United States Patent Application Publication US 2005/0244851 A1 - sequence listing, part 29

SEQ ID NO: 1116133 - DNA, 25 bp, Homo sapien
tgccaaactgattgcagaaatattg

SEQ ID NO: 1116134 - DNA, 25 bp, Homo sapien
cagctaatccaaaaattgccaaact

SEQ ID NO: 1116135 - DNA, 25 bp, Homo sapien
gccaaactgattgcagaaatattgg

SEQ ID NO: 1116136 - DNA, 25 bp, Homo sapien
aatgagtggattattcaaagacagg

SEQ ID NO: 1116137 - DNA, 25 bp, Homo sapien
tgattacagcttatataaacatgaa

SEQ ID NO: 1116138 - DNA, 25 bp, Homo sapien
catttcgggcctagggctaaaatca

SEQ ID NO: 1116139 - DNA, 25 bp, Homo sapien
ggatacattttgatgttagtacacc

SEQ ID NO: 1116140 - DNA, 25 bp, Homo sapien
ctaacgtcgacgatgggccccgcgg

SEQ ID NO: 1116141 - DNA, 25 bp, Homo sapien
cagcgccaaggatgggtcagtcggc

SEQ ID NO: 1116142 - DNA, 25 bp, Homo sapien
gcagccgcagctgtcgtttccgtga

SEQ ID NO: 1116143 - DNA, 25 bp, Homo sapien
tcagtcggctcggagaacggccgct

SEQ ID NO: 1116144 - DNA, 25 bp, Homo sapien
ggcggagccggccgacctagcggcg

SEQ ID NO: 1116145 - DNA, 25 bp, Homo sapien
cggcgaggcggaggtgccgcggccg

SEQ ID NO: 1116146 - DNA, 25 bp, Homo sapien
ccgggcggagccggccgacctagcg

SEQ ID NO: 1116147 - DNA, 25 bp, Homo sapien
agccggccgacctagcggcggcgag

SEQ ID NO: 1116148 - DNA, 25 bp, Homo sapien
tgcacggcgcgactgaggaaggtgc

SEQ ID NO: 1116149 - DNA, 25 bp, Homo sapien
ctgcacggcgcgactgaggaaggtg

SEQ ID NO: 1116150 - DNA, 25 bp, Homo sapien
tcccttaataaacggctcaagccaa

SEQ ID NO: 1116151 - DNA, 25 bp, Homo sapien
gatattaacaaccaccatctctgcg

SEQ ID NO: 1116152 - DNA, 25 bp, Homo sapien
gaaagacttgccctgaccatcctat

SEQ ID NO: 1116153 - DNA, 25 bp, Homo sapien
aaactaggtctgtcacttccttgag

SEQ ID NO: 1116154 - DNA, 25 bp, Homo sapien
tgagactcagggtgattaaacactt

SEQ ID NO: 1116155 - DNA, 25 bp, Homo sapien
ccaaggtgtcattgttgggattcaa

SEQ ID NO: 1116156 - DNA, 25 bp, Homo sapien
gaacccttacacatgagtgagacag

SEQ ID NO: 1116157 - DNA, 25 bp, Homo sapien
tagcagtactgtagggtcacatgac

SEQ ID NO: 1116158 - DNA, 25 bp, Homo sapien
tctaagtgagcatccaattctgtct

SEQ ID NO: 1116159 - DNA, 25 bp, Homo sapien
ttcagctttgctaaggaggttctct

SEQ ID NO: 1116160 - DNA, 25 bp, Homo sapien
tctgtccatattttggtacattcag

SEQ ID NO: 1116161 - DNA, 25 bp, Homo sapien
ttggatttggctgcaataacacttc

SEQ ID NO: 1116162 - DNA, 25 bp, Homo sapien
aggcatagaacaatccaggcttgga

SEQ ID NO: 1116163 - DNA, 25 bp, Homo sapien
gacacaggcgcttaaggcatagaac

SEQ ID NO: 1116164 - DNA, 25 bp, Homo sapien
aaatatagacacaggcgcttaaggc

SEQ ID NO: 1116165 - DNA, 25 bp, Homo sapien
tagaacaatccaggcttggaatagt

SEQ ID NO: 1116166 - DNA, 25 bp, Homo sapien
ctgacagctttagcatgagcatttg

SEQ ID NO: 1116167 - DNA, 25 bp, Homo sapien
atctgacagctttagcatgagcatt

SEQ ID NO: 1116168 - DNA, 25 bp, Homo sapien
tgacagctttagcatgagcatttgc

SEQ ID NO: 1116169 - DNA, 25 bp, Homo sapien
acagctttagcatgagcatttgctc

SEQ ID NO: 1116170 - DNA, 25 bp, Homo sapien
atcatatattgtcccaaaagttctg

SEQ ID NO: 1116171 - DNA, 25 bp, Homo sapien
agttctgggttgtttatacgacttg

SEQ ID NO: 1116172 - DNA, 25 bp, Homo sapien
tatacgacttggagcttttctatcc

SEQ ID NO: 1116173 - DNA, 25 bp, Homo sapien
cagtccctgcatcaatcatatattg

SEQ ID NO: 1116174 - DNA, 25 bp, Homo sapien
aggctgacgtttgaatcagttctct

SEQ ID NO: 1116175 - DNA, 25 bp, Homo sapien
taatctccttctataaagtttctta

SEQ ID NO: 1116176 - DNA, 25 bp, Homo sapien
ggctgacgtttgaatcagttctctg

SEQ ID NO: 1116177 - DNA, 25 bp, Homo sapien
taaaaaatgaagagctacacggtat

SEQ ID NO: 1116178 - DNA, 25 bp, Homo sapien
tctggtgaacatgcactgacctaga

SEQ ID NO: 1116179 - DNA, 25 bp, Homo sapien
catctacacagtcattaagaggcca

SEQ ID NO: 1116180 - DNA, 25 bp, Homo sapien
ggataaaggcatctcaataacactg

SEQ ID NO: 1116181 - DNA, 25 bp, Homo sapien
tgccttttttagtctcgtttttgca

SEQ ID NO: 1116182 - DNA, 25 bp, Homo sapien
tttttagtctcgtttttgcagcatc

SEQ ID NO: 1116183 - DNA, 25 bp, Homo sapien
ttttttagtctcgtttttgcagcat

SEQ ID NO: 1116184 - DNA, 25 bp, Homo sapien
cttttttagtctcgtttttgcagca

SEQ ID NO: 1116185 - DNA, 25 bp, Homo sapien
aatagtctgtatctttcatggttta

SEQ ID NO: 1116186 - DNA, 25 bp, Homo sapien
gactctaaagttaatagtctgtatc

SEQ ID NO: 1116187 - DNA, 25 bp, Homo sapien
gtatctttcatggtttattagcaaa

SEQ ID NO: 1116188 - DNA, 25 bp, Homo sapien
ttagaaagcacaaaaacaagactct

SEQ ID NO: 1116189 - DNA, 25 bp, Homo sapien
tatctccttcaaggcgagctgagtt

SEQ ID NO: 1116190 - DNA, 25 bp, Homo sapien
ggaagttgagcatgtaagagaaatt

SEQ ID NO: 1116191 - DNA, 25 bp, Homo sapien
gaagttgagcatgtaagagaaattt

SEQ ID NO: 1116192 - DNA, 25 bp, Homo sapien
acacagactgtgactggacccatgg

SEQ ID NO: 1116193 - DNA, 25 bp, Homo sapien
cccatgggttgttgcccaatacata

SEQ ID NO: 1116194 - DNA, 25 bp, Homo sapien
tgtgtgtgcaaaccacatctctgca

SEQ ID NO: 1116195 - DNA, 25 bp, Homo sapien
gctaaagagacctgaacatatccct

SEQ ID NO: 1116196 - DNA, 25 bp, Homo sapien
cactggcaacaaacctagcagaggg

SEQ ID NO: 1116197 - DNA, 25 bp, Homo sapien
taaggtgaccgggaagattgagact

SEQ ID NO: 1116198 - DNA, 25 bp, Homo sapien
cctttggtggcaatagttaccctag

SEQ ID NO: 1116199 - DNA, 25 bp, Homo sapien
gacctctagcttggacttacggaaa

SEQ ID NO: 1116200 - DNA, 25 bp, Homo sapien
tgaaaagaatctgttacgctaaagc

SEQ ID NO: 1116201 - DNA, 25 bp, Homo sapien
tcaccttgcgtttagttgccaaaca

SEQ ID NO: 1116202 - DNA, 25 bp, Homo sapien
caagttataatctggcaattccgca

SEQ ID NO: 1116203 - DNA, 25 bp, Homo sapien
gctttgtatctaaaatggtcccctg

SEQ ID NO: 1116204 - DNA, 25 bp, Homo sapien
ctctagcagaagtctggtaatctct

SEQ ID NO: 1116205 - DNA, 25 bp, Homo sapien
gtaatctctgcttgacgatcaaatt

SEQ ID NO: 1116206 - DNA, 25 bp, Homo sapien
tgtgtactgctgattccctctagca

SEQ ID NO: 1116207 - DNA, 25 bp, Homo sapien
ctgcttgacgatcaaattcactttg

SEQ ID NO: 1116208 - DNA, 25 bp, Homo sapien
ttgtttctggaggtccaacatatac

SEQ ID NO: 1116209 - DNA, 25 bp, Homo sapien
ctgtgcatagtaagtcatctgggct

SEQ ID NO: 1116210 - DNA, 25 bp, Homo sapien
catatactggtaacactgtgcatag

SEQ ID NO: 1116211 - DNA, 25 bp, Homo sapien
cattcagacagcgaaggtgatgggc

SEQ ID NO: 1116212 - DNA, 25 bp, Homo sapien
gaaaagaaagcagcgaattatttat

SEQ ID NO: 1116213 - DNA, 25 bp, Homo sapien
ttgaaaagaaagcagcgaattattt

SEQ ID NO: 1116214 - DNA, 25 bp, Homo sapien
tgttgaaaagaaagcagcgaattat

SEQ ID NO: 1116215 - DNA, 25 bp, Homo sapien
ctgttgaaaagaaagcagcgaatta

SEQ ID NO: 1116216 - DNA, 25 bp, Homo sapien
tacaggtgtcacagaagtctgattg

SEQ ID NO: 1116217 - DNA, 25 bp, Homo sapien
tcatctgccagaagtgataattcag

SEQ ID NO: 1116218 - DNA, 25 bp, Homo sapien
ccatggcagaagaaccaatcgcatt

SEQ ID NO: 1116219 - DNA, 25 bp, Homo sapien
tactaggccacttgttgaagccatg

SEQ ID NO: 1116220 - DNA, 25 bp, Homo sapien
catgtctggcctagataaaggatct

SEQ ID NO: 1116221 - DNA, 25 bp, Homo sapien
taactatctgtaatctatgaaacca

SEQ ID NO: 1116222 - DNA, 25 bp, Homo sapien
ggagggagttttatacatcttcaag

SEQ ID NO: 1116223 - DNA, 25 bp, Homo sapien
gccttgacctttcgtgttcaaacga

SEQ ID NO: 1116224 - DNA, 25 bp, Homo sapien
cccattagccagtctgaatccattc

SEQ ID NO: 1116225 - DNA, 25 bp, Homo sapien
aggtaattggcaccttgcccttctg

SEQ ID NO: 1116226 - DNA, 25 bp, Homo sapien
ccccattagccagtctgaatccatt

SEQ ID NO: 1116227 - DNA, 25 bp, Homo sapien
taagtaggtaattggcaccttgccc

SEQ ID NO: 1116228 - DNA, 25 bp, Homo sapien
atataaatacaaagtcatgatgggc

SEQ ID NO: 1116229 - DNA, 25 bp, Homo sapien
atgatgggcaacctttccatagtcc

SEQ ID NO: 1116230 - DNA, 25 bp, Homo sapien
agtcatgatgggcaacctttccata

SEQ ID NO: 1116231 - DNA, 25 bp, Homo sapien
atacttaacctgctttatttagagt

SEQ ID NO: 1116232 - DNA, 25 bp, Homo sapien
gctggtattttcagtctcttaacac

SEQ ID NO: 1116233 - DNA, 25 bp, Homo sapien
ctgatggctggtattttcagtctct

SEQ ID NO: 1116234 - DNA, 25 bp, Homo sapien
gatggctggtattttcagtctctta

SEQ ID NO: 1116235 - DNA, 25 bp, Homo sapien
ggtattttcagtctcttaacacatt

SEQ ID NO: 1116236 - DNA, 25 bp, Homo sapien
agaaaaagcttgctgttaatgaaaa

SEQ ID NO: 1116237 - DNA, 25 bp, Homo sapien
gttctgctttaagttgaggctcaaa

SEQ ID NO: 1116238 - DNA, 25 bp, Homo sapien
gaaaaagcttgctgttaatgaaaaa

SEQ ID NO: 1116239 - DNA, 25 bp, Homo sapien
cagttctgctttaagttgaggctca

SEQ ID NO: 1116240 - DNA, 25 bp, Homo sapien
tatttatacctaataaatgagtcgc

SEQ ID NO: 1116241 - DNA, 25 bp, Homo sapien
ttatacctaataaatgagtcgctga

SEQ ID NO: 1116242 - DNA, 25 bp, Homo sapien
ttatttatacctaataaatgagtcg

SEQ ID NO: 1116243 - DNA, 25 bp, Homo sapien
tttatacctaataaatgagtcgctg

SEQ ID NO: 1116244 - DNA, 25 bp, Homo sapien
taaatggatccaatcccaattatgc

SEQ ID NO: 1116245 - DNA, 25 bp, Homo sapien
tgttttaatagtaagctcagagtga

SEQ ID NO: 1116246 - DNA, 25 bp, Homo sapien
ctgttggaaaaccaggtaaacatag

SEQ ID NO: 1116247 - DNA, 25 bp, Homo sapien
ctacagctctttttaagaccgaaag

SEQ ID NO: 1116248 - DNA, 25 bp, Homo sapien
ggacagtatccccagttgaccagca

SEQ ID NO: 1116249 - DNA, 25 bp, Homo sapien
aacaatgatttatagcaatggcccc

SEQ ID NO: 1116250 - DNA, 25 bp, Homo sapien
gagatcctcatcaagatagcctgtg

SEQ ID NO: 1116251 - DNA, 25 bp, Homo sapien
ttaatggtctttaagctctgcaggg

SEQ ID NO: 1116252 - DNA, 25 bp, Homo sapien
gaagtttcccctacatggacagggc

SEQ ID NO: 1116253 - DNA, 25 bp, Homo sapien
gatttatttcccatgtgacgcagag

SEQ ID NO: 1116254 - DNA, 25 bp, Homo sapien
gaagatgactctaccccactggtga

SEQ ID NO: 1116255 - DNA, 25 bp, Homo sapien
tttcagattaagctcagtggcacag

SEQ ID NO: 1116256 - DNA, 25 bp, Homo sapien
aagcactttattaatgaaagttgga

SEQ ID NO: 1116257 - DNA, 25 bp, Homo sapien
taaagcactttattaatgaaagttg

SEQ ID NO: 1116258 - DNA, 25 bp, Homo sapien
gcactttattaatgaaagttggaaa

SEQ ID NO: 1116259 - DNA, 25 bp, Homo sapien
ctttaaagcactttattaatgaaag

SEQ ID NO: 1116260 - DNA, 25 bp, Homo sapien
gctcgtcagataaacctgtgaggcg

SEQ ID NO: 1116261 - DNA, 25 bp, Homo sapien
tgtgctcgtcagataaacctgtgag

SEQ ID NO: 1116262 - DNA, 25 bp, Homo sapien
cagataaacctgtgaggcgaaaaga

SEQ ID NO: 1116263 - DNA, 25 bp, Homo sapien
tgcttgtgctcgtcagataaacctg

SEQ ID NO: 1116264 - DNA, 25 bp, Homo sapien
accctctgcgtttttaaacatgtgc

SEQ ID NO: 1116265 - DNA, 25 bp, Homo sapien
cttaagttcagtattaccctctgcg

SEQ ID NO: 1116266 - DNA, 25 bp, Homo sapien
tcagtattaccctctgcgtttttaa

SEQ ID NO: 1116267 - DNA, 25 bp, Homo sapien
attaccctctgcgtttttaaacatg

SEQ ID NO: 1116268 - DNA, 25 bp, Homo sapien
tgagatgtattatgagggtggaaac

SEQ ID NO: 1116269 - DNA, 25 bp, Homo sapien
gagatgtattatgagggtggaaaca

SEQ ID NO: 1116270 - DNA, 25 bp, Homo sapien
tccctcagctgtttgaacagttgcc

SEQ ID NO: 1116271 - DNA, 25 bp, Homo sapien
ctggcgccactctccaccctaaagc

SEQ ID NO: 1116272 - DNA, 25 bp, Homo sapien
cctcagctgtttgaacagttgccat

SEQ ID NO: 1116273 - DNA, 25 bp, Homo sapien
gcttccctcagctgtttgaacagtt

SEQ ID NO: 1116274 - DNA, 25 bp, Homo sapien
cagcagaagggagcattctctcttt

SEQ ID NO: 1116275 - DNA, 25 bp, Homo sapien
gcccttgatctctttgaaagccagc

SEQ ID NO: 1116276 - DNA, 25 bp, Homo sapien
tatctctagttggattccaggagga

SEQ ID NO: 1116277 - DNA, 25 bp, Homo sapien
tttatctctagttggattccaggag

SEQ ID NO: 1116278 - DNA, 25 bp, Homo sapien
tgcatccctcgatgtgccaggaaac

SEQ ID NO: 1116279 - DNA, 25 bp, Homo sapien
caccgctgaaagatgtattaaaggc

SEQ ID NO: 1116280 - DNA, 25 bp, Homo sapien
tcaatggcactagaacagaggaagg

SEQ ID NO: 1116281 - DNA, 25 bp, Homo sapien
ccatttgtaactctttgcatccctc

SEQ ID NO: 1116282 - DNA, 25 bp, Homo sapien
tgggccgtcagaggttctgttgcct

SEQ ID NO: 1116283 - DNA, 25 bp, Homo sapien
tcctctttccgccatgatgtccagg

SEQ ID NO: 1116284 - DNA, 25 bp, Homo sapien
aactcaatgagccagccggcctttg

SEQ ID NO: 1116285 - DNA, 25 bp, Homo sapien
caggaaccctttaattcaaagatgg

SEQ ID NO: 1116286 - DNA, 25 bp, Homo sapien
tggtctgactgtagatatgatgacg

SEQ ID NO: 1116287 - DNA, 25 bp, Homo sapien
tgactgtagatatgatgacgccact

SEQ ID NO: 1116288 - DNA, 25 bp, Homo sapien
tgtagatatgatgacgccactccat

SEQ ID NO: 1116289 - DNA, 25 bp, Homo sapien
catttttcaatggctcagtggtctg

SEQ ID NO: 1116290 - DNA, 25 bp, Homo sapien
caggtagaagttgctgtatgtgtct

SEQ ID NO: 1116291 - DNA, 25 bp, Homo sapien
agttgctgtatgtgtctgaagctca

SEQ ID NO: 1116292 - DNA, 25 bp, Homo sapien
tcaggtagaagttgctgtatgtgtc

SEQ ID NO: 1116293 - DNA, 25 bp, Homo sapien
gtagaagttgctgtatgtgtctgaa

SEQ ID NO: 1116294 - DNA, 25 bp, Homo sapien
tactgagcctcaacagattgcctgc

SEQ ID NO: 1116295 - DNA, 25 bp, Homo sapien
tcctgagtgaaaagttggaacgcat

SEQ ID NO: 1116296 - DNA, 25 bp, Homo sapien
aaaatgctttgtaacagacttgcgg

SEQ ID NO: 1116297 - DNA, 25 bp, Homo sapien
catgatatctaaggagttggcaagc

SEQ ID NO: 1116298 - DNA, 25 bp, Homo sapien
tcctcaccctctaaggctcaagcaa

SEQ ID NO: 1116299 - DNA, 25 bp, Homo sapien
tcccaagattctgagaccacaggta

SEQ ID NO: 1116300 - DNA, 25 bp, Homo sapien
ccaaagaacggggatttacaggcat

SEQ ID NO: 1116301 - DNA, 25 bp, Homo sapien
tcttgtattcctgggctcgggcgat

SEQ ID NO: 1116302 - DNA, 25 bp, Homo sapien
taagcagactgtagatgtattgaca

SEQ ID NO: 1116303 - DNA, 25 bp, Homo sapien
tgtagcttatcgaatgccatgtgta

SEQ ID NO: 1116304 - DNA, 25 bp, Homo sapien
tggatctacgtttagcagagagaga

SEQ ID NO: 1116305 - DNA, 25 bp, Homo sapien
taaaatgtgatttgctgctacaagg

SEQ ID NO: 1116306 - DNA, 25 bp, Homo sapien
gaatgacttgctaagtcctaaggga

SEQ ID NO: 1116307 - DNA, 25 bp, Homo sapien
atagcaaaacttagctcttctaggg

SEQ ID NO: 1116308 - DNA, 25 bp, Homo sapien
ttctgagcagtgtgtatagcaaaac

SEQ ID NO: 1116309 - DNA, 25 bp, Homo sapien
taaagttagctctaaatcccttgac

SEQ ID NO: 1116310 - DNA, 25 bp, Homo sapien
tcactgcaaccttcggctcactgca

SEQ ID NO: 1116311 - DNA, 25 bp, Homo sapien
tctgcctcagccccacgagtagctg

SEQ ID NO: 1116312 - DNA, 25 bp, Homo sapien
ttctgcctcagccccacgagtagct

SEQ ID NO: 1116313 - DNA, 25 bp, Homo sapien
gaaatttcccctacctgacgctatg

SEQ ID NO: 1116314 - DNA, 25 bp, Homo sapien
gaagatcagtcagttgcagtcaatc

SEQ ID NO: 1116315 - DNA, 25 bp, Homo sapien
gactagtttttgcactgccatggct

SEQ ID NO: 1116316 - DNA, 25 bp, Homo sapien
ggtgggccaaattcagtcaacccag

SEQ ID NO: 1116317 - DNA, 25 bp, Homo sapien
tcaaataaaactactgggtgatcag

SEQ ID NO: 1116318 - DNA, 25 bp, Homo sapien
aaaactactgggtgatcagccacag

SEQ ID NO: 1116319 - DNA, 25 bp, Homo sapien
tactgggtgatcagccacagccaca

SEQ ID NO: 1116320 - DNA, 25 bp, Homo sapien
aactactgggtgatcagccacagcc

SEQ ID NO: 1116321 - DNA, 25 bp, Homo sapien
cagctgagaaagacgcaacattcgg

SEQ ID NO: 1116322 - DNA, 25 bp, Homo sapien
gattgtcttgggtacgtagcttctc

SEQ ID NO: 1116323 - DNA, 25 bp, Homo sapien
gtgtagatcaccttcgcagctgcca

SEQ ID NO: 1116324 - DNA, 25 bp, Homo sapien
aatgcaacgtggcttaatttctcgg

SEQ ID NO: 1116325 - DNA, 25 bp, Homo sapien
ggcgctatcaccaacgccgctggtg

SEQ ID NO: 1116326 - DNA, 25 bp, Homo sapien
ttctcctcagccgactaaacggccg

SEQ ID NO: 1116327 - DNA, 25 bp, Homo sapien
gagagagcgacagcgagagaaccac

SEQ ID NO: 1116328 - DNA, 25 bp, Homo sapien
gcgcagcaaacagcgcgaagcggct

SEQ ID NO: 1116329 - DNA, 25 bp, Homo sapien
cagtttctggatctggttttccaag

SEQ ID NO: 1116330 - DNA, 25 bp, Homo sapien
aagagcatcgccaccgcgaaggcca

SEQ ID NO: 1116331 - DNA, 25 bp, Homo sapien
tttccaagaagagcatcgccaccgc

SEQ ID NO: 1116332 - DNA, 25 bp, Homo sapien
tcgagcgggactcctccagtttctg

SEQ ID NO: 1116333 - DNA, 25 bp, Homo sapien
tcaacccattcttggagctcgtgct

SEQ ID NO: 1116334 - DNA, 25 bp, Homo sapien
cagaccccaggttagatgaacgccc

SEQ ID NO: 1116335 - DNA, 25 bp, Homo sapien
cagcacgccgctcaagcttaattca

SEQ ID NO: 1116336 - DNA, 25 bp, Homo sapien
ggttctctttgaaaccgctttcagc

SEQ ID NO: 1116337 - DNA, 25 bp, Homo sapien
gctaccctttggctagggaagccca

SEQ ID NO: 1116338 - DNA, 25 bp, Homo sapien
tcagctggcaattacaaggtccttt

SEQ ID NO: 1116339 - DNA, 25 bp, Homo sapien
ggaccctcatttccgtactccgatg

SEQ ID NO: 1116340 - DNA, 25 bp, Homo sapien
tccctcagctggcaattacaaggtc

SEQ ID NO: 1116341 - DNA, 25 bp, Homo sapien
tgaagctttgcactcgcgttcccgc

SEQ ID NO: 1116342 - DNA, 25 bp, Homo sapien
gctaaaaagcactcatgaaggtcac

SEQ ID NO: 1116343 - DNA, 25 bp, Homo sapien
gtctgaaaagacaacgcgggcatca

SEQ ID NO: 1116344 - DNA, 25 bp, Homo sapien
gagacaaaagcagttacacgagagg

SEQ ID NO: 1116345 - DNA, 25 bp, Homo sapien
gcctcggaacctacttatgaaggag

SEQ ID NO: 1116346 - DNA, 25 bp, Homo sapien
tacgggtatcacaaaccccagcaag

SEQ ID NO: 1116347 - DNA, 25 bp, Homo sapien
caaacagctggagccagtatccata

SEQ ID NO: 1116348 - DNA, 25 bp, Homo sapien
tcttagacccaatagagaattgagg

SEQ ID NO: 1116349 - DNA, 25 bp, Homo sapien
tgctggaggttcaacgtggactagc

SEQ ID NO: 1116350 - DNA, 25 bp, Homo sapien
tagcctagccaatgcaatgacatgt

SEQ ID NO: 1116351 - DNA, 25 bp, Homo sapien
tataatttggaaatctagcctagcc

SEQ ID NO: 1116352 - DNA, 25 bp, Homo sapien
tactatctgcgcaactttcatgtga

SEQ ID NO: 1116353 - DNA, 25 bp, Homo sapien
cagttccatggaataaacgtatgct

SEQ ID NO: 1116354 - DNA, 25 bp, Homo sapien
ctgtaccaagcctatttcagttttg

SEQ ID NO: 1116355 - DNA, 25 bp, Homo sapien
actgtaccaagcctatttcagtttt

SEQ ID NO: 1116356 - DNA, 25 bp, Homo sapien
ccactgtaccaagcctatttcagtt

SEQ ID NO: 1116357 - DNA, 25 bp, Homo sapien
gccactgtaccaagcctatttcagt

SEQ ID NO: 1116358 - DNA, 25 bp, Homo sapien
ttgcaatcatgtagccggaaagagg

SEQ ID NO: 1116359 - DNA, 25 bp, Homo sapien
tattgcaatcatgtagccggaaaga

SEQ ID NO: 1116360 - DNA, 25 bp, Homo sapien
ttctattgcaatcatgtagccggaa

SEQ ID NO: 1116361 - DNA, 25 bp, Homo sapien
tgcaatcatgtagccggaaagaggg

SEQ ID NO: 1116362 - DNA, 25 bp, Homo sapien
tcaaagaaattacacatgtgtgcat

SEQ ID NO: 1116363 - DNA, 25 bp, Homo sapien
ccaaaaaattgttgctgaagtcctt

SEQ ID NO: 1116364 - DNA, 25 bp, Homo sapien
aagcagcagatccaccccagtaaat

SEQ ID NO: 1116365 - DNA, 25 bp, Homo sapien
ccacccatgcacgtataatttattg

SEQ ID NO: 1116366 - DNA, 25 bp, Homo sapien
gatcacgttgggaagaacttgacat

SEQ ID NO: 1116367 - DNA, 25 bp, Homo sapien
tatattcgtggtctacctatgcgct

SEQ ID NO: 1116368 - DNA, 25 bp, Homo sapien
gagtctgcctaagcatgaacatgga

SEQ ID NO: 1116369 - DNA, 25 bp, Homo sapien
tataaatggtattgcaacactgcta

SEQ ID NO: 1116370 - DNA, 25 bp, Homo sapien
ttaacaacgtctttctttcatggag

SEQ ID NO: 1116371 - DNA, 25 bp, Homo sapien
taaaggctacaattcactctgaggt

SEQ ID NO: 1116372 - DNA, 25 bp, Homo sapien
tatatcttctccaaggaggttcaga

SEQ ID NO: 1116373 - DNA, 25 bp, Homo sapien
agttgctacaaacatgtatcggcag

SEQ ID NO: 1116374 - DNA, 25 bp, Homo sapien
tcacaatagtcacattattttagca

SEQ ID NO: 1116375 - DNA, 25 bp, Homo sapien
gctgccaagccaatataatacaaaa

SEQ ID NO: 1116376 - DNA, 25 bp, Homo sapien
aatatgcagtatgccttaaagctgc

SEQ ID NO: 1116377 - DNA, 25 bp, Homo sapien
tagatggtcttccatatgctcagat

SEQ ID NO: 1116378 - DNA, 25 bp, Homo sapien
tataccgtattgttgtgctaagatg

SEQ ID NO: 1116379 - DNA, 25 bp, Homo sapien
ggtggtctcagatgcagacgagtaa

SEQ ID NO: 1116380 - DNA, 25 bp, Homo sapien
tctccagagctccttcttgaagcat

SEQ ID NO: 1116381 - DNA, 25 bp, Homo sapien
tggatcataagggtggtttacccca

SEQ ID NO: 1116382 - DNA, 25 bp, Homo sapien
gataaacagcatgtacaggaaagac

SEQ ID NO: 1116383 - DNA, 25 bp, Homo sapien
cagtcataagactcttctgtgagag

SEQ ID NO: 1116384 - DNA, 25 bp, Homo sapien
gcatactgaatacttcgagatgaat

SEQ ID NO: 1116385 - DNA, 25 bp, Homo sapien
ccctgatgccagtcataagactctt

SEQ ID NO: 1116386 - DNA, 25 bp, Homo sapien
tgagcccggaaactcaaggttgtag

SEQ ID NO: 1116387 - DNA, 25 bp, Homo sapien
cacttaataataccagccgactgtt

SEQ ID NO: 1116388 - DNA, 25 bp, Homo sapien
tatcatcggtggtatgaaataacac

SEQ ID NO: 1116389 - DNA, 25 bp, Homo sapien
aattctgggtcaaaacagtatacct

SEQ ID NO: 1116390 - DNA, 25 bp, Homo sapien
cttcactgggaactgtataactacc

SEQ ID NO: 1116391 - DNA, 25 bp, Homo sapien
taatttacctaatgcctgcactcag

SEQ ID NO: 1116392 - DNA, 25 bp, Homo sapien
tcagaacccatgaacgtatctcagt

SEQ ID NO: 1116393 - DNA, 25 bp, Homo sapien
ttaccaaggttgcatgctaaagcat

SEQ ID NO: 1116394 - DNA, 25 bp, Homo sapien
gaagaccctagttttatgttgccat

SEQ ID NO: 1116395 - DNA, 25 bp, Homo sapien
agctgcacagtgcttaaaaagtgac

SEQ ID NO: 1116396 - DNA, 25 bp, Homo sapien
aatgggtccccttacaattcaggat

SEQ ID NO: 1116397 - DNA, 25 bp, Homo sapien
taccaaatagggtgtggaagcctct

SEQ ID NO: 1116398 - DNA, 25 bp, Homo sapien
gaactggtagagctgtaatgtccaa

SEQ ID NO: 1116399 - DNA, 25 bp, Homo sapien
aactcaatggctatacttatggacc

SEQ ID NO: 1116400 - DNA, 25 bp, Homo sapien
gtcaactagaaagctaagaactggt

SEQ ID NO: 1116401 - DNA, 25 bp, Homo sapien
ccaaaaatgtcggtactgttactgc

SEQ ID NO: 1116402 - DNA, 25 bp, Homo sapien
aaactgttgaggttgctgacatcaa

SEQ ID NO: 1116403 - DNA, 25 bp, Homo sapien
gacattcgtaacacttggtcacacc

SEQ ID NO: 1116404 - DNA, 25 bp, Homo sapien
aaattgtacagtcaggagaggttct

SEQ ID NO: 1116405 - DNA, 25 bp, Homo sapien
ctgggttggcttaggatgacattcg

SEQ ID NO: 1116406 - DNA, 25 bp, Homo sapien
attaacacggttttgggcagctctg

SEQ ID NO: 1116407 - DNA, 25 bp, Homo sapien
gtctttcaggcctaactggggttca

SEQ ID NO: 1116408 - DNA, 25 bp, Homo sapien
cagatacctgatgtcatctttaaaa

SEQ ID NO: 1116409 - DNA, 25 bp, Homo sapien
tctgttgatctgatgcattcgtttc

SEQ ID NO: 1116410 - DNA, 25 bp, Homo sapien
gactttgtacttcagcccagtccaa

SEQ ID NO: 1116411 - DNA, 25 bp, Homo sapien
ttaatccttggtgggcagttgcttc

SEQ ID NO: 1116412 - DNA, 25 bp, Homo sapien
gagaaatttaatccttggtgggcag

SEQ ID NO: 1116413 - DNA, 25 bp, Homo sapien
gtgagaaatttaatccttggtgggc

SEQ ID NO: 1116414 - DNA, 25 bp, Homo sapien
aatttaatccttggtgggcagttgc

SEQ ID NO: 1116415 - DNA, 25 bp, Homo sapien
catcttttgggaatgaaactcccag

SEQ ID NO: 1116416 - DNA, 25 bp, Homo sapien
tcttttgggaatgaaactcccagag

SEQ ID NO: 1116417 - DNA, 25 bp, Homo sapien
ctgcatccatcttttgggaatgaaa

SEQ ID NO: 1116418 - DNA, 25 bp, Homo sapien
tttgggaatgaaactcccagagcat

SEQ ID NO: 1116419 - DNA, 25 bp, Homo sapien
tgtatgtcgctgctcaatttctcgg

SEQ ID NO: 1116420 - DNA, 25 bp, Homo sapien
gacttcgtgtcttgcaatagccctt

SEQ ID NO: 1116421 - DNA, 25 bp, Homo sapien
cacacaggtcataggcgatattggt

SEQ ID NO: 1116422 - DNA, 25 bp, Homo sapien
gcttgccgttttgggaactctgtta

SEQ ID NO: 1116423 - DNA, 25 bp, Homo sapien
ctgttctgatcatcattatttcttc

SEQ ID NO: 1116424 - DNA, 25 bp, Homo sapien
gaaacgtgtccatgataaaatcctg

SEQ ID NO: 1116425 - DNA, 25 bp, Homo sapien
tctctttccaggaagttatattctt

SEQ ID NO: 1116426 - DNA, 25 bp, Homo sapien
catgataaaatcctggtttcatctc

SEQ ID NO: 1116427 - DNA, 25 bp, Homo sapien
aatccaagtaagaaacgtgtccatg

SEQ ID NO: 1116428 - DNA, 25 bp, Homo sapien
taataataagaaactagcctctcaa

SEQ ID NO: 1116429 - DNA, 25 bp, Homo sapien
tgtctccttgttttcgtctccgtaa

SEQ ID NO: 1116430 - DNA, 25 bp, Homo sapien
tcgtctccgtaaccctggtctataa

SEQ ID NO: 1116431 - DNA, 25 bp, Homo sapien
gcctctcaataggatcccttatgac

SEQ ID NO: 1116432 - DNA, 25 bp, Homo sapien
tgaagccagagcttctctggagcac

SEQ ID NO: 1116433 - DNA, 25 bp, Homo sapien
agccaccttctgctacacattcatc

SEQ ID NO: 1116434 - DNA, 25 bp, Homo sapien
cagcattcggagctatggccacaga

SEQ ID NO: 1116435 - DNA, 25 bp, Homo sapien
cagaagaacgggatttgaagccaga

SEQ ID NO: 1116436 - DNA, 25 bp, Homo sapien
taaggatgataatcaatctgagcca

SEQ ID NO: 1116437 - DNA, 25 bp, Homo sapien
tagtctagtctttcaccgatttccc

SEQ ID NO: 1116438 - DNA, 25 bp, Homo sapien
ttaggatatcactctacatgaggaa

SEQ ID NO: 1116439 - DNA, 25 bp, Homo sapien
tatatctagcccttgtgaaatgaaa

SEQ ID NO: 1116440 - DNA, 25 bp, Homo sapien
aattaggttatacttggcttgatcc

SEQ ID NO: 1116441 - DNA, 25 bp, Homo sapien
ggcaatgctgcctccaataacatga

SEQ ID NO: 1116442 - DNA, 25 bp, Homo sapien
ggcttgatccatagcccacctgctt

SEQ ID NO: 1116443 - DNA, 25 bp, Homo sapien
tgtgcgatagagttcagtagcaccc

SEQ ID NO: 1116444 - DNA, 25 bp, Homo sapien
cgacttagggtaaatcttttcatag

SEQ ID NO: 1116445 - DNA, 25 bp, Homo sapien
gcatgggctctgatgaattggaact

SEQ ID NO: 1116446 - DNA, 25 bp, Homo sapien
tgtgcgaggatgtagaggtctccat

SEQ ID NO: 1116447 - DNA, 25 bp, Homo sapien
tctttttctcgaacggcatgggctc

SEQ ID NO: 1116448 - DNA, 25 bp, Homo sapien
tatgggcaaatccaactacagcaga

SEQ ID NO: 1116449 - DNA, 25 bp, Homo sapien
tggagtcataatacggagtcaccga

SEQ ID NO: 1116450 - DNA, 25 bp, Homo sapien
cactgatggcaccaacgatttgagg

SEQ ID NO: 1116451 - DNA, 25 bp, Homo sapien
ggtgtataacccaaaccctcagtga

SEQ ID NO: 1116452 - DNA, 25 bp, Homo sapien
taaaggagaagcacctgggcctctt

SEQ ID NO: 1116453 - DNA, 25 bp, Homo sapien
catcttccaacaggactatgaggga

SEQ ID NO: 1116454 - DNA, 25 bp, Homo sapien
tcaacacaggcttaacagtaatgcg

SEQ ID NO: 1116455 - DNA, 25 bp, Homo sapien
cagcaactttgcatagggtaaacgg

SEQ ID NO: 1116456 - DNA, 25 bp, Homo sapien
ggtgagaacggcacatcagcttggt

SEQ ID NO: 1116457 - DNA, 25 bp, Homo sapien
cactgagtcagcttggaaaatgtcc

SEQ ID NO: 1116458 - DNA, 25 bp, Homo sapien
tgctacaggtacataagtgaggcgg

SEQ ID NO: 1116459 - DNA, 25 bp, Homo sapien
cagaggcatgtcagtccagataaaa

SEQ ID NO: 1116460 - DNA, 25 bp, Homo sapien
gatccgtatcaaacattacagactg

SEQ ID NO: 1116461 - DNA, 25 bp, Homo sapien
tagaaaatgaatagggctggctccc

SEQ ID NO: 1116462 - DNA, 25 bp, Homo sapien
tcttgtccactcagaagatccgtat

SEQ ID NO: 1116463 - DNA, 25 bp, Homo sapien
taatgtggaactactgtggatcttg

SEQ ID NO: 1116464 - DNA, 25 bp, Homo sapien
gcattgtttgccttactccagaaga

SEQ ID NO: 1116465 - DNA, 25 bp, Homo sapien
tagtagccacgctgaggtttagccc

SEQ ID NO: 1116466 - DNA, 25 bp, Homo sapien
tatgaccaaagaacactgggaccag

SEQ ID NO: 1116467 - DNA, 25 bp, Homo sapien
taactttagtcttggtcagaaccac

SEQ ID NO: 1116468 - DNA, 25 bp, Homo sapien
caggagggaacttgtgatagcacca

SEQ ID NO: 1116469 - DNA, 25 bp, Homo sapien
gatataatggcgtccaggtaaccaa

SEQ ID NO: 1116470 - DNA, 25 bp, Homo sapien
ggacatctgctcacgtgactgtggg

SEQ ID NO: 1116471 - DNA, 25 bp, Homo sapien
ccaaacgggatggttcatggaggca

SEQ ID NO: 1116472 - DNA, 25 bp, Homo sapien
tactacccagggtgaggtcattcct

SEQ ID NO: 1116473 - DNA, 25 bp, Homo sapien
ggtagaatatctggttctttcagtt

SEQ ID NO: 1116474 - DNA, 25 bp, Homo sapien
tagatgagcagaagggaagagttac

SEQ ID NO: 1116475 - DNA, 25 bp, Homo sapien
cattcctccatggtggtagaatatc

SEQ ID NO: 1116476 - DNA, 25 bp, Homo sapien
gccgagctgtgcacaggccctttat

SEQ ID NO: 1116477 - DNA, 25 bp, Homo sapien
aggtccacggagcagttcgccgagc

SEQ ID NO: 1116478 - DNA, 25 bp, Homo sapien
gaagctgcctgttgcttatttcctc

SEQ ID NO: 1116479 - DNA, 25 bp, Homo sapien
tccatctgtcaagaaaggaagctgc

SEQ ID NO: 1116480 - DNA, 25 bp, Homo sapien
cctttccaacgtcagtagctggctc

SEQ ID NO: 1116481 - DNA, 25 bp, Homo sapien
tcctttccaacgtcagtagctggct

SEQ ID NO: 1116482 - DNA, 25 bp, Homo sapien
ctttccaacgtcagtagctggctcc

SEQ ID NO: 1116483 - DNA, 25 bp, Homo sapien
ccccgacacctctcatttgccggcc

SEQ ID NO: 1116484 - DNA, 25 bp, Homo sapien
cgacacctctcatttgccggccaca

SEQ ID NO: 1116485 - DNA, 25 bp, Homo sapien
cacctctcatttgccggccacaaac

SEQ ID NO: 1116486 - DNA, 25 bp, Homo sapien
gacacctctcatttgccggccacaa

SEQ ID NO: 1116487 - DNA, 25 bp, Homo sapien
cctatggcgccacctagtgtcggag

SEQ ID NO: 1116488 - DNA, 25 bp, Homo sapien
cagctgtggacgagtgatgcccttc

SEQ ID NO: 1116489 - DNA, 25 bp, Homo sapien
aaccagagaattccacagcaccgtg

SEQ ID NO: 1116490 - DNA, 25 bp, Homo sapien
tgcagacaacgctctggcgagggct

SEQ ID NO: 1116491 - DNA, 25 bp, Homo sapien
tccccggcgaggagccgggcttctg

SEQ ID NO: 1116492 - DNA, 25 bp, Homo sapien
tagaactcgcggcaatggagactcc

SEQ ID NO: 1116493 - DNA, 25 bp, Homo sapien
accgatggggagcaaacagcctggc

SEQ ID NO: 1116494 - DNA, 25 bp, Homo sapien
ggagactcccgacactccatgtggc

SEQ ID NO: 1116495 - DNA, 25 bp, Homo sapien
atgtggcacaagtcccaggtcccgg

SEQ ID NO: 1116496 - DNA, 25 bp, Homo sapien
ccttgtaatgatgccgctccaagca

SEQ ID NO: 1116497 - DNA, 25 bp, Homo sapien
gccgctccaagcaaatgagtcctta

SEQ ID NO: 1116498 - DNA, 25 bp, Homo sapien
caagcaaatgagtccttaataacaa

SEQ ID NO: 1116499 - DNA, 25 bp, Homo sapien
gtaatgatgccgctccaagcaaatg

SEQ ID NO: 1116500 - DNA, 25 bp, Homo sapien
gaaaaatagggagtatatgtagtac

SEQ ID NO: 1116501 - DNA, 25 bp, Homo sapien
atcgcgcctgcagcctttcgaaaat

SEQ ID NO: 1116502 - DNA, 25 bp, Homo sapien
gcctgcagcctttcgaaaatagaaa

SEQ ID NO: 1116503 - DNA, 25 bp, Homo sapien
gcagcctttcgaaaatagaaaaata

SEQ ID NO: 1116504 - DNA, 25 bp, Homo sapien
gtccgctcctcgggctagcactagg

SEQ ID NO: 1116505 - DNA, 25 bp, Homo sapien
gcgacgggtaaatggagatgcagcc

SEQ ID NO: 1116506 - DNA, 25 bp, Homo sapien
ggatgggagaggacgaccatcgact

SEQ ID NO: 1116507 - DNA, 25 bp, Homo sapien
tggatgggcaaaggaaatgggcgac

SEQ ID NO: 1116508 - DNA, 25 bp, Homo sapien
ggagaccccagtggagccaaggagc

SEQ ID NO: 1116509 - DNA, 25 bp, Homo sapien
acggagaccccagtggagccaagga

SEQ ID NO: 1116510 - DNA, 25 bp, Homo sapien
gaacggagaccccagtggagccaag

SEQ ID NO: 1116511 - DNA, 25 bp, Homo sapien
gggaacggagaccccagtggagcca

SEQ ID NO: 1116512 - DNA, 25 bp, Homo sapien
tgggagtgacaagggaccccagatc

SEQ ID NO: 1116513 - DNA, 25 bp, Homo sapien
aagcccctgcgtagtcctggacaaa

SEQ ID NO: 1116514 - DNA, 25 bp, Homo sapien
agatccggcctaaaccagcgccctg

SEQ ID NO: 1116515 - DNA, 25 bp, Homo sapien
taaaccagcgccctggggtcaagcc

SEQ ID NO: 1116516 - DNA, 25 bp, Homo sapien
cggttctccagaattcggaagtgga

SEQ ID NO: 1116517 - DNA, 25 bp, Homo sapien
tgaagcgtgctttcggcacgaagga

SEQ ID NO: 1116518 - DNA, 25 bp, Homo sapien
gaacgcgcagggcttgattcccggt

SEQ ID NO: 1116519 - DNA, 25 bp, Homo sapien
ctggcagacatgaagcgtgctttcg

SEQ ID NO: 1116520 - DNA, 25 bp, Homo sapien
aagaaactccttgttctccgctcac

SEQ ID NO: 1116521 - DNA, 25 bp, Homo sapien
aaagaaactccttgttctccgctca

SEQ ID NO: 1116522 - DNA, 25 bp, Homo sapien
tgtattcccacttgacagaacagga

SEQ ID NO: 1116523 - DNA, 25 bp, Homo sapien
caatttggtgaagggctagcacgga

SEQ ID NO: 1116524 - DNA, 25 bp, Homo sapien
cacttgccaggaggacactgtagat

SEQ ID NO: 1116525 - DNA, 25 bp, Homo sapien
ctagcacggaagtttagactggacc

SEQ ID NO: 1116526 - DNA, 25 bp, Homo sapien
ctcctcctttctgtcttggagagaa

SEQ ID NO: 1116527 - DNA, 25 bp, Homo sapien
cctcctttctgtcttggagagaaga

SEQ ID NO: 1116528 - DNA, 25 bp, Homo sapien
ctctcctcctttctgtcttggagag

SEQ ID NO: 1116529 - DNA, 25 bp, Homo sapien
taccctctcctcctttctgtcttgg

SEQ ID NO: 1116530 - DNA, 25 bp, Homo sapien
tgccccagtgttacaccgtttatcc

SEQ ID NO: 1116531 - DNA, 25 bp, Homo sapien
cagtgttacaccgtttatccccagc

SEQ ID NO: 1116532 - DNA, 25 bp, Homo sapien
gttacaccgtttatccccagcggca

SEQ ID NO: 1116533 - DNA, 25 bp, Homo sapien
ctgccccagtgttacaccgtttatc

SEQ ID NO: 1116534 - DNA, 25 bp, Homo sapien
gggcctgtgtaagagtcccatcgta

SEQ ID NO: 1116535 - DNA, 25 bp, Homo sapien
ctgtgtaagagtcccatcgtaccaa

SEQ ID NO: 1116536 - DNA, 25 bp, Homo sapien
gaaggggcctgtgtaagagtcccat

SEQ ID NO: 1116537 - DNA, 25 bp, Homo sapien
taagagtcccatcgtaccaacaagg

SEQ ID NO: 1116538 - DNA, 25 bp, Homo sapien
acttgctgccacatataggtccatg

SEQ ID NO: 1116539 - DNA, 25 bp, Homo sapien
actttcaccaaaagcgatgagatgg

SEQ ID NO: 1116540 - DNA, 25 bp, Homo sapien
gccacatataggtccatgccgatga

SEQ ID NO: 1116541 - DNA, 25 bp, Homo sapien
ccatgccgatgagatggtgtagcag

SEQ ID NO: 1116542 - DNA, 25 bp, Homo sapien
gccaaccccgtgatattaatgagat

SEQ ID NO: 1116543 - DNA, 25 bp, Homo sapien
ggatagtcattctctaaaccaggaa

SEQ ID NO: 1116544 - DNA, 25 bp, Homo sapien
taatgagataaacatgttgggaggg

SEQ ID NO: 1116545 - DNA, 25 bp, Homo sapien
ttttagcagcaggaggtattgatag

SEQ ID NO: 1116546 - DNA, 25 bp, Homo sapien
cttttggtgtcccagttcctcgtct

SEQ ID NO: 1116547 - DNA, 25 bp, Homo sapien
gaacagggtgcaagcgtggccagag

SEQ ID NO: 1116548 - DNA, 25 bp, Homo sapien
tgtcccagttcctcgtctacagtga

SEQ ID NO: 1116549 - DNA, 25 bp, Homo sapien
gacactggaccaggattgggaacag

SEQ ID NO: 1116550 - DNA, 25 bp, Homo sapien
tcacagtccgagctggaagaagggt

SEQ ID NO: 1116551 - DNA, 25 bp, Homo sapien
gctggtgaggtctctagagctcctt

SEQ ID NO: 1116552 - DNA, 25 bp, Homo sapien
ccttacggctgcagtggagttcaca

SEQ ID NO: 1116553 - DNA, 25 bp, Homo sapien
gtcatctcgggctcactgtcacaga

SEQ ID NO: 1116554 - DNA, 25 bp, Homo sapien
tgggccgtcttctcaaaataattaa

SEQ ID NO: 1116555 - DNA, 25 bp, Homo sapien
taaactgagtcattcgcacaaggga

SEQ ID NO: 1116556 - DNA, 25 bp, Homo sapien
gctgtatcagtcacattcatggtgc

SEQ ID NO: 1116557 - DNA, 25 bp, Homo sapien
gaaatactgtttaaggctgctggca

SEQ ID NO: 1116558 - DNA, 25 bp, Homo sapien
cagagtcattgagagatcaccaaca

SEQ ID NO: 1116559 - DNA, 25 bp, Homo sapien
accccgagcgatggagtaacttgca

SEQ ID NO: 1116560 - DNA, 25 bp, Homo sapien
taacagttggaactagccctgtggg

SEQ ID NO: 1116561 - DNA, 25 bp, Homo sapien
tgtgggtcctatggtgacaagcacc

SEQ ID NO: 1116562 - DNA, 25 bp, Homo sapien
ggcacatgcggaggcacttgccgct

SEQ ID NO: 1116563 - DNA, 25 bp, Homo sapien
agtgcaaagcggctgccagcatacc

SEQ ID NO: 1116564 - DNA, 25 bp, Homo sapien
agttttgtgccttcggaggagcgcc

SEQ ID NO: 1116565 - DNA, 25 bp, Homo sapien
gctgccactgcgctatgacaaggag

SEQ ID NO: 1116566 - DNA, 25 bp, Homo sapien
aagagaggaagcctaaccaactgct

SEQ ID NO: 1116567 - DNA, 25 bp, Homo sapien
agaggaagcctaaccaactgctcac

SEQ ID NO: 1116568 - DNA, 25 bp, Homo sapien
aagagacaaagaagtcagtatctgt

SEQ ID NO: 1116569 - DNA, 25 bp, Homo sapien
aaagagacaaagaagtcagtatctg

SEQ ID NO: 1116570 - DNA, 25 bp, Homo sapien
aataatcaatggaaaatacccatcc

SEQ ID NO: 1116571 - DNA, 25 bp, Homo sapien
taaagtaataatcaatggaaaatac

SEQ ID NO: 1116572 - DNA, 25 bp, Homo sapien
taatcaatggaaaatacccatccct

SEQ ID NO: 1116573 - DNA, 25 bp, Homo sapien
agtaataatcaatggaaaataccca

SEQ ID NO: 1116574 - DNA, 25 bp, Homo sapien
tggaagaatagctcccctctacaag

SEQ ID NO: 1116575 - DNA, 25 bp, Homo sapien
tcatactacctctggctccatggag

SEQ ID NO: 1116576 - DNA, 25 bp, Homo sapien
gaggatcccctagtagatacccttg

SEQ ID NO: 1116577 - DNA, 25 bp, Homo sapien
gaactacagcactgaaatcccagag

SEQ ID NO: 1116578 - DNA, 25 bp, Homo sapien
tccatcattccaaatgatcagctga

SEQ ID NO: 1116579 - DNA, 25 bp, Homo sapien
tcagctgactttgaagaagtggcag

SEQ ID NO: 1116580 - DNA, 25 bp, Homo sapien
atcggcagcagcgccgtccatcatt

SEQ ID NO: 1116581 - DNA, 25 bp, Homo sapien
aatgatcagctgactttgaagaagt

SEQ ID NO: 1116582 - DNA, 25 bp, Homo sapien
ttcatcaacttctccgacaggcctt

SEQ ID NO: 1116583 - DNA, 25 bp, Homo sapien
cacctaaggtgcatctttcatcaac

SEQ ID NO: 1116584 - DNA, 25 bp, Homo sapien
tcccgagaaagttcaggacggcggc

SEQ ID NO: 1116585 - DNA, 25 bp, Homo sapien
cccagggcgtgctgttctgtacaca

SEQ ID NO: 1116586 - DNA, 25 bp, Homo sapien
gagatataactgattgcggacttcc

SEQ ID NO: 1116587 - DNA, 25 bp, Homo sapien
caattttggcaaccgtacagcactg

SEQ ID NO: 1116588 - DNA, 25 bp, Homo sapien
tattctcatcagtccagggtggcgg

SEQ ID NO: 1116589 - DNA, 25 bp, Homo sapien
taggcaagttttgtggtacctcagc

SEQ ID NO: 1116590 - DNA, 25 bp, Homo sapien
caccttactgaagggagatcttcaa

SEQ ID NO: 1116591 - DNA, 25 bp, Homo sapien
tattgtgcggtgcaccttactgaag

SEQ ID NO: 1116592 - DNA, 25 bp, Homo sapien
aattcagcagtttgtgtgtggcaac

SEQ ID NO: 1116593 - DNA, 25 bp, Homo sapien
taacttgtattgtgcggtgcacctt

SEQ ID NO: 1116594 - DNA, 25 bp, Homo sapien
cctgacagggtttccattagtgtaa

SEQ ID NO: 1116595 - DNA, 25 bp, Homo sapien
aatttaaggtatatccagctctggg

SEQ ID NO: 1116596 - DNA, 25 bp, Homo sapien
gagccgggagcagacaaccctttgt

SEQ ID NO: 1116597 - DNA, 25 bp, Homo sapien
taaagcatcctttgggattccaggg

SEQ ID NO: 1116598 - DNA, 25 bp, Homo sapien
agaacgatttcctcagtggcgccag

SEQ ID NO: 1116599 - DNA, 25 bp, Homo sapien
tgcgtgggatacctttcccagaatt

SEQ ID NO: 1116600 - DNA, 25 bp, Homo sapien
gggaaactgaaatagcgcgtgacag

SEQ ID NO: 1116601 - DNA, 25 bp, Homo sapien
ggctgagcccacagttgtacatgaa

SEQ ID NO: 1116602 - DNA, 25 bp, Homo sapien
ccagggccctgcgtgggataccttt

SEQ ID NO: 1116603 - DNA, 25 bp, Homo sapien
tttggaagccaagacctctaagcct

SEQ ID NO: 1116604 - DNA, 25 bp, Homo sapien
caatgggacccttctgtgtcccctg

SEQ ID NO: 1116605 - DNA, 25 bp, Homo sapien
tggaagctttctccctttggaagcc

SEQ ID NO: 1116606 - DNA, 25 bp, Homo sapien
accagtaaccatagcttagagttca

SEQ ID NO: 1116607 - DNA, 25 bp, Homo sapien
gattcaccctgcgattcaatgttga

SEQ ID NO: 1116608 - DNA, 25 bp, Homo sapien
ttgcggaaatagctaccaagtctcc

SEQ ID NO: 1116609 - DNA, 25 bp, Homo sapien
gaacagttgcccaagtaggacatcc

SEQ ID NO: 1116610 - DNA, 25 bp, Homo sapien
gacatctcaggttttgtggctagga

SEQ ID NO: 1116611 - DNA, 25 bp, Homo sapien
cataatcattcacattggcccggag

SEQ ID NO: 1116612 - DNA, 25 bp, Homo sapien
tgctcacaagttttgcggctgccaa

SEQ ID NO: 1116613 - DNA, 25 bp, Homo sapien
cattcaactgcaaagggtggatggc

SEQ ID NO: 1116614 - DNA, 25 bp, Homo sapien
gaaagaatccgcctgagtggacctg

SEQ ID NO: 1116615 - DNA, 25 bp, Homo sapien
catctccatgggatagcaagaggct

SEQ ID NO: 1116616 - DNA, 25 bp, Homo sapien
tcctgactacagttggcccaggtca

SEQ ID NO: 1116617 - DNA, 25 bp, Homo sapien
tggcacaggccataagcaagttgcc

SEQ ID NO: 1116618 - DNA, 25 bp, Homo sapien
tgctgtcatgtcatccctaccctga

SEQ ID NO: 1116619 - DNA, 25 bp, Homo sapien
tacacgcggaaacgattccttcgtc

SEQ ID NO: 1116620 - DNA, 25 bp, Homo sapien
cttgatcacgataatgacttagagt

SEQ ID NO: 1116621 - DNA, 25 bp, Homo sapien
agagttccgctgagcctttcatcca

SEQ ID NO: 1116622 - DNA, 25 bp, Homo sapien
aacgattccttcgtccttgatcacg

SEQ ID NO: 1116623 - DNA, 25 bp, Homo sapien
ttccccagctcgtatttttctgctc

SEQ ID NO: 1116624 - DNA, 25 bp, Homo sapien
ttgtgttcgtctgttaacccatagg

SEQ ID NO: 1116625 - DNA, 25 bp, Homo sapien
ttctgtctctaaattgtgttcgtct

SEQ ID NO: 1116626 - DNA, 25 bp, Homo sapien
tctaaattgtgttcgtctgttaacc

SEQ ID NO: 1116627 - DNA, 25 bp, Homo sapien
tttgtcccacacatatcaatcccag

SEQ ID NO: 1116628 - DNA, 25 bp, Homo sapien
ccagtgtggaatccggtactttctt

SEQ ID NO: 1116629 - DNA, 25 bp, Homo sapien
cttcacccagctcttgctcagtttt

SEQ ID NO: 1116630 - DNA, 25 bp, Homo sapien
catatcaatcccagtgtggaatccg

SEQ ID NO: 1116631 - DNA, 25 bp, Homo sapien
tgtaggaggagatggaacacaatat

SEQ ID NO: 1116632 - DNA, 25 bp, Homo sapien
ctgtaggaggagatggaacacaata

SEQ ID NO: 1116633 - DNA, 25 bp, Homo sapien
gagtgttgtgcataacagcaatggg

SEQ ID NO: 1116634 - DNA, 25 bp, Homo sapien
cattagtccaattaagtctgcagcc

SEQ ID NO: 1116635 - DNA, 25 bp, Homo sapien
tggaccgtttccacggctttgtcaa

SEQ ID NO: 1116636 - DNA, 25 bp, Homo sapien
ggttcatatttgtggaccgtttcca

SEQ ID NO: 1116637 - DNA, 25 bp, Homo sapien
aaagcccatctgggtctttgtgctc

SEQ ID NO: 1116638 - DNA, 25 bp, Homo sapien
acacgtgcttcagaaagcccatctg

SEQ ID NO: 1116639 - DNA, 25 bp, Homo sapien
aagcccatctgggtctttgtgctca

SEQ ID NO: 1116640 - DNA, 25 bp, Homo sapien
agcccatctgggtctttgtgctcac

SEQ ID NO: 1116641 - DNA, 25 bp, Homo sapien
tcagtgttatcatggcattgaacac

SEQ ID NO: 1116642 - DNA, 25 bp, Homo sapien
ggaatttaactcagccaccgaacca

SEQ ID NO: 1116643 - DNA, 25 bp, Homo sapien
gccaccgaaccaacaatcagtgtta

SEQ ID NO: 1116644 - DNA, 25 bp, Homo sapien
caggcacctgagttccacaaggaac

SEQ ID NO: 1116645 - DNA, 25 bp, Homo sapien
cagatggcagtgccactcggtccct

SEQ ID NO: 1116646 - DNA, 25 bp, Homo sapien
ccagatggcagtgccactcggtccc

SEQ ID NO: 1116647 - DNA, 25 bp, Homo sapien
ttccaaagcccacgcaaccaaagcc

SEQ ID NO: 1116648 - DNA, 25 bp, Homo sapien
agatggcagtgccactcggtccctg

SEQ ID NO: 1116649 - DNA, 25 bp, Homo sapien
gcaaaatgacttccagtataaccag

SEQ ID NO: 1116650 - DNA, 25 bp, Homo sapien
gtataaccagtcaaagggagaaagc

SEQ ID NO: 1116651 - DNA, 25 bp, Homo sapien
gaaagcagtgcctaacggcagggca

SEQ ID NO: 1116652 - DNA, 25 bp, Homo sapien
tttcaacaccaatggacgccactat

SEQ ID NO: 1116653 - DNA, 25 bp, Homo sapien
cctgagttggtttgctggagtctcc

SEQ ID NO: 1116654 - DNA, 25 bp, Homo sapien
cacgtggtggccgtatcagagcaaa

SEQ ID NO: 1116655 - DNA, 25 bp, Homo sapien
agctcgccagagtggtcaccatggg

SEQ ID NO: 1116656 - DNA, 25 bp, Homo sapien
taggaggaacgagaaagtaactgac

SEQ ID NO: 1116657 - DNA, 25 bp, Homo sapien
aaatgcaagtgtgctcttctacccc

SEQ ID NO: 1116658 - DNA, 25 bp, Homo sapien
caggagtaagtgatgatgtgtgtgt

SEQ ID NO: 1116659 - DNA, 25 bp, Homo sapien
acagcaggaggggtcctcccatcag

SEQ ID NO: 1116660 - DNA, 25 bp, Homo sapien
agcaggttgtgagaagtgtaaaaga

SEQ ID NO: 1116661 - DNA, 25 bp, Homo sapien
tgtgtctggtttggttccctcattc

SEQ ID NO: 1116662 - DNA, 25 bp, Homo sapien
atttgtgtctggtttggttccctca

SEQ ID NO: 1116663 - DNA, 25 bp, Homo sapien
ccatttgtgtctggtttggttccct

SEQ ID NO: 1116664 - DNA, 25 bp, Homo sapien
tgtctggtttggttccctcattcat

SEQ ID NO: 1116665 - DNA, 25 bp, Homo sapien
agaagaagggagttctagagcagaa

SEQ ID NO: 1116666 - DNA, 25 bp, Homo sapien
cccatagcatcatccaacatttcag

SEQ ID NO: 1116667 - DNA, 25 bp, Homo sapien
ttcccatagcatcatccaacatttc

SEQ ID NO: 1116668 - DNA, 25 bp, Homo sapien
catagcatcatccaacatttcagga

SEQ ID NO: 1116669 - DNA, 25 bp, Homo sapien
tcgatccgtttgacgagttcctttc

SEQ ID NO: 1116670 - DNA, 25 bp, Homo sapien
aactttctgtgggtacaagccaggt

SEQ ID NO: 1116671 - DNA, 25 bp, Homo sapien
ggcccatccatctcttatcttcgat

SEQ ID NO: 1116672 - DNA, 25 bp, Homo sapien
gtgtcccgtggacaagagccactgg

SEQ ID NO: 1116673 - DNA, 25 bp, Homo sapien
gcagcatcctggcaggcttcatgac

SEQ ID NO: 1116674 - DNA, 25 bp, Homo sapien
atggcagcatcctggcaggcttcat

SEQ ID NO: 1116675 - DNA, 25 bp, Homo sapien
tggcagcatcctggcaggcttcatg

SEQ ID NO: 1116676 - DNA, 25 bp, Homo sapien
catggcagcatcctggcaggcttca

SEQ ID NO: 1116677 - DNA, 25 bp, Homo sapien
ctccttccaccttctcagtccccat

SEQ ID NO: 1116678 - DNA, 25 bp, Homo sapien
caatagcttgatgttcaatctcagt

SEQ ID NO: 1116679 - DNA, 25 bp, Homo sapien
gaggacaatagcttgatgttcaatc

SEQ ID NO: 1116680 - DNA, 25 bp, Homo sapien
agctcatggaggacaatagcttgat

SEQ ID NO: 1116681 - DNA, 25 bp, Homo sapien
ccagataaagcccaaccagctcatg

SEQ ID NO: 1116682 - DNA, 25 bp, Homo sapien
cttttgatgaactgtattcttctgt

SEQ ID NO: 1116683 - DNA, 25 bp, Homo sapien
tattcttctgtcagagacagcctgt

SEQ ID NO: 1116684 - DNA, 25 bp, Homo sapien
aacctctctgagtttgacaacctgc

SEQ ID NO: 1116685 - DNA, 25 bp, Homo sapien
tgacaacctgcagacacttttgatg

SEQ ID NO: 1116686 - DNA, 25 bp, Homo sapien
gatttattatggtctgataatggaa

SEQ ID NO: 1116687 - DNA, 25 bp, Homo sapien
tttcccatgtctggaacctgtgttg

SEQ ID NO: 1116688 - DNA, 25 bp, Homo sapien
ggaacctgtgttgtaatcagtctta

SEQ ID NO: 1116689 - DNA, 25 bp, Homo sapien
aatcagtcttattaactgggaacat

SEQ ID NO: 1116690 - DNA, 25 bp, Homo sapien
cttcaacactgcaaacacattctgt

SEQ ID NO: 1116691 - DNA, 25 bp, Homo sapien
attctgtgtagtcacaagggaggac

SEQ ID NO: 1116692 - DNA, 25 bp, Homo sapien
tctgggggccagacaagctgaacag

SEQ ID NO: 1116693 - DNA, 25 bp, Homo sapien
tagtcacaagggaggactgcattga

SEQ ID NO: 1116694 - DNA, 25 bp, Homo sapien
cgtgtagacacctgagttactggca

SEQ ID NO: 1116695 - DNA, 25 bp, Homo sapien
agccaattccatttcgccaggatga

SEQ ID NO: 1116696 - DNA, 25 bp, Homo sapien
gggctgtctattccggcaggacaga

SEQ ID NO: 1116697 - DNA, 25 bp, Homo sapien
tgtctattccggcaggacagagcca

SEQ ID NO: 1116698 - DNA, 25 bp, Homo sapien
aaaccaatatcctattgaccaacag

SEQ ID NO: 1116699 - DNA, 25 bp, Homo sapien
acaaaccaatatcctattgaccaac

SEQ ID NO: 1116700 - DNA, 25 bp, Homo sapien
tatcctattgaccaacagtcgtttt

SEQ ID NO: 1116701 - DNA, 25 bp, Homo sapien
ccaatatcctattgaccaacagtcg

SEQ ID NO: 1116702 - DNA, 25 bp, Homo sapien
atcatctagtccacagatatttccc

SEQ ID NO: 1116703 - DNA, 25 bp, Homo sapien
agatcatctagtccacagatatttc

SEQ ID NO: 1116704 - DNA, 25 bp, Homo sapien
gatcatctagtccacagatatttcc

SEQ ID NO: 1116705 - DNA, 25 bp, Homo sapien
aaagcccctgaatccggcatgcagg

SEQ ID NO: 1116706 - DNA, 25 bp, Homo sapien
attctgattggcctgttttcgatgg

SEQ ID NO: 1116707 - DNA, 25 bp, Homo sapien
gcctgttttcgatgggtgtccatcc

SEQ ID NO: 1116708 - DNA, 25 bp, Homo sapien
agaaagcccctgaatccggcatgca

SEQ ID NO: 1116709 - DNA, 25 bp, Homo sapien
ggccactggtggcccactgtttggc

SEQ ID NO: 1116710 - DNA, 25 bp, Homo sapien
tggtggcccactgtttggcagcaca

SEQ ID NO: 1116711 - DNA, 25 bp, Homo sapien
cactgtttggcagcacaggctccat

SEQ ID NO: 1116712 - DNA, 25 bp, Homo sapien
ccactggtggcccactgtttggcag

SEQ ID NO: 1116713 - DNA, 25 bp, Homo sapien
gattctgtgacaccataaccgccat

SEQ ID NO: 1116714 - DNA, 25 bp, Homo sapien
cttgtgctgtttctcgcagattctg

SEQ ID NO: 1116715 - DNA, 25 bp, Homo sapien
tgctgtttctcgcagattctgtgac

SEQ ID NO: 1116716 - DNA, 25 bp, Homo sapien
tctcgcagattctgtgacaccataa

SEQ ID NO: 1116717 - DNA, 25 bp, Homo sapien
cagagcacacaggactctaggaagc

SEQ ID NO: 1116718 - DNA, 25 bp, Homo sapien
gagcacacaggactctaggaagcta

SEQ ID NO: 1116719 - DNA, 25 bp, Homo sapien
cacagagcacacaggactctaggaa

SEQ ID NO: 1116720 - DNA, 25 bp, Homo sapien
agcacacaggactctaggaagctac

SEQ ID NO: 1116721 - DNA, 25 bp, Homo sapien
aaaggtgtctaggtgtgtcctcctc

SEQ ID NO: 1116722 - DNA, 25 bp, Homo sapien
tccagttgtcctcagaaaggtgtct

SEQ ID NO: 1116723 - DNA, 25 bp, Homo sapien
tccggttcgtcttgggaagatatta

SEQ ID NO: 1116724 - DNA, 25 bp, Homo sapien
tgaggagcagaatgtccggttcgtc

SEQ ID NO: 1116725 - DNA, 25 bp, Homo sapien
aggcaggcagcggagtcctatagcc

SEQ ID NO: 1116726 - DNA, 25 bp, Homo sapien
tttcatctcccggtgtacactggtc

SEQ ID NO: 1116727 - DNA, 25 bp, Homo sapien
ggcagcactgcattcagatagctct

SEQ ID NO: 1116728 - DNA, 25 bp, Homo sapien
aagatacccactctgcttggcaagg

SEQ ID NO: 1116729 - DNA, 25 bp, Homo sapien
gaatacacgctgtgtttgaacatgc

SEQ ID NO: 1116730 - DNA, 25 bp, Homo sapien
tcacatcgctcataagaatacacgc

SEQ ID NO: 1116731 - DNA, 25 bp, Homo sapien
tgaacatgcagtcaaacaccagcgt

SEQ ID NO: 1116732 - DNA, 25 bp, Homo sapien
gctttgcacgctgacataaacacag

SEQ ID NO: 1116733 - DNA, 25 bp, Homo sapien
ctttctgtaatatgagagaggcgaa

SEQ ID NO: 1116734 - DNA, 25 bp, Homo sapien
ttctttctgtaatatgagagaggcg

SEQ ID NO: 1116735 - DNA, 25 bp, Homo sapien
taatatgagagaggcgaagaatgaa

SEQ ID NO: 1116736 - DNA, 25 bp, Homo sapien
tctgtaatatgagagaggcgaagaa

SEQ ID NO: 1116737 - DNA, 25 bp, Homo sapien
tgtaaggaaaaggtgatgtcaacag

SEQ ID NO: 1116738 - DNA, 25 bp, Homo sapien
atgtactctttgtccagttttgttc

SEQ ID NO: 1116739 - DNA, 25 bp, Homo sapien
taaggaaaaggtgatgtcaacagca

SEQ ID NO: 1116740 - DNA, 25 bp, Homo sapien
gttctgcagccggtctctcttggga

SEQ ID NO: 1116741 - DNA, 25 bp, Homo sapien
tcaagaaagtcaacacaccaaagac

SEQ ID NO: 1116742 - DNA, 25 bp, Homo sapien
ttagggctggtactacattgggcac

SEQ ID NO: 1116743 - DNA, 25 bp, Homo sapien
gtgctcttttcgctgttgccattga

SEQ ID NO: 1116744 - DNA, 25 bp, Homo sapien
tgatcttgtgatgaactgcttgtca

SEQ ID NO: 1116745 - DNA, 25 bp, Homo sapien
gggctaagtaatagacttctccaaa

SEQ ID NO: 1116746 - DNA, 25 bp, Homo sapien
gaatacataatgataatctggggct

SEQ ID NO: 1116747 - DNA, 25 bp, Homo sapien
agtaatagacttctccaaatggcat

SEQ ID NO: 1116748 - DNA, 25 bp, Homo sapien
taatctggggctaagtaatagactt

SEQ ID NO: 1116749 - DNA, 25 bp, Homo sapien
cctgtttgggaagataagtcctgca

SEQ ID NO: 1116750 - DNA, 25 bp, Homo sapien
tttctcagaaatgggtctcttcctg

SEQ ID NO: 1116751 - DNA, 25 bp, Homo sapien
cttcctgtttgggaagataagtcct

SEQ ID NO: 1116752 - DNA, 25 bp, Homo sapien
ctttctcagaaatgggtctcttcct

SEQ ID NO: 1116753 - DNA, 25 bp, Homo sapien
tcagcgcacggggaccctgaggacc

SEQ ID NO: 1116754 - DNA, 25 bp, Homo sapien
ctgccttctcagcgcacggggaccc

SEQ ID NO: 1116755 - DNA, 25 bp, Homo sapien
ggaccctgaggacccgcgcccgctc

SEQ ID NO: 1116756 - DNA, 25 bp, Homo sapien
gcccgctcgcccctcggggactgcc

SEQ ID NO: 1116757 - DNA, 25 bp, Homo sapien
agcaactgctgcaatcgctgctgca

SEQ ID NO: 1116758 - DNA, 25 bp, Homo sapien
gcaagtttggcaatgtggcttcact

SEQ ID NO: 1116759 - DNA, 25 bp, Homo sapien
cctccgcggctcttacacatgtgtt

SEQ ID NO: 1116760 - DNA, 25 bp, Homo sapien
tcgcttgctcgctccgggatggcag

SEQ ID NO: 1116761 - DNA, 25 bp, Homo sapien
tcgcgttgctctggggcgggttggg

SEQ ID NO: 1116762 - DNA, 25 bp, Homo sapien
aatcgcgttgctctggggcgggttg

SEQ ID NO: 1116763 - DNA, 25 bp, Homo sapien
tttaaatcgcgttgctctggggcgg

SEQ ID NO: 1116764 - DNA, 25 bp, Homo sapien
tttttaaatcgcgttgctctggggc

SEQ ID NO: 1116765 - DNA, 25 bp, Homo sapien
agggagggagttctcgcagaagcag

SEQ ID NO: 1116766 - DNA, 25 bp, Homo sapien
ggagggagttctcgcagaagcagga

SEQ ID NO: 1116767 - DNA, 25 bp, Homo sapien
agggagttctcgcagaagcaggaaa

SEQ ID NO: 1116768 - DNA, 25 bp, Homo sapien
ggagggagggagttctcgcagaagc

SEQ ID NO: 1116769 - DNA, 25 bp, Homo sapien
cgagcgaagccgctcggcttccagg

SEQ ID NO: 1116770 - DNA, 25 bp, Homo sapien
gcggcggcggtgaaatgcgagcgaa

SEQ ID NO: 1116771 - DNA, 25 bp, Homo sapien
tattgcaatattgcgagaggcggcg

SEQ ID NO: 1116772 - DNA, 25 bp, Homo sapien
atattgcaatattgcgagaggcggc

SEQ ID NO: 1116773 - DNA, 25 bp, Homo sapien
tatgaactagaaatatccccacccc

SEQ ID NO: 1116774 - DNA, 25 bp, Homo sapien
agcaggaaccgctacaaagctggcg

SEQ ID NO: 1116775 - DNA, 25 bp, Homo sapien
tcagactcgcgctttatctaagccg

SEQ ID NO: 1116776 - DNA, 25 bp, Homo sapien
gcaggccggcctcggtagtttcaga

SEQ ID NO: 1116777 - DNA, 25 bp, Homo sapien
gaccagaaactgactcccctgataa

SEQ ID NO: 1116778 - DNA, 25 bp, Homo sapien
cctgataactaaggacgggccctca

SEQ ID NO: 1116779 - DNA, 25 bp, Homo sapien
gagatgaatcaagaagactgaccag

SEQ ID NO: 1116780 - DNA, 25 bp, Homo sapien
tagctaaagctcttaaggacaagca

SEQ ID NO: 1116781 - DNA, 25 bp, Homo sapien
gaataagaactgcaccaattaagct

SEQ ID NO: 1116782 - DNA, 25 bp, Homo sapien
cacatttcctccgaaagagtcccgg

SEQ ID NO: 1116783 - DNA, 25 bp, Homo sapien
cagtgaccgcacaataaaccagaat

SEQ ID NO: 1116784 - DNA, 25 bp, Homo sapien
tcccggaacgtgtgtccagtgaccg

SEQ ID NO: 1116785 - DNA, 25 bp, Homo sapien
ttttgaagatcaatgagtgttttct

SEQ ID NO: 1116786 - DNA, 25 bp, Homo sapien
tgtggtgaccgccatctcccattat

SEQ ID NO: 1116787 - DNA, 25 bp, Homo sapien
catgccattgtggtgaccgccatct

SEQ ID NO: 1116788 - DNA, 25 bp, Homo sapien
ggtgaccgccatctcccattattgt

SEQ ID NO: 1116789 - DNA, 25 bp, Homo sapien
ctcaactttcctgcgcttgccgccg

SEQ ID NO: 1116790 - DNA, 25 bp, Homo sapien
ccgagagcaggctccgctgcgcgct

SEQ ID NO: 1116791 - DNA, 25 bp, Homo sapien
cgcttgccgccgctgacaatttcag

SEQ ID NO: 1116792 - DNA, 25 bp, Homo sapien
gctccggtactgtcaaaactccgag

SEQ ID NO: 1116793 - DNA, 25 bp, Homo sapien
gggcgatgcaaaagttagtaatcgc

SEQ ID NO: 1116794 - DNA, 25 bp, Homo sapien
gaaagacaaaacaggggcgatgcaa

SEQ ID NO: 1116795 - DNA, 25 bp, Homo sapien
caaaagttagtaatcgccggagaga

SEQ ID NO: 1116796 - DNA, 25 bp, Homo sapien
agtaatcgccggagagagagcaagc

SEQ ID NO: 1116797 - DNA, 25 bp, Homo sapien
caatagctgtccatggcatagagca

SEQ ID NO: 1116798 - DNA, 25 bp, Homo sapien
gcagaaagcggtccgcaatcttgcc

SEQ ID NO: 1116799 - DNA, 25 bp, Homo sapien
tgccacttttggtgtaacaggacgt

SEQ ID NO: 1116800 - DNA, 25 bp, Homo sapien
catttctgcaaaggatcatgccact

SEQ ID NO: 1116801 - DNA, 25 bp, Homo sapien
gaccagagggtgctcaacctttgca

SEQ ID NO: 1116802 - DNA, 25 bp, Homo sapien
gaacgcagcttaactcccgcttggg

SEQ ID NO: 1116803 - DNA, 25 bp, Homo sapien
caagcctccgagtaacagtatgaag

SEQ ID NO: 1116804 - DNA, 25 bp, Homo sapien
gaaacagaacacctcctagaagcat

SEQ ID NO: 1116805 - DNA, 25 bp, Homo sapien
gatgccagcagaatcgacacaggtt

SEQ ID NO: 1116806 - DNA, 25 bp, Homo sapien
tacagcaccgtcaaagctcatggca

SEQ ID NO: 1116807 - DNA, 25 bp, Homo sapien
tcagctcggaactgcactgggatct

SEQ ID NO: 1116808 - DNA, 25 bp, Homo sapien
catggcattacttggaaggaggacc

SEQ ID NO: 1116809 - DNA, 25 bp, Homo sapien
gaaggaagacttcagtaatctctta

SEQ ID NO: 1116810 - DNA, 25 bp, Homo sapien
gccctgagctaagtgtgaggccatc

SEQ ID NO: 1116811 - DNA, 25 bp, Homo sapien
catcaatttcgtactgagctagaac

SEQ ID NO: 1116812 - DNA, 25 bp, Homo sapien
gagctagaactcatctctcctagaa

SEQ ID NO: 1116813 - DNA, 25 bp, Homo sapien
cttgagggacattggagagggggta

SEQ ID NO: 1116814 - DNA, 25 bp, Homo sapien
ttgagggacattggagagggggtag

SEQ ID NO: 1116815 - DNA, 25 bp, Homo sapien
gcggcattgaaagctcctccaacaa

SEQ ID NO: 1116816 - DNA, 25 bp, Homo sapien
gagcagattactccactcttctgca

SEQ ID NO: 1116817 - DNA, 25 bp, Homo sapien
gcggcgggcgagcagattactccac

SEQ ID NO: 1116818 - DNA, 25 bp, Homo sapien
cggtccctgcggcattgaaagctcc

SEQ ID NO: 1116819 - DNA, 25 bp, Homo sapien
agctttttagcaagaccttggttgt

SEQ ID NO: 1116820 - DNA, 25 bp, Homo sapien
gggactggtgaaagcgccccctcat

SEQ ID NO: 1116821 - DNA, 25 bp, Homo sapien
tgcccatcgacacttggccgcggag

SEQ ID NO: 1116822 - DNA, 25 bp, Homo sapien
aaaagcccctcagtaaatcgctatg

SEQ ID NO: 1116823 - DNA, 25 bp, Homo sapien
caggcaggcgttggtccctttaaga

SEQ ID NO: 1116824 - DNA, 25 bp, Homo sapien
taaatgttttgtttgcgacgcagct

SEQ ID NO: 1116825 - DNA, 25 bp, Homo sapien
tgtgcggattcgctgcagcaaggca

SEQ ID NO: 1116826 - DNA, 25 bp, Homo sapien
cattcggagcagatctaagccagag

SEQ ID NO: 1116827 - DNA, 25 bp, Homo sapien
gagtttccgaagctacttggggcgc

SEQ ID NO: 1116828 - DNA, 25 bp, Homo sapien
ttcctcctctcgctgcactttccgc

SEQ ID NO: 1116829 - DNA, 25 bp, Homo sapien
gaggaaagacggttcgaggaagaga

SEQ ID NO: 1116830 - DNA, 25 bp, Homo sapien
cgccggtctccgaacttcctcctct

SEQ ID NO: 1116831 - DNA, 25 bp, Homo sapien
ggtgctggccgcctagggagcgagg

SEQ ID NO: 1116832 - DNA, 25 bp, Homo sapien
gcttccggcgcgtttcctcgccctc

SEQ ID NO: 1116833 - DNA, 25 bp, Homo sapien
gcgccacgtgaaccgcccgagtgga

SEQ ID NO: 1116834 - DNA, 25 bp, Homo sapien
gggaaagaaagcgcgacccgctcgc

SEQ ID NO: 1116835 - DNA, 25 bp, Homo sapien
tagcagcttgctgttgattaccagg

SEQ ID NO: 1116836 - DNA, 25 bp, Homo sapien
aaatgaactcgctgtctggcggcgc

SEQ ID NO: 1116837 - DNA, 25 bp, Homo sapien
ctagcctgttcaattaaagggacag

SEQ ID NO: 1116838 - DNA, 25 bp, Homo sapien
gggacagcattctctgaatatagca

SEQ ID NO: 1116839 - DNA, 25 bp, Homo sapien
taattcagagtaacagatctgcccc

SEQ ID NO: 1116840 - DNA, 25 bp, Homo sapien
ccccaagtgaattggaggccttgaa

SEQ ID NO: 1116841 - DNA, 25 bp, Homo sapien
cacgtcctattggaaaagtgccatt

SEQ ID NO: 1116842 - DNA, 25 bp, Homo sapien
tgacaaatcaagataaacgttcccc

SEQ ID NO: 1116843 - DNA, 25 bp, Homo sapien
tgcctggagccaagtccattaaagg

SEQ ID NO: 1116844 - DNA, 25 bp, Homo sapien
gctactgatccagaagcaattggtt

SEQ ID NO: 1116845 - DNA, 25 bp, Homo sapien
gaaaaaagcacatccacagctactg

SEQ ID NO: 1116846 - DNA, 25 bp, Homo sapien
gcaacccagaaattatgcctggagc

SEQ ID NO: 1116847 - DNA, 25 bp, Homo sapien
gtatatacatttgtacctgcaagta

SEQ ID NO: 1116848 - DNA, 25 bp, Homo sapien
tgagagtgtggctgaaaggtatata

SEQ ID NO: 1116849 - DNA, 25 bp, Homo sapien
caaggagaggtacgtttctgagagt

SEQ ID NO: 1116850 - DNA, 25 bp, Homo sapien
ttgggcaaggagaggtacgtttctg

SEQ ID NO: 1116851 - DNA, 25 bp, Homo sapien
tgggtcctcagtccaagaaggtcgt

SEQ ID NO: 1116852 - DNA, 25 bp, Homo sapien
tctcagactggactataatgggctc

SEQ ID NO: 1116853 - DNA, 25 bp, Homo sapien
taccccaggtcaggctaattaaagc

SEQ ID NO: 1116854 - DNA, 25 bp, Homo sapien
aaaggctcgaggctttaggtgctca

SEQ ID NO: 1116855 - DNA, 25 bp, Homo sapien
gaagcccgagaaacaaattttgcag

SEQ ID NO: 1116856 - DNA, 25 bp, Homo sapien
tgggctgctgtctcctaatgctgga

SEQ ID NO: 1116857 - DNA, 25 bp, Homo sapien
tcaggaacactgatgaggacctccc

SEQ ID NO: 1116858 - DNA, 25 bp, Homo sapien
gacacattgacacgttcttgcagaa

SEQ ID NO: 1116859 - DNA, 25 bp, Homo sapien
cgggatctggacccatttgtcatca

SEQ ID NO: 1116860 - DNA, 25 bp, Homo sapien
gggatctggacccatttgtcatcat

SEQ ID NO: 1116861 - DNA, 25 bp, Homo sapien
tgaaacaaagaataacggttgacac

SEQ ID NO: 1116862 - DNA, 25 bp, Homo sapien
aaagaataacggttgacaccagtga

SEQ ID NO: 1116863 - DNA, 25 bp, Homo sapien
aagaataacggttgacaccagtgaa

SEQ ID NO: 1116864 - DNA, 25 bp, Homo sapien
aacaaagaataacggttgacaccag

SEQ ID NO: 1116865 - DNA, 25 bp, Homo sapien
gcgctgcaagcaccgctatttccaa

SEQ ID NO: 1116866 - DNA, 25 bp, Homo sapien
aggaatcgactgtccgcaagcgctg

SEQ ID NO: 1116867 - DNA, 25 bp, Homo sapien
gagttcactcgcaggaatcgactgt

SEQ ID NO: 1116868 - DNA, 25 bp, Homo sapien
tacacattgccttgcgccctcatga

SEQ ID NO: 1116869 - DNA, 25 bp, Homo sapien
gagctgtaggtctatcatgttcaca

SEQ ID NO: 1116870 - DNA, 25 bp, Homo sapien
gctctgaagtgaattcaaatggcca

SEQ ID NO: 1116871 - DNA, 25 bp, Homo sapien
tctggcagtagtggattgctctgaa

SEQ ID NO: 1116872 - DNA, 25 bp, Homo sapien
tgatgtagtgaaaccgatctcccgg

SEQ ID NO: 1116873 - DNA, 25 bp, Homo sapien
ggtgtccagattgctattcctaacg

SEQ ID NO: 1116874 - DNA, 25 bp, Homo sapien
gaagctacagatataacaaagtcag

SEQ ID NO: 1116875 - DNA, 25 bp, Homo sapien
tggtaccgccaatgaacaaaaatgc

SEQ ID NO: 1116876 - DNA, 25 bp, Homo sapien
tcttgctaggttaagaggttgaacc

SEQ ID NO: 1116877 - DNA, 25 bp, Homo sapien
gtaaagagtaaatgaatcaatgtca

SEQ ID NO: 1116878 - DNA, 25 bp, Homo sapien
taaagagtaaatgaatcaatgtcat

SEQ ID NO: 1116879 - DNA, 25 bp, Homo sapien
aaagagtaaatgaatcaatgtcatc

SEQ ID NO: 1116880 - DNA, 25 bp, Homo sapien
taaacttgagcaagggaaaagggca

SEQ ID NO: 1116881 - DNA, 25 bp, Homo sapien
gtttcaatgcaataactcagtgctg

SEQ ID NO: 1116882 - DNA, 25 bp, Homo sapien
gtcaaacatactatcagagctgatg

SEQ ID NO: 1116883 - DNA, 25 bp, Homo sapien
cccgagatttttgaagcttgctaaa

SEQ ID NO: 1116884 - DNA, 25 bp, Homo sapien
agcatttatatgtcttggcactcct

SEQ ID NO: 1116885 - DNA, 25 bp, Homo sapien
gaagaagcttgaaatacctcatcag

SEQ ID NO: 1116886 - DNA, 25 bp, Homo sapien
aaatggttattctatgtagctcccc

SEQ ID NO: 1116887 - DNA, 25 bp, Homo sapien
tcagcagtgactggttagtttgcaa

SEQ ID NO: 1116888 - DNA, 25 bp, Homo sapien
tctgcgaatagaaggaaaatggcca

SEQ ID NO: 1116889 - DNA, 25 bp, Homo sapien
tggaccacgttcagcttgcccaaaa

SEQ ID NO: 1116890 - DNA, 25 bp, Homo sapien
gcacaggtaattctagatggcacca

SEQ ID NO: 1116891 - DNA, 25 bp, Homo sapien
aaaagcagtttatgttccaccagga

SEQ ID NO: 1116892 - DNA, 25 bp, Homo sapien
tgagaaaggtaatttgtctgtccag

SEQ ID NO: 1116893 - DNA, 25 bp, Homo sapien
ggaagctcagtgtgagaaaggtaat

SEQ ID NO: 1116894 - DNA, 25 bp, Homo sapien
gaagctcagtgtgagaaaggtaatt

SEQ ID NO: 1116895 - DNA, 25 bp, Homo sapien
taaatggacgctcagaaagtttctg

SEQ ID NO: 1116896 - DNA, 25 bp, Homo sapien
tattattccgatatccccatgtgaa

SEQ ID NO: 1116897 - DNA, 25 bp, Homo sapien
tatgctacttactctggcagtgaag

SEQ ID NO: 1116898 - DNA, 25 bp, Homo sapien
catagttcaatgcaagggtggcttc

SEQ ID NO: 1116899 - DNA, 25 bp, Homo sapien
caaaggtgacttgtctactgaagac

SEQ ID NO: 1116900 - DNA, 25 bp, Homo sapien
tacaccaataaatgcgggaagggca

SEQ ID NO: 1116901 - DNA, 25 bp, Homo sapien
ccatgggagtagcaacattaggaca

SEQ ID NO: 1116902 - DNA, 25 bp, Homo sapien
tggcactggtgctagctacaaaggt

SEQ ID NO: 1116903 - DNA, 25 bp, Homo sapien
ttctacacagtagctgctatgagcc

SEQ ID NO: 1116904 - DNA, 25 bp, Homo sapien
ttcattcagcaaattagaagtaggg

SEQ ID NO: 1116905 - DNA, 25 bp, Homo sapien
cagtagctgctatgagcctgatttt

SEQ ID NO: 1116906 - DNA, 25 bp, Homo sapien
tagggggaattttctacacagtagc

SEQ ID NO: 1116907 - DNA, 25 bp, Homo sapien
tatttaaatacaccatactagagca

SEQ ID NO: 1116908 - DNA, 25 bp, Homo sapien
catactagagcaaatgtctctgaaa

SEQ ID NO: 1116909 - DNA, 25 bp, Homo sapien
tattatttaaatacaccatactaga

SEQ ID NO: 1116910 - DNA, 25 bp, Homo sapien
tacaccatactagagcaaatgtctc

SEQ ID NO: 1116911 - DNA, 25 bp, Homo sapien
gaagaataccttactggcccagagc

SEQ ID NO: 1116912 - DNA, 25 bp, Homo sapien
caggcactgtggtggacactctgct

SEQ ID NO: 1116913 - DNA, 25 bp, Homo sapien
tctgggtccctacaactaagtgagc

SEQ ID NO: 1116914 - DNA, 25 bp, Homo sapien
tcttgacttatagaaaggaccctgt

SEQ ID NO: 1116915 - DNA, 25 bp, Homo sapien
tacatatcagggacataagtgctta

SEQ ID NO: 1116916 - DNA, 25 bp, Homo sapien
tgctgagctacacctctctacatgg

SEQ ID NO: 1116917 - DNA, 25 bp, Homo sapien
ggagggtctacatcaggcgcttttc

SEQ ID NO: 1116918 - DNA, 25 bp, Homo sapien
tacatggctccacggctattctcag

SEQ ID NO: 1116919 - DNA, 25 bp, Homo sapien
tagtagctttctatccacacagagc

SEQ ID NO: 1116920 - DNA, 25 bp, Homo sapien
caatttagcacatcaaagagaaggc

SEQ ID NO: 1116921 - DNA, 25 bp, Homo sapien
gaaatgcctctggtttcaagaaagt

SEQ ID NO: 1116922 - DNA, 25 bp, Homo sapien
tataggtctgcaacttaagaaatgc

SEQ ID NO: 1116923 - DNA, 25 bp, Homo sapien
catcggcgaatgtgctacactttgc

SEQ ID NO: 1116924 - DNA, 25 bp, Homo sapien
taacatgcgttcagagcactgccaa

SEQ ID NO: 1116925 - DNA, 25 bp, Homo sapien
tttaactaggtacccagcatcggcg

SEQ ID NO: 1116926 - DNA, 25 bp, Homo sapien
gagttgccgtccattctcagcagaa

SEQ ID NO: 1116927 - DNA, 25 bp, Homo sapien
catgattacgaaagtcttgttcttg

SEQ ID NO: 1116928 - DNA, 25 bp, Homo sapien
cctttactactttgtgtggagtatg

SEQ ID NO: 1116929 - DNA, 25 bp, Homo sapien
tctaaacacatcctttactactttg

SEQ ID NO: 1116930 - DNA, 25 bp, Homo sapien
tgctttctgaactaacatgattacg

SEQ ID NO: 1116931 - DNA, 25 bp, Homo sapien
gggtgatcttgccaaccgttttgag

SEQ ID NO: 1116932 - DNA, 25 bp, Homo sapien
gaaaccaggtacaagtctctgagac

SEQ ID NO: 1116933 - DNA, 25 bp, Homo sapien
gaaaatctgattgcctcactgggat

SEQ ID NO: 1116934 - DNA, 25 bp, Homo sapien
tgtccaaatacctgtgtcagggttg

SEQ ID NO: 1116935 - DNA, 25 bp, Homo sapien
aatggtctccgaactatgaggcggg

SEQ ID NO: 1116936 - DNA, 25 bp, Homo sapien
gggccatccttccagggtagtgcca

SEQ ID NO: 1116937 - DNA, 25 bp, Homo sapien
agtgccacgggcttgctcagaagtc

SEQ ID NO: 1116938 - DNA, 25 bp, Homo sapien
tgaggcgggtagcttgcatatccca

SEQ ID NO: 1116939 - DNA, 25 bp, Homo sapien
tttcatatcctgcttggtttaaagc

SEQ ID NO: 1116940 - DNA, 25 bp, Homo sapien
cattttcatatcctgcttggtttaa

SEQ ID NO: 1116941 - DNA, 25 bp, Homo sapien
tatgcattttcatatcctgcttggt

SEQ ID NO: 1116942 - DNA, 25 bp, Homo sapien
ttatgcattttcatatcctgcttgg

SEQ ID NO: 1116943 - DNA, 25 bp, Homo sapien
taagggttgacagtaaatctatccc

SEQ ID NO: 1116944 - DNA, 25 bp, Homo sapien
taaactcatcgaatttaagggttga

SEQ ID NO: 1116945 - DNA, 25 bp, Homo sapien
catcgaatttaagggttgacagtaa

SEQ ID NO: 1116946 - DNA, 25 bp, Homo sapien
gctctttaaactcatcgaatttaag

SEQ ID NO: 1116947 - DNA, 25 bp, Homo sapien
gaggagttccacaaagatccatcgg

SEQ ID NO: 1116948 - DNA, 25 bp, Homo sapien
gggaagctgccacaggtctgaaatt

SEQ ID NO: 1116949 - DNA, 25 bp, Homo sapien
tcttcagtctgcctgtacggtgctt

SEQ ID NO: 1116950 - DNA, 25 bp, Homo sapien
gcttgaaccactgtaggcttatcag

SEQ ID NO: 1116951 - DNA, 25 bp, Homo sapien
gagataagacaatacagcttctcag

SEQ ID NO: 1116952 - DNA, 25 bp, Homo sapien
taagtcacagccttcacacggtgcc

SEQ ID NO: 1116953 - DNA, 25 bp, Homo sapien
tctctggactgctagaataagagtc

SEQ ID NO: 1116954 - DNA, 25 bp, Homo sapien
agtgtctcgtctggaacattattct

SEQ ID NO: 1116955 - DNA, 25 bp, Homo sapien
tactgtgtctccagatcatgcccat

SEQ ID NO: 1116956 - DNA, 25 bp, Homo sapien
ctactgtgtctccagatcatgccca

SEQ ID NO: 1116957 - DNA, 25 bp, Homo sapien
gagagaaatagtgtaaaaagccaac

SEQ ID NO: 1116958 - DNA, 25 bp, Homo sapien
aaatagtgtaaaaagccaacaccat

SEQ ID NO: 1116959 - DNA, 25 bp, Homo sapien
tcaaaaagagagaaatagtgtaaaa

SEQ ID NO: 1116960 - DNA, 25 bp, Homo sapien
aagagagaaatagtgtaaaaagcca

SEQ ID NO: 1116961 - DNA, 25 bp, Homo sapien
cagggccacttcagatggtctttgg

SEQ ID NO: 1116962 - DNA, 25 bp, Homo sapien
ccagggccacttcagatggtctttg

SEQ ID NO: 1116963 - DNA, 25 bp, Homo sapien
aattaggggccagtgagttaaacat

SEQ ID NO: 1116964 - DNA, 25 bp, Homo sapien
aaatgaaggtccagcagaaattagg

SEQ ID NO: 1116965 - DNA, 25 bp, Homo sapien
gaaatgaaggtccagcagaaattag

SEQ ID NO: 1116966 - DNA, 25 bp, Homo sapien
tgtttgtgcaaaatctgagtcaaag

SEQ ID NO: 1116967 - DNA, 25 bp, Homo sapien
tgtgcaaaatctgagtcaaaggggt

SEQ ID NO: 1116968 - DNA, 25 bp, Homo sapien
tttgtgcaaaatctgagtcaaaggg

SEQ ID NO: 1116969 - DNA, 25 bp, Homo sapien
ttgtttgtgcaaaatctgagtcaaa

SEQ ID NO: 1116970 - DNA, 25 bp, Homo sapien
gtcagggaaagatctgatctgagca

SEQ ID NO: 1116971 - DNA, 25 bp, Homo sapien
tctgatctgagcagccgtggctact

SEQ ID NO: 1116972 - DNA, 25 bp, Homo sapien
cagattgtcagggaaagatctgatc

SEQ ID NO: 1116973 - DNA, 25 bp, Homo sapien
tctgagcagccgtggctactcttcc

SEQ ID NO: 1116974 - DNA, 25 bp, Homo sapien
atttccaagctgttggtaacggact

SEQ ID NO: 1116975 - DNA, 25 bp, Homo sapien
catttgggttatgtcctctaactga

SEQ ID NO: 1116976 - DNA, 25 bp, Homo sapien
ttgggttatgtcctctaactgaatt

SEQ ID NO: 1116977 - DNA, 25 bp, Homo sapien
caagctgttggtaacggactaaaga

SEQ ID NO: 1116978 - DNA, 25 bp, Homo sapien
cgtggcctctgcactggaagagctt

SEQ ID NO: 1116979 - DNA, 25 bp, Homo sapien
catgatgaattccattgccagcagc

SEQ ID NO: 1116980 - DNA, 25 bp, Homo sapien
tgggatttgtgtttcgcctctgttt

SEQ ID NO: 1116981 - DNA, 25 bp, Homo sapien
cgccccaggcgtggctgatgtgcac

SEQ ID NO: 1116982 - DNA, 25 bp, Homo sapien
gcaggttgccaaattagtgaagaag

SEQ ID NO: 1116983 - DNA, 25 bp, Homo sapien
tgccaaattagtgaagaagaggaga

SEQ ID NO: 1116984 - DNA, 25 bp, Homo sapien
tctaaactgccagtgatcaaaaggg

SEQ ID NO: 1116985 - DNA, 25 bp, Homo sapien
cagtgatcaaaagggcagccttgca

SEQ ID NO: 1116986 - DNA, 25 bp, Homo sapien
gacaccttgccgtttgggattatga

SEQ ID NO: 1116987 - DNA, 25 bp, Homo sapien
ttaagtgctgtgttgagtgccgctc

SEQ ID NO: 1116988 - DNA, 25 bp, Homo sapien
taatcttaaggcctgcgggtagtca

SEQ ID NO: 1116989 - DNA, 25 bp, Homo sapien
ttggcagcaggagacaccttgccgt

SEQ ID NO: 1116990 - DNA, 25 bp, Homo sapien
gaaacctaggtataacttcctcatc

SEQ ID NO: 1116991 - DNA, 25 bp, Homo sapien
tgtataactcagcagtaagaatttt

SEQ ID NO: 1116992 - DNA, 25 bp, Homo sapien
aatgtttcacagttgaaacctaggt

SEQ ID NO: 1116993 - DNA, 25 bp, Homo sapien
taatcaaggctttcaatggagggca

SEQ ID NO: 1116994 - DNA, 25 bp, Homo sapien
gtttttcatgtgagtcaacatcacc

SEQ ID NO: 1116995 - DNA, 25 bp, Homo sapien
cttgtttttcatgtgagtcaacatc

SEQ ID NO: 1116996 - DNA, 25 bp, Homo sapien
ttttcatgtgagtcaacatcaccat

SEQ ID NO: 1116997 - DNA, 25 bp, Homo sapien
tccttgtttttcatgtgagtcaaca

SEQ ID NO: 1116998 - DNA, 25 bp, Homo sapien
agggtgtcgcaggattgctgtggag

SEQ ID NO: 1116999 - DNA, 25 bp, Homo sapien
cagggtgtcgcaggattgctgtgga

SEQ ID NO: 1117000 - DNA, 25 bp, Homo sapien
tcagggtgtcgcaggattgctgtgg

SEQ ID NO: 1117001 - DNA, 25 bp, Homo sapien
caagtgtcaagtcacttggggttac

SEQ ID NO: 1117002 - DNA, 25 bp, Homo sapien
aagtcacttggggttactcctgtgg

SEQ ID NO: 1117003 - DNA, 25 bp, Homo sapien
tcacttggggttactcctgtgggct

SEQ ID NO: 1117004 - DNA, 25 bp, Homo sapien
tgtcaagtcacttggggttactcct

SEQ ID NO: 1117005 - DNA, 25 bp, Homo sapien
ttaatgagggcaccggtggtgagtt

SEQ ID NO: 1117006 - DNA, 25 bp, Homo sapien
gcaccggtggtgagttgatgggaac

SEQ ID NO: 1117007 - DNA, 25 bp, Homo sapien
tgatgggaactgagctaccactggg

SEQ ID NO: 1117008 - DNA, 25 bp, Homo sapien
tccagagcagagttgtcggacaaat

SEQ ID NO: 1117009 - DNA, 25 bp, Homo sapien
tcaggggagagctacccagtcccct

SEQ ID NO: 1117010 - DNA, 25 bp, Homo sapien
cttcacggacactaaaggcactgtg

SEQ ID NO: 1117011 - DNA, 25 bp, Homo sapien
tggtgggaggtgaagatggaccgaa

SEQ ID NO: 1117012 - DNA, 25 bp, Homo sapien
ggtgaagatggaccgaaaacaaata

SEQ ID NO: 1117013 - DNA, 25 bp, Homo sapien
aactgaacggcactattgtctgaca

SEQ ID NO: 1117014 - DNA, 25 bp, Homo sapien
ttgtctgacaaagtcgatggtcgcc

SEQ ID NO: 1117015 - DNA, 25 bp, Homo sapien
gtgaaacacagatagtacatagaag

SEQ ID NO: 1117016 - DNA, 25 bp, Homo sapien
aaaagtctgcaacttcccggtggag

SEQ ID NO: 1117017 - DNA, 25 bp, Homo sapien
ccttattgtttctggcagaactgac

SEQ ID NO: 1117018 - DNA, 25 bp, Homo sapien
tgacacatttgtgcctagcatagtg

SEQ ID NO: 1117019 - DNA, 25 bp, Homo sapien
tgctgttgtccgcagaagggtcaca

SEQ ID NO: 1117020 - DNA, 25 bp, Homo sapien
cagggactctcctgccagtgctgta

SEQ ID NO: 1117021 - DNA, 25 bp, Homo sapien
tacgttaggtttaatgcatcccctg

SEQ ID NO: 1117022 - DNA, 25 bp, Homo sapien
tcttggtcgcagacatacgttaggt

SEQ ID NO: 1117023 - DNA, 25 bp, Homo sapien
taaactatatgcacggctttgtgtc

SEQ ID NO: 1117024 - DNA, 25 bp, Homo sapien
tacaggtagttcaaggccgctctgc

SEQ ID NO: 1117025 - DNA, 25 bp, Homo sapien
gttgtaacaacccactgtccacatg

SEQ ID NO: 1117026 - DNA, 25 bp, Homo sapien
cagcagtaggaggtgaccaggactt

SEQ ID NO: 1117027 - DNA, 25 bp, Homo sapien
cctctccaggcgtacaaaagcatgt

SEQ ID NO: 1117028 - DNA, 25 bp, Homo sapien
ctactccaataccatccagcagtag

SEQ ID NO: 1117029 - DNA, 25 bp, Homo sapien
gtttctataaaccagactgaactgg

SEQ ID NO: 1117030 - DNA, 25 bp, Homo sapien
tcacatgcgttctgctcaaatgcta

SEQ ID NO: 1117031 - DNA, 25 bp, Homo sapien
tctcaaagttaggacaggctatgtc

SEQ ID NO: 1117032 - DNA, 25 bp, Homo sapien
tgtaatgcttgaatcctgatatcct

SEQ ID NO: 1117033 - DNA, 25 bp, Homo sapien
tgttccaaatccacaaccagtattt

SEQ ID NO: 1117034 - DNA, 25 bp, Homo sapien
ccattttaaggctccagtgctccca

SEQ ID NO: 1117035 - DNA, 25 bp, Homo sapien
taactccttgaagtggctctgaaca

SEQ ID NO: 1117036 - DNA, 25 bp, Homo sapien
ccatacttggcagcggatttctcca

SEQ ID NO: 1117037 - DNA, 25 bp, Homo sapien
ccaagtatcgaaggagagagggtca

SEQ ID NO: 1117038 - DNA, 25 bp, Homo sapien
tatcataaaaatgataccgggtatc

SEQ ID NO: 1117039 - DNA, 25 bp, Homo sapien
gtatcatgcagacgagcagtgaggc

SEQ ID NO: 1117040 - DNA, 25 bp, Homo sapien
gagacaggacaaattgtgtccaagt

SEQ ID NO: 1117041 - DNA, 25 bp, Homo sapien
ctgtatatagcttgcttgtagcaga

SEQ ID NO: 1117042 - DNA, 25 bp, Homo sapien
tgtagcagaaaccttcagctctgac

SEQ ID NO: 1117043 - DNA, 25 bp, Homo sapien
tgtatatagcttgcttgtagcagaa

SEQ ID NO: 1117044 - DNA, 25 bp, Homo sapien
ctgacctccgtttcattggctccat

SEQ ID NO: 1117045 - DNA, 25 bp, Homo sapien
ggctccatgatcacatcaattattt

SEQ ID NO: 1117046 - DNA, 25 bp, Homo sapien
cattcttggctccatgatcacatca

SEQ ID NO: 1117047 - DNA, 25 bp, Homo sapien
cttggctccatgatcacatcaatta

SEQ ID NO: 1117048 - DNA, 25 bp, Homo sapien
gttatcattcttggctccatgatca

SEQ ID NO: 1117049 - DNA, 25 bp, Homo sapien
tttgctgatgcagtaagactggaga

SEQ ID NO: 1117050 - DNA, 25 bp, Homo sapien
aggatccagtctggtgcaggcactg

SEQ ID NO: 1117051 - DNA, 25 bp, Homo sapien
aaggatccagtctggtgcaggcact

SEQ ID NO: 1117052 - DNA, 25 bp, Homo sapien
aattctttgctgatgcagtaagact

SEQ ID NO: 1117053 - DNA, 25 bp, Homo sapien
accaaatcagtgtggatgaactcag

SEQ ID NO: 1117054 - DNA, 25 bp, Homo sapien
gaccaaatcagtgtggatgaactca

SEQ ID NO: 1117055 - DNA, 25 bp, Homo sapien
ccaaatcagtgtggatgaactcagt

SEQ ID NO: 1117056 - DNA, 25 bp, Homo sapien
tggactttccccacatcatctgaag

SEQ ID NO: 1117057 - DNA, 25 bp, Homo sapien
catacagattagagccttcggacat

SEQ ID NO: 1117058 - DNA, 25 bp, Homo sapien
atggagatgacgtctgcacatacag

SEQ ID NO: 1117059 - DNA, 25 bp, Homo sapien
aaccgcacacttggacagatggaga

SEQ ID NO: 1117060 - DNA, 25 bp, Homo sapien
taagtcagtgaaggtggtacaacca

SEQ ID NO: 1117061 - DNA, 25 bp, Homo sapien
gtcagtgaaggtggtacaaccatac

SEQ ID NO: 1117062 - DNA, 25 bp, Homo sapien
ttaagtcagtgaaggtggtacaacc

SEQ ID NO: 1117063 - DNA, 25 bp, Homo sapien
aagtcagtgaaggtggtacaaccat

SEQ ID NO: 1117064 - DNA, 25 bp, Homo sapien
taggcacattatgccgttatgtaaa

SEQ ID NO: 1117065 - DNA, 25 bp, Homo sapien
ccctgattagtgacattatgcagtt

SEQ ID NO: 1117066 - DNA, 25 bp, Homo sapien
tatatttcccacagagtaatggggt

SEQ ID NO: 1117067 - DNA, 25 bp, Homo sapien
tctgttatatctaggcacattatgc

SEQ ID NO: 1117068 - DNA, 25 bp, Homo sapien
tcgttttatgtcttccaagcatgcc

SEQ ID NO: 1117069 - DNA, 25 bp, Homo sapien
tatgtcgttttatgtcttccaagca

SEQ ID NO: 1117070 - DNA, 25 bp, Homo sapien
gctgctggggtggttcattcacttc

SEQ ID NO: 1117071 - DNA, 25 bp, Homo sapien
tatgtcttccaagcatgcccagctt

SEQ ID NO: 1117072 - DNA, 25 bp, Homo sapien
atcagcagtggacatgtgacattct

SEQ ID NO: 1117073 - DNA, 25 bp, Homo sapien
ccatcagcagtggacatgtgacatt

SEQ ID NO: 1117074 - DNA, 25 bp, Homo sapien
catcagcagtggacatgtgacattc

SEQ ID NO: 1117075 - DNA, 25 bp, Homo sapien
ccactggctctaagggctacaggca

SEQ ID NO: 1117076 - DNA, 25 bp, Homo sapien
actggctctaagggctacaggcaca

SEQ ID NO: 1117077 - DNA, 25 bp, Homo sapien
cactggctctaagggctacaggcac

SEQ ID NO: 1117078 - DNA, 25 bp, Homo sapien
cctgatgcgcccaaggaagcaggaa

SEQ ID NO: 1117079 - DNA, 25 bp, Homo sapien
ggacccattgactcgattgtctgag

SEQ ID NO: 1117080 - DNA, 25 bp, Homo sapien
aacctagtgttgttctccagcccca

SEQ ID NO: 1117081 - DNA, 25 bp, Homo sapien
ctactggttggcgtaggctgccttc

SEQ ID NO: 1117082 - DNA, 25 bp, Homo sapien
tgccacctcggtacaatttctgctg

SEQ ID NO: 1117083 - DNA, 25 bp, Homo sapien
gaaatctacacagccctgaatggag

SEQ ID NO: 1117084 - DNA, 25 bp, Homo sapien
tattgttttcgctcagggtggaggt

SEQ ID NO: 1117085 - DNA, 25 bp, Homo sapien
gcaagaagcccgttttgccacctcg

SEQ ID NO: 1117086 - DNA, 25 bp, Homo sapien
gcctgtgtttgtcctcgtagcctca

SEQ ID NO: 1117087 - DNA, 25 bp, Homo sapien
taacgtgcactggtgggcacagtgt

SEQ ID NO: 1117088 - DNA, 25 bp, Homo sapien
gcatgtcccaactgttgtcaattta

SEQ ID NO: 1117089 - DNA, 25 bp, Homo sapien
tgtcaatttatcaatgtaacgtgca

SEQ ID NO: 1117090 - DNA, 25 bp, Homo sapien
agtcttcagttaagataagcatgta

SEQ ID NO: 1117091 - DNA, 25 bp, Homo sapien
accgtgtcgagattgctgctgcggc

SEQ ID NO: 1117092 - DNA, 25 bp, Homo sapien
cttggcccagcgatgtgagctgatc

SEQ ID NO: 1117093 - DNA, 25 bp, Homo sapien
taagcatgtaatggatgaagcagcg

SEQ ID NO: 1117094 - DNA, 25 bp, Homo sapien
taaccaaatagttcagactgtgttc

SEQ ID NO: 1117095 - DNA, 25 bp, Homo sapien
actggtctgtaagtgggccggattt

SEQ ID NO: 1117096 - DNA, 25 bp, Homo sapien
gatacgagtagctgtttccaatgtc

SEQ ID NO: 1117097 - DNA, 25 bp, Homo sapien
ttgcatgagaaacaccagatcctgt

SEQ ID NO: 1117098 - DNA, 25 bp, Homo sapien
atcttttccctctccatactcagac

SEQ ID NO: 1117099 - DNA, 25 bp, Homo sapien
acttttgtccaccctgggctgctca

SEQ ID NO: 1117100 - DNA, 25 bp, Homo sapien
ttccctctccatactcagaccccat

SEQ ID NO: 1117101 - DNA, 25 bp, Homo sapien
tttgtccaccctgggctgctcatct

SEQ ID NO: 1117102 - DNA, 25 bp, Homo sapien
gattataatccacctggccattggg

SEQ ID NO: 1117103 - DNA, 25 bp, Homo sapien
cctatatcgttgattctggattctg

SEQ ID NO: 1117104 - DNA, 25 bp, Homo sapien
tcagggaattctcctatatcgttga

SEQ ID NO: 1117105 - DNA, 25 bp, Homo sapien
tccaagggctttatctcttgattat

SEQ ID NO: 1117106 - DNA, 25 bp, Homo sapien
gattctgttctggattctggctttg

SEQ ID NO: 1117107 - DNA, 25 bp, Homo sapien
aaagagatctaatttattggtttct

SEQ ID NO: 1117108 - DNA, 25 bp, Homo sapien
agaagaaacagctgaatgatgacat

SEQ ID NO: 1117109 - DNA, 25 bp, Homo sapien
gattctggctttgccagaagaaaca

SEQ ID NO: 1117110 - DNA, 25 bp, Homo sapien
catttttcacccgagcacagttgcc

SEQ ID NO: 1117111 - DNA, 25 bp, Homo sapien
agttgccaagcaccggcaagatgcc

SEQ ID NO: 1117112 - DNA, 25 bp, Homo sapien
tgttctgattttgcaggcatatcat

SEQ ID NO: 1117113 - DNA, 25 bp, Homo sapien
cttcgacttgcccattgttctgatt

SEQ ID NO: 1117114 - DNA, 25 bp, Homo sapien
gataatcatcaattgtacactcttg

SEQ ID NO: 1117115 - DNA, 25 bp, Homo sapien
actcttgactacactattaatggct

SEQ ID NO: 1117116 - DNA, 25 bp, Homo sapien
cattttgcctggtaacgaacactta

SEQ ID NO: 1117117 - DNA, 25 bp, Homo sapien
tatctgcttatttgaagtgcaaaga

SEQ ID NO: 1117118 - DNA, 25 bp, Homo sapien
ttcttttccaagttgtcatagagca

SEQ ID NO: 1117119 - DNA, 25 bp, Homo sapien
tcttcttttccaagttgtcatagag

SEQ ID NO: 1117120 - DNA, 25 bp, Homo sapien
catcttcttttccaagttgtcatag

SEQ ID NO: 1117121 - DNA, 25 bp, Homo sapien
tcttttccaagttgtcatagagcat

SEQ ID NO: 1117122 - DNA, 25 bp, Homo sapien
gacgttagtaacagccctgtatgca

SEQ ID NO: 1117123 - DNA, 25 bp, Homo sapien
tcatttgccgtgaagagtaggtgac

SEQ ID NO: 1117124 - DNA, 25 bp, Homo sapien
tcatggtaaatttcttgttgatcac

SEQ ID NO: 1117125 - DNA, 25 bp, Homo sapien
gctttcttagttgccaagtggtgac

SEQ ID NO: 1117126 - DNA, 25 bp, Homo sapien
attctggctttcacattcaggacag

SEQ ID NO: 1117127 - DNA, 25 bp, Homo sapien
cacaaaagtaggcatattccatctc

SEQ ID NO: 1117128 - DNA, 25 bp, Homo sapien
atttcattctggctttcacattcag

SEQ ID NO: 1117129 - DNA, 25 bp, Homo sapien
ctttgtgcctaatgtgtatcatttc

SEQ ID NO: 1117130 - DNA, 25 bp, Homo sapien
taacgagtaaaatgacttcttctct

SEQ ID NO: 1117131 - DNA, 25 bp, Homo sapien
aaaagcatctttatgcagcagtaca

SEQ ID NO: 1117132 - DNA, 25 bp, Homo sapien
cagcagtacatttgttacgttgtat

SEQ ID NO: 1117133 - DNA, 25 bp, Homo sapien
tggctcctgcttttaacgagtaaaa

SEQ ID NO: 1117134 - DNA, 25 bp, Homo sapien
tatgtcaaatttcagcccaaagcca

SEQ ID NO: 1117135 - DNA, 25 bp, Homo sapien
ctataatcaaaagttttcagtgatt

SEQ ID NO: 1117136 - DNA, 25 bp, Homo sapien
taatcaaaagttttcagtgattctc

SEQ ID NO: 1117137 - DNA, 25 bp, Homo sapien
tcaaaagttttcagtgattctcctt

SEQ ID NO: 1117138 - DNA, 25 bp, Homo sapien
caaaagttttcagtgattctccttg

SEQ ID NO: 1117139 - DNA, 25 bp, Homo sapien
gctttctttatcactaatccactgg

SEQ ID NO: 1117140 - DNA, 25 bp, Homo sapien
taatccactgggcaaatgctggtaa

SEQ ID NO: 1117141 - DNA, 25 bp, Homo sapien
tatcactaatccactgggcaaatgc

SEQ ID NO: 1117142 - DNA, 25 bp, Homo sapien
cactgggcaaatgctggtaaattaa

SEQ ID NO: 1117143 - DNA, 25 bp, Homo sapien
cagctgtccatgagtctttcttctc

SEQ ID NO: 1117144 - DNA, 25 bp, Homo sapien
gcttctgtttgcttggtcacagctg

SEQ ID NO: 1117145 - DNA, 25 bp, Homo sapien
cacagctgtccatgagtctttcttc

SEQ ID NO: 1117146 - DNA, 25 bp, Homo sapien
tccactgcttctgtttgcttggtca

SEQ ID NO: 1117147 - DNA, 25 bp, Homo sapien
caaatgcttcgtcatattcttcctc

SEQ ID NO: 1117148 - DNA, 25 bp, Homo sapien
ttttcataaagcaaatgcttcgtca

SEQ ID NO: 1117149 - DNA, 25 bp, Homo sapien
cataaagcaaatgcttcgtcatatt

SEQ ID NO: 1117150 - DNA, 25 bp, Homo sapien
aagcaaatgcttcgtcatattcttc

SEQ ID NO: 1117151 - DNA, 25 bp, Homo sapien
gatctttccctacatcaagttcttt

SEQ ID NO: 1117152 - DNA, 25 bp, Homo sapien
ttcttttgggcaaagttgatctttc

SEQ ID NO: 1117153 - DNA, 25 bp, Homo sapien
aaagttgatctttccctacatcaag

SEQ ID NO: 1117154 - DNA, 25 bp, Homo sapien
tgggcaaagttgatctttccctaca

SEQ ID NO: 1117155 - DNA, 25 bp, Homo sapien
ccgattaatgacaggccagaaattt

SEQ ID NO: 1117156 - DNA, 25 bp, Homo sapien
gaagacttctcacgtgctctccgat

SEQ ID NO: 1117157 - DNA, 25 bp, Homo sapien
tgtgagtcactctgcgaagacttct

SEQ ID NO: 1117158 - DNA, 25 bp, Homo sapien
taaaggttgccctaaggccgatgtg

SEQ ID NO: 1117159 - DNA, 25 bp, Homo sapien
cacagtggtcccgttgaaggtcgat

SEQ ID NO: 1117160 - DNA, 25 bp, Homo sapien
ctcctggatccataacagaacttgt

SEQ ID NO: 1117161 - DNA, 25 bp, Homo sapien
cagaacttgtagatctcttccacac

SEQ ID NO: 1117162 - DNA, 25 bp, Homo sapien
cccgttgaaggtcgattgtgtctca

SEQ ID NO: 1117163 - DNA, 25 bp, Homo sapien
tcattgtgcataatctctggtcagc

SEQ ID NO: 1117164 - DNA, 25 bp, Homo sapien
cataatctctggtcagcttcctttc

SEQ ID NO: 1117165 - DNA, 25 bp, Homo sapien
taatctctggtcagcttcctttcat

SEQ ID NO: 1117166 - DNA, 25 bp, Homo sapien
ttcctttcatctgctcctagcctca

SEQ ID NO: 1117167 - DNA, 25 bp, Homo sapien
agtgttgaggacatcatctctggat

SEQ ID NO: 1117168 - DNA, 25 bp, Homo sapien
caatcagtgttgaggacatcatctc

SEQ ID NO: 1117169 - DNA, 25 bp, Homo sapien
cacaatcagtgttgaggacatcatc

SEQ ID NO: 1117170 - DNA, 25 bp, Homo sapien
atcagtgttgaggacatcatctctg

SEQ ID NO: 1117171 - DNA, 25 bp, Homo sapien
caactgatggtccaccagtaaggga

SEQ ID NO: 1117172 - DNA, 25 bp, Homo sapien
ggtccaccagtaagggaagaatata

SEQ ID NO: 1117173 - DNA, 25 bp, Homo sapien
tgatggtccaccagtaagggaagaa

SEQ ID NO: 1117174 - DNA, 25 bp, Homo sapien
gtgacaactgatggtccaccagtaa

SEQ ID NO: 1117175 - DNA, 25 bp, Homo sapien
ttgcttgatggaggattctgacttg

SEQ ID NO: 1117176 - DNA, 25 bp, Homo sapien
gttgcttgatggaggattctgactt

SEQ ID NO: 1117177 - DNA, 25 bp, Homo sapien
tgcttgatggaggattctgacttgc

SEQ ID NO: 1117178 - DNA, 25 bp, Homo sapien
tcccaacatctgagtcctcactcca

SEQ ID NO: 1117179 - DNA, 25 bp, Homo sapien
gagcttcctgggaatttctgctcct

SEQ ID NO: 1117180 - DNA, 25 bp, Homo sapien
caagagcttcctgggaatttctgct

SEQ ID NO: 1117181 - DNA, 25 bp, Homo sapien
agtcctcactccacctccaagagct

SEQ ID NO: 1117182 - DNA, 25 bp, Homo sapien
acattttcaggtccggttgctataa

SEQ ID NO: 1117183 - DNA, 25 bp, Homo sapien
cattttcaggtccggttgctataac

SEQ ID NO: 1117184 - DNA, 25 bp, Homo sapien
ttcaggtccggttgctataacttta

SEQ ID NO: 1117185 - DNA, 25 bp, Homo sapien
attttcaggtccggttgctataact

SEQ ID NO: 1117186 - DNA, 25 bp, Homo sapien
tgtgccatgacatcaagtcgcaggg

SEQ ID NO: 1117187 - DNA, 25 bp, Homo sapien
gacacaagcagcaaaattcttatgg

SEQ ID NO: 1117188 - DNA, 25 bp, Homo sapien
gaagctgggcagacttgtgccatga

SEQ ID NO: 1117189 - DNA, 25 bp, Homo sapien
agttgaactttgaaagaagctgggc

SEQ ID NO: 1117190 - DNA, 25 bp, Homo sapien
taggcgtttataactgtcataaaaa

SEQ ID NO: 1117191 - DNA, 25 bp, Homo sapien
gtcccatgatagacttagatttttt

SEQ ID NO: 1117192 - DNA, 25 bp, Homo sapien
caacctggcagtaaattttgcaata

SEQ ID NO: 1117193 - DNA, 25 bp, Homo sapien
tcataaaaatttagtgtggcatgca

SEQ ID NO: 1117194 - DNA, 25 bp, Homo sapien
gcagtgttaacccagaaatatctca

SEQ ID NO: 1117195 - DNA, 25 bp, Homo sapien
cagggcacagtcataccaggcattc

SEQ ID NO: 1117196 - DNA, 25 bp, Homo sapien
tcatatgaatatcacttggcttcag

SEQ ID NO: 1117197 - DNA, 25 bp, Homo sapien
tcaagaatgacttagccctggtcct

SEQ ID NO: 1117198 - DNA, 25 bp, Homo sapien
gtgccgcatgtctcccttagttttt

SEQ ID NO: 1117199 - DNA, 25 bp, Homo sapien
gatcttgtcagtgccgcatgtctcc

SEQ ID NO: 1117200 - DNA, 25 bp, Homo sapien
aaataatcccagtgaaatcctttga

SEQ ID NO: 1117201 - DNA, 25 bp, Homo sapien
taatcccagtgaaatcctttgattg

SEQ ID NO: 1117202 - DNA, 25 bp, Homo sapien
gaatatctccttttagatcaacatc

SEQ ID NO: 1117203 - DNA, 25 bp, Homo sapien
tctccttttagatcaacatcctcag

SEQ ID NO: 1117204 - DNA, 25 bp, Homo sapien
cttttagatcaacatcctcagacag

SEQ ID NO: 1117205 - DNA, 25 bp, Homo sapien
tttagatcaacatcctcagacagga

SEQ ID NO: 1117206 - DNA, 25 bp, Homo sapien
ggcacccacggttagtagatacgca

SEQ ID NO: 1117207 - DNA, 25 bp, Homo sapien
gatgagcttccttcacagttggagg

SEQ ID NO: 1117208 - DNA, 25 bp, Homo sapien
gagaccccagcaagagtataagtga

SEQ ID NO: 1117209 - DNA, 25 bp, Homo sapien
caaaggcggatgctggtataggaca

SEQ ID NO: 1117210 - DNA, 25 bp, Homo sapien
ccccttcatggacttgatgccaatc

SEQ ID NO: 1117211 - DNA, 25 bp, Homo sapien
tctaccaccactctcacagaaggct

SEQ ID NO: 1117212 - DNA, 25 bp, Homo sapien
ggacttgatgccaatcctacttttc

SEQ ID NO: 1117213 - DNA, 25 bp, Homo sapien
cagaaggctgacctccaatttgtgc

SEQ ID NO: 1117214 - DNA, 25 bp, Homo sapien
tccttgtgcctattacagtggctca

SEQ ID NO: 1117215 - DNA, 25 bp, Homo sapien
gcctccttgtgcctattacagtggc

SEQ ID NO: 1117216 - DNA, 25 bp, Homo sapien
ggagcctccttgtgcctattacagt

SEQ ID NO: 1117217 - DNA, 25 bp, Homo sapien
cttgtgcctattacagtggctcagg

SEQ ID NO: 1117218 - DNA, 25 bp, Homo sapien
ggcacccctacactcattttctatt

SEQ ID NO: 1117219 - DNA, 25 bp, Homo sapien
aaagcagtagcaggcctatccttgg

SEQ ID NO: 1117220 - DNA, 25 bp, Homo sapien
gcacccctacactcattttctattg

SEQ ID NO: 1117221 - DNA, 25 bp, Homo sapien
ttgaaagcagtagcaggcctatcct

SEQ ID NO: 1117222 - DNA, 25 bp, Homo sapien
caaaatgggagacggctaagtctgc

SEQ ID NO: 1117223 - DNA, 25 bp, Homo sapien
gaaggcattcaggttacacagagtg

SEQ ID NO: 1117224 - DNA, 25 bp, Homo sapien
gatctgctgggctaaggatgctttc

SEQ ID NO: 1117225 - DNA, 25 bp, Homo sapien
tcttccttgatcagtggactgcagc

SEQ ID NO: 1117226 - DNA, 25 bp, Homo sapien
tggcctgtctttgtttaacatatga

SEQ ID NO: 1117227 - DNA, 25 bp, Homo sapien
gatggggaagcgctatgttttggtg

SEQ ID NO: 1117228 - DNA, 25 bp, Homo sapien
atcatatttatcaaaaggtttaagg

SEQ ID NO: 1117229 - DNA, 25 bp, Homo sapien
aggttggcctgtctttgtttaacat

SEQ ID NO: 1117230 - DNA, 25 bp, Homo sapien
gggaccacttagcttaagagaatac

SEQ ID NO: 1117231 - DNA, 25 bp, Homo sapien
aatcccatgtgtttctattgagaca

SEQ ID NO: 1117232 - DNA, 25 bp, Homo sapien
ccaatggttaacattctgcttctga

SEQ ID NO: 1117233 - DNA, 25 bp, Homo sapien
tctttgacatcaggcgcccagtcag

SEQ ID NO: 1117234 - DNA, 25 bp, Homo sapien
tatctagatgatacgctgacagcat

SEQ ID NO: 1117235 - DNA, 25 bp, Homo sapien
gaggctgtgcaatgctcctttctat

SEQ ID NO: 1117236 - DNA, 25 bp, Homo sapien
aaacctgagcgttcattttctaatc

SEQ ID NO: 1117237 - DNA, 25 bp, Homo sapien
aatgtcattagtcttccttcacaga

SEQ ID NO: 1117238 - DNA, 25 bp, Homo sapien
tcaatcccagtgtaattaactccat

SEQ ID NO: 1117239 - DNA, 25 bp, Homo sapien
caatcctcattgctcattgctcctg

SEQ ID NO: 1117240 - DNA, 25 bp, Homo sapien
ccaatcctcattgctcattgctcct

SEQ ID NO: 1117241 - DNA, 25 bp, Homo sapien
aggatctgtgactgcttcagtcacc

SEQ ID NO: 1117242 - DNA, 25 bp, Homo sapien
ttcaggatctgtgactgcttcagtc

SEQ ID NO: 1117243 - DNA, 25 bp, Homo sapien
tcaggatctgtgactgcttcagtca

SEQ ID NO: 1117244 - DNA, 25 bp, Homo sapien
caggatctgtgactgcttcagtcac

SEQ ID NO: 1117245 - DNA, 25 bp, Homo sapien
acttttcacttagggcctcaggctg

SEQ ID NO: 1117246 - DNA, 25 bp, Homo sapien
gctgaagttgaactaggctcccaaa

SEQ ID NO: 1117247 - DNA, 25 bp, Homo sapien
gttgaactaggctcccaaaggtgaa

SEQ ID NO: 1117248 - DNA, 25 bp, Homo sapien
aacttttcacttagggcctcaggct

SEQ ID NO: 1117249 - DNA, 25 bp, Homo sapien
ttgaatctggcccaggtcaatagcc

SEQ ID NO: 1117250 - DNA, 25 bp, Homo sapien
agtcttggaatcaaagtccgtggag

SEQ ID NO: 1117251 - DNA, 25 bp, Homo sapien
gaatcaaagtccgtggagcccttct

SEQ ID NO: 1117252 - DNA, 25 bp, Homo sapien
caggtcaatagccagtaacaggaaa

SEQ ID NO: 1117253 - DNA, 25 bp, Homo sapien
ctgccagcaacaggaccaagtacaa

SEQ ID NO: 1117254 - DNA, 25 bp, Homo sapien
tgccagcaacaggaccaagtacaaa

SEQ ID NO: 1117255 - DNA, 25 bp, Homo sapien
gccagcaacaggaccaagtacaaag

SEQ ID NO: 1117256 - DNA, 25 bp, Homo sapien
tgagagtggcagttacatcaccagg

SEQ ID NO: 1117257 - DNA, 25 bp, Homo sapien
ttgaggaatgcatgccgggttgagc

SEQ ID NO: 1117258 - DNA, 25 bp, Homo sapien
aagttctctctcagaggtacagtcg

SEQ ID NO: 1117259 - DNA, 25 bp, Homo sapien
ctcagaggtacagtcgagtttcagg

SEQ ID NO: 1117260 - DNA, 25 bp, Homo sapien
agtttgggagctgaatggcgagggc

SEQ ID NO: 1117261 - DNA, 25 bp, Homo sapien
taagtttgggagctgaatggcgagg

SEQ ID NO: 1117262 - DNA, 25 bp, Homo sapien
aataagtttgggagctgaatggcga

SEQ ID NO: 1117263 - DNA, 25 bp, Homo sapien
tttgggagctgaatggcgagggcac

SEQ ID NO: 1117264 - DNA, 25 bp, Homo sapien
ctgagctcctgcgtgttgaaagatt

SEQ ID NO: 1117265 - DNA, 25 bp, Homo sapien
gagctcctgcgtgttgaaagatttt

SEQ ID NO: 1117266 - DNA, 25 bp, Homo sapien
tgagctcctgcgtgttgaaagattt

SEQ ID NO: 1117267 - DNA, 25 bp, Homo sapien
agctcctgcgtgttgaaagattttt

SEQ ID NO: 1117268 - DNA, 25 bp, Homo sapien
gcagcatgaagtgactgttatagct

SEQ ID NO: 1117269 - DNA, 25 bp, Homo sapien
tggttgggaacctgtgtgctgcagc

SEQ ID NO: 1117270 - DNA, 25 bp, Homo sapien
ctgcagcatgaagtgactgttatag

SEQ ID NO: 1117271 - DNA, 25 bp, Homo sapien
ctctggagcccctggttgggaacct

SEQ ID NO: 1117272 - DNA, 25 bp, Homo sapien
ccctttttctagttctataggacat

SEQ ID NO: 1117273 - DNA, 25 bp, Homo sapien
tccctttttctagttctataggaca

SEQ ID NO: 1117274 - DNA, 25 bp, Homo sapien
tgtctctcttaatctgcccatttca

SEQ ID NO: 1117275 - DNA, 25 bp, Homo sapien
gtctctcttaatctgcccatttcaa

SEQ ID NO: 1117276 - DNA, 25 bp, Homo sapien
cttgggagacctctgtcttgtttcc

SEQ ID NO: 1117277 - DNA, 25 bp, Homo sapien
taatgtgtgatagacaatctattgg

SEQ ID NO: 1117278 - DNA, 25 bp, Homo sapien
gataaaatgccgagtccctgctctc

SEQ ID NO: 1117279 - DNA, 25 bp, Homo sapien
gtttttcaacacatagtgtgaagta

SEQ ID NO: 1117280 - DNA, 25 bp, Homo sapien
tcatgttgatgagagtcaaacgaag

SEQ ID NO: 1117281 - DNA, 25 bp, Homo sapien
tagattctaaaatcataagactgga

SEQ ID NO: 1117282 - DNA, 25 bp, Homo sapien
tttgaatgaaagatggcttcggttt

SEQ ID NO: 1117283 - DNA, 25 bp, Homo sapien
gatccctctgtcatgagcactttga

SEQ ID NO: 1117284 - DNA, 25 bp, Homo sapien
tctgctgtctatgtaaagtaatgga

SEQ ID NO: 1117285 - DNA, 25 bp, Homo sapien
tgatacattcagtgccttgcctctc

SEQ ID NO: 1117286 - DNA, 25 bp, Homo sapien
tctggcaagatgatctctttggttg

SEQ ID NO: 1117287 - DNA, 25 bp, Homo sapien
cttggttggcgatgactgtttcctc

SEQ ID NO: 1117288 - DNA, 25 bp, Homo sapien
gatcatcctcagataagctttgtag

SEQ ID NO: 1117289 - DNA, 25 bp, Homo sapien
cagtattagagcattgaggcagagg

SEQ ID NO: 1117290 - DNA, 25 bp, Homo sapien
gatactttaccaagtggacctgaca

SEQ ID NO: 1117291 - DNA, 25 bp, Homo sapien
gggacacttgaacaccccactgaca

SEQ ID NO: 1117292 - DNA, 25 bp, Homo sapien
gacagacacctgcagaacacttcac

SEQ ID NO: 1117293 - DNA, 25 bp, Homo sapien
catgatagcagcagaccgttccttg

SEQ ID NO: 1117294 - DNA, 25 bp, Homo sapien
ttcagccatgatagcagcagaccgt

SEQ ID NO: 1117295 - DNA, 25 bp, Homo sapien
gatagcagcagaccgttccttgagc

SEQ ID NO: 1117296 - DNA, 25 bp, Homo sapien
agcagaccgttccttgagccttcca

SEQ ID NO: 1117297 - DNA, 25 bp, Homo sapien
ttcagttggttctgtatctgccaaa

SEQ ID NO: 1117298 - DNA, 25 bp, Homo sapien
tcagttggttctgtatctgccaaag

SEQ ID NO: 1117299 - DNA, 25 bp, Homo sapien
tttcagttggttctgtatctgccaa

SEQ ID NO: 1117300 - DNA, 25 bp, Homo sapien
cagttggttctgtatctgccaaagg

SEQ ID NO: 1117301 - DNA, 25 bp, Homo sapien
ttataccaagagatcagaagctggt

SEQ ID NO: 1117302 - DNA, 25 bp, Homo sapien
tggagtcaatgagtctgccccttct

SEQ ID NO: 1117303 - DNA, 25 bp, Homo sapien
aagctggtaagacacccaagctgga

SEQ ID NO: 1117304 - DNA, 25 bp, Homo sapien
agagatcagaagctggtaagacacc

SEQ ID NO: 1117305 - DNA, 25 bp, Homo sapien
catggcagagcgaatcaggtggcat

SEQ ID NO: 1117306 - DNA, 25 bp, Homo sapien
gagcatggcagagcgaatcaggtgg

SEQ ID NO: 1117307 - DNA, 25 bp, Homo sapien
aagagcatggcagagcgaatcaggt

SEQ ID NO: 1117308 - DNA, 25 bp, Homo sapien
gcatggcagagcgaatcaggtggca

SEQ ID NO: 1117309 - DNA, 25 bp, Homo sapien
catatttaggaatcctgtcatatac

SEQ ID NO: 1117310 - DNA, 25 bp, Homo sapien
atatttaggaatcctgtcatataca

SEQ ID NO: 1117311 - DNA, 25 bp, Homo sapien
ctctcatatttaggaatcctgtcat

SEQ ID NO: 1117312 - DNA, 25 bp, Homo sapien
ctcatatttaggaatcctgtcatat

SEQ ID NO: 1117313 - DNA, 25 bp, Homo sapien
atatatgctcctctgctacatctga

SEQ ID NO: 1117314 - DNA, 25 bp, Homo sapien
tacatctgacaccaagcttcccttg

SEQ ID NO: 1117315 - DNA, 25 bp, Homo sapien
tctgctacatctgacaccaagcttc

SEQ ID NO: 1117316 - DNA, 25 bp, Homo sapien
gtatatatgctcctctgctacatct

SEQ ID NO: 1117317 - DNA, 25 bp, Homo sapien
gagtggactcctaggtacaggtctc

SEQ ID NO: 1117318 - DNA, 25 bp, Homo sapien
catgtctaagtgctacaggctcaga

SEQ ID NO: 1117319 - DNA, 25 bp, Homo sapien
tcgggtaggccaatgcatgtctaag

SEQ ID NO: 1117320 - DNA, 25 bp, Homo sapien
tcttgcagccaagaatcgggtaggc

SEQ ID NO: 1117321 - DNA, 25 bp, Homo sapien
tcctcttcctggtaaggccaccagg

SEQ ID NO: 1117322 - DNA, 25 bp, Homo sapien
taggaaggaaataggcatgtagcat

SEQ ID NO: 1117323 - DNA, 25 bp, Homo sapien
agcttccctgtggaatgtgtaggaa

SEQ ID NO: 1117324 - DNA, 25 bp, Homo sapien
tgcttctgacagtcaagcttccctg

SEQ ID NO: 1117325 - DNA, 25 bp, Homo sapien
tcagatgtatatctattacacagga

SEQ ID NO: 1117326 - DNA, 25 bp, Homo sapien
ggtggcttgttagtggtacaaataa

SEQ ID NO: 1117327 - DNA, 25 bp, Homo sapien
aacacggtgatgtagttaggtggct

SEQ ID NO: 1117328 - DNA, 25 bp, Homo sapien
cagctagttgggaaaattgacatct

SEQ ID NO: 1117329 - DNA, 25 bp, Homo sapien
tggtcaccgtaatcatgactgaaac

SEQ ID NO: 1117330 - DNA, 25 bp, Homo sapien
ttgattgatcatggtcaccgtaatc

SEQ ID NO: 1117331 - DNA, 25 bp, Homo sapien
tgtaaaacagccgtttctctggcct

SEQ ID NO: 1117332 - DNA, 25 bp, Homo sapien
tataaatcctattcccatgaacaaa

SEQ ID NO: 1117333 - DNA, 25 bp, Homo sapien
gcctgttgatataatccagagctgc

SEQ ID NO: 1117334 - DNA, 25 bp, Homo sapien
ctttaagggataattgtgggtgcat

SEQ ID NO: 1117335 - DNA, 25 bp, Homo sapien
agagctgccacagtggtgcaacccc

SEQ ID NO: 1117336 - DNA, 25 bp, Homo sapien
ggtgcaacccctgattatatgttca

SEQ ID NO: 1117337 - DNA, 25 bp, Homo sapien
atcagtcctgctctcaaacaggctt

SEQ ID NO: 1117338 - DNA, 25 bp, Homo sapien
gggagctactttattagtgttacaa

SEQ ID NO: 1117339 - DNA, 25 bp, Homo sapien
gagaagccatggtaaatgaatgacg

SEQ ID NO: 1117340 - DNA, 25 bp, Homo sapien
tgaatgacgtttgagctaggtgtga

SEQ ID NO: 1117341 - DNA, 25 bp, Homo sapien
aagcacatttagaacaagcatttct

SEQ ID NO: 1117342 - DNA, 25 bp, Homo sapien
tcgaaattcctgatgatatgggcaa

SEQ ID NO: 1117343 - DNA, 25 bp, Homo sapien
gagccttcataatatcaggactgac

SEQ ID NO: 1117344 - DNA, 25 bp, Homo sapien
cagatgagtggaattgcagcccttt

SEQ ID NO: 1117345 - DNA, 25 bp, Homo sapien
ggactgacatttcgaactgagctat

SEQ ID NO: 1117346 - DNA, 25 bp, Homo sapien
ggaacactaaggtaaaggcatggag

SEQ ID NO: 1117347 - DNA, 25 bp, Homo sapien
acactaaggtaaaggcatggagaca

SEQ ID NO: 1117348 - DNA, 25 bp, Homo sapien
acccctcctcgaggctctccttctc

SEQ ID NO: 1117349 - DNA, 25 bp, Homo sapien
tcaggaacactaaggtaaaggcatg

SEQ ID NO: 1117350 - DNA, 25 bp, Homo sapien
tgctgttaacggttttccgtatctc

SEQ ID NO: 1117351 - DNA, 25 bp, Homo sapien
gctgttaacggttttccgtatctca

SEQ ID NO: 1117352 - DNA, 25 bp, Homo sapien
gaaggtggagcatatccagaggaca

SEQ ID NO: 1117353 - DNA, 25 bp, Homo sapien
agcattcgccggcagaatgtttgta

SEQ ID NO: 1117354 - DNA, 25 bp, Homo sapien
tgactggaatagcattcgccggcag

SEQ ID NO: 1117355 - DNA, 25 bp, Homo sapien
tggaatagcattcgccggcagaatg

SEQ ID NO: 1117356 - DNA, 25 bp, Homo sapien
gcattcgccggcagaatgtttgtag

SEQ ID NO: 1117357 - DNA, 25 bp, Homo sapien
ttgcttggcgctctgtggcagctgc

SEQ ID NO: 1117358 - DNA, 25 bp, Homo sapien
tggcttctggtagttccgtgaaacg

SEQ ID NO: 1117359 - DNA, 25 bp, Homo sapien
aatcatcatccttgcttggcgctct

SEQ ID NO: 1117360 - DNA, 25 bp, Homo sapien
tccgtgaaacgtgtgggcagaagaa

SEQ ID NO: 1117361 - DNA, 25 bp, Homo sapien
tgtctgcactgtgtgactgtcagaa

SEQ ID NO: 1117362 - DNA, 25 bp, Homo sapien
tctgcactgtgtgactgtcagaatg

SEQ ID NO: 1117363 - DNA, 25 bp, Homo sapien
cttgtctgcactgtgtgactgtcag

SEQ ID NO: 1117364 - DNA, 25 bp, Homo sapien
tcttgtctgcactgtgtgactgtca

SEQ ID NO: 1117365 - DNA, 25 bp, Homo sapien
tgagcaatgccgataacaactagcc

SEQ ID NO: 1117366 - DNA, 25 bp, Homo sapien
ccaagtgactgatggtgctgctgaa

SEQ ID NO: 1117367 - DNA, 25 bp, Homo sapien
ggtctcacacagagccatcctcaat

SEQ ID NO: 1117368 - DNA, 25 bp, Homo sapien
ctcaatccatggagaacggccagca

SEQ ID NO: 1117369 - DNA, 25 bp, Homo sapien
attgattgcatacacatttgactga

SEQ ID NO: 1117370 - DNA, 25 bp, Homo sapien
ccagacttgtgtgagcaccttttct

SEQ ID NO: 1117371 - DNA, 25 bp, Homo sapien
tgaaggactaactggttccactggt

SEQ ID NO: 1117372 - DNA, 25 bp, Homo sapien
atttgactgaaggactaactggttc

SEQ ID NO: 1117373 - DNA, 25 bp, Homo sapien
agttgctgtattttgagctagtcca

SEQ ID NO: 1117374 - DNA, 25 bp, Homo sapien
tctgggctgcattagttgctgtatt

SEQ ID NO: 1117375 - DNA, 25 bp, Homo sapien
cattagttgctgtattttgagctag

SEQ ID NO: 1117376 - DNA, 25 bp, Homo sapien
ggctgcattagttgctgtattttga

SEQ ID NO: 1117377 - DNA, 25 bp, Homo sapien
ggtcacaaataagaaggctgagctc

SEQ ID NO: 1117378 - DNA, 25 bp, Homo sapien
ggcacaatcatgtcttgacacgtca

SEQ ID NO: 1117379 - DNA, 25 bp, Homo sapien
tctgagagttgttgaactgtaagtc

SEQ ID NO: 1117380 - DNA, 25 bp, Homo sapien
ttgttgaactgtaagtcccaaatgg

SEQ ID NO: 1117381 - DNA, 25 bp, Homo sapien
atacccatatggataagcttgaacc

SEQ ID NO: 1117382 - DNA, 25 bp, Homo sapien
tacccatatggataagcttgaacca

SEQ ID NO: 1117383 - DNA, 25 bp, Homo sapien
ggataagcttgaaccatacacatat

SEQ ID NO: 1117384 - DNA, 25 bp, Homo sapien
catatggataagcttgaaccataca

SEQ ID NO: 1117385 - DNA, 25 bp, Homo sapien
gggatagcattatacctcatataat

SEQ ID NO: 1117386 - DNA, 25 bp, Homo sapien
ctatggggatagcattatacctcat

SEQ ID NO: 1117387 - DNA, 25 bp, Homo sapien
gcattatacctcatataatggacag

SEQ ID NO: 1117388 - DNA, 25 bp, Homo sapien
ttatacctcatataatggacaggtt

SEQ ID NO: 1117389 - DNA, 25 bp, Homo sapien
gacaccctgcaagtccactgtggaa

SEQ ID NO: 1117390 - DNA, 25 bp, Homo sapien
ctgacaccctgcaagtccactgtgg

SEQ ID NO: 1117391 - DNA, 25 bp, Homo sapien
gcttgggtcctgtacctgacaccct

SEQ ID NO: 1117392 - DNA, 25 bp, Homo sapien
ccccactgttgctgcttgggtcctg

SEQ ID NO: 1117393 - DNA, 25 bp, Homo sapien
ttctgcgggattcctttcaaggctt

SEQ ID NO: 1117394 - DNA, 25 bp, Homo sapien
tcaagcaccaactgtccagtggtga

SEQ ID NO: 1117395 - DNA, 25 bp, Homo sapien
aacttcagtccgagcttctgcggga

SEQ ID NO: 1117396 - DNA, 25 bp, Homo sapien
ttctgctgccagaacaacttcagtc

SEQ ID NO: 1117397 - DNA, 25 bp, Homo sapien
ggaagcttgtgcctttgggagcaca

SEQ ID NO: 1117398 - DNA, 25 bp, Homo sapien
gggcttttgaagttgaagctgctct

SEQ ID NO: 1117399 - DNA, 25 bp, Homo sapien
ccaatgaagagagccttggaagctt

SEQ ID NO: 1117400 - DNA, 25 bp, Homo sapien
gagcacagcaagaggaaggcatcct

SEQ ID NO: 1117401 - DNA, 25 bp, Homo sapien
cattcagcggctgtaaattcagcct

SEQ ID NO: 1117402 - DNA, 25 bp, Homo sapien
cacattcagcggctgtaaattcagc

SEQ ID NO: 1117403 - DNA, 25 bp, Homo sapien
atattgcacattcagcggctgtaaa

SEQ ID NO: 1117404 - DNA, 25 bp, Homo sapien
cagcggctgtaaattcagcctgtat

SEQ ID NO: 1117405 - DNA, 25 bp, Homo sapien
gcctaccaggagacatgctcaagaa

SEQ ID NO: 1117406 - DNA, 25 bp, Homo sapien
catgctcaagaaggcttcctgttga

SEQ ID NO: 1117407 - DNA, 25 bp, Homo sapien
gaatgacttagatccctttagccta

SEQ ID NO: 1117408 - DNA, 25 bp, Homo sapien
ttcaccctcggcgaatgacttagat

SEQ ID NO: 1117409 - DNA, 25 bp, Homo sapien
agcggcacagagactcgttcagggt

SEQ ID NO: 1117410 - DNA, 25 bp, Homo sapien
gcacagagactcgttcagggttcag

SEQ ID NO: 1117411 - DNA, 25 bp, Homo sapien
tcgttcagggttcagtattaacctg

SEQ ID NO: 1117412 - DNA, 25 bp, Homo sapien
cagagactcgttcagggttcagtat

SEQ ID NO: 1117413 - DNA, 25 bp, Homo sapien
tctgctcatctggagtcagtgaatc

SEQ ID NO: 1117414 - DNA, 25 bp, Homo sapien
tggtgagctctgctcatctggagtc

SEQ ID NO: 1117415 - DNA, 25 bp, Homo sapien
gctctgctcatctggagtcagtgaa

SEQ ID NO: 1117416 - DNA, 25 bp, Homo sapien
tgctcatctggagtcagtgaatcct

SEQ ID NO: 1117417 - DNA, 25 bp, Homo sapien
ggatctcctacacccaatcccccat

SEQ ID NO: 1117418 - DNA, 25 bp, Homo sapien
ttatggatctcctacacccaatccc

SEQ ID NO: 1117419 - DNA, 25 bp, Homo sapien
gatctcctacacccaatcccccatc

SEQ ID NO: 1117420 - DNA, 25 bp, Homo sapien
atggatctcctacacccaatccccc

SEQ ID NO: 1117421 - DNA, 25 bp, Homo sapien
ctgtggttagggatactccattaac

SEQ ID NO: 1117422 - DNA, 25 bp, Homo sapien
tagttctctgatgtgttctgacaga

SEQ ID NO: 1117423 - DNA, 25 bp, Homo sapien
tactccattaactttgtctgtcatc

SEQ ID NO: 1117424 - DNA, 25 bp, Homo sapien
ttattttccctagtatccagcagaa

SEQ ID NO: 1117425 - DNA, 25 bp, Homo sapien
actggattgtaagcatgaatatatg

SEQ ID NO: 1117426 - DNA, 25 bp, Homo sapien
atatatgtgccgaatgtgttggctg

SEQ ID NO: 1117427 - DNA, 25 bp, Homo sapien
catgaatatatgtgccgaatgtgtt

SEQ ID NO: 1117428 - DNA, 25 bp, Homo sapien
catggatcatttactggattgtaag

SEQ ID NO: 1117429 - DNA, 25 bp, Homo sapien
gaatgagtgtcatgtgaataactat

SEQ ID NO: 1117430 - DNA, 25 bp, Homo sapien
gagtgtcatgtgaataactatttct

SEQ ID NO: 1117431 - DNA, 25 bp, Homo sapien
gagaatgagtgtcatgtgaataact

SEQ ID NO: 1117432 - DNA, 25 bp, Homo sapien
tgatgagaatgagtgtcatgtgaat

SEQ ID NO: 1117433 - DNA, 25 bp, Homo sapien
gattaattttaaggacgcattcaaa

SEQ ID NO: 1117434 - DNA, 25 bp, Homo sapien
gacgcattcaaagacgtttcctcca

SEQ ID NO: 1117435 - DNA, 25 bp, Homo sapien
aggacgcattcaaagacgtttcctc

SEQ ID NO: 1117436 - DNA, 25 bp, Homo sapien
gcattcaaagacgtttcctccataa

SEQ ID NO: 1117437 - DNA, 25 bp, Homo sapien
agcatgcagtagtttggctatgaat

SEQ ID NO: 1117438 - DNA, 25 bp, Homo sapien
cagtagtttggctatgaatcataac

SEQ ID NO: 1117439 - DNA, 25 bp, Homo sapien
catgcagtagtttggctatgaatca

SEQ ID NO: 1117440 - DNA, 25 bp, Homo sapien
agtttggctatgaatcataacttct

SEQ ID NO: 1117441 - DNA, 25 bp, Homo sapien
gcatttctagaacaccacctgagga

SEQ ID NO: 1117442 - DNA, 25 bp, Homo sapien
cacctgaggatttggtcacgtcttc

SEQ ID NO: 1117443 - DNA, 25 bp, Homo sapien
cacgtcttcatttatgggtgaataa

SEQ ID NO: 1117444 - DNA, 25 bp, Homo sapien
cactgatgggccctctgttgctgca

SEQ ID NO: 1117445 - DNA, 25 bp, Homo sapien
gtttccttaagtccaccattacaga

SEQ ID NO: 1117446 - DNA, 25 bp, Homo sapien
cgaggcactttaagagttgattgac

SEQ ID NO: 1117447 - DNA, 25 bp, Homo sapien
gatttgacaagaatgacgaggcact

SEQ ID NO: 1117448 - DNA, 25 bp, Homo sapien
ttctgccaagaaacattaaggctga

SEQ ID NO: 1117449 - DNA, 25 bp, Homo sapien
cattagcctggataagccccagagc

SEQ ID NO: 1117450 - DNA, 25 bp, Homo sapien
ccagtaagccctggtgctgccaaga

SEQ ID NO: 1117451 - DNA, 25 bp, Homo sapien
gccccagagcatatgaagagctgaa

SEQ ID NO: 1117452 - DNA, 25 bp, Homo sapien
actgtgatactccattagcctggat

SEQ ID NO: 1117453 - DNA, 25 bp, Homo sapien
gggcttcatttcttagagtgacatg

SEQ ID NO: 1117454 - DNA, 25 bp, Homo sapien
catttcttagagtgacatgtgccat

SEQ ID NO: 1117455 - DNA, 25 bp, Homo sapien
gcttcatttcttagagtgacatgtg

SEQ ID NO: 1117456 - DNA, 25 bp, Homo sapien
ttcatttcttagagtgacatgtgcc

SEQ ID NO: 1117457 - DNA, 25 bp, Homo sapien
cagacttaggaaggttggcttgagc

SEQ ID NO: 1117458 - DNA, 25 bp, Homo sapien
tgcatgcatgcactgggaacagact

SEQ ID NO: 1117459 - DNA, 25 bp, Homo sapien
gtaaagggttacacattctaggcag

SEQ ID NO: 1117460 - DNA, 25 bp, Homo sapien
gaatgcgagagtcttgaagaagtcc

SEQ ID NO: 1117461 - DNA, 25 bp, Homo sapien
ggtttggcagtactggccctgattc

SEQ ID NO: 1117462 - DNA, 25 bp, Homo sapien
gccctgattctcctacttttctcta

SEQ ID NO: 1117463 - DNA, 25 bp, Homo sapien
ctgggtttggcagtactggccctga

SEQ ID NO: 1117464 - DNA, 25 bp, Homo sapien
tttggcagtactggccctgattctc

SEQ ID NO: 1117465 - DNA, 25 bp, Homo sapien
gaaaggtgagtgaattggtccagcc

SEQ ID NO: 1117466 - DNA, 25 bp, Homo sapien
tagaaaggtgagtgaattggtccag

SEQ ID NO: 1117467 - DNA, 25 bp, Homo sapien
aaaggtgagtgaattggtccagccc

SEQ ID NO: 1117468 - DNA, 25 bp, Homo sapien
cttagaaaggtgagtgaattggtcc

SEQ ID NO: 1117469 - DNA, 25 bp, Homo sapien
tgtgagggatgaattgtaagttttc

SEQ ID NO: 1117470 - DNA, 25 bp, Homo sapien
tctgcttacttgtggtttctgtgct

SEQ ID NO: 1117471 - DNA, 25 bp, Homo sapien
ttacttgtggtttctgtgctattaa

SEQ ID NO: 1117472 - DNA, 25 bp, Homo sapien
ttcttgtgagggatgaattgtaagt

SEQ ID NO: 1117473 - DNA, 25 bp, Homo sapien
atgctttaagttgcaaggcatttag

SEQ ID NO: 1117474 - DNA, 25 bp, Homo sapien
ctgcttcttccagctattcatatag

SEQ ID NO: 1117475 - DNA, 25 bp, Homo sapien
tgctttaagttgcaaggcatttaga

SEQ ID NO: 1117476 - DNA, 25 bp, Homo sapien
tgcttcttccagctattcatatagt

SEQ ID NO: 1117477 - DNA, 25 bp, Homo sapien
atgaagccaaggagcttgctgccaa

SEQ ID NO: 1117478 - DNA, 25 bp, Homo sapien
tgacagcatgaagccaaggagcttg

SEQ ID NO: 1117479 - DNA, 25 bp, Homo sapien
acagcatgaagccaaggagcttgct

SEQ ID NO: 1117480 - DNA, 25 bp, Homo sapien
agcatgaagccaaggagcttgctgc

SEQ ID NO: 1117481 - DNA, 25 bp, Homo sapien
cttaattctatttctgagtctataa

SEQ ID NO: 1117482 - DNA, 25 bp, Homo sapien
gggatggaatgatgaagactcatgg

SEQ ID NO: 1117483 - DNA, 25 bp, Homo sapien
gatggaatgatgaagactcatggat

SEQ ID NO: 1117484 - DNA, 25 bp, Homo sapien
ggatggaatgatgaagactcatgga

SEQ ID NO: 1117485 - DNA, 25 bp, Homo sapien
taaaagaagcgtctcatactgtagc

SEQ ID NO: 1117486 - DNA, 25 bp, Homo sapien
ggcttttatcaaccactgcatctct

SEQ ID NO: 1117487 - DNA, 25 bp, Homo sapien
cccagttcatctgtctatagggcag

SEQ ID NO: 1117488 - DNA, 25 bp, Homo sapien
caatgtaaatgtatgccagcgtgct

SEQ ID NO: 1117489 - DNA, 25 bp, Homo sapien
gttattataaaagtctcggaagctc

SEQ ID NO: 1117490 - DNA, 25 bp, Homo sapien
tattataaaagtctcggaagctcat

SEQ ID NO: 1117491 - DNA, 25 bp, Homo sapien
tgttgattcaaggttattataaaag

SEQ ID NO: 1117492 - DNA, 25 bp, Homo sapien
tcaaggttattataaaagtctcgga

SEQ ID NO: 1117493 - DNA, 25 bp, Homo sapien
cagtgtgcccctgctggggggtgcc

SEQ ID NO: 1117494 - DNA, 25 bp, Homo sapien
tcggtgtgtatgtcctttctgttag

SEQ ID NO: 1117495 - DNA, 25 bp, Homo sapien
cggtgtgtatgtcctttctgttagt

SEQ ID NO: 1117496 - DNA, 25 bp, Homo sapien
tgtgcccctgctggggggtgcctcc

SEQ ID NO: 1117497 - DNA, 25 bp, Homo sapien
tgagcttgtcattagtagattagtt

SEQ ID NO: 1117498 - DNA, 25 bp, Homo sapien
caaagccttctgttgaggatgagtt

SEQ ID NO: 1117499 - DNA, 25 bp, Homo sapien
ttgtcattagtagattagttgctgc

SEQ ID NO: 1117500 - DNA, 25 bp, Homo sapien
gcttgtcattagtagattagttgct

SEQ ID NO: 1117501 - DNA, 25 bp, Homo sapien
tgataatagactctgtgcccttctt

SEQ ID NO: 1117502 - DNA, 25 bp, Homo sapien
ttctttttggagtcagcagttgccc

SEQ ID NO: 1117503 - DNA, 25 bp, Homo sapien
tactgtaaaaaataggacacctcag

SEQ ID NO: 1117504 - DNA, 25 bp, Homo sapien
gacacctcagtttttgggtaatgaa

SEQ ID NO: 1117505 - DNA, 25 bp, Homo sapien
ccactttgaggggtttatatagcct

SEQ ID NO: 1117506 - DNA, 25 bp, Homo sapien
tatagcctctgaatcctgtatatca

SEQ ID NO: 1117507 - DNA, 25 bp, Homo sapien
tgaagctctcacagttgtttccttt

SEQ ID NO: 1117508 - DNA, 25 bp, Homo sapien
gaatatcagggatgttggatttaca

SEQ ID NO: 1117509 - DNA, 25 bp, Homo sapien
tcaagcaggagtgtactgagtgcct

SEQ ID NO: 1117510 - DNA, 25 bp, Homo sapien
gattttgtgccttggcatttaaatg

SEQ ID NO: 1117511 - DNA, 25 bp, Homo sapien
aatatccattccaatcaagcaggag

SEQ ID NO: 1117512 - DNA, 25 bp, Homo sapien
catctgtagggacatattatgtaca

SEQ ID NO: 1117513 - DNA, 25 bp, Homo sapien
cacctgaatcatggatcatcttttc

SEQ ID NO: 1117514 - DNA, 25 bp, Homo sapien
ttcacctgaatcatggatcatcttt

SEQ ID NO: 1117515 - DNA, 25 bp, Homo sapien
gaacatgccgagcataattctccat

SEQ ID NO: 1117516 - DNA, 25 bp, Homo sapien
ttttctggaacatgccgagcataat

SEQ ID NO: 1117517 - DNA, 25 bp, Homo sapien
ctttgtgggttgctttctctttcct

SEQ ID NO: 1117518 - DNA, 25 bp, Homo sapien
agggaattggtggggtgggaagcat

SEQ ID NO: 1117519 - DNA, 25 bp, Homo sapien
cacctggatttatcatttcgaaccg

SEQ ID NO: 1117520 - DNA, 25 bp, Homo sapien
gaaccgttcccacattctattcatt

SEQ ID NO: 1117521 - DNA, 25 bp, Homo sapien
ttgaaactcgttctatcacctggat

SEQ ID NO: 1117522 - DNA, 25 bp, Homo sapien
aatgttgctgttgagtcctgttccc

SEQ ID NO: 1117523 - DNA, 25 bp, Homo sapien
tctgccgttcccctggcttccctat

SEQ ID NO: 1117524 - DNA, 25 bp, Homo sapien
agagtcgtcttctgcacaacctctg

SEQ ID NO: 1117525 - DNA, 25 bp, Homo sapien
tgcacaacctctgccgttcccctgg

SEQ ID NO: 1117526 - DNA, 25 bp, Homo sapien
ttattttgccagagtcgtcttctgc

SEQ ID NO: 1117527 - DNA, 25 bp, Homo sapien
ggctgtgtgacgtagtttacccaat

SEQ ID NO: 1117528 - DNA, 25 bp, Homo sapien
taaaaagggacaaactcagatcaca

SEQ ID NO: 1117529 - DNA, 25 bp, Homo sapien
tttgtctgggacaactacgtgccca

SEQ ID NO: 1117530 - DNA, 25 bp, Homo sapien
gaggccctgggcaagctattatttt

SEQ ID NO: 1117531 - DNA, 25 bp, Homo sapien
cagatagtaaccaagtcgtactcca

SEQ ID NO: 1117532 - DNA, 25 bp, Homo sapien
aaacaatactttgcgattcatccaa

SEQ ID NO: 1117533 - DNA, 25 bp, Homo sapien
tcgtactccaaaacaatactttgcg

SEQ ID NO: 1117534 - DNA, 25 bp, Homo sapien
ttgcgattcatccaactcttgatta

SEQ ID NO: 1117535 - DNA, 25 bp, Homo sapien
cattcgaagggtcattttttggtgc

SEQ ID NO: 1117536 - DNA, 25 bp, Homo sapien
gatacagcttgtgcacgatttgctc

SEQ ID NO: 1117537 - DNA, 25 bp, Homo sapien
cacgatttgctcattcgaagggtca

SEQ ID NO: 1117538 - DNA, 25 bp, Homo sapien
tgtgccactgttgtgcacagataca

SEQ ID NO: 1117539 - DNA, 25 bp, Homo sapien
tttatctctgtactggcaaccatta

SEQ ID NO: 1117540 - DNA, 25 bp, Homo sapien
tactggcaaccattacatgttttca

SEQ ID NO: 1117541 - DNA, 25 bp, Homo sapien
gtcaatttgggatacttcatcagcc

SEQ ID NO: 1117542 - DNA, 25 bp, Homo sapien
ttacaagtcaatttgggatacttca

SEQ ID NO: 1117543 - DNA, 25 bp, Homo sapien
cagggtgaaggtgtattggagaagt

SEQ ID NO: 1117544 - DNA, 25 bp, Homo sapien
tagttgggggaatcttacacctctg

SEQ ID NO: 1117545 - DNA, 25 bp, Homo sapien
gggaatcttacacctctgtttatca

SEQ ID NO: 1117546 - DNA, 25 bp, Homo sapien
tacacctctgtttatcaagctgtat

SEQ ID NO: 1117547 - DNA, 25 bp, Homo sapien
ttcctgagcagtatctgcagagaac

SEQ ID NO: 1117548 - DNA, 25 bp, Homo sapien
tcctgagcagtatctgcagagaact

SEQ ID NO: 1117549 - DNA, 25 bp, Homo sapien
tgctggtagtaaggaaaatactcct

SEQ ID NO: 1117550 - DNA, 25 bp, Homo sapien
cactatctgatttgactgttcactg

SEQ ID NO: 1117551 - DNA, 25 bp, Homo sapien
tagctttcagtttaagttcagtgcg

SEQ ID NO: 1117552 - DNA, 25 bp, Homo sapien
cagtgcgttgaatccggcagagttc

SEQ ID NO: 1117553 - DNA, 25 bp, Homo sapien
cctctagtgtgctttggaaggacat

SEQ ID NO: 1117554 - DNA, 25 bp, Homo sapien
gactagactgtagatccaaatgcca

SEQ ID NO: 1117555 - DNA, 25 bp, Homo sapien
tgccaactactagaaccaaccctgg

SEQ ID NO: 1117556 - DNA, 25 bp, Homo sapien
tctatctggatgtcttgactagact

SEQ ID NO: 1117557 - DNA, 25 bp, Homo sapien
tttcacactttctgtgccataaagc

SEQ ID NO: 1117558 - DNA, 25 bp, Homo sapien
tttttcacactttctgtgccataaa

SEQ ID NO: 1117559 - DNA, 25 bp, Homo sapien
tcacactttctgtgccataaagctg

SEQ ID NO: 1117560 - DNA, 25 bp, Homo sapien
cacactttctgtgccataaagctga

SEQ ID NO: 1117561 - DNA, 25 bp, Homo sapien
tcctggccaggcacatagagtttgg

SEQ ID NO: 1117562 - DNA, 25 bp, Homo sapien
ttggacttgcaaatacaatttcctt

SEQ ID NO: 1117563 - DNA, 25 bp, Homo sapien
caaacattcagaaattggacttgca

SEQ ID NO: 1117564 - DNA, 25 bp, Homo sapien
cttcaagatgagtgatgcacactca

SEQ ID NO: 1117565 - DNA, 25 bp, Homo sapien
cctgcagtagagagccccacacact

SEQ ID NO: 1117566 - DNA, 25 bp, Homo sapien
actatattatccacatcccctctca

SEQ ID NO: 1117567 - DNA, 25 bp, Homo sapien
acactatattatccacatcccctct

SEQ ID NO: 1117568 - DNA, 25 bp, Homo sapien
cccacacactatattatccacatcc

SEQ ID NO: 1117569 - DNA, 25 bp, Homo sapien
aatacagagttaaggtcgacccagg

SEQ ID NO: 1117570 - DNA, 25 bp, Homo sapien
ggttccaggtatttgagatctgtca

SEQ ID NO: 1117571 - DNA, 25 bp, Homo sapien
tcgacccaggtctcttaactctgtt

SEQ ID NO: 1117572 - DNA, 25 bp, Homo sapien
taaagttccaacttatgcccataaa

SEQ ID NO: 1117573 - DNA, 25 bp, Homo sapien
agaaaagaaccatgtaggctcttgg

SEQ ID NO: 1117574 - DNA, 25 bp, Homo sapien
ttaaaaccaggagcagacttttcca

SEQ ID NO: 1117575 - DNA, 25 bp, Homo sapien
gaaccatgtaggctcttggatgtta

SEQ ID NO: 1117576 - DNA, 25 bp, Homo sapien
acttttccaatcaacttttgcaaat

SEQ ID NO: 1117577 - DNA, 25 bp, Homo sapien
tgcctttggagtatgaagttcccag

SEQ ID NO: 1117578 - DNA, 25 bp, Homo sapien
tgaaactttgtctaactccctgtgc

SEQ ID NO: 1117579 - DNA, 25 bp, Homo sapien
tgtttcacaagctgtgcatcacaga

SEQ ID NO: 1117580 - DNA, 25 bp, Homo sapien
tatcttgcaattatccatggtccgg

SEQ ID NO: 1117581 - DNA, 25 bp, Homo sapien
gaaaactatcaatacagggtgatgg

SEQ ID NO: 1117582 - DNA, 25 bp, Homo sapien
gtgatggataccctgcttaaagtgc

SEQ ID NO: 1117583 - DNA, 25 bp, Homo sapien
ctttcacagtcactaaaatagggtg

SEQ ID NO: 1117584 - DNA, 25 bp, Homo sapien
gatgccattctgaactgtaaaacga

SEQ ID NO: 1117585 - DNA, 25 bp, Homo sapien
tggatgcaactgatttgctagttgc

SEQ ID NO: 1117586 - DNA, 25 bp, Homo sapien
aatatatttgagcattagctcaagc

SEQ ID NO: 1117587 - DNA, 25 bp, Homo sapien
gcattagctcaagcaaaaacagcta

SEQ ID NO: 1117588 - DNA, 25 bp, Homo sapien
tatttgagcattagctcaagcaaaa

SEQ ID NO: 1117589 - DNA, 25 bp, Homo sapien
tagtgcccaggtctgtcattgtttc

SEQ ID NO: 1117590 - DNA, 25 bp, Homo sapien
ggtagtgcccaggtctgtcattgtt

SEQ ID NO: 1117591 - DNA, 25 bp, Homo sapien
ctggtagtgcccaggtctgtcattg

SEQ ID NO: 1117592 - DNA, 25 bp, Homo sapien
tggtagtgcccaggtctgtcattgt

SEQ ID NO: 1117593 - DNA, 25 bp, Homo sapien
ttgtgctttctaccttgaagaagca

SEQ ID NO: 1117594 - DNA, 25 bp, Homo sapien
gaagaagcacaaaaagcacttgtcg

SEQ ID NO: 1117595 - DNA, 25 bp, Homo sapien
tagtgcctaaaatcttagatttgtg

SEQ ID NO: 1117596 - DNA, 25 bp, Homo sapien
tgtcgaaacactggttgaatgaatc

SEQ ID NO: 1117597 - DNA, 25 bp, Homo sapien
ctggatggaaccatttgactgaaaa

SEQ ID NO: 1117598 - DNA, 25 bp, Homo sapien
tctcagttaccctggagctgtacaa

SEQ ID NO: 1117599 - DNA, 25 bp, Homo sapien
tattttctcagttaccctggagctg

SEQ ID NO: 1117600 - DNA, 25 bp, Homo sapien
gaaaatccatgtcaaaaggccaaca

SEQ ID NO: 1117601 - DNA, 25 bp, Homo sapien
tattccattcttgtttagttaccat

SEQ ID NO: 1117602 - DNA, 25 bp, Homo sapien
catattccattcttgtttagttacc

SEQ ID NO: 1117603 - DNA, 25 bp, Homo sapien
atattccattcttgtttagttacca

SEQ ID NO: 1117604 - DNA, 25 bp, Homo sapien
atgcaccatacatgctcccctatga

SEQ ID NO: 1117605 - DNA, 25 bp, Homo sapien
ccttcccagtcgtggagccaccatg

SEQ ID NO: 1117606 - DNA, 25 bp, Homo sapien
gattgccactagtgaccttgccttc

SEQ ID NO: 1117607 - DNA, 25 bp, Homo sapien
ctggtgccgattgccactagtgacc

SEQ ID NO: 1117608 - DNA, 25 bp, Homo sapien
tgcatcttgggaaccaaaacttcaa

SEQ ID NO: 1117609 - DNA, 25 bp, Homo sapien
acttcaagtactctggtaactgatc

SEQ ID NO: 1117610 - DNA, 25 bp, Homo sapien
cagtgctgtacttggtactgattca

SEQ ID NO: 1117611 - DNA, 25 bp, Homo sapien
gattcatataggactttgcatcttg

SEQ ID NO: 1117612 - DNA, 25 bp, Homo sapien
taatcaaagtaagagtgcctaagga

SEQ ID NO: 1117613 - DNA, 25 bp, Homo sapien
caaacgtgtccctacagtatgatgg

SEQ ID NO: 1117614 - DNA, 25 bp, Homo sapien
tgtccatttaagagggcaaagtcct

SEQ ID NO: 1117615 - DNA, 25 bp, Homo sapien
tcaagtgaaatgagacaggaaccat

SEQ ID NO: 1117616 - DNA, 25 bp, Homo sapien
aggggaaaggactgggctcgagtct

SEQ ID NO: 1117617 - DNA, 25 bp, Homo sapien
tgaggggaaaggactgggctcgagt

SEQ ID NO: 1117618 - DNA, 25 bp, Homo sapien
aatgaggggaaaggactgggctcga

SEQ ID NO: 1117619 - DNA, 25 bp, Homo sapien
tgaaaatgaggggaaaggactgggc

SEQ ID NO: 1117620 - DNA, 25 bp, Homo sapien
gctgccagcacacgtgacggcggca

SEQ ID NO: 1117621 - DNA, 25 bp, Homo sapien
gcccctcatcgggcagggaaggtgg

SEQ ID NO: 1117622 - DNA, 25 bp, Homo sapien
tccgacccgactccgcggcgagggc

SEQ ID NO: 1117623 - DNA, 25 bp, Homo sapien
gtcttccgacccgactccgcggcga

SEQ ID NO: 1117624 - DNA, 25 bp, Homo sapien
agctagggcactcgtagcgggcttc

SEQ ID NO: 1117625 - DNA, 25 bp, Homo sapien
tattccgtccggttcatcgagagcg

SEQ ID NO: 1117626 - DNA, 25 bp, Homo sapien
aaaaaacaactagggattcatggag

SEQ ID NO: 1117627 - DNA, 25 bp, Homo sapien
ttcgtctagtcgctccctctgggcg

SEQ ID NO: 1117628 - DNA, 25 bp, Homo sapien
ctgcagttccgtgagcagaatctcc

SEQ ID NO: 1117629 - DNA, 25 bp, Homo sapien
tgcagttccgtgagcagaatctccc

SEQ ID NO: 1117630 - DNA, 25 bp, Homo sapien
gcagttccgtgagcagaatctcccc

SEQ ID NO: 1117631 - DNA, 25 bp, Homo sapien
ggggctggaagttatgggggcgctc

SEQ ID NO: 1117632 - DNA, 25 bp, Homo sapien
gctggaagttatgggggcgctcttt

SEQ ID NO: 1117633 - DNA, 25 bp, Homo sapien
tatgggggcgctctttgtgcggagt

SEQ ID NO: 1117634 - DNA, 25 bp, Homo sapien
gttatgggggcgctctttgtgcgga

SEQ ID NO: 1117635 - DNA, 25 bp, Homo sapien
ttgaacagcacgtatcactacatag

SEQ ID NO: 1117636 - DNA, 25 bp, Homo sapien
gcggttaatcagattccggtggtta

SEQ ID NO: 1117637 - DNA, 25 bp, Homo sapien
tttggcggttaatcagattccggtg

SEQ ID NO: 1117638 - DNA, 25 bp, Homo sapien
tggcggttaatcagattccggtggt

SEQ ID NO: 1117639 - DNA, 25 bp, Homo sapien
ttggcggttaatcagattccggtgg

SEQ ID NO: 1117640 - DNA, 25 bp, Homo sapien
tacaggattagcctccctttactaa

SEQ ID NO: 1117641 - DNA, 25 bp, Homo sapien
gattgaactaccgatacatactgca

SEQ ID NO: 1117642 - DNA, 25 bp, Homo sapien
aatcatgatttgagtgaaagatgcc

SEQ ID NO: 1117643 - DNA, 25 bp, Homo sapien
cacagttgttatcagcatgtcaagc

SEQ ID NO: 1117644 - DNA, 25 bp, Homo sapien
catgtgcaaaacaccgcacctggtt

SEQ ID NO: 1117645 - DNA, 25 bp, Homo sapien
ctcttaaacactactagtggaaaag

SEQ ID NO: 1117646 - DNA, 25 bp, Homo sapien
aagaataatgaaagtgtaagtccac

SEQ ID NO: 1117647 - DNA, 25 bp, Homo sapien
catgcacctgctatatgttttagcc

SEQ ID NO: 1117648 - DNA, 25 bp, Homo sapien
gtctcaacccctcaagatcaagtga

SEQ ID NO: 1117649 - DNA, 25 bp, Homo sapien
gacctcatgtttataatatggaaag

SEQ ID NO: 1117650 - DNA, 25 bp, Homo sapien
gcacgtgccactgtggttggctatt

SEQ ID NO: 1117651 - DNA, 25 bp, Homo sapien
gagaaatagcaatccctcatatcca

SEQ ID NO: 1117652 - DNA, 25 bp, Homo sapien
aatcaaaagatagcaggtgttgatg

SEQ ID NO: 1117653 - DNA, 25 bp, Homo sapien
ctaccacatgatccgataaatccca

SEQ ID NO: 1117654 - DNA, 25 bp, Homo sapien
aaaacagcatgaaggctactcaaaa

SEQ ID NO: 1117655 - DNA, 25 bp, Homo sapien
caaaagatagcaggtgttgatgagg

SEQ ID NO: 1117656 - DNA, 25 bp, Homo sapien
gttgtcaacaacactagcacatgtc

SEQ ID NO: 1117657 - DNA, 25 bp, Homo sapien
tataagtcctacgatccatttggtt

SEQ ID NO: 1117658 - DNA, 25 bp, Homo sapien
gtccaaagccagaggtctgcaaaat

SEQ ID NO: 1117659 - DNA, 25 bp, Homo sapien
tagtttaagctagttccattcctcc

SEQ ID NO: 1117660 - DNA, 25 bp, Homo sapien
tctcagaaaacggaagacttcggga

SEQ ID NO: 1117661 - DNA, 25 bp, Homo sapien
cattctcagaaaacggaagacttcg

SEQ ID NO: 1117662 - DNA, 25 bp, Homo sapien
ctcacattctcagaaaacggaagac

SEQ ID NO: 1117663 - DNA, 25 bp, Homo sapien
aaagtctaatttttgaacagcactc

SEQ ID NO: 1117664 - DNA, 25 bp, Homo sapien
atttctctcttaattcgatccttga

SEQ ID NO: 1117665 - DNA, 25 bp, Homo sapien
acaacaatatgtgcatttaattcct

SEQ ID NO: 1117666 - DNA, 25 bp, Homo sapien
cagcttgtgatgtagttcttctaat

SEQ ID NO: 1117667 - DNA, 25 bp, Homo sapien
taattcgatccttgatatcatccaa

SEQ ID NO: 1117668 - DNA, 25 bp, Homo sapien
agtcttgaactcctggcctcaagtg

SEQ ID NO: 1117669 - DNA, 25 bp, Homo sapien
tagtcttgaactcctggcctcaagt

SEQ ID NO: 1117670 - DNA, 25 bp, Homo sapien
caccacgtcgactaattttcgtatt

SEQ ID NO: 1117671 - DNA, 25 bp, Homo sapien
gcacacgccaccacgtcgactaatt

SEQ ID NO: 1117672 - DNA, 25 bp, Homo sapien
gcttactaagcttatgtacccacaa

SEQ ID NO: 1117673 - DNA, 25 bp, Homo sapien
tcatgggattaccttagtgtgcaag

SEQ ID NO: 1117674 - DNA, 25 bp, Homo sapien
cccacaagacaacaggaattagtca

SEQ ID NO: 1117675 - DNA, 25 bp, Homo sapien
ccttgaaatcttcttgccagaccta

SEQ ID NO: 1117676 - DNA, 25 bp, Homo sapien
gaagctcagagtatcatgggcatga

SEQ ID NO: 1117677 - DNA, 25 bp, Homo sapien
gcttaacagtactatgctgaaaaga

SEQ ID NO: 1117678 - DNA, 25 bp, Homo sapien
caatgttagttgtgggcctgtcata

SEQ ID NO: 1117679 - DNA, 25 bp, Homo sapien
catatatagaccttcttgtgttgag

SEQ ID NO: 1117680 - DNA, 25 bp, Homo sapien
tattgcactgtgtttatataccatg

SEQ ID NO: 1117681 - DNA, 25 bp, Homo sapien
taacctgtgaccaacaacttcctct

SEQ ID NO: 1117682 - DNA, 25 bp, Homo sapien
tctcttctacgtcaatgaatttgtc

SEQ ID NO: 1117683 - DNA, 25 bp, Homo sapien
ccatgctgtgtaatagatcaacaga

SEQ ID NO: 1117684 - DNA, 25 bp, Homo sapien
cactatttaagtgggcagggcaata

SEQ ID NO: 1117685 - DNA, 25 bp, Homo sapien
gaacaaagttccctcaatacagata

SEQ ID NO: 1117686 - DNA, 25 bp, Homo sapien
gaagaatttgctaagattaacccca

SEQ ID NO: 1117687 - DNA, 25 bp, Homo sapien
ccaggagtgcaaaagagcaacttac

SEQ ID NO: 1117688 - DNA, 25 bp, Homo sapien
gacaatgcactagagttaagcccat

SEQ ID NO: 1117689 - DNA, 25 bp, Homo sapien
caaagagattttaggcatgtctggg

SEQ ID NO: 1117690 - DNA, 25 bp, Homo sapien
tacagtcccaacttcacggttaggc

SEQ ID NO: 1117691 - DNA, 25 bp, Homo sapien
gatggaacgcagacaagactaattc

SEQ ID NO: 1117692 - DNA, 25 bp, Homo sapien
agtaacttggtcatgactggaaaac

SEQ ID NO: 1117693 - DNA, 25 bp, Homo sapien
agctaaagactagggtactaccctg

SEQ ID NO: 1117694 - DNA, 25 bp, Homo sapien
cctctacaatataagatggtgtgac

SEQ ID NO: 1117695 - DNA, 25 bp, Homo sapien
cagcctgttggaacacttaccttga

SEQ ID NO: 1117696 - DNA, 25 bp, Homo sapien
aatacatctgtatcatattctctgc

SEQ ID NO: 1117697 - DNA, 25 bp, Homo sapien
gagggtcattatttggagtatctgg

SEQ ID NO: 1117698 - DNA, 25 bp, Homo sapien
ttgtaaggccttcaatctattgttg

SEQ ID NO: 1117699 - DNA, 25 bp, Homo sapien
tgttgctagtagaacaacgagggtc

SEQ ID NO: 1117700 - DNA, 25 bp, Homo sapien
atagttacatttattaactacactt

SEQ ID NO: 1117701 - DNA, 25 bp, Homo sapien
tagttacatttattaactacactta

SEQ ID NO: 1117702 - DNA, 25 bp, Homo sapien
ggtgagtagttaggatgcatgatta

SEQ ID NO: 1117703 - DNA, 25 bp, Homo sapien
ccaccaggcctagtctcaaatttca

SEQ ID NO: 1117704 - DNA, 25 bp, Homo sapien
gagtagttaggatgcatgattaaga

SEQ ID NO: 1117705 - DNA, 25 bp, Homo sapien
caaatttcatttggggtgagtagtt

SEQ ID NO: 1117706 - DNA, 25 bp, Homo sapien
gagtacctgctatgtaataaggcac

SEQ ID NO: 1117707 - DNA, 25 bp, Homo sapien
taagaacttgtactatagccacacc

SEQ ID NO: 1117708 - DNA, 25 bp, Homo sapien
taaaacgatgtactctgaccctctg

SEQ ID NO: 1117709 - DNA, 25 bp, Homo sapien
taactggcaggcctatctcagaggc

SEQ ID NO: 1117710 - DNA, 25 bp, Homo sapien
gctctgattacaacatgcacaaggg

SEQ ID NO: 1117711 - DNA, 25 bp, Homo sapien
ggaagctatttaacctggactactg

SEQ ID NO: 1117712 - DNA, 25 bp, Homo sapien
gccctgaggtaagagtgtgcttgct

SEQ ID NO: 1117713 - DNA, 25 bp, Homo sapien
taaagggcaccataattcatcagtc

SEQ ID NO: 1117714 - DNA, 25 bp, Homo sapien
gaatctgcattcgtatgacttctat

SEQ ID NO: 1117715 - DNA, 25 bp, Homo sapien
gcagttgctgagctgtaccatggag

SEQ ID NO: 1117716 - DNA, 25 bp, Homo sapien
tatcaaaagccaattcattagtctg

SEQ ID NO: 1117717 - DNA, 25 bp, Homo sapien
caattcattagtctggactgcctga

SEQ ID NO: 1117718 - DNA, 25 bp, Homo sapien
cataagaaggaggacaatttattcc

SEQ ID NO: 1117719 - DNA, 25 bp, Homo sapien
gaaggaggacaatttattccatcac

SEQ ID NO: 1117720 - DNA, 25 bp, Homo sapien
tatgctcataagaaggaggacaatt

SEQ ID NO: 1117721 - DNA, 25 bp, Homo sapien
cattatgctcataagaaggaggaca

SEQ ID NO: 1117722 - DNA, 25 bp, Homo sapien
gcaaactctatcctaaaatgatgcc

SEQ ID NO: 1117723 - DNA, 25 bp, Homo sapien
gccttaattcttccatccgaagttc

SEQ ID NO: 1117724 - DNA, 25 bp, Homo sapien
tctgctactgcaaactctatcctaa

SEQ ID NO: 1117725 - DNA, 25 bp, Homo sapien
tcaagaggacttatcacaggttttg

SEQ ID NO: 1117726 - DNA, 25 bp, Homo sapien
ttcctgagccaagtaatttcattac

SEQ ID NO: 1117727 - DNA, 25 bp, Homo sapien
tttcctgagccaagtaatttcatta

SEQ ID NO: 1117728 - DNA, 25 bp, Homo sapien
ttttcctgagccaagtaatttcatt

SEQ ID NO: 1117729 - DNA, 25 bp, Homo sapien
tctgaaagtgcttttctgtctgtta

SEQ ID NO: 1117730 - DNA, 25 bp, Homo sapien
ctgaaagtgcttttctgtctgttac

SEQ ID NO: 1117731 - DNA, 25 bp, Homo sapien
ttctgaaagtgcttttctgtctgtt

SEQ ID NO: 1117732 - DNA, 25 bp, Homo sapien
gatatcatactttgacgtggactta

SEQ ID NO: 1117733 - DNA, 25 bp, Homo sapien
tagtgctgctggtttggatagtgta

SEQ ID NO: 1117734 - DNA, 25 bp, Homo sapien
tgatgcagcaacaagtgaaagttct

SEQ ID NO: 1117735 - DNA, 25 bp, Homo sapien
taaaaggtccaacttctgacttgat

SEQ ID NO: 1117736 - DNA, 25 bp, Homo sapien
taatttctgtattcttagtatagat

SEQ ID NO: 1117737 - DNA, 25 bp, Homo sapien
atttctgtattcttagtatagatgg

SEQ ID NO: 1117738 - DNA, 25 bp, Homo sapien
aatttctgtattcttagtatagatg

SEQ ID NO: 1117739 - DNA, 25 bp, Homo sapien
ttgttaccaccagccaggcttgaaa

SEQ ID NO: 1117740 - DNA, 25 bp, Homo sapien
taggtaggaatagtgtttgttacca

SEQ ID NO: 1117741 - DNA, 25 bp, Homo sapien
caatactcagtgcatataggtagga

SEQ ID NO: 1117742 - DNA, 25 bp, Homo sapien
caccagccaggcttgaaaatctcaa

SEQ ID NO: 1117743 - DNA, 25 bp, Homo sapien
aaagatgatctggtttcacttggac

SEQ ID NO: 1117744 - DNA, 25 bp, Homo sapien
tcttggcagcccataagacgaactt

SEQ ID NO: 1117745 - DNA, 25 bp, Homo sapien
caactgatgttgcttttgaccgtcc

SEQ ID NO: 1117746 - DNA, 25 bp, Homo sapien
acttggactccaaccaggcagtgca

SEQ ID NO: 1117747 - DNA, 25 bp, Homo sapien
catcggtttttagaagatttcgact

SEQ ID NO: 1117748 - DNA, 25 bp, Homo sapien
tttagaagatttcgactacttccgc

SEQ ID NO: 1117749 - DNA, 25 bp, Homo sapien
tagaagatttcgactacttccgctt

SEQ ID NO: 1117750 - DNA, 25 bp, Homo sapien
tggacaagtcatcggtttttagaag

SEQ ID NO: 1117751 - DNA, 25 bp, Homo sapien
catgactgattggaaatgggtttcc

SEQ ID NO: 1117752 - DNA, 25 bp, Homo sapien
tttggccaaccacagtattatcgag

SEQ ID NO: 1117753 - DNA, 25 bp, Homo sapien
cctgtccagttccagtgtaaacttc

SEQ ID NO: 1117754 - DNA, 25 bp, Homo sapien
ccagtgtaaacttctggtcccatga

SEQ ID NO: 1117755 - DNA, 25 bp, Homo sapien
cagaaagatgtaaggccccagaaag

SEQ ID NO: 1117756 - DNA, 25 bp, Homo sapien
caaagaggtatttagtggccctaag

SEQ ID NO: 1117757 - DNA, 25 bp, Homo sapien
ctcaagatgaaagctgtgtagcagc

SEQ ID NO: 1117758 - DNA, 25 bp, Homo sapien
cagaacttggttcatctatggacaa

SEQ ID NO: 1117759 - DNA, 25 bp, Homo sapien
taaattggttactttagtgtctcat

SEQ ID NO: 1117760 - DNA, 25 bp, Homo sapien
ggttactttagtgtctcattcttaa

SEQ ID NO: 1117761 - DNA, 25 bp, Homo sapien
tgtctcattcttaagaaagccatgg

SEQ ID NO: 1117762 - DNA, 25 bp, Homo sapien
tagtgtctcattcttaagaaagcca

SEQ ID NO: 1117763 - DNA, 25 bp, Homo sapien
gcacccggccgacatgttattttta

SEQ ID NO: 1117764 - DNA, 25 bp, Homo sapien
gatgaaacaatactcccagtgtcag

SEQ ID NO: 1117765 - DNA, 25 bp, Homo sapien
tcactgccatggttgctatgagaaa

SEQ ID NO: 1117766 - DNA, 25 bp, Homo sapien
tttttaacagcggtggaatctggaa

SEQ ID NO: 1117767 - DNA, 25 bp, Homo sapien
tacaacaaagatatgtcatgaatgc

SEQ ID NO: 1117768 - DNA, 25 bp, Homo sapien
cctaatgctcttatggtgagctcaa

SEQ ID NO: 1117769 - DNA, 25 bp, Homo sapien
gctcaagtgtcaacagtatccattt

SEQ ID NO: 1117770 - DNA, 25 bp, Homo sapien
attttgtagccacctcctaatgctc

SEQ ID NO: 1117771 - DNA, 25 bp, Homo sapien
tcaaagaagtttaaatagtggtata

SEQ ID NO: 1117772 - DNA, 25 bp, Homo sapien
taagatttcaatttgtgtagcacag

SEQ ID NO: 1117773 - DNA, 25 bp, Homo sapien
gcccaacaggtatatcgaatttaag

SEQ ID NO: 1117774 - DNA, 25 bp, Homo sapien
aaaggtataccagagttcaggagtt

SEQ ID NO: 1117775 - DNA, 25 bp, Homo sapien
tctttgggtatgctgcagcaaaaaa

SEQ ID NO: 1117776 - DNA, 25 bp, Homo sapien
ctgtattgactagagtgtgttgtat

SEQ ID NO: 1117777 - DNA, 25 bp, Homo sapien
tctatttgggaatcactgtattgac

SEQ ID NO: 1117778 - DNA, 25 bp, Homo sapien
gattctgacctgtatctatttggga

SEQ ID NO: 1117779 - DNA, 25 bp, Homo sapien
ttaaaatgcaagtgtgattgctggt

SEQ ID NO: 1117780 - DNA, 25 bp, Homo sapien
aatgcaagtgtgattgctggtacgc

SEQ ID NO: 1117781 - DNA, 25 bp, Homo sapien
tgattgctggtacgccggcaatttt

SEQ ID NO: 1117782 - DNA, 25 bp, Homo sapien
caagtgtgattgctggtacgccggc

SEQ ID NO: 1117783 - DNA, 25 bp, Homo sapien
caaatagagacacatgccatgccgt

SEQ ID NO: 1117784 - DNA, 25 bp, Homo sapien
gaccgccaatcacgccaataaactg

SEQ ID NO: 1117785 - DNA, 25 bp, Homo sapien
catgccgttggttgtctaaaaaatc

SEQ ID NO: 1117786 - DNA, 25 bp, Homo sapien
tctaacctcagaaattttacagcac

SEQ ID NO: 1117787 - DNA, 25 bp, Homo sapien
tctttgaagttttggtcttctttca

SEQ ID NO: 1117788 - DNA, 25 bp, Homo sapien
gtcttctttcaataactggattaaa

SEQ ID NO: 1117789 - DNA, 25 bp, Homo sapien
tttggtcttctttcaataactggat

SEQ ID NO: 1117790 - DNA, 25 bp, Homo sapien
tgaagttttggtcttctttcaataa

SEQ ID NO: 1117791 - DNA, 25 bp, Homo sapien
tgaggagctctgagaaatgttttgc

SEQ ID NO: 1117792 - DNA, 25 bp, Homo sapien
ttgaggagctctgagaaatgttttg

SEQ ID NO: 1117793 - DNA, 25 bp, Homo sapien
aggtgccagaatgatttactgtagg

SEQ ID NO: 1117794 - DNA, 25 bp, Homo sapien
aaccactggcactgtagtaggcaca

SEQ ID NO: 1117795 - DNA, 25 bp, Homo sapien
ttccccaagtggcaatattaatatt

SEQ ID NO: 1117796 - DNA, 25 bp, Homo sapien
tgatttactgtaggaatagctcttc

SEQ ID NO: 1117797 - DNA, 25 bp, Homo sapien
gctggaggtgctagttgagggatgc

SEQ ID NO: 1117798 - DNA, 25 bp, Homo sapien
ctggaggtgctagttgagggatgcg

SEQ ID NO: 1117799 - DNA, 25 bp, Homo sapien
ctagctggaggtgctagttgaggga

SEQ ID NO: 1117800 - DNA, 25 bp, Homo sapien
gaggtgctagttgagggatgcgtac

SEQ ID NO: 1117801 - DNA, 25 bp, Homo sapien
cagtacacctgctataatcagtacg

SEQ ID NO: 1117802 - DNA, 25 bp, Homo sapien
gtaagaatgtcccaataactttgta

SEQ ID NO: 1117803 - DNA, 25 bp, Homo sapien
taactttgtataagagatgcttaaa

SEQ ID NO: 1117804 - DNA, 25 bp, Homo sapien
aaagcaagactcagtacacctgcta

SEQ ID NO: 1117805 - DNA, 25 bp, Homo sapien
acagtaatagaaagtctgtatttta

SEQ ID NO: 1117806 - DNA, 25 bp, Homo sapien
aatagaaagtctgtattttaaacag

SEQ ID NO: 1117807 - DNA, 25 bp, Homo sapien
taatagaaagtctgtattttaaaca

SEQ ID NO: 1117808 - DNA, 25 bp, Homo sapien
caaaacagtaatagaaagtctgtat

SEQ ID NO: 1117809 - DNA, 25 bp, Homo sapien
ggaggttcaggctcaagatcaaagt

SEQ ID NO: 1117810 - DNA, 25 bp, Homo sapien
tttctccaagagaagaagctcgtgg

SEQ ID NO: 1117811 - DNA, 25 bp, Homo sapien
tcaagatcaaagtccaatttggtta

SEQ ID NO: 1117812 - DNA, 25 bp, Homo sapien
cttaattcagaagattcatctattt

SEQ ID NO: 1117813 - DNA, 25 bp, Homo sapien
tgatgcttttattgctaattcattc

SEQ ID NO: 1117814 - DNA, 25 bp, Homo sapien
cagttcagtggcaattttaaatgga

SEQ ID NO: 1117815 - DNA, 25 bp, Homo sapien
agaggaattatgcaaggtttaaaat

SEQ ID NO: 1117816 - DNA, 25 bp, Homo sapien
gacacgccttattcactatgatgct

SEQ ID NO: 1117817 - DNA, 25 bp, Homo sapien
tagctgagactagaccataagaaac

SEQ ID NO: 1117818 - DNA, 25 bp, Homo sapien
agaaacataaattcggctgggtgca

SEQ ID NO: 1117819 - DNA, 25 bp, Homo sapien
gcagtatgtcatgtagtatcaacca

SEQ ID NO: 1117820 - DNA, 25 bp, Homo sapien
catgagcatccagaggctaatgaca

SEQ ID NO: 1117821 - DNA, 25 bp, Homo sapien
gtagctggagccatcgcttttatat

SEQ ID NO: 1117822 - DNA, 25 bp, Homo sapien
ccgagtagctggagccatcgctttt

SEQ ID NO: 1117823 - DNA, 25 bp, Homo sapien
agctggagccatcgcttttatatta

SEQ ID NO: 1117824 - DNA, 25 bp, Homo sapien
ggagccatcgcttttatattaaact

SEQ ID NO: 1117825 - DNA, 25 bp, Homo sapien
tattaaatacacgtgaatccataga

SEQ ID NO: 1117826 - DNA, 25 bp, Homo sapien
aaatattaaatacacgtgaatccat

SEQ ID NO: 1117827 - DNA, 25 bp, Homo sapien
tacacgtgaatccatagaaataccc

SEQ ID NO: 1117828 - DNA, 25 bp, Homo sapien
gaatccatagaaatacccagaaaac

SEQ ID NO: 1117829 - DNA, 25 bp, Homo sapien
tctaggcctgactgaggagtatcag

SEQ ID NO: 1117830 - DNA, 25 bp, Homo sapien
gtatcaggcttgtattcagattgag

SEQ ID NO: 1117831 - DNA, 25 bp, Homo sapien
tgtcctcaagttcttgaataccact

SEQ ID NO: 1117832 - DNA, 25 bp, Homo sapien
gaataccactatattctaggcctga

SEQ ID NO: 1117833 - DNA, 25 bp, Homo sapien
caagacagcacaacacctgaaatct

SEQ ID NO: 1117834 - DNA, 25 bp, Homo sapien
tgtagattaaactgaaacctttgct

SEQ ID NO: 1117835 - DNA, 25 bp, Homo sapien
cctgaaatcttgtagattaaactga

SEQ ID NO: 1117836 - DNA, 25 bp, Homo sapien
tcccaagacagcacaacacctgaaa

SEQ ID NO: 1117837 - DNA, 25 bp, Homo sapien
tcatctcgagccacaatatctcctt

SEQ ID NO: 1117838 - DNA, 25 bp, Homo sapien
tctcgagccacaatatctcctttct

SEQ ID NO: 1117839 - DNA, 25 bp, Homo sapien
ctgtctacttcatctcgagccacaa

SEQ ID NO: 1117840 - DNA, 25 bp, Homo sapien
tacttcatctcgagccacaatatct

SEQ ID NO: 1117841 - DNA, 25 bp, Homo sapien
tctaaacatgtaatatggtactcag

SEQ ID NO: 1117842 - DNA, 25 bp, Homo sapien
taaatctcaaccttttgaggcctgt

SEQ ID NO: 1117843 - DNA, 25 bp, Homo sapien
ttctaagaactacccatatggtgga

SEQ ID NO: 1117844 - DNA, 25 bp, Homo sapien
tggcatatctacatagcaagacaac

SEQ ID NO: 1117845 - DNA, 25 bp, Homo sapien
tttcagtagaggtaatggcctagat

SEQ ID NO: 1117846 - DNA, 25 bp, Homo sapien
cctgtctctacacaagactggatta

SEQ ID NO: 1117847 - DNA, 25 bp, Homo sapien
cataccaagaccctgacactatggg

SEQ ID NO: 1117848 - DNA, 25 bp, Homo sapien
tgtagatggatcagttgtatgcacc

SEQ ID NO: 1117849 - DNA, 25 bp, Homo sapien
ttggaaacatgcaaaaaggttcacc

SEQ ID NO: 1117850 - DNA, 25 bp, Homo sapien
gacatcagtatgaatgtgcatcatt

SEQ ID NO: 1117851 - DNA, 25 bp, Homo sapien
cggcagcatattccattacaaagca

SEQ ID NO: 1117852 - DNA, 25 bp, Homo sapien
attaggtccccaccggcagcatatt

SEQ ID NO: 1117853 - DNA, 25 bp, Homo sapien
aattctggatggcattctctagtga

SEQ ID NO: 1117854 - DNA, 25 bp, Homo sapien
ggagttctagtatttcttgcagaga

SEQ ID NO: 1117855 - DNA, 25 bp, Homo sapien
ggttttgggcaatccatgacatttt

SEQ ID NO: 1117856 - DNA, 25 bp, Homo sapien
cagagatattttacgcacaaggacg

SEQ ID NO: 1117857 - DNA, 25 bp, Homo sapien
tctgagaactgaatgataaagggag

SEQ ID NO: 1117858 - DNA, 25 bp, Homo sapien
tagctagggaactcagaaaattacc

SEQ ID NO: 1117859 - DNA, 25 bp, Homo sapien
aacaggacagatatggttcttgctc

SEQ ID NO: 1117860 - DNA, 25 bp, Homo sapien
cactgattgcctaatatgttccagg

SEQ ID NO: 1117861 - DNA, 25 bp, Homo sapien
taaaatgcaactacttagaaatact

SEQ ID NO: 1117862 - DNA, 25 bp, Homo sapien
tttttaaacgcggggcttgtgctgc

SEQ ID NO: 1117863 - DNA, 25 bp, Homo sapien
tcagggtccaccaggcagtttcatc

SEQ ID NO: 1117864 - DNA, 25 bp, Homo sapien
gcaactacttagaaatacttactta

SEQ ID NO: 1117865 - DNA, 25 bp, Homo sapien
tgtgtcatcctcgcacaggggtcat

SEQ ID NO: 1117866 - DNA, 25 bp, Homo sapien
ctctataaggttccaattttagtgt

SEQ ID NO: 1117867 - DNA, 25 bp, Homo sapien
taatcttctctataaggttccaatt

SEQ ID NO: 1117868 - DNA, 25 bp, Homo sapien
tgtgtgtcatcctcgcacaggggtc

SEQ ID NO: 1117869 - DNA, 25 bp, Homo sapien
cataaagtgagttagagaggagccc

SEQ ID NO: 1117870 - DNA, 25 bp, Homo sapien
aaagtgagttagagaggagcccctc

SEQ ID NO: 1117871 - DNA, 25 bp, Homo sapien
taaagtgagttagagaggagcccct

SEQ ID NO: 1117872 - DNA, 25 bp, Homo sapien
ctcataaagtgagttagagaggagc

SEQ ID NO: 1117873 - DNA, 25 bp, Homo sapien
gggttcagtttcagttccccgcata

SEQ ID NO: 1117874 - DNA, 25 bp, Homo sapien
gttcagtttcagttccccgcatatg

SEQ ID NO: 1117875 - DNA, 25 bp, Homo sapien
ggttcagtttcagttccccgcatat

SEQ ID NO: 1117876 - DNA, 25 bp, Homo sapien
aatactgcaacccaagaactacaca

SEQ ID NO: 1117877 - DNA, 25 bp, Homo sapien
atgtaaatactgcaacccaagaact

SEQ ID NO: 1117878 - DNA, 25 bp, Homo sapien
taaatactgcaacccaagaactaca

SEQ ID NO: 1117879 - DNA, 25 bp, Homo sapien
tactgcaacccaagaactacacaag

SEQ ID NO: 1117880 - DNA, 25 bp, Homo sapien
ttaaagtttgcttatataccatcca

SEQ ID NO: 1117881 - DNA, 25 bp, Homo sapien
cacctggccaacttaatccagtttt

SEQ ID NO: 1117882 - DNA, 25 bp, Homo sapien
agttaacagtattaataaggcatca

SEQ ID NO: 1117883 - DNA, 25 bp, Homo sapien
gcacctggccaacttaatccagttt

SEQ ID NO: 1117884 - DNA, 25 bp, Homo sapien
tggtaagtttattactctatataag

SEQ ID NO: 1117885 - DNA, 25 bp, Homo sapien
aaggtagctcatgagaaattcttct

SEQ ID NO: 1117886 - DNA, 25 bp, Homo sapien
gagatttaaatactataacacaaac

SEQ ID NO: 1117887 - DNA, 25 bp, Homo sapien
tttattactctatataaggtagctc

SEQ ID NO: 1117888 - DNA, 25 bp, Homo sapien
tctagcaataagttatccaatttca

SEQ ID NO: 1117889 - DNA, 25 bp, Homo sapien
acaaagccctctgtatctagcaata

SEQ ID NO: 1117890 - DNA, 25 bp, Homo sapien
tttcacaaagccctctgtatctagc

SEQ ID NO: 1117891 - DNA, 25 bp, Homo sapien
gcaataagttatccaatttcaaatc

SEQ ID NO: 1117892 - DNA, 25 bp, Homo sapien
caccaatctacagcccttgtataag

SEQ ID NO: 1117893 - DNA, 25 bp, Homo sapien
acttctggggcaagaaattcaggag

SEQ ID NO: 1117894 - DNA, 25 bp, Homo sapien
tacagcccttgtataagaagtttct

SEQ ID NO: 1117895 - DNA, 25 bp, Homo sapien
ttcatatataagcacgccaaggccc

SEQ ID NO: 1117896 - DNA, 25 bp, Homo sapien
aaagtacaatactgaaatacaagga

SEQ ID NO: 1117897 - DNA, 25 bp, Homo sapien
tctttacaggtacagagtacattcc

SEQ ID NO: 1117898 - DNA, 25 bp, Homo sapien
gcactgatagtgcattccacaaacc

SEQ ID NO: 1117899 - DNA, 25 bp, Homo sapien
tgaaggtattacagaaagatagctg

SEQ ID NO: 1117900 - DNA, 25 bp, Homo sapien
cagagtgtgttgctcagacggaagt

SEQ ID NO: 1117901 - DNA, 25 bp, Homo sapien
agtagtttcccggtgaagcaaggat

SEQ ID NO: 1117902 - DNA, 25 bp, Homo sapien
acttcagtagtttcccggtgaagca

SEQ ID NO: 1117903 - DNA, 25 bp, Homo sapien
tagtttcccggtgaagcaaggatgc

SEQ ID NO: 1117904 - DNA, 25 bp, Homo sapien
tatccatccggcgaaactaaaacca

SEQ ID NO: 1117905 - DNA, 25 bp, Homo sapien
cttacaagtgtacaagggaggttgc

SEQ ID NO: 1117906 - DNA, 25 bp, Homo sapien
tgctttagatatgctctggagccag

SEQ ID NO: 1117907 - DNA, 25 bp, Homo sapien
tacacctccgaaaatgggcagaaga

SEQ ID NO: 1117908 - DNA, 25 bp, Homo sapien
tataataggagggagtagattcaac

SEQ ID NO: 1117909 - DNA, 25 bp, Homo sapien
ttgttttctgccaaaccctccagtg

SEQ ID NO: 1117910 - DNA, 25 bp, Homo sapien
caactgtgaagaaatagccagatcc

SEQ ID NO: 1117911 - DNA, 25 bp, Homo sapien
ttttcccagctaccctcttgtggag

SEQ ID NO: 1117912 - DNA, 25 bp, Homo sapien
gcttacttagcctcgttagatttga

SEQ ID NO: 1117913 - DNA, 25 bp, Homo sapien
tatccagggaaagtgagcaatcttt

SEQ ID NO: 1117914 - DNA, 25 bp, Homo sapien
catttttcataatgaccctgagaca

SEQ ID NO: 1117915 - DNA, 25 bp, Homo sapien
gatggcttaaaaatcactcagtcat

SEQ ID NO: 1117916 - DNA, 25 bp, Homo sapien
ttcatcatttacaatactgtcaaaa

SEQ ID NO: 1117917 - DNA, 25 bp, Homo sapien
catcatttacaatactgtcaaaaac

SEQ ID NO: 1117918 - DNA, 25 bp, Homo sapien
cctcttcatcatcaccaggaaaggg

SEQ ID NO: 1117919 - DNA, 25 bp, Homo sapien
cttcatcatcaccaggaaagggaga

SEQ ID NO: 1117920 - DNA, 25 bp, Homo sapien
tggcttctgtagataagaaccttgg

SEQ ID NO: 1117921 - DNA, 25 bp, Homo sapien
agaaatggcttctgtagataagaac

SEQ ID NO: 1117922 - DNA, 25 bp, Homo sapien
tagataagaaccttggataccttac

SEQ ID NO: 1117923 - DNA, 25 bp, Homo sapien
tctgtagataagaaccttggatacc

SEQ ID NO: 1117924 - DNA, 25 bp, Homo sapien
cactgataaggattattactttaaa

SEQ ID NO: 1117925 - DNA, 25 bp, Homo sapien
atctttctcgctagccccaaggcgc

SEQ ID NO: 1117926 - DNA, 25 bp, Homo sapien
caaggcgccgttcaggatttcttct

SEQ ID NO: 1117927 - DNA, 25 bp, Homo sapien
ctctgcatctttctcgctagcccca

SEQ ID NO: 1117928 - DNA, 25 bp, Homo sapien
ccccaaggcgccgttcaggatttct

SEQ ID NO: 1117929 - DNA, 25 bp, Homo sapien
cagaataggtgcttctgaggtaaat

SEQ ID NO: 1117930 - DNA, 25 bp, Homo sapien
catcttctcgtcctcttatggtagg

SEQ ID NO: 1117931 - DNA, 25 bp, Homo sapien
gcaatgtagtcaaaatctctgaaca

SEQ ID NO: 1117932 - DNA, 25 bp, Homo sapien
ccttggttctcgaggtggagtcaga

SEQ ID NO: 1117933 - DNA, 25 bp, Homo sapien
gagttgtatacaaactgccacggtt

SEQ ID NO: 1117934 - DNA, 25 bp, Homo sapien
cgctgaagtacaatgaggagccact

SEQ ID NO: 1117935 - DNA, 25 bp, Homo sapien
aactcagaagctattggtggcacag

SEQ ID NO: 1117936 - DNA, 25 bp, Homo sapien
gcatatggcaaagctagggactata

SEQ ID NO: 1117937 - DNA, 25 bp, Homo sapien
gatccagtggcctaaaatgtacaaa

SEQ ID NO: 1117938 - DNA, 25 bp, Homo sapien
agttatggttcccttctacagcaga

SEQ ID NO: 1117939 - DNA, 25 bp, Homo sapien
tctagactttgggaatgcatacagg

SEQ ID NO: 1117940 - DNA, 25 bp, Homo sapien
ttggttcggctgattaaaagtcctc

SEQ ID NO: 1117941 - DNA, 25 bp, Homo sapien
ccaaaaaagtgagcagactgtacct

SEQ ID NO: 1117942 - DNA, 25 bp, Homo sapien
tcctttgccgaggaaattaactggc

SEQ ID NO: 1117943 - DNA, 25 bp, Homo sapien
gccacagacggatcctttgaagagt

SEQ ID NO: 1117944 - DNA, 25 bp, Homo sapien
aattgtgtaaatagaccctgccttc

SEQ ID NO: 1117945 - DNA, 25 bp, Homo sapien
tgaacacagaaaagttaaagtatat

SEQ ID NO: 1117946 - DNA, 25 bp, Homo sapien
tattaaagttaattagtctttgaga

SEQ ID NO: 1117947 - DNA, 25 bp, Homo sapien
ttagtctttgagattttgaacacag

SEQ ID NO: 1117948 - DNA, 25 bp, Homo sapien
tacttgcaagaatgtttattaaagt

SEQ ID NO: 1117949 - DNA, 25 bp, Homo sapien
tcccaatgaagtggacagtttgctc

SEQ ID NO: 1117950 - DNA, 25 bp, Homo sapien
tacatacaatactggtgcttgcatc

SEQ ID NO: 1117951 - DNA, 25 bp, Homo sapien
gcctttttgagaagccaggtcctaa

SEQ ID NO: 1117952 - DNA, 25 bp, Homo sapien
gatgctactgaccttacaggagcag

SEQ ID NO: 1117953 - DNA, 25 bp, Homo sapien
gagaaatctatccttggtaacccca

SEQ ID NO: 1117954 - DNA, 25 bp, Homo sapien
gaatctgatagtcccaacctggaga

SEQ ID NO: 1117955 - DNA, 25 bp, Homo sapien
gaactcgtctacaggatttaagcac

SEQ ID NO: 1117956 - DNA, 25 bp, Homo sapien
ggtaacttgctgtctctcgcatgtg

SEQ ID NO: 1117957 - DNA, 25 bp, Homo sapien
tatatatagctattctataacttgt

SEQ ID NO: 1117958 - DNA, 25 bp, Homo sapien
tttatcttgtgttacccttctggga

SEQ ID NO: 1117959 - DNA, 25 bp, Homo sapien
tcctgtttgggaaatattgtactgc

SEQ ID NO: 1117960 - DNA, 25 bp, Homo sapien
tattcagaacgtccattaaagcagc

SEQ ID NO: 1117961 - DNA, 25 bp, Homo sapien
tattccactacgtgcattgttgcaa

SEQ ID NO: 1117962 - DNA, 25 bp, Homo sapien
tactacttgtgtcaacaacatggtc

SEQ ID NO: 1117963 - DNA, 25 bp, Homo sapien
atgaggcttgcattgtaggcatttc

SEQ ID NO: 1117964 - DNA, 25 bp, Homo sapien
catttgtaaagtttggatcaggaga

SEQ ID NO: 1117965 - DNA, 25 bp, Homo sapien
tgtttagtctgttcgattttctggt

SEQ ID NO: 1117966 - DNA, 25 bp, Homo sapien
tagactgatctatcctcgagcccca

SEQ ID NO: 1117967 - DNA, 25 bp, Homo sapien
gtacatagcctatacaaaatgctgg

SEQ ID NO: 1117968 - DNA, 25 bp, Homo sapien
gaggcagctaacgtcaaattcttga

SEQ ID NO: 1117969 - DNA, 25 bp, Homo sapien
gacatggtacgcattccagggctga

SEQ ID NO: 1117970 - DNA, 25 bp, Homo sapien
ttgaaagcgctagaaaccagtgtgg

SEQ ID NO: 1117971 - DNA, 25 bp, Homo sapien
agctatttacatggcctcacaggca

SEQ ID NO: 1117972 - DNA, 25 bp, Homo sapien
cagttaactctgtgggaagtatcac

SEQ ID NO: 1117973 - DNA, 25 bp, Homo sapien
cccgtaaagctgtggaactggactt

SEQ ID NO: 1117974 - DNA, 25 bp, Homo sapien
gggcttgtgccgtaatcctgataac

SEQ ID NO: 1117975 - DNA, 25 bp, Homo sapien
tctgaattctctactacaggttgta

SEQ ID NO: 1117976 - DNA, 25 bp, Homo sapien
ggttgtatgccacagtgattaagat

SEQ ID NO: 1117977 - DNA, 25 bp, Homo sapien
gattaagattagtttccaggaagac

SEQ ID NO: 1117978 - DNA, 25 bp, Homo sapien
tcaaggtgggcaaatattctacaac

SEQ ID NO: 1117979 - DNA, 25 bp, Homo sapien
tcttaagggaccaccattgtgtata

SEQ ID NO: 1117980 - DNA, 25 bp, Homo sapien
cccactaagggacaacatttgtgac

SEQ ID NO: 1117981 - DNA, 25 bp, Homo sapien
aattgaatttgcatcagctcgctgg

SEQ ID NO: 1117982 - DNA, 25 bp, Homo sapien
tgttgtgtcttgttgcgggcaccgc

SEQ ID NO: 1117983 - DNA, 25 bp, Homo sapien
cattcgcttcctgctttcggtgtgt

SEQ ID NO: 1117984 - DNA, 25 bp, Homo sapien
gaagatggcgtctaccagccggtta

SEQ ID NO: 1117985 - DNA, 25 bp, Homo sapien
cagccggttagtatgtcccgccgag

SEQ ID NO: 1117986 - DNA, 25 bp, Homo sapien
tgcgtgggtgagtcgtctataaaaa

SEQ ID NO: 1117987 - DNA, 25 bp, Homo sapien
tctgctacgactgcgtgggtgagtc

SEQ ID NO: 1117988 - DNA, 25 bp, Homo sapien
gtagccctgctctgctacgactgcg

SEQ ID NO: 1117989 - DNA, 25 bp, Homo sapien
gactgcgtgggtgagtcgtctataa

SEQ ID NO: 1117990 - DNA, 25 bp, Homo sapien
agccctttcctggttgcacttgaca

SEQ ID NO: 1117991 - DNA, 25 bp, Homo sapien
catgaatccactaggtgcaggtcca

SEQ ID NO: 1117992 - DNA, 25 bp, Homo sapien
gctttactatgaaacctctactgga

SEQ ID NO: 1117993 - DNA, 25 bp, Homo sapien
tctactggactgaggtgcagcaccc

SEQ ID NO: 1117994 - DNA, 25 bp, Homo sapien
gagccaatccaaagctcaaaactga

SEQ ID NO: 1117995 - DNA, 25 bp, Homo sapien
agtttggcatgcttcaatccaatca

SEQ ID NO: 1117996 - DNA, 25 bp, Homo sapien
agagccaatccaaagctcaaaactg

SEQ ID NO: 1117997 - DNA, 25 bp, Homo sapien
tcaatagtttggcatgcttcaatcc

SEQ ID NO: 1117998 - DNA, 25 bp, Homo sapien
tgaaatcaaaagttctcagtggtcc

SEQ ID NO: 1117999 - DNA, 25 bp, Homo sapien
aaggtgaaatcaaaagttctcagtg

SEQ ID NO: 1118000 - DNA, 25 bp, Homo sapien
aatcaaaagttctcagtggtcccag

SEQ ID NO: 1118001 - DNA, 25 bp, Homo sapien
agaaaggtgaaatcaaaagttctca

SEQ ID NO: 1118002 - DNA, 25 bp, Homo sapien
cgccaggcaccagttttgggtcttt

SEQ ID NO: 1118003 - DNA, 25 bp, Homo sapien
gggtctttcgttgaattctgccata

SEQ ID NO: 1118004 - DNA, 25 bp, Homo sapien
cagaggctagctttggatatccaaa

SEQ ID NO: 1118005 - DNA, 25 bp, Homo sapien
cagagaatggattcccagaggctag

SEQ ID NO: 1118006 - DNA, 25 bp, Homo sapien
cacagcagacaccttaccggatctg

SEQ ID NO: 1118007 - DNA, 25 bp, Homo sapien
agcgagtctgcgatggcggcaaaca

SEQ ID NO: 1118008 - DNA, 25 bp, Homo sapien
cagcagcgagtctgcgatggcggca

SEQ ID NO: 1118009 - DNA, 25 bp, Homo sapien
gcacagcagacaccttaccggatct

SEQ ID NO: 1118010 - DNA, 25 bp, Homo sapien
attgtgctctcaggtgataagatga

SEQ ID NO: 1118011 - DNA, 25 bp, Homo sapien
cccattgtgctctcaggtgataaga

SEQ ID NO: 1118012 - DNA, 25 bp, Homo sapien
ccgatcattgtccttcccattgtgc

SEQ ID NO: 1118013 - DNA, 25 bp, Homo sapien
ttcccattgtgctctcaggtgataa

SEQ ID NO: 1118014 - DNA, 25 bp, Homo sapien
aagactttcagtgtaactggctgga

SEQ ID NO: 1118015 - DNA, 25 bp, Homo sapien
ctagaaataactatactggctaaat

SEQ ID NO: 1118016 - DNA, 25 bp, Homo sapien
gaacaataacaataggaagtgctgg

SEQ ID NO: 1118017 - DNA, 25 bp, Homo sapien
tccagccacttggagacagaacaag

SEQ ID NO: 1118018 - DNA, 25 bp, Homo sapien
tcagctttatcaagttacagtaaac

SEQ ID NO: 1118019 - DNA, 25 bp, Homo sapien
tctgtttagaattacaactcaatgg

SEQ ID NO: 1118020 - DNA, 25 bp, Homo sapien
aagttggcttgcttgggcgggtgct

SEQ ID NO: 1118021 - DNA, 25 bp, Homo sapien
tgatttcagaatactctggcagctt

SEQ ID NO: 1118022 - DNA, 25 bp, Homo sapien
tgataaaagaccgtgaaaccaacaa

SEQ ID NO: 1118023 - DNA, 25 bp, Homo sapien
aggactagttcgcagcagcagtgga

SEQ ID NO: 1118024 - DNA, 25 bp, Homo sapien
tggaagtactcttgataaaagaccg

SEQ ID NO: 1118025 - DNA, 25 bp, Homo sapien
gaaccgctcccctctcgtagagatg

SEQ ID NO: 1118026 - DNA, 25 bp, Homo sapien
cagccaatggagttccctgagtcca

SEQ ID NO: 1118027 - DNA, 25 bp, Homo sapien
atttccatccattccgcgatcgcgg

SEQ ID NO: 1118028 - DNA, 25 bp, Homo sapien
aatccccggccacgtccaggccatc

SEQ ID NO: 1118029 - DNA, 25 bp, Homo sapien
cgatcgcggcggaccccaccgtcat

SEQ ID NO: 1118030 - DNA, 25 bp, Homo sapien
aaaccagtcctcgtcctataacctg

SEQ ID NO: 1118031 - DNA, 25 bp, Homo sapien
cagtcgcatacatccgattcgagcc

SEQ ID NO: 1118032 - DNA, 25 bp, Homo sapien
tataacctgccccaacccgatcagt

SEQ ID NO: 1118033 - DNA, 25 bp, Homo sapien
gatccctccacttgtacaagcccag

SEQ ID NO: 1118034 - DNA, 25 bp, Homo sapien
cctccaagctattctccatagtagt

SEQ ID NO: 1118035 - DNA, 25 bp, Homo sapien
tccaagctattctccatagtagttg

SEQ ID NO: 1118036 - DNA, 25 bp, Homo sapien
tctcattgtagtttttatgtgtaat

SEQ ID NO: 1118037 - DNA, 25 bp, Homo sapien
atgtgtaatttgcatattttgaacc

SEQ ID NO: 1118038 - DNA, 25 bp, Homo sapien
aatattacacgatgaatcccaagag

SEQ ID NO: 1118039 - DNA, 25 bp, Homo sapien
tcggggagggcacaaatccagcatg

SEQ ID NO: 1118040 - DNA, 25 bp, Homo sapien
gcaacaggtaaaactccacagaaag

SEQ ID NO: 1118041 - DNA, 25 bp, Homo sapien
ccacagggatctatcgggaggtcag

SEQ ID NO: 1118042 - DNA, 25 bp, Homo sapien
tgcactttaactgaagatagagact

SEQ ID NO: 1118043 - DNA, 25 bp, Homo sapien
tgagacctttagacagttgaccctg

SEQ ID NO: 1118044 - DNA, 25 bp, Homo sapien
ttagcaagagtaggaattgaatcat

SEQ ID NO: 1118045 - DNA, 25 bp, Homo sapien
gattataaccttaatgtgacacctg

SEQ ID NO: 1118046 - DNA, 25 bp, Homo sapien
ttatccttgtaaccattattaagta

SEQ ID NO: 1118047 - DNA, 25 bp, Homo sapien
tatccttgtaaccattattaagtat

SEQ ID NO: 1118048 - DNA, 25 bp, Homo sapien
atttatccttgtaaccattattaag

SEQ ID NO: 1118049 - DNA, 25 bp, Homo sapien
atccttgtaaccattattaagtatg

SEQ ID NO: 1118050 - DNA, 25 bp, Homo sapien
aagcacaggtaagaactcctattgc

SEQ ID NO: 1118051 - DNA, 25 bp, Homo sapien
tgaagtacctcagctcagggacgtg

SEQ ID NO: 1118052 - DNA, 25 bp, Homo sapien
ggtaagaactcctattgcttcctct

SEQ ID NO: 1118053 - DNA, 25 bp, Homo sapien
gagcctataacgttgtggcaaggat

SEQ ID NO: 1118054 - DNA, 25 bp, Homo sapien
tgaatgatttccgtaatacaagaca

SEQ ID NO: 1118055 - DNA, 25 bp, Homo sapien
attctctggtgaaaaattgaatgat

SEQ ID NO: 1118056 - DNA, 25 bp, Homo sapien
tgatttccgtaatacaagacataat

SEQ ID NO: 1118057 - DNA, 25 bp, Homo sapien
aattgaatgatttccgtaatacaag

SEQ ID NO: 1118058 - DNA, 25 bp, Homo sapien
tgagagttccaaatagtgcacagac

SEQ ID NO: 1118059 - DNA, 25 bp, Homo sapien
ggaaactgtataaaacctgtgagag

SEQ ID NO: 1118060 - DNA, 25 bp, Homo sapien
caataaccgttctgctacaagtaaa

SEQ ID NO: 1118061 - DNA, 25 bp, Homo sapien
tataatatgccagcccaataaccgt

SEQ ID NO: 1118062 - DNA, 25 bp, Homo sapien
tcatcttcacctggataggtcagcc

SEQ ID NO: 1118063 - DNA, 25 bp, Homo sapien
gataggtcagccttttgaattgtag

SEQ ID NO: 1118064 - DNA, 25 bp, Homo sapien
caatgctgcacactctcatcttcac

SEQ ID NO: 1118065 - DNA, 25 bp, Homo sapien
gtgtaagaatttccaatgctgcaca

SEQ ID NO: 1118066 - DNA, 25 bp, Homo sapien
gcttccaaatcatttgtcctctttc

SEQ ID NO: 1118067 - DNA, 25 bp, Homo sapien
tatctttgcttccaaatcatttgtc

SEQ ID NO: 1118068 - DNA, 25 bp, Homo sapien
tttgcttccaaatcatttgtcctct

SEQ ID NO: 1118069 - DNA, 25 bp, Homo sapien
tctttgcttccaaatcatttgtcct

SEQ ID NO: 1118070 - DNA, 25 bp, Homo sapien
ggctcaacttgaaatgcaggcccag

SEQ ID NO: 1118071 - DNA, 25 bp, Homo sapien
tcaggatgcatcttgaaagactggc

SEQ ID NO: 1118072 - DNA, 25 bp, Homo sapien
cagagcagtggccaattgagcaact

SEQ ID NO: 1118073 - DNA, 25 bp, Homo sapien
tcctgggttaggtcagcatgatcca

SEQ ID NO: 1118074 - DNA, 25 bp, Homo sapien
ataatttgcaaagatggactttaaa

SEQ ID NO: 1118075 - DNA, 25 bp, Homo sapien
agatgctgtgtaactaaactgaaat

SEQ ID NO: 1118076 - DNA, 25 bp, Homo sapien
gccaaatacacaatgtatttatagc

SEQ ID NO: 1118077 - DNA, 25 bp, Homo sapien
tgtatttatagcaacgtataatttg

SEQ ID NO: 1118078 - DNA, 25 bp, Homo sapien
ggtctggccaagtctacaatgtccc

SEQ ID NO: 1118079 - DNA, 25 bp, Homo sapien
gactacacggtctatgagcaataat

SEQ ID NO: 1118080 - DNA, 25 bp, Homo sapien
ggacaaccaccctagcttcttagtg

SEQ ID NO: 1118081 - DNA, 25 bp, Homo sapien
ggaaatctcataagctggtaccact

SEQ ID NO: 1118082 - DNA, 25 bp, Homo sapien
gatacaggatctccagacgaaaatg

SEQ ID NO: 1118083 - DNA, 25 bp, Homo sapien
tagaatttggaacaagcgtcactac

SEQ ID NO: 1118084 - DNA, 25 bp, Homo sapien
gtcacccctaaccaaggcataattg

SEQ ID NO: 1118085 - DNA, 25 bp, Homo sapien
gacgaaaggcatgtaccataagcta

SEQ ID NO: 1118086 - DNA, 25 bp, Homo sapien
ttcatcctacttatcttgagcaggc

SEQ ID NO: 1118087 - DNA, 25 bp, Homo sapien
tatgcatacaactgacaaccagagc

SEQ ID NO: 1118088 - DNA, 25 bp, Homo sapien
aaaagaaagcgacttcagcagaaag

SEQ ID NO: 1118089 - DNA, 25 bp, Homo sapien
ttgagcaggcttccgttcagccaca

SEQ ID NO: 1118090 - DNA, 25 bp, Homo sapien
ccctgcctagggtttgtgatcttct

SEQ ID NO: 1118091 - DNA, 25 bp, Homo sapien
tttggaataatgctatgcccattca

SEQ ID NO: 1118092 - DNA, 25 bp, Homo sapien
tagtccaagcattggcaaactacag

SEQ ID NO: 1118093 - DNA, 25 bp, Homo sapien
catagactaaaacatgaaccgtgtg

SEQ ID NO: 1118094 - DNA, 25 bp, Homo sapien
tttagctgtaggtcaattgttctca

SEQ ID NO: 1118095 - DNA, 25 bp, Homo sapien
tacacccatcaagactactatcctg

SEQ ID NO: 1118096 - DNA, 25 bp, Homo sapien
tatcctgctttggtactttaggcaa

SEQ ID NO: 1118097 - DNA, 25 bp, Homo sapien
agttttcagtgtatagtccttggca

SEQ ID NO: 1118098 - DNA, 25 bp, Homo sapien
aagaaaacgctgagtcgccactgga

SEQ ID NO: 1118099 - DNA, 25 bp, Homo sapien
tgaaccaagtgccagaaccttgtgg

SEQ ID NO: 1118100 - DNA, 25 bp, Homo sapien
aagtcttagtagtctgcgcagtgca

SEQ ID NO: 1118101 - DNA, 25 bp, Homo sapien
tggtacgatcaaaggcactatgtct

SEQ ID NO: 1118102 - DNA, 25 bp, Homo sapien
ctacgaactgatagggaaagactcc

SEQ ID NO: 1118103 - DNA, 25 bp, Homo sapien
tagtctaagcaactttggaatacag

SEQ ID NO: 1118104 - DNA, 25 bp, Homo sapien
gaaagtgacacttctctgactacag

SEQ ID NO: 1118105 - DNA, 25 bp, Homo sapien
cacataaatggagtagatgcctgtc

SEQ ID NO: 1118106 - DNA, 25 bp, Homo sapien
gggtaacctgagtcccacagtctga

SEQ ID NO: 1118107 - DNA, 25 bp, Homo sapien
gaaatcaggaccaaggctgggttag

SEQ ID NO: 1118108 - DNA, 25 bp, Homo sapien
catgtcagatttgagataccaagct

SEQ ID NO: 1118109 - DNA, 25 bp, Homo sapien
gctcaaagggcttcctgcatagtga

SEQ ID NO: 1118110 - DNA, 25 bp, Homo sapien
agcctggacgttggaggaagcccca

SEQ ID NO: 1118111 - DNA, 25 bp, Homo sapien
aaagtccacagttaccgtgagagaa

SEQ ID NO: 1118112 - DNA, 25 bp, Homo sapien
gcagtgcagccaaactcggaagaaa

SEQ ID NO: 1118113 - DNA, 25 bp, Homo sapien
cacagttaccgtgagagaaaaaaga

SEQ ID NO: 1118114 - DNA, 25 bp, Homo sapien
gagtgggccacttcgcaccaattta

SEQ ID NO: 1118115 - DNA, 25 bp, Homo sapien
tgcttgaggcacaatgccagttcct

SEQ ID NO: 1118116 - DNA, 25 bp, Homo sapien
ggaaaacatagctcaactcaagaag

SEQ ID NO: 1118117 - DNA, 25 bp, Homo sapien
taaaacctcggtggaacagctaagc

SEQ ID NO: 1118118 - DNA, 25 bp, Homo sapien
gaccatgagagaggctagcagactg

SEQ ID NO: 1118119 - DNA, 25 bp, Homo sapien
caagcgagtgtgtgccagcaaaaca

SEQ ID NO: 1118120 - DNA, 25 bp, Homo sapien
gttaactggcaacaacacaccgatg

SEQ ID NO: 1118121 - DNA, 25 bp, Homo sapien
tgtcccacaggcaagatagcccagt

SEQ ID NO: 1118122 - DNA, 25 bp, Homo sapien
taccattttcataacatcacctact

SEQ ID NO: 1118123 - DNA, 25 bp, Homo sapien
tcacctacttcattctacagtctca

SEQ ID NO: 1118124 - DNA, 25 bp, Homo sapien
gtggatacctgttggcacctacaat

SEQ ID NO: 1118125 - DNA, 25 bp, Homo sapien
gattatatttagtggagtggatacc

SEQ ID NO: 1118126 - DNA, 25 bp, Homo sapien
tggagataatatttcccggcatagc

SEQ ID NO: 1118127 - DNA, 25 bp, Homo sapien
tgtgaataggccttatgttctatgc

SEQ ID NO: 1118128 - DNA, 25 bp, Homo sapien
gccttatgttctatgcctccagatc

SEQ ID NO: 1118129 - DNA, 25 bp, Homo sapien
gagataatatttcccggcatagctg

SEQ ID NO: 1118130 - DNA, 25 bp, Homo sapien
tgtctagcaattctactattgggta

SEQ ID NO: 1118131 - DNA, 25 bp, Homo sapien
taggaagaacaggacagtgagctgg

SEQ ID NO: 1118132 - DNA, 25 bp, Homo sapien
tcatattggctagtgagagtgatct

SEQ ID NO: 1118133 - DNA, 25 bp, Homo sapien
ggctcttggcttaatgttattaacg

SEQ ID NO: 1118134 - DNA, 25 bp, Homo sapien
gctgtctagtgctcaaaacttgcag

SEQ ID NO: 1118135 - DNA, 25 bp, Homo sapien
tatttctgctgtctagtgctcaaaa

SEQ ID NO: 1118136 - DNA, 25 bp, Homo sapien
agggatagcattgaactatttgctc

SEQ ID NO: 1118137 - DNA, 25 bp, Homo sapien
caaaacttgcagctagaattgaggg

SEQ ID NO: 1118138 - DNA, 25 bp, Homo sapien
taacttgatgcctccccttttgttc

SEQ ID NO: 1118139 - DNA, 25 bp, Homo sapien
tatggtttgaggtttggtaacttga

SEQ ID NO: 1118140 - DNA, 25 bp, Homo sapien
gattgtaggtgtacagcattatttc

SEQ ID NO: 1118141 - DNA, 25 bp, Homo sapien
tatgcagagtaagctgggggcccag

SEQ ID NO: 1118142 - DNA, 25 bp, Homo sapien
ctctctaagccaaaccacaccctgg

SEQ ID NO: 1118143 - DNA, 25 bp, Homo sapien
gcctgggcgatgtagaaaaggtaag

SEQ ID NO: 1118144 - DNA, 25 bp, Homo sapien
tggtgtgtgccccacctctctaagc

SEQ ID NO: 1118145 - DNA, 25 bp, Homo sapien
ctgggctccacggtgcagtctgaaa

SEQ ID NO: 1118146 - DNA, 25 bp, Homo sapien
tggatgtctgtaaatccggctggac

SEQ ID NO: 1118147 - DNA, 25 bp, Homo sapien
tctaagaacagtccgtttctcgagg

SEQ ID NO: 1118148 - DNA, 25 bp, Homo sapien
tttctcgaggatccaggcgcaggag

SEQ ID NO: 1118149 - DNA, 25 bp, Homo sapien
aacaaattcccaagcgcagactgca

SEQ ID NO: 1118150 - DNA, 25 bp, Homo sapien
tgtgtaacacagacatattgctatg

SEQ ID NO: 1118151 - DNA, 25 bp, Homo sapien
catagacatattgctatgtgcaatc

SEQ ID NO: 1118152 - DNA, 25 bp, Homo sapien
gaacacttatagacttttatctgtg

SEQ ID NO: 1118153 - DNA, 25 bp, Homo sapien
taggactattataacaggcacatgc

SEQ ID NO: 1118154 - DNA, 25 bp, Homo sapien
aacactcaccagtctttttattatt

SEQ ID NO: 1118155 - DNA, 25 bp, Homo sapien
tacatatacacgtgccatgttggtg

SEQ ID NO: 1118156 - DNA, 25 bp, Homo sapien
acatatacacgtgccatgttggtgt

SEQ ID NO: 1118157 - DNA, 25 bp, Homo sapien
ctcaccagtctttttattattatta

SEQ ID NO: 1118158 - DNA, 25 bp, Homo sapien
ccaagagtctcctttgcaagtcact

SEQ ID NO: 1118159 - DNA, 25 bp, Homo sapien
tttcccaagagtctcctttgcaagt

SEQ ID NO: 1118160 - DNA, 25 bp, Homo sapien
ttcccaattggatctccagaagaag

SEQ ID NO: 1118161 - DNA, 25 bp, Homo sapien
ctctggttaaggtatttcccaattg

SEQ ID NO: 1118162 - DNA, 25 bp, Homo sapien
cgatgatccatgtgttttactctaa

SEQ ID NO: 1118163 - DNA, 25 bp, Homo sapien
aaagtgctaaatatgggagtttcct

SEQ ID NO: 1118164 - DNA, 25 bp, Homo sapien
gcccagaggactgttaataacgatg

SEQ ID NO: 1118165 - DNA, 25 bp, Homo sapien
gaaactgtagaccttgggacaatca

SEQ ID NO: 1118166 - DNA, 25 bp, Homo sapien
tggggagtagtatgtccccaggttc

SEQ ID NO: 1118167 - DNA, 25 bp, Homo sapien
cagtgctggggagtagtatgtcccc

SEQ ID NO: 1118168 - DNA, 25 bp, Homo sapien
agtgctggggagtagtatgtcccca

SEQ ID NO: 1118169 - DNA, 25 bp, Homo sapien
ggagtagtatgtccccaggttcagt

SEQ ID NO: 1118170 - DNA, 25 bp, Homo sapien
caggtgagagatcacttccatcatc

SEQ ID NO: 1118171 - DNA, 25 bp, Homo sapien
tcacgctgggccagagtcatcactg

SEQ ID NO: 1118172 - DNA, 25 bp, Homo sapien
gggaacctcattcgctgggccatct

SEQ ID NO: 1118173 - DNA, 25 bp, Homo sapien
ctctcacaggctgtgtgcatatcca

SEQ ID NO: 1118174 - DNA, 25 bp, Homo sapien
gcatccacataagttaccaccagac

SEQ ID NO: 1118175 - DNA, 25 bp, Homo sapien
tgcaatattgaacagatgcctgttc

SEQ ID NO: 1118176 - DNA, 25 bp, Homo sapien
tgaacagatgcctgttcgttctgca

SEQ ID NO: 1118177 - DNA, 25 bp, Homo sapien
gcagccataaatcctccttcctatt

SEQ ID NO: 1118178 - DNA, 25 bp, Homo sapien
acagatgcctgttcgttctgcagcc

SEQ ID NO: 1118179 - DNA, 25 bp, Homo sapien
tgcctgatacaacattggatgaaga

SEQ ID NO: 1118180 - DNA, 25 bp, Homo sapien
cctgatacaacattggatgaagaaa

SEQ ID NO: 1118181 - DNA, 25 bp, Homo sapien
tttgggagttgatatttctactctc

SEQ ID NO: 1118182 - DNA, 25 bp, Homo sapien
cctgtactgtttcttttgggagttg

SEQ ID NO: 1118183 - DNA, 25 bp, Homo sapien
actgatacctctagcactatgctgg

SEQ ID NO: 1118184 - DNA, 25 bp, Homo sapien
tgtgattcacctatgaggacctgac

SEQ ID NO: 1118185 - DNA, 25 bp, Homo sapien
ggacctgacaaaggcttcaaacagc

SEQ ID NO: 1118186 - DNA, 25 bp, Homo sapien
tctgccactgatacctctagcacta

SEQ ID NO: 1118187 - DNA, 25 bp, Homo sapien
gacacatgcattcctgtcaccatca

SEQ ID NO: 1118188 - DNA, 25 bp, Homo sapien
cacttttacagttttgttggtcatt

SEQ ID NO: 1118189 - DNA, 25 bp, Homo sapien
cttctcttgatccacggttgacaca

SEQ ID NO: 1118190 - DNA, 25 bp, Homo sapien
cattcctgtcaccatcaaagcgttt

SEQ ID NO: 1118191 - DNA, 25 bp, Homo sapien
tacgcaatagatacacaggaaacgc

SEQ ID NO: 1118192 - DNA, 25 bp, Homo sapien
caggaaacgctctcatagtccaaca

SEQ ID NO: 1118193 - DNA, 25 bp, Homo sapien
tgcttctgaactgccgtacgcaata

SEQ ID NO: 1118194 - DNA, 25 bp, Homo sapien
tgaactgccgtacgcaatagataca

SEQ ID NO: 1118195 - DNA, 25 bp, Homo sapien
gctgagtaagctagttgtttccaca

SEQ ID NO: 1118196 - DNA, 25 bp, Homo sapien
tgctctatagcaccgcaggtccaag

SEQ ID NO: 1118197 - DNA, 25 bp, Homo sapien
ccaagaacagttttcagttgcctca

SEQ ID NO: 1118198 - DNA, 25 bp, Homo sapien
aaagctgagtaagctagttgtttcc

SEQ ID NO: 1118199 - DNA, 25 bp, Homo sapien
gagagagatagccaggcaggcgccc

SEQ ID NO: 1118200 - DNA, 25 bp, Homo sapien
tgagagagatagccaggcaggcgcc

SEQ ID NO: 1118201 - DNA, 25 bp, Homo sapien
ctgagagagatagccaggcaggcgc

SEQ ID NO: 1118202 - DNA, 25 bp, Homo sapien
cggtataattgcctggaagctcctt

SEQ ID NO: 1118203 - DNA, 25 bp, Homo sapien
gtgaccactagaaagatagacaaga

SEQ ID NO: 1118204 - DNA, 25 bp, Homo sapien
tctcccttccggtataattgcctgg

SEQ ID NO: 1118205 - DNA, 25 bp, Homo sapien
gaaagatagacaagaaactctccct

SEQ ID NO: 1118206 - DNA, 25 bp, Homo sapien
ccaccaggcaaacgggggccaacat

SEQ ID NO: 1118207 - DNA, 25 bp, Homo sapien
gctcattgttattttccaccaggca

SEQ ID NO: 1118208 - DNA, 25 bp, Homo sapien
attgttattttccaccaggcaaacg

SEQ ID NO: 1118209 - DNA, 25 bp, Homo sapien
tccaccaggcaaacgggggccaaca

SEQ ID NO: 1118210 - DNA, 25 bp, Homo sapien
gatttccctgtacggtacagtccta

SEQ ID NO: 1118211 - DNA, 25 bp, Homo sapien
tgccagatggttcatcaagtaggat

SEQ ID NO: 1118212 - DNA, 25 bp, Homo sapien
attctgtcctgccagatggttcatc

SEQ ID NO: 1118213 - DNA, 25 bp, Homo sapien
agtaggatttccctgtacggtacag

SEQ ID NO: 1118214 - DNA, 25 bp, Homo sapien
tttcagactgcaccgtggagcccag

SEQ ID NO: 1118215 - DNA, 25 bp, Homo sapien
gtttcagactgcaccgtggagccca

SEQ ID NO: 1118216 - DNA, 25 bp, Homo sapien
cagaccttcggtgtccagaaggacc

SEQ ID NO: 1118217 - DNA, 25 bp, Homo sapien
ggaccagggtgtggtttggcttgga

SEQ ID NO: 1118218 - DNA, 25 bp, Homo sapien
accttcggtgtccagaaggaccagg

SEQ ID NO: 1118219 - DNA, 25 bp, Homo sapien
ttccacatcgcccagaccttcggtg

SEQ ID NO: 1118220 - DNA, 25 bp, Homo sapien
aggaacctgtctatgactctctgtc

SEQ ID NO: 1118221 - DNA, 25 bp, Homo sapien
aaaggaacctgtctatgactctctg

SEQ ID NO: 1118222 - DNA, 25 bp, Homo sapien
tggaataaaaggaacctgtctatga

SEQ ID NO: 1118223 - DNA, 25 bp, Homo sapien
aataaaaggaacctgtctatgactc

SEQ ID NO: 1118224 - DNA, 25 bp, Homo sapien
cactgtttgatagacgactttaaag

SEQ ID NO: 1118225 - DNA, 25 bp, Homo sapien
tagacaggagtatatcactgtttga

SEQ ID NO: 1118226 - DNA, 25 bp, Homo sapien
ttaatacagaatcgcaaaatgctct

SEQ ID NO: 1118227 - DNA, 25 bp, Homo sapien
caatatatattgcaaagccacagta

SEQ ID NO: 1118228 - DNA, 25 bp, Homo sapien
ggcaaagatccaggagtcattctta

SEQ ID NO: 1118229 - DNA, 25 bp, Homo sapien
agccagggcaaagatccaggagtca

SEQ ID NO: 1118230 - DNA, 25 bp, Homo sapien
agcacagccagggcaaagatccagg

SEQ ID NO: 1118231 - DNA, 25 bp, Homo sapien
aaagatccaggagtcattcttaggg

SEQ ID NO: 1118232 - DNA, 25 bp, Homo sapien
tggttgatggtgctcatgctgttgt

SEQ ID NO: 1118233 - DNA, 25 bp, Homo sapien
ttgatggtgctcatgctgttgtaga

SEQ ID NO: 1118234 - DNA, 25 bp, Homo sapien
ggtgctcatgctgttgtagacaaag

SEQ ID NO: 1118235 - DNA, 25 bp, Homo sapien
gatggtgctcatgctgttgtagaca

SEQ ID NO: 1118236 - DNA, 25 bp, Homo sapien
ttctgttctgttcctggaaggatac

SEQ ID NO: 1118237 - DNA, 25 bp, Homo sapien
ggtggttctgttctgttcctggaag

SEQ ID NO: 1118238 - DNA, 25 bp, Homo sapien
ctggtggttctgttctgttcctgga

SEQ ID NO: 1118239 - DNA, 25 bp, Homo sapien
tggttctgttctgttcctggaagga

SEQ ID NO: 1118240 - DNA, 25 bp, Homo sapien
ttgatctccattcctataaagtcaa

SEQ ID NO: 1118241 - DNA, 25 bp, Homo sapien
tctccattcctataaagtcaatgaa

SEQ ID NO: 1118242 - DNA, 25 bp, Homo sapien
gatctccattcctataaagtcaatg

SEQ ID NO: 1118243 - DNA, 25 bp, Homo sapien
tccattcctataaagtcaatgaaac

SEQ ID NO: 1118244 - DNA, 25 bp, Homo sapien
gagtgaaatcccgtactgtccaaag

SEQ ID NO: 1118245 - DNA, 25 bp, Homo sapien
catcttctgtgatagggtgaccgtt

SEQ ID NO: 1118246 - DNA, 25 bp, Homo sapien
tcagctccagagtgaaatcccgtac

SEQ ID NO: 1118247 - DNA, 25 bp, Homo sapien
aattagttctgtgagctccgtcaca

SEQ ID NO: 1118248 - DNA, 25 bp, Homo sapien
aaaattggatgtttgaactctggga

SEQ ID NO: 1118249 - DNA, 25 bp, Homo sapien
tggctagaaggtctttgtcatttgt

SEQ ID NO: 1118250 - DNA, 25 bp, Homo sapien
cttgcatgagtgaagatgtaagaac

SEQ ID NO: 1118251 - DNA, 25 bp, Homo sapien
tctcaatattggctagaaggtcttt

SEQ ID NO: 1118252 - DNA, 25 bp, Homo sapien
tcttgcatgagtgaagatgtaagaa

SEQ ID NO: 1118253 - DNA, 25 bp, Homo sapien
cagtgactgtgattccctccctgag

SEQ ID NO: 1118254 - DNA, 25 bp, Homo sapien
gtgactgtgattccctccctgaggg

SEQ ID NO: 1118255 - DNA, 25 bp, Homo sapien
ccagtgactgtgattccctccctga

SEQ ID NO: 1118256 - DNA, 25 bp, Homo sapien
agtgactgtgattccctccctgagg

SEQ ID NO: 1118257 - DNA, 25 bp, Homo sapien
tgatggcctctacataagtcactgc

SEQ ID NO: 1118258 - DNA, 25 bp, Homo sapien
gatggcctctacataagtcactgcc

SEQ ID NO: 1118259 - DNA, 25 bp, Homo sapien
gggagcttcactcgctgggccatct

SEQ ID NO: 1118260 - DNA, 25 bp, Homo sapien
ctgtggggagcttcactcgctgggc

SEQ ID NO: 1118261 - DNA, 25 bp, Homo sapien
gtgacaataaaggcaactataggct

SEQ ID NO: 1118262 - DNA, 25 bp, Homo sapien
ggtgacaataaaggcaactataggc

SEQ ID NO: 1118263 - DNA, 25 bp, Homo sapien
tggtgacaataaaggcaactatagg

SEQ ID NO: 1118264 - DNA, 25 bp, Homo sapien
agaaatcccccttcttattcattgt

SEQ ID NO: 1118265 - DNA, 25 bp, Homo sapien
gcagcaagaaatcccccttcttatt

SEQ ID NO: 1118266 - DNA, 25 bp, Homo sapien
aaatcccccttcttattcattgtgg

SEQ ID NO: 1118267 - DNA, 25 bp, Homo sapien
ctgcagcaagaaatcccccttctta

SEQ ID NO: 1118268 - DNA, 25 bp, Homo sapien
gctcattgagtttagcctggcagta

SEQ ID NO: 1118269 - DNA, 25 bp, Homo sapien
catgtagagcttgtgccctccagga

SEQ ID NO: 1118270 - DNA, 25 bp, Homo sapien
ggaacttgccaatagtcctgttcaa

SEQ ID NO: 1118271 - DNA, 25 bp, Homo sapien
ttagcctggcagtattgaacagatg

SEQ ID NO: 1118272 - DNA, 25 bp, Homo sapien
ctatcagtgagggctttatctgact

SEQ ID NO: 1118273 - DNA, 25 bp, Homo sapien
tctctatcagtgagggctttatctg

SEQ ID NO: 1118274 - DNA, 25 bp, Homo sapien
tctatcagtgagggctttatctgac

SEQ ID NO: 1118275 - DNA, 25 bp, Homo sapien
ctctatcagtgagggctttatctga

SEQ ID NO: 1118276 - DNA, 25 bp, Homo sapien
gctctctcagtaggtgttctctctc

SEQ ID NO: 1118277 - DNA, 25 bp, Homo sapien
tccaacatcataatctgctctctca

SEQ ID NO: 1118278 - DNA, 25 bp, Homo sapien
tttccttgcgactcttatcttgagc

SEQ ID NO: 1118279 - DNA, 25 bp, Homo sapien
ccttcagttgggctatgttttcctt

SEQ ID NO: 1118280 - DNA, 25 bp, Homo sapien
tattgcagttagctcatcggcaagg

SEQ ID NO: 1118281 - DNA, 25 bp, Homo sapien
tgtccaaggttcgtgcaatccaggg

SEQ ID NO: 1118282 - DNA, 25 bp, Homo sapien
catgaccaattaatttagcaggagc

SEQ ID NO: 1118283 - DNA, 25 bp, Homo sapien
tagcaggagcagacaatattgcagt

SEQ ID NO: 1118284 - DNA, 25 bp, Homo sapien
aggggagcttatgctttttaaagag

SEQ ID NO: 1118285 - DNA, 25 bp, Homo sapien
ggagcttatgctttttaaagagtga

SEQ ID NO: 1118286 - DNA, 25 bp, Homo sapien
tatgctttttaaagagtgagctcac

SEQ ID NO: 1118287 - DNA, 25 bp, Homo sapien
cttatgctttttaaagagtgagctc

SEQ ID NO: 1118288 - DNA, 25 bp, Homo sapien
caagaccattctttactggtacaaa

SEQ ID NO: 1118289 - DNA, 25 bp, Homo sapien
tcttaccaatctaatgtgaaggaca

SEQ ID NO: 1118290 - DNA, 25 bp, Homo sapien
gggccaggcactgatatcctctaat

SEQ ID NO: 1118291 - DNA, 25 bp, Homo sapien
gcctcagtggacctcttgtatgtaa

SEQ ID NO: 1118292 - DNA, 25 bp, Homo sapien
agaagcaacaaggaatttcatcatc

SEQ ID NO: 1118293 - DNA, 25 bp, Homo sapien
tagacccctcattgggctggctgat

SEQ ID NO: 1118294 - DNA, 25 bp, Homo sapien
ctagtactcagatcttagtcttaga

SEQ ID NO: 1118295 - DNA, 25 bp, Homo sapien
cttagacccctcattgggctggctg

SEQ ID NO: 1118296 - DNA, 25 bp, Homo sapien
tactcagatcttagtcttagacccc

SEQ ID NO: 1118297 - DNA, 25 bp, Homo sapien
gaattatctccatcaggccttgcag

SEQ ID NO: 1118298 - DNA, 25 bp, Homo sapien
taaatggctccagacgtttcctagg

SEQ ID NO: 1118299 - DNA, 25 bp, Homo sapien
gactataattacaacctggaggccc

SEQ ID NO: 1118300 - DNA, 25 bp, Homo sapien
tatctgaggctaccgcaaaaagacc

SEQ ID NO: 1118301 - DNA, 25 bp, Homo sapien
tagagactgtgatacatgaagttac

SEQ ID NO: 1118302 - DNA, 25 bp, Homo sapien
cagtttcacagagactgtaggacat

SEQ ID NO: 1118303 - DNA, 25 bp, Homo sapien
ctagagaaggacactataccaggaa

SEQ ID NO: 1118304 - DNA, 25 bp, Homo sapien
gaggtcataggtttgtctgagtcac

SEQ ID NO: 1118305 - DNA, 25 bp, Homo sapien
catgttgagggcttggtcgacacca

SEQ ID NO: 1118306 - DNA, 25 bp, Homo sapien
tctgtgcaactctcaagggagaaaa

SEQ ID NO: 1118307 - DNA, 25 bp, Homo sapien
tcctgggacataacaggtaagccct

SEQ ID NO: 1118308 - DNA, 25 bp, Homo sapien
cataccagtttgagctctgaaggga

SEQ ID NO: 1118309 - DNA, 25 bp, Homo sapien
ctgctgaagaactgactgccagacc

SEQ ID NO: 1118310 - DNA, 25 bp, Homo sapien
taggaagcacacggccactctgcca

SEQ ID NO: 1118311 - DNA, 25 bp, Homo sapien
cagacctctggatgtgaggagacat

SEQ ID NO: 1118312 - DNA, 25 bp, Homo sapien
gaagaactgactgccagacctctgg

SEQ ID NO: 1118313 - DNA, 25 bp, Homo sapien
ccatgagtcttcagttcagtcctac

SEQ ID NO: 1118314 - DNA, 25 bp, Homo sapien
cattcatgagttctgtgccgctgac

SEQ ID NO: 1118315 - DNA, 25 bp, Homo sapien
ctccaggttgtgctgtgtagccacc

SEQ ID NO: 1118316 - DNA, 25 bp, Homo sapien
agtcctactgatcacaaccttgttg

SEQ ID NO: 1118317 - DNA, 25 bp, Homo sapien
cacaggtagttgaattcctcaaaat

SEQ ID NO: 1118318 - DNA, 25 bp, Homo sapien
gtgtcactatccatcatggccacca

SEQ ID NO: 1118319 - DNA, 25 bp, Homo sapien
gcctatggtgtcactatccatcatg

SEQ ID NO: 1118320 - DNA, 25 bp, Homo sapien
aatccagcttgcctatggtgtcact

SEQ ID NO: 1118321 - DNA, 25 bp, Homo sapien
atgagaagggctaaccatcctaaat

SEQ ID NO: 1118322 - DNA, 25 bp, Homo sapien
gagaagggctaaccatcctaaatat

SEQ ID NO: 1118323 - DNA, 25 bp, Homo sapien
tgagaagggctaaccatcctaaata

SEQ ID NO: 1118324 - DNA, 25 bp, Homo sapien
atattttactgttccaacgttgtag

SEQ ID NO: 1118325 - DNA, 25 bp, Homo sapien
ttagttcatgaggagtggcttctag

SEQ ID NO: 1118326 - DNA, 25 bp, Homo sapien
tagttcatgaggagtggcttctagc

SEQ ID NO: 1118327 - DNA, 25 bp, Homo sapien
tatggaagtattgtcaaagtagctc

SEQ ID NO: 1118328 - DNA, 25 bp, Homo sapien
gaatcataagattccccattatggc

SEQ ID NO: 1118329 - DNA, 25 bp, Homo sapien
gttttgcaattataagggagaatca

SEQ ID NO: 1118330 - DNA, 25 bp, Homo sapien
aatgagagtttctagtgttttgcaa

SEQ ID NO: 1118331 - DNA, 25 bp, Homo sapien
cattgggcctgtcatgtggatctct

SEQ ID NO: 1118332 - DNA, 25 bp, Homo sapien
ccattagtgttctcaatgaggcaca

SEQ ID NO: 1118333 - DNA, 25 bp, Homo sapien
cagagcttctggattcgccatcagt

SEQ ID NO: 1118334 - DNA, 25 bp, Homo sapien
gtaatggcagaaaggatcttcagag

SEQ ID NO: 1118335 - DNA, 25 bp, Homo sapien
agcttgttaatcaggtaggattttc

SEQ ID NO: 1118336 - DNA, 25 bp, Homo sapien
ccagcttgttaatcaggtaggattt

SEQ ID NO: 1118337 - DNA, 25 bp, Homo sapien
gagccagcttgttaatcaggtagga

SEQ ID NO: 1118338 - DNA, 25 bp, Homo sapien
tctgagccagcttgttaatcaggta

SEQ ID NO: 1118339 - DNA, 25 bp, Homo sapien
ttaaaattatcccttagagcagcgt

SEQ ID NO: 1118340 - DNA, 25 bp, Homo sapien
taaaattatcccttagagcagcgtg

SEQ ID NO: 1118341 - DNA, 25 bp, Homo sapien
cacctggctcggagggtcctacgcc

SEQ ID NO: 1118342 - DNA, 25 bp, Homo sapien
acgcccacggagtctcgctgattgc

SEQ ID NO: 1118343 - DNA, 25 bp, Homo sapien
cggtgcaccacgagattatatcccg

SEQ ID NO: 1118344 - DNA, 25 bp, Homo sapien
aaaaaacggtgcaccacgagattat

SEQ ID NO: 1118345 - DNA, 25 bp, Homo sapien
taggaaatttgaatatccaatgcat

SEQ ID NO: 1118346 - DNA, 25 bp, Homo sapien
agaccctcggtgtccagcagaacta

SEQ ID NO: 1118347 - DNA, 25 bp, Homo sapien
agattcctttagtgtgagactgcac

SEQ ID NO: 1118348 - DNA, 25 bp, Homo sapien
tgtccagcagaactaggatgtggcc

SEQ ID NO: 1118349 - DNA, 25 bp, Homo sapien
gcagaactaggatgtggcctggctt

SEQ ID NO: 1118350 - DNA, 25 bp, Homo sapien
aggaggacggccagggcgaagatcc

SEQ ID NO: 1118351 - DNA, 25 bp, Homo sapien
ggcgaagatccaggagtcattctgg

SEQ ID NO: 1118352 - DNA, 25 bp, Homo sapien
gaagatccaggagtcattctggttg

SEQ ID NO: 1118353 - DNA, 25 bp, Homo sapien
tccaggagtcattctggttgtcacc

SEQ ID NO: 1118354 - DNA, 25 bp, Homo sapien
tagaccctgtccaagatctattgaa

SEQ ID NO: 1118355 - DNA, 25 bp, Homo sapien
tgggatcactcctctgtactttatg

SEQ ID NO: 1118356 - DNA, 25 bp, Homo sapien
taaccccaagcaacattaggacagg

SEQ ID NO: 1118357 - DNA, 25 bp, Homo sapien
tcctcagaagatacgtatgcatacc

SEQ ID NO: 1118358 - DNA, 25 bp, Homo sapien
gcaatagccttttgcactgcggctg

SEQ ID NO: 1118359 - DNA, 25 bp, Homo sapien
gcgttctccatgcagggtagatccc

SEQ ID NO: 1118360 - DNA, 25 bp, Homo sapien
tgagttctctatctgggccaaggcc

SEQ ID NO: 1118361 - DNA, 25 bp, Homo sapien
caaggccaggactgcgttctccatg

SEQ ID NO: 1118362 - DNA, 25 bp, Homo sapien
catctttgaaggaactcctgatgaa

SEQ ID NO: 1118363 - DNA, 25 bp, Homo sapien
acatctttgaaggaactcctgatga

SEQ ID NO: 1118364 - DNA, 25 bp, Homo sapien
tttgaaatagatggtccacatcttt

SEQ ID NO: 1118365 - DNA, 25 bp, Homo sapien
ggtccacatctttgaaggaactcct

SEQ ID NO: 1118366 - DNA, 25 bp, Homo sapien
tgaccctaaaccatataaatttgag

SEQ ID NO: 1118367 - DNA, 25 bp, Homo sapien
atgaccctaaaccatataaatttga

SEQ ID NO: 1118368 - DNA, 25 bp, Homo sapien
gagtctgtaataatacagttggtcc

SEQ ID NO: 1118369 - DNA, 25 bp, Homo sapien
gaatatcaaatcagtctgagaagag

SEQ ID NO: 1118370 - DNA, 25 bp, Homo sapien
gaagctctggttatcagttgtatgc

SEQ ID NO: 1118371 - DNA, 25 bp, Homo sapien
gaacagaagcatgctcaagataagc

SEQ ID NO: 1118372 - DNA, 25 bp, Homo sapien
gattgatagctttatgtcaaccgtt

SEQ ID NO: 1118373 - DNA, 25 bp, Homo sapien
gtgaggttcaggaccgagattgata

SEQ ID NO: 1118374 - DNA, 25 bp, Homo sapien
actgaagtcgctttctttttggagg

SEQ ID NO: 1118375 - DNA, 25 bp, Homo sapien
gctttatgtcaaccgttagaggaaa

SEQ ID NO: 1118376 - DNA, 25 bp, Homo sapien
ggttcctcatagtactttttctcca

SEQ ID NO: 1118377 - DNA, 25 bp, Homo sapien
ttcttctagaggactgaaaatgacc

SEQ ID NO: 1118378 - DNA, 25 bp, Homo sapien
catcccgctttttgtctagctgggc

SEQ ID NO: 1118379 - DNA, 25 bp, Homo sapien
taaagctgagcaacgatctgatgat

SEQ ID NO: 1118380 - DNA, 25 bp, Homo sapien
aggtttccataatcgacagatgaat

SEQ ID NO: 1118381 - DNA, 25 bp, Homo sapien
gcaggtttccataatcgacagatga

SEQ ID NO: 1118382 - DNA, 25 bp, Homo sapien
agcaggtttccataatcgacagatg

SEQ ID NO: 1118383 - DNA, 25 bp, Homo sapien
caggtttccataatcgacagatgaa

SEQ ID NO: 1118384 - DNA, 25 bp, Homo sapien
ggctgtaagcaggtgttcctgtttg

SEQ ID NO: 1118385 - DNA, 25 bp, Homo sapien
ctgtaagcaggtgttcctgtttgtc

SEQ ID NO: 1118386 - DNA, 25 bp, Homo sapien
gctgtaagcaggtgttcctgtttgt

SEQ ID NO: 1118387 - DNA, 25 bp, Homo sapien
gagtctggtctgtctggagaattgc

SEQ ID NO: 1118388 - DNA, 25 bp, Homo sapien
ttgcatcagtcatagactccttgga

SEQ ID NO: 1118389 - DNA, 25 bp, Homo sapien
actccttggatttcaagtatgtctg

SEQ ID NO: 1118390 - DNA, 25 bp, Homo sapien
tctgtctggagaattgcatcagtca

SEQ ID NO: 1118391 - DNA, 25 bp, Homo sapien
ctgaagtttaagagcgagggtcctc

SEQ ID NO: 1118392 - DNA, 25 bp, Homo sapien
aacatttttgctgaagcctgtgcag

SEQ ID NO: 1118393 - DNA, 25 bp, Homo sapien
taagagcgagggtcctctcttgctc

SEQ ID NO: 1118394 - DNA, 25 bp, Homo sapien
tgaagcctgtgcagactcagctttc

SEQ ID NO: 1118395 - DNA, 25 bp, Homo sapien
gcttcacatggtattaagcaagaga

SEQ ID NO: 1118396 - DNA, 25 bp, Homo sapien
atatttgcagtttagtgaccagact

SEQ ID NO: 1118397 - DNA, 25 bp, Homo sapien
tctctctgccacagtaagcctgtga

SEQ ID NO: 1118398 - DNA, 25 bp, Homo sapien
gatggctagcagataatacctgcct

SEQ ID NO: 1118399 - DNA, 25 bp, Homo sapien
aggtaagaaatctgagtgccagact

SEQ ID NO: 1118400 - DNA, 25 bp, Homo sapien
gagtgccagactgaccatactgagt

SEQ ID NO: 1118401 - DNA, 25 bp, Homo sapien
agaaatctgagtgccagactgacca

SEQ ID NO: 1118402 - DNA, 25 bp, Homo sapien
agactgaccatactgagtttctgca

SEQ ID NO: 1118403 - DNA, 25 bp, Homo sapien
catgagtggcctgagctgtgtcctg

SEQ ID NO: 1118404 - DNA, 25 bp, Homo sapien
gcttagagccaagtgatggccttcc

SEQ ID NO: 1118405 - DNA, 25 bp, Homo sapien
acctgtgctctagactcgctgagtc

SEQ ID NO: 1118406 - DNA, 25 bp, Homo sapien
cacagtgtcaacagggaattatacc

SEQ ID NO: 1118407 - DNA, 25 bp, Homo sapien
tctcttttagtagtcgctcttgttc

SEQ ID NO: 1118408 - DNA, 25 bp, Homo sapien
ttttcaaatctctcttttagtagtc

SEQ ID NO: 1118409 - DNA, 25 bp, Homo sapien
caaatctctcttttagtagtcgctc

SEQ ID NO: 1118410 - DNA, 25 bp, Homo sapien
ctctcttttagtagtcgctcttgtt

SEQ ID NO: 1118411 - DNA, 25 bp, Homo sapien
catgtccttggttgtatcattgtcc

SEQ ID NO: 1118412 - DNA, 25 bp, Homo sapien
gtatcattgtcctctggagattctg

SEQ ID NO: 1118413 - DNA, 25 bp, Homo sapien
tggtacatgtccttggttgtatcat

SEQ ID NO: 1118414 - DNA, 25 bp, Homo sapien
cttggttgtatcattgtcctctgga

SEQ ID NO: 1118415 - DNA, 25 bp, Homo sapien
ttgctcatagactgtgtagccctga

SEQ ID NO: 1118416 - DNA, 25 bp, Homo sapien
tgccataaatacagtgtgtaattgg

SEQ ID NO: 1118417 - DNA, 25 bp, Homo sapien
cagtgtgtaattggcattatgtgac

SEQ ID NO: 1118418 - DNA, 25 bp, Homo sapien
tagccctgatctaatggataactgt

SEQ ID NO: 1118419 - DNA, 25 bp, Homo sapien
gtatactaagtaaacacaagaacat

SEQ ID NO: 1118420 - DNA, 25 bp, Homo sapien
cacatgagataaagtctatgtatac

SEQ ID NO: 1118421 - DNA, 25 bp, Homo sapien
taaagtctatgtatactaagtaaac

SEQ ID NO: 1118422 - DNA, 25 bp, Homo sapien
ctaggacttttgacacatgagataa

SEQ ID NO: 1118423 - DNA, 25 bp, Homo sapien
cattgctataaagactaaaaccttc

SEQ ID NO: 1118424 - DNA, 25 bp, Homo sapien
ttaatcagaaataagaagcctagtg

SEQ ID NO: 1118425 - DNA, 25 bp, Homo sapien
aaagattgccaaccattgctataaa

SEQ ID NO: 1118426 - DNA, 25 bp, Homo sapien
taagaagcctagtgaaatacattgt

SEQ ID NO: 1118427 - DNA, 25 bp, Homo sapien
tacacttggcatgcaaccacggtgg

SEQ ID NO: 1118428 - DNA, 25 bp, Homo sapien
gaagtgctagagtgcttgtcgccca

SEQ ID NO: 1118429 - DNA, 25 bp, Homo sapien
cagttgccatggacacctggtttca

SEQ ID NO: 1118430 - DNA, 25 bp, Homo sapien
tcccaagactcaaggagctgccgtg

SEQ ID NO: 1118431 - DNA, 25 bp, Homo sapien
ccagggggacgcagcattcctggct

SEQ ID NO: 1118432 - DNA, 25 bp, Homo sapien
ccttgacagcgacggtcttgctttc

SEQ ID NO: 1118433 - DNA, 25 bp, Homo sapien
tggctctttccaggccaatcactgc

SEQ ID NO: 1118434 - DNA, 25 bp, Homo sapien
tgcctagaagctccttgacagcgac

SEQ ID NO: 1118435 - DNA, 25 bp, Homo sapien
tactgtagtgccctttagggttcta

SEQ ID NO: 1118436 - DNA, 25 bp, Homo sapien
tgtagtgccctttagggttctaaca

SEQ ID NO: 1118437 - DNA, 25 bp, Homo sapien
cctcctactgtagtgccctttaggg

SEQ ID NO: 1118438 - DNA, 25 bp, Homo sapien
ttctaacaaaagacctgtagtccat

SEQ ID NO: 1118439 - DNA, 25 bp, Homo sapien
tggccatagatctcacagccttgga

SEQ ID NO: 1118440 - DNA, 25 bp, Homo sapien
tgtgcttcaagcctcgtatcgccct

SEQ ID NO: 1118441 - DNA, 25 bp, Homo sapien
tcaagcctcgtatcgccctcttgtg

SEQ ID NO: 1118442 - DNA, 25 bp, Homo sapien
ttggaatcagtgtgcttcaagcctc

SEQ ID NO: 1118443 - DNA, 25 bp, Homo sapien
cctggagccagggtcggattaagaa

SEQ ID NO: 1118444 - DNA, 25 bp, Homo sapien
tcgccacgtggagctctgagatgat

SEQ ID NO: 1118445 - DNA, 25 bp, Homo sapien
gattaagaatgaaggtcgccacgtg

SEQ ID NO: 1118446 - DNA, 25 bp, Homo sapien
gatgcagcgaagtcccacttatcag

SEQ ID NO: 1118447 - DNA, 25 bp, Homo sapien
gtctccatcaaatttctgtttctgg

SEQ ID NO: 1118448 - DNA, 25 bp, Homo sapien
ttctttttatccacttctttgtctc

SEQ ID NO: 1118449 - DNA, 25 bp, Homo sapien
cttccaattatctgcttgttcttct

SEQ ID NO: 1118450 - DNA, 25 bp, Homo sapien
tatccacttctttgtctccatcaaa

SEQ ID NO: 1118451 - DNA, 25 bp, Homo sapien
gcacgcgggaacctcctcttcgaaa

SEQ ID NO: 1118452 - DNA, 25 bp, Homo sapien
agcacgcgggaacctcctcttcgaa

SEQ ID NO: 1118453 - DNA, 25 bp, Homo sapien
ctgagggaaaggtcgggtgcagcac

SEQ ID NO: 1118454 - DNA, 25 bp, Homo sapien
aaggtcgggtgcagcacgcgggaac

SEQ ID NO: 1118455 - DNA, 25 bp, Homo sapien
gcgtccctgagtaacttggcattta

SEQ ID NO: 1118456 - DNA, 25 bp, Homo sapien
tgctggaaacaaagcgcagctgcca

SEQ ID NO: 1118457 - DNA, 25 bp, Homo sapien
tgacttcggcactacaccgcgtgtg

SEQ ID NO: 1118458 - DNA, 25 bp, Homo sapien
gcatttatataacgcgtgttgggcc

SEQ ID NO: 1118459 - DNA, 25 bp, Homo sapien
gctcagcgggaagccccggcgctgt

SEQ ID NO: 1118460 - DNA, 25 bp, Homo sapien
gcggcgtgctcctgggccgctccgg

SEQ ID NO: 1118461 - DNA, 25 bp, Homo sapien
ctccccgcggcgtgctcctgggccg

SEQ ID NO: 1118462 - DNA, 25 bp, Homo sapien
aggctgcgggctcagcgggaagccc

SEQ ID NO: 1118463 - DNA, 25 bp, Homo sapien
tcctccaccacctcggtcggcgcgg

SEQ ID NO: 1118464 - DNA, 25 bp, Homo sapien
ggtcggcgcggctcgccctcctgga

SEQ ID NO: 1118465 - DNA, 25 bp, Homo sapien
tgctgcgtccccgtatccggtcctc

SEQ ID NO: 1118466 - DNA, 25 bp, Homo sapien
tggaaccggggtgtcacgctccgac

SEQ ID NO: 1118467 - DNA, 25 bp, Homo sapien
tgttggtgttttcactctgaggatt

SEQ ID NO: 1118468 - DNA, 25 bp, Homo sapien
aaaataggttattatgtctgccaaa

SEQ ID NO: 1118469 - DNA, 25 bp, Homo sapien
ctgccaaaggcattattttaaacac

SEQ ID NO: 1118470 - DNA, 25 bp, Homo sapien
gatcaaccttaatgatcagaaaaag

SEQ ID NO: 1118471 - DNA, 25 bp, Homo sapien
gaaattaagtcataataaaggcatg

SEQ ID NO: 1118472 - DNA, 25 bp, Homo sapien
ttcctttactcaggttcacagcagc

SEQ ID NO: 1118473 - DNA, 25 bp, Homo sapien
aattgtgtggcaattgagtagaatc

SEQ ID NO: 1118474 - DNA, 25 bp, Homo sapien
gcagcactgaaggagtaaatgtaaa

SEQ ID NO: 1118475 - DNA, 25 bp, Homo sapien
atttcctttactcaggttcacagca

SEQ ID NO: 1118476 - DNA, 25 bp, Homo sapien
gaaatggtcacaggatgacagatga

SEQ ID NO: 1118477 - DNA, 25 bp, Homo sapien
ggtcacaggatgacagatgagaaga

SEQ ID NO: 1118478 - DNA, 25 bp, Homo sapien
aatggtcacaggatgacagatgaga

SEQ ID NO: 1118479 - DNA, 25 bp, Homo sapien
tggaaatggtcacaggatgacagat

SEQ ID NO: 1118480 - DNA, 25 bp, Homo sapien
agaataggcattgcagaatggagcc

SEQ ID NO: 1118481 - DNA, 25 bp, Homo sapien
gctggcagcgtctgtgaaatatgct

SEQ ID NO: 1118482 - DNA, 25 bp, Homo sapien
tgttagctgaagaataggcattgca

SEQ ID NO: 1118483 - DNA, 25 bp, Homo sapien
tggagctggatacggaagagaaata

SEQ ID NO: 1118484 - DNA, 25 bp, Homo sapien
aagaatgtggtctccatgagagatg

SEQ ID NO: 1118485 - DNA, 25 bp, Homo sapien
gaatgtggtctccatgagagatgag

SEQ ID NO: 1118486 - DNA, 25 bp, Homo sapien
gtggtctccatgagagatgagcaga

SEQ ID NO: 1118487 - DNA, 25 bp, Homo sapien
aatgtggtctccatgagagatgagc

SEQ ID NO: 1118488 - DNA, 25 bp, Homo sapien
agtgagtgattcacctgtcctcccc

SEQ ID NO: 1118489 - DNA, 25 bp, Homo sapien
cagatctccacgagggtggggaaca

SEQ ID NO: 1118490 - DNA, 25 bp, Homo sapien
tgcccgacccatgtctcctttataa

SEQ ID NO: 1118491 - DNA, 25 bp, Homo sapien
ggaacatgtgcatttttgctcatca

SEQ ID NO: 1118492 - DNA, 25 bp, Homo sapien
ttcttaaaatggatgacggtaatta

SEQ ID NO: 1118493 - DNA, 25 bp, Homo sapien
aattgtgtacaatttcttactattc

SEQ ID NO: 1118494 - DNA, 25 bp, Homo sapien
ctaggtgagtttgtacattcttaaa

SEQ ID NO: 1118495 - DNA, 25 bp, Homo sapien
caatttggtatcaaattagtttcta

SEQ ID NO: 1118496 - DNA, 25 bp, Homo sapien
tggctgttccaactcccactccaat

SEQ ID NO: 1118497 - DNA, 25 bp, Homo sapien
ccactccaatgctcttgttctttca

SEQ ID NO: 1118498 - DNA, 25 bp, Homo sapien
gttctttcattcgtgtcacaaaggg

SEQ ID NO: 1118499 - DNA, 25 bp, Homo sapien
agcactggctgttccaactcccact

SEQ ID NO: 1118500 - DNA, 25 bp, Homo sapien
cctacgatgtttccactgaacttgt

SEQ ID NO: 1118501 - DNA, 25 bp, Homo sapien
ctcctacgatgtttccactgaactt

SEQ ID NO: 1118502 - DNA, 25 bp, Homo sapien
gatgtttccactgaacttgtgagtc

SEQ ID NO: 1118503 - DNA, 25 bp, Homo sapien
tacgatgtttccactgaacttgtga

SEQ ID NO: 1118504 - DNA, 25 bp, Homo sapien
atccaggtagtgaggtctagtaggc

SEQ ID NO: 1118505 - DNA, 25 bp, Homo sapien
aggtagtgaggtctagtaggcagct

SEQ ID NO: 1118506 - DNA, 25 bp, Homo sapien
tccaggtagtgaggtctagtaggca

SEQ ID NO: 1118507 - DNA, 25 bp, Homo sapien
tagtgaggtctagtaggcagctgaa

SEQ ID NO: 1118508 - DNA, 25 bp, Homo sapien
ccgaatctcaggttgatagcaacat

SEQ ID NO: 1118509 - DNA, 25 bp, Homo sapien
ttcatgttgaagcttaatcctcagt

SEQ ID NO: 1118510 - DNA, 25 bp, Homo sapien
cctcaatgatgggatttagtgcctt

SEQ ID NO: 1118511 - DNA, 25 bp, Homo sapien
caagggctaaggcattgactgctat

SEQ ID NO: 1118512 - DNA, 25 bp, Homo sapien
cacatatgctatgctcgggtgacat

SEQ ID NO: 1118513 - DNA, 25 bp, Homo sapien
tgttgcggtcatggctcaatgcacc

SEQ ID NO: 1118514 - DNA, 25 bp, Homo sapien
tatgcttaaggtttcatccgccacc

SEQ ID NO: 1118515 - DNA, 25 bp, Homo sapien
tataccgagatgtgtggaagcaact

SEQ ID NO: 1118516 - DNA, 25 bp, Homo sapien
tgacttctcacagaagaggttaact

SEQ ID NO: 1118517 - DNA, 25 bp, Homo sapien
tctcacagaagaggttaactattac

SEQ ID NO: 1118518 - DNA, 25 bp, Homo sapien
cttctcacagaagaggttaactatt

SEQ ID NO: 1118519 - DNA, 25 bp, Homo sapien
gacttctcacagaagaggttaacta

SEQ ID NO: 1118520 - DNA, 25 bp, Homo sapien
taaaaagaaagcattaaagagatca

SEQ ID NO: 1118521 - DNA, 25 bp, Homo sapien
aaaaagaaagcattaaagagatcac

SEQ ID NO: 1118522 - DNA, 25 bp, Homo sapien
ttaaaaagaaagcattaaagagatc

SEQ ID NO: 1118523 - DNA, 25 bp, Homo sapien
caactggaacctctgcaattagtct

SEQ ID NO: 1118524 - DNA, 25 bp, Homo sapien
actggaacctctgcaattagtctca

SEQ ID NO: 1118525 - DNA, 25 bp, Homo sapien
cctctgcaattagtctcaatttgaa

SEQ ID NO: 1118526 - DNA, 25 bp, Homo sapien
tggaacctctgcaattagtctcaat

SEQ ID NO: 1118527 - DNA, 25 bp, Homo sapien
aaaggtgtatctacagggccccact

SEQ ID NO: 1118528 - DNA, 25 bp, Homo sapien
tcataggtcagtttacttttcacac

SEQ ID NO: 1118529 - DNA, 25 bp, Homo sapien
tcaattacaggttagttcccacagc

SEQ ID NO: 1118530 - DNA, 25 bp, Homo sapien
aatagattttcacactctgggcctc

SEQ ID NO: 1118531 - DNA, 25 bp, Homo sapien
tgcttcagtcaggaggtctacacct

SEQ ID NO: 1118532 - DNA, 25 bp, Homo sapien
taaatccaatatgcttcagtcagga

SEQ ID NO: 1118533 - DNA, 25 bp, Homo sapien
tccaatatgcttcagtcaggaggtc

SEQ ID NO: 1118534 - DNA, 25 bp, Homo sapien
taaataaatccaatatgcttcagtc

SEQ ID NO: 1118535 - DNA, 25 bp, Homo sapien
aaaatgtctgagtaagctcctttcc

SEQ ID NO: 1118536 - DNA, 25 bp, Homo sapien
gactttcccttgtaggaggacagaa

SEQ ID NO: 1118537 - DNA, 25 bp, Homo sapien
gataagatgactgggcatctgctaa

SEQ ID NO: 1118538 - DNA, 25 bp, Homo sapien
aataccagaagacgtcccaccatgg

SEQ ID NO: 1118539 - DNA, 25 bp, Homo sapien
gtcccaccatggttttaagatgtga

SEQ ID NO: 1118540 - DNA, 25 bp, Homo sapien
gatgactgggcatctgctaagcatt

SEQ ID NO: 1118541 - DNA, 25 bp, Homo sapien
aaatgctcgagcctggaactggtac

SEQ ID NO: 1118542 - DNA, 25 bp, Homo sapien
gtaacaacttgtgggatccgggaga

SEQ ID NO: 1118543 - DNA, 25 bp, Homo sapien
gataatgccccaatctgtgcaggaa

SEQ ID NO: 1118544 - DNA, 25 bp, Homo sapien
gatgaatggtacacacgaagctcct

SEQ ID NO: 1118545 - DNA, 25 bp, Homo sapien
ctataagtacggcagatactgaata

SEQ ID NO: 1118546 - DNA, 25 bp, Homo sapien
tataaacctgatacgctgcccaagt

SEQ ID NO: 1118547 - DNA, 25 bp, Homo sapien
tgtctaactatgtatgcagccaatg

SEQ ID NO: 1118548 - DNA, 25 bp, Homo sapien
agaatctattctgtgggaggcctag

SEQ ID NO: 1118549 - DNA, 25 bp, Homo sapien
ctctgagctggtaaggtcctcgtca

SEQ ID NO: 1118550 - DNA, 25 bp, Homo sapien
tataccactgtaccccatgtggaat

SEQ ID NO: 1118551 - DNA, 25 bp, Homo sapien
ctgtaccccatgtggaatcacttgg

SEQ ID NO: 1118552 - DNA, 25 bp, Homo sapien
accactgtaccccatgtggaatcac

SEQ ID NO: 1118553 - DNA, 25 bp, Homo sapien
catataccactgtaccccatgtgga

SEQ ID NO: 1118554 - DNA, 25 bp, Homo sapien
tacattattcaccttctggctagaa

SEQ ID NO: 1118555 - DNA, 25 bp, Homo sapien
cctaggtgtaaattggactggtcta

SEQ ID NO: 1118556 - DNA, 25 bp, Homo sapien
aatgtggaagtaagaagacctaggt

SEQ ID NO: 1118557 - DNA, 25 bp, Homo sapien
gactggtctaagatttcagcaaacc

SEQ ID NO: 1118558 - DNA, 25 bp, Homo sapien
cactctcttgtctggctatcagcac

SEQ ID NO: 1118559 - DNA, 25 bp, Homo sapien
tctctacatctgtgattttagtgaa

SEQ ID NO: 1118560 - DNA, 25 bp, Homo sapien
tcttgtctggctatcagcactacca

SEQ ID NO: 1118561 - DNA, 25 bp, Homo sapien
gattttagtgaacttcttaggctcc

SEQ ID NO: 1118562 - DNA, 25 bp, Homo sapien
tccttgctgtatatgggtgggcaac

SEQ ID NO: 1118563 - DNA, 25 bp, Homo sapien
acatcctaagaatctgacagcagac

SEQ ID NO: 1118564 - DNA, 25 bp, Homo sapien
agtgaggactgtggctaccctggac

SEQ ID NO: 1118565 - DNA, 25 bp, Homo sapien
cagaaataaattaccctcaagagtc

SEQ ID NO: 1118566 - DNA, 25 bp, Homo sapien
aagttctcctcaacaatcagacagt

SEQ ID NO: 1118567 - DNA, 25 bp, Homo sapien
gacagttccgttttagggactgaca

SEQ ID NO: 1118568 - DNA, 25 bp, Homo sapien
tgtaaacgttctgttacagggagag

SEQ ID NO: 1118569 - DNA, 25 bp, Homo sapien
acaatcagacagttccgttttaggg

SEQ ID NO: 1118570 - DNA, 25 bp, Homo sapien
taattttcaggatgccccgaggata

SEQ ID NO: 1118571 - DNA, 25 bp, Homo sapien
tattggagctatgccacagcactga

SEQ ID NO: 1118572 - DNA, 25 bp, Homo sapien
taaggaagactcaagcaagctggga

SEQ ID NO: 1118573 - DNA, 25 bp, Homo sapien
cataacttagggaacagagcacttc

SEQ ID NO: 1118574 - DNA, 25 bp, Homo sapien
tttgaacccatcaatattatgcaat

SEQ ID NO: 1118575 - DNA, 25 bp, Homo sapien
aatggtttttgaacccatcaatatt

SEQ ID NO: 1118576 - DNA, 25 bp, Homo sapien
ttaatggtttttgaacccatcaata

SEQ ID NO: 1118577 - DNA, 25 bp, Homo sapien
tggtttttgaacccatcaatattat

SEQ ID NO: 1118578 - DNA, 25 bp, Homo sapien
tgctttgggtacagatcagctctaa

SEQ ID NO: 1118579 - DNA, 25 bp, Homo sapien
tcagctctaaatactgcaggatggg

SEQ ID NO: 1118580 - DNA, 25 bp, Homo sapien
tcaatgagacataattacaggcact

SEQ ID NO: 1118581 - DNA, 25 bp, Homo sapien
gcaggatgggcaaagtaaaactact

SEQ ID NO: 1118582 - DNA, 25 bp, Homo sapien
aagctactgaatctgtggcaaaggg

SEQ ID NO: 1118583 - DNA, 25 bp, Homo sapien
gatagctccctgtggatacagaagt

SEQ ID NO: 1118584 - DNA, 25 bp, Homo sapien
gagaatgtagcctgttaccaaaggt

SEQ ID NO: 1118585 - DNA, 25 bp, Homo sapien
caaaggtatgtagtagatagctccc

SEQ ID NO: 1118586 - DNA, 25 bp, Homo sapien
ggaggacctcgtactctaaagcaaa

SEQ ID NO: 1118587 - DNA, 25 bp, Homo sapien
tgatctacagagtagggaggacctc

SEQ ID NO: 1118588 - DNA, 25 bp, Homo sapien
aaaccaatgggagtatgccaccaaa

SEQ ID NO: 1118589 - DNA, 25 bp, Homo sapien
ctaaggtctcgtaaatcagaggagc

SEQ ID NO: 1118590 - DNA, 25 bp, Homo sapien
tcctggctaccgaagacaaatagta

SEQ ID NO: 1118591 - DNA, 25 bp, Homo sapien
aatgaggagtcgtcatggtctttgc

SEQ ID NO: 1118592 - DNA, 25 bp, Homo sapien
caacctttatagattgctgcctagc

SEQ ID NO: 1118593 - DNA, 25 bp, Homo sapien
cgttacatctactcagtgtcctggc

SEQ ID NO: 1118594 - DNA, 25 bp, Homo sapien
catggcatgctctcatttgtctctt

SEQ ID NO: 1118595 - DNA, 25 bp, Homo sapien
gctctcatttgtctctttacatgcc

SEQ ID NO: 1118596 - DNA, 25 bp, Homo sapien
tctcatttgtctctttacatgcctc

SEQ ID NO: 1118597 - DNA, 25 bp, Homo sapien
tcatttgtctctttacatgcctctt

SEQ ID NO: 1118598 - DNA, 25 bp, Homo sapien
gaaaaattcctagagagtctctggg

SEQ ID NO: 1118599 - DNA, 25 bp, Homo sapien
ggcaaaggctaactttagcagtttg

SEQ ID NO: 1118600 - DNA, 25 bp, Homo sapien
aggcaaaggctaactttagcagttt

SEQ ID NO: 1118601 - DNA, 25 bp, Homo sapien
gatagacaactagttgctggccagt

SEQ ID NO: 1118602 - DNA, 25 bp, Homo sapien
tctcttaggccttaggagctgaatc

SEQ ID NO: 1118603 - DNA, 25 bp, Homo sapien
gttttcgtgctacaagccttcagaa

SEQ ID NO: 1118604 - DNA, 25 bp, Homo sapien
ccttcagaaaacagtcgcctccttt

SEQ ID NO: 1118605 - DNA, 25 bp, Homo sapien
ttgtcgcgcccgagcactgcggccg

SEQ ID NO: 1118606 - DNA, 25 bp, Homo sapien
gcttccagccgggacgcagctaacg

SEQ ID NO: 1118607 - DNA, 25 bp, Homo sapien
agctaacgccccagccccgcaagcc

SEQ ID NO: 1118608 - DNA, 25 bp, Homo sapien
tcctacttctcttcgcgggcttcca

SEQ ID NO: 1118609 - DNA, 25 bp, Homo sapien
tggagaaggtgctagggagcggcga

SEQ ID NO: 1118610 - DNA, 25 bp, Homo sapien
ctccgggcgcgagagtgtcgactgg

SEQ ID NO: 1118611 - DNA, 25 bp, Homo sapien
ggctcagcggctgccagggacggcg

SEQ ID NO: 1118612 - DNA, 25 bp, Homo sapien
cgcgagagtgtcgactggagaaggt

SEQ ID NO: 1118613 - DNA, 25 bp, Homo sapien
caaaagtgctaacttcaagggttcg

SEQ ID NO: 1118614 - DNA, 25 bp, Homo sapien
cacggtgctctcacgtttcttcgag

SEQ ID NO: 1118615 - DNA, 25 bp, Homo sapien
aagggaaagatcagcgagcctaggc

SEQ ID NO: 1118616 - DNA, 25 bp, Homo sapien
catctcattggtgggaaccagctgg

SEQ ID NO: 1118617 - DNA, 25 bp, Homo sapien
cataaataggtttgcctagtccaca

SEQ ID NO: 1118618 - DNA, 25 bp, Homo sapien
tcagaagcccggttttagagggtga

SEQ ID NO: 1118619 - DNA, 25 bp, Homo sapien
aatagtaccgtgtatgtcagaagcc

SEQ ID NO: 1118620 - DNA, 25 bp, Homo sapien
gacaataaactagtgaatacccagg

SEQ ID NO: 1118621 - DNA, 25 bp, Homo sapien
tatggtacttacaagaaagagaggc

SEQ ID NO: 1118622 - DNA, 25 bp, Homo sapien
aggaggaggcactttgataacccaa

SEQ ID NO: 1118623 - DNA, 25 bp, Homo sapien
cataatagcatctaggtagcaccga

SEQ ID NO: 1118624 - DNA, 25 bp, Homo sapien
tgaccttctcaattccctgggcatc

SEQ ID NO: 1118625 - DNA, 25 bp, Homo sapien
gtttagtcataagcggtcacattaa

SEQ ID NO: 1118626 - DNA, 25 bp, Homo sapien
tacctcattggacatctgcattttc

SEQ ID NO: 1118627 - DNA, 25 bp, Homo sapien
gaattctaagtttagtcataagcgg

SEQ ID NO: 1118628 - DNA, 25 bp, Homo sapien
cttagatgtatatactactacctca

SEQ ID NO: 1118629 - DNA, 25 bp, Homo sapien
tctctcaagaagagcacgctgcttg

SEQ ID NO: 1118630 - DNA, 25 bp, Homo sapien
taacacttttgcatgacacagagct

SEQ ID NO: 1118631 - DNA, 25 bp, Homo sapien
tcctattttggaagcccgtggctga

SEQ ID NO: 1118632 - DNA, 25 bp, Homo sapien
tgtaagggcagagaccaggttgctc

SEQ ID NO: 1118633 - DNA, 25 bp, Homo sapien
tagggggatctgtatgtgatttcca

SEQ ID NO: 1118634 - DNA, 25 bp, Homo sapien
caaatattgcactgttccaatctcc

SEQ ID NO: 1118635 - DNA, 25 bp, Homo sapien
atgcagtccccaaatattgcactgt

SEQ ID NO: 1118636 - DNA, 25 bp, Homo sapien
ccaatctcctttagggggatctgta

SEQ ID NO: 1118637 - DNA, 25 bp, Homo sapien
cacacgcagcaacatgtgggtcaac

SEQ ID NO: 1118638 - DNA, 25 bp, Homo sapien
acacgcagcaacatgtgggtcaacc

SEQ ID NO: 1118639 - DNA, 25 bp, Homo sapien
aacacacgcagcaacatgtgggtca

SEQ ID NO: 1118640 - DNA, 25 bp, Homo sapien
tgaacacacgcagcaacatgtgggt

SEQ ID NO: 1118641 - DNA, 25 bp, Homo sapien
tctcatgacaggcactgaaggccgt

SEQ ID NO: 1118642 - DNA, 25 bp, Homo sapien
tgaaggccgttagaatctcagtggg

SEQ ID NO: 1118643 - DNA, 25 bp, Homo sapien
ggtcatgggctgctcaacaatctcc

SEQ ID NO: 1118644 - DNA, 25 bp, Homo sapien
ggatggtcatcaccggtcatgggct

SEQ ID NO: 1118645 - DNA, 25 bp, Homo sapien
aacttaacacagcctaatgttttag

SEQ ID NO: 1118646 - DNA, 25 bp, Homo sapien
taacacagcctaatgttttagaaac

SEQ ID NO: 1118647 - DNA, 25 bp, Homo sapien
acttaacacagcctaatgttttaga

SEQ ID NO: 1118648 - DNA, 25 bp, Homo sapien
cttaacacagcctaatgttttagaa

SEQ ID NO: 1118649 - DNA, 25 bp, Homo sapien
agcgcagcccagaaaacccaggcat

SEQ ID NO: 1118650 - DNA, 25 bp, Homo sapien
cagcgcagcccagaaaacccaggca

SEQ ID NO: 1118651 - DNA, 25 bp, Homo sapien
taaggccaggttttcaatcacctta

SEQ ID NO: 1118652 - DNA, 25 bp, Homo sapien
gaactctcaatatcattggctgtgg

SEQ ID NO: 1118653 - DNA, 25 bp, Homo sapien
tcaatcaccttatcagtctcaacat

SEQ ID NO: 1118654 - DNA, 25 bp, Homo sapien
attctaaacccttgaaaaggctgtg

SEQ ID NO: 1118655 - DNA, 25 bp, Homo sapien
gaggtcttagcttgtacccaagaaa

SEQ ID NO: 1118656 - DNA, 25 bp, Homo sapien
caggatgtgttgatcagtaatgtct

SEQ ID NO: 1118657 - DNA, 25 bp, Homo sapien
tgtcactactgctaaacaggatgtg

SEQ ID NO: 1118658 - DNA, 25 bp, Homo sapien
aaatggccaaatgttgtgactacct

SEQ ID NO: 1118659 - DNA, 25 bp, Homo sapien
catcttatttatgagcagcacttca

SEQ ID NO: 1118660 - DNA, 25 bp, Homo sapien
atgagcagcacttcatgtaatttga

SEQ ID NO: 1118661 - DNA, 25 bp, Homo sapien
tgagcagcacttcatgtaatttgac

SEQ ID NO: 1118662 - DNA, 25 bp, Homo sapien
ctgcttcggtaaccttttgcagaca

SEQ ID NO: 1118663 - DNA, 25 bp, Homo sapien
tattacatctctgcttcggtaacct

SEQ ID NO: 1118664 - DNA, 25 bp, Homo sapien
acatctctgcttcggtaaccttttg

SEQ ID NO: 1118665 - DNA, 25 bp, Homo sapien
tttgcagacattcagattcatttcc

SEQ ID NO: 1118666 - DNA, 25 bp, Homo sapien
tctgggtccttgtctgagttgcttc

SEQ ID NO: 1118667 - DNA, 25 bp, Homo sapien
gggtccttgtctgagttgcttcaca

SEQ ID NO: 1118668 - DNA, 25 bp, Homo sapien
gttctctgggtccttgtctgagttg

SEQ ID NO: 1118669 - DNA, 25 bp, Homo sapien
tctctgggtccttgtctgagttgct

SEQ ID NO: 1118670 - DNA, 25 bp, Homo sapien
cctcctactgtgagaagaaatatcc

SEQ ID NO: 1118671 - DNA, 25 bp, Homo sapien
aactagatagacaatggccgggcgc

SEQ ID NO: 1118672 - DNA, 25 bp, Homo sapien
taaatgaatagggtgcacccacggc

SEQ ID NO: 1118673 - DNA, 25 bp, Homo sapien
tttagtgtgacccaggacttgaggt

SEQ ID NO: 1118674 - DNA, 25 bp, Homo sapien
ggcttcagcactcggaaggcaggct

SEQ ID NO: 1118675 - DNA, 25 bp, Homo sapien
tcatgagcatggctactgagaggta

SEQ ID NO: 1118676 - DNA, 25 bp, Homo sapien
ctgagaggtaatcggtaaacacatc

SEQ ID NO: 1118677 - DNA, 25 bp, Homo sapien
tgtaaagtacatccaaacacgccga

SEQ ID NO: 1118678 - DNA, 25 bp, Homo sapien
atcctggatcttcacctcgttcctc

SEQ ID NO: 1118679 - DNA, 25 bp, Homo sapien
ctagatcctggatcttcacctcgtt

SEQ ID NO: 1118680 - DNA, 25 bp, Homo sapien
gatcctggatcttcacctcgttcct

SEQ ID NO: 1118681 - DNA, 25 bp, Homo sapien
tagatcctggatcttcacctcgttc

SEQ ID NO: 1118682 - DNA, 25 bp, Homo sapien
gccactgattgtgcgaggtaagagt

SEQ ID NO: 1118683 - DNA, 25 bp, Homo sapien
tgcgaggtaagagtggtggtgctga

SEQ ID NO: 1118684 - DNA, 25 bp, Homo sapien
tgtctgagcaggagccactgattgt

SEQ ID NO: 1118685 - DNA, 25 bp, Homo sapien
caggagccactgattgtgcgaggta

SEQ ID NO: 1118686 - DNA, 25 bp, Homo sapien
gcacaaagttgggtgtttacactat

SEQ ID NO: 1118687 - DNA, 25 bp, Homo sapien
gaagcaacgtgttgacctttcagga

SEQ ID NO: 1118688 - DNA, 25 bp, Homo sapien
gtcataataagataacctggagtca

SEQ ID NO: 1118689 - DNA, 25 bp, Homo sapien
ctgagcagagatctaaagcaatctt

SEQ ID NO: 1118690 - DNA, 25 bp, Homo sapien
ggtttctaactgctaattctatatt

SEQ ID NO: 1118691 - DNA, 25 bp, Homo sapien
taactgctaattctatatttggtaa

SEQ ID NO: 1118692 - DNA, 25 bp, Homo sapien
tctggtttctaactgctaattctat

SEQ ID NO: 1118693 - DNA, 25 bp, Homo sapien
gcttccagggggcttgcatcttcca

SEQ ID NO: 1118694 - DNA, 25 bp, Homo sapien
gtccactatgtctgtatagctcctg

SEQ ID NO: 1118695 - DNA, 25 bp, Homo sapien
tctgcctgatcttgtccactatgtc

SEQ ID NO: 1118696 - DNA, 25 bp, Homo sapien
tatgtctgtatagctcctgcaaagt

SEQ ID NO: 1118697 - DNA, 25 bp, Homo sapien
tgtggtttagggccagaaccttagc

SEQ ID NO: 1118698 - DNA, 25 bp, Homo sapien
tagagggagaatttcatctacgcac

SEQ ID NO: 1118699 - DNA, 25 bp, Homo sapien
gataagacaggttccacacatttca

SEQ ID NO: 1118700 - DNA, 25 bp, Homo sapien
tctctgggaagttgatggtagccta

SEQ ID NO: 1118701 - DNA, 25 bp, Homo sapien
taaagggagtcatcatttggaagtc

SEQ ID NO: 1118702 - DNA, 25 bp, Homo sapien
tagtaaagtgagagaaaaaccagtc

SEQ ID NO: 1118703 - DNA, 25 bp, Homo sapien
taacagtataaggaccagtaagctc

SEQ ID NO: 1118704 - DNA, 25 bp, Homo sapien
ggcaaactgccaaagtctaaggtat

SEQ ID NO: 1118705 - DNA, 25 bp, Homo sapien
aaactccttgagttatgcaccgtga

SEQ ID NO: 1118706 - DNA, 25 bp, Homo sapien
tcactatcatcaggacgaacaccgt

SEQ ID NO: 1118707 - DNA, 25 bp, Homo sapien
ccgtccttgtctccaacagaaatgg

SEQ ID NO: 1118708 - DNA, 25 bp, Homo sapien
tcacaactcttgctgtgcattatgt

SEQ ID NO: 1118709 - DNA, 25 bp, Homo sapien
tagacatctatgagaaccacacatg

SEQ ID NO: 1118710 - DNA, 25 bp, Homo sapien
tgtgttctgggtggtagacgcatcc

SEQ ID NO: 1118711 - DNA, 25 bp, Homo sapien
ttatcatggtatttggatgttccac

SEQ ID NO: 1118712 - DNA, 25 bp, Homo sapien
tttccactgcttctcttgagtgtac

SEQ ID NO: 1118713 - DNA, 25 bp, Homo sapien
gagtccaccaataggtcttatcatg

SEQ ID NO: 1118714 - DNA, 25 bp, Homo sapien
cacatttgcatgaatgagacaccaa

SEQ ID NO: 1118715 - DNA, 25 bp, Homo sapien
taaaaccacttagcttcagagaaac

SEQ ID NO: 1118716 - DNA, 25 bp, Homo sapien
gataactagttgaaaaggtaccaca

SEQ ID NO: 1118717 - DNA, 25 bp, Homo sapien
catgaatgagacaccaaagggctga

SEQ ID NO: 1118718 - DNA, 25 bp, Homo sapien
caaatcatcatgttgagaaaacaca

SEQ ID NO: 1118719 - DNA, 25 bp, Homo sapien
tgaagatccttcctcaattctaagg

SEQ ID NO: 1118720 - DNA, 25 bp, Homo sapien
tctaaggtcaatgaaataagctgaa

SEQ ID NO: 1118721 - DNA, 25 bp, Homo sapien
gattcttcaattctgatctgcaaat

SEQ ID NO: 1118722 - DNA, 25 bp, Homo sapien
agcagctcatccacacacattatca

SEQ ID NO: 1118723 - DNA, 25 bp, Homo sapien
ttatcacatggagcaattccgccat

SEQ ID NO: 1118724 - DNA, 25 bp, Homo sapien
ctcatccacacacattatcacatgg

SEQ ID NO: 1118725 - DNA, 25 bp, Homo sapien
acattatcacatggagcaattccgc

SEQ ID NO: 1118726 - DNA, 25 bp, Homo sapien
ttaaacagtgtttttgccatatctt

SEQ ID NO: 1118727 - DNA, 25 bp, Homo sapien
aggttaaacagtgtttttgccatat

SEQ ID NO: 1118728 - DNA, 25 bp, Homo sapien
ttgtcttcttcttcgtcatcttctt

SEQ ID NO: 1118729 - DNA, 25 bp, Homo sapien
ttctttgtcttcttcttcgtcatct

SEQ ID NO: 1118730 - DNA, 25 bp, Homo sapien
atagcatagtaaggtgaccacgagc

SEQ ID NO: 1118731 - DNA, 25 bp, Homo sapien
tgtaaagtggtctgctatagcatag

SEQ ID NO: 1118732 - DNA, 25 bp, Homo sapien
gcatagtaaggtgaccacgagctgg

SEQ ID NO: 1118733 - DNA, 25 bp, Homo sapien
gcatagaaactgaacccgttgtaaa

SEQ ID NO: 1118734 - DNA, 25 bp, Homo sapien
taaccaaagagtattcagcaatgac

SEQ ID NO: 1118735 - DNA, 25 bp, Homo sapien
gagaatgaatgcaccctttttgaag

SEQ ID NO: 1118736 - DNA, 25 bp, Homo sapien
acctagacgaatcatcttcaggagg

SEQ ID NO: 1118737 - DNA, 25 bp, Homo sapien
catgtggaattaataacgcagggaa

SEQ ID NO: 1118738 - DNA, 25 bp, Homo sapien
ctcttttcggaaggcagattatctt

SEQ ID NO: 1118739 - DNA, 25 bp, Homo sapien
cattcgaaagggaagagtggttctg

SEQ ID NO: 1118740 - DNA, 25 bp, Homo sapien
ggcaactgcttgagagacattcgaa

SEQ ID NO: 1118741 - DNA, 25 bp, Homo sapien
ctgagcaggctgcactcttttcgga

SEQ ID NO: 1118742 - DNA, 25 bp, Homo sapien
cagataaagcccgtgtggtccaagg

SEQ ID NO: 1118743 - DNA, 25 bp, Homo sapien
gatttcggagcccatacatccaggg

SEQ ID NO: 1118744 - DNA, 25 bp, Homo sapien
gagggctcgctcataacacatctga

SEQ ID NO: 1118745 - DNA, 25 bp, Homo sapien
tacagtctggcgaacatacatggca

SEQ ID NO: 1118746 - DNA, 25 bp, Homo sapien
gaaaggcattaagactacctaatta

SEQ ID NO: 1118747 - DNA, 25 bp, Homo sapien
actgtatttggtagaagcgtgtttc

SEQ ID NO: 1118748 - DNA, 25 bp, Homo sapien
taaaaatacatactccttacgcgat

SEQ ID NO: 1118749 - DNA, 25 bp, Homo sapien
gcgtgtttcagtcaaactttaacga

SEQ ID NO: 1118750 - DNA, 25 bp, Homo sapien
gttgttcaccagtactacatagcag

SEQ ID NO: 1118751 - DNA, 25 bp, Homo sapien
gttccactgaatgaaggtcttggcc

SEQ ID NO: 1118752 - DNA, 25 bp, Homo sapien
caaaaataagaaccctgtacaggtg

SEQ ID NO: 1118753 - DNA, 25 bp, Homo sapien
tcactcacaaaaaccttgcctaagg

SEQ ID NO: 1118754 - DNA, 25 bp, Homo sapien
gttctggttctaggtcaagggcaca

SEQ ID NO: 1118755 - DNA, 25 bp, Homo sapien
gatggatttcccgtgcttgtagcac

SEQ ID NO: 1118756 - DNA, 25 bp, Homo sapien
gaacccacaagtacggaaggctgac

SEQ ID NO: 1118757 - DNA, 25 bp, Homo sapien
gaattgattccaggatgccctcgaa

SEQ ID NO: 1118758 - DNA, 25 bp, Homo sapien
gactatttactgaaagctgagctgg

SEQ ID NO: 1118759 - DNA, 25 bp, Homo sapien
ggcctcctagctgtgcaggatcatg

SEQ ID NO: 1118760 - DNA, 25 bp, Homo sapien
tccctaagcctggagtgaatgtggt

SEQ ID NO: 1118761 - DNA, 25 bp, Homo sapien
tgtacaatctcatctggcaaacgta

SEQ ID NO: 1118762 - DNA, 25 bp, Homo sapien
gcctaccctgtatcttttatgcaaa

SEQ ID NO: 1118763 - DNA, 25 bp, Homo sapien
gagatgtcttttacctgaggctaat

SEQ ID NO: 1118764 - DNA, 25 bp, Homo sapien
ggcaaaagtccagatgtaactcgag

SEQ ID NO: 1118765 - DNA, 25 bp, Homo sapien
gaggctaataaggattgaaccaagc

SEQ ID NO: 1118766 - DNA, 25 bp, Homo sapien
taaaagctctttccctgacgtcctc

SEQ ID NO: 1118767 - DNA, 25 bp, Homo sapien
tggcaccaagccctccaaatgacat

SEQ ID NO: 1118768 - DNA, 25 bp, Homo sapien
gacatcacgtgatctctcaggcctc

SEQ ID NO: 1118769 - DNA, 25 bp, Homo sapien
atccattccaatggccgtgaccctt

SEQ ID NO: 1118770 - DNA, 25 bp, Homo sapien
ggataagcagatacaaacttttgca

SEQ ID NO: 1118771 - DNA, 25 bp, Homo sapien
ggagcaggcttgaaggaggataagc

SEQ ID NO: 1118772 - DNA, 25 bp, Homo sapien
gaggataagcagatacaaacttttg

SEQ ID NO: 1118773 - DNA, 25 bp, Homo sapien
aaggaggataagcagatacaaactt

SEQ ID NO: 1118774 - DNA, 25 bp, Homo sapien
gcatcaaagcccttggttgggagaa

SEQ ID NO: 1118775 - DNA, 25 bp, Homo sapien
tcaaagcccttggttgggagaacca

SEQ ID NO: 1118776 - DNA, 25 bp, Homo sapien
tagcatcaaagcccttggttgggag

SEQ ID NO: 1118777 - DNA, 25 bp, Homo sapien
ccttggttgggagaaccaaggcatt

SEQ ID NO: 1118778 - DNA, 25 bp, Homo sapien
taatgttacagcatattgctggcag

SEQ ID NO: 1118779 - DNA, 25 bp, Homo sapien
tatctttagtcctccagagtctttc

SEQ ID NO: 1118780 - DNA, 25 bp, Homo sapien
tgtgagtgccaagcctagatacttt

SEQ ID NO: 1118781 - DNA, 25 bp, Homo sapien
gtgcatctgtgagtgccaagcctag

SEQ ID NO: 1118782 - DNA, 25 bp, Homo sapien
catagaaaatctggagactagtctg

SEQ ID NO: 1118783 - DNA, 25 bp, Homo sapien
cctgaaaattggttatgggcaaatc

SEQ ID NO: 1118784 - DNA, 25 bp, Homo sapien
gtaaagtcctgagaaatagcctgaa

SEQ ID NO: 1118785 - DNA, 25 bp, Homo sapien
ccttctgcatggtaagtagagtgtg

SEQ ID NO: 1118786 - DNA, 25 bp, Homo sapien
ccaggtgttcacaggagcgagaaat

SEQ ID NO: 1118787 - DNA, 25 bp, Homo sapien
aatctaatggcctctggatgaaccc

SEQ ID NO: 1118788 - DNA, 25 bp, Homo sapien
gatgaaccctgctgccaactgaggc

SEQ ID NO: 1118789 - DNA, 25 bp, Homo sapien
gcagggttagacttgcagtgtgacc

SEQ ID NO: 1118790 - DNA, 25 bp, Homo sapien
tctcacagctcacaagcctgggttg

SEQ ID NO: 1118791 - DNA, 25 bp, Homo sapien
gctaacagcctgacatgcactatgt

SEQ ID NO: 1118792 - DNA, 25 bp, Homo sapien
ttagaagccttgtcacctgttactg

SEQ ID NO: 1118793 - DNA, 25 bp, Homo sapien
ggttactctgcctcactagttacga

SEQ ID NO: 1118794 - DNA, 25 bp, Homo sapien
tggatggccttctgcctctaaaccg

SEQ ID NO: 1118795 - DNA, 25 bp, Homo sapien
tttgggagacgaatgagtgagatca

SEQ ID NO: 1118796 - DNA, 25 bp, Homo sapien
cacacctgggtttgtgttatttggg

SEQ ID NO: 1118797 - DNA, 25 bp, Homo sapien
gtatacggtgcccagtacaccttat

SEQ ID NO: 1118798 - DNA, 25 bp, Homo sapien
agccagacacccacactttcagaca

SEQ ID NO: 1118799 - DNA, 25 bp, Homo sapien
ctgagaggaagcagcgtccagccag

SEQ ID NO: 1118800 - DNA, 25 bp, Homo sapien
ggagtgtgtcatctgctggagggtg

SEQ ID NO: 1118801 - DNA, 25 bp, Homo sapien
cagacagagccgcttctgagaagca

SEQ ID NO: 1118802 - DNA, 25 bp, Homo sapien
tcactgcctaggtgctgtgtccata

SEQ ID NO: 1118803 - DNA, 25 bp, Homo sapien
cactgcctaggtgctgtgtccatac

SEQ ID NO: 1118804 - DNA, 25 bp, Homo sapien
tgcccaggctgtcaggggcctgcca

SEQ ID NO: 1118805 - DNA, 25 bp, Homo sapien
gggcctgccattctctccttgcaga

SEQ ID NO: 1118806 - DNA, 25 bp, Homo sapien
gctgtcaggggcctgccattctctc

SEQ ID NO: 1118807 - DNA, 25 bp, Homo sapien
ttctctccttgcagatgcacagtac

SEQ ID NO: 1118808 - DNA, 25 bp, Homo sapien
tctgttaacggctggctttttctgg

SEQ ID NO: 1118809 - DNA, 25 bp, Homo sapien
tgcaatggttttgcaatgacagcag

SEQ ID NO: 1118810 - DNA, 25 bp, Homo sapien
gaaacttgcgggttgttacagtgca

SEQ ID NO: 1118811 - DNA, 25 bp, Homo sapien
tatagttaggaatgtgatggaccaa

SEQ ID NO: 1118812 - DNA, 25 bp, Homo sapien
aaagcagcatcagtcgtggagcggt

SEQ ID NO: 1118813 - DNA, 25 bp, Homo sapien
aatctggccatagctgtgttgactc

SEQ ID NO: 1118814 - DNA, 25 bp, Homo sapien
tacagctggctagagaagaagggaa

SEQ ID NO: 1118815 - DNA, 25 bp, Homo sapien
tgagttaccgagaatccaaggctgt

SEQ ID NO: 1118816 - DNA, 25 bp, Homo sapien
cctaggactggggtagcgtctgtca

SEQ ID NO: 1118817 - DNA, 25 bp, Homo sapien
gcaagtccgcatgcctaggactggg

SEQ ID NO: 1118818 - DNA, 25 bp, Homo sapien
tgctcgaggcaagtccgcatgccta

SEQ ID NO: 1118819 - DNA, 25 bp, Homo sapien
gtgtgctcgaggcaagtccgcatgc

SEQ ID NO: 1118820 - DNA, 25 bp, Homo sapien
tggccccagttgctatccggagatg

SEQ ID NO: 1118821 - DNA, 25 bp, Homo sapien
catggaggcttgcatctttaagcgc

SEQ ID NO: 1118822 - DNA, 25 bp, Homo sapien
tcagttcgtggtaatcatggaggct

SEQ ID NO: 1118823 - DNA, 25 bp, Homo sapien
ctgagtagttttcaagtccctggct

SEQ ID NO: 1118824 - DNA, 25 bp, Homo sapien
cgaaatcttaactactgatgacagt

SEQ ID NO: 1118825 - DNA, 25 bp, Homo sapien
gaccaccgaaatcttaactactgat

SEQ ID NO: 1118826 - DNA, 25 bp, Homo sapien
ccagaccaccgaaatcttaactact

SEQ ID NO: 1118827 - DNA, 25 bp, Homo sapien
caccgaaatcttaactactgatgac

SEQ ID NO: 1118828 - DNA, 25 bp, Homo sapien
agcgcgctcaggaattgtcctgaga

SEQ ID NO: 1118829 - DNA, 25 bp, Homo sapien
cagcgcgctcaggaattgtcctgag

SEQ ID NO: 1118830 - DNA, 25 bp, Homo sapien
gcgcgctcaggaattgtcctgagag

SEQ ID NO: 1118831 - DNA, 25 bp, Homo sapien
gcgctcaggaattgtcctgagagca

SEQ ID NO: 1118832 - DNA, 25 bp, Homo sapien
tatgcctaggagtgcatgctccttg

SEQ ID NO: 1118833 - DNA, 25 bp, Homo sapien
atatgcctaggagtgcatgctcctt

SEQ ID NO: 1118834 - DNA, 25 bp, Homo sapien
gcctaggagtgcatgctccttgagc

SEQ ID NO: 1118835 - DNA, 25 bp, Homo sapien
tgcctaggagtgcatgctccttgag

SEQ ID NO: 1118836 - DNA, 25 bp, Homo sapien
gagatgttaccctagatgcccggag

SEQ ID NO: 1118837 - DNA, 25 bp, Homo sapien
tgggctggccttcatcttactaacg

SEQ ID NO: 1118838 - DNA, 25 bp, Homo sapien
cagggctaggaagggaatctcagaa

SEQ ID NO: 1118839 - DNA, 25 bp, Homo sapien
gacggaaatttggacagtctcccac

SEQ ID NO: 1118840 - DNA, 25 bp, Homo sapien
ccagcccctggaacgcttaatggga

SEQ ID NO: 1118841 - DNA, 25 bp, Homo sapien
tccccgtgtcctcgggtggcggctg

SEQ ID NO: 1118842 - DNA, 25 bp, Homo sapien
aggcaggcccgccttatctggagcc

SEQ ID NO: 1118843 - DNA, 25 bp, Homo sapien
ggctgcgctgctgcttaaattccaa

SEQ ID NO: 1118844 - DNA, 25 bp, Homo sapien
cagcgaggtgcatggattcgataca

SEQ ID NO: 1118845 - DNA, 25 bp, Homo sapien
ttcgacggagccagagtgaggcaac

SEQ ID NO: 1118846 - DNA, 25 bp, Homo sapien
cacagaggactgacaacgagcgtcc

SEQ ID NO: 1118847 - DNA, 25 bp, Homo sapien
aacagaccactgcagttcgacggag

SEQ ID NO: 1118848 - DNA, 25 bp, Homo sapien
gtgtctccccgcttgaggattctcc

SEQ ID NO: 1118849 - DNA, 25 bp, Homo sapien
ggagaaacgcggctcgccttgtcgt

SEQ ID NO: 1118850 - DNA, 25 bp, Homo sapien
gtcgtggctggcgatacgcctctgc

SEQ ID NO: 1118851 - DNA, 25 bp, Homo sapien
ctggcgatacgcctctgcaggaagg

SEQ ID NO: 1118852 - DNA, 25 bp, Homo sapien
cagctcagcaacaggggttcagcgt

SEQ ID NO: 1118853 - DNA, 25 bp, Homo sapien
ccccgcatccccacatttgaggaca

SEQ ID NO: 1118854 - DNA, 25 bp, Homo sapien
cccgcatccccacatttgaggacag

SEQ ID NO: 1118855 - DNA, 25 bp, Homo sapien
aagttcagttcaaggccggtatcag

SEQ ID NO: 1118856 - DNA, 25 bp, Homo sapien
gctaaatttgatactccggcgacct

SEQ ID NO: 1118857 - DNA, 25 bp, Homo sapien
gactaaaacgtagcacacctggcat

SEQ ID NO: 1118858 - DNA, 25 bp, Homo sapien
gctagaagggaagcttgaggccaca

SEQ ID NO: 1118859 - DNA, 25 bp, Homo sapien
gatgcgatgtgatccaacatgttgg

SEQ ID NO: 1118860 - DNA, 25 bp, Homo sapien
tacgtgattacctacagacttccaa

SEQ ID NO: 1118861 - DNA, 25 bp, Homo sapien
cagtcattgtgaacctggcactggt

SEQ ID NO: 1118862 - DNA, 25 bp, Homo sapien
cacaggctagcttctgggttcatac

SEQ ID NO: 1118863 - DNA, 25 bp, Homo sapien
tacccgctctgtgggatctctggag

SEQ ID NO: 1118864 - DNA, 25 bp, Homo sapien
tctggactgacgcttctgaggtgag

SEQ ID NO: 1118865 - DNA, 25 bp, Homo sapien
catgcgcacattggtacctgagagc

SEQ ID NO: 1118866 - DNA, 25 bp, Homo sapien
tatggtgttctgtcccatgcgcaca

SEQ ID NO: 1118867 - DNA, 25 bp, Homo sapien
gagcagtgcatctgcacctctaatc

SEQ ID NO: 1118868 - DNA, 25 bp, Homo sapien
actgggaaatactgcactccaggtg

SEQ ID NO: 1118869 - DNA, 25 bp, Homo sapien
gactgggaaatactgcactccaggt

SEQ ID NO: 1118870 - DNA, 25 bp, Homo sapien
gaatagcaccagaaagcactttcat

SEQ ID NO: 1118871 - DNA, 25 bp, Homo sapien
gcattttcatgtagacggctgctga

SEQ ID NO: 1118872 - DNA, 25 bp, Homo sapien
taaacagcagtaagatgtatcttcc

SEQ ID NO: 1118873 - DNA, 25 bp, Homo sapien
tgtatgacgccttgatatcctgaat

SEQ ID NO: 1118874 - DNA, 25 bp, Homo sapien
gctgtttggaaccacaatttgggcc

SEQ ID NO: 1118875 - DNA, 25 bp, Homo sapien
aatttgggcccagagaatccgagct

SEQ ID NO: 1118876 - DNA, 25 bp, Homo sapien
caacccctgggatgagttgaattcc

SEQ ID NO: 1118877 - DNA, 25 bp, Homo sapien
tcagggaagtctgatctggccccag

SEQ ID NO: 1118878 - DNA, 25 bp, Homo sapien
gaataaaactcagtgcaattcctgc

SEQ ID NO: 1118879 - DNA, 25 bp, Homo sapien
tccagggacaaatcctgagagagac

SEQ ID NO: 1118880 - DNA, 25 bp, Homo sapien
aacctggccattgttgagatgaacg

SEQ ID NO: 1118881 - DNA, 25 bp, Homo sapien
actaggtgcctacttagaagttcca

SEQ ID NO: 1118882 - DNA, 25 bp, Homo sapien
gattcaaacacaggctactaagtag

SEQ ID NO: 1118883 - DNA, 25 bp, Homo sapien
gaagaaatttcacatcgtccgactc

SEQ ID NO: 1118884 - DNA, 25 bp, Homo sapien
actgtatgtgctacctacctgtgag

SEQ ID NO: 1118885 - DNA, 25 bp, Homo sapien
catgatgccatgttgcctgtacgta

SEQ ID NO: 1118886 - DNA, 25 bp, Homo sapien
tttgtaagggaggatctacgttcat

SEQ ID NO: 1118887 - DNA, 25 bp, Homo sapien
tgaaaatggagggatttgtaaggga

SEQ ID NO: 1118888 - DNA, 25 bp, Homo sapien
ttcctgggtaagtcagaagggctgt

SEQ ID NO: 1118889 - DNA, 25 bp, Homo sapien
tttcccatcttcctgggtaagtcag

SEQ ID NO: 1118890 - DNA, 25 bp, Homo sapien
tcttcctgggtaagtcagaagggct

SEQ ID NO: 1118891 - DNA, 25 bp, Homo sapien
tcttcactctcgccttttcccatct

SEQ ID NO: 1118892 - DNA, 25 bp, Homo sapien
taaggcatggagcattagaagtgga

SEQ ID NO: 1118893 - DNA, 25 bp, Homo sapien
acttaggggcctataccacttctgg

SEQ ID NO: 1118894 - DNA, 25 bp, Homo sapien
gaagtggagcttgaaaaagcttgac

SEQ ID NO: 1118895 - DNA, 25 bp, Homo sapien
ggacagtcttgggtcatacttttta

SEQ ID NO: 1118896 - DNA, 25 bp, Homo sapien
tgagaaagttcatggtgctcccctc

SEQ ID NO: 1118897 - DNA, 25 bp, Homo sapien
ccatacagtggctattaagttctga

SEQ ID NO: 1118898 - DNA, 25 bp, Homo sapien
aaatatgttggcctgtaggttgaga

SEQ ID NO: 1118899 - DNA, 25 bp, Homo sapien
taagttctgagatagtgacataaga

SEQ ID NO: 1118900 - DNA, 25 bp, Homo sapien
tcaatggttccagaaggtctcctgc

SEQ ID NO: 1118901 - DNA, 25 bp, Homo sapien
tgacacagtcaatggttccagaagg

SEQ ID NO: 1118902 - DNA, 25 bp, Homo sapien
acagtcaatggttccagaaggtctc

SEQ ID NO: 1118903 - DNA, 25 bp, Homo sapien
aatggttccagaaggtctcctgcag

SEQ ID NO: 1118904 - DNA, 25 bp, Homo sapien
tgaagcccctgttctcaaggattta

SEQ ID NO: 1118905 - DNA, 25 bp, Homo sapien
gttctcaaggatttaatgctttctg

SEQ ID NO: 1118906 - DNA, 25 bp, Homo sapien
gagcctcctggtcaactcacagctc

SEQ ID NO: 1118907 - DNA, 25 bp, Homo sapien
ccaaatctcagaggggatcaggtgc

SEQ ID NO: 1118908 - DNA, 25 bp, Homo sapien
tctattcccattccgccaccaggtg

SEQ ID NO: 1118909 - DNA, 25 bp, Homo sapien
ccgccaccaggtgcaacttctgatt

SEQ ID NO: 1118910 - DNA, 25 bp, Homo sapien
cgccaccaggtgcaacttctgattt

SEQ ID NO: 1118911 - DNA, 25 bp, Homo sapien
attccgccaccaggtgcaacttctg

SEQ ID NO: 1118912 - DNA, 25 bp, Homo sapien
tgttggcccgttgtgggcaggaaac

SEQ ID NO: 1118913 - DNA, 25 bp, Homo sapien
gcccgttgtgggcaggaaacctgca

SEQ ID NO: 1118914 - DNA, 25 bp, Homo sapien
ctatgaatcattcaatgttggcccg

SEQ ID NO: 1118915 - DNA, 25 bp, Homo sapien
tgaatcattcaatgttggcccgttg

SEQ ID NO: 1118916 - DNA, 25 bp, Homo sapien
cccaactcttggtcatgtctgtgaa

SEQ ID NO: 1118917 - DNA, 25 bp, Homo sapien
ttcatgcagacttcccgatctgctc

SEQ ID NO: 1118918 - DNA, 25 bp, Homo sapien
ttcccaactcttggtcatgtctgtg

SEQ ID NO: 1118919 - DNA, 25 bp, Homo sapien
attgatgactacagtcatagccctc

SEQ ID NO: 1118920 - DNA, 25 bp, Homo sapien
tgcctgagaaccatactgagaggcc

SEQ ID NO: 1118921 - DNA, 25 bp, Homo sapien
gcctgagaaccatactgagaggcca

SEQ ID NO: 1118922 - DNA, 25 bp, Homo sapien
cctgcctgagaaccatactgagagg

SEQ ID NO: 1118923 - DNA, 25 bp, Homo sapien
cctgagaaccatactgagaggccat

SEQ ID NO: 1118924 - DNA, 25 bp, Homo sapien
gtctccgtggtgatgccgaccaaac

SEQ ID NO: 1118925 - DNA, 25 bp, Homo sapien
tgcttgtggactgagcatatgcaag

SEQ ID NO: 1118926 - DNA, 25 bp, Homo sapien
caagtttgtgcatctctgacatctg

SEQ ID NO: 1118927 - DNA, 25 bp, Homo sapien
tggtgatgccgaccaaaccggttcc

SEQ ID NO: 1118928 - DNA, 25 bp, Homo sapien
tcttcatatagtggaaggagtgagg

SEQ ID NO: 1118929 - DNA, 25 bp, Homo sapien
gggacgcaatattcagactatagca

SEQ ID NO: 1118930 - DNA, 25 bp, Homo sapien
gaagtctaccaatgataagtaatga

SEQ ID NO: 1118931 - DNA, 25 bp, Homo sapien
tatagcatggatcaaactagtaaga

SEQ ID NO: 1118932 - DNA, 25 bp, Homo sapien
gggaattagacaaagcgtaacatgg

SEQ ID NO: 1118933 - DNA, 25 bp, Homo sapien
ccgggcctccatgtgattgcgagcg

SEQ ID NO: 1118934 - DNA, 25 bp, Homo sapien
attgcgagcgctttctccggtggcc

SEQ ID NO: 1118935 - DNA, 25 bp, Homo sapien
gtaacatggactccgggcccgtgca

SEQ ID NO: 1118936 - DNA, 25 bp, Homo sapien
ggtgcagctcggccgccaagccacg

SEQ ID NO: 1118937 - DNA, 25 bp, Homo sapien
tgcagctcggccgccaagccacggc

SEQ ID NO: 1118938 - DNA, 25 bp, Homo sapien
tggggtgcagctcggccgccaagcc

SEQ ID NO: 1118939 - DNA, 25 bp, Homo sapien
cttggggtgcagctcggccgccaag

SEQ ID NO: 1118940 - DNA, 25 bp, Homo sapien
gaggtgctggtcctcccggcaacca

SEQ ID NO: 1118941 - DNA, 25 bp, Homo sapien
caggatttgagcagaagtcccgctc

SEQ ID NO: 1118942 - DNA, 25 bp, Homo sapien
ttttcaagcccctggacaggatttg

SEQ ID NO: 1118943 - DNA, 25 bp, Homo sapien
cctatcaaccctccagtaactggag

SEQ ID NO: 1118944 - DNA, 25 bp, Homo sapien
cagggatttagttagttggtgtcaa

SEQ ID NO: 1118945 - DNA, 25 bp, Homo sapien
tccacatggtaatggaaggctgggt

SEQ ID NO: 1118946 - DNA, 25 bp, Homo sapien
tggtgtcaagacagatgaagcaaga

SEQ ID NO: 1118947 - DNA, 25 bp, Homo sapien
ttgcatcatatgctactccacatgg

SEQ ID NO: 1118948 - DNA, 25 bp, Homo sapien
ttttgatgaagcctagcatttcatg

SEQ ID NO: 1118949 - DNA, 25 bp, Homo sapien
tctttttgatgaagcctagcatttc

SEQ ID NO: 1118950 - DNA, 25 bp, Homo sapien
atctttttgatgaagcctagcattt

SEQ ID NO: 1118951 - DNA, 25 bp, Homo sapien
tgatgaagcctagcatttcatggtt

SEQ ID NO: 1118952 - DNA, 25 bp, Homo sapien
gagaacagggctagagaaaacacca

SEQ ID NO: 1118953 - DNA, 25 bp, Homo sapien
taaatgccgggatgccgctatggct

SEQ ID NO: 1118954 - DNA, 25 bp, Homo sapien
cacgcagcacgaaccagaggagtta

SEQ ID NO: 1118955 - DNA, 25 bp, Homo sapien
cattggcctggaagcctaaatgccg

SEQ ID NO: 1118956 - DNA, 25 bp, Homo sapien
tcgtcgttgttgtgagagagttcaa

SEQ ID NO: 1118957 - DNA, 25 bp, Homo sapien
cagattcgtcactaggactggattc

SEQ ID NO: 1118958 - DNA, 25 bp, Homo sapien
gaggagcagccagactagagaagcc

SEQ ID NO: 1118959 - DNA, 25 bp, Homo sapien
cacttcctgtaatgaccttggctgc

SEQ ID NO: 1118960 - DNA, 25 bp, Homo sapien
tgattggcatttacccatagaggat

SEQ ID NO: 1118961 - DNA, 25 bp, Homo sapien
gaaccatggctttcaaggaagcctt

SEQ ID NO: 1118962 - DNA, 25 bp, Homo sapien
ggaagcctttcgcagagccaactgg

SEQ ID NO: 1118963 - DNA, 25 bp, Homo sapien
gggtagcacatgcaacaggattttc

SEQ ID NO: 1118964 - DNA, 25 bp, Homo sapien
taaaaagcgcttacaggactgtctc

SEQ ID NO: 1118965 - DNA, 25 bp, Homo sapien
gcaaaagtcatattcccaagtgagg

SEQ ID NO: 1118966 - DNA, 25 bp, Homo sapien
ttgtgcctcgctggctcaaaagaga

SEQ ID NO: 1118967 - DNA, 25 bp, Homo sapien
cacagagaagttccatagtcctggg

SEQ ID NO: 1118968 - DNA, 25 bp, Homo sapien
tagagagatccaagtgtcggcagcg

SEQ ID NO: 1118969 - DNA, 25 bp, Homo sapien
gagaaagagctagagagatccaagt

SEQ ID NO: 1118970 - DNA, 25 bp, Homo sapien
gggtcaccgcttgcataactgccat

SEQ ID NO: 1118971 - DNA, 25 bp, Homo sapien
gcttgcataactgccatggtgggca

SEQ ID NO: 1118972 - DNA, 25 bp, Homo sapien
aagcggccaccctgttctctcaggg

SEQ ID NO: 1118973 - DNA, 25 bp, Homo sapien
ggcgacaggagacttcactcctcca

SEQ ID NO: 1118974 - DNA, 25 bp, Homo sapien
tccggaggctggaaccacggcgaca

SEQ ID NO: 1118975 - DNA, 25 bp, Homo sapien
tgagacccggcagcacgttatagac

SEQ ID NO: 1118976 - DNA, 25 bp, Homo sapien
cttgagttctgggcagagcctgagt

SEQ ID NO: 1118977 - DNA, 25 bp, Homo sapien
catccctgtggagtttcaacgacat

SEQ ID NO: 1118978 - DNA, 25 bp, Homo sapien
ggctcaggcctcttaagatcaaaag

SEQ ID NO: 1118979 - DNA, 25 bp, Homo sapien
tcaacgacattcatggctaccacga

SEQ ID NO: 1118980 - DNA, 25 bp, Homo sapien
gatcaaaagaatgccccacagacac

SEQ ID NO: 1118981 - DNA, 25 bp, Homo sapien
caaaggctctgggattagcgctgcc

SEQ ID NO: 1118982 - DNA, 25 bp, Homo sapien
tacagacacaactgcagacacctgg

SEQ ID NO: 1118983 - DNA, 25 bp, Homo sapien
gattcctcaggaaaccgtggcactc

SEQ ID NO: 1118984 - DNA, 25 bp, Homo sapien
gacacctgggtacggttatctaaca

SEQ ID NO: 1118985 - DNA, 25 bp, Homo sapien
tgtcagcagtcaaaggcaccaaggc

SEQ ID NO: 1118986 - DNA, 25 bp, Homo sapien
tagctttggttacagccgcgcacca

SEQ ID NO: 1118987 - DNA, 25 bp, Homo sapien
tcagcaccggtgaaaacctacgtag

SEQ ID NO: 1118988 - DNA, 25 bp, Homo sapien
tactggcttccgtgcaggactgatc

SEQ ID NO: 1118989 - DNA, 25 bp, Homo sapien
ctcaaataaacaggcttggtttcca

SEQ ID NO: 1118990 - DNA, 25 bp, Homo sapien
aatctcaaataaacaggcttggttt

SEQ ID NO: 1118991 - DNA, 25 bp, Homo sapien
atctcaaataaacaggcttggtttc

SEQ ID NO: 1118992 - DNA, 25 bp, Homo sapien
tctcaaataaacaggcttggtttcc

SEQ ID NO: 1118993 - DNA, 25 bp, Homo sapien
taaagaataaccagatgactagccc

SEQ ID NO: 1118994 - DNA, 25 bp, Homo sapien
gcagtgtagctgaaccttaaaaata

SEQ ID NO: 1118995 - DNA, 25 bp, Homo sapien
tatacaatgggatatgatctggcaa

SEQ ID NO: 1118996 - DNA, 25 bp, Homo sapien
tatatctccacctaaaaacgtgcat

SEQ ID NO: 1118997 - DNA, 25 bp, Homo sapien
tagggtcctaagagacgaacgttca

SEQ ID NO: 1118998 - DNA, 25 bp, Homo sapien
taccatctggtcgtgatcctgcact

SEQ ID NO: 1118999 - DNA, 25 bp, Homo sapien
cacactgacaggatcggatgacctt

SEQ ID NO: 1119000 - DNA, 25 bp, Homo sapien
gaggttccaataccagtgctgacca

SEQ ID NO: 1119001 - DNA, 25 bp, Homo sapien
taacttagctggaggcaacatcaag

SEQ ID NO: 1119002 - DNA, 25 bp, Homo sapien
taatagttcgggtctaagggcacaa

SEQ ID NO: 1119003 - DNA, 25 bp, Homo sapien
gaaaggttcctgatgccaagatcca

SEQ ID NO: 1119004 - DNA, 25 bp, Homo sapien
catcaagcatgatatcagtgggact

SEQ ID NO: 1119005 - DNA, 25 bp, Homo sapien
gatttatgcccatgtaaacgactag

SEQ ID NO: 1119006 - DNA, 25 bp, Homo sapien
gattaacctcacgtgcatatttccg

SEQ ID NO: 1119007 - DNA, 25 bp, Homo sapien
taatatgtgctagtgtccaagcgtg

SEQ ID NO: 1119008 - DNA, 25 bp, Homo sapien
caacttatgggctgcgaatacacca

SEQ ID NO: 1119009 - DNA, 25 bp, Homo sapien
tgtaacacatcgtccctctaccagg

SEQ ID NO: 1119010 - DNA, 25 bp, Homo sapien
tgatgcactgtacccaaaagtcatt

SEQ ID NO: 1119011 - DNA, 25 bp, Homo sapien
catcagtgcctatggtaagccttcc

SEQ ID NO: 1119012 - DNA, 25 bp, Homo sapien
ttgatgctcccagagtatcctgtgc

SEQ ID NO: 1119013 - DNA, 25 bp, Homo sapien
cctgaaccaaatactggcagtgaga

SEQ ID NO: 1119014 - DNA, 25 bp, Homo sapien
agcattccagaagggtgctcagaag

SEQ ID NO: 1119015 - DNA, 25 bp, Homo sapien
tcagaaggcacccaacctgaaccaa

SEQ ID NO: 1119016 - DNA, 25 bp, Homo sapien
aaatgatcaacaactctaacaggca

SEQ ID NO: 1119017 - DNA, 25 bp, Homo sapien
ggtgacccgagcagccatgaatgaa

SEQ ID NO: 1119018 - DNA, 25 bp, Homo sapien
tcaaggcaagtacccaagagttttg

SEQ ID NO: 1119019 - DNA, 25 bp, Homo sapien
gctgacagctttatagcacggaact

SEQ ID NO: 1119020 - DNA, 25 bp, Homo sapien
gaatgggcttctctaattatgtgca

SEQ ID NO: 1119021 - DNA, 25 bp, Homo sapien
taagtgatgcaacttccgcaagggt

SEQ ID NO: 1119022 - DNA, 25 bp, Homo sapien
tggtggtgacctcggcatttcctgg

SEQ ID NO: 1119023 - DNA, 25 bp, Homo sapien
ggaaatgtcgtttgttgtccgccca

SEQ ID NO: 1119024 - DNA, 25 bp, Homo sapien
aaatctgtgcgaggatatgtggctc

SEQ ID NO: 1119025 - DNA, 25 bp, Homo sapien
agacaacgcttttgtcgtccaaggg

SEQ ID NO: 1119026 - DNA, 25 bp, Homo sapien
catgctgggaacttcaatcacaggc

SEQ ID NO: 1119027 - DNA, 25 bp, Homo sapien
tcaagtcactatcttccacatgggc

SEQ ID NO: 1119028 - DNA, 25 bp, Homo sapien
tcatcactgctggtagaaacatgct

SEQ ID NO: 1119029 - DNA, 25 bp, Homo sapien
gatgctcaactttgggcttgcagac

SEQ ID NO: 1119030 - DNA, 25 bp, Homo sapien
gacaaagttcgctgtatagcagaga

SEQ ID NO: 1119031 - DNA, 25 bp, Homo sapien
attgtgggtgcactcaaatacctca

SEQ ID NO: 1119032 - DNA, 25 bp, Homo sapien
tcaaagctgattgcgttgacaaagt

SEQ ID NO: 1119033 - DNA, 25 bp, Homo sapien
taaggtgccgcaactctcggagaga

SEQ ID NO: 1119034 - DNA, 25 bp, Homo sapien
gacttcgagtggcagggtatcaaaa

SEQ ID NO: 1119035 - DNA, 25 bp, Homo sapien
tactgccactggtaaggattcgagc

SEQ ID NO: 1119036 - DNA, 25 bp, Homo sapien
gaaggcatctcaagtgatcgcgaag

SEQ ID NO: 1119037 - DNA, 25 bp, Homo sapien
taataacttgtacgtgagcacttgc

SEQ ID NO: 1119038 - DNA, 25 bp, Homo sapien
taatcatttactttagcaggcaagc

SEQ ID NO: 1119039 - DNA, 25 bp, Homo sapien
taaacattcagtagcggcagcatcc

SEQ ID NO: 1119040 - DNA, 25 bp, Homo sapien
gaagttgttcctgcacatcactgtg

SEQ ID NO: 1119041 - DNA, 25 bp, Homo sapien
gaacggagttaaagcaatattgcac

SEQ ID NO: 1119042 - DNA, 25 bp, Homo sapien
ctactgcattccaagtctgtaagag

SEQ ID NO: 1119043 - DNA, 25 bp, Homo sapien
ccagtcaactgttgtgagaggtgct

SEQ ID NO: 1119044 - DNA, 25 bp, Homo sapien
tctatgacacgaggtgctcaggagc

SEQ ID NO: 1119045 - DNA, 25 bp, Homo sapien
tgggttaaacccttggagatacatc

SEQ ID NO: 1119046 - DNA, 25 bp, Homo sapien
tccatcataaccaaagccggatagg

SEQ ID NO: 1119047 - DNA, 25 bp, Homo sapien
taggtaacaggcctaagctgcagga

SEQ ID NO: 1119048 - DNA, 25 bp, Homo sapien
gattatgcacatttatctccaggga

SEQ ID NO: 1119049 - DNA, 25 bp, Homo sapien
caaaatattggtcagcccagaagca

SEQ ID NO: 1119050 - DNA, 25 bp, Homo sapien
tgataaaaggatgaggttagccctc

SEQ ID NO: 1119051 - DNA, 25 bp, Homo sapien
tgttgttgcagtagtgggctcctga

SEQ ID NO: 1119052 - DNA, 25 bp, Homo sapien
tattccctgcccaacgaaaacagtc

SEQ ID NO: 1119053 - DNA, 25 bp, Homo sapien
ccctctgagattccttttctaatga

SEQ ID NO: 1119054 - DNA, 25 bp, Homo sapien
tccctctgagattccttttctaatg

SEQ ID NO: 1119055 - DNA, 25 bp, Homo sapien
ctacgaccatatgaggaaaggaggt

SEQ ID NO: 1119056 - DNA, 25 bp, Homo sapien
agcagacgggacaaggactcacaat

SEQ ID NO: 1119057 - DNA, 25 bp, Homo sapien
acaagatatcccaaatggctgttac

SEQ ID NO: 1119058 - DNA, 25 bp, Homo sapien
gactcacaatttagacctttacaag

SEQ ID NO: 1119059 - DNA, 25 bp, Homo sapien
cattgcaaaatcattcggaagagga

SEQ ID NO: 1119060 - DNA, 25 bp, Homo sapien
ggaccaacagttataaccctctctg

SEQ ID NO: 1119061 - DNA, 25 bp, Homo sapien
gctcaaacaccctctggacactaat

SEQ ID NO: 1119062 - DNA, 25 bp, Homo sapien
gctagggaccaccaactgatcagga

SEQ ID NO: 1119063 - DNA, 25 bp, Homo sapien
gatagcttgtctcctacgattagcg

SEQ ID NO: 1119064 - DNA, 25 bp, Homo sapien
tcatgtgacccaggtgtgtcaggaa

SEQ ID NO: 1119065 - DNA, 25 bp, Homo sapien
gacaaacaggtacgatactccttcg

SEQ ID NO: 1119066 - DNA, 25 bp, Homo sapien
tctgctagcctgtggagggacaaac

SEQ ID NO: 1119067 - DNA, 25 bp, Homo sapien
tgacaccctcggatgtaagtgccat

SEQ ID NO: 1119068 - DNA, 25 bp, Homo sapien
ctagggtgtgacatccagggacagc

SEQ ID NO: 1119069 - DNA, 25 bp, Homo sapien
gagtcttctctttggttgtgatagc

SEQ ID NO: 1119070 - DNA, 25 bp, Homo sapien
gctttgacaccctcggatgtaagtg

SEQ ID NO: 1119071 - DNA, 25 bp, Homo sapien
tgaccggagtgccgggaaaccacaa

SEQ ID NO: 1119072 - DNA, 25 bp, Homo sapien
cacaaggggttgtccagggctagta

SEQ ID NO: 1119073 - DNA, 25 bp, Homo sapien
tccagggctagtaacttcagagaag

SEQ ID NO: 1119074 - DNA, 25 bp, Homo sapien
tgttttggttagtgttccaacagga

SEQ ID NO: 1119075 - DNA, 25 bp, Homo sapien
aagccccaaatttctgatggcacca

SEQ ID NO: 1119076 - DNA, 25 bp, Homo sapien
ggaacgtccaaggtctttatgtata

SEQ ID NO: 1119077 - DNA, 25 bp, Homo sapien
tatattttccactgagttgattctc

SEQ ID NO: 1119078 - DNA, 25 bp, Homo sapien
tagaaatgatgggtttggaacgtcc

SEQ ID NO: 1119079 - DNA, 25 bp, Homo sapien
ctctcttcatttttcccttttccat

SEQ ID NO: 1119080 - DNA, 25 bp, Homo sapien
ctttgcctttttttcctctcttcat

SEQ ID NO: 1119081 - DNA, 25 bp, Homo sapien
tggatcccgtgttgaaaatacaccc

SEQ ID NO: 1119082 - DNA, 25 bp, Homo sapien
ttcctaggaggcaaccctgtgctgc

SEQ ID NO: 1119083 - DNA, 25 bp, Homo sapien
caaggcactaatgtgctataaacca

SEQ ID NO: 1119084 - DNA, 25 bp, Homo sapien
actggagagtcgaataacaaagccg

SEQ ID NO: 1119085 - DNA, 25 bp, Homo sapien
gaggcggggccgaccggcgctacca

SEQ ID NO: 1119086 - DNA, 25 bp, Homo sapien
ggccgaccggcgctaccagccccat

SEQ ID NO: 1119087 - DNA, 25 bp, Homo sapien
gcggggccgaccggcgctaccagcc

SEQ ID NO: 1119088 - DNA, 25 bp, Homo sapien
gggccgaccggcgctaccagcccca

SEQ ID NO: 1119089 - DNA, 25 bp, Homo sapien
agggccgtcggccttggcggcgcta

SEQ ID NO: 1119090 - DNA, 25 bp, Homo sapien
taggctgagctatggccggcggcga

SEQ ID NO: 1119091 - DNA, 25 bp, Homo sapien
gatcactccgcgcgaccgagagcgg

SEQ ID NO: 1119092 - DNA, 25 bp, Homo sapien
cgagcgtccgcgacccgcgattcca

SEQ ID NO: 1119093 - DNA, 25 bp, Homo sapien
ctaaacggacggtctgggtcgctgc

SEQ ID NO: 1119094 - DNA, 25 bp, Homo sapien
taaacggacggtctgggtcgctgcc

SEQ ID NO: 1119095 - DNA, 25 bp, Homo sapien
actaaacggacggtctgggtcgctg

SEQ ID NO: 1119096 - DNA, 25 bp, Homo sapien
aagccctgataagtattcctgcagg

SEQ ID NO: 1119097 - DNA, 25 bp, Homo sapien
taagtattcctgcaggcggagtgtg

SEQ ID NO: 1119098 - DNA, 25 bp, Homo sapien
cctgataagtattcctgcaggcgga

SEQ ID NO: 1119099 - DNA, 25 bp, Homo sapien
ttcctgcaggcggagtgtgtgtaat

SEQ ID NO: 1119100 - DNA, 25 bp, Homo sapien
aacatctaagaacctataccagtgg

SEQ ID NO: 1119101 - DNA, 25 bp, Homo sapien
tgtaagaaatttgagaaaccctgcc

SEQ ID NO: 1119102 - DNA, 25 bp, Homo sapien
tccaatgggttcctcttattccaag

SEQ ID NO: 1119103 - DNA, 25 bp, Homo sapien
cacctaggttattgcaaaagtctcc

SEQ ID NO: 1119104 - DNA, 25 bp, Homo sapien
ccagggccataatcacgatccattc

SEQ ID NO: 1119105 - DNA, 25 bp, Homo sapien
tttttagataaatatccttgaatgt

SEQ ID NO: 1119106 - DNA, 25 bp, Homo sapien
agataaatatccttgaatgtcagac

SEQ ID NO: 1119107 - DNA, 25 bp, Homo sapien
ctttactggcactcaaaagaagaat

SEQ ID NO: 1119108 - DNA, 25 bp, Homo sapien
tttactggcactcaaaagaagaatt

SEQ ID NO: 1119109 - DNA, 25 bp, Homo sapien
aaagaaaaaagttatatgatgctca

SEQ ID NO: 1119110 - DNA, 25 bp, Homo sapien
aagaaaaaagttatatgatgctcac

SEQ ID NO: 1119111 - DNA, 25 bp, Homo sapien
taaaaagaaaaaagttatatgatgc

SEQ ID NO: 1119112 - DNA, 25 bp, Homo sapien
aaaagaaaaaagttatatgatgctc

SEQ ID NO: 1119113 - DNA, 25 bp, Homo sapien
gccatatgactggtttaggtaggaa

SEQ ID NO: 1119114 - DNA, 25 bp, Homo sapien
gtaggaatccatggatctctgaccc

SEQ ID NO: 1119115 - DNA, 25 bp, Homo sapien
accaccactgtgattgtccatgcca

SEQ ID NO: 1119116 - DNA, 25 bp, Homo sapien
cataggatccatggccatagtcacg

SEQ ID NO: 1119117 - DNA, 25 bp, Homo sapien
taaaggcccacaattacacatgaga

SEQ ID NO: 1119118 - DNA, 25 bp, Homo sapien
tgtgcctcaaaaagtagacacccct

SEQ ID NO: 1119119 - DNA, 25 bp, Homo sapien
tacatagcaccccacattagaaaag

SEQ ID NO: 1119120 - DNA, 25 bp, Homo sapien
taatacaatgcttctagcctagagc

SEQ ID NO: 1119121 - DNA, 25 bp, Homo sapien
gggcagttcaacgtgagaccagata

SEQ ID NO: 1119122 - DNA, 25 bp, Homo sapien
cagagagatccttttgcactcccaa

SEQ ID NO: 1119123 - DNA, 25 bp, Homo sapien
aaactgcttcattgtgtctgtagga

SEQ ID NO: 1119124 - DNA, 25 bp, Homo sapien
tcacatttgattagggctgggcagt

SEQ ID NO: 1119125 - DNA, 25 bp, Homo sapien
cagagaagacctggagtcgtaagac

SEQ ID NO: 1119126 - DNA, 25 bp, Homo sapien
gtcaaggctattccggtaggagctc

SEQ ID NO: 1119127 - DNA, 25 bp, Homo sapien
gtaggagctctcaaatcgaccacca

SEQ ID NO: 1119128 - DNA, 25 bp, Homo sapien
tctacctccgaaagagtcaaggcta

SEQ ID NO: 1119129 - DNA, 25 bp, Homo sapien
tcaggataagcaggcgttcctctcc

SEQ ID NO: 1119130 - DNA, 25 bp, Homo sapien
tgatggtcctccaaaagcatcatag

SEQ ID NO: 1119131 - DNA, 25 bp, Homo sapien
gagagcctacaggtgcaggcttcat

SEQ ID NO: 1119132 - DNA, 25 bp, Homo sapien
ctgcttccaaacgtactttcaggat

SEQ ID NO: 1119133 - DNA, 25 bp, Homo sapien
tactacaccaagaggccacatgtcc

SEQ ID NO: 1119134 - DNA, 25 bp, Homo sapien
gataaagaattgcatctgacgttcc

SEQ ID NO: 1119135 - DNA, 25 bp, Homo sapien
tgaagagtcatgcaaccaaacgact

SEQ ID NO: 1119136 - DNA, 25 bp, Homo sapien
tgtatactatgctcaggaatgccta

SEQ ID NO: 1119137 - DNA, 25 bp, Homo sapien
cagcagcaactgtcacattggtgga

SEQ ID NO: 1119138 - DNA, 25 bp, Homo sapien
ttcttgataaaggttccactgggct

SEQ ID NO: 1119139 - DNA, 25 bp, Homo sapien
tgatagtcaacaacaattccgggtc

SEQ ID NO: 1119140 - DNA, 25 bp, Homo sapien
gatttgctgaggcttatcttctcca

SEQ ID NO: 1119141 - DNA, 25 bp, Homo sapien
gtatccatctccgtatttctcactg

SEQ ID NO: 1119142 - DNA, 25 bp, Homo sapien
ttctgcgcctttgtttctctcgccg

SEQ ID NO: 1119143 - DNA, 25 bp, Homo sapien
ctgtatccatctccgtatttctcac

SEQ ID NO: 1119144 - DNA, 25 bp, Homo sapien
cgagcctcaattcgccgcttttctt

SEQ ID NO: 1119145 - DNA, 25 bp, Homo sapien
aatgctattagatttattttcctgg

SEQ ID NO: 1119146 - DNA, 25 bp, Homo sapien
caactgctgagttcatatcctaatt

SEQ ID NO: 1119147 - DNA, 25 bp, Homo sapien
ccaccgtgaccagaataactgtttc

SEQ ID NO: 1119148 - DNA, 25 bp, Homo sapien
gagccaactgctgagttcatatcct

SEQ ID NO: 1119149 - DNA, 25 bp, Homo sapien
caaatgttcgaaatttacaaaatga

SEQ ID NO: 1119150 - DNA, 25 bp, Homo sapien
tgcaaaaactccataactactttat

SEQ ID NO: 1119151 - DNA, 25 bp, Homo sapien
ctgtatatgatctaatgtttcctga

SEQ ID NO: 1119152 - DNA, 25 bp, Homo sapien
gatgtgaagaactttccagatgcag

SEQ ID NO: 1119153 - DNA, 25 bp, Homo sapien
tcttgaatttattcaccatacactc

SEQ ID NO: 1119154 - DNA, 25 bp, Homo sapien
tgttgcttacgaatagatgttttct

SEQ ID NO: 1119155 - DNA, 25 bp, Homo sapien
attatttgtctgttgcttacgaata

SEQ ID NO: 1119156 - DNA, 25 bp, Homo sapien
tgtctgttgcttacgaatagatgtt

SEQ ID NO: 1119157 - DNA, 25 bp, Homo sapien
gtaaagcagggatataaacactgca

SEQ ID NO: 1119158 - DNA, 25 bp, Homo sapien
ggatataaacactgcaagcgctgca

SEQ ID NO: 1119159 - DNA, 25 bp, Homo sapien
ctgcttccctttgatatgatcagga

SEQ ID NO: 1119160 - DNA, 25 bp, Homo sapien
gcgctgcaatgaactgtctctacct

SEQ ID NO: 1119161 - DNA, 25 bp, Homo sapien
cagtaataatcaaatctttactttc

SEQ ID NO: 1119162 - DNA, 25 bp, Homo sapien
tgtatttttcccaaccatcagaaaa

SEQ ID NO: 1119163 - DNA, 25 bp, Homo sapien
tgtatcagtaataatcaaatcttta

SEQ ID NO: 1119164 - DNA, 25 bp, Homo sapien
ccaaccatcagaaaaatgtatcagt

SEQ ID NO: 1119165 - DNA, 25 bp, Homo sapien
cttaacaaaacgttcatatcgcgcc

SEQ ID NO: 1119166 - DNA, 25 bp, Homo sapien
cgcgccttcactattggattattta

SEQ ID NO: 1119167 - DNA, 25 bp, Homo sapien
caaaacgttcatatcgcgccttcac

SEQ ID NO: 1119168 - DNA, 25 bp, Homo sapien
aaaatgcttgtagcagtcaagacac

SEQ ID NO: 1119169 - DNA, 25 bp, Homo sapien
gagctgaccatgagcagaagatgtt

SEQ ID NO: 1119170 - DNA, 25 bp, Homo sapien
caagatgatacagttggagaattaa

SEQ ID NO: 1119171 - DNA, 25 bp, Homo sapien
agaaattgatgtactgattatctca

SEQ ID NO: 1119172 - DNA, 25 bp, Homo sapien
tactgattatctcaatgaggacaaa

SEQ ID NO: 1119173 - DNA, 25 bp, Homo sapien
gaacaagatgatacagttggagaat

SEQ ID NO: 1119174 - DNA, 25 bp, Homo sapien
cttgaatttcaaaaggattctcacc

SEQ ID NO: 1119175 - DNA, 25 bp, Homo sapien
tccttctatttgctgatcctgagaa

SEQ ID NO: 1119176 - DNA, 25 bp, Homo sapien
tcaggttgctcaacagggaagtcag

SEQ ID NO: 1119177 - DNA, 25 bp, Homo sapien
tcttcaataggttcatcaatcttct

SEQ ID NO: 1119178 - DNA, 25 bp, Homo sapien
tatgtggaatgcatgcaacatgggt

SEQ ID NO: 1119179 - DNA, 25 bp, Homo sapien
acttgcccagtttatatcttccagg

SEQ ID NO: 1119180 - DNA, 25 bp, Homo sapien
ttgaatattcactcccaagagcagc

SEQ ID NO: 1119181 - DNA, 25 bp, Homo sapien
cattagaaccgaaatgtaaagctcc

SEQ ID NO: 1119182 - DNA, 25 bp, Homo sapien
tttattgctacaaagggaaacatgg

SEQ ID NO: 1119183 - DNA, 25 bp, Homo sapien
attttattgctacaaagggaaacat

SEQ ID NO: 1119184 - DNA, 25 bp, Homo sapien
cattttattgctacaaagggaaaca

SEQ ID NO: 1119185 - DNA, 25 bp, Homo sapien
ttttattgctacaaagggaaacatg

SEQ ID NO: 1119186 - DNA, 25 bp, Homo sapien
gtataaataaggtcagttcaaactc

SEQ ID NO: 1119187 - DNA, 25 bp, Homo sapien
tataaataaggtcagttcaaactca

SEQ ID NO: 1119188 - DNA, 25 bp, Homo sapien
taaataaggtcagttcaaactcact

SEQ ID NO: 1119189 - DNA, 25 bp, Homo sapien
agtataaataaggtcagttcaaact

SEQ ID NO: 1119190 - DNA, 25 bp, Homo sapien
ggctcacacttaacagtcccagcta

SEQ ID NO: 1119191 - DNA, 25 bp, Homo sapien
gaggttgaggctacactgcactcca

SEQ ID NO: 1119192 - DNA, 25 bp, Homo sapien
cttgggaggctaagttggaggatcg

SEQ ID NO: 1119193 - DNA, 25 bp, Homo sapien
tggtggctcacacttaacagtccca

SEQ ID NO: 1119194 - DNA, 25 bp, Homo sapien
tcatgcgtcccacaaaaaagtacta

SEQ ID NO: 1119195 - DNA, 25 bp, Homo sapien
taggctgtataaaggctcatgcgtc

SEQ ID NO: 1119196 - DNA, 25 bp, Homo sapien
taaactgcccgcctacaaattatcc

SEQ ID NO: 1119197 - DNA, 25 bp, Homo sapien
tcattaccttgcaaattagctaggc

SEQ ID NO: 1119198 - DNA, 25 bp, Homo sapien
gaacacctccaaagaatatgctcta

SEQ ID NO: 1119199 - DNA, 25 bp, Homo sapien
gctaggccagtctgatcaacatgat

SEQ ID NO: 1119200 - DNA, 25 bp, Homo sapien
tcaacatgataaggagttctaactg

SEQ ID NO: 1119201 - DNA, 25 bp, Homo sapien
aaagtaacaaaaggccattatggct

SEQ ID NO: 1119202 - DNA, 25 bp, Homo sapien
ctagtatggctgtctccgaggaggc

SEQ ID NO: 1119203 - DNA, 25 bp, Homo sapien
tagaattcacaacagacctctggga

SEQ ID NO: 1119204 - DNA, 25 bp, Homo sapien
cttgcaaatgagagcctaggagtca

SEQ ID NO: 1119205 - DNA, 25 bp, Homo sapien
gactagaacattcctgcctggacgg

SEQ ID NO: 1119206 - DNA, 25 bp, Homo sapien
tggtgaattctctatacatatggct

SEQ ID NO: 1119207 - DNA, 25 bp, Homo sapien
taaacagatggtgttctgggttttc

SEQ ID NO: 1119208 - DNA, 25 bp, Homo sapien
ttacctggcactgtgatatatgcag

SEQ ID NO: 1119209 - DNA, 25 bp, Homo sapien
ctctggaagtatcttcagctcaaaa

SEQ ID NO: 1119210 - DNA, 25 bp, Homo sapien
aaatagcagtatgttgtagcactcc

SEQ ID NO: 1119211 - DNA, 25 bp, Homo sapien
tgcattgtgatgacaggatggaccc

SEQ ID NO: 1119212 - DNA, 25 bp, Homo sapien
tatctgacaatttctaagcgctgtg

SEQ ID NO: 1119213 - DNA, 25 bp, Homo sapien
ataatttgataccatgccgtgcagg

SEQ ID NO: 1119214 - DNA, 25 bp, Homo sapien
tcttagacagtatacagttccaagt

SEQ ID NO: 1119215 - DNA, 25 bp, Homo sapien
tagtccttagccaagttacaaaggc

SEQ ID NO: 1119216 - DNA, 25 bp, Homo sapien
gatgtttgtctctacaatcacactg

SEQ ID NO: 1119217 - DNA, 25 bp, Homo sapien
gaacacagtgtttattcaggcattt

SEQ ID NO: 1119218 - DNA, 25 bp, Homo sapien
gcttttttgcctaggaacatggcca

SEQ ID NO: 1119219 - DNA, 25 bp, Homo sapien
tgacaccttgaagggtgacaccagc

SEQ ID NO: 1119220 - DNA, 25 bp, Homo sapien
ccatcctggaagctagttgtattca

SEQ ID NO: 1119221 - DNA, 25 bp, Homo sapien
caagatagagggagcctcagtctct

SEQ ID NO: 1119222 - DNA, 25 bp, Homo sapien
ctttaatgtttcaccgatgtattta

SEQ ID NO: 1119223 - DNA, 25 bp, Homo sapien
gcctgggcttttacccatgatttta

SEQ ID NO: 1119224 - DNA, 25 bp, Homo sapien
tgggcttttacccatgattttaaca

SEQ ID NO: 1119225 - DNA, 25 bp, Homo sapien
atgtttcaccgatgtatttatcttt

SEQ ID NO: 1119226 - DNA, 25 bp, Homo sapien
ctagggacacaggagttatacaaca

SEQ ID NO: 1119227 - DNA, 25 bp, Homo sapien
tattctggttatactgaactaggga

SEQ ID NO: 1119228 - DNA, 25 bp, Homo sapien
ttatacaacaaggagcccggtggct

SEQ ID NO: 1119229 - DNA, 25 bp, Homo sapien
tctggttatactgaactagggacac

SEQ ID NO: 1119230 - DNA, 25 bp, Homo sapien
atttcttctctcccccagcttgttg

SEQ ID NO: 1119231 - DNA, 25 bp, Homo sapien
ttctctcccccagcttgttgtctag

SEQ ID NO: 1119232 - DNA, 25 bp, Homo sapien
ccagcttgttgtctagcttctgacc

SEQ ID NO: 1119233 - DNA, 25 bp, Homo sapien
tcccccagcttgttgtctagcttct

SEQ ID NO: 1119234 - DNA, 25 bp, Homo sapien
aaaacacccttgataagaaataatg

SEQ ID NO: 1119235 - DNA, 25 bp, Homo sapien
cacccttgataagaaataatgacca

SEQ ID NO: 1119236 - DNA, 25 bp, Homo sapien
ttcactacccttgctacagacttct

SEQ ID NO: 1119237 - DNA, 25 bp, Homo sapien
tgtttttcactacccttgctacaga

SEQ ID NO: 1119238 - DNA, 25 bp, Homo sapien
tgtaggactttcttcccaactacag

SEQ ID NO: 1119239 - DNA, 25 bp, Homo sapien
gcaaggcagctcttcggatttcatt

SEQ ID NO: 1119240 - DNA, 25 bp, Homo sapien
aaggcagctcttcggatttcatttc

SEQ ID NO: 1119241 - DNA, 25 bp, Homo sapien
agcaaggcagctcttcggatttcat

SEQ ID NO: 1119242 - DNA, 25 bp, Homo sapien
gcagctcttcggatttcatttctct

SEQ ID NO: 1119243 - DNA, 25 bp, Homo sapien
cacgataaaataagttgagtcctga

SEQ ID NO: 1119244 - DNA, 25 bp, Homo sapien
ccatgatggctttacaagatcccca

SEQ ID NO: 1119245 - DNA, 25 bp, Homo sapien
ttaattatggcctcaaaatgccagt

SEQ ID NO: 1119246 - DNA, 25 bp, Homo sapien
tcacacgataaaataagttgagtcc

SEQ ID NO: 1119247 - DNA, 25 bp, Homo sapien
agcaaaatggccaatcccaggccca

SEQ ID NO: 1119248 - DNA, 25 bp, Homo sapien
cagaggaaagaggaaacttcccaag

SEQ ID NO: 1119249 - DNA, 25 bp, Homo sapien
caagaaaagcaaaatggccaatccc

SEQ ID NO: 1119250 - DNA, 25 bp, Homo sapien
gacagaggaaagaggaaacttccca

SEQ ID NO: 1119251 - DNA, 25 bp, Homo sapien
ggtccttaattgagctcttccctgt

SEQ ID NO: 1119252 - DNA, 25 bp, Homo sapien
gcatttgtctctatgtagttttcat

SEQ ID NO: 1119253 - DNA, 25 bp, Homo sapien
caaaattagtttgtgctttctctgg

SEQ ID NO: 1119254 - DNA, 25 bp, Homo sapien
ccctgaattctggtccttaattgag

SEQ ID NO: 1119255 - DNA, 25 bp, Homo sapien
gatttcaatcctgacctggcaagat

SEQ ID NO: 1119256 - DNA, 25 bp, Homo sapien
tcaacatccagctgaataactgcac

SEQ ID NO: 1119257 - DNA, 25 bp, Homo sapien
gctgaataactgcactaacttgata

SEQ ID NO: 1119258 - DNA, 25 bp, Homo sapien
tcagtaaagtatcagaaaggtagcc

SEQ ID NO: 1119259 - DNA, 25 bp, Homo sapien
ttctcttttcggttatggggctcat

SEQ ID NO: 1119260 - DNA, 25 bp, Homo sapien
cttctcttttcggttatggggctca

SEQ ID NO: 1119261 - DNA, 25 bp, Homo sapien
gctaaaggtgagcatgcttacagtg

SEQ ID NO: 1119262 - DNA, 25 bp, Homo sapien
aagtagccttgatcactgacattgg

SEQ ID NO: 1119263 - DNA, 25 bp, Homo sapien
gcttacagtgtttgacgtttgtggt

SEQ ID NO: 1119264 - DNA, 25 bp, Homo sapien
tatgacagaccaggattcaggattg

SEQ ID NO: 1119265 - DNA, 25 bp, Homo sapien
ttttcttgcagataggaactttccc

SEQ ID NO: 1119266 - DNA, 25 bp, Homo sapien
ttccctttctgccatgctttttcta

SEQ ID NO: 1119267 - DNA, 25 bp, Homo sapien
cttgcagataggaactttccctttc

SEQ ID NO: 1119268 - DNA, 25 bp, Homo sapien
tccctttctgccatgctttttctac

SEQ ID NO: 1119269 - DNA, 25 bp, Homo sapien
ggcacggatgtgacttctaaacctt

SEQ ID NO: 1119270 - DNA, 25 bp, Homo sapien
gcagagcaggaagatcatcacatag

SEQ ID NO: 1119271 - DNA, 25 bp, Homo sapien
acatagacctgtttagtggcacgga

SEQ ID NO: 1119272 - DNA, 25 bp, Homo sapien
gaattcacccgagctcctagcagtg

SEQ ID NO: 1119273 - DNA, 25 bp, Homo sapien
tggaaattatttactctagcaatcc

SEQ ID NO: 1119274 - DNA, 25 bp, Homo sapien
tttcaggaatgaagagtagataatc

SEQ ID NO: 1119275 - DNA, 25 bp, Homo sapien
gaaattatttactctagcaatcctc

SEQ ID NO: 1119276 - DNA, 25 bp, Homo sapien
ttttggatgcacaggagtcgagcag

SEQ ID NO: 1119277 - DNA, 25 bp, Homo sapien
ttaatctgaggtgctttatacatac

SEQ ID NO: 1119278 - DNA, 25 bp, Homo sapien
cttaatctgaggtgctttatacata

SEQ ID NO: 1119279 - DNA, 25 bp, Homo sapien
caccattcaatcgagatagccttag

SEQ ID NO: 1119280 - DNA, 25 bp, Homo sapien
ttccatgggttgtcttaccctgctt

SEQ ID NO: 1119281 - DNA, 25 bp, Homo sapien
gcttggctcaggagaatcatcagcc

SEQ ID NO: 1119282 - DNA, 25 bp, Homo sapien
ctgcttggctcaggagaatcatcag

SEQ ID NO: 1119283 - DNA, 25 bp, Homo sapien
ggctccccagtacctgccacatcaa

SEQ ID NO: 1119284 - DNA, 25 bp, Homo sapien
caaccatcctgcatattaatgaaac

SEQ ID NO: 1119285 - DNA, 25 bp, Homo sapien
actcagtcatttgattgtcaaagcc

SEQ ID NO: 1119286 - DNA, 25 bp, Homo sapien
cacatcaagtctgaactcagtcatt

SEQ ID NO: 1119287 - DNA, 25 bp, Homo sapien
gatttgtgctacatcactcttttgg

SEQ ID NO: 1119288 - DNA, 25 bp, Homo sapien
ttggttgcagaaacatattaaggag

SEQ ID NO: 1119289 - DNA, 25 bp, Homo sapien
gattgtgatcctctccgatgctcct

SEQ ID NO: 1119290 - DNA, 25 bp, Homo sapien
ctccgatgctcctaagatttgtgct

SEQ ID NO: 1119291 - DNA, 25 bp, Homo sapien
ctaagactggagagaagtcagctgt

SEQ ID NO: 1119292 - DNA, 25 bp, Homo sapien
gagaagtcagctgtctctccaagag

SEQ ID NO: 1119293 - DNA, 25 bp, Homo sapien
ggagagaagtcagctgtctctccaa

SEQ ID NO: 1119294 - DNA, 25 bp, Homo sapien
ctggagagaagtcagctgtctctcc

SEQ ID NO: 1119295 - DNA, 25 bp, Homo sapien
tttatactataccagtgccgcacac

SEQ ID NO: 1119296 - DNA, 25 bp, Homo sapien
ctccctttatactataccagtgccg

SEQ ID NO: 1119297 - DNA, 25 bp, Homo sapien
cctttatactataccagtgccgcac

SEQ ID NO: 1119298 - DNA, 25 bp, Homo sapien
tactataccagtgccgcacactcag

SEQ ID NO: 1119299 - DNA, 25 bp, Homo sapien
tgatttcggcaggaaaagttggtct

SEQ ID NO: 1119300 - DNA, 25 bp, Homo sapien
gaataagagcattaggaactaccag

SEQ ID NO: 1119301 - DNA, 25 bp, Homo sapien
ttcccttctgaataagagcattagg

SEQ ID NO: 1119302 - DNA, 25 bp, Homo sapien
gcagcaactgcttgacccaattgac

SEQ ID NO: 1119303 - DNA, 25 bp, Homo sapien
tctctgcttataagtgtccaggtca

SEQ ID NO: 1119304 - DNA, 25 bp, Homo sapien
cccgaatggtttccatctctgctta

SEQ ID NO: 1119305 - DNA, 25 bp, Homo sapien
gtatcatcatgtaaaagtttggctg

SEQ ID NO: 1119306 - DNA, 25 bp, Homo sapien
cagacctgtaggtcaaagaccagaa

SEQ ID NO: 1119307 - DNA, 25 bp, Homo sapien
gcggtaagtacggaatggcctgaaa

SEQ ID NO: 1119308 - DNA, 25 bp, Homo sapien
ccaggcagctacctgaaactgaggt

SEQ ID NO: 1119309 - DNA, 25 bp, Homo sapien
agccaggcagctacctgaaactgag

SEQ ID NO: 1119310 - DNA, 25 bp, Homo sapien
ttaacttcgggagactgtagcggta

SEQ ID NO: 1119311 - DNA, 25 bp, Homo sapien
taaggctttgactactaacccatgc

SEQ ID NO: 1119312 - DNA, 25 bp, Homo sapien
gcttcttcaggaaactccgatcagt

SEQ ID NO: 1119313 - DNA, 25 bp, Homo sapien
tgaaccaattgtgtccaagtcatgg

SEQ ID NO: 1119314 - DNA, 25 bp, Homo sapien
tttgtgtctaaagggtggagcatgc

SEQ ID NO: 1119315 - DNA, 25 bp, Homo sapien
ctcaggacatacattaattacagat

SEQ ID NO: 1119316 - DNA, 25 bp, Homo sapien
caggacatacattaattacagattc

SEQ ID NO: 1119317 - DNA, 25 bp, Homo sapien
aactcaggacatacattaattacag

SEQ ID NO: 1119318 - DNA, 25 bp, Homo sapien
ttaaactcaggacatacattaatta

SEQ ID NO: 1119319 - DNA, 25 bp, Homo sapien
tcccagaagaaaggagcaccgaggc

SEQ ID NO: 1119320 - DNA, 25 bp, Homo sapien
cccagaagaaaggagcaccgaggca

SEQ ID NO: 1119321 - DNA, 25 bp, Homo sapien
agccactgaactccataccttatgt

SEQ ID NO: 1119322 - DNA, 25 bp, Homo sapien
gaactccataccttatgtgtgtcac

SEQ ID NO: 1119323 - DNA, 25 bp, Homo sapien
gatgacctgcattcggagggtgatt

SEQ ID NO: 1119324 - DNA, 25 bp, Homo sapien
ttattagagttgtatcagggctttc

SEQ ID NO: 1119325 - DNA, 25 bp, Homo sapien
gaaatacggtattcactgtaggagg

SEQ ID NO: 1119326 - DNA, 25 bp, Homo sapien
caaggaaatacggtattcactgtag

SEQ ID NO: 1119327 - DNA, 25 bp, Homo sapien
ctgtaggagggcagatcctcccagt

SEQ ID NO: 1119328 - DNA, 25 bp, Homo sapien
gatcctcccagtcagctagaatcac

SEQ ID NO: 1119329 - DNA, 25 bp, Homo sapien
gaaattatgcatagatctgccatta

SEQ ID NO: 1119330 - DNA, 25 bp, Homo sapien
tcagtgtgtgggtaagtaattgcat

SEQ ID NO: 1119331 - DNA, 25 bp, Homo sapien
tggcttagttaggtgccccggattc

SEQ ID NO: 1119332 - DNA, 25 bp, Homo sapien
ttctgggagttagggaaattatgca

SEQ ID NO: 1119333 - DNA, 25 bp, Homo sapien
caacgactaggatatgtaaggagct

SEQ ID NO: 1119334 - DNA, 25 bp, Homo sapien
gaccaaggtccactagtgaggccct

SEQ ID NO: 1119335 - DNA, 25 bp, Homo sapien
taatcagtctcttaatgggaggcag

SEQ ID NO: 1119336 - DNA, 25 bp, Homo sapien
cattagatggaaattggagcccgat

SEQ ID NO: 1119337 - DNA, 25 bp, Homo sapien
tccgtgaaatcaggttggcaggcca

SEQ ID NO: 1119338 - DNA, 25 bp, Homo sapien
caggccaggacagacataatgctgc

SEQ ID NO: 1119339 - DNA, 25 bp, Homo sapien
aatagcacactcagagtccgcacag

SEQ ID NO: 1119340 - DNA, 25 bp, Homo sapien
tgctgcagctacacatatcccttga

SEQ ID NO: 1119341 - DNA, 25 bp, Homo sapien
tttccccaccatcagattcaagtgt

SEQ ID NO: 1119342 - DNA, 25 bp, Homo sapien
tattatttaagcttatgggctgcgt

SEQ ID NO: 1119343 - DNA, 25 bp, Homo sapien
tatgggctgcgtgtgtgaatctcct

SEQ ID NO: 1119344 - DNA, 25 bp, Homo sapien
gcatattccataaacagctcttcac

SEQ ID NO: 1119345 - DNA, 25 bp, Homo sapien
tcaactgtttacctctgaatgctga

SEQ ID NO: 1119346 - DNA, 25 bp, Homo sapien
cagggtatgggatagaaaacatgcc

SEQ ID NO: 1119347 - DNA, 25 bp, Homo sapien
catatggccagtaaatagcagagtc

SEQ ID NO: 1119348 - DNA, 25 bp, Homo sapien
gataaacacatatcacagggtatgg

SEQ ID NO: 1119349 - DNA, 25 bp, Homo sapien
aattttttctgccaccagagacacc

SEQ ID NO: 1119350 - DNA, 25 bp, Homo sapien
ggaattttttctgccaccagagaca

SEQ ID NO: 1119351 - DNA, 25 bp, Homo sapien
gacagcagcttgattcagttgctac

SEQ ID NO: 1119352 - DNA, 25 bp, Homo sapien
tacatataatctggctttctgtcct

SEQ ID NO: 1119353 - DNA, 25 bp, Homo sapien
aatgtgaactgtctgaagacagtac

SEQ ID NO: 1119354 - DNA, 25 bp, Homo sapien
tagcaccacatcataatacatatca

SEQ ID NO: 1119355 - DNA, 25 bp, Homo sapien
tagcaactaagaagaaacttgatgg

SEQ ID NO: 1119356 - DNA, 25 bp, Homo sapien
tgacttcacatatattagcaccaca

SEQ ID NO: 1119357 - DNA, 25 bp, Homo sapien
tggctgaacatgcactgagaacagc

SEQ ID NO: 1119358 - DNA, 25 bp, Homo sapien
gggtttatatccttaatgggatcag

SEQ ID NO: 1119359 - DNA, 25 bp, Homo sapien
gggatcagaggtcttatcggcgatt

SEQ ID NO: 1119360 - DNA, 25 bp, Homo sapien
gggctgtcatcaactccatctgaag

SEQ ID NO: 1119361 - DNA, 25 bp, Homo sapien
atctcacaggtttccatagacagca

SEQ ID NO: 1119362 - DNA, 25 bp, Homo sapien
gatctcacaggtttccatagacagc

SEQ ID NO: 1119363 - DNA, 25 bp, Homo sapien
ccagatctcacaggtttccatagac

SEQ ID NO: 1119364 - DNA, 25 bp, Homo sapien
agatctcacaggtttccatagacag

SEQ ID NO: 1119365 - DNA, 25 bp, Homo sapien
acatctgcccacatttttcacacca

SEQ ID NO: 1119366 - DNA, 25 bp, Homo sapien
ggtcagagtcagattgaggatggaa

SEQ ID NO: 1119367 - DNA, 25 bp, Homo sapien
cagagtcagattgaggatggaaaat

SEQ ID NO: 1119368 - DNA, 25 bp, Homo sapien
atctgcccacatttttcacaccagt

SEQ ID NO: 1119369 - DNA, 25 bp, Homo sapien
gctgctggtcaacaggtgggcacct

SEQ ID NO: 1119370 - DNA, 25 bp, Homo sapien
tcttagggaggtcacccaatggtct

SEQ ID NO: 1119371 - DNA, 25 bp, Homo sapien
gccaagtacctcatgcaagccagct

SEQ ID NO: 1119372 - DNA, 25 bp, Homo sapien
tgttgaactgcccaacggaactgga

SEQ ID NO: 1119373 - DNA, 25 bp, Homo sapien
cacagtgtgacaggattaggaatct

SEQ ID NO: 1119374 - DNA, 25 bp, Homo sapien
caaaatagggagcaaagagggctgc

SEQ ID NO: 1119375 - DNA, 25 bp, Homo sapien
cgggagaagtgctcaagggttcaca

SEQ ID NO: 1119376 - DNA, 25 bp, Homo sapien
aaggagtctctgttgtaaagcccac

SEQ ID NO: 1119377 - DNA, 25 bp, Homo sapien
aaaggtactgagtgtagatgcagca

SEQ ID NO: 1119378 - DNA, 25 bp, Homo sapien
ggttctgaagcatgaaacttggttg

SEQ ID NO: 1119379 - DNA, 25 bp, Homo sapien
caagtgaaatattgggctttggtga

SEQ ID NO: 1119380 - DNA, 25 bp, Homo sapien
gaaggcccacgagtcattgtcgttg

SEQ ID NO: 1119381 - DNA, 25 bp, Homo sapien
tccatcttgggccttataaccagga

SEQ ID NO: 1119382 - DNA, 25 bp, Homo sapien
gtagcagatgaagcaactcaggcaa

SEQ ID NO: 1119383 - DNA, 25 bp, Homo sapien
tgggccttataaccaggaagtgtgt

SEQ ID NO: 1119384 - DNA, 25 bp, Homo sapien
ttatggtagcagatgaagcaactca

SEQ ID NO: 1119385 - DNA, 25 bp, Homo sapien
cacattggaagaaggcaagaagaag

SEQ ID NO: 1119386 - DNA, 25 bp, Homo sapien
tcccacacgacaggagattaaatag

SEQ ID NO: 1119387 - DNA, 25 bp, Homo sapien
tatggacagaggatcacggagattt

SEQ ID NO: 1119388 - DNA, 25 bp, Homo sapien
tgaacataatttcccacacgacagg

SEQ ID NO: 1119389 - DNA, 25 bp, Homo sapien
cctatcttgatcaacagccagcagc

SEQ ID NO: 1119390 - DNA, 25 bp, Homo sapien
aacacattgcagatataatctcaag

SEQ ID NO: 1119391 - DNA, 25 bp, Homo sapien
gcagatataatctcaagaccttgtg

SEQ ID NO: 1119392 - DNA, 25 bp, Homo sapien
cagcctatcttgatcaacagccagc

SEQ ID NO: 1119393 - DNA, 25 bp, Homo sapien
gaagccgagtggtatgctttagcat

SEQ ID NO: 1119394 - DNA, 25 bp, Homo sapien
ttcttctccacggtcatgagattct

SEQ ID NO: 1119395 - DNA, 25 bp, Homo sapien
tcttaggcgaaattcttttagtgcc

SEQ ID NO: 1119396 - DNA, 25 bp, Homo sapien
catgatcctctgcatgatttacaga

SEQ ID NO: 1119397 - DNA, 25 bp, Homo sapien
tgacgtagctcttgtatggtttgcc

SEQ ID NO: 1119398 - DNA, 25 bp, Homo sapien
gctcttctgctaccggtgttcttct

SEQ ID NO: 1119399 - DNA, 25 bp, Homo sapien
tgtcttcctggcctgacgtagctct

SEQ ID NO: 1119400 - DNA, 25 bp, Homo sapien
ttcttctttgacaccgacagggctg

SEQ ID NO: 1119401 - DNA, 25 bp, Homo sapien
acaccatgcttcatgaaccccaaag

SEQ ID NO: 1119402 - DNA, 25 bp, Homo sapien
tggaccctgcttaggaagacatttg

SEQ ID NO: 1119403 - DNA, 25 bp, Homo sapien
tactccgggactcctgtggtatctc

SEQ ID NO: 1119404 - DNA, 25 bp, Homo sapien
caataggtatgtaactttactccgg

SEQ ID NO: 1119405 - DNA, 25 bp, Homo sapien
tatggagccactaatgccctcagca

SEQ ID NO: 1119406 - DNA, 25 bp, Homo sapien
tttatggagccactaatgccctcag

SEQ ID NO: 1119407 - DNA, 25 bp, Homo sapien
attttatggagccactaatgccctc

SEQ ID NO: 1119408 - DNA, 25 bp, Homo sapien
ttatggagccactaatgccctcagc

SEQ ID NO: 1119409 - DNA, 25 bp, Homo sapien
gatcttgaacttaagacctcataag

SEQ ID NO: 1119410 - DNA, 25 bp, Homo sapien
tcaataaaatcagtcatgataataa

SEQ ID NO: 1119411 - DNA, 25 bp, Homo sapien
cttaagacctcataagcctcataga

SEQ ID NO: 1119412 - DNA, 25 bp, Homo sapien
gggccctaaggttatctgtagaatc

SEQ ID NO: 1119413 - DNA, 25 bp, Homo sapien
ttcatggagggtagtagggatatca

SEQ ID NO: 1119414 - DNA, 25 bp, Homo sapien
ggtagtagggatatcaacaaaggcc

SEQ ID NO: 1119415 - DNA, 25 bp, Homo sapien
cttagttcatggagggtagtaggga

SEQ ID NO: 1119416 - DNA, 25 bp, Homo sapien
accacccaagtgcttccaatcagaa

SEQ ID NO: 1119417 - DNA, 25 bp, Homo sapien
aattctacacagaatccccaaatgt

SEQ ID NO: 1119418 - DNA, 25 bp, Homo sapien
attctacacagaatccccaaatgtc

SEQ ID NO: 1119419 - DNA, 25 bp, Homo sapien
aatccccaaatgtcaatgaggatca

SEQ ID NO: 1119420 - DNA, 25 bp, Homo sapien
ccaaatgtcaatgaggatcactggc

SEQ ID NO: 1119421 - DNA, 25 bp, Homo sapien
agggctcagaagttggatcttccag

SEQ ID NO: 1119422 - DNA, 25 bp, Homo sapien
tcagggctcagaagttggatcttcc

SEQ ID NO: 1119423 - DNA, 25 bp, Homo sapien
gggctcagaagttggatcttccagg

SEQ ID NO: 1119424 - DNA, 25 bp, Homo sapien
cagggctcagaagttggatcttcca

SEQ ID NO: 1119425 - DNA, 25 bp, Homo sapien
ctttccactgcactttcttgccaat

SEQ ID NO: 1119426 - DNA, 25 bp, Homo sapien
tcacatcagggttgataaattcaaa

SEQ ID NO: 1119427 - DNA, 25 bp, Homo sapien
tttcttgccaatgccaccactcttt

SEQ ID NO: 1119428 - DNA, 25 bp, Homo sapien
cacatcagggttgataaattcaaag

SEQ ID NO: 1119429 - DNA, 25 bp, Homo sapien
ttttctttaaacctgatcatgtctg

SEQ ID NO: 1119430 - DNA, 25 bp, Homo sapien
gcatgttaaacccatctctcaccat

SEQ ID NO: 1119431 - DNA, 25 bp, Homo sapien
tcatgtctgtccttatacatgcatg

SEQ ID NO: 1119432 - DNA, 25 bp, Homo sapien
gcaggtatctcctaaatatgctgat

SEQ ID NO: 1119433 - DNA, 25 bp, Homo sapien
gcagggttgtgtgttccttcgccaa

SEQ ID NO: 1119434 - DNA, 25 bp, Homo sapien
gaacctggaaactaatgcaaatgct

SEQ ID NO: 1119435 - DNA, 25 bp, Homo sapien
gaggtcttgagatccaaaggcaaca

SEQ ID NO: 1119436 - DNA, 25 bp, Homo sapien
aatgcttagtggttcccccttctgc

SEQ ID NO: 1119437 - DNA, 25 bp, Homo sapien
ttagagaggcgcgtgcagcccgctt

SEQ ID NO: 1119438 - DNA, 25 bp, Homo sapien
ggcacctcacactgtcccattagag

SEQ ID NO: 1119439 - DNA, 25 bp, Homo sapien
gcagcccgcttgttgggcatgttga

SEQ ID NO: 1119440 - DNA, 25 bp, Homo sapien
cacactgtcccattagagaggcgcg

SEQ ID NO: 1119441 - DNA, 25 bp, Homo sapien
cagtcattttgctaccaagggagaa

SEQ ID NO: 1119442 - DNA, 25 bp, Homo sapien
tgttgacgattcttgcatacccatc

SEQ ID NO: 1119443 - DNA, 25 bp, Homo sapien
ttttgaattcaacagcatgtcctgg

SEQ ID NO: 1119444 - DNA, 25 bp, Homo sapien
tcctggtgtttgcaaggtagacatc

SEQ ID NO: 1119445 - DNA, 25 bp, Homo sapien
ctcccatttactgacaggctccaac

SEQ ID NO: 1119446 - DNA, 25 bp, Homo sapien
gctcccatttactgacaggctccaa

SEQ ID NO: 1119447 - DNA, 25 bp, Homo sapien
ccagagtggtctaggtttgttagca

SEQ ID NO: 1119448 - DNA, 25 bp, Homo sapien
tctgatgttcattggaccctcagct

SEQ ID NO: 1119449 - DNA, 25 bp, Homo sapien
tcgggcactgtagttcacacagcag

SEQ ID NO: 1119450 - DNA, 25 bp, Homo sapien
agttcgttgcaagtaaatatcgggc

SEQ ID NO: 1119451 - DNA, 25 bp, Homo sapien
gacacagcgcaagtactctcttgag

SEQ ID NO: 1119452 - DNA, 25 bp, Homo sapien
gggacacagcgcaagtactctcttg

SEQ ID NO: 1119453 - DNA, 25 bp, Homo sapien
gcgcaagtactctcttgaggtaaag

SEQ ID NO: 1119454 - DNA, 25 bp, Homo sapien
tttcatctgatgatttctgacattc

SEQ ID NO: 1119455 - DNA, 25 bp, Homo sapien
cggctgcaccttcccaggcccacca

SEQ ID NO: 1119456 - DNA, 25 bp, Homo sapien
tgcggctgcaccttcccaggcccac

SEQ ID NO: 1119457 - DNA, 25 bp, Homo sapien
cgatgcggctgcaccttcccaggcc

SEQ ID NO: 1119458 - DNA, 25 bp, Homo sapien
gatgcggctgcaccttcccaggccc

SEQ ID NO: 1119459 - DNA, 25 bp, Homo sapien
caatcattaagcaaccagtagggtg

SEQ ID NO: 1119460 - DNA, 25 bp, Homo sapien
ttgtggacagcaacctctggagtgt

SEQ ID NO: 1119461 - DNA, 25 bp, Homo sapien
gcctcttagctattaagttttcact

SEQ ID NO: 1119462 - DNA, 25 bp, Homo sapien
tctcagtgtaaacgactcattttgc

SEQ ID NO: 1119463 - DNA, 25 bp, Homo sapien
tagtaataagtgtatgctcccctct

SEQ ID NO: 1119464 - DNA, 25 bp, Homo sapien
cattgcattgtaaaactagaaaccc

SEQ ID NO: 1119465 - DNA, 25 bp, Homo sapien
gttttgatctgggttgccatagtaa

SEQ ID NO: 1119466 - DNA, 25 bp, Homo sapien
tatgaagtatctgtgatttgctcag

SEQ ID NO: 1119467 - DNA, 25 bp, Homo sapien
tttagtaccagctgaaggaacttcc

SEQ ID NO: 1119468 - DNA, 25 bp, Homo sapien
tttaccagtagagaccacaggggct

SEQ ID NO: 1119469 - DNA, 25 bp, Homo sapien
ggttgcttctctgggcgtatgctca

SEQ ID NO: 1119470 - DNA, 25 bp, Homo sapien
ggctgagcagggtctaatagcacca

SEQ ID NO: 1119471 - DNA, 25 bp, Homo sapien
tggggcccaggtctgcgtttcagat

SEQ ID NO: 1119472 - DNA, 25 bp, Homo sapien
catctgtagtagaaaatttgggcta

SEQ ID NO: 1119473 - DNA, 25 bp, Homo sapien
caggtctgcgtttcagatttaaggc

SEQ ID NO: 1119474 - DNA, 25 bp, Homo sapien
gcccaggtctgcgtttcagatttaa

SEQ ID NO: 1119475 - DNA, 25 bp, Homo sapien
agtgtgagaaaacttagactgaagt

SEQ ID NO: 1119476 - DNA, 25 bp, Homo sapien
gggcactgcacatgttgagacaaac

SEQ ID NO: 1119477 - DNA, 25 bp, Homo sapien
gggtgccggatgaaagcctaatcat

SEQ ID NO: 1119478 - DNA, 25 bp, Homo sapien
acttagactgaagttggttttgaag

SEQ ID NO: 1119479 - DNA, 25 bp, Homo sapien
ggtttaagcaccatcagagcatcag

SEQ ID NO: 1119480 - DNA, 25 bp, Homo sapien
gagcatcaggcattatcaccttttg

SEQ ID NO: 1119481 - DNA, 25 bp, Homo sapien
gaacattcctcaatatatttagccg

SEQ ID NO: 1119482 - DNA, 25 bp, Homo sapien
caccttttgaagtattgccgaatct

SEQ ID NO: 1119483 - DNA, 25 bp, Homo sapien
tggacctgtttggaggtttgtcaaa

SEQ ID NO: 1119484 - DNA, 25 bp, Homo sapien
cacctggacctgtttggaggtttgt

SEQ ID NO: 1119485 - DNA, 25 bp, Homo sapien
cattcacaaggctgtttacatgctt

SEQ ID NO: 1119486 - DNA, 25 bp, Homo sapien
tcacaaggctgtttacatgctttgt

SEQ ID NO: 1119487 - DNA, 25 bp, Homo sapien
tcttcttagacatgtagattaatga

SEQ ID NO: 1119488 - DNA, 25 bp, Homo sapien
tgttttagctgcatcatacaaattt

SEQ ID NO: 1119489 - DNA, 25 bp, Homo sapien
gggtttgttctatgacctagtatat

SEQ ID NO: 1119490 - DNA, 25 bp, Homo sapien
gaagcttaggttaatgatttagtac

SEQ ID NO: 1119491 - DNA, 25 bp, Homo sapien
ttctgatcttagtaaggacagtata

SEQ ID NO: 1119492 - DNA, 25 bp, Homo sapien
taaatagaagtagtaagtgagtctc

SEQ ID NO: 1119493 - DNA, 25 bp, Homo sapien
ctgatcttagtaaggacagtataag

SEQ ID NO: 1119494 - DNA, 25 bp, Homo sapien
gtagtaagtgagtctccttatttct

SEQ ID NO: 1119495 - DNA, 25 bp, Homo sapien
cccattggttgttctgccaatatgc

SEQ ID NO: 1119496 - DNA, 25 bp, Homo sapien
ctcccattggttgttctgccaatat

SEQ ID NO: 1119497 - DNA, 25 bp, Homo sapien
tcccattggttgttctgccaatatg

SEQ ID NO: 1119498 - DNA, 25 bp, Homo sapien
tcgccggtggaggcctgatgagtct

SEQ ID NO: 1119499 - DNA, 25 bp, Homo sapien
ccctcgccggtggaggcctgatgag

SEQ ID NO: 1119500 - DNA, 25 bp, Homo sapien
ctcgccggtggaggcctgatgagtc

SEQ ID NO: 1119501 - DNA, 25 bp, Homo sapien
cctcgccggtggaggcctgatgagt

SEQ ID NO: 1119502 - DNA, 25 bp, Homo sapien
tgagaactgatcgagttgctcaatc

SEQ ID NO: 1119503 - DNA, 25 bp, Homo sapien
tctcagaagcatccatattgccgat

SEQ ID NO: 1119504 - DNA, 25 bp, Homo sapien
taagggcagcctagctcttttaaat

SEQ ID NO: 1119505 - DNA, 25 bp, Homo sapien
catattgccgatcctctctgagaac

SEQ ID NO: 1119506 - DNA, 25 bp, Homo sapien
gcttttagtaatgctctccatgaca

SEQ ID NO: 1119507 - DNA, 25 bp, Homo sapien
tgtagggttgggccaacagagcact

SEQ ID NO: 1119508 - DNA, 25 bp, Homo sapien
ctgcttttagtaatgctctccatga

SEQ ID NO: 1119509 - DNA, 25 bp, Homo sapien
cacttggtccataaggcaaagtggg

SEQ ID NO: 1119510 - DNA, 25 bp, Homo sapien
taaagaggatactaatgcttggagg

SEQ ID NO: 1119511 - DNA, 25 bp, Homo sapien
ccataaagaggatactaatgcttgg

SEQ ID NO: 1119512 - DNA, 25 bp, Homo sapien
agaggatactaatgcttggaggttt

SEQ ID NO: 1119513 - DNA, 25 bp, Homo sapien
gatactaatgcttggaggttttctc

SEQ ID NO: 1119514 - DNA, 25 bp, Homo sapien
ttattcacccacgtagagagctctc

SEQ ID NO: 1119515 - DNA, 25 bp, Homo sapien
ttcacccacgtagagagctctcagg

SEQ ID NO: 1119516 - DNA, 25 bp, Homo sapien
aggccaccaccaatatcaaccttgg

SEQ ID NO: 1119517 - DNA, 25 bp, Homo sapien
ggccaccaccaatatcaaccttggg

SEQ ID NO: 1119518 - DNA, 25 bp, Homo sapien
taagcatagaagtgttattgaacag

SEQ ID NO: 1119519 - DNA, 25 bp, Homo sapien
ggaaggcaaacataagcatagaagt

SEQ ID NO: 1119520 - DNA, 25 bp, Homo sapien
tgttattgaacagaaaccccttcag

SEQ ID NO: 1119521 - DNA, 25 bp, Homo sapien
tagaagtgttattgaacagaaaccc

SEQ ID NO: 1119522 - DNA, 25 bp, Homo sapien
gagcttcatctgatcgttcgtacat

SEQ ID NO: 1119523 - DNA, 25 bp, Homo sapien
tgatcgttcgtacatgaaagtataa

SEQ ID NO: 1119524 - DNA, 25 bp, Homo sapien
cagtttgaatgttagttaaataagt

SEQ ID NO: 1119525 - DNA, 25 bp, Homo sapien
ggcccagaagtaggagtcttgtcag

SEQ ID NO: 1119526 - DNA, 25 bp, Homo sapien
cagacttagttagctctggctgcct

SEQ ID NO: 1119527 - DNA, 25 bp, Homo sapien
caaagcagacttagttagctctggc

SEQ ID NO: 1119528 - DNA, 25 bp, Homo sapien
gcctttgttccctgacagtagttaa

SEQ ID NO: 1119529 - DNA, 25 bp, Homo sapien
aagcttcaattaggctggtatccat

SEQ ID NO: 1119530 - DNA, 25 bp, Homo sapien
tacccaatgcccgtaaggtgtgtag

SEQ ID NO: 1119531 - DNA, 25 bp, Homo sapien
gtagttgctgtcataaagcaggctc

SEQ ID NO: 1119532 - DNA, 25 bp, Homo sapien
tagttgctgtcataaagcaggctca

SEQ ID NO: 1119533 - DNA, 25 bp, Homo sapien
tgcccgtaaggtgtgtagttgctgt

SEQ ID NO: 1119534 - DNA, 25 bp, Homo sapien
cctctggcactgacttaggactgtc

SEQ ID NO: 1119535 - DNA, 25 bp, Homo sapien
tcccacatctgagcctgttgcatgg

SEQ ID NO: 1119536 - DNA, 25 bp, Homo sapien
ctggcactgacttaggactgtcgct

SEQ ID NO: 1119537 - DNA, 25 bp, Homo sapien
tgtcccacatctgagcctgttgcat

SEQ ID NO: 1119538 - DNA, 25 bp, Homo sapien
ctgggatacaatagattcaagcagt

SEQ ID NO: 1119539 - DNA, 25 bp, Homo sapien
ggatatccgaaaaagatttcatgaa

SEQ ID NO: 1119540 - DNA, 25 bp, Homo sapien
tgggatacaatagattcaagcagtt

SEQ ID NO: 1119541 - DNA, 25 bp, Homo sapien
ttttggatatccgaaaaagatttca

SEQ ID NO: 1119542 - DNA, 25 bp, Homo sapien
tgggaaagagattatgggtcagtcc

SEQ ID NO: 1119543 - DNA, 25 bp, Homo sapien
ggaaagagattatgggtcagtcccc

SEQ ID NO: 1119544 - DNA, 25 bp, Homo sapien
ctgggaaagagattatgggtcagtc

SEQ ID NO: 1119545 - DNA, 25 bp, Homo sapien
aaagagattatgggtcagtccccag

SEQ ID NO: 1119546 - DNA, 25 bp, Homo sapien
caaggttgggtacagatttggtatc

SEQ ID NO: 1119547 - DNA, 25 bp, Homo sapien
tcttcaaggcatcgtgaacgtaagc

SEQ ID NO: 1119548 - DNA, 25 bp, Homo sapien
gaatataagcagctgccggaatcag

SEQ ID NO: 1119549 - DNA, 25 bp, Homo sapien
ccggaatcagtgacaaggttgggta

SEQ ID NO: 1119550 - DNA, 25 bp, Homo sapien
ttgatgccacgctgagcaaaaccta

SEQ ID NO: 1119551 - DNA, 25 bp, Homo sapien
gccacgctgagcaaaacctagttaa

SEQ ID NO: 1119552 - DNA, 25 bp, Homo sapien
cgctgagcaaaacctagttaaaggt

SEQ ID NO: 1119553 - DNA, 25 bp, Homo sapien
gatgccacgctgagcaaaacctagt

SEQ ID NO: 1119554 - DNA, 25 bp, Homo sapien
tgttgcaggtggtagcttgttcttt

SEQ ID NO: 1119555 - DNA, 25 bp, Homo sapien
cattcatttttgttgcaggtggtag

SEQ ID NO: 1119556 - DNA, 25 bp, Homo sapien
ttcctgttttgggtgtcctctagag

SEQ ID NO: 1119557 - DNA, 25 bp, Homo sapien
ggtgtcctctagaggttctgaaaag

SEQ ID NO: 1119558 - DNA, 25 bp, Homo sapien
tgtttctcctgctagggagcagggc

SEQ ID NO: 1119559 - DNA, 25 bp, Homo sapien
gcagggctgccatatgtacagggcc

SEQ ID NO: 1119560 - DNA, 25 bp, Homo sapien
ctgctgtctgagtggaagtatttaa

SEQ ID NO: 1119561 - DNA, 25 bp, Homo sapien
gctgccatatgtacagggccacctg

SEQ ID NO: 1119562 - DNA, 25 bp, Homo sapien
agctaaacacctcaatgattttcca

SEQ ID NO: 1119563 - DNA, 25 bp, Homo sapien
acatagctctgactatatcactcct

SEQ ID NO: 1119564 - DNA, 25 bp, Homo sapien
gactatatcactcctcagctaaaca

SEQ ID NO: 1119565 - DNA, 25 bp, Homo sapien
aaacacaagcttcttattcagacat

SEQ ID NO: 1119566 - DNA, 25 bp, Homo sapien
tcccccccagtttactgtctgcctg

SEQ ID NO: 1119567 - DNA, 25 bp, Homo sapien
caaacacaaagcatgctgtgtccct

SEQ ID NO: 1119568 - DNA, 25 bp, Homo sapien
tgctcgagcatctccaggagggcct

SEQ ID NO: 1119569 - DNA, 25 bp, Homo sapien
tgcacaaggccatatgattagagcc

SEQ ID NO: 1119570 - DNA, 25 bp, Homo sapien
ggagggcctggattaatagaaatgc

SEQ ID NO: 1119571 - DNA, 25 bp, Homo sapien
tgtcctattcagctttgtcttatcc

SEQ ID NO: 1119572 - DNA, 25 bp, Homo sapien
catgctgccttcctcgttaccagct

SEQ ID NO: 1119573 - DNA, 25 bp, Homo sapien
cctcattctgcttttctattctctg

SEQ ID NO: 1119574 - DNA, 25 bp, Homo sapien
ttaccagctcgctcgtatcccgggt

SEQ ID NO: 1119575 - DNA, 25 bp, Homo sapien
tggctgacttgcctgtgcagcactg

SEQ ID NO: 1119576 - DNA, 25 bp, Homo sapien
ggctgacttgcctgtgcagcactgc

SEQ ID NO: 1119577 - DNA, 25 bp, Homo sapien
gctgacttgcctgtgcagcactgct

SEQ ID NO: 1119578 - DNA, 25 bp, Homo sapien
tccaagccatcctttactgtcataa

SEQ ID NO: 1119579 - DNA, 25 bp, Homo sapien
ccaagccatcctttactgtcataac

SEQ ID NO: 1119580 - DNA, 25 bp, Homo sapien
ctgttttctctatgaagagtgcttt

SEQ ID NO: 1119581 - DNA, 25 bp, Homo sapien
gtccaagccatcctttactgtcata

SEQ ID NO: 1119582 - DNA, 25 bp, Homo sapien
gacataacttgcaggaagcatggag

SEQ ID NO: 1119583 - DNA, 25 bp, Homo sapien
tgctgcccagtggagctctctttct

SEQ ID NO: 1119584 - DNA, 25 bp, Homo sapien
tgaatgaacttgtggtttgctgccc

SEQ ID NO: 1119585 - DNA, 25 bp, Homo sapien
caaggaagggacaagctgttggata

SEQ ID NO: 1119586 - DNA, 25 bp, Homo sapien
tcttatgctctagcgatatcttact

SEQ ID NO: 1119587 - DNA, 25 bp, Homo sapien
tgctctagcgatatcttactcttat

SEQ ID NO: 1119588 - DNA, 25 bp, Homo sapien
ttactcttatccctctctgagtacc

SEQ ID NO: 1119589 - DNA, 25 bp, Homo sapien
ttggttcttatgctctagcgatatc

SEQ ID NO: 1119590 - DNA, 25 bp, Homo sapien
ctgctgagggaatgcagagaaaggg

SEQ ID NO: 1119591 - DNA, 25 bp, Homo sapien
aatgcagagaaagggaaggagcccc

SEQ ID NO: 1119592 - DNA, 25 bp, Homo sapien
tgcagagaaagggaaggagccccat

SEQ ID NO: 1119593 - DNA, 25 bp, Homo sapien
ggaatgcagagaaagggaaggagcc

SEQ ID NO: 1119594 - DNA, 25 bp, Homo sapien
gtcttgacgactgttccaaggctga

SEQ ID NO: 1119595 - DNA, 25 bp, Homo sapien
ctgaaagaacccatcatctggtggc

SEQ ID NO: 1119596 - DNA, 25 bp, Homo sapien
ctctggaggtcttgacgactgttcc

SEQ ID NO: 1119597 - DNA, 25 bp, Homo sapien
tggtggctccatacacatttgcctc

SEQ ID NO: 1119598 - DNA, 25 bp, Homo sapien
tcccaaagtagtacacaatgtccta

SEQ ID NO: 1119599 - DNA, 25 bp, Homo sapien
gggtcccaaagtagtacacaatgtc

SEQ ID NO: 1119600 - DNA, 25 bp, Homo sapien
agagcagtcgctgggtgtgggctac

SEQ ID NO: 1119601 - DNA, 25 bp, Homo sapien
tcagagcagtcgctgggtgtgggct

SEQ ID NO: 1119602 - DNA, 25 bp, Homo sapien
agctaattgaatagctttgcccttg

SEQ ID NO: 1119603 - DNA, 25 bp, Homo sapien
gatccaagaatcaggtgaccgaaat

SEQ ID NO: 1119604 - DNA, 25 bp, Homo sapien
acttgtgtttctgctagtggaaaga

SEQ ID NO: 1119605 - DNA, 25 bp, Homo sapien
aaagaaggcccctggagatccaaga

SEQ ID NO: 1119606 - DNA, 25 bp, Homo sapien
tagggtaaactttgcaggcctcaag

SEQ ID NO: 1119607 - DNA, 25 bp, Homo sapien
aaggacagtctggaaataaatatct

SEQ ID NO: 1119608 - DNA, 25 bp, Homo sapien
aaaacaacatgccaggcgcccaatt

SEQ ID NO: 1119609 - DNA, 25 bp, Homo sapien
ggcctcaagtgtgtctttgcctcct

SEQ ID NO: 1119610 - DNA, 25 bp, Homo sapien
gactgagcatgggtcaattttaaag

SEQ ID NO: 1119611 - DNA, 25 bp, Homo sapien
tgagctggtggcaagtatcattctt

SEQ ID NO: 1119612 - DNA, 25 bp, Homo sapien
tctggtctggtaattcccttagtgc

SEQ ID NO: 1119613 - DNA, 25 bp, Homo sapien
tccagagtcagatttaagtccagag

SEQ ID NO: 1119614 - DNA, 25 bp, Homo sapien
aaataattttgccaatgctccaagc

SEQ ID NO: 1119615 - DNA, 25 bp, Homo sapien
gaattatctgctttggagctaatcc

SEQ ID NO: 1119616 - DNA, 25 bp, Homo sapien
caatcccgctatctttggcaaataa

SEQ ID NO: 1119617 - DNA, 25 bp, Homo sapien
gagctaatcccttccaatatcccaa

SEQ ID NO: 1119618 - DNA, 25 bp, Homo sapien
ttctgcatgaactcgaaatccttct

SEQ ID NO: 1119619 - DNA, 25 bp, Homo sapien
catcttctgcatgaactcgaaatcc

SEQ ID NO: 1119620 - DNA, 25 bp, Homo sapien
tcttctgcatgaactcgaaatcctt

SEQ ID NO: 1119621 - DNA, 25 bp, Homo sapien
cttctgcatgaactcgaaatccttc

SEQ ID NO: 1119622 - DNA, 25 bp, Homo sapien
gaccactgcttggatttatgcaata

SEQ ID NO: 1119623 - DNA, 25 bp, Homo sapien
ctccattccttatgaagaccactgc

SEQ ID NO: 1119624 - DNA, 25 bp, Homo sapien
ccttatgaagaccactgcttggatt

SEQ ID NO: 1119625 - DNA, 25 bp, Homo sapien
tgaagaccactgcttggatttatgc

SEQ ID NO: 1119626 - DNA, 25 bp, Homo sapien
tgactaaaaattgaacggaggcttc

SEQ ID NO: 1119627 - DNA, 25 bp, Homo sapien
tgtttagctatgtgatcaggaagtg

SEQ ID NO: 1119628 - DNA, 25 bp, Homo sapien
ttgaacggaggcttccaacagggct

SEQ ID NO: 1119629 - DNA, 25 bp, Homo sapien
tgaggagatctagcccatttttagc

SEQ ID NO: 1119630 - DNA, 25 bp, Homo sapien
tgtatttactcaaagatggaactgt

SEQ ID NO: 1119631 - DNA, 25 bp, Homo sapien
aagatggaactgtccggtcacttag

SEQ ID NO: 1119632 - DNA, 25 bp, Homo sapien
ttgtatttactcaaagatggaactg

SEQ ID NO: 1119633 - DNA, 25 bp, Homo sapien
aaagatggaactgtccggtcactta

SEQ ID NO: 1119634 - DNA, 25 bp, Homo sapien
ctgggcttgtgtagaatattccgta

SEQ ID NO: 1119635 - DNA, 25 bp, Homo sapien
ccatcttctgtgtttgaagcactca

SEQ ID NO: 1119636 - DNA, 25 bp, Homo sapien
gaatattccgtagttgctcccagca

SEQ ID NO: 1119637 - DNA, 25 bp, Homo sapien
tggccatgtccaacttgagtttgat

SEQ ID NO: 1119638 - DNA, 25 bp, Homo sapien
atgctttgatatgggtaacattgcc

SEQ ID NO: 1119639 - DNA, 25 bp, Homo sapien
tcagtgtacataaaaatcccagctt

SEQ ID NO: 1119640 - DNA, 25 bp, Homo sapien
ttagatcctttgaactctttcaagc

SEQ ID NO: 1119641 - DNA, 25 bp, Homo sapien
taacagcctgcattaaggaacttat

SEQ ID NO: 1119642 - DNA, 25 bp, Homo sapien
gaggaaagccacataagagcccttg

SEQ ID NO: 1119643 - DNA, 25 bp, Homo sapien
tctgttttcagaaatcgcaccaaag

SEQ ID NO: 1119644 - DNA, 25 bp, Homo sapien
gatatttgggaatgctgctgatcag

SEQ ID NO: 1119645 - DNA, 25 bp, Homo sapien
aagacttgaggttttagcggaattg

SEQ ID NO: 1119646 - DNA, 25 bp, Homo sapien
aatgtccgtgatatcacacactcag

SEQ ID NO: 1119647 - DNA, 25 bp, Homo sapien
gctgctttgctgtctaacttgctct

SEQ ID NO: 1119648 - DNA, 25 bp, Homo sapien
caaggacctttgtccgtgctactaa

SEQ ID NO: 1119649 - DNA, 25 bp, Homo sapien
tgtccgtgctactaaataatgtccg

SEQ ID NO: 1119650 - DNA, 25 bp, Homo sapien
tatgaaagcatagctgctgagtaat

SEQ ID NO: 1119651 - DNA, 25 bp, Homo sapien
agcatagctgctgagtaattcttcc

SEQ ID NO: 1119652 - DNA, 25 bp, Homo sapien
gaaagcatagctgctgagtaattct

SEQ ID NO: 1119653 - DNA, 25 bp, Homo sapien
catagctgctgagtaattcttccag

SEQ ID NO: 1119654 - DNA, 25 bp, Homo sapien
ggacgttgtgtttactgtgcatgag

SEQ ID NO: 1119655 - DNA, 25 bp, Homo sapien
ttaatcatcccttattgagcagcat

SEQ ID NO: 1119656 - DNA, 25 bp, Homo sapien
gatgctttctggacgttgtgtttac

SEQ ID NO: 1119657 - DNA, 25 bp, Homo sapien
ttattatgacgggaagaaacagcag

SEQ ID NO: 1119658 - DNA, 25 bp, Homo sapien
gagtgaatgggcttacttccagtca

SEQ ID NO: 1119659 - DNA, 25 bp, Homo sapien
gcatttcagcagttgatggggctga

SEQ ID NO: 1119660 - DNA, 25 bp, Homo sapien
gggctgagtgaatgggcttacttcc

SEQ ID NO: 1119661 - DNA, 25 bp, Homo sapien
aaggactgcatttcagcagttgatg

SEQ ID NO: 1119662 - DNA, 25 bp, Homo sapien
agagaacgctgcacttcctgctcat

SEQ ID NO: 1119663 - DNA, 25 bp, Homo sapien
gagaacgctgcacttcctgctcatg

SEQ ID NO: 1119664 - DNA, 25 bp, Homo sapien
tctagtagtgcactgtagaaatgat

SEQ ID NO: 1119665 - DNA, 25 bp, Homo sapien
caatggcagttgcagcgaagccaca

SEQ ID NO: 1119666 - DNA, 25 bp, Homo sapien
tcttttcaatgtgaagccgtaagga

SEQ ID NO: 1119667 - DNA, 25 bp, Homo sapien
taaggaggaacttacgataagctag

SEQ ID NO: 1119668 - DNA, 25 bp, Homo sapien
gagcagcttgcatttgtaagaatca

SEQ ID NO: 1119669 - DNA, 25 bp, Homo sapien
caaaagatgcattgacaagattcgt

SEQ ID NO: 1119670 - DNA, 25 bp, Homo sapien
ggattacaagcgaacgcgcccggca

SEQ ID NO: 1119671 - DNA, 25 bp, Homo sapien
cagccggattacaagcgaacgcgcc

SEQ ID NO: 1119672 - DNA, 25 bp, Homo sapien
gccggattacaagcgaacgcgcccg

SEQ ID NO: 1119673 - DNA, 25 bp, Homo sapien
attacaagcgaacgcgcccggcagc

SEQ ID NO: 1119674 - DNA, 25 bp, Homo sapien
ttcaatccccgctgttctctcggaa

SEQ ID NO: 1119675 - DNA, 25 bp, Homo sapien
atctccttgcctccgtcccttcaat

SEQ ID NO: 1119676 - DNA, 25 bp, Homo sapien
agaagagcgagagctgcccggattg

SEQ ID NO: 1119677 - DNA, 25 bp, Homo sapien
gccaaactcccttcgccttccgaga

SEQ ID NO: 1119678 - DNA, 25 bp, Homo sapien
tcggctcttccttcaattgccttca

SEQ ID NO: 1119679 - DNA, 25 bp, Homo sapien
ctgctaaggtcaccaagccgtccat

SEQ ID NO: 1119680 - DNA, 25 bp, Homo sapien
atctccacacctgaattggaggagc

SEQ ID NO: 1119681 - DNA, 25 bp, Homo sapien
caccaagccgtccatgatttgaaaa

SEQ ID NO: 1119682 - DNA, 25 bp, Homo sapien
gaggctggcagtcctgttcttgctg

SEQ ID NO: 1119683 - DNA, 25 bp, Homo sapien
tgcctgaaggcaggtccagctcttt

SEQ ID NO: 1119684 - DNA, 25 bp, Homo sapien
agctctttcctggttgctgagcggc

SEQ ID NO: 1119685 - DNA, 25 bp, Homo sapien
tcctggttgctgagcggcaccaggg

SEQ ID NO: 1119686 - DNA, 25 bp, Homo sapien
tagctgatgggctctgtccggccgc

SEQ ID NO: 1119687 - DNA, 25 bp, Homo sapien
aggactggcagtactttcctcccgc

SEQ ID NO: 1119688 - DNA, 25 bp, Homo sapien
tcacaagagcttcgctgagctgggc

SEQ ID NO: 1119689 - DNA, 25 bp, Homo sapien
tgcagaggccttccgcgttgtagct

SEQ ID NO: 1119690 - DNA, 25 bp, Homo sapien
cgcggcctccttgccccacggctgg

SEQ ID NO: 1119691 - DNA, 25 bp, Homo sapien
cggcaatctccgaggaaggtgggct

SEQ ID NO: 1119692 - DNA, 25 bp, Homo sapien
gttcgagggccgcggcaatctccga

SEQ ID NO: 1119693 - DNA, 25 bp, Homo sapien
gggtgaatctcattgggcgcttccg

SEQ ID NO: 1119694 - DNA, 25 bp, Homo sapien
tgtcaaactgacaaccccagctata

SEQ ID NO: 1119695 - DNA, 25 bp, Homo sapien
acctaactttcacttgtgggtagat

SEQ ID NO: 1119696 - DNA, 25 bp, Homo sapien
cctctgaggccaattaggaaatttc

SEQ ID NO: 1119697 - DNA, 25 bp, Homo sapien
ggctgcattaatgtcaaactgacaa

SEQ ID NO: 1119698 - DNA, 25 bp, Homo sapien
gcattgctcttatgatctgatgtga

SEQ ID NO: 1119699 - DNA, 25 bp, Homo sapien
gcaaagttaacccattccatctttc

SEQ ID NO: 1119700 - DNA, 25 bp, Homo sapien
tttgaagcattgctcttatgatctg

SEQ ID NO: 1119701 - DNA, 25 bp, Homo sapien
aatcttttgaagcattgctcttatg

SEQ ID NO: 1119702 - DNA, 25 bp, Homo sapien
gtttgcatcacctccaaggaattca

SEQ ID NO: 1119703 - DNA, 25 bp, Homo sapien
tttgacagcgcatgttaacaagcct

SEQ ID NO: 1119704 - DNA, 25 bp, Homo sapien
taatatcaaagcttaacggtatctg

SEQ ID NO: 1119705 - DNA, 25 bp, Homo sapien
tgtttggatctctaactgcggccct

SEQ ID NO: 1119706 - DNA, 25 bp, Homo sapien
gcagctgttgtcggcaaatccatgt

SEQ ID NO: 1119707 - DNA, 25 bp, Homo sapien
cagctgttgtcggcaaatccatgtt

SEQ ID NO: 1119708 - DNA, 25 bp, Homo sapien
tctagtagttgctccggtgtcagac

SEQ ID NO: 1119709 - DNA, 25 bp, Homo sapien
ccaatttggtgggagcactctgggc

SEQ ID NO: 1119710 - DNA, 25 bp, Homo sapien
gcagtttcactgtaaaaagcccgag

SEQ ID NO: 1119711 - DNA, 25 bp, Homo sapien
gggcgatgctccagttcaccagaat

SEQ ID NO: 1119712 - DNA, 25 bp, Homo sapien
gactaatgatctgagagccttttcc

SEQ ID NO: 1119713 - DNA, 25 bp, Homo sapien
gagatgaattcacttccaagactaa

SEQ ID NO: 1119714 - DNA, 25 bp, Homo sapien
gcaactaggcagatttgacggtggg

SEQ ID NO: 1119715 - DNA, 25 bp, Homo sapien
tgttgctctgctgcactgatttgca

SEQ ID NO: 1119716 - DNA, 25 bp, Homo sapien
ggccagtcatctggctcttaacgtt

SEQ ID NO: 1119717 - DNA, 25 bp, Homo sapien
gggccagtcatctggctcttaacgt

SEQ ID NO: 1119718 - DNA, 25 bp, Homo sapien
agtcatctggctcttaacgttggct

SEQ ID NO: 1119719 - DNA, 25 bp, Homo sapien
ccagtcatctggctcttaacgttgg

SEQ ID NO: 1119720 - DNA, 25 bp, Homo sapien
gccctagaggcgagcattcctgttt

SEQ ID NO: 1119721 - DNA, 25 bp, Homo sapien
gaagaacccttcatagtccaaggta

SEQ ID NO: 1119722 - DNA, 25 bp, Homo sapien
ttacagtgatcttctaggccccagc

SEQ ID NO: 1119723 - DNA, 25 bp, Homo sapien
gatgatacatgtaaccacgaatggg

SEQ ID NO: 1119724 - DNA, 25 bp, Homo sapien
tccaaatggattgcagtctggtcaa

SEQ ID NO: 1119725 - DNA, 25 bp, Homo sapien
gatttggcattgttgtgcggaagat

SEQ ID NO: 1119726 - DNA, 25 bp, Homo sapien
gaagattccaaggtagtagctccaa

SEQ ID NO: 1119727 - DNA, 25 bp, Homo sapien
gattgcagtctggtcaattgccaca

SEQ ID NO: 1119728 - DNA, 25 bp, Homo sapien
cgatgactgcaaggatcctgcccat

SEQ ID NO: 1119729 - DNA, 25 bp, Homo sapien
atgaggcccactggaaggatgcacg

SEQ ID NO: 1119730 - DNA, 25 bp, Homo sapien
cactggaaggatgcacgatgactgc

SEQ ID NO: 1119731 - DNA, 25 bp, Homo sapien
gctgtcatgaacatgctctgatatt

SEQ ID NO: 1119732 - DNA, 25 bp, Homo sapien
aattggagatctgtatggaagggac

SEQ ID NO: 1119733 - DNA, 25 bp, Homo sapien
cagctgaagttgtgggataggacca

SEQ ID NO: 1119734 - DNA, 25 bp, Homo sapien
gataggaccagaatgcagagaaatt

SEQ ID NO: 1119735 - DNA, 25 bp, Homo sapien
ctagagaagtgttaggctggaattg

SEQ ID NO: 1119736 - DNA, 25 bp, Homo sapien
taaggtacatttcataggctcatcc

SEQ ID NO: 1119737 - DNA, 25 bp, Homo sapien
caacacctgtgcaattagaactgca

SEQ ID NO: 1119738 - DNA, 25 bp, Homo sapien
ctaatgagctgttgctaaggtacat

SEQ ID NO: 1119739 - DNA, 25 bp, Homo sapien
taaccccttggtgtaatcagatgat

SEQ ID NO: 1119740 - DNA, 25 bp, Homo sapien
aatatgatgcctcctaatgtggtgg

SEQ ID NO: 1119741 - DNA, 25 bp, Homo sapien
tgcagccagcagattacctgacaaa

SEQ ID NO: 1119742 - DNA, 25 bp, Homo sapien
gaaaagctagacaattcaatccggc

SEQ ID NO: 1119743 - DNA, 25 bp, Homo sapien
tgatctattgctgagcgctgcggcg

SEQ ID NO: 1119744 - DNA, 25 bp, Homo sapien
tagtactctgacgtgagcggagcct

SEQ ID NO: 1119745 - DNA, 25 bp, Homo sapien
tcaccacgcggttccaagggcagga

SEQ ID NO: 1119746 - DNA, 25 bp, Homo sapien
aatgctgctcgcctcgctgaggtcg

SEQ ID NO: 1119747 - DNA, 25 bp, Homo sapien
aggtgggacggatgcccgactccct

SEQ ID NO: 1119748 - DNA, 25 bp, Homo sapien
gcataacctgtccacaagttaaggg

SEQ ID NO: 1119749 - DNA, 25 bp, Homo sapien
gacacagccaggcataacctgtcca

SEQ ID NO: 1119750 - DNA, 25 bp, Homo sapien
ggatcagaagattcaccttcccgcc

SEQ ID NO: 1119751 - DNA, 25 bp, Homo sapien
tccaacagtcctttctacccagcag

SEQ ID NO: 1119752 - DNA, 25 bp, Homo sapien
tgacttgagttctacagattggctt

SEQ ID NO: 1119753 - DNA, 25 bp, Homo sapien
acagattggcttaatcggtcagcta

SEQ ID NO: 1119754 - DNA, 25 bp, Homo sapien
ggcttaatcggtcagctatgaacat

SEQ ID NO: 1119755 - DNA, 25 bp, Homo sapien
gctgacttgagttctacagattggc

SEQ ID NO: 1119756 - DNA, 25 bp, Homo sapien
tccgcagggcagacgcggtgaccca

SEQ ID NO: 1119757 - DNA, 25 bp, Homo sapien
tgcgttctgcgctcctggagctgga

SEQ ID NO: 1119758 - DNA, 25 bp, Homo sapien
gctcgtgactcggatagctctggtt

SEQ ID NO: 1119759 - DNA, 25 bp, Homo sapien
gctctggttcccacgttgcagttgg

SEQ ID NO: 1119760 - DNA, 25 bp, Homo sapien
tctccgtagttcacagggaccctgc

SEQ ID NO: 1119761 - DNA, 25 bp, Homo sapien
tatgactgatcgctcaacaccttgt

SEQ ID NO: 1119762 - DNA, 25 bp, Homo sapien
tcccggagagagcagattgcacccg

SEQ ID NO: 1119763 - DNA, 25 bp, Homo sapien
acttcacagtgcgtttcgggctgct

SEQ ID NO: 1119764 - DNA, 25 bp, Homo sapien
ggtcaacaccttgagacctgaggaa

SEQ ID NO: 1119765 - DNA, 25 bp, Homo sapien
gaaagacagagggagcggcccttac

SEQ ID NO: 1119766 - DNA, 25 bp, Homo sapien
gatattattttcgtggatacaagag

SEQ ID NO: 1119767 - DNA, 25 bp, Homo sapien
tctctctgtgggtaaacttcatatc

SEQ ID NO: 1119768 - DNA, 25 bp, Homo sapien
tctgttttgctagatggcaggtgta

SEQ ID NO: 1119769 - DNA, 25 bp, Homo sapien
ctgttttgctagatggcaggtgtaa

SEQ ID NO: 1119770 - DNA, 25 bp, Homo sapien
ggtctgttttgctagatggcaggtg

SEQ ID NO: 1119771 - DNA, 25 bp, Homo sapien
gtctgttttgctagatggcaggtgt

SEQ ID NO: 1119772 - DNA, 25 bp, Homo sapien
tgttgcacaatacgcttcactggtt

SEQ ID NO: 1119773 - DNA, 25 bp, Homo sapien
cacacttaacaatgcagggtcatgt

SEQ ID NO: 1119774 - DNA, 25 bp, Homo sapien
gacaagtacgttatacagcatgccg

SEQ ID NO: 1119775 - DNA, 25 bp, Homo sapien
tcctagctaattgggcagacaagta

SEQ ID NO: 1119776 - DNA, 25 bp, Homo sapien
gaatcttttggaagtcaacattcac

SEQ ID NO: 1119777 - DNA, 25 bp, Homo sapien
cattcacttgtgttccatcatcaaa

SEQ ID NO: 1119778 - DNA, 25 bp, Homo sapien
caagaacaaatttgctagtaattag

SEQ ID NO: 1119779 - DNA, 25 bp, Homo sapien
catcatcaaagctggtaatcaactg

SEQ ID NO: 1119780 - DNA, 25 bp, Homo sapien
tcattttagattcgtggagcccaca

SEQ ID NO: 1119781 - DNA, 25 bp, Homo sapien
cattttcaagacacagggcatactc

SEQ ID NO: 1119782 - DNA, 25 bp, Homo sapien
ccctgggttatcagagtccgagaca

SEQ ID NO: 1119783 - DNA, 25 bp, Homo sapien
ccattatcaggtccagctgggtcac

SEQ ID NO: 1119784 - DNA, 25 bp, Homo sapien
ttttgggatgaggtattattgagtg

SEQ ID NO: 1119785 - DNA, 25 bp, Homo sapien
ggcccagaattgctatggcaggagt

SEQ ID NO: 1119786 - DNA, 25 bp, Homo sapien
gaattgctatggcaggagttctcaa

SEQ ID NO: 1119787 - DNA, 25 bp, Homo sapien
tatggcaggagttctcaaacttgtt

SEQ ID NO: 1119788 - DNA, 25 bp, Homo sapien
ttgtgggccagaattgaccttcttc

SEQ ID NO: 1119789 - DNA, 25 bp, Homo sapien
cttccctggagcctacatattcctg

SEQ ID NO: 1119790 - DNA, 25 bp, Homo sapien
cctggagcctacatattcctgatat

SEQ ID NO: 1119791 - DNA, 25 bp, Homo sapien
tccctggagcctacatattcctgat

SEQ ID NO: 1119792 - DNA, 25 bp, Homo sapien
gaactgtggcataactcatatctgt

SEQ ID NO: 1119793 - DNA, 25 bp, Homo sapien
gaatacaaagtccaaaggatcactc

SEQ ID NO: 1119794 - DNA, 25 bp, Homo sapien
gcaggcgttgctgcgtgcgcctcta

SEQ ID NO: 1119795 - DNA, 25 bp, Homo sapien
tcaaggactgtccaattagaataca

SEQ ID NO: 1119796 - DNA, 25 bp, Homo sapien
tctttgcttcgtatgtaaataaagt

SEQ ID NO: 1119797 - DNA, 25 bp, Homo sapien
gagtattttggtagagtatatacat

SEQ ID NO: 1119798 - DNA, 25 bp, Homo sapien
ggatatgcattgattctttgcttcg

SEQ ID NO: 1119799 - DNA, 25 bp, Homo sapien
gcattgattctttgcttcgtatgta

SEQ ID NO: 1119800 - DNA, 25 bp, Homo sapien
caaagagagcggagttcataagcca

SEQ ID NO: 1119801 - DNA, 25 bp, Homo sapien
tcattaaccactggacagcctgtgg

SEQ ID NO: 1119802 - DNA, 25 bp, Homo sapien
tctgaaaacgccttaagtggaggcc

SEQ ID NO: 1119803 - DNA, 25 bp, Homo sapien
aataatacgttgactctgcctgaag

SEQ ID NO: 1119804 - DNA, 25 bp, Homo sapien
cttgcagcaagatgttaataagaca

SEQ ID NO: 1119805 - DNA, 25 bp, Homo sapien
tgcagcaagatgttaataagacaaa

SEQ ID NO: 1119806 - DNA, 25 bp, Homo sapien
tcttgcagcaagatgttaataagac

SEQ ID NO: 1119807 - DNA, 25 bp, Homo sapien
gttcttgcagcaagatgttaataag

SEQ ID NO: 1119808 - DNA, 25 bp, Homo sapien
gggcaatagttcagcttatcccact

SEQ ID NO: 1119809 - DNA, 25 bp, Homo sapien
aagagtcacaagctagtttcaggta

SEQ ID NO: 1119810 - DNA, 25 bp, Homo sapien
taaagtaacctagcttgagaacaga

SEQ ID NO: 1119811 - DNA, 25 bp, Homo sapien
cagtggattgttggtgtagaagtca

SEQ ID NO: 1119812 - DNA, 25 bp, Homo sapien
gaactttcggagttaattctgaaga

SEQ ID NO: 1119813 - DNA, 25 bp, Homo sapien
actttcggagttaattctgaagact

SEQ ID NO: 1119814 - DNA, 25 bp, Homo sapien
tctgaattgtcagtgtttagttttc

SEQ ID NO: 1119815 - DNA, 25 bp, Homo sapien
tctgaactttcggagttaattctga

SEQ ID NO: 1119816 - DNA, 25 bp, Homo sapien
gactttacacataacagcttttggg

SEQ ID NO: 1119817 - DNA, 25 bp, Homo sapien
aacttttcttattgtagcttttgtg

SEQ ID NO: 1119818 - DNA, 25 bp, Homo sapien
gcttttgtgaagtatagaaggctaa

SEQ ID NO: 1119819 - DNA, 25 bp, Homo sapien
gcaaattggttaaattagacattga

SEQ ID NO: 1119820 - DNA, 25 bp, Homo sapien
tgttacgagacttctacagacaact

SEQ ID NO: 1119821 - DNA, 25 bp, Homo sapien
gaacctgaagatgagttgtcccaga

SEQ ID NO: 1119822 - DNA, 25 bp, Homo sapien
gtgtgatcatcaaactcaacgaggg

SEQ ID NO: 1119823 - DNA, 25 bp, Homo sapien
cagactcttctcagtgattggaaac

SEQ ID NO: 1119824 - DNA, 25 bp, Homo sapien
agttggtgctacacaaggagcccgg

SEQ ID NO: 1119825 - DNA, 25 bp, Homo sapien
gccacggagcctgaggtgagcggcg

SEQ ID NO: 1119826 - DNA, 25 bp, Homo sapien
ttttgccgcacaggctaagatggcg

SEQ ID NO: 1119827 - DNA, 25 bp, Homo sapien
catccaaaaggacgcattttgccgc

SEQ ID NO: 1119828 - DNA, 25 bp, Homo sapien
agagcggcgtgtgacgcggggacgc

SEQ ID NO: 1119829 - DNA, 25 bp, Homo sapien
tgctcccaacgtcgccccggtttga

SEQ ID NO: 1119830 - DNA, 25 bp, Homo sapien
cccggtttgacgcacacggcaccaa

SEQ ID NO: 1119831 - DNA, 25 bp, Homo sapien
gggacgccgcgtgctcccaacgtcg

SEQ ID NO: 1119832 - DNA, 25 bp, Homo sapien
cagtggtgcactgtttccgctgccc

SEQ ID NO: 1119833 - DNA, 25 bp, Homo sapien
ttgtttggtttctggcacccgagaa

SEQ ID NO: 1119834 - DNA, 25 bp, Homo sapien
agcgcgaagcttcccgggagctcct

SEQ ID NO: 1119835 - DNA, 25 bp, Homo sapien
gtttgtctaattggcccagacgctc

SEQ ID NO: 1119836 - DNA, 25 bp, Homo sapien
cctctcgtcgtcttctaaatttcac

SEQ ID NO: 1119837 - DNA, 25 bp, Homo sapien
acttgatatctcttaaagtaggcct

SEQ ID NO: 1119838 - DNA, 25 bp, Homo sapien
ttcacttgatatctcttaaagtagg

SEQ ID NO: 1119839 - DNA, 25 bp, Homo sapien
aatttcacttgatatctcttaaagt

SEQ ID NO: 1119840 - DNA, 25 bp, Homo sapien
agtgtttctgagcatagtaatcagt

SEQ ID NO: 1119841 - DNA, 25 bp, Homo sapien
caagtgtttctgagcatagtaatca

SEQ ID NO: 1119842 - DNA, 25 bp, Homo sapien
gtttctgagcatagtaatcagtttt

SEQ ID NO: 1119843 - DNA, 25 bp, Homo sapien
ttctgagcatagtaatcagttttac

SEQ ID NO: 1119844 - DNA, 25 bp, Homo sapien
tgtattcatttttatcctgtatcac

SEQ ID NO: 1119845 - DNA, 25 bp, Homo sapien
atgttgtattcatttttatcctgta

SEQ ID NO: 1119846 - DNA, 25 bp, Homo sapien
ctgtatttgggtatgttgtattcat

SEQ ID NO: 1119847 - DNA, 25 bp, Homo sapien
gttgtattcatttttatcctgtatc

SEQ ID NO: 1119848 - DNA, 25 bp, Homo sapien
gacaaatgatactctgtttgttcca

SEQ ID NO: 1119849 - DNA, 25 bp, Homo sapien
aatgatactctgtttgttccacgaa

SEQ ID NO: 1119850 - DNA, 25 bp, Homo sapien
atgatactctgtttgttccacgaac

SEQ ID NO: 1119851 - DNA, 25 bp, Homo sapien
caaatgatactctgtttgttccacg

SEQ ID NO: 1119852 - DNA, 25 bp, Homo sapien
cacattgtagtcatcgccagttgcc

SEQ ID NO: 1119853 - DNA, 25 bp, Homo sapien
cattgtagtcatcgccagttgcctc

SEQ ID NO: 1119854 - DNA, 25 bp, Homo sapien
tgtagtcatcgccagttgcctccac

SEQ ID NO: 1119855 - DNA, 25 bp, Homo sapien
gtcatcgccagttgcctccacttgg

SEQ ID NO: 1119856 - DNA, 25 bp, Homo sapien
cccatgcacagctcccttcagagtg

SEQ ID NO: 1119857 - DNA, 25 bp, Homo sapien
ccccatgcacagctcccttcagagt

SEQ ID NO: 1119858 - DNA, 25 bp, Homo sapien
taaccagggaatcatttagtactgt

SEQ ID NO: 1119859 - DNA, 25 bp, Homo sapien
cagggaatcatttagtactgtgagg

SEQ ID NO: 1119860 - DNA, 25 bp, Homo sapien
ggaatcatttagtactgtgagggac

SEQ ID NO: 1119861 - DNA, 25 bp, Homo sapien
gaatcatttagtactgtgagggaca

SEQ ID NO: 1119862 - DNA, 25 bp, Homo sapien
ctgcaacattgtggcccatgatgtg

SEQ ID NO: 1119863 - DNA, 25 bp, Homo sapien
acattgtggcccatgatgtgcttcc

SEQ ID NO: 1119864 - DNA, 25 bp, Homo sapien
cattgtggcccatgatgtgcttcct

SEQ ID NO: 1119865 - DNA, 25 bp, Homo sapien
caacattgtggcccatgatgtgctt

SEQ ID NO: 1119866 - DNA, 25 bp, Homo sapien
tcacagactggactctctcgtatag

SEQ ID NO: 1119867 - DNA, 25 bp, Homo sapien
cagactggactctctcgtatagcag

SEQ ID NO: 1119868 - DNA, 25 bp, Homo sapien
ttgggcttcttttcacagactggac

SEQ ID NO: 1119869 - DNA, 25 bp, Homo sapien
tcttttcacagactggactctctcg

SEQ ID NO: 1119870 - DNA, 25 bp, Homo sapien
tagctctcagcagcccgctcctgag

SEQ ID NO: 1119871 - DNA, 25 bp, Homo sapien
ctcagcagcccgctcctgagctctg

SEQ ID NO: 1119872 - DNA, 25 bp, Homo sapien
cagcccgctcctgagctctgaggaa

SEQ ID NO: 1119873 - DNA, 25 bp, Homo sapien
ttagctctcagcagcccgctcctga

SEQ ID NO: 1119874 - DNA, 25 bp, Homo sapien
caacaaaatagacagcatttgagca

SEQ ID NO: 1119875 - DNA, 25 bp, Homo sapien
catttgagcaaagaaatctttcatc

SEQ ID NO: 1119876 - DNA, 25 bp, Homo sapien
aatctttcatctgcctgatacccca

SEQ ID NO: 1119877 - DNA, 25 bp, Homo sapien
caaaatagacagcatttgagcaaag

SEQ ID NO: 1119878 - DNA, 25 bp, Homo sapien
tcctctgaggtctgcaagtgatcag

SEQ ID NO: 1119879 - DNA, 25 bp, Homo sapien
tgatgtgtggctgatatgagtcccg

SEQ ID NO: 1119880 - DNA, 25 bp, Homo sapien
gggagacctatgcttgggaaatgca

SEQ ID NO: 1119881 - DNA, 25 bp, Homo sapien
gaggtctgcaagtgatcagtgttag

SEQ ID NO: 1119882 - DNA, 25 bp, Homo sapien
gaaatcataaactcatagatgccag

SEQ ID NO: 1119883 - DNA, 25 bp, Homo sapien
tttgcctgaaggctcgcaggccaat

SEQ ID NO: 1119884 - DNA, 25 bp, Homo sapien
caggagaaaaacgatttccacgacg

SEQ ID NO: 1119885 - DNA, 25 bp, Homo sapien
caatttaggtatcttgtactctggc

SEQ ID NO: 1119886 - DNA, 25 bp, Homo sapien
aatccaggttactccattgtgcggt

SEQ ID NO: 1119887 - DNA, 25 bp, Homo sapien
tcatgcaccatcaagcaagtttcta

SEQ ID NO: 1119888 - DNA, 25 bp, Homo sapien
gttctgctgtctcaacacatggcct

SEQ ID NO: 1119889 - DNA, 25 bp, Homo sapien
tggaagacggcacaccactcttcaa

SEQ ID NO: 1119890 - DNA, 25 bp, Homo sapien
agtcactcagcatgactttcttaga

SEQ ID NO: 1119891 - DNA, 25 bp, Homo sapien
gtcactcagcatgactttcttagac

SEQ ID NO: 1119892 - DNA, 25 bp, Homo sapien
tcactcagcatgactttcttagact

SEQ ID NO: 1119893 - DNA, 25 bp, Homo sapien
tgtgtctttattcccgcatcagctg

SEQ ID NO: 1119894 - DNA, 25 bp, Homo sapien
tttattcccgcatcagctgtgtccc

SEQ ID NO: 1119895 - DNA, 25 bp, Homo sapien
cctctgtgtggtttggtaaattaca

SEQ ID NO: 1119896 - DNA, 25 bp, Homo sapien
tgtgtcccctggaagagactttctc

SEQ ID NO: 1119897 - DNA, 25 bp, Homo sapien
ttcatccttccctctggtcacactg

SEQ ID NO: 1119898 - DNA, 25 bp, Homo sapien
ttccctctggtcacactgattttcc

SEQ ID NO: 1119899 - DNA, 25 bp, Homo sapien
atccttccctctggtcacactgatt

SEQ ID NO: 1119900 - DNA, 25 bp, Homo sapien
ccttccctctggtcacactgatttt

SEQ ID NO: 1119901 - DNA, 25 bp, Homo sapien
tcttctcagtgtgtatctttaccaa

SEQ ID NO: 1119902 - DNA, 25 bp, Homo sapien
cagctgatgtgatacattcttggcc

SEQ ID NO: 1119903 - DNA, 25 bp, Homo sapien
tctgtttctccatgagacctgaata

SEQ ID NO: 1119904 - DNA, 25 bp, Homo sapien
taactgtgccctgactgacattctg

SEQ ID NO: 1119905 - DNA, 25 bp, Homo sapien
tcccgagccattcccccttcttggc

SEQ ID NO: 1119906 - DNA, 25 bp, Homo sapien
accaagttctttctcccgagccatt

SEQ ID NO: 1119907 - DNA, 25 bp, Homo sapien
gagccaccaagttctttctcccgag

SEQ ID NO: 1119908 - DNA, 25 bp, Homo sapien
ctagagccaccaagttctttctccc

SEQ ID NO: 1119909 - DNA, 25 bp, Homo sapien
gttgagagtaagttccttgggcaca

SEQ ID NO: 1119910 - DNA, 25 bp, Homo sapien
cacagacatcggattccacggcgca

SEQ ID NO: 1119911 - DNA, 25 bp, Homo sapien
tgggtgtggcacagttgagagtaag

SEQ ID NO: 1119912 - DNA, 25 bp, Homo sapien
cggcgcacatcagtgcataacgcat

SEQ ID NO: 1119913 - DNA, 25 bp, Homo sapien
cctggagctgacaaggcccaatatg

SEQ ID NO: 1119914 - DNA, 25 bp, Homo sapien
tcccccacgtccacagtacatgtgc

SEQ ID NO: 1119915 - DNA, 25 bp, Homo sapien
ccccacgtccacagtacatgtgcat

SEQ ID NO: 1119916 - DNA, 25 bp, Homo sapien
cacgtccacagtacatgtgcatttg

SEQ ID NO: 1119917 - DNA, 25 bp, Homo sapien
tccagggatctttccctgtgttgcc

SEQ ID NO: 1119918 - DNA, 25 bp, Homo sapien
gctctctcgaaccaggcttgaattt

SEQ ID NO: 1119919 - DNA, 25 bp, Homo sapien
tgtgttgcccgaaactcaacccacc

SEQ ID NO: 1119920 - DNA, 25 bp, Homo sapien
tgctctgcatgaccgtgctctctcg

SEQ ID NO: 1119921 - DNA, 25 bp, Homo sapien
atcggagcggacagacctggaagat

SEQ ID NO: 1119922 - DNA, 25 bp, Homo sapien
tggaagatgttcagctggcttccct

SEQ ID NO: 1119923 - DNA, 25 bp, Homo sapien
gctggcttccctgagtgatgcttgg

SEQ ID NO: 1119924 - DNA, 25 bp, Homo sapien
ttgggttcaccacttccttagtgaa

SEQ ID NO: 1119925 - DNA, 25 bp, Homo sapien
tgaatgggtgaatgtgtccacctgc

SEQ ID NO: 1119926 - DNA, 25 bp, Homo sapien
ggcatacagcaggcacttgagatga

SEQ ID NO: 1119927 - DNA, 25 bp, Homo sapien
tgagatgaatgggtgaatgtgtcca

SEQ ID NO: 1119928 - DNA, 25 bp, Homo sapien
gcatacagcaggcacttgagatgaa

SEQ ID NO: 1119929 - DNA, 25 bp, Homo sapien
aggagccagacggtccacatacatc

SEQ ID NO: 1119930 - DNA, 25 bp, Homo sapien
ctctgtgagatcagactcgtaaatt

SEQ ID NO: 1119931 - DNA, 25 bp, Homo sapien
taagagacagaattgaatcctttct

SEQ ID NO: 1119932 - DNA, 25 bp, Homo sapien
gacggtccacatacatcatcaactg

SEQ ID NO: 1119933 - DNA, 25 bp, Homo sapien
cccctccagccctatcccaccccat

SEQ ID NO: 1119934 - DNA, 25 bp, Homo sapien
ccagaagccaggcaagagcccctcc

SEQ ID NO: 1119935 - DNA, 25 bp, Homo sapien
agaagccaggcaagagcccctccag

SEQ ID NO: 1119936 - DNA, 25 bp, Homo sapien
aggcaagagcccctccagccctatc

SEQ ID NO: 1119937 - DNA, 25 bp, Homo sapien
tgttgccaaggccactaccatgaac

SEQ ID NO: 1119938 - DNA, 25 bp, Homo sapien
catgaacaactttgggcagcaactc

SEQ ID NO: 1119939 - DNA, 25 bp, Homo sapien
ggtccccattgttcttgacaaggct

SEQ ID NO: 1119940 - DNA, 25 bp, Homo sapien
tcttgtcccggtcttgtccaaaata

SEQ ID NO: 1119941 - DNA, 25 bp, Homo sapien
catacactgaccacatgaaagagaa

SEQ ID NO: 1119942 - DNA, 25 bp, Homo sapien
tacactgaccacatgaaagagaata

SEQ ID NO: 1119943 - DNA, 25 bp, Homo sapien
acactgaccacatgaaagagaatac

SEQ ID NO: 1119944 - DNA, 25 bp, Homo sapien
tcatacactgaccacatgaaagaga

SEQ ID NO: 1119945 - DNA, 25 bp, Homo sapien
ctgggccccgtttcctgaccaccag

SEQ ID NO: 1119946 - DNA, 25 bp, Homo sapien
cccgtttcctgaccaccagctgggc

SEQ ID NO: 1119947 - DNA, 25 bp, Homo sapien
ggccccgtttcctgaccaccagctg

SEQ ID NO: 1119948 - DNA, 25 bp, Homo sapien
ccgtttcctgaccaccagctgggca

SEQ ID NO: 1119949 - DNA, 25 bp, Homo sapien
tgtactgtgatgaaacccctaactt

SEQ ID NO: 1119950 - DNA, 25 bp, Homo sapien
aagaccattccaacatgtgtcaggc

SEQ ID NO: 1119951 - DNA, 25 bp, Homo sapien
tgtgtcaggcacagagttagcaggc

SEQ ID NO: 1119952 - DNA, 25 bp, Homo sapien
tgatagggtacagtggtctccgcag

SEQ ID NO: 1119953 - DNA, 25 bp, Homo sapien
gatgcagaagaaacagaaatctgta

SEQ ID NO: 1119954 - DNA, 25 bp, Homo sapien
tgtaaacaacacttcccttggacca

SEQ ID NO: 1119955 - DNA, 25 bp, Homo sapien
cagtggggatgcagaagaaacagaa

SEQ ID NO: 1119956 - DNA, 25 bp, Homo sapien
gaagcagtggggatgcagaagaaac

SEQ ID NO: 1119957 - DNA, 25 bp, Homo sapien
ttggtgatacgagctctttttttgt

SEQ ID NO: 1119958 - DNA, 25 bp, Homo sapien
cttggtgatacgagctctttttttg

SEQ ID NO: 1119959 - DNA, 25 bp, Homo sapien
gcagcagcatgattagacatgctct

SEQ ID NO: 1119960 - DNA, 25 bp, Homo sapien
gcatgattagacatgctctctgaat

SEQ ID NO: 1119961 - DNA, 25 bp, Homo sapien
ccataaggggagcagttaacagaca

SEQ ID NO: 1119962 - DNA, 25 bp, Homo sapien
gacatgctctctgaatagtattggc

SEQ ID NO: 1119963 - DNA, 25 bp, Homo sapien
cactgcttgccttatctggtgcaga

SEQ ID NO: 1119964 - DNA, 25 bp, Homo sapien
ccttatctggtgcagagaaacagag

SEQ ID NO: 1119965 - DNA, 25 bp, Homo sapien
gccttatctggtgcagagaaacaga

SEQ ID NO: 1119966 - DNA, 25 bp, Homo sapien
gcttgccttatctggtgcagagaaa

SEQ ID NO: 1119967 - DNA, 25 bp, Homo sapien
gctcaggggtaagatcataggacat

SEQ ID NO: 1119968 - DNA, 25 bp, Homo sapien
tctgtttttactgaggacaagctca

SEQ ID NO: 1119969 - DNA, 25 bp, Homo sapien
ctgaggctgtggcacttctgttttt

SEQ ID NO: 1119970 - DNA, 25 bp, Homo sapien
acaagctcaggggtaagatcatagg

SEQ ID NO: 1119971 - DNA, 25 bp, Homo sapien
gcttcttatgcttctcattgtcagg

SEQ ID NO: 1119972 - DNA, 25 bp, Homo sapien
tcagagtgtattctgttgaggcaag

SEQ ID NO: 1119973 - DNA, 25 bp, Homo sapien
caaggtggacggttgaatgaagaca

SEQ ID NO: 1119974 - DNA, 25 bp, Homo sapien
tcattgtcaggagctttcaagttag

SEQ ID NO: 1119975 - DNA, 25 bp, Homo sapien
ctaagcccactttcccccctcagct

SEQ ID NO: 1119976 - DNA, 25 bp, Homo sapien
gcttgattcagggttgccctgggca

SEQ ID NO: 1119977 - DNA, 25 bp, Homo sapien
ggcctcggcggctaaagcttgattc

SEQ ID NO: 1119978 - DNA, 25 bp, Homo sapien
tgggcaggcggtcctaagcccactt

SEQ ID NO: 1119979 - DNA, 25 bp, Homo sapien
ggcaacacagaggagggatgactgg

SEQ ID NO: 1119980 - DNA, 25 bp, Homo sapien
gcaacacagaggagggatgactggc

SEQ ID NO: 1119981 - DNA, 25 bp, Homo sapien
tgatgtcattctcccgggtggcact

SEQ ID NO: 1119982 - DNA, 25 bp, Homo sapien
ttagtttggccaggccttgaatacc

SEQ ID NO: 1119983 - DNA, 25 bp, Homo sapien
ggccaaagtagctcttgatgtcatt

SEQ ID NO: 1119984 - DNA, 25 bp, Homo sapien
cacatcagcaattagtttggccagg

SEQ ID NO: 1119985 - DNA, 25 bp, Homo sapien
tgctcatagaggcatcaatggccac

SEQ ID NO: 1119986 - DNA, 25 bp, Homo sapien
gctcatagaggcatcaatggccacc

SEQ ID NO: 1119987 - DNA, 25 bp, Homo sapien
ggcgaacagcaatcaggaactgata

SEQ ID NO: 1119988 - DNA, 25 bp, Homo sapien
ccaccctggcgaacagcaatcagga

SEQ ID NO: 1119989 - DNA, 25 bp, Homo sapien
gaacatgcctatcaggtggctggtg

SEQ ID NO: 1119990 - DNA, 25 bp, Homo sapien
tgatgccgttctccatcacgcgaat

SEQ ID NO: 1119991 - DNA, 25 bp, Homo sapien
cgaatagtgcggtagaacatgccta

SEQ ID NO: 1119992 - DNA, 25 bp, Homo sapien
catcacgcgaatagtgcggtagaac

SEQ ID NO: 1119993 - DNA, 25 bp, Homo sapien
gtggtggcgtgccctcaaagacata

SEQ ID NO: 1119994 - DNA, 25 bp, Homo sapien
tggtggcgtgccctcaaagacatac

SEQ ID NO: 1119995 - DNA, 25 bp, Homo sapien
tgcatttggccagctcgcctgactt

SEQ ID NO: 1119996 - DNA, 25 bp, Homo sapien
gcatttggccagctcgcctgacttg

SEQ ID NO: 1119997 - DNA, 25 bp, Homo sapien
catttggccagctcgcctgacttgt

SEQ ID NO: 1119998 - DNA, 25 bp, Homo sapien
atttggccagctcgcctgacttgtg

SEQ ID NO: 1119999 - DNA, 25 bp, Homo sapien
ctgcctcgatgggtgcatcaaggta

SEQ ID NO: 1120000 - DNA, 25 bp, Homo sapien
tcgatgggtgcatcaaggtaaggga

SEQ ID NO: 1120001 - DNA, 25 bp, Homo sapien
cctcgatgggtgcatcaaggtaagg

SEQ ID NO: 1120002 - DNA, 25 bp, Homo sapien
gcctcgatgggtgcatcaaggtaag

SEQ ID NO: 1120003 - DNA, 25 bp, Homo sapien
gaattcctggattggcagctttttg

SEQ ID NO: 1120004 - DNA, 25 bp, Homo sapien
tggaattcctggattggcagctttt

SEQ ID NO: 1120005 - DNA, 25 bp, Homo sapien
aggtggaattcctggattggcagct

SEQ ID NO: 1120006 - DNA, 25 bp, Homo sapien
ggtggaattcctggattggcagctt

SEQ ID NO: 1120007 - DNA, 25 bp, Homo sapien
tagcaggatgcacagatccacaaac

SEQ ID NO: 1120008 - DNA, 25 bp, Homo sapien
ctagcaggatgcacagatccacaaa

SEQ ID NO: 1120009 - DNA, 25 bp, Homo sapien
gcccaatactccagatactcttaca

SEQ ID NO: 1120010 - DNA, 25 bp, Homo sapien
cccaatactccagatactcttacag

SEQ ID NO: 1120011 - DNA, 25 bp, Homo sapien
ttggctcgctccacttcagctccac

SEQ ID NO: 1120012 - DNA, 25 bp, Homo sapien
tggctcgctccacttcagctccaca

SEQ ID NO: 1120013 - DNA, 25 bp, Homo sapien
ttcttcatttggctcgctccacttc

SEQ ID NO: 1120014 - DNA, 25 bp, Homo sapien
tcatttggctcgctccacttcagct

SEQ ID NO: 1120015 - DNA, 25 bp, Homo sapien
ccttgaagaaatcatccaggcggcc

SEQ ID NO: 1120016 - DNA, 25 bp, Homo sapien
gagagtgagccagtcaccttgaaga

SEQ ID NO: 1120017 - DNA, 25 bp, Homo sapien
gagtgagccagtcaccttgaagaaa

SEQ ID NO: 1120018 - DNA, 25 bp, Homo sapien
aagagagtgagccagtcaccttgaa

SEQ ID NO: 1120019 - DNA, 25 bp, Homo sapien
tttgattctggctccttgcacttag

SEQ ID NO: 1120020 - DNA, 25 bp, Homo sapien
ccctttgattctggctccttgcact

SEQ ID NO: 1120021 - DNA, 25 bp, Homo sapien
atccctttgattctggctccttgca

SEQ ID NO: 1120022 - DNA, 25 bp, Homo sapien
cttcttcttagtggatccctttgat

SEQ ID NO: 1120023 - DNA, 25 bp, Homo sapien
agttcctcccatctgctaagatgcg

SEQ ID NO: 1120024 - DNA, 25 bp, Homo sapien
agcagttcctcccatctgctaagat

SEQ ID NO: 1120025 - DNA, 25 bp, Homo sapien
gttcctcccatctgctaagatgcgc

SEQ ID NO: 1120026 - DNA, 25 bp, Homo sapien
ccatctgctaagatgcgccttcctg

SEQ ID NO: 1120027 - DNA, 25 bp, Homo sapien
cgtcttactcctctgaataactaga

SEQ ID NO: 1120028 - DNA, 25 bp, Homo sapien
ctcaactcagctgattgccagatga

SEQ ID NO: 1120029 - DNA, 25 bp, Homo sapien
aaacagcacatgaaaaccagtgtct

SEQ ID NO: 1120030 - DNA, 25 bp, Homo sapien
gattgccagatgaacatcaccgtct

SEQ ID NO: 1120031 - DNA, 25 bp, Homo sapien
tatatacttaagaaccaagcctacc

SEQ ID NO: 1120032 - DNA, 25 bp, Homo sapien
taacagtgggtagcagagtttgtac

SEQ ID NO: 1120033 - DNA, 25 bp, Homo sapien
agtttgtacttaatagtaacatgcc

SEQ ID NO: 1120034 - DNA, 25 bp, Homo sapien
tagtgtcatatctgcaacaaggaag

SEQ ID NO: 1120035 - DNA, 25 bp, Homo sapien
gatccttcgatgtcggctcttccta

SEQ ID NO: 1120036 - DNA, 25 bp, Homo sapien
gcgacgtcgctttttgatccttcga

SEQ ID NO: 1120037 - DNA, 25 bp, Homo sapien
gaagcagaattcaccaagcgttgga

SEQ ID NO: 1120038 - DNA, 25 bp, Homo sapien
cggccaagcgttcatagcgacgtcg

SEQ ID NO: 1120039 - DNA, 25 bp, Homo sapien
tttgggttttaagcaggaggtgtca

SEQ ID NO: 1120040 - DNA, 25 bp, Homo sapien
tgtacacctgtcaaacggtaacgca

SEQ ID NO: 1120041 - DNA, 25 bp, Homo sapien
gctgtacacctgtcaaacggtaacg

SEQ ID NO: 1120042 - DNA, 25 bp, Homo sapien
gggctgtacacctgtcaaacggtaa

SEQ ID NO: 1120043 - DNA, 25 bp, Homo sapien
acagaccgtgaaagcggggcctcac

SEQ ID NO: 1120044 - DNA, 25 bp, Homo sapien
gcatttccagtcagaaagcggtgag

SEQ ID NO: 1120045 - DNA, 25 bp, Homo sapien
ccgcccctaaagtcggctgattggt

SEQ ID NO: 1120046 - DNA, 25 bp, Homo sapien
ctgattggtgttcggttcctgtgtc

SEQ ID NO: 1120047 - DNA, 25 bp, Homo sapien
tcttgtgttccggtgtgtggcgccc

SEQ ID NO: 1120048 - DNA, 25 bp, Homo sapien
cacagctcctagttctagaactgcc

SEQ ID NO: 1120049 - DNA, 25 bp, Homo sapien
ctagttctagaactgcccctgcagc

SEQ ID NO: 1120050 - DNA, 25 bp, Homo sapien
gctcctagttctagaactgcccctg

SEQ ID NO: 1120051 - DNA, 25 bp, Homo sapien
ttgatttcacagctcctagttctag

SEQ ID NO: 1120052 - DNA, 25 bp, Homo sapien
ctaaacacttagcttcgctttggga

SEQ ID NO: 1120053 - DNA, 25 bp, Homo sapien
cacttagcttcgctttgggagaaga

SEQ ID NO: 1120054 - DNA, 25 bp, Homo sapien
aacacttagcttcgctttgggagaa

SEQ ID NO: 1120055 - DNA, 25 bp, Homo sapien
taaacacttagcttcgctttgggag

SEQ ID NO: 1120056 - DNA, 25 bp, Homo sapien
ttttgccatgcccagtagacgatac

SEQ ID NO: 1120057 - DNA, 25 bp, Homo sapien
gggaaaactcagtaggcaaatgtga

SEQ ID NO: 1120058 - DNA, 25 bp, Homo sapien
aatccaacagcttgtcagaagtgtg

SEQ ID NO: 1120059 - DNA, 25 bp, Homo sapien
aagcaacccatccaagcaagaatcg

SEQ ID NO: 1120060 - DNA, 25 bp, Homo sapien
cttcctttccaagctctcttgagtt

SEQ ID NO: 1120061 - DNA, 25 bp, Homo sapien
caagctctcttgagtttgagggcat

SEQ ID NO: 1120062 - DNA, 25 bp, Homo sapien
cttcttcctttccaagctctcttga

SEQ ID NO: 1120063 - DNA, 25 bp, Homo sapien
cctttccaagctctcttgagtttga

SEQ ID NO: 1120064 - DNA, 25 bp, Homo sapien
taaggagccttggaaaaatcctctg

SEQ ID NO: 1120065 - DNA, 25 bp, Homo sapien
ctgcatctatgcagcatctgccctg

SEQ ID NO: 1120066 - DNA, 25 bp, Homo sapien
cagcagtgttccctgttagggacct

SEQ ID NO: 1120067 - DNA, 25 bp, Homo sapien
tgagcagacatggtcactggcagca

SEQ ID NO: 1120068 - DNA, 25 bp, Homo sapien
gttcaaccactgaccatctttgctg

SEQ ID NO: 1120069 - DNA, 25 bp, Homo sapien
ttctgcacgatatttctgggagttc

SEQ ID NO: 1120070 - DNA, 25 bp, Homo sapien
tgtgggcacaagtattgctttccct

SEQ ID NO: 1120071 - DNA, 25 bp, Homo sapien
ttcacagacaggttcaaccactgac

SEQ ID NO: 1120072 - DNA, 25 bp, Homo sapien
cttttctcaaggaccccaagcatcg

SEQ ID NO: 1120073 - DNA, 25 bp, Homo sapien
tctcaaggaccccaagcatcgaagc

SEQ ID NO: 1120074 - DNA, 25 bp, Homo sapien
aaggaccccaagcatcgaagctctc

SEQ ID NO: 1120075 - DNA, 25 bp, Homo sapien
atgcccttttctcaaggaccccaag

SEQ ID NO: 1120076 - DNA, 25 bp, Homo sapien
gtttctgcagactcccttgggtcgc

SEQ ID NO: 1120077 - DNA, 25 bp, Homo sapien
cacctgcaggacgttatctgtgttc

SEQ ID NO: 1120078 - DNA, 25 bp, Homo sapien
ccatggtttctgtaccgccctgaca

SEQ ID NO: 1120079 - DNA, 25 bp, Homo sapien
gacatgtgggtaaagccgtctaaga

SEQ ID NO: 1120080 - DNA, 25 bp, Homo sapien
gggaatgcagcgattgttctgcttc

SEQ ID NO: 1120081 - DNA, 25 bp, Homo sapien
gaatgcagcgattgttctgcttctc

SEQ ID NO: 1120082 - DNA, 25 bp, Homo sapien
ggaatgcagcgattgttctgcttct

SEQ ID NO: 1120083 - DNA, 25 bp, Homo sapien
tcattcataaaactcctttaggttc

SEQ ID NO: 1120084 - DNA, 25 bp, Homo sapien
ttcataaaactcctttaggttcagc

SEQ ID NO: 1120085 - DNA, 25 bp, Homo sapien
cattcataaaactcctttaggttca

SEQ ID NO: 1120086 - DNA, 25 bp, Homo sapien
cataaaactcctttaggttcagcac

SEQ ID NO: 1120087 - DNA, 25 bp, Homo sapien
gatcggatgcgcctgcgcaacactt

SEQ ID NO: 1120088 - DNA, 25 bp, Homo sapien
gccgctctggttgcacatgcgcaca

SEQ ID NO: 1120089 - DNA, 25 bp, Homo sapien
ccgctactgggcgtttgcgcaagag

SEQ ID NO: 1120090 - DNA, 25 bp, Homo sapien
ccgcggattccgctactgggcgttt

SEQ ID NO: 1120091 - DNA, 25 bp, Homo sapien
tttaagggagtacgacttctgtggc

SEQ ID NO: 1120092 - DNA, 25 bp, Homo sapien
taagggagtacgacttctgtggctc

SEQ ID NO: 1120093 - DNA, 25 bp, Homo sapien
tccccagatgcctgggtcgccgtct

SEQ ID NO: 1120094 - DNA, 25 bp, Homo sapien
tgggtcgccgtctccaagagatccc

SEQ ID NO: 1120095 - DNA, 25 bp, Homo sapien
gggtgaatgaatgggaatccgccgg

SEQ ID NO: 1120096 - DNA, 25 bp, Homo sapien
agggtgaatgaatgggaatccgccg

SEQ ID NO: 1120097 - DNA, 25 bp, Homo sapien
aagggtgaatgaatgggaatccgcc

SEQ ID NO: 1120098 - DNA, 25 bp, Homo sapien
actgatacgaccctggccacgagta

SEQ ID NO: 1120099 - DNA, 25 bp, Homo sapien
agcgccaggaggctcgtccaaggcc

SEQ ID NO: 1120100 - DNA, 25 bp, Homo sapien
ttttcgccactgacaggaagcgcca

SEQ ID NO: 1120101 - DNA, 25 bp, Homo sapien
caaggccccaagcaagttgacggag

SEQ ID NO: 1120102 - DNA, 25 bp, Homo sapien
cagccagcgggaccgcgtgggggag

SEQ ID NO: 1120103 - DNA, 25 bp, Homo sapien
cgcagtgggaaacggcgaggctgcc

SEQ ID NO: 1120104 - DNA, 25 bp, Homo sapien
caggcgcagtgggaaacggcgaggc

SEQ ID NO: 1120105 - DNA, 25 bp, Homo sapien
gggaaacggcgaggctgccagtccg

SEQ ID NO: 1120106 - DNA, 25 bp, Homo sapien
tgcagggagaatttcccggcttggg

SEQ ID NO: 1120107 - DNA, 25 bp, Homo sapien
ctatcagaaacaccggcagggggct

SEQ ID NO: 1120108 - DNA, 25 bp, Homo sapien
cagggagaatttcccggcttgggca

SEQ ID NO: 1120109 - DNA, 25 bp, Homo sapien
gctgcagggagaatttcccggcttg

SEQ ID NO: 1120110 - DNA, 25 bp, Homo sapien
gggttacatccacagggggagcaaa

SEQ ID NO: 1120111 - DNA, 25 bp, Homo sapien
aggggttacatccacagggggagca

SEQ ID NO: 1120112 - DNA, 25 bp, Homo sapien
tacatccacagggggagcaaagcag

SEQ ID NO: 1120113 - DNA, 25 bp, Homo sapien
ggttacatccacagggggagcaaag

SEQ ID NO: 1120114 - DNA, 25 bp, Homo sapien
cacaagccaattgagatgcaaaatg

SEQ ID NO: 1120115 - DNA, 25 bp, Homo sapien
aagccaattgagatgcaaaatgcca

SEQ ID NO: 1120116 - DNA, 25 bp, Homo sapien
agccaattgagatgcaaaatgccag

SEQ ID NO: 1120117 - DNA, 25 bp, Homo sapien
caagccaattgagatgcaaaatgcc

SEQ ID NO: 1120118 - DNA, 25 bp, Homo sapien
ccatctgaatccccaaagacgcctc

SEQ ID NO: 1120119 - DNA, 25 bp, Homo sapien
ggctcatccatctgaatccccaaag

SEQ ID NO: 1120120 - DNA, 25 bp, Homo sapien
tggctcatccatctgaatccccaaa

SEQ ID NO: 1120121 - DNA, 25 bp, Homo sapien
tctgaatccccaaagacgcctccat

SEQ ID NO: 1120122 - DNA, 25 bp, Homo sapien
taaagagccttcagcctgaaaccgg

SEQ ID NO: 1120123 - DNA, 25 bp, Homo sapien
ttcagcctgaaaccggtcacgctgg

SEQ ID NO: 1120124 - DNA, 25 bp, Homo sapien
tgcaagtttaaaattctgctcgttt

SEQ ID NO: 1120125 - DNA, 25 bp, Homo sapien
tttttaaagagccttcagcctgaaa

SEQ ID NO: 1120126 - DNA, 25 bp, Homo sapien
gacacattgcgatgttcttgaaaac

SEQ ID NO: 1120127 - DNA, 25 bp, Homo sapien
tagtatcctctatccttgactgcag

SEQ ID NO: 1120128 - DNA, 25 bp, Homo sapien
tagatggcatgacaaggacacattg

SEQ ID NO: 1120129 - DNA, 25 bp, Homo sapien
gaaggcctactaaagctctcaagca

SEQ ID NO: 1120130 - DNA, 25 bp, Homo sapien
aaacacattactaagctgtggtaca

SEQ ID NO: 1120131 - DNA, 25 bp, Homo sapien
tgtcctcaatcttaaacacattact

SEQ ID NO: 1120132 - DNA, 25 bp, Homo sapien
tgtggtacagcttcataaagcttct

SEQ ID NO: 1120133 - DNA, 25 bp, Homo sapien
ggtacagcttcataaagcttctcaa

SEQ ID NO: 1120134 - DNA, 25 bp, Homo sapien
tggccaaataaacagagctgaaagt

SEQ ID NO: 1120135 - DNA, 25 bp, Homo sapien
gccaaataaacagagctgaaagtgc

SEQ ID NO: 1120136 - DNA, 25 bp, Homo sapien
ggccaaataaacagagctgaaagtg

SEQ ID NO: 1120137 - DNA, 25 bp, Homo sapien
gccactgttaggcactgaagttcag

SEQ ID NO: 1120138 - DNA, 25 bp, Homo sapien
ccagccactgttaggcactgaagtt

SEQ ID NO: 1120139 - DNA, 25 bp, Homo sapien
tcagctgcaattcttataggatgac

SEQ ID NO: 1120140 - DNA, 25 bp, Homo sapien
cagccactgttaggcactgaagttc

SEQ ID NO: 1120141 - DNA, 25 bp, Homo sapien
cagatatggcatagcaataactaca

SEQ ID NO: 1120142 - DNA, 25 bp, Homo sapien
catgatcattcttcctaaagcagta

SEQ ID NO: 1120143 - DNA, 25 bp, Homo sapien
caaaaacgactcatgctccagatat

SEQ ID NO: 1120144 - DNA, 25 bp, Homo sapien
gcagtatttaactcccatgacatta

SEQ ID NO: 1120145 - DNA, 25 bp, Homo sapien
tgaaaggaaagagaattcagaatgt

SEQ ID NO: 1120146 - DNA, 25 bp, Homo sapien
gaaaggaaagagaattcagaatgtc

SEQ ID NO: 1120147 - DNA, 25 bp, Homo sapien
ttgaaaggaaagagaattcagaatg

SEQ ID NO: 1120148 - DNA, 25 bp, Homo sapien
cttgaaaggaaagagaattcagaat

SEQ ID NO: 1120149 - DNA, 25 bp, Homo sapien
cacggtgaacaataccaaactgatg

SEQ ID NO: 1120150 - DNA, 25 bp, Homo sapien
tgggcttaacatcacggtgaacaat

SEQ ID NO: 1120151 - DNA, 25 bp, Homo sapien
ttcaggcgcctattatataaaaaat

SEQ ID NO: 1120152 - DNA, 25 bp, Homo sapien
gaacagattaagcatatattcccgt

SEQ ID NO: 1120153 - DNA, 25 bp, Homo sapien
cgtatcatgggttccttgggccaaa

SEQ ID NO: 1120154 - DNA, 25 bp, Homo sapien
caaaccaaagtctaccaaggcatac

SEQ ID NO: 1120155 - DNA, 25 bp, Homo sapien
tattttcgtatcatgggttccttgg

SEQ ID NO: 1120156 - DNA, 25 bp, Homo sapien
gctgagcttcagactggacaaattt

SEQ ID NO: 1120157 - DNA, 25 bp, Homo sapien
tgtgtagggtcttttaacagaagct

SEQ ID NO: 1120158 - DNA, 25 bp, Homo sapien
ttgtgtagggtcttttaacagaagc

SEQ ID NO: 1120159 - DNA, 25 bp, Homo sapien
tagtattctatctccctctgttggt

SEQ ID NO: 1120160 - DNA, 25 bp, Homo sapien
atatttctaaaacagtgtcggtact

SEQ ID NO: 1120161 - DNA, 25 bp, Homo sapien
tatcctagtattctatctccctctg

SEQ ID NO: 1120162 - DNA, 25 bp, Homo sapien
tctaaaacagtgtcggtacttaaga

SEQ ID NO: 1120163 - DNA, 25 bp, Homo sapien
ggacagaaaggcctacagatccctc

SEQ ID NO: 1120164 - DNA, 25 bp, Homo sapien
tcactgcagggctctcatgtgaaat

SEQ ID NO: 1120165 - DNA, 25 bp, Homo sapien
agagcgctggacagaaaggcctaca

SEQ ID NO: 1120166 - DNA, 25 bp, Homo sapien
actgcagggctctcatgtgaaatgg

SEQ ID NO: 1120167 - DNA, 25 bp, Homo sapien
tgactgactgaccattatgctatta

SEQ ID NO: 1120168 - DNA, 25 bp, Homo sapien
tatgactgactgaccattatgctat

SEQ ID NO: 1120169 - DNA, 25 bp, Homo sapien
actgactgaccattatgctattaag

SEQ ID NO: 1120170 - DNA, 25 bp, Homo sapien
gtatgactgactgaccattatgcta

SEQ ID NO: 1120171 - DNA, 25 bp, Homo sapien
gacagtaatagctaaccaaaaatga

SEQ ID NO: 1120172 - DNA, 25 bp, Homo sapien
ctctagcaatgacagaaagccctta

SEQ ID NO: 1120173 - DNA, 25 bp, Homo sapien
gctgtcacaagatatcataagtcaa

SEQ ID NO: 1120174 - DNA, 25 bp, Homo sapien
tagctaactgtatggagctcacact

SEQ ID NO: 1120175 - DNA, 25 bp, Homo sapien
tatggcaaaaagcaatagcggaagc

SEQ ID NO: 1120176 - DNA, 25 bp, Homo sapien
aaaaactgctgaatggctattggac

SEQ ID NO: 1120177 - DNA, 25 bp, Homo sapien
tactaattagtcctagcttggccaa

SEQ ID NO: 1120178 - DNA, 25 bp, Homo sapien
tgtaaactgcacaagtacgttggct

SEQ ID NO: 1120179 - DNA, 25 bp, Homo sapien
tttttgttgctaactttctagacag

SEQ ID NO: 1120180 - DNA, 25 bp, Homo sapien
ccacagtctttgactgcttcatgag

SEQ ID NO: 1120181 - DNA, 25 bp, Homo sapien
tagctgggcaagaactggcagtttt

SEQ ID NO: 1120182 - DNA, 25 bp, Homo sapien
gctaactttctagacagtacatcca

SEQ ID NO: 1120183 - DNA, 25 bp, Homo sapien
cttgaaaggcaaatactacaaactt

SEQ ID NO: 1120184 - DNA, 25 bp, Homo sapien
tgaaaggcaaatactacaaacttta

SEQ ID NO: 1120185 - DNA, 25 bp, Homo sapien
tgccctaggggcaacctgctgacgc

SEQ ID NO: 1120186 - DNA, 25 bp, Homo sapien
cactttgtcaagacctctggtgctc

SEQ ID NO: 1120187 - DNA, 25 bp, Homo sapien
tcctggtgtacctgccctaggggca

SEQ ID NO: 1120188 - DNA, 25 bp, Homo sapien
tgtagtttgattggggcactttgtc

SEQ ID NO: 1120189 - DNA, 25 bp, Homo sapien
tcttagctcctttggtacctctgcc

SEQ ID NO: 1120190 - DNA, 25 bp, Homo sapien
ttcttagctcctttggtacctctgc

SEQ ID NO: 1120191 - DNA, 25 bp, Homo sapien
cttagctcctttggtacctctgcct

SEQ ID NO: 1120192 - DNA, 25 bp, Homo sapien
tttcttagctcctttggtacctctg

SEQ ID NO: 1120193 - DNA, 25 bp, Homo sapien
tttttctgagtacacagtaggtgta

SEQ ID NO: 1120194 - DNA, 25 bp, Homo sapien
gtgactgtgaagactttaatttttc

SEQ ID NO: 1120195 - DNA, 25 bp, Homo sapien
tgtaataatcacatcctggaaaaca

SEQ ID NO: 1120196 - DNA, 25 bp, Homo sapien
tcctggaaaacagggtatccattcc

SEQ ID NO: 1120197 - DNA, 25 bp, Homo sapien
taatttgggccaaagcagttaaatc

SEQ ID NO: 1120198 - DNA, 25 bp, Homo sapien
tatcgtccactaagcaaagaaagaa

SEQ ID NO: 1120199 - DNA, 25 bp, Homo sapien
ttgtcataatttgggccaaagcagt

SEQ ID NO: 1120200 - DNA, 25 bp, Homo sapien
tataaaatggatatcgtccactaag

SEQ ID NO: 1120201 - DNA, 25 bp, Homo sapien
ctggaacttctttgctacataatat

SEQ ID NO: 1120202 - DNA, 25 bp, Homo sapien
tcaagtcttgtgctggaacttcttt

SEQ ID NO: 1120203 - DNA, 25 bp, Homo sapien
caagtcttgtgctggaacttctttg

SEQ ID NO: 1120204 - DNA, 25 bp, Homo sapien
taacttgggagtgctagaatccata

SEQ ID NO: 1120205 - DNA, 25 bp, Homo sapien
ttgttaacttgggagtgctagaatc

SEQ ID NO: 1120206 - DNA, 25 bp, Homo sapien
gttaacttgggagtgctagaatcca

SEQ ID NO: 1120207 - DNA, 25 bp, Homo sapien
aacttgggagtgctagaatccatac

SEQ ID NO: 1120208 - DNA, 25 bp, Homo sapien
taaattggtattatactcatcaaaa

SEQ ID NO: 1120209 - DNA, 25 bp, Homo sapien
gtttgaacgaggcaagaagctttat

SEQ ID NO: 1120210 - DNA, 25 bp, Homo sapien
aatgctcacagctattactatcccc

SEQ ID NO: 1120211 - DNA, 25 bp, Homo sapien
ctgagtattgtcctggaggtgtttg

SEQ ID NO: 1120212 - DNA, 25 bp, Homo sapien
tctgctgttattcttgaagctggat

SEQ ID NO: 1120213 - DNA, 25 bp, Homo sapien
ctagaagtttatcaagcaggtcata

SEQ ID NO: 1120214 - DNA, 25 bp, Homo sapien
gcaggtcataagcttcatcaggtac

SEQ ID NO: 1120215 - DNA, 25 bp, Homo sapien
aatggatgcaacaaagcttcttctg

SEQ ID NO: 1120216 - DNA, 25 bp, Homo sapien
ttattctacctcataacagtaaaca

SEQ ID NO: 1120217 - DNA, 25 bp, Homo sapien
tttattctacctcataacagtaaac

SEQ ID NO: 1120218 - DNA, 25 bp, Homo sapien
ttttattctacctcataacagtaaa

SEQ ID NO: 1120219 - DNA, 25 bp, Homo sapien
taagtgatactttgccccatgacca

SEQ ID NO: 1120220 - DNA, 25 bp, Homo sapien
ctaaatgggaaatctgtcagctgac

SEQ ID NO: 1120221 - DNA, 25 bp, Homo sapien
tctggatggctctacgcagaggaaa

SEQ ID NO: 1120222 - DNA, 25 bp, Homo sapien
tcagcaccatgtaatttccgaggag

SEQ ID NO: 1120223 - DNA, 25 bp, Homo sapien
ttgcctgctggagtaacactggcat

SEQ ID NO: 1120224 - DNA, 25 bp, Homo sapien
tggttgcctgctggagtaacactgg

SEQ ID NO: 1120225 - DNA, 25 bp, Homo sapien
cctgctggagtaacactggcattct

SEQ ID NO: 1120226 - DNA, 25 bp, Homo sapien
aggatgtctgtcagaagcccattcc

SEQ ID NO: 1120227 - DNA, 25 bp, Homo sapien
tcattttctgatttgtactactcac

SEQ ID NO: 1120228 - DNA, 25 bp, Homo sapien
gaaggaaatcaatggatctttcatt

SEQ ID NO: 1120229 - DNA, 25 bp, Homo sapien
ttagaaggaaatcaatggatctttc

SEQ ID NO: 1120230 - DNA, 25 bp, Homo sapien
ttcattttctgatttgtactactca

SEQ ID NO: 1120231 - DNA, 25 bp, Homo sapien
tttttgggtcctgcagttgcaaacc

SEQ ID NO: 1120232 - DNA, 25 bp, Homo sapien
atttttgggtcctgcagttgcaaac

SEQ ID NO: 1120233 - DNA, 25 bp, Homo sapien
ctatttttgggtcctgcagttgcaa

SEQ ID NO: 1120234 - DNA, 25 bp, Homo sapien
tatttttgggtcctgcagttgcaaa

SEQ ID NO: 1120235 - DNA, 25 bp, Homo sapien
atgagctgtagctggctgatgtccc

SEQ ID NO: 1120236 - DNA, 25 bp, Homo sapien
tgagctgtagctggctgatgtccct

SEQ ID NO: 1120237 - DNA, 25 bp, Homo sapien
tcgaagcttctgtatcgccaacgtg

SEQ ID NO: 1120238 - DNA, 25 bp, Homo sapien
gccctaaaagcgaggtgatcacctt

SEQ ID NO: 1120239 - DNA, 25 bp, Homo sapien
gccaacgtgttctgcgaaaactcgg

SEQ ID NO: 1120240 - DNA, 25 bp, Homo sapien
tgatcaccttgagcagcaacgacga

SEQ ID NO: 1120241 - DNA, 25 bp, Homo sapien
acagtccaggcggaagaccgtcgtc

SEQ ID NO: 1120242 - DNA, 25 bp, Homo sapien
gaggtggcccaattgttggccgact

SEQ ID NO: 1120243 - DNA, 25 bp, Homo sapien
gaccgtcgtccaagcaggaggaaga

SEQ ID NO: 1120244 - DNA, 25 bp, Homo sapien
acaatgagcctgcaccgcgctggtt

SEQ ID NO: 1120245 - DNA, 25 bp, Homo sapien
cactttagaaacttctaaggaggag

SEQ ID NO: 1120246 - DNA, 25 bp, Homo sapien
aggatggcactgtgataggtcccca

SEQ ID NO: 1120247 - DNA, 25 bp, Homo sapien
gaaacttctaaggaggagccctgct

SEQ ID NO: 1120248 - DNA, 25 bp, Homo sapien
aggagccctgctggcattcaaggat

SEQ ID NO: 1120249 - DNA, 25 bp, Homo sapien
tctcattgtgttcgtggctggcgcc

SEQ ID NO: 1120250 - DNA, 25 bp, Homo sapien
gaagtttcttacatccaagtggcca

SEQ ID NO: 1120251 - DNA, 25 bp, Homo sapien
aaactgcgcggtgcctagaggtaca

SEQ ID NO: 1120252 - DNA, 25 bp, Homo sapien
ggtacaaacccgctgtgatcaggtg

SEQ ID NO: 1120253 - DNA, 25 bp, Homo sapien
gatggtcccgcgacacatcgtgtct

SEQ ID NO: 1120254 - DNA, 25 bp, Homo sapien
ccaggagtgctaccgcggtcatttc

SEQ ID NO: 1120255 - DNA, 25 bp, Homo sapien
catcgtgtctgcagctttagaggcc

SEQ ID NO: 1120256 - DNA, 25 bp, Homo sapien
ggcagctcccatgttgagcgcccag

SEQ ID NO: 1120257 - DNA, 25 bp, Homo sapien
taggaaggtcctccctgaaaataca

SEQ ID NO: 1120258 - DNA, 25 bp, Homo sapien
tgagaagtggaggtacctaggaagg

SEQ ID NO: 1120259 - DNA, 25 bp, Homo sapien
actgagaagtggaggtacctaggaa

SEQ ID NO: 1120260 - DNA, 25 bp, Homo sapien
tccctgaaaatacatcgggttgtaa

SEQ ID NO: 1120261 - DNA, 25 bp, Homo sapien
tccagcggattcgtggaaatggatg

SEQ ID NO: 1120262 - DNA, 25 bp, Homo sapien
gcgagtccagcggattcgtggaaat

SEQ ID NO: 1120263 - DNA, 25 bp, Homo sapien
aggagcgagtccagcggattcgtgg

SEQ ID NO: 1120264 - DNA, 25 bp, Homo sapien
agtccagcggattcgtggaaatgga

SEQ ID NO: 1120265 - DNA, 25 bp, Homo sapien
tgtgggacaagaactgaactaggca

SEQ ID NO: 1120266 - DNA, 25 bp, Homo sapien
ctgtgggacaagaactgaactaggc

SEQ ID NO: 1120267 - DNA, 25 bp, Homo sapien
tgtgtggcatacatgaggctttgtg

SEQ ID NO: 1120268 - DNA, 25 bp, Homo sapien
gtttagttgtgtggcatacatgagg

SEQ ID NO: 1120269 - DNA, 25 bp, Homo sapien
ggcattgggagtgtagcagctcttc

SEQ ID NO: 1120270 - DNA, 25 bp, Homo sapien
tccaaagagccactctagagttttc

SEQ ID NO: 1120271 - DNA, 25 bp, Homo sapien
ccactttatttcaagggcagccaac

SEQ ID NO: 1120272 - DNA, 25 bp, Homo sapien
agggcagccaacttcagggccttaa

SEQ ID NO: 1120273 - DNA, 25 bp, Homo sapien
gatgccacaaatacaggattgttca

SEQ ID NO: 1120274 - DNA, 25 bp, Homo sapien
ccaagctggcccacaaatgcaggtt

SEQ ID NO: 1120275 - DNA, 25 bp, Homo sapien
aaagccttgaactaacatcatctga

SEQ ID NO: 1120276 - DNA, 25 bp, Homo sapien
aggctcaagtgggcactttccacag

SEQ ID NO: 1120277 - DNA, 25 bp, Homo sapien
gctcaagtgggcactttccacagcc

SEQ ID NO: 1120278 - DNA, 25 bp, Homo sapien
tgaaggctcaagtgggcactttcca

SEQ ID NO: 1120279 - DNA, 25 bp, Homo sapien
aaattcatctacttctgtgtttttg

SEQ ID NO: 1120280 - DNA, 25 bp, Homo sapien
tttttcatggagagtgcgagtgtgg

SEQ ID NO: 1120281 - DNA, 25 bp, Homo sapien
tcagataagaaatctgtgactctgt

SEQ ID NO: 1120282 - DNA, 25 bp, Homo sapien
gaatccccaggaagttctgtcagat

SEQ ID NO: 1120283 - DNA, 25 bp, Homo sapien
tactgcagttgggaattttctctcc

SEQ ID NO: 1120284 - DNA, 25 bp, Homo sapien
gagtttgcccacatgtgaccggatc

SEQ ID NO: 1120285 - DNA, 25 bp, Homo sapien
ggccaagttcctcgattcaccgtac

SEQ ID NO: 1120286 - DNA, 25 bp, Homo sapien
caaggactcctatctccctgagttt

SEQ ID NO: 1120287 - DNA, 25 bp, Homo sapien
tgttctttacacgtcttattcaggg

SEQ ID NO: 1120288 - DNA, 25 bp, Homo sapien
ccgtattgggtgtagttgccatgtc

SEQ ID NO: 1120289 - DNA, 25 bp, Homo sapien
cgtattgggtgtagttgccatgtca

SEQ ID NO: 1120290 - DNA, 25 bp, Homo sapien
tattgggtgtagttgccatgtcaac

SEQ ID NO: 1120291 - DNA, 25 bp, Homo sapien
aagccgtattgggtgtagttgccat

SEQ ID NO: 1120292 - DNA, 25 bp, Homo sapien
cttttgggcagcctgccctgagtgg

SEQ ID NO: 1120293 - DNA, 25 bp, Homo sapien
gccctgggctccttttgggcagcct

SEQ ID NO: 1120294 - DNA, 25 bp, Homo sapien
ttgagggccaggcaagagatcctgc

SEQ ID NO: 1120295 - DNA, 25 bp, Homo sapien
ggccaggcaagagatcctgccagcc

SEQ ID NO: 1120296 - DNA, 25 bp, Homo sapien
ggatcaaatctaagcaggacgtgag

SEQ ID NO: 1120297 - DNA, 25 bp, Homo sapien
gcagcttgagcagccaaaggatcaa

SEQ ID NO: 1120298 - DNA, 25 bp, Homo sapien
cttagacttgtcctcgttggcagcc

SEQ ID NO: 1120299 - DNA, 25 bp, Homo sapien
taagcaggacgtgagatgtacttcc

SEQ ID NO: 1120300 - DNA, 25 bp, Homo sapien
gtacctttgcagacataggttccat

SEQ ID NO: 1120301 - DNA, 25 bp, Homo sapien
gagcccttgtttttgaggtccactc

SEQ ID NO: 1120302 - DNA, 25 bp, Homo sapien
ctggggtttccaataacaaagcctg

SEQ ID NO: 1120303 - DNA, 25 bp, Homo sapien
cactccggtctgaggcgctgcctgt

SEQ ID NO: 1120304 - DNA, 25 bp, Homo sapien
tatgggagggcagctttgtaaagcc

SEQ ID NO: 1120305 - DNA, 25 bp, Homo sapien
atttggaccctctcgaccctcagag

SEQ ID NO: 1120306 - DNA, 25 bp, Homo sapien
aacgcaaagccctgcataactcctg

SEQ ID NO: 1120307 - DNA, 25 bp, Homo sapien
cctcctctggacaatgagtgcccat

SEQ ID NO: 1120308 - DNA, 25 bp, Homo sapien
ttctttggaaaggtgcagtgcgttc

SEQ ID NO: 1120309 - DNA, 25 bp, Homo sapien
tctttggaaaggtgcagtgcgttcc

SEQ ID NO: 1120310 - DNA, 25 bp, Homo sapien
ctcttctttggaaaggtgcagtgcg

SEQ ID NO: 1120311 - DNA, 25 bp, Homo sapien
tttggaaaggtgcagtgcgttcctt

SEQ ID NO: 1120312 - DNA, 25 bp, Homo sapien
gcctagagccgaatttatcatccac

SEQ ID NO: 1120313 - DNA, 25 bp, Homo sapien
aacgcttgtaagagggccagaaaca

SEQ ID NO: 1120314 - DNA, 25 bp, Homo sapien
acataatttggcttccagcctagag

SEQ ID NO: 1120315 - DNA, 25 bp, Homo sapien
ttgtcctgccaacctctggtacctg

SEQ ID NO: 1120316 - DNA, 25 bp, Homo sapien
ccagatcctcataaagcagctcaaa

SEQ ID NO: 1120317 - DNA, 25 bp, Homo sapien
aatatttgccgtccaacgaagcatg

SEQ ID NO: 1120318 - DNA, 25 bp, Homo sapien
tagacgtgactgaggattgggaacc

SEQ ID NO: 1120319 - DNA, 25 bp, Homo sapien
cagggcctggtatgagtaattaact

SEQ ID NO: 1120320 - DNA, 25 bp, Homo sapien
cctttgagtacagccttcgggagct

SEQ ID NO: 1120321 - DNA, 25 bp, Homo sapien
ccatccctttgagtacagccttcgg

SEQ ID NO: 1120322 - DNA, 25 bp, Homo sapien
tccctttgagtacagccttcgggag

SEQ ID NO: 1120323 - DNA, 25 bp, Homo sapien
acctcccatccctttgagtacagcc

SEQ ID NO: 1120324 - DNA, 25 bp, Homo sapien
tctgatgcatcttcactgtgaccat

SEQ ID NO: 1120325 - DNA, 25 bp, Homo sapien
ccgtcttctgatgcatcttcactgt

SEQ ID NO: 1120326 - DNA, 25 bp, Homo sapien
ctccgtcttctgatgcatcttcact

SEQ ID NO: 1120327 - DNA, 25 bp, Homo sapien
cttctgatgcatcttcactgtgacc

SEQ ID NO: 1120328 - DNA, 25 bp, Homo sapien
gttgacctgataaggtgccttcacc

SEQ ID NO: 1120329 - DNA, 25 bp, Homo sapien
ttggttgacctgataaggtgccttc

SEQ ID NO: 1120330 - DNA, 25 bp, Homo sapien
ggttgacctgataaggtgccttcac

SEQ ID NO: 1120331 - DNA, 25 bp, Homo sapien
tctttggttgacctgataaggtgcc

SEQ ID NO: 1120332 - DNA, 25 bp, Homo sapien
tctccttcgatctcacataactgtg

SEQ ID NO: 1120333 - DNA, 25 bp, Homo sapien
acagtgtcaaagcttggctctcctt

SEQ ID NO: 1120334 - DNA, 25 bp, Homo sapien
gctctccttcgatctcacataactg

SEQ ID NO: 1120335 - DNA, 25 bp, Homo sapien
ttggctctccttcgatctcacataa

SEQ ID NO: 1120336 - DNA, 25 bp, Homo sapien
tgctgagcagccttcggtcaagctt

SEQ ID NO: 1120337 - DNA, 25 bp, Homo sapien
gcttccatggtcagcctttgctccg

SEQ ID NO: 1120338 - DNA, 25 bp, Homo sapien
tcggtcaagcttccatggtcagcct

SEQ ID NO: 1120339 - DNA, 25 bp, Homo sapien
gcagccttcggtcaagcttccatgg

SEQ ID NO: 1120340 - DNA, 25 bp, Homo sapien
ggaggtcaggaattgccgggggcac

SEQ ID NO: 1120341 - DNA, 25 bp, Homo sapien
ctaggcaaagccttcaagctgcttg

SEQ ID NO: 1120342 - DNA, 25 bp, Homo sapien
tgcttgggggaggtcaggaattgcc

SEQ ID NO: 1120343 - DNA, 25 bp, Homo sapien
aggcaaagccttcaagctgcttggg

SEQ ID NO: 1120344 - DNA, 25 bp, Homo sapien
tagattcccactcagtctgtctggc

SEQ ID NO: 1120345 - DNA, 25 bp, Homo sapien
taactgagcttgcactgtgagccag

SEQ ID NO: 1120346 - DNA, 25 bp, Homo sapien
agtctgtctggcaccaatgtttgca

SEQ ID NO: 1120347 - DNA, 25 bp, Homo sapien
gagaaccccaggaagaacagatgca

SEQ ID NO: 1120348 - DNA, 25 bp, Homo sapien
cttattactgatatggagaaattta

SEQ ID NO: 1120349 - DNA, 25 bp, Homo sapien
taatccaaaacaagctcctaactct

SEQ ID NO: 1120350 - DNA, 25 bp, Homo sapien
accaagttgtgattgcaaagaaaag

SEQ ID NO: 1120351 - DNA, 25 bp, Homo sapien
gagaaatttaagtggtctggataaa

SEQ ID NO: 1120352 - DNA, 25 bp, Homo sapien
actggggaacaggacgattttgctt

SEQ ID NO: 1120353 - DNA, 25 bp, Homo sapien
atccactggggaacaggacgatttt

SEQ ID NO: 1120354 - DNA, 25 bp, Homo sapien
tcatctgaatccactggggaacagg

SEQ ID NO: 1120355 - DNA, 25 bp, Homo sapien
ctgaatccactggggaacaggacga

SEQ ID NO: 1120356 - DNA, 25 bp, Homo sapien
gcatcaatcaccaccagcggtgaca

SEQ ID NO: 1120357 - DNA, 25 bp, Homo sapien
caagcgaggacaggggcatcaatca

SEQ ID NO: 1120358 - DNA, 25 bp, Homo sapien
aagcagcaacggcagggaatgagca

SEQ ID NO: 1120359 - DNA, 25 bp, Homo sapien
agcggtgacaccgtcccagttcctc

SEQ ID NO: 1120360 - DNA, 25 bp, Homo sapien
aaggtgggaagtgcgagagaggaag

SEQ ID NO: 1120361 - DNA, 25 bp, Homo sapien
attcctgggaatctcagacttagaa

SEQ ID NO: 1120362 - DNA, 25 bp, Homo sapien
tgggaagtgcgagagaggaagatgc

SEQ ID NO: 1120363 - DNA, 25 bp, Homo sapien
ggtgggaagtgcgagagaggaagat

SEQ ID NO: 1120364 - DNA, 25 bp, Homo sapien
ccagagagacaaaacatgagaccca

SEQ ID NO: 1120365 - DNA, 25 bp, Homo sapien
agggcatgtaggcttcctgctggtt

SEQ ID NO: 1120366 - DNA, 25 bp, Homo sapien
atgggttccaggcatctcacatcag

SEQ ID NO: 1120367 - DNA, 25 bp, Homo sapien
tctctaagatgttcgacctttaggg

SEQ ID NO: 1120368 - DNA, 25 bp, Homo sapien
aaggcaggctggacaaggagttgca

SEQ ID NO: 1120369 - DNA, 25 bp, Homo sapien
agatgatggcacatggcctgaaaga

SEQ ID NO: 1120370 - DNA, 25 bp, Homo sapien
atgatggcacatggcctgaaagatg

SEQ ID NO: 1120371 - DNA, 25 bp, Homo sapien
acgaaccccaaaggcaggctggaca

SEQ ID NO: 1120372 - DNA, 25 bp, Homo sapien
tagccggtccatattcagggacaag

SEQ ID NO: 1120373 - DNA, 25 bp, Homo sapien
aatcaagtgctgctgacgtgagctg

SEQ ID NO: 1120374 - DNA, 25 bp, Homo sapien
gcccagggattgcagtccaaggatt

SEQ ID NO: 1120375 - DNA, 25 bp, Homo sapien
acacatgttgttcataagggcagca

SEQ ID NO: 1120376 - DNA, 25 bp, Homo sapien
ccgtagctgagttctgttctgccca

SEQ ID NO: 1120377 - DNA, 25 bp, Homo sapien
tactgagctctggaactttaagtcc

SEQ ID NO: 1120378 - DNA, 25 bp, Homo sapien
tcttttcagcgactcagccataggc

SEQ ID NO: 1120379 - DNA, 25 bp, Homo sapien
gaatctgaaacgctgctctgggtga

SEQ ID NO: 1120380 - DNA, 25 bp, Homo sapien
taggatttaaggactgaacttgaag

SEQ ID NO: 1120381 - DNA, 25 bp, Homo sapien
cctcaggttcaaataggatttaagg

SEQ ID NO: 1120382 - DNA, 25 bp, Homo sapien
aacagccttagcaaggacctcaggt

SEQ ID NO: 1120383 - DNA, 25 bp, Homo sapien
aggacctcaggttcaaataggattt

SEQ ID NO: 1120384 - DNA, 25 bp, Homo sapien
tgggtccgcaggctcaacccagcca

SEQ ID NO: 1120385 - DNA, 25 bp, Homo sapien
gggtccgcaggctcaacccagccac

SEQ ID NO: 1120386 - DNA, 25 bp, Homo sapien
gtccgcaggctcaacccagccacca

SEQ ID NO: 1120387 - DNA, 25 bp, Homo sapien
ggtccgcaggctcaacccagccacc

SEQ ID NO: 1120388 - DNA, 25 bp, Homo sapien
tcaccagcattttgccgtttacatg

SEQ ID NO: 1120389 - DNA, 25 bp, Homo sapien
tccattccaggtagcacagtattca

SEQ ID NO: 1120390 - DNA, 25 bp, Homo sapien
tagcaccttgcaaatctccattcca

SEQ ID NO: 1120391 - DNA, 25 bp, Homo sapien
tgacacaagttatagccaaaaaagg

SEQ ID NO: 1120392 - DNA, 25 bp, Homo sapien
gatatcattcataagttcccagtct

SEQ ID NO: 1120393 - DNA, 25 bp, Homo sapien
ttcccagtctcagacagtgttttca

SEQ ID NO: 1120394 - DNA, 25 bp, Homo sapien
ggtctctgccatactggtttgatat

SEQ ID NO: 1120395 - DNA, 25 bp, Homo sapien
ataagttcccagtctcagacagtgt

SEQ ID NO: 1120396 - DNA, 25 bp, Homo sapien
tgaaaatgatttgtaaaaagctttg

SEQ ID NO: 1120397 - DNA, 25 bp, Homo sapien
gatttgtaaaaagctttgtattcat

SEQ ID NO: 1120398 - DNA, 25 bp, Homo sapien
atgatttgtaaaaagctttgtattc

SEQ ID NO: 1120399 - DNA, 25 bp, Homo sapien
aaatgatttgtaaaaagctttgtat

SEQ ID NO: 1120400 - DNA, 25 bp, Homo sapien
aatataagccatggggtcatcactt

SEQ ID NO: 1120401 - DNA, 25 bp, Homo sapien
gaatataagccatggggtcatcact

SEQ ID NO: 1120402 - DNA, 25 bp, Homo sapien
taatgtaatcactctttttagatcc

SEQ ID NO: 1120403 - DNA, 25 bp, Homo sapien
aatgtaatcactctttttagatcca

SEQ ID NO: 1120404 - DNA, 25 bp, Homo sapien
tctttttagatccatattcatcaaa

SEQ ID NO: 1120405 - DNA, 25 bp, Homo sapien
tcactctttttagatccatattcat

SEQ ID NO: 1120406 - DNA, 25 bp, Homo sapien
tgatgaatacacagagcacatacag

SEQ ID NO: 1120407 - DNA, 25 bp, Homo sapien
tgtgatgaatacacagagcacatac

SEQ ID NO: 1120408 - DNA, 25 bp, Homo sapien
ctgtgatgaatacacagagcacata

SEQ ID NO: 1120409 - DNA, 25 bp, Homo sapien
gtgatgaatacacagagcacataca

SEQ ID NO: 1120410 - DNA, 25 bp, Homo sapien
acaaaattaaggtacttaggcatca

SEQ ID NO: 1120411 - DNA, 25 bp, Homo sapien
ggtacttaggcatcatatcatggaa

SEQ ID NO: 1120412 - DNA, 25 bp, Homo sapien
cttaggcatcatatcatggaattca

SEQ ID NO: 1120413 - DNA, 25 bp, Homo sapien
aattaaggtacttaggcatcatatc

SEQ ID NO: 1120414 - DNA, 25 bp, Homo sapien
gggaaacattcaaggggagatcatc

SEQ ID NO: 1120415 - DNA, 25 bp, Homo sapien
ggaaacattcaaggggagatcatct

SEQ ID NO: 1120416 - DNA, 25 bp, Homo sapien
tagcaagacatgtttgattggagtg

SEQ ID NO: 1120417 - DNA, 25 bp, Homo sapien
gatcttgtccagagttttacaaaca

SEQ ID NO: 1120418 - DNA, 25 bp, Homo sapien
tctagtgtagtaatgtcagttggat

SEQ ID NO: 1120419 - DNA, 25 bp, Homo sapien
ctttccacatactggtctagtgtag

SEQ ID NO: 1120420 - DNA, 25 bp, Homo sapien
cttttatcaaacttcattccttcct

SEQ ID NO: 1120421 - DNA, 25 bp, Homo sapien
aatttgcagagctgtccttgctcgt

SEQ ID NO: 1120422 - DNA, 25 bp, Homo sapien
tcagaagtcgttcaacagatggagg

SEQ ID NO: 1120423 - DNA, 25 bp, Homo sapien
cagagctgtccttgctcgtttggta

SEQ ID NO: 1120424 - DNA, 25 bp, Homo sapien
aaagcatgtctctgatcagtgggtg

SEQ ID NO: 1120425 - DNA, 25 bp, Homo sapien
tcaaagcatgtctctgatcagtggg

SEQ ID NO: 1120426 - DNA, 25 bp, Homo sapien
gcatgtctctgatcagtgggtgtct

SEQ ID NO: 1120427 - DNA, 25 bp, Homo sapien
tctctgatcagtgggtgtctgggat

SEQ ID NO: 1120428 - DNA, 25 bp, Homo sapien
catacatgaggagtgttaaagaaat

SEQ ID NO: 1120429 - DNA, 25 bp, Homo sapien
gacttaaattccacattcgctctcc

SEQ ID NO: 1120430 - DNA, 25 bp, Homo sapien
tgttcaaactgagcgaaggattctt

SEQ ID NO: 1120431 - DNA, 25 bp, Homo sapien
gttttacatcaagaatggtcagttt

SEQ ID NO: 1120432 - DNA, 25 bp, Homo sapien
actctgacttgatccctgatgcata

SEQ ID NO: 1120433 - DNA, 25 bp, Homo sapien
ggacagtcagttggacctatctgca

SEQ ID NO: 1120434 - DNA, 25 bp, Homo sapien
aaagcccatctttggaatgcaggcc

SEQ ID NO: 1120435 - DNA, 25 bp, Homo sapien
gatgcatattggccccttcttcctg

SEQ ID NO: 1120436 - DNA, 25 bp, Homo sapien
cctcacaagaaacctgccaggccat

SEQ ID NO: 1120437 - DNA, 25 bp, Homo sapien
aaaaacctcacaagaaacctgccag

SEQ ID NO: 1120438 - DNA, 25 bp, Homo sapien
caaaaacctcacaagaaacctgcca

SEQ ID NO: 1120439 - DNA, 25 bp, Homo sapien
aaacctcacaagaaacctgccaggc

SEQ ID NO: 1120440 - DNA, 25 bp, Homo sapien
tgataagtacagcaactgcagaaga

SEQ ID NO: 1120441 - DNA, 25 bp, Homo sapien
taagtacagcaactgcagaagagac

SEQ ID NO: 1120442 - DNA, 25 bp, Homo sapien
gataagtacagcaactgcagaagag

SEQ ID NO: 1120443 - DNA, 25 bp, Homo sapien
aagtacagcaactgcagaagagact

SEQ ID NO: 1120444 - DNA, 25 bp, Homo sapien
atccctgtggccagtttgaacaccc

SEQ ID NO: 1120445 - DNA, 25 bp, Homo sapien
caggctacacccttaatttgcagag

SEQ ID NO: 1120446 - DNA, 25 bp, Homo sapien
gaagctgttgttaaaatgccccaaa

SEQ ID NO: 1120447 - DNA, 25 bp, Homo sapien
catctatgagggtaaaacgagtacc

SEQ ID NO: 1120448 - DNA, 25 bp, Homo sapien
tagattacgctacctgtgtttgaaa

SEQ ID NO: 1120449 - DNA, 25 bp, Homo sapien
cagctactgtgaattctttcgatca

SEQ ID NO: 1120450 - DNA, 25 bp, Homo sapien
tgcgctttgcctaaccttcggtgga

SEQ ID NO: 1120451 - DNA, 25 bp, Homo sapien
tcagagtggaggacctagattacgc

SEQ ID NO: 1120452 - DNA, 25 bp, Homo sapien
caaaaagggcttgaggtgaatttca

SEQ ID NO: 1120453 - DNA, 25 bp, Homo sapien
gaatagtgtcaccaattccaccaag

SEQ ID NO: 1120454 - DNA, 25 bp, Homo sapien
tgctgagattggaaaagggcactca

SEQ ID NO: 1120455 - DNA, 25 bp, Homo sapien
gcaaatgcatggcaaatcctgtcgg

SEQ ID NO: 1120456 - DNA, 25 bp, Homo sapien
tggatgcacacttctgaccttgctg

SEQ ID NO: 1120457 - DNA, 25 bp, Homo sapien
gggactgcaccctgacaagtgttaa

SEQ ID NO: 1120458 - DNA, 25 bp, Homo sapien
gatgtgtcccttgatgggtgctgcc

SEQ ID NO: 1120459 - DNA, 25 bp, Homo sapien
taatagccagatagtagaaccagtg

SEQ ID NO: 1120460 - DNA, 25 bp, Homo sapien
ttggaagttgatccaagagaggcat

SEQ ID NO: 1120461 - DNA, 25 bp, Homo sapien
aaaatactctaaaggaccagccagg

SEQ ID NO: 1120462 - DNA, 25 bp, Homo sapien
cagggcattcattctctatccaaga

SEQ ID NO: 1120463 - DNA, 25 bp, Homo sapien
gcttaattgacagaccagggcattc

SEQ ID NO: 1120464 - DNA, 25 bp, Homo sapien
gtgctgtcaagtgtagtcacgatca

SEQ ID NO: 1120465 - DNA, 25 bp, Homo sapien
tgctgtcaagtgtagtcacgatcat

SEQ ID NO: 1120466 - DNA, 25 bp, Homo sapien
cgctttccgctctgaaaaacgtact

SEQ ID NO: 1120467 - DNA, 25 bp, Homo sapien
tgtgacatcccgctttccgctctga

SEQ ID NO: 1120468 - DNA, 25 bp, Homo sapien
gacatcccgctttccgctctgaaaa

SEQ ID NO: 1120469 - DNA, 25 bp, Homo sapien
gctctgaaaaacgtactctgtgtat

SEQ ID NO: 1120470 - DNA, 25 bp, Homo sapien
ctcagccctgagtgtatgaagctta

SEQ ID NO: 1120471 - DNA, 25 bp, Homo sapien
gagtggcagttaactccagttccaa

SEQ ID NO: 1120472 - DNA, 25 bp, Homo sapien
tcaggacacaattcggagttgccgt

SEQ ID NO: 1120473 - DNA, 25 bp, Homo sapien
gaagcttattgctgctggcccgtga

SEQ ID NO: 1120474 - DNA, 25 bp, Homo sapien
gataacgtttccatgggagatgaga

SEQ ID NO: 1120475 - DNA, 25 bp, Homo sapien
tgttctgataacgtttccatgggag

SEQ ID NO: 1120476 - DNA, 25 bp, Homo sapien
tgtactgttgttctgataacgtttc

SEQ ID NO: 1120477 - DNA, 25 bp, Homo sapien
tgttgttctgataacgtttccatgg

SEQ ID NO: 1120478 - DNA, 25 bp, Homo sapien
ttccgttcctctccactctgaccag

SEQ ID NO: 1120479 - DNA, 25 bp, Homo sapien
tgtcccttccattccgttcctctcc

SEQ ID NO: 1120480 - DNA, 25 bp, Homo sapien
tatttcgttgctttaactgtttcat

SEQ ID NO: 1120481 - DNA, 25 bp, Homo sapien
gtctgtcccttccattccgttcctc

SEQ ID NO: 1120482 - DNA, 25 bp, Homo sapien
taaaatacctagtccagaggccttg

SEQ ID NO: 1120483 - DNA, 25 bp, Homo sapien
ggccttggccagcttacttatgtca

SEQ ID NO: 1120484 - DNA, 25 bp, Homo sapien
caagatgagaccctagtgcctggct

SEQ ID NO: 1120485 - DNA, 25 bp, Homo sapien
gcattctctcctgcaaggtctgtag

SEQ ID NO: 1120486 - DNA, 25 bp, Homo sapien
taatattgtattggtaggtcttgcc

SEQ ID NO: 1120487 - DNA, 25 bp, Homo sapien
ttaagagggcatctcagaaagacat

SEQ ID NO: 1120488 - DNA, 25 bp, Homo sapien
caggatcttacattaggaggaaggc

SEQ ID NO: 1120489 - DNA, 25 bp, Homo sapien
tagataagaggcttaattcagctca

SEQ ID NO: 1120490 - DNA, 25 bp, Homo sapien
gccaccagccctaacagaatgctca

SEQ ID NO: 1120491 - DNA, 25 bp, Homo sapien
gcccagagcatgccacatgcaatgc

SEQ ID NO: 1120492 - DNA, 25 bp, Homo sapien
cccagagcatgccacatgcaatgca

SEQ ID NO: 1120493 - DNA, 25 bp, Homo sapien
agccctaacagaatgctcaccaggc

SEQ ID NO: 1120494 - DNA, 25 bp, Homo sapien
tggttctgaaccacagcaactgagc

SEQ ID NO: 1120495 - DNA, 25 bp, Homo sapien
aaaaaccaggtccacagcttctcag

SEQ ID NO: 1120496 - DNA, 25 bp, Homo sapien
aactgagccgagcacaatccttctg

SEQ ID NO: 1120497 - DNA, 25 bp, Homo sapien
gcactgcttgatgggcctgtaactg

SEQ ID NO: 1120498 - DNA, 25 bp, Homo sapien
tatctgatttctatgaacagtgctt

SEQ ID NO: 1120499 - DNA, 25 bp, Homo sapien
agtgcttgctggcactgactcaaga

SEQ ID NO: 1120500 - DNA, 25 bp, Homo sapien
ttgctggcactgactcaagaaagaa

SEQ ID NO: 1120501 - DNA, 25 bp, Homo sapien
agtatctgatttctatgaacagtgc

SEQ ID NO: 1120502 - DNA, 25 bp, Homo sapien
tgagtagtgtataaagtgtaacatt

SEQ ID NO: 1120503 - DNA, 25 bp, Homo sapien
ctatgagtagtgtataaagtgtaac

SEQ ID NO: 1120504 - DNA, 25 bp, Homo sapien
ctctatgagtagtgtataaagtgta

SEQ ID NO: 1120505 - DNA, 25 bp, Homo sapien
aggtccacggggaatcctgaaggct

SEQ ID NO: 1120506 - DNA, 25 bp, Homo sapien
tagcatcacccctaccttaggtaag

SEQ ID NO: 1120507 - DNA, 25 bp, Homo sapien
tcagagttcctctcgtgtctccaac

SEQ ID NO: 1120508 - DNA, 25 bp, Homo sapien
ttgtgtcaacctcatagaaggatgg

SEQ ID NO: 1120509 - DNA, 25 bp, Homo sapien
tagatacaccctttttgatgaacat

SEQ ID NO: 1120510 - DNA, 25 bp, Homo sapien
ggtccgtagagttgctgaccacaga

SEQ ID NO: 1120511 - DNA, 25 bp, Homo sapien
cccaggtccgtagagttgctgacca

SEQ ID NO: 1120512 - DNA, 25 bp, Homo sapien
ggccccaggtccgtagagttgctga

SEQ ID NO: 1120513 - DNA, 25 bp, Homo sapien
aggcaaggccccaggtccgtagagt

SEQ ID NO: 1120514 - DNA, 25 bp, Homo sapien
ttactggcatagggtcatcttcagc

SEQ ID NO: 1120515 - DNA, 25 bp, Homo sapien
ggatgtgctggtgcttaggaatggc

SEQ ID NO: 1120516 - DNA, 25 bp, Homo sapien
ctgtcaggagccatcggtttgctcc

SEQ ID NO: 1120517 - DNA, 25 bp, Homo sapien
cggtttgctccttcaaacaggaagg

SEQ ID NO: 1120518 - DNA, 25 bp, Homo sapien
taaccaagataatgttccggacagt

SEQ ID NO: 1120519 - DNA, 25 bp, Homo sapien
caagataatgttccggacagtctgc

SEQ ID NO: 1120520 - DNA, 25 bp, Homo sapien
gatgattaaccaagataatgttccg

SEQ ID NO: 1120521 - DNA, 25 bp, Homo sapien
tgttccggacagtctgcagctgaac

SEQ ID NO: 1120522 - DNA, 25 bp, Homo sapien
tggtatgactgcagctcccgttgac

SEQ ID NO: 1120523 - DNA, 25 bp, Homo sapien
taaagtactggctggtatgactgca

SEQ ID NO: 1120524 - DNA, 25 bp, Homo sapien
ctgaaatcacttgtgtatctggcag

SEQ ID NO: 1120525 - DNA, 25 bp, Homo sapien
gggcagactcccatataaagtactg

SEQ ID NO: 1120526 - DNA, 25 bp, Homo sapien
tgccccagaccgagatctgtcaggg

SEQ ID NO: 1120527 - DNA, 25 bp, Homo sapien
gtgccccagaccgagatctgtcagg

SEQ ID NO: 1120528 - DNA, 25 bp, Homo sapien
tcctgtgccccagaccgagatctgt

SEQ ID NO: 1120529 - DNA, 25 bp, Homo sapien
ctgtgccccagaccgagatctgtca

SEQ ID NO: 1120530 - DNA, 25 bp, Homo sapien
aaagcgtctgatcggcacacagggt

SEQ ID NO: 1120531 - DNA, 25 bp, Homo sapien
tctggggactgttgaagccacaagg

SEQ ID NO: 1120532 - DNA, 25 bp, Homo sapien
gaggaagttgctactccttatgccc

SEQ ID NO: 1120533 - DNA, 25 bp, Homo sapien
gtgagagccgtttcccacctaagtg

SEQ ID NO: 1120534 - DNA, 25 bp, Homo sapien
tccttgtagtggtttagttggttca

SEQ ID NO: 1120535 - DNA, 25 bp, Homo sapien
gcgaattagggacctttcatttcca

SEQ ID NO: 1120536 - DNA, 25 bp, Homo sapien
ctttgagttacactgcgaattaggg

SEQ ID NO: 1120537 - DNA, 25 bp, Homo sapien
tagttggttcatggttgataaagac

SEQ ID NO: 1120538 - DNA, 25 bp, Homo sapien
gaagagacccttgcacaatagtaaa

SEQ ID NO: 1120539 - DNA, 25 bp, Homo sapien
aaagtgcggccaataatagtgtatc

SEQ ID NO: 1120540 - DNA, 25 bp, Homo sapien
tgcgtgaccccgattcagagttttc

SEQ ID NO: 1120541 - DNA, 25 bp, Homo sapien
cctgctgtctggtttggcttaatca

SEQ ID NO: 1120542 - DNA, 25 bp, Homo sapien
cctactgtcgcctgggctggagtgc

SEQ ID NO: 1120543 - DNA, 25 bp, Homo sapien
ggagtctcctactgtcgcctgggct

SEQ ID NO: 1120544 - DNA, 25 bp, Homo sapien
caattgcgttttggaattgggccaa

SEQ ID NO: 1120545 - DNA, 25 bp, Homo sapien
taaactgccagtgtactgctctagg

SEQ ID NO: 1120546 - DNA, 25 bp, Homo sapien
gctctaggctctccgtgagggagct

SEQ ID NO: 1120547 - DNA, 25 bp, Homo sapien
ggagaagtgcttgtggctatattgt

SEQ ID NO: 1120548 - DNA, 25 bp, Homo sapien
aattgttagattatttgcaaagccc

SEQ ID NO: 1120549 - DNA, 25 bp, Homo sapien
tgttagattatttgcaaagcccatg

SEQ ID NO: 1120550 - DNA, 25 bp, Homo sapien
agattatttgcaaagcccatgctga

SEQ ID NO: 1120551 - DNA, 25 bp, Homo sapien
ctaattaattgttagattatttgca

SEQ ID NO: 1120552 - DNA, 25 bp, Homo sapien
gactcttcggtaatgagaggtgata

SEQ ID NO: 1120553 - DNA, 25 bp, Homo sapien
caaggtaggagattcgtgttgggtc

SEQ ID NO: 1120554 - DNA, 25 bp, Homo sapien
cattggtcccggaacctgtggccaa

SEQ ID NO: 1120555 - DNA, 25 bp, Homo sapien
ggtcattggtcccggaacctgtggc

SEQ ID NO: 1120556 - DNA, 25 bp, Homo sapien
aggcgcatgattggcccatcccgca

SEQ ID NO: 1120557 - DNA, 25 bp, Homo sapien
caccgaggcgcatgattggcccatc

SEQ ID NO: 1120558 - DNA, 25 bp, Homo sapien
ctgctcagcaccgaggcgcatgatt

SEQ ID NO: 1120559 - DNA, 25 bp, Homo sapien
agcaccgaggcgcatgattggccca

SEQ ID NO: 1120560 - DNA, 25 bp, Homo sapien
ctgggaagtgttccgggaagcgtgc

SEQ ID NO: 1120561 - DNA, 25 bp, Homo sapien
cgggaagcgtgccagcaagaggcct

SEQ ID NO: 1120562 - DNA, 25 bp, Homo sapien
agtgttccgggaagcgtgccagcaa

SEQ ID NO: 1120563 - DNA, 25 bp, Homo sapien
agcaagaggccttcctttaggactg

SEQ ID NO: 1120564 - DNA, 25 bp, Homo sapien
gctctgagcacgctgattttggaag

SEQ ID NO: 1120565 - DNA, 25 bp, Homo sapien
tttggaagtgatgtaggagcaggga

SEQ ID NO: 1120566 - DNA, 25 bp, Homo sapien
tggaggtatctttatcaccccatag

SEQ ID NO: 1120567 - DNA, 25 bp, Homo sapien
tttatcaccccatagagcttcgagc

SEQ ID NO: 1120568 - DNA, 25 bp, Homo sapien
ggacatgactggcaccagctccatg

SEQ ID NO: 1120569 - DNA, 25 bp, Homo sapien
ggctgagtattggcccccatggtga

SEQ ID NO: 1120570 - DNA, 25 bp, Homo sapien
tggttggtcatgatgttgtacttgg

SEQ ID NO: 1120571 - DNA, 25 bp, Homo sapien
acttggtaggggctgagtattggcc

SEQ ID NO: 1120572 - DNA, 25 bp, Homo sapien
tggaggtggctctgtatgtcagcat

SEQ ID NO: 1120573 - DNA, 25 bp, Homo sapien
ggtggtcacagtttctttggcagct

SEQ ID NO: 1120574 - DNA, 25 bp, Homo sapien
cgagtgaggtggtcacagtttcttt

SEQ ID NO: 1120575 - DNA, 25 bp, Homo sapien
tgtcgagtgaggtggtcacagtttc

SEQ ID NO: 1120576 - DNA, 25 bp, Homo sapien
gggctgtaggaagggggcctcctca

SEQ ID NO: 1120577 - DNA, 25 bp, Homo sapien
catttttatagggggctgtaggaag

SEQ ID NO: 1120578 - DNA, 25 bp, Homo sapien
ggctgtaggaagggggcctcctcac

SEQ ID NO: 1120579 - DNA, 25 bp, Homo sapien
tcacatttttatagggggctgtagg

SEQ ID NO: 1120580 - DNA, 25 bp, Homo sapien
tttgtctgggccttcagtgaaaacc

SEQ ID NO: 1120581 - DNA, 25 bp, Homo sapien
ggagcacgtaaattgagcccaagtt

SEQ ID NO: 1120582 - DNA, 25 bp, Homo sapien
ctccttttggttatgtggccagagg

SEQ ID NO: 1120583 - DNA, 25 bp, Homo sapien
ccaagttagaataataggagcctgc

SEQ ID NO: 1120584 - DNA, 25 bp, Homo sapien
ctcactcgccccggctacagtgcag

SEQ ID NO: 1120585 - DNA, 25 bp, Homo sapien
gtctcactcgccccggctacagtgc

SEQ ID NO: 1120586 - DNA, 25 bp, Homo sapien
gagtctcactcgccccggctacagt

SEQ ID NO: 1120587 - DNA, 25 bp, Homo sapien
cactcgccccggctacagtgcagtg

SEQ ID NO: 1120588 - DNA, 25 bp, Homo sapien
agaacaggcagagtggagtcaggct

SEQ ID NO: 1120589 - DNA, 25 bp, Homo sapien
gaacaggcagagtggagtcaggctt

SEQ ID NO: 1120590 - DNA, 25 bp, Homo sapien
tctctctgcctgtggtttgcccttt

SEQ ID NO: 1120591 - DNA, 25 bp, Homo sapien
caggcatgggcttgctgcggtttct

SEQ ID NO: 1120592 - DNA, 25 bp, Homo sapien
aacaggcatgggcttgctgcggttt

SEQ ID NO: 1120593 - DNA, 25 bp, Homo sapien
catgggcttgctgcggtttctctct

SEQ ID NO: 1120594 - DNA, 25 bp, Homo sapien
agaatcatagagtttagggttacag

SEQ ID NO: 1120595 - DNA, 25 bp, Homo sapien
tacagtggggcttagaataatcttc

SEQ ID NO: 1120596 - DNA, 25 bp, Homo sapien
tcatagagtttagggttacagtggg

SEQ ID NO: 1120597 - DNA, 25 bp, Homo sapien
aatcatagagtttagggttacagtg

SEQ ID NO: 1120598 - DNA, 25 bp, Homo sapien
tttttccttcggcagattccccaga

SEQ ID NO: 1120599 - DNA, 25 bp, Homo sapien
tgcttctcttgctgcctcgtgagaa

SEQ ID NO: 1120600 - DNA, 25 bp, Homo sapien
tccagtggggcttcatgtggctcct

SEQ ID NO: 1120601 - DNA, 25 bp, Homo sapien
agagcaggattgagtcttaccatct

SEQ ID NO: 1120602 - DNA, 25 bp, Homo sapien
tatgttccggatgtctcttcagtct

SEQ ID NO: 1120603 - DNA, 25 bp, Homo sapien
tcctcttatgttccggatgtctctt

SEQ ID NO: 1120604 - DNA, 25 bp, Homo sapien
gttttcctcttatgttccggatgtc

SEQ ID NO: 1120605 - DNA, 25 bp, Homo sapien
tcttatgttccggatgtctcttcag

SEQ ID NO: 1120606 - DNA, 25 bp, Homo sapien
gaatttgttgtgaatccttttgtaa

SEQ ID NO: 1120607 - DNA, 25 bp, Homo sapien
tccagaggaatttgttgtgaatcct

SEQ ID NO: 1120608 - DNA, 25 bp, Homo sapien
gttgtgaatccttttgtaatgatcc

SEQ ID NO: 1120609 - DNA, 25 bp, Homo sapien
gtgaatccttttgtaatgatcctca

SEQ ID NO: 1120610 - DNA, 25 bp, Homo sapien
ccgccaggacctccggccttgggag

SEQ ID NO: 1120611 - DNA, 25 bp, Homo sapien
gagcaggcaccggtggccagcggtg

SEQ ID NO: 1120612 - DNA, 25 bp, Homo sapien
cggccagggtcgctccagccgccag

SEQ ID NO: 1120613 - DNA, 25 bp, Homo sapien
ggtgcgtgggcagcggccgcacggg

SEQ ID NO: 1120614 - DNA, 25 bp, Homo sapien
gatggcgtagttttgccgcggcgca

SEQ ID NO: 1120615 - DNA, 25 bp, Homo sapien
ggccactttccctgcgcgattcccg

SEQ ID NO: 1120616 - DNA, 25 bp, Homo sapien
ggaggtgagagtccccagcgggtcc

SEQ ID NO: 1120617 - DNA, 25 bp, Homo sapien
tgaaggagggcagtcggcggctctc

SEQ ID NO: 1120618 - DNA, 25 bp, Homo sapien
gccctagaggtgcatctctcttcat

SEQ ID NO: 1120619 - DNA, 25 bp, Homo sapien
agccctagaggtgcatctctcttca

SEQ ID NO: 1120620 - DNA, 25 bp, Homo sapien
aaatatgtcgatgctgtccctttgc

SEQ ID NO: 1120621 - DNA, 25 bp, Homo sapien
tcttccccacgtcaagtcggcatct

SEQ ID NO: 1120622 - DNA, 25 bp, Homo sapien
gtcggcatctcccaaaatatgtcga

SEQ ID NO: 1120623 - DNA, 25 bp, Homo sapien
tacccccgcaggctacatttgacag

SEQ ID NO: 1120624 - DNA, 25 bp, Homo sapien
agatgttaaacccactagttgcaaa

SEQ ID NO: 1120625 - DNA, 25 bp, Homo sapien
ggactctggaagtacaccaaaagat

SEQ ID NO: 1120626 - DNA, 25 bp, Homo sapien
gtaggtcacacaaagtccattctcc

SEQ ID NO: 1120627 - DNA, 25 bp, Homo sapien
acccactagttgcaaaagcttccat

SEQ ID NO: 1120628 - DNA, 25 bp, Homo sapien
tcattgtgacagaaaggaagtcttg

SEQ ID NO: 1120629 - DNA, 25 bp, Homo sapien
tgaacacatttctttccggagattt

SEQ ID NO: 1120630 - DNA, 25 bp, Homo sapien
agtcttgagacccagtgagagattg

SEQ ID NO: 1120631 - DNA, 25 bp, Homo sapien
catcagagacattccactgtgaaca

SEQ ID NO: 1120632 - DNA, 25 bp, Homo sapien
ggagagctggtgtatgcaattcaca

SEQ ID NO: 1120633 - DNA, 25 bp, Homo sapien
gcaattcacatgagcattaatgaga

SEQ ID NO: 1120634 - DNA, 25 bp, Homo sapien
aatgagaattgtgcgtgcactgagc

SEQ ID NO: 1120635 - DNA, 25 bp, Homo sapien
taaatgatgagtgcttttgagtgta

SEQ ID NO: 1120636 - DNA, 25 bp, Homo sapien
cagggcaacagttctccgcagttcc

SEQ ID NO: 1120637 - DNA, 25 bp, Homo sapien
tttttgttgtaatggcggtcgcgcg

SEQ ID NO: 1120638 - DNA, 25 bp, Homo sapien
gcccctttcaggctgcacaaaatga

SEQ ID NO: 1120639 - DNA, 25 bp, Homo sapien
caaaatgaagcggtgcagggcaaca

SEQ ID NO: 1120640 - DNA, 25 bp, Homo sapien
gtatgttacctgtatattacaaaac

SEQ ID NO: 1120641 - DNA, 25 bp, Homo sapien
ctgtatgttacctgtatattacaaa

SEQ ID NO: 1120642 - DNA, 25 bp, Homo sapien
tgttacctgtatattacaaaaccga

SEQ ID NO: 1120643 - DNA, 25 bp, Homo sapien
atgttacctgtatattacaaaaccg

SEQ ID NO: 1120644 - DNA, 25 bp, Homo sapien
agcaccccctgtggagggtacatta

SEQ ID NO: 1120645 - DNA, 25 bp, Homo sapien
ctcggggccggcctaaggcagcacc

SEQ ID NO: 1120646 - DNA, 25 bp, Homo sapien
ttgttcccacccaaggccgcacctc

SEQ ID NO: 1120647 - DNA, 25 bp, Homo sapien
tgttcccacccaaggccgcacctcg

SEQ ID NO: 1120648 - DNA, 25 bp, Homo sapien
cggggtggccttctcaactgcccgg

SEQ ID NO: 1120649 - DNA, 25 bp, Homo sapien
ggggtggccttctcaactgcccgga

SEQ ID NO: 1120650 - DNA, 25 bp, Homo sapien
acaccagtccaagacctaagaggaa

SEQ ID NO: 1120651 - DNA, 25 bp, Homo sapien
agcagcgatccacaccagtccaaga

SEQ ID NO: 1120652 - DNA, 25 bp, Homo sapien
gtacaggcagcagcgatccacacca

SEQ ID NO: 1120653 - DNA, 25 bp, Homo sapien
gatccacaccagtccaagacctaag

SEQ ID NO: 1120654 - DNA, 25 bp, Homo sapien
aattcttaatacaggccagcgcgcc

SEQ ID NO: 1120655 - DNA, 25 bp, Homo sapien
ccagcgcgccttgaagtaaagccca

SEQ ID NO: 1120656 - DNA, 25 bp, Homo sapien
taaatgaagcaagaacccgaacttc

SEQ ID NO: 1120657 - DNA, 25 bp, Homo sapien
caatcctgcagtacccaaaagaggg

SEQ ID NO: 1120658 - DNA, 25 bp, Homo sapien
gttatcacttctgcccaagagcctc

SEQ ID NO: 1120659 - DNA, 25 bp, Homo sapien
ccctcaagatcaagacgagttatca

SEQ ID NO: 1120660 - DNA, 25 bp, Homo sapien
gatcaagacgagttatcacttctgc

SEQ ID NO: 1120661 - DNA, 25 bp, Homo sapien
gtctaacttctatttgtccctcaag

SEQ ID NO: 1120662 - DNA, 25 bp, Homo sapien
ttttgactcttaacttgacctccca

SEQ ID NO: 1120663 - DNA, 25 bp, Homo sapien
tttgactcttaacttgacctcccag

SEQ ID NO: 1120664 - DNA, 25 bp, Homo sapien
gagagcttcaattaagcccttcagc

SEQ ID NO: 1120665 - DNA, 25 bp, Homo sapien
gagcttcaattaagcccttcagcat

SEQ ID NO: 1120666 - DNA, 25 bp, Homo sapien
agccagagagcttcaattaagccct

SEQ ID NO: 1120667 - DNA, 25 bp, Homo sapien
cagagagcttcaattaagcccttca

SEQ ID NO: 1120668 - DNA, 25 bp, Homo sapien
gcattcagccgaagagcccctttct

SEQ ID NO: 1120669 - DNA, 25 bp, Homo sapien
gactcatagcattcagccgaagagc

SEQ ID NO: 1120670 - DNA, 25 bp, Homo sapien
tgaagcggactcatagcattcagcc

SEQ ID NO: 1120671 - DNA, 25 bp, Homo sapien
tagcattcagccgaagagccccttt

SEQ ID NO: 1120672 - DNA, 25 bp, Homo sapien
aacacaaattgaggtcttagcagga

SEQ ID NO: 1120673 - DNA, 25 bp, Homo sapien
acacaaattgaggtcttagcaggaa

SEQ ID NO: 1120674 - DNA, 25 bp, Homo sapien
cacaaattgaggtcttagcaggaaa

SEQ ID NO: 1120675 - DNA, 25 bp, Homo sapien
aaacacaaattgaggtcttagcagg

SEQ ID NO: 1120676 - DNA, 25 bp, Homo sapien
ttcactatatatgccttagccttgg

SEQ ID NO: 1120677 - DNA, 25 bp, Homo sapien
tacaaatagtaaaagtttcactata

SEQ ID NO: 1120678 - DNA, 25 bp, Homo sapien
tagtaaaagtttcactatatatgcc

SEQ ID NO: 1120679 - DNA, 25 bp, Homo sapien
aagtttcactatatatgccttagcc

SEQ ID NO: 1120680 - DNA, 25 bp, Homo sapien
tttgaatcctgtctacaagtacatg

SEQ ID NO: 1120681 - DNA, 25 bp, Homo sapien
actgctttgaatcctgtctacaagt

SEQ ID NO: 1120682 - DNA, 25 bp, Homo sapien
gctttgaatcctgtctacaagtaca

SEQ ID NO: 1120683 - DNA, 25 bp, Homo sapien
tgaatcctgtctacaagtacatgtc

SEQ ID NO: 1120684 - DNA, 25 bp, Homo sapien
tactgaagttgatttgtcaatcgcc

SEQ ID NO: 1120685 - DNA, 25 bp, Homo sapien
tcacagcatccacaggacgttgaaa

SEQ ID NO: 1120686 - DNA, 25 bp, Homo sapien
gtggaggagggttaacaataatagc

SEQ ID NO: 1120687 - DNA, 25 bp, Homo sapien
gggccatgaaaaactatgcttccat

SEQ ID NO: 1120688 - DNA, 25 bp, Homo sapien
caatttgagaacattgtattgaagt

SEQ ID NO: 1120689 - DNA, 25 bp, Homo sapien
tgaagccttcgcataatatttattc

SEQ ID NO: 1120690 - DNA, 25 bp, Homo sapien
tctatacattctgaagccttcgcat

SEQ ID NO: 1120691 - DNA, 25 bp, Homo sapien
tattgaagtcttctatacattctga

SEQ ID NO: 1120692 - DNA, 25 bp, Homo sapien
tgattctttccttaacacccacaac

SEQ ID NO: 1120693 - DNA, 25 bp, Homo sapien
ttctctagagcttgtgccataagaa

SEQ ID NO: 1120694 - DNA, 25 bp, Homo sapien
aatttctgcataaacagcttctcta

SEQ ID NO: 1120695 - DNA, 25 bp, Homo sapien
gcttctctagagcttgtgccataag

SEQ ID NO: 1120696 - DNA, 25 bp, Homo sapien
gaactggagttgactgaagctccct

SEQ ID NO: 1120697 - DNA, 25 bp, Homo sapien
cctgtaccacgttcaagggagaaat

SEQ ID NO: 1120698 - DNA, 25 bp, Homo sapien
aaatacagaaggaatttcttgctgc

SEQ ID NO: 1120699 - DNA, 25 bp, Homo sapien
ctgttgcgctgggtgatgatttttc

SEQ ID NO: 1120700 - DNA, 25 bp, Homo sapien
ttcttttataggtggcagtgccact

SEQ ID NO: 1120701 - DNA, 25 bp, Homo sapien
attttcttttataggtggcagtgcc

SEQ ID NO: 1120702 - DNA, 25 bp, Homo sapien
tacttgctttaactgctgaagttgc

SEQ ID NO: 1120703 - DNA, 25 bp, Homo sapien
gctttaactgctgaagttgcaggag

SEQ ID NO: 1120704 - DNA, 25 bp, Homo sapien
caggattataaaagggccatgcata

SEQ ID NO: 1120705 - DNA, 25 bp, Homo sapien
gtcccaaagcattaacgtcaacagg

SEQ ID NO: 1120706 - DNA, 25 bp, Homo sapien
gatccatcggatttttgacaacgtc

SEQ ID NO: 1120707 - DNA, 25 bp, Homo sapien
catagtagttatggagtcccaaagc

SEQ ID NO: 1120708 - DNA, 25 bp, Homo sapien
cagatagtgtgacttggatgatctt

SEQ ID NO: 1120709 - DNA, 25 bp, Homo sapien
tccagatagtgtgacttggatgatc

SEQ ID NO: 1120710 - DNA, 25 bp, Homo sapien
gatagtgtgacttggatgatcttaa

SEQ ID NO: 1120711 - DNA, 25 bp, Homo sapien
ccagatagtgtgacttggatgatct

SEQ ID NO: 1120712 - DNA, 25 bp, Homo sapien
atctggaggattgtacttgtagcaa

SEQ ID NO: 1120713 - DNA, 25 bp, Homo sapien
tgaagcattcttgccattgtcacaa

SEQ ID NO: 1120714 - DNA, 25 bp, Homo sapien
gtacttgtagcaattcatgaacatt

SEQ ID NO: 1120715 - DNA, 25 bp, Homo sapien
cattgtcacaacttcgtgatctgga

SEQ ID NO: 1120716 - DNA, 25 bp, Homo sapien
tcaatcgggatctttgaaaaatgcg

SEQ ID NO: 1120717 - DNA, 25 bp, Homo sapien
tctcaacaggttcaatcgggatctt

SEQ ID NO: 1120718 - DNA, 25 bp, Homo sapien
ggatctttgaaaaatgcgtttcgaa

SEQ ID NO: 1120719 - DNA, 25 bp, Homo sapien
ttgaaaaatgcgtttcgaaaacatc

SEQ ID NO: 1120720 - DNA, 25 bp, Homo sapien
agtggtttctgtgatatctgttttg

SEQ ID NO: 1120721 - DNA, 25 bp, Homo sapien
gatatctgttttgatgtaacataaa

SEQ ID NO: 1120722 - DNA, 25 bp, Homo sapien
gtggtttctgtgatatctgttttga

SEQ ID NO: 1120723 - DNA, 25 bp, Homo sapien
tatctgttttgatgtaacataaagg

SEQ ID NO: 1120724 - DNA, 25 bp, Homo sapien
agaggaggcttcattagtgttctct

SEQ ID NO: 1120725 - DNA, 25 bp, Homo sapien
tcctgaagctttgcaagacgcttaa

SEQ ID NO: 1120726 - DNA, 25 bp, Homo sapien
gcttaactcgctcatcttcagaatc

SEQ ID NO: 1120727 - DNA, 25 bp, Homo sapien
tttgcaagacgcttaactcgctcat

SEQ ID NO: 1120728 - DNA, 25 bp, Homo sapien
tgggacaaaacctggagctgttgat

SEQ ID NO: 1120729 - DNA, 25 bp, Homo sapien
gtacttgggacaaaacctggagctg

SEQ ID NO: 1120730 - DNA, 25 bp, Homo sapien
caaaacctggagctgttgatgtaca

SEQ ID NO: 1120731 - DNA, 25 bp, Homo sapien
ggagctgttgatgtacagctttaag

SEQ ID NO: 1120732 - DNA, 25 bp, Homo sapien
cctttagcctcatttgctcacacat

SEQ ID NO: 1120733 - DNA, 25 bp, Homo sapien
tggattttcattgctgttattaacc

SEQ ID NO: 1120734 - DNA, 25 bp, Homo sapien
tctcttggacttttcctttagcctc

SEQ ID NO: 1120735 - DNA, 25 bp, Homo sapien
cttggattttcattgctgttattaa

SEQ ID NO: 1120736 - DNA, 25 bp, Homo sapien
caaagtctatctctatctcatcagg

SEQ ID NO: 1120737 - DNA, 25 bp, Homo sapien
tctttcttagacatgccgaaacata

SEQ ID NO: 1120738 - DNA, 25 bp, Homo sapien
tatgtgaactactcgcccaagttta

SEQ ID NO: 1120739 - DNA, 25 bp, Homo sapien
catcaggattggaattgctcagaga

SEQ ID NO: 1120740 - DNA, 25 bp, Homo sapien
tctattaatatgcagaaatacatac

SEQ ID NO: 1120741 - DNA, 25 bp, Homo sapien
gatttctattaatatgcagaaatac

SEQ ID NO: 1120742 - DNA, 25 bp, Homo sapien
tttctattaatatgcagaaatacat

SEQ ID NO: 1120743 - DNA, 25 bp, Homo sapien
cgatttctattaatatgcagaaata

SEQ ID NO: 1120744 - DNA, 25 bp, Homo sapien
ttctgtgagtgaagttcttctttgg

SEQ ID NO: 1120745 - DNA, 25 bp, Homo sapien
tattaacatccagtaaccgcttttc

SEQ ID NO: 1120746 - DNA, 25 bp, Homo sapien
taacatccagtaaccgcttttccaa

SEQ ID NO: 1120747 - DNA, 25 bp, Homo sapien
tgtgagtgaagttcttctttggaca

SEQ ID NO: 1120748 - DNA, 25 bp, Homo sapien
gctttggatggttgcgttttatcag

SEQ ID NO: 1120749 - DNA, 25 bp, Homo sapien
tttcaacagctttggatggttgcgt

SEQ ID NO: 1120750 - DNA, 25 bp, Homo sapien
cagctttggatggttgcgttttatc

SEQ ID NO: 1120751 - DNA, 25 bp, Homo sapien
tcaacagctttggatggttgcgttt

SEQ ID NO: 1120752 - DNA, 25 bp, Homo sapien
gctgtctgaagagcttaagtcactg

SEQ ID NO: 1120753 - DNA, 25 bp, Homo sapien
actgctgtctgaagagcttaagtca

SEQ ID NO: 1120754 - DNA, 25 bp, Homo sapien
tactttcagactctgatgagctgct

SEQ ID NO: 1120755 - DNA, 25 bp, Homo sapien
tctgaagagcttaagtcactgctgc

SEQ ID NO: 1120756 - DNA, 25 bp, Homo sapien
ttcaacacagcaatgttttaagatt

SEQ ID NO: 1120757 - DNA, 25 bp, Homo sapien
acaaaaacttgctactttgatttca

SEQ ID NO: 1120758 - DNA, 25 bp, Homo sapien
tcaacacagcaatgttttaagattt

SEQ ID NO: 1120759 - DNA, 25 bp, Homo sapien
tcattctctgaacattacactaaat

SEQ ID NO: 1120760 - DNA, 25 bp, Homo sapien
aaggatgaagtgacaaattcacttt

SEQ ID NO: 1120761 - DNA, 25 bp, Homo sapien
ttctctgaacattacactaaatcca

SEQ ID NO: 1120762 - DNA, 25 bp, Homo sapien
aaaatgcaaaaagtccaaaggatga

SEQ ID NO: 1120763 - DNA, 25 bp, Homo sapien
gtttccactggatgtgttactgttc

SEQ ID NO: 1120764 - DNA, 25 bp, Homo sapien
cagtttccactggatgtgttactgt

SEQ ID NO: 1120765 - DNA, 25 bp, Homo sapien
gccatcagtttccactggatgtgtt

SEQ ID NO: 1120766 - DNA, 25 bp, Homo sapien
atcagtttccactggatgtgttact

SEQ ID NO: 1120767 - DNA, 25 bp, Homo sapien
cattctctttagaaggagaatcatt

SEQ ID NO: 1120768 - DNA, 25 bp, Homo sapien
tacattctctttagaaggagaatca

SEQ ID NO: 1120769 - DNA, 25 bp, Homo sapien
ctttacattctctttagaaggagaa

SEQ ID NO: 1120770 - DNA, 25 bp, Homo sapien
ggagaatcatttggttttacttctg

SEQ ID NO: 1120771 - DNA, 25 bp, Homo sapien
ttccttcaggcggtatgcattcatt

SEQ ID NO: 1120772 - DNA, 25 bp, Homo sapien
caggcggtatgcattcattcttcat

SEQ ID NO: 1120773 - DNA, 25 bp, Homo sapien
cgcctgttcttccttcaggcggtat

SEQ ID NO: 1120774 - DNA, 25 bp, Homo sapien
tgttcttccttcaggcggtatgcat

SEQ ID NO: 1120775 - DNA, 25 bp, Homo sapien
tggtgatttggtggcattacatgtg

SEQ ID NO: 1120776 - DNA, 25 bp, Homo sapien
tgtggtctgatgaacaagggtagta

SEQ ID NO: 1120777 - DNA, 25 bp, Homo sapien
caagggtagtattggcagaggttgt

SEQ ID NO: 1120778 - DNA, 25 bp, Homo sapien
aggttgtgtcttgcacacaatatcc

SEQ ID NO: 1120779 - DNA, 25 bp, Homo sapien
tctgcccttgggtggccaagtggaa

SEQ ID NO: 1120780 - DNA, 25 bp, Homo sapien
tgcccttgggtggccaagtggaaac

SEQ ID NO: 1120781 - DNA, 25 bp, Homo sapien
ctgcccttgggtggccaagtggaaa

SEQ ID NO: 1120782 - DNA, 25 bp, Homo sapien
tacaggagcttgacattcagattct

SEQ ID NO: 1120783 - DNA, 25 bp, Homo sapien
ttctgtacaggagcttgacattcag

SEQ ID NO: 1120784 - DNA, 25 bp, Homo sapien
tcagattctaacatcgttgtgtcac

SEQ ID NO: 1120785 - DNA, 25 bp, Homo sapien
cgttgtgtcactatcaccagatgga

SEQ ID NO: 1120786 - DNA, 25 bp, Homo sapien
tctgaggatttcattacacctgatg

SEQ ID NO: 1120787 - DNA, 25 bp, Homo sapien
cgtatgagttcctgtgtccgagctt

SEQ ID NO: 1120788 - DNA, 25 bp, Homo sapien
tcatctgaggatttcattacacctg

SEQ ID NO: 1120789 - DNA, 25 bp, Homo sapien
gtattttgttccaaatgcttccgta

SEQ ID NO: 1120790 - DNA, 25 bp, Homo sapien
ctacagtcaatccattcccaagatc

SEQ ID NO: 1120791 - DNA, 25 bp, Homo sapien
tctacagtcaatccattcccaagat

SEQ ID NO: 1120792 - DNA, 25 bp, Homo sapien
tacagtcaatccattcccaagatcc

SEQ ID NO: 1120793 - DNA, 25 bp, Homo sapien
ttgctaaatcacggtctttgagaag

SEQ ID NO: 1120794 - DNA, 25 bp, Homo sapien
tgctaaatcacggtctttgagaagc

SEQ ID NO: 1120795 - DNA, 25 bp, Homo sapien
gctaaatcacggtctttgagaagcc

SEQ ID NO: 1120796 - DNA, 25 bp, Homo sapien
cattccaggctgggcgacaagagcg

SEQ ID NO: 1120797 - DNA, 25 bp, Homo sapien
cattgcattccaggctgggcgacaa

SEQ ID NO: 1120798 - DNA, 25 bp, Homo sapien
ttgcattccaggctgggcgacaaga

SEQ ID NO: 1120799 - DNA, 25 bp, Homo sapien
tgcattccaggctgggcgacaagag

SEQ ID NO: 1120800 - DNA, 25 bp, Homo sapien
tgaagggtcatatcaatggtaccca

SEQ ID NO: 1120801 - DNA, 25 bp, Homo sapien
taatgtcactttgaagggtcatatc

SEQ ID NO: 1120802 - DNA, 25 bp, Homo sapien
gtcataatgtcactttgaagggtca

SEQ ID NO: 1120803 - DNA, 25 bp, Homo sapien
gggtcatatcaatggtacccaccat

SEQ ID NO: 1120804 - DNA, 25 bp, Homo sapien
gcattttgatcttttaccattcatt

SEQ ID NO: 1120805 - DNA, 25 bp, Homo sapien
aaaataagcatatagctattaaaaa

SEQ ID NO: 1120806 - DNA, 25 bp, Homo sapien
cttcctcgggagcgggtgagcgagc

SEQ ID NO: 1120807 - DNA, 25 bp, Homo sapien
ccttcctcgggagcgggtgagcgag

SEQ ID NO: 1120808 - DNA, 25 bp, Homo sapien
gagcgagcgccgcagcgcgccaggc

SEQ ID NO: 1120809 - DNA, 25 bp, Homo sapien
ggtgagcgagcgccgcagcgcgcca

SEQ ID NO: 1120810 - DNA, 25 bp, Homo sapien
ccttgccgaggctccacaaaagttt

SEQ ID NO: 1120811 - DNA, 25 bp, Homo sapien
cgcagtagcagtagaccagggacca

SEQ ID NO: 1120812 - DNA, 25 bp, Homo sapien
agcagggaccggagcgtgagcatca

SEQ ID NO: 1120813 - DNA, 25 bp, Homo sapien
gtcgctcaggcacgcgggagggtgc

SEQ ID NO: 1120814 - DNA, 25 bp, Homo sapien
cctcgcggcggtcacgctccctccc

SEQ ID NO: 1120815 - DNA, 25 bp, Homo sapien
ctcccgccaggcccgcgcggccctt

SEQ ID NO: 1120816 - DNA, 25 bp, Homo sapien
ccgccaggcccgcgcggcccttcac

SEQ ID NO: 1120817 - DNA, 25 bp, Homo sapien
gcggcggtcacgctccctcccgctc

SEQ ID NO: 1120818 - DNA, 25 bp, Homo sapien
catagtgaaatcttaaccctgaatc

SEQ ID NO: 1120819 - DNA, 25 bp, Homo sapien
acatagtgaaatcttaaccctgaat

SEQ ID NO: 1120820 - DNA, 25 bp, Homo sapien
tgaagcagcagcataagtggtttgc

SEQ ID NO: 1120821 - DNA, 25 bp, Homo sapien
gaagcagcagcataagtggtttgcc

SEQ ID NO: 1120822 - DNA, 25 bp, Homo sapien
aagcagcagcataagtggtttgcct

SEQ ID NO: 1120823 - DNA, 25 bp, Homo sapien
gctacaactcgatattcacttttaa

SEQ ID NO: 1120824 - DNA, 25 bp, Homo sapien
gacaatccaatttataattctgtcg

SEQ ID NO: 1120825 - DNA, 25 bp, Homo sapien
aattctgtcgatgaatgggagcatc

SEQ ID NO: 1120826 - DNA, 25 bp, Homo sapien
ttctccataacctctcaaatccagt

SEQ ID NO: 1120827 - DNA, 25 bp, Homo sapien
cagaatagttgctctagatgcatca

SEQ ID NO: 1120828 - DNA, 25 bp, Homo sapien
aaaagtcattcttggctggtagaca

SEQ ID NO: 1120829 - DNA, 25 bp, Homo sapien
gccattaggtctatgtttaaaaaca

SEQ ID NO: 1120830 - DNA, 25 bp, Homo sapien
cagcacccgggccattaggtctatg

SEQ ID NO: 1120831 - DNA, 25 bp, Homo sapien
gcaattagccaagcaatcatgcccc

SEQ ID NO: 1120832 - DNA, 25 bp, Homo sapien
taacaataagcttcatcaccatttc

SEQ ID NO: 1120833 - DNA, 25 bp, Homo sapien
gataacagatggcaattagccaagc

SEQ ID NO: 1120834 - DNA, 25 bp, Homo sapien
tacatttggatgagggaagttaata

SEQ ID NO: 1120835 - DNA, 25 bp, Homo sapien
actggatttcaacagctgagcaggg

SEQ ID NO: 1120836 - DNA, 25 bp, Homo sapien
gctgagcagggtgtcgtaaaatata

SEQ ID NO: 1120837 - DNA, 25 bp, Homo sapien
gaagaagtaataataactggatttc

SEQ ID NO: 1120838 - DNA, 25 bp, Homo sapien
cataaattctgggaaccatggtatt

SEQ ID NO: 1120839 - DNA, 25 bp, Homo sapien
tccaggctgagaaaagacataaata

SEQ ID NO: 1120840 - DNA, 25 bp, Homo sapien
tgggccacttaatgctccaggctga

SEQ ID NO: 1120841 - DNA, 25 bp, Homo sapien
gatcctctgttgttaattggcatcc

SEQ ID NO: 1120842 - DNA, 25 bp, Homo sapien
gccagtgctgtgactggtaaacaga

SEQ ID NO: 1120843 - DNA, 25 bp, Homo sapien
taagttgaactcttatctcactgat

SEQ ID NO: 1120844 - DNA, 25 bp, Homo sapien
gatttgctttgtagtccagtaggta

SEQ ID NO: 1120845 - DNA, 25 bp, Homo sapien
gatttctactgtaatgtgttcagag

SEQ ID NO: 1120846 - DNA, 25 bp, Homo sapien
ggttttgccacttatctctattgtg

SEQ ID NO: 1120847 - DNA, 25 bp, Homo sapien
tgaatgcgtcattctctccccacag

SEQ ID NO: 1120848 - DNA, 25 bp, Homo sapien
gcttctgacaaaatagttagcctga

SEQ ID NO: 1120849 - DNA, 25 bp, Homo sapien
ccatgtgatgtttgagaggcaggca

SEQ ID NO: 1120850 - DNA, 25 bp, Homo sapien
tggtcttgctgaagccaatgactgg

SEQ ID NO: 1120851 - DNA, 25 bp, Homo sapien
tggcacagctaatctttaatataca

SEQ ID NO: 1120852 - DNA, 25 bp, Homo sapien
caggtttgccttataatatggcaca

SEQ ID NO: 1120853 - DNA, 25 bp, Homo sapien
tcattacagacccttcatagaagat

SEQ ID NO: 1120854 - DNA, 25 bp, Homo sapien
taaaaggcaccatatgttaacagag

SEQ ID NO: 1120855 - DNA, 25 bp, Homo sapien
ggtcagatcctagctccagaactta

SEQ ID NO: 1120856 - DNA, 25 bp, Homo sapien
ggcaaagttacacgttaaatcacat

SEQ ID NO: 1120857 - DNA, 25 bp, Homo sapien
cagaacttacactatgggcattggc

SEQ ID NO: 1120858 - DNA, 25 bp, Homo sapien
aaattggtgatacctaccttgcatg

SEQ ID NO: 1120859 - DNA, 25 bp, Homo sapien
gaggtttaactcaagatggcaccct

SEQ ID NO: 1120860 - DNA, 25 bp, Homo sapien
tgtaggttcctgagagatatggcca

SEQ ID NO: 1120861 - DNA, 25 bp, Homo sapien
tgtaataggccggaattgcccatgg

SEQ ID NO: 1120862 - DNA, 25 bp, Homo sapien
aaacaggaagagtggcgtggatacc

SEQ ID NO: 1120863 - DNA, 25 bp, Homo sapien
ctgttagaggaaattgtaggttaat

SEQ ID NO: 1120864 - DNA, 25 bp, Homo sapien
ttgtaggttaatagaaaatgctgca

SEQ ID NO: 1120865 - DNA, 25 bp, Homo sapien
gaaattgtaggttaatagaaaatgc

SEQ ID NO: 1120866 - DNA, 25 bp, Homo sapien
acataattagaactgttagaggaaa

SEQ ID NO: 1120867 - DNA, 25 bp, Homo sapien
gaaaccgacttagcagacccaggct

SEQ ID NO: 1120868 - DNA, 25 bp, Homo sapien
gccgtgaaaccgacttagcagaccc

SEQ ID NO: 1120869 - DNA, 25 bp, Homo sapien
ctgtggatgcagagccgtgaaaccg

SEQ ID NO: 1120870 - DNA, 25 bp, Homo sapien
tgcagagccgtgaaaccgacttagc

SEQ ID NO: 1120871 - DNA, 25 bp, Homo sapien
catgagcttgagtactggtttcacc

SEQ ID NO: 1120872 - DNA, 25 bp, Homo sapien
gacttgattagctcctgcgtgatcc

SEQ ID NO: 1120873 - DNA, 25 bp, Homo sapien
tggccactggccagatgaagaggaa

SEQ ID NO: 1120874 - DNA, 25 bp, Homo sapien
cattcgtacccacgaggatgatgca

SEQ ID NO: 1120875 - DNA, 25 bp, Homo sapien
gaccgtggtgctgtaacgaagatag

SEQ ID NO: 1120876 - DNA, 25 bp, Homo sapien
cacacaggggattgagtcaaagaaa

SEQ ID NO: 1120877 - DNA, 25 bp, Homo sapien
ctgtgttgacagtaggaatttccca

SEQ ID NO: 1120878 - DNA, 25 bp, Homo sapien
tcactttagccaggaacccaagtaa

SEQ ID NO: 1120879 - DNA, 25 bp, Homo sapien
tttaaaagtgactagacgggagcga

SEQ ID NO: 1120880 - DNA, 25 bp, Homo sapien
ggaacacctggacagaaggcccctg

SEQ ID NO: 1120881 - DNA, 25 bp, Homo sapien
gatttcatccttagtattcttcctg

SEQ ID NO: 1120882 - DNA, 25 bp, Homo sapien
gattgatgcacacaccttctaggaa

SEQ ID NO: 1120883 - DNA, 25 bp, Homo sapien
cctgtaaggctgtgaatccctgcca

SEQ ID NO: 1120884 - DNA, 25 bp, Homo sapien
gagtgtcaacatacaggcctgtaag

SEQ ID NO: 1120885 - DNA, 25 bp, Homo sapien
tacaggcctgtaaggctgtgaatcc

SEQ ID NO: 1120886 - DNA, 25 bp, Homo sapien
gaagagttgactgagtgtcaacata

SEQ ID NO: 1120887 - DNA, 25 bp, Homo sapien
tgcagccttcgtaagtgtgccctgt

SEQ ID NO: 1120888 - DNA, 25 bp, Homo sapien
catcattattcctgccgaagtgggc

SEQ ID NO: 1120889 - DNA, 25 bp, Homo sapien
tgaaggttacctgcggagatcatca

SEQ ID NO: 1120890 - DNA, 25 bp, Homo sapien
tgtctcaagggctctgaaattggga

SEQ ID NO: 1120891 - DNA, 25 bp, Homo sapien
ggacatttgcagactcttttcagac

SEQ ID NO: 1120892 - DNA, 25 bp, Homo sapien
aaaccatccgcatcaagatcaaaaa

SEQ ID NO: 1120893 - DNA, 25 bp, Homo sapien
catttgcagactcttttcagaccta

SEQ ID NO: 1120894 - DNA, 25 bp, Homo sapien
ttaaaccatccgcatcaagatcaaa

SEQ ID NO: 1120895 - DNA, 25 bp, Homo sapien
taatgaatatatataggctgcctgg

SEQ ID NO: 1120896 - DNA, 25 bp, Homo sapien
cctggaggtctaggtgtgaattaaa

SEQ ID NO: 1120897 - DNA, 25 bp, Homo sapien
tggaaacatcaagatctggcactcc

SEQ ID NO: 1120898 - DNA, 25 bp, Homo sapien
gcctaaagtatagcagcgaactcct

SEQ ID NO: 1120899 - DNA, 25 bp, Homo sapien
tcaaagggacaatatggacagttag

SEQ ID NO: 1120900 - DNA, 25 bp, Homo sapien
tctctatgtaggtcaaagggacaat

SEQ ID NO: 1120901 - DNA, 25 bp, Homo sapien
actgtgtctctatgtaggtcaaagg

SEQ ID NO: 1120902 - DNA, 25 bp, Homo sapien
taggtcaaagggacaatatggacag

SEQ ID NO: 1120903 - DNA, 25 bp, Homo sapien
cgagccggctcttgacccaggaaga

SEQ ID NO: 1120904 - DNA, 25 bp, Homo sapien
gacgcctctcgtcggtttgtagaca

SEQ ID NO: 1120905 - DNA, 25 bp, Homo sapien
gtctcacagaggtacgacgccctgg

SEQ ID NO: 1120906 - DNA, 25 bp, Homo sapien
cgtgcgcaggcgtactcgctctgtt

SEQ ID NO: 1120907 - DNA, 25 bp, Homo sapien
tttgcaaccccttactgcaaactcc

SEQ ID NO: 1120908 - DNA, 25 bp, Homo sapien
ctcacacggccccttcctttgcaac

SEQ ID NO: 1120909 - DNA, 25 bp, Homo sapien
tgagctgctccgacaccgtcgcctt

SEQ ID NO: 1120910 - DNA, 25 bp, Homo sapien
ccccagaagtaccatgggggccgca

SEQ ID NO: 1120911 - DNA, 25 bp, Homo sapien
ataggtgccaccatcatttcttttt

SEQ ID NO: 1120912 - DNA, 25 bp, Homo sapien
acattcagtttcctcttgtgttaaa

SEQ ID NO: 1120913 - DNA, 25 bp, Homo sapien
tttcctcttgtgttaaatgagaata

SEQ ID NO: 1120914 - DNA, 25 bp, Homo sapien
tttaacattcagtttcctcttgtgt

SEQ ID NO: 1120915 - DNA, 25 bp, Homo sapien
ctactgtcactttgattgcctgcca

SEQ ID NO: 1120916 - DNA, 25 bp, Homo sapien
attgtttaacattggcttagagcct

SEQ ID NO: 1120917 - DNA, 25 bp, Homo sapien
tcatagtttaattagtgatactaaa

SEQ ID NO: 1120918 - DNA, 25 bp, Homo sapien
tacagaggcaacataaagttaatac

SEQ ID NO: 1120919 - DNA, 25 bp, Homo sapien
tagtgatactaaaaaacgtatacat

SEQ ID NO: 1120920 - DNA, 25 bp, Homo sapien
ctcttgctaaaaggactgctttgtg

SEQ ID NO: 1120921 - DNA, 25 bp, Homo sapien
taacatctgtatggaattcttccct

SEQ ID NO: 1120922 - DNA, 25 bp, Homo sapien
cagcaataggctcctgatttgttaa

SEQ ID NO: 1120923 - DNA, 25 bp, Homo sapien
gaaaatagaagtcaggaactcttgc

SEQ ID NO: 1120924 - DNA, 25 bp, Homo sapien
tggaaaactgatgtcaagttgcttt

SEQ ID NO: 1120925 - DNA, 25 bp, Homo sapien
atctctgtcactgatatcctctgga

SEQ ID NO: 1120926 - DNA, 25 bp, Homo sapien
gcttttgtgatatcccaatctccat

SEQ ID NO: 1120927 - DNA, 25 bp, Homo sapien
ctgaagagaacaatcagatgagttt

SEQ ID NO: 1120928 - DNA, 25 bp, Homo sapien
tgtgagctttaaaacgttttccatc

SEQ ID NO: 1120929 - DNA, 25 bp, Homo sapien
aaatatcaatatctgggcaacaagg

SEQ ID NO: 1120930 - DNA, 25 bp, Homo sapien
acaaaaatatcaatatctgggcaac

SEQ ID NO: 1120931 - DNA, 25 bp, Homo sapien
ggtttcacataaagcttcaataaat

SEQ ID NO: 1120932 - DNA, 25 bp, Homo sapien
gactgatagcttcagctacagcact

SEQ ID NO: 1120933 - DNA, 25 bp, Homo sapien
gcttcagctacagcactcggaaatt

SEQ ID NO: 1120934 - DNA, 25 bp, Homo sapien
tctttgactgcataatgactgatag

SEQ ID NO: 1120935 - DNA, 25 bp, Homo sapien
ggcctacccctctaatctttgactg

SEQ ID NO: 1120936 - DNA, 25 bp, Homo sapien
cctgaattctgtacaagtgcctgct

SEQ ID NO: 1120937 - DNA, 25 bp, Homo sapien
ttcctgcagattgtgaatttgtttt

SEQ ID NO: 1120938 - DNA, 25 bp, Homo sapien
ctgaattctgtacaagtgcctgctt

SEQ ID NO: 1120939 - DNA, 25 bp, Homo sapien
gaattctgtacaagtgcctgcttcc

SEQ ID NO: 1120940 - DNA, 25 bp, Homo sapien
atagacactttactaaggaattcct

SEQ ID NO: 1120941 - DNA, 25 bp, Homo sapien
cttatccagagactctaaaatagac

SEQ ID NO: 1120942 - DNA, 25 bp, Homo sapien
tcacttatccagagactctaaaata

SEQ ID NO: 1120943 - DNA, 25 bp, Homo sapien
agagactctaaaatagacactttac

SEQ ID NO: 1120944 - DNA, 25 bp, Homo sapien
aaataatcagaaggccccaatcttc

SEQ ID NO: 1120945 - DNA, 25 bp, Homo sapien
tcagaaggccccaatcttcccactt

SEQ ID NO: 1120946 - DNA, 25 bp, Homo sapien
taatcagaaggccccaatcttccca

SEQ ID NO: 1120947 - DNA, 25 bp, Homo sapien
caaaataatcagaaggccccaatct

SEQ ID NO: 1120948 - DNA, 25 bp, Homo sapien
agctttcagcccaacagccactcag

SEQ ID NO: 1120949 - DNA, 25 bp, Homo sapien
aactagatctggcactcaaaatggc

SEQ ID NO: 1120950 - DNA, 25 bp, Homo sapien
aaataactagatctggcactcaaaa

SEQ ID NO: 1120951 - DNA, 25 bp, Homo sapien
agcaaaataactagatctggcactc

SEQ ID NO: 1120952 - DNA, 25 bp, Homo sapien
tgttttggacgtttctaagcacact

SEQ ID NO: 1120953 - DNA, 25 bp, Homo sapien
aaaacttgaacgtaggccaagcgca

SEQ ID NO: 1120954 - DNA, 25 bp, Homo sapien
tttgctatgtattgcccacgccatg

SEQ ID NO: 1120955 - DNA, 25 bp, Homo sapien
aatgtctccagcatagtccttctgg

SEQ ID NO: 1120956 - DNA, 25 bp, Homo sapien
gaagctgctggttatgcaaagtaag

SEQ ID NO: 1120957 - DNA, 25 bp, Homo sapien
cattgctgtcctggtattgggaaag

SEQ ID NO: 1120958 - DNA, 25 bp, Homo sapien
tcctgcagacatgcaacagtggcac

SEQ ID NO: 1120959 - DNA, 25 bp, Homo sapien
gacagacaggattgtcttcgaatct

SEQ ID NO: 1120960 - DNA, 25 bp, Homo sapien
aattattgaaggcagttcctcttga

SEQ ID NO: 1120961 - DNA, 25 bp, Homo sapien
tgtgcccggccagattatagaattc

SEQ ID NO: 1120962 - DNA, 25 bp, Homo sapien
catggatggaactaggatcatagaa

SEQ ID NO: 1120963 - DNA, 25 bp, Homo sapien
cagtatctggtgaattactaactca

SEQ ID NO: 1120964 - DNA, 25 bp, Homo sapien
ctggaatgtccagagttcctccata

SEQ ID NO: 1120965 - DNA, 25 bp, Homo sapien
gtccagagttcctccatatataaaa

SEQ ID NO: 1120966 - DNA, 25 bp, Homo sapien
gaatgtccagagttcctccatatat

SEQ ID NO: 1120967 - DNA, 25 bp, Homo sapien
tgtccagagttcctccatatataaa

SEQ ID NO: 1120968 - DNA, 25 bp, Homo sapien
taacactttgcaacacagctcaaca

SEQ ID NO: 1120969 - DNA, 25 bp, Homo sapien
agcagaacctaactcttttatattt

SEQ ID NO: 1120970 - DNA, 25 bp, Homo sapien
tacttcattaacactttgcaacaca

SEQ ID NO: 1120971 - DNA, 25 bp, Homo sapien
cattaacactttgcaacacagctca

SEQ ID NO: 1120972 - DNA, 25 bp, Homo sapien
tattactgtgagttgataagtcacc

SEQ ID NO: 1120973 - DNA, 25 bp, Homo sapien
aataaagactgttctcaatcttatt

SEQ ID NO: 1120974 - DNA, 25 bp, Homo sapien
agactgttctcaatcttattactgt

SEQ ID NO: 1120975 - DNA, 25 bp, Homo sapien
tactgaagatatagtataatagact

SEQ ID NO: 1120976 - DNA, 25 bp, Homo sapien
gtccatacatatcagccatattgag

SEQ ID NO: 1120977 - DNA, 25 bp, Homo sapien
catatcagccatattgagtatctga

SEQ ID NO: 1120978 - DNA, 25 bp, Homo sapien
gaaattacagtaatctcttcttaaa

SEQ ID NO: 1120979 - DNA, 25 bp, Homo sapien
atccttctagtccatacatatcagc

SEQ ID NO: 1120980 - DNA, 25 bp, Homo sapien
tctgagcacctttgaattatacagg

SEQ ID NO: 1120981 - DNA, 25 bp, Homo sapien
taaagcactattactatcagagtta

SEQ ID NO: 1120982 - DNA, 25 bp, Homo sapien
tatacaggatactcctactcaatac

SEQ ID NO: 1120983 - DNA, 25 bp, Homo sapien
taaaaatctagcaggtaataatggg

SEQ ID NO: 1120984 - DNA, 25 bp, Homo sapien
taaggtcctcctccttcgctgtgga

SEQ ID NO: 1120985 - DNA, 25 bp, Homo sapien
tctgtatgacaataactgtagttcc

SEQ ID NO: 1120986 - DNA, 25 bp, Homo sapien
gacatactccaagctctcctaagaa

SEQ ID NO: 1120987 - DNA, 25 bp, Homo sapien
tgtagttccttacaccaaggctggt

SEQ ID NO: 1120988 - DNA, 25 bp, Homo sapien
taccacagcaaaatagacaatatta

SEQ ID NO: 1120989 - DNA, 25 bp, Homo sapien
accacagcaaaatagacaatattaa

SEQ ID NO: 1120990 - DNA, 25 bp, Homo sapien
cactccaactgaatgagcaataatc

SEQ ID NO: 1120991 - DNA, 25 bp, Homo sapien
gagcaataatcaggcattctagtat

SEQ ID NO: 1120992 - DNA, 25 bp, Homo sapien
catgcagtcagcaaaaagactttcc

SEQ ID NO: 1120993 - DNA, 25 bp, Homo sapien
ttctagtatagacgtcaatgttctg

SEQ ID NO: 1120994 - DNA, 25 bp, Homo sapien
tgcaaagcttctctcagaccaaaac

SEQ ID NO: 1120995 - DNA, 25 bp, Homo sapien
ggtatatttgcaaagcttctctcag

SEQ ID NO: 1120996 - DNA, 25 bp, Homo sapien
cagaccaaaaccttgcaaaatgctt

SEQ ID NO: 1120997 - DNA, 25 bp, Homo sapien
ctgaatctcaggaggtatatttgca

SEQ ID NO: 1120998 - DNA, 25 bp, Homo sapien
taatggcaaacacacaaaagagtat

SEQ ID NO: 1120999 - DNA, 25 bp, Homo sapien
ttttaatggcaaacacacaaaagag

SEQ ID NO: 1121000 - DNA, 25 bp, Homo sapien
ctttttaatggcaaacacacaaaag

SEQ ID NO: 1121001 - DNA, 25 bp, Homo sapien
taaactttttaatggcaaacacaca

SEQ ID NO: 1121002 - DNA, 25 bp, Homo sapien
tggtatctcaccagctgatatctta

SEQ ID NO: 1121003 - DNA, 25 bp, Homo sapien
ccatgcctagccttacatttacttt

SEQ ID NO: 1121004 - DNA, 25 bp, Homo sapien
caccagctgatatcttacacttatt

SEQ ID NO: 1121005 - DNA, 25 bp, Homo sapien
cagttagattttgacatatcttcta

SEQ ID NO: 1121006 - DNA, 25 bp, Homo sapien
gcctgtcactttccatcagaagaaa

SEQ ID NO: 1121007 - DNA, 25 bp, Homo sapien
tccgtccacttcactctgggtaaac

SEQ ID NO: 1121008 - DNA, 25 bp, Homo sapien
ctctgggtaaactgatgattagcct

SEQ ID NO: 1121009 - DNA, 25 bp, Homo sapien
ggtcagtgctgcttccgtccacttc

SEQ ID NO: 1121010 - DNA, 25 bp, Homo sapien
cttggagaagttgtctacaataaat

SEQ ID NO: 1121011 - DNA, 25 bp, Homo sapien
gaataatcttggagaagttgtctac

SEQ ID NO: 1121012 - DNA, 25 bp, Homo sapien
ttttcactctgaataatcttggaga

SEQ ID NO: 1121013 - DNA, 25 bp, Homo sapien
aagaagagcaaaattttcactctga

SEQ ID NO: 1121014 - DNA, 25 bp, Homo sapien
aagagagcagctattttcagtggtg

SEQ ID NO: 1121015 - DNA, 25 bp, Homo sapien
tgtactgtcagagttcagcagtgtg

SEQ ID NO: 1121016 - DNA, 25 bp, Homo sapien
attgtgtccaacagatcggctgtgc

SEQ ID NO: 1121017 - DNA, 25 bp, Homo sapien
cggctgtgctgctcattgcttgtga

SEQ ID NO: 1121018 - DNA, 25 bp, Homo sapien
tctgtgtgacgaacagcatagaaag

SEQ ID NO: 1121019 - DNA, 25 bp, Homo sapien
gagcctggatcttgcacgtaaaacc

SEQ ID NO: 1121020 - DNA, 25 bp, Homo sapien
gatccacagcttatcacgcagagcc

SEQ ID NO: 1121021 - DNA, 25 bp, Homo sapien
tgttgatcatctgtgctcatcagct

SEQ ID NO: 1121022 - DNA, 25 bp, Homo sapien
agaaacagcaatttgtttttataag

SEQ ID NO: 1121023 - DNA, 25 bp, Homo sapien
ctgtagaaagaaacagcaatttgtt

SEQ ID NO: 1121024 - DNA, 25 bp, Homo sapien
tgtagaaagaaacagcaatttgttt

SEQ ID NO: 1121025 - DNA, 25 bp, Homo sapien
agcaatttgtttttataaggaacat

SEQ ID NO: 1121026 - DNA, 25 bp, Homo sapien
ctgcgagctactgaatataggcttt

SEQ ID NO: 1121027 - DNA, 25 bp, Homo sapien
tgaatataggctttttgccaagtct

SEQ ID NO: 1121028 - DNA, 25 bp, Homo sapien
gccaagtcttcgatcatcacctttg

SEQ ID NO: 1121029 - DNA, 25 bp, Homo sapien
tttttgccaagtcttcgatcatcac

SEQ ID NO: 1121030 - DNA, 25 bp, Homo sapien
ctacttcatcattttccttagaacc

SEQ ID NO: 1121031 - DNA, 25 bp, Homo sapien
cttcatcattttccttagaaccaac

SEQ ID NO: 1121032 - DNA, 25 bp, Homo sapien
tacttcatcattttccttagaacca

SEQ ID NO: 1121033 - DNA, 25 bp, Homo sapien
acttcatcattttccttagaaccaa

SEQ ID NO: 1121034 - DNA, 25 bp, Homo sapien
ggtacttgacgaatgtccagatgct

SEQ ID NO: 1121035 - DNA, 25 bp, Homo sapien
tatactatttctattggtacttgac

SEQ ID NO: 1121036 - DNA, 25 bp, Homo sapien
gatgctcctaatccatcagatttca

SEQ ID NO: 1121037 - DNA, 25 bp, Homo sapien
tgtccagatgctcctaatccatcag

SEQ ID NO: 1121038 - DNA, 25 bp, Homo sapien
agttcttttgtaatcttagatgcta

SEQ ID NO: 1121039 - DNA, 25 bp, Homo sapien
ttgttacagttttgggctttccaga

SEQ ID NO: 1121040 - DNA, 25 bp, Homo sapien
tttagttcttttgtaatcttagatg

SEQ ID NO: 1121041 - DNA, 25 bp, Homo sapien
tgttacagttttgggctttccagaa

SEQ ID NO: 1121042 - DNA, 25 bp, Homo sapien
catgttttccaaccgtgccttatca

SEQ ID NO: 1121043 - DNA, 25 bp, Homo sapien
gacatgttttccaaccgtgccttat

SEQ ID NO: 1121044 - DNA, 25 bp, Homo sapien
tacaacttgtctaggtgacatgttt

SEQ ID NO: 1121045 - DNA, 25 bp, Homo sapien
aggtgacatgttttccaaccgtgcc

SEQ ID NO: 1121046 - DNA, 25 bp, Homo sapien
acctgaaatttgcccttcctgattt

SEQ ID NO: 1121047 - DNA, 25 bp, Homo sapien
gcacctgaaatttgcccttcctgat

SEQ ID NO: 1121048 - DNA, 25 bp, Homo sapien
ggtctggcacctgaaatttgccctt

SEQ ID NO: 1121049 - DNA, 25 bp, Homo sapien
ctggcacctgaaatttgcccttcct

SEQ ID NO: 1121050 - DNA, 25 bp, Homo sapien
aaaggatagtttatgtccagaaggc

SEQ ID NO: 1121051 - DNA, 25 bp, Homo sapien
cggttcatccagacattcagtggaa

SEQ ID NO: 1121052 - DNA, 25 bp, Homo sapien
atctgctggagggtcctgcgatgct

SEQ ID NO: 1121053 - DNA, 25 bp, Homo sapien
tggtgaatccttccctgtagctttc

SEQ ID NO: 1121054 - DNA, 25 bp, Homo sapien
cttgaaacaggtcgagattttatgg

SEQ ID NO: 1121055 - DNA, 25 bp, Homo sapien
gtaactcttgaaacaggtcgagatt

SEQ ID NO: 1121056 - DNA, 25 bp, Homo sapien
ttggaagttccattggtaactcttg

SEQ ID NO: 1121057 - DNA, 25 bp, Homo sapien
gttatttacattagtgtcttgttca

SEQ ID NO: 1121058 - DNA, 25 bp, Homo sapien
ggctcactacatcctttgccactga

SEQ ID NO: 1121059 - DNA, 25 bp, Homo sapien
ctgtggtactggctcactacatcct

SEQ ID NO: 1121060 - DNA, 25 bp, Homo sapien
tcactacatcctttgccactgactt

SEQ ID NO: 1121061 - DNA, 25 bp, Homo sapien
tttgccactgactttctttagtaca

SEQ ID NO: 1121062 - DNA, 25 bp, Homo sapien
agatggggtactctttgtcctctgc

SEQ ID NO: 1121063 - DNA, 25 bp, Homo sapien
cagtacatccattgctagttcctct

SEQ ID NO: 1121064 - DNA, 25 bp, Homo sapien
tttagtaagattagatggggtactc

SEQ ID NO: 1121065 - DNA, 25 bp, Homo sapien
agtacatccattgctagttcctctt

SEQ ID NO: 1121066 - DNA, 25 bp, Homo sapien
tagttgtattgtggtccaactttgc

SEQ ID NO: 1121067 - DNA, 25 bp, Homo sapien
gagtttggtgactctccttgggatc

SEQ ID NO: 1121068 - DNA, 25 bp, Homo sapien
tgtattgtggtccaactttgccaca

SEQ ID NO: 1121069 - DNA, 25 bp, Homo sapien
tgtacttgcttgaccatttttctct

SEQ ID NO: 1121070 - DNA, 25 bp, Homo sapien
tagatttttaggcattgccactatt

SEQ ID NO: 1121071 - DNA, 25 bp, Homo sapien
taggcattgccactatttttgcatt

SEQ ID NO: 1121072 - DNA, 25 bp, Homo sapien
ctgatttagatttttaggcattgcc

SEQ ID NO: 1121073 - DNA, 25 bp, Homo sapien
ctttgactgatttagatttttaggc

SEQ ID NO: 1121074 - DNA, 25 bp, Homo sapien
acatatgttagctgcatcgcaatca

SEQ ID NO: 1121075 - DNA, 25 bp, Homo sapien
caggatgactggagtgcttctgcat

SEQ ID NO: 1121076 - DNA, 25 bp, Homo sapien
tttgatataacctgtccaggaggca

SEQ ID NO: 1121077 - DNA, 25 bp, Homo sapien
tcaaatggatttgccctgcacttgt

SEQ ID NO: 1121078 - DNA, 25 bp, Homo sapien
tctgatagctgtcccgaaaaacact

SEQ ID NO: 1121079 - DNA, 25 bp, Homo sapien
tactaggaattgtcagtccttccac

SEQ ID NO: 1121080 - DNA, 25 bp, Homo sapien
gtctgctgtagcatgtttgtcttca

SEQ ID NO: 1121081 - DNA, 25 bp, Homo sapien
gattcatctgacaacttactaggaa

SEQ ID NO: 1121082 - DNA, 25 bp, Homo sapien
aaactggacactgcctcgtggaata

SEQ ID NO: 1121083 - DNA, 25 bp, Homo sapien
cagatctgggctttatgtcatcgga

SEQ ID NO: 1121084 - DNA, 25 bp, Homo sapien
tcaggagtactggtatcactgctac

SEQ ID NO: 1121085 - DNA, 25 bp, Homo sapien
tctctcgctgatgcagaacaccagt

SEQ ID NO: 1121086 - DNA, 25 bp, Homo sapien
ttttcttgaagagtcaatgctacta

SEQ ID NO: 1121087 - DNA, 25 bp, Homo sapien
catttttacatacactattgccttt

SEQ ID NO: 1121088 - DNA, 25 bp, Homo sapien
tactaagatccaagacagtgctttc

SEQ ID NO: 1121089 - DNA, 25 bp, Homo sapien
tctgcttctactggataggacgtct

SEQ ID NO: 1121090 - DNA, 25 bp, Homo sapien
ctctttgatgaagatccaagtgaca

SEQ ID NO: 1121091 - DNA, 25 bp, Homo sapien
tgaggcagaacttgactccgaaagg

SEQ ID NO: 1121092 - DNA, 25 bp, Homo sapien
cactatccaagaatttgctgcgttg

SEQ ID NO: 1121093 - DNA, 25 bp, Homo sapien
cagtagttgtagaatggctctcttt

SEQ ID NO: 1121094 - DNA, 25 bp, Homo sapien
tattcttccgattttgctgaacagg

SEQ ID NO: 1121095 - DNA, 25 bp, Homo sapien
tagggtaagtccgttgcaaaaggca

SEQ ID NO: 1121096 - DNA, 25 bp, Homo sapien
ttactagagttattgcacaggcctc

SEQ ID NO: 1121097 - DNA, 25 bp, Homo sapien
caaaggaagatgcaagcaaggacaa

SEQ ID NO: 1121098 - DNA, 25 bp, Homo sapien
gcaaaatcaacataggcaactaaca

SEQ ID NO: 1121099 - DNA, 25 bp, Homo sapien
cagagttttgtagaatattaacaca

SEQ ID NO: 1121100 - DNA, 25 bp, Homo sapien
taaaaattgcacgttggtaccctca

SEQ ID NO: 1121101 - DNA, 25 bp, Homo sapien
tcaagggtaatgtttagaagcaaaa

SEQ ID NO: 1121102 - DNA, 25 bp, Homo sapien
gatgctcgctgaggaatcaagtgga

SEQ ID NO: 1121103 - DNA, 25 bp, Homo sapien
ttgaaggccgatggtcatacatgcg

SEQ ID NO: 1121104 - DNA, 25 bp, Homo sapien
gccttgaggcgaacaatcttcagag

SEQ ID NO: 1121105 - DNA, 25 bp, Homo sapien
aaaactagccatggtgatgctcgct

SEQ ID NO: 1121106 - DNA, 25 bp, Homo sapien
gaaagtttatatccggctaatgcaa

SEQ ID NO: 1121107 - DNA, 25 bp, Homo sapien
tggacacaagcacggtaagttttta

SEQ ID NO: 1121108 - DNA, 25 bp, Homo sapien
gaacaaatcatcagctaggaaagga

SEQ ID NO: 1121109 - DNA, 25 bp, Homo sapien
tactatgttaccctatgcagagcaa

SEQ ID NO: 1121110 - DNA, 25 bp, Homo sapien
ttctaaagcatcatatgaagctccc

SEQ ID NO: 1121111 - DNA, 25 bp, Homo sapien
gcttgcttagctgcttatcagaaag

SEQ ID NO: 1121112 - DNA, 25 bp, Homo sapien
tgaagctcccaaacttatcattctc

SEQ ID NO: 1121113 - DNA, 25 bp, Homo sapien
acattcctgatatagcttgcttagc

SEQ ID NO: 1121114 - DNA, 25 bp, Homo sapien
gtctccttttcagtcaagctccttg

SEQ ID NO: 1121115 - DNA, 25 bp, Homo sapien
aaatggactagtctaagtgtgtgcc

SEQ ID NO: 1121116 - DNA, 25 bp, Homo sapien
gaagttccttgaaatgccacctatc

SEQ ID NO: 1121117 - DNA, 25 bp, Homo sapien
gcagcagtaggtgccttgtagtccc

SEQ ID NO: 1121118 - DNA, 25 bp, Homo sapien
tgccggcgcatttccagctttatct

SEQ ID NO: 1121119 - DNA, 25 bp, Homo sapien
catgtgttggtctgccggcgcattt

SEQ ID NO: 1121120 - DNA, 25 bp, Homo sapien
ggtctgccggcgcatttccagcttt

SEQ ID NO: 1121121 - DNA, 25 bp, Homo sapien
agggctcatcatgtgttggtctgcc

SEQ ID NO: 1121122 - DNA, 25 bp, Homo sapien
ggtgtgtcaactgcatctcaaatgt

SEQ ID NO: 1121123 - DNA, 25 bp, Homo sapien
tcataacctgttagaatgcaagtga

SEQ ID NO: 1121124 - DNA, 25 bp, Homo sapien
gcaagtgatcttaatgaaacagtcc

SEQ ID NO: 1121125 - DNA, 25 bp, Homo sapien
gatgtttgcctaaatggcttgctca

SEQ ID NO: 1121126 - DNA, 25 bp, Homo sapien
tgggagaatcaactaaacaatgatc

SEQ ID NO: 1121127 - DNA, 25 bp, Homo sapien
acctctgcctaccacgcgattcttg

SEQ ID NO: 1121128 - DNA, 25 bp, Homo sapien
cccagcctagaagatgttaatatta

SEQ ID NO: 1121129 - DNA, 25 bp, Homo sapien
tacaggcgcattcagccatagccgg

SEQ ID NO: 1121130 - DNA, 25 bp, Homo sapien
caactaagggttgaactcttgataa

SEQ ID NO: 1121131 - DNA, 25 bp, Homo sapien
tatgtggtttcatcaaagacgtata

SEQ ID NO: 1121132 - DNA, 25 bp, Homo sapien
tattttgatgcctggtgagttctga

SEQ ID NO: 1121133 - DNA, 25 bp, Homo sapien
tctgtggtgactagaaggcttgaac

SEQ ID NO: 1121134 - DNA, 25 bp, Homo sapien
aacaaaatctcattgtatgcgttca

SEQ ID NO: 1121135 - DNA, 25 bp, Homo sapien
atctcattgtatgcgttcattctaa

SEQ ID NO: 1121136 - DNA, 25 bp, Homo sapien
caaacaaaatctcattgtatgcgtt

SEQ ID NO: 1121137 - DNA, 25 bp, Homo sapien
aaaatctcattgtatgcgttcattc

SEQ ID NO: 1121138 - DNA, 25 bp, Homo sapien
ccagctaggaacttcgtggttatca

SEQ ID NO: 1121139 - DNA, 25 bp, Homo sapien
cactttccctcgtaggcactgtggt

SEQ ID NO: 1121140 - DNA, 25 bp, Homo sapien
tgcctcagatcagggggtctatacc

SEQ ID NO: 1121141 - DNA, 25 bp, Homo sapien
aggcagccagagatgtatgaatcac

SEQ ID NO: 1121142 - DNA, 25 bp, Homo sapien
cagagaccgctcagggtttcccaaa

SEQ ID NO: 1121143 - DNA, 25 bp, Homo sapien
aggcgccgccggtagggcagagcgc

SEQ ID NO: 1121144 - DNA, 25 bp, Homo sapien
cagaacgttccgtgagcagtgagag

SEQ ID NO: 1121145 - DNA, 25 bp, Homo sapien
cagggttctgcagtcgctgggcttc

SEQ ID NO: 1121146 - DNA, 25 bp, Homo sapien
tgtggatcaacctagcttctaatgg

SEQ ID NO: 1121147 - DNA, 25 bp, Homo sapien
aacctagcttctaatggtgcaacaa

SEQ ID NO: 1121148 - DNA, 25 bp, Homo sapien
gagctaataataatggtggttgtcc

SEQ ID NO: 1121149 - DNA, 25 bp, Homo sapien
gccatctgtctgtggatcaacctag

SEQ ID NO: 1121150 - DNA, 25 bp, Homo sapien
gggcaatgtagcgagaccttctttc

SEQ ID NO: 1121151 - DNA, 25 bp, Homo sapien
gcaatgtagcgagaccttctttcta

SEQ ID NO: 1121152 - DNA, 25 bp, Homo sapien
caggcaattaaatcatattacccac

SEQ ID NO: 1121153 - DNA, 25 bp, Homo sapien
aggcaattaaatcatattacccaca

SEQ ID NO: 1121154 - DNA, 25 bp, Homo sapien
gaactttgtggcttcgattttctag

SEQ ID NO: 1121155 - DNA, 25 bp, Homo sapien
ttttctagggcagttgcaacttcat

SEQ ID NO: 1121156 - DNA, 25 bp, Homo sapien
gaatctgaatatcgaactttgtggc

SEQ ID NO: 1121157 - DNA, 25 bp, Homo sapien
ttgatccattttccactgaatctga

SEQ ID NO: 1121158 - DNA, 25 bp, Homo sapien
tctcaattttggctagaaatatttc

SEQ ID NO: 1121159 - DNA, 25 bp, Homo sapien
ttcttcagttgacagaagacattcc

SEQ ID NO: 1121160 - DNA, 25 bp, Homo sapien
ctctgctgaatcctgaacatcagtt

SEQ ID NO: 1121161 - DNA, 25 bp, Homo sapien
gacattccttagtatccattaataa

SEQ ID NO: 1121162 - DNA, 25 bp, Homo sapien
tgcacataagattaatagcatttac

SEQ ID NO: 1121163 - DNA, 25 bp, Homo sapien
tactggaagtattcgtaagttacaa

SEQ ID NO: 1121164 - DNA, 25 bp, Homo sapien
ctttgctatagtgcacataagatta

SEQ ID NO: 1121165 - DNA, 25 bp, Homo sapien
actgtgttgtgtactggaagtattc

SEQ ID NO: 1121166 - DNA, 25 bp, Homo sapien
gctgttatcattctgtagcaaatgc

SEQ ID NO: 1121167 - DNA, 25 bp, Homo sapien
tgaatcactattcagttttatcttc

SEQ ID NO: 1121168 - DNA, 25 bp, Homo sapien
tccaaacaggactttgctcaatgat

SEQ ID NO: 1121169 - DNA, 25 bp, Homo sapien
ctcaatgatgtaagctttagctgtt

SEQ ID NO: 1121170 - DNA, 25 bp, Homo sapien
cattaagttggtactctaatttggg

SEQ ID NO: 1121171 - DNA, 25 bp, Homo sapien
acattaagttggtactctaatttgg

SEQ ID NO: 1121172 - DNA, 25 bp, Homo sapien
cattgtagtgtagaactgcctagtc

SEQ ID NO: 1121173 - DNA, 25 bp, Homo sapien
tgaaatatttgcagagccggatgac

SEQ ID NO: 1121174 - DNA, 25 bp, Homo sapien
tccttttgtgagagagatatgctac

SEQ ID NO: 1121175 - DNA, 25 bp, Homo sapien
ggaaatcagtaagcctccttgggta

SEQ ID NO: 1121176 - DNA, 25 bp, Homo sapien
cccgcctccctacgcgtagcgcggg

SEQ ID NO: 1121177 - DNA, 25 bp, Homo sapien
acgctccggcgtctcgccccgaggc

SEQ ID NO: 1121178 - DNA, 25 bp, Homo sapien
tagtctgccggacggggacacgctc

SEQ ID NO: 1121179 - DNA, 25 bp, Homo sapien
cgaggccccgcctccctacgcgtag

SEQ ID NO: 1121180 - DNA, 25 bp, Homo sapien
cggcttttcgagagcagcggggagc

SEQ ID NO: 1121181 - DNA, 25 bp, Homo sapien
ggccttgcggccggcagaagacggc

SEQ ID NO: 1121182 - DNA, 25 bp, Homo sapien
ctgcggcttttcgagagcagcgggg

SEQ ID NO: 1121183 - DNA, 25 bp, Homo sapien
ccttgcggccggcagaagacggccc

SEQ ID NO: 1121184 - DNA, 25 bp, Homo sapien
gtccggcaccttaaagaactgggca

SEQ ID NO: 1121185 - DNA, 25 bp, Homo sapien
ccgtctgccaaacgtcctctctggg

SEQ ID NO: 1121186 - DNA, 25 bp, Homo sapien
cactcctgaaaatctgagatctggg

SEQ ID NO: 1121187 - DNA, 25 bp, Homo sapien
aaacctctctccgtctgccaaacgt

SEQ ID NO: 1121188 - DNA, 25 bp, Homo sapien
tagaagcatcttcttgtttcaaagt

SEQ ID NO: 1121189 - DNA, 25 bp, Homo sapien
ttcaaagtacttgtctgtttagtac

SEQ ID NO: 1121190 - DNA, 25 bp, Homo sapien
agcatcttcttgtttcaaagtactt

SEQ ID NO: 1121191 - DNA, 25 bp, Homo sapien
gaagcatcttcttgtttcaaagtac

SEQ ID NO: 1121192 - DNA, 25 bp, Homo sapien
ctcctctaaaagctgttcaacaata

SEQ ID NO: 1121193 - DNA, 25 bp, Homo sapien
ttctcctctaaaagctgttcaacaa

SEQ ID NO: 1121194 - DNA, 25 bp, Homo sapien
tctcctctaaaagctgttcaacaat

SEQ ID NO: 1121195 - DNA, 25 bp, Homo sapien
gacaatagaacgttcatccacgaca

SEQ ID NO: 1121196 - DNA, 25 bp, Homo sapien
tagtgagcaggtgtaatgaacctcc

SEQ ID NO: 1121197 - DNA, 25 bp, Homo sapien
tccacgacatcactgtagtgagcag

SEQ ID NO: 1121198 - DNA, 25 bp, Homo sapien
gacataaaggataaccacagagttt

SEQ ID NO: 1121199 - DNA, 25 bp, Homo sapien
gtaatatcatagactttattggttt

SEQ ID NO: 1121200 - DNA, 25 bp, Homo sapien
taatatcatagactttattggtttt

SEQ ID NO: 1121201 - DNA, 25 bp, Homo sapien
gataacaaaaattgctgcaaaaaga

SEQ ID NO: 1121202 - DNA, 25 bp, Homo sapien
cttgataacaaaaattgctgcaaaa

SEQ ID NO: 1121203 - DNA, 25 bp, Homo sapien
tgataacaaaaattgctgcaaaaag

SEQ ID NO: 1121204 - DNA, 25 bp, Homo sapien
ttgataacaaaaattgctgcaaaaa

SEQ ID NO: 1121205 - DNA, 25 bp, Homo sapien
tcttctcgaacccatactggagttt

SEQ ID NO: 1121206 - DNA, 25 bp, Homo sapien
tctcttcttctcgaacccatactgg

SEQ ID NO: 1121207 - DNA, 25 bp, Homo sapien
ttctcgaacccatactggagttttg

SEQ ID NO: 1121208 - DNA, 25 bp, Homo sapien
tcttcttctcgaacccatactggag

SEQ ID NO: 1121209 - DNA, 25 bp, Homo sapien
caagaggctaaactccagcattgcc

SEQ ID NO: 1121210 - DNA, 25 bp, Homo sapien
gaattgagagtggtgttacatcgcc

SEQ ID NO: 1121211 - DNA, 25 bp, Homo sapien
gagttcacctggatcctaagaccca

SEQ ID NO: 1121212 - DNA, 25 bp, Homo sapien
cagacataactagcatcacaggaca

SEQ ID NO: 1121213 - DNA, 25 bp, Homo sapien
aagaccaaattaggtcaaattcaat

SEQ ID NO: 1121214 - DNA, 25 bp, Homo sapien
ttcacaataatgtaagaaagaccaa

SEQ ID NO: 1121215 - DNA, 25 bp, Homo sapien
gaaagaccaaattaggtcaaattca

SEQ ID NO: 1121216 - DNA, 25 bp, Homo sapien
atgccaagttcaaattgttcaggac

SEQ ID NO: 1121217 - DNA, 25 bp, Homo sapien
tgtatgcaacttagaataaataaaa

SEQ ID NO: 1121218 - DNA, 25 bp, Homo sapien
gtccagctgtaatctaagagtctat

SEQ ID NO: 1121219 - DNA, 25 bp, Homo sapien
aatctaagagtctatcagttgtgag

SEQ ID NO: 1121220 - DNA, 25 bp, Homo sapien
tgtgagatccatttcaattgcacag

SEQ ID NO: 1121221 - DNA, 25 bp, Homo sapien
gtctgctagatggttttacacatta

SEQ ID NO: 1121222 - DNA, 25 bp, Homo sapien
tatttacactgttgtgcaactatcg

SEQ ID NO: 1121223 - DNA, 25 bp, Homo sapien
ttgtgcaactatcgccaccatgcat

SEQ ID NO: 1121224 - DNA, 25 bp, Homo sapien
tcttcccaaattgtctgctagatgg

SEQ ID NO: 1121225 - DNA, 25 bp, Homo sapien
caatcctttgatcatacagccccta

SEQ ID NO: 1121226 - DNA, 25 bp, Homo sapien
cctttattaaagaagtctgccctca

SEQ ID NO: 1121227 - DNA, 25 bp, Homo sapien
gagggtactttatcagcaatgaggc

SEQ ID NO: 1121228 - DNA, 25 bp, Homo sapien
aataaatcataaagcaaggcccagg

SEQ ID NO: 1121229 - DNA, 25 bp, Homo sapien
tcttcctttagcagttgaaaatcag

SEQ ID NO: 1121230 - DNA, 25 bp, Homo sapien
cttcctttagcagttgaaaatcagg

SEQ ID NO: 1121231 - DNA, 25 bp, Homo sapien
gttcttcctttagcagttgaaaatc

SEQ ID NO: 1121232 - DNA, 25 bp, Homo sapien
ttcttcctttagcagttgaaaatca

SEQ ID NO: 1121233 - DNA, 25 bp, Homo sapien
aaagtggctaggattgtcgatatct

SEQ ID NO: 1121234 - DNA, 25 bp, Homo sapien
tcactgtgagtgctagaagaactag

SEQ ID NO: 1121235 - DNA, 25 bp, Homo sapien
tcactgctactatcactgtgagtgc

SEQ ID NO: 1121236 - DNA, 25 bp, Homo sapien
ggctttactgcataactgtacttct

SEQ ID NO: 1121237 - DNA, 25 bp, Homo sapien
gagaggcttcgggtttcagacacac

SEQ ID NO: 1121238 - DNA, 25 bp, Homo sapien
caggcagggaaatgactatctggat

SEQ ID NO: 1121239 - DNA, 25 bp, Homo sapien
tagacactgacctagacacttggtt

SEQ ID NO: 1121240 - DNA, 25 bp, Homo sapien
ttctggccatacaaaaacctcaatg

SEQ ID NO: 1121241 - DNA, 25 bp, Homo sapien
aaggtaaagactcatccaagctgtt

SEQ ID NO: 1121242 - DNA, 25 bp, Homo sapien
ctctgtaaaactccctgatcctcag

SEQ ID NO: 1121243 - DNA, 25 bp, Homo sapien
taatggctgtacctgagcccctaaa

SEQ ID NO: 1121244 - DNA, 25 bp, Homo sapien
tcaaattctcgtaacttggcagtgg

SEQ ID NO: 1121245 - DNA, 25 bp, Homo sapien
agttttccaaatgttaacgatctgg

SEQ ID NO: 1121246 - DNA, 25 bp, Homo sapien
tctggaaaaactcaatgtctgtaag

SEQ ID NO: 1121247 - DNA, 25 bp, Homo sapien
ggcagaatgactaaagaaactattt

SEQ ID NO: 1121248 - DNA, 25 bp, Homo sapien
tagtaatgccaacagtggagatggc

SEQ ID NO: 1121249 - DNA, 25 bp, Homo sapien
ttcatttattgtatgaagaattagg

SEQ ID NO: 1121250 - DNA, 25 bp, Homo sapien
tcatttattgtatgaagaattaggg

SEQ ID NO: 1121251 - DNA, 25 bp, Homo sapien
aaagtttgtatctgtggcacagtag

SEQ ID NO: 1121252 - DNA, 25 bp, Homo sapien
ctttctttgataagcagaacaataa

SEQ ID NO: 1121253 - DNA, 25 bp, Homo sapien
ggcacagtaggaaaataactagact

SEQ ID NO: 1121254 - DNA, 25 bp, Homo sapien
tctttctttgataagcagaacaata

SEQ ID NO: 1121255 - DNA, 25 bp, Homo sapien
tctgggaacttgagtctatcagtgg

SEQ ID NO: 1121256 - DNA, 25 bp, Homo sapien
gcgttttctaatctggttctgggaa

SEQ ID NO: 1121257 - DNA, 25 bp, Homo sapien
gaacttgagtctatcagtggaaagg

SEQ ID NO: 1121258 - DNA, 25 bp, Homo sapien
tactcaacttttcaagtacgatgcg

SEQ ID NO: 1121259 - DNA, 25 bp, Homo sapien
tctcccaatgtaatctgaagaggaa

SEQ ID NO: 1121260 - DNA, 25 bp, Homo sapien
gttgtgtgtaaatatctcccaatgt

SEQ ID NO: 1121261 - DNA, 25 bp, Homo sapien
tttaagttgtgtgtaaatatctccc

SEQ ID NO: 1121262 - DNA, 25 bp, Homo sapien
atatctcccaatgtaatctgaagag

SEQ ID NO: 1121263 - DNA, 25 bp, Homo sapien
gtcttatcagaggtcattctgtatt

SEQ ID NO: 1121264 - DNA, 25 bp, Homo sapien
cttatcagaggtcattctgtattct

SEQ ID NO: 1121265 - DNA, 25 bp, Homo sapien
tcttatcagaggtcattctgtattc

SEQ ID NO: 1121266 - DNA, 25 bp, Homo sapien
tgtcttatcagaggtcattctgtat

SEQ ID NO: 1121267 - DNA, 25 bp, Homo sapien
aagcaaacatcgtatagcattttct

SEQ ID NO: 1121268 - DNA, 25 bp, Homo sapien
tttgctcatcataattttgaatgaa

SEQ ID NO: 1121269 - DNA, 25 bp, Homo sapien
ttgctcatcataattttgaatgaaa

SEQ ID NO: 1121270 - DNA, 25 bp, Homo sapien
gcaaacatcgtatagcattttcttt

SEQ ID NO: 1121271 - DNA, 25 bp, Homo sapien
cattccgcaggtttgtgtataatat

SEQ ID NO: 1121272 - DNA, 25 bp, Homo sapien
gcaacaccatagcaattaaagtcca

SEQ ID NO: 1121273 - DNA, 25 bp, Homo sapien
agcaacaccatagcaattaaagtcc

SEQ ID NO: 1121274 - DNA, 25 bp, Homo sapien
aattaaagtccattccgcaggtttg

SEQ ID NO: 1121275 - DNA, 25 bp, Homo sapien
taaatagccttagaaaccactagtg

SEQ ID NO: 1121276 - DNA, 25 bp, Homo sapien
ctttccaagatgataacaggctggg

SEQ ID NO: 1121277 - DNA, 25 bp, Homo sapien
tcaatgtcctatgggcttcaatgac

SEQ ID NO: 1121278 - DNA, 25 bp, Homo sapien
ccactagtggtttcttaaaagctga

SEQ ID NO: 1121279 - DNA, 25 bp, Homo sapien
tccattagagaacatcaagggcata

SEQ ID NO: 1121280 - DNA, 25 bp, Homo sapien
gacttgcatgctactccctgaacga

SEQ ID NO: 1121281 - DNA, 25 bp, Homo sapien
aataccatttcccaggacttgcatg

SEQ ID NO: 1121282 - DNA, 25 bp, Homo sapien
tatggtctctgcctaggaagcgggc

SEQ ID NO: 1121283 - DNA, 25 bp, Homo sapien
taaaatgactactgggtgtgaagca

SEQ ID NO: 1121284 - DNA, 25 bp, Homo sapien
ggagccctcatactttgctagtgga

SEQ ID NO: 1121285 - DNA, 25 bp, Homo sapien
tgaatgtttatagcactgttatcca

SEQ ID NO: 1121286 - DNA, 25 bp, Homo sapien
taaagttcaatctttggagccctca

SEQ ID NO: 1121287 - DNA, 25 bp, Homo sapien
ctttttgctcaggatccttggtgac

SEQ ID NO: 1121288 - DNA, 25 bp, Homo sapien
tagtgaagttggagtgcacatcttt

SEQ ID NO: 1121289 - DNA, 25 bp, Homo sapien
ggatagtgaagttggagtgcacatc

SEQ ID NO: 1121290 - DNA, 25 bp, Homo sapien
ttttgctcaggatccttggtgactt

SEQ ID NO: 1121291 - DNA, 25 bp, Homo sapien
cttttgaaattaagaacaggaggca

SEQ ID NO: 1121292 - DNA, 25 bp, Homo sapien
aacactgacatttaaggcaaggaga

SEQ ID NO: 1121293 - DNA, 25 bp, Homo sapien
ttaccctctagttcttccagccttg

SEQ ID NO: 1121294 - DNA, 25 bp, Homo sapien
agccttgcctgtctaacgtctcctt

SEQ ID NO: 1121295 - DNA, 25 bp, Homo sapien
aatgcctaaattaattctcctaggg

SEQ ID NO: 1121296 - DNA, 25 bp, Homo sapien
caagctcagaaatgcctaaattaat

SEQ ID NO: 1121297 - DNA, 25 bp, Homo sapien
agtggctgtacaactcaagctcaga

SEQ ID NO: 1121298 - DNA, 25 bp, Homo sapien
taaacatagtggctgtacaactcaa

SEQ ID NO: 1121299 - DNA, 25 bp, Homo sapien
ctaagtgctagagtaagtgcttggc

SEQ ID NO: 1121300 - DNA, 25 bp, Homo sapien
gcttggcactaggaagacaaaagta

SEQ ID NO: 1121301 - DNA, 25 bp, Homo sapien
gacaatgtatttgactgcatggaga

SEQ ID NO: 1121302 - DNA, 25 bp, Homo sapien
cacgtgcaatgcaattttaccagtg

SEQ ID NO: 1121303 - DNA, 25 bp, Homo sapien
ataaaggtctttatccttgtcttca

SEQ ID NO: 1121304 - DNA, 25 bp, Homo sapien
aaggtctttatccttgtcttcacat

SEQ ID NO: 1121305 - DNA, 25 bp, Homo sapien
aaaggtctttatccttgtcttcaca

SEQ ID NO: 1121306 - DNA, 25 bp, Homo sapien
ggtctttatccttgtcttcacattg

SEQ ID NO: 1121307 - DNA, 25 bp, Homo sapien
tctatccaaggatttagagctgtac

SEQ ID NO: 1121308 - DNA, 25 bp, Homo sapien
tcaggttaggacaagtaccctccat

SEQ ID NO: 1121309 - DNA, 25 bp, Homo sapien
taccctccatttgttattactgagc

SEQ ID NO: 1121310 - DNA, 25 bp, Homo sapien
gacctttatttagctgactgctcca

SEQ ID NO: 1121311 - DNA, 25 bp, Homo sapien
ctggatgaaacagcgagacagacct

SEQ ID NO: 1121312 - DNA, 25 bp, Homo sapien
taagatggcttaacacaggctatct

SEQ ID NO: 1121313 - DNA, 25 bp, Homo sapien
tcaaaaggtgacacttaagatggct

SEQ ID NO: 1121314 - DNA, 25 bp, Homo sapien
tggtgggcccaaataacttctatgt

SEQ ID NO: 1121315 - DNA, 25 bp, Homo sapien
tgattcgctgaatccacagttacag

SEQ ID NO: 1121316 - DNA, 25 bp, Homo sapien
tatttttaagatgctgaaccctgaa

SEQ ID NO: 1121317 - DNA, 25 bp, Homo sapien
cagaacccctgtgtacaaagaacta

SEQ ID NO: 1121318 - DNA, 25 bp, Homo sapien
aatctagtggactacttttggagtc

SEQ ID NO: 1121319 - DNA, 25 bp, Homo sapien
ctgaatgccaagaattggggtcagt

SEQ ID NO: 1121320 - DNA, 25 bp, Homo sapien
caaggagggtgtctagaaaccgtgt

SEQ ID NO: 1121321 - DNA, 25 bp, Homo sapien
taattcttcaaggagggtgtctaga

SEQ ID NO: 1121322 - DNA, 25 bp, Homo sapien
tttttagatgtaattcttcaaggag

SEQ ID NO: 1121323 - DNA, 25 bp, Homo sapien
gctggttctaaatatgatggttaga

SEQ ID NO: 1121324 - DNA, 25 bp, Homo sapien
gtcaggatgaagttcaagactctca

SEQ ID NO: 1121325 - DNA, 25 bp, Homo sapien
gttttaactgatcaaggtcaactgg

SEQ ID NO: 1121326 - DNA, 25 bp, Homo sapien
tgagcttcgtattcaacttgagggc

SEQ ID NO: 1121327 - DNA, 25 bp, Homo sapien
cagaatgatttcgttagctcacagc

SEQ ID NO: 1121328 - DNA, 25 bp, Homo sapien
tagttatcagtcaccaccagaccat

SEQ ID NO: 1121329 - DNA, 25 bp, Homo sapien
ccagaccatcatggcggctagaatt

SEQ ID NO: 1121330 - DNA, 25 bp, Homo sapien
tactatgtcttgtactagggataca

SEQ ID NO: 1121331 - DNA, 25 bp, Homo sapien
ttccagaaacggtgaatagaagttc

SEQ ID NO: 1121332 - DNA, 25 bp, Homo sapien
tgatggctggaaatcatccagaaaa

SEQ ID NO: 1121333 - DNA, 25 bp, Homo sapien
taggttgggaggtcaaaatcataac

SEQ ID NO: 1121334 - DNA, 25 bp, Homo sapien
ctgatatgatggctggaaatcatcc

SEQ ID NO: 1121335 - DNA, 25 bp, Homo sapien
tattgacctaattgtttactgatct

SEQ ID NO: 1121336 - DNA, 25 bp, Homo sapien
cacagagctaattactggtggagcc

SEQ ID NO: 1121337 - DNA, 25 bp, Homo sapien
gacagtagcctttgcccatacagag

SEQ ID NO: 1121338 - DNA, 25 bp, Homo sapien
aaaaaattgtcagagtggccccaga

SEQ ID NO: 1121339 - DNA, 25 bp, Homo sapien
ccaagttgtctgtgttccgcctcaa

SEQ ID NO: 1121340 - DNA, 25 bp, Homo sapien
taccagcacctctttgtacctttcg

SEQ ID NO: 1121341 - DNA, 25 bp, Homo sapien
cagcacctctttgtacctttcgtag

SEQ ID NO: 1121342 - DNA, 25 bp, Homo sapien
gcacctctttgtacctttcgtagaa

SEQ ID NO: 1121343 - DNA, 25 bp, Homo sapien
cacctctttgtacctttcgtagaat

SEQ ID NO: 1121344 - DNA, 25 bp, Homo sapien
gacttccacaatggtcggactaatt

SEQ ID NO: 1121345 - DNA, 25 bp, Homo sapien
agtttgggcaacaaggccattgtca

SEQ ID NO: 1121346 - DNA, 25 bp, Homo sapien
gcactggcacagtcacagctaactg

SEQ ID NO: 1121347 - DNA, 25 bp, Homo sapien
cctcccaatgtagcctctcaagtag

SEQ ID NO: 1121348 - DNA, 25 bp, Homo sapien
caggcaatcctcccaatgtagcctc

SEQ ID NO: 1121349 - DNA, 25 bp, Homo sapien
gttgtttggttttctgatcttgtga

SEQ ID NO: 1121350 - DNA, 25 bp, Homo sapien
ttccgaaagtgcagggatttcagat

SEQ ID NO: 1121351 - DNA, 25 bp, Homo sapien
ggatttcagatgtgaaccacctccc

SEQ ID NO: 1121352 - DNA, 25 bp, Homo sapien
agggatttcagatgtgaaccacctc

SEQ ID NO: 1121353 - DNA, 25 bp, Homo sapien
atttcagatgtgaaccacctccccg

SEQ ID NO: 1121354 - DNA, 25 bp, Homo sapien
caatttgtatatctttgctgaaata

SEQ ID NO: 1121355 - DNA, 25 bp, Homo sapien
tctcttcatatgctaagcaatttgt

SEQ ID NO: 1121356 - DNA, 25 bp, Homo sapien
gtcctctatcagatacttattatgg

SEQ ID NO: 1121357 - DNA, 25 bp, Homo sapien
actagtgatagtacacatctcttca

SEQ ID NO: 1121358 - DNA, 25 bp, Homo sapien
catctgcaggcaatccatgttttca

SEQ ID NO: 1121359 - DNA, 25 bp, Homo sapien
tgttttcacatcagacccatgcaac

SEQ ID NO: 1121360 - DNA, 25 bp, Homo sapien
tctggactgtaaatggaaacatacc

SEQ ID NO: 1121361 - DNA, 25 bp, Homo sapien
ccatatgtgggatattgcatcagac

SEQ ID NO: 1121362 - DNA, 25 bp, Homo sapien
tggtgacttggtggcagttgtccac

SEQ ID NO: 1121363 - DNA, 25 bp, Homo sapien
tactgagctactggctcctcacctg

SEQ ID NO: 1121364 - DNA, 25 bp, Homo sapien
gaacctagctattttctcaagaagc

SEQ ID NO: 1121365 - DNA, 25 bp, Homo sapien
cccggccagggagctctttcagatt

SEQ ID NO: 1121366 - DNA, 25 bp, Homo sapien
tagggtttccatcatcttaagcact

SEQ ID NO: 1121367 - DNA, 25 bp, Homo sapien
taaatagggtttccatcatcttaag

SEQ ID NO: 1121368 - DNA, 25 bp, Homo sapien
gggtttccatcatcttaagcactta

SEQ ID NO: 1121369 - DNA, 25 bp, Homo sapien
aatagggtttccatcatcttaagca

SEQ ID NO: 1121370 - DNA, 25 bp, Homo sapien
tggcctgcctaggtacatttcagat

SEQ ID NO: 1121371 - DNA, 25 bp, Homo sapien
ggagccagtcctaactcagactctg

SEQ ID NO: 1121372 - DNA, 25 bp, Homo sapien
ccctcagtccaacaaaaatgtgctt

SEQ ID NO: 1121373 - DNA, 25 bp, Homo sapien
ccaccctcagtccaacaaaaatgtg

SEQ ID NO: 1121374 - DNA, 25 bp, Homo sapien
ctgactagggctttgatgagagtgc

SEQ ID NO: 1121375 - DNA, 25 bp, Homo sapien
tcctgactagggctttgatgagagt

SEQ ID NO: 1121376 - DNA, 25 bp, Homo sapien
cctgactagggctttgatgagagtg

SEQ ID NO: 1121377 - DNA, 25 bp, Homo sapien
attcctgactagggctttgatgaga

SEQ ID NO: 1121378 - DNA, 25 bp, Homo sapien
acaggcagccccacgcagtcactgc

SEQ ID NO: 1121379 - DNA, 25 bp, Homo sapien
tggggaacaatacatttcatgaagg

SEQ ID NO: 1121380 - DNA, 25 bp, Homo sapien
gaacaatacatttcatgaaggcatt

SEQ ID NO: 1121381 - DNA, 25 bp, Homo sapien
gctttattggggaacaatacatttc

SEQ ID NO: 1121382 - DNA, 25 bp, Homo sapien
aaggcctgaacatttagagagtaga

SEQ ID NO: 1121383 - DNA, 25 bp, Homo sapien
tgctttcatctaaaggtattttgat

SEQ ID NO: 1121384 - DNA, 25 bp, Homo sapien
gcctgaacatttagagagtagaaaa

SEQ ID NO: 1121385 - DNA, 25 bp, Homo sapien
catctaaaggtattttgatccaatt

SEQ ID NO: 1121386 - DNA, 25 bp, Homo sapien
taaaaccaatgcgtggctggccaca

SEQ ID NO: 1121387 - DNA, 25 bp, Homo sapien
acatagtgattgagacctgggtaac

SEQ ID NO: 1121388 - DNA, 25 bp, Homo sapien
cttgaggcaaggagtaacatagtga

SEQ ID NO: 1121389 - DNA, 25 bp, Homo sapien
tctgccctagaggatttccgagaga

SEQ ID NO: 1121390 - DNA, 25 bp, Homo sapien
caagacatatgggttggcaaagaac

SEQ ID NO: 1121391 - DNA, 25 bp, Homo sapien
gaataccagggaacatcttcaagct

SEQ ID NO: 1121392 - DNA, 25 bp, Homo sapien
cagtgggtcttatcccaggaacgca

SEQ ID NO: 1121393 - DNA, 25 bp, Homo sapien
taaccagggcagtaaggcaagacat

SEQ ID NO: 1121394 - DNA, 25 bp, Homo sapien
tagaatagtgcttatgaacaaaacc

SEQ ID NO: 1121395 - DNA, 25 bp, Homo sapien
tgtatttccttgtattgtgtgcttt

SEQ ID NO: 1121396 - DNA, 25 bp, Homo sapien
gcacctccggatagaaacaatgtct

SEQ ID NO: 1121397 - DNA, 25 bp, Homo sapien
ttttcgaggggacattcaactgtag

SEQ ID NO: 1121398 - DNA, 25 bp, Homo sapien
gagcaggtcagtgatcacactgaac

SEQ ID NO: 1121399 - DNA, 25 bp, Homo sapien
cactgactcaccagtcaccttgaca

SEQ ID NO: 1121400 - DNA, 25 bp, Homo sapien
gatggtaaatgtgacaaggacctgt

SEQ ID NO: 1121401 - DNA, 25 bp, Homo sapien
ggtgttgccgtatctgccagggatg

SEQ ID NO: 1121402 - DNA, 25 bp, Homo sapien
tgttgccctatccagttgagaggaa

SEQ ID NO: 1121403 - DNA, 25 bp, Homo sapien
caacctattggcacctgtttgcgca

SEQ ID NO: 1121404 - DNA, 25 bp, Homo sapien
gaagataactcccatgatgtcatga

SEQ ID NO: 1121405 - DNA, 25 bp, Homo sapien
caagtgggaccaataattgttgccc

SEQ ID NO: 1121406 - DNA, 25 bp, Homo sapien
tgccttgtgggcaaactcagggatg

SEQ ID NO: 1121407 - DNA, 25 bp, Homo sapien
tcttagagaagacccaagccgtggc

SEQ ID NO: 1121408 - DNA, 25 bp, Homo sapien
cagttgcaggccataaagagacgct

SEQ ID NO: 1121409 - DNA, 25 bp, Homo sapien
agggatttccaaaggtctgaatgta

SEQ ID NO: 1121410 - DNA, 25 bp, Homo sapien
gtgcccattcgtaggtgaaatccca

SEQ ID NO: 1121411 - DNA, 25 bp, Homo sapien
tgacctgttccgttttaacctgcgc

SEQ ID NO: 1121412 - DNA, 25 bp, Homo sapien
taacctgcgctgtttctccttaggc

SEQ ID NO: 1121413 - DNA, 25 bp, Homo sapien
cagtgcccattagtgcccattcgta

SEQ ID NO: 1121414 - DNA, 25 bp, Homo sapien
cgtctggaggtgtcgtgacatgcca

SEQ ID NO: 1121415 - DNA, 25 bp, Homo sapien
gaaagggtgttgattgtggccgtct

SEQ ID NO: 1121416 - DNA, 25 bp, Homo sapien
tgtcgaaagggtgttgattgtggcc

SEQ ID NO: 1121417 - DNA, 25 bp, Homo sapien
tgattgtggccgtctggaggtgtcg

SEQ ID NO: 1121418 - DNA, 25 bp, Homo sapien
tcctttagctaatatttcagggaca

SEQ ID NO: 1121419 - DNA, 25 bp, Homo sapien
tatttcagggacagacacgcgacgc

SEQ ID NO: 1121420 - DNA, 25 bp, Homo sapien
tttcagggacagacacgcgacgcat

SEQ ID NO: 1121421 - DNA, 25 bp, Homo sapien
taatatttcagggacagacacgcga

SEQ ID NO: 1121422 - DNA, 25 bp, Homo sapien
gcatgtgaagcgtcctgggttgtgt

SEQ ID NO: 1121423 - DNA, 25 bp, Homo sapien
agcatgtgaagcgtcctgggttgtg

SEQ ID NO: 1121424 - DNA, 25 bp, Homo sapien
catgtgaagcgtcctgggttgtgta

SEQ ID NO: 1121425 - DNA, 25 bp, Homo sapien
agagcatgtgaagcgtcctgggttg

SEQ ID NO: 1121426 - DNA, 25 bp, Homo sapien
tcactgagaaatccgctggatctcc

SEQ ID NO: 1121427 - DNA, 25 bp, Homo sapien
cctccacagcttttgaagatggagt

SEQ ID NO: 1121428 - DNA, 25 bp, Homo sapien
ccacagcttttgaagatggagtctg

SEQ ID NO: 1121429 - DNA, 25 bp, Homo sapien
tgagaaatccgctggatctcctcct

SEQ ID NO: 1121430 - DNA, 25 bp, Homo sapien
cttgctttcagtgcctcctctaaaa

SEQ ID NO: 1121431 - DNA, 25 bp, Homo sapien
gccactgtgttccatcaatattaag

SEQ ID NO: 1121432 - DNA, 25 bp, Homo sapien
aagccactgtgttccatcaatatta

SEQ ID NO: 1121433 - DNA, 25 bp, Homo sapien
ccactgtgttccatcaatattaaga

SEQ ID NO: 1121434 - DNA, 25 bp, Homo sapien
tgcagtgcctgggaaattcattcac

SEQ ID NO: 1121435 - DNA, 25 bp, Homo sapien
aggattttctaaccgacacctgcag

SEQ ID NO: 1121436 - DNA, 25 bp, Homo sapien
aatgctctcgaagggactttccagc

SEQ ID NO: 1121437 - DNA, 25 bp, Homo sapien
gaaacacccagcttggaggtggtct

SEQ ID NO: 1121438 - DNA, 25 bp, Homo sapien
cctccagctagccagttggtgaagc

SEQ ID NO: 1121439 - DNA, 25 bp, Homo sapien
gattgatttgagacacggatggaac

SEQ ID NO: 1121440 - DNA, 25 bp, Homo sapien
gctatcaggattcaggccacgtaaa

SEQ ID NO: 1121441 - DNA, 25 bp, Homo sapien
gagtttgcgttcatctacaccagac

SEQ ID NO: 1121442 - DNA, 25 bp, Homo sapien
agacagcacttcaaatgcaggcggg

SEQ ID NO: 1121443 - DNA, 25 bp, Homo sapien
gaccttgggcgtagaaatgctaacg

SEQ ID NO: 1121444 - DNA, 25 bp, Homo sapien
cgtctgcgaacggagctcggagttt

SEQ ID NO: 1121445 - DNA, 25 bp, Homo sapien
agacagctgcgaaggcagcgtctgc

SEQ ID NO: 1121446 - DNA, 25 bp, Homo sapien
tcctccgggtttgtctcctaggtgc

SEQ ID NO: 1121447 - DNA, 25 bp, Homo sapien
ggtttgtctcctaggtgccatggcc

SEQ ID NO: 1121448 - DNA, 25 bp, Homo sapien
tgtctcctaggtgccatggcctctc

SEQ ID NO: 1121449 - DNA, 25 bp, Homo sapien
ccgggtttgtctcctaggtgccatg

SEQ ID NO: 1121450 - DNA, 25 bp, Homo sapien
tgagcaagccctcggagtgaccgtg

SEQ ID NO: 1121451 - DNA, 25 bp, Homo sapien
cggagagtactgacccacgtctcca

SEQ ID NO: 1121452 - DNA, 25 bp, Homo sapien
cggagtgaccgtgggtgacagcggc

SEQ ID NO: 1121453 - DNA, 25 bp, Homo sapien
ggctggggctgagcaagccctcgga

SEQ ID NO: 1121454 - DNA, 25 bp, Homo sapien
ttccgggtcctcgaccactgggcat

SEQ ID NO: 1121455 - DNA, 25 bp, Homo sapien
cacagccaggcaggcgatgagtagc

SEQ ID NO: 1121456 - DNA, 25 bp, Homo sapien
taacccacccgatgggaactacagc

SEQ ID NO: 1121457 - DNA, 25 bp, Homo sapien
tttcactccagttggtagctggctc

SEQ ID NO: 1121458 - DNA, 25 bp, Homo sapien
gaaggcagattcgtttactccagac

SEQ ID NO: 1121459 - DNA, 25 bp, Homo sapien
gactcgtttgagctgagagcgccaa

SEQ ID NO: 1121460 - DNA, 25 bp, Homo sapien
ggccacggagaactgctgtactgca

SEQ ID NO: 1121461 - DNA, 25 bp, Homo sapien
ctagtccggcagtggaaacagcgcg

SEQ ID NO: 1121462 - DNA, 25 bp, Homo sapien
gggcgcgcagcaggcggtctggtgg

SEQ ID NO: 1121463 - DNA, 25 bp, Homo sapien
caggcggtctggtggttcggcaggg

SEQ ID NO: 1121464 - DNA, 25 bp, Homo sapien
gcgcgacccgcgcagtgtgactgga

SEQ ID NO: 1121465 - DNA, 25 bp, Homo sapien
tgcggaccgccgtgcgggagcccag

SEQ ID NO: 1121466 - DNA, 25 bp, Homo sapien
ggtaggtccgccgagcctgttctgc

SEQ ID NO: 1121467 - DNA, 25 bp, Homo sapien
gggactcgcagagcactggcactgc

SEQ ID NO: 1121468 - DNA, 25 bp, Homo sapien
cgcgccgtgactccgcaggtaggtc

SEQ ID NO: 1121469 - DNA, 25 bp, Homo sapien
gactcgcagagcactggcactgcgg

SEQ ID NO: 1121470 - DNA, 25 bp, Homo sapien
tggaggcctattgtgcacgaagttg

SEQ ID NO: 1121471 - DNA, 25 bp, Homo sapien
cacgaagttgtgatcaaaatccaag

SEQ ID NO: 1121472 - DNA, 25 bp, Homo sapien
tccaatgagcaaagggtgtaggctt

SEQ ID NO: 1121473 - DNA, 25 bp, Homo sapien
tctcttctccttgtgcatgtctgac

SEQ ID NO: 1121474 - DNA, 25 bp, Homo sapien
taataagaaagcttgctcccttggg

SEQ ID NO: 1121475 - DNA, 25 bp, Homo sapien
ccttgggacagttaccttcctggtg

SEQ ID NO: 1121476 - DNA, 25 bp, Homo sapien
ttgacaagctgagagtagaggatac

SEQ ID NO: 1121477 - DNA, 25 bp, Homo sapien
tcacacctgtgaaagaataaccact

SEQ ID NO: 1121478 - DNA, 25 bp, Homo sapien
tgcatatgatgcttccatgtgttgg

SEQ ID NO: 1121479 - DNA, 25 bp, Homo sapien
tcatgactgaagaggttatagcaca

SEQ ID NO: 1121480 - DNA, 25 bp, Homo sapien
tacatgttgcaaaatgactgctttc

SEQ ID NO: 1121481 - DNA, 25 bp, Homo sapien
tgaaaattattggtgggccactgaa

SEQ ID NO: 1121482 - DNA, 25 bp, Homo sapien
ggtataggtccactttgatccactg

SEQ ID NO: 1121483 - DNA, 25 bp, Homo sapien
aaattacagagagtgctggtgcctc

SEQ ID NO: 1121484 - DNA, 25 bp, Homo sapien
gaatcccagattccctcagatagga

SEQ ID NO: 1121485 - DNA, 25 bp, Homo sapien
gccttttcagtctcgaagctcatga

SEQ ID NO: 1121486 - DNA, 25 bp, Homo sapien
gcaacttgcattgtgtcatgaccct

SEQ ID NO: 1121487 - DNA, 25 bp, Homo sapien
ccttctgtaatactactcccggaga

SEQ ID NO: 1121488 - DNA, 25 bp, Homo sapien
gagaaaaacccacatcctatgcata

SEQ ID NO: 1121489 - DNA, 25 bp, Homo sapien
tacgcttgtgtttgagactaagcaa

SEQ ID NO: 1121490 - DNA, 25 bp, Homo sapien
cctttagctagtcctgtgtatatgt

SEQ ID NO: 1121491 - DNA, 25 bp, Homo sapien
cacacccggccttgggctggtattt

SEQ ID NO: 1121492 - DNA, 25 bp, Homo sapien
tttagctagtcctgtgtatatgtat

SEQ ID NO: 1121493 - DNA, 25 bp, Homo sapien
ttagctagtcctgtgtatatgtata

SEQ ID NO: 1121494 - DNA, 25 bp, Homo sapien
gaaatggctgattctgtgcagcaca

SEQ ID NO: 1121495 - DNA, 25 bp, Homo sapien
gagattctttcgtgtccaacttcag

SEQ ID NO: 1121496 - DNA, 25 bp, Homo sapien
ctagtcattagggattgcgagattc

SEQ ID NO: 1121497 - DNA, 25 bp, Homo sapien
tagtttatgtacacttagtgcccag

SEQ ID NO: 1121498 - DNA, 25 bp, Homo sapien
gttcatcaggtgtaatgactcatgc

SEQ ID NO: 1121499 - DNA, 25 bp, Homo sapien
tgttcatcaggtgtaatgactcatg

SEQ ID NO: 1121500 - DNA, 25 bp, Homo sapien
tttttgttcatcaggtgtaatgact

SEQ ID NO: 1121501 - DNA, 25 bp, Homo sapien
tttgttcatcaggtgtaatgactca

SEQ ID NO: 1121502 - DNA, 25 bp, Homo sapien
tgtaccaagtgctcggtgaatattg

SEQ ID NO: 1121503 - DNA, 25 bp, Homo sapien
tctttgtaccaagtgctcggtgaat

SEQ ID NO: 1121504 - DNA, 25 bp, Homo sapien
gtaccaagtgctcggtgaatattgg

SEQ ID NO: 1121505 - DNA, 25 bp, Homo sapien
cagctctttgtaccaagtgctcggt

SEQ ID NO: 1121506 - DNA, 25 bp, Homo sapien
taattttgcaacagtacttccagga

SEQ ID NO: 1121507 - DNA, 25 bp, Homo sapien
ttttgtgtactacttcagagagaac

SEQ ID NO: 1121508 - DNA, 25 bp, Homo sapien
gaaggcggaggtccattccactgat

SEQ ID NO: 1121509 - DNA, 25 bp, Homo sapien
caaatcgttggccagccatcgtgaa

SEQ ID NO: 1121510 - DNA, 25 bp, Homo sapien
gagtaagcagtaagatgatgtaatg

SEQ ID NO: 1121511 - DNA, 25 bp, Homo sapien
ggagtaagcagtaagatgatgtaat

SEQ ID NO: 1121512 - DNA, 25 bp, Homo sapien
caggagtaagcagtaagatgatgta

SEQ ID NO: 1121513 - DNA, 25 bp, Homo sapien
aggagtaagcagtaagatgatgtaa

SEQ ID NO: 1121514 - DNA, 25 bp, Homo sapien
cattatcatgagcagtcaatagctg

SEQ ID NO: 1121515 - DNA, 25 bp, Homo sapien
ttgtgccatttgaggtcctgcttgt

SEQ ID NO: 1121516 - DNA, 25 bp, Homo sapien
ttcacatcattatcatgagcagtca

SEQ ID NO: 1121517 - DNA, 25 bp, Homo sapien
tgaggtcctgcttgtcctctctttg

SEQ ID NO: 1121518 - DNA, 25 bp, Homo sapien
aggaggacacatctgtagcttgtaa

SEQ ID NO: 1121519 - DNA, 25 bp, Homo sapien
gatgaggcgtgcatagtagatacca

SEQ ID NO: 1121520 - DNA, 25 bp, Homo sapien
ggaggacacatctgtagcttgtaag

SEQ ID NO: 1121521 - DNA, 25 bp, Homo sapien
agcttgtaagatgaggcgtgcatag

SEQ ID NO: 1121522 - DNA, 25 bp, Homo sapien
gtgcgcatgtgcccaaggccctgaa

SEQ ID NO: 1121523 - DNA, 25 bp, Homo sapien
tgcgcatgtgcccaaggccctgaac

SEQ ID NO: 1121524 - DNA, 25 bp, Homo sapien
gcgcatgtgcccaaggccctgaaca

SEQ ID NO: 1121525 - DNA, 25 bp, Homo sapien
cagtgcgcatgtgcccaaggccctg

SEQ ID NO: 1121526 - DNA, 25 bp, Homo sapien
actattgccagtgagggacagccca

SEQ ID NO: 1121527 - DNA, 25 bp, Homo sapien
ttgccagtgagggacagcccaatac

SEQ ID NO: 1121528 - DNA, 25 bp, Homo sapien
tattgccagtgagggacagcccaat

SEQ ID NO: 1121529 - DNA, 25 bp, Homo sapien
ctactattgccagtgagggacagcc

SEQ ID NO: 1121530 - DNA, 25 bp, Homo sapien
gggtaatgttcatttgtctgaaagc

SEQ ID NO: 1121531 - DNA, 25 bp, Homo sapien
gtaatgttcatttgtctgaaagctc

SEQ ID NO: 1121532 - DNA, 25 bp, Homo sapien
ggtaatgttcatttgtctgaaagct

SEQ ID NO: 1121533 - DNA, 25 bp, Homo sapien
tagaggacctaaatattggtcaaga

SEQ ID NO: 1121534 - DNA, 25 bp, Homo sapien
tccggtttaacgagctatttgatac

SEQ ID NO: 1121535 - DNA, 25 bp, Homo sapien
aagtactcgttgtcccaggatctta

SEQ ID NO: 1121536 - DNA, 25 bp, Homo sapien
tgttgccacctgtcctccattgttg

SEQ ID NO: 1121537 - DNA, 25 bp, Homo sapien
gtctgtatgggcttcacatttctca

SEQ ID NO: 1121538 - DNA, 25 bp, Homo sapien
cacattcacagaggagacctagcat

SEQ ID NO: 1121539 - DNA, 25 bp, Homo sapien
gactggttaccatagcatttgttca

SEQ ID NO: 1121540 - DNA, 25 bp, Homo sapien
tgccgcaattctctcctagctgtaa

SEQ ID NO: 1121541 - DNA, 25 bp, Homo sapien
caacaaaatgactgctgcctttaga

SEQ ID NO: 1121542 - DNA, 25 bp, Homo sapien
caaaatgactgctgcctttagaaac

SEQ ID NO: 1121543 - DNA, 25 bp, Homo sapien
aaaatgactgctgcctttagaaacc

SEQ ID NO: 1121544 - DNA, 25 bp, Homo sapien
aacaaaatgactgctgcctttagaa

SEQ ID NO: 1121545 - DNA, 25 bp, Homo sapien
gctgccagaagatgaagctgtattt

SEQ ID NO: 1121546 - DNA, 25 bp, Homo sapien
tggccagcaagctgccagaagatga

SEQ ID NO: 1121547 - DNA, 25 bp, Homo sapien
cagcaagctgccagaagatgaagct

SEQ ID NO: 1121548 - DNA, 25 bp, Homo sapien
gaaggaggagtgtggccagcaagct

SEQ ID NO: 1121549 - DNA, 25 bp, Homo sapien
aatttgaaacgttttctgatacagg

SEQ ID NO: 1121550 - DNA, 25 bp, Homo sapien
atttgaaacgttttctgatacaggg

SEQ ID NO: 1121551 - DNA, 25 bp, Homo sapien
tactttacagttgaatcttctttat

SEQ ID NO: 1121552 - DNA, 25 bp, Homo sapien
ctttatagatattaatccagtggaa

SEQ ID NO: 1121553 - DNA, 25 bp, Homo sapien
aacagagaccggcgtccgctgctcg

SEQ ID NO: 1121554 - DNA, 25 bp, Homo sapien
gaccggcgtccgctgctcgacagag

SEQ ID NO: 1121555 - DNA, 25 bp, Homo sapien
tgcggaacagagaccggcgtccgct

SEQ ID NO: 1121556 - DNA, 25 bp, Homo sapien
ctgcggaacagagaccggcgtccgc

SEQ ID NO: 1121557 - DNA, 25 bp, Homo sapien
atctaaagccccgagaccgaggcat

SEQ ID NO: 1121558 - DNA, 25 bp, Homo sapien
aaagggaacctccatgcatctaaag

SEQ ID NO: 1121559 - DNA, 25 bp, Homo sapien
cctaggctggcatacgggcaagaaa

SEQ ID NO: 1121560 - DNA, 25 bp, Homo sapien
tcgaccaagtcagagctagcaatct

SEQ ID NO: 1121561 - DNA, 25 bp, Homo sapien
cccaagttcgcgcaccgggcggcag

SEQ ID NO: 1121562 - DNA, 25 bp, Homo sapien
ccaagttcgcgcaccgggcggcagc

SEQ ID NO: 1121563 - DNA, 25 bp, Homo sapien
ccccaagttcgcgcaccgggcggca

SEQ ID NO: 1121564 - DNA, 25 bp, Homo sapien
cttctccccaatccgccgtccaagc

SEQ ID NO: 1121565 - DNA, 25 bp, Homo sapien
ccttctccccaatccgccgtccaag

SEQ ID NO: 1121566 - DNA, 25 bp, Homo sapien
tctccccaatccgccgtccaagctc

SEQ ID NO: 1121567 - DNA, 25 bp, Homo sapien
tccccaatccgccgtccaagctcac

SEQ ID NO: 1121568 - DNA, 25 bp, Homo sapien
cacactagacggcagtatccgcact

SEQ ID NO: 1121569 - DNA, 25 bp, Homo sapien
agacggcagtatccgcactcaggct

SEQ ID NO: 1121570 - DNA, 25 bp, Homo sapien
ggcagtatccgcactcaggctgtct

SEQ ID NO: 1121571 - DNA, 25 bp, Homo sapien
cactcaggctgtctactaaactcac

SEQ ID NO: 1121572 - DNA, 25 bp, Homo sapien
cacgcccggccgcttgccagcgccc

SEQ ID NO: 1121573 - DNA, 25 bp, Homo sapien
ggctgaggtcgactgcttgcgacct

SEQ ID NO: 1121574 - DNA, 25 bp, Homo sapien
ggtcgactgcttgcgacctctcacg

SEQ ID NO: 1121575 - DNA, 25 bp, Homo sapien
tgaggtcgactgcttgcgacctctc

SEQ ID NO: 1121576 - DNA, 25 bp, Homo sapien
taaatctaagacttgccggctccga

SEQ ID NO: 1121577 - DNA, 25 bp, Homo sapien
gaagtactcggtactcggaggtcga

SEQ ID NO: 1121578 - DNA, 25 bp, Homo sapien
cattctcctggaaaacccacgaagt

SEQ ID NO: 1121579 - DNA, 25 bp, Homo sapien
cgggcacaagcttcctaaatctaag

SEQ ID NO: 1121580 - DNA, 25 bp, Homo sapien
gcaatcagtgatgccaaacgtcggt

SEQ ID NO: 1121581 - DNA, 25 bp, Homo sapien
caaagcttaactgggcaagagcaca

SEQ ID NO: 1121582 - DNA, 25 bp, Homo sapien
caggtttcacaagcaactagggtca

SEQ ID NO: 1121583 - DNA, 25 bp, Homo sapien
tcaaggaccagcaccggtaattgtg

SEQ ID NO: 1121584 - DNA, 25 bp, Homo sapien
tggtatctcttaaagtaggccttat

SEQ ID NO: 1121585 - DNA, 25 bp, Homo sapien
cacttggtatctcttaaagtaggcc

SEQ ID NO: 1121586 - DNA, 25 bp, Homo sapien
ctcgtcgtcttctaaatttcacttg

SEQ ID NO: 1121587 - DNA, 25 bp, Homo sapien
tctcttaaagtaggccttattctta

SEQ ID NO: 1121588 - DNA, 25 bp, Homo sapien
aagcagattaatattgtaaacacaa

SEQ ID NO: 1121589 - DNA, 25 bp, Homo sapien
agcagattaatattgtaaacacaaa

SEQ ID NO: 1121590 - DNA, 25 bp, Homo sapien
attgtagaaaggatactccactgca

SEQ ID NO: 1121591 - DNA, 25 bp, Homo sapien
ttgtagaaaggatactccactgcat

SEQ ID NO: 1121592 - DNA, 25 bp, Homo sapien
aattgtagaaaggatactccactgc

SEQ ID NO: 1121593 - DNA, 25 bp, Homo sapien
ccaagcgtttccgagcataataatc

SEQ ID NO: 1121594 - DNA, 25 bp, Homo sapien
aagcgtttccgagcataataatcag

SEQ ID NO: 1121595 - DNA, 25 bp, Homo sapien
gtttgtcacacgaactatcatcctg

SEQ ID NO: 1121596 - DNA, 25 bp, Homo sapien
tcaccaagcgtttccgagcataata

SEQ ID NO: 1121597 - DNA, 25 bp, Homo sapien
gaggtgctagacagcccttctaaca

SEQ ID NO: 1121598 - DNA, 25 bp, Homo sapien
aaaaattattcactggatgcttttg

SEQ ID NO: 1121599 - DNA, 25 bp, Homo sapien
tgctagacagcccttctaacacaca

SEQ ID NO: 1121600 - DNA, 25 bp, Homo sapien
ctggatgcttttggaggtgctagac

SEQ ID NO: 1121601 - DNA, 25 bp, Homo sapien
aggcatgagcgcaaccaagagcatt

SEQ ID NO: 1121602 - DNA, 25 bp, Homo sapien
ttcccaggttccaattctagaccta

SEQ ID NO: 1121603 - DNA, 25 bp, Homo sapien
gcatacgctgcgcagactatcatat

SEQ ID NO: 1121604 - DNA, 25 bp, Homo sapien
cagttcgtgtgcatacgctgcgcag

SEQ ID NO: 1121605 - DNA, 25 bp, Homo sapien
gtgcatacgctgcgcagactatcat

SEQ ID NO: 1121606 - DNA, 25 bp, Homo sapien
cgtgtgcatacgctgcgcagactat

SEQ ID NO: 1121607 - DNA, 25 bp, Homo sapien
cctgcgggccagcagcaggccagta

SEQ ID NO: 1121608 - DNA, 25 bp, Homo sapien
ccagcagcaggccagtacaatatgc

SEQ ID NO: 1121609 - DNA, 25 bp, Homo sapien
tgcgggccagcagcaggccagtaca

SEQ ID NO: 1121610 - DNA, 25 bp, Homo sapien
gggccagcagcaggccagtacaata

SEQ ID NO: 1121611 - DNA, 25 bp, Homo sapien
tatacctaagtagcaagggtcttca

SEQ ID NO: 1121612 - DNA, 25 bp, Homo sapien
cagaaggtctagagtggagttccca

SEQ ID NO: 1121613 - DNA, 25 bp, Homo sapien
gctgcaggtcgctagtggcaaaacc

SEQ ID NO: 1121614 - DNA, 25 bp, Homo sapien
ggagttcccacgagtctgcattttt

SEQ ID NO: 1121615 - DNA, 25 bp, Homo sapien
tcaagaaaccaatgtaaatgctggt

SEQ ID NO: 1121616 - DNA, 25 bp, Homo sapien
tattcaagaaaccaatgtaaatgct

SEQ ID NO: 1121617 - DNA, 25 bp, Homo sapien
gaaaccaatgtaaatgctggtttca

SEQ ID NO: 1121618 - DNA, 25 bp, Homo sapien
aaaccaatgtaaatgctggtttcaa

SEQ ID NO: 1121619 - DNA, 25 bp, Homo sapien
cttcatagatcttgtccatgccaaa

SEQ ID NO: 1121620 - DNA, 25 bp, Homo sapien
ttcatagatcttgtccatgccaaac

SEQ ID NO: 1121621 - DNA, 25 bp, Homo sapien
aaatagcaggtgaaggcacctggct

SEQ ID NO: 1121622 - DNA, 25 bp, Homo sapien
agctcccttcagggcaccaaaaact

SEQ ID NO: 1121623 - DNA, 25 bp, Homo sapien
gcctgcatccaaatagcaggtgaag

SEQ ID NO: 1121624 - DNA, 25 bp, Homo sapien
tccatccacagctcccttcagggca

SEQ ID NO: 1121625 - DNA, 25 bp, Homo sapien
tgcaaaaggtagtggtttcaatccc

SEQ ID NO: 1121626 - DNA, 25 bp, Homo sapien
cttgggacaaataactctgggcctc

SEQ ID NO: 1121627 - DNA, 25 bp, Homo sapien
gcatggtacctaggcatacagcagg

SEQ ID NO: 1121628 - DNA, 25 bp, Homo sapien
cacggtccaggcaccaaggtcttaa

SEQ ID NO: 1121629 - DNA, 25 bp, Homo sapien
ctacaaaattagtcatccagcacat

SEQ ID NO: 1121630 - DNA, 25 bp, Homo sapien
attaccaaggctttccaccactaca

SEQ ID NO: 1121631 - DNA, 25 bp, Homo sapien
gaaattcatgctacaaaaaccttta

SEQ ID NO: 1121632 - DNA, 25 bp, Homo sapien
caaggctttccaccactacaaaatt

SEQ ID NO: 1121633 - DNA, 25 bp, Homo sapien
gctgccatcagtcccgtcttgaaac

SEQ ID NO: 1121634 - DNA, 25 bp, Homo sapien
ttatcgcatcatatgcaaccaaagg

SEQ ID NO: 1121635 - DNA, 25 bp, Homo sapien
gcaaccaaaggaccaactactgact

SEQ ID NO: 1121636 - DNA, 25 bp, Homo sapien
actactgactgctcagttagtggga

SEQ ID NO: 1121637 - DNA, 25 bp, Homo sapien
agactcacttaacttagtttactag

SEQ ID NO: 1121638 - DNA, 25 bp, Homo sapien
tattttagtatagactcacttaact

SEQ ID NO: 1121639 - DNA, 25 bp, Homo sapien
ttagtatagactcacttaacttagt

SEQ ID NO: 1121640 - DNA, 25 bp, Homo sapien
tattcatattttagtatagactcac

SEQ ID NO: 1121641 - DNA, 25 bp, Homo sapien
ggcccatgatgtgcttccgatgtac

SEQ ID NO: 1121642 - DNA, 25 bp, Homo sapien
tctggcccatgatgtgcttccgatg

SEQ ID NO: 1121643 - DNA, 25 bp, Homo sapien
tggcccatgatgtgcttccgatgta

SEQ ID NO: 1121644 - DNA, 25 bp, Homo sapien
cccatgatgtgcttccgatgtactt

SEQ ID NO: 1121645 - DNA, 25 bp, Homo sapien
cctatataagaatgttacctgcccc

SEQ ID NO: 1121646 - DNA, 25 bp, Homo sapien
caagtctagctcatgttgtcaagaa

SEQ ID NO: 1121647 - DNA, 25 bp, Homo sapien
tagcacctcttatccaacaaagcag

SEQ ID NO: 1121648 - DNA, 25 bp, Homo sapien
tacagaacagccaaagcataaaagg

SEQ ID NO: 1121649 - DNA, 25 bp, Homo sapien
ccaggatgaagtcataagtaacaaa

SEQ ID NO: 1121650 - DNA, 25 bp, Homo sapien
taaatgacctctttaccaggatgaa

SEQ ID NO: 1121651 - DNA, 25 bp, Homo sapien
tctgagcaagtatgacatgactaca

SEQ ID NO: 1121652 - DNA, 25 bp, Homo sapien
ttcagcctttacactgtgtccaaag

SEQ ID NO: 1121653 - DNA, 25 bp, Homo sapien
gaattgaggtaaagaccacctcctg

SEQ ID NO: 1121654 - DNA, 25 bp, Homo sapien
aagcagacatgtagataatgcctga

SEQ ID NO: 1121655 - DNA, 25 bp, Homo sapien
aatgcctgaattgaggtaaagacca

SEQ ID NO: 1121656 - DNA, 25 bp, Homo sapien
gacatgtagataatgcctgaattga

SEQ ID NO: 1121657 - DNA, 25 bp, Homo sapien
tcccagctacaggactacacgtgag

SEQ ID NO: 1121658 - DNA, 25 bp, Homo sapien
tgtgaattatcactacagaactcca

SEQ ID NO: 1121659 - DNA, 25 bp, Homo sapien
ggcaattattaatggtggcatgcac

SEQ ID NO: 1121660 - DNA, 25 bp, Homo sapien
cttgtccttctaagccagattctca

SEQ ID NO: 1121661 - DNA, 25 bp, Homo sapien
aaagcaaacagtacttggtttcatt

SEQ ID NO: 1121662 - DNA, 25 bp, Homo sapien
cttggtttcatttcatgtgccctac

SEQ ID NO: 1121663 - DNA, 25 bp, Homo sapien
ggaaagcaaacagtacttggtttca

SEQ ID NO: 1121664 - DNA, 25 bp, Homo sapien
acaaaggaaagcaaacagtacttgg

SEQ ID NO: 1121665 - DNA, 25 bp, Homo sapien
catagactggattctctcgtatagc

SEQ ID NO: 1121666 - DNA, 25 bp, Homo sapien
ctggattctctcgtatagcagcatg

SEQ ID NO: 1121667 - DNA, 25 bp, Homo sapien
agactggattctctcgtatagcagc

SEQ ID NO: 1121668 - DNA, 25 bp, Homo sapien
tttcatagactggattctctcgtat

SEQ ID NO: 1121669 - DNA, 25 bp, Homo sapien
tgccccacgtgggaaccattcccaa

SEQ ID NO: 1121670 - DNA, 25 bp, Homo sapien
cacgtgggaaccattcccaacctgt

SEQ ID NO: 1121671 - DNA, 25 bp, Homo sapien
ccacgtgggaaccattcccaacctg

SEQ ID NO: 1121672 - DNA, 25 bp, Homo sapien
tcgcttctgccacatcacgcagagc

SEQ ID NO: 1121673 - DNA, 25 bp, Homo sapien
tcccttcgcttctgccacatcacgc

SEQ ID NO: 1121674 - DNA, 25 bp, Homo sapien
cttcgcttctgccacatcacgcaga

SEQ ID NO: 1121675 - DNA, 25 bp, Homo sapien
cccttcgcttctgccacatcacgca

SEQ ID NO: 1121676 - DNA, 25 bp, Homo sapien
gactgtactaggatagaaagaacca

SEQ ID NO: 1121677 - DNA, 25 bp, Homo sapien
taggatagaaagaaccacctcagta

SEQ ID NO: 1121678 - DNA, 25 bp, Homo sapien
cagtagtgtctgaggctaacacatt

SEQ ID NO: 1121679 - DNA, 25 bp, Homo sapien
gaaagaaccacctcagtagtgtctg

SEQ ID NO: 1121680 - DNA, 25 bp, Homo sapien
tacattgtatttgtgggccatcaca

SEQ ID NO: 1121681 - DNA, 25 bp, Homo sapien
tgtgatgtcctactaccatagggcc

SEQ ID NO: 1121682 - DNA, 25 bp, Homo sapien
caagtataaaatctccaacaggagg

SEQ ID NO: 1121683 - DNA, 25 bp, Homo sapien
cagtttgtccaagagagtggcactc

SEQ ID NO: 1121684 - DNA, 25 bp, Homo sapien
tgccttcttttgagctacccgatcc

SEQ ID NO: 1121685 - DNA, 25 bp, Homo sapien
ttcttttgagctacccgatccttct

SEQ ID NO: 1121686 - DNA, 25 bp, Homo sapien
ccttcttttgagctacccgatcctt

SEQ ID NO: 1121687 - DNA, 25 bp, Homo sapien
ttgagctacccgatccttcttctga

SEQ ID NO: 1121688 - DNA, 25 bp, Homo sapien
tatctatatctgaaaaaatcataga

SEQ ID NO: 1121689 - DNA, 25 bp, Homo sapien
ctgttcataagtttattatctatat

SEQ ID NO: 1121690 - DNA, 25 bp, Homo sapien
tctatatctgaaaaaatcatagaaa

SEQ ID NO: 1121691 - DNA, 25 bp, Homo sapien
tcataagtttattatctatatctga

SEQ ID NO: 1121692 - DNA, 25 bp, Homo sapien
tactgcgtggtgctccaagtgaaat

SEQ ID NO: 1121693 - DNA, 25 bp, Homo sapien
tactcaaagactacctactgcgtgg

SEQ ID NO: 1121694 - DNA, 25 bp, Homo sapien
gaagccctgttacatctccgaagta

SEQ ID NO: 1121695 - DNA, 25 bp, Homo sapien
caggtgtaggatcaacaggtcccca

SEQ ID NO: 1121696 - DNA, 25 bp, Homo sapien
gagaagcaaagtcggcatgggcact

SEQ ID NO: 1121697 - DNA, 25 bp, Homo sapien
tcttgacggtggctgatggagacaa

SEQ ID NO: 1121698 - DNA, 25 bp, Homo sapien
ttgggtgaccaaggaaacctctctg

SEQ ID NO: 1121699 - DNA, 25 bp, Homo sapien
tcttgacaggcaaaattgggtgacc

SEQ ID NO: 1121700 - DNA, 25 bp, Homo sapien
taattacattgttggttaactatct

SEQ ID NO: 1121701 - DNA, 25 bp, Homo sapien
tagttgacccttattgtaactttga

SEQ ID NO: 1121702 - DNA, 25 bp, Homo sapien
ttttcaagtccacatatgaggcggt

SEQ ID NO: 1121703 - DNA, 25 bp, Homo sapien
tgatgtaagtacattacagtacaat

SEQ ID NO: 1121704 - DNA, 25 bp, Homo sapien
gctcccgttcacaatacagacaagg

SEQ ID NO: 1121705 - DNA, 25 bp, Homo sapien
tgtgtgctcccgttcacaatacaga

SEQ ID NO: 1121706 - DNA, 25 bp, Homo sapien
gctgaggtgtacatgggagttcacc

SEQ ID NO: 1121707 - DNA, 25 bp, Homo sapien
gttcacaatacagacaaggcgcagg

SEQ ID NO: 1121708 - DNA, 25 bp, Homo sapien
aaatcatagtagcacttctggtggc

SEQ ID NO: 1121709 - DNA, 25 bp, Homo sapien
taatcctgggacaggcagtatcact

SEQ ID NO: 1121710 - DNA, 25 bp, Homo sapien
ggtggccttcatgtcttatgctaca

SEQ ID NO: 1121711 - DNA, 25 bp, Homo sapien
tgcccggccaatcttaaatcatagt

SEQ ID NO: 1121712 - DNA, 25 bp, Homo sapien
tatgttggcggaaagcccctactgg

SEQ ID NO: 1121713 - DNA, 25 bp, Homo sapien
tctgggcatgggcagggatctgaga

SEQ ID NO: 1121714 - DNA, 25 bp, Homo sapien
cagccagttatcctgttgggatatt

SEQ ID NO: 1121715 - DNA, 25 bp, Homo sapien
gggaacctcatgcatacagccagtt

SEQ ID NO: 1121716 - DNA, 25 bp, Homo sapien
aggctcgcttctcatatgtgcggat

SEQ ID NO: 1121717 - DNA, 25 bp, Homo sapien
catatgtgcggatgaaatatctttt

SEQ ID NO: 1121718 - DNA, 25 bp, Homo sapien
gcttctcatatgtgcggatgaaata

SEQ ID NO: 1121719 - DNA, 25 bp, Homo sapien
ggaagctggattatatatgtgcagt

SEQ ID NO: 1121720 - DNA, 25 bp, Homo sapien
ttctcctttaacaattgttagcgtc

SEQ ID NO: 1121721 - DNA, 25 bp, Homo sapien
ttacactttgcaagttgatatgcaa

SEQ ID NO: 1121722 - DNA, 25 bp, Homo sapien
tacactttgcaagttgatatgcaaa

SEQ ID NO: 1121723 - DNA, 25 bp, Homo sapien
tttaacaattgttagcgtctcctca

SEQ ID NO: 1121724 - DNA, 25 bp, Homo sapien
aacactaccaggccccacatactgt

SEQ ID NO: 1121725 - DNA, 25 bp, Homo sapien
cactaccaggccccacatactgtgc

SEQ ID NO: 1121726 - DNA, 25 bp, Homo sapien
aaacactaccaggccccacatactg

SEQ ID NO: 1121727 - DNA, 25 bp, Homo sapien
acactaccaggccccacatactgtg

SEQ ID NO: 1121728 - DNA, 25 bp, Homo sapien
tctgctctacacctagggccaataa

SEQ ID NO: 1121729 - DNA, 25 bp, Homo sapien
tcttgaccccagatatgactcaggg

SEQ ID NO: 1121730 - DNA, 25 bp, Homo sapien
gatgcctaggttgcagcttgttgaa

SEQ ID NO: 1121731 - DNA, 25 bp, Homo sapien
ttcgcttgggcttatgtcagagtcc

SEQ ID NO: 1121732 - DNA, 25 bp, Homo sapien
acttttggcagaccatgggagtttc

SEQ ID NO: 1121733 - DNA, 25 bp, Homo sapien
gctagtgtggacttttggcagacca

SEQ ID NO: 1121734 - DNA, 25 bp, Homo sapien
cacagctctctggttgggtattctt

SEQ ID NO: 1121735 - DNA, 25 bp, Homo sapien
attcttctattgagctagtgtggac

SEQ ID NO: 1121736 - DNA, 25 bp, Homo sapien
ccttttctgggacatcgttcacaat

SEQ ID NO: 1121737 - DNA, 25 bp, Homo sapien
ttggtctgatatggtcatctttgtg

SEQ ID NO: 1121738 - DNA, 25 bp, Homo sapien
tttgtccatcctgagtgtgtttcta

SEQ ID NO: 1121739 - DNA, 25 bp, Homo sapien
cacaatttgtccatcctgagtgtgt

SEQ ID NO: 1121740 - DNA, 25 bp, Homo sapien
atacttatgtcaatttttttgcaac

SEQ ID NO: 1121741 - DNA, 25 bp, Homo sapien
cttatacttatgtcaatttttttgc

SEQ ID NO: 1121742 - DNA, 25 bp, Homo sapien
tttttttgcaacacattgcattttc

SEQ ID NO: 1121743 - DNA, 25 bp, Homo sapien
tttttgcaacacattgcattttcta

SEQ ID NO: 1121744 - DNA, 25 bp, Homo sapien
aagactgacgcacagttgctctccc

SEQ ID NO: 1121745 - DNA, 25 bp, Homo sapien
tcaggtcccaccgtcctcctgtcct

SEQ ID NO: 1121746 - DNA, 25 bp, Homo sapien
tactgcccaactccgaggagctggt

SEQ ID NO: 1121747 - DNA, 25 bp, Homo sapien
tcctgcccaagactgacgcacagtt

SEQ ID NO: 1121748 - DNA, 25 bp, Homo sapien
cagggagtcagaaacaaggaataag

SEQ ID NO: 1121749 - DNA, 25 bp, Homo sapien
cttcagggagtcagaaacaaggaat

SEQ ID NO: 1121750 - DNA, 25 bp, Homo sapien
caacaaggacctgtaagtggggttg

SEQ ID NO: 1121751 - DNA, 25 bp, Homo sapien
gccttcagggagtcagaaacaagga

SEQ ID NO: 1121752 - DNA, 25 bp, Homo sapien
ctttctctttgggagcagtcctctc

SEQ ID NO: 1121753 - DNA, 25 bp, Homo sapien
taacacagcagtaatgcctttctct

SEQ ID NO: 1121754 - DNA, 25 bp, Homo sapien
ctggccttctccatgtcttttaatt

SEQ ID NO: 1121755 - DNA, 25 bp, Homo sapien
aagtgctactattgcaagcatgagc

SEQ ID NO: 1121756 - DNA, 25 bp, Homo sapien
gaacctccaatttatacgttcttgc

SEQ ID NO: 1121757 - DNA, 25 bp, Homo sapien
ggcttccctgaaacaactgagattt

SEQ ID NO: 1121758 - DNA, 25 bp, Homo sapien
ctgaaacaactgagatttcagaacc

SEQ ID NO: 1121759 - DNA, 25 bp, Homo sapien
caatttatacgttcttgcatgaaga

SEQ ID NO: 1121760 - DNA, 25 bp, Homo sapien
tctttgccttagaatgtcctttccc

SEQ ID NO: 1121761 - DNA, 25 bp, Homo sapien
ttccccatttgctctccatacccat

SEQ ID NO: 1121762 - DNA, 25 bp, Homo sapien
ccatttgctctccatacccattcat

SEQ ID NO: 1121763 - DNA, 25 bp, Homo sapien
cccatttgctctccatacccattca

SEQ ID NO: 1121764 - DNA, 25 bp, Homo sapien
tcttccttctcaccatcgttaagtc

SEQ ID NO: 1121765 - DNA, 25 bp, Homo sapien
ttcttccttctcaccatcgttaagt

SEQ ID NO: 1121766 - DNA, 25 bp, Homo sapien
cttcttccttctcaccatcgttaag

SEQ ID NO: 1121767 - DNA, 25 bp, Homo sapien
gagcaacaagcttctcatggcaagg

SEQ ID NO: 1121768 - DNA, 25 bp, Homo sapien
ctgagcaacaagcttctcatggcaa

SEQ ID NO: 1121769 - DNA, 25 bp, Homo sapien
agcaacaagcttctcatggcaaggc

SEQ ID NO: 1121770 - DNA, 25 bp, Homo sapien
tgagcaacaagcttctcatggcaag

SEQ ID NO: 1121771 - DNA, 25 bp, Homo sapien
tcatgaaagtcgtccttcttctctc

SEQ ID NO: 1121772 - DNA, 25 bp, Homo sapien
cctctctgtgggctagaaggacttg

SEQ ID NO: 1121773 - DNA, 25 bp, Homo sapien
acactgttagtctgtgcagcctctc

SEQ ID NO: 1121774 - DNA, 25 bp, Homo sapien
tgggcaggcacactgttagtctgtg

SEQ ID NO: 1121775 - DNA, 25 bp, Homo sapien
cgcaggtcggttgcccttgactcag

SEQ ID NO: 1121776 - DNA, 25 bp, Homo sapien
tacgaccccgcgctccgggcattgc

SEQ ID NO: 1121777 - DNA, 25 bp, Homo sapien
gctccgggcattgcccgcagccctg

SEQ ID NO: 1121778 - DNA, 25 bp, Homo sapien
ggcggagctcgacgggccgccttct

SEQ ID NO: 1121779 - DNA, 25 bp, Homo sapien
gctccagggcccgagtcgtcccgcc

SEQ ID NO: 1121780 - DNA, 25 bp, Homo sapien
agccgggctccagggcccgagtcgt

SEQ ID NO: 1121781 - DNA, 25 bp, Homo sapien
cggccctcgcggctcccgcgccgcg

SEQ ID NO: 1121782 - DNA, 25 bp, Homo sapien
ccagccgggctccagggcccgagtc

SEQ ID NO: 1121783 - DNA, 25 bp, Homo sapien
ccggagcagactgcgaggccagcgc

SEQ ID NO: 1121784 - DNA, 25 bp, Homo sapien
agactgcgaggccagcgcggtccgg

SEQ ID NO: 1121785 - DNA, 25 bp, Homo sapien
agcagactgcgaggccagcgcggtc

SEQ ID NO: 1121786 - DNA, 25 bp, Homo sapien
ggcgggtggcgggacgcgcagctgg

SEQ ID NO: 1121787 - DNA, 25 bp, Homo sapien
cgccctgtccgcgttcgaagctgag

SEQ ID NO: 1121788 - DNA, 25 bp, Homo sapien
gggcgagggaggacgagccagtccc

SEQ ID NO: 1121789 - DNA, 25 bp, Homo sapien
gggatgccccggtctgcgtctccag

SEQ ID NO: 1121790 - DNA, 25 bp, Homo sapien
tgactccaggagaagagtccatggg

SEQ ID NO: 1121791 - DNA, 25 bp, Homo sapien
taggccgttagaggcgaactggagc

SEQ ID NO: 1121792 - DNA, 25 bp, Homo sapien
cgttagaggcgaactggagcgtggt

SEQ ID NO: 1121793 - DNA, 25 bp, Homo sapien
agttgtaggccgttagaggcgaact

SEQ ID NO: 1121794 - DNA, 25 bp, Homo sapien
gaggcgaactggagcgtggtaaggg

SEQ ID NO: 1121795 - DNA, 25 bp, Homo sapien
tctacaacttggagagggccctcag

SEQ ID NO: 1121796 - DNA, 25 bp, Homo sapien
tgtgaaaagcctacacactgaacac

SEQ ID NO: 1121797 - DNA, 25 bp, Homo sapien
aaagacaagtcatcaaccaggaaag

SEQ ID NO: 1121798 - DNA, 25 bp, Homo sapien
ggaacaattgcatatccagatggaa

SEQ ID NO: 1121799 - DNA, 25 bp, Homo sapien
tctcttaagcacacgtggataaacc

SEQ ID NO: 1121800 - DNA, 25 bp, Homo sapien
tactccttctcttaagcacacgtgg

SEQ ID NO: 1121801 - DNA, 25 bp, Homo sapien
gaaggctatcacttactccttctct

SEQ ID NO: 1121802 - DNA, 25 bp, Homo sapien
ccttctcttaagcacacgtggataa

SEQ ID NO: 1121803 - DNA, 25 bp, Homo sapien
ccttccagagtgtctgagacttgca

SEQ ID NO: 1121804 - DNA, 25 bp, Homo sapien
cagagtgtctgagacttgcaccttc

SEQ ID NO: 1121805 - DNA, 25 bp, Homo sapien
gtgtctgagacttgcaccttcttcc

SEQ ID NO: 1121806 - DNA, 25 bp, Homo sapien
cccgacccttccagagtgtctgaga

SEQ ID NO: 1121807 - DNA, 25 bp, Homo sapien
gacaggggtgaggtccagcaaaggg

SEQ ID NO: 1121808 - DNA, 25 bp, Homo sapien
gatgacaggggtgaggtccagcaaa

SEQ ID NO: 1121809 - DNA, 25 bp, Homo sapien
gggtgaggtccagcaaaggggagac

SEQ ID NO: 1121810 - DNA, 25 bp, Homo sapien
ctgatgacaggggtgaggtccagca

SEQ ID NO: 1121811 - DNA, 25 bp, Homo sapien
ctgggagtcagatgacggtcaggga

SEQ ID NO: 1121812 - DNA, 25 bp, Homo sapien
ggagtcagatgacggtcagggaagg

SEQ ID NO: 1121813 - DNA, 25 bp, Homo sapien
tgggagtcagatgacggtcagggaa

SEQ ID NO: 1121814 - DNA, 25 bp, Homo sapien
agtcagatgacggtcagggaagggg

SEQ ID NO: 1121815 - DNA, 25 bp, Homo sapien
cagctgtgtggcgagatggcctgca

SEQ ID NO: 1121816 - DNA, 25 bp, Homo sapien
tttgggtagcctcacactgctctct

SEQ ID NO: 1121817 - DNA, 25 bp, Homo sapien
ctcagctcccttttgggtagcctca

SEQ ID NO: 1121818 - DNA, 25 bp, Homo sapien
tctcttgacaccgtaggcagctgtg

SEQ ID NO: 1121819 - DNA, 25 bp, Homo sapien
taggaattccacgagttcccatccc

SEQ ID NO: 1121820 - DNA, 25 bp, Homo sapien
tcccatcccactagacttgttgggc

SEQ ID NO: 1121821 - DNA, 25 bp, Homo sapien
tacttaggaattccacgagttccca

SEQ ID NO: 1121822 - DNA, 25 bp, Homo sapien
tgggcatctccatgtcatttagaca

SEQ ID NO: 1121823 - DNA, 25 bp, Homo sapien
tattgttccagtgttattaggttgg

SEQ ID NO: 1121824 - DNA, 25 bp, Homo sapien
gtattgttccagtgttattaggttg

SEQ ID NO: 1121825 - DNA, 25 bp, Homo sapien
tgtattgttccagtgttattaggtt

SEQ ID NO: 1121826 - DNA, 25 bp, Homo sapien
ctgtattgttccagtgttattaggt

SEQ ID NO: 1121827 - DNA, 25 bp, Homo sapien
cttgccgtttgaaccctctgacttt

SEQ ID NO: 1121828 - DNA, 25 bp, Homo sapien
tcttatatccttgaccaaggaacag

SEQ ID NO: 1121829 - DNA, 25 bp, Homo sapien
agtcttcctctatcagcatgcagct

SEQ ID NO: 1121830 - DNA, 25 bp, Homo sapien
ttatatccttgaccaaggaacagtc

SEQ ID NO: 1121831 - DNA, 25 bp, Homo sapien
cttatatccttgaccaaggaacagt

SEQ ID NO: 1121832 - DNA, 25 bp, Homo sapien
tgaaagcttatctggaggctccagc

SEQ ID NO: 1121833 - DNA, 25 bp, Homo sapien
gcagactgtcacatgtagcacctcg

SEQ ID NO: 1121834 - DNA, 25 bp, Homo sapien
gcgagatccaacatgagttcctaca

SEQ ID NO: 1121835 - DNA, 25 bp, Homo sapien
tagcacctcgtttggatctgcctgg

SEQ ID NO: 1121836 - DNA, 25 bp, Homo sapien
ggcaggctggcactgttatacagga

SEQ ID NO: 1121837 - DNA, 25 bp, Homo sapien
tgaaagctgcgctcctgatcgtcgg

SEQ ID NO: 1121838 - DNA, 25 bp, Homo sapien
tacaggaaaagggtcgtgtgcgacc

SEQ ID NO: 1121839 - DNA, 25 bp, Homo sapien
tctttaacgttgcagtgaggctcag

SEQ ID NO: 1121840 - DNA, 25 bp, Homo sapien
cgggtacccggcacatatgcacgca

SEQ ID NO: 1121841 - DNA, 25 bp, Homo sapien
tagaatgagcgttcttacaccggcc

SEQ ID NO: 1121842 - DNA, 25 bp, Homo sapien
gagcgttcttacaccggcctcaaac

SEQ ID NO: 1121843 - DNA, 25 bp, Homo sapien
gcacaaaccgaggtccttggagaca

SEQ ID NO: 1121844 - DNA, 25 bp, Homo sapien
ttcccctgcgagtccgagcacttac

SEQ ID NO: 1121845 - DNA, 25 bp, Homo sapien
gccaaccgcttcatacaggaaaaaa

SEQ ID NO: 1121846 - DNA, 25 bp, Homo sapien
tcggtcacttcagtggtgccaaccg

SEQ ID NO: 1121847 - DNA, 25 bp, Homo sapien
caaccaatccgtccccgtgggcgct

SEQ ID NO: 1121848 - DNA, 25 bp, Homo sapien
aggttcatcctgcccctccaaccgt

SEQ ID NO: 1121849 - DNA, 25 bp, Homo sapien
ttcatcctgcccctccaaccgtctc

SEQ ID NO: 1121850 - DNA, 25 bp, Homo sapien
tcatcctgcccctccaaccgtctcc

SEQ ID NO: 1121851 - DNA, 25 bp, Homo sapien
atcctgcccctccaaccgtctcccg

SEQ ID NO: 1121852 - DNA, 25 bp, Homo sapien
gcagcaagttatgatagcaccactt

SEQ ID NO: 1121853 - DNA, 25 bp, Homo sapien
cacttccgcccaagagtctgaggca

SEQ ID NO: 1121854 - DNA, 25 bp, Homo sapien
taaaaagactagagaggtcactatc

SEQ ID NO: 1121855 - DNA, 25 bp, Homo sapien
gtacaccttcaaagaatgcatgtga

SEQ ID NO: 1121856 - DNA, 25 bp, Homo sapien
ctgagtagctgagattacagacatg

SEQ ID NO: 1121857 - DNA, 25 bp, Homo sapien
gacagggtttcactatgttggccca

SEQ ID NO: 1121858 - DNA, 25 bp, Homo sapien
ctgggttcaagtgaacctcagcctc

SEQ ID NO: 1121859 - DNA, 25 bp, Homo sapien
tgccaccacacctggctaaattttt

SEQ ID NO: 1121860 - DNA, 25 bp, Homo sapien
ggctttagtactcttcatgaaatta

SEQ ID NO: 1121861 - DNA, 25 bp, Homo sapien
gtttacaatgtcagtgactgtggct

SEQ ID NO: 1121862 - DNA, 25 bp, Homo sapien
tgaaaattgcaactaaaagcagagg

SEQ ID NO: 1121863 - DNA, 25 bp, Homo sapien
gcttaaccacctaacaggttagaga

SEQ ID NO: 1121864 - DNA, 25 bp, Homo sapien
ctttgtggtaccatattctacgtgg

SEQ ID NO: 1121865 - DNA, 25 bp, Homo sapien
aggatttcaccgtgcaaaccaggat

SEQ ID NO: 1121866 - DNA, 25 bp, Homo sapien
tctacgtggttcttcatatgtaaac

SEQ ID NO: 1121867 - DNA, 25 bp, Homo sapien
ccggcctctaaattctttacaagca

SEQ ID NO: 1121868 - DNA, 25 bp, Homo sapien
gtaaatgtcatcctctcatccctca

SEQ ID NO: 1121869 - DNA, 25 bp, Homo sapien
cggctggacaactgggtataggtgg

SEQ ID NO: 1121870 - DNA, 25 bp, Homo sapien
tataggtgggtagtgtccatctgtt

SEQ ID NO: 1121871 - DNA, 25 bp, Homo sapien
tctcaccatctgtaaatgtcatcct

SEQ ID NO: 1121872 - DNA, 25 bp, Homo sapien
atactgtccagcccttggtaaatcc

SEQ ID NO: 1121873 - DNA, 25 bp, Homo sapien
actgtccagcccttggtaaatcctt

SEQ ID NO: 1121874 - DNA, 25 bp, Homo sapien
ctgtccagcccttggtaaatccttt

SEQ ID NO: 1121875 - DNA, 25 bp, Homo sapien
tactgtccagcccttggtaaatcct

SEQ ID NO: 1121876 - DNA, 25 bp, Homo sapien
tgttcctgtgccaatctagaatgac

SEQ ID NO: 1121877 - DNA, 25 bp, Homo sapien
gctcttgtcatcttggaagttcccc

SEQ ID NO: 1121878 - DNA, 25 bp, Homo sapien
gagcagtggcttacaacagaaggct

SEQ ID NO: 1121879 - DNA, 25 bp, Homo sapien
gaatgactatcctctaagccttgct

SEQ ID NO: 1121880 - DNA, 25 bp, Homo sapien
gtagaatgtcaaagagaaccagggt

SEQ ID NO: 1121881 - DNA, 25 bp, Homo sapien
aagtagaatgtcaaagagaaccagg

SEQ ID NO: 1121882 - DNA, 25 bp, Homo sapien
agtagaatgtcaaagagaaccaggg

SEQ ID NO: 1121883 - DNA, 25 bp, Homo sapien
tatatacccatatccccccatcctc

SEQ ID NO: 1121884 - DNA, 25 bp, Homo sapien
tccccccatcctcatatgtgtattt

SEQ ID NO: 1121885 - DNA, 25 bp, Homo sapien
ccccatcctcatatgtgtattttta

SEQ ID NO: 1121886 - DNA, 25 bp, Homo sapien
catttatatacccatatccccccat

SEQ ID NO: 1121887 - DNA, 25 bp, Homo sapien
ttcgacgtaaaggagaccgcttgtg

SEQ ID NO: 1121888 - DNA, 25 bp, Homo sapien
taaaggagaccgcttgtggaccagt

SEQ ID NO: 1121889 - DNA, 25 bp, Homo sapien
aggagaccgcttgtggaccagtgaa

SEQ ID NO: 1121890 - DNA, 25 bp, Homo sapien
gacgtaaaggagaccgcttgtggac

SEQ ID NO: 1121891 - DNA, 25 bp, Homo sapien
aagccatctgaccatctagctagga

SEQ ID NO: 1121892 - DNA, 25 bp, Homo sapien
gctaggacatcctgaccctcttcaa

SEQ ID NO: 1121893 - DNA, 25 bp, Homo sapien
caaatttacatgctggctttttggc

SEQ ID NO: 1121894 - DNA, 25 bp, Homo sapien
tgatagtgccaagataaaacaagcc

SEQ ID NO: 1121895 - DNA, 25 bp, Homo sapien
tttgaatgtccttccagagaaccca

SEQ ID NO: 1121896 - DNA, 25 bp, Homo sapien
tccagagaacccaggatttagaact

SEQ ID NO: 1121897 - DNA, 25 bp, Homo sapien
gtttgaatgtccttccagagaaccc

SEQ ID NO: 1121898 - DNA, 25 bp, Homo sapien
gagaacccaggatttagaactgtct

SEQ ID NO: 1121899 - DNA, 25 bp, Homo sapien
tgaagaaagaacaaccacagaacat

SEQ ID NO: 1121900 - DNA, 25 bp, Homo sapien
caggagcaatcctttgtaattccaa

SEQ ID NO: 1121901 - DNA, 25 bp, Homo sapien
taagaagagttaaatgaccaggagc

SEQ ID NO: 1121902 - DNA, 25 bp, Homo sapien
gcaggacttatagaacccctcacac

SEQ ID NO: 1121903 - DNA, 25 bp, Homo sapien
ttatttgtttgttctggtctctcat

SEQ ID NO: 1121904 - DNA, 25 bp, Homo sapien
tttttcccctcagatagggtcttgc

SEQ ID NO: 1121905 - DNA, 25 bp, Homo sapien
ttgacttcccaagcccaagcaatgc

SEQ ID NO: 1121906 - DNA, 25 bp, Homo sapien
gtttgttctggtctctcatcctctc

SEQ ID NO: 1121907 - DNA, 25 bp, Homo sapien
ccatttcattgggagcttctgaata

SEQ ID NO: 1121908 - DNA, 25 bp, Homo sapien
accatttcattgggagcttctgaat

SEQ ID NO: 1121909 - DNA, 25 bp, Homo sapien
cttcttgacatattgtacagaccat

SEQ ID NO: 1121910 - DNA, 25 bp, Homo sapien
gcttctgaatactcttcttgacata

SEQ ID NO: 1121911 - DNA, 25 bp, Homo sapien
tatgaggtgtgtgacacaactgatg

SEQ ID NO: 1121912 - DNA, 25 bp, Homo sapien
gaggtgtgtgacacaactgatgata

SEQ ID NO: 1121913 - DNA, 25 bp, Homo sapien
ctgcaatcaatatgaggtgtgtgac

SEQ ID NO: 1121914 - DNA, 25 bp, Homo sapien
tcaatatgaggtgtgtgacacaact

SEQ ID NO: 1121915 - DNA, 25 bp, Homo sapien
tgcaaaaacacactgccgacagagc

SEQ ID NO: 1121916 - DNA, 25 bp, Homo sapien
gcaaaaacacactgccgacagagcc

SEQ ID NO: 1121917 - DNA, 25 bp, Homo sapien
tgcatcccattcaaggtctgccaca

SEQ ID NO: 1121918 - DNA, 25 bp, Homo sapien
tcccattcaaggtctgccacactat

SEQ ID NO: 1121919 - DNA, 25 bp, Homo sapien
cctccacaatagcagtaacactgct

SEQ ID NO: 1121920 - DNA, 25 bp, Homo sapien
tgccacactatagggtaatgtctgc

SEQ ID NO: 1121921 - DNA, 25 bp, Homo sapien
gcacacaagcctcatgaaaccactg

SEQ ID NO: 1121922 - DNA, 25 bp, Homo sapien
ggcttttgaaggcattgcacacaag

SEQ ID NO: 1121923 - DNA, 25 bp, Homo sapien
gcctcatgaaaccactgcttacatt

SEQ ID NO: 1121924 - DNA, 25 bp, Homo sapien
cttttgaaggcattgcacacaagcc

SEQ ID NO: 1121925 - DNA, 25 bp, Homo sapien
tctttaaaggaaggtaccaatgaga

SEQ ID NO: 1121926 - DNA, 25 bp, Homo sapien
tgtgtctttaacaaggccctgtggt

SEQ ID NO: 1121927 - DNA, 25 bp, Homo sapien
gttcctggagctcactgtgctaccc

SEQ ID NO: 1121928 - DNA, 25 bp, Homo sapien
caataggagcaaatgtaatcactga

SEQ ID NO: 1121929 - DNA, 25 bp, Homo sapien
cactgtaatggtagacgtttgaggt

SEQ ID NO: 1121930 - DNA, 25 bp, Homo sapien
gacagagcatataaacgtataaaat

SEQ ID NO: 1121931 - DNA, 25 bp, Homo sapien
tgaggtattctggtccagaactgca

SEQ ID NO: 1121932 - DNA, 25 bp, Homo sapien
gacgtttgaggtattctggtccaga

SEQ ID NO: 1121933 - DNA, 25 bp, Homo sapien
ttaggttgtaaaggcataggtgtgc

SEQ ID NO: 1121934 - DNA, 25 bp, Homo sapien
tgtatgtcataagctcaagttcaga

SEQ ID NO: 1121935 - DNA, 25 bp, Homo sapien
tctccagggtgcaatctatcccagt

SEQ ID NO: 1121936 - DNA, 25 bp, Homo sapien
tcccagttttcattaatgtatgtca

SEQ ID NO: 1121937 - DNA, 25 bp, Homo sapien
ttccagagtcaacaggcaacaaaca

SEQ ID NO: 1121938 - DNA, 25 bp, Homo sapien
ctccttctacaaatttccagagtca

SEQ ID NO: 1121939 - DNA, 25 bp, Homo sapien
agtcaacaggcaacaaacacacagg

SEQ ID NO: 1121940 - DNA, 25 bp, Homo sapien
caaatttccagagtcaacaggcaac

SEQ ID NO: 1121941 - DNA, 25 bp, Homo sapien
tgttctccctgatatcccataaacc

SEQ ID NO: 1121942 - DNA, 25 bp, Homo sapien
ttaaaactacaaactaaatcatgca

SEQ ID NO: 1121943 - DNA, 25 bp, Homo sapien
ttgatatgaaataggatgtccttcg

SEQ ID NO: 1121944 - DNA, 25 bp, Homo sapien
tcgtgtctcaaagctacaaatcaag

SEQ ID NO: 1121945 - DNA, 25 bp, Homo sapien
ctgcatatgaagtgctaaaagaata

SEQ ID NO: 1121946 - DNA, 25 bp, Homo sapien
ttcagaagttcagttggagctggga

SEQ ID NO: 1121947 - DNA, 25 bp, Homo sapien
ggagctgggacacccaaaattcata

SEQ ID NO: 1121948 - DNA, 25 bp, Homo sapien
gcagacaatgtactaacaggtatac

SEQ ID NO: 1121949 - DNA, 25 bp, Homo sapien
tattacgtataacaagaattgctga

SEQ ID NO: 1121950 - DNA, 25 bp, Homo sapien
ggaatgacccattatttatgttacc

SEQ ID NO: 1121951 - DNA, 25 bp, Homo sapien
gagcaggcgctttagtctatattac

SEQ ID NO: 1121952 - DNA, 25 bp, Homo sapien
agctatgtatgactgtaccattgca

SEQ ID NO: 1121953 - DNA, 25 bp, Homo sapien
gaactcaagtgataagcccattcat

SEQ ID NO: 1121954 - DNA, 25 bp, Homo sapien
catgttaaatacgagttaggtactc

SEQ ID NO: 1121955 - DNA, 25 bp, Homo sapien
cctactgtaatttctgaagggtcta

SEQ ID NO: 1121956 - DNA, 25 bp, Homo sapien
gtgccaatatgctgagtgctaaaaa

SEQ ID NO: 1121957 - DNA, 25 bp, Homo sapien
aagtatcaagaaacaatttaacgca

SEQ ID NO: 1121958 - DNA, 25 bp, Homo sapien
gaagtatcaagaaacaatttaacgc

SEQ ID NO: 1121959 - DNA, 25 bp, Homo sapien
ctccagaacatgctcatatctttca

SEQ ID NO: 1121960 - DNA, 25 bp, Homo sapien
gcctccagaacatgctcatatcttt

SEQ ID NO: 1121961 - DNA, 25 bp, Homo sapien
aatgcctccagaacatgctcatatc

SEQ ID NO: 1121962 - DNA, 25 bp, Homo sapien
tgcctccagaacatgctcatatctt

SEQ ID NO: 1121963 - DNA, 25 bp, Homo sapien
gaagggaatccttgttagtatagtg

SEQ ID NO: 1121964 - DNA, 25 bp, Homo sapien
gaagacctgtagatctgtatgagaa

SEQ ID NO: 1121965 - DNA, 25 bp, Homo sapien
gagataccgatatgtctcccaccca

SEQ ID NO: 1121966 - DNA, 25 bp, Homo sapien
tgctttttcaatggaacaggctaaa

SEQ ID NO: 1121967 - DNA, 25 bp, Homo sapien
tattatggacttgggcctctgcaaa

SEQ ID NO: 1121968 - DNA, 25 bp, Homo sapien
tgccccagagccagtctacagtagg

SEQ ID NO: 1121969 - DNA, 25 bp, Homo sapien
taaaaggagtatctagagtgccgga

SEQ ID NO: 1121970 - DNA, 25 bp, Homo sapien
gatatatttctggtaccctaaactg

SEQ ID NO: 1121971 - DNA, 25 bp, Homo sapien
tgaatcagatataggtttggatgcc

SEQ ID NO: 1121972 - DNA, 25 bp, Homo sapien
tcagatataggtttggatgcctttc

SEQ ID NO: 1121973 - DNA, 25 bp, Homo sapien
acgaattcgcaacccaaacaaatgc

SEQ ID NO: 1121974 - DNA, 25 bp, Homo sapien
ggcacaggaggaacacgaattcgca

SEQ ID NO: 1121975 - DNA, 25 bp, Homo sapien
aaccatcatttgactagtcctatcc

SEQ ID NO: 1121976 - DNA, 25 bp, Homo sapien
atttgtcggcctccctacataggaa

SEQ ID NO: 1121977 - DNA, 25 bp, Homo sapien
ggatcattcctacttacacacaaaa

SEQ ID NO: 1121978 - DNA, 25 bp, Homo sapien
gtgttgatgacatataccctttcca

SEQ ID NO: 1121979 - DNA, 25 bp, Homo sapien
aatccttcatattctcagggagtca

SEQ ID NO: 1121980 - DNA, 25 bp, Homo sapien
tgtagtagtcataaaggctgccttt

SEQ ID NO: 1121981 - DNA, 25 bp, Homo sapien
tccacaagtttagtcaagtgcacag

SEQ ID NO: 1121982 - DNA, 25 bp, Homo sapien
gcccagagtggcagaatgtaaagga

SEQ ID NO: 1121983 - DNA, 25 bp, Homo sapien
tttttcttgtatatgggccaggtgg

SEQ ID NO: 1121984 - DNA, 25 bp, Homo sapien
ttgtatatgggccaggtggacgacc

SEQ ID NO: 1121985 - DNA, 25 bp, Homo sapien
caggtggacgacctacagatttttt

SEQ ID NO: 1121986 - DNA, 25 bp, Homo sapien
gtggctcagcagttttttgaatcat

SEQ ID NO: 1121987 - DNA, 25 bp, Homo sapien
atagaacaaggtaaatccaaagtag

SEQ ID NO: 1121988 - DNA, 25 bp, Homo sapien
ctatagaacaaggtaaatccaaagt

SEQ ID NO: 1121989 - DNA, 25 bp, Homo sapien
caaggtaaatccaaagtaggattct

SEQ ID NO: 1121990 - DNA, 25 bp, Homo sapien
cctatagaacaaggtaaatccaaag

SEQ ID NO: 1121991 - DNA, 25 bp, Homo sapien
gtgaaatccacatctgaggtattgg

SEQ ID NO: 1121992 - DNA, 25 bp, Homo sapien
gatgaatgtgcagttccctcagttc

SEQ ID NO: 1121993 - DNA, 25 bp, Homo sapien
gcactggaagcacccgtgaaatcca

SEQ ID NO: 1121994 - DNA, 25 bp, Homo sapien
cctggaaatgctagacgaggtagtt

SEQ ID NO: 1121995 - DNA, 25 bp, Homo sapien
tgaatattaacaactattgggatct

SEQ ID NO: 1121996 - DNA, 25 bp, Homo sapien
ttcaatcaacactttacaaagaaaa

SEQ ID NO: 1121997 - DNA, 25 bp, Homo sapien
ctcaaaaagctgatagacacaactt

SEQ ID NO: 1121998 - DNA, 25 bp, Homo sapien
ggatctacatatggattacctctca

SEQ ID NO: 1121999 - DNA, 25 bp, Homo sapien
ctagagaggccgacatgggaggatt

SEQ ID NO: 1122000 - DNA, 25 bp, Homo sapien
cttgagaaggccaacacaggaggat

SEQ ID NO: 1122001 - DNA, 25 bp, Homo sapien
agccactagagaggccgacatggga

SEQ ID NO: 1122002 - DNA, 25 bp, Homo sapien
agcacttgagaaggccaacacagga

SEQ ID NO: 1122003 - DNA, 25 bp, Homo sapien
taagatatcagaggggagtctgcta

SEQ ID NO: 1122004 - DNA, 25 bp, Homo sapien
agaggggagtctgctattgatgaaa

SEQ ID NO: 1122005 - DNA, 25 bp, Homo sapien
gctattgatgaaaatcttaagttta

SEQ ID NO: 1122006 - DNA, 25 bp, Homo sapien
tgctattgatgaaaatcttaagttt

SEQ ID NO: 1122007 - DNA, 25 bp, Homo sapien
gaataagcacaaactagcagtcaga

SEQ ID NO: 1122008 - DNA, 25 bp, Homo sapien
tgtgaggtccttttcagcacagaaa

SEQ ID NO: 1122009 - DNA, 25 bp, Homo sapien
taggcctagtgaagtaatacaccag

SEQ ID NO: 1122010 - DNA, 25 bp, Homo sapien
cagtcagagtatcctgggtctatcc

SEQ ID NO: 1122011 - DNA, 25 bp, Homo sapien
ttagcatcctatgcccatacaatat

SEQ ID NO: 1122012 - DNA, 25 bp, Homo sapien
tctactgagcttttttagcatccta

SEQ ID NO: 1122013 - DNA, 25 bp, Homo sapien
ttgtctactgagcttttttagcatc

SEQ ID NO: 1122014 - DNA, 25 bp, Homo sapien
gagaaggccagaattgtctactgag

SEQ ID NO: 1122015 - DNA, 25 bp, Homo sapien
caaatgtggtattgcagcaggccaa

SEQ ID NO: 1122016 - DNA, 25 bp, Homo sapien
aaactcggtatttttcgccacatgc

SEQ ID NO: 1122017 - DNA, 25 bp, Homo sapien
tgtcacccgacgtgccaaaactcgg

SEQ ID NO: 1122018 - DNA, 25 bp, Homo sapien
tctgagttctgagtctggagtgctc

SEQ ID NO: 1122019 - DNA, 25 bp, Homo sapien
cacaaaaaactgactcaatggaata

SEQ ID NO: 1122020 - DNA, 25 bp, Homo sapien
caggtacatgttaaggctagtatca

SEQ ID NO: 1122021 - DNA, 25 bp, Homo sapien
tatccataacattgacaggtacatg

SEQ ID NO: 1122022 - DNA, 25 bp, Homo sapien
ccaaatacttgtgctatctacatga

SEQ ID NO: 1122023 - DNA, 25 bp, Homo sapien
gaacatcagagccatgtgaaccacc

SEQ ID NO: 1122024 - DNA, 25 bp, Homo sapien
agctcatttatacctggccaaccag

SEQ ID NO: 1122025 - DNA, 25 bp, Homo sapien
tacatagcaagcaacagcacccaat

SEQ ID NO: 1122026 - DNA, 25 bp, Homo sapien
ggccaaccaggaaccaaatgcagac

SEQ ID NO: 1122027 - DNA, 25 bp, Homo sapien
gagtttgctctgatatgcatttgga

SEQ ID NO: 1122028 - DNA, 25 bp, Homo sapien
tcacactaaggcctagagtttgctc

SEQ ID NO: 1122029 - DNA, 25 bp, Homo sapien
tagcagttaccgtgttcacctcaca

SEQ ID NO: 1122030 - DNA, 25 bp, Homo sapien
tactacaatatttaactaaggccca

SEQ ID NO: 1122031 - DNA, 25 bp, Homo sapien
tgggcctaattgcaacaccagtctg

SEQ ID NO: 1122032 - DNA, 25 bp, Homo sapien
taaatgcggcagttacaaattaact

SEQ ID NO: 1122033 - DNA, 25 bp, Homo sapien
tcctgctgatccagttgtacttaag

SEQ ID NO: 1122034 - DNA, 25 bp, Homo sapien
taaatcacctgagaattacctaatg

SEQ ID NO: 1122035 - DNA, 25 bp, Homo sapien
ccgagattgtgcctaggcaaactcc

SEQ ID NO: 1122036 - DNA, 25 bp, Homo sapien
gatactacactccaatatagcaaga

SEQ ID NO: 1122037 - DNA, 25 bp, Homo sapien
tactacactccaatatagcaagacc

SEQ ID NO: 1122038 - DNA, 25 bp, Homo sapien
atagatactacactccaatatagca

SEQ ID NO: 1122039 - DNA, 25 bp, Homo sapien
gggagaacaggcacaagaacaagaa

SEQ ID NO: 1122040 - DNA, 25 bp, Homo sapien
tactggcacagatatattggatatg

SEQ ID NO: 1122041 - DNA, 25 bp, Homo sapien
tgacaatacattcagcaccatttct

SEQ ID NO: 1122042 - DNA, 25 bp, Homo sapien
tcctggataatatgggagaacaggc

SEQ ID NO: 1122043 - DNA, 25 bp, Homo sapien
tggagacaggatggaccaaaactct

SEQ ID NO: 1122044 - DNA, 25 bp, Homo sapien
tatctagtatttgctataaacaagg

SEQ ID NO: 1122045 - DNA, 25 bp, Homo sapien
tccattacactatgagatagagtct

SEQ ID NO: 1122046 - DNA, 25 bp, Homo sapien
caagggttggcatgttataggcttc

SEQ ID NO: 1122047 - DNA, 25 bp, Homo sapien
cgcgaccttggcccacagcaacctt

SEQ ID NO: 1122048 - DNA, 25 bp, Homo sapien
tctccctctgtcactctgttaccca

SEQ ID NO: 1122049 - DNA, 25 bp, Homo sapien
accttggcccacagcaaccttcatc

SEQ ID NO: 1122050 - DNA, 25 bp, Homo sapien
cgaccttggcccacagcaaccttca

SEQ ID NO: 1122051 - DNA, 25 bp, Homo sapien
ggagcggagacaacagtacctgacg

SEQ ID NO: 1122052 - DNA, 25 bp, Homo sapien
gaaggagtgcttctaccagcccatg

SEQ ID NO: 1122053 - DNA, 25 bp, Homo sapien
gaactgcgcttctctttcggaggga

SEQ ID NO: 1122054 - DNA, 25 bp, Homo sapien
agtaagtgcggaggataaaccagcc

SEQ ID NO: 1122055 - DNA, 25 bp, Homo sapien
aattaccgccatgatgcccattggt

SEQ ID NO: 1122056 - DNA, 25 bp, Homo sapien
aagcctcggacacaactcggagaac

SEQ ID NO: 1122057 - DNA, 25 bp, Homo sapien
cgcactcgagtctgcgttaggaagc

SEQ ID NO: 1122058 - DNA, 25 bp, Homo sapien
ggcagcacagaattcgaaccgccgc

SEQ ID NO: 1122059 - DNA, 25 bp, Homo sapien
cccaaatcgtcgctggggagagacc

SEQ ID NO: 1122060 - DNA, 25 bp, Homo sapien
ccaaatcgtcgctggggagagaccc

SEQ ID NO: 1122061 - DNA, 25 bp, Homo sapien
cacccaaatcgtcgctggggagaga

SEQ ID NO: 1122062 - DNA, 25 bp, Homo sapien
caaatcgtcgctggggagagaccca

SEQ ID NO: 1122063 - DNA, 25 bp, Homo sapien
aataaaatacaaccgttcagagcag

SEQ ID NO: 1122064 - DNA, 25 bp, Homo sapien
gcagcatgctcagcaaccacgagga

SEQ ID NO: 1122065 - DNA, 25 bp, Homo sapien
tcccagcgcatccaaggtgccggga

SEQ ID NO: 1122066 - DNA, 25 bp, Homo sapien
gtttccccacgccaaggcgcagtcg

SEQ ID NO: 1122067 - DNA, 25 bp, Homo sapien
tcttcccctaaactctgcaaactcc

SEQ ID NO: 1122068 - DNA, 25 bp, Homo sapien
tctttattatagtagtctgatgaac

SEQ ID NO: 1122069 - DNA, 25 bp, Homo sapien
gttatcttcagttcatgtcttaagg

SEQ ID NO: 1122070 - DNA, 25 bp, Homo sapien
tctgcaaactccattctgttatctt

SEQ ID NO: 1122071 - DNA, 25 bp, Homo sapien
aaattagcttttcagaccttgaagg

SEQ ID NO: 1122072 - DNA, 25 bp, Homo sapien
gaaaatcagtgctgctaccagatat

SEQ ID NO: 1122073 - DNA, 25 bp, Homo sapien
tacagacgttttcataaggtgaata

SEQ ID NO: 1122074 - DNA, 25 bp, Homo sapien
caaaagtccagggtggctaggctga

SEQ ID NO: 1122075 - DNA, 25 bp, Homo sapien
ggcttttaatctcctgatccacagg

SEQ ID NO: 1122076 - DNA, 25 bp, Homo sapien
gcattctgttgcctaagtttattta

SEQ ID NO: 1122077 - DNA, 25 bp, Homo sapien
tgattctgtgtgaccaaacaagcat

SEQ ID NO: 1122078 - DNA, 25 bp, Homo sapien
ttgctcttgactgtgttaattcaaa

SEQ ID NO: 1122079 - DNA, 25 bp, Homo sapien
tcttctaagattgggacactggctg

SEQ ID NO: 1122080 - DNA, 25 bp, Homo sapien
taatctgttcttctaagattgggac

SEQ ID NO: 1122081 - DNA, 25 bp, Homo sapien
tctgttcttctaagattgggacact

SEQ ID NO: 1122082 - DNA, 25 bp, Homo sapien
tctaagattgggacactggctgcct

SEQ ID NO: 1122083 - DNA, 25 bp, Homo sapien
attcaacaagttctaagacagctga

SEQ ID NO: 1122084 - DNA, 25 bp, Homo sapien
ccaagaggagttatgattgactaaa

SEQ ID NO: 1122085 - DNA, 25 bp, Homo sapien
tacatgcaacctacagccaagagga

SEQ ID NO: 1122086 - DNA, 25 bp, Homo sapien
tagcccctatatactacatgcaacc

SEQ ID NO: 1122087 - DNA, 25 bp, Homo sapien
tttggactcctgcaaactctgttcc

SEQ ID NO: 1122088 - DNA, 25 bp, Homo sapien
taattttatacattcctctttggac

SEQ ID NO: 1122089 - DNA, 25 bp, Homo sapien
tgtttggtttgttcaagtaagtcca

SEQ ID NO: 1122090 - DNA, 25 bp, Homo sapien
caattaccattttctggctctgttc

SEQ ID NO: 1122091 - DNA, 25 bp, Homo sapien
gtgtccacatgtaccagaacgcaaa

SEQ ID NO: 1122092 - DNA, 25 bp, Homo sapien
tcgggtactgctgcattgactgtgt

SEQ ID NO: 1122093 - DNA, 25 bp, Homo sapien
aaggtggcaattgacatcgggtact

SEQ ID NO: 1122094 - DNA, 25 bp, Homo sapien
tgtaccagaacgcaaatgaggtggg

SEQ ID NO: 1122095 - DNA, 25 bp, Homo sapien
gctcttcggcattatatagtgcttc

SEQ ID NO: 1122096 - DNA, 25 bp, Homo sapien
tactcagctcttcggcattatatag

SEQ ID NO: 1122097 - DNA, 25 bp, Homo sapien
gaaagctttactcagctcttcggca

SEQ ID NO: 1122098 - DNA, 25 bp, Homo sapien
gttggaaagctttactcagctcttc

SEQ ID NO: 1122099 - DNA, 25 bp, Homo sapien
ttggaatatagacagtaatacaaaa

SEQ ID NO: 1122100 - DNA, 25 bp, Homo sapien
tggaatatagacagtaatacaaaac

SEQ ID NO: 1122101 - DNA, 25 bp, Homo sapien
gttggaatatagacagtaatacaaa

SEQ ID NO: 1122102 - DNA, 25 bp, Homo sapien
tgttggaatatagacagtaatacaa

SEQ ID NO: 1122103 - DNA, 25 bp, Homo sapien
tacagccctagtacagatttgtatg

SEQ ID NO: 1122104 - DNA, 25 bp, Homo sapien
tcttgaccaatttgcaacatctggc

SEQ ID NO: 1122105 - DNA, 25 bp, Homo sapien
tctcccagggtatctttcatcttgt

SEQ ID NO: 1122106 - DNA, 25 bp, Homo sapien
tccagacctatagatacaaaagcct

SEQ ID NO: 1122107 - DNA, 25 bp, Homo sapien
cctgtaacagataggcaattgcatc

SEQ ID NO: 1122108 - DNA, 25 bp, Homo sapien
aagtgaagttcctgggcagtagcaa

SEQ ID NO: 1122109 - DNA, 25 bp, Homo sapien
gtccccagccttgtagtgaaaagaa

SEQ ID NO: 1122110 - DNA, 25 bp, Homo sapien
tacagctgctgcgtccgagttacta

SEQ ID NO: 1122111 - DNA, 25 bp, Homo sapien
ctttttcacagttagttagatttct

SEQ ID NO: 1122112 - DNA, 25 bp, Homo sapien
cagttagttagatttctctctaata

SEQ ID NO: 1122113 - DNA, 25 bp, Homo sapien
tttcacagttagttagatttctctc

SEQ ID NO: 1122114 - DNA, 25 bp, Homo sapien
cacagttagttagatttctctctaa

SEQ ID NO: 1122115 - DNA, 25 bp, Homo sapien
tttcaagttcacttttatatagacc

SEQ ID NO: 1122116 - DNA, 25 bp, Homo sapien
tctctttcagaatttcaagttcact

SEQ ID NO: 1122117 - DNA, 25 bp, Homo sapien
tcaagttcacttttatatagaccac

SEQ ID NO: 1122118 - DNA, 25 bp, Homo sapien
aagttcacttttatatagaccacac

SEQ ID NO: 1122119 - DNA, 25 bp, Homo sapien
gcatgccaggcactcacaactttat

SEQ ID NO: 1122120 - DNA, 25 bp, Homo sapien
taatacctgctcacatttactaaat

SEQ ID NO: 1122121 - DNA, 25 bp, Homo sapien
tataagacaggaaatctaacttcaa

SEQ ID NO: 1122122 - DNA, 25 bp, Homo sapien
tagtgtctcacagtaaatggtaggg

SEQ ID NO: 1122123 - DNA, 25 bp, Homo sapien
tcaaaatactttgtctagattcagt

SEQ ID NO: 1122124 - DNA, 25 bp, Homo sapien
tgcaacacggacctttaattctcgg

SEQ ID NO: 1122125 - DNA, 25 bp, Homo sapien
aaatctagtcgctcattctgtgctg

SEQ ID NO: 1122126 - DNA, 25 bp, Homo sapien
tagattcagttagttgtgccatgac

SEQ ID NO: 1122127 - DNA, 25 bp, Homo sapien
gaaagatatgatttaaagccaaata

SEQ ID NO: 1122128 - DNA, 25 bp, Homo sapien
aaagatatgatttaaagccaaataa

SEQ ID NO: 1122129 - DNA, 25 bp, Homo sapien
agaaagatatgatttaaagccaaat

SEQ ID NO: 1122130 - DNA, 25 bp, Homo sapien
tagaaagatatgatttaaagccaaa

SEQ ID NO: 1122131 - DNA, 25 bp, Homo sapien
caatgcaacggtcttccttgtttga

SEQ ID NO: 1122132 - DNA, 25 bp, Homo sapien
ttatttgcctcacagcagccaatgc

SEQ ID NO: 1122133 - DNA, 25 bp, Homo sapien
tcacagcagccaatgcaacggtctt

SEQ ID NO: 1122134 - DNA, 25 bp, Homo sapien
gcagccaatgcaacggtcttccttg

SEQ ID NO: 1122135 - DNA, 25 bp, Homo sapien
ttctatttgctataactgcagaatc

SEQ ID NO: 1122136 - DNA, 25 bp, Homo sapien
tctatttgctataactgcagaatct

SEQ ID NO: 1122137 - DNA, 25 bp, Homo sapien
cattctatttgctataactgcagaa

SEQ ID NO: 1122138 - DNA, 25 bp, Homo sapien
acattctatttgctataactgcaga

SEQ ID NO: 1122139 - DNA, 25 bp, Homo sapien
cacctagctttacaggttctgtttc

SEQ ID NO: 1122140 - DNA, 25 bp, Homo sapien
taagactctgagataactgatttgc

SEQ ID NO: 1122141 - DNA, 25 bp, Homo sapien
gcagtcaggtttgcatgaagctttt

SEQ ID NO: 1122142 - DNA, 25 bp, Homo sapien
taatttgctactttcttggctgtca

SEQ ID NO: 1122143 - DNA, 25 bp, Homo sapien
gctcctcttgaatcagctgaaactg

SEQ ID NO: 1122144 - DNA, 25 bp, Homo sapien
gagccatgttaaccttcaaatcaga

SEQ ID NO: 1122145 - DNA, 25 bp, Homo sapien
tatcagcttagtacgtagttcttct

SEQ ID NO: 1122146 - DNA, 25 bp, Homo sapien
ctattccagtaacaagtctttgcct

SEQ ID NO: 1122147 - DNA, 25 bp, Homo sapien
caagagttaaaagttgagaacattt

SEQ ID NO: 1122148 - DNA, 25 bp, Homo sapien
aataagcaactatcttttcttccag

SEQ ID NO: 1122149 - DNA, 25 bp, Homo sapien
tctcaagagttaaaagttgagaaca

SEQ ID NO: 1122150 - DNA, 25 bp, Homo sapien
tttttgcagcaatagaggaataagc

SEQ ID NO: 1122151 - DNA, 25 bp, Homo sapien
tccattctttaaagaaccacagtag

SEQ ID NO: 1122152 - DNA, 25 bp, Homo sapien
tactttatcaagacgagaagattta

SEQ ID NO: 1122153 - DNA, 25 bp, Homo sapien
tacataaaagtacattagtcaacca

SEQ ID NO: 1122154 - DNA, 25 bp, Homo sapien
cattagtcaaccattaaatatgtca

SEQ ID NO: 1122155 - DNA, 25 bp, Homo sapien
tttctttatgctgttccaagtgaat

SEQ ID NO: 1122156 - DNA, 25 bp, Homo sapien
gctctgtattaatattggtttctag

SEQ ID NO: 1122157 - DNA, 25 bp, Homo sapien
tggtttctagactccttatcttttc

SEQ ID NO: 1122158 - DNA, 25 bp, Homo sapien
aggctaaacaaattttctcatgctc

SEQ ID NO: 1122159 - DNA, 25 bp, Homo sapien
gacaaattctctatgcggtccttca

SEQ ID NO: 1122160 - DNA, 25 bp, Homo sapien
gaaatctcatgacgtcccactatgt

SEQ ID NO: 1122161 - DNA, 25 bp, Homo sapien
cagccctgtggtattcgtggtttca

SEQ ID NO: 1122162 - DNA, 25 bp, Homo sapien
aggtccttccccatatatctctgag

SEQ ID NO: 1122163 - DNA, 25 bp, Homo sapien
ttcaagatgatgttgtttgcatatt

SEQ ID NO: 1122164 - DNA, 25 bp, Homo sapien
gttgcaacatggacatagtcttttc

SEQ ID NO: 1122165 - DNA, 25 bp, Homo sapien
tgctttccgtcaagagtctatctag

SEQ ID NO: 1122166 - DNA, 25 bp, Homo sapien
catattatatcttgttgcaacatgg

SEQ ID NO: 1122167 - DNA, 25 bp, Homo sapien
taaagcttcatctttcttcatattt

SEQ ID NO: 1122168 - DNA, 25 bp, Homo sapien
tttaaagcttcatctttcttcatat

SEQ ID NO: 1122169 - DNA, 25 bp, Homo sapien
ttggttctgtaatgcttttaaagct

SEQ ID NO: 1122170 - DNA, 25 bp, Homo sapien
gcttcatctttcttcatattttcct

SEQ ID NO: 1122171 - DNA, 25 bp, Homo sapien
aatttccaatgctgaatctagttgc

SEQ ID NO: 1122172 - DNA, 25 bp, Homo sapien
ttttgtcctacatctcatgcttctt

SEQ ID NO: 1122173 - DNA, 25 bp, Homo sapien
tattttgtcctacatctcatgcttc

SEQ ID NO: 1122174 - DNA, 25 bp, Homo sapien
attttgtcctacatctcatgcttct

SEQ ID NO: 1122175 - DNA, 25 bp, Homo sapien
tatattttgtcctacatctcatgct

SEQ ID NO: 1122176 - DNA, 25 bp, Homo sapien
gggaccacgggtatgcaccaccata

SEQ ID NO: 1122177 - DNA, 25 bp, Homo sapien
ggaccacgggtatgcaccaccatac

SEQ ID NO: 1122178 - DNA, 25 bp, Homo sapien
gccctctagattacaaataggtttg

SEQ ID NO: 1122179 - DNA, 25 bp, Homo sapien
ggcagccctgcttctagactatgat

SEQ ID NO: 1122180 - DNA, 25 bp, Homo sapien
cctctattgccccagttcctattgg

SEQ ID NO: 1122181 - DNA, 25 bp, Homo sapien
gatgcacctaagtctggagtgctgg

SEQ ID NO: 1122182 - DNA, 25 bp, Homo sapien
aaaactgaagtattagagaatgggc

SEQ ID NO: 1122183 - DNA, 25 bp, Homo sapien
tatccaagagcacctattaagaaga

SEQ ID NO: 1122184 - DNA, 25 bp, Homo sapien
taaatagcggaagagaatcacgact

SEQ ID NO: 1122185 - DNA, 25 bp, Homo sapien
cttttttctaactatccagcaggtg

SEQ ID NO: 1122186 - DNA, 25 bp, Homo sapien
cagaagtctcttgaagactgtgatt

SEQ ID NO: 1122187 - DNA, 25 bp, Homo sapien
tgtctcttgttgtaacatttgctgc

SEQ ID NO: 1122188 - DNA, 25 bp, Homo sapien
ttctaattgtctcttgttgtaacat

SEQ ID NO: 1122189 - DNA, 25 bp, Homo sapien
ttcaagtttagtttgagtatcttct

SEQ ID NO: 1122190 - DNA, 25 bp, Homo sapien
tgagtatcttctagctctccatttc

SEQ ID NO: 1122191 - DNA, 25 bp, Homo sapien
agtgccagtaagctcaatcactttt

SEQ ID NO: 1122192 - DNA, 25 bp, Homo sapien
ggcagtgccagtaagctcaatcact

SEQ ID NO: 1122193 - DNA, 25 bp, Homo sapien
cagtgccagtaagctcaatcacttt

SEQ ID NO: 1122194 - DNA, 25 bp, Homo sapien
ctggcagtgccagtaagctcaatca

SEQ ID NO: 1122195 - DNA, 25 bp, Homo sapien
tatctaattgagagaggtgcattgc

SEQ ID NO: 1122196 - DNA, 25 bp, Homo sapien
tagctctgtctttgtctgatctaag

SEQ ID NO: 1122197 - DNA, 25 bp, Homo sapien
tattttctccatctcgttttaggtg

SEQ ID NO: 1122198 - DNA, 25 bp, Homo sapien
tgtactgatccatctcaatctttac

SEQ ID NO: 1122199 - DNA, 25 bp, Homo sapien
caattcctggagttgtcttaaagta

SEQ ID NO: 1122200 - DNA, 25 bp, Homo sapien
agttcagtctcaagtacttcccgtt

SEQ ID NO: 1122201 - DNA, 25 bp, Homo sapien
cagctgtgagatcctttatagtagt

SEQ ID NO: 1122202 - DNA, 25 bp, Homo sapien
cctctaatgataattgagccttctg

SEQ ID NO: 1122203 - DNA, 25 bp, Homo sapien
tagtgactgggtggctactttagag

SEQ ID NO: 1122204 - DNA, 25 bp, Homo sapien
ggatgtttcctatatgccagggttc

SEQ ID NO: 1122205 - DNA, 25 bp, Homo sapien
aagaaacagctatggccaaggttcc

SEQ ID NO: 1122206 - DNA, 25 bp, Homo sapien
ctctctgaagtaatgtgaaggacaa

SEQ ID NO: 1122207 - DNA, 25 bp, Homo sapien
gctctttgctttagttcccaatttc

SEQ ID NO: 1122208 - DNA, 25 bp, Homo sapien
tctttaagtgcctgatccatttcaa

SEQ ID NO: 1122209 - DNA, 25 bp, Homo sapien
gtgcctgatccatttcaaggagctc

SEQ ID NO: 1122210 - DNA, 25 bp, Homo sapien
tctttgctttagttcccaatttctc

SEQ ID NO: 1122211 - DNA, 25 bp, Homo sapien
tatgcttagaataggctttgtaatt

SEQ ID NO: 1122212 - DNA, 25 bp, Homo sapien
agtataaactcattagtatagctaa

SEQ ID NO: 1122213 - DNA, 25 bp, Homo sapien
caagtataaactcattagtatagct

SEQ ID NO: 1122214 - DNA, 25 bp, Homo sapien
ttgtatgcttagaataggctttgta

SEQ ID NO: 1122215 - DNA, 25 bp, Homo sapien
ctcctctgtgctcacgaatagtcat

SEQ ID NO: 1122216 - DNA, 25 bp, Homo sapien
ccaaacctgaggaaagatataagta

SEQ ID NO: 1122217 - DNA, 25 bp, Homo sapien
tatgggatctttgggacaacatcaa

SEQ ID NO: 1122218 - DNA, 25 bp, Homo sapien
caggtataaagaggtcaaagatcgc

SEQ ID NO: 1122219 - DNA, 25 bp, Homo sapien
taaatagactacacagtgagaggag

SEQ ID NO: 1122220 - DNA, 25 bp, Homo sapien
aaaagatttgctgggaaacatgccc

SEQ ID NO: 1122221 - DNA, 25 bp, Homo sapien
tgcttaaattcctggaagggcctcc

SEQ ID NO: 1122222 - DNA, 25 bp, Homo sapien
cttgaagcccttgtaagacctgcag

SEQ ID NO: 1122223 - DNA, 25 bp, Homo sapien
cagaaagccatgtcaaccttgaagc

SEQ ID NO: 1122224 - DNA, 25 bp, Homo sapien
gtaatttgtcattcagactttctat

SEQ ID NO: 1122225 - DNA, 25 bp, Homo sapien
tcgaagctgttctttagcattttgt

SEQ ID NO: 1122226 - DNA, 25 bp, Homo sapien
gaagctgttctttagcattttgtaa

SEQ ID NO: 1122227 - DNA, 25 bp, Homo sapien
cattttgtaatttgtcattcagact

SEQ ID NO: 1122228 - DNA, 25 bp, Homo sapien
ttttttcagttgacttatctcctgt

SEQ ID NO: 1122229 - DNA, 25 bp, Homo sapien
tccttaggtggaaataatttgctta

SEQ ID NO: 1122230 - DNA, 25 bp, Homo sapien
tgttccttaggtggaaataatttgc

SEQ ID NO: 1122231 - DNA, 25 bp, Homo sapien
cacttgttccttaggtggaaataat

SEQ ID NO: 1122232 - DNA, 25 bp, Homo sapien
gcttcatatcctccagttcactaga

SEQ ID NO: 1122233 - DNA, 25 bp, Homo sapien
caattctgtatgagagttctgcacc

SEQ ID NO: 1122234 - DNA, 25 bp, Homo sapien
gccccaaatctatggcctccttgta

SEQ ID NO: 1122235 - DNA, 25 bp, Homo sapien
tggacttgctgatgacgagcctctg

SEQ ID NO: 1122236 - DNA, 25 bp, Homo sapien
ttctaaatgagcttcacgtacttta

SEQ ID NO: 1122237 - DNA, 25 bp, Homo sapien
ctaaatgagcttcacgtactttaga

SEQ ID NO: 1122238 - DNA, 25 bp, Homo sapien
cagctaaatggtttccatgagcatc

SEQ ID NO: 1122239 - DNA, 25 bp, Homo sapien
cccccagttcttcagctaaatggtt

SEQ ID NO: 1122240 - DNA, 25 bp, Homo sapien
ccactttgcatggttctcttgatgt

SEQ ID NO: 1122241 - DNA, 25 bp, Homo sapien
ctttgcatggttctcttgatgtgaa

SEQ ID NO: 1122242 - DNA, 25 bp, Homo sapien
gcatggttctcttgatgtgaaatca

SEQ ID NO: 1122243 - DNA, 25 bp, Homo sapien
cagaagacttttgagagtcagcaga

SEQ ID NO: 1122244 - DNA, 25 bp, Homo sapien
gcttacagtatcctgagcttcttct

SEQ ID NO: 1122245 - DNA, 25 bp, Homo sapien
tcattcctatcttggacttgttgat

SEQ ID NO: 1122246 - DNA, 25 bp, Homo sapien
gcagcttcaattacttcattcctat

SEQ ID NO: 1122247 - DNA, 25 bp, Homo sapien
tgccttctctaactgttcgtttagt

SEQ ID NO: 1122248 - DNA, 25 bp, Homo sapien
tcatagatatgctttattactttta

SEQ ID NO: 1122249 - DNA, 25 bp, Homo sapien
catagatatgctttattacttttat

SEQ ID NO: 1122250 - DNA, 25 bp, Homo sapien
tttcatagatatgctttattacttt

SEQ ID NO: 1122251 - DNA, 25 bp, Homo sapien
ttttcatagatatgctttattactt

SEQ ID NO: 1122252 - DNA, 25 bp, Homo sapien
ttgtgaacgtaattgtagtgagcca

SEQ ID NO: 1122253 - DNA, 25 bp, Homo sapien
catcaagtataaaaccctctaaaca

SEQ ID NO: 1122254 - DNA, 25 bp, Homo sapien
tagtgagccataatataatgatgcc

SEQ ID NO: 1122255 - DNA, 25 bp, Homo sapien
tctttgcccttgttgacctcaagtg

SEQ ID NO: 1122256 - DNA, 25 bp, Homo sapien
tttgcagtggagagttctgtcgatg

SEQ ID NO: 1122257 - DNA, 25 bp, Homo sapien
tttggcagaagtgtgatttggtgct

SEQ ID NO: 1122258 - DNA, 25 bp, Homo sapien
aatttgatttcactgttgtctcaga

SEQ ID NO: 1122259 - DNA, 25 bp, Homo sapien
cagttttcatgagttgtgtggttct

SEQ ID NO: 1122260 - DNA, 25 bp, Homo sapien
gaacatcaggcataatttctgttgg

SEQ ID NO: 1122261 - DNA, 25 bp, Homo sapien
gaaattttggcctgtaatctggtta

SEQ ID NO: 1122262 - DNA, 25 bp, Homo sapien
taagatcactggcactaatagagcg

SEQ ID NO: 1122263 - DNA, 25 bp, Homo sapien
gcgacgtaattttgtacacttggaa

SEQ ID NO: 1122264 - DNA, 25 bp, Homo sapien
cacctgtttgcatagaagacttttt

SEQ ID NO: 1122265 - DNA, 25 bp, Homo sapien
accagcacctgtttgcatagaagac

SEQ ID NO: 1122266 - DNA, 25 bp, Homo sapien
cagcacctgtttgcatagaagactt

SEQ ID NO: 1122267 - DNA, 25 bp, Homo sapien
gcacctgtttgcatagaagactttt

SEQ ID NO: 1122268 - DNA, 25 bp, Homo sapien
tcaacacatcagtatcttctttgaa

SEQ ID NO: 1122269 - DNA, 25 bp, Homo sapien
caaaagaaagcagcaagtttaagcc

SEQ ID NO: 1122270 - DNA, 25 bp, Homo sapien
agcaaaataacagcttctatgaagt

SEQ ID NO: 1122271 - DNA, 25 bp, Homo sapien
taaacagcacagtaccaaaaattcc

SEQ ID NO: 1122272 - DNA, 25 bp, Homo sapien
ttaagaactgacattcctcgcctct

SEQ ID NO: 1122273 - DNA, 25 bp, Homo sapien
taagaactgacattcctcgcctctt

SEQ ID NO: 1122274 - DNA, 25 bp, Homo sapien
actgacattcctcgcctcttttcct

SEQ ID NO: 1122275 - DNA, 25 bp, Homo sapien
gaactgacattcctcgcctcttttc

SEQ ID NO: 1122276 - DNA, 25 bp, Homo sapien
tctcaggtgatgagagttgtctcca

SEQ ID NO: 1122277 - DNA, 25 bp, Homo sapien
tctggtaccagagaggaggatacct

SEQ ID NO: 1122278 - DNA, 25 bp, Homo sapien
gatctccctcacatttgaaaacaag

SEQ ID NO: 1122279 - DNA, 25 bp, Homo sapien
gttgtctccagagttggtatcctct

SEQ ID NO: 1122280 - DNA, 25 bp, Homo sapien
gacatgcattaaatagtgcctggca

SEQ ID NO: 1122281 - DNA, 25 bp, Homo sapien
tcaagagtaaggagatgctgtcttt

SEQ ID NO: 1122282 - DNA, 25 bp, Homo sapien
aaattaagtgcacaataatgctttt

SEQ ID NO: 1122283 - DNA, 25 bp, Homo sapien
atcttaatattctcaggacatgcat

SEQ ID NO: 1122284 - DNA, 25 bp, Homo sapien
ggaacggacagctgatatatgtaac

SEQ ID NO: 1122285 - DNA, 25 bp, Homo sapien
cacgcccggccaagtaacaatattt

SEQ ID NO: 1122286 - DNA, 25 bp, Homo sapien
cagcgcagaaagatataaagggata

SEQ ID NO: 1122287 - DNA, 25 bp, Homo sapien
tataatatagtcattacaatggaat

SEQ ID NO: 1122288 - DNA, 25 bp, Homo sapien
gacctcagatgatctgcccacctcg

SEQ ID NO: 1122289 - DNA, 25 bp, Homo sapien
aggctagtgtgcaatggcgcaacct

SEQ ID NO: 1122290 - DNA, 25 bp, Homo sapien
ctagtgtgcaatggcgcaacctcag

SEQ ID NO: 1122291 - DNA, 25 bp, Homo sapien
tgacctcagatgatctgcccacctc

SEQ ID NO: 1122292 - DNA, 25 bp, Homo sapien
taatctgcacagtcagggatttcag

SEQ ID NO: 1122293 - DNA, 25 bp, Homo sapien
gcatgagaaattccttgatctagaa

SEQ ID NO: 1122294 - DNA, 25 bp, Homo sapien
tcaaaatcagagctcctgaagacaa

SEQ ID NO: 1122295 - DNA, 25 bp, Homo sapien
ccaagtagaacagagctggataggt

SEQ ID NO: 1122296 - DNA, 25 bp, Homo sapien
gttctggctcaaacaacaactgcag

SEQ ID NO: 1122297 - DNA, 25 bp, Homo sapien
tttccacgtccatgttactcaggca

SEQ ID NO: 1122298 - DNA, 25 bp, Homo sapien
cactgtgagctgtgtcggtgcctta

SEQ ID NO: 1122299 - DNA, 25 bp, Homo sapien
cctcctggtgggctgtaaacaactc

SEQ ID NO: 1122300 - DNA, 25 bp, Homo sapien
gatcagtgcctgatatgaattatac

SEQ ID NO: 1122301 - DNA, 25 bp, Homo sapien
caggttgttacttaactccaaagct

SEQ ID NO: 1122302 - DNA, 25 bp, Homo sapien
ggagctgaaatttcaaaccaggttg

SEQ ID NO: 1122303 - DNA, 25 bp, Homo sapien
ggatattttaactgcaccttgaaga

SEQ ID NO: 1122304 - DNA, 25 bp, Homo sapien
agtttatccgtctgaaaaagctggc

SEQ ID NO: 1122305 - DNA, 25 bp, Homo sapien
tattgctacaggcttctgtggtagc

SEQ ID NO: 1122306 - DNA, 25 bp, Homo sapien
aagagttgtaggttccagtcccagc

SEQ ID NO: 1122307 - DNA, 25 bp, Homo sapien
gacgagtagagcacacattatttca

SEQ ID NO: 1122308 - DNA, 25 bp, Homo sapien
tcactgtaccggagagctccaagca

SEQ ID NO: 1122309 - DNA, 25 bp, Homo sapien
gaacgcagatcgtggaagccgaaga

SEQ ID NO: 1122310 - DNA, 25 bp, Homo sapien
ggaaggtttgcaggaagccgctccc

SEQ ID NO: 1122311 - DNA, 25 bp, Homo sapien
taggcgaggaaggatcgtctctacc

SEQ ID NO: 1122312 - DNA, 25 bp, Homo sapien
ccgctgccgctgctggaacggcgac

SEQ ID NO: 1122313 - DNA, 25 bp, Homo sapien
gccgctgctggaacggcgacggccg

SEQ ID NO: 1122314 - DNA, 25 bp, Homo sapien
ctgccgctgctggaacggcgacggc

SEQ ID NO: 1122315 - DNA, 25 bp, Homo sapien
gctgccgctgctggaacggcgacgg

SEQ ID NO: 1122316 - DNA, 25 bp, Homo sapien
gccgccgcctcacaacatgtccgcc

SEQ ID NO: 1122317 - DNA, 25 bp, Homo sapien
cgcctcacaacatgtccgccgctgc

SEQ ID NO: 1122318 - DNA, 25 bp, Homo sapien
cctcggccaaaccatccttcagaca

SEQ ID NO: 1122319 - DNA, 25 bp, Homo sapien
gccgcctcggccaaaccatccttca

SEQ ID NO: 1122320 - DNA, 25 bp, Homo sapien
acggcgtcggagcagaggcaagatc

SEQ ID NO: 1122321 - DNA, 25 bp, Homo sapien
cagcgggctcggctctatagagccc

SEQ ID NO: 1122322 - DNA, 25 bp, Homo sapien
actggtccccaacggcgtcggagca

SEQ ID NO: 1122323 - DNA, 25 bp, Homo sapien
gctcggctctatagagcccgaggcc

SEQ ID NO: 1122324 - DNA, 25 bp, Homo sapien
cactcgcgtgtgtgagagatttagg

SEQ ID NO: 1122325 - DNA, 25 bp, Homo sapien
gcagaaaatgaacggaggagcagct

SEQ ID NO: 1122326 - DNA, 25 bp, Homo sapien
tctggtccactactccaccgagatt

SEQ ID NO: 1122327 - DNA, 25 bp, Homo sapien
aaaagtcgccctcggagagtgatcc

SEQ ID NO: 1122328 - DNA, 25 bp, Homo sapien
tcatcgttgccagacgaggaagcca

SEQ ID NO: 1122329 - DNA, 25 bp, Homo sapien
gaatgaattcagtgcagcagttcac

SEQ ID NO: 1122330 - DNA, 25 bp, Homo sapien
cttgtatgacatgctctggtgagat

SEQ ID NO: 1122331 - DNA, 25 bp, Homo sapien
tggccacccggacattaggaagagt

SEQ ID NO: 1122332 - DNA, 25 bp, Homo sapien
cacacaccctaaataccttctgtaa

SEQ ID NO: 1122333 - DNA, 25 bp, Homo sapien
tatattgactaatgccccaaaggca

SEQ ID NO: 1122334 - DNA, 25 bp, Homo sapien
gatgggtcgtgcctatggttctagc

SEQ ID NO: 1122335 - DNA, 25 bp, Homo sapien
gattgaggatgtcacgagccatgac

SEQ ID NO: 1122336 - DNA, 25 bp, Homo sapien
tccaaacgagaactggcctttcttc

SEQ ID NO: 1122337 - DNA, 25 bp, Homo sapien
gatgtaagagccaaatcccaaactt

SEQ ID NO: 1122338 - DNA, 25 bp, Homo sapien
tactgttttacactcttgcaagact

SEQ ID NO: 1122339 - DNA, 25 bp, Homo sapien
ttcttcaggaatgccaaggttttcc

SEQ ID NO: 1122340 - DNA, 25 bp, Homo sapien
ctctaggtggtctgcaatatcaata

SEQ ID NO: 1122341 - DNA, 25 bp, Homo sapien
taagcctagcacctagcatgatgct

SEQ ID NO: 1122342 - DNA, 25 bp, Homo sapien
gtgaagacagatatagcaggcagtc

SEQ ID NO: 1122343 - DNA, 25 bp, Homo sapien
taacattgcatgtactaacgcctgc

SEQ ID NO: 1122344 - DNA, 25 bp, Homo sapien
caaggtcttccaaattagtgtctac

SEQ ID NO: 1122345 - DNA, 25 bp, Homo sapien
tgctgacactcatcctatgtgaaat

SEQ ID NO: 1122346 - DNA, 25 bp, Homo sapien
gcatcagtcagtgtataatcaagag

SEQ ID NO: 1122347 - DNA, 25 bp, Homo sapien
agtgtctaccccaacctctctatag

SEQ ID NO: 1122348 - DNA, 25 bp, Homo sapien
gctgcatttgaagccattcctgttg

SEQ ID NO: 1122349 - DNA, 25 bp, Homo sapien
cagcaagctgggcttgttgggcagc

SEQ ID NO: 1122350 - DNA, 25 bp, Homo sapien
cctgattagatgcactggctgaggc

SEQ ID NO: 1122351 - DNA, 25 bp, Homo sapien
ttcatcctgagaagatcccgcctga

SEQ ID NO: 1122352 - DNA, 25 bp, Homo sapien
gaaacttaatagcagacatccctag

SEQ ID NO: 1122353 - DNA, 25 bp, Homo sapien
ggactcgctgctatctaaaatttca

SEQ ID NO: 1122354 - DNA, 25 bp, Homo sapien
tattgatcaaacgaaggactcgctg

SEQ ID NO: 1122355 - DNA, 25 bp, Homo sapien
taccaatgacaagtccaccaagatg

SEQ ID NO: 1122356 - DNA, 25 bp, Homo sapien
taaaagacaaattcagatactacag

SEQ ID NO: 1122357 - DNA, 25 bp, Homo sapien
tagagctttgtagaaatttcactgt

SEQ ID NO: 1122358 - DNA, 25 bp, Homo sapien
agagctttgtagaaatttcactgta

SEQ ID NO: 1122359 - DNA, 25 bp, Homo sapien
gacaaattcagatactacagaactg

SEQ ID NO: 1122360 - DNA, 25 bp, Homo sapien
ccaaatgcacttcatgggtatgaca

SEQ ID NO: 1122361 - DNA, 25 bp, Homo sapien
catatagggctgatcagttgtaaca

SEQ ID NO: 1122362 - DNA, 25 bp, Homo sapien
taatgttggactctaggccatctag

SEQ ID NO: 1122363 - DNA, 25 bp, Homo sapien
tgggagccacaatctatttttgggc

SEQ ID NO: 1122364 - DNA, 25 bp, Homo sapien
caaagatagccagcgtatgaatccc

SEQ ID NO: 1122365 - DNA, 25 bp, Homo sapien
caggttgaataacggcctccaaaga

SEQ ID NO: 1122366 - DNA, 25 bp, Homo sapien
taaatacaggccgtcactggaagcc

SEQ ID NO: 1122367 - DNA, 25 bp, Homo sapien
tgcaggtgagccctaaacttagagg

SEQ ID NO: 1122368 - DNA, 25 bp, Homo sapien
taatggctgctctaggtcctatcgg

SEQ ID NO: 1122369 - DNA, 25 bp, Homo sapien
caaactgggtgtggctaacaatgag

SEQ ID NO: 1122370 - DNA, 25 bp, Homo sapien
gtcctatcgggtaaagggatcagca

SEQ ID NO: 1122371 - DNA, 25 bp, Homo sapien
catagagactgaatgctggttacca

SEQ ID NO: 1122372 - DNA, 25 bp, Homo sapien
caattatttacaaccagggccactg

SEQ ID NO: 1122373 - DNA, 25 bp, Homo sapien
taaatggtcccagtatgcgtgtgtg

SEQ ID NO: 1122374 - DNA, 25 bp, Homo sapien
tgagtgcgccctgtgatgaaaaggc

SEQ ID NO: 1122375 - DNA, 25 bp, Homo sapien
tcaattcccaaagatgcacgttagg

SEQ ID NO: 1122376 - DNA, 25 bp, Homo sapien
gaatcatttagacaacagtggacag

SEQ ID NO: 1122377 - DNA, 25 bp, Homo sapien
tggttccaggataccccaaggatac

SEQ ID NO: 1122378 - DNA, 25 bp, Homo sapien
cacagagggccaacagtacttaatt

SEQ ID NO: 1122379 - DNA, 25 bp, Homo sapien
ggtcgatctatagatgtggaacccc

SEQ ID NO: 1122380 - DNA, 25 bp, Homo sapien
aaacctttactgtgtcagttgctag

SEQ ID NO: 1122381 - DNA, 25 bp, Homo sapien
ggataattaaatggtccctgtcctc

SEQ ID NO: 1122382 - DNA, 25 bp, Homo sapien
gaactgagggctaactacaagtaga

SEQ ID NO: 1122383 - DNA, 25 bp, Homo sapien
cagttgctaggatactgagaggata

SEQ ID NO: 1122384 - DNA, 25 bp, Homo sapien
gcacttaggaggactagcagtttct

SEQ ID NO: 1122385 - DNA, 25 bp, Homo sapien
gaaagctcaagccacatggaggaga

SEQ ID NO: 1122386 - DNA, 25 bp, Homo sapien
tctggactggccctgcaattgctct

SEQ ID NO: 1122387 - DNA, 25 bp, Homo sapien
ccaatagaatgtgatggaggagctg

SEQ ID NO: 1122388 - DNA, 25 bp, Homo sapien
tctgctggagacatactggagctgt

SEQ ID NO: 1122389 - DNA, 25 bp, Homo sapien
tttaggccctagctttgagactttc

SEQ ID NO: 1122390 - DNA, 25 bp, Homo sapien
tgtaccttcagatggcatgatctcg

SEQ ID NO: 1122391 - DNA, 25 bp, Homo sapien
taaattccgcagttaaggctgatac

SEQ ID NO: 1122392 - DNA, 25 bp, Homo sapien
gtatcattaggttgtccaggctagt

SEQ ID NO: 1122393 - DNA, 25 bp, Homo sapien
tctatgtccttcttgtaggcaaaag

SEQ ID NO: 1122394 - DNA, 25 bp, Homo sapien
aatgtctgacaacccattattttaa

SEQ ID NO: 1122395 - DNA, 25 bp, Homo sapien
tgattggagggtttcatccatttaa

SEQ ID NO: 1122396 - DNA, 25 bp, Homo sapien
gatatttcacgttgattgatctgca

SEQ ID NO: 1122397 - DNA, 25 bp, Homo sapien
catgatgcatgatctttttaatgct

SEQ ID NO: 1122398 - DNA, 25 bp, Homo sapien
gcatatagttggtcatagtggccac

SEQ ID NO: 1122399 - DNA, 25 bp, Homo sapien
gaagccatcggatcccatatttttc

SEQ ID NO: 1122400 - DNA, 25 bp, Homo sapien
ggatcaggtttcttaccactaggcg

SEQ ID NO: 1122401 - DNA, 25 bp, Homo sapien
tttgtacctttgaaagactgccttg

SEQ ID NO: 1122402 - DNA, 25 bp, Homo sapien
aaaggtgtagtgagagggaacatcc

SEQ ID NO: 1122403 - DNA, 25 bp, Homo sapien
gcctacccttttactgtattgcagg

SEQ ID NO: 1122404 - DNA, 25 bp, Homo sapien
tctctatcagggaagaagacctctc

SEQ ID NO: 1122405 - DNA, 25 bp, Homo sapien
cacaagtaggtaggagtacaggcat

SEQ ID NO: 1122406 - DNA, 25 bp, Homo sapien
tgttgtaactcataagccagcctag

SEQ ID NO: 1122407 - DNA, 25 bp, Homo sapien
gatgaaaaattatccgtggcctaca

SEQ ID NO: 1122408 - DNA, 25 bp, Homo sapien
tcatttcataggtcattatacccaa

SEQ ID NO: 1122409 - DNA, 25 bp, Homo sapien
tccaggttatagagactatagaatc

SEQ ID NO: 1122410 - DNA, 25 bp, Homo sapien
tctaactggcagtgtggatgacaca

SEQ ID NO: 1122411 - DNA, 25 bp, Homo sapien
ttatacccaaagattatccaggtta

SEQ ID NO: 1122412 - DNA, 25 bp, Homo sapien
aaaagttatttcgatgccaggtctc

SEQ ID NO: 1122413 - DNA, 25 bp, Homo sapien
caatgaagggaatcaagagtccacc

SEQ ID NO: 1122414 - DNA, 25 bp, Homo sapien
ggtacacgcttatcctctatggaag

SEQ ID NO: 1122415 - DNA, 25 bp, Homo sapien
catttaagagcgacagcaggtagca

SEQ ID NO: 1122416 - DNA, 25 bp, Homo sapien
aatcaagataactgactaccttcag

SEQ ID NO: 1122417 - DNA, 25 bp, Homo sapien
gaacaatcaagataactgactacct

SEQ ID NO: 1122418 - DNA, 25 bp, Homo sapien
acaatcaagataactgactaccttc

SEQ ID NO: 1122419 - DNA, 25 bp, Homo sapien
agagtagaacaagggttctatctgt

SEQ ID NO: 1122420 - DNA, 25 bp, Homo sapien
tgagtctaggaggtgaggtttcagt

SEQ ID NO: 1122421 - DNA, 25 bp, Homo sapien
caatttagtaatatctggcaaagaa

SEQ ID NO: 1122422 - DNA, 25 bp, Homo sapien
ttaaattgtcggcaaggccaagtgc

SEQ ID NO: 1122423 - DNA, 25 bp, Homo sapien
tcaagttcatgtcaatttagtaata

SEQ ID NO: 1122424 - DNA, 25 bp, Homo sapien
caaaatttctcctcgcccttcagtt

SEQ ID NO: 1122425 - DNA, 25 bp, Homo sapien
tttctgaacggaaaaagactgccaa

SEQ ID NO: 1122426 - DNA, 25 bp, Homo sapien
tccttgtctggacttagctcccctt

SEQ ID NO: 1122427 - DNA, 25 bp, Homo sapien
cttcaggccaaagggagagctattt

SEQ ID NO: 1122428 - DNA, 25 bp, Homo sapien
tccgcccgtaccttggccagacact

SEQ ID NO: 1122429 - DNA, 25 bp, Homo sapien
cgcgccggcgccaggagcaaattct

SEQ ID NO: 1122430 - DNA, 25 bp, Homo sapien
gccaggagcaaattctccgacctat

SEQ ID NO: 1122431 - DNA, 25 bp, Homo sapien
agcaaattctccgacctattaccct

SEQ ID NO: 1122432 - DNA, 25 bp, Homo sapien
taaattgggtgtgcagcaaggacac

SEQ ID NO: 1122433 - DNA, 25 bp, Homo sapien
ccatgcccaggtagataacatctca

SEQ ID NO: 1122434 - DNA, 25 bp, Homo sapien
tgggctccatacagattctaaatgc

SEQ ID NO: 1122435 - DNA, 25 bp, Homo sapien
aaatgccccaattgccaaacatgaa

SEQ ID NO: 1122436 - DNA, 25 bp, Homo sapien
tattaaccacttttcagacccatag

SEQ ID NO: 1122437 - DNA, 25 bp, Homo sapien
ccttaaccacagaggatacattctg

SEQ ID NO: 1122438 - DNA, 25 bp, Homo sapien
gaaatttatgctcaggtcctcagcc

SEQ ID NO: 1122439 - DNA, 25 bp, Homo sapien
tcttgctagagttgtctgagttcct

SEQ ID NO: 1122440 - DNA, 25 bp, Homo sapien
caaacacgatggttagaactgcaac

SEQ ID NO: 1122441 - DNA, 25 bp, Homo sapien
aaaaagggatctgaacactccagcg

SEQ ID NO: 1122442 - DNA, 25 bp, Homo sapien
tcctgggccttcacaaaaggattgg

SEQ ID NO: 1122443 - DNA, 25 bp, Homo sapien
ggaaagcctctaacatgaaagacag

SEQ ID NO: 1122444 - DNA, 25 bp, Homo sapien
tctgctgatgaacaagtgggttgct

SEQ ID NO: 1122445 - DNA, 25 bp, Homo sapien
gctgctatacacacgggtggacaaa

SEQ ID NO: 1122446 - DNA, 25 bp, Homo sapien
cacacgggtggacaaatatctcttt

SEQ ID NO: 1122447 - DNA, 25 bp, Homo sapien
tgtgtcagaatttcgttcaaggctg

SEQ ID NO: 1122448 - DNA, 25 bp, Homo sapien
tgctctagaccatcgcagcttccaa

SEQ ID NO: 1122449 - DNA, 25 bp, Homo sapien
ccctgctctagaccatcgcagcttc

SEQ ID NO: 1122450 - DNA, 25 bp, Homo sapien
taccctgctctagaccatcgcagct

SEQ ID NO: 1122451 - DNA, 25 bp, Homo sapien
ttctgataccctgctctagaccatc

SEQ ID NO: 1122452 - DNA, 25 bp, Homo sapien
agcaaaattaaaagccaacatttgg

SEQ ID NO: 1122453 - DNA, 25 bp, Homo sapien
acaagcaaaattaaaagccaacatt

SEQ ID NO: 1122454 - DNA, 25 bp, Homo sapien
aaaagaagccaaatgaataatgtat

SEQ ID NO: 1122455 - DNA, 25 bp, Homo sapien
tgttacagacatgaaacaaaacaag

SEQ ID NO: 1122456 - DNA, 25 bp, Homo sapien
ctgattatccaaatcaggctttctt

SEQ ID NO: 1122457 - DNA, 25 bp, Homo sapien
ggcaaaatcaaatcccaggtaccca

SEQ ID NO: 1122458 - DNA, 25 bp, Homo sapien
tgggcaaaatcaaatcccaggtacc

SEQ ID NO: 1122459 - DNA, 25 bp, Homo sapien
tatacactcagtttgaacactttga

SEQ ID NO: 1122460 - DNA, 25 bp, Homo sapien
tgctttcctctatcgaatgcagtga

SEQ ID NO: 1122461 - DNA, 25 bp, Homo sapien
tgtactacagcctaactttgtaaca

SEQ ID NO: 1122462 - DNA, 25 bp, Homo sapien
taacatttcagactgtaagagttga

SEQ ID NO: 1122463 - DNA, 25 bp, Homo sapien
tcagtggtgagctctaatttaaatc

SEQ ID NO: 1122464 - DNA, 25 bp, Homo sapien
tatatgttgctacaaggttctaccg

SEQ ID NO: 1122465 - DNA, 25 bp, Homo sapien
tctaccgtatagtaatgtgaggcaa

SEQ ID NO: 1122466 - DNA, 25 bp, Homo sapien
taaattaaagctggcatcagcacca

SEQ ID NO: 1122467 - DNA, 25 bp, Homo sapien
gcactgttcttattcctatggattt

SEQ ID NO: 1122468 - DNA, 25 bp, Homo sapien
ccagatagaacctggaataaattac

SEQ ID NO: 1122469 - DNA, 25 bp, Homo sapien
catgacaaactaaaggagtgaaggt

SEQ ID NO: 1122470 - DNA, 25 bp, Homo sapien
catcaaagaggcatcacttccctat

SEQ ID NO: 1122471 - DNA, 25 bp, Homo sapien
tcaaagcctgagatcatacatcctc

SEQ ID NO: 1122472 - DNA, 25 bp, Homo sapien
ttcaaagcctgagatcatacatcct

SEQ ID NO: 1122473 - DNA, 25 bp, Homo sapien
gattatcaaaagtaacatcttccaa

SEQ ID NO: 1122474 - DNA, 25 bp, Homo sapien
tcatgaagtcttagattatcaaaag

SEQ ID NO: 1122475 - DNA, 25 bp, Homo sapien
atcaaagtcatgaagtcttagatta

SEQ ID NO: 1122476 - DNA, 25 bp, Homo sapien
gtcttagattatcaaaagtaacatc

SEQ ID NO: 1122477 - DNA, 25 bp, Homo sapien
tctatcctctctttaacaaatttgg

SEQ ID NO: 1122478 - DNA, 25 bp, Homo sapien
tccccattgtgtatgcttgtctaag

SEQ ID NO: 1122479 - DNA, 25 bp, Homo sapien
tttccaagaagtcaattccccattg

SEQ ID NO: 1122480 - DNA, 25 bp, Homo sapien
caattgtttcgcatagttctgttca

SEQ ID NO: 1122481 - DNA, 25 bp, Homo sapien
attcttctccaggatatgggggtat

SEQ ID NO: 1122482 - DNA, 25 bp, Homo sapien
atatgggggtatgaagatgtaaaac

SEQ ID NO: 1122483 - DNA, 25 bp, Homo sapien
tctccaggatatgggggtatgaaga

SEQ ID NO: 1122484 - DNA, 25 bp, Homo sapien
gatatgggggtatgaagatgtaaaa

SEQ ID NO: 1122485 - DNA, 25 bp, Homo sapien
tccagccccctaacagtttggtaga

SEQ ID NO: 1122486 - DNA, 25 bp, Homo sapien
aacgacgtggccaattctgcatggg

SEQ ID NO: 1122487 - DNA, 25 bp, Homo sapien
cctaacagtttggtagaacgacgtg

SEQ ID NO: 1122488 - DNA, 25 bp, Homo sapien
tggtagaacgacgtggccaattctg

SEQ ID NO: 1122489 - DNA, 25 bp, Homo sapien
tttgtaacagcttgtggaaatgcat

SEQ ID NO: 1122490 - DNA, 25 bp, Homo sapien
ttttgtaacagcttgtggaaatgca

SEQ ID NO: 1122491 - DNA, 25 bp, Homo sapien
tcctcctgtagcttggagtaatttc

SEQ ID NO: 1122492 - DNA, 25 bp, Homo sapien
cctgtagcttggagtaatttcatca

SEQ ID NO: 1122493 - DNA, 25 bp, Homo sapien
tgtagcttggagtaatttcatcatc

SEQ ID NO: 1122494 - DNA, 25 bp, Homo sapien
ctcctgtagcttggagtaatttcat

SEQ ID NO: 1122495 - DNA, 25 bp, Homo sapien
catctttggatgaacgtttggggca

SEQ ID NO: 1122496 - DNA, 25 bp, Homo sapien
agctgcctgtatgcctgcccatatc

SEQ ID NO: 1122497 - DNA, 25 bp, Homo sapien
cagaacaattttgctatcagctctg

SEQ ID NO: 1122498 - DNA, 25 bp, Homo sapien
cagctgcctgtatgcctgcccatat

SEQ ID NO: 1122499 - DNA, 25 bp, Homo sapien
ctacagaacaattttgctatcagct

SEQ ID NO: 1122500 - DNA, 25 bp, Homo sapien
aatgaacttggttggattcctaggc

SEQ ID NO: 1122501 - DNA, 25 bp, Homo sapien
ctgcaggctcttttggcatactgga

SEQ ID NO: 1122502 - DNA, 25 bp, Homo sapien
tcctaggcttggtagctgaacctgt

SEQ ID NO: 1122503 - DNA, 25 bp, Homo sapien
ctggaatctcttaagttgccaactg

SEQ ID NO: 1122504 - DNA, 25 bp, Homo sapien
actctgtgcgccatttcttctgcta

SEQ ID NO: 1122505 - DNA, 25 bp, Homo sapien
tgctacaacttctcgctgtcctgca

SEQ ID NO: 1122506 - DNA, 25 bp, Homo sapien
tcagatcatgagcatatctcattaa

SEQ ID NO: 1122507 - DNA, 25 bp, Homo sapien
tcattaattcaccatacactctgtg

SEQ ID NO: 1122508 - DNA, 25 bp, Homo sapien
tgagcttttcgtccttcttgcagat

SEQ ID NO: 1122509 - DNA, 25 bp, Homo sapien
ctgtttccagcacatgtcaagatat

SEQ ID NO: 1122510 - DNA, 25 bp, Homo sapien
attgttgagcttttcgtccttcttg

SEQ ID NO: 1122511 - DNA, 25 bp, Homo sapien
gttgagcttttcgtccttcttgcag

SEQ ID NO: 1122512 - DNA, 25 bp, Homo sapien
gacacagattatagagcattttatg

SEQ ID NO: 1122513 - DNA, 25 bp, Homo sapien
ggcaactgcagtgttctacgtgaac

SEQ ID NO: 1122514 - DNA, 25 bp, Homo sapien
gggaaggtttctattagcaggccaa

SEQ ID NO: 1122515 - DNA, 25 bp, Homo sapien
aaaccacatgagcaagtgccttggg

SEQ ID NO: 1122516 - DNA, 25 bp, Homo sapien
taagcctactgctgaccttaaggag

SEQ ID NO: 1122517 - DNA, 25 bp, Homo sapien
agccttgtaactgatggacctcgca

SEQ ID NO: 1122518 - DNA, 25 bp, Homo sapien
cgtgggctactgactaactatggaa

SEQ ID NO: 1122519 - DNA, 25 bp, Homo sapien
gagcacctggtcaagatggcaaagt

SEQ ID NO: 1122520 - DNA, 25 bp, Homo sapien
gcccttagcaagtaccaggtccagg

SEQ ID NO: 1122521 - DNA, 25 bp, Homo sapien
gacatggccagggagttcgtttcct

SEQ ID NO: 1122522 - DNA, 25 bp, Homo sapien
gaaaatacgcaccttgcaacctgtg

SEQ ID NO: 1122523 - DNA, 25 bp, Homo sapien
aaatgaacctactggatgagtctcc

SEQ ID NO: 1122524 - DNA, 25 bp, Homo sapien
agttgtatgctttctccgttcttga

SEQ ID NO: 1122525 - DNA, 25 bp, Homo sapien
cctaaaaggtctgcaggagataact

SEQ ID NO: 1122526 - DNA, 25 bp, Homo sapien
cccatcaacctgtggattcatttca

SEQ ID NO: 1122527 - DNA, 25 bp, Homo sapien
cattttgctagaacacattcagcag

SEQ ID NO: 1122528 - DNA, 25 bp, Homo sapien
gcattagtatcattatccaatcttt

SEQ ID NO: 1122529 - DNA, 25 bp, Homo sapien
ttatccaatctttcataactctgtt

SEQ ID NO: 1122530 - DNA, 25 bp, Homo sapien
cttggttgcattagtatcattatcc

SEQ ID NO: 1122531 - DNA, 25 bp, Homo sapien
ctgccttggttgcattagtatcatt

SEQ ID NO: 1122532 - DNA, 25 bp, Homo sapien
gccatatgcgtacgcagattcaact

SEQ ID NO: 1122533 - DNA, 25 bp, Homo sapien
cttgtaaatctgaggaatcactaca

SEQ ID NO: 1122534 - DNA, 25 bp, Homo sapien
tttttattttcatcggccatatgcg

SEQ ID NO: 1122535 - DNA, 25 bp, Homo sapien
taaatctgaggaatcactacataaa

SEQ ID NO: 1122536 - DNA, 25 bp, Homo sapien
cactcactgagtttaatagtccttc

SEQ ID NO: 1122537 - DNA, 25 bp, Homo sapien
tgagtttaatagtccttcgttcgtc

SEQ ID NO: 1122538 - DNA, 25 bp, Homo sapien
ttgaaatgatgggaataactttgcg

SEQ ID NO: 1122539 - DNA, 25 bp, Homo sapien
ctttgcgttctgagtcagcaaatcc

SEQ ID NO: 1122540 - DNA, 25 bp, Homo sapien
gtttggatgcactgatagtcccatc

SEQ ID NO: 1122541 - DNA, 25 bp, Homo sapien
gaaatggttctatatatatgttgac

SEQ ID NO: 1122542 - DNA, 25 bp, Homo sapien
tatatgttgactgtaatcttcaaat

SEQ ID NO: 1122543 - DNA, 25 bp, Homo sapien
cagatttgaaggagtctaccaccat

SEQ ID NO: 1122544 - DNA, 25 bp, Homo sapien
tggagaatgtgagaaactgggaccc

SEQ ID NO: 1122545 - DNA, 25 bp, Homo sapien
actgggacccattaggagtactgga

SEQ ID NO: 1122546 - DNA, 25 bp, Homo sapien
taatgcacgggctcaatggagaatg

SEQ ID NO: 1122547 - DNA, 25 bp, Homo sapien
ggcttctgaaagaaggaattctggg

SEQ ID NO: 1122548 - DNA, 25 bp, Homo sapien
gaaaaaagaagtccagaaaatgaca

SEQ ID NO: 1122549 - DNA, 25 bp, Homo sapien
agaagtccagaaaatgacataatac

SEQ ID NO: 1122550 - DNA, 25 bp, Homo sapien
aagtccagaaaatgacataatacac

SEQ ID NO: 1122551 - DNA, 25 bp, Homo sapien
aaaaagaagtccagaaaatgacata

SEQ ID NO: 1122552 - DNA, 25 bp, Homo sapien
ccatggggacttttcaaaatgtcat

SEQ ID NO: 1122553 - DNA, 25 bp, Homo sapien
tcaattacctaccatccacatatag

SEQ ID NO: 1122554 - DNA, 25 bp, Homo sapien
acctaccatccacatatagaattag

SEQ ID NO: 1122555 - DNA, 25 bp, Homo sapien
aatgtcatcaattacctaccatcca

SEQ ID NO: 1122556 - DNA, 25 bp, Homo sapien
tgagttctagccttgtaactcaggc

SEQ ID NO: 1122557 - DNA, 25 bp, Homo sapien
ggcaatagaaatcccaaatatgatt

SEQ ID NO: 1122558 - DNA, 25 bp, Homo sapien
atgagttctagccttgtaactcagg

SEQ ID NO: 1122559 - DNA, 25 bp, Homo sapien
aactcaggcaatagaaatcccaaat

SEQ ID NO: 1122560 - DNA, 25 bp, Homo sapien
tccagggttcatagctctaattgcc

SEQ ID NO: 1122561 - DNA, 25 bp, Homo sapien
gctatcttacgtaaataacttatga

SEQ ID NO: 1122562 - DNA, 25 bp, Homo sapien
ttacacttacctcgcatctctatga

SEQ ID NO: 1122563 - DNA, 25 bp, Homo sapien
aatctgggaggggatttcagccttc

SEQ ID NO: 1122564 - DNA, 25 bp, Homo sapien
gcaaatatcgcacaaaacaggagtt

SEQ ID NO: 1122565 - DNA, 25 bp, Homo sapien
ttctgaagagaccaaccatagtgct

SEQ ID NO: 1122566 - DNA, 25 bp, Homo sapien
tatactgggatctgtacacacgagt

SEQ ID NO: 1122567 - DNA, 25 bp, Homo sapien
cacacggtgacccagaaaatgcaac

SEQ ID NO: 1122568 - DNA, 25 bp, Homo sapien
gagtgatcatagctctcatggctca

SEQ ID NO: 1122569 - DNA, 25 bp, Homo sapien
tgcccacaatggaatgcagttgagt

SEQ ID NO: 1122570 - DNA, 25 bp, Homo sapien
caatctggcctaaataaatcaatgg

SEQ ID NO: 1122571 - DNA, 25 bp, Homo sapien
ggatatcaatcaacccaatctggcc

SEQ ID NO: 1122572 - DNA, 25 bp, Homo sapien
aatacgatcttgctctttgggccac

SEQ ID NO: 1122573 - DNA, 25 bp, Homo sapien
gagaaaactcactcctaggatgagc

SEQ ID NO: 1122574 - DNA, 25 bp, Homo sapien
tccccagtggcctgtagattatgga

SEQ ID NO: 1122575 - DNA, 25 bp, Homo sapien
tcaccatgtgtaagaatgagtcact

SEQ ID NO: 1122576 - DNA, 25 bp, Homo sapien
aagttcatcaatgcgctgctgtagt

SEQ ID NO: 1122577 - DNA, 25 bp, Homo sapien
ttacgtctctgttctggtggcagat

SEQ ID NO: 1122578 - DNA, 25 bp, Homo sapien
tggcagatgactgaaatcttctagt

SEQ ID NO: 1122579 - DNA, 25 bp, Homo sapien
gctgtagttttttacgtctctgttc

SEQ ID NO: 1122580 - DNA, 25 bp, Homo sapien
gactcgtacgcagcttaatcttaag

SEQ ID NO: 1122581 - DNA, 25 bp, Homo sapien
catgacctgattaaagacaatttgc

SEQ ID NO: 1122582 - DNA, 25 bp, Homo sapien
tacaatcggttgtgcctcaattagc

SEQ ID NO: 1122583 - DNA, 25 bp, Homo sapien
tacagtcttgttggaggatgatctc

SEQ ID NO: 1122584 - DNA, 25 bp, Homo sapien
tctgctaatttaggctgcaaactcc

SEQ ID NO: 1122585 - DNA, 25 bp, Homo sapien
tcttatggatttccattcgtaggcg

SEQ ID NO: 1122586 - DNA, 25 bp, Homo sapien
attcgtaggcggtcaatgttattca

SEQ ID NO: 1122587 - DNA, 25 bp, Homo sapien
aactccctggatcccccatttgtgg

SEQ ID NO: 1122588 - DNA, 25 bp, Homo sapien
cacctgttttgccttcgacttcaga

SEQ ID NO: 1122589 - DNA, 25 bp, Homo sapien
ttctcgtccctgtgttacaagatga

SEQ ID NO: 1122590 - DNA, 25 bp, Homo sapien
cctgtgttacaagatgatttatgtc

SEQ ID NO: 1122591 - DNA, 25 bp, Homo sapien
ttttgccttcgacttcagagagcca

SEQ ID NO: 1122592 - DNA, 25 bp, Homo sapien
aatactcgcctagagctttggagcc

SEQ ID NO: 1122593 - DNA, 25 bp, Homo sapien
tataaccagttcacaagaagtcctg

SEQ ID NO: 1122594 - DNA, 25 bp, Homo sapien
tggagtggcccatcagagcaatcat

SEQ ID NO: 1122595 - DNA, 25 bp, Homo sapien
tctactggactcgaaacctgcagga

SEQ ID NO: 1122596 - DNA, 25 bp, Homo sapien
tggcccacggacttcctggtttgca

SEQ ID NO: 1122597 - DNA, 25 bp, Homo sapien
tagcaggcaagggatcatcatcctc

SEQ ID NO: 1122598 - DNA, 25 bp, Homo sapien
gctttgcagtgtccaatagcaggca

SEQ ID NO: 1122599 - DNA, 25 bp, Homo sapien
tcaaactcattgtggtgaccatgct

SEQ ID NO: 1122600 - DNA, 25 bp, Homo sapien
taaacaggtggcctacggactcagt

SEQ ID NO: 1122601 - DNA, 25 bp, Homo sapien
taggacatgtgcacagtaaggactc

SEQ ID NO: 1122602 - DNA, 25 bp, Homo sapien
gaagagcatgaagtggcatccgcca

SEQ ID NO: 1122603 - DNA, 25 bp, Homo sapien
tattaggatgctagtaacgtgggca

SEQ ID NO: 1122604 - DNA, 25 bp, Homo sapien
tgtctccgagctcttgtccatccgt

SEQ ID NO: 1122605 - DNA, 25 bp, Homo sapien
tatgtatgacgtgggaacgtagcct

SEQ ID NO: 1122606 - DNA, 25 bp, Homo sapien
gtcacctttgtcctcctctataatg

SEQ ID NO: 1122607 - DNA, 25 bp, Homo sapien
tctttcattgctagagtaccttcat

SEQ ID NO: 1122608 - DNA, 25 bp, Homo sapien
gtcagctaccgaaaacaccaggaaa

SEQ ID NO: 1122609 - DNA, 25 bp, Homo sapien
taaaggcggtacacatatcttcctc

SEQ ID NO: 1122610 - DNA, 25 bp, Homo sapien
ttcagcggaaataacaaaatgccct

SEQ ID NO: 1122611 - DNA, 25 bp, Homo sapien
tcacacagacttaagcgggacataa

SEQ ID NO: 1122612 - DNA, 25 bp, Homo sapien
tcaatcacgctagacatgcaacagg

SEQ ID NO: 1122613 - DNA, 25 bp, Homo sapien
tcacaaatgcgaggcaggacaccat

SEQ ID NO: 1122614 - DNA, 25 bp, Homo sapien
taaagcaggtcgcactgagctgaca

SEQ ID NO: 1122615 - DNA, 25 bp, Homo sapien
ggttcaaacaaaagcatcacgtgga

SEQ ID NO: 1122616 - DNA, 25 bp, Homo sapien
cttggcacattcaagaacaaaatca

SEQ ID NO: 1122617 - DNA, 25 bp, Homo sapien
cacatctctgattcacatagcaatg

SEQ ID NO: 1122618 - DNA, 25 bp, Homo sapien
ttatctgagacttggcacattcaag

SEQ ID NO: 1122619 - DNA, 25 bp, Homo sapien
catagcaatgaaagatcacacacta

SEQ ID NO: 1122620 - DNA, 25 bp, Homo sapien
cgttatcttcccctcgcaaatagga

SEQ ID NO: 1122621 - DNA, 25 bp, Homo sapien
tgttgttatcaaggacgttatcttc

SEQ ID NO: 1122622 - DNA, 25 bp, Homo sapien
caaggacgttatcttcccctcgcaa

SEQ ID NO: 1122623 - DNA, 25 bp, Homo sapien
gagactagagagacttttcatttgt

SEQ ID NO: 1122624 - DNA, 25 bp, Homo sapien
tgcactcgtgtatttatcacagcac

SEQ ID NO: 1122625 - DNA, 25 bp, Homo sapien
accgcgcctggtgctttcagtctat

SEQ ID NO: 1122626 - DNA, 25 bp, Homo sapien
tgaatttcaaatgcgattgctatgg

SEQ ID NO: 1122627 - DNA, 25 bp, Homo sapien
tttaacacatcttaggcagaactga

SEQ ID NO: 1122628 - DNA, 25 bp, Homo sapien
gcagcaaaggtgcacaagtcaatca

SEQ ID NO: 1122629 - DNA, 25 bp, Homo sapien
gactcaattggcctgtgtgagcagg

SEQ ID NO: 1122630 - DNA, 25 bp, Homo sapien
gaaagacaccaacaatgaggtatgt

SEQ ID NO: 1122631 - DNA, 25 bp, Homo sapien
tggcctgaagccagtgactcaattg

SEQ ID NO: 1122632 - DNA, 25 bp, Homo sapien
gatatccatattaccacaaagccag

SEQ ID NO: 1122633 - DNA, 25 bp, Homo sapien
tgttggcagcaaaacgtcgcagcag

SEQ ID NO: 1122634 - DNA, 25 bp, Homo sapien
gatccggccggtgtcagacaaaagc

SEQ ID NO: 1122635 - DNA, 25 bp, Homo sapien
catgaatggcaaagcccacagcgga

SEQ ID NO: 1122636 - DNA, 25 bp, Homo sapien
taagggtaatagcagccagctgtgg

SEQ ID NO: 1122637 - DNA, 25 bp, Homo sapien
gtagccatgaaactagaccccaagg

SEQ ID NO: 1122638 - DNA, 25 bp, Homo sapien
tctagtcagtcaggcacattgggcc

SEQ ID NO: 1122639 - DNA, 25 bp, Homo sapien
gaagctcctcgtagaaacaggcctg

SEQ ID NO: 1122640 - DNA, 25 bp, Homo sapien
cagggcagggctatgttgaaacttc

SEQ ID NO: 1122641 - DNA, 25 bp, Homo sapien
tttcagggagaacgtcagtgttacc

SEQ ID NO: 1122642 - DNA, 25 bp, Homo sapien
cattcgaaaacgacacaaggcctca

SEQ ID NO: 1122643 - DNA, 25 bp, Homo sapien
gccccatctagttgtctcattcgaa

SEQ ID NO: 1122644 - DNA, 25 bp, Homo sapien
tggatcacatgcaggacagaagagc

SEQ ID NO: 1122645 - DNA, 25 bp, Homo sapien
tgtacagattgatgacccgcagggt

SEQ ID NO: 1122646 - DNA, 25 bp, Homo sapien
catgggcggaagcacctgtgtaacc

SEQ ID NO: 1122647 - DNA, 25 bp, Homo sapien
tggattagtgaagcaggcggtcacc

SEQ ID NO: 1122648 - DNA, 25 bp, Homo sapien
tgttcaggaagtgaagggacagcca

SEQ ID NO: 1122649 - DNA, 25 bp, Homo sapien
ctcagctccttggtcagaactgagt

SEQ ID NO: 1122650 - DNA, 25 bp, Homo sapien
gacgggaacacccacaaatcacagg

SEQ ID NO: 1122651 - DNA, 25 bp, Homo sapien
cacaagggatttaggctaagcctgc

SEQ ID NO: 1122652 - DNA, 25 bp, Homo sapien
tcacaggcttccataaggtagatca

SEQ ID NO: 1122653 - DNA, 25 bp, Homo sapien
ggttaggatttagttcagctgccag

SEQ ID NO: 1122654 - DNA, 25 bp, Homo sapien
cctgtaggattcactctctggagtc

SEQ ID NO: 1122655 - DNA, 25 bp, Homo sapien
tcctgtaataccctacctcctatag

SEQ ID NO: 1122656 - DNA, 25 bp, Homo sapien
tcatcccaaattatttgagagcgtc

SEQ ID NO: 1122657 - DNA, 25 bp, Homo sapien
gagagcgtcaatcttaatatcttca

SEQ ID NO: 1122658 - DNA, 25 bp, Homo sapien
cagaagatgtctacaaatgtgagag

SEQ ID NO: 1122659 - DNA, 25 bp, Homo sapien
gaagcagttagaatgcctaggacct

SEQ ID NO: 1122660 - DNA, 25 bp, Homo sapien
tattttcccaagattggaagcagtt

SEQ ID NO: 1122661 - DNA, 25 bp, Homo sapien
tgtcaactttctaagagagcacagc

SEQ ID NO: 1122662 - DNA, 25 bp, Homo sapien
cattgttgtgccttcgcatgcttta

SEQ ID NO: 1122663 - DNA, 25 bp, Homo sapien
gttgtgccttcgcatgctttagccc

SEQ ID NO: 1122664 - DNA, 25 bp, Homo sapien
gtgccttcgcatgctttagccctct

SEQ ID NO: 1122665 - DNA, 25 bp, Homo sapien
ttagccctctcctcctagccagaac

SEQ ID NO: 1122666 - DNA, 25 bp, Homo sapien
tctggagtgtgatggtctaaaccct

SEQ ID NO: 1122667 - DNA, 25 bp, Homo sapien
gggattccactcatactagcctagg

SEQ ID NO: 1122668 - DNA, 25 bp, Homo sapien
aaaagactctgacctgtgcctccag

SEQ ID NO: 1122669 - DNA, 25 bp, Homo sapien
tcacaagaggagtttgccggctgat

SEQ ID NO: 1122670 - DNA, 25 bp, Homo sapien
ggcaggacatgagggatgttttgtt

SEQ ID NO: 1122671 - DNA, 25 bp, Homo sapien
gcaggacatgagggatgttttgttc

SEQ ID NO: 1122672 - DNA, 25 bp, Homo sapien
ctgtctgctggaccacaagacaaag

SEQ ID NO: 1122673 - DNA, 25 bp, Homo sapien
tgccaggccgtgtacctctacagat

SEQ ID NO: 1122674 - DNA, 25 bp, Homo sapien
tacctctacagatgtgtcactgtct

SEQ ID NO: 1122675 - DNA, 25 bp, Homo sapien
tgttccccagttcccatcctggact

SEQ ID NO: 1122676 - DNA, 25 bp, Homo sapien
ccacattgtgtcaagcgagcatcca

SEQ ID NO: 1122677 - DNA, 25 bp, Homo sapien
tagaactaaattatcgagggccaga

SEQ ID NO: 1122678 - DNA, 25 bp, Homo sapien
tgagtgctactcaaaatcccaggaa

SEQ ID NO: 1122679 - DNA, 25 bp, Homo sapien
catccatgtgccaggtatagtgcca

SEQ ID NO: 1122680 - DNA, 25 bp, Homo sapien
ttgagaaccctgatagcattccggg

SEQ ID NO: 1122681 - DNA, 25 bp, Homo sapien
taacatcgaagatccagaactccag

SEQ ID NO: 1122682 - DNA, 25 bp, Homo sapien
gactgttgtggacttctccctcaag

SEQ ID NO: 1122683 - DNA, 25 bp, Homo sapien
cccaacctgtggagttgtttgatac

SEQ ID NO: 1122684 - DNA, 25 bp, Homo sapien
gcttagaaattagaccaatggccgg

SEQ ID NO: 1122685 - DNA, 25 bp, Homo sapien
ttgggccacctggtacagttcacag

SEQ ID NO: 1122686 - DNA, 25 bp, Homo sapien
cagtgatgatgcaggtctcaggtca

SEQ ID NO: 1122687 - DNA, 25 bp, Homo sapien
cagggattcccagagttcagtggat

SEQ ID NO: 1122688 - DNA, 25 bp, Homo sapien
ttagatgaaaacacccaagggctcg

SEQ ID NO: 1122689 - DNA, 25 bp, Homo sapien
tgacagctgtgtacaagtggcacct

SEQ ID NO: 1122690 - DNA, 25 bp, Homo sapien
ttttctagcctagcatcccagtggg

SEQ ID NO: 1122691 - DNA, 25 bp, Homo sapien
tgcaaggctttaggatcgccacaag

SEQ ID NO: 1122692 - DNA, 25 bp, Homo sapien
tgaagtgtgcatggattaggaagct

SEQ ID NO: 1122693 - DNA, 25 bp, Homo sapien
tgtgcatggattaggaagctctctg

SEQ ID NO: 1122694 - DNA, 25 bp, Homo sapien
ctgagctttaatgagagaatttgaa

SEQ ID NO: 1122695 - DNA, 25 bp, Homo sapien
catggattaggaagctctctgcaaa

SEQ ID NO: 1122696 - DNA, 25 bp, Homo sapien
cactgaccccagataagatagatgt

SEQ ID NO: 1122697 - DNA, 25 bp, Homo sapien
tctttgtcagaagggaccagaaacc

SEQ ID NO: 1122698 - DNA, 25 bp, Homo sapien
gctgcctcagatctagccagagagg

SEQ ID NO: 1122699 - DNA, 25 bp, Homo sapien
cacggcaggcatgcagtaagtcctt

SEQ ID NO: 1122700 - DNA, 25 bp, Homo sapien
aaagcactactattactgagtgtaa

SEQ ID NO: 1122701 - DNA, 25 bp, Homo sapien
ctactattactgagtgtaatcttgc

SEQ ID NO: 1122702 - DNA, 25 bp, Homo sapien
gctgctgaactcagcgattaatatt

SEQ ID NO: 1122703 - DNA, 25 bp, Homo sapien
actgagtgtaatcttgctgctgaac

SEQ ID NO: 1122704 - DNA, 25 bp, Homo sapien
taactctggttgaaggaaacgatcg

SEQ ID NO: 1122705 - DNA, 25 bp, Homo sapien
cattgcatccttagttcagctcagc

SEQ ID NO: 1122706 - DNA, 25 bp, Homo sapien
catagggacggcatttcagcctggg

SEQ ID NO: 1122707 - DNA, 25 bp, Homo sapien
cagtcaccggttgtggtacctcgga

SEQ ID NO: 1122708 - DNA, 25 bp, Homo sapien
gggttcacagtagacagccgttaca

SEQ ID NO: 1122709 - DNA, 25 bp, Homo sapien
gtcatgactttaatatcccgaaggg

SEQ ID NO: 1122710 - DNA, 25 bp, Homo sapien
gatgtgctggccctcatagagttgg

SEQ ID NO: 1122711 - DNA, 25 bp, Homo sapien
caaatacaagatgttccagccatgt

SEQ ID NO: 1122712 - DNA, 25 bp, Homo sapien
ggctgctgccaacaggaagcatgtg

SEQ ID NO: 1122713 - DNA, 25 bp, Homo sapien
gaagcatgtgtctgctgaatatggc

SEQ ID NO: 1122714 - DNA, 25 bp, Homo sapien
gctgccaacaggaagcatgtgtctg

SEQ ID NO: 1122715 - DNA, 25 bp, Homo sapien
ctgaatatggctggcaggcagctcc

SEQ ID NO: 1122716 - DNA, 25 bp, Homo sapien
gatcacgattactggtgttcacccc

SEQ ID NO: 1122717 - DNA, 25 bp, Homo sapien
tggtgttcacccctgaccgatgtcc

SEQ ID NO: 1122718 - DNA, 25 bp, Homo sapien
gatgttttgagctgttctgatcacg

SEQ ID NO: 1122719 - DNA, 25 bp, Homo sapien
tagttgccacaagatgttttgagct

SEQ ID NO: 1122720 - DNA, 25 bp, Homo sapien
gatatacactgcaaggcgtacccaa

SEQ ID NO: 1122721 - DNA, 25 bp, Homo sapien
caatgaggtccttccatgcacagaa

SEQ ID NO: 1122722 - DNA, 25 bp, Homo sapien
catgtgacaaaagcggtcccttagc

SEQ ID NO: 1122723 - DNA, 25 bp, Homo sapien
ttatcacaagtgacccaaccgggag

SEQ ID NO: 1122724 - DNA, 25 bp, Homo sapien
ttagcccagatggatgaacaggtgt

SEQ ID NO: 1122725 - DNA, 25 bp, Homo sapien
tctgctgccctggtcggttctggca

SEQ ID NO: 1122726 - DNA, 25 bp, Homo sapien
ggcagcatgggtacttgaaccctga

SEQ ID NO: 1122727 - DNA, 25 bp, Homo sapien
ggataactcctcaggccagacactg

SEQ ID NO: 1122728 - DNA, 25 bp, Homo sapien
taatgggccgattggctggctctgc

SEQ ID NO: 1122729 - DNA, 25 bp, Homo sapien
ggcacgctgtacattccatgagatt

SEQ ID NO: 1122730 - DNA, 25 bp, Homo sapien
gaaccaaataatgggccgattggct

SEQ ID NO: 1122731 - DNA, 25 bp, Homo sapien
caagttatatgaaccaaataatggg

SEQ ID NO: 1122732 - DNA, 25 bp, Homo sapien
tcagtggaggaccgaaggctccctg

SEQ ID NO: 1122733 - DNA, 25 bp, Homo sapien
cttcagtggaggaccgaaggctccc

SEQ ID NO: 1122734 - DNA, 25 bp, Homo sapien
cagtggaggaccgaaggctccctga

SEQ ID NO: 1122735 - DNA, 25 bp, Homo sapien
ttcagtggaggaccgaaggctccct

SEQ ID NO: 1122736 - DNA, 25 bp, Homo sapien
tgtgatgccgcttctcttggcttcc

SEQ ID NO: 1122737 - DNA, 25 bp, Homo sapien
gggaacccggtgtggatgcttccac

SEQ ID NO: 1122738 - DNA, 25 bp, Homo sapien
tgccagagagcaccgctggtttgtc

SEQ ID NO: 1122739 - DNA, 25 bp, Homo sapien
tgtgtgtggccgcatgggctaacat

SEQ ID NO: 1122740 - DNA, 25 bp, Homo sapien
aggagttgaattgccattcttttca

SEQ ID NO: 1122741 - DNA, 25 bp, Homo sapien
atgatgctgttttaacatgattagg

SEQ ID NO: 1122742 - DNA, 25 bp, Homo sapien
gaaaaaggagttgaattgccattct

SEQ ID NO: 1122743 - DNA, 25 bp, Homo sapien
ttaaatgatgctgttttaacatgat

SEQ ID NO: 1122744 - DNA, 25 bp, Homo sapien
ctattcaatttgactgactgctgcc

SEQ ID NO: 1122745 - DNA, 25 bp, Homo sapien
tggctgctttttcaaggtttaggta

SEQ ID NO: 1122746 - DNA, 25 bp, Homo sapien
tttaggtaggtggccacgttgagga

SEQ ID NO: 1122747 - DNA, 25 bp, Homo sapien
aggtggccacgttgaggatgggtgt

SEQ ID NO: 1122748 - DNA, 25 bp, Homo sapien
ctaaagggtgatggctgctttttca

SEQ ID NO: 1122749 - DNA, 25 bp, Homo sapien
tgaccctggtacaccctactgggaa

SEQ ID NO: 1122750 - DNA, 25 bp, Homo sapien
ggaatctgcgttgagcaggtcccat

SEQ ID NO: 1122751 - DNA, 25 bp, Homo sapien
ctctgactttcacacttgaccctgg

SEQ ID NO: 1122752 - DNA, 25 bp, Homo sapien
ctactgggaatctgcgttgagcagg

SEQ ID NO: 1122753 - DNA, 25 bp, Homo sapien
ggtcagaggtgagctcagcccctgc

SEQ ID NO: 1122754 - DNA, 25 bp, Homo sapien
gggtcagaggtgagctcagcccctg

SEQ ID NO: 1122755 - DNA, 25 bp, Homo sapien
tgcgaatggtttagtgcattccgag

SEQ ID NO: 1122756 - DNA, 25 bp, Homo sapien
cattccgaggaatggtgaatgtccc

SEQ ID NO: 1122757 - DNA, 25 bp, Homo sapien
tcggtgtttgaacgcagctgttgcg

SEQ ID NO: 1122758 - DNA, 25 bp, Homo sapien
tgaatgtcccggtccctggtggcct

SEQ ID NO: 1122759 - DNA, 25 bp, Homo sapien
tagtccatgggttgaattgatgttt

SEQ ID NO: 1122760 - DNA, 25 bp, Homo sapien
aagtaatagtccatgggttgaattg

SEQ ID NO: 1122761 - DNA, 25 bp, Homo sapien
aatagtccatgggttgaattgatgt

SEQ ID NO: 1122762 - DNA, 25 bp, Homo sapien
gtaatagtccatgggttgaattgat

SEQ ID NO: 1122763 - DNA, 25 bp, Homo sapien
gtcttaggccaaaaccatagtttgc

SEQ ID NO: 1122764 - DNA, 25 bp, Homo sapien
tttcctctgtgtgttggccttaaaa

SEQ ID NO: 1122765 - DNA, 25 bp, Homo sapien
gggctacttgctgcacacagcctga

SEQ ID NO: 1122766 - DNA, 25 bp, Homo sapien
actctgctcagggtaaatgcttcta

SEQ ID NO: 1122767 - DNA, 25 bp, Homo sapien
taatcaggtgtagacactcgtcgag

SEQ ID NO: 1122768 - DNA, 25 bp, Homo sapien
cgctttaaaacggtgtaatcaggtg

SEQ ID NO: 1122769 - DNA, 25 bp, Homo sapien
tgagcggactccgaagcatctggca

SEQ ID NO: 1122770 - DNA, 25 bp, Homo sapien
ggttaactcgcttgaagcaaggtgc

SEQ ID NO: 1122771 - DNA, 25 bp, Homo sapien
tgaatagttggttgtgttgctccct

SEQ ID NO: 1122772 - DNA, 25 bp, Homo sapien
ggttccgatagatcgtacagcccaa

SEQ ID NO: 1122773 - DNA, 25 bp, Homo sapien
ggagcctgccctgtaactgttgaca

SEQ ID NO: 1122774 - DNA, 25 bp, Homo sapien
tgcaaagaaagcgaaggagcctgcc

SEQ ID NO: 1122775 - DNA, 25 bp, Homo sapien
cccagagcgctctggtggaagccca

SEQ ID NO: 1122776 - DNA, 25 bp, Homo sapien
gggtcgggcagatgcgagggcccag

SEQ ID NO: 1122777 - DNA, 25 bp, Homo sapien
cccaaggctccgaggaggcgagttt

SEQ ID NO: 1122778 - DNA, 25 bp, Homo sapien
cctcttcgcagaagccggccggggt

SEQ ID NO: 1122779 - DNA, 25 bp, Homo sapien
ttggcggccaggcatcttgctcggt

SEQ ID NO: 1122780 - DNA, 25 bp, Homo sapien
agcggcatcttcccgggcgctggcc

SEQ ID NO: 1122781 - DNA, 25 bp, Homo sapien
catcttgctcggtggcactcgagcg

SEQ ID NO: 1122782 - DNA, 25 bp, Homo sapien
cggccaggcatcttgctcggtggca

SEQ ID NO: 1122783 - DNA, 25 bp, Homo sapien
cccgccagcggatttggcgttgggg

SEQ ID NO: 1122784 - DNA, 25 bp, Homo sapien
agacgtggcccacggcggggagcgc

SEQ ID NO: 1122785 - DNA, 25 bp, Homo sapien
caggccctccgagcgcgctgggact

SEQ ID NO: 1122786 - DNA, 25 bp, Homo sapien
agcgcgctgggactccccgagacgt

SEQ ID NO: 1122787 - DNA, 25 bp, Homo sapien
aaggagtggattcgacgaggctgtc

SEQ ID NO: 1122788 - DNA, 25 bp, Homo sapien
ctgcagacgagcaaagcagatctgt

SEQ ID NO: 1122789 - DNA, 25 bp, Homo sapien
cgagcaaagcagatctgttgggtaa

SEQ ID NO: 1122790 - DNA, 25 bp, Homo sapien
gatctgttgggtaattaaataacgc

SEQ ID NO: 1122791 - DNA, 25 bp, Homo sapien
ccttcacattgaaagccagccaggt

SEQ ID NO: 1122792 - DNA, 25 bp, Homo sapien
caaagcccttcacattgaaagccag

SEQ ID NO: 1122793 - DNA, 25 bp, Homo sapien
gcccttcacattgaaagccagccag

SEQ ID NO: 1122794 - DNA, 25 bp, Homo sapien
ttcacattgaaagccagccaggtgt

SEQ ID NO: 1122795 - DNA, 25 bp, Homo sapien
tcaatacgtccatacgagtgcaatt

SEQ ID NO: 1122796 - DNA, 25 bp, Homo sapien
catacgagtgcaattgatttgcctg

SEQ ID NO: 1122797 - DNA, 25 bp, Homo sapien
tacgtccatacgagtgcaattgatt

SEQ ID NO: 1122798 - DNA, 25 bp, Homo sapien
cgtccatacgagtgcaattgatttg

SEQ ID NO: 1122799 - DNA, 25 bp, Homo sapien
aactgagccctttccggtcataact

SEQ ID NO: 1122800 - DNA, 25 bp, Homo sapien
ccccagggtagcctgaagcatctaa

SEQ ID NO: 1122801 - DNA, 25 bp, Homo sapien
ggccatcgccactaggttttacata

SEQ ID NO: 1122802 - DNA, 25 bp, Homo sapien
agaaggcagtcaggtggccatcgcc

SEQ ID NO: 1122803 - DNA, 25 bp, Homo sapien
agcacccaataatgtcaggcagcca

SEQ ID NO: 1122804 - DNA, 25 bp, Homo sapien
tgcactttgggggacgctatgtgtt

SEQ ID NO: 1122805 - DNA, 25 bp, Homo sapien
ctttgggggacgctatgtgttcatc

SEQ ID NO: 1122806 - DNA, 25 bp, Homo sapien
cgctatgtgttcatcatcaatatat

SEQ ID NO: 1122807 - DNA, 25 bp, Homo sapien
gggacgctatgtgttcatcatcaat

SEQ ID NO: 1122808 - DNA, 25 bp, Homo sapien
gagcgtccctggagctactttcgag

SEQ ID NO: 1122809 - DNA, 25 bp, Homo sapien
acagcagtccgtgtttacagaggca

SEQ ID NO: 1122810 - DNA, 25 bp, Homo sapien
cacagagtgccaagagtaggtgctc

SEQ ID NO: 1122811 - DNA, 25 bp, Homo sapien
taggagcacaagaggtgagcgtccc

SEQ ID NO: 1122812 - DNA, 25 bp, Homo sapien
cctagatttgtgatggggtgggcct

SEQ ID NO: 1122813 - DNA, 25 bp, Homo sapien
taagtggaaagtaacacaggaacac

SEQ ID NO: 1122814 - DNA, 25 bp, Homo sapien
cacaggaacacgcttgagaagtgcc

SEQ ID NO: 1122815 - DNA, 25 bp, Homo sapien
acacgcttgagaagtgccaacccag

SEQ ID NO: 1122816 - DNA, 25 bp, Homo sapien
ctggtaagtggaaagtaacacagga

SEQ ID NO: 1122817 - DNA, 25 bp, Homo sapien
gatgtgaatggtctgaagccaagtt

SEQ ID NO: 1122818 - DNA, 25 bp, Homo sapien
gcagagctcgaggtgcgctgtacct

SEQ ID NO: 1122819 - DNA, 25 bp, Homo sapien
tgccagaatatctggaccacctgtt

SEQ ID NO: 1122820 - DNA, 25 bp, Homo sapien
tctggtagctttgccaatagccagg

SEQ ID NO: 1122821 - DNA, 25 bp, Homo sapien
aggaggcacgattcccttgtgttgt

SEQ ID NO: 1122822 - DNA, 25 bp, Homo sapien
aaaagcaggaggcacgattcccttg

SEQ ID NO: 1122823 - DNA, 25 bp, Homo sapien
gcaggaggcacgattcccttgtgtt

SEQ ID NO: 1122824 - DNA, 25 bp, Homo sapien
aagcaggaggcacgattcccttgtg

SEQ ID NO: 1122825 - DNA, 25 bp, Homo sapien
tcactgaggccggtatatgatcacc

SEQ ID NO: 1122826 - DNA, 25 bp, Homo sapien
taagaaaaccccatgtgtcggagcc

SEQ ID NO: 1122827 - DNA, 25 bp, Homo sapien
tctacagtttactggccgaccaggg

SEQ ID NO: 1122828 - DNA, 25 bp, Homo sapien
actaaactgtgggtcttggcaatca

SEQ ID NO: 1122829 - DNA, 25 bp, Homo sapien
catcggggatgctcaggtacagtgc

SEQ ID NO: 1122830 - DNA, 25 bp, Homo sapien
cctataggtggaagctatagttagc

SEQ ID NO: 1122831 - DNA, 25 bp, Homo sapien
gggcagaatctctgtttaacctata

SEQ ID NO: 1122832 - DNA, 25 bp, Homo sapien
gttagcattctatgagcccatcggg

SEQ ID NO: 1122833 - DNA, 25 bp, Homo sapien
tcctgtggaattccgctgaaagaca

SEQ ID NO: 1122834 - DNA, 25 bp, Homo sapien
tattcagagtcgttgccggagtgct

SEQ ID NO: 1122835 - DNA, 25 bp, Homo sapien
tgaaagacagctcccgactgtgtcc

SEQ ID NO: 1122836 - DNA, 25 bp, Homo sapien
gccggccttgcagggagtattcaga

SEQ ID NO: 1122837 - DNA, 25 bp, Homo sapien
tggtgaggtccgctgagggtgccca

SEQ ID NO: 1122838 - DNA, 25 bp, Homo sapien
gtccgctgagggtgcccacatgcct

SEQ ID NO: 1122839 - DNA, 25 bp, Homo sapien
ggacggcagacgcctgtgggcagag

SEQ ID NO: 1122840 - DNA, 25 bp, Homo sapien
cctgccctgcgctaggtcctgaggg

SEQ ID NO: 1122841 - DNA, 25 bp, Homo sapien
ggtctgggaaccaggctcaacttgc

SEQ ID NO: 1122842 - DNA, 25 bp, Homo sapien
tctgacatgcgtgggcagctgccat

SEQ ID NO: 1122843 - DNA, 25 bp, Homo sapien
caggctctctttgctggtccctggg

SEQ ID NO: 1122844 - DNA, 25 bp, Homo sapien
cctctgacatgcgtgggcagctgcc

SEQ ID NO: 1122845 - DNA, 25 bp, Homo sapien
catgagttttcctaaggggattgca

SEQ ID NO: 1122846 - DNA, 25 bp, Homo sapien
gctcttctgcctagcacaggccgcg

SEQ ID NO: 1122847 - DNA, 25 bp, Homo sapien
acaggccgcggtggccagccttgga

SEQ ID NO: 1122848 - DNA, 25 bp, Homo sapien
ttctgcctagcacaggccgcggtgg

SEQ ID NO: 1122849 - DNA, 25 bp, Homo sapien
gtgagctcttctgcctagcacaggc

SEQ ID NO: 1122850 - DNA, 25 bp, Homo sapien
gcagtccctctggaaacctaaggag

SEQ ID NO: 1122851 - DNA, 25 bp, Homo sapien
cacacaggtagtatatatgataagc

SEQ ID NO: 1122852 - DNA, 25 bp, Homo sapien
ggagtgtaccacgacacctgctaat

SEQ ID NO: 1122853 - DNA, 25 bp, Homo sapien
aaaatccctaatacacacacagctg

SEQ ID NO: 1122854 - DNA, 25 bp, Homo sapien
ctacaggagctgcttcatctgaccc

SEQ ID NO: 1122855 - DNA, 25 bp, Homo sapien
tacaggagctgcttcatctgaccca

SEQ ID NO: 1122856 - DNA, 25 bp, Homo sapien
ggagctgcttcatctgacccaagct

SEQ ID NO: 1122857 - DNA, 25 bp, Homo sapien
caggagctgcttcatctgacccaag

SEQ ID NO: 1122858 - DNA, 25 bp, Homo sapien
ccactggcagaacccaagtgactct

SEQ ID NO: 1122859 - DNA, 25 bp, Homo sapien
tcccctgaagctactgtaattgcct

SEQ ID NO: 1122860 - DNA, 25 bp, Homo sapien
ctgaagctactgtaattgcctcaca

SEQ ID NO: 1122861 - DNA, 25 bp, Homo sapien
agctactgtaattgcctcacaccca

SEQ ID NO: 1122862 - DNA, 25 bp, Homo sapien
tccaggaaggcctgctgttatcaga

SEQ ID NO: 1122863 - DNA, 25 bp, Homo sapien
gtcatgagcacgctgctctgctgcc

SEQ ID NO: 1122864 - DNA, 25 bp, Homo sapien
gatgtgcctgagcagtcatgagcac

SEQ ID NO: 1122865 - DNA, 25 bp, Homo sapien
caggaaggcctgctgttatcagatg

SEQ ID NO: 1122866 - DNA, 25 bp, Homo sapien
gtctctctttcccttgagtgtgctt

SEQ ID NO: 1122867 - DNA, 25 bp, Homo sapien
gaagaagagatgcagctgtaaatca

SEQ ID NO: 1122868 - DNA, 25 bp, Homo sapien
gaagagatgcagctgtaaatcagtg

SEQ ID NO: 1122869 - DNA, 25 bp, Homo sapien
tgtgctttgaacagaccgcaggctg

SEQ ID NO: 1122870 - DNA, 25 bp, Homo sapien
aacaccctgcagctcgcaaacctct

SEQ ID NO: 1122871 - DNA, 25 bp, Homo sapien
gtggcatcttgcactctcactcctg

SEQ ID NO: 1122872 - DNA, 25 bp, Homo sapien
tcctgcaaactgttctgggcccttc

SEQ ID NO: 1122873 - DNA, 25 bp, Homo sapien
tcctggtggcatcttgcactctcac

SEQ ID NO: 1122874 - DNA, 25 bp, Homo sapien
ccggagcatcgacccaacttcgggt

SEQ ID NO: 1122875 - DNA, 25 bp, Homo sapien
aaggcgagtggccatgtaaggcacc

SEQ ID NO: 1122876 - DNA, 25 bp, Homo sapien
gtggaggaggcagtcgcagcaccgg

SEQ ID NO: 1122877 - DNA, 25 bp, Homo sapien
tccatcaggcgctgtggtctgggaa

SEQ ID NO: 1122878 - DNA, 25 bp, Homo sapien
tcagctctgccgggacctctgtgca

SEQ ID NO: 1122879 - DNA, 25 bp, Homo sapien
agctctgccgggacctctgtgcatt

SEQ ID NO: 1122880 - DNA, 25 bp, Homo sapien
gcggtcagctctgccgggacctctg

SEQ ID NO: 1122881 - DNA, 25 bp, Homo sapien
ctgcggtcagctctgccgggacctc

SEQ ID NO: 1122882 - DNA, 25 bp, Homo sapien
aggcatgggccatgatgcctggcta

SEQ ID NO: 1122883 - DNA, 25 bp, Homo sapien
gcatgggccatgatgcctggctaat

SEQ ID NO: 1122884 - DNA, 25 bp, Homo sapien
ggcatgggccatgatgcctggctaa

SEQ ID NO: 1122885 - DNA, 25 bp, Homo sapien
caggcatgggccatgatgcctggct

SEQ ID NO: 1122886 - DNA, 25 bp, Homo sapien
ttggtgtcaccatgagcagcttcct

SEQ ID NO: 1122887 - DNA, 25 bp, Homo sapien
gacttgacttttctccccagatgaa

SEQ ID NO: 1122888 - DNA, 25 bp, Homo sapien
ctagccattgttgtcggcatttggt

SEQ ID NO: 1122889 - DNA, 25 bp, Homo sapien
gatacctgccggagttgacttgact

SEQ ID NO: 1122890 - DNA, 25 bp, Homo sapien
ctgtgggaatctagatgcatcaggg

SEQ ID NO: 1122891 - DNA, 25 bp, Homo sapien
tctgctccgctgagcgactgatcct

SEQ ID NO: 1122892 - DNA, 25 bp, Homo sapien
gggaatctagatgcatcagggtttt

SEQ ID NO: 1122893 - DNA, 25 bp, Homo sapien
gctgagcgactgatcctgtgggaat

SEQ ID NO: 1122894 - DNA, 25 bp, Homo sapien
agacccagacaactctccattctcc

SEQ ID NO: 1122895 - DNA, 25 bp, Homo sapien
cagacccagacaactctccattctc

SEQ ID NO: 1122896 - DNA, 25 bp, Homo sapien
actgtttggagatgccagacccaga

SEQ ID NO: 1122897 - DNA, 25 bp, Homo sapien
aagagacgtcttcactctgataccc

SEQ ID NO: 1122898 - DNA, 25 bp, Homo sapien
gctcttcaaaagagacgtcttcact

SEQ ID NO: 1122899 - DNA, 25 bp, Homo sapien
taagtcttctggttagcaaatagct

SEQ ID NO: 1122900 - DNA, 25 bp, Homo sapien
ctaagtcttctggttagcaaatagc

SEQ ID NO: 1122901 - DNA, 25 bp, Homo sapien
tcatttgctgaagggtgaactcatc

SEQ ID NO: 1122902 - DNA, 25 bp, Homo sapien
gggtgaactcatcggtcttcaaagc

SEQ ID NO: 1122903 - DNA, 25 bp, Homo sapien
aaagcacctaactccttggaggtgg

SEQ ID NO: 1122904 - DNA, 25 bp, Homo sapien
caagctggcagcatcacttctttcc

SEQ ID NO: 1122905 - DNA, 25 bp, Homo sapien
ctggaaacaactgagccatgggccc

SEQ ID NO: 1122906 - DNA, 25 bp, Homo sapien
ttctgaataatcacaagggcctgtg

SEQ ID NO: 1122907 - DNA, 25 bp, Homo sapien
aatcacaagggcctgtgacaaagca

SEQ ID NO: 1122908 - DNA, 25 bp, Homo sapien
aacaactgagccatgggcccctctg

SEQ ID NO: 1122909 - DNA, 25 bp, Homo sapien
gaccagaggccgcagctttatactc

SEQ ID NO: 1122910 - DNA, 25 bp, Homo sapien
tgcagaccagaggccgcagctttat

SEQ ID NO: 1122911 - DNA, 25 bp, Homo sapien
gaggccgcagctttatactcctctt

SEQ ID NO: 1122912 - DNA, 25 bp, Homo sapien
gccgcagctttatactcctctttct

SEQ ID NO: 1122913 - DNA, 25 bp, Homo sapien
tcccctggccctgtatcctgatgga

SEQ ID NO: 1122914 - DNA, 25 bp, Homo sapien
agccagttcttcttcacactgggtc

SEQ ID NO: 1122915 - DNA, 25 bp, Homo sapien
gcttccagctgacacttgttctttt

SEQ ID NO: 1122916 - DNA, 25 bp, Homo sapien
ctggccctgtatcctgatggatcag

SEQ ID NO: 1122917 - DNA, 25 bp, Homo sapien
agccccacttcctgcgatatctcta

SEQ ID NO: 1122918 - DNA, 25 bp, Homo sapien
ttatctccacgaaatgagaggcctc

SEQ ID NO: 1122919 - DNA, 25 bp, Homo sapien
ttcctgcgatatctctacttcccca

SEQ ID NO: 1122920 - DNA, 25 bp, Homo sapien
ctcccaggcagcgccctgtttgttt

SEQ ID NO: 1122921 - DNA, 25 bp, Homo sapien
gaccagaagagggattttatggctt

SEQ ID NO: 1122922 - DNA, 25 bp, Homo sapien
acagaatcagtgcttgctggggacc

SEQ ID NO: 1122923 - DNA, 25 bp, Homo sapien
ccagaagagggattttatggcttga

SEQ ID NO: 1122924 - DNA, 25 bp, Homo sapien
gaagagggattttatggcttgaggg

SEQ ID NO: 1122925 - DNA, 25 bp, Homo sapien
acaaagggcgacactcagatctcag

SEQ ID NO: 1122926 - DNA, 25 bp, Homo sapien
agccagcgctcaaaggcccttgggg

SEQ ID NO: 1122927 - DNA, 25 bp, Homo sapien
agacgctccaggaccttttccagcc

SEQ ID NO: 1122928 - DNA, 25 bp, Homo sapien
gctccaggaccttttccagccagcg

SEQ ID NO: 1122929 - DNA, 25 bp, Homo sapien
tgatgcctggttcacttcattgttc

SEQ ID NO: 1122930 - DNA, 25 bp, Homo sapien
ctattccaaatctgcccttgatgcc

SEQ ID NO: 1122931 - DNA, 25 bp, Homo sapien
tattccaaatctgcccttgatgcct

SEQ ID NO: 1122932 - DNA, 25 bp, Homo sapien
gcccttgatgcctggttcacttcat

SEQ ID NO: 1122933 - DNA, 25 bp, Homo sapien
acagcagagggcacaaatagtatct

SEQ ID NO: 1122934 - DNA, 25 bp, Homo sapien
cacagcagagggcacaaatagtatc

SEQ ID NO: 1122935 - DNA, 25 bp, Homo sapien
cctgctgtgtgggactttatacaag

SEQ ID NO: 1122936 - DNA, 25 bp, Homo sapien
tgtgggactttatacaagacatctc

SEQ ID NO: 1122937 - DNA, 25 bp, Homo sapien
gggactttatacaagacatctcttg

SEQ ID NO: 1122938 - DNA, 25 bp, Homo sapien
ttatacaagacatctcttgccagat

SEQ ID NO: 1122939 - DNA, 25 bp, Homo sapien
cgcgcgcgtgctgggcaggtagagg

SEQ ID NO: 1122940 - DNA, 25 bp, Homo sapien
agccgcgcgcgtgctgggcaggtag

SEQ ID NO: 1122941 - DNA, 25 bp, Homo sapien
ggcaggtagaggctggagcggtcag

SEQ ID NO: 1122942 - DNA, 25 bp, Homo sapien
gtagaggctggagcggtcaggagca

SEQ ID NO: 1122943 - DNA, 25 bp, Homo sapien
gacctgtccgcatcacactgtgact

SEQ ID NO: 1122944 - DNA, 25 bp, Homo sapien
tcctggacctgtccgcatcacactg

SEQ ID NO: 1122945 - DNA, 25 bp, Homo sapien
tggacctgtccgcatcacactgtga

SEQ ID NO: 1122946 - DNA, 25 bp, Homo sapien
ctggacctgtccgcatcacactgtg

SEQ ID NO: 1122947 - DNA, 25 bp, Homo sapien
taaaactcagcatcggcgcttctcc

SEQ ID NO: 1122948 - DNA, 25 bp, Homo sapien
gcttccctcgagaaatgatacctga

SEQ ID NO: 1122949 - DNA, 25 bp, Homo sapien
gggaggtgctaccttcagaaaggct

SEQ ID NO: 1122950 - DNA, 25 bp, Homo sapien
tgatgttggccaagatatcagaacc

SEQ ID NO: 1122951 - DNA, 25 bp, Homo sapien
caaattgtaaatgaagcactggggt

SEQ ID NO: 1122952 - DNA, 25 bp, Homo sapien
ccaagggcaacaggaaccggagtca

SEQ ID NO: 1122953 - DNA, 25 bp, Homo sapien
aaccggagtcacctaggattagctg

SEQ ID NO: 1122954 - DNA, 25 bp, Homo sapien
gtcacctaggattagctggtcccaa

SEQ ID NO: 1122955 - DNA, 25 bp, Homo sapien
gttgagcaaagtatcaggggagcta

SEQ ID NO: 1122956 - DNA, 25 bp, Homo sapien
aaatgagcagccttccatgaaaaag

SEQ ID NO: 1122957 - DNA, 25 bp, Homo sapien
ctaggacaatgctgatcgcttctga

SEQ ID NO: 1122958 - DNA, 25 bp, Homo sapien
aatgagcagccttccatgaaaaagg

SEQ ID NO: 1122959 - DNA, 25 bp, Homo sapien
ggcacgtgctgccacacccagctaa

SEQ ID NO: 1122960 - DNA, 25 bp, Homo sapien
caggttcaagccaggttcaggtgat

SEQ ID NO: 1122961 - DNA, 25 bp, Homo sapien
cccaggttcaagccaggttcaggtg

SEQ ID NO: 1122962 - DNA, 25 bp, Homo sapien
acctcatgatctacccatcttggcc

SEQ ID NO: 1122963 - DNA, 25 bp, Homo sapien
gaagttttgacagcatgcattagag

SEQ ID NO: 1122964 - DNA, 25 bp, Homo sapien
actgctggcctagatattcctttac

SEQ ID NO: 1122965 - DNA, 25 bp, Homo sapien
gctggcctagatattcctttactcc

SEQ ID NO: 1122966 - DNA, 25 bp, Homo sapien
ttactcccacttccataacccacag

SEQ ID NO: 1122967 - DNA, 25 bp, Homo sapien
acctgacctatgagacggcctttgc

SEQ ID NO: 1122968 - DNA, 25 bp, Homo sapien
aattcacacctataggtggaggaag

SEQ ID NO: 1122969 - DNA, 25 bp, Homo sapien
gaagaacagtggaccaagctgaagg

SEQ ID NO: 1122970 - DNA, 25 bp, Homo sapien
cattttgagggagtgaatataattc

SEQ ID NO: 1122971 - DNA, 25 bp, Homo sapien
gaagtcatagcagccagtgtagact

SEQ ID NO: 1122972 - DNA, 25 bp, Homo sapien
tgtagactttagcttaggaatacac

SEQ ID NO: 1122973 - DNA, 25 bp, Homo sapien
agtgtagactttagcttaggaatac

SEQ ID NO: 1122974 - DNA, 25 bp, Homo sapien
ctagaagtcatagcagccagtgtag

SEQ ID NO: 1122975 - DNA, 25 bp, Homo sapien
cccattggaggttttgcaggtagtg

SEQ ID NO: 1122976 - DNA, 25 bp, Homo sapien
caagcccattggaggttttgcaggt

SEQ ID NO: 1122977 - DNA, 25 bp, Homo sapien
tgagtcctgaagagcagctttacca

SEQ ID NO: 1122978 - DNA, 25 bp, Homo sapien
caggtagtggacgtgagtcctgaag

SEQ ID NO: 1122979 - DNA, 25 bp, Homo sapien
agctgtgtggctgtaacaccagtgg

SEQ ID NO: 1122980 - DNA, 25 bp, Homo sapien
cagctgtgtggctgtaacaccagtg

SEQ ID NO: 1122981 - DNA, 25 bp, Homo sapien
tgtgggagtcaagggatgtatgcgc

SEQ ID NO: 1122982 - DNA, 25 bp, Homo sapien
gagctgtgttcagtctcacaggggc

SEQ ID NO: 1122983 - DNA, 25 bp, Homo sapien
gagtcaagggatgtatgcgcctcct

SEQ ID NO: 1122984 - DNA, 25 bp, Homo sapien
tggtttgtgggagtcaagggatgta

SEQ ID NO: 1122985 - DNA, 25 bp, Homo sapien
acagtttcacagagctctctacagg

SEQ ID NO: 1122986 - DNA, 25 bp, Homo sapien
agagaaatcgaagacatccacccac

SEQ ID NO: 1122987 - DNA, 25 bp, Homo sapien
tgcatccaagggctatctctaaaga

SEQ ID NO: 1122988 - DNA, 25 bp, Homo sapien
agtttcacagagctctctacaggcc

SEQ ID NO: 1122989 - DNA, 25 bp, Homo sapien
atattccgtggagagggatggtccc

SEQ ID NO: 1122990 - DNA, 25 bp, Homo sapien
cttgggatggcttggatattccgtg

SEQ ID NO: 1122991 - DNA, 25 bp, Homo sapien
tattccgtggagagggatggtcccc

SEQ ID NO: 1122992 - DNA, 25 bp, Homo sapien
tttcttgggatggcttggatattcc

SEQ ID NO: 1122993 - DNA, 25 bp, Homo sapien
aatggtactatctcctgctggggtg

SEQ ID NO: 1122994 - DNA, 25 bp, Homo sapien
cctgctggggtgacctctgctttcc

SEQ ID NO: 1122995 - DNA, 25 bp, Homo sapien
aagaaatggtactatctcctgctgg

SEQ ID NO: 1122996 - DNA, 25 bp, Homo sapien
aggagctcaagcctgcaaaacctcc

SEQ ID NO: 1122997 - DNA, 25 bp, Homo sapien
cggcaagtgccccaccagtgggtgc

SEQ ID NO: 1122998 - DNA, 25 bp, Homo sapien
tagagggaccaggttagtgaagtta

SEQ ID NO: 1122999 - DNA, 25 bp, Homo sapien
tgaagttacccagaacagagatggg

SEQ ID NO: 1123000 - DNA, 25 bp, Homo sapien
tgctgcgggccctttaaatgatacc

SEQ ID NO: 1123001 - DNA, 25 bp, Homo sapien
tgaaagatgaatctagctccaaacc

SEQ ID NO: 1123002 - DNA, 25 bp, Homo sapien
gaggatcacttcctgcacacggtag

SEQ ID NO: 1123003 - DNA, 25 bp, Homo sapien
acttcctgcacacggtaggccctca

SEQ ID NO: 1123004 - DNA, 25 bp, Homo sapien
gatcacttcctgcacacggtaggcc

SEQ ID NO: 1123005 - DNA, 25 bp, Homo sapien
aagtatgaatgaatacgtggatgaa

SEQ ID NO: 1123006 - DNA, 25 bp, Homo sapien
tataccctggactacagcagtttct

SEQ ID NO: 1123007 - DNA, 25 bp, Homo sapien
cacatataccctggactacagcagt

SEQ ID NO: 1123008 - DNA, 25 bp, Homo sapien
acatataccctggactacagcagtt

SEQ ID NO: 1123009 - DNA, 25 bp, Homo sapien
catataccctggactacagcagttt

SEQ ID NO: 1123010 - DNA, 25 bp, Homo sapien
cacgttagctttcacggtttcatga

SEQ ID NO: 1123011 - DNA, 25 bp, Homo sapien
tcgccaggcctcaaatgcagaatag

SEQ ID NO: 1123012 - DNA, 25 bp, Homo sapien
cccagctagtgagcgtggagaactg

SEQ ID NO: 1123013 - DNA, 25 bp, Homo sapien
acttaaccccaagacgaagctatgg

SEQ ID NO: 1123014 - DNA, 25 bp, Homo sapien
gtgacgccgggcctttacgtcgcgc

SEQ ID NO: 1123015 - DNA, 25 bp, Homo sapien
ccagccgttgcaccgttaagccggg

SEQ ID NO: 1123016 - DNA, 25 bp, Homo sapien
aggcccaggccagccgttgcaccgt

SEQ ID NO: 1123017 - DNA, 25 bp, Homo sapien
ttgcaccgttaagccgggccggtga

SEQ ID NO: 1123018 - DNA, 25 bp, Homo sapien
aggtcggcgacccagttgagccaag

SEQ ID NO: 1123019 - DNA, 25 bp, Homo sapien
cgacggtcccacctggtcggtgtga

SEQ ID NO: 1123020 - DNA, 25 bp, Homo sapien
ctatgttaagccagaggcgacggcc

SEQ ID NO: 1123021 - DNA, 25 bp, Homo sapien
ggcccagccgtacgaatcacagtcg

SEQ ID NO: 1123022 - DNA, 25 bp, Homo sapien
ggaacctttgaatgccttcagcctc

SEQ ID NO: 1123023 - DNA, 25 bp, Homo sapien
gccttcagcctctagaagtccaatg

SEQ ID NO: 1123024 - DNA, 25 bp, Homo sapien
acctttgaatgccttcagcctctag

SEQ ID NO: 1123025 - DNA, 25 bp, Homo sapien
acccggaacctttgaatgccttcag

SEQ ID NO: 1123026 - DNA, 25 bp, Homo sapien
tgcgagagcagggaatgagagagaa

SEQ ID NO: 1123027 - DNA, 25 bp, Homo sapien
atgagagagaagttaaaccgtttag

SEQ ID NO: 1123028 - DNA, 25 bp, Homo sapien
aaaaataagagacatgatggaggca

SEQ ID NO: 1123029 - DNA, 25 bp, Homo sapien
gagagagaagttaaaccgtttagca

SEQ ID NO: 1123030 - DNA, 25 bp, Homo sapien
tgggcctaggacctctttgcactgg

SEQ ID NO: 1123031 - DNA, 25 bp, Homo sapien
gagccgcttaagaaaggaccgcaag

SEQ ID NO: 1123032 - DNA, 25 bp, Homo sapien
taagagtcccagagtgacggcagaa

SEQ ID NO: 1123033 - DNA, 25 bp, Homo sapien
gaaatctccatttttgacgggctcc

SEQ ID NO: 1123034 - DNA, 25 bp, Homo sapien
caaagtcaaacgacaaaaagactga

SEQ ID NO: 1123035 - DNA, 25 bp, Homo sapien
tacatgaatcatgaatttctgtaag

SEQ ID NO: 1123036 - DNA, 25 bp, Homo sapien
acaaagtcaaacgacaaaaagactg

SEQ ID NO: 1123037 - DNA, 25 bp, Homo sapien
cttgccaatgcttgtattgtcgtct

SEQ ID NO: 1123038 - DNA, 25 bp, Homo sapien
gaagactcaacatcctaattagttc

SEQ ID NO: 1123039 - DNA, 25 bp, Homo sapien
ttatatttaacacactccagaagag

SEQ ID NO: 1123040 - DNA, 25 bp, Homo sapien
tttacatccccactggcaatgaatg

SEQ ID NO: 1123041 - DNA, 25 bp, Homo sapien
tgcacagtgataggagtaaacatac

SEQ ID NO: 1123042 - DNA, 25 bp, Homo sapien
taagtatacaccacaaccaggtagg

SEQ ID NO: 1123043 - DNA, 25 bp, Homo sapien
ggaaatcatctatgcatgcacagtg

SEQ ID NO: 1123044 - DNA, 25 bp, Homo sapien
cagtaaaaaggaatgctccctccct

SEQ ID NO: 1123045 - DNA, 25 bp, Homo sapien
caagtgagtattagacattgcatga

SEQ ID NO: 1123046 - DNA, 25 bp, Homo sapien
taaagcacgtagattagtatccagc

SEQ ID NO: 1123047 - DNA, 25 bp, Homo sapien
catttgctcaaattaaagatgtgga

SEQ ID NO: 1123048 - DNA, 25 bp, Homo sapien
gtatccagcagatattaagtggcca

SEQ ID NO: 1123049 - DNA, 25 bp, Homo sapien
ggagatgtgcatccagtgagaccaa

SEQ ID NO: 1123050 - DNA, 25 bp, Homo sapien
gttttccaggctgatgttcacatct

SEQ ID NO: 1123051 - DNA, 25 bp, Homo sapien
tagagagtggtaatactaccaaata

SEQ ID NO: 1123052 - DNA, 25 bp, Homo sapien
aatgtatctaaacttcagcagagct

SEQ ID NO: 1123053 - DNA, 25 bp, Homo sapien
tctcttgtatttcatccgggcgcag

SEQ ID NO: 1123054 - DNA, 25 bp, Homo sapien
aaatttgtgtctgtaacctgaatag

SEQ ID NO: 1123055 - DNA, 25 bp, Homo sapien
aattatgtgaaatctgcccgggcac

SEQ ID NO: 1123056 - DNA, 25 bp, Homo sapien
gctcaagttttctcaacctagggaa

SEQ ID NO: 1123057 - DNA, 25 bp, Homo sapien
gctgtggctactgcggtattcggtc

SEQ ID NO: 1123058 - DNA, 25 bp, Homo sapien
tcctgacattcaagcgcacgagtgg

SEQ ID NO: 1123059 - DNA, 25 bp, Homo sapien
tattttggcctaggtatcagggtaa

SEQ ID NO: 1123060 - DNA, 25 bp, Homo sapien
aactgacttaggagcataacttacc

SEQ ID NO: 1123061 - DNA, 25 bp, Homo sapien
ggaaaaggcagaagctaattcagag

SEQ ID NO: 1123062 - DNA, 25 bp, Homo sapien
tagagagcttggatataaacttgga

SEQ ID NO: 1123063 - DNA, 25 bp, Homo sapien
cagaggctccaaggtgtgaatgtgc

SEQ ID NO: 1123064 - DNA, 25 bp, Homo sapien
gtgggatatggcatcagagcagtca

SEQ ID NO: 1123065 - DNA, 25 bp, Homo sapien
tttccatatgttggcagatgtcatg

SEQ ID NO: 1123066 - DNA, 25 bp, Homo sapien
catatgttggcagatgtcatgtgtc

SEQ ID NO: 1123067 - DNA, 25 bp, Homo sapien
taactttccatatgttggcagatgt

SEQ ID NO: 1123068 - DNA, 25 bp, Homo sapien
tatgttggcagatgtcatgtgtctg

SEQ ID NO: 1123069 - DNA, 25 bp, Homo sapien
tttgaacttggcctaagtcttggat

SEQ ID NO: 1123070 - DNA, 25 bp, Homo sapien
tggagccttttccactatacaatct

SEQ ID NO: 1123071 - DNA, 25 bp, Homo sapien
gtattacagtctgaaaacttcatcc

SEQ ID NO: 1123072 - DNA, 25 bp, Homo sapien
cttttgccttcccagtagagctttc

SEQ ID NO: 1123073 - DNA, 25 bp, Homo sapien
aggcggtgtctgcctcgcgctgtcc

SEQ ID NO: 1123074 - DNA, 25 bp, Homo sapien
gaggcggtgtctgcctcgcgctgtc

SEQ ID NO: 1123075 - DNA, 25 bp, Homo sapien
ggaggcggtgtctgcctcgcgctgt

SEQ ID NO: 1123076 - DNA, 25 bp, Homo sapien
cggaggcggtgtctgcctcgcgctg

SEQ ID NO: 1123077 - DNA, 25 bp, Homo sapien
aataatctcgaccacctctaaaggg

SEQ ID NO: 1123078 - DNA, 25 bp, Homo sapien
tagagtgtacgcgtctcaagggcaa

SEQ ID NO: 1123079 - DNA, 25 bp, Homo sapien
tacgtagcatttccgagtcccggtg

SEQ ID NO: 1123080 - DNA, 25 bp, Homo sapien
taaagagacgtgtaggaagcccacc

SEQ ID NO: 1123081 - DNA, 25 bp, Homo sapien
ggagaacaactttgatgagttgaca

SEQ ID NO: 1123082 - DNA, 25 bp, Homo sapien
agaataaacagtgtacagaagcact

SEQ ID NO: 1123083 - DNA, 25 bp, Homo sapien
cagaagcacttaaatgacttgatgg

SEQ ID NO: 1123084 - DNA, 25 bp, Homo sapien
gacatctataccaaaacccaatctg

SEQ ID NO: 1123085 - DNA, 25 bp, Homo sapien
gctcacagcatgatcgacaccgaag

SEQ ID NO: 1123086 - DNA, 25 bp, Homo sapien
ttaaagcagcacaagcgaagatggc

SEQ ID NO: 1123087 - DNA, 25 bp, Homo sapien
cagctcaggtctgtagctcacagca

SEQ ID NO: 1123088 - DNA, 25 bp, Homo sapien
tacaaacaatcaagaaatgatgcca

SEQ ID NO: 1123089 - DNA, 25 bp, Homo sapien
ctccaggaaggtgccgctgtatcca

SEQ ID NO: 1123090 - DNA, 25 bp, Homo sapien
caaactgtggtaatttccactcctc

SEQ ID NO: 1123091 - DNA, 25 bp, Homo sapien
gataatggtcctctgttgcaacacc

SEQ ID NO: 1123092 - DNA, 25 bp, Homo sapien
ccagtcttcagaacaaactgtggta

SEQ ID NO: 1123093 - DNA, 25 bp, Homo sapien
agaggtttcccagtgcctctcagac

SEQ ID NO: 1123094 - DNA, 25 bp, Homo sapien
taagaggtttcccagtgcctctcag

SEQ ID NO: 1123095 - DNA, 25 bp, Homo sapien
tcaagtttaagaggtttcccagtgc

SEQ ID NO: 1123096 - DNA, 25 bp, Homo sapien
tttaagaggtttcccagtgcctctc

SEQ ID NO: 1123097 - DNA, 25 bp, Homo sapien
ctgtcaggcacatactgggtcaggc

SEQ ID NO: 1123098 - DNA, 25 bp, Homo sapien
tcaggcacatactgggtcaggccat

SEQ ID NO: 1123099 - DNA, 25 bp, Homo sapien
tgtcaggcacatactgggtcaggcc

SEQ ID NO: 1123100 - DNA, 25 bp, Homo sapien
aggcacatactgggtcaggccatca

SEQ ID NO: 1123101 - DNA, 25 bp, Homo sapien
cctgggccagttgggcgtctccagc

SEQ ID NO: 1123102 - DNA, 25 bp, Homo sapien
ggtctgatgacccaaatgacaactg

SEQ ID NO: 1123103 - DNA, 25 bp, Homo sapien
caaatgacaactgctgcagctggca

SEQ ID NO: 1123104 - DNA, 25 bp, Homo sapien
tgggccagttgggcgtctccagcag

SEQ ID NO: 1123105 - DNA, 25 bp, Homo sapien
tgttgctgtgcctcaaaaacccaat

SEQ ID NO: 1123106 - DNA, 25 bp, Homo sapien
attgtccgtggcctaatgtcatcaa

SEQ ID NO: 1123107 - DNA, 25 bp, Homo sapien
cacagccctaataattgtccgtggc

SEQ ID NO: 1123108 - DNA, 25 bp, Homo sapien
gccatgaagttttacaggagccaca

SEQ ID NO: 1123109 - DNA, 25 bp, Homo sapien
ttaatcagcacaattggcctccaat

SEQ ID NO: 1123110 - DNA, 25 bp, Homo sapien
taatcagcacaattggcctccaata

SEQ ID NO: 1123111 - DNA, 25 bp, Homo sapien
agagagctcaatctctctttagatt

SEQ ID NO: 1123112 - DNA, 25 bp, Homo sapien
aaaagagagctcaatctctctttag

SEQ ID NO: 1123113 - DNA, 25 bp, Homo sapien
tggtaaaaagagagctcaatctctc

SEQ ID NO: 1123114 - DNA, 25 bp, Homo sapien
ggtaaaaagagagctcaatctctct

SEQ ID NO: 1123115 - DNA, 25 bp, Homo sapien
ccgcagagagttagttaactgctaa

SEQ ID NO: 1123116 - DNA, 25 bp, Homo sapien
gctaactctaatcaactgggtttaa

SEQ ID NO: 1123117 - DNA, 25 bp, Homo sapien
agtggcatccaatcccgcagagagt

SEQ ID NO: 1123118 - DNA, 25 bp, Homo sapien
ctctaatcaactgggtttaatctac

SEQ ID NO: 1123119 - DNA, 25 bp, Homo sapien
caagactctatcttacatcagcaga

SEQ ID NO: 1123120 - DNA, 25 bp, Homo sapien
taaggacacaagactctatcttaca

SEQ ID NO: 1123121 - DNA, 25 bp, Homo sapien
ctctatcttacatcagcagaatgca

SEQ ID NO: 1123122 - DNA, 25 bp, Homo sapien
tcaaacaccttaattaagctaaatc

SEQ ID NO: 1123123 - DNA, 25 bp, Homo sapien
tgtgttcatctttggacacagccat

SEQ ID NO: 1123124 - DNA, 25 bp, Homo sapien
tgaatttagtctgtgttcatctttg

SEQ ID NO: 1123125 - DNA, 25 bp, Homo sapien
aattcttcctttaaagatgaacatg

SEQ ID NO: 1123126 - DNA, 25 bp, Homo sapien
agatgaacatgttttctgaatttag

SEQ ID NO: 1123127 - DNA, 25 bp, Homo sapien
gttctctcagccaacctctgctgac

SEQ ID NO: 1123128 - DNA, 25 bp, Homo sapien
ttctctcagccaacctctgctgaca

SEQ ID NO: 1123129 - DNA, 25 bp, Homo sapien
tctctcagccaacctctgctgacat

SEQ ID NO: 1123130 - DNA, 25 bp, Homo sapien
tctcagccaacctctgctgacattc

SEQ ID NO: 1123131 - DNA, 25 bp, Homo sapien
tccacacagttctagggtacagatg

SEQ ID NO: 1123132 - DNA, 25 bp, Homo sapien
aactccaacaaatagccacactggc

SEQ ID NO: 1123133 - DNA, 25 bp, Homo sapien
taagctccacacagttctagggtac

SEQ ID NO: 1123134 - DNA, 25 bp, Homo sapien
gctccacacagttctagggtacaga

SEQ ID NO: 1123135 - DNA, 25 bp, Homo sapien
gctggtgacaacatgagtccacaat

SEQ ID NO: 1123136 - DNA, 25 bp, Homo sapien
cgttgctggtgacaacatgagtcca

SEQ ID NO: 1123137 - DNA, 25 bp, Homo sapien
agtccacaatgacatcatctagtgc

SEQ ID NO: 1123138 - DNA, 25 bp, Homo sapien
gacatcatctagtgcatgccaatac

SEQ ID NO: 1123139 - DNA, 25 bp, Homo sapien
tgtctggctcccatgaacttctcca

SEQ ID NO: 1123140 - DNA, 25 bp, Homo sapien
gccaaccaaggactggagactcagg

SEQ ID NO: 1123141 - DNA, 25 bp, Homo sapien
tcatcccatctatgccaaccaagga

SEQ ID NO: 1123142 - DNA, 25 bp, Homo sapien
ctggagacagcacctacgacgtgga

SEQ ID NO: 1123143 - DNA, 25 bp, Homo sapien
gggactactcagtcgagaactcatg

SEQ ID NO: 1123144 - DNA, 25 bp, Homo sapien
ggcacacattgagcagactgtcctc

SEQ ID NO: 1123145 - DNA, 25 bp, Homo sapien
aagctgatggggactactcagtcga

SEQ ID NO: 1123146 - DNA, 25 bp, Homo sapien
tcagtcgagaactcatgagatgcag

SEQ ID NO: 1123147 - DNA, 25 bp, Homo sapien
ctcagtcttatagtcaagaatttcc

SEQ ID NO: 1123148 - DNA, 25 bp, Homo sapien
tacctgtgacacctgggtttactgt

SEQ ID NO: 1123149 - DNA, 25 bp, Homo sapien
tactgtcttgttcaagggacatggc

SEQ ID NO: 1123150 - DNA, 25 bp, Homo sapien
ttcaagggacatggctgtttctcag

SEQ ID NO: 1123151 - DNA, 25 bp, Homo sapien
tattgtgaccccattgccatctggt

SEQ ID NO: 1123152 - DNA, 25 bp, Homo sapien
tactgggaccacttgttgactaaac

SEQ ID NO: 1123153 - DNA, 25 bp, Homo sapien
actggaacttgctggtattgtgacc

SEQ ID NO: 1123154 - DNA, 25 bp, Homo sapien
gccatctggtgggacagcattaaag

SEQ ID NO: 1123155 - DNA, 25 bp, Homo sapien
tactagctggcagtccaatgaaggg

SEQ ID NO: 1123156 - DNA, 25 bp, Homo sapien
catcattttggaacttaggaccacc

SEQ ID NO: 1123157 - DNA, 25 bp, Homo sapien
cgcgtgtgcgcttacagggatctct

SEQ ID NO: 1123158 - DNA, 25 bp, Homo sapien
gaattttaaagctggcctggaatct

SEQ ID NO: 1123159 - DNA, 25 bp, Homo sapien
ttacacatattgaccagcaccttag

SEQ ID NO: 1123160 - DNA, 25 bp, Homo sapien
tctttgtgtaggatacatgaacatg

SEQ ID NO: 1123161 - DNA, 25 bp, Homo sapien
caaaaggctaaagtctcgcttccca

SEQ ID NO: 1123162 - DNA, 25 bp, Homo sapien
agcttctgctgacagtcggtggaca

SEQ ID NO: 1123163 - DNA, 25 bp, Homo sapien
tcactcctagcacgtcctggatgta

SEQ ID NO: 1123164 - DNA, 25 bp, Homo sapien
gcacagggttgctccccactttgat

SEQ ID NO: 1123165 - DNA, 25 bp, Homo sapien
gatgtattcgtcaaaatatgtcctc

SEQ ID NO: 1123166 - DNA, 25 bp, Homo sapien
aatatgtcctcttatgccacgtcag

SEQ ID NO: 1123167 - DNA, 25 bp, Homo sapien
tagacgctcataaatgcttctctgg

SEQ ID NO: 1123168 - DNA, 25 bp, Homo sapien
tgtagtcacatagaatagacgctca

SEQ ID NO: 1123169 - DNA, 25 bp, Homo sapien
cttagtggagctgtagtcacataga

SEQ ID NO: 1123170 - DNA, 25 bp, Homo sapien
gcttctctgggctgtaaaggttgaa

SEQ ID NO: 1123171 - DNA, 25 bp, Homo sapien
tgatttacttatgcgcagcctccct

SEQ ID NO: 1123172 - DNA, 25 bp, Homo sapien
aaagtagcctttcagatgtcccttg

SEQ ID NO: 1123173 - DNA, 25 bp, Homo sapien
cctccctggagacatgagtgtggct

SEQ ID NO: 1123174 - DNA, 25 bp, Homo sapien
aaaactgatgggagcttgtgactga

SEQ ID NO: 1123175 - DNA, 25 bp, Homo sapien
ctcatggagtgaccttttggctgcc

SEQ ID NO: 1123176 - DNA, 25 bp, Homo sapien
gatgacgcatttcctagcactcagg

SEQ ID NO: 1123177 - DNA, 25 bp, Homo sapien
gacctcctggtagagaccgtttgac

SEQ ID NO: 1123178 - DNA, 25 bp, Homo sapien
cacagatactgggacggacagaaaa

SEQ ID NO: 1123179 - DNA, 25 bp, Homo sapien
cctgtttaaggcttctctgggcaag

SEQ ID NO: 1123180 - DNA, 25 bp, Homo sapien
gaggcgagcagaccctgccaaaact

SEQ ID NO: 1123181 - DNA, 25 bp, Homo sapien
tccaccaatgtcaccctgtttaagg

SEQ ID NO: 1123182 - DNA, 25 bp, Homo sapien
aaaactgggagactgaatagatcgc

SEQ ID NO: 1123183 - DNA, 25 bp, Homo sapien
tgttggggagcaggctttacccgac

SEQ ID NO: 1123184 - DNA, 25 bp, Homo sapien
aggccaccagcaaaggcctgttggg

SEQ ID NO: 1123185 - DNA, 25 bp, Homo sapien
cttgtgcagcccatacctgaaggcc

SEQ ID NO: 1123186 - DNA, 25 bp, Homo sapien
ttgtgcagcccatacctgaaggcca

SEQ ID NO: 1123187 - DNA, 25 bp, Homo sapien
ccctcaccctgatcaacctggacag

SEQ ID NO: 1123188 - DNA, 25 bp, Homo sapien
tggagtgaatcattgtaggagaaaa

SEQ ID NO: 1123189 - DNA, 25 bp, Homo sapien
aacctggacagatctctcttccttt

SEQ ID NO: 1123190 - DNA, 25 bp, Homo sapien
ctgcttgggtggagtgaatcattgt

SEQ ID NO: 1123191 - DNA, 25 bp, Homo sapien
gcacaccccttcacgtgctgaaatg

SEQ ID NO: 1123192 - DNA, 25 bp, Homo sapien
cccttcacgtgctgaaatgcacacg

SEQ ID NO: 1123193 - DNA, 25 bp, Homo sapien
ggaagttgcacaccccttcacgtgc

SEQ ID NO: 1123194 - DNA, 25 bp, Homo sapien
tgcaggggaggaagttgcacacccc

SEQ ID NO: 1123195 - DNA, 25 bp, Homo sapien
tctcggcacaaaatgacgtgtcccc

SEQ ID NO: 1123196 - DNA, 25 bp, Homo sapien
tggttgaaggaatagacgagcgtct

SEQ ID NO: 1123197 - DNA, 25 bp, Homo sapien
gcaactgcgtggagtcttcttgaac

SEQ ID NO: 1123198 - DNA, 25 bp, Homo sapien
taggtgctcagttcaccgtggttga

SEQ ID NO: 1123199 - DNA, 25 bp, Homo sapien
tctgggctggcgttcactggatgcc

SEQ ID NO: 1123200 - DNA, 25 bp, Homo sapien
gagatttctgtctggcacgcctccc

SEQ ID NO: 1123201 - DNA, 25 bp, Homo sapien
tgcctctagaagatggtccctctaa

SEQ ID NO: 1123202 - DNA, 25 bp, Homo sapien
caatctggcctttcgctggcatggg

SEQ ID NO: 1123203 - DNA, 25 bp, Homo sapien
caaaaggtgccggagatcagagaac

SEQ ID NO: 1123204 - DNA, 25 bp, Homo sapien
taaagtagcataggtggaatagtcc

SEQ ID NO: 1123205 - DNA, 25 bp, Homo sapien
gatcagagaacaccaagactgtact

SEQ ID NO: 1123206 - DNA, 25 bp, Homo sapien
aatagtccatgagaagtgcgagcaa

SEQ ID NO: 1123207 - DNA, 25 bp, Homo sapien
ccagaggcgctcttaacggcgttta

SEQ ID NO: 1123208 - DNA, 25 bp, Homo sapien
cttcgtgagacagatacagcttttg

SEQ ID NO: 1123209 - DNA, 25 bp, Homo sapien
tctggtcttcgtgtggtcattagca

SEQ ID NO: 1123210 - DNA, 25 bp, Homo sapien
agtagcctttaatcaccaggagaag

SEQ ID NO: 1123211 - DNA, 25 bp, Homo sapien
gtgtctgtggaatgcaaggagcccc

SEQ ID NO: 1123212 - DNA, 25 bp, Homo sapien
tctgtggaatgcaaggagccccttc

SEQ ID NO: 1123213 - DNA, 25 bp, Homo sapien
tgtctgtggaatgcaaggagcccct

SEQ ID NO: 1123214 - DNA, 25 bp, Homo sapien
gtctgtggaatgcaaggagcccctt

SEQ ID NO: 1123215 - DNA, 25 bp, Homo sapien
ggcccgatttagctttattctgcta

SEQ ID NO: 1123216 - DNA, 25 bp, Homo sapien
cgctcccggcccgatttagctttat

SEQ ID NO: 1123217 - DNA, 25 bp, Homo sapien
agagcccatcgctctggggtatatg

SEQ ID NO: 1123218 - DNA, 25 bp, Homo sapien
tttattctgctaaagcagagcccat

SEQ ID NO: 1123219 - DNA, 25 bp, Homo sapien
ccacttgcacaccattcatggggga

SEQ ID NO: 1123220 - DNA, 25 bp, Homo sapien
tgcttccatggctatccttgtgatt

SEQ ID NO: 1123221 - DNA, 25 bp, Homo sapien
caaagtttttgcgtcgcctgcaggg

SEQ ID NO: 1123222 - DNA, 25 bp, Homo sapien
ttgctgggtccactggggccctgtt

SEQ ID NO: 1123223 - DNA, 25 bp, Homo sapien
tgggtcttccaagcattatcaaagg

SEQ ID NO: 1123224 - DNA, 25 bp, Homo sapien
ttccaagcattatcaaaggaaaagc

SEQ ID NO: 1123225 - DNA, 25 bp, Homo sapien
cttgtgtgaattgggtcttccaagc

SEQ ID NO: 1123226 - DNA, 25 bp, Homo sapien
caacttgtgtgaattgggtcttcca

SEQ ID NO: 1123227 - DNA, 25 bp, Homo sapien
agctgtactcggtttgtcccctctc

SEQ ID NO: 1123228 - DNA, 25 bp, Homo sapien
atagtaagctacttaagcatttttc

SEQ ID NO: 1123229 - DNA, 25 bp, Homo sapien
agccaccagctgtactcggtttgtc

SEQ ID NO: 1123230 - DNA, 25 bp, Homo sapien
accagctgtactcggtttgtcccct

SEQ ID NO: 1123231 - DNA, 25 bp, Homo sapien
gaccatgtcctcagattatccaacg

SEQ ID NO: 1123232 - DNA, 25 bp, Homo sapien
tctctggtgaggactaaccacacaa

SEQ ID NO: 1123233 - DNA, 25 bp, Homo sapien
aaatgctggtgtacacatagggtcc

SEQ ID NO: 1123234 - DNA, 25 bp, Homo sapien
tcccaagttgacgagtagcaccaag

SEQ ID NO: 1123235 - DNA, 25 bp, Homo sapien
catttgtggatagtgcacaaattgt

SEQ ID NO: 1123236 - DNA, 25 bp, Homo sapien
gccagatttactttagcttgtttct

SEQ ID NO: 1123237 - DNA, 25 bp, Homo sapien
caaattgttaactagtacagaagcc

SEQ ID NO: 1123238 - DNA, 25 bp, Homo sapien
catgttatttggagtatgatatatg

SEQ ID NO: 1123239 - DNA, 25 bp, Homo sapien
ttttacatatgagcgtgaaacccga

SEQ ID NO: 1123240 - DNA, 25 bp, Homo sapien
ttacatatgagcgtgaaacccgaat

SEQ ID NO: 1123241 - DNA, 25 bp, Homo sapien
cattttacatatgagcgtgaaaccc

SEQ ID NO: 1123242 - DNA, 25 bp, Homo sapien
tacatatgagcgtgaaacccgaatc

SEQ ID NO: 1123243 - DNA, 25 bp, Homo sapien
gagataacgtagagatgtacatctg

SEQ ID NO: 1123244 - DNA, 25 bp, Homo sapien
gatatagtctgtctcatgatcctca

SEQ ID NO: 1123245 - DNA, 25 bp, Homo sapien
ggcttcaaagacttgccatacagca

SEQ ID NO: 1123246 - DNA, 25 bp, Homo sapien
gatggcagttctctcccaagttgat

SEQ ID NO: 1123247 - DNA, 25 bp, Homo sapien
gttctacctggattgtcaacaactg

SEQ ID NO: 1123248 - DNA, 25 bp, Homo sapien
gagtacaggtcagtaagcctcatta

SEQ ID NO: 1123249 - DNA, 25 bp, Homo sapien
ccaaaaaatgcctgtttcagaagtt

SEQ ID NO: 1123250 - DNA, 25 bp, Homo sapien
catttgatagtttttcaccccttgg

SEQ ID NO: 1123251 - DNA, 25 bp, Homo sapien
acataatggccagaaggcttgcaaa

SEQ ID NO: 1123252 - DNA, 25 bp, Homo sapien
aatgtttctgaatgcaagtgcctaa

SEQ ID NO: 1123253 - DNA, 25 bp, Homo sapien
caaatggtccatttgaatgcatccc

SEQ ID NO: 1123254 - DNA, 25 bp, Homo sapien
gatatagtctcaactaataggtgca

SEQ ID NO: 1123255 - DNA, 25 bp, Homo sapien
gaatgcaacagtttgaagacctcga

SEQ ID NO: 1123256 - DNA, 25 bp, Homo sapien
cacggtctcgtggtgaagtcaatgc

SEQ ID NO: 1123257 - DNA, 25 bp, Homo sapien
tgtcctgggcaagcaactggtcaac

SEQ ID NO: 1123258 - DNA, 25 bp, Homo sapien
tgacagggcctcttttgtataggac

SEQ ID NO: 1123259 - DNA, 25 bp, Homo sapien
gactacaatgatcatgcccagtgca

SEQ ID NO: 1123260 - DNA, 25 bp, Homo sapien
gcccagtgcactccaggaaaaagga

SEQ ID NO: 1123261 - DNA, 25 bp, Homo sapien
tatcaatgccactcaacccagtaag

SEQ ID NO: 1123262 - DNA, 25 bp, Homo sapien
tgacaacaagcctccagattagtgg

SEQ ID NO: 1123263 - DNA, 25 bp, Homo sapien
ccatgtgccacaaacttaaatagat

SEQ ID NO: 1123264 - DNA, 25 bp, Homo sapien
aatatgtaagactcatattgtcttg

SEQ ID NO: 1123265 - DNA, 25 bp, Homo sapien
tattgtcttgatagagtgttcatct

SEQ ID NO: 1123266 - DNA, 25 bp, Homo sapien
taactcctccacataggtaactgag

SEQ ID NO: 1123267 - DNA, 25 bp, Homo sapien
ctttttattcttttagcagtgtctt

SEQ ID NO: 1123268 - DNA, 25 bp, Homo sapien
tttattcttttagcagtgtcttttg

SEQ ID NO: 1123269 - DNA, 25 bp, Homo sapien
ctctttttattcttttagcagtgtc

SEQ ID NO: 1123270 - DNA, 25 bp, Homo sapien
tattcttttagcagtgtcttttggg

SEQ ID NO: 1123271 - DNA, 25 bp, Homo sapien
tgttagctgttccaataggtgtgtt

SEQ ID NO: 1123272 - DNA, 25 bp, Homo sapien
tcaaaggcttattgacaatctgtgt

SEQ ID NO: 1123273 - DNA, 25 bp, Homo sapien
tgtccttgacatgtatcagtcgttg

SEQ ID NO: 1123274 - DNA, 25 bp, Homo sapien
tccagagtggctataatatttttca

SEQ ID NO: 1123275 - DNA, 25 bp, Homo sapien
gtatgtgtactaattcaggcacctg

SEQ ID NO: 1123276 - DNA, 25 bp, Homo sapien
caggcacctgatagcaaggataggc

SEQ ID NO: 1123277 - DNA, 25 bp, Homo sapien
ccactatgctgagacctgaattttg

SEQ ID NO: 1123278 - DNA, 25 bp, Homo sapien
taataggctctcaggtcgtgctgat

SEQ ID NO: 1123279 - DNA, 25 bp, Homo sapien
taaaagaaggattgagagcgaagtg

SEQ ID NO: 1123280 - DNA, 25 bp, Homo sapien
gagagtggtaatgtgcagtgactac

SEQ ID NO: 1123281 - DNA, 25 bp, Homo sapien
aaaacttagcatgaagaattggacc

SEQ ID NO: 1123282 - DNA, 25 bp, Homo sapien
taattgggaccttatctaaaatgtg

SEQ ID NO: 1123283 - DNA, 25 bp, Homo sapien
tgtgatgagacaagaatggatgcag

SEQ ID NO: 1123284 - DNA, 25 bp, Homo sapien
gattagagaaccctgtagatcagaa

SEQ ID NO: 1123285 - DNA, 25 bp, Homo sapien
ctcatgttgagccttgtagagcatg

SEQ ID NO: 1123286 - DNA, 25 bp, Homo sapien
cactagtgtggtagcagtagagaga

SEQ ID NO: 1123287 - DNA, 25 bp, Homo sapien
aaaggagagtactgcctgccaggaa

SEQ ID NO: 1123288 - DNA, 25 bp, Homo sapien
ttaccaccgtcggctgtccattttg

SEQ ID NO: 1123289 - DNA, 25 bp, Homo sapien
ccaccgtcggctgtccattttggtt

SEQ ID NO: 1123290 - DNA, 25 bp, Homo sapien
ggaacttgctctttggcaaagagta

SEQ ID NO: 1123291 - DNA, 25 bp, Homo sapien
ttcagtctgacacatgcaaaggctg

SEQ ID NO: 1123292 - DNA, 25 bp, Homo sapien
aggctgagtaaaacagacatctcat

SEQ ID NO: 1123293 - DNA, 25 bp, Homo sapien
tctcaagtccgtctttcttactggg

SEQ ID NO: 1123294 - DNA, 25 bp, Homo sapien
ttcttcaccgggtctcaagtccgtc

SEQ ID NO: 1123295 - DNA, 25 bp, Homo sapien
tctaagtcgctctgcccgccctgct

SEQ ID NO: 1123296 - DNA, 25 bp, Homo sapien
cctgcaggagggtacaaaaagtcac

SEQ ID NO: 1123297 - DNA, 25 bp, Homo sapien
aacaaggacagagaacctgctccct

SEQ ID NO: 1123298 - DNA, 25 bp, Homo sapien
cgccctgctgcaagtcaaaagggcg

SEQ ID NO: 1123299 - DNA, 25 bp, Homo sapien
gactaattttcactggagcgaacag

SEQ ID NO: 1123300 - DNA, 25 bp, Homo sapien
ctaattttcactggagcgaacagaa

SEQ ID NO: 1123301 - DNA, 25 bp, Homo sapien
aattttcactggagcgaacagaaag

SEQ ID NO: 1123302 - DNA, 25 bp, Homo sapien
attttcactggagcgaacagaaagg

SEQ ID NO: 1123303 - DNA, 25 bp, Homo sapien
cagcatgaggtctgaattgattcct

SEQ ID NO: 1123304 - DNA, 25 bp, Homo sapien
tagtttcctgtccttatgacagcac

SEQ ID NO: 1123305 - DNA, 25 bp, Homo sapien
ccagcatgaggtctgaattgattcc

SEQ ID NO: 1123306 - DNA, 25 bp, Homo sapien
tgttggtaatgtctttcacattcat

SEQ ID NO: 1123307 - DNA, 25 bp, Homo sapien
tgatcggggcttctatcatcatctt

SEQ ID NO: 1123308 - DNA, 25 bp, Homo sapien
aacatccctgatcggggcttctatc

SEQ ID NO: 1123309 - DNA, 25 bp, Homo sapien
cctccaacaccagaatccaacatcc

SEQ ID NO: 1123310 - DNA, 25 bp, Homo sapien
tccaacaccagaatccaacatccct

SEQ ID NO: 1123311 - DNA, 25 bp, Homo sapien
tagaacctactaaggtgaccagtca

SEQ ID NO: 1123312 - DNA, 25 bp, Homo sapien
gtagaacctactaaggtgaccagtc

SEQ ID NO: 1123313 - DNA, 25 bp, Homo sapien
gattcagacattcagcaataggtct

SEQ ID NO: 1123314 - DNA, 25 bp, Homo sapien
cttgaagcagggtgattcagacatt

SEQ ID NO: 1123315 - DNA, 25 bp, Homo sapien
tgattgctggaaagcttactgacca

SEQ ID NO: 1123316 - DNA, 25 bp, Homo sapien
gaggagagcgttctgactcatttga

SEQ ID NO: 1123317 - DNA, 25 bp, Homo sapien
cagactagctcgtgcaaaggaggag

SEQ ID NO: 1123318 - DNA, 25 bp, Homo sapien
agaaaaacgtcctgcagagtactgc

SEQ ID NO: 1123319 - DNA, 25 bp, Homo sapien
ccatggagaccggacagcaagctga

SEQ ID NO: 1123320 - DNA, 25 bp, Homo sapien
gagcttgaagcccatggagaccgga

SEQ ID NO: 1123321 - DNA, 25 bp, Homo sapien
ggacagcaagctgaagccatgctcc

SEQ ID NO: 1123322 - DNA, 25 bp, Homo sapien
gccctggttcatgagactgtaaagg

SEQ ID NO: 1123323 - DNA, 25 bp, Homo sapien
cctttgctacagtttggctctcatc

SEQ ID NO: 1123324 - DNA, 25 bp, Homo sapien
tcctgccctttgctacagtttggct

SEQ ID NO: 1123325 - DNA, 25 bp, Homo sapien
tgtattcatttatacagccatgcat

SEQ ID NO: 1123326 - DNA, 25 bp, Homo sapien
gctacagtttggctctcatccatgt

SEQ ID NO: 1123327 - DNA, 25 bp, Homo sapien
tcagcttaagcatggcccattcttg

SEQ ID NO: 1123328 - DNA, 25 bp, Homo sapien
ttctgcagtatgaagcagtccatag

SEQ ID NO: 1123329 - DNA, 25 bp, Homo sapien
caggcttcccctctcatcatccaga

SEQ ID NO: 1123330 - DNA, 25 bp, Homo sapien
ccatagctctctaagctgccaggct

SEQ ID NO: 1123331 - DNA, 25 bp, Homo sapien
caggtgcccagtatggccaaatcca

SEQ ID NO: 1123332 - DNA, 25 bp, Homo sapien
ttgatggtgatgatatccactttgc

SEQ ID NO: 1123333 - DNA, 25 bp, Homo sapien
tgaggtcattgatggtgatgatatc

SEQ ID NO: 1123334 - DNA, 25 bp, Homo sapien
gaccaggtgcccagtatggccaaat

SEQ ID NO: 1123335 - DNA, 25 bp, Homo sapien
ggaaccatgtgattccatggtagac

SEQ ID NO: 1123336 - DNA, 25 bp, Homo sapien
tggaaccatgtgattccatggtaga

SEQ ID NO: 1123337 - DNA, 25 bp, Homo sapien
ctggaaccatgtgattccatggtag

SEQ ID NO: 1123338 - DNA, 25 bp, Homo sapien
cttgatggtgcagtggaacttgctg

SEQ ID NO: 1123339 - DNA, 25 bp, Homo sapien
gggatttccattttcagccttgatg

SEQ ID NO: 1123340 - DNA, 25 bp, Homo sapien
gatgggatttccattttcagccttg

SEQ ID NO: 1123341 - DNA, 25 bp, Homo sapien
ttgatggtgcagtggaacttgctgt

SEQ ID NO: 1123342 - DNA, 25 bp, Homo sapien
ccttttggctccaccctctaagtga

SEQ ID NO: 1123343 - DNA, 25 bp, Homo sapien
agtggactccataacataatcagca

SEQ ID NO: 1123344 - DNA, 25 bp, Homo sapien
ataacataatcagcaccagcgtcac

SEQ ID NO: 1123345 - DNA, 25 bp, Homo sapien
cttttggctccaccctctaagtgag

SEQ ID NO: 1123346 - DNA, 25 bp, Homo sapien
tcagcagagggggcagaggtaatga

SEQ ID NO: 1123347 - DNA, 25 bp, Homo sapien
cagcagagggggcagaggtaatgac

SEQ ID NO: 1123348 - DNA, 25 bp, Homo sapien
catcagcagagggggcagaggtaat

SEQ ID NO: 1123349 - DNA, 25 bp, Homo sapien
ggcatcagcagagggggcagaggta

SEQ ID NO: 1123350 - DNA, 25 bp, Homo sapien
tgaggtttttatacttcttatggct

SEQ ID NO: 1123351 - DNA, 25 bp, Homo sapien
tttatacttcttatggctcatgccc

SEQ ID NO: 1123352 - DNA, 25 bp, Homo sapien
aggtttttatacttcttatggctca

SEQ ID NO: 1123353 - DNA, 25 bp, Homo sapien
tatacttcttatggctcatgcccat

SEQ ID NO: 1123354 - DNA, 25 bp, Homo sapien
ggtggtgcaggaggcattgctgatg

SEQ ID NO: 1123355 - DNA, 25 bp, Homo sapien
tggtggtgcaggaggcattgctgat

SEQ ID NO: 1123356 - DNA, 25 bp, Homo sapien
tggtgcaggaggcattgctgatgat

SEQ ID NO: 1123357 - DNA, 25 bp, Homo sapien
ctggtggtgcaggaggcattgctga

SEQ ID NO: 1123358 - DNA, 25 bp, Homo sapien
tgatgctgagtcgcttcatgatgcc

SEQ ID NO: 1123359 - DNA, 25 bp, Homo sapien
gatgctgagtcgcttcatgatgcca

SEQ ID NO: 1123360 - DNA, 25 bp, Homo sapien
gctgagtcgcttcatgatgccagag

SEQ ID NO: 1123361 - DNA, 25 bp, Homo sapien
tgctgagtcgcttcatgatgccaga

SEQ ID NO: 1123362 - DNA, 25 bp, Homo sapien
ttcccagaggggccatgagagtctt

SEQ ID NO: 1123363 - DNA, 25 bp, Homo sapien
cagtttcccagaggggccatgagag

SEQ ID NO: 1123364 - DNA, 25 bp, Homo sapien
gtttcccagaggggccatgagagtc

SEQ ID NO: 1123365 - DNA, 25 bp, Homo sapien
cacagtttcccagaggggccatgag

SEQ ID NO: 1123366 - DNA, 25 bp, Homo sapien
tagacacatgcagggatgatgtaat

SEQ ID NO: 1123367 - DNA, 25 bp, Homo sapien
acatgcagggatgatgtaatggaga

SEQ ID NO: 1123368 - DNA, 25 bp, Homo sapien
gcaccagtagacacatgcagggatg

SEQ ID NO: 1123369 - DNA, 25 bp, Homo sapien
ggcagcaccagtagacacatgcagg

SEQ ID NO: 1123370 - DNA, 25 bp, Homo sapien
tttggctggtttctccagagagcag

SEQ ID NO: 1123371 - DNA, 25 bp, Homo sapien
ctgagcttcctgttcggcttgggga

SEQ ID NO: 1123372 - DNA, 25 bp, Homo sapien
acaccactgagcttcctgttcggct

SEQ ID NO: 1123373 - DNA, 25 bp, Homo sapien
gtgggtacatggaaggccacaccac

SEQ ID NO: 1123374 - DNA, 25 bp, Homo sapien
ctgttaaagttggaggagacagcct

SEQ ID NO: 1123375 - DNA, 25 bp, Homo sapien
agacagcctggtgctcagtgtggcc

SEQ ID NO: 1123376 - DNA, 25 bp, Homo sapien
cagcctggtgctcagtgtggcccac

SEQ ID NO: 1123377 - DNA, 25 bp, Homo sapien
ggagacagcctggtgctcagtgtgg

SEQ ID NO: 1123378 - DNA, 25 bp, Homo sapien
gaaacgagcctgacaaagaggccgt

SEQ ID NO: 1123379 - DNA, 25 bp, Homo sapien
aacgagcctgacaaagaggccgttg

SEQ ID NO: 1123380 - DNA, 25 bp, Homo sapien
ccggaaacgagcctgacaaagaggc

SEQ ID NO: 1123381 - DNA, 25 bp, Homo sapien
cgagcctgacaaagaggccgttgag

SEQ ID NO: 1123382 - DNA, 25 bp, Homo sapien
gttgctgtagccaaattcattgtca

SEQ ID NO: 1123383 - DNA, 25 bp, Homo sapien
gctgtagccaaattcattgtcatac

SEQ ID NO: 1123384 - DNA, 25 bp, Homo sapien
cactttgttgctgtagccaaattca

SEQ ID NO: 1123385 - DNA, 25 bp, Homo sapien
tcactttgttgctgtagccaaattc

SEQ ID NO: 1123386 - DNA, 25 bp, Homo sapien
gaagccatgtggatcataaaggtta

SEQ ID NO: 1123387 - DNA, 25 bp, Homo sapien
ttcttggaagccatgtggatcataa

SEQ ID NO: 1123388 - DNA, 25 bp, Homo sapien
cttggaagccatgtggatcataaag

SEQ ID NO: 1123389 - DNA, 25 bp, Homo sapien
tggaagccatgtggatcataaaggt

SEQ ID NO: 1123390 - DNA, 25 bp, Homo sapien
caagagcatcctggtgaatattggc

SEQ ID NO: 1123391 - DNA, 25 bp, Homo sapien
ccatttccagcaccgtggctttgat

SEQ ID NO: 1123392 - DNA, 25 bp, Homo sapien
gactgcagatcccttacatggtcca

SEQ ID NO: 1123393 - DNA, 25 bp, Homo sapien
ccactcaggattggcacacaagagc

SEQ ID NO: 1123394 - DNA, 25 bp, Homo sapien
tctctctgcgaatccagccttcagc

SEQ ID NO: 1123395 - DNA, 25 bp, Homo sapien
taagaactattgaagttcacggcca

SEQ ID NO: 1123396 - DNA, 25 bp, Homo sapien
catgagggcacatccatggatatca

SEQ ID NO: 1123397 - DNA, 25 bp, Homo sapien
ccatggatatcataaagcagccctt

SEQ ID NO: 1123398 - DNA, 25 bp, Homo sapien
gagttagtctcaaatgccagagtga

SEQ ID NO: 1123399 - DNA, 25 bp, Homo sapien
cagagtgaaagtccttgcctatcac

SEQ ID NO: 1123400 - DNA, 25 bp, Homo sapien
agctagagttaggtttggccatccc

SEQ ID NO: 1123401 - DNA, 25 bp, Homo sapien
tggccatccctagtgttcagtggag

SEQ ID NO: 1123402 - DNA, 25 bp, Homo sapien
gggactctaatgcagaagttgagca

SEQ ID NO: 1123403 - DNA, 25 bp, Homo sapien
gcccagaggatgtttacaggaaaga

SEQ ID NO: 1123404 - DNA, 25 bp, Homo sapien
ctgtcagactagaaatagggactct

SEQ ID NO: 1123405 - DNA, 25 bp, Homo sapien
cctttgacttgtaggactgtcagac

SEQ ID NO: 1123406 - DNA, 25 bp, Homo sapien
ggtcaaccgtcaactgctgaatcca

SEQ ID NO: 1123407 - DNA, 25 bp, Homo sapien
caacctgctggaggtcaaccgtcaa

SEQ ID NO: 1123408 - DNA, 25 bp, Homo sapien
tgctgaatccataacagtcgggttc

SEQ ID NO: 1123409 - DNA, 25 bp, Homo sapien
cataacagtcgggttctctgttgcc

SEQ ID NO: 1123410 - DNA, 25 bp, Homo sapien
tcatggtggcgtgtgtttgtagttc

SEQ ID NO: 1123411 - DNA, 25 bp, Homo sapien
tccagcctcagaaggatagtcaagg

SEQ ID NO: 1123412 - DNA, 25 bp, Homo sapien
atgataaataatggccatgtgcact

SEQ ID NO: 1123413 - DNA, 25 bp, Homo sapien
aaacatgtttcggtagcactcaata

SEQ ID NO: 1123414 - DNA, 25 bp, Homo sapien
catcaagcccagacctagaataggg

SEQ ID NO: 1123415 - DNA, 25 bp, Homo sapien
cacagtcggagctgagggaaaatcg

SEQ ID NO: 1123416 - DNA, 25 bp, Homo sapien
gatgcagcccggctgagagcagggt

SEQ ID NO: 1123417 - DNA, 25 bp, Homo sapien
gaaaatcggtgaacatcaagcccag

SEQ ID NO: 1123418 - DNA, 25 bp, Homo sapien
gcaatgaccacggaggatacagata

SEQ ID NO: 1123419 - DNA, 25 bp, Homo sapien
ttccaaggtggtagtttccctctgc

SEQ ID NO: 1123420 - DNA, 25 bp, Homo sapien
gctgacaaggaatcatccagaacct

SEQ ID NO: 1123421 - DNA, 25 bp, Homo sapien
gataggactatagtctcttcccagg

SEQ ID NO: 1123422 - DNA, 25 bp, Homo sapien
atggcccccagcaagtggagaagaa

SEQ ID NO: 1123423 - DNA, 25 bp, Homo sapien
gcccccagcaagtggagaagaatga

SEQ ID NO: 1123424 - DNA, 25 bp, Homo sapien
ggcccccagcaagtggagaagaatg

SEQ ID NO: 1123425 - DNA, 25 bp, Homo sapien
tggcccccagcaagtggagaagaat

SEQ ID NO: 1123426 - DNA, 25 bp, Homo sapien
tggccataggacaatagatgagggt

SEQ ID NO: 1123427 - DNA, 25 bp, Homo sapien
tggtgtccaagagcagtcaggaggc

SEQ ID NO: 1123428 - DNA, 25 bp, Homo sapien
gacagatgccggttgtgtctgacta

SEQ ID NO: 1123429 - DNA, 25 bp, Homo sapien
aggcccttgccagattctaggacag

SEQ ID NO: 1123430 - DNA, 25 bp, Homo sapien
tatgtagaaagcaaggcacaaaagg

SEQ ID NO: 1123431 - DNA, 25 bp, Homo sapien
gtctttgctgctccacggtgttcat

SEQ ID NO: 1123432 - DNA, 25 bp, Homo sapien
cttggatctccatgcaactgccatg

SEQ ID NO: 1123433 - DNA, 25 bp, Homo sapien
aagttatgtagaaagcaaggcacaa

SEQ ID NO: 1123434 - DNA, 25 bp, Homo sapien
tggccttcaaggccactgtttaaga

SEQ ID NO: 1123435 - DNA, 25 bp, Homo sapien
atggccttcaaggccactgtttaag

SEQ ID NO: 1123436 - DNA, 25 bp, Homo sapien
gccttcaaggccactgtttaagaaa

SEQ ID NO: 1123437 - DNA, 25 bp, Homo sapien
ggccttcaaggccactgtttaagaa

SEQ ID NO: 1123438 - DNA, 25 bp, Homo sapien
caatggagatagtagacaaagccct

SEQ ID NO: 1123439 - DNA, 25 bp, Homo sapien
aatggagatagtagacaaagccctt

SEQ ID NO: 1123440 - DNA, 25 bp, Homo sapien
tagacaaagcccttacatactcaca

SEQ ID NO: 1123441 - DNA, 25 bp, Homo sapien
ttttgcctcagagtgccacactggt

SEQ ID NO: 1123442 - DNA, 25 bp, Homo sapien
acctcttatgtcaggctggcactgc

SEQ ID NO: 1123443 - DNA, 25 bp, Homo sapien
tggtgtcatcccctgatcctgtggc

SEQ ID NO: 1123444 - DNA, 25 bp, Homo sapien
gcagctccacctcttatgtcaggct

SEQ ID NO: 1123445 - DNA, 25 bp, Homo sapien
actgccggtaccagcgagccggcga

SEQ ID NO: 1123446 - DNA, 25 bp, Homo sapien
gctaccttactgcacgcagcgcggg

SEQ ID NO: 1123447 - DNA, 25 bp, Homo sapien
gcggcggcggctaccttactgcacg

SEQ ID NO: 1123448 - DNA, 25 bp, Homo sapien
ggcggctaccttactgcacgcagcg

SEQ ID NO: 1123449 - DNA, 25 bp, Homo sapien
caggaacgcggcaccagccagcgag

SEQ ID NO: 1123450 - DNA, 25 bp, Homo sapien
cagccagcgaggagtttcgcgccgt

SEQ ID NO: 1123451 - DNA, 25 bp, Homo sapien
gcgcggcgccgcttgtggagcaggc

SEQ ID NO: 1123452 - DNA, 25 bp, Homo sapien
tcaagtacttgctgaaggccgccat

SEQ ID NO: 1123453 - DNA, 25 bp, Homo sapien
gccgtcgtggcggggactcgcggac

SEQ ID NO: 1123454 - DNA, 25 bp, Homo sapien
ctgggaccgacgccgtcgtggcggg

SEQ ID NO: 1123455 - DNA, 25 bp, Homo sapien
ccgacgccgtcgtggcggggactcg

SEQ ID NO: 1123456 - DNA, 25 bp, Homo sapien
gtcgtggcggggactcgcggacacc

SEQ ID NO: 1123457 - DNA, 25 bp, Homo sapien
tgctggctgggcgccggttcgcccg

SEQ ID NO: 1123458 - DNA, 25 bp, Homo sapien
gtggagcgaggtcgccggacaggcc

SEQ ID NO: 1123459 - DNA, 25 bp, Homo sapien
ggaggccgctgcctgagtgctggct

SEQ ID NO: 1123460 - DNA, 25 bp, Homo sapien
ggcacagaagaattcgcactcccgg

SEQ ID NO: 1123461 - DNA, 25 bp, Homo sapien
cacagaagggggtgatgtagggaag

SEQ ID NO: 1123462 - DNA, 25 bp, Homo sapien
cagaagggggtgatgtagggaaggg

SEQ ID NO: 1123463 - DNA, 25 bp, Homo sapien
gacacagaagggggtgatgtaggga

SEQ ID NO: 1123464 - DNA, 25 bp, Homo sapien
ccagaaagttgacacagaagggggt

SEQ ID NO: 1123465 - DNA, 25 bp, Homo sapien
agatgagatggcaaaaccagaacac

SEQ ID NO: 1123466 - DNA, 25 bp, Homo sapien
atgagatggcaaaaccagaacacac

SEQ ID NO: 1123467 - DNA, 25 bp, Homo sapien
ctgaagatgagatggcaaaaccaga

SEQ ID NO: 1123468 - DNA, 25 bp, Homo sapien
gaagatgagatggcaaaaccagaac

SEQ ID NO: 1123469 - DNA, 25 bp, Homo sapien
caatagcagttagtcgggaatcgag

SEQ ID NO: 1123470 - DNA, 25 bp, Homo sapien
caagtggaccgggaatagtttcata

SEQ ID NO: 1123471 - DNA, 25 bp, Homo sapien
gaatcgagccaaacctcgtccaagt

SEQ ID NO: 1123472 - DNA, 25 bp, Homo sapien
tagacggcaatcctgccaagtggac

SEQ ID NO: 1123473 - DNA, 25 bp, Homo sapien
caatgactggcaagaacgcttggga

SEQ ID NO: 1123474 - DNA, 25 bp, Homo sapien
tctaagtccgacagaaccgatccag

SEQ ID NO: 1123475 - DNA, 25 bp, Homo sapien
gcactgaaattctcccgcggtggaa

SEQ ID NO: 1123476 - DNA, 25 bp, Homo sapien
gatgaaatgccaccgaccaaatgtt

SEQ ID NO: 1123477 - DNA, 25 bp, Homo sapien
tctaacccatgacagagccgaacta

SEQ ID NO: 1123478 - DNA, 25 bp, Homo sapien
ccgaactagggaattaaagatgact

SEQ ID NO: 1123479 - DNA, 25 bp, Homo sapien
ggatacctagagcagtagtctccaa

SEQ ID NO: 1123480 - DNA, 25 bp, Homo sapien
tcaggatctgatgtaggcaaaagcc

SEQ ID NO: 1123481 - DNA, 25 bp, Homo sapien
tttactaaacaatatatcttgggca

SEQ ID NO: 1123482 - DNA, 25 bp, Homo sapien
ctctttactaaacaatatatcttgg

SEQ ID NO: 1123483 - DNA, 25 bp, Homo sapien
tctttactaaacaatatatcttggg

SEQ ID NO: 1123484 - DNA, 25 bp, Homo sapien
ctttactaaacaatatatcttgggc

SEQ ID NO: 1123485 - DNA, 25 bp, Homo sapien
cttccacatggttaattcgaactta

SEQ ID NO: 1123486 - DNA, 25 bp, Homo sapien
gttaattcgaacttaaggactctca

SEQ ID NO: 1123487 - DNA, 25 bp, Homo sapien
ttaaggactctcataattagatacc

SEQ ID NO: 1123488 - DNA, 25 bp, Homo sapien
gaacttaaggactctcataattaga

SEQ ID NO: 1123489 - DNA, 25 bp, Homo sapien
cacttcatcacttttctctctccaa

SEQ ID NO: 1123490 - DNA, 25 bp, Homo sapien
catcacttttctctctccaagtttc

SEQ ID NO: 1123491 - DNA, 25 bp, Homo sapien
cacttttctctctccaagtttccat

SEQ ID NO: 1123492 - DNA, 25 bp, Homo sapien
ttcatcacttttctctctccaagtt

SEQ ID NO: 1123493 - DNA, 25 bp, Homo sapien
tcacatgatcagtcagctctcccat

SEQ ID NO: 1123494 - DNA, 25 bp, Homo sapien
tgttctagggaccatgattttcaga

SEQ ID NO: 1123495 - DNA, 25 bp, Homo sapien
cagaatctgtatgagccttgagaaa

SEQ ID NO: 1123496 - DNA, 25 bp, Homo sapien
tctttacaaaatgttctagggacca

SEQ ID NO: 1123497 - DNA, 25 bp, Homo sapien
tgtccaccacagctcgctccttttt

SEQ ID NO: 1123498 - DNA, 25 bp, Homo sapien
gcataacagcaataagtaccaagta

SEQ ID NO: 1123499 - DNA, 25 bp, Homo sapien
ttcgagacaccagcataacagcaat

SEQ ID NO: 1123500 - DNA, 25 bp, Homo sapien
gttcgagacaccagcataacagcaa

SEQ ID NO: 1123501 - DNA, 25 bp, Homo sapien
taacagcaataagtaccaagtaacc

SEQ ID NO: 1123502 - DNA, 25 bp, Homo sapien
gataatcagatcatcagtccagagg

SEQ ID NO: 1123503 - DNA, 25 bp, Homo sapien
gattccaatcattctgcagccaagg

SEQ ID NO: 1123504 - DNA, 25 bp, Homo sapien
ctatagctgagcaatcggaatggca

SEQ ID NO: 1123505 - DNA, 25 bp, Homo sapien
ggaacaaatctccagctatagctga

SEQ ID NO: 1123506 - DNA, 25 bp, Homo sapien
gaggaaggcctctaatgtgaatgac

SEQ ID NO: 1123507 - DNA, 25 bp, Homo sapien
taaaactgagtactacacacacgtg

SEQ ID NO: 1123508 - DNA, 25 bp, Homo sapien
cacacgtgcacatgattagggtccc

SEQ ID NO: 1123509 - DNA, 25 bp, Homo sapien
gacaggatatccctaagcttaagtg

SEQ ID NO: 1123510 - DNA, 25 bp, Homo sapien
tctggacttactttagaaaaggcaa

SEQ ID NO: 1123511 - DNA, 25 bp, Homo sapien
aattatcctgtacgaatgtacaata

SEQ ID NO: 1123512 - DNA, 25 bp, Homo sapien
tttgcactgtagcttaaatactgag

SEQ ID NO: 1123513 - DNA, 25 bp, Homo sapien
caatttgcactgtagcttaaatact

SEQ ID NO: 1123514 - DNA, 25 bp, Homo sapien
taagatttgcccatactccaaagtc

SEQ ID NO: 1123515 - DNA, 25 bp, Homo sapien
accaaagtgctttagtgctgcccaa

SEQ ID NO: 1123516 - DNA, 25 bp, Homo sapien
aatggtttaccattggagtagcagc

SEQ ID NO: 1123517 - DNA, 25 bp, Homo sapien
tctgcttgtagccaaatgggtgaaa

SEQ ID NO: 1123518 - DNA, 25 bp, Homo sapien
gagaggggtttgtagcatgaaacat

SEQ ID NO: 1123519 - DNA, 25 bp, Homo sapien
aaagcttttaatgtatagtatgtgc

SEQ ID NO: 1123520 - DNA, 25 bp, Homo sapien
tcaaagcttttaatgtatagtatgt

SEQ ID NO: 1123521 - DNA, 25 bp, Homo sapien
tgagaggggtttgtagcatgaaaca

SEQ ID NO: 1123522 - DNA, 25 bp, Homo sapien
tttcctgctacgaccaatgatacca

SEQ ID NO: 1123523 - DNA, 25 bp, Homo sapien
gcagcgatgaagttgagtaagtatc

SEQ ID NO: 1123524 - DNA, 25 bp, Homo sapien
aatctttcctgctacgaccaatgat

SEQ ID NO: 1123525 - DNA, 25 bp, Homo sapien
gatgaagttgagtaagtatctcttg

SEQ ID NO: 1123526 - DNA, 25 bp, Homo sapien
tagtgagccttactcggaagcacag

SEQ ID NO: 1123527 - DNA, 25 bp, Homo sapien
cttcaagaagttattaaccagagag

SEQ ID NO: 1123528 - DNA, 25 bp, Homo sapien
cctcatagaggtatttagtgagcct

SEQ ID NO: 1123529 - DNA, 25 bp, Homo sapien
ctcggaagcacagtttaagctcatt

SEQ ID NO: 1123530 - DNA, 25 bp, Homo sapien
tctggattagctattctgttgtcca

SEQ ID NO: 1123531 - DNA, 25 bp, Homo sapien
gctggtctggattagctattctgtt

SEQ ID NO: 1123532 - DNA, 25 bp, Homo sapien
agatttgaatacagatcgactacac

SEQ ID NO: 1123533 - DNA, 25 bp, Homo sapien
gaatacagatcgactacactgttac

SEQ ID NO: 1123534 - DNA, 25 bp, Homo sapien
ctatcacagtcaggagctttggcaa

SEQ ID NO: 1123535 - DNA, 25 bp, Homo sapien
ggcctatcacagtcaggagctttgg

SEQ ID NO: 1123536 - DNA, 25 bp, Homo sapien
aggcctatcacagtcaggagctttg

SEQ ID NO: 1123537 - DNA, 25 bp, Homo sapien
cctatcacagtcaggagctttggca

SEQ ID NO: 1123538 - DNA, 25 bp, Homo sapien
gcttctggagagctaaataaataac

SEQ ID NO: 1123539 - DNA, 25 bp, Homo sapien
tagttgtcagagttcccgagtttgg

SEQ ID NO: 1123540 - DNA, 25 bp, Homo sapien
ggtgtacagccccactacaagtact

SEQ ID NO: 1123541 - DNA, 25 bp, Homo sapien
catggaaagttgtatagatacaccc

SEQ ID NO: 1123542 - DNA, 25 bp, Homo sapien
tgagctccaattgcactcgttaact

SEQ ID NO: 1123543 - DNA, 25 bp, Homo sapien
tccaattgcactcgttaacttaaag

SEQ ID NO: 1123544 - DNA, 25 bp, Homo sapien
caattgcactcgttaacttaaagat

SEQ ID NO: 1123545 - DNA, 25 bp, Homo sapien
gctccaattgcactcgttaacttaa

SEQ ID NO: 1123546 - DNA, 25 bp, Homo sapien
taatgccacaaaatttttccaagta

SEQ ID NO: 1123547 - DNA, 25 bp, Homo sapien
agaagcgggtctcgctttttgtcca

SEQ ID NO: 1123548 - DNA, 25 bp, Homo sapien
ttcctcttaccactgtagcttatcc

SEQ ID NO: 1123549 - DNA, 25 bp, Homo sapien
tacacagtagcctctacacttttac

SEQ ID NO: 1123550 - DNA, 25 bp, Homo sapien
tgaaagaaattgccctactgggtaa

SEQ ID NO: 1123551 - DNA, 25 bp, Homo sapien
tcttaccactgtagcttatccctca

SEQ ID NO: 1123552 - DNA, 25 bp, Homo sapien
gccgagaattaacatatctatattc

SEQ ID NO: 1123553 - DNA, 25 bp, Homo sapien
gcccagaaacaaccaagtaggccat

SEQ ID NO: 1123554 - DNA, 25 bp, Homo sapien
gaagtcgagttaggaatagcccaga

SEQ ID NO: 1123555 - DNA, 25 bp, Homo sapien
taccaatgggtcttcgaagtcgagt

SEQ ID NO: 1123556 - DNA, 25 bp, Homo sapien
tagggtcccaactggtctaagccaa

SEQ ID NO: 1123557 - DNA, 25 bp, Homo sapien
taaagacacaccaggcgagatggcc

SEQ ID NO: 1123558 - DNA, 25 bp, Homo sapien
cataggtatcctggctgcaaaagac

SEQ ID NO: 1123559 - DNA, 25 bp, Homo sapien
ggtcacaagaagaattagcccgagg

SEQ ID NO: 1123560 - DNA, 25 bp, Homo sapien
cagttttcggaagactgagtggact

SEQ ID NO: 1123561 - DNA, 25 bp, Homo sapien
tattcccattgtaaaaggcaatttc

SEQ ID NO: 1123562 - DNA, 25 bp, Homo sapien
ttttcggaagactgagtggactgtc

SEQ ID NO: 1123563 - DNA, 25 bp, Homo sapien
tcttttattcccattgtaaaaggca

SEQ ID NO: 1123564 - DNA, 25 bp, Homo sapien
tgctcaagctggagatacaatgaat

SEQ ID NO: 1123565 - DNA, 25 bp, Homo sapien
cctgagtacagggtagcttgttaac

SEQ ID NO: 1123566 - DNA, 25 bp, Homo sapien
tgttaacaacttggtatcttctgca

SEQ ID NO: 1123567 - DNA, 25 bp, Homo sapien
tcttctgcaactagacaatctctgg

SEQ ID NO: 1123568 - DNA, 25 bp, Homo sapien
aatactatcaatgaagcccattgaa

SEQ ID NO: 1123569 - DNA, 25 bp, Homo sapien
atcaatgaagcccattgaaaaccga

SEQ ID NO: 1123570 - DNA, 25 bp, Homo sapien
caatgaagcccattgaaaaccgaaa

SEQ ID NO: 1123571 - DNA, 25 bp, Homo sapien
tgaagcccattgaaaaccgaaacaa

SEQ ID NO: 1123572 - DNA, 25 bp, Homo sapien
gatgtcgaggatgagacaaatctaa

SEQ ID NO: 1123573 - DNA, 25 bp, Homo sapien
caactaggtaaccaacaacagtggc

SEQ ID NO: 1123574 - DNA, 25 bp, Homo sapien
tctagaagttccgaatgtgtactct

SEQ ID NO: 1123575 - DNA, 25 bp, Homo sapien
caaatctaagaaagggcgactgaca

SEQ ID NO: 1123576 - DNA, 25 bp, Homo sapien
gccaatctagtcatttcacgcccag

SEQ ID NO: 1123577 - DNA, 25 bp, Homo sapien
ccagccaaaactattcgacccagag

SEQ ID NO: 1123578 - DNA, 25 bp, Homo sapien
gcattcttccactttggtagtaatc

SEQ ID NO: 1123579 - DNA, 25 bp, Homo sapien
gcttgagacattcgcaaaagcattc

SEQ ID NO: 1123580 - DNA, 25 bp, Homo sapien
taaatccttcagtacttgcattaat

SEQ ID NO: 1123581 - DNA, 25 bp, Homo sapien
taattctgtaatccgagcagtaaaa

SEQ ID NO: 1123582 - DNA, 25 bp, Homo sapien
gtgcgctcatatttgccatgattta

SEQ ID NO: 1123583 - DNA, 25 bp, Homo sapien
tgtgcgctcatatttgccatgattt

SEQ ID NO: 1123584 - DNA, 25 bp, Homo sapien
ggaatgacttgtactccttcaatac

SEQ ID NO: 1123585 - DNA, 25 bp, Homo sapien
agcaccaggtatcaagggaatgact

SEQ ID NO: 1123586 - DNA, 25 bp, Homo sapien
tgttatctgcaataatgatttctcc

SEQ ID NO: 1123587 - DNA, 25 bp, Homo sapien
tatctgcaataatgatttctccagc

SEQ ID NO: 1123588 - DNA, 25 bp, Homo sapien
cgttgctaaaggaacatgatcaaac

SEQ ID NO: 1123589 - DNA, 25 bp, Homo sapien
taaggtctcggatcaaaacatctcc

SEQ ID NO: 1123590 - DNA, 25 bp, Homo sapien
aaattaaggtctcggatcaaaacat

SEQ ID NO: 1123591 - DNA, 25 bp, Homo sapien
acatctccatttggcgttgctaaag

SEQ ID NO: 1123592 - DNA, 25 bp, Homo sapien
aaaagtgaactctttccgcagccat

SEQ ID NO: 1123593 - DNA, 25 bp, Homo sapien
tccgcagccatttggaccacaaatt

SEQ ID NO: 1123594 - DNA, 25 bp, Homo sapien
aattagaacattagccccagatcga

SEQ ID NO: 1123595 - DNA, 25 bp, Homo sapien
tcaccaagaacacggaaaagtgaac

SEQ ID NO: 1123596 - DNA, 25 bp, Homo sapien
ttcaggtttagttagacgtcctcca

SEQ ID NO: 1123597 - DNA, 25 bp, Homo sapien
tcaggtttagttagacgtcctccaa

SEQ ID NO: 1123598 - DNA, 25 bp, Homo sapien
ttctcgtccatctggatatatcact

SEQ ID NO: 1123599 - DNA, 25 bp, Homo sapien
ggatatatcacttgatctcgaagtg

SEQ ID NO: 1123600 - DNA, 25 bp, Homo sapien
gtgttccaagggtcatgtaaggtct

SEQ ID NO: 1123601 - DNA, 25 bp, Homo sapien
tcgaagtgttccaagggtcatgtaa

SEQ ID NO: 1123602 - DNA, 25 bp, Homo sapien
ggacattgtctaagtattccttcag

SEQ ID NO: 1123603 - DNA, 25 bp, Homo sapien
cactgagtacgtccatccaatcctg

SEQ ID NO: 1123604 - DNA, 25 bp, Homo sapien
cagcctccttcacgttcaaggatat

SEQ ID NO: 1123605 - DNA, 25 bp, Homo sapien
ggatatgacccaactggacattgtc

SEQ ID NO: 1123606 - DNA, 25 bp, Homo sapien
tattggtatatagtcggatctgcag

SEQ ID NO: 1123607 - DNA, 25 bp, Homo sapien
cctgagtgatacaaaagagatgtct

SEQ ID NO: 1123608 - DNA, 25 bp, Homo sapien
ggatcgtttctaataccttcagcta

SEQ ID NO: 1123609 - DNA, 25 bp, Homo sapien
tttcataacccagccaggattacct

SEQ ID NO: 1123610 - DNA, 25 bp, Homo sapien
cttgcaaaatcagggactcggaggt

SEQ ID NO: 1123611 - DNA, 25 bp, Homo sapien
tctgggcacgcctttgaattcctaa

SEQ ID NO: 1123612 - DNA, 25 bp, Homo sapien
tctcacgttatagcactagccaggc

SEQ ID NO: 1123613 - DNA, 25 bp, Homo sapien
tagccaggcaagtcacactattagg

SEQ ID NO: 1123614 - DNA, 25 bp, Homo sapien
ggagtcctccctggtctggtccttc

SEQ ID NO: 1123615 - DNA, 25 bp, Homo sapien
attcccttccctaatcttgaacact

SEQ ID NO: 1123616 - DNA, 25 bp, Homo sapien
tacttgggtatctcacaggactctc

SEQ ID NO: 1123617 - DNA, 25 bp, Homo sapien
cctggctgaaacagcaagacgctat

SEQ ID NO: 1123618 - DNA, 25 bp, Homo sapien
gtgtaaaacacaggcagacctaaaa

SEQ ID NO: 1123619 - DNA, 25 bp, Homo sapien
cgtacttcatgggaaatactaattg

SEQ ID NO: 1123620 - DNA, 25 bp, Homo sapien
tactaattgctcagagtaaaacaca

SEQ ID NO: 1123621 - DNA, 25 bp, Homo sapien
ccttaagactgatgagagaggaagt

SEQ ID NO: 1123622 - DNA, 25 bp, Homo sapien
ctttcgacaatgactataaatgtag

SEQ ID NO: 1123623 - DNA, 25 bp, Homo sapien
taactgcacttgtgcattcatccaa

SEQ ID NO: 1123624 - DNA, 25 bp, Homo sapien
aaatgtagccttccacgtcgacact

SEQ ID NO: 1123625 - DNA, 25 bp, Homo sapien
tccacgtcgacactaactgcacttg

SEQ ID NO: 1123626 - DNA, 25 bp, Homo sapien
ggctcctcaaactgagcacctgcgt

SEQ ID NO: 1123627 - DNA, 25 bp, Homo sapien
tgttacttagtgacctggaatcttc

SEQ ID NO: 1123628 - DNA, 25 bp, Homo sapien
tttggacatagtttacactaggtag

SEQ ID NO: 1123629 - DNA, 25 bp, Homo sapien
tacactaggtaggaggccatggctc

SEQ ID NO: 1123630 - DNA, 25 bp, Homo sapien
catctgtacatcacggtcaccaaag

SEQ ID NO: 1123631 - DNA, 25 bp, Homo sapien
ccatctgtacatcacggtcaccaaa

SEQ ID NO: 1123632 - DNA, 25 bp, Homo sapien
atctgtacatcacggtcaccaaaga

SEQ ID NO: 1123633 - DNA, 25 bp, Homo sapien
ctgtacatcacggtcaccaaagacc

SEQ ID NO: 1123634 - DNA, 25 bp, Homo sapien
gaaagtactggccatcaaccacata

SEQ ID NO: 1123635 - DNA, 25 bp, Homo sapien
gaaagcactactgccatctaatggg

SEQ ID NO: 1123636 - DNA, 25 bp, Homo sapien
ggctggcaaatgcatgcttagggca

SEQ ID NO: 1123637 - DNA, 25 bp, Homo sapien
aaaaggtcaatagtgccaggactga

SEQ ID NO: 1123638 - DNA, 25 bp, Homo sapien
acacagtgaagagagtgatgccaac

SEQ ID NO: 1123639 - DNA, 25 bp, Homo sapien
agagatttcctatgagacacagtga

SEQ ID NO: 1123640 - DNA, 25 bp, Homo sapien
tgagacacagtgaagagagtgatgc

SEQ ID NO: 1123641 - DNA, 25 bp, Homo sapien
tcatgatgtttccaaagagatttcc

SEQ ID NO: 1123642 - DNA, 25 bp, Homo sapien
tgccgatatatcctaacctctgaag

SEQ ID NO: 1123643 - DNA, 25 bp, Homo sapien
gaccaaggatctcagctaccagtag

SEQ ID NO: 1123644 - DNA, 25 bp, Homo sapien
tataagcatcccacaaatcagaatg

SEQ ID NO: 1123645 - DNA, 25 bp, Homo sapien
tgcttccgtaactccatgaccaagg

SEQ ID NO: 1123646 - DNA, 25 bp, Homo sapien
taagagccaaactcaactgtatctt

SEQ ID NO: 1123647 - DNA, 25 bp, Homo sapien
aagagccaaactcaactgtatcttc

SEQ ID NO: 1123648 - DNA, 25 bp, Homo sapien
ctaagagccaaactcaactgtatct

SEQ ID NO: 1123649 - DNA, 25 bp, Homo sapien
gaagactatcttgctagaacaggac

SEQ ID NO: 1123650 - DNA, 25 bp, Homo sapien
gtttccaactaccacagggcacagg

SEQ ID NO: 1123651 - DNA, 25 bp, Homo sapien
tgtgatacatggtaacccctccttg

SEQ ID NO: 1123652 - DNA, 25 bp, Homo sapien
gacttcgaatggtttacatcccagg

SEQ ID NO: 1123653 - DNA, 25 bp, Homo sapien
gaaaaagatgttccgtggtcaatca

SEQ ID NO: 1123654 - DNA, 25 bp, Homo sapien
tataaggcagctaggagaatacttc

SEQ ID NO: 1123655 - DNA, 25 bp, Homo sapien
tatgtcttggcatgcagcgtggtgc

SEQ ID NO: 1123656 - DNA, 25 bp, Homo sapien
tttactgtgggtcttcgaagaacca

SEQ ID NO: 1123657 - DNA, 25 bp, Homo sapien
gacttcaatccatgtaggaaagtaa

SEQ ID NO: 1123658 - DNA, 25 bp, Homo sapien
tctgggcaccttcctaatatgcttt

SEQ ID NO: 1123659 - DNA, 25 bp, Homo sapien
aagtggcattaaacatttgagagct

SEQ ID NO: 1123660 - DNA, 25 bp, Homo sapien
ggaaattgggtgcatttctaggact

SEQ ID NO: 1123661 - DNA, 25 bp, Homo sapien
gcactgtgaccgagaacttttaaga

SEQ ID NO: 1123662 - DNA, 25 bp, Homo sapien
cactcaaggagtaaccaggtcgtcc

SEQ ID NO: 1123663 - DNA, 25 bp, Homo sapien
tagattatatattccgcactcaagg

SEQ ID NO: 1123664 - DNA, 25 bp, Homo sapien
gtatttcggagcatgaagaccctgg

SEQ ID NO: 1123665 - DNA, 25 bp, Homo sapien
gcagcaggacacagtagacattcgt

SEQ ID NO: 1123666 - DNA, 25 bp, Homo sapien
gctgagcactggatacacaaactgt

SEQ ID NO: 1123667 - DNA, 25 bp, Homo sapien
tagcaacaagtcacagatttccctg

SEQ ID NO: 1123668 - DNA, 25 bp, Homo sapien
ccacagaggctgtagagtctaaccc

SEQ ID NO: 1123669 - DNA, 25 bp, Homo sapien
ggaagaattcttccaaggcgccctc

SEQ ID NO: 1123670 - DNA, 25 bp, Homo sapien
cactatctctggtcgtaccgggcga

SEQ ID NO: 1123671 - DNA, 25 bp, Homo sapien
gaattctccagtcgtgtcttgcagg

SEQ ID NO: 1123672 - DNA, 25 bp, Homo sapien
tgcatttcggtggaactcagtccca

SEQ ID NO: 1123673 - DNA, 25 bp, Homo sapien
aggagatgctctgttctttatcctc

SEQ ID NO: 1123674 - DNA, 25 bp, Homo sapien
caaggagatgctctgttctttatcc

SEQ ID NO: 1123675 - DNA, 25 bp, Homo sapien
tgctctgttctttatcctcctggag

SEQ ID NO: 1123676 - DNA, 25 bp, Homo sapien
tctgttctttatcctcctggagcat

SEQ ID NO: 1123677 - DNA, 25 bp, Homo sapien
tcctataaaacagccccatccctat

SEQ ID NO: 1123678 - DNA, 25 bp, Homo sapien
ataaaacagccccatccctatctcc

SEQ ID NO: 1123679 - DNA, 25 bp, Homo sapien
aacagccccatccctatctcccttc

SEQ ID NO: 1123680 - DNA, 25 bp, Homo sapien
cagccccatccctatctcccttcgc

SEQ ID NO: 1123681 - DNA, 25 bp, Homo sapien
gccagaaagaaatccaatcatgatc

SEQ ID NO: 1123682 - DNA, 25 bp, Homo sapien
cagaaagaaatccaatcatgatcag

SEQ ID NO: 1123683 - DNA, 25 bp, Homo sapien
ctgtggccagaaagaaatccaatca

SEQ ID NO: 1123684 - DNA, 25 bp, Homo sapien
tggccagaaagaaatccaatcatga

SEQ ID NO: 1123685 - DNA, 25 bp, Homo sapien
gaagcctcggcatgttcccgaaata

SEQ ID NO: 1123686 - DNA, 25 bp, Homo sapien
tcccgaaatacttgatgagcataac

SEQ ID NO: 1123687 - DNA, 25 bp, Homo sapien
taacagtgtggataaacatttagta

SEQ ID NO: 1123688 - DNA, 25 bp, Homo sapien
aagccaggaagcctcggcatgttcc

SEQ ID NO: 1123689 - DNA, 25 bp, Homo sapien
taaatccatcgtttccttggagaga

SEQ ID NO: 1123690 - DNA, 25 bp, Homo sapien
cagggaagggtcataaaaggaatca

SEQ ID NO: 1123691 - DNA, 25 bp, Homo sapien
tctgggctgccactatgactgccac

SEQ ID NO: 1123692 - DNA, 25 bp, Homo sapien
tctgttctacatgaaacgcttccat

SEQ ID NO: 1123693 - DNA, 25 bp, Homo sapien
cagacccactcggtgctgaagcagc

SEQ ID NO: 1123694 - DNA, 25 bp, Homo sapien
agcggtcaccctcttgtagctcaga

SEQ ID NO: 1123695 - DNA, 25 bp, Homo sapien
tgaagcagctccacgggctgctttc

SEQ ID NO: 1123696 - DNA, 25 bp, Homo sapien
gggttagaattaggattagcggtca

SEQ ID NO: 1123697 - DNA, 25 bp, Homo sapien
tttcctgtctgcagtcgaagccctg

SEQ ID NO: 1123698 - DNA, 25 bp, Homo sapien
ttgggccacagtggccgaaagagcc

SEQ ID NO: 1123699 - DNA, 25 bp, Homo sapien
aggcccctcaggcaagcttgggcca

SEQ ID NO: 1123700 - DNA, 25 bp, Homo sapien
ttaactcagttcgatgatgggatga

SEQ ID NO: 1123701 - DNA, 25 bp, Homo sapien
gacaatttcctactatctcaatcaa

SEQ ID NO: 1123702 - DNA, 25 bp, Homo sapien
tttcctactatctcaatcaattcag

SEQ ID NO: 1123703 - DNA, 25 bp, Homo sapien
cagacaatttcctactatctcaatc

SEQ ID NO: 1123704 - DNA, 25 bp, Homo sapien
tactatctcaatcaattcagcggat

SEQ ID NO: 1123705 - DNA, 25 bp, Homo sapien
gactgatgacgtcaccagcatcatc

SEQ ID NO: 1123706 - DNA, 25 bp, Homo sapien
atcctcaacaagtgtctgtgacagc

SEQ ID NO: 1123707 - DNA, 25 bp, Homo sapien
tgatgacgtcaccagcatcatcctc

SEQ ID NO: 1123708 - DNA, 25 bp, Homo sapien
ccagcatcatcctcaacaagtgtct

SEQ ID NO: 1123709 - DNA, 25 bp, Homo sapien
tatcctgtataggaccccaagccac

SEQ ID NO: 1123710 - DNA, 25 bp, Homo sapien
aataactgagcgaacacaatgagcc

SEQ ID NO: 1123711 - DNA, 25 bp, Homo sapien
cacaggtgaagaactaatgttgacg

SEQ ID NO: 1123712 - DNA, 25 bp, Homo sapien
gaaaaaagctaagcctcgcacccta

SEQ ID NO: 1123713 - DNA, 25 bp, Homo sapien
gctcaggcaacttgttggaaggaca

SEQ ID NO: 1123714 - DNA, 25 bp, Homo sapien
caagtaagctgtattttgcactcca

SEQ ID NO: 1123715 - DNA, 25 bp, Homo sapien
tctgttcgaggatggcaagtaagct

SEQ ID NO: 1123716 - DNA, 25 bp, Homo sapien
tgttggttctgtgcaacactggtct

SEQ ID NO: 1123717 - DNA, 25 bp, Homo sapien
ttcttgactttatggaatcattcag

SEQ ID NO: 1123718 - DNA, 25 bp, Homo sapien
tcttgactttatggaatcattcagt

SEQ ID NO: 1123719 - DNA, 25 bp, Homo sapien
tgtgacaccgagaactccacaccct

SEQ ID NO: 1123720 - DNA, 25 bp, Homo sapien
tggccctccccatcagcagggattt

SEQ ID NO: 1123721 - DNA, 25 bp, Homo sapien
cagggatttgggtccgcaggctggg

SEQ ID NO: 1123722 - DNA, 25 bp, Homo sapien
gccacatctggaagcatcccacttt

SEQ ID NO: 1123723 - DNA, 25 bp, Homo sapien
gatcataagtaaagtgcctgaccta

SEQ ID NO: 1123724 - DNA, 25 bp, Homo sapien
tctggctccagttgaaagaactttg

SEQ ID NO: 1123725 - DNA, 25 bp, Homo sapien
cctagaggaggcactatatgtaaac

SEQ ID NO: 1123726 - DNA, 25 bp, Homo sapien
gaactctggcaaatgacgtaatctc

SEQ ID NO: 1123727 - DNA, 25 bp, Homo sapien
ccttcactgagtgattaaccctgtg

SEQ ID NO: 1123728 - DNA, 25 bp, Homo sapien
cttcactgagtgattaaccctgtga

SEQ ID NO: 1123729 - DNA, 25 bp, Homo sapien
ccaccttcactgagtgattaaccct

SEQ ID NO: 1123730 - DNA, 25 bp, Homo sapien
cactgagtgattaaccctgtgaatt

SEQ ID NO: 1123731 - DNA, 25 bp, Homo sapien
tgggtgtgtcctattacgtcctctg

SEQ ID NO: 1123732 - DNA, 25 bp, Homo sapien
ccttcttacggtgctgctggaggaa

SEQ ID NO: 1123733 - DNA, 25 bp, Homo sapien
gatacatgaagtttaggcacactgg

SEQ ID NO: 1123734 - DNA, 25 bp, Homo sapien
ctggccgaggaagtacaaagataca

SEQ ID NO: 1123735 - DNA, 25 bp, Homo sapien
tcagttcggacacaggaattttccc

SEQ ID NO: 1123736 - DNA, 25 bp, Homo sapien
cagaaatacttttggaccatcgaag

SEQ ID NO: 1123737 - DNA, 25 bp, Homo sapien
cattcttggcaacaagacattgcag

SEQ ID NO: 1123738 - DNA, 25 bp, Homo sapien
tccttatgacgtttctggtggtcca

SEQ ID NO: 1123739 - DNA, 25 bp, Homo sapien
gatcttcggtgaccatgtagcctga

SEQ ID NO: 1123740 - DNA, 25 bp, Homo sapien
taaaggtagtcaagaccacagttgg

SEQ ID NO: 1123741 - DNA, 25 bp, Homo sapien
gttgaaatacattgcacctgggctg

SEQ ID NO: 1123742 - DNA, 25 bp, Homo sapien
aatgtcggctgttgctctttccaga

SEQ ID NO: 1123743 - DNA, 25 bp, Homo sapien
tacccacgggactgtggtcaggacc

SEQ ID NO: 1123744 - DNA, 25 bp, Homo sapien
tgacaggtagctggccaacaagttc

SEQ ID NO: 1123745 - DNA, 25 bp, Homo sapien
gaagctgccgtcttcaacatggtgc

SEQ ID NO: 1123746 - DNA, 25 bp, Homo sapien
aaggagatccacttaaaaagcttct

SEQ ID NO: 1123747 - DNA, 25 bp, Homo sapien
cacctttggcagagcgctcacagat

SEQ ID NO: 1123748 - DNA, 25 bp, Homo sapien
gttgagagtcattggccagcacatt

SEQ ID NO: 1123749 - DNA, 25 bp, Homo sapien
gactgttgccataaacaggcttggg

SEQ ID NO: 1123750 - DNA, 25 bp, Homo sapien
gcttgagggagagagaacacccctt

SEQ ID NO: 1123751 - DNA, 25 bp, Homo sapien
tgtgatttccaaaccacttgctgtt

SEQ ID NO: 1123752 - DNA, 25 bp, Homo sapien
tgccctgtgtcccttagacctaagt

SEQ ID NO: 1123753 - DNA, 25 bp, Homo sapien
gaaatttctgagtccttaatgtgga

SEQ ID NO: 1123754 - DNA, 25 bp, Homo sapien
cctaagtagcacttgctgagctcct

SEQ ID NO: 1123755 - DNA, 25 bp, Homo sapien
ctttgatatcctttgcctgggccat

SEQ ID NO: 1123756 - DNA, 25 bp, Homo sapien
caggcttgcgatgccaaatctttat

SEQ ID NO: 1123757 - DNA, 25 bp, Homo sapien
cagtcgtctgcctagagtggaggct

SEQ ID NO: 1123758 - DNA, 25 bp, Homo sapien
tcttacttcacactcgccctgggct

SEQ ID NO: 1123759 - DNA, 25 bp, Homo sapien
aaatctttatctctagcctgactcc

SEQ ID NO: 1123760 - DNA, 25 bp, Homo sapien
tgtggaaagagcggctgaagatggc

SEQ ID NO: 1123761 - DNA, 25 bp, Homo sapien
ctgtggaaagagcggctgaagatgg

SEQ ID NO: 1123762 - DNA, 25 bp, Homo sapien
gaaagagcggctgaagatggcttct

SEQ ID NO: 1123763 - DNA, 25 bp, Homo sapien
tggaaagagcggctgaagatggctt

SEQ ID NO: 1123764 - DNA, 25 bp, Homo sapien
aggtgagggaccacagtaaggccca

SEQ ID NO: 1123765 - DNA, 25 bp, Homo sapien
gaggaggtgagggaccacagtaagg

SEQ ID NO: 1123766 - DNA, 25 bp, Homo sapien
agtttgcacagatggacatggggac

SEQ ID NO: 1123767 - DNA, 25 bp, Homo sapien
tttgcacagatggacatggggacag

SEQ ID NO: 1123768 - DNA, 25 bp, Homo sapien
cgatgttgcccttctgtgacttctt

SEQ ID NO: 1123769 - DNA, 25 bp, Homo sapien
cccctccgatgttgcccttctgtga

SEQ ID NO: 1123770 - DNA, 25 bp, Homo sapien
cctccgatgttgcccttctgtgact

SEQ ID NO: 1123771 - DNA, 25 bp, Homo sapien
tccgatgttgcccttctgtgacttc

SEQ ID NO: 1123772 - DNA, 25 bp, Homo sapien
tcttggctggctgactatgggttgc

SEQ ID NO: 1123773 - DNA, 25 bp, Homo sapien
gacacaagatgatcaccctctggag

SEQ ID NO: 1123774 - DNA, 25 bp, Homo sapien
taaaatgccaatcagtgacgtgtcc

SEQ ID NO: 1123775 - DNA, 25 bp, Homo sapien
tcttctcggcgccagggtaaaatgc

SEQ ID NO: 1123776 - DNA, 25 bp, Homo sapien
gcagtttgctcctgattctccatag

SEQ ID NO: 1123777 - DNA, 25 bp, Homo sapien
gaagcaacacccctgaactgggaag

SEQ ID NO: 1123778 - DNA, 25 bp, Homo sapien
tgtcagtcgggcgatgaagcaacac

SEQ ID NO: 1123779 - DNA, 25 bp, Homo sapien
gcttctctggcctgcgtgtcagtcg

SEQ ID NO: 1123780 - DNA, 25 bp, Homo sapien
tgctcctgcaacactgtggggcccc

SEQ ID NO: 1123781 - DNA, 25 bp, Homo sapien
cctccagtgccggagtccagaagta

SEQ ID NO: 1123782 - DNA, 25 bp, Homo sapien
ctttcaagcctggttagggagtgga

SEQ ID NO: 1123783 - DNA, 25 bp, Homo sapien
tcagcatatgaatcaggcctccagt

SEQ ID NO: 1123784 - DNA, 25 bp, Homo sapien
gactgtgccgactctgcagggatga

SEQ ID NO: 1123785 - DNA, 25 bp, Homo sapien
ggccttccctaagtggactctctgc

SEQ ID NO: 1123786 - DNA, 25 bp, Homo sapien
ccttccctaagtggactctctgcct

SEQ ID NO: 1123787 - DNA, 25 bp, Homo sapien
tctgcctcggtcctcttttctccca

SEQ ID NO: 1123788 - DNA, 25 bp, Homo sapien
atggccttccctaagtggactctct

SEQ ID NO: 1123789 - DNA, 25 bp, Homo sapien
taacaaggtcgtaggcaaacaaatg

SEQ ID NO: 1123790 - DNA, 25 bp, Homo sapien
tacttggtacattcgtgcttaacaa

SEQ ID NO: 1123791 - DNA, 25 bp, Homo sapien
taataacagcttttgcatcttggag

SEQ ID NO: 1123792 - DNA, 25 bp, Homo sapien
ctgggaggaaagtaggcatcttgtc

SEQ ID NO: 1123793 - DNA, 25 bp, Homo sapien
cagagtgattcattctgagagggga

SEQ ID NO: 1123794 - DNA, 25 bp, Homo sapien
aaagcaaggaacatagagccacgct

SEQ ID NO: 1123795 - DNA, 25 bp, Homo sapien
caaggaacatagagccacgctttgg

SEQ ID NO: 1123796 - DNA, 25 bp, Homo sapien
gcccagccaaaattccaattaactc

SEQ ID NO: 1123797 - DNA, 25 bp, Homo sapien
gtttctgctcaggcttgttaatgcc

SEQ ID NO: 1123798 - DNA, 25 bp, Homo sapien
cgaggctaatacagtgtgtttctgc

SEQ ID NO: 1123799 - DNA, 25 bp, Homo sapien
cttgaataagggcagtatcagtaga

SEQ ID NO: 1123800 - DNA, 25 bp, Homo sapien
tatcagtagatactgtgtcactgtg

SEQ ID NO: 1123801 - DNA, 25 bp, Homo sapien
ctttcttgccatctggtttgactgg

SEQ ID NO: 1123802 - DNA, 25 bp, Homo sapien
agaagaatgcagctcctttcttgcc

SEQ ID NO: 1123803 - DNA, 25 bp, Homo sapien
tgactggaaatccactggtctggtg

SEQ ID NO: 1123804 - DNA, 25 bp, Homo sapien
ctggaagagtctccaagagcagctg

SEQ ID NO: 1123805 - DNA, 25 bp, Homo sapien
ccagtggccatagagatggggacag

SEQ ID NO: 1123806 - DNA, 25 bp, Homo sapien
gatggggacagaccggactctggtg

SEQ ID NO: 1123807 - DNA, 25 bp, Homo sapien
cctggggttggaatacagttccact

SEQ ID NO: 1123808 - DNA, 25 bp, Homo sapien
acttctcctcttgatgtttgcacca

SEQ ID NO: 1123809 - DNA, 25 bp, Homo sapien
cattgccaataaactgctgaatctc

SEQ ID NO: 1123810 - DNA, 25 bp, Homo sapien
tcacgccatgtacaaaacattgcca

SEQ ID NO: 1123811 - DNA, 25 bp, Homo sapien
catcacgccatgtacaaaacattgc

SEQ ID NO: 1123812 - DNA, 25 bp, Homo sapien
tgccaataaactgctgaatctctgc

SEQ ID NO: 1123813 - DNA, 25 bp, Homo sapien
ctgtcacccagtatgtttctgagaa

SEQ ID NO: 1123814 - DNA, 25 bp, Homo sapien
ctgagaaaccacattcctgacagct

SEQ ID NO: 1123815 - DNA, 25 bp, Homo sapien
aggctgtcacccagtatgtttctga

SEQ ID NO: 1123816 - DNA, 25 bp, Homo sapien
gagaaaccacattcctgacagctga

SEQ ID NO: 1123817 - DNA, 25 bp, Homo sapien
cagggctacatttggggcatcccca

SEQ ID NO: 1123818 - DNA, 25 bp, Homo sapien
gtgagtgcatcaaaaccagggctac

SEQ ID NO: 1123819 - DNA, 25 bp, Homo sapien
ggggcatccccaatgtcaatcacat

SEQ ID NO: 1123820 - DNA, 25 bp, Homo sapien
aaaccagggctacatttggggcatc

SEQ ID NO: 1123821 - DNA, 25 bp, Homo sapien
caagcttcttgtatcaggtgccaca

SEQ ID NO: 1123822 - DNA, 25 bp, Homo sapien
cagacattagttgcatcttcattgt

SEQ ID NO: 1123823 - DNA, 25 bp, Homo sapien
gcccttcaagcttcttgtatcaggt

SEQ ID NO: 1123824 - DNA, 25 bp, Homo sapien
cctgtgaaggcagaacctggtgctg

SEQ ID NO: 1123825 - DNA, 25 bp, Homo sapien
ttcctcctggcaatcaggcatctgg

SEQ ID NO: 1123826 - DNA, 25 bp, Homo sapien
tgctcctacagggattgctgccgtg

SEQ ID NO: 1123827 - DNA, 25 bp, Homo sapien
gggacggccagcatccaaagtaaat

SEQ ID NO: 1123828 - DNA, 25 bp, Homo sapien
tcagctaggaccttggcaactctgc

SEQ ID NO: 1123829 - DNA, 25 bp, Homo sapien
ctaagtgtatattcaggcaatttat

SEQ ID NO: 1123830 - DNA, 25 bp, Homo sapien
aggcaatttatcaaattcaaaagga

SEQ ID NO: 1123831 - DNA, 25 bp, Homo sapien
atttatcaaattcaaaaggagactg

SEQ ID NO: 1123832 - DNA, 25 bp, Homo sapien
tcaaattcaaaaggagactgggtca

SEQ ID NO: 1123833 - DNA, 25 bp, Homo sapien
ttgggctgtcagtcggttccagctg

SEQ ID NO: 1123834 - DNA, 25 bp, Homo sapien
tgttctggacagttaagggcagtta

SEQ ID NO: 1123835 - DNA, 25 bp, Homo sapien
gttccagctgtagatggctcttgca

SEQ ID NO: 1123836 - DNA, 25 bp, Homo sapien
cccatggaccaataacacagttcag

SEQ ID NO: 1123837 - DNA, 25 bp, Homo sapien
gatgtgagttcatgttcactgccaa

SEQ ID NO: 1123838 - DNA, 25 bp, Homo sapien
ccaaaaagcacagctgttgtcacag

SEQ ID NO: 1123839 - DNA, 25 bp, Homo sapien
agatgtgagttcatgttcactgcca

SEQ ID NO: 1123840 - DNA, 25 bp, Homo sapien
agctgttgtcacagggcttacagca

SEQ ID NO: 1123841 - DNA, 25 bp, Homo sapien
actctgagtaccagtcttgagagac

SEQ ID NO: 1123842 - DNA, 25 bp, Homo sapien
taccagtcttgagagaccattttct

SEQ ID NO: 1123843 - DNA, 25 bp, Homo sapien
gcacttgctggcactctgagacact

SEQ ID NO: 1123844 - DNA, 25 bp, Homo sapien
tgctggcactctgagacactctgag

SEQ ID NO: 1123845 - DNA, 25 bp, Homo sapien
tattgggggagtgaacgaggagagc

SEQ ID NO: 1123846 - DNA, 25 bp, Homo sapien
ggagagcaaggattagaaaactaac

SEQ ID NO: 1123847 - DNA, 25 bp, Homo sapien
gaaaactaactactggttattatgc

SEQ ID NO: 1123848 - DNA, 25 bp, Homo sapien
aactactggttattatgcttattac

SEQ ID NO: 1123849 - DNA, 25 bp, Homo sapien
gcagaactaactcagccgttagggc

SEQ ID NO: 1123850 - DNA, 25 bp, Homo sapien
cttggttgtgctcaaaggactggaa

SEQ ID NO: 1123851 - DNA, 25 bp, Homo sapien
ccaagaagccgtttgcctttctgtg

SEQ ID NO: 1123852 - DNA, 25 bp, Homo sapien
cccactttgtagaacagcttttaga

SEQ ID NO: 1123853 - DNA, 25 bp, Homo sapien
cccaagatatactggatagataagg

SEQ ID NO: 1123854 - DNA, 25 bp, Homo sapien
agatatactggatagataaggaggc

SEQ ID NO: 1123855 - DNA, 25 bp, Homo sapien
aatggcccaagatatactggataga

SEQ ID NO: 1123856 - DNA, 25 bp, Homo sapien
tggcccaagatatactggatagata

SEQ ID NO: 1123857 - DNA, 25 bp, Homo sapien
ctccagtgcgggcaggatcactgac

SEQ ID NO: 1123858 - DNA, 25 bp, Homo sapien
tcagaaggaccagatccttccccat

SEQ ID NO: 1123859 - DNA, 25 bp, Homo sapien
gagtcagttatcagaggctccagtg

SEQ ID NO: 1123860 - DNA, 25 bp, Homo sapien
tccagtgcgggcaggatcactgact

SEQ ID NO: 1123861 - DNA, 25 bp, Homo sapien
tcgaggcagcggctcccaggatgtg

SEQ ID NO: 1123862 - DNA, 25 bp, Homo sapien
tttgacgactaaagctgagccggcg

SEQ ID NO: 1123863 - DNA, 25 bp, Homo sapien
ggaagaggctcagacgcttccctgc

SEQ ID NO: 1123864 - DNA, 25 bp, Homo sapien
cgccacgaccttgggcgggtggtcg

SEQ ID NO: 1123865 - DNA, 25 bp, Homo sapien
ctgtacgcggagacgcagcgcccgc

SEQ ID NO: 1123866 - DNA, 25 bp, Homo sapien
tacgcggagacgcagcgcccgcgag

SEQ ID NO: 1123867 - DNA, 25 bp, Homo sapien
gtacgcggagacgcagcgcccgcga

SEQ ID NO: 1123868 - DNA, 25 bp, Homo sapien
tgtacgcggagacgcagcgcccgcg

SEQ ID NO: 1123869 - DNA, 25 bp, Homo sapien
caggcagtgcatcgtgcgctcgccg

SEQ ID NO: 1123870 - DNA, 25 bp, Homo sapien
gcgggggccggtgactgggagccgc

SEQ ID NO: 1123871 - DNA, 25 bp, Homo sapien
tcggcgcccaggcagtgcatcgtgc

SEQ ID NO: 1123872 - DNA, 25 bp, Homo sapien
gcccaggcagtgcatcgtgcgctcg

SEQ ID NO: 1123873 - DNA, 25 bp, Homo sapien
ctgaggacgaccccaagtttgcgcc

SEQ ID NO: 1123874 - DNA, 25 bp, Homo sapien
acctgaggacgaccccaagtttgcg

SEQ ID NO: 1123875 - DNA, 25 bp, Homo sapien
tgaggacgaccccaagtttgcgccc

SEQ ID NO: 1123876 - DNA, 25 bp, Homo sapien
cctgaggacgaccccaagtttgcgc

SEQ ID NO: 1123877 - DNA, 25 bp, Homo sapien
agagaaagaacaggaataaccatgc

SEQ ID NO: 1123878 - DNA, 25 bp, Homo sapien
tataaatctggggtcgccactccct

SEQ ID NO: 1123879 - DNA, 25 bp, Homo sapien
catgccgtatctgtgcatttcctat

SEQ ID NO: 1123880 - DNA, 25 bp, Homo sapien
aggaataaccatgccgtatctgtgc

SEQ ID NO: 1123881 - DNA, 25 bp, Homo sapien
agcctggtggaacgtgaagctctcc

SEQ ID NO: 1123882 - DNA, 25 bp, Homo sapien
tagcgctttgctccgtcagtaacag

SEQ ID NO: 1123883 - DNA, 25 bp, Homo sapien
agctctccagcatcatagcgctttg

SEQ ID NO: 1123884 - DNA, 25 bp, Homo sapien
tgctgatataaaacggagcctggtg

SEQ ID NO: 1123885 - DNA, 25 bp, Homo sapien
tgtcctgccctgaaagaggggcccc

SEQ ID NO: 1123886 - DNA, 25 bp, Homo sapien
aaagaggagtcttcccgcggctcca

SEQ ID NO: 1123887 - DNA, 25 bp, Homo sapien
catgtcctgccctgaaagaggggcc

SEQ ID NO: 1123888 - DNA, 25 bp, Homo sapien
caaagaggagtcttcccgcggctcc

SEQ ID NO: 1123889 - DNA, 25 bp, Homo sapien
acatgggcatctaagtcgcccttcc

SEQ ID NO: 1123890 - DNA, 25 bp, Homo sapien
accaggaatgactgtttgttgacac

SEQ ID NO: 1123891 - DNA, 25 bp, Homo sapien
catgggcatctaagtcgcccttcct

SEQ ID NO: 1123892 - DNA, 25 bp, Homo sapien
ttgttgacactgcattatgaacaca

SEQ ID NO: 1123893 - DNA, 25 bp, Homo sapien
gccatgcggttgagctgcgtacctt

SEQ ID NO: 1123894 - DNA, 25 bp, Homo sapien
tcttcagggcagttggatacacaga

SEQ ID NO: 1123895 - DNA, 25 bp, Homo sapien
tcttccagggagtcaagctgctctt

SEQ ID NO: 1123896 - DNA, 25 bp, Homo sapien
ggtgtttgcaaagaactggacctct

SEQ ID NO: 1123897 - DNA, 25 bp, Homo sapien
gggtcttaaatgtgggctgtctcct

SEQ ID NO: 1123898 - DNA, 25 bp, Homo sapien
cttccttctgacaccgcctttgggt

SEQ ID NO: 1123899 - DNA, 25 bp, Homo sapien
tctctaggaccggatgtgcccacgt

SEQ ID NO: 1123900 - DNA, 25 bp, Homo sapien
ctaggaccggatgtgcccacgtgca

SEQ ID NO: 1123901 - DNA, 25 bp, Homo sapien
tagttgaaggaattcaaactataaa

SEQ ID NO: 1123902 - DNA, 25 bp, Homo sapien
gcttttggactgtgggtatagttga

SEQ ID NO: 1123903 - DNA, 25 bp, Homo sapien
ctgtgggtatagttgaaggaattca

SEQ ID NO: 1123904 - DNA, 25 bp, Homo sapien
cagtgagtctgcttttggactgtgg

SEQ ID NO: 1123905 - DNA, 25 bp, Homo sapien
gaattcggtggagggtgtcaacatc

SEQ ID NO: 1123906 - DNA, 25 bp, Homo sapien
tgagggacacatcggttaaataagg

SEQ ID NO: 1123907 - DNA, 25 bp, Homo sapien
tagcactcaggtgtttgagggacac

SEQ ID NO: 1123908 - DNA, 25 bp, Homo sapien
aacagatgcaaatagggagtagcac

SEQ ID NO: 1123909 - DNA, 25 bp, Homo sapien
tgcgaggatacacaggccaaggatt

SEQ ID NO: 1123910 - DNA, 25 bp, Homo sapien
ctaatgcgaggatacacaggccaag

SEQ ID NO: 1123911 - DNA, 25 bp, Homo sapien
tacacaggccaaggattgtatctct

SEQ ID NO: 1123912 - DNA, 25 bp, Homo sapien
caaggattgtatctcttcccgacat

SEQ ID NO: 1123913 - DNA, 25 bp, Homo sapien
cccacttaaatctgaaacactgaaa

SEQ ID NO: 1123914 - DNA, 25 bp, Homo sapien
cacttaaatctgaaacactgaaaat

SEQ ID NO: 1123915 - DNA, 25 bp, Homo sapien
cttaaatctgaaacactgaaaatat

SEQ ID NO: 1123916 - DNA, 25 bp, Homo sapien
ccacttaaatctgaaacactgaaaa

SEQ ID NO: 1123917 - DNA, 25 bp, Homo sapien
gccagccgctcctctattcgtattg

SEQ ID NO: 1123918 - DNA, 25 bp, Homo sapien
ggccagccgctcctctattcgtatt

SEQ ID NO: 1123919 - DNA, 25 bp, Homo sapien
ggctttctgccagagggccagccgc

SEQ ID NO: 1123920 - DNA, 25 bp, Homo sapien
ttctgccagagggccagccgctcct

SEQ ID NO: 1123921 - DNA, 25 bp, Homo sapien
tgaaccagaagggtggtgatgaatc

SEQ ID NO: 1123922 - DNA, 25 bp, Homo sapien
aaaatgtgaaccagaagggtggtga

SEQ ID NO: 1123923 - DNA, 25 bp, Homo sapien
tgatgaatctgaaggtaaacatcat

SEQ ID NO: 1123924 - DNA, 25 bp, Homo sapien
gtgatgaatctgaaggtaaacatca

SEQ ID NO: 1123925 - DNA, 25 bp, Homo sapien
gctgaggtcgttggtatagtcataa

SEQ ID NO: 1123926 - DNA, 25 bp, Homo sapien
agccaccataaaacaccgcagacaa

SEQ ID NO: 1123927 - DNA, 25 bp, Homo sapien
tggatacgatagcaaaccccagcac

SEQ ID NO: 1123928 - DNA, 25 bp, Homo sapien
tgtgtccaattctatgctgaggtcg

SEQ ID NO: 1123929 - DNA, 25 bp, Homo sapien
cagtgacagtggataaactgcagaa

SEQ ID NO: 1123930 - DNA, 25 bp, Homo sapien
gtttctgccgtcaacagtcaagtgg

SEQ ID NO: 1123931 - DNA, 25 bp, Homo sapien
cagctttgctggagcgtttctgccg

SEQ ID NO: 1123932 - DNA, 25 bp, Homo sapien
acagtggataaactgcagaagctgc

SEQ ID NO: 1123933 - DNA, 25 bp, Homo sapien
caaaaatcaagacgagcagcactgc

SEQ ID NO: 1123934 - DNA, 25 bp, Homo sapien
agcacagccacccagaggacccaga

SEQ ID NO: 1123935 - DNA, 25 bp, Homo sapien
tgaggatggcaaatgtccacagtgg

SEQ ID NO: 1123936 - DNA, 25 bp, Homo sapien
ccacccagaggacccagaagaaaat

SEQ ID NO: 1123937 - DNA, 25 bp, Homo sapien
gaaaatgaggatggcaaatgtccac

SEQ ID NO: 1123938 - DNA, 25 bp, Homo sapien
gtggttccaaaatggtcttctgtgt

SEQ ID NO: 1123939 - DNA, 25 bp, Homo sapien
ggttaggtgcctacagaaacaggcc

SEQ ID NO: 1123940 - DNA, 25 bp, Homo sapien
tctgtgtatgactccaaggtgatgg

SEQ ID NO: 1123941 - DNA, 25 bp, Homo sapien
caatgaggggttaggtgcctacaga

SEQ ID NO: 1123942 - DNA, 25 bp, Homo sapien
tggtaatattcttgctgttggcctt

SEQ ID NO: 1123943 - DNA, 25 bp, Homo sapien
agtccttactgaatttattctctca

SEQ ID NO: 1123944 - DNA, 25 bp, Homo sapien
ttctctcatgaaacacaaacccagc

SEQ ID NO: 1123945 - DNA, 25 bp, Homo sapien
catattgtagtttttcctagagctt

SEQ ID NO: 1123946 - DNA, 25 bp, Homo sapien
cttgcatccatgtgtactgaatttg

SEQ ID NO: 1123947 - DNA, 25 bp, Homo sapien
gatcccagatgcaagggaggtgtaa

SEQ ID NO: 1123948 - DNA, 25 bp, Homo sapien
ccagatgcaagggaggtgtaaggta

SEQ ID NO: 1123949 - DNA, 25 bp, Homo sapien
atttcctagctttggatcccagatg

SEQ ID NO: 1123950 - DNA, 25 bp, Homo sapien
tgcacccggcctaaagaggcctatt

SEQ ID NO: 1123951 - DNA, 25 bp, Homo sapien
ctgagaacaaaggggaccctgtgca

SEQ ID NO: 1123952 - DNA, 25 bp, Homo sapien
tgagaacaaaggggaccctgtgcac

SEQ ID NO: 1123953 - DNA, 25 bp, Homo sapien
agagtccctctcaagtgttagctgg

SEQ ID NO: 1123954 - DNA, 25 bp, Homo sapien
gatcacctggcgcctcttcataaga

SEQ ID NO: 1123955 - DNA, 25 bp, Homo sapien
gaatgagacaatcgggcactgtgca

SEQ ID NO: 1123956 - DNA, 25 bp, Homo sapien
ctgaagctgcctgtgggacgtggaa

SEQ ID NO: 1123957 - DNA, 25 bp, Homo sapien
cagcacagacctcgcgggaagtcca

SEQ ID NO: 1123958 - DNA, 25 bp, Homo sapien
gattaaatcttctaactgcagcaca

SEQ ID NO: 1123959 - DNA, 25 bp, Homo sapien
ctttgtgtatcccaagtacacggtg

SEQ ID NO: 1123960 - DNA, 25 bp, Homo sapien
tgctgtgtgcagtcctgtgattaaa

SEQ ID NO: 1123961 - DNA, 25 bp, Homo sapien
cacatgtaccgaatgcccgaaaggg

SEQ ID NO: 1123962 - DNA, 25 bp, Homo sapien
caaggatgaattcactagtccagat

SEQ ID NO: 1123963 - DNA, 25 bp, Homo sapien
tgaaataacaagtaaccactgcccc

SEQ ID NO: 1123964 - DNA, 25 bp, Homo sapien
tggccgccttccataacctgggcag

SEQ ID NO: 1123965 - DNA, 25 bp, Homo sapien
tctttcagtgcgttttgcatgtaca

SEQ ID NO: 1123966 - DNA, 25 bp, Homo sapien
caacggttccttgatggtagaagaa

SEQ ID NO: 1123967 - DNA, 25 bp, Homo sapien
ggatgatcaggaggatcatttttac

SEQ ID NO: 1123968 - DNA, 25 bp, Homo sapien
tgtacatgacaatgattctcggaat

SEQ ID NO: 1123969 - DNA, 25 bp, Homo sapien
cactctcaagcgcatgtgtacacac

SEQ ID NO: 1123970 - DNA, 25 bp, Homo sapien
catttctcactctcaagcgcatgtg

SEQ ID NO: 1123971 - DNA, 25 bp, Homo sapien
tttctcactctcaagcgcatgtgta

SEQ ID NO: 1123972 - DNA, 25 bp, Homo sapien
tctcactctcaagcgcatgtgtaca

SEQ ID NO: 1123973 - DNA, 25 bp, Homo sapien
acaggtacctggacaatgcaccatg

SEQ ID NO: 1123974 - DNA, 25 bp, Homo sapien
tatttgtcaagacaccagaaacagc

SEQ ID NO: 1123975 - DNA, 25 bp, Homo sapien
tggagcaggtatttgtcaagacacc

SEQ ID NO: 1123976 - DNA, 25 bp, Homo sapien
agcagtagcagcatcggaacaggta

SEQ ID NO: 1123977 - DNA, 25 bp, Homo sapien
taaacataggtggtctaattagtcc

SEQ ID NO: 1123978 - DNA, 25 bp, Homo sapien
gaagttgccgtctggatatatacac

SEQ ID NO: 1123979 - DNA, 25 bp, Homo sapien
caccacgacaaatgtattcaaacgg

SEQ ID NO: 1123980 - DNA, 25 bp, Homo sapien
tacatgctggcttatagcaatccaa

SEQ ID NO: 1123981 - DNA, 25 bp, Homo sapien
tctctccagagctctcaacatcagc

SEQ ID NO: 1123982 - DNA, 25 bp, Homo sapien
tctccagagctctcaacatcagctg

SEQ ID NO: 1123983 - DNA, 25 bp, Homo sapien
tccagagctctcaacatcagctggc

SEQ ID NO: 1123984 - DNA, 25 bp, Homo sapien
ctccagagctctcaacatcagctgg

SEQ ID NO: 1123985 - DNA, 25 bp, Homo sapien
tctgcctccatgagcatggcctcct

SEQ ID NO: 1123986 - DNA, 25 bp, Homo sapien
ccttctgcctccatgagcatggcct

SEQ ID NO: 1123987 - DNA, 25 bp, Homo sapien
tgcctccatgagcatggcctcctcc

SEQ ID NO: 1123988 - DNA, 25 bp, Homo sapien
ttctgcctccatgagcatggcctcc

SEQ ID NO: 1123989 - DNA, 25 bp, Homo sapien
gacaggtagtcacctagtgctagca

SEQ ID NO: 1123990 - DNA, 25 bp, Homo sapien
cacatcaaggcagataggaccatag

SEQ ID NO: 1123991 - DNA, 25 bp, Homo sapien
taggtgaccataggtaaaagattcc

SEQ ID NO: 1123992 - DNA, 25 bp, Homo sapien
aaagattcctacttcccaagcaggg

SEQ ID NO: 1123993 - DNA, 25 bp, Homo sapien
tggagaagtggcaaggctcttctct

SEQ ID NO: 1123994 - DNA, 25 bp, Homo sapien
ttggagaagtggcaaggctcttctc

SEQ ID NO: 1123995 - DNA, 25 bp, Homo sapien
gagaagtggcaaggctcttctctga

SEQ ID NO: 1123996 - DNA, 25 bp, Homo sapien
gcttggagaagtggcaaggctcttc

SEQ ID NO: 1123997 - DNA, 25 bp, Homo sapien
agaggaaacaaaggtctatgggtct

SEQ ID NO: 1123998 - DNA, 25 bp, Homo sapien
tcttgactgaaggtccaggtctgcc

SEQ ID NO: 1123999 - DNA, 25 bp, Homo sapien
ggaaacaaaggtctatgggtcttga

SEQ ID NO: 1124000 - DNA, 25 bp, Homo sapien
acaaaggtctatgggtcttgactga

SEQ ID NO: 1124001 - DNA, 25 bp, Homo sapien
cattagaaaatgacactctcctggg

SEQ ID NO: 1124002 - DNA, 25 bp, Homo sapien
cacattagaaaatgacactctcctg

SEQ ID NO: 1124003 - DNA, 25 bp, Homo sapien
acattagaaaatgacactctcctgg

SEQ ID NO: 1124004 - DNA, 25 bp, Homo sapien
tctccgccttgtgtattttctcctt

SEQ ID NO: 1124005 - DNA, 25 bp, Homo sapien
tgatggttgactttgctctctttgc

SEQ ID NO: 1124006 - DNA, 25 bp, Homo sapien
ttccccattcaagcaggactcgggc

SEQ ID NO: 1124007 - DNA, 25 bp, Homo sapien
ctaagacatgtatgatggttgactt

SEQ ID NO: 1124008 - DNA, 25 bp, Homo sapien
gcattcggcttttgatttattccca

SEQ ID NO: 1124009 - DNA, 25 bp, Homo sapien
ttctttagcatcacaaaacaggtgg

SEQ ID NO: 1124010 - DNA, 25 bp, Homo sapien
gaggtagtggcattcggcttttgat

SEQ ID NO: 1124011 - DNA, 25 bp, Homo sapien
aaattcagtgtgcatacttctttag

SEQ ID NO: 1124012 - DNA, 25 bp, Homo sapien
cagctccaccattgccgctcagcct

SEQ ID NO: 1124013 - DNA, 25 bp, Homo sapien
agcagctccaccattgccgctcagc

SEQ ID NO: 1124014 - DNA, 25 bp, Homo sapien
gctccaccattgccgctcagcctct

SEQ ID NO: 1124015 - DNA, 25 bp, Homo sapien
agctccaccattgccgctcagcctc

SEQ ID NO: 1124016 - DNA, 25 bp, Homo sapien
tgacttacagcacctaccgcaaagg

SEQ ID NO: 1124017 - DNA, 25 bp, Homo sapien
taaaagcatggtggttacggtaagc

SEQ ID NO: 1124018 - DNA, 25 bp, Homo sapien
ggtcttgggcaaatgatctaacctc

SEQ ID NO: 1124019 - DNA, 25 bp, Homo sapien
ggcaactctttaagcacctgaggag

SEQ ID NO: 1124020 - DNA, 25 bp, Homo sapien
gaatgtcccactacaaacatgtgga

SEQ ID NO: 1124021 - DNA, 25 bp, Homo sapien
ttaggtaccagaaagcaagcgggat

SEQ ID NO: 1124022 - DNA, 25 bp, Homo sapien
aacccaaaggtgcaacaggcatgca

SEQ ID NO: 1124023 - DNA, 25 bp, Homo sapien
cccttgctagggaagtgagctcctt

SEQ ID NO: 1124024 - DNA, 25 bp, Homo sapien
tgcatcttttgctgatgtacagaaa

SEQ ID NO: 1124025 - DNA, 25 bp, Homo sapien
aaagtgacttgagttcttggacaag

SEQ ID NO: 1124026 - DNA, 25 bp, Homo sapien
tctgtcccattaatagcagttgtag

SEQ ID NO: 1124027 - DNA, 25 bp, Homo sapien
tccaaagcagttaatagatgtaaag

SEQ ID NO: 1124028 - DNA, 25 bp, Homo sapien
aaacagtgaaacacaccactaacac

SEQ ID NO: 1124029 - DNA, 25 bp, Homo sapien
aaaacagtgaaacacaccactaaca

SEQ ID NO: 1124030 - DNA, 25 bp, Homo sapien
gtagggcttttctgacgatccatca

SEQ ID NO: 1124031 - DNA, 25 bp, Homo sapien
aaaactatgggctactaagtaggca

SEQ ID NO: 1124032 - DNA, 25 bp, Homo sapien
accaataacagagggactgcccaca

SEQ ID NO: 1124033 - DNA, 25 bp, Homo sapien
gaatgcccgattgtagttaaaagcc

SEQ ID NO: 1124034 - DNA, 25 bp, Homo sapien
tgtgtgcagctttacaaaactttca

SEQ ID NO: 1124035 - DNA, 25 bp, Homo sapien
caagattgcgagcatggagattgca

SEQ ID NO: 1124036 - DNA, 25 bp, Homo sapien
agagaggctgggtatgagcctcttt

SEQ ID NO: 1124037 - DNA, 25 bp, Homo sapien
gggtatgagcctctttcgtgtgtgc

SEQ ID NO: 1124038 - DNA, 25 bp, Homo sapien
ttaggaatccatctgatcagcattc

SEQ ID NO: 1124039 - DNA, 25 bp, Homo sapien
gatcagcattcttgttcagcttcac

SEQ ID NO: 1124040 - DNA, 25 bp, Homo sapien
tcagccttggagagttcagcgcaaa

SEQ ID NO: 1124041 - DNA, 25 bp, Homo sapien
cttcagggagaaggttctcagaaag

SEQ ID NO: 1124042 - DNA, 25 bp, Homo sapien
taaagtagcacaggggagaatcaca

SEQ ID NO: 1124043 - DNA, 25 bp, Homo sapien
gaatagtattatgtgtctgtactgt

SEQ ID NO: 1124044 - DNA, 25 bp, Homo sapien
tactgttgataacgtaggggccgag

SEQ ID NO: 1124045 - DNA, 25 bp, Homo sapien
cctctgacggtttgctgaagaatta

SEQ ID NO: 1124046 - DNA, 25 bp, Homo sapien
cctgctgtgcccttgcattgtttaa

SEQ ID NO: 1124047 - DNA, 25 bp, Homo sapien
ctgctgtgcccttgcattgtttaat

SEQ ID NO: 1124048 - DNA, 25 bp, Homo sapien
caggtacagatacctaaatgggtat

SEQ ID NO: 1124049 - DNA, 25 bp, Homo sapien
tgttttccaggtacagatacctaaa

SEQ ID NO: 1124050 - DNA, 25 bp, Homo sapien
tttccaggtacagatacctaaatgg

SEQ ID NO: 1124051 - DNA, 25 bp, Homo sapien
aatgttttccaggtacagataccta

SEQ ID NO: 1124052 - DNA, 25 bp, Homo sapien
aaacttacctcagttcttacatagt

SEQ ID NO: 1124053 - DNA, 25 bp, Homo sapien
ttagttgtgcacttacaaacttacc

SEQ ID NO: 1124054 - DNA, 25 bp, Homo sapien
tgttacctggtcaaacaataatgac

SEQ ID NO: 1124055 - DNA, 25 bp, Homo sapien
gtaaactaatatagttccagtattg

SEQ ID NO: 1124056 - DNA, 25 bp, Homo sapien
tattcagtgagaaccaagctagcct

SEQ ID NO: 1124057 - DNA, 25 bp, Homo sapien
taccaggatgactaccccagagatt

SEQ ID NO: 1124058 - DNA, 25 bp, Homo sapien
tgtcattcacaacggaagccaagga

SEQ ID NO: 1124059 - DNA, 25 bp, Homo sapien
gattaccaatatagcgaccaaggca

SEQ ID NO: 1124060 - DNA, 25 bp, Homo sapien
ggctgaatagaaggcaaataccaga

SEQ ID NO: 1124061 - DNA, 25 bp, Homo sapien
tgaatgaactagatgcttttcctgc

SEQ ID NO: 1124062 - DNA, 25 bp, Homo sapien
ggatagagactacataaacagaatt

SEQ ID NO: 1124063 - DNA, 25 bp, Homo sapien
tcctgcctgtaagaagtctaatagg

SEQ ID NO: 1124064 - DNA, 25 bp, Homo sapien
taaacgtgtctatcggctggacgca

SEQ ID NO: 1124065 - DNA, 25 bp, Homo sapien
aaacatgaaaattagcgtggcgtgg

SEQ ID NO: 1124066 - DNA, 25 bp, Homo sapien
aatatagtcaagacttaaacgtgtc

SEQ ID NO: 1124067 - DNA, 25 bp, Homo sapien
caagaccccagtgtaaaaatatagt

SEQ ID NO: 1124068 - DNA, 25 bp, Homo sapien
aagaaaatgtcagcgtttttctgcc

SEQ ID NO: 1124069 - DNA, 25 bp, Homo sapien
taatgctgtttagctggcctgactg

SEQ ID NO: 1124070 - DNA, 25 bp, Homo sapien
ccatgaagtattaatgaggtaagtt

SEQ ID NO: 1124071 - DNA, 25 bp, Homo sapien
gactgcataaagctcacttactaga

SEQ ID NO: 1124072 - DNA, 25 bp, Homo sapien
cagcaggtgtgcctagacagtattc

SEQ ID NO: 1124073 - DNA, 25 bp, Homo sapien
gatcagctgtatcctatgccctagg

SEQ ID NO: 1124074 - DNA, 25 bp, Homo sapien
gacagtattctcctcggtctctgga

SEQ ID NO: 1124075 - DNA, 25 bp, Homo sapien
caagggaagctctaagggctgaagc

SEQ ID NO: 1124076 - DNA, 25 bp, Homo sapien
aattattattttggaattggctggg

SEQ ID NO: 1124077 - DNA, 25 bp, Homo sapien
ttattattttggaattggctgggcg

SEQ ID NO: 1124078 - DNA, 25 bp, Homo sapien
attattattttggaattggctgggc

SEQ ID NO: 1124079 - DNA, 25 bp, Homo sapien
gtcaggaatgtgatctgccccagag

SEQ ID NO: 1124080 - DNA, 25 bp, Homo sapien
accaagcagtactactgtgtttcat

SEQ ID NO: 1124081 - DNA, 25 bp, Homo sapien
gcaccaggtctgtagatctgcacca

SEQ ID NO: 1124082 - DNA, 25 bp, Homo sapien
caggcagcgtgtgaggcatttccac

SEQ ID NO: 1124083 - DNA, 25 bp, Homo sapien
ccgtttggtgactgcagaacgcgcc

SEQ ID NO: 1124084 - DNA, 25 bp, Homo sapien
tcacagtctccgatctcggtgcctg

SEQ ID NO: 1124085 - DNA, 25 bp, Homo sapien
tgttcccgcgccgtgggacaggact

SEQ ID NO: 1124086 - DNA, 25 bp, Homo sapien
gagagagaccgcctaatgtcccgcc

SEQ ID NO: 1124087 - DNA, 25 bp, Homo sapien
gctgaattccggataaagatgcctg

SEQ ID NO: 1124088 - DNA, 25 bp, Homo sapien
gaaatctgtcctaggtgtgcaccag

SEQ ID NO: 1124089 - DNA, 25 bp, Homo sapien
tattacgggtaggaaatgggactgc

SEQ ID NO: 1124090 - DNA, 25 bp, Homo sapien
tatctagtctaccagctgctcaggc

SEQ ID NO: 1124091 - DNA, 25 bp, Homo sapien
cacactttggtgcatgagactcaga

SEQ ID NO: 1124092 - DNA, 25 bp, Homo sapien
gactagtaagcgaagaatgcctcaa

SEQ ID NO: 1124093 - DNA, 25 bp, Homo sapien
gggaaaagccttgcaaactggatag

SEQ ID NO: 1124094 - DNA, 25 bp, Homo sapien
tgaatctctcaagttgcccgcctgg

SEQ ID NO: 1124095 - DNA, 25 bp, Homo sapien
tattttcgtggcaagatgtatggca

SEQ ID NO: 1124096 - DNA, 25 bp, Homo sapien
ccacaccctggtagttagtttgcaa

SEQ ID NO: 1124097 - DNA, 25 bp, Homo sapien
tacttaagattgctgggccacaccc

SEQ ID NO: 1124098 - DNA, 25 bp, Homo sapien
ggttgagttgacctccttaacagca

SEQ ID NO: 1124099 - DNA, 25 bp, Homo sapien
ctttttttagatcatatagggcaac

SEQ ID NO: 1124100 - DNA, 25 bp, Homo sapien
aaaatggctactccagactgagcag

SEQ ID NO: 1124101 - DNA, 25 bp, Homo sapien
gaggtcattcttgccgccattttgg

SEQ ID NO: 1124102 - DNA, 25 bp, Homo sapien
tgccggttgcccttatttatagtta

SEQ ID NO: 1124103 - DNA, 25 bp, Homo sapien
gcattgtggacttgttacaggaaca

SEQ ID NO: 1124104 - DNA, 25 bp, Homo sapien
gatccaaccccaagagagggctctt

SEQ ID NO: 1124105 - DNA, 25 bp, Homo sapien
cgatccaaccccaagagagggctct

SEQ ID NO: 1124106 - DNA, 25 bp, Homo sapien
tctttaattctctggcattgtggac

SEQ ID NO: 1124107 - DNA, 25 bp, Homo sapien
ccatgagaaggaccatactgaaaaa

SEQ ID NO: 1124108 - DNA, 25 bp, Homo sapien
gactagaactgtatttttggcttac

SEQ ID NO: 1124109 - DNA, 25 bp, Homo sapien
gacgcagactagaactgtatttttg

SEQ ID NO: 1124110 - DNA, 25 bp, Homo sapien
gtgggctgacgcagactagaactgt

SEQ ID NO: 1124111 - DNA, 25 bp, Homo sapien
ggctgacgcagactagaactgtatt

SEQ ID NO: 1124112 - DNA, 25 bp, Homo sapien
ccctcgccaggctaactttttgagg

SEQ ID NO: 1124113 - DNA, 25 bp, Homo sapien
ctcgccaggctaactttttgaggtt

SEQ ID NO: 1124114 - DNA, 25 bp, Homo sapien
ctcccctcgccaggctaactttttg

SEQ ID NO: 1124115 - DNA, 25 bp, Homo sapien
cccctcgccaggctaactttttgag

SEQ ID NO: 1124116 - DNA, 25 bp, Homo sapien
tttatgtgacaacaggggaaatctc

SEQ ID NO: 1124117 - DNA, 25 bp, Homo sapien
gtgacaacaggggaaatctcatcat

SEQ ID NO: 1124118 - DNA, 25 bp, Homo sapien
agttctgagagcacaaggggccccc

SEQ ID NO: 1124119 - DNA, 25 bp, Homo sapien
atcgtttcatgcttggagttctgag

SEQ ID NO: 1124120 - DNA, 25 bp, Homo sapien
gcaaaataaaattcagccaggaaac

SEQ ID NO: 1124121 - DNA, 25 bp, Homo sapien
ttcagccaggaaacacttagctgtt

SEQ ID NO: 1124122 - DNA, 25 bp, Homo sapien
taaaattcagccaggaaacacttag

SEQ ID NO: 1124123 - DNA, 25 bp, Homo sapien
agccaggaaacacttagctgttttt

SEQ ID NO: 1124124 - DNA, 25 bp, Homo sapien
gcttttcaacgtagccttggatccc

SEQ ID NO: 1124125 - DNA, 25 bp, Homo sapien
tgcactgtggtcaaaggcttttcaa

SEQ ID NO: 1124126 - DNA, 25 bp, Homo sapien
tgcacctcaaagcacgataacagga

SEQ ID NO: 1124127 - DNA, 25 bp, Homo sapien
cctgagtgcgggctgtgtcgacatc

SEQ ID NO: 1124128 - DNA, 25 bp, Homo sapien
catagcccttgtaaaaccctagcca

SEQ ID NO: 1124129 - DNA, 25 bp, Homo sapien
tcatagcccttgtaaaaccctagcc

SEQ ID NO: 1124130 - DNA, 25 bp, Homo sapien
tcatgtcttaaatttgcatgcagcc

SEQ ID NO: 1124131 - DNA, 25 bp, Homo sapien
atgtcttaaatttgcatgcagccaa

SEQ ID NO: 1124132 - DNA, 25 bp, Homo sapien
catgtcttaaatttgcatgcagcca

SEQ ID NO: 1124133 - DNA, 25 bp, Homo sapien
atatatatttgttatctagcctggg

SEQ ID NO: 1124134 - DNA, 25 bp, Homo sapien
tatatatttgttatctagcctgggt

SEQ ID NO: 1124135 - DNA, 25 bp, Homo sapien
tatatttgttatctagcctgggtga

SEQ ID NO: 1124136 - DNA, 25 bp, Homo sapien
gatttctccctattccaagtctatt

SEQ ID NO: 1124137 - DNA, 25 bp, Homo sapien
gatacaatacagatgtaatcaggct

SEQ ID NO: 1124138 - DNA, 25 bp, Homo sapien
gagtgcacaatgctgagtcttttac

SEQ ID NO: 1124139 - DNA, 25 bp, Homo sapien
accgcaagtatctaaagttaacagt

SEQ ID NO: 1124140 - DNA, 25 bp, Homo sapien
catacttttagtggcaacctttctg

SEQ ID NO: 1124141 - DNA, 25 bp, Homo sapien
gccagcccagctttgacagtgggct

SEQ ID NO: 1124142 - DNA, 25 bp, Homo sapien
gctccagttctctaccttcatccat

SEQ ID NO: 1124143 - DNA, 25 bp, Homo sapien
cagctttgacagtgggctccagttc

SEQ ID NO: 1124144 - DNA, 25 bp, Homo sapien
ggctccagttctctaccttcatcca

SEQ ID NO: 1124145 - DNA, 25 bp, Homo sapien
ctgtctacgtaatggagccaatacc

SEQ ID NO: 1124146 - DNA, 25 bp, Homo sapien
atgaacatgcatggaacgtgcagac

SEQ ID NO: 1124147 - DNA, 25 bp, Homo sapien
catgcactgaaaccaaagctgtgca

SEQ ID NO: 1124148 - DNA, 25 bp, Homo sapien
gtctgtaggatgctactgacatgca

SEQ ID NO: 1124149 - DNA, 25 bp, Homo sapien
gcagactgtgtagcacgttgggtct

SEQ ID NO: 1124150 - DNA, 25 bp, Homo sapien
taggaagctagttaatagccctctg

SEQ ID NO: 1124151 - DNA, 25 bp, Homo sapien
tcatccaacttaaggcgaggctgcc

SEQ ID NO: 1124152 - DNA, 25 bp, Homo sapien
aatattggcccatgagatagctgac

SEQ ID NO: 1124153 - DNA, 25 bp, Homo sapien
aataagacatagaaacggctgggtt

SEQ ID NO: 1124154 - DNA, 25 bp, Homo sapien
cagtggtgccttttccacatagtca

SEQ ID NO: 1124155 - DNA, 25 bp, Homo sapien
tttgaaattccactcataccaggac

SEQ ID NO: 1124156 - DNA, 25 bp, Homo sapien
agcggcttctcaacttcagtggtgc

SEQ ID NO: 1124157 - DNA, 25 bp, Homo sapien
cactcataccaggacagcattttac

SEQ ID NO: 1124158 - DNA, 25 bp, Homo sapien
ttcaaggtgaaagccaatgtgtttt

SEQ ID NO: 1124159 - DNA, 25 bp, Homo sapien
ctttcaaggtgaaagccaatgtgtt

SEQ ID NO: 1124160 - DNA, 25 bp, Homo sapien
aaagccaatgtgttttcccaaggat

SEQ ID NO: 1124161 - DNA, 25 bp, Homo sapien
agccaatgtgttttcccaaggatag

SEQ ID NO: 1124162 - DNA, 25 bp, Homo sapien
ggctcattttggatctgaggctggt

SEQ ID NO: 1124163 - DNA, 25 bp, Homo sapien
aggctcattttggatctgaggctgg

SEQ ID NO: 1124164 - DNA, 25 bp, Homo sapien
tcttgagttgtcactgttccagccc

SEQ ID NO: 1124165 - DNA, 25 bp, Homo sapien
cactcttgagttgtcactgttccag

SEQ ID NO: 1124166 - DNA, 25 bp, Homo sapien
actcttgagttgtcactgttccagc

SEQ ID NO: 1124167 - DNA, 25 bp, Homo sapien
ttgagttgtcactgttccagcccat

SEQ ID NO: 1124168 - DNA, 25 bp, Homo sapien
caaaattaggctgcatattagcagt

SEQ ID NO: 1124169 - DNA, 25 bp, Homo sapien
tatagcttctgtttcacattgagtg

SEQ ID NO: 1124170 - DNA, 25 bp, Homo sapien
ctttctaagtcgatgctttttccac

SEQ ID NO: 1124171 - DNA, 25 bp, Homo sapien
gagttccgaacaacatctgtgtcaa

SEQ ID NO: 1124172 - DNA, 25 bp, Homo sapien
cgtccaggtctaggaaagctatctc

SEQ ID NO: 1124173 - DNA, 25 bp, Homo sapien
gacgctcttgcataggctttaccag

SEQ ID NO: 1124174 - DNA, 25 bp, Homo sapien
tggactgagacttcctaaacccatt

SEQ ID NO: 1124175 - DNA, 25 bp, Homo sapien
gatgtagactttcttccacgtccag

SEQ ID NO: 1124176 - DNA, 25 bp, Homo sapien
accatattgactcttcaggctgtgc

SEQ ID NO: 1124177 - DNA, 25 bp, Homo sapien
ttagagctgtaagccagagagtggc

SEQ ID NO: 1124178 - DNA, 25 bp, Homo sapien
taatgtcacggttagggcttccacc

SEQ ID NO: 1124179 - DNA, 25 bp, Homo sapien
ttgccctaccctgtggataaccatg

SEQ ID NO: 1124180 - DNA, 25 bp, Homo sapien
tgttggtggtatgtagagatacact

SEQ ID NO: 1124181 - DNA, 25 bp, Homo sapien
tgcaaatagtggtagttctaattct

SEQ ID NO: 1124182 - DNA, 25 bp, Homo sapien
tttagtgacattttccgtgttggtg

SEQ ID NO: 1124183 - DNA, 25 bp, Homo sapien
tgtgaagataatctaatcatctgca

SEQ ID NO: 1124184 - DNA, 25 bp, Homo sapien
cctggccacattttgcttttcacac

SEQ ID NO: 1124185 - DNA, 25 bp, Homo sapien
ctttaattcatctggaattgatttc

SEQ ID NO: 1124186 - DNA, 25 bp, Homo sapien
tgcttttcacacttgtctttaattc

SEQ ID NO: 1124187 - DNA, 25 bp, Homo sapien
ttaattcatctggaattgatttctt

SEQ ID NO: 1124188 - DNA, 25 bp, Homo sapien
cacggatgccaaaatccgcagatgc

SEQ ID NO: 1124189 - DNA, 25 bp, Homo sapien
tattttcacgaccttgcacggatgc

SEQ ID NO: 1124190 - DNA, 25 bp, Homo sapien
tgcacattgctcatcctcccatata

SEQ ID NO: 1124191 - DNA, 25 bp, Homo sapien
tgtacatgtccagtacagatacagt

SEQ ID NO: 1124192 - DNA, 25 bp, Homo sapien
tagagtgagtgcctttatccatccc

SEQ ID NO: 1124193 - DNA, 25 bp, Homo sapien
ggacagctggcctaactcagaccaa

SEQ ID NO: 1124194 - DNA, 25 bp, Homo sapien
tgccttcagtggctcaagaggccct

SEQ ID NO: 1124195 - DNA, 25 bp, Homo sapien
tacacgaagcatcctgttcatgtgc

SEQ ID NO: 1124196 - DNA, 25 bp, Homo sapien
tgtggaacacacatgccgagtaaac

SEQ ID NO: 1124197 - DNA, 25 bp, Homo sapien
taaactatgggcacattcaaagagg

SEQ ID NO: 1124198 - DNA, 25 bp, Homo sapien
tcaggcgattgagcattaagaaccc

SEQ ID NO: 1124199 - DNA, 25 bp, Homo sapien
catcagtccaaggttaggcaggcaa

SEQ ID NO: 1124200 - DNA, 25 bp, Homo sapien
gaatatgggtagtgcttcgttccat

SEQ ID NO: 1124201 - DNA, 25 bp, Homo sapien
ctgcgaatatgggtagtgcttcgtt

SEQ ID NO: 1124202 - DNA, 25 bp, Homo sapien
gcgaatatgggtagtgcttcgttcc

SEQ ID NO: 1124203 - DNA, 25 bp, Homo sapien
cgaatatgggtagtgcttcgttcca

SEQ ID NO: 1124204 - DNA, 25 bp, Homo sapien
tgtgaactttgacagcggctggtcc

SEQ ID NO: 1124205 - DNA, 25 bp, Homo sapien
tctcgttctagctgcggccgcagga

SEQ ID NO: 1124206 - DNA, 25 bp, Homo sapien
tccgcgtttgagtcgcttcggcacc

SEQ ID NO: 1124207 - DNA, 25 bp, Homo sapien
ccggaagttggacgcatgcgccgtt

SEQ ID NO: 1124208 - DNA, 25 bp, Homo sapien
tgacctcgtcgtgggcgtaaatcaa

SEQ ID NO: 1124209 - DNA, 25 bp, Homo sapien
cacgaagttgacagagccagaacac

SEQ ID NO: 1124210 - DNA, 25 bp, Homo sapien
ccttagcttcaggtggcattcacga

SEQ ID NO: 1124211 - DNA, 25 bp, Homo sapien
tcgggacctttagggcgcagagact

SEQ ID NO: 1124212 - DNA, 25 bp, Homo sapien
aatatttctgaaggaggtagccaag

SEQ ID NO: 1124213 - DNA, 25 bp, Homo sapien
ggcttgagctcacagtccgctgaaa

SEQ ID NO: 1124214 - DNA, 25 bp, Homo sapien
gaataaaccgagatgaaacgtctac

SEQ ID NO: 1124215 - DNA, 25 bp, Homo sapien
caccattggcagattcaccgtcaac

SEQ ID NO: 1124216 - DNA, 25 bp, Homo sapien
catcttgttgttccaccctcttcta

SEQ ID NO: 1124217 - DNA, 25 bp, Homo sapien
acagctggtcacagacatgtccatg

SEQ ID NO: 1124218 - DNA, 25 bp, Homo sapien
caggcctagaataaaagagcagctc

SEQ ID NO: 1124219 - DNA, 25 bp, Homo sapien
aaattcaggtcatagaggatccagg

SEQ ID NO: 1124220 - DNA, 25 bp, Homo sapien
cgtgagccaaggtagtgtgtctgga

SEQ ID NO: 1124221 - DNA, 25 bp, Homo sapien
gccgtgagccaaggtagtgtgtctg

SEQ ID NO: 1124222 - DNA, 25 bp, Homo sapien
tgagccaaggtagtgtgtctggaat

SEQ ID NO: 1124223 - DNA, 25 bp, Homo sapien
ttgccgtgagccaaggtagtgtgtc

SEQ ID NO: 1124224 - DNA, 25 bp, Homo sapien
gaatatgttttcctagagactgcct

SEQ ID NO: 1124225 - DNA, 25 bp, Homo sapien
cttaggatatgaacaatgactggca

SEQ ID NO: 1124226 - DNA, 25 bp, Homo sapien
tccactggccatgaaagaaattcct

SEQ ID NO: 1124227 - DNA, 25 bp, Homo sapien
ttgtgcattattcttcaggttaaaa

SEQ ID NO: 1124228 - DNA, 25 bp, Homo sapien
ccaggaaagcagtatcatagagttg

SEQ ID NO: 1124229 - DNA, 25 bp, Homo sapien
cctaccaggaaagcagtatcataga

SEQ ID NO: 1124230 - DNA, 25 bp, Homo sapien
cagtatcatagagttgttcaaagca

SEQ ID NO: 1124231 - DNA, 25 bp, Homo sapien
gaaagcagtatcatagagttgttca

SEQ ID NO: 1124232 - DNA, 25 bp, Homo sapien
caactactagtcattctccattttc

SEQ ID NO: 1124233 - DNA, 25 bp, Homo sapien
cgcgtgtagaagaagcgtgttctct

SEQ ID NO: 1124234 - DNA, 25 bp, Homo sapien
aaagcctccaagtgatctgcatcaa

SEQ ID NO: 1124235 - DNA, 25 bp, Homo sapien
tgagaattccaagttgcctagtaga

SEQ ID NO: 1124236 - DNA, 25 bp, Homo sapien
gtttttcttgccacgtctgacacgg

SEQ ID NO: 1124237 - DNA, 25 bp, Homo sapien
gctagccacgtaacaaaaaatcttc

SEQ ID NO: 1124238 - DNA, 25 bp, Homo sapien
tcagtacctgggctagccacgtaac

SEQ ID NO: 1124239 - DNA, 25 bp, Homo sapien
tgggctagccacgtaacaaaaaatc

SEQ ID NO: 1124240 - DNA, 25 bp, Homo sapien
cccgcagcggtcagtacctgggcta

SEQ ID NO: 1124241 - DNA, 25 bp, Homo sapien
agatgctcacgggagccagggaagc

SEQ ID NO: 1124242 - DNA, 25 bp, Homo sapien
tggcgctggccagtgccgcccggtg

SEQ ID NO: 1124243 - DNA, 25 bp, Homo sapien
tctacaggagtctgctcatccgggc

SEQ ID NO: 1124244 - DNA, 25 bp, Homo sapien
agggcggcgggtgtctacaggagtc

SEQ ID NO: 1124245 - DNA, 25 bp, Homo sapien
cggggcgaggcaagcccgccttcct

SEQ ID NO: 1124246 - DNA, 25 bp, Homo sapien
gagctctcggccgcgctaggccagg

SEQ ID NO: 1124247 - DNA, 25 bp, Homo sapien
tcccgcgcgccggacgcccacccag

SEQ ID NO: 1124248 - DNA, 25 bp, Homo sapien
tctccgcgggctgcgcttggcggct

SEQ ID NO: 1124249 - DNA, 25 bp, Homo sapien
gctctaacaagaaagctctccctgg

SEQ ID NO: 1124250 - DNA, 25 bp, Homo sapien
tccctggatgcccaaaggtttgcac

SEQ ID NO: 1124251 - DNA, 25 bp, Homo sapien
cccgattgtgtgtgggctctaacaa

SEQ ID NO: 1124252 - DNA, 25 bp, Homo sapien
tttaagctcagacccgagaggcacc

SEQ ID NO: 1124253 - DNA, 25 bp, Homo sapien
cctgataccaatgccaggtgaatac

SEQ ID NO: 1124254 - DNA, 25 bp, Homo sapien
gctcattcctaatgttcagttaaag

SEQ ID NO: 1124255 - DNA, 25 bp, Homo sapien
tgttcagttaaagtctgtttcccat

SEQ ID NO: 1124256 - DNA, 25 bp, Homo sapien
tggtgtaatccatccagcgcctgat

SEQ ID NO: 1124257 - DNA, 25 bp, Homo sapien
catcatttcatctatgtgagttctg

SEQ ID NO: 1124258 - DNA, 25 bp, Homo sapien
cccatcatttcatctatgtgagttc

SEQ ID NO: 1124259 - DNA, 25 bp, Homo sapien
ccatcatttcatctatgtgagttct

SEQ ID NO: 1124260 - DNA, 25 bp, Homo sapien
gattgccattgcctaaaactggtcc

SEQ ID NO: 1124261 - DNA, 25 bp, Homo sapien
gatctgaccggataatttggtggcc

SEQ ID NO: 1124262 - DNA, 25 bp, Homo sapien
tctacccgagggctagtctgaaggt

SEQ ID NO: 1124263 - DNA, 25 bp, Homo sapien
tctactcgagctactttgacagtgg

SEQ ID NO: 1124264 - DNA, 25 bp, Homo sapien
actgtttcaagctactagggtctat

SEQ ID NO: 1124265 - DNA, 25 bp, Homo sapien
agggtctatggatggtttatttggc

SEQ ID NO: 1124266 - DNA, 25 bp, Homo sapien
gaatagttcttgatattaccagcct

SEQ ID NO: 1124267 - DNA, 25 bp, Homo sapien
gcaacagattaaaagacgactcaat

SEQ ID NO: 1124268 - DNA, 25 bp, Homo sapien
gcatctcactccaccgaaaactttt

SEQ ID NO: 1124269 - DNA, 25 bp, Homo sapien
aaatgttgctccctagcatctcact

SEQ ID NO: 1124270 - DNA, 25 bp, Homo sapien
gagtacacatgtgatttacgtgaca

SEQ ID NO: 1124271 - DNA, 25 bp, Homo sapien
tattgaagaattctacccttaggaa

SEQ ID NO: 1124272 - DNA, 25 bp, Homo sapien
tcatggaagtggtaaaagaagagct

SEQ ID NO: 1124273 - DNA, 25 bp, Homo sapien
taagtatatacaccatcatgggagg

SEQ ID NO: 1124274 - DNA, 25 bp, Homo sapien
gggccctagtctaactttcagagga

SEQ ID NO: 1124275 - DNA, 25 bp, Homo sapien
gaggactctgcaaacaagatttggg

SEQ ID NO: 1124276 - DNA, 25 bp, Homo sapien
gcgtggtggtatgcggctgttgtcc

SEQ ID NO: 1124277 - DNA, 25 bp, Homo sapien
cgtggtggtatgcggctgttgtccc

SEQ ID NO: 1124278 - DNA, 25 bp, Homo sapien
tatcagctatgagagcacttccctt

SEQ ID NO: 1124279 - DNA, 25 bp, Homo sapien
taaaattgtgttaaggacacatttc

SEQ ID NO: 1124280 - DNA, 25 bp, Homo sapien
tcagtcttcacatcaaaaaacagtc

SEQ ID NO: 1124281 - DNA, 25 bp, Homo sapien
catgactgtacatgtcttaactatc

SEQ ID NO: 1124282 - DNA, 25 bp, Homo sapien
tctacaggtagctagtagctggcag

SEQ ID NO: 1124283 - DNA, 25 bp, Homo sapien
ctctacaggtagctagtagctggca

SEQ ID NO: 1124284 - DNA, 25 bp, Homo sapien
ctacaggtagctagtagctggcaga

SEQ ID NO: 1124285 - DNA, 25 bp, Homo sapien
agccaaaaaccatagaactaacact

SEQ ID NO: 1124286 - DNA, 25 bp, Homo sapien
tctcatctatgatatgaaagagttg

SEQ ID NO: 1124287 - DNA, 25 bp, Homo sapien
ttctcatctatgatatgaaagagtt

SEQ ID NO: 1124288 - DNA, 25 bp, Homo sapien
aacaatcaagccaaaaaccatagaa

SEQ ID NO: 1124289 - DNA, 25 bp, Homo sapien
tacaggtaacactgatgagcagttt

SEQ ID NO: 1124290 - DNA, 25 bp, Homo sapien
atgagcagttttgtgttgatctcca

SEQ ID NO: 1124291 - DNA, 25 bp, Homo sapien
agactattgaaacctggagaaactt

SEQ ID NO: 1124292 - DNA, 25 bp, Homo sapien
ttctttttgaagctgagactattga

SEQ ID NO: 1124293 - DNA, 25 bp, Homo sapien
caaagaatggcatgtggatactacc

SEQ ID NO: 1124294 - DNA, 25 bp, Homo sapien
gtagcctcatcgaataagaaaatgt

SEQ ID NO: 1124295 - DNA, 25 bp, Homo sapien
tgtacaggccaaaaataccaaccac

SEQ ID NO: 1124296 - DNA, 25 bp, Homo sapien
caaagtggatcagctttagtagcct

SEQ ID NO: 1124297 - DNA, 25 bp, Homo sapien
cagaaatgaggtagcctgaggcaat

SEQ ID NO: 1124298 - DNA, 25 bp, Homo sapien
tcacgtttgcaagtgatggaccacc

SEQ ID NO: 1124299 - DNA, 25 bp, Homo sapien
caatattcacgtttgcaagtgatgg

SEQ ID NO: 1124300 - DNA, 25 bp, Homo sapien
gcctgaggcaatagcaatattcacg

SEQ ID NO: 1124301 - DNA, 25 bp, Homo sapien
cagggacgcacaatgatgcattata

SEQ ID NO: 1124302 - DNA, 25 bp, Homo sapien
ggtagtatgcatacagggacgcaca

SEQ ID NO: 1124303 - DNA, 25 bp, Homo sapien
cagtacaaggtagtatgcatacagg

SEQ ID NO: 1124304 - DNA, 25 bp, Homo sapien
tatgcatacagggacgcacaatgat

SEQ ID NO: 1124305 - DNA, 25 bp, Homo sapien
ttaaggagctttgcatagagtaaaa

SEQ ID NO: 1124306 - DNA, 25 bp, Homo sapien
aggagctttgcatagagtaaaatct

SEQ ID NO: 1124307 - DNA, 25 bp, Homo sapien
taaggagctttgcatagagtaaaat

SEQ ID NO: 1124308 - DNA, 25 bp, Homo sapien
ctttaaggagctttgcatagagtaa

SEQ ID NO: 1124309 - DNA, 25 bp, Homo sapien
catttctaatggcatatgggccact

SEQ ID NO: 1124310 - DNA, 25 bp, Homo sapien
acctcttaacatctcacagtatctc

SEQ ID NO: 1124311 - DNA, 25 bp, Homo sapien
ctttcccctgggatagccatgcatc

SEQ ID NO: 1124312 - DNA, 25 bp, Homo sapien
tctccaaaaacctcttaacatctca

SEQ ID NO: 1124313 - DNA, 25 bp, Homo sapien
cattgctcaggtaaagactcttcta

SEQ ID NO: 1124314 - DNA, 25 bp, Homo sapien
gttcctgatccctgttaactgcagt

SEQ ID NO: 1124315 - DNA, 25 bp, Homo sapien
acatacatatactaggccaggcgca

SEQ ID NO: 1124316 - DNA, 25 bp, Homo sapien
gaaccagttacacaatggttctctg

SEQ ID NO: 1124317 - DNA, 25 bp, Homo sapien
caacttttcagagagtcaactaggg

SEQ ID NO: 1124318 - DNA, 25 bp, Homo sapien
ccagagacataacaatggaggagaa

SEQ ID NO: 1124319 - DNA, 25 bp, Homo sapien
tcaactagggcacagccataccagt

SEQ ID NO: 1124320 - DNA, 25 bp, Homo sapien
gaggagaaagaattatgcacaggtt

SEQ ID NO: 1124321 - DNA, 25 bp, Homo sapien
ggaaagctctgcaagcaggcgaaaa

SEQ ID NO: 1124322 - DNA, 25 bp, Homo sapien
tgattcacaaacgggctggaaagct

SEQ ID NO: 1124323 - DNA, 25 bp, Homo sapien
ttcccaatgtatgccagcactccat

SEQ ID NO: 1124324 - DNA, 25 bp, Homo sapien
aaaattcccaatgtatgccagcact

SEQ ID NO: 1124325 - DNA, 25 bp, Homo sapien
agttgcaaatgtaatttcttcaggc

SEQ ID NO: 1124326 - DNA, 25 bp, Homo sapien
ttgcaaatgtaatttcttcaggcat

SEQ ID NO: 1124327 - DNA, 25 bp, Homo sapien
ttagttgcaaatgtaatttcttcag

SEQ ID NO: 1124328 - DNA, 25 bp, Homo sapien
atcttagttgcaaatgtaatttctt

SEQ ID NO: 1124329 - DNA, 25 bp, Homo sapien
taattgtgtagaggtatcgtactca

SEQ ID NO: 1124330 - DNA, 25 bp, Homo sapien
gaggtatcgtactcactaaaaattg

SEQ ID NO: 1124331 - DNA, 25 bp, Homo sapien
tgtgtagaggtatcgtactcactaa

SEQ ID NO: 1124332 - DNA, 25 bp, Homo sapien
ggtatcgtactcactaaaaattgtg

SEQ ID NO: 1124333 - DNA, 25 bp, Homo sapien
tggaggactcacactacccatttcc

SEQ ID NO: 1124334 - DNA, 25 bp, Homo sapien
caaagggcctagaatagcatacgca

SEQ ID NO: 1124335 - DNA, 25 bp, Homo sapien
caagtcagcatggtgttagtgaaag

SEQ ID NO: 1124336 - DNA, 25 bp, Homo sapien
cacatttatagtgcatctctgagga

SEQ ID NO: 1124337 - DNA, 25 bp, Homo sapien
gaagcattgaggcaatccgcacgat

SEQ ID NO: 1124338 - DNA, 25 bp, Homo sapien
tccgcacgatgaagaatactactgt

SEQ ID NO: 1124339 - DNA, 25 bp, Homo sapien
tgtagggttctgttccatacacgga

SEQ ID NO: 1124340 - DNA, 25 bp, Homo sapien
catacacggaatacatgaagccata

SEQ ID NO: 1124341 - DNA, 25 bp, Homo sapien
taagcacctatgatgtggacagcac

SEQ ID NO: 1124342 - DNA, 25 bp, Homo sapien
caaactgctacatggagactcacta

SEQ ID NO: 1124343 - DNA, 25 bp, Homo sapien
gcaaagtgtacctcctgcaaaggtc

SEQ ID NO: 1124344 - DNA, 25 bp, Homo sapien
gccaactaagtaagcacgggtatga

SEQ ID NO: 1124345 - DNA, 25 bp, Homo sapien
gatggtgcaaccaacagtaaacctg

SEQ ID NO: 1124346 - DNA, 25 bp, Homo sapien
taagaccgtcctgggtcatccataa

SEQ ID NO: 1124347 - DNA, 25 bp, Homo sapien
tctacaccagtgaagaaccattctc

SEQ ID NO: 1124348 - DNA, 25 bp, Homo sapien
cacttaacgtaaggctagtccatga

SEQ ID NO: 1124349 - DNA, 25 bp, Homo sapien
tgtttggaattaagagcaacctaga

SEQ ID NO: 1124350 - DNA, 25 bp, Homo sapien
aaatgtttggaattaagagcaacct

SEQ ID NO: 1124351 - DNA, 25 bp, Homo sapien
aatgtttggaattaagagcaaccta

SEQ ID NO: 1124352 - DNA, 25 bp, Homo sapien
taaatgtttggaattaagagcaacc

SEQ ID NO: 1124353 - DNA, 25 bp, Homo sapien
tatcacggcgtttaagggaaaagca

SEQ ID NO: 1124354 - DNA, 25 bp, Homo sapien
tagatcaagggaggactatcacggc

SEQ ID NO: 1124355 - DNA, 25 bp, Homo sapien
ttaacgagttttcagccagaggtac

SEQ ID NO: 1124356 - DNA, 25 bp, Homo sapien
tatgctggctcgcacctgagaaaca

SEQ ID NO: 1124357 - DNA, 25 bp, Homo sapien
tctcaagctccttgacttgacaggg

SEQ ID NO: 1124358 - DNA, 25 bp, Homo sapien
ttactatcatctctagacctttctc

SEQ ID NO: 1124359 - DNA, 25 bp, Homo sapien
tcaagctccttgacttgacagggct

SEQ ID NO: 1124360 - DNA, 25 bp, Homo sapien
actatcatctctagacctttctcaa

SEQ ID NO: 1124361 - DNA, 25 bp, Homo sapien
agaatataaatcctaattagtattt

SEQ ID NO: 1124362 - DNA, 25 bp, Homo sapien
tagaatataaatcctaattagtatt

SEQ ID NO: 1124363 - DNA, 25 bp, Homo sapien
ttacagtactattacatctattttc

SEQ ID NO: 1124364 - DNA, 25 bp, Homo sapien
aattacagtactattacatctattt

SEQ ID NO: 1124365 - DNA, 25 bp, Homo sapien
cattgctttatgttgtctattatcc

SEQ ID NO: 1124366 - DNA, 25 bp, Homo sapien
tttatgttgtctattatcctgtcta

SEQ ID NO: 1124367 - DNA, 25 bp, Homo sapien
taattaaacattgctttatgttgtc

SEQ ID NO: 1124368 - DNA, 25 bp, Homo sapien
taaacattgctttatgttgtctatt

SEQ ID NO: 1124369 - DNA, 25 bp, Homo sapien
gacacactgaatattattttcgtga

SEQ ID NO: 1124370 - DNA, 25 bp, Homo sapien
gaaatatgtgaataagacacactga

SEQ ID NO: 1124371 - DNA, 25 bp, Homo sapien
cctgtggaaatgttaatgactgtgc

SEQ ID NO: 1124372 - DNA, 25 bp, Homo sapien
ttttcgtgaggctcttcttcactgc

SEQ ID NO: 1124373 - DNA, 25 bp, Homo sapien
atgtttccagtgactacagcctttg

SEQ ID NO: 1124374 - DNA, 25 bp, Homo sapien
cttaatgtaataagtttcctcgtat

SEQ ID NO: 1124375 - DNA, 25 bp, Homo sapien
acagttagagcattgtctacctcca

SEQ ID NO: 1124376 - DNA, 25 bp, Homo sapien
tgtctacagttagagcattgtctac

SEQ ID NO: 1124377 - DNA, 25 bp, Homo sapien
ttcctcgtattcacaggctactgaa

SEQ ID NO: 1124378 - DNA, 25 bp, Homo sapien
cccaccgcctcagcgcttccccttc

SEQ ID NO: 1124379 - DNA, 25 bp, Homo sapien
ctcagcgcttccccttccgctgccg

SEQ ID NO: 1124380 - DNA, 25 bp, Homo sapien
gggccccaccgcctcagcgcttccc

SEQ ID NO: 1124381 - DNA, 25 bp, Homo sapien
cctcagcgcttccccttccgctgcc

SEQ ID NO: 1124382 - DNA, 25 bp, Homo sapien
gaaaatcgcggccaggaccgagagc

SEQ ID NO: 1124383 - DNA, 25 bp, Homo sapien
atcgcggccaggaccgagagctcct

SEQ ID NO: 1124384 - DNA, 25 bp, Homo sapien
aggaccgagagctcctcctgcacag

SEQ ID NO: 1124385 - DNA, 25 bp, Homo sapien
gcctgcagaaaatcgcggccaggac

SEQ ID NO: 1124386 - DNA, 25 bp, Homo sapien
gacacagaacaacgagggggcgtca

SEQ ID NO: 1124387 - DNA, 25 bp, Homo sapien
gggcatagtgcttaggaaggacaca

SEQ ID NO: 1124388 - DNA, 25 bp, Homo sapien
catagtgcttaggaaggacacagaa

SEQ ID NO: 1124389 - DNA, 25 bp, Homo sapien
cctagggcatagtgcttaggaagga

SEQ ID NO: 1124390 - DNA, 25 bp, Homo sapien
tgattccagtggcaaaagggagaac

SEQ ID NO: 1124391 - DNA, 25 bp, Homo sapien
tgcaacattctcctgattccagtgg

SEQ ID NO: 1124392 - DNA, 25 bp, Homo sapien
taatagttgatccttgggttagcag

SEQ ID NO: 1124393 - DNA, 25 bp, Homo sapien
tcttgttaccaggaatgcaattcct

SEQ ID NO: 1124394 - DNA, 25 bp, Homo sapien
tcccaggcaagcatacaccagtgct

SEQ ID NO: 1124395 - DNA, 25 bp, Homo sapien
taacgaacattgactatggccacat

SEQ ID NO: 1124396 - DNA, 25 bp, Homo sapien
tattacatgatattgggttctccca

SEQ ID NO: 1124397 - DNA, 25 bp, Homo sapien
tgacaatcagcataaaaccgagctg

SEQ ID NO: 1124398 - DNA, 25 bp, Homo sapien
tcatatgacacatgcactgtaagtc

SEQ ID NO: 1124399 - DNA, 25 bp, Homo sapien
tatatgttcggaagaaaactgcctt

SEQ ID NO: 1124400 - DNA, 25 bp, Homo sapien
tagaaaactgtgaccgtcatactag

SEQ ID NO: 1124401 - DNA, 25 bp, Homo sapien
aaagttgcccctatctgctttaagg

SEQ ID NO: 1124402 - DNA, 25 bp, Homo sapien
tttttctctgtgttattttctggtc

SEQ ID NO: 1124403 - DNA, 25 bp, Homo sapien
caattttcatttttctctgtgttat

SEQ ID NO: 1124404 - DNA, 25 bp, Homo sapien
catttttctctgtgttattttctgg

SEQ ID NO: 1124405 - DNA, 25 bp, Homo sapien
ttcatttttctctgtgttattttct

SEQ ID NO: 1124406 - DNA, 25 bp, Homo sapien
aagtcttgaaaagctactgagccag

SEQ ID NO: 1124407 - DNA, 25 bp, Homo sapien
aaagtcttgaaaagctactgagcca

SEQ ID NO: 1124408 - DNA, 25 bp, Homo sapien
gaaagtcttgaaaagctactgagcc

SEQ ID NO: 1124409 - DNA, 25 bp, Homo sapien
cgggtcctctctggtgcagggaacc

SEQ ID NO: 1124410 - DNA, 25 bp, Homo sapien
ggtcctctctggtgcagggaaccac

SEQ ID NO: 1124411 - DNA, 25 bp, Homo sapien
gcagggaaccacaggaaagaaacat

SEQ ID NO: 1124412 - DNA, 25 bp, Homo sapien
gtgcagggaaccacaggaaagaaac

SEQ ID NO: 1124413 - DNA, 25 bp, Homo sapien
tccacaggaaactctatcactggtc

SEQ ID NO: 1124414 - DNA, 25 bp, Homo sapien
aactctatcactggtcttgtgcttg

SEQ ID NO: 1124415 - DNA, 25 bp, Homo sapien
caactgccaaatcccacaagtcctc

SEQ ID NO: 1124416 - DNA, 25 bp, Homo sapien
ccttctttcatacttagcattcaac

SEQ ID NO: 1124417 - DNA, 25 bp, Homo sapien
tattgattcatacaggaccagacac

SEQ ID NO: 1124418 - DNA, 25 bp, Homo sapien
ccagctgcaaggaacgactatttta

SEQ ID NO: 1124419 - DNA, 25 bp, Homo sapien
cagttaaccgttaagaagaccatat

SEQ ID NO: 1124420 - DNA, 25 bp, Homo sapien
tctggaaacatagacagttaaccgt

SEQ ID NO: 1124421 - DNA, 25 bp, Homo sapien
tcatacctggattgctgctcaacag

SEQ ID NO: 1124422 - DNA, 25 bp, Homo sapien
gcctttgctttattcccctgcatga

SEQ ID NO: 1124423 - DNA, 25 bp, Homo sapien
aacaactgagacctgaatgtatccc

SEQ ID NO: 1124424 - DNA, 25 bp, Homo sapien
tgagagaagcagtcaaatctttccc

SEQ ID NO: 1124425 - DNA, 25 bp, Homo sapien
catgtgacatagtaactgcctggaa

SEQ ID NO: 1124426 - DNA, 25 bp, Homo sapien
caaagcaagcaatggaatcccctgt

SEQ ID NO: 1124427 - DNA, 25 bp, Homo sapien
tatgaagggacacgtaatactagga

SEQ ID NO: 1124428 - DNA, 25 bp, Homo sapien
gatttgcttggcttcaccctctgat

SEQ ID NO: 1124429 - DNA, 25 bp, Homo sapien
ctggaaggcatccaaaaataatcat

SEQ ID NO: 1124430 - DNA, 25 bp, Homo sapien
catccatggtcgtgcttgttgaaaa

SEQ ID NO: 1124431 - DNA, 25 bp, Homo sapien
tgaattctgaacacggtcccatctg

SEQ ID NO: 1124432 - DNA, 25 bp, Homo sapien
cactgggccctggtcaactgttcag

SEQ ID NO: 1124433 - DNA, 25 bp, Homo sapien
cataggctccgacaaaaggctctct

SEQ ID NO: 1124434 - DNA, 25 bp, Homo sapien
ttctccacaattttgacatatttag

SEQ ID NO: 1124435 - DNA, 25 bp, Homo sapien
ctccacaattttgacatatttagtc

SEQ ID NO: 1124436 - DNA, 25 bp, Homo sapien
tctccacaattttgacatatttagt

SEQ ID NO: 1124437 - DNA, 25 bp, Homo sapien
tccacaattttgacatatttagtct

SEQ ID NO: 1124438 - DNA, 25 bp, Homo sapien
tcctgtcagccttaaatctgaagcc

SEQ ID NO: 1124439 - DNA, 25 bp, Homo sapien
ttctgtctccctgtagtaaaatcag

SEQ ID NO: 1124440 - DNA, 25 bp, Homo sapien
cttgaggttgtttctgtctccctgt

SEQ ID NO: 1124441 - DNA, 25 bp, Homo sapien
tccctgtagtaaaatcagtattatt

SEQ ID NO: 1124442 - DNA, 25 bp, Homo sapien
ggttgtttctgtctccctgtagtaa

SEQ ID NO: 1124443 - DNA, 25 bp, Homo sapien
gctttgcaagtttgtacttgtaatt

SEQ ID NO: 1124444 - DNA, 25 bp, Homo sapien
tcttaataattaatctatcccattg

SEQ ID NO: 1124445 - DNA, 25 bp, Homo sapien
ggaagatccattaagattgtaataa

SEQ ID NO: 1124446 - DNA, 25 bp, Homo sapien
aatcttattcttcaagctttgcaag

SEQ ID NO: 1124447 - DNA, 25 bp, Homo sapien
tatctagatatagcgccatggcaca

SEQ ID NO: 1124448 - DNA, 25 bp, Homo sapien
taaatgacattaccaggcacacagc

SEQ ID NO: 1124449 - DNA, 25 bp, Homo sapien
catggcacacttgagagcacaagcc

SEQ ID NO: 1124450 - DNA, 25 bp, Homo sapien
accttgctgtgcctaactatgggaa

SEQ ID NO: 1124451 - DNA, 25 bp, Homo sapien
tttgtttcaaacagtacactaatca

SEQ ID NO: 1124452 - DNA, 25 bp, Homo sapien
gtttcaaacagtacactaatcattt

SEQ ID NO: 1124453 - DNA, 25 bp, Homo sapien
tccacttgagtccacatctactttg

SEQ ID NO: 1124454 - DNA, 25 bp, Homo sapien
atttctttccacttgagtccacatc

SEQ ID NO: 1124455 - DNA, 25 bp, Homo sapien
gagtataattatcgattcagttgct

SEQ ID NO: 1124456 - DNA, 25 bp, Homo sapien
gaaactcatgaatatgcctagattt

SEQ ID NO: 1124457 - DNA, 25 bp, Homo sapien
catctgcaatagtactaaattatac

SEQ ID NO: 1124458 - DNA, 25 bp, Homo sapien
tgaatatgcctagatttgtcagagt

SEQ ID NO: 1124459 - DNA, 25 bp, Homo sapien
cagagcaagtacaaattcggagaaa

SEQ ID NO: 1124460 - DNA, 25 bp, Homo sapien
gagcaagtacaaattcggagaaaag

SEQ ID NO: 1124461 - DNA, 25 bp, Homo sapien
caaattccttttgtaattcatccaa

SEQ ID NO: 1124462 - DNA, 25 bp, Homo sapien
caacgctgaatactctttgacttca

SEQ ID NO: 1124463 - DNA, 25 bp, Homo sapien
tagccagaaaattacatagtttcaa

SEQ ID NO: 1124464 - DNA, 25 bp, Homo sapien
cctggcaaacattagaatatacaag

SEQ ID NO: 1124465 - DNA, 25 bp, Homo sapien
cactgctattttactaaaagattcc

SEQ ID NO: 1124466 - DNA, 25 bp, Homo sapien
atctactgaacctagcctttcctgg

SEQ ID NO: 1124467 - DNA, 25 bp, Homo sapien
gaaaatggcgatcaaatgctaaaaa

SEQ ID NO: 1124468 - DNA, 25 bp, Homo sapien
atgggggaaaatggcgatcaaatgc

SEQ ID NO: 1124469 - DNA, 25 bp, Homo sapien
aaacattagacataacctggatggg

SEQ ID NO: 1124470 - DNA, 25 bp, Homo sapien
taaaacattagacataacctggatg

SEQ ID NO: 1124471 - DNA, 25 bp, Homo sapien
taggtcatgataagtatgtttcacc

SEQ ID NO: 1124472 - DNA, 25 bp, Homo sapien
gaatcaaatctctagtcctaaggct

SEQ ID NO: 1124473 - DNA, 25 bp, Homo sapien
caccatgttttgaccgatttcataa

SEQ ID NO: 1124474 - DNA, 25 bp, Homo sapien
tatcttacggcttctctcattaggt

SEQ ID NO: 1124475 - DNA, 25 bp, Homo sapien
ctctcaagccgtaggagtacaagga

SEQ ID NO: 1124476 - DNA, 25 bp, Homo sapien
gaattaacaccaataagaacagtag

SEQ ID NO: 1124477 - DNA, 25 bp, Homo sapien
tcaagctacagaatatctaggtggg

SEQ ID NO: 1124478 - DNA, 25 bp, Homo sapien
cagtcagaaacaagtaccaaagtag

SEQ ID NO: 1124479 - DNA, 25 bp, Homo sapien
taagctgcatgctcaagtggctcag

SEQ ID NO: 1124480 - DNA, 25 bp, Homo sapien
ggtcccaaaggtacaactaagctgc

SEQ ID NO: 1124481 - DNA, 25 bp, Homo sapien
tatagtaactagtccttctgcacag

SEQ ID NO: 1124482 - DNA, 25 bp, Homo sapien
gatcaggcacaagtgggtcccaaag

SEQ ID NO: 1124483 - DNA, 25 bp, Homo sapien
gaggctaaccatgccttagtgatga

SEQ ID NO: 1124484 - DNA, 25 bp, Homo sapien
ccaagattaatcctggaagcctaat

SEQ ID NO: 1124485 - DNA, 25 bp, Homo sapien
tgctaaagattagcagaggctaacc

SEQ ID NO: 1124486 - DNA, 25 bp, Homo sapien
tttgagactcaactacatagaggga

SEQ ID NO: 1124487 - DNA, 25 bp, Homo sapien
gctaacatatattagaatgtgctca

SEQ ID NO: 1124488 - DNA, 25 bp, Homo sapien
cagactgcccagtagaataatgaat

SEQ ID NO: 1124489 - DNA, 25 bp, Homo sapien
tattaatatccagcaccactagaca

SEQ ID NO: 1124490 - DNA, 25 bp, Homo sapien
gaggatgtccaaatggctaacatat

SEQ ID NO: 1124491 - DNA, 25 bp, Homo sapien
ctgcaacaaagaagggttgttaaag

SEQ ID NO: 1124492 - DNA, 25 bp, Homo sapien
cttcactgcaacaaagaagggttgt

SEQ ID NO: 1124493 - DNA, 25 bp, Homo sapien
cactgcaacaaagaagggttgttaa

SEQ ID NO: 1124494 - DNA, 25 bp, Homo sapien
ttcactgcaacaaagaagggttgtt

SEQ ID NO: 1124495 - DNA, 25 bp, Homo sapien
cgtgtttgttcttgacaaacaagtc

SEQ ID NO: 1124496 - DNA, 25 bp, Homo sapien
ttgttcttgacaaacaagtctgttc

SEQ ID NO: 1124497 - DNA, 25 bp, Homo sapien
tgcgtgtttgttcttgacaaacaag

SEQ ID NO: 1124498 - DNA, 25 bp, Homo sapien
gttcttgacaaacaagtctgttctc

SEQ ID NO: 1124499 - DNA, 25 bp, Homo sapien
tccatggtcacttctagagctacag

SEQ ID NO: 1124500 - DNA, 25 bp, Homo sapien
taattctgaggtagtgacaagccca

SEQ ID NO: 1124501 - DNA, 25 bp, Homo sapien
gctcccagagggtcaaatgtaatgt

SEQ ID NO: 1124502 - DNA, 25 bp, Homo sapien
tgtagatttggaggtctgcggcccc

SEQ ID NO: 1124503 - DNA, 25 bp, Homo sapien
agcaaccacagagtgttctgagatt

SEQ ID NO: 1124504 - DNA, 25 bp, Homo sapien
ggcagcaaccacagagtgttctgag

SEQ ID NO: 1124505 - DNA, 25 bp, Homo sapien
gcggcactttgtcagcttgaaccat

SEQ ID NO: 1124506 - DNA, 25 bp, Homo sapien
accagcggcactttgtcagcttgaa

SEQ ID NO: 1124507 - DNA, 25 bp, Homo sapien
aagcagcaatagtgactgtcttccc

SEQ ID NO: 1124508 - DNA, 25 bp, Homo sapien
aaagcagcaatagtgactgtcttcc

SEQ ID NO: 1124509 - DNA, 25 bp, Homo sapien
gcagcggcttgcttcgttgtaaagc

SEQ ID NO: 1124510 - DNA, 25 bp, Homo sapien
gatgagattcgcacaggccttttca

SEQ ID NO: 1124511 - DNA, 25 bp, Homo sapien
ttttcaggaacattatataacatct

SEQ ID NO: 1124512 - DNA, 25 bp, Homo sapien
ctcctgctcatggactgccagagat

SEQ ID NO: 1124513 - DNA, 25 bp, Homo sapien
tgatttccttaatatacttaaaaga

SEQ ID NO: 1124514 - DNA, 25 bp, Homo sapien
aagagataaaatcccactgatgcct

SEQ ID NO: 1124515 - DNA, 25 bp, Homo sapien
aaaagagataaaatcccactgatgc

SEQ ID NO: 1124516 - DNA, 25 bp, Homo sapien
tccttaatatacttaaaagagataa

SEQ ID NO: 1124517 - DNA, 25 bp, Homo sapien
cttgcaggcaaacagaacacactct

SEQ ID NO: 1124518 - DNA, 25 bp, Homo sapien
cagtagtgagctcattttgaagtgc

SEQ ID NO: 1124519 - DNA, 25 bp, Homo sapien
tgaagtgcttgctttaacccctgaa

SEQ ID NO: 1124520 - DNA, 25 bp, Homo sapien
gagttgcatccctttgtctgggtag

SEQ ID NO: 1124521 - DNA, 25 bp, Homo sapien
catggtcagtaagagtagggaagca

SEQ ID NO: 1124522 - DNA, 25 bp, Homo sapien
ttcatgtaatgaaaccaggatcttt

SEQ ID NO: 1124523 - DNA, 25 bp, Homo sapien
ctgcaagataatgggatgaacttat

SEQ ID NO: 1124524 - DNA, 25 bp, Homo sapien
tagggaagcatctggattcattgac

SEQ ID NO: 1124525 - DNA, 25 bp, Homo sapien
ctgctgaattggatctcgctttaac

SEQ ID NO: 1124526 - DNA, 25 bp, Homo sapien
tgctgaattggatctcgctttaact

SEQ ID NO: 1124527 - DNA, 25 bp, Homo sapien
atgctcggtgtttcagaggctctgc

SEQ ID NO: 1124528 - DNA, 25 bp, Homo sapien
agttgaccctagaattcgtccagtg

SEQ ID NO: 1124529 - DNA, 25 bp, Homo sapien
ctagaattcgtccagtgttccatgc

SEQ ID NO: 1124530 - DNA, 25 bp, Homo sapien
ccagtgttccatgctcggtgtttca

SEQ ID NO: 1124531 - DNA, 25 bp, Homo sapien
caacaatcgaccttgaataagatct

SEQ ID NO: 1124532 - DNA, 25 bp, Homo sapien
ggacaggcacactctggtattatcc

SEQ ID NO: 1124533 - DNA, 25 bp, Homo sapien
tctttgtgggcccttgatcaacaat

SEQ ID NO: 1124534 - DNA, 25 bp, Homo sapien
actcatgactgtggacaggcacact

SEQ ID NO: 1124535 - DNA, 25 bp, Homo sapien
tggaagagcaaatagctgtaccatt

SEQ ID NO: 1124536 - DNA, 25 bp, Homo sapien
tttcttcatgttactgggtgagaat

SEQ ID NO: 1124537 - DNA, 25 bp, Homo sapien
ttatcacctttgttatcttaaacat

SEQ ID NO: 1124538 - DNA, 25 bp, Homo sapien
ggtgagaatccactccataccccag

SEQ ID NO: 1124539 - DNA, 25 bp, Homo sapien
gcctaggtcttggtattctctccac

SEQ ID NO: 1124540 - DNA, 25 bp, Homo sapien
gattagcgacattgccaaaaatgac

SEQ ID NO: 1124541 - DNA, 25 bp, Homo sapien
ggcgtgtggattcgggctgctgggc

SEQ ID NO: 1124542 - DNA, 25 bp, Homo sapien
gatcaggagagcctaggtcttggta

SEQ ID NO: 1124543 - DNA, 25 bp, Homo sapien
agtcggcccacgtgaataaattctg

SEQ ID NO: 1124544 - DNA, 25 bp, Homo sapien
gacaggattgccctttgacgtcaaa

SEQ ID NO: 1124545 - DNA, 25 bp, Homo sapien
gtcaaaactctcagtcggcccacgt

SEQ ID NO: 1124546 - DNA, 25 bp, Homo sapien
caatattgccatttgagtggtatca

SEQ ID NO: 1124547 - DNA, 25 bp, Homo sapien
gctttcctcagaaggtatgccatag

SEQ ID NO: 1124548 - DNA, 25 bp, Homo sapien
cagaaggtatgccataggcaatgct

SEQ ID NO: 1124549 - DNA, 25 bp, Homo sapien
aaggtatgccataggcaatgctgga

SEQ ID NO: 1124550 - DNA, 25 bp, Homo sapien
ttcctcagaaggtatgccataggca

SEQ ID NO: 1124551 - DNA, 25 bp, Homo sapien
ccactgtagtacaggccaaggcctg

SEQ ID NO: 1124552 - DNA, 25 bp, Homo sapien
gataaacagttgctactggaaacac

SEQ ID NO: 1124553 - DNA, 25 bp, Homo sapien
tgggtgggaatgtgacccaagccaa

SEQ ID NO: 1124554 - DNA, 25 bp, Homo sapien
gcctggtggcaaatttgggaagata

SEQ ID NO: 1124555 - DNA, 25 bp, Homo sapien
cttttcacaaattacagcaatttca

SEQ ID NO: 1124556 - DNA, 25 bp, Homo sapien
ttcatggctgaaagatgttgagggt

SEQ ID NO: 1124557 - DNA, 25 bp, Homo sapien
atttcatggctgaaagatgttgagg

SEQ ID NO: 1124558 - DNA, 25 bp, Homo sapien
tcacaaattacagcaatttcatggc

SEQ ID NO: 1124559 - DNA, 25 bp, Homo sapien
cttgtctgggtcctgagtagtgaga

SEQ ID NO: 1124560 - DNA, 25 bp, Homo sapien
ggccatttgagtagctgtcaccaca

SEQ ID NO: 1124561 - DNA, 25 bp, Homo sapien
tcaaggaccatatctgggtatgggc

SEQ ID NO: 1124562 - DNA, 25 bp, Homo sapien
caagtgaaagtcacctcaaggacca

SEQ ID NO: 1124563 - DNA, 25 bp, Homo sapien
tgtactcccacagctcgttgttcat

SEQ ID NO: 1124564 - DNA, 25 bp, Homo sapien
ccacagctcgttgttcataacttta

SEQ ID NO: 1124565 - DNA, 25 bp, Homo sapien
cttttctgtactcccacagctcgtt

SEQ ID NO: 1124566 - DNA, 25 bp, Homo sapien
tactcccacagctcgttgttcataa

SEQ ID NO: 1124567 - DNA, 25 bp, Homo sapien
attttgcataagtcatgtccagtgg

SEQ ID NO: 1124568 - DNA, 25 bp, Homo sapien
ttttgcataagtcatgtccagtggg

SEQ ID NO: 1124569 - DNA, 25 bp, Homo sapien
gtccagtggggtttcattagtgatg

SEQ ID NO: 1124570 - DNA, 25 bp, Homo sapien
gtgatgtagcagaacttgctcaagg

SEQ ID NO: 1124571 - DNA, 25 bp, Homo sapien
ggtttggccgctgccatttttcatt

SEQ ID NO: 1124572 - DNA, 25 bp, Homo sapien
tgatgatgttcacgaggacaacccc

SEQ ID NO: 1124573 - DNA, 25 bp, Homo sapien
gattagtctgatgatgttcacgagg

SEQ ID NO: 1124574 - DNA, 25 bp, Homo sapien
aggcgcgcttccacatgattagtct

SEQ ID NO: 1124575 - DNA, 25 bp, Homo sapien
gatccaactggcaccaggcgcgctt

SEQ ID NO: 1124576 - DNA, 25 bp, Homo sapien
cagcagcaaatgttgttctttgatt

SEQ ID NO: 1124577 - DNA, 25 bp, Homo sapien
cagcaaatgttgttctttgattttc

SEQ ID NO: 1124578 - DNA, 25 bp, Homo sapien
gaacagcagcaaatgttgttctttg

SEQ ID NO: 1124579 - DNA, 25 bp, Homo sapien
aacagcagcaaatgttgttctttga

SEQ ID NO: 1124580 - DNA, 25 bp, Homo sapien
ggaatcttgatgatcaccataaaca

SEQ ID NO: 1124581 - DNA, 25 bp, Homo sapien
gagggtccagtcctccgactgttct

SEQ ID NO: 1124582 - DNA, 25 bp, Homo sapien
gtccagtcctccgactgttctcaga

SEQ ID NO: 1124583 - DNA, 25 bp, Homo sapien
tcttgatgatcaccataaacagcag

SEQ ID NO: 1124584 - DNA, 25 bp, Homo sapien
ctgggacagagcaggtacagcaggg

SEQ ID NO: 1124585 - DNA, 25 bp, Homo sapien
cctgggacagagcaggtacagcagg

SEQ ID NO: 1124586 - DNA, 25 bp, Homo sapien
acagcagggcaggaggagtgcacag

SEQ ID NO: 1124587 - DNA, 25 bp, Homo sapien
gcagggcaggaggagtgcacagagc

SEQ ID NO: 1124588 - DNA, 25 bp, Homo sapien
cagtagctgtgctctgctactatca

SEQ ID NO: 1124589 - DNA, 25 bp, Homo sapien
ggctggtaccacctactgccagtag

SEQ ID NO: 1124590 - DNA, 25 bp, Homo sapien
gtgactgcagggctggtaccaccta

SEQ ID NO: 1124591 - DNA, 25 bp, Homo sapien
tattcatgatttgcagggtgactgc

SEQ ID NO: 1124592 - DNA, 25 bp, Homo sapien
accagtcccactaagagcttcctat

SEQ ID NO: 1124593 - DNA, 25 bp, Homo sapien
gagcttcctatagagatttaatcca

SEQ ID NO: 1124594 - DNA, 25 bp, Homo sapien
aatccatagccaaagatgatctcca

SEQ ID NO: 1124595 - DNA, 25 bp, Homo sapien
gatgatctccaccttatcttgctcc

SEQ ID NO: 1124596 - DNA, 25 bp, Homo sapien
gggagatccacaacttaaatggacc

SEQ ID NO: 1124597 - DNA, 25 bp, Homo sapien
gagatccacaacttaaatggaccaa

SEQ ID NO: 1124598 - DNA, 25 bp, Homo sapien
ctgggagatccacaacttaaatgga

SEQ ID NO: 1124599 - DNA, 25 bp, Homo sapien
tgggagatccacaacttaaatggac

SEQ ID NO: 1124600 - DNA, 25 bp, Homo sapien
tccagcaggtggcaatgggcatgac

SEQ ID NO: 1124601 - DNA, 25 bp, Homo sapien
gaggaagagtccagcaggtggcaat

SEQ ID NO: 1124602 - DNA, 25 bp, Homo sapien
aagagtccagcaggtggcaatgggc

SEQ ID NO: 1124603 - DNA, 25 bp, Homo sapien
gcaggtggcaatgggcatgactcat

SEQ ID NO: 1124604 - DNA, 25 bp, Homo sapien
gggatagtgatgctttgcaaggact

SEQ ID NO: 1124605 - DNA, 25 bp, Homo sapien
tagtgatgctttgcaaggactaagc

SEQ ID NO: 1124606 - DNA, 25 bp, Homo sapien
gatgctttgcaaggactaagctgat

SEQ ID NO: 1124607 - DNA, 25 bp, Homo sapien
tgatgctttgcaaggactaagctga

SEQ ID NO: 1124608 - DNA, 25 bp, Homo sapien
caggacagcggagacaaagggaacc

SEQ ID NO: 1124609 - DNA, 25 bp, Homo sapien
gaaattactgtaaggctgaatacaa

SEQ ID NO: 1124610 - DNA, 25 bp, Homo sapien
aattactgtaaggctgaatacaacg

SEQ ID NO: 1124611 - DNA, 25 bp, Homo sapien
gagaaattactgtaaggctgaatac

SEQ ID NO: 1124612 - DNA, 25 bp, Homo sapien
ctgtggagaaattactgtaaggctg

SEQ ID NO: 1124613 - DNA, 25 bp, Homo sapien
catatcctccacaggagatacatca

SEQ ID NO: 1124614 - DNA, 25 bp, Homo sapien
tgtgtggaccacattaaatgtgcac

SEQ ID NO: 1124615 - DNA, 25 bp, Homo sapien
cacttccaagcatgtagcccaacaa

SEQ ID NO: 1124616 - DNA, 25 bp, Homo sapien
gcatgtagcccaacaaattttcttc

SEQ ID NO: 1124617 - DNA, 25 bp, Homo sapien
acctgctgcaaccacaaggacatcc

SEQ ID NO: 1124618 - DNA, 25 bp, Homo sapien
cctgctgcaaccacaaggacatcct

SEQ ID NO: 1124619 - DNA, 25 bp, Homo sapien
tgtagtccttcggagtaacgcctca

SEQ ID NO: 1124620 - DNA, 25 bp, Homo sapien
ttactgtagtccttcggagtaacgc

SEQ ID NO: 1124621 - DNA, 25 bp, Homo sapien
tccttcggagtaacgcctcagcatc

SEQ ID NO: 1124622 - DNA, 25 bp, Homo sapien
tagtccttcggagtaacgcctcagc

SEQ ID NO: 1124623 - DNA, 25 bp, Homo sapien
cactcactacacacttgggctgcat

SEQ ID NO: 1124624 - DNA, 25 bp, Homo sapien
ctcactcactacacacttgggctgc

SEQ ID NO: 1124625 - DNA, 25 bp, Homo sapien
tcactcactacacacttgggctgca

SEQ ID NO: 1124626 - DNA, 25 bp, Homo sapien
cctcactcactacacacttgggctg

SEQ ID NO: 1124627 - DNA, 25 bp, Homo sapien
atgactgaacaggtgtagaggtccc

SEQ ID NO: 1124628 - DNA, 25 bp, Homo sapien
aatcctgaataggacaggtgaggtc

SEQ ID NO: 1124629 - DNA, 25 bp, Homo sapien
tgcgcacagcaggtagaaagaggcc

SEQ ID NO: 1124630 - DNA, 25 bp, Homo sapien
ggtcccatgcgcacagcaggtagaa

SEQ ID NO: 1124631 - DNA, 25 bp, Homo sapien
tcattcattgactccgggtaatgag

SEQ ID NO: 1124632 - DNA, 25 bp, Homo sapien
cattgactccgggtaatgagatttc

SEQ ID NO: 1124633 - DNA, 25 bp, Homo sapien
gactccgggtaatgagatttcatat

SEQ ID NO: 1124634 - DNA, 25 bp, Homo sapien
ccgggtaatgagatttcatattccg

SEQ ID NO: 1124635 - DNA, 25 bp, Homo sapien
tagacgttttcaggttaagatcttc

SEQ ID NO: 1124636 - DNA, 25 bp, Homo sapien
cccacattgctaaggatttgacttg

SEQ ID NO: 1124637 - DNA, 25 bp, Homo sapien
ccttatcaataaaaccccacattgc

SEQ ID NO: 1124638 - DNA, 25 bp, Homo sapien
ttagctagacgttttcaggttaaga

SEQ ID NO: 1124639 - DNA, 25 bp, Homo sapien
gcaagacagctaaacatcagtccag

SEQ ID NO: 1124640 - DNA, 25 bp, Homo sapien
gagtttgaagtctgtgatccaccaa

SEQ ID NO: 1124641 - DNA, 25 bp, Homo sapien
caaaaatacaagctggtgcaagaca

SEQ ID NO: 1124642 - DNA, 25 bp, Homo sapien
gagagaagctatcctacccagcaat

SEQ ID NO: 1124643 - DNA, 25 bp, Homo sapien
gaaaatgaaggtcctcgtgcttctt

SEQ ID NO: 1124644 - DNA, 25 bp, Homo sapien
tgaaggtcctcgtgcttctttgcat

SEQ ID NO: 1124645 - DNA, 25 bp, Homo sapien
cctcgtgcttctttgcatcagattc

SEQ ID NO: 1124646 - DNA, 25 bp, Homo sapien
ggtcctcgtgcttctttgcatcaga

SEQ ID NO: 1124647 - DNA, 25 bp, Homo sapien
tttggaaccaggcacgaattaggcc

SEQ ID NO: 1124648 - DNA, 25 bp, Homo sapien
tagtatctctttgtgcccgtgtgtg

SEQ ID NO: 1124649 - DNA, 25 bp, Homo sapien
caataatttattgctccccattctg

SEQ ID NO: 1124650 - DNA, 25 bp, Homo sapien
tgttcatgtgggtgcgtgtttcttc

SEQ ID NO: 1124651 - DNA, 25 bp, Homo sapien
atgggtcagacctccaacattggct

SEQ ID NO: 1124652 - DNA, 25 bp, Homo sapien
tcagacctccaacattggctggcaa

SEQ ID NO: 1124653 - DNA, 25 bp, Homo sapien
aggagagaaaagcatgggtcagacc

SEQ ID NO: 1124654 - DNA, 25 bp, Homo sapien
ggagagaaaagcatgggtcagacct

SEQ ID NO: 1124655 - DNA, 25 bp, Homo sapien
agttccaagcggctgagaaggcctc

SEQ ID NO: 1124656 - DNA, 25 bp, Homo sapien
gaatacctttaacatcccaagtctg

SEQ ID NO: 1124657 - DNA, 25 bp, Homo sapien
accctcaggctcgacatcatgttgg

SEQ ID NO: 1124658 - DNA, 25 bp, Homo sapien
tggactgtgcacagcacggagaccc

SEQ ID NO: 1124659 - DNA, 25 bp, Homo sapien
tctggctatgtgattcctgtggagg

SEQ ID NO: 1124660 - DNA, 25 bp, Homo sapien
cctgtggaggaattgccatttttct

SEQ ID NO: 1124661 - DNA, 25 bp, Homo sapien
ctatacaatgctgccatgctgacca

SEQ ID NO: 1124662 - DNA, 25 bp, Homo sapien
agccaattggtccaagccaggccaa

SEQ ID NO: 1124663 - DNA, 25 bp, Homo sapien
cttgggaaatttacatcaggcgagc

SEQ ID NO: 1124664 - DNA, 25 bp, Homo sapien
ccttagagactgactgaaacatgct

SEQ ID NO: 1124665 - DNA, 25 bp, Homo sapien
tcaggcgagcaattcaacaggtctt

SEQ ID NO: 1124666 - DNA, 25 bp, Homo sapien
tggttgaagtcaagagaccccatgc

SEQ ID NO: 1124667 - DNA, 25 bp, Homo sapien
tctgaacttactagtgactccaagg

SEQ ID NO: 1124668 - DNA, 25 bp, Homo sapien
cattaggttgacttaaaggttgaag

SEQ ID NO: 1124669 - DNA, 25 bp, Homo sapien
caaggtgaatcatttcattaggttg

SEQ ID NO: 1124670 - DNA, 25 bp, Homo sapien
tcgatggttcagcagtgtcctgggc

SEQ ID NO: 1124671 - DNA, 25 bp, Homo sapien
tcttacacgatatacagtactctcc

SEQ ID NO: 1124672 - DNA, 25 bp, Homo sapien
ttgggtgtcttgtcactctcccctc

SEQ ID NO: 1124673 - DNA, 25 bp, Homo sapien
tctcccctccaaagtagcttatctg

SEQ ID NO: 1124674 - DNA, 25 bp, Homo sapien
ccctgagacgagttatggaaatatc

SEQ ID NO: 1124675 - DNA, 25 bp, Homo sapien
gagtactagccaaggagctttgttc

SEQ ID NO: 1124676 - DNA, 25 bp, Homo sapien
tgggcttgagtactagccaaggagc

SEQ ID NO: 1124677 - DNA, 25 bp, Homo sapien
gcttgagtactagccaaggagcttt

SEQ ID NO: 1124678 - DNA, 25 bp, Homo sapien
gctgggcttgagtactagccaagga

SEQ ID NO: 1124679 - DNA, 25 bp, Homo sapien
tgacaacaacgacacctacatctat

SEQ ID NO: 1124680 - DNA, 25 bp, Homo sapien
gacaacaacgacacctacatctata

SEQ ID NO: 1124681 - DNA, 25 bp, Homo sapien
cacgaacacgattgtagggctttaa

SEQ ID NO: 1124682 - DNA, 25 bp, Homo sapien
tatttcgtcgacttccctttgcagc

SEQ ID NO: 1124683 - DNA, 25 bp, Homo sapien
tgagcaaaccgaggggggcacccca

SEQ ID NO: 1124684 - DNA, 25 bp, Homo sapien
cccatctacattgacacgaacacga

SEQ ID NO: 1124685 - DNA, 25 bp, Homo sapien
gggcaaaataaagtgccttccatgg

SEQ ID NO: 1124686 - DNA, 25 bp, Homo sapien
ggatgtcttccagaccgtcctgtag

SEQ ID NO: 1124687 - DNA, 25 bp, Homo sapien
aaataaagtgccttccatgggatgt

SEQ ID NO: 1124688 - DNA, 25 bp, Homo sapien
ttccatgggatgtcttccagaccgt

SEQ ID NO: 1124689 - DNA, 25 bp, Homo sapien
tacgagtgtatcttgtaacgctgcc

SEQ ID NO: 1124690 - DNA, 25 bp, Homo sapien
cgctgccatttaccttcaagagaaa

SEQ ID NO: 1124691 - DNA, 25 bp, Homo sapien
taccttcaagagaaatttgcgattt

SEQ ID NO: 1124692 - DNA, 25 bp, Homo sapien
tgtaacgctgccatttaccttcaag

SEQ ID NO: 1124693 - DNA, 25 bp, Homo sapien
ccaactcatatcctctgattttaaa

SEQ ID NO: 1124694 - DNA, 25 bp, Homo sapien
tagtgctgaatgaacatccagcagc

SEQ ID NO: 1124695 - DNA, 25 bp, Homo sapien
taaacactagtgctgaatgaacatc

SEQ ID NO: 1124696 - DNA, 25 bp, Homo sapien
cgggcttttgttaaacactagtgct

SEQ ID NO: 1124697 - DNA, 25 bp, Homo sapien
gatcctggataaagggactggctcc

SEQ ID NO: 1124698 - DNA, 25 bp, Homo sapien
catggtctccatgtaatgtgcgctc

SEQ ID NO: 1124699 - DNA, 25 bp, Homo sapien
aatcagtgtggccactatgagccgg

SEQ ID NO: 1124700 - DNA, 25 bp, Homo sapien
tatgagccggtctggcacattcttc

SEQ ID NO: 1124701 - DNA, 25 bp, Homo sapien
tgtcacttcctcaaagtaaccttcc

SEQ ID NO: 1124702 - DNA, 25 bp, Homo sapien
cttcagcctcaagccataatattca

SEQ ID NO: 1124703 - DNA, 25 bp, Homo sapien
ttttgacattacctagctccctcac

SEQ ID NO: 1124704 - DNA, 25 bp, Homo sapien
tcctacatttaaaacttgacatttg

SEQ ID NO: 1124705 - DNA, 25 bp, Homo sapien
cagtcgatggtcatttgagttattc

SEQ ID NO: 1124706 - DNA, 25 bp, Homo sapien
ttatggccagttccactgtatggat

SEQ ID NO: 1124707 - DNA, 25 bp, Homo sapien
gatttatgcaaccatctccacagca

SEQ ID NO: 1124708 - DNA, 25 bp, Homo sapien
gtgaatggaatgatatatgtggccc

SEQ ID NO: 1124709 - DNA, 25 bp, Homo sapien
ctggcagatccaggcattctcgcat

SEQ ID NO: 1124710 - DNA, 25 bp, Homo sapien
tatagcatccagctccaagcagctc

SEQ ID NO: 1124711 - DNA, 25 bp, Homo sapien
tctcttctgtaaattgttagcacta

SEQ ID NO: 1124712 - DNA, 25 bp, Homo sapien
caaagatttttacaccacagtcaga

SEQ ID NO: 1124713 - DNA, 25 bp, Homo sapien
ctcaggtggagtagttttaagaggt

SEQ ID NO: 1124714 - DNA, 25 bp, Homo sapien
agtagttttaagaggtgaagccagc

SEQ ID NO: 1124715 - DNA, 25 bp, Homo sapien
ggagtagttttaagaggtgaagcca

SEQ ID NO: 1124716 - DNA, 25 bp, Homo sapien
gtggagtagttttaagaggtgaagc

SEQ ID NO: 1124717 - DNA, 25 bp, Homo sapien
cagccccactgcatcatcttgacca

SEQ ID NO: 1124718 - DNA, 25 bp, Homo sapien
gccccactgcatcatcttgaccaaa

SEQ ID NO: 1124719 - DNA, 25 bp, Homo sapien
agccccactgcatcatcttgaccaa

SEQ ID NO: 1124720 - DNA, 25 bp, Homo sapien
attaccatcatagagaaccaaatag

SEQ ID NO: 1124721 - DNA, 25 bp, Homo sapien
aagaatgttcccatgatattaccat

SEQ ID NO: 1124722 - DNA, 25 bp, Homo sapien
catcatagagaaccaaataggccat

SEQ ID NO: 1124723 - DNA, 25 bp, Homo sapien
tgttcccatgatattaccatcatag

SEQ ID NO: 1124724 - DNA, 25 bp, Homo sapien
taaatagggccacaatatcaagttc

SEQ ID NO: 1124725 - DNA, 25 bp, Homo sapien
caagttcatctacactgttagtgag

SEQ ID NO: 1124726 - DNA, 25 bp, Homo sapien
tagtggcagccagggaaactttgag

SEQ ID NO: 1124727 - DNA, 25 bp, Homo sapien
gaggtctttatcactgccaagttca

SEQ ID NO: 1124728 - DNA, 25 bp, Homo sapien
gacttgggttggtggaatgcattca

SEQ ID NO: 1124729 - DNA, 25 bp, Homo sapien
taaagggtgtttcatgatccttcca

SEQ ID NO: 1124730 - DNA, 25 bp, Homo sapien
gctaacggaatgaaacacgcatggg

SEQ ID NO: 1124731 - DNA, 25 bp, Homo sapien
cagtacgttcaaaagtgctaacgga

SEQ ID NO: 1124732 - DNA, 25 bp, Homo sapien
tttctgtggtcacaccccgatgtat

SEQ ID NO: 1124733 - DNA, 25 bp, Homo sapien
tcacaccccgatgtatgaaccacaa

SEQ ID NO: 1124734 - DNA, 25 bp, Homo sapien
cctgtgggcaaccaagaggatgtgt

SEQ ID NO: 1124735 - DNA, 25 bp, Homo sapien
tgggcaaccaagaggatgtgttttc

SEQ ID NO: 1124736 - DNA, 25 bp, Homo sapien
ggaactgtgcgggtttccagcaggc

SEQ ID NO: 1124737 - DNA, 25 bp, Homo sapien
ataaaggaactgtgcgggtttccag

SEQ ID NO: 1124738 - DNA, 25 bp, Homo sapien
aaggaactgtgcgggtttccagcag

SEQ ID NO: 1124739 - DNA, 25 bp, Homo sapien
aactgtgcgggtttccagcaggctg

SEQ ID NO: 1124740 - DNA, 25 bp, Homo sapien
tctgaaccaggtatgatcaccctct

SEQ ID NO: 1124741 - DNA, 25 bp, Homo sapien
gaagaggtagtacagggatctgaac

SEQ ID NO: 1124742 - DNA, 25 bp, Homo sapien
gatcaccctcttcgttcaatggcaa

SEQ ID NO: 1124743 - DNA, 25 bp, Homo sapien
tcttcgttcaatggcaagaatttaa

SEQ ID NO: 1124744 - DNA, 25 bp, Homo sapien
gaaacttaactgttcctccctcagc

SEQ ID NO: 1124745 - DNA, 25 bp, Homo sapien
ctccctcagctctgctattatgctt

SEQ ID NO: 1124746 - DNA, 25 bp, Homo sapien
agaaacttaactgttcctccctcag

SEQ ID NO: 1124747 - DNA, 25 bp, Homo sapien
cctcagctctgctattatgctttcc

SEQ ID NO: 1124748 - DNA, 25 bp, Homo sapien
acggtgtgaggaggaataatttcaa

SEQ ID NO: 1124749 - DNA, 25 bp, Homo sapien
tttcaatgtcgtcgtggcaaaactg

SEQ ID NO: 1124750 - DNA, 25 bp, Homo sapien
aataatttcaatgtcgtcgtggcaa

SEQ ID NO: 1124751 - DNA, 25 bp, Homo sapien
caatgtcgtcgtggcaaaactggac

SEQ ID NO: 1124752 - DNA, 25 bp, Homo sapien
agtttgaataaacataaccattgac

SEQ ID NO: 1124753 - DNA, 25 bp, Homo sapien
gcagtttgaataaacataaccattg

SEQ ID NO: 1124754 - DNA, 25 bp, Homo sapien
cagcagtttgaataaacataaccat

SEQ ID NO: 1124755 - DNA, 25 bp, Homo sapien
tcagcagtttgaataaacataacca

SEQ ID NO: 1124756 - DNA, 25 bp, Homo sapien
gagtaattcaattgcctcatttgcc

SEQ ID NO: 1124757 - DNA, 25 bp, Homo sapien
gaaacattgagtaattcaattgcct

SEQ ID NO: 1124758 - DNA, 25 bp, Homo sapien
catgcacaggaaacattgagtaatt

SEQ ID NO: 1124759 - DNA, 25 bp, Homo sapien
aattcaattgcctcatttgccatca

SEQ ID NO: 1124760 - DNA, 25 bp, Homo sapien
caaagttgaagaaagacacccaggt

SEQ ID NO: 1124761 - DNA, 25 bp, Homo sapien
tccccactctgagaacgagattctt

SEQ ID NO: 1124762 - DNA, 25 bp, Homo sapien
tctaaaaggagcatcacagctagtc

SEQ ID NO: 1124763 - DNA, 25 bp, Homo sapien
tgcctggacaggtcgaatactaagt

SEQ ID NO: 1124764 - DNA, 25 bp, Homo sapien
cctcatgcccttcttactgaccagg

SEQ ID NO: 1124765 - DNA, 25 bp, Homo sapien
tcctcatgcccttcttactgaccag

SEQ ID NO: 1124766 - DNA, 25 bp, Homo sapien
ctcatgcccttcttactgaccagga

SEQ ID NO: 1124767 - DNA, 25 bp, Homo sapien
cctcctcatgcccttcttactgacc

SEQ ID NO: 1124768 - DNA, 25 bp, Homo sapien
gtagggccactgtagaaacaagccg

SEQ ID NO: 1124769 - DNA, 25 bp, Homo sapien
tcactggggctcctctggatctcca

SEQ ID NO: 1124770 - DNA, 25 bp, Homo sapien
ctgtagaaacaagccggtcactggg

SEQ ID NO: 1124771 - DNA, 25 bp, Homo sapien
tctgaccccactcctttagatgaat

SEQ ID NO: 1124772 - DNA, 25 bp, Homo sapien
aattgctctttcaggaggttctcca

SEQ ID NO: 1124773 - DNA, 25 bp, Homo sapien
ttccacatagacttgtctacagact

SEQ ID NO: 1124774 - DNA, 25 bp, Homo sapien
caattgctctttcaggaggttctcc

SEQ ID NO: 1124775 - DNA, 25 bp, Homo sapien
acagactgaaatcagctctccaatt

SEQ ID NO: 1124776 - DNA, 25 bp, Homo sapien
cagccttctccaagtacagcataga

SEQ ID NO: 1124777 - DNA, 25 bp, Homo sapien
agccttctccaagtacagcatagag

SEQ ID NO: 1124778 - DNA, 25 bp, Homo sapien
cattcgcatgaatgttgtcctggac

SEQ ID NO: 1124779 - DNA, 25 bp, Homo sapien
ctggacaaatcaaagtgccgacact

SEQ ID NO: 1124780 - DNA, 25 bp, Homo sapien
tctgctgggagcttcattatgctga

SEQ ID NO: 1124781 - DNA, 25 bp, Homo sapien
cactttaggagaaaggcgctgtctg

SEQ ID NO: 1124782 - DNA, 25 bp, Homo sapien
tggaccagaaatctgaaaaggtttg

SEQ ID NO: 1124783 - DNA, 25 bp, Homo sapien
tgtttaatcttcttcccctgcgcat

SEQ ID NO: 1124784 - DNA, 25 bp, Homo sapien
tttgtttaatcttcttcccctgcgc

SEQ ID NO: 1124785 - DNA, 25 bp, Homo sapien
ctggaccagaaatctgaaaaggttt

SEQ ID NO: 1124786 - DNA, 25 bp, Homo sapien
tgaactcaatccacaggtacatcgt

SEQ ID NO: 1124787 - DNA, 25 bp, Homo sapien
acattagataggtcgcatgatggca

SEQ ID NO: 1124788 - DNA, 25 bp, Homo sapien
ggtacatcgttgcagtcgccttggg

SEQ ID NO: 1124789 - DNA, 25 bp, Homo sapien
gagttggaatggatggccacctgca

SEQ ID NO: 1124790 - DNA, 25 bp, Homo sapien
attttcaatatatgtgttgatatct

SEQ ID NO: 1124791 - DNA, 25 bp, Homo sapien
cagattttcaatatatgtgttgata

SEQ ID NO: 1124792 - DNA, 25 bp, Homo sapien
tcaatatatgtgttgatatctgcca

SEQ ID NO: 1124793 - DNA, 25 bp, Homo sapien
tttcaatatatgtgttgatatctgc

SEQ ID NO: 1124794 - DNA, 25 bp, Homo sapien
agatttaccaggttcccagattcca

SEQ ID NO: 1124795 - DNA, 25 bp, Homo sapien
tcaggtttgaatcagatttaccagg

SEQ ID NO: 1124796 - DNA, 25 bp, Homo sapien
cagatttaccaggttcccagattcc

SEQ ID NO: 1124797 - DNA, 25 bp, Homo sapien
tcagatttaccaggttcccagattc

SEQ ID NO: 1124798 - DNA, 25 bp, Homo sapien
gaaggtggtctcctctcaaatgtcc

SEQ ID NO: 1124799 - DNA, 25 bp, Homo sapien
aaggtggtctcctctcaaatgtccc

SEQ ID NO: 1124800 - DNA, 25 bp, Homo sapien
aggtggtctcctctcaaatgtccct

SEQ ID NO: 1124801 - DNA, 25 bp, Homo sapien
gcgtgtagtaggggcagcatctctc

SEQ ID NO: 1124802 - DNA, 25 bp, Homo sapien
cctgcaagtgcccatggagcgtgta

SEQ ID NO: 1124803 - DNA, 25 bp, Homo sapien
gcagatgtcgggagctctgtctcct

SEQ ID NO: 1124804 - DNA, 25 bp, Homo sapien
ggcagatgtcgggagctctgtctcc

SEQ ID NO: 1124805 - DNA, 25 bp, Homo sapien
atattgcagtctatcctcataggta

SEQ ID NO: 1124806 - DNA, 25 bp, Homo sapien
ttatggctattaaatgaaattgcag

SEQ ID NO: 1124807 - DNA, 25 bp, Homo sapien
ccattagagtaatggtttatggcta

SEQ ID NO: 1124808 - DNA, 25 bp, Homo sapien
cataggtatttgtcaaaccattaga

SEQ ID NO: 1124809 - DNA, 25 bp, Homo sapien
aacatgaagtttccacgtcccttgt

SEQ ID NO: 1124810 - DNA, 25 bp, Homo sapien
acgtcccttgtgaatctgttctatg

SEQ ID NO: 1124811 - DNA, 25 bp, Homo sapien
tcatgatggttctatcaaacatgaa

SEQ ID NO: 1124812 - DNA, 25 bp, Homo sapien
tccctgaatttcaatggctcacaaa

SEQ ID NO: 1124813 - DNA, 25 bp, Homo sapien
aataaacagcatttccacggcccat

SEQ ID NO: 1124814 - DNA, 25 bp, Homo sapien
gaagccaattaagtagttaaagatc

SEQ ID NO: 1124815 - DNA, 25 bp, Homo sapien
gcccagtatgcagattgctttttct

SEQ ID NO: 1124816 - DNA, 25 bp, Homo sapien
tatacaagcctataaagtcacagcc

SEQ ID NO: 1124817 - DNA, 25 bp, Homo sapien
caaatgttatgtagccttcaatgtc

SEQ ID NO: 1124818 - DNA, 25 bp, Homo sapien
tcaatgtcaggctccctgcagtttc

SEQ ID NO: 1124819 - DNA, 25 bp, Homo sapien
cctttttctatctgcagttccatgg

SEQ ID NO: 1124820 - DNA, 25 bp, Homo sapien
ttctatctgcagttccatggctcat

SEQ ID NO: 1124821 - DNA, 25 bp, Homo sapien
taaaggtcaacatcacaaattgctg

SEQ ID NO: 1124822 - DNA, 25 bp, Homo sapien
catacctcatatggcaacaaattgg

SEQ ID NO: 1124823 - DNA, 25 bp, Homo sapien
ggtgggcctcctatttgcatattaa

SEQ ID NO: 1124824 - DNA, 25 bp, Homo sapien
cagtgacatctttgggcgttggtga

SEQ ID NO: 1124825 - DNA, 25 bp, Homo sapien
ggcaagggaatttgatagatttggc

SEQ ID NO: 1124826 - DNA, 25 bp, Homo sapien
ggaatttgatagatttggcagcgac

SEQ ID NO: 1124827 - DNA, 25 bp, Homo sapien
aaaatggcaagggaatttgatagat

SEQ ID NO: 1124828 - DNA, 25 bp, Homo sapien
caagggaatttgatagatttggcag

SEQ ID NO: 1124829 - DNA, 25 bp, Homo sapien
ttcactgtcagctaagatggctgtg

SEQ ID NO: 1124830 - DNA, 25 bp, Homo sapien
aatatcttcactgtcagctaagatg

SEQ ID NO: 1124831 - DNA, 25 bp, Homo sapien
gttattcaaatatgacttagaacaa

SEQ ID NO: 1124832 - DNA, 25 bp, Homo sapien
ctaagatggctgtgttattcaaata

SEQ ID NO: 1124833 - DNA, 25 bp, Homo sapien
tcagtgccaatggaactgttgaggt

SEQ ID NO: 1124834 - DNA, 25 bp, Homo sapien
ttgaggtaacatcatccatatctgt

SEQ ID NO: 1124835 - DNA, 25 bp, Homo sapien
cattgcacccaagaataagttcagt

SEQ ID NO: 1124836 - DNA, 25 bp, Homo sapien
ccaatggaactgttgaggtaacatc

SEQ ID NO: 1124837 - DNA, 25 bp, Homo sapien
tgacagccgaactagtagcaaggtt

SEQ ID NO: 1124838 - DNA, 25 bp, Homo sapien
gagctgaaagcgattttgacagccg

SEQ ID NO: 1124839 - DNA, 25 bp, Homo sapien
ttctctgggagagtgtcaacaccaa

SEQ ID NO: 1124840 - DNA, 25 bp, Homo sapien
taagaaagctgaagtcttaagtgga

SEQ ID NO: 1124841 - DNA, 25 bp, Homo sapien
aaaactatagcttatctgtggctgt

SEQ ID NO: 1124842 - DNA, 25 bp, Homo sapien
cagcctggaaaaactatagcttatc

SEQ ID NO: 1124843 - DNA, 25 bp, Homo sapien
ggcaagacagcacgatgcaagtgtg

SEQ ID NO: 1124844 - DNA, 25 bp, Homo sapien
gggaaaagataattacacaggacag

SEQ ID NO: 1124845 - DNA, 25 bp, Homo sapien
ctaactggaaaatggtaagctgttt

SEQ ID NO: 1124846 - DNA, 25 bp, Homo sapien
cctcccctatgcgtgccttactgat

SEQ ID NO: 1124847 - DNA, 25 bp, Homo sapien
gattttgaaaaactctgctaactgg

SEQ ID NO: 1124848 - DNA, 25 bp, Homo sapien
ctcttcctcccctatgcgtgcctta

SEQ ID NO: 1124849 - DNA, 25 bp, Homo sapien
cctgcaatgcttggtggtatacctg

SEQ ID NO: 1124850 - DNA, 25 bp, Homo sapien
agttctgggaacctgcaatgcttgg

SEQ ID NO: 1124851 - DNA, 25 bp, Homo sapien
aatgcttggtggtatacctgggcca

SEQ ID NO: 1124852 - DNA, 25 bp, Homo sapien
tctgggaacctgcaatgcttggtgg

SEQ ID NO: 1124853 - DNA, 25 bp, Homo sapien
accacaatagaacttgatctgttct

SEQ ID NO: 1124854 - DNA, 25 bp, Homo sapien
caatagaacttgatctgttctgaag

SEQ ID NO: 1124855 - DNA, 25 bp, Homo sapien
ggagatgagtcaacggaaggggtgg

SEQ ID NO: 1124856 - DNA, 25 bp, Homo sapien
tagaacttgatctgttctgaagtgg

SEQ ID NO: 1124857 - DNA, 25 bp, Homo sapien
tagagttagggtcacatctgctcct

SEQ ID NO: 1124858 - DNA, 25 bp, Homo sapien
gaagtcaccagtagattcatccttt

SEQ ID NO: 1124859 - DNA, 25 bp, Homo sapien
taaaaagcctactcctgaagtcacc

SEQ ID NO: 1124860 - DNA, 25 bp, Homo sapien
tattcctgaacgctgtataaaggtg

SEQ ID NO: 1124861 - DNA, 25 bp, Homo sapien
tatgaaattagtctcgggcttgagg

SEQ ID NO: 1124862 - DNA, 25 bp, Homo sapien
tcccatgactctccaaaaagattca

SEQ ID NO: 1124863 - DNA, 25 bp, Homo sapien
tccagatgtggcagaggctccatag

SEQ ID NO: 1124864 - DNA, 25 bp, Homo sapien
tgtcatcaaaatcaggtccagatgt

SEQ ID NO: 1124865 - DNA, 25 bp, Homo sapien
ggcttcgagacttggctcccagcta

SEQ ID NO: 1124866 - DNA, 25 bp, Homo sapien
aattctgagatgtatccacttcccc

SEQ ID NO: 1124867 - DNA, 25 bp, Homo sapien
cagtcgtgtgtatcaggaaacccaa

SEQ ID NO: 1124868 - DNA, 25 bp, Homo sapien
gacatcttctccagtaaacaatgcc

SEQ ID NO: 1124869 - DNA, 25 bp, Homo sapien
caccatgaagctctcagtgtttaaa

SEQ ID NO: 1124870 - DNA, 25 bp, Homo sapien
agtacctatttcacatgattgggat

SEQ ID NO: 1124871 - DNA, 25 bp, Homo sapien
attacataagttgatccatttctag

SEQ ID NO: 1124872 - DNA, 25 bp, Homo sapien
gaatgttagcgtatattcattgctc

SEQ ID NO: 1124873 - DNA, 25 bp, Homo sapien
tcttcaagtctttgcagtactctga

SEQ ID NO: 1124874 - DNA, 25 bp, Homo sapien
ttctgtccactctttcatagtactc

SEQ ID NO: 1124875 - DNA, 25 bp, Homo sapien
gctgcgtcttagctcttgatacccc

SEQ ID NO: 1124876 - DNA, 25 bp, Homo sapien
tgcagtactctgagtgtccttttcc

SEQ ID NO: 1124877 - DNA, 25 bp, Homo sapien
gtaggtacctatctcccctgaatga

SEQ ID NO: 1124878 - DNA, 25 bp, Homo sapien
gacatttatgacatatccacctggt

SEQ ID NO: 1124879 - DNA, 25 bp, Homo sapien
gagacttagcccaatataaacaaga

SEQ ID NO: 1124880 - DNA, 25 bp, Homo sapien
tcattgcagtgaggtccattttatc

SEQ ID NO: 1124881 - DNA, 25 bp, Homo sapien
gatctttataccaagtggagcacca

SEQ ID NO: 1124882 - DNA, 25 bp, Homo sapien
cattgtttcatcttggacagctggt

SEQ ID NO: 1124883 - DNA, 25 bp, Homo sapien
tcttaaagtaaggaatagtgtcact

SEQ ID NO: 1124884 - DNA, 25 bp, Homo sapien
cagctatcctacaacaaagaggaga

SEQ ID NO: 1124885 - DNA, 25 bp, Homo sapien
aacttgttgcctcacaggaagtgcc

SEQ ID NO: 1124886 - DNA, 25 bp, Homo sapien
tctccacactgtcatagcaaaaggc

SEQ ID NO: 1124887 - DNA, 25 bp, Homo sapien
gcctcttgacccagttaatatgacc

SEQ ID NO: 1124888 - DNA, 25 bp, Homo sapien
tggcatactcatgaatggaagacct

SEQ ID NO: 1124889 - DNA, 25 bp, Homo sapien
agataccctctgatcttttttgcca

SEQ ID NO: 1124890 - DNA, 25 bp, Homo sapien
ccgatttatctcacatgggcagtac

SEQ ID NO: 1124891 - DNA, 25 bp, Homo sapien
ggttgcttcaggatgtagatagtgc

SEQ ID NO: 1124892 - DNA, 25 bp, Homo sapien
tgtcaatgaccttcccagataccct

SEQ ID NO: 1124893 - DNA, 25 bp, Homo sapien
gaagcaaggatttctgtgatactaa

SEQ ID NO: 1124894 - DNA, 25 bp, Homo sapien
gggtcatgaagtaaatggcagcctt

SEQ ID NO: 1124895 - DNA, 25 bp, Homo sapien
tactaatcactagtcactccccaga

SEQ ID NO: 1124896 - DNA, 25 bp, Homo sapien
gagattaaattgtccttcaccaggg

SEQ ID NO: 1124897 - DNA, 25 bp, Homo sapien
catgaaggaaatatgggagctctaa

SEQ ID NO: 1124898 - DNA, 25 bp, Homo sapien
aagagaactcatgcagggaaacccc

SEQ ID NO: 1124899 - DNA, 25 bp, Homo sapien
tttactttcatgagaatagcccagg

SEQ ID NO: 1124900 - DNA, 25 bp, Homo sapien
aatgggtccctttcacaacatgaag

SEQ ID NO: 1124901 - DNA, 25 bp, Homo sapien
ctggaatcccacaattataatatgc

SEQ ID NO: 1124902 - DNA, 25 bp, Homo sapien
tgatgacttcagtataagaggccat

SEQ ID NO: 1124903 - DNA, 25 bp, Homo sapien
cacaattataatatgcaccacagtg

SEQ ID NO: 1124904 - DNA, 25 bp, Homo sapien
cacagtgatgacttcagtataagag

SEQ ID NO: 1124905 - DNA, 25 bp, Homo sapien
ctggaagtagcagcttcggagtgac

SEQ ID NO: 1124906 - DNA, 25 bp, Homo sapien
aagtagcagcttcggagtgactgac

SEQ ID NO: 1124907 - DNA, 25 bp, Homo sapien
tagcagcttcggagtgactgacgag

SEQ ID NO: 1124908 - DNA, 25 bp, Homo sapien
cttcggagtgactgacgagagccat

SEQ ID NO: 1124909 - DNA, 25 bp, Homo sapien
atatcacatacaataagggaaggca

SEQ ID NO: 1124910 - DNA, 25 bp, Homo sapien
gagtttttctgtgccctacttctgc

SEQ ID NO: 1124911 - DNA, 25 bp, Homo sapien
cccccgctgcactaaatcgacactt

SEQ ID NO: 1124912 - DNA, 25 bp, Homo sapien
ggaaggcagagtcttttgttgagtt

SEQ ID NO: 1124913 - DNA, 25 bp, Homo sapien
ttaatcaatatcttgattgactttc

SEQ ID NO: 1124914 - DNA, 25 bp, Homo sapien
gtaccttagtgtagttatcaacagg

SEQ ID NO: 1124915 - DNA, 25 bp, Homo sapien
ccttagtgtagttatcaacaggaat

SEQ ID NO: 1124916 - DNA, 25 bp, Homo sapien
cttattctttttgagtaccttagtg

SEQ ID NO: 1124917 - DNA, 25 bp, Homo sapien
aagactgagaactgtccttctgcat

SEQ ID NO: 1124918 - DNA, 25 bp, Homo sapien
ctggaagactgagaactgtccttct

SEQ ID NO: 1124919 - DNA, 25 bp, Homo sapien
ggaagactgagaactgtccttctgc

SEQ ID NO: 1124920 - DNA, 25 bp, Homo sapien
gaagactgagaactgtccttctgca

SEQ ID NO: 1124921 - DNA, 25 bp, Homo sapien
tctccacactaaagatgacttggag

SEQ ID NO: 1124922 - DNA, 25 bp, Homo sapien
aaattcatcaagcagactgatccaa

SEQ ID NO: 1124923 - DNA, 25 bp, Homo sapien
catgattccatgagttcaggtctcc

SEQ ID NO: 1124924 - DNA, 25 bp, Homo sapien
gagcaaacataatcactaggtttaa

SEQ ID NO: 1124925 - DNA, 25 bp, Homo sapien
gagtgcaatgaacacttctggaggc

SEQ ID NO: 1124926 - DNA, 25 bp, Homo sapien
gagagtgcaatgaacacttctggag

SEQ ID NO: 1124927 - DNA, 25 bp, Homo sapien
cagagagtgcaatgaacacttctgg

SEQ ID NO: 1124928 - DNA, 25 bp, Homo sapien
agtgcaatgaacacttctggaggcc

SEQ ID NO: 1124929 - DNA, 25 bp, Homo sapien
tcacttttcatcaacaatctttgct

SEQ ID NO: 1124930 - DNA, 25 bp, Homo sapien
cttttcatcaacaatctttgctaat

SEQ ID NO: 1124931 - DNA, 25 bp, Homo sapien
ttttcatcaacaatctttgctaata

SEQ ID NO: 1124932 - DNA, 25 bp, Homo sapien
tcatcaacaatctttgctaatatac

SEQ ID NO: 1124933 - DNA, 25 bp, Homo sapien
attttttctcagactccatagcagt

SEQ ID NO: 1124934 - DNA, 25 bp, Homo sapien
ttttctcagactccatagcagtctt

SEQ ID NO: 1124935 - DNA, 25 bp, Homo sapien
gacattttttctcagactccatagc

SEQ ID NO: 1124936 - DNA, 25 bp, Homo sapien
ttgacattttttctcagactccata

SEQ ID NO: 1124937 - DNA, 25 bp, Homo sapien
cactttgatggctcttcctgatcac

SEQ ID NO: 1124938 - DNA, 25 bp, Homo sapien
ccaggataacactttgatggctctt

SEQ ID NO: 1124939 - DNA, 25 bp, Homo sapien
gataacactttgatggctcttcctg

SEQ ID NO: 1124940 - DNA, 25 bp, Homo sapien
gaattccaggataacactttgatgg

SEQ ID NO: 1124941 - DNA, 25 bp, Homo sapien
gcactttctcgatgtaaagggacat

SEQ ID NO: 1124942 - DNA, 25 bp, Homo sapien
agcactttctcgatgtaaagggaca

SEQ ID NO: 1124943 - DNA, 25 bp, Homo sapien
ggttacaggacactgttcatttcca

SEQ ID NO: 1124944 - DNA, 25 bp, Homo sapien
ctgcattctgactctagtctcactc

SEQ ID NO: 1124945 - DNA, 25 bp, Homo sapien
gcctgcattctgactctagtctcac

SEQ ID NO: 1124946 - DNA, 25 bp, Homo sapien
tctgagggttacaggacactgttca

SEQ ID NO: 1124947 - DNA, 25 bp, Homo sapien
cttgatggcagaacttttaggtgga

SEQ ID NO: 1124948 - DNA, 25 bp, Homo sapien
gtttcaggccttggtagcacaatca

SEQ ID NO: 1124949 - DNA, 25 bp, Homo sapien
tatgcaggtttttccgaagtttcag

SEQ ID NO: 1124950 - DNA, 25 bp, Homo sapien
aacatccagggatcacattgaagtc

SEQ ID NO: 1124951 - DNA, 25 bp, Homo sapien
tttctaaagcctacagaccatcctg

SEQ ID NO: 1124952 - DNA, 25 bp, Homo sapien
cacttcatcatggtaataggctata

SEQ ID NO: 1124953 - DNA, 25 bp, Homo sapien
ggaccttgcctgttagccctttaca

SEQ ID NO: 1124954 - DNA, 25 bp, Homo sapien
tatttgacaatccatagggaccttg

SEQ ID NO: 1124955 - DNA, 25 bp, Homo sapien
gcttcaggctcatactccatccaaa

SEQ ID NO: 1124956 - DNA, 25 bp, Homo sapien
ggctcatactccatccaaaccattg

SEQ ID NO: 1124957 - DNA, 25 bp, Homo sapien
ctggcttcaggctcatactccatcc

SEQ ID NO: 1124958 - DNA, 25 bp, Homo sapien
ctcatactccatccaaaccattgcc

SEQ ID NO: 1124959 - DNA, 25 bp, Homo sapien
gatgattcaactagacctcttctgc

SEQ ID NO: 1124960 - DNA, 25 bp, Homo sapien
tcttctgccaaaatccgctggatct

SEQ ID NO: 1124961 - DNA, 25 bp, Homo sapien
tgctcagtcgtaatagccagaggcc

SEQ ID NO: 1124962 - DNA, 25 bp, Homo sapien
cacagggattcagggcaaacaaagc

SEQ ID NO: 1124963 - DNA, 25 bp, Homo sapien
tgtatatgtattccaaccctgatgt

SEQ ID NO: 1124964 - DNA, 25 bp, Homo sapien
ttcaacctagaggatctctgtagag

SEQ ID NO: 1124965 - DNA, 25 bp, Homo sapien
tgagcaaatcttgaagcgacatggg

SEQ ID NO: 1124966 - DNA, 25 bp, Homo sapien
tgcatgcatgctaccacttcgataa

SEQ ID NO: 1124967 - DNA, 25 bp, Homo sapien
gggtccttagtatccatgcctatgc

SEQ ID NO: 1124968 - DNA, 25 bp, Homo sapien
caaggtaattgaggatgaggccata

SEQ ID NO: 1124969 - DNA, 25 bp, Homo sapien
ttaactgggagtaatgagggacaag

SEQ ID NO: 1124970 - DNA, 25 bp, Homo sapien
gataactgaccggagatgggctctc

SEQ ID NO: 1124971 - DNA, 25 bp, Homo sapien
gctcgagaggcgaaagcaactcctg

SEQ ID NO: 1124972 - DNA, 25 bp, Homo sapien
ttgagtccttgctatctgagattat

SEQ ID NO: 1124973 - DNA, 25 bp, Homo sapien
ttgctatctgagattattggcctct

SEQ ID NO: 1124974 - DNA, 25 bp, Homo sapien
ctctcctggggctcgagaggcgaaa

SEQ ID NO: 1124975 - DNA, 25 bp, Homo sapien
gaaggtaggctggatgacttaagat

SEQ ID NO: 1124976 - DNA, 25 bp, Homo sapien
caaatgctaccataatttccaagtg

SEQ ID NO: 1124977 - DNA, 25 bp, Homo sapien
ccaagtgcaatcattacaagttcaa

SEQ ID NO: 1124978 - DNA, 25 bp, Homo sapien
tagagaagggctatcccttaagata

SEQ ID NO: 1124979 - DNA, 25 bp, Homo sapien
aacacatgaaaaaatgctcatcatc

SEQ ID NO: 1124980 - DNA, 25 bp, Homo sapien
actgtccatcagagaaatgcaaatc

SEQ ID NO: 1124981 - DNA, 25 bp, Homo sapien
gcaaagaacatgaacagatacttct

SEQ ID NO: 1124982 - DNA, 25 bp, Homo sapien
aaagaagacatttatgcagccaaaa

SEQ ID NO: 1124983 - DNA, 25 bp, Homo sapien
tgctacccaggcccgatacccccaa

SEQ ID NO: 1124984 - DNA, 25 bp, Homo sapien
gtcccagcctggctattggttctca

SEQ ID NO: 1124985 - DNA, 25 bp, Homo sapien
ccagcctggctattggttctcagga

SEQ ID NO: 1124986 - DNA, 25 bp, Homo sapien
cagcctggctattggttctcaggaa

SEQ ID NO: 1124987 - DNA, 25 bp, Homo sapien
tcatggatccactccggagaatggg

SEQ ID NO: 1124988 - DNA, 25 bp, Homo sapien
gatcctcggatatgttgaagcttgg

SEQ ID NO: 1124989 - DNA, 25 bp, Homo sapien
acacttctgtgatgccactttattc

SEQ ID NO: 1124990 - DNA, 25 bp, Homo sapien
tttattcaggccttcgatcctcgga

SEQ ID NO: 1124991 - DNA, 25 bp, Homo sapien
tctatgaggtgttgagttggaacgc

SEQ ID NO: 1124992 - DNA, 25 bp, Homo sapien
tagttcattatcagggaaccctgaa

SEQ ID NO: 1124993 - DNA, 25 bp, Homo sapien
cctgaaacagctttaagggtagttg

SEQ ID NO: 1124994 - DNA, 25 bp, Homo sapien
aagggaagtcccagtatcagttagt

SEQ ID NO: 1124995 - DNA, 25 bp, Homo sapien
gcatggcccaatactgctgactgtg

SEQ ID NO: 1124996 - DNA, 25 bp, Homo sapien
aaataggcctgtgaccttcagtggg

SEQ ID NO: 1124997 - DNA, 25 bp, Homo sapien
tattgaaaaactctgtgcataaacc

SEQ ID NO: 1124998 - DNA, 25 bp, Homo sapien
tctccagtgaacaacccttcacttg

SEQ ID NO: 1124999 - DNA, 25 bp, Homo sapien
cttcatcttcccaataaggtaacaa

SEQ ID NO: 1125000 - DNA, 25 bp, Homo sapien
tagccataggcttaatgctggatga

SEQ ID NO: 1125001 - DNA, 25 bp, Homo sapien
tcatccctgaattatagccataggc

SEQ ID NO: 1125002 - DNA, 25 bp, Homo sapien
tcatcttcccaataaggtaacaaac

SEQ ID NO: 1125003 - DNA, 25 bp, Homo sapien
gaaagggtgacacaacagatataaa

SEQ ID NO: 1125004 - DNA, 25 bp, Homo sapien
tggggaaagggtgacacaacagata

SEQ ID NO: 1125005 - DNA, 25 bp, Homo sapien
gggaaagggtgacacaacagatata

SEQ ID NO: 1125006 - DNA, 25 bp, Homo sapien
aagggtgacacaacagatataaaaa

SEQ ID NO: 1125007 - DNA, 25 bp, Homo sapien
ttctgaacagatctcaggccactcc

SEQ ID NO: 1125008 - DNA, 25 bp, Homo sapien
tgccttctgaacagatctcaggcca

SEQ ID NO: 1125009 - DNA, 25 bp, Homo sapien
tgaacagatctcaggccactcccta

SEQ ID NO: 1125010 - DNA, 25 bp, Homo sapien
ccttctgaacagatctcaggccact

SEQ ID NO: 1125011 - DNA, 25 bp, Homo sapien
tcagataaaatgctgtattctcatt

SEQ ID NO: 1125012 - DNA, 25 bp, Homo sapien
cagatcagataaaatgctgtattct

SEQ ID NO: 1125013 - DNA, 25 bp, Homo sapien
gataaaatgctgtattctcattcat

SEQ ID NO: 1125014 - DNA, 25 bp, Homo sapien
agatcagataaaatgctgtattctc

SEQ ID NO: 1125015 - DNA, 25 bp, Homo sapien
ctgagggagcaagtttgggaaactg

SEQ ID NO: 1125016 - DNA, 25 bp, Homo sapien
tgagggagcaagtttgggaaactgc

SEQ ID NO: 1125017 - DNA, 25 bp, Homo sapien
gggcagcaccacatcggggctcagg

SEQ ID NO: 1125018 - DNA, 25 bp, Homo sapien
ggcagcaccacatcggggctcaggg

SEQ ID NO: 1125019 - DNA, 25 bp, Homo sapien
ggatcctatactggagacagcttgc

SEQ ID NO: 1125020 - DNA, 25 bp, Homo sapien
tcttaaggcctcctatagctgctca

SEQ ID NO: 1125021 - DNA, 25 bp, Homo sapien
caattgaaccttgagtgagccgggt

SEQ ID NO: 1125022 - DNA, 25 bp, Homo sapien
taaaaagccctactgggtgattggc

SEQ ID NO: 1125023 - DNA, 25 bp, Homo sapien
ccctgcccacagctgttttcttcat

SEQ ID NO: 1125024 - DNA, 25 bp, Homo sapien
ccagccctgcccacagctgttttct

SEQ ID NO: 1125025 - DNA, 25 bp, Homo sapien
agccctgcccacagctgttttcttc

SEQ ID NO: 1125026 - DNA, 25 bp, Homo sapien
ctcaaattcaagcccagccctgccc

SEQ ID NO: 1125027 - DNA, 25 bp, Homo sapien
taatgaatacagatacttagttctg

SEQ ID NO: 1125028 - DNA, 25 bp, Homo sapien
tactgagaagcaacaaccctgttgg

SEQ ID NO: 1125029 - DNA, 25 bp, Homo sapien
tagttctgtttctcttgcgtcgtac

SEQ ID NO: 1125030 - DNA, 25 bp, Homo sapien
ccctgttggaactttgatgtgcgaa

SEQ ID NO: 1125031 - DNA, 25 bp, Homo sapien
tcttcggcatcttttctgtggagcc

SEQ ID NO: 1125032 - DNA, 25 bp, Homo sapien
ccatgaacgttttagctgtcttctt

SEQ ID NO: 1125033 - DNA, 25 bp, Homo sapien
cttcttcggcatcttttctgtggag

SEQ ID NO: 1125034 - DNA, 25 bp, Homo sapien
gtcttcttcggcatcttttctgtgg

SEQ ID NO: 1125035 - DNA, 25 bp, Homo sapien
cagtgatctccatacttgtggccac

SEQ ID NO: 1125036 - DNA, 25 bp, Homo sapien
agtgtttatcaactgtgctgaaggc

SEQ ID NO: 1125037 - DNA, 25 bp, Homo sapien
tgaaggcatgtcttggcttggccca

SEQ ID NO: 1125038 - DNA, 25 bp, Homo sapien
cactccctagactcagcttggtttt

SEQ ID NO: 1125039 - DNA, 25 bp, Homo sapien
tatgatgaatccaaaagaatggagc

SEQ ID NO: 1125040 - DNA, 25 bp, Homo sapien
ggagctagagtgaaggcccacagca

SEQ ID NO: 1125041 - DNA, 25 bp, Homo sapien
aatggagctagagtgaaggcccaca

SEQ ID NO: 1125042 - DNA, 25 bp, Homo sapien
caaaagaatggagctagagtgaagg

SEQ ID NO: 1125043 - DNA, 25 bp, Homo sapien
tcatttggggttcgctgaattgtta

SEQ ID NO: 1125044 - DNA, 25 bp, Homo sapien
ctatcatttggggttcgctgaattg

SEQ ID NO: 1125045 - DNA, 25 bp, Homo sapien
ttttcctatcatttggggttcgctg

SEQ ID NO: 1125046 - DNA, 25 bp, Homo sapien
ttcctatcatttggggttcgctgaa

SEQ ID NO: 1125047 - DNA, 25 bp, Homo sapien
ctccgagtcgttttgtgctcccctt

SEQ ID NO: 1125048 - DNA, 25 bp, Homo sapien
tgtgtgctcactaggcagggactcc

SEQ ID NO: 1125049 - DNA, 25 bp, Homo sapien
cagggactccgagtcgttttgtgct

SEQ ID NO: 1125050 - DNA, 25 bp, Homo sapien
gatctgtgtgctcactaggcaggga

SEQ ID NO: 1125051 - DNA, 25 bp, Homo sapien
agtttcactgcgttgctctgctccc

SEQ ID NO: 1125052 - DNA, 25 bp, Homo sapien
catggaggggcaagtccaactatta

SEQ ID NO: 1125053 - DNA, 25 bp, Homo sapien
aattcagacaacttaataatttcag

SEQ ID NO: 1125054 - DNA, 25 bp, Homo sapien
gcaagtccaactattatgaattcag

SEQ ID NO: 1125055 - DNA, 25 bp, Homo sapien
tgaggatccactgaataggatagtc

SEQ ID NO: 1125056 - DNA, 25 bp, Homo sapien
caatggaaagacactttttgaaggt

SEQ ID NO: 1125057 - DNA, 25 bp, Homo sapien
agcaatggaaagacactttttgaag

SEQ ID NO: 1125058 - DNA, 25 bp, Homo sapien
cactgaataggatagtctaaataag

SEQ ID NO: 1125059 - DNA, 25 bp, Homo sapien
tactgtaagtaagaagcccatcatc

SEQ ID NO: 1125060 - DNA, 25 bp, Homo sapien
gatctcggaacccaacgcctatgag

SEQ ID NO: 1125061 - DNA, 25 bp, Homo sapien
taattgatgcacaaccttaggtggc

SEQ ID NO: 1125062 - DNA, 25 bp, Homo sapien
agtgcctgcaaccacccaatgtgtg

SEQ ID NO: 1125063 - DNA, 25 bp, Homo sapien
aacaaatcacaggttcaattttggg

SEQ ID NO: 1125064 - DNA, 25 bp, Homo sapien
taaagtttattgactacaagcacat

SEQ ID NO: 1125065 - DNA, 25 bp, Homo sapien
taaaggacaggaatctgtttatctt

SEQ ID NO: 1125066 - DNA, 25 bp, Homo sapien
cagcaactgctcatacaagtcaagg

SEQ ID NO: 1125067 - DNA, 25 bp, Homo sapien
gggagagaatgtgcccctactgaaa

SEQ ID NO: 1125068 - DNA, 25 bp, Homo sapien
gatcccgttctgtgtttatgcctga

SEQ ID NO: 1125069 - DNA, 25 bp, Homo sapien
ttaatgcctgctctaacccatgcca

SEQ ID NO: 1125070 - DNA, 25 bp, Homo sapien
tccatgaagcaaacataagaacgcg

SEQ ID NO: 1125071 - DNA, 25 bp, Homo sapien
gaaatgcagcatttaagcctcaccc

SEQ ID NO: 1125072 - DNA, 25 bp, Homo sapien
gggagaagcaaacgcagtctcccac

SEQ ID NO: 1125073 - DNA, 25 bp, Homo sapien
ttatgcagacgaatttcccaaatgt

SEQ ID NO: 1125074 - DNA, 25 bp, Homo sapien
tgtggttaaatcatagggtcaacat

SEQ ID NO: 1125075 - DNA, 25 bp, Homo sapien
ctgactgaatggatgatctatgcat

SEQ ID NO: 1125076 - DNA, 25 bp, Homo sapien
tgtctcgtggccatttttggcttaa

SEQ ID NO: 1125077 - DNA, 25 bp, Homo sapien
gatagaattacagctactcttactc

SEQ ID NO: 1125078 - DNA, 25 bp, Homo sapien
aaattgacccttttgtcaccatatg

SEQ ID NO: 1125079 - DNA, 25 bp, Homo sapien
ctcattcccgatgactaattctgca

SEQ ID NO: 1125080 - DNA, 25 bp, Homo sapien
tcagcgtataaactggatgtttctc

SEQ ID NO: 1125081 - DNA, 25 bp, Homo sapien
tcttcctggtgtttaagttcagctt

SEQ ID NO: 1125082 - DNA, 25 bp, Homo sapien
cctggtgtttaagttcagcttgggc

SEQ ID NO: 1125083 - DNA, 25 bp, Homo sapien
tgctaagaagaagtggccaattatt

SEQ ID NO: 1125084 - DNA, 25 bp, Homo sapien
ggaaaattgctaagaagaagtggcc

SEQ ID NO: 1125085 - DNA, 25 bp, Homo sapien
tgatagaaacaaggttctataggaa

SEQ ID NO: 1125086 - DNA, 25 bp, Homo sapien
gatagaaacaaggttctataggaaa

SEQ ID NO: 1125087 - DNA, 25 bp, Homo sapien
caaactaaaatcaaccactcttgca

SEQ ID NO: 1125088 - DNA, 25 bp, Homo sapien
aaactaaaatcaaccactcttgcaa

SEQ ID NO: 1125089 - DNA, 25 bp, Homo sapien
aactaaaatcaaccactcttgcaaa

SEQ ID NO: 1125090 - DNA, 25 bp, Homo sapien
tcaaactaaaatcaaccactcttgc

SEQ ID NO: 1125091 - DNA, 25 bp, Homo sapien
taatcttggtgctagtcctttaact

SEQ ID NO: 1125092 - DNA, 25 bp, Homo sapien
tttaatcttggtgctagtcctttaa

SEQ ID NO: 1125093 - DNA, 25 bp, Homo sapien
agtcaacgctcccttttaatcttgg

SEQ ID NO: 1125094 - DNA, 25 bp, Homo sapien
ttcactacagtcaacgctccctttt

SEQ ID NO: 1125095 - DNA, 25 bp, Homo sapien
aaactcttcactagtctccactcca

SEQ ID NO: 1125096 - DNA, 25 bp, Homo sapien
tgcggaggctagtgctctggttgaa

SEQ ID NO: 1125097 - DNA, 25 bp, Homo sapien
tcttatttttggcactggcgttgga

SEQ ID NO: 1125098 - DNA, 25 bp, Homo sapien
cagtctctgtcagtgttaccatagc

SEQ ID NO: 1125099 - DNA, 25 bp, Homo sapien
tggtcacactccgtgtgggtgacag

SEQ ID NO: 1125100 - DNA, 25 bp, Homo sapien
aaacaagagcccataaccatcaggt

SEQ ID NO: 1125101 - DNA, 25 bp, Homo sapien
tcatgatctgtccttggtcacactc

SEQ ID NO: 1125102 - DNA, 25 bp, Homo sapien
gagctgttgcacttcaaacaagagc

SEQ ID NO: 1125103 - DNA, 25 bp, Homo sapien
tgaatgattgcctttctgaaggaaa

SEQ ID NO: 1125104 - DNA, 25 bp, Homo sapien
caatagggagggcagttggccaaac

SEQ ID NO: 1125105 - DNA, 25 bp, Homo sapien
tggccaaacactgccttaggacagc

SEQ ID NO: 1125106 - DNA, 25 bp, Homo sapien
gcagttggccaaacactgccttagg

SEQ ID NO: 1125107 - DNA, 25 bp, Homo sapien
caataggactatcttctgtaggagg

SEQ ID NO: 1125108 - DNA, 25 bp, Homo sapien
agtggcatcaacaagcgtcttcatg

SEQ ID NO: 1125109 - DNA, 25 bp, Homo sapien
tctgtaggaggatcataacagtggc

SEQ ID NO: 1125110 - DNA, 25 bp, Homo sapien
gaatcagcgatcaaaatgtgcccag

SEQ ID NO: 1125111 - DNA, 25 bp, Homo sapien
tattcagtgtcatgttctcataatg

SEQ ID NO: 1125112 - DNA, 25 bp, Homo sapien
cataatgatcaataccaacattcac

SEQ ID NO: 1125113 - DNA, 25 bp, Homo sapien
tctcataatgatcaataccaacatt

SEQ ID NO: 1125114 - DNA, 25 bp, Homo sapien
tgttctcataatgatcaataccaac

SEQ ID NO: 1125115 - DNA, 25 bp, Homo sapien
tggcagcaaacccgttgtgaaaaag

SEQ ID NO: 1125116 - DNA, 25 bp, Homo sapien
tgtgttctggcagcaaacccgttgt

SEQ ID NO: 1125117 - DNA, 25 bp, Homo sapien
tctggcagcaaacccgttgtgaaaa

SEQ ID NO: 1125118 - DNA, 25 bp, Homo sapien
tgttctggcagcaaacccgttgtga

SEQ ID NO: 1125119 - DNA, 25 bp, Homo sapien
cgaatctacgtgtccaatgacgaca

SEQ ID NO: 1125120 - DNA, 25 bp, Homo sapien
gccagaagtggtggacttgcccgaa

SEQ ID NO: 1125121 - DNA, 25 bp, Homo sapien
aagtggtggacttgcccgaatctac

SEQ ID NO: 1125122 - DNA, 25 bp, Homo sapien
aatgacgacaatgttgatatgagtc

SEQ ID NO: 1125123 - DNA, 25 bp, Homo sapien
cagcagcctctttctgcaatttttc

SEQ ID NO: 1125124 - DNA, 25 bp, Homo sapien
catctcagcagcctctttctgcaat

SEQ ID NO: 1125125 - DNA, 25 bp, Homo sapien
tctcagcagcctctttctgcaattt

SEQ ID NO: 1125126 - DNA, 25 bp, Homo sapien
gcaatttttcaattgttcttttgtc

SEQ ID NO: 1125127 - DNA, 25 bp, Homo sapien
tttcagtttatccaagactcaggca

SEQ ID NO: 1125128 - DNA, 25 bp, Homo sapien
cagtttatccaagactcaggcatac

SEQ ID NO: 1125129 - DNA, 25 bp, Homo sapien
ctttcagtttatccaagactcaggc

SEQ ID NO: 1125130 - DNA, 25 bp, Homo sapien
tcagtttatccaagactcaggcata

SEQ ID NO: 1125131 - DNA, 25 bp, Homo sapien
aaatttccacaaggagatatcaatg

SEQ ID NO: 1125132 - DNA, 25 bp, Homo sapien
atttccacaaggagatatcaatggt

SEQ ID NO: 1125133 - DNA, 25 bp, Homo sapien
atatcaatggtgataccacgttcac

SEQ ID NO: 1125134 - DNA, 25 bp, Homo sapien
tcaatggtgataccacgttcacgct

SEQ ID NO: 1125135 - DNA, 25 bp, Homo sapien
atcaatgatagtcacatagtacttg

SEQ ID NO: 1125136 - DNA, 25 bp, Homo sapien
gcatcaatgatagtcacatagtact

SEQ ID NO: 1125137 - DNA, 25 bp, Homo sapien
gggcatcaatgatagtcacatagta

SEQ ID NO: 1125138 - DNA, 25 bp, Homo sapien
ctggggcatcaatgatagtcacata

SEQ ID NO: 1125139 - DNA, 25 bp, Homo sapien
aattaggacagcacaaccagcctga

SEQ ID NO: 1125140 - DNA, 25 bp, Homo sapien
caacaattaggacagcacaaccagc

SEQ ID NO: 1125141 - DNA, 25 bp, Homo sapien
taggacagcacaaccagcctgagat

SEQ ID NO: 1125142 - DNA, 25 bp, Homo sapien
gcagcaacaattaggacagcacaac

SEQ ID NO: 1125143 - DNA, 25 bp, Homo sapien
acccagtgtatatgccagaagggca

SEQ ID NO: 1125144 - DNA, 25 bp, Homo sapien
tgctgatttccttaacaatttcctc

SEQ ID NO: 1125145 - DNA, 25 bp, Homo sapien
tttcacacccagtgtatatgccaga

SEQ ID NO: 1125146 - DNA, 25 bp, Homo sapien
tcacacccagtgtatatgccagaag

SEQ ID NO: 1125147 - DNA, 25 bp, Homo sapien
ggcatgttagcacttggctccagca

SEQ ID NO: 1125148 - DNA, 25 bp, Homo sapien
aaggcatgttagcacttggctccag

SEQ ID NO: 1125149 - DNA, 25 bp, Homo sapien
tgaaccaaggcatgttagcacttgg

SEQ ID NO: 1125150 - DNA, 25 bp, Homo sapien
ccaaggcatgttagcacttggctcc

SEQ ID NO: 1125151 - DNA, 25 bp, Homo sapien
tacttctgttgtaacgctgactgga

SEQ ID NO: 1125152 - DNA, 25 bp, Homo sapien
tctccactcggccaacaagaacagt

SEQ ID NO: 1125153 - DNA, 25 bp, Homo sapien
acagattttacttctgttgtaacgc

SEQ ID NO: 1125154 - DNA, 25 bp, Homo sapien
gcattgccatccttatgggtgactt

SEQ ID NO: 1125155 - DNA, 25 bp, Homo sapien
cagcaacgttgccacgatgaacatc

SEQ ID NO: 1125156 - DNA, 25 bp, Homo sapien
accagcaacgttgccacgatgaaca

SEQ ID NO: 1125157 - DNA, 25 bp, Homo sapien
aacgttgccacgatgaacatccttg

SEQ ID NO: 1125158 - DNA, 25 bp, Homo sapien
gcaacgttgccacgatgaacatcct

SEQ ID NO: 1125159 - DNA, 25 bp, Homo sapien
tccaatacaggtgcatagccagagc

SEQ ID NO: 1125160 - DNA, 25 bp, Homo sapien
caatacaggtgcatagccagagctt

SEQ ID NO: 1125161 - DNA, 25 bp, Homo sapien
catagccagagcttatttggcccgg

SEQ ID NO: 1125162 - DNA, 25 bp, Homo sapien
ccagagcttatttggcccggatggt

SEQ ID NO: 1125163 - DNA, 25 bp, Homo sapien
ttagggccatcttccagctttttac

SEQ ID NO: 1125164 - DNA, 25 bp, Homo sapien
gaatttagggccatcttccagcttt

SEQ ID NO: 1125165 - DNA, 25 bp, Homo sapien
aatttagggccatcttccagctttt

SEQ ID NO: 1125166 - DNA, 25 bp, Homo sapien
cttcaagaatttagggccatcttcc

SEQ ID NO: 1125167 - DNA, 25 bp, Homo sapien
tatcatgaacagtaaagcgacccaa

SEQ ID NO: 1125168 - DNA, 25 bp, Homo sapien
tcatgaacagtaaagcgacccaaag

SEQ ID NO: 1125169 - DNA, 25 bp, Homo sapien
acagtaaagcgacccaaaggtggat

SEQ ID NO: 1125170 - DNA, 25 bp, Homo sapien
atgaacagtaaagcgacccaaaggt

SEQ ID NO: 1125171 - DNA, 25 bp, Homo sapien
tgtccactgctttgatgacacccac

SEQ ID NO: 1125172 - DNA, 25 bp, Homo sapien
atttagccttctgagctttctgggc

SEQ ID NO: 1125173 - DNA, 25 bp, Homo sapien
gggcagacttggtgaccttgccagc

SEQ ID NO: 1125174 - DNA, 25 bp, Homo sapien
gccttctgagctttctgggcagact

SEQ ID NO: 1125175 - DNA, 25 bp, Homo sapien
ataacttaaaactgctgcatgcgaa

SEQ ID NO: 1125176 - DNA, 25 bp, Homo sapien
taaaactgctgcatgcgaaaaagaa

SEQ ID NO: 1125177 - DNA, 25 bp, Homo sapien
actgctgcatgcgaaaaagaaaacc

SEQ ID NO: 1125178 - DNA, 25 bp, Homo sapien
cttaaaactgctgcatgcgaaaaag

SEQ ID NO: 1125179 - DNA, 25 bp, Homo sapien
ccactgctcccggtctgttttttga

SEQ ID NO: 1125180 - DNA, 25 bp, Homo sapien
cagggttttgcatgtaacccagggt

SEQ ID NO: 1125181 - DNA, 25 bp, Homo sapien
aataatagatcatttaatgggcttc

SEQ ID NO: 1125182 - DNA, 25 bp, Homo sapien
gatctcactcggtctcccagtatgg

SEQ ID NO: 1125183 - DNA, 25 bp, Homo sapien
ttaatgaggctgtttagtaggaaac

SEQ ID NO: 1125184 - DNA, 25 bp, Homo sapien
aacatccctgccgttgcttagccag

SEQ ID NO: 1125185 - DNA, 25 bp, Homo sapien
gctgtttagtaggaaacatccctgc

SEQ ID NO: 1125186 - DNA, 25 bp, Homo sapien
cctgtagttatgcttatgttaatga

SEQ ID NO: 1125187 - DNA, 25 bp, Homo sapien
tcatgggcaacaattggtctagtga

SEQ ID NO: 1125188 - DNA, 25 bp, Homo sapien
gacagaatgattgtctcgtctttca

SEQ ID NO: 1125189 - DNA, 25 bp, Homo sapien
tctcgtctttcatgggcaacaattg

SEQ ID NO: 1125190 - DNA, 25 bp, Homo sapien
gaaatatgacagaatgattgtctcg

SEQ ID NO: 1125191 - DNA, 25 bp, Homo sapien
ctcctatctatttcctgctgctggg

SEQ ID NO: 1125192 - DNA, 25 bp, Homo sapien
gctgactctcccctgatgcagattt

SEQ ID NO: 1125193 - DNA, 25 bp, Homo sapien
gactctgtctgctgccaacctggct

SEQ ID NO: 1125194 - DNA, 25 bp, Homo sapien
atctgcctggactttctcctatcta

SEQ ID NO: 1125195 - DNA, 25 bp, Homo sapien
tatatggagtgtgtatagcgtagct

SEQ ID NO: 1125196 - DNA, 25 bp, Homo sapien
gggaagtataagttgtgagtctcta

SEQ ID NO: 1125197 - DNA, 25 bp, Homo sapien
ggagagtaggatgattcacctaatt

SEQ ID NO: 1125198 - DNA, 25 bp, Homo sapien
tagcgtagctttagagatgcaatac

SEQ ID NO: 1125199 - DNA, 25 bp, Homo sapien
accgaggttcaggtatttcaaagct

SEQ ID NO: 1125200 - DNA, 25 bp, Homo sapien
cgtgggtagcaagttgatgaacatt

SEQ ID NO: 1125201 - DNA, 25 bp, Homo sapien
tccttttccgcttctattagtctgg

SEQ ID NO: 1125202 - DNA, 25 bp, Homo sapien
gaggttcaggtatttcaaagcttgc

SEQ ID NO: 1125203 - DNA, 25 bp, Homo sapien
catagtttggaacactcttgctgca

SEQ ID NO: 1125204 - DNA, 25 bp, Homo sapien
tatacttgtttccatagtttggaac

SEQ ID NO: 1125205 - DNA, 25 bp, Homo sapien
gaaatcagaataggcccaatttatt

SEQ ID NO: 1125206 - DNA, 25 bp, Homo sapien
actgaagcgtcttttatatacttgt

SEQ ID NO: 1125207 - DNA, 25 bp, Homo sapien
ctgttatccctactgtaagcaggac

SEQ ID NO: 1125208 - DNA, 25 bp, Homo sapien
ggttggcacatgtagctttatccac

SEQ ID NO: 1125209 - DNA, 25 bp, Homo sapien
aaggatccttgggtctggttggcac

SEQ ID NO: 1125210 - DNA, 25 bp, Homo sapien
tctggctggcaaaggatccttgggt

SEQ ID NO: 1125211 - DNA, 25 bp, Homo sapien
tccacacatgtaggtgtcagtgatc

SEQ ID NO: 1125212 - DNA, 25 bp, Homo sapien
tcacctttaagattccagtccttaa

SEQ ID NO: 1125213 - DNA, 25 bp, Homo sapien
ctttaagattccagtccttaaccat

SEQ ID NO: 1125214 - DNA, 25 bp, Homo sapien
cttcacctttaagattccagtcctt

SEQ ID NO: 1125215 - DNA, 25 bp, Homo sapien
ttcacctttaagattccagtcctta

SEQ ID NO: 1125216 - DNA, 25 bp, Homo sapien
taggcaaactgtggtccccttctcc

SEQ ID NO: 1125217 - DNA, 25 bp, Homo sapien
tcctggtgcgctagagtcttagtgt

SEQ ID NO: 1125218 - DNA, 25 bp, Homo sapien
ctagagtcttagtgtgctaaactcc

SEQ ID NO: 1125219 - DNA, 25 bp, Homo sapien
cactcaatcagcttagtgcactaga

SEQ ID NO: 1125220 - DNA, 25 bp, Homo sapien
ttcgtcttgaattctcctgtgctct

SEQ ID NO: 1125221 - DNA, 25 bp, Homo sapien
attcgtcttgaattctcctgtgctc

SEQ ID NO: 1125222 - DNA, 25 bp, Homo sapien
aattcgtcttgaattctcctgtgct

SEQ ID NO: 1125223 - DNA, 25 bp, Homo sapien
tcattttaatgggtggcgaggagtt

SEQ ID NO: 1125224 - DNA, 25 bp, Homo sapien
ggtctttgggatgccacacatcaaa

SEQ ID NO: 1125225 - DNA, 25 bp, Homo sapien
tatcagcatgctaaatgccctccag

SEQ ID NO: 1125226 - DNA, 25 bp, Homo sapien
cagtccttcgcactggagtgtggcg

SEQ ID NO: 1125227 - DNA, 25 bp, Homo sapien
gaccagatcaacaggcttattagaa

SEQ ID NO: 1125228 - DNA, 25 bp, Homo sapien
ggtaccccaatctgaagtcagtaaa

SEQ ID NO: 1125229 - DNA, 25 bp, Homo sapien
gagatctatactgttggaaaacgct

SEQ ID NO: 1125230 - DNA, 25 bp, Homo sapien
taaatgaactaatctacaagcgtgg

SEQ ID NO: 1125231 - DNA, 25 bp, Homo sapien
cgagccacacaagcggcgagaaaat

SEQ ID NO: 1125232 - DNA, 25 bp, Homo sapien
ttcgctcacaagaaccgagccacgc

SEQ ID NO: 1125233 - DNA, 25 bp, Homo sapien
gcggcggcggaaagagccgagcgcg

SEQ ID NO: 1125234 - DNA, 25 bp, Homo sapien
ccgacggaaattgccgaaggtgccg

SEQ ID NO: 1125235 - DNA, 25 bp, Homo sapien
cacgccaactgcaacctcagtgacg

SEQ ID NO: 1125236 - DNA, 25 bp, Homo sapien
ttcacgccaactgcaacctcagtga

SEQ ID NO: 1125237 - DNA, 25 bp, Homo sapien
gccaactgcaacctcagtgacgatt

SEQ ID NO: 1125238 - DNA, 25 bp, Homo sapien
cttcacgccaactgcaacctcagtg

SEQ ID NO: 1125239 - DNA, 25 bp, Homo sapien
aaaactattagatctactaaatgag

SEQ ID NO: 1125240 - DNA, 25 bp, Homo sapien
cagaacatatgagcaatatgccata

SEQ ID NO: 1125241 - DNA, 25 bp, Homo sapien
ttcagaacatatgagcaatatgcca

SEQ ID NO: 1125242 - DNA, 25 bp, Homo sapien
taaatgagtttagcaaaggttcaga

SEQ ID NO: 1125243 - DNA, 25 bp, Homo sapien
ggcaacacacataatgtatttcatt

SEQ ID NO: 1125244 - DNA, 25 bp, Homo sapien
aaggcaacacacataatgtatttca

SEQ ID NO: 1125245 - DNA, 25 bp, Homo sapien
aggcaacacacataatgtatttcat

SEQ ID NO: 1125246 - DNA, 25 bp, Homo sapien
ccaaaagaaacgtagtatgaaccat

SEQ ID NO: 1125247 - DNA, 25 bp, Homo sapien
aagcttatctgattcactctggcac

SEQ ID NO: 1125248 - DNA, 25 bp, Homo sapien
tctatctctattgcatttaccctta

SEQ ID NO: 1125249 - DNA, 25 bp, Homo sapien
tccccaattatttgcgttctatctc

SEQ ID NO: 1125250 - DNA, 25 bp, Homo sapien
gaactcctacgcactactggtgaga

SEQ ID NO: 1125251 - DNA, 25 bp, Homo sapien
ggaaaataatctagtactgtctcat

SEQ ID NO: 1125252 - DNA, 25 bp, Homo sapien
cataaataggaacaatacactggaa

SEQ ID NO: 1125253 - DNA, 25 bp, Homo sapien
ggaagaccagagaatatactacaca

SEQ ID NO: 1125254 - DNA, 25 bp, Homo sapien
actgcctgagagtagttcgtcagat

SEQ ID NO: 1125255 - DNA, 25 bp, Homo sapien
tgctgctcatattagagttcggact

SEQ ID NO: 1125256 - DNA, 25 bp, Homo sapien
tagagttcggactactgagaacact

SEQ ID NO: 1125257 - DNA, 25 bp, Homo sapien
cctgagagtagttcgtcagatcctc

SEQ ID NO: 1125258 - DNA, 25 bp, Homo sapien
ggttttaaacaactatgtagctgaa

SEQ ID NO: 1125259 - DNA, 25 bp, Homo sapien
caactatggttgcaatggttttaaa

SEQ ID NO: 1125260 - DNA, 25 bp, Homo sapien
tggcccattcagatgagaacacgtc

SEQ ID NO: 1125261 - DNA, 25 bp, Homo sapien
tcttaaatatgcaggtagacaacat

SEQ ID NO: 1125262 - DNA, 25 bp, Homo sapien
gttaactgaattgtcagagatgtgt

SEQ ID NO: 1125263 - DNA, 25 bp, Homo sapien
tcaatgataatgacctgttgacaaa

SEQ ID NO: 1125264 - DNA, 25 bp, Homo sapien
taatcattacatagcaaaatcaatg

SEQ ID NO: 1125265 - DNA, 25 bp, Homo sapien
ggcccagtgattttgctttgtaatc

SEQ ID NO: 1125266 - DNA, 25 bp, Homo sapien
gatcctttctattcaggtccaggct

SEQ ID NO: 1125267 - DNA, 25 bp, Homo sapien
gagcagacaatttctgacagacctg

SEQ ID NO: 1125268 - DNA, 25 bp, Homo sapien
gagtaccgtgcaacctatggaatca

SEQ ID NO: 1125269 - DNA, 25 bp, Homo sapien
ggagtgtttgaagtaccctgcaata

SEQ ID NO: 1125270 - DNA, 25 bp, Homo sapien
aatctgctactagttccaaccagtg

SEQ ID NO: 1125271 - DNA, 25 bp, Homo sapien
tcctctctgacagatttaatcactg

SEQ ID NO: 1125272 - DNA, 25 bp, Homo sapien
cagactgcttcattgtccattagat

SEQ ID NO: 1125273 - DNA, 25 bp, Homo sapien
tacctgagcttcttaggaatgtaag

SEQ ID NO: 1125274 - DNA, 25 bp, Homo sapien
tttaatacgaggtgttggtctcctg

SEQ ID NO: 1125275 - DNA, 25 bp, Homo sapien
ccctgtagagccaagttatgccatt

SEQ ID NO: 1125276 - DNA, 25 bp, Homo sapien
gccattcagtctaaagaaattcgct

SEQ ID NO: 1125277 - DNA, 25 bp, Homo sapien
agtactcctcttatcccctgtagag

SEQ ID NO: 1125278 - DNA, 25 bp, Homo sapien
aagtctgtagttacctccaggttca

SEQ ID NO: 1125279 - DNA, 25 bp, Homo sapien
tagtaatgttcactgaaggttctcc

SEQ ID NO: 1125280 - DNA, 25 bp, Homo sapien
tgtgctactttctgcgcagactaag

SEQ ID NO: 1125281 - DNA, 25 bp, Homo sapien
caccagatggcacattgttacaact

SEQ ID NO: 1125282 - DNA, 25 bp, Homo sapien
tggtctacgtcttcatgtaagtctt

SEQ ID NO: 1125283 - DNA, 25 bp, Homo sapien
gcagtgtttcatattggtgtagatg

SEQ ID NO: 1125284 - DNA, 25 bp, Homo sapien
cattttctaagaatttgctgccaag

SEQ ID NO: 1125285 - DNA, 25 bp, Homo sapien
gcatgttaacatattgagccttcta

SEQ ID NO: 1125286 - DNA, 25 bp, Homo sapien
aattttttactatcattaccattgg

SEQ ID NO: 1125287 - DNA, 25 bp, Homo sapien
aaattttttactatcattaccattg

SEQ ID NO: 1125288 - DNA, 25 bp, Homo sapien
tatgaagtacacgagaaggagcacc

SEQ ID NO: 1125289 - DNA, 25 bp, Homo sapien
ttcagcataaggatgttggtcacct

SEQ ID NO: 1125290 - DNA, 25 bp, Homo sapien
aggtaagcctaaagcaataacttca

SEQ ID NO: 1125291 - DNA, 25 bp, Homo sapien
ccccaggtaattttcgaatatgaag

SEQ ID NO: 1125292 - DNA, 25 bp, Homo sapien
tctttgtgattcgagtactggatat

SEQ ID NO: 1125293 - DNA, 25 bp, Homo sapien
taaccatagtaatagctgcttcctc

SEQ ID NO: 1125294 - DNA, 25 bp, Homo sapien
ttacgaagatgaggtgtcacagcag

SEQ ID NO: 1125295 - DNA, 25 bp, Homo sapien
gcttcctcggttgctagttccaaaa

SEQ ID NO: 1125296 - DNA, 25 bp, Homo sapien
catccatccatgtgtaggcctcagc

SEQ ID NO: 1125297 - DNA, 25 bp, Homo sapien
ggattaccagtataagccaccaagc

SEQ ID NO: 1125298 - DNA, 25 bp, Homo sapien
gaataggttctggtgatctaccgca

SEQ ID NO: 1125299 - DNA, 25 bp, Homo sapien
cagtgacgcatctgggatcaccgca

SEQ ID NO: 1125300 - DNA, 25 bp, Homo sapien
ctgtggtgccactaagaggagtatt

SEQ ID NO: 1125301 - DNA, 25 bp, Homo sapien
tggagtcactgcactctcgctaact

SEQ ID NO: 1125302 - DNA, 25 bp, Homo sapien
acatcaagtgttacagggtagtaca

SEQ ID NO: 1125303 - DNA, 25 bp, Homo sapien
gctgtcacagcttgaagaactgcct

SEQ ID NO: 1125304 - DNA, 25 bp, Homo sapien
tcttcaatacagcaccaaacttaga

SEQ ID NO: 1125305 - DNA, 25 bp, Homo sapien
gatcaccatactggagcaaagcttg

SEQ ID NO: 1125306 - DNA, 25 bp, Homo sapien
tgcttgttgagcatttactggatca

SEQ ID NO: 1125307 - DNA, 25 bp, Homo sapien
caatacagcaccaaacttagaaaat

SEQ ID NO: 1125308 - DNA, 25 bp, Homo sapien
gaataccctggtgtaaaggtgaaga

SEQ ID NO: 1125309 - DNA, 25 bp, Homo sapien
gaaagagagttcatacacatcagga

SEQ ID NO: 1125310 - DNA, 25 bp, Homo sapien
aagtggaagccatgtatcaatcaac

SEQ ID NO: 1125311 - DNA, 25 bp, Homo sapien
tgggttaggcaaggtacctatcatc

SEQ ID NO: 1125312 - DNA, 25 bp, Homo sapien
tctgaaactgacgagtgccaggtct

SEQ ID NO: 1125313 - DNA, 25 bp, Homo sapien
taaaagctaccaggaaaaggattca

SEQ ID NO: 1125314 - DNA, 25 bp, Homo sapien
ggctgtcatgcttcttcaagggtta

SEQ ID NO: 1125315 - DNA, 25 bp, Homo sapien
tataaaggactatgttaccgctatg

SEQ ID NO: 1125316 - DNA, 25 bp, Homo sapien
ctgtaaaagtgaataaagcatatca

SEQ ID NO: 1125317 - DNA, 25 bp, Homo sapien
aaagtgaataaagcatatcagcaat

SEQ ID NO: 1125318 - DNA, 25 bp, Homo sapien
gtaaaagtgaataaagcatatcagc

SEQ ID NO: 1125319 - DNA, 25 bp, Homo sapien
taaaagtgaataaagcatatcagca

SEQ ID NO: 1125320 - DNA, 25 bp, Homo sapien
tccccagatggaagatcaggtcgag

SEQ ID NO: 1125321 - DNA, 25 bp, Homo sapien
ccttagggtacagcaggcattataa

SEQ ID NO: 1125322 - DNA, 25 bp, Homo sapien
gcagcaatagctgggtccaatgcag

SEQ ID NO: 1125323 - DNA, 25 bp, Homo sapien
ctaagagggatgtctccttggcaaa

SEQ ID NO: 1125324 - DNA, 25 bp, Homo sapien
tgggagaaaagtggttaagacaata

SEQ ID NO: 1125325 - DNA, 25 bp, Homo sapien
atgggagaaaagtggttaagacaat

SEQ ID NO: 1125326 - DNA, 25 bp, Homo sapien
tatttcttcattagagcttttcttc

SEQ ID NO: 1125327 - DNA, 25 bp, Homo sapien
caggcatagtgacatcaagtttaaa

SEQ ID NO: 1125328 - DNA, 25 bp, Homo sapien
acacacacaagaactttaggcctag

SEQ ID NO: 1125329 - DNA, 25 bp, Homo sapien
tcaagtttaaagtgtaaatatggca

SEQ ID NO: 1125330 - DNA, 25 bp, Homo sapien
taggcctagactcaggcatagtgac

SEQ ID NO: 1125331 - DNA, 25 bp, Homo sapien
gattccacgctatcaactataagtt

SEQ ID NO: 1125332 - DNA, 25 bp, Homo sapien
taaaaggccactacaatatgcttca

SEQ ID NO: 1125333 - DNA, 25 bp, Homo sapien
tatttttattaggtggctcaagtcc

SEQ ID NO: 1125334 - DNA, 25 bp, Homo sapien
caagtccattgtggtacaaagtaaa

SEQ ID NO: 1125335 - DNA, 25 bp, Homo sapien
gaatccacgtgacttctaaccaagc

SEQ ID NO: 1125336 - DNA, 25 bp, Homo sapien
cacacctcagtagggtccaaagaag

SEQ ID NO: 1125337 - DNA, 25 bp, Homo sapien
gtttcagcaaggtcataagatcaca

SEQ ID NO: 1125338 - DNA, 25 bp, Homo sapien
tctgccaagtgcctagctgaatgaa

SEQ ID NO: 1125339 - DNA, 25 bp, Homo sapien
tcctaaaaacataggaatgcctgtg

SEQ ID NO: 1125340 - DNA, 25 bp, Homo sapien
tttcctacagaaagtctgctttgcc

SEQ ID NO: 1125341 - DNA, 25 bp, Homo sapien
tgctacatagtaaaaccatcttgag

SEQ ID NO: 1125342 - DNA, 25 bp, Homo sapien
tagaatctggtgacttcaacgtgca

SEQ ID NO: 1125343 - DNA, 25 bp, Homo sapien
tggctcctaggattgagacaatttc

SEQ ID NO: 1125344 - DNA, 25 bp, Homo sapien
aaatgggatcgataatggtaactac

SEQ ID NO: 1125345 - DNA, 25 bp, Homo sapien
aatctgggcaaactgttctttgtac

SEQ ID NO: 1125346 - DNA, 25 bp, Homo sapien
gctcggccactcaaaagttaaagga

SEQ ID NO: 1125347 - DNA, 25 bp, Homo sapien
gaaatgagccaacatccttctaggg

SEQ ID NO: 1125348 - DNA, 25 bp, Homo sapien
gctgaatttcctactgtccagtgga

SEQ ID NO: 1125349 - DNA, 25 bp, Homo sapien
caaacatggaacctgagaggactcc

SEQ ID NO: 1125350 - DNA, 25 bp, Homo sapien
tctgccctggacagttaaacctttg

SEQ ID NO: 1125351 - DNA, 25 bp, Homo sapien
tctgggcttgacaaatactagagtg

SEQ ID NO: 1125352 - DNA, 25 bp, Homo sapien
gagagtttccccaaatctagtagag

SEQ ID NO: 1125353 - DNA, 25 bp, Homo sapien
ccatagagtcaagcttaggctcaag

SEQ ID NO: 1125354 - DNA, 25 bp, Homo sapien
caatgaggatggcttccgatgtcaa

SEQ ID NO: 1125355 - DNA, 25 bp, Homo sapien
taccattttatgcaaggaacttgag

SEQ ID NO: 1125356 - DNA, 25 bp, Homo sapien
aattcttaaagtatagtcagccctc

SEQ ID NO: 1125357 - DNA, 25 bp, Homo sapien
tgagcatcagtggatttgagtatcc

SEQ ID NO: 1125358 - DNA, 25 bp, Homo sapien
tatctctgggttccgattcaaccaa

SEQ ID NO: 1125359 - DNA, 25 bp, Homo sapien
gctgggtcacccagacattttgagt

SEQ ID NO: 1125360 - DNA, 25 bp, Homo sapien
gagcttcataaacgatcatgtgcta

SEQ ID NO: 1125361 - DNA, 25 bp, Homo sapien
ttttcatgtgaaatggccctcatca

SEQ ID NO: 1125362 - DNA, 25 bp, Homo sapien
catgtatatgacaagagaccctaag

SEQ ID NO: 1125363 - DNA, 25 bp, Homo sapien
tggctcactgctgtttctatcttct

SEQ ID NO: 1125364 - DNA, 25 bp, Homo sapien
cactgctgtttctatcttctgggct

SEQ ID NO: 1125365 - DNA, 25 bp, Homo sapien
tcactgctgtttctatcttctgggc

SEQ ID NO: 1125366 - DNA, 25 bp, Homo sapien
tgctgtttctatcttctgggctcag

SEQ ID NO: 1125367 - DNA, 25 bp, Homo sapien
aaacacacatactattagccttcag

SEQ ID NO: 1125368 - DNA, 25 bp, Homo sapien
gccttcagttaccactgtatgctat

SEQ ID NO: 1125369 - DNA, 25 bp, Homo sapien
ctatgaagatctcaggaactctcac

SEQ ID NO: 1125370 - DNA, 25 bp, Homo sapien
gtgggccccctatgaagatctcagg

SEQ ID NO: 1125371 - DNA, 25 bp, Homo sapien
tcaatatggcatgcagaagaagttc

SEQ ID NO: 1125372 - DNA, 25 bp, Homo sapien
tctgtatgagatcccactgatggca

SEQ ID NO: 1125373 - DNA, 25 bp, Homo sapien
cattggcaatctgaagcgctcttta

SEQ ID NO: 1125374 - DNA, 25 bp, Homo sapien
gaagaagttcagtaccaagcctcaa

SEQ ID NO: 1125375 - DNA, 25 bp, Homo sapien
ttcagctcctagagacaaatcactc

SEQ ID NO: 1125376 - DNA, 25 bp, Homo sapien
accaatttaagcacgatggctgcat

SEQ ID NO: 1125377 - DNA, 25 bp, Homo sapien
atggctgcatggcttacggctgacc

SEQ ID NO: 1125378 - DNA, 25 bp, Homo sapien
gaaacaaaggtagtagtctttcagc

SEQ ID NO: 1125379 - DNA, 25 bp, Homo sapien
accaacaggactgtattgccaccag

SEQ ID NO: 1125380 - DNA, 25 bp, Homo sapien
aacaggactgtattgccaccagctg

SEQ ID NO: 1125381 - DNA, 25 bp, Homo sapien
gagactccaggcatacccactcggc

SEQ ID NO: 1125382 - DNA, 25 bp, Homo sapien
ggactgtattgccaccagctgagac

SEQ ID NO: 1125383 - DNA, 25 bp, Homo sapien
taggtcagtacataggaaatgcagg

SEQ ID NO: 1125384 - DNA, 25 bp, Homo sapien
catagggaaggaaagcatgcatagg

SEQ ID NO: 1125385 - DNA, 25 bp, Homo sapien
ttgaactttaactgcataagcatgg

SEQ ID NO: 1125386 - DNA, 25 bp, Homo sapien
gctaatgttcatattaacagaggcc

SEQ ID NO: 1125387 - DNA, 25 bp, Homo sapien
cataacgaagggtggttcccgcaga

SEQ ID NO: 1125388 - DNA, 25 bp, Homo sapien
caagcagcgtaagacaagaagagag

SEQ ID NO: 1125389 - DNA, 25 bp, Homo sapien
ttcccgcagaatggtgaggtggtca

SEQ ID NO: 1125390 - DNA, 25 bp, Homo sapien
ggaagagcggagatgaacagatcat

SEQ ID NO: 1125391 - DNA, 25 bp, Homo sapien
tttggagccacagagaggtaatcca

SEQ ID NO: 1125392 - DNA, 25 bp, Homo sapien
cttttttggagccacagagaggtaa

SEQ ID NO: 1125393 - DNA, 25 bp, Homo sapien
tttttggagccacagagaggtaatc

SEQ ID NO: 1125394 - DNA, 25 bp, Homo sapien
tggagccacagagaggtaatccaaa

SEQ ID NO: 1125395 - DNA, 25 bp, Homo sapien
tcacacgctgcacatctccataaac

SEQ ID NO: 1125396 - DNA, 25 bp, Homo sapien
acacgctgcacatctccataaacac

SEQ ID NO: 1125397 - DNA, 25 bp, Homo sapien
cacacgctgcacatctccataaaca

SEQ ID NO: 1125398 - DNA, 25 bp, Homo sapien
agttgtgattggtttccatcagcca

SEQ ID NO: 1125399 - DNA, 25 bp, Homo sapien
tgtattagagcgctgtctttcttat

SEQ ID NO: 1125400 - DNA, 25 bp, Homo sapien
ccatctgtattagagcgctgtcttt

SEQ ID NO: 1125401 - DNA, 25 bp, Homo sapien
gattggtttccatcagccatctgta

SEQ ID NO: 1125402 - DNA, 25 bp, Homo sapien
gatttgctcaagtctacctgtagtt

SEQ ID NO: 1125403 - DNA, 25 bp, Homo sapien
gaggctatttcactaggcacacata

SEQ ID NO: 1125404 - DNA, 25 bp, Homo sapien
gaaagcaaaatctacctagcagcaa

SEQ ID NO: 1125405 - DNA, 25 bp, Homo sapien
tacttttatggtcacacagttcaag

SEQ ID NO: 1125406 - DNA, 25 bp, Homo sapien
caaaatcttttgttagcccttgatc

SEQ ID NO: 1125407 - DNA, 25 bp, Homo sapien
tgatcatcaagtccctctcgaggta

SEQ ID NO: 1125408 - DNA, 25 bp, Homo sapien
ccaggtttcttaaaacgatgcaatg

SEQ ID NO: 1125409 - DNA, 25 bp, Homo sapien
tctcgaggtagctgtacagtctgat

SEQ ID NO: 1125410 - DNA, 25 bp, Homo sapien
cccagtgttagcgaacagtgttcgt

SEQ ID NO: 1125411 - DNA, 25 bp, Homo sapien
cagtgcccccagtgttagcgaacag

SEQ ID NO: 1125412 - DNA, 25 bp, Homo sapien
tagatcctcttctgctactgatgga

SEQ ID NO: 1125413 - DNA, 25 bp, Homo sapien
acagtgttcgtagatcctcttctgc

SEQ ID NO: 1125414 - DNA, 25 bp, Homo sapien
ttctccaaggttataattatgaaga

SEQ ID NO: 1125415 - DNA, 25 bp, Homo sapien
tctccaaggttataattatgaagat

SEQ ID NO: 1125416 - DNA, 25 bp, Homo sapien
ttccactgttgccatctgaagaaga

SEQ ID NO: 1125417 - DNA, 25 bp, Homo sapien
tccactgttgccatctgaagaagag

SEQ ID NO: 1125418 - DNA, 25 bp, Homo sapien
aatggcttccctatagaacagatga

SEQ ID NO: 1125419 - DNA, 25 bp, Homo sapien
tatatgatacgtcccacaagagtgt

SEQ ID NO: 1125420 - DNA, 25 bp, Homo sapien
taaggcacgtatgtcaactaagttg

SEQ ID NO: 1125421 - DNA, 25 bp, Homo sapien
ccagaattgtgagatacaaaaggcc

SEQ ID NO: 1125422 - DNA, 25 bp, Homo sapien
tcaacaattcggattgacaagaact

SEQ ID NO: 1125423 - DNA, 25 bp, Homo sapien
catttaaacagaatcaacaattcgg

SEQ ID NO: 1125424 - DNA, 25 bp, Homo sapien
tgtgccgctttcaaactatactgaa

SEQ ID NO: 1125425 - DNA, 25 bp, Homo sapien
tatgaatcttgaaactaagtacatc

SEQ ID NO: 1125426 - DNA, 25 bp, Homo sapien
ggtgaatatagagctacagaagtgt

SEQ ID NO: 1125427 - DNA, 25 bp, Homo sapien
gatttatttatggtataaagccata

SEQ ID NO: 1125428 - DNA, 25 bp, Homo sapien
gtgtttattgagcatgctacagggg

SEQ ID NO: 1125429 - DNA, 25 bp, Homo sapien
ggtataaagccatagaattgtaata

SEQ ID NO: 1125430 - DNA, 25 bp, Homo sapien
gatctattagtgcataaatctactg

SEQ ID NO: 1125431 - DNA, 25 bp, Homo sapien
aaatgtttaatatgtgtcctcctga

SEQ ID NO: 1125432 - DNA, 25 bp, Homo sapien
tcctcctgaaaagcagttaccatct

SEQ ID NO: 1125433 - DNA, 25 bp, Homo sapien
tttaaagcagtagattataacaggg

SEQ ID NO: 1125434 - DNA, 25 bp, Homo sapien
tctgtgcctcagtatcaagtgccat

SEQ ID NO: 1125435 - DNA, 25 bp, Homo sapien
atctgtgcctcagtatcaagtgcca

SEQ ID NO: 1125436 - DNA, 25 bp, Homo sapien
catctgtgcctcagtatcaagtgcc

SEQ ID NO: 1125437 - DNA, 25 bp, Homo sapien
ccatctgtgcctcagtatcaagtgc

SEQ ID NO: 1125438 - DNA, 25 bp, Homo sapien
ggaagcagagataaccctttgttca

SEQ ID NO: 1125439 - DNA, 25 bp, Homo sapien
aatagtagaagcaagtaatggtggg

SEQ ID NO: 1125440 - DNA, 25 bp, Homo sapien
ggaacacaacactgcttgtagcgat

SEQ ID NO: 1125441 - DNA, 25 bp, Homo sapien
tagggacctcatctattgaagcagg

SEQ ID NO: 1125442 - DNA, 25 bp, Homo sapien
tccaaggagtcgaacatcctgcact

SEQ ID NO: 1125443 - DNA, 25 bp, Homo sapien
cctctccaaggagtcgaacatcctg

SEQ ID NO: 1125444 - DNA, 25 bp, Homo sapien
aaggagtcgaacatcctgcactgtg

SEQ ID NO: 1125445 - DNA, 25 bp, Homo sapien
ttccttaacgccaccaagcagtcac

SEQ ID NO: 1125446 - DNA, 25 bp, Homo sapien
actccaaagagggtagcagcgaatg

SEQ ID NO: 1125447 - DNA, 25 bp, Homo sapien
gcagcgaatgtacaattctgaattc

SEQ ID NO: 1125448 - DNA, 25 bp, Homo sapien
tctgaattccttgtgtggaaagcag

SEQ ID NO: 1125449 - DNA, 25 bp, Homo sapien
tacaattctgaattccttgtgtgga

SEQ ID NO: 1125450 - DNA, 25 bp, Homo sapien
catattcaggattatttatcaggtc

SEQ ID NO: 1125451 - DNA, 25 bp, Homo sapien
atcaggtccatgaatatgacagcca

SEQ ID NO: 1125452 - DNA, 25 bp, Homo sapien
tgttttccgatgctatctttgagaa

SEQ ID NO: 1125453 - DNA, 25 bp, Homo sapien
gccatttgatcaagaagcattatgt

SEQ ID NO: 1125454 - DNA, 25 bp, Homo sapien
tgagcctcagcggtatctttctcaa

SEQ ID NO: 1125455 - DNA, 25 bp, Homo sapien
caaatgtctgaacaatgttcgtgat

SEQ ID NO: 1125456 - DNA, 25 bp, Homo sapien
cccctggtcagtgagtggttctaca

SEQ ID NO: 1125457 - DNA, 25 bp, Homo sapien
caaacctttgctgggaacctaatat

SEQ ID NO: 1125458 - DNA, 25 bp, Homo sapien
aggaaagctgccaacacaatgagag

SEQ ID NO: 1125459 - DNA, 25 bp, Homo sapien
atgagagtttcagttcccatggaac

SEQ ID NO: 1125460 - DNA, 25 bp, Homo sapien
gctgccaacacaatgagagtttcag

SEQ ID NO: 1125461 - DNA, 25 bp, Homo sapien
caacacaatgagagtttcagttccc

SEQ ID NO: 1125462 - DNA, 25 bp, Homo sapien
cagagttacagaattttgaggtgac

SEQ ID NO: 1125463 - DNA, 25 bp, Homo sapien
tctttcattattgttggcatctctt

SEQ ID NO: 1125464 - DNA, 25 bp, Homo sapien
tacagaattttgaggtgacggagag

SEQ ID NO: 1125465 - DNA, 25 bp, Homo sapien
tggcatctcttcagtctgctggcaa

SEQ ID NO: 1125466 - DNA, 25 bp, Homo sapien
tatgtctggtctttttatagttgcc

SEQ ID NO: 1125467 - DNA, 25 bp, Homo sapien
caagtcttgtattggcagctcagaa

SEQ ID NO: 1125468 - DNA, 25 bp, Homo sapien
gggttacccaagtctccagtcagaa

SEQ ID NO: 1125469 - DNA, 25 bp, Homo sapien
gaaacaagtcttgtattggcagctc

SEQ ID NO: 1125470 - DNA, 25 bp, Homo sapien
tttgacattggcagctgtaagtacc

SEQ ID NO: 1125471 - DNA, 25 bp, Homo sapien
ggatctattgattgaaatgccattc

SEQ ID NO: 1125472 - DNA, 25 bp, Homo sapien
gctgttggatctattgattgaaatg

SEQ ID NO: 1125473 - DNA, 25 bp, Homo sapien
tatatttgacattggcagctgtaag

SEQ ID NO: 1125474 - DNA, 25 bp, Homo sapien
tagatacactcatggaagttgtgca

SEQ ID NO: 1125475 - DNA, 25 bp, Homo sapien
aagcaggaaagtcagatgatagcac

SEQ ID NO: 1125476 - DNA, 25 bp, Homo sapien
ccccacaagaacattctatagatac

SEQ ID NO: 1125477 - DNA, 25 bp, Homo sapien
gatagcacttgaataacccttctcc

SEQ ID NO: 1125478 - DNA, 25 bp, Homo sapien
ccactgtcggcacattcagccaagt

SEQ ID NO: 1125479 - DNA, 25 bp, Homo sapien
gaagaaatatcgaggtggccaccat

SEQ ID NO: 1125480 - DNA, 25 bp, Homo sapien
agctgaatgggctgattcacccgag

SEQ ID NO: 1125481 - DNA, 25 bp, Homo sapien
tcagccaagttactaccagaaggtc

SEQ ID NO: 1125482 - DNA, 25 bp, Homo sapien
ctccacagtaacacattttcctcac

SEQ ID NO: 1125483 - DNA, 25 bp, Homo sapien
ctggacaccaagtaggagaccagga

SEQ ID NO: 1125484 - DNA, 25 bp, Homo sapien
ggacaccaagtaggagaccaggaat

SEQ ID NO: 1125485 - DNA, 25 bp, Homo sapien
gacaccaagtaggagaccaggaatt

SEQ ID NO: 1125486 - DNA, 25 bp, Homo sapien
acaccaagtaggagaccaggaattg

SEQ ID NO: 1125487 - DNA, 25 bp, Homo sapien
ctgtaaggtctacccatctgttctt

SEQ ID NO: 1125488 - DNA, 25 bp, Homo sapien
cagtcaccccctcggattctgtaag

SEQ ID NO: 1125489 - DNA, 25 bp, Homo sapien
gattctgtaaggtctacccatctgt

SEQ ID NO: 1125490 - DNA, 25 bp, Homo sapien
cctcggattctgtaaggtctaccca

SEQ ID NO: 1125491 - DNA, 25 bp, Homo sapien
tcagagctagatggcagtctccaga

SEQ ID NO: 1125492 - DNA, 25 bp, Homo sapien
ctagatggcagtctccagagaaggt

SEQ ID NO: 1125493 - DNA, 25 bp, Homo sapien
gagctagatggcagtctccagagaa

SEQ ID NO: 1125494 - DNA, 25 bp, Homo sapien
tctcagagctagatggcagtctcca

SEQ ID NO: 1125495 - DNA, 25 bp, Homo sapien
agggacttattcatccagatcagat

SEQ ID NO: 1125496 - DNA, 25 bp, Homo sapien
cagggacttattcatccagatcaga

SEQ ID NO: 1125497 - DNA, 25 bp, Homo sapien
ggccagggacttattcatccagatc

SEQ ID NO: 1125498 - DNA, 25 bp, Homo sapien
gccagggacttattcatccagatca

SEQ ID NO: 1125499 - DNA, 25 bp, Homo sapien
gaacagaatatggtaactcagggct

SEQ ID NO: 1125500 - DNA, 25 bp, Homo sapien
tcatttatgccttgacgtatgaatg

SEQ ID NO: 1125501 - DNA, 25 bp, Homo sapien
tatgaatgagtagaacagaatatgg

SEQ ID NO: 1125502 - DNA, 25 bp, Homo sapien
taactcagggctatgtgaagatctt

SEQ ID NO: 1125503 - DNA, 25 bp, Homo sapien
cctttaatactgataagaagtgaca

SEQ ID NO: 1125504 - DNA, 25 bp, Homo sapien
tgctacaactgtgacagcaaaaagc

SEQ ID NO: 1125505 - DNA, 25 bp, Homo sapien
caatcaaaacttgagttgaagagct

SEQ ID NO: 1125506 - DNA, 25 bp, Homo sapien
tcaagagagtatcagtgctacaact

SEQ ID NO: 1125507 - DNA, 25 bp, Homo sapien
tgatcctttgctcagcagcaaattt

SEQ ID NO: 1125508 - DNA, 25 bp, Homo sapien
cactttgatcctttgctcagcagca

SEQ ID NO: 1125509 - DNA, 25 bp, Homo sapien
ttacactttgatcctttgctcagca

SEQ ID NO: 1125510 - DNA, 25 bp, Homo sapien
ttgatcctttgctcagcagcaaatt

SEQ ID NO: 1125511 - DNA, 25 bp, Homo sapien
aacatctgctaaatggtctcataag

SEQ ID NO: 1125512 - DNA, 25 bp, Homo sapien
gtctcataagtgtcagcaccttcaa

SEQ ID NO: 1125513 - DNA, 25 bp, Homo sapien
tactcctgtaacatctgctaaatgg

SEQ ID NO: 1125514 - DNA, 25 bp, Homo sapien
ttgaaaaacggcttatactcctgta

SEQ ID NO: 1125515 - DNA, 25 bp, Homo sapien
tgtctcccttgttaccagcagtaag

SEQ ID NO: 1125516 - DNA, 25 bp, Homo sapien
cttttgttgtaagacacacaacaca

SEQ ID NO: 1125517 - DNA, 25 bp, Homo sapien
taccagcagtaaggatggatacata

SEQ ID NO: 1125518 - DNA, 25 bp, Homo sapien
cccttgttaccagcagtaaggatgg

SEQ ID NO: 1125519 - DNA, 25 bp, Homo sapien
tgatcaggtctcctccgtaagaagt

SEQ ID NO: 1125520 - DNA, 25 bp, Homo sapien
taagaagttcgtacggcagtagcag

SEQ ID NO: 1125521 - DNA, 25 bp, Homo sapien
gagccaagggtcttaaacattctga

SEQ ID NO: 1125522 - DNA, 25 bp, Homo sapien
cgttcacccgaagatctcaggcatt

SEQ ID NO: 1125523 - DNA, 25 bp, Homo sapien
gatctgagtcctgagagttctccca

SEQ ID NO: 1125524 - DNA, 25 bp, Homo sapien
taccctgcaccaggagatctgagtc

SEQ ID NO: 1125525 - DNA, 25 bp, Homo sapien
ggagactcagatcaattacagaaca

SEQ ID NO: 1125526 - DNA, 25 bp, Homo sapien
ttgtcccagcatgctagtgtggttt

SEQ ID NO: 1125527 - DNA, 25 bp, Homo sapien
gacctgctcacttgtgcttgcaaag

SEQ ID NO: 1125528 - DNA, 25 bp, Homo sapien
caattagcttgggtgtaaacgctgc

SEQ ID NO: 1125529 - DNA, 25 bp, Homo sapien
taaacgctgcagtcagaatgacctg

SEQ ID NO: 1125530 - DNA, 25 bp, Homo sapien
cctgttttccatgggatcgggtcaa

SEQ ID NO: 1125531 - DNA, 25 bp, Homo sapien
cttcgatgctgtttataagcttctc

SEQ ID NO: 1125532 - DNA, 25 bp, Homo sapien
tcgatgctgtttataagcttctcaa

SEQ ID NO: 1125533 - DNA, 25 bp, Homo sapien
atgctgtttataagcttctcaatga

SEQ ID NO: 1125534 - DNA, 25 bp, Homo sapien
gatgctgtttataagcttctcaatg

SEQ ID NO: 1125535 - DNA, 25 bp, Homo sapien
tatttaactttgcacttgagttggt

SEQ ID NO: 1125536 - DNA, 25 bp, Homo sapien
tgtatttaactttgcacttgagttg

SEQ ID NO: 1125537 - DNA, 25 bp, Homo sapien
atttctggagaagggcctttgaaca

SEQ ID NO: 1125538 - DNA, 25 bp, Homo sapien
taactttgcacttgagttggttgtc

SEQ ID NO: 1125539 - DNA, 25 bp, Homo sapien
agtgaagcagacattgcagtcagcc

SEQ ID NO: 1125540 - DNA, 25 bp, Homo sapien
gctgctgaaaacgttcatcagtgtg

SEQ ID NO: 1125541 - DNA, 25 bp, Homo sapien
tgacgaggaagaggatttaccctct

SEQ ID NO: 1125542 - DNA, 25 bp, Homo sapien
tgaacgcttcagtaaagagctgctg

SEQ ID NO: 1125543 - DNA, 25 bp, Homo sapien
ctcatgcgtgagatgggtgtacaaa

SEQ ID NO: 1125544 - DNA, 25 bp, Homo sapien
tgctgtgcacatacgggctctgact

SEQ ID NO: 1125545 - DNA, 25 bp, Homo sapien
tattaagtaaaatccccttcgctga

SEQ ID NO: 1125546 - DNA, 25 bp, Homo sapien
tccaaattgccctatgctgtgctcc

SEQ ID NO: 1125547 - DNA, 25 bp, Homo sapien
tgaacatcaagcatggttatgccca

SEQ ID NO: 1125548 - DNA, 25 bp, Homo sapien
gcccagtgttatccagggactagag

SEQ ID NO: 1125549 - DNA, 25 bp, Homo sapien
gaaggtggcatttcaagcaaatcag

SEQ ID NO: 1125550 - DNA, 25 bp, Homo sapien
tacttgtaataacctgcagccatgg

SEQ ID NO: 1125551 - DNA, 25 bp, Homo sapien
tctgcctcatagagttataaattag

SEQ ID NO: 1125552 - DNA, 25 bp, Homo sapien
tcatagctgcatgaacttgcctcag

SEQ ID NO: 1125553 - DNA, 25 bp, Homo sapien
tacataaagctctggaggccaaaaa

SEQ ID NO: 1125554 - DNA, 25 bp, Homo sapien
tgaaagaaatccacgttaagatgac

SEQ ID NO: 1125555 - DNA, 25 bp, Homo sapien
gaaatatcagctgaagagagcgcat

SEQ ID NO: 1125556 - DNA, 25 bp, Homo sapien
ttgaaatatcagctgaagagagcgc

SEQ ID NO: 1125557 - DNA, 25 bp, Homo sapien
tgaaatatcagctgaagagagcgca

SEQ ID NO: 1125558 - DNA, 25 bp, Homo sapien
attgaaatatcagctgaagagagcg

SEQ ID NO: 1125559 - DNA, 25 bp, Homo sapien
gtcaaatgtgagaacaaggcgacac

SEQ ID NO: 1125560 - DNA, 25 bp, Homo sapien
gaaattgataatcggtcctgttagg

SEQ ID NO: 1125561 - DNA, 25 bp, Homo sapien
caaggaaagctgtctaggtggccca

SEQ ID NO: 1125562 - DNA, 25 bp, Homo sapien
caaggctatttcagttggtgtcaaa

SEQ ID NO: 1125563 - DNA, 25 bp, Homo sapien
ccatggcactagtgcagtgtggtgt

SEQ ID NO: 1125564 - DNA, 25 bp, Homo sapien
gtgtggagttgacctcattctcctg

SEQ ID NO: 1125565 - DNA, 25 bp, Homo sapien
catctccaccatggcactagtgcag

SEQ ID NO: 1125566 - DNA, 25 bp, Homo sapien
cagtgtggtgtggagttgacctcat

SEQ ID NO: 1125567 - DNA, 25 bp, Homo sapien
tctcaggtccacatacagttttatt

SEQ ID NO: 1125568 - DNA, 25 bp, Homo sapien
agcaaggagtaaagagaagagtttc

SEQ ID NO: 1125569 - DNA, 25 bp, Homo sapien
taaagatagcaaggagtaaagagaa

SEQ ID NO: 1125570 - DNA, 25 bp, Homo sapien
gtctctccagtagtcacattcttct

SEQ ID NO: 1125571 - DNA, 25 bp, Homo sapien
cttcataaacactgaggtccagtca

SEQ ID NO: 1125572 - DNA, 25 bp, Homo sapien
ccagtcaggctttgatctgtagttt

SEQ ID NO: 1125573 - DNA, 25 bp, Homo sapien
cataaacactgaggtccagtcaggc

SEQ ID NO: 1125574 - DNA, 25 bp, Homo sapien
tcataaacactgaggtccagtcagg

SEQ ID NO: 1125575 - DNA, 25 bp, Homo sapien
aaacactgttcatacttaaaacttg

SEQ ID NO: 1125576 - DNA, 25 bp, Homo sapien
ttcccaaacactgttcatacttaaa

SEQ ID NO: 1125577 - DNA, 25 bp, Homo sapien
ccaaacactgttcatacttaaaact

SEQ ID NO: 1125578 - DNA, 25 bp, Homo sapien
aacactgttcatacttaaaacttgt

SEQ ID NO: 1125579 - DNA, 25 bp, Homo sapien
actgaagtattaacgccaggaacga

SEQ ID NO: 1125580 - DNA, 25 bp, Homo sapien
tattaacgccaggaacgatgttcct

SEQ ID NO: 1125581 - DNA, 25 bp, Homo sapien
gatgatttgactgactgacctaaag

SEQ ID NO: 1125582 - DNA, 25 bp, Homo sapien
cgatgttcctgttggtgaaagcttt

SEQ ID NO: 1125583 - DNA, 25 bp, Homo sapien
aatccacatttatttgagtaattgt

SEQ ID NO: 1125584 - DNA, 25 bp, Homo sapien
catttatttgagtaattgtacttgg

SEQ ID NO: 1125585 - DNA, 25 bp, Homo sapien
tccacatttatttgagtaattgtac

SEQ ID NO: 1125586 - DNA, 25 bp, Homo sapien
cacatttatttgagtaattgtactt

SEQ ID NO: 1125587 - DNA, 25 bp, Homo sapien
aaggaaggagcattttggatagtct

SEQ ID NO: 1125588 - DNA, 25 bp, Homo sapien
taaggacgtagaggacattgagaag

SEQ ID NO: 1125589 - DNA, 25 bp, Homo sapien
gaccactcttctgcgctataactgt

SEQ ID NO: 1125590 - DNA, 25 bp, Homo sapien
gaaaataagatggactgatgggcta

SEQ ID NO: 1125591 - DNA, 25 bp, Homo sapien
aaaagagagctattactcgctccac

SEQ ID NO: 1125592 - DNA, 25 bp, Homo sapien
gattctacccattctcaaagtacag

SEQ ID NO: 1125593 - DNA, 25 bp, Homo sapien
attgcactcaccctcttgattctac

SEQ ID NO: 1125594 - DNA, 25 bp, Homo sapien
gctataccaagttgtataaaccaat

SEQ ID NO: 1125595 - DNA, 25 bp, Homo sapien
tctatccaaagtgcacacactttgt

SEQ ID NO: 1125596 - DNA, 25 bp, Homo sapien
aaagtgcacacactttgtaacttag

SEQ ID NO: 1125597 - DNA, 25 bp, Homo sapien
ctctacaataaagtagtcatgtatc

SEQ ID NO: 1125598 - DNA, 25 bp, Homo sapien
tacaataaagtagtcatgtatctat

SEQ ID NO: 1125599 - DNA, 25 bp, Homo sapien
ggttgctgcacaagacatctgtctt

SEQ ID NO: 1125600 - DNA, 25 bp, Homo sapien
tagtaatccataagattgtcatggt

SEQ ID NO: 1125601 - DNA, 25 bp, Homo sapien
tatagtatggaactttcatcaggga

SEQ ID NO: 1125602 - DNA, 25 bp, Homo sapien
tttaagctgcacaaactgcaagcaa

SEQ ID NO: 1125603 - DNA, 25 bp, Homo sapien
tattaagagcttataactgagttga

SEQ ID NO: 1125604 - DNA, 25 bp, Homo sapien
actgagttgaaagttaagatctaaa

SEQ ID NO: 1125605 - DNA, 25 bp, Homo sapien
tctgttgtaaacttagagtgatgca

SEQ ID NO: 1125606 - DNA, 25 bp, Homo sapien
gcccaaagcgtacaaaagactctgt

SEQ ID NO: 1125607 - DNA, 25 bp, Homo sapien
caactattcaggccacatatacgtt

SEQ ID NO: 1125608 - DNA, 25 bp, Homo sapien
actattcaggccacatatacgttcc

SEQ ID NO: 1125609 - DNA, 25 bp, Homo sapien
aactattcaggccacatatacgttc

SEQ ID NO: 1125610 - DNA, 25 bp, Homo sapien
tcaactattcaggccacatatacgt

SEQ ID NO: 1125611 - DNA, 25 bp, Homo sapien
caggtagtatattaacgagttgttc

SEQ ID NO: 1125612 - DNA, 25 bp, Homo sapien
tctgctggactctctaatctcacat

SEQ ID NO: 1125613 - DNA, 25 bp, Homo sapien
ggccttcaaaattctgctggactct

SEQ ID NO: 1125614 - DNA, 25 bp, Homo sapien
tttcaggtagtatattaacgagttg

SEQ ID NO: 1125615 - DNA, 25 bp, Homo sapien
catagtacagtctcttgtggatgaa

SEQ ID NO: 1125616 - DNA, 25 bp, Homo sapien
agttctatgtgtaaggctgtcctgt

SEQ ID NO: 1125617 - DNA, 25 bp, Homo sapien
ggctgtcctgttctctttgaaattc

SEQ ID NO: 1125618 - DNA, 25 bp, Homo sapien
tgctccccactgactagttctatgt

SEQ ID NO: 1125619 - DNA, 25 bp, Homo sapien
tgggctgatccttaccatggacctt

SEQ ID NO: 1125620 - DNA, 25 bp, Homo sapien
ttttgcaggcatgccaccttctttc

SEQ ID NO: 1125621 - DNA, 25 bp, Homo sapien
ctgtattcagtgaacttaggataaa

SEQ ID NO: 1125622 - DNA, 25 bp, Homo sapien
ggcatcaagccacattgccatcgtg

SEQ ID NO: 1125623 - DNA, 25 bp, Homo sapien
tagtctgtcctttgattgggaatag

SEQ ID NO: 1125624 - DNA, 25 bp, Homo sapien
tatatgtcatcacacaggtgacctt

SEQ ID NO: 1125625 - DNA, 25 bp, Homo sapien
gatgcatctgttgtcataatcaact

SEQ ID NO: 1125626 - DNA, 25 bp, Homo sapien
tagtattctcttacataaaggaaag

SEQ ID NO: 1125627 - DNA, 25 bp, Homo sapien
ctggatttcccattttggctactgg

SEQ ID NO: 1125628 - DNA, 25 bp, Homo sapien
tgactctgctgaaagtggtcttcag

SEQ ID NO: 1125629 - DNA, 25 bp, Homo sapien
tactggtggaattgactctgctgaa

SEQ ID NO: 1125630 - DNA, 25 bp, Homo sapien
ttgctcgtgctctgcctggatttcc

SEQ ID NO: 1125631 - DNA, 25 bp, Homo sapien
aatggcttgatgtaactgaattccc

SEQ ID NO: 1125632 - DNA, 25 bp, Homo sapien
tccacacagttgaagcagaatggct

SEQ ID NO: 1125633 - DNA, 25 bp, Homo sapien
tcaaaacgtgggaactcagaatggc

SEQ ID NO: 1125634 - DNA, 25 bp, Homo sapien
cgtttgtttgttcgaacctgcagct

SEQ ID NO: 1125635 - DNA, 25 bp, Homo sapien
aaactgctgtgttgtcgggtaattg

SEQ ID NO: 1125636 - DNA, 25 bp, Homo sapien
taaactgctgtgttgtcgggtaatt

SEQ ID NO: 1125637 - DNA, 25 bp, Homo sapien
tttcattaaactgctgtgttgtcgg

SEQ ID NO: 1125638 - DNA, 25 bp, Homo sapien
cattaaactgctgtgttgtcgggta

SEQ ID NO: 1125639 - DNA, 25 bp, Homo sapien
taggagtatggaaaacacgttcttg

SEQ ID NO: 1125640 - DNA, 25 bp, Homo sapien
aggagtatggaaaacacgttcttgg

SEQ ID NO: 1125641 - DNA, 25 bp, Homo sapien
taaataggcaaggatggctcttgaa

SEQ ID NO: 1125642 - DNA, 25 bp, Homo sapien
gtttaaataggcaaggatggctctt

SEQ ID NO: 1125643 - DNA, 25 bp, Homo sapien
aaattcccagtgttcacagcacctt

SEQ ID NO: 1125644 - DNA, 25 bp, Homo sapien
tttacttcctcttttagcagacaaa

SEQ ID NO: 1125645 - DNA, 25 bp, Homo sapien
tgtgccggcacattatcaacaacaa

SEQ ID NO: 1125646 - DNA, 25 bp, Homo sapien
gtcatgtgccggcacattatcaaca

SEQ ID NO: 1125647 - DNA, 25 bp, Homo sapien
tgccggcacattatcaacaacaatg

SEQ ID NO: 1125648 - DNA, 25 bp, Homo sapien
ttagtcatgtgccggcacattatca

SEQ ID NO: 1125649 - DNA, 25 bp, Homo sapien
tggagccaaaataagctggagatac

SEQ ID NO: 1125650 - DNA, 25 bp, Homo sapien
tttatcctagcaaagagcctggtac

SEQ ID NO: 1125651 - DNA, 25 bp, Homo sapien
gatacaggatattagcagctcttgc

SEQ ID NO: 1125652 - DNA, 25 bp, Homo sapien
gactgcctctttagtgctcctataa

SEQ ID NO: 1125653 - DNA, 25 bp, Homo sapien
gaccctccatgagtaaatttgaccc

SEQ ID NO: 1125654 - DNA, 25 bp, Homo sapien
catgagtaaagttgacggtgttcac

SEQ ID NO: 1125655 - DNA, 25 bp, Homo sapien
ttgaccctccatgagtaaagttgac

SEQ ID NO: 1125656 - DNA, 25 bp, Homo sapien
tcatacttaggcaagccagctgctg

SEQ ID NO: 1125657 - DNA, 25 bp, Homo sapien
tgaacagcttgcctaacccagcggc

SEQ ID NO: 1125658 - DNA, 25 bp, Homo sapien
taacccagcggcagatgttccgcac

SEQ ID NO: 1125659 - DNA, 25 bp, Homo sapien
cagctcttgcgatgctcacaatatc

SEQ ID NO: 1125660 - DNA, 25 bp, Homo sapien
gcgatgctcacaatatcagtgacat

SEQ ID NO: 1125661 - DNA, 25 bp, Homo sapien
ccatcagacctgagacagtgttggt

SEQ ID NO: 1125662 - DNA, 25 bp, Homo sapien
gtgccatcagattttaatcccatca

SEQ ID NO: 1125663 - DNA, 25 bp, Homo sapien
tggtggctgtaacgccattggcacc

SEQ ID NO: 1125664 - DNA, 25 bp, Homo sapien
tatgtagttcgctttgcaatcccca

SEQ ID NO: 1125665 - DNA, 25 bp, Homo sapien
tgtgctgtcacttgagctttcatat

SEQ ID NO: 1125666 - DNA, 25 bp, Homo sapien
gctgtcacttgagctttcatattca

SEQ ID NO: 1125667 - DNA, 25 bp, Homo sapien
tcatcctgtgctgtcacttgagctt

SEQ ID NO: 1125668 - DNA, 25 bp, Homo sapien
ctttcatattcaatccgttctgtca

SEQ ID NO: 1125669 - DNA, 25 bp, Homo sapien
cctctgtgacctcctttattctctt

SEQ ID NO: 1125670 - DNA, 25 bp, Homo sapien
gctgagacttagatattcatgaggg

SEQ ID NO: 1125671 - DNA, 25 bp, Homo sapien
ggagcagttgcagttcctctagcat

SEQ ID NO: 1125672 - DNA, 25 bp, Homo sapien
gaccatgcagcaggaattagcaaga

SEQ ID NO: 1125673 - DNA, 25 bp, Homo sapien
taacttcaaccataccccatgctag

SEQ ID NO: 1125674 - DNA, 25 bp, Homo sapien
tggcagtactcctgacatgggggaa

SEQ ID NO: 1125675 - DNA, 25 bp, Homo sapien
gacctaatgtcatggtactcctcct

SEQ ID NO: 1125676 - DNA, 25 bp, Homo sapien
gaccagagacaaggacctaatgtca

SEQ ID NO: 1125677 - DNA, 25 bp, Homo sapien
ttctcttggtaactagcctttactg

SEQ ID NO: 1125678 - DNA, 25 bp, Homo sapien
aaagaaggcctttctcagttcatag

SEQ ID NO: 1125679 - DNA, 25 bp, Homo sapien
tggtagttgccacagttctaactga

SEQ ID NO: 1125680 - DNA, 25 bp, Homo sapien
gaatttggggcctttaatgtcacat

SEQ ID NO: 1125681 - DNA, 25 bp, Homo sapien
tgaaatcaatagctgtaaatggtag

SEQ ID NO: 1125682 - DNA, 25 bp, Homo sapien
tgtaatttcagttggcaatctttac

SEQ ID NO: 1125683 - DNA, 25 bp, Homo sapien
cagttggcaatctttacttgattcc

SEQ ID NO: 1125684 - DNA, 25 bp, Homo sapien
ccttcagtccaaactcaactattat

SEQ ID NO: 1125685 - DNA, 25 bp, Homo sapien
cttgattccttcagtccaaactcaa

SEQ ID NO: 1125686 - DNA, 25 bp, Homo sapien
aaaccttaattgtgacaatgccttc

SEQ ID NO: 1125687 - DNA, 25 bp, Homo sapien
catcctcttggaaaggattttctca

SEQ ID NO: 1125688 - DNA, 25 bp, Homo sapien
ctgagaattattaaagaggacatta

SEQ ID NO: 1125689 - DNA, 25 bp, Homo sapien
ggacattatgtttgttaatcgggca

SEQ ID NO: 1125690 - DNA, 25 bp, Homo sapien
tatcacccacggacgtcttcccttc

SEQ ID NO: 1125691 - DNA, 25 bp, Homo sapien
ttcccttcccacttggaccgtgata

SEQ ID NO: 1125692 - DNA, 25 bp, Homo sapien
gctctgctccgcttaggctgtgaca

SEQ ID NO: 1125693 - DNA, 25 bp, Homo sapien
tgccactggccatgtagacatcctt

SEQ ID NO: 1125694 - DNA, 25 bp, Homo sapien
ttatcatgccgcttgcttctctgcc

SEQ ID NO: 1125695 - DNA, 25 bp, Homo sapien
ttttaagctgactatgatgaatggc

SEQ ID NO: 1125696 - DNA, 25 bp, Homo sapien
cccatgcttggcatgagctttgcca

SEQ ID NO: 1125697 - DNA, 25 bp, Homo sapien
tggcatgagctttgccaattttaag

SEQ ID NO: 1125698 - DNA, 25 bp, Homo sapien
tcagtaattggcctcgtgatcttcc

SEQ ID NO: 1125699 - DNA, 25 bp, Homo sapien
ggcctcgtgatcttccatgctgggt

SEQ ID NO: 1125700 - DNA, 25 bp, Homo sapien
taaacatgatcagtaattggcctcg

SEQ ID NO: 1125701 - DNA, 25 bp, Homo sapien
gatcttccatgctgggttcatttga

SEQ ID NO: 1125702 - DNA, 25 bp, Homo sapien
ctgccccaccagcattcagtggcat

SEQ ID NO: 1125703 - DNA, 25 bp, Homo sapien
tctgccagaaaatccccccatatca

SEQ ID NO: 1125704 - DNA, 25 bp, Homo sapien
cagaaaatccccccatatcagtttt

SEQ ID NO: 1125705 - DNA, 25 bp, Homo sapien
ggaaacattcttcctaatgctcttg

SEQ ID NO: 1125706 - DNA, 25 bp, Homo sapien
aacattcttcctaatgctcttgcca

SEQ ID NO: 1125707 - DNA, 25 bp, Homo sapien
tcagctcagtgctcacaattgccca

SEQ ID NO: 1125708 - DNA, 25 bp, Homo sapien
cagtgctcacaattgcccatgacca

SEQ ID NO: 1125709 - DNA, 25 bp, Homo sapien
caattgcccatgaccaattctgcac

SEQ ID NO: 1125710 - DNA, 25 bp, Homo sapien
gtgctcacaattgcccatgaccaat

SEQ ID NO: 1125711 - DNA, 25 bp, Homo sapien
gaattttgccacctctgcagttttg

SEQ ID NO: 1125712 - DNA, 25 bp, Homo sapien
gaagtccttatctctatatctccca

SEQ ID NO: 1125713 - DNA, 25 bp, Homo sapien
tcctgtcatctgaaccgaagtcctt

SEQ ID NO: 1125714 - DNA, 25 bp, Homo sapien
tatctcccaccacgtgtacttttaa

SEQ ID NO: 1125715 - DNA, 25 bp, Homo sapien
ctacaatgtatctagatatcaattc

SEQ ID NO: 1125716 - DNA, 25 bp, Homo sapien
gaattggtgtccttcatcaattcta

SEQ ID NO: 1125717 - DNA, 25 bp, Homo sapien
tccctttcttgtatactacaatgta

SEQ ID NO: 1125718 - DNA, 25 bp, Homo sapien
tgttgtctggaatctaagaattggt

SEQ ID NO: 1125719 - DNA, 25 bp, Homo sapien
gcagatattaaccagttgttggcag

SEQ ID NO: 1125720 - DNA, 25 bp, Homo sapien
ttaaccagttgttggcagtagactt

SEQ ID NO: 1125721 - DNA, 25 bp, Homo sapien
attgcagatattaaccagttgttgg

SEQ ID NO: 1125722 - DNA, 25 bp, Homo sapien
gatattaaccagttgttggcagtag

SEQ ID NO: 1125723 - DNA, 25 bp, Homo sapien
aaatattttgacaaggaccaggatt

SEQ ID NO: 1125724 - DNA, 25 bp, Homo sapien
gcaggtagtttgctattcgcagcat

SEQ ID NO: 1125725 - DNA, 25 bp, Homo sapien
tgtgtgtatgctgtgcaggtagttt

SEQ ID NO: 1125726 - DNA, 25 bp, Homo sapien
gaccaggattactgactgctgtgtg

SEQ ID NO: 1125727 - DNA, 25 bp, Homo sapien
gccaatccaacgtttcattcatgca

SEQ ID NO: 1125728 - DNA, 25 bp, Homo sapien
gtgctttccccttcggtatcattag

SEQ ID NO: 1125729 - DNA, 25 bp, Homo sapien
accagcaagtctagccaatccaacg

SEQ ID NO: 1125730 - DNA, 25 bp, Homo sapien
catctcttcggcttagtgctttccc

SEQ ID NO: 1125731 - DNA, 25 bp, Homo sapien
tctttcacttcagctaagcccattg

SEQ ID NO: 1125732 - DNA, 25 bp, Homo sapien
tgcttctttcacttcagctaagccc

SEQ ID NO: 1125733 - DNA, 25 bp, Homo sapien
ttcagctaagcccattgcccttttc

SEQ ID NO: 1125734 - DNA, 25 bp, Homo sapien
tttcacttcagctaagcccattgcc

SEQ ID NO: 1125735 - DNA, 25 bp, Homo sapien
tgagagggatgctgggtatattgga

SEQ ID NO: 1125736 - DNA, 25 bp, Homo sapien
gagggatgctgggtatattggaaag

SEQ ID NO: 1125737 - DNA, 25 bp, Homo sapien
ggatgctgggtatattggaaagaaa

SEQ ID NO: 1125738 - DNA, 25 bp, Homo sapien
gggtgagagggatgctgggtatatt

SEQ ID NO: 1125739 - DNA, 25 bp, Homo sapien
acatcctgtgagaatgtagccttca

SEQ ID NO: 1125740 - DNA, 25 bp, Homo sapien
ggctcagtggtgatagatactacct

SEQ ID NO: 1125741 - DNA, 25 bp, Homo sapien
tggtggttggccaatgaaatgcctg

SEQ ID NO: 1125742 - DNA, 25 bp, Homo sapien
tgaggacaccgagtttaggaaatgg

SEQ ID NO: 1125743 - DNA, 25 bp, Homo sapien
caagatttctcctgaatctgggcct

SEQ ID NO: 1125744 - DNA, 25 bp, Homo sapien
tttccctctggttgagtcccacttg

SEQ ID NO: 1125745 - DNA, 25 bp, Homo sapien
cctcgtccagggagtttgtgacatg

SEQ ID NO: 1125746 - DNA, 25 bp, Homo sapien
tgaagcctgcttactggtctgtctc

SEQ ID NO: 1125747 - DNA, 25 bp, Homo sapien
gggatgccaaagttggagcacgaaa

SEQ ID NO: 1125748 - DNA, 25 bp, Homo sapien
agggatgccaaagttggagcacgaa

SEQ ID NO: 1125749 - DNA, 25 bp, Homo sapien
ctagggatgccaaagttggagcacg

SEQ ID NO: 1125750 - DNA, 25 bp, Homo sapien
tagggatgccaaagttggagcacga

SEQ ID NO: 1125751 - DNA, 25 bp, Homo sapien
gcagaaggggagacttaaattgctg

SEQ ID NO: 1125752 - DNA, 25 bp, Homo sapien
ttgctgaagtccctgaacggccatc

SEQ ID NO: 1125753 - DNA, 25 bp, Homo sapien
aaattgctgaagtccctgaacggcc

SEQ ID NO: 1125754 - DNA, 25 bp, Homo sapien
ctgaagtccctgaacggccatctga

SEQ ID NO: 1125755 - DNA, 25 bp, Homo sapien
caaggaagtgcagtagagtatgaca

SEQ ID NO: 1125756 - DNA, 25 bp, Homo sapien
aggaagtgcagtagagtatgacaat

SEQ ID NO: 1125757 - DNA, 25 bp, Homo sapien
tcaaggaagtgcagtagagtatgac

SEQ ID NO: 1125758 - DNA, 25 bp, Homo sapien
cttcaaggaagtgcagtagagtatg

SEQ ID NO: 1125759 - DNA, 25 bp, Homo sapien
aggacagccataacctcttcatatt

SEQ ID NO: 1125760 - DNA, 25 bp, Homo sapien
aaggacagccataacctcttcatat

SEQ ID NO: 1125761 - DNA, 25 bp, Homo sapien
ggacagccataacctcttcatattt

SEQ ID NO: 1125762 - DNA, 25 bp, Homo sapien
agccattgtttgccttgtcaactta

SEQ ID NO: 1125763 - DNA, 25 bp, Homo sapien
gccattgtttgccttgtcaacttaa

SEQ ID NO: 1125764 - DNA, 25 bp, Homo sapien
ccattgtttgccttgtcaacttaac

SEQ ID NO: 1125765 - DNA, 25 bp, Homo sapien
cattgtttgccttgtcaacttaacc

SEQ ID NO: 1125766 - DNA, 25 bp, Homo sapien
cccatcttctgctggctgttcctct

SEQ ID NO: 1125767 - DNA, 25 bp, Homo sapien
tgcccatcttctgctggctgttcct

SEQ ID NO: 1125768 - DNA, 25 bp, Homo sapien
ctgttcctctgcagcacagaaggac

SEQ ID NO: 1125769 - DNA, 25 bp, Homo sapien
cctgcccatcttctgctggctgttc

SEQ ID NO: 1125770 - DNA, 25 bp, Homo sapien
gctttgactgtggtaatagcacagg

SEQ ID NO: 1125771 - DNA, 25 bp, Homo sapien
ctgttgctttgactgtggtaatagc

SEQ ID NO: 1125772 - DNA, 25 bp, Homo sapien
gttgctttgactgtggtaatagcac

SEQ ID NO: 1125773 - DNA, 25 bp, Homo sapien
tttgactgtggtaatagcacaggtg

SEQ ID NO: 1125774 - DNA, 25 bp, Homo sapien
tctcttcttgctgtatgctttgtag

SEQ ID NO: 1125775 - DNA, 25 bp, Homo sapien
caggcttggcctcatgaacttccaa

SEQ ID NO: 1125776 - DNA, 25 bp, Homo sapien
acaggcttggcctcatgaacttcca

SEQ ID NO: 1125777 - DNA, 25 bp, Homo sapien
gcacaggcttggcctcatgaacttc

SEQ ID NO: 1125778 - DNA, 25 bp, Homo sapien
ctggcacaggcttggcctcatgaac

SEQ ID NO: 1125779 - DNA, 25 bp, Homo sapien
ccctctattgctgtatcccactgtg

SEQ ID NO: 1125780 - DNA, 25 bp, Homo sapien
gctgtatcccactgtgggtgatttt

SEQ ID NO: 1125781 - DNA, 25 bp, Homo sapien
ctattgctgtatcccactgtgggtg

SEQ ID NO: 1125782 - DNA, 25 bp, Homo sapien
ctctattgctgtatcccactgtggg

SEQ ID NO: 1125783 - DNA, 25 bp, Homo sapien
aacatcagttctgtactgtttctgg

SEQ ID NO: 1125784 - DNA, 25 bp, Homo sapien
ggatttattatcatttgcagatgaa

SEQ ID NO: 1125785 - DNA, 25 bp, Homo sapien
catttttcaggttgtaccaaggcac

SEQ ID NO: 1125786 - DNA, 25 bp, Homo sapien
ctccctcaacatcagttctgtactg

SEQ ID NO: 1125787 - DNA, 25 bp, Homo sapien
ggcaataattgaaagtgggaagaga

SEQ ID NO: 1125788 - DNA, 25 bp, Homo sapien
cacaaaggagttgaacttccctttg

SEQ ID NO: 1125789 - DNA, 25 bp, Homo sapien
agtcacaaaggagttgaacttccct

SEQ ID NO: 1125790 - DNA, 25 bp, Homo sapien
aataattgaaagtgggaagagatct

SEQ ID NO: 1125791 - DNA, 25 bp, Homo sapien
tgtgcaacatctgctctacgttgtg

SEQ ID NO: 1125792 - DNA, 25 bp, Homo sapien
ggagctcgccgtgtgttcatcgtct

SEQ ID NO: 1125793 - DNA, 25 bp, Homo sapien
gagtcgtgattgtacttggagctgg

SEQ ID NO: 1125794 - DNA, 25 bp, Homo sapien
tcagaaaaggctttgttaatataag

SEQ ID NO: 1125795 - DNA, 25 bp, Homo sapien
gaaatattgcaaaccgttaacacag

SEQ ID NO: 1125796 - DNA, 25 bp, Homo sapien
ttcatcattcaggaatgtgcgcctg

SEQ ID NO: 1125797 - DNA, 25 bp, Homo sapien
gattccagtctgttatgacctaaac

SEQ ID NO: 1125798 - DNA, 25 bp, Homo sapien
tcctggaaaactgcaagatgcaatt

SEQ ID NO: 1125799 - DNA, 25 bp, Homo sapien
tttgctttttaacccatcgcgtaca

SEQ ID NO: 1125800 - DNA, 25 bp, Homo sapien
catatgtccacgaagatagctttgc

SEQ ID NO: 1125801 - DNA, 25 bp, Homo sapien
cagtatttagttctgtcaatagagg

SEQ ID NO: 1125802 - DNA, 25 bp, Homo sapien
cccatcgcgtacacagttttcagta

SEQ ID NO: 1125803 - DNA, 25 bp, Homo sapien
tgccaatatccttggactaactcca

SEQ ID NO: 1125804 - DNA, 25 bp, Homo sapien
tccttggactaactccattcacttt

SEQ ID NO: 1125805 - DNA, 25 bp, Homo sapien
tggactaactccattcactttcaac

SEQ ID NO: 1125806 - DNA, 25 bp, Homo sapien
gactaactccattcactttcaacat

SEQ ID NO: 1125807 - DNA, 25 bp, Homo sapien
acagtctttggtcatgattcttgag

SEQ ID NO: 1125808 - DNA, 25 bp, Homo sapien
tctctgcttcacagtctttggtcat

SEQ ID NO: 1125809 - DNA, 25 bp, Homo sapien
cagtctttggtcatgattcttgaga

SEQ ID NO: 1125810 - DNA, 25 bp, Homo sapien
taaacagtcgtagtcattggaaata

SEQ ID NO: 1125811 - DNA, 25 bp, Homo sapien
tgtctttgtagtaaacagtcgtagt

SEQ ID NO: 1125812 - DNA, 25 bp, Homo sapien
tgtagtaaacagtcgtagtcattgg

SEQ ID NO: 1125813 - DNA, 25 bp, Homo sapien
tacttccaatttaaattgagaataa

SEQ ID NO: 1125814 - DNA, 25 bp, Homo sapien
tttttgttcttagcattagaatctt

SEQ ID NO: 1125815 - DNA, 25 bp, Homo sapien
gtttttgttcttagcattagaatct

SEQ ID NO: 1125816 - DNA, 25 bp, Homo sapien
ggtttttgttcttagcattagaatc

SEQ ID NO: 1125817 - DNA, 25 bp, Homo sapien
tgggtgcttgccaaccttagggtat

SEQ ID NO: 1125818 - DNA, 25 bp, Homo sapien
tctgggtgcttgccaaccttagggt

SEQ ID NO: 1125819 - DNA, 25 bp, Homo sapien
ctgggtgcttgccaaccttagggta

SEQ ID NO: 1125820 - DNA, 25 bp, Homo sapien
tgcttgccaaccttagggtattttg

SEQ ID NO: 1125821 - DNA, 25 bp, Homo sapien
aatcaggaactagattaggcgttca

SEQ ID NO: 1125822 - DNA, 25 bp, Homo sapien
aatatctgggtggatttgtcagaaa

SEQ ID NO: 1125823 - DNA, 25 bp, Homo sapien
tgtcagaaatcaggaactagattag

SEQ ID NO: 1125824 - DNA, 25 bp, Homo sapien
tatctgggtggatttgtcagaaatc

SEQ ID NO: 1125825 - DNA, 25 bp, Homo sapien
cagtgtgatattgactgtaggttta

SEQ ID NO: 1125826 - DNA, 25 bp, Homo sapien
tatgtaggaaatgaaagcggaactg

SEQ ID NO: 1125827 - DNA, 25 bp, Homo sapien
atcaggagtagaagtaaaatctttc

SEQ ID NO: 1125828 - DNA, 25 bp, Homo sapien
gcggaactggaaaatatcaggagta

SEQ ID NO: 1125829 - DNA, 25 bp, Homo sapien
aactgctccgtaggtagaatatgac

SEQ ID NO: 1125830 - DNA, 25 bp, Homo sapien
gcataagatgtgttgttgtgaatta

SEQ ID NO: 1125831 - DNA, 25 bp, Homo sapien
ggctgccagaacaactgctccgtag

SEQ ID NO: 1125832 - DNA, 25 bp, Homo sapien
tgacagtttggcttggttatttgtt

SEQ ID NO: 1125833 - DNA, 25 bp, Homo sapien
gatgtattttgatcagcatttgcag

SEQ ID NO: 1125834 - DNA, 25 bp, Homo sapien
gcagattatgtaagattattcctat

SEQ ID NO: 1125835 - DNA, 25 bp, Homo sapien
caaatctaaccattatcataaaagt

SEQ ID NO: 1125836 - DNA, 25 bp, Homo sapien
gctgttcgaattacacgatgtttta

SEQ ID NO: 1125837 - DNA, 25 bp, Homo sapien
ttggatgcacaaatagcaatttctt

SEQ ID NO: 1125838 - DNA, 25 bp, Homo sapien
tagcaatttcttcattcaggcattc

SEQ ID NO: 1125839 - DNA, 25 bp, Homo sapien
cattcaggcattcaaaaggtaacga

SEQ ID NO: 1125840 - DNA, 25 bp, Homo sapien
cattcaaaaggtaacgagacattca

SEQ ID NO: 1125841 - DNA, 25 bp, Homo sapien
atacttggtcaccatacctcacaag

SEQ ID NO: 1125842 - DNA, 25 bp, Homo sapien
ttctaggctagccaaatatacttgg

SEQ ID NO: 1125843 - DNA, 25 bp, Homo sapien
tcaatgtaaaccctggttttctggc

SEQ ID NO: 1125844 - DNA, 25 bp, Homo sapien
tgtaaaccctggttttctggctgta

SEQ ID NO: 1125845 - DNA, 25 bp, Homo sapien
gtcctgaagggtatggatctgggct

SEQ ID NO: 1125846 - DNA, 25 bp, Homo sapien
tttggtcctgaagggtatggatctg

SEQ ID NO: 1125847 - DNA, 25 bp, Homo sapien
agctttggtcctgaagggtatggat

SEQ ID NO: 1125848 - DNA, 25 bp, Homo sapien
ggtcctgaagggtatggatctgggc

SEQ ID NO: 1125849 - DNA, 25 bp, Homo sapien
attgtatgtgtgctgctactggaaa

SEQ ID NO: 1125850 - DNA, 25 bp, Homo sapien
cccagcttcctggttattatcatcc

SEQ ID NO: 1125851 - DNA, 25 bp, Homo sapien
aaataattttgagcatcagttgtgt

SEQ ID NO: 1125852 - DNA, 25 bp, Homo sapien
tgtgtgaattgtgttctgttctaaa

SEQ ID NO: 1125853 - DNA, 25 bp, Homo sapien
tgttttgaagcacccatgtgcaaaa

SEQ ID NO: 1125854 - DNA, 25 bp, Homo sapien
gatagtcctgggtgtaagatactaa

SEQ ID NO: 1125855 - DNA, 25 bp, Homo sapien
cttacgggagatgactggagcctca

SEQ ID NO: 1125856 - DNA, 25 bp, Homo sapien
tttgtacgtagatgggatagtcctg

SEQ ID NO: 1125857 - DNA, 25 bp, Homo sapien
cactggtcttttatgcttacgggag

SEQ ID NO: 1125858 - DNA, 25 bp, Homo sapien
ctccttcagcaccttgttccctcat

SEQ ID NO: 1125859 - DNA, 25 bp, Homo sapien
cttggcgtaattttaggacttcagc

SEQ ID NO: 1125860 - DNA, 25 bp, Homo sapien
ttggcgtaattttaggacttcagca

SEQ ID NO: 1125861 - DNA, 25 bp, Homo sapien
gcagtatgttcaagaagtatccatg

SEQ ID NO: 1125862 - DNA, 25 bp, Homo sapien
ttgcagtatgttcaagaagtatcca

SEQ ID NO: 1125863 - DNA, 25 bp, Homo sapien
gaagtatccatgatttcttccctgt

SEQ ID NO: 1125864 - DNA, 25 bp, Homo sapien
tttcttccctgtggcgtcaccaggt

SEQ ID NO: 1125865 - DNA, 25 bp, Homo sapien
gcaagggatgtggacttctgtagaa

SEQ ID NO: 1125866 - DNA, 25 bp, Homo sapien
aaaggcaactgcaagggatgtggac

SEQ ID NO: 1125867 - DNA, 25 bp, Homo sapien
gtctgttgtgctgcaaagacagctg

SEQ ID NO: 1125868 - DNA, 25 bp, Homo sapien
tgctgtctgttgtgctgcaaagaca

SEQ ID NO: 1125869 - DNA, 25 bp, Homo sapien
gtgaaccatggtatcaccctgatga

SEQ ID NO: 1125870 - DNA, 25 bp, Homo sapien
ggtgaaccatggtatcaccctgatg

SEQ ID NO: 1125871 - DNA, 25 bp, Homo sapien
gataccaccacctgatatccagaga

SEQ ID NO: 1125872 - DNA, 25 bp, Homo sapien
gagaatactttctcagtcctgactc

SEQ ID NO: 1125873 - DNA, 25 bp, Homo sapien
ttatccttttctgttcaacagcgtt

SEQ ID NO: 1125874 - DNA, 25 bp, Homo sapien
ccttttctgttcaacagcgttggct

SEQ ID NO: 1125875 - DNA, 25 bp, Homo sapien
tccttttctgttcaacagcgttggc

SEQ ID NO: 1125876 - DNA, 25 bp, Homo sapien
tatccttttctgttcaacagcgttg

SEQ ID NO: 1125877 - DNA, 25 bp, Homo sapien
gttaatctggtaatatgcatccctc

SEQ ID NO: 1125878 - DNA, 25 bp, Homo sapien
ggtaatatgcatccctcacatgttt

SEQ ID NO: 1125879 - DNA, 25 bp, Homo sapien
tggataactcaggttaatctggtaa

SEQ ID NO: 1125880 - DNA, 25 bp, Homo sapien
tcacattggataactcaggttaatc

SEQ ID NO: 1125881 - DNA, 25 bp, Homo sapien
tcatttgaactagttcagtcaacag

SEQ ID NO: 1125882 - DNA, 25 bp, Homo sapien
tggacagtgaacagagagacctctt

SEQ ID NO: 1125883 - DNA, 25 bp, Homo sapien
tgctatgtgtatttagatagaagct

SEQ ID NO: 1125884 - DNA, 25 bp, Homo sapien
gggtgattgttatgctatgtgtatt

SEQ ID NO: 1125885 - DNA, 25 bp, Homo sapien
ttttaaagataagactctgttgtaa

SEQ ID NO: 1125886 - DNA, 25 bp, Homo sapien
gcttttcattgaagcatatgtatat

SEQ ID NO: 1125887 - DNA, 25 bp, Homo sapien
ctcagggttgccgagctgtcagctg

SEQ ID NO: 1125888 - DNA, 25 bp, Homo sapien
cagggttgccgagctgtcagctgca

SEQ ID NO: 1125889 - DNA, 25 bp, Homo sapien
ctgcttttcattgaagcatatgtat

SEQ ID NO: 1125890 - DNA, 25 bp, Homo sapien
gcagctcaggatgcatgacctttca

SEQ ID NO: 1125891 - DNA, 25 bp, Homo sapien
gcctcatgatgcttggtttagtaca

SEQ ID NO: 1125892 - DNA, 25 bp, Homo sapien
tcagcctggctactatcatgaaaga

SEQ ID NO: 1125893 - DNA, 25 bp, Homo sapien
tatcatcctggaactatattcagcc

SEQ ID NO: 1125894 - DNA, 25 bp, Homo sapien
gaggttggtgttctatagcacagta

SEQ ID NO: 1125895 - DNA, 25 bp, Homo sapien
ttggtgttctatagcacagtaaggt

SEQ ID NO: 1125896 - DNA, 25 bp, Homo sapien
agtgttgtcacaggagatggagact

SEQ ID NO: 1125897 - DNA, 25 bp, Homo sapien
aaataacgtgagaaaatttggagtg

SEQ ID NO: 1125898 - DNA, 25 bp, Homo sapien
aattagagctaacctgtgcctgtta

SEQ ID NO: 1125899 - DNA, 25 bp, Homo sapien
tattacatggcatgtctggtcggca

SEQ ID NO: 1125900 - DNA, 25 bp, Homo sapien
ttgtctaggctagcaggcctgcgtt

SEQ ID NO: 1125901 - DNA, 25 bp, Homo sapien
taatgtgtaccatggttgctgatac

SEQ ID NO: 1125902 - DNA, 25 bp, Homo sapien
ttcagcttcttgtgaaagcagctct

SEQ ID NO: 1125903 - DNA, 25 bp, Homo sapien
tctgcttagtatgtttgctccctct

SEQ ID NO: 1125904 - DNA, 25 bp, Homo sapien
gcagctacgtgaattgtgtttcgat

SEQ ID NO: 1125905 - DNA, 25 bp, Homo sapien
cattgttctgatgtatttcgaaggc

SEQ ID NO: 1125906 - DNA, 25 bp, Homo sapien
tgagaatgtcccaaagcctatggaa

SEQ ID NO: 1125907 - DNA, 25 bp, Homo sapien
acttgttgtgtaagttgtcttatac

SEQ ID NO: 1125908 - DNA, 25 bp, Homo sapien
gaagaagcagacacatacaaggcag

SEQ ID NO: 1125909 - DNA, 25 bp, Homo sapien
tcttatactgtttgattctcaaacc

SEQ ID NO: 1125910 - DNA, 25 bp, Homo sapien
gccagtaaagaagctgtcttgtgga

SEQ ID NO: 1125911 - DNA, 25 bp, Homo sapien
aaagaagctgtcttgtggaagccat

SEQ ID NO: 1125912 - DNA, 25 bp, Homo sapien
ctctaactcattaacagaaggccag

SEQ ID NO: 1125913 - DNA, 25 bp, Homo sapien
actcattaacagaaggccagtaaag

SEQ ID NO: 1125914 - DNA, 25 bp, Homo sapien
gctgtttgagcaggaataaaatgaa

SEQ ID NO: 1125915 - DNA, 25 bp, Homo sapien
tctttttcattctgggctgtttgag

SEQ ID NO: 1125916 - DNA, 25 bp, Homo sapien
tttttcattctgggctgtttgagca

SEQ ID NO: 1125917 - DNA, 25 bp, Homo sapien
ctttttcattctgggctgtttgagc

SEQ ID NO: 1125918 - DNA, 25 bp, Homo sapien
gcctaaggagctgggcattgatcct

SEQ ID NO: 1125919 - DNA, 25 bp, Homo sapien
tccaagatctgccaatatctctggg

SEQ ID NO: 1125920 - DNA, 25 bp, Homo sapien
agatctgccaatatctctgggccct

SEQ ID NO: 1125921 - DNA, 25 bp, Homo sapien
gtcagccctctgagaatagcctaag

SEQ ID NO: 1125922 - DNA, 25 bp, Homo sapien
gcttcgtttgtcgagtcacagattc

SEQ ID NO: 1125923 - DNA, 25 bp, Homo sapien
cccagggcttcgtttgtcgagtcac

SEQ ID NO: 1125924 - DNA, 25 bp, Homo sapien
tttgtcgagtcacagattctccatc

SEQ ID NO: 1125925 - DNA, 25 bp, Homo sapien
tcccagggcttcgtttgtcgagtca

SEQ ID NO: 1125926 - DNA, 25 bp, Homo sapien
tggagaatggcttgacagcgtgcat

SEQ ID NO: 1125927 - DNA, 25 bp, Homo sapien
gataatagcgtttctttctggagaa

SEQ ID NO: 1125928 - DNA, 25 bp, Homo sapien
gacagcgtgcatggttcctaatttt

SEQ ID NO: 1125929 - DNA, 25 bp, Homo sapien
cagtgctgataatagcgtttctttc

SEQ ID NO: 1125930 - DNA, 25 bp, Homo sapien
ctaccagtaacaggaataactggga

SEQ ID NO: 1125931 - DNA, 25 bp, Homo sapien
tattgaccttattacttagttgcac

SEQ ID NO: 1125932 - DNA, 25 bp, Homo sapien
tagttgcactggtattatatctaat

SEQ ID NO: 1125933 - DNA, 25 bp, Homo sapien
atccttccagcactattgaccttat

SEQ ID NO: 1125934 - DNA, 25 bp, Homo sapien
ctagtccagcaagttaggataggtg

SEQ ID NO: 1125935 - DNA, 25 bp, Homo sapien
caagttaggataggtggtggccaaa

SEQ ID NO: 1125936 - DNA, 25 bp, Homo sapien
cactgcaggttgttagcaggtggtg

SEQ ID NO: 1125937 - DNA, 25 bp, Homo sapien
aaagatggataccagcactgcaggt

SEQ ID NO: 1125938 - DNA, 25 bp, Homo sapien
gtggctcccgtggaagatgaacttc

SEQ ID NO: 1125939 - DNA, 25 bp, Homo sapien
atggctgtggctcccgtggaagatg

SEQ ID NO: 1125940 - DNA, 25 bp, Homo sapien
ggcttagttgtgagagacactcgcc

SEQ ID NO: 1125941 - DNA, 25 bp, Homo sapien
ttcctggcttagttgtgagagacac

SEQ ID NO: 1125942 - DNA, 25 bp, Homo sapien
gcctgaagtagttatcatatgccac

SEQ ID NO: 1125943 - DNA, 25 bp, Homo sapien
ccaagttacatgttagaaggaatcc

SEQ ID NO: 1125944 - DNA, 25 bp, Homo sapien
tatgccactaaagcacagatcagca

SEQ ID NO: 1125945 - DNA, 25 bp, Homo sapien
tcagcactgagaccaattcatgaaa

SEQ ID NO: 1125946 - DNA, 25 bp, Homo sapien
tgaattctaagcaattgttgcatgc

SEQ ID NO: 1125947 - DNA, 25 bp, Homo sapien
tgttgcatgctggtccctggacaat

SEQ ID NO: 1125948 - DNA, 25 bp, Homo sapien
tgaaaggagttgactttccttgaat

SEQ ID NO: 1125949 - DNA, 25 bp, Homo sapien
ccctggacaataatataaagctggt

SEQ ID NO: 1125950 - DNA, 25 bp, Homo sapien
attggcaagttgaagttacagctgc

SEQ ID NO: 1125951 - DNA, 25 bp, Homo sapien
ttggcaagttgaagttacagctgca

SEQ ID NO: 1125952 - DNA, 25 bp, Homo sapien
cgcccttctatttgagctacccttg

SEQ ID NO: 1125953 - DNA, 25 bp, Homo sapien
tccttaagtactgctgaaccagaaa

SEQ ID NO: 1125954 - DNA, 25 bp, Homo sapien
taaatctctcagcagtccttaagta

SEQ ID NO: 1125955 - DNA, 25 bp, Homo sapien
aagaaaagtcctgaatcagtcgccc

SEQ ID NO: 1125956 - DNA, 25 bp, Homo sapien
acttatatcacctccactaagggaa

SEQ ID NO: 1125957 - DNA, 25 bp, Homo sapien
taagggaataggtcagcacactgca

SEQ ID NO: 1125958 - DNA, 25 bp, Homo sapien
gcacactgcaactgatttcccattt

SEQ ID NO: 1125959 - DNA, 25 bp, Homo sapien
gctgattttgtgatgccacttatat

SEQ ID NO: 1125960 - DNA, 25 bp, Homo sapien
gggaatttgagcaaccttggtaggc

SEQ ID NO: 1125961 - DNA, 25 bp, Homo sapien
ttttggttcactcgagaggatgcgg

SEQ ID NO: 1125962 - DNA, 25 bp, Homo sapien
ttgctggcgccagtaaacaggttgg

SEQ ID NO: 1125963 - DNA, 25 bp, Homo sapien
tctgcctgccagactagtgggctga

SEQ ID NO: 1125964 - DNA, 25 bp, Homo sapien
tctctagggatctaccagttggtga

SEQ ID NO: 1125965 - DNA, 25 bp, Homo sapien
aaaatgcaatatgtctactggtggc

SEQ ID NO: 1125966 - DNA, 25 bp, Homo sapien
tctctggaaagttggcctcatgctg

SEQ ID NO: 1125967 - DNA, 25 bp, Homo sapien
gaagctacatactctagttcctagg

SEQ ID NO: 1125968 - DNA, 25 bp, Homo sapien
cagggaacgggtggagcccttctca

SEQ ID NO: 1125969 - DNA, 25 bp, Homo sapien
gctcaaagaacattgtcgtctgcag

SEQ ID NO: 1125970 - DNA, 25 bp, Homo sapien
ttcgacattctatcaccagcaagag

SEQ ID NO: 1125971 - DNA, 25 bp, Homo sapien
gcaagagaatatgtaactcctgttc

SEQ ID NO: 1125972 - DNA, 25 bp, Homo sapien
accccattgtgtctgatcccacaat

SEQ ID NO: 1125973 - DNA, 25 bp, Homo sapien
agtgaagggtactccacacacaccc

SEQ ID NO: 1125974 - DNA, 25 bp, Homo sapien
ttactcccagggtatctatactcac

SEQ ID NO: 1125975 - DNA, 25 bp, Homo sapien
attcccagtgaagggtactccacac

SEQ ID NO: 1125976 - DNA, 25 bp, Homo sapien
gacaccgaggtgtcttgaaggaagc

SEQ ID NO: 1125977 - DNA, 25 bp, Homo sapien
caagagcagtctgaaccctggagag

SEQ ID NO: 1125978 - DNA, 25 bp, Homo sapien
cctttctcaggcacgaagtgcgtgt

SEQ ID NO: 1125979 - DNA, 25 bp, Homo sapien
tcatgcttccccacctagggtttcg

SEQ ID NO: 1125980 - DNA, 25 bp, Homo sapien
cacgggctacgcacgaagactgaat

SEQ ID NO: 1125981 - DNA, 25 bp, Homo sapien
tgcgtggtggtcgttggttgtgcac

SEQ ID NO: 1125982 - DNA, 25 bp, Homo sapien
cgcacgaagactgaattcctgagaa

SEQ ID NO: 1125983 - DNA, 25 bp, Homo sapien
tcgttggttgtgcacgggctacgca

SEQ ID NO: 1125984 - DNA, 25 bp, Homo sapien
aagattccactagcgcggccaaaca

SEQ ID NO: 1125985 - DNA, 25 bp, Homo sapien
cactagcgcggccaaacactaagac

SEQ ID NO: 1125986 - DNA, 25 bp, Homo sapien
agaagattccactagcgcggccaaa

SEQ ID NO: 1125987 - DNA, 25 bp, Homo sapien
ccagaagattccactagcgcggcca

SEQ ID NO: 1125988 - DNA, 25 bp, Homo sapien
cgcgaatcccgagcccggggcggtg

SEQ ID NO: 1125989 - DNA, 25 bp, Homo sapien
agttgggaacgactgaaaggccttg

SEQ ID NO: 1125990 - DNA, 25 bp, Homo sapien
gagcgtcgcgagtgaggcgccgaag

SEQ ID NO: 1125991 - DNA, 25 bp, Homo sapien
tgagcagtttgggagcgtcgcgagt

SEQ ID NO: 1125992 - DNA, 25 bp, Homo sapien
cagaaagggcgtgtccgtgggcgaa

SEQ ID NO: 1125993 - DNA, 25 bp, Homo sapien
tggaaaatgggttcgcgcagggggc

SEQ ID NO: 1125994 - DNA, 25 bp, Homo sapien
cggaaaggctgtgcgctgcgcctct

SEQ ID NO: 1125995 - DNA, 25 bp, Homo sapien
tgtgcgctgcgcctctggtgaccag

SEQ ID NO: 1125996 - DNA, 25 bp, Homo sapien
gcggttcggcgttcccagtccgctc

SEQ ID NO: 1125997 - DNA, 25 bp, Homo sapien
aacgcccgtggttgccaaggtagca

SEQ ID NO: 1125998 - DNA, 25 bp, Homo sapien
cagctggccactaaacgcccgtggt

SEQ ID NO: 1125999 - DNA, 25 bp, Homo sapien
gccaaggtagcactttcttgttctt

SEQ ID NO: 1126000 - DNA, 25 bp, Homo sapien
cactaaacgcccgtggttgccaagg

SEQ ID NO: 1126001 - DNA, 25 bp, Homo sapien
acgcgtagtcgaggagagtaccagc

SEQ ID NO: 1126002 - DNA, 25 bp, Homo sapien
tacgcgtagtcgaggagagtaccag

SEQ ID NO: 1126003 - DNA, 25 bp, Homo sapien
gaatacgcgtagtcgaggagagtac

SEQ ID NO: 1126004 - DNA, 25 bp, Homo sapien
ttaagaatacgcgtagtcgaggaga

SEQ ID NO: 1126005 - DNA, 25 bp, Homo sapien
cagaggaaagcactgggagagcacc

SEQ ID NO: 1126006 - DNA, 25 bp, Homo sapien
taccacctagagtggactggccgag

SEQ ID NO: 1126007 - DNA, 25 bp, Homo sapien
taactattcacgtctcttacagggt

SEQ ID NO: 1126008 - DNA, 25 bp, Homo sapien
gaaggttacttgtcactcccacttg

SEQ ID NO: 1126009 - DNA, 25 bp, Homo sapien
gcactgctacttgggtagaaagaaa

SEQ ID NO: 1126010 - DNA, 25 bp, Homo sapien
ctgctacttgggtagaaagaaagca

SEQ ID NO: 1126011 - DNA, 25 bp, Homo sapien
ctggtggaacattgggtaggtaggg

SEQ ID NO: 1126012 - DNA, 25 bp, Homo sapien
tggcactgctacttgggtagaaaga

SEQ ID NO: 1126013 - DNA, 25 bp, Homo sapien
ggttgagctgtccattcgtccaggt

SEQ ID NO: 1126014 - DNA, 25 bp, Homo sapien
ggtgttctcgtaagtcaggctgccc

SEQ ID NO: 1126015 - DNA, 25 bp, Homo sapien
gagcgtcagttctgctgcgagtgct

SEQ ID NO: 1126016 - DNA, 25 bp, Homo sapien
gctttggttagagctcagagcgtca

SEQ ID NO: 1126017 - DNA, 25 bp, Homo sapien
ggaaatccgacagcttaaggaggct

SEQ ID NO: 1126018 - DNA, 25 bp, Homo sapien
tctaaatattcaaaagcgaagtgta

SEQ ID NO: 1126019 - DNA, 25 bp, Homo sapien
tgtaagttgatcaacaaacgccctg

SEQ ID NO: 1126020 - DNA, 25 bp, Homo sapien
taagcctccgctgatattgttccgc

SEQ ID NO: 1126021 - DNA, 25 bp, Homo sapien
taacccggcactcggagagaagaag

SEQ ID NO: 1126022 - DNA, 25 bp, Homo sapien
ctgtaacccggcactcggagagaag

SEQ ID NO: 1126023 - DNA, 25 bp, Homo sapien
ccggcactcggagagaagaagcagc

SEQ ID NO: 1126024 - DNA, 25 bp, Homo sapien
acccggcactcggagagaagaagca

SEQ ID NO: 1126025 - DNA, 25 bp, Homo sapien
gctgaaggctatcgcctgggactcc

SEQ ID NO: 1126026 - DNA, 25 bp, Homo sapien
tcgcatcagctgaaggctatcgcct

SEQ ID NO: 1126027 - DNA, 25 bp, Homo sapien
gactcctcggaagcatgagcaagcc

SEQ ID NO: 1126028 - DNA, 25 bp, Homo sapien
cctttctggaagctcgcatcagctg

SEQ ID NO: 1126029 - DNA, 25 bp, Homo sapien
tctcggctgtcagtgttttccgttt

SEQ ID NO: 1126030 - DNA, 25 bp, Homo sapien
tcggctgtcagtgttttccgttttc

SEQ ID NO: 1126031 - DNA, 25 bp, Homo sapien
ctctcggctgtcagtgttttccgtt

SEQ ID NO: 1126032 - DNA, 25 bp, Homo sapien
cctctcggctgtcagtgttttccgt

SEQ ID NO: 1126033 - DNA, 25 bp, Homo sapien
taagagactatgaagcttgcacgtc

SEQ ID NO: 1126034 - DNA, 25 bp, Homo sapien
gatccactactggatggttaacagc

SEQ ID NO: 1126035 - DNA, 25 bp, Homo sapien
catagtcccacaaggcattggtcct

SEQ ID NO: 1126036 - DNA, 25 bp, Homo sapien
caccattagcatgtttgggatccac

SEQ ID NO: 1126037 - DNA, 25 bp, Homo sapien
agcttgacacgaatgacaacaaagg

SEQ ID NO: 1126038 - DNA, 25 bp, Homo sapien
tgcagggggcaatagcttgacacga

SEQ ID NO: 1126039 - DNA, 25 bp, Homo sapien
ccctggaatgttgtgtaggttggaa

SEQ ID NO: 1126040 - DNA, 25 bp, Homo sapien
acaaaggctgctgaactattagact

SEQ ID NO: 1126041 - DNA, 25 bp, Homo sapien
cggtccgagccagcgctggcgggct

SEQ ID NO: 1126042 - DNA, 25 bp, Homo sapien
cctttcctcgatctgaaatccaagg

SEQ ID NO: 1126043 - DNA, 25 bp, Homo sapien
tgattttttcgctctcctactctcc

SEQ ID NO: 1126044 - DNA, 25 bp, Homo sapien
aggtggtggttgattttttcgctct

SEQ ID NO: 1126045 - DNA, 25 bp, Homo sapien
gcgtccgcaccaaccgcgcctcgcg

SEQ ID NO: 1126046 - DNA, 25 bp, Homo sapien
gggagagcgatgactcccacgcccc

SEQ ID NO: 1126047 - DNA, 25 bp, Homo sapien
ctgcggggagagcgatgactcccac

SEQ ID NO: 1126048 - DNA, 25 bp, Homo sapien
ccccgcgtccgcaccaaccgcgcct

SEQ ID NO: 1126049 - DNA, 25 bp, Homo sapien
gggccgtcttgctccggcctccagc

SEQ ID NO: 1126050 - DNA, 25 bp, Homo sapien
ccgtccttgcgagggcgttagggag

SEQ ID NO: 1126051 - DNA, 25 bp, Homo sapien
gcccgacgggcagccgtccttgcga

SEQ ID NO: 1126052 - DNA, 25 bp, Homo sapien
agtgagccgtggtctctggcccaaa

SEQ ID NO: 1126053 - DNA, 25 bp, Homo sapien
tccggcgctcttctccgggcgtatt

SEQ ID NO: 1126054 - DNA, 25 bp, Homo sapien
cggcccggacctcgggcagggcagg

SEQ ID NO: 1126055 - DNA, 25 bp, Homo sapien
tccgggcgtattgggctcagcccgc

SEQ ID NO: 1126056 - DNA, 25 bp, Homo sapien
tcttctccgggcgtattgggctcag

SEQ ID NO: 1126057 - DNA, 25 bp, Homo sapien
tgttttctgttgcttttagcacgcc

SEQ ID NO: 1126058 - DNA, 25 bp, Homo sapien
agagtggggtttggcgctttgtttg

SEQ ID NO: 1126059 - DNA, 25 bp, Homo sapien
ttttctgttgcttttagcacgcccc

SEQ ID NO: 1126060 - DNA, 25 bp, Homo sapien
tgttgcttttagcacgcccccagcg

SEQ ID NO: 1126061 - DNA, 25 bp, Homo sapien
agcagttcaaagattctgccatcca

SEQ ID NO: 1126062 - DNA, 25 bp, Homo sapien
gcagttcaaagattctgccatccac

SEQ ID NO: 1126063 - DNA, 25 bp, Homo sapien
ttagcagttcaaagattctgccatc

SEQ ID NO: 1126064 - DNA, 25 bp, Homo sapien
tagcagttcaaagattctgccatcc

SEQ ID NO: 1126065 - DNA, 25 bp, Homo sapien
ggcgatttcattatttagtgattca

SEQ ID NO: 1126066 - DNA, 25 bp, Homo sapien
tatttagtgattcattacttggttt

SEQ ID NO: 1126067 - DNA, 25 bp, Homo sapien
tagtgattcattacttggtttcatt

SEQ ID NO: 1126068 - DNA, 25 bp, Homo sapien
tttagtgattcattacttggtttca

SEQ ID NO: 1126069 - DNA, 25 bp, Homo sapien
tcagagtgtcagcaggatgaacaat

SEQ ID NO: 1126070 - DNA, 25 bp, Homo sapien
ctgtcagagtgtcagcaggatgaac

SEQ ID NO: 1126071 - DNA, 25 bp, Homo sapien
caggatgaacaatgaaaaggatgtt

SEQ ID NO: 1126072 - DNA, 25 bp, Homo sapien
gatgctgtcagagtgtcagcaggat

SEQ ID NO: 1126073 - DNA, 25 bp, Homo sapien
ttgccagaagggagtaaaatgctgc

SEQ ID NO: 1126074 - DNA, 25 bp, Homo sapien
acttgtgaaagcaatgaaatctggg

SEQ ID NO: 1126075 - DNA, 25 bp, Homo sapien
tgccagaagggagtaaaatgctgca

SEQ ID NO: 1126076 - DNA, 25 bp, Homo sapien
ctgtgtggtttgtcttgttgggtga

SEQ ID NO: 1126077 - DNA, 25 bp, Homo sapien
tgtgtggtttgtcttgttgggtgac

SEQ ID NO: 1126078 - DNA, 25 bp, Homo sapien
acgggcattgcacagggcgtcttca

SEQ ID NO: 1126079 - DNA, 25 bp, Homo sapien
cgctgtaatgctgatgcagacgggc

SEQ ID NO: 1126080 - DNA, 25 bp, Homo sapien
taaaccataggacacattagcaagg

SEQ ID NO: 1126081 - DNA, 25 bp, Homo sapien
caaaatccgagacaaccttactggg

SEQ ID NO: 1126082 - DNA, 25 bp, Homo sapien
catgagagccatatcttcttttaaa

SEQ ID NO: 1126083 - DNA, 25 bp, Homo sapien
atttgcttattcatgagagccatat

SEQ ID NO: 1126084 - DNA, 25 bp, Homo sapien
cttattcatgagagccatatcttct

SEQ ID NO: 1126085 - DNA, 25 bp, Homo sapien
tcatgagagccatatcttcttttaa

SEQ ID NO: 1126086 - DNA, 25 bp, Homo sapien
tgtgccaacccgtaccacatctgtt

SEQ ID NO: 1126087 - DNA, 25 bp, Homo sapien
ttacatctgctacgagcctattggg

SEQ ID NO: 1126088 - DNA, 25 bp, Homo sapien
gcaccttctaacttaaatttactca

SEQ ID NO: 1126089 - DNA, 25 bp, Homo sapien
gctacgagcctattgggtgccttct

SEQ ID NO: 1126090 - DNA, 25 bp, Homo sapien
acaccaaggcttaaatcattcagga

SEQ ID NO: 1126091 - DNA, 25 bp, Homo sapien
gagtgaataaccttcgatagagtct

SEQ ID NO: 1126092 - DNA, 25 bp, Homo sapien
tggaaacattggtaagtaccccgca

SEQ ID NO: 1126093 - DNA, 25 bp, Homo sapien
tgtagaataaagtgataaccggcaa

SEQ ID NO: 1126094 - DNA, 25 bp, Homo sapien
tgtggattaacagacagttgcttcc

SEQ ID NO: 1126095 - DNA, 25 bp, Homo sapien
attaacagacagttgcttccccatg

SEQ ID NO: 1126096 - DNA, 25 bp, Homo sapien
tgcttgtggattaacagacagttgc

SEQ ID NO: 1126097 - DNA, 25 bp, Homo sapien
ggattaacagacagttgcttcccca

SEQ ID NO: 1126098 - DNA, 25 bp, Homo sapien
tcatagattctagtctggtgcccat

SEQ ID NO: 1126099 - DNA, 25 bp, Homo sapien
caacgtctgcttacaacaaatctgt

SEQ ID NO: 1126100 - DNA, 25 bp, Homo sapien
tgtggtgaacatgcacaatcatggg

SEQ ID NO: 1126101 - DNA, 25 bp, Homo sapien
ggtgcccattaagatccatcagtat

SEQ ID NO: 1126102 - DNA, 25 bp, Homo sapien
ttctgggttgctaaggaatgactgc

SEQ ID NO: 1126103 - DNA, 25 bp, Homo sapien
tctgggttgctaaggaatgactgcc

SEQ ID NO: 1126104 - DNA, 25 bp, Homo sapien
tcttcttcttgtaccacgcagaggt

SEQ ID NO: 1126105 - DNA, 25 bp, Homo sapien
cgcagaggtgtatgttcctagtttc

SEQ ID NO: 1126106 - DNA, 25 bp, Homo sapien
agtttctgagatcccttacaaaagg

SEQ ID NO: 1126107 - DNA, 25 bp, Homo sapien
tacaaaaggcagatccattggaact

SEQ ID NO: 1126108 - DNA, 25 bp, Homo sapien
acatcctcataaatcactcttgcct

SEQ ID NO: 1126109 - DNA, 25 bp, Homo sapien
cctcataaatcactcttgcctcaaa

SEQ ID NO: 1126110 - DNA, 25 bp, Homo sapien
tccacatcctcataaatcactcttg

SEQ ID NO: 1126111 - DNA, 25 bp, Homo sapien
tatccacatcctcataaatcactct

SEQ ID NO: 1126112 - DNA, 25 bp, Homo sapien
tcaagagtcacagtgactcctcttg

SEQ ID NO: 1126113 - DNA, 25 bp, Homo sapien
cttgtcataaaaccaatccacaatt

SEQ ID NO: 1126114 - DNA, 25 bp, Homo sapien
tctgttgtcccttgtctcattagaa

SEQ ID NO: 1126115 - DNA, 25 bp, Homo sapien
ccaggtgcctccatggtctttctca

SEQ ID NO: 1126116 - DNA, 25 bp, Homo sapien
tcacattgtacaccaggtttcccct

SEQ ID NO: 1126117 - DNA, 25 bp, Homo sapien
tacagagactctgtgaagttcagat

SEQ ID NO: 1126118 - DNA, 25 bp, Homo sapien
gtttcccctttacagagactctgtg

SEQ ID NO: 1126119 - DNA, 25 bp, Homo sapien
ttatccaaccagataattacggtaa

SEQ ID NO: 1126120 - DNA, 25 bp, Homo sapien
catttcttctagtgaaccaaggtat

SEQ ID NO: 1126121 - DNA, 25 bp, Homo sapien
gcatttcttctagtgaaccaaggta

SEQ ID NO: 1126122 - DNA, 25 bp, Homo sapien
agcatttcttctagtgaaccaaggt

SEQ ID NO: 1126123 - DNA, 25 bp, Homo sapien
ttcctgcaaattggccactgttgcc

SEQ ID NO: 1126124 - DNA, 25 bp, Homo sapien
acttctgcttacaaggccagtgatg

SEQ ID NO: 1126125 - DNA, 25 bp, Homo sapien
tgtcatctagacaatcttcacatgg

SEQ ID NO: 1126126 - DNA, 25 bp, Homo sapien
cactgttgccagctcagcgtatctg

SEQ ID NO: 1126127 - DNA, 25 bp, Homo sapien
gcttgcagagtgaccatttgttcat

SEQ ID NO: 1126128 - DNA, 25 bp, Homo sapien
tgcttgcagagtgaccatttgttca

SEQ ID NO: 1126129 - DNA, 25 bp, Homo sapien
tggtgccacacaaaagaagagggct

SEQ ID NO: 1126130 - DNA, 25 bp, Homo sapien
catggtgccacacaaaagaagaggg

SEQ ID NO: 1126131 - DNA, 25 bp, Homo sapien
acatctcacatggtgccacacaaaa

SEQ ID NO: 1126132 - DNA, 25 bp, Homo sapien
tgccacacaaaagaagagggcttgt

SEQ ID NO: 1126133 - DNA, 25 bp, Homo sapien
aacaccggagggtggtcataagcca

SEQ ID NO: 1126134 - DNA, 25 bp, Homo sapien
cataagccagaatacccccttccat

SEQ ID NO: 1126135 - DNA, 25 bp, Homo sapien
tgacaacagccaattgaagcaaagt

SEQ ID NO: 1126136 - DNA, 25 bp, Homo sapien
gcaaagtacaccacaatcacaaaaa

SEQ ID NO: 1126137 - DNA, 25 bp, Homo sapien
tgtgttgccagatcaacagagtagc

SEQ ID NO: 1126138 - DNA, 25 bp, Homo sapien
caatggctgaactaggcccttgact

SEQ ID NO: 1126139 - DNA, 25 bp, Homo sapien
caaagaatggtagggaagcatgaca

SEQ ID NO: 1126140 - DNA, 25 bp, Homo sapien
ccttgactaatcatgggcctgagac

SEQ ID NO: 1126141 - DNA, 25 bp, Homo sapien
caagcaaacttgaagaagggcaggg

SEQ ID NO: 1126142 - DNA, 25 bp, Homo sapien
agcagtcagcctctcattatacagc

SEQ ID NO: 1126143 - DNA, 25 bp, Homo sapien
tgtttaccaacaggttcttcaggca

SEQ ID NO: 1126144 - DNA, 25 bp, Homo sapien
caggcacatggagggtctgacttaa

SEQ ID NO: 1126145 - DNA, 25 bp, Homo sapien
cgtagcgcttaagttgaaattgtcc

SEQ ID NO: 1126146 - DNA, 25 bp, Homo sapien
gtgtagtcatgatgaactcttcaaa

SEQ ID NO: 1126147 - DNA, 25 bp, Homo sapien
agttgaaattgtcccatcagtgtag

SEQ ID NO: 1126148 - DNA, 25 bp, Homo sapien
ttccctcaggaatttcgtagcgctt

SEQ ID NO: 1126149 - DNA, 25 bp, Homo sapien
ccttcagcactgtcagtccaaaact

SEQ ID NO: 1126150 - DNA, 25 bp, Homo sapien
gctggctgcaacttcggtacttttt

SEQ ID NO: 1126151 - DNA, 25 bp, Homo sapien
taatgcaaaaggttctggcagagct

SEQ ID NO: 1126152 - DNA, 25 bp, Homo sapien
caaaactcctgaggatatgaactaa

SEQ ID NO: 1126153 - DNA, 25 bp, Homo sapien
gatggcgtgatcctatacctaaaaa

SEQ ID NO: 1126154 - DNA, 25 bp, Homo sapien
tgtatcaagccctatgccatgagct

SEQ ID NO: 1126155 - DNA, 25 bp, Homo sapien
tagtcagagttcaagtccaatgcct

SEQ ID NO: 1126156 - DNA, 25 bp, Homo sapien
caaagcagtttcctcacaaggtgga

SEQ ID NO: 1126157 - DNA, 25 bp, Homo sapien
taatacggagattaagagtaccagc

SEQ ID NO: 1126158 - DNA, 25 bp, Homo sapien
ccaaaagctaactatgagaagcagc

SEQ ID NO: 1126159 - DNA, 25 bp, Homo sapien
caaacaatccaagcctgtaagcagg

SEQ ID NO: 1126160 - DNA, 25 bp, Homo sapien
tcttcatgaccagatagagggttcg

SEQ ID NO: 1126161 - DNA, 25 bp, Homo sapien
ctgcagccattatgatggaggtggt

SEQ ID NO: 1126162 - DNA, 25 bp, Homo sapien
aaatcttatcccaagacagctaaaa

SEQ ID NO: 1126163 - DNA, 25 bp, Homo sapien
aaacctgggctcataatgcacagat

SEQ ID NO: 1126164 - DNA, 25 bp, Homo sapien
ttggggatttaataccagtgattgc

SEQ ID NO: 1126165 - DNA, 25 bp, Homo sapien
tcataatgcacagataaaacactct

SEQ ID NO: 1126166 - DNA, 25 bp, Homo sapien
tcatatttgtttccgatttctttat

SEQ ID NO: 1126167 - DNA, 25 bp, Homo sapien
ttctcatatttgtttccgatttctt

SEQ ID NO: 1126168 - DNA, 25 bp, Homo sapien
ttctttattgttgacagtatagggg

SEQ ID NO: 1126169 - DNA, 25 bp, Homo sapien
tctttattgttgacagtataggggg

SEQ ID NO: 1126170 - DNA, 25 bp, Homo sapien
ttcccattctgtggccctaggattc

SEQ ID NO: 1126171 - DNA, 25 bp, Homo sapien
tcagcttcccattctgtggccctag

SEQ ID NO: 1126172 - DNA, 25 bp, Homo sapien
tttcagcttcccattctgtggccct

SEQ ID NO: 1126173 - DNA, 25 bp, Homo sapien
agcttcccattctgtggccctagga

SEQ ID NO: 1126174 - DNA, 25 bp, Homo sapien
ctcagtgacatctgtgaatattaag

SEQ ID NO: 1126175 - DNA, 25 bp, Homo sapien
taagacaattgttgtctgccctgca

SEQ ID NO: 1126176 - DNA, 25 bp, Homo sapien
cctgcattatgtacaatgctggcaa

SEQ ID NO: 1126177 - DNA, 25 bp, Homo sapien
aaatctcatgtagtctctcagtgac

SEQ ID NO: 1126178 - DNA, 25 bp, Homo sapien
ttgtcatcccaacagagctgatctg

SEQ ID NO: 1126179 - DNA, 25 bp, Homo sapien
gctgatctgagtgagaagtgccatt

SEQ ID NO: 1126180 - DNA, 25 bp, Homo sapien
gaaatagtagcacactcagaagagc

SEQ ID NO: 1126181 - DNA, 25 bp, Homo sapien
gctagatgtaaactcagcccagtgc

SEQ ID NO: 1126182 - DNA, 25 bp, Homo sapien
cagcatctgactaaagatcaatgag

SEQ ID NO: 1126183 - DNA, 25 bp, Homo sapien
catctgactaaagatcaatgagaga

SEQ ID NO: 1126184 - DNA, 25 bp, Homo sapien
gtcagcatctgactaaagatcaatg

SEQ ID NO: 1126185 - DNA, 25 bp, Homo sapien
ttcagtcagcatctgactaaagatc

SEQ ID NO: 1126186 - DNA, 25 bp, Homo sapien
tttcccccacaactgctgagagtgt

SEQ ID NO: 1126187 - DNA, 25 bp, Homo sapien
ccccacaactgctgagagtgtgctc

SEQ ID NO: 1126188 - DNA, 25 bp, Homo sapien
actgctgagagtgtgctcttttgac

SEQ ID NO: 1126189 - DNA, 25 bp, Homo sapien
cacaactgctgagagtgtgctcttt

SEQ ID NO: 1126190 - DNA, 25 bp, Homo sapien
tgcctatgaagtatagacctagtgt

SEQ ID NO: 1126191 - DNA, 25 bp, Homo sapien
tttcagcaactgtggagctgtcatc

SEQ ID NO: 1126192 - DNA, 25 bp, Homo sapien
agacctagtgtttcagcaactgtgg

SEQ ID NO: 1126193 - DNA, 25 bp, Homo sapien
gtgctgcctatgaagtatagaccta

SEQ ID NO: 1126194 - DNA, 25 bp, Homo sapien
catgcttaccctcgtcttagaagaa

SEQ ID NO: 1126195 - DNA, 25 bp, Homo sapien
tgctgaactgtcagtccattaaagc

SEQ ID NO: 1126196 - DNA, 25 bp, Homo sapien
aattttactcaacaaagagcatgca

SEQ ID NO: 1126197 - DNA, 25 bp, Homo sapien
tataaacccaggcaatgcatatttg

SEQ ID NO: 1126198 - DNA, 25 bp, Homo sapien
tgttttataccctacattgtgctgc

SEQ ID NO: 1126199 - DNA, 25 bp, Homo sapien
gcattgtactttctggacttgatca

SEQ ID NO: 1126200 - DNA, 25 bp, Homo sapien
ttcagtctggcagtcaaagcattgt

SEQ ID NO: 1126201 - DNA, 25 bp, Homo sapien
cattgtgctgctcaaagtctttcac

SEQ ID NO: 1126202 - DNA, 25 bp, Homo sapien
caaatcagaggtgtccgtacaaatc

SEQ ID NO: 1126203 - DNA, 25 bp, Homo sapien
gaatggctgcattgaccctatggtg

SEQ ID NO: 1126204 - DNA, 25 bp, Homo sapien
cagtgtggctaaaatcagatgtcct

SEQ ID NO: 1126205 - DNA, 25 bp, Homo sapien
gagagtgctagctctggcaacagga

SEQ ID NO: 1126206 - DNA, 25 bp, Homo sapien
gatgaaggtaagattagaacattcc

SEQ ID NO: 1126207 - DNA, 25 bp, Homo sapien
aactgcagttcacttctatttcagg

SEQ ID NO: 1126208 - DNA, 25 bp, Homo sapien
tataactgcagttcacttctatttc

SEQ ID NO: 1126209 - DNA, 25 bp, Homo sapien
gagaaatgctaataagattatgatg

SEQ ID NO: 1126210 - DNA, 25 bp, Homo sapien
cacatttctctcagtcattatctga

SEQ ID NO: 1126211 - DNA, 25 bp, Homo sapien
aaatggcttacactgcattctgtgt

SEQ ID NO: 1126212 - DNA, 25 bp, Homo sapien
gattaaaatggcttacactgcattc

SEQ ID NO: 1126213 - DNA, 25 bp, Homo sapien
tatctgattaaaatggcttacactg

SEQ ID NO: 1126214 - DNA, 25 bp, Homo sapien
gaatttcaatgcatgacagtgacca

SEQ ID NO: 1126215 - DNA, 25 bp, Homo sapien
gagaagaaagcttcggtaggtctca

SEQ ID NO: 1126216 - DNA, 25 bp, Homo sapien
ggtcttcagggaagtcatctgtcct

SEQ ID NO: 1126217 - DNA, 25 bp, Homo sapien
tacagaggcagttgtgaaaggcaga

SEQ ID NO: 1126218 - DNA, 25 bp, Homo sapien
agatagatacaagagagaatgagcc

SEQ ID NO: 1126219 - DNA, 25 bp, Homo sapien
gagccacacactcagtcaacgagta

SEQ ID NO: 1126220 - DNA, 25 bp, Homo sapien
gaggcagttgccataattagcttaa

SEQ ID NO: 1126221 - DNA, 25 bp, Homo sapien
gtcaacgagtacagcaatttctgga

SEQ ID NO: 1126222 - DNA, 25 bp, Homo sapien
cagctgaaattcactaactagaaag

SEQ ID NO: 1126223 - DNA, 25 bp, Homo sapien
aaatgctctcacctcttgtatacac

SEQ ID NO: 1126224 - DNA, 25 bp, Homo sapien
tttcctttactaaatgctctcacct

SEQ ID NO: 1126225 - DNA, 25 bp, Homo sapien
tgccagctgaaattcactaactaga

SEQ ID NO: 1126226 - DNA, 25 bp, Homo sapien
cctttctccttttccaactctggag

SEQ ID NO: 1126227 - DNA, 25 bp, Homo sapien
ctattgcctttctccttttccaact

SEQ ID NO: 1126228 - DNA, 25 bp, Homo sapien
tttctccttttccaactctggagat

SEQ ID NO: 1126229 - DNA, 25 bp, Homo sapien
tgcctttctccttttccaactctgg

SEQ ID NO: 1126230 - DNA, 25 bp, Homo sapien
gacaatgcatcttgcacatcaggga

SEQ ID NO: 1126231 - DNA, 25 bp, Homo sapien
gatgaggcttcccaaatgattcaga

SEQ ID NO: 1126232 - DNA, 25 bp, Homo sapien
gccaagagtagattatagtagccca

SEQ ID NO: 1126233 - DNA, 25 bp, Homo sapien
tagaaggtacccacttaggcagagg

SEQ ID NO: 1126234 - DNA, 25 bp, Homo sapien
ctccatcccgagagtgcgcgcccag

SEQ ID NO: 1126235 - DNA, 25 bp, Homo sapien
aggagggcgcctgcgatgcccggcg

SEQ ID NO: 1126236 - DNA, 25 bp, Homo sapien
cggcgctcgccctccatcccgagag

SEQ ID NO: 1126237 - DNA, 25 bp, Homo sapien
cgaggagggcgcctgcgatgcccgg

SEQ ID NO: 1126238 - DNA, 25 bp, Homo sapien
ctccaggtaacgttaaaatgaacag

SEQ ID NO: 1126239 - DNA, 25 bp, Homo sapien
aatgaacaggcttcttagtaatgaa

SEQ ID NO: 1126240 - DNA, 25 bp, Homo sapien
aatacagcgttgtgatctgaactca

SEQ ID NO: 1126241 - DNA, 25 bp, Homo sapien
agcagcaacttgagaaactggagtg

SEQ ID NO: 1126242 - DNA, 25 bp, Homo sapien
tatccagcttgattgatacatgcaa

SEQ ID NO: 1126243 - DNA, 25 bp, Homo sapien
gaggtaacacactattatccagctt

SEQ ID NO: 1126244 - DNA, 25 bp, Homo sapien
agagcatgtcatataaaagcatttc

SEQ ID NO: 1126245 - DNA, 25 bp, Homo sapien
ccctatgttttaacacaagcagatt

SEQ ID NO: 1126246 - DNA, 25 bp, Homo sapien
acaaaacacttggagagcaggattc

SEQ ID NO: 1126247 - DNA, 25 bp, Homo sapien
taaaacacttgttgcacagctagag

SEQ ID NO: 1126248 - DNA, 25 bp, Homo sapien
catagactgtgatgaaggaatgacc

SEQ ID NO: 1126249 - DNA, 25 bp, Homo sapien
gattccagtcggaccaaccaatgag

SEQ ID NO: 1126250 - DNA, 25 bp, Homo sapien
cgtacaaacgtgctttggcattctt

SEQ ID NO: 1126251 - DNA, 25 bp, Homo sapien
cattacgtacaaacgtgctttggca

SEQ ID NO: 1126252 - DNA, 25 bp, Homo sapien
gacattacgtacaaacgtgctttgg

SEQ ID NO: 1126253 - DNA, 25 bp, Homo sapien
tttactgacattacgtacaaacgtg

SEQ ID NO: 1126254 - DNA, 25 bp, Homo sapien
gactttcaggttcatcaactgtgat

SEQ ID NO: 1126255 - DNA, 25 bp, Homo sapien
gtctcctaacttcaaattcactgga

SEQ ID NO: 1126256 - DNA, 25 bp, Homo sapien
tctcctaacttcaaattcactggag

SEQ ID NO: 1126257 - DNA, 25 bp, Homo sapien
cgtctcctaacttcaaattcactgg

SEQ ID NO: 1126258 - DNA, 25 bp, Homo sapien
tatgtaaagccttcctgcgtgtctc

SEQ ID NO: 1126259 - DNA, 25 bp, Homo sapien
aatgaagtcatcgttaaagcgttcc

SEQ ID NO: 1126260 - DNA, 25 bp, Homo sapien
caagcttgtgcagtgagaaaaattt

SEQ ID NO: 1126261 - DNA, 25 bp, Homo sapien
gatgatcagcaattcggttcaaaaa

SEQ ID NO: 1126262 - DNA, 25 bp, Homo sapien
agctctgacggtttgccccatcctg

SEQ ID NO: 1126263 - DNA, 25 bp, Homo sapien
caaatttattttctggctaaatagt

SEQ ID NO: 1126264 - DNA, 25 bp, Homo sapien
cattgaggacgcaacagctctgacg

SEQ ID NO: 1126265 - DNA, 25 bp, Homo sapien
tattttctggctaaatagttcaata

SEQ ID NO: 1126266 - DNA, 25 bp, Homo sapien
gagtccagacatccgcttttcagtg

SEQ ID NO: 1126267 - DNA, 25 bp, Homo sapien
ctgagagtccagacatccgcttttc

SEQ ID NO: 1126268 - DNA, 25 bp, Homo sapien
agacatccgcttttcagtggcctta

SEQ ID NO: 1126269 - DNA, 25 bp, Homo sapien
tccagacatccgcttttcagtggcc

SEQ ID NO: 1126270 - DNA, 25 bp, Homo sapien
acttcaactttggaatccagttctg

SEQ ID NO: 1126271 - DNA, 25 bp, Homo sapien
agatcagtatctgcctttttatagg

SEQ ID NO: 1126272 - DNA, 25 bp, Homo sapien
tgcctttttataggtcaaaacttca

SEQ ID NO: 1126273 - DNA, 25 bp, Homo sapien
cagttctgcttgtatttggtctctt

SEQ ID NO: 1126274 - DNA, 25 bp, Homo sapien
tcacagattcctttctcctactctg

SEQ ID NO: 1126275 - DNA, 25 bp, Homo sapien
ctacagcagcccaccactccccact

SEQ ID NO: 1126276 - DNA, 25 bp, Homo sapien
tttctcctactctgtctacagcagc

SEQ ID NO: 1126277 - DNA, 25 bp, Homo sapien
acagattcctttctcctactctgtc

SEQ ID NO: 1126278 - DNA, 25 bp, Homo sapien
gaaatggcccctgggttgtctccaa

SEQ ID NO: 1126279 - DNA, 25 bp, Homo sapien
ttcattatcagttgctttgctgggt

SEQ ID NO: 1126280 - DNA, 25 bp, Homo sapien
ccaaaggtgactttgatggagtctc

SEQ ID NO: 1126281 - DNA, 25 bp, Homo sapien
tttgctgggtttgcacgtagcatcc

SEQ ID NO: 1126282 - DNA, 25 bp, Homo sapien
gagggccttcttgattacagcatca

SEQ ID NO: 1126283 - DNA, 25 bp, Homo sapien
tgtgtgcaaacccactaccctgctg

SEQ ID NO: 1126284 - DNA, 25 bp, Homo sapien
caaattccccgccagctgtgtgtgt

SEQ ID NO: 1126285 - DNA, 25 bp, Homo sapien
tactccctggtactttcttctggga

SEQ ID NO: 1126286 - DNA, 25 bp, Homo sapien
gcttaaataatagttcccagataat

SEQ ID NO: 1126287 - DNA, 25 bp, Homo sapien
tatgtacaaagcagggttgttgttc

SEQ ID NO: 1126288 - DNA, 25 bp, Homo sapien
gaataggtatgcaaaagtgaattac

SEQ ID NO: 1126289 - DNA, 25 bp, Homo sapien
ccagtgtttacactaggtgggaatc

SEQ ID NO: 1126290 - DNA, 25 bp, Homo sapien
tatcctgtgttaaggaactgaggac

SEQ ID NO: 1126291 - DNA, 25 bp, Homo sapien
ttatcctgtgttaaggaactgagga

SEQ ID NO: 1126292 - DNA, 25 bp, Homo sapien
tctttaaggttgatacctagagtac

SEQ ID NO: 1126293 - DNA, 25 bp, Homo sapien
ttaaggttgatacctagagtacgag

SEQ ID NO: 1126294 - DNA, 25 bp, Homo sapien
ggttgatacctagagtacgagtagg

SEQ ID NO: 1126295 - DNA, 25 bp, Homo sapien
tacctagagtacgagtaggtgaaga

SEQ ID NO: 1126296 - DNA, 25 bp, Homo sapien
agtcacaaagagagatacattgatc

SEQ ID NO: 1126297 - DNA, 25 bp, Homo sapien
caaagagagatacattgatctatga

SEQ ID NO: 1126298 - DNA, 25 bp, Homo sapien
cacaaagagagatacattgatctat

SEQ ID NO: 1126299 - DNA, 25 bp, Homo sapien
taagtcacaaagagagatacattga

SEQ ID NO: 1126300 - DNA, 25 bp, Homo sapien
cattattagcacattccactttatc

SEQ ID NO: 1126301 - DNA, 25 bp, Homo sapien
ggcattattagcacattccacttta

SEQ ID NO: 1126302 - DNA, 25 bp, Homo sapien
cagggcattattagcacattccact

SEQ ID NO: 1126303 - DNA, 25 bp, Homo sapien
ttcagggcattattagcacattcca

SEQ ID NO: 1126304 - DNA, 25 bp, Homo sapien
caaacaattggagctataaggatct

SEQ ID NO: 1126305 - DNA, 25 bp, Homo sapien
catttaagggctccaacttcttgat

SEQ ID NO: 1126306 - DNA, 25 bp, Homo sapien
tttgcaatatggcacagcgatgctc

SEQ ID NO: 1126307 - DNA, 25 bp, Homo sapien
caattctgtaatgtaagcgtagaca

SEQ ID NO: 1126308 - DNA, 25 bp, Homo sapien
gatcagccaggaatcacttgctctc

SEQ ID NO: 1126309 - DNA, 25 bp, Homo sapien
cagccaggaatcacttgctctcaag

SEQ ID NO: 1126310 - DNA, 25 bp, Homo sapien
caggaatcacttgctctcaagcctt

SEQ ID NO: 1126311 - DNA, 25 bp, Homo sapien
cataagatcagccaggaatcacttg

SEQ ID NO: 1126312 - DNA, 25 bp, Homo sapien
ccacaggtacaattgtgtcagattc

SEQ ID NO: 1126313 - DNA, 25 bp, Homo sapien
gtccacaggtacaattgtgtcagat

SEQ ID NO: 1126314 - DNA, 25 bp, Homo sapien
ggtccacaggtacaattgtgtcaga

SEQ ID NO: 1126315 - DNA, 25 bp, Homo sapien
caggtacaattgtgtcagattcttc

SEQ ID NO: 1126316 - DNA, 25 bp, Homo sapien
ttgactgtatcctcctctatcatct

SEQ ID NO: 1126317 - DNA, 25 bp, Homo sapien
gactgtatcctcctctatcatcttt

SEQ ID NO: 1126318 - DNA, 25 bp, Homo sapien
cttgactgtatcctcctctatcatc

SEQ ID NO: 1126319 - DNA, 25 bp, Homo sapien
tgactgtatcctcctctatcatctt

SEQ ID NO: 1126320 - DNA, 25 bp, Homo sapien
attttcttgcttccagagatgctcc

SEQ ID NO: 1126321 - DNA, 25 bp, Homo sapien
ttgcttccagagatgctcctcatac

SEQ ID NO: 1126322 - DNA, 25 bp, Homo sapien
ttcttgcttccagagatgctcctca

SEQ ID NO: 1126323 - DNA, 25 bp, Homo sapien
taattttcttgcttccagagatgct

SEQ ID NO: 1126324 - DNA, 25 bp, Homo sapien
ctcagaaagtgactatatttgcaga

SEQ ID NO: 1126325 - DNA, 25 bp, Homo sapien
caggcatgccgcatggcgtatgcag

SEQ ID NO: 1126326 - DNA, 25 bp, Homo sapien
catggcgtatgcaggagtggtggag

SEQ ID NO: 1126327 - DNA, 25 bp, Homo sapien
tggtagcaggcatgccgcatggcgt

SEQ ID NO: 1126328 - DNA, 25 bp, Homo sapien
caaagctggactgattaacactggt

SEQ ID NO: 1126329 - DNA, 25 bp, Homo sapien
taaagtgtctatatcggacaaccag

SEQ ID NO: 1126330 - DNA, 25 bp, Homo sapien
ttctacataaacactccaaagctgg

SEQ ID NO: 1126331 - DNA, 25 bp, Homo sapien
ggacaaccagcactaataacagact

SEQ ID NO: 1126332 - DNA, 25 bp, Homo sapien
aggcttcttccaagtgaaggttggt

SEQ ID NO: 1126333 - DNA, 25 bp, Homo sapien
gtctgtgatgtaaggaatgactccc

SEQ ID NO: 1126334 - DNA, 25 bp, Homo sapien
tggtctgtgatgtaaggaatgactc

SEQ ID NO: 1126335 - DNA, 25 bp, Homo sapien
caagtgaaggttggtctgtgatgta

SEQ ID NO: 1126336 - DNA, 25 bp, Homo sapien
cacggcagatccagaaagaataact

SEQ ID NO: 1126337 - DNA, 25 bp, Homo sapien
gcaattattggcacacaaatttaag

SEQ ID NO: 1126338 - DNA, 25 bp, Homo sapien
ttcatgtcagtgacctggaatacct

SEQ ID NO: 1126339 - DNA, 25 bp, Homo sapien
aaccaagccagatatctctctgtat

SEQ ID NO: 1126340 - DNA, 25 bp, Homo sapien
tattaaaacagtccttacaacatat

SEQ ID NO: 1126341 - DNA, 25 bp, Homo sapien
attaaaacagtccttacaacatatt

SEQ ID NO: 1126342 - DNA, 25 bp, Homo sapien
ttattaaaacagtccttacaacata

SEQ ID NO: 1126343 - DNA, 25 bp, Homo sapien
tatacttgttaacacatgctgaact

SEQ ID NO: 1126344 - DNA, 25 bp, Homo sapien
aaatgaatacgcagtatacttgtta

SEQ ID NO: 1126345 - DNA, 25 bp, Homo sapien
aaagctaggtatgaattgtaaagaa

SEQ ID NO: 1126346 - DNA, 25 bp, Homo sapien
ttaagaggcttgagctactaggagg

SEQ ID NO: 1126347 - DNA, 25 bp, Homo sapien
tatctcaggattcacctatgaaggg

SEQ ID NO: 1126348 - DNA, 25 bp, Homo sapien
aattgcatgttgtgggatgattccc

SEQ ID NO: 1126349 - DNA, 25 bp, Homo sapien
taagggatctcactgcacaataacc

SEQ ID NO: 1126350 - DNA, 25 bp, Homo sapien
tcaaacctaggtgaactgtaacaca

SEQ ID NO: 1126351 - DNA, 25 bp, Homo sapien
tggggatgcagttgtttatctggac

SEQ ID NO: 1126352 - DNA, 25 bp, Homo sapien
ggatgcagttgtttatctggacatt

SEQ ID NO: 1126353 - DNA, 25 bp, Homo sapien
tggaatggggatgcagttgtttatc

SEQ ID NO: 1126354 - DNA, 25 bp, Homo sapien
tggaacctgcctggaatccaccttg

SEQ ID NO: 1126355 - DNA, 25 bp, Homo sapien
ttccaaccataatggtccacggatt

SEQ ID NO: 1126356 - DNA, 25 bp, Homo sapien
ttggccctgaccatcggctccttgc

SEQ ID NO: 1126357 - DNA, 25 bp, Homo sapien
cctgaccatcggctccttgcccttt

SEQ ID NO: 1126358 - DNA, 25 bp, Homo sapien
accataatggtccacggatttccat

SEQ ID NO: 1126359 - DNA, 25 bp, Homo sapien
tgggaagatctaaagtgcgcagttg

SEQ ID NO: 1126360 - DNA, 25 bp, Homo sapien
tacattctataggattgccagagag

SEQ ID NO: 1126361 - DNA, 25 bp, Homo sapien
gctcattaggctttctgttgggaag

SEQ ID NO: 1126362 - DNA, 25 bp, Homo sapien
tcttggcaggtagcgtggcctccac

SEQ ID NO: 1126363 - DNA, 25 bp, Homo sapien
tggtctgtcttgacacttcctatgg

SEQ ID NO: 1126364 - DNA, 25 bp, Homo sapien
ccactaacaactttgaagatttcac

SEQ ID NO: 1126365 - DNA, 25 bp, Homo sapien
ttctggctgctgaagtgtctggtct

SEQ ID NO: 1126366 - DNA, 25 bp, Homo sapien
cctatggtgccataaggaagtgttt

SEQ ID NO: 1126367 - DNA, 25 bp, Homo sapien
gacggtgatgctggcgtactacttc

SEQ ID NO: 1126368 - DNA, 25 bp, Homo sapien
gtactacttcgagtatacggacacg

SEQ ID NO: 1126369 - DNA, 25 bp, Homo sapien
tgcagggcttcttctgccacgacag

SEQ ID NO: 1126370 - DNA, 25 bp, Homo sapien
agttcctccaagttatgggcagccc

SEQ ID NO: 1126371 - DNA, 25 bp, Homo sapien
atcccgcctcccgtgcctcgtcctc

SEQ ID NO: 1126372 - DNA, 25 bp, Homo sapien
ccggtggctgcctcggcggaccggg

SEQ ID NO: 1126373 - DNA, 25 bp, Homo sapien
gggaggcgtgcatgcccctgctgcc

SEQ ID NO: 1126374 - DNA, 25 bp, Homo sapien
tgccggcgcctcgaagcccggacct

SEQ ID NO: 1126375 - DNA, 25 bp, Homo sapien
catcggcactttgcgccttggtggg

SEQ ID NO: 1126376 - DNA, 25 bp, Homo sapien
caccattttcccaggcgttgtgcgg

SEQ ID NO: 1126377 - DNA, 25 bp, Homo sapien
ggaagacgcgtccacgcaccatttt

SEQ ID NO: 1126378 - DNA, 25 bp, Homo sapien
cggttgaaactctgggcgccgcatc

SEQ ID NO: 1126379 - DNA, 25 bp, Homo sapien
cagggaataaagaacgagatgaggc

SEQ ID NO: 1126380 - DNA, 25 bp, Homo sapien
cgcataggcgtggatagccatggac

SEQ ID NO: 1126381 - DNA, 25 bp, Homo sapien
ctgggaccgctcagtgcctggaatc

SEQ ID NO: 1126382 - DNA, 25 bp, Homo sapien
tttgtatgcatgtgctgtgagccag

SEQ ID NO: 1126383 - DNA, 25 bp, Homo sapien
tggagagaggtattggaattgataa

SEQ ID NO: 1126384 - DNA, 25 bp, Homo sapien
cttccaagagcatacagtattgggg

SEQ ID NO: 1126385 - DNA, 25 bp, Homo sapien
caagagcatacagtattggggtgga

SEQ ID NO: 1126386 - DNA, 25 bp, Homo sapien
gagagaggtattggaattgataaat

SEQ ID NO: 1126387 - DNA, 25 bp, Homo sapien
gaccggattctctggtacagcagca

SEQ ID NO: 1126388 - DNA, 25 bp, Homo sapien
tttcatagaccggattctctggtac

SEQ ID NO: 1126389 - DNA, 25 bp, Homo sapien
atagaccggattctctggtacagca

SEQ ID NO: 1126390 - DNA, 25 bp, Homo sapien
accggattctctggtacagcagcat

SEQ ID NO: 1126391 - DNA, 25 bp, Homo sapien
gtttggtttggctctcagcagcccg

SEQ ID NO: 1126392 - DNA, 25 bp, Homo sapien
tgttcatcagtttattatctatatc

SEQ ID NO: 1126393 - DNA, 25 bp, Homo sapien
gttgctgttcatcagtttattatct

SEQ ID NO: 1126394 - DNA, 25 bp, Homo sapien
gctgttcatcagtttattatctata

SEQ ID NO: 1126395 - DNA, 25 bp, Homo sapien
tgactcttagatcactcagtgcctg

SEQ ID NO: 1126396 - DNA, 25 bp, Homo sapien
gactgcagggtattgtacttgactc

SEQ ID NO: 1126397 - DNA, 25 bp, Homo sapien
gaactccggcaattaccatagctgg

SEQ ID NO: 1126398 - DNA, 25 bp, Homo sapien
agtgcctgccagaccactgtggaac

SEQ ID NO: 1126399 - DNA, 25 bp, Homo sapien
tccaagtgggtctcaaattgcaaaa

SEQ ID NO: 1126400 - DNA, 25 bp, Homo sapien
tgtccctctggtatgtccaagtggg

SEQ ID NO: 1126401 - DNA, 25 bp, Homo sapien
actcacaggtctcgctatctgctgg

SEQ ID NO: 1126402 - DNA, 25 bp, Homo sapien
tatctgctggtgtaccgtgctaacg

SEQ ID NO: 1126403 - DNA, 25 bp, Homo sapien
ttcctggaccctcctttgttagctc

SEQ ID NO: 1126404 - DNA, 25 bp, Homo sapien
tttcacagacccacgtgcattttcc

SEQ ID NO: 1126405 - DNA, 25 bp, Homo sapien
caacttctggactttcacagaccca

SEQ ID NO: 1126406 - DNA, 25 bp, Homo sapien
cctggaccctcctttgttagctcaa

SEQ ID NO: 1126407 - DNA, 25 bp, Homo sapien
gcttctctcacattcgttcctcata

SEQ ID NO: 1126408 - DNA, 25 bp, Homo sapien
tctcacattcgttcctcatacacat

SEQ ID NO: 1126409 - DNA, 25 bp, Homo sapien
tccacttaactttgcttctctcaca

SEQ ID NO: 1126410 - DNA, 25 bp, Homo sapien
ttcagttccctccacttaactttgc

SEQ ID NO: 1126411 - DNA, 25 bp, Homo sapien
gagactttctgattcaccatgaagc

SEQ ID NO: 1126412 - DNA, 25 bp, Homo sapien
cagctcttacatgacatgaccacag

SEQ ID NO: 1126413 - DNA, 25 bp, Homo sapien
tatactgccggatatcagctctgct

SEQ ID NO: 1126414 - DNA, 25 bp, Homo sapien
ctgaaatgcacagggagactttctg

SEQ ID NO: 1126415 - DNA, 25 bp, Homo sapien
tgtcctaggattcctttgcaaagcc

SEQ ID NO: 1126416 - DNA, 25 bp, Homo sapien
aaggtctagggtgaactgtcctagg

SEQ ID NO: 1126417 - DNA, 25 bp, Homo sapien
ctccctttacctcatcagtgtttgg

SEQ ID NO: 1126418 - DNA, 25 bp, Homo sapien
gccttccaatgctgaacagctgctg

SEQ ID NO: 1126419 - DNA, 25 bp, Homo sapien
gtcatctgcattgctaccatgttat

SEQ ID NO: 1126420 - DNA, 25 bp, Homo sapien
ttcataaagagagttctgctgtgtc

SEQ ID NO: 1126421 - DNA, 25 bp, Homo sapien
gcattgctaccatgttatccctttt

SEQ ID NO: 1126422 - DNA, 25 bp, Homo sapien
cataaagagagttctgctgtgtcat

SEQ ID NO: 1126423 - DNA, 25 bp, Homo sapien
cacttaaccctgctcgagttttctc

SEQ ID NO: 1126424 - DNA, 25 bp, Homo sapien
actctgaccaaagagaatcttctta

SEQ ID NO: 1126425 - DNA, 25 bp, Homo sapien
gatcaaaaagggaaactgcactgtt

SEQ ID NO: 1126426 - DNA, 25 bp, Homo sapien
gccagatgggtgaccccaataggaa

SEQ ID NO: 1126427 - DNA, 25 bp, Homo sapien
cctgcttgatgtccaaggcttaaag

SEQ ID NO: 1126428 - DNA, 25 bp, Homo sapien
ctgcttgatgtccaaggcttaaagt

SEQ ID NO: 1126429 - DNA, 25 bp, Homo sapien
tgcttgatgtccaaggcttaaagtc

SEQ ID NO: 1126430 - DNA, 25 bp, Homo sapien
cataggtcaagcaggagcatgagca

SEQ ID NO: 1126431 - DNA, 25 bp, Homo sapien
caagttctgttatgggatcctcggg

SEQ ID NO: 1126432 - DNA, 25 bp, Homo sapien
gagtgtgccaaacctaacccttatg

SEQ ID NO: 1126433 - DNA, 25 bp, Homo sapien
gatgccaattgctccatgagtagcc

SEQ ID NO: 1126434 - DNA, 25 bp, Homo sapien
accttacaatatttgccaccaagac

SEQ ID NO: 1126435 - DNA, 25 bp, Homo sapien
cttcaccttacaatatttgccacca

SEQ ID NO: 1126436 - DNA, 25 bp, Homo sapien
tcatcctgccacttcaccttacaat

SEQ ID NO: 1126437 - DNA, 25 bp, Homo sapien
tcaccttacaatatttgccaccaag

SEQ ID NO: 1126438 - DNA, 25 bp, Homo sapien
cagaagtgttgttttccatagccac

SEQ ID NO: 1126439 - DNA, 25 bp, Homo sapien
tcagaagtgttgttttccatagcca

SEQ ID NO: 1126440 - DNA, 25 bp, Homo sapien
gaagtgttgttttccatagccactc

SEQ ID NO: 1126441 - DNA, 25 bp, Homo sapien
agtgttgttttccatagccactcac

SEQ ID NO: 1126442 - DNA, 25 bp, Homo sapien
cattctcaaatccgtgatcttcaga

SEQ ID NO: 1126443 - DNA, 25 bp, Homo sapien
acattctcaaatccgtgatcttcag

SEQ ID NO: 1126444 - DNA, 25 bp, Homo sapien
tttgtgtagtcacaaaccagggagc

SEQ ID NO: 1126445 - DNA, 25 bp, Homo sapien
gacaacctggtttgtgtagtcacaa

SEQ ID NO: 1126446 - DNA, 25 bp, Homo sapien
ctggtttgatgacaacctggtttgt

SEQ ID NO: 1126447 - DNA, 25 bp, Homo sapien
tgtgtagtcacaaaccagggagctg

SEQ ID NO: 1126448 - DNA, 25 bp, Homo sapien
gagggaaacttcatattgagtaatt

SEQ ID NO: 1126449 - DNA, 25 bp, Homo sapien
agggaaacttcatattgagtaattc

SEQ ID NO: 1126450 - DNA, 25 bp, Homo sapien
acttggcagtaggagaactgccttt

SEQ ID NO: 1126451 - DNA, 25 bp, Homo sapien
agacttggcagtaggagaactgcct

SEQ ID NO: 1126452 - DNA, 25 bp, Homo sapien
cagacttggcagtaggagaactgcc

SEQ ID NO: 1126453 - DNA, 25 bp, Homo sapien
gacttggcagtaggagaactgcctt

SEQ ID NO: 1126454 - DNA, 25 bp, Homo sapien
caaggcatcctgctgaactatatct

SEQ ID NO: 1126455 - DNA, 25 bp, Homo sapien
tcctgctgaactatatctgtgccta

SEQ ID NO: 1126456 - DNA, 25 bp, Homo sapien
tgcccagaataagggcagtgtattt

SEQ ID NO: 1126457 - DNA, 25 bp, Homo sapien
ggcatcctgctgaactatatctgtg

SEQ ID NO: 1126458 - DNA, 25 bp, Homo sapien
cactggttaaccgatgggcagcatg

SEQ ID NO: 1126459 - DNA, 25 bp, Homo sapien
tcattgctggatgcaacaccactgc

SEQ ID NO: 1126460 - DNA, 25 bp, Homo sapien
tcttcctcattgtgtacccactggt

SEQ ID NO: 1126461 - DNA, 25 bp, Homo sapien
ggcaaaactttcatcaggtactatt

SEQ ID NO: 1126462 - DNA, 25 bp, Homo sapien
cagcttgttgctacccaggaatgac

SEQ ID NO: 1126463 - DNA, 25 bp, Homo sapien
tgtgggttccttgcatccagagagg

SEQ ID NO: 1126464 - DNA, 25 bp, Homo sapien
caagaatccgaaaaggaggacgcac

SEQ ID NO: 1126465 - DNA, 25 bp, Homo sapien
tttttctggcgagagacgacgtcca

SEQ ID NO: 1126466 - DNA, 25 bp, Homo sapien
tgcagcaacccagctattccctgag

SEQ ID NO: 1126467 - DNA, 25 bp, Homo sapien
tttgcagcaacccagctattccctg

SEQ ID NO: 1126468 - DNA, 25 bp, Homo sapien
gctattccctgagcgggccagtcct

SEQ ID NO: 1126469 - DNA, 25 bp, Homo sapien
tctccccgcccctttttgcagcaac

SEQ ID NO: 1126470 - DNA, 25 bp, Homo sapien
ccccgggcgaggtgtgcacagcgca

SEQ ID NO: 1126471 - DNA, 25 bp, Homo sapien
cgcccggcgccgctgatgtcacatt

SEQ ID NO: 1126472 - DNA, 25 bp, Homo sapien
gctgatgtcacattccccgcggcca

SEQ ID NO: 1126473 - DNA, 25 bp, Homo sapien
gtgcacagcgcagctgaggcgagct

SEQ ID NO: 1126474 - DNA, 25 bp, Homo sapien
ggcaggagggtgacgctgtccttga

SEQ ID NO: 1126475 - DNA, 25 bp, Homo sapien
aggagggtgacgctgtccttgatca

SEQ ID NO: 1126476 - DNA, 25 bp, Homo sapien
gggctgacaggtattcacaggcaca

SEQ ID NO: 1126477 - DNA, 25 bp, Homo sapien
acaggtattcacaggcacattcggg

SEQ ID NO: 1126478 - DNA, 25 bp, Homo sapien
cccgggctgacaggtattcacaggc

SEQ ID NO: 1126479 - DNA, 25 bp, Homo sapien
tgacaggtattcacaggcacattcg

SEQ ID NO: 1126480 - DNA, 25 bp, Homo sapien
gacacaaatcccgaaatatgggcat

SEQ ID NO: 1126481 - DNA, 25 bp, Homo sapien
ccctctggggcactagcggacgttg

SEQ ID NO: 1126482 - DNA, 25 bp, Homo sapien
gggcactagcggacgttgtgcacac

SEQ ID NO: 1126483 - DNA, 25 bp, Homo sapien
atcccgaaatatgggcatcatggcc

SEQ ID NO: 1126484 - DNA, 25 bp, Homo sapien
ttgcctcctctttcatgagggcatt

SEQ ID NO: 1126485 - DNA, 25 bp, Homo sapien
cacatccttaattctctggtttgcc

SEQ ID NO: 1126486 - DNA, 25 bp, Homo sapien
tacattctgtaaaggcacatcctta

SEQ ID NO: 1126487 - DNA, 25 bp, Homo sapien
tcaaaagcgcccacgtacattctgt

SEQ ID NO: 1126488 - DNA, 25 bp, Homo sapien
ccactaactgatgagccaatgtggg

SEQ ID NO: 1126489 - DNA, 25 bp, Homo sapien
catctatccagagttcttgttgagg

SEQ ID NO: 1126490 - DNA, 25 bp, Homo sapien
gtatgcactgtcctccaactctttg

SEQ ID NO: 1126491 - DNA, 25 bp, Homo sapien
ctttgtgcttggacactcccagtgg

SEQ ID NO: 1126492 - DNA, 25 bp, Homo sapien
tgtcatatgggatggcagttgttcc

SEQ ID NO: 1126493 - DNA, 25 bp, Homo sapien
tgagagcagagaaatagtcttatcc

SEQ ID NO: 1126494 - DNA, 25 bp, Homo sapien
gcttccttcggatcactttctctga

SEQ ID NO: 1126495 - DNA, 25 bp, Homo sapien
tctgaccatacagagatatcctgat

SEQ ID NO: 1126496 - DNA, 25 bp, Homo sapien
aaattcctggaagcatgcaccgccg

SEQ ID NO: 1126497 - DNA, 25 bp, Homo sapien
tggaagcatgcaccgccgtgtatcc

SEQ ID NO: 1126498 - DNA, 25 bp, Homo sapien
catgcaccgccgtgtatcctgctgt

SEQ ID NO: 1126499 - DNA, 25 bp, Homo sapien
gcaccgccgtgtatcctgctgtcat

SEQ ID NO: 1126500 - DNA, 25 bp, Homo sapien
aatagaggctaaccaccgatgatgc

SEQ ID NO: 1126501 - DNA, 25 bp, Homo sapien
ggctaaccaccgatgatgccaatat

SEQ ID NO: 1126502 - DNA, 25 bp, Homo sapien
aggaaatagaggctaaccaccgatg

SEQ ID NO: 1126503 - DNA, 25 bp, Homo sapien
taaccaccgatgatgccaatatagg

SEQ ID NO: 1126504 - DNA, 25 bp, Homo sapien
aatgtacggcatgctaagactccgg

SEQ ID NO: 1126505 - DNA, 25 bp, Homo sapien
caaaagccaagctaagcaacatgag

SEQ ID NO: 1126506 - DNA, 25 bp, Homo sapien
ccagagtgcacaggtttgaagacat

SEQ ID NO: 1126507 - DNA, 25 bp, Homo sapien
tcatagcagctaaatccagagtgca

SEQ ID NO: 1126508 - DNA, 25 bp, Homo sapien
taatgttgggctctagtccgacccc

SEQ ID NO: 1126509 - DNA, 25 bp, Homo sapien
ctccagcattaatgttgggctctag

SEQ ID NO: 1126510 - DNA, 25 bp, Homo sapien
gaggcaacagtagagaattccttct

SEQ ID NO: 1126511 - DNA, 25 bp, Homo sapien
tctgacagctcgtctgaggaaggaa

SEQ ID NO: 1126512 - DNA, 25 bp, Homo sapien
ggactttctagacctgtcgctgatg

SEQ ID NO: 1126513 - DNA, 25 bp, Homo sapien
cctttggataatggactttctagac

SEQ ID NO: 1126514 - DNA, 25 bp, Homo sapien
taatggactttctagacctgtcgct

SEQ ID NO: 1126515 - DNA, 25 bp, Homo sapien
tagacctgtcgctgatgcaggctct

SEQ ID NO: 1126516 - DNA, 25 bp, Homo sapien
tctaagttgatttcaagaagacagt

SEQ ID NO: 1126517 - DNA, 25 bp, Homo sapien
aacattagtgaattaagatcttaaa

SEQ ID NO: 1126518 - DNA, 25 bp, Homo sapien
gatttcaagaagacagtatagaaaa

SEQ ID NO: 1126519 - DNA, 25 bp, Homo sapien
atgaaagaaattgttaccaagttgg

SEQ ID NO: 1126520 - DNA, 25 bp, Homo sapien
tgtagagcataatccaaatacatga

SEQ ID NO: 1126521 - DNA, 25 bp, Homo sapien
ctgtagagcataatccaaatacatg

SEQ ID NO: 1126522 - DNA, 25 bp, Homo sapien
ggtgcttgatatcctgtggacagct

SEQ ID NO: 1126523 - DNA, 25 bp, Homo sapien
actgtgaggtcagatcctgagcaaa

SEQ ID NO: 1126524 - DNA, 25 bp, Homo sapien
tttgcacacagtcagaaagtaaggt

SEQ ID NO: 1126525 - DNA, 25 bp, Homo sapien
tatcttccacaatgtaggaattttc

SEQ ID NO: 1126526 - DNA, 25 bp, Homo sapien
ggcagcaagggttgcatgttgagaa

SEQ ID NO: 1126527 - DNA, 25 bp, Homo sapien
caagggttgcatgttgagaagggaa

SEQ ID NO: 1126528 - DNA, 25 bp, Homo sapien
gcaaaggcagcaagggttgcatgtt

SEQ ID NO: 1126529 - DNA, 25 bp, Homo sapien
cgaaacatacacagctgcaaaggca

SEQ ID NO: 1126530 - DNA, 25 bp, Homo sapien
tcagaagcttagaggaatccgttaa

SEQ ID NO: 1126531 - DNA, 25 bp, Homo sapien
actgagttatccgtgttagcccgca

SEQ ID NO: 1126532 - DNA, 25 bp, Homo sapien
tccgttaatgtggaattgaagtaca

SEQ ID NO: 1126533 - DNA, 25 bp, Homo sapien
gacatcaactgggtggttcttatac

SEQ ID NO: 1126534 - DNA, 25 bp, Homo sapien
gaaacatactctcatcactgggcag

SEQ ID NO: 1126535 - DNA, 25 bp, Homo sapien
ggctcaggctctataacttgcaagg

SEQ ID NO: 1126536 - DNA, 25 bp, Homo sapien
gagctgctttgatcgagcggaatcc

SEQ ID NO: 1126537 - DNA, 25 bp, Homo sapien
gacgggactgaatggacactcttgg

SEQ ID NO: 1126538 - DNA, 25 bp, Homo sapien
tatgacttgcatgattcggggctgg

SEQ ID NO: 1126539 - DNA, 25 bp, Homo sapien
acttgcatgattcggggctggctgt

SEQ ID NO: 1126540 - DNA, 25 bp, Homo sapien
ctgcttggacatggctatgacttgc

SEQ ID NO: 1126541 - DNA, 25 bp, Homo sapien
catgattcggggctggctgttgctt

SEQ ID NO: 1126542 - DNA, 25 bp, Homo sapien
gaaatggacagcgtctctgagccaa

SEQ ID NO: 1126543 - DNA, 25 bp, Homo sapien
tgagtccctgttgagatcgttgagc

SEQ ID NO: 1126544 - DNA, 25 bp, Homo sapien
aatgatattgccctttctccgcagg

SEQ ID NO: 1126545 - DNA, 25 bp, Homo sapien
caaggttttatagcggatggagcca

SEQ ID NO: 1126546 - DNA, 25 bp, Homo sapien
caatctagcttggtgagacttccca

SEQ ID NO: 1126547 - DNA, 25 bp, Homo sapien
caggcaaaagccagtatgagcgtca

SEQ ID NO: 1126548 - DNA, 25 bp, Homo sapien
catatggtcttttgcgagtagccct

SEQ ID NO: 1126549 - DNA, 25 bp, Homo sapien
taatcagcaccacccgtattgagct

SEQ ID NO: 1126550 - DNA, 25 bp, Homo sapien
tatttctaatgtctgcaactttcat

SEQ ID NO: 1126551 - DNA, 25 bp, Homo sapien
atatttctaatgtctgcaactttca

SEQ ID NO: 1126552 - DNA, 25 bp, Homo sapien
catatttctaatgtctgcaactttc

SEQ ID NO: 1126553 - DNA, 25 bp, Homo sapien
gcattctttcctggataatgttcat

SEQ ID NO: 1126554 - DNA, 25 bp, Homo sapien
tcaaaagggaggtccacagtctcat

SEQ ID NO: 1126555 - DNA, 25 bp, Homo sapien
tcatctatttctgcattctttcctg

SEQ ID NO: 1126556 - DNA, 25 bp, Homo sapien
ctctcctcaaaagggaggtccacag

SEQ ID NO: 1126557 - DNA, 25 bp, Homo sapien
ggaagtagtgggagggcattcccaa

SEQ ID NO: 1126558 - DNA, 25 bp, Homo sapien
gtgggagggcattcccaaacagtct

SEQ ID NO: 1126559 - DNA, 25 bp, Homo sapien
agtagtgggagggcattcccaaaca

SEQ ID NO: 1126560 - DNA, 25 bp, Homo sapien
tagtgggagggcattcccaaacagt

SEQ ID NO: 1126561 - DNA, 25 bp, Homo sapien
catatactggtggtgcattaatagg

SEQ ID NO: 1126562 - DNA, 25 bp, Homo sapien
gatgagagtaccagcctcagtgggc

SEQ ID NO: 1126563 - DNA, 25 bp, Homo sapien
ttgggaggctgcgactgagcccagc

SEQ ID NO: 1126564 - DNA, 25 bp, Homo sapien
ggagacagggatgagagtaccagcc

SEQ ID NO: 1126565 - DNA, 25 bp, Homo sapien
tcagttgtccttgtgccatcgggct

SEQ ID NO: 1126566 - DNA, 25 bp, Homo sapien
ctcaagattattgggctcatggcct

SEQ ID NO: 1126567 - DNA, 25 bp, Homo sapien
tctggagagccctaagaagctgtgt

SEQ ID NO: 1126568 - DNA, 25 bp, Homo sapien
ccatcgggcttgacaactttggtcc

SEQ ID NO: 1126569 - DNA, 25 bp, Homo sapien
aatgctggcagtccatattggaggc

SEQ ID NO: 1126570 - DNA, 25 bp, Homo sapien
acaatgctggcagtccatattggag

SEQ ID NO: 1126571 - DNA, 25 bp, Homo sapien
tgctggcagtccatattggaggctt

SEQ ID NO: 1126572 - DNA, 25 bp, Homo sapien
ttaaacaatgctggcagtccatatt

SEQ ID NO: 1126573 - DNA, 25 bp, Homo sapien
accaaggaaggttggagaggcttca

SEQ ID NO: 1126574 - DNA, 25 bp, Homo sapien
tcaccaaggaaggttggagaggctt

SEQ ID NO: 1126575 - DNA, 25 bp, Homo sapien
ggctgctgggcccacaagtagaata

SEQ ID NO: 1126576 - DNA, 25 bp, Homo sapien
ccacaagtagaatagccctgccctg

SEQ ID NO: 1126577 - DNA, 25 bp, Homo sapien
gaccagccaactgaaagagagcact

SEQ ID NO: 1126578 - DNA, 25 bp, Homo sapien
tgtaacagtcctgaagctaaaggtg

SEQ ID NO: 1126579 - DNA, 25 bp, Homo sapien
gggtgaccatcgctcttgtagaaca

SEQ ID NO: 1126580 - DNA, 25 bp, Homo sapien
gagcactgatgttctgggtgaccat

SEQ ID NO: 1126581 - DNA, 25 bp, Homo sapien
tttttgtctttgaagttgccagaag

SEQ ID NO: 1126582 - DNA, 25 bp, Homo sapien
tgccagaagagggatgaagagtctg

SEQ ID NO: 1126583 - DNA, 25 bp, Homo sapien
aagagggatgaagagtctgtgaatt

SEQ ID NO: 1126584 - DNA, 25 bp, Homo sapien
tttgaagttgccagaagagggatga

SEQ ID NO: 1126585 - DNA, 25 bp, Homo sapien
tttagcatttgcaatccttcctgtg

SEQ ID NO: 1126586 - DNA, 25 bp, Homo sapien
aatccttcctgtgcgctggtcctgc

SEQ ID NO: 1126587 - DNA, 25 bp, Homo sapien
tgcaatccttcctgtgcgctggtcc

SEQ ID NO: 1126588 - DNA, 25 bp, Homo sapien
catttgcaatccttcctgtgcgctg

SEQ ID NO: 1126589 - DNA, 25 bp, Homo sapien
caggtgagtgtgctgtgcagatggg

SEQ ID NO: 1126590 - DNA, 25 bp, Homo sapien
gaaagctcatgtggccaatcttggc

SEQ ID NO: 1126591 - DNA, 25 bp, Homo sapien
tggcgtttctcattaggcatctctt

SEQ ID NO: 1126592 - DNA, 25 bp, Homo sapien
ttcccagagcctctctgtgaaagct

SEQ ID NO: 1126593 - DNA, 25 bp, Homo sapien
ccagtgtgtaagtgccagataaagc

SEQ ID NO: 1126594 - DNA, 25 bp, Homo sapien
ataaagccccttgattggtgagagc

SEQ ID NO: 1126595 - DNA, 25 bp, Homo sapien
ttgaaaacgttgtcctgccagtgtg

SEQ ID NO: 1126596 - DNA, 25 bp, Homo sapien
gagtgatattgacccacatcggcat

SEQ ID NO: 1126597 - DNA, 25 bp, Homo sapien
cccattgcaccccagatggctttgc

SEQ ID NO: 1126598 - DNA, 25 bp, Homo sapien
agagaggcattgccccattgcaccc

SEQ ID NO: 1126599 - DNA, 25 bp, Homo sapien
ggcattgccccattgcaccccagat

SEQ ID NO: 1126600 - DNA, 25 bp, Homo sapien
acttgtggatcagaggccttgagct

SEQ ID NO: 1126601 - DNA, 25 bp, Homo sapien
gagcatgttctctcacaaagggtcg

SEQ ID NO: 1126602 - DNA, 25 bp, Homo sapien
gacaggacaatgatgcagagtgcta

SEQ ID NO: 1126603 - DNA, 25 bp, Homo sapien
caaagggtcgctgcactggaaacag

SEQ ID NO: 1126604 - DNA, 25 bp, Homo sapien
tcccttggtcgtatagaggaagctc

SEQ ID NO: 1126605 - DNA, 25 bp, Homo sapien
ttgggctgaggtccgagtgtgtggt

SEQ ID NO: 1126606 - DNA, 25 bp, Homo sapien
aggtccgagtgtgtggtagacacct

SEQ ID NO: 1126607 - DNA, 25 bp, Homo sapien
atggaataactgagacataagctcc

SEQ ID NO: 1126608 - DNA, 25 bp, Homo sapien
cgagtgtgtggtagacacctgctgc

SEQ ID NO: 1126609 - DNA, 25 bp, Homo sapien
ctctagttctttcggagtcaacttt

SEQ ID NO: 1126610 - DNA, 25 bp, Homo sapien
tctttcggagtcaactttggatctt

SEQ ID NO: 1126611 - DNA, 25 bp, Homo sapien
tggatcttttgttggatccaagtag

SEQ ID NO: 1126612 - DNA, 25 bp, Homo sapien
cttttgttggatccaagtagtctca

SEQ ID NO: 1126613 - DNA, 25 bp, Homo sapien
ttacatacaatgtccagctcattcc

SEQ ID NO: 1126614 - DNA, 25 bp, Homo sapien
tcggactcagcacggaccactgaat

SEQ ID NO: 1126615 - DNA, 25 bp, Homo sapien
tgtgcttttccactttcggactcag

SEQ ID NO: 1126616 - DNA, 25 bp, Homo sapien
tgcaagcagcaacatgtgagagtat

SEQ ID NO: 1126617 - DNA, 25 bp, Homo sapien
acggccagctctgctatgtgctttt

SEQ ID NO: 1126618 - DNA, 25 bp, Homo sapien
ttgacttggatttctatggaatgca

SEQ ID NO: 1126619 - DNA, 25 bp, Homo sapien
ttctttcttggacgctgttcagaaa

SEQ ID NO: 1126620 - DNA, 25 bp, Homo sapien
cttttgttattgcttgacttggatt

SEQ ID NO: 1126621 - DNA, 25 bp, Homo sapien
ttttctttcttggacgctgttcaga

SEQ ID NO: 1126622 - DNA, 25 bp, Homo sapien
tatttagtgtggcttaagcaccaag

SEQ ID NO: 1126623 - DNA, 25 bp, Homo sapien
gtatttagtgtggcttaagcaccaa

SEQ ID NO: 1126624 - DNA, 25 bp, Homo sapien
atttagtgtggcttaagcaccaagt

SEQ ID NO: 1126625 - DNA, 25 bp, Homo sapien
gaaattcccgacttgtcaggagcgt

SEQ ID NO: 1126626 - DNA, 25 bp, Homo sapien
ggctgctggcatgagttgactgaca

SEQ ID NO: 1126627 - DNA, 25 bp, Homo sapien
tgacaagtttgaacggcagcggcac

SEQ ID NO: 1126628 - DNA, 25 bp, Homo sapien
cagatcaggccagacagacacatgt

SEQ ID NO: 1126629 - DNA, 25 bp, Homo sapien
tcttcccttcaccagctcagcttct

SEQ ID NO: 1126630 - DNA, 25 bp, Homo sapien
cccttcaccagctcagcttcttcca

SEQ ID NO: 1126631 - DNA, 25 bp, Homo sapien
tgtgatggcctggagtcttcccttc

SEQ ID NO: 1126632 - DNA, 25 bp, Homo sapien
ttcccttcaccagctcagcttcttc

SEQ ID NO: 1126633 - DNA, 25 bp, Homo sapien
gctgtaatgtaaaaggcccatgcca

SEQ ID NO: 1126634 - DNA, 25 bp, Homo sapien
tgtttttccacttgcgagggctcag

SEQ ID NO: 1126635 - DNA, 25 bp, Homo sapien
gcagagccgagttcctgtcccttaa

SEQ ID NO: 1126636 - DNA, 25 bp, Homo sapien
cattagaaatagtggagcctgtgac

SEQ ID NO: 1126637 - DNA, 25 bp, Homo sapien
gaactgagtctatgatcgcaagaca

SEQ ID NO: 1126638 - DNA, 25 bp, Homo sapien
tgggccacgttcactttcagacagt

SEQ ID NO: 1126639 - DNA, 25 bp, Homo sapien
tacggaatgttactcatcctaaggg

SEQ ID NO: 1126640 - DNA, 25 bp, Homo sapien
gtattttccaatgtcgctgtaggca

SEQ ID NO: 1126641 - DNA, 25 bp, Homo sapien
tcagtagaggagttagcaaagtagc

SEQ ID NO: 1126642 - DNA, 25 bp, Homo sapien
tggcaaagaagtgtggcgtaccaca

SEQ ID NO: 1126643 - DNA, 25 bp, Homo sapien
cctctctggaagaaacatgtaatct

SEQ ID NO: 1126644 - DNA, 25 bp, Homo sapien
cacatggtgtcctttatgggtgggc

SEQ ID NO: 1126645 - DNA, 25 bp, Homo sapien
gagttctgatcaacccttagcacca

SEQ ID NO: 1126646 - DNA, 25 bp, Homo sapien
tatagcttcagtggcaggagtcatg

SEQ ID NO: 1126647 - DNA, 25 bp, Homo sapien
taagggacattatagcaccaaaggt

SEQ ID NO: 1126648 - DNA, 25 bp, Homo sapien
gaagttaaaggcaaccagattctgg

SEQ ID NO: 1126649 - DNA, 25 bp, Homo sapien
tgtcttcctctattttcagacgctt

SEQ ID NO: 1126650 - DNA, 25 bp, Homo sapien
ttgtcttcctctattttcagacgct

SEQ ID NO: 1126651 - DNA, 25 bp, Homo sapien
tcttcctctattttcagacgcttct

SEQ ID NO: 1126652 - DNA, 25 bp, Homo sapien
ttcctctattttcagacgcttctgt

SEQ ID NO: 1126653 - DNA, 25 bp, Homo sapien
gatgtcaggaaacataaagatatgt

SEQ ID NO: 1126654 - DNA, 25 bp, Homo sapien
atgtcaggaaacataaagatatgtt

SEQ ID NO: 1126655 - DNA, 25 bp, Homo sapien
gattccatctagaagccatttctcc

SEQ ID NO: 1126656 - DNA, 25 bp, Homo sapien
cgctgctgattccatctagaagcca

SEQ ID NO: 1126657 - DNA, 25 bp, Homo sapien
tcctgttcttttccgctgctgattc

SEQ ID NO: 1126658 - DNA, 25 bp, Homo sapien
gaagccatttctccctcaaggcctt

SEQ ID NO: 1126659 - DNA, 25 bp, Homo sapien
tctagaacctggatctggtgctggt

SEQ ID NO: 1126660 - DNA, 25 bp, Homo sapien
tgttctagaacctggatctggtgct

SEQ ID NO: 1126661 - DNA, 25 bp, Homo sapien
tttgttctagaacctggatctggtg

SEQ ID NO: 1126662 - DNA, 25 bp, Homo sapien
ttctagaacctggatctggtgctgg

SEQ ID NO: 1126663 - DNA, 25 bp, Homo sapien
gaaatgaagtgaacgcctgtgacca

SEQ ID NO: 1126664 - DNA, 25 bp, Homo sapien
caagcattggttgtgggtgcccatc

SEQ ID NO: 1126665 - DNA, 25 bp, Homo sapien
tcacacctgtacatcgggaggccga

SEQ ID NO: 1126666 - DNA, 25 bp, Homo sapien
caatacttctgggagctcgtgtgct

SEQ ID NO: 1126667 - DNA, 25 bp, Homo sapien
cactgtgggtacttgtttaggagaa

SEQ ID NO: 1126668 - DNA, 25 bp, Homo sapien
cattgctactcagtgctaacaggaa

SEQ ID NO: 1126669 - DNA, 25 bp, Homo sapien
cctcgagcaggcacgtaagtcaagt

SEQ ID NO: 1126670 - DNA, 25 bp, Homo sapien
gagtggcaaatgtcaccctcgagca

SEQ ID NO: 1126671 - DNA, 25 bp, Homo sapien
aatggttcagtggtcgcagtaagcg

SEQ ID NO: 1126672 - DNA, 25 bp, Homo sapien
taaggtattaatcagggcacaaggc

SEQ ID NO: 1126673 - DNA, 25 bp, Homo sapien
tatgtgtgagtcagggtaccctctg

SEQ ID NO: 1126674 - DNA, 25 bp, Homo sapien
gacgttcaatataggcttcccctgg

SEQ ID NO: 1126675 - DNA, 25 bp, Homo sapien
tctctgctatgtggtattagatacg

SEQ ID NO: 1126676 - DNA, 25 bp, Homo sapien
tctcacccgtgtttgaggaaacatt

SEQ ID NO: 1126677 - DNA, 25 bp, Homo sapien
tttttcacgtagcatatctcacccg

SEQ ID NO: 1126678 - DNA, 25 bp, Homo sapien
taaggtacaattgacctgcacaggt

SEQ ID NO: 1126679 - DNA, 25 bp, Homo sapien
ggcaagttctcaataatgttcatgg

SEQ ID NO: 1126680 - DNA, 25 bp, Homo sapien
ggctaattagacttccctcagagaa

SEQ ID NO: 1126681 - DNA, 25 bp, Homo sapien
tcagaaagacctatgtgtgactcct

SEQ ID NO: 1126682 - DNA, 25 bp, Homo sapien
gaggaccctcagagtttattgcaat

SEQ ID NO: 1126683 - DNA, 25 bp, Homo sapien
catagaataaccaacaagaatcaga

SEQ ID NO: 1126684 - DNA, 25 bp, Homo sapien
taaattccaatcctaataaaacata

SEQ ID NO: 1126685 - DNA, 25 bp, Homo sapien
taaatggacgaagtgacatttgcct

SEQ ID NO: 1126686 - DNA, 25 bp, Homo sapien
gaatcagataaccttgggtggtcta

SEQ ID NO: 1126687 - DNA, 25 bp, Homo sapien
gcactgctcttgaggacccttttaa

SEQ ID NO: 1126688 - DNA, 25 bp, Homo sapien
tcccttaggaggtagcaaagcaaca

SEQ ID NO: 1126689 - DNA, 25 bp, Homo sapien
ctttgactgtatagccaagggcatc

SEQ ID NO: 1126690 - DNA, 25 bp, Homo sapien
gaaatagggcctctagataacctca

SEQ ID NO: 1126691 - DNA, 25 bp, Homo sapien
gaattctgcctagagtggtgagcaa

SEQ ID NO: 1126692 - DNA, 25 bp, Homo sapien
gagtcaaggtatccctgtattgccc

SEQ ID NO: 1126693 - DNA, 25 bp, Homo sapien
ccccactaaatcttgggagaacagg

SEQ ID NO: 1126694 - DNA, 25 bp, Homo sapien
ccagtttcttttgggactcacaggc

SEQ ID NO: 1126695 - DNA, 25 bp, Homo sapien
gaacggtctccttcaaagaatctgg

SEQ ID NO: 1126696 - DNA, 25 bp, Homo sapien
gaattacttgcgtttcagtagccca

SEQ ID NO: 1126697 - DNA, 25 bp, Homo sapien
tctaacaaggattgaagtccgggct

SEQ ID NO: 1126698 - DNA, 25 bp, Homo sapien
gactacacctaaagagagggtccaa

SEQ ID NO: 1126699 - DNA, 25 bp, Homo sapien
tgcaagacttaaattagggactcat

SEQ ID NO: 1126700 - DNA, 25 bp, Homo sapien
cctctccaattagccactatagaaa

SEQ ID NO: 1126701 - DNA, 25 bp, Homo sapien
tattcggccctgatttaaagcttaa

SEQ ID NO: 1126702 - DNA, 25 bp, Homo sapien
gatatttacttacagagtctgaact

SEQ ID NO: 1126703 - DNA, 25 bp, Homo sapien
agagacaaagctcctggtctgcttg

SEQ ID NO: 1126704 - DNA, 25 bp, Homo sapien
gagcccgatgacttcagctagtttc

SEQ ID NO: 1126705 - DNA, 25 bp, Homo sapien
tttcctggggcatagagacaaagct

SEQ ID NO: 1126706 - DNA, 25 bp, Homo sapien
gatgacttcagctagtttcttcctg

SEQ ID NO: 1126707 - DNA, 25 bp, Homo sapien
tctaagtgaaatggagtagcccctg

SEQ ID NO: 1126708 - DNA, 25 bp, Homo sapien
actatagagagcgaaggaagagcca

SEQ ID NO: 1126709 - DNA, 25 bp, Homo sapien
tagaagtgactgaactgtgactgcc

SEQ ID NO: 1126710 - DNA, 25 bp, Homo sapien
catcagggcctagctgtggaatcag

SEQ ID NO: 1126711 - DNA, 25 bp, Homo sapien
ctagactgttgcaagcattctgagc

SEQ ID NO: 1126712 - DNA, 25 bp, Homo sapien
gagctggtatcttggccagtgtaca

SEQ ID NO: 1126713 - DNA, 25 bp, Homo sapien
catttgaaactagactgttgcaagc

SEQ ID NO: 1126714 - DNA, 25 bp, Homo sapien
ccagtgtacagctgcgtgtcagatt

SEQ ID NO: 1126715 - DNA, 25 bp, Homo sapien
tgtaccgaaaggaatggtacatttg

SEQ ID NO: 1126716 - DNA, 25 bp, Homo sapien
agtttcctaagagttgggccatatt

SEQ ID NO: 1126717 - DNA, 25 bp, Homo sapien
tgcatattctaccattgaaaatgac

SEQ ID NO: 1126718 - DNA, 25 bp, Homo sapien
agagatgcagaaatggaccaaatat

SEQ ID NO: 1126719 - DNA, 25 bp, Homo sapien
caaatgcggagttctcaaatatgtc

SEQ ID NO: 1126720 - DNA, 25 bp, Homo sapien
tatatggaagatacctaatgcccga

SEQ ID NO: 1126721 - DNA, 25 bp, Homo sapien
taatgcccgactttgaacgattttc

SEQ ID NO: 1126722 - DNA, 25 bp, Homo sapien
tgcatgtaagtagccagacactttc

SEQ ID NO: 1126723 - DNA, 25 bp, Homo sapien
tgagatttgcagttcagctttttca

SEQ ID NO: 1126724 - DNA, 25 bp, Homo sapien
cgttgagatttgcagttcagctttt

SEQ ID NO: 1126725 - DNA, 25 bp, Homo sapien
aagatcttggatctctttctcaagc

SEQ ID NO: 1126726 - DNA, 25 bp, Homo sapien
tcagctttttcaagatcttggatct

SEQ ID NO: 1126727 - DNA, 25 bp, Homo sapien
gttgtccgctcaattgactttagtt

SEQ ID NO: 1126728 - DNA, 25 bp, Homo sapien
tgtccgctcaattgactttagtttc

SEQ ID NO: 1126729 - DNA, 25 bp, Homo sapien
tgtcttctgttgtccgctcaattga

SEQ ID NO: 1126730 - DNA, 25 bp, Homo sapien
tcttataatgtcttctgttgtccgc

SEQ ID NO: 1126731 - DNA, 25 bp, Homo sapien
tttcttctctttccactttcacaga

SEQ ID NO: 1126732 - DNA, 25 bp, Homo sapien
ctttcttctctttccactttcacag

SEQ ID NO: 1126733 - DNA, 25 bp, Homo sapien
tctttcttctctttccactttcaca

SEQ ID NO: 1126734 - DNA, 25 bp, Homo sapien
cttaacctagaaggtatgtaggact

SEQ ID NO: 1126735 - DNA, 25 bp, Homo sapien
aaggtcagggatattagcatagatg

SEQ ID NO: 1126736 - DNA, 25 bp, Homo sapien
ctccttccttaacctagaaggtatg

SEQ ID NO: 1126737 - DNA, 25 bp, Homo sapien
aggtatgtaggactttggaaggtca

SEQ ID NO: 1126738 - DNA, 25 bp, Homo sapien
gctgcactgtgattagaacttactg

SEQ ID NO: 1126739 - DNA, 25 bp, Homo sapien
tggtgccaggccatcggtgccattg

SEQ ID NO: 1126740 - DNA, 25 bp, Homo sapien
gttcctctacttcaactggtgccag

SEQ ID NO: 1126741 - DNA, 25 bp, Homo sapien
gggattggcatatacaggctcatga

SEQ ID NO: 1126742 - DNA, 25 bp, Homo sapien
atgacattcgattcttcccaaggag

SEQ ID NO: 1126743 - DNA, 25 bp, Homo sapien
tgaaagaccattgcccatattgtgt

SEQ ID NO: 1126744 - DNA, 25 bp, Homo sapien
tctgcttgttgaatcactgatcggg

SEQ ID NO: 1126745 - DNA, 25 bp, Homo sapien
tggagagggtgcatctttgtcctgc

SEQ ID NO: 1126746 - DNA, 25 bp, Homo sapien
gaaaatcattgtcaccggttctgta

SEQ ID NO: 1126747 - DNA, 25 bp, Homo sapien
gtatcatttatgtctggaggcaggg

SEQ ID NO: 1126748 - DNA, 25 bp, Homo sapien
tggtaggacggtttctctgcttctc

SEQ ID NO: 1126749 - DNA, 25 bp, Homo sapien
tttggctggctggtacacctgacta

SEQ ID NO: 1126750 - DNA, 25 bp, Homo sapien
tcacatgactgaacagcagtggcat

SEQ ID NO: 1126751 - DNA, 25 bp, Homo sapien
acagcagtggcatgccttgtcattt

SEQ ID NO: 1126752 - DNA, 25 bp, Homo sapien
atgactgaacagcagtggcatgcct

SEQ ID NO: 1126753 - DNA, 25 bp, Homo sapien
cagtggcatgccttgtcatttttat

SEQ ID NO: 1126754 - DNA, 25 bp, Homo sapien
tgataaccatatttataccaaggga

SEQ ID NO: 1126755 - DNA, 25 bp, Homo sapien
taactattatgcctaccagggctat

SEQ ID NO: 1126756 - DNA, 25 bp, Homo sapien
gatggcatgtgagggcatatgacac

SEQ ID NO: 1126757 - DNA, 25 bp, Homo sapien
gctcaacccacttggtgtttgtgaa

SEQ ID NO: 1126758 - DNA, 25 bp, Homo sapien
ggctgttgcaggttggcaatcagca

SEQ ID NO: 1126759 - DNA, 25 bp, Homo sapien
cagcaccagtagcatatgaactccc

SEQ ID NO: 1126760 - DNA, 25 bp, Homo sapien
ttatcccttggactctaatggctgt

SEQ ID NO: 1126761 - DNA, 25 bp, Homo sapien
caccacttcatcctggaatgccact

SEQ ID NO: 1126762 - DNA, 25 bp, Homo sapien
tagtagagcaaacagtacaagtgga

SEQ ID NO: 1126763 - DNA, 25 bp, Homo sapien
catgatcgtgtttgctttcagctca

SEQ ID NO: 1126764 - DNA, 25 bp, Homo sapien
tatggttaacttagggcagaagcag

SEQ ID NO: 1126765 - DNA, 25 bp, Homo sapien
cctttcccaaaggagctctggcctt

SEQ ID NO: 1126766 - DNA, 25 bp, Homo sapien
ttttcccagctttgccattctcatc

SEQ ID NO: 1126767 - DNA, 25 bp, Homo sapien
tttttcccagctttgccattctcat

SEQ ID NO: 1126768 - DNA, 25 bp, Homo sapien
cttttttcccagctttgccattctc

SEQ ID NO: 1126769 - DNA, 25 bp, Homo sapien
ttttttcccagctttgccattctca

SEQ ID NO: 1126770 - DNA, 25 bp, Homo sapien
gatgtttatataggtggtacaactc

SEQ ID NO: 1126771 - DNA, 25 bp, Homo sapien
gactactacttattcacatggctta

SEQ ID NO: 1126772 - DNA, 25 bp, Homo sapien
ccactgaatcgtgtcaagtaactgg

SEQ ID NO: 1126773 - DNA, 25 bp, Homo sapien
tttcccccactgaatcgtgtcaagt

SEQ ID NO: 1126774 - DNA, 25 bp, Homo sapien
tacaatgccagttaatatactatac

SEQ ID NO: 1126775 - DNA, 25 bp, Homo sapien
aaattacaatgccagttaatatact

SEQ ID NO: 1126776 - DNA, 25 bp, Homo sapien
tatttatttgtcagagttgaatact

SEQ ID NO: 1126777 - DNA, 25 bp, Homo sapien
ttgtcagagttgaatacttctgtga

SEQ ID NO: 1126778 - DNA, 25 bp, Homo sapien
caggaggatgtacttttattaaggc

SEQ ID NO: 1126779 - DNA, 25 bp, Homo sapien
aggaggatgtacttttattaaggca

SEQ ID NO: 1126780 - DNA, 25 bp, Homo sapien
tgcactggccggactatccaaactc

SEQ ID NO: 1126781 - DNA, 25 bp, Homo sapien
gaagtctctaccaaaccaactgaag

SEQ ID NO: 1126782 - DNA, 25 bp, Homo sapien
taagattcgaactcaagcttgccca

SEQ ID NO: 1126783 - DNA, 25 bp, Homo sapien
cattacgggatgcaccttttggata

SEQ ID NO: 1126784 - DNA, 25 bp, Homo sapien
gcacaaagaaggcataagtagatat

SEQ ID NO: 1126785 - DNA, 25 bp, Homo sapien
ctgcacaaagaaggcataagtagat

SEQ ID NO: 1126786 - DNA, 25 bp, Homo sapien
acaaagaaggcataagtagatatct

SEQ ID NO: 1126787 - DNA, 25 bp, Homo sapien
aaagaaggcataagtagatatcttg

SEQ ID NO: 1126788 - DNA, 25 bp, Homo sapien
tttttcttcttaggttctctgcgca

SEQ ID NO: 1126789 - DNA, 25 bp, Homo sapien
gtttttcttcttaggttctctgcgc

SEQ ID NO: 1126790 - DNA, 25 bp, Homo sapien
ttttcttcttaggttctctgcgcat

SEQ ID NO: 1126791 - DNA, 25 bp, Homo sapien
tgatcatagcataatttatccgcct

SEQ ID NO: 1126792 - DNA, 25 bp, Homo sapien
ttcctgatcatagcataatttatcc

SEQ ID NO: 1126793 - DNA, 25 bp, Homo sapien
ctgatcatagcataatttatccgcc

SEQ ID NO: 1126794 - DNA, 25 bp, Homo sapien
gctttctagacttgtagtcagcaac

SEQ ID NO: 1126795 - DNA, 25 bp, Homo sapien
accttttgcaccatcaagctttcta

SEQ ID NO: 1126796 - DNA, 25 bp, Homo sapien
aagctttctagacttgtagtcagca

SEQ ID NO: 1126797 - DNA, 25 bp, Homo sapien
ttgcaccatcaagctttctagactt

SEQ ID NO: 1126798 - DNA, 25 bp, Homo sapien
ttctgcttatgggtggttggtatcc

SEQ ID NO: 1126799 - DNA, 25 bp, Homo sapien
caaattgcaaatgcctagtcttcac

SEQ ID NO: 1126800 - DNA, 25 bp, Homo sapien
gcaatgttgccaaaaacaatgagca

SEQ ID NO: 1126801 - DNA, 25 bp, Homo sapien
ctgtaataaacactctgggaagttt

SEQ ID NO: 1126802 - DNA, 25 bp, Homo sapien
tatgtgggcttgctatatttcgagt

SEQ ID NO: 1126803 - DNA, 25 bp, Homo sapien
gtcttcaaatatgtgggcttgctat

SEQ ID NO: 1126804 - DNA, 25 bp, Homo sapien
cgagtgttgaggctaagatatttta

SEQ ID NO: 1126805 - DNA, 25 bp, Homo sapien
tcttgatgtgtttggtcttcaaata

SEQ ID NO: 1126806 - DNA, 25 bp, Homo sapien
ctacaaaggtgctgtggtactttaa

SEQ ID NO: 1126807 - DNA, 25 bp, Homo sapien
tgaactacaaaggtgctgtggtact

SEQ ID NO: 1126808 - DNA, 25 bp, Homo sapien
caaaggtgctgtggtactttaaaga

SEQ ID NO: 1126809 - DNA, 25 bp, Homo sapien
atattttgaactacaaaggtgctgt

SEQ ID NO: 1126810 - DNA, 25 bp, Homo sapien
gccttaagggtctgatttgaagcta

SEQ ID NO: 1126811 - DNA, 25 bp, Homo sapien
atcaaaacctcacaaagtaggccag

SEQ ID NO: 1126812 - DNA, 25 bp, Homo sapien
tgtgtcagccttaagggtctgattt

SEQ ID NO: 1126813 - DNA, 25 bp, Homo sapien
ggatagtttggtgatcaaaacctca

SEQ ID NO: 1126814 - DNA, 25 bp, Homo sapien
atcatttgacaccttctctgttgag

SEQ ID NO: 1126815 - DNA, 25 bp, Homo sapien
tttttgacagtctttttagggcatc

SEQ ID NO: 1126816 - DNA, 25 bp, Homo sapien
gaaggccttgctctctacctttaag

SEQ ID NO: 1126817 - DNA, 25 bp, Homo sapien
tttgttctgtacagctttcgaaggc

SEQ ID NO: 1126818 - DNA, 25 bp, Homo sapien
gatgggactcaggtaaatccttaga

SEQ ID NO: 1126819 - DNA, 25 bp, Homo sapien
gctgaactcccgatatattcctgca

SEQ ID NO: 1126820 - DNA, 25 bp, Homo sapien
cctgcatctttgattagcctcatag

SEQ ID NO: 1126821 - DNA, 25 bp, Homo sapien
ttagcctcatagaaagatgggactc

SEQ ID NO: 1126822 - DNA, 25 bp, Homo sapien
gacttagaccagaggcaatatttga

SEQ ID NO: 1126823 - DNA, 25 bp, Homo sapien
tggcatctcagcacaaagaaacctc

SEQ ID NO: 1126824 - DNA, 25 bp, Homo sapien
cagtgaggtgtagaagacttagacc

SEQ ID NO: 1126825 - DNA, 25 bp, Homo sapien
aaagaaacctccgttgttcagtgag

SEQ ID NO: 1126826 - DNA, 25 bp, Homo sapien
ctggaggggtgggattcttcagaga

SEQ ID NO: 1126827 - DNA, 25 bp, Homo sapien
gggtgggattcttcagagacaaaat

SEQ ID NO: 1126828 - DNA, 25 bp, Homo sapien
ggaggggtgggattcttcagagaca

SEQ ID NO: 1126829 - DNA, 25 bp, Homo sapien
aggggtgggattcttcagagacaaa

SEQ ID NO: 1126830 - DNA, 25 bp, Homo sapien
caaggcgaagtcttggactcctgct

SEQ ID NO: 1126831 - DNA, 25 bp, Homo sapien
tgggtcctctccagctggatatgat

SEQ ID NO: 1126832 - DNA, 25 bp, Homo sapien
agtggccaaggcgaagtcttggact

SEQ ID NO: 1126833 - DNA, 25 bp, Homo sapien
ttcctcgggagcctcaagaactggg

SEQ ID NO: 1126834 - DNA, 25 bp, Homo sapien
tattctgctcgagtaagtccacaga

SEQ ID NO: 1126835 - DNA, 25 bp, Homo sapien
gatattctgctcgagtaagtccaca

SEQ ID NO: 1126836 - DNA, 25 bp, Homo sapien
gagatattctgctcgagtaagtcca

SEQ ID NO: 1126837 - DNA, 25 bp, Homo sapien
atgagatattctgctcgagtaagtc

SEQ ID NO: 1126838 - DNA, 25 bp, Homo sapien
tgataaaaggctttggggatgttga

SEQ ID NO: 1126839 - DNA, 25 bp, Homo sapien
gggatgttgagactcccagcaggtc

SEQ ID NO: 1126840 - DNA, 25 bp, Homo sapien
ctctcccatggaagttatgggagtc

SEQ ID NO: 1126841 - DNA, 25 bp, Homo sapien
ctccctctcccatggaagttatggg

SEQ ID NO: 1126842 - DNA, 25 bp, Homo sapien
gcaagaagcagagtcaagcacacac

SEQ ID NO: 1126843 - DNA, 25 bp, Homo sapien
ggcaagaagcagagtcaagcacaca

SEQ ID NO: 1126844 - DNA, 25 bp, Homo sapien
tttgtttcttgaccacgaaatgctt

SEQ ID NO: 1126845 - DNA, 25 bp, Homo sapien
ttgaccacgaaatgcttaatcctga

SEQ ID NO: 1126846 - DNA, 25 bp, Homo sapien
tttcttgaccacgaaatgcttaatc

SEQ ID NO: 1126847 - DNA, 25 bp, Homo sapien
gaccacgaaatgcttaatcctgaaa

SEQ ID NO: 1126848 - DNA, 25 bp, Homo sapien
agaaggactggaagaatcgtgcttg

SEQ ID NO: 1126849 - DNA, 25 bp, Homo sapien
tggaagaatcgtgcttggccacttc

SEQ ID NO: 1126850 - DNA, 25 bp, Homo sapien
actggaagaatcgtgcttggccact

SEQ ID NO: 1126851 - DNA, 25 bp, Homo sapien
ggactggaagaatcgtgcttggcca

SEQ ID NO: 1126852 - DNA, 25 bp, Homo sapien
cgagggagttatacgtgcggcttct

SEQ ID NO: 1126853 - DNA, 25 bp, Homo sapien
tgggagcggaccgtacctctggccc

SEQ ID NO: 1126854 - DNA, 25 bp, Homo sapien
cccgcgactctggtgctacggtcgg

SEQ ID NO: 1126855 - DNA, 25 bp, Homo sapien
agagtctcagcgacttcgcctcgcg

SEQ ID NO: 1126856 - DNA, 25 bp, Homo sapien
aagagattagtctgctcaaagataa

SEQ ID NO: 1126857 - DNA, 25 bp, Homo sapien
cctctggaatagctgccgtagacag

SEQ ID NO: 1126858 - DNA, 25 bp, Homo sapien
attcgggtcgccagccaccaatggg

SEQ ID NO: 1126859 - DNA, 25 bp, Homo sapien
taacaggtgggcaatctccccattc

SEQ ID NO: 1126860 - DNA, 25 bp, Homo sapien
tgttttatgcctagcagagcaatga

SEQ ID NO: 1126861 - DNA, 25 bp, Homo sapien
tttgagcacaacgaataagaccgaa

SEQ ID NO: 1126862 - DNA, 25 bp, Homo sapien
gagactccgaatggcacttctgctt

SEQ ID NO: 1126863 - DNA, 25 bp, Homo sapien
aaagcaatacacttaggaaagcctg

SEQ ID NO: 1126864 - DNA, 25 bp, Homo sapien
taaaagaactccacagtcgaatgag

SEQ ID NO: 1126865 - DNA, 25 bp, Homo sapien
attaaaagaactccacagtcgaatg

SEQ ID NO: 1126866 - DNA, 25 bp, Homo sapien
aagaactccacagtcgaatgagtta

SEQ ID NO: 1126867 - DNA, 25 bp, Homo sapien
aactccacagtcgaatgagttaccc

SEQ ID NO: 1126868 - DNA, 25 bp, Homo sapien
cagtttctccatttcgttcagaagt

SEQ ID NO: 1126869 - DNA, 25 bp, Homo sapien
tctccatttcgttcagaagtaaaat

SEQ ID NO: 1126870 - DNA, 25 bp, Homo sapien
catttcgttcagaagtaaaattcga

SEQ ID NO: 1126871 - DNA, 25 bp, Homo sapien
cgttcagaagtaaaattcgaatctg

SEQ ID NO: 1126872 - DNA, 25 bp, Homo sapien
tcagaggccaaagagggagggttgc

SEQ ID NO: 1126873 - DNA, 25 bp, Homo sapien
agtactttcagaggccaaagaggga

SEQ ID NO: 1126874 - DNA, 25 bp, Homo sapien
ttcagaggccaaagagggagggttg

SEQ ID NO: 1126875 - DNA, 25 bp, Homo sapien
cccagtactttcagaggccaaagag

SEQ ID NO: 1126876 - DNA, 25 bp, Homo sapien
aaataaattaatgctcagaattggg

SEQ ID NO: 1126877 - DNA, 25 bp, Homo sapien
ataaataaattaatgctcagaattg

SEQ ID NO: 1126878 - DNA, 25 bp, Homo sapien
ataaattaatgctcagaattggggc

SEQ ID NO: 1126879 - DNA, 25 bp, Homo sapien
taaattaatgctcagaattggggcc

SEQ ID NO: 1126880 - DNA, 25 bp, Homo sapien
aaattaccacattgaaaaacagatg

SEQ ID NO: 1126881 - DNA, 25 bp, Homo sapien
aaacatcatagagctgtctgctctg

SEQ ID NO: 1126882 - DNA, 25 bp, Homo sapien
caaacctaatgctgttttggcacta

SEQ ID NO: 1126883 - DNA, 25 bp, Homo sapien
gaaacgcattcctattcacatagca

SEQ ID NO: 1126884 - DNA, 25 bp, Homo sapien
taaaaagcacatgttaataaactca

SEQ ID NO: 1126885 - DNA, 25 bp, Homo sapien
aaaaagcacatgttaataaactcat

SEQ ID NO: 1126886 - DNA, 25 bp, Homo sapien
ctaaataaaaagcacatgttaataa

SEQ ID NO: 1126887 - DNA, 25 bp, Homo sapien
aataaaaagcacatgttaataaact

SEQ ID NO: 1126888 - DNA, 25 bp, Homo sapien
tgtatacacggtaactgcttttccc

SEQ ID NO: 1126889 - DNA, 25 bp, Homo sapien
gattgttgcagattaagtttacagt

SEQ ID NO: 1126890 - DNA, 25 bp, Homo sapien
ccaatccagagaacggaatttttct

SEQ ID NO: 1126891 - DNA, 25 bp, Homo sapien
ggtaatttgtatacacggtaactgc

SEQ ID NO: 1126892 - DNA, 25 bp, Homo sapien
caagggtagcacatgattatcagca

SEQ ID NO: 1126893 - DNA, 25 bp, Homo sapien
tgctttcccattcatcaaaaggtcc

SEQ ID NO: 1126894 - DNA, 25 bp, Homo sapien
tatcagcaccaacacgtaaaatggg

SEQ ID NO: 1126895 - DNA, 25 bp, Homo sapien
aaatgtctgaagagtaacacagtcc

SEQ ID NO: 1126896 - DNA, 25 bp, Homo sapien
gacctagatagtccaagagtctgca

SEQ ID NO: 1126897 - DNA, 25 bp, Homo sapien
gcaagggagtagcatgacctagata

SEQ ID NO: 1126898 - DNA, 25 bp, Homo sapien
taatttttccactagctgtccaaca

SEQ ID NO: 1126899 - DNA, 25 bp, Homo sapien
tttaattctaactgattggcaaggg

SEQ ID NO: 1126900 - DNA, 25 bp, Homo sapien
cagtatgattgtagacaacatcagt

SEQ ID NO: 1126901 - DNA, 25 bp, Homo sapien
gattgtagacaacatcagtaataca

SEQ ID NO: 1126902 - DNA, 25 bp, Homo sapien
tatgattgtagacaacatcagtaat

SEQ ID NO: 1126903 - DNA, 25 bp, Homo sapien
ttgtagacaacatcagtaatacaaa

SEQ ID NO: 1126904 - DNA, 25 bp, Homo sapien
tagtactatagtaccagagctcctg

SEQ ID NO: 1126905 - DNA, 25 bp, Homo sapien
gacaaaaggatgagtcacattccag

SEQ ID NO: 1126906 - DNA, 25 bp, Homo sapien
ggtaccttccaagacctcaagtgga

SEQ ID NO: 1126907 - DNA, 25 bp, Homo sapien
cacattccaggtgggatagagcagg

SEQ ID NO: 1126908 - DNA, 25 bp, Homo sapien
ttttcaatcaaagcaggtattccct

SEQ ID NO: 1126909 - DNA, 25 bp, Homo sapien
ggagaaacgccaaagtgctctgtct

SEQ ID NO: 1126910 - DNA, 25 bp, Homo sapien
gacccaggcaggttttaagtgtgga

SEQ ID NO: 1126911 - DNA, 25 bp, Homo sapien
gattataggcacattctggatgttc

SEQ ID NO: 1126912 - DNA, 25 bp, Homo sapien
tcttctaaattgctcaaccgctttg

SEQ ID NO: 1126913 - DNA, 25 bp, Homo sapien
gctcaaccgctttgttgacatctac

SEQ ID NO: 1126914 - DNA, 25 bp, Homo sapien
aaccgctttgttgacatctacttgg

SEQ ID NO: 1126915 - DNA, 25 bp, Homo sapien
tgtaagaagtcttctaaattgctca

SEQ ID NO: 1126916 - DNA, 25 bp, Homo sapien
ttaaaagatcaagagcatactaggg

SEQ ID NO: 1126917 - DNA, 25 bp, Homo sapien
tattatggtggtacttcaaatcagt

SEQ ID NO: 1126918 - DNA, 25 bp, Homo sapien
tatgaaattggaagccatcagagat

SEQ ID NO: 1126919 - DNA, 25 bp, Homo sapien
tagaataaaagagacggatcagtgg

SEQ ID NO: 1126920 - DNA, 25 bp, Homo sapien
caatgttcatatctacagtacagcc

SEQ ID NO: 1126921 - DNA, 25 bp, Homo sapien
tacagccaaaccgtctgtattcagg

SEQ ID NO: 1126922 - DNA, 25 bp, Homo sapien
catgtggtatgaaagtcgttagtgc

SEQ ID NO: 1126923 - DNA, 25 bp, Homo sapien
caggatcttgaataatcgtaaggtg

SEQ ID NO: 1126924 - DNA, 25 bp, Homo sapien
taatgagtcgatgcttctctgaatt

SEQ ID NO: 1126925 - DNA, 25 bp, Homo sapien
gatagttaatgagtcgatgcttctc

SEQ ID NO: 1126926 - DNA, 25 bp, Homo sapien
ctccattcttttatgaaaccaatta

SEQ ID NO: 1126927 - DNA, 25 bp, Homo sapien
ccattcttttatgaaaccaattaca

SEQ ID NO: 1126928 - DNA, 25 bp, Homo sapien
atggccagccagtcgttcataaaac

SEQ ID NO: 1126929 - DNA, 25 bp, Homo sapien
tggccagccagtcgttcataaaaca

SEQ ID NO: 1126930 - DNA, 25 bp, Homo sapien
ggccagccagtcgttcataaaacac

SEQ ID NO: 1126931 - DNA, 25 bp, Homo sapien
actaaaggatgctttctagtgacag

SEQ ID NO: 1126932 - DNA, 25 bp, Homo sapien
tggtaactaaaggatgctttctagt

SEQ ID NO: 1126933 - DNA, 25 bp, Homo sapien
ctaaaggatgctttctagtgacagg

SEQ ID NO: 1126934 - DNA, 25 bp, Homo sapien
taactaaaggatgctttctagtgac

SEQ ID NO: 1126935 - DNA, 25 bp, Homo sapien
tctatctcttcaaatgggaaagtaa

SEQ ID NO: 1126936 - DNA, 25 bp, Homo sapien
atctcttcaaatgggaaagtaaaat

SEQ ID NO: 1126937 - DNA, 25 bp, Homo sapien
ggagaagtctatctcttcaaatggg

SEQ ID NO: 1126938 - DNA, 25 bp, Homo sapien
gagaagtctatctcttcaaatggga

SEQ ID NO: 1126939 - DNA, 25 bp, Homo sapien
tctcccattacccatccattgtgtg

SEQ ID NO: 1126940 - DNA, 25 bp, Homo sapien
caagctttatttggcagatgaatca

SEQ ID NO: 1126941 - DNA, 25 bp, Homo sapien
cattgtgtgccatcagaaaacaagc

SEQ ID NO: 1126942 - DNA, 25 bp, Homo sapien
tcagcaaagtttcgaagaggatcat

SEQ ID NO: 1126943 - DNA, 25 bp, Homo sapien
tcagctacgtgaagaggtgttgagt

SEQ ID NO: 1126944 - DNA, 25 bp, Homo sapien
tttttcatgtgtgcccagagataag

SEQ ID NO: 1126945 - DNA, 25 bp, Homo sapien
gcagttatcaagacgtactccctgg

SEQ ID NO: 1126946 - DNA, 25 bp, Homo sapien
gcgtaatttaacactgtctccccag

SEQ ID NO: 1126947 - DNA, 25 bp, Homo sapien
tcttcacttcctgtgaacagttcag

SEQ ID NO: 1126948 - DNA, 25 bp, Homo sapien
gtaacaaagacattgtccagatctt

SEQ ID NO: 1126949 - DNA, 25 bp, Homo sapien
aacagttcagctactacatataaat

SEQ ID NO: 1126950 - DNA, 25 bp, Homo sapien
ggaactaatgcccagtctagtaaca

SEQ ID NO: 1126951 - DNA, 25 bp, Homo sapien
tgactattatatgcactcattgcct

SEQ ID NO: 1126952 - DNA, 25 bp, Homo sapien
ccataaacagggcatgtgcaatagc

SEQ ID NO: 1126953 - DNA, 25 bp, Homo sapien
tccatatcggtaaactaatctgccc

SEQ ID NO: 1126954 - DNA, 25 bp, Homo sapien
caataggacactcattatcatgcgt

SEQ ID NO: 1126955 - DNA, 25 bp, Homo sapien
cactagcacaacatgccatagaaac

SEQ ID NO: 1126956 - DNA, 25 bp, Homo sapien
ctcttgtacttccactagcacaaca

SEQ ID NO: 1126957 - DNA, 25 bp, Homo sapien
caattgtagtacttggaagagcatc

SEQ ID NO: 1126958 - DNA, 25 bp, Homo sapien
catagaaacaattgtagtacttgga

SEQ ID NO: 1126959 - DNA, 25 bp, Homo sapien
tcaggattccacttagtgtaaaacc

SEQ ID NO: 1126960 - DNA, 25 bp, Homo sapien
ttcaggattccacttagtgtaaaac

SEQ ID NO: 1126961 - DNA, 25 bp, Homo sapien
caggattccacttagtgtaaaaccg

SEQ ID NO: 1126962 - DNA, 25 bp, Homo sapien
ggctccaagctcctgatgaagttta

SEQ ID NO: 1126963 - DNA, 25 bp, Homo sapien
ccaagctcctgatgaagtttactga

SEQ ID NO: 1126964 - DNA, 25 bp, Homo sapien
tccaagctcctgatgaagtttactg

SEQ ID NO: 1126965 - DNA, 25 bp, Homo sapien
aagctcctgatgaagtttactgata

SEQ ID NO: 1126966 - DNA, 25 bp, Homo sapien
ttagctctcaaactggaaagactta

SEQ ID NO: 1126967 - DNA, 25 bp, Homo sapien
agattagctctcaaactggaaagac

SEQ ID NO: 1126968 - DNA, 25 bp, Homo sapien
ctagattagctctcaaactggaaag

SEQ ID NO: 1126969 - DNA, 25 bp, Homo sapien
agctctcaaactggaaagacttact

SEQ ID NO: 1126970 - DNA, 25 bp, Homo sapien
taggtgagtgtcttgttactgccac

SEQ ID NO: 1126971 - DNA, 25 bp, Homo sapien
gttctagatacagccacaacagact

SEQ ID NO: 1126972 - DNA, 25 bp, Homo sapien
cagggatgcacatttgaggcacttc

SEQ ID NO: 1126973 - DNA, 25 bp, Homo sapien
tgaagtcttgggattcctgaaagca

SEQ ID NO: 1126974 - DNA, 25 bp, Homo sapien
tctttttctcaagtacgtccacagt

SEQ ID NO: 1126975 - DNA, 25 bp, Homo sapien
gatatataaccataacattacagta

SEQ ID NO: 1126976 - DNA, 25 bp, Homo sapien
tacgtccacagtagcactgtgttat

SEQ ID NO: 1126977 - DNA, 25 bp, Homo sapien
tacagtaacaatttttagattgcat

SEQ ID NO: 1126978 - DNA, 25 bp, Homo sapien
tgctacatgttcagaagaatcactg

SEQ ID NO: 1126979 - DNA, 25 bp, Homo sapien
gaccttgaaagatccagacaattcg

SEQ ID NO: 1126980 - DNA, 25 bp, Homo sapien
tcactgaacaaaggaggtgcaactt

SEQ ID NO: 1126981 - DNA, 25 bp, Homo sapien
tgaaatagtggactgacatagggct

SEQ ID NO: 1126982 - DNA, 25 bp, Homo sapien
taatttctactgtgatatctggtgt

SEQ ID NO: 1126983 - DNA, 25 bp, Homo sapien
ctagcttcaagaactacttcttcaa

SEQ ID NO: 1126984 - DNA, 25 bp, Homo sapien
ttctcatccttcctataaggtttcg

SEQ ID NO: 1126985 - DNA, 25 bp, Homo sapien
cctataaggtttcgtgtttctctca

SEQ ID NO: 1126986 - DNA, 25 bp, Homo sapien
attgggcccttttgtggcaactcca

SEQ ID NO: 1126987 - DNA, 25 bp, Homo sapien
tttcttgaatatattcattgggccc

SEQ ID NO: 1126988 - DNA, 25 bp, Homo sapien
tcttgaatatattcattgggccctt

SEQ ID NO: 1126989 - DNA, 25 bp, Homo sapien
ttcattgggcccttttgtggcaact

SEQ ID NO: 1126990 - DNA, 25 bp, Homo sapien
tttttaatataggatctgcattgtc

SEQ ID NO: 1126991 - DNA, 25 bp, Homo sapien
gatttcgaagaattccaacagcgac

SEQ ID NO: 1126992 - DNA, 25 bp, Homo sapien
gcattgtcaacagctaggctgccag

SEQ ID NO: 1126993 - DNA, 25 bp, Homo sapien
caacagcgacttgtgcatgtggatc

SEQ ID NO: 1126994 - DNA, 25 bp, Homo sapien
ggtatgtcatagcaccctccaccat

SEQ ID NO: 1126995 - DNA, 25 bp, Homo sapien
tctgattcacatcggtaaaggatct

SEQ ID NO: 1126996 - DNA, 25 bp, Homo sapien
cttgaagacctgcatatttaagggc

SEQ ID NO: 1126997 - DNA, 25 bp, Homo sapien
taagggctgaccagtttggtatgtc

SEQ ID NO: 1126998 - DNA, 25 bp, Homo sapien
ctgacttcatttagactaaatttat

SEQ ID NO: 1126999 - DNA, 25 bp, Homo sapien
gaattgcatgaattttactaggtat

SEQ ID NO: 1127000 - DNA, 25 bp, Homo sapien
tattatttcaatgatgctaccttaa

SEQ ID NO: 1127001 - DNA, 25 bp, Homo sapien
gaagcattagaatttcccagatttt

SEQ ID NO: 1127002 - DNA, 25 bp, Homo sapien
catagtcaatcatccaatctccaga

SEQ ID NO: 1127003 - DNA, 25 bp, Homo sapien
atttctgccaatacagacattaaac

SEQ ID NO: 1127004 - DNA, 25 bp, Homo sapien
tcagcaatagttcctgatcgtgaaa

SEQ ID NO: 1127005 - DNA, 25 bp, Homo sapien
taagccggttactgacatagtcaat

SEQ ID NO: 1127006 - DNA, 25 bp, Homo sapien
gaagaacatagcctgcaaccattta

SEQ ID NO: 1127007 - DNA, 25 bp, Homo sapien
gcatcaaagtaacatgggataaggt

SEQ ID NO: 1127008 - DNA, 25 bp, Homo sapien
ctgtatccagaagagtggtatatgc

SEQ ID NO: 1127009 - DNA, 25 bp, Homo sapien
aaggtaacgtgggatctgcttcagg

SEQ ID NO: 1127010 - DNA, 25 bp, Homo sapien
cacaaaggttgaaccattctgaaca

SEQ ID NO: 1127011 - DNA, 25 bp, Homo sapien
cagttgaactgaacccaatgaaagg

SEQ ID NO: 1127012 - DNA, 25 bp, Homo sapien
ctataaggtacatccattagggcag

SEQ ID NO: 1127013 - DNA, 25 bp, Homo sapien
aagggaattttcctactccacacag

SEQ ID NO: 1127014 - DNA, 25 bp, Homo sapien
tgaatttgttacttgattcaggttt

SEQ ID NO: 1127015 - DNA, 25 bp, Homo sapien
ttgaatttgttacttgattcaggtt

SEQ ID NO: 1127016 - DNA, 25 bp, Homo sapien
taatcagcagtatacctctaagtgc

SEQ ID NO: 1127017 - DNA, 25 bp, Homo sapien
tggcttctacatagcgtccagtaat

SEQ ID NO: 1127018 - DNA, 25 bp, Homo sapien
tgcaataaaagtatcccttccccag

SEQ ID NO: 1127019 - DNA, 25 bp, Homo sapien
tccccagcagcggaaaataccagaa

SEQ ID NO: 1127020 - DNA, 25 bp, Homo sapien
tagctaatgctaaagataacctgac

SEQ ID NO: 1127021 - DNA, 25 bp, Homo sapien
ctcagacaaagaactagcaatgcct

SEQ ID NO: 1127022 - DNA, 25 bp, Homo sapien
tcaagacttctacaagactcagaca

SEQ ID NO: 1127023 - DNA, 25 bp, Homo sapien
taacctgacttgtaatatgaaggac

SEQ ID NO: 1127024 - DNA, 25 bp, Homo sapien
gaatgagaccatgcctcagggtacc

SEQ ID NO: 1127025 - DNA, 25 bp, Homo sapien
tcagggtacccgcaaatgctaaaat

SEQ ID NO: 1127026 - DNA, 25 bp, Homo sapien
cacccagtagattaggaatgagacc

SEQ ID NO: 1127027 - DNA, 25 bp, Homo sapien
taatcctggatacactgcagccacc

SEQ ID NO: 1127028 - DNA, 25 bp, Homo sapien
tgtatgccctgcatgtgtttttgca

SEQ ID NO: 1127029 - DNA, 25 bp, Homo sapien
gtttttgcattgcttcctgtatgac

SEQ ID NO: 1127030 - DNA, 25 bp, Homo sapien
tccttcatgtttcgatctatctggg

SEQ ID NO: 1127031 - DNA, 25 bp, Homo sapien
cagcattcctttctcggaactgtat

SEQ ID NO: 1127032 - DNA, 25 bp, Homo sapien
ccatccatgtgccacaattgaaacg

SEQ ID NO: 1127033 - DNA, 25 bp, Homo sapien
tcaactcctgcagttatattaaaac

SEQ ID NO: 1127034 - DNA, 25 bp, Homo sapien
tcatcaactcctgcagttatattaa

SEQ ID NO: 1127035 - DNA, 25 bp, Homo sapien
attgaaacgatttcctccataaaca

SEQ ID NO: 1127036 - DNA, 25 bp, Homo sapien
cacgagcacttacagaaaagaacag

SEQ ID NO: 1127037 - DNA, 25 bp, Homo sapien
gataacttatatcaacaggattgtg

SEQ ID NO: 1127038 - DNA, 25 bp, Homo sapien
tgtagagaatcaacccacgagcact

SEQ ID NO: 1127039 - DNA, 25 bp, Homo sapien
gattccacaagtaagtgctttctta

SEQ ID NO: 1127040 - DNA, 25 bp, Homo sapien
ttactcaggcccacaatttccacag

SEQ ID NO: 1127041 - DNA, 25 bp, Homo sapien
attccagcaaccagcgaacagcaga

SEQ ID NO: 1127042 - DNA, 25 bp, Homo sapien
gcgaacagcagatttactcaggccc

SEQ ID NO: 1127043 - DNA, 25 bp, Homo sapien
ggataattccagcaaccagcgaaca

SEQ ID NO: 1127044 - DNA, 25 bp, Homo sapien
gtatatgccacgtttgtgaaccaga

SEQ ID NO: 1127045 - DNA, 25 bp, Homo sapien
gggtcttcggaaacatgaaatagct

SEQ ID NO: 1127046 - DNA, 25 bp, Homo sapien
ccattgctatggtaaaattaggcct

SEQ ID NO: 1127047 - DNA, 25 bp, Homo sapien
tcatttaaatctgaagggtcttcgg

SEQ ID NO: 1127048 - DNA, 25 bp, Homo sapien
aagttgccacagctacactgaaggc

SEQ ID NO: 1127049 - DNA, 25 bp, Homo sapien
aaaggaagttgccacagctacactg

SEQ ID NO: 1127050 - DNA, 25 bp, Homo sapien
aaggaagttgccacagctacactga

SEQ ID NO: 1127051 - DNA, 25 bp, Homo sapien
ttgccacagctacactgaaggcaga

SEQ ID NO: 1127052 - DNA, 25 bp, Homo sapien
tcatgccaaggggaccaagcaattt

SEQ ID NO: 1127053 - DNA, 25 bp, Homo sapien
tttctgtagtaaagagctcaggggc

SEQ ID NO: 1127054 - DNA, 25 bp, Homo sapien
aagttttcatgccaaggggaccaag

SEQ ID NO: 1127055 - DNA, 25 bp, Homo sapien
tctggatctaaagttttcatgccaa

SEQ ID NO: 1127056 - DNA, 25 bp, Homo sapien
tacaggtgtacacaatctctcccaa

SEQ ID NO: 1127057 - DNA, 25 bp, Homo sapien
ggtgtacacaatctctcccaactaa

SEQ ID NO: 1127058 - DNA, 25 bp, Homo sapien
tgtacacaatctctcccaactaatt

SEQ ID NO: 1127059 - DNA, 25 bp, Homo sapien
aaaaaattatggttgatgtcaatgt

SEQ ID NO: 1127060 - DNA, 25 bp, Homo sapien
caagattgtagttgtcattgtctaa

SEQ ID NO: 1127061 - DNA, 25 bp, Homo sapien
acctttagcaagattgtagttgtca

SEQ ID NO: 1127062 - DNA, 25 bp, Homo sapien
tgtctaatgcattgtcataaattcc

SEQ ID NO: 1127063 - DNA, 25 bp, Homo sapien
tcattgtctaatgcattgtcataaa

SEQ ID NO: 1127064 - DNA, 25 bp, Homo sapien
aaaatacccaataggccacagccac

SEQ ID NO: 1127065 - DNA, 25 bp, Homo sapien
cgaagaaaatacccaataggccaca

SEQ ID NO: 1127066 - DNA, 25 bp, Homo sapien
aatacccaataggccacagccactc

SEQ ID NO: 1127067 - DNA, 25 bp, Homo sapien
aaatacccaataggccacagccact

SEQ ID NO: 1127068 - DNA, 25 bp, Homo sapien
ttaaccaaaactatagtctttgcag

SEQ ID NO: 1127069 - DNA, 25 bp, Homo sapien
caaaactatagtctttgcagtagtc

SEQ ID NO: 1127070 - DNA, 25 bp, Homo sapien
ttgcagtagtctccgggcccatcaa

SEQ ID NO: 1127071 - DNA, 25 bp, Homo sapien
tatagtctttgcagtagtctccggg

SEQ ID NO: 1127072 - DNA, 25 bp, Homo sapien
cactgagaaatagcttggaactggt

SEQ ID NO: 1127073 - DNA, 25 bp, Homo sapien
cccaatgtgggaagtaggttattca

SEQ ID NO: 1127074 - DNA, 25 bp, Homo sapien
ccaggagggctccacacatagaggt

SEQ ID NO: 1127075 - DNA, 25 bp, Homo sapien
caagaggtatgaagagggagtccac

SEQ ID NO: 1127076 - DNA, 25 bp, Homo sapien
ttctcattggtcagttctggaagtc

SEQ ID NO: 1127077 - DNA, 25 bp, Homo sapien
cataaagtgtctcaagaatagtagc

SEQ ID NO: 1127078 - DNA, 25 bp, Homo sapien
gaaaggacagtactgggcattctca

SEQ ID NO: 1127079 - DNA, 25 bp, Homo sapien
gaatagtagcaattgaccaggcttg

SEQ ID NO: 1127080 - DNA, 25 bp, Homo sapien
caacgtgggtatctgccttactaga

SEQ ID NO: 1127081 - DNA, 25 bp, Homo sapien
gacatttgcccactagacacagtag

SEQ ID NO: 1127082 - DNA, 25 bp, Homo sapien
tccttttacccgcacagtttagaga

SEQ ID NO: 1127083 - DNA, 25 bp, Homo sapien
ttagtgaaaaaccaaggcatagtcc

SEQ ID NO: 1127084 - DNA, 25 bp, Homo sapien
attgccttttctttctctcattctc

SEQ ID NO: 1127085 - DNA, 25 bp, Homo sapien
caggcaccagtacactgccattcat

SEQ ID NO: 1127086 - DNA, 25 bp, Homo sapien
tgccttttctttctctcattctctt

SEQ ID NO: 1127087 - DNA, 25 bp, Homo sapien
agtacactgccattcattgcctttt

SEQ ID NO: 1127088 - DNA, 25 bp, Homo sapien
ttattataagggtctgaaatgactc

SEQ ID NO: 1127089 - DNA, 25 bp, Homo sapien
tcttgtagtattgatctcttcttgg

SEQ ID NO: 1127090 - DNA, 25 bp, Homo sapien
ggtcaagttgactaccattgaatga

SEQ ID NO: 1127091 - DNA, 25 bp, Homo sapien
gaaatgactcaacatcaaaatacca

SEQ ID NO: 1127092 - DNA, 25 bp, Homo sapien
actggattggttaccctcagattta

SEQ ID NO: 1127093 - DNA, 25 bp, Homo sapien
gctattactttaatacagcttttca

SEQ ID NO: 1127094 - DNA, 25 bp, Homo sapien
ctggattggttaccctcagatttaa

SEQ ID NO: 1127095 - DNA, 25 bp, Homo sapien
ctgaagctattactttaatacagct

SEQ ID NO: 1127096 - DNA, 25 bp, Homo sapien
tggactaatacaggtgccatgtact

SEQ ID NO: 1127097 - DNA, 25 bp, Homo sapien
actaatacaggtgccatgtactgca

SEQ ID NO: 1127098 - DNA, 25 bp, Homo sapien
gactaatacaggtgccatgtactgc

SEQ ID NO: 1127099 - DNA, 25 bp, Homo sapien
aatggactaatacaggtgccatgta

SEQ ID NO: 1127100 - DNA, 25 bp, Homo sapien
gcagagttatgagggaccaacccct

SEQ ID NO: 1127101 - DNA, 25 bp, Homo sapien
cccagaggattgcagagttatgagg

SEQ ID NO: 1127102 - DNA, 25 bp, Homo sapien
ttgcagagttatgagggaccaaccc

SEQ ID NO: 1127103 - DNA, 25 bp, Homo sapien
aggattgcagagttatgagggacca

SEQ ID NO: 1127104 - DNA, 25 bp, Homo sapien
cgtaccaccaatgggcctagtgtca

SEQ ID NO: 1127105 - DNA, 25 bp, Homo sapien
gccgtaccaccaatgggcctagtgt

SEQ ID NO: 1127106 - DNA, 25 bp, Homo sapien
aagccgtaccaccaatgggcctagt

SEQ ID NO: 1127107 - DNA, 25 bp, Homo sapien
caaagccgtaccaccaatgggccta

SEQ ID NO: 1127108 - DNA, 25 bp, Homo sapien
gccaaccaaccagtggtctgcaaga

SEQ ID NO: 1127109 - DNA, 25 bp, Homo sapien
aaccagtggtctgcaagaaggcttg

SEQ ID NO: 1127110 - DNA, 25 bp, Homo sapien
ccagattagctatggcaaaggctgc

SEQ ID NO: 1127111 - DNA, 25 bp, Homo sapien
aaaacaaccagattagctatggcaa

SEQ ID NO: 1127112 - DNA, 25 bp, Homo sapien
ttgaaagcaaacgaaccctctccta

SEQ ID NO: 1127113 - DNA, 25 bp, Homo sapien
acgaaccctctcctaaaagtgactg

SEQ ID NO: 1127114 - DNA, 25 bp, Homo sapien
gaaccctctcctaaaagtgactgtc

SEQ ID NO: 1127115 - DNA, 25 bp, Homo sapien
gaggaacggggagatggattttgaa

SEQ ID NO: 1127116 - DNA, 25 bp, Homo sapien
tgacactcgtcgagggcctctgcgg

SEQ ID NO: 1127117 - DNA, 25 bp, Homo sapien
gcagagggtgccaaggtgtccactg

SEQ ID NO: 1127118 - DNA, 25 bp, Homo sapien
aaggtgtccactgcgtaaggaaggg

SEQ ID NO: 1127119 - DNA, 25 bp, Homo sapien
gagcgcgaaacagatggagtgacac

SEQ ID NO: 1127120 - DNA, 25 bp, Homo sapien
ctgcttcaccgtcgcgtggaggcct

SEQ ID NO: 1127121 - DNA, 25 bp, Homo sapien
gggcactgctttctgctacacctct

SEQ ID NO: 1127122 - DNA, 25 bp, Homo sapien
cctggggcactgctttctgctacac

SEQ ID NO: 1127123 - DNA, 25 bp, Homo sapien
ctggttcctgcttcaccgtcgcgtg

SEQ ID NO: 1127124 - DNA, 25 bp, Homo sapien
ggcagccccagctcggcacttggca

SEQ ID NO: 1127125 - DNA, 25 bp, Homo sapien
gccccagctcggcacttggcagctc

SEQ ID NO: 1127126 - DNA, 25 bp, Homo sapien
cagctcggcacttggcagctctgtc

SEQ ID NO: 1127127 - DNA, 25 bp, Homo sapien
tggcagccccagctcggcacttggc

SEQ ID NO: 1127128 - DNA, 25 bp, Homo sapien
ctggcaaatgccgttcccggctcgg

SEQ ID NO: 1127129 - DNA, 25 bp, Homo sapien
ctctggcaaatgccgttcccggctc

SEQ ID NO: 1127130 - DNA, 25 bp, Homo sapien
tctggcaaatgccgttcccggctcg

SEQ ID NO: 1127131 - DNA, 25 bp, Homo sapien
cgtagccaccgccagctcggtgcag

SEQ ID NO: 1127132 - DNA, 25 bp, Homo sapien
tgccgagtccgctgggtcctacgcg

SEQ ID NO: 1127133 - DNA, 25 bp, Homo sapien
gagtccgctgggtcctacgcgaccg

SEQ ID NO: 1127134 - DNA, 25 bp, Homo sapien
tgcagcccaggcgtttccgggttcc

SEQ ID NO: 1127135 - DNA, 25 bp, Homo sapien
gacttcacatcagccccctcgcatg

SEQ ID NO: 1127136 - DNA, 25 bp, Homo sapien
cccctccccaggtgcgctgaggact

SEQ ID NO: 1127137 - DNA, 25 bp, Homo sapien
tccccttcacccctacagacttcac

SEQ ID NO: 1127138 - DNA, 25 bp, Homo sapien
tcaggtcttcgataccgtccccttc

SEQ ID NO: 1127139 - DNA, 25 bp, Homo sapien
tcaggcaatctggatagagaagcca

SEQ ID NO: 1127140 - DNA, 25 bp, Homo sapien
aagctatttcagttacccagacagg

SEQ ID NO: 1127141 - DNA, 25 bp, Homo sapien
tgtaacttatccaatcactcgagca

SEQ ID NO: 1127142 - DNA, 25 bp, Homo sapien
tagaaagagttctggtcaggcaatc

SEQ ID NO: 1127143 - DNA, 25 bp, Homo sapien
agattgcgcctctgtactccagcca

SEQ ID NO: 1127144 - DNA, 25 bp, Homo sapien
tgcgcctctgtactccagccaaggt

SEQ ID NO: 1127145 - DNA, 25 bp, Homo sapien
attgcgcctctgtactccagccaag

SEQ ID NO: 1127146 - DNA, 25 bp, Homo sapien
gagattgcgcctctgtactccagcc

SEQ ID NO: 1127147 - DNA, 25 bp, Homo sapien
cgcgatgttcgtcaggctgttctca

SEQ ID NO: 1127148 - DNA, 25 bp, Homo sapien
caggcctactgcactccttcttgtg

SEQ ID NO: 1127149 - DNA, 25 bp, Homo sapien
gggtaatcaagaacaatgtttagct

SEQ ID NO: 1127150 - DNA, 25 bp, Homo sapien
tatggatttatggtctgacaaactg

SEQ ID NO: 1127151 - DNA, 25 bp, Homo sapien
tcttctccataacgttcgaacttta

SEQ ID NO: 1127152 - DNA, 25 bp, Homo sapien
cataacgttcgaactttagtatatg

SEQ ID NO: 1127153 - DNA, 25 bp, Homo sapien
tctccataacgttcgaactttagta

SEQ ID NO: 1127154 - DNA, 25 bp, Homo sapien
ctaatcttctccataacgttcgaac

SEQ ID NO: 1127155 - DNA, 25 bp, Homo sapien
aaatatgaagacatatataggttaa

SEQ ID NO: 1127156 - DNA, 25 bp, Homo sapien
atatgaagacatatataggttaaaa

SEQ ID NO: 1127157 - DNA, 25 bp, Homo sapien
aatatgaagacatatataggttaaa

SEQ ID NO: 1127158 - DNA, 25 bp, Homo sapien
aaggcctgagaaggcaagagtcttt

SEQ ID NO: 1127159 - DNA, 25 bp, Homo sapien
tttctctaaccaaaggcctgagaag

SEQ ID NO: 1127160 - DNA, 25 bp, Homo sapien
caaaggcctgagaaggcaagagtct

SEQ ID NO: 1127161 - DNA, 25 bp, Homo sapien
accaaaggcctgagaaggcaagagt

SEQ ID NO: 1127162 - DNA, 25 bp, Homo sapien
taacgcattgttagaaccaaactgg

SEQ ID NO: 1127163 - DNA, 25 bp, Homo sapien
aatgcaggccattatcttcaaaagt

SEQ ID NO: 1127164 - DNA, 25 bp, Homo sapien
gatagataacgaggtccttcttctt

SEQ ID NO: 1127165 - DNA, 25 bp, Homo sapien
ctgctgtagaagatagataacgagg

SEQ ID NO: 1127166 - DNA, 25 bp, Homo sapien
gctgcatctagatttgatagtgcca

SEQ ID NO: 1127167 - DNA, 25 bp, Homo sapien
atagcaagtttaagtgtttccatag

SEQ ID NO: 1127168 - DNA, 25 bp, Homo sapien
tctgaagagtatagatccctgatgg

SEQ ID NO: 1127169 - DNA, 25 bp, Homo sapien
tttcatcatgtagtactcgattcag

SEQ ID NO: 1127170 - DNA, 25 bp, Homo sapien
aaagcaactcctgtcatcaaaatta

SEQ ID NO: 1127171 - DNA, 25 bp, Homo sapien
tcaaaattactagggacagccactg

SEQ ID NO: 1127172 - DNA, 25 bp, Homo sapien
ttttttactaagcatagacacagaa

SEQ ID NO: 1127173 - DNA, 25 bp, Homo sapien
gacagccactggtatacacccaatt

SEQ ID NO: 1127174 - DNA, 25 bp, Homo sapien
tagtgcgaccaaggaactgaaattt

SEQ ID NO: 1127175 - DNA, 25 bp, Homo sapien
cacgtgaaatgtgggtagtgcgacc

SEQ ID NO: 1127176 - DNA, 25 bp, Homo sapien
gggtcatcgctatatttaagtggct

SEQ ID NO: 1127177 - DNA, 25 bp, Homo sapien
tctaccctggagagctgattcacag

SEQ ID NO: 1127178 - DNA, 25 bp, Homo sapien
tgtgtcagcaaaagtagagatcagc

SEQ ID NO: 1127179 - DNA, 25 bp, Homo sapien
tacagagaccaatgctaccttgaga

SEQ ID NO: 1127180 - DNA, 25 bp, Homo sapien
gaaaagacagtccatcagacaggga

SEQ ID NO: 1127181 - DNA, 25 bp, Homo sapien
ggatcattgcaccagggatagtacc

SEQ ID NO: 1127182 - DNA, 25 bp, Homo sapien
caaagtaaaccccagcaaagccact

SEQ ID NO: 1127183 - DNA, 25 bp, Homo sapien
gaatcaagctgagaatctgagggcc

SEQ ID NO: 1127184 - DNA, 25 bp, Homo sapien
tgctgtgagaactgccatgagtcct

SEQ ID NO: 1127185 - DNA, 25 bp, Homo sapien
gagtcctacaaattgagaaccagct

SEQ ID NO: 1127186 - DNA, 25 bp, Homo sapien
taatcctggacatctatctttgtgc

SEQ ID NO: 1127187 - DNA, 25 bp, Homo sapien
tctatactcctaggaacaataggta

SEQ ID NO: 1127188 - DNA, 25 bp, Homo sapien
gacttggaattcttacattacagcc

SEQ ID NO: 1127189 - DNA, 25 bp, Homo sapien
gatagacttttatccagacttggaa

SEQ ID NO: 1127190 - DNA, 25 bp, Homo sapien
gcattctaacagttgcataatattc

SEQ ID NO: 1127191 - DNA, 25 bp, Homo sapien
tagaaggatatatacatgtcagtat

SEQ ID NO: 1127192 - DNA, 25 bp, Homo sapien
tcagtatgaacagaactactgcatt

SEQ ID NO: 1127193 - DNA, 25 bp, Homo sapien
agccactgtatccaggcttatatat

SEQ ID NO: 1127194 - DNA, 25 bp, Homo sapien
acccattaatccaaatatacttcca

SEQ ID NO: 1127195 - DNA, 25 bp, Homo sapien
gaacaactactatccaggtcagtcg

SEQ ID NO: 1127196 - DNA, 25 bp, Homo sapien
ggtcagtcggttatatccctgaaaa

SEQ ID NO: 1127197 - DNA, 25 bp, Homo sapien
ttaatccaaatatacttccaaagaa

SEQ ID NO: 1127198 - DNA, 25 bp, Homo sapien
tcttcaccttcctttctggagcctt

SEQ ID NO: 1127199 - DNA, 25 bp, Homo sapien
accttcctttctggagccttgcttc

SEQ ID NO: 1127200 - DNA, 25 bp, Homo sapien
ctatcctttgccatcttcaccttcc

SEQ ID NO: 1127201 - DNA, 25 bp, Homo sapien
ctttgccatcttcaccttcctttct

SEQ ID NO: 1127202 - DNA, 25 bp, Homo sapien
cagctattacaaggcctccaagtgc

SEQ ID NO: 1127203 - DNA, 25 bp, Homo sapien
tatcgataaagaggttgcaaatcct

SEQ ID NO: 1127204 - DNA, 25 bp, Homo sapien
taatattatcgataaagaggttgca

SEQ ID NO: 1127205 - DNA, 25 bp, Homo sapien
ataacagcagctattacaaggcctc

SEQ ID NO: 1127206 - DNA, 25 bp, Homo sapien
tatgaacatataaataataaagtaa

SEQ ID NO: 1127207 - DNA, 25 bp, Homo sapien
ctgtctcaaaaatatgaacatataa

SEQ ID NO: 1127208 - DNA, 25 bp, Homo sapien
tctcaaaaatatgaacatataaata

SEQ ID NO: 1127209 - DNA, 25 bp, Homo sapien
tgtctcaaaaatatgaacatataaa

SEQ ID NO: 1127210 - DNA, 25 bp, Homo sapien
gatggaatgaggctaaaggcaaata

SEQ ID NO: 1127211 - DNA, 25 bp, Homo sapien
tctccatctggcttagtgtcctgag

SEQ ID NO: 1127212 - DNA, 25 bp, Homo sapien
gtaagatgcataaagatagagggct

SEQ ID NO: 1127213 - DNA, 25 bp, Homo sapien
ccttatatacttcctcagaaacgtg

SEQ ID NO: 1127214 - DNA, 25 bp, Homo sapien
tgtaaactagactacaaatattaac

SEQ ID NO: 1127215 - DNA, 25 bp, Homo sapien
atgtaaactagactacaaatattaa

SEQ ID NO: 1127216 - DNA, 25 bp, Homo sapien
cagaaatgaatttagacaggatatg

SEQ ID NO: 1127217 - DNA, 25 bp, Homo sapien
tatgtaaactagactacaaatatta

SEQ ID NO: 1127218 - DNA, 25 bp, Homo sapien
gactgcactatactgtcttccaaag

SEQ ID NO: 1127219 - DNA, 25 bp, Homo sapien
caaacccaggtatgtctaactctac

SEQ ID NO: 1127220 - DNA, 25 bp, Homo sapien
tacttactacattccaggtatctgg

SEQ ID NO: 1127221 - DNA, 25 bp, Homo sapien
gtaacacggctaacaaatcttgagt

SEQ ID NO: 1127222 - DNA, 25 bp, Homo sapien
tacaaggatggctccaaggaaaaag

SEQ ID NO: 1127223 - DNA, 25 bp, Homo sapien
aaggatggctccaaggaaaaagaca

SEQ ID NO: 1127224 - DNA, 25 bp, Homo sapien
ttacaaggatggctccaaggaaaaa

SEQ ID NO: 1127225 - DNA, 25 bp, Homo sapien
caaggatggctccaaggaaaaagac

SEQ ID NO: 1127226 - DNA, 25 bp, Homo sapien
ctgcaggtttgggatcataaccata

SEQ ID NO: 1127227 - DNA, 25 bp, Homo sapien
ctatgctttagtgggatttcctgca

SEQ ID NO: 1127228 - DNA, 25 bp, Homo sapien
ggtttgggatcataaccatacaaaa

SEQ ID NO: 1127229 - DNA, 25 bp, Homo sapien
gctttagtgggatttcctgcaggtt

SEQ ID NO: 1127230 - DNA, 25 bp, Homo sapien
ctaccatctagcacaggagcaactg

SEQ ID NO: 1127231 - DNA, 25 bp, Homo sapien
tagtgccccatcgtgaaaaaccagt

SEQ ID NO: 1127232 - DNA, 25 bp, Homo sapien
tgaagagattaagggctaacctcca

SEQ ID NO: 1127233 - DNA, 25 bp, Homo sapien
ttaatgtcgagattcctagtgcccc

SEQ ID NO: 1127234 - DNA, 25 bp, Homo sapien
tatgcttgatagttcaaaattctcc

SEQ ID NO: 1127235 - DNA, 25 bp, Homo sapien
caaaattctccaaatgtagatatta

SEQ ID NO: 1127236 - DNA, 25 bp, Homo sapien
atacagtatatgcttgatagttcaa

SEQ ID NO: 1127237 - DNA, 25 bp, Homo sapien
tctccaaatgtagatattatacaat

SEQ ID NO: 1127238 - DNA, 25 bp, Homo sapien
gtaatatggcaatctggaatgtctc

SEQ ID NO: 1127239 - DNA, 25 bp, Homo sapien
ggaattcaaaatttggctacctctc

SEQ ID NO: 1127240 - DNA, 25 bp, Homo sapien
ttggatttaaagtcatagcgctgtt

SEQ ID NO: 1127241 - DNA, 25 bp, Homo sapien
ctcagcagctcttgtgggaacacag

SEQ ID NO: 1127242 - DNA, 25 bp, Homo sapien
taaaagcttgatacagtaaggcctg

SEQ ID NO: 1127243 - DNA, 25 bp, Homo sapien
taggcaagggtacccaacagtctgt

SEQ ID NO: 1127244 - DNA, 25 bp, Homo sapien
taacactgccagttcacgttaggca

SEQ ID NO: 1127245 - DNA, 25 bp, Homo sapien
tatatgtgacatgatcctagggcac

SEQ ID NO: 1127246 - DNA, 25 bp, Homo sapien
ttgaagagctaatgttgaaacaacc

SEQ ID NO: 1127247 - DNA, 25 bp, Homo sapien
gcaaggcacataggaccagattttg

SEQ ID NO: 1127248 - DNA, 25 bp, Homo sapien
gctggataccaaaaaatgacaagag

SEQ ID NO: 1127249 - DNA, 25 bp, Homo sapien
ccatgtgtctacagttgtgaattac

SEQ ID NO: 1127250 - DNA, 25 bp, Homo sapien
tagagtccagtagtgtcatcatggt

SEQ ID NO: 1127251 - DNA, 25 bp, Homo sapien
ccagtagtgtcatcatggtttactg

SEQ ID NO: 1127252 - DNA, 25 bp, Homo sapien
aggtgcatgcccacatattggctaa

SEQ ID NO: 1127253 - DNA, 25 bp, Homo sapien
cacaggtgcatgcccacatattggc

SEQ ID NO: 1127254 - DNA, 25 bp, Homo sapien
tattatcacaattgatctccatgca

SEQ ID NO: 1127255 - DNA, 25 bp, Homo sapien
taaaaatgctggcactttagtgatt

SEQ ID NO: 1127256 - DNA, 25 bp, Homo sapien
tacttcagcagtagagataggacta

SEQ ID NO: 1127257 - DNA, 25 bp, Homo sapien
gtattttgtgtaaggttacttcagc

SEQ ID NO: 1127258 - DNA, 25 bp, Homo sapien
tatgattactaatgctggtcactat

SEQ ID NO: 1127259 - DNA, 25 bp, Homo sapien
ctataagattcagattctaagatac

SEQ ID NO: 1127260 - DNA, 25 bp, Homo sapien
cactatcagtctcttttgaaaggca

SEQ ID NO: 1127261 - DNA, 25 bp, Homo sapien
gattctaagatacttttgcatagca

SEQ ID NO: 1127262 - DNA, 25 bp, Homo sapien
cttaaggacttgagtgtgcccaaat

SEQ ID NO: 1127263 - DNA, 25 bp, Homo sapien
tcagccaaatgcagatggaaaacac

SEQ ID NO: 1127264 - DNA, 25 bp, Homo sapien
gctgacttttcttatacgcggtttc

SEQ ID NO: 1127265 - DNA, 25 bp, Homo sapien
gatgtgaaacccacccatagggagg

SEQ ID NO: 1127266 - DNA, 25 bp, Homo sapien
catgttgtgaaagaggcacagtaag

SEQ ID NO: 1127267 - DNA, 25 bp, Homo sapien
tagaggcctagacaagcaaattggg

SEQ ID NO: 1127268 - DNA, 25 bp, Homo sapien
gacaattagataagagtcaaagaac

SEQ ID NO: 1127269 - DNA, 25 bp, Homo sapien
gataatatattcactgacggtcaca

SEQ ID NO: 1127270 - DNA, 25 bp, Homo sapien
cacagggtacctgagagacacaaat

SEQ ID NO: 1127271 - DNA, 25 bp, Homo sapien
gagccacctgttattgctgattgaa

SEQ ID NO: 1127272 - DNA, 25 bp, Homo sapien
gataacatcaagcaacccaacagtg

SEQ ID NO: 1127273 - DNA, 25 bp, Homo sapien
gtcaaggattttctacatggccaag

SEQ ID NO: 1127274 - DNA, 25 bp, Homo sapien
ggttgtgaatacagctggccctcag

SEQ ID NO: 1127275 - DNA, 25 bp, Homo sapien
caaactttgcgctaagagactgata

SEQ ID NO: 1127276 - DNA, 25 bp, Homo sapien
tactcgctaacgtaagcaaaaggga

SEQ ID NO: 1127277 - DNA, 25 bp, Homo sapien
catatggagggatgaccgtattcac

SEQ ID NO: 1127278 - DNA, 25 bp, Homo sapien
ccagcagctagtgccgtcccaccac

SEQ ID NO: 1127279 - DNA, 25 bp, Homo sapien
gtgccgtcccaccactactgccggg

SEQ ID NO: 1127280 - DNA, 25 bp, Homo sapien
agctagtgccgtcccaccactactg

SEQ ID NO: 1127281 - DNA, 25 bp, Homo sapien
gtcccaccactactgccgggccgag

SEQ ID NO: 1127282 - DNA, 25 bp, Homo sapien
cgtgcctccgtccttaatgatgatc

SEQ ID NO: 1127283 - DNA, 25 bp, Homo sapien
tggccagcatgatactgcggttcgc

SEQ ID NO: 1127284 - DNA, 25 bp, Homo sapien
tgatactgcggttcgcggcccgttt

SEQ ID NO: 1127285 - DNA, 25 bp, Homo sapien
tccttaatgatgatcttcttggcca

SEQ ID NO: 1127286 - DNA, 25 bp, Homo sapien
caagcccgagcagcggaggacgatt

SEQ ID NO: 1127287 - DNA, 25 bp, Homo sapien
acgattcccggagcggcggcatgcg

SEQ ID NO: 1127288 - DNA, 25 bp, Homo sapien
caggtgcgggaaagaaagaggacgg

SEQ ID NO: 1127289 - DNA, 25 bp, Homo sapien
aggcaccggcagctcggacagggtg

SEQ ID NO: 1127290 - DNA, 25 bp, Homo sapien
agccccttgacaagcgcggcgacgg

SEQ ID NO: 1127291 - DNA, 25 bp, Homo sapien
tggaaacagaaagcgaacgtactac

SEQ ID NO: 1127292 - DNA, 25 bp, Homo sapien
ccggagcaccgacgcagagagacgt

SEQ ID NO: 1127293 - DNA, 25 bp, Homo sapien
gacgccaccccgttagcaacatatg

SEQ ID NO: 1127294 - DNA, 25 bp, Homo sapien
caggtgtctgccgtcatgcttccga

SEQ ID NO: 1127295 - DNA, 25 bp, Homo sapien
tttgaaaactagcaggttcgaatgt

SEQ ID NO: 1127296 - DNA, 25 bp, Homo sapien
catgcttccgactccgggaagtgag

SEQ ID NO: 1127297 - DNA, 25 bp, Homo sapien
caggttcgaatgtaggccccaggtg

SEQ ID NO: 1127298 - DNA, 25 bp, Homo sapien
aagtgtcctcctccgatccttaggc

SEQ ID NO: 1127299 - DNA, 25 bp, Homo sapien
cgatccttaggccatgactgattct

SEQ ID NO: 1127300 - DNA, 25 bp, Homo sapien
ttaggccatgactgattctaatact

SEQ ID NO: 1127301 - DNA, 25 bp, Homo sapien
caaagtgtcctcctccgatccttag

SEQ ID NO: 1127302 - DNA, 25 bp, Homo sapien
aagcaaattcactaatatggttact

SEQ ID NO: 1127303 - DNA, 25 bp, Homo sapien
catcagtgaagtagtatacagtata

SEQ ID NO: 1127304 - DNA, 25 bp, Homo sapien
tcttccaagaaacatgtatagccaa

SEQ ID NO: 1127305 - DNA, 25 bp, Homo sapien
tactgaatataatatgtggaactta

SEQ ID NO: 1127306 - DNA, 25 bp, Homo sapien
gcttgggtcctgctcttgaaacggt

SEQ ID NO: 1127307 - DNA, 25 bp, Homo sapien
ggtgctctgcttatccagggatatg

SEQ ID NO: 1127308 - DNA, 25 bp, Homo sapien
tccactgtcagagatgtagttccac

SEQ ID NO: 1127309 - DNA, 25 bp, Homo sapien
ggtacttccgaccatgcaattcaga

SEQ ID NO: 1127310 - DNA, 25 bp, Homo sapien
gcatatacttgtccctcctgaacca

SEQ ID NO: 1127311 - DNA, 25 bp, Homo sapien
agtgagagttcagctatgaggacgc

SEQ ID NO: 1127312 - DNA, 25 bp, Homo sapien
cgcaaaggcgtaagactaatagaat

SEQ ID NO: 1127313 - DNA, 25 bp, Homo sapien
ccacgactggaaggaaaacatgtat

SEQ ID NO: 1127314 - DNA, 25 bp, Homo sapien
tgcagtattatcactctggtgattt

SEQ ID NO: 1127315 - DNA, 25 bp, Homo sapien
gcagtattatcactctggtgatttc

SEQ ID NO: 1127316 - DNA, 25 bp, Homo sapien
tgtcttcaaagtcagagggacagac

SEQ ID NO: 1127317 - DNA, 25 bp, Homo sapien
cacagtatgcagttggaacatacag

SEQ ID NO: 1127318 - DNA, 25 bp, Homo sapien
caacgaaattcattagcataagcac

SEQ ID NO: 1127319 - DNA, 25 bp, Homo sapien
gttggaacatacagagtccaaggga

SEQ ID NO: 1127320 - DNA, 25 bp, Homo sapien
aactccaaaaagatgacgataactg

SEQ ID NO: 1127321 - DNA, 25 bp, Homo sapien
tgcatgatagacactaggagaacct

SEQ ID NO: 1127322 - DNA, 25 bp, Homo sapien
tgacgataactgcatgatagacact

SEQ ID NO: 1127323 - DNA, 25 bp, Homo sapien
tgatagacactaggagaacctattc

SEQ ID NO: 1127324 - DNA, 25 bp, Homo sapien
ttgaattaagccgttcatcagaaat

SEQ ID NO: 1127325 - DNA, 25 bp, Homo sapien
tttactccttgaattaagccgttca

SEQ ID NO: 1127326 - DNA, 25 bp, Homo sapien
tactccttgaattaagccgttcatc

SEQ ID NO: 1127327 - DNA, 25 bp, Homo sapien
tccttgaattaagccgttcatcaga

SEQ ID NO: 1127328 - DNA, 25 bp, Homo sapien
atgtgaaaaacaccgttagcagcaa

SEQ ID NO: 1127329 - DNA, 25 bp, Homo sapien
attaaaggaattggggcacatgtga

SEQ ID NO: 1127330 - DNA, 25 bp, Homo sapien
gagcaccaataagcggggcactaag

SEQ ID NO: 1127331 - DNA, 25 bp, Homo sapien
cagcaagaaggattttcggccccaa

SEQ ID NO: 1127332 - DNA, 25 bp, Homo sapien
cataagccatacttctttcatgctc

SEQ ID NO: 1127333 - DNA, 25 bp, Homo sapien
cttgggttatatctgctacgtatgc

SEQ ID NO: 1127334 - DNA, 25 bp, Homo sapien
tctgctacgtatgcaaataccacag

SEQ ID NO: 1127335 - DNA, 25 bp, Homo sapien
acttctttcatgctcttgggttata

SEQ ID NO: 1127336 - DNA, 25 bp, Homo sapien
cagatacaaaaggtatagaataaac

SEQ ID NO: 1127337 - DNA, 25 bp, Homo sapien
atttctcagcagatacaaaaggtat

SEQ ID NO: 1127338 - DNA, 25 bp, Homo sapien
aatgcaaaggtttgcactccttata

SEQ ID NO: 1127339 - DNA, 25 bp, Homo sapien
ttttacgcaaaaatcttgtaatgca

SEQ ID NO: 1127340 - DNA, 25 bp, Homo sapien
caggagttggcgacctaccactatg

SEQ ID NO: 1127341 - DNA, 25 bp, Homo sapien
taccactatggctcaaatctggctg

SEQ ID NO: 1127342 - DNA, 25 bp, Homo sapien
aaaggtttgctgatccctgagctag

SEQ ID NO: 1127343 - DNA, 25 bp, Homo sapien
gtcctttgaatcagaaatcagtccc

SEQ ID NO: 1127344 - DNA, 25 bp, Homo sapien
attttctcaggcaacgactctggca

SEQ ID NO: 1127345 - DNA, 25 bp, Homo sapien
tactcgtccaagataagctccaatt

SEQ ID NO: 1127346 - DNA, 25 bp, Homo sapien
agctattgctgtagctaagaccacc

SEQ ID NO: 1127347 - DNA, 25 bp, Homo sapien
aagctgtccccatatactcgtccaa

SEQ ID NO: 1127348 - DNA, 25 bp, Homo sapien
tatcaaggagaaggaaaaagtataa

SEQ ID NO: 1127349 - DNA, 25 bp, Homo sapien
ttatcaaggagaaggaaaaagtata

SEQ ID NO: 1127350 - DNA, 25 bp, Homo sapien
tccggtaggtaggagagaaacactg

SEQ ID NO: 1127351 - DNA, 25 bp, Homo sapien
cactgtaatgcagatcagcagcact

SEQ ID NO: 1127352 - DNA, 25 bp, Homo sapien
gcactatggaatcttggccgacttt

SEQ ID NO: 1127353 - DNA, 25 bp, Homo sapien
aaaaaagctggaatattggcctgcc

SEQ ID NO: 1127354 - DNA, 25 bp, Homo sapien
gctataaacgctgcaacactttctg

SEQ ID NO: 1127355 - DNA, 25 bp, Homo sapien
atgccaaggactgctataaacgctg

SEQ ID NO: 1127356 - DNA, 25 bp, Homo sapien
ctgtgcaataatggaaagaatgcca

SEQ ID NO: 1127357 - DNA, 25 bp, Homo sapien
gcaataatggaaagaatgccaagga

SEQ ID NO: 1127358 - DNA, 25 bp, Homo sapien
gaatcctactcgagaaatggtgaac

SEQ ID NO: 1127359 - DNA, 25 bp, Homo sapien
gaatgaatcatgagacctgcagaag

SEQ ID NO: 1127360 - DNA, 25 bp, Homo sapien
actgtttaccaactgggctgccaag

SEQ ID NO: 1127361 - DNA, 25 bp, Homo sapien
tgttcactcaactggagccgcactg

SEQ ID NO: 1127362 - DNA, 25 bp, Homo sapien
tgatcacatctattgcaaggttggg

SEQ ID NO: 1127363 - DNA, 25 bp, Homo sapien
ctggagtaccatgggacaactgtgg

SEQ ID NO: 1127364 - DNA, 25 bp, Homo sapien
gaaaaagatactcatgcccaggttg

SEQ ID NO: 1127365 - DNA, 25 bp, Homo sapien
tgggttaatctttgataattcatca

SEQ ID NO: 1127366 - DNA, 25 bp, Homo sapien
ctcagaggtccgctagagctcacaa

SEQ ID NO: 1127367 - DNA, 25 bp, Homo sapien
caggaacaaaagcacgtgggtaaga

SEQ ID NO: 1127368 - DNA, 25 bp, Homo sapien
gtacaatgatggagatatgcgcaca

SEQ ID NO: 1127369 - DNA, 25 bp, Homo sapien
caagatcattcttctacctttgagg

SEQ ID NO: 1127370 - DNA, 25 bp, Homo sapien
gaaatgactatcttcccctttgtgg

SEQ ID NO: 1127371 - DNA, 25 bp, Homo sapien
catgtaccctggagcacgtgttctt

SEQ ID NO: 1127372 - DNA, 25 bp, Homo sapien
gctagtctaagaaagctgacacttc

SEQ ID NO: 1127373 - DNA, 25 bp, Homo sapien
taaaatgcggtcatctcatagccct

SEQ ID NO: 1127374 - DNA, 25 bp, Homo sapien
aattgacctcataagtaaactcaag

SEQ ID NO: 1127375 - DNA, 25 bp, Homo sapien
ttgaaatcctagacccagtaaaatg

SEQ ID NO: 1127376 - DNA, 25 bp, Homo sapien
gttcttatttccaattgacctcata

SEQ ID NO: 1127377 - DNA, 25 bp, Homo sapien
tcctagacccagtaaaatggtgttc

SEQ ID NO: 1127378 - DNA, 25 bp, Homo sapien
taatactatctacgtgggcagcctg

SEQ ID NO: 1127379 - DNA, 25 bp, Homo sapien
tggagaacaaatcatcaccctcttg

SEQ ID NO: 1127380 - DNA, 25 bp, Homo sapien
tccaaacagagacgaggcagtcagt

SEQ ID NO: 1127381 - DNA, 25 bp, Homo sapien
ctttcagggccttgttgctatggga

SEQ ID NO: 1127382 - DNA, 25 bp, Homo sapien
gatcagcatcagcagttcgtgaaac

SEQ ID NO: 1127383 - DNA, 25 bp, Homo sapien
caggaaaggtgatgctagacatggc

SEQ ID NO: 1127384 - DNA, 25 bp, Homo sapien
cgtgaaacaagtgcactgacagcag

SEQ ID NO: 1127385 - DNA, 25 bp, Homo sapien
actgacagcaggaaaggtgatgcta

SEQ ID NO: 1127386 - DNA, 25 bp, Homo sapien
aaatgaatccatagagggccggtcc

SEQ ID NO: 1127387 - DNA, 25 bp, Homo sapien
gggccggtcccagaccattgcataa

SEQ ID NO: 1127388 - DNA, 25 bp, Homo sapien
tcctgttatcattccttgaacgaca

SEQ ID NO: 1127389 - DNA, 25 bp, Homo sapien
gttattggcagttctttaagttcca

SEQ ID NO: 1127390 - DNA, 25 bp, Homo sapien
gatggctgtgactgccacagtgctt

SEQ ID NO: 1127391 - DNA, 25 bp, Homo sapien
cctctcctggcgcttgtgtattatg

SEQ ID NO: 1127392 - DNA, 25 bp, Homo sapien
ggtatgttccggaataaacaaggca

SEQ ID NO: 1127393 - DNA, 25 bp, Homo sapien
gccagcagtactgaacaggctccaa

SEQ ID NO: 1127394 - DNA, 25 bp, Homo sapien
tcccacggagttcatgcagatacat

SEQ ID NO: 1127395 - DNA, 25 bp, Homo sapien
tttgagccagcatttagattacagg

SEQ ID NO: 1127396 - DNA, 25 bp, Homo sapien
gagttaaagctcaacaccttaagga

SEQ ID NO: 1127397 - DNA, 25 bp, Homo sapien
tgtacatccagaactagaggtgaaa

SEQ ID NO: 1127398 - DNA, 25 bp, Homo sapien
cttatttaaccatagtgagtgttcc

SEQ ID NO: 1127399 - DNA, 25 bp, Homo sapien
tacactttagagaaattcacatcgg

SEQ ID NO: 1127400 - DNA, 25 bp, Homo sapien
taagcaataaccacacacaagatga

SEQ ID NO: 1127401 - DNA, 25 bp, Homo sapien
aattgtataaagctctcctctaggg

SEQ ID NO: 1127402 - DNA, 25 bp, Homo sapien
caagtgtctttaaactagggatcta

SEQ ID NO: 1127403 - DNA, 25 bp, Homo sapien
taatattaggcagttgatactcccc

SEQ ID NO: 1127404 - DNA, 25 bp, Homo sapien
tgcatgacatacaggtagctctctt

SEQ ID NO: 1127405 - DNA, 25 bp, Homo sapien
catgttttggatgggatgcatgaca

SEQ ID NO: 1127406 - DNA, 25 bp, Homo sapien
atgatgaaactaaggcacagaaagg

SEQ ID NO: 1127407 - DNA, 25 bp, Homo sapien
gaactattattagccctattttaca

SEQ ID NO: 1127408 - DNA, 25 bp, Homo sapien
ctattttacagatgatgaaactaag

SEQ ID NO: 1127409 - DNA, 25 bp, Homo sapien
cagatgatgaaactaaggcacagaa

SEQ ID NO: 1127410 - DNA, 25 bp, Homo sapien
tgtgataggtactgtttgaagtgct

SEQ ID NO: 1127411 - DNA, 25 bp, Homo sapien
gagcattttctatgtgataggtact

SEQ ID NO: 1127412 - DNA, 25 bp, Homo sapien
taaagataatagttaatgcttactg

SEQ ID NO: 1127413 - DNA, 25 bp, Homo sapien
tatgtgaatttagtatctagtaata

SEQ ID NO: 1127414 - DNA, 25 bp, Homo sapien
tagggtatccattcagacaatgcaa

SEQ ID NO: 1127415 - DNA, 25 bp, Homo sapien
tcttgagagcagattactggcacag

SEQ ID NO: 1127416 - DNA, 25 bp, Homo sapien
cagactgtctgagttagaagcggct

SEQ ID NO: 1127417 - DNA, 25 bp, Homo sapien
ggcacaggttcaatatcaacagcag

SEQ ID NO: 1127418 - DNA, 25 bp, Homo sapien
tgtcaaaaaccctacctgtgcacgg

SEQ ID NO: 1127419 - DNA, 25 bp, Homo sapien
ttgcacctaggtgtcgagtcggccc

SEQ ID NO: 1127420 - DNA, 25 bp, Homo sapien
gcgccacacaggttaatacccggaa

SEQ ID NO: 1127421 - DNA, 25 bp, Homo sapien
ggaagccggctcacatcaagttaat

SEQ ID NO: 1127422 - DNA, 25 bp, Homo sapien
gcatctaccctcagctggaaaacca

SEQ ID NO: 1127423 - DNA, 25 bp, Homo sapien
ccatcctgcagaaccgtttcttctt

SEQ ID NO: 1127424 - DNA, 25 bp, Homo sapien
ggctccagcgtgttcaccacaaaat

SEQ ID NO: 1127425 - DNA, 25 bp, Homo sapien
tttccacatagtaaccgcatctacc

SEQ ID NO: 1127426 - DNA, 25 bp, Homo sapien
cttgagagagtagggcgataccaca

SEQ ID NO: 1127427 - DNA, 25 bp, Homo sapien
tcttgagagagtagggcgataccac

SEQ ID NO: 1127428 - DNA, 25 bp, Homo sapien
ttgagagagtagggcgataccacac

SEQ ID NO: 1127429 - DNA, 25 bp, Homo sapien
gagaatccaggggacacaagcagaa

SEQ ID NO: 1127430 - DNA, 25 bp, Homo sapien
aggggccgggttccagcaccgacag

SEQ ID NO: 1127431 - DNA, 25 bp, Homo sapien
gacaggaccaggatacttatttccg

SEQ ID NO: 1127432 - DNA, 25 bp, Homo sapien
ccgacaggaccaggatacttatttc

SEQ ID NO: 1127433 - DNA, 25 bp, Homo sapien
ggacacaggattcttttccgagcat

SEQ ID NO: 1127434 - DNA, 25 bp, Homo sapien
tttgctagttgatcttcatatactg

SEQ ID NO: 1127435 - DNA, 25 bp, Homo sapien
tgctagttgatcttcatatactgtg

SEQ ID NO: 1127436 - DNA, 25 bp, Homo sapien
aatgctttgctagttgatcttcata

SEQ ID NO: 1127437 - DNA, 25 bp, Homo sapien
gctttgctagttgatcttcatatac

SEQ ID NO: 1127438 - DNA, 25 bp, Homo sapien
taattgttcaggtatttctgtttca

SEQ ID NO: 1127439 - DNA, 25 bp, Homo sapien
cttaagcctgcattaatatcttgaa

SEQ ID NO: 1127440 - DNA, 25 bp, Homo sapien
tctgtttcatctcttaagcctgcat

SEQ ID NO: 1127441 - DNA, 25 bp, Homo sapien
taagcctgcattaatatcttgaata

SEQ ID NO: 1127442 - DNA, 25 bp, Homo sapien
tcttaattaacttttccaactgctc

SEQ ID NO: 1127443 - DNA, 25 bp, Homo sapien
aacttttccaactgctcttcagata

SEQ ID NO: 1127444 - DNA, 25 bp, Homo sapien
aattaacttttccaactgctcttca

SEQ ID NO: 1127445 - DNA, 25 bp, Homo sapien
tcttcagatagagaagaaattggaa

SEQ ID NO: 1127446 - DNA, 25 bp, Homo sapien
tggttgcagaatcgccatttttagg

SEQ ID NO: 1127447 - DNA, 25 bp, Homo sapien
gtttcaggtgcttggttgcagaatc

SEQ ID NO: 1127448 - DNA, 25 bp, Homo sapien
tagggtcattaagtgcatcgtgtaa

SEQ ID NO: 1127449 - DNA, 25 bp, Homo sapien
gcagaatcgccatttttagggtcat

SEQ ID NO: 1127450 - DNA, 25 bp, Homo sapien
atggaaatatttggtaccctcaaag

SEQ ID NO: 1127451 - DNA, 25 bp, Homo sapien
gcaaggtaatttctgcataaggcag

SEQ ID NO: 1127452 - DNA, 25 bp, Homo sapien
caaaggccatgtttagtagttacta

SEQ ID NO: 1127453 - DNA, 25 bp, Homo sapien
ggtactcagaatcacatccatgccc

SEQ ID NO: 1127454 - DNA, 25 bp, Homo sapien
ggtcaccttttccactaggatgaag

SEQ ID NO: 1127455 - DNA, 25 bp, Homo sapien
taggatgaagtgaactttttcagca

SEQ ID NO: 1127456 - DNA, 25 bp, Homo sapien
taaggcaatatcaacccaatgagat

SEQ ID NO: 1127457 - DNA, 25 bp, Homo sapien
ccaaactcaacaaagcatcttcttg

SEQ ID NO: 1127458 - DNA, 25 bp, Homo sapien
acaaacagaacattattgtaataat

SEQ ID NO: 1127459 - DNA, 25 bp, Homo sapien
cacaaacagaacattattgtaataa

SEQ ID NO: 1127460 - DNA, 25 bp, Homo sapien
caagtgttgaatatcaatttgaagt

SEQ ID NO: 1127461 - DNA, 25 bp, Homo sapien
gttgaatatcaatttgaagtctttc

SEQ ID NO: 1127462 - DNA, 25 bp, Homo sapien
aacacaagtgttgaatatcaatttg

SEQ ID NO: 1127463 - DNA, 25 bp, Homo sapien
tcaaacacaagtgttgaatatcaat

SEQ ID NO: 1127464 - DNA, 25 bp, Homo sapien
tgttgccataccacacagatgcttt

SEQ ID NO: 1127465 - DNA, 25 bp, Homo sapien
ctgttgccataccacacagatgctt

SEQ ID NO: 1127466 - DNA, 25 bp, Homo sapien
ctttccaattcctaccacaggtagt

SEQ ID NO: 1127467 - DNA, 25 bp, Homo sapien
ttgccataccacacagatgctttcc

SEQ ID NO: 1127468 - DNA, 25 bp, Homo sapien
aatcatacagtttccataaatggtc

SEQ ID NO: 1127469 - DNA, 25 bp, Homo sapien
ctttaaggtctaatgtgatgcagta

SEQ ID NO: 1127470 - DNA, 25 bp, Homo sapien
aaaagagaccactgaaatggttggg

SEQ ID NO: 1127471 - DNA, 25 bp, Homo sapien
taaaaaatcagtagcttctaggtgg

SEQ ID NO: 1127472 - DNA, 25 bp, Homo sapien
gtttggactatatcaggaagtaccg

SEQ ID NO: 1127473 - DNA, 25 bp, Homo sapien
tcctatgtgcccaagctaatcctga

SEQ ID NO: 1127474 - DNA, 25 bp, Homo sapien
gctatcgtgcccaacaaatttctgt

SEQ ID NO: 1127475 - DNA, 25 bp, Homo sapien
gtctatggaaaagcacacagggttt

SEQ ID NO: 1127476 - DNA, 25 bp, Homo sapien
taatatacacaaacttaagaggcag

SEQ ID NO: 1127477 - DNA, 25 bp, Homo sapien
tgttcctgttatatagcaagcatcg

SEQ ID NO: 1127478 - DNA, 25 bp, Homo sapien
gactatggctatttcccatcgaaaa

SEQ ID NO: 1127479 - DNA, 25 bp, Homo sapien
gaggcagatgtactccacattacaa

SEQ ID NO: 1127480 - DNA, 25 bp, Homo sapien
caaacacaattatgtggccccccca

SEQ ID NO: 1127481 - DNA, 25 bp, Homo sapien
ctgcaaacacaattatgtggccccc

SEQ ID NO: 1127482 - DNA, 25 bp, Homo sapien
gcaaacacaattatgtggccccccc

SEQ ID NO: 1127483 - DNA, 25 bp, Homo sapien
tgcaaacacaattatgtggcccccc

SEQ ID NO: 1127484 - DNA, 25 bp, Homo sapien
tgttttccgcatcccacaagttgcc

SEQ ID NO: 1127485 - DNA, 25 bp, Homo sapien
ggcaaacaatcagcgccatcatctg

SEQ ID NO: 1127486 - DNA, 25 bp, Homo sapien
tgcaataacaatgccagccacaggg

SEQ ID NO: 1127487 - DNA, 25 bp, Homo sapien
taatggaattccactgctccaaggc

SEQ ID NO: 1127488 - DNA, 25 bp, Homo sapien
tttattgagagactgttaactaacc

SEQ ID NO: 1127489 - DNA, 25 bp, Homo sapien
ccataatgtactaagtactttgtcc

SEQ ID NO: 1127490 - DNA, 25 bp, Homo sapien
gactgttaactaacccataatgtac

SEQ ID NO: 1127491 - DNA, 25 bp, Homo sapien
ctaacccataatgtactaagtactt

SEQ ID NO: 1127492 - DNA, 25 bp, Homo sapien
cagagggtctgtatagtactgcaaa

SEQ ID NO: 1127493 - DNA, 25 bp, Homo sapien
tgctgcaaatactggattcgacctt

SEQ ID NO: 1127494 - DNA, 25 bp, Homo sapien
gcaaagcaggactgaatcccttctg

SEQ ID NO: 1127495 - DNA, 25 bp, Homo sapien
gaccttggtcaatcagcaatttaca

SEQ ID NO: 1127496 - DNA, 25 bp, Homo sapien
gtgatgaagaatgatttggtaaagc

SEQ ID NO: 1127497 - DNA, 25 bp, Homo sapien
tctggtgatgaagaatgatttggta

SEQ ID NO: 1127498 - DNA, 25 bp, Homo sapien
ctggtgatgaagaatgatttggtaa

SEQ ID NO: 1127499 - DNA, 25 bp, Homo sapien
ggtgatgaagaatgatttggtaaag

SEQ ID NO: 1127500 - DNA, 25 bp, Homo sapien
gaatttgaaccgagacagtctgaca

SEQ ID NO: 1127501 - DNA, 25 bp, Homo sapien
tgtttcagatcaccaagtcaacggt

SEQ ID NO: 1127502 - DNA, 25 bp, Homo sapien
caaggtcgcacaactgaagatggta

SEQ ID NO: 1127503 - DNA, 25 bp, Homo sapien
caaagagattaggtagcatgcccaa

SEQ ID NO: 1127504 - DNA, 25 bp, Homo sapien
attagtattgcttgacacaataaaa

SEQ ID NO: 1127505 - DNA, 25 bp, Homo sapien
tctgggcataaattgttgaatgatg

SEQ ID NO: 1127506 - DNA, 25 bp, Homo sapien
gggcataaattgttgaatgatgcaa

SEQ ID NO: 1127507 - DNA, 25 bp, Homo sapien
ctgggcataaattgttgaatgatgc

SEQ ID NO: 1127508 - DNA, 25 bp, Homo sapien
agtaaatttgatgcacctgtggaac

SEQ ID NO: 1127509 - DNA, 25 bp, Homo sapien
caagaaatagctgtatgcatatccc

SEQ ID NO: 1127510 - DNA, 25 bp, Homo sapien
cacttggcaaatttcgcctcccagg

SEQ ID NO: 1127511 - DNA, 25 bp, Homo sapien
cacctggcccttagcagtaaatttg

SEQ ID NO: 1127512 - DNA, 25 bp, Homo sapien
tatttggccttcagtttatgcacac

SEQ ID NO: 1127513 - DNA, 25 bp, Homo sapien
tatcacatctcaccaagtcgttcag

SEQ ID NO: 1127514 - DNA, 25 bp, Homo sapien
aatgtgtgtatcactaactgctgcc

SEQ ID NO: 1127515 - DNA, 25 bp, Homo sapien
caagagtcacggagaagagcaggta

SEQ ID NO: 1127516 - DNA, 25 bp, Homo sapien
tactatcaaaactctgtcaagcatt

SEQ ID NO: 1127517 - DNA, 25 bp, Homo sapien
gaaacaattatgttattgatagcag

SEQ ID NO: 1127518 - DNA, 25 bp, Homo sapien
aacaaaaagccactagatataactt

SEQ ID NO: 1127519 - DNA, 25 bp, Homo sapien
tttactaagtactatcaaaactctg

SEQ ID NO: 1127520 - DNA, 25 bp, Homo sapien
aatcagtgaagaagtttccatggtg

SEQ ID NO: 1127521 - DNA, 25 bp, Homo sapien
caacaattgtcgctcttgcaaataa

SEQ ID NO: 1127522 - DNA, 25 bp, Homo sapien
caagcaaacttgtcaccaacaattg

SEQ ID NO: 1127523 - DNA, 25 bp, Homo sapien
ctcaagactgggtaactaataaaga

SEQ ID NO: 1127524 - DNA, 25 bp, Homo sapien
tatattgatactagccttcttttgc

SEQ ID NO: 1127525 - DNA, 25 bp, Homo sapien
actgcttgtgcaaccaattgctaaa

SEQ ID NO: 1127526 - DNA, 25 bp, Homo sapien
gtaaagtatttgtgcctaaagtcca

SEQ ID NO: 1127527 - DNA, 25 bp, Homo sapien
gaagccatgttattagaggcatgta

SEQ ID NO: 1127528 - DNA, 25 bp, Homo sapien
tagaattttccactgaagtcatctc

SEQ ID NO: 1127529 - DNA, 25 bp, Homo sapien
tgggaccagcattttgtttgtggag

SEQ ID NO: 1127530 - DNA, 25 bp, Homo sapien
gatgatagcttctttgactacaggt

SEQ ID NO: 1127531 - DNA, 25 bp, Homo sapien
ttttacccctcaaatgcttggtaga

SEQ ID NO: 1127532 - DNA, 25 bp, Homo sapien
ctatcaagtatgattgctgcaggtt

SEQ ID NO: 1127533 - DNA, 25 bp, Homo sapien
ggctttcaatgttacactatcaagt

SEQ ID NO: 1127534 - DNA, 25 bp, Homo sapien
tagacatacttggttaggttaaata

SEQ ID NO: 1127535 - DNA, 25 bp, Homo sapien
tattgaatggaagtagtgagagcag

SEQ ID NO: 1127536 - DNA, 25 bp, Homo sapien
gacaactggcacaaaacaaacctaa

SEQ ID NO: 1127537 - DNA, 25 bp, Homo sapien
acagaaacgacggtggtggtggtgt

SEQ ID NO: 1127538 - DNA, 25 bp, Homo sapien
cagaagtacattttaattcctagtt

SEQ ID NO: 1127539 - DNA, 25 bp, Homo sapien
agggaataattagcacttaaaatga

SEQ ID NO: 1127540 - DNA, 25 bp, Homo sapien
tcagcctgcagttaggtagagccat

SEQ ID NO: 1127541 - DNA, 25 bp, Homo sapien
ccttatggaggaggtattagagact

SEQ ID NO: 1127542 - DNA, 25 bp, Homo sapien
tatatgggttgaagtaatgtaggcc

SEQ ID NO: 1127543 - DNA, 25 bp, Homo sapien
gagactgatcccagacctctacaaa

SEQ ID NO: 1127544 - DNA, 25 bp, Homo sapien
caggtcaaataaatgctgttgttgt

SEQ ID NO: 1127545 - DNA, 25 bp, Homo sapien
tgtcattgtgccactatcctccagt

SEQ ID NO: 1127546 - DNA, 25 bp, Homo sapien
tgccactatcctccagtatgggtga

SEQ ID NO: 1127547 - DNA, 25 bp, Homo sapien
ttcagataatacaaagagttaacca

SEQ ID NO: 1127548 - DNA, 25 bp, Homo sapien
atctctacagttttgtaaaaataca

SEQ ID NO: 1127549 - DNA, 25 bp, Homo sapien
cccatctctacagttttgtaaaaat

SEQ ID NO: 1127550 - DNA, 25 bp, Homo sapien
ttttaaaattagcctggtggctcac

SEQ ID NO: 1127551 - DNA, 25 bp, Homo sapien
tttttaaaattagcctggtggctca

SEQ ID NO: 1127552 - DNA, 25 bp, Homo sapien
tccctcatgtaaggaaggtacttta

SEQ ID NO: 1127553 - DNA, 25 bp, Homo sapien
gaaattaaggtctattccattctcc

SEQ ID NO: 1127554 - DNA, 25 bp, Homo sapien
tttggtcttcagctaaaaaatagga

SEQ ID NO: 1127555 - DNA, 25 bp, Homo sapien
ttctccatatcctgggtaagaatgt

SEQ ID NO: 1127556 - DNA, 25 bp, Homo sapien
ttcctgaatagtatcctgaagtgtg

SEQ ID NO: 1127557 - DNA, 25 bp, Homo sapien
gtctttttcacatagtctcatattt

SEQ ID NO: 1127558 - DNA, 25 bp, Homo sapien
gaagttttcctgaatagtatcctga

SEQ ID NO: 1127559 - DNA, 25 bp, Homo sapien
tgctagttcggggaagttttcctga

SEQ ID NO: 1127560 - DNA, 25 bp, Homo sapien
gagaaacttgttaaggacttacagc

SEQ ID NO: 1127561 - DNA, 25 bp, Homo sapien
tggttccctttcattaccttcagga

SEQ ID NO: 1127562 - DNA, 25 bp, Homo sapien
catactccttagtgtggcatacaaa

SEQ ID NO: 1127563 - DNA, 25 bp, Homo sapien
tctctacactgcaccaagactggtc

SEQ ID NO: 1127564 - DNA, 25 bp, Homo sapien
cagagtcttgtggtccatggcggcc

SEQ ID NO: 1127565 - DNA, 25 bp, Homo sapien
cctgcagcagagtcttgtggtccat

SEQ ID NO: 1127566 - DNA, 25 bp, Homo sapien
agagtcttgtggtccatggcggccc

SEQ ID NO: 1127567 - DNA, 25 bp, Homo sapien
cagcagagtcttgtggtccatggcg

SEQ ID NO: 1127568 - DNA, 25 bp, Homo sapien
ggtaggatagcggatgacggtccag

SEQ ID NO: 1127569 - DNA, 25 bp, Homo sapien
agcctcccacgaccacgatagagtt

SEQ ID NO: 1127570 - DNA, 25 bp, Homo sapien
tcgctccctcaaggcaaaacagcaa

SEQ ID NO: 1127571 - DNA, 25 bp, Homo sapien
ggtggctccacagttggggcatctt

SEQ ID NO: 1127572 - DNA, 25 bp, Homo sapien
cagtcctgaagcttaatcaaataaa

SEQ ID NO: 1127573 - DNA, 25 bp, Homo sapien
cgctttacaaaacagtcctgaagct

SEQ ID NO: 1127574 - DNA, 25 bp, Homo sapien
catcggtcccacctcgctttacaaa

SEQ ID NO: 1127575 - DNA, 25 bp, Homo sapien
ctggcgtgtgccacatcggtcccac

SEQ ID NO: 1127576 - DNA, 25 bp, Homo sapien
tcaataaatgttaagcgtggtggtt

SEQ ID NO: 1127577 - DNA, 25 bp, Homo sapien
cctgtctgaaaagaaagtactcagc

SEQ ID NO: 1127578 - DNA, 25 bp, Homo sapien
tactcagcacatgggaggcactcaa

SEQ ID NO: 1127579 - DNA, 25 bp, Homo sapien
gctgccccgacccatgaatagttca

SEQ ID NO: 1127580 - DNA, 25 bp, Homo sapien
agaaagaagagacgttggctcccgc

SEQ ID NO: 1127581 - DNA, 25 bp, Homo sapien
tcagaaaccttggttcatgcctggg

SEQ ID NO: 1127582 - DNA, 25 bp, Homo sapien
actggagtcagcagaaacgaacccc

SEQ ID NO: 1127583 - DNA, 25 bp, Homo sapien
agaaagcggaagaagcggcgcctct

SEQ ID NO: 1127584 - DNA, 25 bp, Homo sapien
catgatgctgccatcgacctccacc

SEQ ID NO: 1127585 - DNA, 25 bp, Homo sapien
tgatgctgccatcgacctccacccg

SEQ ID NO: 1127586 - DNA, 25 bp, Homo sapien
atgatgctgccatcgacctccaccc

SEQ ID NO: 1127587 - DNA, 25 bp, Homo sapien
atgctgccatcgacctccacccgcg

SEQ ID NO: 1127588 - DNA, 25 bp, Homo sapien
ctcggatcttctgcacccgcaaggg

SEQ ID NO: 1127589 - DNA, 25 bp, Homo sapien
gctcaaggccgtagagactctcagg

SEQ ID NO: 1127590 - DNA, 25 bp, Homo sapien
gcctaggagacagctcaaggccgta

SEQ ID NO: 1127591 - DNA, 25 bp, Homo sapien
tgctccggccggctcggatcttctg

SEQ ID NO: 1127592 - DNA, 25 bp, Homo sapien
aaactcgagaccatttctaaactca

SEQ ID NO: 1127593 - DNA, 25 bp, Homo sapien
tttcaagactttacaacccaggcca

SEQ ID NO: 1127594 - DNA, 25 bp, Homo sapien
catacctgcgtctgggaccttctgg

SEQ ID NO: 1127595 - DNA, 25 bp, Homo sapien
atgcccggtgaggtgagaaaacatt

SEQ ID NO: 1127596 - DNA, 25 bp, Homo sapien
atgtacctgaagctcaactagtggc

SEQ ID NO: 1127597 - DNA, 25 bp, Homo sapien
gaagctcaactagtggcatgcccag

SEQ ID NO: 1127598 - DNA, 25 bp, Homo sapien
tcttctagcaggtgcatgtacctga

SEQ ID NO: 1127599 - DNA, 25 bp, Homo sapien
aacctgggtcctcttctagcaggtg

SEQ ID NO: 1127600 - DNA, 25 bp, Homo sapien
ttgatcttggacttccagcctccag

SEQ ID NO: 1127601 - DNA, 25 bp, Homo sapien
cttgtcaggaccttgatcttggact

SEQ ID NO: 1127602 - DNA, 25 bp, Homo sapien
ccttgatcttggacttccagcctcc

SEQ ID NO: 1127603 - DNA, 25 bp, Homo sapien
gatcttggacttccagcctccagaa

SEQ ID NO: 1127604 - DNA, 25 bp, Homo sapien
tcagactgcctacatccccacattt

SEQ ID NO: 1127605 - DNA, 25 bp, Homo sapien
gactgcctacatccccacattttat

SEQ ID NO: 1127606 - DNA, 25 bp, Homo sapien
agactgcctacatccccacatttta

SEQ ID NO: 1127607 - DNA, 25 bp, Homo sapien
actgcctacatccccacattttatg

SEQ ID NO: 1127608 - DNA, 25 bp, Homo sapien
gcccatcacacaaatctcgaatcat

SEQ ID NO: 1127609 - DNA, 25 bp, Homo sapien
gatcttctctggtgtaaaggttatt

SEQ ID NO: 1127610 - DNA, 25 bp, Homo sapien
tttctgttgagccaatttctgcccc

SEQ ID NO: 1127611 - DNA, 25 bp, Homo sapien
aaatctcgaatcatttccagtccag

SEQ ID NO: 1127612 - DNA, 25 bp, Homo sapien
tataatcgatctgtggtgccatttc

SEQ ID NO: 1127613 - DNA, 25 bp, Homo sapien
gacctgcatcaagaggcacacactc

SEQ ID NO: 1127614 - DNA, 25 bp, Homo sapien
ccatttcagcattagttccaccttt

SEQ ID NO: 1127615 - DNA, 25 bp, Homo sapien
catcactgtataatcgatctgtggt

SEQ ID NO: 1127616 - DNA, 25 bp, Homo sapien
atttttcaacaattggcttgaagac

SEQ ID NO: 1127617 - DNA, 25 bp, Homo sapien
aatttttcaacaattggcttgaaga

SEQ ID NO: 1127618 - DNA, 25 bp, Homo sapien
cacagccacgctcagttaaatttat

SEQ ID NO: 1127619 - DNA, 25 bp, Homo sapien
tggcaaaacaccagcaacgaaagct

SEQ ID NO: 1127620 - DNA, 25 bp, Homo sapien
tagggttcaattgtttaactggtga

SEQ ID NO: 1127621 - DNA, 25 bp, Homo sapien
cgaaagctcttccatatatcttagt

SEQ ID NO: 1127622 - DNA, 25 bp, Homo sapien
gatgttaacatacaaatcccggatc

SEQ ID NO: 1127623 - DNA, 25 bp, Homo sapien
gctgccgctgccatatcttttgcta

SEQ ID NO: 1127624 - DNA, 25 bp, Homo sapien
tctgatgcatctaactgctgccgct

SEQ ID NO: 1127625 - DNA, 25 bp, Homo sapien
taggttcttgaacaggctggatgtt

SEQ ID NO: 1127626 - DNA, 25 bp, Homo sapien
tttaccaagcgatgatccagcaaac

SEQ ID NO: 1127627 - DNA, 25 bp, Homo sapien
aaacaaacagccagtggaggtctca

SEQ ID NO: 1127628 - DNA, 25 bp, Homo sapien
aacagccagtggaggtctcagcaat

SEQ ID NO: 1127629 - DNA, 25 bp, Homo sapien
ctcgtttaccaagcgatgatccagc

SEQ ID NO: 1127630 - DNA, 25 bp, Homo sapien
ggttgtgtgcgattgtagttttagc

SEQ ID NO: 1127631 - DNA, 25 bp, Homo sapien
ggcatggttgtgtgcgattgtagtt

SEQ ID NO: 1127632 - DNA, 25 bp, Homo sapien
gcatggttgtgtgcgattgtagttt

SEQ ID NO: 1127633 - DNA, 25 bp, Homo sapien
tgtgtgcgattgtagttttagctac

SEQ ID NO: 1127634 - DNA, 25 bp, Homo sapien
tatgaccctataatgctatgcctca

SEQ ID NO: 1127635 - DNA, 25 bp, Homo sapien
gcaacatagctagacgccatctacc

SEQ ID NO: 1127636 - DNA, 25 bp, Homo sapien
ccaaatcctagaaaagcatgcgtgt

SEQ ID NO: 1127637 - DNA, 25 bp, Homo sapien
gcatgcgtgttacaattagtctgca

SEQ ID NO: 1127638 - DNA, 25 bp, Homo sapien
tcggcagcttcaattccaactttgt

SEQ ID NO: 1127639 - DNA, 25 bp, Homo sapien
ttcggcagcttcaattccaactttg

SEQ ID NO: 1127640 - DNA, 25 bp, Homo sapien
tccacagtaccaccatgtctaagat

SEQ ID NO: 1127641 - DNA, 25 bp, Homo sapien
cagtaccaccatgtctaagatttgc

SEQ ID NO: 1127642 - DNA, 25 bp, Homo sapien
atactcatccacagtaccaccatgt

SEQ ID NO: 1127643 - DNA, 25 bp, Homo sapien
tcatccacagtaccaccatgtctaa

SEQ ID NO: 1127644 - DNA, 25 bp, Homo sapien
cgtatggagtgtaactggtcctgtt

SEQ ID NO: 1127645 - DNA, 25 bp, Homo sapien
ggaaactccattggctaatgccatg

SEQ ID NO: 1127646 - DNA, 25 bp, Homo sapien
ccattggctaatgccatgaaaacaa

SEQ ID NO: 1127647 - DNA, 25 bp, Homo sapien
tcagcaaaatgtatcgcggtttgcg

SEQ ID NO: 1127648 - DNA, 25 bp, Homo sapien
gtttcatgatgaaatatacctattg

SEQ ID NO: 1127649 - DNA, 25 bp, Homo sapien
gggaaatatgctacatgttactgaa

SEQ ID NO: 1127650 - DNA, 25 bp, Homo sapien
gcaaagagaaacgatttaggagaag

SEQ ID NO: 1127651 - DNA, 25 bp, Homo sapien
gcttaagattagcaacttcccttat

SEQ ID NO: 1127652 - DNA, 25 bp, Homo sapien
tatgaaacacacgtagcagctatga

SEQ ID NO: 1127653 - DNA, 25 bp, Homo sapien
taatgtactgacacagagtggacac

SEQ ID NO: 1127654 - DNA, 25 bp, Homo sapien
cctgaaaggagcatagcaggcctat

SEQ ID NO: 1127655 - DNA, 25 bp, Homo sapien
tcatttgagttcagttcaggaggct

SEQ ID NO: 1127656 - DNA, 25 bp, Homo sapien
aatataagtatctttagcggcgtct

SEQ ID NO: 1127657 - DNA, 25 bp, Homo sapien
atttggatttgtcatcccaattcct

SEQ ID NO: 1127658 - DNA, 25 bp, Homo sapien
atctttagcggcgtcttcttcatct

SEQ ID NO: 1127659 - DNA, 25 bp, Homo sapien
taagtatctttagcggcgtcttctt

SEQ ID NO: 1127660 - DNA, 25 bp, Homo sapien
caatgaggtatcatttaagaggcaa

SEQ ID NO: 1127661 - DNA, 25 bp, Homo sapien
tctcagcaaacctagaacactgtac

SEQ ID NO: 1127662 - DNA, 25 bp, Homo sapien
gaaatagtgcaatatatcaatgagg

SEQ ID NO: 1127663 - DNA, 25 bp, Homo sapien
gaaatcagctatcacacatatccac

SEQ ID NO: 1127664 - DNA, 25 bp, Homo sapien
tgttgtcacaacaagtacatttgca

SEQ ID NO: 1127665 - DNA, 25 bp, Homo sapien
tatatccctgatttaattaattaca

SEQ ID NO: 1127666 - DNA, 25 bp, Homo sapien
gcctcattatacttgagatgtgatt

SEQ ID NO: 1127667 - DNA, 25 bp, Homo sapien
ccaaattacagatcaaatctatatc

SEQ ID NO: 1127668 - DNA, 25 bp, Homo sapien
gatgaatctgcgaaacctactaggg

SEQ ID NO: 1127669 - DNA, 25 bp, Homo sapien
aatgttattgttgccgggtgcactg

SEQ ID NO: 1127670 - DNA, 25 bp, Homo sapien
aaaaaatatttacgaccagctgtgg

SEQ ID NO: 1127671 - DNA, 25 bp, Homo sapien
caaagtgcccactaggtagaaggta

SEQ ID NO: 1127672 - DNA, 25 bp, Homo sapien
tgttgtatcatggactgattcactg

SEQ ID NO: 1127673 - DNA, 25 bp, Homo sapien
tggactgattcactgattcaaactg

SEQ ID NO: 1127674 - DNA, 25 bp, Homo sapien
gtccgccactctatccagtgttgta

SEQ ID NO: 1127675 - DNA, 25 bp, Homo sapien
tcccacaatgaatactgagaaaagt

SEQ ID NO: 1127676 - DNA, 25 bp, Homo sapien
tcagactttcgctctcatcctcata

SEQ ID NO: 1127677 - DNA, 25 bp, Homo sapien
tcgctctcatcctcatattcagcaa

SEQ ID NO: 1127678 - DNA, 25 bp, Homo sapien
gactttcgctctcatcctcatattc

SEQ ID NO: 1127679 - DNA, 25 bp, Homo sapien
tgaaatcagactttcgctctcatcc

SEQ ID NO: 1127680 - DNA, 25 bp, Homo sapien
tatttccataatatcaaatatacat

SEQ ID NO: 1127681 - DNA, 25 bp, Homo sapien
ctcttcatacctatgttttatttcc

SEQ ID NO: 1127682 - DNA, 25 bp, Homo sapien
aatatttctcttcatacctatgttt

SEQ ID NO: 1127683 - DNA, 25 bp, Homo sapien
tttctcttcatacctatgttttatt

SEQ ID NO: 1127684 - DNA, 25 bp, Homo sapien
tggtgacccttgacacacttttgga

SEQ ID NO: 1127685 - DNA, 25 bp, Homo sapien
cacaaatgttgtgccctgtggtttc

SEQ ID NO: 1127686 - DNA, 25 bp, Homo sapien
tgatgcctagtcctgtgtagaaact

SEQ ID NO: 1127687 - DNA, 25 bp, Homo sapien
ggtccttagtgttccagaagcctgg

SEQ ID NO: 1127688 - DNA, 25 bp, Homo sapien
tctgattgcctgtgatgatatgcct

SEQ ID NO: 1127689 - DNA, 25 bp, Homo sapien
accccattcaggcatcctcaatgga

SEQ ID NO: 1127690 - DNA, 25 bp, Homo sapien
tggattcctaaattcccctgctctc

SEQ ID NO: 1127691 - DNA, 25 bp, Homo sapien
tctctagagtgtgatcagggccaac

SEQ ID NO: 1127692 - DNA, 25 bp, Homo sapien
tcaactgaagacaattccacagggt

SEQ ID NO: 1127693 - DNA, 25 bp, Homo sapien
tttatcaactgaagacaattccaca

SEQ ID NO: 1127694 - DNA, 25 bp, Homo sapien
cctttttatcaactgaagacaattc

SEQ ID NO: 1127695 - DNA, 25 bp, Homo sapien
gaagacaattccacagggtacaagt

SEQ ID NO: 1127696 - DNA, 25 bp, Homo sapien
ggtattgtaatttaattgactccta

SEQ ID NO: 1127697 - DNA, 25 bp, Homo sapien
ttaattgactcctagctaacagcat

SEQ ID NO: 1127698 - DNA, 25 bp, Homo sapien
gactcctagctaacagcataattaa

SEQ ID NO: 1127699 - DNA, 25 bp, Homo sapien
taggtattgtaatttaattgactcc

SEQ ID NO: 1127700 - DNA, 25 bp, Homo sapien
ctctcagttatcctgaggtcaaagt

SEQ ID NO: 1127701 - DNA, 25 bp, Homo sapien
tattctctcagttatcctgaggtca

SEQ ID NO: 1127702 - DNA, 25 bp, Homo sapien
ttgtagtttcataataaaggcatac

SEQ ID NO: 1127703 - DNA, 25 bp, Homo sapien
ttggttgtagtttcataataaaggc

SEQ ID NO: 1127704 - DNA, 25 bp, Homo sapien
cgaaaatggcgctacagaccgacta

SEQ ID NO: 1127705 - DNA, 25 bp, Homo sapien
tgtacctaatcagagtgcagtccct

SEQ ID NO: 1127706 - DNA, 25 bp, Homo sapien
gaccgactatccgaagagcatgcgc

SEQ ID NO: 1127707 - DNA, 25 bp, Homo sapien
ttgaacaacttgaacgctgggcgtc

SEQ ID NO: 1127708 - DNA, 25 bp, Homo sapien
cttgtctctgcgaggctctacgtac

SEQ ID NO: 1127709 - DNA, 25 bp, Homo sapien
tgacttgtctctgcgaggctctacg

SEQ ID NO: 1127710 - DNA, 25 bp, Homo sapien
cattgacttgtctctgcgaggctct

SEQ ID NO: 1127711 - DNA, 25 bp, Homo sapien
gaggccattgacttgtctctgcgag

SEQ ID NO: 1127712 - DNA, 25 bp, Homo sapien
acttgtactttgttctcacgggaca

SEQ ID NO: 1127713 - DNA, 25 bp, Homo sapien
tgtactttgttctcacgggacaaaa

SEQ ID NO: 1127714 - DNA, 25 bp, Homo sapien
cttgtactttgttctcacgggacaa

SEQ ID NO: 1127715 - DNA, 25 bp, Homo sapien
ttgtactttgttctcacgggacaaa

SEQ ID NO: 1127716 - DNA, 25 bp, Homo sapien
cagccgggaggacttcagtgcccgc

SEQ ID NO: 1127717 - DNA, 25 bp, Homo sapien
ggagacttctggtcccgatcgcgcc

SEQ ID NO: 1127718 - DNA, 25 bp, Homo sapien
gatcgcgcccgtggctactcgagcg

SEQ ID NO: 1127719 - DNA, 25 bp, Homo sapien
caaagtgatcatggaggaggagact

SEQ ID NO: 1127720 - DNA, 25 bp, Homo sapien
tgtggccgctcctatttggactcgg

SEQ ID NO: 1127721 - DNA, 25 bp, Homo sapien
tggctgtggccgctcctatttggac

SEQ ID NO: 1127722 - DNA, 25 bp, Homo sapien
ctggctgtggccgctcctatttgga

SEQ ID NO: 1127723 - DNA, 25 bp, Homo sapien
gctgtggccgctcctatttggactc

SEQ ID NO: 1127724 - DNA, 25 bp, Homo sapien
agtcccgaacaacaagcctggccga

SEQ ID NO: 1127725 - DNA, 25 bp, Homo sapien
cttaagcgagatacgcacgggggag

SEQ ID NO: 1127726 - DNA, 25 bp, Homo sapien
ggcggcttcggggtcagcgcgccgg

SEQ ID NO: 1127727 - DNA, 25 bp, Homo sapien
agggaggcagcaggcgccgaaggcg

SEQ ID NO: 1127728 - DNA, 25 bp, Homo sapien
caagccccgattagttcccctgact

SEQ ID NO: 1127729 - DNA, 25 bp, Homo sapien
gaactcacaagccccgattagttcc

SEQ ID NO: 1127730 - DNA, 25 bp, Homo sapien
ttagttcccctgactccgctgccat

SEQ ID NO: 1127731 - DNA, 25 bp, Homo sapien
cgattagttcccctgactccgctgc

SEQ ID NO: 1127732 - DNA, 25 bp, Homo sapien
gacacaagaaagagaagccggaagc

SEQ ID NO: 1127733 - DNA, 25 bp, Homo sapien
gcagggggtcctcggagaaaggaga

SEQ ID NO: 1127734 - DNA, 25 bp, Homo sapien
agggacacaagaaagagaagccgga

SEQ ID NO: 1127735 - DNA, 25 bp, Homo sapien
agccggaagcagggggtcctcggag

SEQ ID NO: 1127736 - DNA, 25 bp, Homo sapien
gaaaaccgaagcctgcgatggtgga

SEQ ID NO: 1127737 - DNA, 25 bp, Homo sapien
cccgacgcagcttcggagatttgaa

SEQ ID NO: 1127738 - DNA, 25 bp, Homo sapien
aagccggtgctgtcccattacgagg

SEQ ID NO: 1127739 - DNA, 25 bp, Homo sapien
gaagaaagaggtgagcctcccgacg

SEQ ID NO: 1127740 - DNA, 25 bp, Homo sapien
agctcctcatcgatggagaaatagt

SEQ ID NO: 1127741 - DNA, 25 bp, Homo sapien
tcctcatcgatggagaaatagtggg

SEQ ID NO: 1127742 - DNA, 25 bp, Homo sapien
gaaatagtgggtatttactgtgctt

SEQ ID NO: 1127743 - DNA, 25 bp, Homo sapien
tcatcgatggagaaatagtgggtat

SEQ ID NO: 1127744 - DNA, 25 bp, Homo sapien
ccccaaagtggagctgacgagatgg

SEQ ID NO: 1127745 - DNA, 25 bp, Homo sapien
taagagctccagtaggctcaccaca

SEQ ID NO: 1127746 - DNA, 25 bp, Homo sapien
cagagcccgggttactagacatcct

SEQ ID NO: 1127747 - DNA, 25 bp, Homo sapien
tggcaggctggcttttcagttcaac

SEQ ID NO: 1127748 - DNA, 25 bp, Homo sapien
ctggcttgggaatgtgtttatgaac

SEQ ID NO: 1127749 - DNA, 25 bp, Homo sapien
caaaataatgaagccgccctgtggt

SEQ ID NO: 1127750 - DNA, 25 bp, Homo sapien
gagctgtggctaagtaaaagtcatt

SEQ ID NO: 1127751 - DNA, 25 bp, Homo sapien
gcatgattatgactagccctgttaa

SEQ ID NO: 1127752 - DNA, 25 bp, Homo sapien
gcaatatctgtacaccattgccaag

SEQ ID NO: 1127753 - DNA, 25 bp, Homo sapien
caagttcagcggtccaaaatctgca

SEQ ID NO: 1127754 - DNA, 25 bp, Homo sapien
tcagcggtccaaaatctgcatagaa

SEQ ID NO: 1127755 - DNA, 25 bp, Homo sapien
tacaccattgccaagttcagcggtc

SEQ ID NO: 1127756 - DNA, 25 bp, Homo sapien
tccgttggtcaaaacaggtgtagtg

SEQ ID NO: 1127757 - DNA, 25 bp, Homo sapien
ggtcaaaacaggtgtagtgcactat

SEQ ID NO: 1127758 - DNA, 25 bp, Homo sapien
aaacaggtgtagtgcactattttct

SEQ ID NO: 1127759 - DNA, 25 bp, Homo sapien
caggtgtagtgcactattttctttc

SEQ ID NO: 1127760 - DNA, 25 bp, Homo sapien
tctccaccgtctctcaatcccactg

SEQ ID NO: 1127761 - DNA, 25 bp, Homo sapien
cagtgttagcatttcactggcctga

SEQ ID NO: 1127762 - DNA, 25 bp, Homo sapien
tgttagcatttcactggcctgatta

SEQ ID NO: 1127763 - DNA, 25 bp, Homo sapien
accgtctctcaatcccactgaaaaa

SEQ ID NO: 1127764 - DNA, 25 bp, Homo sapien
tcaggcacggcaaacaatttcaagt

SEQ ID NO: 1127765 - DNA, 25 bp, Homo sapien
gaatacgtctaaatgtgagcctgct

SEQ ID NO: 1127766 - DNA, 25 bp, Homo sapien
tcctcactcgggtaaatgccaggtg

SEQ ID NO: 1127767 - DNA, 25 bp, Homo sapien
tacagaacatgctctcatatcaggc

SEQ ID NO: 1127768 - DNA, 25 bp, Homo sapien
ggaaaggccacaattttactcactc

SEQ ID NO: 1127769 - DNA, 25 bp, Homo sapien
tactcactctatcaaatagaaaaca

SEQ ID NO: 1127770 - DNA, 25 bp, Homo sapien
tcactgcaagcggttagctcttctt

SEQ ID NO: 1127771 - DNA, 25 bp, Homo sapien
agtgctcatgaagaggggtttaatg

SEQ ID NO: 1127772 - DNA, 25 bp, Homo sapien
gagctcatcctagtagatcatatta

SEQ ID NO: 1127773 - DNA, 25 bp, Homo sapien
tagaagctgttatccacagcaaagt

SEQ ID NO: 1127774 - DNA, 25 bp, Homo sapien
catgaacgcatagtgaagaacaaca

SEQ ID NO: 1127775 - DNA, 25 bp, Homo sapien
gcaagtaagtacaaggagctcatcc

SEQ ID NO: 1127776 - DNA, 25 bp, Homo sapien
caagtagctgcagaattaatcgttc

SEQ ID NO: 1127777 - DNA, 25 bp, Homo sapien
ctattctggctcactactgtaggca

SEQ ID NO: 1127778 - DNA, 25 bp, Homo sapien
taaaacatacaggaagttcacccac

SEQ ID NO: 1127779 - DNA, 25 bp, Homo sapien
taacttaaacccaatcaacagatcc

SEQ ID NO: 1127780 - DNA, 25 bp, Homo sapien
tggacctttcttccatgacaatcat

SEQ ID NO: 1127781 - DNA, 25 bp, Homo sapien
ctggacctttcttccatgacaatca

SEQ ID NO: 1127782 - DNA, 25 bp, Homo sapien
tggcagcgacagttgtaccctcata

SEQ ID NO: 1127783 - DNA, 25 bp, Homo sapien
cctactcttgaggaaagccagtgtt

SEQ ID NO: 1127784 - DNA, 25 bp, Homo sapien
cctgaggtgagttatttcagtgcct

SEQ ID NO: 1127785 - DNA, 25 bp, Homo sapien
tataccgtgtgctcaccaaagacca

SEQ ID NO: 1127786 - DNA, 25 bp, Homo sapien
cagagggcagatccatgaagaggcc

SEQ ID NO: 1127787 - DNA, 25 bp, Homo sapien
gagacagagggcagatccatgaaga

SEQ ID NO: 1127788 - DNA, 25 bp, Homo sapien
acagagggcagatccatgaagaggc

SEQ ID NO: 1127789 - DNA, 25 bp, Homo sapien
agacagagggcagatccatgaagag

SEQ ID NO: 1127790 - DNA, 25 bp, Homo sapien
tcacttcctccactttgagtgacag

SEQ ID NO: 1127791 - DNA, 25 bp, Homo sapien
cttcctccactttgagtgacagctg

SEQ ID NO: 1127792 - DNA, 25 bp, Homo sapien
acagctgttacggtgatagtgttga

SEQ ID NO: 1127793 - DNA, 25 bp, Homo sapien
acggtgatagtgttgatctttacaa

SEQ ID NO: 1127794 - DNA, 25 bp, Homo sapien
tagaacacccaagaatgacacaaaa

SEQ ID NO: 1127795 - DNA, 25 bp, Homo sapien
aacacccaagaatgacacaaaacta

SEQ ID NO: 1127796 - DNA, 25 bp, Homo sapien
tttagaacacccaagaatgacacaa

SEQ ID NO: 1127797 - DNA, 25 bp, Homo sapien
ttagaacacccaagaatgacacaaa

SEQ ID NO: 1127798 - DNA, 25 bp, Homo sapien
cagacaggagtgctctgtaggcttc

SEQ ID NO: 1127799 - DNA, 25 bp, Homo sapien
agccagacaggagtgctctgtaggc

SEQ ID NO: 1127800 - DNA, 25 bp, Homo sapien
tagggggggtttgagccagacagga

SEQ ID NO: 1127801 - DNA, 25 bp, Homo sapien
acaggagtgctctgtaggcttcttc

SEQ ID NO: 1127802 - DNA, 25 bp, Homo sapien
ttgttcccttgaaggctaactgcca

SEQ ID NO: 1127803 - DNA, 25 bp, Homo sapien
gttcccttgaaggctaactgccaag

SEQ ID NO: 1127804 - DNA, 25 bp, Homo sapien
actgaaaggcctcttgttcccttga

SEQ ID NO: 1127805 - DNA, 25 bp, Homo sapien
tcttgttcccttgaaggctaactgc

SEQ ID NO: 1127806 - DNA, 25 bp, Homo sapien
cattaaggtaaatgactgcaatctt

SEQ ID NO: 1127807 - DNA, 25 bp, Homo sapien
aatggcaaattggttttaactcagg

SEQ ID NO: 1127808 - DNA, 25 bp, Homo sapien
cacccacacggccaacaatttttct

SEQ ID NO: 1127809 - DNA, 25 bp, Homo sapien
aactcaggtatttaagagcttttca

SEQ ID NO: 1127810 - DNA, 25 bp, Homo sapien
tgaggctgccgctagaaaggcatgt

SEQ ID NO: 1127811 - DNA, 25 bp, Homo sapien
tctaattcagtaggccaaaggcagg

SEQ ID NO: 1127812 - DNA, 25 bp, Homo sapien
ggcatcacccggatagttccacaga

SEQ ID NO: 1127813 - DNA, 25 bp, Homo sapien
taaacccagagaacattgtgcatgc

SEQ ID NO: 1127814 - DNA, 25 bp, Homo sapien
gattgtaagtgcaatttccaaagga

SEQ ID NO: 1127815 - DNA, 25 bp, Homo sapien
tctgattccctgcaaacagtcgaga

SEQ ID NO: 1127816 - DNA, 25 bp, Homo sapien
cagtcgagaatggtgagattgtaag

SEQ ID NO: 1127817 - DNA, 25 bp, Homo sapien
ccctgcaaacagtcgagaatggtga

SEQ ID NO: 1127818 - DNA, 25 bp, Homo sapien
agtcaaaaaatccatgttgtaatcc

SEQ ID NO: 1127819 - DNA, 25 bp, Homo sapien
catccacatcaaatgtctcaaagtc

SEQ ID NO: 1127820 - DNA, 25 bp, Homo sapien
tctcaaagtcaaaaaatccatgttg

SEQ ID NO: 1127821 - DNA, 25 bp, Homo sapien
ctcataatgttcatattcatccaca

SEQ ID NO: 1127822 - DNA, 25 bp, Homo sapien
tttgcaatacatgagtgtgacaggg

SEQ ID NO: 1127823 - DNA, 25 bp, Homo sapien
cacccactcgatttgcaatacatga

SEQ ID NO: 1127824 - DNA, 25 bp, Homo sapien
atttagcacccactcgatttgcaat

SEQ ID NO: 1127825 - DNA, 25 bp, Homo sapien
ctcgatttgcaatacatgagtgtga

SEQ ID NO: 1127826 - DNA, 25 bp, Homo sapien
atcaaaccatggcaagccttttggt

SEQ ID NO: 1127827 - DNA, 25 bp, Homo sapien
catcaaaccatggcaagccttttgg

SEQ ID NO: 1127828 - DNA, 25 bp, Homo sapien
aaccatggcaagccttttggtaaat

SEQ ID NO: 1127829 - DNA, 25 bp, Homo sapien
tcaaaccatggcaagccttttggta

SEQ ID NO: 1127830 - DNA, 25 bp, Homo sapien
ggaagcaatgttgttctcttcactg

SEQ ID NO: 1127831 - DNA, 25 bp, Homo sapien
tccagctaatgagacaccttgtagg

SEQ ID NO: 1127832 - DNA, 25 bp, Homo sapien
tctaaacacgctaagagatcctcag

SEQ ID NO: 1127833 - DNA, 25 bp, Homo sapien
catacatagagtcaggtgctcctcc

SEQ ID NO: 1127834 - DNA, 25 bp, Homo sapien
tgtaggaaagccaactgaacacagc

SEQ ID NO: 1127835 - DNA, 25 bp, Homo sapien
ttataattcttatacaatttaggaa

SEQ ID NO: 1127836 - DNA, 25 bp, Homo sapien
tataattcttatacaatttaggaaa

SEQ ID NO: 1127837 - DNA, 25 bp, Homo sapien
tttataattcttatacaatttagga

SEQ ID NO: 1127838 - DNA, 25 bp, Homo sapien
ttttcctggaacaatccagttgaag

SEQ ID NO: 1127839 - DNA, 25 bp, Homo sapien
attttcctggaacaatccagttgaa

SEQ ID NO: 1127840 - DNA, 25 bp, Homo sapien
gcttttaggatgtggtccactaaat

SEQ ID NO: 1127841 - DNA, 25 bp, Homo sapien
ttgcttttaggatgtggtccactaa

SEQ ID NO: 1127842 - DNA, 25 bp, Homo sapien
gaatccacacgccaacaattactgg

SEQ ID NO: 1127843 - DNA, 25 bp, Homo sapien
caattactggcctatgaacctggac

SEQ ID NO: 1127844 - DNA, 25 bp, Homo sapien
agaggcttagcacccttcctggcag

SEQ ID NO: 1127845 - DNA, 25 bp, Homo sapien
aatatgacagggcacaatacatgca

SEQ ID NO: 1127846 - DNA, 25 bp, Homo sapien
tatttccctgcaacagatttatagc

SEQ ID NO: 1127847 - DNA, 25 bp, Homo sapien
ttatttccctgcaacagatttatag

SEQ ID NO: 1127848 - DNA, 25 bp, Homo sapien
agtaagcaaaaggcatgcatttcat

SEQ ID NO: 1127849 - DNA, 25 bp, Homo sapien
gagcagtaagcaaaaggcatgcatt

SEQ ID NO: 1127850 - DNA, 25 bp, Homo sapien
aaaggaacaaaggagcagtaagcaa

SEQ ID NO: 1127851 - DNA, 25 bp, Homo sapien
aaggagcagtaagcaaaaggcatgc

SEQ ID NO: 1127852 - DNA, 25 bp, Homo sapien
ataaggaaagtaggcttcaggggcg

SEQ ID NO: 1127853 - DNA, 25 bp, Homo sapien
gaaagtaggcttcaggggcgtgaag

SEQ ID NO: 1127854 - DNA, 25 bp, Homo sapien
aaggaaagtaggcttcaggggcgtg

SEQ ID NO: 1127855 - DNA, 25 bp, Homo sapien
ggaaagtaggcttcaggggcgtgaa

SEQ ID NO: 1127856 - DNA, 25 bp, Homo sapien
gaaccttcgcacgatgttgtcactg

SEQ ID NO: 1127857 - DNA, 25 bp, Homo sapien
ctttgcagtgaacggcgatggcccc

SEQ ID NO: 1127858 - DNA, 25 bp, Homo sapien
gaagaggtcatagtgctcgaagcca

SEQ ID NO: 1127859 - DNA, 25 bp, Homo sapien
tggccccttcggtgttctcacagat

SEQ ID NO: 1127860 - DNA, 25 bp, Homo sapien
ggattatctcctgctaaacgttgat

SEQ ID NO: 1127861 - DNA, 25 bp, Homo sapien
tctttgcacaaggtctctcaggtga

SEQ ID NO: 1127862 - DNA, 25 bp, Homo sapien
gaaataaggccaaattaatctcagg

SEQ ID NO: 1127863 - DNA, 25 bp, Homo sapien
tgtgtcaatccaagatacggatggc

SEQ ID NO: 1127864 - DNA, 25 bp, Homo sapien
tggccggcatattctaatccaagca

SEQ ID NO: 1127865 - DNA, 25 bp, Homo sapien
gtcctataatagagcctggccggca

SEQ ID NO: 1127866 - DNA, 25 bp, Homo sapien
tatttcagcatgtgtaaacctgtag

SEQ ID NO: 1127867 - DNA, 25 bp, Homo sapien
tgtagtgtttcattacataacaggc

SEQ ID NO: 1127868 - DNA, 25 bp, Homo sapien
cttcactggatggtcgatttttcag

SEQ ID NO: 1127869 - DNA, 25 bp, Homo sapien
ctccttggacccacaacgatgcttg

SEQ ID NO: 1127870 - DNA, 25 bp, Homo sapien
gatggtcgatttttcagtttggatc

SEQ ID NO: 1127871 - DNA, 25 bp, Homo sapien
gtttggatcggaaaatgtctccttg

SEQ ID NO: 1127872 - DNA, 25 bp, Homo sapien
ctctccaaatcgttccatgttttgt

SEQ ID NO: 1127873 - DNA, 25 bp, Homo sapien
tctccaaatcgttccatgttttgtg

SEQ ID NO: 1127874 - DNA, 25 bp, Homo sapien
aacacaagcttggactcagacagac

SEQ ID NO: 1127875 - DNA, 25 bp, Homo sapien
taaaaacttggtactcgtggcatcc

SEQ ID NO: 1127876 - DNA, 25 bp, Homo sapien
tcttgctatatagacggatggctct

SEQ ID NO: 1127877 - DNA, 25 bp, Homo sapien
ggctttcaaagcaccacttgtggta

SEQ ID NO: 1127878 - DNA, 25 bp, Homo sapien
caggatggtgaggtacgtggctgtc

SEQ ID NO: 1127879 - DNA, 25 bp, Homo sapien
gatggtgaggtacgtggctgtctct

SEQ ID NO: 1127880 - DNA, 25 bp, Homo sapien
gaggtacgtggctgtctctgacttt

SEQ ID NO: 1127881 - DNA, 25 bp, Homo sapien
tctccctgggttataccatttttca

SEQ ID NO: 1127882 - DNA, 25 bp, Homo sapien
tggatgtccttttgtatcatctgac

SEQ ID NO: 1127883 - DNA, 25 bp, Homo sapien
tgggacactgctcttggatgtcctt

SEQ ID NO: 1127884 - DNA, 25 bp, Homo sapien
cttggatgtccttttgtatcatctg

SEQ ID NO: 1127885 - DNA, 25 bp, Homo sapien
gaaaggctgggacactgctcttgga

SEQ ID NO: 1127886 - DNA, 25 bp, Homo sapien
aactgcagatccttgcagggatgaa

SEQ ID NO: 1127887 - DNA, 25 bp, Homo sapien
taactgcagatccttgcagggatga

SEQ ID NO: 1127888 - DNA, 25 bp, Homo sapien
gtaactgcagatccttgcagggatg

SEQ ID NO: 1127889 - DNA, 25 bp, Homo sapien
gttctgttgatcctcttggccgttg

SEQ ID NO: 1127890 - DNA, 25 bp, Homo sapien
ttcttacagtggcacccgaagacaa

SEQ ID NO: 1127891 - DNA, 25 bp, Homo sapien
aaagaagttctgttgatcctcttgg

SEQ ID NO: 1127892 - DNA, 25 bp, Homo sapien
cagtggcacccgaagacaaagaagt

SEQ ID NO: 1127893 - DNA, 25 bp, Homo sapien
ttgttgagctcagggtaatttctgg

SEQ ID NO: 1127894 - DNA, 25 bp, Homo sapien
gatagaacggctcaggaatctcgct

SEQ ID NO: 1127895 - DNA, 25 bp, Homo sapien
cattcaagaggttggtaaacgggct

SEQ ID NO: 1127896 - DNA, 25 bp, Homo sapien
ctgccttagaggatgaggaggtctt

SEQ ID NO: 1127897 - DNA, 25 bp, Homo sapien
agcctcggctgggaaggcaaggcac

SEQ ID NO: 1127898 - DNA, 25 bp, Homo sapien
gcaaggcacagaagttgcattcagg

SEQ ID NO: 1127899 - DNA, 25 bp, Homo sapien
gcacagaagttgcattcagggttct

SEQ ID NO: 1127900 - DNA, 25 bp, Homo sapien
ttctgaggaccaggaggtggtgtct

SEQ ID NO: 1127901 - DNA, 25 bp, Homo sapien
cttggcgtttacttgaagaggagct

SEQ ID NO: 1127902 - DNA, 25 bp, Homo sapien
agaggagctagcagaatgtagtgca

SEQ ID NO: 1127903 - DNA, 25 bp, Homo sapien
tagacagtttcacagcacagaggga

SEQ ID NO: 1127904 - DNA, 25 bp, Homo sapien
gaatgtagtgcatagacagtttcac

SEQ ID NO: 1127905 - DNA, 25 bp, Homo sapien
tgttcatgccctgagtacgatcagt

SEQ ID NO: 1127906 - DNA, 25 bp, Homo sapien
tagcaagtgtgaagcgacaccaggc

SEQ ID NO: 1127907 - DNA, 25 bp, Homo sapien
gaagcaggcactccctagatgatgg

SEQ ID NO: 1127908 - DNA, 25 bp, Homo sapien
ctgagtgggccatacgcagcacact

SEQ ID NO: 1127909 - DNA, 25 bp, Homo sapien
tacaaacagaatgacttcaaaaaac

SEQ ID NO: 1127910 - DNA, 25 bp, Homo sapien
gattcaaggcccacatccacaagat

SEQ ID NO: 1127911 - DNA, 25 bp, Homo sapien
gatgaggaaggccaataaccaatac

SEQ ID NO: 1127912 - DNA, 25 bp, Homo sapien
aggtgactctcaacacaaaagaggg

SEQ ID NO: 1127913 - DNA, 25 bp, Homo sapien
aacttggatgtgcacatttgcagtt

SEQ ID NO: 1127914 - DNA, 25 bp, Homo sapien
tgtgcacatttgcagttgaggagac

SEQ ID NO: 1127915 - DNA, 25 bp, Homo sapien
ggatgtgcacatttgcagttgagga

SEQ ID NO: 1127916 - DNA, 25 bp, Homo sapien
caacttggatgtgcacatttgcagt

SEQ ID NO: 1127917 - DNA, 25 bp, Homo sapien
cagatctggccttgaagaagtcggc

SEQ ID NO: 1127918 - DNA, 25 bp, Homo sapien
taatctgcgggagagactttcacca

SEQ ID NO: 1127919 - DNA, 25 bp, Homo sapien
tcggcagtaatctgcgggagagact

SEQ ID NO: 1127920 - DNA, 25 bp, Homo sapien
ccttgaagaagtcggcagtaatctg

SEQ ID NO: 1127921 - DNA, 25 bp, Homo sapien
caggttcgaaaggtgtgtgtgcatt

SEQ ID NO: 1127922 - DNA, 25 bp, Homo sapien
tgcatttcagggacttcaagactta

SEQ ID NO: 1127923 - DNA, 25 bp, Homo sapien
gaagtctgtgactttagtgcacctg

SEQ ID NO: 1127924 - DNA, 25 bp, Homo sapien
taacactagatgaaatgtagctggg

SEQ ID NO: 1127925 - DNA, 25 bp, Homo sapien
ctgctttttctcggtttcttctaag

SEQ ID NO: 1127926 - DNA, 25 bp, Homo sapien
caaagggcgaaagccacaatgtcat

SEQ ID NO: 1127927 - DNA, 25 bp, Homo sapien
gacagcggtgtcgacattaaatagt

SEQ ID NO: 1127928 - DNA, 25 bp, Homo sapien
ttaacatcgtgcaccaggaaaggct

SEQ ID NO: 1127929 - DNA, 25 bp, Homo sapien
tatggtccctgaccgcaaagggcga

SEQ ID NO: 1127930 - DNA, 25 bp, Homo sapien
gagtcttgctgtcggaatttaataa

SEQ ID NO: 1127931 - DNA, 25 bp, Homo sapien
gaagtactaccagcttgaaatctga

SEQ ID NO: 1127932 - DNA, 25 bp, Homo sapien
tgggacaacagacataaaccaggaa

SEQ ID NO: 1127933 - DNA, 25 bp, Homo sapien
tgaaatctgatcttaagacccaaaa

SEQ ID NO: 1127934 - DNA, 25 bp, Homo sapien
taatgaacatattcagactgaaggg

SEQ ID NO: 1127935 - DNA, 25 bp, Homo sapien
ttagtaatgaacatattcagactga

SEQ ID NO: 1127936 - DNA, 25 bp, Homo sapien
aatgaacatattcagactgaaggga

SEQ ID NO: 1127937 - DNA, 25 bp, Homo sapien
agtaatgaacatattcagactgaag

SEQ ID NO: 1127938 - DNA, 25 bp, Homo sapien
caaaccatgtgtgattacaggcaac

SEQ ID NO: 1127939 - DNA, 25 bp, Homo sapien
tccagatatgctagcgtgtgcagca

SEQ ID NO: 1127940 - DNA, 25 bp, Homo sapien
cactttcagtgtcgaagcagtccat

SEQ ID NO: 1127941 - DNA, 25 bp, Homo sapien
tataatagactcaaggtaccctccc

SEQ ID NO: 1127942 - DNA, 25 bp, Homo sapien
gattatgccatttccccaagtgggt

SEQ ID NO: 1127943 - DNA, 25 bp, Homo sapien
gagctccttgaagatatggatgacg

SEQ ID NO: 1127944 - DNA, 25 bp, Homo sapien
tccttgaagatatggatgacggcat

SEQ ID NO: 1127945 - DNA, 25 bp, Homo sapien
atttccccaagtgggttgtgagctc

SEQ ID NO: 1127946 - DNA, 25 bp, Homo sapien
caatcgaaaaacaccagcgaataca

SEQ ID NO: 1127947 - DNA, 25 bp, Homo sapien
tgggtttctctcacaatcgaaaaac

SEQ ID NO: 1127948 - DNA, 25 bp, Homo sapien
tattgggttccatacacttgtgcct

SEQ ID NO: 1127949 - DNA, 25 bp, Homo sapien
cacttgtgcctaaaccagttaatgt

SEQ ID NO: 1127950 - DNA, 25 bp, Homo sapien
aacatctttatgctgttttatagcc

SEQ ID NO: 1127951 - DNA, 25 bp, Homo sapien
cttggtctctcagatattacacaac

SEQ ID NO: 1127952 - DNA, 25 bp, Homo sapien
acaacatctttatgctgttttatag

SEQ ID NO: 1127953 - DNA, 25 bp, Homo sapien
ggtctctcagatattacacaactga

SEQ ID NO: 1127954 - DNA, 25 bp, Homo sapien
ggagcaagtgcccgcttctcccaag

SEQ ID NO: 1127955 - DNA, 25 bp, Homo sapien
tcagcaacagcatcagtggtccaga

SEQ ID NO: 1127956 - DNA, 25 bp, Homo sapien
ggctggtccttagccggtgtctcag

SEQ ID NO: 1127957 - DNA, 25 bp, Homo sapien
aagtaaagtggcgggctgcaagccc

SEQ ID NO: 1127958 - DNA, 25 bp, Homo sapien
ctagcgtcggcttctggcagcgcgg

SEQ ID NO: 1127959 - DNA, 25 bp, Homo sapien
gcagcgcggtccatcctgacactgt

SEQ ID NO: 1127960 - DNA, 25 bp, Homo sapien
agcgtcggcttctggcagcgcggtc

SEQ ID NO: 1127961 - DNA, 25 bp, Homo sapien
tggcagcgcggtccatcctgacact

SEQ ID NO: 1127962 - DNA, 25 bp, Homo sapien
ctggccaactcttcacacctccctc

SEQ ID NO: 1127963 - DNA, 25 bp, Homo sapien
tggccaactcttcacacctccctcg

SEQ ID NO: 1127964 - DNA, 25 bp, Homo sapien
tctggccaactcttcacacctccct

SEQ ID NO: 1127965 - DNA, 25 bp, Homo sapien
gcctctggtacagcgcctggtaggt

SEQ ID NO: 1127966 - DNA, 25 bp, Homo sapien
gacgacacgagatagatgaccatgc

SEQ ID NO: 1127967 - DNA, 25 bp, Homo sapien
tgcagctttcggaaggacgacacga

SEQ ID NO: 1127968 - DNA, 25 bp, Homo sapien
aatacaggagtgacaccgggatgcg

SEQ ID NO: 1127969 - DNA, 25 bp, Homo sapien
cagcagcgccgggtagtggactcgc

SEQ ID NO: 1127970 - DNA, 25 bp, Homo sapien
cgccgggtagtggactcgcggtggc

SEQ ID NO: 1127971 - DNA, 25 bp, Homo sapien
acgcacgcggcgcacgatgcccagg

SEQ ID NO: 1127972 - DNA, 25 bp, Homo sapien
gggtagtggactcgcggtggcgcgg

SEQ ID NO: 1127973 - DNA, 25 bp, Homo sapien
agccgggcaactggtgcagcaggtg

SEQ ID NO: 1127974 - DNA, 25 bp, Homo sapien
gcagccgggcaactggtgcagcagg

SEQ ID NO: 1127975 - DNA, 25 bp, Homo sapien
gcggcgcagccgggcaactggtgca

SEQ ID NO: 1127976 - DNA, 25 bp, Homo sapien
gcgcagccgggcaactggtgcagca

SEQ ID NO: 1127977 - DNA, 25 bp, Homo sapien
gcagcaccgacaggccgctgagacg

SEQ ID NO: 1127978 - DNA, 25 bp, Homo sapien
agcagcagcaccgacaggccgctga

SEQ ID NO: 1127979 - DNA, 25 bp, Homo sapien
tgcgtggccagcaggaagacgcagc

SEQ ID NO: 1127980 - DNA, 25 bp, Homo sapien
gcaccgacaggccgctgagacgccg

SEQ ID NO: 1127981 - DNA, 25 bp, Homo sapien
cacggagcggcggaactcctcgttc

SEQ ID NO: 1127982 - DNA, 25 bp, Homo sapien
ccacgtgtagagcagcggattgagc

SEQ ID NO: 1127983 - DNA, 25 bp, Homo sapien
cggcagcgagaagccgctggccagg

SEQ ID NO: 1127984 - DNA, 25 bp, Homo sapien
ggacactgcgggcacggctgtggcg

SEQ ID NO: 1127985 - DNA, 25 bp, Homo sapien
cggtgcccaaggacgtcggaagccg

SEQ ID NO: 1127986 - DNA, 25 bp, Homo sapien
gcgacggtgcccaaggacgtcggaa

SEQ ID NO: 1127987 - DNA, 25 bp, Homo sapien
aggaggcgacggtgcccaaggacgt

SEQ ID NO: 1127988 - DNA, 25 bp, Homo sapien
tcggaagccggggatctccgcttcc

SEQ ID NO: 1127989 - DNA, 25 bp, Homo sapien
acgccttggttcaggtagcccgctg

SEQ ID NO: 1127990 - DNA, 25 bp, Homo sapien
aggtggccgtccaaaatgacttcgg

SEQ ID NO: 1127991 - DNA, 25 bp, Homo sapien
tcgggcgccccacttaaagagacgc

SEQ ID NO: 1127992 - DNA, 25 bp, Homo sapien
tctatcgggcttcgcggcggaagtc

SEQ ID NO: 1127993 - DNA, 25 bp, Homo sapien
taaaacgccagtttgcaagttcttc

SEQ ID NO: 1127994 - DNA, 25 bp, Homo sapien
aaacgccagtttgcaagttcttcaa

SEQ ID NO: 1127995 - DNA, 25 bp, Homo sapien
aacgccagtttgcaagttcttcaag

SEQ ID NO: 1127996 - DNA, 25 bp, Homo sapien
cgccagtttgcaagttcttcaagtc

SEQ ID NO: 1127997 - DNA, 25 bp, Homo sapien
caaaatgagggtagcaacaagtgtg

SEQ ID NO: 1127998 - DNA, 25 bp, Homo sapien
taatggcaactcatactggtgggca

SEQ ID NO: 1127999 - DNA, 25 bp, Homo sapien
tggttcatgcacactcaaggcgctt

SEQ ID NO: 1128000 - DNA, 25 bp, Homo sapien
tatagtacagaatgttcaaagctgc

SEQ ID NO: 1128001 - DNA, 25 bp, Homo sapien
aattgcccaggcgtgcaacaaagca

SEQ ID NO: 1128002 - DNA, 25 bp, Homo sapien
tgggtcaagacaggaagaactctag

SEQ ID NO: 1128003 - DNA, 25 bp, Homo sapien
taatgtcctggctgaaattgcccag

SEQ ID NO: 1128004 - DNA, 25 bp, Homo sapien
taagttctagcatctaggagcatgc

SEQ ID NO: 1128005 - DNA, 25 bp, Homo sapien
gttactttcatcactagtgctttgg

SEQ ID NO: 1128006 - DNA, 25 bp, Homo sapien
ctaaaattagataaagccagcaaga

SEQ ID NO: 1128007 - DNA, 25 bp, Homo sapien
tctgttacaacgttctcaaggaggt

SEQ ID NO: 1128008 - DNA, 25 bp, Homo sapien
tcaaggaggtatgcaaggaaaccag

SEQ ID NO: 1128009 - DNA, 25 bp, Homo sapien
tagtgccctggtaagccattttcag

SEQ ID NO: 1128010 - DNA, 25 bp, Homo sapien
gaaagctgacttcatatgcgtggca

SEQ ID NO: 1128011 - DNA, 25 bp, Homo sapien
taaagtaggtctcccattggcatgg

SEQ ID NO: 1128012 - DNA, 25 bp, Homo sapien
aagatgattctcagtgctagccaga

SEQ ID NO: 1128013 - DNA, 25 bp, Homo sapien
ggtctccacgaagaggaatttttgc

SEQ ID NO: 1128014 - DNA, 25 bp, Homo sapien
ttctctggtctccacgaagaggaat

SEQ ID NO: 1128015 - DNA, 25 bp, Homo sapien
gaagaggaatttttgcttcgcaccc

SEQ ID NO: 1128016 - DNA, 25 bp, Homo sapien
gaatttttgcttcgcacccctggct

SEQ ID NO: 1128017 - DNA, 25 bp, Homo sapien
gatatcccgcacgaaagggacctca

SEQ ID NO: 1128018 - DNA, 25 bp, Homo sapien
cagttgcggcggcaaagggctatcc

SEQ ID NO: 1128019 - DNA, 25 bp, Homo sapien
tggcactggacaggatatcccgcac

SEQ ID NO: 1128020 - DNA, 25 bp, Homo sapien
caaatggccccgctacatgcagttg

SEQ ID NO: 1128021 - DNA, 25 bp, Homo sapien
taggacatagctcaaatgacctgaa

SEQ ID NO: 1128022 - DNA, 25 bp, Homo sapien
ccaagctgatttatgtgtagataca

SEQ ID NO: 1128023 - DNA, 25 bp, Homo sapien
gtagatacagcctaaatttatatcc

SEQ ID NO: 1128024 - DNA, 25 bp, Homo sapien
taataatttaacagctaggacatag

SEQ ID NO: 1128025 - DNA, 25 bp, Homo sapien
cagctgcatgatacgctcacttaga

SEQ ID NO: 1128026 - DNA, 25 bp, Homo sapien
gcatgatacgctcacttagagcttg

SEQ ID NO: 1128027 - DNA, 25 bp, Homo sapien
gcttgttgaaactctcgccttttct

SEQ ID NO: 1128028 - DNA, 25 bp, Homo sapien
cacttagagcttgttgaaactctcg

SEQ ID NO: 1128029 - DNA, 25 bp, Homo sapien
cagtcccactcaatggatactgcag

SEQ ID NO: 1128030 - DNA, 25 bp, Homo sapien
cagtagctgaagcagtagcactgaa

SEQ ID NO: 1128031 - DNA, 25 bp, Homo sapien
ttttcagctactgaaggggcctcag

SEQ ID NO: 1128032 - DNA, 25 bp, Homo sapien
taagcctctgttccaatattaccct

SEQ ID NO: 1128033 - DNA, 25 bp, Homo sapien
ggtcatcagtggaagacagtccccg

SEQ ID NO: 1128034 - DNA, 25 bp, Homo sapien
cagtggaagacagtccccgtttcct

SEQ ID NO: 1128035 - DNA, 25 bp, Homo sapien
gaggtcatcagtggaagacagtccc

SEQ ID NO: 1128036 - DNA, 25 bp, Homo sapien
catcagtggaagacagtccccgttt

SEQ ID NO: 1128037 - DNA, 25 bp, Homo sapien
gatttttaggagtccagatatctgt

SEQ ID NO: 1128038 - DNA, 25 bp, Homo sapien
caatgttgtcttcacgattaagtgg

SEQ ID NO: 1128039 - DNA, 25 bp, Homo sapien
gctgctttggcttgattagacttga

SEQ ID NO: 1128040 - DNA, 25 bp, Homo sapien
gatatctgtgtttagttctgctgct

SEQ ID NO: 1128041 - DNA, 25 bp, Homo sapien
gggtgatgctactcatttctgaaat

SEQ ID NO: 1128042 - DNA, 25 bp, Homo sapien
tctccattgtaaagcaagggtgatg

SEQ ID NO: 1128043 - DNA, 25 bp, Homo sapien
tcaatactcagttttctccattgta

SEQ ID NO: 1128044 - DNA, 25 bp, Homo sapien
tgtaaagcaagggtgatgctactca

SEQ ID NO: 1128045 - DNA, 25 bp, Homo sapien
gcaacttccacatggaaataatcag

SEQ ID NO: 1128046 - DNA, 25 bp, Homo sapien
tttccattggccactgtaggatttg

SEQ ID NO: 1128047 - DNA, 25 bp, Homo sapien
gccactgtaggatttgcaacttcca

SEQ ID NO: 1128048 - DNA, 25 bp, Homo sapien
ttccacatggaaataatcagtgaga

SEQ ID NO: 1128049 - DNA, 25 bp, Homo sapien
gactactgctgagactcaattgacg

SEQ ID NO: 1128050 - DNA, 25 bp, Homo sapien
gaaccagaggcctttcactttgctt

SEQ ID NO: 1128051 - DNA, 25 bp, Homo sapien
tggttttgaaactaaatcagggaca

SEQ ID NO: 1128052 - DNA, 25 bp, Homo sapien
tcagggacaagggttatgaaccaga

SEQ ID NO: 1128053 - DNA, 25 bp, Homo sapien
gcattactttgtgagattggtgctt

SEQ ID NO: 1128054 - DNA, 25 bp, Homo sapien
tcttgcactgcattactttgtgaga

SEQ ID NO: 1128055 - DNA, 25 bp, Homo sapien
gtccggcgggtcttagaaatattca

SEQ ID NO: 1128056 - DNA, 25 bp, Homo sapien
cataataccacttttcctgggcata

SEQ ID NO: 1128057 - DNA, 25 bp, Homo sapien
tcacttagatctgcagttgggctga

SEQ ID NO: 1128058 - DNA, 25 bp, Homo sapien
acttagatctgcagttgggctgaac

SEQ ID NO: 1128059 - DNA, 25 bp, Homo sapien
agatctgcagttgggctgaacacac

SEQ ID NO: 1128060 - DNA, 25 bp, Homo sapien
ttagatctgcagttgggctgaacac

SEQ ID NO: 1128061 - DNA, 25 bp, Homo sapien
ggcagctgcttgtcatgaaacccac

SEQ ID NO: 1128062 - DNA, 25 bp, Homo sapien
caacagcattatcagctcctgttct

SEQ ID NO: 1128063 - DNA, 25 bp, Homo sapien
aataagagcattaacaaacaacagc

SEQ ID NO: 1128064 - DNA, 25 bp, Homo sapien
caaaaagtagtttacaataagagca

SEQ ID NO: 1128065 - DNA, 25 bp, Homo sapien
cagtaactctttggccagcatgctc

SEQ ID NO: 1128066 - DNA, 25 bp, Homo sapien
taatgacccacgaattgaatcacga

SEQ ID NO: 1128067 - DNA, 25 bp, Homo sapien
tgctgcggccagtgatgataatgac

SEQ ID NO: 1128068 - DNA, 25 bp, Homo sapien
taatattggtcaacatcactgggag

SEQ ID NO: 1128069 - DNA, 25 bp, Homo sapien
gaggcaagggattatatgtacacac

SEQ ID NO: 1128070 - DNA, 25 bp, Homo sapien
ttgccattgtctgtaaggctgattg

SEQ ID NO: 1128071 - DNA, 25 bp, Homo sapien
tgacattgccattgtctgtaaggct

SEQ ID NO: 1128072 - DNA, 25 bp, Homo sapien
cattgccattgtctgtaaggctgat

SEQ ID NO: 1128073 - DNA, 25 bp, Homo sapien
gccattgtctgtaaggctgattgtc

SEQ ID NO: 1128074 - DNA, 25 bp, Homo sapien
attcagggggttctattgtcttctc

SEQ ID NO: 1128075 - DNA, 25 bp, Homo sapien
ttcagggggttctattgtcttctcc

SEQ ID NO: 1128076 - DNA, 25 bp, Homo sapien
tctcgacatatttaacctctttaag

SEQ ID NO: 1128077 - DNA, 25 bp, Homo sapien
tattttctcgacatatttaacctct

SEQ ID NO: 1128078 - DNA, 25 bp, Homo sapien
gctttattttctcgacatatttaac

SEQ ID NO: 1128079 - DNA, 25 bp, Homo sapien
tttctcgacatatttaacctcttta

SEQ ID NO: 1128080 - DNA, 25 bp, Homo sapien
gctgctgtatcagttggtatctcaa

SEQ ID NO: 1128081 - DNA, 25 bp, Homo sapien
agttggtatctcaatcgggctctga

SEQ ID NO: 1128082 - DNA, 25 bp, Homo sapien
tcaatcgggctctgagatacttcag

SEQ ID NO: 1128083 - DNA, 25 bp, Homo sapien
tcgggctctgagatacttcaggcat

SEQ ID NO: 1128084 - DNA, 25 bp, Homo sapien
tcctcttggatactgatgtggctcc

SEQ ID NO: 1128085 - DNA, 25 bp, Homo sapien
tggatctcctcttggatactgatgt

SEQ ID NO: 1128086 - DNA, 25 bp, Homo sapien
tggttggagaggcttctggatctcc

SEQ ID NO: 1128087 - DNA, 25 bp, Homo sapien
ctggttggagaggcttctggatctc

SEQ ID NO: 1128088 - DNA, 25 bp, Homo sapien
ccagtgaggcccgatgcagataccg

SEQ ID NO: 1128089 - DNA, 25 bp, Homo sapien
cctgggagggtattcagctcctgaa

SEQ ID NO: 1128090 - DNA, 25 bp, Homo sapien
gcagataccgcggagtgaaatagaa

SEQ ID NO: 1128091 - DNA, 25 bp, Homo sapien
gttgcagaggcggagggaaatccct

SEQ ID NO: 1128092 - DNA, 25 bp, Homo sapien
taagttgctgtcgtgatgagaaaat

SEQ ID NO: 1128093 - DNA, 25 bp, Homo sapien
tttaagttgctgtcgtgatgagaaa

SEQ ID NO: 1128094 - DNA, 25 bp, Homo sapien
gctgtcgtgatgagaaaatagtggt

SEQ ID NO: 1128095 - DNA, 25 bp, Homo sapien
gttgctgtcgtgatgagaaaatagt

SEQ ID NO: 1128096 - DNA, 25 bp, Homo sapien
ttgaggctccaaggatcacgaccat

SEQ ID NO: 1128097 - DNA, 25 bp, Homo sapien
tccaaagtatatttgaggctccaag

SEQ ID NO: 1128098 - DNA, 25 bp, Homo sapien
atccaaagtatatttgaggctccaa

SEQ ID NO: 1128099 - DNA, 25 bp, Homo sapien
accaatctgagcaagatatctagat

SEQ ID NO: 1128100 - DNA, 25 bp, Homo sapien
gattctggggtggtctcgattttaa

SEQ ID NO: 1128101 - DNA, 25 bp, Homo sapien
ctgagcaagatatctagattctggg

SEQ ID NO: 1128102 - DNA, 25 bp, Homo sapien
ggtggtctcgattttaaaagcttga

SEQ ID NO: 1128103 - DNA, 25 bp, Homo sapien
tcagtggactatctatctgggttct

SEQ ID NO: 1128104 - DNA, 25 bp, Homo sapien
cattcgtcaccttcccattcagtgg

SEQ ID NO: 1128105 - DNA, 25 bp, Homo sapien
gtcagcgtagatgtggtcccctcat

SEQ ID NO: 1128106 - DNA, 25 bp, Homo sapien
gattcacaagttgctgtgcacaggt

SEQ ID NO: 1128107 - DNA, 25 bp, Homo sapien
aacaaatacatggatgggctttttg

SEQ ID NO: 1128108 - DNA, 25 bp, Homo sapien
caatgtgtaatttagctcggcaaac

SEQ ID NO: 1128109 - DNA, 25 bp, Homo sapien
cctgtcaaatgggtatacatcagca

SEQ ID NO: 1128110 - DNA, 25 bp, Homo sapien
cacttgactgtgatcggcttcccag

SEQ ID NO: 1128111 - DNA, 25 bp, Homo sapien
agtaagtctatctccagcctgtcaa

SEQ ID NO: 1128112 - DNA, 25 bp, Homo sapien
cagctttgtggatggattcacagaa

SEQ ID NO: 1128113 - DNA, 25 bp, Homo sapien
ccagaaaggtgctgtagattcccat

SEQ ID NO: 1128114 - DNA, 25 bp, Homo sapien
tggtcacagagccaccttcttgcag

SEQ ID NO: 1128115 - DNA, 25 bp, Homo sapien
gaaaatctctggagctggtagaccc

SEQ ID NO: 1128116 - DNA, 25 bp, Homo sapien
tataaagcagaatacagaattcctg

SEQ ID NO: 1128117 - DNA, 25 bp, Homo sapien
cctgggaaatattaggtgtacaatc

SEQ ID NO: 1128118 - DNA, 25 bp, Homo sapien
actaaagagctatttagccccagga

SEQ ID NO: 1128119 - DNA, 25 bp, Homo sapien
aagtatgaactatgctgagcctggg

SEQ ID NO: 1128120 - DNA, 25 bp, Homo sapien
ttattttggctcttactaaggaata

SEQ ID NO: 1128121 - DNA, 25 bp, Homo sapien
agatatattattttggctcttacta

SEQ ID NO: 1128122 - DNA, 25 bp, Homo sapien
tattattttggctcttactaaggaa

SEQ ID NO: 1128123 - DNA, 25 bp, Homo sapien
aaaagatatattattttggctctta

SEQ ID NO: 1128124 - DNA, 25 bp, Homo sapien
catttattatgtgttaggtactgtg

SEQ ID NO: 1128125 - DNA, 25 bp, Homo sapien
ggtactgtgctaagaatccaaacat

SEQ ID NO: 1128126 - DNA, 25 bp, Homo sapien
gctgcccatgtttataatctattca

SEQ ID NO: 1128127 - DNA, 25 bp, Homo sapien
gactatgctgcccatgtttataatc

SEQ ID NO: 1128128 - DNA, 25 bp, Homo sapien
gccgagatgtgagggcaaactccta

SEQ ID NO: 1128129 - DNA, 25 bp, Homo sapien
tagtatcccatgtgatgcaaagtgc

SEQ ID NO: 1128130 - DNA, 25 bp, Homo sapien
aatgctaacctaacatccaaccgag

SEQ ID NO: 1128131 - DNA, 25 bp, Homo sapien
tccaaccgagataatccacttaggg

SEQ ID NO: 1128132 - DNA, 25 bp, Homo sapien
gctcagagggctgtctatctgggtt

SEQ ID NO: 1128133 - DNA, 25 bp, Homo sapien
ggtccaggggagatctcaacagtaa

SEQ ID NO: 1128134 - DNA, 25 bp, Homo sapien
tctccaatctgagcagcaatccggg

SEQ ID NO: 1128135 - DNA, 25 bp, Homo sapien
gcccatgacactacatgtcaacatg

SEQ ID NO: 1128136 - DNA, 25 bp, Homo sapien
tttcttatgtccacaagtcactgtg

SEQ ID NO: 1128137 - DNA, 25 bp, Homo sapien
ataagagtgttcgttctcaaaactc

SEQ ID NO: 1128138 - DNA, 25 bp, Homo sapien
gttcgttctcaaaactcacagggct

SEQ ID NO: 1128139 - DNA, 25 bp, Homo sapien
agcgtggaattggtcccctcactcc

SEQ ID NO: 1128140 - DNA, 25 bp, Homo sapien
taattcaatctccagccggtcaagg

SEQ ID NO: 1128141 - DNA, 25 bp, Homo sapien
gaaccttgcagcttacagtgacaga

SEQ ID NO: 1128142 - DNA, 25 bp, Homo sapien
gagatttcatatccgtatcctccaa

SEQ ID NO: 1128143 - DNA, 25 bp, Homo sapien
ggccaccactcatctcgatttctgg

SEQ ID NO: 1128144 - DNA, 25 bp, Homo sapien
gtttgggttcgaattccatgtcatc

SEQ ID NO: 1128145 - DNA, 25 bp, Homo sapien
ccagtatcttcaatggtagggatga

SEQ ID NO: 1128146 - DNA, 25 bp, Homo sapien
gacataaagtgtttgcgtactctgc

SEQ ID NO: 1128147 - DNA, 25 bp, Homo sapien
catcaatatgtaacttagcctgaca

SEQ ID NO: 1128148 - DNA, 25 bp, Homo sapien
gaagggctgaccaagacggttgtat

SEQ ID NO: 1128149 - DNA, 25 bp, Homo sapien
cacataaataaaccccagaatcttc

SEQ ID NO: 1128150 - DNA, 25 bp, Homo sapien
agaggctgtagctccccgttaggga

SEQ ID NO: 1128151 - DNA, 25 bp, Homo sapien
cctggctcaagcatgtcatattcac

SEQ ID NO: 1128152 - DNA, 25 bp, Homo sapien
tataggcgccatctatagattttag

SEQ ID NO: 1128153 - DNA, 25 bp, Homo sapien
tcaactgggcctttcggatggtata

SEQ ID NO: 1128154 - DNA, 25 bp, Homo sapien
ttccacatgtacaagagatgatgac

SEQ ID NO: 1128155 - DNA, 25 bp, Homo sapien
tatactcccgcatccttcaactggg

SEQ ID NO: 1128156 - DNA, 25 bp, Homo sapien
gtttgcactccaccgccaagtatgg

SEQ ID NO: 1128157 - DNA, 25 bp, Homo sapien
tgtgcattcacaagagggcttagga

SEQ ID NO: 1128158 - DNA, 25 bp, Homo sapien
tagccaagtgccagacctcttaaga

SEQ ID NO: 1128159 - DNA, 25 bp, Homo sapien
gcttaattaaaggtggcccagaggc

SEQ ID NO: 1128160 - DNA, 25 bp, Homo sapien
tattaaggaggatgcaaaatagagc

SEQ ID NO: 1128161 - DNA, 25 bp, Homo sapien
tgtgcttctacaagactatatgacc

SEQ ID NO: 1128162 - DNA, 25 bp, Homo sapien
aatagagcacgagaagctcaggaga

SEQ ID NO: 1128163 - DNA, 25 bp, Homo sapien
attccaatggcaggtattattaagg

SEQ ID NO: 1128164 - DNA, 25 bp, Homo sapien
gtgtctccagttgaacatatcaagc

SEQ ID NO: 1128165 - DNA, 25 bp, Homo sapien
taaattataatagtccaagcaacac

SEQ ID NO: 1128166 - DNA, 25 bp, Homo sapien
ttgcacagataaatagtgtctccag

SEQ ID NO: 1128167 - DNA, 25 bp, Homo sapien
tgctcacagcaagggacatagatgg

SEQ ID NO: 1128168 - DNA, 25 bp, Homo sapien
gccagtactatacagagaaacccag

SEQ ID NO: 1128169 - DNA, 25 bp, Homo sapien
gctacaatgtgactaaaggaggcag

SEQ ID NO: 1128170 - DNA, 25 bp, Homo sapien
taagggtcacattttgagtatccgt

SEQ ID NO: 1128171 - DNA, 25 bp, Homo sapien
gaaacatctccgtaccatgccagta

SEQ ID NO: 1128172 - DNA, 25 bp, Homo sapien
tttatatggaagttcaaaaactaga

SEQ ID NO: 1128173 - DNA, 25 bp, Homo sapien
aaatggtatagggacaattgtttca

SEQ ID NO: 1128174 - DNA, 25 bp, Homo sapien
tattgtatgaaagttataccccaaa

SEQ ID NO: 1128175 - DNA, 25 bp, Homo sapien
ctgtaagacatcaaagatagtctaa

SEQ ID NO: 1128176 - DNA, 25 bp, Homo sapien
ttaggactaaagcacaaatatctgc

SEQ ID NO: 1128177 - DNA, 25 bp, Homo sapien
actgaaaacagtaagacattggtga

SEQ ID NO: 1128178 - DNA, 25 bp, Homo sapien
tttacagaagttgacaagcagattc

SEQ ID NO: 1128179 - DNA, 25 bp, Homo sapien
gcaaggttgaagaatacccaatcag

SEQ ID NO: 1128180 - DNA, 25 bp, Homo sapien
catggttcccaacaattcctttcca

SEQ ID NO: 1128181 - DNA, 25 bp, Homo sapien
gccaacaaacatggttcccaacaat

SEQ ID NO: 1128182 - DNA, 25 bp, Homo sapien
ccaacaaacatggttcccaacaatt

SEQ ID NO: 1128183 - DNA, 25 bp, Homo sapien
caacaaacatggttcccaacaattc

SEQ ID NO: 1128184 - DNA, 25 bp, Homo sapien
atctgtccttcaaagatgtctaagc

SEQ ID NO: 1128185 - DNA, 25 bp, Homo sapien
ggtggaagtgaggttagaaactgct

SEQ ID NO: 1128186 - DNA, 25 bp, Homo sapien
attttgctcgagaattttctttctt

SEQ ID NO: 1128187 - DNA, 25 bp, Homo sapien
gtggaagtgaggttagaaactgctg

SEQ ID NO: 1128188 - DNA, 25 bp, Homo sapien
tctgtaaggtctttaatagatggat

SEQ ID NO: 1128189 - DNA, 25 bp, Homo sapien
ctaaagtgctcgaaactggtaaact

SEQ ID NO: 1128190 - DNA, 25 bp, Homo sapien
ttggcctaaagtgctcgaaactggt

SEQ ID NO: 1128191 - DNA, 25 bp, Homo sapien
agtgctcgaaactggtaaacttcag

SEQ ID NO: 1128192 - DNA, 25 bp, Homo sapien
aaagggtatgaatatgctctgtcta

SEQ ID NO: 1128193 - DNA, 25 bp, Homo sapien
tgagaaggccctccgcattgtgtaa

SEQ ID NO: 1128194 - DNA, 25 bp, Homo sapien
tggtgctgatgacttaggaatttaa

SEQ ID NO: 1128195 - DNA, 25 bp, Homo sapien
tgtctccagaacaattgtagaatga

SEQ ID NO: 1128196 - DNA, 25 bp, Homo sapien
agaatgagttctgtgctggtgctga

SEQ ID NO: 1128197 - DNA, 25 bp, Homo sapien
cagcagcaccactcgttgtgggacc

SEQ ID NO: 1128198 - DNA, 25 bp, Homo sapien
ataagctgcggtgactacctttccc

SEQ ID NO: 1128199 - DNA, 25 bp, Homo sapien
taagctgcggtgactacctttccca

SEQ ID NO: 1128200 - DNA, 25 bp, Homo sapien
cgttgtgggacctgtttcccagtgc

SEQ ID NO: 1128201 - DNA, 25 bp, Homo sapien
tcagaaagccaaagatactagtaac

SEQ ID NO: 1128202 - DNA, 25 bp, Homo sapien
ctctaggagtagtggtgggaataaa

SEQ ID NO: 1128203 - DNA, 25 bp, Homo sapien
ggctttgtaattaccctagtcttca

SEQ ID NO: 1128204 - DNA, 25 bp, Homo sapien
taattaccctagtcttcagaaagcc

SEQ ID NO: 1128205 - DNA, 25 bp, Homo sapien
caagatgctcatgttgcgtagggaa

SEQ ID NO: 1128206 - DNA, 25 bp, Homo sapien
taatgcagacgtacaacagaacaga

SEQ ID NO: 1128207 - DNA, 25 bp, Homo sapien
caggatgagaaatcgactccaggtc

SEQ ID NO: 1128208 - DNA, 25 bp, Homo sapien
ttatggaattctctagggccccacc

SEQ ID NO: 1128209 - DNA, 25 bp, Homo sapien
ggcaaatctcgtagtgaaatggcag

SEQ ID NO: 1128210 - DNA, 25 bp, Homo sapien
gaatagttatcgttctgctgccatc

SEQ ID NO: 1128211 - DNA, 25 bp, Homo sapien
aaactggtcattggttgtagagccg

SEQ ID NO: 1128212 - DNA, 25 bp, Homo sapien
caatctggacagtatgaggcaaatc

SEQ ID NO: 1128213 - DNA, 25 bp, Homo sapien
gccggtctctttcgcttccaggtca

SEQ ID NO: 1128214 - DNA, 25 bp, Homo sapien
ggtggtccgtcacgtgaatgtttaa

SEQ ID NO: 1128215 - DNA, 25 bp, Homo sapien
ggccgccgctctaattcttgtcaga

SEQ ID NO: 1128216 - DNA, 25 bp, Homo sapien
gaaactctagaattcgtgccggtct

SEQ ID NO: 1128217 - DNA, 25 bp, Homo sapien
ttcccggatgcatgggctccagcgc

SEQ ID NO: 1128218 - DNA, 25 bp, Homo sapien
cgaccgcctaccaccagtgttcccg

SEQ ID NO: 1128219 - DNA, 25 bp, Homo sapien
agtgttcccggatgcatgggctcca

SEQ ID NO: 1128220 - DNA, 25 bp, Homo sapien
ccagtgttcccggatgcatgggctc

SEQ ID NO: 1128221 - DNA, 25 bp, Homo sapien
gcttacttccggcccgggccgcgca

SEQ ID NO: 1128222 - DNA, 25 bp, Homo sapien
cttccggcccgggccgcgcaacgcg

SEQ ID NO: 1128223 - DNA, 25 bp, Homo sapien
tccggcccgggccgcgcaacgcgtc

SEQ ID NO: 1128224 - DNA, 25 bp, Homo sapien
gccgcgcgccgctgcgagacacaga

SEQ ID NO: 1128225 - DNA, 25 bp, Homo sapien
gtagtgacgcctcaaacgggaatcc

SEQ ID NO: 1128226 - DNA, 25 bp, Homo sapien
agtgacagtagtgacgcctcaaacg

SEQ ID NO: 1128227 - DNA, 25 bp, Homo sapien
tgacgcctcaaacgggaatccccag

SEQ ID NO: 1128228 - DNA, 25 bp, Homo sapien
cttctctgcccggcgaagggccggg

SEQ ID NO: 1128229 - DNA, 25 bp, Homo sapien
ctctgcccggcgaagggccgggtct

SEQ ID NO: 1128230 - DNA, 25 bp, Homo sapien
tctctgcccggcgaagggccgggtc

SEQ ID NO: 1128231 - DNA, 25 bp, Homo sapien
tctgcccggcgaagggccgggtcta

SEQ ID NO: 1128232 - DNA, 25 bp, Homo sapien
tcgtctttgatggacaggggcaaca

SEQ ID NO: 1128233 - DNA, 25 bp, Homo sapien
cttgggtggtttgtattcatcgtct

SEQ ID NO: 1128234 - DNA, 25 bp, Homo sapien
gaacttgggtggtttgtattcatcg

SEQ ID NO: 1128235 - DNA, 25 bp, Homo sapien
tattcatcgtctttgatggacaggg

SEQ ID NO: 1128236 - DNA, 25 bp, Homo sapien
caaaagcgaaagagaggttcaggca

SEQ ID NO: 1128237 - DNA, 25 bp, Homo sapien
cagttgctccagatgccgtagagta

SEQ ID NO: 1128238 - DNA, 25 bp, Homo sapien
tccgggaagtcttgtcggacagtat

SEQ ID NO: 1128239 - DNA, 25 bp, Homo sapien
gccgtagagtagttccacaaaagcg

SEQ ID NO: 1128240 - DNA, 25 bp, Homo sapien
actccttggtcacttgcaaaggtca

SEQ ID NO: 1128241 - DNA, 25 bp, Homo sapien
ccactccttggtcacttgcaaaggt

SEQ ID NO: 1128242 - DNA, 25 bp, Homo sapien
cactccttggtcacttgcaaaggtc

SEQ ID NO: 1128243 - DNA, 25 bp, Homo sapien
tccttggtcacttgcaaaggtcagc

SEQ ID NO: 1128244 - DNA, 25 bp, Homo sapien
ctcctgcacaaggaaaagcccagct

SEQ ID NO: 1128245 - DNA, 25 bp, Homo sapien
tcctgcacaaggaaaagcccagctg

SEQ ID NO: 1128246 - DNA, 25 bp, Homo sapien
cagtgctatcgaaaaacatgtgaaa

SEQ ID NO: 1128247 - DNA, 25 bp, Homo sapien
aaaagagtcggaaatcaagcctaag

SEQ ID NO: 1128248 - DNA, 25 bp, Homo sapien
aaaatggcagtgctatcgaaaaaca

SEQ ID NO: 1128249 - DNA, 25 bp, Homo sapien
tgtgaaaagagtcggaaatcaagcc

SEQ ID NO: 1128250 - DNA, 25 bp, Homo sapien
tcaaaaataggccattgacaaagcc

SEQ ID NO: 1128251 - DNA, 25 bp, Homo sapien
aataggccattgacaaagccagcca

SEQ ID NO: 1128252 - DNA, 25 bp, Homo sapien
cagccagaacttccgctctaacata

SEQ ID NO: 1128253 - DNA, 25 bp, Homo sapien
aaaaagcagtgaagatcaaaaatag

SEQ ID NO: 1128254 - DNA, 25 bp, Homo sapien
tgagaatgtccatgacctccatgtt

SEQ ID NO: 1128255 - DNA, 25 bp, Homo sapien
atgagaatgtccatgacctccatgt

SEQ ID NO: 1128256 - DNA, 25 bp, Homo sapien
aagaagcagtctctcatggtggaca

SEQ ID NO: 1128257 - DNA, 25 bp, Homo sapien
gcagtctctcatggtggacatctgg

SEQ ID NO: 1128258 - DNA, 25 bp, Homo sapien
agggatagttcaggaagatattcac

SEQ ID NO: 1128259 - DNA, 25 bp, Homo sapien
tatgacagaaacctagtagaaaatg

SEQ ID NO: 1128260 - DNA, 25 bp, Homo sapien
tgatatcacactaaacagataagct

SEQ ID NO: 1128261 - DNA, 25 bp, Homo sapien
gatccatgatacaagcacagctctg

SEQ ID NO: 1128262 - DNA, 25 bp, Homo sapien
tgatctagagcaccattaaagaggg

SEQ ID NO: 1128263 - DNA, 25 bp, Homo sapien
tggctatggcaatgatcgacatggc

SEQ ID NO: 1128264 - DNA, 25 bp, Homo sapien
gagaatgaaagtgtccatgtccatg

SEQ ID NO: 1128265 - DNA, 25 bp, Homo sapien
tgatcatggctatgtgcagcaccat

SEQ ID NO: 1128266 - DNA, 25 bp, Homo sapien
ctgctgggtcctgttgtttctttta

SEQ ID NO: 1128267 - DNA, 25 bp, Homo sapien
cttgtaaaatctgtctgctgggtcc

SEQ ID NO: 1128268 - DNA, 25 bp, Homo sapien
tgtaaaatctgtctgctgggtcctg

SEQ ID NO: 1128269 - DNA, 25 bp, Homo sapien
tgtctgctgggtcctgttgtttctt

SEQ ID NO: 1128270 - DNA, 25 bp, Homo sapien
ttattcaataccatcatctgcccta

SEQ ID NO: 1128271 - DNA, 25 bp, Homo sapien
tattcaataccatcatctgccctat

SEQ ID NO: 1128272 - DNA, 25 bp, Homo sapien
aattttgcatcatgatggcagaagc

SEQ ID NO: 1128273 - DNA, 25 bp, Homo sapien
ttacaactataagaatggctataag

SEQ ID NO: 1128274 - DNA, 25 bp, Homo sapien
aattacaccaatacttccaagtgta

SEQ ID NO: 1128275 - DNA, 25 bp, Homo sapien
taagaattgaacagataggatctgc

SEQ ID NO: 1128276 - DNA, 25 bp, Homo sapien
gaattgagaagtactgagagagacc

SEQ ID NO: 1128277 - DNA, 25 bp, Homo sapien
atacatgcaatcaacccagcctggg

SEQ ID NO: 1128278 - DNA, 25 bp, Homo sapien
tatcatgaagcctgctaaggagttc

SEQ ID NO: 1128279 - DNA, 25 bp, Homo sapien
cctaatggagcttgagggcaataac

SEQ ID NO: 1128280 - DNA, 25 bp, Homo sapien
tggccccttattgccttctctaagt

SEQ ID NO: 1128281 - DNA, 25 bp, Homo sapien
ttcttatagttcataacctaaatgg

SEQ ID NO: 1128282 - DNA, 25 bp, Homo sapien
gatgagagtcctatattcttatagt

SEQ ID NO: 1128283 - DNA, 25 bp, Homo sapien
gcagtttatctggataatagagcaa

SEQ ID NO: 1128284 - DNA, 25 bp, Homo sapien
caaagagtggtattaggaacaaggt

SEQ ID NO: 1128285 - DNA, 25 bp, Homo sapien
ggaacaaggtattctggcccatata

SEQ ID NO: 1128286 - DNA, 25 bp, Homo sapien
ggcccatatattaggaacgttctga

SEQ ID NO: 1128287 - DNA, 25 bp, Homo sapien
caaagaatatgtcactcctgagaga

SEQ ID NO: 1128288 - DNA, 25 bp, Homo sapien
tataagaggtattcaaaaggtagac

SEQ ID NO: 1128289 - DNA, 25 bp, Homo sapien
gaccactgggatagaacagacagcc

SEQ ID NO: 1128290 - DNA, 25 bp, Homo sapien
caagtaagtttaacgaagtgtgata

SEQ ID NO: 1128291 - DNA, 25 bp, Homo sapien
taaaattcctatgggatctcaagaa

SEQ ID NO: 1128292 - DNA, 25 bp, Homo sapien
caaaaaaggctctgttcgagtcgac

SEQ ID NO: 1128293 - DNA, 25 bp, Homo sapien
catcaactttcacgggctttacaga

SEQ ID NO: 1128294 - DNA, 25 bp, Homo sapien
tacgttatctttgttgttgctactg

SEQ ID NO: 1128295 - DNA, 25 bp, Homo sapien
tactcatttaacctctacgttatct

SEQ ID NO: 1128296 - DNA, 25 bp, Homo sapien
cctatcagcaaagtatgagagtacc

SEQ ID NO: 1128297 - DNA, 25 bp, Homo sapien
gacattgcccaattcctctgagtta

SEQ ID NO: 1128298 - DNA, 25 bp, Homo sapien
gcagtcagttttctaaagagcccga

SEQ ID NO: 1128299 - DNA, 25 bp, Homo sapien
gaagtggtgtctcaatgcagtttta

SEQ ID NO: 1128300 - DNA, 25 bp, Homo sapien
tgattaaagggcacctaggcagccc

SEQ ID NO: 1128301 - DNA, 25 bp, Homo sapien
taggacctcagtcacgtaacaggga

SEQ ID NO: 1128302 - DNA, 25 bp, Homo sapien
tgaattagaggatactcagctactg

SEQ ID NO: 1128303 - DNA, 25 bp, Homo sapien
gaagtgggatccctcaacctgtgag

SEQ ID NO: 1128304 - DNA, 25 bp, Homo sapien
tatgcttttcacgtttttgacttac

SEQ ID NO: 1128305 - DNA, 25 bp, Homo sapien
aaaaacatattctgtctgggtatgg

SEQ ID NO: 1128306 - DNA, 25 bp, Homo sapien
ttgaagggctaaatatgtggatgat

SEQ ID NO: 1128307 - DNA, 25 bp, Homo sapien
atatgtggatgattccaaagtcaaa

SEQ ID NO: 1128308 - DNA, 25 bp, Homo sapien
cagaagcagcttttagtgaaagagc

SEQ ID NO: 1128309 - DNA, 25 bp, Homo sapien
gggtatgcattacgaaaacttctga

SEQ ID NO: 1128310 - DNA, 25 bp, Homo sapien
gaacagtctactgacaatcacaatg

SEQ ID NO: 1128311 - DNA, 25 bp, Homo sapien
gaaaactggcccataatggtaacgc

SEQ ID NO: 1128312 - DNA, 25 bp, Homo sapien
aagtaaaacttcagataatagctgt

SEQ ID NO: 1128313 - DNA, 25 bp, Homo sapien
cagataatagctgtaggtgaagaag

SEQ ID NO: 1128314 - DNA, 25 bp, Homo sapien
taaaacttcagataatagctgtagg

SEQ ID NO: 1128315 - DNA, 25 bp, Homo sapien
aacttcagataatagctgtaggtga

SEQ ID NO: 1128316 - DNA, 25 bp, Homo sapien
tctgcattaatattccaacagattc

SEQ ID NO: 1128317 - DNA, 25 bp, Homo sapien
tagcactgaggcagactattttcta

SEQ ID NO: 1128318 - DNA, 25 bp, Homo sapien
attccaacagattctcttaaaagag

SEQ ID NO: 1128319 - DNA, 25 bp, Homo sapien
tgaggcagactattttctaataggg

SEQ ID NO: 1128320 - DNA, 25 bp, Homo sapien
tactattaatttcaaggtcccaaca

SEQ ID NO: 1128321 - DNA, 25 bp, Homo sapien
agcatcaggtgctactattaatttc

SEQ ID NO: 1128322 - DNA, 25 bp, Homo sapien
ggtcccaacataaacgtcagaacat

SEQ ID NO: 1128323 - DNA, 25 bp, Homo sapien
gcatcagcatcaggtgctactatta

SEQ ID NO: 1128324 - DNA, 25 bp, Homo sapien
tattatgtgtttggcttaaaatcca

SEQ ID NO: 1128325 - DNA, 25 bp, Homo sapien
aaatattatgtgtttggcttaaaat

SEQ ID NO: 1128326 - DNA, 25 bp, Homo sapien
ctgagtaaaaatattatgtgtttgg

SEQ ID NO: 1128327 - DNA, 25 bp, Homo sapien
gagtaaaaatattatgtgtttggct

SEQ ID NO: 1128328 - DNA, 25 bp, Homo sapien
ggaactaaggccaccagtattttga

SEQ ID NO: 1128329 - DNA, 25 bp, Homo sapien
cataaggaccatgcattactagggt

SEQ ID NO: 1128330 - DNA, 25 bp, Homo sapien
tgtgttgagccaccttcactgcaag

SEQ ID NO: 1128331 - DNA, 25 bp, Homo sapien
ccctggtctctgcaaggaatgaaat

SEQ ID NO: 1128332 - DNA, 25 bp, Homo sapien
tactgaagtggcttttagcaatcca

SEQ ID NO: 1128333 - DNA, 25 bp, Homo sapien
ggatattgcctaagatatagtcaca

SEQ ID NO: 1128334 - DNA, 25 bp, Homo sapien
ccaaagcaatctgagtactgaagtg

SEQ ID NO: 1128335 - DNA, 25 bp, Homo sapien
tagtttatattcacgtacagcaagc

SEQ ID NO: 1128336 - DNA, 25 bp, Homo sapien
gcccgatgaggacagcttcaagttt

SEQ ID NO: 1128337 - DNA, 25 bp, Homo sapien
caagctgatatccttcccctgaggg

SEQ ID NO: 1128338 - DNA, 25 bp, Homo sapien
tcctagccctaaacagagaagatgg

SEQ ID NO: 1128339 - DNA, 25 bp, Homo sapien
caaaatgggcaaaacttgggctctt

SEQ ID NO: 1128340 - DNA, 25 bp, Homo sapien
cattgctgactcctagaacctcaag

SEQ ID NO: 1128341 - DNA, 25 bp, Homo sapien
gagaatattcactggctgccctttt

SEQ ID NO: 1128342 - DNA, 25 bp, Homo sapien
ggtaaatacctcagcactcccagta

SEQ ID NO: 1128343 - DNA, 25 bp, Homo sapien
tcaagtgagagccagcacacagtaa

SEQ ID NO: 1128344 - DNA, 25 bp, Homo sapien
tgctactcaaggatactgctctcta

SEQ ID NO: 1128345 - DNA, 25 bp, Homo sapien
gttaacagtcacacaccctatccag

SEQ ID NO: 1128346 - DNA, 25 bp, Homo sapien
caaccctgtctaaatcctcctgtga

SEQ ID NO: 1128347 - DNA, 25 bp, Homo sapien
tagaggacaccatgatgcttgactg

SEQ ID NO: 1128348 - DNA, 25 bp, Homo sapien
gcaaagtcaatctgtacgtagagct

SEQ ID NO: 1128349 - DNA, 25 bp, Homo sapien
caatctgtacgtagagctgtctcac

SEQ ID NO: 1128350 - DNA, 25 bp, Homo sapien
aagtcaatctgtacgtagagctgtc

SEQ ID NO: 1128351 - DNA, 25 bp, Homo sapien
gtcaatctgtacgtagagctgtctc

SEQ ID NO: 1128352 - DNA, 25 bp, Homo sapien
gtccataaaaggtgcataatttctt

SEQ ID NO: 1128353 - DNA, 25 bp, Homo sapien
tccataaaaggtgcataatttcttt

SEQ ID NO: 1128354 - DNA, 25 bp, Homo sapien
tacaatgttttggatcgtacagtac

SEQ ID NO: 1128355 - DNA, 25 bp, Homo sapien
taaatctgatcccttagctgtgaac

SEQ ID NO: 1128356 - DNA, 25 bp, Homo sapien
tctaccccgtctacttagtgctcgg

SEQ ID NO: 1128357 - DNA, 25 bp, Homo sapien
gcatgaacggctgactctaccccgt

SEQ ID NO: 1128358 - DNA, 25 bp, Homo sapien
aaatgccactttgcctgcggaaaag

SEQ ID NO: 1128359 - DNA, 25 bp, Homo sapien
tatgcgctggcaatgtaatgtaaca

SEQ ID NO: 1128360 - DNA, 25 bp, Homo sapien
gactggaggcccacaactgaaattc

SEQ ID NO: 1128361 - DNA, 25 bp, Homo sapien
tagagttcacggcaatctgcagcag

SEQ ID NO: 1128362 - DNA, 25 bp, Homo sapien
taacatgaaggccacactaaccgcc

SEQ ID NO: 1128363 - DNA, 25 bp, Homo sapien
ggctagattccccaggcaagtcact

SEQ ID NO: 1128364 - DNA, 25 bp, Homo sapien
gactggaagccaacacgacaagaat

SEQ ID NO: 1128365 - DNA, 25 bp, Homo sapien
gatctgggtcactaaggcttctggg

SEQ ID NO: 1128366 - DNA, 25 bp, Homo sapien
ttcaagtgacccaggttccacagtc

SEQ ID NO: 1128367 - DNA, 25 bp, Homo sapien
aatcttcattgaggctaactgtagc

SEQ ID NO: 1128368 - DNA, 25 bp, Homo sapien
aacaaaggagactatggagactgtc

SEQ ID NO: 1128369 - DNA, 25 bp, Homo sapien
agactgtctggttcctgatttggcc

SEQ ID NO: 1128370 - DNA, 25 bp, Homo sapien
tcagccatatatggattgatatggt

SEQ ID NO: 1128371 - DNA, 25 bp, Homo sapien
gcatcaatggactttgaacatagat

SEQ ID NO: 1128372 - DNA, 25 bp, Homo sapien
ccattgtctgatgtaaatttcagcc

SEQ ID NO: 1128373 - DNA, 25 bp, Homo sapien
cccaggtgttgtggtaggtaattga

SEQ ID NO: 1128374 - DNA, 25 bp, Homo sapien
caggaggcagcatacatccaatgga

SEQ ID NO: 1128375 - DNA, 25 bp, Homo sapien
tagcagttaccgaggagacactttg

SEQ ID NO: 1128376 - DNA, 25 bp, Homo sapien
gacgaccagaaaattgcagcaggca

SEQ ID NO: 1128377 - DNA, 25 bp, Homo sapien
tggacttgggagaaccattgcattc

SEQ ID NO: 1128378 - DNA, 25 bp, Homo sapien
cacacagctaattggatggcaaggc

SEQ ID NO: 1128379 - DNA, 25 bp, Homo sapien
taatactaaagctaaggctggctgt

SEQ ID NO: 1128380 - DNA, 25 bp, Homo sapien
ttggtaggccatgttaaagtcgtga

SEQ ID NO: 1128381 - DNA, 25 bp, Homo sapien
accgcacccagtcaagagattcttg

SEQ ID NO: 1128382 - DNA, 25 bp, Homo sapien
attacatctatcaaagggctttcag

SEQ ID NO: 1128383 - DNA, 25 bp, Homo sapien
tctatcaaagggctttcagatgggt

SEQ ID NO: 1128384 - DNA, 25 bp, Homo sapien
tcaaagggctttcagatgggtctgt

SEQ ID NO: 1128385 - DNA, 25 bp, Homo sapien
aagggctttcagatgggtctgtgca

SEQ ID NO: 1128386 - DNA, 25 bp, Homo sapien
tctgacgcagcgtctgacacacagt

SEQ ID NO: 1128387 - DNA, 25 bp, Homo sapien
caccattgattatagggaggccaca

SEQ ID NO: 1128388 - DNA, 25 bp, Homo sapien
gagtttatatctggtcaggtccctg

SEQ ID NO: 1128389 - DNA, 25 bp, Homo sapien
gctttcaatgctggttccaagaaca

SEQ ID NO: 1128390 - DNA, 25 bp, Homo sapien
tccccaacccatttcgagttggata

SEQ ID NO: 1128391 - DNA, 25 bp, Homo sapien
ttacacatgttcctatacagaatgc

SEQ ID NO: 1128392 - DNA, 25 bp, Homo sapien
gaatgcagaaatactagaaacttat

SEQ ID NO: 1128393 - DNA, 25 bp, Homo sapien
gaaacttacttactactagcatcag

SEQ ID NO: 1128394 - DNA, 25 bp, Homo sapien
caaccactgagtattgttcattacc

SEQ ID NO: 1128395 - DNA, 25 bp, Homo sapien
tacctttgtagtttattagccaaca

SEQ ID NO: 1128396 - DNA, 25 bp, Homo sapien
agagttcagaatcaaccactgagta

SEQ ID NO: 1128397 - DNA, 25 bp, Homo sapien
cactatgatggtaaaaattgttgta

SEQ ID NO: 1128398 - DNA, 25 bp, Homo sapien
cctccacactgatagacaggtaaag

SEQ ID NO: 1128399 - DNA, 25 bp, Homo sapien
tatgtaagcacctacagtcatatcc

SEQ ID NO: 1128400 - DNA, 25 bp, Homo sapien
tctcgtgtctaaattgggtgaaggt

SEQ ID NO: 1128401 - DNA, 25 bp, Homo sapien
tacggtgagaattagcagtctttat

SEQ ID NO: 1128402 - DNA, 25 bp, Homo sapien
ggctcgtgagcacgcccgatccttt

SEQ ID NO: 1128403 - DNA, 25 bp, Homo sapien
tttaagccatgggttagagggctcg

SEQ ID NO: 1128404 - DNA, 25 bp, Homo sapien
cagccggcgggtttcttcagtggag

SEQ ID NO: 1128405 - DNA, 25 bp, Homo sapien
ctgaggctatgaaacggtggctcca

SEQ ID NO: 1128406 - DNA, 25 bp, Homo sapien
ttacataaaatagccctcactgagg

SEQ ID NO: 1128407 - DNA, 25 bp, Homo sapien
tgtgttacaaagtgagcaatgctac

SEQ ID NO: 1128408 - DNA, 25 bp, Homo sapien
tgtgtgtggctaatatacagcctgg

SEQ ID NO: 1128409 - DNA, 25 bp, Homo sapien
cagcctggtagttcgcttttatgaa

SEQ ID NO: 1128410 - DNA, 25 bp, Homo sapien
tacagtcaaatagtggttcggttac

SEQ ID NO: 1128411 - DNA, 25 bp, Homo sapien
gaactactactacacagaacatgga

SEQ ID NO: 1128412 - DNA, 25 bp, Homo sapien
catggatgagtaaagcagagccaag

SEQ ID NO: 1128413 - DNA, 25 bp, Homo sapien
gaagccagacgcgaaagggtacatt

SEQ ID NO: 1128414 - DNA, 25 bp, Homo sapien
gaaaaggcagcttgagtcctacctt

SEQ ID NO: 1128415 - DNA, 25 bp, Homo sapien
ggttatagtttgctgtcccatggcc

SEQ ID NO: 1128416 - DNA, 25 bp, Homo sapien
cccatggcctagagaaagttgtttc

SEQ ID NO: 1128417 - DNA, 25 bp, Homo sapien
tctagttcaccccaaacgtgctggt

SEQ ID NO: 1128418 - DNA, 25 bp, Homo sapien
caaagtggtcacaaagaatagcaga

SEQ ID NO: 1128419 - DNA, 25 bp, Homo sapien
aaaggccgcgcttggtggctaacgc

SEQ ID NO: 1128420 - DNA, 25 bp, Homo sapien
gcaagcattatggtctctgtacaac

SEQ ID NO: 1128421 - DNA, 25 bp, Homo sapien
tatcacatgggttagagagtcgaac

SEQ ID NO: 1128422 - DNA, 25 bp, Homo sapien
taggtgagggttcttgggtgacttc

SEQ ID NO: 1128423 - DNA, 25 bp, Homo sapien
aatgaaacctaaaataagcagaagg

SEQ ID NO: 1128424 - DNA, 25 bp, Homo sapien
taatgacttaagcatatacctgaag

SEQ ID NO: 1128425 - DNA, 25 bp, Homo sapien
accatagctaaagcagttcttaggg

SEQ ID NO: 1128426 - DNA, 25 bp, Homo sapien
catcaaaacctcattaaccatagct

SEQ ID NO: 1128427 - DNA, 25 bp, Homo sapien
ttagcttggatttaatgggataggc

SEQ ID NO: 1128428 - DNA, 25 bp, Homo sapien
aggcaacatagtgttaccccttctc

SEQ ID NO: 1128429 - DNA, 25 bp, Homo sapien
ttggggttacattaagctattattg

SEQ ID NO: 1128430 - DNA, 25 bp, Homo sapien
cagctaaatggagattgagttaggt

SEQ ID NO: 1128431 - DNA, 25 bp, Homo sapien
cggccccaatcattaagacctctaa

SEQ ID NO: 1128432 - DNA, 25 bp, Homo sapien
agacctctaaactgcaaaagggatt

SEQ ID NO: 1128433 - DNA, 25 bp, Homo sapien
caatcattaagacctctaaactgca

SEQ ID NO: 1128434 - DNA, 25 bp, Homo sapien
cgtgcccggccccaatcattaagac

SEQ ID NO: 1128435 - DNA, 25 bp, Homo sapien
ctatgacatcatataaacctttcac

SEQ ID NO: 1128436 - DNA, 25 bp, Homo sapien
cagctttatctatgacatcatataa

SEQ ID NO: 1128437 - DNA, 25 bp, Homo sapien
gctttatctatgacatcatataaac

SEQ ID NO: 1128438 - DNA, 25 bp, Homo sapien
ttatctatgacatcatataaacctt

SEQ ID NO: 1128439 - DNA, 25 bp, Homo sapien
gtttatcaccacatgtgatatattc

SEQ ID NO: 1128440 - DNA, 25 bp, Homo sapien
tgtttatcaccacatgtgatatatt

SEQ ID NO: 1128441 - DNA, 25 bp, Homo sapien
gattcagtactcatcttccaaaaca

SEQ ID NO: 1128442 - DNA, 25 bp, Homo sapien
aaaagctgctggaatgaaaatgtgg

SEQ ID NO: 1128443 - DNA, 25 bp, Homo sapien
ttctctcaacgaacacaatttttca

SEQ ID NO: 1128444 - DNA, 25 bp, Homo sapien
gaaaatgtggaagtagaatgaaaag

SEQ ID NO: 1128445 - DNA, 25 bp, Homo sapien
ttgagagagttatttaacgtctctg

SEQ ID NO: 1128446 - DNA, 25 bp, Homo sapien
aatagtgattaacagggctggcact

SEQ ID NO: 1128447 - DNA, 25 bp, Homo sapien
gagagttatttaacgtctctgcgct

SEQ ID NO: 1128448 - DNA, 25 bp, Homo sapien
gagagagttatttaacgtctctgcg

SEQ ID NO: 1128449 - DNA, 25 bp, Homo sapien
cacttgtaggtccagggtggttcaa

SEQ ID NO: 1128450 - DNA, 25 bp, Homo sapien
cattggagaaatgtactgggctgcc

SEQ ID NO: 1128451 - DNA, 25 bp, Homo sapien
tcagttcaatccgaaggacaggaag

SEQ ID NO: 1128452 - DNA, 25 bp, Homo sapien
cctgagagctctcgtagtgtgaagc

SEQ ID NO: 1128453 - DNA, 25 bp, Homo sapien
ctggtatactccagagcccacatga

SEQ ID NO: 1128454 - DNA, 25 bp, Homo sapien
aaaggtgtaggcttgcccatctcag

SEQ ID NO: 1128455 - DNA, 25 bp, Homo sapien
caatattcaagacgtccatgtacct

SEQ ID NO: 1128456 - DNA, 25 bp, Homo sapien
catgtaccttacttcagttcctggt

SEQ ID NO: 1128457 - DNA, 25 bp, Homo sapien
tgctctcaagtaatggctagtctgg

SEQ ID NO: 1128458 - DNA, 25 bp, Homo sapien
caattaggcattcactagataagca

SEQ ID NO: 1128459 - DNA, 25 bp, Homo sapien
tcttagcagaatataacaaacccca

SEQ ID NO: 1128460 - DNA, 25 bp, Homo sapien
agacttgtgtctacatctactacag

SEQ ID NO: 1128461 - DNA, 25 bp, Homo sapien
caattgctcagtagatggtcattca

SEQ ID NO: 1128462 - DNA, 25 bp, Homo sapien
gctcataagccataatcctggtgca

SEQ ID NO: 1128463 - DNA, 25 bp, Homo sapien
cactgggttgtggagagtatctaac

SEQ ID NO: 1128464 - DNA, 25 bp, Homo sapien
tctgggtccagaaagaagttgcctt

SEQ ID NO: 1128465 - DNA, 25 bp, Homo sapien
tacatgattctcgagggctaaaggc

SEQ ID NO: 1128466 - DNA, 25 bp, Homo sapien
tctgagactcaatcattctgaaggg

SEQ ID NO: 1128467 - DNA, 25 bp, Homo sapien
caaacagtgcagcatccagtggacg

SEQ ID NO: 1128468 - DNA, 25 bp, Homo sapien
aatatagtcctagattggtccaggg

SEQ ID NO: 1128469 - DNA, 25 bp, Homo sapien
cagtatcctgtctcattatgactgg

SEQ ID NO: 1128470 - DNA, 25 bp, Homo sapien
ggggctcgaatctagtctggacaac

SEQ ID NO: 1128471 - DNA, 25 bp, Homo sapien
tttgtgtggtctttggcttatgcag

SEQ ID NO: 1128472 - DNA, 25 bp, Homo sapien
tattaagaatcaagtaactgtccct

SEQ ID NO: 1128473 - DNA, 25 bp, Homo sapien
taggcccagcaaggatatttaggac

SEQ ID NO: 1128474 - DNA, 25 bp, Homo sapien
ggagtggcatgctcagatcagatct

SEQ ID NO: 1128475 - DNA, 25 bp, Homo sapien
ttttaaaggagctccacacgctaga

SEQ ID NO: 1128476 - DNA, 25 bp, Homo sapien
cataggtagaaagagcgaggccact

SEQ ID NO: 1128477 - DNA, 25 bp, Homo sapien
ggctccaagaatacaacaagagaaa

SEQ ID NO: 1128478 - DNA, 25 bp, Homo sapien
caggggctccaagaatacaacaaga

SEQ ID NO: 1128479 - DNA, 25 bp, Homo sapien
gggctccaagaatacaacaagagaa

SEQ ID NO: 1128480 - DNA, 25 bp, Homo sapien
ggggctccaagaatacaacaagaga

SEQ ID NO: 1128481 - DNA, 25 bp, Homo sapien
tagccttctaaacgccatgcacaga

SEQ ID NO: 1128482 - DNA, 25 bp, Homo sapien
gatctctgtgtaaacctcacatcag

SEQ ID NO: 1128483 - DNA, 25 bp, Homo sapien
tgtgtaaacctcacatcagggaaga

SEQ ID NO: 1128484 - DNA, 25 bp, Homo sapien
ccccagcctaaggtgtagccttcta

SEQ ID NO: 1128485 - DNA, 25 bp, Homo sapien
caatctctcttttgctaatatctca

SEQ ID NO: 1128486 - DNA, 25 bp, Homo sapien
tcccattattcatgtcacacagcat

SEQ ID NO: 1128487 - DNA, 25 bp, Homo sapien
tcttcaagcctatgggtcatcaatc

SEQ ID NO: 1128488 - DNA, 25 bp, Homo sapien
cttttgctaatatctcaatttcctg

SEQ ID NO: 1128489 - DNA, 25 bp, Homo sapien
tatgctgctaaagtgtcatgtactc

SEQ ID NO: 1128490 - DNA, 25 bp, Homo sapien
gcacccagggaaactacaattggta

SEQ ID NO: 1128491 - DNA, 25 bp, Homo sapien
tctagctggctaggtcaactctatc

SEQ ID NO: 1128492 - DNA, 25 bp, Homo sapien
aattcatcagggcttccaagcactc

SEQ ID NO: 1128493 - DNA, 25 bp, Homo sapien
tcatgtggatgactacttcatgtaa

SEQ ID NO: 1128494 - DNA, 25 bp, Homo sapien
atgtcatgtggatgactacttcatg

SEQ ID NO: 1128495 - DNA, 25 bp, Homo sapien
gtcatgtggatgactacttcatgta

SEQ ID NO: 1128496 - DNA, 25 bp, Homo sapien
tgtcatgtggatgactacttcatgt

SEQ ID NO: 1128497 - DNA, 25 bp, Homo sapien
gcttcattggagtagccacgcttag

SEQ ID NO: 1128498 - DNA, 25 bp, Homo sapien
gctgtggcagtatgagaggatcttc

SEQ ID NO: 1128499 - DNA, 25 bp, Homo sapien
tctacaggacttgagacaggaatgt

SEQ ID NO: 1128500 - DNA, 25 bp, Homo sapien
tttgcaaagccatagtcactgagcc

SEQ ID NO: 1128501 - DNA, 25 bp, Homo sapien
caataacatcttcttgattctcatg

SEQ ID NO: 1128502 - DNA, 25 bp, Homo sapien
aataacatcttcttgattctcatgc

SEQ ID NO: 1128503 - DNA, 25 bp, Homo sapien
cagatttaagtgtgaaaaggacagc

SEQ ID NO: 1128504 - DNA, 25 bp, Homo sapien
actgagcaggttcaacaacacagga

SEQ ID NO: 1128505 - DNA, 25 bp, Homo sapien
caactgagcaggttcaacaacacag

SEQ ID NO: 1128506 - DNA, 25 bp, Homo sapien
acacacctattactgcaaattcaca

SEQ ID NO: 1128507 - DNA, 25 bp, Homo sapien
taggatgcacacacctattactgca

SEQ ID NO: 1128508 - DNA, 25 bp, Homo sapien
ctgagcagcggttagggacaagatc

SEQ ID NO: 1128509 - DNA, 25 bp, Homo sapien
cagacggctaacaatccggaaaatt

SEQ ID NO: 1128510 - DNA, 25 bp, Homo sapien
tcccctggaataaaacagacggcta

SEQ ID NO: 1128511 - DNA, 25 bp, Homo sapien
cttaggtgagatgttaggcagaagt

SEQ ID NO: 1128512 - DNA, 25 bp, Homo sapien
atgagaccctgcacctgacccagtt

SEQ ID NO: 1128513 - DNA, 25 bp, Homo sapien
tgccatgttgtgaactccggacctc

SEQ ID NO: 1128514 - DNA, 25 bp, Homo sapien
ttgccatgttgtgaactccggacct

SEQ ID NO: 1128515 - DNA, 25 bp, Homo sapien
cacctgacccagttcatgataatta

SEQ ID NO: 1128516 - DNA, 25 bp, Homo sapien
tgtgttgcttgctgacgacctgccg

SEQ ID NO: 1128517 - DNA, 25 bp, Homo sapien
tgccgactggcactactcagagaag

SEQ ID NO: 1128518 - DNA, 25 bp, Homo sapien
ctctccagttagaggagccagtctg

SEQ ID NO: 1128519 - DNA, 25 bp, Homo sapien
gtgaaacgaactgcattcaggctga

SEQ ID NO: 1128520 - DNA, 25 bp, Homo sapien
tttccattcctctagtgagcaccat

SEQ ID NO: 1128521 - DNA, 25 bp, Homo sapien
tttaaattgaatttccattcctcta

SEQ ID NO: 1128522 - DNA, 25 bp, Homo sapien
tccacattttgtttactctttctgc

SEQ ID NO: 1128523 - DNA, 25 bp, Homo sapien
tctgctttccctatttattgtttta

SEQ ID NO: 1128524 - DNA, 25 bp, Homo sapien
tttctcagtttcatgaagggccagg

SEQ ID NO: 1128525 - DNA, 25 bp, Homo sapien
ttctcagtttcatgaagggccaggc

SEQ ID NO: 1128526 - DNA, 25 bp, Homo sapien
gctttgcgccaagaagtcattgttg

SEQ ID NO: 1128527 - DNA, 25 bp, Homo sapien
taagatgcaatctgctgagatgctg

SEQ ID NO: 1128528 - DNA, 25 bp, Homo sapien
gatgcttgaggattggctttgcgcc

SEQ ID NO: 1128529 - DNA, 25 bp, Homo sapien
gagctgatttgcaaggaatatggtt

SEQ ID NO: 1128530 - DNA, 25 bp, Homo sapien
tctttcttgcatatctgccatggga

SEQ ID NO: 1128531 - DNA, 25 bp, Homo sapien
ggagtttgacccaacagacagattg

SEQ ID NO: 1128532 - DNA, 25 bp, Homo sapien
tcttgcatatctgccatgggagttt

SEQ ID NO: 1128533 - DNA, 25 bp, Homo sapien
gattgtccagtgaaccaggtgaaca

SEQ ID NO: 1128534 - DNA, 25 bp, Homo sapien
tcacttcacgcaggtctcagatcaa

SEQ ID NO: 1128535 - DNA, 25 bp, Homo sapien
cccacaattcagacaaggatatgca

SEQ ID NO: 1128536 - DNA, 25 bp, Homo sapien
gaagtactttgtgtacgttcccaca

SEQ ID NO: 1128537 - DNA, 25 bp, Homo sapien
tcagaaggttgtatggtaatcactc

SEQ ID NO: 1128538 - DNA, 25 bp, Homo sapien
gggcctctattctgtcaatcatgga

SEQ ID NO: 1128539 - DNA, 25 bp, Homo sapien
cacactgttacttgccttcctgggc

SEQ ID NO: 1128540 - DNA, 25 bp, Homo sapien
actgaagtcctttccgcccctagca

SEQ ID NO: 1128541 - DNA, 25 bp, Homo sapien
caatcatggagcgttgcttggccag

SEQ ID NO: 1128542 - DNA, 25 bp, Homo sapien
caatttttgatttcaaagtggcttt

SEQ ID NO: 1128543 - DNA, 25 bp, Homo sapien
aagtggctttgttgttctttacaca

SEQ ID NO: 1128544 - DNA, 25 bp, Homo sapien
gatttcaaagtggctttgttgttct

SEQ ID NO: 1128545 - DNA, 25 bp, Homo sapien
ccatttccaatttttgatttcaaag

SEQ ID NO: 1128546 - DNA, 25 bp, Homo sapien
aggagctccccgagccactttcgcg

SEQ ID NO: 1128547 - DNA, 25 bp, Homo sapien
cccgcagccctaggaggatcggtgt

SEQ ID NO: 1128548 - DNA, 25 bp, Homo sapien
actttcgcgcgagcagcagaaaacc

SEQ ID NO: 1128549 - DNA, 25 bp, Homo sapien
gatcggtgtgctgagcttgtggcca

SEQ ID NO: 1128550 - DNA, 25 bp, Homo sapien
cggatctgaactgctgagacgcact

SEQ ID NO: 1128551 - DNA, 25 bp, Homo sapien
gggcccccggatctgaactgctgag

SEQ ID NO: 1128552 - DNA, 25 bp, Homo sapien
ccccggatctgaactgctgagacgc

SEQ ID NO: 1128553 - DNA, 25 bp, Homo sapien
tctgaactgctgagacgcactgtcc

SEQ ID NO: 1128554 - DNA, 25 bp, Homo sapien
tacgcgaagtcacccagcgccgcgc

SEQ ID NO: 1128555 - DNA, 25 bp, Homo sapien
tgctacgcgaagtcacccagcgccg

SEQ ID NO: 1128556 - DNA, 25 bp, Homo sapien
ctacgcgaagtcacccagcgccgcg

SEQ ID NO: 1128557 - DNA, 25 bp, Homo sapien
ctgctacgcgaagtcacccagcgcc

SEQ ID NO: 1128558 - DNA, 25 bp, Homo sapien
aagttgcgttcggagagcccgggat

SEQ ID NO: 1128559 - DNA, 25 bp, Homo sapien
gtacggctcgcttcgcatcttgctg

SEQ ID NO: 1128560 - DNA, 25 bp, Homo sapien
gactgactgcgtagtgctctcgcaa

SEQ ID NO: 1128561 - DNA, 25 bp, Homo sapien
gctctcgcaaacttactcgagtcgg

SEQ ID NO: 1128562 - DNA, 25 bp, Homo sapien
tgcttagggtccgagggcgcagtga

SEQ ID NO: 1128563 - DNA, 25 bp, Homo sapien
gggctctattaataactctctagga

SEQ ID NO: 1128564 - DNA, 25 bp, Homo sapien
catttgaaagcgtaagccatttggg

SEQ ID NO: 1128565 - DNA, 25 bp, Homo sapien
taggagcaggtgtgcttagggtccg

SEQ ID NO: 1128566 - DNA, 25 bp, Homo sapien
tcctcggaaaagactcaactgccag

SEQ ID NO: 1128567 - DNA, 25 bp, Homo sapien
ccccggatttccagccatgagattc

SEQ ID NO: 1128568 - DNA, 25 bp, Homo sapien
tgaagcagtcaccagcttagctgca

SEQ ID NO: 1128569 - DNA, 25 bp, Homo sapien
agcttagctgcacgctcaataccag

SEQ ID NO: 1128570 - DNA, 25 bp, Homo sapien
ctggagagggcctcggaaaccgcag

SEQ ID NO: 1128571 - DNA, 25 bp, Homo sapien
gcgagagagccttcactggcttcag

SEQ ID NO: 1128572 - DNA, 25 bp, Homo sapien
tactccagacgaacgctagagggcg

SEQ ID NO: 1128573 - DNA, 25 bp, Homo sapien
tggttcgatgagtgatccaggcttt

SEQ ID NO: 1128574 - DNA, 25 bp, Homo sapien
gataattacggtcttgagcagcgcc

SEQ ID NO: 1128575 - DNA, 25 bp, Homo sapien
tggccccagacaagagcaggttagc

SEQ ID NO: 1128576 - DNA, 25 bp, Homo sapien
gacatgatccggatgaaggcccgac

SEQ ID NO: 1128577 - DNA, 25 bp, Homo sapien
tgttctccaggatgataaagcagca

SEQ ID NO: 1128578 - DNA, 25 bp, Homo sapien
ggtggccagcgaccaagtaaagagc

SEQ ID NO: 1128579 - DNA, 25 bp, Homo sapien
gtctgtttctcctaggacaccaagg

SEQ ID NO: 1128580 - DNA, 25 bp, Homo sapien
gatcccgcttacatggaaactttgg

SEQ ID NO: 1128581 - DNA, 25 bp, Homo sapien
cagggcatccctaaagaagcagaag

SEQ ID NO: 1128582 - DNA, 25 bp, Homo sapien
ttttcttaagaaatacacattcaat

SEQ ID NO: 1128583 - DNA, 25 bp, Homo sapien
ttcttaagaaatacacattcaatgg

SEQ ID NO: 1128584 - DNA, 25 bp, Homo sapien
tcttaagaaatacacattcaatggt

SEQ ID NO: 1128585 - DNA, 25 bp, Homo sapien
tattttcttaagaaatacacattca

SEQ ID NO: 1128586 - DNA, 25 bp, Homo sapien
tactatctaatgaatagctggactg

SEQ ID NO: 1128587 - DNA, 25 bp, Homo sapien
ctggactgaaaagtttctggcgttc

SEQ ID NO: 1128588 - DNA, 25 bp, Homo sapien
cttcaattactatctaatgaatagc

SEQ ID NO: 1128589 - DNA, 25 bp, Homo sapien
ttaaagtaatgcttttaagggcaca

SEQ ID NO: 1128590 - DNA, 25 bp, Homo sapien
ggtttaattgcactgaaaaccatac

SEQ ID NO: 1128591 - DNA, 25 bp, Homo sapien
tgataaagctatgtgcaaaatgatc

SEQ ID NO: 1128592 - DNA, 25 bp, Homo sapien
aacaagacatctctcggtttaattg

SEQ ID NO: 1128593 - DNA, 25 bp, Homo sapien
aagtcagaaacctattaaatactat

SEQ ID NO: 1128594 - DNA, 25 bp, Homo sapien
cagaagataggctgggagaagccaa

SEQ ID NO: 1128595 - DNA, 25 bp, Homo sapien
ttacaataagtctgtgatgcttgca

SEQ ID NO: 1128596 - DNA, 25 bp, Homo sapien
taaaagtgttatgctactcagccca

SEQ ID NO: 1128597 - DNA, 25 bp, Homo sapien
actgatactgtatacttctatgtgg

SEQ ID NO: 1128598 - DNA, 25 bp, Homo sapien
ttccgccttagcagacagatggaga

SEQ ID NO: 1128599 - DNA, 25 bp, Homo sapien
gacacttgaaagcacaaattctgaa

SEQ ID NO: 1128600 - DNA, 25 bp, Homo sapien
tcatgtcccaactgtgtcctgtgca

SEQ ID NO: 1128601 - DNA, 25 bp, Homo sapien
gaaatgacatctactctattaggtg

SEQ ID NO: 1128602 - DNA, 25 bp, Homo sapien
tactctgatagtctctacaaaagtt

SEQ ID NO: 1128603 - DNA, 25 bp, Homo sapien
tcttttagttatttgtgattcctcc

SEQ ID NO: 1128604 - DNA, 25 bp, Homo sapien
tatttgtgattcctccctcaaggta

SEQ ID NO: 1128605 - DNA, 25 bp, Homo sapien
tcatacatttactgtgtccacaagg

SEQ ID NO: 1128606 - DNA, 25 bp, Homo sapien
gaacataactttactggtgacctga

SEQ ID NO: 1128607 - DNA, 25 bp, Homo sapien
ggtggccacatgaagctcgctgaag

SEQ ID NO: 1128608 - DNA, 25 bp, Homo sapien
tctctgaagtgtctagacaggagca

SEQ ID NO: 1128609 - DNA, 25 bp, Homo sapien
tatttctggtacctcaaaagatctg

SEQ ID NO: 1128610 - DNA, 25 bp, Homo sapien
tgttacagtgattcgaattcggtga

SEQ ID NO: 1128611 - DNA, 25 bp, Homo sapien
cttgttacagtgattcgaattcggt

SEQ ID NO: 1128612 - DNA, 25 bp, Homo sapien
gaattcggtgaattgccacctctgg

SEQ ID NO: 1128613 - DNA, 25 bp, Homo sapien
tcgaattcggtgaattgccacctct

SEQ ID NO: 1128614 - DNA, 25 bp, Homo sapien
cttctccagggattttactttgcgg

SEQ ID NO: 1128615 - DNA, 25 bp, Homo sapien
tcctttgctcctctgatcaagtcag

SEQ ID NO: 1128616 - DNA, 25 bp, Homo sapien
ccatgtcttagaacattcacaaggg

SEQ ID NO: 1128617 - DNA, 25 bp, Homo sapien
ggtaggcattcgaactggtcctttc

SEQ ID NO: 1128618 - DNA, 25 bp, Homo sapien
gtgccagtcaataagtcgcttgtgg

SEQ ID NO: 1128619 - DNA, 25 bp, Homo sapien
ttgtggattctcatcccgaaacaat

SEQ ID NO: 1128620 - DNA, 25 bp, Homo sapien
tgtggattctcatcccgaaacaatc

SEQ ID NO: 1128621 - DNA, 25 bp, Homo sapien
gactgtgccagtcaataagtcgctt

SEQ ID NO: 1128622 - DNA, 25 bp, Homo sapien
atacattctttagggagaattcatc

SEQ ID NO: 1128623 - DNA, 25 bp, Homo sapien
cattttaatctgagagaaagttcac

SEQ ID NO: 1128624 - DNA, 25 bp, Homo sapien
tctctctacattctcgaagataccc

SEQ ID NO: 1128625 - DNA, 25 bp, Homo sapien
atgttcatgcccacacactcagtca

SEQ ID NO: 1128626 - DNA, 25 bp, Homo sapien
tcaaggtgtcatcaagattggttct

SEQ ID NO: 1128627 - DNA, 25 bp, Homo sapien
tgatgatcatgagggaggatctgtt

SEQ ID NO: 1128628 - DNA, 25 bp, Homo sapien
tctccttagcatgtagatggccatc

SEQ ID NO: 1128629 - DNA, 25 bp, Homo sapien
ggttctttctgatgatcatgaggga

SEQ ID NO: 1128630 - DNA, 25 bp, Homo sapien
aaagctgtacatgtacctcctggat

SEQ ID NO: 1128631 - DNA, 25 bp, Homo sapien
caggatcattcatactcaaacttca

SEQ ID NO: 1128632 - DNA, 25 bp, Homo sapien
tgtacccaggtaacaaagctgtaca

SEQ ID NO: 1128633 - DNA, 25 bp, Homo sapien
caatgtacccaggtaacaaagctgt

SEQ ID NO: 1128634 - DNA, 25 bp, Homo sapien
gctggtatttatccttgtcttgacc

SEQ ID NO: 1128635 - DNA, 25 bp, Homo sapien
cacctgcactgacaggaaccatttc

SEQ ID NO: 1128636 - DNA, 25 bp, Homo sapien
tgttgtaatgatctctttcatcacc

SEQ ID NO: 1128637 - DNA, 25 bp, Homo sapien
tcttgaccttcagttatgttgtaat

SEQ ID NO: 1128638 - DNA, 25 bp, Homo sapien
tgagtggatgctcacactgccatcc

SEQ ID NO: 1128639 - DNA, 25 bp, Homo sapien
catgagtggatgctcacactgccat

SEQ ID NO: 1128640 - DNA, 25 bp, Homo sapien
gtggatgctcacactgccatccaac

SEQ ID NO: 1128641 - DNA, 25 bp, Homo sapien
tcatgagtggatgctcacactgcca

SEQ ID NO: 1128642 - DNA, 25 bp, Homo sapien
ccaggcaatagactcctccacttgg

SEQ ID NO: 1128643 - DNA, 25 bp, Homo sapien
accaggcaatagactcctccacttg

SEQ ID NO: 1128644 - DNA, 25 bp, Homo sapien
caggcaatagactcctccacttggg

SEQ ID NO: 1128645 - DNA, 25 bp, Homo sapien
gcagggcggcaagaaaaggcccaca

SEQ ID NO: 1128646 - DNA, 25 bp, Homo sapien
gtgtccccagtgtatgtcctctgtc

SEQ ID NO: 1128647 - DNA, 25 bp, Homo sapien
catttcgttatctgagctgtgctcc

SEQ ID NO: 1128648 - DNA, 25 bp, Homo sapien
ttcttaatgggctagcacgtgtccc

SEQ ID NO: 1128649 - DNA, 25 bp, Homo sapien
cctctgaagaatccaacgcatacat

SEQ ID NO: 1128650 - DNA, 25 bp, Homo sapien
gggatcagtaggccaagcataagcc

SEQ ID NO: 1128651 - DNA, 25 bp, Homo sapien
tccacaattctctatgattctctcc

SEQ ID NO: 1128652 - DNA, 25 bp, Homo sapien
tctgggatcagtaggccaagcataa

SEQ ID NO: 1128653 - DNA, 25 bp, Homo sapien
aaatgagggcaggctatttgcagct

SEQ ID NO: 1128654 - DNA, 25 bp, Homo sapien
tgcagaagggaaaaaccgcttctct

SEQ ID NO: 1128655 - DNA, 25 bp, Homo sapien
agggaaaaaccgcttctctgtgaga

SEQ ID NO: 1128656 - DNA, 25 bp, Homo sapien
gaaaaaccgcttctctgtgagaagc

SEQ ID NO: 1128657 - DNA, 25 bp, Homo sapien
agaagggaaaaaccgcttctctgtg

SEQ ID NO: 1128658 - DNA, 25 bp, Homo sapien
tgcaagctctgttgggttttcctca

SEQ ID NO: 1128659 - DNA, 25 bp, Homo sapien
caagctctgttgggttttcctcagg

SEQ ID NO: 1128660 - DNA, 25 bp, Homo sapien
aatgcaagctctgttgggttttcct

SEQ ID NO: 1128661 - DNA, 25 bp, Homo sapien
aaatgcaagctctgttgggttttcc

SEQ ID NO: 1128662 - DNA, 25 bp, Homo sapien
tgaagacaggagttacaaccaaaca

SEQ ID NO: 1128663 - DNA, 25 bp, Homo sapien
gacaagctccaatgatatctcactg

SEQ ID NO: 1128664 - DNA, 25 bp, Homo sapien
ggcaagatgcctgttcagtgggtca

SEQ ID NO: 1128665 - DNA, 25 bp, Homo sapien
agtgggtcaactggcatatcataca

SEQ ID NO: 1128666 - DNA, 25 bp, Homo sapien
tcctccatgtgtacaaacattcatc

SEQ ID NO: 1128667 - DNA, 25 bp, Homo sapien
ctcctccatgtgtacaaacattcat

SEQ ID NO: 1128668 - DNA, 25 bp, Homo sapien
cctctaagcatgtacagcatatgta

SEQ ID NO: 1128669 - DNA, 25 bp, Homo sapien
tttcctcattttggctgaccaccca

SEQ ID NO: 1128670 - DNA, 25 bp, Homo sapien
gtaagtatctacctctaagcatgta

SEQ ID NO: 1128671 - DNA, 25 bp, Homo sapien
tctgctccctgtaagtatctacctc

SEQ ID NO: 1128672 - DNA, 25 bp, Homo sapien
cctggcatcagcgctttgtcgtaat

SEQ ID NO: 1128673 - DNA, 25 bp, Homo sapien
gcctgtgtatctgcagccatctggg

SEQ ID NO: 1128674 - DNA, 25 bp, Homo sapien
ttcccattgattcatagcctgttat

SEQ ID NO: 1128675 - DNA, 25 bp, Homo sapien
gcagcctgtgtatctgcagccatct

SEQ ID NO: 1128676 - DNA, 25 bp, Homo sapien
gcctgttatttcctgtgcagcctgt

SEQ ID NO: 1128677 - DNA, 25 bp, Homo sapien
gaaatagctctcagcttgcaaaaaa

SEQ ID NO: 1128678 - DNA, 25 bp, Homo sapien
tttgtgctgtgagagtgcaaatatg

SEQ ID NO: 1128679 - DNA, 25 bp, Homo sapien
caagaaggaaatagctctcagcttg

SEQ ID NO: 1128680 - DNA, 25 bp, Homo sapien
tgtgctgtgagagtgcaaatatgtc

SEQ ID NO: 1128681 - DNA, 25 bp, Homo sapien
cctctaagatttcatatcttgtgtt

SEQ ID NO: 1128682 - DNA, 25 bp, Homo sapien
gatggcctatgtcttcctctaagat

SEQ ID NO: 1128683 - DNA, 25 bp, Homo sapien
tttcccttgatggcctatgtcttcc

SEQ ID NO: 1128684 - DNA, 25 bp, Homo sapien
cccttgatggcctatgtcttcctct

SEQ ID NO: 1128685 - DNA, 25 bp, Homo sapien
ccaactcccacattttatgatgact

SEQ ID NO: 1128686 - DNA, 25 bp, Homo sapien
ccacattttatgatgacttctccca

SEQ ID NO: 1128687 - DNA, 25 bp, Homo sapien
cccacattttatgatgacttctccc

SEQ ID NO: 1128688 - DNA, 25 bp, Homo sapien
tttctcccaactcccacattttatg

SEQ ID NO: 1128689 - DNA, 25 bp, Homo sapien
cacaaataacatgatggatatgttt

SEQ ID NO: 1128690 - DNA, 25 bp, Homo sapien
acatgatggatatgtttgtggaaat

SEQ ID NO: 1128691 - DNA, 25 bp, Homo sapien
caaataacatgatggatatgtttgt

SEQ ID NO: 1128692 - DNA, 25 bp, Homo sapien
tggatatgtttgtggaaatcatcac

SEQ ID NO: 1128693 - DNA, 25 bp, Homo sapien
ccgcaatgatgtaggattccactca

SEQ ID NO: 1128694 - DNA, 25 bp, Homo sapien
ttcttgaccagcttgtcttttcaga

SEQ ID NO: 1128695 - DNA, 25 bp, Homo sapien
agaaatttaccatcatatccacata

SEQ ID NO: 1128696 - DNA, 25 bp, Homo sapien
aagtgctccataaaggtcagccttg

SEQ ID NO: 1128697 - DNA, 25 bp, Homo sapien
tgtcagaaggctgccagacaccttg

SEQ ID NO: 1128698 - DNA, 25 bp, Homo sapien
gagaatgcggcaaaactgaccctcg

SEQ ID NO: 1128699 - DNA, 25 bp, Homo sapien
caccttggataagggtagagaccac

SEQ ID NO: 1128700 - DNA, 25 bp, Homo sapien
tataatcaagatctaggctgtctcc

SEQ ID NO: 1128701 - DNA, 25 bp, Homo sapien
ggagaaagttgctgacattccacaa

SEQ ID NO: 1128702 - DNA, 25 bp, Homo sapien
tctcatctgttggttctgctccagg

SEQ ID NO: 1128703 - DNA, 25 bp, Homo sapien
cattccacaatgcatttcctcgact

SEQ ID NO: 1128704 - DNA, 25 bp, Homo sapien
tccacaactccctagaggtaggaga

SEQ ID NO: 1128705 - DNA, 25 bp, Homo sapien
catacaaggagataagtccaaatgc

SEQ ID NO: 1128706 - DNA, 25 bp, Homo sapien
gacatacaaggagataagtccaaat

SEQ ID NO: 1128707 - DNA, 25 bp, Homo sapien
gttgacatacaaggagataagtcca

SEQ ID NO: 1128708 - DNA, 25 bp, Homo sapien
tgacatacaaggagataagtccaaa

SEQ ID NO: 1128709 - DNA, 25 bp, Homo sapien
cttgtgccatacttgattgaccaaa

SEQ ID NO: 1128710 - DNA, 25 bp, Homo sapien
gtgccatacttgattgaccaaaggg

SEQ ID NO: 1128711 - DNA, 25 bp, Homo sapien
cccttgtgccatacttgattgacca

SEQ ID NO: 1128712 - DNA, 25 bp, Homo sapien
ttacccttgtgccatacttgattga

SEQ ID NO: 1128713 - DNA, 25 bp, Homo sapien
ttcagggacaattggttgctgcacc

SEQ ID NO: 1128714 - DNA, 25 bp, Homo sapien
tcagggacaattggttgctgcaccc

SEQ ID NO: 1128715 - DNA, 25 bp, Homo sapien
tttcagggacaattggttgctgcac

SEQ ID NO: 1128716 - DNA, 25 bp, Homo sapien
gagacagctcattccactggacttt

SEQ ID NO: 1128717 - DNA, 25 bp, Homo sapien
gaagagacagctcattccactggac

SEQ ID NO: 1128718 - DNA, 25 bp, Homo sapien
tcctgaagagacagctcattccact

SEQ ID NO: 1128719 - DNA, 25 bp, Homo sapien
gatttattcctgaagagacagctca

SEQ ID NO: 1128720 - DNA, 25 bp, Homo sapien
ctattatttcccttggagacacatc

SEQ ID NO: 1128721 - DNA, 25 bp, Homo sapien
gagacacatccagtctcttcagatc

SEQ ID NO: 1128722 - DNA, 25 bp, Homo sapien
gatctgcaaacagcaaggtcagcag

SEQ ID NO: 1128723 - DNA, 25 bp, Homo sapien
aggtcagcagatcttcagggtgaag

SEQ ID NO: 1128724 - DNA, 25 bp, Homo sapien
gcagctgcagaatccaggatctgca

SEQ ID NO: 1128725 - DNA, 25 bp, Homo sapien
caggatctgcaaacagcaaggtcag

SEQ ID NO: 1128726 - DNA, 25 bp, Homo sapien
attaagaaggcaatacccgtagtct

SEQ ID NO: 1128727 - DNA, 25 bp, Homo sapien
taagaaggcaatacccgtagtctgt

SEQ ID NO: 1128728 - DNA, 25 bp, Homo sapien
cttccttactcccgtgcctttctct

SEQ ID NO: 1128729 - DNA, 25 bp, Homo sapien
agaaggcaatacccgtagtctgttc

SEQ ID NO: 1128730 - DNA, 25 bp, Homo sapien
cataatatgtacactagtcagccgc

SEQ ID NO: 1128731 - DNA, 25 bp, Homo sapien
gcccagaggaaagctcgacgtttgc

SEQ ID NO: 1128732 - DNA, 25 bp, Homo sapien
gacagatgacactctttggaggagg

SEQ ID NO: 1128733 - DNA, 25 bp, Homo sapien
gggattccttcaaagtctgcataca

SEQ ID NO: 1128734 - DNA, 25 bp, Homo sapien
gatgattcacgactcaggaaggacc

SEQ ID NO: 1128735 - DNA, 25 bp, Homo sapien
aaggaccgagccttcctgatggtgt

SEQ ID NO: 1128736 - DNA, 25 bp, Homo sapien
tcattaggctactcagacgagtgca

SEQ ID NO: 1128737 - DNA, 25 bp, Homo sapien
cgagtagagtttacagcagaatacc

SEQ ID NO: 1128738 - DNA, 25 bp, Homo sapien
gactggtcttaagctgttcttgcat

SEQ ID NO: 1128739 - DNA, 25 bp, Homo sapien
gaatgggtaggagcaaccactgact

SEQ ID NO: 1128740 - DNA, 25 bp, Homo sapien
acaggtgccctctgtgcctattcag

SEQ ID NO: 1128741 - DNA, 25 bp, Homo sapien
gcctgaggttgcagactggtctgaa

SEQ ID NO: 1128742 - DNA, 25 bp, Homo sapien
gaactctgacggttcttgacaagaa

SEQ ID NO: 1128743 - DNA, 25 bp, Homo sapien
tatatgtgctgttcaagcgagcact

SEQ ID NO: 1128744 - DNA, 25 bp, Homo sapien
ggccacactaaccttccctgtatca

SEQ ID NO: 1128745 - DNA, 25 bp, Homo sapien
ccctgtatcatttccatgttagtat

SEQ ID NO: 1128746 - DNA, 25 bp, Homo sapien
tgggcaggggccacactaaccttcc

SEQ ID NO: 1128747 - DNA, 25 bp, Homo sapien
tattgtctacacacattagcacttc

SEQ ID NO: 1128748 - DNA, 25 bp, Homo sapien
tacacacattagcacttcacttaat

SEQ ID NO: 1128749 - DNA, 25 bp, Homo sapien
tcccgcaaccccactttggttgtgc

SEQ ID NO: 1128750 - DNA, 25 bp, Homo sapien
ttggttgtgcctccttattgtctac

SEQ ID NO: 1128751 - DNA, 25 bp, Homo sapien
tatggtgtttcctggacacttgggc

SEQ ID NO: 1128752 - DNA, 25 bp, Homo sapien
cgtagatactacaaacactggtaat

SEQ ID NO: 1128753 - DNA, 25 bp, Homo sapien
cagcagccagtgatgcagttatctt

SEQ ID NO: 1128754 - DNA, 25 bp, Homo sapien
cactgagacagtagtaacgtagata

SEQ ID NO: 1128755 - DNA, 25 bp, Homo sapien
taacgctcaactcagttaacacctc

SEQ ID NO: 1128756 - DNA, 25 bp, Homo sapien
tgccacccattctttaacgctcaac

SEQ ID NO: 1128757 - DNA, 25 bp, Homo sapien
acccattctttaacgctcaactcag

SEQ ID NO: 1128758 - DNA, 25 bp, Homo sapien
tctttaacgctcaactcagttaaca

SEQ ID NO: 1128759 - DNA, 25 bp, Homo sapien
ctattccaaaattcttatgcaacat

SEQ ID NO: 1128760 - DNA, 25 bp, Homo sapien
gtttatcattccctctttcttctcc

SEQ ID NO: 1128761 - DNA, 25 bp, Homo sapien
ttctcctattccaaaattcttatgc

SEQ ID NO: 1128762 - DNA, 25 bp, Homo sapien
ctttcttctcctattccaaaattct

SEQ ID NO: 1128763 - DNA, 25 bp, Homo sapien
aaagcagttctccagattccaggag

SEQ ID NO: 1128764 - DNA, 25 bp, Homo sapien
gcagttctccagattccaggagttc

SEQ ID NO: 1128765 - DNA, 25 bp, Homo sapien
atactatcttataggcagccctggc

SEQ ID NO: 1128766 - DNA, 25 bp, Homo sapien
agttctcagggatccagatcaatac

SEQ ID NO: 1128767 - DNA, 25 bp, Homo sapien
tcttcagaaaccaaaaattggctca

SEQ ID NO: 1128768 - DNA, 25 bp, Homo sapien
cctcttcagaaaccaaaaattggct

SEQ ID NO: 1128769 - DNA, 25 bp, Homo sapien
ttggctcacaggtgcattaaaaatc

SEQ ID NO: 1128770 - DNA, 25 bp, Homo sapien
aaaaattggctcacaggtgcattaa

SEQ ID NO: 1128771 - DNA, 25 bp, Homo sapien
agagctggtgtacaacacttttaca

SEQ ID NO: 1128772 - DNA, 25 bp, Homo sapien
tgtcttcacacctgtcacaaagcac

SEQ ID NO: 1128773 - DNA, 25 bp, Homo sapien
cacacctgtcacaaagcacattatt

SEQ ID NO: 1128774 - DNA, 25 bp, Homo sapien
atcttctaaggttactgagagctgg

SEQ ID NO: 1128775 - DNA, 25 bp, Homo sapien
cttggcaattatgacagcactgtac

SEQ ID NO: 1128776 - DNA, 25 bp, Homo sapien
tatgacagcactgtactgttccttt

SEQ ID NO: 1128777 - DNA, 25 bp, Homo sapien
ggcaattatgacagcactgtactgt

SEQ ID NO: 1128778 - DNA, 25 bp, Homo sapien
aattatgacagcactgtactgttcc

SEQ ID NO: 1128779 - DNA, 25 bp, Homo sapien
tgctgagctattccgggttctatct

SEQ ID NO: 1128780 - DNA, 25 bp, Homo sapien
gctattccgggttctatctgatgaa

SEQ ID NO: 1128781 - DNA, 25 bp, Homo sapien
gaatttgctgagctattccgggttc

SEQ ID NO: 1128782 - DNA, 25 bp, Homo sapien
gcttgaatttgctgagctattccgg

SEQ ID NO: 1128783 - DNA, 25 bp, Homo sapien
gcgagtattatcactggtcccatta

SEQ ID NO: 1128784 - DNA, 25 bp, Homo sapien
gaagccatgcaatactacaaccagc

SEQ ID NO: 1128785 - DNA, 25 bp, Homo sapien
gagagaggtttgttggccatgctca

SEQ ID NO: 1128786 - DNA, 25 bp, Homo sapien
ccataaaatgccagcagcgagtatt

SEQ ID NO: 1128787 - DNA, 25 bp, Homo sapien
aattctgctaattagcatcacagaa

SEQ ID NO: 1128788 - DNA, 25 bp, Homo sapien
caattctgctaattagcatcacaga

SEQ ID NO: 1128789 - DNA, 25 bp, Homo sapien
ggtcgcttctgcaattctgctaatt

SEQ ID NO: 1128790 - DNA, 25 bp, Homo sapien
cccagggcagagtgagaaatgtatt

SEQ ID NO: 1128791 - DNA, 25 bp, Homo sapien
tgtattgtataactgagtggagaca

SEQ ID NO: 1128792 - DNA, 25 bp, Homo sapien
ccccagggcagagtgagaaatgtat

SEQ ID NO: 1128793 - DNA, 25 bp, Homo sapien
aatgtattgtataactgagtggaga

SEQ ID NO: 1128794 - DNA, 25 bp, Homo sapien
tgctagaaatccatcactaatgagt

SEQ ID NO: 1128795 - DNA, 25 bp, Homo sapien
tagaaatccatcactaatgagttca

SEQ ID NO: 1128796 - DNA, 25 bp, Homo sapien
tgctgctagaaatccatcactaatg

SEQ ID NO: 1128797 - DNA, 25 bp, Homo sapien
gctgctagaaatccatcactaatga

SEQ ID NO: 1128798 - DNA, 25 bp, Homo sapien
cagctataccatgggatagcagtgc

SEQ ID NO: 1128799 - DNA, 25 bp, Homo sapien
agtgccttcaaatggcaggggaaag

SEQ ID NO: 1128800 - DNA, 25 bp, Homo sapien
gatcaattctagcaattcctcagca

SEQ ID NO: 1128801 - DNA, 25 bp, Homo sapien
ataagatcaattctagcaattcctc

SEQ ID NO: 1128802 - DNA, 25 bp, Homo sapien
gcctggacaatccacaggacctagg

SEQ ID NO: 1128803 - DNA, 25 bp, Homo sapien
gacctaggtgccagtaactctgcca

SEQ ID NO: 1128804 - DNA, 25 bp, Homo sapien
tgcaatttgggccttgcctggacaa

SEQ ID NO: 1128805 - DNA, 25 bp, Homo sapien
tatttgctctgttctcggatggacc

SEQ ID NO: 1128806 - DNA, 25 bp, Homo sapien
ggatgttcaaagatctggatagcta

SEQ ID NO: 1128807 - DNA, 25 bp, Homo sapien
gacattcttttaccagcagttgtac

SEQ ID NO: 1128808 - DNA, 25 bp, Homo sapien
cacaataactgcttctaataggagt

SEQ ID NO: 1128809 - DNA, 25 bp, Homo sapien
acatctgggcttgtacgtttctgcc

SEQ ID NO: 1128810 - DNA, 25 bp, Homo sapien
tcttccctagctctaactgattggt

SEQ ID NO: 1128811 - DNA, 25 bp, Homo sapien
tctcttccctagctctaactgattg

SEQ ID NO: 1128812 - DNA, 25 bp, Homo sapien
ttctcttccctagctctaactgatt

SEQ ID NO: 1128813 - DNA, 25 bp, Homo sapien
ctcttccctagctctaactgattgg

SEQ ID NO: 1128814 - DNA, 25 bp, Homo sapien
gttctgattatcagtgttaagaaac

SEQ ID NO: 1128815 - DNA, 25 bp, Homo sapien
cgttggtgaaaggagcttgtgtttg

SEQ ID NO: 1128816 - DNA, 25 bp, Homo sapien
ttggtgaaaggagcttgtgtttgtt

SEQ ID NO: 1128817 - DNA, 25 bp, Homo sapien
aagttctgattatcagtgttaagaa

SEQ ID NO: 1128818 - DNA, 25 bp, Homo sapien
tgaaccgtttctttgttgaaagcag

SEQ ID NO: 1128819 - DNA, 25 bp, Homo sapien
aataatactcccatcgcagacgtgc

SEQ ID NO: 1128820 - DNA, 25 bp, Homo sapien
cagctgatcctggtcaataatactc

SEQ ID NO: 1128821 - DNA, 25 bp, Homo sapien
gcagggaagcgttttccagctgatc

SEQ ID NO: 1128822 - DNA, 25 bp, Homo sapien
aattcattttcaatctgcacagtca

SEQ ID NO: 1128823 - DNA, 25 bp, Homo sapien
gcaaattcattttcaatctgcacag

SEQ ID NO: 1128824 - DNA, 25 bp, Homo sapien
ctctgcaaattcattttcaatctgc

SEQ ID NO: 1128825 - DNA, 25 bp, Homo sapien
attcattttcaatctgcacagtcat

SEQ ID NO: 1128826 - DNA, 25 bp, Homo sapien
tctccgttctgttaccacatctgtc

SEQ ID NO: 1128827 - DNA, 25 bp, Homo sapien
ctgctggcttctccgttctgttacc

SEQ ID NO: 1128828 - DNA, 25 bp, Homo sapien
gctggcttctccgttctgttaccac

SEQ ID NO: 1128829 - DNA, 25 bp, Homo sapien
ggcttctccgttctgttaccacatc

SEQ ID NO: 1128830 - DNA, 25 bp, Homo sapien
ttcttaagcaggcacttgcggccat

SEQ ID NO: 1128831 - DNA, 25 bp, Homo sapien
tattcttaagcaggcacttgcggcc

SEQ ID NO: 1128832 - DNA, 25 bp, Homo sapien
tccccagtagcatatattcttaagc

SEQ ID NO: 1128833 - DNA, 25 bp, Homo sapien
atatattcttaagcaggcacttgcg

SEQ ID NO: 1128834 - DNA, 25 bp, Homo sapien
aattatatcccagtgtatgaactga

SEQ ID NO: 1128835 - DNA, 25 bp, Homo sapien
tcagaaacacaattatatcccagtg

SEQ ID NO: 1128836 - DNA, 25 bp, Homo sapien
cctgttgacaggtctaaattcagaa

SEQ ID NO: 1128837 - DNA, 25 bp, Homo sapien
tcctgatcatccctgttgacaggtc

SEQ ID NO: 1128838 - DNA, 25 bp, Homo sapien
ccatcataattcacttttatagtca

SEQ ID NO: 1128839 - DNA, 25 bp, Homo sapien
cctccatctatgccatcataattca

SEQ ID NO: 1128840 - DNA, 25 bp, Homo sapien
atgccatcataattcacttttatag

SEQ ID NO: 1128841 - DNA, 25 bp, Homo sapien
tattcctccatctatgccatcataa

SEQ ID NO: 1128842 - DNA, 25 bp, Homo sapien
ctgcatgttacatcagtgcgggtac

SEQ ID NO: 1128843 - DNA, 25 bp, Homo sapien
gcagtaggtcccagtactgcacttc

SEQ ID NO: 1128844 - DNA, 25 bp, Homo sapien
gtgcgggtactaatgcagcaaggaa

SEQ ID NO: 1128845 - DNA, 25 bp, Homo sapien
taggtcccagtactgcacttctcca

SEQ ID NO: 1128846 - DNA, 25 bp, Homo sapien
ttacttcctatggactgcaactcag

SEQ ID NO: 1128847 - DNA, 25 bp, Homo sapien
aattctcgccccctatacctccagt

SEQ ID NO: 1128848 - DNA, 25 bp, Homo sapien
gcagcaacaccaatgccatgacagg

SEQ ID NO: 1128849 - DNA, 25 bp, Homo sapien
ttctaatcttctacactggggtgtt

SEQ ID NO: 1128850 - DNA, 25 bp, Homo sapien
tgttcccctctctttataacttgga

SEQ ID NO: 1128851 - DNA, 25 bp, Homo sapien
taaatatagcatagagttggccctc

SEQ ID NO: 1128852 - DNA, 25 bp, Homo sapien
ttatatggccagattaaaatcttcc

SEQ ID NO: 1128853 - DNA, 25 bp, Homo sapien
taatcgtctcaacaaatgttcaaat

SEQ ID NO: 1128854 - DNA, 25 bp, Homo sapien
tttagcactaatgaatcccaaatgc

SEQ ID NO: 1128855 - DNA, 25 bp, Homo sapien
tatgggtggccttatcatgtagcag

SEQ ID NO: 1128856 - DNA, 25 bp, Homo sapien
gaaaggactcttgtcaacgttatca

SEQ ID NO: 1128857 - DNA, 25 bp, Homo sapien
tgttggagatccttaatgctaggtc

SEQ ID NO: 1128858 - DNA, 25 bp, Homo sapien
agacccaagaaaacttcccactgct

SEQ ID NO: 1128859 - DNA, 25 bp, Homo sapien
caaggagcctctcatacagtaccaa

SEQ ID NO: 1128860 - DNA, 25 bp, Homo sapien
tattcttgaccataagtaagaccca

SEQ ID NO: 1128861 - DNA, 25 bp, Homo sapien
cccttggttgagaaaccagatcagt

SEQ ID NO: 1128862 - DNA, 25 bp, Homo sapien
ctgtttggcagtagcctcctaatct

SEQ ID NO: 1128863 - DNA, 25 bp, Homo sapien
aacatcaacctcttgttttgttgtt

SEQ ID NO: 1128864 - DNA, 25 bp, Homo sapien
tcaacatcaacctcttgttttgttg

SEQ ID NO: 1128865 - DNA, 25 bp, Homo sapien
caacatcaacctcttgttttgttgt

SEQ ID NO: 1128866 - DNA, 25 bp, Homo sapien
agattctgctcccaagatttggctc

SEQ ID NO: 1128867 - DNA, 25 bp, Homo sapien
tagaagattctgctcccaagatttg

SEQ ID NO: 1128868 - DNA, 25 bp, Homo sapien
gaagattctgctcccaagatttggc

SEQ ID NO: 1128869 - DNA, 25 bp, Homo sapien
cttttagaagattctgctcccaaga

SEQ ID NO: 1128870 - DNA, 25 bp, Homo sapien
ctggaagagaagcacaggaaatttt

SEQ ID NO: 1128871 - DNA, 25 bp, Homo sapien
tctgccctatctggaagagaagcac

SEQ ID NO: 1128872 - DNA, 25 bp, Homo sapien
cttctgccctatctggaagagaagc

SEQ ID NO: 1128873 - DNA, 25 bp, Homo sapien
atctggaagagaagcacaggaaatt

SEQ ID NO: 1128874 - DNA, 25 bp, Homo sapien
tttggaggatgaagccatctctttg

SEQ ID NO: 1128875 - DNA, 25 bp, Homo sapien
ttggaggatgaagccatctctttgg

SEQ ID NO: 1128876 - DNA, 25 bp, Homo sapien
ggaggatgaagccatctctttggct

SEQ ID NO: 1128877 - DNA, 25 bp, Homo sapien
ctttggaggatgaagccatctcttt

SEQ ID NO: 1128878 - DNA, 25 bp, Homo sapien
tctgttgaagctaagtggttgatgt

SEQ ID NO: 1128879 - DNA, 25 bp, Homo sapien
taagtggttgatgtgtgaactagtc

SEQ ID NO: 1128880 - DNA, 25 bp, Homo sapien
gaagctaagtggttgatgtgtgaac

SEQ ID NO: 1128881 - DNA, 25 bp, Homo sapien
gaagtatctgttgaagctaagtggt

SEQ ID NO: 1128882 - DNA, 25 bp, Homo sapien
tgaacccctgttggctactttgaaa

SEQ ID NO: 1128883 - DNA, 25 bp, Homo sapien
tttagcttccattttcgaattagcc

SEQ ID NO: 1128884 - DNA, 25 bp, Homo sapien
tgtccatattaaggagggaactgct

SEQ ID NO: 1128885 - DNA, 25 bp, Homo sapien
ccattttcgaattagccttctgtgc

SEQ ID NO: 1128886 - DNA, 25 bp, Homo sapien
tcatgattcaacagaccagtagaga

SEQ ID NO: 1128887 - DNA, 25 bp, Homo sapien
tcaacagaccagtagagagtagttc

SEQ ID NO: 1128888 - DNA, 25 bp, Homo sapien
tagagagtagttcctggaaatttct

SEQ ID NO: 1128889 - DNA, 25 bp, Homo sapien
gaccagtagagagtagttcctggaa

SEQ ID NO: 1128890 - DNA, 25 bp, Homo sapien
ggtaagctataggtgagtgcacacc

SEQ ID NO: 1128891 - DNA, 25 bp, Homo sapien
gggtccatcggcagaagagcttcaa

SEQ ID NO: 1128892 - DNA, 25 bp, Homo sapien
ggcaacatgggtaagctataggtga

SEQ ID NO: 1128893 - DNA, 25 bp, Homo sapien
tatgatggctaccagaaaaacagcc

SEQ ID NO: 1128894 - DNA, 25 bp, Homo sapien
tttatgtctctgcatggttaaggct

SEQ ID NO: 1128895 - DNA, 25 bp, Homo sapien
cactggaactttggttaatggacaa

SEQ ID NO: 1128896 - DNA, 25 bp, Homo sapien
gcatggttaaggctttattagtaaa

SEQ ID NO: 1128897 - DNA, 25 bp, Homo sapien
tcactggaactttggttaatggaca

SEQ ID NO: 1128898 - DNA, 25 bp, Homo sapien
taacaagtacccagatcctttctca

SEQ ID NO: 1128899 - DNA, 25 bp, Homo sapien
gatccttaaggacagactgggcctc

SEQ ID NO: 1128900 - DNA, 25 bp, Homo sapien
tccttaaggacagactgggcctcag

SEQ ID NO: 1128901 - DNA, 25 bp, Homo sapien
atgtgttaacaagtacccagatcct

SEQ ID NO: 1128902 - DNA, 25 bp, Homo sapien
gctgagtccagggtttatatgtgct

SEQ ID NO: 1128903 - DNA, 25 bp, Homo sapien
gttcttactccggtgacgggctcca

SEQ ID NO: 1128904 - DNA, 25 bp, Homo sapien
catgctgattggtccttgggcaggt

SEQ ID NO: 1128905 - DNA, 25 bp, Homo sapien
tatctgtcccctcttgctattgaga

SEQ ID NO: 1128906 - DNA, 25 bp, Homo sapien
cttgctataggggagatccgtcttc

SEQ ID NO: 1128907 - DNA, 25 bp, Homo sapien
tgctataggggagatccgtcttcat

SEQ ID NO: 1128908 - DNA, 25 bp, Homo sapien
ggaacactctctccttgctataggg

SEQ ID NO: 1128909 - DNA, 25 bp, Homo sapien
ctggaacactctctccttgctatag

SEQ ID NO: 1128910 - DNA, 25 bp, Homo sapien
cccttgagtgtgatttgagtccttc

SEQ ID NO: 1128911 - DNA, 25 bp, Homo sapien
gcttcccttgagtgtgatttgagtc

SEQ ID NO: 1128912 - DNA, 25 bp, Homo sapien
tgcatatctctgtccggcagcagcc

SEQ ID NO: 1128913 - DNA, 25 bp, Homo sapien
tgtgatttgagtccttcaggcttgc

SEQ ID NO: 1128914 - DNA, 25 bp, Homo sapien
tgctaaattaaaatagagttgtccc

SEQ ID NO: 1128915 - DNA, 25 bp, Homo sapien
cctaagatctttttctgctaaatta

SEQ ID NO: 1128916 - DNA, 25 bp, Homo sapien
ctaaattaaaatagagttgtcccat

SEQ ID NO: 1128917 - DNA, 25 bp, Homo sapien
tttctgctaaattaaaatagagttg

SEQ ID NO: 1128918 - DNA, 25 bp, Homo sapien
tgtgggacaacaactccttgatgag

SEQ ID NO: 1128919 - DNA, 25 bp, Homo sapien
aggtacagaagtgtgggacaacaac

SEQ ID NO: 1128920 - DNA, 25 bp, Homo sapien
cagaagtgtgggacaacaactcctt

SEQ ID NO: 1128921 - DNA, 25 bp, Homo sapien
caactccttgatgagtttgaaagtt

SEQ ID NO: 1128922 - DNA, 25 bp, Homo sapien
gttccagacaactgagagctagtgg

SEQ ID NO: 1128923 - DNA, 25 bp, Homo sapien
aactgagagctagtggctggcagaa

SEQ ID NO: 1128924 - DNA, 25 bp, Homo sapien
tccagacaactgagagctagtggct

SEQ ID NO: 1128925 - DNA, 25 bp, Homo sapien
gacaactgagagctagtggctggca

SEQ ID NO: 1128926 - DNA, 25 bp, Homo sapien
gagtatttcatccagtccagaccct

SEQ ID NO: 1128927 - DNA, 25 bp, Homo sapien
agccataagcaatcactttcagttg

SEQ ID NO: 1128928 - DNA, 25 bp, Homo sapien
tcagttgcctaaggttgagtatttc

SEQ ID NO: 1128929 - DNA, 25 bp, Homo sapien
cagtccagaccctttgcgtttgttc

SEQ ID NO: 1128930 - DNA, 25 bp, Homo sapien
tctgatatctctaccttcacttttc

SEQ ID NO: 1128931 - DNA, 25 bp, Homo sapien
agagaagtcaaagcaaccacagtgc

SEQ ID NO: 1128932 - DNA, 25 bp, Homo sapien
ttttctttctgatatctctaccttc

SEQ ID NO: 1128933 - DNA, 25 bp, Homo sapien
gaagtcaaagcaaccacagtgctca

SEQ ID NO: 1128934 - DNA, 25 bp, Homo sapien
gagcaaagcctgcataccactgatc

SEQ ID NO: 1128935 - DNA, 25 bp, Homo sapien
gcttttgaactctgagcaaagcctg

SEQ ID NO: 1128936 - DNA, 25 bp, Homo sapien
ttttgaactctgagcaaagcctgca

SEQ ID NO: 1128937 - DNA, 25 bp, Homo sapien
aaagcctgcataccactgatcagtc

SEQ ID NO: 1128938 - DNA, 25 bp, Homo sapien
tgtactagcaactgaggaattccca

SEQ ID NO: 1128939 - DNA, 25 bp, Homo sapien
ggaattcccacagataggtttatca

SEQ ID NO: 1128940 - DNA, 25 bp, Homo sapien
ttgtcgaagccaagaaatgatgcag

SEQ ID NO: 1128941 - DNA, 25 bp, Homo sapien
tgcagagctgctcacatgagttctt

SEQ ID NO: 1128942 - DNA, 25 bp, Homo sapien
ttgccacacattcacccttgcttgc

SEQ ID NO: 1128943 - DNA, 25 bp, Homo sapien
gccacacattcacccttgcttgctt

SEQ ID NO: 1128944 - DNA, 25 bp, Homo sapien
gcttcagaaatattcgtgggccttg

SEQ ID NO: 1128945 - DNA, 25 bp, Homo sapien
agaaatattcgtgggccttggagat

SEQ ID NO: 1128946 - DNA, 25 bp, Homo sapien
tgttgcccagggcattctggcagca

SEQ ID NO: 1128947 - DNA, 25 bp, Homo sapien
agtgaagataatatagtaaatagag

SEQ ID NO: 1128948 - DNA, 25 bp, Homo sapien
cattgttgcccagggcattctggca

SEQ ID NO: 1128949 - DNA, 25 bp, Homo sapien
ataatatagtaaatagagtgagatc

SEQ ID NO: 1128950 - DNA, 25 bp, Homo sapien
caaagagggacgaatgtgggaataa

SEQ ID NO: 1128951 - DNA, 25 bp, Homo sapien
tgatgcagccccaatccctgttgca

SEQ ID NO: 1128952 - DNA, 25 bp, Homo sapien
tggagaatgaggaacccttatatac

SEQ ID NO: 1128953 - DNA, 25 bp, Homo sapien
ttaagggaagatatacaagtgacca

SEQ ID NO: 1128954 - DNA, 25 bp, Homo sapien
cactattggcttatagaaatgcaac

SEQ ID NO: 1128955 - DNA, 25 bp, Homo sapien
cttttcaagattgttcactattggc

SEQ ID NO: 1128956 - DNA, 25 bp, Homo sapien
cagtgtatgtcgagtaacagtggtg

SEQ ID NO: 1128957 - DNA, 25 bp, Homo sapien
tgtatcccacaactactcaacttgt

SEQ ID NO: 1128958 - DNA, 25 bp, Homo sapien
tgagcctcgatgcttcagatggctt

SEQ ID NO: 1128959 - DNA, 25 bp, Homo sapien
agcctcgatgcttcagatggcttca

SEQ ID NO: 1128960 - DNA, 25 bp, Homo sapien
aacctgagcctcgatgcttcagatg

SEQ ID NO: 1128961 - DNA, 25 bp, Homo sapien
cctgagcctcgatgcttcagatggc

SEQ ID NO: 1128962 - DNA, 25 bp, Homo sapien
cattggtccttgtaggcatttgagc

SEQ ID NO: 1128963 - DNA, 25 bp, Homo sapien
attggtccttgtaggcatttgagcc

SEQ ID NO: 1128964 - DNA, 25 bp, Homo sapien
tcattggtccttgtaggcatttgag

SEQ ID NO: 1128965 - DNA, 25 bp, Homo sapien
tgtgtcctcttgcactcgctgttgt

SEQ ID NO: 1128966 - DNA, 25 bp, Homo sapien
cgcatctgttagataggggcatgca

SEQ ID NO: 1128967 - DNA, 25 bp, Homo sapien
tgctgtgtcctcttgcactcgctgt

SEQ ID NO: 1128968 - DNA, 25 bp, Homo sapien
tcctcttgcactcgctgttgttttg

SEQ ID NO: 1128969 - DNA, 25 bp, Homo sapien
aattcaagcgctgcgcgggcggacc

SEQ ID NO: 1128970 - DNA, 25 bp, Homo sapien
gtgctaagctggtcactgcccgcgg

SEQ ID NO: 1128971 - DNA, 25 bp, Homo sapien
acctagtagatcctgtgtgctgagc

SEQ ID NO: 1128972 - DNA, 25 bp, Homo sapien
gggcggaccggcagtgctgagggac

SEQ ID NO: 1128973 - DNA, 25 bp, Homo sapien
caaagataggccagatgtaggaaca

SEQ ID NO: 1128974 - DNA, 25 bp, Homo sapien
catttacaaaccaggagagaggcct

SEQ ID NO: 1128975 - DNA, 25 bp, Homo sapien
gagctgttcattcctcctgtccgga

SEQ ID NO: 1128976 - DNA, 25 bp, Homo sapien
gaacctctgggacgtggcaaagaca

SEQ ID NO: 1128977 - DNA, 25 bp, Homo sapien
ttatcaagtttctgactatacagag

SEQ ID NO: 1128978 - DNA, 25 bp, Homo sapien
gaaaagtttattatcaagtttctga

SEQ ID NO: 1128979 - DNA, 25 bp, Homo sapien
tattatcaagtttctgactatacag

SEQ ID NO: 1128980 - DNA, 25 bp, Homo sapien
tctgactatacagagattcgcagac

SEQ ID NO: 1128981 - DNA, 25 bp, Homo sapien
tggctaagatggaaacagggctgat

SEQ ID NO: 1128982 - DNA, 25 bp, Homo sapien
taggaaataccgatgcctttgtggg

SEQ ID NO: 1128983 - DNA, 25 bp, Homo sapien
gatataagttggtgtggctaagatg

SEQ ID NO: 1128984 - DNA, 25 bp, Homo sapien
ggctgattcttgattcccaattctc

SEQ ID NO: 1128985 - DNA, 25 bp, Homo sapien
tacaccaaaaattgatcaagtacct

SEQ ID NO: 1128986 - DNA, 25 bp, Homo sapien
tcaagtacctattgttgatgtcatg

SEQ ID NO: 1128987 - DNA, 25 bp, Homo sapien
gatgtcatgatcaatgactttggtg

SEQ ID NO: 1128988 - DNA, 25 bp, Homo sapien
cagaatcagaagttcggatttgaag

SEQ ID NO: 1128989 - DNA, 25 bp, Homo sapien
ggaatactgcacttttccgaccggc

SEQ ID NO: 1128990 - DNA, 25 bp, Homo sapien
ccggaatactgcacttttccgaccg

SEQ ID NO: 1128991 - DNA, 25 bp, Homo sapien
gagattatatccggcacctggctca

SEQ ID NO: 1128992 - DNA, 25 bp, Homo sapien
gattatatccggcacctggctcaga

SEQ ID NO: 1128993 - DNA, 25 bp, Homo sapien
cagcaggattacgtggtttcccagg

SEQ ID NO: 1128994 - DNA, 25 bp, Homo sapien
atattctttagggtgatccaggtcc

SEQ ID NO: 1128995 - DNA, 25 bp, Homo sapien
tccaggtcctcaaggtatctcaggg

SEQ ID NO: 1128996 - DNA, 25 bp, Homo sapien
tatctcagggaaagatggaccagca

SEQ ID NO: 1128997 - DNA, 25 bp, Homo sapien
tatctgactctggtttgatgcttat

SEQ ID NO: 1128998 - DNA, 25 bp, Homo sapien
gcctgagccctggactgtgaatttt

SEQ ID NO: 1128999 - DNA, 25 bp, Homo sapien
taataagcccttagctatgtgttgg

SEQ ID NO: 1129000 - DNA, 25 bp, Homo sapien
ggtgaaacgggaaggactcattcta

SEQ ID NO: 1129001 - DNA, 25 bp, Homo sapien
tattttcatgactggtaggctcatt

SEQ ID NO: 1129002 - DNA, 25 bp, Homo sapien
tagccggatgtggtacatatttatc

SEQ ID NO: 1129003 - DNA, 25 bp, Homo sapien
ctgaataacattctactagccggat

SEQ ID NO: 1129004 - DNA, 25 bp, Homo sapien
tcatgactggtaggctcatttcttc

SEQ ID NO: 1129005 - DNA, 25 bp, Homo sapien
ggctctgggatttcaccgtaacaac

SEQ ID NO: 1129006 - DNA, 25 bp, Homo sapien
cttggaaaggacgaagttggtctgc

SEQ ID NO: 1129007 - DNA, 25 bp, Homo sapien
gatttcaccgtaacaaccctcgcat

SEQ ID NO: 1129008 - DNA, 25 bp, Homo sapien
tcgcaatttcgtgggttgagttcac

SEQ ID NO: 1129009 - DNA, 25 bp, Homo sapien
gaagctccttgaaaactccgtgtgc

SEQ ID NO: 1129010 - DNA, 25 bp, Homo sapien
taacagacgggtgcaagtagacaag

SEQ ID NO: 1129011 - DNA, 25 bp, Homo sapien
tcagagtaggcagcgcaatgagtcc

SEQ ID NO: 1129012 - DNA, 25 bp, Homo sapien
caaggataaggttaccgctgccagc

SEQ ID NO: 1129013 - DNA, 25 bp, Homo sapien
acttcagcatcaaatactttgacgc

SEQ ID NO: 1129014 - DNA, 25 bp, Homo sapien
catcaaatactttgacgcttacatg

SEQ ID NO: 1129015 - DNA, 25 bp, Homo sapien
tacatgcttatgcatattgataagc

SEQ ID NO: 1129016 - DNA, 25 bp, Homo sapien
tactttgacgcttacatgcttatgc

SEQ ID NO: 1129017 - DNA, 25 bp, Homo sapien
ccctccaccagcaaacaattgcata

SEQ ID NO: 1129018 - DNA, 25 bp, Homo sapien
agtaagaggatctggaggaggccac

SEQ ID NO: 1129019 - DNA, 25 bp, Homo sapien
cctccaccagcaaacaattgcatat

SEQ ID NO: 1129020 - DNA, 25 bp, Homo sapien
ctccaccagcaaacaattgcatatc

SEQ ID NO: 1129021 - DNA, 25 bp, Homo sapien
aaagttgatgaagatcccatgaaga

SEQ ID NO: 1129022 - DNA, 25 bp, Homo sapien
taaagttgatgaagatcccatgaag

SEQ ID NO: 1129023 - DNA, 25 bp, Homo sapien
aagttgatgaagatcccatgaagat

SEQ ID NO: 1129024 - DNA, 25 bp, Homo sapien
cttaaagttgatgaagatcccatga

SEQ ID NO: 1129025 - DNA, 25 bp, Homo sapien
attcttctgtctacgtccatcactg

SEQ ID NO: 1129026 - DNA, 25 bp, Homo sapien
gtccatcactgtgccttcagggtca

SEQ ID NO: 1129027 - DNA, 25 bp, Homo sapien
tctgtctacgtccatcactgtgcct

SEQ ID NO: 1129028 - DNA, 25 bp, Homo sapien
gaagacattcttctgtctacgtcca

SEQ ID NO: 1129029 - DNA, 25 bp, Homo sapien
ggtctaggcatttgtgttctttctc

SEQ ID NO: 1129030 - DNA, 25 bp, Homo sapien
ctaggcatttgtgttctttctccat

SEQ ID NO: 1129031 - DNA, 25 bp, Homo sapien
tctaggcatttgtgttctttctcca

SEQ ID NO: 1129032 - DNA, 25 bp, Homo sapien
ttggtctaggcatttgtgttctttc

SEQ ID NO: 1129033 - DNA, 25 bp, Homo sapien
agcaggcaagatcatcaggccccat

SEQ ID NO: 1129034 - DNA, 25 bp, Homo sapien
tggggcccattgaggtttgccagca

SEQ ID NO: 1129035 - DNA, 25 bp, Homo sapien
cttgaataccaggatggggcccatt

SEQ ID NO: 1129036 - DNA, 25 bp, Homo sapien
gcccattgaggtttgccagcaggca

SEQ ID NO: 1129037 - DNA, 25 bp, Homo sapien
catgttcttaattgagtgtgtgacg

SEQ ID NO: 1129038 - DNA, 25 bp, Homo sapien
gatcatgttcttaattgagtgtgtg

SEQ ID NO: 1129039 - DNA, 25 bp, Homo sapien
aattgctgatcatgttcttaattga

SEQ ID NO: 1129040 - DNA, 25 bp, Homo sapien
tcttaattgagtgtgtgacggtcat

SEQ ID NO: 1129041 - DNA, 25 bp, Homo sapien
cataaccaaggcaagtaagggtgat

SEQ ID NO: 1129042 - DNA, 25 bp, Homo sapien
ggcagcagcaacctcgttgccacga

SEQ ID NO: 1129043 - DNA, 25 bp, Homo sapien
gattccaacatttggcgaaggcgtg

SEQ ID NO: 1129044 - DNA, 25 bp, Homo sapien
gaaggcgtgggcatgagacataacc

SEQ ID NO: 1129045 - DNA, 25 bp, Homo sapien
tacaatgagcacttagccaacgagg

SEQ ID NO: 1129046 - DNA, 25 bp, Homo sapien
actgtttggtccgtacaatgagcac

SEQ ID NO: 1129047 - DNA, 25 bp, Homo sapien
tcagaaggtgtaagactgtttggtc

SEQ ID NO: 1129048 - DNA, 25 bp, Homo sapien
gagcacttagccaacgagggatcat

SEQ ID NO: 1129049 - DNA, 25 bp, Homo sapien
tgatagtcacttattaaaatctcag

SEQ ID NO: 1129050 - DNA, 25 bp, Homo sapien
ctggatatgatagtcacttattaaa

SEQ ID NO: 1129051 - DNA, 25 bp, Homo sapien
gatatgatagtcacttattaaaatc

SEQ ID NO: 1129052 - DNA, 25 bp, Homo sapien
catctggatatgatagtcacttatt

SEQ ID NO: 1129053 - DNA, 25 bp, Homo sapien
ggcatcagactggaaacaataggcc

SEQ ID NO: 1129054 - DNA, 25 bp, Homo sapien
agtcttcatgactggcagcttcaca

SEQ ID NO: 1129055 - DNA, 25 bp, Homo sapien
aggcatcagactggaaacaataggc

SEQ ID NO: 1129056 - DNA, 25 bp, Homo sapien
gagtcttcatgactggcagcttcac

SEQ ID NO: 1129057 - DNA, 25 bp, Homo sapien
ggctgtctgtcttagccaaaatttt

SEQ ID NO: 1129058 - DNA, 25 bp, Homo sapien
gatgacactagcctttaactggaag

SEQ ID NO: 1129059 - DNA, 25 bp, Homo sapien
cacatgctccggtgtttctatacca

SEQ ID NO: 1129060 - DNA, 25 bp, Homo sapien
ctataccatctttgataaggatgac

SEQ ID NO: 1129061 - DNA, 25 bp, Homo sapien
gattagtacagcatgttcagttatg

SEQ ID NO: 1129062 - DNA, 25 bp, Homo sapien
ttggtttgattagtacagcatgttc

SEQ ID NO: 1129063 - DNA, 25 bp, Homo sapien
ttgattagtacagcatgttcagtta

SEQ ID NO: 1129064 - DNA, 25 bp, Homo sapien
ggtttgattagtacagcatgttcag

SEQ ID NO: 1129065 - DNA, 25 bp, Homo sapien
tttgtgggaaatgatcctcttggca

SEQ ID NO: 1129066 - DNA, 25 bp, Homo sapien
gtttgtgggaaatgatcctcttggc

SEQ ID NO: 1129067 - DNA, 25 bp, Homo sapien
ttgtgggaaatgatcctcttggcaa

SEQ ID NO: 1129068 - DNA, 25 bp, Homo sapien
agtttgtgggaaatgatcctcttgg

SEQ ID NO: 1129069 - DNA, 25 bp, Homo sapien
gctgaagatacatgatgtccagtaa

SEQ ID NO: 1129070 - DNA, 25 bp, Homo sapien
ggaatctacattcaacatttgatac

SEQ ID NO: 1129071 - DNA, 25 bp, Homo sapien
caacatttgatactgcgtgtgactc

SEQ ID NO: 1129072 - DNA, 25 bp, Homo sapien
cgtgtgactcctgatgaacacgctg

SEQ ID NO: 1129073 - DNA, 25 bp, Homo sapien
aacttccatattcctcctagcttaa

SEQ ID NO: 1129074 - DNA, 25 bp, Homo sapien
gaaaactgcactgacagtgagtgga

SEQ ID NO: 1129075 - DNA, 25 bp, Homo sapien
gtgagtggataaatcccatgaactc

SEQ ID NO: 1129076 - DNA, 25 bp, Homo sapien
aactttgggttgattgagaagtcca

SEQ ID NO: 1129077 - DNA, 25 bp, Homo sapien
cttctaagataagcttcctccccac

SEQ ID NO: 1129078 - DNA, 25 bp, Homo sapien
cactttttctccatttctttcattt

SEQ ID NO: 1129079 - DNA, 25 bp, Homo sapien
ccactttttctccatttctttcatt

SEQ ID NO: 1129080 - DNA, 25 bp, Homo sapien
ctaagataagcttcctccccacttt

SEQ ID NO: 1129081 - DNA, 25 bp, Homo sapien
tctggagtatctgagggaaacccaa

SEQ ID NO: 1129082 - DNA, 25 bp, Homo sapien
agaagatattggagctcagagcccc

SEQ ID NO: 1129083 - DNA, 25 bp, Homo sapien
tatatgtgctctggggtattttccg

SEQ ID NO: 1129084 - DNA, 25 bp, Homo sapien
ctgagggaaacccaataacacttct

SEQ ID NO: 1129085 - DNA, 25 bp, Homo sapien
tgagatactccatgaaaatcttttc

SEQ ID NO: 1129086 - DNA, 25 bp, Homo sapien
aatatttgggtcttccatattgata

SEQ ID NO: 1129087 - DNA, 25 bp, Homo sapien
tcaagatgagatactccatgaaaat

SEQ ID NO: 1129088 - DNA, 25 bp, Homo sapien
ttgggtcttccatattgatacccat

SEQ ID NO: 1129089 - DNA, 25 bp, Homo sapien
aatgagaaatgtatggagccgaccc

SEQ ID NO: 1129090 - DNA, 25 bp, Homo sapien
agaatgagaaatgtatggagccgac

SEQ ID NO: 1129091 - DNA, 25 bp, Homo sapien
agaagaatgagaaatgtatggagcc

SEQ ID NO: 1129092 - DNA, 25 bp, Homo sapien
tgagaaatgtatggagccgacccat

SEQ ID NO: 1129093 - DNA, 25 bp, Homo sapien
gtccaagtgtgctttaagtgtattc

SEQ ID NO: 1129094 - DNA, 25 bp, Homo sapien
tgtattcatttgtcgcattttttct

SEQ ID NO: 1129095 - DNA, 25 bp, Homo sapien
cttgtccaagtgtgctttaagtgta

SEQ ID NO: 1129096 - DNA, 25 bp, Homo sapien
gtgtattcatttgtcgcattttttc

SEQ ID NO: 1129097 - DNA, 25 bp, Homo sapien
tcatgatctggtagtgagcaggact

SEQ ID NO: 1129098 - DNA, 25 bp, Homo sapien
gagaagatggcctaagatcagggtc

SEQ ID NO: 1129099 - DNA, 25 bp, Homo sapien
tgaccagtatcttgaaagtagcagg

SEQ ID NO: 1129100 - DNA, 25 bp, Homo sapien
cttcaacactggacttgaaatgacc

SEQ ID NO: 1129101 - DNA, 25 bp, Homo sapien
ccatcatgaatctcctcccttccaa

SEQ ID NO: 1129102 - DNA, 25 bp, Homo sapien
gatgactgacagttggagttccaac

SEQ ID NO: 1129103 - DNA, 25 bp, Homo sapien
cctattaatatgaataggtcttgtt

SEQ ID NO: 1129104 - DNA, 25 bp, Homo sapien
ccaagatgactgacagttggagttc

SEQ ID NO: 1129105 - DNA, 25 bp, Homo sapien
tgtcaccaagttacccccaaatgct

SEQ ID NO: 1129106 - DNA, 25 bp, Homo sapien
tcagaaggcttagtctgcaaaatgg

SEQ ID NO: 1129107 - DNA, 25 bp, Homo sapien
ttctgtatgatttcagaaggcttag

SEQ ID NO: 1129108 - DNA, 25 bp, Homo sapien
gcttagtctgcaaaatggtcttcac

SEQ ID NO: 1129109 - DNA, 25 bp, Homo sapien
cagccaaatcaactgttgggatcag

SEQ ID NO: 1129110 - DNA, 25 bp, Homo sapien
cagctttggaagagacatatatggg

SEQ ID NO: 1129111 - DNA, 25 bp, Homo sapien
aagggagcactgctacacgtatgcc

SEQ ID NO: 1129112 - DNA, 25 bp, Homo sapien
agtcatcctcctcagccgagtgggc

SEQ ID NO: 1129113 - DNA, 25 bp, Homo sapien
tgcgagggttaacacaagttgtcaa

SEQ ID NO: 1129114 - DNA, 25 bp, Homo sapien
caaaaattggcccagagatgtgcga

SEQ ID NO: 1129115 - DNA, 25 bp, Homo sapien
cagggaaagaaggttgacgctcaag

SEQ ID NO: 1129116 - DNA, 25 bp, Homo sapien
ttcagggaaagaaggttgacgctca

SEQ ID NO: 1129117 - DNA, 25 bp, Homo sapien
aaagcggcaacccttcgaagactct

SEQ ID NO: 1129118 - DNA, 25 bp, Homo sapien
agaactgcgccaccgaaaagcggca

SEQ ID NO: 1129119 - DNA, 25 bp, Homo sapien
atgatttaaattccaggggtctccg

SEQ ID NO: 1129120 - DNA, 25 bp, Homo sapien
gaagggcgcggtgctaatgatttaa

SEQ ID NO: 1129121 - DNA, 25 bp, Homo sapien
tattttttccgcctcgcgctaagga

SEQ ID NO: 1129122 - DNA, 25 bp, Homo sapien
gcaaaaacagaaatcgtgggaagaa

SEQ ID NO: 1129123 - DNA, 25 bp, Homo sapien
aatcgcggcatcaacacaagctggg

SEQ ID NO: 1129124 - DNA, 25 bp, Homo sapien
tctggaaaccaggaaataccgagaa

SEQ ID NO: 1129125 - DNA, 25 bp, Homo sapien
tgcatccccttgatatcgcaagcgg

SEQ ID NO: 1129126 - DNA, 25 bp, Homo sapien
tcctcagcagtaagctcagccggca

SEQ ID NO: 1129127 - DNA, 25 bp, Homo sapien
agcgaggaggagctcgtgcatcccc

SEQ ID NO: 1129128 - DNA, 25 bp, Homo sapien
tatcgcaagcggctgctcgggagct

SEQ ID NO: 1129129 - DNA, 25 bp, Homo sapien
taatctgatacacgatgacctgatg

SEQ ID NO: 1129130 - DNA, 25 bp, Homo sapien
taaaactccacttcgcagagcagat

SEQ ID NO: 1129131 - DNA, 25 bp, Homo sapien
tatgactaatccagactcgagccga

SEQ ID NO: 1129132 - DNA, 25 bp, Homo sapien
gacctgatgtacttaaattgagcca

SEQ ID NO: 1129133 - DNA, 25 bp, Homo sapien
tttaaactttcctctatacataaca

SEQ ID NO: 1129134 - DNA, 25 bp, Homo sapien
tagggaatgtggcaaaagctgtatg

SEQ ID NO: 1129135 - DNA, 25 bp, Homo sapien
agggaatgtggcaaaagctgtatgt

SEQ ID NO: 1129136 - DNA, 25 bp, Homo sapien
ttagggaatgtggcaaaagctgtat

SEQ ID NO: 1129137 - DNA, 25 bp, Homo sapien
gggaatgtggcaaaagctgtatgtt

SEQ ID NO: 1129138 - DNA, 25 bp, Homo sapien
gagtcgccctgaatagagataaagc

SEQ ID NO: 1129139 - DNA, 25 bp, Homo sapien
catctcggatcataaggcattagtc

SEQ ID NO: 1129140 - DNA, 25 bp, Homo sapien
tgcggcccaggttctaacaggtggt

SEQ ID NO: 1129141 - DNA, 25 bp, Homo sapien
agtacaagccttaaccagagaccgg

SEQ ID NO: 1129142 - DNA, 25 bp, Homo sapien
ttcagtctagtcacaacagcaaaag

SEQ ID NO: 1129143 - DNA, 25 bp, Homo sapien
taccattgtggtcaaggcaaccatc

SEQ ID NO: 1129144 - DNA, 25 bp, Homo sapien
taatcaccgctaaccactaccattg

SEQ ID NO: 1129145 - DNA, 25 bp, Homo sapien
ggcacagtgtatattgcttgggtga

SEQ ID NO: 1129146 - DNA, 25 bp, Homo sapien
cctataccataaggccatagtcatc

SEQ ID NO: 1129147 - DNA, 25 bp, Homo sapien
agaaatcctgtttgcctataccata

SEQ ID NO: 1129148 - DNA, 25 bp, Homo sapien
catatccaagtcattaagaaatcct

SEQ ID NO: 1129149 - DNA, 25 bp, Homo sapien
tcctgtttgcctataccataaggcc

SEQ ID NO: 1129150 - DNA, 25 bp, Homo sapien
ccaaaaatgattcgttagagaccaa

SEQ ID NO: 1129151 - DNA, 25 bp, Homo sapien
tctgcttatacccaggcagctgaaa

SEQ ID NO: 1129152 - DNA, 25 bp, Homo sapien
tataaaaactaccacaaatctcagg

SEQ ID NO: 1129153 - DNA, 25 bp, Homo sapien
tgtattccgttagcttagcaccttg

SEQ ID NO: 1129154 - DNA, 25 bp, Homo sapien
gctcttttgcaaattcaacgactaa

SEQ ID NO: 1129155 - DNA, 25 bp, Homo sapien
gggagtgaactcgatcttgctcttt

SEQ ID NO: 1129156 - DNA, 25 bp, Homo sapien
caacgactaaagtatgacctaaaag

SEQ ID NO: 1129157 - DNA, 25 bp, Homo sapien
cctaaaagtttcagttgatggagtc

SEQ ID NO: 1129158 - DNA, 25 bp, Homo sapien
ttttttctttatcatcttcgacagg

SEQ ID NO: 1129159 - DNA, 25 bp, Homo sapien
ctttatcatcttcgacagggtcatc

SEQ ID NO: 1129160 - DNA, 25 bp, Homo sapien
ttctttatcatcttcgacagggtca

SEQ ID NO: 1129161 - DNA, 25 bp, Homo sapien
ccatggtttggtgcaattccatttt

SEQ ID NO: 1129162 - DNA, 25 bp, Homo sapien
gcttgccaaggcatttacaatgttt

SEQ ID NO: 1129163 - DNA, 25 bp, Homo sapien
acgcttgccaaggcatttacaatgt

SEQ ID NO: 1129164 - DNA, 25 bp, Homo sapien
atttacaatgtttgctaggattgtg

SEQ ID NO: 1129165 - DNA, 25 bp, Homo sapien
tttacaatgtttgctaggattgtgc

SEQ ID NO: 1129166 - DNA, 25 bp, Homo sapien
tgggaggtcgcgcagtaattggtcc

SEQ ID NO: 1129167 - DNA, 25 bp, Homo sapien
ggaggtcgcgcagtaattggtccaa

SEQ ID NO: 1129168 - DNA, 25 bp, Homo sapien
gaggtcgcgcagtaattggtccaaa

SEQ ID NO: 1129169 - DNA, 25 bp, Homo sapien
gggaggtcgcgcagtaattggtcca

SEQ ID NO: 1129170 - DNA, 25 bp, Homo sapien
gactgtgtagcaatgtcttcatcaa

SEQ ID NO: 1129171 - DNA, 25 bp, Homo sapien
cagactgtgtagcaatgtcttcatc

SEQ ID NO: 1129172 - DNA, 25 bp, Homo sapien
gcagactgtgtagcaatgtcttcat

SEQ ID NO: 1129173 - DNA, 25 bp, Homo sapien
agactgtgtagcaatgtcttcatca

SEQ ID NO: 1129174 - DNA, 25 bp, Homo sapien
ggtgcatgcaatggcatatagtctt

SEQ ID NO: 1129175 - DNA, 25 bp, Homo sapien
catgcaatggcatatagtcttcata

SEQ ID NO: 1129176 - DNA, 25 bp, Homo sapien
gtgggtggaagaggtgcatgcaatg

SEQ ID NO: 1129177 - DNA, 25 bp, Homo sapien
tggaagaggtgcatgcaatggcata

SEQ ID NO: 1129178 - DNA, 25 bp, Homo sapien
ctctgtcggtcctcatcatcagtgc

SEQ ID NO: 1129179 - DNA, 25 bp, Homo sapien
ggctgaagatttgctagttccatta

SEQ ID NO: 1129180 - DNA, 25 bp, Homo sapien
gggctgaagatttgctagttccatt

SEQ ID NO: 1129181 - DNA, 25 bp, Homo sapien
ctgtgtgaaggacacaaaggtgtat

SEQ ID NO: 1129182 - DNA, 25 bp, Homo sapien
gacacaaaggtgtattcaacatatc

SEQ ID NO: 1129183 - DNA, 25 bp, Homo sapien
cacaaaggtgtattcaacatatcct

SEQ ID NO: 1129184 - DNA, 25 bp, Homo sapien
gaaggacacaaaggtgtattcaaca

SEQ ID NO: 1129185 - DNA, 25 bp, Homo sapien
gcatgtcggtagatatatggaattc

SEQ ID NO: 1129186 - DNA, 25 bp, Homo sapien
gctggcatgtcggtagatatatgga

SEQ ID NO: 1129187 - DNA, 25 bp, Homo sapien
atgcagctggcatgtcggtagatat

SEQ ID NO: 1129188 - DNA, 25 bp, Homo sapien
gcagctggcatgtcggtagatatat

SEQ ID NO: 1129189 - DNA, 25 bp, Homo sapien
gcatcaacttcagtagcaggtaaat

SEQ ID NO: 1129190 - DNA, 25 bp, Homo sapien
atgcatcaacttcagtagcaggtaa

SEQ ID NO: 1129191 - DNA, 25 bp, Homo sapien
ttggatgcatcaacttcagtagcag

SEQ ID NO: 1129192 - DNA, 25 bp, Homo sapien
atattggatgcatcaacttcagtag

SEQ ID NO: 1129193 - DNA, 25 bp, Homo sapien
tttccaattcccttctagaaataca

SEQ ID NO: 1129194 - DNA, 25 bp, Homo sapien
gcatctcagacaaaccatggcctaa

SEQ ID NO: 1129195 - DNA, 25 bp, Homo sapien
taaaggtccgttaagatgagtcatg

SEQ ID NO: 1129196 - DNA, 25 bp, Homo sapien
cactgtatggaaaggaacgttccct

SEQ ID NO: 1129197 - DNA, 25 bp, Homo sapien
taactccagacttgtgggacacact

SEQ ID NO: 1129198 - DNA, 25 bp, Homo sapien
tggttcacccggttcataacttctg

SEQ ID NO: 1129199 - DNA, 25 bp, Homo sapien
tctacagtttggttcacccggttca

SEQ ID NO: 1129200 - DNA, 25 bp, Homo sapien
tacagtttggttcacccggttcata

SEQ ID NO: 1129201 - DNA, 25 bp, Homo sapien
tcacccggttcataacttctgaaaa

SEQ ID NO: 1129202 - DNA, 25 bp, Homo sapien
gttgtttcagccacttagccctagg

SEQ ID NO: 1129203 - DNA, 25 bp, Homo sapien
tgtcatgccctgaagcacagtaaga

SEQ ID NO: 1129204 - DNA, 25 bp, Homo sapien
ccaaggaaggtgaaagttcgccagc

SEQ ID NO: 1129205 - DNA, 25 bp, Homo sapien
taccagcagaagctatgggagaggc

SEQ ID NO: 1129206 - DNA, 25 bp, Homo sapien
gtttctgatgaaaagtcaacatatc

SEQ ID NO: 1129207 - DNA, 25 bp, Homo sapien
gtgtttctgatgaaaagtcaacata

SEQ ID NO: 1129208 - DNA, 25 bp, Homo sapien
tctgatgaaaagtcaacatatcttc

SEQ ID NO: 1129209 - DNA, 25 bp, Homo sapien
gatgaaaagtcaacatatcttccaa

SEQ ID NO: 1129210 - DNA, 25 bp, Homo sapien
gactacactatttgataggcacgtc

SEQ ID NO: 1129211 - DNA, 25 bp, Homo sapien
tactattagcaactagaaaaccaaa

SEQ ID NO: 1129212 - DNA, 25 bp, Homo sapien
catgttctgcactaaaattgattct

SEQ ID NO: 1129213 - DNA, 25 bp, Homo sapien
caaagaatgtcagtttcaatgtgaa

SEQ ID NO: 1129214 - DNA, 25 bp, Homo sapien
aagcttgtcctttcatacgaccttc

SEQ ID NO: 1129215 - DNA, 25 bp, Homo sapien
tcctttcatacgaccttctttcatc

SEQ ID NO: 1129216 - DNA, 25 bp, Homo sapien
aaagcacatatccattagcttcctt

SEQ ID NO: 1129217 - DNA, 25 bp, Homo sapien
aaaagcacatatccattagcttcct

SEQ ID NO: 1129218 - DNA, 25 bp, Homo sapien
gtaacgaatgaatatctactgctag

SEQ ID NO: 1129219 - DNA, 25 bp, Homo sapien
tgccaattgtggaaatttctaaagg

SEQ ID NO: 1129220 - DNA, 25 bp, Homo sapien
tatctactgctagaatgccaattgt

SEQ ID NO: 1129221 - DNA, 25 bp, Homo sapien
tgggtttaattgtaacgaatgaata

SEQ ID NO: 1129222 - DNA, 25 bp, Homo sapien
caaaaactttctagtgtatggtggg

SEQ ID NO: 1129223 - DNA, 25 bp, Homo sapien
cattgactactaaaagcaagatggt

SEQ ID NO: 1129224 - DNA, 25 bp, Homo sapien
tttctagtttgcaaactgcattgac

SEQ ID NO: 1129225 - DNA, 25 bp, Homo sapien
gcaagatggttaatcaatgatatac

SEQ ID NO: 1129226 - DNA, 25 bp, Homo sapien
cttccttaggatcttgttttggtct

SEQ ID NO: 1129227 - DNA, 25 bp, Homo sapien
ttggtctagcagatcgagcaaactg

SEQ ID NO: 1129228 - DNA, 25 bp, Homo sapien
taggatcttgttttggtctagcaga

SEQ ID NO: 1129229 - DNA, 25 bp, Homo sapien
tcttgttttggtctagcagatcgag

SEQ ID NO: 1129230 - DNA, 25 bp, Homo sapien
caagggtgaccgacctgtcttggct

SEQ ID NO: 1129231 - DNA, 25 bp, Homo sapien
taatgggacttaactgcacagatag

SEQ ID NO: 1129232 - DNA, 25 bp, Homo sapien
tattcaagccatctcagaaggacta

SEQ ID NO: 1129233 - DNA, 25 bp, Homo sapien
ggtctctggataagatgcctcatca

SEQ ID NO: 1129234 - DNA, 25 bp, Homo sapien
catgacagtattacagcagtattta

SEQ ID NO: 1129235 - DNA, 25 bp, Homo sapien
tacagcagtatttacgcaggaatgc

SEQ ID NO: 1129236 - DNA, 25 bp, Homo sapien
cagcagtatttacgcaggaatgctt

SEQ ID NO: 1129237 - DNA, 25 bp, Homo sapien
tacactttgcatgacagtattacag

SEQ ID NO: 1129238 - DNA, 25 bp, Homo sapien
taaaggacagcacagaaaattcaac

SEQ ID NO: 1129239 - DNA, 25 bp, Homo sapien
caacaggtgggggaaggacaaacat

SEQ ID NO: 1129240 - DNA, 25 bp, Homo sapien
aagtattccttaacctggatcaaca

SEQ ID NO: 1129241 - DNA, 25 bp, Homo sapien
tccttaacctggatcaacaggtggg

SEQ ID NO: 1129242 - DNA, 25 bp, Homo sapien
tattctgggttaaagtaaatgaaca

SEQ ID NO: 1129243 - DNA, 25 bp, Homo sapien
tgtattctgggttaaagtaaatgaa

SEQ ID NO: 1129244 - DNA, 25 bp, Homo sapien
ttctctaagtaagttgacctgattc

SEQ ID NO: 1129245 - DNA, 25 bp, Homo sapien
tatattacacaacagaaagcatatg

SEQ ID NO: 1129246 - DNA, 25 bp, Homo sapien
atatattacacaacagaaagcatat

SEQ ID NO: 1129247 - DNA, 25 bp, Homo sapien
atattacacaacagaaagcatatgt

SEQ ID NO: 1129248 - DNA, 25 bp, Homo sapien
tcactaagacttcagatgagaggtc

SEQ ID NO: 1129249 - DNA, 25 bp, Homo sapien
gattacggtcatcaaccagtctgga

SEQ ID NO: 1129250 - DNA, 25 bp, Homo sapien
caaagcagtgtctaaactggtcagt

SEQ ID NO: 1129251 - DNA, 25 bp, Homo sapien
tctcccatctcggacttgcaaagtg

SEQ ID NO: 1129252 - DNA, 25 bp, Homo sapien
aaaaataactaagagctgaaccatt

SEQ ID NO: 1129253 - DNA, 25 bp, Homo sapien
taactaagagctgaaccatttatat

SEQ ID NO: 1129254 - DNA, 25 bp, Homo sapien
agagctgaaccatttatatttagaa

SEQ ID NO: 1129255 - DNA, 25 bp, Homo sapien
taagagctgaaccatttatatttag

SEQ ID NO: 1129256 - DNA, 25 bp, Homo sapien
cacttgaaggacacgggattcaaaa

SEQ ID NO: 1129257 - DNA, 25 bp, Homo sapien
agcacttgaaggacacgggattcaa

SEQ ID NO: 1129258 - DNA, 25 bp, Homo sapien
gcacttgaaggacacgggattcaaa

SEQ ID NO: 1129259 - DNA, 25 bp, Homo sapien
tttaaatacactttcaaagctgtta

SEQ ID NO: 1129260 - DNA, 25 bp, Homo sapien
tattatatttgaggaaaatcattaa

SEQ ID NO: 1129261 - DNA, 25 bp, Homo sapien
attcactgatttaaaggcatataga

SEQ ID NO: 1129262 - DNA, 25 bp, Homo sapien
aatttattatatttgaggaaaatca

SEQ ID NO: 1129263 - DNA, 25 bp, Homo sapien
cactgatttaaaggcatatagattt

SEQ ID NO: 1129264 - DNA, 25 bp, Homo sapien
cagtgatagcacctatgctgaactc

SEQ ID NO: 1129265 - DNA, 25 bp, Homo sapien
cactgtcttattcacctagggaaat

SEQ ID NO: 1129266 - DNA, 25 bp, Homo sapien
aaataaaccacagattgcctaagag

SEQ ID NO: 1129267 - DNA, 25 bp, Homo sapien
gaactccaatgcatcttcaaccaca

SEQ ID NO: 1129268 - DNA, 25 bp, Homo sapien
cttagtatactatacttagtactat

SEQ ID NO: 1129269 - DNA, 25 bp, Homo sapien
atacttagtatactatacttagtac

SEQ ID NO: 1129270 - DNA, 25 bp, Homo sapien
acttagtatactatacttagtacta

SEQ ID NO: 1129271 - DNA, 25 bp, Homo sapien
tacttagtatactatacttagtact

SEQ ID NO: 1129272 - DNA, 25 bp, Homo sapien
tgctttagcaatcgggaactcccca

SEQ ID NO: 1129273 - DNA, 25 bp, Homo sapien
tatttagaacccaaagtctggacca

SEQ ID NO: 1129274 - DNA, 25 bp, Homo sapien
tatttcatttgcagggcggatcact

SEQ ID NO: 1129275 - DNA, 25 bp, Homo sapien
tcaactaggatcaacaaaggcactc

SEQ ID NO: 1129276 - DNA, 25 bp, Homo sapien
caatatgtggccctagagtcctact

SEQ ID NO: 1129277 - DNA, 25 bp, Homo sapien
tctgaactccagtattacaacaggt

SEQ ID NO: 1129278 - DNA, 25 bp, Homo sapien
tacaacaggttgatcaccacactcc

SEQ ID NO: 1129279 - DNA, 25 bp, Homo sapien
tgtttcctaagcaaaccactgtctt

SEQ ID NO: 1129280 - DNA, 25 bp, Homo sapien
gataatatcctgacgacaaagcaat

SEQ ID NO: 1129281 - DNA, 25 bp, Homo sapien
taacggttactatcatgtgccaaat

SEQ ID NO: 1129282 - DNA, 25 bp, Homo sapien
gagttatccttagagaagctattca

SEQ ID NO: 1129283 - DNA, 25 bp, Homo sapien
gaaacggctctagtgtaaactcagt

SEQ ID NO: 1129284 - DNA, 25 bp, Homo sapien
gcttattcgcttaggatttctggca

SEQ ID NO: 1129285 - DNA, 25 bp, Homo sapien
caatgcatttggaatgttggtaaaa

SEQ ID NO: 1129286 - DNA, 25 bp, Homo sapien
tgaactctgttcttgtaatagcaaa

SEQ ID NO: 1129287 - DNA, 25 bp, Homo sapien
caacaatgccagatcaatgaactct

SEQ ID NO: 1129288 - DNA, 25 bp, Homo sapien
gaacatatacccctggaatagaggg

SEQ ID NO: 1129289 - DNA, 25 bp, Homo sapien
gactgcaaaaggcttggtactatct

SEQ ID NO: 1129290 - DNA, 25 bp, Homo sapien
ttaaagaaggatagttgcatctgta

SEQ ID NO: 1129291 - DNA, 25 bp, Homo sapien
taaacaatgtaactatctgcatagc

SEQ ID NO: 1129292 - DNA, 25 bp, Homo sapien
gatcacttgaagtctagttgtccct

SEQ ID NO: 1129293 - DNA, 25 bp, Homo sapien
caacaacgtgagttgactcgccagc

SEQ ID NO: 1129294 - DNA, 25 bp, Homo sapien
aatagtagttgagtgatgtgccagg

SEQ ID NO: 1129295 - DNA, 25 bp, Homo sapien
tgtccctagtcattccaacaacgtg

SEQ ID NO: 1129296 - DNA, 25 bp, Homo sapien
actcatgtgcttaatatagtgcata

SEQ ID NO: 1129297 - DNA, 25 bp, Homo sapien
gcccatgaattggagaaactaactt

SEQ ID NO: 1129298 - DNA, 25 bp, Homo sapien
aacgtttaaaatctcaaagcccatg

SEQ ID NO: 1129299 - DNA, 25 bp, Homo sapien
tgcatatagtagtaggattggtggt

SEQ ID NO: 1129300 - DNA, 25 bp, Homo sapien
ctgggggttgtcgtccccagcaaag

SEQ ID NO: 1129301 - DNA, 25 bp, Homo sapien
acatggctgggggttgtcgtcccca

SEQ ID NO: 1129302 - DNA, 25 bp, Homo sapien
ttgtcaatcaccagtacggcaatct

SEQ ID NO: 1129303 - DNA, 25 bp, Homo sapien
tcaccagtacggcaatctcttcttc

SEQ ID NO: 1129304 - DNA, 25 bp, Homo sapien
caggatactgtgcttgctctcagcc

SEQ ID NO: 1129305 - DNA, 25 bp, Homo sapien
gatactgtgcttgctctcagccatg

SEQ ID NO: 1129306 - DNA, 25 bp, Homo sapien
tactgtgcttgctctcagccatgta

SEQ ID NO: 1129307 - DNA, 25 bp, Homo sapien
ggtcaggatactgtgcttgctctca

SEQ ID NO: 1129308 - DNA, 25 bp, Homo sapien
catcccagttggtcatgataccatg

SEQ ID NO: 1129309 - DNA, 25 bp, Homo sapien
gtcatcccagttggtcatgatacca

SEQ ID NO: 1129310 - DNA, 25 bp, Homo sapien
tctatgtcatcccagttggtcatga

SEQ ID NO: 1129311 - DNA, 25 bp, Homo sapien
cttctctatgtcatcccagttggtc

SEQ ID NO: 1129312 - DNA, 25 bp, Homo sapien
tgcagtcccttgtagaaggtgtgat

SEQ ID NO: 1129313 - DNA, 25 bp, Homo sapien
gccatgtgcagtcccttgtagaagg

SEQ ID NO: 1129314 - DNA, 25 bp, Homo sapien
agtcccttgtagaaggtgtgatgcc

SEQ ID NO: 1129315 - DNA, 25 bp, Homo sapien
aaggccatgtgcagtcccttgtaga

SEQ ID NO: 1129316 - DNA, 25 bp, Homo sapien
tctctgttggccttgaggttcaggg

SEQ ID NO: 1129317 - DNA, 25 bp, Homo sapien
gccagggtgttgaaggtatcaaaca

SEQ ID NO: 1129318 - DNA, 25 bp, Homo sapien
atggccagggtgttgaaggtatcaa

SEQ ID NO: 1129319 - DNA, 25 bp, Homo sapien
tgttggccttgaggttcagggggtc

SEQ ID NO: 1129320 - DNA, 25 bp, Homo sapien
cagtgtgcaaccacaggtgtagagg

SEQ ID NO: 1129321 - DNA, 25 bp, Homo sapien
atgccagtgtgcaaccacaggtgta

SEQ ID NO: 1129322 - DNA, 25 bp, Homo sapien
gccagtgtgcaaccacaggtgtaga

SEQ ID NO: 1129323 - DNA, 25 bp, Homo sapien
caatgccagtgtgcaaccacaggtg

SEQ ID NO: 1129324 - DNA, 25 bp, Homo sapien
gctgaagctatagccaaccttggta

SEQ ID NO: 1129325 - DNA, 25 bp, Homo sapien
agtggtgctgaagctatagccaacc

SEQ ID NO: 1129326 - DNA, 25 bp, Homo sapien
acagtttctccttgacgtagtgtct

SEQ ID NO: 1129327 - DNA, 25 bp, Homo sapien
tgatctcccgctcggcagtggtgct

SEQ ID NO: 1129328 - DNA, 25 bp, Homo sapien
actgcaacctcattgccgatggtga

SEQ ID NO: 1129329 - DNA, 25 bp, Homo sapien
ctgcaacctcattgccgatggtgat

SEQ ID NO: 1129330 - DNA, 25 bp, Homo sapien
atggtctgggtggatgccacaagat

SEQ ID NO: 1129331 - DNA, 25 bp, Homo sapien
tggagttgaagatggtctgggtgga

SEQ ID NO: 1129332 - DNA, 25 bp, Homo sapien
tgaagatggtctgggtggatgccac

SEQ ID NO: 1129333 - DNA, 25 bp, Homo sapien
gatggagttgaagatggtctgggtg

SEQ ID NO: 1129334 - DNA, 25 bp, Homo sapien
gatgcctgggtacatgttgccacca

SEQ ID NO: 1129335 - DNA, 25 bp, Homo sapien
tgatgcctgggtacatgttgccacc

SEQ ID NO: 1129336 - DNA, 25 bp, Homo sapien
atgcctgggtacatgttgccaccag

SEQ ID NO: 1129337 - DNA, 25 bp, Homo sapien
ggcaaactgtttactcataatctga

SEQ ID NO: 1129338 - DNA, 25 bp, Homo sapien
ttaaggagcccttaccagcctgtag

SEQ ID NO: 1129339 - DNA, 25 bp, Homo sapien
ccatggtgttctggcagacaacaga

SEQ ID NO: 1129340 - DNA, 25 bp, Homo sapien
gaagcaattgctagccatctgctca

SEQ ID NO: 1129341 - DNA, 25 bp, Homo sapien
tttgctttgaagttgtcagtgtcct

SEQ ID NO: 1129342 - DNA, 25 bp, Homo sapien
cctccaaatcccttgggagctaaat

SEQ ID NO: 1129343 - DNA, 25 bp, Homo sapien
gctaaatatcgctcacattcaagag

SEQ ID NO: 1129344 - DNA, 25 bp, Homo sapien
cgccattcaaacagatgaacaatag

SEQ ID NO: 1129345 - DNA, 25 bp, Homo sapien
tcaagagcaatatcaacccatcgcc

SEQ ID NO: 1129346 - DNA, 25 bp, Homo sapien
ctgaaagggttgtgaattgcaacat

SEQ ID NO: 1129347 - DNA, 25 bp, Homo sapien
aagggttgtgaattgcaacattttc

SEQ ID NO: 1129348 - DNA, 25 bp, Homo sapien
gaaagggttgtgaattgcaacattt

SEQ ID NO: 1129349 - DNA, 25 bp, Homo sapien
caacattttcatttggtggagagac

SEQ ID NO: 1129350 - DNA, 25 bp, Homo sapien
atttatagctaactggttggtatct

SEQ ID NO: 1129351 - DNA, 25 bp, Homo sapien
tctagtcaccatgtttctaaattca

SEQ ID NO: 1129352 - DNA, 25 bp, Homo sapien
gctaactggttggtatctttcccac

SEQ ID NO: 1129353 - DNA, 25 bp, Homo sapien
ccagatcttgtgcataatttatagc

SEQ ID NO: 1129354 - DNA, 25 bp, Homo sapien
tctttggtagatagagagcacatac

SEQ ID NO: 1129355 - DNA, 25 bp, Homo sapien
cccaggaattatggatggagataca

SEQ ID NO: 1129356 - DNA, 25 bp, Homo sapien
cattaaatagagaagctagctagtc

SEQ ID NO: 1129357 - DNA, 25 bp, Homo sapien
tagctagtcaccacgaaaaacccag

SEQ ID NO: 1129358 - DNA, 25 bp, Homo sapien
gattaattacagcatccacataaat

SEQ ID NO: 1129359 - DNA, 25 bp, Homo sapien
aattacagcatccacataaatacga

SEQ ID NO: 1129360 - DNA, 25 bp, Homo sapien
ttacagcatccacataaatacgaac

SEQ ID NO: 1129361 - DNA, 25 bp, Homo sapien
atatgattaattacagcatccacat

SEQ ID NO: 1129362 - DNA, 25 bp, Homo sapien
gtagttctcgatatctccacttcca

SEQ ID NO: 1129363 - DNA, 25 bp, Homo sapien
gactgctggaaagtccctacttcca

SEQ ID NO: 1129364 - DNA, 25 bp, Homo sapien
ggtactgcttgttcctgcactcaca

SEQ ID NO: 1129365 - DNA, 25 bp, Homo sapien
cattaaaatcccatccagaatatgg

SEQ ID NO: 1129366 - DNA, 25 bp, Homo sapien
ttggaacgcacataatctttctcca

SEQ ID NO: 1129367 - DNA, 25 bp, Homo sapien
tcttggaacgcacataatctttctc

SEQ ID NO: 1129368 - DNA, 25 bp, Homo sapien
cttggaacgcacataatctttctcc

SEQ ID NO: 1129369 - DNA, 25 bp, Homo sapien
atcttggaacgcacataatctttct

SEQ ID NO: 1129370 - DNA, 25 bp, Homo sapien
aactgtgccgagttttgcaccatac

SEQ ID NO: 1129371 - DNA, 25 bp, Homo sapien
attccacttgcgaataactgtgccg

SEQ ID NO: 1129372 - DNA, 25 bp, Homo sapien
gttttgcaccatacttgaattctgt

SEQ ID NO: 1129373 - DNA, 25 bp, Homo sapien
tacttgaattctgtcacccggccat

SEQ ID NO: 1129374 - DNA, 25 bp, Homo sapien
tacttagacggaaactcctaggata

SEQ ID NO: 1129375 - DNA, 25 bp, Homo sapien
cattttacggaatgtcaaactaggt

SEQ ID NO: 1129376 - DNA, 25 bp, Homo sapien
tgtagtctatattcgtatatacaag

SEQ ID NO: 1129377 - DNA, 25 bp, Homo sapien
gttcctaggcatactcacttgtgat

SEQ ID NO: 1129378 - DNA, 25 bp, Homo sapien
ccatgtcctcgttgattgtcatggt

SEQ ID NO: 1129379 - DNA, 25 bp, Homo sapien
gattgtcatggttatccacaaagac

SEQ ID NO: 1129380 - DNA, 25 bp, Homo sapien
atgtcctcgttgattgtcatggtta

SEQ ID NO: 1129381 - DNA, 25 bp, Homo sapien
tgtcatggttatccacaaagacaag

SEQ ID NO: 1129382 - DNA, 25 bp, Homo sapien
tcattaccatcattaaaagatgtgt

SEQ ID NO: 1129383 - DNA, 25 bp, Homo sapien
agaatatcagaatatcattaccatc

SEQ ID NO: 1129384 - DNA, 25 bp, Homo sapien
taattatattatcacagaatatcag

SEQ ID NO: 1129385 - DNA, 25 bp, Homo sapien
cacagaatatcagaatatcattacc

SEQ ID NO: 1129386 - DNA, 25 bp, Homo sapien
tcttggccaacggtagcttgacatt

SEQ ID NO: 1129387 - DNA, 25 bp, Homo sapien
caacggtagcttgacattactcgtg

SEQ ID NO: 1129388 - DNA, 25 bp, Homo sapien
ggtagcttgacattactcgtgtaaa

SEQ ID NO: 1129389 - DNA, 25 bp, Homo sapien
gatgagcaagcataaatccaactgc

SEQ ID NO: 1129390 - DNA, 25 bp, Homo sapien
tatcatatgtctgaaaaggcttgca

SEQ ID NO: 1129391 - DNA, 25 bp, Homo sapien
gcattactaaaatcgcagccctata

SEQ ID NO: 1129392 - DNA, 25 bp, Homo sapien
tttaatccctgtgcctagctcttat

SEQ ID NO: 1129393 - DNA, 25 bp, Homo sapien
tgttcttactgtgggcagatgatgt

SEQ ID NO: 1129394 - DNA, 25 bp, Homo sapien
aatgccttgaacgtgacatgtgctc

SEQ ID NO: 1129395 - DNA, 25 bp, Homo sapien
aatactctgtgacccttaacatcag

SEQ ID NO: 1129396 - DNA, 25 bp, Homo sapien
aaagctagctagatatctgtgtgac

SEQ ID NO: 1129397 - DNA, 25 bp, Homo sapien
gtttttagcatgcagcagtcctgga

SEQ ID NO: 1129398 - DNA, 25 bp, Homo sapien
gtgaaaagccaaattttaacataca

SEQ ID NO: 1129399 - DNA, 25 bp, Homo sapien
taacatacatatatttacctcttcc

SEQ ID NO: 1129400 - DNA, 25 bp, Homo sapien
gaaaagccaaattttaacatacata

SEQ ID NO: 1129401 - DNA, 25 bp, Homo sapien
tacatatatttacctcttccttctc

SEQ ID NO: 1129402 - DNA, 25 bp, Homo sapien
tatttggcgccatcgatgttcacag

SEQ ID NO: 1129403 - DNA, 25 bp, Homo sapien
tgccacaagtagtgtctggattaat

SEQ ID NO: 1129404 - DNA, 25 bp, Homo sapien
ggtggcccaacccaatcattaacat

SEQ ID NO: 1129405 - DNA, 25 bp, Homo sapien
cgatgttcacagacccagtcattgc

SEQ ID NO: 1129406 - DNA, 25 bp, Homo sapien
taccatataaaacgttgatattctt

SEQ ID NO: 1129407 - DNA, 25 bp, Homo sapien
aatgcaatggaaagtttactattag

SEQ ID NO: 1129408 - DNA, 25 bp, Homo sapien
caataccatataaaacgttgatatt

SEQ ID NO: 1129409 - DNA, 25 bp, Homo sapien
aaagtttactattagaggacatgtc

SEQ ID NO: 1129410 - DNA, 25 bp, Homo sapien
ggttgctcccattatcataccagtt

SEQ ID NO: 1129411 - DNA, 25 bp, Homo sapien
cataccagtttgtaaaaggctggcc

SEQ ID NO: 1129412 - DNA, 25 bp, Homo sapien
gctggccatccactacattgcggaa

SEQ ID NO: 1129413 - DNA, 25 bp, Homo sapien
tacattgcggaaattaaccatgttc

SEQ ID NO: 1129414 - DNA, 25 bp, Homo sapien
tgacatcacagtatgtgccagcagg

SEQ ID NO: 1129415 - DNA, 25 bp, Homo sapien
atgacatcacagtatgtgccagcag

SEQ ID NO: 1129416 - DNA, 25 bp, Homo sapien
gacatcacagtatgtgccagcagga

SEQ ID NO: 1129417 - DNA, 25 bp, Homo sapien
aattttatctccagaaatgacatca

SEQ ID NO: 1129418 - DNA, 25 bp, Homo sapien
gattcagcatgaattgcaataaatg

SEQ ID NO: 1129419 - DNA, 25 bp, Homo sapien
agattcagcatgaattgcaataaat

SEQ ID NO: 1129420 - DNA, 25 bp, Homo sapien
cagcatgaattgcaataaatggatc

SEQ ID NO: 1129421 - DNA, 25 bp, Homo sapien
ttcagcatgaattgcaataaatgga

SEQ ID NO: 1129422 - DNA, 25 bp, Homo sapien
ttgaggatatgcatttaattttaaa

SEQ ID NO: 1129423 - DNA, 25 bp, Homo sapien
tgaggatatgcatttaattttaaat

SEQ ID NO: 1129424 - DNA, 25 bp, Homo sapien
gaggatatgcatttaattttaaatt

SEQ ID NO: 1129425 - DNA, 25 bp, Homo sapien
tcttccatcctaggttcagtgtctg

SEQ ID NO: 1129426 - DNA, 25 bp, Homo sapien
gcctctggagcaagtgggatgccct

SEQ ID NO: 1129427 - DNA, 25 bp, Homo sapien
catggttgcctaagccataggaaag

SEQ ID NO: 1129428 - DNA, 25 bp, Homo sapien
tctgggaccctacaaattaaactga

SEQ ID NO: 1129429 - DNA, 25 bp, Homo sapien
gacgtatcaactgaggtcgagagtt

SEQ ID NO: 1129430 - DNA, 25 bp, Homo sapien
gaaaccccatctcaggatcccttga

SEQ ID NO: 1129431 - DNA, 25 bp, Homo sapien
gaccagcctgattaacacgaagaaa

SEQ ID NO: 1129432 - DNA, 25 bp, Homo sapien
gagcctgaggcagacgtatcaactg

SEQ ID NO: 1129433 - DNA, 25 bp, Homo sapien
tattatatctgaggaaagtcattac

SEQ ID NO: 1129434 - DNA, 25 bp, Homo sapien
tactgatttaaaggcgtatggattt

SEQ ID NO: 1129435 - DNA, 25 bp, Homo sapien
taaatacactttcaaagctgttatg

SEQ ID NO: 1129436 - DNA, 25 bp, Homo sapien
tatctgaggaaagtcattacaatac

SEQ ID NO: 1129437 - DNA, 25 bp, Homo sapien
tcctaaaacttatactcactaagta

SEQ ID NO: 1129438 - DNA, 25 bp, Homo sapien
tactcactaagtactatatacttag

SEQ ID NO: 1129439 - DNA, 25 bp, Homo sapien
cttatactcactaagtactatatac

SEQ ID NO: 1129440 - DNA, 25 bp, Homo sapien
taaaacttatactcactaagtacta

SEQ ID NO: 1129441 - DNA, 25 bp, Homo sapien
ttttagccatgaagtgaccaagcca

SEQ ID NO: 1129442 - DNA, 25 bp, Homo sapien
aagtgaccaagccacgtgtagtaaa

SEQ ID NO: 1129443 - DNA, 25 bp, Homo sapien
gtgaccaagccacgtgtagtaaaga

SEQ ID NO: 1129444 - DNA, 25 bp, Homo sapien
atgaagtgaccaagccacgtgtagt

SEQ ID NO: 1129445 - DNA, 25 bp, Homo sapien
agccagactggtcttccacaagcat

SEQ ID NO: 1129446 - DNA, 25 bp, Homo sapien
cgagccagactggtcttccacaagc

SEQ ID NO: 1129447 - DNA, 25 bp, Homo sapien
gagccagactggtcttccacaagca

SEQ ID NO: 1129448 - DNA, 25 bp, Homo sapien
gttctcacataacagtagaaaacca

SEQ ID NO: 1129449 - DNA, 25 bp, Homo sapien
agaaaaccaaaatttgttgtcatct

SEQ ID NO: 1129450 - DNA, 25 bp, Homo sapien
gaaaaccaaaatttgttgtcatctc

SEQ ID NO: 1129451 - DNA, 25 bp, Homo sapien
ctcacataacagtagaaaaccaaaa

SEQ ID NO: 1129452 - DNA, 25 bp, Homo sapien
tttgctttgaagttgtcagtgtcct

SEQ ID NO: 1129453 - DNA, 25 bp, Homo sapien
tgaaaagcaacagaaagaacttcat

SEQ ID NO: 1129454 - DNA, 25 bp, Homo sapien
ctgagcccagcagaacccaatggtg

SEQ ID NO: 1129455 - DNA, 25 bp, Homo sapien
ggtgaaaagcaacagaaagaacttc

SEQ ID NO: 1129456 - DNA, 25 bp, Homo sapien
agcccagcagaacccaatggtgaaa

SEQ ID NO: 1129457 - DNA, 25 bp, Homo sapien
tcaagagcaatatcaacccatcgcc

SEQ ID NO: 1129458 - DNA, 25 bp, Homo sapien
cgccattcaaacagatgaacaatag

SEQ ID NO: 1129459 - DNA, 25 bp, Homo sapien
gcaatatcaacccatcgccattcaa

SEQ ID NO: 1129460 - DNA, 25 bp, Homo sapien
gctaaatatcgctcacattcaagag

SEQ ID NO: 1129461 - DNA, 25 bp, Homo sapien
ccagatcttgtgcataatttatagc

SEQ ID NO: 1129462 - DNA, 25 bp, Homo sapien
tctagtcaccatgtttctaaattca

SEQ ID NO: 1129463 - DNA, 25 bp, Homo sapien
atttatagctaactggttggtatct

SEQ ID NO: 1129464 - DNA, 25 bp, Homo sapien
gctaactggttggtatctttcccac

SEQ ID NO: 1129465 - DNA, 25 bp, Homo sapien
gtagttctcgatatctccacttcca

SEQ ID NO: 1129466 - DNA, 25 bp, Homo sapien
gactgctggaaagtccctacttcca

SEQ ID NO: 1129467 - DNA, 25 bp, Homo sapien
ctgagtagcatcattgtagttctcg

SEQ ID NO: 1129468 - DNA, 25 bp, Homo sapien
gtactgcttgttcctgcactcacag

SEQ ID NO: 1129469 - DNA, 25 bp, Homo sapien
tatattcggcaatcttagaacgcac

SEQ ID NO: 1129470 - DNA, 25 bp, Homo sapien
caaaattgcctttatgtctccaggc

SEQ ID NO: 1129471 - DNA, 25 bp, Homo sapien
gtttagattatgcagtttgtccaaa

SEQ ID NO: 1129472 - DNA, 25 bp, Homo sapien
caccaatgtcaatgagatggttcat

SEQ ID NO: 1129473 - DNA, 25 bp, Homo sapien
tgataaagtataggctacaatattg

SEQ ID NO: 1129474 - DNA, 25 bp, Homo sapien
ttcttattcctattatctcaacagg

SEQ ID NO: 1129475 - DNA, 25 bp, Homo sapien
caataacattttgtgtaaggacttt

SEQ ID NO: 1129476 - DNA, 25 bp, Homo sapien
tgtttgttacacgaaatgtgcaaaa

SEQ ID NO: 1129477 - DNA, 25 bp, Homo sapien
gccgagttttgcaccatacttgaat

SEQ ID NO: 1129478 - DNA, 25 bp, Homo sapien
tacttgaattctgtcacccggccat

SEQ ID NO: 1129479 - DNA, 25 bp, Homo sapien
tccacttgcgaataactgtgccgag

SEQ ID NO: 1129480 - DNA, 25 bp, Homo sapien
cccggccattaccaaagtagtcact

SEQ ID NO: 1129481 - DNA, 25 bp, Homo sapien
ccagaagataagtcacactgaggta

SEQ ID NO: 1129482 - DNA, 25 bp, Homo sapien
cacactgaggtagtatgactaatag

SEQ ID NO: 1129483 - DNA, 25 bp, Homo sapien
atgtttagcgttcctagacatattg

SEQ ID NO: 1129484 - DNA, 25 bp, Homo sapien
gatccatgaaatacttcagggaaaa

SEQ ID NO: 1129485 - DNA, 25 bp, Homo sapien
gaaaaataagatatacgttgatgta

SEQ ID NO: 1129486 - DNA, 25 bp, Homo sapien
catttcacaacagtttgagagtaac

SEQ ID NO: 1129487 - DNA, 25 bp, Homo sapien
tatacgttgatgtatcatttcacaa

SEQ ID NO: 1129488 - DNA, 25 bp, Homo sapien
taacttaactgtgcatctctctctg

SEQ ID NO: 1129489 - DNA, 25 bp, Homo sapien
tcatggttatccacaaagacaagcg

SEQ ID NO: 1129490 - DNA, 25 bp, Homo sapien
caaagacaagcgctctgtcagaagg

SEQ ID NO: 1129491 - DNA, 25 bp, Homo sapien
gattgtcatggttatccacaaagac

SEQ ID NO: 1129492 - DNA, 25 bp, Homo sapien
ccatgtcctcgttgattgtcatggt

SEQ ID NO: 1129493 - DNA, 25 bp, Homo sapien
tcttggccaacggtagcttgacatt

SEQ ID NO: 1129494 - DNA, 25 bp, Homo sapien
gatgagcaagcataaatccaactgc

SEQ ID NO: 1129495 - DNA, 25 bp, Homo sapien
gccaacggtagcttgacattactcg

SEQ ID NO: 1129496 - DNA, 25 bp, Homo sapien
agcttgacattactcgtgtaaatcc

SEQ ID NO: 1129497 - DNA, 25 bp, Homo sapien
cagaaaaggatatattgaacaactc

SEQ ID NO: 1129498 - DNA, 25 bp, Homo sapien
tcttcagaaaaggatatattgaaca

SEQ ID NO: 1129499 - DNA, 25 bp, Homo sapien
tatattgaacaactccaaaacttac

SEQ ID NO: 1129500 - DNA, 25 bp, Homo sapien
aggatatattgaacaactccaaaac

SEQ ID NO: 1129501 - DNA, 25 bp, Homo sapien
taaattgctatacaaagtgcggact

SEQ ID NO: 1129502 - DNA, 25 bp, Homo sapien
cactacgggcagatgatgttttaag

SEQ ID NO: 1129503 - DNA, 25 bp, Homo sapien
tccgtgtgactcataggaaggagga

SEQ ID NO: 1129504 - DNA, 25 bp, Homo sapien
aaagctagctagatatccgtgtgac

SEQ ID NO: 1129505 - DNA, 25 bp, Homo sapien
caatcctgttacttgtgtctctgca

SEQ ID NO: 1129506 - DNA, 25 bp, Homo sapien
caaacccaaccaatcctgttacttg

SEQ ID NO: 1129507 - DNA, 25 bp, Homo sapien
gttacttgtgtctctgcattcagtg

SEQ ID NO: 1129508 - DNA, 25 bp, Homo sapien
gtgtctctgcattcagtgactttat

SEQ ID NO: 1129509 - DNA, 25 bp, Homo sapien
cgatgttcacagacccagtcattgc

SEQ ID NO: 1129510 - DNA, 25 bp, Homo sapien
ggtggcccaacccaatcattaacat

SEQ ID NO: 1129511 - DNA, 25 bp, Homo sapien
tgccacaagtagtgtctggattaat

SEQ ID NO: 1129512 - DNA, 25 bp, Homo sapien
tatttggcgccatcgatgttcacag

SEQ ID NO: 1129513 - DNA, 25 bp, Homo sapien
taaaaggctggccatccactacatt

SEQ ID NO: 1129514 - DNA, 25 bp, Homo sapien
ctggccatccactacattgcggaaa

SEQ ID NO: 1129515 - DNA, 25 bp, Homo sapien
aaggctggccatccactacattgcg

SEQ ID NO: 1129516 - DNA, 25 bp, Homo sapien
cttggttgctcccattatcatacca

SEQ ID NO: 1129517 - DNA, 25 bp, Homo sapien
gattggcaggaacggtcacactttg

SEQ ID NO: 1129518 - DNA, 25 bp, Homo sapien
gacaattcaactgtttacaccaagg

SEQ ID NO: 1129519 - DNA, 25 bp, Homo sapien
ctagagtgagctaagtatgagtgtc

SEQ ID NO: 1129520 - DNA, 25 bp, Homo sapien
tatgagtgtcagttggtcttggaca

SEQ ID NO: 1129521 - DNA, 25 bp, Homo sapien
gacatcacagtatgtgccagcagga

SEQ ID NO: 1129522 - DNA, 25 bp, Homo sapien
catgaattgcaataaatggatcttc

SEQ ID NO: 1129523 - DNA, 25 bp, Homo sapien
gatcttcagcagagttactaataga

SEQ ID NO: 1129524 - DNA, 25 bp, Homo sapien
gagctttgccatcatcagaaacgta

SEQ ID NO: 1129525 - DNA, 25 bp, Homo sapien
tacgtggaaatagaagaccctggag

SEQ ID NO: 1129526 - DNA, 25 bp, Homo sapien
cagaatgatccacacgaagaaaccc

SEQ ID NO: 1129527 - DNA, 25 bp, Homo sapien
cacaaagggacacgagggacatgta

SEQ ID NO: 1129528 - DNA, 25 bp, Homo sapien
caaaagaagcaatcggttaggctgg

SEQ ID NO: 1129529 - DNA, 25 bp, Homo sapien
tggaaaagaacacgaaaccacattg

SEQ ID NO: 1129530 - DNA, 25 bp, Homo sapien
tgtatgaacatctcatcactgactg

SEQ ID NO: 1129531 - DNA, 25 bp, Homo sapien
gaaatctcacctttagttaaactga

SEQ ID NO: 1129532 - DNA, 25 bp, Homo sapien
tacttattcagtgatagcgcctctg

SEQ ID NO: 1129533 - DNA, 25 bp, Homo sapien
gcagcaaatgaatcgaactatcaga

SEQ ID NO: 1129534 - DNA, 25 bp, Homo sapien
cttagagttccggaaagtgcagcaa

SEQ ID NO: 1129535 - DNA, 25 bp, Homo sapien
ttctggaaagtatgtcaagaaacaa

SEQ ID NO: 1129536 - DNA, 25 bp, Homo sapien
gacacaagtccttcctatagtattg

SEQ ID NO: 1129537 - DNA, 25 bp, Homo sapien
tagaagttacatgccgtttaccaac

SEQ ID NO: 1129538 - DNA, 25 bp, Homo sapien
tacgaattggctcaaataataggcc

SEQ ID NO: 1129539 - DNA, 25 bp, Homo sapien
ttgctgacttgatacagaagacggc

SEQ ID NO: 1129540 - DNA, 25 bp, Homo sapien
ggtttggactgcctctacgaattgg

SEQ ID NO: 1129541 - DNA, 25 bp, Homo sapien
ctgtggacagcacaatgcgaagcaa

SEQ ID NO: 1129542 - DNA, 25 bp, Homo sapien
gagcagctcattttgaagatcttca

SEQ ID NO: 1129543 - DNA, 25 bp, Homo sapien
aagcaaggcccctctgtacctcggg

SEQ ID NO: 1129544 - DNA, 25 bp, Homo sapien
tacctcggggaatagaagcctctgg

SEQ ID NO: 1129545 - DNA, 25 bp, Homo sapien
gaatagcagtgccaccgctgctata

SEQ ID NO: 1129546 - DNA, 25 bp, Homo sapien
agaatagcagtgccaccgctgctat

SEQ ID NO: 1129547 - DNA, 25 bp, Homo sapien
ttttttcagacagagagaggacaaa

SEQ ID NO: 1129548 - DNA, 25 bp, Homo sapien
cagagagaggacaaacaataaagga

SEQ ID NO: 1129549 - DNA, 25 bp, Homo sapien
agacagagagaggacaaacaataaa

SEQ ID NO: 1129550 - DNA, 25 bp, Homo sapien
caataaaggaaagatacataaagtt

SEQ ID NO: 1129551 - DNA, 25 bp, Homo sapien
agacatcagtcacagccctgctact

SEQ ID NO: 1129552 - DNA, 25 bp, Homo sapien
tccttcaaatgcttgatctggtgcc

SEQ ID NO: 1129553 - DNA, 25 bp, Homo sapien
aatgcttgatctggtgccaacttat

SEQ ID NO: 1129554 - DNA, 25 bp, Homo sapien
agccctgctactccttcaaatgctt

SEQ ID NO: 1129555 - DNA, 25 bp, Homo sapien
cacgtgtactaaacactgacatcaa

SEQ ID NO: 1129556 - DNA, 25 bp, Homo sapien
gaccaagccacgtgtactaaacact

SEQ ID NO: 1129557 - DNA, 25 bp, Homo sapien
ggaagagttaacttgaatgccaggc

SEQ ID NO: 1129558 - DNA, 25 bp, Homo sapien
gaagagttaacttgaatgccaggcc

SEQ ID NO: 1129559 - DNA, 25 bp, Homo sapien
cttccacaagcacgtttttagccat

SEQ ID NO: 1129560 - DNA, 25 bp, Homo sapien
gacttgtcttccacaagcacgtttt

SEQ ID NO: 1129561 - DNA, 25 bp, Homo sapien
tcttccacaagcacgtttttagcca

SEQ ID NO: 1129562 - DNA, 25 bp, Homo sapien
ttgtcttccacaagcacgtttttag

SEQ ID NO: 1129563 - DNA, 25 bp, Homo sapien
ctgacagaccgacaagacggaaaca

SEQ ID NO: 1129564 - DNA, 25 bp, Homo sapien
agaccgacaagacggaaacaactgg

SEQ ID NO: 1129565 - DNA, 25 bp, Homo sapien
cagaccgacaagacggaaacaactg

SEQ ID NO: 1129566 - DNA, 25 bp, Homo sapien
gacagaccgacaagacggaaacaac

SEQ ID NO: 1129567 - DNA, 25 bp, Homo sapien
cggtataaatgcgaaccgcttccaa

SEQ ID NO: 1129568 - DNA, 25 bp, Homo sapien
cccacggtgctctggtagataacgt

SEQ ID NO: 1129569 - DNA, 25 bp, Homo sapien
tataaatgcgaaccgcttccaactc

SEQ ID NO: 1129570 - DNA, 25 bp, Homo sapien
tagataacgtaagctaagaaaggaa

SEQ ID NO: 1129571 - DNA, 25 bp, Homo sapien
ttttgcatatggtagcacttttatt

SEQ ID NO: 1129572 - DNA, 25 bp, Homo sapien
ttgcatatggtagcacttttatttt

SEQ ID NO: 1129573 - DNA, 25 bp, Homo sapien
tttgcatatggtagcacttttattt

SEQ ID NO: 1129574 - DNA, 25 bp, Homo sapien
tttttgcatatggtagcacttttat

SEQ ID NO: 1129575 - DNA, 25 bp, Homo sapien
tttgctttgaagttgtcagtgtcct

SEQ ID NO: 1129576 - DNA, 25 bp, Homo sapien
ctgagcccagcagaacccaatggtg

SEQ ID NO: 1129577 - DNA, 25 bp, Homo sapien
agcccagcagaacccaatggtgaaa

SEQ ID NO: 1129578 - DNA, 25 bp, Homo sapien
tgaaaagcaaccaaaagagcttcat

SEQ ID NO: 1129579 - DNA, 25 bp, Homo sapien
tggtgaaaagcaaccaaaagagctt

SEQ ID NO: 1129580 - DNA, 25 bp, Homo sapien
cctccaaatcccttgggagctaaat

SEQ ID NO: 1129581 - DNA, 25 bp, Homo sapien
tcaagagcaatatcaacccatcgcc

SEQ ID NO: 1129582 - DNA, 25 bp, Homo sapien
cgccattcaaacagatgaacaatag

SEQ ID NO: 1129583 - DNA, 25 bp, Homo sapien
gctaaatatcgctcacattcaagag

SEQ ID NO: 1129584 - DNA, 25 bp, Homo sapien
ccagatcttgtgcataatttatagc

SEQ ID NO: 1129585 - DNA, 25 bp, Homo sapien
ccaacattgttgcatctagtcacca

SEQ ID NO: 1129586 - DNA, 25 bp, Homo sapien
ccaccaaggtctgaaagggttgtga

SEQ ID NO: 1129587 - DNA, 25 bp, Homo sapien
gctaactggttggtatctttcccac

SEQ ID NO: 1129588 - DNA, 25 bp, Homo sapien
cacagcattaccacacatatgatta

SEQ ID NO: 1129589 - DNA, 25 bp, Homo sapien
cattaaaatcccatccagaatatgg

SEQ ID NO: 1129590 - DNA, 25 bp, Homo sapien
ggtactgcttgttcctgcactcaca

SEQ ID NO: 1129591 - DNA, 25 bp, Homo sapien
gactgctggaaagtccctacttcca

SEQ ID NO: 1129592 - DNA, 25 bp, Homo sapien
tatattcggcaatcttagaacgcac

SEQ ID NO: 1129593 - DNA, 25 bp, Homo sapien
cccagtgcaagatcgagaagaccag

SEQ ID NO: 1129594 - DNA, 25 bp, Homo sapien
gaagaccagacagacgacaatctct

SEQ ID NO: 1129595 - DNA, 25 bp, Homo sapien
caaaattgcctttatgtctccaggc

SEQ ID NO: 1129596 - DNA, 25 bp, Homo sapien
cacgcctggtcctatttgttatatg

SEQ ID NO: 1129597 - DNA, 25 bp, Homo sapien
aataataacagctcacaggaatacg

SEQ ID NO: 1129598 - DNA, 25 bp, Homo sapien
catttttaattgaatctgccgtgaa

SEQ ID NO: 1129599 - DNA, 25 bp, Homo sapien
ttgctatatcgtccaggatggtccc

SEQ ID NO: 1129600 - DNA, 25 bp, Homo sapien
tacttgaattctgtcacccggccat

SEQ ID NO: 1129601 - DNA, 25 bp, Homo sapien
cccggccattaccaaagtagtcact

SEQ ID NO: 1129602 - DNA, 25 bp, Homo sapien
gccgagttttgcaccatacttgaat

SEQ ID NO: 1129603 - DNA, 25 bp, Homo sapien
tccacttgcgaataactgtgccgag

SEQ ID NO: 1129604 - DNA, 25 bp, Homo sapien
atgaaatagttcaggggaaaagttg

SEQ ID NO: 1129605 - DNA, 25 bp, Homo sapien
ctatgaaatagttcaggggaaaagt

SEQ ID NO: 1129606 - DNA, 25 bp, Homo sapien
gcactggggtagtatgactaacaga

SEQ ID NO: 1129607 - DNA, 25 bp, Homo sapien
gataactcgcactggggtagtatga

SEQ ID NO: 1129608 - DNA, 25 bp, Homo sapien
ctcgcactggggtagtatgactaac

SEQ ID NO: 1129609 - DNA, 25 bp, Homo sapien
tccagaagataactcgcactggggt

SEQ ID NO: 1129610 - DNA, 25 bp, Homo sapien
ggtaagtttagcgttcctaggcata

SEQ ID NO: 1129611 - DNA, 25 bp, Homo sapien
gtttagggcactagaatacttatca

SEQ ID NO: 1129612 - DNA, 25 bp, Homo sapien
cagacagaaactcctagggtaagtt

SEQ ID NO: 1129613 - DNA, 25 bp, Homo sapien
gtgacagacactctaaatacaaaag

SEQ ID NO: 1129614 - DNA, 25 bp, Homo sapien
tatacgttgatgtatcatttcacaa

SEQ ID NO: 1129615 - DNA, 25 bp, Homo sapien
ttgagagtaactctactgtgcatct

SEQ ID NO: 1129616 - DNA, 25 bp, Homo sapien
gcatctctttctgtaaggcatggca

SEQ ID NO: 1129617 - DNA, 25 bp, Homo sapien
ttgaaacataagatatacgttgatg

SEQ ID NO: 1129618 - DNA, 25 bp, Homo sapien
agcgccatgtcctcgttgattgtca

SEQ ID NO: 1129619 - DNA, 25 bp, Homo sapien
ctagcatcccagaaggtaagtatag

SEQ ID NO: 1129620 - DNA, 25 bp, Homo sapien
taagtatagaggctcctccagcgcc

SEQ ID NO: 1129621 - DNA, 25 bp, Homo sapien
tcatggttatccacaaagacaagcg

SEQ ID NO: 1129622 - DNA, 25 bp, Homo sapien
tgtaaatccataaggatgagcaagc

SEQ ID NO: 1129623 - DNA, 25 bp, Homo sapien
cggtagcttgacattactcgtgtaa

SEQ ID NO: 1129624 - DNA, 25 bp, Homo sapien
gatgagcaagcataaatccaactgc

SEQ ID NO: 1129625 - DNA, 25 bp, Homo sapien
tcaaaatatcttggccaacggtagc

SEQ ID NO: 1129626 - DNA, 25 bp, Homo sapien
ggtggcccaacccaatcattaacat

SEQ ID NO: 1129627 - DNA, 25 bp, Homo sapien
tctggattaatagtaacttctttag

SEQ ID NO: 1129628 - DNA, 25 bp, Homo sapien
tgccacaagtagtgtctggattaat

SEQ ID NO: 1129629 - DNA, 25 bp, Homo sapien
tatttggcgccatcgatgttcacag

SEQ ID NO: 1129630 - DNA, 25 bp, Homo sapien
ggttgctcccattatcataccagtt

SEQ ID NO: 1129631 - DNA, 25 bp, Homo sapien
tacattgcggaaattaaccatgttc

SEQ ID NO: 1129632 - DNA, 25 bp, Homo sapien
cataccagtttgtaaaaggctggcc

SEQ ID NO: 1129633 - DNA, 25 bp, Homo sapien
gctggccatccactacattgcggaa

SEQ ID NO: 1129634 - DNA, 25 bp, Homo sapien
cattaaccacaagatacatattatt

SEQ ID NO: 1129635 - DNA, 25 bp, Homo sapien
ggccaataatgagaagtttcagaac

SEQ ID NO: 1129636 - DNA, 25 bp, Homo sapien
aaatcattaaccacaagatacatat

SEQ ID NO: 1129637 - DNA, 25 bp, Homo sapien
tcattaaccacaagatacatattat

SEQ ID NO: 1129638 - DNA, 25 bp, Homo sapien
catgaattgcaataaatggatcttc

SEQ ID NO: 1129639 - DNA, 25 bp, Homo sapien
gacatcacagtatgtgccagcagga

SEQ ID NO: 1129640 - DNA, 25 bp, Homo sapien
gatcttcagcagagttactaataga

SEQ ID NO: 1129641 - DNA, 25 bp, Homo sapien
gctttgccatcatcagaaacgtaga

SEQ ID NO: 1129642 - DNA, 25 bp, Homo sapien
tttgcggatttgcatttaattttaa

SEQ ID NO: 1129643 - DNA, 25 bp, Homo sapien
ttgcggatttgcatttaattttaaa

SEQ ID NO: 1129644 - DNA, 25 bp, Homo sapien
tgcggatttgcatttaattttaaat

SEQ ID NO: 1129645 - DNA, 25 bp, Homo sapien
gaggtaaaaatgttatgattgattc

SEQ ID NO: 1129646 - DNA, 25 bp, Homo sapien
aaatgttatgattgattcataaaac

SEQ ID NO: 1129647 - DNA, 25 bp, Homo sapien
ctgttgaggtaaaaatgttatgatt

SEQ ID NO: 1129648 - DNA, 25 bp, Homo sapien
gttatgattgattcataaaacctca

SEQ ID NO: 1129649 - DNA, 25 bp, Homo sapien
caaaattgcctttatgtctccaggc

SEQ ID NO: 1129650 - DNA, 25 bp, Homo sapien
tatattcggcaatcttagaacgcac

SEQ ID NO: 1129651 - DNA, 25 bp, Homo sapien
gtttagattatgcagtttgtccaaa

SEQ ID NO: 1129652 - DNA, 25 bp, Homo sapien
caccaatgtcaatgagatggttcat

SEQ ID NO: 1129653 - DNA, 25 bp, Homo sapien
ttcctattatctcaacaggtaatat

SEQ ID NO: 1129654 - DNA, 25 bp, Homo sapien
tgtttgttacacgaaatgtgcaaaa

SEQ ID NO: 1129655 - DNA, 25 bp, Homo sapien
tttgttacacgaaatgtgcaaaatg

SEQ ID NO: 1129656 - DNA, 25 bp, Homo sapien
ttcttattcctattatctcaacagg

SEQ ID NO: 1129657 - DNA, 25 bp, Homo sapien
gccgagttttgcaccatacttgaat

SEQ ID NO: 1129658 - DNA, 25 bp, Homo sapien
cccggccattaccaaagtagtcact

SEQ ID NO: 1129659 - DNA, 25 bp, Homo sapien
tacttgaattctgtcacccggccat

SEQ ID NO: 1129660 - DNA, 25 bp, Homo sapien
tccacttgcgaataactgtgccgag

SEQ ID NO: 1129661 - DNA, 25 bp, Homo sapien
cattatacagaatgtcaaactagat

SEQ ID NO: 1129662 - DNA, 25 bp, Homo sapien
catgtgtaatctacatgtatggtcc

SEQ ID NO: 1129663 - DNA, 25 bp, Homo sapien
cgtacttagatgaaaactcctaggg

SEQ ID NO: 1129664 - DNA, 25 bp, Homo sapien
tgaaaactcctagggtatgtttagc

SEQ ID NO: 1129665 - DNA, 25 bp, Homo sapien
tcatggttatccacaaagacaagcg

SEQ ID NO: 1129666 - DNA, 25 bp, Homo sapien
gattgtcatggttatccacaaagac

SEQ ID NO: 1129667 - DNA, 25 bp, Homo sapien
caaagacaagcgctctgtcagaagg

SEQ ID NO: 1129668 - DNA, 25 bp, Homo sapien
ccatgtcctcgttgattgtcatggt

SEQ ID NO: 1129669 - DNA, 25 bp, Homo sapien
tcttggccaacggtagcttgacatt

SEQ ID NO: 1129670 - DNA, 25 bp, Homo sapien
gatgagcaagcataaatccaactgc

SEQ ID NO: 1129671 - DNA, 25 bp, Homo sapien
gccaacggtagcttgacattactcg

SEQ ID NO: 1129672 - DNA, 25 bp, Homo sapien
agcttgacattactcgtgtaaatcc

SEQ ID NO: 1129673 - DNA, 25 bp, Homo sapien
cagaaaaggatatattgaacaactc

SEQ ID NO: 1129674 - DNA, 25 bp, Homo sapien
tcttcagaaaaggatatattgaaca

SEQ ID NO: 1129675 - DNA, 25 bp, Homo sapien
tatattgaacaactccaaaacttac

SEQ ID NO: 1129676 - DNA, 25 bp, Homo sapien
aggatatattgaacaactccaaaac

SEQ ID NO: 1129677 - DNA, 25 bp, Homo sapien
cactacgggcagatgatgttttaag

SEQ ID NO: 1129678 - DNA, 25 bp, Homo sapien
tccgtgtgactcataggaaggagga

SEQ ID NO: 1129679 - DNA, 25 bp, Homo sapien
taaattgctatacaaagtgcggact

SEQ ID NO: 1129680 - DNA, 25 bp, Homo sapien
aaagctagctagatatccgtgtgac

SEQ ID NO: 1129681 - DNA, 25 bp, Homo sapien
caatcctgttacttgtgtctctgca

SEQ ID NO: 1129682 - DNA, 25 bp, Homo sapien
caaacccaaccaatcctgttacttg

SEQ ID NO: 1129683 - DNA, 25 bp, Homo sapien
gttacttgtgtctctgcattcagtg

SEQ ID NO: 1129684 - DNA, 25 bp, Homo sapien
gtgtctctgcattcagtgactttat

SEQ ID NO: 1129685 - DNA, 25 bp, Homo sapien
tgccacaagtagtgtctggattaat

SEQ ID NO: 1129686 - DNA, 25 bp, Homo sapien
tttggcgccatcgatgttcacagac

SEQ ID NO: 1129687 - DNA, 25 bp, Homo sapien
tagtgtctggattaatagtaacttc

SEQ ID NO: 1129688 - DNA, 25 bp, Homo sapien
ggtggcccaacccaatcattaacat

SEQ ID NO: 1129689 - DNA, 25 bp, Homo sapien
taaaaggctggccatccactacatt

SEQ ID NO: 1129690 - DNA, 25 bp, Homo sapien
ctggccatccactacattgcggaaa

SEQ ID NO: 1129691 - DNA, 25 bp, Homo sapien
aaggctggccatccactacattgcg

SEQ ID NO: 1129692 - DNA, 25 bp, Homo sapien
cttggttgctcccattatcatacca

SEQ ID NO: 1129693 - DNA, 25 bp, Homo sapien
taggtggaaatagctttctaggacc

SEQ ID NO: 1129694 - DNA, 25 bp, Homo sapien
tagtaggtggaaatagctttctagg

SEQ ID NO: 1129695 - DNA, 25 bp, Homo sapien
gtggaaatagctttctaggaccaaa

SEQ ID NO: 1129696 - DNA, 25 bp, Homo sapien
ggtggaaatagctttctaggaccaa

SEQ ID NO: 1129697 - DNA, 25 bp, Homo sapien
gacatcacagtatgtgccagcagga

SEQ ID NO: 1129698 - DNA, 25 bp, Homo sapien
catgaattgcaataaatggatcttc

SEQ ID NO: 1129699 - DNA, 25 bp, Homo sapien
gatcttcagcagagttactaataga

SEQ ID NO: 1129700 - DNA, 25 bp, Homo sapien
gagctttgccatcatcagaaacgta

SEQ ID NO: 1129701 - DNA, 25 bp, Homo sapien
tgaggacatgcatttaattttaaat

SEQ ID NO: 1129702 - DNA, 25 bp, Homo sapien
tttgaggacatgcatttaattttaa

SEQ ID NO: 1129703 - DNA, 25 bp, Homo sapien
gaggacatgcatttaattttaaatt

SEQ ID NO: 1129704 - DNA, 25 bp, Homo sapien
ttgaggacatgcatttaattttaaa

SEQ ID NO: 1129705 - DNA, 25 bp, Homo sapien
tacgtggaaatagaagaccctggag

SEQ ID NO: 1129706 - DNA, 25 bp, Homo sapien
cacaaagggacacgagggacatgta

SEQ ID NO: 1129707 - DNA, 25 bp, Homo sapien
cagaatgatccacacgaagaaaccc

SEQ ID NO: 1129708 - DNA, 25 bp, Homo sapien
caaaagaagcaatcggttaggctgg

SEQ ID NO: 1129709 - DNA, 25 bp, Homo sapien
tacttattcagtgatagcgcctctg

SEQ ID NO: 1129710 - DNA, 25 bp, Homo sapien
tgtatgaacatctcatcactgactg

SEQ ID NO: 1129711 - DNA, 25 bp, Homo sapien
tggaaaagaacacgaaaccacattg

SEQ ID NO: 1129712 - DNA, 25 bp, Homo sapien
gaaatctcacctttagttaaactga

SEQ ID NO: 1129713 - DNA, 25 bp, Homo sapien
cttagagttccggaaagtgcagcaa

SEQ ID NO: 1129714 - DNA, 25 bp, Homo sapien
ttctggaaagtatgtcaagaaacaa

SEQ ID NO: 1129715 - DNA, 25 bp, Homo sapien
gcagcaaatgaatcgaactatcaga

SEQ ID NO: 1129716 - DNA, 25 bp, Homo sapien
gacacaagtccttcctatagtattg

SEQ ID NO: 1129717 - DNA, 25 bp, Homo sapien
tacgaattggctcaaataataggcc

SEQ ID NO: 1129718 - DNA, 25 bp, Homo sapien
tagaagttacatgccgtttaccaac

SEQ ID NO: 1129719 - DNA, 25 bp, Homo sapien
ttgctgacttgatacagaagacggc

SEQ ID NO: 1129720 - DNA, 25 bp, Homo sapien
ggtttggactgcctctacgaattgg

SEQ ID NO: 1129721 - DNA, 25 bp, Homo sapien
ctgtggacagcacaatgcgaagcaa

SEQ ID NO: 1129722 - DNA, 25 bp, Homo sapien
aagcaaggcccctctgtacctcggg

SEQ ID NO: 1129723 - DNA, 25 bp, Homo sapien
tacctcggggaatagaagcctctgg

SEQ ID NO: 1129724 - DNA, 25 bp, Homo sapien
gagcagctcattttgaagatcttca

SEQ ID NO: 1129725 - DNA, 25 bp, Homo sapien
gaatagcagtgccaccgctgctata

SEQ ID NO: 1129726 - DNA, 25 bp, Homo sapien
agaatagcagtgccaccgctgctat

SEQ ID NO: 1129727 - DNA, 25 bp, Homo sapien
ttttttcagacagagagaggacaaa

SEQ ID NO: 1129728 - DNA, 25 bp, Homo sapien
cagagagaggacaaacaataaagga

SEQ ID NO: 1129729 - DNA, 25 bp, Homo sapien
caataaaggaaagatacataaagtt

SEQ ID NO: 1129730 - DNA, 25 bp, Homo sapien
agacagagagaggacaaacaataaa

SEQ ID NO: 1129731 - DNA, 25 bp, Homo sapien
agccctgctactccttcaaatgctt

SEQ ID NO: 1129732 - DNA, 25 bp, Homo sapien
tccttcaaatgcttgatctggtgcc

SEQ ID NO: 1129733 - DNA, 25 bp, Homo sapien
agacatcagtcacagccctgctact

SEQ ID NO: 1129734 - DNA, 25 bp, Homo sapien
aatgcttgatctggtgccaacttat

SEQ ID NO: 1129735 - DNA, 25 bp, Homo sapien
gaccaagccacgtgtactaaacact

SEQ ID NO: 1129736 - DNA, 25 bp, Homo sapien
gaagagttaacttgaatgccaggcc

SEQ ID NO: 1129737 - DNA, 25 bp, Homo sapien
cacgtgtactaaacactgacatcaa

SEQ ID NO: 1129738 - DNA, 25 bp, Homo sapien
ggaagagttaacttgaatgccaggc

SEQ ID NO: 1129739 - DNA, 25 bp, Homo sapien
cttccacaagcacgtttttagccat

SEQ ID NO: 1129740 - DNA, 25 bp, Homo sapien
gacttgtcttccacaagcacgtttt

SEQ ID NO: 1129741 - DNA, 25 bp, Homo sapien
ttgtcttccacaagcacgtttttag

SEQ ID NO: 1129742 - DNA, 25 bp, Homo sapien
tcttccacaagcacgtttttagcca

SEQ ID NO: 1129743 - DNA, 25 bp, Homo sapien
ctgacagaccgacaagacggaaaca

SEQ ID NO: 1129744 - DNA, 25 bp, Homo sapien
agaccgacaagacggaaacaactgg

SEQ ID NO: 1129745 - DNA, 25 bp, Homo sapien
gacagaccgacaagacggaaacaac

SEQ ID NO: 1129746 - DNA, 25 bp, Homo sapien
cagaccgacaagacggaaacaactg

SEQ ID NO: 1129747 - DNA, 25 bp, Homo sapien
cggtataaatgcgaaccgcttccaa

SEQ ID NO: 1129748 - DNA, 25 bp, Homo sapien
tagataacgtaagctaagaaaggaa

SEQ ID NO: 1129749 - DNA, 25 bp, Homo sapien
tataaatgcgaaccgcttccaactc

SEQ ID NO: 1129750 - DNA, 25 bp, Homo sapien
cccacggtgctctggtagataacgt

SEQ ID NO: 1129751 - DNA, 25 bp, Homo sapien
tttgctttgaagttgtcagtgtcct

SEQ ID NO: 1129752 - DNA, 25 bp, Homo sapien
tggtgaaaagcaaccaaaagagctt

SEQ ID NO: 1129753 - DNA, 25 bp, Homo sapien
ctgagcccagcagaacccaatggtg

SEQ ID NO: 1129754 - DNA, 25 bp, Homo sapien
agcccagcagaacccaatggtgaaa

SEQ ID NO: 1129755 - DNA, 25 bp, Homo sapien
tgaaaagcaaccaaaagagcttcat

SEQ ID NO: 1129756 - DNA, 25 bp, Homo sapien
tcaagagcaatatcaacccatcgcc

SEQ ID NO: 1129757 - DNA, 25 bp, Homo sapien
cgccattcaaacagatgaacaatag

SEQ ID NO: 1129758 - DNA, 25 bp, Homo sapien
cctccaaatcccttgggagctaaat

SEQ ID NO: 1129759 - DNA, 25 bp, Homo sapien
gctaaatatcgctcacattcaagag

SEQ ID NO: 1129760 - DNA, 25 bp, Homo sapien
ccaccaaggtctgaaagggttgtga

SEQ ID NO: 1129761 - DNA, 25 bp, Homo sapien
ccaacattgttgcatctagtcacca

SEQ ID NO: 1129762 - DNA, 25 bp, Homo sapien
gctaactggttggtatctttcccac

SEQ ID NO: 1129763 - DNA, 25 bp, Homo sapien
ccagatcttgtgcataatttatagc

SEQ ID NO: 1129764 - DNA, 25 bp, Homo sapien
ttacagcatccacataaatacgaac

SEQ ID NO: 1129765 - DNA, 25 bp, Homo sapien
atatgattaattacagcatccacat

SEQ ID NO: 1129766 - DNA, 25 bp, Homo sapien
aattacagcatccacataaatacga

SEQ ID NO: 1129767 - DNA, 25 bp, Homo sapien
gattaattacagcatccacataaat

SEQ ID NO: 1129768 - DNA, 25 bp, Homo sapien
caggtactgcttgttcctgcactca

SEQ ID NO: 1129769 - DNA, 25 bp, Homo sapien
ggtactgcttgttcctgcactcaca

SEQ ID NO: 1129770 - DNA, 25 bp, Homo sapien
ccacaggtactgcttgttcctgcac

SEQ ID NO: 1129771 - DNA, 25 bp, Homo sapien
gtactgcttgttcctgcactcacag

SEQ ID NO: 1129772 - DNA, 25 bp, Homo sapien
ccagttttacatttaccatcattaa

SEQ ID NO: 1129773 - DNA, 25 bp, Homo sapien
atcattatagttctcgatatctcca

SEQ ID NO: 1129774 - DNA, 25 bp, Homo sapien
atagttctcgatatctccacttcca

SEQ ID NO: 1129775 - DNA, 25 bp, Homo sapien
cattaaaatcccatccagaatatgg

SEQ ID NO: 1129776 - DNA, 25 bp, Homo sapien
tatattcggcaatcttagaacgcac

SEQ ID NO: 1129777 - DNA, 25 bp, Homo sapien
gaacgcacataatccttccccagtg

SEQ ID NO: 1129778 - DNA, 25 bp, Homo sapien
cccagtgcaagatcgagaagaccag

SEQ ID NO: 1129779 - DNA, 25 bp, Homo sapien
gaagaccagacagacgacaatctct

SEQ ID NO: 1129780 - DNA, 25 bp, Homo sapien
ccaaaattgcctttatgtctccagg

SEQ ID NO: 1129781 - DNA, 25 bp, Homo sapien
gattatgcagtttgtccaaaattgc

SEQ ID NO: 1129782 - DNA, 25 bp, Homo sapien
gtttagattatgcagtttgtccaaa

SEQ ID NO: 1129783 - DNA, 25 bp, Homo sapien
cagtttgtccaaaattgcctttatg

SEQ ID NO: 1129784 - DNA, 25 bp, Homo sapien
cacgcctggtcctatttgttatatg

SEQ ID NO: 1129785 - DNA, 25 bp, Homo sapien
aataataacagctcacaggaatacg

SEQ ID NO: 1129786 - DNA, 25 bp, Homo sapien
catttttaattgaatctgccgtgaa

SEQ ID NO: 1129787 - DNA, 25 bp, Homo sapien
ttgctatatcgtccaggatggtccc

SEQ ID NO: 1129788 - DNA, 25 bp, Homo sapien
tccacttgcgaataactgtgccgag

SEQ ID NO: 1129789 - DNA, 25 bp, Homo sapien
tacttgaattctgtcacccggccat

SEQ ID NO: 1129790 - DNA, 25 bp, Homo sapien
cccggccattaccaaagtagtcact

SEQ ID NO: 1129791 - DNA, 25 bp, Homo sapien
gccgagttttgcaccatacttgaat

SEQ ID NO: 1129792 - DNA, 25 bp, Homo sapien
ctatgaaatagttcaggggaaaagt

SEQ ID NO: 1129793 - DNA, 25 bp, Homo sapien
atgaaatagttcaggggaaaagttg

SEQ ID NO: 1129794 - DNA, 25 bp, Homo sapien
gataactcgcactggggtagtatga

SEQ ID NO: 1129795 - DNA, 25 bp, Homo sapien
gcactggggtagtatgactaacaga

SEQ ID NO: 1129796 - DNA, 25 bp, Homo sapien
ctcgcactggggtagtatgactaac

SEQ ID NO: 1129797 - DNA, 25 bp, Homo sapien
tccagaagataactcgcactggggt

SEQ ID NO: 1129798 - DNA, 25 bp, Homo sapien
gtttagggcactagaatacttatca

SEQ ID NO: 1129799 - DNA, 25 bp, Homo sapien
ggtaagtttagcgttcctaggcata

SEQ ID NO: 1129800 - DNA, 25 bp, Homo sapien
gtgacagacactctaaatacaaaag

SEQ ID NO: 1129801 - DNA, 25 bp, Homo sapien
cagacagaaactcctagggtaagtt

SEQ ID NO: 1129802 - DNA, 25 bp, Homo sapien
ttgagagtaactctactgtgcatct

SEQ ID NO: 1129803 - DNA, 25 bp, Homo sapien
gcatctctttctgtaaggcatggca

SEQ ID NO: 1129804 - DNA, 25 bp, Homo sapien
ttgaaacataagatatacgttgatg

SEQ ID NO: 1129805 - DNA, 25 bp, Homo sapien
tatacgttgatgtatcatttcacaa

SEQ ID NO: 1129806 - DNA, 25 bp, Homo sapien
agcgccatgtcctcgttgattgtca

SEQ ID NO: 1129807 - DNA, 25 bp, Homo sapien
ctagcatcccagaaggtaagtatag

SEQ ID NO: 1129808 - DNA, 25 bp, Homo sapien
taagtatagaggctcctccagcgcc

SEQ ID NO: 1129809 - DNA, 25 bp, Homo sapien
tcatggttatccacaaagacaagcg

SEQ ID NO: 1129810 - DNA, 25 bp, Homo sapien
tgtaaatccataaggatgagcaagc

SEQ ID NO: 1129811 - DNA, 25 bp, Homo sapien
tcaaaatatcttggccaacggtagc

SEQ ID NO: 1129812 - DNA, 25 bp, Homo sapien
gatgagcaagcataaatccaactgc

SEQ ID NO: 1129813 - DNA, 25 bp, Homo sapien
cggtagcttgacattactcgtgtaa

SEQ ID NO: 1129814 - DNA, 25 bp, Homo sapien
tctggattaatagtaacttctttag

SEQ ID NO: 1129815 - DNA, 25 bp, Homo sapien
tgccacaagtagtgtctggattaat

SEQ ID NO: 1129816 - DNA, 25 bp, Homo sapien
tatttggcgccatcgatgttcacag

SEQ ID NO: 1129817 - DNA, 25 bp, Homo sapien
ggtggcccaacccaatcattaacat

SEQ ID NO: 1129818 - DNA, 25 bp, Homo sapien
gctggccatccactacattgcggaa

SEQ ID NO: 1129819 - DNA, 25 bp, Homo sapien
ggttgctcccattatcataccagtt

SEQ ID NO: 1129820 - DNA, 25 bp, Homo sapien
cataccagtttgtaaaaggctggcc

SEQ ID NO: 1129821 - DNA, 25 bp, Homo sapien
tacattgcggaaattaaccatgttc

SEQ ID NO: 1129822 - DNA, 25 bp, Homo sapien
ggccaataatgagaagtttcagaac

SEQ ID NO: 1129823 - DNA, 25 bp, Homo sapien
tcattaaccacaagatacatattat

SEQ ID NO: 1129824 - DNA, 25 bp, Homo sapien
aaatcattaaccacaagatacatat

SEQ ID NO: 1129825 - DNA, 25 bp, Homo sapien
cattaaccacaagatacatattatt

SEQ ID NO: 1129826 - DNA, 25 bp, Homo sapien
gacatcacagtatgtgccagcagga

SEQ ID NO: 1129827 - DNA, 25 bp, Homo sapien
gatcttcagcagagttactaataga

SEQ ID NO: 1129828 - DNA, 25 bp, Homo sapien
catgaattgcaataaatggatcttc

SEQ ID NO: 1129829 - DNA, 25 bp, Homo sapien
gctttgccatcatcagaaacgtaga

SEQ ID NO: 1129830 - DNA, 25 bp, Homo sapien
tttgcggatttgcatttaattttaa

SEQ ID NO: 1129831 - DNA, 25 bp, Homo sapien
tgcggatttgcatttaattttaaat

SEQ ID NO: 1129832 - DNA, 25 bp, Homo sapien
ttgcggatttgcatttaattttaaa

SEQ ID NO: 1129833 - DNA, 25 bp, Homo sapien
gattcaccagatttggtagtggtgg

SEQ ID NO: 1129834 - DNA, 25 bp, Homo sapien
cttttagattcaccagatttggtag

SEQ ID NO: 1129835 - DNA, 25 bp, Homo sapien
tttagattcaccagatttggtagtg

SEQ ID NO: 1129836 - DNA, 25 bp, Homo sapien
tagattcaccagatttggtagtggt

SEQ ID NO: 1129837 - DNA, 25 bp, Homo sapien
cagtgcaattttcttcggaccccac

SEQ ID NO: 1129838 - DNA, 25 bp, Homo sapien
gcaggtgtcagtgcaattttcttcg

SEQ ID NO: 1129839 - DNA, 25 bp, Homo sapien
ggtgtcagtgcaattttcttcggac

SEQ ID NO: 1129840 - DNA, 25 bp, Homo sapien
tgtcagtgcaattttcttcggaccc

SEQ ID NO: 1129841 - DNA, 25 bp, Homo sapien
tatccaaagctactggaacattctg

SEQ ID NO: 1129842 - DNA, 25 bp, Homo sapien
tccaaagctactggaacattctgtg

SEQ ID NO: 1129843 - DNA, 25 bp, Homo sapien
ttatccaaagctactggaacattct

SEQ ID NO: 1129844 - DNA, 25 bp, Homo sapien
atccaaagctactggaacattctgt

SEQ ID NO: 1129845 - DNA, 25 bp, Homo sapien
gctttctccacatgatgggaacggt

SEQ ID NO: 1129846 - DNA, 25 bp, Homo sapien
gggaacggtgcccagttacagtcat

SEQ ID NO: 1129847 - DNA, 25 bp, Homo sapien
ggctttctccacatgatgggaacgg

SEQ ID NO: 1129848 - DNA, 25 bp, Homo sapien
atgatgggaacggtgcccagttaca

SEQ ID NO: 1129849 - DNA, 25 bp, Homo sapien
gaaacagcacttcacaaagtggcat

SEQ ID NO: 1129850 - DNA, 25 bp, Homo sapien
tcttgagagtgcttggcagctcgtc

SEQ ID NO: 1129851 - DNA, 25 bp, Homo sapien
ccatggcaataaagtaggctatctt

SEQ ID NO: 1129852 - DNA, 25 bp, Homo sapien
tctgctcagagcaaacatggtgggt

SEQ ID NO: 1129853 - DNA, 25 bp, Homo sapien
ctgaatcagtactcccatgatgaat

SEQ ID NO: 1129854 - DNA, 25 bp, Homo sapien
gatgaattggcaactatttacaatg

SEQ ID NO: 1129855 - DNA, 25 bp, Homo sapien
ttggcaactatttacaatggattcc

SEQ ID NO: 1129856 - DNA, 25 bp, Homo sapien
ctcccatgatgaattggcaactatt

SEQ ID NO: 1129857 - DNA, 25 bp, Homo sapien
cccttggtggtgactcaatgttcct

SEQ ID NO: 1129858 - DNA, 25 bp, Homo sapien
ggtggtgactcaatgttcctgaaat

SEQ ID NO: 1129859 - DNA, 25 bp, Homo sapien
tggtggtgactcaatgttcctgaaa

SEQ ID NO: 1129860 - DNA, 25 bp, Homo sapien
cttggtggtgactcaatgttcctga

SEQ ID NO: 1129861 - DNA, 25 bp, Homo sapien
gacttgatatgtattgggagacttc

SEQ ID NO: 1129862 - DNA, 25 bp, Homo sapien
caaaatgctgtcctagacttgatat

SEQ ID NO: 1129863 - DNA, 25 bp, Homo sapien
tcctgggtggatacatagctcagcc

SEQ ID NO: 1129864 - DNA, 25 bp, Homo sapien
cacttcagtgacagcatataatggg

SEQ ID NO: 1129865 - DNA, 25 bp, Homo sapien
ctcttcagcaggtttcttgatctcc

SEQ ID NO: 1129866 - DNA, 25 bp, Homo sapien
gcgccagctcttcagcaggtttctt

SEQ ID NO: 1129867 - DNA, 25 bp, Homo sapien
ctgcgccagctcttcagcaggtttc

SEQ ID NO: 1129868 - DNA, 25 bp, Homo sapien
cagctcttcagcaggtttcttgatc

SEQ ID NO: 1129869 - DNA, 25 bp, Homo sapien
gggagcatattcattaccaagttca

SEQ ID NO: 1129870 - DNA, 25 bp, Homo sapien
gaaccttcctcgatttgggagcata

SEQ ID NO: 1129871 - DNA, 25 bp, Homo sapien
cactggatccagtatgagtaacccg

SEQ ID NO: 1129872 - DNA, 25 bp, Homo sapien
gagtaacccgagtcaggcttctgaa

SEQ ID NO: 1129873 - DNA, 25 bp, Homo sapien
gacagcctaaagcacacttctccat

SEQ ID NO: 1129874 - DNA, 25 bp, Homo sapien
agtttccaagtaggtcagctctcca

SEQ ID NO: 1129875 - DNA, 25 bp, Homo sapien
gctacagctgagtgtttgaacccaa

SEQ ID NO: 1129876 - DNA, 25 bp, Homo sapien
aatctctgattcagagctacagctg

SEQ ID NO: 1129877 - DNA, 25 bp, Homo sapien
tcataggattgagatgaagttgcag

SEQ ID NO: 1129878 - DNA, 25 bp, Homo sapien
ttttgtaatcatccaaacttgtggt

SEQ ID NO: 1129879 - DNA, 25 bp, Homo sapien
cttgtggtagggtcatctttataaa

SEQ ID NO: 1129880 - DNA, 25 bp, Homo sapien
ttgtaatcatccaaacttgtggtag

SEQ ID NO: 1129881 - DNA, 25 bp, Homo sapien
tgtaatcatccaaacttgtggtagg

SEQ ID NO: 1129882 - DNA, 25 bp, Homo sapien
gggaacctagccttcttgtccatca

SEQ ID NO: 1129883 - DNA, 25 bp, Homo sapien
gtccatcagagacaacgggcttttc

SEQ ID NO: 1129884 - DNA, 25 bp, Homo sapien
cttgtccatcagagacaacgggctt

SEQ ID NO: 1129885 - DNA, 25 bp, Homo sapien
ctgtaaagggaacctagccttcttg

SEQ ID NO: 1129886 - DNA, 25 bp, Homo sapien
taagtcgacacagttatgcttagcc

SEQ ID NO: 1129887 - DNA, 25 bp, Homo sapien
agactgagtttctaagtcgacacag

SEQ ID NO: 1129888 - DNA, 25 bp, Homo sapien
caccttcttggtagttaacctgaga

SEQ ID NO: 1129889 - DNA, 25 bp, Homo sapien
cagttatgcttagccaccttcttgg

SEQ ID NO: 1129890 - DNA, 25 bp, Homo sapien
tgcggctgctgtagcggttgcagca

SEQ ID NO: 1129891 - DNA, 25 bp, Homo sapien
cctgcggctgctgtagcggttgcag

SEQ ID NO: 1129892 - DNA, 25 bp, Homo sapien
cggctgctgtagcggttgcagcact

SEQ ID NO: 1129893 - DNA, 25 bp, Homo sapien
ctgctgtagcggttgcagcactgcc

SEQ ID NO: 1129894 - DNA, 25 bp, Homo sapien
tctaaacgtccttcagacggcgtcg

SEQ ID NO: 1129895 - DNA, 25 bp, Homo sapien
tgcggactccgtggcgagatctgtt

SEQ ID NO: 1129896 - DNA, 25 bp, Homo sapien
ccagggagcttggttactgtttcaa

SEQ ID NO: 1129897 - DNA, 25 bp, Homo sapien
cttgtcatgctcagtcctagtacca

SEQ ID NO: 1129898 - DNA, 25 bp, Homo sapien
tccaacgaccttcgctctgcgcgtg

SEQ ID NO: 1129899 - DNA, 25 bp, Homo sapien
gcttccaacgaccttcgctctgcgc

SEQ ID NO: 1129900 - DNA, 25 bp, Homo sapien
ttccaacgaccttcgctctgcgcgt

SEQ ID NO: 1129901 - DNA, 25 bp, Homo sapien
cttccaacgaccttcgctctgcgcg

SEQ ID NO: 1129902 - DNA, 25 bp, Homo sapien
ggctgatggaggaggggacccactc

SEQ ID NO: 1129903 - DNA, 25 bp, Homo sapien
ctgatggaggaggggacccactcac

SEQ ID NO: 1129904 - DNA, 25 bp, Homo sapien
caggctgatggaggaggggacccac

SEQ ID NO: 1129905 - DNA, 25 bp, Homo sapien
gaggggccgtccaggctgatggagg

SEQ ID NO: 1129906 - DNA, 25 bp, Homo sapien
aacgtgcccagcctattgttattac

SEQ ID NO: 1129907 - DNA, 25 bp, Homo sapien
gctgaagtgatgcaatcttgactca

SEQ ID NO: 1129908 - DNA, 25 bp, Homo sapien
gcccagcctattgttattacatatt

SEQ ID NO: 1129909 - DNA, 25 bp, Homo sapien
taacctccgcccactggtctcaagt

SEQ ID NO: 1129910 - DNA, 25 bp, Homo sapien
tactaaattgacttttggagcatct

SEQ ID NO: 1129911 - DNA, 25 bp, Homo sapien
ttactaaattgacttttggagcatc

SEQ ID NO: 1129912 - DNA, 25 bp, Homo sapien
caattactaaattgacttttggagc

SEQ ID NO: 1129913 - DNA, 25 bp, Homo sapien
tgcaattactaaattgacttttgga

SEQ ID NO: 1129914 - DNA, 25 bp, Homo sapien
actgaatacccagtcaggcccaaag

SEQ ID NO: 1129915 - DNA, 25 bp, Homo sapien
tgaaatgacctgatggtcactgaat

SEQ ID NO: 1129916 - DNA, 25 bp, Homo sapien
tctcctctaatgcacagtttccagg

SEQ ID NO: 1129917 - DNA, 25 bp, Homo sapien
gttttctcctctaatgcacagtttc

SEQ ID NO: 1129918 - DNA, 25 bp, Homo sapien
aaaggctcattataaaatgagatca

SEQ ID NO: 1129919 - DNA, 25 bp, Homo sapien
aaggctcattataaaatgagatcat

SEQ ID NO: 1129920 - DNA, 25 bp, Homo sapien
caaaggctcattataaaatgagatc

SEQ ID NO: 1129921 - DNA, 25 bp, Homo sapien
aacatcatgcttgcacttcgtgaga

SEQ ID NO: 1129922 - DNA, 25 bp, Homo sapien
caacaagtttgtacactcctagagg

SEQ ID NO: 1129923 - DNA, 25 bp, Homo sapien
ggcagctatatcatacgtttaaaac

SEQ ID NO: 1129924 - DNA, 25 bp, Homo sapien
tctaagcccctcacccatgtgaatg

SEQ ID NO: 1129925 - DNA, 25 bp, Homo sapien
gctttgacctcgatttgagaatctt

SEQ ID NO: 1129926 - DNA, 25 bp, Homo sapien
attttatctttagctttgacctcga

SEQ ID NO: 1129927 - DNA, 25 bp, Homo sapien
tatctttagctttgacctcgatttg

SEQ ID NO: 1129928 - DNA, 25 bp, Homo sapien
ctttagctttgacctcgatttgaga

SEQ ID NO: 1129929 - DNA, 25 bp, Homo sapien
tctccaggttatgtgtccgtgggca

SEQ ID NO: 1129930 - DNA, 25 bp, Homo sapien
tgtctccaggttatgtgtccgtggg

SEQ ID NO: 1129931 - DNA, 25 bp, Homo sapien
ctttgtctccaggttatgtgtccgt

SEQ ID NO: 1129932 - DNA, 25 bp, Homo sapien
ccaggttatgtgtccgtgggcacac

SEQ ID NO: 1129933 - DNA, 25 bp, Homo sapien
gagggatttatcctctttcgctgag

SEQ ID NO: 1129934 - DNA, 25 bp, Homo sapien
ggtacaatgtacatcccacacgaat

SEQ ID NO: 1129935 - DNA, 25 bp, Homo sapien
cagataatcgcactcaatgaacaca

SEQ ID NO: 1129936 - DNA, 25 bp, Homo sapien
tagttctggtatacccctcagaggg

SEQ ID NO: 1129937 - DNA, 25 bp, Homo sapien
gagttttctgagtatagctgcagat

SEQ ID NO: 1129938 - DNA, 25 bp, Homo sapien
agttttctgagtatagctgcagatt

SEQ ID NO: 1129939 - DNA, 25 bp, Homo sapien
gtgaggctaccatcaaccgcctggt

SEQ ID NO: 1129940 - DNA, 25 bp, Homo sapien
cactttggcgaattggctgaggaga

SEQ ID NO: 1129941 - DNA, 25 bp, Homo sapien
tccagatgccggctcaagatgagta

SEQ ID NO: 1129942 - DNA, 25 bp, Homo sapien
caaaattattccacggagggtgagg

SEQ ID NO: 1129943 - DNA, 25 bp, Homo sapien
aaaggccttgagataatcttcttag

SEQ ID NO: 1129944 - DNA, 25 bp, Homo sapien
caggcatattaaggctccattgtat

SEQ ID NO: 1129945 - DNA, 25 bp, Homo sapien
acacttgaaatatgtcatgcaactc

SEQ ID NO: 1129946 - DNA, 25 bp, Homo sapien
ctttatctttgaccattaggagttg

SEQ ID NO: 1129947 - DNA, 25 bp, Homo sapien
ggaaatttggtaggccagagacata

SEQ ID NO: 1129948 - DNA, 25 bp, Homo sapien
gacataactgatctaaggcaaaaca

SEQ ID NO: 1129949 - DNA, 25 bp, Homo sapien
ggtttcagacctttgtataacggca

SEQ ID NO: 1129950 - DNA, 25 bp, Homo sapien
tagaaagcaagctagaccgtatatc

SEQ ID NO: 1129951 - DNA, 25 bp, Homo sapien
gatggcttctgactagtattactca

SEQ ID NO: 1129952 - DNA, 25 bp, Homo sapien
cagaaactgcagacaaggatggctt

SEQ ID NO: 1129953 - DNA, 25 bp, Homo sapien
caaggatggcttctgactagtatta

SEQ ID NO: 1129954 - DNA, 25 bp, Homo sapien
tgcaagtggaaaactaacatcattc

SEQ ID NO: 1129955 - DNA, 25 bp, Homo sapien
cacttaaacgttgatgaaactgaaa

SEQ ID NO: 1129956 - DNA, 25 bp, Homo sapien
tttttctggtgaccttcaagacctc

SEQ ID NO: 1129957 - DNA, 25 bp, Homo sapien
ggaatacatcctggtttgaactata

SEQ ID NO: 1129958 - DNA, 25 bp, Homo sapien
tcttaccaacttagcagcctcctag

SEQ ID NO: 1129959 - DNA, 25 bp, Homo sapien
ccagagctctcctgtaccaggcagt

SEQ ID NO: 1129960 - DNA, 25 bp, Homo sapien
actttctccatctgtggtcccagag

SEQ ID NO: 1129961 - DNA, 25 bp, Homo sapien
gagctctcctgtaccaggcagtcat

SEQ ID NO: 1129962 - DNA, 25 bp, Homo sapien
atctgtggtcccagagctctcctgt

SEQ ID NO: 1129963 - DNA, 25 bp, Homo sapien
aatttatgttcacgaatatgagcac

SEQ ID NO: 1129964 - DNA, 25 bp, Homo sapien
ttatgttcacgaatatgagcactgg

SEQ ID NO: 1129965 - DNA, 25 bp, Homo sapien
ataatttatgttcacgaatatgagc

SEQ ID NO: 1129966 - DNA, 25 bp, Homo sapien
tatttatctgattttgaatatcagc

SEQ ID NO: 1129967 - DNA, 25 bp, Homo sapien
tgctttggcaatgtatacatgaata

SEQ ID NO: 1129968 - DNA, 25 bp, Homo sapien
tttctgattctttaattggtagata

SEQ ID NO: 1129969 - DNA, 25 bp, Homo sapien
gattctttaattggtagatatttga

SEQ ID NO: 1129970 - DNA, 25 bp, Homo sapien
ctgagcttacagtaaattctaatga

SEQ ID NO: 1129971 - DNA, 25 bp, Homo sapien
catccagaacctggaaattgttccc

SEQ ID NO: 1129972 - DNA, 25 bp, Homo sapien
acttcatccagaacctggaaattgt

SEQ ID NO: 1129973 - DNA, 25 bp, Homo sapien
caccaacttcatccagaacctggaa

SEQ ID NO: 1129974 - DNA, 25 bp, Homo sapien
gaaattgttcccctttttctgagca

SEQ ID NO: 1129975 - DNA, 25 bp, Homo sapien
gatgctcgttataacctgcatgaaa

SEQ ID NO: 1129976 - DNA, 25 bp, Homo sapien
gctcgttataacctgcatgaaagtg

SEQ ID NO: 1129977 - DNA, 25 bp, Homo sapien
tgctcgttataacctgcatgaaagt

SEQ ID NO: 1129978 - DNA, 25 bp, Homo sapien
tgatgctcgttataacctgcatgaa

SEQ ID NO: 1129979 - DNA, 25 bp, Homo sapien
tgctctaaagtaatttggttctgca

SEQ ID NO: 1129980 - DNA, 25 bp, Homo sapien
gcctgctctaaagtaatttggttct

SEQ ID NO: 1129981 - DNA, 25 bp, Homo sapien
tgcctgctctaaagtaatttggttc

SEQ ID NO: 1129982 - DNA, 25 bp, Homo sapien
cctgctctaaagtaatttggttctg

SEQ ID NO: 1129983 - DNA, 25 bp, Homo sapien
tctattatttcatttgcgttttctt

SEQ ID NO: 1129984 - DNA, 25 bp, Homo sapien
taaagccatctattatttcatttgc

SEQ ID NO: 1129985 - DNA, 25 bp, Homo sapien
cttcattatctttctgtcggaccat

SEQ ID NO: 1129986 - DNA, 25 bp, Homo sapien
ttcatttgcgttttcttcattatct

SEQ ID NO: 1129987 - DNA, 25 bp, Homo sapien
ttcttatgttgggatgttaatgatg

SEQ ID NO: 1129988 - DNA, 25 bp, Homo sapien
tcttatgttgggatgttaatgatgt

SEQ ID NO: 1129989 - DNA, 25 bp, Homo sapien
atttcttatgttgggatgttaatga

SEQ ID NO: 1129990 - DNA, 25 bp, Homo sapien
tcatttcttatgttgggatgttaat

SEQ ID NO: 1129991 - DNA, 25 bp, Homo sapien
taaactctagacttgaccaaaggta

SEQ ID NO: 1129992 - DNA, 25 bp, Homo sapien
cctaaagagcttgcaattggatctc

SEQ ID NO: 1129993 - DNA, 25 bp, Homo sapien
tgttgggacctgaagcctaaaaaga

SEQ ID NO: 1129994 - DNA, 25 bp, Homo sapien
tgtgtcctccgaaaaacgtgctttg

SEQ ID NO: 1129995 - DNA, 25 bp, Homo sapien
ttcgtagagtatgatgagctatcac

SEQ ID NO: 1129996 - DNA, 25 bp, Homo sapien
tctaattacagagtccgtcactttt

SEQ ID NO: 1129997 - DNA, 25 bp, Homo sapien
cattagggttacatgcactttgagt

SEQ ID NO: 1129998 - DNA, 25 bp, Homo sapien
tgcactttgagttgttttcgtagag

SEQ ID NO: 1129999 - DNA, 25 bp, Homo sapien
tcagactctttacccattgcaagaa

SEQ ID NO: 1130000 - DNA, 25 bp, Homo sapien
ttgaacatccatgcaagatacttgg

SEQ ID NO: 1130001 - DNA, 25 bp, Homo sapien
tgcagtggaaagaaacgatgaactt

SEQ ID NO: 1130002 - DNA, 25 bp, Homo sapien
cttggtaagccggaattgcagtgga

SEQ ID NO: 1130003 - DNA, 25 bp, Homo sapien
cactgcctgaggcaatgtgatggcc

SEQ ID NO: 1130004 - DNA, 25 bp, Homo sapien
gatccataaggaggcatgctacact

SEQ ID NO: 1130005 - DNA, 25 bp, Homo sapien
taaagtcctagcagatccctagagg

SEQ ID NO: 1130006 - DNA, 25 bp, Homo sapien
ccaagcagagtgatgttgattctcc

SEQ ID NO: 1130007 - DNA, 25 bp, Homo sapien
gaacaacatatgtccccttgatgct

SEQ ID NO: 1130008 - DNA, 25 bp, Homo sapien
tccttgatgaacaacatatgtcccc

SEQ ID NO: 1130009 - DNA, 25 bp, Homo sapien
ttgatgaacaacatatgtccccttg

SEQ ID NO: 1130010 - DNA, 25 bp, Homo sapien
catatgtccccttgatgctatccat

SEQ ID NO: 1130011 - DNA, 25 bp, Homo sapien
ctttctttgtgatactatttgaact

SEQ ID NO: 1130012 - DNA, 25 bp, Homo sapien
tatttgaactacagctgactgacca

SEQ ID NO: 1130013 - DNA, 25 bp, Homo sapien
ttctttgtgatactatttgaactac

SEQ ID NO: 1130014 - DNA, 25 bp, Homo sapien
actatttgaactacagctgactgac

SEQ ID NO: 1130015 - DNA, 25 bp, Homo sapien
tcaataatcactaccaaccgaggta

SEQ ID NO: 1130016 - DNA, 25 bp, Homo sapien
caataatcactaccaaccgaggtaa

SEQ ID NO: 1130017 - DNA, 25 bp, Homo sapien
ccgcacccagtctctagttctttta

SEQ ID NO: 1130018 - DNA, 25 bp, Homo sapien
caccgcacccagtctctagttcttt

SEQ ID NO: 1130019 - DNA, 25 bp, Homo sapien
ccaccgcacccagtctctagttctt

SEQ ID NO: 1130020 - DNA, 25 bp, Homo sapien
accgcacccagtctctagttctttt

SEQ ID NO: 1130021 - DNA, 25 bp, Homo sapien
tttctgccacattgctaatactgac

SEQ ID NO: 1130022 - DNA, 25 bp, Homo sapien
gtttctgccacattgctaatactga

SEQ ID NO: 1130023 - DNA, 25 bp, Homo sapien
tgtaaatatctaaagtaccagaaat

SEQ ID NO: 1130024 - DNA, 25 bp, Homo sapien
gtcattagaatttagctttatagcc

SEQ ID NO: 1130025 - DNA, 25 bp, Homo sapien
agaaatactatagctggcatcagaa

SEQ ID NO: 1130026 - DNA, 25 bp, Homo sapien
tgtcattagaatttagctttatagc

SEQ ID NO: 1130027 - DNA, 25 bp, Homo sapien
agtgttctaaatctttccagttata

SEQ ID NO: 1130028 - DNA, 25 bp, Homo sapien
gtcctcaagccatctatggtctacc

SEQ ID NO: 1130029 - DNA, 25 bp, Homo sapien
gtgtcctcaagccatctatggtcta

SEQ ID NO: 1130030 - DNA, 25 bp, Homo sapien
ggtctaccttgggatagtgttctaa

SEQ ID NO: 1130031 - DNA, 25 bp, Homo sapien
gtatgttacggctgagaatctgctg

SEQ ID NO: 1130032 - DNA, 25 bp, Homo sapien
ctgtcctaatgctttcgaccctgaa

SEQ ID NO: 1130033 - DNA, 25 bp, Homo sapien
tctggtatgttacggctgagaatct

SEQ ID NO: 1130034 - DNA, 25 bp, Homo sapien
tttgtttctggtatgttacggctga

SEQ ID NO: 1130035 - DNA, 25 bp, Homo sapien
tattcataccaatccagagattgtt

SEQ ID NO: 1130036 - DNA, 25 bp, Homo sapien
ttcataccaatccagagattgtttc

SEQ ID NO: 1130037 - DNA, 25 bp, Homo sapien
attcataccaatccagagattgttt

SEQ ID NO: 1130038 - DNA, 25 bp, Homo sapien
tcataccaatccagagattgtttct

SEQ ID NO: 1130039 - DNA, 25 bp, Homo sapien
gtcgggttatcctcaaagagaagcc

SEQ ID NO: 1130040 - DNA, 25 bp, Homo sapien
catcagactaacagcagatctctcg

SEQ ID NO: 1130041 - DNA, 25 bp, Homo sapien
gcagaaactctacaagccagaagag

SEQ ID NO: 1130042 - DNA, 25 bp, Homo sapien
agtgggggccaatattcaacattct

SEQ ID NO: 1130043 - DNA, 25 bp, Homo sapien
agagctgtcagtttgcccactgact

SEQ ID NO: 1130044 - DNA, 25 bp, Homo sapien
tgttctcattgggaaatccttgccc

SEQ ID NO: 1130045 - DNA, 25 bp, Homo sapien
gccattcccagattggtgtgccaaa

SEQ ID NO: 1130046 - DNA, 25 bp, Homo sapien
tgacttcttcctgcgcagttgctga

SEQ ID NO: 1130047 - DNA, 25 bp, Homo sapien
tttctcctccatgtagatctttgtc

SEQ ID NO: 1130048 - DNA, 25 bp, Homo sapien
gtttctcctccatgtagatctttgt

SEQ ID NO: 1130049 - DNA, 25 bp, Homo sapien
ttttcctatgttggagttgctgttc

SEQ ID NO: 1130050 - DNA, 25 bp, Homo sapien
attttcctatgttggagttgctgtt

SEQ ID NO: 1130051 - DNA, 25 bp, Homo sapien
tattttcctatgttggagttgctgt

SEQ ID NO: 1130052 - DNA, 25 bp, Homo sapien
acaaaaatcctggagtagaaatatg

SEQ ID NO: 1130053 - DNA, 25 bp, Homo sapien
gacatgatcggttactgtacttttt

SEQ ID NO: 1130054 - DNA, 25 bp, Homo sapien
tacttcctacaaaaatcctggagta

SEQ ID NO: 1130055 - DNA, 25 bp, Homo sapien
gatctggggacatgatcggttactg

SEQ ID NO: 1130056 - DNA, 25 bp, Homo sapien
tcaaccacagaacatggtcagaact

SEQ ID NO: 1130057 - DNA, 25 bp, Homo sapien
taaagtatcttgtacactttcaacc

SEQ ID NO: 1130058 - DNA, 25 bp, Homo sapien
tatcttgtacactttcaaccacaga

SEQ ID NO: 1130059 - DNA, 25 bp, Homo sapien
aagtatcttgtacactttcaaccac

SEQ ID NO: 1130060 - DNA, 25 bp, Homo sapien
tagggagaatatatgtctactcatg

SEQ ID NO: 1130061 - DNA, 25 bp, Homo sapien
gattgcttctgttggtattagtcta

SEQ ID NO: 1130062 - DNA, 25 bp, Homo sapien
gatttaggtcattattcagcacaga

SEQ ID NO: 1130063 - DNA, 25 bp, Homo sapien
cactgtgggccaactattgcaaaac

SEQ ID NO: 1130064 - DNA, 25 bp, Homo sapien
taaccataaatctgtggagctgaga

SEQ ID NO: 1130065 - DNA, 25 bp, Homo sapien
gaataactagtaaccataaatctgt

SEQ ID NO: 1130066 - DNA, 25 bp, Homo sapien
tgttaaaggcaccaaagtcttttga

SEQ ID NO: 1130067 - DNA, 25 bp, Homo sapien
tagtaaccataaatctgtggagctg

SEQ ID NO: 1130068 - DNA, 25 bp, Homo sapien
tttctcgtatatatctccctaccat

SEQ ID NO: 1130069 - DNA, 25 bp, Homo sapien
ctcattttctcgtatatatctccct

SEQ ID NO: 1130070 - DNA, 25 bp, Homo sapien
catctctgcactaccgtagaattgt

SEQ ID NO: 1130071 - DNA, 25 bp, Homo sapien
ctaccatctctgcactaccgtagaa

SEQ ID NO: 1130072 - DNA, 25 bp, Homo sapien
tcttgatttctacaaagccgttgct

SEQ ID NO: 1130073 - DNA, 25 bp, Homo sapien
ataatccaggaaaccaaatggtcct

SEQ ID NO: 1130074 - DNA, 25 bp, Homo sapien
gcttgcattttataatccaggaaac

SEQ ID NO: 1130075 - DNA, 25 bp, Homo sapien
gatcatatactggagtgatcgttct

SEQ ID NO: 1130076 - DNA, 25 bp, Homo sapien
gtgcaaagccaaaactgacttttct

SEQ ID NO: 1130077 - DNA, 25 bp, Homo sapien
ctggaagctttcaagtgcaaagcca

SEQ ID NO: 1130078 - DNA, 25 bp, Homo sapien
caagtgcaaagccaaaactgacttt

SEQ ID NO: 1130079 - DNA, 25 bp, Homo sapien
gctttcaagtgcaaagccaaaactg

SEQ ID NO: 1130080 - DNA, 25 bp, Homo sapien
caaaagccttgtcactagtacacaa

SEQ ID NO: 1130081 - DNA, 25 bp, Homo sapien
tctgagaggtgttgccttgcatctg

SEQ ID NO: 1130082 - DNA, 25 bp, Homo sapien
taaacatgtgtaagcctaaggaaga

SEQ ID NO: 1130083 - DNA, 25 bp, Homo sapien
aaatcttggagtgggaatgtcatca

SEQ ID NO: 1130084 - DNA, 25 bp, Homo sapien
ttaagcaccagttctataggaagag

SEQ ID NO: 1130085 - DNA, 25 bp, Homo sapien
acgagaatgctcagcattcccagaa

SEQ ID NO: 1130086 - DNA, 25 bp, Homo sapien
aagtaatctatattctttacacgag

SEQ ID NO: 1130087 - DNA, 25 bp, Homo sapien
gagaatgctcagcattcccagaata

SEQ ID NO: 1130088 - DNA, 25 bp, Homo sapien
atattctttacacgagaatgctcag

SEQ ID NO: 1130089 - DNA, 25 bp, Homo sapien
tcaatgccttactgtttctatgtcc

SEQ ID NO: 1130090 - DNA, 25 bp, Homo sapien
gctgtacatagatacattctgggat

SEQ ID NO: 1130091 - DNA, 25 bp, Homo sapien
taaaagaactgcaagtacaccagtg

SEQ ID NO: 1130092 - DNA, 25 bp, Homo sapien
cacatacattgttaggctgaggtta

SEQ ID NO: 1130093 - DNA, 25 bp, Homo sapien
tgatttccagtgggcagattatcaa

SEQ ID NO: 1130094 - DNA, 25 bp, Homo sapien
tccagtgggcagattatcaaaaata

SEQ ID NO: 1130095 - DNA, 25 bp, Homo sapien
tttccagtgggcagattatcaaaaa

SEQ ID NO: 1130096 - DNA, 25 bp, Homo sapien
ccagtgggcagattatcaaaaataa

SEQ ID NO: 1130097 - DNA, 25 bp, Homo sapien
cagccagcataagggccctggagcc

SEQ ID NO: 1130098 - DNA, 25 bp, Homo sapien
ccagcataagggccctggagccagt

SEQ ID NO: 1130099 - DNA, 25 bp, Homo sapien
ctgtgagggcagccagcataagggc

SEQ ID NO: 1130100 - DNA, 25 bp, Homo sapien
gtgagggcagccagcataagggccc

SEQ ID NO: 1130101 - DNA, 25 bp, Homo sapien
tctcagttcagggtagatcctgtca

SEQ ID NO: 1130102 - DNA, 25 bp, Homo sapien
cagggtagatcctgtcaccaggctg

SEQ ID NO: 1130103 - DNA, 25 bp, Homo sapien
ttcagggtagatcctgtcaccaggc

SEQ ID NO: 1130104 - DNA, 25 bp, Homo sapien
tcagttcagggtagatcctgtcacc

SEQ ID NO: 1130105 - DNA, 25 bp, Homo sapien
tatgggagtggaactcttttgagag

SEQ ID NO: 1130106 - DNA, 25 bp, Homo sapien
ggatcacagtccttgtacaccgacc

SEQ ID NO: 1130107 - DNA, 25 bp, Homo sapien
cactggctcatattgagagatggcc

SEQ ID NO: 1130108 - DNA, 25 bp, Homo sapien
agtccttgtacaccgacccatgggc

SEQ ID NO: 1130109 - DNA, 25 bp, Homo sapien
gccccatattctttggatccagttg

SEQ ID NO: 1130110 - DNA, 25 bp, Homo sapien
tatgtatttgcactagtaaggatgg

SEQ ID NO: 1130111 - DNA, 25 bp, Homo sapien
gatccagttggttccaaatacaaga

SEQ ID NO: 1130112 - DNA, 25 bp, Homo sapien
catgaagagcaaatgccatgggtgc

SEQ ID NO: 1130113 - DNA, 25 bp, Homo sapien
tcccaagttccagcaattcttgttc

SEQ ID NO: 1130114 - DNA, 25 bp, Homo sapien
caagttccagcaattcttgttcctc

SEQ ID NO: 1130115 - DNA, 25 bp, Homo sapien
cctcccaagttccagcaattcttgt

SEQ ID NO: 1130116 - DNA, 25 bp, Homo sapien
ccaagttccagcaattcttgttcct

SEQ ID NO: 1130117 - DNA, 25 bp, Homo sapien
ggtgcccagtctgctagatcattta

SEQ ID NO: 1130118 - DNA, 25 bp, Homo sapien
cattttgatccattgaatacggtgg

SEQ ID NO: 1130119 - DNA, 25 bp, Homo sapien
caatttgagagtgtagccctttgat

SEQ ID NO: 1130120 - DNA, 25 bp, Homo sapien
caacatcggacagttgctgaaagca

SEQ ID NO: 1130121 - DNA, 25 bp, Homo sapien
atgcttcctggacagttggatccaa

SEQ ID NO: 1130122 - DNA, 25 bp, Homo sapien
ctggatggacgggatgctagccttg

SEQ ID NO: 1130123 - DNA, 25 bp, Homo sapien
atctctggatggacgggatgctagc

SEQ ID NO: 1130124 - DNA, 25 bp, Homo sapien
gcttcctggacagttggatccaatc

SEQ ID NO: 1130125 - DNA, 25 bp, Homo sapien
gttatcattgcacatgaagtttctg

SEQ ID NO: 1130126 - DNA, 25 bp, Homo sapien
tttcgttgaagacggcatttcaacc

SEQ ID NO: 1130127 - DNA, 25 bp, Homo sapien
gaagtttctgattttcgttgaagac

SEQ ID NO: 1130128 - DNA, 25 bp, Homo sapien
tcattgcacatgaagtttctgattt

SEQ ID NO: 1130129 - DNA, 25 bp, Homo sapien
tgtaggtaaaggataaaccgctatc

SEQ ID NO: 1130130 - DNA, 25 bp, Homo sapien
tgttttaggcttctccatcgccttg

SEQ ID NO: 1130131 - DNA, 25 bp, Homo sapien
caagtggacttttgccagtccactg

SEQ ID NO: 1130132 - DNA, 25 bp, Homo sapien
ttctccatcgccttgtaggtaaagg

SEQ ID NO: 1130133 - DNA, 25 bp, Homo sapien
gagtatctggatcttccacactttg

SEQ ID NO: 1130134 - DNA, 25 bp, Homo sapien
cattttctgaggagtcaatagtctc

SEQ ID NO: 1130135 - DNA, 25 bp, Homo sapien
catattaacaggatgcgagtatctg

SEQ ID NO: 1130136 - DNA, 25 bp, Homo sapien
catctgcgactttgggaggataatt

SEQ ID NO: 1130137 - DNA, 25 bp, Homo sapien
tgaagcagcctattggtataccctg

SEQ ID NO: 1130138 - DNA, 25 bp, Homo sapien
tgatacggcccataaaggcggccag

SEQ ID NO: 1130139 - DNA, 25 bp, Homo sapien
cacgaaatggctgtcagtggcctga

SEQ ID NO: 1130140 - DNA, 25 bp, Homo sapien
aaatgatcataaagctcccaaaggg

SEQ ID NO: 1130141 - DNA, 25 bp, Homo sapien
tatctgacactttcttatgtaaatc

SEQ ID NO: 1130142 - DNA, 25 bp, Homo sapien
tctgacactttcttatgtaaatctt

SEQ ID NO: 1130143 - DNA, 25 bp, Homo sapien
gacactttcttatgtaaatcttctt

SEQ ID NO: 1130144 - DNA, 25 bp, Homo sapien
atatctgacactttcttatgtaaat

SEQ ID NO: 1130145 - DNA, 25 bp, Homo sapien
ctatgatcataaaccaaataagcaa

SEQ ID NO: 1130146 - DNA, 25 bp, Homo sapien
gctatgatcataaaccaaataagca

SEQ ID NO: 1130147 - DNA, 25 bp, Homo sapien
gtgatgattttttctcatctgtcat

SEQ ID NO: 1130148 - DNA, 25 bp, Homo sapien
gttggtgatgattttttctcatctg

SEQ ID NO: 1130149 - DNA, 25 bp, Homo sapien
ggtgatgattttttctcatctgtca

SEQ ID NO: 1130150 - DNA, 25 bp, Homo sapien
tggtgatgattttttctcatctgtc

SEQ ID NO: 1130151 - DNA, 25 bp, Homo sapien
ggagtctgttcgtgtgaatgtgcct

SEQ ID NO: 1130152 - DNA, 25 bp, Homo sapien
tactgtcccttgtatggatgctggg

SEQ ID NO: 1130153 - DNA, 25 bp, Homo sapien
cactgcaaagcttccaagagagatg

SEQ ID NO: 1130154 - DNA, 25 bp, Homo sapien
tgaatgtgcctcatctgtggcattc

SEQ ID NO: 1130155 - DNA, 25 bp, Homo sapien
tacttggaagacgaaggcaatacct

SEQ ID NO: 1130156 - DNA, 25 bp, Homo sapien
cgaaggcaataccttgtgcaaagga

SEQ ID NO: 1130157 - DNA, 25 bp, Homo sapien
tgtgttagttacttggaagacgaag

SEQ ID NO: 1130158 - DNA, 25 bp, Homo sapien
caataccttgtgcaaaggaggcatt

SEQ ID NO: 1130159 - DNA, 25 bp, Homo sapien
gatgctggcatacttaaagactggg

SEQ ID NO: 1130160 - DNA, 25 bp, Homo sapien
caaggcgtgcagtaccctggttcat

SEQ ID NO: 1130161 - DNA, 25 bp, Homo sapien
tgtcctctggataacgactcagttc

SEQ ID NO: 1130162 - DNA, 25 bp, Homo sapien
gataaagggagtggacctctacttc

SEQ ID NO: 1130163 - DNA, 25 bp, Homo sapien
gtggctcctatgcagcagatctgtc

SEQ ID NO: 1130164 - DNA, 25 bp, Homo sapien
tatgcagcagatctgtcatctctac

SEQ ID NO: 1130165 - DNA, 25 bp, Homo sapien
atggtggctcctatgcagcagatct

SEQ ID NO: 1130166 - DNA, 25 bp, Homo sapien
tcctatgcagcagatctgtcatctc

SEQ ID NO: 1130167 - DNA, 25 bp, Homo sapien
ctaggaccatgatcatcaaaactat

SEQ ID NO: 1130168 - DNA, 25 bp, Homo sapien
tgatcatcaaaactatctcttctaa

SEQ ID NO: 1130169 - DNA, 25 bp, Homo sapien
tttcttctgaatcatccctaggtac

SEQ ID NO: 1130170 - DNA, 25 bp, Homo sapien
ttcttctgaatcatccctaggtact

SEQ ID NO: 1130171 - DNA, 25 bp, Homo sapien
gatcataatcaagcaccaggttgag

SEQ ID NO: 1130172 - DNA, 25 bp, Homo sapien
tcataatagccagattctcgagaat

SEQ ID NO: 1130173 - DNA, 25 bp, Homo sapien
tagccagattctcgagaatgacttc

SEQ ID NO: 1130174 - DNA, 25 bp, Homo sapien
gccagattctcgagaatgacttcca

SEQ ID NO: 1130175 - DNA, 25 bp, Homo sapien
taatagccagattctcgagaatgac

SEQ ID NO: 1130176 - DNA, 25 bp, Homo sapien
caccaaaaaaagaatcatccctaca

SEQ ID NO: 1130177 - DNA, 25 bp, Homo sapien
ctcaccaaaaaaagaatcatcccta

SEQ ID NO: 1130178 - DNA, 25 bp, Homo sapien
tcaccaaaaaaagaatcatccctac

SEQ ID NO: 1130179 - DNA, 25 bp, Homo sapien
ctctcttgtaaagggtcaggaccat

SEQ ID NO: 1130180 - DNA, 25 bp, Homo sapien
gagcacagatgggtataacctttca

SEQ ID NO: 1130181 - DNA, 25 bp, Homo sapien
gaacaactctgctcgtttccactct

SEQ ID NO: 1130182 - DNA, 25 bp, Homo sapien
tatgttgactcaactcctcattaga

SEQ ID NO: 1130183 - DNA, 25 bp, Homo sapien
gaatcagatgatttgaaatgactcc

SEQ ID NO: 1130184 - DNA, 25 bp, Homo sapien
ctccaaatggttctaccagctgtaa

SEQ ID NO: 1130185 - DNA, 25 bp, Homo sapien
ttagaatcagatgatttgaaatgac

SEQ ID NO: 1130186 - DNA, 25 bp, Homo sapien
tttgaaatgactccaaatggttcta

SEQ ID NO: 1130187 - DNA, 25 bp, Homo sapien
cttctgggataaatgaactctcact

SEQ ID NO: 1130188 - DNA, 25 bp, Homo sapien
tcttttatacttctgggataaatga

SEQ ID NO: 1130189 - DNA, 25 bp, Homo sapien
tatacttctgggataaatgaactct

SEQ ID NO: 1130190 - DNA, 25 bp, Homo sapien
ctgggataaatgaactctcactggc

SEQ ID NO: 1130191 - DNA, 25 bp, Homo sapien
atccaagctcttgccttcgatcaaa

SEQ ID NO: 1130192 - DNA, 25 bp, Homo sapien
acatccaagctcttgccttcgatca

SEQ ID NO: 1130193 - DNA, 25 bp, Homo sapien
atcacacatccaagctcttgccttc

SEQ ID NO: 1130194 - DNA, 25 bp, Homo sapien
acacatccaagctcttgccttcgat

SEQ ID NO: 1130195 - DNA, 25 bp, Homo sapien
ttatatttctcagacaggtctacct

SEQ ID NO: 1130196 - DNA, 25 bp, Homo sapien
gaatcctcagtactagatttttata

SEQ ID NO: 1130197 - DNA, 25 bp, Homo sapien
acaggtctaccttcacacatctccc

SEQ ID NO: 1130198 - DNA, 25 bp, Homo sapien
ttggaatcctcagtactagattttt

SEQ ID NO: 1130199 - DNA, 25 bp, Homo sapien
ttatttccaaaagtagttgaatcag

SEQ ID NO: 1130200 - DNA, 25 bp, Homo sapien
agtagttgaatcagggacagttttt

SEQ ID NO: 1130201 - DNA, 25 bp, Homo sapien
agttgaatcagggacagtttttgtc

SEQ ID NO: 1130202 - DNA, 25 bp, Homo sapien
tcagggacagtttttgtcatttcca

SEQ ID NO: 1130203 - DNA, 25 bp, Homo sapien
aatgctaaatctggaaggaactttc

SEQ ID NO: 1130204 - DNA, 25 bp, Homo sapien
ggaaggaactttcacatcagtaaca

SEQ ID NO: 1130205 - DNA, 25 bp, Homo sapien
gagatccagaagatgtaagtctaac

SEQ ID NO: 1130206 - DNA, 25 bp, Homo sapien
tcacgtagttacaataatccataag

SEQ ID NO: 1130207 - DNA, 25 bp, Homo sapien
catattgagcatcctagattcagag

SEQ ID NO: 1130208 - DNA, 25 bp, Homo sapien
tagattcagagaaccactgccccat

SEQ ID NO: 1130209 - DNA, 25 bp, Homo sapien
tgatttcgagaaatcatattgagca

SEQ ID NO: 1130210 - DNA, 25 bp, Homo sapien
tcctagattcagagaaccactgccc

SEQ ID NO: 1130211 - DNA, 25 bp, Homo sapien
catttgtctctgcttaaatattgga

SEQ ID NO: 1130212 - DNA, 25 bp, Homo sapien
tctccactgccctgataagtcctct

SEQ ID NO: 1130213 - DNA, 25 bp, Homo sapien
ataagtcctcttcatatgccatttg

SEQ ID NO: 1130214 - DNA, 25 bp, Homo sapien
ttttcatcaccaattctctccactg

SEQ ID NO: 1130215 - DNA, 25 bp, Homo sapien
taagtattagctggagcggtgaaac

SEQ ID NO: 1130216 - DNA, 25 bp, Homo sapien
tgttggacagtggaactgctgtttc

SEQ ID NO: 1130217 - DNA, 25 bp, Homo sapien
tagctggagcggtgaaacagtcaga

SEQ ID NO: 1130218 - DNA, 25 bp, Homo sapien
ctgtttctcactatggatgtcatca

SEQ ID NO: 1130219 - DNA, 25 bp, Homo sapien
gctcgtatagtttccactcacattc

SEQ ID NO: 1130220 - DNA, 25 bp, Homo sapien
ccgttagcagctcgtatagtttcca

SEQ ID NO: 1130221 - DNA, 25 bp, Homo sapien
taaatgccttgtcccgttagcagct

SEQ ID NO: 1130222 - DNA, 25 bp, Homo sapien
gccttgtcccgttagcagctcgtat

SEQ ID NO: 1130223 - DNA, 25 bp, Homo sapien
tcttatctctttactgtcttcaata

SEQ ID NO: 1130224 - DNA, 25 bp, Homo sapien
aagctttaaagccaggtctacaaag

SEQ ID NO: 1130225 - DNA, 25 bp, Homo sapien
acaaagcttagagtcagttgctgac

SEQ ID NO: 1130226 - DNA, 25 bp, Homo sapien
tcagttgctgactgtagcagttaag

SEQ ID NO: 1130227 - DNA, 25 bp, Homo sapien
cacacaaaaccccaatattagagag

SEQ ID NO: 1130228 - DNA, 25 bp, Homo sapien
tacaggtgcacccaatcaggcctgg

SEQ ID NO: 1130229 - DNA, 25 bp, Homo sapien
taaatgccgaaaggtagaattgctg

SEQ ID NO: 1130230 - DNA, 25 bp, Homo sapien
tattagagagttctagttgccaggc

SEQ ID NO: 1130231 - DNA, 25 bp, Homo sapien
aacagatgtgaacggagggccgcat

SEQ ID NO: 1130232 - DNA, 25 bp, Homo sapien
aatggaatgtttgtggaagcctggg

SEQ ID NO: 1130233 - DNA, 25 bp, Homo sapien
ggaacagatgtgaacggagggccgc

SEQ ID NO: 1130234 - DNA, 25 bp, Homo sapien
aatgtttgtggaagcctgggaacag

SEQ ID NO: 1130235 - DNA, 25 bp, Homo sapien
tattagtcatttgtaggcttccctg

SEQ ID NO: 1130236 - DNA, 25 bp, Homo sapien
tactaatgcagaataggaaaccatg

SEQ ID NO: 1130237 - DNA, 25 bp, Homo sapien
taaaatacctgctagtgataacgaa

SEQ ID NO: 1130238 - DNA, 25 bp, Homo sapien
tgattagcagtaaatcggcccttaa

SEQ ID NO: 1130239 - DNA, 25 bp, Homo sapien
tgtttttactgtatggttgtacttc

SEQ ID NO: 1130240 - DNA, 25 bp, Homo sapien
taaaggagatatgtctctcgtcata

SEQ ID NO: 1130241 - DNA, 25 bp, Homo sapien
gtctctcgtcatattaaaggtaatt

SEQ ID NO: 1130242 - DNA, 25 bp, Homo sapien
tttccctctaatgacataaaggaga

SEQ ID NO: 1130243 - DNA, 25 bp, Homo sapien
taaagagttctgcagcattgttagg

SEQ ID NO: 1130244 - DNA, 25 bp, Homo sapien
gaaaccacggataggatgacgaaca

SEQ ID NO: 1130245 - DNA, 25 bp, Homo sapien
cattgttaggatattgaaaccacgg

SEQ ID NO: 1130246 - DNA, 25 bp, Homo sapien
tgttttagggacattagccttccca

SEQ ID NO: 1130247 - DNA, 25 bp, Homo sapien
gcacgagtgacacctggtaccagga

SEQ ID NO: 1130248 - DNA, 25 bp, Homo sapien
ggcccatctggacggcggaagataa

SEQ ID NO: 1130249 - DNA, 25 bp, Homo sapien
aagataagctggatggctccttgga

SEQ ID NO: 1130250 - DNA, 25 bp, Homo sapien
ggctatcattcgagagcagcagacg

SEQ ID NO: 1130251 - DNA, 25 bp, Homo sapien
tatgaggacaatttagaaggagcta

SEQ ID NO: 1130252 - DNA, 25 bp, Homo sapien
cctctacgcacaagcccagaagctg

SEQ ID NO: 1130253 - DNA, 25 bp, Homo sapien
gagctaagttggctggcgcctgcct

SEQ ID NO: 1130254 - DNA, 25 bp, Homo sapien
agtacccgccgcctctacgcacaag

SEQ ID NO: 1130255 - DNA, 25 bp, Homo sapien
tgagctgagatctccccattgtact

SEQ ID NO: 1130256 - DNA, 25 bp, Homo sapien
cagcctgggcaacaagagcgaaact

SEQ ID NO: 1130257 - DNA, 25 bp, Homo sapien
cttgaaactgggaggcggaggccac

SEQ ID NO: 1130258 - DNA, 25 bp, Homo sapien
tgaaactgggaggcggaggccacag

SEQ ID NO: 1130259 - DNA, 25 bp, Homo sapien
tttctcaatcagtctttgaatgaaa

SEQ ID NO: 1130260 - DNA, 25 bp, Homo sapien
ttttctcaatcagtctttgaatgaa

SEQ ID NO: 1130261 - DNA, 25 bp, Homo sapien
gattttctcaatcagtctttgaatg

SEQ ID NO: 1130262 - DNA, 25 bp, Homo sapien
gagattttctcaatcagtctttgaa

SEQ ID NO: 1130263 - DNA, 25 bp, Homo sapien
gaccatagctcttggaataaatctt

SEQ ID NO: 1130264 - DNA, 25 bp, Homo sapien
tggaatgtctgaaggttaaactcat

SEQ ID NO: 1130265 - DNA, 25 bp, Homo sapien
ggtgactgaccatagctcttggaat

SEQ ID NO: 1130266 - DNA, 25 bp, Homo sapien
aatcttacgcatttcttgaagcagc

SEQ ID NO: 1130267 - DNA, 25 bp, Homo sapien
tcaggaggcctgtcactaagccatg

SEQ ID NO: 1130268 - DNA, 25 bp, Homo sapien
ctaattctgtagcagtccggttaca

SEQ ID NO: 1130269 - DNA, 25 bp, Homo sapien
cagttgcattcggtgatttcccagg

SEQ ID NO: 1130270 - DNA, 25 bp, Homo sapien
ccaatctactgaaggactttggctg

SEQ ID NO: 1130271 - DNA, 25 bp, Homo sapien
tgtagagtgctcaaaaccattcatt

SEQ ID NO: 1130272 - DNA, 25 bp, Homo sapien
acctattgcctatgtaaccttggtg

SEQ ID NO: 1130273 - DNA, 25 bp, Homo sapien
ttggtgtactactcaactacactgg

SEQ ID NO: 1130274 - DNA, 25 bp, Homo sapien
gtgcacaattatagtatgttatttc

SEQ ID NO: 1130275 - DNA, 25 bp, Homo sapien
tgttttcttattttcacagcctttc

SEQ ID NO: 1130276 - DNA, 25 bp, Homo sapien
actgttttcttattttcacagcctt

SEQ ID NO: 1130277 - DNA, 25 bp, Homo sapien
aactgttttcttattttcacagcct

SEQ ID NO: 1130278 - DNA, 25 bp, Homo sapien
ttttcttattttcacagcctttcat

SEQ ID NO: 1130279 - DNA, 25 bp, Homo sapien
cccctttgatatagatctggctgaa

SEQ ID NO: 1130280 - DNA, 25 bp, Homo sapien
tagggcatgcccctttgatatagat

SEQ ID NO: 1130281 - DNA, 25 bp, Homo sapien
ctagggattccgatagggcatgccc

SEQ ID NO: 1130282 - DNA, 25 bp, Homo sapien
gatctggctgaatatcattctgttt

SEQ ID NO: 1130283 - DNA, 25 bp, Homo sapien
ccttcactgccggagggggcatcga

SEQ ID NO: 1130284 - DNA, 25 bp, Homo sapien
gagcagttgcctgcttccagtctgg

SEQ ID NO: 1130285 - DNA, 25 bp, Homo sapien
ttcaaagtcaagtatggtaaagtgc

SEQ ID NO: 1130286 - DNA, 25 bp, Homo sapien
tattttagagcagttgcctgcttcc

SEQ ID NO: 1130287 - DNA, 25 bp, Homo sapien
ggctatgtaatatctgtatgcttca

SEQ ID NO: 1130288 - DNA, 25 bp, Homo sapien
ctgtatgcttcactgtcatgtgcaa

SEQ ID NO: 1130289 - DNA, 25 bp, Homo sapien
tggctatgtaatatctgtatgcttc

SEQ ID NO: 1130290 - DNA, 25 bp, Homo sapien
atctgtatgcttcactgtcatgtgc

SEQ ID NO: 1130291 - DNA, 25 bp, Homo sapien
agtactttccgtacttcaatcacct

SEQ ID NO: 1130292 - DNA, 25 bp, Homo sapien
caatggcatttcgacgtgtctgtgt

SEQ ID NO: 1130293 - DNA, 25 bp, Homo sapien
catttcgacgtgtctgtgttttctc

SEQ ID NO: 1130294 - DNA, 25 bp, Homo sapien
tccagtaagtactttccgtacttca

SEQ ID NO: 1130295 - DNA, 25 bp, Homo sapien
ggctctttacgacattctctcactg

SEQ ID NO: 1130296 - DNA, 25 bp, Homo sapien
tgaggattcaagtttggctctttac

SEQ ID NO: 1130297 - DNA, 25 bp, Homo sapien
atacaaagcttgggacccagtgctt

SEQ ID NO: 1130298 - DNA, 25 bp, Homo sapien
gaaactgtaccaagtctttgtcaga

SEQ ID NO: 1130299 - DNA, 25 bp, Homo sapien
caatattgcataggatgaattccag

SEQ ID NO: 1130300 - DNA, 25 bp, Homo sapien
aattatcaatattgcataggatgaa

SEQ ID NO: 1130301 - DNA, 25 bp, Homo sapien
tatcaatattgcataggatgaattc

SEQ ID NO: 1130302 - DNA, 25 bp, Homo sapien
ttaattatcaatattgcataggatg

SEQ ID NO: 1130303 - DNA, 25 bp, Homo sapien
tttgtgtccttcaaaacttacttca

SEQ ID NO: 1130304 - DNA, 25 bp, Homo sapien
ctatgcctctgctttgtgtccttca

SEQ ID NO: 1130305 - DNA, 25 bp, Homo sapien
tgtgtccttcaaaacttacttcaaa

SEQ ID NO: 1130306 - DNA, 25 bp, Homo sapien
tccttcaaaacttacttcaaacata

SEQ ID NO: 1130307 - DNA, 25 bp, Homo sapien
aaggctctgccctatatctggtata

SEQ ID NO: 1130308 - DNA, 25 bp, Homo sapien
gcagaagccaacttttgcagcagac

SEQ ID NO: 1130309 - DNA, 25 bp, Homo sapien
tgttctgtctttccaacagtggcga

SEQ ID NO: 1130310 - DNA, 25 bp, Homo sapien
tctacttttcctctagcagaagcca

SEQ ID NO: 1130311 - DNA, 25 bp, Homo sapien
gaagaaacacaaatgatgaagttgg

SEQ ID NO: 1130312 - DNA, 25 bp, Homo sapien
ctacaggaagaaacacaaatgatga

SEQ ID NO: 1130313 - DNA, 25 bp, Homo sapien
caggaagaaacacaaatgatgaagt

SEQ ID NO: 1130314 - DNA, 25 bp, Homo sapien
aatgatgaagttgggtttgttgagc

SEQ ID NO: 1130315 - DNA, 25 bp, Homo sapien
ctcagcaagtactgctgagtgccca

SEQ ID NO: 1130316 - DNA, 25 bp, Homo sapien
gctgagtgcccagtaagtgcagcaa

SEQ ID NO: 1130317 - DNA, 25 bp, Homo sapien
actcagcaagtactgctgagtgccc

SEQ ID NO: 1130318 - DNA, 25 bp, Homo sapien
ctgctgagtgcccagtaagtgcagc

SEQ ID NO: 1130319 - DNA, 25 bp, Homo sapien
tagatgtcaatgaacagtcactaac

SEQ ID NO: 1130320 - DNA, 25 bp, Homo sapien
tgctgcattgcagatttcctcactt

SEQ ID NO: 1130321 - DNA, 25 bp, Homo sapien
ctaacaatggttttggtatgctgca

SEQ ID NO: 1130322 - DNA, 25 bp, Homo sapien
gatttacacgacagttcatagccag

SEQ ID NO: 1130323 - DNA, 25 bp, Homo sapien
ccttctgccgcctttgctctaaaaa

SEQ ID NO: 1130324 - DNA, 25 bp, Homo sapien
aacatttgagtagttgcactgaggg

SEQ ID NO: 1130325 - DNA, 25 bp, Homo sapien
tgcactgagggcagatcataacccc

SEQ ID NO: 1130326 - DNA, 25 bp, Homo sapien
gagtgaacaaaaccaccccatgaaa

SEQ ID NO: 1130327 - DNA, 25 bp, Homo sapien
gactggagtggatgagcctgtccct

SEQ ID NO: 1130328 - DNA, 25 bp, Homo sapien
agtggactctgggatccaagtcaaa

SEQ ID NO: 1130329 - DNA, 25 bp, Homo sapien
gactgagccataattccaggactgg

SEQ ID NO: 1130330 - DNA, 25 bp, Homo sapien
caactctgtgtatggaatcgggtaa

SEQ ID NO: 1130331 - DNA, 25 bp, Homo sapien
tacttgtgacaagacatcatgcttg

SEQ ID NO: 1130332 - DNA, 25 bp, Homo sapien
gttacccgtacaaagtgagtggtga

SEQ ID NO: 1130333 - DNA, 25 bp, Homo sapien
gaataagtcaagtccaactggcttg

SEQ ID NO: 1130334 - DNA, 25 bp, Homo sapien
tcatgcttggtactttggttacccg

SEQ ID NO: 1130335 - DNA, 25 bp, Homo sapien
ttccccttgaactattcttactagc

SEQ ID NO: 1130336 - DNA, 25 bp, Homo sapien
gactttcaacccaatagacatctct

SEQ ID NO: 1130337 - DNA, 25 bp, Homo sapien
tattcttactagcaacagtctgtgg

SEQ ID NO: 1130338 - DNA, 25 bp, Homo sapien
cacggtaaattcattcacaacatca

SEQ ID NO: 1130339 - DNA, 25 bp, Homo sapien
tgatatatttgggtttgtggagatg

SEQ ID NO: 1130340 - DNA, 25 bp, Homo sapien
gctgatatatttgggtttgtggaga

SEQ ID NO: 1130341 - DNA, 25 bp, Homo sapien
atatatttgggtttgtggagatgtc

SEQ ID NO: 1130342 - DNA, 25 bp, Homo sapien
ctgctgatatatttgggtttgtgga

SEQ ID NO: 1130343 - DNA, 25 bp, Homo sapien
tagtatgcagttcttgtagctgctg

SEQ ID NO: 1130344 - DNA, 25 bp, Homo sapien
ccccttgtgaatagtatgcagttct

SEQ ID NO: 1130345 - DNA, 25 bp, Homo sapien
tgggtctgtccaatatcccattgct

SEQ ID NO: 1130346 - DNA, 25 bp, Homo sapien
gggtctgtccaatatcccattgctt

SEQ ID NO: 1130347 - DNA, 25 bp, Homo sapien
ccaagacactagcctcagctcttag

SEQ ID NO: 1130348 - DNA, 25 bp, Homo sapien
tagaatactaagaatacgatattgc

SEQ ID NO: 1130349 - DNA, 25 bp, Homo sapien
cagctcttagaatactaagaatacg

SEQ ID NO: 1130350 - DNA, 25 bp, Homo sapien
tacgatattgcaatggtgtcttcac

SEQ ID NO: 1130351 - DNA, 25 bp, Homo sapien
tcttttgaaattgtagggttgtcta

SEQ ID NO: 1130352 - DNA, 25 bp, Homo sapien
tgtagggttgtctacgattgaaatg

SEQ ID NO: 1130353 - DNA, 25 bp, Homo sapien
ggttgtctacgattgaaatgttcat

SEQ ID NO: 1130354 - DNA, 25 bp, Homo sapien
gaaattgtagggttgtctacgattg

SEQ ID NO: 1130355 - DNA, 25 bp, Homo sapien
agcagtcacgcttttttccccaatc

SEQ ID NO: 1130356 - DNA, 25 bp, Homo sapien
tgaaaaagcagcagtcacgcttttt

SEQ ID NO: 1130357 - DNA, 25 bp, Homo sapien
gcagtccacaaatagtgtttgcatt

SEQ ID NO: 1130358 - DNA, 25 bp, Homo sapien
ttctgcagtccacaaatagtgtttg

SEQ ID NO: 1130359 - DNA, 25 bp, Homo sapien
ataaaggttcctgtggagcttcctc

SEQ ID NO: 1130360 - DNA, 25 bp, Homo sapien
tgtaaataaaggttcctgtggagct

SEQ ID NO: 1130361 - DNA, 25 bp, Homo sapien
gcttcctctatggtttgatcaaggg

SEQ ID NO: 1130362 - DNA, 25 bp, Homo sapien
ttgactgtaaataaaggttcctgtg

SEQ ID NO: 1130363 - DNA, 25 bp, Homo sapien
tatgtagcccaataaaccgatgacc

SEQ ID NO: 1130364 - DNA, 25 bp, Homo sapien
ttagcaaggctagtaatgagaatcc

SEQ ID NO: 1130365 - DNA, 25 bp, Homo sapien
tcacttcagctaatgcagggcttca

SEQ ID NO: 1130366 - DNA, 25 bp, Homo sapien
ggcattctatacgatatcaaggcat

SEQ ID NO: 1130367 - DNA, 25 bp, Homo sapien
ccaatgggcaaggtgcctttctctg

SEQ ID NO: 1130368 - DNA, 25 bp, Homo sapien
ttcctgtgggattttatactgattc

SEQ ID NO: 1130369 - DNA, 25 bp, Homo sapien
gccactaccaatgggcaaggtgcct

SEQ ID NO: 1130370 - DNA, 25 bp, Homo sapien
tgctctgttgccactaccaatgggc

SEQ ID NO: 1130371 - DNA, 25 bp, Homo sapien
ttcttccatctgatgtagcataact

SEQ ID NO: 1130372 - DNA, 25 bp, Homo sapien
agacactgcattgcttcttccatct

SEQ ID NO: 1130373 - DNA, 25 bp, Homo sapien
tgtagcataactcctgatttcattt

SEQ ID NO: 1130374 - DNA, 25 bp, Homo sapien
gttctactgactaagtattctttca

SEQ ID NO: 1130375 - DNA, 25 bp, Homo sapien
ggctgagaaaatgtccctctctcct

SEQ ID NO: 1130376 - DNA, 25 bp, Homo sapien
agtggtcatggcttttgtggctcct

SEQ ID NO: 1130377 - DNA, 25 bp, Homo sapien
tcaaggctgagtaagggatcagttt

SEQ ID NO: 1130378 - DNA, 25 bp, Homo sapien
tatctttattgtagtgccaacactg

SEQ ID NO: 1130379 - DNA, 25 bp, Homo sapien
cgatgctttgtaatgttcctcaaga

SEQ ID NO: 1130380 - DNA, 25 bp, Homo sapien
tgctttgtaatgttcctcaagaacc

SEQ ID NO: 1130381 - DNA, 25 bp, Homo sapien
gatgctttgtaatgttcctcaagaa

SEQ ID NO: 1130382 - DNA, 25 bp, Homo sapien
ctttgtaatgttcctcaagaaccat

SEQ ID NO: 1130383 - DNA, 25 bp, Homo sapien
tttctctcaattaaacccatgcttg

SEQ ID NO: 1130384 - DNA, 25 bp, Homo sapien
gaaacagcctttaaacctgagtcac

SEQ ID NO: 1130385 - DNA, 25 bp, Homo sapien
gatttaatttgctcagagaaacagc

SEQ ID NO: 1130386 - DNA, 25 bp, Homo sapien
tcattctacaggatttaatttgctc

SEQ ID NO: 1130387 - DNA, 25 bp, Homo sapien
caaccaatggcattagctgtatgat

SEQ ID NO: 1130388 - DNA, 25 bp, Homo sapien
aattggaggagctacatgagtacta

SEQ ID NO: 1130389 - DNA, 25 bp, Homo sapien
gtcttctcacagattcaattgctct

SEQ ID NO: 1130390 - DNA, 25 bp, Homo sapien
accattacagccagacacctactaa

SEQ ID NO: 1130391 - DNA, 25 bp, Homo sapien
aatcccataacctgtatgagtctct

SEQ ID NO: 1130392 - DNA, 25 bp, Homo sapien
ccaatcccataacctgtatgagtct

SEQ ID NO: 1130393 - DNA, 25 bp, Homo sapien
tcccataacctgtatgagtctctct

SEQ ID NO: 1130394 - DNA, 25 bp, Homo sapien
aggaattgaacctccagaaactggt

SEQ ID NO: 1130395 - DNA, 25 bp, Homo sapien
gaagatgatcagatctacaacgtta

SEQ ID NO: 1130396 - DNA, 25 bp, Homo sapien
tctttatagtaataccaatcacgat

SEQ ID NO: 1130397 - DNA, 25 bp, Homo sapien
tatagtaataccaatcacgattggg

SEQ ID NO: 1130398 - DNA, 25 bp, Homo sapien
ctacaacgttattgttgctgcccac

SEQ ID NO: 1130399 - DNA, 25 bp, Homo sapien
gaactccatcgagccattgctttgg

SEQ ID NO: 1130400 - DNA, 25 bp, Homo sapien
tccctggtgaactccatcgagccat

SEQ ID NO: 1130401 - DNA, 25 bp, Homo sapien
ccatcgagccattgctttgggttta

SEQ ID NO: 1130402 - DNA, 25 bp, Homo sapien
agagcaagatcctccctggtgaact

SEQ ID NO: 1130403 - DNA, 25 bp, Homo sapien
tgtgaatcctgcgttgtgtagagac

SEQ ID NO: 1130404 - DNA, 25 bp, Homo sapien
tttgactgaagtgctaagaggaacc

SEQ ID NO: 1130405 - DNA, 25 bp, Homo sapien
ctcctagattgggtagtagtgtccc

SEQ ID NO: 1130406 - DNA, 25 bp, Homo sapien
taagcaacgctatgggatttgagac

SEQ ID NO: 1130407 - DNA, 25 bp, Homo sapien
ctcattatgaacattccatctcttc

SEQ ID NO: 1130408 - DNA, 25 bp, Homo sapien
tggacactctgataaatcctggaga

SEQ ID NO: 1130409 - DNA, 25 bp, Homo sapien
tgtggtgagcaagataaacactttc

SEQ ID NO: 1130410 - DNA, 25 bp, Homo sapien
aagggagggacagatagcatagtca

SEQ ID NO: 1130411 - DNA, 25 bp, Homo sapien
aacatacaatagtgtcttctggaca

SEQ ID NO: 1130412 - DNA, 25 bp, Homo sapien
cttgaattcctacatgtttctggag

SEQ ID NO: 1130413 - DNA, 25 bp, Homo sapien
tcctacatgtttctggagggacctg

SEQ ID NO: 1130414 - DNA, 25 bp, Homo sapien
gaattcctacatgtttctggaggga

SEQ ID NO: 1130415 - DNA, 25 bp, Homo sapien
catcttgaattcctacatgtttctg

SEQ ID NO: 1130416 - DNA, 25 bp, Homo sapien
tattcaaaggtaaggccagtctgct

SEQ ID NO: 1130417 - DNA, 25 bp, Homo sapien
gaaggatgctggtgttgttattccc

SEQ ID NO: 1130418 - DNA, 25 bp, Homo sapien
gacaggttgataacttgcttagggt

SEQ ID NO: 1130419 - DNA, 25 bp, Homo sapien
gtttgaactttcacacactagaagg

SEQ ID NO: 1130420 - DNA, 25 bp, Homo sapien
gctgaattcactttttgtctaacat

SEQ ID NO: 1130421 - DNA, 25 bp, Homo sapien
gttgttgtcaacttcaatggccgac

SEQ ID NO: 1130422 - DNA, 25 bp, Homo sapien
aaatggtcaacgatgagttcttcgg

SEQ ID NO: 1130423 - DNA, 25 bp, Homo sapien
tgtagttgtcagaggatctgcttcg

SEQ ID NO: 1130424 - DNA, 25 bp, Homo sapien
tgtggagagcgcaagagactgtatt

SEQ ID NO: 1130425 - DNA, 25 bp, Homo sapien
aagggaatggtctgcttaggtgatc

SEQ ID NO: 1130426 - DNA, 25 bp, Homo sapien
gatcctaacacccacttattaagct

SEQ ID NO: 1130427 - DNA, 25 bp, Homo sapien
gactgtgtggagagcgcaagagact

SEQ ID NO: 1130428 - DNA, 25 bp, Homo sapien
acagacgttaatggcatcctgtaac

SEQ ID NO: 1130429 - DNA, 25 bp, Homo sapien
tgtgaggtgaacagacgttaatggc

SEQ ID NO: 1130430 - DNA, 25 bp, Homo sapien
tgttatgtgaggtgaacagacgtta

SEQ ID NO: 1130431 - DNA, 25 bp, Homo sapien
gattcggggatgcaagtgtcttgtc

SEQ ID NO: 1130432 - DNA, 25 bp, Homo sapien
cagatgaactgaagagtcaatcctt

SEQ ID NO: 1130433 - DNA, 25 bp, Homo sapien
gggacatcagatgaactgaagagtc

SEQ ID NO: 1130434 - DNA, 25 bp, Homo sapien
catcagatgaactgaagagtcaatc

SEQ ID NO: 1130435 - DNA, 25 bp, Homo sapien
tgttactaggggacatcagatgaac

SEQ ID NO: 1130436 - DNA, 25 bp, Homo sapien
tgaatataagcaatgccagcatgta

SEQ ID NO: 1130437 - DNA, 25 bp, Homo sapien
tctgaatataagcaatgccagcatg

SEQ ID NO: 1130438 - DNA, 25 bp, Homo sapien
taagcaatgccagcatgtatagttt

SEQ ID NO: 1130439 - DNA, 25 bp, Homo sapien
ttgttctgaatataagcaatgccag

SEQ ID NO: 1130440 - DNA, 25 bp, Homo sapien
ggtagaccacctcatgtatggaaaa

SEQ ID NO: 1130441 - DNA, 25 bp, Homo sapien
gaaagtgaatcaaagtgtacctgag

SEQ ID NO: 1130442 - DNA, 25 bp, Homo sapien
tgtggcacaagatattatacccagc

SEQ ID NO: 1130443 - DNA, 25 bp, Homo sapien
aactactggctgtatattgccagcc

SEQ ID NO: 1130444 - DNA, 25 bp, Homo sapien
cacaagaaaactctggtccctgtat

SEQ ID NO: 1130445 - DNA, 25 bp, Homo sapien
ccacaagaaaactctggtccctgta

SEQ ID NO: 1130446 - DNA, 25 bp, Homo sapien
tcatcctcaagaaggaaagatatct

SEQ ID NO: 1130447 - DNA, 25 bp, Homo sapien
tattagctattgacagctgtaggtt

SEQ ID NO: 1130448 - DNA, 25 bp, Homo sapien
gatgggcagacattctcctagaatt

SEQ ID NO: 1130449 - DNA, 25 bp, Homo sapien
tcataaatctgtataggatgggcag

SEQ ID NO: 1130450 - DNA, 25 bp, Homo sapien
tgaccaggaatactgctctggttct

SEQ ID NO: 1130451 - DNA, 25 bp, Homo sapien
tacaggaatgcgctgaccaggaata

SEQ ID NO: 1130452 - DNA, 25 bp, Homo sapien
gaccaggaatactgctctggttctc

SEQ ID NO: 1130453 - DNA, 25 bp, Homo sapien
caggaatgcgctgaccaggaatact

SEQ ID NO: 1130454 - DNA, 25 bp, Homo sapien
gagccaagggagcagacaagattga

SEQ ID NO: 1130455 - DNA, 25 bp, Homo sapien
atgaagggctaaggcatgcagtctt

SEQ ID NO: 1130456 - DNA, 25 bp, Homo sapien
gaatgaagggctaaggcatgcagtc

SEQ ID NO: 1130457 - DNA, 25 bp, Homo sapien
ctagaatgaagggctaaggcatgca

SEQ ID NO: 1130458 - DNA, 25 bp, Homo sapien
tgcttagcatactttcgagaagggt

SEQ ID NO: 1130459 - DNA, 25 bp, Homo sapien
gggtacacatcagggcaaactcctg

SEQ ID NO: 1130460 - DNA, 25 bp, Homo sapien
gacatctcagtgacttgcttagcat

SEQ ID NO: 1130461 - DNA, 25 bp, Homo sapien
tcctggaccctgctgcgtagaggca

SEQ ID NO: 1130462 - DNA, 25 bp, Homo sapien
aactacccagaagattgtgcgtttg

SEQ ID NO: 1130463 - DNA, 25 bp, Homo sapien
tagggcacatgcattggctcagaag

SEQ ID NO: 1130464 - DNA, 25 bp, Homo sapien
cacagtgagtatagaatatgttagg

SEQ ID NO: 1130465 - DNA, 25 bp, Homo sapien
ctggttggtgccttgacacagtgag

SEQ ID NO: 1130466 - DNA, 25 bp, Homo sapien
tcattaatgagcaaacatctggcca

SEQ ID NO: 1130467 - DNA, 25 bp, Homo sapien
cagtgaattcaagcacggatgaacc

SEQ ID NO: 1130468 - DNA, 25 bp, Homo sapien
gatgaccctggccattgactctagt

SEQ ID NO: 1130469 - DNA, 25 bp, Homo sapien
gatgaaccatgttgtgatgaccctg

SEQ ID NO: 1130470 - DNA, 25 bp, Homo sapien
gcttcttggtcaagtccccaacact

SEQ ID NO: 1130471 - DNA, 25 bp, Homo sapien
ggagcttcttggtcaagtccccaac

SEQ ID NO: 1130472 - DNA, 25 bp, Homo sapien
ggtctgggagcttcttggtcaagtc

SEQ ID NO: 1130473 - DNA, 25 bp, Homo sapien
tgggagcttcttggtcaagtcccca

SEQ ID NO: 1130474 - DNA, 25 bp, Homo sapien
cagccaggttgaggagtctggcatt

SEQ ID NO: 1130475 - DNA, 25 bp, Homo sapien
tctggcattgataacattactgctc

SEQ ID NO: 1130476 - DNA, 25 bp, Homo sapien
cagaagcttgtgcatagtgaccaca

SEQ ID NO: 1130477 - DNA, 25 bp, Homo sapien
gcagaggggattatcagcactgaga

SEQ ID NO: 1130478 - DNA, 25 bp, Homo sapien
tatcacccagggaacagacttgtca

SEQ ID NO: 1130479 - DNA, 25 bp, Homo sapien
cagagagttggctattaccgggatt

SEQ ID NO: 1130480 - DNA, 25 bp, Homo sapien
cagttttggaggagcaaaggcctga

SEQ ID NO: 1130481 - DNA, 25 bp, Homo sapien
ttgtcaccaagggaacagttttgga

SEQ ID NO: 1130482 - DNA, 25 bp, Homo sapien
tctgcctgtggacttggtgcataca

SEQ ID NO: 1130483 - DNA, 25 bp, Homo sapien
ccttctgcctgtggacttggtgcat

SEQ ID NO: 1130484 - DNA, 25 bp, Homo sapien
tgtgctttctgaggacagtctatag

SEQ ID NO: 1130485 - DNA, 25 bp, Homo sapien
tgaggacagtctatagccttctgcc

SEQ ID NO: 1130486 - DNA, 25 bp, Homo sapien
ggtggaattctcctgttgagttcat

SEQ ID NO: 1130487 - DNA, 25 bp, Homo sapien
aaggtggaattctcctgttgagttc

SEQ ID NO: 1130488 - DNA, 25 bp, Homo sapien
tcctgcttgtggcaaaggtggaatt

SEQ ID NO: 1130489 - DNA, 25 bp, Homo sapien
gcaaaggtggaattctcctgttgag

SEQ ID NO: 1130490 - DNA, 25 bp, Homo sapien
tttgtttttgtcctagcagcagtga

SEQ ID NO: 1130491 - DNA, 25 bp, Homo sapien
gagaggtagtcatagttcagaggct

SEQ ID NO: 1130492 - DNA, 25 bp, Homo sapien
ggctggcaggcaaagttatggcaaa

SEQ ID NO: 1130493 - DNA, 25 bp, Homo sapien
cagtgactgtaaagtcactcatcag

SEQ ID NO: 1130494 - DNA, 25 bp, Homo sapien
tcaggttccagttactttgtgatct

SEQ ID NO: 1130495 - DNA, 25 bp, Homo sapien
tactttgtgatctccaaactccagg

SEQ ID NO: 1130496 - DNA, 25 bp, Homo sapien
aaatactcccaattatattcattgt

SEQ ID NO: 1130497 - DNA, 25 bp, Homo sapien
taattaatgtggctacactcctttg

SEQ ID NO: 1130498 - DNA, 25 bp, Homo sapien
cctctcttctataggtaaaatactc

SEQ ID NO: 1130499 - DNA, 25 bp, Homo sapien
atcgttcagattttggtgaagagtc

SEQ ID NO: 1130500 - DNA, 25 bp, Homo sapien
tgctctgcgctttataggccacagt

SEQ ID NO: 1130501 - DNA, 25 bp, Homo sapien
tcatcttgctctgcgctttataggc

SEQ ID NO: 1130502 - DNA, 25 bp, Homo sapien
tctgcgctttataggccacagtccc

SEQ ID NO: 1130503 - DNA, 25 bp, Homo sapien
ttgtacttcatcttgctctgcgctt

SEQ ID NO: 1130504 - DNA, 25 bp, Homo sapien
aaagggacctagatcatagcccttc

SEQ ID NO: 1130505 - DNA, 25 bp, Homo sapien
ttccctaagccgtgcggctcagcag

SEQ ID NO: 1130506 - DNA, 25 bp, Homo sapien
gtaggaaagggacctagatcatagc

SEQ ID NO: 1130507 - DNA, 25 bp, Homo sapien
atagcccttccctaagccgtgcggc

SEQ ID NO: 1130508 - DNA, 25 bp, Homo sapien
tagtcctccggggtcgctccagggc

SEQ ID NO: 1130509 - DNA, 25 bp, Homo sapien
cgagtagcactcgtagtacagctgg

SEQ ID NO: 1130510 - DNA, 25 bp, Homo sapien
tcgtggaccgaaacgtccgagtagc

SEQ ID NO: 1130511 - DNA, 25 bp, Homo sapien
ctcgtagtacagctggtcccgttcc

SEQ ID NO: 1130512 - DNA, 25 bp, Homo sapien
tgcaccggctcgttcaggtagagga

SEQ ID NO: 1130513 - DNA, 25 bp, Homo sapien
cagtgctgcccagttccgaaggata

SEQ ID NO: 1130514 - DNA, 25 bp, Homo sapien
tgatctctcctgaaacgtccgtgtc

SEQ ID NO: 1130515 - DNA, 25 bp, Homo sapien
gaagatgctcagaatgccggtgccc

SEQ ID NO: 1130516 - DNA, 25 bp, Homo sapien
gaagaagtaccatagcctacaggca

SEQ ID NO: 1130517 - DNA, 25 bp, Homo sapien
taagtaggccaactcacatgatccc

SEQ ID NO: 1130518 - DNA, 25 bp, Homo sapien
ttacccatggtgatgaataagccct

SEQ ID NO: 1130519 - DNA, 25 bp, Homo sapien
taagcccttgggctaggctcagaaa

SEQ ID NO: 1130520 - DNA, 25 bp, Homo sapien
cagaacaccagtttttcacacctat

SEQ ID NO: 1130521 - DNA, 25 bp, Homo sapien
cttagcatacagaagctcgaaaatc

SEQ ID NO: 1130522 - DNA, 25 bp, Homo sapien
catagtttgaattgtcctgaagtta

SEQ ID NO: 1130523 - DNA, 25 bp, Homo sapien
gggctgtaacacttaagaactaata

SEQ ID NO: 1130524 - DNA, 25 bp, Homo sapien
ggtccaatggcaccaagcagtcagt

SEQ ID NO: 1130525 - DNA, 25 bp, Homo sapien
ggaggtgtcctcactccagaggtct

SEQ ID NO: 1130526 - DNA, 25 bp, Homo sapien
gtaccagtccatacagacagattgg

SEQ ID NO: 1130527 - DNA, 25 bp, Homo sapien
tcctttgggcctggtagttcctgcc

SEQ ID NO: 1130528 - DNA, 25 bp, Homo sapien
gaattagctatgtaaacttaggcca

SEQ ID NO: 1130529 - DNA, 25 bp, Homo sapien
tcccagtctttagcccattatcatt

SEQ ID NO: 1130530 - DNA, 25 bp, Homo sapien
atctgtataactcttgttcctggta

SEQ ID NO: 1130531 - DNA, 25 bp, Homo sapien
ggccaagtccttcaatatctgtata

SEQ ID NO: 1130532 - DNA, 25 bp, Homo sapien
gagtgccgcaattgactaactgttg

SEQ ID NO: 1130533 - DNA, 25 bp, Homo sapien
tcatctctcctcagcattgggtggt

SEQ ID NO: 1130534 - DNA, 25 bp, Homo sapien
ccaggctaaggatgcaaattactga

SEQ ID NO: 1130535 - DNA, 25 bp, Homo sapien
tgttgtcactcattcaggaggtacg

SEQ ID NO: 1130536 - DNA, 25 bp, Homo sapien
gggctggctcttctcaaccttgctt

SEQ ID NO: 1130537 - DNA, 25 bp, Homo sapien
tcagctctctagtagcctatgtgag

SEQ ID NO: 1130538 - DNA, 25 bp, Homo sapien
gaagggtcgtctatgcaatatactg

SEQ ID NO: 1130539 - DNA, 25 bp, Homo sapien
gtcggaatgatgttgggactcagca

SEQ ID NO: 1130540 - DNA, 25 bp, Homo sapien
tattgttctgtatatgataaataca

SEQ ID NO: 1130541 - DNA, 25 bp, Homo sapien
atattgttctgtatatgataaatac

SEQ ID NO: 1130542 - DNA, 25 bp, Homo sapien
caattatattgttctgtatatgata

SEQ ID NO: 1130543 - DNA, 25 bp, Homo sapien
atgcaattatattgttctgtatatg

SEQ ID NO: 1130544 - DNA, 25 bp, Homo sapien
ggcagtttccgttgttctgaatttc

SEQ ID NO: 1130545 - DNA, 25 bp, Homo sapien
gagaatgaagtcaagttggcaattt

SEQ ID NO: 1130546 - DNA, 25 bp, Homo sapien
ggcaatttcgagtgtaggcagtttc

SEQ ID NO: 1130547 - DNA, 25 bp, Homo sapien
cattatgtagttcaagttgggtttt

SEQ ID NO: 1130548 - DNA, 25 bp, Homo sapien
caccggtgtcgtgcacattgtgaac

SEQ ID NO: 1130549 - DNA, 25 bp, Homo sapien
cacattgtgaacttctggcaaggac

SEQ ID NO: 1130550 - DNA, 25 bp, Homo sapien
cacctgaacctccatggcacaatgc

SEQ ID NO: 1130551 - DNA, 25 bp, Homo sapien
catgaggcttccaccggtgtcgtgc

SEQ ID NO: 1130552 - DNA, 25 bp, Homo sapien
gggcgctgaggcaacagggccccct

SEQ ID NO: 1130553 - DNA, 25 bp, Homo sapien
tcctccacagaagcgccgtttccag

SEQ ID NO: 1130554 - DNA, 25 bp, Homo sapien
agaagcgccgtttccagtaactcct

SEQ ID NO: 1130555 - DNA, 25 bp, Homo sapien
gctccacgacctcggggcgctgagg

SEQ ID NO: 1130556 - DNA, 25 bp, Homo sapien
tgtgcgctccgagcggtcctaactc

SEQ ID NO: 1130557 - DNA, 25 bp, Homo sapien
agcggtcctaactccgtcccgctcg

SEQ ID NO: 1130558 - DNA, 25 bp, Homo sapien
gacctgtgcgctccgagcggtccta

SEQ ID NO: 1130559 - DNA, 25 bp, Homo sapien
ctcgagacctgtgcgctccgagcgg

SEQ ID NO: 1130560 - DNA, 25 bp, Homo sapien
gatgaaatatacatggcccacgacg

SEQ ID NO: 1130561 - DNA, 25 bp, Homo sapien
caattaaagagtgagcgcgagagcc

SEQ ID NO: 1130562 - DNA, 25 bp, Homo sapien
tcaagccgcaggacgattttctggt

SEQ ID NO: 1130563 - DNA, 25 bp, Homo sapien
cactgatggcagtgagacgcgacgc

SEQ ID NO: 1130564 - DNA, 25 bp, Homo sapien
agatctcagccttcggaggtcgtgc

SEQ ID NO: 1130565 - DNA, 25 bp, Homo sapien
tgcctctgacacttctcgccttaaa

SEQ ID NO: 1130566 - DNA, 25 bp, Homo sapien
tccgaaatgcaaaagatcagtgact

SEQ ID NO: 1130567 - DNA, 25 bp, Homo sapien
cccgttgacgtcctcttccgaaatg

SEQ ID NO: 1130568 - DNA, 25 bp, Homo sapien
tcgtttgcccttgcgccgggcggga

SEQ ID NO: 1130569 - DNA, 25 bp, Homo sapien
gtttgcccttgcgccgggcgggagc

SEQ ID NO: 1130570 - DNA, 25 bp, Homo sapien
ctcgtttgcccttgcgccgggcggg

SEQ ID NO: 1130571 - DNA, 25 bp, Homo sapien
gctcgtttgcccttgcgccgggcgg

SEQ ID NO: 1130572 - DNA, 25 bp, Homo sapien
ggctctcccgttgtacatccgataa

SEQ ID NO: 1130573 - DNA, 25 bp, Homo sapien
aaaaggatgagtgtctatagcccgg

SEQ ID NO: 1130574 - DNA, 25 bp, Homo sapien
taatttagcaaagcgatggctctcc

SEQ ID NO: 1130575 - DNA, 25 bp, Homo sapien
tcacaagggatgctcaagcaggctg

SEQ ID NO: 1130576 - DNA, 25 bp, Homo sapien
tgaggacaccgtaacccaaagggca

SEQ ID NO: 1130577 - DNA, 25 bp, Homo sapien
ggcatgaatcgacaggaatcttgac

SEQ ID NO: 1130578 - DNA, 25 bp, Homo sapien
aacccaaagggcatgaatcgacagg

SEQ ID NO: 1130579 - DNA, 25 bp, Homo sapien
tcgacaggaatcttgacaaatacat

SEQ ID NO: 1130580 - DNA, 25 bp, Homo sapien
gagggtctccacaggtaatatccgg

SEQ ID NO: 1130581 - DNA, 25 bp, Homo sapien
tatccggaggatcgagtttcacttt

SEQ ID NO: 1130582 - DNA, 25 bp, Homo sapien
cattgcacagaacgtctcaggaggg

SEQ ID NO: 1130583 - DNA, 25 bp, Homo sapien
tattttgtcatgtccgtggattccg

SEQ ID NO: 1130584 - DNA, 25 bp, Homo sapien
tcatgtggcagctcccctgatgtaa

SEQ ID NO: 1130585 - DNA, 25 bp, Homo sapien
catgtggcagctcccctgatgtaat

SEQ ID NO: 1130586 - DNA, 25 bp, Homo sapien
tgtggcagctcccctgatgtaatag

SEQ ID NO: 1130587 - DNA, 25 bp, Homo sapien
tggcagctcccctgatgtaataggc

SEQ ID NO: 1130588 - DNA, 25 bp, Homo sapien
tgcgggaagatatgacagctaagtt

SEQ ID NO: 1130589 - DNA, 25 bp, Homo sapien
tgccatttttaagccactggggtgt

SEQ ID NO: 1130590 - DNA, 25 bp, Homo sapien
gagataactgcagataattttgcca

SEQ ID NO: 1130591 - DNA, 25 bp, Homo sapien
ccactggggtgtgcgggaagatatg

SEQ ID NO: 1130592 - DNA, 25 bp, Homo sapien
gttcctactacagagccattatgat

SEQ ID NO: 1130593 - DNA, 25 bp, Homo sapien
taatggcctggaagtgaagtataat

SEQ ID NO: 1130594 - DNA, 25 bp, Homo sapien
agtgaagtataatttcagttcctac

SEQ ID NO: 1130595 - DNA, 25 bp, Homo sapien
tctcgtggaccagttaattcattac

SEQ ID NO: 1130596 - DNA, 25 bp, Homo sapien
tgaaccctcacaccaatgtatgtga

SEQ ID NO: 1130597 - DNA, 25 bp, Homo sapien
agcgatatttagtatctcagataca

SEQ ID NO: 1130598 - DNA, 25 bp, Homo sapien
cacattgttgtagcgatatttagta

SEQ ID NO: 1130599 - DNA, 25 bp, Homo sapien
tacagagttaactcttcgttgtcct

SEQ ID NO: 1130600 - DNA, 25 bp, Homo sapien
cccaaaatttgactgtacaccaaca

SEQ ID NO: 1130601 - DNA, 25 bp, Homo sapien
acggtgctaggcctatattcaccca

SEQ ID NO: 1130602 - DNA, 25 bp, Homo sapien
tatattcacccaaactcttacagtc

SEQ ID NO: 1130603 - DNA, 25 bp, Homo sapien
caaatattgaataggaagcccctca

SEQ ID NO: 1130604 - DNA, 25 bp, Homo sapien
gggttaacctggcaaagaatctcca

SEQ ID NO: 1130605 - DNA, 25 bp, Homo sapien
aaatacatgtgtccctagggcccct

SEQ ID NO: 1130606 - DNA, 25 bp, Homo sapien
gaactgatgtcaacccttgggataa

SEQ ID NO: 1130607 - DNA, 25 bp, Homo sapien
taatgtccaagcatgcacaaggtac

SEQ ID NO: 1130608 - DNA, 25 bp, Homo sapien
gtggaaggagaagaaagttcagctg

SEQ ID NO: 1130609 - DNA, 25 bp, Homo sapien
gaaggagaagaaagttcagctgcca

SEQ ID NO: 1130610 - DNA, 25 bp, Homo sapien
gggtggaaggagaagaaagttcagc

SEQ ID NO: 1130611 - DNA, 25 bp, Homo sapien
ctggaaccagagacagggtggaagg

SEQ ID NO: 1130612 - DNA, 25 bp, Homo sapien
cagggacaatggttccctgtagaaa

SEQ ID NO: 1130613 - DNA, 25 bp, Homo sapien
agtacgagtccctggtagcgagtca

SEQ ID NO: 1130614 - DNA, 25 bp, Homo sapien
tccacgatcatgatgaagaggaggg

SEQ ID NO: 1130615 - DNA, 25 bp, Homo sapien
gacgccttgagcacttcagcatcag

SEQ ID NO: 1130616 - DNA, 25 bp, Homo sapien
catccaatttaaacaaaacctggag

SEQ ID NO: 1130617 - DNA, 25 bp, Homo sapien
tccaatttaaacaaaacctggagca

SEQ ID NO: 1130618 - DNA, 25 bp, Homo sapien
agcactcaactctggcatcacctcc

SEQ ID NO: 1130619 - DNA, 25 bp, Homo sapien
ctcttttagttgcaatcctgaaccg

SEQ ID NO: 1130620 - DNA, 25 bp, Homo sapien
aaagtgcatcccctttctgtgatgc

SEQ ID NO: 1130621 - DNA, 25 bp, Homo sapien
agcctttgctcaaagtgcatcccct

SEQ ID NO: 1130622 - DNA, 25 bp, Homo sapien
cctctttattcccatagagctctct

SEQ ID NO: 1130623 - DNA, 25 bp, Homo sapien
tcttatctgttcttatctggaacaa

SEQ ID NO: 1130624 - DNA, 25 bp, Homo sapien
gagatctgtctgatacagactgccc

SEQ ID NO: 1130625 - DNA, 25 bp, Homo sapien
actgcagactttctagagatctgtc

SEQ ID NO: 1130626 - DNA, 25 bp, Homo sapien
gggaactggccctccttcaatctgc

SEQ ID NO: 1130627 - DNA, 25 bp, Homo sapien
ggaactggccctccttcaatctgca

SEQ ID NO: 1130628 - DNA, 25 bp, Homo sapien
gaacttgatggttatcatccaggag

SEQ ID NO: 1130629 - DNA, 25 bp, Homo sapien
tcactggcctgaacttgatggttat

SEQ ID NO: 1130630 - DNA, 25 bp, Homo sapien
ttggcaacaatttgccttccttcca

SEQ ID NO: 1130631 - DNA, 25 bp, Homo sapien
tggcagtatccaagatgctaaagta

SEQ ID NO: 1130632 - DNA, 25 bp, Homo sapien
cctggcagtatccaagatgctaaag

SEQ ID NO: 1130633 - DNA, 25 bp, Homo sapien
tcatttcattctcgttggcaacaat

SEQ ID NO: 1130634 - DNA, 25 bp, Homo sapien
gcatccttgatgttgtattccttct

SEQ ID NO: 1130635 - DNA, 25 bp, Homo sapien
tcagtatcttagtgagccctggaca

SEQ ID NO: 1130636 - DNA, 25 bp, Homo sapien
ttacactgggactctgttggtgtgg

SEQ ID NO: 1130637 - DNA, 25 bp, Homo sapien
ttccttcttgactttgagattctgt

SEQ ID NO: 1130638 - DNA, 25 bp, Homo sapien
tttctaagacagcagcatcggtttg

SEQ ID NO: 1130639 - DNA, 25 bp, Homo sapien
tcggtttgtatggagcagcagatgc

SEQ ID NO: 1130640 - DNA, 25 bp, Homo sapien
cacataatggcagtgtctattaggg

SEQ ID NO: 1130641 - DNA, 25 bp, Homo sapien
tacaggatacctcacgtggcacatt

SEQ ID NO: 1130642 - DNA, 25 bp, Homo sapien
ccatggtcagcacactaacacagga

SEQ ID NO: 1130643 - DNA, 25 bp, Homo sapien
catgccttcctttgtgtatcacttc

SEQ ID NO: 1130644 - DNA, 25 bp, Homo sapien
ttgtgtatcacttcctgaccacctc

SEQ ID NO: 1130645 - DNA, 25 bp, Homo sapien
gccatggtcagcacactaacacagg

SEQ ID NO: 1130646 - DNA, 25 bp, Homo sapien
taaacattaagcttgcatgcactgg

SEQ ID NO: 1130647 - DNA, 25 bp, Homo sapien
tttccgtgactttcgataaaataca

SEQ ID NO: 1130648 - DNA, 25 bp, Homo sapien
gcttgcatgcactggtttccgtgac

SEQ ID NO: 1130649 - DNA, 25 bp, Homo sapien
cgtgactttcgataaaatacatttc

SEQ ID NO: 1130650 - DNA, 25 bp, Homo sapien
gctgcagctttagttcaccaagatc

SEQ ID NO: 1130651 - DNA, 25 bp, Homo sapien
tctcttgcctatgaactaaccttgg

SEQ ID NO: 1130652 - DNA, 25 bp, Homo sapien
agatctctagatccttttccttgct

SEQ ID NO: 1130653 - DNA, 25 bp, Homo sapien
actaaccttggtgagtagtcccagc

SEQ ID NO: 1130654 - DNA, 25 bp, Homo sapien
cctggtaggaggccaaccagaccac

SEQ ID NO: 1130655 - DNA, 25 bp, Homo sapien
ctggtaggaggccaaccagaccacc

SEQ ID NO: 1130656 - DNA, 25 bp, Homo sapien
tgtgggaattcactgcaacaaaatg

SEQ ID NO: 1130657 - DNA, 25 bp, Homo sapien
gtgggaattcactgcaacaaaatgc

SEQ ID NO: 1130658 - DNA, 25 bp, Homo sapien
ctgtgggaattcactgcaacaaaat

SEQ ID NO: 1130659 - DNA, 25 bp, Homo sapien
tgggaattcactgcaacaaaatgcc

SEQ ID NO: 1130660 - DNA, 25 bp, Homo sapien
tcatgccatctagcaaggcctgata

SEQ ID NO: 1130661 - DNA, 25 bp, Homo sapien
agtaattcatgccatctagcaaggc

SEQ ID NO: 1130662 - DNA, 25 bp, Homo sapien
taattcatgccatctagcaaggcct

SEQ ID NO: 1130663 - DNA, 25 bp, Homo sapien
gtaattcatgccatctagcaaggcc

SEQ ID NO: 1130664 - DNA, 25 bp, Homo sapien
tcttcagcacaagtatgaggattca

SEQ ID NO: 1130665 - DNA, 25 bp, Homo sapien
cagttcttgaactccatctgttatg

SEQ ID NO: 1130666 - DNA, 25 bp, Homo sapien
ggatccaccataggttcttcagcac

SEQ ID NO: 1130667 - DNA, 25 bp, Homo sapien
tatgccatagggatccaccataggt

SEQ ID NO: 1130668 - DNA, 25 bp, Homo sapien
tcctccacggcgttcattaatgggt

SEQ ID NO: 1130669 - DNA, 25 bp, Homo sapien
tttttccttgcatggttcctatttc

SEQ ID NO: 1130670 - DNA, 25 bp, Homo sapien
ctgcataatctgtagaaaatcggat

SEQ ID NO: 1130671 - DNA, 25 bp, Homo sapien
aaaatgaatggtaagcatgcaatcc

SEQ ID NO: 1130672 - DNA, 25 bp, Homo sapien
tgagtgcatttaggttgatattgta

SEQ ID NO: 1130673 - DNA, 25 bp, Homo sapien
gatattgtattggatgaaaacactt

SEQ ID NO: 1130674 - DNA, 25 bp, Homo sapien
attgtattggatgaaaacacttctg

SEQ ID NO: 1130675 - DNA, 25 bp, Homo sapien
ttgtattggatgaaaacacttctga

SEQ ID NO: 1130676 - DNA, 25 bp, Homo sapien
aacccattgttctctttgggtgtca

SEQ ID NO: 1130677 - DNA, 25 bp, Homo sapien
tgtcaattgcataagccatgaaatg

SEQ ID NO: 1130678 - DNA, 25 bp, Homo sapien
tttgggtgtcaattgcataagccat

SEQ ID NO: 1130679 - DNA, 25 bp, Homo sapien
cattgttctctttgggtgtcaattg

SEQ ID NO: 1130680 - DNA, 25 bp, Homo sapien
tgtgcatacattgtacttggttgtt

SEQ ID NO: 1130681 - DNA, 25 bp, Homo sapien
taatccccaatattccacaatgcat

SEQ ID NO: 1130682 - DNA, 25 bp, Homo sapien
gattgtcgaatcaggtttcatgcaa

SEQ ID NO: 1130683 - DNA, 25 bp, Homo sapien
tctcttagtgattaaaaactgtctt

SEQ ID NO: 1130684 - DNA, 25 bp, Homo sapien
tgttcagtcacatcaacaggagctg

SEQ ID NO: 1130685 - DNA, 25 bp, Homo sapien
actgtgaccagatagcaagtgccta

SEQ ID NO: 1130686 - DNA, 25 bp, Homo sapien
tagtcagagtacttaccctacaggg

SEQ ID NO: 1130687 - DNA, 25 bp, Homo sapien
gaagtaccactgtatgtgctacgaa

SEQ ID NO: 1130688 - DNA, 25 bp, Homo sapien
cactgatatagtagtgacaggcttg

SEQ ID NO: 1130689 - DNA, 25 bp, Homo sapien
agtgacaggcttggacactggtgtc

SEQ ID NO: 1130690 - DNA, 25 bp, Homo sapien
attctgaggcactgatatagtagtg

SEQ ID NO: 1130691 - DNA, 25 bp, Homo sapien
actagctgtgagatactggacacat

SEQ ID NO: 1130692 - DNA, 25 bp, Homo sapien
gattacagtctatccactataccgc

SEQ ID NO: 1130693 - DNA, 25 bp, Homo sapien
cacacttcttgtcaggctgcttaac

SEQ ID NO: 1130694 - DNA, 25 bp, Homo sapien
tgcttaacttctcctggccttagtt

SEQ ID NO: 1130695 - DNA, 25 bp, Homo sapien
gtgtgtatacatagaacaagattag

SEQ ID NO: 1130696 - DNA, 25 bp, Homo sapien
acctgagtagggcttatccaaaaag

SEQ ID NO: 1130697 - DNA, 25 bp, Homo sapien
gcttatccaaaaagatcttaggttc

SEQ ID NO: 1130698 - DNA, 25 bp, Homo sapien
gctaagacctgagtagggcttatcc

SEQ ID NO: 1130699 - DNA, 25 bp, Homo sapien
cttaggttctgagtacaaaggggtg

SEQ ID NO: 1130700 - DNA, 25 bp, Homo sapien
ctatctcttagtatcaaacctgttg

SEQ ID NO: 1130701 - DNA, 25 bp, Homo sapien
tctcttagtatcaaacctgttgtag

SEQ ID NO: 1130702 - DNA, 25 bp, Homo sapien
tcttagtatcaaacctgttgtagca

SEQ ID NO: 1130703 - DNA, 25 bp, Homo sapien
cttagtatcaaacctgttgtagcag

SEQ ID NO: 1130704 - DNA, 25 bp, Homo sapien
accttcttcattagttttccagaat

SEQ ID NO: 1130705 - DNA, 25 bp, Homo sapien
cttcttcattagttttccagaatcc

SEQ ID NO: 1130706 - DNA, 25 bp, Homo sapien
tcttcattagttttccagaatcctt

SEQ ID NO: 1130707 - DNA, 25 bp, Homo sapien
taaccttcttcattagttttccaga

SEQ ID NO: 1130708 - DNA, 25 bp, Homo sapien
gaggacaaagacaaatggcatgagc

SEQ ID NO: 1130709 - DNA, 25 bp, Homo sapien
aaaaagtccaactccaagtacagag

SEQ ID NO: 1130710 - DNA, 25 bp, Homo sapien
tttgctcataggttggtcactggga

SEQ ID NO: 1130711 - DNA, 25 bp, Homo sapien
ggcatgagctgcaattatgtcccag

SEQ ID NO: 1130712 - DNA, 25 bp, Homo sapien
aatgtggtaccctaaaggctctggg

SEQ ID NO: 1130713 - DNA, 25 bp, Homo sapien
tgggtccttgcttcataatgtctgg

SEQ ID NO: 1130714 - DNA, 25 bp, Homo sapien
tactttgttcaccaccaattattaa

SEQ ID NO: 1130715 - DNA, 25 bp, Homo sapien
ttttggctttccctgaaatccgtca

SEQ ID NO: 1130716 - DNA, 25 bp, Homo sapien
gatagggctgccatgttcgtccata

SEQ ID NO: 1130717 - DNA, 25 bp, Homo sapien
ccatattgcgtaggcgaggtccagc

SEQ ID NO: 1130718 - DNA, 25 bp, Homo sapien
gttgtatccagctgtccgtagaggg

SEQ ID NO: 1130719 - DNA, 25 bp, Homo sapien
taaaagtagcgtgccaagtgtagct

SEQ ID NO: 1130720 - DNA, 25 bp, Homo sapien
cagggacagcaagtttgggattaca

SEQ ID NO: 1130721 - DNA, 25 bp, Homo sapien
gacacacccgttcccattgaaggca

SEQ ID NO: 1130722 - DNA, 25 bp, Homo sapien
gaagaatcatgccaggttcagggac

SEQ ID NO: 1130723 - DNA, 25 bp, Homo sapien
cctacttctacagtggagttcctga

SEQ ID NO: 1130724 - DNA, 25 bp, Homo sapien
gaaaagcttcgcagataaaggcttt

SEQ ID NO: 1130725 - DNA, 25 bp, Homo sapien
attttaggaaaagcttcgcagataa

SEQ ID NO: 1130726 - DNA, 25 bp, Homo sapien
gatatattcgttatataccaccaag

SEQ ID NO: 1130727 - DNA, 25 bp, Homo sapien
taccaccaagatcttggtcaaaatt

SEQ ID NO: 1130728 - DNA, 25 bp, Homo sapien
ctctactggacctttctcatttgcc

SEQ ID NO: 1130729 - DNA, 25 bp, Homo sapien
cttacagttgactagtgaacaggaa

SEQ ID NO: 1130730 - DNA, 25 bp, Homo sapien
actggacctttctcatttgcccagc

SEQ ID NO: 1130731 - DNA, 25 bp, Homo sapien
tacagttgactagtgaacaggaaaa

SEQ ID NO: 1130732 - DNA, 25 bp, Homo sapien
acacgcccgagccatcagaccttgc

SEQ ID NO: 1130733 - DNA, 25 bp, Homo sapien
ctagtgcagtacatgccagcatcag

SEQ ID NO: 1130734 - DNA, 25 bp, Homo sapien
tggtgcctagtgcagtacatgccag

SEQ ID NO: 1130735 - DNA, 25 bp, Homo sapien
tgcttctttagtccctcccctaaga

SEQ ID NO: 1130736 - DNA, 25 bp, Homo sapien
acatccataagtcagaattagtcca

SEQ ID NO: 1130737 - DNA, 25 bp, Homo sapien
ttgaacaatgtaagtactacggagc

SEQ ID NO: 1130738 - DNA, 25 bp, Homo sapien
gtaagtactacggagctgctgaaat

SEQ ID NO: 1130739 - DNA, 25 bp, Homo sapien
tagtccatgtagattattaagttta

SEQ ID NO: 1130740 - DNA, 25 bp, Homo sapien
acttgatgccctttaatgtaccttc

SEQ ID NO: 1130741 - DNA, 25 bp, Homo sapien
ttaatgtaccttccattagtgatat

SEQ ID NO: 1130742 - DNA, 25 bp, Homo sapien
ctacttgatgccctttaatgtacct

SEQ ID NO: 1130743 - DNA, 25 bp, Homo sapien
ccttccattagtgatattattgtag

SEQ ID NO: 1130744 - DNA, 25 bp, Homo sapien
gatgggagttttccagtccactttc

SEQ ID NO: 1130745 - DNA, 25 bp, Homo sapien
agttttccagtccactttcttcaag

SEQ ID NO: 1130746 - DNA, 25 bp, Homo sapien
actgaagatgttgatgggagttttc

SEQ ID NO: 1130747 - DNA, 25 bp, Homo sapien
aaatactgaagatgttgatgggagt

SEQ ID NO: 1130748 - DNA, 25 bp, Homo sapien
tcagataaacacagagcagcctggt

SEQ ID NO: 1130749 - DNA, 25 bp, Homo sapien
tccccatggaaaaataagaagctat

SEQ ID NO: 1130750 - DNA, 25 bp, Homo sapien
aaaaagtcacggcactcctctggtc

SEQ ID NO: 1130751 - DNA, 25 bp, Homo sapien
tacatagtagtattccacaggattc

SEQ ID NO: 1130752 - DNA, 25 bp, Homo sapien
cccagtgacgccactaactttattc

SEQ ID NO: 1130753 - DNA, 25 bp, Homo sapien
ttatttgaccatacatgtgagggtt

SEQ ID NO: 1130754 - DNA, 25 bp, Homo sapien
caacaacataaaaaccccagtgacg

SEQ ID NO: 1130755 - DNA, 25 bp, Homo sapien
tcactcgatggtcttggcaacgttg

SEQ ID NO: 1130756 - DNA, 25 bp, Homo sapien
gagtcaaggagtattgtttgtgcag

SEQ ID NO: 1130757 - DNA, 25 bp, Homo sapien
gaaactttgtgctcattacaaatga

SEQ ID NO: 1130758 - DNA, 25 bp, Homo sapien
tgaatttgcttactctaggacactc

SEQ ID NO: 1130759 - DNA, 25 bp, Homo sapien
tataagttgcatatcatgtaacatt

SEQ ID NO: 1130760 - DNA, 25 bp, Homo sapien
tttttctctcatagatgatcctgaa

SEQ ID NO: 1130761 - DNA, 25 bp, Homo sapien
caatggatattacaatgctgtcact

SEQ ID NO: 1130762 - DNA, 25 bp, Homo sapien
caatgttaggactgtaggatgagcc

SEQ ID NO: 1130763 - DNA, 25 bp, Homo sapien
tttttgtgctgaccaacagggtcaa

SEQ ID NO: 1130764 - DNA, 25 bp, Homo sapien
caaagaaattgtgggcttgaagatc

SEQ ID NO: 1130765 - DNA, 25 bp, Homo sapien
ggcttcaaagaaattgtgggcttga

SEQ ID NO: 1130766 - DNA, 25 bp, Homo sapien
ttggcttcaaagaaattgtgggctt

SEQ ID NO: 1130767 - DNA, 25 bp, Homo sapien
gaaattgtgggcttgaagatcttca

SEQ ID NO: 1130768 - DNA, 25 bp, Homo sapien
cgtctgctgggctaatgagctctcc

SEQ ID NO: 1130769 - DNA, 25 bp, Homo sapien
tcttctgcaggcgaatccccaaaag

SEQ ID NO: 1130770 - DNA, 25 bp, Homo sapien
caaagccctggctctttttggtggc

SEQ ID NO: 1130771 - DNA, 25 bp, Homo sapien
ttcgttcagggatagagcgtctgct

SEQ ID NO: 1130772 - DNA, 25 bp, Homo sapien
gcagggtgttatggcatgtttgtaa

SEQ ID NO: 1130773 - DNA, 25 bp, Homo sapien
ttacttctggggcaccaaagctgtc

SEQ ID NO: 1130774 - DNA, 25 bp, Homo sapien
ctcttttacttctggggcaccaaag

SEQ ID NO: 1130775 - DNA, 25 bp, Homo sapien
cctcacagcagggtgttatggcatg

SEQ ID NO: 1130776 - DNA, 25 bp, Homo sapien
tccttcctcgacattcttctcctga

SEQ ID NO: 1130777 - DNA, 25 bp, Homo sapien
ttcctcgacattcttctcctgagcc

SEQ ID NO: 1130778 - DNA, 25 bp, Homo sapien
ctccttcctcgacattcttctcctg

SEQ ID NO: 1130779 - DNA, 25 bp, Homo sapien
ccttcctcgacattcttctcctgag

SEQ ID NO: 1130780 - DNA, 25 bp, Homo sapien
gacttctgtgacgtcccacttgtct

SEQ ID NO: 1130781 - DNA, 25 bp, Homo sapien
tgacgtcccacttgtctctgacaga

SEQ ID NO: 1130782 - DNA, 25 bp, Homo sapien
gggcagacttctgtgacgtcccact

SEQ ID NO: 1130783 - DNA, 25 bp, Homo sapien
gtcccacttgtctctgacagattca

SEQ ID NO: 1130784 - DNA, 25 bp, Homo sapien
tggactccaaggtcggccctgataa

SEQ ID NO: 1130785 - DNA, 25 bp, Homo sapien
cacatacagtggcatggagattaca

SEQ ID NO: 1130786 - DNA, 25 bp, Homo sapien
gtctggacctgtagtgttgtgctca

SEQ ID NO: 1130787 - DNA, 25 bp, Homo sapien
tgtcaatttgctgttgtcatacaca

SEQ ID NO: 1130788 - DNA, 25 bp, Homo sapien
tttcagtgggggcacacagatggtt

SEQ ID NO: 1130789 - DNA, 25 bp, Homo sapien
cttgggctgttgcaggtagttaatt

SEQ ID NO: 1130790 - DNA, 25 bp, Homo sapien
taattggtccatccatggaattggg

SEQ ID NO: 1130791 - DNA, 25 bp, Homo sapien
agcatgtcagagcctgttttcctat

SEQ ID NO: 1130792 - DNA, 25 bp, Homo sapien
tcttggcaagctgacctgccctgag

SEQ ID NO: 1130793 - DNA, 25 bp, Homo sapien
gtcttggcaagctgacctgccctga

SEQ ID NO: 1130794 - DNA, 25 bp, Homo sapien
tcagatggtctctcctgtaggagat

SEQ ID NO: 1130795 - DNA, 25 bp, Homo sapien
tgtaggagattgaaggctcttgtgt

SEQ ID NO: 1130796 - DNA, 25 bp, Homo sapien
cctgtaggagattgaaggctcttgt

SEQ ID NO: 1130797 - DNA, 25 bp, Homo sapien
actcagatggtctctcctgtaggag

SEQ ID NO: 1130798 - DNA, 25 bp, Homo sapien
accaatactggaaatactggggata

SEQ ID NO: 1130799 - DNA, 25 bp, Homo sapien
taccaatactggaaatactggggat

SEQ ID NO: 1130800 - DNA, 25 bp, Homo sapien
ccaatactggaaatactggggatac

SEQ ID NO: 1130801 - DNA, 25 bp, Homo sapien
gaagcatcctttcaggtcaccactg

SEQ ID NO: 1130802 - DNA, 25 bp, Homo sapien
ggttctgatgcatatacccaaggca

SEQ ID NO: 1130803 - DNA, 25 bp, Homo sapien
tataaattgggacacctgactgtgc

SEQ ID NO: 1130804 - DNA, 25 bp, Homo sapien
tattcacaagctcaagtaaactggg

SEQ ID NO: 1130805 - DNA, 25 bp, Homo sapien
ccagaggcatattgaagggagagtc

SEQ ID NO: 1130806 - DNA, 25 bp, Homo sapien
ggaaaggaatccacgagtgcacgca

SEQ ID NO: 1130807 - DNA, 25 bp, Homo sapien
gaagctcttacatcctgtttgctgg

SEQ ID NO: 1130808 - DNA, 25 bp, Homo sapien
cattctaagcggaacagccagaggc

SEQ ID NO: 1130809 - DNA, 25 bp, Homo sapien
gcagtgtcgtctacgtgtgaattct

SEQ ID NO: 1130810 - DNA, 25 bp, Homo sapien
gaacaggcagtgtcgtctacgtgtg

SEQ ID NO: 1130811 - DNA, 25 bp, Homo sapien
tgtcgtctacgtgtgaattcttgcc

SEQ ID NO: 1130812 - DNA, 25 bp, Homo sapien
attcccgtgccctctggaacaggca

SEQ ID NO: 1130813 - DNA, 25 bp, Homo sapien
tttgaaccttaatacaggcgttggc

SEQ ID NO: 1130814 - DNA, 25 bp, Homo sapien
tgaccaccctatccatgcatttgaa

SEQ ID NO: 1130815 - DNA, 25 bp, Homo sapien
gatgatcggaaaggatgaccaccct

SEQ ID NO: 1130816 - DNA, 25 bp, Homo sapien
taatagatagacaacagcaggtacg

SEQ ID NO: 1130817 - DNA, 25 bp, Homo sapien
gatccctgcaggtagcacttccctt

SEQ ID NO: 1130818 - DNA, 25 bp, Homo sapien
tgggcttcctcaacaggctgacaga

SEQ ID NO: 1130819 - DNA, 25 bp, Homo sapien
taatgtagcacaccatgcaatttgc

SEQ ID NO: 1130820 - DNA, 25 bp, Homo sapien
tgcaatttgcctatcgctacactag

SEQ ID NO: 1130821 - DNA, 25 bp, Homo sapien
ccaagtggctatgctactgtaaaca

SEQ ID NO: 1130822 - DNA, 25 bp, Homo sapien
gagaaatagataccaagtggctatg

SEQ ID NO: 1130823 - DNA, 25 bp, Homo sapien
tagataccaagtggctatgctactg

SEQ ID NO: 1130824 - DNA, 25 bp, Homo sapien
gtggctatgctactgtaaacaggta

SEQ ID NO: 1130825 - DNA, 25 bp, Homo sapien
caaagccttgcagagggcttcagta

SEQ ID NO: 1130826 - DNA, 25 bp, Homo sapien
ggcaaagccttgcagagggcttcag

SEQ ID NO: 1130827 - DNA, 25 bp, Homo sapien
aaagccttgcagagggcttcagtaa

SEQ ID NO: 1130828 - DNA, 25 bp, Homo sapien
agggcaaagccttgcagagggcttc

SEQ ID NO: 1130829 - DNA, 25 bp, Homo sapien
tgtataggtcgatttctcatctctg

SEQ ID NO: 1130830 - DNA, 25 bp, Homo sapien
taccacccaggtccataaggatggc

SEQ ID NO: 1130831 - DNA, 25 bp, Homo sapien
tctcaccgatatgtggacaggcatg

SEQ ID NO: 1130832 - DNA, 25 bp, Homo sapien
tgtgttgtcctttggtaccacccag

SEQ ID NO: 1130833 - DNA, 25 bp, Homo sapien
cctcaagggaagaaatattcggcca

SEQ ID NO: 1130834 - DNA, 25 bp, Homo sapien
tcggccatatcctattaaactttgg

SEQ ID NO: 1130835 - DNA, 25 bp, Homo sapien
gggaagaaatattcggccatatcct

SEQ ID NO: 1130836 - DNA, 25 bp, Homo sapien
taaactttggaggatctgcacgcat

SEQ ID NO: 1130837 - DNA, 25 bp, Homo sapien
ggaaagagacagattgctccaaatt

SEQ ID NO: 1130838 - DNA, 25 bp, Homo sapien
agattgctctaaatgctggaacaca

SEQ ID NO: 1130839 - DNA, 25 bp, Homo sapien
tcaatatggagcaatagtcagcgaa

SEQ ID NO: 1130840 - DNA, 25 bp, Homo sapien
gaaaatttactgtgatgtgaaagac

SEQ ID NO: 1130841 - DNA, 25 bp, Homo sapien
tttgcaacttgaacagaagaaactg

SEQ ID NO: 1130842 - DNA, 25 bp, Homo sapien
gtttgcaacttgaacagaagaaact

SEQ ID NO: 1130843 - DNA, 25 bp, Homo sapien
tggtttgcaacttgaacagaagaaa

SEQ ID NO: 1130844 - DNA, 25 bp, Homo sapien
ggtttgcaacttgaacagaagaaac

SEQ ID NO: 1130845 - DNA, 25 bp, Homo sapien
tgctcttctcatacaggacttattt

SEQ ID NO: 1130846 - DNA, 25 bp, Homo sapien
tcatacaggacttatttccaaaaat

SEQ ID NO: 1130847 - DNA, 25 bp, Homo sapien
gatttgttaccctctgagcctgcat

SEQ ID NO: 1130848 - DNA, 25 bp, Homo sapien
ccaaattgatttgttaccctctgag

SEQ ID NO: 1130849 - DNA, 25 bp, Homo sapien
cccccaggaatgtgtctggacctca

SEQ ID NO: 1130850 - DNA, 25 bp, Homo sapien
ccccaggaatgtgtctggacctcat

SEQ ID NO: 1130851 - DNA, 25 bp, Homo sapien
tgcccccaggaatgtgtctggacct

SEQ ID NO: 1130852 - DNA, 25 bp, Homo sapien
ctgcccccaggaatgtgtctggacc

SEQ ID NO: 1130853 - DNA, 25 bp, Homo sapien
gctcttccacacatatcatttgacg

SEQ ID NO: 1130854 - DNA, 25 bp, Homo sapien
tgcatccttatgtagctgttgaagc

SEQ ID NO: 1130855 - DNA, 25 bp, Homo sapien
tggtaagtctacctcattgggtagc

SEQ ID NO: 1130856 - DNA, 25 bp, Homo sapien
gacgatgatgtgaatttgtctctgg

SEQ ID NO: 1130857 - DNA, 25 bp, Homo sapien
gagagtctaagtaccatcaccatgg

SEQ ID NO: 1130858 - DNA, 25 bp, Homo sapien
catgccaagacagcaactcagtcgg

SEQ ID NO: 1130859 - DNA, 25 bp, Homo sapien
caaatttaatagagttctagacaac

SEQ ID NO: 1130860 - DNA, 25 bp, Homo sapien
tccccaatgctaagagaagatggct

SEQ ID NO: 1130861 - DNA, 25 bp, Homo sapien
tgtttacagctcacgcaaatgactg

SEQ ID NO: 1130862 - DNA, 25 bp, Homo sapien
tcatcgtccagttgtgcagaagcat

SEQ ID NO: 1130863 - DNA, 25 bp, Homo sapien
catttctgaagtagcccagcctgca

SEQ ID NO: 1130864 - DNA, 25 bp, Homo sapien
tataactgcatcgattggagtggcc

SEQ ID NO: 1130865 - DNA, 25 bp, Homo sapien
cacagaagaatagctgaaattgtaa

SEQ ID NO: 1130866 - DNA, 25 bp, Homo sapien
ccccgtagctcaaaaggcacagaag

SEQ ID NO: 1130867 - DNA, 25 bp, Homo sapien
tcaaaaggcacagaagaatagctga

SEQ ID NO: 1130868 - DNA, 25 bp, Homo sapien
gaagaatagctgaaattgtaatgga

SEQ ID NO: 1130869 - DNA, 25 bp, Homo sapien
ggagcgtcacgtacttaaatgcatc

SEQ ID NO: 1130870 - DNA, 25 bp, Homo sapien
cactggtaacagatcgtaatggaga

SEQ ID NO: 1130871 - DNA, 25 bp, Homo sapien
gaaatgcttcggcaaatatggctat

SEQ ID NO: 1130872 - DNA, 25 bp, Homo sapien
caggttatcaacacaggagcgtcac

SEQ ID NO: 1130873 - DNA, 25 bp, Homo sapien
tcctgagccattacaacgatcatgg

SEQ ID NO: 1130874 - DNA, 25 bp, Homo sapien
taggccctgttgttccagtcttaca

SEQ ID NO: 1130875 - DNA, 25 bp, Homo sapien
gacagccgtagtgccaggaatttcc

SEQ ID NO: 1130876 - DNA, 25 bp, Homo sapien
ggaatttcccggcagacactcatca

SEQ ID NO: 1130877 - DNA, 25 bp, Homo sapien
cacgcaccggcctagccaagcagaa

SEQ ID NO: 1130878 - DNA, 25 bp, Homo sapien
gaaatcagccatgctgcagcaggca

SEQ ID NO: 1130879 - DNA, 25 bp, Homo sapien
tcagcggtttggatctttttctgct

SEQ ID NO: 1130880 - DNA, 25 bp, Homo sapien
gcggtttggatctttttctgctctg

SEQ ID NO: 1130881 - DNA, 25 bp, Homo sapien
tggtctggacgggtatatggatctc

SEQ ID NO: 1130882 - DNA, 25 bp, Homo sapien
ctattgtgtcacttaatttatggtc

SEQ ID NO: 1130883 - DNA, 25 bp, Homo sapien
tcattctgcggtgaagatttccacg

SEQ ID NO: 1130884 - DNA, 25 bp, Homo sapien
tatggatctccatacaatatttcaa

SEQ ID NO: 1130885 - DNA, 25 bp, Homo sapien
ggagctctagggtaactttcagttc

SEQ ID NO: 1130886 - DNA, 25 bp, Homo sapien
tggagctctagggtaactttcagtt

SEQ ID NO: 1130887 - DNA, 25 bp, Homo sapien
gagctctagggtaactttcagttca

SEQ ID NO: 1130888 - DNA, 25 bp, Homo sapien
gctctagggtaactttcagttcaag

SEQ ID NO: 1130889 - DNA, 25 bp, Homo sapien
gaagacctggtaatctcaagagaaa

SEQ ID NO: 1130890 - DNA, 25 bp, Homo sapien
gacatgccacgtgccttgacaagct

SEQ ID NO: 1130891 - DNA, 25 bp, Homo sapien
gagaaatgaggctgaaccaaatggc

SEQ ID NO: 1130892 - DNA, 25 bp, Homo sapien
tcgcatagtgcctaacctcagaggc

SEQ ID NO: 1130893 - DNA, 25 bp, Homo sapien
atatgggcagccctaactgacattt

SEQ ID NO: 1130894 - DNA, 25 bp, Homo sapien
gctgacatttgtttcaagtgaaaag

SEQ ID NO: 1130895 - DNA, 25 bp, Homo sapien
tctgcaagtataaaatgcacatctg

SEQ ID NO: 1130896 - DNA, 25 bp, Homo sapien
tggctattaagccttacaatatggg

SEQ ID NO: 1130897 - DNA, 25 bp, Homo sapien
tgtttgctcccttatgtgacaatgc

SEQ ID NO: 1130898 - DNA, 25 bp, Homo sapien
gtttgctcccttatgtgacaatgcc

SEQ ID NO: 1130899 - DNA, 25 bp, Homo sapien
agtgtttgctcccttatgtgacaat

SEQ ID NO: 1130900 - DNA, 25 bp, Homo sapien
tttgctcccttatgtgacaatgcct

SEQ ID NO: 1130901 - DNA, 25 bp, Homo sapien
tgaatttttcttaatgtttggaaca

SEQ ID NO: 1130902 - DNA, 25 bp, Homo sapien
gagtttgagcatacatgtccttctc

SEQ ID NO: 1130903 - DNA, 25 bp, Homo sapien
tggagtttgagcatacatgtccttc

SEQ ID NO: 1130904 - DNA, 25 bp, Homo sapien
tgtggagtttgagcatacatgtcct

SEQ ID NO: 1130905 - DNA, 25 bp, Homo sapien
ggagtttgagcatacatgtccttct

SEQ ID NO: 1130906 - DNA, 25 bp, Homo sapien
caggtaggatcaggctgttgctttg

SEQ ID NO: 1130907 - DNA, 25 bp, Homo sapien
cggctgctagcagataaaactgtgc

SEQ ID NO: 1130908 - DNA, 25 bp, Homo sapien
catacacctttcactgttaagcttc

SEQ ID NO: 1130909 - DNA, 25 bp, Homo sapien
tcaggctgttgctttgattctcggc

SEQ ID NO: 1130910 - DNA, 25 bp, Homo sapien
aagaatggcccaaggtgaaactcca

SEQ ID NO: 1130911 - DNA, 25 bp, Homo sapien
gagaacttgcccttgcttaactgaa

SEQ ID NO: 1130912 - DNA, 25 bp, Homo sapien
tacttacgtaagaaaagagcttcac

SEQ ID NO: 1130913 - DNA, 25 bp, Homo sapien
gaaactccacttatgtacttacgta

SEQ ID NO: 1130914 - DNA, 25 bp, Homo sapien
caagatgacgggttgttcctgcaga

SEQ ID NO: 1130915 - DNA, 25 bp, Homo sapien
gaatgatcccttacaccaacatgag

SEQ ID NO: 1130916 - DNA, 25 bp, Homo sapien
cctgtgatacccatgtcaagacaga

SEQ ID NO: 1130917 - DNA, 25 bp, Homo sapien
gagcaatcctgatcattttatggcc

SEQ ID NO: 1130918 - DNA, 25 bp, Homo sapien
acagcactgtgctcacacgtagcac

SEQ ID NO: 1130919 - DNA, 25 bp, Homo sapien
ggcacagcactgtgctcacacgtag

SEQ ID NO: 1130920 - DNA, 25 bp, Homo sapien
cacagagttggcacagcactgtgct

SEQ ID NO: 1130921 - DNA, 25 bp, Homo sapien
agagttggcacagcactgtgctcac

SEQ ID NO: 1130922 - DNA, 25 bp, Homo sapien
tcttaccattcctgtctccggggca

SEQ ID NO: 1130923 - DNA, 25 bp, Homo sapien
ttaccattcctgtctccggggcaac

SEQ ID NO: 1130924 - DNA, 25 bp, Homo sapien
ccattcctgtctccggggcaacaga

SEQ ID NO: 1130925 - DNA, 25 bp, Homo sapien
taccattcctgtctccggggcaaca

SEQ ID NO: 1130926 - DNA, 25 bp, Homo sapien
agctagtggcctttatgttaggaaa

SEQ ID NO: 1130927 - DNA, 25 bp, Homo sapien
taacctgaagctagtggcctttatg

SEQ ID NO: 1130928 - DNA, 25 bp, Homo sapien
aatgaatagcataacctgaagctag

SEQ ID NO: 1130929 - DNA, 25 bp, Homo sapien
ctgtatactggcaagggtattttca

SEQ ID NO: 1130930 - DNA, 25 bp, Homo sapien
cacttcaaggaatcaatgtaatgcg

SEQ ID NO: 1130931 - DNA, 25 bp, Homo sapien
taatgcgttaccatgacagcttttc

SEQ ID NO: 1130932 - DNA, 25 bp, Homo sapien
cacctgaaacaagcccaggattgct

SEQ ID NO: 1130933 - DNA, 25 bp, Homo sapien
taacaaaggtatgtgggctacattc

SEQ ID NO: 1130934 - DNA, 25 bp, Homo sapien
gttcccctaaggtcatgatgatcca

SEQ ID NO: 1130935 - DNA, 25 bp, Homo sapien
tatgctcagagggtattagccagga

SEQ ID NO: 1130936 - DNA, 25 bp, Homo sapien
gatgatccattccactaccaaaggg

SEQ ID NO: 1130937 - DNA, 25 bp, Homo sapien
tagccaggacttggtgttgccactt

SEQ ID NO: 1130938 - DNA, 25 bp, Homo sapien
tattcataatcatgctccatcttca

SEQ ID NO: 1130939 - DNA, 25 bp, Homo sapien
ctgatattcataatcatgctccatc

SEQ ID NO: 1130940 - DNA, 25 bp, Homo sapien
gatattcataatcatgctccatctt

SEQ ID NO: 1130941 - DNA, 25 bp, Homo sapien
attcataatcatgctccatcttcat

SEQ ID NO: 1130942 - DNA, 25 bp, Homo sapien
cccagggatgccacatgagttcaac

SEQ ID NO: 1130943 - DNA, 25 bp, Homo sapien
catggttaataacagagtgccctaa

SEQ ID NO: 1130944 - DNA, 25 bp, Homo sapien
tggtgacctctaacacggttgcgta

SEQ ID NO: 1130945 - DNA, 25 bp, Homo sapien
aatgtcatggtgaaatttccccagg

SEQ ID NO: 1130946 - DNA, 25 bp, Homo sapien
atttccgggaatagtaataaatgcg

SEQ ID NO: 1130947 - DNA, 25 bp, Homo sapien
ccgggaatagtaataaatgcgatgg

SEQ ID NO: 1130948 - DNA, 25 bp, Homo sapien
gaatagtaataaatgcgatggtgaa

SEQ ID NO: 1130949 - DNA, 25 bp, Homo sapien
atagtaataaatgcgatggtgaaac

SEQ ID NO: 1130950 - DNA, 25 bp, Homo sapien
taaatatgggaagtatagcccaagg

SEQ ID NO: 1130951 - DNA, 25 bp, Homo sapien
tatgggaagtatagcccaaggttac

SEQ ID NO: 1130952 - DNA, 25 bp, Homo sapien
atatgggaagtatagcccaaggtta

SEQ ID NO: 1130953 - DNA, 25 bp, Homo sapien
ttgtaaatatgggaagtatagccca

SEQ ID NO: 1130954 - DNA, 25 bp, Homo sapien
gtggggacacggggaaagtagcatg

SEQ ID NO: 1130955 - DNA, 25 bp, Homo sapien
agcagtcacattcgtccctgacagc

SEQ ID NO: 1130956 - DNA, 25 bp, Homo sapien
tggggacacggggaaagtagcatgc

SEQ ID NO: 1130957 - DNA, 25 bp, Homo sapien
aaagcagtcacattcgtccctgaca

SEQ ID NO: 1130958 - DNA, 25 bp, Homo sapien
tccagcgctgcatgcatgaagacag

SEQ ID NO: 1130959 - DNA, 25 bp, Homo sapien
tcttcatggaactgggacctgttgt

SEQ ID NO: 1130960 - DNA, 25 bp, Homo sapien
cattctctcggtgcgtgattccagc

SEQ ID NO: 1130961 - DNA, 25 bp, Homo sapien
ttttaaaggacaagtgcccgatgca

SEQ ID NO: 1130962 - DNA, 25 bp, Homo sapien
atgcccgtgtatgcggccgggcaca

SEQ ID NO: 1130963 - DNA, 25 bp, Homo sapien
cgcagcttctcgcagaggatgcccg

SEQ ID NO: 1130964 - DNA, 25 bp, Homo sapien
acaggcagcgcacgttgttgtggca

SEQ ID NO: 1130965 - DNA, 25 bp, Homo sapien
gtgcaggagctcgttgtcgcagaca

SEQ ID NO: 1130966 - DNA, 25 bp, Homo sapien
agggggctggcggttcccagcagcg

SEQ ID NO: 1130967 - DNA, 25 bp, Homo sapien
gggcgcgccctggccagagtcggag

SEQ ID NO: 1130968 - DNA, 25 bp, Homo sapien
gctggcggttcccagcagcgtggtc

SEQ ID NO: 1130969 - DNA, 25 bp, Homo sapien
gccctggccagagtcggagccgcag

SEQ ID NO: 1130970 - DNA, 25 bp, Homo sapien
caagggttacagagcaacgttcact

SEQ ID NO: 1130971 - DNA, 25 bp, Homo sapien
agcacgttcgttgcccttacagaga

SEQ ID NO: 1130972 - DNA, 25 bp, Homo sapien
cttgtatagtgggtgtgtgctcgca

SEQ ID NO: 1130973 - DNA, 25 bp, Homo sapien
ttggtccacacactgggcggagtcg

SEQ ID NO: 1130974 - DNA, 25 bp, Homo sapien
ccttaagactctggttcgggctgat

SEQ ID NO: 1130975 - DNA, 25 bp, Homo sapien
gatcagcatccctagagtcacatga

SEQ ID NO: 1130976 - DNA, 25 bp, Homo sapien
ccaggttgcgtcttgtgatactcca

SEQ ID NO: 1130977 - DNA, 25 bp, Homo sapien
tgctgggaacgaaatgcacactgtc

SEQ ID NO: 1130978 - DNA, 25 bp, Homo sapien
ttattgccttcttcgaattggcttt

SEQ ID NO: 1130979 - DNA, 25 bp, Homo sapien
tttattgccttcttcgaattggctt

SEQ ID NO: 1130980 - DNA, 25 bp, Homo sapien
tattgccttcttcgaattggctttt

SEQ ID NO: 1130981 - DNA, 25 bp, Homo sapien
gagcattaactacagggccagctga

SEQ ID NO: 1130982 - DNA, 25 bp, Homo sapien
gctgaactgtggagcagacgccttc

SEQ ID NO: 1130983 - DNA, 25 bp, Homo sapien
cttagggatctgactcaagggcacc

SEQ ID NO: 1130984 - DNA, 25 bp, Homo sapien
gattcctgagcgttgcgacaaagcc

SEQ ID NO: 1130985 - DNA, 25 bp, Homo sapien
tgatacagcttagccactgccacct

SEQ ID NO: 1130986 - DNA, 25 bp, Homo sapien
ctggtggctcgtactgttctctgat

SEQ ID NO: 1130987 - DNA, 25 bp, Homo sapien
tactgttctctgatacagcttagcc

SEQ ID NO: 1130988 - DNA, 25 bp, Homo sapien
ggctcgtactgttctctgatacagc

SEQ ID NO: 1130989 - DNA, 25 bp, Homo sapien
gctcagactctccactaggcaagct

SEQ ID NO: 1130990 - DNA, 25 bp, Homo sapien
tattctcaagacacattctatctgc

SEQ ID NO: 1130991 - DNA, 25 bp, Homo sapien
ccactaggcaagctgcactgttcat

SEQ ID NO: 1130992 - DNA, 25 bp, Homo sapien
tccaattcttcggaagatgtcagct

SEQ ID NO: 1130993 - DNA, 25 bp, Homo sapien
cactaataatagcaggtgtactata

SEQ ID NO: 1130994 - DNA, 25 bp, Homo sapien
taatagcaggtgtactatagacagt

SEQ ID NO: 1130995 - DNA, 25 bp, Homo sapien
taataatagcaggtgtactatagac

SEQ ID NO: 1130996 - DNA, 25 bp, Homo sapien
ataatagcaggtgtactatagacag

SEQ ID NO: 1130997 - DNA, 25 bp, Homo sapien
acatgtcagaggttgaaagggcaga

SEQ ID NO: 1130998 - DNA, 25 bp, Homo sapien
cacatgtcagaggttgaaagggcag

SEQ ID NO: 1130999 - DNA, 25 bp, Homo sapien
atgtcagaggttgaaagggcagagg

SEQ ID NO: 1131000 - DNA, 25 bp, Homo sapien
tgtcagaggttgaaagggcagaggt

SEQ ID NO: 1131001 - DNA, 25 bp, Homo sapien
gctttcaggccaacataagtcgaga

SEQ ID NO: 1131002 - DNA, 25 bp, Homo sapien
tttccagtaacttgttgacctccat

SEQ ID NO: 1131003 - DNA, 25 bp, Homo sapien
taagtcgagaagcagtaaggatttt

SEQ ID NO: 1131004 - DNA, 25 bp, Homo sapien
tgttttccagtaacttgttgacctc

SEQ ID NO: 1131005 - DNA, 25 bp, Homo sapien
ttggaaaggagagaaccaacctagc

SEQ ID NO: 1131006 - DNA, 25 bp, Homo sapien
aaggagagaaccaacctagccacca

SEQ ID NO: 1131007 - DNA, 25 bp, Homo sapien
gagagaaccaacctagccaccaggc

SEQ ID NO: 1131008 - DNA, 25 bp, Homo sapien
gaaaggagagaaccaacctagccac

SEQ ID NO: 1131009 - DNA, 25 bp, Homo sapien
cctgaccgaggatctggcagagcat

SEQ ID NO: 1131010 - DNA, 25 bp, Homo sapien
ttggcctgaccgaggatctggcaga

SEQ ID NO: 1131011 - DNA, 25 bp, Homo sapien
ccagaagctccagttccaataaata

SEQ ID NO: 1131012 - DNA, 25 bp, Homo sapien
tgccagatgcaagagatacagtgtt

SEQ ID NO: 1131013 - DNA, 25 bp, Homo sapien
gatctccaacatgatttcatgcatt

SEQ ID NO: 1131014 - DNA, 25 bp, Homo sapien
tctccaatagagattacaatagaga

SEQ ID NO: 1131015 - DNA, 25 bp, Homo sapien
aaaattgtgcggatgtggcttctgg

SEQ ID NO: 1131016 - DNA, 25 bp, Homo sapien
gattacaatagagatctccaacatg

SEQ ID NO: 1131017 - DNA, 25 bp, Homo sapien
aggtatttccacactctagggtcat

SEQ ID NO: 1131018 - DNA, 25 bp, Homo sapien
caggtatttccacactctagggtca

SEQ ID NO: 1131019 - DNA, 25 bp, Homo sapien
tacacaggtatttccacactctagg

SEQ ID NO: 1131020 - DNA, 25 bp, Homo sapien
cacaggtatttccacactctagggt

SEQ ID NO: 1131021 - DNA, 25 bp, Homo sapien
ctcatagggtagatgtgatccatca

SEQ ID NO: 1131022 - DNA, 25 bp, Homo sapien
gatgtgatccatcatataagataag

SEQ ID NO: 1131023 - DNA, 25 bp, Homo sapien
tgtgatccatcatataagataagct

SEQ ID NO: 1131024 - DNA, 25 bp, Homo sapien
gggtagatgtgatccatcatataag

SEQ ID NO: 1131025 - DNA, 25 bp, Homo sapien
tgtgcctcttgagctacgtctttga

SEQ ID NO: 1131026 - DNA, 25 bp, Homo sapien
agctacgtctttgagtgagataggc

SEQ ID NO: 1131027 - DNA, 25 bp, Homo sapien
cgtctttgagtgagataggcaaagg

SEQ ID NO: 1131028 - DNA, 25 bp, Homo sapien
catgtgcctcttgagctacgtcttt

SEQ ID NO: 1131029 - DNA, 25 bp, Homo sapien
actgggtgctgaattggcgttcacc

SEQ ID NO: 1131030 - DNA, 25 bp, Homo sapien
tgaacaagctccaattagtgctgct

SEQ ID NO: 1131031 - DNA, 25 bp, Homo sapien
attagtgctgctttgacaattacag

SEQ ID NO: 1131032 - DNA, 25 bp, Homo sapien
ccaggtagccagcctttgaattgaa

SEQ ID NO: 1131033 - DNA, 25 bp, Homo sapien
aaacaggaaaacatgctgctggcaa

SEQ ID NO: 1131034 - DNA, 25 bp, Homo sapien
ctggcaaggaaaactcaagtataac

SEQ ID NO: 1131035 - DNA, 25 bp, Homo sapien
taaacaggaaaacatgctgctggca

SEQ ID NO: 1131036 - DNA, 25 bp, Homo sapien
ctgctggcaaggaaaactcaagtat

SEQ ID NO: 1131037 - DNA, 25 bp, Homo sapien
ccttcccctcacaagatgctttctg

SEQ ID NO: 1131038 - DNA, 25 bp, Homo sapien
ttcccctcacaagatgctttctgtg

SEQ ID NO: 1131039 - DNA, 25 bp, Homo sapien
atgaaaaccatgacaaattaaagaa

SEQ ID NO: 1131040 - DNA, 25 bp, Homo sapien
ctccttcccctcacaagatgctttc

SEQ ID NO: 1131041 - DNA, 25 bp, Homo sapien
gcctaacatctatagcaaacatggc

SEQ ID NO: 1131042 - DNA, 25 bp, Homo sapien
tgcctaacatctatagcaaacatgg

SEQ ID NO: 1131043 - DNA, 25 bp, Homo sapien
cttgtcctagacaaatctaagaaga

SEQ ID NO: 1131044 - DNA, 25 bp, Homo sapien
ggaaacttcggcatttccatcagta

SEQ ID NO: 1131045 - DNA, 25 bp, Homo sapien
cctgccccaatgtgaaaactgttgg

SEQ ID NO: 1131046 - DNA, 25 bp, Homo sapien
catggagactctgataagcaccaag

SEQ ID NO: 1131047 - DNA, 25 bp, Homo sapien
tcatggatccggcaagccaaaaatc

SEQ ID NO: 1131048 - DNA, 25 bp, Homo sapien
cttgctcatggatccggcaagccaa

SEQ ID NO: 1131049 - DNA, 25 bp, Homo sapien
ccaaaaatcgtattacagcagtatg

SEQ ID NO: 1131050 - DNA, 25 bp, Homo sapien
tccggcaagccaaaaatcgtattac

SEQ ID NO: 1131051 - DNA, 25 bp, Homo sapien
tccaacaatcccagctcgaaatcct

SEQ ID NO: 1131052 - DNA, 25 bp, Homo sapien
gatgctcttacttctctcagtccag

SEQ ID NO: 1131053 - DNA, 25 bp, Homo sapien
cagtccagtgagccatattctgttt

SEQ ID NO: 1131054 - DNA, 25 bp, Homo sapien
tactcggaggattctgcgttctttg

SEQ ID NO: 1131055 - DNA, 25 bp, Homo sapien
gacatagtcatgaatcaagacttcc

SEQ ID NO: 1131056 - DNA, 25 bp, Homo sapien
taaatgcctctggaacgtggaggaa

SEQ ID NO: 1131057 - DNA, 25 bp, Homo sapien
agacttccagtaaatgcctctggaa

SEQ ID NO: 1131058 - DNA, 25 bp, Homo sapien
tgtgtctttgctatccgaagctgct

SEQ ID NO: 1131059 - DNA, 25 bp, Homo sapien
aaggactccattagcccgctctggt

SEQ ID NO: 1131060 - DNA, 25 bp, Homo sapien
ggtgtgctgcctgtataatgccctt

SEQ ID NO: 1131061 - DNA, 25 bp, Homo sapien
taatgcccttgatctctaagagaaa

SEQ ID NO: 1131062 - DNA, 25 bp, Homo sapien
ggcaaaccaatcagatggcaacctc

SEQ ID NO: 1131063 - DNA, 25 bp, Homo sapien
gccagtgacagttaggacttatttc

SEQ ID NO: 1131064 - DNA, 25 bp, Homo sapien
cagtgacagttaggacttatttccc

SEQ ID NO: 1131065 - DNA, 25 bp, Homo sapien
agcatctagccagtgacagttagga

SEQ ID NO: 1131066 - DNA, 25 bp, Homo sapien
tctagccagtgacagttaggactta

SEQ ID NO: 1131067 - DNA, 25 bp, Homo sapien
ggtacttctgtgtaggtaagctcat

SEQ ID NO: 1131068 - DNA, 25 bp, Homo sapien
taggtaagctcattaggaaaaagca

SEQ ID NO: 1131069 - DNA, 25 bp, Homo sapien
atcacacgtcttcccgccaggagag

SEQ ID NO: 1131070 - DNA, 25 bp, Homo sapien
gagaggaaagctcctaggtacttct

SEQ ID NO: 1131071 - DNA, 25 bp, Homo sapien
tcagccaatcgaaagggagtccggt

SEQ ID NO: 1131072 - DNA, 25 bp, Homo sapien
cattctgaatggacaggcgatggcc

SEQ ID NO: 1131073 - DNA, 25 bp, Homo sapien
tcagatcccgaatccggagtggcgg

SEQ ID NO: 1131074 - DNA, 25 bp, Homo sapien
gcacagtaatgcgaaggatcccaga

SEQ ID NO: 1131075 - DNA, 25 bp, Homo sapien
ttaaatctttgctgggtcctatgtc

SEQ ID NO: 1131076 - DNA, 25 bp, Homo sapien
taaatctttgctgggtcctatgtca

SEQ ID NO: 1131077 - DNA, 25 bp, Homo sapien
taatggccatcacagtcctgaaagc

SEQ ID NO: 1131078 - DNA, 25 bp, Homo sapien
attgcagatatcaccttgcttcagg

SEQ ID NO: 1131079 - DNA, 25 bp, Homo sapien
tgccatagttaatggccatcacagt

SEQ ID NO: 1131080 - DNA, 25 bp, Homo sapien
aaagcccacacaccaatttccaaat

SEQ ID NO: 1131081 - DNA, 25 bp, Homo sapien
gcgctgactcccttagaaatcctga

SEQ ID NO: 1131082 - DNA, 25 bp, Homo sapien
tcaattttaaagaacaccggcataa

SEQ ID NO: 1131083 - DNA, 25 bp, Homo sapien
cacccgtatcgcgaaagagttgaag

SEQ ID NO: 1131084 - DNA, 25 bp, Homo sapien
gaaatagaatgaaagtgcagccaag

SEQ ID NO: 1131085 - DNA, 25 bp, Homo sapien
taaaataggaactggagattcccaa

SEQ ID NO: 1131086 - DNA, 25 bp, Homo sapien
taggatcctctgtttgatagttctc

SEQ ID NO: 1131087 - DNA, 25 bp, Homo sapien
ttgtttgcagtggtaaaagaaaaca

SEQ ID NO: 1131088 - DNA, 25 bp, Homo sapien
ccaaaatggttgatgtggagaagtg

SEQ ID NO: 1131089 - DNA, 25 bp, Homo sapien
gcctttgcgaatgttttttcataag

SEQ ID NO: 1131090 - DNA, 25 bp, Homo sapien
actccaattgcctttgcgaatgttt

SEQ ID NO: 1131091 - DNA, 25 bp, Homo sapien
tgcctttgcgaatgttttttcataa

SEQ ID NO: 1131092 - DNA, 25 bp, Homo sapien
ccaattgcctttgcgaatgtttttt

SEQ ID NO: 1131093 - DNA, 25 bp, Homo sapien
tcatatttaagcctgctgtttttcc

SEQ ID NO: 1131094 - DNA, 25 bp, Homo sapien
cacaaagctatggtttccacggtta

SEQ ID NO: 1131095 - DNA, 25 bp, Homo sapien
tattccatgtgttgggcccaatccc

SEQ ID NO: 1131096 - DNA, 25 bp, Homo sapien
cagagatggtcagtagctgccataa

SEQ ID NO: 1131097 - DNA, 25 bp, Homo sapien
gaagtgattcttgttatagcccaca

SEQ ID NO: 1131098 - DNA, 25 bp, Homo sapien
ttaaataccctaaagtctgagcaga

SEQ ID NO: 1131099 - DNA, 25 bp, Homo sapien
caccccaaggtctggttgactcatt

SEQ ID NO: 1131100 - DNA, 25 bp, Homo sapien
caatgaccgtatatgtaaagggcac

SEQ ID NO: 1131101 - DNA, 25 bp, Homo sapien
catagtaccatgatgcaaacaagga

SEQ ID NO: 1131102 - DNA, 25 bp, Homo sapien
gcccatatcaagctgggggggcttt

SEQ ID NO: 1131103 - DNA, 25 bp, Homo sapien
tgcccatatcaagctgggggggctt

SEQ ID NO: 1131104 - DNA, 25 bp, Homo sapien
cccatatcaagctgggggggctttg

SEQ ID NO: 1131105 - DNA, 25 bp, Homo sapien
ctttcttctggttccactgaagagg

SEQ ID NO: 1131106 - DNA, 25 bp, Homo sapien
ttcttctggttccactgaagaggcc

SEQ ID NO: 1131107 - DNA, 25 bp, Homo sapien
cttctggttccactgaagaggccat

SEQ ID NO: 1131108 - DNA, 25 bp, Homo sapien
tcttctggttccactgaagaggcca

SEQ ID NO: 1131109 - DNA, 25 bp, Homo sapien
tctaggtgcaatacttcatctgagg

SEQ ID NO: 1131110 - DNA, 25 bp, Homo sapien
caccgaggatatgttaaggttgcca

SEQ ID NO: 1131111 - DNA, 25 bp, Homo sapien
gactggcaggaggaaaatcagcttg

SEQ ID NO: 1131112 - DNA, 25 bp, Homo sapien
gaaaaaccgtcagagaacaatgctg

SEQ ID NO: 1131113 - DNA, 25 bp, Homo sapien
gaataccttgtacattggttctgaa

SEQ ID NO: 1131114 - DNA, 25 bp, Homo sapien
agtactgagcagaataccttgtaca

SEQ ID NO: 1131115 - DNA, 25 bp, Homo sapien
aaggctggccgtatttatctgtgga

SEQ ID NO: 1131116 - DNA, 25 bp, Homo sapien
tatctgtggatccttttcagtactg

SEQ ID NO: 1131117 - DNA, 25 bp, Homo sapien
tgtaactgctctgccgatgcatttg

SEQ ID NO: 1131118 - DNA, 25 bp, Homo sapien
aactgctctgccgatgcatttgctg

SEQ ID NO: 1131119 - DNA, 25 bp, Homo sapien
tcattgtaactgctctgccgatgca

SEQ ID NO: 1131120 - DNA, 25 bp, Homo sapien
gctctgccgatgcatttgctgactc

SEQ ID NO: 1131121 - DNA, 25 bp, Homo sapien
tagatttattgtgggtcaccctacc

SEQ ID NO: 1131122 - DNA, 25 bp, Homo sapien
gagctgtgagacatcttcctgtatc

SEQ ID NO: 1131123 - DNA, 25 bp, Homo sapien
ctttggacctcaagcactgcactgt

SEQ ID NO: 1131124 - DNA, 25 bp, Homo sapien
tgggcaccaatggtagtgaagcctt

SEQ ID NO: 1131125 - DNA, 25 bp, Homo sapien
tgtaaatcggtttcatggtcgtctc

SEQ ID NO: 1131126 - DNA, 25 bp, Homo sapien
tcggtttcatggtcgtctcttctgt

SEQ ID NO: 1131127 - DNA, 25 bp, Homo sapien
ttctgtgcctttcgaaactgccaat

SEQ ID NO: 1131128 - DNA, 25 bp, Homo sapien
tctcttctgtgcctttcgaaactgc

SEQ ID NO: 1131129 - DNA, 25 bp, Homo sapien
tctgccatgcgggtaagagcgcagt

SEQ ID NO: 1131130 - DNA, 25 bp, Homo sapien
caatccgtgattgaagccattaaga

SEQ ID NO: 1131131 - DNA, 25 bp, Homo sapien
tcctggagtttgactgaagtgtgtc

SEQ ID NO: 1131132 - DNA, 25 bp, Homo sapien
agtcctcatggctactgctcgctgc

SEQ ID NO: 1131133 - DNA, 25 bp, Homo sapien
ctgtgaacagtaaccaagggtttag

SEQ ID NO: 1131134 - DNA, 25 bp, Homo sapien
tgtgaacagtaaccaagggtttaga

SEQ ID NO: 1131135 - DNA, 25 bp, Homo sapien
tatgggttggggtatcgtagtggta

SEQ ID NO: 1131136 - DNA, 25 bp, Homo sapien
gggtatcgtagtggtaccattcaga

SEQ ID NO: 1131137 - DNA, 25 bp, Homo sapien
ttggggtatcgtagtggtaccattc

SEQ ID NO: 1131138 - DNA, 25 bp, Homo sapien
aaatatctgagcagggggttgtgtt

SEQ ID NO: 1131139 - DNA, 25 bp, Homo sapien
gagtccgattccttctccaacaagt

SEQ ID NO: 1131140 - DNA, 25 bp, Homo sapien
cagtcccttcctcttgatttctcct

SEQ ID NO: 1131141 - DNA, 25 bp, Homo sapien
tcctcttcgtcccaaactgacttgg

SEQ ID NO: 1131142 - DNA, 25 bp, Homo sapien
taagttctcatgatcattgcagccc

SEQ ID NO: 1131143 - DNA, 25 bp, Homo sapien
gagaaagtgtgtggcagcacctctg

SEQ ID NO: 1131144 - DNA, 25 bp, Homo sapien
gctctggctgcctaaattgaacatt

SEQ ID NO: 1131145 - DNA, 25 bp, Homo sapien
caggttgccaaccagtaagttacag

SEQ ID NO: 1131146 - DNA, 25 bp, Homo sapien
caagctgaaaatggatccccgctgg

SEQ ID NO: 1131147 - DNA, 25 bp, Homo sapien
tgtttctgggacattgattcttttc

SEQ ID NO: 1131148 - DNA, 25 bp, Homo sapien
tacaatggtttataatacttagagg

SEQ ID NO: 1131149 - DNA, 25 bp, Homo sapien
ttcttattaagataccacatggttt

SEQ ID NO: 1131150 - DNA, 25 bp, Homo sapien
tgtaagaaagtcacctcaactgatg

SEQ ID NO: 1131151 - DNA, 25 bp, Homo sapien
ggtggtttctagctttttatcacca

SEQ ID NO: 1131152 - DNA, 25 bp, Homo sapien
ccaggaaccttcttacaatttagag

SEQ ID NO: 1131153 - DNA, 25 bp, Homo sapien
caggaaccttcttacaatttagagg

SEQ ID NO: 1131154 - DNA, 25 bp, Homo sapien
agctttttatcaccaggaaccttct

SEQ ID NO: 1131155 - DNA, 25 bp, Homo sapien
cactgaacatttcagtgctcgtaac

SEQ ID NO: 1131156 - DNA, 25 bp, Homo sapien
actgaacatttcagtgctcgtaaca

SEQ ID NO: 1131157 - DNA, 25 bp, Homo sapien
tggcccttgaccttagtgcctgaag

SEQ ID NO: 1131158 - DNA, 25 bp, Homo sapien
gacatttctcgaagttggttagcct

SEQ ID NO: 1131159 - DNA, 25 bp, Homo sapien
tcttctgtagggtaattgtttccca

SEQ ID NO: 1131160 - DNA, 25 bp, Homo sapien
tccttgagtttagggctggcccttg

SEQ ID NO: 1131161 - DNA, 25 bp, Homo sapien
taatctgctcctcaggatcacttca

SEQ ID NO: 1131162 - DNA, 25 bp, Homo sapien
tacctgtcctgtcttactcttcctc

SEQ ID NO: 1131163 - DNA, 25 bp, Homo sapien
tggtcagtttagtaattcgtctttg

SEQ ID NO: 1131164 - DNA, 25 bp, Homo sapien
tattccccaagagcaatggtcagtt

SEQ ID NO: 1131165 - DNA, 25 bp, Homo sapien
taagtattccccaagagcaatggtc

SEQ ID NO: 1131166 - DNA, 25 bp, Homo sapien
catgggtacatctggagagcacctc

SEQ ID NO: 1131167 - DNA, 25 bp, Homo sapien
gacagttccatacaagcttccaaga

SEQ ID NO: 1131168 - DNA, 25 bp, Homo sapien
gcttggcctcttattgcaaccacag

SEQ ID NO: 1131169 - DNA, 25 bp, Homo sapien
cacttcaaaatcgtcttgcttggcc

SEQ ID NO: 1131170 - DNA, 25 bp, Homo sapien
tgaggcgggaaagaaataagttgtc

SEQ ID NO: 1131171 - DNA, 25 bp, Homo sapien
gtgtgaggatttcgtaaaggctttc

SEQ ID NO: 1131172 - DNA, 25 bp, Homo sapien
taagttgtcttagggtgcccttcac

SEQ ID NO: 1131173 - DNA, 25 bp, Homo sapien
tgaatgcgaaagctttgcgtccgga

SEQ ID NO: 1131174 - DNA, 25 bp, Homo sapien
ggcccatggtactgccctctgactg

SEQ ID NO: 1131175 - DNA, 25 bp, Homo sapien
tgtgccttgctcataatgcctctca

SEQ ID NO: 1131176 - DNA, 25 bp, Homo sapien
gtcatggcggtgactcagctggccc

SEQ ID NO: 1131177 - DNA, 25 bp, Homo sapien
tcataacctgaattagtgcccaaga

SEQ ID NO: 1131178 - DNA, 25 bp, Homo sapien
gtgtatggactccatcttattgttc

SEQ ID NO: 1131179 - DNA, 25 bp, Homo sapien
agtgtatggactccatcttattgtt

SEQ ID NO: 1131180 - DNA, 25 bp, Homo sapien
acttgctgcggccaatacttccatg

SEQ ID NO: 1131181 - DNA, 25 bp, Homo sapien
catccatctgatattgccctaaata

SEQ ID NO: 1131182 - DNA, 25 bp, Homo sapien
tttccttgtggctgcggccggttgc

SEQ ID NO: 1131183 - DNA, 25 bp, Homo sapien
tgcggccaatacttccatgtctttc

SEQ ID NO: 1131184 - DNA, 25 bp, Homo sapien
tagataactggcactcaagatccac

SEQ ID NO: 1131185 - DNA, 25 bp, Homo sapien
catggccagccacgatttacatcac

SEQ ID NO: 1131186 - DNA, 25 bp, Homo sapien
gttgcatccttagtaattcagttta

SEQ ID NO: 1131187 - DNA, 25 bp, Homo sapien
cctttatcctaatctgtgaagaaac

SEQ ID NO: 1131188 - DNA, 25 bp, Homo sapien
tgccagtcaggatgccggcactgct

SEQ ID NO: 1131189 - DNA, 25 bp, Homo sapien
caagactgccagtcaggatgccggc

SEQ ID NO: 1131190 - DNA, 25 bp, Homo sapien
gtacagtttctatgacgatcacagc

SEQ ID NO: 1131191 - DNA, 25 bp, Homo sapien
ttctatgacgatcacagctgctctg

SEQ ID NO: 1131192 - DNA, 25 bp, Homo sapien
agagtcattggtgcctaatccatcc

SEQ ID NO: 1131193 - DNA, 25 bp, Homo sapien
aggcacaaccatcccatcttgctgt

SEQ ID NO: 1131194 - DNA, 25 bp, Homo sapien
gcaggattccagctcgagggtgaaa

SEQ ID NO: 1131195 - DNA, 25 bp, Homo sapien
ttgctgtgaccctccatgggttgcc

SEQ ID NO: 1131196 - DNA, 25 bp, Homo sapien
tggatgaaatgaagagtgatacata

SEQ ID NO: 1131197 - DNA, 25 bp, Homo sapien
gctggatgaaatgaagagtgataca

SEQ ID NO: 1131198 - DNA, 25 bp, Homo sapien
ctggatgaaatgaagagtgatacat

SEQ ID NO: 1131199 - DNA, 25 bp, Homo sapien
tctttagcagacttgaggagctgcc

SEQ ID NO: 1131200 - DNA, 25 bp, Homo sapien
acaaaatgggagatattgaacaaaa

SEQ ID NO: 1131201 - DNA, 25 bp, Homo sapien
tttgtagaattaagacgaaatgtta

SEQ ID NO: 1131202 - DNA, 25 bp, Homo sapien
gggagatattgaacaaaattaattc

SEQ ID NO: 1131203 - DNA, 25 bp, Homo sapien
ccctgcgcttggctttggtgtctct

SEQ ID NO: 1131204 - DNA, 25 bp, Homo sapien
catggatcctatcactgggtctgga

SEQ ID NO: 1131205 - DNA, 25 bp, Homo sapien
gacctaatgctgcacccatatggat

SEQ ID NO: 1131206 - DNA, 25 bp, Homo sapien
tctaaccttgatctccactacattc

SEQ ID NO: 1131207 - DNA, 25 bp, Homo sapien
caaagcctcctttggcttgtggaaa

SEQ ID NO: 1131208 - DNA, 25 bp, Homo sapien
ggagtgggacagctgccaagttcac

SEQ ID NO: 1131209 - DNA, 25 bp, Homo sapien
ccaagttcaccatatgaacgttcat

SEQ ID NO: 1131210 - DNA, 25 bp, Homo sapien
cctttggcttgtggaaaagcacagt

SEQ ID NO: 1131211 - DNA, 25 bp, Homo sapien
catttgattgatgcaggcggccctt

SEQ ID NO: 1131212 - DNA, 25 bp, Homo sapien
tgggtgagtctaggcccattttaca

SEQ ID NO: 1131213 - DNA, 25 bp, Homo sapien
cttaattacatgtagagcagctctg

SEQ ID NO: 1131214 - DNA, 25 bp, Homo sapien
tcattggaactgtgtgtgctaggga

SEQ ID NO: 1131215 - DNA, 25 bp, Homo sapien
tgtagtgtgtgcaagatacatttta

SEQ ID NO: 1131216 - DNA, 25 bp, Homo sapien
tcctccaaatgtgtagtgtgtgcaa

SEQ ID NO: 1131217 - DNA, 25 bp, Homo sapien
ctcctcctccaaatgtgtagtgtgt

SEQ ID NO: 1131218 - DNA, 25 bp, Homo sapien
caaatgtgtagtgtgtgcaagatac

SEQ ID NO: 1131219 - DNA, 25 bp, Homo sapien
cactatctgtggatctgaaaatcca

SEQ ID NO: 1131220 - DNA, 25 bp, Homo sapien
caatacaagacatttcctggcactt

SEQ ID NO: 1131221 - DNA, 25 bp, Homo sapien
aaggaacctgttgccttggcctggc

SEQ ID NO: 1131222 - DNA, 25 bp, Homo sapien
gggtgattcgacacaaggaacctgt

SEQ ID NO: 1131223 - DNA, 25 bp, Homo sapien
tggaagggctgttgctctaattgtt

SEQ ID NO: 1131224 - DNA, 25 bp, Homo sapien
aattgttggcctctatagacagccc

SEQ ID NO: 1131225 - DNA, 25 bp, Homo sapien
tcatcaagctgggacagttggtctg

SEQ ID NO: 1131226 - DNA, 25 bp, Homo sapien
ctgagtcatcaagctgggacagttg

SEQ ID NO: 1131227 - DNA, 25 bp, Homo sapien
cggacattctctcatgtcgctgcct

SEQ ID NO: 1131228 - DNA, 25 bp, Homo sapien
catgtcgctgcctcaaaattcctgc

SEQ ID NO: 1131229 - DNA, 25 bp, Homo sapien
aaattcctgcagattttgatgaggt

SEQ ID NO: 1131230 - DNA, 25 bp, Homo sapien
tgaggtatggacattcagaagcctg

SEQ ID NO: 1131231 - DNA, 25 bp, Homo sapien
cacgtgactgtgttggagttctgga

SEQ ID NO: 1131232 - DNA, 25 bp, Homo sapien
agttctggagaagggttacttctga

SEQ ID NO: 1131233 - DNA, 25 bp, Homo sapien
gagaagggttacttctgagggcagc

SEQ ID NO: 1131234 - DNA, 25 bp, Homo sapien
tctgaggtgcagctcagttaggaga

SEQ ID NO: 1131235 - DNA, 25 bp, Homo sapien
gccagtatctattctagctagagca

SEQ ID NO: 1131236 - DNA, 25 bp, Homo sapien
ctggcaagagtcaatcatggtgcct

SEQ ID NO: 1131237 - DNA, 25 bp, Homo sapien
tctaggtcccattatcccaagggca

SEQ ID NO: 1131238 - DNA, 25 bp, Homo sapien
tgttcaaagctggagcaactgaaaa

SEQ ID NO: 1131239 - DNA, 25 bp, Homo sapien
ttggacaaccttagtgtctggtttg

SEQ ID NO: 1131240 - DNA, 25 bp, Homo sapien
tggacaaccttagtgtctggtttgc

SEQ ID NO: 1131241 - DNA, 25 bp, Homo sapien
tgctgtcctcttccccgtcactcat

SEQ ID NO: 1131242 - DNA, 25 bp, Homo sapien
ggacaaccttagtgtctggtttgct

SEQ ID NO: 1131243 - DNA, 25 bp, Homo sapien
gagacactcttagcctccgttcaca

SEQ ID NO: 1131244 - DNA, 25 bp, Homo sapien
tgcagagaaggatcgagaaccaggt

SEQ ID NO: 1131245 - DNA, 25 bp, Homo sapien
caagacatgtacttgccctgcatag

SEQ ID NO: 1131246 - DNA, 25 bp, Homo sapien
taaggtgcttgattcccaagcagga

SEQ ID NO: 1131247 - DNA, 25 bp, Homo sapien
agctcaggttctatttgtctccctg

SEQ ID NO: 1131248 - DNA, 25 bp, Homo sapien
ataaccctgtgttagctcaggttct

SEQ ID NO: 1131249 - DNA, 25 bp, Homo sapien
tgtgttagctcaggttctatttgtc

SEQ ID NO: 1131250 - DNA, 25 bp, Homo sapien
ctgctgccactcttgctattgtttt

SEQ ID NO: 1131251 - DNA, 25 bp, Homo sapien
agcccattcttgactagcttgtagc

SEQ ID NO: 1131252 - DNA, 25 bp, Homo sapien
ccaccagttggttgataggatgtac

SEQ ID NO: 1131253 - DNA, 25 bp, Homo sapien
gcactcagtagtgaagcaaggaacc

SEQ ID NO: 1131254 - DNA, 25 bp, Homo sapien
tcagtagtgaagcaaggaaccacct

SEQ ID NO: 1131255 - DNA, 25 bp, Homo sapien
tgattaatggagtctgaacagggct

SEQ ID NO: 1131256 - DNA, 25 bp, Homo sapien
ctatgattaatggagtctgaacagg

SEQ ID NO: 1131257 - DNA, 25 bp, Homo sapien
tatgattaatggagtctgaacaggg

SEQ ID NO: 1131258 - DNA, 25 bp, Homo sapien
attaatggagtctgaacagggctgt

SEQ ID NO: 1131259 - DNA, 25 bp, Homo sapien
tcccttgaagcatcttaaaaatcga

SEQ ID NO: 1131260 - DNA, 25 bp, Homo sapien
tctgcttgtctcatatctgtgttcg

SEQ ID NO: 1131261 - DNA, 25 bp, Homo sapien
cgttatcagcgcagtaaagcccgta

SEQ ID NO: 1131262 - DNA, 25 bp, Homo sapien
tacaatgtagtacgcaagtgtctgg

SEQ ID NO: 1131263 - DNA, 25 bp, Homo sapien
gaggccattaccatgcttgcgagca

SEQ ID NO: 1131264 - DNA, 25 bp, Homo sapien
tcaggatcaccgagccaagagatga

SEQ ID NO: 1131265 - DNA, 25 bp, Homo sapien
gatgtcctgatataccgcactgccg

SEQ ID NO: 1131266 - DNA, 25 bp, Homo sapien
ccaaaaagtcatgcgggatgtcctg

SEQ ID NO: 1131267 - DNA, 25 bp, Homo sapien
tgacatgtaaataggatcccagctg

SEQ ID NO: 1131268 - DNA, 25 bp, Homo sapien
ccgtctttaacagcaaagcatggag

SEQ ID NO: 1131269 - DNA, 25 bp, Homo sapien
caggagaaaggctttgctacgttcc

SEQ ID NO: 1131270 - DNA, 25 bp, Homo sapien
tgtagagaagatgctcattccgtct

SEQ ID NO: 1131271 - DNA, 25 bp, Homo sapien
gaagaaagcatatgccatcctttgc

SEQ ID NO: 1131272 - DNA, 25 bp, Homo sapien
tgagcccagtatttcctatccaact

SEQ ID NO: 1131273 - DNA, 25 bp, Homo sapien
tacacctcgcccttgctaagtttag

SEQ ID NO: 1131274 - DNA, 25 bp, Homo sapien
taaccttaaacacattgagcccagt

SEQ ID NO: 1131275 - DNA, 25 bp, Homo sapien
gaaatgaggctctttgacttggtct

SEQ ID NO: 1131276 - DNA, 25 bp, Homo sapien
tctccagttggactgagccacacat

SEQ ID NO: 1131277 - DNA, 25 bp, Homo sapien
gacctcaccatgaaagatgttggag

SEQ ID NO: 1131278 - DNA, 25 bp, Homo sapien
tgaatatgctcttgacctcaccatg

SEQ ID NO: 1131279 - DNA, 25 bp, Homo sapien
taagactagcccaacagttgcaaga

SEQ ID NO: 1131280 - DNA, 25 bp, Homo sapien
gcaagaacatgctctaggaggtaaa

SEQ ID NO: 1131281 - DNA, 25 bp, Homo sapien
cagataagactagcccaacagttgc

SEQ ID NO: 1131282 - DNA, 25 bp, Homo sapien
ttccccctgtgaatccggtgaggac

SEQ ID NO: 1131283 - DNA, 25 bp, Homo sapien
aaagtgtttaggtgcttgagttcca

SEQ ID NO: 1131284 - DNA, 25 bp, Homo sapien
gcatgctctggctgtgttaacttgc

SEQ ID NO: 1131285 - DNA, 25 bp, Homo sapien
caatcttttagttctgcggtaggga

SEQ ID NO: 1131286 - DNA, 25 bp, Homo sapien
ggttctaggtgttatttgaggtcga

SEQ ID NO: 1131287 - DNA, 25 bp, Homo sapien
tgtctgacactggaaggccaagtag

SEQ ID NO: 1131288 - DNA, 25 bp, Homo sapien
cagctgagtgggtcaggtgcaagaa

SEQ ID NO: 1131289 - DNA, 25 bp, Homo sapien
caagtagacactggaaggcaaagcc

SEQ ID NO: 1131290 - DNA, 25 bp, Homo sapien
ggtgcaagaagctgtctgacactgg

SEQ ID NO: 1131291 - DNA, 25 bp, Homo sapien
gaggttgtactccattcgtgggcca

SEQ ID NO: 1131292 - DNA, 25 bp, Homo sapien
gcaattgctgccgtaaccatctctt

SEQ ID NO: 1131293 - DNA, 25 bp, Homo sapien
tcccataccccaagtagacagaagc

SEQ ID NO: 1131294 - DNA, 25 bp, Homo sapien
gaagcatttggacttgggcatggaa

SEQ ID NO: 1131295 - DNA, 25 bp, Homo sapien
gaagagcataatgttactccttgct

SEQ ID NO: 1131296 - DNA, 25 bp, Homo sapien
cagttgtgacagctttaggagagga

SEQ ID NO: 1131297 - DNA, 25 bp, Homo sapien
gtgttccagttgtgacagctttagg

SEQ ID NO: 1131298 - DNA, 25 bp, Homo sapien
tcagaagagcataatgttactcctt

SEQ ID NO: 1131299 - DNA, 25 bp, Homo sapien
tcatgtgccagtgtcctcgataagg

SEQ ID NO: 1131300 - DNA, 25 bp, Homo sapien
gatggtggtctatctccttgtgacc

SEQ ID NO: 1131301 - DNA, 25 bp, Homo sapien
ccttgtgaccatgttttgttgggcc

SEQ ID NO: 1131302 - DNA, 25 bp, Homo sapien
ttgttgggccatagcccctcatgtg

SEQ ID NO: 1131303 - DNA, 25 bp, Homo sapien
ctgtgtgctgcaaaggttgcagctg

SEQ ID NO: 1131304 - DNA, 25 bp, Homo sapien
ctagaagttgcttcaacattgtaat

SEQ ID NO: 1131305 - DNA, 25 bp, Homo sapien
tcttagaactagaagttgcttcaac

SEQ ID NO: 1131306 - DNA, 25 bp, Homo sapien
gaactagaagttgcttcaacattgt

SEQ ID NO: 1131307 - DNA, 25 bp, Homo sapien
gttcttagaactagaagttgcttca

SEQ ID NO: 1131308 - DNA, 25 bp, Homo sapien
ttgctggtgctgtttagagagggac

SEQ ID NO: 1131309 - DNA, 25 bp, Homo sapien
gccacaaattgctggtgctgtttag

SEQ ID NO: 1131310 - DNA, 25 bp, Homo sapien
gctggtgctgtttagagagggacat

SEQ ID NO: 1131311 - DNA, 25 bp, Homo sapien
cagggccacaaattgctggtgctgt

SEQ ID NO: 1131312 - DNA, 25 bp, Homo sapien
tagattcccggttgactgactgctg

SEQ ID NO: 1131313 - DNA, 25 bp, Homo sapien
ccccaatgccacagaccgaagagcc

SEQ ID NO: 1131314 - DNA, 25 bp, Homo sapien
ttcatagtcgtaaagttatggcccc

SEQ ID NO: 1131315 - DNA, 25 bp, Homo sapien
ccgaagagccccctgtgcagcattg

SEQ ID NO: 1131316 - DNA, 25 bp, Homo sapien
gagcaaccctggcaatggttcattc

SEQ ID NO: 1131317 - DNA, 25 bp, Homo sapien
gaactgtccttggtacatggctttt

SEQ ID NO: 1131318 - DNA, 25 bp, Homo sapien
tgctgccagaacttcatggttaatg

SEQ ID NO: 1131319 - DNA, 25 bp, Homo sapien
ttaatagatccccacaaatgtggtg

SEQ ID NO: 1131320 - DNA, 25 bp, Homo sapien
tgaagttctgcaccctggcattcaa

SEQ ID NO: 1131321 - DNA, 25 bp, Homo sapien
ccaggcagttctcctaggagcaggc

SEQ ID NO: 1131322 - DNA, 25 bp, Homo sapien
gcagttctcctaggagcaggcccgg

SEQ ID NO: 1131323 - DNA, 25 bp, Homo sapien
cctctggctgcactggacgagcgca

SEQ ID NO: 1131324 - DNA, 25 bp, Homo sapien
actggacgagcgcaaggcagatctg

SEQ ID NO: 1131325 - DNA, 25 bp, Homo sapien
cggtgcaggggtttcacacgacggt

SEQ ID NO: 1131326 - DNA, 25 bp, Homo sapien
gacggtgcaggggtttcacacgacg

SEQ ID NO: 1131327 - DNA, 25 bp, Homo sapien
cgtcgacggtgcaggggtttcacac

SEQ ID NO: 1131328 - DNA, 25 bp, Homo sapien
tcgacggtgcaggggtttcacacga

SEQ ID NO: 1131329 - DNA, 25 bp, Homo sapien
agcagcacgggggaatgtaacaaca

SEQ ID NO: 1131330 - DNA, 25 bp, Homo sapien
caaggggtgggtaagcggtcagaca

SEQ ID NO: 1131331 - DNA, 25 bp, Homo sapien
gtgggtaagcggtcagacacgggac

SEQ ID NO: 1131332 - DNA, 25 bp, Homo sapien
agcacgggggaatgtaacaacaagg

SEQ ID NO: 1131333 - DNA, 25 bp, Homo sapien
gcagcactgatattatccaacgtgt

SEQ ID NO: 1131334 - DNA, 25 bp, Homo sapien
cctgattggcccagagtggaaccgg

SEQ ID NO: 1131335 - DNA, 25 bp, Homo sapien
gcctgattggcccagagtggaaccg

SEQ ID NO: 1131336 - DNA, 25 bp, Homo sapien
tgtgagcacaaagccgggtgcctga

SEQ ID NO: 1131337 - DNA, 25 bp, Homo sapien
tctttctcccctgcttgttaacgta

SEQ ID NO: 1131338 - DNA, 25 bp, Homo sapien
tgaccccccatgaatgcctctggag

SEQ ID NO: 1131339 - DNA, 25 bp, Homo sapien
gaaaaaactgtgacgtgatgacccc

SEQ ID NO: 1131340 - DNA, 25 bp, Homo sapien
ccctgcttgttaacgtatcatgaaa

SEQ ID NO: 1131341 - DNA, 25 bp, Homo sapien
gcagctctaaaccagtggtcgtgag

SEQ ID NO: 1131342 - DNA, 25 bp, Homo sapien
tgacaggagcagctctaaaccagtg

SEQ ID NO: 1131343 - DNA, 25 bp, Homo sapien
gaccacggctgcacaaggcagctct

SEQ ID NO: 1131344 - DNA, 25 bp, Homo sapien
tggtgctggagcttacttgctgccc

SEQ ID NO: 1131345 - DNA, 25 bp, Homo sapien
gggtacccgacaggtgagatggctg

SEQ ID NO: 1131346 - DNA, 25 bp, Homo sapien
ctgggtacccgacaggtgagatggc

SEQ ID NO: 1131347 - DNA, 25 bp, Homo sapien
caggtgagatggctgtagcagacac

SEQ ID NO: 1131348 - DNA, 25 bp, Homo sapien
gtgagatggctgtagcagacactgg

SEQ ID NO: 1131349 - DNA, 25 bp, Homo sapien
atattaaggtacatgatcagctctt

SEQ ID NO: 1131350 - DNA, 25 bp, Homo sapien
ggtacatgatcagctctttctattt

SEQ ID NO: 1131351 - DNA, 25 bp, Homo sapien
tatgaatgtgatttgtctgtacatc

SEQ ID NO: 1131352 - DNA, 25 bp, Homo sapien
tataatatgataagcctgggattct

SEQ ID NO: 1131353 - DNA, 25 bp, Homo sapien
tgttttcaatatgggcagcacaaag

SEQ ID NO: 1131354 - DNA, 25 bp, Homo sapien
gaatcagattccgttttagtcagga

SEQ ID NO: 1131355 - DNA, 25 bp, Homo sapien
gaagtggattgatcatgagcaaatg

SEQ ID NO: 1131356 - DNA, 25 bp, Homo sapien
gcacaaaggtgagagatacatatta

SEQ ID NO: 1131357 - DNA, 25 bp, Homo sapien
gaatacgaatgaacacagtggtgga

SEQ ID NO: 1131358 - DNA, 25 bp, Homo sapien
aatcattaatctttatttcgggtgg

SEQ ID NO: 1131359 - DNA, 25 bp, Homo sapien
caaataagtatagggtttatgtcct

SEQ ID NO: 1131360 - DNA, 25 bp, Homo sapien
tctgaagggaagtgatgaaattata

SEQ ID NO: 1131361 - DNA, 25 bp, Homo sapien
ccttctcagcatgttgtgcttcgta

SEQ ID NO: 1131362 - DNA, 25 bp, Homo sapien
gcttcgtacatactcctattgcagt

SEQ ID NO: 1131363 - DNA, 25 bp, Homo sapien
tcctattgcagtatttccaagtcat

SEQ ID NO: 1131364 - DNA, 25 bp, Homo sapien
catgttgtgcttcgtacatactcct

SEQ ID NO: 1131365 - DNA, 25 bp, Homo sapien
ctggaggatgtaggggccattcaat

SEQ ID NO: 1131366 - DNA, 25 bp, Homo sapien
ggaggatgtaggggccattcaatct

SEQ ID NO: 1131367 - DNA, 25 bp, Homo sapien
tggaggatgtaggggccattcaatc

SEQ ID NO: 1131368 - DNA, 25 bp, Homo sapien
ctataacaaggatgggaccttggac

SEQ ID NO: 1131369 - DNA, 25 bp, Homo sapien
gaccttggacatttttgagcttcag

SEQ ID NO: 1131370 - DNA, 25 bp, Homo sapien
cggagatctcttttggtacctggac

SEQ ID NO: 1131371 - DNA, 25 bp, Homo sapien
cctcgatggactccctctacggaga

SEQ ID NO: 1131372 - DNA, 25 bp, Homo sapien
gaagccgttaggatgagccctctcc

SEQ ID NO: 1131373 - DNA, 25 bp, Homo sapien
tgcattgtgtttggcgcccctgagg

SEQ ID NO: 1131374 - DNA, 25 bp, Homo sapien
gcagagatcccgttcgtcggtcgca

SEQ ID NO: 1131375 - DNA, 25 bp, Homo sapien
ccagagctttaaccgatgaaggtgc

SEQ ID NO: 1131376 - DNA, 25 bp, Homo sapien
aggaggaactgtggcgcccagcgct

SEQ ID NO: 1131377 - DNA, 25 bp, Homo sapien
cggagcagccgacgcgctacgagac

SEQ ID NO: 1131378 - DNA, 25 bp, Homo sapien
agtggtggacatcggcgagctgcag

SEQ ID NO: 1131379 - DNA, 25 bp, Homo sapien
ccgcctgagcgtagggagggctgcg

SEQ ID NO: 1131380 - DNA, 25 bp, Homo sapien
tgcgcctctgggaccatgttgcgct

SEQ ID NO: 1131381 - DNA, 25 bp, Homo sapien
tggctgcgggacttcgtgctgccca

SEQ ID NO: 1131382 - DNA, 25 bp, Homo sapien
gatctcccgtgacttcctcggccag

SEQ ID NO: 1131383 - DNA, 25 bp, Homo sapien
gacggcgccccaaacgctgttgcgc

SEQ ID NO: 1131384 - DNA, 25 bp, Homo sapien
agcacctcccgagacccagctccca

SEQ ID NO: 1131385 - DNA, 25 bp, Homo sapien
tcacttccggctctctggaggcggg

SEQ ID NO: 1131386 - DNA, 25 bp, Homo sapien
acttccggctctctggaggcgggcc

SEQ ID NO: 1131387 - DNA, 25 bp, Homo sapien
cctcacttccggctctctggaggcg

SEQ ID NO: 1131388 - DNA, 25 bp, Homo sapien
gagtaaccagtcttcaagaccccgc

SEQ ID NO: 1131389 - DNA, 25 bp, Homo sapien
tagacatccgtgagagacaatgccc

SEQ ID NO: 1131390 - DNA, 25 bp, Homo sapien
cgcatgctgacagcgggactggcaa

SEQ ID NO: 1131391 - DNA, 25 bp, Homo sapien
gtgagagacaatgccctccatggcc

SEQ ID NO: 1131392 - DNA, 25 bp, Homo sapien
taatcacgggcaaatcctagctaag

SEQ ID NO: 1131393 - DNA, 25 bp, Homo sapien
tactgatgagagactacccggagac

SEQ ID NO: 1131394 - DNA, 25 bp, Homo sapien
gatgattttactaagcaggcagccc

SEQ ID NO: 1131395 - DNA, 25 bp, Homo sapien
tttaaagcagaatcgccatcccagg

SEQ ID NO: 1131396 - DNA, 25 bp, Homo sapien
ttgtcatcaattcccttcccgctag

SEQ ID NO: 1131397 - DNA, 25 bp, Homo sapien
gctagtcacaactggtaactactga

SEQ ID NO: 1131398 - DNA, 25 bp, Homo sapien
tgatatcccagagtaaattaaccca

SEQ ID NO: 1131399 - DNA, 25 bp, Homo sapien
taacccatgttagtgtgcagttctg

SEQ ID NO: 1131400 - DNA, 25 bp, Homo sapien
gacaggtaacaggttgcacttcgag

SEQ ID NO: 1131401 - DNA, 25 bp, Homo sapien
catccagggttcttgtataagtgca

SEQ ID NO: 1131402 - DNA, 25 bp, Homo sapien
tggcccacacttcataaacgctttg

SEQ ID NO: 1131403 - DNA, 25 bp, Homo sapien
ttcttacttagtgggcttgggcagg

SEQ ID NO: 1131404 - DNA, 25 bp, Homo sapien
tcacaagtggagagattgcaggaag

SEQ ID NO: 1131405 - DNA, 25 bp, Homo sapien
ccgtgatgctagcagcatcagagac

SEQ ID NO: 1131406 - DNA, 25 bp, Homo sapien
gagacagcatcacaagtggagagat

SEQ ID NO: 1131407 - DNA, 25 bp, Homo sapien
tttctaaccccttctccgtgatgct

SEQ ID NO: 1131408 - DNA, 25 bp, Homo sapien
tgcccattacatacattgcatcttg

SEQ ID NO: 1131409 - DNA, 25 bp, Homo sapien
ttgcatcttgccagtgcttatttga

SEQ ID NO: 1131410 - DNA, 25 bp, Homo sapien
atgctcagtgcccattacatacatt

SEQ ID NO: 1131411 - DNA, 25 bp, Homo sapien
cattacatacattgcatcttgccag

SEQ ID NO: 1131412 - DNA, 25 bp, Homo sapien
tccataataataggctctggacaaa

SEQ ID NO: 1131413 - DNA, 25 bp, Homo sapien
tttccataataataggctctggaca

SEQ ID NO: 1131414 - DNA, 25 bp, Homo sapien
gtttccataataataggctctggac

SEQ ID NO: 1131415 - DNA, 25 bp, Homo sapien
tgtttccataataataggctctgga

SEQ ID NO: 1131416 - DNA, 25 bp, Homo sapien
gattctcgcggtacagactcagttc

SEQ ID NO: 1131417 - DNA, 25 bp, Homo sapien
cactcgcgggtgtttaagattctcg

SEQ ID NO: 1131418 - DNA, 25 bp, Homo sapien
gaaaggctgcgccaccttgtgggac

SEQ ID NO: 1131419 - DNA, 25 bp, Homo sapien
cagttgagacgccagatgtgagttg

SEQ ID NO: 1131420 - DNA, 25 bp, Homo sapien
agtagtcatcgttatcctggcaggc

SEQ ID NO: 1131421 - DNA, 25 bp, Homo sapien
taagtagtcatcgttatcctggcag

SEQ ID NO: 1131422 - DNA, 25 bp, Homo sapien
ttcgaagaggatcccgtagcgtaag

SEQ ID NO: 1131423 - DNA, 25 bp, Homo sapien
gatcccgtagcgtaagtagtcatcg

SEQ ID NO: 1131424 - DNA, 25 bp, Homo sapien
ctcctcggagttggggtcaaacgcg

SEQ ID NO: 1131425 - DNA, 25 bp, Homo sapien
acgccgtccccattgcaatccaggt

SEQ ID NO: 1131426 - DNA, 25 bp, Homo sapien
ggagctcaatgatgtccaccacgcc

SEQ ID NO: 1131427 - DNA, 25 bp, Homo sapien
agctcaatgatgtccaccacgccgt

SEQ ID NO: 1131428 - DNA, 25 bp, Homo sapien
tctccctctgcccaacgtctcccca

SEQ ID NO: 1131429 - DNA, 25 bp, Homo sapien
tctgcccaacgtctccccaggctgc

SEQ ID NO: 1131430 - DNA, 25 bp, Homo sapien
aagggcagggtttgcttctccctct

SEQ ID NO: 1131431 - DNA, 25 bp, Homo sapien
gctcacagaggagaaccccaccctt

SEQ ID NO: 1131432 - DNA, 25 bp, Homo sapien
tgtcattgatccatcactatccatg

SEQ ID NO: 1131433 - DNA, 25 bp, Homo sapien
catttcagtgatatttgttgcagga

SEQ ID NO: 1131434 - DNA, 25 bp, Homo sapien
ttcatcccagtctactgtcattgat

SEQ ID NO: 1131435 - DNA, 25 bp, Homo sapien
cagtaaaaagtagtacttccattca

SEQ ID NO: 1131436 - DNA, 25 bp, Homo sapien
gaaaaactcatagaatacaggtact

SEQ ID NO: 1131437 - DNA, 25 bp, Homo sapien
ggaattcattcattgggctcatgca

SEQ ID NO: 1131438 - DNA, 25 bp, Homo sapien
ttctgcaaattaccattcttgtagg

SEQ ID NO: 1131439 - DNA, 25 bp, Homo sapien
cagaaatttcctatagttcaactaa

SEQ ID NO: 1131440 - DNA, 25 bp, Homo sapien
tagctttctacaaggagcaaagata

SEQ ID NO: 1131441 - DNA, 25 bp, Homo sapien
taaggatagctttctacaaggagca

SEQ ID NO: 1131442 - DNA, 25 bp, Homo sapien
ggatagctttctacaaggagcaaag

SEQ ID NO: 1131443 - DNA, 25 bp, Homo sapien
ttataaggatagctttctacaagga

SEQ ID NO: 1131444 - DNA, 25 bp, Homo sapien
tctggaatagctatactctctccta

SEQ ID NO: 1131445 - DNA, 25 bp, Homo sapien
ttcaagcggtctaaaggtgccgtgc

SEQ ID NO: 1131446 - DNA, 25 bp, Homo sapien
ctgcatcatgactttcaagcggtct

SEQ ID NO: 1131447 - DNA, 25 bp, Homo sapien
gtgcatgtccgtgcaaccgcactag

SEQ ID NO: 1131448 - DNA, 25 bp, Homo sapien
tcttaaagggtaggtaaggcgagca

SEQ ID NO: 1131449 - DNA, 25 bp, Homo sapien
ctccatgggatgcattaaccagaat

SEQ ID NO: 1131450 - DNA, 25 bp, Homo sapien
tgttccctacacttagcccactgaa

SEQ ID NO: 1131451 - DNA, 25 bp, Homo sapien
gccattcaaagtatgttccctacac

SEQ ID NO: 1131452 - DNA, 25 bp, Homo sapien
cacttagcccactgaattaaaggtt

SEQ ID NO: 1131453 - DNA, 25 bp, Homo sapien
cataaacaagatgcgttgatggtac

SEQ ID NO: 1131454 - DNA, 25 bp, Homo sapien
ttgtgaagacttcgcacactgtgac

SEQ ID NO: 1131455 - DNA, 25 bp, Homo sapien
cattgaaacctactgcttgtgcaca

SEQ ID NO: 1131456 - DNA, 25 bp, Homo sapien
tcataggccccaaccttgagtgctg

SEQ ID NO: 1131457 - DNA, 25 bp, Homo sapien
tgtatcaccataaatagcgaggatg

SEQ ID NO: 1131458 - DNA, 25 bp, Homo sapien
tcaccataaatagcgaggatgacat

SEQ ID NO: 1131459 - DNA, 25 bp, Homo sapien
ctgtgtatcaccataaatagcgagg

SEQ ID NO: 1131460 - DNA, 25 bp, Homo sapien
ataaatagcgaggatgacatactga

SEQ ID NO: 1131461 - DNA, 25 bp, Homo sapien
acacaacactcctctcatgataaga

SEQ ID NO: 1131462 - DNA, 25 bp, Homo sapien
acaacactcctctcatgataagatg

SEQ ID NO: 1131463 - DNA, 25 bp, Homo sapien
aacactcctctcatgataagatgct

SEQ ID NO: 1131464 - DNA, 25 bp, Homo sapien
cactcctctcatgataagatgctct

SEQ ID NO: 1131465 - DNA, 25 bp, Homo sapien
actaatagacactaggcttaacacc

SEQ ID NO: 1131466 - DNA, 25 bp, Homo sapien
tatgtgactgaagttaagttgtatc

SEQ ID NO: 1131467 - DNA, 25 bp, Homo sapien
tatgcaagtctcaaagtaaccacaa

SEQ ID NO: 1131468 - DNA, 25 bp, Homo sapien
ctctgatacacaaatgacaaagtga

SEQ ID NO: 1131469 - DNA, 25 bp, Homo sapien
gggtaaatacaggtctgggcagtta

SEQ ID NO: 1131470 - DNA, 25 bp, Homo sapien
tcctaaatgaacaccatcaaaacta

SEQ ID NO: 1131471 - DNA, 25 bp, Homo sapien
tgaacaccatcaaaactaagcaatt

SEQ ID NO: 1131472 - DNA, 25 bp, Homo sapien
ggcagttacaccagccaatgagcca

SEQ ID NO: 1131473 - DNA, 25 bp, Homo sapien
gccacaatcaataatccctgaatac

SEQ ID NO: 1131474 - DNA, 25 bp, Homo sapien
tacaatgcctagcaagttaggagta

SEQ ID NO: 1131475 - DNA, 25 bp, Homo sapien
gatctatgccggcataaggtacaat

SEQ ID NO: 1131476 - DNA, 25 bp, Homo sapien
cctgaatactctccagttttaccta

SEQ ID NO: 1131477 - DNA, 25 bp, Homo sapien
tatgcactgcaatgattactacaaa

SEQ ID NO: 1131478 - DNA, 25 bp, Homo sapien
caactttaccattatgcactgcaat

SEQ ID NO: 1131479 - DNA, 25 bp, Homo sapien
aaaacatcactaagtgcttccagaa

SEQ ID NO: 1131480 - DNA, 25 bp, Homo sapien
cagcaactttaccattatgcactgc

SEQ ID NO: 1131481 - DNA, 25 bp, Homo sapien
cataattttctagccaaaaattctt

SEQ ID NO: 1131482 - DNA, 25 bp, Homo sapien
ctgcataattttctagccaaaaatt

SEQ ID NO: 1131483 - DNA, 25 bp, Homo sapien
taattttctagccaaaaattcttca

SEQ ID NO: 1131484 - DNA, 25 bp, Homo sapien
gcataattttctagccaaaaattct

SEQ ID NO: 1131485 - DNA, 25 bp, Homo sapien
cacaagtattagacaatgtactaca

SEQ ID NO: 1131486 - DNA, 25 bp, Homo sapien
cgagttctaataaggttcacagaga

SEQ ID NO: 1131487 - DNA, 25 bp, Homo sapien
gaaactggctaactgaccacaagta

SEQ ID NO: 1131488 - DNA, 25 bp, Homo sapien
ctgcatgcgagttctaataaggttc

SEQ ID NO: 1131489 - DNA, 25 bp, Homo sapien
ctgaatcatagaagttgtttttcct

SEQ ID NO: 1131490 - DNA, 25 bp, Homo sapien
tgaatcatagaagttgtttttcctt

SEQ ID NO: 1131491 - DNA, 25 bp, Homo sapien
gaagcacctttatgatgtttgaggt

SEQ ID NO: 1131492 - DNA, 25 bp, Homo sapien
acgcctactgcaggaagcaccttta

SEQ ID NO: 1131493 - DNA, 25 bp, Homo sapien
cacagccaacgcctactgcaggaag

SEQ ID NO: 1131494 - DNA, 25 bp, Homo sapien
caggaagcacctttatgatgtttga

SEQ ID NO: 1131495 - DNA, 25 bp, Homo sapien
ataacatctctttataacacaggta

SEQ ID NO: 1131496 - DNA, 25 bp, Homo sapien
taaactcctataactgaccaaatgt

SEQ ID NO: 1131497 - DNA, 25 bp, Homo sapien
caattaagtgattacaatgacaaca

SEQ ID NO: 1131498 - DNA, 25 bp, Homo sapien
tgtataaagcattttcaagctcagc

SEQ ID NO: 1131499 - DNA, 25 bp, Homo sapien
tttgttctaattccacatcagtctt

SEQ ID NO: 1131500 - DNA, 25 bp, Homo sapien
tccacatcagtcttcttattaccta

SEQ ID NO: 1131501 - DNA, 25 bp, Homo sapien
gtttgacactaggaaacagtgtgcc

SEQ ID NO: 1131502 - DNA, 25 bp, Homo sapien
gatgggcctgactaaaatattcctc

SEQ ID NO: 1131503 - DNA, 25 bp, Homo sapien
tgagcctcgtcacgcagaataatgc

SEQ ID NO: 1131504 - DNA, 25 bp, Homo sapien
gggttctcctctgtgagcctcgtca

SEQ ID NO: 1131505 - DNA, 25 bp, Homo sapien
ccaacgaaacatgttctcaatcttc

SEQ ID NO: 1131506 - DNA, 25 bp, Homo sapien
gagaagcaaaccctgccctttccag

SEQ ID NO: 1131507 - DNA, 25 bp, Homo sapien
gaaactggagctccgcgtttgaccc

SEQ ID NO: 1131508 - DNA, 25 bp, Homo sapien
gctacgggatcctcttcgaagacct

SEQ ID NO: 1131509 - DNA, 25 bp, Homo sapien
cttcgaagacctggattgcaatggg

SEQ ID NO: 1131510 - DNA, 25 bp, Homo sapien
caactccgaggaggtgagaccggaa

SEQ ID NO: 1131511 - DNA, 25 bp, Homo sapien
tggcctgccaggataacgatgacta

SEQ ID NO: 1131512 - DNA, 25 bp, Homo sapien
caaggtggcgcagcctttccgtggc

SEQ ID NO: 1131513 - DNA, 25 bp, Homo sapien
cacatctggcgtctcaactgtcgcg

SEQ ID NO: 1131514 - DNA, 25 bp, Homo sapien
cggctccgctagacagttgcagaag

SEQ ID NO: 1131515 - DNA, 25 bp, Homo sapien
ggaattccagtagctacagtcaggg

SEQ ID NO: 1131516 - DNA, 25 bp, Homo sapien
gaatttttacatactccggcagcac

SEQ ID NO: 1131517 - DNA, 25 bp, Homo sapien
agactgcttcctaggtgggacccga

SEQ ID NO: 1131518 - DNA, 25 bp, Homo sapien
tctgctaagggacagtcagtctgcc

SEQ ID NO: 1131519 - DNA, 25 bp, Homo sapien
gaaaagtcattgtaggcccaagcca

SEQ ID NO: 1131520 - DNA, 25 bp, Homo sapien
tcaattctttggttaggtcagagac

SEQ ID NO: 1131521 - DNA, 25 bp, Homo sapien
gaataagtatgtagtgcccactgag

SEQ ID NO: 1131522 - DNA, 25 bp, Homo sapien
tgtgtgctgttgtgctaatccctca

SEQ ID NO: 1131523 - DNA, 25 bp, Homo sapien
ggtgattcacaaggtcacattccca

SEQ ID NO: 1131524 - DNA, 25 bp, Homo sapien
tgggtgattcacaaggtcacattcc

SEQ ID NO: 1131525 - DNA, 25 bp, Homo sapien
tgattcacaaggtcacattcccagt

SEQ ID NO: 1131526 - DNA, 25 bp, Homo sapien
attcacaaggtcacattcccagtgg

SEQ ID NO: 1131527 - DNA, 25 bp, Homo sapien
catcagtgatctgggctcttcccaa

SEQ ID NO: 1131528 - DNA, 25 bp, Homo sapien
tcgtcctgctgaaccatttccacgc

SEQ ID NO: 1131529 - DNA, 25 bp, Homo sapien
gaaccatttccacgcactgtccaat

SEQ ID NO: 1131530 - DNA, 25 bp, Homo sapien
cagtgatctgggctcttcccaaagc

SEQ ID NO: 1131531 - DNA, 25 bp, Homo sapien
tcaaaactgtacacatacttggata

SEQ ID NO: 1131532 - DNA, 25 bp, Homo sapien
tcccctggctgtatttaattcacta

SEQ ID NO: 1131533 - DNA, 25 bp, Homo sapien
aattatttattgaccaattcatact

SEQ ID NO: 1131534 - DNA, 25 bp, Homo sapien
tttattgaccaattcatactaggca

SEQ ID NO: 1131535 - DNA, 25 bp, Homo sapien
tgcaataacagaattagaaggtggg

SEQ ID NO: 1131536 - DNA, 25 bp, Homo sapien
agttgcaataacagaattagaaggt

SEQ ID NO: 1131537 - DNA, 25 bp, Homo sapien
gcagttgcaataacagaattagaag

SEQ ID NO: 1131538 - DNA, 25 bp, Homo sapien
ctgcagttgcaataacagaattaga

SEQ ID NO: 1131539 - DNA, 25 bp, Homo sapien
caacactttagagtccttaaccgca

SEQ ID NO: 1131540 - DNA, 25 bp, Homo sapien
tagcagccagtgtaccaggtaacgg

SEQ ID NO: 1131541 - DNA, 25 bp, Homo sapien
tgatgaacacgacacaacactttag

SEQ ID NO: 1131542 - DNA, 25 bp, Homo sapien
cgcaaaaacagggaccgggatgcct

SEQ ID NO: 1131543 - DNA, 25 bp, Homo sapien
gatgacaattactggaattgttaac

SEQ ID NO: 1131544 - DNA, 25 bp, Homo sapien
tcaattaggtttaatcaggactgag

SEQ ID NO: 1131545 - DNA, 25 bp, Homo sapien
ggagaagaaacccagacacatgatg

SEQ ID NO: 1131546 - DNA, 25 bp, Homo sapien
catgatgggtcaaaaactagtgaaa

SEQ ID NO: 1131547 - DNA, 25 bp, Homo sapien
taggcagtagcttgagttataagga

SEQ ID NO: 1131548 - DNA, 25 bp, Homo sapien
ctctttgaggtctcggaactgctga

SEQ ID NO: 1131549 - DNA, 25 bp, Homo sapien
tgccagctgcgagcgcaattcctgg

SEQ ID NO: 1131550 - DNA, 25 bp, Homo sapien
ggaactgctgattgctctctgccag

SEQ ID NO: 1131551 - DNA, 25 bp, Homo sapien
tggactgcagttcatccctcagcac

SEQ ID NO: 1131552 - DNA, 25 bp, Homo sapien
gactgcagttcatccctcagcacag

SEQ ID NO: 1131553 - DNA, 25 bp, Homo sapien
actgcagttcatccctcagcacaga

SEQ ID NO: 1131554 - DNA, 25 bp, Homo sapien
catggactgcagttcatccctcagc

SEQ ID NO: 1131555 - DNA, 25 bp, Homo sapien
gaccctgggacttgtcagggtcatc

SEQ ID NO: 1131556 - DNA, 25 bp, Homo sapien
gggttttcagatgcttgttcagcca

SEQ ID NO: 1131557 - DNA, 25 bp, Homo sapien
ctcagcttgtgaacaaggtgctctg

SEQ ID NO: 1131558 - DNA, 25 bp, Homo sapien
aactgggtcagctcttttgcctgag

SEQ ID NO: 1131559 - DNA, 25 bp, Homo sapien
tacagatgtgtccattgaaatattt

SEQ ID NO: 1131560 - DNA, 25 bp, Homo sapien
ctgcaaatacagatgtgtccattga

SEQ ID NO: 1131561 - DNA, 25 bp, Homo sapien
gcaaatacagatgtgtccattgaaa

SEQ ID NO: 1131562 - DNA, 25 bp, Homo sapien
gatgtgtccattgaaatatttccca

SEQ ID NO: 1131563 - DNA, 25 bp, Homo sapien
ctcctcgtctttgtcgtcttcatcc

SEQ ID NO: 1131564 - DNA, 25 bp, Homo sapien
tcctcatcttcatcttcatcatttt

SEQ ID NO: 1131565 - DNA, 25 bp, Homo sapien
atcctcatcttcatcttcatcattt

SEQ ID NO: 1131566 - DNA, 25 bp, Homo sapien
ctcgtctttgtcgtcttcatcctca

SEQ ID NO: 1131567 - DNA, 25 bp, Homo sapien
gggggcaggtgattcctgtactttc

SEQ ID NO: 1131568 - DNA, 25 bp, Homo sapien
ggcaggtgattcctgtactttctca

SEQ ID NO: 1131569 - DNA, 25 bp, Homo sapien
gggcaggtgattcctgtactttctc

SEQ ID NO: 1131570 - DNA, 25 bp, Homo sapien
caggtgattcctgtactttctcaac

SEQ ID NO: 1131571 - DNA, 25 bp, Homo sapien
caaaaggcattgcaccccaagaagt

SEQ ID NO: 1131572 - DNA, 25 bp, Homo sapien
ccaaaaggcattgcaccccaagaag

SEQ ID NO: 1131573 - DNA, 25 bp, Homo sapien
cagagcagagtcgacttcgtgttcc

SEQ ID NO: 1131574 - DNA, 25 bp, Homo sapien
gggaatgtttagagcttcctcctct

SEQ ID NO: 1131575 - DNA, 25 bp, Homo sapien
gaagggttgtgactatttgaacaag

SEQ ID NO: 1131576 - DNA, 25 bp, Homo sapien
cgacttcgtgttccttaaatgtgat

SEQ ID NO: 1131577 - DNA, 25 bp, Homo sapien
tcctcctcatggtcattttgatttt

SEQ ID NO: 1131578 - DNA, 25 bp, Homo sapien
ctggggggcactggcgctttcccct

SEQ ID NO: 1131579 - DNA, 25 bp, Homo sapien
tggggggcactggcgctttcccctc

SEQ ID NO: 1131580 - DNA, 25 bp, Homo sapien
cctcctcctcctcatggtcattttg

SEQ ID NO: 1131581 - DNA, 25 bp, Homo sapien
caaaacacatttctctggcaagtcc

SEQ ID NO: 1131582 - DNA, 25 bp, Homo sapien
tctggcaagtcctgcaggactccct

SEQ ID NO: 1131583 - DNA, 25 bp, Homo sapien
ctagaatgagacaaaacacatttct

SEQ ID NO: 1131584 - DNA, 25 bp, Homo sapien
cttctcttcagaatcctgcagcttt

SEQ ID NO: 1131585 - DNA, 25 bp, Homo sapien
gtaagagttggacttgtcatggtgt

SEQ ID NO: 1131586 - DNA, 25 bp, Homo sapien
tcccatttgggattggagtaatccc

SEQ ID NO: 1131587 - DNA, 25 bp, Homo sapien
tgccaagaaagagacttcacgatgc

SEQ ID NO: 1131588 - DNA, 25 bp, Homo sapien
cctggcaacatcctgagcggagcaa

SEQ ID NO: 1131589 - DNA, 25 bp, Homo sapien
ttgtcctttcacctcttcaagatca

SEQ ID NO: 1131590 - DNA, 25 bp, Homo sapien
cttgtcctttcacctcttcaagatc

SEQ ID NO: 1131591 - DNA, 25 bp, Homo sapien
ggagtcaagcaacatccatccagtg

SEQ ID NO: 1131592 - DNA, 25 bp, Homo sapien
tacctgggacaccaattggagattt

SEQ ID NO: 1131593 - DNA, 25 bp, Homo sapien
agtacaaagtgctccaataagggtg

SEQ ID NO: 1131594 - DNA, 25 bp, Homo sapien
tggagtactcactgtctacaagagc

SEQ ID NO: 1131595 - DNA, 25 bp, Homo sapien
atctcctcttgatcctttttaattt

SEQ ID NO: 1131596 - DNA, 25 bp, Homo sapien
tgggctttggtcttctatctcctct

SEQ ID NO: 1131597 - DNA, 25 bp, Homo sapien
gcatggtgggctttggtcttctatc

SEQ ID NO: 1131598 - DNA, 25 bp, Homo sapien
tatctcctcttgatcctttttaatt

SEQ ID NO: 1131599 - DNA, 25 bp, Homo sapien
gtgaactgagggagtcaagtaaact

SEQ ID NO: 1131600 - DNA, 25 bp, Homo sapien
cttggggacaggccgcctcggtggg

SEQ ID NO: 1131601 - DNA, 25 bp, Homo sapien
ctgtgaaatttgaacctctgaccgg

SEQ ID NO: 1131602 - DNA, 25 bp, Homo sapien
cctgtgaaatttgaacctctgaccg

SEQ ID NO: 1131603 - DNA, 25 bp, Homo sapien
gcctgtgaaatttgaacctctgacc

SEQ ID NO: 1131604 - DNA, 25 bp, Homo sapien
tgtgaaatttgaacctctgaccggt

SEQ ID NO: 1131605 - DNA, 25 bp, Homo sapien
cggccagtgacttgacgcccttgtg

SEQ ID NO: 1131606 - DNA, 25 bp, Homo sapien
gaatccggccagtgacttgacgccc

SEQ ID NO: 1131607 - DNA, 25 bp, Homo sapien
cgcccttgtgtgttgcttgctgagc

SEQ ID NO: 1131608 - DNA, 25 bp, Homo sapien
ttgacgcccttgtgtgttgcttgct

SEQ ID NO: 1131609 - DNA, 25 bp, Homo sapien
gggccagcgaatctgaatgccagtc

SEQ ID NO: 1131610 - DNA, 25 bp, Homo sapien
tgcgggccagcgaatctgaatgcca

SEQ ID NO: 1131611 - DNA, 25 bp, Homo sapien
gcatgcgggccagcgaatctgaatg

SEQ ID NO: 1131612 - DNA, 25 bp, Homo sapien
agcatgcgggccagcgaatctgaat

SEQ ID NO: 1131613 - DNA, 25 bp, Homo sapien
cctatcatcctttgcatcctttcag

SEQ ID NO: 1131614 - DNA, 25 bp, Homo sapien
atcatcctttgcatcctttcagcag

SEQ ID NO: 1131615 - DNA, 25 bp, Homo sapien
tcatcctatcatcctttgcatcctt

SEQ ID NO: 1131616 - DNA, 25 bp, Homo sapien
catcctatcatcctttgcatccttt

SEQ ID NO: 1131617 - DNA, 25 bp, Homo sapien
cagggaatgttcctttttacgacag

SEQ ID NO: 1131618 - DNA, 25 bp, Homo sapien
tcagaagaagattgttagaatacag

SEQ ID NO: 1131619 - DNA, 25 bp, Homo sapien
aaaagcttaaaacattgtatgtgaa

SEQ ID NO: 1131620 - DNA, 25 bp, Homo sapien
cactagtccagggtgataggcaaaa

SEQ ID NO: 1131621 - DNA, 25 bp, Homo sapien
gcttacacattttcaggaaggcccc

SEQ ID NO: 1131622 - DNA, 25 bp, Homo sapien
aggccccaggcttgctcatttggtg

SEQ ID NO: 1131623 - DNA, 25 bp, Homo sapien
ggaaggccccaggcttgctcatttg

SEQ ID NO: 1131624 - DNA, 25 bp, Homo sapien
ctttggtgtgcagaacactcagatc

SEQ ID NO: 1131625 - DNA, 25 bp, Homo sapien
gatggttcatctatctttatgtttt

SEQ ID NO: 1131626 - DNA, 25 bp, Homo sapien
tttctcatttgatggttcatctatc

SEQ ID NO: 1131627 - DNA, 25 bp, Homo sapien
ctgccttcctgctatctgtttttcc

SEQ ID NO: 1131628 - DNA, 25 bp, Homo sapien
gccttcctgctatctgtttttcctt

SEQ ID NO: 1131629 - DNA, 25 bp, Homo sapien
ccaagtgaggattcagcttaatggc

SEQ ID NO: 1131630 - DNA, 25 bp, Homo sapien
aagtgaggattcagcttaatggcat

SEQ ID NO: 1131631 - DNA, 25 bp, Homo sapien
tggcacacagaatggccaagtgagg

SEQ ID NO: 1131632 - DNA, 25 bp, Homo sapien
cttggcacacagaatggccaagtga

SEQ ID NO: 1131633 - DNA, 25 bp, Homo sapien
caatggctctgtcactgtcttgact

SEQ ID NO: 1131634 - DNA, 25 bp, Homo sapien
gtcactgtcttgactggcagcattg

SEQ ID NO: 1131635 - DNA, 25 bp, Homo sapien
ctgtcactgtcttgactggcagcat

SEQ ID NO: 1131636 - DNA, 25 bp, Homo sapien
tctgtcactgtcttgactggcagca

SEQ ID NO: 1131637 - DNA, 25 bp, Homo sapien
ttaacctttgggttgctctggcatt

SEQ ID NO: 1131638 - DNA, 25 bp, Homo sapien
aggccaccataacttctgaaccctg

SEQ ID NO: 1131639 - DNA, 25 bp, Homo sapien
ccaccataacttctgaaccctgcat

SEQ ID NO: 1131640 - DNA, 25 bp, Homo sapien
tgagattcttaacctttgggttgct

SEQ ID NO: 1131641 - DNA, 25 bp, Homo sapien
caccggaaatcatgtaggaacgatt

SEQ ID NO: 1131642 - DNA, 25 bp, Homo sapien
cgattccagttgcttacacctgagg

SEQ ID NO: 1131643 - DNA, 25 bp, Homo sapien
tccagttgcttacacctgaggccat

SEQ ID NO: 1131644 - DNA, 25 bp, Homo sapien
ttgtgtttctgccaccggaaatcat

SEQ ID NO: 1131645 - DNA, 25 bp, Homo sapien
ggtgcaggaaccatgagatctggaa

SEQ ID NO: 1131646 - DNA, 25 bp, Homo sapien
gggtgcaggaaccatgagatctgga

SEQ ID NO: 1131647 - DNA, 25 bp, Homo sapien
ttgatagcgtgatgggccaccaaga

SEQ ID NO: 1131648 - DNA, 25 bp, Homo sapien
tcactctattcttgatagcgtgatg

SEQ ID NO: 1131649 - DNA, 25 bp, Homo sapien
gcccatctcatggaagaacctcact

SEQ ID NO: 1131650 - DNA, 25 bp, Homo sapien
tctcatggaagaacctcactctatt

SEQ ID NO: 1131651 - DNA, 25 bp, Homo sapien
tacagtattcttgatgtagcaagta

SEQ ID NO: 1131652 - DNA, 25 bp, Homo sapien
taatgactacagtattcttgatgta

SEQ ID NO: 1131653 - DNA, 25 bp, Homo sapien
cctcatctggcttaatgactacagt

SEQ ID NO: 1131654 - DNA, 25 bp, Homo sapien
agagcagggtgttctctgagacctt

SEQ ID NO: 1131655 - DNA, 25 bp, Homo sapien
gttgatctttgaaactaaggtaaca

SEQ ID NO: 1131656 - DNA, 25 bp, Homo sapien
tttgctattggaagttgatctttga

SEQ ID NO: 1131657 - DNA, 25 bp, Homo sapien
ctttgctattggaagttgatctttg

SEQ ID NO: 1131658 - DNA, 25 bp, Homo sapien
gatctttgaaactaaggtaacagcc

SEQ ID NO: 1131659 - DNA, 25 bp, Homo sapien
cgctgccgcccgtctgggagtcggg

SEQ ID NO: 1131660 - DNA, 25 bp, Homo sapien
ccgtctgggagtcgggagaggcgag

SEQ ID NO: 1131661 - DNA, 25 bp, Homo sapien
gctcgaggaaccgccgcctcagcgc

SEQ ID NO: 1131662 - DNA, 25 bp, Homo sapien
ccgcccgtctgggagtcgggagagg

SEQ ID NO: 1131663 - DNA, 25 bp, Homo sapien
aggtgagcgcccttttggtgctcag

SEQ ID NO: 1131664 - DNA, 25 bp, Homo sapien
cagcctgggccggaacgcggcggca

SEQ ID NO: 1131665 - DNA, 25 bp, Homo sapien
gcggggagcggtcgtgctgcagctc

SEQ ID NO: 1131666 - DNA, 25 bp, Homo sapien
ctgcagctcgcccggggaggtgagc

SEQ ID NO: 1131667 - DNA, 25 bp, Homo sapien
cgtgagagccaggcgcctgcaagct

SEQ ID NO: 1131668 - DNA, 25 bp, Homo sapien
gagagccaggcgcctgcaagctggg

SEQ ID NO: 1131669 - DNA, 25 bp, Homo sapien
gccaggcgcctgcaagctgggcgca

SEQ ID NO: 1131670 - DNA, 25 bp, Homo sapien
gagccaggcgcctgcaagctgggcg

SEQ ID NO: 1131671 - DNA, 25 bp, Homo sapien
aagaggaccccattgacgaagggca

SEQ ID NO: 1131672 - DNA, 25 bp, Homo sapien
tcggcggtgaagctgccgccgtcca

SEQ ID NO: 1131673 - DNA, 25 bp, Homo sapien
cgccgtccagcagccgcatcttgca

SEQ ID NO: 1131674 - DNA, 25 bp, Homo sapien
cccattgacgaagggcactgaggag

SEQ ID NO: 1131675 - DNA, 25 bp, Homo sapien
aaaggcgagcaaatgggccaaggag

SEQ ID NO: 1131676 - DNA, 25 bp, Homo sapien
ggagagatgctgcccatccaacaag

SEQ ID NO: 1131677 - DNA, 25 bp, Homo sapien
ctagggaaaggcgagcaaatgggcc

SEQ ID NO: 1131678 - DNA, 25 bp, Homo sapien
atccaacaagccctggccaagcaga

SEQ ID NO: 1131679 - DNA, 25 bp, Homo sapien
aataaattcgactgattttagagcg

SEQ ID NO: 1131680 - DNA, 25 bp, Homo sapien
tcaataaattcgactgattttagag

SEQ ID NO: 1131681 - DNA, 25 bp, Homo sapien
aattcgactgattttagagcggtcc

SEQ ID NO: 1131682 - DNA, 25 bp, Homo sapien
taaattcgactgattttagagcggt

SEQ ID NO: 1131683 - DNA, 25 bp, Homo sapien
agaacccatttgcaaagcactttgc

SEQ ID NO: 1131684 - DNA, 25 bp, Homo sapien
acccatttgcaaagcactttgcaga

SEQ ID NO: 1131685 - DNA, 25 bp, Homo sapien
aagaacccatttgcaaagcactttg

SEQ ID NO: 1131686 - DNA, 25 bp, Homo sapien
gaacccatttgcaaagcactttgca

SEQ ID NO: 1131687 - DNA, 25 bp, Homo sapien
tctgtcaacctgtgagtagctctga

SEQ ID NO: 1131688 - DNA, 25 bp, Homo sapien
cattagcgcctaactggagacgccg

SEQ ID NO: 1131689 - DNA, 25 bp, Homo sapien
acaaggagacctactagtggccact

SEQ ID NO: 1131690 - DNA, 25 bp, Homo sapien
ggagacgccgctctctgatgaggca

SEQ ID NO: 1131691 - DNA, 25 bp, Homo sapien
cgaatcggcttaggcttttcaacaa

SEQ ID NO: 1131692 - DNA, 25 bp, Homo sapien
gaatatccactgatgtgtcaccaca

SEQ ID NO: 1131693 - DNA, 25 bp, Homo sapien
ccaacaggaccttcacgaatcggct

SEQ ID NO: 1131694 - DNA, 25 bp, Homo sapien
gacaagtttctagccccaattccac

SEQ ID NO: 1131695 - DNA, 25 bp, Homo sapien
taggcttagactcaccgcattccaa

SEQ ID NO: 1131696 - DNA, 25 bp, Homo sapien
tctacctaatgtcaaaggcacaggc

SEQ ID NO: 1131697 - DNA, 25 bp, Homo sapien
ggtctcctctttaaatgccaactgg

SEQ ID NO: 1131698 - DNA, 25 bp, Homo sapien
tgccaactgggtgctaaggcactgt

SEQ ID NO: 1131699 - DNA, 25 bp, Homo sapien
cactactcatcaggctgtcacctca

SEQ ID NO: 1131700 - DNA, 25 bp, Homo sapien
ggctccaatagacaacatctaagaa

SEQ ID NO: 1131701 - DNA, 25 bp, Homo sapien
ctaaataagtttagtaagcaggcct

SEQ ID NO: 1131702 - DNA, 25 bp, Homo sapien
gagctcaaccaatccgcgtgtctcg

SEQ ID NO: 1131703 - DNA, 25 bp, Homo sapien
aaacagaaggatgtactctggccaa

SEQ ID NO: 1131704 - DNA, 25 bp, Homo sapien
taaaaggtccaatacatagatgtgc

SEQ ID NO: 1131705 - DNA, 25 bp, Homo sapien
tgccacagcctcatgtgaaacttag

SEQ ID NO: 1131706 - DNA, 25 bp, Homo sapien
aactatttggctatcagcacaaaaa

SEQ ID NO: 1131707 - DNA, 25 bp, Homo sapien
actgtgtactatgtaatgttttgat

SEQ ID NO: 1131708 - DNA, 25 bp, Homo sapien
aattgctaaaccaagccaattaaca

SEQ ID NO: 1131709 - DNA, 25 bp, Homo sapien
attgctaaaccaagccaattaacat

SEQ ID NO: 1131710 - DNA, 25 bp, Homo sapien
atacttactgtgtactatgtaatgt

SEQ ID NO: 1131711 - DNA, 25 bp, Homo sapien
ctcaagccaccctcctgcttcagtc

SEQ ID NO: 1131712 - DNA, 25 bp, Homo sapien
aattttcttcaaagacagggtctca

SEQ ID NO: 1131713 - DNA, 25 bp, Homo sapien
aagccaccctcctgcttcagtcttc

SEQ ID NO: 1131714 - DNA, 25 bp, Homo sapien
ggctcaagccaccctcctgcttcag

SEQ ID NO: 1131715 - DNA, 25 bp, Homo sapien
cagaaactgccattgaaaggtggtt

SEQ ID NO: 1131716 - DNA, 25 bp, Homo sapien
gaaactgccattgaaaggtggttgt

SEQ ID NO: 1131717 - DNA, 25 bp, Homo sapien
aactgccattgaaaggtggttgtaa

SEQ ID NO: 1131718 - DNA, 25 bp, Homo sapien
tcagaaactgccattgaaaggtggt

SEQ ID NO: 1131719 - DNA, 25 bp, Homo sapien
cagtttaattctaacgcatctagtt

SEQ ID NO: 1131720 - DNA, 25 bp, Homo sapien
ttaattctaacgcatctagttttgt

SEQ ID NO: 1131721 - DNA, 25 bp, Homo sapien
tctaacgcatctagttttgtcatta

SEQ ID NO: 1131722 - DNA, 25 bp, Homo sapien
aatctctctgcaactcggtgtccca

SEQ ID NO: 1131723 - DNA, 25 bp, Homo sapien
gctgtgctgaagtttcttaatctct

SEQ ID NO: 1131724 - DNA, 25 bp, Homo sapien
atttataatgctgtgctgaagtttc

SEQ ID NO: 1131725 - DNA, 25 bp, Homo sapien
gtctgtatttataatgctgtgctga

SEQ ID NO: 1131726 - DNA, 25 bp, Homo sapien
atgctgtgctgaagtttcttaatct

SEQ ID NO: 1131727 - DNA, 25 bp, Homo sapien
ggatactctgtagatacaaggatct

SEQ ID NO: 1131728 - DNA, 25 bp, Homo sapien
aacttctttctccagcgaacacagt

SEQ ID NO: 1131729 - DNA, 25 bp, Homo sapien
gatacaaggatctaggatgcctgtg

SEQ ID NO: 1131730 - DNA, 25 bp, Homo sapien
gaacacagtttgcttgtaccacctc

SEQ ID NO: 1131731 - DNA, 25 bp, Homo sapien
cagtggtctgcaacaagctagtcca

SEQ ID NO: 1131732 - DNA, 25 bp, Homo sapien
tagacctgttaagattgctgcaatc

SEQ ID NO: 1131733 - DNA, 25 bp, Homo sapien
tgaggtgtttatcaaggcccctcct

SEQ ID NO: 1131734 - DNA, 25 bp, Homo sapien
tcaggtggtcctctaacatctgcct

SEQ ID NO: 1131735 - DNA, 25 bp, Homo sapien
tgcataagcttttccaccttttaat

SEQ ID NO: 1131736 - DNA, 25 bp, Homo sapien
tttgcataagcttttccacctttta

SEQ ID NO: 1131737 - DNA, 25 bp, Homo sapien
ttgcataagcttttccaccttttaa

SEQ ID NO: 1131738 - DNA, 25 bp, Homo sapien
ctttgcataagcttttccacctttt

SEQ ID NO: 1131739 - DNA, 25 bp, Homo sapien
taagaatggaattatcctgtcttgt

SEQ ID NO: 1131740 - DNA, 25 bp, Homo sapien
tgccaggtttagatctgcaaagccc

SEQ ID NO: 1131741 - DNA, 25 bp, Homo sapien
gtggtatttcctgatccagcaaact

SEQ ID NO: 1131742 - DNA, 25 bp, Homo sapien
tagccttccagtaaacagcggcgag

SEQ ID NO: 1131743 - DNA, 25 bp, Homo sapien
ggtcaccagacatcagttgcatact

SEQ ID NO: 1131744 - DNA, 25 bp, Homo sapien
taaaacatgggtcaccagacatcag

SEQ ID NO: 1131745 - DNA, 25 bp, Homo sapien
gacatcagttgcatactgatcaaaa

SEQ ID NO: 1131746 - DNA, 25 bp, Homo sapien
acatgggtcaccagacatcagttgc

SEQ ID NO: 1131747 - DNA, 25 bp, Homo sapien
aatccaagggcgctgttctagcaac

SEQ ID NO: 1131748 - DNA, 25 bp, Homo sapien
taccaaagtgcctgccaaagtcatc

SEQ ID NO: 1131749 - DNA, 25 bp, Homo sapien
taacccatgctcaaaaggctttagt

SEQ ID NO: 1131750 - DNA, 25 bp, Homo sapien
catgccccgctggatgttaaatagg

SEQ ID NO: 1131751 - DNA, 25 bp, Homo sapien
tcaccagcaattggtatagacattg

SEQ ID NO: 1131752 - DNA, 25 bp, Homo sapien
gcaattggtatagacattgaagtgg

SEQ ID NO: 1131753 - DNA, 25 bp, Homo sapien
ccagcaattggtatagacattgaag

SEQ ID NO: 1131754 - DNA, 25 bp, Homo sapien
attggtatagacattgaagtggagg

SEQ ID NO: 1131755 - DNA, 25 bp, Homo sapien
attttccctagggcacaatcatatt

SEQ ID NO: 1131756 - DNA, 25 bp, Homo sapien
gcttcttccagagaatgcagaactg

SEQ ID NO: 1131757 - DNA, 25 bp, Homo sapien
tatagcagctattctataaatgata

SEQ ID NO: 1131758 - DNA, 25 bp, Homo sapien
aaggaaagcaattgagtaacatagc

SEQ ID NO: 1131759 - DNA, 25 bp, Homo sapien
taaataccttagttcgctgaagaat

SEQ ID NO: 1131760 - DNA, 25 bp, Homo sapien
cacaacagcaagctaaagagtactc

SEQ ID NO: 1131761 - DNA, 25 bp, Homo sapien
cagtctatgcaataaactcctgttg

SEQ ID NO: 1131762 - DNA, 25 bp, Homo sapien
gagggacatccttttaagtcagtgc

SEQ ID NO: 1131763 - DNA, 25 bp, Homo sapien
gatgttctagaatgtccacaggcac

SEQ ID NO: 1131764 - DNA, 25 bp, Homo sapien
ccacaggcaccaagttcgtctggaa

SEQ ID NO: 1131765 - DNA, 25 bp, Homo sapien
tttgactgctgacttgcatagcttg

SEQ ID NO: 1131766 - DNA, 25 bp, Homo sapien
aacagaggcactctttgctgaaaga

SEQ ID NO: 1131767 - DNA, 25 bp, Homo sapien
tcagagaaactagatgaccgggagt

SEQ ID NO: 1131768 - DNA, 25 bp, Homo sapien
gaccgggagtgacacgtgctatacc

SEQ ID NO: 1131769 - DNA, 25 bp, Homo sapien
cactgaggtatttctcctgtggcag

SEQ ID NO: 1131770 - DNA, 25 bp, Homo sapien
tactttcaactcctgttgatgtgct

SEQ ID NO: 1131771 - DNA, 25 bp, Homo sapien
tggctcagcgattttctgctcaatt

SEQ ID NO: 1131772 - DNA, 25 bp, Homo sapien
tgtatcaagatttggctcagcgatt

SEQ ID NO: 1131773 - DNA, 25 bp, Homo sapien
ttatcagctgtatcaagatttggct

SEQ ID NO: 1131774 - DNA, 25 bp, Homo sapien
tttttctgaagctgtatcttcttta

SEQ ID NO: 1131775 - DNA, 25 bp, Homo sapien
tggaatctaggctgaagtcttgact

SEQ ID NO: 1131776 - DNA, 25 bp, Homo sapien
tcgcttcagctgagattctacagaa

SEQ ID NO: 1131777 - DNA, 25 bp, Homo sapien
tggtgtcatcaactcgcttcagctg

SEQ ID NO: 1131778 - DNA, 25 bp, Homo sapien
cttccgcactggaatctaggctgaa

SEQ ID NO: 1131779 - DNA, 25 bp, Homo sapien
gcctctttactgctgactacacaga

SEQ ID NO: 1131780 - DNA, 25 bp, Homo sapien
cctggattgcaggaatctatgctta

SEQ ID NO: 1131781 - DNA, 25 bp, Homo sapien
attgatcacttttaactaacatttg

SEQ ID NO: 1131782 - DNA, 25 bp, Homo sapien
tatgggcatgaaatttactatacaa

SEQ ID NO: 1131783 - DNA, 25 bp, Homo sapien
tcaaattggtggcatacaaattttc

SEQ ID NO: 1131784 - DNA, 25 bp, Homo sapien
aaattggtggcatacaaattttcag

SEQ ID NO: 1131785 - DNA, 25 bp, Homo sapien
caaattttcagcttcagtgaaaatt

SEQ ID NO: 1131786 - DNA, 25 bp, Homo sapien
tacaaattttcagcttcagtgaaaa

SEQ ID NO: 1131787 - DNA, 25 bp, Homo sapien
caggacccacaaatagccttagtcc

SEQ ID NO: 1131788 - DNA, 25 bp, Homo sapien
gacccacaaatagccttagtccttc

SEQ ID NO: 1131789 - DNA, 25 bp, Homo sapien
gatgatgactgccaaaggttgtact

SEQ ID NO: 1131790 - DNA, 25 bp, Homo sapien
tgactgccaaaggttgtacttcccc

SEQ ID NO: 1131791 - DNA, 25 bp, Homo sapien
cagtggctgtgtaactgctcggaaa

SEQ ID NO: 1131792 - DNA, 25 bp, Homo sapien
gactagcgatgcacagtggcgcatg

SEQ ID NO: 1131793 - DNA, 25 bp, Homo sapien
gcagcttaagttgctcagtggctgt

SEQ ID NO: 1131794 - DNA, 25 bp, Homo sapien
tcttcctaaattatcagactagcga

SEQ ID NO: 1131795 - DNA, 25 bp, Homo sapien
caacttgttcataagctccagaccc

SEQ ID NO: 1131796 - DNA, 25 bp, Homo sapien
agcgtttgatcacaacttgttcata

SEQ ID NO: 1131797 - DNA, 25 bp, Homo sapien
acaacttgttcataagctccagacc

SEQ ID NO: 1131798 - DNA, 25 bp, Homo sapien
ctagcgtttgatcacaacttgttca

SEQ ID NO: 1131799 - DNA, 25 bp, Homo sapien
aggtgcttccaaggcacacagtggc

SEQ ID NO: 1131800 - DNA, 25 bp, Homo sapien
cacatcttaaatccacaaggaaatg

SEQ ID NO: 1131801 - DNA, 25 bp, Homo sapien
aaagcaggcttttcattatgatgtg

SEQ ID NO: 1131802 - DNA, 25 bp, Homo sapien
tattaagtgcttgaataaaatgcct

SEQ ID NO: 1131803 - DNA, 25 bp, Homo sapien
caacaaattggctaagtggtcaacc

SEQ ID NO: 1131804 - DNA, 25 bp, Homo sapien
tcttgtatagagaggtgtcggacca

SEQ ID NO: 1131805 - DNA, 25 bp, Homo sapien
gatagctcttctgttagggtgccca

SEQ ID NO: 1131806 - DNA, 25 bp, Homo sapien
gacacttaggcaacccttagcgagt

SEQ ID NO: 1131807 - DNA, 25 bp, Homo sapien
ggaggtcctgacaacatgtactcag

SEQ ID NO: 1131808 - DNA, 25 bp, Homo sapien
acaacatgtactcagggtggtcggg

SEQ ID NO: 1131809 - DNA, 25 bp, Homo sapien
tactcagggtggtcggggcacatct

SEQ ID NO: 1131810 - DNA, 25 bp, Homo sapien
acaactcaaagcaaggagggagctt

SEQ ID NO: 1131811 - DNA, 25 bp, Homo sapien
gtgccgcgtcgcagccgcacgctag

SEQ ID NO: 1131812 - DNA, 25 bp, Homo sapien
gtcctcgccaaggttcggaagagga

SEQ ID NO: 1131813 - DNA, 25 bp, Homo sapien
cagccgcacgctagcggggtcaacg

SEQ ID NO: 1131814 - DNA, 25 bp, Homo sapien
aagaggaccttgaaaatggcttctg

SEQ ID NO: 1131815 - DNA, 25 bp, Homo sapien
ggccgcctcgcgtggagccttgctg

SEQ ID NO: 1131816 - DNA, 25 bp, Homo sapien
ttaggcctttgccacgcctcgggag

SEQ ID NO: 1131817 - DNA, 25 bp, Homo sapien
tcgggagcgccacgaactcaacagc

SEQ ID NO: 1131818 - DNA, 25 bp, Homo sapien
tttaaggcccccgtggactgctctg

SEQ ID NO: 1131819 - DNA, 25 bp, Homo sapien
gatggcaggatacaataacttttcc

SEQ ID NO: 1131820 - DNA, 25 bp, Homo sapien
aacagttctatccacaacactcggg

SEQ ID NO: 1131821 - DNA, 25 bp, Homo sapien
tttctgaacgcaggtgtcactgggc

SEQ ID NO: 1131822 - DNA, 25 bp, Homo sapien
caataacttttccaagagatcaaca

SEQ ID NO: 1131823 - DNA, 25 bp, Homo sapien
aaggaaagatgagttataatgacaa

SEQ ID NO: 1131824 - DNA, 25 bp, Homo sapien
gaaagatgagttataatgacaaaat

SEQ ID NO: 1131825 - DNA, 25 bp, Homo sapien
cgaaggaaagatgagttataatgac

SEQ ID NO: 1131826 - DNA, 25 bp, Homo sapien
ggaaagatgagttataatgacaaaa

SEQ ID NO: 1131827 - DNA, 25 bp, Homo sapien
aagtcctaggcccaaaaactggcag

SEQ ID NO: 1131828 - DNA, 25 bp, Homo sapien
agtcagtttaaatggctcaccgggc

SEQ ID NO: 1131829 - DNA, 25 bp, Homo sapien
taaaaaattttgtcaggcgcgatgg

SEQ ID NO: 1131830 - DNA, 25 bp, Homo sapien
taagcatcaggctcaaactggcatc

SEQ ID NO: 1131831 - DNA, 25 bp, Homo sapien
ggtggaatgaactccctcaatgatc

SEQ ID NO: 1131832 - DNA, 25 bp, Homo sapien
cctctgggtaaagactcaaaggtgg

SEQ ID NO: 1131833 - DNA, 25 bp, Homo sapien
ggctcctctgggtaaagactcaaag

SEQ ID NO: 1131834 - DNA, 25 bp, Homo sapien
agactcaaaggtggaatgaactccc

SEQ ID NO: 1131835 - DNA, 25 bp, Homo sapien
caagagaactagaaccctgagagga

SEQ ID NO: 1131836 - DNA, 25 bp, Homo sapien
gatcaaaggtcacgtacttcgccag

SEQ ID NO: 1131837 - DNA, 25 bp, Homo sapien
gagtttgccgagtgacacattgcca

SEQ ID NO: 1131838 - DNA, 25 bp, Homo sapien
caatcagagacgctcagttgggctg

SEQ ID NO: 1131839 - DNA, 25 bp, Homo sapien
gcgagttgcctgtcagcgcggggct

SEQ ID NO: 1131840 - DNA, 25 bp, Homo sapien
gctgcagccgcctggtgctgcggct

SEQ ID NO: 1131841 - DNA, 25 bp, Homo sapien
tcagcgcggggctgttgttagccat

SEQ ID NO: 1131842 - DNA, 25 bp, Homo sapien
ggtgctgcggctgcgagttgcctgt

SEQ ID NO: 1131843 - DNA, 25 bp, Homo sapien
gtcttctcgttgccccagagcggga

SEQ ID NO: 1131844 - DNA, 25 bp, Homo sapien
tcttctcgttgccccagagcgggag

SEQ ID NO: 1131845 - DNA, 25 bp, Homo sapien
ttctcgttgccccagagcgggagca

SEQ ID NO: 1131846 - DNA, 25 bp, Homo sapien
tgccctgcttgccggagaccgccgg

SEQ ID NO: 1131847 - DNA, 25 bp, Homo sapien
tactttgaagtaaggcgacgacagg

SEQ ID NO: 1131848 - DNA, 25 bp, Homo sapien
cacctcgtggtaggtcttgagctcg

SEQ ID NO: 1131849 - DNA, 25 bp, Homo sapien
gagctcgtagagctgtactttgaag

SEQ ID NO: 1131850 - DNA, 25 bp, Homo sapien
ttaaagtagatctcgtccaccacct

SEQ ID NO: 1131851 - DNA, 25 bp, Homo sapien
aactgagacaagagtgcagtgagga

SEQ ID NO: 1131852 - DNA, 25 bp, Homo sapien
aaacaagaactgagacaagagtgca

SEQ ID NO: 1131853 - DNA, 25 bp, Homo sapien
tgctaacgaaacaagaactgagaca

SEQ ID NO: 1131854 - DNA, 25 bp, Homo sapien
caagagtgcagtgaggaggcgccag

SEQ ID NO: 1131855 - DNA, 25 bp, Homo sapien
tgctccgagcctcgctgcaagactg

SEQ ID NO: 1131856 - DNA, 25 bp, Homo sapien
ggctgctccgagcctcgctgcaaga

SEQ ID NO: 1131857 - DNA, 25 bp, Homo sapien
tccgagcctcgctgcaagactgagt

SEQ ID NO: 1131858 - DNA, 25 bp, Homo sapien
gcctcgctgcaagactgagtcaatc

SEQ ID NO: 1131859 - DNA, 25 bp, Homo sapien
ctgtctggcccgctgttttcctgct

SEQ ID NO: 1131860 - DNA, 25 bp, Homo sapien
tctcccatggttcaacgtgcgtgac

SEQ ID NO: 1131861 - DNA, 25 bp, Homo sapien
tcctttctcccatggttcaacgtgc

SEQ ID NO: 1131862 - DNA, 25 bp, Homo sapien
tgtctggcccgctgttttcctgctt

SEQ ID NO: 1131863 - DNA, 25 bp, Homo sapien
caagcgctctaatatatggagagtc

SEQ ID NO: 1131864 - DNA, 25 bp, Homo sapien
taagacccatcacttgctttcgagt

SEQ ID NO: 1131865 - DNA, 25 bp, Homo sapien
tgctgtagaaacaattcctcctgtt

SEQ ID NO: 1131866 - DNA, 25 bp, Homo sapien
gagtctgtgtgtgttataagaccca

SEQ ID NO: 1131867 - DNA, 25 bp, Homo sapien
gaaggattcaaaccagtcccacaga

SEQ ID NO: 1131868 - DNA, 25 bp, Homo sapien
atcaaggaaggattcaaaccagtcc

SEQ ID NO: 1131869 - DNA, 25 bp, Homo sapien
caaaccagtcccacagatctgtagg

SEQ ID NO: 1131870 - DNA, 25 bp, Homo sapien
gattcaaaccagtcccacagatctg

SEQ ID NO: 1131871 - DNA, 25 bp, Homo sapien
agccatcaggtctcagtaaaaggac

SEQ ID NO: 1131872 - DNA, 25 bp, Homo sapien
gaagttcttgaagacattaaaccac

SEQ ID NO: 1131873 - DNA, 25 bp, Homo sapien
tcaggatcaatacaatacacagaac

SEQ ID NO: 1131874 - DNA, 25 bp, Homo sapien
tatctgttcgatcttgagcatgccc

SEQ ID NO: 1131875 - DNA, 25 bp, Homo sapien
tagtagactgggtagacatagggac

SEQ ID NO: 1131876 - DNA, 25 bp, Homo sapien
ggtgggactaagatgcatacctcta

SEQ ID NO: 1131877 - DNA, 25 bp, Homo sapien
tcagatttcaaattagggagactcg

SEQ ID NO: 1131878 - DNA, 25 bp, Homo sapien
gacatgttggacttcaccatgcaag

SEQ ID NO: 1131879 - DNA, 25 bp, Homo sapien
cattgtctctgaaaagggtcattac

SEQ ID NO: 1131880 - DNA, 25 bp, Homo sapien
gcatgcaagtgagaacaaaccctgc

SEQ ID NO: 1131881 - DNA, 25 bp, Homo sapien
tcagtcccaaacctatagtgcaagc

SEQ ID NO: 1131882 - DNA, 25 bp, Homo sapien
ggtcattaccgcatgaaggccttct

SEQ ID NO: 1131883 - DNA, 25 bp, Homo sapien
gatcgtagcatttctccaatggtca

SEQ ID NO: 1131884 - DNA, 25 bp, Homo sapien
tccaatggtcattacacagcctcca

SEQ ID NO: 1131885 - DNA, 25 bp, Homo sapien
aaccactccagttttgtgagaaaag

SEQ ID NO: 1131886 - DNA, 25 bp, Homo sapien
gaacgtctgcgttcaacatgtctgt

SEQ ID NO: 1131887 - DNA, 25 bp, Homo sapien
gggacctccgtggactcagagatct

SEQ ID NO: 1131888 - DNA, 25 bp, Homo sapien
catggccctcccgatgatgacttct

SEQ ID NO: 1131889 - DNA, 25 bp, Homo sapien
cctcccgatgatgacttctacttct

SEQ ID NO: 1131890 - DNA, 25 bp, Homo sapien
ctccgtggactcagagatctccttg

SEQ ID NO: 1131891 - DNA, 25 bp, Homo sapien
tggcttcacgctctagtcgctggcg

SEQ ID NO: 1131892 - DNA, 25 bp, Homo sapien
tttctttggcttcacgctctagtcg

SEQ ID NO: 1131893 - DNA, 25 bp, Homo sapien
cccggtcaatacttcgggatcttcg

SEQ ID NO: 1131894 - DNA, 25 bp, Homo sapien
caatacttcgggatcttcgccgttc

SEQ ID NO: 1131895 - DNA, 25 bp, Homo sapien
tatcacgacttcgactgcgacttct

SEQ ID NO: 1131896 - DNA, 25 bp, Homo sapien
tcgactgcgacttctatgcctttcc

SEQ ID NO: 1131897 - DNA, 25 bp, Homo sapien
ctttcctatcacgacttcgactgcg

SEQ ID NO: 1131898 - DNA, 25 bp, Homo sapien
tatcccctttcctatcacgacttcg

SEQ ID NO: 1131899 - DNA, 25 bp, Homo sapien
ggacctttctcttgatcgctctctc

SEQ ID NO: 1131900 - DNA, 25 bp, Homo sapien
tccttatcatagtcacgatctcgtc

SEQ ID NO: 1131901 - DNA, 25 bp, Homo sapien
tctgtgccgcctatcatctttgtct

SEQ ID NO: 1131902 - DNA, 25 bp, Homo sapien
tctacttcgactcctacttctgtgt

SEQ ID NO: 1131903 - DNA, 25 bp, Homo sapien
gactggtccttactatcactgtgat

SEQ ID NO: 1131904 - DNA, 25 bp, Homo sapien
ggaacgttctttgcttctactacgc

SEQ ID NO: 1131905 - DNA, 25 bp, Homo sapien
tccttgactgccacttcgacttcgt

SEQ ID NO: 1131906 - DNA, 25 bp, Homo sapien
cactgtgatctcgtttgtgggaacg

SEQ ID NO: 1131907 - DNA, 25 bp, Homo sapien
tttatgctgtttttcttggctctct

SEQ ID NO: 1131908 - DNA, 25 bp, Homo sapien
tcacacagtctcatctttgttttta

SEQ ID NO: 1131909 - DNA, 25 bp, Homo sapien
tgtttttatgctgtttttcttggct

SEQ ID NO: 1131910 - DNA, 25 bp, Homo sapien
ttttcttggctctcttgttctatac

SEQ ID NO: 1131911 - DNA, 25 bp, Homo sapien
cattttcaggacatatgtacagact

SEQ ID NO: 1131912 - DNA, 25 bp, Homo sapien
aaggcacttccctacacgaaagagg

SEQ ID NO: 1131913 - DNA, 25 bp, Homo sapien
agcttgaggagtgcgaactactgca

SEQ ID NO: 1131914 - DNA, 25 bp, Homo sapien
tttaaccaacatggcaaccatgcca

SEQ ID NO: 1131915 - DNA, 25 bp, Homo sapien
cattctattacgaaaagcacagcca

SEQ ID NO: 1131916 - DNA, 25 bp, Homo sapien
tgaaatcacagcctaaaaacctctg

SEQ ID NO: 1131917 - DNA, 25 bp, Homo sapien
ccttcttgtacattggcagcacata

SEQ ID NO: 1131918 - DNA, 25 bp, Homo sapien
taagtgtccctttgaggtagaatgc

SEQ ID NO: 1131919 - DNA, 25 bp, Homo sapien
taaaaactcaaacagcaatctccat

SEQ ID NO: 1131920 - DNA, 25 bp, Homo sapien
aagcttgaggcttgaatctgtttct

SEQ ID NO: 1131921 - DNA, 25 bp, Homo sapien
cactcatgatggttctgtaatcaga

SEQ ID NO: 1131922 - DNA, 25 bp, Homo sapien
ttagtatagggttctgcaagaatgc

SEQ ID NO: 1131923 - DNA, 25 bp, Homo sapien
cttctgagtgcgcattagttggcca

SEQ ID NO: 1131924 - DNA, 25 bp, Homo sapien
gaatactgagttttagccctagcac

SEQ ID NO: 1131925 - DNA, 25 bp, Homo sapien
caatgtgcgtgccaggttcactaca

SEQ ID NO: 1131926 - DNA, 25 bp, Homo sapien
tagttggccagtataaccagtgaga

SEQ ID NO: 1131927 - DNA, 25 bp, Homo sapien
gaaccatatccaaagtagtagctcc

SEQ ID NO: 1131928 - DNA, 25 bp, Homo sapien
gtcaatcgaggtgatagttctttca

SEQ ID NO: 1131929 - DNA, 25 bp, Homo sapien
tctaacttctgggtgtctatagcac

SEQ ID NO: 1131930 - DNA, 25 bp, Homo sapien
gacgatcatcgaactgtcaatcgag

SEQ ID NO: 1131931 - DNA, 25 bp, Homo sapien
ggtgaaatcattccagtaagtacaa

SEQ ID NO: 1131932 - DNA, 25 bp, Homo sapien
aactggatggaggatgcttattaag

SEQ ID NO: 1131933 - DNA, 25 bp, Homo sapien
tccagtaagtacaaaaactggatgg

SEQ ID NO: 1131934 - DNA, 25 bp, Homo sapien
catggaaaggtgaaatcattccagt

SEQ ID NO: 1131935 - DNA, 25 bp, Homo sapien
tttccctctattggtatagtcgaat

SEQ ID NO: 1131936 - DNA, 25 bp, Homo sapien
ctggattggctggatgagtgttgca

SEQ ID NO: 1131937 - DNA, 25 bp, Homo sapien
ggtatagtcgaatatccaggacatt

SEQ ID NO: 1131938 - DNA, 25 bp, Homo sapien
gattggctggatgagtgttgcattt

SEQ ID NO: 1131939 - DNA, 25 bp, Homo sapien
ggcaagcgggccaaaaagctactgt

SEQ ID NO: 1131940 - DNA, 25 bp, Homo sapien
cggcaagcgggccaaaaagctactg

SEQ ID NO: 1131941 - DNA, 25 bp, Homo sapien
ccacggcaagcgggccaaaaagcta

SEQ ID NO: 1131942 - DNA, 25 bp, Homo sapien
acggcaagcgggccaaaaagctact

SEQ ID NO: 1131943 - DNA, 25 bp, Homo sapien
aaccaggggcacttggagaccggca

SEQ ID NO: 1131944 - DNA, 25 bp, Homo sapien
tgtaaccaggggcacttggagaccg

SEQ ID NO: 1131945 - DNA, 25 bp, Homo sapien
agaccggcagggacaggtattgcaa

SEQ ID NO: 1131946 - DNA, 25 bp, Homo sapien
ccggcagggacaggtattgcaaaga

SEQ ID NO: 1131947 - DNA, 25 bp, Homo sapien
taggaagtagctcctccccttcagt

SEQ ID NO: 1131948 - DNA, 25 bp, Homo sapien
tcctccccttcagtgtggagctgac

SEQ ID NO: 1131949 - DNA, 25 bp, Homo sapien
aacaccgttggtcgctgggatgtag

SEQ ID NO: 1131950 - DNA, 25 bp, Homo sapien
cccaggagtataacaccgttggtcg

SEQ ID NO: 1131951 - DNA, 25 bp, Homo sapien
aaaggcaaacatgtctctcgtccac

SEQ ID NO: 1131952 - DNA, 25 bp, Homo sapien
tcaaaggcaaacatgtctctcgtcc

SEQ ID NO: 1131953 - DNA, 25 bp, Homo sapien
aggcaaacatgtctctcgtccacca

SEQ ID NO: 1131954 - DNA, 25 bp, Homo sapien
caatcaaaggcaaacatgtctctcg

SEQ ID NO: 1131955 - DNA, 25 bp, Homo sapien
tggccaccgtggtttcaatgactgt

SEQ ID NO: 1131956 - DNA, 25 bp, Homo sapien
tgcagcctttagtcccgtcacagtg

SEQ ID NO: 1131957 - DNA, 25 bp, Homo sapien
gaatatgcctgatcaatagtgggta

SEQ ID NO: 1131958 - DNA, 25 bp, Homo sapien
gtgtccccgtcttcagccgtgagga

SEQ ID NO: 1131959 - DNA, 25 bp, Homo sapien
ctgctttggaggtgacgcctggctt

SEQ ID NO: 1131960 - DNA, 25 bp, Homo sapien
ctttggaggtgacgcctggcttctc

SEQ ID NO: 1131961 - DNA, 25 bp, Homo sapien
ctcccagcagcgctgatggatctga

SEQ ID NO: 1131962 - DNA, 25 bp, Homo sapien
cgctgatggatctgatggtgatttc

SEQ ID NO: 1131963 - DNA, 25 bp, Homo sapien
tacttctagaattggtgcagccaac

SEQ ID NO: 1131964 - DNA, 25 bp, Homo sapien
cattggctcgcataatggacacgga

SEQ ID NO: 1131965 - DNA, 25 bp, Homo sapien
tctgattgcaggtggagtcatcccc

SEQ ID NO: 1131966 - DNA, 25 bp, Homo sapien
gagagttccggcttctaaactggtg

SEQ ID NO: 1131967 - DNA, 25 bp, Homo sapien
gctccactatcgaaagagacttgaa

SEQ ID NO: 1131968 - DNA, 25 bp, Homo sapien
tcagagctccactatcgaaagagac

SEQ ID NO: 1131969 - DNA, 25 bp, Homo sapien
gagctccactatcgaaagagacttg

SEQ ID NO: 1131970 - DNA, 25 bp, Homo sapien
gccttcagagctccactatcgaaag

SEQ ID NO: 1131971 - DNA, 25 bp, Homo sapien
aagtattcagttccacactggaggg

SEQ ID NO: 1131972 - DNA, 25 bp, Homo sapien
agttgtactgcaggtcagctctgaa

SEQ ID NO: 1131973 - DNA, 25 bp, Homo sapien
tggtgcaggaactgaaagttgtact

SEQ ID NO: 1131974 - DNA, 25 bp, Homo sapien
tgaagatgatttgctagatccagca

SEQ ID NO: 1131975 - DNA, 25 bp, Homo sapien
gatctacactggaccaagccacaga

SEQ ID NO: 1131976 - DNA, 25 bp, Homo sapien
ttggatcgtcactcttccgggtgca

SEQ ID NO: 1131977 - DNA, 25 bp, Homo sapien
gaagccacactcagataagaagttg

SEQ ID NO: 1131978 - DNA, 25 bp, Homo sapien
gatgtgttgcagtgtacttccaagc

SEQ ID NO: 1131979 - DNA, 25 bp, Homo sapien
cactctagagccgaaagggtgcacg

SEQ ID NO: 1131980 - DNA, 25 bp, Homo sapien
gcacgcaggagtagtgtcattgcac

SEQ ID NO: 1131981 - DNA, 25 bp, Homo sapien
cacggacaggagaccagacaatctc

SEQ ID NO: 1131982 - DNA, 25 bp, Homo sapien
gtttcatacagttcggcaccacgga

SEQ ID NO: 1131983 - DNA, 25 bp, Homo sapien
taggaggaaccgaatggctgaagtc

SEQ ID NO: 1131984 - DNA, 25 bp, Homo sapien
tcatggtgtgagtacaggcaggccc

SEQ ID NO: 1131985 - DNA, 25 bp, Homo sapien
ttttcaaccacgtcatgcatgcggg

SEQ ID NO: 1131986 - DNA, 25 bp, Homo sapien
tgcatgcgggccaaattcatagtgc

SEQ ID NO: 1131987 - DNA, 25 bp, Homo sapien
catggagaatgcatcccttgaaaca

SEQ ID NO: 1131988 - DNA, 25 bp, Homo sapien
gcagtcaccgtgtaagtagcatcat

SEQ ID NO: 1131989 - DNA, 25 bp, Homo sapien
ggatcgccagtgcacattaatcatg

SEQ ID NO: 1131990 - DNA, 25 bp, Homo sapien
catggtgcaggactctcctgtgctg

SEQ ID NO: 1131991 - DNA, 25 bp, Homo sapien
gcagtggttttgatgagtgtgacac

SEQ ID NO: 1131992 - DNA, 25 bp, Homo sapien
tgagttactgtcagaccggttggac

SEQ ID NO: 1131993 - DNA, 25 bp, Homo sapien
agactgtccagtgtgtgactccaga

SEQ ID NO: 1131994 - DNA, 25 bp, Homo sapien
tagtccagctcacgttgattactga

SEQ ID NO: 1131995 - DNA, 25 bp, Homo sapien
cccggtggcactaattgcttttaat

SEQ ID NO: 1131996 - DNA, 25 bp, Homo sapien
taactttggtaggagcaatctgcag

SEQ ID NO: 1131997 - DNA, 25 bp, Homo sapien
gtcactgtgtaattgatgccacatg

SEQ ID NO: 1131998 - DNA, 25 bp, Homo sapien
taattgatgccacatgtgatgcatc

SEQ ID NO: 1131999 - DNA, 25 bp, Homo sapien
tgaaaatgcctttggagccatagag

SEQ ID NO: 1132000 - DNA, 25 bp, Homo sapien
tcagtgctgtaattggcagagcccc

SEQ ID NO: 1132001 - DNA, 25 bp, Homo sapien
gaggcttgccagtagatccggatgc

SEQ ID NO: 1132002 - DNA, 25 bp, Homo sapien
tcacagtgtatacatccccacaggg

SEQ ID NO: 1132003 - DNA, 25 bp, Homo sapien
cattccaagtgtacttccagagcaa

SEQ ID NO: 1132004 - DNA, 25 bp, Homo sapien
ccattccaagtgtacttccagagca

SEQ ID NO: 1132005 - DNA, 25 bp, Homo sapien
ccaagtgtacttccagagcaagtta

SEQ ID NO: 1132006 - DNA, 25 bp, Homo sapien
ttccaagtgtacttccagagcaagt

SEQ ID NO: 1132007 - DNA, 25 bp, Homo sapien
cctttcactgaagaccagggtgtat

SEQ ID NO: 1132008 - DNA, 25 bp, Homo sapien
tgtatggtctctactactttgggag

SEQ ID NO: 1132009 - DNA, 25 bp, Homo sapien
cacctctatgtctcagggagatact

SEQ ID NO: 1132010 - DNA, 25 bp, Homo sapien
ctgattaaagaatgcagacctaggt

SEQ ID NO: 1132011 - DNA, 25 bp, Homo sapien
gtatgtcacagagaggaagcttcct

SEQ ID NO: 1132012 - DNA, 25 bp, Homo sapien
aagttgcccaggatgtacaggtgac

SEQ ID NO: 1132013 - DNA, 25 bp, Homo sapien
tgtgatgtcaggcacaaacccctcc

SEQ ID NO: 1132014 - DNA, 25 bp, Homo sapien
agcccctgctcatggtgtgatgtca

SEQ ID NO: 1132015 - DNA, 25 bp, Homo sapien
ttcttcatttctcttccctctataa

SEQ ID NO: 1132016 - DNA, 25 bp, Homo sapien
tcattcttcatttctcttccctcta

SEQ ID NO: 1132017 - DNA, 25 bp, Homo sapien
tcttcatttctcttccctctataaa

SEQ ID NO: 1132018 - DNA, 25 bp, Homo sapien
tcatttctcttccctctataaatca

SEQ ID NO: 1132019 - DNA, 25 bp, Homo sapien
ttgtttttatctggggctcactttg

SEQ ID NO: 1132020 - DNA, 25 bp, Homo sapien
tcagtcggccacagtttgaggctct

SEQ ID NO: 1132021 - DNA, 25 bp, Homo sapien
tgctcctaacttgcgatgagggcgt

SEQ ID NO: 1132022 - DNA, 25 bp, Homo sapien
gccaataagatggatggtcctcccc

SEQ ID NO: 1132023 - DNA, 25 bp, Homo sapien
aaaagatgcacgcatgtcagtcggc

SEQ ID NO: 1132024 - DNA, 25 bp, Homo sapien
cttcccgacactgcggagcagcagc

SEQ ID NO: 1132025 - DNA, 25 bp, Homo sapien
ccaacctactttggccgcagaagcg

SEQ ID NO: 1132026 - DNA, 25 bp, Homo sapien
tccactcccaacctactttggccgc

SEQ ID NO: 1132027 - DNA, 25 bp, Homo sapien
tactttggccgcagaagcggcgttg

SEQ ID NO: 1132028 - DNA, 25 bp, Homo sapien
ctgccacacgacgctctttagcccc

SEQ ID NO: 1132029 - DNA, 25 bp, Homo sapien
tctgccacacgacgctctttagccc

SEQ ID NO: 1132030 - DNA, 25 bp, Homo sapien
tgccacacgacgctctttagccccc

SEQ ID NO: 1132031 - DNA, 25 bp, Homo sapien
ccacacgacgctctttagccccctc

SEQ ID NO: 1132032 - DNA, 25 bp, Homo sapien
aaagcaacaagtgctcgcggcggct

SEQ ID NO: 1132033 - DNA, 25 bp, Homo sapien
agaagtcctcacacaggtcccaaag

SEQ ID NO: 1132034 - DNA, 25 bp, Homo sapien
gcaacaagtgctcgcggcggctcct

SEQ ID NO: 1132035 - DNA, 25 bp, Homo sapien
gctgcaaaacgaggcccggcacggc

SEQ ID NO: 1132036 - DNA, 25 bp, Homo sapien
aacgagaaggccgcgtcccgtcgca

SEQ ID NO: 1132037 - DNA, 25 bp, Homo sapien
cgtcgcaccccgcccatccctggtg

SEQ ID NO: 1132038 - DNA, 25 bp, Homo sapien
ggcggagcttcgcggccagagcgcg

SEQ ID NO: 1132039 - DNA, 25 bp, Homo sapien
gaggcgagggggtgcccgacgccaa

SEQ ID NO: 1132040 - DNA, 25 bp, Homo sapien
taaacagcgcccgaattgtctcgga

SEQ ID NO: 1132041 - DNA, 25 bp, Homo sapien
taaggagtccggtcctaacagcagg

SEQ ID NO: 1132042 - DNA, 25 bp, Homo sapien
gaaagtaggctcctctcggaatagg

SEQ ID NO: 1132043 - DNA, 25 bp, Homo sapien
aaagcacgggttgatactaacacga

SEQ ID NO: 1132044 - DNA, 25 bp, Homo sapien
tcatctatcatattaatctttcgat

SEQ ID NO: 1132045 - DNA, 25 bp, Homo sapien
gaccatattcatcatcaaagtttca

SEQ ID NO: 1132046 - DNA, 25 bp, Homo sapien
tgttctcagagcaaaggtaagagaa

SEQ ID NO: 1132047 - DNA, 25 bp, Homo sapien
tgcttgttctcagagcaaaggtaag

SEQ ID NO: 1132048 - DNA, 25 bp, Homo sapien
ttcttgcagtcatcaaacactgttg

SEQ ID NO: 1132049 - DNA, 25 bp, Homo sapien
tctttcttgcagtcatcaaacactg

SEQ ID NO: 1132050 - DNA, 25 bp, Homo sapien
ttgcagtcatcaaacactgttgctt

SEQ ID NO: 1132051 - DNA, 25 bp, Homo sapien
cttctttcttgcagtcatcaaacac

SEQ ID NO: 1132052 - DNA, 25 bp, Homo sapien
caaaagcttagtggtaaattcatct

SEQ ID NO: 1132053 - DNA, 25 bp, Homo sapien
cacgatgccaaaagcttagtggtaa

SEQ ID NO: 1132054 - DNA, 25 bp, Homo sapien
caacacgatgccaaaagcttagtgg

SEQ ID NO: 1132055 - DNA, 25 bp, Homo sapien
attttgcaacacgatgccaaaagct

SEQ ID NO: 1132056 - DNA, 25 bp, Homo sapien
aaagtgttcatgccaagaataacac

SEQ ID NO: 1132057 - DNA, 25 bp, Homo sapien
aaaagtgttcatgccaagaataaca

SEQ ID NO: 1132058 - DNA, 25 bp, Homo sapien
taaaaagtgttcatgccaagaataa

SEQ ID NO: 1132059 - DNA, 25 bp, Homo sapien
aaaaagtgttcatgccaagaataac

SEQ ID NO: 1132060 - DNA, 25 bp, Homo sapien
tatcaaaggtatcccacagcagcga

SEQ ID NO: 1132061 - DNA, 25 bp, Homo sapien
gctaatgtggaactcaaaaggactg

SEQ ID NO: 1132062 - DNA, 25 bp, Homo sapien
cagcagcgagctctatgatatacag

SEQ ID NO: 1132063 - DNA, 25 bp, Homo sapien
cagtttcatagagggattttcagga

SEQ ID NO: 1132064 - DNA, 25 bp, Homo sapien
taatcccaagacactactaaatatt

SEQ ID NO: 1132065 - DNA, 25 bp, Homo sapien
tctccactcaagtagcaaatcctga

SEQ ID NO: 1132066 - DNA, 25 bp, Homo sapien
ttgttttaatcccaagacactacta

SEQ ID NO: 1132067 - DNA, 25 bp, Homo sapien
attctccactcaagtagcaaatcct

SEQ ID NO: 1132068 - DNA, 25 bp, Homo sapien
ttcatttgtctgacaggttcacggt

SEQ ID NO: 1132069 - DNA, 25 bp, Homo sapien
ctttgatgtcggagtgatgaaataa

SEQ ID NO: 1132070 - DNA, 25 bp, Homo sapien
tgtcggagtgatgaaataaagagct

SEQ ID NO: 1132071 - DNA, 25 bp, Homo sapien
gacaggttcacggttcttataaata

SEQ ID NO: 1132072 - DNA, 25 bp, Homo sapien
tacttgttctccgatttacttgcaa

SEQ ID NO: 1132073 - DNA, 25 bp, Homo sapien
cttgttctccgatttacttgcaaaa

SEQ ID NO: 1132074 - DNA, 25 bp, Homo sapien
aaatcatgtaagaaacaatctacag

SEQ ID NO: 1132075 - DNA, 25 bp, Homo sapien
ttatacttgttctccgatttacttg

SEQ ID NO: 1132076 - DNA, 25 bp, Homo sapien
ttgttaaagagattatcagggcaaa

SEQ ID NO: 1132077 - DNA, 25 bp, Homo sapien
tctttacatcttcttattgacttgg

SEQ ID NO: 1132078 - DNA, 25 bp, Homo sapien
ttgacttggagcaagaagccttaat

SEQ ID NO: 1132079 - DNA, 25 bp, Homo sapien
ctgagattcatgtggaatgaaggaa

SEQ ID NO: 1132080 - DNA, 25 bp, Homo sapien
ggttcattgcttcaacatgatggtg

SEQ ID NO: 1132081 - DNA, 25 bp, Homo sapien
tatactacgggtgaaggttcattgc

SEQ ID NO: 1132082 - DNA, 25 bp, Homo sapien
ctacaggatagatataagcagtgtc

SEQ ID NO: 1132083 - DNA, 25 bp, Homo sapien
aaatttcaacaagatcactcccagg

SEQ ID NO: 1132084 - DNA, 25 bp, Homo sapien
tgtgtgtgattgctctaacagactg

SEQ ID NO: 1132085 - DNA, 25 bp, Homo sapien
gaaacaggattctgtgccttgtgca

SEQ ID NO: 1132086 - DNA, 25 bp, Homo sapien
taacagactggttggcatgtgatgc

SEQ ID NO: 1132087 - DNA, 25 bp, Homo sapien
ggtacagtacccatatggccttgac

SEQ ID NO: 1132088 - DNA, 25 bp, Homo sapien
gctatggggctgagccacgtgcagg

SEQ ID NO: 1132089 - DNA, 25 bp, Homo sapien
cagcgacgtggcaggttgcagcaag

SEQ ID NO: 1132090 - DNA, 25 bp, Homo sapien
tggggctgagccacgtgcaggccat

SEQ ID NO: 1132091 - DNA, 25 bp, Homo sapien
ggcaggttgcagcaaggcacaggtg

SEQ ID NO: 1132092 - DNA, 25 bp, Homo sapien
tctttaatccctttgactcatggaa

SEQ ID NO: 1132093 - DNA, 25 bp, Homo sapien
gcaatgatctcctgacttctaggat

SEQ ID NO: 1132094 - DNA, 25 bp, Homo sapien
tctaaatgtgctgatgtccaacttt

SEQ ID NO: 1132095 - DNA, 25 bp, Homo sapien
caccatgagtgagttaatcttcttc

SEQ ID NO: 1132096 - DNA, 25 bp, Homo sapien
agttttttaagactactgccacatg

SEQ ID NO: 1132097 - DNA, 25 bp, Homo sapien
aagttttttaagactactgccacat

SEQ ID NO: 1132098 - DNA, 25 bp, Homo sapien
gactactgccacatgcttttttcat

SEQ ID NO: 1132099 - DNA, 25 bp, Homo sapien
taagactactgccacatgctttttt

SEQ ID NO: 1132100 - DNA, 25 bp, Homo sapien
ctcttcctctatctcctccccactt

SEQ ID NO: 1132101 - DNA, 25 bp, Homo sapien
tcctctatctcctccccactttcca

SEQ ID NO: 1132102 - DNA, 25 bp, Homo sapien
cctccatttccctcttcctctatct

SEQ ID NO: 1132103 - DNA, 25 bp, Homo sapien
ccatttccctcttcctctatctcct

SEQ ID NO: 1132104 - DNA, 25 bp, Homo sapien
ccagggtctggactataacagtaat

SEQ ID NO: 1132105 - DNA, 25 bp, Homo sapien
cacactgtaactatctggtcagcca

SEQ ID NO: 1132106 - DNA, 25 bp, Homo sapien
ttttcatccaaggtggcacacactg

SEQ ID NO: 1132107 - DNA, 25 bp, Homo sapien
gaatgcatctggtacatcaagagta

SEQ ID NO: 1132108 - DNA, 25 bp, Homo sapien
tggcggtcaccatgttaagcgaaat

SEQ ID NO: 1132109 - DNA, 25 bp, Homo sapien
gacattgacacacatatcggattta

SEQ ID NO: 1132110 - DNA, 25 bp, Homo sapien
tatgtatcgattcctctaaagatgg

SEQ ID NO: 1132111 - DNA, 25 bp, Homo sapien
catgttctcacttgcttccgggagc

SEQ ID NO: 1132112 - DNA, 25 bp, Homo sapien
aacaagctgtgcaagcttactggca

SEQ ID NO: 1132113 - DNA, 25 bp, Homo sapien
catcaatcttgtagtagtcttcaag

SEQ ID NO: 1132114 - DNA, 25 bp, Homo sapien
gcttactggcattatctagaggttt

SEQ ID NO: 1132115 - DNA, 25 bp, Homo sapien
tattaggctcttttcatcaatcttg

SEQ ID NO: 1132116 - DNA, 25 bp, Homo sapien
tagtcattacttgccttgcatacat

SEQ ID NO: 1132117 - DNA, 25 bp, Homo sapien
tcattacttgccttgcatacattac

SEQ ID NO: 1132118 - DNA, 25 bp, Homo sapien
gcatagtcattacttgccttgcata

SEQ ID NO: 1132119 - DNA, 25 bp, Homo sapien
ttatgcatagtcattacttgccttg

SEQ ID NO: 1132120 - DNA, 25 bp, Homo sapien
ctcaattggtagtagatcatatgcc

SEQ ID NO: 1132121 - DNA, 25 bp, Homo sapien
ggtcagttcatgcaggacagtggac

SEQ ID NO: 1132122 - DNA, 25 bp, Homo sapien
gccacgatcaattattaagagctgt

SEQ ID NO: 1132123 - DNA, 25 bp, Homo sapien
tggacacaggatcaaagccacgatc

SEQ ID NO: 1132124 - DNA, 25 bp, Homo sapien
cacagttaaggaagcaaacacacca

SEQ ID NO: 1132125 - DNA, 25 bp, Homo sapien
tctccttcaatgatagtgagcctgg

SEQ ID NO: 1132126 - DNA, 25 bp, Homo sapien
aactatgcctgttgtcctcaatagc

SEQ ID NO: 1132127 - DNA, 25 bp, Homo sapien
ccctgtgtttaaatgtagctctact

SEQ ID NO: 1132128 - DNA, 25 bp, Homo sapien
tctggacacttagagcttcctgctg

SEQ ID NO: 1132129 - DNA, 25 bp, Homo sapien
tatcccctctgaataaactgcttaa

SEQ ID NO: 1132130 - DNA, 25 bp, Homo sapien
aattgtgatggagcacaaaccacag

SEQ ID NO: 1132131 - DNA, 25 bp, Homo sapien
aaaccacagggagctttacttccat

SEQ ID NO: 1132132 - DNA, 25 bp, Homo sapien
taagagtaacaagcctgacaatact

SEQ ID NO: 1132133 - DNA, 25 bp, Homo sapien
agataagagtaacaagcctgacaat

SEQ ID NO: 1132134 - DNA, 25 bp, Homo sapien
ataagagtaacaagcctgacaatac

SEQ ID NO: 1132135 - DNA, 25 bp, Homo sapien
gataagagtaacaagcctgacaata

SEQ ID NO: 1132136 - DNA, 25 bp, Homo sapien
acaatacctttgacttataagtgat

SEQ ID NO: 1132137 - DNA, 25 bp, Homo sapien
gctgcactaaggatgaaagcccttt

SEQ ID NO: 1132138 - DNA, 25 bp, Homo sapien
cacctgtgtggattacagatgacca

SEQ ID NO: 1132139 - DNA, 25 bp, Homo sapien
ctgagtcaagatcaggaaggactgc

SEQ ID NO: 1132140 - DNA, 25 bp, Homo sapien
gactgaatcatccttggaactactg

SEQ ID NO: 1132141 - DNA, 25 bp, Homo sapien
caaatattcagtttaggtgccatta

SEQ ID NO: 1132142 - DNA, 25 bp, Homo sapien
cagttaactttaagaacaagactca

SEQ ID NO: 1132143 - DNA, 25 bp, Homo sapien
tcctaagcctaccaagacattttca

SEQ ID NO: 1132144 - DNA, 25 bp, Homo sapien
tgaatacctactcaaaactaaggca

SEQ ID NO: 1132145 - DNA, 25 bp, Homo sapien
caaccgcaatatgtcgatgtcgaat

SEQ ID NO: 1132146 - DNA, 25 bp, Homo sapien
gtcgaattctaacccagaggtcatc

SEQ ID NO: 1132147 - DNA, 25 bp, Homo sapien
tgtcgatgtcgaattctaacccaga

SEQ ID NO: 1132148 - DNA, 25 bp, Homo sapien
ctaacacaaccgcaatatgtcgatg

SEQ ID NO: 1132149 - DNA, 25 bp, Homo sapien
tttctttcataagcttgggaatttc

SEQ ID NO: 1132150 - DNA, 25 bp, Homo sapien
tctgttgctttctttgttgatgaaa

SEQ ID NO: 1132151 - DNA, 25 bp, Homo sapien
gaaatttctttcataagcttgggaa

SEQ ID NO: 1132152 - DNA, 25 bp, Homo sapien
aatttctttcataagcttgggaatt

SEQ ID NO: 1132153 - DNA, 25 bp, Homo sapien
cacaataacgtagctgatatcaaca

SEQ ID NO: 1132154 - DNA, 25 bp, Homo sapien
gaaagaagaatttaggaggcttcca

SEQ ID NO: 1132155 - DNA, 25 bp, Homo sapien
gatatcaacattactctcccttcat

SEQ ID NO: 1132156 - DNA, 25 bp, Homo sapien
caatagctttcaagtaatggataaa

SEQ ID NO: 1132157 - DNA, 25 bp, Homo sapien
gctgggtaagagcactaagtgatgt

SEQ ID NO: 1132158 - DNA, 25 bp, Homo sapien
taatctgttttcggaaatggggcat

SEQ ID NO: 1132159 - DNA, 25 bp, Homo sapien
gtaatctgttttcggaaatggggca

SEQ ID NO: 1132160 - DNA, 25 bp, Homo sapien
cttagtaatctgttttcggaaatgg

SEQ ID NO: 1132161 - DNA, 25 bp, Homo sapien
cttctgctaagttaagatggacaac

SEQ ID NO: 1132162 - DNA, 25 bp, Homo sapien
ctgctaagttaagatggacaacttg

SEQ ID NO: 1132163 - DNA, 25 bp, Homo sapien
atcttctgctaagttaagatggaca

SEQ ID NO: 1132164 - DNA, 25 bp, Homo sapien
ttattcatgcaatcttctgctaagt

SEQ ID NO: 1132165 - DNA, 25 bp, Homo sapien
tgaaatttgttatgaacagaggcat

SEQ ID NO: 1132166 - DNA, 25 bp, Homo sapien
ccttgaaatttgttatgaacagagg

SEQ ID NO: 1132167 - DNA, 25 bp, Homo sapien
ggagtactcgcatggaatctttcac

SEQ ID NO: 1132168 - DNA, 25 bp, Homo sapien
gatttttgttgagtagaactggaag

SEQ ID NO: 1132169 - DNA, 25 bp, Homo sapien
agtagaactggaaggagtactcgca

SEQ ID NO: 1132170 - DNA, 25 bp, Homo sapien
tagaattgctcttattttatcacaa

SEQ ID NO: 1132171 - DNA, 25 bp, Homo sapien
cagttacgaatcatgtcactctcat

SEQ ID NO: 1132172 - DNA, 25 bp, Homo sapien
ttacattctggatcaacctgtccaa

SEQ ID NO: 1132173 - DNA, 25 bp, Homo sapien
ccaaggtaactccagttacgaatca

SEQ ID NO: 1132174 - DNA, 25 bp, Homo sapien
tctggatcaacctgtccaaattttc

SEQ ID NO: 1132175 - DNA, 25 bp, Homo sapien
ttcttaacggtttgccttgttgaga

SEQ ID NO: 1132176 - DNA, 25 bp, Homo sapien
ttgataaaaggtgtccaccgagaga

SEQ ID NO: 1132177 - DNA, 25 bp, Homo sapien
gtttcttctgcagaccgatcctttc

SEQ ID NO: 1132178 - DNA, 25 bp, Homo sapien
tgataaaaggtgtccaccgagagag

SEQ ID NO: 1132179 - DNA, 25 bp, Homo sapien
cctgaaccattccatactgctggac

SEQ ID NO: 1132180 - DNA, 25 bp, Homo sapien
ctgctggacactgggaacaatatgg

SEQ ID NO: 1132181 - DNA, 25 bp, Homo sapien
tatggccattcttttgaatctaatc

SEQ ID NO: 1132182 - DNA, 25 bp, Homo sapien
gaatctaatctattatcaatagcat

SEQ ID NO: 1132183 - DNA, 25 bp, Homo sapien
ggatttatgtgcctgagaaacttca

SEQ ID NO: 1132184 - DNA, 25 bp, Homo sapien
ttcataagcacaacgcacttcagag

SEQ ID NO: 1132185 - DNA, 25 bp, Homo sapien
caaaaacaatcagctttgacccatt

SEQ ID NO: 1132186 - DNA, 25 bp, Homo sapien
cagagtatgtgatccctccaattac

SEQ ID NO: 1132187 - DNA, 25 bp, Homo sapien
tattcagcatctttatatcatccaa

SEQ ID NO: 1132188 - DNA, 25 bp, Homo sapien
ttgggtgttaaaacatgtgtagaac

SEQ ID NO: 1132189 - DNA, 25 bp, Homo sapien
catctttaattaaggagactttatc

SEQ ID NO: 1132190 - DNA, 25 bp, Homo sapien
tttatatcatccaacagctttttgg

SEQ ID NO: 1132191 - DNA, 25 bp, Homo sapien
tagtaagaatctctaaaccctccaa

SEQ ID NO: 1132192 - DNA, 25 bp, Homo sapien
tatccaatgggtaattagtatgtac

SEQ ID NO: 1132193 - DNA, 25 bp, Homo sapien
tacataggtggctgtgaaaaattac

SEQ ID NO: 1132194 - DNA, 25 bp, Homo sapien
cacttagaggaaacaattctatcat

SEQ ID NO: 1132195 - DNA, 25 bp, Homo sapien
tccatttccccgcatgtaaagtggg

SEQ ID NO: 1132196 - DNA, 25 bp, Homo sapien
catgcctggccgacttcttgggttt

SEQ ID NO: 1132197 - DNA, 25 bp, Homo sapien
gcacttagaatggtaccaggctcat

SEQ ID NO: 1132198 - DNA, 25 bp, Homo sapien
taataagtactcagcaagcgatggc

SEQ ID NO: 1132199 - DNA, 25 bp, Homo sapien
tgttttaaagggtcagtctagctac

SEQ ID NO: 1132200 - DNA, 25 bp, Homo sapien
ctgtggcaggcccacccaattaagt

SEQ ID NO: 1132201 - DNA, 25 bp, Homo sapien
gcatgtgataccacagctagctact

SEQ ID NO: 1132202 - DNA, 25 bp, Homo sapien
agttaagattggaggacaaaggcca

SEQ ID NO: 1132203 - DNA, 25 bp, Homo sapien
tttgtagtaagtattcccatcacgt

SEQ ID NO: 1132204 - DNA, 25 bp, Homo sapien
tatagtgttctgagtattgtcgaca

SEQ ID NO: 1132205 - DNA, 25 bp, Homo sapien
tttataatcagctcaccaaggttct

SEQ ID NO: 1132206 - DNA, 25 bp, Homo sapien
tactgggctaccttatgcaattctc

SEQ ID NO: 1132207 - DNA, 25 bp, Homo sapien
gtgagcttaggctagcacttcagca

SEQ ID NO: 1132208 - DNA, 25 bp, Homo sapien
gacttcataataaagtaaatcacac

SEQ ID NO: 1132209 - DNA, 25 bp, Homo sapien
tggtgaccaccttgttgtccattcc

SEQ ID NO: 1132210 - DNA, 25 bp, Homo sapien
ccttcttctctaagttggcaggtta

SEQ ID NO: 1132211 - DNA, 25 bp, Homo sapien
gcctcttgccactaaggagttttgg

SEQ ID NO: 1132212 - DNA, 25 bp, Homo sapien
cagccggaaacaacaattcgctgac

SEQ ID NO: 1132213 - DNA, 25 bp, Homo sapien
agaaattcttaattgagtccatcag

SEQ ID NO: 1132214 - DNA, 25 bp, Homo sapien
caacaattcgctgaccatctttggc

SEQ ID NO: 1132215 - DNA, 25 bp, Homo sapien
gtgctcttcaaagctgattgcttgc

SEQ ID NO: 1132216 - DNA, 25 bp, Homo sapien
ttaaaagaacccagaagaagcaggc

SEQ ID NO: 1132217 - DNA, 25 bp, Homo sapien
ccatgattttgaagctccgtttttg

SEQ ID NO: 1132218 - DNA, 25 bp, Homo sapien
ttcaaagctgattgcttgcagttaa

SEQ ID NO: 1132219 - DNA, 25 bp, Homo sapien
ttgtatcacatcagaagttccctac

SEQ ID NO: 1132220 - DNA, 25 bp, Homo sapien
aaagtttgtatcacatcagaagttc

SEQ ID NO: 1132221 - DNA, 25 bp, Homo sapien
aagacaaaagtttgtatcacatcag

SEQ ID NO: 1132222 - DNA, 25 bp, Homo sapien
gtttgtatcacatcagaagttccct

SEQ ID NO: 1132223 - DNA, 25 bp, Homo sapien
tgggcgtggccttggacatattatt

SEQ ID NO: 1132224 - DNA, 25 bp, Homo sapien
tttaatctagaaacatcatacactg

SEQ ID NO: 1132225 - DNA, 25 bp, Homo sapien
tctagaaacatcatacactgtatac

SEQ ID NO: 1132226 - DNA, 25 bp, Homo sapien
attcatgaatccctgacgcctgggc

SEQ ID NO: 1132227 - DNA, 25 bp, Homo sapien
gctctcattcaaaccgacaacgccc

SEQ ID NO: 1132228 - DNA, 25 bp, Homo sapien
ttggtcctcctctgctccgggacgt

SEQ ID NO: 1132229 - DNA, 25 bp, Homo sapien
cgacagacgggtggtcacggcccct

SEQ ID NO: 1132230 - DNA, 25 bp, Homo sapien
gcgtctttcggaccggccaatggcg

SEQ ID NO: 1132231 - DNA, 25 bp, Homo sapien
gtcccgggtacgcggtgaaggtgca

SEQ ID NO: 1132232 - DNA, 25 bp, Homo sapien
tcccgggtacgcggtgaaggtgcag

SEQ ID NO: 1132233 - DNA, 25 bp, Homo sapien
aacgcctcagaacccgcgtcgcgga

SEQ ID NO: 1132234 - DNA, 25 bp, Homo sapien
ctccctccgagagcccctcaaacgc

SEQ ID NO: 1132235 - DNA, 25 bp, Homo sapien
aaacgcctcagaacccgcgtcgcgg

SEQ ID NO: 1132236 - DNA, 25 bp, Homo sapien
tcctcaagccgagtttctggtttct

SEQ ID NO: 1132237 - DNA, 25 bp, Homo sapien
tgaagaccttccgacaaaaaagcag

SEQ ID NO: 1132238 - DNA, 25 bp, Homo sapien
gtttcttgagcatcgacgccgcgtc

SEQ ID NO: 1132239 - DNA, 25 bp, Homo sapien
aaagcagcaactcctcaagccgagt

SEQ ID NO: 1132240 - DNA, 25 bp, Homo sapien
ccagttggtgcccaaaagttcacta

SEQ ID NO: 1132241 - DNA, 25 bp, Homo sapien
tttctatggtaaatcgaccagttgg

SEQ ID NO: 1132242 - DNA, 25 bp, Homo sapien
ttgcagcaactaccaatttctatgg

SEQ ID NO: 1132243 - DNA, 25 bp, Homo sapien
cactaatttaagcacggtcaaggca

SEQ ID NO: 1132244 - DNA, 25 bp, Homo sapien
cattttaaagcagaaataaatccca

SEQ ID NO: 1132245 - DNA, 25 bp, Homo sapien
gcctcccacaggtgcccagcaccac

SEQ ID NO: 1132246 - DNA, 25 bp, Homo sapien
tgcacctgacccaaacacattttaa

SEQ ID NO: 1132247 - DNA, 25 bp, Homo sapien
cactgcacctgacccaaacacattt

SEQ ID NO: 1132248 - DNA, 25 bp, Homo sapien
aaaagttgtgtctctactgaacatg

SEQ ID NO: 1132249 - DNA, 25 bp, Homo sapien
attatagtaggtcctccagatctgt

SEQ ID NO: 1132250 - DNA, 25 bp, Homo sapien
aattaaattatagtaggtcctccag

SEQ ID NO: 1132251 - DNA, 25 bp, Homo sapien
atgaaaagttgtgtctctactgaac

SEQ ID NO: 1132252 - DNA, 25 bp, Homo sapien
tgtccggttagtatattaatgagtt

SEQ ID NO: 1132253 - DNA, 25 bp, Homo sapien
tacaatgtagaattgtttgtagaac

SEQ ID NO: 1132254 - DNA, 25 bp, Homo sapien
gtgttaatacatcctaagctcctga

SEQ ID NO: 1132255 - DNA, 25 bp, Homo sapien
gccaatccagtcctttacaatgtag

SEQ ID NO: 1132256 - DNA, 25 bp, Homo sapien
gtaacgaacatgaaaagaatggtct

SEQ ID NO: 1132257 - DNA, 25 bp, Homo sapien
cgaacatgaaaagaatggtcttctc

SEQ ID NO: 1132258 - DNA, 25 bp, Homo sapien
catgaaaagaatggtcttctctcat

SEQ ID NO: 1132259 - DNA, 25 bp, Homo sapien
ctgtaacgaacatgaaaagaatggt

SEQ ID NO: 1132260 - DNA, 25 bp, Homo sapien
ttgtctacagacaatactatggctg

SEQ ID NO: 1132261 - DNA, 25 bp, Homo sapien
tggtcatcagagttaaaaacacttt

SEQ ID NO: 1132262 - DNA, 25 bp, Homo sapien
tagtacataattggtctctactatc

SEQ ID NO: 1132263 - DNA, 25 bp, Homo sapien
caactgaaacttgaaatggtcatca

SEQ ID NO: 1132264 - DNA, 25 bp, Homo sapien
gtggcatcccacaaaacttagctat

SEQ ID NO: 1132265 - DNA, 25 bp, Homo sapien
tgatggcgcatcatttcactgaggg

SEQ ID NO: 1132266 - DNA, 25 bp, Homo sapien
aattaggaataaggcagaactggct

SEQ ID NO: 1132267 - DNA, 25 bp, Homo sapien
tacaatggattactaatgatggcgc

SEQ ID NO: 1132268 - DNA, 25 bp, Homo sapien
caatggctactgcttgctcatcttc

SEQ ID NO: 1132269 - DNA, 25 bp, Homo sapien
gccaatggctactgcttgctcatct

SEQ ID NO: 1132270 - DNA, 25 bp, Homo sapien
ccaatggctactgcttgctcatctt

SEQ ID NO: 1132271 - DNA, 25 bp, Homo sapien
cttcaaagaatgacacgccagcgcg

SEQ ID NO: 1132272 - DNA, 25 bp, Homo sapien
caactggctgtaaatagcgctaagt

SEQ ID NO: 1132273 - DNA, 25 bp, Homo sapien
tagaaataagcattgcccaactggc

SEQ ID NO: 1132274 - DNA, 25 bp, Homo sapien
gccagcgcggcagtctcctgattta

SEQ ID NO: 1132275 - DNA, 25 bp, Homo sapien
ctatggcttcgtcaaaattcccaag

SEQ ID NO: 1132276 - DNA, 25 bp, Homo sapien
taaggtgtttcccagattaccacta

SEQ ID NO: 1132277 - DNA, 25 bp, Homo sapien
gctctctggaaatatctaggtgtcg

SEQ ID NO: 1132278 - DNA, 25 bp, Homo sapien
tgtcgctgacaacaaactatggctt

SEQ ID NO: 1132279 - DNA, 25 bp, Homo sapien
ggcatgatacacattcccaagattg

SEQ ID NO: 1132280 - DNA, 25 bp, Homo sapien
cattcccaagattgtaaagtgctct

SEQ ID NO: 1132281 - DNA, 25 bp, Homo sapien
gatacacattcccaagattgtaaag

SEQ ID NO: 1132282 - DNA, 25 bp, Homo sapien
ttctcctacatcctggggaccaggg

SEQ ID NO: 1132283 - DNA, 25 bp, Homo sapien
tccctgaagttgccaaggaggtaat

SEQ ID NO: 1132284 - DNA, 25 bp, Homo sapien
tcggtcacccaaagcagtcactaat

SEQ ID NO: 1132285 - DNA, 25 bp, Homo sapien
ttccaaaggcacgtccttgtgccgc

SEQ ID NO: 1132286 - DNA, 25 bp, Homo sapien
ttgtgccgctcggtcacccaaagca

SEQ ID NO: 1132287 - DNA, 25 bp, Homo sapien
gatggaggaaatgatctggctccaa

SEQ ID NO: 1132288 - DNA, 25 bp, Homo sapien
ggaggaaatgatctggctccaaggc

SEQ ID NO: 1132289 - DNA, 25 bp, Homo sapien
tgatggaggaaatgatctggctcca

SEQ ID NO: 1132290 - DNA, 25 bp, Homo sapien
ctggctccaaggctttccactgtac

SEQ ID NO: 1132291 - DNA, 25 bp, Homo sapien
tgtagtattccgaggcagtttcaaa

SEQ ID NO: 1132292 - DNA, 25 bp, Homo sapien
aggttgctatatgctcttctttcag

SEQ ID NO: 1132293 - DNA, 25 bp, Homo sapien
tccgaggcagtttcaaattcaccaa

SEQ ID NO: 1132294 - DNA, 25 bp, Homo sapien
tatgcatttccaaggttgctatatg

SEQ ID NO: 1132295 - DNA, 25 bp, Homo sapien
tatttctaaccaacgacttggaata

SEQ ID NO: 1132296 - DNA, 25 bp, Homo sapien
tagaacctttcagtatttaacacag

SEQ ID NO: 1132297 - DNA, 25 bp, Homo sapien
catgcttctttagtcaaatagccac

SEQ ID NO: 1132298 - DNA, 25 bp, Homo sapien
tctagcctgcttattgggaggaaaa

SEQ ID NO: 1132299 - DNA, 25 bp, Homo sapien
tagtcttgaagtaaagtatatgtat

SEQ ID NO: 1132300 - DNA, 25 bp, Homo sapien
gtgcttctacagctcggtctttaag

SEQ ID NO: 1132301 - DNA, 25 bp, Homo sapien
cagctcttgagcaattgctaagtgc

SEQ ID NO: 1132302 - DNA, 25 bp, Homo sapien
gctgtcgggccaacagtagtgtctt

SEQ ID NO: 1132303 - DNA, 25 bp, Homo sapien
gcaaaatgcattgcttgatcatgat

SEQ ID NO: 1132304 - DNA, 25 bp, Homo sapien
tttcctaagctccaacatgctcttc

SEQ ID NO: 1132305 - DNA, 25 bp, Homo sapien
ctgtgtatgcatttcctaagctcca

SEQ ID NO: 1132306 - DNA, 25 bp, Homo sapien
gcttgatcatgatttcctagtgctg

SEQ ID NO: 1132307 - DNA, 25 bp, Homo sapien
gaaggtctgagagattaagtcgtgc

SEQ ID NO: 1132308 - DNA, 25 bp, Homo sapien
tgttagttcaccacttttatcccca

SEQ ID NO: 1132309 - DNA, 25 bp, Homo sapien
cattatggagttatttgtgctgtag

SEQ ID NO: 1132310 - DNA, 25 bp, Homo sapien
tcaatttcagtattttcagacatta

SEQ ID NO: 1132311 - DNA, 25 bp, Homo sapien
gctaactgcaactcataagactcat

SEQ ID NO: 1132312 - DNA, 25 bp, Homo sapien
caactttattactgatgtctgactc

SEQ ID NO: 1132313 - DNA, 25 bp, Homo sapien
taactcatgaatgggtcagacacat

SEQ ID NO: 1132314 - DNA, 25 bp, Homo sapien
aaaatattgcattagatgaagccta

SEQ ID NO: 1132315 - DNA, 25 bp, Homo sapien
cacaagtaaggctggccggtaattt

SEQ ID NO: 1132316 - DNA, 25 bp, Homo sapien
tgttcacaagtaaggctggccggta

SEQ ID NO: 1132317 - DNA, 25 bp, Homo sapien
ttatgttcacaagtaaggctggccg

SEQ ID NO: 1132318 - DNA, 25 bp, Homo sapien
atcttatgttcacaagtaaggctgg

SEQ ID NO: 1132319 - DNA, 25 bp, Homo sapien
tccatattttccatactatgccggc

SEQ ID NO: 1132320 - DNA, 25 bp, Homo sapien
ggtgttaacttcataagttccatat

SEQ ID NO: 1132321 - DNA, 25 bp, Homo sapien
tttccatactatgccggcgtcccaa

SEQ ID NO: 1132322 - DNA, 25 bp, Homo sapien
ctggtgttaacttcataagttccat

SEQ ID NO: 1132323 - DNA, 25 bp, Homo sapien
tggcaataagaggtttttgcttagc

SEQ ID NO: 1132324 - DNA, 25 bp, Homo sapien
agagtagctttgcagaaggtttggc

SEQ ID NO: 1132325 - DNA, 25 bp, Homo sapien
catcttggagaactttagtggagga

SEQ ID NO: 1132326 - DNA, 25 bp, Homo sapien
tccccttcagtctgttgacaaagag

SEQ ID NO: 1132327 - DNA, 25 bp, Homo sapien
tgagaatttggaattcggtggtcaa

SEQ ID NO: 1132328 - DNA, 25 bp, Homo sapien
gaatttggaattcggtggtcaatag

SEQ ID NO: 1132329 - DNA, 25 bp, Homo sapien
atttggaattcggtggtcaatagaa

SEQ ID NO: 1132330 - DNA, 25 bp, Homo sapien
tggaattcggtggtcaatagaatta

SEQ ID NO: 1132331 - DNA, 25 bp, Homo sapien
gcaacatctctgatcatccatccta

SEQ ID NO: 1132332 - DNA, 25 bp, Homo sapien
catctccaatagtatctgcactgat

SEQ ID NO: 1132333 - DNA, 25 bp, Homo sapien
tgaaatcggcttaataagtcaaaga

SEQ ID NO: 1132334 - DNA, 25 bp, Homo sapien
cctattgctttgaaatcggcttaat

SEQ ID NO: 1132335 - DNA, 25 bp, Homo sapien
ttttgtgttagacgaagccctggca

SEQ ID NO: 1132336 - DNA, 25 bp, Homo sapien
tcaggtggctaagtaccgactggct

SEQ ID NO: 1132337 - DNA, 25 bp, Homo sapien
gcaaattactgaaactagccctctg

SEQ ID NO: 1132338 - DNA, 25 bp, Homo sapien
tctgtgagctggcaagaagatctaa

SEQ ID NO: 1132339 - DNA, 25 bp, Homo sapien
tctctaatacaaaataagcccttcc

SEQ ID NO: 1132340 - DNA, 25 bp, Homo sapien
tcagtggtatctgagctgtatgcag

SEQ ID NO: 1132341 - DNA, 25 bp, Homo sapien
cctgaatgagaattataacactacc

SEQ ID NO: 1132342 - DNA, 25 bp, Homo sapien
gaatgatggacaataataactctct

SEQ ID NO: 1132343 - DNA, 25 bp, Homo sapien
ggtcctgccaactaaccataatata

SEQ ID NO: 1132344 - DNA, 25 bp, Homo sapien
ttattaagaggtcctgccaactaac

SEQ ID NO: 1132345 - DNA, 25 bp, Homo sapien
cagttattcaaggtataagtcatcc

SEQ ID NO: 1132346 - DNA, 25 bp, Homo sapien
agtgaatagaaccattcatttccca

SEQ ID NO: 1132347 - DNA, 25 bp, Homo sapien
tagtttctggcattgtagctcaaga

SEQ ID NO: 1132348 - DNA, 25 bp, Homo sapien
tgcactacattgttagggactgtga

SEQ ID NO: 1132349 - DNA, 25 bp, Homo sapien
tagatccctgaacatttaagcccac

SEQ ID NO: 1132350 - DNA, 25 bp, Homo sapien
gactgtgataagacatagatccctg

SEQ ID NO: 1132351 - DNA, 25 bp, Homo sapien
aataaggctgaaaaagtcttcatct

SEQ ID NO: 1132352 - DNA, 25 bp, Homo sapien
aaagtcctttagcccaaagtcagtg

SEQ ID NO: 1132353 - DNA, 25 bp, Homo sapien
gtaaaagaactctctgttcatccat

SEQ ID NO: 1132354 - DNA, 25 bp, Homo sapien
tggtactgtcggaccctttgtggta

SEQ ID NO: 1132355 - DNA, 25 bp, Homo sapien
aatggtctgccgattttttccctga

SEQ ID NO: 1132356 - DNA, 25 bp, Homo sapien
atggtctgccgattttttccctgaa

SEQ ID NO: 1132357 - DNA, 25 bp, Homo sapien
taatggtctgccgattttttccctg

SEQ ID NO: 1132358 - DNA, 25 bp, Homo sapien
ctaatggtctgccgattttttccct

SEQ ID NO: 1132359 - DNA, 25 bp, Homo sapien
tcccaagcagtaatcacagacgatg

SEQ ID NO: 1132360 - DNA, 25 bp, Homo sapien
gacgatgaagcaccttacaggaccc

SEQ ID NO: 1132361 - DNA, 25 bp, Homo sapien
tcaaacgcgcatgtccagagaagta

SEQ ID NO: 1132362 - DNA, 25 bp, Homo sapien
ggtaaagtaatctcacaagctgcca

SEQ ID NO: 1132363 - DNA, 25 bp, Homo sapien
gcagtattatggaacagaagagacc

SEQ ID NO: 1132364 - DNA, 25 bp, Homo sapien
taggttcttgacctaaccacatggg

SEQ ID NO: 1132365 - DNA, 25 bp, Homo sapien
aacttgttccaagcgtgggcctttg

SEQ ID NO: 1132366 - DNA, 25 bp, Homo sapien
tgatccagtgttactccaggtccca

SEQ ID NO: 1132367 - DNA, 25 bp, Homo sapien
tactttgacagctagcaaggcgaca

SEQ ID NO: 1132368 - DNA, 25 bp, Homo sapien
catgcagccatggagtatcgttacc

SEQ ID NO: 1132369 - DNA, 25 bp, Homo sapien
gactctgaaaagtagtgaatgcccc

SEQ ID NO: 1132370 - DNA, 25 bp, Homo sapien
tgttacaggcacttacgggaaccca

SEQ ID NO: 1132371 - DNA, 25 bp, Homo sapien
ctggaccacgtggacaggatccggt

SEQ ID NO: 1132372 - DNA, 25 bp, Homo sapien
cggaaaaggcccagctcaagtctga

SEQ ID NO: 1132373 - DNA, 25 bp, Homo sapien
gattactacaaaggtgccaacttca

SEQ ID NO: 1132374 - DNA, 25 bp, Homo sapien
atacagccccgcaagaggtgtggct

SEQ ID NO: 1132375 - DNA, 25 bp, Homo sapien
tgggaagccagcgtatgagcatgac

SEQ ID NO: 1132376 - DNA, 25 bp, Homo sapien
cccggagctctagggaaggtacagt

SEQ ID NO: 1132377 - DNA, 25 bp, Homo sapien
gtgtcattggctggctagactatac

SEQ ID NO: 1132378 - DNA, 25 bp, Homo sapien
tacagtagagccctaaaggattagc

SEQ ID NO: 1132379 - DNA, 25 bp, Homo sapien
tataggcggtcctgagagcgaacct

SEQ ID NO: 1132380 - DNA, 25 bp, Homo sapien
gagtactgtacacgcaagcatgcat

SEQ ID NO: 1132381 - DNA, 25 bp, Homo sapien
ttcggccacgggatagaagacggca

SEQ ID NO: 1132382 - DNA, 25 bp, Homo sapien
taagttagccattgagtcctcagga

SEQ ID NO: 1132383 - DNA, 25 bp, Homo sapien
cctggccaacatggtgaaaccctgt

SEQ ID NO: 1132384 - DNA, 25 bp, Homo sapien
tagctgggcctggtgacgtgcacct

SEQ ID NO: 1132385 - DNA, 25 bp, Homo sapien
ctgtctctactaaaaatacaaaaat

SEQ ID NO: 1132386 - DNA, 25 bp, Homo sapien
cacttggtcaggaggtcaagactag

SEQ ID NO: 1132387 - DNA, 25 bp, Homo sapien
tacgttggtacactcagttgagacg

SEQ ID NO: 1132388 - DNA, 25 bp, Homo sapien
tgagggcaagggcaacgtcattaag

SEQ ID NO: 1132389 - DNA, 25 bp, Homo sapien
tctgcatcgtggttttagtggctac

SEQ ID NO: 1132390 - DNA, 25 bp, Homo sapien
tataccgtattgatgaacaagccac

SEQ ID NO: 1132391 - DNA, 25 bp, Homo sapien
ctgagtggttgagaaggtgcgcttg

SEQ ID NO: 1132392 - DNA, 25 bp, Homo sapien
tgagaaggtgcgcttggataaaatt

SEQ ID NO: 1132393 - DNA, 25 bp, Homo sapien
ggtgcgcttggataaaatttgcttc

SEQ ID NO: 1132394 - DNA, 25 bp, Homo sapien
gaaggtgcgcttggataaaatttgc

SEQ ID NO: 1132395 - DNA, 25 bp, Homo sapien
gggtgtcagtgagatcagtggaggc

SEQ ID NO: 1132396 - DNA, 25 bp, Homo sapien
ggctgcagaggtccagcaatgctga

SEQ ID NO: 1132397 - DNA, 25 bp, Homo sapien
tgcagaggtccagcaatgctgaagg

SEQ ID NO: 1132398 - DNA, 25 bp, Homo sapien
tgtcagtgagatcagtggaggctgc

SEQ ID NO: 1132399 - DNA, 25 bp, Homo sapien
gttggctgcgtaggcagggtgaact

SEQ ID NO: 1132400 - DNA, 25 bp, Homo sapien
gctgcgtaggcagggtgaactggta

SEQ ID NO: 1132401 - DNA, 25 bp, Homo sapien
tcggttggctgcgtaggcagggtga

SEQ ID NO: 1132402 - DNA, 25 bp, Homo sapien
tggctgcgtaggcagggtgaactgg

SEQ ID NO: 1132403 - DNA, 25 bp, Homo sapien
caattgcaattgctgaagcatacac

SEQ ID NO: 1132404 - DNA, 25 bp, Homo sapien
tcctcgcaattgcaattgctgaagc

SEQ ID NO: 1132405 - DNA, 25 bp, Homo sapien
tgctgaagcatacactttgccctct

SEQ ID NO: 1132406 - DNA, 25 bp, Homo sapien
accgtatccatcctcgcaattgcaa

SEQ ID NO: 1132407 - DNA, 25 bp, Homo sapien
gaagaagggtgtccctgctccagga

SEQ ID NO: 1132408 - DNA, 25 bp, Homo sapien
caccagaggttggactggaaccacc

SEQ ID NO: 1132409 - DNA, 25 bp, Homo sapien
tgggtcaccaagtcagtcaccagag

SEQ ID NO: 1132410 - DNA, 25 bp, Homo sapien
ccttcttacaaggtggcagctggct

SEQ ID NO: 1132411 - DNA, 25 bp, Homo sapien
atccaaaacctttacctgaatgatt

SEQ ID NO: 1132412 - DNA, 25 bp, Homo sapien
ttgatccaaaacctttacctgaatg

SEQ ID NO: 1132413 - DNA, 25 bp, Homo sapien
tgatccaaaacctttacctgaatga

SEQ ID NO: 1132414 - DNA, 25 bp, Homo sapien
cttgatccaaaacctttacctgaat

SEQ ID NO: 1132415 - DNA, 25 bp, Homo sapien
ttccaataaagtatacagttattca

SEQ ID NO: 1132416 - DNA, 25 bp, Homo sapien
ttctaagtatctccagagcataaca

SEQ ID NO: 1132417 - DNA, 25 bp, Homo sapien
ccagagcataacagtgattttagtg

SEQ ID NO: 1132418 - DNA, 25 bp, Homo sapien
gtatctccagagcataacagtgatt

SEQ ID NO: 1132419 - DNA, 25 bp, Homo sapien
tgtccgccgcggttgcgcgcgttcc

SEQ ID NO: 1132420 - DNA, 25 bp, Homo sapien
ctggcgggtccagcggactcgcggc

SEQ ID NO: 1132421 - DNA, 25 bp, Homo sapien
ggcggctgcctgtccgccgcggttg

SEQ ID NO: 1132422 - DNA, 25 bp, Homo sapien
gaccgtgctagctgcgtgcgtccgc

SEQ ID NO: 1132423 - DNA, 25 bp, Homo sapien
caggaagcacgctgaaaccctgggc

SEQ ID NO: 1132424 - DNA, 25 bp, Homo sapien
gcggcaagctgtgcgacctcttctg

SEQ ID NO: 1132425 - DNA, 25 bp, Homo sapien
attcgatgacgaggcccaggaagca

SEQ ID NO: 1132426 - DNA, 25 bp, Homo sapien
cagccgtcagccgaacaattcgatg

SEQ ID NO: 1132427 - DNA, 25 bp, Homo sapien
tcctctgcagatagaactgtcaccc

SEQ ID NO: 1132428 - DNA, 25 bp, Homo sapien
tgtcaccctctggacttacaatggg

SEQ ID NO: 1132429 - DNA, 25 bp, Homo sapien
catgtcagtctatgcagcaaaagca

SEQ ID NO: 1132430 - DNA, 25 bp, Homo sapien
tgggtagagcacaccgcatgtcagt

SEQ ID NO: 1132431 - DNA, 25 bp, Homo sapien
gctctgtaggtccggcggcgcatct

SEQ ID NO: 1132432 - DNA, 25 bp, Homo sapien
ggtccggcggcgcatcttaggtgct

SEQ ID NO: 1132433 - DNA, 25 bp, Homo sapien
ttgcatgatttcgtggggttctccg

SEQ ID NO: 1132434 - DNA, 25 bp, Homo sapien
tcgtggggttctccgggtcaagtga

SEQ ID NO: 1132435 - DNA, 25 bp, Homo sapien
ccaaattactctcatagagctccat

SEQ ID NO: 1132436 - DNA, 25 bp, Homo sapien
tgccattccttccaaattactctca

SEQ ID NO: 1132437 - DNA, 25 bp, Homo sapien
atttctgataatcccacccctgcca

SEQ ID NO: 1132438 - DNA, 25 bp, Homo sapien
ccacccctgccattccttccaaatt

SEQ ID NO: 1132439 - DNA, 25 bp, Homo sapien
ccactttaaccagaaatcggcgata

SEQ ID NO: 1132440 - DNA, 25 bp, Homo sapien
ccttaaactatcaggagaatctcga

SEQ ID NO: 1132441 - DNA, 25 bp, Homo sapien
tttcagatcctaaagcaccacgtcg

SEQ ID NO: 1132442 - DNA, 25 bp, Homo sapien
cacgtcgtcggaaaacattcaaagg

SEQ ID NO: 1132443 - DNA, 25 bp, Homo sapien
ctgaacgttgcaaatgaaatgagga

SEQ ID NO: 1132444 - DNA, 25 bp, Homo sapien
tgaacgttgcaaatgaaatgaggaa

SEQ ID NO: 1132445 - DNA, 25 bp, Homo sapien
gaacgttgcaaatgaaatgaggaac

SEQ ID NO: 1132446 - DNA, 25 bp, Homo sapien
ggcctccgtgactgcccttgagctg

SEQ ID NO: 1132447 - DNA, 25 bp, Homo sapien
gctgctcttccttactccggatgga

SEQ ID NO: 1132448 - DNA, 25 bp, Homo sapien
tactccggatggaaatctagtcaga

SEQ ID NO: 1132449 - DNA, 25 bp, Homo sapien
ttgagagaactccagcaccgcgggt

SEQ ID NO: 1132450 - DNA, 25 bp, Homo sapien
ttattttgcgccgtggcggctgctg

SEQ ID NO: 1132451 - DNA, 25 bp, Homo sapien
tattttgcgccgtggcggctgctgt

SEQ ID NO: 1132452 - DNA, 25 bp, Homo sapien
cccgcgtcagtgtgtttgaaaaggt

SEQ ID NO: 1132453 - DNA, 25 bp, Homo sapien
gctggcccgcgtcagtgtgtttgaa

SEQ ID NO: 1132454 - DNA, 25 bp, Homo sapien
ggcccgcgtcagtgtgtttgaaaag

SEQ ID NO: 1132455 - DNA, 25 bp, Homo sapien
cgtcagtgtgtttgaaaaggtaaag

SEQ ID NO: 1132456 - DNA, 25 bp, Homo sapien
taagaagaacgctatctcgaaggct

SEQ ID NO: 1132457 - DNA, 25 bp, Homo sapien
gaacgctatcaggagtggctagccg

SEQ ID NO: 1132458 - DNA, 25 bp, Homo sapien
gaagaagccgtagtacgcaggagca

SEQ ID NO: 1132459 - DNA, 25 bp, Homo sapien
tagccgattgtcgagctcgggaaac

SEQ ID NO: 1132460 - DNA, 25 bp, Homo sapien
taaattcgagtcttcagtgccaggt

SEQ ID NO: 1132461 - DNA, 25 bp, Homo sapien
gaggttaaattcgagtcttcagtgc

SEQ ID NO: 1132462 - DNA, 25 bp, Homo sapien
aattcacaaggaggttaaattcgag

SEQ ID NO: 1132463 - DNA, 25 bp, Homo sapien
ttttctctcataagtttctgcagac

SEQ ID NO: 1132464 - DNA, 25 bp, Homo sapien
gacgaggtactttcttgaagtaggc

SEQ ID NO: 1132465 - DNA, 25 bp, Homo sapien
ccttcttctctgatagcagccaggt

SEQ ID NO: 1132466 - DNA, 25 bp, Homo sapien
gttttgagacgaggtactttcttga

SEQ ID NO: 1132467 - DNA, 25 bp, Homo sapien
cttctctgatagcagccaggttttg

SEQ ID NO: 1132468 - DNA, 25 bp, Homo sapien
tccacactgtccagagatggcagtc

SEQ ID NO: 1132469 - DNA, 25 bp, Homo sapien
acactgtccagagatggcagtctct

SEQ ID NO: 1132470 - DNA, 25 bp, Homo sapien
gctccacactgtccagagatggcag

SEQ ID NO: 1132471 - DNA, 25 bp, Homo sapien
cacactgtccagagatggcagtctc

SEQ ID NO: 1132472 - DNA, 25 bp, Homo sapien
gaaaccaaatataatcccagctcac

SEQ ID NO: 1132473 - DNA, 25 bp, Homo sapien
gattaattttccagactctcagacc

SEQ ID NO: 1132474 - DNA, 25 bp, Homo sapien
cgggctgatctacaactcctggaca

SEQ ID NO: 1132475 - DNA, 25 bp, Homo sapien
tcttccctcaactttggagaatgat

SEQ ID NO: 1132476 - DNA, 25 bp, Homo sapien
aacacaagcaattgccacagcagca

SEQ ID NO: 1132477 - DNA, 25 bp, Homo sapien
acaagcaattgccacagcagcatgc

SEQ ID NO: 1132478 - DNA, 25 bp, Homo sapien
gccattacaacacaagcaattgcca

SEQ ID NO: 1132479 - DNA, 25 bp, Homo sapien
gacgtaaaaggccattacaacacaa

SEQ ID NO: 1132480 - DNA, 25 bp, Homo sapien
ttcatccccgtccccttggttggca

SEQ ID NO: 1132481 - DNA, 25 bp, Homo sapien
cccttggttggcagttgatgacttg

SEQ ID NO: 1132482 - DNA, 25 bp, Homo sapien
tgggttcaggtctccaacaggttct

SEQ ID NO: 1132483 - DNA, 25 bp, Homo sapien
ggttcaggtctccaacaggttcttc

SEQ ID NO: 1132484 - DNA, 25 bp, Homo sapien
gatccttccatagatataagcaggg

SEQ ID NO: 1132485 - DNA, 25 bp, Homo sapien
cctacagggtttatggtgatgccag

SEQ ID NO: 1132486 - DNA, 25 bp, Homo sapien
gaagttctagacatccaacagctga

SEQ ID NO: 1132487 - DNA, 25 bp, Homo sapien
catctaaaatggtctgctcaggagt

SEQ ID NO: 1132488 - DNA, 25 bp, Homo sapien
aattcatcacttctgagcgccgggc

SEQ ID NO: 1132489 - DNA, 25 bp, Homo sapien
caaataagatcaaagtgtaagcggg

SEQ ID NO: 1132490 - DNA, 25 bp, Homo sapien
gcccggcctcgtctatctgatcaat

SEQ ID NO: 1132491 - DNA, 25 bp, Homo sapien
gaatcgcctcgataatcagtggccg

SEQ ID NO: 1132492 - DNA, 25 bp, Homo sapien
ggattcacccgaattgactccagtt

SEQ ID NO: 1132493 - DNA, 25 bp, Homo sapien
ggatacatctactcaaactatggag

SEQ ID NO: 1132494 - DNA, 25 bp, Homo sapien
aaaacaaccaaggctggacgcggtg

SEQ ID NO: 1132495 - DNA, 25 bp, Homo sapien
aaggctaagcaagtttggatacatc

SEQ ID NO: 1132496 - DNA, 25 bp, Homo sapien
attctctaactaaaacaaggactga

SEQ ID NO: 1132497 - DNA, 25 bp, Homo sapien
tacaacaatttagtgtgtacggagt

SEQ ID NO: 1132498 - DNA, 25 bp, Homo sapien
gaggtaaagttcattaagcccacat

SEQ ID NO: 1132499 - DNA, 25 bp, Homo sapien
gcttaggttttgctctaggcagtta

SEQ ID NO: 1132500 - DNA, 25 bp, Homo sapien
gcagggaccacgcgcgcctctgcag

SEQ ID NO: 1132501 - DNA, 25 bp, Homo sapien
tggggcagggaccacgcgcgcctct

SEQ ID NO: 1132502 - DNA, 25 bp, Homo sapien
agggaccacgcgcgcctctgcagct

SEQ ID NO: 1132503 - DNA, 25 bp, Homo sapien
gaccacgcgcgcctctgcagctcac

SEQ ID NO: 1132504 - DNA, 25 bp, Homo sapien
gtcgccttgacaaccgcctcctctc

SEQ ID NO: 1132505 - DNA, 25 bp, Homo sapien
cgtcgccttgacaaccgcctcctct

SEQ ID NO: 1132506 - DNA, 25 bp, Homo sapien
ccacgtcgccttgacaaccgcctcc

SEQ ID NO: 1132507 - DNA, 25 bp, Homo sapien
acgtcgccttgacaaccgcctcctc

SEQ ID NO: 1132508 - DNA, 25 bp, Homo sapien
ggctacgccaacaccgcccatcctt

SEQ ID NO: 1132509 - DNA, 25 bp, Homo sapien
agtcacctccctgcggctacgccaa

SEQ ID NO: 1132510 - DNA, 25 bp, Homo sapien
cacaggcggaggatgcaagaggcca

SEQ ID NO: 1132511 - DNA, 25 bp, Homo sapien
aggccaggctcgcttcagtcacctc

SEQ ID NO: 1132512 - DNA, 25 bp, Homo sapien
ttctgctggcagaaggcggaaaaaa

SEQ ID NO: 1132513 - DNA, 25 bp, Homo sapien
gctgcttctgctggcagaaggcgga

SEQ ID NO: 1132514 - DNA, 25 bp, Homo sapien
tgcttctgctggcagaaggcggaaa

SEQ ID NO: 1132515 - DNA, 25 bp, Homo sapien
cttctgctggcagaaggcggaaaaa

SEQ ID NO: 1132516 - DNA, 25 bp, Homo sapien
agcgttgtcctgagtgagcggcagt

SEQ ID NO: 1132517 - DNA, 25 bp, Homo sapien
ctgagtgagcggcagtagcggctca

SEQ ID NO: 1132518 - DNA, 25 bp, Homo sapien
ttgtcctgagtgagcggcagtagcg

SEQ ID NO: 1132519 - DNA, 25 bp, Homo sapien
gtgagcggcagtagcggctcaggtg

SEQ ID NO: 1132520 - DNA, 25 bp, Homo sapien
ttcccctgactctggcggagagatg

SEQ ID NO: 1132521 - DNA, 25 bp, Homo sapien
cacagccggggtatgcgcctctcag

SEQ ID NO: 1132522 - DNA, 25 bp, Homo sapien
gggtatgcgcctctcagttcttccc

SEQ ID NO: 1132523 - DNA, 25 bp, Homo sapien
tcccctgactctggcggagagatgg

SEQ ID NO: 1132524 - DNA, 25 bp, Homo sapien
tgattcttaggcaagtgggctttct

SEQ ID NO: 1132525 - DNA, 25 bp, Homo sapien
tcccttgtttgattcttaggcaagt

SEQ ID NO: 1132526 - DNA, 25 bp, Homo sapien
gggctttcttggtctcattattttg

SEQ ID NO: 1132527 - DNA, 25 bp, Homo sapien
tattttggttggttagaccacaggc

SEQ ID NO: 1132528 - DNA, 25 bp, Homo sapien
gagcctcaggataaggtagagcgtg

SEQ ID NO: 1132529 - DNA, 25 bp, Homo sapien
ttcactgcaccttgggaaatgctcc

SEQ ID NO: 1132530 - DNA, 25 bp, Homo sapien
taaggtagagcgtgttaaaggcagc

SEQ ID NO: 1132531 - DNA, 25 bp, Homo sapien
cctttggctcgcagtcagcacttag

SEQ ID NO: 1132532 - DNA, 25 bp, Homo sapien
ccttaagatgctactaatttccaga

SEQ ID NO: 1132533 - DNA, 25 bp, Homo sapien
gcctggccctagaagttgctttcac

SEQ ID NO: 1132534 - DNA, 25 bp, Homo sapien
cttgacaccttaagatgctactaat

SEQ ID NO: 1132535 - DNA, 25 bp, Homo sapien
gactctatttagtgagtgatctgaa

SEQ ID NO: 1132536 - DNA, 25 bp, Homo sapien
gccatgcttgaggaaccaaggcccc

SEQ ID NO: 1132537 - DNA, 25 bp, Homo sapien
gagatttaagaacgtccactgccgg

SEQ ID NO: 1132538 - DNA, 25 bp, Homo sapien
gccctggaggacatcttgactgtaa

SEQ ID NO: 1132539 - DNA, 25 bp, Homo sapien
tgccggaaactagaccaacagctaa

SEQ ID NO: 1132540 - DNA, 25 bp, Homo sapien
ccagagtgacatgggtttgcaactg

SEQ ID NO: 1132541 - DNA, 25 bp, Homo sapien
gtgacatgggtttgcaactgaaact

SEQ ID NO: 1132542 - DNA, 25 bp, Homo sapien
gagtgacatgggtttgcaactgaaa

SEQ ID NO: 1132543 - DNA, 25 bp, Homo sapien
cctccagagtgacatgggtttgcaa

SEQ ID NO: 1132544 - DNA, 25 bp, Homo sapien
tgtttgattcttaaagcaagcagag

SEQ ID NO: 1132545 - DNA, 25 bp, Homo sapien
tttcaccgttctagagactaagaag

SEQ ID NO: 1132546 - DNA, 25 bp, Homo sapien
catgctcctttataagggtacctaa

SEQ ID NO: 1132547 - DNA, 25 bp, Homo sapien
taatatatcacattggtaacacttg

SEQ ID NO: 1132548 - DNA, 25 bp, Homo sapien
caggggcactgcgacctcactgtgt

SEQ ID NO: 1132549 - DNA, 25 bp, Homo sapien
tgctcaggctttgggtggatggact

SEQ ID NO: 1132550 - DNA, 25 bp, Homo sapien
tctgctcaggctttgggtggatgga

SEQ ID NO: 1132551 - DNA, 25 bp, Homo sapien
gcactgcgacctcactgtgtcccat

SEQ ID NO: 1132552 - DNA, 25 bp, Homo sapien
tagctcaggaacaatatctcagaag

SEQ ID NO: 1132553 - DNA, 25 bp, Homo sapien
gaaaatgatgttcacggccgggctt

SEQ ID NO: 1132554 - DNA, 25 bp, Homo sapien
cagagtgcacattgtagcagtgtca

SEQ ID NO: 1132555 - DNA, 25 bp, Homo sapien
tgtcactggacatacccgggctgtg

SEQ ID NO: 1132556 - DNA, 25 bp, Homo sapien
cagcactggctttcaagctgctaaa

SEQ ID NO: 1132557 - DNA, 25 bp, Homo sapien
tgtctggggcacagcactggctttc

SEQ ID NO: 1132558 - DNA, 25 bp, Homo sapien
tggggcacagcactggctttcaagc

SEQ ID NO: 1132559 - DNA, 25 bp, Homo sapien
gggcacagcactggctttcaagctg

SEQ ID NO: 1132560 - DNA, 25 bp, Homo sapien
gccgtgtactcatagtggtactcag

SEQ ID NO: 1132561 - DNA, 25 bp, Homo sapien
tggaacccgtgctgtcacacgccgt

SEQ ID NO: 1132562 - DNA, 25 bp, Homo sapien
gggtatgcggcacggcgaccctcca

SEQ ID NO: 1132563 - DNA, 25 bp, Homo sapien
gtcacacgccgtgtactcatagtgg

SEQ ID NO: 1132564 - DNA, 25 bp, Homo sapien
atcaaaccgaatgcctgtgccgagg

SEQ ID NO: 1132565 - DNA, 25 bp, Homo sapien
ttcatatccagaaactccccggcgt

SEQ ID NO: 1132566 - DNA, 25 bp, Homo sapien
cggccctcagcgcatggcttacatg

SEQ ID NO: 1132567 - DNA, 25 bp, Homo sapien
gaagtacagttcccggtggactcag

SEQ ID NO: 1132568 - DNA, 25 bp, Homo sapien
tagtattcgaagttaacggtgccag

SEQ ID NO: 1132569 - DNA, 25 bp, Homo sapien
tgcattcgtccgtgttggaggcgat

SEQ ID NO: 1132570 - DNA, 25 bp, Homo sapien
ccagattgcttcaggttgacggcgt

SEQ ID NO: 1132571 - DNA, 25 bp, Homo sapien
ttgacggcgtacatcagtgtggctg

SEQ ID NO: 1132572 - DNA, 25 bp, Homo sapien
ctgtggaattcccatcctttctctg

SEQ ID NO: 1132573 - DNA, 25 bp, Homo sapien
ctgtggtcttcatccacctggagtc

SEQ ID NO: 1132574 - DNA, 25 bp, Homo sapien
tgggctggcactggtcattctgaac

SEQ ID NO: 1132575 - DNA, 25 bp, Homo sapien
ggtcttcatccacctggagtcatct

SEQ ID NO: 1132576 - DNA, 25 bp, Homo sapien
cattattgcctcgatttagctccac

SEQ ID NO: 1132577 - DNA, 25 bp, Homo sapien
gctgtggttctccaatagaggacat

SEQ ID NO: 1132578 - DNA, 25 bp, Homo sapien
tccaatagaggacattattgcctcg

SEQ ID NO: 1132579 - DNA, 25 bp, Homo sapien
cagcacaggcttgggtactttggtc

SEQ ID NO: 1132580 - DNA, 25 bp, Homo sapien
cttgtctgcatacgtgccaggtttg

SEQ ID NO: 1132581 - DNA, 25 bp, Homo sapien
gagttggctgggcaaagtttgcaga

SEQ ID NO: 1132582 - DNA, 25 bp, Homo sapien
ttggctgggcaaagtttgcagaaag

SEQ ID NO: 1132583 - DNA, 25 bp, Homo sapien
tgcttgtctgcatacgtgccaggtt

SEQ ID NO: 1132584 - DNA, 25 bp, Homo sapien
tgagtatttgtcagggtcacactgg

SEQ ID NO: 1132585 - DNA, 25 bp, Homo sapien
ctgagtatttgtcagggtcacactg

SEQ ID NO: 1132586 - DNA, 25 bp, Homo sapien
gaaggatggctctattccctggtat

SEQ ID NO: 1132587 - DNA, 25 bp, Homo sapien
tattccctggtatctccttgtgtgt

SEQ ID NO: 1132588 - DNA, 25 bp, Homo sapien
gatggctctattccctggtatctcc

SEQ ID NO: 1132589 - DNA, 25 bp, Homo sapien
ctctattccctggtatctccttgtg

SEQ ID NO: 1132590 - DNA, 25 bp, Homo sapien
gatatatggattggcaagggtattc

SEQ ID NO: 1132591 - DNA, 25 bp, Homo sapien
tatggattggcaagggtattccagg

SEQ ID NO: 1132592 - DNA, 25 bp, Homo sapien
taatggatatatggattggcaaggg

SEQ ID NO: 1132593 - DNA, 25 bp, Homo sapien
ttggcaagggtattccaggatccag

SEQ ID NO: 1132594 - DNA, 25 bp, Homo sapien
caaggtggcactgctactaattggt

SEQ ID NO: 1132595 - DNA, 25 bp, Homo sapien
tagggaccagtgagaaagatgcttt

SEQ ID NO: 1132596 - DNA, 25 bp, Homo sapien
gagccctagtaatttagttctggag

SEQ ID NO: 1132597 - DNA, 25 bp, Homo sapien
ttagtttaggtcctggacatcagca

SEQ ID NO: 1132598 - DNA, 25 bp, Homo sapien
gagttacataagaaagctgagctcc

SEQ ID NO: 1132599 - DNA, 25 bp, Homo sapien
ttggagttacataagaaagctgagc

SEQ ID NO: 1132600 - DNA, 25 bp, Homo sapien
gttacataagaaagctgagctcctg

SEQ ID NO: 1132601 - DNA, 25 bp, Homo sapien
tatttggagttacataagaaagctg

SEQ ID NO: 1132602 - DNA, 25 bp, Homo sapien
catcgcaggccgtgtgtgtgtagaa

SEQ ID NO: 1132603 - DNA, 25 bp, Homo sapien
taatctttgtctgtgcaagctgggc

SEQ ID NO: 1132604 - DNA, 25 bp, Homo sapien
aagctgggcgcacgttacaggaaga

SEQ ID NO: 1132605 - DNA, 25 bp, Homo sapien
cacgttacaggaagaagatcctttc

SEQ ID NO: 1132606 - DNA, 25 bp, Homo sapien
caacaagagttaagctccataaggg

SEQ ID NO: 1132607 - DNA, 25 bp, Homo sapien
tgttgaacaaatggcctcctctgag

SEQ ID NO: 1132608 - DNA, 25 bp, Homo sapien
ctggcacagagtcgctcctcgataa

SEQ ID NO: 1132609 - DNA, 25 bp, Homo sapien
tccataagggctagatgttccctca

SEQ ID NO: 1132610 - DNA, 25 bp, Homo sapien
taggagccagctcgaggtgtgtccc

SEQ ID NO: 1132611 - DNA, 25 bp, Homo sapien
acggtactgacccagaaggccttgg

SEQ ID NO: 1132612 - DNA, 25 bp, Homo sapien
gaactgagtctaaggtgcaactgac

SEQ ID NO: 1132613 - DNA, 25 bp, Homo sapien
tttcaggcagcaagcacggtactga

SEQ ID NO: 1132614 - DNA, 25 bp, Homo sapien
taggacatctttgggactctacctt

SEQ ID NO: 1132615 - DNA, 25 bp, Homo sapien
ctttgtgtggctcacggatgtatcc

SEQ ID NO: 1132616 - DNA, 25 bp, Homo sapien
ggctcacggatgtatcccaagcacc

SEQ ID NO: 1132617 - DNA, 25 bp, Homo sapien
gtgagatttaggacatctttgggac

SEQ ID NO: 1132618 - DNA, 25 bp, Homo sapien
gtaggaaccatatgggcagggctgg

SEQ ID NO: 1132619 - DNA, 25 bp, Homo sapien
aaggtcctcgctacagattttcggc

SEQ ID NO: 1132620 - DNA, 25 bp, Homo sapien
gcagtgggtcttcacaccagaggca

SEQ ID NO: 1132621 - DNA, 25 bp, Homo sapien
gattttcggcttggcccatttgtac

SEQ ID NO: 1132622 - DNA, 25 bp, Homo sapien
cgaagttgatcccactgagaacggt

SEQ ID NO: 1132623 - DNA, 25 bp, Homo sapien
tgtcatgcccttgtactcgaagttg

SEQ ID NO: 1132624 - DNA, 25 bp, Homo sapien
catgtttgtgggcagcgtgttccac

SEQ ID NO: 1132625 - DNA, 25 bp, Homo sapien
tattcaaatcccacagcaggttcag

SEQ ID NO: 1132626 - DNA, 25 bp, Homo sapien
aaccagagtgagaatcatgaagtca

SEQ ID NO: 1132627 - DNA, 25 bp, Homo sapien
caaccagagtgagaatcatgaagtc

SEQ ID NO: 1132628 - DNA, 25 bp, Homo sapien
accagagtgagaatcatgaagtcat

SEQ ID NO: 1132629 - DNA, 25 bp, Homo sapien
caccatgaagtagagctcacagttc

SEQ ID NO: 1132630 - DNA, 25 bp, Homo sapien
accatgaagtagagctcacagttca

SEQ ID NO: 1132631 - DNA, 25 bp, Homo sapien
cccttgttaaactgtgaagtccctg

SEQ ID NO: 1132632 - DNA, 25 bp, Homo sapien
catcccaggtgccatcacggttggt

SEQ ID NO: 1132633 - DNA, 25 bp, Homo sapien
tggaggccctctagcgggcaaagaa

SEQ ID NO: 1132634 - DNA, 25 bp, Homo sapien
cccaggacagacaagtgaagcgggt

SEQ ID NO: 1132635 - DNA, 25 bp, Homo sapien
ggtataggactgtttgcctttggaa

SEQ ID NO: 1132636 - DNA, 25 bp, Homo sapien
tgaagctcgtggtagtgttctcctc

SEQ ID NO: 1132637 - DNA, 25 bp, Homo sapien
aggtataggactgtttgcctttgga

SEQ ID NO: 1132638 - DNA, 25 bp, Homo sapien
ccaggtgaagctcgtggtagtgttc

SEQ ID NO: 1132639 - DNA, 25 bp, Homo sapien
gatggagtagatcttggcaacgtca

SEQ ID NO: 1132640 - DNA, 25 bp, Homo sapien
catcagaggcttctagggcacaggg

SEQ ID NO: 1132641 - DNA, 25 bp, Homo sapien
ggcaggttcctgaatctcggtcaat

SEQ ID NO: 1132642 - DNA, 25 bp, Homo sapien
tcggtcaatatagtaaccagcagga

SEQ ID NO: 1132643 - DNA, 25 bp, Homo sapien
cttgttgttcttggtccctggacca

SEQ ID NO: 1132644 - DNA, 25 bp, Homo sapien
ttgttgttcttggtccctggaccac

SEQ ID NO: 1132645 - DNA, 25 bp, Homo sapien
cctgcagccaagagtagcagttttc

SEQ ID NO: 1132646 - DNA, 25 bp, Homo sapien
tttgccaaagcggagaagttgtagt

SEQ ID NO: 1132647 - DNA, 25 bp, Homo sapien
gagggtaaagtgatggaagtatttc

SEQ ID NO: 1132648 - DNA, 25 bp, Homo sapien
caatcgttgtagcacagagagtgga

SEQ ID NO: 1132649 - DNA, 25 bp, Homo sapien
aagttgtagttgaaagtcctggtcg

SEQ ID NO: 1132650 - DNA, 25 bp, Homo sapien
gatagggcctctctgtgttgttcag

SEQ ID NO: 1132651 - DNA, 25 bp, Homo sapien
ttcgtaaagatagggcctctctgtg

SEQ ID NO: 1132652 - DNA, 25 bp, Homo sapien
ttttcgtaaagatagggcctctctg

SEQ ID NO: 1132653 - DNA, 25 bp, Homo sapien
cgtaaagatagggcctctctgtgtt

SEQ ID NO: 1132654 - DNA, 25 bp, Homo sapien
cctggcagacgtaggctgtgataga

SEQ ID NO: 1132655 - DNA, 25 bp, Homo sapien
ggccttgtagcctgtcacctctggg

SEQ ID NO: 1132656 - DNA, 25 bp, Homo sapien
cagtgacattgtcggtgcacacaga

SEQ ID NO: 1132657 - DNA, 25 bp, Homo sapien
tgtgatagatttggagaaccctgac

SEQ ID NO: 1132658 - DNA, 25 bp, Homo sapien
ttcatctcatcacatccctgagtgg

SEQ ID NO: 1132659 - DNA, 25 bp, Homo sapien
ccatccagagtcatatctgttgtca

SEQ ID NO: 1132660 - DNA, 25 bp, Homo sapien
gggaggtgattccatccagagtcat

SEQ ID NO: 1132661 - DNA, 25 bp, Homo sapien
tccagagtcatatctgttgtcaccc

SEQ ID NO: 1132662 - DNA, 25 bp, Homo sapien
ggtgattccatccagagtcatatct

SEQ ID NO: 1132663 - DNA, 25 bp, Homo sapien
tcacgtccggtattcccaaggactc

SEQ ID NO: 1132664 - DNA, 25 bp, Homo sapien
ctataaaagaagatcacgtccggta

SEQ ID NO: 1132665 - DNA, 25 bp, Homo sapien
aaggactccaggtggaaaagttcag

SEQ ID NO: 1132666 - DNA, 25 bp, Homo sapien
aagaagatcacgtccggtattccca

SEQ ID NO: 1132667 - DNA, 25 bp, Homo sapien
tgtggactgcacctgacgcggatgg

SEQ ID NO: 1132668 - DNA, 25 bp, Homo sapien
ggactgcacctgacgcggatggtgg

SEQ ID NO: 1132669 - DNA, 25 bp, Homo sapien
ctgcaggactgggtcacatcattgg

SEQ ID NO: 1132670 - DNA, 25 bp, Homo sapien
actgcaggactgggtcacatcattg

SEQ ID NO: 1132671 - DNA, 25 bp, Homo sapien
acagctgctgacgatagcatggtag

SEQ ID NO: 1132672 - DNA, 25 bp, Homo sapien
gagcagagcgggcaagcagccgcgc

SEQ ID NO: 1132673 - DNA, 25 bp, Homo sapien
gacgatagcatggtagtcagccact

SEQ ID NO: 1132674 - DNA, 25 bp, Homo sapien
gcatggtagtcagccactgagcaga

SEQ ID NO: 1132675 - DNA, 25 bp, Homo sapien
cagagcatagcttgggttctcgcca

SEQ ID NO: 1132676 - DNA, 25 bp, Homo sapien
tctctgctcaggcagagaaatgcca

SEQ ID NO: 1132677 - DNA, 25 bp, Homo sapien
ggttctcgccacacgtaagtagtct

SEQ ID NO: 1132678 - DNA, 25 bp, Homo sapien
ccaaaagtagcaggtcaagacggtg

SEQ ID NO: 1132679 - DNA, 25 bp, Homo sapien
ctgatcaataatccaaccctgtcca

SEQ ID NO: 1132680 - DNA, 25 bp, Homo sapien
gatcaataatccaaccctgtccatc

SEQ ID NO: 1132681 - DNA, 25 bp, Homo sapien
tattctccctgatcaataatccaac

SEQ ID NO: 1132682 - DNA, 25 bp, Homo sapien
tccctgatcaataatccaaccctgt

SEQ ID NO: 1132683 - DNA, 25 bp, Homo sapien
cagcttggagtacttgtactctagt

SEQ ID NO: 1132684 - DNA, 25 bp, Homo sapien
ccagcttggagtacttgtactctag

SEQ ID NO: 1132685 - DNA, 25 bp, Homo sapien
accagcttggagtacttgtactcta

SEQ ID NO: 1132686 - DNA, 25 bp, Homo sapien
caccagcttggagtacttgtactct

SEQ ID NO: 1132687 - DNA, 25 bp, Homo sapien
gatcttcccaaagagtgacttcttg

SEQ ID NO: 1132688 - DNA, 25 bp, Homo sapien
gatgaggtcgtcctctacatcctcg

SEQ ID NO: 1132689 - DNA, 25 bp, Homo sapien
tgacttcttgctggtaaagatgagg

SEQ ID NO: 1132690 - DNA, 25 bp, Homo sapien
gcgcagctgtcagctgctggcaggt

SEQ ID NO: 1132691 - DNA, 25 bp, Homo sapien
cagaattgctcagtggggaacagct

SEQ ID NO: 1132692 - DNA, 25 bp, Homo sapien
agactgaactatgattcagctccca

SEQ ID NO: 1132693 - DNA, 25 bp, Homo sapien
cagctcagaattgctcagtggggaa

SEQ ID NO: 1132694 - DNA, 25 bp, Homo sapien
agctgagactgaactatgattcagc

SEQ ID NO: 1132695 - DNA, 25 bp, Homo sapien
ctgcacaggggcaagtttggggaca

SEQ ID NO: 1132696 - DNA, 25 bp, Homo sapien
cagaaggaacccttatgaaattcct

SEQ ID NO: 1132697 - DNA, 25 bp, Homo sapien
agaaggaacccttatgaaattcctg

SEQ ID NO: 1132698 - DNA, 25 bp, Homo sapien
ggcaagtttggggacaaaggagaga

SEQ ID NO: 1132699 - DNA, 25 bp, Homo sapien
ctgaaagagagatggtgacaggagc

SEQ ID NO: 1132700 - DNA, 25 bp, Homo sapien
gagagatggtgacaggagctggctg

SEQ ID NO: 1132701 - DNA, 25 bp, Homo sapien
tgaaagagagatggtgacaggagct

SEQ ID NO: 1132702 - DNA, 25 bp, Homo sapien
aagagagatggtgacaggagctggc

SEQ ID NO: 1132703 - DNA, 25 bp, Homo sapien
aggtccatgtctaggcctcctgagg

SEQ ID NO: 1132704 - DNA, 25 bp, Homo sapien
tgtcttcagcggcactgagtcaaat

SEQ ID NO: 1132705 - DNA, 25 bp, Homo sapien
ggtccatgtctaggcctcctgagga

SEQ ID NO: 1132706 - DNA, 25 bp, Homo sapien
cttcagcggcactgagtcaaatcca

SEQ ID NO: 1132707 - DNA, 25 bp, Homo sapien
aggcaggtgaggcaggcagtgcctc

SEQ ID NO: 1132708 - DNA, 25 bp, Homo sapien
gaggaggcaggtgaggcaggcagtg

SEQ ID NO: 1132709 - DNA, 25 bp, Homo sapien
ctatgcaaggtgaggaggcaggtga

SEQ ID NO: 1132710 - DNA, 25 bp, Homo sapien
ggaggcaggtgaggcaggcagtgcc

SEQ ID NO: 1132711 - DNA, 25 bp, Homo sapien
agtgggtgttgcaggatgctggcac

SEQ ID NO: 1132712 - DNA, 25 bp, Homo sapien
ggtgttgcaggatgctggcacccaa

SEQ ID NO: 1132713 - DNA, 25 bp, Homo sapien
tggcacccaaatcgccgcaggcttg

SEQ ID NO: 1132714 - DNA, 25 bp, Homo sapien
caaatcgccgcaggcttgcaaaggt

SEQ ID NO: 1132715 - DNA, 25 bp, Homo sapien
tgggtactctataaaaaaagatctg

SEQ ID NO: 1132716 - DNA, 25 bp, Homo sapien
ttggcaggtttgaggcaagcagaaa

SEQ ID NO: 1132717 - DNA, 25 bp, Homo sapien
caaagtgtgggtatatttggcaggt

SEQ ID NO: 1132718 - DNA, 25 bp, Homo sapien
tacaaacaaagtgtgggtatatttg

SEQ ID NO: 1132719 - DNA, 25 bp, Homo sapien
gatagtgatggaggcagaactgcca

SEQ ID NO: 1132720 - DNA, 25 bp, Homo sapien
aatatggcccaaacttctaggacgg

SEQ ID NO: 1132721 - DNA, 25 bp, Homo sapien
ggcacaggcacaaatcatgggcaat

SEQ ID NO: 1132722 - DNA, 25 bp, Homo sapien
tgagggcatgcgaggaaaactccca

SEQ ID NO: 1132723 - DNA, 25 bp, Homo sapien
aaactattaacgcttggattacagg

SEQ ID NO: 1132724 - DNA, 25 bp, Homo sapien
tctaccaacaacagcttggacagac

SEQ ID NO: 1132725 - DNA, 25 bp, Homo sapien
tgcatgttccaggactcaaggtaac

SEQ ID NO: 1132726 - DNA, 25 bp, Homo sapien
ggaaatccaaccagccctgatgaaa

SEQ ID NO: 1132727 - DNA, 25 bp, Homo sapien
gcttccaggacacttacatttccca

SEQ ID NO: 1132728 - DNA, 25 bp, Homo sapien
tgactgattcctcaacaagtagtgg

SEQ ID NO: 1132729 - DNA, 25 bp, Homo sapien
gcttctagcctatgtccatcttgtt

SEQ ID NO: 1132730 - DNA, 25 bp, Homo sapien
tctctgcctctctgcgaatgtggaa

SEQ ID NO: 1132731 - DNA, 25 bp, Homo sapien
ccgggccaacgctcagggaagcaag

SEQ ID NO: 1132732 - DNA, 25 bp, Homo sapien
tcctcccgggccaacgctcagggaa

SEQ ID NO: 1132733 - DNA, 25 bp, Homo sapien
cactcagcctgtgaccgccgcactg

SEQ ID NO: 1132734 - DNA, 25 bp, Homo sapien
ggaagcaaggatcgcgccgcagcac

SEQ ID NO: 1132735 - DNA, 25 bp, Homo sapien
agtcccgggtccttgaagcgcttct

SEQ ID NO: 1132736 - DNA, 25 bp, Homo sapien
tttatccacccgaaacaaatccaga

SEQ ID NO: 1132737 - DNA, 25 bp, Homo sapien
agctggtccactagtcccgggtcct

SEQ ID NO: 1132738 - DNA, 25 bp, Homo sapien
tcctgcgtctctcggatgagggctg

SEQ ID NO: 1132739 - DNA, 25 bp, Homo sapien
cgaaatgcttccgataccgaaggaa

SEQ ID NO: 1132740 - DNA, 25 bp, Homo sapien
gatggccttccgaaaagcttcaggg

SEQ ID NO: 1132741 - DNA, 25 bp, Homo sapien
tattcggcttcatgatagatgcccg

SEQ ID NO: 1132742 - DNA, 25 bp, Homo sapien
cgatatgactccaagatccggcagt

SEQ ID NO: 1132743 - DNA, 25 bp, Homo sapien
tcacaagtacttgacagcatccgcc

SEQ ID NO: 1132744 - DNA, 25 bp, Homo sapien
tgcagtgtactgtcatcgacctagc

SEQ ID NO: 1132745 - DNA, 25 bp, Homo sapien
gacctagctcccagatggttgcaga

SEQ ID NO: 1132746 - DNA, 25 bp, Homo sapien
actcttggatagtggctgcctttgc

SEQ ID NO: 1132747 - DNA, 25 bp, Homo sapien
gggacaaatccctcagatgtggaca

SEQ ID NO: 1132748 - DNA, 25 bp, Homo sapien
gattcagtagaacagtgctcaggct

SEQ ID NO: 1132749 - DNA, 25 bp, Homo sapien
gctatgtgtcctcaattagggagca

SEQ ID NO: 1132750 - DNA, 25 bp, Homo sapien
taaatctgccagtgtctaccttggg

SEQ ID NO: 1132751 - DNA, 25 bp, Homo sapien
tgcttaaactttatgatcaatagta

SEQ ID NO: 1132752 - DNA, 25 bp, Homo sapien
gactatcgccaacttataatgctta

SEQ ID NO: 1132753 - DNA, 25 bp, Homo sapien
taacaattacagactatcgccaact

SEQ ID NO: 1132754 - DNA, 25 bp, Homo sapien
caaattaacaattacagactatcgc

SEQ ID NO: 1132755 - DNA, 25 bp, Homo sapien
gatgaatcttacagacataatcttg

SEQ ID NO: 1132756 - DNA, 25 bp, Homo sapien
gaaagaagccatatgcaaaagtata

SEQ ID NO: 1132757 - DNA, 25 bp, Homo sapien
aaaagagtctctagaagcttattca

SEQ ID NO: 1132758 - DNA, 25 bp, Homo sapien
gaaccaactactgctacatgttaat

SEQ ID NO: 1132759 - DNA, 25 bp, Homo sapien
ccactgcattccagcctggtaacag

SEQ ID NO: 1132760 - DNA, 25 bp, Homo sapien
actgcattccagcctggtaacagaa

SEQ ID NO: 1132761 - DNA, 25 bp, Homo sapien
tgcattccagcctggtaacagaatg

SEQ ID NO: 1132762 - DNA, 25 bp, Homo sapien
gcattccagcctggtaacagaatga

SEQ ID NO: 1132763 - DNA, 25 bp, Homo sapien
tctgcctcatgaagttataaaatct

SEQ ID NO: 1132764 - DNA, 25 bp, Homo sapien
gatactcctttctcctgatcttgac

SEQ ID NO: 1132765 - DNA, 25 bp, Homo sapien
tactgatttcaggttaaggcccaaa

SEQ ID NO: 1132766 - DNA, 25 bp, Homo sapien
caaatgccggcagagctgaaggatc

SEQ ID NO: 1132767 - DNA, 25 bp, Homo sapien
cattttctctccgattgtcttgctg

SEQ ID NO: 1132768 - DNA, 25 bp, Homo sapien
tttctctccgattgtcttgctgcat

SEQ ID NO: 1132769 - DNA, 25 bp, Homo sapien
ttcagcttgttcaagttgtctgccc

SEQ ID NO: 1132770 - DNA, 25 bp, Homo sapien
tcttgctgcataggttcttcagctt

SEQ ID NO: 1132771 - DNA, 25 bp, Homo sapien
gacacataacgtagcaagatttgaa

SEQ ID NO: 1132772 - DNA, 25 bp, Homo sapien
tatggagcataactacgctgagacg

SEQ ID NO: 1132773 - DNA, 25 bp, Homo sapien
ccataaccattgcttggcgtttaaa

SEQ ID NO: 1132774 - DNA, 25 bp, Homo sapien
aatatctccgctcaagttctcatgg

SEQ ID NO: 1132775 - DNA, 25 bp, Homo sapien
tcagcacattctctgggacagactc

SEQ ID NO: 1132776 - DNA, 25 bp, Homo sapien
aagcgtctgcagtaaggtcatcgaa

SEQ ID NO: 1132777 - DNA, 25 bp, Homo sapien
agctaaagcgtctgcagtaaggtca

SEQ ID NO: 1132778 - DNA, 25 bp, Homo sapien
ggtcatcgaaactcagcacattctc

SEQ ID NO: 1132779 - DNA, 25 bp, Homo sapien
tcatcgttactgatgggtacagaag

SEQ ID NO: 1132780 - DNA, 25 bp, Homo sapien
gctccgcgtcacacttcaggatggc

SEQ ID NO: 1132781 - DNA, 25 bp, Homo sapien
gcttcatcaatgaggagtcggactt

SEQ ID NO: 1132782 - DNA, 25 bp, Homo sapien
caatctctcggaggttctcaaaccg

SEQ ID NO: 1132783 - DNA, 25 bp, Homo sapien
tcattggtcccagggccacatgagg

SEQ ID NO: 1132784 - DNA, 25 bp, Homo sapien
ccccagcctgcagtgagtttaatgt

SEQ ID NO: 1132785 - DNA, 25 bp, Homo sapien
tccagagtcgtctcgtggtctgtgc

SEQ ID NO: 1132786 - DNA, 25 bp, Homo sapien
cacatgagggcggactcagggccct

SEQ ID NO: 1132787 - DNA, 25 bp, Homo sapien
tgactgtacaatcaccccaaatcct

SEQ ID NO: 1132788 - DNA, 25 bp, Homo sapien
ttcaagaagtaccctcgactcccag

SEQ ID NO: 1132789 - DNA, 25 bp, Homo sapien
gagagtacttcttcctgactgtaca

SEQ ID NO: 1132790 - DNA, 25 bp, Homo sapien
aagccatctaccatcaccaccaggt

SEQ ID NO: 1132791 - DNA, 25 bp, Homo sapien
gccaagagaacaggactaccgaggg

SEQ ID NO: 1132792 - DNA, 25 bp, Homo sapien
gaactgacacctaaaggcacctggg

SEQ ID NO: 1132793 - DNA, 25 bp, Homo sapien
tctacggaatcctgataagccctct

SEQ ID NO: 1132794 - DNA, 25 bp, Homo sapien
tcatccaggcacaccgttaagagaa

SEQ ID NO: 1132795 - DNA, 25 bp, Homo sapien
ttcccaaggtgcgaagggcatactg

SEQ ID NO: 1132796 - DNA, 25 bp, Homo sapien
ggtataaatgggaatgtagccccga

SEQ ID NO: 1132797 - DNA, 25 bp, Homo sapien
aatgtagccccgacttcccaaggtg

SEQ ID NO: 1132798 - DNA, 25 bp, Homo sapien
cgaagggcatactggatgagagcct

SEQ ID NO: 1132799 - DNA, 25 bp, Homo sapien
aagatgccacgggtgtcacggccat

SEQ ID NO: 1132800 - DNA, 25 bp, Homo sapien
ggtagacaggccagcatacttgatg

SEQ ID NO: 1132801 - DNA, 25 bp, Homo sapien
gcaatcaggtacttctcatcatagg

SEQ ID NO: 1132802 - DNA, 25 bp, Homo sapien
ctcaaactgatggactcggaagatg

SEQ ID NO: 1132803 - DNA, 25 bp, Homo sapien
caaatgcttatggtgcgagcttccc

SEQ ID NO: 1132804 - DNA, 25 bp, Homo sapien
ctggtgagtggtaaagccgcagcct

SEQ ID NO: 1132805 - DNA, 25 bp, Homo sapien
ggactggaccacaagagcaaatgct

SEQ ID NO: 1132806 - DNA, 25 bp, Homo sapien
catatagtgactgggataatcctca

SEQ ID NO: 1132807 - DNA, 25 bp, Homo sapien
tagaactcctctgcggtggtaatca

SEQ ID NO: 1132808 - DNA, 25 bp, Homo sapien
caatgtggtaaggaatccccaggga

SEQ ID NO: 1132809 - DNA, 25 bp, Homo sapien
tcctctgcggtggtaatcatctctt

SEQ ID NO: 1132810 - DNA, 25 bp, Homo sapien
gcggtggtaatcatctcttcaaaca

SEQ ID NO: 1132811 - DNA, 25 bp, Homo sapien
ttctttaattcatgtcctgtctcca

SEQ ID NO: 1132812 - DNA, 25 bp, Homo sapien
aattgtgagctgtttctctgtgtgg

SEQ ID NO: 1132813 - DNA, 25 bp, Homo sapien
cctttagcaagcctgaagaattctt

SEQ ID NO: 1132814 - DNA, 25 bp, Homo sapien
taacaccaaatactcccaagtgaga

SEQ ID NO: 1132815 - DNA, 25 bp, Homo sapien
ggaaggctcctgagcccggaaacca

SEQ ID NO: 1132816 - DNA, 25 bp, Homo sapien
gaacaggagaccaactcacggaagg

SEQ ID NO: 1132817 - DNA, 25 bp, Homo sapien
catatcggattcgaagccggcgagc

SEQ ID NO: 1132818 - DNA, 25 bp, Homo sapien
ccggcgagcctggtaatccgtgcaa

SEQ ID NO: 1132819 - DNA, 25 bp, Homo sapien
cagtgcaccccaaaggctgagaaat

SEQ ID NO: 1132820 - DNA, 25 bp, Homo sapien
tgagaaataattcggacgggccgtg

SEQ ID NO: 1132821 - DNA, 25 bp, Homo sapien
tcagtcctgactcagtagaaggcat

SEQ ID NO: 1132822 - DNA, 25 bp, Homo sapien
tctagctaaaagaactcagtcctga

SEQ ID NO: 1132823 - DNA, 25 bp, Homo sapien
ctccaacttgttctgtgtagataaa

SEQ ID NO: 1132824 - DNA, 25 bp, Homo sapien
aacccagaccttcttgggtgagaag

SEQ ID NO: 1132825 - DNA, 25 bp, Homo sapien
aagagggaagcctccaacttgttct

SEQ ID NO: 1132826 - DNA, 25 bp, Homo sapien
ctgtgtagataaatggagattattc

SEQ ID NO: 1132827 - DNA, 25 bp, Homo sapien
catcgggtcttactgacggccagga

SEQ ID NO: 1132828 - DNA, 25 bp, Homo sapien
gacttggaaaagagtagggcctgaa

SEQ ID NO: 1132829 - DNA, 25 bp, Homo sapien
gaaggaagaaactactattgtggcc

SEQ ID NO: 1132830 - DNA, 25 bp, Homo sapien
aagtcgggctcaactctcatcgggt

SEQ ID NO: 1132831 - DNA, 25 bp, Homo sapien
gcattgagcatatggacaaactcca

SEQ ID NO: 1132832 - DNA, 25 bp, Homo sapien
gttctccaggatggcgcagatggta

SEQ ID NO: 1132833 - DNA, 25 bp, Homo sapien
cagatggtacgggtagtggcgcaca

SEQ ID NO: 1132834 - DNA, 25 bp, Homo sapien
ggcgcacatggtagcattgagcata

SEQ ID NO: 1132835 - DNA, 25 bp, Homo sapien
ctggcggcatgaactccttcaattt

SEQ ID NO: 1132836 - DNA, 25 bp, Homo sapien
ctttgatggctcctgctcaatgggc

SEQ ID NO: 1132837 - DNA, 25 bp, Homo sapien
cagcctgttttctagggtgacgtct

SEQ ID NO: 1132838 - DNA, 25 bp, Homo sapien
ctcaatgggcgcaggcttcacaaag

SEQ ID NO: 1132839 - DNA, 25 bp, Homo sapien
cacaaaggggatcagttcttgcagt

SEQ ID NO: 1132840 - DNA, 25 bp, Homo sapien
cccatgcgaggagacaggaacatct

SEQ ID NO: 1132841 - DNA, 25 bp, Homo sapien
ccctctcagctacgcagtcagatgg

SEQ ID NO: 1132842 - DNA, 25 bp, Homo sapien
tgaaagcctggcaaatagggaggca

SEQ ID NO: 1132843 - DNA, 25 bp, Homo sapien
gaacatctgtgtggtacatggcact

SEQ ID NO: 1132844 - DNA, 25 bp, Homo sapien
tattttaacctcctaggagagaggc

SEQ ID NO: 1132845 - DNA, 25 bp, Homo sapien
tatatcagggagaacctcagaggcg

SEQ ID NO: 1132846 - DNA, 25 bp, Homo sapien
tatgcagttggtctccccatgtggg

SEQ ID NO: 1132847 - DNA, 25 bp, Homo sapien
tggctgtaacgagagaaactgctgt

SEQ ID NO: 1132848 - DNA, 25 bp, Homo sapien
cctccatcaggccacgttgtctcat

SEQ ID NO: 1132849 - DNA, 25 bp, Homo sapien
tccatcaggccacgttgtctcatct

SEQ ID NO: 1132850 - DNA, 25 bp, Homo sapien
ccgacctccatcaggccacgttgtc

SEQ ID NO: 1132851 - DNA, 25 bp, Homo sapien
aggccacgttgtctcatctccctta

SEQ ID NO: 1132852 - DNA, 25 bp, Homo sapien
caggcagctgtagggacttctaaga

SEQ ID NO: 1132853 - DNA, 25 bp, Homo sapien
ttctaagacagagctaaggcagagc

SEQ ID NO: 1132854 - DNA, 25 bp, Homo sapien
tgaattacaaatgggagcagcttgc

SEQ ID NO: 1132855 - DNA, 25 bp, Homo sapien
caaaccaaatagttgaggccacagg

SEQ ID NO: 1132856 - DNA, 25 bp, Homo sapien
caccagtccctacacgggcaggagg

SEQ ID NO: 1132857 - DNA, 25 bp, Homo sapien
accagtccctacacgggcaggagga

SEQ ID NO: 1132858 - DNA, 25 bp, Homo sapien
caggagggtctctctgcacaaagca

SEQ ID NO: 1132859 - DNA, 25 bp, Homo sapien
caaggcaggagggtctctctgcaca

SEQ ID NO: 1132860 - DNA, 25 bp, Homo sapien
ccttatagttactttctgctaacaa

SEQ ID NO: 1132861 - DNA, 25 bp, Homo sapien
ttctggaagcatggggtcccttata

SEQ ID NO: 1132862 - DNA, 25 bp, Homo sapien
agcatggggtcccttatagttactt

SEQ ID NO: 1132863 - DNA, 25 bp, Homo sapien
cccttatagttactttctgctaaca

SEQ ID NO: 1132864 - DNA, 25 bp, Homo sapien
cctgtcccctcgtgcagttccctct

SEQ ID NO: 1132865 - DNA, 25 bp, Homo sapien
tcttcctgtcccctcgtgcagttcc

SEQ ID NO: 1132866 - DNA, 25 bp, Homo sapien
ttcttcctgtcccctcgtgcagttc

SEQ ID NO: 1132867 - DNA, 25 bp, Homo sapien
ttcctgtcccctcgtgcagttccct

SEQ ID NO: 1132868 - DNA, 25 bp, Homo sapien
tgttgacatcgactgaagagtccag

SEQ ID NO: 1132869 - DNA, 25 bp, Homo sapien
ccagttttcttattgaagtgccaca

SEQ ID NO: 1132870 - DNA, 25 bp, Homo sapien
tacctaatggtatccttcacagggt

SEQ ID NO: 1132871 - DNA, 25 bp, Homo sapien
tgcatttatctgattaaaggatacc

SEQ ID NO: 1132872 - DNA, 25 bp, Homo sapien
atttgagagggtgtgcaggattcca

SEQ ID NO: 1132873 - DNA, 25 bp, Homo sapien
gtgtgcaggattccaggggttctcc

SEQ ID NO: 1132874 - DNA, 25 bp, Homo sapien
aggagccgtgcaggcgacccagaaa

SEQ ID NO: 1132875 - DNA, 25 bp, Homo sapien
ccagacatgaagctggaccacacgg

SEQ ID NO: 1132876 - DNA, 25 bp, Homo sapien
gaagtaccctaagtatgcctagagg

SEQ ID NO: 1132877 - DNA, 25 bp, Homo sapien
cagatgcccggtgcgaattagcgat

SEQ ID NO: 1132878 - DNA, 25 bp, Homo sapien
aagggccctgagcaacacaacaaag

SEQ ID NO: 1132879 - DNA, 25 bp, Homo sapien
cagcctcatgttggacaccacttgg

SEQ ID NO: 1132880 - DNA, 25 bp, Homo sapien
tcgcggcggcggctcattaccatag

SEQ ID NO: 1132881 - DNA, 25 bp, Homo sapien
cggctgctgcctgtcgccgcggccc

SEQ ID NO: 1132882 - DNA, 25 bp, Homo sapien
ggcgagctctgcagagtcgcggcgg

SEQ ID NO: 1132883 - DNA, 25 bp, Homo sapien
gctcattaccatagacctgctcgcg

SEQ ID NO: 1132884 - DNA, 25 bp, Homo sapien
gccgggtcaacggcggcggcggctc

SEQ ID NO: 1132885 - DNA, 25 bp, Homo sapien
cagctcccggccggcggccgggtca

SEQ ID NO: 1132886 - DNA, 25 bp, Homo sapien
gcggcggcggctcctcctccggctc

SEQ ID NO: 1132887 - DNA, 25 bp, Homo sapien
ctctcccagctcccggccggcggcc

SEQ ID NO: 1132888 - DNA, 25 bp, Homo sapien
tggtctcccaatagtggcggcggca

SEQ ID NO: 1132889 - DNA, 25 bp, Homo sapien
gtctcccaatagtggcggcggcagc

SEQ ID NO: 1132890 - DNA, 25 bp, Homo sapien
cacttggtctcccaatagtggcggc

SEQ ID NO: 1132891 - DNA, 25 bp, Homo sapien
gaagagcctcgtcccctggacccca

SEQ ID NO: 1132892 - DNA, 25 bp, Homo sapien
ctgaggatggacagagccagcccat

SEQ ID NO: 1132893 - DNA, 25 bp, Homo sapien
catgatgctatagtgcaccacggca

SEQ ID NO: 1132894 - DNA, 25 bp, Homo sapien
tggatgaccaggacgtactcaggcc

SEQ ID NO: 1132895 - DNA, 25 bp, Homo sapien
ccttggaaggtgtagaagaccctgc

SEQ ID NO: 1132896 - DNA, 25 bp, Homo sapien
cagcaggcggtacagaatattggca

SEQ ID NO: 1132897 - DNA, 25 bp, Homo sapien
gaccatggacaggagctgctgcgtg

SEQ ID NO: 1132898 - DNA, 25 bp, Homo sapien
ttcccctggcagatgtgccagcgga

SEQ ID NO: 1132899 - DNA, 25 bp, Homo sapien
tgccaggtcccggtcagcctcccag

SEQ ID NO: 1132900 - DNA, 25 bp, Homo sapien
cctggcagatgtgccagcggagact

SEQ ID NO: 1132901 - DNA, 25 bp, Homo sapien
gccatcgtcttaggccccgcctggg

SEQ ID NO: 1132902 - DNA, 25 bp, Homo sapien
gccatggagcgggagaaactttgcc

SEQ ID NO: 1132903 - DNA, 25 bp, Homo sapien
gggaacaaacacttctccctgtgtc

SEQ ID NO: 1132904 - DNA, 25 bp, Homo sapien
cgggagaaactttgccacccctcag

SEQ ID NO: 1132905 - DNA, 25 bp, Homo sapien
cttgacgggatattccctccaggca

SEQ ID NO: 1132906 - DNA, 25 bp, Homo sapien
agaaagcagcccaagactccacaca

SEQ ID NO: 1132907 - DNA, 25 bp, Homo sapien
ttgacgggatattccctccaggcag

SEQ ID NO: 1132908 - DNA, 25 bp, Homo sapien
ggcagaaagcagcccaagactccac

SEQ ID NO: 1132909 - DNA, 25 bp, Homo sapien
tatacctggtatatctgcctaatga

SEQ ID NO: 1132910 - DNA, 25 bp, Homo sapien
aggaagcctgcccagatttatgtca

SEQ ID NO: 1132911 - DNA, 25 bp, Homo sapien
gtttcagacttccccgcaccaggat

SEQ ID NO: 1132912 - DNA, 25 bp, Homo sapien
agctggcacagagctcttgtatacc

SEQ ID NO: 1132913 - DNA, 25 bp, Homo sapien
tgtacgttgaagaccaccacgtggt

SEQ ID NO: 1132914 - DNA, 25 bp, Homo sapien
tgctgtgggtgagcatctcatcggt

SEQ ID NO: 1132915 - DNA, 25 bp, Homo sapien
ggaagcgctcgggtgacatgtcctc

SEQ ID NO: 1132916 - DNA, 25 bp, Homo sapien
acatgtcctccaggcgcagcgtgat

SEQ ID NO: 1132917 - DNA, 25 bp, Homo sapien
tcagagggcaggaagggcggcccgc

SEQ ID NO: 1132918 - DNA, 25 bp, Homo sapien
ctcagagggcaggaagggcggcccg

SEQ ID NO: 1132919 - DNA, 25 bp, Homo sapien
cagagggcaggaagggcggcccgcc

SEQ ID NO: 1132920 - DNA, 25 bp, Homo sapien
ggtctcgcagtagtcacccgtgaag

SEQ ID NO: 1132921 - DNA, 25 bp, Homo sapien
acacgcagcgcatgtagttctcgca

SEQ ID NO: 1132922 - DNA, 25 bp, Homo sapien
agaggtccacctcggtctcgcagta

SEQ ID NO: 1132923 - DNA, 25 bp, Homo sapien
catcacgacagaggcaggtgtagcc

SEQ ID NO: 1132924 - DNA, 25 bp, Homo sapien
ctcacaaccaacttatgacctaagt

SEQ ID NO: 1132925 - DNA, 25 bp, Homo sapien
cacacagctactagcggcaaagctg

SEQ ID NO: 1132926 - DNA, 25 bp, Homo sapien
caaagctgatacacgaacacaggcc

SEQ ID NO: 1132927 - DNA, 25 bp, Homo sapien
tatgacctaagtacggtcattatct

SEQ ID NO: 1132928 - DNA, 25 bp, Homo sapien
acatgctgagagtgggaaactgagc

SEQ ID NO: 1132929 - DNA, 25 bp, Homo sapien
ctgggacatgctgagagtgggaaac

SEQ ID NO: 1132930 - DNA, 25 bp, Homo sapien
catgctgagagtgggaaactgagcc

SEQ ID NO: 1132931 - DNA, 25 bp, Homo sapien
ggacatgctgagagtgggaaactga

SEQ ID NO: 1132932 - DNA, 25 bp, Homo sapien
ttgagccctgcggtccagactaagg

SEQ ID NO: 1132933 - DNA, 25 bp, Homo sapien
gccctgcggtccagactaaggacct

SEQ ID NO: 1132934 - DNA, 25 bp, Homo sapien
tgcggtccagactaaggacctctgt

SEQ ID NO: 1132935 - DNA, 25 bp, Homo sapien
gagccctgcggtccagactaaggac

SEQ ID NO: 1132936 - DNA, 25 bp, Homo sapien
ggtttcataagcacaggcctgctgg

SEQ ID NO: 1132937 - DNA, 25 bp, Homo sapien
gatcccgggagccttcgatgtcaca

SEQ ID NO: 1132938 - DNA, 25 bp, Homo sapien
gacacttggttgtaaggcccggatc

SEQ ID NO: 1132939 - DNA, 25 bp, Homo sapien
tgcaagttcctcggagtccccagca

SEQ ID NO: 1132940 - DNA, 25 bp, Homo sapien
caagaggaaaggcaggtgagtacca

SEQ ID NO: 1132941 - DNA, 25 bp, Homo sapien
ctggacaagaggaaaggcaggtgag

SEQ ID NO: 1132942 - DNA, 25 bp, Homo sapien
ggaaaggcaggtgagtaccaagtac

SEQ ID NO: 1132943 - DNA, 25 bp, Homo sapien
aggaaaggcaggtgagtaccaagta

SEQ ID NO: 1132944 - DNA, 25 bp, Homo sapien
ggcgcaggccgcgaaaggtgatgaa

SEQ ID NO: 1132945 - DNA, 25 bp, Homo sapien
cagggtgaagtggaaacgctggcgc

SEQ ID NO: 1132946 - DNA, 25 bp, Homo sapien
gatgggcaatcgcacttgaaaccgc

SEQ ID NO: 1132947 - DNA, 25 bp, Homo sapien
agctgcgcgtggtcacctggcagta

SEQ ID NO: 1132948 - DNA, 25 bp, Homo sapien
cagggaatggggtacccacctggat

SEQ ID NO: 1132949 - DNA, 25 bp, Homo sapien
gcagggaatggggtacccacctgga

SEQ ID NO: 1132950 - DNA, 25 bp, Homo sapien
attgtacaacagcaacccgtcgcgc

SEQ ID NO: 1132951 - DNA, 25 bp, Homo sapien
gcttctcattgaaacgcccattgta

SEQ ID NO: 1132952 - DNA, 25 bp, Homo sapien
cctcgagggccacaaagtcatgctt

SEQ ID NO: 1132953 - DNA, 25 bp, Homo sapien
acctgctcctggatcacctcgaggg

SEQ ID NO: 1132954 - DNA, 25 bp, Homo sapien
agctgcaccgtatgccactggccat

SEQ ID NO: 1132955 - DNA, 25 bp, Homo sapien
atcactgactcctccgggcacgaat

SEQ ID NO: 1132956 - DNA, 25 bp, Homo sapien
cttattgtagtatttcagctgcacc

SEQ ID NO: 1132957 - DNA, 25 bp, Homo sapien
ctccgggcacgaatggggacaccgt

SEQ ID NO: 1132958 - DNA, 25 bp, Homo sapien
caggacagatccgaagcgcaaggcc

SEQ ID NO: 1132959 - DNA, 25 bp, Homo sapien
tgggagccctgtctgacccaacagt

SEQ ID NO: 1132960 - DNA, 25 bp, Homo sapien
agcgcaaggccactcctgtgtcaca

SEQ ID NO: 1132961 - DNA, 25 bp, Homo sapien
ggagccctgtctgacccaacagtgg

SEQ ID NO: 1132962 - DNA, 25 bp, Homo sapien
tgtccacctgcaggttccgcatgca

SEQ ID NO: 1132963 - DNA, 25 bp, Homo sapien
caggcacggtgccattgttggcaat

SEQ ID NO: 1132964 - DNA, 25 bp, Homo sapien
gccatgtctatgtgccggctgtcca

SEQ ID NO: 1132965 - DNA, 25 bp, Homo sapien
attcggactgggaagctctcgggca

SEQ ID NO: 1132966 - DNA, 25 bp, Homo sapien
gttcacgcaagtgcccccattgtgg

SEQ ID NO: 1132967 - DNA, 25 bp, Homo sapien
gaacgcgtcccactggttcacgcaa

SEQ ID NO: 1132968 - DNA, 25 bp, Homo sapien
tgctgtcacacacgttcttcttggc

SEQ ID NO: 1132969 - DNA, 25 bp, Homo sapien
cacacgttcttcttggcagggcagc

SEQ ID NO: 1132970 - DNA, 25 bp, Homo sapien
tcggcctggcgcgtgcggaacatga

SEQ ID NO: 1132971 - DNA, 25 bp, Homo sapien
ctgcagcaggacaccgtcggcctgg

SEQ ID NO: 1132972 - DNA, 25 bp, Homo sapien
tgcggaacatgaggctgaggtacca

SEQ ID NO: 1132973 - DNA, 25 bp, Homo sapien
gctgaggtaccagggttgggagatg

SEQ ID NO: 1132974 - DNA, 25 bp, Homo sapien
cctccacgctcagcatcacgtggcc

SEQ ID NO: 1132975 - DNA, 25 bp, Homo sapien
ctccacgctcagcatcacgtggccc

SEQ ID NO: 1132976 - DNA, 25 bp, Homo sapien
gccctccacgctcagcatcacgtgg

SEQ ID NO: 1132977 - DNA, 25 bp, Homo sapien
tccacgctcagcatcacgtggccct

SEQ ID NO: 1132978 - DNA, 25 bp, Homo sapien
cgggccccccgctggctcccagtgc

SEQ ID NO: 1132979 - DNA, 25 bp, Homo sapien
tgccagctgtgcatggtgccagtca

SEQ ID NO: 1132980 - DNA, 25 bp, Homo sapien
cccgctggctcccagtgccagctgt

SEQ ID NO: 1132981 - DNA, 25 bp, Homo sapien
aatggcatggccgggccccccgctg

SEQ ID NO: 1132982 - DNA, 25 bp, Homo sapien
tggcccaggtattccgcccactgtt

SEQ ID NO: 1132983 - DNA, 25 bp, Homo sapien
tgcaaacagccccgaaagccacggg

SEQ ID NO: 1132984 - DNA, 25 bp, Homo sapien
tctgctgcccataatcgaaggacag

SEQ ID NO: 1132985 - DNA, 25 bp, Homo sapien
ttccgcccactgttatgttgctcag

SEQ ID NO: 1132986 - DNA, 25 bp, Homo sapien
atggctgggatccaggctgttaacc

SEQ ID NO: 1132987 - DNA, 25 bp, Homo sapien
gacacgggtttgagtcacaagggtc

SEQ ID NO: 1132988 - DNA, 25 bp, Homo sapien
ttgctgcaatagctgttagcaggac

SEQ ID NO: 1132989 - DNA, 25 bp, Homo sapien
ggctgggatccaggctgttaacccc

SEQ ID NO: 1132990 - DNA, 25 bp, Homo sapien
ctggtgctcacacgggttcaggtca

SEQ ID NO: 1132991 - DNA, 25 bp, Homo sapien
gggacactcgcaggtatagccatgg

SEQ ID NO: 1132992 - DNA, 25 bp, Homo sapien
tggtctcacagtatggcccaaggta

SEQ ID NO: 1132993 - DNA, 25 bp, Homo sapien
gcgggtacacacagactggtgctca

SEQ ID NO: 1132994 - DNA, 25 bp, Homo sapien
cttgcagtggcactcgccgcttgtc

SEQ ID NO: 1132995 - DNA, 25 bp, Homo sapien
gcactcgccgcttgtcttgttgcag

SEQ ID NO: 1132996 - DNA, 25 bp, Homo sapien
tgcagtggcactcgccgcttgtctt

SEQ ID NO: 1132997 - DNA, 25 bp, Homo sapien
cacatgtgggatgtccccaccagcc

SEQ ID NO: 1132998 - DNA, 25 bp, Homo sapien
gacacctggcttgcatggacactgg

SEQ ID NO: 1132999 - DNA, 25 bp, Homo sapien
agcggtcacactgacgcccgatgac

SEQ ID NO: 1133000 - DNA, 25 bp, Homo sapien
caaaagggttgtcacagcggtcaca

SEQ ID NO: 1133001 - DNA, 25 bp, Homo sapien
ggtagcagtcacacaagaggcaggt

SEQ ID NO: 1133002 - DNA, 25 bp, Homo sapien
agcaggcagcccgaagcgggtacgg

SEQ ID NO: 1133003 - DNA, 25 bp, Homo sapien
gctcgtgggcagctgtcataattca

SEQ ID NO: 1133004 - DNA, 25 bp, Homo sapien
agcctttgggacagggagcagcagc

SEQ ID NO: 1133005 - DNA, 25 bp, Homo sapien
agatcccagcctcaatcgctcgtgg

SEQ ID NO: 1133006 - DNA, 25 bp, Homo sapien
aagatgtaggcacacctgggcaaca

SEQ ID NO: 1133007 - DNA, 25 bp, Homo sapien
tccccggatcttcagccaggagctt

SEQ ID NO: 1133008 - DNA, 25 bp, Homo sapien
tgccctcatcccactaacagcagag

SEQ ID NO: 1133009 - DNA, 25 bp, Homo sapien
gtccaagatgtaggcacacctgggc

SEQ ID NO: 1133010 - DNA, 25 bp, Homo sapien
gaagcccttcagttctgagaaggtg

SEQ ID NO: 1133011 - DNA, 25 bp, Homo sapien
gtgctcatcacagtggcgcacagca

SEQ ID NO: 1133012 - DNA, 25 bp, Homo sapien
gaaggtgatggacgtgcagttgaag

SEQ ID NO: 1133013 - DNA, 25 bp, Homo sapien
gctcatcacagtggcgcacagcagt

SEQ ID NO: 1133014 - DNA, 25 bp, Homo sapien
tgcacgtcctgtgtggcagacagcc

SEQ ID NO: 1133015 - DNA, 25 bp, Homo sapien
ctgggagcgccctgagtctaggcct

SEQ ID NO: 1133016 - DNA, 25 bp, Homo sapien
accttgacgtcgctgccgaagtagc

SEQ ID NO: 1133017 - DNA, 25 bp, Homo sapien
tgactcattccgctgtagccgctca

SEQ ID NO: 1133018 - DNA, 25 bp, Homo sapien
gcttaggtaggtgtgccgcatgttc

SEQ ID NO: 1133019 - DNA, 25 bp, Homo sapien
taggtgtgccgcatgttctgggcca

SEQ ID NO: 1133020 - DNA, 25 bp, Homo sapien
cagggcactggcgtaggcctcatag

SEQ ID NO: 1133021 - DNA, 25 bp, Homo sapien
ccagtgccgcttgttggctgtgtcc

SEQ ID NO: 1133022 - DNA, 25 bp, Homo sapien
gaagacagactcaggcagaatgact

SEQ ID NO: 1133023 - DNA, 25 bp, Homo sapien
agcttggccccagcaaagttccctt

SEQ ID NO: 1133024 - DNA, 25 bp, Homo sapien
tggccccagcaaagttccctttgtc

SEQ ID NO: 1133025 - DNA, 25 bp, Homo sapien
aatgactgttgtctcaaggtccggg

SEQ ID NO: 1133026 - DNA, 25 bp, Homo sapien
tggctcagctccgggtgccgtcgct

SEQ ID NO: 1133027 - DNA, 25 bp, Homo sapien
gcgcttgtcagggtcatagttatga

SEQ ID NO: 1133028 - DNA, 25 bp, Homo sapien
tcagggtcatagttatgaggcagta

SEQ ID NO: 1133029 - DNA, 25 bp, Homo sapien
gtagcccggccagggtgcggtagat

SEQ ID NO: 1133030 - DNA, 25 bp, Homo sapien
gaactgcaccgtgacgggtttgtcc

SEQ ID NO: 1133031 - DNA, 25 bp, Homo sapien
gattgaatggttccagaagacacag

SEQ ID NO: 1133032 - DNA, 25 bp, Homo sapien
cctcatcatcatggacgctgatgct

SEQ ID NO: 1133033 - DNA, 25 bp, Homo sapien
gaagacacagatgggcttggtccgc

SEQ ID NO: 1133034 - DNA, 25 bp, Homo sapien
cactggcagctgacgtggctctcat

SEQ ID NO: 1133035 - DNA, 25 bp, Homo sapien
tcgtcatgtggttgcactggcagct

SEQ ID NO: 1133036 - DNA, 25 bp, Homo sapien
tcattgcggaagacgacttcacagc

SEQ ID NO: 1133037 - DNA, 25 bp, Homo sapien
agcgaagctcgtcatgtggttgcac

SEQ ID NO: 1133038 - DNA, 25 bp, Homo sapien
ctcccgccgagaaacgtccatgagc

SEQ ID NO: 1133039 - DNA, 25 bp, Homo sapien
tcccgccgagaaacgtccatgagca

SEQ ID NO: 1133040 - DNA, 25 bp, Homo sapien
cccgccgagaaacgtccatgagcac

SEQ ID NO: 1133041 - DNA, 25 bp, Homo sapien
tctgcagctgcccctgtgggcccga

SEQ ID NO: 1133042 - DNA, 25 bp, Homo sapien
ctgcagctgcccctgtgggcccgac

SEQ ID NO: 1133043 - DNA, 25 bp, Homo sapien
ggctctgcagctgcccctgtgggcc

SEQ ID NO: 1133044 - DNA, 25 bp, Homo sapien
ccacggctctgcagctgcccctgtg

SEQ ID NO: 1133045 - DNA, 25 bp, Homo sapien
tcttcagtggcaggatctccccatt

SEQ ID NO: 1133046 - DNA, 25 bp, Homo sapien
atgtcagtgtcttcagtggcaggat

SEQ ID NO: 1133047 - DNA, 25 bp, Homo sapien
acgtatgtcagtgtcttcagtggca

SEQ ID NO: 1133048 - DNA, 25 bp, Homo sapien
tatgtcagtgtcttcagtggcagga

SEQ ID NO: 1133049 - DNA, 25 bp, Homo sapien
gaagaaggtgagcagaagggcagcc

SEQ ID NO: 1133050 - DNA, 25 bp, Homo sapien
agcagaagggcagccaaggtgacac

SEQ ID NO: 1133051 - DNA, 25 bp, Homo sapien
ggcagccaaggtgacacctagagcc

SEQ ID NO: 1133052 - DNA, 25 bp, Homo sapien
gaagggcagccaaggtgacacctag

SEQ ID NO: 1133053 - DNA, 25 bp, Homo sapien
tgtcaggttacgtcggatgccgtgt

SEQ ID NO: 1133054 - DNA, 25 bp, Homo sapien
cggatgccgtgttggttggagcgca

SEQ ID NO: 1133055 - DNA, 25 bp, Homo sapien
tggagcgcaggatacgcaagagagt

SEQ ID NO: 1133056 - DNA, 25 bp, Homo sapien
agggcagctgtcaggttacgtcgga

SEQ ID NO: 1133057 - DNA, 25 bp, Homo sapien
tgctgcactaggcaccttattagag

SEQ ID NO: 1133058 - DNA, 25 bp, Homo sapien
gctctgcttcgggtcaggcatggag

SEQ ID NO: 1133059 - DNA, 25 bp, Homo sapien
cttattagagttcatggtgcaggag

SEQ ID NO: 1133060 - DNA, 25 bp, Homo sapien
tttctgggcagtaggagcatcttac

SEQ ID NO: 1133061 - DNA, 25 bp, Homo sapien
tgtgatgaaggcaggcacgccccag

SEQ ID NO: 1133062 - DNA, 25 bp, Homo sapien
caggatggcaatgactgtgcaggca

SEQ ID NO: 1133063 - DNA, 25 bp, Homo sapien
gcacctcagtgagtgcccggtacag

SEQ ID NO: 1133064 - DNA, 25 bp, Homo sapien
gggccggtgttgacatcgcgcacct

SEQ ID NO: 1133065 - DNA, 25 bp, Homo sapien
ccaagactgggaatgggtgggagta

SEQ ID NO: 1133066 - DNA, 25 bp, Homo sapien
caagactgggaatgggtgggagtac

SEQ ID NO: 1133067 - DNA, 25 bp, Homo sapien
ccccaagactgggaatgggtgggag

SEQ ID NO: 1133068 - DNA, 25 bp, Homo sapien
cccaagactgggaatgggtgggagt

SEQ ID NO: 1133069 - DNA, 25 bp, Homo sapien
gagtctgggttaaaccagagggaca

SEQ ID NO: 1133070 - DNA, 25 bp, Homo sapien
gcctgggaagtagggctgcgggcag

SEQ ID NO: 1133071 - DNA, 25 bp, Homo sapien
tggaaaagggttctgcccaccatcg

SEQ ID NO: 1133072 - DNA, 25 bp, Homo sapien
tccccaggataagggagtgacgcct

SEQ ID NO: 1133073 - DNA, 25 bp, Homo sapien
agcaaaactccagatgagcgtgtca

SEQ ID NO: 1133074 - DNA, 25 bp, Homo sapien
cgagacggcaaaggccaccgggcca

SEQ ID NO: 1133075 - DNA, 25 bp, Homo sapien
aactccagatgagcgtgtcatagat

SEQ ID NO: 1133076 - DNA, 25 bp, Homo sapien
aggccaccgggccagcaaaactcca

SEQ ID NO: 1133077 - DNA, 25 bp, Homo sapien
cccgggccgccaggatgtacaggaa

SEQ ID NO: 1133078 - DNA, 25 bp, Homo sapien
gcccgggccgccaggatgtacagga

SEQ ID NO: 1133079 - DNA, 25 bp, Homo sapien
cctttcttctcaaagccctgccgct

SEQ ID NO: 1133080 - DNA, 25 bp, Homo sapien
acaggacctttcttctcaaagccct

SEQ ID NO: 1133081 - DNA, 25 bp, Homo sapien
tttcttctcaaagccctgccgctgg

SEQ ID NO: 1133082 - DNA, 25 bp, Homo sapien
aggacctttcttctcaaagccctgc

SEQ ID NO: 1133083 - DNA, 25 bp, Homo sapien
atagggacaggccatgagtccggcc

SEQ ID NO: 1133084 - DNA, 25 bp, Homo sapien
atgagacctcccatgctggtgcctg

SEQ ID NO: 1133085 - DNA, 25 bp, Homo sapien
atgagtccggccatgagacctccca

SEQ ID NO: 1133086 - DNA, 25 bp, Homo sapien
caggccatgagtccggccatgagac

SEQ ID NO: 1133087 - DNA, 25 bp, Homo sapien
ggaggacggcgaaggagggctgcag

SEQ ID NO: 1133088 - DNA, 25 bp, Homo sapien
aggagggtgtcgctgttgacagaga

SEQ ID NO: 1133089 - DNA, 25 bp, Homo sapien
agcaggaggacggcgaaggagggct

SEQ ID NO: 1133090 - DNA, 25 bp, Homo sapien
gggtgtcgctgttgacagagagcag

SEQ ID NO: 1133091 - DNA, 25 bp, Homo sapien
gcagcaacggtctgtgcatattcag

SEQ ID NO: 1133092 - DNA, 25 bp, Homo sapien
gcatattcaggcatccacagcccag

SEQ ID NO: 1133093 - DNA, 25 bp, Homo sapien
cggtctgtgcatattcaggcatcca

SEQ ID NO: 1133094 - DNA, 25 bp, Homo sapien
aagaggcagcaacggtctgtgcata

SEQ ID NO: 1133095 - DNA, 25 bp, Homo sapien
caggcaagcttgagtgctttccgga

SEQ ID NO: 1133096 - DNA, 25 bp, Homo sapien
cttgcggctgcaggcaagcttgagt

SEQ ID NO: 1133097 - DNA, 25 bp, Homo sapien
gctttccggacctccttgctaagca

SEQ ID NO: 1133098 - DNA, 25 bp, Homo sapien
caagcttgagtgctttccggacctc

SEQ ID NO: 1133099 - DNA, 25 bp, Homo sapien
ggtacagccgcccatctgcgtaggg

SEQ ID NO: 1133100 - DNA, 25 bp, Homo sapien
ccgagtctccgtagggctggtacag

SEQ ID NO: 1133101 - DNA, 25 bp, Homo sapien
actcttgcccgagcgactggtgctg

SEQ ID NO: 1133102 - DNA, 25 bp, Homo sapien
tgtgcagagagccggccgagtctcc

SEQ ID NO: 1133103 - DNA, 25 bp, Homo sapien
gctggcctgggtccagcatgcgtgg

SEQ ID NO: 1133104 - DNA, 25 bp, Homo sapien
gtcccttacagcttctaatccaagc

SEQ ID NO: 1133105 - DNA, 25 bp, Homo sapien
tgggtccagcatgcgtgggcccctc

SEQ ID NO: 1133106 - DNA, 25 bp, Homo sapien
gtgtgtgctcctcaactcccaacag

SEQ ID NO: 1133107 - DNA, 25 bp, Homo sapien
gccagggttcagtgcggactcctcc

SEQ ID NO: 1133108 - DNA, 25 bp, Homo sapien
ccttggccagggttcagtgcggact

SEQ ID NO: 1133109 - DNA, 25 bp, Homo sapien
ggaacaggctgcctggatcccccag

SEQ ID NO: 1133110 - DNA, 25 bp, Homo sapien
tcttgaccttccaggaacaggctgc

SEQ ID NO: 1133111 - DNA, 25 bp, Homo sapien
cccaccttcagtaaaagccagccaa

SEQ ID NO: 1133112 - DNA, 25 bp, Homo sapien
ctccacccaccttcagtaaaagcca

SEQ ID NO: 1133113 - DNA, 25 bp, Homo sapien
ccaccttcagtaaaagccagccaac

SEQ ID NO: 1133114 - DNA, 25 bp, Homo sapien
cacctccacccaccttcagtaaaag

SEQ ID NO: 1133115 - DNA, 25 bp, Homo sapien
agccactctggtcgtcttctaagga

SEQ ID NO: 1133116 - DNA, 25 bp, Homo sapien
atgagtgggtagaggcataggagcc

SEQ ID NO: 1133117 - DNA, 25 bp, Homo sapien
tcactgtcggagtccgtgtcaggat

SEQ ID NO: 1133118 - DNA, 25 bp, Homo sapien
gacaggtcactgtcggagtccgtgt

SEQ ID NO: 1133119 - DNA, 25 bp, Homo sapien
gagtactgtgcaggggcagtctctc

SEQ ID NO: 1133120 - DNA, 25 bp, Homo sapien
agcaggctatcccagccctgctctc

SEQ ID NO: 1133121 - DNA, 25 bp, Homo sapien
ggccccagcaggctatcccagccct

SEQ ID NO: 1133122 - DNA, 25 bp, Homo sapien
ccttgggagtactgtgcaggggcag

SEQ ID NO: 1133123 - DNA, 25 bp, Homo sapien
gggcatctccattctcccgcagccg

SEQ ID NO: 1133124 - DNA, 25 bp, Homo sapien
gggcctagggacccctctcgagaca

SEQ ID NO: 1133125 - DNA, 25 bp, Homo sapien
aggggccccgttgccactactctct

SEQ ID NO: 1133126 - DNA, 25 bp, Homo sapien
tagggacccctctcgagacagggca

SEQ ID NO: 1133127 - DNA, 25 bp, Homo sapien
tgcggccacaggagaatgtgaggta

SEQ ID NO: 1133128 - DNA, 25 bp, Homo sapien
tgactaggggagctcggcagctggg

SEQ ID NO: 1133129 - DNA, 25 bp, Homo sapien
tgaggtatgaggctgctgactaggg

SEQ ID NO: 1133130 - DNA, 25 bp, Homo sapien
cacaggagaatgtgaggtatgaggc

SEQ ID NO: 1133131 - DNA, 25 bp, Homo sapien
gggaagaccctgtgcattgctccag

SEQ ID NO: 1133132 - DNA, 25 bp, Homo sapien
accgtgcctgccttgatgctcatgg

SEQ ID NO: 1133133 - DNA, 25 bp, Homo sapien
cggctgccctcactagcggaggagc

SEQ ID NO: 1133134 - DNA, 25 bp, Homo sapien
gcgatgggcatgaccccgttcagct

SEQ ID NO: 1133135 - DNA, 25 bp, Homo sapien
ttcaccagacgaaggaaacaggaaa

SEQ ID NO: 1133136 - DNA, 25 bp, Homo sapien
ggctgcgccgcgtagagcctaggag

SEQ ID NO: 1133137 - DNA, 25 bp, Homo sapien
gagagagtgaaagctttcaccagac

SEQ ID NO: 1133138 - DNA, 25 bp, Homo sapien
gcaaggcaccatggtttgtgggcac

SEQ ID NO: 1133139 - DNA, 25 bp, Homo sapien
atgcaggaagttaaagaagagaaat

SEQ ID NO: 1133140 - DNA, 25 bp, Homo sapien
ttaatgcaggaagttaaagaagaga

SEQ ID NO: 1133141 - DNA, 25 bp, Homo sapien
aatgcaggaagttaaagaagagaaa

SEQ ID NO: 1133142 - DNA, 25 bp, Homo sapien
taatgcaggaagttaaagaagagaa

SEQ ID NO: 1133143 - DNA, 25 bp, Homo sapien
ctcgggcgtaggaaccacggcccag

SEQ ID NO: 1133144 - DNA, 25 bp, Homo sapien
cggggcaggataaagcacaagacag

SEQ ID NO: 1133145 - DNA, 25 bp, Homo sapien
gagcctcgggcgtaggaaccacggc

SEQ ID NO: 1133146 - DNA, 25 bp, Homo sapien
gggagcggggcaggataaagcacaa

SEQ ID NO: 1133147 - DNA, 25 bp, Homo sapien
ggtcagcaactgagcaaacacctgg

SEQ ID NO: 1133148 - DNA, 25 bp, Homo sapien
aatgaagcacttttgggtcagcaac

SEQ ID NO: 1133149 - DNA, 25 bp, Homo sapien
ccacagcaggttagacaaagtagca

SEQ ID NO: 1133150 - DNA, 25 bp, Homo sapien
gagtggacaccagaacccagacttg

SEQ ID NO: 1133151 - DNA, 25 bp, Homo sapien
ctcactgcaacttccaccttctggg

SEQ ID NO: 1133152 - DNA, 25 bp, Homo sapien
ttcaagcaattctcctttctcagcc

SEQ ID NO: 1133153 - DNA, 25 bp, Homo sapien
ctggagtttaatggcgcgatctggg

SEQ ID NO: 1133154 - DNA, 25 bp, Homo sapien
cgcctgccacccacgtccggctaat

SEQ ID NO: 1133155 - DNA, 25 bp, Homo sapien
ttctggcagatttggccggcttctt

SEQ ID NO: 1133156 - DNA, 25 bp, Homo sapien
ctttactgcaccgttttattagagg

SEQ ID NO: 1133157 - DNA, 25 bp, Homo sapien
tggtttctggcagatttggccggct

SEQ ID NO: 1133158 - DNA, 25 bp, Homo sapien
ttattagagggatgtttgagatctg

SEQ ID NO: 1133159 - DNA, 25 bp, Homo sapien
actgactgttccctgatgatttggc

SEQ ID NO: 1133160 - DNA, 25 bp, Homo sapien
gatttggcccacctcctgtgtttgg

SEQ ID NO: 1133161 - DNA, 25 bp, Homo sapien
gctgccttcccacgaaagtgtaaag

SEQ ID NO: 1133162 - DNA, 25 bp, Homo sapien
taatgatttattgctatgccccaga

SEQ ID NO: 1133163 - DNA, 25 bp, Homo sapien
taattccgaagatacaccagctcac

SEQ ID NO: 1133164 - DNA, 25 bp, Homo sapien
agggtccccgtgtgtgtgataagca

SEQ ID NO: 1133165 - DNA, 25 bp, Homo sapien
taaccatatacgatagggctcttcg

SEQ ID NO: 1133166 - DNA, 25 bp, Homo sapien
tggagtcagttgttcagggtccccg

SEQ ID NO: 1133167 - DNA, 25 bp, Homo sapien
ccagtagacttacgcaaggacaggg

SEQ ID NO: 1133168 - DNA, 25 bp, Homo sapien
cctagagttgattgtcgggtacaca

SEQ ID NO: 1133169 - DNA, 25 bp, Homo sapien
tgtacttggtaccatccctgggctc

SEQ ID NO: 1133170 - DNA, 25 bp, Homo sapien
gggacagtcctactccaagaacact

SEQ ID NO: 1133171 - DNA, 25 bp, Homo sapien
aatagatttaatgcctgagggtcgc

SEQ ID NO: 1133172 - DNA, 25 bp, Homo sapien
gcagacccttggtttggacctcaca

SEQ ID NO: 1133173 - DNA, 25 bp, Homo sapien
gcgtgttgatttagtgactcctgaa

SEQ ID NO: 1133174 - DNA, 25 bp, Homo sapien
tgggctcatttcctcagcgtgttga

SEQ ID NO: 1133175 - DNA, 25 bp, Homo sapien
caagcactctagattgaaaatgact

SEQ ID NO: 1133176 - DNA, 25 bp, Homo sapien
ttcttaagtacaagttctgagctgg

SEQ ID NO: 1133177 - DNA, 25 bp, Homo sapien
aagtacaagttctgagctgggtgca

SEQ ID NO: 1133178 - DNA, 25 bp, Homo sapien
tacaagttctgagctgggtgcagag

SEQ ID NO: 1133179 - DNA, 25 bp, Homo sapien
tcagaggctttgatgtaatgcaaaa

SEQ ID NO: 1133180 - DNA, 25 bp, Homo sapien
gaatcaagagtatgccactgagcta

SEQ ID NO: 1133181 - DNA, 25 bp, Homo sapien
gagtcagcctttaaacattgttcag

SEQ ID NO: 1133182 - DNA, 25 bp, Homo sapien
gaagcaacttgtgtctattgacaga

SEQ ID NO: 1133183 - DNA, 25 bp, Homo sapien
taaaacagtgcctgaaatatagcag

SEQ ID NO: 1133184 - DNA, 25 bp, Homo sapien
ttattccaatccaggaacataggat

SEQ ID NO: 1133185 - DNA, 25 bp, Homo sapien
gttcttgatgtaccttaagtaccta

SEQ ID NO: 1133186 - DNA, 25 bp, Homo sapien
catctgatgaattaacgtgtttgga

SEQ ID NO: 1133187 - DNA, 25 bp, Homo sapien
tcttgctactgatttgtttggatat

SEQ ID NO: 1133188 - DNA, 25 bp, Homo sapien
tttatttgtatttccctcatgatta

SEQ ID NO: 1133189 - DNA, 25 bp, Homo sapien
tcttttgataaatggctgttcaggt

SEQ ID NO: 1133190 - DNA, 25 bp, Homo sapien
ctactgatttgtttggatattaacc

SEQ ID NO: 1133191 - DNA, 25 bp, Homo sapien
ccttatctggactgcctgcatttga

SEQ ID NO: 1133192 - DNA, 25 bp, Homo sapien
ttagctataatagactcatgggaaa

SEQ ID NO: 1133193 - DNA, 25 bp, Homo sapien
catggtaaggtggtatagcactgcc

SEQ ID NO: 1133194 - DNA, 25 bp, Homo sapien
tctaagggtttgacttaccatggta

SEQ ID NO: 1133195 - DNA, 25 bp, Homo sapien
gcgagccaatgaggagtgggccggg

SEQ ID NO: 1133196 - DNA, 25 bp, Homo sapien
gaagccggaggcgacgcgagccaat

SEQ ID NO: 1133197 - DNA, 25 bp, Homo sapien
tctgccccgttccagccaatcagtc

SEQ ID NO: 1133198 - DNA, 25 bp, Homo sapien
aatcagtcccgcatcttagcatccg

SEQ ID NO: 1133199 - DNA, 25 bp, Homo sapien
ttagtgatgctctataacagaatca

SEQ ID NO: 1133200 - DNA, 25 bp, Homo sapien
tatccctattctatgaagatgtctg

SEQ ID NO: 1133201 - DNA, 25 bp, Homo sapien
taaatgaactagtccagctcttccc

SEQ ID NO: 1133202 - DNA, 25 bp, Homo sapien
tttgaaatgcaaatgttagtgggcc

SEQ ID NO: 1133203 - DNA, 25 bp, Homo sapien
tcagcagggtaactcagcccagctt

SEQ ID NO: 1133204 - DNA, 25 bp, Homo sapien
actgactccatgtactttgctgctg

SEQ ID NO: 1133205 - DNA, 25 bp, Homo sapien
tcctgaccatggtagggccatcagc

SEQ ID NO: 1133206 - DNA, 25 bp, Homo sapien
gaaaggatatccttgggacagcaga

SEQ ID NO: 1133207 - DNA, 25 bp, Homo sapien
gtgggacatgatcaacagagagaat

SEQ ID NO: 1133208 - DNA, 25 bp, Homo sapien
cagagagaatggaaaacctagtcat

SEQ ID NO: 1133209 - DNA, 25 bp, Homo sapien
tgatatcttcagcagtcacaactgg

SEQ ID NO: 1133210 - DNA, 25 bp, Homo sapien
gaggcaaatgtgaagtggcacctat

SEQ ID NO: 1133211 - DNA, 25 bp, Homo sapien
aacttggtgctttgaggcataaccc

SEQ ID NO: 1133212 - DNA, 25 bp, Homo sapien
caatgagacaatgacagtggagagt

SEQ ID NO: 1133213 - DNA, 25 bp, Homo sapien
ccgtcgttgcgtagagtccttgtga

SEQ ID NO: 1133214 - DNA, 25 bp, Homo sapien
tgtcctgtgaacataacattcccag

SEQ ID NO: 1133215 - DNA, 25 bp, Homo sapien
tagtggatttatgcctttttagaag

SEQ ID NO: 1133216 - DNA, 25 bp, Homo sapien
gaagtcctttaatcttacatcaata

SEQ ID NO: 1133217 - DNA, 25 bp, Homo sapien
tacatcaatagacttaaggaaggcg

SEQ ID NO: 1133218 - DNA, 25 bp, Homo sapien
agtctgcacctttaactagaaatat

SEQ ID NO: 1133219 - DNA, 25 bp, Homo sapien
tttttaagtgaaacagagcagtaga

SEQ ID NO: 1133220 - DNA, 25 bp, Homo sapien
ccttgcccatagtagtgatgagtgg

SEQ ID NO: 1133221 - DNA, 25 bp, Homo sapien
tctcatttcattccgggagggtatt

SEQ ID NO: 1133222 - DNA, 25 bp, Homo sapien
gtagatatcaaaatgccttgcccat

SEQ ID NO: 1133223 - DNA, 25 bp, Homo sapien
cagtagcactctttcagttgtgacc

SEQ ID NO: 1133224 - DNA, 25 bp, Homo sapien
cagctagggtacagatgtgtgcacc

SEQ ID NO: 1133225 - DNA, 25 bp, Homo sapien
tgggtactacccattaggtgccagt

SEQ ID NO: 1133226 - DNA, 25 bp, Homo sapien
ccacacctggcgtggactggataat

SEQ ID NO: 1133227 - DNA, 25 bp, Homo sapien
caagggtcactctttgctccgttca

SEQ ID NO: 1133228 - DNA, 25 bp, Homo sapien
aggccaagggtcactctttgctccg

SEQ ID NO: 1133229 - DNA, 25 bp, Homo sapien
gccaagggtcactctttgctccgtt

SEQ ID NO: 1133230 - DNA, 25 bp, Homo sapien
aagggtcactctttgctccgttcat

SEQ ID NO: 1133231 - DNA, 25 bp, Homo sapien
ctaccctcgccatgtttcttacccg

SEQ ID NO: 1133232 - DNA, 25 bp, Homo sapien
agttggctgccggtgagttgggtgc

SEQ ID NO: 1133233 - DNA, 25 bp, Homo sapien
gtgttggtcctcagaatccccgcgt

SEQ ID NO: 1133234 - DNA, 25 bp, Homo sapien
tactgcggccgtgtgggtgagttgg

SEQ ID NO: 1133235 - DNA, 25 bp, Homo sapien
tcacctaggcgggaactactaccag

SEQ ID NO: 1133236 - DNA, 25 bp, Homo sapien
gcgggctaaagaggtcgcggtcgca

SEQ ID NO: 1133237 - DNA, 25 bp, Homo sapien
aggaagcgcgttggcccaatcacct

SEQ ID NO: 1133238 - DNA, 25 bp, Homo sapien
cggaccaaccaagccctcgtgagga

SEQ ID NO: 1133239 - DNA, 25 bp, Homo sapien
gcaaccacccgcgatttaaggcgga

SEQ ID NO: 1133240 - DNA, 25 bp, Homo sapien
gggtgcctatcgtccctagcaacca

SEQ ID NO: 1133241 - DNA, 25 bp, Homo sapien
ctagcaaccacccgcgatttaaggc

SEQ ID NO: 1133242 - DNA, 25 bp, Homo sapien
tacacgccttgggtgcctatcgtcc

SEQ ID NO: 1133243 - DNA, 25 bp, Homo sapien
gaagtctggatcctgaactctaggt

SEQ ID NO: 1133244 - DNA, 25 bp, Homo sapien
caaactggctgaaacgaagggactc

SEQ ID NO: 1133245 - DNA, 25 bp, Homo sapien
ttttctcaataaacgagccaaactg

SEQ ID NO: 1133246 - DNA, 25 bp, Homo sapien
tcagacccactgtagccgactcatt

SEQ ID NO: 1133247 - DNA, 25 bp, Homo sapien
tgggaaatcagtacgcatctacctt

SEQ ID NO: 1133248 - DNA, 25 bp, Homo sapien
gttctctaccacaacaatgctcctg

SEQ ID NO: 1133249 - DNA, 25 bp, Homo sapien
ttccatgggaaatcagtacgcatct

SEQ ID NO: 1133250 - DNA, 25 bp, Homo sapien
cccaggagaacttcaacggagttgt

SEQ ID NO: 1133251 - DNA, 25 bp, Homo sapien
gcgcgagcggccgtcggtgggccgg

SEQ ID NO: 1133252 - DNA, 25 bp, Homo sapien
gtcggtgggccggagtccagtctgg

SEQ ID NO: 1133253 - DNA, 25 bp, Homo sapien
gcggccgtcggtgggccggagtcca

SEQ ID NO: 1133254 - DNA, 25 bp, Homo sapien
cggtgggccggagtccagtctggct

SEQ ID NO: 1133255 - DNA, 25 bp, Homo sapien
ctggccgggaggcggcggacacggc

SEQ ID NO: 1133256 - DNA, 25 bp, Homo sapien
gaggcggcggacacggcgggggagc

SEQ ID NO: 1133257 - DNA, 25 bp, Homo sapien
tggccgggaggcggcggacacggcg

SEQ ID NO: 1133258 - DNA, 25 bp, Homo sapien
aggcggcggacacggcgggggagcg

SEQ ID NO: 1133259 - DNA, 25 bp, Homo sapien
ctgggcgcggcgtggtggcttggct

SEQ ID NO: 1133260 - DNA, 25 bp, Homo sapien
ggcgagcgctgggcgcggcgtggtg

SEQ ID NO: 1133261 - DNA, 25 bp, Homo sapien
ctggcgcggcgagcgctgggcgcgg

SEQ ID NO: 1133262 - DNA, 25 bp, Homo sapien
gctggcgcggcgagcgctgggcgcg

SEQ ID NO: 1133263 - DNA, 25 bp, Homo sapien
ctgctggcgcggcgacttgtccgcc

SEQ ID NO: 1133264 - DNA, 25 bp, Homo sapien
gctggcgcggcgacttgtccgccgt

SEQ ID NO: 1133265 - DNA, 25 bp, Homo sapien
acttgtccgccgtgcggccggcgct

SEQ ID NO: 1133266 - DNA, 25 bp, Homo sapien
ggcgcggcgacttgtccgccgtgcg

SEQ ID NO: 1133267 - DNA, 25 bp, Homo sapien
aactttgatgaagcccagcggctcc

SEQ ID NO: 1133268 - DNA, 25 bp, Homo sapien
ctggagaactttgatgaagcccagc

SEQ ID NO: 1133269 - DNA, 25 bp, Homo sapien
gcagccccacgagtaggcggtccac

SEQ ID NO: 1133270 - DNA, 25 bp, Homo sapien
cagcgcagccccacgagtaggcggt

SEQ ID NO: 1133271 - DNA, 25 bp, Homo sapien
ccaaggagtggtatgtgcaggatca

SEQ ID NO: 1133272 - DNA, 25 bp, Homo sapien
tcttggtgaagagcggacctcgtcc

SEQ ID NO: 1133273 - DNA, 25 bp, Homo sapien
tctcgcccgggtgaaatgtgagcgc

SEQ ID NO: 1133274 - DNA, 25 bp, Homo sapien
tgcacatagaaggaccgaatccggg

SEQ ID NO: 1133275 - DNA, 25 bp, Homo sapien
tatgtccaggttatttttgctagct

SEQ ID NO: 1133276 - DNA, 25 bp, Homo sapien
tagcttagtatagacttagtgagac

SEQ ID NO: 1133277 - DNA, 25 bp, Homo sapien
tctccaataattggtctatgtccag

SEQ ID NO: 1133278 - DNA, 25 bp, Homo sapien
taatagagacgcgacctccccttat

SEQ ID NO: 1133279 - DNA, 25 bp, Homo sapien
tcaggctgctggaccaaatagccaa

SEQ ID NO: 1133280 - DNA, 25 bp, Homo sapien
gagagtgaggatcccctttaatcaa

SEQ ID NO: 1133281 - DNA, 25 bp, Homo sapien
aatacaaggttgactgagtggtgtc

SEQ ID NO: 1133282 - DNA, 25 bp, Homo sapien
ggccaaagtcgagaactaaccgtga

SEQ ID NO: 1133283 - DNA, 25 bp, Homo sapien
cacaggacccgaaggcgaaaatagc

SEQ ID NO: 1133284 - DNA, 25 bp, Homo sapien
gggatagccaaatgcaacgatgatg

SEQ ID NO: 1133285 - DNA, 25 bp, Homo sapien
cacgtccttggcttcgttgttgcag

SEQ ID NO: 1133286 - DNA, 25 bp, Homo sapien
aacgatgatggagctcacgtccttg

SEQ ID NO: 1133287 - DNA, 25 bp, Homo sapien
gctctggtcaatgtgtctgaaattg

SEQ ID NO: 1133288 - DNA, 25 bp, Homo sapien
tttgctctggtcaatgtgtctgaaa

SEQ ID NO: 1133289 - DNA, 25 bp, Homo sapien
gttttgctctggtcaatgtgtctga

SEQ ID NO: 1133290 - DNA, 25 bp, Homo sapien
tgctctggtcaatgtgtctgaaatt

SEQ ID NO: 1133291 - DNA, 25 bp, Homo sapien
gatgccaagggtcacgaagaactcg

SEQ ID NO: 1133292 - DNA, 25 bp, Homo sapien
catctcatattggatccggtgcaac

SEQ ID NO: 1133293 - DNA, 25 bp, Homo sapien
caccagcgggaagcgtttgttctct

SEQ ID NO: 1133294 - DNA, 25 bp, Homo sapien
catggtcttggagctggactcttca

SEQ ID NO: 1133295 - DNA, 25 bp, Homo sapien
cattccttctggcctgtgctgactc

SEQ ID NO: 1133296 - DNA, 25 bp, Homo sapien
cccattccttctggcctgtgctgac

SEQ ID NO: 1133297 - DNA, 25 bp, Homo sapien
caccccattccttctggcctgtgct

SEQ ID NO: 1133298 - DNA, 25 bp, Homo sapien
ttccttctggcctgtgctgactcac

SEQ ID NO: 1133299 - DNA, 25 bp, Homo sapien
gtgctattgtgcctcctgtgaacag

SEQ ID NO: 1133300 - DNA, 25 bp, Homo sapien
taaggaaactgcgatttagagaggt

SEQ ID NO: 1133301 - DNA, 25 bp, Homo sapien
tccagagcctgcttgtgtatggtgc

SEQ ID NO: 1133302 - DNA, 25 bp, Homo sapien
tatttaacttgtccgagatcacaca

SEQ ID NO: 1133303 - DNA, 25 bp, Homo sapien
tcaagctggatggtcgtgtggcccc

SEQ ID NO: 1133304 - DNA, 25 bp, Homo sapien
agatgttggccaggcccatagaggg

SEQ ID NO: 1133305 - DNA, 25 bp, Homo sapien
gcagctgcagctaccagccagaaga

SEQ ID NO: 1133306 - DNA, 25 bp, Homo sapien
tctccatggcacactgacatggctg

SEQ ID NO: 1133307 - DNA, 25 bp, Homo sapien
ggctggtgctgcttcctgcagtggc

SEQ ID NO: 1133308 - DNA, 25 bp, Homo sapien
tggtgctgcttcctgcagtggccac

SEQ ID NO: 1133309 - DNA, 25 bp, Homo sapien
cagggctggtgctgcttcctgcagt

SEQ ID NO: 1133310 - DNA, 25 bp, Homo sapien
ctagctgggacaggcctgggcagca

SEQ ID NO: 1133311 - DNA, 25 bp, Homo sapien
acagttcccggcccacaggaagaag

SEQ ID NO: 1133312 - DNA, 25 bp, Homo sapien
caacagttcccggcccacaggaaga

SEQ ID NO: 1133313 - DNA, 25 bp, Homo sapien
acaggaagaagttgataaagccaaa

SEQ ID NO: 1133314 - DNA, 25 bp, Homo sapien
ctggtcctggtcctggtcctggtcc

SEQ ID NO: 1133315 - DNA, 25 bp, Homo sapien
tgctcagctgcactctcctggctgg

SEQ ID NO: 1133316 - DNA, 25 bp, Homo sapien
gctccctgctcagctgcactctcct

SEQ ID NO: 1133317 - DNA, 25 bp, Homo sapien
gctgcactctcctggctgggaccct

SEQ ID NO: 1133318 - DNA, 25 bp, Homo sapien
caagtaagatacctgggtccaggca

SEQ ID NO: 1133319 - DNA, 25 bp, Homo sapien
tgtccagttcgggaatagccaggtg

SEQ ID NO: 1133320 - DNA, 25 bp, Homo sapien
tggctgctaggaaccagtctcagag

SEQ ID NO: 1133321 - DNA, 25 bp, Homo sapien
catgggatgactggagatcagacgc

SEQ ID NO: 1133322 - DNA, 25 bp, Homo sapien
tcaaatgcctcagatgcacgatgct

SEQ ID NO: 1133323 - DNA, 25 bp, Homo sapien
gaataaaaggaaggcctggacagac

SEQ ID NO: 1133324 - DNA, 25 bp, Homo sapien
gaaggcctcatcaggaccctctgaa

SEQ ID NO: 1133325 - DNA, 25 bp, Homo sapien
gcaggtcctgactccacatttttga

SEQ ID NO: 1133326 - DNA, 25 bp, Homo sapien
aagacaaatatggaactgggtccca

SEQ ID NO: 1133327 - DNA, 25 bp, Homo sapien
aagaggatatacactaaagacaaat

SEQ ID NO: 1133328 - DNA, 25 bp, Homo sapien
gggctctggggcaacttagcctcat

SEQ ID NO: 1133329 - DNA, 25 bp, Homo sapien
gaagaagcaccaatagcatcggcct

SEQ ID NO: 1133330 - DNA, 25 bp, Homo sapien
gtaggaagcaaatgatccttaccca

SEQ ID NO: 1133331 - DNA, 25 bp, Homo sapien
taggaagcaaatgatccttacccag

SEQ ID NO: 1133332 - DNA, 25 bp, Homo sapien
ggtaggaagcaaatgatccttaccc

SEQ ID NO: 1133333 - DNA, 25 bp, Homo sapien
caattggcactggattggaaagtgg

SEQ ID NO: 1133334 - DNA, 25 bp, Homo sapien
gcttagtgggccaattggcactgga

SEQ ID NO: 1133335 - DNA, 25 bp, Homo sapien
ctttaggatgcttagtgggccaatt

SEQ ID NO: 1133336 - DNA, 25 bp, Homo sapien
aagtggtcggattcttccctcttct

SEQ ID NO: 1133337 - DNA, 25 bp, Homo sapien
gaacgaggcttccttgctctaaaga

SEQ ID NO: 1133338 - DNA, 25 bp, Homo sapien
gagagattggcacagggcacattca

SEQ ID NO: 1133339 - DNA, 25 bp, Homo sapien
tctagtgggacaaagggcaagtacc

SEQ ID NO: 1133340 - DNA, 25 bp, Homo sapien
tttccctagctgaaggcccagttgc

SEQ ID NO: 1133341 - DNA, 25 bp, Homo sapien
tccagaattgctaatgagtcccagt

SEQ ID NO: 1133342 - DNA, 25 bp, Homo sapien
tactttggtctaattgggtgccacc

SEQ ID NO: 1133343 - DNA, 25 bp, Homo sapien
ggtgccaccaaaagaggagatgtca

SEQ ID NO: 1133344 - DNA, 25 bp, Homo sapien
gatccctagggcatccaggaatcag

SEQ ID NO: 1133345 - DNA, 25 bp, Homo sapien
ccgccgccatcgcattaaaaaagta

SEQ ID NO: 1133346 - DNA, 25 bp, Homo sapien
tcccaccctcacacaatcagacaaa

SEQ ID NO: 1133347 - DNA, 25 bp, Homo sapien
tcatcttctcagctgataacatttc

SEQ ID NO: 1133348 - DNA, 25 bp, Homo sapien
aaaagtctgcctactccatttcccg

SEQ ID NO: 1133349 - DNA, 25 bp, Homo sapien
gaccaagatcacctgtcatgatgac

SEQ ID NO: 1133350 - DNA, 25 bp, Homo sapien
taatgaatactttctctgctggaag

SEQ ID NO: 1133351 - DNA, 25 bp, Homo sapien
cagaaggctgtctccgagccagagc

SEQ ID NO: 1133352 - DNA, 25 bp, Homo sapien
gaactgcgatcgataccctgtacag

SEQ ID NO: 1133353 - DNA, 25 bp, Homo sapien
aaggggagggagtctgtaggaggtg

SEQ ID NO: 1133354 - DNA, 25 bp, Homo sapien
ctgtgaatcagaagggcaaggggag

SEQ ID NO: 1133355 - DNA, 25 bp, Homo sapien
ggcaaggggagggagtctgtaggag

SEQ ID NO: 1133356 - DNA, 25 bp, Homo sapien
tgtgaatcagaagggcaaggggagg

SEQ ID NO: 1133357 - DNA, 25 bp, Homo sapien
tctaagccgtgcgtccgccagctgg

SEQ ID NO: 1133358 - DNA, 25 bp, Homo sapien
gaagcgactccgctcccctgtagat

SEQ ID NO: 1133359 - DNA, 25 bp, Homo sapien
gggctggcggccacgaagcgactcc

SEQ ID NO: 1133360 - DNA, 25 bp, Homo sapien
ctgtagatcgaatagggtaggtgca

SEQ ID NO: 1133361 - DNA, 25 bp, Homo sapien
tcttggagcggatgctattgcctac

SEQ ID NO: 1133362 - DNA, 25 bp, Homo sapien
tcttctaacccttatgcacacatta

SEQ ID NO: 1133363 - DNA, 25 bp, Homo sapien
tattgcctaccgagcttgcagcaag

SEQ ID NO: 1133364 - DNA, 25 bp, Homo sapien
gagtccctccgaaatgcacaattgc

SEQ ID NO: 1133365 - DNA, 25 bp, Homo sapien
cctttccagcgcagtctttgcgcaa

SEQ ID NO: 1133366 - DNA, 25 bp, Homo sapien
tttgcgcaagcgcaacacaggttgc

SEQ ID NO: 1133367 - DNA, 25 bp, Homo sapien
agcgcaacacaggttgcctgttccc

SEQ ID NO: 1133368 - DNA, 25 bp, Homo sapien
cagcgcagtctttgcgcaagcgcaa

SEQ ID NO: 1133369 - DNA, 25 bp, Homo sapien
ccgccgcggacgcgcgcccgccctg

SEQ ID NO: 1133370 - DNA, 25 bp, Homo sapien
gcccgccctggcgccgccgccgcgc

SEQ ID NO: 1133371 - DNA, 25 bp, Homo sapien
caccgccgcggacgcgcgcccgccc

SEQ ID NO: 1133372 - DNA, 25 bp, Homo sapien
gccctggcgccgccgccgcgcggcc

SEQ ID NO: 1133373 - DNA, 25 bp, Homo sapien
gcggccattgctgccgccgcgcgtt

SEQ ID NO: 1133374 - DNA, 25 bp, Homo sapien
cgccgctccagagcggccattgctg

SEQ ID NO: 1133375 - DNA, 25 bp, Homo sapien
cgaagtcatcgagactcggcacccg

SEQ ID NO: 1133376 - DNA, 25 bp, Homo sapien
ctgtcccgcgaagtcatcgagactc

SEQ ID NO: 1133377 - DNA, 25 bp, Homo sapien
cgtcagccgcgggcaggtcggcccg

SEQ ID NO: 1133378 - DNA, 25 bp, Homo sapien
gcccgctccacccacgagctccagc

SEQ ID NO: 1133379 - DNA, 25 bp, Homo sapien
cccgctccacccacgagctccagct

SEQ ID NO: 1133380 - DNA, 25 bp, Homo sapien
cggcccgctccacccacgagctcca

SEQ ID NO: 1133381 - DNA, 25 bp, Homo sapien
gagccggacggcggctccagtcggc

SEQ ID NO: 1133382 - DNA, 25 bp, Homo sapien
ccggaggcgcgaaggtgacggagcg

SEQ ID NO: 1133383 - DNA, 25 bp, Homo sapien
gcgcgaaggtgacggagcgggcggg

SEQ ID NO: 1133384 - DNA, 25 bp, Homo sapien
cggacggcggctccagtcggcggct

SEQ ID NO: 1133385 - DNA, 25 bp, Homo sapien
gcagctgcaggcaaatgccgaaaag

SEQ ID NO: 1133386 - DNA, 25 bp, Homo sapien
caggcaaatgccgaaaaggagcagg

SEQ ID NO: 1133387 - DNA, 25 bp, Homo sapien
aacacgtggaggactgttgcggaca

SEQ ID NO: 1133388 - DNA, 25 bp, Homo sapien
tgggaaacacgtggaggactgttgc

SEQ ID NO: 1133389 - DNA, 25 bp, Homo sapien
ctgtaggcccgctcactaaggcact

SEQ ID NO: 1133390 - DNA, 25 bp, Homo sapien
gctgtaggcccgctcactaaggcac

SEQ ID NO: 1133391 - DNA, 25 bp, Homo sapien
taggcccgctcactaaggcactcag

SEQ ID NO: 1133392 - DNA, 25 bp, Homo sapien
tgtaggcccgctcactaaggcactc

SEQ ID NO: 1133393 - DNA, 25 bp, Homo sapien
gggcgtgatgcctgctgtcaccccg

SEQ ID NO: 1133394 - DNA, 25 bp, Homo sapien
gctgtcaccccgaaaggccacgagg

SEQ ID NO: 1133395 - DNA, 25 bp, Homo sapien
gatgcctgctgtcaccccgaaaggc

SEQ ID NO: 1133396 - DNA, 25 bp, Homo sapien
cttcaggggcgtgatgcctgctgtc

SEQ ID NO: 1133397 - DNA, 25 bp, Homo sapien
caggggttgcccttgtacctcagtt

SEQ ID NO: 1133398 - DNA, 25 bp, Homo sapien
cccttcttagagggcctttgggcag

SEQ ID NO: 1133399 - DNA, 25 bp, Homo sapien
caggtcctgcactgataggatggtc

SEQ ID NO: 1133400 - DNA, 25 bp, Homo sapien
ttggtcagctatgcaagtccctccc

SEQ ID NO: 1133401 - DNA, 25 bp, Homo sapien
cagggccagttttagagagtctcca

SEQ ID NO: 1133402 - DNA, 25 bp, Homo sapien
caatgtttctataagtccctgagtc

SEQ ID NO: 1133403 - DNA, 25 bp, Homo sapien
gaacctttcagtgggtccattctca

SEQ ID NO: 1133404 - DNA, 25 bp, Homo sapien
tatgaagcccacactccgtgacaag

SEQ ID NO: 1133405 - DNA, 25 bp, Homo sapien
gtttttgctactctcctccagctca

SEQ ID NO: 1133406 - DNA, 25 bp, Homo sapien
ggcatccaacttcttcgtgtttttg

SEQ ID NO: 1133407 - DNA, 25 bp, Homo sapien
tcttcgtgtttttgctactctcctc

SEQ ID NO: 1133408 - DNA, 25 bp, Homo sapien
caacttcttcgtgtttttgctactc

SEQ ID NO: 1133409 - DNA, 25 bp, Homo sapien
tgggtcccagccctaatgtgtgtcg

SEQ ID NO: 1133410 - DNA, 25 bp, Homo sapien
ggtggaaaagtggagcgtggtcctg

SEQ ID NO: 1133411 - DNA, 25 bp, Homo sapien
cagccctaatgtgtgtcgactccca

SEQ ID NO: 1133412 - DNA, 25 bp, Homo sapien
aaaagtggagcgtggtcctgtctgc

SEQ ID NO: 1133413 - DNA, 25 bp, Homo sapien
tgatctccaacgacaggtcacagga

SEQ ID NO: 1133414 - DNA, 25 bp, Homo sapien
aggagccagaacaaccggccgactc

SEQ ID NO: 1133415 - DNA, 25 bp, Homo sapien
tatgattatgatctccaacgacagg

SEQ ID NO: 1133416 - DNA, 25 bp, Homo sapien
gactcggacctatcaaaatgagggt

SEQ ID NO: 1133417 - DNA, 25 bp, Homo sapien
tacgctttcaggtgagtgggcaatc

SEQ ID NO: 1133418 - DNA, 25 bp, Homo sapien
tctggaagatcggagagcactccca

SEQ ID NO: 1133419 - DNA, 25 bp, Homo sapien
ccccgctgatataacaagctccatg

SEQ ID NO: 1133420 - DNA, 25 bp, Homo sapien
tcgatctaagcagtcccaaagggta

SEQ ID NO: 1133421 - DNA, 25 bp, Homo sapien
ggttacacacaaccaagtagaagtc

SEQ ID NO: 1133422 - DNA, 25 bp, Homo sapien
gtggttacacacaaccaagtagaag

SEQ ID NO: 1133423 - DNA, 25 bp, Homo sapien
gggcagtgcccgaagatggacatgt

SEQ ID NO: 1133424 - DNA, 25 bp, Homo sapien
cagggcagtgcccgaagatggacat

SEQ ID NO: 1133425 - DNA, 25 bp, Homo sapien
ggaggctggtggccacggctccggg

SEQ ID NO: 1133426 - DNA, 25 bp, Homo sapien
ctggaggaggttttcgtggaacctg

SEQ ID NO: 1133427 - DNA, 25 bp, Homo sapien
taaagcttgctgaggggcccatgtc

SEQ ID NO: 1133428 - DNA, 25 bp, Homo sapien
gtggggcccggccataaagcttgct

SEQ ID NO: 1133429 - DNA, 25 bp, Homo sapien
gattccatgtccatcaggcttcggg

SEQ ID NO: 1133430 - DNA, 25 bp, Homo sapien
ggcttcgggagactggacatcttct

SEQ ID NO: 1133431 - DNA, 25 bp, Homo sapien
ggtggggccaccctgattccatgtc

SEQ ID NO: 1133432 - DNA, 25 bp, Homo sapien
cagattcaccacaggcacgaaaagg

SEQ ID NO: 1133433 - DNA, 25 bp, Homo sapien
aggttctttagaagggggagccatg

SEQ ID NO: 1133434 - DNA, 25 bp, Homo sapien
atgatctcgatgttctctctgccag

SEQ ID NO: 1133435 - DNA, 25 bp, Homo sapien
gagtgagaaagaacttcacctcctg

SEQ ID NO: 1133436 - DNA, 25 bp, Homo sapien
gaagcttcccaggaagcaagcaggt

SEQ ID NO: 1133437 - DNA, 25 bp, Homo sapien
gatggccaggcccataaacctgacc

SEQ ID NO: 1133438 - DNA, 25 bp, Homo sapien
aggagtccccactctacattctgga

SEQ ID NO: 1133439 - DNA, 25 bp, Homo sapien
tcaggtgcgccttttgggacttcaa

SEQ ID NO: 1133440 - DNA, 25 bp, Homo sapien
cctgagaactggtactaaggcagaa

SEQ ID NO: 1133441 - DNA, 25 bp, Homo sapien
tttacaggaggatttggccgcttcc

SEQ ID NO: 1133442 - DNA, 25 bp, Homo sapien
ggtgtgagaaccatccctatcccaa

SEQ ID NO: 1133443 - DNA, 25 bp, Homo sapien
ccacactgcctgttgaggtcgcact

SEQ ID NO: 1133444 - DNA, 25 bp, Homo sapien
gtcaacaggcgggtacagatctttt

SEQ ID NO: 1133445 - DNA, 25 bp, Homo sapien
tctctggatttattaccccacactg

SEQ ID NO: 1133446 - DNA, 25 bp, Homo sapien
tgcctgttgaggtcgcactccttcc

SEQ ID NO: 1133447 - DNA, 25 bp, Homo sapien
gaaggagtgggcaagccctgtgctg

SEQ ID NO: 1133448 - DNA, 25 bp, Homo sapien
agtgggcaagccctgtgctgtcctc

SEQ ID NO: 1133449 - DNA, 25 bp, Homo sapien
aaggagtgggcaagccctgtgctgt

SEQ ID NO: 1133450 - DNA, 25 bp, Homo sapien
ggaaggagtgggcaagccctgtgct

SEQ ID NO: 1133451 - DNA, 25 bp, Homo sapien
tctgcttggcacgaacagagaaggt

SEQ ID NO: 1133452 - DNA, 25 bp, Homo sapien
accgctgctacaacctggactgagg

SEQ ID NO: 1133453 - DNA, 25 bp, Homo sapien
cagtgcacagtatgggtaggtctgc

SEQ ID NO: 1133454 - DNA, 25 bp, Homo sapien
gacttcccggcgctggtgtactgag

SEQ ID NO: 1133455 - DNA, 25 bp, Homo sapien
tatcctgagtgttggatctggcaca

SEQ ID NO: 1133456 - DNA, 25 bp, Homo sapien
ttgaacctgccgagctcaaagagca

SEQ ID NO: 1133457 - DNA, 25 bp, Homo sapien
cagagagactgctcccaagggattc

SEQ ID NO: 1133458 - DNA, 25 bp, Homo sapien
gagtgaatacacatagggctgcctt

SEQ ID NO: 1133459 - DNA, 25 bp, Homo sapien
catccaattcactctcggaggaggc

SEQ ID NO: 1133460 - DNA, 25 bp, Homo sapien
cacaggggccttcatcatccaattc

SEQ ID NO: 1133461 - DNA, 25 bp, Homo sapien
accacaggggccttcatcatccaat

SEQ ID NO: 1133462 - DNA, 25 bp, Homo sapien
ggggccttcatcatccaattcactc

SEQ ID NO: 1133463 - DNA, 25 bp, Homo sapien
gggccgggttgcataatggcagtca

SEQ ID NO: 1133464 - DNA, 25 bp, Homo sapien
cactctcttcgctggaggcctgggt

SEQ ID NO: 1133465 - DNA, 25 bp, Homo sapien
tcctcactctcttcgctggaggcct

SEQ ID NO: 1133466 - DNA, 25 bp, Homo sapien
ggtggaggtcgtcagatgtcccctc

SEQ ID NO: 1133467 - DNA, 25 bp, Homo sapien
gttccagcatggagctgagtgctga

SEQ ID NO: 1133468 - DNA, 25 bp, Homo sapien
tccagccggcggctaaacacatagc

SEQ ID NO: 1133469 - DNA, 25 bp, Homo sapien
tgctgaggtgccgttccagcatgga

SEQ ID NO: 1133470 - DNA, 25 bp, Homo sapien
gagtgctgagcagaaccggtccagc

SEQ ID NO: 1133471 - DNA, 25 bp, Homo sapien
caggtgcctgtagaggatgggctca

SEQ ID NO: 1133472 - DNA, 25 bp, Homo sapien
tctcagggttggacctggaaggcgg

SEQ ID NO: 1133473 - DNA, 25 bp, Homo sapien
aggttcagctgccggtgggatcttc

SEQ ID NO: 1133474 - DNA, 25 bp, Homo sapien
taacggggagttgacaaggtgagct

SEQ ID NO: 1133475 - DNA, 25 bp, Homo sapien
ctgaaggacggggatggcgtgttgg

SEQ ID NO: 1133476 - DNA, 25 bp, Homo sapien
acaggcagccgccacgctgggggag

SEQ ID NO: 1133477 - DNA, 25 bp, Homo sapien
gtgaggtgatagcctggctcccgcc

SEQ ID NO: 1133478 - DNA, 25 bp, Homo sapien
aaggacggggatggcgtgttggcag

SEQ ID NO: 1133479 - DNA, 25 bp, Homo sapien
ttcactggccggcaataagtggcca

SEQ ID NO: 1133480 - DNA, 25 bp, Homo sapien
tagttttggccgagaggcccctaca

SEQ ID NO: 1133481 - DNA, 25 bp, Homo sapien
gcctggcttcttgcggcgcacagag

SEQ ID NO: 1133482 - DNA, 25 bp, Homo sapien
gatgcaggtccgtttaagagtggta

SEQ ID NO: 1133483 - DNA, 25 bp, Homo sapien
ttccctgcacaaacaccaatgtagc

SEQ ID NO: 1133484 - DNA, 25 bp, Homo sapien
gggtcacagccaattcagaaagaag

SEQ ID NO: 1133485 - DNA, 25 bp, Homo sapien
gaactgacctacctcttcctaaaga

SEQ ID NO: 1133486 - DNA, 25 bp, Homo sapien
ggaaggttcaccaggcaaaaagctg

SEQ ID NO: 1133487 - DNA, 25 bp, Homo sapien
gctgctcggcatgttaggctgtgac

SEQ ID NO: 1133488 - DNA, 25 bp, Homo sapien
cagggaacagaggtagctccagtac

SEQ ID NO: 1133489 - DNA, 25 bp, Homo sapien
ctcggcatgttaggctgtgacccag

SEQ ID NO: 1133490 - DNA, 25 bp, Homo sapien
tccttcagggaacagaggtagctcc

SEQ ID NO: 1133491 - DNA, 25 bp, Homo sapien
tgctggcctggtgagtaaaactgag

SEQ ID NO: 1133492 - DNA, 25 bp, Homo sapien
tggaaaccctggagaacttgcctgt

SEQ ID NO: 1133493 - DNA, 25 bp, Homo sapien
cacagggtttatgattaggcccaca

SEQ ID NO: 1133494 - DNA, 25 bp, Homo sapien
taaaactggctgcaggctttactgg

SEQ ID NO: 1133495 - DNA, 25 bp, Homo sapien
taaagttataaaaagcggcagcagc

SEQ ID NO: 1133496 - DNA, 25 bp, Homo sapien
ctccgttgcagtgggcaggcacttt

SEQ ID NO: 1133497 - DNA, 25 bp, Homo sapien
aaagttataaaaagcggcagcagcc

SEQ ID NO: 1133498 - DNA, 25 bp, Homo sapien
gtgctggcggctccgttgcagtggg

SEQ ID NO: 1133499 - DNA, 25 bp, Homo sapien
tacgctgaaccaagactgtgaaaca

SEQ ID NO: 1133500 - DNA, 25 bp, Homo sapien
tacaagggcctaaatcccaagcagc

SEQ ID NO: 1133501 - DNA, 25 bp, Homo sapien
agtactggatttccctggctgtgca

SEQ ID NO: 1133502 - DNA, 25 bp, Homo sapien
caaatcacacacttggtacgctgaa

SEQ ID NO: 1133503 - DNA, 25 bp, Homo sapien
cgaacacgtcttccgggtttgcgat

SEQ ID NO: 1133504 - DNA, 25 bp, Homo sapien
agtgcggcggagtggcccacagcgc

SEQ ID NO: 1133505 - DNA, 25 bp, Homo sapien
cgtcttccgggtttgcgatcgcgga

SEQ ID NO: 1133506 - DNA, 25 bp, Homo sapien
tttgcgatcgcggaggcggtggcgg

SEQ ID NO: 1133507 - DNA, 25 bp, Homo sapien
tggcccgcgggcccgtacactccag

SEQ ID NO: 1133508 - DNA, 25 bp, Homo sapien
tcctggccgggacagcgctgtcaga

SEQ ID NO: 1133509 - DNA, 25 bp, Homo sapien
gtgaagcccaaagctaccaggtgcg

SEQ ID NO: 1133510 - DNA, 25 bp, Homo sapien
taccaggtgcgccaagatcccactg

SEQ ID NO: 1133511 - DNA, 25 bp, Homo sapien
cgcagccagcgggtcagtctcggct

SEQ ID NO: 1133512 - DNA, 25 bp, Homo sapien
ctatcctccatcaggggacctgttt

SEQ ID NO: 1133513 - DNA, 25 bp, Homo sapien
ctccttcacttctatcctccatcag

SEQ ID NO: 1133514 - DNA, 25 bp, Homo sapien
ggttccccgttcagcacctctcagc

SEQ ID NO: 1133515 - DNA, 25 bp, Homo sapien
gttccccgttcagcacctctcagct

SEQ ID NO: 1133516 - DNA, 25 bp, Homo sapien
cgggttccccgttcagcacctctca

SEQ ID NO: 1133517 - DNA, 25 bp, Homo sapien
gggttccccgttcagcacctctcag

SEQ ID NO: 1133518 - DNA, 25 bp, Homo sapien
taatcgggcacaggaactaaggaca

SEQ ID NO: 1133519 - DNA, 25 bp, Homo sapien
taggtggaacccaaagaatctagcc

SEQ ID NO: 1133520 - DNA, 25 bp, Homo sapien
tgttcctgcccctgtagctaggtgg

SEQ ID NO: 1133521 - DNA, 25 bp, Homo sapien
taaggacaaagtggagcagccaagg

SEQ ID NO: 1133522 - DNA, 25 bp, Homo sapien
catgaatacagggtgccaggagaaa

SEQ ID NO: 1133523 - DNA, 25 bp, Homo sapien
atgaatacagggtgccaggagaaaa

SEQ ID NO: 1133524 - DNA, 25 bp, Homo sapien
ccatgaatacagggtgccaggagaa

SEQ ID NO: 1133525 - DNA, 25 bp, Homo sapien
ccagtaagcctcatgtctggcttgg

SEQ ID NO: 1133526 - DNA, 25 bp, Homo sapien
ctgtgaacataggagagagccagta

SEQ ID NO: 1133527 - DNA, 25 bp, Homo sapien
ggcttggaggcctgagaaaaaggag

SEQ ID NO: 1133528 - DNA, 25 bp, Homo sapien
gaaaaaggaggtgctctcatacatc

SEQ ID NO: 1133529 - DNA, 25 bp, Homo sapien
ctgcccagtggagccggatccgtgc

SEQ ID NO: 1133530 - DNA, 25 bp, Homo sapien
cacagaggatggctagggtctgccc

SEQ ID NO: 1133531 - DNA, 25 bp, Homo sapien
gatccgtgcttttcgggagcagaag

SEQ ID NO: 1133532 - DNA, 25 bp, Homo sapien
cagtggagccggatccgtgcttttc

SEQ ID NO: 1133533 - DNA, 25 bp, Homo sapien
ccagcagtgtcagggctcccaccca

SEQ ID NO: 1133534 - DNA, 25 bp, Homo sapien
tgcccggggacaaaggaggcagagc

SEQ ID NO: 1133535 - DNA, 25 bp, Homo sapien
ctgcccggggacaaaggaggcagag

SEQ ID NO: 1133536 - DNA, 25 bp, Homo sapien
tgagtacatgcccagaagcaccgtt

SEQ ID NO: 1133537 - DNA, 25 bp, Homo sapien
tgtagccatcaggtagaccaccagt

SEQ ID NO: 1133538 - DNA, 25 bp, Homo sapien
gcctggaaccatactgagtacatgc

SEQ ID NO: 1133539 - DNA, 25 bp, Homo sapien
atggtagagcttgaggcgagccacc

SEQ ID NO: 1133540 - DNA, 25 bp, Homo sapien
gacgggcagtgccaggcacaggtac

SEQ ID NO: 1133541 - DNA, 25 bp, Homo sapien
ctggatagacgggcagtgccaggca

SEQ ID NO: 1133542 - DNA, 25 bp, Homo sapien
ggatagacgggcagtgccaggcaca

SEQ ID NO: 1133543 - DNA, 25 bp, Homo sapien
tagacgggcagtgccaggcacaggt

SEQ ID NO: 1133544 - DNA, 25 bp, Homo sapien
tttcttcctcggcaagtaggatctg

SEQ ID NO: 1133545 - DNA, 25 bp, Homo sapien
ttcctcggcaagtaggatctggaaa

SEQ ID NO: 1133546 - DNA, 25 bp, Homo sapien
gaaatctggtgcatgatcaccaggg

SEQ ID NO: 1133547 - DNA, 25 bp, Homo sapien
ctggaaatctggtgcatgatcacca

SEQ ID NO: 1133548 - DNA, 25 bp, Homo sapien
tgagacatcgacctgacagacgctg

SEQ ID NO: 1133549 - DNA, 25 bp, Homo sapien
ccctgagtctgctaagtggtccacg

SEQ ID NO: 1133550 - DNA, 25 bp, Homo sapien
cacctagattcagcgttcgcaggaa

SEQ ID NO: 1133551 - DNA, 25 bp, Homo sapien
tggaccagccaagaagtgcgaaaac

SEQ ID NO: 1133552 - DNA, 25 bp, Homo sapien
gagtccagccctcatttgccagctg

SEQ ID NO: 1133553 - DNA, 25 bp, Homo sapien
tggcaccaaactcagccccctcttg

SEQ ID NO: 1133554 - DNA, 25 bp, Homo sapien
aagagagtccagccctcatttgcca

SEQ ID NO: 1133555 - DNA, 25 bp, Homo sapien
ctcagccccctcttggaccaaagag

SEQ ID NO: 1133556 - DNA, 25 bp, Homo sapien
gctgcagcaaggagcggggtggtct

SEQ ID NO: 1133557 - DNA, 25 bp, Homo sapien
agcctggggaactactttcagctgc

SEQ ID NO: 1133558 - DNA, 25 bp, Homo sapien
gggaactactttcagctgcagcaag

SEQ ID NO: 1133559 - DNA, 25 bp, Homo sapien
gggcagcctggggaactactttcag

SEQ ID NO: 1133560 - DNA, 25 bp, Homo sapien
cagcagtctagcatccagtcctcac

SEQ ID NO: 1133561 - DNA, 25 bp, Homo sapien
tcagcagtctagcatccagtcctca

SEQ ID NO: 1133562 - DNA, 25 bp, Homo sapien
ggaggacttccccagatacagagct

SEQ ID NO: 1133563 - DNA, 25 bp, Homo sapien
caagctggtgaactttgcctggccc

SEQ ID NO: 1133564 - DNA, 25 bp, Homo sapien
tgaacaggctttagcacagcggcca

SEQ ID NO: 1133565 - DNA, 25 bp, Homo sapien
tacttctaagctacccggagaggag

SEQ ID NO: 1133566 - DNA, 25 bp, Homo sapien
taagaagcataaagcccaaagcctg

SEQ ID NO: 1133567 - DNA, 25 bp, Homo sapien
actgtttattgcctaagaagcataa

SEQ ID NO: 1133568 - DNA, 25 bp, Homo sapien
tgcctaagaagcataaagcccaaag

SEQ ID NO: 1133569 - DNA, 25 bp, Homo sapien
ttattgcctaagaagcataaagccc

SEQ ID NO: 1133570 - DNA, 25 bp, Homo sapien
gagagcaagtctgatgaggactact

SEQ ID NO: 1133571 - DNA, 25 bp, Homo sapien
caagtctgatgaggactacttggag

SEQ ID NO: 1133572 - DNA, 25 bp, Homo sapien
agtctgatgaggactacttggagtt

SEQ ID NO: 1133573 - DNA, 25 bp, Homo sapien
gagcaagtctgatgaggactacttg

SEQ ID NO: 1133574 - DNA, 25 bp, Homo sapien
cagctgttgatgtcagagcactccc

SEQ ID NO: 1133575 - DNA, 25 bp, Homo sapien
gggtggagctactgcacaaccagcc

SEQ ID NO: 1133576 - DNA, 25 bp, Homo sapien
caagtcaaccttggcagtcagtgaa

SEQ ID NO: 1133577 - DNA, 25 bp, Homo sapien
aaagtcttgaccgaagggcagccct

SEQ ID NO: 1133578 - DNA, 25 bp, Homo sapien
taggctggcaaatcttggagcctct

SEQ ID NO: 1133579 - DNA, 25 bp, Homo sapien
ctcccacttgtgtacacctaggctg

SEQ ID NO: 1133580 - DNA, 25 bp, Homo sapien
ggctctgaaaactagacaatgatca

SEQ ID NO: 1133581 - DNA, 25 bp, Homo sapien
cacctaggctggcaaatcttggagc

SEQ ID NO: 1133582 - DNA, 25 bp, Homo sapien
cttcctcgtagctctgctgacaaag

SEQ ID NO: 1133583 - DNA, 25 bp, Homo sapien
cctcgtagctctgctgacaaagcaa

SEQ ID NO: 1133584 - DNA, 25 bp, Homo sapien
gtacttcctcgtagctctgctgaca

SEQ ID NO: 1133585 - DNA, 25 bp, Homo sapien
tcctcgtagctctgctgacaaagca

SEQ ID NO: 1133586 - DNA, 25 bp, Homo sapien
gaaccctgtgttgaaaactgccagg

SEQ ID NO: 1133587 - DNA, 25 bp, Homo sapien
tatgtaagcgcactagaaccctgtg

SEQ ID NO: 1133588 - DNA, 25 bp, Homo sapien
taagaaaaggccgagagatcaccac

SEQ ID NO: 1133589 - DNA, 25 bp, Homo sapien
ggctgccctaccaagagatttgatt

SEQ ID NO: 1133590 - DNA, 25 bp, Homo sapien
tggagttagaagaaccatgggttga

SEQ ID NO: 1133591 - DNA, 25 bp, Homo sapien
gagttagaagaaccatgggttgaag

SEQ ID NO: 1133592 - DNA, 25 bp, Homo sapien
ctggagttagaagaaccatgggttg

SEQ ID NO: 1133593 - DNA, 25 bp, Homo sapien
gttagaagaaccatgggttgaaggc

SEQ ID NO: 1133594 - DNA, 25 bp, Homo sapien
gaatggtctccaccaatgtgcacaa

SEQ ID NO: 1133595 - DNA, 25 bp, Homo sapien
caggacagtgaatctgtagtcccca

SEQ ID NO: 1133596 - DNA, 25 bp, Homo sapien
gagagacagtgaccatgccaggctc

SEQ ID NO: 1133597 - DNA, 25 bp, Homo sapien
tagtccccattaatgatactctcag

SEQ ID NO: 1133598 - DNA, 25 bp, Homo sapien
catgcttataggtatgcatgcacac

SEQ ID NO: 1133599 - DNA, 25 bp, Homo sapien
ggtatgcatgcttataggtatgcat

SEQ ID NO: 1133600 - DNA, 25 bp, Homo sapien
tgcatgcttataggtatgcatgcac

SEQ ID NO: 1133601 - DNA, 25 bp, Homo sapien
tatgcatgcttataggtatgcatgc

SEQ ID NO: 1133602 - DNA, 25 bp, Homo sapien
cacgccgctccctccgctgggatcg

SEQ ID NO: 1133603 - DNA, 25 bp, Homo sapien
gctgggatcgctgcgcctccggctc

SEQ ID NO: 1133604 - DNA, 25 bp, Homo sapien
tggaggcagcgaccgcggtcggtgg

SEQ ID NO: 1133605 - DNA, 25 bp, Homo sapien
gctccccgcaccgatccgcgccagg

SEQ ID NO: 1133606 - DNA, 25 bp, Homo sapien
ctctgtactgtccttgtctccccat

SEQ ID NO: 1133607 - DNA, 25 bp, Homo sapien
ttctctgggaaatactgtccaggac

SEQ ID NO: 1133608 - DNA, 25 bp, Homo sapien
ccaggccacgtacctccttccccat

SEQ ID NO: 1133609 - DNA, 25 bp, Homo sapien
atctgggagccaggccaaggggctg

SEQ ID NO: 1133610 - DNA, 25 bp, Homo sapien
cccagcatctgggagccaggccaag

SEQ ID NO: 1133611 - DNA, 25 bp, Homo sapien
gaggcagaggaaagcagaggtgaga

SEQ ID NO: 1133612 - DNA, 25 bp, Homo sapien
aaagcagaggtgagagcccttccat

SEQ ID NO: 1133613 - DNA, 25 bp, Homo sapien
cccggctcccatgtgatagctcctc

SEQ ID NO: 1133614 - DNA, 25 bp, Homo sapien
gctcccatgtgatagctcctctcag

SEQ ID NO: 1133615 - DNA, 25 bp, Homo sapien
ttgctgagcagtcccggctcccatg

SEQ ID NO: 1133616 - DNA, 25 bp, Homo sapien
tttgctgagcagtcccggctcccat

SEQ ID NO: 1133617 - DNA, 25 bp, Homo sapien
ctctgggtctggcccccattcctgg

SEQ ID NO: 1133618 - DNA, 25 bp, Homo sapien
attcctggcctagtcggcaactcct

SEQ ID NO: 1133619 - DNA, 25 bp, Homo sapien
tcctggcctagtcggcaactcctac

SEQ ID NO: 1133620 - DNA, 25 bp, Homo sapien
ctgggtctggcccccattcctggcc

SEQ ID NO: 1133621 - DNA, 25 bp, Homo sapien
cccagttctgggcattactaactct

SEQ ID NO: 1133622 - DNA, 25 bp, Homo sapien
ggatagtgcctcagttttagggttc

SEQ ID NO: 1133623 - DNA, 25 bp, Homo sapien
ctgctgatctctgggatagtgcctc

SEQ ID NO: 1133624 - DNA, 25 bp, Homo sapien
actaactctgtgaatcttctgaatt

SEQ ID NO: 1133625 - DNA, 25 bp, Homo sapien
tccgctttcggaatggccttcacct

SEQ ID NO: 1133626 - DNA, 25 bp, Homo sapien
cattcttgttctccatacccttcta

SEQ ID NO: 1133627 - DNA, 25 bp, Homo sapien
tgacccactcaacactccgctttcg

SEQ ID NO: 1133628 - DNA, 25 bp, Homo sapien
ttccagaactgttagccggggattc

SEQ ID NO: 1133629 - DNA, 25 bp, Homo sapien
ttgtctgcgtacagagcgccaggcc

SEQ ID NO: 1133630 - DNA, 25 bp, Homo sapien
cttgggcaggtttgtctgcgtacag

SEQ ID NO: 1133631 - DNA, 25 bp, Homo sapien
tcccctttctggccggaggtagctg

SEQ ID NO: 1133632 - DNA, 25 bp, Homo sapien
agctgaaggatcagaagctcatccc

SEQ ID NO: 1133633 - DNA, 25 bp, Homo sapien
cccatcccccatcctagtccagcga

SEQ ID NO: 1133634 - DNA, 25 bp, Homo sapien
gcccatcccccatcctagtccagcg

SEQ ID NO: 1133635 - DNA, 25 bp, Homo sapien
catcccccatcctagtccagcgacc

SEQ ID NO: 1133636 - DNA, 25 bp, Homo sapien
ccatcccccatcctagtccagcgac

SEQ ID NO: 1133637 - DNA, 25 bp, Homo sapien
tgactgggggatgggtgaggactcc

SEQ ID NO: 1133638 - DNA, 25 bp, Homo sapien
ctccccaaagtggaagagttccctg

SEQ ID NO: 1133639 - DNA, 25 bp, Homo sapien
agttccctgatgactgggggatggg

SEQ ID NO: 1133640 - DNA, 25 bp, Homo sapien
tccccaaagtggaagagttccctga

SEQ ID NO: 1133641 - DNA, 25 bp, Homo sapien
acaaattttcggagggcaggcgtct

SEQ ID NO: 1133642 - DNA, 25 bp, Homo sapien
gaagcaaaagtagccaatccaggtg

SEQ ID NO: 1133643 - DNA, 25 bp, Homo sapien
gggccactcggaacatgctgcagta

SEQ ID NO: 1133644 - DNA, 25 bp, Homo sapien
tcagaaacaagtagaggcggcaggc

SEQ ID NO: 1133645 - DNA, 25 bp, Homo sapien
tcgctggtgagttgctgctccagga

SEQ ID NO: 1133646 - DNA, 25 bp, Homo sapien
ggacggaggtagctgtctgacatga

SEQ ID NO: 1133647 - DNA, 25 bp, Homo sapien
cggcaggacggaggtagctgtctga

SEQ ID NO: 1133648 - DNA, 25 bp, Homo sapien
caggacggaggtagctgtctgacat

SEQ ID NO: 1133649 - DNA, 25 bp, Homo sapien
taagcaaaagctgtgtgcagagacc

SEQ ID NO: 1133650 - DNA, 25 bp, Homo sapien
aaggtggtccttgcaatcataactg

SEQ ID NO: 1133651 - DNA, 25 bp, Homo sapien
aaggcttttgcacacgttcatcctg

SEQ ID NO: 1133652 - DNA, 25 bp, Homo sapien
tcccctagcagtcaaagatcacagc

SEQ ID NO: 1133653 - DNA, 25 bp, Homo sapien
taaaatatcctaaatggcccctaga

SEQ ID NO: 1133654 - DNA, 25 bp, Homo sapien
tactgccctggacaattacactgaa

SEQ ID NO: 1133655 - DNA, 25 bp, Homo sapien
tcctacccttagagaattccctgct

SEQ ID NO: 1133656 - DNA, 25 bp, Homo sapien
accttgcttgggtgcaattactgcc

SEQ ID NO: 1133657 - DNA, 25 bp, Homo sapien
ctactccatgtaccctaatttctat

SEQ ID NO: 1133658 - DNA, 25 bp, Homo sapien
tgccttgtttctggccaaactcagt

SEQ ID NO: 1133659 - DNA, 25 bp, Homo sapien
caccctactggtcctctcattttaa

SEQ ID NO: 1133660 - DNA, 25 bp, Homo sapien
cagtaaaggaatacaccctactggt

SEQ ID NO: 1133661 - DNA, 25 bp, Homo sapien
gattcgcagtattattgatcaggct

SEQ ID NO: 1133662 - DNA, 25 bp, Homo sapien
tgtctctgctaagatcaggctctac

SEQ ID NO: 1133663 - DNA, 25 bp, Homo sapien
tgtttccagctactttaccaattca

SEQ ID NO: 1133664 - DNA, 25 bp, Homo sapien
caggctctacccttgatctcctgtg

SEQ ID NO: 1133665 - DNA, 25 bp, Homo sapien
gggactggaggtgggtcgctgccat

SEQ ID NO: 1133666 - DNA, 25 bp, Homo sapien
aggtgggtcgctgccatgaggagag

SEQ ID NO: 1133667 - DNA, 25 bp, Homo sapien
actggaggtgggtcgctgccatgag

SEQ ID NO: 1133668 - DNA, 25 bp, Homo sapien
ggaggtgggtcgctgccatgaggag

SEQ ID NO: 1133669 - DNA, 25 bp, Homo sapien
tagctgcttaaatgggagactatcc

SEQ ID NO: 1133670 - DNA, 25 bp, Homo sapien
gccttgatccgttagtgttacctga

SEQ ID NO: 1133671 - DNA, 25 bp, Homo sapien
gctcagtgagccaggaatttgttca

SEQ ID NO: 1133672 - DNA, 25 bp, Homo sapien
tcaattgagggaagtaggatggaca

SEQ ID NO: 1133673 - DNA, 25 bp, Homo sapien
gggaacttccacaatgtaataggca

SEQ ID NO: 1133674 - DNA, 25 bp, Homo sapien
tcccagggactagtgggtgttcaac

SEQ ID NO: 1133675 - DNA, 25 bp, Homo sapien
tgccacgggctgaactctcagaagt

SEQ ID NO: 1133676 - DNA, 25 bp, Homo sapien
ttaaaagcaatgaccacacgccctg

SEQ ID NO: 1133677 - DNA, 25 bp, Homo sapien
ttcatctaggattgggagttacccc

SEQ ID NO: 1133678 - DNA, 25 bp, Homo sapien
catctggtgactagaaaactcctgg

SEQ ID NO: 1133679 - DNA, 25 bp, Homo sapien
tatttgccagatacggctaggtgct

SEQ ID NO: 1133680 - DNA, 25 bp, Homo sapien
taactgaccggatggttgcctcaat

SEQ ID NO: 1133681 - DNA, 25 bp, Homo sapien
ttgctgggcggtggccctctccgtc

SEQ ID NO: 1133682 - DNA, 25 bp, Homo sapien
gctgaggcaccgtctattgctgggc

SEQ ID NO: 1133683 - DNA, 25 bp, Homo sapien
ggactcactcacaccacggaaactg

SEQ ID NO: 1133684 - DNA, 25 bp, Homo sapien
gtcagctcccttagcgcccagaaga

SEQ ID NO: 1133685 - DNA, 25 bp, Homo sapien
cctcccgtaagttgcggtcgatcat

SEQ ID NO: 1133686 - DNA, 25 bp, Homo sapien
tcgatcatcttgcttcgctccactg

SEQ ID NO: 1133687 - DNA, 25 bp, Homo sapien
cgtcctcccgtaagttgcggtcgat

SEQ ID NO: 1133688 - DNA, 25 bp, Homo sapien
tgccgccttgtcttcggcgctcaac

SEQ ID NO: 1133689 - DNA, 25 bp, Homo sapien
tatgagcaatctactttgccaaacg

SEQ ID NO: 1133690 - DNA, 25 bp, Homo sapien
gcctggccgacattccttattatga

SEQ ID NO: 1133691 - DNA, 25 bp, Homo sapien
tattaataaggagcaaaaacagtgt

SEQ ID NO: 1133692 - DNA, 25 bp, Homo sapien
catggatagctaaactctatgagca

SEQ ID NO: 1133693 - DNA, 25 bp, Homo sapien
tcttcctgtaccaacccttcatttc

SEQ ID NO: 1133694 - DNA, 25 bp, Homo sapien
ctcttcctgtaccaacccttcattt

SEQ ID NO: 1133695 - DNA, 25 bp, Homo sapien
actcttcctgtaccaacccttcatt

SEQ ID NO: 1133696 - DNA, 25 bp, Homo sapien
cagataagacaaggatgccagtgcc

SEQ ID NO: 1133697 - DNA, 25 bp, Homo sapien
taaagccagtttgccagtcagtagg

SEQ ID NO: 1133698 - DNA, 25 bp, Homo sapien
gaacattggaaaccataggcctaga

SEQ ID NO: 1133699 - DNA, 25 bp, Homo sapien
taaatgacatgtgactaacgtgcag

SEQ ID NO: 1133700 - DNA, 25 bp, Homo sapien
cacaatggtgcttttaccagattct

SEQ ID NO: 1133701 - DNA, 25 bp, Homo sapien
ttcatctgtttcacaatggtgcttt

SEQ ID NO: 1133702 - DNA, 25 bp, Homo sapien
ggtgcttttaccagattctccagca

SEQ ID NO: 1133703 - DNA, 25 bp, Homo sapien
atggtgcttttaccagattctccag

SEQ ID NO: 1133704 - DNA, 25 bp, Homo sapien
tctgaatagccatcctcatgaatga

SEQ ID NO: 1133705 - DNA, 25 bp, Homo sapien
cttatgattgcaatgatggactgta

SEQ ID NO: 1133706 - DNA, 25 bp, Homo sapien
tggactgtatagtattgctgtagac

SEQ ID NO: 1133707 - DNA, 25 bp, Homo sapien
aagtcaatctttagccgtcccatgg

SEQ ID NO: 1133708 - DNA, 25 bp, Homo sapien
tctgctgaagcaagcttgtacccca

SEQ ID NO: 1133709 - DNA, 25 bp, Homo sapien
gtttaatcactcctgctagttctgg

SEQ ID NO: 1133710 - DNA, 25 bp, Homo sapien
taaaacaaataattgccgggcatca

SEQ ID NO: 1133711 - DNA, 25 bp, Homo sapien
tatgaagcagaatcattgagctgat

SEQ ID NO: 1133712 - DNA, 25 bp, Homo sapien
ccatgtgcatagcaaatgaacagac

SEQ ID NO: 1133713 - DNA, 25 bp, Homo sapien
aatgaacagactaaattagttccta

SEQ ID NO: 1133714 - DNA, 25 bp, Homo sapien
gaagccaaccatgtgcatagcaaat

SEQ ID NO: 1133715 - DNA, 25 bp, Homo sapien
acttggtgaagccaaccatgtgcat

SEQ ID NO: 1133716 - DNA, 25 bp, Homo sapien
ggtcttcactctcgtccgaagaaca

SEQ ID NO: 1133717 - DNA, 25 bp, Homo sapien
cgaagaacatcttgctgagttggaa

SEQ ID NO: 1133718 - DNA, 25 bp, Homo sapien
gtgtttctacaatgcctgtggtctt

SEQ ID NO: 1133719 - DNA, 25 bp, Homo sapien
gaagtataggtctttgaaggtgaaa

SEQ ID NO: 1133720 - DNA, 25 bp, Homo sapien
ggcacacctagcaaaaaggctaatg

SEQ ID NO: 1133721 - DNA, 25 bp, Homo sapien
cacctagcaaaaaggctaatgactt

SEQ ID NO: 1133722 - DNA, 25 bp, Homo sapien
cacacctagcaaaaaggctaatgac

SEQ ID NO: 1133723 - DNA, 25 bp, Homo sapien
ttggcacacctagcaaaaaggctaa

SEQ ID NO: 1133724 - DNA, 25 bp, Homo sapien
caaattcagcaaggtcacacataca

SEQ ID NO: 1133725 - DNA, 25 bp, Homo sapien
aagaaagcaaattcagcaaggtcac

SEQ ID NO: 1133726 - DNA, 25 bp, Homo sapien
agcaaattcagcaaggtcacacata

SEQ ID NO: 1133727 - DNA, 25 bp, Homo sapien
gaaagcaaattcagcaaggtcacac

SEQ ID NO: 1133728 - DNA, 25 bp, Homo sapien
caaggtcataatcactgagggccac

SEQ ID NO: 1133729 - DNA, 25 bp, Homo sapien
cgtcctcagccagaacaaggtcata

SEQ ID NO: 1133730 - DNA, 25 bp, Homo sapien
gctgtcactccctcaaaacagtgaa

SEQ ID NO: 1133731 - DNA, 25 bp, Homo sapien
tgatctttggccacctacatcaaac

SEQ ID NO: 1133732 - DNA, 25 bp, Homo sapien
ctgtgtattctggataacagatagt

SEQ ID NO: 1133733 - DNA, 25 bp, Homo sapien
agatagttaacggactcctctttat

SEQ ID NO: 1133734 - DNA, 25 bp, Homo sapien
tattctggataacagatagttaacg

SEQ ID NO: 1133735 - DNA, 25 bp, Homo sapien
ggataacagatagttaacggactcc

SEQ ID NO: 1133736 - DNA, 25 bp, Homo sapien
gctataaagccagggaaacgcaaca

SEQ ID NO: 1133737 - DNA, 25 bp, Homo sapien
caaaagcaaagcctgtctcaacaat

SEQ ID NO: 1133738 - DNA, 25 bp, Homo sapien
ctttagagtagccttagaaactggc

SEQ ID NO: 1133739 - DNA, 25 bp, Homo sapien
tacaccatcttgtctacttatagaa

SEQ ID NO: 1133740 - DNA, 25 bp, Homo sapien
gaagtgagtatagatctccttggta

SEQ ID NO: 1133741 - DNA, 25 bp, Homo sapien
caggtgaagtgagtatagatctcct

SEQ ID NO: 1133742 - DNA, 25 bp, Homo sapien
tgagtatagatctccttggtatctt

SEQ ID NO: 1133743 - DNA, 25 bp, Homo sapien
gcacaggtgaagtgagtatagatct

SEQ ID NO: 1133744 - DNA, 25 bp, Homo sapien
aagagaagaatattcttaattagaa

SEQ ID NO: 1133745 - DNA, 25 bp, Homo sapien
gagaagaatattcttaattagaaaa

SEQ ID NO: 1133746 - DNA, 25 bp, Homo sapien
ctagaagagaagaatattcttaatt

SEQ ID NO: 1133747 - DNA, 25 bp, Homo sapien
gaagagaagaatattcttaattaga

SEQ ID NO: 1133748 - DNA, 25 bp, Homo sapien
tattgaagttctagaatgcagcacc

SEQ ID NO: 1133749 - DNA, 25 bp, Homo sapien
catgcttgtagctgccccatgagac

SEQ ID NO: 1133750 - DNA, 25 bp, Homo sapien
cagcaaaaggtgtctggtctcaaca

SEQ ID NO: 1133751 - DNA, 25 bp, Homo sapien
gatgtcttgacgatcgaatcacact

SEQ ID NO: 1133752 - DNA, 25 bp, Homo sapien
tggcaaacagggatttggcaccaca

SEQ ID NO: 1133753 - DNA, 25 bp, Homo sapien
tttctcaacagaaaaggccatgaag

SEQ ID NO: 1133754 - DNA, 25 bp, Homo sapien
ggtgtgtctgtatccaagaagctga

SEQ ID NO: 1133755 - DNA, 25 bp, Homo sapien
gaggcaccatgtacaaaactcccta

SEQ ID NO: 1133756 - DNA, 25 bp, Homo sapien
taaaaactaccaacaaaggcactga

SEQ ID NO: 1133757 - DNA, 25 bp, Homo sapien
cattgtgggcactgaatcaatcgcc

SEQ ID NO: 1133758 - DNA, 25 bp, Homo sapien
taccaaccctgtttacattgtgggc

SEQ ID NO: 1133759 - DNA, 25 bp, Homo sapien
ggcactgcccaaactactgatttga

SEQ ID NO: 1133760 - DNA, 25 bp, Homo sapien
taagtaactaatcaggccaggcaag

SEQ ID NO: 1133761 - DNA, 25 bp, Homo sapien
attataaattgccagccaggtgcgg

SEQ ID NO: 1133762 - DNA, 25 bp, Homo sapien
tgatggtccaaagcataggcacctg

SEQ ID NO: 1133763 - DNA, 25 bp, Homo sapien
tacagcaaggagttctgcaacagga

SEQ ID NO: 1133764 - DNA, 25 bp, Homo sapien
actgccctatcctgacatgttctga

SEQ ID NO: 1133765 - DNA, 25 bp, Homo sapien
catgttctgaagtatgttgttctca

SEQ ID NO: 1133766 - DNA, 25 bp, Homo sapien
agcagaactaactcataaatgttga

SEQ ID NO: 1133767 - DNA, 25 bp, Homo sapien
cataaatgttgagaaaactgggggg

SEQ ID NO: 1133768 - DNA, 25 bp, Homo sapien
catcctaggtttcttgttgtcttaa

SEQ ID NO: 1133769 - DNA, 25 bp, Homo sapien
ggcactttaagtcatgtacaaatgg

SEQ ID NO: 1133770 - DNA, 25 bp, Homo sapien
aatactctgtatccaaagtgtagga

SEQ ID NO: 1133771 - DNA, 25 bp, Homo sapien
gattttgagcttatttgtgcactga

SEQ ID NO: 1133772 - DNA, 25 bp, Homo sapien
gagatacttctatcccagcagtgta

SEQ ID NO: 1133773 - DNA, 25 bp, Homo sapien
tatagcttagtgaatgctggtacac

SEQ ID NO: 1133774 - DNA, 25 bp, Homo sapien
tctggtaccttgtgattctcactag

SEQ ID NO: 1133775 - DNA, 25 bp, Homo sapien
ggaaaacactagcactgggcataca

SEQ ID NO: 1133776 - DNA, 25 bp, Homo sapien
ccagaaggatttcggtgttgggcca

SEQ ID NO: 1133777 - DNA, 25 bp, Homo sapien
ttctgtgaggtcagaagacactgga

SEQ ID NO: 1133778 - DNA, 25 bp, Homo sapien
cctgctaggtaaaagcatgaaaaca

SEQ ID NO: 1133779 - DNA, 25 bp, Homo sapien
ctctggtggtcctgctaggtaaaag

SEQ ID NO: 1133780 - DNA, 25 bp, Homo sapien
ccactgccctctctacccggcacag

SEQ ID NO: 1133781 - DNA, 25 bp, Homo sapien
gtgaagagctcttacctcccactgc

SEQ ID NO: 1133782 - DNA, 25 bp, Homo sapien
gtgaagggtgaagagctcttacctc

SEQ ID NO: 1133783 - DNA, 25 bp, Homo sapien
agggtgaagagctcttacctcccac

SEQ ID NO: 1133784 - DNA, 25 bp, Homo sapien
gaaacagttcctactctggtaataa

SEQ ID NO: 1133785 - DNA, 25 bp, Homo sapien
gatgtgccgtagaccaaagtgtgcc

SEQ ID NO: 1133786 - DNA, 25 bp, Homo sapien
gataaaagcggcacaaaagttgtct

SEQ ID NO: 1133787 - DNA, 25 bp, Homo sapien
tccccacggtgagacataacagcat

SEQ ID NO: 1133788 - DNA, 25 bp, Homo sapien
tcatcaagatcacaacgctaggcag

SEQ ID NO: 1133789 - DNA, 25 bp, Homo sapien
cattatgccgtctctaaatcgtgga

SEQ ID NO: 1133790 - DNA, 25 bp, Homo sapien
tgatgatgtccagctaccaacagag

SEQ ID NO: 1133791 - DNA, 25 bp, Homo sapien
cttaaaaatagtccagccccatcac

SEQ ID NO: 1133792 - DNA, 25 bp, Homo sapien
tgcattgggctgcttgactacaaag

SEQ ID NO: 1133793 - DNA, 25 bp, Homo sapien
tatcacttactgttcccggagcact

SEQ ID NO: 1133794 - DNA, 25 bp, Homo sapien
tgtgtataccatctcaacgcccttt

SEQ ID NO: 1133795 - DNA, 25 bp, Homo sapien
cactgctaggtgtactgtgtatacc

SEQ ID NO: 1133796 - DNA, 25 bp, Homo sapien
cctcagtgtgagttaccagtattgt

SEQ ID NO: 1133797 - DNA, 25 bp, Homo sapien
ggctaccatggaaagcacctcagca

SEQ ID NO: 1133798 - DNA, 25 bp, Homo sapien
tgtgataattaactggtatgagcca

SEQ ID NO: 1133799 - DNA, 25 bp, Homo sapien
cagtattgtgagtacgctggagcag

SEQ ID NO: 1133800 - DNA, 25 bp, Homo sapien
gctccctaaagatggtgcactcctg

SEQ ID NO: 1133801 - DNA, 25 bp, Homo sapien
taggcccttctagaaacaagctgtt

SEQ ID NO: 1133802 - DNA, 25 bp, Homo sapien
caaggcttaccacggatgtcagaca

SEQ ID NO: 1133803 - DNA, 25 bp, Homo sapien
tatctgcagctccaaaaaggtcctt

SEQ ID NO: 1133804 - DNA, 25 bp, Homo sapien
agcgggacccgaaactcgtccagat

SEQ ID NO: 1133805 - DNA, 25 bp, Homo sapien
cctgggcattcagggtcggactccc

SEQ ID NO: 1133806 - DNA, 25 bp, Homo sapien
ggagtcacgcaacaggtgagacccc

SEQ ID NO: 1133807 - DNA, 25 bp, Homo sapien
cctgcaatcgagaggctggtaggcc

SEQ ID NO: 1133808 - DNA, 25 bp, Homo sapien
agcccgggtcctgagggacggcagg

SEQ ID NO: 1133809 - DNA, 25 bp, Homo sapien
agccaagtcactccaagggcccctg

SEQ ID NO: 1133810 - DNA, 25 bp, Homo sapien
tacagcagaaagcccgggtcctgag

SEQ ID NO: 1133811 - DNA, 25 bp, Homo sapien
ggctgcccacgagaagtctgtacag

SEQ ID NO: 1133812 - DNA, 25 bp, Homo sapien
agcgagtccaagctcaaacacagtc

SEQ ID NO: 1133813 - DNA, 25 bp, Homo sapien
caggaattcagcagcgagcgagtcc

SEQ ID NO: 1133814 - DNA, 25 bp, Homo sapien
aggcatactccgtgaaaacccagca

SEQ ID NO: 1133815 - DNA, 25 bp, Homo sapien
ggcagggcaggcatactccgtgaaa

SEQ ID NO: 1133816 - DNA, 25 bp, Homo sapien
tcctcagtcccaggagtgacgtgac

SEQ ID NO: 1133817 - DNA, 25 bp, Homo sapien
tcccaggagtgacgtgactgatggt

SEQ ID NO: 1133818 - DNA, 25 bp, Homo sapien
gtgacgtgactgatggtggctgggc

SEQ ID NO: 1133819 - DNA, 25 bp, Homo sapien
ttgtctaggcaacctcggggagtgg

SEQ ID NO: 1133820 - DNA, 25 bp, Homo sapien
aagaggccctggccacgatttctca

SEQ ID NO: 1133821 - DNA, 25 bp, Homo sapien
agaggccctggccacgatttctcat

SEQ ID NO: 1133822 - DNA, 25 bp, Homo sapien
ccagatggataggatgccatggctg

SEQ ID NO: 1133823 - DNA, 25 bp, Homo sapien
gccagagccagatggataggatgcc

SEQ ID NO: 1133824 - DNA, 25 bp, Homo sapien
ttgggcttgccagagccagatggat

SEQ ID NO: 1133825 - DNA, 25 bp, Homo sapien
ctggcccgcttcttaaagggatatt

SEQ ID NO: 1133826 - DNA, 25 bp, Homo sapien
aggttgaggggcaccaccacagaga

SEQ ID NO: 1133827 - DNA, 25 bp, Homo sapien
ctgaggttgaggggcaccaccacag

SEQ ID NO: 1133828 - DNA, 25 bp, Homo sapien
cagagaggatgccggaggaggtggc

SEQ ID NO: 1133829 - DNA, 25 bp, Homo sapien
caccacagagaggatgccggaggag

SEQ ID NO: 1133830 - DNA, 25 bp, Homo sapien
tcttaccatctgaccaccgaagggt

SEQ ID NO: 1133831 - DNA, 25 bp, Homo sapien
gggtgtccacggctttgaccccaca

SEQ ID NO: 1133832 - DNA, 25 bp, Homo sapien
tgaccccacaagtatcagatgctct

SEQ ID NO: 1133833 - DNA, 25 bp, Homo sapien
ccagctctgggctagatccgtatca

SEQ ID NO: 1133834 - DNA, 25 bp, Homo sapien
tcgagcgggaagtgcttgaggcagg

SEQ ID NO: 1133835 - DNA, 25 bp, Homo sapien
atccatagacgtgcgcaggtcgagc

SEQ ID NO: 1133836 - DNA, 25 bp, Homo sapien
tcggcgatctccttgcatttgccat

SEQ ID NO: 1133837 - DNA, 25 bp, Homo sapien
cagggatcgggcagactgcagcgga

SEQ ID NO: 1133838 - DNA, 25 bp, Homo sapien
tggagacacggggtgagggtgcggg

SEQ ID NO: 1133839 - DNA, 25 bp, Homo sapien
aggagacagccaagcgtgaggtgag

SEQ ID NO: 1133840 - DNA, 25 bp, Homo sapien
gacagccaagcgtgaggtgagggga

SEQ ID NO: 1133841 - DNA, 25 bp, Homo sapien
cagccaagcgtgaggtgaggggaca

SEQ ID NO: 1133842 - DNA, 25 bp, Homo sapien
gccctccgccctcgggcactctcct

SEQ ID NO: 1133843 - DNA, 25 bp, Homo sapien
tccgccctcgggcactctcctacag

SEQ ID NO: 1133844 - DNA, 25 bp, Homo sapien
cgggcactctcctacagagtctggg

SEQ ID NO: 1133845 - DNA, 25 bp, Homo sapien
gccctcgggcactctcctacagagt

SEQ ID NO: 1133846 - DNA, 25 bp, Homo sapien
tccagctgttcaatggggctctcct

SEQ ID NO: 1133847 - DNA, 25 bp, Homo sapien
ctcagccagtgagcgggtgaacagc

SEQ ID NO: 1133848 - DNA, 25 bp, Homo sapien
atacggggcactacggagctcgctc

SEQ ID NO: 1133849 - DNA, 25 bp, Homo sapien
tcctcggggaactcatacggggcac

SEQ ID NO: 1133850 - DNA, 25 bp, Homo sapien
ttcaggaaatcttgcttggcccgaa

SEQ ID NO: 1133851 - DNA, 25 bp, Homo sapien
tgcttggcccgaagcaggatgtctg

SEQ ID NO: 1133852 - DNA, 25 bp, Homo sapien
taggtccgagtcactgtccgtcttc

SEQ ID NO: 1133853 - DNA, 25 bp, Homo sapien
tgtaggtccgagtcactgtccgtct

SEQ ID NO: 1133854 - DNA, 25 bp, Homo sapien
ccagagatggtgacccgctgaaact

SEQ ID NO: 1133855 - DNA, 25 bp, Homo sapien
aactcccgttccagcacatcacgct

SEQ ID NO: 1133856 - DNA, 25 bp, Homo sapien
gctcccgcaggctccggtcaccctg

SEQ ID NO: 1133857 - DNA, 25 bp, Homo sapien
gttccagcacatcacgctcccgcag

SEQ ID NO: 1133858 - DNA, 25 bp, Homo sapien
atgtacttctcccggatgaagagcg

SEQ ID NO: 1133859 - DNA, 25 bp, Homo sapien
tacttctcccggatgaagagcgccc

SEQ ID NO: 1133860 - DNA, 25 bp, Homo sapien
ccctgttcataggtccgggtctcca

SEQ ID NO: 1133861 - DNA, 25 bp, Homo sapien
aagagcgcccgcaccacactcttgg

SEQ ID NO: 1133862 - DNA, 25 bp, Homo sapien
gtgctcatacgggtgctgctccagc

SEQ ID NO: 1133863 - DNA, 25 bp, Homo sapien
gcaccatgcgcagacccaagcccag

SEQ ID NO: 1133864 - DNA, 25 bp, Homo sapien
ggctcacagtgctcatacgggtgct

SEQ ID NO: 1133865 - DNA, 25 bp, Homo sapien
gggtgtagacgtgcaccacaccccg

SEQ ID NO: 1133866 - DNA, 25 bp, Homo sapien
cagccacaaattcctgcaggtcagg

SEQ ID NO: 1133867 - DNA, 25 bp, Homo sapien
tcagcacattgacgtcagccacaaa

SEQ ID NO: 1133868 - DNA, 25 bp, Homo sapien
tggggccattgataatcagggccat

SEQ ID NO: 1133869 - DNA, 25 bp, Homo sapien
ctgcaggtcagggtatggcagctcc

SEQ ID NO: 1133870 - DNA, 25 bp, Homo sapien
cttgcggatgttgtagaaatctcgg

SEQ ID NO: 1133871 - DNA, 25 bp, Homo sapien
cacatgcatctggaacttggagctc

SEQ ID NO: 1133872 - DNA, 25 bp, Homo sapien
gaaatctcggtgtggcactttcttc

SEQ ID NO: 1133873 - DNA, 25 bp, Homo sapien
tgcagccggcggtagcagaatgact

SEQ ID NO: 1133874 - DNA, 25 bp, Homo sapien
cacactcaggtcgtaggccgtgaga

SEQ ID NO: 1133875 - DNA, 25 bp, Homo sapien
ggccgtgagattcatgctctcaaag

SEQ ID NO: 1133876 - DNA, 25 bp, Homo sapien
aaagacctcccgcagcgtctgttca

SEQ ID NO: 1133877 - DNA, 25 bp, Homo sapien
aggtgccgcttcattgcccgcttga

SEQ ID NO: 1133878 - DNA, 25 bp, Homo sapien
ctcggaggacggactccccaatagg

SEQ ID NO: 1133879 - DNA, 25 bp, Homo sapien
gataccctgttgtccgtcttgatga

SEQ ID NO: 1133880 - DNA, 25 bp, Homo sapien
atgaagatctctcggaggacggact

SEQ ID NO: 1133881 - DNA, 25 bp, Homo sapien
caaagcgatggaaagtgttcctgtc

SEQ ID NO: 1133882 - DNA, 25 bp, Homo sapien
cctcgagcgcccgtaaatggagagc

SEQ ID NO: 1133883 - DNA, 25 bp, Homo sapien
agcttgtcccactcatccctcgagc

SEQ ID NO: 1133884 - DNA, 25 bp, Homo sapien
agtgcacgcggtgcatgacggccca

SEQ ID NO: 1133885 - DNA, 25 bp, Homo sapien
atgacggcccagcgcgccagcttgt

SEQ ID NO: 1133886 - DNA, 25 bp, Homo sapien
cagggtgcacagtggcctcgaacag

SEQ ID NO: 1133887 - DNA, 25 bp, Homo sapien
gccagctggcccttggtacggtaca

SEQ ID NO: 1133888 - DNA, 25 bp, Homo sapien
tgcacagtggcctcgaacagtggca

SEQ ID NO: 1133889 - DNA, 25 bp, Homo sapien
tctaagaagagatgcagttccgggt

SEQ ID NO: 1133890 - DNA, 25 bp, Homo sapien
gcaggtggttcaacatggccatgtt

SEQ ID NO: 1133891 - DNA, 25 bp, Homo sapien
caggttgaagacatggttttcaggc

SEQ ID NO: 1133892 - DNA, 25 bp, Homo sapien
ctgcgcaggtggttcaacatggcca

SEQ ID NO: 1133893 - DNA, 25 bp, Homo sapien
taggcatagggtgggttgtcctcct

SEQ ID NO: 1133894 - DNA, 25 bp, Homo sapien
tcagcacaaacgtgtggaagcccct

SEQ ID NO: 1133895 - DNA, 25 bp, Homo sapien
gcacaaacgtgtggaagcccctctg

SEQ ID NO: 1133896 - DNA, 25 bp, Homo sapien
gcctcagcacaaacgtgtggaagcc

SEQ ID NO: 1133897 - DNA, 25 bp, Homo sapien
tggcctcagcacaaacgtgtggaag

SEQ ID NO: 1133898 - DNA, 25 bp, Homo sapien
gatcatcagtggacagggagaccat

SEQ ID NO: 1133899 - DNA, 25 bp, Homo sapien
acaggtactccggtagcggattccg

SEQ ID NO: 1133900 - DNA, 25 bp, Homo sapien
ttgctgagcggagacatggcgatgc

SEQ ID NO: 1133901 - DNA, 25 bp, Homo sapien
caggtagtacaggtactgcaggacg

SEQ ID NO: 1133902 - DNA, 25 bp, Homo sapien
gcctggctgcctgctgggctctgac

SEQ ID NO: 1133903 - DNA, 25 bp, Homo sapien
ccgcccgcctggctgcctgctgggc

SEQ ID NO: 1133904 - DNA, 25 bp, Homo sapien
gcccgcctggctgcctgctgggctc

SEQ ID NO: 1133905 - DNA, 25 bp, Homo sapien
ccgcctggctgcctgctgggctctg

SEQ ID NO: 1133906 - DNA, 25 bp, Homo sapien
ctcatgagcacgctgttgcgggcca

SEQ ID NO: 1133907 - DNA, 25 bp, Homo sapien
tcacacatatcgcaggagctgagct

SEQ ID NO: 1133908 - DNA, 25 bp, Homo sapien
tgggtggcgatgctgtactcctcca

SEQ ID NO: 1133909 - DNA, 25 bp, Homo sapien
gagcttccacacctgggtggcgatg

SEQ ID NO: 1133910 - DNA, 25 bp, Homo sapien
gtagcggtagcccacgcggatgtct

SEQ ID NO: 1133911 - DNA, 25 bp, Homo sapien
tcctggcacagggtctcgtagcggt

SEQ ID NO: 1133912 - DNA, 25 bp, Homo sapien
tctggactgcctgcgtgatgagcgc

SEQ ID NO: 1133913 - DNA, 25 bp, Homo sapien
tgtctggcacattggtccggcggat

SEQ ID NO: 1133914 - DNA, 25 bp, Homo sapien
ctcctctggaatggtctccagcatc

SEQ ID NO: 1133915 - DNA, 25 bp, Homo sapien
ccgcctcctctggaatggtctccag

SEQ ID NO: 1133916 - DNA, 25 bp, Homo sapien
gcctcctctggaatggtctccagca

SEQ ID NO: 1133917 - DNA, 25 bp, Homo sapien
tctggaatggtctccagcatctcac

SEQ ID NO: 1133918 - DNA, 25 bp, Homo sapien
cattgaggccctgggctcatggtga

SEQ ID NO: 1133919 - DNA, 25 bp, Homo sapien
ttgaggccctgggctcatggtgata

SEQ ID NO: 1133920 - DNA, 25 bp, Homo sapien
tgaggccctgggctcatggtgatac

SEQ ID NO: 1133921 - DNA, 25 bp, Homo sapien
tcattgaggccctgggctcatggtg

SEQ ID NO: 1133922 - DNA, 25 bp, Homo sapien
cacaatctggtcaaagctctgggag

SEQ ID NO: 1133923 - DNA, 25 bp, Homo sapien
aagctgacacccaaggagcacgtgg

SEQ ID NO: 1133924 - DNA, 25 bp, Homo sapien
caaaacgtggtaaaagtgctgcgat

SEQ ID NO: 1133925 - DNA, 25 bp, Homo sapien
gcccctcggctacatgaacaagaca

SEQ ID NO: 1133926 - DNA, 25 bp, Homo sapien
aataatctttatttctcatgcacta

SEQ ID NO: 1133927 - DNA, 25 bp, Homo sapien
aaataatctttatttctcatgcact

SEQ ID NO: 1133928 - DNA, 25 bp, Homo sapien
cctctcccaacagaaaccccacctg

SEQ ID NO: 1133929 - DNA, 25 bp, Homo sapien
ctctcccaacagaaaccccacctgc

SEQ ID NO: 1133930 - DNA, 25 bp, Homo sapien
ccctcagaatgcacggtgcctccat

SEQ ID NO: 1133931 - DNA, 25 bp, Homo sapien
cccctcagaatgcacggtgcctcca

SEQ ID NO: 1133932 - DNA, 25 bp, Homo sapien
gtgcagacctgcttgctgaaagagg

SEQ ID NO: 1133933 - DNA, 25 bp, Homo sapien
ctgaagggccttgggtcttgaccag

SEQ ID NO: 1133934 - DNA, 25 bp, Homo sapien
taagtggccaggatgaattggcaag

SEQ ID NO: 1133935 - DNA, 25 bp, Homo sapien
caggagagggcttggccaatgggaa

SEQ ID NO: 1133936 - DNA, 25 bp, Homo sapien
tcagcttcacggtcacctggagcca

SEQ ID NO: 1133937 - DNA, 25 bp, Homo sapien
ctcagcttcacggtcacctggagcc

SEQ ID NO: 1133938 - DNA, 25 bp, Homo sapien
cagcttcacggtcacctggagccat

SEQ ID NO: 1133939 - DNA, 25 bp, Homo sapien
tgcagcaggtattggcctcctggcc

SEQ ID NO: 1133940 - DNA, 25 bp, Homo sapien
ctgcagcaggtattggcctcctggc

SEQ ID NO: 1133941 - DNA, 25 bp, Homo sapien
gcagcaggtattggcctcctggcct

SEQ ID NO: 1133942 - DNA, 25 bp, Homo sapien
cagcaggtattggcctcctggcctg

SEQ ID NO: 1133943 - DNA, 25 bp, Homo sapien
agggacagcccgttaggcgccacct

SEQ ID NO: 1133944 - DNA, 25 bp, Homo sapien
gggcacggctctgaccacagtagag

SEQ ID NO: 1133945 - DNA, 25 bp, Homo sapien
cacctcgcagctacagctctttggg

SEQ ID NO: 1133946 - DNA, 25 bp, Homo sapien
tgggcttttcggttctttgagcagg

SEQ ID NO: 1133947 - DNA, 25 bp, Homo sapien
ctttgggttcacaccattgatacct

SEQ ID NO: 1133948 - DNA, 25 bp, Homo sapien
gggttcacaccattgatacctctga

SEQ ID NO: 1133949 - DNA, 25 bp, Homo sapien
ctgatgacaaatgccaatttgggtt

SEQ ID NO: 1133950 - DNA, 25 bp, Homo sapien
atacctctgatcctgatgacaaatg

SEQ ID NO: 1133951 - DNA, 25 bp, Homo sapien
ttaactgaagccctgttaagcttca

SEQ ID NO: 1133952 - DNA, 25 bp, Homo sapien
actgaagccctgttaagcttcacaa

SEQ ID NO: 1133953 - DNA, 25 bp, Homo sapien
gaagccctgttaagcttcacaaagt

SEQ ID NO: 1133954 - DNA, 25 bp, Homo sapien
atgttaactgaagccctgttaagct

SEQ ID NO: 1133955 - DNA, 25 bp, Homo sapien
gccataaccacgcttgtagcctagt

SEQ ID NO: 1133956 - DNA, 25 bp, Homo sapien
taaccacgcttgtagcctagttcat

SEQ ID NO: 1133957 - DNA, 25 bp, Homo sapien
caagcaatcaaagcgttgtctgtca

SEQ ID NO: 1133958 - DNA, 25 bp, Homo sapien
tcaagcaatcaaagcgttgtctgtc

SEQ ID NO: 1133959 - DNA, 25 bp, Homo sapien
agtggccacgaggatcacaccaggg

SEQ ID NO: 1133960 - DNA, 25 bp, Homo sapien
gggaagaactggaccagcaggatct

SEQ ID NO: 1133961 - DNA, 25 bp, Homo sapien
tcagaaggaggagtacggctctgcg

SEQ ID NO: 1133962 - DNA, 25 bp, Homo sapien
aggagtacggctctgcggaaggcgg

SEQ ID NO: 1133963 - DNA, 25 bp, Homo sapien
ctcagctgggctgaactgcgacctc

SEQ ID NO: 1133964 - DNA, 25 bp, Homo sapien
tcttcaaggtcgtcacttccaaccg

SEQ ID NO: 1133965 - DNA, 25 bp, Homo sapien
ttccaaccaacaggcgcgggaggca

SEQ ID NO: 1133966 - DNA, 25 bp, Homo sapien
tcaaggtcgtcacttccaaccaaca

SEQ ID NO: 1133967 - DNA, 25 bp, Homo sapien
cccagtaccccagtgtcatggacat

SEQ ID NO: 1133968 - DNA, 25 bp, Homo sapien
tgtcccagtaccccagtgtcatgga

SEQ ID NO: 1133969 - DNA, 25 bp, Homo sapien
cgcggatgtcccagtaccccagtgt

SEQ ID NO: 1133970 - DNA, 25 bp, Homo sapien
gatgtcccagtaccccagtgtcatg

SEQ ID NO: 1133971 - DNA, 25 bp, Homo sapien
cctcgtagcttgagtctgtgtattc

SEQ ID NO: 1133972 - DNA, 25 bp, Homo sapien
gggcagagcccggacacaagggtgt

SEQ ID NO: 1133973 - DNA, 25 bp, Homo sapien
agcccggacacaagggtgtcattac

SEQ ID NO: 1133974 - DNA, 25 bp, Homo sapien
gagcccggacacaagggtgtcatta

SEQ ID NO: 1133975 - DNA, 25 bp, Homo sapien
cagagcccggacacaagggtgtcat

SEQ ID NO: 1133976 - DNA, 25 bp, Homo sapien
gaagggacagcctgcagctccagca

SEQ ID NO: 1133977 - DNA, 25 bp, Homo sapien
gaggcctgcagaggtagccacaggt

SEQ ID NO: 1133978 - DNA, 25 bp, Homo sapien
agggaagggacagcctgcagctcca

SEQ ID NO: 1133979 - DNA, 25 bp, Homo sapien
ctcagggaagggacagcctgcagct

SEQ ID NO: 1133980 - DNA, 25 bp, Homo sapien
gagacaggtggatctagaatctgac

SEQ ID NO: 1133981 - DNA, 25 bp, Homo sapien
ccagtggcaagatccctgagacagg

SEQ ID NO: 1133982 - DNA, 25 bp, Homo sapien
caaagaatcccgctgagggctctgg

SEQ ID NO: 1133983 - DNA, 25 bp, Homo sapien
gtttagggaagctctgagggacacc

SEQ ID NO: 1133984 - DNA, 25 bp, Homo sapien
attgggaaagtccaggcccagcttg

SEQ ID NO: 1133985 - DNA, 25 bp, Homo sapien
ttgggaaagtccaggcccagcttga

SEQ ID NO: 1133986 - DNA, 25 bp, Homo sapien
ggaaagtccaggcccagcttgaatt

SEQ ID NO: 1133987 - DNA, 25 bp, Homo sapien
aaagtccaggcccagcttgaatttt

SEQ ID NO: 1133988 - DNA, 25 bp, Homo sapien
tgcagtcagagacacgtcgcacttt

SEQ ID NO: 1133989 - DNA, 25 bp, Homo sapien
atgcagtcagagacacgtcgcactt

SEQ ID NO: 1133990 - DNA, 25 bp, Homo sapien
cagtcagagacacgtcgcactttcc

SEQ ID NO: 1133991 - DNA, 25 bp, Homo sapien
agtcagagacacgtcgcactttccc

SEQ ID NO: 1133992 - DNA, 25 bp, Homo sapien
agaaatactgtcacatgaacaaatg

SEQ ID NO: 1133993 - DNA, 25 bp, Homo sapien
tgtgcccgctcatggcaggcctgac

SEQ ID NO: 1133994 - DNA, 25 bp, Homo sapien
gaattgggcagaagactcctgatcc

SEQ ID NO: 1133995 - DNA, 25 bp, Homo sapien
ggggctgtgtagacaaccaggagtg

SEQ ID NO: 1133996 - DNA, 25 bp, Homo sapien
ctggatagatgggaaaccggggaag

SEQ ID NO: 1133997 - DNA, 25 bp, Homo sapien
tgtgcttgcgggcaatgtagcacag

SEQ ID NO: 1133998 - DNA, 25 bp, Homo sapien
cttgcgggcaatgtagcacaggatg

SEQ ID NO: 1133999 - DNA, 25 bp, Homo sapien
caatgtagcacaggatggcgttgct

SEQ ID NO: 1134000 - DNA, 25 bp, Homo sapien
acaggttgtgcttgcgggcaatgta

SEQ ID NO: 1134001 - DNA, 25 bp, Homo sapien
ctgattggagacgtccatagcctgg

SEQ ID NO: 1134002 - DNA, 25 bp, Homo sapien
aaagtcagggctgtagcagactctg

SEQ ID NO: 1134003 - DNA, 25 bp, Homo sapien
aagtcagggctgtagcagactctgg

SEQ ID NO: 1134004 - DNA, 25 bp, Homo sapien
cagactctggccagctgattggaga

SEQ ID NO: 1134005 - DNA, 25 bp, Homo sapien
accctcagaggatcaatagcagtga

SEQ ID NO: 1134006 - DNA, 25 bp, Homo sapien
gtttaatgatatgacagtcactctg

SEQ ID NO: 1134007 - DNA, 25 bp, Homo sapien
cagtcactctgctacagtacaggga

SEQ ID NO: 1134008 - DNA, 25 bp, Homo sapien
tagcagtgaggagttcaaattgtga

SEQ ID NO: 1134009 - DNA, 25 bp, Homo sapien
tgcgtattccccgaacaggcagatg

SEQ ID NO: 1134010 - DNA, 25 bp, Homo sapien
agtctgcgtattccccgaacaggca

SEQ ID NO: 1134011 - DNA, 25 bp, Homo sapien
tattccccgaacaggcagatggcat

SEQ ID NO: 1134012 - DNA, 25 bp, Homo sapien
gagtctgcgtattccccgaacaggc

SEQ ID NO: 1134013 - DNA, 25 bp, Homo sapien
gtgctgcatcattgtaggaagttcc

SEQ ID NO: 1134014 - DNA, 25 bp, Homo sapien
tgcatcattgtaggaagttcctcca

SEQ ID NO: 1134015 - DNA, 25 bp, Homo sapien
gaagtgctgcatcattgtaggaagt

SEQ ID NO: 1134016 - DNA, 25 bp, Homo sapien
ctgtgagaagtgctgcatcattgta

SEQ ID NO: 1134017 - DNA, 25 bp, Homo sapien
ttgtctccaacaaaccatggcctct

SEQ ID NO: 1134018 - DNA, 25 bp, Homo sapien
gtctccaacaaaccatggcctcttc

SEQ ID NO: 1134019 - DNA, 25 bp, Homo sapien
tgtctccaacaaaccatggcctctt

SEQ ID NO: 1134020 - DNA, 25 bp, Homo sapien
cttgtctccaacaaaccatggcctc

SEQ ID NO: 1134021 - DNA, 25 bp, Homo sapien
ggatgtatggcaaatctctagtgtc

SEQ ID NO: 1134022 - DNA, 25 bp, Homo sapien
tgggctggaatctctgtaacgtagg

SEQ ID NO: 1134023 - DNA, 25 bp, Homo sapien
ccaagaatgtgtgggctggaatctc

SEQ ID NO: 1134024 - DNA, 25 bp, Homo sapien
tctctgtaacgtaggatgtatggca

SEQ ID NO: 1134025 - DNA, 25 bp, Homo sapien
caaatatacggtggaggtcaaggac

SEQ ID NO: 1134026 - DNA, 25 bp, Homo sapien
ttgggctcaaatatacggtggaggt

SEQ ID NO: 1134027 - DNA, 25 bp, Homo sapien
tacggtggaggtcaaggacatcata

SEQ ID NO: 1134028 - DNA, 25 bp, Homo sapien
ggctcaaatatacggtggaggtcaa

SEQ ID NO: 1134029 - DNA, 25 bp, Homo sapien
catctgaaaggaggtaacggaacaa

SEQ ID NO: 1134030 - DNA, 25 bp, Homo sapien
cgataggtataatgtgctgggcaag

SEQ ID NO: 1134031 - DNA, 25 bp, Homo sapien
acgataggtataatgtgctgggcaa

SEQ ID NO: 1134032 - DNA, 25 bp, Homo sapien
aagcatctgaaaggaggtaacggaa

SEQ ID NO: 1134033 - DNA, 25 bp, Homo sapien
aggagaaggtcggtgaatagcagta

SEQ ID NO: 1134034 - DNA, 25 bp, Homo sapien
cagaggagaaggtcggtgaatagca

SEQ ID NO: 1134035 - DNA, 25 bp, Homo sapien
gcagaggagaaggtcggtgaatagc

SEQ ID NO: 1134036 - DNA, 25 bp, Homo sapien
agaaggtcggtgaatagcagtaaaa

SEQ ID NO: 1134037 - DNA, 25 bp, Homo sapien
ggctgctctgcctgcaggcctctca

SEQ ID NO: 1134038 - DNA, 25 bp, Homo sapien
aggctgctctgcctgcaggcctctc

SEQ ID NO: 1134039 - DNA, 25 bp, Homo sapien
gctgctctgcctgcaggcctctcac

SEQ ID NO: 1134040 - DNA, 25 bp, Homo sapien
tgacactcaggtgtgctctgcacga

SEQ ID NO: 1134041 - DNA, 25 bp, Homo sapien
ctaaggattcagagagagccagggc

SEQ ID NO: 1134042 - DNA, 25 bp, Homo sapien
gccagggctgcctattcccaaaggg

SEQ ID NO: 1134043 - DNA, 25 bp, Homo sapien
tctttccaggatcaaatagccgtgt

SEQ ID NO: 1134044 - DNA, 25 bp, Homo sapien
cttgtgtacagaggttttgggagga

SEQ ID NO: 1134045 - DNA, 25 bp, Homo sapien
ctggacttcatgtaggcagagatct

SEQ ID NO: 1134046 - DNA, 25 bp, Homo sapien
gggaggaagcggctggacttcatgt

SEQ ID NO: 1134047 - DNA, 25 bp, Homo sapien
ccttgtgtacagaggttttgggagg

SEQ ID NO: 1134048 - DNA, 25 bp, Homo sapien
gggcctgtaaaccagtcaatgctgt

SEQ ID NO: 1134049 - DNA, 25 bp, Homo sapien
gtgaagaggcccaataaagtcttgg

SEQ ID NO: 1134050 - DNA, 25 bp, Homo sapien
gctttattttgatcaggtaggccta

SEQ ID NO: 1134051 - DNA, 25 bp, Homo sapien
caggtaggcccttcaaagcagatac

SEQ ID NO: 1134052 - DNA, 25 bp, Homo sapien
aatctctatgaacccagctactgcc

SEQ ID NO: 1134053 - DNA, 25 bp, Homo sapien
cccatcataatctctatgaacccag

SEQ ID NO: 1134054 - DNA, 25 bp, Homo sapien
tcataatctctatgaacccagctac

SEQ ID NO: 1134055 - DNA, 25 bp, Homo sapien
ataatctctatgaacccagctactg

SEQ ID NO: 1134056 - DNA, 25 bp, Homo sapien
taaatgaagatctaggcccagaaag

SEQ ID NO: 1134057 - DNA, 25 bp, Homo sapien
gttctctgtgatgggaattccacca

SEQ ID NO: 1134058 - DNA, 25 bp, Homo sapien
gggcatctaagacgtactcactgag

SEQ ID NO: 1134059 - DNA, 25 bp, Homo sapien
gagacctagctctgcctaaccatgg

SEQ ID NO: 1134060 - DNA, 25 bp, Homo sapien
agagaaggtcttgactgccacaaga

SEQ ID NO: 1134061 - DNA, 25 bp, Homo sapien
cattgtgcctattagagagaaggtc

SEQ ID NO: 1134062 - DNA, 25 bp, Homo sapien
gaatcataattaattacattgtgcc

SEQ ID NO: 1134063 - DNA, 25 bp, Homo sapien
ctagaacagaatcataattaattac

SEQ ID NO: 1134064 - DNA, 25 bp, Homo sapien
ctgacagtttggtggatgcctcctt

SEQ ID NO: 1134065 - DNA, 25 bp, Homo sapien
tcaagttgatgcagaaaattgacca

SEQ ID NO: 1134066 - DNA, 25 bp, Homo sapien
tttggagtgaagaagtcccatgatc

SEQ ID NO: 1134067 - DNA, 25 bp, Homo sapien
ctgccgactgcaggatagagaagca

SEQ ID NO: 1134068 - DNA, 25 bp, Homo sapien
ctgtggattctgcagacaggcctca

SEQ ID NO: 1134069 - DNA, 25 bp, Homo sapien
gctcagcgtttgtgagaggcccaga

SEQ ID NO: 1134070 - DNA, 25 bp, Homo sapien
gctggttgctgtggattctgcagac

SEQ ID NO: 1134071 - DNA, 25 bp, Homo sapien
cggggcggggctcagcgtttgtgag

SEQ ID NO: 1134072 - DNA, 25 bp, Homo sapien
tccagtaccccagtgtcatgggcat

SEQ ID NO: 1134073 - DNA, 25 bp, Homo sapien
cccgcggatgttccagtaccccagt

SEQ ID NO: 1134074 - DNA, 25 bp, Homo sapien
gttccagtaccccagtgtcatgggc

SEQ ID NO: 1134075 - DNA, 25 bp, Homo sapien
cgcggatgttccagtaccccagtgt

SEQ ID NO: 1134076 - DNA, 25 bp, Homo sapien
caccgcccagcggaccctggctcac

SEQ ID NO: 1134077 - DNA, 25 bp, Homo sapien
agatggcccacagctcgggtcagag

SEQ ID NO: 1134078 - DNA, 25 bp, Homo sapien
gagagatggcccacagctcgggtca

SEQ ID NO: 1134079 - DNA, 25 bp, Homo sapien
tggagggtccctgactttgtgacga

SEQ ID NO: 1134080 - DNA, 25 bp, Homo sapien
gagggtccctgactttgtgacgact

SEQ ID NO: 1134081 - DNA, 25 bp, Homo sapien
cctcgtagcttgagtctgtgtattc

SEQ ID NO: 1134082 - DNA, 25 bp, Homo sapien
ggggcagggcccagactcgagggtg

SEQ ID NO: 1134083 - DNA, 25 bp, Homo sapien
ggcagggcccagactcgagggtgcc

SEQ ID NO: 1134084 - DNA, 25 bp, Homo sapien
agggcccagactcgagggtgccatt

SEQ ID NO: 1134085 - DNA, 25 bp, Homo sapien
ggcccagactcgagggtgccattac

SEQ ID NO: 1134086 - DNA, 25 bp, Homo sapien
tgagggacacccatcataattaccc

SEQ ID NO: 1134087 - DNA, 25 bp, Homo sapien
gggacacccatcataattacccaga

SEQ ID NO: 1134088 - DNA, 25 bp, Homo sapien
agccctgagggacacccatcataat

SEQ ID NO: 1134089 - DNA, 25 bp, Homo sapien
cacccatcataattacccagacggg

SEQ ID NO: 1134090 - DNA, 25 bp, Homo sapien
cactggcttctgtcataatcaggag

SEQ ID NO: 1134091 - DNA, 25 bp, Homo sapien
ttcagccactggcttctgtcataat

SEQ ID NO: 1134092 - DNA, 25 bp, Homo sapien
caggcccagcttgaatttttcattc

SEQ ID NO: 1134093 - DNA, 25 bp, Homo sapien
tcattcagccactggcttctgtcat

SEQ ID NO: 1134094 - DNA, 25 bp, Homo sapien
atatgcaagggcaaagaggagacca

SEQ ID NO: 1134095 - DNA, 25 bp, Homo sapien
ccatatgcaagggcaaagaggagac

SEQ ID NO: 1134096 - DNA, 25 bp, Homo sapien
tcccatatgcaagggcaaagaggag

SEQ ID NO: 1134097 - DNA, 25 bp, Homo sapien
cttcccatatgcaagggcaaagagg

SEQ ID NO: 1134098 - DNA, 25 bp, Homo sapien
ctggatagatgggaaaccggggaag

SEQ ID NO: 1134099 - DNA, 25 bp, Homo sapien
ggggaagctcagttgggccaccagg

SEQ ID NO: 1134100 - DNA, 25 bp, Homo sapien
ccggggaagctcagttgggccacca

SEQ ID NO: 1134101 - DNA, 25 bp, Homo sapien
ggaagctcagttgggccaccaggct

SEQ ID NO: 1134102 - DNA, 25 bp, Homo sapien
caggttgtgcttgcgggcaatgtac

SEQ ID NO: 1134103 - DNA, 25 bp, Homo sapien
aggttgtgcttgcgggcaatgtacc

SEQ ID NO: 1134104 - DNA, 25 bp, Homo sapien
tccaaaatgtcttcgcgaatctgct

SEQ ID NO: 1134105 - DNA, 25 bp, Homo sapien
ggccagctgcatacggctgtccata

SEQ ID NO: 1134106 - DNA, 25 bp, Homo sapien
aatctgggtcatagcagagtttggc

SEQ ID NO: 1134107 - DNA, 25 bp, Homo sapien
ggctgtccataaactggttctccaa

SEQ ID NO: 1134108 - DNA, 25 bp, Homo sapien
taacactcaccgtgtaggaccgcgg

SEQ ID NO: 1134109 - DNA, 25 bp, Homo sapien
tgaacccaccaagaggaataaacaa

SEQ ID NO: 1134110 - DNA, 25 bp, Homo sapien
ttcactcgtcaccataaatcctgct

SEQ ID NO: 1134111 - DNA, 25 bp, Homo sapien
tggacacaaactctgcagggaaagg

SEQ ID NO: 1134112 - DNA, 25 bp, Homo sapien
taaaatggaccaatctgcatgtggg

SEQ ID NO: 1134113 - DNA, 25 bp, Homo sapien
ctgcatgtgggtggggccaaataag

SEQ ID NO: 1134114 - DNA, 25 bp, Homo sapien
ctgtaaaatggaccaatctgcatgt

SEQ ID NO: 1134115 - DNA, 25 bp, Homo sapien
tctgcatgtgggtggggccaaataa

SEQ ID NO: 1134116 - DNA, 25 bp, Homo sapien
caatcagcactctgtaaaacggacc

SEQ ID NO: 1134117 - DNA, 25 bp, Homo sapien
tcagcactctgtaaaacggaccaat

SEQ ID NO: 1134118 - DNA, 25 bp, Homo sapien
actctgtaaaacggaccaatcagca

SEQ ID NO: 1134119 - DNA, 25 bp, Homo sapien
agcactctgtaaaacggaccaatca

SEQ ID NO: 1134120 - DNA, 25 bp, Homo sapien
caatcagcactctgtaaaaacagac

SEQ ID NO: 1134121 - DNA, 25 bp, Homo sapien
tcctagttgggcagcagtagaatac

SEQ ID NO: 1134122 - DNA, 25 bp, Homo sapien
tatgtcaagagagcactcggaagac

SEQ ID NO: 1134123 - DNA, 25 bp, Homo sapien
tatttggcaggaccacagtcttggc

SEQ ID NO: 1134124 - DNA, 25 bp, Homo sapien
taaaccactgggagagatggcccaa

SEQ ID NO: 1134125 - DNA, 25 bp, Homo sapien
tgcaggtattctggtttcagtttct

SEQ ID NO: 1134126 - DNA, 25 bp, Homo sapien
gcaggtattctggtttcagtttctc

SEQ ID NO: 1134127 - DNA, 25 bp, Homo sapien
ctgcaggtattctggtttcagtttc

SEQ ID NO: 1134128 - DNA, 25 bp, Homo sapien
tgtccccaagaaaccatggctgctt

SEQ ID NO: 1134129 - DNA, 25 bp, Homo sapien
aactgtgagtagagcttcagcattt

SEQ ID NO: 1134130 - DNA, 25 bp, Homo sapien
cttgtccccaagaaaccatggctgc

SEQ ID NO: 1134131 - DNA, 25 bp, Homo sapien
agagcttcagcatttcagggagtgc

SEQ ID NO: 1134132 - DNA, 25 bp, Homo sapien
tatgtgggctgaaacctccataata

SEQ ID NO: 1134133 - DNA, 25 bp, Homo sapien
gaagtatgacaaatctgtggtgtcc

SEQ ID NO: 1134134 - DNA, 25 bp, Homo sapien
aaatctgtggtgtccccatcacacg

SEQ ID NO: 1134135 - DNA, 25 bp, Homo sapien
tggataaggccaaggatatgtgggc

SEQ ID NO: 1134136 - DNA, 25 bp, Homo sapien
ctcaaggacatcataagcgatgaaa

SEQ ID NO: 1134137 - DNA, 25 bp, Homo sapien
tctctcaaggacatcataagcgatg

SEQ ID NO: 1134138 - DNA, 25 bp, Homo sapien
tttctctcaaggacatcataagcga

SEQ ID NO: 1134139 - DNA, 25 bp, Homo sapien
aaggacatcataagcgatgaaatcc

SEQ ID NO: 1134140 - DNA, 25 bp, Homo sapien
taacgggccatagctctcagctctc

SEQ ID NO: 1134141 - DNA, 25 bp, Homo sapien
agtgaacaggagtaaaatcagcgtg

SEQ ID NO: 1134142 - DNA, 25 bp, Homo sapien
tcagaagcctgttggacaaatgcct

SEQ ID NO: 1134143 - DNA, 25 bp, Homo sapien
tgctctcaaacaagttcagcacaca

SEQ ID NO: 1134144 - DNA, 25 bp, Homo sapien
gctggacttcatgtaggcagagatc

SEQ ID NO: 1134145 - DNA, 25 bp, Homo sapien
ttgccccagacagccatctttgtga

SEQ ID NO: 1134146 - DNA, 25 bp, Homo sapien
tcttgggaggaagcggctggacttc

SEQ ID NO: 1134147 - DNA, 25 bp, Homo sapien
tctttgtgaacacaggtcttgggag

SEQ ID NO: 1134148 - DNA, 25 bp, Homo sapien
ccaggcaggccctttaaagcagaca

SEQ ID NO: 1134149 - DNA, 25 bp, Homo sapien
ttccatcaggtaggcctaaggcagg

SEQ ID NO: 1134150 - DNA, 25 bp, Homo sapien
ggagcagggcctgtaaaccagtcaa

SEQ ID NO: 1134151 - DNA, 25 bp, Homo sapien
gcagacacaaccactaacaggaagg

SEQ ID NO: 1134152 - DNA, 25 bp, Homo sapien
gtcccacaatcagctggctgcagga

SEQ ID NO: 1134153 - DNA, 25 bp, Homo sapien
agaagcaggaaagccagcggtatca

SEQ ID NO: 1134154 - DNA, 25 bp, Homo sapien
acaattttggagtgaagtcccacaa

SEQ ID NO: 1134155 - DNA, 25 bp, Homo sapien
agtcccacaatcagctggctgcagg

SEQ ID NO: 1134156 - DNA, 25 bp, Homo sapien
attccgcagacaggcctaaaccgag

SEQ ID NO: 1134157 - DNA, 25 bp, Homo sapien
agacaggcctaaaccgagcagggct

SEQ ID NO: 1134158 - DNA, 25 bp, Homo sapien
ctggttggtgcggattccgcagaca

SEQ ID NO: 1134159 - DNA, 25 bp, Homo sapien
gtgcggattccgcagacaggcctaa

SEQ ID NO: 1134160 - DNA, 25 bp, Homo sapien
cggatgtcccagtaccccagtatca

SEQ ID NO: 1134161 - DNA, 25 bp, Homo sapien
gatgtcccagtaccccagtatcatg

SEQ ID NO: 1134162 - DNA, 25 bp, Homo sapien
cgcggatgtcccagtaccccagtat

SEQ ID NO: 1134163 - DNA, 25 bp, Homo sapien
tcccagtaccccagtatcatgggca

SEQ ID NO: 1134164 - DNA, 25 bp, Homo sapien
cccgcaggtcgcgtcagagatggag

SEQ ID NO: 1134165 - DNA, 25 bp, Homo sapien
atggcccgcaggtcgcgtcagagat

SEQ ID NO: 1134166 - DNA, 25 bp, Homo sapien
cgcaggtcgcgtcagagatggaggg

SEQ ID NO: 1134167 - DNA, 25 bp, Homo sapien
agatggcccgcaggtcgcgtcagag

SEQ ID NO: 1134168 - DNA, 25 bp, Homo sapien
ccaggagcaggcggatggcgtgggc

SEQ ID NO: 1134169 - DNA, 25 bp, Homo sapien
tcatagcttgagtctgtgtattcca

SEQ ID NO: 1134170 - DNA, 25 bp, Homo sapien
cctcatagcttgagtctgtgtattc

SEQ ID NO: 1134171 - DNA, 25 bp, Homo sapien
tgtgtattccaggagcaggcggatg

SEQ ID NO: 1134172 - DNA, 25 bp, Homo sapien
agagcccgaacacgagggtgccatt

SEQ ID NO: 1134173 - DNA, 25 bp, Homo sapien
gcagagcccgaacacgagggtgcca

SEQ ID NO: 1134174 - DNA, 25 bp, Homo sapien
tgagtgggcagagcccgaacacgag

SEQ ID NO: 1134175 - DNA, 25 bp, Homo sapien
agcccgaacacgagggtgccattac

SEQ ID NO: 1134176 - DNA, 25 bp, Homo sapien
caggggaggcctgcagaggcagcca

SEQ ID NO: 1134177 - DNA, 25 bp, Homo sapien
agctccagcaggggaggcctgcaga

SEQ ID NO: 1134178 - DNA, 25 bp, Homo sapien
gaagagacagcctgcagctccagca

SEQ ID NO: 1134179 - DNA, 25 bp, Homo sapien
ggctcagggaagagacagcctgcag

SEQ ID NO: 1134180 - DNA, 25 bp, Homo sapien
cagggttcagggacaaagaatcccg

SEQ ID NO: 1134181 - DNA, 25 bp, Homo sapien
ccagtggcaagatccctgagacagg

SEQ ID NO: 1134182 - DNA, 25 bp, Homo sapien
gagacaggtggatctagaatctgac

SEQ ID NO: 1134183 - DNA, 25 bp, Homo sapien
caaagaatcccgctgagggctctgg

SEQ ID NO: 1134184 - DNA, 25 bp, Homo sapien
attgggaaagtccaggcccagcttg

SEQ ID NO: 1134185 - DNA, 25 bp, Homo sapien
gaatttttcattcagccactggctt

SEQ ID NO: 1134186 - DNA, 25 bp, Homo sapien
caggcccagcttgaatttttcattc

SEQ ID NO: 1134187 - DNA, 25 bp, Homo sapien
gtccaggcccagcttgaatttttca

SEQ ID NO: 1134188 - DNA, 25 bp, Homo sapien
tgtcacatgaacgaatgcaggtgga

SEQ ID NO: 1134189 - DNA, 25 bp, Homo sapien
tgcagtcagagacacgttgcacttt

SEQ ID NO: 1134190 - DNA, 25 bp, Homo sapien
ctgatcttaacacctctaagctggg

SEQ ID NO: 1134191 - DNA, 25 bp, Homo sapien
gcaggtggacacagaacatcatgga

SEQ ID NO: 1134192 - DNA, 25 bp, Homo sapien
gaaaccggcgaagctcagttgggcc

SEQ ID NO: 1134193 - DNA, 25 bp, Homo sapien
ctggatggatgggaaaccggcgaag

SEQ ID NO: 1134194 - DNA, 25 bp, Homo sapien
cgaagctcagttgggccaccaggct

SEQ ID NO: 1134195 - DNA, 25 bp, Homo sapien
atggatgggaaaccggcgaagctca

SEQ ID NO: 1134196 - DNA, 25 bp, Homo sapien
gttgtgcttgcgggcaatgtagcac

SEQ ID NO: 1134197 - DNA, 25 bp, Homo sapien
acaggttgtgcttgcgggcaatgta

SEQ ID NO: 1134198 - DNA, 25 bp, Homo sapien
ttgtgcttgcgggcaatgtagcaca

SEQ ID NO: 1134199 - DNA, 25 bp, Homo sapien
gcccagctgcatatggttgtccatg

SEQ ID NO: 1134200 - DNA, 25 bp, Homo sapien
ggattgtagcagatcatgcccagct

SEQ ID NO: 1134201 - DNA, 25 bp, Homo sapien
gattgtagcagatcatgcccagctg

SEQ ID NO: 1134202 - DNA, 25 bp, Homo sapien
tggattgtagcagatcatgcccagc

SEQ ID NO: 1134203 - DNA, 25 bp, Homo sapien
cctccaagtactttggcttcagttt

SEQ ID NO: 1134204 - DNA, 25 bp, Homo sapien
gttcctccaagtactttggcttcag

SEQ ID NO: 1134205 - DNA, 25 bp, Homo sapien
tcagggagttcctccaagtactttg

SEQ ID NO: 1134206 - DNA, 25 bp, Homo sapien
cagggagttcctccaagtactttgg

SEQ ID NO: 1134207 - DNA, 25 bp, Homo sapien
gccgcttccccagaaactctgagta

SEQ ID NO: 1134208 - DNA, 25 bp, Homo sapien
cttgtttcctgcaaaccatggccgc

SEQ ID NO: 1134209 - DNA, 25 bp, Homo sapien
ttcctgcaaaccatggccgcttccc

SEQ ID NO: 1134210 - DNA, 25 bp, Homo sapien
tgtttcctgcaaaccatggccgctt

SEQ ID NO: 1134211 - DNA, 25 bp, Homo sapien
ctgcagaaggccaagaatatgtggg

SEQ ID NO: 1134212 - DNA, 25 bp, Homo sapien
tggaggtcaaggacatcatagacga

SEQ ID NO: 1134213 - DNA, 25 bp, Homo sapien
ggtggaggtcaaggacatcatagac

SEQ ID NO: 1134214 - DNA, 25 bp, Homo sapien
cggtggaggtcaaggacatcataga

SEQ ID NO: 1134215 - DNA, 25 bp, Homo sapien
ggaggtcaaggacatcatagacgag

SEQ ID NO: 1134216 - DNA, 25 bp, Homo sapien
gctggacttcatgtaggcagagatc

SEQ ID NO: 1134217 - DNA, 25 bp, Homo sapien
tgttgccccagacagccatctttga

SEQ ID NO: 1134218 - DNA, 25 bp, Homo sapien
tcttgggaggaagcggctggacttc

SEQ ID NO: 1134219 - DNA, 25 bp, Homo sapien
tctttgagaacacaggtcttgggag

SEQ ID NO: 1134220 - DNA, 25 bp, Homo sapien
caatgaagtcttgggagtaaagatg

SEQ ID NO: 1134221 - DNA, 25 bp, Homo sapien
acaggagaaaggaacgaggaggcag

SEQ ID NO: 1134222 - DNA, 25 bp, Homo sapien
aacaggagaaaggaacgaggaggca

SEQ ID NO: 1134223 - DNA, 25 bp, Homo sapien
caggctgagtatgggctcctcactc

SEQ ID NO: 1134224 - DNA, 25 bp, Homo sapien
ccaggcaggccctttaaagcagaca

SEQ ID NO: 1134225 - DNA, 25 bp, Homo sapien
ggagcagggcctgtaaaccagtcaa

SEQ ID NO: 1134226 - DNA, 25 bp, Homo sapien
ttccatcaggtaggcctaaggcagg

SEQ ID NO: 1134227 - DNA, 25 bp, Homo sapien
gcagacacaaccactaacaggaagg

SEQ ID NO: 1134228 - DNA, 25 bp, Homo sapien
agcgggaaaggccagcggtatcatt

SEQ ID NO: 1134229 - DNA, 25 bp, Homo sapien
gaccttgacagtttgttggaagccc

SEQ ID NO: 1134230 - DNA, 25 bp, Homo sapien
gcaggacagagaagcgggaaaggcc

SEQ ID NO: 1134231 - DNA, 25 bp, Homo sapien
ttcttctctctagaccttgacagtt

SEQ ID NO: 1134232 - DNA, 25 bp, Homo sapien
gtgggaccgtaatgcccgcccgagc

SEQ ID NO: 1134233 - DNA, 25 bp, Homo sapien
agtgggaccgtaatgcccgcccgag

SEQ ID NO: 1134234 - DNA, 25 bp, Homo sapien
atcagtgggaccgtaatgcccgccc

SEQ ID NO: 1134235 - DNA, 25 bp, Homo sapien
catatcagtgggaccgtaatgcccg

SEQ ID NO: 1134236 - DNA, 25 bp, Homo sapien
taccttgagcgtaatcatcagagac

SEQ ID NO: 1134237 - DNA, 25 bp, Homo sapien
tagacagaacgcatgaccactttac

SEQ ID NO: 1134238 - DNA, 25 bp, Homo sapien
aatgagccgaaccacctatgcaaag

SEQ ID NO: 1134239 - DNA, 25 bp, Homo sapien
tataatggtgttcggctgcagtcag

SEQ ID NO: 1134240 - DNA, 25 bp, Homo sapien
tattcgttctctcggttttgacaca

SEQ ID NO: 1134241 - DNA, 25 bp, Homo sapien
ggtccggcacacagtatccagattc

SEQ ID NO: 1134242 - DNA, 25 bp, Homo sapien
ttctttggctggtccggcacacagt

SEQ ID NO: 1134243 - DNA, 25 bp, Homo sapien
tggctggtccggcacacagtatcca

SEQ ID NO: 1134244 - DNA, 25 bp, Homo sapien
acagaaatcaggtggtcagcaggtg

SEQ ID NO: 1134245 - DNA, 25 bp, Homo sapien
gacacaagtgcctggccctaggaat

SEQ ID NO: 1134246 - DNA, 25 bp, Homo sapien
taaaacattgttaggactccagagg

SEQ ID NO: 1134247 - DNA, 25 bp, Homo sapien
tttgaaacacatagaaccagtactg

SEQ ID NO: 1134248 - DNA, 25 bp, Homo sapien
ttaatctgtaactgaggtctgggtc

SEQ ID NO: 1134249 - DNA, 25 bp, Homo sapien
gtgcgggggatgattgcccttatct

SEQ ID NO: 1134250 - DNA, 25 bp, Homo sapien
cgggggatgattgcccttatcttgt

SEQ ID NO: 1134251 - DNA, 25 bp, Homo sapien
atctgtaactgaggtctgggtcctg

SEQ ID NO: 1134252 - DNA, 25 bp, Homo sapien
ggtgcggattctgcagacaggcatc

SEQ ID NO: 1134253 - DNA, 25 bp, Homo sapien
gagcggggctcagactttgagaggc

SEQ ID NO: 1134254 - DNA, 25 bp, Homo sapien
gtgcggattctgcagacaggcatca

SEQ ID NO: 1134255 - DNA, 25 bp, Homo sapien
aggcatcagcggagcggggctcaga

SEQ ID NO: 1134256 - DNA, 25 bp, Homo sapien
gatgtcccagtaccccagagtcatg

SEQ ID NO: 1134257 - DNA, 25 bp, Homo sapien
gtcccagtaccccagagtcatgggc

SEQ ID NO: 1134258 - DNA, 25 bp, Homo sapien
cccagtaccccagagtcatgggcat

SEQ ID NO: 1134259 - DNA, 25 bp, Homo sapien
ccacggatgtcccagtaccccagag

SEQ ID NO: 1134260 - DNA, 25 bp, Homo sapien
aggccagcccctagtctatactgca

SEQ ID NO: 1134261 - DNA, 25 bp, Homo sapien
aagaggaacggtccctagagccagt

SEQ ID NO: 1134262 - DNA, 25 bp, Homo sapien
gacttggtgactttctctgcaccag

SEQ ID NO: 1134263 - DNA, 25 bp, Homo sapien
tagtctatactgcacgtacccgtcg

SEQ ID NO: 1134264 - DNA, 25 bp, Homo sapien
tctgtgtattccaggagcaagcgga

SEQ ID NO: 1134265 - DNA, 25 bp, Homo sapien
gagtctgtgtattccaggagcaagc

SEQ ID NO: 1134266 - DNA, 25 bp, Homo sapien
tgtgtattccaggagcaagcggatg

SEQ ID NO: 1134267 - DNA, 25 bp, Homo sapien
tcccccagcgtgtacttcttttcca

SEQ ID NO: 1134268 - DNA, 25 bp, Homo sapien
cttggtgccaactcagcgtgagtgg

SEQ ID NO: 1134269 - DNA, 25 bp, Homo sapien
acatcccagggttcagggagaaaga

SEQ ID NO: 1134270 - DNA, 25 bp, Homo sapien
caacccaattagacagggtgtccag

SEQ ID NO: 1134271 - DNA, 25 bp, Homo sapien
ccacatcccagggttcagggagaaa

SEQ ID NO: 1134272 - DNA, 25 bp, Homo sapien
cttgcaaggccagagggctcactca

SEQ ID NO: 1134273 - DNA, 25 bp, Homo sapien
gaatttttcattcagccactggctt

SEQ ID NO: 1134274 - DNA, 25 bp, Homo sapien
caggcccagcttgaatttttcattc

SEQ ID NO: 1134275 - DNA, 25 bp, Homo sapien
attgggaaagtccaggcccagcttg

SEQ ID NO: 1134276 - DNA, 25 bp, Homo sapien
gtccaggcccagcttgaatttttca

SEQ ID NO: 1134277 - DNA, 25 bp, Homo sapien
actcctgatcttaacacctctaagg

SEQ ID NO: 1134278 - DNA, 25 bp, Homo sapien
agctgggacacagaacatcatgcaa

SEQ ID NO: 1134279 - DNA, 25 bp, Homo sapien
gggacacagaacatcatgcaagggc

SEQ ID NO: 1134280 - DNA, 25 bp, Homo sapien
gctcatggcaggcctgagatagaaa

SEQ ID NO: 1134281 - DNA, 25 bp, Homo sapien
gcaagggcagagaggagaccagggc

SEQ ID NO: 1134282 - DNA, 25 bp, Homo sapien
ttcccatatgcaagggcagagagga

SEQ ID NO: 1134283 - DNA, 25 bp, Homo sapien
tatgcaagggcagagaggagaccag

SEQ ID NO: 1134284 - DNA, 25 bp, Homo sapien
cttcccatatgcaagggcagagagg

SEQ ID NO: 1134285 - DNA, 25 bp, Homo sapien
ggggaagctcagttgggccaccagg

SEQ ID NO: 1134286 - DNA, 25 bp, Homo sapien
ccggggaagctcagttgggccacca

SEQ ID NO: 1134287 - DNA, 25 bp, Homo sapien
ggaagctcagttgggccaccaggct

SEQ ID NO: 1134288 - DNA, 25 bp, Homo sapien
ctggatagatgggaaaccggggaag

SEQ ID NO: 1134289 - DNA, 25 bp, Homo sapien
acaggttgtgcttgcgggcaatgta

SEQ ID NO: 1134290 - DNA, 25 bp, Homo sapien
agactcaatctcagcatcacagccc

SEQ ID NO: 1134291 - DNA, 25 bp, Homo sapien
gctccatgtggttatccataacctg

SEQ ID NO: 1134292 - DNA, 25 bp, Homo sapien
catgtggttatccataacctggttc

SEQ ID NO: 1134293 - DNA, 25 bp, Homo sapien
cagctccatgtggttatccataacc

SEQ ID NO: 1134294 - DNA, 25 bp, Homo sapien
ggttatccataacctggttctccaa

SEQ ID NO: 1134295 - DNA, 25 bp, Homo sapien
aaaatctgggtcatagcacagtctg

SEQ ID NO: 1134296 - DNA, 25 bp, Homo sapien
aaatctgggtcatagcacagtctga

SEQ ID NO: 1134297 - DNA, 25 bp, Homo sapien
aatctgggtcatagcacagtctgac

SEQ ID NO: 1134298 - DNA, 25 bp, Homo sapien
gcagggaaatgggtgactgggagtg

SEQ ID NO: 1134299 - DNA, 25 bp, Homo sapien
ccaaaaggcagggaaatgggtgact

SEQ ID NO: 1134300 - DNA, 25 bp, Homo sapien
cctccctggtctgggccaaaaggca

SEQ ID NO: 1134301 - DNA, 25 bp, Homo sapien
ttggaagtccctccctggtctgggc

SEQ ID NO: 1134302 - DNA, 25 bp, Homo sapien
tttggagaaccaggttatagacgtc

SEQ ID NO: 1134303 - DNA, 25 bp, Homo sapien
gagaagattcgtgtggacattttgg

SEQ ID NO: 1134304 - DNA, 25 bp, Homo sapien
tggccggagtctgctacagacctga

SEQ ID NO: 1134305 - DNA, 25 bp, Homo sapien
ttatagacgtctccagtcagctggc

SEQ ID NO: 1134306 - DNA, 25 bp, Homo sapien
gatcatgaccagttgcatccagttg

SEQ ID NO: 1134307 - DNA, 25 bp, Homo sapien
tagcagatcatgaccagttgcatcc

SEQ ID NO: 1134308 - DNA, 25 bp, Homo sapien
gcagatcatgaccagttgcatccag

SEQ ID NO: 1134309 - DNA, 25 bp, Homo sapien
ggtggtagcagatcatgaccagttg

SEQ ID NO: 1134310 - DNA, 25 bp, Homo sapien
gaatttccaccgtgggatgcctgga

SEQ ID NO: 1134311 - DNA, 25 bp, Homo sapien
aagaaaagaccagtgcgtgcaggaa

SEQ ID NO: 1134312 - DNA, 25 bp, Homo sapien
cagatcccggtgcatgtcaatgaca

SEQ ID NO: 1134313 - DNA, 25 bp, Homo sapien
tgttatgaaaatgcgcagatcccgg

SEQ ID NO: 1134314 - DNA, 25 bp, Homo sapien
cagggagttcctccaagtattttgg

SEQ ID NO: 1134315 - DNA, 25 bp, Homo sapien
cttgtctcctgcaaaccatggccgc

SEQ ID NO: 1134316 - DNA, 25 bp, Homo sapien
gtctcctgcaaaccatggccgcttc

SEQ ID NO: 1134317 - DNA, 25 bp, Homo sapien
agagctttagcttttcagggagttc

SEQ ID NO: 1134318 - DNA, 25 bp, Homo sapien
ctgaagaaggccaagaatgtgtggg

SEQ ID NO: 1134319 - DNA, 25 bp, Homo sapien
tacgcttcatgtcaaggacatcata

SEQ ID NO: 1134320 - DNA, 25 bp, Homo sapien
ggctcaaatatacgcttcatgtcaa

SEQ ID NO: 1134321 - DNA, 25 bp, Homo sapien
acttgggctcaaatatacgcttcat

SEQ ID NO: 1134322 - DNA, 25 bp, Homo sapien
caaatatacgcttcatgtcaaggac

SEQ ID NO: 1134323 - DNA, 25 bp, Homo sapien
cacagggaggttcttggcttgccta

SEQ ID NO: 1134324 - DNA, 25 bp, Homo sapien
catgattcctggcatgaagcccgta

SEQ ID NO: 1134325 - DNA, 25 bp, Homo sapien
tgactgccacccatagatccagagg

SEQ ID NO: 1134326 - DNA, 25 bp, Homo sapien
tcaagtgctggagcatcacacggtc

SEQ ID NO: 1134327 - DNA, 25 bp, Homo sapien
caaacaaaagacctcggaggaattg

SEQ ID NO: 1134328 - DNA, 25 bp, Homo sapien
tgtagctgactttccaaacaaaaga

SEQ ID NO: 1134329 - DNA, 25 bp, Homo sapien
aaaagacctcggaggaattggctgg

SEQ ID NO: 1134330 - DNA, 25 bp, Homo sapien
ctatttgctgttccatgtagctgac

SEQ ID NO: 1134331 - DNA, 25 bp, Homo sapien
gaagctttaaagagcctcgatgcgg

SEQ ID NO: 1134332 - DNA, 25 bp, Homo sapien
gagcctcagggaataagacaagaca

SEQ ID NO: 1134333 - DNA, 25 bp, Homo sapien
gttctagacggcctacaggagcgcg

SEQ ID NO: 1134334 - DNA, 25 bp, Homo sapien
tcagggaagtctatcaggacagggt

SEQ ID NO: 1134335 - DNA, 25 bp, Homo sapien
tttgggtgaaaaacaagtaccatga

SEQ ID NO: 1134336 - DNA, 25 bp, Homo sapien
cactgccagcagattcatcccaggg

SEQ ID NO: 1134337 - DNA, 25 bp, Homo sapien
agcactttgctgtggaccttgctgg

SEQ ID NO: 1134338 - DNA, 25 bp, Homo sapien
caagaccctgttttcgggcagcact

SEQ ID NO: 1134339 - DNA, 25 bp, Homo sapien
gtggaccttgctggactgaacaaag

SEQ ID NO: 1134340 - DNA, 25 bp, Homo sapien
agccgggccgtctgggttcagatcc

SEQ ID NO: 1134341 - DNA, 25 bp, Homo sapien
tgtggtgctcaggagcatggactcc

SEQ ID NO: 1134342 - DNA, 25 bp, Homo sapien
tctgaatttccaagggagcagcact

SEQ ID NO: 1134343 - DNA, 25 bp, Homo sapien
tccagtgacatccttggcatgtgcc

SEQ ID NO: 1134344 - DNA, 25 bp, Homo sapien
aaaggatatgtggagaatcatcaag

SEQ ID NO: 1134345 - DNA, 25 bp, Homo sapien
tgcgatactggcatttccctactcc

SEQ ID NO: 1134346 - DNA, 25 bp, Homo sapien
caagatatgaattgaatcgctgcga

SEQ ID NO: 1134347 - DNA, 25 bp, Homo sapien
tgagttcaagggctgtaggttcatg

SEQ ID NO: 1134348 - DNA, 25 bp, Homo sapien
gggtcagcgctcttgctttgctctt

SEQ ID NO: 1134349 - DNA, 25 bp, Homo sapien
gcacttatgttactggtgtccagct

SEQ ID NO: 1134350 - DNA, 25 bp, Homo sapien
atcaacaacaagatggcccagtggg

SEQ ID NO: 1134351 - DNA, 25 bp, Homo sapien
tgatcagttctgcaagatgcccatc

SEQ ID NO: 1134352 - DNA, 25 bp, Homo sapien
tcccaaacctggagcatttatgcct

SEQ ID NO: 1134353 - DNA, 25 bp, Homo sapien
cctaggcttgtcaagaatctgttca

SEQ ID NO: 1134354 - DNA, 25 bp, Homo sapien
gcaaaaacaatggacaggcccagag

SEQ ID NO: 1134355 - DNA, 25 bp, Homo sapien
gaatctgttcagtccctctccttct

SEQ ID NO: 1134356 - DNA, 25 bp, Homo sapien
caggaagaagcctcagtgccgccag

SEQ ID NO: 1134357 - DNA, 25 bp, Homo sapien
tattgtggagacagcaacaccagtc

SEQ ID NO: 1134358 - DNA, 25 bp, Homo sapien
tcttcggctcccagactgtagctga

SEQ ID NO: 1134359 - DNA, 25 bp, Homo sapien
gctggaggcatcaaacacaggcatc

SEQ ID NO: 1134360 - DNA, 25 bp, Homo sapien
cacgtggctggattcaagatgcaga

SEQ ID NO: 1134361 - DNA, 25 bp, Homo sapien
ctactggtgtccaggagtcactagt

SEQ ID NO: 1134362 - DNA, 25 bp, Homo sapien
gtccaggtcgggtcaccagaccacg

SEQ ID NO: 1134363 - DNA, 25 bp, Homo sapien
agcttcaatggccacagactagcca

SEQ ID NO: 1134364 - DNA, 25 bp, Homo sapien
aggtcgggtcaccagaccacgcagc

SEQ ID NO: 1134365 - DNA, 25 bp, Homo sapien
cacgcagcttcaatggccacagact

SEQ ID NO: 1134366 - DNA, 25 bp, Homo sapien
tgaaggaggccccacggtctcctta

SEQ ID NO: 1134367 - DNA, 25 bp, Homo sapien
aagagctcagcggaaactctgagca

SEQ ID NO: 1134368 - DNA, 25 bp, Homo sapien
ggaaactctgagcaatgctggcagc

SEQ ID NO: 1134369 - DNA, 25 bp, Homo sapien
catcaatgtcaatgcgtttgtgaaa

SEQ ID NO: 1134370 - DNA, 25 bp, Homo sapien
ggcgctggctagcagagccctgagg

SEQ ID NO: 1134371 - DNA, 25 bp, Homo sapien
cacattttcaccacgaccatcatca

SEQ ID NO: 1134372 - DNA, 25 bp, Homo sapien
atcatcatccacttctgctcaggac

SEQ ID NO: 1134373 - DNA, 25 bp, Homo sapien
tcaccacgaccatcatcatccactt

SEQ ID NO: 1134374 - DNA, 25 bp, Homo sapien
acattttcaccacgaccatcatcat

SEQ ID NO: 1134375 - DNA, 25 bp, Homo sapien
tgtccgatcagataagccttgggag

SEQ ID NO: 1134376 - DNA, 25 bp, Homo sapien
gaaatgaggatccatgggtccatgc

SEQ ID NO: 1134377 - DNA, 25 bp, Homo sapien
gccaacaggagattgtccgatcaga

SEQ ID NO: 1134378 - DNA, 25 bp, Homo sapien
ccatgggtccatgccaacaggagat

SEQ ID NO: 1134379 - DNA, 25 bp, Homo sapien
gcccagatgtgtaagcctcaaactg

SEQ ID NO: 1134380 - DNA, 25 bp, Homo sapien
cccagatgtgtaagcctcaaactgc

SEQ ID NO: 1134381 - DNA, 25 bp, Homo sapien
ggacagctcgctttgcacagagaaa

SEQ ID NO: 1134382 - DNA, 25 bp, Homo sapien
caggacagctcgctttgcacagaga

SEQ ID NO: 1134383 - DNA, 25 bp, Homo sapien
acagctcgctttgcacagagaaagg

SEQ ID NO: 1134384 - DNA, 25 bp, Homo sapien
tgcccaggacagctcgctttgcaca

SEQ ID NO: 1134385 - DNA, 25 bp, Homo sapien
aattctccagccaaacaggtccttc

SEQ ID NO: 1134386 - DNA, 25 bp, Homo sapien
tctctgcgcctgctcaattctccag

SEQ ID NO: 1134387 - DNA, 25 bp, Homo sapien
acaggccactgactcatcagcacga

SEQ ID NO: 1134388 - DNA, 25 bp, Homo sapien
gactcatcagcacgaacagcaacct

SEQ ID NO: 1134389 - DNA, 25 bp, Homo sapien
gtgctccatagcaaaccaagatggc

SEQ ID NO: 1134390 - DNA, 25 bp, Homo sapien
gcaaaccaagatggcgccatccgca

SEQ ID NO: 1134391 - DNA, 25 bp, Homo sapien
ctccatagcaaaccaagatggcgcc

SEQ ID NO: 1134392 - DNA, 25 bp, Homo sapien
agcaaaccaagatggcgccatccgc

SEQ ID NO: 1134393 - DNA, 25 bp, Homo sapien
ctaaaaaacagagacagctgggaca

SEQ ID NO: 1134394 - DNA, 25 bp, Homo sapien
taatcctgctccagccaaatctcca

SEQ ID NO: 1134395 - DNA, 25 bp, Homo sapien
atctccactcttgaaaaagccacag

SEQ ID NO: 1134396 - DNA, 25 bp, Homo sapien
caaatctccactcttgaaaaagcca

SEQ ID NO: 1134397 - DNA, 25 bp, Homo sapien
ccaaatctccactcttgaaaaagcc

SEQ ID NO: 1134398 - DNA, 25 bp, Homo sapien
ttctcagggaaagcgtgtagcagga

SEQ ID NO: 1134399 - DNA, 25 bp, Homo sapien
ggctttttctcaagtaatcttctcc

SEQ ID NO: 1134400 - DNA, 25 bp, Homo sapien
tgaatcattttcacctcaggcccct

SEQ ID NO: 1134401 - DNA, 25 bp, Homo sapien
ttctcaagtaatcttctcccattta

SEQ ID NO: 1134402 - DNA, 25 bp, Homo sapien
ctgatgaccctgcttgcttgtgcta

SEQ ID NO: 1134403 - DNA, 25 bp, Homo sapien
gaagaatggagtggcttctgatgac

SEQ ID NO: 1134404 - DNA, 25 bp, Homo sapien
ggttcaagccattttacaagagaaa

SEQ ID NO: 1134405 - DNA, 25 bp, Homo sapien
ctggtttctgggttccatttccctg

SEQ ID NO: 1134406 - DNA, 25 bp, Homo sapien
gatggaccagcaacggtgtgattgc

SEQ ID NO: 1134407 - DNA, 25 bp, Homo sapien
ggaccagcaacggtgtgattgccat

SEQ ID NO: 1134408 - DNA, 25 bp, Homo sapien
agatggaccagcaacggtgtgattg

SEQ ID NO: 1134409 - DNA, 25 bp, Homo sapien
atggaccagcaacggtgtgattgcc

SEQ ID NO: 1134410 - DNA, 25 bp, Homo sapien
tgtgtcataaatggattgtatcctg

SEQ ID NO: 1134411 - DNA, 25 bp, Homo sapien
cacaatattatgtgtcataaatgga

SEQ ID NO: 1134412 - DNA, 25 bp, Homo sapien
gattgtatcctggatctagctagac

SEQ ID NO: 1134413 - DNA, 25 bp, Homo sapien
ggattgtatcctggatctagctaga

SEQ ID NO: 1134414 - DNA, 25 bp, Homo sapien
tttaatactgctaaatggtcaaggg

SEQ ID NO: 1134415 - DNA, 25 bp, Homo sapien
tcggaggcaatttgaccttttatgt

SEQ ID NO: 1134416 - DNA, 25 bp, Homo sapien
tcaagtcggaggcaatttgaccttt

SEQ ID NO: 1134417 - DNA, 25 bp, Homo sapien
tatgttttaatactgctaaatggtc

SEQ ID NO: 1134418 - DNA, 25 bp, Homo sapien
taatgaatacgtgaagagtaggtcc

SEQ ID NO: 1134419 - DNA, 25 bp, Homo sapien
tagtagagccagtgcacgaactcac

SEQ ID NO: 1134420 - DNA, 25 bp, Homo sapien
tactacactgcatcgttactgaggc

SEQ ID NO: 1134421 - DNA, 25 bp, Homo sapien
tattgagcactcactttaggtcagc

SEQ ID NO: 1134422 - DNA, 25 bp, Homo sapien
gaagaggaggtgtgaaacgatggct

SEQ ID NO: 1134423 - DNA, 25 bp, Homo sapien
gaaacgatggcttgattgtcctctg

SEQ ID NO: 1134424 - DNA, 25 bp, Homo sapien
cgatggcttgattgtcctctggcat

SEQ ID NO: 1134425 - DNA, 25 bp, Homo sapien
ggtgtgaaacgatggcttgattgtc

SEQ ID NO: 1134426 - DNA, 25 bp, Homo sapien
aaaccagcaacataaggccgagtcc

SEQ ID NO: 1134427 - DNA, 25 bp, Homo sapien
cttttaaggaccattgtgatcacat

SEQ ID NO: 1134428 - DNA, 25 bp, Homo sapien
tcacattgggcccataaagatcatc

SEQ ID NO: 1134429 - DNA, 25 bp, Homo sapien
actctcccatctcaaggccagtaga

SEQ ID NO: 1134430 - DNA, 25 bp, Homo sapien
atccttctcctaacacattatgttt

SEQ ID NO: 1134431 - DNA, 25 bp, Homo sapien
gttttatagtatggttattgctata

SEQ ID NO: 1134432 - DNA, 25 bp, Homo sapien
ttatagtatggttattgctatacat

SEQ ID NO: 1134433 - DNA, 25 bp, Homo sapien
tttatagtatggttattgctataca

SEQ ID NO: 1134434 - DNA, 25 bp, Homo sapien
tcgaaagtacttatttctcactgaa

SEQ ID NO: 1134435 - DNA, 25 bp, Homo sapien
gaggcctgaacggaattcgaaagta

SEQ ID NO: 1134436 - DNA, 25 bp, Homo sapien
aattccaaggattgctcaacattcc

SEQ ID NO: 1134437 - DNA, 25 bp, Homo sapien
acattccattaaccccaggagctgg

SEQ ID NO: 1134438 - DNA, 25 bp, Homo sapien
ctcgttgtagatgaggcagaaattg

SEQ ID NO: 1134439 - DNA, 25 bp, Homo sapien
cgttgtagatgaggcagaaattgga

SEQ ID NO: 1134440 - DNA, 25 bp, Homo sapien
gtagatgaggcagaaattggaggac

SEQ ID NO: 1134441 - DNA, 25 bp, Homo sapien
ttgtagatgaggcagaaattggagg

SEQ ID NO: 1134442 - DNA, 25 bp, Homo sapien
gggcgagacctctggtaagaaagcc

SEQ ID NO: 1134443 - DNA, 25 bp, Homo sapien
cagcagactcatcgctcagacagga

SEQ ID NO: 1134444 - DNA, 25 bp, Homo sapien
gagtctccagcgagggcgagacctc

SEQ ID NO: 1134445 - DNA, 25 bp, Homo sapien
ttgacccggaattgttcctcagcag

SEQ ID NO: 1134446 - DNA, 25 bp, Homo sapien
gcagcggctctcagacacaggatct

SEQ ID NO: 1134447 - DNA, 25 bp, Homo sapien
gtgcgagtcccttggttctctgcag

SEQ ID NO: 1134448 - DNA, 25 bp, Homo sapien
ggctctcagacacaggatctgagga

SEQ ID NO: 1134449 - DNA, 25 bp, Homo sapien
gggccttctgcacgtgcgagtccct

SEQ ID NO: 1134450 - DNA, 25 bp, Homo sapien
agcaggtgaggtattttcccatagg

SEQ ID NO: 1134451 - DNA, 25 bp, Homo sapien
gtgaggtattttcccataggaggta

SEQ ID NO: 1134452 - DNA, 25 bp, Homo sapien
ctccagcaggtgaggtattttccca

SEQ ID NO: 1134453 - DNA, 25 bp, Homo sapien
caggtgaggtattttcccataggag

SEQ ID NO: 1134454 - DNA, 25 bp, Homo sapien
cgttgctattttggtacccaggaag

SEQ ID NO: 1134455 - DNA, 25 bp, Homo sapien
aactctttgttgtgccgcgttgcta

SEQ ID NO: 1134456 - DNA, 25 bp, Homo sapien
ttcctgtcaacaatgactttctgct

SEQ ID NO: 1134457 - DNA, 25 bp, Homo sapien
aatgactttctgcttagagctgacc

SEQ ID NO: 1134458 - DNA, 25 bp, Homo sapien
tcatgtggcatggtggatcccacag

SEQ ID NO: 1134459 - DNA, 25 bp, Homo sapien
cagcgactggtgctgtcaggctggc

SEQ ID NO: 1134460 - DNA, 25 bp, Homo sapien
ggtggatcccacaggcgggtgggca

SEQ ID NO: 1134461 - DNA, 25 bp, Homo sapien
tgtcaggctggctgtcatgtggcat

SEQ ID NO: 1134462 - DNA, 25 bp, Homo sapien
taggaaccagactacacaggtgatg

SEQ ID NO: 1134463 - DNA, 25 bp, Homo sapien
cacccagctggtgagtaggacgatc

SEQ ID NO: 1134464 - DNA, 25 bp, Homo sapien
tggttccagcatgtccctcaggatg

SEQ ID NO: 1134465 - DNA, 25 bp, Homo sapien
gaattctagaggatggcctagccta

SEQ ID NO: 1134466 - DNA, 25 bp, Homo sapien
gggctgacctgttcagcgctcacta

SEQ ID NO: 1134467 - DNA, 25 bp, Homo sapien
cggcggagcgtctcagaccaggcct

SEQ ID NO: 1134468 - DNA, 25 bp, Homo sapien
aggacatgcctccacggcggagcgt

SEQ ID NO: 1134469 - DNA, 25 bp, Homo sapien
cagcatacactttccaggacatgcc

SEQ ID NO: 1134470 - DNA, 25 bp, Homo sapien
gaccagggacaattaggaaccagat

SEQ ID NO: 1134471 - DNA, 25 bp, Homo sapien
aggaaccagattgccatggttccca

SEQ ID NO: 1134472 - DNA, 25 bp, Homo sapien
ggaccagggacaattaggaaccaga

SEQ ID NO: 1134473 - DNA, 25 bp, Homo sapien
ggatcaccacatggggaccagggac

SEQ ID NO: 1134474 - DNA, 25 bp, Homo sapien
cagcaggcaagtcccctttccattg

SEQ ID NO: 1134475 - DNA, 25 bp, Homo sapien
gccagcaggcaagtcccctttccat

SEQ ID NO: 1134476 - DNA, 25 bp, Homo sapien
ccagcaggcaagtcccctttccatt

SEQ ID NO: 1134477 - DNA, 25 bp, Homo sapien
agcaggcaagtcccctttccattgg

SEQ ID NO: 1134478 - DNA, 25 bp, Homo sapien
cactttcaaggtgagagacagcgtg

SEQ ID NO: 1134479 - DNA, 25 bp, Homo sapien
cagcgtgaagggtggtaaagcagcc

SEQ ID NO: 1134480 - DNA, 25 bp, Homo sapien
tgaagggtggtaaagcagccagcag

SEQ ID NO: 1134481 - DNA, 25 bp, Homo sapien
tttcaaggtgagagacagcgtgaag

SEQ ID NO: 1134482 - DNA, 25 bp, Homo sapien
ctcagtcacctctggatcaatggta

SEQ ID NO: 1134483 - DNA, 25 bp, Homo sapien
ctagaccgagacttcttccaggtgg

SEQ ID NO: 1134484 - DNA, 25 bp, Homo sapien
tcagtcacctctggatcaatggtac

SEQ ID NO: 1134485 - DNA, 25 bp, Homo sapien
ttccaggtggcacccatgctcagtc

SEQ ID NO: 1134486 - DNA, 25 bp, Homo sapien
aaaggagtccagtgttacttgctcc

SEQ ID NO: 1134487 - DNA, 25 bp, Homo sapien
cccattctcggagtgccgaaaggag

SEQ ID NO: 1134488 - DNA, 25 bp, Homo sapien
tgctccctcgtggagcctgagtcag

SEQ ID NO: 1134489 - DNA, 25 bp, Homo sapien
ctgagtcagcaggtttgccggcagc

SEQ ID NO: 1134490 - DNA, 25 bp, Homo sapien
agaggacccaggcaaactttcactt

SEQ ID NO: 1134491 - DNA, 25 bp, Homo sapien
ccgcaccgctgtcctgggatgcgga

SEQ ID NO: 1134492 - DNA, 25 bp, Homo sapien
gctggctgctgcggagtgggcgccc

SEQ ID NO: 1134493 - DNA, 25 bp, Homo sapien
tttccccgggccgagcctcactggc

SEQ ID NO: 1134494 - DNA, 25 bp, Homo sapien
ccgggcgcgtcggccgccctcgctc

SEQ ID NO: 1134495 - DNA, 25 bp, Homo sapien
gcgcgtcggccgccctcgctcgctc

SEQ ID NO: 1134496 - DNA, 25 bp, Homo sapien
ggcgcgtcggccgccctcgctcgct

SEQ ID NO: 1134497 - DNA, 25 bp, Homo sapien
cggccgggcgcgtcggccgccctcg

SEQ ID NO: 1134498 - DNA, 25 bp, Homo sapien
agcgcccggcggcgcccggcgcggt

SEQ ID NO: 1134499 - DNA, 25 bp, Homo sapien
cagcgcccggcggcgcccggcgcgg

SEQ ID NO: 1134500 - DNA, 25 bp, Homo sapien
gcccggcggcgcccggcgcggtcat

SEQ ID NO: 1134501 - DNA, 25 bp, Homo sapien
cgtgggagggcagcgcccggcggcg

SEQ ID NO: 1134502 - DNA, 25 bp, Homo sapien
ggctgatgcccccagattcagggaa

SEQ ID NO: 1134503 - DNA, 25 bp, Homo sapien
tgatgcccccagattcagggaaatg

SEQ ID NO: 1134504 - DNA, 25 bp, Homo sapien
ctggcggctgatgcccccagattca

SEQ ID NO: 1134505 - DNA, 25 bp, Homo sapien
tcctggcggctgatgcccccagatt

SEQ ID NO: 1134506 - DNA, 25 bp, Homo sapien
gagacagaccaacaacagcagggag

SEQ ID NO: 1134507 - DNA, 25 bp, Homo sapien
agacagaccaacaacagcagggagc

SEQ ID NO: 1134508 - DNA, 25 bp, Homo sapien
ggagacagaccaacaacagcaggga

SEQ ID NO: 1134509 - DNA, 25 bp, Homo sapien
gacagaccaacaacagcagggagcc

SEQ ID NO: 1134510 - DNA, 25 bp, Homo sapien
caatcatgtggctacagtactccga

SEQ ID NO: 1134511 - DNA, 25 bp, Homo sapien
gtgtccactcccaatcatgtggcta

SEQ ID NO: 1134512 - DNA, 25 bp, Homo sapien
tgcagagactgcaggtgtccactcc

SEQ ID NO: 1134513 - DNA, 25 bp, Homo sapien
tgtggctacagtactccgacacctc

SEQ ID NO: 1134514 - DNA, 25 bp, Homo sapien
gctggaagcccacagcatccactgc

SEQ ID NO: 1134515 - DNA, 25 bp, Homo sapien
caggcaagcagctggaagcccacag

SEQ ID NO: 1134516 - DNA, 25 bp, Homo sapien
aagcagctggaagcccacagcatcc

SEQ ID NO: 1134517 - DNA, 25 bp, Homo sapien
gcaagcagctggaagcccacagcat

SEQ ID NO: 1134518 - DNA, 25 bp, Homo sapien
atcagtggttgatgttcctgggcaa

SEQ ID NO: 1134519 - DNA, 25 bp, Homo sapien
agaatcagtggttgatgttcctggg

SEQ ID NO: 1134520 - DNA, 25 bp, Homo sapien
gaatcagtggttgatgttcctgggc

SEQ ID NO: 1134521 - DNA, 25 bp, Homo sapien
aatcagtggttgatgttcctgggca

SEQ ID NO: 1134522 - DNA, 25 bp, Homo sapien
aatttggcacgaggtctccatctga

SEQ ID NO: 1134523 - DNA, 25 bp, Homo sapien
tgtaatttggcacgaggtctccatc

SEQ ID NO: 1134524 - DNA, 25 bp, Homo sapien
tcaaatgtaatttggcacgaggtct

SEQ ID NO: 1134525 - DNA, 25 bp, Homo sapien
aatgtaatttggcacgaggtctcca

SEQ ID NO: 1134526 - DNA, 25 bp, Homo sapien
gttatctctgaagcgcatggtgtcc

SEQ ID NO: 1134527 - DNA, 25 bp, Homo sapien
tgctcttcataatccttggtgaagc

SEQ ID NO: 1134528 - DNA, 25 bp, Homo sapien
tgcagctgcacaatggcgatggcat

SEQ ID NO: 1134529 - DNA, 25 bp, Homo sapien
gtcctccattatgtcttgtaccagg

SEQ ID NO: 1134530 - DNA, 25 bp, Homo sapien
gagactccggcagtttacttggtca

SEQ ID NO: 1134531 - DNA, 25 bp, Homo sapien
atgtctacaagtgaatatccaaggg

SEQ ID NO: 1134532 - DNA, 25 bp, Homo sapien
tgagcccagtcttctcattcgtacg

SEQ ID NO: 1134533 - DNA, 25 bp, Homo sapien
tcataatcatcagtgcgacagctgc

SEQ ID NO: 1134534 - DNA, 25 bp, Homo sapien
cttatttgtcaaattcccttggcct

SEQ ID NO: 1134535 - DNA, 25 bp, Homo sapien
tgagcatgaccattggccccatgtc

SEQ ID NO: 1134536 - DNA, 25 bp, Homo sapien
ccccttttgtgagcatgaccattgg

SEQ ID NO: 1134537 - DNA, 25 bp, Homo sapien
gatcagggcccccttttgtgagcat

SEQ ID NO: 1134538 - DNA, 25 bp, Homo sapien
tctcatagaaagttcggacgcaggc

SEQ ID NO: 1134539 - DNA, 25 bp, Homo sapien
gaaaatattccagtccttgtcaagg

SEQ ID NO: 1134540 - DNA, 25 bp, Homo sapien
ttggctggagcattcagcaaagctg

SEQ ID NO: 1134541 - DNA, 25 bp, Homo sapien
gcaactggagaggtgtctcatagaa

SEQ ID NO: 1134542 - DNA, 25 bp, Homo sapien
tggtgagccaccgatggtgctgtcc

SEQ ID NO: 1134543 - DNA, 25 bp, Homo sapien
ggacccaattagtgcccattgcaga

SEQ ID NO: 1134544 - DNA, 25 bp, Homo sapien
gggtcactgctagggatggctttgg

SEQ ID NO: 1134545 - DNA, 25 bp, Homo sapien
tctctggcggctcaaagctctggca

SEQ ID NO: 1134546 - DNA, 25 bp, Homo sapien
ctggagggggaaagctctgtccctt

SEQ ID NO: 1134547 - DNA, 25 bp, Homo sapien
tacatctgccggctgttggcccttt

SEQ ID NO: 1134548 - DNA, 25 bp, Homo sapien
ttggccctttgctgatgcagggagt

SEQ ID NO: 1134549 - DNA, 25 bp, Homo sapien
gaagttgctgggtctggcgggctct

SEQ ID NO: 1134550 - DNA, 25 bp, Homo sapien
ttctggggggtgtgattccagtcct

SEQ ID NO: 1134551 - DNA, 25 bp, Homo sapien
ctgtgtcagtcaaaggaacggagtt

SEQ ID NO: 1134552 - DNA, 25 bp, Homo sapien
gggcgcagtgatgagatcctgggag

SEQ ID NO: 1134553 - DNA, 25 bp, Homo sapien
ctggctgccccttcacttgctggtc

SEQ ID NO: 1134554 - DNA, 25 bp, Homo sapien
ctgcgggctgaaggatccctcggac

SEQ ID NO: 1134555 - DNA, 25 bp, Homo sapien
gggctgaaggatccctcggactgcc

SEQ ID NO: 1134556 - DNA, 25 bp, Homo sapien
ggatccctcggactgcctctcatgg

SEQ ID NO: 1134557 - DNA, 25 bp, Homo sapien
ctgaaggatccctcggactgcctct

SEQ ID NO: 1134558 - DNA, 25 bp, Homo sapien
ggcctccgacggccagcaagaccag

SEQ ID NO: 1134559 - DNA, 25 bp, Homo sapien
ctgtagaacaagaggcctccgacgg

SEQ ID NO: 1134560 - DNA, 25 bp, Homo sapien
agaacaagaggcctccgacggccag

SEQ ID NO: 1134561 - DNA, 25 bp, Homo sapien
gtagaacaagaggcctccgacggcc

SEQ ID NO: 1134562 - DNA, 25 bp, Homo sapien
caggaaagagcatctcactgaggag

SEQ ID NO: 1134563 - DNA, 25 bp, Homo sapien
ctgaggacaggaaagagcatctcac

SEQ ID NO: 1134564 - DNA, 25 bp, Homo sapien
gacaggaaagagcatctcactgagg

SEQ ID NO: 1134565 - DNA, 25 bp, Homo sapien
aggacaggaaagagcatctcactga

SEQ ID NO: 1134566 - DNA, 25 bp, Homo sapien
ccctctggttgctccaagggagaat

SEQ ID NO: 1134567 - DNA, 25 bp, Homo sapien
ccaagggagaatccgctctctgagg

SEQ ID NO: 1134568 - DNA, 25 bp, Homo sapien
tccaagggagaatccgctctctgag

SEQ ID NO: 1134569 - DNA, 25 bp, Homo sapien
aagggagaatccgctctctgaggct

SEQ ID NO: 1134570 - DNA, 25 bp, Homo sapien
ggcagttccacctgtctgtcatcct

SEQ ID NO: 1134571 - DNA, 25 bp, Homo sapien
tggcagttccacctgtctgtcatcc

SEQ ID NO: 1134572 - DNA, 25 bp, Homo sapien
tggctggcgatgtatggaaagggaa

SEQ ID NO: 1134573 - DNA, 25 bp, Homo sapien
ctggctggcgatgtatggaaaggga

SEQ ID NO: 1134574 - DNA, 25 bp, Homo sapien
aatgcagaggtaatagtccctggcc

SEQ ID NO: 1134575 - DNA, 25 bp, Homo sapien
ctagaagcccaatgcagaggtaata

SEQ ID NO: 1134576 - DNA, 25 bp, Homo sapien
cagaggtaatagtccctggcctcag

SEQ ID NO: 1134577 - DNA, 25 bp, Homo sapien
gcccaatgcagaggtaatagtccct

SEQ ID NO: 1134578 - DNA, 25 bp, Homo sapien
gaacgtttgagggacttggccatac

SEQ ID NO: 1134579 - DNA, 25 bp, Homo sapien
tggccatacttagcttagagaattc

SEQ ID NO: 1134580 - DNA, 25 bp, Homo sapien
aaccatatcatataaggaacgtttg

SEQ ID NO: 1134581 - DNA, 25 bp, Homo sapien
catataaggaacgtttgagggactt

SEQ ID NO: 1134582 - DNA, 25 bp, Homo sapien
gctgggcgtcacattttcagaggga

SEQ ID NO: 1134583 - DNA, 25 bp, Homo sapien
tcagagggacattgacaaacgagtg

SEQ ID NO: 1134584 - DNA, 25 bp, Homo sapien
tgaggaacaatagggtcacagctac

SEQ ID NO: 1134585 - DNA, 25 bp, Homo sapien
taagttgtccaagtacagggtagag

SEQ ID NO: 1134586 - DNA, 25 bp, Homo sapien
aatgcggggagggtcgttgaggaca

SEQ ID NO: 1134587 - DNA, 25 bp, Homo sapien
agagaaggaaaggctagtcagcaga

SEQ ID NO: 1134588 - DNA, 25 bp, Homo sapien
agaaggaaaggctagtcagcagagt

SEQ ID NO: 1134589 - DNA, 25 bp, Homo sapien
gggtcgttgaggacatggattggga

SEQ ID NO: 1134590 - DNA, 25 bp, Homo sapien
tggtggacgccccataatgtctcct

SEQ ID NO: 1134591 - DNA, 25 bp, Homo sapien
tctcattcagtcaagggtctgcggg

SEQ ID NO: 1134592 - DNA, 25 bp, Homo sapien
tttacgggaaatcaggccgacgctg

SEQ ID NO: 1134593 - DNA, 25 bp, Homo sapien
cctctgggtgcagggttctttcact

SEQ ID NO: 1134594 - DNA, 25 bp, Homo sapien
gcagggtctcttagcggaggacaaa

SEQ ID NO: 1134595 - DNA, 25 bp, Homo sapien
tgttcagcaggcaggtacagtgttc

SEQ ID NO: 1134596 - DNA, 25 bp, Homo sapien
agtgcaatggcttccttcatgaggg

SEQ ID NO: 1134597 - DNA, 25 bp, Homo sapien
tcaaaggcccatcttcagtcagagc

SEQ ID NO: 1134598 - DNA, 25 bp, Homo sapien
tctcacagtgcgtgagccaatgtcc

SEQ ID NO: 1134599 - DNA, 25 bp, Homo sapien
gcatcaaatatagaggctgtgacta

SEQ ID NO: 1134600 - DNA, 25 bp, Homo sapien
gctgtgactagaaggctaagcccca

SEQ ID NO: 1134601 - DNA, 25 bp, Homo sapien
ttccctaagctgtcggcatcaggac

SEQ ID NO: 1134602 - DNA, 25 bp, Homo sapien
cttcatggacgctattaactcggcc

SEQ ID NO: 1134603 - DNA, 25 bp, Homo sapien
taactcggcctcatggacacacttg

SEQ ID NO: 1134604 - DNA, 25 bp, Homo sapien
tattaactcggcctcatggacacac

SEQ ID NO: 1134605 - DNA, 25 bp, Homo sapien
gacgctattaactcggcctcatgga

SEQ ID NO: 1134606 - DNA, 25 bp, Homo sapien
tctaatgagattgactgattccatc

SEQ ID NO: 1134607 - DNA, 25 bp, Homo sapien
gaccaaagtggaggactgggttctc

SEQ ID NO: 1134608 - DNA, 25 bp, Homo sapien
agaggggcacacttggatctgaacc

SEQ ID NO: 1134609 - DNA, 25 bp, Homo sapien
tcgggaattccgagaggggcacact

SEQ ID NO: 1134610 - DNA, 25 bp, Homo sapien
catgcagtaccttagcagtctgggc

SEQ ID NO: 1134611 - DNA, 25 bp, Homo sapien
gagtgtgacaacataacatccgtga

SEQ ID NO: 1134612 - DNA, 25 bp, Homo sapien
tcacatggcacagctaaggcgattg

SEQ ID NO: 1134613 - DNA, 25 bp, Homo sapien
ccatcacgtgtgtgctggagagcaa

SEQ ID NO: 1134614 - DNA, 25 bp, Homo sapien
ttgtctgttcggcagcccaaggcag

SEQ ID NO: 1134615 - DNA, 25 bp, Homo sapien
cctgcgtcgagctgcgtcggcttct

SEQ ID NO: 1134616 - DNA, 25 bp, Homo sapien
ggtgacgccacgtcaagtactggca

SEQ ID NO: 1134617 - DNA, 25 bp, Homo sapien
caaacacgcacgcaaagcgagggta

SEQ ID NO: 1134618 - DNA, 25 bp, Homo sapien
tcggcgtcctcgatctccttggcct

SEQ ID NO: 1134619 - DNA, 25 bp, Homo sapien
ttctcggcgtcctcgatctccttgg

SEQ ID NO: 1134620 - DNA, 25 bp, Homo sapien
ctcggcgtcctcgatctccttggcc

SEQ ID NO: 1134621 - DNA, 25 bp, Homo sapien
tctcggcgtcctcgatctccttggc

SEQ ID NO: 1134622 - DNA, 25 bp, Homo sapien
cttcttgggcgccttggtgacggtg

SEQ ID NO: 1134623 - DNA, 25 bp, Homo sapien
ttcttgggcgccttggtgacggtgg

SEQ ID NO: 1134624 - DNA, 25 bp, Homo sapien
agccagagcccgggcttgctcgcgt

SEQ ID NO: 1134625 - DNA, 25 bp, Homo sapien
cccagaagtcccaaactagccagag

SEQ ID NO: 1134626 - DNA, 25 bp, Homo sapien
gggcttgctcgcgtcccttccgcga

SEQ ID NO: 1134627 - DNA, 25 bp, Homo sapien
ctcgcgtcccttccgcgaggccgga

SEQ ID NO: 1134628 - DNA, 25 bp, Homo sapien
aatttcttacatatttcgaagtaat

SEQ ID NO: 1134629 - DNA, 25 bp, Homo sapien
tttcttacatatttcgaagtaattg

SEQ ID NO: 1134630 - DNA, 25 bp, Homo sapien
tcttacatatttcgaagtaattgga

SEQ ID NO: 1134631 - DNA, 25 bp, Homo sapien
cttacatatttcgaagtaattggaa

SEQ ID NO: 1134632 - DNA, 25 bp, Homo sapien
ggcgtcttatgtaacagccaagcaa

SEQ ID NO: 1134633 - DNA, 25 bp, Homo sapien
gaaaaaattctggtctatgcacgta

SEQ ID NO: 1134634 - DNA, 25 bp, Homo sapien
gacgtcacttgttgaatgtcccaca

SEQ ID NO: 1134635 - DNA, 25 bp, Homo sapien
cgtaggttgcccttcacatgacagg

SEQ ID NO: 1134636 - DNA, 25 bp, Homo sapien
ctgaggcaggtccaagatgaacagc

SEQ ID NO: 1134637 - DNA, 25 bp, Homo sapien
ttaagccccacaggttaagtacaca

SEQ ID NO: 1134638 - DNA, 25 bp, Homo sapien
tttatggtaagaagcaggagcatgc

SEQ ID NO: 1134639 - DNA, 25 bp, Homo sapien
taagtacacaggcacatcagcggag

SEQ ID NO: 1134640 - DNA, 25 bp, Homo sapien
caacaatagggtgtgctcttgctga

SEQ ID NO: 1134641 - DNA, 25 bp, Homo sapien
aacaatagggtgtgctcttgctgag

SEQ ID NO: 1134642 - DNA, 25 bp, Homo sapien
gtcaacaatagggtgtgctcttgct

SEQ ID NO: 1134643 - DNA, 25 bp, Homo sapien
gtgctcttgctgagcagttcctcaa

SEQ ID NO: 1134644 - DNA, 25 bp, Homo sapien
cagagggattccactaatgccatcg

SEQ ID NO: 1134645 - DNA, 25 bp, Homo sapien
tacgtagttcacactgagccacaca

SEQ ID NO: 1134646 - DNA, 25 bp, Homo sapien
cactcgcaggttccggagagaaaag

SEQ ID NO: 1134647 - DNA, 25 bp, Homo sapien
cacatcattgtggatcagcacatta

SEQ ID NO: 1134648 - DNA, 25 bp, Homo sapien
ggaaacaggtcatggcccaaaagct

SEQ ID NO: 1134649 - DNA, 25 bp, Homo sapien
cccaaaagctttgacgtgaggtctt

SEQ ID NO: 1134650 - DNA, 25 bp, Homo sapien
tgacgtgaggtcaagccagtcttgg

SEQ ID NO: 1134651 - DNA, 25 bp, Homo sapien
taagtactagaagagttggagccat

SEQ ID NO: 1134652 - DNA, 25 bp, Homo sapien
tcctctaacagaatacgcatatttt

SEQ ID NO: 1134653 - DNA, 25 bp, Homo sapien
taacagaatacgcatatttttgtgc

SEQ ID NO: 1134654 - DNA, 25 bp, Homo sapien
acagaatacgcatatttttgtgctc

SEQ ID NO: 1134655 - DNA, 25 bp, Homo sapien
aaatcctctaacagaatacgcatat

SEQ ID NO: 1134656 - DNA, 25 bp, Homo sapien
gaagctgaggagcatcccaaagagg

SEQ ID NO: 1134657 - DNA, 25 bp, Homo sapien
caaagtggccgaaatgccggttcga

SEQ ID NO: 1134658 - DNA, 25 bp, Homo sapien
tatgtgtgagatacggtctttgccc

SEQ ID NO: 1134659 - DNA, 25 bp, Homo sapien
tacggaatcagctctggagcttcag

SEQ ID NO: 1134660 - DNA, 25 bp, Homo sapien
gccattgaaaagtactgctccatag

SEQ ID NO: 1134661 - DNA, 25 bp, Homo sapien
gttgccaacaaattgccattgaaaa

SEQ ID NO: 1134662 - DNA, 25 bp, Homo sapien
ttgccattgaaaagtactgctccat

SEQ ID NO: 1134663 - DNA, 25 bp, Homo sapien
aaattgccattgaaaagtactgctc

SEQ ID NO: 1134664 - DNA, 25 bp, Homo sapien
caccaagatcctgaatgcctagatt

SEQ ID NO: 1134665 - DNA, 25 bp, Homo sapien
agtagggtggacaccaagatcctga

SEQ ID NO: 1134666 - DNA, 25 bp, Homo sapien
accaagatcctgaatgcctagattt

SEQ ID NO: 1134667 - DNA, 25 bp, Homo sapien
aagggagtagtatttagaagctaat

SEQ ID NO: 1134668 - DNA, 25 bp, Homo sapien
gaagggagtagtatttagaagctaa

SEQ ID NO: 1134669 - DNA, 25 bp, Homo sapien
tagaagggagtagtatttagaagct

SEQ ID NO: 1134670 - DNA, 25 bp, Homo sapien
ttagaagggagtagtatttagaagc

SEQ ID NO: 1134671 - DNA, 25 bp, Homo sapien
ttatctcaagggaatcaatctcagg

SEQ ID NO: 1134672 - DNA, 25 bp, Homo sapien
gcaggttttggctgctcccggctct

SEQ ID NO: 1134673 - DNA, 25 bp, Homo sapien
tcaggccagagttgaatccacagcc

SEQ ID NO: 1134674 - DNA, 25 bp, Homo sapien
gcctctgtgtctcaacagtaacagg

SEQ ID NO: 1134675 - DNA, 25 bp, Homo sapien
gttctatgcaaggaaacacggtccc

SEQ ID NO: 1134676 - DNA, 25 bp, Homo sapien
ttctcagatgttaaatagcccagct

SEQ ID NO: 1134677 - DNA, 25 bp, Homo sapien
gaatttcactgctccatgaggaaca

SEQ ID NO: 1134678 - DNA, 25 bp, Homo sapien
taagtatccagtgctactccaggaa

SEQ ID NO: 1134679 - DNA, 25 bp, Homo sapien
agcatatttatgaaaggctagaagg

SEQ ID NO: 1134680 - DNA, 25 bp, Homo sapien
catatttatgaaaggctagaaggtc

SEQ ID NO: 1134681 - DNA, 25 bp, Homo sapien
gagcatatttatgaaaggctagaag

SEQ ID NO: 1134682 - DNA, 25 bp, Homo sapien
gcatatttatgaaaggctagaaggt

SEQ ID NO: 1134683 - DNA, 25 bp, Homo sapien
cacaactgaacaagcataccagtgt

SEQ ID NO: 1134684 - DNA, 25 bp, Homo sapien
caccccataaacagccttacccaca

SEQ ID NO: 1134685 - DNA, 25 bp, Homo sapien
caactgaacaagcataccagtgttc

SEQ ID NO: 1134686 - DNA, 25 bp, Homo sapien
aacagccttacccacaactgaacaa

SEQ ID NO: 1134687 - DNA, 25 bp, Homo sapien
gggaatttggtgaactcctgcatgt

SEQ ID NO: 1134688 - DNA, 25 bp, Homo sapien
aactgtagctgtcagtggaggactg

SEQ ID NO: 1134689 - DNA, 25 bp, Homo sapien
gagacaaagatcttcggccagtttt

SEQ ID NO: 1134690 - DNA, 25 bp, Homo sapien
aggactgtgagatcgagcgagacaa

SEQ ID NO: 1134691 - DNA, 25 bp, Homo sapien
tcaatctcccggcgtccaaattctg

SEQ ID NO: 1134692 - DNA, 25 bp, Homo sapien
tgctgcccttggagttggtttgctg

SEQ ID NO: 1134693 - DNA, 25 bp, Homo sapien
gcccttggagttggtttgctgcttc

SEQ ID NO: 1134694 - DNA, 25 bp, Homo sapien
tcagagctatctgtgtaggatgcag

SEQ ID NO: 1134695 - DNA, 25 bp, Homo sapien
acagaggatttgagctaggtctgca

SEQ ID NO: 1134696 - DNA, 25 bp, Homo sapien
ctgtgaaagaacagaggatttgagc

SEQ ID NO: 1134697 - DNA, 25 bp, Homo sapien
aaagaacagaggatttgagctaggt

SEQ ID NO: 1134698 - DNA, 25 bp, Homo sapien
tgaaagaacagaggatttgagctag

SEQ ID NO: 1134699 - DNA, 25 bp, Homo sapien
gcttctccccctgagcacgtttcct

SEQ ID NO: 1134700 - DNA, 25 bp, Homo sapien
gtgtacagcccactattttagcacc

SEQ ID NO: 1134701 - DNA, 25 bp, Homo sapien
gtgtgtacagcccactattttagca

SEQ ID NO: 1134702 - DNA, 25 bp, Homo sapien
atgtgtgtacagcccactattttag

SEQ ID NO: 1134703 - DNA, 25 bp, Homo sapien
cagggcacagagtgtctcaatcaac

SEQ ID NO: 1134704 - DNA, 25 bp, Homo sapien
gttgagtagatgttacaagcagacc

SEQ ID NO: 1134705 - DNA, 25 bp, Homo sapien
gctacttcattctgagttgagtaga

SEQ ID NO: 1134706 - DNA, 25 bp, Homo sapien
gttacaagcagaccagcggcactga

SEQ ID NO: 1134707 - DNA, 25 bp, Homo sapien
ccatgttcacacagcggtcaataca

SEQ ID NO: 1134708 - DNA, 25 bp, Homo sapien
gactcgcccttccaagcgaacactg

SEQ ID NO: 1134709 - DNA, 25 bp, Homo sapien
ggtcaatacaccaccagaagtcatc

SEQ ID NO: 1134710 - DNA, 25 bp, Homo sapien
tgttggcctgccacccatccatgtt

SEQ ID NO: 1134711 - DNA, 25 bp, Homo sapien
taaacacgtttggatacttcttata

SEQ ID NO: 1134712 - DNA, 25 bp, Homo sapien
ttccacaatgcctcggatcttctta

SEQ ID NO: 1134713 - DNA, 25 bp, Homo sapien
ccagtgggttaagtctcccccatca

SEQ ID NO: 1134714 - DNA, 25 bp, Homo sapien
tgtgaacaccagtcacgctctcttc

SEQ ID NO: 1134715 - DNA, 25 bp, Homo sapien
tctgcctaattctcttcaagttcca

SEQ ID NO: 1134716 - DNA, 25 bp, Homo sapien
caaaaaccaagttagctggcacaac

SEQ ID NO: 1134717 - DNA, 25 bp, Homo sapien
taatttgtggcaaaatctgcctaat

SEQ ID NO: 1134718 - DNA, 25 bp, Homo sapien
gcccaaggatattagaaaacatgat

SEQ ID NO: 1134719 - DNA, 25 bp, Homo sapien
atccaaaatggattctcggcagcag

SEQ ID NO: 1134720 - DNA, 25 bp, Homo sapien
attgacgttcatggccggaacacag

SEQ ID NO: 1134721 - DNA, 25 bp, Homo sapien
cgttcatggccggaacacagagctt

SEQ ID NO: 1134722 - DNA, 25 bp, Homo sapien
caagttatcaaacttctgtttggta

SEQ ID NO: 1134723 - DNA, 25 bp, Homo sapien
aacatcacatctgtggtcctcttca

SEQ ID NO: 1134724 - DNA, 25 bp, Homo sapien
acacaccaccacttgtttcccacca

SEQ ID NO: 1134725 - DNA, 25 bp, Homo sapien
aaagagacactgagacccagctatt

SEQ ID NO: 1134726 - DNA, 25 bp, Homo sapien
aagagacactgagacccagctattt

SEQ ID NO: 1134727 - DNA, 25 bp, Homo sapien
ggtcgatttcggtaatgtagacaat

SEQ ID NO: 1134728 - DNA, 25 bp, Homo sapien
agcacagatggggtcgatttcggta

SEQ ID NO: 1134729 - DNA, 25 bp, Homo sapien
tggggtcgatttcggtaatgtagac

SEQ ID NO: 1134730 - DNA, 25 bp, Homo sapien
ctccaagagctttgagagcagcaca

SEQ ID NO: 1134731 - DNA, 25 bp, Homo sapien
gaaaaatgccaagaggctctcagag

SEQ ID NO: 1134732 - DNA, 25 bp, Homo sapien
tggtgagtgataagctctgctaaac

SEQ ID NO: 1134733 - DNA, 25 bp, Homo sapien
cctagggttagagtgagaagaacag

SEQ ID NO: 1134734 - DNA, 25 bp, Homo sapien
tgctaaactatatacactggcctct

SEQ ID NO: 1134735 - DNA, 25 bp, Homo sapien
tacgacatcgacttgccggatgact

SEQ ID NO: 1134736 - DNA, 25 bp, Homo sapien
gacttgccggatgacttcatttagc

SEQ ID NO: 1134737 - DNA, 25 bp, Homo sapien
ctgtgcaagttattacgacatcgac

SEQ ID NO: 1134738 - DNA, 25 bp, Homo sapien
ttagctttaccaccctgaacccatc

SEQ ID NO: 1134739 - DNA, 25 bp, Homo sapien
gtcactcagactactttcaagattt

SEQ ID NO: 1134740 - DNA, 25 bp, Homo sapien
tctagttctgagacctttatactga

SEQ ID NO: 1134741 - DNA, 25 bp, Homo sapien
acacttctctatgcaagttatttac

SEQ ID NO: 1134742 - DNA, 25 bp, Homo sapien
tatactgaacagaggtctcacctcc

SEQ ID NO: 1134743 - DNA, 25 bp, Homo sapien
tacgatacaactgtttttcatgcga

SEQ ID NO: 1134744 - DNA, 25 bp, Homo sapien
gttggagtggcccatattgcatacg

SEQ ID NO: 1134745 - DNA, 25 bp, Homo sapien
aagtgctcccgtgtcactacattct

SEQ ID NO: 1134746 - DNA, 25 bp, Homo sapien
gtggcccatattgcatacgatacaa

SEQ ID NO: 1134747 - DNA, 25 bp, Homo sapien
tcccacgtcagctccggagtgcgga

SEQ ID NO: 1134748 - DNA, 25 bp, Homo sapien
tgagaacgtactcgctcccacgtca

SEQ ID NO: 1134749 - DNA, 25 bp, Homo sapien
ccaggaggacaactcgtttgccatc

SEQ ID NO: 1134750 - DNA, 25 bp, Homo sapien
catctggccagatgacatggtccac

SEQ ID NO: 1134751 - DNA, 25 bp, Homo sapien
caagtcaagccaaagcgggagagga

SEQ ID NO: 1134752 - DNA, 25 bp, Homo sapien
ggagaggactttacacccctctaga

SEQ ID NO: 1134753 - DNA, 25 bp, Homo sapien
tacagttccagatcaggactctagg

SEQ ID NO: 1134754 - DNA, 25 bp, Homo sapien
catagatctaactactctgcttgtg

SEQ ID NO: 1134755 - DNA, 25 bp, Homo sapien
tgggatgagctctgtctcagattcc

SEQ ID NO: 1134756 - DNA, 25 bp, Homo sapien
gctctgtctcagattccaatggcat

SEQ ID NO: 1134757 - DNA, 25 bp, Homo sapien
tgagctctgtctcagattccaatgg

SEQ ID NO: 1134758 - DNA, 25 bp, Homo sapien
ctgggatgagctctgtctcagattc

SEQ ID NO: 1134759 - DNA, 25 bp, Homo sapien
aactgtggagcagctcaaattgagt

SEQ ID NO: 1134760 - DNA, 25 bp, Homo sapien
tgtggctgtgatggacagaacaaag

SEQ ID NO: 1134761 - DNA, 25 bp, Homo sapien
agcagctcaaattgagtagacgacc

SEQ ID NO: 1134762 - DNA, 25 bp, Homo sapien
aacaaaggtgggaactgtggagcag

SEQ ID NO: 1134763 - DNA, 25 bp, Homo sapien
aaaagaataggatgatgagaacata

SEQ ID NO: 1134764 - DNA, 25 bp, Homo sapien
tagtacagtacaccctcactggaac

SEQ ID NO: 1134765 - DNA, 25 bp, Homo sapien
tcactggaactgatctacgcccagt

SEQ ID NO: 1134766 - DNA, 25 bp, Homo sapien
cagttccacaaattgcagtgcagtg

SEQ ID NO: 1134767 - DNA, 25 bp, Homo sapien
cacagtacctaggactttgcctata

SEQ ID NO: 1134768 - DNA, 25 bp, Homo sapien
gcctatactaaagggcagcacacat

SEQ ID NO: 1134769 - DNA, 25 bp, Homo sapien
tattctcaactaaaacagccaattc

SEQ ID NO: 1134770 - DNA, 25 bp, Homo sapien
taaacagcatttgggtaagtactac

SEQ ID NO: 1134771 - DNA, 25 bp, Homo sapien
cttgtatcgcccctcgggtgcatta

SEQ ID NO: 1134772 - DNA, 25 bp, Homo sapien
tacacatcctgcttgtatcgcccct

SEQ ID NO: 1134773 - DNA, 25 bp, Homo sapien
atcgcccctcgggtgcattatagag

SEQ ID NO: 1134774 - DNA, 25 bp, Homo sapien
ccctcgggtgcattatagagttcta

SEQ ID NO: 1134775 - DNA, 25 bp, Homo sapien
gaatttctaaggtagtcggcacaga

SEQ ID NO: 1134776 - DNA, 25 bp, Homo sapien
gacaccagtaagctagaaagaccct

SEQ ID NO: 1134777 - DNA, 25 bp, Homo sapien
gatgggtacaccgtgcagaaaggca

SEQ ID NO: 1134778 - DNA, 25 bp, Homo sapien
catgtacagtgcgttcagaaaagcc

SEQ ID NO: 1134779 - DNA, 25 bp, Homo sapien
attaggtttgaatggcccatttttg

SEQ ID NO: 1134780 - DNA, 25 bp, Homo sapien
gtttgaatggcccatttttgttgag

SEQ ID NO: 1134781 - DNA, 25 bp, Homo sapien
tgtaaggtgggcatcaaatgatggc

SEQ ID NO: 1134782 - DNA, 25 bp, Homo sapien
cagatgcaagctggcaacgtattca

SEQ ID NO: 1134783 - DNA, 25 bp, Homo sapien
cacacccggctaagagatagggttt

SEQ ID NO: 1134784 - DNA, 25 bp, Homo sapien
ccacagggtctctgacaatgccatt

SEQ ID NO: 1134785 - DNA, 25 bp, Homo sapien
caatgccatttctggtgttaccgcc

SEQ ID NO: 1134786 - DNA, 25 bp, Homo sapien
gcaggctagcctgcttggtttaata

SEQ ID NO: 1134787 - DNA, 25 bp, Homo sapien
ttagagtgtgtggttcaggtggact

SEQ ID NO: 1134788 - DNA, 25 bp, Homo sapien
tgtggttcaggtggactggtccttg

SEQ ID NO: 1134789 - DNA, 25 bp, Homo sapien
gttcaggtggactggtccttggtag

SEQ ID NO: 1134790 - DNA, 25 bp, Homo sapien
tgtgtggttcaggtggactggtcct

SEQ ID NO: 1134791 - DNA, 25 bp, Homo sapien
tctaaagagccatgaagcaagttcc

SEQ ID NO: 1134792 - DNA, 25 bp, Homo sapien
tgactagagtgaggaaccctgaact

SEQ ID NO: 1134793 - DNA, 25 bp, Homo sapien
gacattgcagattgttccacagaga

SEQ ID NO: 1134794 - DNA, 25 bp, Homo sapien
cttttaaggcgatttagacattgca

SEQ ID NO: 1134795 - DNA, 25 bp, Homo sapien
ccgggtaggtaccatccctgcttct

SEQ ID NO: 1134796 - DNA, 25 bp, Homo sapien
tgccgggtaggtaccatccctgctt

SEQ ID NO: 1134797 - DNA, 25 bp, Homo sapien
ctgccgggtaggtaccatccctgct

SEQ ID NO: 1134798 - DNA, 25 bp, Homo sapien
gccgggtaggtaccatccctgcttc

SEQ ID NO: 1134799 - DNA, 25 bp, Homo sapien
gaagaaagcatggtcacactggcaa

SEQ ID NO: 1134800 - DNA, 25 bp, Homo sapien
tactataaatccaagtgggcctcct

SEQ ID NO: 1134801 - DNA, 25 bp, Homo sapien
ctacgggctagaaacagagggactt

SEQ ID NO: 1134802 - DNA, 25 bp, Homo sapien
cagcagggctaacgtgatggataca

SEQ ID NO: 1134803 - DNA, 25 bp, Homo sapien
ctgtatttttgtcagagatgtgtga

SEQ ID NO: 1134804 - DNA, 25 bp, Homo sapien
gtgtgaaccacagcaactccatctt

SEQ ID NO: 1134805 - DNA, 25 bp, Homo sapien
gtatttttgtcagagatgtgtgaac

SEQ ID NO: 1134806 - DNA, 25 bp, Homo sapien
atttttgtcagagatgtgtgaacca

SEQ ID NO: 1134807 - DNA, 25 bp, Homo sapien
agccgccgtgatgcaactctcgcgt

SEQ ID NO: 1134808 - DNA, 25 bp, Homo sapien
ttaactcgcgcacagccgccgtgat

SEQ ID NO: 1134809 - DNA, 25 bp, Homo sapien
tgatgcaactctcgcgtgattttct

SEQ ID NO: 1134810 - DNA, 25 bp, Homo sapien
caactctcgcgtgattttctccagg

SEQ ID NO: 1134811 - DNA, 25 bp, Homo sapien
tgcggttgaactcgcgggctttgcc

SEQ ID NO: 1134812 - DNA, 25 bp, Homo sapien
agtctttgcgctggttgcggttgaa

SEQ ID NO: 1134813 - DNA, 25 bp, Homo sapien
ttgttcacgatcagtgggcccggac

SEQ ID NO: 1134814 - DNA, 25 bp, Homo sapien
tgccccgggtggtggctgtgcggct

SEQ ID NO: 1134815 - DNA, 25 bp, Homo sapien
ccggtgcgagcctcgccccccgaag

SEQ ID NO: 1134816 - DNA, 25 bp, Homo sapien
gagcctcgccccccgaagctcctga

SEQ ID NO: 1134817 - DNA, 25 bp, Homo sapien
gtgcgagcctcgccccccgaagctc

SEQ ID NO: 1134818 - DNA, 25 bp, Homo sapien
gcgagcctcgccccccgaagctcct

SEQ ID NO: 1134819 - DNA, 25 bp, Homo sapien
aatgacacaacatacccacaatggc

SEQ ID NO: 1134820 - DNA, 25 bp, Homo sapien
acacaacatacccacaatggccagg

SEQ ID NO: 1134821 - DNA, 25 bp, Homo sapien
taattacagtctacctgggaagaca

SEQ ID NO: 1134822 - DNA, 25 bp, Homo sapien
agacaaagaccagccacaaaatgac

SEQ ID NO: 1134823 - DNA, 25 bp, Homo sapien
cagtgagaactgacaaagaaggcag

SEQ ID NO: 1134824 - DNA, 25 bp, Homo sapien
tctggctagtggactgtcaacagct

SEQ ID NO: 1134825 - DNA, 25 bp, Homo sapien
ggcagccgccaaacagatcaacttc

SEQ ID NO: 1134826 - DNA, 25 bp, Homo sapien
tctgcctttccacaagactgtaagt

SEQ ID NO: 1134827 - DNA, 25 bp, Homo sapien
gctctgcagcccacttgtctgtgtc

SEQ ID NO: 1134828 - DNA, 25 bp, Homo sapien
tagaactagggaaagcaatgaagcc

SEQ ID NO: 1134829 - DNA, 25 bp, Homo sapien
gggtcacagtggatagccaaggaac

SEQ ID NO: 1134830 - DNA, 25 bp, Homo sapien
tctcacaatgggactgggctctagc

SEQ ID NO: 1134831 - DNA, 25 bp, Homo sapien
gacctcgcattacatgagagtggca

SEQ ID NO: 1134832 - DNA, 25 bp, Homo sapien
ccggaagtcctcctcaaagcatttt

SEQ ID NO: 1134833 - DNA, 25 bp, Homo sapien
catcaggaattctggcccttccgtg

SEQ ID NO: 1134834 - DNA, 25 bp, Homo sapien
tctggcccttccgtgtagctgtaaa

SEQ ID NO: 1134835 - DNA, 25 bp, Homo sapien
caaagcattttcgattcatcaggaa

SEQ ID NO: 1134836 - DNA, 25 bp, Homo sapien
tagaaaaatcctcacaatggcatgg

SEQ ID NO: 1134837 - DNA, 25 bp, Homo sapien
tgttaactcaccaaattcaggactg

SEQ ID NO: 1134838 - DNA, 25 bp, Homo sapien
tgcagggcaagaaaccagttacacc

SEQ ID NO: 1134839 - DNA, 25 bp, Homo sapien
tcaggactgccataggaccagaaag

SEQ ID NO: 1134840 - DNA, 25 bp, Homo sapien
gtgacttccaagccatccaggagcc

SEQ ID NO: 1134841 - DNA, 25 bp, Homo sapien
agaattgctcgagccaccttgagtc

SEQ ID NO: 1134842 - DNA, 25 bp, Homo sapien
atccaggagcctcatggcatgggtc

SEQ ID NO: 1134843 - DNA, 25 bp, Homo sapien
ctggttggtatccagctcagtccac

SEQ ID NO: 1134844 - DNA, 25 bp, Homo sapien
agctccaccaaagcattgaacgtgc

SEQ ID NO: 1134845 - DNA, 25 bp, Homo sapien
tccgagctgcactccccaaacgtgc

SEQ ID NO: 1134846 - DNA, 25 bp, Homo sapien
ttgtagcgcatccaggactgcacct

SEQ ID NO: 1134847 - DNA, 25 bp, Homo sapien
aggagaaagatgttgtagcgcatcc

SEQ ID NO: 1134848 - DNA, 25 bp, Homo sapien
tcttcaaggtgtaagtgaccaactc

SEQ ID NO: 1134849 - DNA, 25 bp, Homo sapien
tattcaacccaggtggtcagaacac

SEQ ID NO: 1134850 - DNA, 25 bp, Homo sapien
gtaagtgaccaactccgttattcaa

SEQ ID NO: 1134851 - DNA, 25 bp, Homo sapien
tccgttattcaacccaggtggtcag

SEQ ID NO: 1134852 - DNA, 25 bp, Homo sapien
gcggaaactgcagggcgaacacagc

SEQ ID NO: 1134853 - DNA, 25 bp, Homo sapien
cactggacaaaggtgacacaggcaa

SEQ ID NO: 1134854 - DNA, 25 bp, Homo sapien
ccaggcactggttgagcccatatgt

SEQ ID NO: 1134855 - DNA, 25 bp, Homo sapien
tgagcccatatgtcagtcttgtgcc

SEQ ID NO: 1134856 - DNA, 25 bp, Homo sapien
ctgacaagtactgaccaatggggaa

SEQ ID NO: 1134857 - DNA, 25 bp, Homo sapien
caaaatgctgtgatacgtgcttgga

SEQ ID NO: 1134858 - DNA, 25 bp, Homo sapien
aacaaaatgctgtgatacgtgcttg

SEQ ID NO: 1134859 - DNA, 25 bp, Homo sapien
acaaaatgctgtgatacgtgcttgg

SEQ ID NO: 1134860 - DNA, 25 bp, Homo sapien
ccaagaaggaagataagtgatgtcc

SEQ ID NO: 1134861 - DNA, 25 bp, Homo sapien
ctccaagaaggaagataagtgatgt

SEQ ID NO: 1134862 - DNA, 25 bp, Homo sapien
tccaagaaggaagataagtgatgtc

SEQ ID NO: 1134863 - DNA, 25 bp, Homo sapien
ctgcaggagattttgagagtcagca

SEQ ID NO: 1134864 - DNA, 25 bp, Homo sapien
aggagattttgagagtcagcatctt

SEQ ID NO: 1134865 - DNA, 25 bp, Homo sapien
caggagattttgagagtcagcatct

SEQ ID NO: 1134866 - DNA, 25 bp, Homo sapien
gcaggagattttgagagtcagcatc

SEQ ID NO: 1134867 - DNA, 25 bp, Homo sapien
tctgtgctgtcagccagggagatgg

SEQ ID NO: 1134868 - DNA, 25 bp, Homo sapien
gaggtctgtgctgtcagccagggag

SEQ ID NO: 1134869 - DNA, 25 bp, Homo sapien
agggagatggcaggcttcctcacag

SEQ ID NO: 1134870 - DNA, 25 bp, Homo sapien
cctcacagcactgctgcaggcggca

SEQ ID NO: 1134871 - DNA, 25 bp, Homo sapien
gcatttaccaccctaagcttcctga

SEQ ID NO: 1134872 - DNA, 25 bp, Homo sapien
ggtcaaaggagcaccctagtgtcta

SEQ ID NO: 1134873 - DNA, 25 bp, Homo sapien
accacagaggtggtagcgagctgta

SEQ ID NO: 1134874 - DNA, 25 bp, Homo sapien
ggaggcaacactacaaccacctagt

SEQ ID NO: 1134875 - DNA, 25 bp, Homo sapien
gatgaacggtctccactatcaggta

SEQ ID NO: 1134876 - DNA, 25 bp, Homo sapien
ggctctgaaggtctgccgcatggtc

SEQ ID NO: 1134877 - DNA, 25 bp, Homo sapien
ctctgaaggtctgccgcatggtcct

SEQ ID NO: 1134878 - DNA, 25 bp, Homo sapien
tcacactcctgatgaacggtctcca

SEQ ID NO: 1134879 - DNA, 25 bp, Homo sapien
cagggcctctagagaggatccccag

SEQ ID NO: 1134880 - DNA, 25 bp, Homo sapien
ctagagaggatccccagggtcctac

SEQ ID NO: 1134881 - DNA, 25 bp, Homo sapien
aggtatcaggaccctcccaaagcct

SEQ ID NO: 1134882 - DNA, 25 bp, Homo sapien
ctctagagaggatccccagggtcct

SEQ ID NO: 1134883 - DNA, 25 bp, Homo sapien
atggctcattgttgtacagcgggga

SEQ ID NO: 1134884 - DNA, 25 bp, Homo sapien
aaatggctcattgttgtacagcggg

SEQ ID NO: 1134885 - DNA, 25 bp, Homo sapien
tggcaaatggctcattgttgtacag

SEQ ID NO: 1134886 - DNA, 25 bp, Homo sapien
gatggcaaatggctcattgttgtac

SEQ ID NO: 1134887 - DNA, 25 bp, Homo sapien
gaccactgcaaaatttggtcaccat

SEQ ID NO: 1134888 - DNA, 25 bp, Homo sapien
gagaactttcttcatgggaaagtga

SEQ ID NO: 1134889 - DNA, 25 bp, Homo sapien
aatttggtcaccatcccaaacagca

SEQ ID NO: 1134890 - DNA, 25 bp, Homo sapien
aagtgaggggcgtgaccactgcaaa

SEQ ID NO: 1134891 - DNA, 25 bp, Homo sapien
tactgcccatcccatagcaccgttc

SEQ ID NO: 1134892 - DNA, 25 bp, Homo sapien
tattcaaggaacagtctccctactg

SEQ ID NO: 1134893 - DNA, 25 bp, Homo sapien
aaaaggatattcaaggaacagtctc

SEQ ID NO: 1134894 - DNA, 25 bp, Homo sapien
aaggaacagtctccctactgcccat

SEQ ID NO: 1134895 - DNA, 25 bp, Homo sapien
cgtgacatccgcaagggaaaggaga

SEQ ID NO: 1134896 - DNA, 25 bp, Homo sapien
cagaaacattcatgacatcatgacc

SEQ ID NO: 1134897 - DNA, 25 bp, Homo sapien
agccactcccaaggagaattccgtg

SEQ ID NO: 1134898 - DNA, 25 bp, Homo sapien
caggcaactcctgaacaatggactg

SEQ ID NO: 1134899 - DNA, 25 bp, Homo sapien
gcgaatcactttgatgctgtcctca

SEQ ID NO: 1134900 - DNA, 25 bp, Homo sapien
ttgtgctctcggcggccccgtttct

SEQ ID NO: 1134901 - DNA, 25 bp, Homo sapien
gagaggctgctctcatgttgcgaat

SEQ ID NO: 1134902 - DNA, 25 bp, Homo sapien
tcaatcaagtctgaagcagatgctg

SEQ ID NO: 1134903 - DNA, 25 bp, Homo sapien
ggcatcacttcatcccgttccaggg

SEQ ID NO: 1134904 - DNA, 25 bp, Homo sapien
ccgctcgttgaaggcatctaggttg

SEQ ID NO: 1134905 - DNA, 25 bp, Homo sapien
aagtcagcctgtcagtctgtgggtg

SEQ ID NO: 1134906 - DNA, 25 bp, Homo sapien
tcatcagccttgtagggatcccgct

SEQ ID NO: 1134907 - DNA, 25 bp, Homo sapien
cacagggtgctttaagagagcctca

SEQ ID NO: 1134908 - DNA, 25 bp, Homo sapien
catgttgtgtgagaccagcaaggcc

SEQ ID NO: 1134909 - DNA, 25 bp, Homo sapien
ttacctggatcaagaaagcgacttc

SEQ ID NO: 1134910 - DNA, 25 bp, Homo sapien
gcagaggaccacacatggtgacaca

SEQ ID NO: 1134911 - DNA, 25 bp, Homo sapien
aaagctataggctactgatttttca

SEQ ID NO: 1134912 - DNA, 25 bp, Homo sapien
gaaatacatgttaactagtttattc

SEQ ID NO: 1134913 - DNA, 25 bp, Homo sapien
tatagctcacttttcctatcccaaa

SEQ ID NO: 1134914 - DNA, 25 bp, Homo sapien
tattcagatagtatgaacaagtttg

SEQ ID NO: 1134915 - DNA, 25 bp, Homo sapien
aacctataaatttgctgcggctgga

SEQ ID NO: 1134916 - DNA, 25 bp, Homo sapien
ctgcctagagtgtaacctataaatt

SEQ ID NO: 1134917 - DNA, 25 bp, Homo sapien
tggactcaaggaacatctcaatgtc

SEQ ID NO: 1134918 - DNA, 25 bp, Homo sapien
gactcaaggaacatctcaatgtctt

SEQ ID NO: 1134919 - DNA, 25 bp, Homo sapien
tgtttcagagtcttgatgctttcgt

SEQ ID NO: 1134920 - DNA, 25 bp, Homo sapien
tttcagagtcttgatgctttcgtgg

SEQ ID NO: 1134921 - DNA, 25 bp, Homo sapien
gtcttgatgctttcgtggattggcc

SEQ ID NO: 1134922 - DNA, 25 bp, Homo sapien
cagagtcttgatgctttcgtggatt

SEQ ID NO: 1134923 - DNA, 25 bp, Homo sapien
cagtcagtcccaaacaaaagctcag

SEQ ID NO: 1134924 - DNA, 25 bp, Homo sapien
tggtgcccggtggtcaggtaatata

SEQ ID NO: 1134925 - DNA, 25 bp, Homo sapien
cccaggttcttgcaggcagacaaca

SEQ ID NO: 1134926 - DNA, 25 bp, Homo sapien
tacaggctggtttcactctactcac

SEQ ID NO: 1134927 - DNA, 25 bp, Homo sapien
caaactccctgcactctagcaaaat

SEQ ID NO: 1134928 - DNA, 25 bp, Homo sapien
gggaaaacattctctggccaaactc

SEQ ID NO: 1134929 - DNA, 25 bp, Homo sapien
tcaccacaaaaatccctagctaaaa

SEQ ID NO: 1134930 - DNA, 25 bp, Homo sapien
aaaacattctctggccaaactccct

SEQ ID NO: 1134931 - DNA, 25 bp, Homo sapien
cctctgcaatcgacgtgtacttgtg

SEQ ID NO: 1134932 - DNA, 25 bp, Homo sapien
ctgtgcctggacctctgcaatcgac

SEQ ID NO: 1134933 - DNA, 25 bp, Homo sapien
tgcctggacctctgcaatcgacgtg

SEQ ID NO: 1134934 - DNA, 25 bp, Homo sapien
tggacctctgcaatcgacgtgtact

SEQ ID NO: 1134935 - DNA, 25 bp, Homo sapien
cgcgcccggactgaggacctccaac

SEQ ID NO: 1134936 - DNA, 25 bp, Homo sapien
gcccggactgaggacctccaactta

SEQ ID NO: 1134937 - DNA, 25 bp, Homo sapien
cgcccggactgaggacctccaactt

SEQ ID NO: 1134938 - DNA, 25 bp, Homo sapien
caccgcgcccggactgaggacctcc

SEQ ID NO: 1134939 - DNA, 25 bp, Homo sapien
catccataaagtggtggacccaggc

SEQ ID NO: 1134940 - DNA, 25 bp, Homo sapien
taaagcatagagagacccagtaact

SEQ ID NO: 1134941 - DNA, 25 bp, Homo sapien
tattcttaaccctgcactagacgtg

SEQ ID NO: 1134942 - DNA, 25 bp, Homo sapien
cagaatacaatctcctgagccagct

SEQ ID NO: 1134943 - DNA, 25 bp, Homo sapien
aagccttggtagagggtttctgcag

SEQ ID NO: 1134944 - DNA, 25 bp, Homo sapien
cagggacttgctcaacttcttcttc

SEQ ID NO: 1134945 - DNA, 25 bp, Homo sapien
gcaagccttggtagagggtttctgc

SEQ ID NO: 1134946 - DNA, 25 bp, Homo sapien
ggagcaagccttggtagagggtttc

SEQ ID NO: 1134947 - DNA, 25 bp, Homo sapien
caaaattaagctctgagcagtcctc

SEQ ID NO: 1134948 - DNA, 25 bp, Homo sapien
aaattaagctctgagcagtcctcct

SEQ ID NO: 1134949 - DNA, 25 bp, Homo sapien
gccagtgtagtgggagtgtcccact

SEQ ID NO: 1134950 - DNA, 25 bp, Homo sapien
aaggccagtgtagtgggagtgtccc

SEQ ID NO: 1134951 - DNA, 25 bp, Homo sapien
gacgtccgctaggatgttgattgag

SEQ ID NO: 1134952 - DNA, 25 bp, Homo sapien
ttttggcttttgaggtgggtgctgc

SEQ ID NO: 1134953 - DNA, 25 bp, Homo sapien
gatgttgattgagtctgttttggct

SEQ ID NO: 1134954 - DNA, 25 bp, Homo sapien
atctcctcaggcaagacgtccgcta

SEQ ID NO: 1134955 - DNA, 25 bp, Homo sapien
tcactggcgaaaagggatgtctcta

SEQ ID NO: 1134956 - DNA, 25 bp, Homo sapien
catttaacctgtagagctgggccaa

SEQ ID NO: 1134957 - DNA, 25 bp, Homo sapien
tatcgccctgagacatttgccagca

SEQ ID NO: 1134958 - DNA, 25 bp, Homo sapien
agcattctgcgtgcccaatcactgg

SEQ ID NO: 1134959 - DNA, 25 bp, Homo sapien
agccaccagcatgcgcagtacctca

SEQ ID NO: 1134960 - DNA, 25 bp, Homo sapien
caccagcatgcgcagtacctcattt

SEQ ID NO: 1134961 - DNA, 25 bp, Homo sapien
taattgcctgggtaagccaccagca

SEQ ID NO: 1134962 - DNA, 25 bp, Homo sapien
gtaagccaccagcatgcgcagtacc

SEQ ID NO: 1134963 - DNA, 25 bp, Homo sapien
tctttgtggcggtttacatccaccc

SEQ ID NO: 1134964 - DNA, 25 bp, Homo sapien
ttcaacttaaagtgcttgagcagca

SEQ ID NO: 1134965 - DNA, 25 bp, Homo sapien
gcagaaatggccttaacaatgacct

SEQ ID NO: 1134966 - DNA, 25 bp, Homo sapien
tggttcaacttaaagtgcttgagca

SEQ ID NO: 1134967 - DNA, 25 bp, Homo sapien
ccaaggcccccgttcttgtgggctg

SEQ ID NO: 1134968 - DNA, 25 bp, Homo sapien
ggctgaagggccatgtcttagaaca

SEQ ID NO: 1134969 - DNA, 25 bp, Homo sapien
ccagggatgaaaggccttggctgaa

SEQ ID NO: 1134970 - DNA, 25 bp, Homo sapien
cagagttcaagtgggtcaaaggcca

SEQ ID NO: 1134971 - DNA, 25 bp, Homo sapien
ttgaagaactttaggatcaaaggaa

SEQ ID NO: 1134972 - DNA, 25 bp, Homo sapien
ttcttggcagtgatgtaggacatga

SEQ ID NO: 1134973 - DNA, 25 bp, Homo sapien
aaggaatgcagttggcaaacaccag

SEQ ID NO: 1134974 - DNA, 25 bp, Homo sapien
cttggcagtgatgtaggacatgatg

SEQ ID NO: 1134975 - DNA, 25 bp, Homo sapien
tggtatatcacactgacgagcaagt

SEQ ID NO: 1134976 - DNA, 25 bp, Homo sapien
aataccagctgggaactctgccgtc

SEQ ID NO: 1134977 - DNA, 25 bp, Homo sapien
tagatcctgggatgaaaaccctcct

SEQ ID NO: 1134978 - DNA, 25 bp, Homo sapien
tagggcattacaaggcacatggccg

SEQ ID NO: 1134979 - DNA, 25 bp, Homo sapien
caccacgcagtgagggtaatccagg

SEQ ID NO: 1134980 - DNA, 25 bp, Homo sapien
cagtgagggtaatccaggacagaaa

SEQ ID NO: 1134981 - DNA, 25 bp, Homo sapien
gccgtcagctctggcagctcatgca

SEQ ID NO: 1134982 - DNA, 25 bp, Homo sapien
ggcagctcatgcaccacgcagtgag

SEQ ID NO: 1134983 - DNA, 25 bp, Homo sapien
tgccaaaaggacagctgaggagagc

SEQ ID NO: 1134984 - DNA, 25 bp, Homo sapien
cctggtgccaaaaggacagctgagg

SEQ ID NO: 1134985 - DNA, 25 bp, Homo sapien
ggtgccaaaaggacagctgaggaga

SEQ ID NO: 1134986 - DNA, 25 bp, Homo sapien
ctggtgccaaaaggacagctgagga

SEQ ID NO: 1134987 - DNA, 25 bp, Homo sapien
ccagcaaaattggttactgtcacct

SEQ ID NO: 1134988 - DNA, 25 bp, Homo sapien
gatccgaagcagattgatacaagaa

SEQ ID NO: 1134989 - DNA, 25 bp, Homo sapien
ctccagcaaaattggttactgtcac

SEQ ID NO: 1134990 - DNA, 25 bp, Homo sapien
tttgtcagcttgttcaagatccgaa

SEQ ID NO: 1134991 - DNA, 25 bp, Homo sapien
acactgctgcttaaccctttggaag

SEQ ID NO: 1134992 - DNA, 25 bp, Homo sapien
ggttggtcaccctaactatgtgtca

SEQ ID NO: 1134993 - DNA, 25 bp, Homo sapien
aacaagcaagcagcccaagttgaag

SEQ ID NO: 1134994 - DNA, 25 bp, Homo sapien
tatcagaggattcaaggacctcccc

SEQ ID NO: 1134995 - DNA, 25 bp, Homo sapien
tcatggcttgtttcacctttagggc

SEQ ID NO: 1134996 - DNA, 25 bp, Homo sapien
gccgatgccgcaccttctggtagat

SEQ ID NO: 1134997 - DNA, 25 bp, Homo sapien
tcatgttgctctttcgccactgccg

SEQ ID NO: 1134998 - DNA, 25 bp, Homo sapien
gtatgcccagtcgtcgttcagccga

SEQ ID NO: 1134999 - DNA, 25 bp, Homo sapien
tatattccagaaacgcaacaacgca

SEQ ID NO: 1135000 - DNA, 25 bp, Homo sapien
cactgtgggcgaaagaagagtgcct

SEQ ID NO: 1135001 - DNA, 25 bp, Homo sapien
ccagaggtactgagaaagaggctta

SEQ ID NO: 1135002 - DNA, 25 bp, Homo sapien
cacagggcattgagagtacagacac

SEQ ID NO: 1135003 - DNA, 25 bp, Homo sapien
cactggccaggaatattgagtgtca

SEQ ID NO: 1135004 - DNA, 25 bp, Homo sapien
taagagcaggatacctccgagctca

SEQ ID NO: 1135005 - DNA, 25 bp, Homo sapien
gttaggagccatgccctgtagcagc

SEQ ID NO: 1135006 - DNA, 25 bp, Homo sapien
gacaaagcaggaagaaacaccgtta

SEQ ID NO: 1135007 - DNA, 25 bp, Homo sapien
tcctcagggaggtccacccgttggc

SEQ ID NO: 1135008 - DNA, 25 bp, Homo sapien
tagcgccgggcgttgaagcgttcaa

SEQ ID NO: 1135009 - DNA, 25 bp, Homo sapien
ctttctaaccagaggtcatagttca

SEQ ID NO: 1135010 - DNA, 25 bp, Homo sapien
atgttggcacgaagggcacactcct

SEQ ID NO: 1135011 - DNA, 25 bp, Homo sapien
tgcagcaatgaactaggacagtccc

SEQ ID NO: 1135012 - DNA, 25 bp, Homo sapien
aaggagcctccgcaattacttctgg

SEQ ID NO: 1135013 - DNA, 25 bp, Homo sapien
cctgaaattcagatgcacggcggag

SEQ ID NO: 1135014 - DNA, 25 bp, Homo sapien
caagataccgactttctggccctgg

SEQ ID NO: 1135015 - DNA, 25 bp, Homo sapien
gagatacgtagaggccatatttcct

SEQ ID NO: 1135016 - DNA, 25 bp, Homo sapien
tatttcctgtagacaagccaacggg

SEQ ID NO: 1135017 - DNA, 25 bp, Homo sapien
ttgacaaggacaagcgttgaccagc

SEQ ID NO: 1135018 - DNA, 25 bp, Homo sapien
cactttctagacctggaggagatac

SEQ ID NO: 1135019 - DNA, 25 bp, Homo sapien
ctcaaggtccctcagtgagtaaatg

SEQ ID NO: 1135020 - DNA, 25 bp, Homo sapien
gtcagagcccgaattgaaagtcagg

SEQ ID NO: 1135021 - DNA, 25 bp, Homo sapien
tcttactcagcccatgcaatacggc

SEQ ID NO: 1135022 - DNA, 25 bp, Homo sapien
tgtcagccagacatgtaggttcatt

SEQ ID NO: 1135023 - DNA, 25 bp, Homo sapien
cacgtgatcggttgcatggacctgc

SEQ ID NO: 1135024 - DNA, 25 bp, Homo sapien
tacttggctcatcgttcagggaacc

SEQ ID NO: 1135025 - DNA, 25 bp, Homo sapien
gaataaatgtgtttgcctggcagga

SEQ ID NO: 1135026 - DNA, 25 bp, Homo sapien
caagacagtcgcatgtatccccaga

SEQ ID NO: 1135027 - DNA, 25 bp, Homo sapien
ctgccttgtttaaattgttggtgac

SEQ ID NO: 1135028 - DNA, 25 bp, Homo sapien
gcctttgatccaggctgccttgttt

SEQ ID NO: 1135029 - DNA, 25 bp, Homo sapien
ccaggctgccttgtttaaattgttg

SEQ ID NO: 1135030 - DNA, 25 bp, Homo sapien
ctcagcaaggttgtcatgggaggca

SEQ ID NO: 1135031 - DNA, 25 bp, Homo sapien
tccattccagcaaagtgtaagcact

SEQ ID NO: 1135032 - DNA, 25 bp, Homo sapien
tgtttccctaaatgaagaactgacc

SEQ ID NO: 1135033 - DNA, 25 bp, Homo sapien
tcagtatctaaacaggacaaaggta

SEQ ID NO: 1135034 - DNA, 25 bp, Homo sapien
cgtgtgtgccactatatcctggtac

SEQ ID NO: 1135035 - DNA, 25 bp, Homo sapien
tctagcatgaggcacagtccagagt

SEQ ID NO: 1135036 - DNA, 25 bp, Homo sapien
gaccaggctgatggaataaaggcct

SEQ ID NO: 1135037 - DNA, 25 bp, Homo sapien
ggtgattcttccacaactacgttat

SEQ ID NO: 1135038 - DNA, 25 bp, Homo sapien
ccagagtgctgagtgacataagtac

SEQ ID NO: 1135039 - DNA, 25 bp, Homo sapien
ccagcagaagcgtggaccccagatt

SEQ ID NO: 1135040 - DNA, 25 bp, Homo sapien
cagcagaagcgtggaccccagattc

SEQ ID NO: 1135041 - DNA, 25 bp, Homo sapien
gcctgggcacaaggtctcacgtgga

SEQ ID NO: 1135042 - DNA, 25 bp, Homo sapien
tcctcctgcagatcaccagccatac

SEQ ID NO: 1135043 - DNA, 25 bp, Homo sapien
agatcaccagccatactcctgccct

SEQ ID NO: 1135044 - DNA, 25 bp, Homo sapien
tcttcggggtcgtggtctgagcaca

SEQ ID NO: 1135045 - DNA, 25 bp, Homo sapien
acatgtgtattaggtgccacctctg

SEQ ID NO: 1135046 - DNA, 25 bp, Homo sapien
ctttacacgctcttttggattgggc

SEQ ID NO: 1135047 - DNA, 25 bp, Homo sapien
tctttctgtcaagcactttacacgc

SEQ ID NO: 1135048 - DNA, 25 bp, Homo sapien
ggctagcatttatcaagcgtcctct

SEQ ID NO: 1135049 - DNA, 25 bp, Homo sapien
gtcctgcgggagatgttggcttctc

SEQ ID NO: 1135050 - DNA, 25 bp, Homo sapien
gagaccagggacccagcttaggcag

SEQ ID NO: 1135051 - DNA, 25 bp, Homo sapien
cttctccctatcaacaaagggctag

SEQ ID NO: 1135052 - DNA, 25 bp, Homo sapien
aagggctagtagtcccaggagacca

SEQ ID NO: 1135053 - DNA, 25 bp, Homo sapien
ctgagtggaatcaggagggatccat

SEQ ID NO: 1135054 - DNA, 25 bp, Homo sapien
gtggaatcaggagggatccatgctc

SEQ ID NO: 1135055 - DNA, 25 bp, Homo sapien
atcaggagggatccatgctctggga

SEQ ID NO: 1135056 - DNA, 25 bp, Homo sapien
cgggctgagtggaatcaggagggat

SEQ ID NO: 1135057 - DNA, 25 bp, Homo sapien
cttggcatcctgtggttcaaagtgt

SEQ ID NO: 1135058 - DNA, 25 bp, Homo sapien
caaagtgtttagctaggaccagtcc

SEQ ID NO: 1135059 - DNA, 25 bp, Homo sapien
tgtcacaggagctctgaggccgtgc

SEQ ID NO: 1135060 - DNA, 25 bp, Homo sapien
tggtgggcctcctttagcgccatct

SEQ ID NO: 1135061 - DNA, 25 bp, Homo sapien
gagaaagagggtctgcctagaacca

SEQ ID NO: 1135062 - DNA, 25 bp, Homo sapien
catctaggctgcgtgctctgtgagg

SEQ ID NO: 1135063 - DNA, 25 bp, Homo sapien
catgcaaatgggtaggatggcccgt

SEQ ID NO: 1135064 - DNA, 25 bp, Homo sapien
cattgtctttctgtcccgaaggaga

SEQ ID NO: 1135065 - DNA, 25 bp, Homo sapien
tgtggatagaaacacgaagctggct

SEQ ID NO: 1135066 - DNA, 25 bp, Homo sapien
gactattttgccatggaccagtgga

SEQ ID NO: 1135067 - DNA, 25 bp, Homo sapien
gaaatagggagccttcaacaggtgc

SEQ ID NO: 1135068 - DNA, 25 bp, Homo sapien
caacaggtgcactggtacaggcttc

SEQ ID NO: 1135069 - DNA, 25 bp, Homo sapien
actagacgacgctgagaagggaaac

SEQ ID NO: 1135070 - DNA, 25 bp, Homo sapien
ttaaagataccccttgtagcagtgt

SEQ ID NO: 1135071 - DNA, 25 bp, Homo sapien
tgcctctagggtgaagaactacacg

SEQ ID NO: 1135072 - DNA, 25 bp, Homo sapien
ccattaaagtgaacaggtctgccct

SEQ ID NO: 1135073 - DNA, 25 bp, Homo sapien
tcacgcgtgggtagtcgcgcagact

SEQ ID NO: 1135074 - DNA, 25 bp, Homo sapien
tgcactccggccgagcagctgcgat

SEQ ID NO: 1135075 - DNA, 25 bp, Homo sapien
gacgggtcgcggacgcacagctcct

SEQ ID NO: 1135076 - DNA, 25 bp, Homo sapien
gagagcgcgcgggattgcgaagact

SEQ ID NO: 1135077 - DNA, 25 bp, Homo sapien
tctgcaaggccaaatcctggtatct

SEQ ID NO: 1135078 - DNA, 25 bp, Homo sapien
gaagcctggccatccctttgtgact

SEQ ID NO: 1135079 - DNA, 25 bp, Homo sapien
aagaccatatcatgccccaaggatg

SEQ ID NO: 1135080 - DNA, 25 bp, Homo sapien
tgggacttgtgggaccattccaaac

SEQ ID NO: 1135081 - DNA, 25 bp, Homo sapien
cagatttgtcgggtttgtgttttgg

SEQ ID NO: 1135082 - DNA, 25 bp, Homo sapien
cacagatttgtcgggtttgtgtttt

SEQ ID NO: 1135083 - DNA, 25 bp, Homo sapien
tcacagatttgtcgggtttgtgttt

SEQ ID NO: 1135084 - DNA, 25 bp, Homo sapien
tttcacagatttgtcgggtttgtgt

SEQ ID NO: 1135085 - DNA, 25 bp, Homo sapien
tgctgtgcagttcaagggccaggcc

SEQ ID NO: 1135086 - DNA, 25 bp, Homo sapien
aggcaaggctgctgtgcagttcaag

SEQ ID NO: 1135087 - DNA, 25 bp, Homo sapien
ggctgctgtgcagttcaagggccag

SEQ ID NO: 1135088 - DNA, 25 bp, Homo sapien
ctgctgtgcagttcaagggccaggc

SEQ ID NO: 1135089 - DNA, 25 bp, Homo sapien
gctcagtgccaatgaatcttgggtc

SEQ ID NO: 1135090 - DNA, 25 bp, Homo sapien
cagcgacagttttacagcagataat

SEQ ID NO: 1135091 - DNA, 25 bp, Homo sapien
ccaagggctgtttgctcagtgccaa

SEQ ID NO: 1135092 - DNA, 25 bp, Homo sapien
tctccatccttcagcgacagtttta

SEQ ID NO: 1135093 - DNA, 25 bp, Homo sapien
tcagctgctgtcagctccttctcat

SEQ ID NO: 1135094 - DNA, 25 bp, Homo sapien
acagagaagatggaattcagctgct

SEQ ID NO: 1135095 - DNA, 25 bp, Homo sapien
cagctgctgtcagctccttctcatt

SEQ ID NO: 1135096 - DNA, 25 bp, Homo sapien
ccagcacacagagaagatggaattc

SEQ ID NO: 1135097 - DNA, 25 bp, Homo sapien
ctctgcttatagtccacaggctcct

SEQ ID NO: 1135098 - DNA, 25 bp, Homo sapien
tcttcggcattgatgccacctgggc

SEQ ID NO: 1135099 - DNA, 25 bp, Homo sapien
acattcagtacactctgcttatagt

SEQ ID NO: 1135100 - DNA, 25 bp, Homo sapien
gactcagtgacatgctcactgctgt

SEQ ID NO: 1135101 - DNA, 25 bp, Homo sapien
gagaagccaatctgggccaggatgt

SEQ ID NO: 1135102 - DNA, 25 bp, Homo sapien
agaagccaatctgggccaggatgta

SEQ ID NO: 1135103 - DNA, 25 bp, Homo sapien
tcatccccggcctatttgcagggga

SEQ ID NO: 1135104 - DNA, 25 bp, Homo sapien
catccccggcctatttgcaggggac

SEQ ID NO: 1135105 - DNA, 25 bp, Homo sapien
cctatttgcaggggacccctgatgc

SEQ ID NO: 1135106 - DNA, 25 bp, Homo sapien
ccggcctatttgcaggggacccctg

SEQ ID NO: 1135107 - DNA, 25 bp, Homo sapien
ggatcccgatgatgatcagcagcac

SEQ ID NO: 1135108 - DNA, 25 bp, Homo sapien
gggatcccgatgatgatcagcagca

SEQ ID NO: 1135109 - DNA, 25 bp, Homo sapien
ggggatcccgatgatgatcagcagc

SEQ ID NO: 1135110 - DNA, 25 bp, Homo sapien
cccccaggcggggacatatatagtg

SEQ ID NO: 1135111 - DNA, 25 bp, Homo sapien
ggagaagccgatgccccccaggcgg

SEQ ID NO: 1135112 - DNA, 25 bp, Homo sapien
atgtgtgcaggagcagctgctcata

SEQ ID NO: 1135113 - DNA, 25 bp, Homo sapien
gcagctgctcatagagcagaccctt

SEQ ID NO: 1135114 - DNA, 25 bp, Homo sapien
tgagcacatgtgtgcaggagcagct

SEQ ID NO: 1135115 - DNA, 25 bp, Homo sapien
gcacatgtgtgcaggagcagctgct

SEQ ID NO: 1135116 - DNA, 25 bp, Homo sapien
gatgctccacccgatgatcacatta

SEQ ID NO: 1135117 - DNA, 25 bp, Homo sapien
tccacccgatgatcacattataata

SEQ ID NO: 1135118 - DNA, 25 bp, Homo sapien
acccgatgatcacattataatacag

SEQ ID NO: 1135119 - DNA, 25 bp, Homo sapien
cagcgggtactggaaggacttgaag

SEQ ID NO: 1135120 - DNA, 25 bp, Homo sapien
cacgctcccattcctgacgacagga

SEQ ID NO: 1135121 - DNA, 25 bp, Homo sapien
cattcctgacgacaggacattcact

SEQ ID NO: 1135122 - DNA, 25 bp, Homo sapien
tgccacgctcccattcctgacgaca

SEQ ID NO: 1135123 - DNA, 25 bp, Homo sapien
gctcccattcctgacgacaggacat

SEQ ID NO: 1135124 - DNA, 25 bp, Homo sapien
gctggctggcatccccagctgggcc

SEQ ID NO: 1135125 - DNA, 25 bp, Homo sapien
ctgggacagggctggctggcatccc

SEQ ID NO: 1135126 - DNA, 25 bp, Homo sapien
gacagggctggctggcatccccagc

SEQ ID NO: 1135127 - DNA, 25 bp, Homo sapien
tggcatccccagctgggccccatac

SEQ ID NO: 1135128 - DNA, 25 bp, Homo sapien
ccatgcctcctgctgcccatgtctc

SEQ ID NO: 1135129 - DNA, 25 bp, Homo sapien
catgcctcctgctgcccatgtctct

SEQ ID NO: 1135130 - DNA, 25 bp, Homo sapien
cctctgctggaccaccactcagggc

SEQ ID NO: 1135131 - DNA, 25 bp, Homo sapien
tcctctgctggaccaccactcaggg

SEQ ID NO: 1135132 - DNA, 25 bp, Homo sapien
gtgctcatcttgggttagccgggat

SEQ ID NO: 1135133 - DNA, 25 bp, Homo sapien
ctgtgctcatcttgggttagccggg

SEQ ID NO: 1135134 - DNA, 25 bp, Homo sapien
ctgaaatagcagcaaaggtcacagg

SEQ ID NO: 1135135 - DNA, 25 bp, Homo sapien
gaaatagcagcaaaggtcacagggc

SEQ ID NO: 1135136 - DNA, 25 bp, Homo sapien
tgaaatagcagcaaaggtcacaggg

SEQ ID NO: 1135137 - DNA, 25 bp, Homo sapien
gactggatgcccttaacgacagcca

SEQ ID NO: 1135138 - DNA, 25 bp, Homo sapien
agggtcatcttccagttgaggcccc

SEQ ID NO: 1135139 - DNA, 25 bp, Homo sapien
tccccacgatgctccaggccacgag

SEQ ID NO: 1135140 - DNA, 25 bp, Homo sapien
cttccccgaggactggatgccctta

SEQ ID NO: 1135141 - DNA, 25 bp, Homo sapien
tgtaggatgccatcaactgcccctc

SEQ ID NO: 1135142 - DNA, 25 bp, Homo sapien
tgaacatgtgtaggatgccatcaac

SEQ ID NO: 1135143 - DNA, 25 bp, Homo sapien
catgtgtaggatgccatcaactgcc

SEQ ID NO: 1135144 - DNA, 25 bp, Homo sapien
ggagtgaacatgtgtaggatgccat

SEQ ID NO: 1135145 - DNA, 25 bp, Homo sapien
tatggagtggcgtgtgccctagcca

SEQ ID NO: 1135146 - DNA, 25 bp, Homo sapien
gaagttggtcacgtgtaaacctctg

SEQ ID NO: 1135147 - DNA, 25 bp, Homo sapien
caagaacactgagggaccatttagg

SEQ ID NO: 1135148 - DNA, 25 bp, Homo sapien
catcaggagcctacagggatttcca

SEQ ID NO: 1135149 - DNA, 25 bp, Homo sapien
tccatgaaaactgatgcactagagc

SEQ ID NO: 1135150 - DNA, 25 bp, Homo sapien
tcctacagcgaaatactatgcatcc

SEQ ID NO: 1135151 - DNA, 25 bp, Homo sapien
cactagagctatacaccaaaattgg

SEQ ID NO: 1135152 - DNA, 25 bp, Homo sapien
gagccctgacgggattagtgcccct

SEQ ID NO: 1135153 - DNA, 25 bp, Homo sapien
actgcaaagtccaggtccgatagcc

SEQ ID NO: 1135154 - DNA, 25 bp, Homo sapien
caaagtccaggtccgatagcctgaa

SEQ ID NO: 1135155 - DNA, 25 bp, Homo sapien
agtccaggtccgatagcctgaatta

SEQ ID NO: 1135156 - DNA, 25 bp, Homo sapien
tccaggtccgatagcctgaattatt

SEQ ID NO: 1135157 - DNA, 25 bp, Homo sapien
taattgcaggtagcccatgctgacc

SEQ ID NO: 1135158 - DNA, 25 bp, Homo sapien
atgattaattgcaggtagcccatgc

SEQ ID NO: 1135159 - DNA, 25 bp, Homo sapien
tcacatgattaattgcaggtagccc

SEQ ID NO: 1135160 - DNA, 25 bp, Homo sapien
gattaattgcaggtagcccatgctg

SEQ ID NO: 1135161 - DNA, 25 bp, Homo sapien
catgatgtcagtttccggtgtaccc

SEQ ID NO: 1135162 - DNA, 25 bp, Homo sapien
gaacttgcccaacaactgctgagtg

SEQ ID NO: 1135163 - DNA, 25 bp, Homo sapien
tgccattgcggaaactgagaccctc

SEQ ID NO: 1135164 - DNA, 25 bp, Homo sapien
tctaactgtgggagtcaagaagctc

SEQ ID NO: 1135165 - DNA, 25 bp, Homo sapien
cggggccacgaagcaccagatggca

SEQ ID NO: 1135166 - DNA, 25 bp, Homo sapien
gggccacgaagcaccagatggcact

SEQ ID NO: 1135167 - DNA, 25 bp, Homo sapien
ggggccacgaagcaccagatggcac

SEQ ID NO: 1135168 - DNA, 25 bp, Homo sapien
tatcaaggcgtttgactcgtgggca

SEQ ID NO: 1135169 - DNA, 25 bp, Homo sapien
gcatgatggctgaactacttcctca

SEQ ID NO: 1135170 - DNA, 25 bp, Homo sapien
ggtaaattgagcctggcaccttcag

SEQ ID NO: 1135171 - DNA, 25 bp, Homo sapien
cttttgagcccacaagcagctgctg

SEQ ID NO: 1135172 - DNA, 25 bp, Homo sapien
acaccagggcggcatcgaagtggca

SEQ ID NO: 1135173 - DNA, 25 bp, Homo sapien
ggccaacactgacgtgaagaagttg

SEQ ID NO: 1135174 - DNA, 25 bp, Homo sapien
cagcaaacaccacgagggtggccaa

SEQ ID NO: 1135175 - DNA, 25 bp, Homo sapien
gtcctgcttattgtagctggagaag

SEQ ID NO: 1135176 - DNA, 25 bp, Homo sapien
cactcccaggtaaggtagacaggga

SEQ ID NO: 1135177 - DNA, 25 bp, Homo sapien
cccactcccaggtaaggtagacagg

SEQ ID NO: 1135178 - DNA, 25 bp, Homo sapien
tcccaggtaaggtagacagggagaa

SEQ ID NO: 1135179 - DNA, 25 bp, Homo sapien
ctgcccactcccaggtaaggtagac

SEQ ID NO: 1135180 - DNA, 25 bp, Homo sapien
ggtgggatgaggtcccggctcagga

SEQ ID NO: 1135181 - DNA, 25 bp, Homo sapien
tccttcacggtcatgatgacattgt

SEQ ID NO: 1135182 - DNA, 25 bp, Homo sapien
cttgtccagctcgtcctccagaagg

SEQ ID NO: 1135183 - DNA, 25 bp, Homo sapien
gctcaggacgttggtgttaaggtac

SEQ ID NO: 1135184 - DNA, 25 bp, Homo sapien
ctgaaggtggggtggaaagcagggc

SEQ ID NO: 1135185 - DNA, 25 bp, Homo sapien
caggcccaggttgataagcatcaag

SEQ ID NO: 1135186 - DNA, 25 bp, Homo sapien
catggtcccgatcatgctgcccagg

SEQ ID NO: 1135187 - DNA, 25 bp, Homo sapien
gcatcaagaagaacatgacggacca

SEQ ID NO: 1135188 - DNA, 25 bp, Homo sapien
tgggcaccttgaaggtgtcgatgat

SEQ ID NO: 1135189 - DNA, 25 bp, Homo sapien
cagtcagaagccagaacggaattgt

SEQ ID NO: 1135190 - DNA, 25 bp, Homo sapien
gagtgctaatcactgagtggcacag

SEQ ID NO: 1135191 - DNA, 25 bp, Homo sapien
aacggaattgttgtccacaagggca

SEQ ID NO: 1135192 - DNA, 25 bp, Homo sapien
aagccagaacggaattgttgtccac

SEQ ID NO: 1135193 - DNA, 25 bp, Homo sapien
taccccgctttagggatgcagatga

SEQ ID NO: 1135194 - DNA, 25 bp, Homo sapien
tcaacgcagcaaaccccgaagggaa

SEQ ID NO: 1135195 - DNA, 25 bp, Homo sapien
agaacagaaagataccccgctttag

SEQ ID NO: 1135196 - DNA, 25 bp, Homo sapien
tctatgggccctagatcaacgcagc

SEQ ID NO: 1135197 - DNA, 25 bp, Homo sapien
agcgatgttctcaaggatgacgatg

SEQ ID NO: 1135198 - DNA, 25 bp, Homo sapien
gctggacgaacaacagccccacgag

SEQ ID NO: 1135199 - DNA, 25 bp, Homo sapien
cagggtggccgagtagtcatcgaac

SEQ ID NO: 1135200 - DNA, 25 bp, Homo sapien
aagtagtttccggagcgctggacga

SEQ ID NO: 1135201 - DNA, 25 bp, Homo sapien
ttcttggttccataaatccaggcca

SEQ ID NO: 1135202 - DNA, 25 bp, Homo sapien
tcttggttccataaatccaggccac

SEQ ID NO: 1135203 - DNA, 25 bp, Homo sapien
cacagccatgcatagtggagacacg

SEQ ID NO: 1135204 - DNA, 25 bp, Homo sapien
gagacacgaacttccacatgtagaa

SEQ ID NO: 1135205 - DNA, 25 bp, Homo sapien
ggtgagcacagccatgcatagtgga

SEQ ID NO: 1135206 - DNA, 25 bp, Homo sapien
catgcatagtggagacacgaacttc

SEQ ID NO: 1135207 - DNA, 25 bp, Homo sapien
aggcgctgtagcccgggggcgtgac

SEQ ID NO: 1135208 - DNA, 25 bp, Homo sapien
gcgctgtagcccgggggcgtgaccc

SEQ ID NO: 1135209 - DNA, 25 bp, Homo sapien
ccgggggcgtgacccccagctggat

SEQ ID NO: 1135210 - DNA, 25 bp, Homo sapien
gggggcgtgacccccagctggatga

SEQ ID NO: 1135211 - DNA, 25 bp, Homo sapien
cacggagagggtgttggagccatca

SEQ ID NO: 1135212 - DNA, 25 bp, Homo sapien
tcgccacgacgatgagggtgatcag

SEQ ID NO: 1135213 - DNA, 25 bp, Homo sapien
tggagatgtccttcatcatgcggcc

SEQ ID NO: 1135214 - DNA, 25 bp, Homo sapien
agcgggtctcatcgttctcctccag

SEQ ID NO: 1135215 - DNA, 25 bp, Homo sapien
cacatgatgtgcacactgggcggct

SEQ ID NO: 1135216 - DNA, 25 bp, Homo sapien
gagtgacttgcgacccttcgtgagg

SEQ ID NO: 1135217 - DNA, 25 bp, Homo sapien
tgcagcagtgctatgagatccctct

SEQ ID NO: 1135218 - DNA, 25 bp, Homo sapien
gatcttagctcatcaggtgacccca

SEQ ID NO: 1135219 - DNA, 25 bp, Homo sapien
cagcccccatctgggcctcgggctt

SEQ ID NO: 1135220 - DNA, 25 bp, Homo sapien
ctgttcagcccccatctgggcctcg

SEQ ID NO: 1135221 - DNA, 25 bp, Homo sapien
gttcagcccccatctgggcctcggg

SEQ ID NO: 1135222 - DNA, 25 bp, Homo sapien
cccccatctgggcctcgggcttcat

SEQ ID NO: 1135223 - DNA, 25 bp, Homo sapien
cctggtaatactgcaggcctgtgca

SEQ ID NO: 1135224 - DNA, 25 bp, Homo sapien
ggcagaagctgacctcactggcatt

SEQ ID NO: 1135225 - DNA, 25 bp, Homo sapien
tcagggcctatttgaaggatccagg

SEQ ID NO: 1135226 - DNA, 25 bp, Homo sapien
cagaacccaaagtgacggcctggtg

SEQ ID NO: 1135227 - DNA, 25 bp, Homo sapien
ccttgatacctgacaggcttaagca

SEQ ID NO: 1135228 - DNA, 25 bp, Homo sapien
aggcttaagcaagaccacaaagcag

SEQ ID NO: 1135229 - DNA, 25 bp, Homo sapien
taagcaagaccacaaagcagccact

SEQ ID NO: 1135230 - DNA, 25 bp, Homo sapien
agcaagaccacaaagcagccactat

SEQ ID NO: 1135231 - DNA, 25 bp, Homo sapien
tctggtggtgctagaacatcctggc

SEQ ID NO: 1135232 - DNA, 25 bp, Homo sapien
tctgccattgggactctgcctactc

SEQ ID NO: 1135233 - DNA, 25 bp, Homo sapien
ctgttgattccaggacctcaggtac

SEQ ID NO: 1135234 - DNA, 25 bp, Homo sapien
tggtgctagaacatcctggctccag

SEQ ID NO: 1135235 - DNA, 25 bp, Homo sapien
ctctgcggtgcttgtggatagtgat

SEQ ID NO: 1135236 - DNA, 25 bp, Homo sapien
ccaactggtgcttccactctgcggt

SEQ ID NO: 1135237 - DNA, 25 bp, Homo sapien
ccactctgcggtgcttgtggatagt

SEQ ID NO: 1135238 - DNA, 25 bp, Homo sapien
tggtgcttccactctgcggtgcttg

SEQ ID NO: 1135239 - DNA, 25 bp, Homo sapien
ggagcctcagcgcaacgccccggcg

SEQ ID NO: 1135240 - DNA, 25 bp, Homo sapien
ttcctgcgatctggcggcgctggga

SEQ ID NO: 1135241 - DNA, 25 bp, Homo sapien
cctggttcctgcgatctggcggcgc

SEQ ID NO: 1135242 - DNA, 25 bp, Homo sapien
agagggagcctcagcgcaacgcccc

SEQ ID NO: 1135243 - DNA, 25 bp, Homo sapien
ccgggctgcttgcggtcaacacgag

SEQ ID NO: 1135244 - DNA, 25 bp, Homo sapien
ctgcttgcggtcaacacgaggcggc

SEQ ID NO: 1135245 - DNA, 25 bp, Homo sapien
gctgcttgcggtcaacacgaggcgg

SEQ ID NO: 1135246 - DNA, 25 bp, Homo sapien
gggctgcttgcggtcaacacgaggc

SEQ ID NO: 1135247 - DNA, 25 bp, Homo sapien
gcgcagcagcaacaagtcctccgag

SEQ ID NO: 1135248 - DNA, 25 bp, Homo sapien
cttcccgaggaggcagcgtcagacg

SEQ ID NO: 1135249 - DNA, 25 bp, Homo sapien
tcccgaggaggcagcgtcagacggg

SEQ ID NO: 1135250 - DNA, 25 bp, Homo sapien
ggtggcggccccctctgcggcttgg

SEQ ID NO: 1135251 - DNA, 25 bp, Homo sapien
gcggccccctctgcggcttgggctt

SEQ ID NO: 1135252 - DNA, 25 bp, Homo sapien
ggggcggccgctgccctccaaacac

SEQ ID NO: 1135253 - DNA, 25 bp, Homo sapien
gggcggccgctgccctccaaacacc

SEQ ID NO: 1135254 - DNA, 25 bp, Homo sapien
gatcttctccgacgcctcgcccttg

SEQ ID NO: 1135255 - DNA, 25 bp, Homo sapien
acggaggcttgttccccgacttgcg

SEQ ID NO: 1135256 - DNA, 25 bp, Homo sapien
tcctccttcagacatgttttggacg

SEQ ID NO: 1135257 - DNA, 25 bp, Homo sapien
cgcccgcggtaggaggagacacaca

SEQ ID NO: 1135258 - DNA, 25 bp, Homo sapien
tgcggtaggtctcatgtcgcgtgcc

SEQ ID NO: 1135259 - DNA, 25 bp, Homo sapien
cacaccgccgccatcggtctcgggc

SEQ ID NO: 1135260 - DNA, 25 bp, Homo sapien
ggtgctgcggtaggtctcatgtcgc

SEQ ID NO: 1135261 - DNA, 25 bp, Homo sapien
taggtctcatgtcgcgtgccgccca

SEQ ID NO: 1135262 - DNA, 25 bp, Homo sapien
tccgtccgggctctcgaagatgtcg

SEQ ID NO: 1135263 - DNA, 25 bp, Homo sapien
tagcggcccgggaggagtagggatc

SEQ ID NO: 1135264 - DNA, 25 bp, Homo sapien
aggtgagctcctcttcgaagagcgg

SEQ ID NO: 1135265 - DNA, 25 bp, Homo sapien
agctcccgctcatcgtcgccggcct

SEQ ID NO: 1135266 - DNA, 25 bp, Homo sapien
gtaagtcaagtgtgtgcaatctcct

SEQ ID NO: 1135267 - DNA, 25 bp, Homo sapien
tgggactgggtccaagtagtaagtc

SEQ ID NO: 1135268 - DNA, 25 bp, Homo sapien
gggatgcggcaaagcaggcagctgg

SEQ ID NO: 1135269 - DNA, 25 bp, Homo sapien
caatctcctgatggagcgtgcaggg

SEQ ID NO: 1135270 - DNA, 25 bp, Homo sapien
gctcaataatgagcagttattcatt

SEQ ID NO: 1135271 - DNA, 25 bp, Homo sapien
aaaattatgtattcccacttgtgtg

SEQ ID NO: 1135272 - DNA, 25 bp, Homo sapien
tacagcaatgtatctgtctggggtg

SEQ ID NO: 1135273 - DNA, 25 bp, Homo sapien
tcacagcctcaatctattaaacggg

SEQ ID NO: 1135274 - DNA, 25 bp, Homo sapien
ttgctgtgtgcgaaaggacgcctca

SEQ ID NO: 1135275 - DNA, 25 bp, Homo sapien
tgtagctaggcaacaggctctcata

SEQ ID NO: 1135276 - DNA, 25 bp, Homo sapien
tgttgtaatcacaagagcaagggct

SEQ ID NO: 1135277 - DNA, 25 bp, Homo sapien
cagggactctggctttgattcaaag

SEQ ID NO: 1135278 - DNA, 25 bp, Homo sapien
agctcaggccacagaaacggaacca

SEQ ID NO: 1135279 - DNA, 25 bp, Homo sapien
ccacagaaacggaaccacagcagca

SEQ ID NO: 1135280 - DNA, 25 bp, Homo sapien
tcaggccacagaaacggaaccacag

SEQ ID NO: 1135281 - DNA, 25 bp, Homo sapien
aggccacagaaacggaaccacagca

SEQ ID NO: 1135282 - DNA, 25 bp, Homo sapien
aagtggtgcgaccttgagaaagccc

SEQ ID NO: 1135283 - DNA, 25 bp, Homo sapien
gtttctaaagtttcggatgctgcca

SEQ ID NO: 1135284 - DNA, 25 bp, Homo sapien
gctgtgaagtctccacggtgagcct

SEQ ID NO: 1135285 - DNA, 25 bp, Homo sapien
tgagtagtagcagaaagcacaggcc

SEQ ID NO: 1135286 - DNA, 25 bp, Homo sapien
taaagcctgtcgtgatcactgacct

SEQ ID NO: 1135287 - DNA, 25 bp, Homo sapien
ggttcaccctagctcagagggcaca

SEQ ID NO: 1135288 - DNA, 25 bp, Homo sapien
agccagggaacttcagaagcgggca

SEQ ID NO: 1135289 - DNA, 25 bp, Homo sapien
cagcatcagtgagtcctggccctca

SEQ ID NO: 1135290 - DNA, 25 bp, Homo sapien
gaggtcatggcaagtcagttacgca

SEQ ID NO: 1135291 - DNA, 25 bp, Homo sapien
gacaaagtgacaagggtatatgccc

SEQ ID NO: 1135292 - DNA, 25 bp, Homo sapien
ttccagataaggacccctgctaggg

SEQ ID NO: 1135293 - DNA, 25 bp, Homo sapien
cccacatgtgtatggtaagtacgca

SEQ ID NO: 1135294 - DNA, 25 bp, Homo sapien
tctacccgacttggcttttgtcagg

SEQ ID NO: 1135295 - DNA, 25 bp, Homo sapien
acttggcttttgtcaggagcatggc

SEQ ID NO: 1135296 - DNA, 25 bp, Homo sapien
ccgacttggcttttgtcaggagcat

SEQ ID NO: 1135297 - DNA, 25 bp, Homo sapien
tacccgacttggcttttgtcaggag

SEQ ID NO: 1135298 - DNA, 25 bp, Homo sapien
cctctcacttcctattgaactttat

SEQ ID NO: 1135299 - DNA, 25 bp, Homo sapien
ttttcttacgactcctgtggcacct

SEQ ID NO: 1135300 - DNA, 25 bp, Homo sapien
tgtggcacctctcatgatccgtctt

SEQ ID NO: 1135301 - DNA, 25 bp, Homo sapien
gatccgtcttgtattactgttgcca

SEQ ID NO: 1135302 - DNA, 25 bp, Homo sapien
tccctaacgctgcatatggtttagc

SEQ ID NO: 1135303 - DNA, 25 bp, Homo sapien
tctgcttgagctggtcacctgacca

SEQ ID NO: 1135304 - DNA, 25 bp, Homo sapien
tggtttagctctacccacatggaaa

SEQ ID NO: 1135305 - DNA, 25 bp, Homo sapien
aaggcccacccaattcaacttctag

SEQ ID NO: 1135306 - DNA, 25 bp, Homo sapien
tgcccagaacggatgagtccctacc

SEQ ID NO: 1135307 - DNA, 25 bp, Homo sapien
ccctaccccagaaggaattcagtct

SEQ ID NO: 1135308 - DNA, 25 bp, Homo sapien
ctgggttgcccagaacggatgagtc

SEQ ID NO: 1135309 - DNA, 25 bp, Homo sapien
agtctagcccggatcactatccaag

SEQ ID NO: 1135310 - DNA, 25 bp, Homo sapien
ccagtgtccagaacccacctctacc

SEQ ID NO: 1135311 - DNA, 25 bp, Homo sapien
cccagtgtccagaacccacctctac

SEQ ID NO: 1135312 - DNA, 25 bp, Homo sapien
tcccagtgtccagaacccacctcta

SEQ ID NO: 1135313 - DNA, 25 bp, Homo sapien
gcacaaagcctagagcattccagga

SEQ ID NO: 1135314 - DNA, 25 bp, Homo sapien
caggaaatgagaaggtctgccaaac

SEQ ID NO: 1135315 - DNA, 25 bp, Homo sapien
tccagggaagcaagatccttgtgcc

SEQ ID NO: 1135316 - DNA, 25 bp, Homo sapien
tgagggcccgcactaaggcctaggt

SEQ ID NO: 1135317 - DNA, 25 bp, Homo sapien
tccctaggtgggctggcaaaagtgc

SEQ ID NO: 1135318 - DNA, 25 bp, Homo sapien
cacatcctggattagggaacaaccc

SEQ ID NO: 1135319 - DNA, 25 bp, Homo sapien
tgaaggtgagccgaatctggagcca

SEQ ID NO: 1135320 - DNA, 25 bp, Homo sapien
aaaactgccggtgaactggctccac

SEQ ID NO: 1135321 - DNA, 25 bp, Homo sapien
tcactgtacctcattcgcactttaa

SEQ ID NO: 1135322 - DNA, 25 bp, Homo sapien
cattcgcactttaacttggatgggt

SEQ ID NO: 1135323 - DNA, 25 bp, Homo sapien
cttggatgggttgatcagaaacagc

SEQ ID NO: 1135324 - DNA, 25 bp, Homo sapien
cactttaacttggatgggttgatca

SEQ ID NO: 1135325 - DNA, 25 bp, Homo sapien
aaggctgtaccttttcgtcatacca

SEQ ID NO: 1135326 - DNA, 25 bp, Homo sapien
gcctggtactgttaagcactctgta

SEQ ID NO: 1135327 - DNA, 25 bp, Homo sapien
gaacatcagagacgttacatacttg

SEQ ID NO: 1135328 - DNA, 25 bp, Homo sapien
gatcctgttcccagttagctccctg

SEQ ID NO: 1135329 - DNA, 25 bp, Homo sapien
cttgttcttagtactgcaaaacacc

SEQ ID NO: 1135330 - DNA, 25 bp, Homo sapien
ttgttcttagtactgcaaaacacca

SEQ ID NO: 1135331 - DNA, 25 bp, Homo sapien
tgaccagacggctgagcctaaatag

SEQ ID NO: 1135332 - DNA, 25 bp, Homo sapien
gttattcatgccgtgccatccacca

SEQ ID NO: 1135333 - DNA, 25 bp, Homo sapien
gcggctgggtttaagtgtccaatca

SEQ ID NO: 1135334 - DNA, 25 bp, Homo sapien
tgtaataacaccaattatggaggct

SEQ ID NO: 1135335 - DNA, 25 bp, Homo sapien
gctgatctcgacagctgctgggatc

SEQ ID NO: 1135336 - DNA, 25 bp, Homo sapien
ccatacgcatcagcatcagagtggc

SEQ ID NO: 1135337 - DNA, 25 bp, Homo sapien
gatctcgacagctgctgggatctcg

SEQ ID NO: 1135338 - DNA, 25 bp, Homo sapien
agaaaaaggaaccatacgcatcagc

SEQ ID NO: 1135339 - DNA, 25 bp, Homo sapien
ggtggtctggtcagaagaaccagtc

SEQ ID NO: 1135340 - DNA, 25 bp, Homo sapien
ggcagacaacatgcaccatggcagt

SEQ ID NO: 1135341 - DNA, 25 bp, Homo sapien
gaagaaccagtctcactccttccca

SEQ ID NO: 1135342 - DNA, 25 bp, Homo sapien
cagacaacatgcaccatggcagttg

SEQ ID NO: 1135343 - DNA, 25 bp, Homo sapien
cttaggatgtccccgctgactgcct

SEQ ID NO: 1135344 - DNA, 25 bp, Homo sapien
ccgctgactgcctagatggtgagga

SEQ ID NO: 1135345 - DNA, 25 bp, Homo sapien
gactgcctagatggtgaggaagccc

SEQ ID NO: 1135346 - DNA, 25 bp, Homo sapien
tgtccccgctgactgcctagatggt

SEQ ID NO: 1135347 - DNA, 25 bp, Homo sapien
taaggcttctcaagctgcaatggga

SEQ ID NO: 1135348 - DNA, 25 bp, Homo sapien
catttgtaataagcactcaggtgag

SEQ ID NO: 1135349 - DNA, 25 bp, Homo sapien
tacaatgcattcctgatccagaggc

SEQ ID NO: 1135350 - DNA, 25 bp, Homo sapien
tatgaaggaatgctccgaggcaggt

SEQ ID NO: 1135351 - DNA, 25 bp, Homo sapien
tattaaaggcctcatgggtctccag

SEQ ID NO: 1135352 - DNA, 25 bp, Homo sapien
ggaggatctctgtcacgttgcggtc

SEQ ID NO: 1135353 - DNA, 25 bp, Homo sapien
gagcaggttcttgacgaagtccagc

SEQ ID NO: 1135354 - DNA, 25 bp, Homo sapien
tggtgatgttccctacgcggaggat

SEQ ID NO: 1135355 - DNA, 25 bp, Homo sapien
ttgttgacgatgacaggcaccggca

SEQ ID NO: 1135356 - DNA, 25 bp, Homo sapien
agtacatgggtgactccagctgcgc

SEQ ID NO: 1135357 - DNA, 25 bp, Homo sapien
gagcttgaagatacgcaggatgcgc

SEQ ID NO: 1135358 - DNA, 25 bp, Homo sapien
tgaagtcggtgtggtcattaccccg

SEQ ID NO: 1135359 - DNA, 25 bp, Homo sapien
catttggaaactccctaggccactg

SEQ ID NO: 1135360 - DNA, 25 bp, Homo sapien
agggaagccccacacaaaacacatg

SEQ ID NO: 1135361 - DNA, 25 bp, Homo sapien
cacatctttatgcttagggaagccc

SEQ ID NO: 1135362 - DNA, 25 bp, Homo sapien
gccaaatcccaaggtctgaggtcca

SEQ ID NO: 1135363 - DNA, 25 bp, Homo sapien
gacccgggcatgtatgataggcaca

SEQ ID NO: 1135364 - DNA, 25 bp, Homo sapien
ctctcagggtcaggctaagggcaag

SEQ ID NO: 1135365 - DNA, 25 bp, Homo sapien
gagtgcagctgaaattccccgggaa

SEQ ID NO: 1135366 - DNA, 25 bp, Homo sapien
taccatgagaaaagctccgacgcag

SEQ ID NO: 1135367 - DNA, 25 bp, Homo sapien
aggcatagtccccagtgctgagcag

SEQ ID NO: 1135368 - DNA, 25 bp, Homo sapien
tttccggacactaccatcggcgcag

SEQ ID NO: 1135369 - DNA, 25 bp, Homo sapien
tttctgtctcgagtggtggagcgtc

SEQ ID NO: 1135370 - DNA, 25 bp, Homo sapien
ctcatcagacagcactgcgttggca

SEQ ID NO: 1135371 - DNA, 25 bp, Homo sapien
gccttttccgacaagcagaggatgg

SEQ ID NO: 1135372 - DNA, 25 bp, Homo sapien
tttccgaggccaggaatccctagct

SEQ ID NO: 1135373 - DNA, 25 bp, Homo sapien
gggcaagagagacgaataagtgatc

SEQ ID NO: 1135374 - DNA, 25 bp, Homo sapien
tgatcattcctacccgctttccgag

SEQ ID NO: 1135375 - DNA, 25 bp, Homo sapien
cagctgacttttgtcctgtcctgcc

SEQ ID NO: 1135376 - DNA, 25 bp, Homo sapien
ccagctgacttttgtcctgtcctgc

SEQ ID NO: 1135377 - DNA, 25 bp, Homo sapien
agctgacttttgtcctgtcctgccc

SEQ ID NO: 1135378 - DNA, 25 bp, Homo sapien
tagggcaagctgtaacgcgatgcca

SEQ ID NO: 1135379 - DNA, 25 bp, Homo sapien
taacgcgatgccagtggagacagcc

SEQ ID NO: 1135380 - DNA, 25 bp, Homo sapien
caactatgttgtttagactccggga

SEQ ID NO: 1135381 - DNA, 25 bp, Homo sapien
tgagcaggaactttttcagagggta

SEQ ID NO: 1135382 - DNA, 25 bp, Homo sapien
tgtcaggtctaattcccatcaggtg

SEQ ID NO: 1135383 - DNA, 25 bp, Homo sapien
tgggagtcaccactgaatctgggca

SEQ ID NO: 1135384 - DNA, 25 bp, Homo sapien
gagatgcccgacataacagccttgt

SEQ ID NO: 1135385 - DNA, 25 bp, Homo sapien
ccatcaggtgaaagaggaaacgtct

SEQ ID NO: 1135386 - DNA, 25 bp, Homo sapien
aattaggccctaagatgcaccggtg

SEQ ID NO: 1135387 - DNA, 25 bp, Homo sapien
tgcaggtccaagtctagcccaagga

SEQ ID NO: 1135388 - DNA, 25 bp, Homo sapien
caccggtgagaatgcctgggctact

SEQ ID NO: 1135389 - DNA, 25 bp, Homo sapien
cagcaaggctgtcaagtgtcccaga

SEQ ID NO: 1135390 - DNA, 25 bp, Homo sapien
gtagggcaggtaggagtactgctgt

SEQ ID NO: 1135391 - DNA, 25 bp, Homo sapien
tccagacccgctgggacaacccctg

SEQ ID NO: 1135392 - DNA, 25 bp, Homo sapien
tgcagatctgggtcaacagtggagg

SEQ ID NO: 1135393 - DNA, 25 bp, Homo sapien
ctctcgggtctgaggtctagggcta

SEQ ID NO: 1135394 - DNA, 25 bp, Homo sapien
gggatgtctaccacctgggcctttc

SEQ ID NO: 1135395 - DNA, 25 bp, Homo sapien
ggtcaggaaatagtaccttattgag

SEQ ID NO: 1135396 - DNA, 25 bp, Homo sapien
agcctgggatgtctaccacctgggc

SEQ ID NO: 1135397 - DNA, 25 bp, Homo sapien
cttttgggatcccaccctcagcctg

SEQ ID NO: 1135398 - DNA, 25 bp, Homo sapien
gggcatgcagcctcaggtgaatgct

SEQ ID NO: 1135399 - DNA, 25 bp, Homo sapien
tcaatgtggcaggaacagagtccca

SEQ ID NO: 1135400 - DNA, 25 bp, Homo sapien
cccagcagttggagggcatgcagcc

SEQ ID NO: 1135401 - DNA, 25 bp, Homo sapien
tggcaggaacagagtcccagcagtt

SEQ ID NO: 1135402 - DNA, 25 bp, Homo sapien
gagaaagggaccatagctctgcagc

SEQ ID NO: 1135403 - DNA, 25 bp, Homo sapien
gcctcttaggtcttcaaagctccag

SEQ ID NO: 1135404 - DNA, 25 bp, Homo sapien
tgttgcctgaccaacttgagctctc

SEQ ID NO: 1135405 - DNA, 25 bp, Homo sapien
gagtatgatgccatgtcgtgcccag

SEQ ID NO: 1135406 - DNA, 25 bp, Homo sapien
gtgtgagacactgggacgcacgctt

SEQ ID NO: 1135407 - DNA, 25 bp, Homo sapien
gctttcggctcaacattgccttctg

SEQ ID NO: 1135408 - DNA, 25 bp, Homo sapien
gaatgagacgttagaaggaagccag

SEQ ID NO: 1135409 - DNA, 25 bp, Homo sapien
caggtgatgttgtagctcatcgcca

SEQ ID NO: 1135410 - DNA, 25 bp, Homo sapien
gctcgagcacagcatgacagttgga

SEQ ID NO: 1135411 - DNA, 25 bp, Homo sapien
tcagcctgggcatagttggacgaga

SEQ ID NO: 1135412 - DNA, 25 bp, Homo sapien
ccgagggtcgcatgggagattttcc

SEQ ID NO: 1135413 - DNA, 25 bp, Homo sapien
gggtcacctggcctctgctattgca

SEQ ID NO: 1135414 - DNA, 25 bp, Homo sapien
aagcaagactttgaattgaggcccc

SEQ ID NO: 1135415 - DNA, 25 bp, Homo sapien
ggcccctatggtcctacacagatgc

SEQ ID NO: 1135416 - DNA, 25 bp, Homo sapien
cactgtgccgctactatatgtcata

SEQ ID NO: 1135417 - DNA, 25 bp, Homo sapien
caaacagggaaaccatttcggtgag

SEQ ID NO: 1135418 - DNA, 25 bp, Homo sapien
cccaagacagctcccgggtgtgttc

SEQ ID NO: 1135419 - DNA, 25 bp, Homo sapien
gtttgccctccactaccggaggaga

SEQ ID NO: 1135420 - DNA, 25 bp, Homo sapien
ccttacacttcaggaacaggcttcc

SEQ ID NO: 1135421 - DNA, 25 bp, Homo sapien
tatctttaattgacactggctgcct

SEQ ID NO: 1135422 - DNA, 25 bp, Homo sapien
gaggaggggcagtctgctgcttctc

SEQ ID NO: 1135423 - DNA, 25 bp, Homo sapien
cttgggctcgactccagctttgggg

SEQ ID NO: 1135424 - DNA, 25 bp, Homo sapien
tcgactccagctttggggaacagga

SEQ ID NO: 1135425 - DNA, 25 bp, Homo sapien
aggaggaagccagagccctttcttc

SEQ ID NO: 1135426 - DNA, 25 bp, Homo sapien
tttcttccttgacagcacggcctgc

SEQ ID NO: 1135427 - DNA, 25 bp, Homo sapien
cagagagtggctaagcattggaccc

SEQ ID NO: 1135428 - DNA, 25 bp, Homo sapien
tggctcaatgagagagacacggcct

SEQ ID NO: 1135429 - DNA, 25 bp, Homo sapien
tgaggaaatagacgttcacagaggc

SEQ ID NO: 1135430 - DNA, 25 bp, Homo sapien
cactggaggttatgactcacaagcc

SEQ ID NO: 1135431 - DNA, 25 bp, Homo sapien
aataaggttcttatatatacctact

SEQ ID NO: 1135432 - DNA, 25 bp, Homo sapien
tattatttccggatctgctctctgc

SEQ ID NO: 1135433 - DNA, 25 bp, Homo sapien
gtagttgggatcaggtttccaagac

SEQ ID NO: 1135434 - DNA, 25 bp, Homo sapien
ccacctattatttccggatctgctc

SEQ ID NO: 1135435 - DNA, 25 bp, Homo sapien
ccattttaagaagctctctctctgg

SEQ ID NO: 1135436 - DNA, 25 bp, Homo sapien
ttttaagaagctctctctctggtga

SEQ ID NO: 1135437 - DNA, 25 bp, Homo sapien
tgtagaacttggtaataggttggaa

SEQ ID NO: 1135438 - DNA, 25 bp, Homo sapien
taggttggaatacgggtgggagata

SEQ ID NO: 1135439 - DNA, 25 bp, Homo sapien
ccgtggaccagaaatcgatggcagt

SEQ ID NO: 1135440 - DNA, 25 bp, Homo sapien
ccaggcagggtctgtcagtgtcaat

SEQ ID NO: 1135441 - DNA, 25 bp, Homo sapien
ggcttgggctggtcgtaaacactca

SEQ ID NO: 1135442 - DNA, 25 bp, Homo sapien
tctggaaaaggacttctagtgcttc

SEQ ID NO: 1135443 - DNA, 25 bp, Homo sapien
caggtccgggaagcaggttagagag

SEQ ID NO: 1135444 - DNA, 25 bp, Homo sapien
cactgcttcgggaagcaagcacaca

SEQ ID NO: 1135445 - DNA, 25 bp, Homo sapien
ccacttctgggtcgctaaggcggaa

SEQ ID NO: 1135446 - DNA, 25 bp, Homo sapien
gtgtgggtctccgtctggcttctca

SEQ ID NO: 1135447 - DNA, 25 bp, Homo sapien
catgggcattccctacgatgctggc

SEQ ID NO: 1135448 - DNA, 25 bp, Homo sapien
caccctttacatcggagaagcccag

SEQ ID NO: 1135449 - DNA, 25 bp, Homo sapien
caggcacagatagtacaaagagcca

SEQ ID NO: 1135450 - DNA, 25 bp, Homo sapien
gatacccaccctctcaatgtcagaa

SEQ ID NO: 1135451 - DNA, 25 bp, Homo sapien
cacggttgtaaatggggatgaagtc

SEQ ID NO: 1135452 - DNA, 25 bp, Homo sapien
tctggaccccaagtgatagatgtga

SEQ ID NO: 1135453 - DNA, 25 bp, Homo sapien
cctctagtcacacggttgtaaatgg

SEQ ID NO: 1135454 - DNA, 25 bp, Homo sapien
tgactcatggttggtagctaaaaat

SEQ ID NO: 1135455 - DNA, 25 bp, Homo sapien
cattttgacatgaggcactagccac

SEQ ID NO: 1135456 - DNA, 25 bp, Homo sapien
gaaaggtgggtctaatctatggcct

SEQ ID NO: 1135457 - DNA, 25 bp, Homo sapien
ggaaagcagccgagtaaacatctag

SEQ ID NO: 1135458 - DNA, 25 bp, Homo sapien
tgtgatctaattggccagggctaca

SEQ ID NO: 1135459 - DNA, 25 bp, Homo sapien
gagctccacctgtgctgttgtttcc

SEQ ID NO: 1135460 - DNA, 25 bp, Homo sapien
ggacctctgccatcgtttgccttca

SEQ ID NO: 1135461 - DNA, 25 bp, Homo sapien
tcttgatccccattggcccagagct

SEQ ID NO: 1135462 - DNA, 25 bp, Homo sapien
tcctgagaggaagttcggttgtcct

SEQ ID NO: 1135463 - DNA, 25 bp, Homo sapien
aagctttgcagtatccttccttcaa

SEQ ID NO: 1135464 - DNA, 25 bp, Homo sapien
actgcagaggggattttccttcctg

SEQ ID NO: 1135465 - DNA, 25 bp, Homo sapien
ctggtatccaacactgatcttttat

SEQ ID NO: 1135466 - DNA, 25 bp, Homo sapien
tgatcttttatactcaaaaaatgag

SEQ ID NO: 1135467 - DNA, 25 bp, Homo sapien
aataacttggatcaagagaatcatt

SEQ ID NO: 1135468 - DNA, 25 bp, Homo sapien
aaacacatttattatgctcccaacc

SEQ ID NO: 1135469 - DNA, 25 bp, Homo sapien
acatttattatgctcccaacccata

SEQ ID NO: 1135470 - DNA, 25 bp, Homo sapien
aaataacttggatcaagagaatcat

SEQ ID NO: 1135471 - DNA, 25 bp, Homo sapien
caggctccatgttatcaactgtgtc

SEQ ID NO: 1135472 - DNA, 25 bp, Homo sapien
aaactttcccaactgacgtcttctg

SEQ ID NO: 1135473 - DNA, 25 bp, Homo sapien
cccaactgacgtcttctggacaggc

SEQ ID NO: 1135474 - DNA, 25 bp, Homo sapien
tggacaggctccatgttatcaactg

SEQ ID NO: 1135475 - DNA, 25 bp, Homo sapien
aacagcactattgtgtgactacagc

SEQ ID NO: 1135476 - DNA, 25 bp, Homo sapien
cagcactattgtgtgactacagcat

SEQ ID NO: 1135477 - DNA, 25 bp, Homo sapien
tgactacagcatcctatggaaaatt

SEQ ID NO: 1135478 - DNA, 25 bp, Homo sapien
gactacagcatcctatggaaaattt

SEQ ID NO: 1135479 - DNA, 25 bp, Homo sapien
caagaattcttctaataacacccca

SEQ ID NO: 1135480 - DNA, 25 bp, Homo sapien
tttgcacagctatataaaacctttt

SEQ ID NO: 1135481 - DNA, 25 bp, Homo sapien
tgcacctagtgagatcatacaactt

SEQ ID NO: 1135482 - DNA, 25 bp, Homo sapien
aagaaagggtcttataaatctgcac

SEQ ID NO: 1135483 - DNA, 25 bp, Homo sapien
agacatgtaagagcctcgctcctcc

SEQ ID NO: 1135484 - DNA, 25 bp, Homo sapien
cagacatgtaagagcctcgctcctc

SEQ ID NO: 1135485 - DNA, 25 bp, Homo sapien
tcagacatgtaagagcctcgctcct

SEQ ID NO: 1135486 - DNA, 25 bp, Homo sapien
tctttgtctccattatgggctcttt

SEQ ID NO: 1135487 - DNA, 25 bp, Homo sapien
gcttcctgaattctagtctgagaat

SEQ ID NO: 1135488 - DNA, 25 bp, Homo sapien
ttcctgaattctagtctgagaatcc

SEQ ID NO: 1135489 - DNA, 25 bp, Homo sapien
cctctttgtctccattatgggctct

SEQ ID NO: 1135490 - DNA, 25 bp, Homo sapien
gcacttaactttccaggaggccaca

SEQ ID NO: 1135491 - DNA, 25 bp, Homo sapien
ttgcacttaactttccaggaggcca

SEQ ID NO: 1135492 - DNA, 25 bp, Homo sapien
ctttgcacttaactttccaggaggc

SEQ ID NO: 1135493 - DNA, 25 bp, Homo sapien
gcctttgcacttaactttccaggag

SEQ ID NO: 1135494 - DNA, 25 bp, Homo sapien
cgaatagtacaattccccgatgtga

SEQ ID NO: 1135495 - DNA, 25 bp, Homo sapien
cttttcgcacaggagagagctggtc

SEQ ID NO: 1135496 - DNA, 25 bp, Homo sapien
aggagagagctggtcgaatagtaca

SEQ ID NO: 1135497 - DNA, 25 bp, Homo sapien
actcgcctctgacttttcgcacagg

SEQ ID NO: 1135498 - DNA, 25 bp, Homo sapien
atagacacatcggtttcggctgtta

SEQ ID NO: 1135499 - DNA, 25 bp, Homo sapien
ccatagacacatcggtttcggctgt

SEQ ID NO: 1135500 - DNA, 25 bp, Homo sapien
gcaccatagacacatcggtttcggc

SEQ ID NO: 1135501 - DNA, 25 bp, Homo sapien
cagcaccatagacacatcggtttcg

SEQ ID NO: 1135502 - DNA, 25 bp, Homo sapien
ctgtggaagagtgttatttacaaga

SEQ ID NO: 1135503 - DNA, 25 bp, Homo sapien
tgtggaagagtgttatttacaagaa

SEQ ID NO: 1135504 - DNA, 25 bp, Homo sapien
tgggattgctttctttcgttccaag

SEQ ID NO: 1135505 - DNA, 25 bp, Homo sapien
attgctttctttcgttccaagttgg

SEQ ID NO: 1135506 - DNA, 25 bp, Homo sapien
cacttgggattgctttctttcgttc

SEQ ID NO: 1135507 - DNA, 25 bp, Homo sapien
gattgctttctttcgttccaagttg

SEQ ID NO: 1135508 - DNA, 25 bp, Homo sapien
cagagacagtccgaggaaggccttc

SEQ ID NO: 1135509 - DNA, 25 bp, Homo sapien
ctttcatccctagggtgggacagcg

SEQ ID NO: 1135510 - DNA, 25 bp, Homo sapien
tgtgcatcaaatctagtctctgaaa

SEQ ID NO: 1135511 - DNA, 25 bp, Homo sapien
caagcagcgtctttctgtgcatcaa

SEQ ID NO: 1135512 - DNA, 25 bp, Homo sapien
cagacccatggacacagtctgagga

SEQ ID NO: 1135513 - DNA, 25 bp, Homo sapien
cccagacccatggacacagtctgag

SEQ ID NO: 1135514 - DNA, 25 bp, Homo sapien
agcaggcatcacagagtagtggaag

SEQ ID NO: 1135515 - DNA, 25 bp, Homo sapien
gcatcacagagtagtggaagcggaa

SEQ ID NO: 1135516 - DNA, 25 bp, Homo sapien
ggaaatgtagacattttcagggaaa

SEQ ID NO: 1135517 - DNA, 25 bp, Homo sapien
gaaaaccagatgctctggttgccta

SEQ ID NO: 1135518 - DNA, 25 bp, Homo sapien
cagatgctctggttgcctatcccca

SEQ ID NO: 1135519 - DNA, 25 bp, Homo sapien
cattttcagggaaaaccagatgctc

SEQ ID NO: 1135520 - DNA, 25 bp, Homo sapien
tgtagcaagggtagacaacatcctc

SEQ ID NO: 1135521 - DNA, 25 bp, Homo sapien
tagcaagggtagacaacatcctcct

SEQ ID NO: 1135522 - DNA, 25 bp, Homo sapien
cttgtagcaagggtagacaacatcc

SEQ ID NO: 1135523 - DNA, 25 bp, Homo sapien
gcaagggtagacaacatcctcctac

SEQ ID NO: 1135524 - DNA, 25 bp, Homo sapien
gaagtttcctcctgaaaggcctgtg

SEQ ID NO: 1135525 - DNA, 25 bp, Homo sapien
ttgaaatctacaacctcagccacct

SEQ ID NO: 1135526 - DNA, 25 bp, Homo sapien
ttctgtggccttgctttgaaatcta

SEQ ID NO: 1135527 - DNA, 25 bp, Homo sapien
gaagctctgaaaagaaacactggtc

SEQ ID NO: 1135528 - DNA, 25 bp, Homo sapien
agggacgtgtgagggtaagcagcag

SEQ ID NO: 1135529 - DNA, 25 bp, Homo sapien
ttagcctattggcatctggttccag

SEQ ID NO: 1135530 - DNA, 25 bp, Homo sapien
cagggacgtgtgagggtaagcagca

SEQ ID NO: 1135531 - DNA, 25 bp, Homo sapien
gcctattggcatctggttccagcca

SEQ ID NO: 1135532 - DNA, 25 bp, Homo sapien
ctgagggttaagaaatcagggaggt

SEQ ID NO: 1135533 - DNA, 25 bp, Homo sapien
gagggttaagaaatcagggaggtga

SEQ ID NO: 1135534 - DNA, 25 bp, Homo sapien
tgagggttaagaaatcagggaggtg

SEQ ID NO: 1135535 - DNA, 25 bp, Homo sapien
agtgtatgaaggctcgcgtggcctc

SEQ ID NO: 1135536 - DNA, 25 bp, Homo sapien
tgaaggctcgcgtggcctcttgaag

SEQ ID NO: 1135537 - DNA, 25 bp, Homo sapien
tctctggcccccatagagtcctgct

SEQ ID NO: 1135538 - DNA, 25 bp, Homo sapien
cctgctgcagaaagatgcgcagtgt

SEQ ID NO: 1135539 - DNA, 25 bp, Homo sapien
ctctggactggcaaagtcgctccct

SEQ ID NO: 1135540 - DNA, 25 bp, Homo sapien
gacctctggactggcaaagtcgctc

SEQ ID NO: 1135541 - DNA, 25 bp, Homo sapien
acctctggactggcaaagtcgctcc

SEQ ID NO: 1135542 - DNA, 25 bp, Homo sapien
tctggactggcaaagtcgctccctc

SEQ ID NO: 1135543 - DNA, 25 bp, Homo sapien
ctagatgtcacctggcaaggctgag

SEQ ID NO: 1135544 - DNA, 25 bp, Homo sapien
aagaagtaccatgaacacgctgaag

SEQ ID NO: 1135545 - DNA, 25 bp, Homo sapien
tgaacacgctgaagacaattaaata

SEQ ID NO: 1135546 - DNA, 25 bp, Homo sapien
tttaaagaagtaccatgaacacgct

SEQ ID NO: 1135547 - DNA, 25 bp, Homo sapien
gaacacgctgaagacaattaaatac

SEQ ID NO: 1135548 - DNA, 25 bp, Homo sapien
gcagattccctgagcatcagagcag

SEQ ID NO: 1135549 - DNA, 25 bp, Homo sapien
agattccctgagcatcagagcagct

SEQ ID NO: 1135550 - DNA, 25 bp, Homo sapien
cagcagattccctgagcatcagagc

SEQ ID NO: 1135551 - DNA, 25 bp, Homo sapien
cagattccctgagcatcagagcagc

SEQ ID NO: 1135552 - DNA, 25 bp, Homo sapien
caagatccaatctatagtagagggt

SEQ ID NO: 1135553 - DNA, 25 bp, Homo sapien
tgaggtcaccacagcctttagactg

SEQ ID NO: 1135554 - DNA, 25 bp, Homo sapien
gaagctggaggccttctatctcttg

SEQ ID NO: 1135555 - DNA, 25 bp, Homo sapien
caaagaaactcgaaggaagaagctc

SEQ ID NO: 1135556 - DNA, 25 bp, Homo sapien
ggtgcaggcgatgccgagcttaggg

SEQ ID NO: 1135557 - DNA, 25 bp, Homo sapien
gaggtgcaggcgatgccgagcttag

SEQ ID NO: 1135558 - DNA, 25 bp, Homo sapien
atgccgagcttaggggggtatggcc

SEQ ID NO: 1135559 - DNA, 25 bp, Homo sapien
agcttaggggggtatggcctgtgcc

SEQ ID NO: 1135560 - DNA, 25 bp, Homo sapien
gatccacctcgtttggctccttcag

SEQ ID NO: 1135561 - DNA, 25 bp, Homo sapien
cagtcgttcgccgtacaactttcct

SEQ ID NO: 1135562 - DNA, 25 bp, Homo sapien
ctttcctttccatagtgcgttactg

SEQ ID NO: 1135563 - DNA, 25 bp, Homo sapien
ccatagtgcgttactgtggcggaca

SEQ ID NO: 1135564 - DNA, 25 bp, Homo sapien
aagaagcagggcgactaagacgcag

SEQ ID NO: 1135565 - DNA, 25 bp, Homo sapien
gcgggacctcgagagctaagaagca

SEQ ID NO: 1135566 - DNA, 25 bp, Homo sapien
agagagttcacggttcctgcagcct

SEQ ID NO: 1135567 - DNA, 25 bp, Homo sapien
tgctaacacgtaacacgcgggacct

SEQ ID NO: 1135568 - DNA, 25 bp, Homo sapien
cgtcgctgtggtagctgagtgaaca

SEQ ID NO: 1135569 - DNA, 25 bp, Homo sapien
caggctttccggctgtcggggccct

SEQ ID NO: 1135570 - DNA, 25 bp, Homo sapien
cggacaccattttacgtcgctgtgg

SEQ ID NO: 1135571 - DNA, 25 bp, Homo sapien
gtcctgggacgcctagcggacacca

SEQ ID NO: 1135572 - DNA, 25 bp, Homo sapien
cgtcacttagatgtcgcgagagggt

SEQ ID NO: 1135573 - DNA, 25 bp, Homo sapien
tagaacacgtgcttgctgtgcgacg

SEQ ID NO: 1135574 - DNA, 25 bp, Homo sapien
taaatctgattggatgtcggcaagg

SEQ ID NO: 1135575 - DNA, 25 bp, Homo sapien
ggcccttggagttcgaaacttctga

SEQ ID NO: 1135576 - DNA, 25 bp, Homo sapien
ttcggcgttttttccagagaggcag

SEQ ID NO: 1135577 - DNA, 25 bp, Homo sapien
gatatcgcgagagacggtaagctcc

SEQ ID NO: 1135578 - DNA, 25 bp, Homo sapien
cactatttgggaggtcgggccatca

SEQ ID NO: 1135579 - DNA, 25 bp, Homo sapien
tgttgattggacaaaaagtctgccc

SEQ ID NO: 1135580 - DNA, 25 bp, Homo sapien
tataactatgcaagcggctactgga

SEQ ID NO: 1135581 - DNA, 25 bp, Homo sapien
accggtatcatactcgcggctgcca

SEQ ID NO: 1135582 - DNA, 25 bp, Homo sapien
gctgccacctcgactgctggacttg

SEQ ID NO: 1135583 - DNA, 25 bp, Homo sapien
cccttcattgttgcgggtcgtcgga

SEQ ID NO: 1135584 - DNA, 25 bp, Homo sapien
tccaccgcttcgtcactaagctggg

SEQ ID NO: 1135585 - DNA, 25 bp, Homo sapien
ccaccgcttcgtcactaagctggga

SEQ ID NO: 1135586 - DNA, 25 bp, Homo sapien
gaccccaactcgcttatcttcagag

SEQ ID NO: 1135587 - DNA, 25 bp, Homo sapien
actaagctgggaccccaactcgctt

SEQ ID NO: 1135588 - DNA, 25 bp, Homo sapien
ctggccgccggaagttcacaaaggc

SEQ ID NO: 1135589 - DNA, 25 bp, Homo sapien
tgccagaacccgacagatgactgat

SEQ ID NO: 1135590 - DNA, 25 bp, Homo sapien
gaacccgacagatgactgattttca

SEQ ID NO: 1135591 - DNA, 25 bp, Homo sapien
aaaggctacccgctcatccccgctg

SEQ ID NO: 1135592 - DNA, 25 bp, Homo sapien
acagcttctatcttcagaggccggt

SEQ ID NO: 1135593 - DNA, 25 bp, Homo sapien
ggtcatagagcaccaggcggcctct

SEQ ID NO: 1135594 - DNA, 25 bp, Homo sapien
tctggcatgcttggccgcccgcgcg

SEQ ID NO: 1135595 - DNA, 25 bp, Homo sapien
ttcagaggccggtcatagagcacca

SEQ ID NO: 1135596 - DNA, 25 bp, Homo sapien
tcaagactgtatgcagggcgcactc

SEQ ID NO: 1135597 - DNA, 25 bp, Homo sapien
ctctctcatagaacgggtagtctct

SEQ ID NO: 1135598 - DNA, 25 bp, Homo sapien
gcagccggtagtctctgtatcccaa

SEQ ID NO: 1135599 - DNA, 25 bp, Homo sapien
tctccaggtctcgaggcaatggtgg

SEQ ID NO: 1135600 - DNA, 25 bp, Homo sapien
gttgcccaagaagagcgtccggtta

SEQ ID NO: 1135601 - DNA, 25 bp, Homo sapien
gatcaaattctcgtgccagggcagc

SEQ ID NO: 1135602 - DNA, 25 bp, Homo sapien
cgtaagtactagtctggccgcgaga

SEQ ID NO: 1135603 - DNA, 25 bp, Homo sapien
tttggcccggtgagacatatctaag

SEQ ID NO: 1135604 - DNA, 25 bp, Homo sapien
taagggtggtgtcctatcccgagca

SEQ ID NO: 1135605 - DNA, 25 bp, Homo sapien
tcaaagggtctggtgcccgatgtcc

SEQ ID NO: 1135606 - DNA, 25 bp, Homo sapien
gctgttgtaacgatcccggctactg

SEQ ID NO: 1135607 - DNA, 25 bp, Homo sapien
ggtggcacccaatcagagtcaggat

SEQ ID NO: 1135608 - DNA, 25 bp, Homo sapien
ggtccaaacggagacgctgagtgat

SEQ ID NO: 1135609 - DNA, 25 bp, Homo sapien
ggctggtccaaacggagacgctgag

SEQ ID NO: 1135610 - DNA, 25 bp, Homo sapien
acttgggctggtccaaacggagacg

SEQ ID NO: 1135611 - DNA, 25 bp, Homo sapien
ccaacttgggctggtccaaacggag

SEQ ID NO: 1135612 - DNA, 25 bp, Homo sapien
agtagaagtggcagtgtctgatgca

SEQ ID NO: 1135613 - DNA, 25 bp, Homo sapien
ggaggctgatcaccccggctgcctg

SEQ ID NO: 1135614 - DNA, 25 bp, Homo sapien
tgggaaggcatgaaggaccccggtg

SEQ ID NO: 1135615 - DNA, 25 bp, Homo sapien
aggctgatcaccccggctgcctgct

SEQ ID NO: 1135616 - DNA, 25 bp, Homo sapien
gggaggctgatcaccccggctgcct

SEQ ID NO: 1135617 - DNA, 25 bp, Homo sapien
taaaagatgactatgagcctgcaga

SEQ ID NO: 1135618 - DNA, 25 bp, Homo sapien
gacatttcaattccgtagctggaca

SEQ ID NO: 1135619 - DNA, 25 bp, Homo sapien
tatgagcccacgtatgtagactcca

SEQ ID NO: 1135620 - DNA, 25 bp, Homo sapien
tactcataagggtgggaactcctaa

SEQ ID NO: 1135621 - DNA, 25 bp, Homo sapien
tcctggctaatgagaagtagaaccg

SEQ ID NO: 1135622 - DNA, 25 bp, Homo sapien
ttcacataaaaggtcattaaggccc

SEQ ID NO: 1135623 - DNA, 25 bp, Homo sapien
ccagccaggcgatggacattttaag

SEQ ID NO: 1135624 - DNA, 25 bp, Homo sapien
gacaaatgcttataaccagccaggc

SEQ ID NO: 1135625 - DNA, 25 bp, Homo sapien
tcttgttctcatacctaactcctat

SEQ ID NO: 1135626 - DNA, 25 bp, Homo sapien
agggtcagcgccaagttttctctct

SEQ ID NO: 1135627 - DNA, 25 bp, Homo sapien
ctataacagggtcagcgccaagttt

SEQ ID NO: 1135628 - DNA, 25 bp, Homo sapien
tctcatacctaactcctatctgaaa

SEQ ID NO: 1135629 - DNA, 25 bp, Homo sapien
ctgaaatcatttcctccctttaggg

SEQ ID NO: 1135630 - DNA, 25 bp, Homo sapien
tcctccctttagggacaccactata

SEQ ID NO: 1135631 - DNA, 25 bp, Homo sapien
tgaaatcatttcctccctttaggga

SEQ ID NO: 1135632 - DNA, 25 bp, Homo sapien
tcatttcctccctttagggacacca

SEQ ID NO: 1135633 - DNA, 25 bp, Homo sapien
tataacaagtagaacaatagggtgg

SEQ ID NO: 1135634 - DNA, 25 bp, Homo sapien
aatacccactggcataaaccttgaa

SEQ ID NO: 1135635 - DNA, 25 bp, Homo sapien
ccaaagacagcagccgttattttaa

SEQ ID NO: 1135636 - DNA, 25 bp, Homo sapien
gatggttcacctcaacttcaaaaag

SEQ ID NO: 1135637 - DNA, 25 bp, Homo sapien
catatcttcatccgctgttcaacca

SEQ ID NO: 1135638 - DNA, 25 bp, Homo sapien
tccatatcttcatccgctgttcaac

SEQ ID NO: 1135639 - DNA, 25 bp, Homo sapien
attccatatcttcatccgctgttca

SEQ ID NO: 1135640 - DNA, 25 bp, Homo sapien
tatcttcatccgctgttcaaccagt

SEQ ID NO: 1135641 - DNA, 25 bp, Homo sapien
cagcacaaatcaaagaggtcatttt

SEQ ID NO: 1135642 - DNA, 25 bp, Homo sapien
acacagcacaaatcaaagaggtcat

SEQ ID NO: 1135643 - DNA, 25 bp, Homo sapien
gcccatgtaaactccacataagcca

SEQ ID NO: 1135644 - DNA, 25 bp, Homo sapien
cagaggcccatgtaaactccacata

SEQ ID NO: 1135645 - DNA, 25 bp, Homo sapien
ggtcaaaggtttgccgtcaattcac

SEQ ID NO: 1135646 - DNA, 25 bp, Homo sapien
tcagaattgacacaccgtgatagtc

SEQ ID NO: 1135647 - DNA, 25 bp, Homo sapien
tgagaaccgagaagcaaatgatccc

SEQ ID NO: 1135648 - DNA, 25 bp, Homo sapien
tgaaactaaggccaaacgtgatggg

SEQ ID NO: 1135649 - DNA, 25 bp, Homo sapien
tgaactccagcgttgtcaccgtgca

SEQ ID NO: 1135650 - DNA, 25 bp, Homo sapien
tactaccaaccgaagtgactgggcc

SEQ ID NO: 1135651 - DNA, 25 bp, Homo sapien
caaggtggtcttcgtctgcaactag

SEQ ID NO: 1135652 - DNA, 25 bp, Homo sapien
taattacaaacgctagctctcagga

SEQ ID NO: 1135653 - DNA, 25 bp, Homo sapien
taaccgtggcatcctttgttgataa

SEQ ID NO: 1135654 - DNA, 25 bp, Homo sapien
tgataatcacctgttgcctagcaat

SEQ ID NO: 1135655 - DNA, 25 bp, Homo sapien
caccttgcagagtataaccgtggca

SEQ ID NO: 1135656 - DNA, 25 bp, Homo sapien
gtttgccactggaacaccaccttgc

SEQ ID NO: 1135657 - DNA, 25 bp, Homo sapien
tgaaatatgacacttcggtgaagga

SEQ ID NO: 1135658 - DNA, 25 bp, Homo sapien
cagcagagtgccttaaggcttccat

SEQ ID NO: 1135659 - DNA, 25 bp, Homo sapien
ctgaaatatgacacttcggtgaagg

SEQ ID NO: 1135660 - DNA, 25 bp, Homo sapien
ctagtaatggcagcagagtgcctta

SEQ ID NO: 1135661 - DNA, 25 bp, Homo sapien
aaatgactgctatcaatgtgcccca

SEQ ID NO: 1135662 - DNA, 25 bp, Homo sapien
tggcctacccttcaggattccctat

SEQ ID NO: 1135663 - DNA, 25 bp, Homo sapien
tgtacagtacttggcagaatccttg

SEQ ID NO: 1135664 - DNA, 25 bp, Homo sapien
tacttatgcttgtctgcctgacacg

SEQ ID NO: 1135665 - DNA, 25 bp, Homo sapien
tgtgcctggcctctgatagtcaatt

SEQ ID NO: 1135666 - DNA, 25 bp, Homo sapien
catatacgaatacagcatcccaaag

SEQ ID NO: 1135667 - DNA, 25 bp, Homo sapien
taattatattgcagacactagtgta

SEQ ID NO: 1135668 - DNA, 25 bp, Homo sapien
tcccaataggtcttaaactgtgtaa

SEQ ID NO: 1135669 - DNA, 25 bp, Homo sapien
gtctgccaattagaactcatctttg

SEQ ID NO: 1135670 - DNA, 25 bp, Homo sapien
gaaacaggaggacaagtgccagtgc

SEQ ID NO: 1135671 - DNA, 25 bp, Homo sapien
gtcagatcccaaagtcgactatagg

SEQ ID NO: 1135672 - DNA, 25 bp, Homo sapien
tgtgcagctctgacttccaacccag

SEQ ID NO: 1135673 - DNA, 25 bp, Homo sapien
gaagtaatggcaaggtgttccaccc

SEQ ID NO: 1135674 - DNA, 25 bp, Homo sapien
gcagtcctctgaagccatagcaata

SEQ ID NO: 1135675 - DNA, 25 bp, Homo sapien
catcccttaagggtagtacgccagg

SEQ ID NO: 1135676 - DNA, 25 bp, Homo sapien
tacgccaggaccaaggaaataagtg

SEQ ID NO: 1135677 - DNA, 25 bp, Homo sapien
cctccatgcctggtccaaaatgctt

SEQ ID NO: 1135678 - DNA, 25 bp, Homo sapien
gcttcttaaactattaccatcatcg

SEQ ID NO: 1135679 - DNA, 25 bp, Homo sapien
taccatcatcgttattccactcttc

SEQ ID NO: 1135680 - DNA, 25 bp, Homo sapien
catgcctggtccaaaatgcttctta

SEQ ID NO: 1135681 - DNA, 25 bp, Homo sapien
ccttacttagtgactggaatggtat

SEQ ID NO: 1135682 - DNA, 25 bp, Homo sapien
tgggcgcggccagataagtttttaa

SEQ ID NO: 1135683 - DNA, 25 bp, Homo sapien
cgccatggtaattcagtcactaaaa

SEQ ID NO: 1135684 - DNA, 25 bp, Homo sapien
gaatggtatatgctccctccaaaag

SEQ ID NO: 1135685 - DNA, 25 bp, Homo sapien
gccaaaagactttgaagaccctcca

SEQ ID NO: 1135686 - DNA, 25 bp, Homo sapien
ttaaaaagcacttaggaccaggtgc

SEQ ID NO: 1135687 - DNA, 25 bp, Homo sapien
ccttgagaccctttaggaagtccag

SEQ ID NO: 1135688 - DNA, 25 bp, Homo sapien
taagttttagtatgtgccattagcc

SEQ ID NO: 1135689 - DNA, 25 bp, Homo sapien
tacaagagttcagagactagtcacc

SEQ ID NO: 1135690 - DNA, 25 bp, Homo sapien
gactagcgtgggtaacttagatcca

SEQ ID NO: 1135691 - DNA, 25 bp, Homo sapien
cccagggtgttacttctgagaccac

SEQ ID NO: 1135692 - DNA, 25 bp, Homo sapien
catttgctgtgttggcaggactaag

SEQ ID NO: 1135693 - DNA, 25 bp, Homo sapien
tagggtccgaagtgcatctgaacag

SEQ ID NO: 1135694 - DNA, 25 bp, Homo sapien
agggtccgaagtgcatctgaacaga

SEQ ID NO: 1135695 - DNA, 25 bp, Homo sapien
gggtccgaagtgcatctgaacagat

SEQ ID NO: 1135696 - DNA, 25 bp, Homo sapien
ttagggtccgaagtgcatctgaaca

SEQ ID NO: 1135697 - DNA, 25 bp, Homo sapien
gcaggtagcctgtagacaccaagga

SEQ ID NO: 1135698 - DNA, 25 bp, Homo sapien
taccaggcatagagtgaacattcag

SEQ ID NO: 1135699 - DNA, 25 bp, Homo sapien
tcaggtaaatctgacgcaggtagcc

SEQ ID NO: 1135700 - DNA, 25 bp, Homo sapien
tgtgcgtaagaatcaactgagtgcc

SEQ ID NO: 1135701 - DNA, 25 bp, Homo sapien
ccccagggatgagaggaaaattgtc

SEQ ID NO: 1135702 - DNA, 25 bp, Homo sapien
caagattgccaatagccagctggtg

SEQ ID NO: 1135703 - DNA, 25 bp, Homo sapien
ttacttggaaaacacactctggagg

SEQ ID NO: 1135704 - DNA, 25 bp, Homo sapien
tactgagttcccatcttaaaaggcc

SEQ ID NO: 1135705 - DNA, 25 bp, Homo sapien
tatagcctagcaccatacgtgagga

SEQ ID NO: 1135706 - DNA, 25 bp, Homo sapien
aactcagttcttgcaggtgtaggca

SEQ ID NO: 1135707 - DNA, 25 bp, Homo sapien
tgttagcccaaatccagtatagcct

SEQ ID NO: 1135708 - DNA, 25 bp, Homo sapien
tgcttttgcggttagatggcaccca

SEQ ID NO: 1135709 - DNA, 25 bp, Homo sapien
tgtttctgcatcaatttgctcaaga

SEQ ID NO: 1135710 - DNA, 25 bp, Homo sapien
gctcaagataatggtccagctgcat

SEQ ID NO: 1135711 - DNA, 25 bp, Homo sapien
gagatttggagtataattgaacccc

SEQ ID NO: 1135712 - DNA, 25 bp, Homo sapien
agtataattgaacccctcacccaga

SEQ ID NO: 1135713 - DNA, 25 bp, Homo sapien
cctgccctgagcatagtcgccaaaa

SEQ ID NO: 1135714 - DNA, 25 bp, Homo sapien
aagtaaagtccactagcaggagggc

SEQ ID NO: 1135715 - DNA, 25 bp, Homo sapien
tgagcctgcggcaaaaaattctacc

SEQ ID NO: 1135716 - DNA, 25 bp, Homo sapien
tttgaagacaagtgtatgagagctc

SEQ ID NO: 1135717 - DNA, 25 bp, Homo sapien
gatacaaagctgactcaacaaaggc

SEQ ID NO: 1135718 - DNA, 25 bp, Homo sapien
gccagaggccaaccatgtaaacagg

SEQ ID NO: 1135719 - DNA, 25 bp, Homo sapien
tcaaagaataggaatctcaggccag

SEQ ID NO: 1135720 - DNA, 25 bp, Homo sapien
ccaatccagaaagcttagtagagac

SEQ ID NO: 1135721 - DNA, 25 bp, Homo sapien
tcatcaatatcactggcttctatct

SEQ ID NO: 1135722 - DNA, 25 bp, Homo sapien
aaggtcatccagggcagtaacatgc

SEQ ID NO: 1135723 - DNA, 25 bp, Homo sapien
atgatgataccttctggaatacctc

SEQ ID NO: 1135724 - DNA, 25 bp, Homo sapien
taacacttaaaacagttgtacagct

SEQ ID NO: 1135725 - DNA, 25 bp, Homo sapien
caattttgtccctttggaggcgccg

SEQ ID NO: 1135726 - DNA, 25 bp, Homo sapien
gaagacacgtgagtagtgcgcgcct

SEQ ID NO: 1135727 - DNA, 25 bp, Homo sapien
taaagaacgcggacgttgcaccgtg

SEQ ID NO: 1135728 - DNA, 25 bp, Homo sapien
aaatgccaggccacgaactgaagca

SEQ ID NO: 1135729 - DNA, 25 bp, Homo sapien
tctcggagtcggttgaactagggtc

SEQ ID NO: 1135730 - DNA, 25 bp, Homo sapien
aagatctgtcccctaggtctcggag

SEQ ID NO: 1135731 - DNA, 25 bp, Homo sapien
tgagtcccctcaccataataagcac

SEQ ID NO: 1135732 - DNA, 25 bp, Homo sapien
tataatcgttctactgcactacagc

SEQ ID NO: 1135733 - DNA, 25 bp, Homo sapien
ttgggaagccaacgagggagggtca

SEQ ID NO: 1135734 - DNA, 25 bp, Homo sapien
gactgggctacacactgagactcca

SEQ ID NO: 1135735 - DNA, 25 bp, Homo sapien
tgggaagccaacgagggagggtcac

SEQ ID NO: 1135736 - DNA, 25 bp, Homo sapien
ggagggtcacttgagactgggctac

SEQ ID NO: 1135737 - DNA, 25 bp, Homo sapien
ggttgccagcactcaaaactaagaa

SEQ ID NO: 1135738 - DNA, 25 bp, Homo sapien
tgctctaatacggatgtcatggaac

SEQ ID NO: 1135739 - DNA, 25 bp, Homo sapien
actcaggaggatgaatcacgagctc

SEQ ID NO: 1135740 - DNA, 25 bp, Homo sapien
tggcaaggacatgtgagccagctat

SEQ ID NO: 1135741 - DNA, 25 bp, Homo sapien
tttttgtcatgctctgttgcactag

SEQ ID NO: 1135742 - DNA, 25 bp, Homo sapien
tgctctgttgcactagggatgcaga

SEQ ID NO: 1135743 - DNA, 25 bp, Homo sapien
tgtcatgctctgttgcactagggat

SEQ ID NO: 1135744 - DNA, 25 bp, Homo sapien
cttagagtaaaggtaaccatagagt

SEQ ID NO: 1135745 - DNA, 25 bp, Homo sapien
tgggcttgggtattctctgctggac

SEQ ID NO: 1135746 - DNA, 25 bp, Homo sapien
tccaagagctcatttatgaaagagg

SEQ ID NO: 1135747 - DNA, 25 bp, Homo sapien
cagcagtgagatggcctacagggtc

SEQ ID NO: 1135748 - DNA, 25 bp, Homo sapien
tgagtcaacaaaaggagttagggtc

SEQ ID NO: 1135749 - DNA, 25 bp, Homo sapien
tcctcacctagattataagcaactt

SEQ ID NO: 1135750 - DNA, 25 bp, Homo sapien
tcagatgtgtcctcacctagattat

SEQ ID NO: 1135751 - DNA, 25 bp, Homo sapien
attagttattctctcagatgtgtcc

SEQ ID NO: 1135752 - DNA, 25 bp, Homo sapien
actattagttattctctcagatgtg

SEQ ID NO: 1135753 - DNA, 25 bp, Homo sapien
cactagccacagacagaaaaacaag

SEQ ID NO: 1135754 - DNA, 25 bp, Homo sapien
gacagaaaaacaagcagataatttt

SEQ ID NO: 1135755 - DNA, 25 bp, Homo sapien
aatttctttcaattcctgtttcaca

SEQ ID NO: 1135756 - DNA, 25 bp, Homo sapien
aaacataaactgagtttttgcttat

SEQ ID NO: 1135757 - DNA, 25 bp, Homo sapien
gagatctgtgcgaagggaagcatat

SEQ ID NO: 1135758 - DNA, 25 bp, Homo sapien
tacagaagcgagaaatagttattca

SEQ ID NO: 1135759 - DNA, 25 bp, Homo sapien
tagttattcatttgacacatgcatt

SEQ ID NO: 1135760 - DNA, 25 bp, Homo sapien
gggggagatctgtgcgaagggaagc

SEQ ID NO: 1135761 - DNA, 25 bp, Homo sapien
tgagcctcagggttttgtgtttttg

SEQ ID NO: 1135762 - DNA, 25 bp, Homo sapien
cagcaaatatttatcttctgagcct

SEQ ID NO: 1135763 - DNA, 25 bp, Homo sapien
aatatttatcttctgagcctcaggg

SEQ ID NO: 1135764 - DNA, 25 bp, Homo sapien
aagcacagtgatcttcagcaaatat

SEQ ID NO: 1135765 - DNA, 25 bp, Homo sapien
cagtagaccagttcttggattccaa

SEQ ID NO: 1135766 - DNA, 25 bp, Homo sapien
gaaatctttgcgctctgctctccat

SEQ ID NO: 1135767 - DNA, 25 bp, Homo sapien
gggtgcagaactctaagcaggtcat

SEQ ID NO: 1135768 - DNA, 25 bp, Homo sapien
tgtgggagtccggaagaaatctttg

SEQ ID NO: 1135769 - DNA, 25 bp, Homo sapien
tatcaaggcatcagaggatttgtcc

SEQ ID NO: 1135770 - DNA, 25 bp, Homo sapien
ccgaggtatcaaggcatcagaggat

SEQ ID NO: 1135771 - DNA, 25 bp, Homo sapien
catcagaggatttgtccacaggctt

SEQ ID NO: 1135772 - DNA, 25 bp, Homo sapien
gggaaaaccgaggtatcaaggcatc

SEQ ID NO: 1135773 - DNA, 25 bp, Homo sapien
accgttgtgattaccccagtttctg

SEQ ID NO: 1135774 - DNA, 25 bp, Homo sapien
gagaggtggcatccatagcagtcaa

SEQ ID NO: 1135775 - DNA, 25 bp, Homo sapien
taaatcagaaagtgctgcctttgct

SEQ ID NO: 1135776 - DNA, 25 bp, Homo sapien
cctttgctgctgttgaccgttgtga

SEQ ID NO: 1135777 - DNA, 25 bp, Homo sapien
tgtcctccaccggaaattcacacat

SEQ ID NO: 1135778 - DNA, 25 bp, Homo sapien
tggacacgctggatgtcccggtttc

SEQ ID NO: 1135779 - DNA, 25 bp, Homo sapien
ctgcactgtggctggacacgctgga

SEQ ID NO: 1135780 - DNA, 25 bp, Homo sapien
cacgctggatgtcccggtttccaag

SEQ ID NO: 1135781 - DNA, 25 bp, Homo sapien
gcagatccagtcttgtggtagataa

SEQ ID NO: 1135782 - DNA, 25 bp, Homo sapien
gatatcagagtaaagcttcttccag

SEQ ID NO: 1135783 - DNA, 25 bp, Homo sapien
cttcttccagcatcaaaggcctcta

SEQ ID NO: 1135784 - DNA, 25 bp, Homo sapien
cacagataaagctgattcactgaca

SEQ ID NO: 1135785 - DNA, 25 bp, Homo sapien
cctctgtaagtgcttgcaagtgggc

SEQ ID NO: 1135786 - DNA, 25 bp, Homo sapien
tagccgggcagtggcaaaacggaca

SEQ ID NO: 1135787 - DNA, 25 bp, Homo sapien
taaggcccatggccaagtgaagtag

SEQ ID NO: 1135788 - DNA, 25 bp, Homo sapien
gtttgtctgcaagctggtaaggccc

SEQ ID NO: 1135789 - DNA, 25 bp, Homo sapien
gacaagcctattgcttttatggtgg

SEQ ID NO: 1135790 - DNA, 25 bp, Homo sapien
cagggatgcttagcagtcagcaaaa

SEQ ID NO: 1135791 - DNA, 25 bp, Homo sapien
aggaggagatttttggtttcctctg

SEQ ID NO: 1135792 - DNA, 25 bp, Homo sapien
cagagcagggatgcttagcagtcag

SEQ ID NO: 1135793 - DNA, 25 bp, Homo sapien
catgggtgtgctgcgatttcctgga

SEQ ID NO: 1135794 - DNA, 25 bp, Homo sapien
gcctcccatcagagtgtgagcacct

SEQ ID NO: 1135795 - DNA, 25 bp, Homo sapien
tattgccactgcttccgtgtgcctc

SEQ ID NO: 1135796 - DNA, 25 bp, Homo sapien
tgcagcatggtcctaggagagcgcc

SEQ ID NO: 1135797 - DNA, 25 bp, Homo sapien
gagatgctgggccagctagcagaca

SEQ ID NO: 1135798 - DNA, 25 bp, Homo sapien
tcgtgtgttacatgaggagaccttc

SEQ ID NO: 1135799 - DNA, 25 bp, Homo sapien
gacagtttcaacaggcagagtcaca

SEQ ID NO: 1135800 - DNA, 25 bp, Homo sapien
ggtgatgaaggaccatctaaaggaa

SEQ ID NO: 1135801 - DNA, 25 bp, Homo sapien
cctgcttagatgcctctcgcttcct

SEQ ID NO: 1135802 - DNA, 25 bp, Homo sapien
gcctgcttagatgcctctcgcttcc

SEQ ID NO: 1135803 - DNA, 25 bp, Homo sapien
ctgcttagatgcctctcgcttcctc

SEQ ID NO: 1135804 - DNA, 25 bp, Homo sapien
tgcttagatgcctctcgcttcctcc

SEQ ID NO: 1135805 - DNA, 25 bp, Homo sapien
gattgagactcgcgtggcacctctc

SEQ ID NO: 1135806 - DNA, 25 bp, Homo sapien
ttgagactcgcgtggcacctctcat

SEQ ID NO: 1135807 - DNA, 25 bp, Homo sapien
attgagactcgcgtggcacctctca

SEQ ID NO: 1135808 - DNA, 25 bp, Homo sapien
acagtcagacacagttactaggagg

SEQ ID NO: 1135809 - DNA, 25 bp, Homo sapien
gtcagacacagttactaggaggagc

SEQ ID NO: 1135810 - DNA, 25 bp, Homo sapien
cctgtgatcacagcacagtcagaca

SEQ ID NO: 1135811 - DNA, 25 bp, Homo sapien
ctgtgatcacagcacagtcagacac

SEQ ID NO: 1135812 - DNA, 25 bp, Homo sapien
ttcttccagtggattttatatggaa

SEQ ID NO: 1135813 - DNA, 25 bp, Homo sapien
tttctgcttcagtaagaatggtcct

SEQ ID NO: 1135814 - DNA, 25 bp, Homo sapien
tatatggaaagctctcaggtacagc

SEQ ID NO: 1135815 - DNA, 25 bp, Homo sapien
tggtcctgctaccataacacatcat

SEQ ID NO: 1135816 - DNA, 25 bp, Homo sapien
gtggctgccggggtggcactcctcg

SEQ ID NO: 1135817 - DNA, 25 bp, Homo sapien
cccagcggggtgcacatccgcagcc

SEQ ID NO: 1135818 - DNA, 25 bp, Homo sapien
tgcacatccgcagccctcgaagcca

SEQ ID NO: 1135819 - DNA, 25 bp, Homo sapien
tgccggggtggcactcctcgccttc

SEQ ID NO: 1135820 - DNA, 25 bp, Homo sapien
aggtgtggtgcttgcgtttcctgaa

SEQ ID NO: 1135821 - DNA, 25 bp, Homo sapien
ttgggcaagcaaggacaggtgtggt

SEQ ID NO: 1135822 - DNA, 25 bp, Homo sapien
tgtggtgcttgcgtttcctgaagaa

SEQ ID NO: 1135823 - DNA, 25 bp, Homo sapien
acagcaggttgggcaagcaaggaca

SEQ ID NO: 1135824 - DNA, 25 bp, Homo sapien
cttcaagtccatggagcagcggtac

SEQ ID NO: 1135825 - DNA, 25 bp, Homo sapien
tgttcttcaagtccatggagcagcg

SEQ ID NO: 1135826 - DNA, 25 bp, Homo sapien
taaaaattgatgttcttcaagtcca

SEQ ID NO: 1135827 - DNA, 25 bp, Homo sapien
ttgatgttcttcaagtccatggagc

SEQ ID NO: 1135828 - DNA, 25 bp, Homo sapien
tgggtatcctgagaccaggcaagcg

SEQ ID NO: 1135829 - DNA, 25 bp, Homo sapien
ccaatcgagggaagatgaactaccc

SEQ ID NO: 1135830 - DNA, 25 bp, Homo sapien
caatcttgagtctgtggtctgaaac

SEQ ID NO: 1135831 - DNA, 25 bp, Homo sapien
taattcagaccgagggatacatgtg

SEQ ID NO: 1135832 - DNA, 25 bp, Homo sapien
caggttggtgtgtagttgcctccct

SEQ ID NO: 1135833 - DNA, 25 bp, Homo sapien
ccagcaggttggtgtgtagttgcct

SEQ ID NO: 1135834 - DNA, 25 bp, Homo sapien
ccctaattgccttctaatatgtcaa

SEQ ID NO: 1135835 - DNA, 25 bp, Homo sapien
gcaggttggtgtgtagttgcctccc

SEQ ID NO: 1135836 - DNA, 25 bp, Homo sapien
gatccttgagagactgccctcacag

SEQ ID NO: 1135837 - DNA, 25 bp, Homo sapien
cagggagcttcatccagggatgagc

SEQ ID NO: 1135838 - DNA, 25 bp, Homo sapien
gctggtatattgatcatgttctctg

SEQ ID NO: 1135839 - DNA, 25 bp, Homo sapien
gggccttgatccttgagagactgcc

SEQ ID NO: 1135840 - DNA, 25 bp, Homo sapien
tagctcccagctacaaggtaggccg

SEQ ID NO: 1135841 - DNA, 25 bp, Homo sapien
tacagaattggttcaatggacacca

SEQ ID NO: 1135842 - DNA, 25 bp, Homo sapien
gccggaaaattgaggattgcacttt

SEQ ID NO: 1135843 - DNA, 25 bp, Homo sapien
aagcgggaagaagcagtaccagcag

SEQ ID NO: 1135844 - DNA, 25 bp, Homo sapien
aaagactgcaaggaataccacaagg

SEQ ID NO: 1135845 - DNA, 25 bp, Homo sapien
ctgcaaggaataccacaaggcccct

SEQ ID NO: 1135846 - DNA, 25 bp, Homo sapien
caaggaataccacaaggcccctcat

SEQ ID NO: 1135847 - DNA, 25 bp, Homo sapien
gactgcaaggaataccacaaggccc

SEQ ID NO: 1135848 - DNA, 25 bp, Homo sapien
gactgcataatggtgattcctcagg

SEQ ID NO: 1135849 - DNA, 25 bp, Homo sapien
gtagttggtcagagactcgctggcc

SEQ ID NO: 1135850 - DNA, 25 bp, Homo sapien
aggagcctgcgctccttcagggccc

SEQ ID NO: 1135851 - DNA, 25 bp, Homo sapien
gagtgcttcctgctgactgcataat

SEQ ID NO: 1135852 - DNA, 25 bp, Homo sapien
cagagggcacccagatatccgggga

SEQ ID NO: 1135853 - DNA, 25 bp, Homo sapien
tcaaacaccaaggtgaacttctggg

SEQ ID NO: 1135854 - DNA, 25 bp, Homo sapien
gtcccgatgtagatcttcccaaagt

SEQ ID NO: 1135855 - DNA, 25 bp, Homo sapien
gggaagggtcccgatgtagatcttc

SEQ ID NO: 1135856 - DNA, 25 bp, Homo sapien
taagaatatggcctcaatactggca

SEQ ID NO: 1135857 - DNA, 25 bp, Homo sapien
cttgtaagaatatggcctcaatact

SEQ ID NO: 1135858 - DNA, 25 bp, Homo sapien
tatggcctcaatactggcaattctc

SEQ ID NO: 1135859 - DNA, 25 bp, Homo sapien
gaatatggcctcaatactggcaatt

SEQ ID NO: 1135860 - DNA, 25 bp, Homo sapien
gccagggccgaacccctcagcaggc

SEQ ID NO: 1135861 - DNA, 25 bp, Homo sapien
ccagagttagtggggcccttagaat

SEQ ID NO: 1135862 - DNA, 25 bp, Homo sapien
tcttctcaccactcacggtgccagc

SEQ ID NO: 1135863 - DNA, 25 bp, Homo sapien
ttctcaccactcacggtgccagcca

SEQ ID NO: 1135864 - DNA, 25 bp, Homo sapien
cttggacggatcgaagcgttggtgg

SEQ ID NO: 1135865 - DNA, 25 bp, Homo sapien
tggacggatcgaagcgttggtggtt

SEQ ID NO: 1135866 - DNA, 25 bp, Homo sapien
ttggacggatcgaagcgttggtggt

SEQ ID NO: 1135867 - DNA, 25 bp, Homo sapien
agcaagccccgcatgctgcctgtgc

SEQ ID NO: 1135868 - DNA, 25 bp, Homo sapien
ctgcctgtgccatactggatggaca

SEQ ID NO: 1135869 - DNA, 25 bp, Homo sapien
tactggatggacagggacttgccca

SEQ ID NO: 1135870 - DNA, 25 bp, Homo sapien
tgtgccatactggatggacagggac

SEQ ID NO: 1135871 - DNA, 25 bp, Homo sapien
cactgctgaggttccaggcactggg

SEQ ID NO: 1135872 - DNA, 25 bp, Homo sapien
gggccagctctccagtgaagatgca

SEQ ID NO: 1135873 - DNA, 25 bp, Homo sapien
agcactgctgaggttccaggcactg

SEQ ID NO: 1135874 - DNA, 25 bp, Homo sapien
aggcactgggccagctctccagtga

SEQ ID NO: 1135875 - DNA, 25 bp, Homo sapien
ctctcctttcccggcagttagtgca

SEQ ID NO: 1135876 - DNA, 25 bp, Homo sapien
ctcctttcccggcagttagtgcaat

SEQ ID NO: 1135877 - DNA, 25 bp, Homo sapien
agttagtgcaatgatcttgaggaat

SEQ ID NO: 1135878 - DNA, 25 bp, Homo sapien
tagtgcaatgatcttgaggaattgt

SEQ ID NO: 1135879 - DNA, 25 bp, Homo sapien
gcaagagaatcatgacctccactag

SEQ ID NO: 1135880 - DNA, 25 bp, Homo sapien
ctgcaagagaatcatgacctccact

SEQ ID NO: 1135881 - DNA, 25 bp, Homo sapien
agagaatcatgacctccactaggtc

SEQ ID NO: 1135882 - DNA, 25 bp, Homo sapien
caagagaatcatgacctccactagg

SEQ ID NO: 1135883 - DNA, 25 bp, Homo sapien
taggtgaagacgtcgccaggttcct

SEQ ID NO: 1135884 - DNA, 25 bp, Homo sapien
gatcccatcaaactcggagtaggtg

SEQ ID NO: 1135885 - DNA, 25 bp, Homo sapien
ctcggagtaggtgaagacgtcgcca

SEQ ID NO: 1135886 - DNA, 25 bp, Homo sapien
caggttcctgggtgctcagacccac

SEQ ID NO: 1135887 - DNA, 25 bp, Homo sapien
ccaggtgcctctgcatcgtgttgtc

SEQ ID NO: 1135888 - DNA, 25 bp, Homo sapien
tgcatcgtgttgtcaaacactggca

SEQ ID NO: 1135889 - DNA, 25 bp, Homo sapien
tgcctctgcatcgtgttgtcaaaca

SEQ ID NO: 1135890 - DNA, 25 bp, Homo sapien
tctgcatcgtgttgtcaaacactgg

SEQ ID NO: 1135891 - DNA, 25 bp, Homo sapien
tagtacgacagatcaatggccctca

SEQ ID NO: 1135892 - DNA, 25 bp, Homo sapien
gggagcctgtgtagtacgacagatc

SEQ ID NO: 1135893 - DNA, 25 bp, Homo sapien
cgtgagcatgctcccctggtcattc

SEQ ID NO: 1135894 - DNA, 25 bp, Homo sapien
caatggccctcagcgtgagcatgct

SEQ ID NO: 1135895 - DNA, 25 bp, Homo sapien
gaactgccagtattcttgcagtcat

SEQ ID NO: 1135896 - DNA, 25 bp, Homo sapien
ccagtattcttgcagtcatgggtat

SEQ ID NO: 1135897 - DNA, 25 bp, Homo sapien
tgccagtattcttgcagtcatgggt

SEQ ID NO: 1135898 - DNA, 25 bp, Homo sapien
gtgaactgccagtattcttgcagtc

SEQ ID NO: 1135899 - DNA, 25 bp, Homo sapien
cttccaaaggtatgcaagatggcct

SEQ ID NO: 1135900 - DNA, 25 bp, Homo sapien
ttccaaaggtatgcaagatggcctc

SEQ ID NO: 1135901 - DNA, 25 bp, Homo sapien
gcagtggctccaatggcctgctgga

SEQ ID NO: 1135902 - DNA, 25 bp, Homo sapien
atgttgaggatgttgccaccaggcc

SEQ ID NO: 1135903 - DNA, 25 bp, Homo sapien
accagcagggaggtgccggtgtcca

SEQ ID NO: 1135904 - DNA, 25 bp, Homo sapien
tcattgtactggcccgcagtggctc

SEQ ID NO: 1135905 - DNA, 25 bp, Homo sapien
tcaggcgcccgcagtcgatgtcaaa

SEQ ID NO: 1135906 - DNA, 25 bp, Homo sapien
tgggaatgctgctcaggcgcccgca

SEQ ID NO: 1135907 - DNA, 25 bp, Homo sapien
cagggggtacttcttgccgtggatc

SEQ ID NO: 1135908 - DNA, 25 bp, Homo sapien
tggatctcgaagacagccgtgggaa

SEQ ID NO: 1135909 - DNA, 25 bp, Homo sapien
ggatccactgctgggaactatagtc

SEQ ID NO: 1135910 - DNA, 25 bp, Homo sapien
cagccccacacggttattggtcctg

SEQ ID NO: 1135911 - DNA, 25 bp, Homo sapien
tattggtcctgtcaaagacactgta

SEQ ID NO: 1135912 - DNA, 25 bp, Homo sapien
cagatgaagacattccccaggatcc

SEQ ID NO: 1135913 - DNA, 25 bp, Homo sapien
cattgaggtccatggccagtgatgc

SEQ ID NO: 1135914 - DNA, 25 bp, Homo sapien
cagaaatgcggtgtttattgggaac

SEQ ID NO: 1135915 - DNA, 25 bp, Homo sapien
gcggtgtttattgggaaccatctgc

SEQ ID NO: 1135916 - DNA, 25 bp, Homo sapien
tgtgtgtttggtcacattgaggtcc

SEQ ID NO: 1135917 - DNA, 25 bp, Homo sapien
tctgcggccaagctggctgcacagc

SEQ ID NO: 1135918 - DNA, 25 bp, Homo sapien
ggaaaggcagcttgagccttcctgc

SEQ ID NO: 1135919 - DNA, 25 bp, Homo sapien
tgcacagccgcaaacccagacaggc

SEQ ID NO: 1135920 - DNA, 25 bp, Homo sapien
atgggctgcctctgcggccaagctg

SEQ ID NO: 1135921 - DNA, 25 bp, Homo sapien
gtatgctctggccagtcgggcccca

SEQ ID NO: 1135922 - DNA, 25 bp, Homo sapien
ccagacagccgttgtatgctctggc

SEQ ID NO: 1135923 - DNA, 25 bp, Homo sapien
tatgctctggccagtcgggccccag

SEQ ID NO: 1135924 - DNA, 25 bp, Homo sapien
ctcctccagacagccgttgtatgct

SEQ ID NO: 1135925 - DNA, 25 bp, Homo sapien
ctttgtaggttgttaggagactggt

SEQ ID NO: 1135926 - DNA, 25 bp, Homo sapien
gagactttgtaggttgttaggagac

SEQ ID NO: 1135927 - DNA, 25 bp, Homo sapien
gactttgtaggttgttaggagactg

SEQ ID NO: 1135928 - DNA, 25 bp, Homo sapien
ggagactttgtaggttgttaggaga

SEQ ID NO: 1135929 - DNA, 25 bp, Homo sapien
tacctcaataaacaagggccagttg

SEQ ID NO: 1135930 - DNA, 25 bp, Homo sapien
caagcttccgggagactatgctgac

SEQ ID NO: 1135931 - DNA, 25 bp, Homo sapien
gaaaccagcgggtgatcatcaacat

SEQ ID NO: 1135932 - DNA, 25 bp, Homo sapien
gggaagatcctcatcagcgaaagca

SEQ ID NO: 1135933 - DNA, 25 bp, Homo sapien
agtgactgcccatcaggatctagta

SEQ ID NO: 1135934 - DNA, 25 bp, Homo sapien
cccagtgttgatgcctggttgttcc

SEQ ID NO: 1135935 - DNA, 25 bp, Homo sapien
tgctttgcccttgccagtgactgcc

SEQ ID NO: 1135936 - DNA, 25 bp, Homo sapien
caggatctagtatgagagatacccc

SEQ ID NO: 1135937 - DNA, 25 bp, Homo sapien
ctagcggtaggaatctggctggagc

SEQ ID NO: 1135938 - DNA, 25 bp, Homo sapien
ggagctcggattttatgtgaccacc

SEQ ID NO: 1135939 - DNA, 25 bp, Homo sapien
agggaacgcctgcagcgacagagct

SEQ ID NO: 1135940 - DNA, 25 bp, Homo sapien
tggctggagctgaacgttcacactc

SEQ ID NO: 1135941 - DNA, 25 bp, Homo sapien
ctttggcgatgggattcggacggca

SEQ ID NO: 1135942 - DNA, 25 bp, Homo sapien
agttggtagcctctggtccgtcccg

SEQ ID NO: 1135943 - DNA, 25 bp, Homo sapien
gacggcaatgtggatccccgtgtcc

SEQ ID NO: 1135944 - DNA, 25 bp, Homo sapien
cggcggagtccgtgaccaggaaagg

SEQ ID NO: 1135945 - DNA, 25 bp, Homo sapien
taaatttggctgtcatggtctgaag

SEQ ID NO: 1135946 - DNA, 25 bp, Homo sapien
ctttccactggttataaatttggct

SEQ ID NO: 1135947 - DNA, 25 bp, Homo sapien
cactggttataaatttggctgtcat

SEQ ID NO: 1135948 - DNA, 25 bp, Homo sapien
ggttataaatttggctgtcatggtc

SEQ ID NO: 1135949 - DNA, 25 bp, Homo sapien
aatgagtaatggtccccagcacctc

SEQ ID NO: 1135950 - DNA, 25 bp, Homo sapien
gaatgagtaatggtccccagcacct

SEQ ID NO: 1135951 - DNA, 25 bp, Homo sapien
cagaatgagtaatggtccccagcac

SEQ ID NO: 1135952 - DNA, 25 bp, Homo sapien
tcagaatgagtaatggtccccagca

SEQ ID NO: 1135953 - DNA, 25 bp, Homo sapien
tgctgttggcataggtctctgcttc

SEQ ID NO: 1135954 - DNA, 25 bp, Homo sapien
acagatgagcatcgccagctcttct

SEQ ID NO: 1135955 - DNA, 25 bp, Homo sapien
tattgtctctagtcctgcagggtgc

SEQ ID NO: 1135956 - DNA, 25 bp, Homo sapien
ccaaggaaacgtcctgtgggtcagc

SEQ ID NO: 1135957 - DNA, 25 bp, Homo sapien
agttctatagaacttatataaaaga

SEQ ID NO: 1135958 - DNA, 25 bp, Homo sapien
tctatagaacttatataaaagagtt

SEQ ID NO: 1135959 - DNA, 25 bp, Homo sapien
aatggataaagggtacagaggtaat

SEQ ID NO: 1135960 - DNA, 25 bp, Homo sapien
ttaatgtcctaaggtacaaacaatg

SEQ ID NO: 1135961 - DNA, 25 bp, Homo sapien
tagccaatcattacagaccggaatt

SEQ ID NO: 1135962 - DNA, 25 bp, Homo sapien
cattacagaccggaatttccaaatt

SEQ ID NO: 1135963 - DNA, 25 bp, Homo sapien
caatcattacagaccggaatttcca

SEQ ID NO: 1135964 - DNA, 25 bp, Homo sapien
taatagccaatcattacagaccgga

SEQ ID NO: 1135965 - DNA, 25 bp, Homo sapien
gggcaccatataattcaagatgtga

SEQ ID NO: 1135966 - DNA, 25 bp, Homo sapien
ttcactggttgccatattcaccagg

SEQ ID NO: 1135967 - DNA, 25 bp, Homo sapien
actggttgccatattcaccagggaa

SEQ ID NO: 1135968 - DNA, 25 bp, Homo sapien
tcagaatcactaatacggttgggca

SEQ ID NO: 1135969 - DNA, 25 bp, Homo sapien
cgtttccgtgggataaccctcgcag

SEQ ID NO: 1135970 - DNA, 25 bp, Homo sapien
agtgactgggcagatccgtttccgt

SEQ ID NO: 1135971 - DNA, 25 bp, Homo sapien
tttccgtgggataaccctcgcagcc

SEQ ID NO: 1135972 - DNA, 25 bp, Homo sapien
gcagatccgtttccgtgggataacc

SEQ ID NO: 1135973 - DNA, 25 bp, Homo sapien
tccacctgatcatgggtgtacatag

SEQ ID NO: 1135974 - DNA, 25 bp, Homo sapien
tcaatgaacattgcctgtccacctg

SEQ ID NO: 1135975 - DNA, 25 bp, Homo sapien
ttctgcagctgagagttcctgtgtc

SEQ ID NO: 1135976 - DNA, 25 bp, Homo sapien
tagacaccagctgtaactacattgc

SEQ ID NO: 1135977 - DNA, 25 bp, Homo sapien
ggaaagtcccatgatcaagctctag

SEQ ID NO: 1135978 - DNA, 25 bp, Homo sapien
aacagttgcgattaatggtgccagc

SEQ ID NO: 1135979 - DNA, 25 bp, Homo sapien
tctgccttcacgtgggatccagcga

SEQ ID NO: 1135980 - DNA, 25 bp, Homo sapien
tgaacatgctctgtgcttgccccag

SEQ ID NO: 1135981 - DNA, 25 bp, Homo sapien
ggcccagggtgctcattagtgcctg

SEQ ID NO: 1135982 - DNA, 25 bp, Homo sapien
tcactgctgcctagttagcacctac

SEQ ID NO: 1135983 - DNA, 25 bp, Homo sapien
agttagcacctacagttgtcttggg

SEQ ID NO: 1135984 - DNA, 25 bp, Homo sapien
gctcattagtgcctggtcacccaca

SEQ ID NO: 1135985 - DNA, 25 bp, Homo sapien
tttattgggctaaggcattatgcca

SEQ ID NO: 1135986 - DNA, 25 bp, Homo sapien
agctaatgaacacttacccacccag

SEQ ID NO: 1135987 - DNA, 25 bp, Homo sapien
tcttaagttggaaacgaggtcattg

SEQ ID NO: 1135988 - DNA, 25 bp, Homo sapien
ctagaaatcctaccccttgttgttg

SEQ ID NO: 1135989 - DNA, 25 bp, Homo sapien
atttttacttcaatactcctccaag

SEQ ID NO: 1135990 - DNA, 25 bp, Homo sapien
tctatttttacttcaatactcctcc

SEQ ID NO: 1135991 - DNA, 25 bp, Homo sapien
gacttctatttttacttcaatactc

SEQ ID NO: 1135992 - DNA, 25 bp, Homo sapien
ttacttcaatactcctccaaggcat

SEQ ID NO: 1135993 - DNA, 25 bp, Homo sapien
acgctggtgaaccacggctacgcgg

SEQ ID NO: 1135994 - DNA, 25 bp, Homo sapien
gagcagcggcggtgcccacacgctg

SEQ ID NO: 1135995 - DNA, 25 bp, Homo sapien
gtgaaccacggctacgcggagcccg

SEQ ID NO: 1135996 - DNA, 25 bp, Homo sapien
gtgcccacacgctggtgaaccacgg

SEQ ID NO: 1135997 - DNA, 25 bp, Homo sapien
ttctatagacaacagacgagccgtc

SEQ ID NO: 1135998 - DNA, 25 bp, Homo sapien
ctctgggccccaaatacaaagtaag

SEQ ID NO: 1135999 - DNA, 25 bp, Homo sapien
ggttcggctgtccaacagggctaga

SEQ ID NO: 1136000 - DNA, 25 bp, Homo sapien
tcggcaatcagaagcaaataggctg

SEQ ID NO: 1136001 - DNA, 25 bp, Homo sapien
tttcaacagcatgtaagcccaatga

SEQ ID NO: 1136002 - DNA, 25 bp, Homo sapien
actagagagttaccaaacggaggcg

SEQ ID NO: 1136003 - DNA, 25 bp, Homo sapien
caagtatgaagaccctgagagcaga

SEQ ID NO: 1136004 - DNA, 25 bp, Homo sapien
gaagctgacagttttaatggagacc

SEQ ID NO: 1136005 - DNA, 25 bp, Homo sapien
gctacatccatagtgggaagaatga

SEQ ID NO: 1136006 - DNA, 25 bp, Homo sapien
gggttggtatagcagtagaaatcag

SEQ ID NO: 1136007 - DNA, 25 bp, Homo sapien
tcagctacatccatagtgggaagaa

SEQ ID NO: 1136008 - DNA, 25 bp, Homo sapien
gaaatcaggaagcttgacattgggt

SEQ ID NO: 1136009 - DNA, 25 bp, Homo sapien
cagagtcgtgcatcatcatccctca

SEQ ID NO: 1136010 - DNA, 25 bp, Homo sapien
ttgcagagtcgtgcatcatcatccc

SEQ ID NO: 1136011 - DNA, 25 bp, Homo sapien
tgcagagtcgtgcatcatcatccct

SEQ ID NO: 1136012 - DNA, 25 bp, Homo sapien
agttgcagagtcgtgcatcatcatc

SEQ ID NO: 1136013 - DNA, 25 bp, Homo sapien
cattagggtggaaccaggaccactt

SEQ ID NO: 1136014 - DNA, 25 bp, Homo sapien
ttagggtggaaccaggaccacttca

SEQ ID NO: 1136015 - DNA, 25 bp, Homo sapien
agggtggaaccaggaccacttcata

SEQ ID NO: 1136016 - DNA, 25 bp, Homo sapien
acattagggtggaaccaggaccact

SEQ ID NO: 1136017 - DNA, 25 bp, Homo sapien
gaaagagtctctaatgccatggtga

SEQ ID NO: 1136018 - DNA, 25 bp, Homo sapien
tctctctttgtgaacccacattttc

SEQ ID NO: 1136019 - DNA, 25 bp, Homo sapien
agatattgctaagtaaccaaatggg

SEQ ID NO: 1136020 - DNA, 25 bp, Homo sapien
agagtctggctatgtgggacacaac

SEQ ID NO: 1136021 - DNA, 25 bp, Homo sapien
tgtgcaggtgctaacagccatgagg

SEQ ID NO: 1136022 - DNA, 25 bp, Homo sapien
ggtgctgtgcaggtgctaacagcca

SEQ ID NO: 1136023 - DNA, 25 bp, Homo sapien
tctttgacttatgcaagtgattcca

SEQ ID NO: 1136024 - DNA, 25 bp, Homo sapien
ctttctctttgacttatgcaagtga

SEQ ID NO: 1136025 - DNA, 25 bp, Homo sapien
cagctcttgctctgcatttattcat

SEQ ID NO: 1136026 - DNA, 25 bp, Homo sapien
tatgcaagtgattccaagatcctgg

SEQ ID NO: 1136027 - DNA, 25 bp, Homo sapien
ttggcactgcccacccactcagtgt

SEQ ID NO: 1136028 - DNA, 25 bp, Homo sapien
tcagtagcctaaagccaattgcttg

SEQ ID NO: 1136029 - DNA, 25 bp, Homo sapien
aaagccaattgcttggcactgccca

SEQ ID NO: 1136030 - DNA, 25 bp, Homo sapien
aagccaattgcttggcactgcccac

SEQ ID NO: 1136031 - DNA, 25 bp, Homo sapien
catttggcaagagcttcatcacaat

SEQ ID NO: 1136032 - DNA, 25 bp, Homo sapien
tttggcaagagcttcatcacaatca

SEQ ID NO: 1136033 - DNA, 25 bp, Homo sapien
gcatttggcaagagcttcatcacaa

SEQ ID NO: 1136034 - DNA, 25 bp, Homo sapien
tggcaagagcttcatcacaatcaat

SEQ ID NO: 1136035 - DNA, 25 bp, Homo sapien
ggaagctcatcttgtagtttgagtc

SEQ ID NO: 1136036 - DNA, 25 bp, Homo sapien
ggagaagggaagctcatcttgtagt

SEQ ID NO: 1136037 - DNA, 25 bp, Homo sapien
tggagaagggaagctcatcttgtag

SEQ ID NO: 1136038 - DNA, 25 bp, Homo sapien
aagggaagctcatcttgtagtttga

SEQ ID NO: 1136039 - DNA, 25 bp, Homo sapien
ctggacactgtaaagatacctcatt

SEQ ID NO: 1136040 - DNA, 25 bp, Homo sapien
ggacactgtaaagatacctcatttc

SEQ ID NO: 1136041 - DNA, 25 bp, Homo sapien
actgtaaagatacctcatttccaga

SEQ ID NO: 1136042 - DNA, 25 bp, Homo sapien
gacactgtaaagatacctcatttcc

SEQ ID NO: 1136043 - DNA, 25 bp, Homo sapien
gttgacttcttgtatctgtgatgtg

SEQ ID NO: 1136044 - DNA, 25 bp, Homo sapien
tctgtgatgtgtcttccacgaatct

SEQ ID NO: 1136045 - DNA, 25 bp, Homo sapien
aacattgatatagttgacttcttgt

SEQ ID NO: 1136046 - DNA, 25 bp, Homo sapien
gtgtcttccacgaatctgtcatatt

SEQ ID NO: 1136047 - DNA, 25 bp, Homo sapien
tgcctgcttgcagatgacaacacag

SEQ ID NO: 1136048 - DNA, 25 bp, Homo sapien
aagtgcctgcttgcagatgacaaca

SEQ ID NO: 1136049 - DNA, 25 bp, Homo sapien
aacacaagtgcctgcttgcagatga

SEQ ID NO: 1136050 - DNA, 25 bp, Homo sapien
cacaagtgcctgcttgcagatgaca

SEQ ID NO: 1136051 - DNA, 25 bp, Homo sapien
cagacatttctgttgcctgatgagg

SEQ ID NO: 1136052 - DNA, 25 bp, Homo sapien
ctgttgcctgatgaggagaaaatgg

SEQ ID NO: 1136053 - DNA, 25 bp, Homo sapien
tgtgcccccgcaggtgttcagacat

SEQ ID NO: 1136054 - DNA, 25 bp, Homo sapien
gcccccgcaggtgttcagacatttc

SEQ ID NO: 1136055 - DNA, 25 bp, Homo sapien
gaaccaggccaagaagacgtggtca

SEQ ID NO: 1136056 - DNA, 25 bp, Homo sapien
gccaaacacctcaccgtgtgcgtgg

SEQ ID NO: 1136057 - DNA, 25 bp, Homo sapien
tcaccgtgtgcgtggagaatcctcc

SEQ ID NO: 1136058 - DNA, 25 bp, Homo sapien
agggcagcgcttcaccacagagacc

SEQ ID NO: 1136059 - DNA, 25 bp, Homo sapien
tgacacagtttgacaaggcctagtc

SEQ ID NO: 1136060 - DNA, 25 bp, Homo sapien
tgtgtcacagctggataacttgtgc

SEQ ID NO: 1136061 - DNA, 25 bp, Homo sapien
tggataacttgtgcttaggaagggg

SEQ ID NO: 1136062 - DNA, 25 bp, Homo sapien
gctggataacttgtgcttaggaagg

SEQ ID NO: 1136063 - DNA, 25 bp, Homo sapien
acagctggataacttgtgcttagga

SEQ ID NO: 1136064 - DNA, 25 bp, Homo sapien
atctgggggtggtcactactgtaaa

SEQ ID NO: 1136065 - DNA, 25 bp, Homo sapien
gggggtggtcactactgtaaagcat

SEQ ID NO: 1136066 - DNA, 25 bp, Homo sapien
tattttaagaatctgggggtggtca

SEQ ID NO: 1136067 - DNA, 25 bp, Homo sapien
ctgggggtggtcactactgtaaagc

SEQ ID NO: 1136068 - DNA, 25 bp, Homo sapien
tatcaatgtcatgtttagactggct

SEQ ID NO: 1136069 - DNA, 25 bp, Homo sapien
cagcagtgattaaagccttgtactt

SEQ ID NO: 1136070 - DNA, 25 bp, Homo sapien
agtatcaatgtcatgtttagactgg

SEQ ID NO: 1136071 - DNA, 25 bp, Homo sapien
tgcagcagtgattaaagccttgtac

SEQ ID NO: 1136072 - DNA, 25 bp, Homo sapien
gacaggacaagttcaccaggaggaa

SEQ ID NO: 1136073 - DNA, 25 bp, Homo sapien
ggaagagaatccttgaagcacgaat

SEQ ID NO: 1136074 - DNA, 25 bp, Homo sapien
gactaaaactagaaggacaatgagg

SEQ ID NO: 1136075 - DNA, 25 bp, Homo sapien
gtttccagaaacagttaagatgtag

SEQ ID NO: 1136076 - DNA, 25 bp, Homo sapien
tgatcagtttcatagggtccacaga

SEQ ID NO: 1136077 - DNA, 25 bp, Homo sapien
cagtgagcaagaggcactccgtggc

SEQ ID NO: 1136078 - DNA, 25 bp, Homo sapien
cagagaggaccctttgcacaagagt

SEQ ID NO: 1136079 - DNA, 25 bp, Homo sapien
tggcagccagggatccgaagaagta

SEQ ID NO: 1136080 - DNA, 25 bp, Homo sapien
cccagtgtccttcaagaccaccttg

SEQ ID NO: 1136081 - DNA, 25 bp, Homo sapien
ctgtgttacaggatcccagtgtcct

SEQ ID NO: 1136082 - DNA, 25 bp, Homo sapien
tacaggatcccagtgtccttcaaga

SEQ ID NO: 1136083 - DNA, 25 bp, Homo sapien
caagaccaccttggatgtttcttca

SEQ ID NO: 1136084 - DNA, 25 bp, Homo sapien
ctatttgtgtaaaaggagaagtgaa

SEQ ID NO: 1136085 - DNA, 25 bp, Homo sapien
tgtaaaaggagaagtgaagggtgaa

SEQ ID NO: 1136086 - DNA, 25 bp, Homo sapien
tgtgtaaaaggagaagtgaagggtg

SEQ ID NO: 1136087 - DNA, 25 bp, Homo sapien
atttgtgtaaaaggagaagtgaagg

SEQ ID NO: 1136088 - DNA, 25 bp, Homo sapien
cgagacaaggctggtaacacagata

SEQ ID NO: 1136089 - DNA, 25 bp, Homo sapien
ctttcggcagaatttagtgattatc

SEQ ID NO: 1136090 - DNA, 25 bp, Homo sapien
aggcaccgttcctcagtcctttcgg

SEQ ID NO: 1136091 - DNA, 25 bp, Homo sapien
tttagtgattatccttgaggtggcc

SEQ ID NO: 1136092 - DNA, 25 bp, Homo sapien
ggtccctcggctagaggcctgtcca

SEQ ID NO: 1136093 - DNA, 25 bp, Homo sapien
gtccctcggctagaggcctgtccat

SEQ ID NO: 1136094 - DNA, 25 bp, Homo sapien
gggtccctcggctagaggcctgtcc

SEQ ID NO: 1136095 - DNA, 25 bp, Homo sapien
ggggtccctcggctagaggcctgtc

SEQ ID NO: 1136096 - DNA, 25 bp, Homo sapien
gaagagtaataagcagttgtagagg

SEQ ID NO: 1136097 - DNA, 25 bp, Homo sapien
taaaacgaagccaaagcatcaactc

SEQ ID NO: 1136098 - DNA, 25 bp, Homo sapien
aagcatcaactctcatgtattcgtg

SEQ ID NO: 1136099 - DNA, 25 bp, Homo sapien
taataagcagttgtagaggaagaag

SEQ ID NO: 1136100 - DNA, 25 bp, Homo sapien
ccagagagaatgctgctccgtttcc

SEQ ID NO: 1136101 - DNA, 25 bp, Homo sapien
agagagaatgctgctccgtttcccc

SEQ ID NO: 1136102 - DNA, 25 bp, Homo sapien
cacatgccataagggccccagagag

SEQ ID NO: 1136103 - DNA, 25 bp, Homo sapien
tttgccacatgccataagggcccca

SEQ ID NO: 1136104 - DNA, 25 bp, Homo sapien
acttcagcagtttcaagctactcat

SEQ ID NO: 1136105 - DNA, 25 bp, Homo sapien
acaggacatacttcagcagtttcaa

SEQ ID NO: 1136106 - DNA, 25 bp, Homo sapien
caaaagagcaagttgaagaaaaaca

SEQ ID NO: 1136107 - DNA, 25 bp, Homo sapien
gagcaagttgaagaaaaacaggaca

SEQ ID NO: 1136108 - DNA, 25 bp, Homo sapien
catgaccatgtagagaagatgccct

SEQ ID NO: 1136109 - DNA, 25 bp, Homo sapien
gaggcactcaatatccagagcacag

SEQ ID NO: 1136110 - DNA, 25 bp, Homo sapien
tgtgctggacatgacccaaacacgc

SEQ ID NO: 1136111 - DNA, 25 bp, Homo sapien
aggaagctcatcttgctaggcagaa

SEQ ID NO: 1136112 - DNA, 25 bp, Homo sapien
gcactccgaagttgttgtggatcag

SEQ ID NO: 1136113 - DNA, 25 bp, Homo sapien
taatagagcccacgatgacaaacac

SEQ ID NO: 1136114 - DNA, 25 bp, Homo sapien
gacaaacacattgcccagcgtgagg

SEQ ID NO: 1136115 - DNA, 25 bp, Homo sapien
gttttccttgatagagcccatgcag

SEQ ID NO: 1136116 - DNA, 25 bp, Homo sapien
tccgtgggaccctagtcatacataa

SEQ ID NO: 1136117 - DNA, 25 bp, Homo sapien
gcaccacatctgctgtaaggactca

SEQ ID NO: 1136118 - DNA, 25 bp, Homo sapien
gcagacttggctgatctgaggtacc

SEQ ID NO: 1136119 - DNA, 25 bp, Homo sapien
tgtgcctataagtgatctaccaaga

SEQ ID NO: 1136120 - DNA, 25 bp, Homo sapien
caaagcagatacattctcacagcac

SEQ ID NO: 1136121 - DNA, 25 bp, Homo sapien
catttgcacgagtacagggtgttcc

SEQ ID NO: 1136122 - DNA, 25 bp, Homo sapien
tcctcaggccgttgtaagccttctt

SEQ ID NO: 1136123 - DNA, 25 bp, Homo sapien
tccaggggcatttgcacgagtacag

SEQ ID NO: 1136124 - DNA, 25 bp, Homo sapien
tctgttcatatacaaagagcaggat

SEQ ID NO: 1136125 - DNA, 25 bp, Homo sapien
agcaaggaggataatcagcagcagg

SEQ ID NO: 1136126 - DNA, 25 bp, Homo sapien
tatacaaagagcaggatggccaagg

SEQ ID NO: 1136127 - DNA, 25 bp, Homo sapien
gatggccaaggtcacctcagcaagg

SEQ ID NO: 1136128 - DNA, 25 bp, Homo sapien
aaatgactggatggagtcccacgct

SEQ ID NO: 1136129 - DNA, 25 bp, Homo sapien
ccttggtgctattgtctgagtggta

SEQ ID NO: 1136130 - DNA, 25 bp, Homo sapien
taacggtggatgctgtcggtcagac

SEQ ID NO: 1136131 - DNA, 25 bp, Homo sapien
tcggtcagacccttagccacatact

SEQ ID NO: 1136132 - DNA, 25 bp, Homo sapien
cagatcaagaataaggcacccaggg

SEQ ID NO: 1136133 - DNA, 25 bp, Homo sapien
tgtggagtagagacccctgtgctta

SEQ ID NO: 1136134 - DNA, 25 bp, Homo sapien
taatggagggattaggctgaccacc

SEQ ID NO: 1136135 - DNA, 25 bp, Homo sapien
tgggcaactcgggaactcaatggca

SEQ ID NO: 1136136 - DNA, 25 bp, Homo sapien
ctccacttttcgatctgaggggcaa

SEQ ID NO: 1136137 - DNA, 25 bp, Homo sapien
ccaatcactcgtgccatttatacca

SEQ ID NO: 1136138 - DNA, 25 bp, Homo sapien
tgggccactggtccaatcactcgtg

SEQ ID NO: 1136139 - DNA, 25 bp, Homo sapien
atgctggtgggccactggtccaatc

SEQ ID NO: 1136140 - DNA, 25 bp, Homo sapien
tctatgactgcagtttccgaggtaa

SEQ ID NO: 1136141 - DNA, 25 bp, Homo sapien
ttctcaatagaaggtctaggtcctc

SEQ ID NO: 1136142 - DNA, 25 bp, Homo sapien
tagtgtagcaagatcaatcacagtg

SEQ ID NO: 1136143 - DNA, 25 bp, Homo sapien
ctaattacccaaggttgttgccctg

SEQ ID NO: 1136144 - DNA, 25 bp, Homo sapien
tgctgaccagagattaacatagggc

SEQ ID NO: 1136145 - DNA, 25 bp, Homo sapien
caggagcagataacatgaggagaca

SEQ ID NO: 1136146 - DNA, 25 bp, Homo sapien
taaactagcttctaagaggcaggtc

SEQ ID NO: 1136147 - DNA, 25 bp, Homo sapien
gaagtcctagatccttacccgctga

SEQ ID NO: 1136148 - DNA, 25 bp, Homo sapien
gatgattccgatatacaggaaattg

SEQ ID NO: 1136149 - DNA, 25 bp, Homo sapien
cacagtcttgctttcgcatagcaac

SEQ ID NO: 1136150 - DNA, 25 bp, Homo sapien
acagtcttgctttcgcatagcaacc

SEQ ID NO: 1136151 - DNA, 25 bp, Homo sapien
gatggtgatgattccgatatacagg

SEQ ID NO: 1136152 - DNA, 25 bp, Homo sapien
tctatataccttaaagcaaattgtt

SEQ ID NO: 1136153 - DNA, 25 bp, Homo sapien
tgctacttggctgggggaattcata

SEQ ID NO: 1136154 - DNA, 25 bp, Homo sapien
ccaagagatgttcttatagcacatt

SEQ ID NO: 1136155 - DNA, 25 bp, Homo sapien
aatcttacctgacttaactcatgta

SEQ ID NO: 1136156 - DNA, 25 bp, Homo sapien
caatgcctgggattggcctctgaga

SEQ ID NO: 1136157 - DNA, 25 bp, Homo sapien
taacaggctgtaaagtactggagca

SEQ ID NO: 1136158 - DNA, 25 bp, Homo sapien
gaagccttgctgctaggatggtcat

SEQ ID NO: 1136159 - DNA, 25 bp, Homo sapien
gccccttaacatgcaagatcaggtt

SEQ ID NO: 1136160 - DNA, 25 bp, Homo sapien
gtcagtgcaaaggacatccccaaca

SEQ ID NO: 1136161 - DNA, 25 bp, Homo sapien
tggctggttttgtcaatctggcagt

SEQ ID NO: 1136162 - DNA, 25 bp, Homo sapien
tcatagccctatggtctggctggtt

SEQ ID NO: 1136163 - DNA, 25 bp, Homo sapien
tgtcaatctggcagttcagggtcag

SEQ ID NO: 1136164 - DNA, 25 bp, Homo sapien
tcatcctgcagtgatcatgtagggc

SEQ ID NO: 1136165 - DNA, 25 bp, Homo sapien
tctctggttgtataagacagggacc

SEQ ID NO: 1136166 - DNA, 25 bp, Homo sapien
tgtgacaatggtccagtgagcctgg

SEQ ID NO: 1136167 - DNA, 25 bp, Homo sapien
tagccagggcacttagtcaaagaga

SEQ ID NO: 1136168 - DNA, 25 bp, Homo sapien
ggtagtcttctttggattaagtcag

SEQ ID NO: 1136169 - DNA, 25 bp, Homo sapien
tcttctttggattaagtcagcttgg

SEQ ID NO: 1136170 - DNA, 25 bp, Homo sapien
tggattaagtcagcttggtgctcta

SEQ ID NO: 1136171 - DNA, 25 bp, Homo sapien
agtcagcttggtgctctataacctt

SEQ ID NO: 1136172 - DNA, 25 bp, Homo sapien
gaacttgtgcgttgacgtctctaga

SEQ ID NO: 1136173 - DNA, 25 bp, Homo sapien
caatgagcttccttgacattgagat

SEQ ID NO: 1136174 - DNA, 25 bp, Homo sapien
gttgctggagttattgcactcgcac

SEQ ID NO: 1136175 - DNA, 25 bp, Homo sapien
tgttagcccttgtacatgacctgcc

SEQ ID NO: 1136176 - DNA, 25 bp, Homo sapien
tgcgttgatgatctgtgaaactgtc

SEQ ID NO: 1136177 - DNA, 25 bp, Homo sapien
aagaatagctaccccagctgggcgc

SEQ ID NO: 1136178 - DNA, 25 bp, Homo sapien
gagcgtgcttaatgaatctagatgc

SEQ ID NO: 1136179 - DNA, 25 bp, Homo sapien
ggtggagcattctgtcgatgtctgt

SEQ ID NO: 1136180 - DNA, 25 bp, Homo sapien
tctaaggcacaagagagcatggcat

SEQ ID NO: 1136181 - DNA, 25 bp, Homo sapien
caaaagagtggccagatatccagac

SEQ ID NO: 1136182 - DNA, 25 bp, Homo sapien
gatgacaaccgcatcctaccagttg

SEQ ID NO: 1136183 - DNA, 25 bp, Homo sapien
gtcgtagtgaactgtgaacatgcca

SEQ ID NO: 1136184 - DNA, 25 bp, Homo sapien
tatctttacctaaattgctcaggca

SEQ ID NO: 1136185 - DNA, 25 bp, Homo sapien
gaggaaatcagctccaaacttagct

SEQ ID NO: 1136186 - DNA, 25 bp, Homo sapien
ttgcttatagtgatgtgttcccagg

SEQ ID NO: 1136187 - DNA, 25 bp, Homo sapien
caggcattattccagcagtagatag

SEQ ID NO: 1136188 - DNA, 25 bp, Homo sapien
gagtgtgccttactcgaattcctga

SEQ ID NO: 1136189 - DNA, 25 bp, Homo sapien
cctgaccatttgacctctggagaag

SEQ ID NO: 1136190 - DNA, 25 bp, Homo sapien
taaggcattacatctgaagagtgat

SEQ ID NO: 1136191 - DNA, 25 bp, Homo sapien
catcagataaaggtgcccaaggaag

SEQ ID NO: 1136192 - DNA, 25 bp, Homo sapien
ttggctcggatggaaaaaatcttct

SEQ ID NO: 1136193 - DNA, 25 bp, Homo sapien
caagtagttcagacgattggctcgg

SEQ ID NO: 1136194 - DNA, 25 bp, Homo sapien
ctcaggaatggttgaggcctcccaa

SEQ ID NO: 1136195 - DNA, 25 bp, Homo sapien
cacaagtgcatcagttcaattgccc

SEQ ID NO: 1136196 - DNA, 25 bp, Homo sapien
tctttagagcctgacacagcggctc

SEQ ID NO: 1136197 - DNA, 25 bp, Homo sapien
cctctttagagcctgacacagcggc

SEQ ID NO: 1136198 - DNA, 25 bp, Homo sapien
ctctttagagcctgacacagcggct

SEQ ID NO: 1136199 - DNA, 25 bp, Homo sapien
agttggagcccgcagagtgcgccac

SEQ ID NO: 1136200 - DNA, 25 bp, Homo sapien
tttccggacgctgtgtagttgagag

SEQ ID NO: 1136201 - DNA, 25 bp, Homo sapien
cctctgtccgtcttagggatgtgga

SEQ ID NO: 1136202 - DNA, 25 bp, Homo sapien
gaagcgcttgtctccgcggcgctta

SEQ ID NO: 1136203 - DNA, 25 bp, Homo sapien
aggcaacgcctcgcgttggtaagta

SEQ ID NO: 1136204 - DNA, 25 bp, Homo sapien
ggcaacgcctcgcgttggtaagtac

SEQ ID NO: 1136205 - DNA, 25 bp, Homo sapien
atgtcaaataacctacggagggtct

SEQ ID NO: 1136206 - DNA, 25 bp, Homo sapien
ccacttttctggatgaggtgtcccc

SEQ ID NO: 1136207 - DNA, 25 bp, Homo sapien
cgctgtcgccctccgttaaggtcga

SEQ ID NO: 1136208 - DNA, 25 bp, Homo sapien
aaggtcgaacccctcacagttgctg

SEQ ID NO: 1136209 - DNA, 25 bp, Homo sapien
tcagcgtagggctgtgagggcgcag

SEQ ID NO: 1136210 - DNA, 25 bp, Homo sapien
accgccaggagccttccggtttctg

SEQ ID NO: 1136211 - DNA, 25 bp, Homo sapien
gtttctgcgcggtgcgcgacctcgt

SEQ ID NO: 1136212 - DNA, 25 bp, Homo sapien
gctgtgagggcgcagtccaccgcca

SEQ ID NO: 1136213 - DNA, 25 bp, Homo sapien
gctttagcgagccagtcaccttggc

SEQ ID NO: 1136214 - DNA, 25 bp, Homo sapien
tccagctatcggcttcagtgggcgg

SEQ ID NO: 1136215 - DNA, 25 bp, Homo sapien
tcaccttggcaaccggacgtgacga

SEQ ID NO: 1136216 - DNA, 25 bp, Homo sapien
tcagcactgaccaggctctgttggg

SEQ ID NO: 1136217 - DNA, 25 bp, Homo sapien
cttttaatgcactgacgggagagaa

SEQ ID NO: 1136218 - DNA, 25 bp, Homo sapien
aagtgcatgactccaaaaaagcgcg

SEQ ID NO: 1136219 - DNA, 25 bp, Homo sapien
taagtaagtctagaggcaaagcttc

SEQ ID NO: 1136220 - DNA, 25 bp, Homo sapien
gaaaaacgtacgctagcggcgagca

SEQ ID NO: 1136221 - DNA, 25 bp, Homo sapien
tcttagcagcattagataaatggaa

SEQ ID NO: 1136222 - DNA, 25 bp, Homo sapien
catgtatccagcattatagaatcac

SEQ ID NO: 1136223 - DNA, 25 bp, Homo sapien
tatccagcattatagaatcacagaa

SEQ ID NO: 1136224 - DNA, 25 bp, Homo sapien
tcacttttaattccctattaacatc

SEQ ID NO: 1136225 - DNA, 25 bp, Homo sapien
tcgttcaaggattaaccaggcccaa

SEQ ID NO: 1136226 - DNA, 25 bp, Homo sapien
cttcctagatcagacaaggtcaggt

SEQ ID NO: 1136227 - DNA, 25 bp, Homo sapien
tctcgttcaaggattaaccaggccc

SEQ ID NO: 1136228 - DNA, 25 bp, Homo sapien
tctctcgttcaaggattaaccaggc

SEQ ID NO: 1136229 - DNA, 25 bp, Homo sapien
ggagtacaagtactgaattctctct

SEQ ID NO: 1136230 - DNA, 25 bp, Homo sapien
agtacaagtactgaattctctctag

SEQ ID NO: 1136231 - DNA, 25 bp, Homo sapien
tgtggagtacaagtactgaattctc

SEQ ID NO: 1136232 - DNA, 25 bp, Homo sapien
acaagtactgaattctctctagttc

SEQ ID NO: 1136233 - DNA, 25 bp, Homo sapien
ccctgatcactctgaaaactaactg

SEQ ID NO: 1136234 - DNA, 25 bp, Homo sapien
tttgatcttgaggatacaaagatcc

SEQ ID NO: 1136235 - DNA, 25 bp, Homo sapien
ttgatcttgaggatacaaagatccc

SEQ ID NO: 1136236 - DNA, 25 bp, Homo sapien
acaaagatccctgatcactctgaaa

SEQ ID NO: 1136237 - DNA, 25 bp, Homo sapien
gcagggtgagtcctgtcactgccaa

SEQ ID NO: 1136238 - DNA, 25 bp, Homo sapien
ctggtgactgtatgatgtagcaaag

SEQ ID NO: 1136239 - DNA, 25 bp, Homo sapien
aaggtagccataatctccctggaaa

SEQ ID NO: 1136240 - DNA, 25 bp, Homo sapien
ctgtatgatgtagcaaaggtagcca

SEQ ID NO: 1136241 - DNA, 25 bp, Homo sapien
atctgtgtacaggataggtaggcca

SEQ ID NO: 1136242 - DNA, 25 bp, Homo sapien
ccacgggttttcaggcttgaggatg

SEQ ID NO: 1136243 - DNA, 25 bp, Homo sapien
gctgaactcctctcaacgtttagat

SEQ ID NO: 1136244 - DNA, 25 bp, Homo sapien
ttcatatctcatggaaatgaacaga

SEQ ID NO: 1136245 - DNA, 25 bp, Homo sapien
ttaaaaccgaatactctcacaagtc

SEQ ID NO: 1136246 - DNA, 25 bp, Homo sapien
aaaccgaatactctcacaagtcacg

SEQ ID NO: 1136247 - DNA, 25 bp, Homo sapien
aatactctcacaagtcacgcagcca

SEQ ID NO: 1136248 - DNA, 25 bp, Homo sapien
ccgaatactctcacaagtcacgcag

SEQ ID NO: 1136249 - DNA, 25 bp, Homo sapien
tgttaggagcacttttatgagagac

SEQ ID NO: 1136250 - DNA, 25 bp, Homo sapien
taagagaaacaacctgacgtgcacc

SEQ ID NO: 1136251 - DNA, 25 bp, Homo sapien
gggctcttccatggcttaagtgttg

SEQ ID NO: 1136252 - DNA, 25 bp, Homo sapien
taatcaccaatgaaggagagaggca

SEQ ID NO: 1136253 - DNA, 25 bp, Homo sapien
caaccacttaatcaaggctgacagt

SEQ ID NO: 1136254 - DNA, 25 bp, Homo sapien
gaacgaacacggctactttccagag

SEQ ID NO: 1136255 - DNA, 25 bp, Homo sapien
ggattaaccctctatgacactgcac

SEQ ID NO: 1136256 - DNA, 25 bp, Homo sapien
tctaaaggatatcatcaagaagact

SEQ ID NO: 1136257 - DNA, 25 bp, Homo sapien
tagtgcctcagtaattgagctagga

SEQ ID NO: 1136258 - DNA, 25 bp, Homo sapien
cattttgttgtgaccctctgagcag

SEQ ID NO: 1136259 - DNA, 25 bp, Homo sapien
tagttttacagtaccactgctgtgt

SEQ ID NO: 1136260 - DNA, 25 bp, Homo sapien
gaattcagattgtacatagtgcctc

SEQ ID NO: 1136261 - DNA, 25 bp, Homo sapien
aagtgggaattcatagctgtggagc

SEQ ID NO: 1136262 - DNA, 25 bp, Homo sapien
taagaagggattctggttaaactgc

SEQ ID NO: 1136263 - DNA, 25 bp, Homo sapien
caggcagggtgatttataggaaaag

SEQ ID NO: 1136264 - DNA, 25 bp, Homo sapien
gcatctggttatgatgaggacttca

SEQ ID NO: 1136265 - DNA, 25 bp, Homo sapien
gcagtgcctgatgccgagttccgtc

SEQ ID NO: 1136266 - DNA, 25 bp, Homo sapien
ccaggcaaagcggagcggagatcct

SEQ ID NO: 1136267 - DNA, 25 bp, Homo sapien
tccgtctctcgcgtcttttcctggt

SEQ ID NO: 1136268 - DNA, 25 bp, Homo sapien
agcggagcggagatcctcaaacggc

SEQ ID NO: 1136269 - DNA, 25 bp, Homo sapien
ctaccttatgccaggcgccagaggg

SEQ ID NO: 1136270 - DNA, 25 bp, Homo sapien
cctccgggggctaccttatgccagg

SEQ ID NO: 1136271 - DNA, 25 bp, Homo sapien
tcgcaggcgcgcgagactcctgctg

SEQ ID NO: 1136272 - DNA, 25 bp, Homo sapien
tgctggccctcattgcctccggggg

SEQ ID NO: 1136273 - DNA, 25 bp, Homo sapien
agtacacccctagaaatatcgcctc

SEQ ID NO: 1136274 - DNA, 25 bp, Homo sapien
tagaaatatcgcctccgactccagc

SEQ ID NO: 1136275 - DNA, 25 bp, Homo sapien
tgggtgactgatcggcggcagcacg

SEQ ID NO: 1136276 - DNA, 25 bp, Homo sapien
ccgactccagccgactgggtgactg

SEQ ID NO: 1136277 - DNA, 25 bp, Homo sapien
gctcccacacaacagccccccggct

SEQ ID NO: 1136278 - DNA, 25 bp, Homo sapien
ggctcccacacaacagccccccggc

SEQ ID NO: 1136279 - DNA, 25 bp, Homo sapien
tcccacacaacagccccccggctcc

SEQ ID NO: 1136280 - DNA, 25 bp, Homo sapien
ctcccacacaacagccccccggctc

SEQ ID NO: 1136281 - DNA, 25 bp, Homo sapien
acagcatgaccctcaaaaagaacat

SEQ ID NO: 1136282 - DNA, 25 bp, Homo sapien
agcaaaagcttggtattttataggt

SEQ ID NO: 1136283 - DNA, 25 bp, Homo sapien
tcagcaaaagcttggtattttatag

SEQ ID NO: 1136284 - DNA, 25 bp, Homo sapien
catcagcacctttaaccagcttaaa

SEQ ID NO: 1136285 - DNA, 25 bp, Homo sapien
aaaagtctatcatgcaaaacggctg

SEQ ID NO: 1136286 - DNA, 25 bp, Homo sapien
gctacactagcagaaaggaagggca

SEQ ID NO: 1136287 - DNA, 25 bp, Homo sapien
ccgccatgtctaagggtgccaagtt

SEQ ID NO: 1136288 - DNA, 25 bp, Homo sapien
gacttggaagcaaaaacagggctgt

SEQ ID NO: 1136289 - DNA, 25 bp, Homo sapien
cccagactgttgtgtatactctaca

SEQ ID NO: 1136290 - DNA, 25 bp, Homo sapien
tcacagtcctatagctattgtagcc

SEQ ID NO: 1136291 - DNA, 25 bp, Homo sapien
tgtaatcagtaactccgttcctctg

SEQ ID NO: 1136292 - DNA, 25 bp, Homo sapien
ctacaagtgcatgggccaagcctgt

SEQ ID NO: 1136293 - DNA, 25 bp, Homo sapien
ccatggatggataggagtaaaccag

SEQ ID NO: 1136294 - DNA, 25 bp, Homo sapien
tttggagaattaacgcagagttgtc

SEQ ID NO: 1136295 - DNA, 25 bp, Homo sapien
gaaaatggaacacgccctgagatag

SEQ ID NO: 1136296 - DNA, 25 bp, Homo sapien
tgctcaggtacgagagagatcacca

SEQ ID NO: 1136297 - DNA, 25 bp, Homo sapien
aattaaaattattgctggcttagaa

SEQ ID NO: 1136298 - DNA, 25 bp, Homo sapien
aggatgagcagaaaatgtccttttc

SEQ ID NO: 1136299 - DNA, 25 bp, Homo sapien
aaacctagccaccagtcttaacagt

SEQ ID NO: 1136300 - DNA, 25 bp, Homo sapien
caggcctatgaccaaaaggatgagc

SEQ ID NO: 1136301 - DNA, 25 bp, Homo sapien
cagagtttgcagtcactaccacagg

SEQ ID NO: 1136302 - DNA, 25 bp, Homo sapien
aagcaagcatatctcaatggagccg

SEQ ID NO: 1136303 - DNA, 25 bp, Homo sapien
ctacaacaggaagatcaggacaatg

SEQ ID NO: 1136304 - DNA, 25 bp, Homo sapien
ccgcatagggtaggtggctacaaca

SEQ ID NO: 1136305 - DNA, 25 bp, Homo sapien
aggaccttgagtttaatccctgaag

SEQ ID NO: 1136306 - DNA, 25 bp, Homo sapien
gatgactgctaataaaggaccttga

SEQ ID NO: 1136307 - DNA, 25 bp, Homo sapien
tctcggtggagatatacaacaatga

SEQ ID NO: 1136308 - DNA, 25 bp, Homo sapien
aaaagtgggttaagtgatgactgct

SEQ ID NO: 1136309 - DNA, 25 bp, Homo sapien
cttcttttgtaggtttttgtggctg

SEQ ID NO: 1136310 - DNA, 25 bp, Homo sapien
cttttgtaggtttttgtggctggtg

SEQ ID NO: 1136311 - DNA, 25 bp, Homo sapien
gcagggaccgtccagcactttgata

SEQ ID NO: 1136312 - DNA, 25 bp, Homo sapien
gggactccgggtgagaatctccaca

SEQ ID NO: 1136313 - DNA, 25 bp, Homo sapien
ggagggaactcttctaacgagccat

SEQ ID NO: 1136314 - DNA, 25 bp, Homo sapien
tgtagtactcatatgcccgaagccc

SEQ ID NO: 1136315 - DNA, 25 bp, Homo sapien
caagtgtgtaggctgtacttacaag

SEQ ID NO: 1136316 - DNA, 25 bp, Homo sapien
tagttaaaatgaccccacgatccca

SEQ ID NO: 1136317 - DNA, 25 bp, Homo sapien
cacgatcccaattacaacgtttttg

SEQ ID NO: 1136318 - DNA, 25 bp, Homo sapien
taatttaagcactaggatcacagtc

SEQ ID NO: 1136319 - DNA, 25 bp, Homo sapien
cagccatgatcaaaaagttctccca

SEQ ID NO: 1136320 - DNA, 25 bp, Homo sapien
aagactggtaaatgaaaaggccaca

SEQ ID NO: 1136321 - DNA, 25 bp, Homo sapien
cccagaggagaactactattggttc

SEQ ID NO: 1136322 - DNA, 25 bp, Homo sapien
caagcaatatatgcccacagaggtg

SEQ ID NO: 1136323 - DNA, 25 bp, Homo sapien
gacggaccgacttacttgcttcaga

SEQ ID NO: 1136324 - DNA, 25 bp, Homo sapien
cctctactaaataagctgctgttgg

SEQ ID NO: 1136325 - DNA, 25 bp, Homo sapien
gcaaatcattacaaggcagacagcc

SEQ ID NO: 1136326 - DNA, 25 bp, Homo sapien
tgatggtgacaattatgccccaagc

SEQ ID NO: 1136327 - DNA, 25 bp, Homo sapien
cagaagaaagatcacgatgaaaacc

SEQ ID NO: 1136328 - DNA, 25 bp, Homo sapien
gaagaaagatcacgatgaaaaccaa

SEQ ID NO: 1136329 - DNA, 25 bp, Homo sapien
aagaaagatcacgatgaaaaccaaa

SEQ ID NO: 1136330 - DNA, 25 bp, Homo sapien
gaaagatcacgatgaaaaccaaata

SEQ ID NO: 1136331 - DNA, 25 bp, Homo sapien
tccaatcagggtttgtccccagctg

SEQ ID NO: 1136332 - DNA, 25 bp, Homo sapien
gccagtgcgcacaatagaacataaa

SEQ ID NO: 1136333 - DNA, 25 bp, Homo sapien
tccaaatcgcaatgttccagaaaca

SEQ ID NO: 1136334 - DNA, 25 bp, Homo sapien
gctgcactgcaatacaagttccaag

SEQ ID NO: 1136335 - DNA, 25 bp, Homo sapien
tacaggcaggcatcttatcatccaa

SEQ ID NO: 1136336 - DNA, 25 bp, Homo sapien
ataatagagggacatatgcagagac

SEQ ID NO: 1136337 - DNA, 25 bp, Homo sapien
gagaatacattagggctgacagata

SEQ ID NO: 1136338 - DNA, 25 bp, Homo sapien
aatattggattagggcgctgctctc

SEQ ID NO: 1136339 - DNA, 25 bp, Homo sapien
tcttggcaggatttagcaatgttct

SEQ ID NO: 1136340 - DNA, 25 bp, Homo sapien
tactatgaatagttcacactgccaa

SEQ ID NO: 1136341 - DNA, 25 bp, Homo sapien
cactgccaaattcaatgtacacttt

SEQ ID NO: 1136342 - DNA, 25 bp, Homo sapien
tcttttgtgaaatgcatccttctgg

SEQ ID NO: 1136343 - DNA, 25 bp, Homo sapien
tgcctggccatagcacatttctatg

SEQ ID NO: 1136344 - DNA, 25 bp, Homo sapien
aaatttggtgctgctttaatgcaaa

SEQ ID NO: 1136345 - DNA, 25 bp, Homo sapien
catttctatgaacattatagcctgc

SEQ ID NO: 1136346 - DNA, 25 bp, Homo sapien
taatcccttgtaatactaaaattca

SEQ ID NO: 1136347 - DNA, 25 bp, Homo sapien
attataattatgatctgggactctg

SEQ ID NO: 1136348 - DNA, 25 bp, Homo sapien
taattatgatctgggactctgtaac

SEQ ID NO: 1136349 - DNA, 25 bp, Homo sapien
gatctgggactctgtaacatcgaat

SEQ ID NO: 1136350 - DNA, 25 bp, Homo sapien
gtgagaagctggcatattataatta

SEQ ID NO: 1136351 - DNA, 25 bp, Homo sapien
caccaagactgctgtaaactcaagc

SEQ ID NO: 1136352 - DNA, 25 bp, Homo sapien
gaacttggccaacaaggaattcact

SEQ ID NO: 1136353 - DNA, 25 bp, Homo sapien
tctggactatcttactgggaaaaca

SEQ ID NO: 1136354 - DNA, 25 bp, Homo sapien
ttttttcagggcaggcgacctaatg

SEQ ID NO: 1136355 - DNA, 25 bp, Homo sapien
tttaatcacgacaaccaccctagga

SEQ ID NO: 1136356 - DNA, 25 bp, Homo sapien
ccctaggaggtaggaaatatcacca

SEQ ID NO: 1136357 - DNA, 25 bp, Homo sapien
gattctaccagaaataccatgggtg

SEQ ID NO: 1136358 - DNA, 25 bp, Homo sapien
gggagtcagctaaaacaggtcttaa

SEQ ID NO: 1136359 - DNA, 25 bp, Homo sapien
aaaagggtgcatgcagtgcaaagtc

SEQ ID NO: 1136360 - DNA, 25 bp, Homo sapien
gaactaaagcaagctaagagggaca

SEQ ID NO: 1136361 - DNA, 25 bp, Homo sapien
tgtttagaagacagctagttacatg

SEQ ID NO: 1136362 - DNA, 25 bp, Homo sapien
gggtgcatgcagtgcaaagtcattc

SEQ ID NO: 1136363 - DNA, 25 bp, Homo sapien
ggtgtcaaagatgatcgattctgtc

SEQ ID NO: 1136364 - DNA, 25 bp, Homo sapien
ggtgttgccaataaggggaattaca

SEQ ID NO: 1136365 - DNA, 25 bp, Homo sapien
taaggggaattacactcagtagcag

SEQ ID NO: 1136366 - DNA, 25 bp, Homo sapien
aggagactaagcaggtaggtgtcaa

SEQ ID NO: 1136367 - DNA, 25 bp, Homo sapien
aaaaggtggtcctccaatcactgcc

SEQ ID NO: 1136368 - DNA, 25 bp, Homo sapien
gattgccaaaaaggtggtcctccaa

SEQ ID NO: 1136369 - DNA, 25 bp, Homo sapien
tgattattatgaagatttgcacttc

SEQ ID NO: 1136370 - DNA, 25 bp, Homo sapien
catagattgccaaaaaggtggtcct

SEQ ID NO: 1136371 - DNA, 25 bp, Homo sapien
cagattaagttcacacagtaggcca

SEQ ID NO: 1136372 - DNA, 25 bp, Homo sapien
ggaaatcaaggtccaagctcgttca

SEQ ID NO: 1136373 - DNA, 25 bp, Homo sapien
taagccagagagagttacgcaacag

SEQ ID NO: 1136374 - DNA, 25 bp, Homo sapien
ggaacctgggtcaaacgcacacagt

SEQ ID NO: 1136375 - DNA, 25 bp, Homo sapien
gtgctgctccactaccctgaataca

SEQ ID NO: 1136376 - DNA, 25 bp, Homo sapien
cacagattatccacatgggtggcta

SEQ ID NO: 1136377 - DNA, 25 bp, Homo sapien
tattctggtgatgctattgtgctgc

SEQ ID NO: 1136378 - DNA, 25 bp, Homo sapien
taaattcagagtcaggagtaacact

SEQ ID NO: 1136379 - DNA, 25 bp, Homo sapien
cgcttaagatcaaggagggtggcac

SEQ ID NO: 1136380 - DNA, 25 bp, Homo sapien
cattattctattacagggacagccc

SEQ ID NO: 1136381 - DNA, 25 bp, Homo sapien
gaaaagctcgagtcaaaggaatccc

SEQ ID NO: 1136382 - DNA, 25 bp, Homo sapien
gaagcaagctattgacctaggcgca

SEQ ID NO: 1136383 - DNA, 25 bp, Homo sapien
gtaatttgtacaggaaaatatggtc

SEQ ID NO: 1136384 - DNA, 25 bp, Homo sapien
aacaccacctgtgaagattacacgg

SEQ ID NO: 1136385 - DNA, 25 bp, Homo sapien
cacctgtgaagattacacggaagta

SEQ ID NO: 1136386 - DNA, 25 bp, Homo sapien
gattacacggaagtaatttgtacag

SEQ ID NO: 1136387 - DNA, 25 bp, Homo sapien
tataaatcacaaactagaagagcta

SEQ ID NO: 1136388 - DNA, 25 bp, Homo sapien
tcacagttcaactcaaactttcagg

SEQ ID NO: 1136389 - DNA, 25 bp, Homo sapien
tcagtactcatcagatactacatgg

SEQ ID NO: 1136390 - DNA, 25 bp, Homo sapien
ggaacctcatggtgcctgataggca

SEQ ID NO: 1136391 - DNA, 25 bp, Homo sapien
caaatgtcagtatataaagacaggg

SEQ ID NO: 1136392 - DNA, 25 bp, Homo sapien
gatttcttgtagatcattgcagcta

SEQ ID NO: 1136393 - DNA, 25 bp, Homo sapien
aaaccaaatgtcagtatataaagac

SEQ ID NO: 1136394 - DNA, 25 bp, Homo sapien
tgtaatcactgatccaatatggaga

SEQ ID NO: 1136395 - DNA, 25 bp, Homo sapien
taacgtaggcattttcataagagga

SEQ ID NO: 1136396 - DNA, 25 bp, Homo sapien
gaagccttaatttgagtgtccagat

SEQ ID NO: 1136397 - DNA, 25 bp, Homo sapien
tgtcaactaaccctacaaaagatgc

SEQ ID NO: 1136398 - DNA, 25 bp, Homo sapien
caagagattctgattagaagagggc

SEQ ID NO: 1136399 - DNA, 25 bp, Homo sapien
ccagaaacaaaagtgccggacctat

SEQ ID NO: 1136400 - DNA, 25 bp, Homo sapien
gcatttcacttttcgtcatgtgtgc

SEQ ID NO: 1136401 - DNA, 25 bp, Homo sapien
gccggacctatgaatgctgtgtcat

SEQ ID NO: 1136402 - DNA, 25 bp, Homo sapien
tttcacttttcgtcatgtgtgcaac

SEQ ID NO: 1136403 - DNA, 25 bp, Homo sapien
catgaaataagacttagtacaatac

SEQ ID NO: 1136404 - DNA, 25 bp, Homo sapien
aaccatgaaataagacttagtacaa

SEQ ID NO: 1136405 - DNA, 25 bp, Homo sapien
ccatgaaataagacttagtacaata

SEQ ID NO: 1136406 - DNA, 25 bp, Homo sapien
gaaataagacttagtacaatactta

SEQ ID NO: 1136407 - DNA, 25 bp, Homo sapien
gcaggtgagacgcaatctgattgca

SEQ ID NO: 1136408 - DNA, 25 bp, Homo sapien
gattagaatgagctgtagagacctt

SEQ ID NO: 1136409 - DNA, 25 bp, Homo sapien
tctgattgcaaacactgacacagta

SEQ ID NO: 1136410 - DNA, 25 bp, Homo sapien
tctgaagacatgtatgtgcaggtga

SEQ ID NO: 1136411 - DNA, 25 bp, Homo sapien
tagttccacctcacaagctagtggg

SEQ ID NO: 1136412 - DNA, 25 bp, Homo sapien
attagaactctccaccactgcggat

SEQ ID NO: 1136413 - DNA, 25 bp, Homo sapien
cattctcacacaggatagttagggc

SEQ ID NO: 1136414 - DNA, 25 bp, Homo sapien
ttgagaagacactaaacaaggatgt

SEQ ID NO: 1136415 - DNA, 25 bp, Homo sapien
aaacttagtttatctttccactgag

SEQ ID NO: 1136416 - DNA, 25 bp, Homo sapien
acaggatttcccaagcctgtgagag

SEQ ID NO: 1136417 - DNA, 25 bp, Homo sapien
acattattctgcatgctaacaggat

SEQ ID NO: 1136418 - DNA, 25 bp, Homo sapien
aaaagttggcttttagatcatatat

SEQ ID NO: 1136419 - DNA, 25 bp, Homo sapien
aaatgtcacaagacacatcacaaca

SEQ ID NO: 1136420 - DNA, 25 bp, Homo sapien
tcaaacgatagtacagataccaaag

SEQ ID NO: 1136421 - DNA, 25 bp, Homo sapien
aaaaggagagtacaaagtgacctct

SEQ ID NO: 1136422 - DNA, 25 bp, Homo sapien
gtacagataccaaagaggagactgc

SEQ ID NO: 1136423 - DNA, 25 bp, Homo sapien
aagtgacctcttagagaggcccagg

SEQ ID NO: 1136424 - DNA, 25 bp, Homo sapien
caactgatgtaactttgccaaacaa

SEQ ID NO: 1136425 - DNA, 25 bp, Homo sapien
aatagcaagtgacactggcatgcca

SEQ ID NO: 1136426 - DNA, 25 bp, Homo sapien
ctatagatagtacctgatgtgtcag

SEQ ID NO: 1136427 - DNA, 25 bp, Homo sapien
tttaatacttggtctgccctaacat

SEQ ID NO: 1136428 - DNA, 25 bp, Homo sapien
cagagacctactgcaggtggcagat

SEQ ID NO: 1136429 - DNA, 25 bp, Homo sapien
cagtggtgcctaaatatagttgtac

SEQ ID NO: 1136430 - DNA, 25 bp, Homo sapien
caatgtaatttgcttttgggagtgc

SEQ ID NO: 1136431 - DNA, 25 bp, Homo sapien
ggtggaaccgggcatactgaagttc

SEQ ID NO: 1136432 - DNA, 25 bp, Homo sapien
gggaagcagcttcagtctagagtaa

SEQ ID NO: 1136433 - DNA, 25 bp, Homo sapien
gctgcactgacgttcttcccctttg

SEQ ID NO: 1136434 - DNA, 25 bp, Homo sapien
tacatggcttccatacgtaggtctg

SEQ ID NO: 1136435 - DNA, 25 bp, Homo sapien
taactaaaggtgaagggatcgctgc

SEQ ID NO: 1136436 - DNA, 25 bp, Homo sapien
accttcttaatgtcggtaagtgtct

SEQ ID NO: 1136437 - DNA, 25 bp, Homo sapien
ttaatgtcggtaagtgtctgggttc

SEQ ID NO: 1136438 - DNA, 25 bp, Homo sapien
ctggtcaatctttgtgaaggaacct

SEQ ID NO: 1136439 - DNA, 25 bp, Homo sapien
gctggtcaatctttgtgaaggaacc

SEQ ID NO: 1136440 - DNA, 25 bp, Homo sapien
tactaaatgctccatgtagaagcaa

SEQ ID NO: 1136441 - DNA, 25 bp, Homo sapien
aatgtactaaatgctccatgtagaa

SEQ ID NO: 1136442 - DNA, 25 bp, Homo sapien
gcacttatgtgaacaatgtactaaa

SEQ ID NO: 1136443 - DNA, 25 bp, Homo sapien
tgctccatgtagaagcaatttctgc

SEQ ID NO: 1136444 - DNA, 25 bp, Homo sapien
gcaatctcaagaatatcagtctagg

SEQ ID NO: 1136445 - DNA, 25 bp, Homo sapien
gcagcatagtatgacctcgggcagc

SEQ ID NO: 1136446 - DNA, 25 bp, Homo sapien
caccacgagaggcaggagtttttct

SEQ ID NO: 1136447 - DNA, 25 bp, Homo sapien
cataagatgttgcaagcatgaaaaa

SEQ ID NO: 1136448 - DNA, 25 bp, Homo sapien
ccatgtgctctaggtcgggaagtcc

SEQ ID NO: 1136449 - DNA, 25 bp, Homo sapien
ccaagtgttggaggtataggatccc

SEQ ID NO: 1136450 - DNA, 25 bp, Homo sapien
tatcctgagaccagccggtttccag

SEQ ID NO: 1136451 - DNA, 25 bp, Homo sapien
caagtgccagtgacagaactctcca

SEQ ID NO: 1136452 - DNA, 25 bp, Homo sapien
gttgggtggagatcacccagatgtt

SEQ ID NO: 1136453 - DNA, 25 bp, Homo sapien
ggagatcacccagatgttttccact

SEQ ID NO: 1136454 - DNA, 25 bp, Homo sapien
gggtggagatcacccagatgttttc

SEQ ID NO: 1136455 - DNA, 25 bp, Homo sapien
gtggagatcacccagatgttttcca

SEQ ID NO: 1136456 - DNA, 25 bp, Homo sapien
agattcctgacttccctagaaaggg

SEQ ID NO: 1136457 - DNA, 25 bp, Homo sapien
caagtaaggtgtggtgccagctcca

SEQ ID NO: 1136458 - DNA, 25 bp, Homo sapien
tctttactgtacatgagtttggccg

SEQ ID NO: 1136459 - DNA, 25 bp, Homo sapien
caggagtggcaaacactggcgtcaa

SEQ ID NO: 1136460 - DNA, 25 bp, Homo sapien
cctggtgacaaggagtgatgtggtg

SEQ ID NO: 1136461 - DNA, 25 bp, Homo sapien
gctggaagggatgggccagcttccc

SEQ ID NO: 1136462 - DNA, 25 bp, Homo sapien
tgtgtgtgtatcctggtgacaagga

SEQ ID NO: 1136463 - DNA, 25 bp, Homo sapien
atcaaggttccagaaggtcccctca

SEQ ID NO: 1136464 - DNA, 25 bp, Homo sapien
cttctctggagagcactggcctggt

SEQ ID NO: 1136465 - DNA, 25 bp, Homo sapien
gcaggatgaggctgacattctctct

SEQ ID NO: 1136466 - DNA, 25 bp, Homo sapien
ccagaccctgggacatctgtgtgaa

SEQ ID NO: 1136467 - DNA, 25 bp, Homo sapien
tgtgtgaatggaaggggtctgcccc

SEQ ID NO: 1136468 - DNA, 25 bp, Homo sapien
aatatctggccattccatctgcacc

SEQ ID NO: 1136469 - DNA, 25 bp, Homo sapien
tccaatatctggccattccatctgc

SEQ ID NO: 1136470 - DNA, 25 bp, Homo sapien
catctgcaccatcagggagaggtca

SEQ ID NO: 1136471 - DNA, 25 bp, Homo sapien
ccatctgcaccatcagggagaggtc

SEQ ID NO: 1136472 - DNA, 25 bp, Homo sapien
ttccaacattggcacgccaggaggc

SEQ ID NO: 1136473 - DNA, 25 bp, Homo sapien
ctcttagcccaagccccagagttgg

SEQ ID NO: 1136474 - DNA, 25 bp, Homo sapien
gccccgcaacagtgaaatggacata

SEQ ID NO: 1136475 - DNA, 25 bp, Homo sapien
gctgaacagccgtgacccttagata

SEQ ID NO: 1136476 - DNA, 25 bp, Homo sapien
agcagatagccaccggccacaaaca

SEQ ID NO: 1136477 - DNA, 25 bp, Homo sapien
cagttcctcggagccagcgcccctg

SEQ ID NO: 1136478 - DNA, 25 bp, Homo sapien
atagccaccggccacaaacacaggt

SEQ ID NO: 1136479 - DNA, 25 bp, Homo sapien
cctgggagtcctccgtggtctttgc

SEQ ID NO: 1136480 - DNA, 25 bp, Homo sapien
cacgtgtccttccatccaggaagct

SEQ ID NO: 1136481 - DNA, 25 bp, Homo sapien
gtgtgcctgaaagcgccccggttgt

SEQ ID NO: 1136482 - DNA, 25 bp, Homo sapien
caggaagcttgtggtgcaaccgcag

SEQ ID NO: 1136483 - DNA, 25 bp, Homo sapien
gcggcgggacacaggaagccgttgt

SEQ ID NO: 1136484 - DNA, 25 bp, Homo sapien
ggtgatttcagccaggacatgcgct

SEQ ID NO: 1136485 - DNA, 25 bp, Homo sapien
caagtttgaatggaaggcagcgaca

SEQ ID NO: 1136486 - DNA, 25 bp, Homo sapien
tgtgaggactgaaaactctgcccct

SEQ ID NO: 1136487 - DNA, 25 bp, Homo sapien
gtgaaagtgaaagtgtcggacccgc

SEQ ID NO: 1136488 - DNA, 25 bp, Homo sapien
agttgtctttcgaagcctttcgtca

SEQ ID NO: 1136489 - DNA, 25 bp, Homo sapien
cctgcagttgtctttcgaagccttt

SEQ ID NO: 1136490 - DNA, 25 bp, Homo sapien
tctttcgaagcctttcgtcactttc

SEQ ID NO: 1136491 - DNA, 25 bp, Homo sapien
ttcgaagcctttcgtcactttcttg

SEQ ID NO: 1136492 - DNA, 25 bp, Homo sapien
ttccctgtgtcacgagttgggcccc

SEQ ID NO: 1136493 - DNA, 25 bp, Homo sapien
tggactgtagctgccaaagcccatg

SEQ ID NO: 1136494 - DNA, 25 bp, Homo sapien
catggtcacggccattccctgtgtc

SEQ ID NO: 1136495 - DNA, 25 bp, Homo sapien
cagggaaagtggactggactgtagc

SEQ ID NO: 1136496 - DNA, 25 bp, Homo sapien
gatgtcgcataaatgtttgcctgca

SEQ ID NO: 1136497 - DNA, 25 bp, Homo sapien
tggctatgagttggaagatgtcgca

SEQ ID NO: 1136498 - DNA, 25 bp, Homo sapien
ttgcctgcattgaaccactggtggg

SEQ ID NO: 1136499 - DNA, 25 bp, Homo sapien
ttgaaagtgcctcggatttgctggt

SEQ ID NO: 1136500 - DNA, 25 bp, Homo sapien
aaaaagcactcatggtccagcctgg

SEQ ID NO: 1136501 - DNA, 25 bp, Homo sapien
tttaaaaaagcactcatggtccagc

SEQ ID NO: 1136502 - DNA, 25 bp, Homo sapien
taaaaaagcactcatggtccagcct

SEQ ID NO: 1136503 - DNA, 25 bp, Homo sapien
ggtttaaaaaagcactcatggtcca

SEQ ID NO: 1136504 - DNA, 25 bp, Homo sapien
tacacgaaagaagcaagaagtccag

SEQ ID NO: 1136505 - DNA, 25 bp, Homo sapien
acgaaagaagcaagaagtccaggga

SEQ ID NO: 1136506 - DNA, 25 bp, Homo sapien
ctacacgaaagaagcaagaagtcca

SEQ ID NO: 1136507 - DNA, 25 bp, Homo sapien
cacgaaagaagcaagaagtccaggg

SEQ ID NO: 1136508 - DNA, 25 bp, Homo sapien
ttctgggatacacattctctaggtc

SEQ ID NO: 1136509 - DNA, 25 bp, Homo sapien
ttttatccactgaggtttcgacagc

SEQ ID NO: 1136510 - DNA, 25 bp, Homo sapien
tcttttatccactgaggtttcgaca

SEQ ID NO: 1136511 - DNA, 25 bp, Homo sapien
tctgggatacacattctctaggtct

SEQ ID NO: 1136512 - DNA, 25 bp, Homo sapien
ctgcccagagagacttctggtccat

SEQ ID NO: 1136513 - DNA, 25 bp, Homo sapien
gccacacttcatctgggctccccag

SEQ ID NO: 1136514 - DNA, 25 bp, Homo sapien
tagagccacacttcatctgggctcc

SEQ ID NO: 1136515 - DNA, 25 bp, Homo sapien
gagccacacttcatctgggctcccc

SEQ ID NO: 1136516 - DNA, 25 bp, Homo sapien
gatagagccacacttcatctgggct

SEQ ID NO: 1136517 - DNA, 25 bp, Homo sapien
gataatggcagtgaaaatgtgggtg

SEQ ID NO: 1136518 - DNA, 25 bp, Homo sapien
aagagaaatctgttgagccaaacct

SEQ ID NO: 1136519 - DNA, 25 bp, Homo sapien
gttgagccaaacctggttctgctgt

SEQ ID NO: 1136520 - DNA, 25 bp, Homo sapien
gttctgctgtcccagataatggcag

SEQ ID NO: 1136521 - DNA, 25 bp, Homo sapien
tccctggagaagcagcaagaccact

SEQ ID NO: 1136522 - DNA, 25 bp, Homo sapien
cctggagaagcagcaagaccactac

SEQ ID NO: 1136523 - DNA, 25 bp, Homo sapien
tggagaagcagcaagaccactacac

SEQ ID NO: 1136524 - DNA, 25 bp, Homo sapien
ctccctggagaagcagcaagaccac

SEQ ID NO: 1136525 - DNA, 25 bp, Homo sapien
tggtaaagtagcaaaccagtttgta

SEQ ID NO: 1136526 - DNA, 25 bp, Homo sapien
tagcaaaccagtttgtaggcagatc

SEQ ID NO: 1136527 - DNA, 25 bp, Homo sapien
aagtagcaaaccagtttgtaggcag

SEQ ID NO: 1136528 - DNA, 25 bp, Homo sapien
taaagtagcaaaccagtttgtaggc

SEQ ID NO: 1136529 - DNA, 25 bp, Homo sapien
ttgtccttgatgataaccttgttgt

SEQ ID NO: 1136530 - DNA, 25 bp, Homo sapien
tggtctggtagagcatcacttcact

SEQ ID NO: 1136531 - DNA, 25 bp, Homo sapien
cgatgctggcgaatgaatagatgag

SEQ ID NO: 1136532 - DNA, 25 bp, Homo sapien
taggaaggggtcaatattctcaggg

SEQ ID NO: 1136533 - DNA, 25 bp, Homo sapien
ggtaccctccaatggacaagagaat

SEQ ID NO: 1136534 - DNA, 25 bp, Homo sapien
aaacaggtaccctccaatggacaag

SEQ ID NO: 1136535 - DNA, 25 bp, Homo sapien
taccctccaatggacaagagaattt

SEQ ID NO: 1136536 - DNA, 25 bp, Homo sapien
caggtaccctccaatggacaagaga

SEQ ID NO: 1136537 - DNA, 25 bp, Homo sapien
ggtgttcacggaggagttaacacag

SEQ ID NO: 1136538 - DNA, 25 bp, Homo sapien
ccaaaaaagttaggtagcctgatct

SEQ ID NO: 1136539 - DNA, 25 bp, Homo sapien
tataaaaactccaagactctctcag

SEQ ID NO: 1136540 - DNA, 25 bp, Homo sapien
tactctggctgtaactgacttctga

SEQ ID NO: 1136541 - DNA, 25 bp, Homo sapien
tccaagcgtgatgtagaagaatcca

SEQ ID NO: 1136542 - DNA, 25 bp, Homo sapien
tcagcacagtgaaatgagtgttttc

SEQ ID NO: 1136543 - DNA, 25 bp, Homo sapien
gggtagatccagcttacatccagtc

SEQ ID NO: 1136544 - DNA, 25 bp, Homo sapien
tccatcaaagttatggttcctcaga

SEQ ID NO: 1136545 - DNA, 25 bp, Homo sapien
agatacgcccgcagtcaagagaagc

SEQ ID NO: 1136546 - DNA, 25 bp, Homo sapien
tgcctccctgcagatacgcccgcag

SEQ ID NO: 1136547 - DNA, 25 bp, Homo sapien
ctgttatcaatcatttgcctccctg

SEQ ID NO: 1136548 - DNA, 25 bp, Homo sapien
agctgttatcaatcatttgcctccc

SEQ ID NO: 1136549 - DNA, 25 bp, Homo sapien
ggagcttggccctctgtcctgccac

SEQ ID NO: 1136550 - DNA, 25 bp, Homo sapien
aagtcaaaggacaggaggttgatga

SEQ ID NO: 1136551 - DNA, 25 bp, Homo sapien
ccttgctcagagggctgttgtggcc

SEQ ID NO: 1136552 - DNA, 25 bp, Homo sapien
tttcccaagacccatggaagtcaaa

SEQ ID NO: 1136553 - DNA, 25 bp, Homo sapien
gccagtgtgaaggagtgcccatatg

SEQ ID NO: 1136554 - DNA, 25 bp, Homo sapien
cctgaagactctgtgatgggtccag

SEQ ID NO: 1136555 - DNA, 25 bp, Homo sapien
tatgtatccagtaccccacagcata

SEQ ID NO: 1136556 - DNA, 25 bp, Homo sapien
cccacggtggtttctgcagaggcca

SEQ ID NO: 1136557 - DNA, 25 bp, Homo sapien
ccttgactgcgtagggaacctgttg

SEQ ID NO: 1136558 - DNA, 25 bp, Homo sapien
cactggttccccttgactgcgtagg

SEQ ID NO: 1136559 - DNA, 25 bp, Homo sapien
ggtctccatactcttcacatcatca

SEQ ID NO: 1136560 - DNA, 25 bp, Homo sapien
tgttgatcctggagccgcgtgatct

SEQ ID NO: 1136561 - DNA, 25 bp, Homo sapien
gccagtgaagtcatccatgtcaata

SEQ ID NO: 1136562 - DNA, 25 bp, Homo sapien
tgcttggacaagagggtaagggccc

SEQ ID NO: 1136563 - DNA, 25 bp, Homo sapien
actgcttggacaagagggtaagggc

SEQ ID NO: 1136564 - DNA, 25 bp, Homo sapien
catgtcaatagaccagatcatggct

SEQ ID NO: 1136565 - DNA, 25 bp, Homo sapien
aggcttgggtaaaggcgtagcaata

SEQ ID NO: 1136566 - DNA, 25 bp, Homo sapien
gggagctcccaaatgtctagactaa

SEQ ID NO: 1136567 - DNA, 25 bp, Homo sapien
ccttcaaggtaatagggaggcttgg

SEQ ID NO: 1136568 - DNA, 25 bp, Homo sapien
aaggcgtagcaataatgaccatggg

SEQ ID NO: 1136569 - DNA, 25 bp, Homo sapien
tacttcagggcaacaagtcaacagc

SEQ ID NO: 1136570 - DNA, 25 bp, Homo sapien
caggtccaatctatgatctaagagg

SEQ ID NO: 1136571 - DNA, 25 bp, Homo sapien
gaatcccacatgagaattcctggga

SEQ ID NO: 1136572 - DNA, 25 bp, Homo sapien
ccagcctggcaaggggaatcccaca

SEQ ID NO: 1136573 - DNA, 25 bp, Homo sapien
caaaaagatcttggtcagagggtgc

SEQ ID NO: 1136574 - DNA, 25 bp, Homo sapien
aagacaaaaagatcttggtcagagg

SEQ ID NO: 1136575 - DNA, 25 bp, Homo sapien
acaaaaagatcttggtcagagggtg

SEQ ID NO: 1136576 - DNA, 25 bp, Homo sapien
ctaaagacaaaaagatcttggtcag

SEQ ID NO: 1136577 - DNA, 25 bp, Homo sapien
agcagtggccgccacatcagagaat

SEQ ID NO: 1136578 - DNA, 25 bp, Homo sapien
cggttctcagcagtggccgccacat

SEQ ID NO: 1136579 - DNA, 25 bp, Homo sapien
ctcagcagtggccgccacatcagag

SEQ ID NO: 1136580 - DNA, 25 bp, Homo sapien
gcggttctcagcagtggccgccaca

SEQ ID NO: 1136581 - DNA, 25 bp, Homo sapien
aactgtatggctgactgcatgaagg

SEQ ID NO: 1136582 - DNA, 25 bp, Homo sapien
tgtccagcccatcgaagttgtactt

SEQ ID NO: 1136583 - DNA, 25 bp, Homo sapien
tgggctgccacgattgcctggatac

SEQ ID NO: 1136584 - DNA, 25 bp, Homo sapien
caatcaatgtccagcccatcgaagt

SEQ ID NO: 1136585 - DNA, 25 bp, Homo sapien
cgacatctcagggatctggcaggca

SEQ ID NO: 1136586 - DNA, 25 bp, Homo sapien
tgcgggtagactcttgctcaaaagc

SEQ ID NO: 1136587 - DNA, 25 bp, Homo sapien
gcagcagacatcaacaatctgggct

SEQ ID NO: 1136588 - DNA, 25 bp, Homo sapien
tcaatggtacctttgccagctgaca

SEQ ID NO: 1136589 - DNA, 25 bp, Homo sapien
tcatcagactgatgaggtccatgta

SEQ ID NO: 1136590 - DNA, 25 bp, Homo sapien
aggagccccttaggtcataggtcat

SEQ ID NO: 1136591 - DNA, 25 bp, Homo sapien
gggtgtcctcgcctatgaagccctc

SEQ ID NO: 1136592 - DNA, 25 bp, Homo sapien
cttaggtcataggtcatcagactga

SEQ ID NO: 1136593 - DNA, 25 bp, Homo sapien
gaaggtgtgagcataagccccaaag

SEQ ID NO: 1136594 - DNA, 25 bp, Homo sapien
gtgtgagcataagccccaaagccca

SEQ ID NO: 1136595 - DNA, 25 bp, Homo sapien
tgaaggtgtgagcataagccccaaa

SEQ ID NO: 1136596 - DNA, 25 bp, Homo sapien
aggtgtgagcataagccccaaagcc

SEQ ID NO: 1136597 - DNA, 25 bp, Homo sapien
ccagcctcctgtgtatagggcccag

SEQ ID NO: 1136598 - DNA, 25 bp, Homo sapien
cagcctcctgtgtatagggcccaga

SEQ ID NO: 1136599 - DNA, 25 bp, Homo sapien
ggggcattccacacctaggtggctc

SEQ ID NO: 1136600 - DNA, 25 bp, Homo sapien
gggggcattccacacctaggtggct

SEQ ID NO: 1136601 - DNA, 25 bp, Homo sapien
ccagggggcattccacacctaggtg

SEQ ID NO: 1136602 - DNA, 25 bp, Homo sapien
agggggcattccacacctaggtggc

SEQ ID NO: 1136603 - DNA, 25 bp, Homo sapien
tcttggagttgtcgtacctgatcca

SEQ ID NO: 1136604 - DNA, 25 bp, Homo sapien
gagttgtcgtacctgatccactggt

SEQ ID NO: 1136605 - DNA, 25 bp, Homo sapien
tgagggtgaagctcttggagttgtc

SEQ ID NO: 1136606 - DNA, 25 bp, Homo sapien
tgtcgtacctgatccactggttccc

SEQ ID NO: 1136607 - DNA, 25 bp, Homo sapien
caagaagcaggaagcatgaatcaaa

SEQ ID NO: 1136608 - DNA, 25 bp, Homo sapien
ctgtatcaagaagcaggaagcatga

SEQ ID NO: 1136609 - DNA, 25 bp, Homo sapien
agaagcaggaagcatgaatcaaaga

SEQ ID NO: 1136610 - DNA, 25 bp, Homo sapien
tgtatcaagaagcaggaagcatgaa

SEQ ID NO: 1136611 - DNA, 25 bp, Homo sapien
tgtgaaattatccaggtcaatggcc

SEQ ID NO: 1136612 - DNA, 25 bp, Homo sapien
aaattatccaggtcaatggcccaga

SEQ ID NO: 1136613 - DNA, 25 bp, Homo sapien
cacagaaagtgcctgtgaaattatc

SEQ ID NO: 1136614 - DNA, 25 bp, Homo sapien
gcccagacaatggcccctccaaatc

SEQ ID NO: 1136615 - DNA, 25 bp, Homo sapien
ctggtgggactaggatacagacctt

SEQ ID NO: 1136616 - DNA, 25 bp, Homo sapien
cacagttgtagaaagcatgcttgct

SEQ ID NO: 1136617 - DNA, 25 bp, Homo sapien
caagagcagctggtatcaaagacca

SEQ ID NO: 1136618 - DNA, 25 bp, Homo sapien
gacctttggacttcccagtacagaa

SEQ ID NO: 1136619 - DNA, 25 bp, Homo sapien
ctttagtcttacaatctccaaggga

SEQ ID NO: 1136620 - DNA, 25 bp, Homo sapien
gtcttacaatctccaagggacccag

SEQ ID NO: 1136621 - DNA, 25 bp, Homo sapien
caggtgaatagcttatgcccagtta

SEQ ID NO: 1136622 - DNA, 25 bp, Homo sapien
gggacccagcaggtgaatagcttat

SEQ ID NO: 1136623 - DNA, 25 bp, Homo sapien
gggggcgatgctccatccatcagta

SEQ ID NO: 1136624 - DNA, 25 bp, Homo sapien
ttgggggcgatgctccatccatcag

SEQ ID NO: 1136625 - DNA, 25 bp, Homo sapien
tgggggcgatgctccatccatcagt

SEQ ID NO: 1136626 - DNA, 25 bp, Homo sapien
cttgggggcgatgctccatccatca

SEQ ID NO: 1136627 - DNA, 25 bp, Homo sapien
tggggtcgtcacacacgggaggaat

SEQ ID NO: 1136628 - DNA, 25 bp, Homo sapien
gggtcgtcacacacgggaggaatag

SEQ ID NO: 1136629 - DNA, 25 bp, Homo sapien
ggtcgtcacacacgggaggaatagg

SEQ ID NO: 1136630 - DNA, 25 bp, Homo sapien
ctggggtcgtcacacacgggaggaa

SEQ ID NO: 1136631 - DNA, 25 bp, Homo sapien
tggcactcaggttgggttctctctg

SEQ ID NO: 1136632 - DNA, 25 bp, Homo sapien
gtcggagcgaccaaggacaggctct

SEQ ID NO: 1136633 - DNA, 25 bp, Homo sapien
gacaggctctcgctggcactcaggt

SEQ ID NO: 1136634 - DNA, 25 bp, Homo sapien
tctcgctggcactcaggttgggttc

SEQ ID NO: 1136635 - DNA, 25 bp, Homo sapien
tccaagggtctgattgattacgtct

SEQ ID NO: 1136636 - DNA, 25 bp, Homo sapien
tatagtagcgtgttaaattgttgcc

SEQ ID NO: 1136637 - DNA, 25 bp, Homo sapien
cacaaaagggtgatctccaagggtc

SEQ ID NO: 1136638 - DNA, 25 bp, Homo sapien
gccttgagccatacaacagatatat

SEQ ID NO: 1136639 - DNA, 25 bp, Homo sapien
cacatgaaagctgagagtgttgatt

SEQ ID NO: 1136640 - DNA, 25 bp, Homo sapien
ttgcatatgggaaatcaggtaggag

SEQ ID NO: 1136641 - DNA, 25 bp, Homo sapien
aggtatccttccagtaaaagatgag

SEQ ID NO: 1136642 - DNA, 25 bp, Homo sapien
gtgtgaacacatgaaagctgagagt

SEQ ID NO: 1136643 - DNA, 25 bp, Homo sapien
cagtgagaagggtgagcttggccat

SEQ ID NO: 1136644 - DNA, 25 bp, Homo sapien
ctatttcagctgtcagcacaaggag

SEQ ID NO: 1136645 - DNA, 25 bp, Homo sapien
tttcagctgtcagcacaaggagcag

SEQ ID NO: 1136646 - DNA, 25 bp, Homo sapien
tatttcagctgtcagcacaaggagc

SEQ ID NO: 1136647 - DNA, 25 bp, Homo sapien
tcagctgtcagcacaaggagcagac

SEQ ID NO: 1136648 - DNA, 25 bp, Homo sapien
ctgttacccagagaaagaaggtgag

SEQ ID NO: 1136649 - DNA, 25 bp, Homo sapien
ccagagaaagaaggtgagagacaag

SEQ ID NO: 1136650 - DNA, 25 bp, Homo sapien
cagagaaagaaggtgagagacaagc

SEQ ID NO: 1136651 - DNA, 25 bp, Homo sapien
agaaagaaggtgagagacaagctcc

SEQ ID NO: 1136652 - DNA, 25 bp, Homo sapien
cattgaaagcttggtagagagtcat

SEQ ID NO: 1136653 - DNA, 25 bp, Homo sapien
gcattccagcaaaggcgtagatcaa

SEQ ID NO: 1136654 - DNA, 25 bp, Homo sapien
cagcaaaggcgtagatcaagtgggt

SEQ ID NO: 1136655 - DNA, 25 bp, Homo sapien
tcatgtcatcccattcgatggtggt

SEQ ID NO: 1136656 - DNA, 25 bp, Homo sapien
tgaaactcaggttttccgtcattta

SEQ ID NO: 1136657 - DNA, 25 bp, Homo sapien
gtctgctgtggaagatcttgtttaa

SEQ ID NO: 1136658 - DNA, 25 bp, Homo sapien
tgctgtggaagatcttgtttaaact

SEQ ID NO: 1136659 - DNA, 25 bp, Homo sapien
gatttgaaactcaggttttccgtca

SEQ ID NO: 1136660 - DNA, 25 bp, Homo sapien
ccaggaaagtgtcatgcagcctctc

SEQ ID NO: 1136661 - DNA, 25 bp, Homo sapien
tataagcttcccttggcaactgagc

SEQ ID NO: 1136662 - DNA, 25 bp, Homo sapien
tagctgcaatagtgagcaagaagcc

SEQ ID NO: 1136663 - DNA, 25 bp, Homo sapien
gattgttctcaactgagtccaccag

SEQ ID NO: 1136664 - DNA, 25 bp, Homo sapien
gccaaagttccagccaccaatagcc

SEQ ID NO: 1136665 - DNA, 25 bp, Homo sapien
gtgccaaagttccagccaccaatag

SEQ ID NO: 1136666 - DNA, 25 bp, Homo sapien
cagtgccaaagttccagccaccaat

SEQ ID NO: 1136667 - DNA, 25 bp, Homo sapien
tgccaaagttccagccaccaatagc

SEQ ID NO: 1136668 - DNA, 25 bp, Homo sapien
ggaatttgatgactgagttgatgaa

SEQ ID NO: 1136669 - DNA, 25 bp, Homo sapien
tcatagccagactggatgttggaga

SEQ ID NO: 1136670 - DNA, 25 bp, Homo sapien
tgggcttattaatgtgcttggcctc

SEQ ID NO: 1136671 - DNA, 25 bp, Homo sapien
gaccatcagcctgggcttattaatg

SEQ ID NO: 1136672 - DNA, 25 bp, Homo sapien
ggatctcatagccagactggatgtt

SEQ ID NO: 1136673 - DNA, 25 bp, Homo sapien
catgacatggatgtagtccgggtac

SEQ ID NO: 1136674 - DNA, 25 bp, Homo sapien
tcatgacatggatgtagtccgggta

SEQ ID NO: 1136675 - DNA, 25 bp, Homo sapien
gtcatgacatggatgtagtccgggt

SEQ ID NO: 1136676 - DNA, 25 bp, Homo sapien
ggtcatgacatggatgtagtccggg

SEQ ID NO: 1136677 - DNA, 25 bp, Homo sapien
ggaaggagtgtccataggctgggaa

SEQ ID NO: 1136678 - DNA, 25 bp, Homo sapien
tggtaggggcatcaattccatggtt

SEQ ID NO: 1136679 - DNA, 25 bp, Homo sapien
tcatagtaggcccagaacccagact

SEQ ID NO: 1136680 - DNA, 25 bp, Homo sapien
cctggtatagggtccagcagggcca

SEQ ID NO: 1136681 - DNA, 25 bp, Homo sapien
tcttggtgttatcgtatccaagcca

SEQ ID NO: 1136682 - DNA, 25 bp, Homo sapien
tacttcagtagctccattcttcagg

SEQ ID NO: 1136683 - DNA, 25 bp, Homo sapien
gcatagggaacatcctcagaagcct

SEQ ID NO: 1136684 - DNA, 25 bp, Homo sapien
catttcctttgtaggcatagggaac

SEQ ID NO: 1136685 - DNA, 25 bp, Homo sapien
gcatccttcagggtggtgatcagag

SEQ ID NO: 1136686 - DNA, 25 bp, Homo sapien
gagggaattttccttggttgcagaa

SEQ ID NO: 1136687 - DNA, 25 bp, Homo sapien
gaaagtgcctgtgaaatcatccagg

SEQ ID NO: 1136688 - DNA, 25 bp, Homo sapien
agagcatccttcagggtggtgatca

SEQ ID NO: 1136689 - DNA, 25 bp, Homo sapien
tagatcacctgtggtacctacagag

SEQ ID NO: 1136690 - DNA, 25 bp, Homo sapien
gatgtgtgagagctagtacctggat

SEQ ID NO: 1136691 - DNA, 25 bp, Homo sapien
gaagaaatggtgaagagccctgttt

SEQ ID NO: 1136692 - DNA, 25 bp, Homo sapien
tgcaacagctccatgacttccaagg

SEQ ID NO: 1136693 - DNA, 25 bp, Homo sapien
gctgacaccgcatgtgatgtttgcc

SEQ ID NO: 1136694 - DNA, 25 bp, Homo sapien
gcaggagcagaaggtatcaaagaca

SEQ ID NO: 1136695 - DNA, 25 bp, Homo sapien
cagagctacgactgtggctgacacc

SEQ ID NO: 1136696 - DNA, 25 bp, Homo sapien
ttcacacaactgtaggaggcattct

SEQ ID NO: 1136697 - DNA, 25 bp, Homo sapien
ccttttattgcacaacaacttctga

SEQ ID NO: 1136698 - DNA, 25 bp, Homo sapien
gctcaaccttttattgcacaacaac

SEQ ID NO: 1136699 - DNA, 25 bp, Homo sapien
attgcacaacaacttctgaggctgg

SEQ ID NO: 1136700 - DNA, 25 bp, Homo sapien
taatgctcaaccttttattgcacaa

SEQ ID NO: 1136701 - DNA, 25 bp, Homo sapien
gtcggccacctgttcgtgcacagac

SEQ ID NO: 1136702 - DNA, 25 bp, Homo sapien
agtcggccacctgttcgtgcacaga

SEQ ID NO: 1136703 - DNA, 25 bp, Homo sapien
ccagagtcggccacctgttcgtgca

SEQ ID NO: 1136704 - DNA, 25 bp, Homo sapien
cagagtcggccacctgttcgtgcac

SEQ ID NO: 1136705 - DNA, 25 bp, Homo sapien
gcaccagtcccgcagagctttttat

SEQ ID NO: 1136706 - DNA, 25 bp, Homo sapien
cagtcccgcagagctttttatatgt

SEQ ID NO: 1136707 - DNA, 25 bp, Homo sapien
ccagtcccgcagagctttttatatg

SEQ ID NO: 1136708 - DNA, 25 bp, Homo sapien
caccagtcccgcagagctttttata

SEQ ID NO: 1136709 - DNA, 25 bp, Homo sapien
ctgtgaggagaataagctttgtcat

SEQ ID NO: 1136710 - DNA, 25 bp, Homo sapien
cactgtagtcaatgatgacacatcc

SEQ ID NO: 1136711 - DNA, 25 bp, Homo sapien
tccgaagtttactatctatggaaga

SEQ ID NO: 1136712 - DNA, 25 bp, Homo sapien
ataaatgttcctgaatgctgagtcc

SEQ ID NO: 1136713 - DNA, 25 bp, Homo sapien
tactgaaatcaccaactgatcactg

SEQ ID NO: 1136714 - DNA, 25 bp, Homo sapien
gagctgcaaattcagtataaggaca

SEQ ID NO: 1136715 - DNA, 25 bp, Homo sapien
cgagctgcaaattcagtataaggac

SEQ ID NO: 1136716 - DNA, 25 bp, Homo sapien
tgcaaattcagtataaggacaagac

SEQ ID NO: 1136717 - DNA, 25 bp, Homo sapien
gctgcaaattcagtataaggacaag

SEQ ID NO: 1136718 - DNA, 25 bp, Homo sapien
gcctgatctctgtgtggaggtaatt

SEQ ID NO: 1136719 - DNA, 25 bp, Homo sapien
ctgtgtggaggtaattagtatgaac

SEQ ID NO: 1136720 - DNA, 25 bp, Homo sapien
ggtaattagtatgaacactcttgca

SEQ ID NO: 1136721 - DNA, 25 bp, Homo sapien
tagtatgaacactcttgcaaatgca

SEQ ID NO: 1136722 - DNA, 25 bp, Homo sapien
ttgtcaggcatgaagcgccccaggc

SEQ ID NO: 1136723 - DNA, 25 bp, Homo sapien
gtcgatgttgtcaggcatgaagcgc

SEQ ID NO: 1136724 - DNA, 25 bp, Homo sapien
cctcccagcaaaggcgtagatcagg

SEQ ID NO: 1136725 - DNA, 25 bp, Homo sapien
cattgaaagcttggtagagagtcac

SEQ ID NO: 1136726 - DNA, 25 bp, Homo sapien
ggggcagtcccgaagttccagcctc

SEQ ID NO: 1136727 - DNA, 25 bp, Homo sapien
ggcagtcccgaagttccagcctcca

SEQ ID NO: 1136728 - DNA, 25 bp, Homo sapien
cagtcccgaagttccagcctccaat

SEQ ID NO: 1136729 - DNA, 25 bp, Homo sapien
gtcccgaagttccagcctccaatgg

SEQ ID NO: 1136730 - DNA, 25 bp, Homo sapien
tagagggaagcattataacactgtc

SEQ ID NO: 1136731 - DNA, 25 bp, Homo sapien
gaacctcagtaagtaaacctctgtg

SEQ ID NO: 1136732 - DNA, 25 bp, Homo sapien
tgagaccttggtggtcccaacacct

SEQ ID NO: 1136733 - DNA, 25 bp, Homo sapien
cacagcccagagtaaagcatgttct

SEQ ID NO: 1136734 - DNA, 25 bp, Homo sapien
tggcggttctcaggagtagaaacca

SEQ ID NO: 1136735 - DNA, 25 bp, Homo sapien
ggcggttctcaggagtagaaaccat

SEQ ID NO: 1136736 - DNA, 25 bp, Homo sapien
ctggcggttctcaggagtagaaacc

SEQ ID NO: 1136737 - DNA, 25 bp, Homo sapien
cgtcaaactcatactggcgcaggaa

SEQ ID NO: 1136738 - DNA, 25 bp, Homo sapien
gtccagcccgtcaaactcatactgg

SEQ ID NO: 1136739 - DNA, 25 bp, Homo sapien
catactggcgcaggaatttgatgac

SEQ ID NO: 1136740 - DNA, 25 bp, Homo sapien
cagtcaaagtccagcccgtcaaact

SEQ ID NO: 1136741 - DNA, 25 bp, Homo sapien
tagggtgcgccagagtatgttccag

SEQ ID NO: 1136742 - DNA, 25 bp, Homo sapien
gaagctctagttgcagtgataccct

SEQ ID NO: 1136743 - DNA, 25 bp, Homo sapien
gaaacactttctgatcctgccccag

SEQ ID NO: 1136744 - DNA, 25 bp, Homo sapien
tactcagtaataacgggcagcctag

SEQ ID NO: 1136745 - DNA, 25 bp, Homo sapien
tctcatagccagactggatattgga

SEQ ID NO: 1136746 - DNA, 25 bp, Homo sapien
ctgggcttgttgatctgcttggcct

SEQ ID NO: 1136747 - DNA, 25 bp, Homo sapien
cctgggcttgttgatctgcttggcc

SEQ ID NO: 1136748 - DNA, 25 bp, Homo sapien
ggggatctcatagccagactggata

SEQ ID NO: 1136749 - DNA, 25 bp, Homo sapien
gttgctgccggtgtcagtcgggtat

SEQ ID NO: 1136750 - DNA, 25 bp, Homo sapien
gtgtagccctcccaggagccatgga

SEQ ID NO: 1136751 - DNA, 25 bp, Homo sapien
tgccggtgtcagtcgggtatttgta

SEQ ID NO: 1136752 - DNA, 25 bp, Homo sapien
tgctgccggtgtcagtcgggtattt

SEQ ID NO: 1136753 - DNA, 25 bp, Homo sapien
gacccagtacttagttatattagtc

SEQ ID NO: 1136754 - DNA, 25 bp, Homo sapien
ctgcaatgtcagtgggttagttaca

SEQ ID NO: 1136755 - DNA, 25 bp, Homo sapien
cagctgaggacccagtacttagtta

SEQ ID NO: 1136756 - DNA, 25 bp, Homo sapien
ggttagttacatggcccaaccagct

SEQ ID NO: 1136757 - DNA, 25 bp, Homo sapien
tgaagttgtgtccataggtagggaa

SEQ ID NO: 1136758 - DNA, 25 bp, Homo sapien
tgtccataggtagggaatccaacga

SEQ ID NO: 1136759 - DNA, 25 bp, Homo sapien
cataggtagggaatccaacgatgag

SEQ ID NO: 1136760 - DNA, 25 bp, Homo sapien
tagggaatccaacgatgagcttctc

SEQ ID NO: 1136761 - DNA, 25 bp, Homo sapien
ccatccctgagtggctccatttttc

SEQ ID NO: 1136762 - DNA, 25 bp, Homo sapien
atcccatccctgagtggctccattt

SEQ ID NO: 1136763 - DNA, 25 bp, Homo sapien
gcatcccatccctgagtggctccat

SEQ ID NO: 1136764 - DNA, 25 bp, Homo sapien
tcccatccctgagtggctccatttt

SEQ ID NO: 1136765 - DNA, 25 bp, Homo sapien
taatatcgaagctcttgatgttgtc

SEQ ID NO: 1136766 - DNA, 25 bp, Homo sapien
ttaatatcgaagctcttgatgttgt

SEQ ID NO: 1136767 - DNA, 25 bp, Homo sapien
cttaatatcgaagctcttgatgttg

SEQ ID NO: 1136768 - DNA, 25 bp, Homo sapien
acccacacattgccctgataggcat

SEQ ID NO: 1136769 - DNA, 25 bp, Homo sapien
caaatttgttgtgcttaagccattg

SEQ ID NO: 1136770 - DNA, 25 bp, Homo sapien
atttgttgtgcttaagccattgagc

SEQ ID NO: 1136771 - DNA, 25 bp, Homo sapien
cctccaaatttgttgtgcttaagcc

SEQ ID NO: 1136772 - DNA, 25 bp, Homo sapien
tccaaatttgttgtgcttaagccat

SEQ ID NO: 1136773 - DNA, 25 bp, Homo sapien
gaaagtgccagtgaagtcatccaga

SEQ ID NO: 1136774 - DNA, 25 bp, Homo sapien
tggagattaggggaaacttgccctg

SEQ ID NO: 1136775 - DNA, 25 bp, Homo sapien
gtgccagtgaagtcatccagatcaa

SEQ ID NO: 1136776 - DNA, 25 bp, Homo sapien
agtgaagtcatccagatcaatggcc

SEQ ID NO: 1136777 - DNA, 25 bp, Homo sapien
tattggctcaatgggctgagctgga

SEQ ID NO: 1136778 - DNA, 25 bp, Homo sapien
gcagttctgctggtacgtgactcca

SEQ ID NO: 1136779 - DNA, 25 bp, Homo sapien
ctccattcacgcagtgccagaaggc

SEQ ID NO: 1136780 - DNA, 25 bp, Homo sapien
tgtcgaagacaagcccggcctggca

SEQ ID NO: 1136781 - DNA, 25 bp, Homo sapien
tgcaggactttaggtaggggcaaca

SEQ ID NO: 1136782 - DNA, 25 bp, Homo sapien
aaaagagactggaactctagggaat

SEQ ID NO: 1136783 - DNA, 25 bp, Homo sapien
ggcaacatgtcctaagcaaaagaga

SEQ ID NO: 1136784 - DNA, 25 bp, Homo sapien
tggaactctagggaatatagaccag

SEQ ID NO: 1136785 - DNA, 25 bp, Homo sapien
taacatgttatcttctatgcctggg

SEQ ID NO: 1136786 - DNA, 25 bp, Homo sapien
tgggaaattgcaggcaggtaacaag

SEQ ID NO: 1136787 - DNA, 25 bp, Homo sapien
gcacccaggactgacctgcatgaaa

SEQ ID NO: 1136788 - DNA, 25 bp, Homo sapien
tgcaggcctacccaaccctttgtgt

SEQ ID NO: 1136789 - DNA, 25 bp, Homo sapien
cccaggtagagaagatagcatggac

SEQ ID NO: 1136790 - DNA, 25 bp, Homo sapien
ttttgttgcctctcaagctcccagg

SEQ ID NO: 1136791 - DNA, 25 bp, Homo sapien
agcatggaccttctggattcctcag

SEQ ID NO: 1136792 - DNA, 25 bp, Homo sapien
gattcctcagtcgttctgggcaaga

SEQ ID NO: 1136793 - DNA, 25 bp, Homo sapien
atgtcatgtgtatctcctgtataac

SEQ ID NO: 1136794 - DNA, 25 bp, Homo sapien
ctgtctatatgtcatgtgtatctcc

SEQ ID NO: 1136795 - DNA, 25 bp, Homo sapien
acagactgtctatatgtcatgtgta

SEQ ID NO: 1136796 - DNA, 25 bp, Homo sapien
ctatatgtcatgtgtatctcctgta

SEQ ID NO: 1136797 - DNA, 25 bp, Homo sapien
gggcggagttgagctgacagctagt

SEQ ID NO: 1136798 - DNA, 25 bp, Homo sapien
gagttgagctgacagctagttccat

SEQ ID NO: 1136799 - DNA, 25 bp, Homo sapien
gcggagttgagctgacagctagttc

SEQ ID NO: 1136800 - DNA, 25 bp, Homo sapien
ggtggactccctgggcaacgcccca

SEQ ID NO: 1136801 - DNA, 25 bp, Homo sapien
agtgaggttcagaatgtcccgaagt

SEQ ID NO: 1136802 - DNA, 25 bp, Homo sapien
gtgaggttcagaatgtcccgaagtc

SEQ ID NO: 1136803 - DNA, 25 bp, Homo sapien
acagtgaggttcagaatgtcccgaa

SEQ ID NO: 1136804 - DNA, 25 bp, Homo sapien
cagtgaggttcagaatgtcccgaag

SEQ ID NO: 1136805 - DNA, 25 bp, Homo sapien
aatagctttggaagctgggccaaga

SEQ ID NO: 1136806 - DNA, 25 bp, Homo sapien
ctgcagggttgacggggcggcaaat

SEQ ID NO: 1136807 - DNA, 25 bp, Homo sapien
gggcggcaaatagctttggaagctg

SEQ ID NO: 1136808 - DNA, 25 bp, Homo sapien
cggcaaatagctttggaagctgggc

SEQ ID NO: 1136809 - DNA, 25 bp, Homo sapien
agggtttcctggattcgcggctgta

SEQ ID NO: 1136810 - DNA, 25 bp, Homo sapien
caggggattgtaaactcagtagctg

SEQ ID NO: 1136811 - DNA, 25 bp, Homo sapien
ggattgtaaactcagtagctgggct

SEQ ID NO: 1136812 - DNA, 25 bp, Homo sapien
ggctgcgggtagagggtttcctgga

SEQ ID NO: 1136813 - DNA, 25 bp, Homo sapien
tgcgcggcaagttggggcgtccacc

SEQ ID NO: 1136814 - DNA, 25 bp, Homo sapien
gtccaccgagccactactggggcag

SEQ ID NO: 1136815 - DNA, 25 bp, Homo sapien
cgagccactactggggcaggaaccc

SEQ ID NO: 1136816 - DNA, 25 bp, Homo sapien
gcctgcgcggcaagttggggcgtcc

SEQ ID NO: 1136817 - DNA, 25 bp, Homo sapien
ttgccaaggaaacgaaggctagtcc

SEQ ID NO: 1136818 - DNA, 25 bp, Homo sapien
cgcgagctgctagggctagcacttg

SEQ ID NO: 1136819 - DNA, 25 bp, Homo sapien
acgaaggctagtcccgtgattccca

SEQ ID NO: 1136820 - DNA, 25 bp, Homo sapien
ttgtgtactgcgttgccaaggaaac

SEQ ID NO: 1136821 - DNA, 25 bp, Homo sapien
caaactcctggaggggggcgaactg

SEQ ID NO: 1136822 - DNA, 25 bp, Homo sapien
ctctaggcttctcggcagccctcct

SEQ ID NO: 1136823 - DNA, 25 bp, Homo sapien
ctctactctaggcttctcggcagcc

SEQ ID NO: 1136824 - DNA, 25 bp, Homo sapien
tggaggggggcgaactgcacttcct

SEQ ID NO: 1136825 - DNA, 25 bp, Homo sapien
cccaatcaaattcgggggatggaag

SEQ ID NO: 1136826 - DNA, 25 bp, Homo sapien
tgatcccctaagagggacaaacttg

SEQ ID NO: 1136827 - DNA, 25 bp, Homo sapien
ccaaaagggtagttatccgcagcgt

SEQ ID NO: 1136828 - DNA, 25 bp, Homo sapien
tcctctgttgacatgttccaaaagg

SEQ ID NO: 1136829 - DNA, 25 bp, Homo sapien
tcacagctgttctggctcccaaagt

SEQ ID NO: 1136830 - DNA, 25 bp, Homo sapien
tgtattggcttaaacctcacagctg

SEQ ID NO: 1136831 - DNA, 25 bp, Homo sapien
ccttttatactggttgggatcttag

SEQ ID NO: 1136832 - DNA, 25 bp, Homo sapien
gataagtcgtatgccaagccatatc

SEQ ID NO: 1136833 - DNA, 25 bp, Homo sapien
ctttctggtacctgcctgcatgagg

SEQ ID NO: 1136834 - DNA, 25 bp, Homo sapien
ctgggatagtaagtgtcctttgggt

SEQ ID NO: 1136835 - DNA, 25 bp, Homo sapien
cttaaatcgaggcaccaagacatta

SEQ ID NO: 1136836 - DNA, 25 bp, Homo sapien
ttcctgctgaggacttactttctgg

SEQ ID NO: 1136837 - DNA, 25 bp, Homo sapien
tatcgaacctacaaaactacctggc

SEQ ID NO: 1136838 - DNA, 25 bp, Homo sapien
tggactaggcctaacctcttggaaa

SEQ ID NO: 1136839 - DNA, 25 bp, Homo sapien
gacatccagttagagcacagatcga

SEQ ID NO: 1136840 - DNA, 25 bp, Homo sapien
tgtaagccccaagaaatcaggagcc

SEQ ID NO: 1136841 - DNA, 25 bp, Homo sapien
gagcccagtctggagatccaaattt

SEQ ID NO: 1136842 - DNA, 25 bp, Homo sapien
caatttttggcggtggcttcttctc

SEQ ID NO: 1136843 - DNA, 25 bp, Homo sapien
ttctgtagacatggaacctgagccc

SEQ ID NO: 1136844 - DNA, 25 bp, Homo sapien
tcattggccaggcaatttttggcgg

SEQ ID NO: 1136845 - DNA, 25 bp, Homo sapien
cacggttccgatgctttctaaagtc

SEQ ID NO: 1136846 - DNA, 25 bp, Homo sapien
taggccacacggttccgatgctttc

SEQ ID NO: 1136847 - DNA, 25 bp, Homo sapien
aattataatacaggcttaggtaggc

SEQ ID NO: 1136848 - DNA, 25 bp, Homo sapien
tacaggcttaggtaggccacacggt

SEQ ID NO: 1136849 - DNA, 25 bp, Homo sapien
tgtacaccacaagtcagtagatgga

SEQ ID NO: 1136850 - DNA, 25 bp, Homo sapien
gctgccagacaagagggccacagta

SEQ ID NO: 1136851 - DNA, 25 bp, Homo sapien
ggagcacgtgaaggtagttacagcc

SEQ ID NO: 1136852 - DNA, 25 bp, Homo sapien
tgttttctgtatctagcaagcccaa

SEQ ID NO: 1136853 - DNA, 25 bp, Homo sapien
tgttgactcacagactaaatggatg

SEQ ID NO: 1136854 - DNA, 25 bp, Homo sapien
gccaggcccaaggacttagtagata

SEQ ID NO: 1136855 - DNA, 25 bp, Homo sapien
tgctctgctcaacacatagtaggac

SEQ ID NO: 1136856 - DNA, 25 bp, Homo sapien
tcattcagattggagggcagaccca

SEQ ID NO: 1136857 - DNA, 25 bp, Homo sapien
tggccatgagggttacagtaggctc

SEQ ID NO: 1136858 - DNA, 25 bp, Homo sapien
ccactggcagcttctcaatctttgg

SEQ ID NO: 1136859 - DNA, 25 bp, Homo sapien
tccagacacatgcaggcttatcacc

SEQ ID NO: 1136860 - DNA, 25 bp, Homo sapien
ggctctcttgcagccactggcagct

SEQ ID NO: 1136861 - DNA, 25 bp, Homo sapien
ttccctgggaaaagctttgagcgtc

SEQ ID NO: 1136862 - DNA, 25 bp, Homo sapien
caaagggacctaagaacttgaagca

SEQ ID NO: 1136863 - DNA, 25 bp, Homo sapien
gcgtctctgtaccaaacagtgtgaa

SEQ ID NO: 1136864 - DNA, 25 bp, Homo sapien
gcatcatatgaccaggaggcttcac

SEQ ID NO: 1136865 - DNA, 25 bp, Homo sapien
ggctcactgaaggtgtagatagttc

SEQ ID NO: 1136866 - DNA, 25 bp, Homo sapien
cttgtgtgactcattttattccaac

SEQ ID NO: 1136867 - DNA, 25 bp, Homo sapien
gaactgagcctgcaacatctttgag

SEQ ID NO: 1136868 - DNA, 25 bp, Homo sapien
aacactgaggcaagatgctccacca

SEQ ID NO: 1136869 - DNA, 25 bp, Homo sapien
caagtacactttttgtccacaggtg

SEQ ID NO: 1136870 - DNA, 25 bp, Homo sapien
tccacaggtggactttctcaaggag

SEQ ID NO: 1136871 - DNA, 25 bp, Homo sapien
gaaatacctgctcataagcaagctg

SEQ ID NO: 1136872 - DNA, 25 bp, Homo sapien
tcaggtgcatcatgactaagtccaa

SEQ ID NO: 1136873 - DNA, 25 bp, Homo sapien
tttcacccaccaaccggcttctgat

SEQ ID NO: 1136874 - DNA, 25 bp, Homo sapien
cctttcacccaccaaccggcttctg

SEQ ID NO: 1136875 - DNA, 25 bp, Homo sapien
acccaccaaccggcttctgatccct

SEQ ID NO: 1136876 - DNA, 25 bp, Homo sapien
ttcacccaccaaccggcttctgatc

SEQ ID NO: 1136877 - DNA, 25 bp, Homo sapien
tgctccaacaggtacgaatggtgcc

SEQ ID NO: 1136878 - DNA, 25 bp, Homo sapien
acttcaataatgagacgtctaacta

SEQ ID NO: 1136879 - DNA, 25 bp, Homo sapien
caataatgagacgtctaactaaagc

SEQ ID NO: 1136880 - DNA, 25 bp, Homo sapien
taacttcaataatgagacgtctaac

SEQ ID NO: 1136881 - DNA, 25 bp, Homo sapien
tcaataatgagacgtctaactaaag

SEQ ID NO: 1136882 - DNA, 25 bp, Homo sapien
gcaggacttggtacggttttacaca

SEQ ID NO: 1136883 - DNA, 25 bp, Homo sapien
catcatggtgttggtcttgtagccc

SEQ ID NO: 1136884 - DNA, 25 bp, Homo sapien
cagtcacaaaaatgcagcccagctc

SEQ ID NO: 1136885 - DNA, 25 bp, Homo sapien
ctgtctatgaggaattggccgtgtc

SEQ ID NO: 1136886 - DNA, 25 bp, Homo sapien
caagtgcagtagtgaaaagggagga

SEQ ID NO: 1136887 - DNA, 25 bp, Homo sapien
tgaaaagggaggaaagaatagaaca

SEQ ID NO: 1136888 - DNA, 25 bp, Homo sapien
gtgcagtagtgaaaagggaggaaag

SEQ ID NO: 1136889 - DNA, 25 bp, Homo sapien
cagtagtgaaaagggaggaaagaat

SEQ ID NO: 1136890 - DNA, 25 bp, Homo sapien
ctgccccgcgttcctgagctcagat

SEQ ID NO: 1136891 - DNA, 25 bp, Homo sapien
tgggtcgcgtcaccgagctgtcccc

SEQ ID NO: 1136892 - DNA, 25 bp, Homo sapien
cctgggtcgcgtcaccgagctgtcc

SEQ ID NO: 1136893 - DNA, 25 bp, Homo sapien
ctgggtcgcgtcaccgagctgtccc

SEQ ID NO: 1136894 - DNA, 25 bp, Homo sapien
ccgcctgcatggaacggcagttgga

SEQ ID NO: 1136895 - DNA, 25 bp, Homo sapien
agttggaaccgtggagatgcggaag

SEQ ID NO: 1136896 - DNA, 25 bp, Homo sapien
ggtaccggtccggtgagccgagatc

SEQ ID NO: 1136897 - DNA, 25 bp, Homo sapien
ctaggttggagttggaaccgtggag

SEQ ID NO: 1136898 - DNA, 25 bp, Homo sapien
tgtgaccccgataggagaatctgtc

SEQ ID NO: 1136899 - DNA, 25 bp, Homo sapien
tatcgcgagaagagtcaagtaacgc

SEQ ID NO: 1136900 - DNA, 25 bp, Homo sapien
caagtaacgctgagagcctatcgca

SEQ ID NO: 1136901 - DNA, 25 bp, Homo sapien
gagccatagaagcaattctcgcgag

SEQ ID NO: 1136902 - DNA, 25 bp, Homo sapien
tgtggcggcggcggaaagtaccacc

SEQ ID NO: 1136903 - DNA, 25 bp, Homo sapien
cggaaagtaccacccgggacagcat

SEQ ID NO: 1136904 - DNA, 25 bp, Homo sapien
gcggaaagtaccacccgggacagca

SEQ ID NO: 1136905 - DNA, 25 bp, Homo sapien
ccgctgtggcggcggcggaaagtac

SEQ ID NO: 1136906 - DNA, 25 bp, Homo sapien
cctggacctaggaaggctgcattct

SEQ ID NO: 1136907 - DNA, 25 bp, Homo sapien
tggacctaggaaggctgcattcttc

SEQ ID NO: 1136908 - DNA, 25 bp, Homo sapien
aggaaggctgcattcttcagagagg

SEQ ID NO: 1136909 - DNA, 25 bp, Homo sapien
ctaggaaggctgcattcttcagaga

SEQ ID NO: 1136910 - DNA, 25 bp, Homo sapien
gagagcgttcctggcagttacagga

SEQ ID NO: 1136911 - DNA, 25 bp, Homo sapien
caggaacaagtgtcttgtctgaaag

SEQ ID NO: 1136912 - DNA, 25 bp, Homo sapien
tctgaaagagggtttaagtgtccca

SEQ ID NO: 1136913 - DNA, 25 bp, Homo sapien
ggcagttacaggaacaagtgtcttg

SEQ ID NO: 1136914 - DNA, 25 bp, Homo sapien
caggctgtggaagctacatgtcata

SEQ ID NO: 1136915 - DNA, 25 bp, Homo sapien
gggtatgtcatctactcggattcag

SEQ ID NO: 1136916 - DNA, 25 bp, Homo sapien
tacatgtcataaggtcccaagggaa

SEQ ID NO: 1136917 - DNA, 25 bp, Homo sapien
catgctttactgttttattgaacaa

SEQ ID NO: 1136918 - DNA, 25 bp, Homo sapien
cgtattttgcaagctttagaactaa

SEQ ID NO: 1136919 - DNA, 25 bp, Homo sapien
aaagagaaatctctaggaaaatgga

SEQ ID NO: 1136920 - DNA, 25 bp, Homo sapien
gagaaatctctaggaaaatggacat

SEQ ID NO: 1136921 - DNA, 25 bp, Homo sapien
gaagtaaaaagagaaatctctagga

SEQ ID NO: 1136922 - DNA, 25 bp, Homo sapien
tcttactctcctggaattacttaac

SEQ ID NO: 1136923 - DNA, 25 bp, Homo sapien
tactctcctggaattacttaacagc

SEQ ID NO: 1136924 - DNA, 25 bp, Homo sapien
ttgtatgcccttcataccatgactt

SEQ ID NO: 1136925 - DNA, 25 bp, Homo sapien
attacttaacagctctcaaaaacaa

SEQ ID NO: 1136926 - DNA, 25 bp, Homo sapien
aaatatattagctaccccaccaggt

SEQ ID NO: 1136927 - DNA, 25 bp, Homo sapien
tgaaatctgagaatcatgcttgaga

SEQ ID NO: 1136928 - DNA, 25 bp, Homo sapien
tctcaacttctatctccttgtaata

SEQ ID NO: 1136929 - DNA, 25 bp, Homo sapien
gtttctcaattcagcactaccgacg

SEQ ID NO: 1136930 - DNA, 25 bp, Homo sapien
tgctgtcatttagtctccttcaagt

SEQ ID NO: 1136931 - DNA, 25 bp, Homo sapien
acagttacagcatactgatgtctcc

SEQ ID NO: 1136932 - DNA, 25 bp, Homo sapien
tatagtctggccaatttattcatcc

SEQ ID NO: 1136933 - DNA, 25 bp, Homo sapien
tcaacagtggatttggaaactattc

SEQ ID NO: 1136934 - DNA, 25 bp, Homo sapien
aattgtacaaatgtaaagcctgttt

SEQ ID NO: 1136935 - DNA, 25 bp, Homo sapien
acaggtagtaattgtacaaatgtaa

SEQ ID NO: 1136936 - DNA, 25 bp, Homo sapien
ctacaggtagtaattgtacaaatgt

SEQ ID NO: 1136937 - DNA, 25 bp, Homo sapien
gtaattgtacaaatgtaaagcctgt

SEQ ID NO: 1136938 - DNA, 25 bp, Homo sapien
cagtccataacgaacttttcctccg

SEQ ID NO: 1136939 - DNA, 25 bp, Homo sapien
tgttatcacctatggacgtctgagg

SEQ ID NO: 1136940 - DNA, 25 bp, Homo sapien
aatgctactttaggtgactccaggg

SEQ ID NO: 1136941 - DNA, 25 bp, Homo sapien
ttatcgaatgggacactagaccgga

SEQ ID NO: 1136942 - DNA, 25 bp, Homo sapien
taaaaatagctgacttgcggctgca

SEQ ID NO: 1136943 - DNA, 25 bp, Homo sapien
gaccattacacctagtactgatagg

SEQ ID NO: 1136944 - DNA, 25 bp, Homo sapien
ttccatagaccattacacctagtac

SEQ ID NO: 1136945 - DNA, 25 bp, Homo sapien
ttacacctagtactgatagggcagt

SEQ ID NO: 1136946 - DNA, 25 bp, Homo sapien
catagaccattacacctagtactga

SEQ ID NO: 1136947 - DNA, 25 bp, Homo sapien
ttctggatgtgttggatggaagcct

SEQ ID NO: 1136948 - DNA, 25 bp, Homo sapien
tgtgacttctccgtatcaattgcat

SEQ ID NO: 1136949 - DNA, 25 bp, Homo sapien
gcctgttgtgacttctccgtatcaa

SEQ ID NO: 1136950 - DNA, 25 bp, Homo sapien
ctccgtatcaattgcattctggatg

SEQ ID NO: 1136951 - DNA, 25 bp, Homo sapien
agaaatgataaatattgtttgtata

SEQ ID NO: 1136952 - DNA, 25 bp, Homo sapien
ctggggcaaaattaagaaatgataa

SEQ ID NO: 1136953 - DNA, 25 bp, Homo sapien
ttaagaaatgataaatattgtttgt

SEQ ID NO: 1136954 - DNA, 25 bp, Homo sapien
tggggcaaaattaagaaatgataaa

SEQ ID NO: 1136955 - DNA, 25 bp, Homo sapien
tctatacagtcgttcccggtaagta

SEQ ID NO: 1136956 - DNA, 25 bp, Homo sapien
actctatacagtcgttcccggtaag

SEQ ID NO: 1136957 - DNA, 25 bp, Homo sapien
tatactctatacagtcgttcccggt

SEQ ID NO: 1136958 - DNA, 25 bp, Homo sapien
atatactctatacagtcgttcccgg

SEQ ID NO: 1136959 - DNA, 25 bp, Homo sapien
tgtgataaggaaagagaaatctggt

SEQ ID NO: 1136960 - DNA, 25 bp, Homo sapien
ctgtgataaggaaagagaaatctgg

SEQ ID NO: 1136961 - DNA, 25 bp, Homo sapien
tgccagcagctttaggtccgcaatg

SEQ ID NO: 1136962 - DNA, 25 bp, Homo sapien
cagcagctttaggtccgcaatgcac

SEQ ID NO: 1136963 - DNA, 25 bp, Homo sapien
ctttaggtccgcaatgcacttggca

SEQ ID NO: 1136964 - DNA, 25 bp, Homo sapien
gcagctttaggtccgcaatgcactt

SEQ ID NO: 1136965 - DNA, 25 bp, Homo sapien
cgatagagatttcgttctctcacta

SEQ ID NO: 1136966 - DNA, 25 bp, Homo sapien
gactggccgatagagatttcgttct

SEQ ID NO: 1136967 - DNA, 25 bp, Homo sapien
gagatttcgttctctcactatatga

SEQ ID NO: 1136968 - DNA, 25 bp, Homo sapien
aacatctgactggccgatagagatt

SEQ ID NO: 1136969 - DNA, 25 bp, Homo sapien
taaaggcaaactgcttattcagaag

SEQ ID NO: 1136970 - DNA, 25 bp, Homo sapien
ataaaggcaaactgcttattcagaa

SEQ ID NO: 1136971 - DNA, 25 bp, Homo sapien
tgacaaaagctgagtatttcagaga

SEQ ID NO: 1136972 - DNA, 25 bp, Homo sapien
caaaagctgagtatttcagagaatt

SEQ ID NO: 1136973 - DNA, 25 bp, Homo sapien
ttttacccatatgacaaaagctgag

SEQ ID NO: 1136974 - DNA, 25 bp, Homo sapien
tcagagaattatacaacttgaaaaa

SEQ ID NO: 1136975 - DNA, 25 bp, Homo sapien
aatattttctataggcatactacta

SEQ ID NO: 1136976 - DNA, 25 bp, Homo sapien
agaaacagttcaccactgaatggtc

SEQ ID NO: 1136977 - DNA, 25 bp, Homo sapien
cactgaatggtctcataaacaagac

SEQ ID NO: 1136978 - DNA, 25 bp, Homo sapien
agccagaaacagttcaccactgaat

SEQ ID NO: 1136979 - DNA, 25 bp, Homo sapien
caccatggaacacaagtatctcttc

SEQ ID NO: 1136980 - DNA, 25 bp, Homo sapien
ttcatctactgatggccgattgggc

SEQ ID NO: 1136981 - DNA, 25 bp, Homo sapien
tatatgtcgactgggattgctggat

SEQ ID NO: 1136982 - DNA, 25 bp, Homo sapien
tccttgtacaagtatgggagaatca

SEQ ID NO: 1136983 - DNA, 25 bp, Homo sapien
ggacaaccactatcaaggccagaga

SEQ ID NO: 1136984 - DNA, 25 bp, Homo sapien
tgtctgtgcttgttacttccacttg

SEQ ID NO: 1136985 - DNA, 25 bp, Homo sapien
gactgccgtgtggactctaagctcc

SEQ ID NO: 1136986 - DNA, 25 bp, Homo sapien
cagagatgataaaaacggacatggg

SEQ ID NO: 1136987 - DNA, 25 bp, Homo sapien
aaattgaacacgttggaagccaggg

SEQ ID NO: 1136988 - DNA, 25 bp, Homo sapien
tcagctctgccaacatggtaacaaa

SEQ ID NO: 1136989 - DNA, 25 bp, Homo sapien
tggtaacaaagaagccgcagacaat

SEQ ID NO: 1136990 - DNA, 25 bp, Homo sapien
tccaggctgtacaaaactaggtggc

SEQ ID NO: 1136991 - DNA, 25 bp, Homo sapien
tatcacacatttagaggcttaaaac

SEQ ID NO: 1136992 - DNA, 25 bp, Homo sapien
tctattgctgcctaacatatcacac

SEQ ID NO: 1136993 - DNA, 25 bp, Homo sapien
gggttgtgttcttatcagaggcttg

SEQ ID NO: 1136994 - DNA, 25 bp, Homo sapien
caccaggctgtaatccaggtattgg

SEQ ID NO: 1136995 - DNA, 25 bp, Homo sapien
gagaggccaattaacatgaggactg

SEQ ID NO: 1136996 - DNA, 25 bp, Homo sapien
ggactggaaagagttgactggattt

SEQ ID NO: 1136997 - DNA, 25 bp, Homo sapien
taaacatatgtgattaggagccaga

SEQ ID NO: 1136998 - DNA, 25 bp, Homo sapien
catatgtgattaggagccagaggag

SEQ ID NO: 1136999 - DNA, 25 bp, Homo sapien
tagctgggatcattgcacctgacac

SEQ ID NO: 1137000 - DNA, 25 bp, Homo sapien
gataaggtaatccacgtacagtatg

SEQ ID NO: 1137001 - DNA, 25 bp, Homo sapien
aactctgaggagcaccaagatttaa

SEQ ID NO: 1137002 - DNA, 25 bp, Homo sapien
gaagtcaccagtatactcatgatag

SEQ ID NO: 1137003 - DNA, 25 bp, Homo sapien
ctcctgaactcaagctgtcctctca

SEQ ID NO: 1137004 - DNA, 25 bp, Homo sapien
tcctgaactcaagctgtcctctcac

SEQ ID NO: 1137005 - DNA, 25 bp, Homo sapien
gaactcaagctgtcctctcacttca

SEQ ID NO: 1137006 - DNA, 25 bp, Homo sapien
ctgaactcaagctgtcctctcactt

SEQ ID NO: 1137007 - DNA, 25 bp, Homo sapien
cttcaaagggaaggcgaatcatttc

SEQ ID NO: 1137008 - DNA, 25 bp, Homo sapien
cagatttactgtggaggtcgcatca

SEQ ID NO: 1137009 - DNA, 25 bp, Homo sapien
tgctataggccatacagtgagctag

SEQ ID NO: 1137010 - DNA, 25 bp, Homo sapien
tgtttactttaaccactgtgccaga

SEQ ID NO: 1137011 - DNA, 25 bp, Homo sapien
gaaataaagattactgcccctgcca

SEQ ID NO: 1137012 - DNA, 25 bp, Homo sapien
gatcttactaaactcaacggtaggc

SEQ ID NO: 1137013 - DNA, 25 bp, Homo sapien
tccggtcatagcacgacgcagtcgt

SEQ ID NO: 1137014 - DNA, 25 bp, Homo sapien
tgccactgccagcatcacattgtgt

SEQ ID NO: 1137015 - DNA, 25 bp, Homo sapien
tgtcagataagaaaagggccaacgg

SEQ ID NO: 1137016 - DNA, 25 bp, Homo sapien
cacagtccgcagcagaatcggcagt

SEQ ID NO: 1137017 - DNA, 25 bp, Homo sapien
tctgagccatgagaataggaggccc

SEQ ID NO: 1137018 - DNA, 25 bp, Homo sapien
cacaggagactgatgtataagccga

SEQ ID NO: 1137019 - DNA, 25 bp, Homo sapien
cagtgtcgggtttacatgtggagcc

SEQ ID NO: 1137020 - DNA, 25 bp, Homo sapien
tgtcgggtttacatgtggagccatt

SEQ ID NO: 1137021 - DNA, 25 bp, Homo sapien
gtcgggtttacatgtggagccattg

SEQ ID NO: 1137022 - DNA, 25 bp, Homo sapien
agtgtcgggtttacatgtggagcca

SEQ ID NO: 1137023 - DNA, 25 bp, Homo sapien
ttgtggtggttagagagacagggtg

SEQ ID NO: 1137024 - DNA, 25 bp, Homo sapien
tagagagacagggtgcagggctagt

SEQ ID NO: 1137025 - DNA, 25 bp, Homo sapien
tggttagagagacagggtgcagggc

SEQ ID NO: 1137026 - DNA, 25 bp, Homo sapien
gagacagggtgcagggctagttgtt

SEQ ID NO: 1137027 - DNA, 25 bp, Homo sapien
tcccacgtggtacaagatgaaacag

SEQ ID NO: 1137028 - DNA, 25 bp, Homo sapien
cagcacaacatcaaatcccacgtgg

SEQ ID NO: 1137029 - DNA, 25 bp, Homo sapien
tgaaacagataggagaatgctcatt

SEQ ID NO: 1137030 - DNA, 25 bp, Homo sapien
taagagccatactcctgagatcaca

SEQ ID NO: 1137031 - DNA, 25 bp, Homo sapien
atgaggaagataaaggctatcagca

SEQ ID NO: 1137032 - DNA, 25 bp, Homo sapien
cagtgtcagtagaaccccagcacaa

SEQ ID NO: 1137033 - DNA, 25 bp, Homo sapien
ggaagataaaggctatcagcagcag

SEQ ID NO: 1137034 - DNA, 25 bp, Homo sapien
agcagcagtgtcagtagaaccccag

SEQ ID NO: 1137035 - DNA, 25 bp, Homo sapien
aaagaagagggacccatctcagcaa

SEQ ID NO: 1137036 - DNA, 25 bp, Homo sapien
gaagagggacccatctcagcaatgg

SEQ ID NO: 1137037 - DNA, 25 bp, Homo sapien
agaagagggacccatctcagcaatg

SEQ ID NO: 1137038 - DNA, 25 bp, Homo sapien
aagaagagggacccatctcagcaat

SEQ ID NO: 1137039 - DNA, 25 bp, Homo sapien
tggctggaggatctgagtgaggatc

SEQ ID NO: 1137040 - DNA, 25 bp, Homo sapien
tggaggatctgagtgaggatctggg

SEQ ID NO: 1137041 - DNA, 25 bp, Homo sapien
ggatctgagtgaggatctggggcct

SEQ ID NO: 1137042 - DNA, 25 bp, Homo sapien
tctggggcctggggcttggagtgat

SEQ ID NO: 1137043 - DNA, 25 bp, Homo sapien
tagcagataatgaagagtatggagg

SEQ ID NO: 1137044 - DNA, 25 bp, Homo sapien
ggaattccaatgacggtagcccttc

SEQ ID NO: 1137045 - DNA, 25 bp, Homo sapien
gtcaaagaatcacttgcccagtgtc

SEQ ID NO: 1137046 - DNA, 25 bp, Homo sapien
tggaaatcaataccaccattctagc

SEQ ID NO: 1137047 - DNA, 25 bp, Homo sapien
tgctggcataggtaagtgattcccc

SEQ ID NO: 1137048 - DNA, 25 bp, Homo sapien
gcagaatggttctcagccaagtgat

SEQ ID NO: 1137049 - DNA, 25 bp, Homo sapien
tgagagtttgaaagttgtgctggca

SEQ ID NO: 1137050 - DNA, 25 bp, Homo sapien
ctttaatttgagcatagacaatggg

SEQ ID NO: 1137051 - DNA, 25 bp, Homo sapien
gaccattggtctccaaagatgctgg

SEQ ID NO: 1137052 - DNA, 25 bp, Homo sapien
cacaggctgtcagttcaagtgggag

SEQ ID NO: 1137053 - DNA, 25 bp, Homo sapien
gattcaagcctcattggaaaagctg

SEQ ID NO: 1137054 - DNA, 25 bp, Homo sapien
catgatgctgggtgaatactctgtg

SEQ ID NO: 1137055 - DNA, 25 bp, Homo sapien
ttactgacaaaaggctccagttggg

SEQ ID NO: 1137056 - DNA, 25 bp, Homo sapien
ccttgattacttccactgaggtggg

SEQ ID NO: 1137057 - DNA, 25 bp, Homo sapien
cacttgagggcctgtatgcctgggc

SEQ ID NO: 1137058 - DNA, 25 bp, Homo sapien
tgcctgggccaagggatttttacat

SEQ ID NO: 1137059 - DNA, 25 bp, Homo sapien
aatggcgtgcaagtgtctggttccc

SEQ ID NO: 1137060 - DNA, 25 bp, Homo sapien
gaagcacctgaaccaagtgggtccc

SEQ ID NO: 1137061 - DNA, 25 bp, Homo sapien
agttggtgactaggtaagcagcttc

SEQ ID NO: 1137062 - DNA, 25 bp, Homo sapien
gctgattcccagacagtcgcctgtt

SEQ ID NO: 1137063 - DNA, 25 bp, Homo sapien
ggaagtcaccctgtattgccatagc

SEQ ID NO: 1137064 - DNA, 25 bp, Homo sapien
agagaaatctagtagcttggctgca

SEQ ID NO: 1137065 - DNA, 25 bp, Homo sapien
gatgcaattaacaggagcagtcctc

SEQ ID NO: 1137066 - DNA, 25 bp, Homo sapien
caggcaatctagacagcaggatgca

SEQ ID NO: 1137067 - DNA, 25 bp, Homo sapien
acccacgtggaaggagccacacaga

SEQ ID NO: 1137068 - DNA, 25 bp, Homo sapien
gcaggtctgatcctgaaatacggcc

SEQ ID NO: 1137069 - DNA, 25 bp, Homo sapien
aaataaatggaggtcctcaggcagc

SEQ ID NO: 1137070 - DNA, 25 bp, Homo sapien
cgtgtgttcgaaccggcaggtctga

SEQ ID NO: 1137071 - DNA, 25 bp, Homo sapien
caagtggccactgaaacaaatgctc

SEQ ID NO: 1137072 - DNA, 25 bp, Homo sapien
gagaagacttttggaccttgtacca

SEQ ID NO: 1137073 - DNA, 25 bp, Homo sapien
tgtgccatgccacctttgactttgg

SEQ ID NO: 1137074 - DNA, 25 bp, Homo sapien
caaatgctctggattactgtggacc

SEQ ID NO: 1137075 - DNA, 25 bp, Homo sapien
tgaagtgccgatttcaaatgaagac

SEQ ID NO: 1137076 - DNA, 25 bp, Homo sapien
atgaagactgacttgatcctgaaca

SEQ ID NO: 1137077 - DNA, 25 bp, Homo sapien
agactgacttgatcctgaacataac

SEQ ID NO: 1137078 - DNA, 25 bp, Homo sapien
atcctgctgaagtgccgatttcaaa

SEQ ID NO: 1137079 - DNA, 25 bp, Homo sapien
ctgcctgaacaaattgcatctgagc

SEQ ID NO: 1137080 - DNA, 25 bp, Homo sapien
atgtgcatcgttgacagacatctga

SEQ ID NO: 1137081 - DNA, 25 bp, Homo sapien
ctgggagttggagggttctttctca

SEQ ID NO: 1137082 - DNA, 25 bp, Homo sapien
ttctcaccgcccctctgttcatcct

SEQ ID NO: 1137083 - DNA, 25 bp, Homo sapien
cagggcatgtgcatcgttgacagac

SEQ ID NO: 1137084 - DNA, 25 bp, Homo sapien
gattgcccactcataatcttcaggg

SEQ ID NO: 1137085 - DNA, 25 bp, Homo sapien
catcacggtatatgtgaaccattgg

SEQ ID NO: 1137086 - DNA, 25 bp, Homo sapien
gcttctgtcctcatcacggtatatg

SEQ ID NO: 1137087 - DNA, 25 bp, Homo sapien
gttgaggaactggattgcccactca

SEQ ID NO: 1137088 - DNA, 25 bp, Homo sapien
ctctcggccgtggctcctgctccgg

SEQ ID NO: 1137089 - DNA, 25 bp, Homo sapien
tcctctcggccgtggctcctgctcc

SEQ ID NO: 1137090 - DNA, 25 bp, Homo sapien
cctctcggccgtggctcctgctccg

SEQ ID NO: 1137091 - DNA, 25 bp, Homo sapien
taaactctggttctcagccctaaga

SEQ ID NO: 1137092 - DNA, 25 bp, Homo sapien
tgagacggcccttcatgcttttgaa

SEQ ID NO: 1137093 - DNA, 25 bp, Homo sapien
tatagggtacctctcaaaaggacag

SEQ ID NO: 1137094 - DNA, 25 bp, Homo sapien
cctaagaagagtggctggctacctg

SEQ ID NO: 1137095 - DNA, 25 bp, Homo sapien
tcacaactgtgtgcaggagactgag

SEQ ID NO: 1137096 - DNA, 25 bp, Homo sapien
taaaaactactgcttgtaatcccca

SEQ ID NO: 1137097 - DNA, 25 bp, Homo sapien
gcttataggttcaatactcatctgg

SEQ ID NO: 1137098 - DNA, 25 bp, Homo sapien
ttgaactgctttgttgatcagaacc

SEQ ID NO: 1137099 - DNA, 25 bp, Homo sapien
tactcttatacacagggtaatcacc

SEQ ID NO: 1137100 - DNA, 25 bp, Homo sapien
cacagggtaatcaccctctgatcca

SEQ ID NO: 1137101 - DNA, 25 bp, Homo sapien
cctctgatccagttatcccacttct

SEQ ID NO: 1137102 - DNA, 25 bp, Homo sapien
gagacacatactcttatacacaggg

SEQ ID NO: 1137103 - DNA, 25 bp, Homo sapien
gaggatttctgctattaccacccaa

SEQ ID NO: 1137104 - DNA, 25 bp, Homo sapien
tgtaacagatatctatcacattggc

SEQ ID NO: 1137105 - DNA, 25 bp, Homo sapien
gcaaagattgtaaaaactgacctac

SEQ ID NO: 1137106 - DNA, 25 bp, Homo sapien
catttcaggacaattgcaaatttct

SEQ ID NO: 1137107 - DNA, 25 bp, Homo sapien
tgttattcccctatggtaaattctg

SEQ ID NO: 1137108 - DNA, 25 bp, Homo sapien
tggccgtaggctccaatatctaatc

SEQ ID NO: 1137109 - DNA, 25 bp, Homo sapien
ccttttccacagtctagcacgtcaa

SEQ ID NO: 1137110 - DNA, 25 bp, Homo sapien
aaagtattctactccttcaaccata

SEQ ID NO: 1137111 - DNA, 25 bp, Homo sapien
ttaaggatgcatggaaaaattcaac

SEQ ID NO: 1137112 - DNA, 25 bp, Homo sapien
gaaatggactttcactttctaagtc

SEQ ID NO: 1137113 - DNA, 25 bp, Homo sapien
caggagcagtatcaccaccaatggg

SEQ ID NO: 1137114 - DNA, 25 bp, Homo sapien
gatggcaaattcacatactactata

SEQ ID NO: 1137115 - DNA, 25 bp, Homo sapien
tcgtcaataatgtgagtaggcctca

SEQ ID NO: 1137116 - DNA, 25 bp, Homo sapien
gaatgtcaatcaaggtgtacccacc

SEQ ID NO: 1137117 - DNA, 25 bp, Homo sapien
tataggttctgtaggtatctgccca

SEQ ID NO: 1137118 - DNA, 25 bp, Homo sapien
caatcaggctgagtttcccgggaag

SEQ ID NO: 1137119 - DNA, 25 bp, Homo sapien
gataacagtgcctggctcgcagggt

SEQ ID NO: 1137120 - DNA, 25 bp, Homo sapien
tttatgcgcccaacacagaatggga

SEQ ID NO: 1137121 - DNA, 25 bp, Homo sapien
gaagcatcagctttgagccctaagt

SEQ ID NO: 1137122 - DNA, 25 bp, Homo sapien
catcactagctctaattggcaggga

SEQ ID NO: 1137123 - DNA, 25 bp, Homo sapien
gcagtgagccgttgcagtgatcgcg

SEQ ID NO: 1137124 - DNA, 25 bp, Homo sapien
agtgagccgttgcagtgatcgcgcc

SEQ ID NO: 1137125 - DNA, 25 bp, Homo sapien
cagtgagccgttgcagtgatcgcgc

SEQ ID NO: 1137126 - DNA, 25 bp, Homo sapien
tgagccgttgcagtgatcgcgccac

SEQ ID NO: 1137127 - DNA, 25 bp, Homo sapien
tattcacaaggctgttataaccacc

SEQ ID NO: 1137128 - DNA, 25 bp, Homo sapien
tgtgcttagcatgcttccaaggttc

SEQ ID NO: 1137129 - DNA, 25 bp, Homo sapien
actgctgggtcgtaagataactcta

SEQ ID NO: 1137130 - DNA, 25 bp, Homo sapien
tacagccttcctagtgtgtatgaaa

SEQ ID NO: 1137131 - DNA, 25 bp, Homo sapien
aactacttggtctatggtctggccc

SEQ ID NO: 1137132 - DNA, 25 bp, Homo sapien
taccagtggattaaagcaaaagact

SEQ ID NO: 1137133 - DNA, 25 bp, Homo sapien
ctgctaaggattgggtaccagtgga

SEQ ID NO: 1137134 - DNA, 25 bp, Homo sapien
actctcttttgctataactacttgg

SEQ ID NO: 1137135 - DNA, 25 bp, Homo sapien
caaatgctgacatgtaaattaagat

SEQ ID NO: 1137136 - DNA, 25 bp, Homo sapien
tgaaaagagttctgtaaacagatgg

SEQ ID NO: 1137137 - DNA, 25 bp, Homo sapien
gaagaattgatcaattatcaaatgc

SEQ ID NO: 1137138 - DNA, 25 bp, Homo sapien
gcaggtcaggaaagagcaactagtg

SEQ ID NO: 1137139 - DNA, 25 bp, Homo sapien
tcatacaaggtatgttttctgacta

SEQ ID NO: 1137140 - DNA, 25 bp, Homo sapien
tatttctccgaacgtatccctgtta

SEQ ID NO: 1137141 - DNA, 25 bp, Homo sapien
aaattggtattttgaacagaatgaa

SEQ ID NO: 1137142 - DNA, 25 bp, Homo sapien
ccattcaattgggaaaggatggtct

SEQ ID NO: 1137143 - DNA, 25 bp, Homo sapien
tgtgcatgcatctaacaacagtgtc

SEQ ID NO: 1137144 - DNA, 25 bp, Homo sapien
ggagccctcaacacccttgtcagta

SEQ ID NO: 1137145 - DNA, 25 bp, Homo sapien
ttcagtggcccagtcaacaggtatc

SEQ ID NO: 1137146 - DNA, 25 bp, Homo sapien
taaggtcgtagctgaagtaaacaac

SEQ ID NO: 1137147 - DNA, 25 bp, Homo sapien
taggaatgttgaccaaaggagtagc

SEQ ID NO: 1137148 - DNA, 25 bp, Homo sapien
tgaagacagggccaaacgaagagac

SEQ ID NO: 1137149 - DNA, 25 bp, Homo sapien
ttcgataaggaacaagtagggcact

SEQ ID NO: 1137150 - DNA, 25 bp, Homo sapien
tacttggtatgcgtgggaagccact

SEQ ID NO: 1137151 - DNA, 25 bp, Homo sapien
ggagttatgaattgctgaccacaga

SEQ ID NO: 1137152 - DNA, 25 bp, Homo sapien
gctaccatcagcttacacctggatc

SEQ ID NO: 1137153 - DNA, 25 bp, Homo sapien
cctccagttcagatacttcagtgat

SEQ ID NO: 1137154 - DNA, 25 bp, Homo sapien
cacctggatccctataatagcctct

SEQ ID NO: 1137155 - DNA, 25 bp, Homo sapien
gcaggctataaaagttcctctatga

SEQ ID NO: 1137156 - DNA, 25 bp, Homo sapien
catatgtagcacttaggagagtgcc

SEQ ID NO: 1137157 - DNA, 25 bp, Homo sapien
ggcttcaaagctaggtgtcgtctaa

SEQ ID NO: 1137158 - DNA, 25 bp, Homo sapien
gaaagctctatgagtactctgtaga

SEQ ID NO: 1137159 - DNA, 25 bp, Homo sapien
taaactgtcagtcatcacggttacg

SEQ ID NO: 1137160 - DNA, 25 bp, Homo sapien
catgtcatgaggcaaataacacttg

SEQ ID NO: 1137161 - DNA, 25 bp, Homo sapien
tgagtgttaccacatagaactgtac

SEQ ID NO: 1137162 - DNA, 25 bp, Homo sapien
tacgtatgtcatcagattgagccat

SEQ ID NO: 1137163 - DNA, 25 bp, Homo sapien
atgcccagccatgaatctacatttg

SEQ ID NO: 1137164 - DNA, 25 bp, Homo sapien
ggttcagtaggtgccatcaagacaa

SEQ ID NO: 1137165 - DNA, 25 bp, Homo sapien
caagtgcctggagttactagtggcc

SEQ ID NO: 1137166 - DNA, 25 bp, Homo sapien
cagtccagtttcctcggagttggca

SEQ ID NO: 1137167 - DNA, 25 bp, Homo sapien
tgcacagacactcggtggagtctcc

SEQ ID NO: 1137168 - DNA, 25 bp, Homo sapien
tataatctattgttaagcctgtcca

SEQ ID NO: 1137169 - DNA, 25 bp, Homo sapien
taacctcgctatctttcttataagc

SEQ ID NO: 1137170 - DNA, 25 bp, Homo sapien
taaaagcctgactttaggacccata

SEQ ID NO: 1137171 - DNA, 25 bp, Homo sapien
catcaccgcatacagcctatatatt

SEQ ID NO: 1137172 - DNA, 25 bp, Homo sapien
ccacacccagcagttttcagtattt

SEQ ID NO: 1137173 - DNA, 25 bp, Homo sapien
gagtagctggcaccaaccattataa

SEQ ID NO: 1137174 - DNA, 25 bp, Homo sapien
aaccattataaatgcaccacacctg

SEQ ID NO: 1137175 - DNA, 25 bp, Homo sapien
gtagctggcaccaaccattataaat

SEQ ID NO: 1137176 - DNA, 25 bp, Homo sapien
tcttcatattttggtatggtttttg

SEQ ID NO: 1137177 - DNA, 25 bp, Homo sapien
atgaggtgtaaggaatgagtccagt

SEQ ID NO: 1137178 - DNA, 25 bp, Homo sapien
atgtgatctgtttaaatactgacga

SEQ ID NO: 1137179 - DNA, 25 bp, Homo sapien
tgtgatctgtttaaatactgacgat

SEQ ID NO: 1137180 - DNA, 25 bp, Homo sapien
gatgtgatctgtttaaatactgacg

SEQ ID NO: 1137181 - DNA, 25 bp, Homo sapien
aggaccactagcttgtactcacgca

SEQ ID NO: 1137182 - DNA, 25 bp, Homo sapien
aaggaccactagcttgtactcacgc

SEQ ID NO: 1137183 - DNA, 25 bp, Homo sapien
ggaccactagcttgtactcacgcat

SEQ ID NO: 1137184 - DNA, 25 bp, Homo sapien
caaggaccactagcttgtactcacg

SEQ ID NO: 1137185 - DNA, 25 bp, Homo sapien
gaatcttctatcgttgggtcatatt

SEQ ID NO: 1137186 - DNA, 25 bp, Homo sapien
ttctgtaggaatcttctatcgttgg

SEQ ID NO: 1137187 - DNA, 25 bp, Homo sapien
aggaatcttctatcgttgggtcata

SEQ ID NO: 1137188 - DNA, 25 bp, Homo sapien
tgtaggaatcttctatcgttgggtc

SEQ ID NO: 1137189 - DNA, 25 bp, Homo sapien
caggatttcgagcatacactgttgg

SEQ ID NO: 1137190 - DNA, 25 bp, Homo sapien
ctgcagtagcaccagctcctcagga

SEQ ID NO: 1137191 - DNA, 25 bp, Homo sapien
gaagctgcagtgatctgtgttcaca

SEQ ID NO: 1137192 - DNA, 25 bp, Homo sapien
agctcctcaggaggttatggtggga

SEQ ID NO: 1137193 - DNA, 25 bp, Homo sapien
gatttcttgaccctgggaggttgaa

SEQ ID NO: 1137194 - DNA, 25 bp, Homo sapien
cagggagttagctatgctaccactc

SEQ ID NO: 1137195 - DNA, 25 bp, Homo sapien
gttctggttgttctaccctggctga

SEQ ID NO: 1137196 - DNA, 25 bp, Homo sapien
gttagctatgctaccactcagccat

SEQ ID NO: 1137197 - DNA, 25 bp, Homo sapien
tgttccccatgaccactacctctat

SEQ ID NO: 1137198 - DNA, 25 bp, Homo sapien
caggtcctgtaagtcgttaaacgtg

SEQ ID NO: 1137199 - DNA, 25 bp, Homo sapien
gtcgttaaacgtggactgagctgta

SEQ ID NO: 1137200 - DNA, 25 bp, Homo sapien
tggactgagctgtaatagaatatac

SEQ ID NO: 1137201 - DNA, 25 bp, Homo sapien
gactgagctgtaatagaatatacta

SEQ ID NO: 1137202 - DNA, 25 bp, Homo sapien
tgatctttgactttgcagaagattc

SEQ ID NO: 1137203 - DNA, 25 bp, Homo sapien
gatctttgactttgcagaagattct

SEQ ID NO: 1137204 - DNA, 25 bp, Homo sapien
gcaagttcgaactataatatttggt

SEQ ID NO: 1137205 - DNA, 25 bp, Homo sapien
tatttggttagaaatgctgaaaggc

SEQ ID NO: 1137206 - DNA, 25 bp, Homo sapien
atggttcagtgatgagggcaagttc

SEQ ID NO: 1137207 - DNA, 25 bp, Homo sapien
cagtgatgagggcaagttcgaacta

SEQ ID NO: 1137208 - DNA, 25 bp, Homo sapien
tcaaatcatttaactctctgtcatc

SEQ ID NO: 1137209 - DNA, 25 bp, Homo sapien
tttaaatggtccagactacaagact

SEQ ID NO: 1137210 - DNA, 25 bp, Homo sapien
tagttccctatactcaatgcataag

SEQ ID NO: 1137211 - DNA, 25 bp, Homo sapien
gaaaacttcaagaactcaatgtgct

SEQ ID NO: 1137212 - DNA, 25 bp, Homo sapien
gcctttgcctttcaggacattgtca

SEQ ID NO: 1137213 - DNA, 25 bp, Homo sapien
cacttgagacatttaaggattgaca

SEQ ID NO: 1137214 - DNA, 25 bp, Homo sapien
tgtcaactgccccaataatgtactt

SEQ ID NO: 1137215 - DNA, 25 bp, Homo sapien
tctccctttcaaggtatcacatgcg

SEQ ID NO: 1137216 - DNA, 25 bp, Homo sapien
tctgtctgaccaggtcataaaatat

SEQ ID NO: 1137217 - DNA, 25 bp, Homo sapien
atctgtctgaccaggtcataaaata

SEQ ID NO: 1137218 - DNA, 25 bp, Homo sapien
ctggctcagagctgctgctgactat

SEQ ID NO: 1137219 - DNA, 25 bp, Homo sapien
gctcagagctgctgctgactatggg

SEQ ID NO: 1137220 - DNA, 25 bp, Homo sapien
ctcagagctgctgctgactatgggc

SEQ ID NO: 1137221 - DNA, 25 bp, Homo sapien
ggctcagagctgctgctgactatgg

SEQ ID NO: 1137222 - DNA, 25 bp, Homo sapien
tgctaaacagctacagtaacagtgc

SEQ ID NO: 1137223 - DNA, 25 bp, Homo sapien
tctaatacaggttaaggcaagggat

SEQ ID NO: 1137224 - DNA, 25 bp, Homo sapien
tatggactagataaggtggcctcag

SEQ ID NO: 1137225 - DNA, 25 bp, Homo sapien
taatccccatagtcaagagcagaag

SEQ ID NO: 1137226 - DNA, 25 bp, Homo sapien
aatgctggcactttccaattaggca

SEQ ID NO: 1137227 - DNA, 25 bp, Homo sapien
tataactgctattgcaaaggagaaa

SEQ ID NO: 1137228 - DNA, 25 bp, Homo sapien
gggaggatcatgataaaaagatcaa

SEQ ID NO: 1137229 - DNA, 25 bp, Homo sapien
gttatctgctgcaatgagtttgagg

SEQ ID NO: 1137230 - DNA, 25 bp, Homo sapien
gacatttcataatcagtatcattac

SEQ ID NO: 1137231 - DNA, 25 bp, Homo sapien
tgaaagccatagaaatcagttatcc

SEQ ID NO: 1137232 - DNA, 25 bp, Homo sapien
taatcatccataaaagctgtaattt

SEQ ID NO: 1137233 - DNA, 25 bp, Homo sapien
gctgtaatttaatctgacagtaaaa

SEQ ID NO: 1137234 - DNA, 25 bp, Homo sapien
agccatagaaatcagttatcccagt

SEQ ID NO: 1137235 - DNA, 25 bp, Homo sapien
ataaacgctttaatctataaacaat

SEQ ID NO: 1137236 - DNA, 25 bp, Homo sapien
gaaagtgcgaggtctgttcctagag

SEQ ID NO: 1137237 - DNA, 25 bp, Homo sapien
taacacttcattggtggactcacac

SEQ ID NO: 1137238 - DNA, 25 bp, Homo sapien
tactaggcagaaaggagctactgtc

SEQ ID NO: 1137239 - DNA, 25 bp, Homo sapien
cataagtagtatcaccctgggtcca

SEQ ID NO: 1137240 - DNA, 25 bp, Homo sapien
aaatctcagcaaggcatgaacactt

SEQ ID NO: 1137241 - DNA, 25 bp, Homo sapien
tccctgagcaatgacttagactttc

SEQ ID NO: 1137242 - DNA, 25 bp, Homo sapien
caaggcacagggttttctaagcttg

SEQ ID NO: 1137243 - DNA, 25 bp, Homo sapien
caaagagacagtatctagagatccc

SEQ ID NO: 1137244 - DNA, 25 bp, Homo sapien
aatgtatgtcacaccttgggcccag

SEQ ID NO: 1137245 - DNA, 25 bp, Homo sapien
tcaagttcgctatagttttggcccc

SEQ ID NO: 1137246 - DNA, 25 bp, Homo sapien
gctgggtagttagaccgcctcaaag

SEQ ID NO: 1137247 - DNA, 25 bp, Homo sapien
tgttcagggataccaccaagccatt

SEQ ID NO: 1137248 - DNA, 25 bp, Homo sapien
agtcttcaacacaccaggcacatgt

SEQ ID NO: 1137249 - DNA, 25 bp, Homo sapien
ccccaggcagttgcatgggctgctc

SEQ ID NO: 1137250 - DNA, 25 bp, Homo sapien
tcatggcattggcacagaccctttc

SEQ ID NO: 1137251 - DNA, 25 bp, Homo sapien
caatcccattacctctcttttacta

SEQ ID NO: 1137252 - DNA, 25 bp, Homo sapien
tgtctggcggttcggaagctgtcta

SEQ ID NO: 1137253 - DNA, 25 bp, Homo sapien
cggaagctgtctaggaggcttctgc

SEQ ID NO: 1137254 - DNA, 25 bp, Homo sapien
gaagctgtctaggaggcttctgcag

SEQ ID NO: 1137255 - DNA, 25 bp, Homo sapien
gttcggaagctgtctaggaggcttc

SEQ ID NO: 1137256 - DNA, 25 bp, Homo sapien
cggctgcgggggcaggcttggccgg

SEQ ID NO: 1137257 - DNA, 25 bp, Homo sapien
gcttggccggctgtctgcctgggct

SEQ ID NO: 1137258 - DNA, 25 bp, Homo sapien
gctgcgggggcaggcttggccggct

SEQ ID NO: 1137259 - DNA, 25 bp, Homo sapien
ggcaggcttggccggctgtctgcct

SEQ ID NO: 1137260 - DNA, 25 bp, Homo sapien
atttcactctaggagtgaggcggga

SEQ ID NO: 1137261 - DNA, 25 bp, Homo sapien
gggacctcgcctgtcatactcagta

SEQ ID NO: 1137262 - DNA, 25 bp, Homo sapien
catgtaagttcttgagagcagggac

SEQ ID NO: 1137263 - DNA, 25 bp, Homo sapien
cggctttgtgtgacaggcgtgaacc

SEQ ID NO: 1137264 - DNA, 25 bp, Homo sapien
gtgggtcccatagaaagggatctct

SEQ ID NO: 1137265 - DNA, 25 bp, Homo sapien
tgggtcccatagaaagggatctctt

SEQ ID NO: 1137266 - DNA, 25 bp, Homo sapien
gggtcccatagaaagggatctcttg

SEQ ID NO: 1137267 - DNA, 25 bp, Homo sapien
tctgaagagcagaatagctgaatga

SEQ ID NO: 1137268 - DNA, 25 bp, Homo sapien
tgctgtgctgaaaactgggagacca

SEQ ID NO: 1137269 - DNA, 25 bp, Homo sapien
tgggagaccacattccgtcaccata

SEQ ID NO: 1137270 - DNA, 25 bp, Homo sapien
tcatttcaatagtccaccttagggc

SEQ ID NO: 1137271 - DNA, 25 bp, Homo sapien
gattctgcccttagcaacctgggtg

SEQ ID NO: 1137272 - DNA, 25 bp, Homo sapien
caaccactgtcgtcatgaaggaagc

SEQ ID NO: 1137273 - DNA, 25 bp, Homo sapien
tcttcacttgttaagcggcggcagc

SEQ ID NO: 1137274 - DNA, 25 bp, Homo sapien
tgaacaggtctcctctaaggcaagg

SEQ ID NO: 1137275 - DNA, 25 bp, Homo sapien
gatgtccttgttctatttcagatgc

SEQ ID NO: 1137276 - DNA, 25 bp, Homo sapien
ccaggatgtccttgttctatttcag

SEQ ID NO: 1137277 - DNA, 25 bp, Homo sapien
caggatgtccttgttctatttcaga

SEQ ID NO: 1137278 - DNA, 25 bp, Homo sapien
tgtccttgttctatttcagatgcct

SEQ ID NO: 1137279 - DNA, 25 bp, Homo sapien
acctgccaaagctaattttccactc

SEQ ID NO: 1137280 - DNA, 25 bp, Homo sapien
tgccaaagctaattttccactcacc

SEQ ID NO: 1137281 - DNA, 25 bp, Homo sapien
cctgccaaagctaattttccactca

SEQ ID NO: 1137282 - DNA, 25 bp, Homo sapien
ctgccaaagctaattttccactcac

SEQ ID NO: 1137283 - DNA, 25 bp, Homo sapien
tctgagcaggatggatacagcaact

SEQ ID NO: 1137284 - DNA, 25 bp, Homo sapien
taatctgagcctcggtggtgacact

SEQ ID NO: 1137285 - DNA, 25 bp, Homo sapien
cgtgctctcgacatttcaaagggcc

SEQ ID NO: 1137286 - DNA, 25 bp, Homo sapien
cagcaagatcatcgcatcaggtcag

SEQ ID NO: 1137287 - DNA, 25 bp, Homo sapien
taggagaacaagaggtgctgagcac

SEQ ID NO: 1137288 - DNA, 25 bp, Homo sapien
tgattaggagaacaagaggtgctga

SEQ ID NO: 1137289 - DNA, 25 bp, Homo sapien
ggagaacaagaggtgctgagcaccc

SEQ ID NO: 1137290 - DNA, 25 bp, Homo sapien
attaggagaacaagaggtgctgagc

SEQ ID NO: 1137291 - DNA, 25 bp, Homo sapien
attggcagttttcccgcgaagacac

SEQ ID NO: 1137292 - DNA, 25 bp, Homo sapien
cttgggagcgagaagaagaaaaact

SEQ ID NO: 1137293 - DNA, 25 bp, Homo sapien
aagacactaacacgcccggcctgga

SEQ ID NO: 1137294 - DNA, 25 bp, Homo sapien
ggaggctgagagactgcccagacac

SEQ ID NO: 1137295 - DNA, 25 bp, Homo sapien
catagcagtcgccactgctgctaag

SEQ ID NO: 1137296 - DNA, 25 bp, Homo sapien
aacgggatggccttgagctgcaccg

SEQ ID NO: 1137297 - DNA, 25 bp, Homo sapien
gcaccggccgcgaaagcagcagtga

SEQ ID NO: 1137298 - DNA, 25 bp, Homo sapien
agcagtgactcgaagtcggccggct

SEQ ID NO: 1137299 - DNA, 25 bp, Homo sapien
gagaacacacaggttttcccggtgc

SEQ ID NO: 1137300 - DNA, 25 bp, Homo sapien
caagaacaagagagtccaaagctat

SEQ ID NO: 1137301 - DNA, 25 bp, Homo sapien
tcccggtgccagatttagcttgaac

SEQ ID NO: 1137302 - DNA, 25 bp, Homo sapien
gagtccaaagctatggtggagaaca

SEQ ID NO: 1137303 - DNA, 25 bp, Homo sapien
tccaacagcaatatgacacttttta

SEQ ID NO: 1137304 - DNA, 25 bp, Homo sapien
acatgacactctaagccttccattt

SEQ ID NO: 1137305 - DNA, 25 bp, Homo sapien
gggtccctccaataaagacatgaca

SEQ ID NO: 1137306 - DNA, 25 bp, Homo sapien
cagcaatttctcttgtaggagccaa

SEQ ID NO: 1137307 - DNA, 25 bp, Homo sapien
tatttatgatgtaccaaatttgtgt

SEQ ID NO: 1137308 - DNA, 25 bp, Homo sapien
tgtaccaaatttgtgtaaatctcag

SEQ ID NO: 1137309 - DNA, 25 bp, Homo sapien
caaatttgtgtaaatctcagccaat

SEQ ID NO: 1137310 - DNA, 25 bp, Homo sapien
aattgaaatatttatgatgtaccaa

SEQ ID NO: 1137311 - DNA, 25 bp, Homo sapien
tcaagaataaagaggcgtatactgc

SEQ ID NO: 1137312 - DNA, 25 bp, Homo sapien
gccttcttctaaaagcttatctgct

SEQ ID NO: 1137313 - DNA, 25 bp, Homo sapien
catcaagaataaagaggcgtatact

SEQ ID NO: 1137314 - DNA, 25 bp, Homo sapien
tctaaaagcttatctgcttcatcaa

SEQ ID NO: 1137315 - DNA, 25 bp, Homo sapien
tcactggaattcagtcttacaaaag

SEQ ID NO: 1137316 - DNA, 25 bp, Homo sapien
gtcttacaaaagtgggatctctcat

SEQ ID NO: 1137317 - DNA, 25 bp, Homo sapien
catctgtttactggcaggcaaggaa

SEQ ID NO: 1137318 - DNA, 25 bp, Homo sapien
ccaaaaattcgggataagtagctga

SEQ ID NO: 1137319 - DNA, 25 bp, Homo sapien
tataagtacctaaaagctgtacaca

SEQ ID NO: 1137320 - DNA, 25 bp, Homo sapien
ccaataatataagtacctaaaagct

SEQ ID NO: 1137321 - DNA, 25 bp, Homo sapien
caagggaaagctccagcatatcaca

SEQ ID NO: 1137322 - DNA, 25 bp, Homo sapien
atgaaacagcaagacaaaactaggc

SEQ ID NO: 1137323 - DNA, 25 bp, Homo sapien
tgccaaagggtatgaattgacaact

SEQ ID NO: 1137324 - DNA, 25 bp, Homo sapien
gctgaacagttcctgtaaatgctga

SEQ ID NO: 1137325 - DNA, 25 bp, Homo sapien
tcctcaaaaaccttatgtgccaaag

SEQ ID NO: 1137326 - DNA, 25 bp, Homo sapien
attagaaaagactaaagcttgatta

SEQ ID NO: 1137327 - DNA, 25 bp, Homo sapien
caaatattgccccatgactatcctt

SEQ ID NO: 1137328 - DNA, 25 bp, Homo sapien
gccccatgactatccttttatttca

SEQ ID NO: 1137329 - DNA, 25 bp, Homo sapien
cagatgaccttttaagttacattac

SEQ ID NO: 1137330 - DNA, 25 bp, Homo sapien
atttcacaagttccccagatgacct

SEQ ID NO: 1137331 - DNA, 25 bp, Homo sapien
gaaaggatatcagccaaatgttgtg

SEQ ID NO: 1137332 - DNA, 25 bp, Homo sapien
aagaaaggatatcagccaaatgttg

SEQ ID NO: 1137333 - DNA, 25 bp, Homo sapien
agaaaggatatcagccaaatgttgt

SEQ ID NO: 1137334 - DNA, 25 bp, Homo sapien
taactaaacaagctcatgccaacag

SEQ ID NO: 1137335 - DNA, 25 bp, Homo sapien
tagtctccccagtatctcgtgatat

SEQ ID NO: 1137336 - DNA, 25 bp, Homo sapien
tggttcattagaaaatagtctcccc

SEQ ID NO: 1137337 - DNA, 25 bp, Homo sapien
cctaaatagtgatcaggccatgcct

SEQ ID NO: 1137338 - DNA, 25 bp, Homo sapien
gcatcaagacgctgattctgattca

SEQ ID NO: 1137339 - DNA, 25 bp, Homo sapien
agtttagccatagcatcaagacgct

SEQ ID NO: 1137340 - DNA, 25 bp, Homo sapien
ggactctgcaatgaaagtgcttcag

SEQ ID NO: 1137341 - DNA, 25 bp, Homo sapien
tctgtggaaatgaggactctgcaat

SEQ ID NO: 1137342 - DNA, 25 bp, Homo sapien
gattagtcacccaaactgaatagga

SEQ ID NO: 1137343 - DNA, 25 bp, Homo sapien
aattaagaactgaatactgaggagc

SEQ ID NO: 1137344 - DNA, 25 bp, Homo sapien
ttcttgttagatacgcctacataaa

SEQ ID NO: 1137345 - DNA, 25 bp, Homo sapien
taactatacagcatggataccaatg

SEQ ID NO: 1137346 - DNA, 25 bp, Homo sapien
ttcaccttctcagcatcaatcccac

SEQ ID NO: 1137347 - DNA, 25 bp, Homo sapien
aatccaatggtacatccagatttac

SEQ ID NO: 1137348 - DNA, 25 bp, Homo sapien
gccagctctcccaatccgatgcatg

SEQ ID NO: 1137349 - DNA, 25 bp, Homo sapien
gatgcatgtatgtctcccaatccaa

SEQ ID NO: 1137350 - DNA, 25 bp, Homo sapien
tattcaaagcccacctgtcacatta

SEQ ID NO: 1137351 - DNA, 25 bp, Homo sapien
tagatccctccccttaaagaaagca

SEQ ID NO: 1137352 - DNA, 25 bp, Homo sapien
aagcccacctgtcacattatagatc

SEQ ID NO: 1137353 - DNA, 25 bp, Homo sapien
tgtcacattatagatccctcccctt

SEQ ID NO: 1137354 - DNA, 25 bp, Homo sapien
agcagagagaatgttaggtagtaaa

SEQ ID NO: 1137355 - DNA, 25 bp, Homo sapien
cagagagaatgttaggtagtaaatc

SEQ ID NO: 1137356 - DNA, 25 bp, Homo sapien
gagagaatgttaggtagtaaatcat

SEQ ID NO: 1137357 - DNA, 25 bp, Homo sapien
gcagagagaatgttaggtagtaaat

SEQ ID NO: 1137358 - DNA, 25 bp, Homo sapien
tattacatttctgggcaattctcat

SEQ ID NO: 1137359 - DNA, 25 bp, Homo sapien
tctccccggcaacagtaggtcactg

SEQ ID NO: 1137360 - DNA, 25 bp, Homo sapien
ccccggcaacagtaggtcactgtca

SEQ ID NO: 1137361 - DNA, 25 bp, Homo sapien
aaagggagaaggttgatattacatt

SEQ ID NO: 1137362 - DNA, 25 bp, Homo sapien
cagatacagaattatttctagagga

SEQ ID NO: 1137363 - DNA, 25 bp, Homo sapien
gatttgactgatagtccagatacag

SEQ ID NO: 1137364 - DNA, 25 bp, Homo sapien
tacacttgctataccatatgtatgc

SEQ ID NO: 1137365 - DNA, 25 bp, Homo sapien
tgtatgcacagcagctttaacttcc

SEQ ID NO: 1137366 - DNA, 25 bp, Homo sapien
caatctgaaggaagaccgcctgggt

SEQ ID NO: 1137367 - DNA, 25 bp, Homo sapien
tccacaggcgtagattcagagtctt

SEQ ID NO: 1137368 - DNA, 25 bp, Homo sapien
aaagaaatacgatcatccacaggcg

SEQ ID NO: 1137369 - DNA, 25 bp, Homo sapien
tccaataatatgaatgagaagcggc

SEQ ID NO: 1137370 - DNA, 25 bp, Homo sapien
tgtcccagtggaaagactcaagtct

SEQ ID NO: 1137371 - DNA, 25 bp, Homo sapien
aaaatggcaccctgaaactttcagc

SEQ ID NO: 1137372 - DNA, 25 bp, Homo sapien
agaaatgccactatacaccactgta

SEQ ID NO: 1137373 - DNA, 25 bp, Homo sapien
tataagtcgaggaggatggatatcc

SEQ ID NO: 1137374 - DNA, 25 bp, Homo sapien
acagatcaaatcaaatacctttagg

SEQ ID NO: 1137375 - DNA, 25 bp, Homo sapien
tacaagaatgcacctctatagaagg

SEQ ID NO: 1137376 - DNA, 25 bp, Homo sapien
gatctaccatgctacaaatttctac

SEQ ID NO: 1137377 - DNA, 25 bp, Homo sapien
cctaagaggattttctgatctacca

SEQ ID NO: 1137378 - DNA, 25 bp, Homo sapien
taaccttgcgatggagttctgtcag

SEQ ID NO: 1137379 - DNA, 25 bp, Homo sapien
ggtttctcaaatatctcgctacatg

SEQ ID NO: 1137380 - DNA, 25 bp, Homo sapien
catacgtgcttgtgtacagaggtac

SEQ ID NO: 1137381 - DNA, 25 bp, Homo sapien
tcatacagagtgatccgcaagtact

SEQ ID NO: 1137382 - DNA, 25 bp, Homo sapien
caactagatccaattgatgaaaaca

SEQ ID NO: 1137383 - DNA, 25 bp, Homo sapien
gacgcggtcaactctggtatgtgcc

SEQ ID NO: 1137384 - DNA, 25 bp, Homo sapien
aaatcgccaacacctgagacgcggt

SEQ ID NO: 1137385 - DNA, 25 bp, Homo sapien
ggtaagcctgtgtgcctcaagaaaa

SEQ ID NO: 1137386 - DNA, 25 bp, Homo sapien
cagcctcagccggtcattagggcac

SEQ ID NO: 1137387 - DNA, 25 bp, Homo sapien
tctgtgtgaatgcaactgcagagga

SEQ ID NO: 1137388 - DNA, 25 bp, Homo sapien
gctgccaagtgaccacacggcaatc

SEQ ID NO: 1137389 - DNA, 25 bp, Homo sapien
taagggaagtctacctcacagaaca

SEQ ID NO: 1137390 - DNA, 25 bp, Homo sapien
gatcctgaaacacatcagtaaagcc

SEQ ID NO: 1137391 - DNA, 25 bp, Homo sapien
aaggaattatgtctctacaagaacc

SEQ ID NO: 1137392 - DNA, 25 bp, Homo sapien
ggaattatgtctctacaagaaccag

SEQ ID NO: 1137393 - DNA, 25 bp, Homo sapien
gaattatgtctctacaagaaccaga

SEQ ID NO: 1137394 - DNA, 25 bp, Homo sapien
attatgtctctacaagaaccagact

SEQ ID NO: 1137395 - DNA, 25 bp, Homo sapien
tagtctgttgagtcattttaaaggg

SEQ ID NO: 1137396 - DNA, 25 bp, Homo sapien
gagactaatagtctgttgagtcatt

SEQ ID NO: 1137397 - DNA, 25 bp, Homo sapien
gttggggttgatattccattgagac

SEQ ID NO: 1137398 - DNA, 25 bp, Homo sapien
tccattgagactaatagtctgttga

SEQ ID NO: 1137399 - DNA, 25 bp, Homo sapien
agtccttaaacaggcgctgcagagc

SEQ ID NO: 1137400 - DNA, 25 bp, Homo sapien
tggtcctattgatgtccatctctag

SEQ ID NO: 1137401 - DNA, 25 bp, Homo sapien
tttaatgctttttgcagagttggca

SEQ ID NO: 1137402 - DNA, 25 bp, Homo sapien
gagcacaagtatttaatgctttttg

SEQ ID NO: 1137403 - DNA, 25 bp, Homo sapien
ggtccaaataccaatcagtgaatga

SEQ ID NO: 1137404 - DNA, 25 bp, Homo sapien
ccatttggttggtccaaataccaat

SEQ ID NO: 1137405 - DNA, 25 bp, Homo sapien
tccacattgggtgatgctggaccag

SEQ ID NO: 1137406 - DNA, 25 bp, Homo sapien
tcagtaatatcctgtccacattggg

SEQ ID NO: 1137407 - DNA, 25 bp, Homo sapien
gtttattcaagatagagccacaaat

SEQ ID NO: 1137408 - DNA, 25 bp, Homo sapien
cagtttattcaagatagagccacaa

SEQ ID NO: 1137409 - DNA, 25 bp, Homo sapien
agtttattcaagatagagccacaaa

SEQ ID NO: 1137410 - DNA, 25 bp, Homo sapien
ccagtttattcaagatagagccaca

SEQ ID NO: 1137411 - DNA, 25 bp, Homo sapien
ccagcatcggcctttgggtgcaacc

SEQ ID NO: 1137412 - DNA, 25 bp, Homo sapien
gattcgctgttagctccagggctgg

SEQ ID NO: 1137413 - DNA, 25 bp, Homo sapien
tgggtcacagtgcaaccaagaggct

SEQ ID NO: 1137414 - DNA, 25 bp, Homo sapien
caaggtattcggtcccagcatgaga

SEQ ID NO: 1137415 - DNA, 25 bp, Homo sapien
agtgtcctgggcgaatattatcatc

SEQ ID NO: 1137416 - DNA, 25 bp, Homo sapien
ttatcatcttccacatgtgctatga

SEQ ID NO: 1137417 - DNA, 25 bp, Homo sapien
cgagcctaagacagctagagccttc

SEQ ID NO: 1137418 - DNA, 25 bp, Homo sapien
cccggctgtggctaggcgagcctaa

SEQ ID NO: 1137419 - DNA, 25 bp, Homo sapien
cagcattagcgctcaggttggcccc

SEQ ID NO: 1137420 - DNA, 25 bp, Homo sapien
cacctacctcgttgactgttgcaag

SEQ ID NO: 1137421 - DNA, 25 bp, Homo sapien
ttcatatgaagctcttgctgccggg

SEQ ID NO: 1137422 - DNA, 25 bp, Homo sapien
taacatggaagtatcaatagcacct

SEQ ID NO: 1137423 - DNA, 25 bp, Homo sapien
aaactgctgcttcactcttccagcc

SEQ ID NO: 1137424 - DNA, 25 bp, Homo sapien
acacccccaaactgctgcttcactc

SEQ ID NO: 1137425 - DNA, 25 bp, Homo sapien
cacccccaaactgctgcttcactct

SEQ ID NO: 1137426 - DNA, 25 bp, Homo sapien
cccaaactgctgcttcactcttcca

SEQ ID NO: 1137427 - DNA, 25 bp, Homo sapien
cttggaaatcgttctggctgctaca

SEQ ID NO: 1137428 - DNA, 25 bp, Homo sapien
ctgtcttggaaatcgttctggctgc

SEQ ID NO: 1137429 - DNA, 25 bp, Homo sapien
cactgtcttggaaatcgttctggct

SEQ ID NO: 1137430 - DNA, 25 bp, Homo sapien
gtcttggaaatcgttctggctgcta

SEQ ID NO: 1137431 - DNA, 25 bp, Homo sapien
ttaattacctcctggacccagtatg

SEQ ID NO: 1137432 - DNA, 25 bp, Homo sapien
gacccagtatgatgtctgtttgctg

SEQ ID NO: 1137433 - DNA, 25 bp, Homo sapien
gaagcccatcagtcttcacagcaac

SEQ ID NO: 1137434 - DNA, 25 bp, Homo sapien
agaagcccatcagtcttcacagcaa

SEQ ID NO: 1137435 - DNA, 25 bp, Homo sapien
gagggaagctggagcattctgttcc

SEQ ID NO: 1137436 - DNA, 25 bp, Homo sapien
tttccccttcgctgtcctgggatcc

SEQ ID NO: 1137437 - DNA, 25 bp, Homo sapien
ggaagctggagcattctgttcccgc

SEQ ID NO: 1137438 - DNA, 25 bp, Homo sapien
agctggagcattctgttcccgccat

SEQ ID NO: 1137439 - DNA, 25 bp, Homo sapien
agtcacttcagggtggagatcagca

SEQ ID NO: 1137440 - DNA, 25 bp, Homo sapien
gtcacttcagggtggagatcagcac

SEQ ID NO: 1137441 - DNA, 25 bp, Homo sapien
taagagtcgagagtcactgaggagt

SEQ ID NO: 1137442 - DNA, 25 bp, Homo sapien
gctgtgtctagacagtgttcaggcc

SEQ ID NO: 1137443 - DNA, 25 bp, Homo sapien
cactttgggtagtttgctgtgtcta

SEQ ID NO: 1137444 - DNA, 25 bp, Homo sapien
ggtattgtagcagcacccactttgg

SEQ ID NO: 1137445 - DNA, 25 bp, Homo sapien
tgtagatgacgcctgttgccagcat

SEQ ID NO: 1137446 - DNA, 25 bp, Homo sapien
ttatgtagatgacgcctgttgccag

SEQ ID NO: 1137447 - DNA, 25 bp, Homo sapien
tgggccaggcttatgtagatgacgc

SEQ ID NO: 1137448 - DNA, 25 bp, Homo sapien
ccaggcttatgtagatgacgcctgt

SEQ ID NO: 1137449 - DNA, 25 bp, Homo sapien
aggccagtgctagccagcagtcacc

SEQ ID NO: 1137450 - DNA, 25 bp, Homo sapien
aaccagtgctcataagtaagctctg

SEQ ID NO: 1137451 - DNA, 25 bp, Homo sapien
gctcaggatccaccatgtgcaaggg

SEQ ID NO: 1137452 - DNA, 25 bp, Homo sapien
gacacctagcaatgcagtcacttgg

SEQ ID NO: 1137453 - DNA, 25 bp, Homo sapien
cagaccaagatgaagattgggttgc

SEQ ID NO: 1137454 - DNA, 25 bp, Homo sapien
gccaaggacactttcagaccaagat

SEQ ID NO: 1137455 - DNA, 25 bp, Homo sapien
cgaatgtctggctgttcctcgaaca

SEQ ID NO: 1137456 - DNA, 25 bp, Homo sapien
gggccttagcattcagcaccatggc

SEQ ID NO: 1137457 - DNA, 25 bp, Homo sapien
actgggaccaaaagaggcattagcc

SEQ ID NO: 1137458 - DNA, 25 bp, Homo sapien
ttcggacactgggaccaaaagaggc

SEQ ID NO: 1137459 - DNA, 25 bp, Homo sapien
ctgaagcttcttcggacactgggac

SEQ ID NO: 1137460 - DNA, 25 bp, Homo sapien
gaccaaaagaggcattagccagatg

SEQ ID NO: 1137461 - DNA, 25 bp, Homo sapien
gcatattaaccatacttcccagtga

SEQ ID NO: 1137462 - DNA, 25 bp, Homo sapien
catcagtggcaagggggctaatcta

SEQ ID NO: 1137463 - DNA, 25 bp, Homo sapien
ttctcccctgcttgtgccagatatt

SEQ ID NO: 1137464 - DNA, 25 bp, Homo sapien
caagggggctaatctatatttgcat

SEQ ID NO: 1137465 - DNA, 25 bp, Homo sapien
aaggtgctgcgggtagattccaccc

SEQ ID NO: 1137466 - DNA, 25 bp, Homo sapien
catcccaaaggtgctgcgggtagat

SEQ ID NO: 1137467 - DNA, 25 bp, Homo sapien
cccaaaggtgctgcgggtagattcc

SEQ ID NO: 1137468 - DNA, 25 bp, Homo sapien
ctcacatcccaaaggtgctgcgggt

SEQ ID NO: 1137469 - DNA, 25 bp, Homo sapien
gatatttaaatgtttccacggtaga

SEQ ID NO: 1137470 - DNA, 25 bp, Homo sapien
ttctgctccccaaccaaatgtgcaa

SEQ ID NO: 1137471 - DNA, 25 bp, Homo sapien
tagcaggagcgaaggcacactgcag

SEQ ID NO: 1137472 - DNA, 25 bp, Homo sapien
tgtgcaacgaaacattcaccaggga

SEQ ID NO: 1137473 - DNA, 25 bp, Homo sapien
ccctgtttggagcagtgattaatac

SEQ ID NO: 1137474 - DNA, 25 bp, Homo sapien
agtccctgtttggagcagtgattaa

SEQ ID NO: 1137475 - DNA, 25 bp, Homo sapien
gagcagtgattaatacaggtttaaa

SEQ ID NO: 1137476 - DNA, 25 bp, Homo sapien
gtttggagcagtgattaatacaggt

SEQ ID NO: 1137477 - DNA, 25 bp, Homo sapien
gtttgcaggaggctaggacacacca

SEQ ID NO: 1137478 - DNA, 25 bp, Homo sapien
gaagagctggcagcgtttccgctga

SEQ ID NO: 1137479 - DNA, 25 bp, Homo sapien
tcctgctgctgaataagcctggaag

SEQ ID NO: 1137480 - DNA, 25 bp, Homo sapien
tagcgcattctgagcatatggagaa

SEQ ID NO: 1137481 - DNA, 25 bp, Homo sapien
gaatcaagctttcttcgaagaaatc

SEQ ID NO: 1137482 - DNA, 25 bp, Homo sapien
cttttccacacttgatgtggcccca

SEQ ID NO: 1137483 - DNA, 25 bp, Homo sapien
ttcctcctggcagtgaatcaagctt

SEQ ID NO: 1137484 - DNA, 25 bp, Homo sapien
gccccagatacaggactcgtcatac

SEQ ID NO: 1137485 - DNA, 25 bp, Homo sapien
tgcagataagggtctctaagcaggg

SEQ ID NO: 1137486 - DNA, 25 bp, Homo sapien
tctatcagagccaatcggcggcagg

SEQ ID NO: 1137487 - DNA, 25 bp, Homo sapien
gcggctgtcacgcagcttgccgtcg

SEQ ID NO: 1137488 - DNA, 25 bp, Homo sapien
ccaccaagcgtagcatcgattctcg

SEQ ID NO: 1137489 - DNA, 25 bp, Homo sapien
aggaggtggtgcagatgttcgggcg

SEQ ID NO: 1137490 - DNA, 25 bp, Homo sapien
gaggtggtgcagatgttcgggcgtg

SEQ ID NO: 1137491 - DNA, 25 bp, Homo sapien
aggtggtgcagatgttcgggcgtgt

SEQ ID NO: 1137492 - DNA, 25 bp, Homo sapien
ggaggtggtgcagatgttcgggcgt

SEQ ID NO: 1137493 - DNA, 25 bp, Homo sapien
tggctgaacacgagggaacaggagc

SEQ ID NO: 1137494 - DNA, 25 bp, Homo sapien
tctctattgcacacttgtgccccat

SEQ ID NO: 1137495 - DNA, 25 bp, Homo sapien
atggagatcagttcatcaatctcta

SEQ ID NO: 1137496 - DNA, 25 bp, Homo sapien
tgtcatcccactgagcaaattctgg

SEQ ID NO: 1137497 - DNA, 25 bp, Homo sapien
tgacagctgacagccgatacaaggg

SEQ ID NO: 1137498 - DNA, 25 bp, Homo sapien
cttgtcatgacagctgacagccgat

SEQ ID NO: 1137499 - DNA, 25 bp, Homo sapien
gacagccgatacaagggcagttgat

SEQ ID NO: 1137500 - DNA, 25 bp, Homo sapien
ctgacagccgatacaagggcagttg

SEQ ID NO: 1137501 - DNA, 25 bp, Homo sapien
taggcagggtactatcattgtgccc

SEQ ID NO: 1137502 - DNA, 25 bp, Homo sapien
ttctgtgttaccgtttgctgtttgg

SEQ ID NO: 1137503 - DNA, 25 bp, Homo sapien
tctgactctcgatcccttggccgag

SEQ ID NO: 1137504 - DNA, 25 bp, Homo sapien
caataacctgtcactcagcaaagag

SEQ ID NO: 1137505 - DNA, 25 bp, Homo sapien
cttggaggtcttgacaacaggactt

SEQ ID NO: 1137506 - DNA, 25 bp, Homo sapien
ttggaggtcttgacaacaggacttt

SEQ ID NO: 1137507 - DNA, 25 bp, Homo sapien
ccttggaggtcttgacaacaggact

SEQ ID NO: 1137508 - DNA, 25 bp, Homo sapien
tgagagatgttaatcggagagagac

SEQ ID NO: 1137509 - DNA, 25 bp, Homo sapien
tccccatctcataaaggtgaaaaaa

SEQ ID NO: 1137510 - DNA, 25 bp, Homo sapien
aatcggagagagaccacacagctgt

SEQ ID NO: 1137511 - DNA, 25 bp, Homo sapien
tgtggtattataatccccatctcat

SEQ ID NO: 1137512 - DNA, 25 bp, Homo sapien
ggcacgtgggcatgcattagctcat

SEQ ID NO: 1137513 - DNA, 25 bp, Homo sapien
aggtgggcacgtgggcatgcattag

SEQ ID NO: 1137514 - DNA, 25 bp, Homo sapien
tgggcacgtgggcatgcattagctc

SEQ ID NO: 1137515 - DNA, 25 bp, Homo sapien
catgaggtgggcacgtgggcatgca

SEQ ID NO: 1137516 - DNA, 25 bp, Homo sapien
aaggccattccgtgcccttgggtgg

SEQ ID NO: 1137517 - DNA, 25 bp, Homo sapien
ttctgtggatggcagtgcgaagtca

SEQ ID NO: 1137518 - DNA, 25 bp, Homo sapien
ggcagtgcgaagtcaacagccattc

SEQ ID NO: 1137519 - DNA, 25 bp, Homo sapien
caaagagaatgccaagctgtcaacc

SEQ ID NO: 1137520 - DNA, 25 bp, Homo sapien
atttgcaaaggcacttgagaatgat

SEQ ID NO: 1137521 - DNA, 25 bp, Homo sapien
ggcacttgagaatgatgttgtgctt

SEQ ID NO: 1137522 - DNA, 25 bp, Homo sapien
ttgcaaaggcacttgagaatgatgt

SEQ ID NO: 1137523 - DNA, 25 bp, Homo sapien
aaaggcacttgagaatgatgttgtg

SEQ ID NO: 1137524 - DNA, 25 bp, Homo sapien
tgtggcctgggcaatgtcctggtta

SEQ ID NO: 1137525 - DNA, 25 bp, Homo sapien
gttaggagacctctagaagctgtcc

SEQ ID NO: 1137526 - DNA, 25 bp, Homo sapien
tgttggccgccctgcagatgagtat

SEQ ID NO: 1137527 - DNA, 25 bp, Homo sapien
tatctccccagggactaagctgctg

SEQ ID NO: 1137528 - DNA, 25 bp, Homo sapien
cctgggtaaatgaccagttctggtc

SEQ ID NO: 1137529 - DNA, 25 bp, Homo sapien
tcatataggtctggctcggcctggg

SEQ ID NO: 1137530 - DNA, 25 bp, Homo sapien
ctcggcctgggtaaatgaccagttc

SEQ ID NO: 1137531 - DNA, 25 bp, Homo sapien
ttttgatgtatcatataggtctggc

SEQ ID NO: 1137532 - DNA, 25 bp, Homo sapien
cctgggggcaaagctgtccttcatt

SEQ ID NO: 1137533 - DNA, 25 bp, Homo sapien
tcaggtggtcattggtccagtggcc

SEQ ID NO: 1137534 - DNA, 25 bp, Homo sapien
gtggtcattggtccagtggcctggg

SEQ ID NO: 1137535 - DNA, 25 bp, Homo sapien
ggcaaagctgtccttcattccctgt

SEQ ID NO: 1137536 - DNA, 25 bp, Homo sapien
gatggtatacatttggggactgcag

SEQ ID NO: 1137537 - DNA, 25 bp, Homo sapien
caatttccaatttctgttacgtgtg

SEQ ID NO: 1137538 - DNA, 25 bp, Homo sapien
tgtgtttccgtgtcaccacatgcct

SEQ ID NO: 1137539 - DNA, 25 bp, Homo sapien
cagtttaggattagtggagatgagt

SEQ ID NO: 1137540 - DNA, 25 bp, Homo sapien
cacgtcctagtaaaaccttggcatt

SEQ ID NO: 1137541 - DNA, 25 bp, Homo sapien
ctgttgtgcctgttgcaggaattca

SEQ ID NO: 1137542 - DNA, 25 bp, Homo sapien
cattggctggaaatggggccgcact

SEQ ID NO: 1137543 - DNA, 25 bp, Homo sapien
catttgtaaggcgtccacgtcctag

SEQ ID NO: 1137544 - DNA, 25 bp, Homo sapien
cctcgcgcgcggagtcactccccct

SEQ ID NO: 1137545 - DNA, 25 bp, Homo sapien
gcgcggagtcactccccctcgcacg

SEQ ID NO: 1137546 - DNA, 25 bp, Homo sapien
ctcgcacgccctcgccctgggcacc

SEQ ID NO: 1137547 - DNA, 25 bp, Homo sapien
ccgcggcgagactccgggtcctcct

SEQ ID NO: 1137548 - DNA, 25 bp, Homo sapien
cgtcggtacactccgccacctccag

SEQ ID NO: 1137549 - DNA, 25 bp, Homo sapien
gctcacacccgcgtcggtacactcc

SEQ ID NO: 1137550 - DNA, 25 bp, Homo sapien
ccgtgcccaccctcgctggcacacg

SEQ ID NO: 1137551 - DNA, 25 bp, Homo sapien
cttgccacgctcacccccgtgccca

SEQ ID NO: 1137552 - DNA, 25 bp, Homo sapien
tgtgatctctcaagccaagcgttcc

SEQ ID NO: 1137553 - DNA, 25 bp, Homo sapien
ggtgagagttcacgctcccaagtcc

SEQ ID NO: 1137554 - DNA, 25 bp, Homo sapien
cagactcccggtctaggtagtgggt

SEQ ID NO: 1137555 - DNA, 25 bp, Homo sapien
gaatctcgaccttctgatggtgcct

SEQ ID NO: 1137556 - DNA, 25 bp, Homo sapien
gaagaatcctcatgtgtgcacagct

SEQ ID NO: 1137557 - DNA, 25 bp, Homo sapien
gcaacgggaggaaatctagtgccct

SEQ ID NO: 1137558 - DNA, 25 bp, Homo sapien
tgaaatacaccctgagctcgcgggt

SEQ ID NO: 1137559 - DNA, 25 bp, Homo sapien
gaaaggctgtaaccctcagaggtac

SEQ ID NO: 1137560 - DNA, 25 bp, Homo sapien
ggacttgcataaactctccagggaa

SEQ ID NO: 1137561 - DNA, 25 bp, Homo sapien
tgattgcagaaggattaaggccact

SEQ ID NO: 1137562 - DNA, 25 bp, Homo sapien
ggtccttgccataaacagcttgaag

SEQ ID NO: 1137563 - DNA, 25 bp, Homo sapien
tctgagtgaacttgaaaccatggac

SEQ ID NO: 1137564 - DNA, 25 bp, Homo sapien
ttatggtgagccgtcagcttccagc

SEQ ID NO: 1137565 - DNA, 25 bp, Homo sapien
tcttcctgagccaagccatagtttg

SEQ ID NO: 1137566 - DNA, 25 bp, Homo sapien
tataacccattttgctaggtgaggg

SEQ ID NO: 1137567 - DNA, 25 bp, Homo sapien
ggtctatccagagctcatgttctca

SEQ ID NO: 1137568 - DNA, 25 bp, Homo sapien
tgtcatgctatctcaggcattggag

SEQ ID NO: 1137569 - DNA, 25 bp, Homo sapien
gccaccatggcgatttattgtcatg

SEQ ID NO: 1137570 - DNA, 25 bp, Homo sapien
gcattggagtcactgcttctatctg

SEQ ID NO: 1137571 - DNA, 25 bp, Homo sapien
caatagatttgatttactagttatg

SEQ ID NO: 1137572 - DNA, 25 bp, Homo sapien
accagaatggagattaggctccaga

SEQ ID NO: 1137573 - DNA, 25 bp, Homo sapien
ccagaatggagattaggctccagac

SEQ ID NO: 1137574 - DNA, 25 bp, Homo sapien
cagaatggagattaggctccagaca

SEQ ID NO: 1137575 - DNA, 25 bp, Homo sapien
tccaatgcgtctatgcagaaaggag

SEQ ID NO: 1137576 - DNA, 25 bp, Homo sapien
gatcaggaaacacatgtaggcttcc

SEQ ID NO: 1137577 - DNA, 25 bp, Homo sapien
cagaaaggagctaaggcagcgaaga

SEQ ID NO: 1137578 - DNA, 25 bp, Homo sapien
tgaggaagacctctggatcaggaaa

SEQ ID NO: 1137579 - DNA, 25 bp, Homo sapien
ccagtgagagatgaccgaggatatg

SEQ ID NO: 1137580 - DNA, 25 bp, Homo sapien
caaccccagtgagagatgaccgagg

SEQ ID NO: 1137581 - DNA, 25 bp, Homo sapien
ccgaggatatgaggcagctgcctct

SEQ ID NO: 1137582 - DNA, 25 bp, Homo sapien
agatgaccgaggatatgaggcagct

SEQ ID NO: 1137583 - DNA, 25 bp, Homo sapien
tctcaaagtgcctgatctggagtct

SEQ ID NO: 1137584 - DNA, 25 bp, Homo sapien
aagtgcctgatctggagtcttggaa

SEQ ID NO: 1137585 - DNA, 25 bp, Homo sapien
caaagtgcctgatctggagtcttgg

SEQ ID NO: 1137586 - DNA, 25 bp, Homo sapien
agcactctcaaagtgcctgatctgg

SEQ ID NO: 1137587 - DNA, 25 bp, Homo sapien
gaacctggtctgcagcactcatttg

SEQ ID NO: 1137588 - DNA, 25 bp, Homo sapien
accgagtcacattcagaacctggtc

SEQ ID NO: 1137589 - DNA, 25 bp, Homo sapien
tcaccgagtcacattcagaacctgg

SEQ ID NO: 1137590 - DNA, 25 bp, Homo sapien
ctgtcaccgagtcacattcagaacc

SEQ ID NO: 1137591 - DNA, 25 bp, Homo sapien
gagttacgagggagattcaacccta

SEQ ID NO: 1137592 - DNA, 25 bp, Homo sapien
gaaaggttgtccctgtagctagcag

SEQ ID NO: 1137593 - DNA, 25 bp, Homo sapien
aaggagattgaaaagaaccactgac

SEQ ID NO: 1137594 - DNA, 25 bp, Homo sapien
cattagccacttatgtgtaaagcct

SEQ ID NO: 1137595 - DNA, 25 bp, Homo sapien
tctccctctttgtctcatagtgaac

SEQ ID NO: 1137596 - DNA, 25 bp, Homo sapien
catagtgaacaagctgatgtgggct

SEQ ID NO: 1137597 - DNA, 25 bp, Homo sapien
gcacgtatacaggttgtggcaactt

SEQ ID NO: 1137598 - DNA, 25 bp, Homo sapien
ccagcttcagcacgtatacaggttg

SEQ ID NO: 1137599 - DNA, 25 bp, Homo sapien
ctctcgaaggggtcttattatgcca

SEQ ID NO: 1137600 - DNA, 25 bp, Homo sapien
gggtcttattatgccagggtctgag

SEQ ID NO: 1137601 - DNA, 25 bp, Homo sapien
gaaggggtcttattatgccagggtc

SEQ ID NO: 1137602 - DNA, 25 bp, Homo sapien
tcgaaggggtcttattatgccaggg

SEQ ID NO: 1137603 - DNA, 25 bp, Homo sapien
caagggtgggcgccggtccagtgga

SEQ ID NO: 1137604 - DNA, 25 bp, Homo sapien
tggagaagatgtggcagcaagggtg

SEQ ID NO: 1137605 - DNA, 25 bp, Homo sapien
ggcagcaagggtgggcgccggtcca

SEQ ID NO: 1137606 - DNA, 25 bp, Homo sapien
ggtgggcgccggtccagtggagccc

SEQ ID NO: 1137607 - DNA, 25 bp, Homo sapien
cacacaggattggtggctgtgcctg

SEQ ID NO: 1137608 - DNA, 25 bp, Homo sapien
ggctgtgcctggtagatgatatagg

SEQ ID NO: 1137609 - DNA, 25 bp, Homo sapien
gtggctgtgcctggtagatgatata

SEQ ID NO: 1137610 - DNA, 25 bp, Homo sapien
ccacacaggattggtggctgtgcct

SEQ ID NO: 1137611 - DNA, 25 bp, Homo sapien
tagtgccaaaagctgaggctccacg

SEQ ID NO: 1137612 - DNA, 25 bp, Homo sapien
cacatccagcctgctctgtttcagt

SEQ ID NO: 1137613 - DNA, 25 bp, Homo sapien
aattcgacctatggccaggatgcag

SEQ ID NO: 1137614 - DNA, 25 bp, Homo sapien
ggctccacgaagaattcgacctatg

SEQ ID NO: 1137615 - DNA, 25 bp, Homo sapien
cggctgttaagaattagctgctgca

SEQ ID NO: 1137616 - DNA, 25 bp, Homo sapien
tataccttccttatgtgggagcaga

SEQ ID NO: 1137617 - DNA, 25 bp, Homo sapien
gcagaaacagagtgcctggacccat

SEQ ID NO: 1137618 - DNA, 25 bp, Homo sapien
gcatctgaattataccttccttatg

SEQ ID NO: 1137619 - DNA, 25 bp, Homo sapien
gaattaatggggatcatttgtctcc

SEQ ID NO: 1137620 - DNA, 25 bp, Homo sapien
ctgagggaattaatggggatcattt

SEQ ID NO: 1137621 - DNA, 25 bp, Homo sapien
tggggatcatttgtctccctagagc

SEQ ID NO: 1137622 - DNA, 25 bp, Homo sapien
gatcatttgtctccctagagcagcc

SEQ ID NO: 1137623 - DNA, 25 bp, Homo sapien
ctgatggcatagcagggtggtatga

SEQ ID NO: 1137624 - DNA, 25 bp, Homo sapien
ctcaggtggagttaggccagatctg

SEQ ID NO: 1137625 - DNA, 25 bp, Homo sapien
gctcggtgtcttaactcctttctgc

SEQ ID NO: 1137626 - DNA, 25 bp, Homo sapien
ctggggctcggtgtcttaactcctt

SEQ ID NO: 1137627 - DNA, 25 bp, Homo sapien
caggtggagttaggccagatctggg

SEQ ID NO: 1137628 - DNA, 25 bp, Homo sapien
actccatcttcggtcccagtgtggc

SEQ ID NO: 1137629 - DNA, 25 bp, Homo sapien
ctccatcttcggtcccagtgtggca

SEQ ID NO: 1137630 - DNA, 25 bp, Homo sapien
caactccatcttcggtcccagtgtg

SEQ ID NO: 1137631 - DNA, 25 bp, Homo sapien
aacaactccatcttcggtcccagtg

SEQ ID NO: 1137632 - DNA, 25 bp, Homo sapien
catctcctgtgcaggtagacactgt

SEQ ID NO: 1137633 - DNA, 25 bp, Homo sapien
ccaggtggttcaccatagaaaccac

SEQ ID NO: 1137634 - DNA, 25 bp, Homo sapien
tagctgccaaaactgccaatacatc

SEQ ID NO: 1137635 - DNA, 25 bp, Homo sapien
ggtggttcaccatagaaaccacatc

SEQ ID NO: 1137636 - DNA, 25 bp, Homo sapien
tgtccgatatgccttttcatggctc

SEQ ID NO: 1137637 - DNA, 25 bp, Homo sapien
cagatggaactgtccgatatgcctt

SEQ ID NO: 1137638 - DNA, 25 bp, Homo sapien
atccttgggtgccagatggaactgt

SEQ ID NO: 1137639 - DNA, 25 bp, Homo sapien
ggtgccagatggaactgtccgatat

SEQ ID NO: 1137640 - DNA, 25 bp, Homo sapien
catgttgctcctgagggcaattgag

SEQ ID NO: 1137641 - DNA, 25 bp, Homo sapien
ctagtcatgttgctcctgagggcaa

SEQ ID NO: 1137642 - DNA, 25 bp, Homo sapien
caattgaggtaaaaccaatagtggc

SEQ ID NO: 1137643 - DNA, 25 bp, Homo sapien
tcctgagggcaattgaggtaaaacc

SEQ ID NO: 1137644 - DNA, 25 bp, Homo sapien
ctggctgggaatcaggagacttgtc

SEQ ID NO: 1137645 - DNA, 25 bp, Homo sapien
cggctggctgggaatcaggagactt

SEQ ID NO: 1137646 - DNA, 25 bp, Homo sapien
gcggctggctgggaatcaggagact

SEQ ID NO: 1137647 - DNA, 25 bp, Homo sapien
gctgcggctggctgggaatcaggag

SEQ ID NO: 1137648 - DNA, 25 bp, Homo sapien
ttggccggcctttgatgcagcagct

SEQ ID NO: 1137649 - DNA, 25 bp, Homo sapien
tggcaagaatgaactacagttggcc

SEQ ID NO: 1137650 - DNA, 25 bp, Homo sapien
catggggcagcccaacctttggcaa

SEQ ID NO: 1137651 - DNA, 25 bp, Homo sapien
gagtatctgtcaggtactgtctgag

SEQ ID NO: 1137652 - DNA, 25 bp, Homo sapien
tggacgtcaagttgatgcatgtttg

SEQ ID NO: 1137653 - DNA, 25 bp, Homo sapien
tgttcatcggctgtgatggacgtca

SEQ ID NO: 1137654 - DNA, 25 bp, Homo sapien
ctgtgatggacgtcaagttgatgca

SEQ ID NO: 1137655 - DNA, 25 bp, Homo sapien
caccacctggctgttcatcggctgt

SEQ ID NO: 1137656 - DNA, 25 bp, Homo sapien
agttgtccatgcctggtggaggctc

SEQ ID NO: 1137657 - DNA, 25 bp, Homo sapien
ggtggaggctctgttggcagtgttg

SEQ ID NO: 1137658 - DNA, 25 bp, Homo sapien
caggcccactaagctgcagttgtcc

SEQ ID NO: 1137659 - DNA, 25 bp, Homo sapien
agctgtgtggatcaggcccactaag

SEQ ID NO: 1137660 - DNA, 25 bp, Homo sapien
tacatgaggtttatcagaggcaaga

SEQ ID NO: 1137661 - DNA, 25 bp, Homo sapien
ccgagtagggagcattgtgccccat

SEQ ID NO: 1137662 - DNA, 25 bp, Homo sapien
tgaccttgggtaaaatgaccgagta

SEQ ID NO: 1137663 - DNA, 25 bp, Homo sapien
tggctacatgaggtttatcagaggc

SEQ ID NO: 1137664 - DNA, 25 bp, Homo sapien
tctgccagctaaatcaaccttcact

SEQ ID NO: 1137665 - DNA, 25 bp, Homo sapien
catctatacttctgccagctaaatc

SEQ ID NO: 1137666 - DNA, 25 bp, Homo sapien
caaccttcactttcaggcctgaaaa

SEQ ID NO: 1137667 - DNA, 25 bp, Homo sapien
aaatcaaccttcactttcaggcctg

SEQ ID NO: 1137668 - DNA, 25 bp, Homo sapien
gacctgtaaccaaggcattcaccct

SEQ ID NO: 1137669 - DNA, 25 bp, Homo sapien
ctgagacccggacctgtaaccaagg

SEQ ID NO: 1137670 - DNA, 25 bp, Homo sapien
gaaagcatttcaggccaaaagtggt

SEQ ID NO: 1137671 - DNA, 25 bp, Homo sapien
ccttggaaaacctgtaggtctctga

SEQ ID NO: 1137672 - DNA, 25 bp, Homo sapien
ctctgctaagctgccgggtggtcac

SEQ ID NO: 1137673 - DNA, 25 bp, Homo sapien
ctaagctgccgggtggtcacagctg

SEQ ID NO: 1137674 - DNA, 25 bp, Homo sapien
ccatggagctctgctaagctgccgg

SEQ ID NO: 1137675 - DNA, 25 bp, Homo sapien
agctctgctaagctgccgggtggtc

SEQ ID NO: 1137676 - DNA, 25 bp, Homo sapien
gtgcatacagcaagaggacaagaat

SEQ ID NO: 1137677 - DNA, 25 bp, Homo sapien
ctgtgcatacagcaagaggacaaga

SEQ ID NO: 1137678 - DNA, 25 bp, Homo sapien
gcatacagcaagaggacaagaatga

SEQ ID NO: 1137679 - DNA, 25 bp, Homo sapien
tgtgcatacagcaagaggacaagaa

SEQ ID NO: 1137680 - DNA, 25 bp, Homo sapien
ccagatgccatgtaggaagtttatc

SEQ ID NO: 1137681 - DNA, 25 bp, Homo sapien
ggacacgggcccagatgccatgtag

SEQ ID NO: 1137682 - DNA, 25 bp, Homo sapien
tgaaaatgcacagccactcccattt

SEQ ID NO: 1137683 - DNA, 25 bp, Homo sapien
cccattctgtgagcagccactgctg

SEQ ID NO: 1137684 - DNA, 25 bp, Homo sapien
agaaatagcattcatgtcatctgtg

SEQ ID NO: 1137685 - DNA, 25 bp, Homo sapien
tcaccgctagtctggctcttagtca

SEQ ID NO: 1137686 - DNA, 25 bp, Homo sapien
gctagtctggctcttagtcactagg

SEQ ID NO: 1137687 - DNA, 25 bp, Homo sapien
tgttggtcatcaccgctagtctggc

SEQ ID NO: 1137688 - DNA, 25 bp, Homo sapien
ccttcctgttggtcatcaccgctag

SEQ ID NO: 1137689 - DNA, 25 bp, Homo sapien
cccactccagagatttgcgttccaa

SEQ ID NO: 1137690 - DNA, 25 bp, Homo sapien
actccagagatttgcgttccaatct

SEQ ID NO: 1137691 - DNA, 25 bp, Homo sapien
gctttttaccctgcatcaaataacc

SEQ ID NO: 1137692 - DNA, 25 bp, Homo sapien
tttttaccctgcatcaaataacctc

SEQ ID NO: 1137693 - DNA, 25 bp, Homo sapien
cacttggaagaactgatggcatcat

SEQ ID NO: 1137694 - DNA, 25 bp, Homo sapien
tgatggcatcatgtcaggactgagg

SEQ ID NO: 1137695 - DNA, 25 bp, Homo sapien
tgtccaacttggctcgtgtttcctc

SEQ ID NO: 1137696 - DNA, 25 bp, Homo sapien
tgcaaatggtatagcccagcccctt

SEQ ID NO: 1137697 - DNA, 25 bp, Homo sapien
gttcatccaggtcaaaaaagcactg

SEQ ID NO: 1137698 - DNA, 25 bp, Homo sapien
gcaaacataatgaacgtcagctgag

SEQ ID NO: 1137699 - DNA, 25 bp, Homo sapien
tcaaaggagctggtagcaaacataa

SEQ ID NO: 1137700 - DNA, 25 bp, Homo sapien
ttccaaaatgtaagactgtcccaat

SEQ ID NO: 1137701 - DNA, 25 bp, Homo sapien
tttcaaagtgagtaagtggcaaaaa

SEQ ID NO: 1137702 - DNA, 25 bp, Homo sapien
tcaagttaattgtagcccttgtcat

SEQ ID NO: 1137703 - DNA, 25 bp, Homo sapien
aatttcaagttaattgtagcccttg

SEQ ID NO: 1137704 - DNA, 25 bp, Homo sapien
tcaaagtgagtaagtggcaaaaata

SEQ ID NO: 1137705 - DNA, 25 bp, Homo sapien
ttctgttggtctggactgcttgcca

SEQ ID NO: 1137706 - DNA, 25 bp, Homo sapien
tagagttatgattgctgaagctgcc

SEQ ID NO: 1137707 - DNA, 25 bp, Homo sapien
cctacaagtagaagcaactctagct

SEQ ID NO: 1137708 - DNA, 25 bp, Homo sapien
ggtaagccaggatttcatccccaca

SEQ ID NO: 1137709 - DNA, 25 bp, Homo sapien
tctctgtaattcagtctcaattact

SEQ ID NO: 1137710 - DNA, 25 bp, Homo sapien
cagtctcaattactccatggtgctc

SEQ ID NO: 1137711 - DNA, 25 bp, Homo sapien
ctcaattactccatggtgctccaca

SEQ ID NO: 1137712 - DNA, 25 bp, Homo sapien
gtctcaattactccatggtgctcca

SEQ ID NO: 1137713 - DNA, 25 bp, Homo sapien
gcatgctctctctgtgtcgggcact

SEQ ID NO: 1137714 - DNA, 25 bp, Homo sapien
cactgtgaggagtgctgcacagggt

SEQ ID NO: 1137715 - DNA, 25 bp, Homo sapien
gtgctgcgctgtcccaggacaccat

SEQ ID NO: 1137716 - DNA, 25 bp, Homo sapien
cacagggtgaaatgtgctgcgctgt

SEQ ID NO: 1137717 - DNA, 25 bp, Homo sapien
aagacacctgatgcagttggagcca

SEQ ID NO: 1137718 - DNA, 25 bp, Homo sapien
tctgacataatgaaggccctggcca

SEQ ID NO: 1137719 - DNA, 25 bp, Homo sapien
gatcaacactgagctcccaaatgag

SEQ ID NO: 1137720 - DNA, 25 bp, Homo sapien
ctgagaaggttgaatgctgggtccc

SEQ ID NO: 1137721 - DNA, 25 bp, Homo sapien
tttctggggtttcttggagactgac

SEQ ID NO: 1137722 - DNA, 25 bp, Homo sapien
tgtgacttctggtggccagccttgg

SEQ ID NO: 1137723 - DNA, 25 bp, Homo sapien
cgctgtgacttctggtggccagcct

SEQ ID NO: 1137724 - DNA, 25 bp, Homo sapien
tttcttggagactgactagacccat

SEQ ID NO: 1137725 - DNA, 25 bp, Homo sapien
tcagccaatatgtggagcacccaca

SEQ ID NO: 1137726 - DNA, 25 bp, Homo sapien
gttgcttgagaacctttataaaata

SEQ ID NO: 1137727 - DNA, 25 bp, Homo sapien
gatgtcacagattcctcagccaata

SEQ ID NO: 1137728 - DNA, 25 bp, Homo sapien
gagcatgcccatgtagagctgttgc

SEQ ID NO: 1137729 - DNA, 25 bp, Homo sapien
tcttgtgtggcataggtgggagcat

SEQ ID NO: 1137730 - DNA, 25 bp, Homo sapien
tggcataggtgggagcattggctct

SEQ ID NO: 1137731 - DNA, 25 bp, Homo sapien
ttgggctttcttgtgtggcataggt

SEQ ID NO: 1137732 - DNA, 25 bp, Homo sapien
cacttgggctttcttgtgtggcata

SEQ ID NO: 1137733 - DNA, 25 bp, Homo sapien
ctattgatgtcacttggactggatc

SEQ ID NO: 1137734 - DNA, 25 bp, Homo sapien
tagggagagcacgttcgtgccagag

SEQ ID NO: 1137735 - DNA, 25 bp, Homo sapien
tatatcttcctggataagtcagaga

SEQ ID NO: 1137736 - DNA, 25 bp, Homo sapien
aaaaatctatgtgggacctactctg

SEQ ID NO: 1137737 - DNA, 25 bp, Homo sapien
cttgaatcaggtagttgatgaggtc

SEQ ID NO: 1137738 - DNA, 25 bp, Homo sapien
aatttttacccatggcctcctcacg

SEQ ID NO: 1137739 - DNA, 25 bp, Homo sapien
tatcctgggactggaccagaagtac

SEQ ID NO: 1137740 - DNA, 25 bp, Homo sapien
gaatccttgaatcaggtagttgatg

SEQ ID NO: 1137741 - DNA, 25 bp, Homo sapien
atttctagagatgaatatggtgtgt

SEQ ID NO: 1137742 - DNA, 25 bp, Homo sapien
gagatgaatatggtgtgttagcagc

SEQ ID NO: 1137743 - DNA, 25 bp, Homo sapien
tctagagatgaatatggtgtgttag

SEQ ID NO: 1137744 - DNA, 25 bp, Homo sapien
gatgaatatggtgtgttagcagctt

SEQ ID NO: 1137745 - DNA, 25 bp, Homo sapien
gggccagactctttcccttgggcca

SEQ ID NO: 1137746 - DNA, 25 bp, Homo sapien
ccagggggccagactctttcccttg

SEQ ID NO: 1137747 - DNA, 25 bp, Homo sapien
cagggggccagactctttcccttgg

SEQ ID NO: 1137748 - DNA, 25 bp, Homo sapien
ggccagactctttcccttgggccat

SEQ ID NO: 1137749 - DNA, 25 bp, Homo sapien
aatgggtaaagtgccaatgtaacaa

SEQ ID NO: 1137750 - DNA, 25 bp, Homo sapien
aaatgggtaaagtgccaatgtaaca

SEQ ID NO: 1137751 - DNA, 25 bp, Homo sapien
caaatgggtaaagtgccaatgtaac

SEQ ID NO: 1137752 - DNA, 25 bp, Homo sapien
tgggtaaagtgccaatgtaacaaag

SEQ ID NO: 1137753 - DNA, 25 bp, Homo sapien
tgaagctgtgtcctttgatttcctc

SEQ ID NO: 1137754 - DNA, 25 bp, Homo sapien
ctcttgcaatcctcttgttgctcac

SEQ ID NO: 1137755 - DNA, 25 bp, Homo sapien
ttcctcttgcaatcctcttgttgct

SEQ ID NO: 1137756 - DNA, 25 bp, Homo sapien
ctgtgaagctgtgtcctttgatttc

SEQ ID NO: 1137757 - DNA, 25 bp, Homo sapien
ttctttgggggctgaatgggctgct

SEQ ID NO: 1137758 - DNA, 25 bp, Homo sapien
tgcatttgcgtgctccaaggagcca

SEQ ID NO: 1137759 - DNA, 25 bp, Homo sapien
tgcatatcctgcattggtgcctccc

SEQ ID NO: 1137760 - DNA, 25 bp, Homo sapien
tgagttggatttcctctccaccctg

SEQ ID NO: 1137761 - DNA, 25 bp, Homo sapien
cttctgcgagctagcacctgctgca

SEQ ID NO: 1137762 - DNA, 25 bp, Homo sapien
taagagtgaaccctctgtactacac

SEQ ID NO: 1137763 - DNA, 25 bp, Homo sapien
ctaagagtgaaccctctgtactaca

SEQ ID NO: 1137764 - DNA, 25 bp, Homo sapien
gtcataaatttttattcctatggac

SEQ ID NO: 1137765 - DNA, 25 bp, Homo sapien
cataaatttttattcctatggacat

SEQ ID NO: 1137766 - DNA, 25 bp, Homo sapien
ctgtcataaatttttattcctatgg

SEQ ID NO: 1137767 - DNA, 25 bp, Homo sapien
catacatcttatcactgtcataaat

SEQ ID NO: 1137768 - DNA, 25 bp, Homo sapien
tctttgcatgagcactgaccattct

SEQ ID NO: 1137769 - DNA, 25 bp, Homo sapien
catctttgcatgagcactgaccatt

SEQ ID NO: 1137770 - DNA, 25 bp, Homo sapien
cccatctttgcatgagcactgacca

SEQ ID NO: 1137771 - DNA, 25 bp, Homo sapien
ccccatctttgcatgagcactgacc

SEQ ID NO: 1137772 - DNA, 25 bp, Homo sapien
tatttaccattattgaaagaattta

SEQ ID NO: 1137773 - DNA, 25 bp, Homo sapien
cttccggttcactgaaagaaccttg

SEQ ID NO: 1137774 - DNA, 25 bp, Homo sapien
tctttcccatcttccggttcactga

SEQ ID NO: 1137775 - DNA, 25 bp, Homo sapien
ggttcactgaaagaaccttggctgc

SEQ ID NO: 1137776 - DNA, 25 bp, Homo sapien
ccatcttccggttcactgaaagaac

SEQ ID NO: 1137777 - DNA, 25 bp, Homo sapien
acatccttgtgccatgtactatttc

SEQ ID NO: 1137778 - DNA, 25 bp, Homo sapien
gtgccatgtactatttccctttttc

SEQ ID NO: 1137779 - DNA, 25 bp, Homo sapien
ccttgtgccatgtactatttccctt

SEQ ID NO: 1137780 - DNA, 25 bp, Homo sapien
tccttgtgccatgtactatttccct

SEQ ID NO: 1137781 - DNA, 25 bp, Homo sapien
tatcaacaacgactaacatcattct

SEQ ID NO: 1137782 - DNA, 25 bp, Homo sapien
tcttcttaagagtgtcaatcttttc

SEQ ID NO: 1137783 - DNA, 25 bp, Homo sapien
accttcaatgcgttctcagatagtt

SEQ ID NO: 1137784 - DNA, 25 bp, Homo sapien
ttttaaccttcaatgcgttctcaga

SEQ ID NO: 1137785 - DNA, 25 bp, Homo sapien
caagtgtgaacagttggttccccac

SEQ ID NO: 1137786 - DNA, 25 bp, Homo sapien
caccaccttgagtgattttgaagcc

SEQ ID NO: 1137787 - DNA, 25 bp, Homo sapien
taaacactgggtgtcgaggtgacag

SEQ ID NO: 1137788 - DNA, 25 bp, Homo sapien
ccggcgcattgggttttcaatatga

SEQ ID NO: 1137789 - DNA, 25 bp, Homo sapien
ccagattgggtcaggtgtctctacc

SEQ ID NO: 1137790 - DNA, 25 bp, Homo sapien
gattccagctaggtcaagatgaagg

SEQ ID NO: 1137791 - DNA, 25 bp, Homo sapien
tctaggatgaagaacctgattggcc

SEQ ID NO: 1137792 - DNA, 25 bp, Homo sapien
cagggtcaccactactggtaagtcc

SEQ ID NO: 1137793 - DNA, 25 bp, Homo sapien
taagcccacagatgttttttccatc

SEQ ID NO: 1137794 - DNA, 25 bp, Homo sapien
tccttccaggatgggggaatctcca

SEQ ID NO: 1137795 - DNA, 25 bp, Homo sapien
ccaggtgagaatgccatggttttcc

SEQ ID NO: 1137796 - DNA, 25 bp, Homo sapien
cctcttgtggtggccaggtgagaat

SEQ ID NO: 1137797 - DNA, 25 bp, Homo sapien
ccttgagtacaccttgcgccagcag

SEQ ID NO: 1137798 - DNA, 25 bp, Homo sapien
gttctcttgtaaagtgccttgagta

SEQ ID NO: 1137799 - DNA, 25 bp, Homo sapien
cttgtaaagtgccttgagtacacct

SEQ ID NO: 1137800 - DNA, 25 bp, Homo sapien
tgagtacaccttgcgccagcaggta

SEQ ID NO: 1137801 - DNA, 25 bp, Homo sapien
ctgttgtggaaatccgtgtcgagga

SEQ ID NO: 1137802 - DNA, 25 bp, Homo sapien
acatggtactgagttggcaggccaa

SEQ ID NO: 1137803 - DNA, 25 bp, Homo sapien
catggtactgagttggcaggccaaa

SEQ ID NO: 1137804 - DNA, 25 bp, Homo sapien
aggaaggctttaattaagattgcca

SEQ ID NO: 1137805 - DNA, 25 bp, Homo sapien
tctgtgtggctgcaggcttggccca

SEQ ID NO: 1137806 - DNA, 25 bp, Homo sapien
ttctgtgtggctgcaggcttggccc

SEQ ID NO: 1137807 - DNA, 25 bp, Homo sapien
tgtggctgcaggcttggcccatctg

SEQ ID NO: 1137808 - DNA, 25 bp, Homo sapien
tgtgtggctgcaggcttggcccatc

SEQ ID NO: 1137809 - DNA, 25 bp, Homo sapien
caagcaggcagcgaatccaatggta

SEQ ID NO: 1137810 - DNA, 25 bp, Homo sapien
cagtctcttcccaaaagggcttcgg

SEQ ID NO: 1137811 - DNA, 25 bp, Homo sapien
agggcttcgggcttgagaaactcga

SEQ ID NO: 1137812 - DNA, 25 bp, Homo sapien
gaaactcgagttcctggctgaagct

SEQ ID NO: 1137813 - DNA, 25 bp, Homo sapien
gacgtgccgtgatggcttcctaaga

SEQ ID NO: 1137814 - DNA, 25 bp, Homo sapien
tcctaagaaggcgacaggcacgtgg

SEQ ID NO: 1137815 - DNA, 25 bp, Homo sapien
acgtggtctgcaaacgagccgcttg

SEQ ID NO: 1137816 - DNA, 25 bp, Homo sapien
gctaaactgtgatgcctcctcggga

SEQ ID NO: 1137817 - DNA, 25 bp, Homo sapien
tactgtctgttctacaacacttccc

SEQ ID NO: 1137818 - DNA, 25 bp, Homo sapien
actgtctgttctacaacacttccct

SEQ ID NO: 1137819 - DNA, 25 bp, Homo sapien
agttactgtctgttctacaacactt

SEQ ID NO: 1137820 - DNA, 25 bp, Homo sapien
tgagtagctgttgatgatcctttcc

SEQ ID NO: 1137821 - DNA, 25 bp, Homo sapien
tgatcaggataaggcagaggaactg

SEQ ID NO: 1137822 - DNA, 25 bp, Homo sapien
gaagaatgatcaggataaggcagag

SEQ ID NO: 1137823 - DNA, 25 bp, Homo sapien
aggataaggcagaggaactgtagat

SEQ ID NO: 1137824 - DNA, 25 bp, Homo sapien
ctggaagaatgatcaggataaggca

SEQ ID NO: 1137825 - DNA, 25 bp, Homo sapien
tcaaaaacagcatcatcggtctttg

SEQ ID NO: 1137826 - DNA, 25 bp, Homo sapien
cggtctttgctctcttgatccaatt

SEQ ID NO: 1137827 - DNA, 25 bp, Homo sapien
gagctgtcttccgtgtcgggttctg

SEQ ID NO: 1137828 - DNA, 25 bp, Homo sapien
tctggtccggtgctcttctgtggag

SEQ ID NO: 1137829 - DNA, 25 bp, Homo sapien
tgatcctgagatttgactgacccat

SEQ ID NO: 1137830 - DNA, 25 bp, Homo sapien
actgcattggtaggggagaagtggc

SEQ ID NO: 1137831 - DNA, 25 bp, Homo sapien
atgactgcattggtaggggagaagt

SEQ ID NO: 1137832 - DNA, 25 bp, Homo sapien
cccaggcatgactgcattggtaggg

SEQ ID NO: 1137833 - DNA, 25 bp, Homo sapien
agcagacactgctgtggagagcagg

SEQ ID NO: 1137834 - DNA, 25 bp, Homo sapien
tggcaggcagtagtggcaatagaag

SEQ ID NO: 1137835 - DNA, 25 bp, Homo sapien
aagagatgaattgaccttccaaggt

SEQ ID NO: 1137836 - DNA, 25 bp, Homo sapien
gactccctcagaggtacattggctt

SEQ ID NO: 1137837 - DNA, 25 bp, Homo sapien
tctcccataatccttcaagggcccc

SEQ ID NO: 1137838 - DNA, 25 bp, Homo sapien
cataatccttcaagggccccacaga

SEQ ID NO: 1137839 - DNA, 25 bp, Homo sapien
tgacttccgtgcatctccatgcaga

SEQ ID NO: 1137840 - DNA, 25 bp, Homo sapien
cactgacttccgtgcatctccatgc

SEQ ID NO: 1137841 - DNA, 25 bp, Homo sapien
tcttccagtaactgccctggctgtg

SEQ ID NO: 1137842 - DNA, 25 bp, Homo sapien
ttcatggggtactctgaccacaggg

SEQ ID NO: 1137843 - DNA, 25 bp, Homo sapien
tgaggagccgctcccttaacgacat

SEQ ID NO: 1137844 - DNA, 25 bp, Homo sapien
gtgtccaaggcccaggtacttcctg

SEQ ID NO: 1137845 - DNA, 25 bp, Homo sapien
gagtccactggctgttagggtgaaa

SEQ ID NO: 1137846 - DNA, 25 bp, Homo sapien
tctctttggctgttggccctcccag

SEQ ID NO: 1137847 - DNA, 25 bp, Homo sapien
taaagctggaggacaaattcctcct

SEQ ID NO: 1137848 - DNA, 25 bp, Homo sapien
ccatcgaggattccggtaagaagaa

SEQ ID NO: 1137849 - DNA, 25 bp, Homo sapien
tgccttgaggaacaccacgctggaa

SEQ ID NO: 1137850 - DNA, 25 bp, Homo sapien
cttgaggaacaccacgctggaatac

SEQ ID NO: 1137851 - DNA, 25 bp, Homo sapien
atctgccttgaggaacaccacgctg

SEQ ID NO: 1137852 - DNA, 25 bp, Homo sapien
cacatctgccttgaggaacaccacg

SEQ ID NO: 1137853 - DNA, 25 bp, Homo sapien
cagggcgggctgtggactgtcaggc

SEQ ID NO: 1137854 - DNA, 25 bp, Homo sapien
agaggggtggcgtctgggactcagg

SEQ ID NO: 1137855 - DNA, 25 bp, Homo sapien
gctgtggagtcgcagaaggctggca

SEQ ID NO: 1137856 - DNA, 25 bp, Homo sapien
ggctggcagccttgagcggaacgcg

SEQ ID NO: 1137857 - DNA, 25 bp, Homo sapien
ccagtcatcactcttatgaactgtg

SEQ ID NO: 1137858 - DNA, 25 bp, Homo sapien
agcacgggtattgagggagctggcg

SEQ ID NO: 1137859 - DNA, 25 bp, Homo sapien
ttaggacgagcgtgggcagctgtag

SEQ ID NO: 1137860 - DNA, 25 bp, Homo sapien
gacttggagctccaggtttaggacg

SEQ ID NO: 1137861 - DNA, 25 bp, Homo sapien
tctagcttgggttttaaaagactga

SEQ ID NO: 1137862 - DNA, 25 bp, Homo sapien
tgtggcagagtgtacagttttctgt

SEQ ID NO: 1137863 - DNA, 25 bp, Homo sapien
ctgtggcagagtgtacagttttctg

SEQ ID NO: 1137864 - DNA, 25 bp, Homo sapien
gagaaaaatacaccttctaaacaca

SEQ ID NO: 1137865 - DNA, 25 bp, Homo sapien
taacgcaccttacagctggctacat

SEQ ID NO: 1137866 - DNA, 25 bp, Homo sapien
atgcactgtcagataacgcacctta

SEQ ID NO: 1137867 - DNA, 25 bp, Homo sapien
agaaaaatacaccttctaaacacag

SEQ ID NO: 1137868 - DNA, 25 bp, Homo sapien
cacacagttggctgaatgggtcctt

SEQ ID NO: 1137869 - DNA, 25 bp, Homo sapien
taatgacccggttatggctgcaccg

SEQ ID NO: 1137870 - DNA, 25 bp, Homo sapien
gtaaatggccctttggaacagtctg

SEQ ID NO: 1137871 - DNA, 25 bp, Homo sapien
gaccagtctgccctgaacaaagtga

SEQ ID NO: 1137872 - DNA, 25 bp, Homo sapien
caatttgatgaaagccaattacaca

SEQ ID NO: 1137873 - DNA, 25 bp, Homo sapien
gatgaaagccaattacacatttcct

SEQ ID NO: 1137874 - DNA, 25 bp, Homo sapien
tttgatgaaagccaattacacattt

SEQ ID NO: 1137875 - DNA, 25 bp, Homo sapien
tcaatttgatgaaagccaattacac

SEQ ID NO: 1137876 - DNA, 25 bp, Homo sapien
gaaaataatttctgtgctagggcca

SEQ ID NO: 1137877 - DNA, 25 bp, Homo sapien
ttttgaggtgtaaatttcacataaa

SEQ ID NO: 1137878 - DNA, 25 bp, Homo sapien
gcaaactggttgacgttatgtttgt

SEQ ID NO: 1137879 - DNA, 25 bp, Homo sapien
tggcaaactggttgacgttatgttt

SEQ ID NO: 1137880 - DNA, 25 bp, Homo sapien
catcacatatgccaggtggtaagtt

SEQ ID NO: 1137881 - DNA, 25 bp, Homo sapien
tgctgggcagtccttaaacgttctc

SEQ ID NO: 1137882 - DNA, 25 bp, Homo sapien
tcgggcaccaggaaacgagatttct

SEQ ID NO: 1137883 - DNA, 25 bp, Homo sapien
aatagtgaatcctgcagccgtcggc

SEQ ID NO: 1137884 - DNA, 25 bp, Homo sapien
tgtggccctaaagtgttcccgagct

SEQ ID NO: 1137885 - DNA, 25 bp, Homo sapien
tcattttatcaactggacagtaaaa

SEQ ID NO: 1137886 - DNA, 25 bp, Homo sapien
tattctgtcatcaactatagtagtt

SEQ ID NO: 1137887 - DNA, 25 bp, Homo sapien
aaatcagggtgttggacgagtgcag

SEQ ID NO: 1137888 - DNA, 25 bp, Homo sapien
tttctatctgggcagcttaaaacaa

SEQ ID NO: 1137889 - DNA, 25 bp, Homo sapien
caggctcctcccggggccccaagat

SEQ ID NO: 1137890 - DNA, 25 bp, Homo sapien
tcaggctcctcccggggccccaaga

SEQ ID NO: 1137891 - DNA, 25 bp, Homo sapien
gatcccttttgtttgggaagagcaa

SEQ ID NO: 1137892 - DNA, 25 bp, Homo sapien
caagatcccttttgtttgggaagag

SEQ ID NO: 1137893 - DNA, 25 bp, Homo sapien
ctcggccccaatccgcgccggctgg

SEQ ID NO: 1137894 - DNA, 25 bp, Homo sapien
ttggcattcaccagcgccaatcgcc

SEQ ID NO: 1137895 - DNA, 25 bp, Homo sapien
gcccggcgggggcattggcattcac

SEQ ID NO: 1137896 - DNA, 25 bp, Homo sapien
agcgccaatcgcctccttgcttctc

SEQ ID NO: 1137897 - DNA, 25 bp, Homo sapien
tttccacgacgctccgggctccgct

SEQ ID NO: 1137898 - DNA, 25 bp, Homo sapien
ctttccacgacgctccgggctccgc

SEQ ID NO: 1137899 - DNA, 25 bp, Homo sapien
taccggtgcccctatccttgctttg

SEQ ID NO: 1137900 - DNA, 25 bp, Homo sapien
aagccccagggatagttgctcctac

SEQ ID NO: 1137901 - DNA, 25 bp, Homo sapien
gcgggaggctaccggtgcccctatc

SEQ ID NO: 1137902 - DNA, 25 bp, Homo sapien
gaggccgttgagacggcggcgggag

SEQ ID NO: 1137903 - DNA, 25 bp, Homo sapien
agctgggaatcgacgagggacaaaa

SEQ ID NO: 1137904 - DNA, 25 bp, Homo sapien
atcgacgagggacaaaaagtagctg

SEQ ID NO: 1137905 - DNA, 25 bp, Homo sapien
ggtgggaggtgcctttgaatgaggg

SEQ ID NO: 1137906 - DNA, 25 bp, Homo sapien
agtcctctccgccaaggctgaggtg

SEQ ID NO: 1137907 - DNA, 25 bp, Homo sapien
attttatcttacggaggaaagcagc

SEQ ID NO: 1137908 - DNA, 25 bp, Homo sapien
gacaggtgtagggagggatgtttgg

SEQ ID NO: 1137909 - DNA, 25 bp, Homo sapien
ttttatcttacggaggaaagcagct

SEQ ID NO: 1137910 - DNA, 25 bp, Homo sapien
tttatcttacggaggaaagcagctc

SEQ ID NO: 1137911 - DNA, 25 bp, Homo sapien
ttgatttttgcttcgccccatccct

SEQ ID NO: 1137912 - DNA, 25 bp, Homo sapien
taaagctggctgtctaggtcggtct

SEQ ID NO: 1137913 - DNA, 25 bp, Homo sapien
gaagaacttaagtgggagaagccgc

SEQ ID NO: 1137914 - DNA, 25 bp, Homo sapien
ggagaagccgcttcctccgtaaagc

SEQ ID NO: 1137915 - DNA, 25 bp, Homo sapien
aaacaggagagctctcgactcctca

SEQ ID NO: 1137916 - DNA, 25 bp, Homo sapien
gagagctctcgactcctcacaagag

SEQ ID NO: 1137917 - DNA, 25 bp, Homo sapien
tctcgactcctcacaagaggccaga

SEQ ID NO: 1137918 - DNA, 25 bp, Homo sapien
acagtcccaaaacaggagagctctc

SEQ ID NO: 1137919 - DNA, 25 bp, Homo sapien
gaccagcccaccctagactgggata

SEQ ID NO: 1137920 - DNA, 25 bp, Homo sapien
taccttcaaggttaactgcagtctc

SEQ ID NO: 1137921 - DNA, 25 bp, Homo sapien
tgtttcaacctgcagtataccttca

SEQ ID NO: 1137922 - DNA, 25 bp, Homo sapien
tagagagttaccaaaggacatagga

SEQ ID NO: 1137923 - DNA, 25 bp, Homo sapien
ttgatagatgatcgtaaaaccaatc

SEQ ID NO: 1137924 - DNA, 25 bp, Homo sapien
atagatgatcgtaaaaccaatcaaa

SEQ ID NO: 1137925 - DNA, 25 bp, Homo sapien
tgatagatgatcgtaaaaccaatca

SEQ ID NO: 1137926 - DNA, 25 bp, Homo sapien
gatagatgatcgtaaaaccaatcaa

SEQ ID NO: 1137927 - DNA, 25 bp, Homo sapien
gaagacctgtgagcaccgagtggct

SEQ ID NO: 1137928 - DNA, 25 bp, Homo sapien
cacattgcgtttgctagagacaccc

SEQ ID NO: 1137929 - DNA, 25 bp, Homo sapien
tattgctgggagctcacgtcttacc

SEQ ID NO: 1137930 - DNA, 25 bp, Homo sapien
tttaggagcacactagaagaggcac

SEQ ID NO: 1137931 - DNA, 25 bp, Homo sapien
cctggcctcagaaactattcttgaa

SEQ ID NO: 1137932 - DNA, 25 bp, Homo sapien
tggcctcagaaactattcttgaaca

SEQ ID NO: 1137933 - DNA, 25 bp, Homo sapien
ctggcctcagaaactattcttgaac

SEQ ID NO: 1137934 - DNA, 25 bp, Homo sapien
ggcctcagaaactattcttgaacaa

SEQ ID NO: 1137935 - DNA, 25 bp, Homo sapien
tattcacaggtttcatcccaccatg

SEQ ID NO: 1137936 - DNA, 25 bp, Homo sapien
caatagccaggacagcatgagtctt

SEQ ID NO: 1137937 - DNA, 25 bp, Homo sapien
catgaaatcttagcccaatagccag

SEQ ID NO: 1137938 - DNA, 25 bp, Homo sapien
tagatgaactttcttgtgccaacag

SEQ ID NO: 1137939 - DNA, 25 bp, Homo sapien
gaaggtagaggcttttgagatcttt

SEQ ID NO: 1137940 - DNA, 25 bp, Homo sapien
tttccactttaagatgtccactgcc

SEQ ID NO: 1137941 - DNA, 25 bp, Homo sapien
tccactttaagatgtccactgccat

SEQ ID NO: 1137942 - DNA, 25 bp, Homo sapien
gggaaggtagaggcttttgagatct

SEQ ID NO: 1137943 - DNA, 25 bp, Homo sapien
ctgcaggttgataatgacaagaaag

SEQ ID NO: 1137944 - DNA, 25 bp, Homo sapien
gctgcaggttgataatgacaagaaa

SEQ ID NO: 1137945 - DNA, 25 bp, Homo sapien
tgccattagcatggtggaaatgtgt

SEQ ID NO: 1137946 - DNA, 25 bp, Homo sapien
cattagcatggtggaaatgtgtcca

SEQ ID NO: 1137947 - DNA, 25 bp, Homo sapien
ctgataatcggcagagtcacacttc

SEQ ID NO: 1137948 - DNA, 25 bp, Homo sapien
tcagtcctcaagtataaacttacag

SEQ ID NO: 1137949 - DNA, 25 bp, Homo sapien
aaacatgaccagttcacacatcctc

SEQ ID NO: 1137950 - DNA, 25 bp, Homo sapien
ggacatgctgtccaagtcttttaaa

SEQ ID NO: 1137951 - DNA, 25 bp, Homo sapien
gccactcttatggaaagtgaatcaa

SEQ ID NO: 1137952 - DNA, 25 bp, Homo sapien
ccagagctactgcttttaagtgaac

SEQ ID NO: 1137953 - DNA, 25 bp, Homo sapien
ctttctacaacactaattctcacaa

SEQ ID NO: 1137954 - DNA, 25 bp, Homo sapien
gagaatctgcatgttccaaagtatg

SEQ ID NO: 1137955 - DNA, 25 bp, Homo sapien
aaacatcttaattggctaggctacc

SEQ ID NO: 1137956 - DNA, 25 bp, Homo sapien
gacacaaactcaatcctttctacaa

SEQ ID NO: 1137957 - DNA, 25 bp, Homo sapien
ttctggtgttaatcacaaactaagc

SEQ ID NO: 1137958 - DNA, 25 bp, Homo sapien
caaaggtaacaatcagacaatctcc

SEQ ID NO: 1137959 - DNA, 25 bp, Homo sapien
tctcagaaagaattagccgctaggg

SEQ ID NO: 1137960 - DNA, 25 bp, Homo sapien
tgatttcactaccactcacaaagat

SEQ ID NO: 1137961 - DNA, 25 bp, Homo sapien
gaatactaaatagtgtcaggagttc

SEQ ID NO: 1137962 - DNA, 25 bp, Homo sapien
caagctctccttcaagaatactaaa

SEQ ID NO: 1137963 - DNA, 25 bp, Homo sapien
aacaaggtcccttgcttcaagctct

SEQ ID NO: 1137964 - DNA, 25 bp, Homo sapien
ctaaatagtgtcaggagttcaggct

SEQ ID NO: 1137965 - DNA, 25 bp, Homo sapien
tatgccaaacatgtcttggctgcaa

SEQ ID NO: 1137966 - DNA, 25 bp, Homo sapien
ctatgccaaacatgtcttggctgca

SEQ ID NO: 1137967 - DNA, 25 bp, Homo sapien
gtcttggctgcaatagagagtgagt

SEQ ID NO: 1137968 - DNA, 25 bp, Homo sapien
gctgcaatagagagtgagtgaggag

SEQ ID NO: 1137969 - DNA, 25 bp, Homo sapien
aatgaactgaggctttcctgctgaa

SEQ ID NO: 1137970 - DNA, 25 bp, Homo sapien
tgcagatgtaatatacccgatgtgg

SEQ ID NO: 1137971 - DNA, 25 bp, Homo sapien
catagctgtgatgttcttaagccac

SEQ ID NO: 1137972 - DNA, 25 bp, Homo sapien
aatcacagcctatggtaggaagcca

SEQ ID NO: 1137973 - DNA, 25 bp, Homo sapien
gggtgccagagaatgtttcaacttg

SEQ ID NO: 1137974 - DNA, 25 bp, Homo sapien
tttggccaaagaactgttaggtcca

SEQ ID NO: 1137975 - DNA, 25 bp, Homo sapien
ttaggtccaggcttatgggtgccag

SEQ ID NO: 1137976 - DNA, 25 bp, Homo sapien
tgtttcaacttgagtccgtttaaga

SEQ ID NO: 1137977 - DNA, 25 bp, Homo sapien
gtaaaacggagaagcaatactatgt

SEQ ID NO: 1137978 - DNA, 25 bp, Homo sapien
acacaatcccctttaaaatcaatct

SEQ ID NO: 1137979 - DNA, 25 bp, Homo sapien
gtgtcctgagattagtaaattcagt

SEQ ID NO: 1137980 - DNA, 25 bp, Homo sapien
gggatgtcacctataaacacaatcc

SEQ ID NO: 1137981 - DNA, 25 bp, Homo sapien
tacaactggctaaactggaatacta

SEQ ID NO: 1137982 - DNA, 25 bp, Homo sapien
aatcacaaggctaacacatgcaagg

SEQ ID NO: 1137983 - DNA, 25 bp, Homo sapien
ttttaagagctagctggccgggaac

SEQ ID NO: 1137984 - DNA, 25 bp, Homo sapien
gaagcccctccgtaactgctggaaa

SEQ ID NO: 1137985 - DNA, 25 bp, Homo sapien
tcaccactcctattggaagtcctgg

SEQ ID NO: 1137986 - DNA, 25 bp, Homo sapien
atgctcatgaactagtagaatcaat

SEQ ID NO: 1137987 - DNA, 25 bp, Homo sapien
cccttgaaagctggcaaaaggtaag

SEQ ID NO: 1137988 - DNA, 25 bp, Homo sapien
tggtctcagcccaaaaattccttca

SEQ ID NO: 1137989 - DNA, 25 bp, Homo sapien
ttacttctggcttgactgcagccat

SEQ ID NO: 1137990 - DNA, 25 bp, Homo sapien
tgggttttacttctggcttgactgc

SEQ ID NO: 1137991 - DNA, 25 bp, Homo sapien
ttctgtctctttcaaggcttgatga

SEQ ID NO: 1137992 - DNA, 25 bp, Homo sapien
tgtctctttcaaggcttgatgagcc

SEQ ID NO: 1137993 - DNA, 25 bp, Homo sapien
ttcttgtctctggttgttactttcc

SEQ ID NO: 1137994 - DNA, 25 bp, Homo sapien
tgtctctggttgttactttccattc

SEQ ID NO: 1137995 - DNA, 25 bp, Homo sapien
tcacaaccttaagaatagagagtgg

SEQ ID NO: 1137996 - DNA, 25 bp, Homo sapien
gcatgcgctcctgcatgttcttgca

SEQ ID NO: 1137997 - DNA, 25 bp, Homo sapien
gactggctgcttttcgccatcattt

SEQ ID NO: 1137998 - DNA, 25 bp, Homo sapien
gttcttgcactgcttcatcacaacc

SEQ ID NO: 1137999 - DNA, 25 bp, Homo sapien
gccgtatcctgtgcatgccgctgcc

SEQ ID NO: 1138000 - DNA, 25 bp, Homo sapien
tgtgcatgccgctgcctttcttcct

SEQ ID NO: 1138001 - DNA, 25 bp, Homo sapien
tatcctgtgcatgccgctgcctttc

SEQ ID NO: 1138002 - DNA, 25 bp, Homo sapien
tcatctccttcagccgtatcctgtg

SEQ ID NO: 1138003 - DNA, 25 bp, Homo sapien
agatttttcccgtggaggcacctgg

SEQ ID NO: 1138004 - DNA, 25 bp, Homo sapien
tacattgttgcctgcagtcagctcc

SEQ ID NO: 1138005 - DNA, 25 bp, Homo sapien
tatctctgggtcacaatggccattg

SEQ ID NO: 1138006 - DNA, 25 bp, Homo sapien
cacagacattagcatgagaggctca

SEQ ID NO: 1138007 - DNA, 25 bp, Homo sapien
gatccctacttggtacgatgactgg

SEQ ID NO: 1138008 - DNA, 25 bp, Homo sapien
catggaaccgttggttgatccctac

SEQ ID NO: 1138009 - DNA, 25 bp, Homo sapien
tgatgaccccaataaacgcttagtg

SEQ ID NO: 1138010 - DNA, 25 bp, Homo sapien
gcttagtgagtaccggcgaagagca

SEQ ID NO: 1138011 - DNA, 25 bp, Homo sapien
tgcttggcggcagagttgtctatga

SEQ ID NO: 1138012 - DNA, 25 bp, Homo sapien
gataaatccctggatggagggctct

SEQ ID NO: 1138013 - DNA, 25 bp, Homo sapien
tgagtgactgtgtttcgggccagct

SEQ ID NO: 1138014 - DNA, 25 bp, Homo sapien
tctgcttgggactgaaatttgtggc

SEQ ID NO: 1138015 - DNA, 25 bp, Homo sapien
gatgggtggagggtttcctctctca

SEQ ID NO: 1138016 - DNA, 25 bp, Homo sapien
tccctggagtaggtgaatggcttgt

SEQ ID NO: 1138017 - DNA, 25 bp, Homo sapien
gatttcgatagtctgtgccaaaggg

SEQ ID NO: 1138018 - DNA, 25 bp, Homo sapien
ccttgttggctagtgaatctggaga

SEQ ID NO: 1138019 - DNA, 25 bp, Homo sapien
gctgctggtaggcaaaagtaactca

SEQ ID NO: 1138020 - DNA, 25 bp, Homo sapien
ctagctgctggtaggcaaaagtaac

SEQ ID NO: 1138021 - DNA, 25 bp, Homo sapien
gctggtaggcaaaagtaactcaaca

SEQ ID NO: 1138022 - DNA, 25 bp, Homo sapien
tgctggtaggcaaaagtaactcaac

SEQ ID NO: 1138023 - DNA, 25 bp, Homo sapien
ttacatcgcttgtgtgagaggcctg

SEQ ID NO: 1138024 - DNA, 25 bp, Homo sapien
gaacagatgccctttttaaatgcgg

SEQ ID NO: 1138025 - DNA, 25 bp, Homo sapien
cacaacatgacggtgactgctgagc

SEQ ID NO: 1138026 - DNA, 25 bp, Homo sapien
gaatgtcaaacgtggagactccctc

SEQ ID NO: 1138027 - DNA, 25 bp, Homo sapien
gagacaataactctctggcactgta

SEQ ID NO: 1138028 - DNA, 25 bp, Homo sapien
tgccttggacagtttaagatacccc

SEQ ID NO: 1138029 - DNA, 25 bp, Homo sapien
ggccagtaacagcttttgcaacatg

SEQ ID NO: 1138030 - DNA, 25 bp, Homo sapien
tattggatccattgcaagattgtgc

SEQ ID NO: 1138031 - DNA, 25 bp, Homo sapien
tgacaggctattaagggaaaccgga

SEQ ID NO: 1138032 - DNA, 25 bp, Homo sapien
tcaaggactaagcatcagaagcact

SEQ ID NO: 1138033 - DNA, 25 bp, Homo sapien
tattcctgtggaacaatgctcattg

SEQ ID NO: 1138034 - DNA, 25 bp, Homo sapien
tatggagtctaacctggatgggtca

SEQ ID NO: 1138035 - DNA, 25 bp, Homo sapien
ctgatgaaggtctcctggcattgat

SEQ ID NO: 1138036 - DNA, 25 bp, Homo sapien
gtctcctggcattgattaggtctga

SEQ ID NO: 1138037 - DNA, 25 bp, Homo sapien
tgaaggtctcctggcattgattagg

SEQ ID NO: 1138038 - DNA, 25 bp, Homo sapien
gcattgattaggtctgatgatccat

SEQ ID NO: 1138039 - DNA, 25 bp, Homo sapien
gagctccttcttaggtcagccccaa

SEQ ID NO: 1138040 - DNA, 25 bp, Homo sapien
cagtgtattgcagaatgctgtggcc

SEQ ID NO: 1138041 - DNA, 25 bp, Homo sapien
cctgaaacagaactcacctcttggg

SEQ ID NO: 1138042 - DNA, 25 bp, Homo sapien
gcatgttcctagatcttccctacaa

SEQ ID NO: 1138043 - DNA, 25 bp, Homo sapien
aagctgctgtcacatccttcggaag

SEQ ID NO: 1138044 - DNA, 25 bp, Homo sapien
tctcagaaccaacaacttcacagtg

SEQ ID NO: 1138045 - DNA, 25 bp, Homo sapien
gctgccactattgggagaagctgct

SEQ ID NO: 1138046 - DNA, 25 bp, Homo sapien
tccagtctaacagtgaaacaaacgc

SEQ ID NO: 1138047 - DNA, 25 bp, Homo sapien
gactccccagagataaggccaatct

SEQ ID NO: 1138048 - DNA, 25 bp, Homo sapien
tcaggttaaacaggtgactccccag

SEQ ID NO: 1138049 - DNA, 25 bp, Homo sapien
tattaatatatgagctgtccaggga

SEQ ID NO: 1138050 - DNA, 25 bp, Homo sapien
tcttgagggccacttactgtcagca

SEQ ID NO: 1138051 - DNA, 25 bp, Homo sapien
acaggatttttgtggcaacaagtgt

SEQ ID NO: 1138052 - DNA, 25 bp, Homo sapien
tgctccagccgtcaaacctgttcag

SEQ ID NO: 1138053 - DNA, 25 bp, Homo sapien
tttgtggcaacaagtgtggcaggca

SEQ ID NO: 1138054 - DNA, 25 bp, Homo sapien
gccgtcaaacctgttcagagacatg

SEQ ID NO: 1138055 - DNA, 25 bp, Homo sapien
agaaggctttgatttgggttgggtg

SEQ ID NO: 1138056 - DNA, 25 bp, Homo sapien
ctagaaggctttgatttgggttggg

SEQ ID NO: 1138057 - DNA, 25 bp, Homo sapien
ttggcgtcagaaccacatggcttcc

SEQ ID NO: 1138058 - DNA, 25 bp, Homo sapien
taggcacgtgcctgctttatctcac

SEQ ID NO: 1138059 - DNA, 25 bp, Homo sapien
taagtcagctttccgaagaagggcg

SEQ ID NO: 1138060 - DNA, 25 bp, Homo sapien
gcaaacccatggagttcttactatg

SEQ ID NO: 1138061 - DNA, 25 bp, Homo sapien
tcgttccgcttttcaggcagggtaa

SEQ ID NO: 1138062 - DNA, 25 bp, Homo sapien
tccgaacttagacaccagggaggcg

SEQ ID NO: 1138063 - DNA, 25 bp, Homo sapien
ctaggcttcgttccgcttttcaggc

SEQ ID NO: 1138064 - DNA, 25 bp, Homo sapien
cagggtaagctgctgtgctccgaac

SEQ ID NO: 1138065 - DNA, 25 bp, Homo sapien
tgcctgctggcaacttggtgcactg

SEQ ID NO: 1138066 - DNA, 25 bp, Homo sapien
tcaattcaggcttccagtggcccac

SEQ ID NO: 1138067 - DNA, 25 bp, Homo sapien
aatgtgcctgtgctcatgatgctcc

SEQ ID NO: 1138068 - DNA, 25 bp, Homo sapien
gatgggcctcgaagcttaaacctca

SEQ ID NO: 1138069 - DNA, 25 bp, Homo sapien
gcttatggctaccactccaaggcca

SEQ ID NO: 1138070 - DNA, 25 bp, Homo sapien
aaatgcttatggctaccactccaag

SEQ ID NO: 1138071 - DNA, 25 bp, Homo sapien
caaaaatgcttatggctaccactcc

SEQ ID NO: 1138072 - DNA, 25 bp, Homo sapien
aatgcttatggctaccactccaagg

SEQ ID NO: 1138073 - DNA, 25 bp, Homo sapien
acgcccagcccctgcaaatttttgt

SEQ ID NO: 1138074 - DNA, 25 bp, Homo sapien
gcccagcccctgcaaatttttgtct

SEQ ID NO: 1138075 - DNA, 25 bp, Homo sapien
cacgcccagcccctgcaaatttttg

SEQ ID NO: 1138076 - DNA, 25 bp, Homo sapien
cagcccctgcaaatttttgtcttat

SEQ ID NO: 1138077 - DNA, 25 bp, Homo sapien
gtggtgtgatattgactggctgcaa

SEQ ID NO: 1138078 - DNA, 25 bp, Homo sapien
agtggtgtgatattgactggctgca

SEQ ID NO: 1138079 - DNA, 25 bp, Homo sapien
tgaacgctgactgtgtaggtatgcc

SEQ ID NO: 1138080 - DNA, 25 bp, Homo sapien
actgccgtcctcaaggatccttcag

SEQ ID NO: 1138081 - DNA, 25 bp, Homo sapien
ggtactgccgtcctcaaggatcctt

SEQ ID NO: 1138082 - DNA, 25 bp, Homo sapien
gtaggtatgccaggtactgccgtcc

SEQ ID NO: 1138083 - DNA, 25 bp, Homo sapien
tgcctggctgattcaaaatacattt

SEQ ID NO: 1138084 - DNA, 25 bp, Homo sapien
tgagccatcatgtctagctgctttt

SEQ ID NO: 1138085 - DNA, 25 bp, Homo sapien
ggtttttttctcatcgctggcttct

SEQ ID NO: 1138086 - DNA, 25 bp, Homo sapien
aagggtttttttctcatcgctggct

SEQ ID NO: 1138087 - DNA, 25 bp, Homo sapien
gcgcctggccggtagatgtactttt

SEQ ID NO: 1138088 - DNA, 25 bp, Homo sapien
cctggccggtagatgtactttttat

SEQ ID NO: 1138089 - DNA, 25 bp, Homo sapien
tttatttcacttgtacataagcatg

SEQ ID NO: 1138090 - DNA, 25 bp, Homo sapien
gtagatccacgtttctgacctatta

SEQ ID NO: 1138091 - DNA, 25 bp, Homo sapien
tctaaggtagtggtttttatatctc

SEQ ID NO: 1138092 - DNA, 25 bp, Homo sapien
tgtctgagacagtgtttacttcacc

SEQ ID NO: 1138093 - DNA, 25 bp, Homo sapien
ccgggagagcgagccgcagagtgag

SEQ ID NO: 1138094 - DNA, 25 bp, Homo sapien
tgagctttagccaagattccgggcg

SEQ ID NO: 1138095 - DNA, 25 bp, Homo sapien
attccgggcgctttccgactcgcgg

SEQ ID NO: 1138096 - DNA, 25 bp, Homo sapien
ggcgactcgccctgtgaaccgggcg

SEQ ID NO: 1138097 - DNA, 25 bp, Homo sapien
gaacttattgtatcatttagccggg

SEQ ID NO: 1138098 - DNA, 25 bp, Homo sapien
gccgggtctccagctttagctgttt

SEQ ID NO: 1138099 - DNA, 25 bp, Homo sapien
gctgtttatcgctgcttgtctctgt

SEQ ID NO: 1138100 - DNA, 25 bp, Homo sapien
tattttcgaggcaattagagaactt

SEQ ID NO: 1138101 - DNA, 25 bp, Homo sapien
tctttccatgaaaagccggagggtg

SEQ ID NO: 1138102 - DNA, 25 bp, Homo sapien
agggtctttccatgaaaagccggag

SEQ ID NO: 1138103 - DNA, 25 bp, Homo sapien
ctttccatgaaaagccggagggtga

SEQ ID NO: 1138104 - DNA, 25 bp, Homo sapien
ttccatgaaaagccggagggtgagg

SEQ ID NO: 1138105 - DNA, 25 bp, Homo sapien
aggaagcttgggaagaacccaggag

SEQ ID NO: 1138106 - DNA, 25 bp, Homo sapien
cttgccctgccaccccatgcaggtg

SEQ ID NO: 1138107 - DNA, 25 bp, Homo sapien
ttgccctgccaccccatgcaggtgt

SEQ ID NO: 1138108 - DNA, 25 bp, Homo sapien
ctcttgccctgccaccccatgcagg

SEQ ID NO: 1138109 - DNA, 25 bp, Homo sapien
tcttgccctgccaccccatgcaggt

SEQ ID NO: 1138110 - DNA, 25 bp, Homo sapien
ccctgggcccctttggcgatgacct

SEQ ID NO: 1138111 - DNA, 25 bp, Homo sapien
cctgggcccctttggcgatgacctt

SEQ ID NO: 1138112 - DNA, 25 bp, Homo sapien
ctgggcccctttggcgatgaccttc

SEQ ID NO: 1138113 - DNA, 25 bp, Homo sapien
gagctcagctcctcacgcaaaggct

SEQ ID NO: 1138114 - DNA, 25 bp, Homo sapien
gtctcaaggtcctagacactactgg

SEQ ID NO: 1138115 - DNA, 25 bp, Homo sapien
caaaataaacttccagtctcaaggt

SEQ ID NO: 1138116 - DNA, 25 bp, Homo sapien
ctagacactactggagagctcagct

SEQ ID NO: 1138117 - DNA, 25 bp, Homo sapien
acaacctaggatgaggcttggctcc

SEQ ID NO: 1138118 - DNA, 25 bp, Homo sapien
caacctaggatgaggcttggctcct

SEQ ID NO: 1138119 - DNA, 25 bp, Homo sapien
gcaagagctgcactcaaccacttaa

SEQ ID NO: 1138120 - DNA, 25 bp, Homo sapien
caactccaaattcactgtcagtctt

SEQ ID NO: 1138121 - DNA, 25 bp, Homo sapien
cggtggtggcgttagaggtgcctcc

SEQ ID NO: 1138122 - DNA, 25 bp, Homo sapien
tgcctcccgagtgtaagcagatggg

SEQ ID NO: 1138123 - DNA, 25 bp, Homo sapien
cgttagaggtgcctcccgagtgtaa

SEQ ID NO: 1138124 - DNA, 25 bp, Homo sapien
tccatccttgcgcttctgtgaaatg

SEQ ID NO: 1138125 - DNA, 25 bp, Homo sapien
gtgacaccggcgctgagcacggagg

SEQ ID NO: 1138126 - DNA, 25 bp, Homo sapien
gcgctgagcacggaggatgcactca

SEQ ID NO: 1138127 - DNA, 25 bp, Homo sapien
cggaggatgcactcatttcctccat

SEQ ID NO: 1138128 - DNA, 25 bp, Homo sapien
acacgcgcggcccttagggcggctc

SEQ ID NO: 1138129 - DNA, 25 bp, Homo sapien
gcgggctctcattggacgggacggg

SEQ ID NO: 1138130 - DNA, 25 bp, Homo sapien
gacgccctaggtgtagcagccgcct

SEQ ID NO: 1138131 - DNA, 25 bp, Homo sapien
cgggcctagtgtgcggacagcccct

SEQ ID NO: 1138132 - DNA, 25 bp, Homo sapien
gcgcaagttgcgatgtccggaagcc

SEQ ID NO: 1138133 - DNA, 25 bp, Homo sapien
gaagccgacgacggcgtgccgaacc

SEQ ID NO: 1138134 - DNA, 25 bp, Homo sapien
ggccatggtgttcgccggcggctgg

SEQ ID NO: 1138135 - DNA, 25 bp, Homo sapien
ttgcgatgtccggaagccgacgacg

SEQ ID NO: 1138136 - DNA, 25 bp, Homo sapien
ccttctgggggtactcaggctgctc

SEQ ID NO: 1138137 - DNA, 25 bp, Homo sapien
gcgcagcccggaggggcgtggacgg

SEQ ID NO: 1138138 - DNA, 25 bp, Homo sapien
ggcaccttctgggggtactcaggct

SEQ ID NO: 1138139 - DNA, 25 bp, Homo sapien
ccgcgcagcccggaggggcgtggac

SEQ ID NO: 1138140 - DNA, 25 bp, Homo sapien
cgcgggcgacggcacagggaccggg

SEQ ID NO: 1138141 - DNA, 25 bp, Homo sapien
gcgccgaagcgggagctgcgcagct

SEQ ID NO: 1138142 - DNA, 25 bp, Homo sapien
gaagcgggagctgcgcagcttcctc

SEQ ID NO: 1138143 - DNA, 25 bp, Homo sapien
cgctggcgcgccgaagcgggagctg

SEQ ID NO: 1138144 - DNA, 25 bp, Homo sapien
acgtgtctacgcgggccggcagcgt

SEQ ID NO: 1138145 - DNA, 25 bp, Homo sapien
tctacgcgggccggcagcgtcagca

SEQ ID NO: 1138146 - DNA, 25 bp, Homo sapien
aggacgtgtctacgcgggccggcag

SEQ ID NO: 1138147 - DNA, 25 bp, Homo sapien
gtgtctacgcgggccggcagcgtca

SEQ ID NO: 1138148 - DNA, 25 bp, Homo sapien
agcctggtcccgtgagcagccagtc

SEQ ID NO: 1138149 - DNA, 25 bp, Homo sapien
gggcatccttgctccgaatgcccag

SEQ ID NO: 1138150 - DNA, 25 bp, Homo sapien
tcaccagtcgtgtaagacgcggcgc

SEQ ID NO: 1138151 - DNA, 25 bp, Homo sapien
aatcgtctccaacccgtcgaagcaa

SEQ ID NO: 1138152 - DNA, 25 bp, Homo sapien
cctgagggaaactcggaaggtagct

SEQ ID NO: 1138153 - DNA, 25 bp, Homo sapien
tagcttctgccctaaggggcttgag

SEQ ID NO: 1138154 - DNA, 25 bp, Homo sapien
gggaaactcggaaggtagcttctgc

SEQ ID NO: 1138155 - DNA, 25 bp, Homo sapien
aactcggaaggtagcttctgcccta

SEQ ID NO: 1138156 - DNA, 25 bp, Homo sapien
aagtgtctggagtctagggcctgca

SEQ ID NO: 1138157 - DNA, 25 bp, Homo sapien
cctacgggaaggtgatgagtgccat

SEQ ID NO: 1138158 - DNA, 25 bp, Homo sapien
gattccatttctaagcctcggctgg

SEQ ID NO: 1138159 - DNA, 25 bp, Homo sapien
taagtgacatcctcaaaacggtggc

SEQ ID NO: 1138160 - DNA, 25 bp, Homo sapien
gccaagattccaagtcaagaggaga

SEQ ID NO: 1138161 - DNA, 25 bp, Homo sapien
gtaaggaaaggacgggaggcactgc

SEQ ID NO: 1138162 - DNA, 25 bp, Homo sapien
tccaagtcaagaggagaaaagccac

SEQ ID NO: 1138163 - DNA, 25 bp, Homo sapien
cttgcacgggaagaagaacggagta

SEQ ID NO: 1138164 - DNA, 25 bp, Homo sapien
ctaacaaatcccatggaatcagcat

SEQ ID NO: 1138165 - DNA, 25 bp, Homo sapien
actggtgacaccaactcaaacaaac

SEQ ID NO: 1138166 - DNA, 25 bp, Homo sapien
aacaaacacaaggagggctgatgct

SEQ ID NO: 1138167 - DNA, 25 bp, Homo sapien
tgatgcttgcctcttcgggaactca

SEQ ID NO: 1138168 - DNA, 25 bp, Homo sapien
acttggtttgagctatgaatgagcc

SEQ ID NO: 1138169 - DNA, 25 bp, Homo sapien
agctatgaatgagcctgtggtttgg

SEQ ID NO: 1138170 - DNA, 25 bp, Homo sapien
gaaaagacttggtttgagctatgaa

SEQ ID NO: 1138171 - DNA, 25 bp, Homo sapien
tttgagctatgaatgagcctgtggt

SEQ ID NO: 1138172 - DNA, 25 bp, Homo sapien
ttctcctgtccagaacgcatcaaag

SEQ ID NO: 1138173 - DNA, 25 bp, Homo sapien
tattctcctgtccagaacgcatcaa

SEQ ID NO: 1138174 - DNA, 25 bp, Homo sapien
ttattctcctgtccagaacgcatca

SEQ ID NO: 1138175 - DNA, 25 bp, Homo sapien
tttattctcctgtccagaacgcatc

SEQ ID NO: 1138176 - DNA, 25 bp, Homo sapien
gccctgtcagaacatcccagacctt

SEQ ID NO: 1138177 - DNA, 25 bp, Homo sapien
agatggccctgtcagaacatcccag

SEQ ID NO: 1138178 - DNA, 25 bp, Homo sapien
atggccctgtcagaacatcccagac

SEQ ID NO: 1138179 - DNA, 25 bp, Homo sapien
cctgtcagaacatcccagacctttt

SEQ ID NO: 1138180 - DNA, 25 bp, Homo sapien
gatattgtcacagatcactcgtgcc

SEQ ID NO: 1138181 - DNA, 25 bp, Homo sapien
tgacactctcggatccattctcggg

SEQ ID NO: 1138182 - DNA, 25 bp, Homo sapien
ttctgagcatgacacggccaaagac

SEQ ID NO: 1138183 - DNA, 25 bp, Homo sapien
gaacgcatgatgtctgggtaacgct

SEQ ID NO: 1138184 - DNA, 25 bp, Homo sapien
agtcaaagtccccacgctggtcatg

SEQ ID NO: 1138185 - DNA, 25 bp, Homo sapien
gagtaatagcgtggactacccctgc

SEQ ID NO: 1138186 - DNA, 25 bp, Homo sapien
tcagttcaccctggctacaggcgcg

SEQ ID NO: 1138187 - DNA, 25 bp, Homo sapien
cgtgcgaccacagcggttattatgt

SEQ ID NO: 1138188 - DNA, 25 bp, Homo sapien
gccaggtaccatgccttctacttta

SEQ ID NO: 1138189 - DNA, 25 bp, Homo sapien
tggtgtgccattttccagcatagta

SEQ ID NO: 1138190 - DNA, 25 bp, Homo sapien
gccttctactttagtggtgtgccat

SEQ ID NO: 1138191 - DNA, 25 bp, Homo sapien
gttttagagtgccaggtaccatgcc

SEQ ID NO: 1138192 - DNA, 25 bp, Homo sapien
ggaaatctgagagtgcacgccagca

SEQ ID NO: 1138193 - DNA, 25 bp, Homo sapien
tagacaagatcagtccgggtggcac

SEQ ID NO: 1138194 - DNA, 25 bp, Homo sapien
caggtgcgcagagtacaggaaccac

SEQ ID NO: 1138195 - DNA, 25 bp, Homo sapien
caggtaatcacctgtgcggcggaaa

SEQ ID NO: 1138196 - DNA, 25 bp, Homo sapien
ggacatctttctagctttaatctcc

SEQ ID NO: 1138197 - DNA, 25 bp, Homo sapien
ttcaaggacatctttctagctttaa

SEQ ID NO: 1138198 - DNA, 25 bp, Homo sapien
aaggacatctttctagctttaatct

SEQ ID NO: 1138199 - DNA, 25 bp, Homo sapien
ctttcaaggacatctttctagcttt

SEQ ID NO: 1138200 - DNA, 25 bp, Homo sapien
cctttggtagggatctcttcttcgt

SEQ ID NO: 1138201 - DNA, 25 bp, Homo sapien
gcctttggtagggatctcttcttcg

SEQ ID NO: 1138202 - DNA, 25 bp, Homo sapien
ctttggtagggatctcttcttcgtt

SEQ ID NO: 1138203 - DNA, 25 bp, Homo sapien
agttgtgtcgtaccctcggccacag

SEQ ID NO: 1138204 - DNA, 25 bp, Homo sapien
ggctttgcaagtatggacgtccaca

SEQ ID NO: 1138205 - DNA, 25 bp, Homo sapien
tgcactcacactgggtaacacgggt

SEQ ID NO: 1138206 - DNA, 25 bp, Homo sapien
acacggcctgcagtgcctagggaac

SEQ ID NO: 1138207 - DNA, 25 bp, Homo sapien
tccagagcgggaaatcagggagctt

SEQ ID NO: 1138208 - DNA, 25 bp, Homo sapien
tgcacaccaagaagtatcgggaagc

SEQ ID NO: 1138209 - DNA, 25 bp, Homo sapien
tgagcatgtgaatggaaccttgtcc

SEQ ID NO: 1138210 - DNA, 25 bp, Homo sapien
caaaaagaagctctctacaggtacc

SEQ ID NO: 1138211 - DNA, 25 bp, Homo sapien
cttactacattaatctatcctagga

SEQ ID NO: 1138212 - DNA, 25 bp, Homo sapien
caaggcctagccagacttactacat

SEQ ID NO: 1138213 - DNA, 25 bp, Homo sapien
tagccagacttactacattaatcta

SEQ ID NO: 1138214 - DNA, 25 bp, Homo sapien
acaaggcctagccagacttactaca

SEQ ID NO: 1138215 - DNA, 25 bp, Homo sapien
aacctccagaatagtgcatgggaag

SEQ ID NO: 1138216 - DNA, 25 bp, Homo sapien
acctccagaatagtgcatgggaaga

SEQ ID NO: 1138217 - DNA, 25 bp, Homo sapien
aaacctccagaatagtgcatgggaa

SEQ ID NO: 1138218 - DNA, 25 bp, Homo sapien
gcttcaaaggctaggatcctctcat

SEQ ID NO: 1138219 - DNA, 25 bp, Homo sapien
gcttactaagcctgctatctctgga

SEQ ID NO: 1138220 - DNA, 25 bp, Homo sapien
taatcactaggacttggagagtcac

SEQ ID NO: 1138221 - DNA, 25 bp, Homo sapien
ttaacccgggtctgtcataaccgca

SEQ ID NO: 1138222 - DNA, 25 bp, Homo sapien
caagggccctgactagctcatgttt

SEQ ID NO: 1138223 - DNA, 25 bp, Homo sapien
tcatgatgggctagaccagccaggg

SEQ ID NO: 1138224 - DNA, 25 bp, Homo sapien
tcaggttgacgtcctatggaaggca

SEQ ID NO: 1138225 - DNA, 25 bp, Homo sapien
caggtctcagcaggttacacaaata

SEQ ID NO: 1138226 - DNA, 25 bp, Homo sapien
aaaaactggctacaggctgcgcagc

SEQ ID NO: 1138227 - DNA, 25 bp, Homo sapien
acattgctgatctgagggacagacc

SEQ ID NO: 1138228 - DNA, 25 bp, Homo sapien
tatctgcagggctaggttaaggctg

SEQ ID NO: 1138229 - DNA, 25 bp, Homo sapien
gattagtgccattattcagggctgg

SEQ ID NO: 1138230 - DNA, 25 bp, Homo sapien
tcagaaattagatctacaagaagtt

SEQ ID NO: 1138231 - DNA, 25 bp, Homo sapien
ttcagaaattagatctacaagaagt

SEQ ID NO: 1138232 - DNA, 25 bp, Homo sapien
cagaaattagatctacaagaagttt

SEQ ID NO: 1138233 - DNA, 25 bp, Homo sapien
gaaattagatctacaagaagttttg

SEQ ID NO: 1138234 - DNA, 25 bp, Homo sapien
gagcagaactcctatgcagcctgag

SEQ ID NO: 1138235 - DNA, 25 bp, Homo sapien
tagtagcaggcagttcccaagtgga

SEQ ID NO: 1138236 - DNA, 25 bp, Homo sapien
caaccacaggtcatgagcagtaggc

SEQ ID NO: 1138237 - DNA, 25 bp, Homo sapien
gaatagccaccgagatgctcagaga

SEQ ID NO: 1138238 - DNA, 25 bp, Homo sapien
ttctgttttgaaggtgctgggactc

SEQ ID NO: 1138239 - DNA, 25 bp, Homo sapien
gggactcctacagggcttgaacatt

SEQ ID NO: 1138240 - DNA, 25 bp, Homo sapien
actgtgctcagatatactctcttgg

SEQ ID NO: 1138241 - DNA, 25 bp, Homo sapien
gctgagccacgcactgttcatgtga

SEQ ID NO: 1138242 - DNA, 25 bp, Homo sapien
tctgaaagtggcaccagggaactgc

SEQ ID NO: 1138243 - DNA, 25 bp, Homo sapien
tgtcttgcgcctaaacagaggtcca

SEQ ID NO: 1138244 - DNA, 25 bp, Homo sapien
tatttctgggtggtagggagcccac

SEQ ID NO: 1138245 - DNA, 25 bp, Homo sapien
ggttggcctccacctcagcatgtgt

SEQ ID NO: 1138246 - DNA, 25 bp, Homo sapien
gctacccagaattttccagagctca

SEQ ID NO: 1138247 - DNA, 25 bp, Homo sapien
tgtgagagaataggaaagagctacc

SEQ ID NO: 1138248 - DNA, 25 bp, Homo sapien
taataagaactaatagccatcctgg

SEQ ID NO: 1138249 - DNA, 25 bp, Homo sapien
ggcaattctacctctttacagggag

SEQ ID NO: 1138250 - DNA, 25 bp, Homo sapien
aactcaaggaggacagagtgtatct

SEQ ID NO: 1138251 - DNA, 25 bp, Homo sapien
gaggtgtgtctaaccccagctaaag

SEQ ID NO: 1138252 - DNA, 25 bp, Homo sapien
gaacaaacttatccagaagggccca

SEQ ID NO: 1138253 - DNA, 25 bp, Homo sapien
gatagggaaaccagagaaacattct

SEQ ID NO: 1138254 - DNA, 25 bp, Homo sapien
tactctagcctaaccatgctgtatg

SEQ ID NO: 1138255 - DNA, 25 bp, Homo sapien
tctagcctaaccatgctgtatggtt

SEQ ID NO: 1138256 - DNA, 25 bp, Homo sapien
cttcctctgctgcagatgttcgtca

SEQ ID NO: 1138257 - DNA, 25 bp, Homo sapien
tatggttttatgacacttcctctgc

SEQ ID NO: 1138258 - DNA, 25 bp, Homo sapien
gattctcggtagtcctagagggcct

SEQ ID NO: 1138259 - DNA, 25 bp, Homo sapien
ttacgccctgaggatccctttgagg

SEQ ID NO: 1138260 - DNA, 25 bp, Homo sapien
taaacccgacgctaggctggaggga

SEQ ID NO: 1138261 - DNA, 25 bp, Homo sapien
tgaagccgcagctgttggagcgtct

SEQ ID NO: 1138262 - DNA, 25 bp, Homo sapien
actatcccaggattcccgactcccg

SEQ ID NO: 1138263 - DNA, 25 bp, Homo sapien
tcaggtccgccactatcccaggatt

SEQ ID NO: 1138264 - DNA, 25 bp, Homo sapien
aggccaacttcaggtccgccactat

SEQ ID NO: 1138265 - DNA, 25 bp, Homo sapien
ctatcccaggattcccgactcccgg

SEQ ID NO: 1138266 - DNA, 25 bp, Homo sapien
cacgaaagaacaggtagccccaatc

SEQ ID NO: 1138267 - DNA, 25 bp, Homo sapien
tgaccctcatttcgtttggaagcgg

SEQ ID NO: 1138268 - DNA, 25 bp, Homo sapien
tcctccagaataggcgctgctgtcc

SEQ ID NO: 1138269 - DNA, 25 bp, Homo sapien
cagctggaacgatcggtggcttttc

SEQ ID NO: 1138270 - DNA, 25 bp, Homo sapien
gagggccccatgtcagttatgcgcg

SEQ ID NO: 1138271 - DNA, 25 bp, Homo sapien
ggcctccatccgaccaaatagctgt

SEQ ID NO: 1138272 - DNA, 25 bp, Homo sapien
catccatctaatgggcgctggcagc

SEQ ID NO: 1138273 - DNA, 25 bp, Homo sapien
cgctggcagcgtgtttcgattattc

SEQ ID NO: 1138274 - DNA, 25 bp, Homo sapien
gaagaaagccgagtgatggaatcac

SEQ ID NO: 1138275 - DNA, 25 bp, Homo sapien
gccgggaagaaagccgagtgatgga

SEQ ID NO: 1138276 - DNA, 25 bp, Homo sapien
aggccgggaagaaagccgagtgatg

SEQ ID NO: 1138277 - DNA, 25 bp, Homo sapien
gggaagaaagccgagtgatggaatc

SEQ ID NO: 1138278 - DNA, 25 bp, Homo sapien
cttgggctgttctggcccagcccgg

SEQ ID NO: 1138279 - DNA, 25 bp, Homo sapien
acacacgatcatcgaagtcggccat

SEQ ID NO: 1138280 - DNA, 25 bp, Homo sapien
tccgacacacgatcatcgaagtcgg

SEQ ID NO: 1138281 - DNA, 25 bp, Homo sapien
cgacacacgatcatcgaagtcggcc

SEQ ID NO: 1138282 - DNA, 25 bp, Homo sapien
gacacacgatcatcgaagtcggcca

SEQ ID NO: 1138283 - DNA, 25 bp, Homo sapien
gaaacgtctgttcccttgcagggag

SEQ ID NO: 1138284 - DNA, 25 bp, Homo sapien
gttaagaggccatcctgaccaggaa

SEQ ID NO: 1138285 - DNA, 25 bp, Homo sapien
tgctaaaggcggtaaaataactgct

SEQ ID NO: 1138286 - DNA, 25 bp, Homo sapien
tgaccaggaagtgactcgccctaaa

SEQ ID NO: 1138287 - DNA, 25 bp, Homo sapien
ctctccttgtcgaagagtcgtgaca

SEQ ID NO: 1138288 - DNA, 25 bp, Homo sapien
gtcgaagagtcgtgacagcaaaatc

SEQ ID NO: 1138289 - DNA, 25 bp, Homo sapien
agagtcgtgacagcaaaatcacttc

SEQ ID NO: 1138290 - DNA, 25 bp, Homo sapien
ccttgtcgaagagtcgtgacagcaa

SEQ ID NO: 1138291 - DNA, 25 bp, Homo sapien
cagtacaggagaaaagtagtgcatg

SEQ ID NO: 1138292 - DNA, 25 bp, Homo sapien
agatttattatagcgaatcagacag

SEQ ID NO: 1138293 - DNA, 25 bp, Homo sapien
tagggagatggacaacatttgggac

SEQ ID NO: 1138294 - DNA, 25 bp, Homo sapien
tcagacaggcgacagtacaggagaa

SEQ ID NO: 1138295 - DNA, 25 bp, Homo sapien
taaaagggatgtgtctatagggaaa

SEQ ID NO: 1138296 - DNA, 25 bp, Homo sapien
agggatgtgtctatagggaaagact

SEQ ID NO: 1138297 - DNA, 25 bp, Homo sapien
aagggatgtgtctatagggaaagac

SEQ ID NO: 1138298 - DNA, 25 bp, Homo sapien
gttaaaagggatgtgtctataggga

SEQ ID NO: 1138299 - DNA, 25 bp, Homo sapien
gaggtcattctaagttctacgtgcc

SEQ ID NO: 1138300 - DNA, 25 bp, Homo sapien
ccaataagttgccttgtgaggtcat

SEQ ID NO: 1138301 - DNA, 25 bp, Homo sapien
ctccacagtggagcatcaaagaagg

SEQ ID NO: 1138302 - DNA, 25 bp, Homo sapien
gaaggcaggatgctttgttcagtct

SEQ ID NO: 1138303 - DNA, 25 bp, Homo sapien
gaatacctctcagcaaaactaactg

SEQ ID NO: 1138304 - DNA, 25 bp, Homo sapien
gggcccggcctgtcctaggatgtct

SEQ ID NO: 1138305 - DNA, 25 bp, Homo sapien
ctgggcccggcctgtcctaggatgt

SEQ ID NO: 1138306 - DNA, 25 bp, Homo sapien
agattatatgaatacctctcagcaa

SEQ ID NO: 1138307 - DNA, 25 bp, Homo sapien
tcagagatgctgtgtggtcatcgcc

SEQ ID NO: 1138308 - DNA, 25 bp, Homo sapien
caagcaggttcaggttcaattctac

SEQ ID NO: 1138309 - DNA, 25 bp, Homo sapien
tcaaatcactatctggagggccaca

SEQ ID NO: 1138310 - DNA, 25 bp, Homo sapien
caagaatgtgctggtactggacaat

SEQ ID NO: 1138311 - DNA, 25 bp, Homo sapien
gggttgacagccactaccttaagct

SEQ ID NO: 1138312 - DNA, 25 bp, Homo sapien
tatgggttccacctgcagaaattct

SEQ ID NO: 1138313 - DNA, 25 bp, Homo sapien
cctcagtaaagatgtgccagcattt

SEQ ID NO: 1138314 - DNA, 25 bp, Homo sapien
aataactttaattcaggctgggcac

SEQ ID NO: 1138315 - DNA, 25 bp, Homo sapien
gaacccatgaggtaacatgagacag

SEQ ID NO: 1138316 - DNA, 25 bp, Homo sapien
taagcaaatacctagacatcactga

SEQ ID NO: 1138317 - DNA, 25 bp, Homo sapien
cactgggagtcagatacagtttcac

SEQ ID NO: 1138318 - DNA, 25 bp, Homo sapien
gacagactcccatacagcagatcct

SEQ ID NO: 1138319 - DNA, 25 bp, Homo sapien
tatctttatgaggacactaactact

SEQ ID NO: 1138320 - DNA, 25 bp, Homo sapien
ggcaagtatgtagagcaaagcaatt

SEQ ID NO: 1138321 - DNA, 25 bp, Homo sapien
ggcactcatcaacaggcccagcata

SEQ ID NO: 1138322 - DNA, 25 bp, Homo sapien
gacctcaggaatctttccgcatcag

SEQ ID NO: 1138323 - DNA, 25 bp, Homo sapien
agaccaaaaccatgtgatcatctca

SEQ ID NO: 1138324 - DNA, 25 bp, Homo sapien
aaaagaccaaaaccatgtgatcatc

SEQ ID NO: 1138325 - DNA, 25 bp, Homo sapien
aattaaaagaccaaaaccatgtgat

SEQ ID NO: 1138326 - DNA, 25 bp, Homo sapien
taaaagaccaaaaccatgtgatcat

SEQ ID NO: 1138327 - DNA, 25 bp, Homo sapien
tgcatgagtgatgaatttagcagct

SEQ ID NO: 1138328 - DNA, 25 bp, Homo sapien
ttaaattcccctgggggtgcatgag

SEQ ID NO: 1138329 - DNA, 25 bp, Homo sapien
tgatgaatttagcagctatgcgtac

SEQ ID NO: 1138330 - DNA, 25 bp, Homo sapien
gagtgatgaatttagcagctatgcg

SEQ ID NO: 1138331 - DNA, 25 bp, Homo sapien
tatcatacagttcctctcgagtagc

SEQ ID NO: 1138332 - DNA, 25 bp, Homo sapien
attgtggttccccaacctgctgcga

SEQ ID NO: 1138333 - DNA, 25 bp, Homo sapien
tcaccatgaagtttaagatgctcca

SEQ ID NO: 1138334 - DNA, 25 bp, Homo sapien
tattgactgttctaccatctgggcc

SEQ ID NO: 1138335 - DNA, 25 bp, Homo sapien
agacgaagtctcactcctgtcgcct

SEQ ID NO: 1138336 - DNA, 25 bp, Homo sapien
gacgaagtctcactcctgtcgccta

SEQ ID NO: 1138337 - DNA, 25 bp, Homo sapien
acgaagtctcactcctgtcgcctag

SEQ ID NO: 1138338 - DNA, 25 bp, Homo sapien
tcattattaagtagtagccgaacgt

SEQ ID NO: 1138339 - DNA, 25 bp, Homo sapien
cttccctgaggagattgtcattatt

SEQ ID NO: 1138340 - DNA, 25 bp, Homo sapien
gtcattattaagtagtagccgaacg

SEQ ID NO: 1138341 - DNA, 25 bp, Homo sapien
ccctgaggagattgtcattattaag

SEQ ID NO: 1138342 - DNA, 25 bp, Homo sapien
ctctgctttaatcgggcaaatgtgg

SEQ ID NO: 1138343 - DNA, 25 bp, Homo sapien
gatcattcctatgtatagctagctg

SEQ ID NO: 1138344 - DNA, 25 bp, Homo sapien
tcagggtgctagtttactgtcaaca

SEQ ID NO: 1138345 - DNA, 25 bp, Homo sapien
aaacattatcattcctcactggcag

SEQ ID NO: 1138346 - DNA, 25 bp, Homo sapien
ccagcctctaaagctaattttcaat

SEQ ID NO: 1138347 - DNA, 25 bp, Homo sapien
agcctctaaagctaattttcaatct

SEQ ID NO: 1138348 - DNA, 25 bp, Homo sapien
cagcctctaaagctaattttcaatc

SEQ ID NO: 1138349 - DNA, 25 bp, Homo sapien
gcctctaaagctaattttcaatctt

SEQ ID NO: 1138350 - DNA, 25 bp, Homo sapien
acacatgcatgtgaaaactcaacca

SEQ ID NO: 1138351 - DNA, 25 bp, Homo sapien
catgtgaaaactcaaccatcacact

SEQ ID NO: 1138352 - DNA, 25 bp, Homo sapien
tcacacatgcatgtgaaaactcaac

SEQ ID NO: 1138353 - DNA, 25 bp, Homo sapien
tctcacacatgcatgtgaaaactca

SEQ ID NO: 1138354 - DNA, 25 bp, Homo sapien
tcatatccttctatcttcacaggcg

SEQ ID NO: 1138355 - DNA, 25 bp, Homo sapien
tatccttctatcttcacaggcgtga

SEQ ID NO: 1138356 - DNA, 25 bp, Homo sapien
tctatcttcacaggcgtgaactgat

SEQ ID NO: 1138357 - DNA, 25 bp, Homo sapien
tcttcacaggcgtgaactgatccat

SEQ ID NO: 1138358 - DNA, 25 bp, Homo sapien
aataggatctctactatctgccagg

SEQ ID NO: 1138359 - DNA, 25 bp, Homo sapien
tatcaaggagaattaaagacagctg

SEQ ID NO: 1138360 - DNA, 25 bp, Homo sapien
taaatttcaggaggaacgcctctgt

SEQ ID NO: 1138361 - DNA, 25 bp, Homo sapien
ccaggcatagcctgtctaaaaggca

SEQ ID NO: 1138362 - DNA, 25 bp, Homo sapien
tgcttctttccgtaagtggtcaaat

SEQ ID NO: 1138363 - DNA, 25 bp, Homo sapien
cacttgcttctttccgtaagtggtc

SEQ ID NO: 1138364 - DNA, 25 bp, Homo sapien
ttgcttctttccgtaagtggtcaaa

SEQ ID NO: 1138365 - DNA, 25 bp, Homo sapien
acttgcttctttccgtaagtggtca

SEQ ID NO: 1138366 - DNA, 25 bp, Homo sapien
aaaacactctctgataacgaagcag

SEQ ID NO: 1138367 - DNA, 25 bp, Homo sapien
ctccaaaggataaggtaaatataag

SEQ ID NO: 1138368 - DNA, 25 bp, Homo sapien
ttggtaggccaaagcctccaaagga

SEQ ID NO: 1138369 - DNA, 25 bp, Homo sapien
ctctgataacgaagcagtcagatac

SEQ ID NO: 1138370 - DNA, 25 bp, Homo sapien
aataatagtctgttgcccatcgata

SEQ ID NO: 1138371 - DNA, 25 bp, Homo sapien
gcccatcgatagttttagcataaac

SEQ ID NO: 1138372 - DNA, 25 bp, Homo sapien
tggtggctttcaatacatgcaataa

SEQ ID NO: 1138373 - DNA, 25 bp, Homo sapien
tttaggctgaaactggtggctttca

SEQ ID NO: 1138374 - DNA, 25 bp, Homo sapien
caagtagcagtaaccctaagccaag

SEQ ID NO: 1138375 - DNA, 25 bp, Homo sapien
tattctgctcatgggaggctcttcc

SEQ ID NO: 1138376 - DNA, 25 bp, Homo sapien
aaactcagattttcaacagggcact

SEQ ID NO: 1138377 - DNA, 25 bp, Homo sapien
gatgaataggctgctgagttacaca

SEQ ID NO: 1138378 - DNA, 25 bp, Homo sapien
cacacacacaacattgcagaattag

SEQ ID NO: 1138379 - DNA, 25 bp, Homo sapien
acacacacaacattgcagaattagc

SEQ ID NO: 1138380 - DNA, 25 bp, Homo sapien
cacacaacattgcagaattagcaat

SEQ ID NO: 1138381 - DNA, 25 bp, Homo sapien
cacacacaacattgcagaattagca

SEQ ID NO: 1138382 - DNA, 25 bp, Homo sapien
tgaatcttaagcacgccaaccacct

SEQ ID NO: 1138383 - DNA, 25 bp, Homo sapien
gctgtaggtggtgtgatggtgaact

SEQ ID NO: 1138384 - DNA, 25 bp, Homo sapien
gtgatggtgaacttccactctgatc

SEQ ID NO: 1138385 - DNA, 25 bp, Homo sapien
ggtgaacttccactctgatctccaa

SEQ ID NO: 1138386 - DNA, 25 bp, Homo sapien
tatggccaggagctacttgttgcag

SEQ ID NO: 1138387 - DNA, 25 bp, Homo sapien
tattgggctccggaagactaaacag

SEQ ID NO: 1138388 - DNA, 25 bp, Homo sapien
tcttacatatcactgagggctcctc

SEQ ID NO: 1138389 - DNA, 25 bp, Homo sapien
gaggaagctgccatatttatctacc

SEQ ID NO: 1138390 - DNA, 25 bp, Homo sapien
cgtgcccggcaagtatcttcttgaa

SEQ ID NO: 1138391 - DNA, 25 bp, Homo sapien
caatataagaatctactgagaacag

SEQ ID NO: 1138392 - DNA, 25 bp, Homo sapien
gaagctagactttccataccctctc

SEQ ID NO: 1138393 - DNA, 25 bp, Homo sapien
tccagatgggcatgagaagctagac

SEQ ID NO: 1138394 - DNA, 25 bp, Homo sapien
taagctatctttaagttgatgagcc

SEQ ID NO: 1138395 - DNA, 25 bp, Homo sapien
ttgatgagccattttaccaactctg

SEQ ID NO: 1138396 - DNA, 25 bp, Homo sapien
gggaagttcatagagaaacctgtta

SEQ ID NO: 1138397 - DNA, 25 bp, Homo sapien
acacaaatccatgctttaagctatc

SEQ ID NO: 1138398 - DNA, 25 bp, Homo sapien
gaaacagttagtgaatcctgtacat

SEQ ID NO: 1138399 - DNA, 25 bp, Homo sapien
tgtacatctttatgactaaccaact

SEQ ID NO: 1138400 - DNA, 25 bp, Homo sapien
aacagttagtgaatcctgtacatct

SEQ ID NO: 1138401 - DNA, 25 bp, Homo sapien
ccaactgaacattgccatcttcata

SEQ ID NO: 1138402 - DNA, 25 bp, Homo sapien
actcattttctgcattctctatgat

SEQ ID NO: 1138403 - DNA, 25 bp, Homo sapien
tgatactcattttctgcattctcta

SEQ ID NO: 1138404 - DNA, 25 bp, Homo sapien
aaactccttggcagtttgggcttca

SEQ ID NO: 1138405 - DNA, 25 bp, Homo sapien
taataaactccttggcagtttgggc

SEQ ID NO: 1138406 - DNA, 25 bp, Homo sapien
agataattgaagatgagttgcttga

SEQ ID NO: 1138407 - DNA, 25 bp, Homo sapien
aacagaaaagtaatgctatagtcaa

SEQ ID NO: 1138408 - DNA, 25 bp, Homo sapien
tagtcaatggatatgcttgagtccc

SEQ ID NO: 1138409 - DNA, 25 bp, Homo sapien
tgaagatgagttgcttgaacagaaa

SEQ ID NO: 1138410 - DNA, 25 bp, Homo sapien
aagctgccggcgcaaggccttgaat

SEQ ID NO: 1138411 - DNA, 25 bp, Homo sapien
attttggtgcgggtaactggaagct

SEQ ID NO: 1138412 - DNA, 25 bp, Homo sapien
agtatcttgttccagtcgattttgg

SEQ ID NO: 1138413 - DNA, 25 bp, Homo sapien
tgccaatcttgtagctgagtatctt

SEQ ID NO: 1138414 - DNA, 25 bp, Homo sapien
tcaagacaacgctataggttcaaca

SEQ ID NO: 1138415 - DNA, 25 bp, Homo sapien
gggtcacctggaacaaacttgcttg

SEQ ID NO: 1138416 - DNA, 25 bp, Homo sapien
tagctagagactgtagcatagcctc

SEQ ID NO: 1138417 - DNA, 25 bp, Homo sapien
gactgaagtaccagaagtgcttgga

SEQ ID NO: 1138418 - DNA, 25 bp, Homo sapien
gaagatagtgtggtatggatggata

SEQ ID NO: 1138419 - DNA, 25 bp, Homo sapien
tacagaagatagtgtggtatggatg

SEQ ID NO: 1138420 - DNA, 25 bp, Homo sapien
atacagaagatagtgtggtatggat

SEQ ID NO: 1138421 - DNA, 25 bp, Homo sapien
atagtgtggtatggatggatagtat

SEQ ID NO: 1138422 - DNA, 25 bp, Homo sapien
gatgagtccagcaccgaagtcttag

SEQ ID NO: 1138423 - DNA, 25 bp, Homo sapien
caatagagggataaccactgaggct

SEQ ID NO: 1138424 - DNA, 25 bp, Homo sapien
gaacaggcactggaactaggcaagc

SEQ ID NO: 1138425 - DNA, 25 bp, Homo sapien
accaaaatataggagggaagcctca

SEQ ID NO: 1138426 - DNA, 25 bp, Homo sapien
tgaccagcaaatctaaatccctatt

SEQ ID NO: 1138427 - DNA, 25 bp, Homo sapien
tcttggatgttctcaaaacgtacac

SEQ ID NO: 1138428 - DNA, 25 bp, Homo sapien
ccgtactcaaactgaatgtctggct

SEQ ID NO: 1138429 - DNA, 25 bp, Homo sapien
caaaagtctgcagtatagtaaaacc

SEQ ID NO: 1138430 - DNA, 25 bp, Homo sapien
taactctttcctaaagcgtctgacc

SEQ ID NO: 1138431 - DNA, 25 bp, Homo sapien
gaggacctccgagcctcagccaggg

SEQ ID NO: 1138432 - DNA, 25 bp, Homo sapien
tcccctggcttctagccagtatcag

SEQ ID NO: 1138433 - DNA, 25 bp, Homo sapien
gccagtatcagaacgtggctaccgc

SEQ ID NO: 1138434 - DNA, 25 bp, Homo sapien
caggagggaagccccctaactctga

SEQ ID NO: 1138435 - DNA, 25 bp, Homo sapien
gcaggagggaagccccctaactctg

SEQ ID NO: 1138436 - DNA, 25 bp, Homo sapien
atgaaactgaaagtcgccgctgcag

SEQ ID NO: 1138437 - DNA, 25 bp, Homo sapien
aaatgaaactgaaagtcgccgctgc

SEQ ID NO: 1138438 - DNA, 25 bp, Homo sapien
aatgaaactgaaagtcgccgctgca

SEQ ID NO: 1138439 - DNA, 25 bp, Homo sapien
gttataaatggtccgcagccgctcg

SEQ ID NO: 1138440 - DNA, 25 bp, Homo sapien
aggaaactctcgaaacactggcccg

SEQ ID NO: 1138441 - DNA, 25 bp, Homo sapien
gccggcagctgaacttactgggcat

SEQ ID NO: 1138442 - DNA, 25 bp, Homo sapien
agccgctcgcgatctgtctccatgt

SEQ ID NO: 1138443 - DNA, 25 bp, Homo sapien
ctccagcttggttaacagagcttgg

SEQ ID NO: 1138444 - DNA, 25 bp, Homo sapien
tccagcttggttaacagagcttggg

SEQ ID NO: 1138445 - DNA, 25 bp, Homo sapien
aggggagtggcaagatcatatttgc

SEQ ID NO: 1138446 - DNA, 25 bp, Homo sapien
cactgcggttggtgggttttaagca

SEQ ID NO: 1138447 - DNA, 25 bp, Homo sapien
cgtcagaggctacactgtggttaca

SEQ ID NO: 1138448 - DNA, 25 bp, Homo sapien
cactctggcatcaggattggaggat

SEQ ID NO: 1138449 - DNA, 25 bp, Homo sapien
tccagagatcaaatagcctggcttt

SEQ ID NO: 1138450 - DNA, 25 bp, Homo sapien
cttctccagagatcaaatagcctgg

SEQ ID NO: 1138451 - DNA, 25 bp, Homo sapien
aagtcatagggtgcaggtggaaccc

SEQ ID NO: 1138452 - DNA, 25 bp, Homo sapien
ggaagggaaaggatccttctccaga

SEQ ID NO: 1138453 - DNA, 25 bp, Homo sapien
tttcagggaaggcaatgggacttcc

SEQ ID NO: 1138454 - DNA, 25 bp, Homo sapien
gcaaggtggctgatcagacagcagt

SEQ ID NO: 1138455 - DNA, 25 bp, Homo sapien
tacagatgtccaagtgtgtgggcaa

SEQ ID NO: 1138456 - DNA, 25 bp, Homo sapien
gacttcccaaggcaaaatacagttg

SEQ ID NO: 1138457 - DNA, 25 bp, Homo sapien
cggcccagcggtcgagtctgaagaa

SEQ ID NO: 1138458 - DNA, 25 bp, Homo sapien
ctcttttctgggaaccgcacgtcgg

SEQ ID NO: 1138459 - DNA, 25 bp, Homo sapien
ccgagtcttggtgacgtaggccaga

SEQ ID NO: 1138460 - DNA, 25 bp, Homo sapien
gcaatcttcattccatacagcatgg

SEQ ID NO: 1138461 - DNA, 25 bp, Homo sapien
catgtttcccatgaagatactcagc

SEQ ID NO: 1138462 - DNA, 25 bp, Homo sapien
gagctgcccatctcgggcttcatgg

SEQ ID NO: 1138463 - DNA, 25 bp, Homo sapien
tgagggtaacagactgggttccgcc

SEQ ID NO: 1138464 - DNA, 25 bp, Homo sapien
aatccaggcggataaggagctgccc

SEQ ID NO: 1138465 - DNA, 25 bp, Homo sapien
gggaagtagcccacaaagctggtct

SEQ ID NO: 1138466 - DNA, 25 bp, Homo sapien
caatgtagaatgtgccggctccttc

SEQ ID NO: 1138467 - DNA, 25 bp, Homo sapien
cggcagccaagaagcgggcaatgta

SEQ ID NO: 1138468 - DNA, 25 bp, Homo sapien
caccacagggtttccggtgatccgg

SEQ ID NO: 1138469 - DNA, 25 bp, Homo sapien
gatctctgcgatctccttaggggca

SEQ ID NO: 1138470 - DNA, 25 bp, Homo sapien
cagcgccatacttaactccaggtca

SEQ ID NO: 1138471 - DNA, 25 bp, Homo sapien
gcagtgaagatacttgttccctgaa

SEQ ID NO: 1138472 - DNA, 25 bp, Homo sapien
tgggtagtatgtccccagcgccata

SEQ ID NO: 1138473 - DNA, 25 bp, Homo sapien
agcttcacctcatagttcctccact

SEQ ID NO: 1138474 - DNA, 25 bp, Homo sapien
tgccggatatcatgctccatctgca

SEQ ID NO: 1138475 - DNA, 25 bp, Homo sapien
gactccaggtcatagtgccggatat

SEQ ID NO: 1138476 - DNA, 25 bp, Homo sapien
caggtcatgggcaccgactccaggt

SEQ ID NO: 1138477 - DNA, 25 bp, Homo sapien
accctcctcacactcaatctgagcc

SEQ ID NO: 1138478 - DNA, 25 bp, Homo sapien
cctcctcacactcaatctgagccct

SEQ ID NO: 1138479 - DNA, 25 bp, Homo sapien
ccctcctcacactcaatctgagccc

SEQ ID NO: 1138480 - DNA, 25 bp, Homo sapien
acacaagcaagcttctgtcccaggg

SEQ ID NO: 1138481 - DNA, 25 bp, Homo sapien
acaagcaagcttctgtcccagggat

SEQ ID NO: 1138482 - DNA, 25 bp, Homo sapien
gtgtgaacacaagcaagcttctgtc

SEQ ID NO: 1138483 - DNA, 25 bp, Homo sapien
gaacacaagcaagcttctgtcccag

SEQ ID NO: 1138484 - DNA, 25 bp, Homo sapien
ggtccaattccaccttgtgcacaaa

SEQ ID NO: 1138485 - DNA, 25 bp, Homo sapien
aaaagctcagcttgacacggtccaa

SEQ ID NO: 1138486 - DNA, 25 bp, Homo sapien
gtctccgaggacaaaagggcaaaca

SEQ ID NO: 1138487 - DNA, 25 bp, Homo sapien
gcacaaagcccttatatgtgatggg

SEQ ID NO: 1138488 - DNA, 25 bp, Homo sapien
cagcggctggcggttgaaggtaaag

SEQ ID NO: 1138489 - DNA, 25 bp, Homo sapien
agggcacggtgctggactcgcagcg

SEQ ID NO: 1138490 - DNA, 25 bp, Homo sapien
acgtcccgaggtgccacaggaaaga

SEQ ID NO: 1138491 - DNA, 25 bp, Homo sapien
gcccatccacaaagcggctcaggag

SEQ ID NO: 1138492 - DNA, 25 bp, Homo sapien
tggcagagggaccaggaatgtgaac

SEQ ID NO: 1138493 - DNA, 25 bp, Homo sapien
ctggcagagggaccaggaatgtgaa

SEQ ID NO: 1138494 - DNA, 25 bp, Homo sapien
gggtggtgcccgtaacaatgtgcct

SEQ ID NO: 1138495 - DNA, 25 bp, Homo sapien
ggtgcccgtaacaatgtgcctcatg

SEQ ID NO: 1138496 - DNA, 25 bp, Homo sapien
tgactccagactccggtcgtacagc

SEQ ID NO: 1138497 - DNA, 25 bp, Homo sapien
ctgggtttgactccagactccggtc

SEQ ID NO: 1138498 - DNA, 25 bp, Homo sapien
taattgcctccactaacgtgacagt

SEQ ID NO: 1138499 - DNA, 25 bp, Homo sapien
aacgtgacagtcttgccggtgcctg

SEQ ID NO: 1138500 - DNA, 25 bp, Homo sapien
ctgcttaattgcctccactaacgtg

SEQ ID NO: 1138501 - DNA, 25 bp, Homo sapien
ctggaggcccaaagatgatgtaggg

SEQ ID NO: 1138502 - DNA, 25 bp, Homo sapien
ttagaagcaggagcatttcgggagt

SEQ ID NO: 1138503 - DNA, 25 bp, Homo sapien
ctgcttagaagcaggagcatttcgg

SEQ ID NO: 1138504 - DNA, 25 bp, Homo sapien
ggagcatttcgggagtgggaaggaa

SEQ ID NO: 1138505 - DNA, 25 bp, Homo sapien
gcttagaagcaggagcatttcggga

SEQ ID NO: 1138506 - DNA, 25 bp, Homo sapien
ctccttgggctagtcttccccaagt

SEQ ID NO: 1138507 - DNA, 25 bp, Homo sapien
ttgggctagtcttccccaagtgctg

SEQ ID NO: 1138508 - DNA, 25 bp, Homo sapien
cttgggctagtcttccccaagtgct

SEQ ID NO: 1138509 - DNA, 25 bp, Homo sapien
actccttgggctagtcttccccaag

SEQ ID NO: 1138510 - DNA, 25 bp, Homo sapien
gagcctttgacagagtaggtcagcc

SEQ ID NO: 1138511 - DNA, 25 bp, Homo sapien
gggctttgggcaagtgcttcaccac

SEQ ID NO: 1138512 - DNA, 25 bp, Homo sapien
cagcccctgagttggatggagcgca

SEQ ID NO: 1138513 - DNA, 25 bp, Homo sapien
ggtaccatgcggatgtccctgctgg

SEQ ID NO: 1138514 - DNA, 25 bp, Homo sapien
gaaatacatactcccccttctttgc

SEQ ID NO: 1138515 - DNA, 25 bp, Homo sapien
tctttgcgtcccagttgcagcaggg

SEQ ID NO: 1138516 - DNA, 25 bp, Homo sapien
tcttcttggcgggaaatacatactc

SEQ ID NO: 1138517 - DNA, 25 bp, Homo sapien
aattaagacccggtattcctgcagc

SEQ ID NO: 1138518 - DNA, 25 bp, Homo sapien
gattcagagacacacccacacacac

SEQ ID NO: 1138519 - DNA, 25 bp, Homo sapien
agagacacacccacacacactcccc

SEQ ID NO: 1138520 - DNA, 25 bp, Homo sapien
agacacacccacacacactccccac

SEQ ID NO: 1138521 - DNA, 25 bp, Homo sapien
tcagagacacacccacacacactcc

SEQ ID NO: 1138522 - DNA, 25 bp, Homo sapien
cagtggccagcctcatcgatgaaga

SEQ ID NO: 1138523 - DNA, 25 bp, Homo sapien
ccatgcagtggccagcctcatcgat

SEQ ID NO: 1138524 - DNA, 25 bp, Homo sapien
aagatgtgtgtgaagtgatcaatgg

SEQ ID NO: 1138525 - DNA, 25 bp, Homo sapien
tgaagtgatcaatgggaaactgggc

SEQ ID NO: 1138526 - DNA, 25 bp, Homo sapien
tgcggagcagcttggttatgaactg

SEQ ID NO: 1138527 - DNA, 25 bp, Homo sapien
gggtcatagccatcagggcccttct

SEQ ID NO: 1138528 - DNA, 25 bp, Homo sapien
ttcttgtacagggagttgtaggtga

SEQ ID NO: 1138529 - DNA, 25 bp, Homo sapien
cagtgagtatcccagtccatgcttc

SEQ ID NO: 1138530 - DNA, 25 bp, Homo sapien
tccccttcataatagagctggttag

SEQ ID NO: 1138531 - DNA, 25 bp, Homo sapien
ccttcataatagagctggttaggaa

SEQ ID NO: 1138532 - DNA, 25 bp, Homo sapien
taggcccgcccagcggcagaagcgt

SEQ ID NO: 1138533 - DNA, 25 bp, Homo sapien
gcgttctcgatccacgacatcagca

SEQ ID NO: 1138534 - DNA, 25 bp, Homo sapien
ctcatctttgcccattacgccgtga

SEQ ID NO: 1138535 - DNA, 25 bp, Homo sapien
cccattacgccgtgaaagatgatgg

SEQ ID NO: 1138536 - DNA, 25 bp, Homo sapien
ctttgcccattacgccgtgaaagat

SEQ ID NO: 1138537 - DNA, 25 bp, Homo sapien
ttcacgctcatctttgcccattacg

SEQ ID NO: 1138538 - DNA, 25 bp, Homo sapien
cagcttcaggtaggaagtcactgtg

SEQ ID NO: 1138539 - DNA, 25 bp, Homo sapien
ttcgagggctcaggcgagctttgcc

SEQ ID NO: 1138540 - DNA, 25 bp, Homo sapien
ttccggtacggggagatgacgccca

SEQ ID NO: 1138541 - DNA, 25 bp, Homo sapien
gagatgacgcccacacttcgagggc

SEQ ID NO: 1138542 - DNA, 25 bp, Homo sapien
ggtgctcttctgagatacggagcca

SEQ ID NO: 1138543 - DNA, 25 bp, Homo sapien
tctgagatacggagccagcagaggc

SEQ ID NO: 1138544 - DNA, 25 bp, Homo sapien
ggatattaaggaggtaccatctggg

SEQ ID NO: 1138545 - DNA, 25 bp, Homo sapien
tggagcctctgcctagtggtctgga

SEQ ID NO: 1138546 - DNA, 25 bp, Homo sapien
ccattaacctaatgcaagagggagc

SEQ ID NO: 1138547 - DNA, 25 bp, Homo sapien
tcgtgccattaacctaatgcaagag

SEQ ID NO: 1138548 - DNA, 25 bp, Homo sapien
tctcgtgccattaacctaatgcaag

SEQ ID NO: 1138549 - DNA, 25 bp, Homo sapien
ttctctcgtgccattaacctaatgc

SEQ ID NO: 1138550 - DNA, 25 bp, Homo sapien
gtcctcgaagctccctgtcaagttt

SEQ ID NO: 1138551 - DNA, 25 bp, Homo sapien
gtttggtgatgcagtaacggatttt

SEQ ID NO: 1138552 - DNA, 25 bp, Homo sapien
gtgatgcagtaacggattttctcca

SEQ ID NO: 1138553 - DNA, 25 bp, Homo sapien
tgtcatccagtcctcgaagctccct

SEQ ID NO: 1138554 - DNA, 25 bp, Homo sapien
taagaatatacaaccctgggcccta

SEQ ID NO: 1138555 - DNA, 25 bp, Homo sapien
tatccttagggcagaggcctcaaac

SEQ ID NO: 1138556 - DNA, 25 bp, Homo sapien
tcgagctctattcaaggcagcaggg

SEQ ID NO: 1138557 - DNA, 25 bp, Homo sapien
tgcagccagtgttgagaccagaacc

SEQ ID NO: 1138558 - DNA, 25 bp, Homo sapien
aggtcactgggcaattgtagatcag

SEQ ID NO: 1138559 - DNA, 25 bp, Homo sapien
cagtgagtgaaccagtgctgcgaca

SEQ ID NO: 1138560 - DNA, 25 bp, Homo sapien
gaaacatgaaggttgaatcctgctg

SEQ ID NO: 1138561 - DNA, 25 bp, Homo sapien
tccaaggagggtacagagaggtcac

SEQ ID NO: 1138562 - DNA, 25 bp, Homo sapien
ggagatgaggatgacgcttcgttct

SEQ ID NO: 1138563 - DNA, 25 bp, Homo sapien
aacccagattaaagtccagatccag

SEQ ID NO: 1138564 - DNA, 25 bp, Homo sapien
agatgaggatgacgcttcgttcttg

SEQ ID NO: 1138565 - DNA, 25 bp, Homo sapien
ctctggctgcttcgcacggtggaga

SEQ ID NO: 1138566 - DNA, 25 bp, Homo sapien
cccgggtcacagctacattgaacct

SEQ ID NO: 1138567 - DNA, 25 bp, Homo sapien
tcagggtcatggcccaggagaaggg

SEQ ID NO: 1138568 - DNA, 25 bp, Homo sapien
ttggcccgggtcacagctacattga

SEQ ID NO: 1138569 - DNA, 25 bp, Homo sapien
ggcccgggtcacagctacattgaac

SEQ ID NO: 1138570 - DNA, 25 bp, Homo sapien
gattaactgagcgataagcaagcgc

SEQ ID NO: 1138571 - DNA, 25 bp, Homo sapien
aagcaagcgcttaaaaaagatccac

SEQ ID NO: 1138572 - DNA, 25 bp, Homo sapien
aatggacacatctgaggattaactg

SEQ ID NO: 1138573 - DNA, 25 bp, Homo sapien
tggaggctaagccacggtcctgtcc

SEQ ID NO: 1138574 - DNA, 25 bp, Homo sapien
aattctgtccctgttgcaggtccag

SEQ ID NO: 1138575 - DNA, 25 bp, Homo sapien
tgtccctgttgcaggtccagtttgg

SEQ ID NO: 1138576 - DNA, 25 bp, Homo sapien
cagtaaattctgtccctgttgcagg

SEQ ID NO: 1138577 - DNA, 25 bp, Homo sapien
ccctgttgcaggtccagtttggcag

SEQ ID NO: 1138578 - DNA, 25 bp, Homo sapien
gtagaggggctgagcttgctcagac

SEQ ID NO: 1138579 - DNA, 25 bp, Homo sapien
ctgaggtagaggggctgagcttgct

SEQ ID NO: 1138580 - DNA, 25 bp, Homo sapien
gaggtagaggggctgagcttgctca

SEQ ID NO: 1138581 - DNA, 25 bp, Homo sapien
ggtagaggggctgagcttgctcaga

SEQ ID NO: 1138582 - DNA, 25 bp, Homo sapien
cctgggggaggtagtcatggctgtg

SEQ ID NO: 1138583 - DNA, 25 bp, Homo sapien
tcccgctcctgggggaggtagtcat

SEQ ID NO: 1138584 - DNA, 25 bp, Homo sapien
cttcaccctcccgctcctgggggag

SEQ ID NO: 1138585 - DNA, 25 bp, Homo sapien
cttgcagagacaggcccccttcacc

SEQ ID NO: 1138586 - DNA, 25 bp, Homo sapien
tcagagctcattcctccactctggc

SEQ ID NO: 1138587 - DNA, 25 bp, Homo sapien
cagagctcattcctccactctggct

SEQ ID NO: 1138588 - DNA, 25 bp, Homo sapien
agctcattcctccactctggctcca

SEQ ID NO: 1138589 - DNA, 25 bp, Homo sapien
agagctcattcctccactctggctc

SEQ ID NO: 1138590 - DNA, 25 bp, Homo sapien
ttggctggtgcgagaaggctgggtg

SEQ ID NO: 1138591 - DNA, 25 bp, Homo sapien
tgcgagaaggctgggtgctgtgtct

SEQ ID NO: 1138592 - DNA, 25 bp, Homo sapien
ggtgcgagaaggctgggtgctgtgt

SEQ ID NO: 1138593 - DNA, 25 bp, Homo sapien
gctggtgcgagaaggctgggtgctg

SEQ ID NO: 1138594 - DNA, 25 bp, Homo sapien
cattgttttctagccccgaggtggt

SEQ ID NO: 1138595 - DNA, 25 bp, Homo sapien
tgctcagccaagaccaaggagggag

SEQ ID NO: 1138596 - DNA, 25 bp, Homo sapien
tccaggtccgcaagaacaagcgtcg

SEQ ID NO: 1138597 - DNA, 25 bp, Homo sapien
tacaggctccaacgtgtgtggcagc

SEQ ID NO: 1138598 - DNA, 25 bp, Homo sapien
tgggagacgctcattcaggcaagag

SEQ ID NO: 1138599 - DNA, 25 bp, Homo sapien
caggagaggttcatgtagtcaacag

SEQ ID NO: 1138600 - DNA, 25 bp, Homo sapien
ttttggatccctggccacgaagctg

SEQ ID NO: 1138601 - DNA, 25 bp, Homo sapien
cagctgctacacttatgggtgaggc

SEQ ID NO: 1138602 - DNA, 25 bp, Homo sapien
aagggatgtgagagctggcttattc

SEQ ID NO: 1138603 - DNA, 25 bp, Homo sapien
ttcagggacctgtaagtggctctct

SEQ ID NO: 1138604 - DNA, 25 bp, Homo sapien
ggcattgtgtaagtggctggaagaa

SEQ ID NO: 1138605 - DNA, 25 bp, Homo sapien
gagatgttaggtctgtgtgttagaa

SEQ ID NO: 1138606 - DNA, 25 bp, Homo sapien
ttatttattccagttaattgtccat

SEQ ID NO: 1138607 - DNA, 25 bp, Homo sapien
taagaaaatctgccctcggggagac

SEQ ID NO: 1138608 - DNA, 25 bp, Homo sapien
tgtccattccgttcagaattgggac

SEQ ID NO: 1138609 - DNA, 25 bp, Homo sapien
cagaattgggactattaagatgatt

SEQ ID NO: 1138610 - DNA, 25 bp, Homo sapien
tacccggacactgatgtcatcctca

SEQ ID NO: 1138611 - DNA, 25 bp, Homo sapien
tgcttctccatcgacagccctgaca

SEQ ID NO: 1138612 - DNA, 25 bp, Homo sapien
tctcctacccggacactgatgtcat

SEQ ID NO: 1138613 - DNA, 25 bp, Homo sapien
gtcatcctcatgtgcttctccatcg

SEQ ID NO: 1138614 - DNA, 25 bp, Homo sapien
gaggtctgatgtagccacactgtct

SEQ ID NO: 1138615 - DNA, 25 bp, Homo sapien
taaggggtcagtgggacagtccctc

SEQ ID NO: 1138616 - DNA, 25 bp, Homo sapien
ctgggaattcaagagagcgattgga

SEQ ID NO: 1138617 - DNA, 25 bp, Homo sapien
gcctctcacagggagttgtccatgc

SEQ ID NO: 1138618 - DNA, 25 bp, Homo sapien
ggtgtagggtgggccggcaaagtca

SEQ ID NO: 1138619 - DNA, 25 bp, Homo sapien
tgtagggtgggccggcaaagtcaac

SEQ ID NO: 1138620 - DNA, 25 bp, Homo sapien
gtgtagggtgggccggcaaagtcaa

SEQ ID NO: 1138621 - DNA, 25 bp, Homo sapien
ctaggtgtagggtgggccggcaaag

SEQ ID NO: 1138622 - DNA, 25 bp, Homo sapien
ggtatctccagaacggattccttcc

SEQ ID NO: 1138623 - DNA, 25 bp, Homo sapien
tcttggtatctccagaacggattcc

SEQ ID NO: 1138624 - DNA, 25 bp, Homo sapien
aatgcagtatctcttggtatctcca

SEQ ID NO: 1138625 - DNA, 25 bp, Homo sapien
tatctcttggtatctccagaacgga

SEQ ID NO: 1138626 - DNA, 25 bp, Homo sapien
tgggcggtggtcggaccgcgtcggc

SEQ ID NO: 1138627 - DNA, 25 bp, Homo sapien
ctgggcggtggtcggaccgcgtcgg

SEQ ID NO: 1138628 - DNA, 25 bp, Homo sapien
tcttgggaactcgtccccaggagag

SEQ ID NO: 1138629 - DNA, 25 bp, Homo sapien
cgttccctccaagcggagtcggcat

SEQ ID NO: 1138630 - DNA, 25 bp, Homo sapien
cgaggaggggcttcggcctgggcgt

SEQ ID NO: 1138631 - DNA, 25 bp, Homo sapien
gcgtcttgggaactcgtccccagga

SEQ ID NO: 1138632 - DNA, 25 bp, Homo sapien
cgacctggaggggtggacgcccctg

SEQ ID NO: 1138633 - DNA, 25 bp, Homo sapien
tggctctccccgacctggaggggtg

SEQ ID NO: 1138634 - DNA, 25 bp, Homo sapien
aggaatctccccgtggctctccccg

SEQ ID NO: 1138635 - DNA, 25 bp, Homo sapien
ctcctccgcagtccaggaatctccc

SEQ ID NO: 1138636 - DNA, 25 bp, Homo sapien
aaggctgggcagagtctgagtccac

SEQ ID NO: 1138637 - DNA, 25 bp, Homo sapien
tcctcccctaggggattgaaggctg

SEQ ID NO: 1138638 - DNA, 25 bp, Homo sapien
ttgaaggctgggcagagtctgagtc

SEQ ID NO: 1138639 - DNA, 25 bp, Homo sapien
cctcccctaggggattgaaggctgg

SEQ ID NO: 1138640 - DNA, 25 bp, Homo sapien
cctgatccggagaagtaagcttggt

SEQ ID NO: 1138641 - DNA, 25 bp, Homo sapien
tacttccaacttgcttgagggccac

SEQ ID NO: 1138642 - DNA, 25 bp, Homo sapien
taaaatgacaggaagcgtcccgtcc

SEQ ID NO: 1138643 - DNA, 25 bp, Homo sapien
cagatctagaggtggtcttcacggg

SEQ ID NO: 1138644 - DNA, 25 bp, Homo sapien
agctttgcggacagcttgcagccac

SEQ ID NO: 1138645 - DNA, 25 bp, Homo sapien
cataatggtgccaggaataggaggt

SEQ ID NO: 1138646 - DNA, 25 bp, Homo sapien
gagccttaggattaggccatggctg

SEQ ID NO: 1138647 - DNA, 25 bp, Homo sapien
caaagcaggcatagtaagtctacca

SEQ ID NO: 1138648 - DNA, 25 bp, Homo sapien
ttctggtcaggttggcatcatccgc

SEQ ID NO: 1138649 - DNA, 25 bp, Homo sapien
ttttccaaggttcctgccggcaggc

SEQ ID NO: 1138650 - DNA, 25 bp, Homo sapien
ggtgctgtctagtccggagccctgt

SEQ ID NO: 1138651 - DNA, 25 bp, Homo sapien
gatgcccactggttcgatctgctgg

SEQ ID NO: 1138652 - DNA, 25 bp, Homo sapien
ttcccacaccagagggctggaatgg

SEQ ID NO: 1138653 - DNA, 25 bp, Homo sapien
ggccacagcctccaatagctttcca

SEQ ID NO: 1138654 - DNA, 25 bp, Homo sapien
gagctggcttggcttagcatccctt

SEQ ID NO: 1138655 - DNA, 25 bp, Homo sapien
tgagcctttgaaggccacagcctcc

SEQ ID NO: 1138656 - DNA, 25 bp, Homo sapien
aaaggatagagggagccgatggctc

SEQ ID NO: 1138657 - DNA, 25 bp, Homo sapien
tggacaagtaggaaagattcatagg

SEQ ID NO: 1138658 - DNA, 25 bp, Homo sapien
tcagactcactccacctggacaagt

SEQ ID NO: 1138659 - DNA, 25 bp, Homo sapien
gaagttcagcccaattctgaagctg

SEQ ID NO: 1138660 - DNA, 25 bp, Homo sapien
ccaggcatctttcgacctggcacag

SEQ ID NO: 1138661 - DNA, 25 bp, Homo sapien
ccccaggcatctttcgacctggcac

SEQ ID NO: 1138662 - DNA, 25 bp, Homo sapien
caggcatctttcgacctggcacaga

SEQ ID NO: 1138663 - DNA, 25 bp, Homo sapien
ggcatctttcgacctggcacagagt

SEQ ID NO: 1138664 - DNA, 25 bp, Homo sapien
tccagttccgctcgaccctctcact

SEQ ID NO: 1138665 - DNA, 25 bp, Homo sapien
gtgctccagttccgctcgaccctct

SEQ ID NO: 1138666 - DNA, 25 bp, Homo sapien
agttccgctcgaccctctcactcat

SEQ ID NO: 1138667 - DNA, 25 bp, Homo sapien
gcagccagccgcccgtgctccagtt

SEQ ID NO: 1138668 - DNA, 25 bp, Homo sapien
cctcgatgcggttccggttgcagca

SEQ ID NO: 1138669 - DNA, 25 bp, Homo sapien
caggagcatttcaccgtctgggagc

SEQ ID NO: 1138670 - DNA, 25 bp, Homo sapien
gtgagccgcaatcacctcgcaggtg

SEQ ID NO: 1138671 - DNA, 25 bp, Homo sapien
ggccacctggccagaaaaacaggag

SEQ ID NO: 1138672 - DNA, 25 bp, Homo sapien
tagggtctctacgagcacagtgggc

SEQ ID NO: 1138673 - DNA, 25 bp, Homo sapien
cagctctagggtctctacgagcaca

SEQ ID NO: 1138674 - DNA, 25 bp, Homo sapien
gtctctacgagcacagtgggcagcc

SEQ ID NO: 1138675 - DNA, 25 bp, Homo sapien
gcggagtgcagctctagggtctcta

SEQ ID NO: 1138676 - DNA, 25 bp, Homo sapien
acaggtccgggagcaccttacactc

SEQ ID NO: 1138677 - DNA, 25 bp, Homo sapien
caccatctctgcaggacgatggagg

SEQ ID NO: 1138678 - DNA, 25 bp, Homo sapien
agggctccatctgacaccaccatct

SEQ ID NO: 1138679 - DNA, 25 bp, Homo sapien
tttgactttgtgtccactgctgcag

SEQ ID NO: 1138680 - DNA, 25 bp, Homo sapien
gagcaggcagcaaaccatgaaaata

SEQ ID NO: 1138681 - DNA, 25 bp, Homo sapien
gtggagcaggcagcaaaccatgaaa

SEQ ID NO: 1138682 - DNA, 25 bp, Homo sapien
tcttgggtgctgtgacagtggacag

SEQ ID NO: 1138683 - DNA, 25 bp, Homo sapien
ctcttgggtgctgtgacagtggaca

SEQ ID NO: 1138684 - DNA, 25 bp, Homo sapien
agtcaagcctttcttgtccaggccg

SEQ ID NO: 1138685 - DNA, 25 bp, Homo sapien
ttgtccaggccgtgacccccaagag

SEQ ID NO: 1138686 - DNA, 25 bp, Homo sapien
tcagtcaagcctttcttgtccaggc

SEQ ID NO: 1138687 - DNA, 25 bp, Homo sapien
gcctttcttgtccaggccgtgaccc

SEQ ID NO: 1138688 - DNA, 25 bp, Homo sapien
aatgccccggaaagactgatgctgc

SEQ ID NO: 1138689 - DNA, 25 bp, Homo sapien
tgtggccacagggtatctgaagaac

SEQ ID NO: 1138690 - DNA, 25 bp, Homo sapien
catgaggcatgtaagtgaatcccca

SEQ ID NO: 1138691 - DNA, 25 bp, Homo sapien
aaagcccagctccacattaggtatg

SEQ ID NO: 1138692 - DNA, 25 bp, Homo sapien
tgtccatcccatacccaatgaatgg

SEQ ID NO: 1138693 - DNA, 25 bp, Homo sapien
tgggagcccaggctatgagatcttg

SEQ ID NO: 1138694 - DNA, 25 bp, Homo sapien
aaacctgaggtgcttggatggagat

SEQ ID NO: 1138695 - DNA, 25 bp, Homo sapien
gaatggcccatacctgtgccaaaga

SEQ ID NO: 1138696 - DNA, 25 bp, Homo sapien
catgggaggcctacgttggaatcct

SEQ ID NO: 1138697 - DNA, 25 bp, Homo sapien
catgagcccaccatcggcagagatt

SEQ ID NO: 1138698 - DNA, 25 bp, Homo sapien
cagaattcagcatcgtccaggtggg

SEQ ID NO: 1138699 - DNA, 25 bp, Homo sapien
tatttcagacaggagaacagtgacc

SEQ ID NO: 1138700 - DNA, 25 bp, Homo sapien
cactcggcaggccaatcacgggagt

SEQ ID NO: 1138701 - DNA, 25 bp, Homo sapien
cggcaggccaatcacgggagtccga

SEQ ID NO: 1138702 - DNA, 25 bp, Homo sapien
actcggcaggccaatcacgggagtc

SEQ ID NO: 1138703 - DNA, 25 bp, Homo sapien
tcggcaggccaatcacgggagtccg

SEQ ID NO: 1138704 - DNA, 25 bp, Homo sapien
ttggaagattgcacagcggccaggc

SEQ ID NO: 1138705 - DNA, 25 bp, Homo sapien
gggtacacctgcagaaaggctgtca

SEQ ID NO: 1138706 - DNA, 25 bp, Homo sapien
acttggaagattgcacagcggccag

SEQ ID NO: 1138707 - DNA, 25 bp, Homo sapien
acacttggaagattgcacagcggcc

SEQ ID NO: 1138708 - DNA, 25 bp, Homo sapien
ctgcggctttccttctgcagtgttt

SEQ ID NO: 1138709 - DNA, 25 bp, Homo sapien
agggagttgtgatgactcttaaaag

SEQ ID NO: 1138710 - DNA, 25 bp, Homo sapien
gagttgtgatgactcttaaaagagc

SEQ ID NO: 1138711 - DNA, 25 bp, Homo sapien
tccctgcggctttccttctgcagtg

SEQ ID NO: 1138712 - DNA, 25 bp, Homo sapien
cctccatcctccaaccttaaaggag

SEQ ID NO: 1138713 - DNA, 25 bp, Homo sapien
ctccatcctccaaccttaaaggagg

SEQ ID NO: 1138714 - DNA, 25 bp, Homo sapien
aaaagcccctattctggcctccagg

SEQ ID NO: 1138715 - DNA, 25 bp, Homo sapien
ccttcaaaggttcatcagattggca

SEQ ID NO: 1138716 - DNA, 25 bp, Homo sapien
gattggcatccttctgaaacagacc

SEQ ID NO: 1138717 - DNA, 25 bp, Homo sapien
tcagggaaggttgcagaacccagac

SEQ ID NO: 1138718 - DNA, 25 bp, Homo sapien
gattcagttggaaacaggaccctag

SEQ ID NO: 1138719 - DNA, 25 bp, Homo sapien
tgggtaccagctaacttcagggact

SEQ ID NO: 1138720 - DNA, 25 bp, Homo sapien
gatgccaacagaagttagccacatg

SEQ ID NO: 1138721 - DNA, 25 bp, Homo sapien
tcaatgaaactgctaggatgccaac

SEQ ID NO: 1138722 - DNA, 25 bp, Homo sapien
gaaagaacaccgtctggatcactgg

SEQ ID NO: 1138723 - DNA, 25 bp, Homo sapien
aagtggcttcgctgatctctctaag

SEQ ID NO: 1138724 - DNA, 25 bp, Homo sapien
tagcccatgggctttagtatgcagc

SEQ ID NO: 1138725 - DNA, 25 bp, Homo sapien
tggacaggacacatcaacagcttgc

SEQ ID NO: 1138726 - DNA, 25 bp, Homo sapien
gactggtcccgtgagtctaagcgag

SEQ ID NO: 1138727 - DNA, 25 bp, Homo sapien
gaccatcgtctttgggaactctggg

SEQ ID NO: 1138728 - DNA, 25 bp, Homo sapien
tctgcctttcgaccctcgctgaaaa

SEQ ID NO: 1138729 - DNA, 25 bp, Homo sapien
cgctgaaaaacccatcagaggacat

SEQ ID NO: 1138730 - DNA, 25 bp, Homo sapien
ggaatggaactcggcagccgctcac

SEQ ID NO: 1138731 - DNA, 25 bp, Homo sapien
tggctatcatgtttcctgcccagta

SEQ ID NO: 1138732 - DNA, 25 bp, Homo sapien
gagaaaaagtcaacgctccagtcct

SEQ ID NO: 1138733 - DNA, 25 bp, Homo sapien
tgcccagtacttggcgagagcttac

SEQ ID NO: 1138734 - DNA, 25 bp, Homo sapien
gcatctcgaacctgcgttaatcggg

SEQ ID NO: 1138735 - DNA, 25 bp, Homo sapien
gaccgacacgatggacgcgggccac

SEQ ID NO: 1138736 - DNA, 25 bp, Homo sapien
gaacgccgcgcccactcggcggaag

SEQ ID NO: 1138737 - DNA, 25 bp, Homo sapien
aagccgccgcatctcgaacctgcgt

SEQ ID NO: 1138738 - DNA, 25 bp, Homo sapien
aggtccagacgacagactccagaca

SEQ ID NO: 1138739 - DNA, 25 bp, Homo sapien
tgcaggcctccgcggttgcaatcct

SEQ ID NO: 1138740 - DNA, 25 bp, Homo sapien
ggttgctgcgcacccagaggccaga

SEQ ID NO: 1138741 - DNA, 25 bp, Homo sapien
caatcctgccgcgaggggttgctgc

SEQ ID NO: 1138742 - DNA, 25 bp, Homo sapien
agctggatccaatcggctcccaaac

SEQ ID NO: 1138743 - DNA, 25 bp, Homo sapien
tgttgattgaagctggatccaatcg

SEQ ID NO: 1138744 - DNA, 25 bp, Homo sapien
ttgaagctggatccaatcggctccc

SEQ ID NO: 1138745 - DNA, 25 bp, Homo sapien
ggatccaatcggctcccaaactggc

SEQ ID NO: 1138746 - DNA, 25 bp, Homo sapien
gcgccgtgaggctgttctggatttt

SEQ ID NO: 1138747 - DNA, 25 bp, Homo sapien
cacaaccacgccgataatgcagcta

SEQ ID NO: 1138748 - DNA, 25 bp, Homo sapien
gcgcaaaagccatcgttgatgttct

SEQ ID NO: 1138749 - DNA, 25 bp, Homo sapien
tgaacatgtcattggcgcaaaagcc

SEQ ID NO: 1138750 - DNA, 25 bp, Homo sapien
tcagccgaaattgtgcagggcaaac

SEQ ID NO: 1138751 - DNA, 25 bp, Homo sapien
ttggagcacagcgtcacccaggaga

SEQ ID NO: 1138752 - DNA, 25 bp, Homo sapien
tcaggccatgaatgttggagcacag

SEQ ID NO: 1138753 - DNA, 25 bp, Homo sapien
cagaggccacacaggaacatgtgca

SEQ ID NO: 1138754 - DNA, 25 bp, Homo sapien
ggaacatgtgcaatagctgtcaggc

SEQ ID NO: 1138755 - DNA, 25 bp, Homo sapien
gagctgagaagaaagcgatttttct

SEQ ID NO: 1138756 - DNA, 25 bp, Homo sapien
aattgaccagtagttgtgtgcaggc

SEQ ID NO: 1138757 - DNA, 25 bp, Homo sapien
tatcatcagccaactcagaaatttc

SEQ ID NO: 1138758 - DNA, 25 bp, Homo sapien
aattgaaccaaagtttggagctgag

SEQ ID NO: 1138759 - DNA, 25 bp, Homo sapien
gtccttcattaccatagcagctttg

SEQ ID NO: 1138760 - DNA, 25 bp, Homo sapien
ttccttcctgctgatcagtaaacag

SEQ ID NO: 1138761 - DNA, 25 bp, Homo sapien
tccttcattaccatagcagctttgt

SEQ ID NO: 1138762 - DNA, 25 bp, Homo sapien
gatcagtaaacagtccttcattacc

SEQ ID NO: 1138763 - DNA, 25 bp, Homo sapien
tggagtgaaggcctaaaagcggggc

SEQ ID NO: 1138764 - DNA, 25 bp, Homo sapien
cggggctaagataaggggtggctct

SEQ ID NO: 1138765 - DNA, 25 bp, Homo sapien
ttgggttctgaagccgctccttccc

SEQ ID NO: 1138766 - DNA, 25 bp, Homo sapien
aagataaggggtggctctgtgcatc

SEQ ID NO: 1138767 - DNA, 25 bp, Homo sapien
tcaaccatccgtctgctgacagaag

SEQ ID NO: 1138768 - DNA, 25 bp, Homo sapien
tatatgatcacactcccatggtttc

SEQ ID NO: 1138769 - DNA, 25 bp, Homo sapien
ccctgctgcttggtaatttgagtcc

SEQ ID NO: 1138770 - DNA, 25 bp, Homo sapien
tccggattgcaagtcctccaacatg

SEQ ID NO: 1138771 - DNA, 25 bp, Homo sapien
tctgagagctaagaagtggctgagt

SEQ ID NO: 1138772 - DNA, 25 bp, Homo sapien
gccatattggggaaagtggaccagt

SEQ ID NO: 1138773 - DNA, 25 bp, Homo sapien
gagctaagaagtggctgagtatagc

SEQ ID NO: 1138774 - DNA, 25 bp, Homo sapien
agctggacagagccgccatattggg

SEQ ID NO: 1138775 - DNA, 25 bp, Homo sapien
ttgtttttcgttctcttccatcctg

SEQ ID NO: 1138776 - DNA, 25 bp, Homo sapien
gggctgagccccatgaagtcattat

SEQ ID NO: 1138777 - DNA, 25 bp, Homo sapien
cccaggcaggtacagataatgatag

SEQ ID NO: 1138778 - DNA, 25 bp, Homo sapien
tatgggtagttacgggctctaacca

SEQ ID NO: 1138779 - DNA, 25 bp, Homo sapien
cgccatctgtcaaccctggatgaga

SEQ ID NO: 1138780 - DNA, 25 bp, Homo sapien
tccaggtagtccacacaaaagtctc

SEQ ID NO: 1138781 - DNA, 25 bp, Homo sapien
tggggcatctacaacaaccagagcc

SEQ ID NO: 1138782 - DNA, 25 bp, Homo sapien
ccaggtcttatgtgggccggagcta

SEQ ID NO: 1138783 - DNA, 25 bp, Homo sapien
tccgcattcagagttccgtactgcc

SEQ ID NO: 1138784 - DNA, 25 bp, Homo sapien
tctgccccctggacagatgaggtcc

SEQ ID NO: 1138785 - DNA, 25 bp, Homo sapien
catttgttccgcattcagagttccg

SEQ ID NO: 1138786 - DNA, 25 bp, Homo sapien
gggacatgcatttgttccgcattca

SEQ ID NO: 1138787 - DNA, 25 bp, Homo sapien
gtgtctcgtgagtttcagtcaagat

SEQ ID NO: 1138788 - DNA, 25 bp, Homo sapien
gtggctcagtgtctcgtgagtttca

SEQ ID NO: 1138789 - DNA, 25 bp, Homo sapien
aacagcttagttggaaggttgtggc

SEQ ID NO: 1138790 - DNA, 25 bp, Homo sapien
acagcttagttggaaggttgtggct

SEQ ID NO: 1138791 - DNA, 25 bp, Homo sapien
gcagaggcatgcattctcagggctt

SEQ ID NO: 1138792 - DNA, 25 bp, Homo sapien
gagacagccttgacttgcagaggca

SEQ ID NO: 1138793 - DNA, 25 bp, Homo sapien
aaaccggctctgtctccagttgcca

SEQ ID NO: 1138794 - DNA, 25 bp, Homo sapien
taacacatgctaccctgcagaggag

SEQ ID NO: 1138795 - DNA, 25 bp, Homo sapien
gtcaaccttggtatggtaattaaga

SEQ ID NO: 1138796 - DNA, 25 bp, Homo sapien
tcctactaggtctggtcaaccttgg

SEQ ID NO: 1138797 - DNA, 25 bp, Homo sapien
ttcagtggttaatgtctctgtctct

SEQ ID NO: 1138798 - DNA, 25 bp, Homo sapien
cctacagggagttcctactaggtct

SEQ ID NO: 1138799 - DNA, 25 bp, Homo sapien
tccaaagcaagcttcctttatatct

SEQ ID NO: 1138800 - DNA, 25 bp, Homo sapien
gcaagcttcctttatatctgtggac

SEQ ID NO: 1138801 - DNA, 25 bp, Homo sapien
caagcttcctttatatctgtggact

SEQ ID NO: 1138802 - DNA, 25 bp, Homo sapien
aaagcaagcttcctttatatctgtg

SEQ ID NO: 1138803 - DNA, 25 bp, Homo sapien
cacgcgcttgtttcgggcagcagag

SEQ ID NO: 1138804 - DNA, 25 bp, Homo sapien
agaaccagtctgtgcgcgcggctgt

SEQ ID NO: 1138805 - DNA, 25 bp, Homo sapien
tgagaccgacgtttgtgtgccggac

SEQ ID NO: 1138806 - DNA, 25 bp, Homo sapien
gtgagaagccccgaccaagctttcc

SEQ ID NO: 1138807 - DNA, 25 bp, Homo sapien
gatgagcctacgaggtcggttctat

SEQ ID NO: 1138808 - DNA, 25 bp, Homo sapien
cggctcccaggcgtcttcccgggtg

SEQ ID NO: 1138809 - DNA, 25 bp, Homo sapien
accaggagccagtcgccgcgggcct

SEQ ID NO: 1138810 - DNA, 25 bp, Homo sapien
tcagtcgcttccctctactacgcgc

SEQ ID NO: 1138811 - DNA, 25 bp, Homo sapien
actaaggcctggaagagttcagcga

SEQ ID NO: 1138812 - DNA, 25 bp, Homo sapien
cagcgatttgcctacagtaacacag

SEQ ID NO: 1138813 - DNA, 25 bp, Homo sapien
taaaactcaagcgtcaagagggctg

SEQ ID NO: 1138814 - DNA, 25 bp, Homo sapien
ccctgtcagcggaagataaaagttt

SEQ ID NO: 1138815 - DNA, 25 bp, Homo sapien
tgcactggcttaaaatcaggaagac

SEQ ID NO: 1138816 - DNA, 25 bp, Homo sapien
aagacaggccgcgtgatggctcacg

SEQ ID NO: 1138817 - DNA, 25 bp, Homo sapien
ggccggcctggctatgtgattttca

SEQ ID NO: 1138818 - DNA, 25 bp, Homo sapien
tcagctctaaaattcctatcttgca

SEQ ID NO: 1138819 - DNA, 25 bp, Homo sapien
gagcatctttctcaccaggcgcggt

SEQ ID NO: 1138820 - DNA, 25 bp, Homo sapien
aaccactgaagtgtgcgctttagaa

SEQ ID NO: 1138821 - DNA, 25 bp, Homo sapien
tccatagacagattagtagttgcta

SEQ ID NO: 1138822 - DNA, 25 bp, Homo sapien
ggaaattgggactaactgctaatag

SEQ ID NO: 1138823 - DNA, 25 bp, Homo sapien
gctacaggagttatgagtcaggaac

SEQ ID NO: 1138824 - DNA, 25 bp, Homo sapien
caaatcttttgtcgtaattattcct

SEQ ID NO: 1138825 - DNA, 25 bp, Homo sapien
tcacaactccatagataatttggag

SEQ ID NO: 1138826 - DNA, 25 bp, Homo sapien
agctttcagtgtacaggccttacaa

SEQ ID NO: 1138827 - DNA, 25 bp, Homo sapien
tgagcacccccaccagcccctccat

SEQ ID NO: 1138828 - DNA, 25 bp, Homo sapien
ctcttgtgagcacccccaccagccc

SEQ ID NO: 1138829 - DNA, 25 bp, Homo sapien
tgtgagcacccccaccagcccctcc

SEQ ID NO: 1138830 - DNA, 25 bp, Homo sapien
cttgtgagcacccccaccagcccct

SEQ ID NO: 1138831 - DNA, 25 bp, Homo sapien
gcccagaagcaggacacttatccat

SEQ ID NO: 1138832 - DNA, 25 bp, Homo sapien
cttttgaggagaagtgggttttctg

SEQ ID NO: 1138833 - DNA, 25 bp, Homo sapien
ggctttttctctgtccctggcccag

SEQ ID NO: 1138834 - DNA, 25 bp, Homo sapien
ttttctctgtccctggcccagaagc

SEQ ID NO: 1138835 - DNA, 25 bp, Homo sapien
tggaggcctcaattcctcacagaaa

SEQ ID NO: 1138836 - DNA, 25 bp, Homo sapien
aattcactacacatggctacttgct

SEQ ID NO: 1138837 - DNA, 25 bp, Homo sapien
aggcctcaattcctcacagaaaggg

SEQ ID NO: 1138838 - DNA, 25 bp, Homo sapien
ggaattcactacacatggctacttg

SEQ ID NO: 1138839 - DNA, 25 bp, Homo sapien
ctgcggaaggtctcatgctgtgaaa

SEQ ID NO: 1138840 - DNA, 25 bp, Homo sapien
tcaggtatctgggttctaagttgct

SEQ ID NO: 1138841 - DNA, 25 bp, Homo sapien
gctgatggtcaggtatctgggttct

SEQ ID NO: 1138842 - DNA, 25 bp, Homo sapien
gatggtcaggtatctgggttctaag

SEQ ID NO: 1138843 - DNA, 25 bp, Homo sapien
caagatgtctttcggggccattgaa

SEQ ID NO: 1138844 - DNA, 25 bp, Homo sapien
acaaacatttattatttcacacagt

SEQ ID NO: 1138845 - DNA, 25 bp, Homo sapien
caaacatttattatttcacacagtg

SEQ ID NO: 1138846 - DNA, 25 bp, Homo sapien
tcacagcagtgcgagctttgtctcc

SEQ ID NO: 1138847 - DNA, 25 bp, Homo sapien
tcatgggaagcagagaacgtctcac

SEQ ID NO: 1138848 - DNA, 25 bp, Homo sapien
tctcaacttgcaggtaaggacatga

SEQ ID NO: 1138849 - DNA, 25 bp, Homo sapien
gagataagtaaatgacgcagcggtc

SEQ ID NO: 1138850 - DNA, 25 bp, Homo sapien
gaatctcatgccgaccttcttcaag

SEQ ID NO: 1138851 - DNA, 25 bp, Homo sapien
ttacagagacatgcgttctgcaggg

SEQ ID NO: 1138852 - DNA, 25 bp, Homo sapien
tgcacacgccctaatcgacaacaaa

SEQ ID NO: 1138853 - DNA, 25 bp, Homo sapien
gccagctgtgtttctagttgccaga

SEQ ID NO: 1138854 - DNA, 25 bp, Homo sapien
acacccacacgcttatatacagtca

SEQ ID NO: 1138855 - DNA, 25 bp, Homo sapien
acacttacacccacacgcttatata

SEQ ID NO: 1138856 - DNA, 25 bp, Homo sapien
cttacacccacacgcttatatacag

SEQ ID NO: 1138857 - DNA, 25 bp, Homo sapien
tacacccacacgcttatatacagtc

SEQ ID NO: 1138858 - DNA, 25 bp, Homo sapien
tgagctggatcttgcttcaggttcc

SEQ ID NO: 1138859 - DNA, 25 bp, Homo sapien
aagcccccaatgtgcagtcctgctg

SEQ ID NO: 1138860 - DNA, 25 bp, Homo sapien
ggccctttgagaagcccccaatgtg

SEQ ID NO: 1138861 - DNA, 25 bp, Homo sapien
tcactggaagccttggagcttggca

SEQ ID NO: 1138862 - DNA, 25 bp, Homo sapien
gaccagggtaggaggagttgcccac

SEQ ID NO: 1138863 - DNA, 25 bp, Homo sapien
ttggaatcaaggtatcttcccagag

SEQ ID NO: 1138864 - DNA, 25 bp, Homo sapien
ttcactctttggaatcaaggtatct

SEQ ID NO: 1138865 - DNA, 25 bp, Homo sapien
tctttggaatcaaggtatcttccca

SEQ ID NO: 1138866 - DNA, 25 bp, Homo sapien
ccaataaattcactctttggaatca

SEQ ID NO: 1138867 - DNA, 25 bp, Homo sapien
ggtaactggacactggatgctgctg

SEQ ID NO: 1138868 - DNA, 25 bp, Homo sapien
gcacctggagatttccattggcact

SEQ ID NO: 1138869 - DNA, 25 bp, Homo sapien
gttctgggttacactggcatggctg

SEQ ID NO: 1138870 - DNA, 25 bp, Homo sapien
tgctgctgcaggaaaaagcgtgcat

SEQ ID NO: 1138871 - DNA, 25 bp, Homo sapien
cagccaataatgaattttctatgtc

SEQ ID NO: 1138872 - DNA, 25 bp, Homo sapien
ttgtattataataaactcatatcag

SEQ ID NO: 1138873 - DNA, 25 bp, Homo sapien
tcatatcagatttttaatgatggcc

SEQ ID NO: 1138874 - DNA, 25 bp, Homo sapien
ggctagtcttgaattaccgacgtca

SEQ ID NO: 1138875 - DNA, 25 bp, Homo sapien
acccaagaattatcaataaataaat

SEQ ID NO: 1138876 - DNA, 25 bp, Homo sapien
cccaagaattatcaataaataaatt

SEQ ID NO: 1138877 - DNA, 25 bp, Homo sapien
cacccaagaattatcaataaataaa

SEQ ID NO: 1138878 - DNA, 25 bp, Homo sapien
agaaacccaatatgctaaacaactt

SEQ ID NO: 1138879 - DNA, 25 bp, Homo sapien
tcttaggcttttatctcagctctca

SEQ ID NO: 1138880 - DNA, 25 bp, Homo sapien
caacttaggactccaccttccagta

SEQ ID NO: 1138881 - DNA, 25 bp, Homo sapien
caccttccagtatgcctgcgtttta

SEQ ID NO: 1138882 - DNA, 25 bp, Homo sapien
tttctcactcaccacttcggatcga

SEQ ID NO: 1138883 - DNA, 25 bp, Homo sapien
ttcggatcgagcctcaacagtgctg

SEQ ID NO: 1138884 - DNA, 25 bp, Homo sapien
cctcttcgtttttcttgctattggc

SEQ ID NO: 1138885 - DNA, 25 bp, Homo sapien
ttggcttagtttccaacagcttccc

SEQ ID NO: 1138886 - DNA, 25 bp, Homo sapien
tttatagagactggatcttactgtg

SEQ ID NO: 1138887 - DNA, 25 bp, Homo sapien
tcctgacctcataactataactttt

SEQ ID NO: 1138888 - DNA, 25 bp, Homo sapien
gaggtggcactatcagtcactgctc

SEQ ID NO: 1138889 - DNA, 25 bp, Homo sapien
tggaatgaggtggcactatcagtca

SEQ ID NO: 1138890 - DNA, 25 bp, Homo sapien
agcaactgggctttctgatctagtc

SEQ ID NO: 1138891 - DNA, 25 bp, Homo sapien
tcaacataggcctactctgagtctc

SEQ ID NO: 1138892 - DNA, 25 bp, Homo sapien
tttactccatttgaagattgactgc

SEQ ID NO: 1138893 - DNA, 25 bp, Homo sapien
gatgtacgcataaagcacctgctta

SEQ ID NO: 1138894 - DNA, 25 bp, Homo sapien
ccttgtgtaagaggctgacttttcc

SEQ ID NO: 1138895 - DNA, 25 bp, Homo sapien
ggccagaaaaatttggcaccaggca

SEQ ID NO: 1138896 - DNA, 25 bp, Homo sapien
taaatcgaggcagaaagatacagac

SEQ ID NO: 1138897 - DNA, 25 bp, Homo sapien
ggatgcatttttaccctccacacaa

SEQ ID NO: 1138898 - DNA, 25 bp, Homo sapien
tagcccgaccatctatgggacttgt

SEQ ID NO: 1138899 - DNA, 25 bp, Homo sapien
tttgccttcgggtggctcagctccg

SEQ ID NO: 1138900 - DNA, 25 bp, Homo sapien
cttttgttgacatggtagcccgacc

SEQ ID NO: 1138901 - DNA, 25 bp, Homo sapien
ccgttgttgcaaatggagtgtgtca

SEQ ID NO: 1138902 - DNA, 25 bp, Homo sapien
tgtaacaccgtacagcaactatacg

SEQ ID NO: 1138903 - DNA, 25 bp, Homo sapien
caactatacgtctgtattggagtca

SEQ ID NO: 1138904 - DNA, 25 bp, Homo sapien
taggtcctatcagcagtatcctggt

SEQ ID NO: 1138905 - DNA, 25 bp, Homo sapien
ttgtcaggctgtggcttgattgcag

SEQ ID NO: 1138906 - DNA, 25 bp, Homo sapien
taatcgtatcctagatacatcaaga

SEQ ID NO: 1138907 - DNA, 25 bp, Homo sapien
caagaaccttgtgaacatccattac

SEQ ID NO: 1138908 - DNA, 25 bp, Homo sapien
tcctagatacatcaagaaccttgtg

SEQ ID NO: 1138909 - DNA, 25 bp, Homo sapien
gaacatccattaccaaggtgttttc

SEQ ID NO: 1138910 - DNA, 25 bp, Homo sapien
ccaacaccgtggagggccgggacat

SEQ ID NO: 1138911 - DNA, 25 bp, Homo sapien
atggcacccaacaccgtggagggcc

SEQ ID NO: 1138912 - DNA, 25 bp, Homo sapien
caacgtgcagtggttggaagcatca

SEQ ID NO: 1138913 - DNA, 25 bp, Homo sapien
caacaggagactgcgacagcccggg

SEQ ID NO: 1138914 - DNA, 25 bp, Homo sapien
cacgaaggccgtgtctatcttggtg

SEQ ID NO: 1138915 - DNA, 25 bp, Homo sapien
ggaaccggagactgtcaggtttcag

SEQ ID NO: 1138916 - DNA, 25 bp, Homo sapien
cagggagttcccaaacaatggattg

SEQ ID NO: 1138917 - DNA, 25 bp, Homo sapien
tcttggactggctgtcgctgtacac

SEQ ID NO: 1138918 - DNA, 25 bp, Homo sapien
agtgtctcttccaccggggtgctgt

SEQ ID NO: 1138919 - DNA, 25 bp, Homo sapien
gaagagctccgttttcacctgctgg

SEQ ID NO: 1138920 - DNA, 25 bp, Homo sapien
agggtccagccattgctcttgcaga

SEQ ID NO: 1138921 - DNA, 25 bp, Homo sapien
cttcccaggtggcatagttggagag

SEQ ID NO: 1138922 - DNA, 25 bp, Homo sapien
ctcagtccagagtgcctgaggcagg

SEQ ID NO: 1138923 - DNA, 25 bp, Homo sapien
cttgtccttatacttgtacttgcca

SEQ ID NO: 1138924 - DNA, 25 bp, Homo sapien
gccagtcagcaggtccccagccaga

SEQ ID NO: 1138925 - DNA, 25 bp, Homo sapien
ccttatacttgtacttgccagtcag

SEQ ID NO: 1138926 - DNA, 25 bp, Homo sapien
tccccagccagagggttgaaggcat

SEQ ID NO: 1138927 - DNA, 25 bp, Homo sapien
gggacattcgtgagcaaccaattgc

SEQ ID NO: 1138928 - DNA, 25 bp, Homo sapien
gattcctgtagatctctgcccattg

SEQ ID NO: 1138929 - DNA, 25 bp, Homo sapien
gattaaaggcctccacaacatctgg

SEQ ID NO: 1138930 - DNA, 25 bp, Homo sapien
cagggcaatgccatcgaagtggtgc

SEQ ID NO: 1138931 - DNA, 25 bp, Homo sapien
atttggtggtgactttactgttagg

SEQ ID NO: 1138932 - DNA, 25 bp, Homo sapien
catttggtggtgactttactgttag

SEQ ID NO: 1138933 - DNA, 25 bp, Homo sapien
ctaattgcaacactacttaaacttg

SEQ ID NO: 1138934 - DNA, 25 bp, Homo sapien
gagaccgatggttgtgtcccgaacg

SEQ ID NO: 1138935 - DNA, 25 bp, Homo sapien
gggtcaggcctctcggtgacttttc

SEQ ID NO: 1138936 - DNA, 25 bp, Homo sapien
gatgagcctacgaggtcggttctac

SEQ ID NO: 1138937 - DNA, 25 bp, Homo sapien
ggcagattgcctagagctcgtcaga

SEQ ID NO: 1138938 - DNA, 25 bp, Homo sapien
tagtacttggccgtggatgccacac

SEQ ID NO: 1138939 - DNA, 25 bp, Homo sapien
tattggaaagcacatgggacctctc

SEQ ID NO: 1138940 - DNA, 25 bp, Homo sapien
cacacacgttggttatgcggtcaca

SEQ ID NO: 1138941 - DNA, 25 bp, Homo sapien
ataatccgggtgaggagcatcagcc

SEQ ID NO: 1138942 - DNA, 25 bp, Homo sapien
tcccaagatttgctcacttaaccag

SEQ ID NO: 1138943 - DNA, 25 bp, Homo sapien
gcaaacaacagtccggcattttcct

SEQ ID NO: 1138944 - DNA, 25 bp, Homo sapien
cctgaggcagattaccatagcagca

SEQ ID NO: 1138945 - DNA, 25 bp, Homo sapien
accagcttgcaaacaacagtccggc

SEQ ID NO: 1138946 - DNA, 25 bp, Homo sapien
gccaggagtcccactagtggctata

SEQ ID NO: 1138947 - DNA, 25 bp, Homo sapien
ggagtcccactagtggctatatatt

SEQ ID NO: 1138948 - DNA, 25 bp, Homo sapien
agtcccactagtggctatatattca

SEQ ID NO: 1138949 - DNA, 25 bp, Homo sapien
aaatagaactactgtgtgagccagg

SEQ ID NO: 1138950 - DNA, 25 bp, Homo sapien
tacagcagctatagaagacagtctt

SEQ ID NO: 1138951 - DNA, 25 bp, Homo sapien
gacagggtctagtcttattcttctg

SEQ ID NO: 1138952 - DNA, 25 bp, Homo sapien
caaattagtacagcagctatagaag

SEQ ID NO: 1138953 - DNA, 25 bp, Homo sapien
catttttggtggaattacaaattag

SEQ ID NO: 1138954 - DNA, 25 bp, Homo sapien
caaagctgaggcatcacagtacttg

SEQ ID NO: 1138955 - DNA, 25 bp, Homo sapien
taatctctatcaaatacctataata

SEQ ID NO: 1138956 - DNA, 25 bp, Homo sapien
tgattgcaaaatgtactacaaggct

SEQ ID NO: 1138957 - DNA, 25 bp, Homo sapien
cacagtacttgattgcaaaatgtac

SEQ ID NO: 1138958 - DNA, 25 bp, Homo sapien
tgtaaaaaggcatatccagaagtgc

SEQ ID NO: 1138959 - DNA, 25 bp, Homo sapien
tacccacagggtatggccttattcc

SEQ ID NO: 1138960 - DNA, 25 bp, Homo sapien
tctcctggagtaggcagctctgtga

SEQ ID NO: 1138961 - DNA, 25 bp, Homo sapien
tagtgctgtatagggtactgcttca

SEQ ID NO: 1138962 - DNA, 25 bp, Homo sapien
atccaccgaactcagccttctggga

SEQ ID NO: 1138963 - DNA, 25 bp, Homo sapien
ggccagctctacctatctctttgtt

SEQ ID NO: 1138964 - DNA, 25 bp, Homo sapien
ccaccgaactcagccttctgggatt

SEQ ID NO: 1138965 - DNA, 25 bp, Homo sapien
accacggccagctctacctatctct

SEQ ID NO: 1138966 - DNA, 25 bp, Homo sapien
cagggatgggactgccaaaatgacc

SEQ ID NO: 1138967 - DNA, 25 bp, Homo sapien
tctgccaaaagtaacaacgaaagga

SEQ ID NO: 1138968 - DNA, 25 bp, Homo sapien
aaatggaaccatgggtcttggatag

SEQ ID NO: 1138969 - DNA, 25 bp, Homo sapien
ttatgaagttgtacggaaatccacc

SEQ ID NO: 1138970 - DNA, 25 bp, Homo sapien
gatgaaggccatacctaatcctctg

SEQ ID NO: 1138971 - DNA, 25 bp, Homo sapien
gaacaaagagtgttccttggccagg

SEQ ID NO: 1138972 - DNA, 25 bp, Homo sapien
gggtaactgagtagactagctgtcc

SEQ ID NO: 1138973 - DNA, 25 bp, Homo sapien
tagctcctgctgtgactatagtaag

SEQ ID NO: 1138974 - DNA, 25 bp, Homo sapien
ccagcatgcattcttaatagtagac

SEQ ID NO: 1138975 - DNA, 25 bp, Homo sapien
gaatgcctgaatgtttatctattaa

SEQ ID NO: 1138976 - DNA, 25 bp, Homo sapien
agtttggaatgcctgaatgtttatc

SEQ ID NO: 1138977 - DNA, 25 bp, Homo sapien
gtagacaatacattaggagtttgga

SEQ ID NO: 1138978 - DNA, 25 bp, Homo sapien
ctggtcttaaactcctaacctcaag

SEQ ID NO: 1138979 - DNA, 25 bp, Homo sapien
gtcttaaactcctaacctcaagtca

SEQ ID NO: 1138980 - DNA, 25 bp, Homo sapien
ttaaactcctaacctcaagtcatct

SEQ ID NO: 1138981 - DNA, 25 bp, Homo sapien
taaactcctaacctcaagtcatctg

SEQ ID NO: 1138982 - DNA, 25 bp, Homo sapien
tccagatgaaggtagaatgccaaga

SEQ ID NO: 1138983 - DNA, 25 bp, Homo sapien
cagacctgccttcataggaatggcc

SEQ ID NO: 1138984 - DNA, 25 bp, Homo sapien
tctcctaggaaaaggttctatggct

SEQ ID NO: 1138985 - DNA, 25 bp, Homo sapien
tggagctctgcatcgaacgttcaga

SEQ ID NO: 1138986 - DNA, 25 bp, Homo sapien
aaatgcttacaacggtgcctggaac

SEQ ID NO: 1138987 - DNA, 25 bp, Homo sapien
tgcttacaacggtgcctggaacaga

SEQ ID NO: 1138988 - DNA, 25 bp, Homo sapien
taaaatgcttacaacggtgcctgga

SEQ ID NO: 1138989 - DNA, 25 bp, Homo sapien
gatgtaaaatgcttacaacggtgcc

SEQ ID NO: 1138990 - DNA, 25 bp, Homo sapien
taaacggcagcagtgtctgaacacc

SEQ ID NO: 1138991 - DNA, 25 bp, Homo sapien
ccgcgctcggctgccaagagttttc

SEQ ID NO: 1138992 - DNA, 25 bp, Homo sapien
caccgcgctcggctgccaagagttt

SEQ ID NO: 1138993 - DNA, 25 bp, Homo sapien
aatctgttctgaactaaacggcagc

SEQ ID NO: 1138994 - DNA, 25 bp, Homo sapien
ggccagcatttaattaggtagatca

SEQ ID NO: 1138995 - DNA, 25 bp, Homo sapien
agatcagatttagggaaggtcaagt

SEQ ID NO: 1138996 - DNA, 25 bp, Homo sapien
taattaggtagatcagatttaggga

SEQ ID NO: 1138997 - DNA, 25 bp, Homo sapien
ccagcatttaattaggtagatcaga

SEQ ID NO: 1138998 - DNA, 25 bp, Homo sapien
ggatgagaactaaagagccctaaag

SEQ ID NO: 1138999 - DNA, 25 bp, Homo sapien
gagccaagtgctaaaagcagctgcg

SEQ ID NO: 1139000 - DNA, 25 bp, Homo sapien
gatgagaactaaagagccctaaagg

SEQ ID NO: 1139001 - DNA, 25 bp, Homo sapien
cagctgcgtgtgacatttccgtcag

SEQ ID NO: 1139002 - DNA, 25 bp, Homo sapien
tctattcatgcccaaacttgattga

SEQ ID NO: 1139003 - DNA, 25 bp, Homo sapien
caaacttgattgattgttaatcctg

SEQ ID NO: 1139004 - DNA, 25 bp, Homo sapien
gattgattgttaatcctggtggcat

SEQ ID NO: 1139005 - DNA, 25 bp, Homo sapien
ttcatgcccaaacttgattgattgt

SEQ ID NO: 1139006 - DNA, 25 bp, Homo sapien
cctaaaagtattgcaaggctgaaag

SEQ ID NO: 1139007 - DNA, 25 bp, Homo sapien
gaaagtcagatccaggtctttagac

SEQ ID NO: 1139008 - DNA, 25 bp, Homo sapien
caaaggttggattagcgtgctaaga

SEQ ID NO: 1139009 - DNA, 25 bp, Homo sapien
cccagagtagtgatttcacctccta

SEQ ID NO: 1139010 - DNA, 25 bp, Homo sapien
tcggtgcacatggtgtgaagcaatt

SEQ ID NO: 1139011 - DNA, 25 bp, Homo sapien
tagattcaggcagctacagcaacag

SEQ ID NO: 1139012 - DNA, 25 bp, Homo sapien
tcttactcacatgcagagcttccag

SEQ ID NO: 1139013 - DNA, 25 bp, Homo sapien
atagctctgcagacgccctggtggt

SEQ ID NO: 1139014 - DNA, 25 bp, Homo sapien
taactatactttgacccactgtgca

SEQ ID NO: 1139015 - DNA, 25 bp, Homo sapien
cataatcttgcttaccagggagcca

SEQ ID NO: 1139016 - DNA, 25 bp, Homo sapien
gacagactgcttggagaacgactta

SEQ ID NO: 1139017 - DNA, 25 bp, Homo sapien
tgtagctaccaaagagacagactgc

SEQ ID NO: 1139018 - DNA, 25 bp, Homo sapien
caatagataccgctttgtgatgata

SEQ ID NO: 1139019 - DNA, 25 bp, Homo sapien
caggattagataataggttaggtca

SEQ ID NO: 1139020 - DNA, 25 bp, Homo sapien
cttccatcaaaaccatagacttgct

SEQ ID NO: 1139021 - DNA, 25 bp, Homo sapien
caatgcatatgttgattagaagtgg

SEQ ID NO: 1139022 - DNA, 25 bp, Homo sapien
ctttagacaggaggccaactctcag

SEQ ID NO: 1139023 - DNA, 25 bp, Homo sapien
ctcgcctatactctctgcactttgg

SEQ ID NO: 1139024 - DNA, 25 bp, Homo sapien
ataggtttactttggactggcgaga

SEQ ID NO: 1139025 - DNA, 25 bp, Homo sapien
tagacacgtgaatgatgccagtatt

SEQ ID NO: 1139026 - DNA, 25 bp, Homo sapien
aaaagctatgacaagtttgcgagag

SEQ ID NO: 1139027 - DNA, 25 bp, Homo sapien
ggcctggaataccaaaagctatgac

SEQ ID NO: 1139028 - DNA, 25 bp, Homo sapien
gagttgtctgaagcatttggaggtt

SEQ ID NO: 1139029 - DNA, 25 bp, Homo sapien
acaagtttgcgagagttgtctgaag

SEQ ID NO: 1139030 - DNA, 25 bp, Homo sapien
caaagatgtctgtgggctgaattca

SEQ ID NO: 1139031 - DNA, 25 bp, Homo sapien
tcaaagatgtctgtgggctgaattc

SEQ ID NO: 1139032 - DNA, 25 bp, Homo sapien
acaacaacaacacacggtgctaatc

SEQ ID NO: 1139033 - DNA, 25 bp, Homo sapien
cacacggtgctaatcaaagatgtct

SEQ ID NO: 1139034 - DNA, 25 bp, Homo sapien
cttacaggtttagattcagggatct

SEQ ID NO: 1139035 - DNA, 25 bp, Homo sapien
ccaattatttcagaggacaggctat

SEQ ID NO: 1139036 - DNA, 25 bp, Homo sapien
ttatagggcattaggaaaatatcta

SEQ ID NO: 1139037 - DNA, 25 bp, Homo sapien
gaatggaaattgcatgcctcttttt

SEQ ID NO: 1139038 - DNA, 25 bp, Homo sapien
ccacgccccgccagtgtatattttc

SEQ ID NO: 1139039 - DNA, 25 bp, Homo sapien
caccacgccccgccagtgtatattt

SEQ ID NO: 1139040 - DNA, 25 bp, Homo sapien
aggatattctctttcataaccacaa

SEQ ID NO: 1139041 - DNA, 25 bp, Homo sapien
acttctgcctccagggtttaagaga

SEQ ID NO: 1139042 - DNA, 25 bp, Homo sapien
aacttctgcctccagggtttaagag

SEQ ID NO: 1139043 - DNA, 25 bp, Homo sapien
caacttctgcctccagggtttaaga

SEQ ID NO: 1139044 - DNA, 25 bp, Homo sapien
cttctgcctccagggtttaagagat

SEQ ID NO: 1139045 - DNA, 25 bp, Homo sapien
tgatcattgatgtgtgcacttagga

SEQ ID NO: 1139046 - DNA, 25 bp, Homo sapien
caatccaggcaaaactattcagtgg

SEQ ID NO: 1139047 - DNA, 25 bp, Homo sapien
tcaggactggttctctataggaagg

SEQ ID NO: 1139048 - DNA, 25 bp, Homo sapien
cagtggtgttaaaagtcaggactgg

SEQ ID NO: 1139049 - DNA, 25 bp, Homo sapien
tggcttcaagtgaatctcctatctc

SEQ ID NO: 1139050 - DNA, 25 bp, Homo sapien
actcctggcttcaagtgaatctcct

SEQ ID NO: 1139051 - DNA, 25 bp, Homo sapien
ggcttcaagtgaatctcctatctcg

SEQ ID NO: 1139052 - DNA, 25 bp, Homo sapien
cctggcttcaagtgaatctcctatc

SEQ ID NO: 1139053 - DNA, 25 bp, Homo sapien
ttggccaacctatcaaggagctctg

SEQ ID NO: 1139054 - DNA, 25 bp, Homo sapien
ggtgactacactctttacatctggg

SEQ ID NO: 1139055 - DNA, 25 bp, Homo sapien
cacttagtctctagaagcgatctgc

SEQ ID NO: 1139056 - DNA, 25 bp, Homo sapien
tcagtgatgcagaccaaaaatagcc

SEQ ID NO: 1139057 - DNA, 25 bp, Homo sapien
gactcagagcttgtccaggaatctg

SEQ ID NO: 1139058 - DNA, 25 bp, Homo sapien
agcttgtccaggaatctggagggat

SEQ ID NO: 1139059 - DNA, 25 bp, Homo sapien
cagagcttgtccaggaatctggagg

SEQ ID NO: 1139060 - DNA, 25 bp, Homo sapien
gggactcagagcttgtccaggaatc

SEQ ID NO: 1139061 - DNA, 25 bp, Homo sapien
caactttttgttgtaatgatataac

SEQ ID NO: 1139062 - DNA, 25 bp, Homo sapien
tcactaatggcacttcatatggtcc

SEQ ID NO: 1139063 - DNA, 25 bp, Homo sapien
aatggcagacaagtacaagctgcag

SEQ ID NO: 1139064 - DNA, 25 bp, Homo sapien
tatggtcccaaggtgttattcaagg

SEQ ID NO: 1139065 - DNA, 25 bp, Homo sapien
gcttggcctcacttagatggactca

SEQ ID NO: 1139066 - DNA, 25 bp, Homo sapien
gatggactcaccctatacatgaggg

SEQ ID NO: 1139067 - DNA, 25 bp, Homo sapien
tcccatgtagaccaaaaacgaagca

SEQ ID NO: 1139068 - DNA, 25 bp, Homo sapien
taaccacaaggtagtgatacgaaca

SEQ ID NO: 1139069 - DNA, 25 bp, Homo sapien
tatgtgcagagaccagtcccacatc

SEQ ID NO: 1139070 - DNA, 25 bp, Homo sapien
ctgcctgtatgtgcagagaccagtc

SEQ ID NO: 1139071 - DNA, 25 bp, Homo sapien
cctgtatgtgcagagaccagtccca

SEQ ID NO: 1139072 - DNA, 25 bp, Homo sapien
gtgcagagaccagtcccacatcttg

SEQ ID NO: 1139073 - DNA, 25 bp, Homo sapien
ggcctgagaggctaattcttattat

SEQ ID NO: 1139074 - DNA, 25 bp, Homo sapien
tggcatttgcaggtgtcctccccaa

SEQ ID NO: 1139075 - DNA, 25 bp, Homo sapien
tcaggtcacctgatgccatctaggg

SEQ ID NO: 1139076 - DNA, 25 bp, Homo sapien
tactgggagaaagtcaatatgaccc

SEQ ID NO: 1139077 - DNA, 25 bp, Homo sapien
tggcatcccaaagtgcctgcattaa

SEQ ID NO: 1139078 - DNA, 25 bp, Homo sapien
gcatcccaaagtgcctgcattaaag

SEQ ID NO: 1139079 - DNA, 25 bp, Homo sapien
gacttcgtgaccacccgccttggca

SEQ ID NO: 1139080 - DNA, 25 bp, Homo sapien
ctcctgacttcgtgaccacccgcct

SEQ ID NO: 1139081 - DNA, 25 bp, Homo sapien
aacgtgagcagtgctgctttctcag

SEQ ID NO: 1139082 - DNA, 25 bp, Homo sapien
agcaaaacgtgagcagtgctgcttt

SEQ ID NO: 1139083 - DNA, 25 bp, Homo sapien
tttctcagcctcaattaacacgaga

SEQ ID NO: 1139084 - DNA, 25 bp, Homo sapien
aataaagcaaaacgtgagcagtgct

SEQ ID NO: 1139085 - DNA, 25 bp, Homo sapien
gttctaaatgctaatcagggtttcc

SEQ ID NO: 1139086 - DNA, 25 bp, Homo sapien
tatgaaatttcagtggtgcgttacc

SEQ ID NO: 1139087 - DNA, 25 bp, Homo sapien
tcgttagctcatctgaccacaaatg

SEQ ID NO: 1139088 - DNA, 25 bp, Homo sapien
aagtcaggaaggatgtcgttagctc

SEQ ID NO: 1139089 - DNA, 25 bp, Homo sapien
ctgggaacctgctgcttaagcagct

SEQ ID NO: 1139090 - DNA, 25 bp, Homo sapien
actgggaacctgctgcttaagcagc

SEQ ID NO: 1139091 - DNA, 25 bp, Homo sapien
tgttacatgcaattgtgaggattcc

SEQ ID NO: 1139092 - DNA, 25 bp, Homo sapien
taaccaagtgttgggggcaagttgc

SEQ ID NO: 1139093 - DNA, 25 bp, Homo sapien
ttccttccgagcaacccaaatccag

SEQ ID NO: 1139094 - DNA, 25 bp, Homo sapien
caagttgctaggacgtggagctgga

SEQ ID NO: 1139095 - DNA, 25 bp, Homo sapien
agagatgctcggtggctgcactgtc

SEQ ID NO: 1139096 - DNA, 25 bp, Homo sapien
gaaggctgtaccatctaaaggcatg

SEQ ID NO: 1139097 - DNA, 25 bp, Homo sapien
atcggcggagaagctcagcagagat

SEQ ID NO: 1139098 - DNA, 25 bp, Homo sapien
tggacgtggcctagaagagctgcct

SEQ ID NO: 1139099 - DNA, 25 bp, Homo sapien
ggacgcctaggggcgccggcgccat

SEQ ID NO: 1139100 - DNA, 25 bp, Homo sapien
gctcggtgcgggcaatttcctgcga

SEQ ID NO: 1139101 - DNA, 25 bp, Homo sapien
aacaggaggagagcggtctgggcaa

SEQ ID NO: 1139102 - DNA, 25 bp, Homo sapien
cctgcgactgcagtccaggagagga

SEQ ID NO: 1139103 - DNA, 25 bp, Homo sapien
caatgaagagtaaccgagaaagcac

SEQ ID NO: 1139104 - DNA, 25 bp, Homo sapien
ggaactgcaaatgatctgccccttt

SEQ ID NO: 1139105 - DNA, 25 bp, Homo sapien
tgcaaatgatctgcccctttaggaa

SEQ ID NO: 1139106 - DNA, 25 bp, Homo sapien
actgcaaatgatctgcccctttagg

SEQ ID NO: 1139107 - DNA, 25 bp, Homo sapien
gaaaggaactgcaaatgatctgccc

SEQ ID NO: 1139108 - DNA, 25 bp, Homo sapien
catacctggctaactgttgcacttt

SEQ ID NO: 1139109 - DNA, 25 bp, Homo sapien
tgtggtttaaagctattaaagtaga

SEQ ID NO: 1139110 - DNA, 25 bp, Homo sapien
agcatacctggctaactgttgcact

SEQ ID NO: 1139111 - DNA, 25 bp, Homo sapien
gcatacctggctaactgttgcactt

SEQ ID NO: 1139112 - DNA, 25 bp, Homo sapien
tttcagaccactaaaaacacctcca

SEQ ID NO: 1139113 - DNA, 25 bp, Homo sapien
tgtcagccatcatgacactccatgc

SEQ ID NO: 1139114 - DNA, 25 bp, Homo sapien
gggtgaccagtatacagtttcagac

SEQ ID NO: 1139115 - DNA, 25 bp, Homo sapien
tccatctacagctgtcagccatcat

SEQ ID NO: 1139116 - DNA, 25 bp, Homo sapien
tctgctactgtctaaaaaagataat

SEQ ID NO: 1139117 - DNA, 25 bp, Homo sapien
catgagattatgtgagagacatcca

SEQ ID NO: 1139118 - DNA, 25 bp, Homo sapien
gagacatccataatacttttgaagt

SEQ ID NO: 1139119 - DNA, 25 bp, Homo sapien
agataatctttctattacatgagat

SEQ ID NO: 1139120 - DNA, 25 bp, Homo sapien
ccatgacataactaaagctgtgtgt

SEQ ID NO: 1139121 - DNA, 25 bp, Homo sapien
taagagcttaatttacaccatgaca

SEQ ID NO: 1139122 - DNA, 25 bp, Homo sapien
tggcacaaggtatcagctcaaggac

SEQ ID NO: 1139123 - DNA, 25 bp, Homo sapien
ttgtggtgttttgactcaaggagaa

SEQ ID NO: 1139124 - DNA, 25 bp, Homo sapien
atgtttgtgattccaagctgatgtt

SEQ ID NO: 1139125 - DNA, 25 bp, Homo sapien
ctgatgttccagttagacaaccgat

SEQ ID NO: 1139126 - DNA, 25 bp, Homo sapien
tccagttagacaaccgattatgact

SEQ ID NO: 1139127 - DNA, 25 bp, Homo sapien
agacaaccgattatgactgaaatcc

SEQ ID NO: 1139128 - DNA, 25 bp, Homo sapien
catagtgttgatctactattgatat

SEQ ID NO: 1139129 - DNA, 25 bp, Homo sapien
ttgttagttcaagcaaagttctttg

SEQ ID NO: 1139130 - DNA, 25 bp, Homo sapien
atcagaaaggttatgaagtattttg

SEQ ID NO: 1139131 - DNA, 25 bp, Homo sapien
cattaaatattgttagttcaagcaa

SEQ ID NO: 1139132 - DNA, 25 bp, Homo sapien
cgggatttctgttagttcattgtaa

SEQ ID NO: 1139133 - DNA, 25 bp, Homo sapien
gaaagtagagtaatattagatgtag

SEQ ID NO: 1139134 - DNA, 25 bp, Homo sapien
agatgtaggttctccaaaatacggg

SEQ ID NO: 1139135 - DNA, 25 bp, Homo sapien
aaatacgggatttctgttagttcat

SEQ ID NO: 1139136 - DNA, 25 bp, Homo sapien
aggtatttaagctgcatgcgaggaa

SEQ ID NO: 1139137 - DNA, 25 bp, Homo sapien
ctgcatgcgaggaaatgaagatgtc

SEQ ID NO: 1139138 - DNA, 25 bp, Homo sapien
taagctgcatgcgaggaaatgaaga

SEQ ID NO: 1139139 - DNA, 25 bp, Homo sapien
catgcgaggaaatgaagatgtcttg

SEQ ID NO: 1139140 - DNA, 25 bp, Homo sapien
gataaattatcgaagcaaccagcct

SEQ ID NO: 1139141 - DNA, 25 bp, Homo sapien
ctttaccactaataaggaacttgat

SEQ ID NO: 1139142 - DNA, 25 bp, Homo sapien
gcctccaaggtggttattctgttat

SEQ ID NO: 1139143 - DNA, 25 bp, Homo sapien
catgctcattcggttacggtttaac

SEQ ID NO: 1139144 - DNA, 25 bp, Homo sapien
tcaaagatcttaaggagtcaagccc

SEQ ID NO: 1139145 - DNA, 25 bp, Homo sapien
tccatccttaagtttgctaattcca

SEQ ID NO: 1139146 - DNA, 25 bp, Homo sapien
gttcttccatgttattcaagccaaa

SEQ ID NO: 1139147 - DNA, 25 bp, Homo sapien
aattccattccgctgcattttcaaa

SEQ ID NO: 1139148 - DNA, 25 bp, Homo sapien
gcaagccatacaaccaccccttgtt

SEQ ID NO: 1139149 - DNA, 25 bp, Homo sapien
gcatcagggctgattctttcaatag

SEQ ID NO: 1139150 - DNA, 25 bp, Homo sapien
caatagcattctggctcacatagag

SEQ ID NO: 1139151 - DNA, 25 bp, Homo sapien
actcgtgtaaggttgttgtgttcca

SEQ ID NO: 1139152 - DNA, 25 bp, Homo sapien
gcagattcatccaggcgggtcagct

SEQ ID NO: 1139153 - DNA, 25 bp, Homo sapien
tctccaataagctcagacccacaaa

SEQ ID NO: 1139154 - DNA, 25 bp, Homo sapien
cgggtcagctggttataggacaaat

SEQ ID NO: 1139155 - DNA, 25 bp, Homo sapien
ccatcagcaatatgagtgactctgt

SEQ ID NO: 1139156 - DNA, 25 bp, Homo sapien
tagtgagacttgtgagtccagcaaa

SEQ ID NO: 1139157 - DNA, 25 bp, Homo sapien
ttctatggcccatgaaatttcattg

SEQ ID NO: 1139158 - DNA, 25 bp, Homo sapien
aaggcttcactagcatcttctatgg

SEQ ID NO: 1139159 - DNA, 25 bp, Homo sapien
agtttagtgagacttgtgagtccag

SEQ ID NO: 1139160 - DNA, 25 bp, Homo sapien
tgctcaagggattcaagaccaatga

SEQ ID NO: 1139161 - DNA, 25 bp, Homo sapien
agatgctcaagggattcaagaccaa

SEQ ID NO: 1139162 - DNA, 25 bp, Homo sapien
ctcaagggattcaagaccaatgaat

SEQ ID NO: 1139163 - DNA, 25 bp, Homo sapien
gatgctcaagggattcaagaccaat

SEQ ID NO: 1139164 - DNA, 25 bp, Homo sapien
taaatgagtctgagaaaaagcattt

SEQ ID NO: 1139165 - DNA, 25 bp, Homo sapien
ttaaatgagtctgagaaaaagcatt

SEQ ID NO: 1139166 - DNA, 25 bp, Homo sapien
ttggaaataacttgggtcactccca

SEQ ID NO: 1139167 - DNA, 25 bp, Homo sapien
caagcaggaacaatgatccaactgg

SEQ ID NO: 1139168 - DNA, 25 bp, Homo sapien
tcacactttaagcacaacaagcagg

SEQ ID NO: 1139169 - DNA, 25 bp, Homo sapien
tacctctagccgcttaaataactga

SEQ ID NO: 1139170 - DNA, 25 bp, Homo sapien
cccactcagtggatgtgaaattact

SEQ ID NO: 1139171 - DNA, 25 bp, Homo sapien
ctgggaatggtctacaatgaggaag

SEQ ID NO: 1139172 - DNA, 25 bp, Homo sapien
gaccacggcaatgtgatgttgcagc

SEQ ID NO: 1139173 - DNA, 25 bp, Homo sapien
cagcaagggcaagtatagccaagga

SEQ ID NO: 1139174 - DNA, 25 bp, Homo sapien
ggtctgggggtccaatgatgaatct

SEQ ID NO: 1139175 - DNA, 25 bp, Homo sapien
cttcaaaggtgcacacttggggtcc

SEQ ID NO: 1139176 - DNA, 25 bp, Homo sapien
gatcctatcggagtcacagcaccgt

SEQ ID NO: 1139177 - DNA, 25 bp, Homo sapien
tccccgatctatcagtcaggagtga

SEQ ID NO: 1139178 - DNA, 25 bp, Homo sapien
gatgtttgtccggagcaatggttcg

SEQ ID NO: 1139179 - DNA, 25 bp, Homo sapien
tgtccggagcaatggttcgttagtc

SEQ ID NO: 1139180 - DNA, 25 bp, Homo sapien
gcaatggttcgttagtctgactcac

SEQ ID NO: 1139181 - DNA, 25 bp, Homo sapien
cagcttcaacagatgtttgtccgga

SEQ ID NO: 1139182 - DNA, 25 bp, Homo sapien
tccattagagacaacagagtagcct

SEQ ID NO: 1139183 - DNA, 25 bp, Homo sapien
caaaagaagtctggcctctagccca

SEQ ID NO: 1139184 - DNA, 25 bp, Homo sapien
gagtagcctcacagagttccaagga

SEQ ID NO: 1139185 - DNA, 25 bp, Homo sapien
ttccaaacaggccaataaaggtcca

SEQ ID NO: 1139186 - DNA, 25 bp, Homo sapien
tctccaaagcccatctgagtgtaga

SEQ ID NO: 1139187 - DNA, 25 bp, Homo sapien
ccagtgacaaagagtccagaatgag

SEQ ID NO: 1139188 - DNA, 25 bp, Homo sapien
aagtcccctgagagatccccaggaa

SEQ ID NO: 1139189 - DNA, 25 bp, Homo sapien
tatcaaagggctcaagggaactgga

SEQ ID NO: 1139190 - DNA, 25 bp, Homo sapien
gaacttgctttatgtgcatgatcaa

SEQ ID NO: 1139191 - DNA, 25 bp, Homo sapien
gaaaacccacttcaacaccgtgcaa

SEQ ID NO: 1139192 - DNA, 25 bp, Homo sapien
gcaatctaaactaagagcactgaaa

SEQ ID NO: 1139193 - DNA, 25 bp, Homo sapien
caccgtgcaatgtgtaatgcaatct

SEQ ID NO: 1139194 - DNA, 25 bp, Homo sapien
ttgaaagttattatcaaccaaccat

SEQ ID NO: 1139195 - DNA, 25 bp, Homo sapien
cattgaagtagccacttcaaatggc

SEQ ID NO: 1139196 - DNA, 25 bp, Homo sapien
caaccaaccattgaagtagccactt

SEQ ID NO: 1139197 - DNA, 25 bp, Homo sapien
tattatcaaccaaccattgaagtag

SEQ ID NO: 1139198 - DNA, 25 bp, Homo sapien
caggatgctttgccctgctagccat

SEQ ID NO: 1139199 - DNA, 25 bp, Homo sapien
tgctttgccctgctagccattcagg

SEQ ID NO: 1139200 - DNA, 25 bp, Homo sapien
gatgctttgccctgctagccattca

SEQ ID NO: 1139201 - DNA, 25 bp, Homo sapien
tttgccctgctagccattcagggtg

SEQ ID NO: 1139202 - DNA, 25 bp, Homo sapien
caattatggtttcaggatgtgtcct

SEQ ID NO: 1139203 - DNA, 25 bp, Homo sapien
gcctcttagagcaattatggtttca

SEQ ID NO: 1139204 - DNA, 25 bp, Homo sapien
tcttagagcaattatggtttcagga

SEQ ID NO: 1139205 - DNA, 25 bp, Homo sapien
tagagcaattatggtttcaggatgt

SEQ ID NO: 1139206 - DNA, 25 bp, Homo sapien
gacatgggtgaatcactgctgctca

SEQ ID NO: 1139207 - DNA, 25 bp, Homo sapien
cactgcagtgcacgtcagagtcaca

SEQ ID NO: 1139208 - DNA, 25 bp, Homo sapien
ccagcttgctgccaataacgaacaa

SEQ ID NO: 1139209 - DNA, 25 bp, Homo sapien
gtctttgcgccacacagtggacatg

SEQ ID NO: 1139210 - DNA, 25 bp, Homo sapien
aatgtcagatttagtctaattctct

SEQ ID NO: 1139211 - DNA, 25 bp, Homo sapien
aaaaatcaaggagcataattcctta

SEQ ID NO: 1139212 - DNA, 25 bp, Homo sapien
taaatgtcagatttagtctaattct

SEQ ID NO: 1139213 - DNA, 25 bp, Homo sapien
aaaatcaaggagcataattccttac

SEQ ID NO: 1139214 - DNA, 25 bp, Homo sapien
cacattggcaataaagaagacgtca

SEQ ID NO: 1139215 - DNA, 25 bp, Homo sapien
tcgagccgcaggaaagtcagtacca

SEQ ID NO: 1139216 - DNA, 25 bp, Homo sapien
gcaccagtgcgaatagtcagatcca

SEQ ID NO: 1139217 - DNA, 25 bp, Homo sapien
cacattctaatctggccatggcacc

SEQ ID NO: 1139218 - DNA, 25 bp, Homo sapien
aatgtggccacgttctgtcccaagg

SEQ ID NO: 1139219 - DNA, 25 bp, Homo sapien
tgacccagatcaaagaagtgccaac

SEQ ID NO: 1139220 - DNA, 25 bp, Homo sapien
gatgacaatgccaactgtggtccag

SEQ ID NO: 1139221 - DNA, 25 bp, Homo sapien
gaaatgtcgttctgtcaccagcaaa

SEQ ID NO: 1139222 - DNA, 25 bp, Homo sapien
atttttaactctcaaaggtaggcag

SEQ ID NO: 1139223 - DNA, 25 bp, Homo sapien
ctgtaaaagagacatttttaactct

SEQ ID NO: 1139224 - DNA, 25 bp, Homo sapien
agacatttttaactctcaaaggtag

SEQ ID NO: 1139225 - DNA, 25 bp, Homo sapien
agagacatttttaactctcaaaggt

SEQ ID NO: 1139226 - DNA, 25 bp, Homo sapien
tagctgggaatgtctgcaggcagat

SEQ ID NO: 1139227 - DNA, 25 bp, Homo sapien
atgtctgcaggcagattgagctcct

SEQ ID NO: 1139228 - DNA, 25 bp, Homo sapien
tgggaatgtctgcaggcagattgag

SEQ ID NO: 1139229 - DNA, 25 bp, Homo sapien
cttgggaagacaagtagctgggaat

SEQ ID NO: 1139230 - DNA, 25 bp, Homo sapien
cgtcagtgcctttgtgtatatatcc

SEQ ID NO: 1139231 - DNA, 25 bp, Homo sapien
gtgtatatatccattggcaggaggc

SEQ ID NO: 1139232 - DNA, 25 bp, Homo sapien
tccattggcaggaggcataagttgc

SEQ ID NO: 1139233 - DNA, 25 bp, Homo sapien
gcataagttgctgatgactgcctgc

SEQ ID NO: 1139234 - DNA, 25 bp, Homo sapien
agaaaccagcctcccttggatgtgg

SEQ ID NO: 1139235 - DNA, 25 bp, Homo sapien
gcctcccttggatgtggtctgaagg

SEQ ID NO: 1139236 - DNA, 25 bp, Homo sapien
ccagcctcccttggatgtggtctga

SEQ ID NO: 1139237 - DNA, 25 bp, Homo sapien
gaagagaaaccagcctcccttggat

SEQ ID NO: 1139238 - DNA, 25 bp, Homo sapien
gacggtatcaggctctctagggcag

SEQ ID NO: 1139239 - DNA, 25 bp, Homo sapien
caccgctcatctgtgtggagggaag

SEQ ID NO: 1139240 - DNA, 25 bp, Homo sapien
caatctgagcaaatcacccgggtac

SEQ ID NO: 1139241 - DNA, 25 bp, Homo sapien
gaacgtcctcctcagcaatataggt

SEQ ID NO: 1139242 - DNA, 25 bp, Homo sapien
ttccaactcctagcatgtcaacaat

SEQ ID NO: 1139243 - DNA, 25 bp, Homo sapien
caacaaatgatagtcaaaaggagct

SEQ ID NO: 1139244 - DNA, 25 bp, Homo sapien
taatcattgattcagtgcagccatt

SEQ ID NO: 1139245 - DNA, 25 bp, Homo sapien
gaaagtttcatgataggtaataatc

SEQ ID NO: 1139246 - DNA, 25 bp, Homo sapien
gaggcaggcctagttctctgtttat

SEQ ID NO: 1139247 - DNA, 25 bp, Homo sapien
aggcctagttctctgtttatgttcc

SEQ ID NO: 1139248 - DNA, 25 bp, Homo sapien
ttgatgaagttgtggtgactcatgg

SEQ ID NO: 1139249 - DNA, 25 bp, Homo sapien
gatgaggcaggcctagttctctgtt

SEQ ID NO: 1139250 - DNA, 25 bp, Homo sapien
tgtgccctcactaccatcttgaatg

SEQ ID NO: 1139251 - DNA, 25 bp, Homo sapien
tccgagtcctactaaaatcaaaagc

SEQ ID NO: 1139252 - DNA, 25 bp, Homo sapien
tcatgtgccctcactaccatcttga

SEQ ID NO: 1139253 - DNA, 25 bp, Homo sapien
ccatcttgaatgttccgagtcctac

SEQ ID NO: 1139254 - DNA, 25 bp, Homo sapien
attaattaataagtctctgcccaga

SEQ ID NO: 1139255 - DNA, 25 bp, Homo sapien
aattaattaataagtctctgcccag

SEQ ID NO: 1139256 - DNA, 25 bp, Homo sapien
agtctctgcccagatttcatcctga

SEQ ID NO: 1139257 - DNA, 25 bp, Homo sapien
ctgacaagcagatgcacaccagggc

SEQ ID NO: 1139258 - DNA, 25 bp, Homo sapien
tagggcaatccagcatgttaagcag

SEQ ID NO: 1139259 - DNA, 25 bp, Homo sapien
tcaggaccattctgaagactagggc

SEQ ID NO: 1139260 - DNA, 25 bp, Homo sapien
ggtataagaccaaacaacgcatggc

SEQ ID NO: 1139261 - DNA, 25 bp, Homo sapien
cctctaggcatgaagaaggcggtta

SEQ ID NO: 1139262 - DNA, 25 bp, Homo sapien
gaaagttccacttaccagaggtcag

SEQ ID NO: 1139263 - DNA, 25 bp, Homo sapien
aacagaggtggatgacgtctagcac

SEQ ID NO: 1139264 - DNA, 25 bp, Homo sapien
tcctctaggtgcatacagctgtgac

SEQ ID NO: 1139265 - DNA, 25 bp, Homo sapien
taataagcagactcaggaagcgtac

SEQ ID NO: 1139266 - DNA, 25 bp, Homo sapien
tatgtgagtttggaacccttgaacc

SEQ ID NO: 1139267 - DNA, 25 bp, Homo sapien
aaggtgtggcagtactaaacagctc

SEQ ID NO: 1139268 - DNA, 25 bp, Homo sapien
gcccatgggagaacacttaggattg

SEQ ID NO: 1139269 - DNA, 25 bp, Homo sapien
ggtcagaccgcttttgtcaaccaaa

SEQ ID NO: 1139270 - DNA, 25 bp, Homo sapien
tagcttgtatacgagggaaagtact

SEQ ID NO: 1139271 - DNA, 25 bp, Homo sapien
gttcccagctacgaacacaggtcag

SEQ ID NO: 1139272 - DNA, 25 bp, Homo sapien
ttttacaacctcacaatgggcaatg

SEQ ID NO: 1139273 - DNA, 25 bp, Homo sapien
ctgaaaacaggcacaagtcaagctg

SEQ ID NO: 1139274 - DNA, 25 bp, Homo sapien
tctcaccattgtaaagaggccacag

SEQ ID NO: 1139275 - DNA, 25 bp, Homo sapien
catctagtattagggctgctcagac

SEQ ID NO: 1139276 - DNA, 25 bp, Homo sapien
caactgtatgggcaaagagatcacg

SEQ ID NO: 1139277 - DNA, 25 bp, Homo sapien
attgggtggaccagtgtagacacaa

SEQ ID NO: 1139278 - DNA, 25 bp, Homo sapien
caattgcctgagcgattctgaggca

SEQ ID NO: 1139279 - DNA, 25 bp, Homo sapien
agacacaattgcctgagcgattctg

SEQ ID NO: 1139280 - DNA, 25 bp, Homo sapien
aattgcctgagcgattctgaggcat

SEQ ID NO: 1139281 - DNA, 25 bp, Homo sapien
tccaggcatcctgcggcctctgcgc

SEQ ID NO: 1139282 - DNA, 25 bp, Homo sapien
ctctttatgcttggccacccatttg

SEQ ID NO: 1139283 - DNA, 25 bp, Homo sapien
catcctgcggcctctgcgctgccag

SEQ ID NO: 1139284 - DNA, 25 bp, Homo sapien
gcaagctctttatgcttggccaccc

SEQ ID NO: 1139285 - DNA, 25 bp, Homo sapien
ctccggtgattctgtccacatctct

SEQ ID NO: 1139286 - DNA, 25 bp, Homo sapien
ctctccggtgattctgtccacatct

SEQ ID NO: 1139287 - DNA, 25 bp, Homo sapien
gtccctgaggtattagtttgtggcc

SEQ ID NO: 1139288 - DNA, 25 bp, Homo sapien
gtattagtttgtggcccccatcttg

SEQ ID NO: 1139289 - DNA, 25 bp, Homo sapien
ctaatgcttcttgttgtcagctgcc

SEQ ID NO: 1139290 - DNA, 25 bp, Homo sapien
taatgcttcttgttgtcagctgcca

SEQ ID NO: 1139291 - DNA, 25 bp, Homo sapien
aatgcttcttgttgtcagctgccac

SEQ ID NO: 1139292 - DNA, 25 bp, Homo sapien
gaactaactggagatcttacagtat

SEQ ID NO: 1139293 - DNA, 25 bp, Homo sapien
tacagtataaggagcatcctctccc

SEQ ID NO: 1139294 - DNA, 25 bp, Homo sapien
cacttctggttgagttccatggcag

SEQ ID NO: 1139295 - DNA, 25 bp, Homo sapien
ttttttctcagggttgccaattcac

SEQ ID NO: 1139296 - DNA, 25 bp, Homo sapien
ggcaccactggtgcgcactgtacag

SEQ ID NO: 1139297 - DNA, 25 bp, Homo sapien
tccatgggcggcaccgccgtcttgg

SEQ ID NO: 1139298 - DNA, 25 bp, Homo sapien
agttcagccggcaccactggtgcgc

SEQ ID NO: 1139299 - DNA, 25 bp, Homo sapien
agcagctagctgctcgaggtccacg

SEQ ID NO: 1139300 - DNA, 25 bp, Homo sapien
tcttgccgttgtagacgcccaccat

SEQ ID NO: 1139301 - DNA, 25 bp, Homo sapien
aggtcttgccgttgtagacgcccac

SEQ ID NO: 1139302 - DNA, 25 bp, Homo sapien
ctggttgaaggtcttgccgttgtag

SEQ ID NO: 1139303 - DNA, 25 bp, Homo sapien
aaggtcttgccgttgtagacgccca

SEQ ID NO: 1139304 - DNA, 25 bp, Homo sapien
agtggctgatcatctccggcttgac

SEQ ID NO: 1139305 - DNA, 25 bp, Homo sapien
caggtagtggctgatcatctccggc

SEQ ID NO: 1139306 - DNA, 25 bp, Homo sapien
tagtggctgatcatctccggcttga

SEQ ID NO: 1139307 - DNA, 25 bp, Homo sapien
ggtagtggctgatcatctccggctt

SEQ ID NO: 1139308 - DNA, 25 bp, Homo sapien
ttttttgagacatgtgtgcctttat

SEQ ID NO: 1139309 - DNA, 25 bp, Homo sapien
gagtgggtggccctgaagccggctg

SEQ ID NO: 1139310 - DNA, 25 bp, Homo sapien
tgagacatgtgtgcctttattagct

SEQ ID NO: 1139311 - DNA, 25 bp, Homo sapien
tggccctgaagccggctgtgcttca

SEQ ID NO: 1139312 - DNA, 25 bp, Homo sapien
ggagctacactagcaaatttcagtg

SEQ ID NO: 1139313 - DNA, 25 bp, Homo sapien
gcccttaaggagctgcttttaactg

SEQ ID NO: 1139314 - DNA, 25 bp, Homo sapien
cctactgggaggataattgaccagg

SEQ ID NO: 1139315 - DNA, 25 bp, Homo sapien
gaactgagttcgtctgtggtttgct

SEQ ID NO: 1139316 - DNA, 25 bp, Homo sapien
tcactcagccaaattcaaagagtca

SEQ ID NO: 1139317 - DNA, 25 bp, Homo sapien
ctcagccaaattcaaagagtcaagg

SEQ ID NO: 1139318 - DNA, 25 bp, Homo sapien
cagccccacctctaatgtctacttc

SEQ ID NO: 1139319 - DNA, 25 bp, Homo sapien
cctctaatgtctacttcaggtgagc

SEQ ID NO: 1139320 - DNA, 25 bp, Homo sapien
tctaattagcagcaggtataagtgg

SEQ ID NO: 1139321 - DNA, 25 bp, Homo sapien
caagttctgaaggtgtttaccaaga

SEQ ID NO: 1139322 - DNA, 25 bp, Homo sapien
caggcatgggtaggtataagtcttt

SEQ ID NO: 1139323 - DNA, 25 bp, Homo sapien
gctccttgtcaaccatgagggttgg

SEQ ID NO: 1139324 - DNA, 25 bp, Homo sapien
aaagctgccgcaattacttagagga

SEQ ID NO: 1139325 - DNA, 25 bp, Homo sapien
gctgtgtcacatagcaaagagagaa

SEQ ID NO: 1139326 - DNA, 25 bp, Homo sapien
agagaaaccaaagctgccgcaatta

SEQ ID NO: 1139327 - DNA, 25 bp, Homo sapien
gaaaccaaagctgccgcaattactt

SEQ ID NO: 1139328 - DNA, 25 bp, Homo sapien
tcctactagcctgtcatgtccacga

SEQ ID NO: 1139329 - DNA, 25 bp, Homo sapien
gaattcaaatgggaagctctttcca

SEQ ID NO: 1139330 - DNA, 25 bp, Homo sapien
gtctttcctactagcctgtcatgtc

SEQ ID NO: 1139331 - DNA, 25 bp, Homo sapien
atgtccacgagggtgtagacacagg

SEQ ID NO: 1139332 - DNA, 25 bp, Homo sapien
atgaatttgggcctcgtcagaaagc

SEQ ID NO: 1139333 - DNA, 25 bp, Homo sapien
tatcagattggaataacagtccctc

SEQ ID NO: 1139334 - DNA, 25 bp, Homo sapien
gattggaataacagtccctcttgct

SEQ ID NO: 1139335 - DNA, 25 bp, Homo sapien
gaaagccatctgctgtgtacgaaca

SEQ ID NO: 1139336 - DNA, 25 bp, Homo sapien
ttgtattacttgtgttatgtatgcc

SEQ ID NO: 1139337 - DNA, 25 bp, Homo sapien
gctgcaggtaacttgtattacttgt

SEQ ID NO: 1139338 - DNA, 25 bp, Homo sapien
gttttctgactttgctgcaggtaac

SEQ ID NO: 1139339 - DNA, 25 bp, Homo sapien
gactttgctgcaggtaacttgtatt

SEQ ID NO: 1139340 - DNA, 25 bp, Homo sapien
tccagagtaaccaaggatgaagctg

SEQ ID NO: 1139341 - DNA, 25 bp, Homo sapien
tgctaatgttccagagtaaccaagg

SEQ ID NO: 1139342 - DNA, 25 bp, Homo sapien
gcaaaattgctaatgttccagagta

SEQ ID NO: 1139343 - DNA, 25 bp, Homo sapien
caaggatgaagctgggacactcagt

SEQ ID NO: 1139344 - DNA, 25 bp, Homo sapien
catccatccagctgatggcccaggt

SEQ ID NO: 1139345 - DNA, 25 bp, Homo sapien
ggcccaggttccaaaggcataattg

SEQ ID NO: 1139346 - DNA, 25 bp, Homo sapien
tgccatccatccagctgatggccca

SEQ ID NO: 1139347 - DNA, 25 bp, Homo sapien
gatggcccaggttccaaaggcataa

SEQ ID NO: 1139348 - DNA, 25 bp, Homo sapien
gggaaactgtctagctaccacagcc

SEQ ID NO: 1139349 - DNA, 25 bp, Homo sapien
tggagggaaactgtctagctaccac

SEQ ID NO: 1139350 - DNA, 25 bp, Homo sapien
gagggaaactgtctagctaccacag

SEQ ID NO: 1139351 - DNA, 25 bp, Homo sapien
ggagggaaactgtctagctaccaca

SEQ ID NO: 1139352 - DNA, 25 bp, Homo sapien
gagcactggcctgccatgagcactg

SEQ ID NO: 1139353 - DNA, 25 bp, Homo sapien
gaagttggaaagaacgcctgctgac

SEQ ID NO: 1139354 - DNA, 25 bp, Homo sapien
ctgagaagcaccgttagacatggtg

SEQ ID NO: 1139355 - DNA, 25 bp, Homo sapien
actggctgcaatgagtatgggctgc

SEQ ID NO: 1139356 - DNA, 25 bp, Homo sapien
gctctgtcctattgtcagtgccatg

SEQ ID NO: 1139357 - DNA, 25 bp, Homo sapien
ctgagttccatcttggaccagctgt

SEQ ID NO: 1139358 - DNA, 25 bp, Homo sapien
cataagggcttgtgtcctcgttggc

SEQ ID NO: 1139359 - DNA, 25 bp, Homo sapien
tgtaatgctcagactcaaaaaagcc

SEQ ID NO: 1139360 - DNA, 25 bp, Homo sapien
cgaatagctcgaagagccggaacat

SEQ ID NO: 1139361 - DNA, 25 bp, Homo sapien
ttacttttagtatcgaatagctcga

SEQ ID NO: 1139362 - DNA, 25 bp, Homo sapien
gtttttgtccgaaagcctgcctata

SEQ ID NO: 1139363 - DNA, 25 bp, Homo sapien
gagtctttattaggataggagaaac

SEQ ID NO: 1139364 - DNA, 25 bp, Homo sapien
cagcctcgccatttgtcactattga

SEQ ID NO: 1139365 - DNA, 25 bp, Homo sapien
aagcatttgtttccagcctcgccat

SEQ ID NO: 1139366 - DNA, 25 bp, Homo sapien
cgccatttgtcactattgattctgc

SEQ ID NO: 1139367 - DNA, 25 bp, Homo sapien
ctggccactggagcaaagcatttgt

SEQ ID NO: 1139368 - DNA, 25 bp, Homo sapien
aacagtaggtctaagaatagactcc

SEQ ID NO: 1139369 - DNA, 25 bp, Homo sapien
agggagctctgtggaaccataagaa

SEQ ID NO: 1139370 - DNA, 25 bp, Homo sapien
taggtctaagaatagactccaaggg

SEQ ID NO: 1139371 - DNA, 25 bp, Homo sapien
gggagctctgtggaaccataagaat

SEQ ID NO: 1139372 - DNA, 25 bp, Homo sapien
ctttctgtctggacatacagaagga

SEQ ID NO: 1139373 - DNA, 25 bp, Homo sapien
agatgttgccagataaagctgactt

SEQ ID NO: 1139374 - DNA, 25 bp, Homo sapien
tttctgtctggacatacagaaggaa

SEQ ID NO: 1139375 - DNA, 25 bp, Homo sapien
gagatgttgccagataaagctgact

SEQ ID NO: 1139376 - DNA, 25 bp, Homo sapien
aacatactgggaatgcttagcagca

SEQ ID NO: 1139377 - DNA, 25 bp, Homo sapien
tatgcaggcataaaatatccttggc

SEQ ID NO: 1139378 - DNA, 25 bp, Homo sapien
ggaatctgctgggtgcatcaggcca

SEQ ID NO: 1139379 - DNA, 25 bp, Homo sapien
tgctgtactactgaaacatgtccgc

SEQ ID NO: 1139380 - DNA, 25 bp, Homo sapien
gctggcaccgccattttctaccggg

SEQ ID NO: 1139381 - DNA, 25 bp, Homo sapien
gcacacgacctagattaagccgcca

SEQ ID NO: 1139382 - DNA, 25 bp, Homo sapien
gacacttctgctctactggaagctg

SEQ ID NO: 1139383 - DNA, 25 bp, Homo sapien
aatgcgataggcttctgggactgag

SEQ ID NO: 1139384 - DNA, 25 bp, Homo sapien
gatgcagccaagtggtcaagtaaaa

SEQ ID NO: 1139385 - DNA, 25 bp, Homo sapien
ttcatctggcaaatggatgcagcca

SEQ ID NO: 1139386 - DNA, 25 bp, Homo sapien
catctggcaaatggatgcagccaag

SEQ ID NO: 1139387 - DNA, 25 bp, Homo sapien
gtttttgaagaacatagattttcat

SEQ ID NO: 1139388 - DNA, 25 bp, Homo sapien
cagaaggaatgcattccgtgaagga

SEQ ID NO: 1139389 - DNA, 25 bp, Homo sapien
tgcattccgtgaaggagcaacatgc

SEQ ID NO: 1139390 - DNA, 25 bp, Homo sapien
ttccgtgaaggagcaacatgcaaca

SEQ ID NO: 1139391 - DNA, 25 bp, Homo sapien
gaatgcattccgtgaaggagcaaca

SEQ ID NO: 1139392 - DNA, 25 bp, Homo sapien
tctcctgtctgtttccttgggccat

SEQ ID NO: 1139393 - DNA, 25 bp, Homo sapien
cagcactggagtgtgccctctcctg

SEQ ID NO: 1139394 - DNA, 25 bp, Homo sapien
tttcctctgaagaagccccagcact

SEQ ID NO: 1139395 - DNA, 25 bp, Homo sapien
aagaagccccagcactggagtgtgc

SEQ ID NO: 1139396 - DNA, 25 bp, Homo sapien
tctttgcagtccgtaaacggcccca

SEQ ID NO: 1139397 - DNA, 25 bp, Homo sapien
catctctgattactctgtgtgctcc

SEQ ID NO: 1139398 - DNA, 25 bp, Homo sapien
ttgtcagggccccttgagtgcccat

SEQ ID NO: 1139399 - DNA, 25 bp, Homo sapien
gcctttcacgggatttttctcatct

SEQ ID NO: 1139400 - DNA, 25 bp, Homo sapien
aaattattccccctggtctctctga

SEQ ID NO: 1139401 - DNA, 25 bp, Homo sapien
tgtcgttactttccggttcactcta

SEQ ID NO: 1139402 - DNA, 25 bp, Homo sapien
cactctatataatccgtgagaaaag

SEQ ID NO: 1139403 - DNA, 25 bp, Homo sapien
cctggtctctctgaagttgtcgtta

SEQ ID NO: 1139404 - DNA, 25 bp, Homo sapien
catcgtgaactctgagtccaaagtc

SEQ ID NO: 1139405 - DNA, 25 bp, Homo sapien
gttcttttagacttatctcatcgtg

SEQ ID NO: 1139406 - DNA, 25 bp, Homo sapien
ttggttgaatcatatgctcatacag

SEQ ID NO: 1139407 - DNA, 25 bp, Homo sapien
tctccttgaaattggcctgtatggc

SEQ ID NO: 1139408 - DNA, 25 bp, Homo sapien
ctacaagaaattgacagttatgtta

SEQ ID NO: 1139409 - DNA, 25 bp, Homo sapien
tacaagaaattgacagttatgttac

SEQ ID NO: 1139410 - DNA, 25 bp, Homo sapien
gtgtctgcagcataaaccccagctg

SEQ ID NO: 1139411 - DNA, 25 bp, Homo sapien
tgctgtcatgctatacgtggtaacc

SEQ ID NO: 1139412 - DNA, 25 bp, Homo sapien
gctgcatctaatactccacttgcaa

SEQ ID NO: 1139413 - DNA, 25 bp, Homo sapien
tcagttaggttgcaaaatcaaagag

SEQ ID NO: 1139414 - DNA, 25 bp, Homo sapien
taacagcacgatctaatgattcact

SEQ ID NO: 1139415 - DNA, 25 bp, Homo sapien
tgtggactcccagcctagaaaagcc

SEQ ID NO: 1139416 - DNA, 25 bp, Homo sapien
cattaggtctacagcactttcccac

SEQ ID NO: 1139417 - DNA, 25 bp, Homo sapien
aaagcccatttgatggtcccacatg

SEQ ID NO: 1139418 - DNA, 25 bp, Homo sapien
tacaaagacatgaacccagcatttt

SEQ ID NO: 1139419 - DNA, 25 bp, Homo sapien
catgtccttttccagaccattgttc

SEQ ID NO: 1139420 - DNA, 25 bp, Homo sapien
tgtccttttccagaccattgttcat

SEQ ID NO: 1139421 - DNA, 25 bp, Homo sapien
atgtccttttccagaccattgttca

SEQ ID NO: 1139422 - DNA, 25 bp, Homo sapien
ccttaagttcaatgggaccttggtg

SEQ ID NO: 1139423 - DNA, 25 bp, Homo sapien
cttaagttcaatgggaccttggtgg

SEQ ID NO: 1139424 - DNA, 25 bp, Homo sapien
agtaccctggtgtgttatgatatcc

SEQ ID NO: 1139425 - DNA, 25 bp, Homo sapien
ccatcgtcgacaaggaagcaaaaaa

SEQ ID NO: 1139426 - DNA, 25 bp, Homo sapien
tatgatatccaagctctaccctgtt

SEQ ID NO: 1139427 - DNA, 25 bp, Homo sapien
cagtatgttagtcctgaatcacagg

SEQ ID NO: 1139428 - DNA, 25 bp, Homo sapien
ccaccgcgggttaggctgaagaaag

SEQ ID NO: 1139429 - DNA, 25 bp, Homo sapien
acccgtcgcgggatcgatcgtggcc

SEQ ID NO: 1139430 - DNA, 25 bp, Homo sapien
gatcgtggccgctgcggagctgtag

SEQ ID NO: 1139431 - DNA, 25 bp, Homo sapien
gcagaagcgcgcgtagacccgtcgc

SEQ ID NO: 1139432 - DNA, 25 bp, Homo sapien
acagtcttgagacggatgggctcgc

SEQ ID NO: 1139433 - DNA, 25 bp, Homo sapien
tgtcccggttggtgagcccgctgac

SEQ ID NO: 1139434 - DNA, 25 bp, Homo sapien
cactcctgcaccttgctgagccagt

SEQ ID NO: 1139435 - DNA, 25 bp, Homo sapien
cttgcccgagacgacgcagcaggtg

SEQ ID NO: 1139436 - DNA, 25 bp, Homo sapien
aaaactcttgtctgcggggggagat

SEQ ID NO: 1139437 - DNA, 25 bp, Homo sapien
ggagatggagctacaaatgtaggaa

SEQ ID NO: 1139438 - DNA, 25 bp, Homo sapien
tcaaaaactcttgtctgcgggggga

SEQ ID NO: 1139439 - DNA, 25 bp, Homo sapien
atggagctacaaatgtaggaaaccc

SEQ ID NO: 1139440 - DNA, 25 bp, Homo sapien
gctagagtgcaagaaacactgaagc

SEQ ID NO: 1139441 - DNA, 25 bp, Homo sapien
caagtgcctctatagtaaagtccct

SEQ ID NO: 1139442 - DNA, 25 bp, Homo sapien
ccaggtacaccaggtggtaaccttg

SEQ ID NO: 1139443 - DNA, 25 bp, Homo sapien
actgaagcagctaagcccttccagg

SEQ ID NO: 1139444 - DNA, 25 bp, Homo sapien
tcaaaatgtaatctatgttcccctg

SEQ ID NO: 1139445 - DNA, 25 bp, Homo sapien
gtaagtgggttgctcctggaaacca

SEQ ID NO: 1139446 - DNA, 25 bp, Homo sapien
cctggccatgttgggatgactgaaa

SEQ ID NO: 1139447 - DNA, 25 bp, Homo sapien
taaggacagcgtgtcctttctcagg

SEQ ID NO: 1139448 - DNA, 25 bp, Homo sapien
cctcttcaaaggatccatcttaggt

SEQ ID NO: 1139449 - DNA, 25 bp, Homo sapien
catcttaggtgtgcaatactcgaag

SEQ ID NO: 1139450 - DNA, 25 bp, Homo sapien
caaaggatccatcttaggtgtgcaa

SEQ ID NO: 1139451 - DNA, 25 bp, Homo sapien
tccatcttaggtgtgcaatactcga

SEQ ID NO: 1139452 - DNA, 25 bp, Homo sapien
caaacatagtttccccagaactgcc

SEQ ID NO: 1139453 - DNA, 25 bp, Homo sapien
tgcctcacagggaataccttgtcct

SEQ ID NO: 1139454 - DNA, 25 bp, Homo sapien
tacaaagagcccaagcaagactcca

SEQ ID NO: 1139455 - DNA, 25 bp, Homo sapien
gcctgagacatcttcttgtcccgca

SEQ ID NO: 1139456 - DNA, 25 bp, Homo sapien
aaagcagagccccattggcctgtag

SEQ ID NO: 1139457 - DNA, 25 bp, Homo sapien
gctgaagctcccacccttaattgga

SEQ ID NO: 1139458 - DNA, 25 bp, Homo sapien
gaaaggatcagctatcactcagcga

SEQ ID NO: 1139459 - DNA, 25 bp, Homo sapien
tgtagtatgccttcctgaaacgcag

SEQ ID NO: 1139460 - DNA, 25 bp, Homo sapien
gaatctcatgaaaactaggcttgta

SEQ ID NO: 1139461 - DNA, 25 bp, Homo sapien
caatcagtgtgatatgttcaggaaa

SEQ ID NO: 1139462 - DNA, 25 bp, Homo sapien
aaaattccagggtattctattacag

SEQ ID NO: 1139463 - DNA, 25 bp, Homo sapien
ccaccatagtcaactgtgataacag

SEQ ID NO: 1139464 - DNA, 25 bp, Homo sapien
tactaaaggcgtaggcaggagctac

SEQ ID NO: 1139465 - DNA, 25 bp, Homo sapien
catgggagaagcaatcggagtacag

SEQ ID NO: 1139466 - DNA, 25 bp, Homo sapien
tcagctgacaggatctatacaaggt

SEQ ID NO: 1139467 - DNA, 25 bp, Homo sapien
aatattatctatcttgaggccaggc

SEQ ID NO: 1139468 - DNA, 25 bp, Homo sapien
catttctctttttccttgtcaaatt

SEQ ID NO: 1139469 - DNA, 25 bp, Homo sapien
tttccttgtcaaatttgggagagtg

SEQ ID NO: 1139470 - DNA, 25 bp, Homo sapien
ctaaattccattccatttctctttt

SEQ ID NO: 1139471 - DNA, 25 bp, Homo sapien
ttccatttctctttttccttgtcaa

SEQ ID NO: 1139472 - DNA, 25 bp, Homo sapien
tgttcatacattatgttcttgactt

SEQ ID NO: 1139473 - DNA, 25 bp, Homo sapien
tccactttgttcatacattatgttc

SEQ ID NO: 1139474 - DNA, 25 bp, Homo sapien
ggaagagtttctgttgattcagttt

SEQ ID NO: 1139475 - DNA, 25 bp, Homo sapien
gaagagtttctgttgattcagtttt

SEQ ID NO: 1139476 - DNA, 25 bp, Homo sapien
agggctgtgcccttatgaatgattt

SEQ ID NO: 1139477 - DNA, 25 bp, Homo sapien
tgaagtttaattcccattgtaattg

SEQ ID NO: 1139478 - DNA, 25 bp, Homo sapien
gcccttatgaatgatttaatgctac

SEQ ID NO: 1139479 - DNA, 25 bp, Homo sapien
tactgtctcagaagtaggtttctca

SEQ ID NO: 1139480 - DNA, 25 bp, Homo sapien
gacaattctgctcttatactggtga

SEQ ID NO: 1139481 - DNA, 25 bp, Homo sapien
tagaaagatcaccaaaaagcccaga

SEQ ID NO: 1139482 - DNA, 25 bp, Homo sapien
tctgaggaggcatgtcacagcaacc

SEQ ID NO: 1139483 - DNA, 25 bp, Homo sapien
tattactccactcaaaagagaaggc

SEQ ID NO: 1139484 - DNA, 25 bp, Homo sapien
ttgagaccagactcgcctcttccaa

SEQ ID NO: 1139485 - DNA, 25 bp, Homo sapien
tttgagaccagactcgcctcttcca

SEQ ID NO: 1139486 - DNA, 25 bp, Homo sapien
ggttcctttggatcatggccctcca

SEQ ID NO: 1139487 - DNA, 25 bp, Homo sapien
gctcagaccaccaataaacagtttt

SEQ ID NO: 1139488 - DNA, 25 bp, Homo sapien
caatctgtgagtgtgccccatttct

SEQ ID NO: 1139489 - DNA, 25 bp, Homo sapien
tgttctcttaaactatcatctgtag

SEQ ID NO: 1139490 - DNA, 25 bp, Homo sapien
ttcaacacaagaataagtcacaaaa

SEQ ID NO: 1139491 - DNA, 25 bp, Homo sapien
cttcaacacaagaataagtcacaaa

SEQ ID NO: 1139492 - DNA, 25 bp, Homo sapien
tcttcaacacaagaataagtcacaa

SEQ ID NO: 1139493 - DNA, 25 bp, Homo sapien
ctcttcaacacaagaataagtcaca

SEQ ID NO: 1139494 - DNA, 25 bp, Homo sapien
cttcactgttagatgggcaccaggc

SEQ ID NO: 1139495 - DNA, 25 bp, Homo sapien
gtctttggttccactacacgcccat

SEQ ID NO: 1139496 - DNA, 25 bp, Homo sapien
gaatcctctctagaaacagctgtct

SEQ ID NO: 1139497 - DNA, 25 bp, Homo sapien
gcctgtcttccgtaacttctatggt

SEQ ID NO: 1139498 - DNA, 25 bp, Homo sapien
tttcctccgcgacccataaaattgc

SEQ ID NO: 1139499 - DNA, 25 bp, Homo sapien
aacaattttatcaactgtatcatgc

SEQ ID NO: 1139500 - DNA, 25 bp, Homo sapien
tccgcgacccataaaattgccagat

SEQ ID NO: 1139501 - DNA, 25 bp, Homo sapien
tccaaagtttcctccgcgacccata

SEQ ID NO: 1139502 - DNA, 25 bp, Homo sapien
tactataaccaggaccacaccatag

SEQ ID NO: 1139503 - DNA, 25 bp, Homo sapien
ttccaccagaactgtcccctttcac

SEQ ID NO: 1139504 - DNA, 25 bp, Homo sapien
caccagaactgtcccctttcacggg

SEQ ID NO: 1139505 - DNA, 25 bp, Homo sapien
gctgtttttcgaaccttctgctacc

SEQ ID NO: 1139506 - DNA, 25 bp, Homo sapien
tcagtaaacacggttgaaaattcag

SEQ ID NO: 1139507 - DNA, 25 bp, Homo sapien
caatatgttacaagatcctagacca

SEQ ID NO: 1139508 - DNA, 25 bp, Homo sapien
ggcaggtagtagtgaaatctcaggt

SEQ ID NO: 1139509 - DNA, 25 bp, Homo sapien
caagaagtacttttagccagacagt

SEQ ID NO: 1139510 - DNA, 25 bp, Homo sapien
tgaagtggtaagacaggacatcctt

SEQ ID NO: 1139511 - DNA, 25 bp, Homo sapien
aattgaagtggtaagacaggacatc

SEQ ID NO: 1139512 - DNA, 25 bp, Homo sapien
tgaattgaagtggtaagacaggaca

SEQ ID NO: 1139513 - DNA, 25 bp, Homo sapien
gttgaattgaagtggtaagacagga

SEQ ID NO: 1139514 - DNA, 25 bp, Homo sapien
ttcaacatcataacagccatcacca

SEQ ID NO: 1139515 - DNA, 25 bp, Homo sapien
taagaccctcaaaagttcaacatca

SEQ ID NO: 1139516 - DNA, 25 bp, Homo sapien
actaagaccctcaaaagttcaacat

SEQ ID NO: 1139517 - DNA, 25 bp, Homo sapien
tcaacatcataacagccatcaccat

SEQ ID NO: 1139518 - DNA, 25 bp, Homo sapien
tataggtgaattcagcagactggct

SEQ ID NO: 1139519 - DNA, 25 bp, Homo sapien
taactctggcggacttgcattggct

SEQ ID NO: 1139520 - DNA, 25 bp, Homo sapien
gctcctcgaggttagaaatccactg

SEQ ID NO: 1139521 - DNA, 25 bp, Homo sapien
gctagtaggtgccaggatgcctgtc

SEQ ID NO: 1139522 - DNA, 25 bp, Homo sapien
ttcaggaacaccaatgagtcataaa

SEQ ID NO: 1139523 - DNA, 25 bp, Homo sapien
ggttctctgcaatccttgaatttga

SEQ ID NO: 1139524 - DNA, 25 bp, Homo sapien
tgtgaagtattttacttgggttctc

SEQ ID NO: 1139525 - DNA, 25 bp, Homo sapien
ggaacaccaatgagtcataaatttg

SEQ ID NO: 1139526 - DNA, 25 bp, Homo sapien
cgcgcacggtgcgcacacacactgg

SEQ ID NO: 1139527 - DNA, 25 bp, Homo sapien
cgattttccaggtgcgtccatcacc

SEQ ID NO: 1139528 - DNA, 25 bp, Homo sapien
acacacactggcctgcgcccactgt

SEQ ID NO: 1139529 - DNA, 25 bp, Homo sapien
tcttaagccggtctgaaaagcgcaa

SEQ ID NO: 1139530 - DNA, 25 bp, Homo sapien
tgtcctgtcggtctcagtacgttca

SEQ ID NO: 1139531 - DNA, 25 bp, Homo sapien
ttctggtgactgaaagtatggtcgg

SEQ ID NO: 1139532 - DNA, 25 bp, Homo sapien
tacgttcactttatagctgctggca

SEQ ID NO: 1139533 - DNA, 25 bp, Homo sapien
gtcgggtgtcagatataaatgtgca

SEQ ID NO: 1139534 - DNA, 25 bp, Homo sapien
aaactacaagggtacaaatgttgct

SEQ ID NO: 1139535 - DNA, 25 bp, Homo sapien
ctactagatgtgagaatttagtgaa

SEQ ID NO: 1139536 - DNA, 25 bp, Homo sapien
ttagtgaagtatgaaaattcctctc

SEQ ID NO: 1139537 - DNA, 25 bp, Homo sapien
tctttcatatcctggagttacattc

SEQ ID NO: 1139538 - DNA, 25 bp, Homo sapien
taaatatcccatctgtacctacatg

SEQ ID NO: 1139539 - DNA, 25 bp, Homo sapien
tctgccatttctaaaaggagtcctg

SEQ ID NO: 1139540 - DNA, 25 bp, Homo sapien
tagaccttgtcagctgacagaacaa

SEQ ID NO: 1139541 - DNA, 25 bp, Homo sapien
tttccaacccagtcctagaatctgc

SEQ ID NO: 1139542 - DNA, 25 bp, Homo sapien
aaatgtgaagaatgctaagggaaac

SEQ ID NO: 1139543 - DNA, 25 bp, Homo sapien
tgcagacagccggaatcaactttca

SEQ ID NO: 1139544 - DNA, 25 bp, Homo sapien
gaatgcacagttataaactagtggg

SEQ ID NO: 1139545 - DNA, 25 bp, Homo sapien
tagtgggtcaaatagcatcaatgcc

SEQ ID NO: 1139546 - DNA, 25 bp, Homo sapien
cttccttcttatttcttacattcct

SEQ ID NO: 1139547 - DNA, 25 bp, Homo sapien
ttcttatttcttacattcctccact

SEQ ID NO: 1139548 - DNA, 25 bp, Homo sapien
tccttcttatttcttacattcctcc

SEQ ID NO: 1139549 - DNA, 25 bp, Homo sapien
ttatttcttacattcctccacttca

SEQ ID NO: 1139550 - DNA, 25 bp, Homo sapien
cacaaaatggtatctggactgaaat

SEQ ID NO: 1139551 - DNA, 25 bp, Homo sapien
tgaatcgattatcttctggcaccat

SEQ ID NO: 1139552 - DNA, 25 bp, Homo sapien
caccattgggtataacaagtctaca

SEQ ID NO: 1139553 - DNA, 25 bp, Homo sapien
ttaaagcagcaagctctatgagtct

SEQ ID NO: 1139554 - DNA, 25 bp, Homo sapien
ggccaggcaagcagctgtaaatcaa

SEQ ID NO: 1139555 - DNA, 25 bp, Homo sapien
tgtcaaccacttggcgaaagtcaag

SEQ ID NO: 1139556 - DNA, 25 bp, Homo sapien
taactaaacgctgggcatgcgggca

SEQ ID NO: 1139557 - DNA, 25 bp, Homo sapien
tacagcttggttgcaaaaaagtccc

SEQ ID NO: 1139558 - DNA, 25 bp, Homo sapien
tggtcccagaggttgtttctattaa

SEQ ID NO: 1139559 - DNA, 25 bp, Homo sapien
gtcccagaggttgtttctattaagc

SEQ ID NO: 1139560 - DNA, 25 bp, Homo sapien
aaactgaagacttaggtaatgccgc

SEQ ID NO: 1139561 - DNA, 25 bp, Homo sapien
tgatcacttgctgcagtttgtggtc

SEQ ID NO: 1139562 - DNA, 25 bp, Homo sapien
gacttaggtaatgccgcaaatcttt

SEQ ID NO: 1139563 - DNA, 25 bp, Homo sapien
aatgccgcaaatctttattaatgac

SEQ ID NO: 1139564 - DNA, 25 bp, Homo sapien
gcctctctaggccaagcagtttaca

SEQ ID NO: 1139565 - DNA, 25 bp, Homo sapien
gccactacatagtcaagggaggaag

SEQ ID NO: 1139566 - DNA, 25 bp, Homo sapien
tagtaacagctatatgaggtaagtc

SEQ ID NO: 1139567 - DNA, 25 bp, Homo sapien
tgcccaagtaaagtagccagtaaga

SEQ ID NO: 1139568 - DNA, 25 bp, Homo sapien
gaaattataatccactcctggtact

SEQ ID NO: 1139569 - DNA, 25 bp, Homo sapien
ctttgaactgttcaacggaaatgaa

SEQ ID NO: 1139570 - DNA, 25 bp, Homo sapien
catcatatgtcccactttctaacaa

SEQ ID NO: 1139571 - DNA, 25 bp, Homo sapien
tgtcccactttctaacaatgctcca

SEQ ID NO: 1139572 - DNA, 25 bp, Homo sapien
taattccagtcgttcagatagtttt

SEQ ID NO: 1139573 - DNA, 25 bp, Homo sapien
aaatatataaactggccagtctggc

SEQ ID NO: 1139574 - DNA, 25 bp, Homo sapien
tactcactgagttcacatgatgaat

SEQ ID NO: 1139575 - DNA, 25 bp, Homo sapien
tcaaaaagtggtactttactggtca

SEQ ID NO: 1139576 - DNA, 25 bp, Homo sapien
gcctcttaagacctattaatgttga

SEQ ID NO: 1139577 - DNA, 25 bp, Homo sapien
gatacctataaatccagtacattga

SEQ ID NO: 1139578 - DNA, 25 bp, Homo sapien
tcctgaagttgatatgtgtctttcc

SEQ ID NO: 1139579 - DNA, 25 bp, Homo sapien
cattctactaaaggagagttgtttc

SEQ ID NO: 1139580 - DNA, 25 bp, Homo sapien
tgcgtttccactgccattaatagct

SEQ ID NO: 1139581 - DNA, 25 bp, Homo sapien
cttcaggaagagagctatccattct

SEQ ID NO: 1139582 - DNA, 25 bp, Homo sapien
ggcttgggagttccatagaagtttc

SEQ ID NO: 1139583 - DNA, 25 bp, Homo sapien
gacagatgtcgttcgttttctttga

SEQ ID NO: 1139584 - DNA, 25 bp, Homo sapien
tcaatgaagtagatcatccctgtgt

SEQ ID NO: 1139585 - DNA, 25 bp, Homo sapien
tccagtcagatgactcagaatgcct

SEQ ID NO: 1139586 - DNA, 25 bp, Homo sapien
tgtttggttgtaacttggaacagtc

SEQ ID NO: 1139587 - DNA, 25 bp, Homo sapien
catccctgtgtcagtgtaggccatt

SEQ ID NO: 1139588 - DNA, 25 bp, Homo sapien
tacaaagacgaggatccaaccaggt

SEQ ID NO: 1139589 - DNA, 25 bp, Homo sapien
cttacaaagacgaggatccaaccag

SEQ ID NO: 1139590 - DNA, 25 bp, Homo sapien
agacgaggatccaaccaggtggttg

SEQ ID NO: 1139591 - DNA, 25 bp, Homo sapien
ctttcttacaaagacgaggatccaa

SEQ ID NO: 1139592 - DNA, 25 bp, Homo sapien
tctctgacataacaatagctactcc

SEQ ID NO: 1139593 - DNA, 25 bp, Homo sapien
tactgtgctattgctttataggtcc

SEQ ID NO: 1139594 - DNA, 25 bp, Homo sapien
gatataaggtactattccagtcatc

SEQ ID NO: 1139595 - DNA, 25 bp, Homo sapien
tacgttgagtctataggaatcctta

SEQ ID NO: 1139596 - DNA, 25 bp, Homo sapien
tcaacatagtatgtcccatactgag

SEQ ID NO: 1139597 - DNA, 25 bp, Homo sapien
tatgtcccatactgagggtcctcta

SEQ ID NO: 1139598 - DNA, 25 bp, Homo sapien
catagtatgtcccatactgagggtc

SEQ ID NO: 1139599 - DNA, 25 bp, Homo sapien
catactgagggtcctctattttctc

SEQ ID NO: 1139600 - DNA, 25 bp, Homo sapien
cctccactggattttcaaactgggt

SEQ ID NO: 1139601 - DNA, 25 bp, Homo sapien
tttgaagacccaatttcaacctgtc

SEQ ID NO: 1139602 - DNA, 25 bp, Homo sapien
tcaacctgtcctaactgctttttcc

SEQ ID NO: 1139603 - DNA, 25 bp, Homo sapien
ttttggcttcctccactggattttc

SEQ ID NO: 1139604 - DNA, 25 bp, Homo sapien
ttttcagtgatgctcgaacaaggac

SEQ ID NO: 1139605 - DNA, 25 bp, Homo sapien
tagtaaaaccaaatcccattgtgct

SEQ ID NO: 1139606 - DNA, 25 bp, Homo sapien
cacctttaagctgggatggatctct

SEQ ID NO: 1139607 - DNA, 25 bp, Homo sapien
ttcacttgtaggaactcatcaggtc

SEQ ID NO: 1139608 - DNA, 25 bp, Homo sapien
tagcagcaacaatgtccacaacagg

SEQ ID NO: 1139609 - DNA, 25 bp, Homo sapien
gatagtcactagttcaggctgggag

SEQ ID NO: 1139610 - DNA, 25 bp, Homo sapien
gagctgcctgacgatgccatggata

SEQ ID NO: 1139611 - DNA, 25 bp, Homo sapien
tgaccgaggacacagttgccattga

SEQ ID NO: 1139612 - DNA, 25 bp, Homo sapien
gcagttttggttggtgaaggaggac

SEQ ID NO: 1139613 - DNA, 25 bp, Homo sapien
tggcagttttggttggtgaaggagg

SEQ ID NO: 1139614 - DNA, 25 bp, Homo sapien
tttggcagttttggttggtgaagga

SEQ ID NO: 1139615 - DNA, 25 bp, Homo sapien
cattttggcagttttggttggtgaa

SEQ ID NO: 1139616 - DNA, 25 bp, Homo sapien
gacctcagaaggatccaattttggg

SEQ ID NO: 1139617 - DNA, 25 bp, Homo sapien
taatgctcggtggaaaaggcatagg

SEQ ID NO: 1139618 - DNA, 25 bp, Homo sapien
taggctcatttatggcctccaaact

SEQ ID NO: 1139619 - DNA, 25 bp, Homo sapien
tcctgacctgataatgctcggtgga

SEQ ID NO: 1139620 - DNA, 25 bp, Homo sapien
tccatctcctcctagcaccctgaag

SEQ ID NO: 1139621 - DNA, 25 bp, Homo sapien
aggtccatctcctcctagcaccctg

SEQ ID NO: 1139622 - DNA, 25 bp, Homo sapien
ggtccatctcctcctagcaccctga

SEQ ID NO: 1139623 - DNA, 25 bp, Homo sapien
gtccatctcctcctagcaccctgaa

SEQ ID NO: 1139624 - DNA, 25 bp, Homo sapien
tctgacagttagtaacacatggcca

SEQ ID NO: 1139625 - DNA, 25 bp, Homo sapien
cagcagttgtcatgaggtccaagac

SEQ ID NO: 1139626 - DNA, 25 bp, Homo sapien
catggccatttcgagcagcagttgt

SEQ ID NO: 1139627 - DNA, 25 bp, Homo sapien
gcgcggagccgaccatctttctcag

SEQ ID NO: 1139628 - DNA, 25 bp, Homo sapien
ctgtaataaacatgatcagttttga

SEQ ID NO: 1139629 - DNA, 25 bp, Homo sapien
gtaataaacatgatcagttttgata

SEQ ID NO: 1139630 - DNA, 25 bp, Homo sapien
aataaacatgatcagttttgatatg

SEQ ID NO: 1139631 - DNA, 25 bp, Homo sapien
ataaacatgatcagttttgatatgt

SEQ ID NO: 1139632 - DNA, 25 bp, Homo sapien
aagacaacatcatagggctcctggg

SEQ ID NO: 1139633 - DNA, 25 bp, Homo sapien
cttttcgttgcaagacaacatcata

SEQ ID NO: 1139634 - DNA, 25 bp, Homo sapien
tcaggcggggagatccattctgtgt

SEQ ID NO: 1139635 - DNA, 25 bp, Homo sapien
gaggtgaggatgacaaagccaaatc

SEQ ID NO: 1139636 - DNA, 25 bp, Homo sapien
ttcagttttccacagcggtcagccg

SEQ ID NO: 1139637 - DNA, 25 bp, Homo sapien
ggacttccttctatgactcggccaa

SEQ ID NO: 1139638 - DNA, 25 bp, Homo sapien
tcttcagcaatgaccgttagtgtga

SEQ ID NO: 1139639 - DNA, 25 bp, Homo sapien
gacagttcaacaatggactgcccat

SEQ ID NO: 1139640 - DNA, 25 bp, Homo sapien
cctgtttacaaagcggctgcccaga

SEQ ID NO: 1139641 - DNA, 25 bp, Homo sapien
tagccattcccacgcactcctttac

SEQ ID NO: 1139642 - DNA, 25 bp, Homo sapien
ctttaccctgtttacaaagcggctg

SEQ ID NO: 1139643 - DNA, 25 bp, Homo sapien
tttacaaagcggctgcccagaacaa

SEQ ID NO: 1139644 - DNA, 25 bp, Homo sapien
tagagttcgattgtcttcggtcgct

SEQ ID NO: 1139645 - DNA, 25 bp, Homo sapien
tttactgcccagtatagagttcgat

SEQ ID NO: 1139646 - DNA, 25 bp, Homo sapien
gattgtcttcggtcgctgtaaattc

SEQ ID NO: 1139647 - DNA, 25 bp, Homo sapien
ctctaaactttactgcccagtatag

SEQ ID NO: 1139648 - DNA, 25 bp, Homo sapien
tatgtggttggcctgtgactgtccc

SEQ ID NO: 1139649 - DNA, 25 bp, Homo sapien
ccccaggtatgtggttggcctgtga

SEQ ID NO: 1139650 - DNA, 25 bp, Homo sapien
ctgtccccaggtatgtggttggcct

SEQ ID NO: 1139651 - DNA, 25 bp, Homo sapien
ccaggtatgtggttggcctgtgact

SEQ ID NO: 1139652 - DNA, 25 bp, Homo sapien
tatgaggaccaagagtagcagagcc

SEQ ID NO: 1139653 - DNA, 25 bp, Homo sapien
taagctgaccctgtcacagtgaaaa

SEQ ID NO: 1139654 - DNA, 25 bp, Homo sapien
gcagcttccctatgaaaactatgag

SEQ ID NO: 1139655 - DNA, 25 bp, Homo sapien
tacaccagagggcagttaagctgac

SEQ ID NO: 1139656 - DNA, 25 bp, Homo sapien
ctacaagagagagaaatcaagtcac

SEQ ID NO: 1139657 - DNA, 25 bp, Homo sapien
tacaagagagagaaatcaagtcact

SEQ ID NO: 1139658 - DNA, 25 bp, Homo sapien
tgaccaagaatgtctgtaagaagtg

SEQ ID NO: 1139659 - DNA, 25 bp, Homo sapien
ctgtaagaagtggagacatcttttc

SEQ ID NO: 1139660 - DNA, 25 bp, Homo sapien
ggctgtgcaaggtgcttgtggtctg

SEQ ID NO: 1139661 - DNA, 25 bp, Homo sapien
aaattactgcggtgtcaggctgtgc

SEQ ID NO: 1139662 - DNA, 25 bp, Homo sapien
catggcaggtcttcgagaattatta

SEQ ID NO: 1139663 - DNA, 25 bp, Homo sapien
tgccagtggtatggcaactcaaaat

SEQ ID NO: 1139664 - DNA, 25 bp, Homo sapien
taaccaagggttcaaagctctcctg

SEQ ID NO: 1139665 - DNA, 25 bp, Homo sapien
tcctatgaatgccagcagaatgcca

SEQ ID NO: 1139666 - DNA, 25 bp, Homo sapien
gctctactggataacaaccaaggtt

SEQ ID NO: 1139667 - DNA, 25 bp, Homo sapien
aagacgaaggatgaacagccccatg

SEQ ID NO: 1139668 - DNA, 25 bp, Homo sapien
ggaccatcttcagcaagacgaagga

SEQ ID NO: 1139669 - DNA, 25 bp, Homo sapien
ctctccagctctactggataacaac

SEQ ID NO: 1139670 - DNA, 25 bp, Homo sapien
tcttgtcacgatatgaaattgtctc

SEQ ID NO: 1139671 - DNA, 25 bp, Homo sapien
gaataaatatgccatcctctgtaaa

SEQ ID NO: 1139672 - DNA, 25 bp, Homo sapien
tgtaaacagtgtctcaagatgctct

SEQ ID NO: 1139673 - DNA, 25 bp, Homo sapien
gatttccaaacccatgttcttgtca

SEQ ID NO: 1139674 - DNA, 25 bp, Homo sapien
cattcacaggaacaacatgaaacta

SEQ ID NO: 1139675 - DNA, 25 bp, Homo sapien
gaacaacatgaaactatgcatcctt

SEQ ID NO: 1139676 - DNA, 25 bp, Homo sapien
ctagacagagaacattcacaggaac

SEQ ID NO: 1139677 - DNA, 25 bp, Homo sapien
cagagaacattcacaggaacaacat

SEQ ID NO: 1139678 - DNA, 25 bp, Homo sapien
tgtgattccttgtgtaggttcccca

SEQ ID NO: 1139679 - DNA, 25 bp, Homo sapien
cctgaatgagctcaattgctcgagt

SEQ ID NO: 1139680 - DNA, 25 bp, Homo sapien
catggtcaggtatcaagccagttcc

SEQ ID NO: 1139681 - DNA, 25 bp, Homo sapien
caattgctcgagtatgtgtgattcc

SEQ ID NO: 1139682 - DNA, 25 bp, Homo sapien
ttatgataactctgctatgtaacta

SEQ ID NO: 1139683 - DNA, 25 bp, Homo sapien
catggttctagcattcacctctgaa

SEQ ID NO: 1139684 - DNA, 25 bp, Homo sapien
tacaacttttcagctactagtgggc

SEQ ID NO: 1139685 - DNA, 25 bp, Homo sapien
cattccaacgaaagtcctgcctaag

SEQ ID NO: 1139686 - DNA, 25 bp, Homo sapien
tttcacgtaggagcacagaccggaa

SEQ ID NO: 1139687 - DNA, 25 bp, Homo sapien
tcgggtttcacgtaggagcacagac

SEQ ID NO: 1139688 - DNA, 25 bp, Homo sapien
aatgttgctcgggtttcacgtagga

SEQ ID NO: 1139689 - DNA, 25 bp, Homo sapien
cacgtaggagcacagaccggaagga

SEQ ID NO: 1139690 - DNA, 25 bp, Homo sapien
gaaatagatgtatttaatagcatca

SEQ ID NO: 1139691 - DNA, 25 bp, Homo sapien
agaaagtgatttacaagacatgcaa

SEQ ID NO: 1139692 - DNA, 25 bp, Homo sapien
gtgatttacaagacatgcaaattta

SEQ ID NO: 1139693 - DNA, 25 bp, Homo sapien
gaagaaagtgatttacaagacatgc

SEQ ID NO: 1139694 - DNA, 25 bp, Homo sapien
gattcttcaattactggcacgtgag

SEQ ID NO: 1139695 - DNA, 25 bp, Homo sapien
ctggctttttgggactaaccgatct

SEQ ID NO: 1139696 - DNA, 25 bp, Homo sapien
ttcctctgaatgttgactggctggc

SEQ ID NO: 1139697 - DNA, 25 bp, Homo sapien
gccctggtgctgacctgacaacttt

SEQ ID NO: 1139698 - DNA, 25 bp, Homo sapien
tgtgcacctgctaccagaagagttg

SEQ ID NO: 1139699 - DNA, 25 bp, Homo sapien
tacatcgaggttggataacacagca

SEQ ID NO: 1139700 - DNA, 25 bp, Homo sapien
gctgggcataccctacacaggttgt

SEQ ID NO: 1139701 - DNA, 25 bp, Homo sapien
tcagacactcatgaagacgagctgg

SEQ ID NO: 1139702 - DNA, 25 bp, Homo sapien
tttcacagtcagactcccagaggga

SEQ ID NO: 1139703 - DNA, 25 bp, Homo sapien
ggacctggacctaatgtgcttcaca

SEQ ID NO: 1139704 - DNA, 25 bp, Homo sapien
cactaattgtggactacagggaaaa

SEQ ID NO: 1139705 - DNA, 25 bp, Homo sapien
ttttgctcagcattccaaggccaca

SEQ ID NO: 1139706 - DNA, 25 bp, Homo sapien
cacccacgctgaacagcaggaggtg

SEQ ID NO: 1139707 - DNA, 25 bp, Homo sapien
aacaattagattaggccattcatac

SEQ ID NO: 1139708 - DNA, 25 bp, Homo sapien
ttatctctcctaaagttgctgtggg

SEQ ID NO: 1139709 - DNA, 25 bp, Homo sapien
cagtgcctcatttatccctgtataa

SEQ ID NO: 1139710 - DNA, 25 bp, Homo sapien
ggtgcttcatatgggtcctgcagtt

SEQ ID NO: 1139711 - DNA, 25 bp, Homo sapien
aatatgcaagaaccgcaagggatca

SEQ ID NO: 1139712 - DNA, 25 bp, Homo sapien
cacttctatgactggtggtgcttca

SEQ ID NO: 1139713 - DNA, 25 bp, Homo sapien
tccacggtttatggagagatgaact

SEQ ID NO: 1139714 - DNA, 25 bp, Homo sapien
cagtcctttccagagtactgtgtgt

SEQ ID NO: 1139715 - DNA, 25 bp, Homo sapien
tagtcctgatcgtaaacacaactgc

SEQ ID NO: 1139716 - DNA, 25 bp, Homo sapien
caaaggtagtgtcttactagcaagg

SEQ ID NO: 1139717 - DNA, 25 bp, Homo sapien
tcctttcctgcctaaatcatggtgc

SEQ ID NO: 1139718 - DNA, 25 bp, Homo sapien
tggaagcactcgtctccatcaacaa

SEQ ID NO: 1139719 - DNA, 25 bp, Homo sapien
ctccatcaacaagtcatctgttaat

SEQ ID NO: 1139720 - DNA, 25 bp, Homo sapien
caagaggcagtcacacttgatctaa

SEQ ID NO: 1139721 - DNA, 25 bp, Homo sapien
tggtgtggggtttattagctcctga

SEQ ID NO: 1139722 - DNA, 25 bp, Homo sapien
cagctctgccaaagcgaatgaatgg

SEQ ID NO: 1139723 - DNA, 25 bp, Homo sapien
tggtgtttccggaggagcaagtcct

SEQ ID NO: 1139724 - DNA, 25 bp, Homo sapien
ctgcttgttcacatgcacaggtgct

SEQ ID NO: 1139725 - DNA, 25 bp, Homo sapien
gcttgttcacatgcacaggtgctct

SEQ ID NO: 1139726 - DNA, 25 bp, Homo sapien
tcctagaactaacttattttggtga

SEQ ID NO: 1139727 - DNA, 25 bp, Homo sapien
tattttggtgattttgttctcttag

SEQ ID NO: 1139728 - DNA, 25 bp, Homo sapien
cttattttggtgattttgttctctt

SEQ ID NO: 1139729 - DNA, 25 bp, Homo sapien
ctagaactaacttattttggtgatt

SEQ ID NO: 1139730 - DNA, 25 bp, Homo sapien
ggtcaagctctttatcctccctgtg

SEQ ID NO: 1139731 - DNA, 25 bp, Homo sapien
tacccttgcaaggtgactggcagcc

SEQ ID NO: 1139732 - DNA, 25 bp, Homo sapien
gccaattttgccaagggcacctttg

SEQ ID NO: 1139733 - DNA, 25 bp, Homo sapien
gcgttggtactgtcttggcccctgt

SEQ ID NO: 1139734 - DNA, 25 bp, Homo sapien
tattctgggaatatcgttggcaatt

SEQ ID NO: 1139735 - DNA, 25 bp, Homo sapien
ccttgcaaatgttgagtgtaccaca

SEQ ID NO: 1139736 - DNA, 25 bp, Homo sapien
gaagtagtggatccataaatgccaa

SEQ ID NO: 1139737 - DNA, 25 bp, Homo sapien
ttggaaacaacagggtaacgagcta

SEQ ID NO: 1139738 - DNA, 25 bp, Homo sapien
gtttcactgtcattgctcaggttga

SEQ ID NO: 1139739 - DNA, 25 bp, Homo sapien
tttcactgtcattgctcaggttgaa

SEQ ID NO: 1139740 - DNA, 25 bp, Homo sapien
ttcactgtcattgctcaggttgaag

SEQ ID NO: 1139741 - DNA, 25 bp, Homo sapien
tcctttatggatgttcctgtagtgc

SEQ ID NO: 1139742 - DNA, 25 bp, Homo sapien
tccctctctgcaccagactgtataa

SEQ ID NO: 1139743 - DNA, 25 bp, Homo sapien
tagtgctatacttgccttgtaattg

SEQ ID NO: 1139744 - DNA, 25 bp, Homo sapien
ttttgttgttcaccatatgccccaa

SEQ ID NO: 1139745 - DNA, 25 bp, Homo sapien
aaggagtgagttgttctatgatgaa

SEQ ID NO: 1139746 - DNA, 25 bp, Homo sapien
tgatgaattagagagcaaatgtccc

SEQ ID NO: 1139747 - DNA, 25 bp, Homo sapien
cattttgtgtcggatttttaagaga

SEQ ID NO: 1139748 - DNA, 25 bp, Homo sapien
tctggctagtttttaccacttggca

SEQ ID NO: 1139749 - DNA, 25 bp, Homo sapien
ccggtcgccgctgcgccagtttttt

SEQ ID NO: 1139750 - DNA, 25 bp, Homo sapien
gcagaggcttctccggtcgccgctg

SEQ ID NO: 1139751 - DNA, 25 bp, Homo sapien
gcccgatatattgcagaggcttctc

SEQ ID NO: 1139752 - DNA, 25 bp, Homo sapien
cacgaacacgctcgcccgatatatt

SEQ ID NO: 1139753 - DNA, 25 bp, Homo sapien
gacctacaatcaaaagcaaatcccc

SEQ ID NO: 1139754 - DNA, 25 bp, Homo sapien
tgtatgttagaattgcaatagaatg

SEQ ID NO: 1139755 - DNA, 25 bp, Homo sapien
acatttagctagtaacgtgatctga

SEQ ID NO: 1139756 - DNA, 25 bp, Homo sapien
tctgaaaactgaatgtcctatgtga

SEQ ID NO: 1139757 - DNA, 25 bp, Homo sapien
catattagcaaagtatagaggtcac

SEQ ID NO: 1139758 - DNA, 25 bp, Homo sapien
gtcactgtgtaaaccgatagaaaag

SEQ ID NO: 1139759 - DNA, 25 bp, Homo sapien
tgctgctttattatgtctgtcacca

SEQ ID NO: 1139760 - DNA, 25 bp, Homo sapien
tcaccatgaaaacttagctgcatct

SEQ ID NO: 1139761 - DNA, 25 bp, Homo sapien
gaagaagcatgcacagagattcagc

SEQ ID NO: 1139762 - DNA, 25 bp, Homo sapien
taccaccctgttgtggaagccactc

SEQ ID NO: 1139763 - DNA, 25 bp, Homo sapien
gaagttgactcccaatgtgtgagga

SEQ ID NO: 1139764 - DNA, 25 bp, Homo sapien
cagtttcggcggtgtgcagcttagc

SEQ ID NO: 1139765 - DNA, 25 bp, Homo sapien
tttagagagggttgcatgaataggc

SEQ ID NO: 1139766 - DNA, 25 bp, Homo sapien
tacaacaagagtgaacctgaatgta

SEQ ID NO: 1139767 - DNA, 25 bp, Homo sapien
taaaccatggactgcgggcaggcga

SEQ ID NO: 1139768 - DNA, 25 bp, Homo sapien
tacatttatccaaaccctcagaatg

SEQ ID NO: 1139769 - DNA, 25 bp, Homo sapien
cagccagaagcgtgacttcgcgcac

SEQ ID NO: 1139770 - DNA, 25 bp, Homo sapien
ctttgcgcggcatagggtgctttac

SEQ ID NO: 1139771 - DNA, 25 bp, Homo sapien
aatagaagctcggttggagaggcct

SEQ ID NO: 1139772 - DNA, 25 bp, Homo sapien
acagctcccatgacgctttgcgcgg

SEQ ID NO: 1139773 - DNA, 25 bp, Homo sapien
tccaatagggcaaattgaatgaagt

SEQ ID NO: 1139774 - DNA, 25 bp, Homo sapien
agtattgtttaaacatcatttgttc

SEQ ID NO: 1139775 - DNA, 25 bp, Homo sapien
ttttcatttggaagtccaatagggc

SEQ ID NO: 1139776 - DNA, 25 bp, Homo sapien
tgaagtattattatctgtctcttgt

SEQ ID NO: 1139777 - DNA, 25 bp, Homo sapien
taaatggagtataccttgtaaatct

SEQ ID NO: 1139778 - DNA, 25 bp, Homo sapien
aatgactattccctgacagttattt

SEQ ID NO: 1139779 - DNA, 25 bp, Homo sapien
gcctaaatggagtataccttgtaaa

SEQ ID NO: 1139780 - DNA, 25 bp, Homo sapien
atttttgcctaaatggagtatacct

SEQ ID NO: 1139781 - DNA, 25 bp, Homo sapien
tttctggaccgacatagaggtataa

SEQ ID NO: 1139782 - DNA, 25 bp, Homo sapien
aggatttctggaccgacatagaggt

SEQ ID NO: 1139783 - DNA, 25 bp, Homo sapien
tcaaacataatctcttggtaaattg

SEQ ID NO: 1139784 - DNA, 25 bp, Homo sapien
tctcttggtaaattgaaggatttct

SEQ ID NO: 1139785 - DNA, 25 bp, Homo sapien
aaagtgtgggattattcaaaggcat

SEQ ID NO: 1139786 - DNA, 25 bp, Homo sapien
ttgagtagttaccataggcttgaat

SEQ ID NO: 1139787 - DNA, 25 bp, Homo sapien
acatttgagtagttaccataggctt

SEQ ID NO: 1139788 - DNA, 25 bp, Homo sapien
ctggccccaagctatcctccatact

SEQ ID NO: 1139789 - DNA, 25 bp, Homo sapien
tcctccatactcacctccaaaagtg

SEQ ID NO: 1139790 - DNA, 25 bp, Homo sapien
ccagggtagaggattatataataca

SEQ ID NO: 1139791 - DNA, 25 bp, Homo sapien
aaaatgtactaagagtggccagagg

SEQ ID NO: 1139792 - DNA, 25 bp, Homo sapien
tcaccgtgcccggttatgggcctaa

SEQ ID NO: 1139793 - DNA, 25 bp, Homo sapien
tcatggatgaattattgtggagaag

SEQ ID NO: 1139794 - DNA, 25 bp, Homo sapien
tcccactggtctgtaaagctggtcc

SEQ ID NO: 1139795 - DNA, 25 bp, Homo sapien
ggcattctgtaaggcacttggtata

SEQ ID NO: 1139796 - DNA, 25 bp, Homo sapien
cttggtatatgatggtgaacagaac

SEQ ID NO: 1139797 - DNA, 25 bp, Homo sapien
tagtatctaagcctagtgtcattca

SEQ ID NO: 1139798 - DNA, 25 bp, Homo sapien
gtacttcatatgtgtcctcagcccc

SEQ ID NO: 1139799 - DNA, 25 bp, Homo sapien
catctggctcccaaaattgatcctg

SEQ ID NO: 1139800 - DNA, 25 bp, Homo sapien
tgatcctgaagctttagactgtact

SEQ ID NO: 1139801 - DNA, 25 bp, Homo sapien
tttgccgttaaatgaagaacatctg

SEQ ID NO: 1139802 - DNA, 25 bp, Homo sapien
taaaatttattttaatagcagagat

SEQ ID NO: 1139803 - DNA, 25 bp, Homo sapien
aaaatttattttaatagcagagatg

SEQ ID NO: 1139804 - DNA, 25 bp, Homo sapien
ttaaaatttattttaatagcagaga

SEQ ID NO: 1139805 - DNA, 25 bp, Homo sapien
tagcaagataaaatcaagtagaggt

SEQ ID NO: 1139806 - DNA, 25 bp, Homo sapien
catgggtgatataaatagcaagata

SEQ ID NO: 1139807 - DNA, 25 bp, Homo sapien
taaaatcaagtagaggttttgcact

SEQ ID NO: 1139808 - DNA, 25 bp, Homo sapien
caaaatatgtagtgtgatacttgca

SEQ ID NO: 1139809 - DNA, 25 bp, Homo sapien
taacactggaaggatactaacaaca

SEQ ID NO: 1139810 - DNA, 25 bp, Homo sapien
aacagaacacctttgagaaacatga

SEQ ID NO: 1139811 - DNA, 25 bp, Homo sapien
aacagtggttatctacaggaggagc

SEQ ID NO: 1139812 - DNA, 25 bp, Homo sapien
agataaattagagactccaggccgg

SEQ ID NO: 1139813 - DNA, 25 bp, Homo sapien
aagagtcttttacaacctgggagtg

SEQ ID NO: 1139814 - DNA, 25 bp, Homo sapien
tataacttactcaaaatccggaggc

SEQ ID NO: 1139815 - DNA, 25 bp, Homo sapien
tccggaggccataagaaaagagata

SEQ ID NO: 1139816 - DNA, 25 bp, Homo sapien
cctgggagtgtgaatgacctttata

SEQ ID NO: 1139817 - DNA, 25 bp, Homo sapien
gggggaagcaggactagtcagaaac

SEQ ID NO: 1139818 - DNA, 25 bp, Homo sapien
ctagataaactgaattcaaagttca

SEQ ID NO: 1139819 - DNA, 25 bp, Homo sapien
tagggggaagcaggactagtcagaa

SEQ ID NO: 1139820 - DNA, 25 bp, Homo sapien
attcaaagttcacatgggagtaggg

SEQ ID NO: 1139821 - DNA, 25 bp, Homo sapien
gcatttctgtatagtctgtgaacca

SEQ ID NO: 1139822 - DNA, 25 bp, Homo sapien
tgctgataggcaaatattctctgcc

SEQ ID NO: 1139823 - DNA, 25 bp, Homo sapien
ttcaagtgtaggagatgcctccagg

SEQ ID NO: 1139824 - DNA, 25 bp, Homo sapien
catacttaagtaggaagcttgttca

SEQ ID NO: 1139825 - DNA, 25 bp, Homo sapien
acacaagggcgtaaatgtgcaggtt

SEQ ID NO: 1139826 - DNA, 25 bp, Homo sapien
acccagcctcaactttaatcttatg

SEQ ID NO: 1139827 - DNA, 25 bp, Homo sapien
gaatataagacacaagggcgtaaat

SEQ ID NO: 1139828 - DNA, 25 bp, Homo sapien
ccagcctcaactttaatcttatgaa

SEQ ID NO: 1139829 - DNA, 25 bp, Homo sapien
aatttgcttccaaatgagagagtgg

SEQ ID NO: 1139830 - DNA, 25 bp, Homo sapien
ctaacctaaggtgaaggacatagag

SEQ ID NO: 1139831 - DNA, 25 bp, Homo sapien
acctaaggtgaaggacatagagctg

SEQ ID NO: 1139832 - DNA, 25 bp, Homo sapien
gagtggaaaagactagaatatatgg

SEQ ID NO: 1139833 - DNA, 25 bp, Homo sapien
tttcagtttgggaatgccacgtgat

SEQ ID NO: 1139834 - DNA, 25 bp, Homo sapien
gaatgccacgtgattctcagaggat

SEQ ID NO: 1139835 - DNA, 25 bp, Homo sapien
tttgggaatgccacgtgattctcag

SEQ ID NO: 1139836 - DNA, 25 bp, Homo sapien
gccacgtgattctcagaggattttt

SEQ ID NO: 1139837 - DNA, 25 bp, Homo sapien
gctcatttggtaacaagattactgg

SEQ ID NO: 1139838 - DNA, 25 bp, Homo sapien
caggctcatttggtaacaagattac

SEQ ID NO: 1139839 - DNA, 25 bp, Homo sapien
ggctcatttggtaacaagattactg

SEQ ID NO: 1139840 - DNA, 25 bp, Homo sapien
ctcatttggtaacaagattactggt

SEQ ID NO: 1139841 - DNA, 25 bp, Homo sapien
tttactggattcctgcacctgcagc

SEQ ID NO: 1139842 - DNA, 25 bp, Homo sapien
gatttccttagttaccaccagttgc

SEQ ID NO: 1139843 - DNA, 25 bp, Homo sapien
gcacatttggcactctaagaaacaa

SEQ ID NO: 1139844 - DNA, 25 bp, Homo sapien
gcagcctcctgcactttttgagtga

SEQ ID NO: 1139845 - DNA, 25 bp, Homo sapien
gcactttagctacatgggaacataa

SEQ ID NO: 1139846 - DNA, 25 bp, Homo sapien
tctagagagaatgagcgacagataa

SEQ ID NO: 1139847 - DNA, 25 bp, Homo sapien
ccaacacaagcatagtcttctctgt

SEQ ID NO: 1139848 - DNA, 25 bp, Homo sapien
taatttgtgttcttactccaaaagc

SEQ ID NO: 1139849 - DNA, 25 bp, Homo sapien
tgcttaatccaacataggctatgaa

SEQ ID NO: 1139850 - DNA, 25 bp, Homo sapien
gatgtgcactctaggttagtaacca

SEQ ID NO: 1139851 - DNA, 25 bp, Homo sapien
gaaaagcaaaaccagtggctgtcta

SEQ ID NO: 1139852 - DNA, 25 bp, Homo sapien
ccgtgcccggctgacagatacattt

SEQ ID NO: 1139853 - DNA, 25 bp, Homo sapien
tgtaccctggcctgtattgtagtgg

SEQ ID NO: 1139854 - DNA, 25 bp, Homo sapien
tgtactgaagctgtatgtcaggccc

SEQ ID NO: 1139855 - DNA, 25 bp, Homo sapien
cagactttccgagacctggtttggt

SEQ ID NO: 1139856 - DNA, 25 bp, Homo sapien
tggaggctctaatcctgtgctcttg

SEQ ID NO: 1139857 - DNA, 25 bp, Homo sapien
cagcaagaaaactgtggttagagga

SEQ ID NO: 1139858 - DNA, 25 bp, Homo sapien
ccagcaagaaaactgtggttagagg

SEQ ID NO: 1139859 - DNA, 25 bp, Homo sapien
agccagcaagaaaactgtggttaga

SEQ ID NO: 1139860 - DNA, 25 bp, Homo sapien
gccagcaagaaaactgtggttagag

SEQ ID NO: 1139861 - DNA, 25 bp, Homo sapien
taccaggtcactttagcagccacta

SEQ ID NO: 1139862 - DNA, 25 bp, Homo sapien
tagaggagcttcgagggtactgcac

SEQ ID NO: 1139863 - DNA, 25 bp, Homo sapien
tactgcacggatgtgtctgcggact

SEQ ID NO: 1139864 - DNA, 25 bp, Homo sapien
caaactgatgtccttgtgcgggtca

SEQ ID NO: 1139865 - DNA, 25 bp, Homo sapien
cccagcagagcaataagttaccaga

SEQ ID NO: 1139866 - DNA, 25 bp, Homo sapien
aaagtagccgatttccgattgcccg

SEQ ID NO: 1139867 - DNA, 25 bp, Homo sapien
aacggcgtcccgataaaagtcatgc

SEQ ID NO: 1139868 - DNA, 25 bp, Homo sapien
gcatcctaaggtcggagtcgggact

SEQ ID NO: 1139869 - DNA, 25 bp, Homo sapien
gcccaggtgctagacaggcccacgg

SEQ ID NO: 1139870 - DNA, 25 bp, Homo sapien
cagaagtccactgcgatgggcgtat

SEQ ID NO: 1139871 - DNA, 25 bp, Homo sapien
tccgagtgcatgtgagacaagaaga

SEQ ID NO: 1139872 - DNA, 25 bp, Homo sapien
caagaagaagagacgtgcggtgcca

SEQ ID NO: 1139873 - DNA, 25 bp, Homo sapien
gcagaagctgtaatggggattccca

SEQ ID NO: 1139874 - DNA, 25 bp, Homo sapien
agctgaccaaatcctgagccaccgg

SEQ ID NO: 1139875 - DNA, 25 bp, Homo sapien
aggaaagctgaccaaatcctgagcc

SEQ ID NO: 1139876 - DNA, 25 bp, Homo sapien
aatggggattcccaagcaatctgcc

SEQ ID NO: 1139877 - DNA, 25 bp, Homo sapien
tgtagaggatggttccaaaatatcc

SEQ ID NO: 1139878 - DNA, 25 bp, Homo sapien
tacggtcatggtctcttgtccaatt

SEQ ID NO: 1139879 - DNA, 25 bp, Homo sapien
cagtgattggcatcgaggagggtta

SEQ ID NO: 1139880 - DNA, 25 bp, Homo sapien
ggtaatacatggctctcaccaacct

SEQ ID NO: 1139881 - DNA, 25 bp, Homo sapien
caattggtgttgtctaggtataaag

SEQ ID NO: 1139882 - DNA, 25 bp, Homo sapien
agggctggctcctttagcatggatg

SEQ ID NO: 1139883 - DNA, 25 bp, Homo sapien
aatgagctggacaatctggtgggca

SEQ ID NO: 1139884 - DNA, 25 bp, Homo sapien
gcttcttgtcgggaaggaagaacca

SEQ ID NO: 1139885 - DNA, 25 bp, Homo sapien
tgctgcgacaaaggcacgaagctcg

SEQ ID NO: 1139886 - DNA, 25 bp, Homo sapien
caatcgtagggtgggtctggttcca

SEQ ID NO: 1139887 - DNA, 25 bp, Homo sapien
catgtattgctgtacagagtccgga

SEQ ID NO: 1139888 - DNA, 25 bp, Homo sapien
cagggccgccgacttacaatgggca

SEQ ID NO: 1139889 - DNA, 25 bp, Homo sapien
tgttccattctttgctatagagatc

SEQ ID NO: 1139890 - DNA, 25 bp, Homo sapien
cttcttgatccgcaaaggatggtgg

SEQ ID NO: 1139891 - DNA, 25 bp, Homo sapien
gctatagagatctgggaacaactgc

SEQ ID NO: 1139892 - DNA, 25 bp, Homo sapien
tctttgctatagagatctgggaaca

SEQ ID NO: 1139893 - DNA, 25 bp, Homo sapien
cctgaattcagtagctagaagaggg

SEQ ID NO: 1139894 - DNA, 25 bp, Homo sapien
tccaggcactctgattccctgtggc

SEQ ID NO: 1139895 - DNA, 25 bp, Homo sapien
cagaagatatttgagtgctagaccc

SEQ ID NO: 1139896 - DNA, 25 bp, Homo sapien
taagtgcactgaaaatcccagtggg

SEQ ID NO: 1139897 - DNA, 25 bp, Homo sapien
atttttccacttgctggtcaaatct

SEQ ID NO: 1139898 - DNA, 25 bp, Homo sapien
cagcagggtttatggtatttttcca

SEQ ID NO: 1139899 - DNA, 25 bp, Homo sapien
tcagcagggtttatggtatttttcc

SEQ ID NO: 1139900 - DNA, 25 bp, Homo sapien
ttttccacttgctggtcaaatctcc

SEQ ID NO: 1139901 - DNA, 25 bp, Homo sapien
tcaggattgaagcatgcagcgccat

SEQ ID NO: 1139902 - DNA, 25 bp, Homo sapien
gtttcagccaaatagggtctccagg

SEQ ID NO: 1139903 - DNA, 25 bp, Homo sapien
taagtaattgctcagggtgccacag

SEQ ID NO: 1139904 - DNA, 25 bp, Homo sapien
tcttcactgctagggctcgaggttc

SEQ ID NO: 1139905 - DNA, 25 bp, Homo sapien
ggcagctgttagactcagatgttta

SEQ ID NO: 1139906 - DNA, 25 bp, Homo sapien
gatgtttataagggagagcagcatc

SEQ ID NO: 1139907 - DNA, 25 bp, Homo sapien
tctgttcaggtataggtgggatccc

SEQ ID NO: 1139908 - DNA, 25 bp, Homo sapien
atcattctgttcaggtataggtggg

SEQ ID NO: 1139909 - DNA, 25 bp, Homo sapien
tccaaggaatctgcttgggtccaca

SEQ ID NO: 1139910 - DNA, 25 bp, Homo sapien
ggcccctcatctggtttcatgaagg

SEQ ID NO: 1139911 - DNA, 25 bp, Homo sapien
gctacatctgagaagttatgaaatg

SEQ ID NO: 1139912 - DNA, 25 bp, Homo sapien
cacaggtataaaccaggaaaagttg

SEQ ID NO: 1139913 - DNA, 25 bp, Homo sapien
gtacgggatccaactgtaaaatgtc

SEQ ID NO: 1139914 - DNA, 25 bp, Homo sapien
gcagactctgcggtgatttaaaggt

SEQ ID NO: 1139915 - DNA, 25 bp, Homo sapien
tgaatggactctctaggacgatcgc

SEQ ID NO: 1139916 - DNA, 25 bp, Homo sapien
ggacgatcgcatagtactgattgca

SEQ ID NO: 1139917 - DNA, 25 bp, Homo sapien
cgccggtgtgtctggttctcagccg

SEQ ID NO: 1139918 - DNA, 25 bp, Homo sapien
cgggtcatcataccccccgcgcgag

SEQ ID NO: 1139919 - DNA, 25 bp, Homo sapien
aggcggcggaggagacgagatctgg

SEQ ID NO: 1139920 - DNA, 25 bp, Homo sapien
gtgtgtctggttctcagccgcgagc

SEQ ID NO: 1139921 - DNA, 25 bp, Homo sapien
tacagtgtcgagagataaactattc

SEQ ID NO: 1139922 - DNA, 25 bp, Homo sapien
caacgaacttgctcaaaaaaccaca

SEQ ID NO: 1139923 - DNA, 25 bp, Homo sapien
agttctacttgccaaccagagccag

SEQ ID NO: 1139924 - DNA, 25 bp, Homo sapien
gaaggtatcaccagcaaaagttcta

SEQ ID NO: 1139925 - DNA, 25 bp, Homo sapien
tcctgaaaatgctgcgcctcttgac

SEQ ID NO: 1139926 - DNA, 25 bp, Homo sapien
gcctcttgactccagcaataaatga

SEQ ID NO: 1139927 - DNA, 25 bp, Homo sapien
gcccagttcattaataccaaagtag

SEQ ID NO: 1139928 - DNA, 25 bp, Homo sapien
caccgtacctggcataaaaagttat

SEQ ID NO: 1139929 - DNA, 25 bp, Homo sapien
tgcaagtggggaggcaattctcttc

SEQ ID NO: 1139930 - DNA, 25 bp, Homo sapien
ttaaacttgcctttgcaagtgggga

SEQ ID NO: 1139931 - DNA, 25 bp, Homo sapien
aacagaattaacatctgtggaaaac

SEQ ID NO: 1139932 - DNA, 25 bp, Homo sapien
gcctttgcaagtggggaggcaattc

SEQ ID NO: 1139933 - DNA, 25 bp, Homo sapien
tgtgcctgaatacaactagaaacca

SEQ ID NO: 1139934 - DNA, 25 bp, Homo sapien
gtaagtacatttctttgtgcctgaa

SEQ ID NO: 1139935 - DNA, 25 bp, Homo sapien
caaattaaaagctaaggtcagtaca

SEQ ID NO: 1139936 - DNA, 25 bp, Homo sapien
tagaaaccacctgcactggactagt

SEQ ID NO: 1139937 - DNA, 25 bp, Homo sapien
tatgatctgcacactaccgttgctg

SEQ ID NO: 1139938 - DNA, 25 bp, Homo sapien
tgctgaaagcactcgtatgaacgga

SEQ ID NO: 1139939 - DNA, 25 bp, Homo sapien
tagggctggcgaactggatcaacca

SEQ ID NO: 1139940 - DNA, 25 bp, Homo sapien
gaaggcactcgacgacactgatggg

SEQ ID NO: 1139941 - DNA, 25 bp, Homo sapien
taccaattagagaggttacataaaa

SEQ ID NO: 1139942 - DNA, 25 bp, Homo sapien
ttaccaattagagaggttacataaa

SEQ ID NO: 1139943 - DNA, 25 bp, Homo sapien
caattagagaggttacataaaacct

SEQ ID NO: 1139944 - DNA, 25 bp, Homo sapien
tacaagggcaattgtcaaactatga

SEQ ID NO: 1139945 - DNA, 25 bp, Homo sapien
ctaattaggcaataagtgggttcaa

SEQ ID NO: 1139946 - DNA, 25 bp, Homo sapien
aatgacacataaatattgcctacta

SEQ ID NO: 1139947 - DNA, 25 bp, Homo sapien
tatatttgacatggtggaatacaag

SEQ ID NO: 1139948 - DNA, 25 bp, Homo sapien
catggtgttgacagcacactctcta

SEQ ID NO: 1139949 - DNA, 25 bp, Homo sapien
gaaagcttttagaccagtgcatggc

SEQ ID NO: 1139950 - DNA, 25 bp, Homo sapien
gttccatcatttaatagctgcaggt

SEQ ID NO: 1139951 - DNA, 25 bp, Homo sapien
aataacccttcatgacagaaatgcc

SEQ ID NO: 1139952 - DNA, 25 bp, Homo sapien
agcaaaaacaaaaaatatcagatta

SEQ ID NO: 1139953 - DNA, 25 bp, Homo sapien
gcaaaaacaaaaaatatcagattaa

SEQ ID NO: 1139954 - DNA, 25 bp, Homo sapien
tagcaaaaacaaaaaatatcagatt

SEQ ID NO: 1139955 - DNA, 25 bp, Homo sapien
ctagcaaaaacaaaaaatatcagat

SEQ ID NO: 1139956 - DNA, 25 bp, Homo sapien
tcacaaaatggtaacccaagaataa

SEQ ID NO: 1139957 - DNA, 25 bp, Homo sapien
cacaaaatggtaacccaagaataat

SEQ ID NO: 1139958 - DNA, 25 bp, Homo sapien
cttcacaaaatggtaacccaagaat

SEQ ID NO: 1139959 - DNA, 25 bp, Homo sapien
ttcacaaaatggtaacccaagaata

SEQ ID NO: 1139960 - DNA, 25 bp, Homo sapien
caccaggataaagaggccatcccag

SEQ ID NO: 1139961 - DNA, 25 bp, Homo sapien
gcaccaggataaagaggccatccca

SEQ ID NO: 1139962 - DNA, 25 bp, Homo sapien
tacttcagtgtgtcatgcgtaaaag

SEQ ID NO: 1139963 - DNA, 25 bp, Homo sapien
tacagatctagcaaagtatcaacct

SEQ ID NO: 1139964 - DNA, 25 bp, Homo sapien
tagctccgagtaagtagaagttctc

SEQ ID NO: 1139965 - DNA, 25 bp, Homo sapien
tagcgacccagtatgtcacagcttc

SEQ ID NO: 1139966 - DNA, 25 bp, Homo sapien
ccagacacagtgttaggagctgagg

SEQ ID NO: 1139967 - DNA, 25 bp, Homo sapien
cacagtgttaggagctgaggataca

SEQ ID NO: 1139968 - DNA, 25 bp, Homo sapien
tgttaggagctgaggatacactggt

SEQ ID NO: 1139969 - DNA, 25 bp, Homo sapien
taggagctgaggatacactggtgat

SEQ ID NO: 1139970 - DNA, 25 bp, Homo sapien
ttcctgttgacttctaatacttcaa

SEQ ID NO: 1139971 - DNA, 25 bp, Homo sapien
tatatactaatccatccacagctac

SEQ ID NO: 1139972 - DNA, 25 bp, Homo sapien
tcaaatctgtggaatctactacaac

SEQ ID NO: 1139973 - DNA, 25 bp, Homo sapien
cacagctactgtatctattatttac

SEQ ID NO: 1139974 - DNA, 25 bp, Homo sapien
ttaagcctccacagtgggtacccca

SEQ ID NO: 1139975 - DNA, 25 bp, Homo sapien
tggttgtttttgttccggcactgag

SEQ ID NO: 1139976 - DNA, 25 bp, Homo sapien
taagcctccacagtgggtaccccaa

SEQ ID NO: 1139977 - DNA, 25 bp, Homo sapien
ttccggcactgagaagatattcagc

SEQ ID NO: 1139978 - DNA, 25 bp, Homo sapien
tattccagtctccagttcatgttct

SEQ ID NO: 1139979 - DNA, 25 bp, Homo sapien
aaatgtacttccgagcttcttttga

SEQ ID NO: 1139980 - DNA, 25 bp, Homo sapien
tacttccgagcttcttttgatttta

SEQ ID NO: 1139981 - DNA, 25 bp, Homo sapien
tgagccatgtcatctaagcaattaa

SEQ ID NO: 1139982 - DNA, 25 bp, Homo sapien
gtattctcttcggtctgccttctct

SEQ ID NO: 1139983 - DNA, 25 bp, Homo sapien
ttttctttaacagatcaatgtattc

SEQ ID NO: 1139984 - DNA, 25 bp, Homo sapien
gtcattgtcacaaactgatggttaa

SEQ ID NO: 1139985 - DNA, 25 bp, Homo sapien
ctcttatctgcatcaattgtgagca

SEQ ID NO: 1139986 - DNA, 25 bp, Homo sapien
acatgtgaaccctccgcttgcagat

SEQ ID NO: 1139987 - DNA, 25 bp, Homo sapien
tatcatacatgtgaaccctccgctt

SEQ ID NO: 1139988 - DNA, 25 bp, Homo sapien
tcatacatgtgaaccctccgcttgc

SEQ ID NO: 1139989 - DNA, 25 bp, Homo sapien
tgtatcatacatgtgaaccctccgc

SEQ ID NO: 1139990 - DNA, 25 bp, Homo sapien
tgaagggactcttgatctgactcac

SEQ ID NO: 1139991 - DNA, 25 bp, Homo sapien
ggcaacatgtgtagtgaagggactc

SEQ ID NO: 1139992 - DNA, 25 bp, Homo sapien
ggttagatttgtgcttgtatttggg

SEQ ID NO: 1139993 - DNA, 25 bp, Homo sapien
gcactgtattgagctgattgctgaa

SEQ ID NO: 1139994 - DNA, 25 bp, Homo sapien
gaccccatttatttgacgatgctga

SEQ ID NO: 1139995 - DNA, 25 bp, Homo sapien
ggctgtggctacacaaaccccaact

SEQ ID NO: 1139996 - DNA, 25 bp, Homo sapien
taagtagcataatagtcagacccca

SEQ ID NO: 1139997 - DNA, 25 bp, Homo sapien
cgaatggtcctatgttggctgtggc

SEQ ID NO: 1139998 - DNA, 25 bp, Homo sapien
agtagtgagacatctgaattagcca

SEQ ID NO: 1139999 - DNA, 25 bp, Homo sapien
tttagtagtgagacatctgaattag

SEQ ID NO: 1140000 - DNA, 25 bp, Homo sapien
agtttagtagtgagacatctgaatt

SEQ ID NO: 1140001 - DNA, 25 bp, Homo sapien
tagtagtgagacatctgaattagcc

SEQ ID NO: 1140002 - DNA, 25 bp, Homo sapien
caccctgctgggcaactccaggaac

SEQ ID NO: 1140003 - DNA, 25 bp, Homo sapien
aaggaaacaccctgctgggcaactc

SEQ ID NO: 1140004 - DNA, 25 bp, Homo sapien
tggttccaggctgcaaggaaacacc

SEQ ID NO: 1140005 - DNA, 25 bp, Homo sapien
ctgggtggttccaggctgcaaggaa

SEQ ID NO: 1140006 - DNA, 25 bp, Homo sapien
aaatgtctgttggaatggatctgtc

SEQ ID NO: 1140007 - DNA, 25 bp, Homo sapien
tgttggaatggatctgtctgagtgc

SEQ ID NO: 1140008 - DNA, 25 bp, Homo sapien
tgtctgttggaatggatctgtctga

SEQ ID NO: 1140009 - DNA, 25 bp, Homo sapien
actataaatgtctgttggaatggat

SEQ ID NO: 1140010 - DNA, 25 bp, Homo sapien
ttttgaatctgtccctctgctctcc

SEQ ID NO: 1140011 - DNA, 25 bp, Homo sapien
gtttctccctggtttatatcgctat

SEQ ID NO: 1140012 - DNA, 25 bp, Homo sapien
tacggattttgaatctgtccctctg

SEQ ID NO: 1140013 - DNA, 25 bp, Homo sapien
ttatatcgctattgctctcctgtcc

SEQ ID NO: 1140014 - DNA, 25 bp, Homo sapien
cctcacagggaatccagaatgcttt

SEQ ID NO: 1140015 - DNA, 25 bp, Homo sapien
cacagggaatccagaatgctttgtt

SEQ ID NO: 1140016 - DNA, 25 bp, Homo sapien
tcacagggaatccagaatgctttgt

SEQ ID NO: 1140017 - DNA, 25 bp, Homo sapien
cagggaatccagaatgctttgttgt

SEQ ID NO: 1140018 - DNA, 25 bp, Homo sapien
tcctgactgaatctgtagtggctga

SEQ ID NO: 1140019 - DNA, 25 bp, Homo sapien
ctgcgtgagaactcctgactgaatc

SEQ ID NO: 1140020 - DNA, 25 bp, Homo sapien
gtacaatcggtacagcattatccat

SEQ ID NO: 1140021 - DNA, 25 bp, Homo sapien
ctggtgcctggggtacaatcggtac

SEQ ID NO: 1140022 - DNA, 25 bp, Homo sapien
tgctaccattagtggtgtacagctt

SEQ ID NO: 1140023 - DNA, 25 bp, Homo sapien
gcaccgcatactgcggtgtgatggt

SEQ ID NO: 1140024 - DNA, 25 bp, Homo sapien
ggctgcgcagctcagagtaaagggc

SEQ ID NO: 1140025 - DNA, 25 bp, Homo sapien
ttgagggtggagagttgctaccatt

SEQ ID NO: 1140026 - DNA, 25 bp, Homo sapien
tccgggtacctgtagctgagccaaa

SEQ ID NO: 1140027 - DNA, 25 bp, Homo sapien
ggagaaagctatcttgccaacgagc

SEQ ID NO: 1140028 - DNA, 25 bp, Homo sapien
gagcttttatcacactaggctggca

SEQ ID NO: 1140029 - DNA, 25 bp, Homo sapien
gagctcaattttggccatccgggta

SEQ ID NO: 1140030 - DNA, 25 bp, Homo sapien
tgccaagttgaaggcaggagaattt

SEQ ID NO: 1140031 - DNA, 25 bp, Homo sapien
caggagaatttgctgagtccctcca

SEQ ID NO: 1140032 - DNA, 25 bp, Homo sapien
gaatttgctgagtccctccaggcca

SEQ ID NO: 1140033 - DNA, 25 bp, Homo sapien
ctgttgccaagttgaaggcaggaga

SEQ ID NO: 1140034 - DNA, 25 bp, Homo sapien
agagttgtgtagagctaccccaggc

SEQ ID NO: 1140035 - DNA, 25 bp, Homo sapien
gctggacagagttgtgtagagctac

SEQ ID NO: 1140036 - DNA, 25 bp, Homo sapien
ccatggcctctggaatcattgctgt

SEQ ID NO: 1140037 - DNA, 25 bp, Homo sapien
cctctggaatcattgctgtgggctg

SEQ ID NO: 1140038 - DNA, 25 bp, Homo sapien
cagtggccaatgtcacatggttagt

SEQ ID NO: 1140039 - DNA, 25 bp, Homo sapien
gcaaggatggctgctgcatgatagt

SEQ ID NO: 1140040 - DNA, 25 bp, Homo sapien
tgggcaacaccaacattcagaggct

SEQ ID NO: 1140041 - DNA, 25 bp, Homo sapien
gcttattcttcttcgaagggaggga

SEQ ID NO: 1140042 - DNA, 25 bp, Homo sapien
gctgatcttggacagggaccaagga

SEQ ID NO: 1140043 - DNA, 25 bp, Homo sapien
aattataagaagatgtggtgcggag

SEQ ID NO: 1140044 - DNA, 25 bp, Homo sapien
ccagagaatagacttgggaaggcag

SEQ ID NO: 1140045 - DNA, 25 bp, Homo sapien
agtatctggaatgatgatgggctga

SEQ ID NO: 1140046 - DNA, 25 bp, Homo sapien
acattagaccttggcttcagtccag

SEQ ID NO: 1140047 - DNA, 25 bp, Homo sapien
cacaatgatagtgcgggtgccagtg

SEQ ID NO: 1140048 - DNA, 25 bp, Homo sapien
aataagggctgctcaaagaagagtc

SEQ ID NO: 1140049 - DNA, 25 bp, Homo sapien
caaaacggatccactattgcctcgg

SEQ ID NO: 1140050 - DNA, 25 bp, Homo sapien
cactgaagcgactggcttagtctta

SEQ ID NO: 1140051 - DNA, 25 bp, Homo sapien
gatacagcatccagatgactgccca

SEQ ID NO: 1140052 - DNA, 25 bp, Homo sapien
tgcccactcactgaagcgactggct

SEQ ID NO: 1140053 - DNA, 25 bp, Homo sapien
ggcttagtcttattgctcaggagac

SEQ ID NO: 1140054 - DNA, 25 bp, Homo sapien
ctgcactggtccccccgcgttgagc

SEQ ID NO: 1140055 - DNA, 25 bp, Homo sapien
gattgagtggttgtgctgcactggt

SEQ ID NO: 1140056 - DNA, 25 bp, Homo sapien
gcactggtccccccgcgttgagctc

SEQ ID NO: 1140057 - DNA, 25 bp, Homo sapien
ttgagtggttgtgctgcactggtcc

SEQ ID NO: 1140058 - DNA, 25 bp, Homo sapien
tccagaaagtaacaacagtgcaggg

SEQ ID NO: 1140059 - DNA, 25 bp, Homo sapien
agaagcagggttctccagaaagtaa

SEQ ID NO: 1140060 - DNA, 25 bp, Homo sapien
cagtgcagggcccaaacagaaggca

SEQ ID NO: 1140061 - DNA, 25 bp, Homo sapien
cagaaggcagtagcccatagcactt

SEQ ID NO: 1140062 - DNA, 25 bp, Homo sapien
caaaaggggcttcatttggctttat

SEQ ID NO: 1140063 - DNA, 25 bp, Homo sapien
ggtggacatcatacaagcactcgaa

SEQ ID NO: 1140064 - DNA, 25 bp, Homo sapien
tcaagagatcatagggttccccact

SEQ ID NO: 1140065 - DNA, 25 bp, Homo sapien
tcaactcaccctattctggcgtcag

SEQ ID NO: 1140066 - DNA, 25 bp, Homo sapien
tcacagacatggttaaagcacccca

SEQ ID NO: 1140067 - DNA, 25 bp, Homo sapien
tacgtatacagatgagcctggcttg

SEQ ID NO: 1140068 - DNA, 25 bp, Homo sapien
tgcagcatgccttgaggaaccctgt

SEQ ID NO: 1140069 - DNA, 25 bp, Homo sapien
aattgttgagcctcgggaagaccca

SEQ ID NO: 1140070 - DNA, 25 bp, Homo sapien
cctgtcgagtgtagcgggctgccat

SEQ ID NO: 1140071 - DNA, 25 bp, Homo sapien
ccaatattaagaacgcagggccagg

SEQ ID NO: 1140072 - DNA, 25 bp, Homo sapien
gaaaataatatcacctcctgggagc

SEQ ID NO: 1140073 - DNA, 25 bp, Homo sapien
gaagcaaggtagcaacgcacagtga

SEQ ID NO: 1140074 - DNA, 25 bp, Homo sapien
tacttgacccagatccatgcaggag

SEQ ID NO: 1140075 - DNA, 25 bp, Homo sapien
aactatgttttacacaatggaccct

SEQ ID NO: 1140076 - DNA, 25 bp, Homo sapien
gatgcattgcaattgctctacattt

SEQ ID NO: 1140077 - DNA, 25 bp, Homo sapien
gttgtaaaagaaagcgcacaaccaa

SEQ ID NO: 1140078 - DNA, 25 bp, Homo sapien
gaaactatctgtttctagaggcttg

SEQ ID NO: 1140079 - DNA, 25 bp, Homo sapien
tgatcccctttatatcctataacag

SEQ ID NO: 1140080 - DNA, 25 bp, Homo sapien
tcccctttatatcctataacagaag

SEQ ID NO: 1140081 - DNA, 25 bp, Homo sapien
ctttcaaagatgtcatttattgatc

SEQ ID NO: 1140082 - DNA, 25 bp, Homo sapien
tcaaagatgtcatttattgatcccc

SEQ ID NO: 1140083 - DNA, 25 bp, Homo sapien
gaaggaacgtacagtcagcctcttc

SEQ ID NO: 1140084 - DNA, 25 bp, Homo sapien
tcaagcccgagggttagctttggag

SEQ ID NO: 1140085 - DNA, 25 bp, Homo sapien
ccctcaagcccgagggttagctttg

SEQ ID NO: 1140086 - DNA, 25 bp, Homo sapien
tggtgccagagtagaaggaacgtac

SEQ ID NO: 1140087 - DNA, 25 bp, Homo sapien
tccatgtactccacaaggtggtgct

SEQ ID NO: 1140088 - DNA, 25 bp, Homo sapien
ctctaaagcagctagtcggcgttcc

SEQ ID NO: 1140089 - DNA, 25 bp, Homo sapien
cagctagtcggcgttccatgtactc

SEQ ID NO: 1140090 - DNA, 25 bp, Homo sapien
tgctgtccttggaggggtcccgacc

SEQ ID NO: 1140091 - DNA, 25 bp, Homo sapien
actggttgaaccaatagccctggaa

SEQ ID NO: 1140092 - DNA, 25 bp, Homo sapien
ccagaggtaaaacgcaaaagtcgat

SEQ ID NO: 1140093 - DNA, 25 bp, Homo sapien
tgtagactctaacagagccctttct

SEQ ID NO: 1140094 - DNA, 25 bp, Homo sapien
taagaggagggcttgtcattccgaa

SEQ ID NO: 1140095 - DNA, 25 bp, Homo sapien
tgtgaagaggtctctgctcccttag

SEQ ID NO: 1140096 - DNA, 25 bp, Homo sapien
tgagccatctgagcctctaggcagg

SEQ ID NO: 1140097 - DNA, 25 bp, Homo sapien
tctaggcaggtctaagcgcatgaag

SEQ ID NO: 1140098 - DNA, 25 bp, Homo sapien
gctcccttagcaattatcctctcgg

SEQ ID NO: 1140099 - DNA, 25 bp, Homo sapien
agaggcccaactcgggagtcaggaa

SEQ ID NO: 1140100 - DNA, 25 bp, Homo sapien
gagaggcccaactcgggagtcagga

SEQ ID NO: 1140101 - DNA, 25 bp, Homo sapien
agggttacaactcccaggcagggag

SEQ ID NO: 1140102 - DNA, 25 bp, Homo sapien
tgcagggttacaactcccaggcagg

SEQ ID NO: 1140103 - DNA, 25 bp, Homo sapien
tctcatcaaactctacacagggcag

SEQ ID NO: 1140104 - DNA, 25 bp, Homo sapien
agacgatccactctcccggagatgg

SEQ ID NO: 1140105 - DNA, 25 bp, Homo sapien
cgactactctggtcctggcactggg

SEQ ID NO: 1140106 - DNA, 25 bp, Homo sapien
gatggtgtcggcctcagttctgagt

SEQ ID NO: 1140107 - DNA, 25 bp, Homo sapien
ccagaagacagagccacaatggact

SEQ ID NO: 1140108 - DNA, 25 bp, Homo sapien
cagaacctctccttaatagacctgg

SEQ ID NO: 1140109 - DNA, 25 bp, Homo sapien
gaattgagaaagagcgggtaccaca

SEQ ID NO: 1140110 - DNA, 25 bp, Homo sapien
tctggagaatagtgagcatttgccc

SEQ ID NO: 1140111 - DNA, 25 bp, Homo sapien
ggaatactgagctgtccaccactgt

SEQ ID NO: 1140112 - DNA, 25 bp, Homo sapien
tgccgctggcatcaaaggagcactg

SEQ ID NO: 1140113 - DNA, 25 bp, Homo sapien
tcacttgagagattgtgtagccaca

SEQ ID NO: 1140114 - DNA, 25 bp, Homo sapien
cactgttcggtttgccaggtggaat

SEQ ID NO: 1140115 - DNA, 25 bp, Homo sapien
tgggcctgcccgcatacaaggttag

SEQ ID NO: 1140116 - DNA, 25 bp, Homo sapien
tctggagttccgtatgaaacaaagg

SEQ ID NO: 1140117 - DNA, 25 bp, Homo sapien
tcgggctctaaaaggattactcagg

SEQ ID NO: 1140118 - DNA, 25 bp, Homo sapien
cattgagggttttgactcttcgggc

SEQ ID NO: 1140119 - DNA, 25 bp, Homo sapien
ccaagaatgattgtgcaacctggcc

SEQ ID NO: 1140120 - DNA, 25 bp, Homo sapien
acaaaccgcagacgccgtggcagca

SEQ ID NO: 1140121 - DNA, 25 bp, Homo sapien
gccaacatctgggacacggtcactg

SEQ ID NO: 1140122 - DNA, 25 bp, Homo sapien
tcagagcggtccagaccaagaatga

SEQ ID NO: 1140123 - DNA, 25 bp, Homo sapien
caacctacgtctggagcagctctgc

SEQ ID NO: 1140124 - DNA, 25 bp, Homo sapien
tcaacctacgtctggagcagctctg

SEQ ID NO: 1140125 - DNA, 25 bp, Homo sapien
caaccttgccgaagggaaatactga

SEQ ID NO: 1140126 - DNA, 25 bp, Homo sapien
cacgtgcctgggttgctttggagca

SEQ ID NO: 1140127 - DNA, 25 bp, Homo sapien
tcgctttatttatcctgcaaacagg

SEQ ID NO: 1140128 - DNA, 25 bp, Homo sapien
tggtctttgcacagttgctgcagcg

SEQ ID NO: 1140129 - DNA, 25 bp, Homo sapien
tacaaatcttcccacaactgagcaa

SEQ ID NO: 1140130 - DNA, 25 bp, Homo sapien
tggcattaataaaaccgtcctcagg

SEQ ID NO: 1140131 - DNA, 25 bp, Homo sapien
aaatcccaagcagtcaataacccag

SEQ ID NO: 1140132 - DNA, 25 bp, Homo sapien
tacctattgtattccagagctacaa

SEQ ID NO: 1140133 - DNA, 25 bp, Homo sapien
atcagctgagaactacgcatgtggg

SEQ ID NO: 1140134 - DNA, 25 bp, Homo sapien
atgagcaaatgctgcagtcttcttt

SEQ ID NO: 1140135 - DNA, 25 bp, Homo sapien
ctcctctccatgagcaaatgctgca

SEQ ID NO: 1140136 - DNA, 25 bp, Homo sapien
atccaaggctctgctaatcagctga

SEQ ID NO: 1140137 - DNA, 25 bp, Homo sapien
cagggacgccaaatgattgcacacg

SEQ ID NO: 1140138 - DNA, 25 bp, Homo sapien
gcttagaacagagtagctcctcaaa

SEQ ID NO: 1140139 - DNA, 25 bp, Homo sapien
tcttttcttagtattactgtgagga

SEQ ID NO: 1140140 - DNA, 25 bp, Homo sapien
gattaaacaagaccatccaggtaaa

SEQ ID NO: 1140141 - DNA, 25 bp, Homo sapien
cctaatagttcaaatactcttgtca

SEQ ID NO: 1140142 - DNA, 25 bp, Homo sapien
caccatgaggttaagacctaatagt

SEQ ID NO: 1140143 - DNA, 25 bp, Homo sapien
tatccatccactcaatagacagcac

SEQ ID NO: 1140144 - DNA, 25 bp, Homo sapien
ctgattgtctgtgttatccatccac

SEQ ID NO: 1140145 - DNA, 25 bp, Homo sapien
agctgaagtctagagcatgtgtctt

SEQ ID NO: 1140146 - DNA, 25 bp, Homo sapien
ggacactgtcatgaccacatgcctg

SEQ ID NO: 1140147 - DNA, 25 bp, Homo sapien
ccaggacactgtcatgaccacatgc

SEQ ID NO: 1140148 - DNA, 25 bp, Homo sapien
ctagagcatgtgtcttgtccaggac

SEQ ID NO: 1140149 - DNA, 25 bp, Homo sapien
aggggtgttcgggagagatgcttac

SEQ ID NO: 1140150 - DNA, 25 bp, Homo sapien
gagatgcttactgtgggctggaccc

SEQ ID NO: 1140151 - DNA, 25 bp, Homo sapien
tggaccctgggcaagggtccatggg

SEQ ID NO: 1140152 - DNA, 25 bp, Homo sapien
ctgcaggggtgttcgggagagatgc

SEQ ID NO: 1140153 - DNA, 25 bp, Homo sapien
gactcctgtgagctgttcgaggaca

SEQ ID NO: 1140154 - DNA, 25 bp, Homo sapien
taacactgcgtgaagaaccactcct

SEQ ID NO: 1140155 - DNA, 25 bp, Homo sapien
caggcaactccgcatctgtaggact

SEQ ID NO: 1140156 - DNA, 25 bp, Homo sapien
ccagggccctaacttgatcataaca

SEQ ID NO: 1140157 - DNA, 25 bp, Homo sapien
ctgctccacaccggcttgggggtgc

SEQ ID NO: 1140158 - DNA, 25 bp, Homo sapien
cgctgctccacaccggcttgggggt

SEQ ID NO: 1140159 - DNA, 25 bp, Homo sapien
accgctgctccacaccggcttgggg

SEQ ID NO: 1140160 - DNA, 25 bp, Homo sapien
caccggcttgggggtgcccgcttct

SEQ ID NO: 1140161 - DNA, 25 bp, Homo sapien
ccgctgaggaacacctatgaggctc

SEQ ID NO: 1140162 - DNA, 25 bp, Homo sapien
gctgaggaacacctatgaggctcca

SEQ ID NO: 1140163 - DNA, 25 bp, Homo sapien
gacaccatctcaataaccacagcaa

SEQ ID NO: 1140164 - DNA, 25 bp, Homo sapien
aggaacacctatgaggctccaccct

SEQ ID NO: 1140165 - DNA, 25 bp, Homo sapien
agggccgtccagtgcctcggcttct

SEQ ID NO: 1140166 - DNA, 25 bp, Homo sapien
gtttaagccaaagggaggatctgca

SEQ ID NO: 1140167 - DNA, 25 bp, Homo sapien
aagaggcagtttaagccaaagggag

SEQ ID NO: 1140168 - DNA, 25 bp, Homo sapien
tgtggcactcaggcgacccctggca

SEQ ID NO: 1140169 - DNA, 25 bp, Homo sapien
cctggcatggcctgcgtgctgtggc

SEQ ID NO: 1140170 - DNA, 25 bp, Homo sapien
gcctggcatggcctgcgtgctgtgg

SEQ ID NO: 1140171 - DNA, 25 bp, Homo sapien
tctggccagttagctgcccagtggg

SEQ ID NO: 1140172 - DNA, 25 bp, Homo sapien
tgggcagggcggtagggacagcttc

SEQ ID NO: 1140173 - DNA, 25 bp, Homo sapien
gccttggtggctatggagacatcgc

SEQ ID NO: 1140174 - DNA, 25 bp, Homo sapien
tagggacagcttcaatgaaggccct

SEQ ID NO: 1140175 - DNA, 25 bp, Homo sapien
cctgcaaatgttcaggattaaggca

SEQ ID NO: 1140176 - DNA, 25 bp, Homo sapien
caggattaaggcattttggaggaat

SEQ ID NO: 1140177 - DNA, 25 bp, Homo sapien
tgttcaggattaaggcattttggag

SEQ ID NO: 1140178 - DNA, 25 bp, Homo sapien
tgcaaatgttcaggattaaggcatt

SEQ ID NO: 1140179 - DNA, 25 bp, Homo sapien
gacctaattctccttgcactgcctg

SEQ ID NO: 1140180 - DNA, 25 bp, Homo sapien
ccactcagtgtttgagacctaattc

SEQ ID NO: 1140181 - DNA, 25 bp, Homo sapien
ccagtgagatgtcaaaagcccaggc

SEQ ID NO: 1140182 - DNA, 25 bp, Homo sapien
gtcctgcaataagattcttcaggca

SEQ ID NO: 1140183 - DNA, 25 bp, Homo sapien
ggctggtgatggtaacaacaaaaca

SEQ ID NO: 1140184 - DNA, 25 bp, Homo sapien
gaattcattcctgttcaccagctgg

SEQ ID NO: 1140185 - DNA, 25 bp, Homo sapien
tctttggaattcattcctgttcacc

SEQ ID NO: 1140186 - DNA, 25 bp, Homo sapien
cagctggctggtgatggtaacaaca

SEQ ID NO: 1140187 - DNA, 25 bp, Homo sapien
gcacctgtgagttcagtttcacagc

SEQ ID NO: 1140188 - DNA, 25 bp, Homo sapien
gactctcctgtctgttcagggcaga

SEQ ID NO: 1140189 - DNA, 25 bp, Homo sapien
ttccatctgggatggaagctgactc

SEQ ID NO: 1140190 - DNA, 25 bp, Homo sapien
gtgttctgactccacagagataccc

SEQ ID NO: 1140191 - DNA, 25 bp, Homo sapien
ctgactccacagagatacccataat

SEQ ID NO: 1140192 - DNA, 25 bp, Homo sapien
ttgctcagtggctctgcaccgctgg

SEQ ID NO: 1140193 - DNA, 25 bp, Homo sapien
cagaggcgggaatttggtccccacg

SEQ ID NO: 1140194 - DNA, 25 bp, Homo sapien
cccagtagcgctgggcctaggagca

SEQ ID NO: 1140195 - DNA, 25 bp, Homo sapien
gcctaggagcactcgggagttgctc

SEQ ID NO: 1140196 - DNA, 25 bp, Homo sapien
tgcaaggaccaggacgccggggttc

SEQ ID NO: 1140197 - DNA, 25 bp, Homo sapien
tgcaggctccatccctccttattcc

SEQ ID NO: 1140198 - DNA, 25 bp, Homo sapien
ggttccaggagactctgcaggctcc

SEQ ID NO: 1140199 - DNA, 25 bp, Homo sapien
ctgcaaggaccaggacgccggggtt

SEQ ID NO: 1140200 - DNA, 25 bp, Homo sapien
aggcctggagataatgcggagtggg

SEQ ID NO: 1140201 - DNA, 25 bp, Homo sapien
agaggcctggagataatgcggagtg

SEQ ID NO: 1140202 - DNA, 25 bp, Homo sapien
cctggagataatgcggagtgggggt

SEQ ID NO: 1140203 - DNA, 25 bp, Homo sapien
gcctggagataatgcggagtggggg

SEQ ID NO: 1140204 - DNA, 25 bp, Homo sapien
ttgtcccgatatctggagggtccgg

SEQ ID NO: 1140205 - DNA, 25 bp, Homo sapien
gccgcggggcttctttgtcccgata

SEQ ID NO: 1140206 - DNA, 25 bp, Homo sapien
ggagtactgggtcgcgtcccctcca

SEQ ID NO: 1140207 - DNA, 25 bp, Homo sapien
ggcagccacgctcgccggctgccgc

SEQ ID NO: 1140208 - DNA, 25 bp, Homo sapien
tctctccgggagaaacttgggtctg

SEQ ID NO: 1140209 - DNA, 25 bp, Homo sapien
gggcttgcctcctagcgagtgtcga

SEQ ID NO: 1140210 - DNA, 25 bp, Homo sapien
cccggctgaggaatagggcttgcct

SEQ ID NO: 1140211 - DNA, 25 bp, Homo sapien
tctgcggctggcacgaggtctttgt

SEQ ID NO: 1140212 - DNA, 25 bp, Homo sapien
gagacttgtcggagcttcgagctgc

SEQ ID NO: 1140213 - DNA, 25 bp, Homo sapien
tggattgggagccagcctcgtccag

SEQ ID NO: 1140214 - DNA, 25 bp, Homo sapien
ctgtattactactgcggaatgcggg

SEQ ID NO: 1140215 - DNA, 25 bp, Homo sapien
cccagctcgggattctggattggga

SEQ ID NO: 1140216 - DNA, 25 bp, Homo sapien
agactcgccagctgccgcgggatgc

SEQ ID NO: 1140217 - DNA, 25 bp, Homo sapien
gaggcgccagactcgccagctgccg

SEQ ID NO: 1140218 - DNA, 25 bp, Homo sapien
gctgccgcgggatgccacgtgaggg

SEQ ID NO: 1140219 - DNA, 25 bp, Homo sapien
gccgcgaggcgccagactcgccagc

SEQ ID NO: 1140220 - DNA, 25 bp, Homo sapien
cgagattcgggacagcccggcttcc

SEQ ID NO: 1140221 - DNA, 25 bp, Homo sapien
agattcgggacagcccggcttcccg

SEQ ID NO: 1140222 - DNA, 25 bp, Homo sapien
ctccgagattcgggacagcccggct

SEQ ID NO: 1140223 - DNA, 25 bp, Homo sapien
tccgagattcgggacagcccggctt

SEQ ID NO: 1140224 - DNA, 25 bp, Homo sapien
caggattgcggagctcggaaagtct

SEQ ID NO: 1140225 - DNA, 25 bp, Homo sapien
ccatagcaacatgcgggtaccgcgg

SEQ ID NO: 1140226 - DNA, 25 bp, Homo sapien
ttccctcccgttgccatggagagag

SEQ ID NO: 1140227 - DNA, 25 bp, Homo sapien
tttcaccgaagcaaggaggtgggtc

SEQ ID NO: 1140228 - DNA, 25 bp, Homo sapien
ctactttaagtctagcctcaatcct

SEQ ID NO: 1140229 - DNA, 25 bp, Homo sapien
aatcctcccgttgagctttctgtct

SEQ ID NO: 1140230 - DNA, 25 bp, Homo sapien
ttatgcttagcagaaagatacatga

SEQ ID NO: 1140231 - DNA, 25 bp, Homo sapien
cacagtttctgaggggatctctact

SEQ ID NO: 1140232 - DNA, 25 bp, Homo sapien
gctcgaagcctctcagccgatctgt

SEQ ID NO: 1140233 - DNA, 25 bp, Homo sapien
ccagcgctgagtgaggcagctcgaa

SEQ ID NO: 1140234 - DNA, 25 bp, Homo sapien
tctcagccgatctgttcctgggcct

SEQ ID NO: 1140235 - DNA, 25 bp, Homo sapien
gaggcagctcgaagcctctcagccg

SEQ ID NO: 1140236 - DNA, 25 bp, Homo sapien
tcagggtggaagctgcgaaccttca

SEQ ID NO: 1140237 - DNA, 25 bp, Homo sapien
ggtagcaccaactgggtcttcagca

SEQ ID NO: 1140238 - DNA, 25 bp, Homo sapien
aagctgcgaaccttcaacaattgcc

SEQ ID NO: 1140239 - DNA, 25 bp, Homo sapien
ccctaaacttatgcccacgcgatgg

SEQ ID NO: 1140240 - DNA, 25 bp, Homo sapien
taataagcgtttagccagaggctct

SEQ ID NO: 1140241 - DNA, 25 bp, Homo sapien
aaggcgcatagggatgccagagccc

SEQ ID NO: 1140242 - DNA, 25 bp, Homo sapien
aggcagcccggattgcacagtatcg

SEQ ID NO: 1140243 - DNA, 25 bp, Homo sapien
tatcgcctgcgtcgtgtctgcttgg

SEQ ID NO: 1140244 - DNA, 25 bp, Homo sapien
cagactcgggatgctccatgcatgg

SEQ ID NO: 1140245 - DNA, 25 bp, Homo sapien
tggtctggaggtgcccagactcggg

SEQ ID NO: 1140246 - DNA, 25 bp, Homo sapien
gaggtgcccagactcgggatgctcc

SEQ ID NO: 1140247 - DNA, 25 bp, Homo sapien
ggtgcccagactcgggatgctccat

SEQ ID NO: 1140248 - DNA, 25 bp, Homo sapien
gaatcttggcttggccctttcctgg

SEQ ID NO: 1140249 - DNA, 25 bp, Homo sapien
cttggcttggccctttcctggaagc

SEQ ID NO: 1140250 - DNA, 25 bp, Homo sapien
aagaatcttggcttggccctttcct

SEQ ID NO: 1140251 - DNA, 25 bp, Homo sapien
agctgctctctgaggagtcctacct

SEQ ID NO: 1140252 - DNA, 25 bp, Homo sapien
cattagcagcactaattgtgcagta

SEQ ID NO: 1140253 - DNA, 25 bp, Homo sapien
cagtaatgacttggtggtattatca

SEQ ID NO: 1140254 - DNA, 25 bp, Homo sapien
gacacacgcgtgctttacagcgatg

SEQ ID NO: 1140255 - DNA, 25 bp, Homo sapien
ttatcccggaaaacagtcagctgcc

SEQ ID NO: 1140256 - DNA, 25 bp, Homo sapien
catggcatccgaggagaaatgaaga

SEQ ID NO: 1140257 - DNA, 25 bp, Homo sapien
gagcagcaagagaggtagcaatgcc

SEQ ID NO: 1140258 - DNA, 25 bp, Homo sapien
ggttctttttcaattgccagcctgc

SEQ ID NO: 1140259 - DNA, 25 bp, Homo sapien
tcttcacttgggtgggagcagcaag

SEQ ID NO: 1140260 - DNA, 25 bp, Homo sapien
agattgaactgtcggagtcaaaggc

SEQ ID NO: 1140261 - DNA, 25 bp, Homo sapien
ctgaaattaatggaatgcaattttc

SEQ ID NO: 1140262 - DNA, 25 bp, Homo sapien
tcttgaagattgaactgtcggagtc

SEQ ID NO: 1140263 - DNA, 25 bp, Homo sapien
agcaaccactcttgaagattgaact

SEQ ID NO: 1140264 - DNA, 25 bp, Homo sapien
ggggtcatgattgttgcaaagcaca

SEQ ID NO: 1140265 - DNA, 25 bp, Homo sapien
tggggtcatgattgttgcaaagcac

SEQ ID NO: 1140266 - DNA, 25 bp, Homo sapien
ttggggtcatgattgttgcaaagca

SEQ ID NO: 1140267 - DNA, 25 bp, Homo sapien
gaaccaactatatggctgacctggc

SEQ ID NO: 1140268 - DNA, 25 bp, Homo sapien
cagcctccatcaggttaaaacttca

SEQ ID NO: 1140269 - DNA, 25 bp, Homo sapien
tggaagcctgggttaggtacctctc

SEQ ID NO: 1140270 - DNA, 25 bp, Homo sapien
tgcactgcataacacttgctaagca

SEQ ID NO: 1140271 - DNA, 25 bp, Homo sapien
aagccacttaatgggcagctctttg

SEQ ID NO: 1140272 - DNA, 25 bp, Homo sapien
aatgtatcgatgtaggcgagtgttc

SEQ ID NO: 1140273 - DNA, 25 bp, Homo sapien
gctctttggcagttccaatgtatcg

SEQ ID NO: 1140274 - DNA, 25 bp, Homo sapien
tctaagccacttaatgggcagctct

SEQ ID NO: 1140275 - DNA, 25 bp, Homo sapien
tggtacatcgtctgctcttctctag

SEQ ID NO: 1140276 - DNA, 25 bp, Homo sapien
gctcttctctagtatggatggcaaa

SEQ ID NO: 1140277 - DNA, 25 bp, Homo sapien
gatagcaattccagcagcgtgtttg

SEQ ID NO: 1140278 - DNA, 25 bp, Homo sapien
tagtatggatggcaaagagatagca

SEQ ID NO: 1140279 - DNA, 25 bp, Homo sapien
tgctgtggagcatcttgcgtgcagc

SEQ ID NO: 1140280 - DNA, 25 bp, Homo sapien
aggagggatagagcccagcgagtca

SEQ ID NO: 1140281 - DNA, 25 bp, Homo sapien
ggctgggctgcaatgagtttccagg

SEQ ID NO: 1140282 - DNA, 25 bp, Homo sapien
tagagcccagcgagtcagctcttcc

SEQ ID NO: 1140283 - DNA, 25 bp, Homo sapien
gaggccagagactcagtacctggtg

SEQ ID NO: 1140284 - DNA, 25 bp, Homo sapien
tcaggatagagtggcatcaacaatg

SEQ ID NO: 1140285 - DNA, 25 bp, Homo sapien
gaacccactctctaccaggcaaaag

SEQ ID NO: 1140286 - DNA, 25 bp, Homo sapien
gagaatttctaactcctctgtctgc

SEQ ID NO: 1140287 - DNA, 25 bp, Homo sapien
tactccgatggtgcaggcatcatta

SEQ ID NO: 1140288 - DNA, 25 bp, Homo sapien
gccttgtgctgagaccggtgttctc

SEQ ID NO: 1140289 - DNA, 25 bp, Homo sapien
tgtgccttgtgctgagaccggtgtt

SEQ ID NO: 1140290 - DNA, 25 bp, Homo sapien
aaagagagaatgctagaatactccg

SEQ ID NO: 1140291 - DNA, 25 bp, Homo sapien
tcacatgtccccttggaaatctctg

SEQ ID NO: 1140292 - DNA, 25 bp, Homo sapien
ttggtgtggactctgctctttgccc

SEQ ID NO: 1140293 - DNA, 25 bp, Homo sapien
ccctcgcttggatcagacaagcttg

SEQ ID NO: 1140294 - DNA, 25 bp, Homo sapien
caagcttggcgtaggaaacaggtga

SEQ ID NO: 1140295 - DNA, 25 bp, Homo sapien
ccttgttcctagatgccgcctccat

SEQ ID NO: 1140296 - DNA, 25 bp, Homo sapien
tcccacttctgagggttttcagggc

SEQ ID NO: 1140297 - DNA, 25 bp, Homo sapien
gttgatcatctaaatgaagcagagg

SEQ ID NO: 1140298 - DNA, 25 bp, Homo sapien
cagctgcatgccgttgatcatctaa

SEQ ID NO: 1140299 - DNA, 25 bp, Homo sapien
cacttctgagggttttcagggcttt

SEQ ID NO: 1140300 - DNA, 25 bp, Homo sapien
ttccagtctgcaagggtagttcccc

SEQ ID NO: 1140301 - DNA, 25 bp, Homo sapien
caagcacttcctggattgcagcaat

SEQ ID NO: 1140302 - DNA, 25 bp, Homo sapien
tactacagacgttttatctacaggg

SEQ ID NO: 1140303 - DNA, 25 bp, Homo sapien
tgtgcaaaatattccctccgttcca

SEQ ID NO: 1140304 - DNA, 25 bp, Homo sapien
gaaagtgcctcgtcttcagctccat

SEQ ID NO: 1140305 - DNA, 25 bp, Homo sapien
tgccttggccacgaaagtgcctcgt

SEQ ID NO: 1140306 - DNA, 25 bp, Homo sapien
gcccagtgagtccacacctggacat

SEQ ID NO: 1140307 - DNA, 25 bp, Homo sapien
tgagggcccatgaccacgtaagtct

SEQ ID NO: 1140308 - DNA, 25 bp, Homo sapien
tgtactcttctgcatgttagttgcg

SEQ ID NO: 1140309 - DNA, 25 bp, Homo sapien
tagttgcgtagcatatgccacatga

SEQ ID NO: 1140310 - DNA, 25 bp, Homo sapien
catgttagttgcgtagcatatgcca

SEQ ID NO: 1140311 - DNA, 25 bp, Homo sapien
tatgccacatgactttcctgcactg

SEQ ID NO: 1140312 - DNA, 25 bp, Homo sapien
ggcatatttgacacaagcttagcaa

SEQ ID NO: 1140313 - DNA, 25 bp, Homo sapien
tagcaaatagcttttccaggaggtt

SEQ ID NO: 1140314 - DNA, 25 bp, Homo sapien
tgatgtgaaggatccagccaaccct

SEQ ID NO: 1140315 - DNA, 25 bp, Homo sapien
caccctgggcgcctagattttgcag

SEQ ID NO: 1140316 - DNA, 25 bp, Homo sapien
cttcccagcccatgtcatagcttgt

SEQ ID NO: 1140317 - DNA, 25 bp, Homo sapien
atgtcatagcttgttgcagtaaatg

SEQ ID NO: 1140318 - DNA, 25 bp, Homo sapien
tcatagcttgttgcagtaaatgctg

SEQ ID NO: 1140319 - DNA, 25 bp, Homo sapien
catagcttgttgcagtaaatgctgg

SEQ ID NO: 1140320 - DNA, 25 bp, Homo sapien
gaagcagtcaggtgacaggaatgta

SEQ ID NO: 1140321 - DNA, 25 bp, Homo sapien
ttggaagcagtcaggtgacaggaat

SEQ ID NO: 1140322 - DNA, 25 bp, Homo sapien
gtggcatcttacatcacagacaccc

SEQ ID NO: 1140323 - DNA, 25 bp, Homo sapien
cacagacaccccagcgctggtctgt

SEQ ID NO: 1140324 - DNA, 25 bp, Homo sapien
ttgtggtgagagtggaaaccacaga

SEQ ID NO: 1140325 - DNA, 25 bp, Homo sapien
tttgtggtgagagtggaaaccacag

SEQ ID NO: 1140326 - DNA, 25 bp, Homo sapien
ttttgtggtgagagtggaaaccaca

SEQ ID NO: 1140327 - DNA, 25 bp, Homo sapien
agaatcacagtacgccagccctggt

SEQ ID NO: 1140328 - DNA, 25 bp, Homo sapien
gaggcccaggctcatcctgtacagg

SEQ ID NO: 1140329 - DNA, 25 bp, Homo sapien
tggtttactccccacaagcgtctca

SEQ ID NO: 1140330 - DNA, 25 bp, Homo sapien
tcttctggcaatgcggtgcccttcg

SEQ ID NO: 1140331 - DNA, 25 bp, Homo sapien
gatcatgaccatgattaccgtcatg

SEQ ID NO: 1140332 - DNA, 25 bp, Homo sapien
gggccattgcaaagacgatcatgac

SEQ ID NO: 1140333 - DNA, 25 bp, Homo sapien
tcatgattgttatcctcggagaggg

SEQ ID NO: 1140334 - DNA, 25 bp, Homo sapien
gattaccgtcatgattgttatcctc

SEQ ID NO: 1140335 - DNA, 25 bp, Homo sapien
cctgtggaatggtggccacgaagat

SEQ ID NO: 1140336 - DNA, 25 bp, Homo sapien
caggcactgttcctacagttggcaa

SEQ ID NO: 1140337 - DNA, 25 bp, Homo sapien
cagcttcagaatggttggacccagg

SEQ ID NO: 1140338 - DNA, 25 bp, Homo sapien
ttgttgcaagtcaggaccgggcagc

SEQ ID NO: 1140339 - DNA, 25 bp, Homo sapien
tgttaacatctctggttcttttaga

SEQ ID NO: 1140340 - DNA, 25 bp, Homo sapien
ttaacatctctggttcttttagaga

SEQ ID NO: 1140341 - DNA, 25 bp, Homo sapien
atgttaacatctctggttcttttag

SEQ ID NO: 1140342 - DNA, 25 bp, Homo sapien
gttaacatctctggttcttttagag

SEQ ID NO: 1140343 - DNA, 25 bp, Homo sapien
catcagcacggagatccctgcccag

SEQ ID NO: 1140344 - DNA, 25 bp, Homo sapien
tgaaattgagcaccaaatgacaggg

SEQ ID NO: 1140345 - DNA, 25 bp, Homo sapien
gggctgggcggtgaagggcgctgca

SEQ ID NO: 1140346 - DNA, 25 bp, Homo sapien
ctgcagggaggactctggtggagca

SEQ ID NO: 1140347 - DNA, 25 bp, Homo sapien
agcaagggccactgacaatgtctcc

SEQ ID NO: 1140348 - DNA, 25 bp, Homo sapien
tgtctgcctggagtctgaggtcttg

SEQ ID NO: 1140349 - DNA, 25 bp, Homo sapien
agcttcccctgcacggcagagaggt

SEQ ID NO: 1140350 - DNA, 25 bp, Homo sapien
tctcacctagcatcctactgagggc

SEQ ID NO: 1140351 - DNA, 25 bp, Homo sapien
gaggtcttgcctgctctacttcctg

SEQ ID NO: 1140352 - DNA, 25 bp, Homo sapien
tgaagtatagagtggtacctcctct

SEQ ID NO: 1140353 - DNA, 25 bp, Homo sapien
ctactgttgcttggatattgaatgt

SEQ ID NO: 1140354 - DNA, 25 bp, Homo sapien
tatagagtggtacctcctcttcatc

SEQ ID NO: 1140355 - DNA, 25 bp, Homo sapien
tggctgctgaagtatagagtggtac

SEQ ID NO: 1140356 - DNA, 25 bp, Homo sapien
gccttactagttccttgcttccagt

SEQ ID NO: 1140357 - DNA, 25 bp, Homo sapien
tcttgttataatgctctggaatgtg

SEQ ID NO: 1140358 - DNA, 25 bp, Homo sapien
cacacgaaagggttaaattcacagc

SEQ ID NO: 1140359 - DNA, 25 bp, Homo sapien
tttgcacatagttaactgcccttca

SEQ ID NO: 1140360 - DNA, 25 bp, Homo sapien
tacttggtcaaaatgcatgtatagc

SEQ ID NO: 1140361 - DNA, 25 bp, Homo sapien
tgtgggaaggcaccaaaatgatttt

SEQ ID NO: 1140362 - DNA, 25 bp, Homo sapien
caacacgtactcttgaatataatgg

SEQ ID NO: 1140363 - DNA, 25 bp, Homo sapien
gccacagtttacatagacatttcag

SEQ ID NO: 1140364 - DNA, 25 bp, Homo sapien
tgatggtgaggtaactgaggactct

SEQ ID NO: 1140365 - DNA, 25 bp, Homo sapien
agactttatacagccccgcagaaaa

SEQ ID NO: 1140366 - DNA, 25 bp, Homo sapien
acctttgccagagtttgagcaggaa

SEQ ID NO: 1140367 - DNA, 25 bp, Homo sapien
tcagatgagagaccagtacatataa

SEQ ID NO: 1140368 - DNA, 25 bp, Homo sapien
cccagttactcggagagctgagcca

SEQ ID NO: 1140369 - DNA, 25 bp, Homo sapien
gtcccagttactcggagagctgagc

SEQ ID NO: 1140370 - DNA, 25 bp, Homo sapien
tgccatgagccgagattgtaccact

SEQ ID NO: 1140371 - DNA, 25 bp, Homo sapien
ggagaattgcttgaacctgggaagc

SEQ ID NO: 1140372 - DNA, 25 bp, Homo sapien
gaggagatctcttgtgctgcgaaaa

SEQ ID NO: 1140373 - DNA, 25 bp, Homo sapien
cagccttgttaatggaaagtcccca

SEQ ID NO: 1140374 - DNA, 25 bp, Homo sapien
gctgtctgccaaaacggaggagatc

SEQ ID NO: 1140375 - DNA, 25 bp, Homo sapien
tcctgagagtagcttgacaccacct

SEQ ID NO: 1140376 - DNA, 25 bp, Homo sapien
atgtgcaatagcacgatcttgactc

SEQ ID NO: 1140377 - DNA, 25 bp, Homo sapien
acgatcttgactcaccttaacctct

SEQ ID NO: 1140378 - DNA, 25 bp, Homo sapien
aatagcacgatcttgactcacctta

SEQ ID NO: 1140379 - DNA, 25 bp, Homo sapien
agcacgatcttgactcaccttaacc

SEQ ID NO: 1140380 - DNA, 25 bp, Homo sapien
gatttagattgattagataggcctc

SEQ ID NO: 1140381 - DNA, 25 bp, Homo sapien
cattccctgctgtactgttggagct

SEQ ID NO: 1140382 - DNA, 25 bp, Homo sapien
gacagattaacttagcacagcttcg

SEQ ID NO: 1140383 - DNA, 25 bp, Homo sapien
gcaatcttgagtatccttgagtaag

SEQ ID NO: 1140384 - DNA, 25 bp, Homo sapien
taactaaattcgaacttggcaaatg

SEQ ID NO: 1140385 - DNA, 25 bp, Homo sapien
cattatttcttggagtgtattaaag

SEQ ID NO: 1140386 - DNA, 25 bp, Homo sapien
agtgccaaacgatgtacagagaagg

SEQ ID NO: 1140387 - DNA, 25 bp, Homo sapien
aatatcttccactcaccttagtaag

SEQ ID NO: 1140388 - DNA, 25 bp, Homo sapien
caaatgttgctctttcacgaaggaa

SEQ ID NO: 1140389 - DNA, 25 bp, Homo sapien
caaatgcgtatatgttgacatcatc

SEQ ID NO: 1140390 - DNA, 25 bp, Homo sapien
taacatggaatcctcatatttctgc

SEQ ID NO: 1140391 - DNA, 25 bp, Homo sapien
tagttaacctttctatcaaatgcgt

SEQ ID NO: 1140392 - DNA, 25 bp, Homo sapien
caagtagagtagtagggcacaggac

SEQ ID NO: 1140393 - DNA, 25 bp, Homo sapien
gagttttcttcacagtagtctaagg

SEQ ID NO: 1140394 - DNA, 25 bp, Homo sapien
tgcatttttccctagatgtgccaaa

SEQ ID NO: 1140395 - DNA, 25 bp, Homo sapien
ggtcctgttacatcagcctcttcag

SEQ ID NO: 1140396 - DNA, 25 bp, Homo sapien
tcgcacaatctgaaatttatcatcc

SEQ ID NO: 1140397 - DNA, 25 bp, Homo sapien
gtgtcctcgcacaatctgaaattta

SEQ ID NO: 1140398 - DNA, 25 bp, Homo sapien
atagtgtcctcgcacaatctgaaat

SEQ ID NO: 1140399 - DNA, 25 bp, Homo sapien
ttcgactaaattgccagtttgctga

SEQ ID NO: 1140400 - DNA, 25 bp, Homo sapien
cactatgctggcgtgaatgcctacg

SEQ ID NO: 1140401 - DNA, 25 bp, Homo sapien
ctatgctggcgtgaatgcctacgtg

SEQ ID NO: 1140402 - DNA, 25 bp, Homo sapien
actatgctggcgtgaatgcctacgt

SEQ ID NO: 1140403 - DNA, 25 bp, Homo sapien
tagcagggcctgtatgattattgaa

SEQ ID NO: 1140404 - DNA, 25 bp, Homo sapien
tgtagaggtttgatgacagatttcc

SEQ ID NO: 1140405 - DNA, 25 bp, Homo sapien
gtatttgagactgccctagcagggc

SEQ ID NO: 1140406 - DNA, 25 bp, Homo sapien
tcgtgatgttgcacactcgcttcag

SEQ ID NO: 1140407 - DNA, 25 bp, Homo sapien
ttttcttggttcctactcaaatgac

SEQ ID NO: 1140408 - DNA, 25 bp, Homo sapien
gttttcttggttcctactcaaatga

SEQ ID NO: 1140409 - DNA, 25 bp, Homo sapien
agttttcttggttcctactcaaatg

SEQ ID NO: 1140410 - DNA, 25 bp, Homo sapien
taatatatcttctgaagactttttc

SEQ ID NO: 1140411 - DNA, 25 bp, Homo sapien
tagaaccacttgtacccagttcagc

SEQ ID NO: 1140412 - DNA, 25 bp, Homo sapien
tttctgttggaatcttctttgatta

SEQ ID NO: 1140413 - DNA, 25 bp, Homo sapien
tgcaagatgtttgggctgatgatgt

SEQ ID NO: 1140414 - DNA, 25 bp, Homo sapien
tgtgttttgaagctgtcttgttatg

SEQ ID NO: 1140415 - DNA, 25 bp, Homo sapien
gcatataactatatcttcctgagaa

SEQ ID NO: 1140416 - DNA, 25 bp, Homo sapien
tgattatttttgtgtaagggtctat

SEQ ID NO: 1140417 - DNA, 25 bp, Homo sapien
cctgagaatggatatctttattatt

SEQ ID NO: 1140418 - DNA, 25 bp, Homo sapien
aagctgctgtttttatggtcagccc

SEQ ID NO: 1140419 - DNA, 25 bp, Homo sapien
ccgtgtgtgacagcaaagctgctgt

SEQ ID NO: 1140420 - DNA, 25 bp, Homo sapien
agctgctgtttttatggtcagcccc

SEQ ID NO: 1140421 - DNA, 25 bp, Homo sapien
ctaccgtgtgtgacagcaaagctgc

SEQ ID NO: 1140422 - DNA, 25 bp, Homo sapien
gatactaatttatacctggcaaatc

SEQ ID NO: 1140423 - DNA, 25 bp, Homo sapien
gcaaaacctgttctttccagacaga

SEQ ID NO: 1140424 - DNA, 25 bp, Homo sapien
ttagcccttccgtgactctctcatt

SEQ ID NO: 1140425 - DNA, 25 bp, Homo sapien
taatgtggttgatctgctgcttgct

SEQ ID NO: 1140426 - DNA, 25 bp, Homo sapien
gagcaaagacttagatctgtaactg

SEQ ID NO: 1140427 - DNA, 25 bp, Homo sapien
gagagagtagagcaaagacttagat

SEQ ID NO: 1140428 - DNA, 25 bp, Homo sapien
gcagtagtgatatgaggagagagta

SEQ ID NO: 1140429 - DNA, 25 bp, Homo sapien
aagtgcagtagtgatatgaggagag

SEQ ID NO: 1140430 - DNA, 25 bp, Homo sapien
ttcccagtgcttttgtaggattctt

SEQ ID NO: 1140431 - DNA, 25 bp, Homo sapien
ccagtgcttttgtaggattctttat

SEQ ID NO: 1140432 - DNA, 25 bp, Homo sapien
cccagtgcttttgtaggattcttta

SEQ ID NO: 1140433 - DNA, 25 bp, Homo sapien
agtgcttttgtaggattctttatat

SEQ ID NO: 1140434 - DNA, 25 bp, Homo sapien
tgctttgtgttgaacattaccttca

SEQ ID NO: 1140435 - DNA, 25 bp, Homo sapien
tgtatgtaatgaaccttggacccac

SEQ ID NO: 1140436 - DNA, 25 bp, Homo sapien
gtccttcgtatattacattttctgc

SEQ ID NO: 1140437 - DNA, 25 bp, Homo sapien
cactgcatttcagctgtccttcgta

SEQ ID NO: 1140438 - DNA, 25 bp, Homo sapien
gggcgcagtatcgacgccggctcca

SEQ ID NO: 1140439 - DNA, 25 bp, Homo sapien
gacacctgcgccgtgtgtcagcaga

SEQ ID NO: 1140440 - DNA, 25 bp, Homo sapien
aagggatttgcgcaaccctagagga

SEQ ID NO: 1140441 - DNA, 25 bp, Homo sapien
gcaacggcgacatccagcaaggtga

SEQ ID NO: 1140442 - DNA, 25 bp, Homo sapien
tgcgcgcgcgctctcgttggttcgc

SEQ ID NO: 1140443 - DNA, 25 bp, Homo sapien
cgcgcgcgctctcgttggttcgctc

SEQ ID NO: 1140444 - DNA, 25 bp, Homo sapien
gcgcgcgctctcgttggttcgctct

SEQ ID NO: 1140445 - DNA, 25 bp, Homo sapien
gcgcgcgcgctctcgttggttcgct

SEQ ID NO: 1140446 - DNA, 25 bp, Homo sapien
aaatcttcacgctacccttgggcta

SEQ ID NO: 1140447 - DNA, 25 bp, Homo sapien
gcaaacaccctttcatgactgaggg

SEQ ID NO: 1140448 - DNA, 25 bp, Homo sapien
tctgtccagaaggtgcagaccagcc

SEQ ID NO: 1140449 - DNA, 25 bp, Homo sapien
gcagaactgctatgaacctcctaag

SEQ ID NO: 1140450 - DNA, 25 bp, Homo sapien
cttgggctatccgtgctgggtaaac

SEQ ID NO: 1140451 - DNA, 25 bp, Homo sapien
cttcttgggctatccgtgctgggta

SEQ ID NO: 1140452 - DNA, 25 bp, Homo sapien
cgtgctgggtaaacctttcccatga

SEQ ID NO: 1140453 - DNA, 25 bp, Homo sapien
tgctgggtaaacctttcccatgaaa

SEQ ID NO: 1140454 - DNA, 25 bp, Homo sapien
caaacgcaaagaggtcaggagcccc

SEQ ID NO: 1140455 - DNA, 25 bp, Homo sapien
ctgcaaacgcaaagaggtcaggagc

SEQ ID NO: 1140456 - DNA, 25 bp, Homo sapien
gcaaacgcaaagaggtcaggagccc

SEQ ID NO: 1140457 - DNA, 25 bp, Homo sapien
tgaggtcctccagtgctgaccgatt

SEQ ID NO: 1140458 - DNA, 25 bp, Homo sapien
ccagtgctgaccgatttgggctaca

SEQ ID NO: 1140459 - DNA, 25 bp, Homo sapien
gctgaggtcctccagtgctgaccga

SEQ ID NO: 1140460 - DNA, 25 bp, Homo sapien
gtcctccagtgctgaccgatttggg

SEQ ID NO: 1140461 - DNA, 25 bp, Homo sapien
tcagccgtggctgcatgtagctgct

SEQ ID NO: 1140462 - DNA, 25 bp, Homo sapien
caggtcctttagtatccagagccaa

SEQ ID NO: 1140463 - DNA, 25 bp, Homo sapien
tggtctccacgtggtactcatgagt

SEQ ID NO: 1140464 - DNA, 25 bp, Homo sapien
tccaccgattgggaagctgggctaa

SEQ ID NO: 1140465 - DNA, 25 bp, Homo sapien
ctcgattgtgttgattgtcttgatg

SEQ ID NO: 1140466 - DNA, 25 bp, Homo sapien
ccccacatgattctcgattgtgttg

SEQ ID NO: 1140467 - DNA, 25 bp, Homo sapien
catgattctcgattgtgttgattgt

SEQ ID NO: 1140468 - DNA, 25 bp, Homo sapien
ttgctgcccgaggaaccaccagttt

SEQ ID NO: 1140469 - DNA, 25 bp, Homo sapien
tctctgcaggaatctcaatgcctgg

SEQ ID NO: 1140470 - DNA, 25 bp, Homo sapien
tgcaggaatctcaatgcctggatta

SEQ ID NO: 1140471 - DNA, 25 bp, Homo sapien
gcaggaatctcaatgcctggattac

SEQ ID NO: 1140472 - DNA, 25 bp, Homo sapien
tctgcaggaatctcaatgcctggat

SEQ ID NO: 1140473 - DNA, 25 bp, Homo sapien
cagctgcaacgcccaatcatcatcc

SEQ ID NO: 1140474 - DNA, 25 bp, Homo sapien
ctcagctgcaacgcccaatcatcat

SEQ ID NO: 1140475 - DNA, 25 bp, Homo sapien
tcagctgcaacgcccaatcatcatc

SEQ ID NO: 1140476 - DNA, 25 bp, Homo sapien
cagtcggctccattcagtactgcac

SEQ ID NO: 1140477 - DNA, 25 bp, Homo sapien
ccagtgggtgggagttcctcaaata

SEQ ID NO: 1140478 - DNA, 25 bp, Homo sapien
atcactgtcacagataggcttccca

SEQ ID NO: 1140479 - DNA, 25 bp, Homo sapien
cagcctccagatagtccgctttggc

SEQ ID NO: 1140480 - DNA, 25 bp, Homo sapien
aggcctcgttggcacccacggcggt

SEQ ID NO: 1140481 - DNA, 25 bp, Homo sapien
aaggaggcctcgttggcacccacgg

SEQ ID NO: 1140482 - DNA, 25 bp, Homo sapien
attcagggccaagttcacccagcgg

SEQ ID NO: 1140483 - DNA, 25 bp, Homo sapien
gggattccgtgtcacagcaatgatg

SEQ ID NO: 1140484 - DNA, 25 bp, Homo sapien
ttcacccagcggtccacatcctcag

SEQ ID NO: 1140485 - DNA, 25 bp, Homo sapien
gattccgtgtcacagcaatgatggg

SEQ ID NO: 1140486 - DNA, 25 bp, Homo sapien
cttcttaaagaagcctcgggccttg

SEQ ID NO: 1140487 - DNA, 25 bp, Homo sapien
ttaaagaagcctcgggccttgccaa

SEQ ID NO: 1140488 - DNA, 25 bp, Homo sapien
taaagaagcctcgggccttgccaac

SEQ ID NO: 1140489 - DNA, 25 bp, Homo sapien
tcttaaagaagcctcgggccttgcc

SEQ ID NO: 1140490 - DNA, 25 bp, Homo sapien
aggtgggacaggcgctggagcaggg

SEQ ID NO: 1140491 - DNA, 25 bp, Homo sapien
cacgcatggtgttggtgaagccaga

SEQ ID NO: 1140492 - DNA, 25 bp, Homo sapien
ccagactgagctctacaagcgttgt

SEQ ID NO: 1140493 - DNA, 25 bp, Homo sapien
cgttgttggcctaatggatggttcg

SEQ ID NO: 1140494 - DNA, 25 bp, Homo sapien
ctaaaggaactgaacagagtacaca

SEQ ID NO: 1140495 - DNA, 25 bp, Homo sapien
cagagtacacacaggaaaagaagct

SEQ ID NO: 1140496 - DNA, 25 bp, Homo sapien
gccatctggcttttggggcctccag

SEQ ID NO: 1140497 - DNA, 25 bp, Homo sapien
agctgtcatcctcttgccatctggc

SEQ ID NO: 1140498 - DNA, 25 bp, Homo sapien
ggtggagtgtttgccgcaggacagc

SEQ ID NO: 1140499 - DNA, 25 bp, Homo sapien
gtttattgatatacaggtaggctct

SEQ ID NO: 1140500 - DNA, 25 bp, Homo sapien
gctctatagcaacaggcccggaggt

SEQ ID NO: 1140501 - DNA, 25 bp, Homo sapien
taacttcagctgttgtttattgata

SEQ ID NO: 1140502 - DNA, 25 bp, Homo sapien
tatcaagcttaatatgtgctgaaca

SEQ ID NO: 1140503 - DNA, 25 bp, Homo sapien
ctagcttggtggtatttttatagcc

SEQ ID NO: 1140504 - DNA, 25 bp, Homo sapien
gaacactttaggtagatgaactaga

SEQ ID NO: 1140505 - DNA, 25 bp, Homo sapien
taaagctttcaacatgtacaggaag

SEQ ID NO: 1140506 - DNA, 25 bp, Homo sapien
ggcagaggttgtagtgagccaagat

SEQ ID NO: 1140507 - DNA, 25 bp, Homo sapien
gaggcatgacaattgcttcagcctg

SEQ ID NO: 1140508 - DNA, 25 bp, Homo sapien
gcatgacaattgcttcagcctggga

SEQ ID NO: 1140509 - DNA, 25 bp, Homo sapien
ctgaggcatgacaattgcttcagcc

SEQ ID NO: 1140510 - DNA, 25 bp, Homo sapien
tgaaagactggctgctcgacaacca

SEQ ID NO: 1140511 - DNA, 25 bp, Homo sapien
tgtgtgtgtgcttcagattctagag

SEQ ID NO: 1140512 - DNA, 25 bp, Homo sapien
gaattgctcagtatgaaacggtaag

SEQ ID NO: 1140513 - DNA, 25 bp, Homo sapien
tgtgggctccttaatacatgccact

SEQ ID NO: 1140514 - DNA, 25 bp, Homo sapien
tttcagtccattgaactctgccgac

SEQ ID NO: 1140515 - DNA, 25 bp, Homo sapien
tgccgaccactagattcccgattgg

SEQ ID NO: 1140516 - DNA, 25 bp, Homo sapien
gcctgagtgtgtgtcatctcatccg

SEQ ID NO: 1140517 - DNA, 25 bp, Homo sapien
gattcccgattggaacatgttgatt

SEQ ID NO: 1140518 - DNA, 25 bp, Homo sapien
tggacgcaccatcacagttaagagt

SEQ ID NO: 1140519 - DNA, 25 bp, Homo sapien
gaagtgtcatggaagctcctttccc

SEQ ID NO: 1140520 - DNA, 25 bp, Homo sapien
acactttgcgtatatagattctgga

SEQ ID NO: 1140521 - DNA, 25 bp, Homo sapien
gtttacccattcatgcgaagtgtca

SEQ ID NO: 1140522 - DNA, 25 bp, Homo sapien
ctaaaagcctgtgctgggttcatcc

SEQ ID NO: 1140523 - DNA, 25 bp, Homo sapien
tcctactccaggcaagtgaaaactt

SEQ ID NO: 1140524 - DNA, 25 bp, Homo sapien
ggcttgatcactatacaaagggcaa

SEQ ID NO: 1140525 - DNA, 25 bp, Homo sapien
gaaataactatacctcaccctgcct

SEQ ID NO: 1140526 - DNA, 25 bp, Homo sapien
agatcaggtcttcactcagttggta

SEQ ID NO: 1140527 - DNA, 25 bp, Homo sapien
tattaatcaacgtaggacaggagga

SEQ ID NO: 1140528 - DNA, 25 bp, Homo sapien
catagatgtgggaagtccagtcgtc

SEQ ID NO: 1140529 - DNA, 25 bp, Homo sapien
taatttatgcctgggtgcggtacct

SEQ ID NO: 1140530 - DNA, 25 bp, Homo sapien
tattctccttacttgtatgacactg

SEQ ID NO: 1140531 - DNA, 25 bp, Homo sapien
cagtttttattctccttacttgtat

SEQ ID NO: 1140532 - DNA, 25 bp, Homo sapien
gcaaggatcgtttctcagtttttat

SEQ ID NO: 1140533 - DNA, 25 bp, Homo sapien
caaatgcaaggatcgtttctcagtt

SEQ ID NO: 1140534 - DNA, 25 bp, Homo sapien
tacagctgaaagtatagacatcctc

SEQ ID NO: 1140535 - DNA, 25 bp, Homo sapien
cagctgaaagtatagacatcctcct

SEQ ID NO: 1140536 - DNA, 25 bp, Homo sapien
ctgaaagtatagacatcctcctgct

SEQ ID NO: 1140537 - DNA, 25 bp, Homo sapien
aatacagctgaaagtatagacatcc

SEQ ID NO: 1140538 - DNA, 25 bp, Homo sapien
caacgttgaggtacagacaggtaag

SEQ ID NO: 1140539 - DNA, 25 bp, Homo sapien
gactagcttggccacaggagacaac

SEQ ID NO: 1140540 - DNA, 25 bp, Homo sapien
gacccgagtgatacccgggagacta

SEQ ID NO: 1140541 - DNA, 25 bp, Homo sapien
cgggacggagcggacccgagtgata

SEQ ID NO: 1140542 - DNA, 25 bp, Homo sapien
gggcggtgtcggaggcgggcatagc

SEQ ID NO: 1140543 - DNA, 25 bp, Homo sapien
gtcggaggcgggcatagcgtgaggg

SEQ ID NO: 1140544 - DNA, 25 bp, Homo sapien
gtgggaataggagccaataagaact

SEQ ID NO: 1140545 - DNA, 25 bp, Homo sapien
gagccaataagaactgagccttgcc

SEQ ID NO: 1140546 - DNA, 25 bp, Homo sapien
ctggccatacagcggacttgaggcg

SEQ ID NO: 1140547 - DNA, 25 bp, Homo sapien
cagcggacttgaggcgtggtggttc

SEQ ID NO: 1140548 - DNA, 25 bp, Homo sapien
tggccatacagcggacttgaggcgt

SEQ ID NO: 1140549 - DNA, 25 bp, Homo sapien
ccatacagcggacttgaggcgtggt

SEQ ID NO: 1140550 - DNA, 25 bp, Homo sapien
ccggacgacggtgacactggtcgcc

SEQ ID NO: 1140551 - DNA, 25 bp, Homo sapien
tcacatgaagcatagggccgtctcc

SEQ ID NO: 1140552 - DNA, 25 bp, Homo sapien
tggtcgcccgcctgctggaactgca

SEQ ID NO: 1140553 - DNA, 25 bp, Homo sapien
gaactgcagtgaccgaggtcctggc

SEQ ID NO: 1140554 - DNA, 25 bp, Homo sapien
gacgtttcaagttggcaccgtagtg

SEQ ID NO: 1140555 - DNA, 25 bp, Homo sapien
ctgaggtcagcctaggaaacagtgc

SEQ ID NO: 1140556 - DNA, 25 bp, Homo sapien
tgaggtgccgcgagagttatttgct

SEQ ID NO: 1140557 - DNA, 25 bp, Homo sapien
gcttggattccctgattaagccagg

SEQ ID NO: 1140558 - DNA, 25 bp, Homo sapien
tttaccattccagagcttgtgagca

SEQ ID NO: 1140559 - DNA, 25 bp, Homo sapien
taaatgctgtatttgctccaacggc

SEQ ID NO: 1140560 - DNA, 25 bp, Homo sapien
tctgtctgaaggctaccatgccgga

SEQ ID NO: 1140561 - DNA, 25 bp, Homo sapien
catgccggatctgtaaatgaacctg

SEQ ID NO: 1140562 - DNA, 25 bp, Homo sapien
tcttgtgccaatagcccttgtatgt

SEQ ID NO: 1140563 - DNA, 25 bp, Homo sapien
ttctgggagctttcacagtactgtc

SEQ ID NO: 1140564 - DNA, 25 bp, Homo sapien
ccttctggagcagtgctactctgta

SEQ ID NO: 1140565 - DNA, 25 bp, Homo sapien
tactgtgtccagagtataatgaacc

SEQ ID NO: 1140566 - DNA, 25 bp, Homo sapien
catggtgctaatggaccagggtcac

SEQ ID NO: 1140567 - DNA, 25 bp, Homo sapien
gggcttgattatttcagttgagtaa

SEQ ID NO: 1140568 - DNA, 25 bp, Homo sapien
gcatttgctcattgcaccagtaact

SEQ ID NO: 1140569 - DNA, 25 bp, Homo sapien
ttgaacaatccagttagcatcacag

SEQ ID NO: 1140570 - DNA, 25 bp, Homo sapien
tgggggctgttcatggcggttccgg

SEQ ID NO: 1140571 - DNA, 25 bp, Homo sapien
gggccggaagtgccgctccttggtg

SEQ ID NO: 1140572 - DNA, 25 bp, Homo sapien
gccgactgattacgtagcgggcggg

SEQ ID NO: 1140573 - DNA, 25 bp, Homo sapien
gcctggggcgccgactgattacgta

SEQ ID NO: 1140574 - DNA, 25 bp, Homo sapien
tttttgagacactagcacctagcgc

SEQ ID NO: 1140575 - DNA, 25 bp, Homo sapien
taaaatacagacacttgacccttgg

SEQ ID NO: 1140576 - DNA, 25 bp, Homo sapien
cattattgaaacgtcccgtgtggga

SEQ ID NO: 1140577 - DNA, 25 bp, Homo sapien
gactgttatcttgttggccctatga

SEQ ID NO: 1140578 - DNA, 25 bp, Homo sapien
tgttgcagctcctcgacctgatcgg

SEQ ID NO: 1140579 - DNA, 25 bp, Homo sapien
gcagctcctcgacctgatcggttgg

SEQ ID NO: 1140580 - DNA, 25 bp, Homo sapien
gctcctcgacctgatcggttggtca

SEQ ID NO: 1140581 - DNA, 25 bp, Homo sapien
caaggctgttgcagctcctcgacct

SEQ ID NO: 1140582 - DNA, 25 bp, Homo sapien
ttgtatggctgctactataacccag

SEQ ID NO: 1140583 - DNA, 25 bp, Homo sapien
tagtcttactcctgagatctcaggg

SEQ ID NO: 1140584 - DNA, 25 bp, Homo sapien
cataatatacgaaggaacaaggcaa

SEQ ID NO: 1140585 - DNA, 25 bp, Homo sapien
tataacccagcttaattctagaggg

SEQ ID NO: 1140586 - DNA, 25 bp, Homo sapien
actgaacaatcgagataacccacta

SEQ ID NO: 1140587 - DNA, 25 bp, Homo sapien
acaatcgagataacccactaccttc

SEQ ID NO: 1140588 - DNA, 25 bp, Homo sapien
agaggagaacaaggaagttcgatct

SEQ ID NO: 1140589 - DNA, 25 bp, Homo sapien
gaaagaggagaacaaggaagttcga

SEQ ID NO: 1140590 - DNA, 25 bp, Homo sapien
gggacatgggcattatcttcataga

SEQ ID NO: 1140591 - DNA, 25 bp, Homo sapien
cctggtaatgttgtaagtgttcaat

SEQ ID NO: 1140592 - DNA, 25 bp, Homo sapien
atatatcgtagtttgtaatgaggac

SEQ ID NO: 1140593 - DNA, 25 bp, Homo sapien
tctggattattttgcgctgggtttt

SEQ ID NO: 1140594 - DNA, 25 bp, Homo sapien
taacctcttacggatttattcagtg

SEQ ID NO: 1140595 - DNA, 25 bp, Homo sapien
ggtaccctaatggtacttcagcagc

SEQ ID NO: 1140596 - DNA, 25 bp, Homo sapien
ttcagcagcactgcgtgaaactggg

SEQ ID NO: 1140597 - DNA, 25 bp, Homo sapien
gtgttcagaacgtcaagctagactt

SEQ ID NO: 1140598 - DNA, 25 bp, Homo sapien
gcctttgaggtaaaacagccgagga

SEQ ID NO: 1140599 - DNA, 25 bp, Homo sapien
tttcccgaagtgagtgctgcacata

SEQ ID NO: 1140600 - DNA, 25 bp, Homo sapien
cattttagatggattacttaccaca

SEQ ID NO: 1140601 - DNA, 25 bp, Homo sapien
ttagtgcccactatgtcatggctta

SEQ ID NO: 1140602 - DNA, 25 bp, Homo sapien
ttggaaactgctggtctgtggtgtt

SEQ ID NO: 1140603 - DNA, 25 bp, Homo sapien
aattaagacctattaagcacttcag

SEQ ID NO: 1140604 - DNA, 25 bp, Homo sapien
agcatcttcccacactgccatttgt

SEQ ID NO: 1140605 - DNA, 25 bp, Homo sapien
caacagatgacttaggttggttaat

SEQ ID NO: 1140606 - DNA, 25 bp, Homo sapien
ggcgcggtcctttgtgtgaggttgg

SEQ ID NO: 1140607 - DNA, 25 bp, Homo sapien
ggttggaagagcctgagaccgagaa

SEQ ID NO: 1140608 - DNA, 25 bp, Homo sapien
ggtggtggcgcggtcctttgtgtga

SEQ ID NO: 1140609 - DNA, 25 bp, Homo sapien
ttggaagagcctgagaccgagaaga

SEQ ID NO: 1140610 - DNA, 25 bp, Homo sapien
ctgggatctgtagtctggctgcttc

SEQ ID NO: 1140611 - DNA, 25 bp, Homo sapien
gggagggagcgaaaatggaggctcc

SEQ ID NO: 1140612 - DNA, 25 bp, Homo sapien
ggatctgtagtctggctgcttcccc

SEQ ID NO: 1140613 - DNA, 25 bp, Homo sapien
agcgaaaatggaggctccgacagca

SEQ ID NO: 1140614 - DNA, 25 bp, Homo sapien
gcgagagaagcgagatttattccta

SEQ ID NO: 1140615 - DNA, 25 bp, Homo sapien
cgtgctgcttatggcggcgctggag

SEQ ID NO: 1140616 - DNA, 25 bp, Homo sapien
cgtaccgggccgtgctgcttatggc

SEQ ID NO: 1140617 - DNA, 25 bp, Homo sapien
gagcccgcaactctcgcgagagaag

SEQ ID NO: 1140618 - DNA, 25 bp, Homo sapien
tcatattgttcaaagctgaggagct

SEQ ID NO: 1140619 - DNA, 25 bp, Homo sapien
gagagaacctactgctagtcccagg

SEQ ID NO: 1140620 - DNA, 25 bp, Homo sapien
gcaacattgagattcaaatgcccag

SEQ ID NO: 1140621 - DNA, 25 bp, Homo sapien
caattccacagaactagatcagcag

SEQ ID NO: 1140622 - DNA, 25 bp, Homo sapien
tcctgtctgtgtggtatggctatag

SEQ ID NO: 1140623 - DNA, 25 bp, Homo sapien
tgacaaaagtaagcctgttatcctg

SEQ ID NO: 1140624 - DNA, 25 bp, Homo sapien
agtgacaaaagtaagcctgttatcc

SEQ ID NO: 1140625 - DNA, 25 bp, Homo sapien
tctgtgtggtatggctatagcaatg

SEQ ID NO: 1140626 - DNA, 25 bp, Homo sapien
tgtactcccatacttctgcagcatt

SEQ ID NO: 1140627 - DNA, 25 bp, Homo sapien
gaccccagagggtttctcagcagtc

SEQ ID NO: 1140628 - DNA, 25 bp, Homo sapien
ccccagagggtttctcagcagtcat

SEQ ID NO: 1140629 - DNA, 25 bp, Homo sapien
tgaccccagagggtttctcagcagt

SEQ ID NO: 1140630 - DNA, 25 bp, Homo sapien
ttgaccccagagggtttctcagcag

SEQ ID NO: 1140631 - DNA, 25 bp, Homo sapien
ccaagaatacaacagggaagatcaa

SEQ ID NO: 1140632 - DNA, 25 bp, Homo sapien
cttgattttgagacctgaagtccta

SEQ ID NO: 1140633 - DNA, 25 bp, Homo sapien
cctaaggtggatctgagacaactcc

SEQ ID NO: 1140634 - DNA, 25 bp, Homo sapien
gaatgctggtccgatgaacaagagc

SEQ ID NO: 1140635 - DNA, 25 bp, Homo sapien
taatctgaagtcaaatttttgagca

SEQ ID NO: 1140636 - DNA, 25 bp, Homo sapien
cctattaatctgaagtcaaattttt

SEQ ID NO: 1140637 - DNA, 25 bp, Homo sapien
tctgaagtcaaatttttgagcatct

SEQ ID NO: 1140638 - DNA, 25 bp, Homo sapien
attaatctgaagtcaaatttttgag

SEQ ID NO: 1140639 - DNA, 25 bp, Homo sapien
ggttcagcaagacaatacctatcac

SEQ ID NO: 1140640 - DNA, 25 bp, Homo sapien
aatacctatcacatgcagtgacata

SEQ ID NO: 1140641 - DNA, 25 bp, Homo sapien
tgcactgactggttcagcaagacaa

SEQ ID NO: 1140642 - DNA, 25 bp, Homo sapien
gactggttcagcaagacaataccta

SEQ ID NO: 1140643 - DNA, 25 bp, Homo sapien
ttttttaaaatgagtgtcatgcagc

SEQ ID NO: 1140644 - DNA, 25 bp, Homo sapien
aactgagcaatagaatactggcaat

SEQ ID NO: 1140645 - DNA, 25 bp, Homo sapien
actgagcaatagaatactggcaata

SEQ ID NO: 1140646 - DNA, 25 bp, Homo sapien
tcctgtcccttatttctcgaggaag

SEQ ID NO: 1140647 - DNA, 25 bp, Homo sapien
aggaagaataggttggtctggacct

SEQ ID NO: 1140648 - DNA, 25 bp, Homo sapien
tttgcaaccttcacaggtaagtgca

SEQ ID NO: 1140649 - DNA, 25 bp, Homo sapien
ttaattcacgagaactaaatccaca

SEQ ID NO: 1140650 - DNA, 25 bp, Homo sapien
ctgcattttgttgatgctacattga

SEQ ID NO: 1140651 - DNA, 25 bp, Homo sapien
tgtccatttcacagtgactaccatt

SEQ ID NO: 1140652 - DNA, 25 bp, Homo sapien
ttgacattttctacgcatgtacatg

SEQ ID NO: 1140653 - DNA, 25 bp, Homo sapien
ccaacattcctactgccttatactt

SEQ ID NO: 1140654 - DNA, 25 bp, Homo sapien
cattcctactgccttatactttttc

SEQ ID NO: 1140655 - DNA, 25 bp, Homo sapien
gcttggtgtactccataggaatcac

SEQ ID NO: 1140656 - DNA, 25 bp, Homo sapien
tactgggacttctgtattctatgaa

SEQ ID NO: 1140657 - DNA, 25 bp, Homo sapien
ccaaatgcttgagaagcaagtgtac

SEQ ID NO: 1140658 - DNA, 25 bp, Homo sapien
gatatgccgattactttactgggac

SEQ ID NO: 1140659 - DNA, 25 bp, Homo sapien
ctgggatatcctacggtaatcatac

SEQ ID NO: 1140660 - DNA, 25 bp, Homo sapien
ggttagggcacactcttgctaataa

SEQ ID NO: 1140661 - DNA, 25 bp, Homo sapien
tgtccttggcatacaacttttgaac

SEQ ID NO: 1140662 - DNA, 25 bp, Homo sapien
catacctcagagtgtggttagggca

SEQ ID NO: 1140663 - DNA, 25 bp, Homo sapien
aggttttagttatgagaaagaagag

SEQ ID NO: 1140664 - DNA, 25 bp, Homo sapien
tattcgaaagaggttttagttatga

SEQ ID NO: 1140665 - DNA, 25 bp, Homo sapien
atattcgaaagaggttttagttatg

SEQ ID NO: 1140666 - DNA, 25 bp, Homo sapien
tttagttatgagaaagaagagtacc

SEQ ID NO: 1140667 - DNA, 25 bp, Homo sapien
cttccactttgatgttagagtaaaa

SEQ ID NO: 1140668 - DNA, 25 bp, Homo sapien
tgatagaaaactgtggtctactcct

SEQ ID NO: 1140669 - DNA, 25 bp, Homo sapien
ccactttgatgttagagtaaaaatg

SEQ ID NO: 1140670 - DNA, 25 bp, Homo sapien
caggtctagtggtggatgatagaaa

SEQ ID NO: 1140671 - DNA, 25 bp, Homo sapien
tgatgagcagccacaatgttattaa

SEQ ID NO: 1140672 - DNA, 25 bp, Homo sapien
tatttttgatgagcagccacaatgt

SEQ ID NO: 1140673 - DNA, 25 bp, Homo sapien
aatggtatatttttgatgagcagcc

SEQ ID NO: 1140674 - DNA, 25 bp, Homo sapien
gagcagccacaatgttattaatgag

SEQ ID NO: 1140675 - DNA, 25 bp, Homo sapien
acattatttctttcagtaatgaaca

SEQ ID NO: 1140676 - DNA, 25 bp, Homo sapien
tatacattatttctttcagtaatga

SEQ ID NO: 1140677 - DNA, 25 bp, Homo sapien
atttctttcagtaatgaacacatac

SEQ ID NO: 1140678 - DNA, 25 bp, Homo sapien
ttatttctttcagtaatgaacacat

SEQ ID NO: 1140679 - DNA, 25 bp, Homo sapien
tcattagcccacgtatgtgtaggac

SEQ ID NO: 1140680 - DNA, 25 bp, Homo sapien
tatgtgtaggactgctgtctctgag

SEQ ID NO: 1140681 - DNA, 25 bp, Homo sapien
ccttggtaaaattcattagcccacg

SEQ ID NO: 1140682 - DNA, 25 bp, Homo sapien
cagttcaggatttgtatgttcctgc

SEQ ID NO: 1140683 - DNA, 25 bp, Homo sapien
ctgactgtaaagttgggccccatgg

SEQ ID NO: 1140684 - DNA, 25 bp, Homo sapien
aagttgggccccatggagaaatatc

SEQ ID NO: 1140685 - DNA, 25 bp, Homo sapien
tatcacttcagtttttgatcccttc

SEQ ID NO: 1140686 - DNA, 25 bp, Homo sapien
gccccatggagaaatatcacttcag

SEQ ID NO: 1140687 - DNA, 25 bp, Homo sapien
cagtaactattaacattaaagttag

SEQ ID NO: 1140688 - DNA, 25 bp, Homo sapien
gaacaaataagacttctatcaccac

SEQ ID NO: 1140689 - DNA, 25 bp, Homo sapien
caattagagtagtagaaggacattc

SEQ ID NO: 1140690 - DNA, 25 bp, Homo sapien
caccactcctattgtgacaatttgg

SEQ ID NO: 1140691 - DNA, 25 bp, Homo sapien
ttagagtagtagaaggacattcttc

SEQ ID NO: 1140692 - DNA, 25 bp, Homo sapien
tttgctcattcttttgtagaagtaa

SEQ ID NO: 1140693 - DNA, 25 bp, Homo sapien
caattgttgctgcaagcagagcata

SEQ ID NO: 1140694 - DNA, 25 bp, Homo sapien
tgtagaagtaaaacagtgtgtaata

SEQ ID NO: 1140695 - DNA, 25 bp, Homo sapien
tcttttgtagaagtaaaacagtgtg

SEQ ID NO: 1140696 - DNA, 25 bp, Homo sapien
agtatttctgaatggttataattca

SEQ ID NO: 1140697 - DNA, 25 bp, Homo sapien
tctggatgatacatttttgaatact

SEQ ID NO: 1140698 - DNA, 25 bp, Homo sapien
tctcagttcagtatgcttccatatg

SEQ ID NO: 1140699 - DNA, 25 bp, Homo sapien
ggcaaaatgctatgggtcttctgga

SEQ ID NO: 1140700 - DNA, 25 bp, Homo sapien
ccgttcatgttgtccaaatcagtca

SEQ ID NO: 1140701 - DNA, 25 bp, Homo sapien
cattgatgatgtccattttacggtc

SEQ ID NO: 1140702 - DNA, 25 bp, Homo sapien
tacggtcatatattggtaacacagc

SEQ ID NO: 1140703 - DNA, 25 bp, Homo sapien
cagtgatagttctatattccacaaa

SEQ ID NO: 1140704 - DNA, 25 bp, Homo sapien
tacatacggtctatgagggcaacag

SEQ ID NO: 1140705 - DNA, 25 bp, Homo sapien
cagaaaaggcgggaaatcgctcagc

SEQ ID NO: 1140706 - DNA, 25 bp, Homo sapien
ggttctgtgcccacgcgaactgcta

SEQ ID NO: 1140707 - DNA, 25 bp, Homo sapien
gcggctggcagttcaacggctaaat

SEQ ID NO: 1140708 - DNA, 25 bp, Homo sapien
cggcggggaggtgcagtagcacaac

SEQ ID NO: 1140709 - DNA, 25 bp, Homo sapien
cgctgccacgctggcctgaaaagaa

SEQ ID NO: 1140710 - DNA, 25 bp, Homo sapien
tcctgtcccattaaattccatcaca

SEQ ID NO: 1140711 - DNA, 25 bp, Homo sapien
aaattccatcacatcgccaggagga

SEQ ID NO: 1140712 - DNA, 25 bp, Homo sapien
cgcccgctgccacgctggcctgaaa

SEQ ID NO: 1140713 - DNA, 25 bp, Homo sapien
gaagaaagtggaatcgcctcccagg

SEQ ID NO: 1140714 - DNA, 25 bp, Homo sapien
tggtacgaacaatgcaaagggcttt

SEQ ID NO: 1140715 - DNA, 25 bp, Homo sapien
gacacctgactgctgcttgatctcg

SEQ ID NO: 1140716 - DNA, 25 bp, Homo sapien
tctgaggtttcaccgcagacacctg

SEQ ID NO: 1140717 - DNA, 25 bp, Homo sapien
aaatcatcttcagtacatttgttga

SEQ ID NO: 1140718 - DNA, 25 bp, Homo sapien
ggagagattagtctttgcaaatgga

SEQ ID NO: 1140719 - DNA, 25 bp, Homo sapien
tttttggagagattagtctttgcaa

SEQ ID NO: 1140720 - DNA, 25 bp, Homo sapien
aatggaaactcaaaatcatcttcag

SEQ ID NO: 1140721 - DNA, 25 bp, Homo sapien
tgctcaagcacgggcaagaaattaa

SEQ ID NO: 1140722 - DNA, 25 bp, Homo sapien
gctcaagcacgggcaagaaattaac

SEQ ID NO: 1140723 - DNA, 25 bp, Homo sapien
ctccaaatcagagtcttttagtcct

SEQ ID NO: 1140724 - DNA, 25 bp, Homo sapien
aatcagagtcttttagtccttcctg

SEQ ID NO: 1140725 - DNA, 25 bp, Homo sapien
caaatcagagtcttttagtccttcc

SEQ ID NO: 1140726 - DNA, 25 bp, Homo sapien
tcagagtcttttagtccttcctgat

SEQ ID NO: 1140727 - DNA, 25 bp, Homo sapien
cctgaatggcttttcgctgtgcttc

SEQ ID NO: 1140728 - DNA, 25 bp, Homo sapien
tcagttcagcttctgtacttacttt

SEQ ID NO: 1140729 - DNA, 25 bp, Homo sapien
tctcagttcagcttctgtacttact

SEQ ID NO: 1140730 - DNA, 25 bp, Homo sapien
tgaatggcttttcgctgtgcttcaa

SEQ ID NO: 1140731 - DNA, 25 bp, Homo sapien
aaacagaaaagttcatcccattttg

SEQ ID NO: 1140732 - DNA, 25 bp, Homo sapien
attttcttgtattccttcttctaat

SEQ ID NO: 1140733 - DNA, 25 bp, Homo sapien
caagtttctacccaagttgctatca

SEQ ID NO: 1140734 - DNA, 25 bp, Homo sapien
tctacccaagttgctatcaataaac

SEQ ID NO: 1140735 - DNA, 25 bp, Homo sapien
ccaagttgctatcaataaactttca

SEQ ID NO: 1140736 - DNA, 25 bp, Homo sapien
taacaagtttctacccaagttgcta

SEQ ID NO: 1140737 - DNA, 25 bp, Homo sapien
tctagcacaggtttctttgagtaga

SEQ ID NO: 1140738 - DNA, 25 bp, Homo sapien
ctagcacaggtttctttgagtagat

SEQ ID NO: 1140739 - DNA, 25 bp, Homo sapien
tctagaagatttcatgacatagcag

SEQ ID NO: 1140740 - DNA, 25 bp, Homo sapien
agaagatttcatgacatagcaggca

SEQ ID NO: 1140741 - DNA, 25 bp, Homo sapien
gtaagagtagagactttgttcactg

SEQ ID NO: 1140742 - DNA, 25 bp, Homo sapien
catggaatatacactcttgtaagag

SEQ ID NO: 1140743 - DNA, 25 bp, Homo sapien
ttatttagatccatataaacttgcc

SEQ ID NO: 1140744 - DNA, 25 bp, Homo sapien
tttagatccatataaacttgcctgg

SEQ ID NO: 1140745 - DNA, 25 bp, Homo sapien
tagatccatataaacttgcctggtt

SEQ ID NO: 1140746 - DNA, 25 bp, Homo sapien
ctggtttcttcccgttcatattcat

SEQ ID NO: 1140747 - DNA, 25 bp, Homo sapien
cgaagttcctcaaaagctgttatca

SEQ ID NO: 1140748 - DNA, 25 bp, Homo sapien
ttgcacacgaagttcctcaaaagct

SEQ ID NO: 1140749 - DNA, 25 bp, Homo sapien
cacgaagttcctcaaaagctgttat

SEQ ID NO: 1140750 - DNA, 25 bp, Homo sapien
cacacgaagttcctcaaaagctgtt

SEQ ID NO: 1140751 - DNA, 25 bp, Homo sapien
ccttcttgtattcttgttcaaggtg

SEQ ID NO: 1140752 - DNA, 25 bp, Homo sapien
ccttgtcatttatttccttcttgta

SEQ ID NO: 1140753 - DNA, 25 bp, Homo sapien
tattcttgttcaaggtgttggattt

SEQ ID NO: 1140754 - DNA, 25 bp, Homo sapien
tcttgtattcttgttcaaggtgttg

SEQ ID NO: 1140755 - DNA, 25 bp, Homo sapien
ttaatgaattagcaaatataaagaa

SEQ ID NO: 1140756 - DNA, 25 bp, Homo sapien
gcaaatataaagaatacaaagagtt

SEQ ID NO: 1140757 - DNA, 25 bp, Homo sapien
atataaagaatacaaagagttggtt

SEQ ID NO: 1140758 - DNA, 25 bp, Homo sapien
ttagcaaatataaagaatacaaaga

SEQ ID NO: 1140759 - DNA, 25 bp, Homo sapien
tttctttctcagtgatttggatcaa

SEQ ID NO: 1140760 - DNA, 25 bp, Homo sapien
tggattcctctagcagaaatgttaa

SEQ ID NO: 1140761 - DNA, 25 bp, Homo sapien
ttcctctagcagaaatgttaaatct

SEQ ID NO: 1140762 - DNA, 25 bp, Homo sapien
tgtcttttcctctaattgattaact

SEQ ID NO: 1140763 - DNA, 25 bp, Homo sapien
cttctagttctttagtcaaatgatg

SEQ ID NO: 1140764 - DNA, 25 bp, Homo sapien
ttgtaatgacactttaatatcttct

SEQ ID NO: 1140765 - DNA, 25 bp, Homo sapien
gtaatgacactttaatatcttctag

SEQ ID NO: 1140766 - DNA, 25 bp, Homo sapien
tctttagtcaaatgatgctgtttct

SEQ ID NO: 1140767 - DNA, 25 bp, Homo sapien
cacaaacgaatgagcagctctagct

SEQ ID NO: 1140768 - DNA, 25 bp, Homo sapien
ttgttgctatctgtaaatcttcctc

SEQ ID NO: 1140769 - DNA, 25 bp, Homo sapien
tcttcagttagctgacaaattgttt

SEQ ID NO: 1140770 - DNA, 25 bp, Homo sapien
gagcagctctagctttattagattc

SEQ ID NO: 1140771 - DNA, 25 bp, Homo sapien
ttgctgttctgttctcaataattct

SEQ ID NO: 1140772 - DNA, 25 bp, Homo sapien
tgttctcaataattcttccaagctg

SEQ ID NO: 1140773 - DNA, 25 bp, Homo sapien
ctttgctgttctgttctcaataatt

SEQ ID NO: 1140774 - DNA, 25 bp, Homo sapien
tctcaataattcttccaagctgcag

SEQ ID NO: 1140775 - DNA, 25 bp, Homo sapien
tcttttgaagctccatggtaagtat

SEQ ID NO: 1140776 - DNA, 25 bp, Homo sapien
gaagaattattaaggtctctgaatc

SEQ ID NO: 1140777 - DNA, 25 bp, Homo sapien
tcaagttctacttctttgttatttg

SEQ ID NO: 1140778 - DNA, 25 bp, Homo sapien
taaacattaacaaatcaggaatgcc

SEQ ID NO: 1140779 - DNA, 25 bp, Homo sapien
caaactgcccaaatggagctgtgga

SEQ ID NO: 1140780 - DNA, 25 bp, Homo sapien
ggaatgccaaaccatacacatagtg

SEQ ID NO: 1140781 - DNA, 25 bp, Homo sapien
catagtgaaagtaatcaaactgccc

SEQ ID NO: 1140782 - DNA, 25 bp, Homo sapien
cttggagaagaccaattagttcttg

SEQ ID NO: 1140783 - DNA, 25 bp, Homo sapien
ctggcttggagaagaccaattagtt

SEQ ID NO: 1140784 - DNA, 25 bp, Homo sapien
gaagaccaattagttcttgttctgt

SEQ ID NO: 1140785 - DNA, 25 bp, Homo sapien
cagcaatcttctcaaattgtttatt

SEQ ID NO: 1140786 - DNA, 25 bp, Homo sapien
acctcttttgaataatactgttcac

SEQ ID NO: 1140787 - DNA, 25 bp, Homo sapien
taacctcttttgaataatactgttc

SEQ ID NO: 1140788 - DNA, 25 bp, Homo sapien
atactgttcacttgtggtaatggca

SEQ ID NO: 1140789 - DNA, 25 bp, Homo sapien
cctcttttgaataatactgttcact

SEQ ID NO: 1140790 - DNA, 25 bp, Homo sapien
gctgattcttgagttctagggtcat

SEQ ID NO: 1140791 - DNA, 25 bp, Homo sapien
ttctagtgaaagcttgttgcagtgt

SEQ ID NO: 1140792 - DNA, 25 bp, Homo sapien
ctagtgaaagcttgttgcagtgtga

SEQ ID NO: 1140793 - DNA, 25 bp, Homo sapien
ttctagggtcatatcacttgtttcc

SEQ ID NO: 1140794 - DNA, 25 bp, Homo sapien
agattttctatttgtttcaacatcc

SEQ ID NO: 1140795 - DNA, 25 bp, Homo sapien
ctatttgtttcaacatcctttcttc

SEQ ID NO: 1140796 - DNA, 25 bp, Homo sapien
tttctatttgtttcaacatcctttc

SEQ ID NO: 1140797 - DNA, 25 bp, Homo sapien
gaagattttctatttgtttcaacat

SEQ ID NO: 1140798 - DNA, 25 bp, Homo sapien
cttctctcacatattctagttcatt

SEQ ID NO: 1140799 - DNA, 25 bp, Homo sapien
ttctctcacatattctagttcattt

SEQ ID NO: 1140800 - DNA, 25 bp, Homo sapien
tcttctctcacatattctagttcat

SEQ ID NO: 1140801 - DNA, 25 bp, Homo sapien
tgtgatacgatccattattaaatat

SEQ ID NO: 1140802 - DNA, 25 bp, Homo sapien
gtttagacatatggtgttgctttta

SEQ ID NO: 1140803 - DNA, 25 bp, Homo sapien
ttattttagtttagacatatggtgt

SEQ ID NO: 1140804 - DNA, 25 bp, Homo sapien
aatttgaaattttgtgatacgatcc

SEQ ID NO: 1140805 - DNA, 25 bp, Homo sapien
tcctgctgaagttcttcaatatact

SEQ ID NO: 1140806 - DNA, 25 bp, Homo sapien
gctgaagttcttcaatatacttgtt

SEQ ID NO: 1140807 - DNA, 25 bp, Homo sapien
ctcctgctgaagttcttcaatatac

SEQ ID NO: 1140808 - DNA, 25 bp, Homo sapien
ctgctgaagttcttcaatatacttg

SEQ ID NO: 1140809 - DNA, 25 bp, Homo sapien
tatctcataaacattcagttgcttg

SEQ ID NO: 1140810 - DNA, 25 bp, Homo sapien
tctcataaacattcagttgcttgct

SEQ ID NO: 1140811 - DNA, 25 bp, Homo sapien
tttatctcataaacattcagttgct

SEQ ID NO: 1140812 - DNA, 25 bp, Homo sapien
ctttatctcataaacattcagttgc

SEQ ID NO: 1140813 - DNA, 25 bp, Homo sapien
ttctgtttggcactttctagttcta

SEQ ID NO: 1140814 - DNA, 25 bp, Homo sapien
ctagttctaactctaatttattgac

SEQ ID NO: 1140815 - DNA, 25 bp, Homo sapien
caatttctttctgataggtgtctgt

SEQ ID NO: 1140816 - DNA, 25 bp, Homo sapien
ctgatatctttttgtcctcaatttc

SEQ ID NO: 1140817 - DNA, 25 bp, Homo sapien
ctattttatgttgacatcgcttatc

SEQ ID NO: 1140818 - DNA, 25 bp, Homo sapien
tttttccataagtgctaccatttca

SEQ ID NO: 1140819 - DNA, 25 bp, Homo sapien
tgttgacatcgcttatcaatttctt

SEQ ID NO: 1140820 - DNA, 25 bp, Homo sapien
cataagtgctaccatttcagctatt

SEQ ID NO: 1140821 - DNA, 25 bp, Homo sapien
tctgagtctctttcttcaatgatct

SEQ ID NO: 1140822 - DNA, 25 bp, Homo sapien
caaagatgctctcagtgatgactgt

SEQ ID NO: 1140823 - DNA, 25 bp, Homo sapien
cttataaagtcctaattctgagtct

SEQ ID NO: 1140824 - DNA, 25 bp, Homo sapien
cttcaatgatcttatcatattggtg

SEQ ID NO: 1140825 - DNA, 25 bp, Homo sapien
taacagacaaaagttcagctttgag

SEQ ID NO: 1140826 - DNA, 25 bp, Homo sapien
agttgcttcttaacagacaaaagtt

SEQ ID NO: 1140827 - DNA, 25 bp, Homo sapien
tcagctttgagattggatagttcaa

SEQ ID NO: 1140828 - DNA, 25 bp, Homo sapien
ttcagctttgagattggatagttca

SEQ ID NO: 1140829 - DNA, 25 bp, Homo sapien
ttttgtaagaagagatttgaggaca

SEQ ID NO: 1140830 - DNA, 25 bp, Homo sapien
agaagagatttgaggacataaatag

SEQ ID NO: 1140831 - DNA, 25 bp, Homo sapien
taagaagagatttgaggacataaat

SEQ ID NO: 1140832 - DNA, 25 bp, Homo sapien
tgtaagaagagatttgaggacataa

SEQ ID NO: 1140833 - DNA, 25 bp, Homo sapien
agctgtgttttcttttgcctctctt

SEQ ID NO: 1140834 - DNA, 25 bp, Homo sapien
ttctttaagagtagctgtgttttct

SEQ ID NO: 1140835 - DNA, 25 bp, Homo sapien
tgtgttttcttttgcctctcttttg

SEQ ID NO: 1140836 - DNA, 25 bp, Homo sapien
tttctttaagagtagctgtgttttc

SEQ ID NO: 1140837 - DNA, 25 bp, Homo sapien
gatcaactgatgtgaaatttcgaga

SEQ ID NO: 1140838 - DNA, 25 bp, Homo sapien
ctttggcaatggtgtagataaagta

SEQ ID NO: 1140839 - DNA, 25 bp, Homo sapien
tggcagatgtccacagatagtctct

SEQ ID NO: 1140840 - DNA, 25 bp, Homo sapien
tatctttggatatgccatgatcaac

SEQ ID NO: 1140841 - DNA, 25 bp, Homo sapien
caaatttgtttgtctttgtatctag

SEQ ID NO: 1140842 - DNA, 25 bp, Homo sapien
gatatgaatgtaggcagcaaatttg

SEQ ID NO: 1140843 - DNA, 25 bp, Homo sapien
gcaaatttgtttgtctttgtatcta

SEQ ID NO: 1140844 - DNA, 25 bp, Homo sapien
ttagatatgaatgtaggcagcaaat

SEQ ID NO: 1140845 - DNA, 25 bp, Homo sapien
tttcttcaatgggtatattcaagtt

SEQ ID NO: 1140846 - DNA, 25 bp, Homo sapien
cttcaatgggtatattcaagttttc

SEQ ID NO: 1140847 - DNA, 25 bp, Homo sapien
caatgggtatattcaagttttctct

SEQ ID NO: 1140848 - DNA, 25 bp, Homo sapien
gggtatattcaagttttctctttgc

SEQ ID NO: 1140849 - DNA, 25 bp, Homo sapien
gaagctggtggattattgttcctat

SEQ ID NO: 1140850 - DNA, 25 bp, Homo sapien
tggtggattattgttcctatacagt

SEQ ID NO: 1140851 - DNA, 25 bp, Homo sapien
ttttgacacaaagatgagaagctgg

SEQ ID NO: 1140852 - DNA, 25 bp, Homo sapien
tgagaagctggtggattattgttcc

SEQ ID NO: 1140853 - DNA, 25 bp, Homo sapien
cggtcctcccgcatttttcttatag

SEQ ID NO: 1140854 - DNA, 25 bp, Homo sapien
tagatccaggggttgttagagatga

SEQ ID NO: 1140855 - DNA, 25 bp, Homo sapien
ttagcaattacagcccaacggtcct

SEQ ID NO: 1140856 - DNA, 25 bp, Homo sapien
tttcttatagctccaaacttcagtg

SEQ ID NO: 1140857 - DNA, 25 bp, Homo sapien
ttggctctggcaaataagaacaaaa

SEQ ID NO: 1140858 - DNA, 25 bp, Homo sapien
ttaggctccttaactacactgattc

SEQ ID NO: 1140859 - DNA, 25 bp, Homo sapien
gacaggtttccagacaatatgtagt

SEQ ID NO: 1140860 - DNA, 25 bp, Homo sapien
tataagtttcacgttattaggctcc

SEQ ID NO: 1140861 - DNA, 25 bp, Homo sapien
ttggtgagcagatgctgtggtgacc

SEQ ID NO: 1140862 - DNA, 25 bp, Homo sapien
caaactaaaagctcttggttcattt

SEQ ID NO: 1140863 - DNA, 25 bp, Homo sapien
ttactttgcattggtgagcagatgc

SEQ ID NO: 1140864 - DNA, 25 bp, Homo sapien
ctgtggtgacccaaactaaaagctc

SEQ ID NO: 1140865 - DNA, 25 bp, Homo sapien
ctcacctccatctactactaaacaa

SEQ ID NO: 1140866 - DNA, 25 bp, Homo sapien
tcacctccatctactactaaacaat

SEQ ID NO: 1140867 - DNA, 25 bp, Homo sapien
ctatgaataatcctggaacttcact

SEQ ID NO: 1140868 - DNA, 25 bp, Homo sapien
tgaataatcctggaacttcactaaa

SEQ ID NO: 1140869 - DNA, 25 bp, Homo sapien
gaataatcctggaacttcactaaag

SEQ ID NO: 1140870 - DNA, 25 bp, Homo sapien
ataatcctggaacttcactaaagca

SEQ ID NO: 1140871 - DNA, 25 bp, Homo sapien
gcttgcccacatgtaaggccaaaaa

SEQ ID NO: 1140872 - DNA, 25 bp, Homo sapien
ttgcccacatgtaaggccaaaaagc

SEQ ID NO: 1140873 - DNA, 25 bp, Homo sapien
gcccacatgtaaggccaaaaagcat

SEQ ID NO: 1140874 - DNA, 25 bp, Homo sapien
cgcttgcccacatgtaaggccaaaa

SEQ ID NO: 1140875 - DNA, 25 bp, Homo sapien
tactcagttggaatacaaaaagaca

SEQ ID NO: 1140876 - DNA, 25 bp, Homo sapien
tatactcagttggaatacaaaaaga

SEQ ID NO: 1140877 - DNA, 25 bp, Homo sapien
actcagttggaatacaaaaagacat

SEQ ID NO: 1140878 - DNA, 25 bp, Homo sapien
tgtatactcagttggaatacaaaaa

SEQ ID NO: 1140879 - DNA, 25 bp, Homo sapien
cacactctctcctttcgatgtgcat

SEQ ID NO: 1140880 - DNA, 25 bp, Homo sapien
taagcacactctctcctttcgatgt

SEQ ID NO: 1140881 - DNA, 25 bp, Homo sapien
tggtgttgatggttaggcaataagc

SEQ ID NO: 1140882 - DNA, 25 bp, Homo sapien
ggttaggcaataagcacactctctc

SEQ ID NO: 1140883 - DNA, 25 bp, Homo sapien
gtagatgaagtctctatatgtgcaa

SEQ ID NO: 1140884 - DNA, 25 bp, Homo sapien
tagggagcaacatggagtgggcatc

SEQ ID NO: 1140885 - DNA, 25 bp, Homo sapien
tcctgggacagagcatatttgggaa

SEQ ID NO: 1140886 - DNA, 25 bp, Homo sapien
catcctggtatttctacagtcctgt

SEQ ID NO: 1140887 - DNA, 25 bp, Homo sapien
ctatagtcagtattgcacttgccac

SEQ ID NO: 1140888 - DNA, 25 bp, Homo sapien
acagtagtttgtcttgatggcttca

SEQ ID NO: 1140889 - DNA, 25 bp, Homo sapien
ggcttcatgtatgcagtcactatag

SEQ ID NO: 1140890 - DNA, 25 bp, Homo sapien
ctgaggtttggtacagtagtttgtc

SEQ ID NO: 1140891 - DNA, 25 bp, Homo sapien
attagctttatttcaggcaagcaca

SEQ ID NO: 1140892 - DNA, 25 bp, Homo sapien
ttcaggcaagcacatttaaccaaat

SEQ ID NO: 1140893 - DNA, 25 bp, Homo sapien
gaagataatgtgaaacataatattt

SEQ ID NO: 1140894 - DNA, 25 bp, Homo sapien
tttcaggcaagcacatttaaccaaa

SEQ ID NO: 1140895 - DNA, 25 bp, Homo sapien
gttttatccagtgcatttgaatgac

SEQ ID NO: 1140896 - DNA, 25 bp, Homo sapien
tctgagtttgggtggagttttatcc

SEQ ID NO: 1140897 - DNA, 25 bp, Homo sapien
aagcactccactgtagattccacat

SEQ ID NO: 1140898 - DNA, 25 bp, Homo sapien
tatccagtgcatttgaatgaccagg

SEQ ID NO: 1140899 - DNA, 25 bp, Homo sapien
taatgtgccccttttggagataagc

SEQ ID NO: 1140900 - DNA, 25 bp, Homo sapien
gaattccaccactaagcaacaatag

SEQ ID NO: 1140901 - DNA, 25 bp, Homo sapien
tatgcgtatgagtaaaattagagaa

SEQ ID NO: 1140902 - DNA, 25 bp, Homo sapien
gctttccaaaatatgcgtatgagta

SEQ ID NO: 1140903 - DNA, 25 bp, Homo sapien
gaactacagttttcaccacttaaca

SEQ ID NO: 1140904 - DNA, 25 bp, Homo sapien
tttttcttgtatagccacctagaga

SEQ ID NO: 1140905 - DNA, 25 bp, Homo sapien
tcctagttgtgtgtgggcaacagaa

SEQ ID NO: 1140906 - DNA, 25 bp, Homo sapien
tgggcactgtatctatgaaatacct

SEQ ID NO: 1140907 - DNA, 25 bp, Homo sapien
tcagatgatgtgaccagagtccagt

SEQ ID NO: 1140908 - DNA, 25 bp, Homo sapien
tcttctccatgtgataaaacggccg

SEQ ID NO: 1140909 - DNA, 25 bp, Homo sapien
gagtgactccagaagtagaacctgc

SEQ ID NO: 1140910 - DNA, 25 bp, Homo sapien
aaaacggccgtcagtggctctaggc

SEQ ID NO: 1140911 - DNA, 25 bp, Homo sapien
tgcagtaggacatgaaggaccttcc

SEQ ID NO: 1140912 - DNA, 25 bp, Homo sapien
gaacctcgccagaagtaagcataga

SEQ ID NO: 1140913 - DNA, 25 bp, Homo sapien
gcaactagagcgaagaggcaactga

SEQ ID NO: 1140914 - DNA, 25 bp, Homo sapien
gggatagttttcctagaaggccaga

SEQ ID NO: 1140915 - DNA, 25 bp, Homo sapien
gagcaagggggagtgtgcgccacca

SEQ ID NO: 1140916 - DNA, 25 bp, Homo sapien
agagcaagggggagtgtgcgccacc

SEQ ID NO: 1140917 - DNA, 25 bp, Homo sapien
agtgtgcgccaccatctgactgtcg

SEQ ID NO: 1140918 - DNA, 25 bp, Homo sapien
gtgcgccaccatctgactgtcgaag

SEQ ID NO: 1140919 - DNA, 25 bp, Homo sapien
tctgcctaccagctggaaccagggc

SEQ ID NO: 1140920 - DNA, 25 bp, Homo sapien
tctcccgtgcacacacccccttttc

SEQ ID NO: 1140921 - DNA, 25 bp, Homo sapien
cctgttcccctccagtctcccgtgc

SEQ ID NO: 1140922 - DNA, 25 bp, Homo sapien
ccccttttcactctgcctaccagct

SEQ ID NO: 1140923 - DNA, 25 bp, Homo sapien
gcgctgattaaatgggtccccagtc

SEQ ID NO: 1140924 - DNA, 25 bp, Homo sapien
cctgcaggtgctccgatagccggcg

SEQ ID NO: 1140925 - DNA, 25 bp, Homo sapien
aaccggtctccgcacagggcgctga

SEQ ID NO: 1140926 - DNA, 25 bp, Homo sapien
gccctgcaggtgctccgatagccgg

SEQ ID NO: 1140927 - DNA, 25 bp, Homo sapien
aagtcccctctctttcttcactcat

SEQ ID NO: 1140928 - DNA, 25 bp, Homo sapien
cttttgagtttgctctcttctcttg

SEQ ID NO: 1140929 - DNA, 25 bp, Homo sapien
tctcttctcttgtttcaaagtcccc

SEQ ID NO: 1140930 - DNA, 25 bp, Homo sapien
ttctcttgtttcaaagtcccctctc

SEQ ID NO: 1140931 - DNA, 25 bp, Homo sapien
atatctagtagagcgagttcagccc

SEQ ID NO: 1140932 - DNA, 25 bp, Homo sapien
gtgccgatactacactgtcctaaat

SEQ ID NO: 1140933 - DNA, 25 bp, Homo sapien
gcagtggtactttcatcataaacaa

SEQ ID NO: 1140934 - DNA, 25 bp, Homo sapien
tacacaaaagtcagtctctgggctc

SEQ ID NO: 1140935 - DNA, 25 bp, Homo sapien
cagcttactgtgaaaccgttgcagc

SEQ ID NO: 1140936 - DNA, 25 bp, Homo sapien
ggtatcagggctccaaggctgttga

SEQ ID NO: 1140937 - DNA, 25 bp, Homo sapien
ccctctccagttagttgtggcaaga

SEQ ID NO: 1140938 - DNA, 25 bp, Homo sapien
tttgccccaggtggtatcactgact

SEQ ID NO: 1140939 - DNA, 25 bp, Homo sapien
gattgacagcctcattctttcagga

SEQ ID NO: 1140940 - DNA, 25 bp, Homo sapien
tccgatatgaagctagctattagtc

SEQ ID NO: 1140941 - DNA, 25 bp, Homo sapien
agcaatttgatgataatgcatgtag

SEQ ID NO: 1140942 - DNA, 25 bp, Homo sapien
taatgagcccttgcatgattagttg

SEQ ID NO: 1140943 - DNA, 25 bp, Homo sapien
tcttttcctagatttggccatatca

SEQ ID NO: 1140944 - DNA, 25 bp, Homo sapien
tttcctagatttggccatatcagtc

SEQ ID NO: 1140945 - DNA, 25 bp, Homo sapien
tagatttggccatatcagtcatccc

SEQ ID NO: 1140946 - DNA, 25 bp, Homo sapien
atttggccatatcagtcatccccat

SEQ ID NO: 1140947 - DNA, 25 bp, Homo sapien
aatacaagtactccaagaaatcaga

SEQ ID NO: 1140948 - DNA, 25 bp, Homo sapien
cactcgagggtatgacagccaagaa

SEQ ID NO: 1140949 - DNA, 25 bp, Homo sapien
ccaggagctcacatttgcagctagt

SEQ ID NO: 1140950 - DNA, 25 bp, Homo sapien
ccaagaatgctttcgtagctgtgct

SEQ ID NO: 1140951 - DNA, 25 bp, Homo sapien
gaaggtgggccttcaactccagacc

SEQ ID NO: 1140952 - DNA, 25 bp, Homo sapien
tggcaggaccaagcatggacaaaac

SEQ ID NO: 1140953 - DNA, 25 bp, Homo sapien
gattcatgatcttaagcacaatgag

SEQ ID NO: 1140954 - DNA, 25 bp, Homo sapien
tcagtcgaagcagcaagaacttaaa

SEQ ID NO: 1140955 - DNA, 25 bp, Homo sapien
gatcatttactgacactggcaggac

SEQ ID NO: 1140956 - DNA, 25 bp, Homo sapien
gcctcattccaatcttaaggctccg

SEQ ID NO: 1140957 - DNA, 25 bp, Homo sapien
cagggagcccatgcctcattccaat

SEQ ID NO: 1140958 - DNA, 25 bp, Homo sapien
ttccaatcttaaggctccgggcaaa

SEQ ID NO: 1140959 - DNA, 25 bp, Homo sapien
gtctggctcttagcagggagcccat

SEQ ID NO: 1140960 - DNA, 25 bp, Homo sapien
tgcgaccagacaaggatagagccct

SEQ ID NO: 1140961 - DNA, 25 bp, Homo sapien
tatggtgacttcaggctgcgaccag

SEQ ID NO: 1140962 - DNA, 25 bp, Homo sapien
aagaagcagcacaatcgggaagggt

SEQ ID NO: 1140963 - DNA, 25 bp, Homo sapien
agaaaagatatgacagagttgcccc

SEQ ID NO: 1140964 - DNA, 25 bp, Homo sapien
gaacccaggaagatcggcctcattg

SEQ ID NO: 1140965 - DNA, 25 bp, Homo sapien
tgggcaaggccaacacatggaatgc

SEQ ID NO: 1140966 - DNA, 25 bp, Homo sapien
tctcggcaccttcatggcaagggct

SEQ ID NO: 1140967 - DNA, 25 bp, Homo sapien
tggattcagagccacaagtgtaggc

SEQ ID NO: 1140968 - DNA, 25 bp, Homo sapien
cacttctcaagagggacaagaagca

SEQ ID NO: 1140969 - DNA, 25 bp, Homo sapien
tgctgaaaggctcactggcctggag

SEQ ID NO: 1140970 - DNA, 25 bp, Homo sapien
agtgtcccctgactccccttccttg

SEQ ID NO: 1140971 - DNA, 25 bp, Homo sapien
gccagcctgtcacttctcaagaggg

SEQ ID NO: 1140972 - DNA, 25 bp, Homo sapien
cctaatgtcctcatagatggacagc

SEQ ID NO: 1140973 - DNA, 25 bp, Homo sapien
gggttgctccatgaaactctgaaca

SEQ ID NO: 1140974 - DNA, 25 bp, Homo sapien
tggacagctatagcctctgggttgc

SEQ ID NO: 1140975 - DNA, 25 bp, Homo sapien
cctctgggttgctccatgaaactct

SEQ ID NO: 1140976 - DNA, 25 bp, Homo sapien
aatatctgctcctatgcgcttctct

SEQ ID NO: 1140977 - DNA, 25 bp, Homo sapien
gcgcttctctccataccacaccttg

SEQ ID NO: 1140978 - DNA, 25 bp, Homo sapien
ggaggaatcctcttgcgaatatctg

SEQ ID NO: 1140979 - DNA, 25 bp, Homo sapien
caatttgcaactcctgattcctttg

SEQ ID NO: 1140980 - DNA, 25 bp, Homo sapien
gaatctggaacctgatgtagcctca

SEQ ID NO: 1140981 - DNA, 25 bp, Homo sapien
tacccagtgcagattaatgagtgcc

SEQ ID NO: 1140982 - DNA, 25 bp, Homo sapien
tcctgactgggctgtggatgcttcc

SEQ ID NO: 1140983 - DNA, 25 bp, Homo sapien
tcctggagctcaccactggaatctg

SEQ ID NO: 1140984 - DNA, 25 bp, Homo sapien
tccacatccctgataagttggcaaa

SEQ ID NO: 1140985 - DNA, 25 bp, Homo sapien
tcttccacatccctgataagttggc

SEQ ID NO: 1140986 - DNA, 25 bp, Homo sapien
aatatcttggatcaaacttgagagt

SEQ ID NO: 1140987 - DNA, 25 bp, Homo sapien
tggatcaaacttgagagtggtgact

SEQ ID NO: 1140988 - DNA, 25 bp, Homo sapien
ggcttttcccaatacaatgatatta

SEQ ID NO: 1140989 - DNA, 25 bp, Homo sapien
aattttccaccactagtttctccag

SEQ ID NO: 1140990 - DNA, 25 bp, Homo sapien
tgagaaccacacctatttaaatgaa

SEQ ID NO: 1140991 - DNA, 25 bp, Homo sapien
tattttctagaagtacactggcttt

SEQ ID NO: 1140992 - DNA, 25 bp, Homo sapien
aacatctgtgcctataatgcttgga

SEQ ID NO: 1140993 - DNA, 25 bp, Homo sapien
ctgtgcctataatgcttggaaactc

SEQ ID NO: 1140994 - DNA, 25 bp, Homo sapien
gctgtctccaataggtctgttgcca

SEQ ID NO: 1140995 - DNA, 25 bp, Homo sapien
agaagctgtctccaataggtctgtt

SEQ ID NO: 1140996 - DNA, 25 bp, Homo sapien
ttcttgaatggagggaatattccac

SEQ ID NO: 1140997 - DNA, 25 bp, Homo sapien
gaaaactgttccacaagtggcctgg

SEQ ID NO: 1140998 - DNA, 25 bp, Homo sapien
tccacaccagcacagcgaggagcag

SEQ ID NO: 1140999 - DNA, 25 bp, Homo sapien
cacctggatcatggaattcacgaat

SEQ ID NO: 1141000 - DNA, 25 bp, Homo sapien
aaagcccctccacgcttcgaggtgg

SEQ ID NO: 1141001 - DNA, 25 bp, Homo sapien
tccacgcttcgaggtggccaaaaga

SEQ ID NO: 1141002 - DNA, 25 bp, Homo sapien
caaagcccctccacgcttcgaggtg

SEQ ID NO: 1141003 - DNA, 25 bp, Homo sapien
ccctccacgcttcgaggtggccaaa

SEQ ID NO: 1141004 - DNA, 25 bp, Homo sapien
tgatttttctacacatgttccagga

SEQ ID NO: 1141005 - DNA, 25 bp, Homo sapien
tccccattgagcaatcacacaggat

SEQ ID NO: 1141006 - DNA, 25 bp, Homo sapien
cattgagcaatcacacaggataaga

SEQ ID NO: 1141007 - DNA, 25 bp, Homo sapien
ctgatttttctacacatgttccagg

SEQ ID NO: 1141008 - DNA, 25 bp, Homo sapien
ttatcgatgacctgctcccactcct

SEQ ID NO: 1141009 - DNA, 25 bp, Homo sapien
cttggcctccacctgcttatcgatg

SEQ ID NO: 1141010 - DNA, 25 bp, Homo sapien
tccacctgcttatcgatgacctgct

SEQ ID NO: 1141011 - DNA, 25 bp, Homo sapien
gcttatcgatgacctgctcccactc

SEQ ID NO: 1141012 - DNA, 25 bp, Homo sapien
ttcccgagtgcacagcaaggctctg

SEQ ID NO: 1141013 - DNA, 25 bp, Homo sapien
aaggctgttgcaagcagagctcatt

SEQ ID NO: 1141014 - DNA, 25 bp, Homo sapien
ctgcagaggctggcaataacggttt

SEQ ID NO: 1141015 - DNA, 25 bp, Homo sapien
ggcaataacggtttcccgagtgcac

SEQ ID NO: 1141016 - DNA, 25 bp, Homo sapien
gagctggcatcccttcaaagggctt

SEQ ID NO: 1141017 - DNA, 25 bp, Homo sapien
attggaaacatgtgtctgagctggc

SEQ ID NO: 1141018 - DNA, 25 bp, Homo sapien
ttgacataatgaaagtgcaacttgc

SEQ ID NO: 1141019 - DNA, 25 bp, Homo sapien
gcaacttgcacactgtctcgagatt

SEQ ID NO: 1141020 - DNA, 25 bp, Homo sapien
gacccaatcttgcatgtggcaggca

SEQ ID NO: 1141021 - DNA, 25 bp, Homo sapien
gtaagttgggcaaatcttccctcca

SEQ ID NO: 1141022 - DNA, 25 bp, Homo sapien
gcagagaatccctccaacccaggga

SEQ ID NO: 1141023 - DNA, 25 bp, Homo sapien
ccagggatgctccttaaagtcaagg

SEQ ID NO: 1141024 - DNA, 25 bp, Homo sapien
cggagccgagtggaagtgtgggcta

SEQ ID NO: 1141025 - DNA, 25 bp, Homo sapien
ctgggcaagagaagcggagccgagt

SEQ ID NO: 1141026 - DNA, 25 bp, Homo sapien
aagtgtgggctatggagaacccagg

SEQ ID NO: 1141027 - DNA, 25 bp, Homo sapien
gggcctgggagtctttctcgcacag

SEQ ID NO: 1141028 - DNA, 25 bp, Homo sapien
tgtccgctccttggaggagagacag

SEQ ID NO: 1141029 - DNA, 25 bp, Homo sapien
gctggaatagaggacaaaagggcac

SEQ ID NO: 1141030 - DNA, 25 bp, Homo sapien
ccgggtctcgtgtccgccctgtccg

SEQ ID NO: 1141031 - DNA, 25 bp, Homo sapien
tccacatcatgggaggaggatccgc

SEQ ID NO: 1141032 - DNA, 25 bp, Homo sapien
gtggtttccgcagcttgggctctgc

SEQ ID NO: 1141033 - DNA, 25 bp, Homo sapien
aaacagcttcaaaccgcccactata

SEQ ID NO: 1141034 - DNA, 25 bp, Homo sapien
ccagaaaggctgaccggggtcgcca

SEQ ID NO: 1141035 - DNA, 25 bp, Homo sapien
gatcggcgtcggagccttccaaaaa

SEQ ID NO: 1141036 - DNA, 25 bp, Homo sapien
tccttaacataagctcgaaaatccc

SEQ ID NO: 1141037 - DNA, 25 bp, Homo sapien
tagcccttcattagagttaaccacc

SEQ ID NO: 1141038 - DNA, 25 bp, Homo sapien
aaatccctgtcaaatagcccttcat

SEQ ID NO: 1141039 - DNA, 25 bp, Homo sapien
gatgaaactccttaacataagctcg

SEQ ID NO: 1141040 - DNA, 25 bp, Homo sapien
cccaaaccagggtggagatgtacat

SEQ ID NO: 1141041 - DNA, 25 bp, Homo sapien
aatcccaaaccagggtggagatgta

SEQ ID NO: 1141042 - DNA, 25 bp, Homo sapien
cctgaaatcccaaaccagggtggag

SEQ ID NO: 1141043 - DNA, 25 bp, Homo sapien
cactgcccctagctgctgaaacaaa

SEQ ID NO: 1141044 - DNA, 25 bp, Homo sapien
gaagactcacggaggttctcctgta

SEQ ID NO: 1141045 - DNA, 25 bp, Homo sapien
tttatcttcgccttgtaatgtctgg

SEQ ID NO: 1141046 - DNA, 25 bp, Homo sapien
tgaccttctgtagttaacattctca

SEQ ID NO: 1141047 - DNA, 25 bp, Homo sapien
aatgtctgggtaagagaagactcac

SEQ ID NO: 1141048 - DNA, 25 bp, Homo sapien
ggaaggtttgctgacggcttgcata

SEQ ID NO: 1141049 - DNA, 25 bp, Homo sapien
gacggcttgcataaaatctctggat

SEQ ID NO: 1141050 - DNA, 25 bp, Homo sapien
aagccttaagagacctttgctggca

SEQ ID NO: 1141051 - DNA, 25 bp, Homo sapien
ttcagagtctagagcaagccttaag

SEQ ID NO: 1141052 - DNA, 25 bp, Homo sapien
gagaaatgaactgggcccactcagg

SEQ ID NO: 1141053 - DNA, 25 bp, Homo sapien
atgccacatgttgccaaactcctac

SEQ ID NO: 1141054 - DNA, 25 bp, Homo sapien
aagggggatagggttaatgccacat

SEQ ID NO: 1141055 - DNA, 25 bp, Homo sapien
gttaatgccacatgttgccaaactc

SEQ ID NO: 1141056 - DNA, 25 bp, Homo sapien
ggatagggttaatgccacatgttgc

SEQ ID NO: 1141057 - DNA, 25 bp, Homo sapien
cccctcctccccaatccatgcacag

SEQ ID NO: 1141058 - DNA, 25 bp, Homo sapien
cactgccagtgccagtcccctcctc

SEQ ID NO: 1141059 - DNA, 25 bp, Homo sapien
ctccccaatccatgcacagccagct

SEQ ID NO: 1141060 - DNA, 25 bp, Homo sapien
actgccagtgccagtcccctcctcc

SEQ ID NO: 1141061 - DNA, 25 bp, Homo sapien
ctcaggtagaggtcgccaaggttca

SEQ ID NO: 1141062 - DNA, 25 bp, Homo sapien
gccgcgttggacaacctcaggtaga

SEQ ID NO: 1141063 - DNA, 25 bp, Homo sapien
cgccttgagttcaggcgaggaggat

SEQ ID NO: 1141064 - DNA, 25 bp, Homo sapien
tgccacttgggtcacacgcttcatc

SEQ ID NO: 1141065 - DNA, 25 bp, Homo sapien
cctgagaaatgtcccgagtgggtgt

SEQ ID NO: 1141066 - DNA, 25 bp, Homo sapien
gaccgagggaacagcgttagttctg

SEQ ID NO: 1141067 - DNA, 25 bp, Homo sapien
ggtctggcgagctctctggttaccc

SEQ ID NO: 1141068 - DNA, 25 bp, Homo sapien
tggtcgtggagtccctagtcccagg

SEQ ID NO: 1141069 - DNA, 25 bp, Homo sapien
gtgagagcagctcggcgctccggca

SEQ ID NO: 1141070 - DNA, 25 bp, Homo sapien
cggcgctccggcacagcagagagcg

SEQ ID NO: 1141071 - DNA, 25 bp, Homo sapien
agcagctcggcgctccggcacagca

SEQ ID NO: 1141072 - DNA, 25 bp, Homo sapien
tcggcgctccggcacagcagagagc

SEQ ID NO: 1141073 - DNA, 25 bp, Homo sapien
ccccagacttaggacaggaatcatc

SEQ ID NO: 1141074 - DNA, 25 bp, Homo sapien
catccatacagggtaggggtccaac

SEQ ID NO: 1141075 - DNA, 25 bp, Homo sapien
tggtgttaccagcaatagggagatt

SEQ ID NO: 1141076 - DNA, 25 bp, Homo sapien
ggagggtgcccttctgctaagttgc

SEQ ID NO: 1141077 - DNA, 25 bp, Homo sapien
cagctgcagtttcccgtacgcaaca

SEQ ID NO: 1141078 - DNA, 25 bp, Homo sapien
cagcagtatctcctaccacgtcatg

SEQ ID NO: 1141079 - DNA, 25 bp, Homo sapien
ctcacacttgcacaccttggttaaa

SEQ ID NO: 1141080 - DNA, 25 bp, Homo sapien
cccagtgactgatccagcagtatct

SEQ ID NO: 1141081 - DNA, 25 bp, Homo sapien
taaggtcccctagagcaaggcaatt

SEQ ID NO: 1141082 - DNA, 25 bp, Homo sapien
cagcctgtaattccacacaacggag

SEQ ID NO: 1141083 - DNA, 25 bp, Homo sapien
gttgaagtcctgctcgaagcaagcc

SEQ ID NO: 1141084 - DNA, 25 bp, Homo sapien
ggtttcatctcaagcccagcaagta

SEQ ID NO: 1141085 - DNA, 25 bp, Homo sapien
gaacttgttgctccaaccagcttgg

SEQ ID NO: 1141086 - DNA, 25 bp, Homo sapien
tcattgcccctagcttggtctgagc

SEQ ID NO: 1141087 - DNA, 25 bp, Homo sapien
tcaagttggcgaagtctgcttctcc

SEQ ID NO: 1141088 - DNA, 25 bp, Homo sapien
cacataagagcttttctcctcgggc

SEQ ID NO: 1141089 - DNA, 25 bp, Homo sapien
gctttgtgccattcttcttgcaaag

SEQ ID NO: 1141090 - DNA, 25 bp, Homo sapien
agctgctccgcatgggtcgggcaca

SEQ ID NO: 1141091 - DNA, 25 bp, Homo sapien
cttgccctgccagctttgtgccatt

SEQ ID NO: 1141092 - DNA, 25 bp, Homo sapien
tctttgagctgctccgcatgggtcg

SEQ ID NO: 1141093 - DNA, 25 bp, Homo sapien
ttgtcagaccttatttcatcatcgc

SEQ ID NO: 1141094 - DNA, 25 bp, Homo sapien
cttgtcagaccttatttcatcatcg

SEQ ID NO: 1141095 - DNA, 25 bp, Homo sapien
gcttgtcagaccttatttcatcatc

SEQ ID NO: 1141096 - DNA, 25 bp, Homo sapien
ggaagcagcaacatccatacatgtg

SEQ ID NO: 1141097 - DNA, 25 bp, Homo sapien
aagctcacagggctttttcggtgcc

SEQ ID NO: 1141098 - DNA, 25 bp, Homo sapien
gttctccaccgctcagagagaagct

SEQ ID NO: 1141099 - DNA, 25 bp, Homo sapien
agggctttttcggtgcctgctggaa

SEQ ID NO: 1141100 - DNA, 25 bp, Homo sapien
ggagctcagatcaaaagggacacag

SEQ ID NO: 1141101 - DNA, 25 bp, Homo sapien
aggagtcacaccacatgcaggcgtc

SEQ ID NO: 1141102 - DNA, 25 bp, Homo sapien
ttggaagagcccctcggttgctggc

SEQ ID NO: 1141103 - DNA, 25 bp, Homo sapien
tcttgcacaggttccagttgaggac

SEQ ID NO: 1141104 - DNA, 25 bp, Homo sapien
aaggtcctgaaggaggagttccagg

SEQ ID NO: 1141105 - DNA, 25 bp, Homo sapien
tctggtgcatctggaaggtcctgaa

SEQ ID NO: 1141106 - DNA, 25 bp, Homo sapien
caccttctggtgcatctggaaggtc

SEQ ID NO: 1141107 - DNA, 25 bp, Homo sapien
gagttccagggccccggctgccatg

SEQ ID NO: 1141108 - DNA, 25 bp, Homo sapien
caggtatgctgcgagcagtctccca

SEQ ID NO: 1141109 - DNA, 25 bp, Homo sapien
aggcatgtcataggccaggtatgct

SEQ ID NO: 1141110 - DNA, 25 bp, Homo sapien
ccagcaggtacacaaggaagaccca

SEQ ID NO: 1141111 - DNA, 25 bp, Homo sapien
gaagacccagacattcagcaatgag

SEQ ID NO: 1141112 - DNA, 25 bp, Homo sapien
ccgtcatattctttactctggcaga

SEQ ID NO: 1141113 - DNA, 25 bp, Homo sapien
ctggctcttcgcctcttcccagagg

SEQ ID NO: 1141114 - DNA, 25 bp, Homo sapien
ctccatcggatgaggagctccgtca

SEQ ID NO: 1141115 - DNA, 25 bp, Homo sapien
ggatgaggagctccgtcatattctt

SEQ ID NO: 1141116 - DNA, 25 bp, Homo sapien
cccataaacctgacttgatgcatct

SEQ ID NO: 1141117 - DNA, 25 bp, Homo sapien
ggacagaagtttggacatagtggtc

SEQ ID NO: 1141118 - DNA, 25 bp, Homo sapien
acttctcccataaacctgacttgat

SEQ ID NO: 1141119 - DNA, 25 bp, Homo sapien
atagtggtctgggaagacttctccc

SEQ ID NO: 1141120 - DNA, 25 bp, Homo sapien
tagttaggcccatagtgtcgtacca

SEQ ID NO: 1141121 - DNA, 25 bp, Homo sapien
ggttagaaccattgacagcagctgt

SEQ ID NO: 1141122 - DNA, 25 bp, Homo sapien
aaagctctgagcaagtatccccacg

SEQ ID NO: 1141123 - DNA, 25 bp, Homo sapien
tcagtgtcacactctcaggtccagg

SEQ ID NO: 1141124 - DNA, 25 bp, Homo sapien
ttaggcctactcctcccacggccat

SEQ ID NO: 1141125 - DNA, 25 bp, Homo sapien
attaggcctactcctcccacggcca

SEQ ID NO: 1141126 - DNA, 25 bp, Homo sapien
aggcctactcctcccacggccatct

SEQ ID NO: 1141127 - DNA, 25 bp, Homo sapien
taggcctactcctcccacggccatc

SEQ ID NO: 1141128 - DNA, 25 bp, Homo sapien
ctagatgaagagcaggtcaaaagac

SEQ ID NO: 1141129 - DNA, 25 bp, Homo sapien
tagatgaagagcaggtcaaaagaca

SEQ ID NO: 1141130 - DNA, 25 bp, Homo sapien
tataccctcttagaatgcttcctca

SEQ ID NO: 1141131 - DNA, 25 bp, Homo sapien
cagcattgtataccctcttagaatg

SEQ ID NO: 1141132 - DNA, 25 bp, Homo sapien
cattgtataccctcttagaatgctt

SEQ ID NO: 1141133 - DNA, 25 bp, Homo sapien
tccacagcattgtataccctcttag

SEQ ID NO: 1141134 - DNA, 25 bp, Homo sapien
attcattcaaaagcacggattgaac

SEQ ID NO: 1141135 - DNA, 25 bp, Homo sapien
aaaagcacggattgaacactatctg

SEQ ID NO: 1141136 - DNA, 25 bp, Homo sapien
cattcaaaagcacggattgaacact

SEQ ID NO: 1141137 - DNA, 25 bp, Homo sapien
gcacggattgaacactatctgtgtg

SEQ ID NO: 1141138 - DNA, 25 bp, Homo sapien
tctcagtccgcatccacaggccagt

SEQ ID NO: 1141139 - DNA, 25 bp, Homo sapien
atttctcagtccgcatccacaggcc

SEQ ID NO: 1141140 - DNA, 25 bp, Homo sapien
tttctcagtccgcatccacaggcca

SEQ ID NO: 1141141 - DNA, 25 bp, Homo sapien
tcatttctcagtccgcatccacagg

SEQ ID NO: 1141142 - DNA, 25 bp, Homo sapien
gctggtgggtcagccttaacatctg

SEQ ID NO: 1141143 - DNA, 25 bp, Homo sapien
tgggtcagccttaacatctgttccc

SEQ ID NO: 1141144 - DNA, 25 bp, Homo sapien
tggtgggtcagccttaacatctgtt

SEQ ID NO: 1141145 - DNA, 25 bp, Homo sapien
ggtgggtcagccttaacatctgttc

SEQ ID NO: 1141146 - DNA, 25 bp, Homo sapien
acaggtggcatatttttgtctggga

SEQ ID NO: 1141147 - DNA, 25 bp, Homo sapien
ctgggactgacttgtgtgctggctt

SEQ ID NO: 1141148 - DNA, 25 bp, Homo sapien
tctgggactgacttgtgtgctggct

SEQ ID NO: 1141149 - DNA, 25 bp, Homo sapien
gtggcatatttttgtctgggactga

SEQ ID NO: 1141150 - DNA, 25 bp, Homo sapien
gaaactgttgtcagaggcttccaca

SEQ ID NO: 1141151 - DNA, 25 bp, Homo sapien
caggtctctcacaggaaactgttgt

SEQ ID NO: 1141152 - DNA, 25 bp, Homo sapien
agagcccaggtctctcacaggaaac

SEQ ID NO: 1141153 - DNA, 25 bp, Homo sapien
tcacaggaaactgttgtcagaggct

SEQ ID NO: 1141154 - DNA, 25 bp, Homo sapien
caactgtatcagctttgaaatatat

SEQ ID NO: 1141155 - DNA, 25 bp, Homo sapien
gactttcacattatagctctttctc

SEQ ID NO: 1141156 - DNA, 25 bp, Homo sapien
gtggactttcacattatagctcttt

SEQ ID NO: 1141157 - DNA, 25 bp, Homo sapien
aagtttggtacaactgtatcagctt

SEQ ID NO: 1141158 - DNA, 25 bp, Homo sapien
catttaaaactctgtcagatctgga

SEQ ID NO: 1141159 - DNA, 25 bp, Homo sapien
gacaggagcagcgtaacagacagtg

SEQ ID NO: 1141160 - DNA, 25 bp, Homo sapien
caaacaagctgctgcatttaaaact

SEQ ID NO: 1141161 - DNA, 25 bp, Homo sapien
ccatgggattaatatctgaaagagc

SEQ ID NO: 1141162 - DNA, 25 bp, Homo sapien
tgtccgttgcccgtgtgtccctgga

SEQ ID NO: 1141163 - DNA, 25 bp, Homo sapien
tgtacatgtccgttgcccgtgtgtc

SEQ ID NO: 1141164 - DNA, 25 bp, Homo sapien
cccttgtacatgtccgttgcccgtg

SEQ ID NO: 1141165 - DNA, 25 bp, Homo sapien
tacatgtccgttgcccgtgtgtccc

SEQ ID NO: 1141166 - DNA, 25 bp, Homo sapien
gtgggagtaacctgcactttctaaa

SEQ ID NO: 1141167 - DNA, 25 bp, Homo sapien
cctcttccatggaaggattgggcat

SEQ ID NO: 1141168 - DNA, 25 bp, Homo sapien
ggtgacccgtgggagtaacctgcac

SEQ ID NO: 1141169 - DNA, 25 bp, Homo sapien
ggaatgctgcactccctggttgcag

SEQ ID NO: 1141170 - DNA, 25 bp, Homo sapien
gcttttcttcatccagagttctcat

SEQ ID NO: 1141171 - DNA, 25 bp, Homo sapien
gcaatccactccaataaatgtccat

SEQ ID NO: 1141172 - DNA, 25 bp, Homo sapien
cagagcaatccactccaataaatgt

SEQ ID NO: 1141173 - DNA, 25 bp, Homo sapien
cttgcttttcttcatccagagttct

SEQ ID NO: 1141174 - DNA, 25 bp, Homo sapien
cccagaggagcaggaaaggaggacc

SEQ ID NO: 1141175 - DNA, 25 bp, Homo sapien
gcccagaggagcaggaaaggaggac

SEQ ID NO: 1141176 - DNA, 25 bp, Homo sapien
tgcccagaggagcaggaaaggagga

SEQ ID NO: 1141177 - DNA, 25 bp, Homo sapien
ctgcccagaggagcaggaaaggagg

SEQ ID NO: 1141178 - DNA, 25 bp, Homo sapien
aggtggcatagggcagcattctgaa

SEQ ID NO: 1141179 - DNA, 25 bp, Homo sapien
tggcatagggcagcattctgaaggt

SEQ ID NO: 1141180 - DNA, 25 bp, Homo sapien
gtgaccgagtgacaaatgctgatgt

SEQ ID NO: 1141181 - DNA, 25 bp, Homo sapien
ccgagtgacaaatgctgatgtgggt

SEQ ID NO: 1141182 - DNA, 25 bp, Homo sapien
gacagagagcaaggaggggatgcag

SEQ ID NO: 1141183 - DNA, 25 bp, Homo sapien
ccagatggagggttctgttcataag

SEQ ID NO: 1141184 - DNA, 25 bp, Homo sapien
ttctgttcataagggaccaggagga

SEQ ID NO: 1141185 - DNA, 25 bp, Homo sapien
aggaggaccaggagtccaatctctg

SEQ ID NO: 1141186 - DNA, 25 bp, Homo sapien
gaggaccaggagtccaatctctggc

SEQ ID NO: 1141187 - DNA, 25 bp, Homo sapien
agagtgatcagtccagctggctggt

SEQ ID NO: 1141188 - DNA, 25 bp, Homo sapien
gaggatgatatttaagcctttctgg

SEQ ID NO: 1141189 - DNA, 25 bp, Homo sapien
ctttctggacaggatagcttctggg

SEQ ID NO: 1141190 - DNA, 25 bp, Homo sapien
cgtgagggaggatgatatttaagcc

SEQ ID NO: 1141191 - DNA, 25 bp, Homo sapien
gggccacaaaggtccgcttgatctc

SEQ ID NO: 1141192 - DNA, 25 bp, Homo sapien
ataattagcattccctgggccacaa

SEQ ID NO: 1141193 - DNA, 25 bp, Homo sapien
ggccacaaaggtccgcttgatctcc

SEQ ID NO: 1141194 - DNA, 25 bp, Homo sapien
gggctcctaggagtgtataattagc

SEQ ID NO: 1141195 - DNA, 25 bp, Homo sapien
gcatgtggccagaactgcaaagccc

SEQ ID NO: 1141196 - DNA, 25 bp, Homo sapien
gaaaaacgtcttttgccctgcagag

SEQ ID NO: 1141197 - DNA, 25 bp, Homo sapien
caagaagcatgggacaggcggtcct

SEQ ID NO: 1141198 - DNA, 25 bp, Homo sapien
ccaggcagtagtcttggggcaagaa

SEQ ID NO: 1141199 - DNA, 25 bp, Homo sapien
gacaagactgtgacttgccacggcc

SEQ ID NO: 1141200 - DNA, 25 bp, Homo sapien
gacagtcagttatgaatccagggag

SEQ ID NO: 1141201 - DNA, 25 bp, Homo sapien
tttggcatccccacgattggaatgt

SEQ ID NO: 1141202 - DNA, 25 bp, Homo sapien
gccacggccagttgggtgactgtat

SEQ ID NO: 1141203 - DNA, 25 bp, Homo sapien
ggcctgagtcagcctggcattgact

SEQ ID NO: 1141204 - DNA, 25 bp, Homo sapien
gcctgagtcagcctggcattgactg

SEQ ID NO: 1141205 - DNA, 25 bp, Homo sapien
cctgagtcagcctggcattgactgc

SEQ ID NO: 1141206 - DNA, 25 bp, Homo sapien
gggctcccacagcccggatataaac

SEQ ID NO: 1141207 - DNA, 25 bp, Homo sapien
tgtgatccgctcaagccttgtggcc

SEQ ID NO: 1141208 - DNA, 25 bp, Homo sapien
caggagtccccagcaaggagtctcc

SEQ ID NO: 1141209 - DNA, 25 bp, Homo sapien
cctcagtctggtgcttgctccctgt

SEQ ID NO: 1141210 - DNA, 25 bp, Homo sapien
agtgtctgcattgggactgaaggtg

SEQ ID NO: 1141211 - DNA, 25 bp, Homo sapien
cttaatgaattgcttgttcccatag

SEQ ID NO: 1141212 - DNA, 25 bp, Homo sapien
gatcccatttgcactccccaaactg

SEQ ID NO: 1141213 - DNA, 25 bp, Homo sapien
gtcttctgatcccatttgcactccc

SEQ ID NO: 1141214 - DNA, 25 bp, Homo sapien
ttaatgaattgcttgttcccatagg

SEQ ID NO: 1141215 - DNA, 25 bp, Homo sapien
acatttatgactccctccttcaggc

SEQ ID NO: 1141216 - DNA, 25 bp, Homo sapien
ttggtaagggccacaggagagcctc

SEQ ID NO: 1141217 - DNA, 25 bp, Homo sapien
aggccacatttatgactccctcctt

SEQ ID NO: 1141218 - DNA, 25 bp, Homo sapien
gagcctcattgaactgtctccactt

SEQ ID NO: 1141219 - DNA, 25 bp, Homo sapien
gtggatagcgaatcctgtcccattc

SEQ ID NO: 1141220 - DNA, 25 bp, Homo sapien
tgactttcccctgaactgtagtgga

SEQ ID NO: 1141221 - DNA, 25 bp, Homo sapien
cctgaactgtagtggatagcgaatc

SEQ ID NO: 1141222 - DNA, 25 bp, Homo sapien
aggcgtttgactttcccctgaactg

SEQ ID NO: 1141223 - DNA, 25 bp, Homo sapien
tggtcaggaagtattggagtgtcta

SEQ ID NO: 1141224 - DNA, 25 bp, Homo sapien
cctgggtgatcatctccttacttgg

SEQ ID NO: 1141225 - DNA, 25 bp, Homo sapien
gggtgatcatctccttacttggaat

SEQ ID NO: 1141226 - DNA, 25 bp, Homo sapien
ttggagtgtctagagcctcctgggt

SEQ ID NO: 1141227 - DNA, 25 bp, Homo sapien
tgctggttgagtaggtgcttgggag

SEQ ID NO: 1141228 - DNA, 25 bp, Homo sapien
ggtgggggcatgaagatagcaggaa

SEQ ID NO: 1141229 - DNA, 25 bp, Homo sapien
tggacctgttgcaataagcttcggg

SEQ ID NO: 1141230 - DNA, 25 bp, Homo sapien
ctgttgcaataagcttcgggtgggt

SEQ ID NO: 1141231 - DNA, 25 bp, Homo sapien
ggacattcccttggtaatactgagg

SEQ ID NO: 1141232 - DNA, 25 bp, Homo sapien
tgacgctcgggtagtggacattccc

SEQ ID NO: 1141233 - DNA, 25 bp, Homo sapien
tgtggtctaccaggagccagtcttg

SEQ ID NO: 1141234 - DNA, 25 bp, Homo sapien
gccagtcttgctgacgctcgggtag

SEQ ID NO: 1141235 - DNA, 25 bp, Homo sapien
caagttctccatgagcagccttggg

SEQ ID NO: 1141236 - DNA, 25 bp, Homo sapien
ccttggtaaccaagttctccatgag

SEQ ID NO: 1141237 - DNA, 25 bp, Homo sapien
gtgctaagctccttggtaaccaagt

SEQ ID NO: 1141238 - DNA, 25 bp, Homo sapien
taaccaagttctccatgagcagcct

SEQ ID NO: 1141239 - DNA, 25 bp, Homo sapien
ggagacattgtgcagtgtgggcatc

SEQ ID NO: 1141240 - DNA, 25 bp, Homo sapien
tcgaggtggtgggagacattgtgca

SEQ ID NO: 1141241 - DNA, 25 bp, Homo sapien
gtgagcatgcagtccctgccttcga

SEQ ID NO: 1141242 - DNA, 25 bp, Homo sapien
gcctgttgtacgtcatctgcactgg

SEQ ID NO: 1141243 - DNA, 25 bp, Homo sapien
tgtcctgaacggtgctcctctaggg

SEQ ID NO: 1141244 - DNA, 25 bp, Homo sapien
ggtgctcctctagggtgcaggatct

SEQ ID NO: 1141245 - DNA, 25 bp, Homo sapien
acttcaaccctaaagcctgtcctga

SEQ ID NO: 1141246 - DNA, 25 bp, Homo sapien
ttgtcgattcctccatctgcactgg

SEQ ID NO: 1141247 - DNA, 25 bp, Homo sapien
cactagccttggtgctcagggggct

SEQ ID NO: 1141248 - DNA, 25 bp, Homo sapien
gatttcccacctgaggttgtgtgaa

SEQ ID NO: 1141249 - DNA, 25 bp, Homo sapien
tccctgccgacagtggacggatggc

SEQ ID NO: 1141250 - DNA, 25 bp, Homo sapien
tgtgaacaactccacctgatccctg

SEQ ID NO: 1141251 - DNA, 25 bp, Homo sapien
gggtcagagagggataagaggcttc

SEQ ID NO: 1141252 - DNA, 25 bp, Homo sapien
ggtcagagagggataagaggcttca

SEQ ID NO: 1141253 - DNA, 25 bp, Homo sapien
tcagagagggataagaggcttcagt

SEQ ID NO: 1141254 - DNA, 25 bp, Homo sapien
tgggggtcagagagggataagaggc

SEQ ID NO: 1141255 - DNA, 25 bp, Homo sapien
aggacagtttcagtggctttgggtg

SEQ ID NO: 1141256 - DNA, 25 bp, Homo sapien
ggacagtttcagtggctttgggtgg

SEQ ID NO: 1141257 - DNA, 25 bp, Homo sapien
gtggatgctgccctctcattcccca

SEQ ID NO: 1141258 - DNA, 25 bp, Homo sapien
ttccccaagctacatcccctgcaga

SEQ ID NO: 1141259 - DNA, 25 bp, Homo sapien
gatgtacaccgcgtcctggttccag

SEQ ID NO: 1141260 - DNA, 25 bp, Homo sapien
aatttgttccggcttccaatgtggc

SEQ ID NO: 1141261 - DNA, 25 bp, Homo sapien
cagctcctgagtgacgttatccaga

SEQ ID NO: 1141262 - DNA, 25 bp, Homo sapien
cagatccatggattgccaagcctgg

SEQ ID NO: 1141263 - DNA, 25 bp, Homo sapien
gcatggagaagaacatgtgtgggtg

SEQ ID NO: 1141264 - DNA, 25 bp, Homo sapien
ggagaagaacatgtgtgggtggcac

SEQ ID NO: 1141265 - DNA, 25 bp, Homo sapien
tctccctgattttcgcctatggctc

SEQ ID NO: 1141266 - DNA, 25 bp, Homo sapien
agggtctccctgattttcgcctatg

SEQ ID NO: 1141267 - DNA, 25 bp, Homo sapien
gacatagtcacacacatagcaagcc

SEQ ID NO: 1141268 - DNA, 25 bp, Homo sapien
agcaactcagtccactccccatgtg

SEQ ID NO: 1141269 - DNA, 25 bp, Homo sapien
cactccccatgtgccaggacatagt

SEQ ID NO: 1141270 - DNA, 25 bp, Homo sapien
caagccaccggcatgttggtgacag

SEQ ID NO: 1141271 - DNA, 25 bp, Homo sapien
cctgggagttagactgcaaagcccc

SEQ ID NO: 1141272 - DNA, 25 bp, Homo sapien
gacctgggagttagactgcaaagcc

SEQ ID NO: 1141273 - DNA, 25 bp, Homo sapien
gagaagacctgggagttagactgca

SEQ ID NO: 1141274 - DNA, 25 bp, Homo sapien
ggagttagactgcaaagccccaggg

SEQ ID NO: 1141275 - DNA, 25 bp, Homo sapien
gttgtggcctgggagggtagcagcc

SEQ ID NO: 1141276 - DNA, 25 bp, Homo sapien
tgctgatctgcccgtgctcctgtgg

SEQ ID NO: 1141277 - DNA, 25 bp, Homo sapien
caggtggacatttgctgttgtggcc

SEQ ID NO: 1141278 - DNA, 25 bp, Homo sapien
agctcccaggtggacatttgctgtt

SEQ ID NO: 1141279 - DNA, 25 bp, Homo sapien
cttccacgagaacagaagaaccgct

SEQ ID NO: 1141280 - DNA, 25 bp, Homo sapien
gcttctgttacatctggtaagttca

SEQ ID NO: 1141281 - DNA, 25 bp, Homo sapien
gaagaaccgcttctgttacatctgg

SEQ ID NO: 1141282 - DNA, 25 bp, Homo sapien
tccacgagaacagaagaaccgcttc

SEQ ID NO: 1141283 - DNA, 25 bp, Homo sapien
cttcaggactcatcaaaacaaagga

SEQ ID NO: 1141284 - DNA, 25 bp, Homo sapien
tccttcaggactcatcaaaacaaag

SEQ ID NO: 1141285 - DNA, 25 bp, Homo sapien
tcaggactcatcaaaacaaaggaca

SEQ ID NO: 1141286 - DNA, 25 bp, Homo sapien
ttcaggactcatcaaaacaaaggac

SEQ ID NO: 1141287 - DNA, 25 bp, Homo sapien
aaaggacatcagtgacatagagcac

SEQ ID NO: 1141288 - DNA, 25 bp, Homo sapien
gacatcagtgacatagagcacagga

SEQ ID NO: 1141289 - DNA, 25 bp, Homo sapien
ggcttgtttgaggatagtaattgtt

SEQ ID NO: 1141290 - DNA, 25 bp, Homo sapien
tcagtgacatagagcacaggaggaa

SEQ ID NO: 1141291 - DNA, 25 bp, Homo sapien
ggccctcatccgagaccagagacag

SEQ ID NO: 1141292 - DNA, 25 bp, Homo sapien
gtaacacccagtcctgcatccatgg

SEQ ID NO: 1141293 - DNA, 25 bp, Homo sapien
catgatggccctcatccgagaccag

SEQ ID NO: 1141294 - DNA, 25 bp, Homo sapien
tgcagtggtaacacccagtcctgca

SEQ ID NO: 1141295 - DNA, 25 bp, Homo sapien
gatgtgagttgaaaccagagtgtcc

SEQ ID NO: 1141296 - DNA, 25 bp, Homo sapien
ccaggatgtgagttgaaaccagagt

SEQ ID NO: 1141297 - DNA, 25 bp, Homo sapien
gtgagttgaaaccagagtgtcctcc

SEQ ID NO: 1141298 - DNA, 25 bp, Homo sapien
ccccccaggatgtgagttgaaacca

SEQ ID NO: 1141299 - DNA, 25 bp, Homo sapien
tcttaatagccatctgtgagtaaca

SEQ ID NO: 1141300 - DNA, 25 bp, Homo sapien
tagccatctgtgagtaacacaaagg

SEQ ID NO: 1141301 - DNA, 25 bp, Homo sapien
taatagccatctgtgagtaacacaa

SEQ ID NO: 1141302 - DNA, 25 bp, Homo sapien
gccatctgtgagtaacacaaaggga

SEQ ID NO: 1141303 - DNA, 25 bp, Homo sapien
aggataatacaatagagcaggaaat

SEQ ID NO: 1141304 - DNA, 25 bp, Homo sapien
ctttgaggataacagaggataatac

SEQ ID NO: 1141305 - DNA, 25 bp, Homo sapien
aggaaattggactactgggtttcat

SEQ ID NO: 1141306 - DNA, 25 bp, Homo sapien
caggaaattggactactgggtttca

SEQ ID NO: 1141307 - DNA, 25 bp, Homo sapien
tccttgtctgcaccagtttgctgca

SEQ ID NO: 1141308 - DNA, 25 bp, Homo sapien
agtttgctgcattcataggcactac

SEQ ID NO: 1141309 - DNA, 25 bp, Homo sapien
taggcactaccacactttattaact

SEQ ID NO: 1141310 - DNA, 25 bp, Homo sapien
ctgctgtccttgtctgcaccagttt

SEQ ID NO: 1141311 - DNA, 25 bp, Homo sapien
ttaaatctgtgccacatatttctgt

SEQ ID NO: 1141312 - DNA, 25 bp, Homo sapien
ttctgtttcatttctgccaaaaaga

SEQ ID NO: 1141313 - DNA, 25 bp, Homo sapien
taaatctgtgccacatatttctgtt

SEQ ID NO: 1141314 - DNA, 25 bp, Homo sapien
tatttctgtttcatttctgccaaaa

SEQ ID NO: 1141315 - DNA, 25 bp, Homo sapien
cagctgaagtgaccactctcgcagc

SEQ ID NO: 1141316 - DNA, 25 bp, Homo sapien
tctcgcagccaattccactttgtct

SEQ ID NO: 1141317 - DNA, 25 bp, Homo sapien
cagatggtttccaaccgcctggatg

SEQ ID NO: 1141318 - DNA, 25 bp, Homo sapien
ccacctcctcgcctgcagctgaagt

SEQ ID NO: 1141319 - DNA, 25 bp, Homo sapien
ccaagttccttaggtgagggtcatc

SEQ ID NO: 1141320 - DNA, 25 bp, Homo sapien
acaaatagccaagttccttaggtga

SEQ ID NO: 1141321 - DNA, 25 bp, Homo sapien
tagccaagttccttaggtgagggtc

SEQ ID NO: 1141322 - DNA, 25 bp, Homo sapien
aatagccaagttccttaggtgaggg

SEQ ID NO: 1141323 - DNA, 25 bp, Homo sapien
tttgcaacatttgagccaggtccct

SEQ ID NO: 1141324 - DNA, 25 bp, Homo sapien
tcattccaggtctgacgcctttcgc

SEQ ID NO: 1141325 - DNA, 25 bp, Homo sapien
tgatagtcccagagtagcaccaaca

SEQ ID NO: 1141326 - DNA, 25 bp, Homo sapien
gcactcagagcggtctcattccagg

SEQ ID NO: 1141327 - DNA, 25 bp, Homo sapien
ccatgactgagagtgatcccacagc

SEQ ID NO: 1141328 - DNA, 25 bp, Homo sapien
tcccacagccacggctttactgatt

SEQ ID NO: 1141329 - DNA, 25 bp, Homo sapien
cttcaccatgactgagagtgatccc

SEQ ID NO: 1141330 - DNA, 25 bp, Homo sapien
atgactgagagtgatcccacagcca

SEQ ID NO: 1141331 - DNA, 25 bp, Homo sapien
ttctcctcagtgcttcttttgacct

SEQ ID NO: 1141332 - DNA, 25 bp, Homo sapien
ctcccagttcatgggtgtgccctga

SEQ ID NO: 1141333 - DNA, 25 bp, Homo sapien
gtgcttcttttgacctcccagttca

SEQ ID NO: 1141334 - DNA, 25 bp, Homo sapien
gttcatgggtgtgccctgaagagtc

SEQ ID NO: 1141335 - DNA, 25 bp, Homo sapien
aagggctgtccctgaaatgtgctgg

SEQ ID NO: 1141336 - DNA, 25 bp, Homo sapien
ggagtgtacaccttgatctttgagc

SEQ ID NO: 1141337 - DNA, 25 bp, Homo sapien
cttctgactcaggaaacggcagtaa

SEQ ID NO: 1141338 - DNA, 25 bp, Homo sapien
taaacatgcttgcaacttcgtgctc

SEQ ID NO: 1141339 - DNA, 25 bp, Homo sapien
ttgttattgatgttactgcatattc

SEQ ID NO: 1141340 - DNA, 25 bp, Homo sapien
gggccactcaacatagcctttattg

SEQ ID NO: 1141341 - DNA, 25 bp, Homo sapien
tgtgaccactagatgatatcaattt

SEQ ID NO: 1141342 - DNA, 25 bp, Homo sapien
tctttttacaataactttgtgacca

SEQ ID NO: 1141343 - DNA, 25 bp, Homo sapien
ttctgggatgatgcgatgaagcagc

SEQ ID NO: 1141344 - DNA, 25 bp, Homo sapien
catgggtggtctttaccagctggct

SEQ ID NO: 1141345 - DNA, 25 bp, Homo sapien
ggctctgttggctttcccctgctta

SEQ ID NO: 1141346 - DNA, 25 bp, Homo sapien
aagaaggctgtagaacatggttctg

SEQ ID NO: 1141347 - DNA, 25 bp, Homo sapien
cggcgatcaggcgccataggcacct

SEQ ID NO: 1141348 - DNA, 25 bp, Homo sapien
cccagcggcgatggctgtggcggta

SEQ ID NO: 1141349 - DNA, 25 bp, Homo sapien
gatcaggcgccataggcacctctcg

SEQ ID NO: 1141350 - DNA, 25 bp, Homo sapien
cggcgatggctgtggcggtagcggc

SEQ ID NO: 1141351 - DNA, 25 bp, Homo sapien
cacctcctcctcctcgccatagaga

SEQ ID NO: 1141352 - DNA, 25 bp, Homo sapien
ttgtgtcgctgagctcgcgctccac

SEQ ID NO: 1141353 - DNA, 25 bp, Homo sapien
tccacctcctcctcctcgccataga

SEQ ID NO: 1141354 - DNA, 25 bp, Homo sapien
gctccacctcctcctcctcgccata

SEQ ID NO: 1141355 - DNA, 25 bp, Homo sapien
gatgccaagcatcagaatgttatac

SEQ ID NO: 1141356 - DNA, 25 bp, Homo sapien
ctcgatgccaagcatcagaatgtta

SEQ ID NO: 1141357 - DNA, 25 bp, Homo sapien
ccaagcatcagaatgttatacttga

SEQ ID NO: 1141358 - DNA, 25 bp, Homo sapien
tcagaatgttatacttgattgaaga

SEQ ID NO: 1141359 - DNA, 25 bp, Homo sapien
ctggagtagtgagtgcacaaggggg

SEQ ID NO: 1141360 - DNA, 25 bp, Homo sapien
tggagtagtgagtgcacaagggggt

SEQ ID NO: 1141361 - DNA, 25 bp, Homo sapien
gttgcaagcccaaacttcacaaatt

SEQ ID NO: 1141362 - DNA, 25 bp, Homo sapien
ggattgctcctcaattctctaatag

SEQ ID NO: 1141363 - DNA, 25 bp, Homo sapien
tacattacactgcaatagttgatac

SEQ ID NO: 1141364 - DNA, 25 bp, Homo sapien
caggattgctcctcaattctctaat

SEQ ID NO: 1141365 - DNA, 25 bp, Homo sapien
gttgatactgatagtcaggattgct

SEQ ID NO: 1141366 - DNA, 25 bp, Homo sapien
ccaagttgaagttcctggagggtat

SEQ ID NO: 1141367 - DNA, 25 bp, Homo sapien
caagttgaagttcctggagggtatt

SEQ ID NO: 1141368 - DNA, 25 bp, Homo sapien
agttgaagttcctggagggtattca

SEQ ID NO: 1141369 - DNA, 25 bp, Homo sapien
gttgaagttcctggagggtattcac

SEQ ID NO: 1141370 - DNA, 25 bp, Homo sapien
agatgttgttagtagctctatagag

SEQ ID NO: 1141371 - DNA, 25 bp, Homo sapien
cagatgttgttagtagctctataga

SEQ ID NO: 1141372 - DNA, 25 bp, Homo sapien
gatgttgttagtagctctatagagt

SEQ ID NO: 1141373 - DNA, 25 bp, Homo sapien
actcccgaagtcataagttcagcaa

SEQ ID NO: 1141374 - DNA, 25 bp, Homo sapien
gccaaagtcataactgctatgaaat

SEQ ID NO: 1141375 - DNA, 25 bp, Homo sapien
aggagcactcccgaagtcataagtt

SEQ ID NO: 1141376 - DNA, 25 bp, Homo sapien
atagccaaagtcataactgctatga

SEQ ID NO: 1141377 - DNA, 25 bp, Homo sapien
cttgaaagaacatttctctcatttt

SEQ ID NO: 1141378 - DNA, 25 bp, Homo sapien
gaaagaacatttctctcattttaga

SEQ ID NO: 1141379 - DNA, 25 bp, Homo sapien
aagaacatttctctcattttagaaa

SEQ ID NO: 1141380 - DNA, 25 bp, Homo sapien
gaacatttctctcattttagaaaag

SEQ ID NO: 1141381 - DNA, 25 bp, Homo sapien
ttctcttcatatgcattgcctgtgc

SEQ ID NO: 1141382 - DNA, 25 bp, Homo sapien
tcatgactgaatgctggctttctct

SEQ ID NO: 1141383 - DNA, 25 bp, Homo sapien
ggccatgcaaatgatcacaatattt

SEQ ID NO: 1141384 - DNA, 25 bp, Homo sapien
aggaggaaccagaaccaaggccatg

SEQ ID NO: 1141385 - DNA, 25 bp, Homo sapien
gccacatcagacagccaggtgtgca

SEQ ID NO: 1141386 - DNA, 25 bp, Homo sapien
gcagggctaggagggcccgagtctc

SEQ ID NO: 1141387 - DNA, 25 bp, Homo sapien
ctggagggccacatcagacagccag

SEQ ID NO: 1141388 - DNA, 25 bp, Homo sapien
gccaggtgtgcaggcgcagggctag

SEQ ID NO: 1141389 - DNA, 25 bp, Homo sapien
ctcagacataccacatgttccctca

SEQ ID NO: 1141390 - DNA, 25 bp, Homo sapien
tcagacataccacatgttccctcat

SEQ ID NO: 1141391 - DNA, 25 bp, Homo sapien
ttgtattgctacagccagttccctt

SEQ ID NO: 1141392 - DNA, 25 bp, Homo sapien
ggcctggagtggttccaaggctggg

SEQ ID NO: 1141393 - DNA, 25 bp, Homo sapien
caggcctggagtggttccaaggctg

SEQ ID NO: 1141394 - DNA, 25 bp, Homo sapien
gcctggagtggttccaaggctgggg

SEQ ID NO: 1141395 - DNA, 25 bp, Homo sapien
gacaggcctggagtggttccaaggc

SEQ ID NO: 1141396 - DNA, 25 bp, Homo sapien
tctggacaagcacaaaggcttctac

SEQ ID NO: 1141397 - DNA, 25 bp, Homo sapien
tgggcctctggacaagcacaaaggc

SEQ ID NO: 1141398 - DNA, 25 bp, Homo sapien
ggacaagcacaaaggcttctactgg

SEQ ID NO: 1141399 - DNA, 25 bp, Homo sapien
ggcctctggacaagcacaaaggctt

SEQ ID NO: 1141400 - DNA, 25 bp, Homo sapien
gctccttaggcagagaagtgctgat

SEQ ID NO: 1141401 - DNA, 25 bp, Homo sapien
gagctccttaggcagagaagtgctg

SEQ ID NO: 1141402 - DNA, 25 bp, Homo sapien
agctccttaggcagagaagtgctga

SEQ ID NO: 1141403 - DNA, 25 bp, Homo sapien
tgcctggcattgaggacctgcatct

SEQ ID NO: 1141404 - DNA, 25 bp, Homo sapien
ttgcctggcattgaggacctgcatc

SEQ ID NO: 1141405 - DNA, 25 bp, Homo sapien
cactactgttgagaagtcgcacccc

SEQ ID NO: 1141406 - DNA, 25 bp, Homo sapien
gttgagaagtcgcaccccttgcctg

SEQ ID NO: 1141407 - DNA, 25 bp, Homo sapien
ccattttgagccacagtgatccagc

SEQ ID NO: 1141408 - DNA, 25 bp, Homo sapien
tattggcagagcgtaaataaggaga

SEQ ID NO: 1141409 - DNA, 25 bp, Homo sapien
cttgggaagtaatggtgtggatttc

SEQ ID NO: 1141410 - DNA, 25 bp, Homo sapien
gaaatacagagctagcaggctgact

SEQ ID NO: 1141411 - DNA, 25 bp, Homo sapien
cttaatgtggacatcctatcagcct

SEQ ID NO: 1141412 - DNA, 25 bp, Homo sapien
ctatagacgagtaccaacgtgcccg

SEQ ID NO: 1141413 - DNA, 25 bp, Homo sapien
tcagcacgtgggagtttggatctgc

SEQ ID NO: 1141414 - DNA, 25 bp, Homo sapien
gacatcctatcagcctggcacacta

SEQ ID NO: 1141415 - DNA, 25 bp, Homo sapien
aaagggtgtatttggcagatcaagg

SEQ ID NO: 1141416 - DNA, 25 bp, Homo sapien
gacttccacgctaatggacttcaca

SEQ ID NO: 1141417 - DNA, 25 bp, Homo sapien
cacagaagtgtgacagagtagatcc

SEQ ID NO: 1141418 - DNA, 25 bp, Homo sapien
tccaggaaggcacatttgtgacttc

SEQ ID NO: 1141419 - DNA, 25 bp, Homo sapien
aattcacttaggttcttatgtctag

SEQ ID NO: 1141420 - DNA, 25 bp, Homo sapien
ggttcttatgtctagccaccttacc

SEQ ID NO: 1141421 - DNA, 25 bp, Homo sapien
taattctaattcacttaggttctta

SEQ ID NO: 1141422 - DNA, 25 bp, Homo sapien
gccaccttaccagatgatgttttgt

SEQ ID NO: 1141423 - DNA, 25 bp, Homo sapien
ccggctctgcggcctgcgctgggct

SEQ ID NO: 1141424 - DNA, 25 bp, Homo sapien
gcggcctgcgctgggctcctggaga

SEQ ID NO: 1141425 - DNA, 25 bp, Homo sapien
ccgagctccgcggcccgcggtctcg

SEQ ID NO: 1141426 - DNA, 25 bp, Homo sapien
gtctcggctcacagcggccccggct

SEQ ID NO: 1141427 - DNA, 25 bp, Homo sapien
ccagggccggctcaattttttgtga

SEQ ID NO: 1141428 - DNA, 25 bp, Homo sapien
ttgcgctctccgaggcgcaaccgga

SEQ ID NO: 1141429 - DNA, 25 bp, Homo sapien
gccggctcaattttttgtgagcgag

SEQ ID NO: 1141430 - DNA, 25 bp, Homo sapien
tgcctgttgcgctctccgaggcgca

SEQ ID NO: 1141431 - DNA, 25 bp, Homo sapien
tatatttgcttgcaagtgactccct

SEQ ID NO: 1141432 - DNA, 25 bp, Homo sapien
ccagcagctgggtacagatttctga

SEQ ID NO: 1141433 - DNA, 25 bp, Homo sapien
tgtgaatcgttaacatgtctggagt

SEQ ID NO: 1141434 - DNA, 25 bp, Homo sapien
cagtcattaattacccctgaaacac

SEQ ID NO: 1141435 - DNA, 25 bp, Homo sapien
ggagccactcttcaacaggaacaaa

SEQ ID NO: 1141436 - DNA, 25 bp, Homo sapien
ggaaattagaagaggagccactctt

SEQ ID NO: 1141437 - DNA, 25 bp, Homo sapien
tcacctaccagactcctaaaacctc

SEQ ID NO: 1141438 - DNA, 25 bp, Homo sapien
accagactcctaaaacctcaaggag

SEQ ID NO: 1141439 - DNA, 25 bp, Homo sapien
tgaggaaggagcaggtactgtttct

SEQ ID NO: 1141440 - DNA, 25 bp, Homo sapien
ttgaggaaggagcaggtactgtttc

SEQ ID NO: 1141441 - DNA, 25 bp, Homo sapien
cttgaggaaggagcaggtactgttt

SEQ ID NO: 1141442 - DNA, 25 bp, Homo sapien
gaggaaggagcaggtactgtttctc

SEQ ID NO: 1141443 - DNA, 25 bp, Homo sapien
gacttgaatagtaagaatatccaga

SEQ ID NO: 1141444 - DNA, 25 bp, Homo sapien
aatgacttgaatagtaagaatatcc

SEQ ID NO: 1141445 - DNA, 25 bp, Homo sapien
ttgtctgtgagattttttcgaatga

SEQ ID NO: 1141446 - DNA, 25 bp, Homo sapien
ccagaataagtggattcggtatcca

SEQ ID NO: 1141447 - DNA, 25 bp, Homo sapien
tccctgagttggactctgactaaaa

SEQ ID NO: 1141448 - DNA, 25 bp, Homo sapien
cctgagttggactctgactaaaatt

SEQ ID NO: 1141449 - DNA, 25 bp, Homo sapien
gagttggactctgactaaaattacc

SEQ ID NO: 1141450 - DNA, 25 bp, Homo sapien
tggactctgactaaaattaccaaag

SEQ ID NO: 1141451 - DNA, 25 bp, Homo sapien
ggtgtcatcaggcatatcaagtttg

SEQ ID NO: 1141452 - DNA, 25 bp, Homo sapien
catcaggcatatcaagtttggtgca

SEQ ID NO: 1141453 - DNA, 25 bp, Homo sapien
caggcatatcaagtttggtgcattt

SEQ ID NO: 1141454 - DNA, 25 bp, Homo sapien
tgtcatcaggcatatcaagtttggt

SEQ ID NO: 1141455 - DNA, 25 bp, Homo sapien
catctgcttggaacctggccagtct

SEQ ID NO: 1141456 - DNA, 25 bp, Homo sapien
atctgcttggaacctggccagtctt

SEQ ID NO: 1141457 - DNA, 25 bp, Homo sapien
tctgcttggaacctggccagtcttc

SEQ ID NO: 1141458 - DNA, 25 bp, Homo sapien
tctgtccgagtagaatcatttccca

SEQ ID NO: 1141459 - DNA, 25 bp, Homo sapien
gaggttgaatggtgacagacttttc

SEQ ID NO: 1141460 - DNA, 25 bp, Homo sapien
tattccggggtgacttgtgtctctc

SEQ ID NO: 1141461 - DNA, 25 bp, Homo sapien
tgaccctctgccgtctttattccgg

SEQ ID NO: 1141462 - DNA, 25 bp, Homo sapien
cagagaaaacataatgtgatctttc

SEQ ID NO: 1141463 - DNA, 25 bp, Homo sapien
gctgattcattgacataacattgat

SEQ ID NO: 1141464 - DNA, 25 bp, Homo sapien
catcccctgggttgaaaagccttga

SEQ ID NO: 1141465 - DNA, 25 bp, Homo sapien
cataacattgattatcatcccctgg

SEQ ID NO: 1141466 - DNA, 25 bp, Homo sapien
cagtgaggatgacatgacacaggtc

SEQ ID NO: 1141467 - DNA, 25 bp, Homo sapien
tgacatgacacaggtcatttgtaaa

SEQ ID NO: 1141468 - DNA, 25 bp, Homo sapien
ggatgacatgacacaggtcatttgt

SEQ ID NO: 1141469 - DNA, 25 bp, Homo sapien
acatgacacaggtcatttgtaaaag

SEQ ID NO: 1141470 - DNA, 25 bp, Homo sapien
ggcccaggtagcgtttgcaatccag

SEQ ID NO: 1141471 - DNA, 25 bp, Homo sapien
tgcacaatgccctggtaattccggt

SEQ ID NO: 1141472 - DNA, 25 bp, Homo sapien
aaagtgcccaggtccctatgagcag

SEQ ID NO: 1141473 - DNA, 25 bp, Homo sapien
gatatgctgtgctccgaggtgcctg

SEQ ID NO: 1141474 - DNA, 25 bp, Homo sapien
cagcaaaatctcaacctgggtgaga

SEQ ID NO: 1141475 - DNA, 25 bp, Homo sapien
atataatttactgcccaaaccaggc

SEQ ID NO: 1141476 - DNA, 25 bp, Homo sapien
cagactctggtcctagctcttggca

SEQ ID NO: 1141477 - DNA, 25 bp, Homo sapien
caataactttgagaacaagcccagc

SEQ ID NO: 1141478 - DNA, 25 bp, Homo sapien
caaggatcagttagggtggcagcaa

SEQ ID NO: 1141479 - DNA, 25 bp, Homo sapien
cacagacatgtgacttggacaccag

SEQ ID NO: 1141480 - DNA, 25 bp, Homo sapien
tagcacaagccaagccagaggaatg

SEQ ID NO: 1141481 - DNA, 25 bp, Homo sapien
gatcatcccgttctcgtagcacaag

SEQ ID NO: 1141482 - DNA, 25 bp, Homo sapien
gactgtctcctgctcggctttattg

SEQ ID NO: 1141483 - DNA, 25 bp, Homo sapien
ggctttattgctgccacaatctgaa

SEQ ID NO: 1141484 - DNA, 25 bp, Homo sapien
cactgagaccacagccggatttttc

SEQ ID NO: 1141485 - DNA, 25 bp, Homo sapien
tctaccactttaactgcagcaaaac

SEQ ID NO: 1141486 - DNA, 25 bp, Homo sapien
cttattaaaggcagggagaggagga

SEQ ID NO: 1141487 - DNA, 25 bp, Homo sapien
agggagaggaggaacaccaatggtc

SEQ ID NO: 1141488 - DNA, 25 bp, Homo sapien
gcagggagaggaggaacaccaatgg

SEQ ID NO: 1141489 - DNA, 25 bp, Homo sapien
aggcagggagaggaggaacaccaat

SEQ ID NO: 1141490 - DNA, 25 bp, Homo sapien
ctaactcaggctctccacgagaggg

SEQ ID NO: 1141491 - DNA, 25 bp, Homo sapien
gtgaccaggcccacacaatgccagg

SEQ ID NO: 1141492 - DNA, 25 bp, Homo sapien
gctctggcagactggctgacacttg

SEQ ID NO: 1141493 - DNA, 25 bp, Homo sapien
gggcatctggctctccctgagggct

SEQ ID NO: 1141494 - DNA, 25 bp, Homo sapien
ttagcccaaggatcggcaggtgacc

SEQ ID NO: 1141495 - DNA, 25 bp, Homo sapien
ccagctgtagccgctggcaggaggc

SEQ ID NO: 1141496 - DNA, 25 bp, Homo sapien
cagctgtagccgctggcaggaggca

SEQ ID NO: 1141497 - DNA, 25 bp, Homo sapien
agctgtagccgctggcaggaggcag

SEQ ID NO: 1141498 - DNA, 25 bp, Homo sapien
cccagctgtagccgctggcaggagg

SEQ ID NO: 1141499 - DNA, 25 bp, Homo sapien
ctctgggctccgggcgcaaggctgt

SEQ ID NO: 1141500 - DNA, 25 bp, Homo sapien
ggcagacgccgtgcgagggaagcca

SEQ ID NO: 1141501 - DNA, 25 bp, Homo sapien
ggctccgggcgcaaggctgtgggca

SEQ ID NO: 1141502 - DNA, 25 bp, Homo sapien
aaggctgtgggcagacgccgtgcga

SEQ ID NO: 1141503 - DNA, 25 bp, Homo sapien
cagggaaaccaacagcacagcattc

SEQ ID NO: 1141504 - DNA, 25 bp, Homo sapien
cagcattcagggagtgtgacccatc

SEQ ID NO: 1141505 - DNA, 25 bp, Homo sapien
tgcagcaagaatcctccagggaaac

SEQ ID NO: 1141506 - DNA, 25 bp, Homo sapien
gtcacacccagccacttgtggtgag

SEQ ID NO: 1141507 - DNA, 25 bp, Homo sapien
ggacaagccctgcagggtatcccca

SEQ ID NO: 1141508 - DNA, 25 bp, Homo sapien
tacacaaaagcttcggcagccaaat

SEQ ID NO: 1141509 - DNA, 25 bp, Homo sapien
aggctggaaagcgtacctggctttt

SEQ ID NO: 1141510 - DNA, 25 bp, Homo sapien
tttgaaccaatatcggaaggctgga

SEQ ID NO: 1141511 - DNA, 25 bp, Homo sapien
tacctggacgtgtgggcttcactgc

SEQ ID NO: 1141512 - DNA, 25 bp, Homo sapien
tccgtaagagctaaatctacctgga

SEQ ID NO: 1141513 - DNA, 25 bp, Homo sapien
tctgacagtcaggtacatttgtggc

SEQ ID NO: 1141514 - DNA, 25 bp, Homo sapien
ctgcttcccagaagagtccgtaaga

SEQ ID NO: 1141515 - DNA, 25 bp, Homo sapien
gagaagccaatgctggagctgaaga

SEQ ID NO: 1141516 - DNA, 25 bp, Homo sapien
tgataaacgcctccaagagtgtgca

SEQ ID NO: 1141517 - DNA, 25 bp, Homo sapien
gagaagcaacaggatgactcagagc

SEQ ID NO: 1141518 - DNA, 25 bp, Homo sapien
ggctctcacagtcctcccaaagagt

SEQ ID NO: 1141519 - DNA, 25 bp, Homo sapien
tgacagcccctcagagcaaagtcct

SEQ ID NO: 1141520 - DNA, 25 bp, Homo sapien
tcagcagatgctctccaaatgggcc

SEQ ID NO: 1141521 - DNA, 25 bp, Homo sapien
aatgggccagctctccaaataagcc

SEQ ID NO: 1141522 - DNA, 25 bp, Homo sapien
tgccagccctgggtgtcacaggcat

SEQ ID NO: 1141523 - DNA, 25 bp, Homo sapien
tacattgtagactttcagcccggcc

SEQ ID NO: 1141524 - DNA, 25 bp, Homo sapien
tgggttatagatggtgaaatctttg

SEQ ID NO: 1141525 - DNA, 25 bp, Homo sapien
tttcagcccggccatatgcttggct

SEQ ID NO: 1141526 - DNA, 25 bp, Homo sapien
ccatatgcttggctgctcggaattt

SEQ ID NO: 1141527 - DNA, 25 bp, Homo sapien
gaaccaaacgtaccatgaatcttaa

SEQ ID NO: 1141528 - DNA, 25 bp, Homo sapien
tagtcacccaactgtgcccctgtga

SEQ ID NO: 1141529 - DNA, 25 bp, Homo sapien
tgtgagcaccacggacaccctttca

SEQ ID NO: 1141530 - DNA, 25 bp, Homo sapien
gcccagagaagaagtcgaaccaaac

SEQ ID NO: 1141531 - DNA, 25 bp, Homo sapien
tccgcttctttactcgccgttcatg

SEQ ID NO: 1141532 - DNA, 25 bp, Homo sapien
ctgcagcaatcatggcccgggactg

SEQ ID NO: 1141533 - DNA, 25 bp, Homo sapien
ggcctcttcataatacaactcgttg

SEQ ID NO: 1141534 - DNA, 25 bp, Homo sapien
gcttgagtccctgcgccgagcagct

SEQ ID NO: 1141535 - DNA, 25 bp, Homo sapien
gatgcgcaggtacttctggagagcc

SEQ ID NO: 1141536 - DNA, 25 bp, Homo sapien
catgctgtggtagttctgctgccgg

SEQ ID NO: 1141537 - DNA, 25 bp, Homo sapien
catgccgttggtgatgcagaaggcc

SEQ ID NO: 1141538 - DNA, 25 bp, Homo sapien
gcctgggcggcctccctagggtcca

SEQ ID NO: 1141539 - DNA, 25 bp, Homo sapien
cgctataattcaactggccaagctc

SEQ ID NO: 1141540 - DNA, 25 bp, Homo sapien
gattttatcacttctagtaacacgc

SEQ ID NO: 1141541 - DNA, 25 bp, Homo sapien
ccaagctcagtgacaagccaggatg

SEQ ID NO: 1141542 - DNA, 25 bp, Homo sapien
tagagatgcctttcgattttatcac

SEQ ID NO: 1141543 - DNA, 25 bp, Homo sapien
tgtagagagccagcggtccttgtca

SEQ ID NO: 1141544 - DNA, 25 bp, Homo sapien
tctcagactgtaagcgaaggacaaa

SEQ ID NO: 1141545 - DNA, 25 bp, Homo sapien
cacattgactacgaggctgaagtcc

SEQ ID NO: 1141546 - DNA, 25 bp, Homo sapien
cactgaggtaccgttctaggaaggc

SEQ ID NO: 1141547 - DNA, 25 bp, Homo sapien
tttaataaagccacaaatatagaac

SEQ ID NO: 1141548 - DNA, 25 bp, Homo sapien
taataaagccacaaatatagaactt

SEQ ID NO: 1141549 - DNA, 25 bp, Homo sapien
tttttaataaagccacaaatataga

SEQ ID NO: 1141550 - DNA, 25 bp, Homo sapien
ttaataaagccacaaatatagaact

SEQ ID NO: 1141551 - DNA, 25 bp, Homo sapien
aacaatgctgggactgacttgaggc

SEQ ID NO: 1141552 - DNA, 25 bp, Homo sapien
gagaagtcccatcgacaaaagtcag

SEQ ID NO: 1141553 - DNA, 25 bp, Homo sapien
gaattagttgtaaggcgaggctccc

SEQ ID NO: 1141554 - DNA, 25 bp, Homo sapien
acttgaggcttcacacagagccgga

SEQ ID NO: 1141555 - DNA, 25 bp, Homo sapien
gatccaaagccaattttgattttta

SEQ ID NO: 1141556 - DNA, 25 bp, Homo sapien
tactttttcaggtacaggtgtatta

SEQ ID NO: 1141557 - DNA, 25 bp, Homo sapien
caaaatactgtaccacttgtggagt

SEQ ID NO: 1141558 - DNA, 25 bp, Homo sapien
caggtgtattacaaagatccaaagc

SEQ ID NO: 1141559 - DNA, 25 bp, Homo sapien
tgtatccatgacgtagcaacctctg

SEQ ID NO: 1141560 - DNA, 25 bp, Homo sapien
tggcacttggaactgcactgtatcc

SEQ ID NO: 1141561 - DNA, 25 bp, Homo sapien
tgaagggatctaacggcaaaaacta

SEQ ID NO: 1141562 - DNA, 25 bp, Homo sapien
tagttgaatagtacatcttggctcc

SEQ ID NO: 1141563 - DNA, 25 bp, Homo sapien
caagctataaagaggttgaaagtgc

SEQ ID NO: 1141564 - DNA, 25 bp, Homo sapien
gaaatcctgtctactataatgtgaa

SEQ ID NO: 1141565 - DNA, 25 bp, Homo sapien
caattgtgggatgcagctttctgaa

SEQ ID NO: 1141566 - DNA, 25 bp, Homo sapien
tacattctaccagccttagggcgaa

SEQ ID NO: 1141567 - DNA, 25 bp, Homo sapien
ccatttactctagcgggagaagcca

SEQ ID NO: 1141568 - DNA, 25 bp, Homo sapien
tagagcgacctctcaaaacacaggg

SEQ ID NO: 1141569 - DNA, 25 bp, Homo sapien
tcactttacaatcgcagggtctctg

SEQ ID NO: 1141570 - DNA, 25 bp, Homo sapien
ggatacttacacagcaggacccaga

SEQ ID NO: 1141571 - DNA, 25 bp, Homo sapien
tgttaaccagacatgagaccttgga

SEQ ID NO: 1141572 - DNA, 25 bp, Homo sapien
taacaaggctgggtggaacacggac

SEQ ID NO: 1141573 - DNA, 25 bp, Homo sapien
cccgaaaaaccaagatgactcctat

SEQ ID NO: 1141574 - DNA, 25 bp, Homo sapien
gactcctatcttgaaagaatgtggg

SEQ ID NO: 1141575 - DNA, 25 bp, Homo sapien
ggttctagttcaaggatgtgtctct

SEQ ID NO: 1141576 - DNA, 25 bp, Homo sapien
ggtccttcctcaacatccagaagtg

SEQ ID NO: 1141577 - DNA, 25 bp, Homo sapien
ggatgtgtctctaggtccttcctca

SEQ ID NO: 1141578 - DNA, 25 bp, Homo sapien
ccccaggttctagttcaaggatgtg

SEQ ID NO: 1141579 - DNA, 25 bp, Homo sapien
tatctacgtagaaacggaacaggac

SEQ ID NO: 1141580 - DNA, 25 bp, Homo sapien
gaaagacggtgggatgcaaactgct

SEQ ID NO: 1141581 - DNA, 25 bp, Homo sapien
tacaaggcccctagaacggcaatga

SEQ ID NO: 1141582 - DNA, 25 bp, Homo sapien
tgagaacacctacgtcaaggaggcc

SEQ ID NO: 1141583 - DNA, 25 bp, Homo sapien
gatatagtttcaggatctgtccaca

SEQ ID NO: 1141584 - DNA, 25 bp, Homo sapien
tgtatcactgactctatctgccagt

SEQ ID NO: 1141585 - DNA, 25 bp, Homo sapien
ttcagaagcctccataatctggtgt

SEQ ID NO: 1141586 - DNA, 25 bp, Homo sapien
ctgactctatctgccagtggtaaat

SEQ ID NO: 1141587 - DNA, 25 bp, Homo sapien
tctttgtgacgcacacagtgacagg

SEQ ID NO: 1141588 - DNA, 25 bp, Homo sapien
gcttccttgtggatgtggaatacag

SEQ ID NO: 1141589 - DNA, 25 bp, Homo sapien
tgacagccgtattatgagcagcctt

SEQ ID NO: 1141590 - DNA, 25 bp, Homo sapien
tgtggaatacaggtctgcatgctga

SEQ ID NO: 1141591 - DNA, 25 bp, Homo sapien
tctcgatgtactcctgtttggcatt

SEQ ID NO: 1141592 - DNA, 25 bp, Homo sapien
ctgagcctgtgtcggctatgtccaa

SEQ ID NO: 1141593 - DNA, 25 bp, Homo sapien
agtgagttgccagcggtcacaggtc

SEQ ID NO: 1141594 - DNA, 25 bp, Homo sapien
ccctctgctctcaaggctttgctga

SEQ ID NO: 1141595 - DNA, 25 bp, Homo sapien
atctgtatcctcagtgagtctctgc

SEQ ID NO: 1141596 - DNA, 25 bp, Homo sapien
ccaaagtatgtgcttatctgtatcc

SEQ ID NO: 1141597 - DNA, 25 bp, Homo sapien
tatcctcagtgagtctctgccagtg

SEQ ID NO: 1141598 - DNA, 25 bp, Homo sapien
ttgcttcattcccaaagtatgtgct

SEQ ID NO: 1141599 - DNA, 25 bp, Homo sapien
gcagtttgctatattcaccacaggc

SEQ ID NO: 1141600 - DNA, 25 bp, Homo sapien
ggaggttgagtcaagcagtttgcta

SEQ ID NO: 1141601 - DNA, 25 bp, Homo sapien
gatctaacagtccatgtctgaccag

SEQ ID NO: 1141602 - DNA, 25 bp, Homo sapien
caccacaggctggtaaggtcccttt

SEQ ID NO: 1141603 - DNA, 25 bp, Homo sapien
gacgggattctaggatgggcctcca

SEQ ID NO: 1141604 - DNA, 25 bp, Homo sapien
aactgctgagttcaaagacacgccg

SEQ ID NO: 1141605 - DNA, 25 bp, Homo sapien
tgatgccaggaagctagggacagac

SEQ ID NO: 1141606 - DNA, 25 bp, Homo sapien
acagcaaatgggacaggaaggcagc

SEQ ID NO: 1141607 - DNA, 25 bp, Homo sapien
tctccactactgttggggccctcag

SEQ ID NO: 1141608 - DNA, 25 bp, Homo sapien
cattgtttatgacctcgtagaggca

SEQ ID NO: 1141609 - DNA, 25 bp, Homo sapien
cacctaggttagtggcaagcaagac

SEQ ID NO: 1141610 - DNA, 25 bp, Homo sapien
ggccctcagttctgcacctaggtta

SEQ ID NO: 1141611 - DNA, 25 bp, Homo sapien
tttcccctgaacagcggacaggaag

SEQ ID NO: 1141612 - DNA, 25 bp, Homo sapien
aagttgcacaccaattaatgtgcaa

SEQ ID NO: 1141613 - DNA, 25 bp, Homo sapien
tttttcccctgaacagcggacagga

SEQ ID NO: 1141614 - DNA, 25 bp, Homo sapien
gaagttgcacaccaattaatgtgca

SEQ ID NO: 1141615 - DNA, 25 bp, Homo sapien
ccttggtccttaatgctggtatcag

SEQ ID NO: 1141616 - DNA, 25 bp, Homo sapien
cacctcctgcaatacaaacactagt

SEQ ID NO: 1141617 - DNA, 25 bp, Homo sapien
ctcctgcaatacaaacactagtaca

SEQ ID NO: 1141618 - DNA, 25 bp, Homo sapien
cctcctgcaatacaaacactagtac

SEQ ID NO: 1141619 - DNA, 25 bp, Homo sapien
gaaaagcatttctgcttgtccaggt

SEQ ID NO: 1141620 - DNA, 25 bp, Homo sapien
catgaaaagcatttctgcttgtcca

SEQ ID NO: 1141621 - DNA, 25 bp, Homo sapien
tggctccatgaaaagcatttctgct

SEQ ID NO: 1141622 - DNA, 25 bp, Homo sapien
ctggctccatgaaaagcatttctgc

SEQ ID NO: 1141623 - DNA, 25 bp, Homo sapien
tccaaacatctgagtatttgacagc

SEQ ID NO: 1141624 - DNA, 25 bp, Homo sapien
aaatacccagatatttccaaacatc

SEQ ID NO: 1141625 - DNA, 25 bp, Homo sapien
ttttactatagatccagatgtttgg

SEQ ID NO: 1141626 - DNA, 25 bp, Homo sapien
tgacagcacgtttttactatagatc

SEQ ID NO: 1141627 - DNA, 25 bp, Homo sapien
tggagacacccgagatgagccactt

SEQ ID NO: 1141628 - DNA, 25 bp, Homo sapien
tcatccgccacaaatcttaatgtgt

SEQ ID NO: 1141629 - DNA, 25 bp, Homo sapien
actggagactttgagttctcctaca

SEQ ID NO: 1141630 - DNA, 25 bp, Homo sapien
tgagttctcctacattcatccgcca

SEQ ID NO: 1141631 - DNA, 25 bp, Homo sapien
cgaaatcgctcgtttgtccgggaag

SEQ ID NO: 1141632 - DNA, 25 bp, Homo sapien
attttcccgcaaggtggtcgccaga

SEQ ID NO: 1141633 - DNA, 25 bp, Homo sapien
tgagtccggaccaagcagcagattc

SEQ ID NO: 1141634 - DNA, 25 bp, Homo sapien
gaactttgccggcagagatgcagct

SEQ ID NO: 1141635 - DNA, 25 bp, Homo sapien
catgggatcatgtaaggcaaaggca

SEQ ID NO: 1141636 - DNA, 25 bp, Homo sapien
aatcaattggtaccaggagagccca

SEQ ID NO: 1141637 - DNA, 25 bp, Homo sapien
agatattattgtccctcgctgcgga

SEQ ID NO: 1141638 - DNA, 25 bp, Homo sapien
gaaaagcccgtagggagtcacatgc

SEQ ID NO: 1141639 - DNA, 25 bp, Homo sapien
gtcatggaggtagtttttggaatga

SEQ ID NO: 1141640 - DNA, 25 bp, Homo sapien
catggaggtagtttttggaatgaca

SEQ ID NO: 1141641 - DNA, 25 bp, Homo sapien
atggaggtagtttttggaatgacaa

SEQ ID NO: 1141642 - DNA, 25 bp, Homo sapien
tcatggaggtagtttttggaatgac

SEQ ID NO: 1141643 - DNA, 25 bp, Homo sapien
agctcctagccatcttcctgttgca

SEQ ID NO: 1141644 - DNA, 25 bp, Homo sapien
tcagctcctagccatcttcctgttg

SEQ ID NO: 1141645 - DNA, 25 bp, Homo sapien
tttcactgagtgtcctgagaaactc

SEQ ID NO: 1141646 - DNA, 25 bp, Homo sapien
tctcagaccttttcactgagtgtcc

SEQ ID NO: 1141647 - DNA, 25 bp, Homo sapien
tgtccagccgagtcgcttggaccac

SEQ ID NO: 1141648 - DNA, 25 bp, Homo sapien
cagccgagtcgcttggaccactgac

SEQ ID NO: 1141649 - DNA, 25 bp, Homo sapien
ctctttgtccagccgagtcgcttgg

SEQ ID NO: 1141650 - DNA, 25 bp, Homo sapien
tttgtccagccgagtcgcttggacc

SEQ ID NO: 1141651 - DNA, 25 bp, Homo sapien
taaatagccatttatcagatgcaac

SEQ ID NO: 1141652 - DNA, 25 bp, Homo sapien
ccagctcagtacatataaatagcca

SEQ ID NO: 1141653 - DNA, 25 bp, Homo sapien
gatgcaacccataatcttcccgctg

SEQ ID NO: 1141654 - DNA, 25 bp, Homo sapien
gagccagctcagtacatataaatag

SEQ ID NO: 1141655 - DNA, 25 bp, Homo sapien
tatttgctcttggttttgcacccat

SEQ ID NO: 1141656 - DNA, 25 bp, Homo sapien
cctgatagcattcattttcttaata

SEQ ID NO: 1141657 - DNA, 25 bp, Homo sapien
ctttcctgatagcattcattttctt

SEQ ID NO: 1141658 - DNA, 25 bp, Homo sapien
ttaatagattcttttatatttgctc

SEQ ID NO: 1141659 - DNA, 25 bp, Homo sapien
cattatcatcatccttccccacttc

SEQ ID NO: 1141660 - DNA, 25 bp, Homo sapien
ttatcatcatccttccccacttcac

SEQ ID NO: 1141661 - DNA, 25 bp, Homo sapien
attatcatcatccttccccacttca

SEQ ID NO: 1141662 - DNA, 25 bp, Homo sapien
gtcgtgtccccatttggttctgctc

SEQ ID NO: 1141663 - DNA, 25 bp, Homo sapien
ggtcgtgtccccatttggttctgct

SEQ ID NO: 1141664 - DNA, 25 bp, Homo sapien
tggtcgtgtccccatttggttctgc

SEQ ID NO: 1141665 - DNA, 25 bp, Homo sapien
cttggtcgtgtccccatttggttct

SEQ ID NO: 1141666 - DNA, 25 bp, Homo sapien
gtctcattatactgggcagtgccgg

SEQ ID NO: 1141667 - DNA, 25 bp, Homo sapien
tgtctcattatactgggcagtgccg

SEQ ID NO: 1141668 - DNA, 25 bp, Homo sapien
ttgtctcattatactgggcagtgcc

SEQ ID NO: 1141669 - DNA, 25 bp, Homo sapien
tctcattatactgggcagtgccggc

SEQ ID NO: 1141670 - DNA, 25 bp, Homo sapien
ggagcagatgtcgacagctctgaaa

SEQ ID NO: 1141671 - DNA, 25 bp, Homo sapien
gagtggagcagatgtcgacagctct

SEQ ID NO: 1141672 - DNA, 25 bp, Homo sapien
agatgtcgacagctctgaaagatcc

SEQ ID NO: 1141673 - DNA, 25 bp, Homo sapien
gtcgacagctctgaaagatcccatg

SEQ ID NO: 1141674 - DNA, 25 bp, Homo sapien
aggttagaacatcatcgcactgggt

SEQ ID NO: 1141675 - DNA, 25 bp, Homo sapien
tctcatctcttgcattcttttcagc

SEQ ID NO: 1141676 - DNA, 25 bp, Homo sapien
ttagaacatcatcgcactgggtgta

SEQ ID NO: 1141677 - DNA, 25 bp, Homo sapien
tcgcactgggtgtatttttccatgt

SEQ ID NO: 1141678 - DNA, 25 bp, Homo sapien
tgatgacctcaagacctcagtagga

SEQ ID NO: 1141679 - DNA, 25 bp, Homo sapien
ctttgccgagagtccacccttgata

SEQ ID NO: 1141680 - DNA, 25 bp, Homo sapien
tggcttccaagaacaagcagggccc

SEQ ID NO: 1141681 - DNA, 25 bp, Homo sapien
caggactcaccctgggtcctgatga

SEQ ID NO: 1141682 - DNA, 25 bp, Homo sapien
cctcgggctccagcatgtagagcat

SEQ ID NO: 1141683 - DNA, 25 bp, Homo sapien
gctcctcgggctccagcatgtagag

SEQ ID NO: 1141684 - DNA, 25 bp, Homo sapien
ccgctcctcgggctccagcatgtag

SEQ ID NO: 1141685 - DNA, 25 bp, Homo sapien
tcctcgggctccagcatgtagagca

SEQ ID NO: 1141686 - DNA, 25 bp, Homo sapien
ttacagctacccgaacagactaaga

SEQ ID NO: 1141687 - DNA, 25 bp, Homo sapien
cgaacagactaagataagcagtgat

SEQ ID NO: 1141688 - DNA, 25 bp, Homo sapien
ttctattacttgtaagtcactcagg

SEQ ID NO: 1141689 - DNA, 25 bp, Homo sapien
cttgtaagtcactcaggtatggtat

SEQ ID NO: 1141690 - DNA, 25 bp, Homo sapien
tccttaaaggaagaagcgataacca

SEQ ID NO: 1141691 - DNA, 25 bp, Homo sapien
aaaggaagaagcgataaccaggtca

SEQ ID NO: 1141692 - DNA, 25 bp, Homo sapien
gaagaagcgataaccaggtcagtag

SEQ ID NO: 1141693 - DNA, 25 bp, Homo sapien
aagcgataaccaggtcagtagatac

SEQ ID NO: 1141694 - DNA, 25 bp, Homo sapien
ctggtatgtttgtcagcccatcccc

SEQ ID NO: 1141695 - DNA, 25 bp, Homo sapien
tggtatgtttgtcagcccatcccca

SEQ ID NO: 1141696 - DNA, 25 bp, Homo sapien
accagatctgggctgtcaacgccat

SEQ ID NO: 1141697 - DNA, 25 bp, Homo sapien
tagagtaaggcctggatgtatttct

SEQ ID NO: 1141698 - DNA, 25 bp, Homo sapien
ggatgtatttctgccagactggcca

SEQ ID NO: 1141699 - DNA, 25 bp, Homo sapien
tcaacgccatcatattctattagag

SEQ ID NO: 1141700 - DNA, 25 bp, Homo sapien
gaaagcctcttggctgacacaaagt

SEQ ID NO: 1141701 - DNA, 25 bp, Homo sapien
aagcctcttggctgacacaaagtaa

SEQ ID NO: 1141702 - DNA, 25 bp, Homo sapien
gcctcttggctgacacaaagtaaaa

SEQ ID NO: 1141703 - DNA, 25 bp, Homo sapien
agcctcttggctgacacaaagtaaa

SEQ ID NO: 1141704 - DNA, 25 bp, Homo sapien
cgaaaggcaagagtgagttgacacc

SEQ ID NO: 1141705 - DNA, 25 bp, Homo sapien
ggaggaaacgactcatttccttcca

SEQ ID NO: 1141706 - DNA, 25 bp, Homo sapien
tcctgatgggaggaaacgactcatt

SEQ ID NO: 1141707 - DNA, 25 bp, Homo sapien
ctcaatttacgaaaggcaagagtga

SEQ ID NO: 1141708 - DNA, 25 bp, Homo sapien
cactcagctgtgtcgctgagcactg

SEQ ID NO: 1141709 - DNA, 25 bp, Homo sapien
tcactcagctgtgtcgctgagcact

SEQ ID NO: 1141710 - DNA, 25 bp, Homo sapien
tcagctgtgtcgctgagcactgaca

SEQ ID NO: 1141711 - DNA, 25 bp, Homo sapien
actcagctgtgtcgctgagcactga

SEQ ID NO: 1141712 - DNA, 25 bp, Homo sapien
tagtcccttagtcaccagttgcaca

SEQ ID NO: 1141713 - DNA, 25 bp, Homo sapien
taagcaagcgcaatattcatctgtg

SEQ ID NO: 1141714 - DNA, 25 bp, Homo sapien
ccttatggttaatgaagcagcactg

SEQ ID NO: 1141715 - DNA, 25 bp, Homo sapien
tccccaatgggcaagcaataaactt

SEQ ID NO: 1141716 - DNA, 25 bp, Homo sapien
tcatttcaggttctgttgcagccat

SEQ ID NO: 1141717 - DNA, 25 bp, Homo sapien
gggctgtcaggctcgagaggtggac

SEQ ID NO: 1141718 - DNA, 25 bp, Homo sapien
cgggccgcgcgcaggaaccccgcca

SEQ ID NO: 1141719 - DNA, 25 bp, Homo sapien
cgcggcaacccctgggcgcccggca

SEQ ID NO: 1141720 - DNA, 25 bp, Homo sapien
tgggcgcccggcaccggcttggacc

SEQ ID NO: 1141721 - DNA, 25 bp, Homo sapien
cccaccgcctggaacgcctcctcca

SEQ ID NO: 1141722 - DNA, 25 bp, Homo sapien
accgcctggaacgcctcctccacct

SEQ ID NO: 1141723 - DNA, 25 bp, Homo sapien
cctggaacgcctcctccacctccat

SEQ ID NO: 1141724 - DNA, 25 bp, Homo sapien
cgcctggaacgcctcctccacctcc

SEQ ID NO: 1141725 - DNA, 25 bp, Homo sapien
acaagtacatctggtagatgcccat

SEQ ID NO: 1141726 - DNA, 25 bp, Homo sapien
aagcacagctacagggcatcttccc

SEQ ID NO: 1141727 - DNA, 25 bp, Homo sapien
taactgaacaagagcttcactaatg

SEQ ID NO: 1141728 - DNA, 25 bp, Homo sapien
tcagccatatctcatcagacctaag

SEQ ID NO: 1141729 - DNA, 25 bp, Homo sapien
cactaatgcttatggtgtgaacttc

SEQ ID NO: 1141730 - DNA, 25 bp, Homo sapien
tcatcacttgcttatgccagggagg

SEQ ID NO: 1141731 - DNA, 25 bp, Homo sapien
tatgtgctggtccacctcattggcg

SEQ ID NO: 1141732 - DNA, 25 bp, Homo sapien
aattcagacatcacttggcaggtgg

SEQ ID NO: 1141733 - DNA, 25 bp, Homo sapien
ccacttcatcaaggttggaggcagg

SEQ ID NO: 1141734 - DNA, 25 bp, Homo sapien
cattggcgtggcacagtcacgaggc

SEQ ID NO: 1141735 - DNA, 25 bp, Homo sapien
taactaactccttgcataatggtat

SEQ ID NO: 1141736 - DNA, 25 bp, Homo sapien
gaacccaacacactgctatatacat

SEQ ID NO: 1141737 - DNA, 25 bp, Homo sapien
tgaacaaagtatttaatcgcatctg

SEQ ID NO: 1141738 - DNA, 25 bp, Homo sapien
tcactaattaagactaggccaggtg

SEQ ID NO: 1141739 - DNA, 25 bp, Homo sapien
tccctgaaactcctcatgaaactct

SEQ ID NO: 1141740 - DNA, 25 bp, Homo sapien
tacattatgacaccagatcaatctc

SEQ ID NO: 1141741 - DNA, 25 bp, Homo sapien
taaatgataagttttctagcattcc

SEQ ID NO: 1141742 - DNA, 25 bp, Homo sapien
tcttccagtcaaaacgtattaatgg

SEQ ID NO: 1141743 - DNA, 25 bp, Homo sapien
gatctcactgccgttggctgtcagg

SEQ ID NO: 1141744 - DNA, 25 bp, Homo sapien
tggttaccgtggctctgatttggca

SEQ ID NO: 1141745 - DNA, 25 bp, Homo sapien
ggccccaaccagtgcaatgaggatg

SEQ ID NO: 1141746 - DNA, 25 bp, Homo sapien
gaaatgcacgtgcttatggatctca

SEQ ID NO: 1141747 - DNA, 25 bp, Homo sapien
tctggctggctcagaaggaccagaa

SEQ ID NO: 1141748 - DNA, 25 bp, Homo sapien
accctcagattctttacctctggct

SEQ ID NO: 1141749 - DNA, 25 bp, Homo sapien
ttccagctgaccatgagatctgccc

SEQ ID NO: 1141750 - DNA, 25 bp, Homo sapien
aaggcttcctgaccatactaagtgg

SEQ ID NO: 1141751 - DNA, 25 bp, Homo sapien
tttatcttgagagtagtagttccct

SEQ ID NO: 1141752 - DNA, 25 bp, Homo sapien
gtcttccaccttcagtcgggcactg

SEQ ID NO: 1141753 - DNA, 25 bp, Homo sapien
tcagtcgggcactgtttattgtgag

SEQ ID NO: 1141754 - DNA, 25 bp, Homo sapien
ctttatcttgagagtagtagttccc

SEQ ID NO: 1141755 - DNA, 25 bp, Homo sapien
tcacagctgaggatcccatggaggt

SEQ ID NO: 1141756 - DNA, 25 bp, Homo sapien
aactgtactcctccaacaagtaggc

SEQ ID NO: 1141757 - DNA, 25 bp, Homo sapien
tatggaatgatcttgtcacagctga

SEQ ID NO: 1141758 - DNA, 25 bp, Homo sapien
tgtgggtcagtgatgccaactgtac

SEQ ID NO: 1141759 - DNA, 25 bp, Homo sapien
gattcagaacaatgggttgacaacc

SEQ ID NO: 1141760 - DNA, 25 bp, Homo sapien
tgacaaccagccctctgcatccttc

SEQ ID NO: 1141761 - DNA, 25 bp, Homo sapien
tcagaacaatgggttgacaaccagc

SEQ ID NO: 1141762 - DNA, 25 bp, Homo sapien
agaacaatgggttgacaaccagccc

SEQ ID NO: 1141763 - DNA, 25 bp, Homo sapien
gattcatgctacaacctaaactctg

SEQ ID NO: 1141764 - DNA, 25 bp, Homo sapien
aatgggtggttaccaggcgccagaa

SEQ ID NO: 1141765 - DNA, 25 bp, Homo sapien
ctggaatagtcaacttcatagaggc

SEQ ID NO: 1141766 - DNA, 25 bp, Homo sapien
aatgttgaaagcgtcctggagatga

SEQ ID NO: 1141767 - DNA, 25 bp, Homo sapien
gagataactccaacaaatacaccac

SEQ ID NO: 1141768 - DNA, 25 bp, Homo sapien
aagctgaccaaaagagataactcca

SEQ ID NO: 1141769 - DNA, 25 bp, Homo sapien
tccgaagcgatctgaaagctgacca

SEQ ID NO: 1141770 - DNA, 25 bp, Homo sapien
cactgactttgtaggatctgttggc

SEQ ID NO: 1141771 - DNA, 25 bp, Homo sapien
cacacattcattaagcaagacaaag

SEQ ID NO: 1141772 - DNA, 25 bp, Homo sapien
ccaccaggaagcgagttactgcaaa

SEQ ID NO: 1141773 - DNA, 25 bp, Homo sapien
caagacaaaggccaccagcgacatc

SEQ ID NO: 1141774 - DNA, 25 bp, Homo sapien
ctgcaagtgcccagtaggcggtgcc

SEQ ID NO: 1141775 - DNA, 25 bp, Homo sapien
gcaactataagaggcacaccagaaa

SEQ ID NO: 1141776 - DNA, 25 bp, Homo sapien
tggcaactataagaggcacaccaga

SEQ ID NO: 1141777 - DNA, 25 bp, Homo sapien
tataagaggcacaccagaaaagaaa

SEQ ID NO: 1141778 - DNA, 25 bp, Homo sapien
tgctggcaactataagaggcacacc

SEQ ID NO: 1141779 - DNA, 25 bp, Homo sapien
ctaattcagggaaaagagaactgtc

SEQ ID NO: 1141780 - DNA, 25 bp, Homo sapien
taattcagggaaaagagaactgtca

SEQ ID NO: 1141781 - DNA, 25 bp, Homo sapien
actgcaaagaacaggccgccaatcg

SEQ ID NO: 1141782 - DNA, 25 bp, Homo sapien
taaccagaatggctagggtcctcca

SEQ ID NO: 1141783 - DNA, 25 bp, Homo sapien
cctccaggagcggatgaagtatcct

SEQ ID NO: 1141784 - DNA, 25 bp, Homo sapien
agaatggctagggtcctccaggagc

SEQ ID NO: 1141785 - DNA, 25 bp, Homo sapien
ctgggagtataaccaacgaggtgat

SEQ ID NO: 1141786 - DNA, 25 bp, Homo sapien
ccaacgaggtgattcaggaatgaat

SEQ ID NO: 1141787 - DNA, 25 bp, Homo sapien
agtataaccaacgaggtgattcagg

SEQ ID NO: 1141788 - DNA, 25 bp, Homo sapien
taaccaacgaggtgattcaggaatg

SEQ ID NO: 1141789 - DNA, 25 bp, Homo sapien
tgttagtgagaacgtgcacttgagt

SEQ ID NO: 1141790 - DNA, 25 bp, Homo sapien
gaacatcaggatcaaagtgtgtcct

SEQ ID NO: 1141791 - DNA, 25 bp, Homo sapien
cgtgcacttgagtttgcggttcctc

SEQ ID NO: 1141792 - DNA, 25 bp, Homo sapien
ttggcaatgaggtacagcgcctctt

SEQ ID NO: 1141793 - DNA, 25 bp, Homo sapien
ccaggcgctaaggatcaggagactt

SEQ ID NO: 1141794 - DNA, 25 bp, Homo sapien
caggatatcaagagaagctcgagca

SEQ ID NO: 1141795 - DNA, 25 bp, Homo sapien
tacttactcaagctcagtggacctg

SEQ ID NO: 1141796 - DNA, 25 bp, Homo sapien
ttagttaaagagcaacagaacacgc

SEQ ID NO: 1141797 - DNA, 25 bp, Homo sapien
gcagctcctatgttgtgttgtcagg

SEQ ID NO: 1141798 - DNA, 25 bp, Homo sapien
ggttttcttaatctccatgcctcca

SEQ ID NO: 1141799 - DNA, 25 bp, Homo sapien
tgcttttgaatgggtagaacctcaa

SEQ ID NO: 1141800 - DNA, 25 bp, Homo sapien
aaattagcagctcctatgttgtgtt

SEQ ID NO: 1141801 - DNA, 25 bp, Homo sapien
taaatcaaatggatggccagcccct

SEQ ID NO: 1141802 - DNA, 25 bp, Homo sapien
tgatctgctgtaagcaataagcttg

SEQ ID NO: 1141803 - DNA, 25 bp, Homo sapien
ccccttaaagaggaaagacattgca

SEQ ID NO: 1141804 - DNA, 25 bp, Homo sapien
tctagaaaagaactcccatggagaa

SEQ ID NO: 1141805 - DNA, 25 bp, Homo sapien
tagatcacccgcactcagagttagg

SEQ ID NO: 1141806 - DNA, 25 bp, Homo sapien
cagagttaggccataatacaccaag

SEQ ID NO: 1141807 - DNA, 25 bp, Homo sapien
ggaatctctatgaggccagacaggg

SEQ ID NO: 1141808 - DNA, 25 bp, Homo sapien
tacagagagggtaagatggaatctc

SEQ ID NO: 1141809 - DNA, 25 bp, Homo sapien
tgataatgttcgcttccgaccaaac

SEQ ID NO: 1141810 - DNA, 25 bp, Homo sapien
gaaatgctgataatgttcgcttccg

SEQ ID NO: 1141811 - DNA, 25 bp, Homo sapien
gaagaaacattacaataagacaagc

SEQ ID NO: 1141812 - DNA, 25 bp, Homo sapien
gtcctcctaggcacagaaatgctga

SEQ ID NO: 1141813 - DNA, 25 bp, Homo sapien
aaatgaagcatgccatatggtcatc

SEQ ID NO: 1141814 - DNA, 25 bp, Homo sapien
aagcatgccatatggtcatctctcc

SEQ ID NO: 1141815 - DNA, 25 bp, Homo sapien
tgaagcatgccatatggtcatctct

SEQ ID NO: 1141816 - DNA, 25 bp, Homo sapien
aatgaagcatgccatatggtcatct

SEQ ID NO: 1141817 - DNA, 25 bp, Homo sapien
cccagatggtagcttaatagcctga

SEQ ID NO: 1141818 - DNA, 25 bp, Homo sapien
taaagggatccttcttgaagctgtg

SEQ ID NO: 1141819 - DNA, 25 bp, Homo sapien
caatcttgtggttggctgtaatgac

SEQ ID NO: 1141820 - DNA, 25 bp, Homo sapien
tgtaatgacgagtgcaatttgcaac

SEQ ID NO: 1141821 - DNA, 25 bp, Homo sapien
tctagaaaatcacggccaaaaacac

SEQ ID NO: 1141822 - DNA, 25 bp, Homo sapien
caatcactgtcatacctcaggtgtg

SEQ ID NO: 1141823 - DNA, 25 bp, Homo sapien
tcctccttctagaaaatcacggcca

SEQ ID NO: 1141824 - DNA, 25 bp, Homo sapien
caaaaacacagttcccaaggcaatc

SEQ ID NO: 1141825 - DNA, 25 bp, Homo sapien
tgcaagctccataacagaaccctat

SEQ ID NO: 1141826 - DNA, 25 bp, Homo sapien
tccagcatgagagagttgttgtgac

SEQ ID NO: 1141827 - DNA, 25 bp, Homo sapien
acagggctcttgttatatcacatgc

SEQ ID NO: 1141828 - DNA, 25 bp, Homo sapien
caaatcgtctcacaatgattgccta

SEQ ID NO: 1141829 - DNA, 25 bp, Homo sapien
gactgaaggcatgtttggtaaggaa

SEQ ID NO: 1141830 - DNA, 25 bp, Homo sapien
tccaaactaacacaagatgctacag

SEQ ID NO: 1141831 - DNA, 25 bp, Homo sapien
tagagggtcacctgagttggcagaa

SEQ ID NO: 1141832 - DNA, 25 bp, Homo sapien
gaaaagtgagggcaaaggaacacaa

SEQ ID NO: 1141833 - DNA, 25 bp, Homo sapien
ggctatctcttctagagatacattg

SEQ ID NO: 1141834 - DNA, 25 bp, Homo sapien
gatacattgtcacagtctccacgaa

SEQ ID NO: 1141835 - DNA, 25 bp, Homo sapien
cagtctccacgaatgcttctgacac

SEQ ID NO: 1141836 - DNA, 25 bp, Homo sapien
ttctagagatacattgtcacagtct

SEQ ID NO: 1141837 - DNA, 25 bp, Homo sapien
gctaatattactcccagaggagaac

SEQ ID NO: 1141838 - DNA, 25 bp, Homo sapien
ttagtggccacctgctaatattact

SEQ ID NO: 1141839 - DNA, 25 bp, Homo sapien
gattactaatctgggaaaaacatta

SEQ ID NO: 1141840 - DNA, 25 bp, Homo sapien
gctgaggaatgccaaacaatctatt

SEQ ID NO: 1141841 - DNA, 25 bp, Homo sapien
cttgctaatgatctatcaattatat

SEQ ID NO: 1141842 - DNA, 25 bp, Homo sapien
agtttatgtgtgtgaaggtgttcat

SEQ ID NO: 1141843 - DNA, 25 bp, Homo sapien
ttctagtttatgtgtgtgaaggtgt

SEQ ID NO: 1141844 - DNA, 25 bp, Homo sapien
catgaacttatccatctcttcctag

SEQ ID NO: 1141845 - DNA, 25 bp, Homo sapien
cttctttctctgtctcatggaatag

SEQ ID NO: 1141846 - DNA, 25 bp, Homo sapien
tctttctctgtctcatggaatagtg

SEQ ID NO: 1141847 - DNA, 25 bp, Homo sapien
tttctctgtctcatggaatagtgtc

SEQ ID NO: 1141848 - DNA, 25 bp, Homo sapien
gaaggttccttctttctctgtctca

SEQ ID NO: 1141849 - DNA, 25 bp, Homo sapien
gtgtggacctcgagcagctgctgga

SEQ ID NO: 1141850 - DNA, 25 bp, Homo sapien
tggacctcgagcagctgctggacat

SEQ ID NO: 1141851 - DNA, 25 bp, Homo sapien
cgcggtgtggacctcgagcagctgc

SEQ ID NO: 1141852 - DNA, 25 bp, Homo sapien
ggacctcgagcagctgctggacatg

SEQ ID NO: 1141853 - DNA, 25 bp, Homo sapien
atataatctcctggtttcctaagcc

SEQ ID NO: 1141854 - DNA, 25 bp, Homo sapien
tcctggtttcctaagcccgtcagaa

SEQ ID NO: 1141855 - DNA, 25 bp, Homo sapien
atctcctggtttcctaagcccgtca

SEQ ID NO: 1141856 - DNA, 25 bp, Homo sapien
tcctcaaagctctcttcaaaatgac

SEQ ID NO: 1141857 - DNA, 25 bp, Homo sapien
gaaattcctactcttgaaggtcagc

SEQ ID NO: 1141858 - DNA, 25 bp, Homo sapien
ataccatcctctcctgaaattccta

SEQ ID NO: 1141859 - DNA, 25 bp, Homo sapien
catcaccaaatgtaattgcctctca

SEQ ID NO: 1141860 - DNA, 25 bp, Homo sapien
ttctgccaaagagaacactctcgtt

SEQ ID NO: 1141861 - DNA, 25 bp, Homo sapien
gaggtgtagatataaacaatgttaa

SEQ ID NO: 1141862 - DNA, 25 bp, Homo sapien
ggtaaagctcagaggtgtagatata

SEQ ID NO: 1141863 - DNA, 25 bp, Homo sapien
gaatggctgttcaccactgcaaaca

SEQ ID NO: 1141864 - DNA, 25 bp, Homo sapien
actgatggtcagcttccccagcaag

SEQ ID NO: 1141865 - DNA, 25 bp, Homo sapien
gggagcaataatcccaccaactcgg

SEQ ID NO: 1141866 - DNA, 25 bp, Homo sapien
ccaactcgggagaacatggaacaag

SEQ ID NO: 1141867 - DNA, 25 bp, Homo sapien
gggatgaagggagcaataatcccac

SEQ ID NO: 1141868 - DNA, 25 bp, Homo sapien
ggaacaagttccaagcccaacattc

SEQ ID NO: 1141869 - DNA, 25 bp, Homo sapien
caatgaatggtaaagaccattgcac

SEQ ID NO: 1141870 - DNA, 25 bp, Homo sapien
tagcagcggactgttaagggtctcc

SEQ ID NO: 1141871 - DNA, 25 bp, Homo sapien
agacccgtggctccgaagacaatga

SEQ ID NO: 1141872 - DNA, 25 bp, Homo sapien
gggtctccggcaataacaaactcag

SEQ ID NO: 1141873 - DNA, 25 bp, Homo sapien
agcctgtaaagataatgcttcttct

SEQ ID NO: 1141874 - DNA, 25 bp, Homo sapien
ggtccaaagcctgtaaagataatgc

SEQ ID NO: 1141875 - DNA, 25 bp, Homo sapien
ccaaagcctgtaaagataatgcttc

SEQ ID NO: 1141876 - DNA, 25 bp, Homo sapien
tgggggtccaaagcctgtaaagata

SEQ ID NO: 1141877 - DNA, 25 bp, Homo sapien
tcacttgatcatctgagtctcttca

SEQ ID NO: 1141878 - DNA, 25 bp, Homo sapien
acttgatcatctgagtctcttcatc

SEQ ID NO: 1141879 - DNA, 25 bp, Homo sapien
ctcactctcactccctaaagagctc

SEQ ID NO: 1141880 - DNA, 25 bp, Homo sapien
cactctcactccctaaagagctctc

SEQ ID NO: 1141881 - DNA, 25 bp, Homo sapien
gtgccaatagagagatggactccca

SEQ ID NO: 1141882 - DNA, 25 bp, Homo sapien
tatccaagggagctgacaggcagcc

SEQ ID NO: 1141883 - DNA, 25 bp, Homo sapien
ttagccagaggcaatcgaacccagt

SEQ ID NO: 1141884 - DNA, 25 bp, Homo sapien
cagtggaaaccagaagtcagtgtgc

SEQ ID NO: 1141885 - DNA, 25 bp, Homo sapien
tggagaagtcctaatgtgaagctgg

SEQ ID NO: 1141886 - DNA, 25 bp, Homo sapien
cattgcttgaaagtagccaaataac

SEQ ID NO: 1141887 - DNA, 25 bp, Homo sapien
tatggttacctaaacagtgtctcag

SEQ ID NO: 1141888 - DNA, 25 bp, Homo sapien
tactgggctgtggttgtaactcaca

SEQ ID NO: 1141889 - DNA, 25 bp, Homo sapien
cttttaactttgtagcatgttcagt

SEQ ID NO: 1141890 - DNA, 25 bp, Homo sapien
tgcgcccaggctgctttccttttaa

SEQ ID NO: 1141891 - DNA, 25 bp, Homo sapien
ctgcgcccaggctgctttcctttta

SEQ ID NO: 1141892 - DNA, 25 bp, Homo sapien
ttccttttaactttgtagcatgttc

SEQ ID NO: 1141893 - DNA, 25 bp, Homo sapien
tggagataataccccgtccttcctc

SEQ ID NO: 1141894 - DNA, 25 bp, Homo sapien
tggagtcactatcaccaaaaggaac

SEQ ID NO: 1141895 - DNA, 25 bp, Homo sapien
gaataataaaacctctcatagtgaa

SEQ ID NO: 1141896 - DNA, 25 bp, Homo sapien
cctctcatagtgaatgttggagtca

SEQ ID NO: 1141897 - DNA, 25 bp, Homo sapien
ccacttctagcaaggtgaggttcat

SEQ ID NO: 1141898 - DNA, 25 bp, Homo sapien
gagaccacttctagcaaggtgaggt

SEQ ID NO: 1141899 - DNA, 25 bp, Homo sapien
atctatggagaccacttctagcaag

SEQ ID NO: 1141900 - DNA, 25 bp, Homo sapien
tatggagaccacttctagcaaggtg

SEQ ID NO: 1141901 - DNA, 25 bp, Homo sapien
tacataagcacccatgggttggccg

SEQ ID NO: 1141902 - DNA, 25 bp, Homo sapien
tagtgaaagcaacccctctgagtga

SEQ ID NO: 1141903 - DNA, 25 bp, Homo sapien
gccacgcccctgtgagaaaaattat

SEQ ID NO: 1141904 - DNA, 25 bp, Homo sapien
tctgagtgaacctagccatgcaggg

SEQ ID NO: 1141905 - DNA, 25 bp, Homo sapien
tcctcagccttgtaatgatgggtcg

SEQ ID NO: 1141906 - DNA, 25 bp, Homo sapien
tcaatcctgcttggtacaagtcctg

SEQ ID NO: 1141907 - DNA, 25 bp, Homo sapien
gagtcaaggccaaagcataaagatt

SEQ ID NO: 1141908 - DNA, 25 bp, Homo sapien
tgggtgccgaaaatgcaatgatact

SEQ ID NO: 1141909 - DNA, 25 bp, Homo sapien
tgtggctgccctatcttgattgctc

SEQ ID NO: 1141910 - DNA, 25 bp, Homo sapien
gaatattctcttgccctacgatcca

SEQ ID NO: 1141911 - DNA, 25 bp, Homo sapien
taccgcagctgatcaaaatgttata

SEQ ID NO: 1141912 - DNA, 25 bp, Homo sapien
tgccctacgatccagcgacaattgc

SEQ ID NO: 1141913 - DNA, 25 bp, Homo sapien
aaaatttcacaatggtctgatctcc

SEQ ID NO: 1141914 - DNA, 25 bp, Homo sapien
ccttgaagctggtaaacatcacgga

SEQ ID NO: 1141915 - DNA, 25 bp, Homo sapien
aagctggtaaacatcacggagtctg

SEQ ID NO: 1141916 - DNA, 25 bp, Homo sapien
aaaaaatttcacaatggtctgatct

SEQ ID NO: 1141917 - DNA, 25 bp, Homo sapien
gttttgccagcaaaacttatgttgg

SEQ ID NO: 1141918 - DNA, 25 bp, Homo sapien
tggttttgccagcaaaacttatgtt

SEQ ID NO: 1141919 - DNA, 25 bp, Homo sapien
tttgccagcaaaacttatgttggaa

SEQ ID NO: 1141920 - DNA, 25 bp, Homo sapien
ttttgccagcaaaacttatgttgga

SEQ ID NO: 1141921 - DNA, 25 bp, Homo sapien
ccctcttccaacttgaaagctggca

SEQ ID NO: 1141922 - DNA, 25 bp, Homo sapien
tcttccaacttgaaagctggcagta

SEQ ID NO: 1141923 - DNA, 25 bp, Homo sapien
agtcagtgtaaacaggtccctttag

SEQ ID NO: 1141924 - DNA, 25 bp, Homo sapien
cctttagagtcgagggaacactcac

SEQ ID NO: 1141925 - DNA, 25 bp, Homo sapien
tggaagtgtgtaatggaccagagac

SEQ ID NO: 1141926 - DNA, 25 bp, Homo sapien
gcaacacttgtgagtagatagcact

SEQ ID NO: 1141927 - DNA, 25 bp, Homo sapien
ttttctcaatggagtgcaacacttg

SEQ ID NO: 1141928 - DNA, 25 bp, Homo sapien
tggtcagtcctcagtagaacagcaa

SEQ ID NO: 1141929 - DNA, 25 bp, Homo sapien
tcagtaggcaatcttctaagtctcc

SEQ ID NO: 1141930 - DNA, 25 bp, Homo sapien
ggcaatcttctaagtctcccacagt

SEQ ID NO: 1141931 - DNA, 25 bp, Homo sapien
ttattcagtaggcaatcttctaagt

SEQ ID NO: 1141932 - DNA, 25 bp, Homo sapien
taggcaatcttctaagtctcccaca

SEQ ID NO: 1141933 - DNA, 25 bp, Homo sapien
ctgccttttgcttctagacccttaa

SEQ ID NO: 1141934 - DNA, 25 bp, Homo sapien
tgccttttgcttctagacccttaag

SEQ ID NO: 1141935 - DNA, 25 bp, Homo sapien
gccttttgcttctagacccttaaga

SEQ ID NO: 1141936 - DNA, 25 bp, Homo sapien
agggaccagcaatggtggttatttc

SEQ ID NO: 1141937 - DNA, 25 bp, Homo sapien
tgtacgtgtcagagtaaggcacagc

SEQ ID NO: 1141938 - DNA, 25 bp, Homo sapien
aatattttcattgtacgtgtcagag

SEQ ID NO: 1141939 - DNA, 25 bp, Homo sapien
cacagcttgaaatctaatgtcttgg

SEQ ID NO: 1141940 - DNA, 25 bp, Homo sapien
tcaaatgatgaacgactttctgcac

SEQ ID NO: 1141941 - DNA, 25 bp, Homo sapien
ggcaggcacaatgtctccgtcgatg

SEQ ID NO: 1141942 - DNA, 25 bp, Homo sapien
tccggaacactaggaggaccttggc

SEQ ID NO: 1141943 - DNA, 25 bp, Homo sapien
ttgggactgtgacgaggaactgact

SEQ ID NO: 1141944 - DNA, 25 bp, Homo sapien
cagtgtgtagtaccgccagtgctgc

SEQ ID NO: 1141945 - DNA, 25 bp, Homo sapien
gacatcgaggccaccgggctttctt

SEQ ID NO: 1141946 - DNA, 25 bp, Homo sapien
tcttgggaaggccagcgctgcagac

SEQ ID NO: 1141947 - DNA, 25 bp, Homo sapien
ccaaactgcagagcggtttcctagc

SEQ ID NO: 1141948 - DNA, 25 bp, Homo sapien
tccagttccacctgatatgcagatg

SEQ ID NO: 1141949 - DNA, 25 bp, Homo sapien
gggaacttgtcaccaggcagacagc

SEQ ID NO: 1141950 - DNA, 25 bp, Homo sapien
tctggggaacttgtcaccaggcaga

SEQ ID NO: 1141951 - DNA, 25 bp, Homo sapien
tggtctggggaacttgtcaccaggc

SEQ ID NO: 1141952 - DNA, 25 bp, Homo sapien
tgctggtctggggaacttgtcacca

SEQ ID NO: 1141953 - DNA, 25 bp, Homo sapien
tgggacgtgataaccggcctgttcc

SEQ ID NO: 1141954 - DNA, 25 bp, Homo sapien
ctgttccagtaacacctgctcagca

SEQ ID NO: 1141955 - DNA, 25 bp, Homo sapien
ctgggcaccagatgtcctccttcag

SEQ ID NO: 1141956 - DNA, 25 bp, Homo sapien
gctgccagtgataatttgaacaggc

SEQ ID NO: 1141957 - DNA, 25 bp, Homo sapien
aggaagaatgacctatccaaagctg

SEQ ID NO: 1141958 - DNA, 25 bp, Homo sapien
ggaagaatgacctatccaaagctgc

SEQ ID NO: 1141959 - DNA, 25 bp, Homo sapien
caggaagaatgacctatccaaagct

SEQ ID NO: 1141960 - DNA, 25 bp, Homo sapien
gcctccagagttgcttaactagcta

SEQ ID NO: 1141961 - DNA, 25 bp, Homo sapien
tctcactggacctctgcagtagcga

SEQ ID NO: 1141962 - DNA, 25 bp, Homo sapien
tgtgcaacacgaaaacctaggagtc

SEQ ID NO: 1141963 - DNA, 25 bp, Homo sapien
gcagtagcgatctcatcagcccatc

SEQ ID NO: 1141964 - DNA, 25 bp, Homo sapien
ctttaaagtggggatatttctcgca

SEQ ID NO: 1141965 - DNA, 25 bp, Homo sapien
taaagtggggatatttctcgcaggt

SEQ ID NO: 1141966 - DNA, 25 bp, Homo sapien
gggatatttctcgcaggtccaaaag

SEQ ID NO: 1141967 - DNA, 25 bp, Homo sapien
agtggggatatttctcgcaggtcca

SEQ ID NO: 1141968 - DNA, 25 bp, Homo sapien
tccggacgaaatagtgtttcaggaa

SEQ ID NO: 1141969 - DNA, 25 bp, Homo sapien
acagtgtccagttcagtcgggttgg

SEQ ID NO: 1141970 - DNA, 25 bp, Homo sapien
ttcaggaagtgctggctcacgcact

SEQ ID NO: 1141971 - DNA, 25 bp, Homo sapien
gaaagaggttgctgttccggacgaa

SEQ ID NO: 1141972 - DNA, 25 bp, Homo sapien
cacatgctaaggaagctggagggca

SEQ ID NO: 1141973 - DNA, 25 bp, Homo sapien
tcagaggtaggcacgttaacattcc

SEQ ID NO: 1141974 - DNA, 25 bp, Homo sapien
aattcctgatcggttgtgccacaca

SEQ ID NO: 1141975 - DNA, 25 bp, Homo sapien
ttagagaataccagcgaagcagaca

SEQ ID NO: 1141976 - DNA, 25 bp, Homo sapien
gatgagcatttttcatgtgattttt

SEQ ID NO: 1141977 - DNA, 25 bp, Homo sapien
gcatttttcatgtgatttttggctg

SEQ ID NO: 1141978 - DNA, 25 bp, Homo sapien
gagcatttttcatgtgatttttggc

SEQ ID NO: 1141979 - DNA, 25 bp, Homo sapien
catttttcatgtgatttttggctgc

SEQ ID NO: 1141980 - DNA, 25 bp, Homo sapien
gtcacagacagcacaagtcacatat

SEQ ID NO: 1141981 - DNA, 25 bp, Homo sapien
tcacatatggcggtccctggacaga

SEQ ID NO: 1141982 - DNA, 25 bp, Homo sapien
gagagtcaatggcagggagccttct

SEQ ID NO: 1141983 - DNA, 25 bp, Homo sapien
aagagcccgcgtcctggtcacagac

SEQ ID NO: 1141984 - DNA, 25 bp, Homo sapien
tctggtcctggtaggctgtgccttc

SEQ ID NO: 1141985 - DNA, 25 bp, Homo sapien
cctctatgtcaaggtcagggaacag

SEQ ID NO: 1141986 - DNA, 25 bp, Homo sapien
cacatccatgttgaggaatgtcctc

SEQ ID NO: 1141987 - DNA, 25 bp, Homo sapien
ttcctgcgaggctcatagggttgca

SEQ ID NO: 1141988 - DNA, 25 bp, Homo sapien
aaggagagaaagggaagtcagagtt

SEQ ID NO: 1141989 - DNA, 25 bp, Homo sapien
tgaaggagagaaagggaagtcagag

SEQ ID NO: 1141990 - DNA, 25 bp, Homo sapien
gagagaaagggaagtcagagttagg

SEQ ID NO: 1141991 - DNA, 25 bp, Homo sapien
ctgaaggagagaaagggaagtcaga

SEQ ID NO: 1141992 - DNA, 25 bp, Homo sapien
tggaagctgttggatagcgagacat

SEQ ID NO: 1141993 - DNA, 25 bp, Homo sapien
tgttggatagcgagacattaaagac

SEQ ID NO: 1141994 - DNA, 25 bp, Homo sapien
gcgagacattaaagacgatattgat

SEQ ID NO: 1141995 - DNA, 25 bp, Homo sapien
taaagacgatattgatgttcccagc

SEQ ID NO: 1141996 - DNA, 25 bp, Homo sapien
tagtgacactttgtatgtgtcagag

SEQ ID NO: 1141997 - DNA, 25 bp, Homo sapien
gagtgcgatgatctggtagtgacac

SEQ ID NO: 1141998 - DNA, 25 bp, Homo sapien
ttaaggctatatcatggaggtcccg

SEQ ID NO: 1141999 - DNA, 25 bp, Homo sapien
ggcaattgtttgctcagctggcaaa

SEQ ID NO: 1142000 - DNA, 25 bp, Homo sapien
caaaccgctgcttactctcctgcct

SEQ ID NO: 1142001 - DNA, 25 bp, Homo sapien
tccaaaccgctgcttactctcctgc

SEQ ID NO: 1142002 - DNA, 25 bp, Homo sapien
ccgctgcttactctcctgcctcttt

SEQ ID NO: 1142003 - DNA, 25 bp, Homo sapien
aaccgctgcttactctcctgcctct

SEQ ID NO: 1142004 - DNA, 25 bp, Homo sapien
tgacaacacagtgaggttcgccgtg

SEQ ID NO: 1142005 - DNA, 25 bp, Homo sapien
gcagggcccaggttacattggaaca

SEQ ID NO: 1142006 - DNA, 25 bp, Homo sapien
taaggcagctgtaagccacaacggg

SEQ ID NO: 1142007 - DNA, 25 bp, Homo sapien
tatacccatatctagacgtgagtcc

SEQ ID NO: 1142008 - DNA, 25 bp, Homo sapien
agtgggcgaccggtagcgcggccat

SEQ ID NO: 1142009 - DNA, 25 bp, Homo sapien
agcacagtgggcgaccggtagcgcg

SEQ ID NO: 1142010 - DNA, 25 bp, Homo sapien
gcgaggggcagtgggccccgaccca

SEQ ID NO: 1142011 - DNA, 25 bp, Homo sapien
cccgacccaccgcagcacagtgggc

SEQ ID NO: 1142012 - DNA, 25 bp, Homo sapien
ctctgtgtcttcatttcttctcttc

SEQ ID NO: 1142013 - DNA, 25 bp, Homo sapien
ctgtgtcttcatttcttctcttccc

SEQ ID NO: 1142014 - DNA, 25 bp, Homo sapien
gtgtcttcatttcttctcttcccac

SEQ ID NO: 1142015 - DNA, 25 bp, Homo sapien
ctactcctctgtgtcttcatttctt

SEQ ID NO: 1142016 - DNA, 25 bp, Homo sapien
tggcgccaccgcggaccctccgggc

SEQ ID NO: 1142017 - DNA, 25 bp, Homo sapien
gcgctgccgaaccttctccgcatgc

SEQ ID NO: 1142018 - DNA, 25 bp, Homo sapien
gcaggaggcgctgccgaaccttctc

SEQ ID NO: 1142019 - DNA, 25 bp, Homo sapien
tcgggcctgcgcggctgcgatcggg

SEQ ID NO: 1142020 - DNA, 25 bp, Homo sapien
gaaatagtgaaaccaatgccgccat

SEQ ID NO: 1142021 - DNA, 25 bp, Homo sapien
tactagtgcgtggaagacaattcac

SEQ ID NO: 1142022 - DNA, 25 bp, Homo sapien
caatgccgccattcagttgaaagcg

SEQ ID NO: 1142023 - DNA, 25 bp, Homo sapien
ctagctgggacagtcggcctcaacc

SEQ ID NO: 1142024 - DNA, 25 bp, Homo sapien
gaacatattgcaatgcagacgtgga

SEQ ID NO: 1142025 - DNA, 25 bp, Homo sapien
tcactgaaacctcggtatgaactag

SEQ ID NO: 1142026 - DNA, 25 bp, Homo sapien
ggtatgaactagttccagatcctcc

SEQ ID NO: 1142027 - DNA, 25 bp, Homo sapien
cctttaagtgcctatcagtcactga

SEQ ID NO: 1142028 - DNA, 25 bp, Homo sapien
tgcaggccactccatgactgcccaa

SEQ ID NO: 1142029 - DNA, 25 bp, Homo sapien
ggaggatttgttgaccgttgatgaa

SEQ ID NO: 1142030 - DNA, 25 bp, Homo sapien
gaccgttgatgaataaggtacatca

SEQ ID NO: 1142031 - DNA, 25 bp, Homo sapien
tgtgaagcgctaccccagaatgaaa

SEQ ID NO: 1142032 - DNA, 25 bp, Homo sapien
tcatcaaggacagttcggtctcttc

SEQ ID NO: 1142033 - DNA, 25 bp, Homo sapien
tctggcggccgtctgttttatgggt

SEQ ID NO: 1142034 - DNA, 25 bp, Homo sapien
ttaaatatttgcagttccagtggaa

SEQ ID NO: 1142035 - DNA, 25 bp, Homo sapien
ccagtggaatgggttttggcacact

SEQ ID NO: 1142036 - DNA, 25 bp, Homo sapien
gggggcagatttgttaattagctcc

SEQ ID NO: 1142037 - DNA, 25 bp, Homo sapien
cgctgtgtcacgcccaggctggagt

SEQ ID NO: 1142038 - DNA, 25 bp, Homo sapien
agtgcagtggcgcaacctctgcctc

SEQ ID NO: 1142039 - DNA, 25 bp, Homo sapien
agtctcgctgtgtcacgcccaggct

SEQ ID NO: 1142040 - DNA, 25 bp, Homo sapien
agtgttgctatttttcccccaatct

SEQ ID NO: 1142041 - DNA, 25 bp, Homo sapien
agaaggatttaacaaagggagcctg

SEQ ID NO: 1142042 - DNA, 25 bp, Homo sapien
gtctctccagcctgattaactggat

SEQ ID NO: 1142043 - DNA, 25 bp, Homo sapien
tcaggtaatacaaggtcccctgtta

SEQ ID NO: 1142044 - DNA, 25 bp, Homo sapien
gtggaaagaaaagtagtagtcactc

SEQ ID NO: 1142045 - DNA, 25 bp, Homo sapien
ctgttccttactggagggctgtgga

SEQ ID NO: 1142046 - DNA, 25 bp, Homo sapien
cttctgaggaaggactgttccttac

SEQ ID NO: 1142047 - DNA, 25 bp, Homo sapien
gagtcacacggtgtcacagttcctt

SEQ ID NO: 1142048 - DNA, 25 bp, Homo sapien
agccatagccaggtgaccagagtca

SEQ ID NO: 1142049 - DNA, 25 bp, Homo sapien
gaagaagaggcccctgatcagctgt

SEQ ID NO: 1142050 - DNA, 25 bp, Homo sapien
ccatttggggatgattagaataggt

SEQ ID NO: 1142051 - DNA, 25 bp, Homo sapien
ttaggaatggggcacgtgtggccag

SEQ ID NO: 1142052 - DNA, 25 bp, Homo sapien
aataggtgggaggagctattaggaa

SEQ ID NO: 1142053 - DNA, 25 bp, Homo sapien
tccccatttcggaccactggaaaca

SEQ ID NO: 1142054 - DNA, 25 bp, Homo sapien
tccctgcctctggtttgaccgcttg

SEQ ID NO: 1142055 - DNA, 25 bp, Homo sapien
tgaaggtctatcttccactgcaacc

SEQ ID NO: 1142056 - DNA, 25 bp, Homo sapien
tgcaaccaagtaatatcacacaatt

SEQ ID NO: 1142057 - DNA, 25 bp, Homo sapien
gcttttccccttagcctatgagcat

SEQ ID NO: 1142058 - DNA, 25 bp, Homo sapien
gcaagcccttgcaaccagcactatg

SEQ ID NO: 1142059 - DNA, 25 bp, Homo sapien
gggttgccctgattgtcctcacttc

SEQ ID NO: 1142060 - DNA, 25 bp, Homo sapien
atgagcataaccgagtttcttcccc

SEQ ID NO: 1142061 - DNA, 25 bp, Homo sapien
acagaggcaggactagggagatccc

SEQ ID NO: 1142062 - DNA, 25 bp, Homo sapien
gacacagaggcaggactagggagat

SEQ ID NO: 1142063 - DNA, 25 bp, Homo sapien
ggcaggactagggagatcccagagg

SEQ ID NO: 1142064 - DNA, 25 bp, Homo sapien
gcaggactagggagatcccagaggc

SEQ ID NO: 1142065 - DNA, 25 bp, Homo sapien
ctgtttaaccaagtggttaagctgc

SEQ ID NO: 1142066 - DNA, 25 bp, Homo sapien
agcctcttctctggtccattgtcag

SEQ ID NO: 1142067 - DNA, 25 bp, Homo sapien
gcctgctcccatttcaagtttgaaa

SEQ ID NO: 1142068 - DNA, 25 bp, Homo sapien
agggttcctggtccatcccacccat

SEQ ID NO: 1142069 - DNA, 25 bp, Homo sapien
tagggttcctggtccatcccaccca

SEQ ID NO: 1142070 - DNA, 25 bp, Homo sapien
caattgttcctggacctaagctggt

SEQ ID NO: 1142071 - DNA, 25 bp, Homo sapien
tttccaattgttcctggacctaagc

SEQ ID NO: 1142072 - DNA, 25 bp, Homo sapien
aattgttcctggacctaagctggtt

SEQ ID NO: 1142073 - DNA, 25 bp, Homo sapien
tccaattgttcctggacctaagctg

SEQ ID NO: 1142074 - DNA, 25 bp, Homo sapien
gccccaaagacatcaaacattagga

SEQ ID NO: 1142075 - DNA, 25 bp, Homo sapien
catcaaacattaggagtcctcttgc

SEQ ID NO: 1142076 - DNA, 25 bp, Homo sapien
cttcaaggcaaaagccccaaagaca

SEQ ID NO: 1142077 - DNA, 25 bp, Homo sapien
ttcaaggcaaaagccccaaagacat

SEQ ID NO: 1142078 - DNA, 25 bp, Homo sapien
gaggcaaaggtctatccccattgtc

SEQ ID NO: 1142079 - DNA, 25 bp, Homo sapien
ctgccttgtacttgagtcgctcctt

SEQ ID NO: 1142080 - DNA, 25 bp, Homo sapien
ttccgaggcaaaggtctatccccat

SEQ ID NO: 1142081 - DNA, 25 bp, Homo sapien
ttgagtcgctccttttccgaggcaa

SEQ ID NO: 1142082 - DNA, 25 bp, Homo sapien
tccaagccagcacaatgagtggtgg

SEQ ID NO: 1142083 - DNA, 25 bp, Homo sapien
aacaccacaataattgcaggcggga

SEQ ID NO: 1142084 - DNA, 25 bp, Homo sapien
gtttgaagactctgaaccgagtgcc

SEQ ID NO: 1142085 - DNA, 25 bp, Homo sapien
gcactgggaagtatgaggaacgcca

SEQ ID NO: 1142086 - DNA, 25 bp, Homo sapien
tctgttacaatgtcaggtaaatcct

SEQ ID NO: 1142087 - DNA, 25 bp, Homo sapien
aaagggactctgttacaatgtcagg

SEQ ID NO: 1142088 - DNA, 25 bp, Homo sapien
acaatgtcaggtaaatccttttcac

SEQ ID NO: 1142089 - DNA, 25 bp, Homo sapien
tgtttttggtcataaagggactctg

SEQ ID NO: 1142090 - DNA, 25 bp, Homo sapien
ggctggctgacaacaggcctaggcc

SEQ ID NO: 1142091 - DNA, 25 bp, Homo sapien
tggctgacaacaggcctaggccaac

SEQ ID NO: 1142092 - DNA, 25 bp, Homo sapien
attacacagtgcctccccgtagcag

SEQ ID NO: 1142093 - DNA, 25 bp, Homo sapien
gccaacaaaggcagattacacagtg

SEQ ID NO: 1142094 - DNA, 25 bp, Homo sapien
tcctggaatttgaaggcagcagaga

SEQ ID NO: 1142095 - DNA, 25 bp, Homo sapien
tgcaggattcctggaatttgaaggc

SEQ ID NO: 1142096 - DNA, 25 bp, Homo sapien
tgactgttggcgtgcaggattcctg

SEQ ID NO: 1142097 - DNA, 25 bp, Homo sapien
gcagagctgactgttggcgtgcagg

SEQ ID NO: 1142098 - DNA, 25 bp, Homo sapien
gagttctctgggtccactccattgc

SEQ ID NO: 1142099 - DNA, 25 bp, Homo sapien
gcatctccagcatgggactgcgatg

SEQ ID NO: 1142100 - DNA, 25 bp, Homo sapien
tgttgcttggtagcttctgggttgg

SEQ ID NO: 1142101 - DNA, 25 bp, Homo sapien
gcccgttttatcctggcatctccag

SEQ ID NO: 1142102 - DNA, 25 bp, Homo sapien
cgccacagagaatgctgcgtctcct

SEQ ID NO: 1142103 - DNA, 25 bp, Homo sapien
gatcaccaatggcaaatgcagttgt

SEQ ID NO: 1142104 - DNA, 25 bp, Homo sapien
tctactctccctgagatgagagaag

SEQ ID NO: 1142105 - DNA, 25 bp, Homo sapien
tgagaaacttctgtagccacaaatc

SEQ ID NO: 1142106 - DNA, 25 bp, Homo sapien
tcagtccctctatgaccaggtagct

SEQ ID NO: 1142107 - DNA, 25 bp, Homo sapien
caaggtcagtccctctatgaccagg

SEQ ID NO: 1142108 - DNA, 25 bp, Homo sapien
agggcaaggtcagtccctctatgac

SEQ ID NO: 1142109 - DNA, 25 bp, Homo sapien
ccctctatgaccaggtagcttctga

SEQ ID NO: 1142110 - DNA, 25 bp, Homo sapien
ctgatgaagcatgggacagcaatgg

SEQ ID NO: 1142111 - DNA, 25 bp, Homo sapien
gcctgatgaagcatgggacagcaat

SEQ ID NO: 1142112 - DNA, 25 bp, Homo sapien
tgaagcatgggacagcaatggatgt

SEQ ID NO: 1142113 - DNA, 25 bp, Homo sapien
gatgaagcatgggacagcaatggat

SEQ ID NO: 1142114 - DNA, 25 bp, Homo sapien
cctcgctttcaggtgtttcaggcag

SEQ ID NO: 1142115 - DNA, 25 bp, Homo sapien
agccaacctctggatgcatgcctcg

SEQ ID NO: 1142116 - DNA, 25 bp, Homo sapien
caggcagagcaggacttgcatgtga

SEQ ID NO: 1142117 - DNA, 25 bp, Homo sapien
ctggccaagggctgaatgaagggtt

SEQ ID NO: 1142118 - DNA, 25 bp, Homo sapien
cttaaggtaatactggaggcaagtc

SEQ ID NO: 1142119 - DNA, 25 bp, Homo sapien
gaggcaagtcttttagcatctgcct

SEQ ID NO: 1142120 - DNA, 25 bp, Homo sapien
taaggtaatactggaggcaagtctt

SEQ ID NO: 1142121 - DNA, 25 bp, Homo sapien
tactggaggcaagtcttttagcatc

SEQ ID NO: 1142122 - DNA, 25 bp, Homo sapien
ttgaagggcatctgtgcttacagac

SEQ ID NO: 1142123 - DNA, 25 bp, Homo sapien
tgaagtgtcccataaggaccaggga

SEQ ID NO: 1142124 - DNA, 25 bp, Homo sapien
cactagccttaaactggcactgcca

SEQ ID NO: 1142125 - DNA, 25 bp, Homo sapien
ggaccagggaaaaatacagtccatg

SEQ ID NO: 1142126 - DNA, 25 bp, Homo sapien
cagtctttgtgccaaggtgcggaaa

SEQ ID NO: 1142127 - DNA, 25 bp, Homo sapien
caagcacttgataggtgaggcacag

SEQ ID NO: 1142128 - DNA, 25 bp, Homo sapien
gcacctgcctcttgccaagcacttg

SEQ ID NO: 1142129 - DNA, 25 bp, Homo sapien
tctaacatgtattctgcacctgcct

SEQ ID NO: 1142130 - DNA, 25 bp, Homo sapien
agatcccacacggacagccattgtc

SEQ ID NO: 1142131 - DNA, 25 bp, Homo sapien
cctaatggtgtgttttacgatatga

SEQ ID NO: 1142132 - DNA, 25 bp, Homo sapien
tcatggtggttcagatcccacacgg

SEQ ID NO: 1142133 - DNA, 25 bp, Homo sapien
tttccaatttatcctaatggtgtgt

SEQ ID NO: 1142134 - DNA, 25 bp, Homo sapien
atcagcaagggagtcctgaccatag

SEQ ID NO: 1142135 - DNA, 25 bp, Homo sapien
caagggagtcctgaccatagcaggc

SEQ ID NO: 1142136 - DNA, 25 bp, Homo sapien
cctcagctgacatatacttgggctc

SEQ ID NO: 1142137 - DNA, 25 bp, Homo sapien
ctgaccatagcaggcctcagctgac

SEQ ID NO: 1142138 - DNA, 25 bp, Homo sapien
cctgcttctgaatggtgcccttgtg

SEQ ID NO: 1142139 - DNA, 25 bp, Homo sapien
tttgtggtggtttggccaaacacag

SEQ ID NO: 1142140 - DNA, 25 bp, Homo sapien
ggcagtatgaacaggatccatgtca

SEQ ID NO: 1142141 - DNA, 25 bp, Homo sapien
aaacacagatgatagccttggcagt

SEQ ID NO: 1142142 - DNA, 25 bp, Homo sapien
tcggctgaagcgtgcaaggctctgc

SEQ ID NO: 1142143 - DNA, 25 bp, Homo sapien
ctttctaaggcaccacggagcagta

SEQ ID NO: 1142144 - DNA, 25 bp, Homo sapien
aaggctctgctgagaagtcggccac

SEQ ID NO: 1142145 - DNA, 25 bp, Homo sapien
cggagcagtagatgtgctctgacaa

SEQ ID NO: 1142146 - DNA, 25 bp, Homo sapien
tctttcttaatccatctgctaccat

SEQ ID NO: 1142147 - DNA, 25 bp, Homo sapien
tgttgattcactgacagtttgagtt

SEQ ID NO: 1142148 - DNA, 25 bp, Homo sapien
tcttaatccatctgctaccatttac

SEQ ID NO: 1142149 - DNA, 25 bp, Homo sapien
ttcttaatccatctgctaccattta

SEQ ID NO: 1142150 - DNA, 25 bp, Homo sapien
catgctccagagacaagggcgtatg

SEQ ID NO: 1142151 - DNA, 25 bp, Homo sapien
caattagctgctgtggtatgccaaa

SEQ ID NO: 1142152 - DNA, 25 bp, Homo sapien
tcaaggtgtcatgggaaagcagcct

SEQ ID NO: 1142153 - DNA, 25 bp, Homo sapien
tagagcggctttgcggaaaacttca

SEQ ID NO: 1142154 - DNA, 25 bp, Homo sapien
tcttttcagccgcaactgatgaacg

SEQ ID NO: 1142155 - DNA, 25 bp, Homo sapien
cttttcttttcagccgcaactgatg

SEQ ID NO: 1142156 - DNA, 25 bp, Homo sapien
tcagccgcaactgatgaacgtacat

SEQ ID NO: 1142157 - DNA, 25 bp, Homo sapien
cagggccagtgatggtcttcagggt

SEQ ID NO: 1142158 - DNA, 25 bp, Homo sapien
taaatcacagatactaaatatgtca

SEQ ID NO: 1142159 - DNA, 25 bp, Homo sapien
atcagataaatcacagatactaaat

SEQ ID NO: 1142160 - DNA, 25 bp, Homo sapien
cttgaccaaagacttggcatcagat

SEQ ID NO: 1142161 - DNA, 25 bp, Homo sapien
ccgtgggatctgtgttataattgga

SEQ ID NO: 1142162 - DNA, 25 bp, Homo sapien
tctccttccaatgacagtcccctgg

SEQ ID NO: 1142163 - DNA, 25 bp, Homo sapien
tggaccctgcatcacacctgcacag

SEQ ID NO: 1142164 - DNA, 25 bp, Homo sapien
gctccactccatggccatcttggct

SEQ ID NO: 1142165 - DNA, 25 bp, Homo sapien
tgctgggtgatgttgctcagctcca

SEQ ID NO: 1142166 - DNA, 25 bp, Homo sapien
cgacccggcaccagaagtcgtgggc

SEQ ID NO: 1142167 - DNA, 25 bp, Homo sapien
aacggcttttccagcgcttcggcga

SEQ ID NO: 1142168 - DNA, 25 bp, Homo sapien
cagtgggtgcggtacggtctcggaa

SEQ ID NO: 1142169 - DNA, 25 bp, Homo sapien
tcgggtgtgattgcagccagcgcct

SEQ ID NO: 1142170 - DNA, 25 bp, Homo sapien
ggctgctaccgctgttgccacgtgt

SEQ ID NO: 1142171 - DNA, 25 bp, Homo sapien
gaaaagcacagagcagctcccggcc

SEQ ID NO: 1142172 - DNA, 25 bp, Homo sapien
agtggagggagctagggctgccgcg

SEQ ID NO: 1142173 - DNA, 25 bp, Homo sapien
gccgggtcctgtcgctggagaatca

SEQ ID NO: 1142174 - DNA, 25 bp, Homo sapien
tttgatgccacctgacctggaccag

SEQ ID NO: 1142175 - DNA, 25 bp, Homo sapien
agccctccacgctgcatgcttttaa

SEQ ID NO: 1142176 - DNA, 25 bp, Homo sapien
agcgaggcgagttgtgcatttccac

SEQ ID NO: 1142177 - DNA, 25 bp, Homo sapien
cagaaatgatcaagggtttgacggt

SEQ ID NO: 1142178 - DNA, 25 bp, Homo sapien
tacaagcttactggcagggaacact

SEQ ID NO: 1142179 - DNA, 25 bp, Homo sapien
tactagctttatagcagccagagga

SEQ ID NO: 1142180 - DNA, 25 bp, Homo sapien
tgtaacttgctccactagctcccgg

SEQ ID NO: 1142181 - DNA, 25 bp, Homo sapien
aactgacaggcaaagggtgaggcac

SEQ ID NO: 1142182 - DNA, 25 bp, Homo sapien
cagcatatgcgttatgagaggacca

SEQ ID NO: 1142183 - DNA, 25 bp, Homo sapien
gggacctgcccctacatggtaacag

SEQ ID NO: 1142184 - DNA, 25 bp, Homo sapien
caattagtaccctgaagcctaggct

SEQ ID NO: 1142185 - DNA, 25 bp, Homo sapien
ggataaaggctgtccaaggccctaa

SEQ ID NO: 1142186 - DNA, 25 bp, Homo sapien
gcccatttcggagttgccaagaaga

SEQ ID NO: 1142187 - DNA, 25 bp, Homo sapien
tagaggctgccaagtctgggctacc

SEQ ID NO: 1142188 - DNA, 25 bp, Homo sapien
tgtagaaacaacacctctggacatg

SEQ ID NO: 1142189 - DNA, 25 bp, Homo sapien
gacaaaagcttttgacgggcaagaa

SEQ ID NO: 1142190 - DNA, 25 bp, Homo sapien
tccaacagggcaggatgcgaaggct

SEQ ID NO: 1142191 - DNA, 25 bp, Homo sapien
caacagggcaggatgcgaaggcttt

SEQ ID NO: 1142192 - DNA, 25 bp, Homo sapien
ccaacagggcaggatgcgaaggctt

SEQ ID NO: 1142193 - DNA, 25 bp, Homo sapien
acagggcaggatgcgaaggctttct

SEQ ID NO: 1142194 - DNA, 25 bp, Homo sapien
gagacatccccgagacttgctagag

SEQ ID NO: 1142195 - DNA, 25 bp, Homo sapien
atcatgttccatgtaagggcacccc

SEQ ID NO: 1142196 - DNA, 25 bp, Homo sapien
catcccagaggtatattgcttcagg

SEQ ID NO: 1142197 - DNA, 25 bp, Homo sapien
ggaaaaggtgcccaagacatgagaa

SEQ ID NO: 1142198 - DNA, 25 bp, Homo sapien
tctctgagcaagttgaatatcattg

SEQ ID NO: 1142199 - DNA, 25 bp, Homo sapien
tacagctcacggattctctctgagc

SEQ ID NO: 1142200 - DNA, 25 bp, Homo sapien
aatgaaatagttataacccctcagc

SEQ ID NO: 1142201 - DNA, 25 bp, Homo sapien
gaggattactagagcagctaggctt

SEQ ID NO: 1142202 - DNA, 25 bp, Homo sapien
gacattctctccattatggagcaac

SEQ ID NO: 1142203 - DNA, 25 bp, Homo sapien
gcaggtctaaagatagtcaacattc

SEQ ID NO: 1142204 - DNA, 25 bp, Homo sapien
atggagcaaccacatttgttggtgc

SEQ ID NO: 1142205 - DNA, 25 bp, Homo sapien
tcttatctattaatgaagcaggtct

SEQ ID NO: 1142206 - DNA, 25 bp, Homo sapien
taacttctgtggtcacgtgtgcagc

SEQ ID NO: 1142207 - DNA, 25 bp, Homo sapien
ctttttaacttctgtggtcacgtgt

SEQ ID NO: 1142208 - DNA, 25 bp, Homo sapien
tctgtggtcacgtgtgcagcactac

SEQ ID NO: 1142209 - DNA, 25 bp, Homo sapien
acttctgtggtcacgtgtgcagcac

SEQ ID NO: 1142210 - DNA, 25 bp, Homo sapien
agtctctggaaatgttttgacataa

SEQ ID NO: 1142211 - DNA, 25 bp, Homo sapien
aaagtgaggccatgaattatgaacc

SEQ ID NO: 1142212 - DNA, 25 bp, Homo sapien
taggcttcagaatggccctgccagt

SEQ ID NO: 1142213 - DNA, 25 bp, Homo sapien
gaacaatactgaagctaccggtagg

SEQ ID NO: 1142214 - DNA, 25 bp, Homo sapien
tacattggctcaagatacattctct

SEQ ID NO: 1142215 - DNA, 25 bp, Homo sapien
gcaggctcatacttatcacgtccaa

SEQ ID NO: 1142216 - DNA, 25 bp, Homo sapien
ctgcaggctcatacttatcacgtcc

SEQ ID NO: 1142217 - DNA, 25 bp, Homo sapien
caggctcatacttatcacgtccaac

SEQ ID NO: 1142218 - DNA, 25 bp, Homo sapien
tgcaggctcatacttatcacgtcca

SEQ ID NO: 1142219 - DNA, 25 bp, Homo sapien
ccatgtccctgtcttttttgccctt

SEQ ID NO: 1142220 - DNA, 25 bp, Homo sapien
catccatgtccctgtcttttttgcc

SEQ ID NO: 1142221 - DNA, 25 bp, Homo sapien
tcatccatgtccctgtcttttttgc

SEQ ID NO: 1142222 - DNA, 25 bp, Homo sapien
tctttcttcagttcatccatgtccc

SEQ ID NO: 1142223 - DNA, 25 bp, Homo sapien
gatgaccaggtcgattctagacagg

SEQ ID NO: 1142224 - DNA, 25 bp, Homo sapien
caggttaagtctatggaagcttcca

SEQ ID NO: 1142225 - DNA, 25 bp, Homo sapien
tctttgaagaatacagtgaggcctg

SEQ ID NO: 1142226 - DNA, 25 bp, Homo sapien
tggctaaagctgagtgaccgtggcc

SEQ ID NO: 1142227 - DNA, 25 bp, Homo sapien
gtctgttccatatttacgatgaagt

SEQ ID NO: 1142228 - DNA, 25 bp, Homo sapien
ccggctcaagtctgttccatattta

SEQ ID NO: 1142229 - DNA, 25 bp, Homo sapien
catcaaggctaagtttatgatcatc

SEQ ID NO: 1142230 - DNA, 25 bp, Homo sapien
tcatcaaggctaagtttatgatcat

SEQ ID NO: 1142231 - DNA, 25 bp, Homo sapien
cattttcttactagagcccctgagg

SEQ ID NO: 1142232 - DNA, 25 bp, Homo sapien
ctttgaagccaactgcaagtcctgg

SEQ ID NO: 1142233 - DNA, 25 bp, Homo sapien
taacacactgcaatgggctagctgg

SEQ ID NO: 1142234 - DNA, 25 bp, Homo sapien
gagcaaaggtgtggcggtttctccc

SEQ ID NO: 1142235 - DNA, 25 bp, Homo sapien
gggccttaaacccaagattcactga

SEQ ID NO: 1142236 - DNA, 25 bp, Homo sapien
cagggttcaggcaaacaataggccc

SEQ ID NO: 1142237 - DNA, 25 bp, Homo sapien
taaacctgttgactgaaaagtactc

SEQ ID NO: 1142238 - DNA, 25 bp, Homo sapien
taggcccaaggaactcataacaccc

SEQ ID NO: 1142239 - DNA, 25 bp, Homo sapien
ctgccgacaaaacttgatccattca

SEQ ID NO: 1142240 - DNA, 25 bp, Homo sapien
atctcgcgccaggatctcagctgca

SEQ ID NO: 1142241 - DNA, 25 bp, Homo sapien
ccgacaaaacttgatccattcagga

SEQ ID NO: 1142242 - DNA, 25 bp, Homo sapien
cagctgcacgagcagatgttaatcc

SEQ ID NO: 1142243 - DNA, 25 bp, Homo sapien
cacagtaacattgagaaccccccaa

SEQ ID NO: 1142244 - DNA, 25 bp, Homo sapien
tggatgctataagccaagaaacaaa

SEQ ID NO: 1142245 - DNA, 25 bp, Homo sapien
agaaacaaagaatcgctccaatcca

SEQ ID NO: 1142246 - DNA, 25 bp, Homo sapien
tcttctgtagcagcttggatgctat

SEQ ID NO: 1142247 - DNA, 25 bp, Homo sapien
tgaaggattccatgatctttgaact

SEQ ID NO: 1142248 - DNA, 25 bp, Homo sapien
tagcttcttgatagtaggagaagca

SEQ ID NO: 1142249 - DNA, 25 bp, Homo sapien
ctgagggaccatgtttttgaaggat

SEQ ID NO: 1142250 - DNA, 25 bp, Homo sapien
gaagcaaccagttatgattacaacg

SEQ ID NO: 1142251 - DNA, 25 bp, Homo sapien
agaaaggctaccactttttggatag

SEQ ID NO: 1142252 - DNA, 25 bp, Homo sapien
aagcttgctcgccagtttaagagat

SEQ ID NO: 1142253 - DNA, 25 bp, Homo sapien
ttggggctgtcaagtcatccactgg

SEQ ID NO: 1142254 - DNA, 25 bp, Homo sapien
catctctctgatgagtcatgtaata

SEQ ID NO: 1142255 - DNA, 25 bp, Homo sapien
caccatttcgaatcacaagggcttg

SEQ ID NO: 1142256 - DNA, 25 bp, Homo sapien
aaccacaacttcctccgcatttatg

SEQ ID NO: 1142257 - DNA, 25 bp, Homo sapien
ttgcagccatttgcagatatgattc

SEQ ID NO: 1142258 - DNA, 25 bp, Homo sapien
ggtcagcaggaattcggtctcctcc

SEQ ID NO: 1142259 - DNA, 25 bp, Homo sapien
gcaatgttcctcgtctccagggggt

SEQ ID NO: 1142260 - DNA, 25 bp, Homo sapien
caccagtgagcgaggagttatccac

SEQ ID NO: 1142261 - DNA, 25 bp, Homo sapien
tgtgaaatctggagacctagtctgg

SEQ ID NO: 1142262 - DNA, 25 bp, Homo sapien
tgattcaccagtgagcgaggagtta

SEQ ID NO: 1142263 - DNA, 25 bp, Homo sapien
aaaccttccggcacattggctacga

SEQ ID NO: 1142264 - DNA, 25 bp, Homo sapien
tgtagacaacaataccacgtgcggt

SEQ ID NO: 1142265 - DNA, 25 bp, Homo sapien
caagccaggtgtactcaaggatgag

SEQ ID NO: 1142266 - DNA, 25 bp, Homo sapien
tcacagtgcgatccccagtgtagac

SEQ ID NO: 1142267 - DNA, 25 bp, Homo sapien
tgtcaaaattcaccacgtgatgtgg

SEQ ID NO: 1142268 - DNA, 25 bp, Homo sapien
taacattcgtgcaagctgatctgag

SEQ ID NO: 1142269 - DNA, 25 bp, Homo sapien
cgtgatgtggctctcaagaagaact

SEQ ID NO: 1142270 - DNA, 25 bp, Homo sapien
tgatctgagtcagggtgaccatcac

SEQ ID NO: 1142271 - DNA, 25 bp, Homo sapien
agttccagttttatcagagcagatg

SEQ ID NO: 1142272 - DNA, 25 bp, Homo sapien
gtttttccttgccatgcgtttggca

SEQ ID NO: 1142273 - DNA, 25 bp, Homo sapien
gtttggcagtaagtgtcagacagac

SEQ ID NO: 1142274 - DNA, 25 bp, Homo sapien
taagttcttcactaagcagtttttc

SEQ ID NO: 1142275 - DNA, 25 bp, Homo sapien
tgattctctgtcgtatcagcttcat

SEQ ID NO: 1142276 - DNA, 25 bp, Homo sapien
tctgattctctgtcgtatcagcttc

SEQ ID NO: 1142277 - DNA, 25 bp, Homo sapien
cactctgattctctgtcgtatcagc

SEQ ID NO: 1142278 - DNA, 25 bp, Homo sapien
actctgattctctgtcgtatcagct

SEQ ID NO: 1142279 - DNA, 25 bp, Homo sapien
ttttcctggttagcctgaaacactg

SEQ ID NO: 1142280 - DNA, 25 bp, Homo sapien
aaacactgccctgttacaaagacct

SEQ ID NO: 1142281 - DNA, 25 bp, Homo sapien
ggtagctgaagtcttgtcaaaagag

SEQ ID NO: 1142282 - DNA, 25 bp, Homo sapien
tgcaattctggacagagcaagccag

SEQ ID NO: 1142283 - DNA, 25 bp, Homo sapien
tcaggatctacaggcaacacaatgt

SEQ ID NO: 1142284 - DNA, 25 bp, Homo sapien
aatacgattatggagtcactgcagc

SEQ ID NO: 1142285 - DNA, 25 bp, Homo sapien
ttatacccacaactactacaggcag

SEQ ID NO: 1142286 - DNA, 25 bp, Homo sapien
gaattccacaggctaaggctgggct

SEQ ID NO: 1142287 - DNA, 25 bp, Homo sapien
tgaagggtatctcgacgattttggc

SEQ ID NO: 1142288 - DNA, 25 bp, Homo sapien
tcatctccttcacggaaccacagca

SEQ ID NO: 1142289 - DNA, 25 bp, Homo sapien
tttggcgtatctttctctcatctcc

SEQ ID NO: 1142290 - DNA, 25 bp, Homo sapien
tgcactttaagagtgctgactcaga

SEQ ID NO: 1142291 - DNA, 25 bp, Homo sapien
gcaacggtctaggatcctttctggg

SEQ ID NO: 1142292 - DNA, 25 bp, Homo sapien
gttctgaaaggcgtctttcagctcc

SEQ ID NO: 1142293 - DNA, 25 bp, Homo sapien
tggaggaggatagagctgcaacggt

SEQ ID NO: 1142294 - DNA, 25 bp, Homo sapien
cagctccaaataggcgttctgaaag

SEQ ID NO: 1142295 - DNA, 25 bp, Homo sapien
tccttcggttggatagacacatacg

SEQ ID NO: 1142296 - DNA, 25 bp, Homo sapien
gaactgactagcatgagaccaaagg

SEQ ID NO: 1142297 - DNA, 25 bp, Homo sapien
catcaggacgttgtttctcacagcc

SEQ ID NO: 1142298 - DNA, 25 bp, Homo sapien
gaggattgcccctaaaagatgtaga

SEQ ID NO: 1142299 - DNA, 25 bp, Homo sapien
tgggcagtaagaaggacaacagcag

SEQ ID NO: 1142300 - DNA, 25 bp, Homo sapien
gatattagggttctagacttgccca

SEQ ID NO: 1142301 - DNA, 25 bp, Homo sapien
gacttgcccactgatgatgacatta

SEQ ID NO: 1142302 - DNA, 25 bp, Homo sapien
agcccgcctacctttctctggagtg

SEQ ID NO: 1142303 - DNA, 25 bp, Homo sapien
gaggacaggagcctttgaaaatttc

SEQ ID NO: 1142304 - DNA, 25 bp, Homo sapien
aggacaggagcctttgaaaatttca

SEQ ID NO: 1142305 - DNA, 25 bp, Homo sapien
ctgcgaggaggacaggagcctttga

SEQ ID NO: 1142306 - DNA, 25 bp, Homo sapien
cgaggaggacaggagcctttgaaaa

SEQ ID NO: 1142307 - DNA, 25 bp, Homo sapien
gcacttcgacatttgcccacggcat

SEQ ID NO: 1142308 - DNA, 25 bp, Homo sapien
caatcatggagatgagcccaacaaa

SEQ ID NO: 1142309 - DNA, 25 bp, Homo sapien
tagggaaattcacatcgtcagtgtc

SEQ ID NO: 1142310 - DNA, 25 bp, Homo sapien
caaagcacagattatcgatagggaa

SEQ ID NO: 1142311 - DNA, 25 bp, Homo sapien
gcttttcagggcagtattaatcctg

SEQ ID NO: 1142312 - DNA, 25 bp, Homo sapien
aaccaaatacccagcaacaggatat

SEQ ID NO: 1142313 - DNA, 25 bp, Homo sapien
tattaatcctgagagtaggccgggt

SEQ ID NO: 1142314 - DNA, 25 bp, Homo sapien
ttagtgcacttgagtaatattcagc

SEQ ID NO: 1142315 - DNA, 25 bp, Homo sapien
aacaagacaatgtgttgaatgcaac

SEQ ID NO: 1142316 - DNA, 25 bp, Homo sapien
aagtcttatatccagtaggcaagag

SEQ ID NO: 1142317 - DNA, 25 bp, Homo sapien
ttatatccagtaggcaagagtaaat

SEQ ID NO: 1142318 - DNA, 25 bp, Homo sapien
gcaactgccaagtaaatgaccttaa

SEQ ID NO: 1142319 - DNA, 25 bp, Homo sapien
tgtgattggatggtctcctgtgacc

SEQ ID NO: 1142320 - DNA, 25 bp, Homo sapien
gattggatggtctcctgtgaccatg

SEQ ID NO: 1142321 - DNA, 25 bp, Homo sapien
gctgtgattggatggtctcctgtga

SEQ ID NO: 1142322 - DNA, 25 bp, Homo sapien
ctttagctgtgattggatggtctcc

SEQ ID NO: 1142323 - DNA, 25 bp, Homo sapien
tcacctggctgactgggatgttgag

SEQ ID NO: 1142324 - DNA, 25 bp, Homo sapien
aggcgggcagcaatgtcttccacgg

SEQ ID NO: 1142325 - DNA, 25 bp, Homo sapien
gcagcaatgtcttccacggtctcat

SEQ ID NO: 1142326 - DNA, 25 bp, Homo sapien
tgttgaggcgggcagcaatgtcttc

SEQ ID NO: 1142327 - DNA, 25 bp, Homo sapien
agctgatacaagaccaaaccctcct

SEQ ID NO: 1142328 - DNA, 25 bp, Homo sapien
ctctaaccgtaacatagggtgaaag

SEQ ID NO: 1142329 - DNA, 25 bp, Homo sapien
gtggcagagctgatacaagaccaaa

SEQ ID NO: 1142330 - DNA, 25 bp, Homo sapien
cctcctctaaccgtaacatagggtg

SEQ ID NO: 1142331 - DNA, 25 bp, Homo sapien
agctgctcggaggtcatgtccttta

SEQ ID NO: 1142332 - DNA, 25 bp, Homo sapien
tgccgtgtactacgcaggccttggc

SEQ ID NO: 1142333 - DNA, 25 bp, Homo sapien
tgtcctttagatcactgccgtgtac

SEQ ID NO: 1142334 - DNA, 25 bp, Homo sapien
tgctcggaggtcatgtcctttagat

SEQ ID NO: 1142335 - DNA, 25 bp, Homo sapien
tccctaaagccaatagtgcccaaag

SEQ ID NO: 1142336 - DNA, 25 bp, Homo sapien
cagcctgatccttgtgctggctgac

SEQ ID NO: 1142337 - DNA, 25 bp, Homo sapien
tagtgcccaaagcagcctgatcctt

SEQ ID NO: 1142338 - DNA, 25 bp, Homo sapien
tgtttccactggaactccaatccct

SEQ ID NO: 1142339 - DNA, 25 bp, Homo sapien
tctaatacagcgaggtatgcatcca

SEQ ID NO: 1142340 - DNA, 25 bp, Homo sapien
ctgagtctaatacagcgaggtatgc

SEQ ID NO: 1142341 - DNA, 25 bp, Homo sapien
tatttatactgagtctaatacagcg

SEQ ID NO: 1142342 - DNA, 25 bp, Homo sapien
tacagcgaggtatgcatccatccat

SEQ ID NO: 1142343 - DNA, 25 bp, Homo sapien
aatcacttttcctagcgatggaaat

SEQ ID NO: 1142344 - DNA, 25 bp, Homo sapien
agagtcattcacaccgtcaccagtc

SEQ ID NO: 1142345 - DNA, 25 bp, Homo sapien
catagcaaccccaatgtctgctttc

SEQ ID NO: 1142346 - DNA, 25 bp, Homo sapien
ccagaagaatcatgtcagcagcttg

SEQ ID NO: 1142347 - DNA, 25 bp, Homo sapien
gcttggacacatctgagccagcaat

SEQ ID NO: 1142348 - DNA, 25 bp, Homo sapien
ttatgagacaagcacactggaaact

SEQ ID NO: 1142349 - DNA, 25 bp, Homo sapien
tctgaataagatcttggtgtacacc

SEQ ID NO: 1142350 - DNA, 25 bp, Homo sapien
ggaaactgaacatatccaagaagta

SEQ ID NO: 1142351 - DNA, 25 bp, Homo sapien
gatgctaatgggcagtatctgaata

SEQ ID NO: 1142352 - DNA, 25 bp, Homo sapien
ggtgatctcgggaatgttactggtt

SEQ ID NO: 1142353 - DNA, 25 bp, Homo sapien
tactggttaaggtataagcaatgga

SEQ ID NO: 1142354 - DNA, 25 bp, Homo sapien
aatgtttgcaataataaatatcagg

SEQ ID NO: 1142355 - DNA, 25 bp, Homo sapien
atgtcagtgcccaagtcaatgcaga

SEQ ID NO: 1142356 - DNA, 25 bp, Homo sapien
cgatctgtgactgttgtgacactca

SEQ ID NO: 1142357 - DNA, 25 bp, Homo sapien
gatctgtgactgttgtgacactcac

SEQ ID NO: 1142358 - DNA, 25 bp, Homo sapien
tcagccgctcattcacaagtttgtc

SEQ ID NO: 1142359 - DNA, 25 bp, Homo sapien
catgctgatcagccgctcattcaca

SEQ ID NO: 1142360 - DNA, 25 bp, Homo sapien
tttgtctgttttgggatttctgggc

SEQ ID NO: 1142361 - DNA, 25 bp, Homo sapien
cacaagtttgtctgttttgggattt

SEQ ID NO: 1142362 - DNA, 25 bp, Homo sapien
gtgccagcttcccactccaggctgc

SEQ ID NO: 1142363 - DNA, 25 bp, Homo sapien
tagatgtgccagcttcccactccag

SEQ ID NO: 1142364 - DNA, 25 bp, Homo sapien
gcttcccactccaggctgcagctta

SEQ ID NO: 1142365 - DNA, 25 bp, Homo sapien
ttagatgtgccagcttcccactcca

SEQ ID NO: 1142366 - DNA, 25 bp, Homo sapien
caggctcactccgttagggctcatc

SEQ ID NO: 1142367 - DNA, 25 bp, Homo sapien
tcctagacctgaaagtcgcctggat

SEQ ID NO: 1142368 - DNA, 25 bp, Homo sapien
cacaaaaggtaactgggcaaacagc

SEQ ID NO: 1142369 - DNA, 25 bp, Homo sapien
ttcagagaaactccacaggctcact

SEQ ID NO: 1142370 - DNA, 25 bp, Homo sapien
ataagtgtgtatctccagggaaagc

SEQ ID NO: 1142371 - DNA, 25 bp, Homo sapien
gaaccatgcctcctgttccgcaagg

SEQ ID NO: 1142372 - DNA, 25 bp, Homo sapien
gaaagcagcctgtgcgtcagtacac

SEQ ID NO: 1142373 - DNA, 25 bp, Homo sapien
tatgtgacccattaatccaggagaa

SEQ ID NO: 1142374 - DNA, 25 bp, Homo sapien
tcagctgattactgcagcaggcctg

SEQ ID NO: 1142375 - DNA, 25 bp, Homo sapien
tttggagcctacacaaagacacatg

SEQ ID NO: 1142376 - DNA, 25 bp, Homo sapien
caagggtacctgtatagccttcagc

SEQ ID NO: 1142377 - DNA, 25 bp, Homo sapien
gaaagaattgcctggtcactcacag

SEQ ID NO: 1142378 - DNA, 25 bp, Homo sapien
cacatcgttgatccagcggtcatcc

SEQ ID NO: 1142379 - DNA, 25 bp, Homo sapien
cactcggaggcccaacaggtgaatt

SEQ ID NO: 1142380 - DNA, 25 bp, Homo sapien
gcggtcatcccagtccactcggagg

SEQ ID NO: 1142381 - DNA, 25 bp, Homo sapien
gaggaagccgttctcagccagaatc

SEQ ID NO: 1142382 - DNA, 25 bp, Homo sapien
gcaggtgaactccacgattttcctc

SEQ ID NO: 1142383 - DNA, 25 bp, Homo sapien
ccacgatactgacgaagaaggctgt

SEQ ID NO: 1142384 - DNA, 25 bp, Homo sapien
gtcttacagatgaccaagtcggccc

SEQ ID NO: 1142385 - DNA, 25 bp, Homo sapien
tgcaccaccacgatactgacgaaga

SEQ ID NO: 1142386 - DNA, 25 bp, Homo sapien
tacatcctaagagcaacacccattc

SEQ ID NO: 1142387 - DNA, 25 bp, Homo sapien
ccagggctgtctcttcaaagaggcc

SEQ ID NO: 1142388 - DNA, 25 bp, Homo sapien
gcagccagggctgtctcttcaaaga

SEQ ID NO: 1142389 - DNA, 25 bp, Homo sapien
gggatacatcctaagagcaacaccc

SEQ ID NO: 1142390 - DNA, 25 bp, Homo sapien
tggagctaccagaggatcaacttac

SEQ ID NO: 1142391 - DNA, 25 bp, Homo sapien
tgcagttcgctgttgagcagttcca

SEQ ID NO: 1142392 - DNA, 25 bp, Homo sapien
tagctgctatcatggaagcctcagg

SEQ ID NO: 1142393 - DNA, 25 bp, Homo sapien
gcagttccatggagctagagcctgt

SEQ ID NO: 1142394 - DNA, 25 bp, Homo sapien
gaagaaagacactgtggcccatgcc

SEQ ID NO: 1142395 - DNA, 25 bp, Homo sapien
cctaacatgagcttggatgggtaag

SEQ ID NO: 1142396 - DNA, 25 bp, Homo sapien
ggaagaaagccgaattcacctaaca

SEQ ID NO: 1142397 - DNA, 25 bp, Homo sapien
gaaaccggccctgaagggactatca

SEQ ID NO: 1142398 - DNA, 25 bp, Homo sapien
caagccccatcttgatacataatgg

SEQ ID NO: 1142399 - DNA, 25 bp, Homo sapien
gctgtacaccagctttgtgtaggga

SEQ ID NO: 1142400 - DNA, 25 bp, Homo sapien
caagctgacagaattcaatttggag

SEQ ID NO: 1142401 - DNA, 25 bp, Homo sapien
cataatggcccaagctgacagaatt

SEQ ID NO: 1142402 - DNA, 25 bp, Homo sapien
tctgcagactttgtaatggaatccc

SEQ ID NO: 1142403 - DNA, 25 bp, Homo sapien
agattgctactccatgtgcccaggg

SEQ ID NO: 1142404 - DNA, 25 bp, Homo sapien
gccagtgtgggtcaaaaccagttta

SEQ ID NO: 1142405 - DNA, 25 bp, Homo sapien
cctagagacgcagaggaaatcagtc

SEQ ID NO: 1142406 - DNA, 25 bp, Homo sapien
gacttcgtcatatacgaagatgaga

SEQ ID NO: 1142407 - DNA, 25 bp, Homo sapien
tgatgagttttctgacttcgtcata

SEQ ID NO: 1142408 - DNA, 25 bp, Homo sapien
tatacgaagatgagaagagagtagg

SEQ ID NO: 1142409 - DNA, 25 bp, Homo sapien
ccagggcgtcgcctgatgatgagtt

SEQ ID NO: 1142410 - DNA, 25 bp, Homo sapien
tcctcctccaaccaaagtcagaatg

SEQ ID NO: 1142411 - DNA, 25 bp, Homo sapien
ccaaccaaagtcagaatgcccataa

SEQ ID NO: 1142412 - DNA, 25 bp, Homo sapien
aaccaaagtcagaatgcccataatt

SEQ ID NO: 1142413 - DNA, 25 bp, Homo sapien
ctccaaccaaagtcagaatgcccat

SEQ ID NO: 1142414 - DNA, 25 bp, Homo sapien
gtcagtttgctggtccagtcacctt

SEQ ID NO: 1142415 - DNA, 25 bp, Homo sapien
gaagatgtgactatggtcagtttgc

SEQ ID NO: 1142416 - DNA, 25 bp, Homo sapien
cttagctaatcagactgaccactga

SEQ ID NO: 1142417 - DNA, 25 bp, Homo sapien
gcctagacaccttgagggaaacaaa

SEQ ID NO: 1142418 - DNA, 25 bp, Homo sapien
gaataccaagttacctggaaagatg

SEQ ID NO: 1142419 - DNA, 25 bp, Homo sapien
gatgaaaaccaaccggaggatgatg

SEQ ID NO: 1142420 - DNA, 25 bp, Homo sapien
taaaatccaaacatgggacctcaac

SEQ ID NO: 1142421 - DNA, 25 bp, Homo sapien
acagacaagacacactacagtgagt

SEQ ID NO: 1142422 - DNA, 25 bp, Homo sapien
tagtaggtttccttctccacccagc

SEQ ID NO: 1142423 - DNA, 25 bp, Homo sapien
atagtaggtttccttctccacccag

SEQ ID NO: 1142424 - DNA, 25 bp, Homo sapien
ggtgtcggatgcagagtgtgtggcc

SEQ ID NO: 1142425 - DNA, 25 bp, Homo sapien
agagtgtgtggcctgatgctccacg

SEQ ID NO: 1142426 - DNA, 25 bp, Homo sapien
tggcctgatgctccacggcgtgcag

SEQ ID NO: 1142427 - DNA, 25 bp, Homo sapien
ggtgggtgtcggatgcagagtgtgt

SEQ ID NO: 1142428 - DNA, 25 bp, Homo sapien
tggatggttttcaggcagccctccc

SEQ ID NO: 1142429 - DNA, 25 bp, Homo sapien
taccagggtagagttccaaactcca

SEQ ID NO: 1142430 - DNA, 25 bp, Homo sapien
gctgcggtgctttcctaccagggta

SEQ ID NO: 1142431 - DNA, 25 bp, Homo sapien
ggacgtcttgcttccccacatgctg

SEQ ID NO: 1142432 - DNA, 25 bp, Homo sapien
aaaatgtattctttcagtctttccg

SEQ ID NO: 1142433 - DNA, 25 bp, Homo sapien
tgtattctttcagtctttccgggtg

SEQ ID NO: 1142434 - DNA, 25 bp, Homo sapien
aatgtattctttcagtctttccggg

SEQ ID NO: 1142435 - DNA, 25 bp, Homo sapien
tatttgtaaaaatccagatataaaa

SEQ ID NO: 1142436 - DNA, 25 bp, Homo sapien
tctggaaatcctttaggcgaggtgc

SEQ ID NO: 1142437 - DNA, 25 bp, Homo sapien
taaactgctggtcagggactcatgt

SEQ ID NO: 1142438 - DNA, 25 bp, Homo sapien
gacatctgtaccaaagaagcgacga

SEQ ID NO: 1142439 - DNA, 25 bp, Homo sapien
ccaactaaaagagcacgggcagaat

SEQ ID NO: 1142440 - DNA, 25 bp, Homo sapien
tcttagagctgtcagagaaacactg

SEQ ID NO: 1142441 - DNA, 25 bp, Homo sapien
gaaacactggcttaacgttctctgg

SEQ ID NO: 1142442 - DNA, 25 bp, Homo sapien
ggaaaatcaggtgtgaagttcagag

SEQ ID NO: 1142443 - DNA, 25 bp, Homo sapien
caaaagctaaagtctcagagtgttt

SEQ ID NO: 1142444 - DNA, 25 bp, Homo sapien
tgggcagtagggtgccaaatgtcat

SEQ ID NO: 1142445 - DNA, 25 bp, Homo sapien
ctttccggtttctcgcttgggcagt

SEQ ID NO: 1142446 - DNA, 25 bp, Homo sapien
tccggtttctcgcttgggcagtagg

SEQ ID NO: 1142447 - DNA, 25 bp, Homo sapien
ttctcgcttgggcagtagggtgcca

SEQ ID NO: 1142448 - DNA, 25 bp, Homo sapien
cacttaatccttttaacagctctga

SEQ ID NO: 1142449 - DNA, 25 bp, Homo sapien
gatgtaaaggacaccggcagtagag

SEQ ID NO: 1142450 - DNA, 25 bp, Homo sapien
agccactatgagactcccttttatg

SEQ ID NO: 1142451 - DNA, 25 bp, Homo sapien
gactcccttttatgcataatttcac

SEQ ID NO: 1142452 - DNA, 25 bp, Homo sapien
ttctttcctgtgcacagattaactg

SEQ ID NO: 1142453 - DNA, 25 bp, Homo sapien
ctttcctgtgcacagattaactgta

SEQ ID NO: 1142454 - DNA, 25 bp, Homo sapien
tcttctttcctgtgcacagattaac

SEQ ID NO: 1142455 - DNA, 25 bp, Homo sapien
ctcttctttcctgtgcacagattaa

SEQ ID NO: 1142456 - DNA, 25 bp, Homo sapien
tctctgcatttaccgaataacctct

SEQ ID NO: 1142457 - DNA, 25 bp, Homo sapien
ttctctgcatttaccgaataacctc

SEQ ID NO: 1142458 - DNA, 25 bp, Homo sapien
tagcgcagagacgaatccgcgctcc

SEQ ID NO: 1142459 - DNA, 25 bp, Homo sapien
tgcagccgccgtagcgcagagacga

SEQ ID NO: 1142460 - DNA, 25 bp, Homo sapien
aggctgtcgcgcgagctccccggaa

SEQ ID NO: 1142461 - DNA, 25 bp, Homo sapien
gcctccgcgggttgaccctctgcag

SEQ ID NO: 1142462 - DNA, 25 bp, Homo sapien
aacaaatccatacacatggaaatcg

SEQ ID NO: 1142463 - DNA, 25 bp, Homo sapien
ccatacacatggaaatcgaatgaag

SEQ ID NO: 1142464 - DNA, 25 bp, Homo sapien
catggaaatcgaatgaagtgaaacg

SEQ ID NO: 1142465 - DNA, 25 bp, Homo sapien
cgaatgaagtgaaacgcatgcaaat

SEQ ID NO: 1142466 - DNA, 25 bp, Homo sapien
gatccagtgtataacaaagtgcaac

SEQ ID NO: 1142467 - DNA, 25 bp, Homo sapien
gtcccgtgatgctgcataaatctca

SEQ ID NO: 1142468 - DNA, 25 bp, Homo sapien
catgtaagaagaggtgtagatctgt

SEQ ID NO: 1142469 - DNA, 25 bp, Homo sapien
ggaaattcacagatgtcccgtgatg

SEQ ID NO: 1142470 - DNA, 25 bp, Homo sapien
cctcccagacacacgtgtgagtggc

SEQ ID NO: 1142471 - DNA, 25 bp, Homo sapien
agacacacgtgtgagtggcagatcc

SEQ ID NO: 1142472 - DNA, 25 bp, Homo sapien
ctggaccctgctgatcatcagtgag

SEQ ID NO: 1142473 - DNA, 25 bp, Homo sapien
gatcatcagtgagccaagcctggaa

SEQ ID NO: 1142474 - DNA, 25 bp, Homo sapien
aggggacagacttgctcttgggccc

SEQ ID NO: 1142475 - DNA, 25 bp, Homo sapien
ttctccaggaggtgatctaggtcct

SEQ ID NO: 1142476 - DNA, 25 bp, Homo sapien
tcatcaagaacccatctccctcagg

SEQ ID NO: 1142477 - DNA, 25 bp, Homo sapien
gactgtggggcagcttaacgctcct

SEQ ID NO: 1142478 - DNA, 25 bp, Homo sapien
cagcttaacgctcctaccagatgac

SEQ ID NO: 1142479 - DNA, 25 bp, Homo sapien
aatcaagcctagtgagaattaagtc

SEQ ID NO: 1142480 - DNA, 25 bp, Homo sapien
aagcaggacagcaataaacatcctt

SEQ ID NO: 1142481 - DNA, 25 bp, Homo sapien
caataaacatccttgggtgtttcct

SEQ ID NO: 1142482 - DNA, 25 bp, Homo sapien
ttgctttggaaaccagtcagaatca

SEQ ID NO: 1142483 - DNA, 25 bp, Homo sapien
ggtctcatccacatgagttgcatcc

SEQ ID NO: 1142484 - DNA, 25 bp, Homo sapien
attctccggctgtgcattggccaaa

SEQ ID NO: 1142485 - DNA, 25 bp, Homo sapien
tctcatccacatgagttgcatcctc

SEQ ID NO: 1142486 - DNA, 25 bp, Homo sapien
tctccggctgtgcattggccaaatg

SEQ ID NO: 1142487 - DNA, 25 bp, Homo sapien
gaactggacaagtctgacatcaagc

SEQ ID NO: 1142488 - DNA, 25 bp, Homo sapien
ggaccgctgtagcttccgctttgaa

SEQ ID NO: 1142489 - DNA, 25 bp, Homo sapien
gacatcaagcccagagttgggaccg

SEQ ID NO: 1142490 - DNA, 25 bp, Homo sapien
taagtcctgaagaaaagcccaatcg

SEQ ID NO: 1142491 - DNA, 25 bp, Homo sapien
ttaatgtcaataccactgcactgag

SEQ ID NO: 1142492 - DNA, 25 bp, Homo sapien
gttaatgtcaataccactgcactga

SEQ ID NO: 1142493 - DNA, 25 bp, Homo sapien
ttcggcaacaacagtcctccatggc

SEQ ID NO: 1142494 - DNA, 25 bp, Homo sapien
tcggcaacaacagtcctccatggct

SEQ ID NO: 1142495 - DNA, 25 bp, Homo sapien
gctgctgacctccttactgtccaga

SEQ ID NO: 1142496 - DNA, 25 bp, Homo sapien
ctgagtacactttcttggacttgct

SEQ ID NO: 1142497 - DNA, 25 bp, Homo sapien
gctgacctccttactgtccagagtc

SEQ ID NO: 1142498 - DNA, 25 bp, Homo sapien
gacctccttactgtccagagtctac

SEQ ID NO: 1142499 - DNA, 25 bp, Homo sapien
tgtccccttgttccctccagtatgt

SEQ ID NO: 1142500 - DNA, 25 bp, Homo sapien
gcaggggcctccaccgtctgctgag

SEQ ID NO: 1142501 - DNA, 25 bp, Homo sapien
ggatactctcctccgaattattggg

SEQ ID NO: 1142502 - DNA, 25 bp, Homo sapien
tgacagttgttggaagaaggcctgc

SEQ ID NO: 1142503 - DNA, 25 bp, Homo sapien
gtccatggtagtggaaatttctcca

SEQ ID NO: 1142504 - DNA, 25 bp, Homo sapien
agtgctgtagggtatgctcatatgt

SEQ ID NO: 1142505 - DNA, 25 bp, Homo sapien
tgtttccctctcctgcaatatggat

SEQ ID NO: 1142506 - DNA, 25 bp, Homo sapien
ctgtgcttcattaatccggaggaaa

SEQ ID NO: 1142507 - DNA, 25 bp, Homo sapien
acctcatcctgggagctgcatggcg

SEQ ID NO: 1142508 - DNA, 25 bp, Homo sapien
catcctgggagctgcatggcggtgg

SEQ ID NO: 1142509 - DNA, 25 bp, Homo sapien
aggaagggaccctgtgagtaagcat

SEQ ID NO: 1142510 - DNA, 25 bp, Homo sapien
cctgtgagtaagcatgacctcatcc

SEQ ID NO: 1142511 - DNA, 25 bp, Homo sapien
ttcctttgtccagccgtgtaatggt

SEQ ID NO: 1142512 - DNA, 25 bp, Homo sapien
agcatggacaccacttcatgtaggg

SEQ ID NO: 1142513 - DNA, 25 bp, Homo sapien
caagactgcggagcatgttcacgca

SEQ ID NO: 1142514 - DNA, 25 bp, Homo sapien
ggaatgcttggctttggaggactca

SEQ ID NO: 1142515 - DNA, 25 bp, Homo sapien
tgaaagtcagtaggcagaacagctg

SEQ ID NO: 1142516 - DNA, 25 bp, Homo sapien
cagctgaaagtcagtaggcagaaca

SEQ ID NO: 1142517 - DNA, 25 bp, Homo sapien
cttctctgtttactgaaggtgttcc

SEQ ID NO: 1142518 - DNA, 25 bp, Homo sapien
tgtctatcttactgcctatgcactg

SEQ ID NO: 1142519 - DNA, 25 bp, Homo sapien
caactgttgctggagtttaccttcc

SEQ ID NO: 1142520 - DNA, 25 bp, Homo sapien
tccttcttaaaggaaccccagctgc

SEQ ID NO: 1142521 - DNA, 25 bp, Homo sapien
taaaagctcccctctgagaattgga

SEQ ID NO: 1142522 - DNA, 25 bp, Homo sapien
ttcaataacaccaactcctgcggca

SEQ ID NO: 1142523 - DNA, 25 bp, Homo sapien
aagtgtggacagagctcatcaggtg

SEQ ID NO: 1142524 - DNA, 25 bp, Homo sapien
tcagacccatagggcacaagctggt

SEQ ID NO: 1142525 - DNA, 25 bp, Homo sapien
tagggcacaagctggtctccaagtg

SEQ ID NO: 1142526 - DNA, 25 bp, Homo sapien
aagggcacctccacctgtggtcaag

SEQ ID NO: 1142527 - DNA, 25 bp, Homo sapien
agctgcggtgctgttctggctgcat

SEQ ID NO: 1142528 - DNA, 25 bp, Homo sapien
gcctcagtcagctgcggtgctgttc

SEQ ID NO: 1142529 - DNA, 25 bp, Homo sapien
cagggccagcaaccttctactgaac

SEQ ID NO: 1142530 - DNA, 25 bp, Homo sapien
gggccagcaaccttctactgaacct

SEQ ID NO: 1142531 - DNA, 25 bp, Homo sapien
aaattaactttagctcacttgcaac

SEQ ID NO: 1142532 - DNA, 25 bp, Homo sapien
gaacactcattagtaaaaccttcaa

SEQ ID NO: 1142533 - DNA, 25 bp, Homo sapien
tccagaacattgaggtagcataaaa

SEQ ID NO: 1142534 - DNA, 25 bp, Homo sapien
tgtgaaacatacacctggccttgat

SEQ ID NO: 1142535 - DNA, 25 bp, Homo sapien
tagctgtcacattgggaggtcaaca

SEQ ID NO: 1142536 - DNA, 25 bp, Homo sapien
gcagacagtagctggaaaaccgtag

SEQ ID NO: 1142537 - DNA, 25 bp, Homo sapien
actcctgaagtggtggacggtgcca

SEQ ID NO: 1142538 - DNA, 25 bp, Homo sapien
tacgaggcaagtgaacacatgggtc

SEQ ID NO: 1142539 - DNA, 25 bp, Homo sapien
cattgtagggtcattcatggagtga

SEQ ID NO: 1142540 - DNA, 25 bp, Homo sapien
caagcattagttttggctgtcatca

SEQ ID NO: 1142541 - DNA, 25 bp, Homo sapien
caagtgactaggtggtttggctact

SEQ ID NO: 1142542 - DNA, 25 bp, Homo sapien
caacttattatatgactaggtgctt

SEQ ID NO: 1142543 - DNA, 25 bp, Homo sapien
ccaggatacctgaactaaagagagg

SEQ ID NO: 1142544 - DNA, 25 bp, Homo sapien
tactcccctggtcagtactgttagc

SEQ ID NO: 1142545 - DNA, 25 bp, Homo sapien
tactgttagccccagataatctgaa

SEQ ID NO: 1142546 - DNA, 25 bp, Homo sapien
catctcctgaacaggttggttccca

SEQ ID NO: 1142547 - DNA, 25 bp, Homo sapien
atgaggagacaggtagccgggtgcg

SEQ ID NO: 1142548 - DNA, 25 bp, Homo sapien
aatgaggagacaggtagccgggtgc

SEQ ID NO: 1142549 - DNA, 25 bp, Homo sapien
gactggcctgagtgccttagcctag

SEQ ID NO: 1142550 - DNA, 25 bp, Homo sapien
tcgtggaagctgctaaaaatgcaag

SEQ ID NO: 1142551 - DNA, 25 bp, Homo sapien
gcagctttacaggagcgacttgaca

SEQ ID NO: 1142552 - DNA, 25 bp, Homo sapien
caagtaagacggaaaagctcacgga

SEQ ID NO: 1142553 - DNA, 25 bp, Homo sapien
aatatgagtctctagggctgggata

SEQ ID NO: 1142554 - DNA, 25 bp, Homo sapien
aacttggattttaactggtgagcca

SEQ ID NO: 1142555 - DNA, 25 bp, Homo sapien
caagtcgctttgttctgcgctgcgg

SEQ ID NO: 1142556 - DNA, 25 bp, Homo sapien
tcaagaaaaagtagacgtcctcgtc

SEQ ID NO: 1142557 - DNA, 25 bp, Homo sapien
tgtcatggaggctttcagaccacag

SEQ ID NO: 1142558 - DNA, 25 bp, Homo sapien
gaattctcgctccttgatgctcaag

SEQ ID NO: 1142559 - DNA, 25 bp, Homo sapien
gaagtccaatgcatgataccagagc

SEQ ID NO: 1142560 - DNA, 25 bp, Homo sapien
aacctgtatcccaagcagcggtgag

SEQ ID NO: 1142561 - DNA, 25 bp, Homo sapien
caaggtctcagtctgatgcaatcat

SEQ ID NO: 1142562 - DNA, 25 bp, Homo sapien
catagcccactgtgtgtagtgagct

SEQ ID NO: 1142563 - DNA, 25 bp, Homo sapien
tatttcctctgcatattaagcaccc

SEQ ID NO: 1142564 - DNA, 25 bp, Homo sapien
ggagcaccctatgggtcaagcatag

SEQ ID NO: 1142565 - DNA, 25 bp, Homo sapien
tgtgtagctccacctttcacaaaat

SEQ ID NO: 1142566 - DNA, 25 bp, Homo sapien
tgcactgcctattaacaggtccagc

SEQ ID NO: 1142567 - DNA, 25 bp, Homo sapien
aaccaataggcagggcccgacaagg

SEQ ID NO: 1142568 - DNA, 25 bp, Homo sapien
ttaacaggtccagcccaaccaatag

SEQ ID NO: 1142569 - DNA, 25 bp, Homo sapien
ggacaaagtaattagccttgaggct

SEQ ID NO: 1142570 - DNA, 25 bp, Homo sapien
tatcccagtgctaccatgaccattg

SEQ ID NO: 1142571 - DNA, 25 bp, Homo sapien
gctgagacgcaagaaggcatatgaa

SEQ ID NO: 1142572 - DNA, 25 bp, Homo sapien
gaggcttttaaagggcaacaatggc

SEQ ID NO: 1142573 - DNA, 25 bp, Homo sapien
tgtgagctagattaaacttaaaaac

SEQ ID NO: 1142574 - DNA, 25 bp, Homo sapien
gtgtgagctagattaaacttaaaaa

SEQ ID NO: 1142575 - DNA, 25 bp, Homo sapien
tatagaggagctagctactttcaat

SEQ ID NO: 1142576 - DNA, 25 bp, Homo sapien
ttctggtatagaggagctagctact

SEQ ID NO: 1142577 - DNA, 25 bp, Homo sapien
agaggagctagctactttcaattcc

SEQ ID NO: 1142578 - DNA, 25 bp, Homo sapien
ggtatagaggagctagctactttca

SEQ ID NO: 1142579 - DNA, 25 bp, Homo sapien
gatgaataatttctgccaccaaagt

SEQ ID NO: 1142580 - DNA, 25 bp, Homo sapien
tgaataatttctgccaccaaagtca

SEQ ID NO: 1142581 - DNA, 25 bp, Homo sapien
gaataatttctgccaccaaagtcat

SEQ ID NO: 1142582 - DNA, 25 bp, Homo sapien
ctgatgaataatttctgccaccaaa

SEQ ID NO: 1142583 - DNA, 25 bp, Homo sapien
ggtgctccatgaatgtcgggtccat

SEQ ID NO: 1142584 - DNA, 25 bp, Homo sapien
gagggcctggaacaaccccatattc

SEQ ID NO: 1142585 - DNA, 25 bp, Homo sapien
catttcttggatttatgcaggtccc

SEQ ID NO: 1142586 - DNA, 25 bp, Homo sapien
tacctggcagatggttggtgctcca

SEQ ID NO: 1142587 - DNA, 25 bp, Homo sapien
gggttacccctaagctcagatttga

SEQ ID NO: 1142588 - DNA, 25 bp, Homo sapien
tgtaggctcactggtgcgcaagtcc

SEQ ID NO: 1142589 - DNA, 25 bp, Homo sapien
tagattgtatcctgagaaaccctgc

SEQ ID NO: 1142590 - DNA, 25 bp, Homo sapien
taagagccttatgccatgtagcaag

SEQ ID NO: 1142591 - DNA, 25 bp, Homo sapien
gctcttaaggggcttaacagctctt

SEQ ID NO: 1142592 - DNA, 25 bp, Homo sapien
tcttgctggcagtccaaatggctgc

SEQ ID NO: 1142593 - DNA, 25 bp, Homo sapien
gctcttgctggcagtccaaatggct

SEQ ID NO: 1142594 - DNA, 25 bp, Homo sapien
ttgctggcagtccaaatggctgcat

SEQ ID NO: 1142595 - DNA, 25 bp, Homo sapien
ccatagcagtgatacgtgattagtc

SEQ ID NO: 1142596 - DNA, 25 bp, Homo sapien
ccttgggtacccataatggttccat

SEQ ID NO: 1142597 - DNA, 25 bp, Homo sapien
gaactagatagtaagaagcagaggg

SEQ ID NO: 1142598 - DNA, 25 bp, Homo sapien
ttatcaactccttgcagctgctggc

SEQ ID NO: 1142599 - DNA, 25 bp, Homo sapien
tagttaagtgagactgcacagcgca

SEQ ID NO: 1142600 - DNA, 25 bp, Homo sapien
caggagttgtgcattctagttaagt

SEQ ID NO: 1142601 - DNA, 25 bp, Homo sapien
gatttcccagaatggtgataaaagc

SEQ ID NO: 1142602 - DNA, 25 bp, Homo sapien
ttctctagggcctctgcggcaagtc

SEQ ID NO: 1142603 - DNA, 25 bp, Homo sapien
tttcaccgggtgtttctgtagcaag

SEQ ID NO: 1142604 - DNA, 25 bp, Homo sapien
tacactgtgctaggcgcattctagg

SEQ ID NO: 1142605 - DNA, 25 bp, Homo sapien
tcttctgagacggaggaaaactgct

SEQ ID NO: 1142606 - DNA, 25 bp, Homo sapien
tcagatggatggtaatggtgccctc

SEQ ID NO: 1142607 - DNA, 25 bp, Homo sapien
ggtggcgattgctcagccattttct

SEQ ID NO: 1142608 - DNA, 25 bp, Homo sapien
catggtggcgattgctcagccattt

SEQ ID NO: 1142609 - DNA, 25 bp, Homo sapien
gagcatggtggcgattgctcagcca

SEQ ID NO: 1142610 - DNA, 25 bp, Homo sapien
tggcgattgctcagccattttctga

SEQ ID NO: 1142611 - DNA, 25 bp, Homo sapien
cagggattctggaactaagtctgat

SEQ ID NO: 1142612 - DNA, 25 bp, Homo sapien
gaactaagtctgataaaagattcca

SEQ ID NO: 1142613 - DNA, 25 bp, Homo sapien
agccctgttctgagaacgagcagac

SEQ ID NO: 1142614 - DNA, 25 bp, Homo sapien
ttctgagaacgagcagactgcaggg

SEQ ID NO: 1142615 - DNA, 25 bp, Homo sapien
gttcttatacccttgctttcccata

SEQ ID NO: 1142616 - DNA, 25 bp, Homo sapien
tttgctccctttatgaagatgttct

SEQ ID NO: 1142617 - DNA, 25 bp, Homo sapien
ttttacactgttgggccaggtgctg

SEQ ID NO: 1142618 - DNA, 25 bp, Homo sapien
tccttcttagggcatcatcaattgc

SEQ ID NO: 1142619 - DNA, 25 bp, Homo sapien
tccaaattaaagtgggcaggggctg

SEQ ID NO: 1142620 - DNA, 25 bp, Homo sapien
ctgctgacctgcagatttgtcaaag

SEQ ID NO: 1142621 - DNA, 25 bp, Homo sapien
acctgcagatttgtcaaagccagtg

SEQ ID NO: 1142622 - DNA, 25 bp, Homo sapien
tgcttttagcagctgctgacctgca

SEQ ID NO: 1142623 - DNA, 25 bp, Homo sapien
tcaagagccggaactccagcaagaa

SEQ ID NO: 1142624 - DNA, 25 bp, Homo sapien
gccatagactaagcgggtgatgccc

SEQ ID NO: 1142625 - DNA, 25 bp, Homo sapien
tccttctggtgcgtttcaagagccg

SEQ ID NO: 1142626 - DNA, 25 bp, Homo sapien
tgtgattggacagttgacagcaccc

SEQ ID NO: 1142627 - DNA, 25 bp, Homo sapien
ttgcggataccagagctccgaacca

SEQ ID NO: 1142628 - DNA, 25 bp, Homo sapien
taagacttgcggataccagagctcc

SEQ ID NO: 1142629 - DNA, 25 bp, Homo sapien
aagacttgcggataccagagctccg

SEQ ID NO: 1142630 - DNA, 25 bp, Homo sapien
gacttgcggataccagagctccgaa

SEQ ID NO: 1142631 - DNA, 25 bp, Homo sapien
aaatacaccccatgttttatccaag

SEQ ID NO: 1142632 - DNA, 25 bp, Homo sapien
aagtgttattaaaataccagacagg

SEQ ID NO: 1142633 - DNA, 25 bp, Homo sapien
tgaaatacaccccatgttttatcca

SEQ ID NO: 1142634 - DNA, 25 bp, Homo sapien
taccagacaggtaagtgtaagcacc

SEQ ID NO: 1142635 - DNA, 25 bp, Homo sapien
catttacctgccttcgtcgccagag

SEQ ID NO: 1142636 - DNA, 25 bp, Homo sapien
tgtgtgtttctctccctcgtaggtg

SEQ ID NO: 1142637 - DNA, 25 bp, Homo sapien
cgtccgcggagggaagatcttcata

SEQ ID NO: 1142638 - DNA, 25 bp, Homo sapien
caatgtgagtggctaccagggacct

SEQ ID NO: 1142639 - DNA, 25 bp, Homo sapien
ccttttccgcctggcactgatgtgc

SEQ ID NO: 1142640 - DNA, 25 bp, Homo sapien
ctctgttaggctctttctcaacttc

SEQ ID NO: 1142641 - DNA, 25 bp, Homo sapien
cccttttccgcctggcactgatgtg

SEQ ID NO: 1142642 - DNA, 25 bp, Homo sapien
gagtcaaagaaatgagcgataggag

SEQ ID NO: 1142643 - DNA, 25 bp, Homo sapien
agaaatgagcgataggagaggagga

SEQ ID NO: 1142644 - DNA, 25 bp, Homo sapien
aaatgagcgataggagaggaggagc

SEQ ID NO: 1142645 - DNA, 25 bp, Homo sapien
tcaaagaaatgagcgataggagagg

SEQ ID NO: 1142646 - DNA, 25 bp, Homo sapien
tctaagctgcggttcactgagcctc

SEQ ID NO: 1142647 - DNA, 25 bp, Homo sapien
ttctcagagggagtgttgccacgaa

SEQ ID NO: 1142648 - DNA, 25 bp, Homo sapien
cactgagcctctggacttctcagag

SEQ ID NO: 1142649 - DNA, 25 bp, Homo sapien
gggagtgttgccacgaagctgccct

SEQ ID NO: 1142650 - DNA, 25 bp, Homo sapien
cctctgctgcctggtagctgacatc

SEQ ID NO: 1142651 - DNA, 25 bp, Homo sapien
cgctcccggcctgttgtcagcaggg

SEQ ID NO: 1142652 - DNA, 25 bp, Homo sapien
caggtctagttctgatgccacttga

SEQ ID NO: 1142653 - DNA, 25 bp, Homo sapien
tcctgacgctgcctgcagatgcgct

SEQ ID NO: 1142654 - DNA, 25 bp, Homo sapien
gtgtatctgcgagggccctgtttcc

SEQ ID NO: 1142655 - DNA, 25 bp, Homo sapien
tgtttcccagttgtcttctctgggc

SEQ ID NO: 1142656 - DNA, 25 bp, Homo sapien
gggctgctgcagaattagtctctac

SEQ ID NO: 1142657 - DNA, 25 bp, Homo sapien
aactctccagcttggtcttgtgtat

SEQ ID NO: 1142658 - DNA, 25 bp, Homo sapien
cagcccttcactggttgagttgtgc

SEQ ID NO: 1142659 - DNA, 25 bp, Homo sapien
ttcaggaataggctctgctctcagt

SEQ ID NO: 1142660 - DNA, 25 bp, Homo sapien
tgagttgtgcaagtttggagtcttt

SEQ ID NO: 1142661 - DNA, 25 bp, Homo sapien
ttagtgaacttgtcagtcttcccca

SEQ ID NO: 1142662 - DNA, 25 bp, Homo sapien
gcagcagcggtgattgatgatacta

SEQ ID NO: 1142663 - DNA, 25 bp, Homo sapien
catcccaggagctggtatcccaggg

SEQ ID NO: 1142664 - DNA, 25 bp, Homo sapien
catctgctactactgtgtgcttcca

SEQ ID NO: 1142665 - DNA, 25 bp, Homo sapien
gatgatactacagcgcatcccagga

SEQ ID NO: 1142666 - DNA, 25 bp, Homo sapien
gatgctatcaggttgcagttctgct

SEQ ID NO: 1142667 - DNA, 25 bp, Homo sapien
tatatggcgcatctcccgtctggag

SEQ ID NO: 1142668 - DNA, 25 bp, Homo sapien
tcagggctctccttaacaagcggcc

SEQ ID NO: 1142669 - DNA, 25 bp, Homo sapien
cagatggacagcgtgggaccccttt

SEQ ID NO: 1142670 - DNA, 25 bp, Homo sapien
gatggagttagaggtgtcctgtccc

SEQ ID NO: 1142671 - DNA, 25 bp, Homo sapien
tggagttagaggtgtcctgtcccaa

SEQ ID NO: 1142672 - DNA, 25 bp, Homo sapien
atggagttagaggtgtcctgtccca

SEQ ID NO: 1142673 - DNA, 25 bp, Homo sapien
ggtgacgtgggacccacttgcagcc

SEQ ID NO: 1142674 - DNA, 25 bp, Homo sapien
tgtgggtgacgtgggacccacttgc

SEQ ID NO: 1142675 - DNA, 25 bp, Homo sapien
ggacactggaacagtccattctgtg

SEQ ID NO: 1142676 - DNA, 25 bp, Homo sapien
ctggaacagtccattctgtgcagtt

SEQ ID NO: 1142677 - DNA, 25 bp, Homo sapien
actcccagcgcagtcgcgtccatgg

SEQ ID NO: 1142678 - DNA, 25 bp, Homo sapien
ctccccagcatttcagtactttcct

SEQ ID NO: 1142679 - DNA, 25 bp, Homo sapien
cgcagtcgcgtccatggcttccagg

SEQ ID NO: 1142680 - DNA, 25 bp, Homo sapien
tttcagtactttcctgagtcctcct

SEQ ID NO: 1142681 - DNA, 25 bp, Homo sapien
tggtgaccaggtggagtgtctcaat

SEQ ID NO: 1142682 - DNA, 25 bp, Homo sapien
ccaggtggagtgtctcaattatctg

SEQ ID NO: 1142683 - DNA, 25 bp, Homo sapien
gtggagtgtctcaattatctggcta

SEQ ID NO: 1142684 - DNA, 25 bp, Homo sapien
gaccaggtggagtgtctcaattatc

SEQ ID NO: 1142685 - DNA, 25 bp, Homo sapien
cttgcagaggagaatgtttgggtgg

SEQ ID NO: 1142686 - DNA, 25 bp, Homo sapien
ggggcaggtttacatcttggctgtc

SEQ ID NO: 1142687 - DNA, 25 bp, Homo sapien
tgggggcaggtttacatcttggctg

SEQ ID NO: 1142688 - DNA, 25 bp, Homo sapien
tctgggggcaggtttacatcttggc

SEQ ID NO: 1142689 - DNA, 25 bp, Homo sapien
ctgggggcaggtttacatcttggct

SEQ ID NO: 1142690 - DNA, 25 bp, Homo sapien
gtgaagctgtcaaaggaagattgta

SEQ ID NO: 1142691 - DNA, 25 bp, Homo sapien
atttgagttgatagcagtgcgggga

SEQ ID NO: 1142692 - DNA, 25 bp, Homo sapien
aggaagattgtaataaattaactgg

SEQ ID NO: 1142693 - DNA, 25 bp, Homo sapien
tgagttgatagcagtgcggggaggg

SEQ ID NO: 1142694 - DNA, 25 bp, Homo sapien
tttcgttacaaagaagcaagagcac

SEQ ID NO: 1142695 - DNA, 25 bp, Homo sapien
tagcttgctgaacaacgttacaatc

SEQ ID NO: 1142696 - DNA, 25 bp, Homo sapien
aactaggtaaccctttatgacattg

SEQ ID NO: 1142697 - DNA, 25 bp, Homo sapien
cattgtttagagatgatttgctgaa

SEQ ID NO: 1142698 - DNA, 25 bp, Homo sapien
ggtgcagatattcattccgggctta

SEQ ID NO: 1142699 - DNA, 25 bp, Homo sapien
tggacatgtttgttagtgtgaggaa

SEQ ID NO: 1142700 - DNA, 25 bp, Homo sapien
tgtgaggaatgatggtgcagatatt

SEQ ID NO: 1142701 - DNA, 25 bp, Homo sapien
tgggaattctgcttcacatagatgg

SEQ ID NO: 1142702 - DNA, 25 bp, Homo sapien
ggtcccagacggttgtaaattctgc

SEQ ID NO: 1142703 - DNA, 25 bp, Homo sapien
ggtgacctcctgggtagccaagagc

SEQ ID NO: 1142704 - DNA, 25 bp, Homo sapien
ctctgagactgcaggtcccagacgg

SEQ ID NO: 1142705 - DNA, 25 bp, Homo sapien
ccttctccgtgagccctctgagact

SEQ ID NO: 1142706 - DNA, 25 bp, Homo sapien
ctgctgtagcagctcgatgaagggc

SEQ ID NO: 1142707 - DNA, 25 bp, Homo sapien
gtagcagctcgatgaagggcaggct

SEQ ID NO: 1142708 - DNA, 25 bp, Homo sapien
tgtagcagctcgatgaagggcaggc

SEQ ID NO: 1142709 - DNA, 25 bp, Homo sapien
gctgtagcagctcgatgaagggcag

SEQ ID NO: 1142710 - DNA, 25 bp, Homo sapien
cagccatgagttaccaatgcccggt

SEQ ID NO: 1142711 - DNA, 25 bp, Homo sapien
tttacagccatgagttaccaatgcc

SEQ ID NO: 1142712 - DNA, 25 bp, Homo sapien
catgagttaccaatgcccggtgcca

SEQ ID NO: 1142713 - DNA, 25 bp, Homo sapien
tcctttacagccatgagttaccaat

SEQ ID NO: 1142714 - DNA, 25 bp, Homo sapien
tgcccacacaaatgcccatgtgtgc

SEQ ID NO: 1142715 - DNA, 25 bp, Homo sapien
ccacggcccagacagcagtgttcat

SEQ ID NO: 1142716 - DNA, 25 bp, Homo sapien
cccacacaaatgcccatgtgtgcca

SEQ ID NO: 1142717 - DNA, 25 bp, Homo sapien
gccacggcccagacagcagtgttca

SEQ ID NO: 1142718 - DNA, 25 bp, Homo sapien
gctccataaattggacactgcccaa

SEQ ID NO: 1142719 - DNA, 25 bp, Homo sapien
ccataaattggacactgcccaaaga

SEQ ID NO: 1142720 - DNA, 25 bp, Homo sapien
acaaaattgctccataaattggaca

SEQ ID NO: 1142721 - DNA, 25 bp, Homo sapien
aattgctccataaattggacactgc

SEQ ID NO: 1142722 - DNA, 25 bp, Homo sapien
gacaggatcattaaaaccctcggag

SEQ ID NO: 1142723 - DNA, 25 bp, Homo sapien
caggatcattaaaaccctcggagag

SEQ ID NO: 1142724 - DNA, 25 bp, Homo sapien
acaggatcattaaaaccctcggaga

SEQ ID NO: 1142725 - DNA, 25 bp, Homo sapien
aggatcattaaaaccctcggagagg

SEQ ID NO: 1142726 - DNA, 25 bp, Homo sapien
gcaggaggactcagcgctctctgga

SEQ ID NO: 1142727 - DNA, 25 bp, Homo sapien
gatgcctgatgtcactgctgacaga

SEQ ID NO: 1142728 - DNA, 25 bp, Homo sapien
ggaagcaggaggactcagcgctctc

SEQ ID NO: 1142729 - DNA, 25 bp, Homo sapien
agggaggatgcctgatgtcactgct

SEQ ID NO: 1142730 - DNA, 25 bp, Homo sapien
aaggaggactgatggtgatgttgcc

SEQ ID NO: 1142731 - DNA, 25 bp, Homo sapien
ggatactccatgagcctacgcaagt

SEQ ID NO: 1142732 - DNA, 25 bp, Homo sapien
gatgttgcctcatttggatactcca

SEQ ID NO: 1142733 - DNA, 25 bp, Homo sapien
tgagcctacgcaagtttcacaaaag

SEQ ID NO: 1142734 - DNA, 25 bp, Homo sapien
caccaatgtaccaaatcgatgtatt

SEQ ID NO: 1142735 - DNA, 25 bp, Homo sapien
aaagtctaatctttggcacactggg

SEQ ID NO: 1142736 - DNA, 25 bp, Homo sapien
ttcatggcaacagccgaaaagagcc

SEQ ID NO: 1142737 - DNA, 25 bp, Homo sapien
gcccacaaaagtctaatctttggca

SEQ ID NO: 1142738 - DNA, 25 bp, Homo sapien
tgctcaaggttggatccaacttttg

SEQ ID NO: 1142739 - DNA, 25 bp, Homo sapien
ctgctcaaggttggatccaactttt

SEQ ID NO: 1142740 - DNA, 25 bp, Homo sapien
ggggcctgaggcttacataccttca

SEQ ID NO: 1142741 - DNA, 25 bp, Homo sapien
gtggggcctgaggcttacatacctt

SEQ ID NO: 1142742 - DNA, 25 bp, Homo sapien
tagcatgaactttaatatgtagaac

SEQ ID NO: 1142743 - DNA, 25 bp, Homo sapien
gaacagatcagaccagttatactgt

SEQ ID NO: 1142744 - DNA, 25 bp, Homo sapien
gaacctgagctccacaggactcaat

SEQ ID NO: 1142745 - DNA, 25 bp, Homo sapien
tgaagtttcccttctgctaccctcc

SEQ ID NO: 1142746 - DNA, 25 bp, Homo sapien
cttgttcttgcatgtagacctgccc

SEQ ID NO: 1142747 - DNA, 25 bp, Homo sapien
ctgcccaagggccattggaggtacc

SEQ ID NO: 1142748 - DNA, 25 bp, Homo sapien
ttcttgcatgtagacctgcccaagg

SEQ ID NO: 1142749 - DNA, 25 bp, Homo sapien
cccaagggccattggaggtaccagt

SEQ ID NO: 1142750 - DNA, 25 bp, Homo sapien
aattctgagcgcaaccaattgacag

SEQ ID NO: 1142751 - DNA, 25 bp, Homo sapien
attctgagcgcaaccaattgacaga

SEQ ID NO: 1142752 - DNA, 25 bp, Homo sapien
gaaattctgagcgcaaccaattgac

SEQ ID NO: 1142753 - DNA, 25 bp, Homo sapien
cctgaaattctgagcgcaaccaatt

SEQ ID NO: 1142754 - DNA, 25 bp, Homo sapien
caccgtgggtgagctgtatgaactc

SEQ ID NO: 1142755 - DNA, 25 bp, Homo sapien
acaaggtgcggcaactagacgtgca

SEQ ID NO: 1142756 - DNA, 25 bp, Homo sapien
tagacgtgcacaactgcagcctgga

SEQ ID NO: 1142757 - DNA, 25 bp, Homo sapien
tatgaactcgaggtctgcgggatgc

SEQ ID NO: 1142758 - DNA, 25 bp, Homo sapien
agaaggcgctcggctgctggatcct

SEQ ID NO: 1142759 - DNA, 25 bp, Homo sapien
ggttccactcatggacacggatgtc

SEQ ID NO: 1142760 - DNA, 25 bp, Homo sapien
tacacgctgaccctaaagggcagca

SEQ ID NO: 1142761 - DNA, 25 bp, Homo sapien
atcctccagcgggttccactcatgg

SEQ ID NO: 1142762 - DNA, 25 bp, Homo sapien
aactgaagtgagactggtggagtcc

SEQ ID NO: 1142763 - DNA, 25 bp, Homo sapien
tgaagtgagactggtggagtccaca

SEQ ID NO: 1142764 - DNA, 25 bp, Homo sapien
actgaagtgagactggtggagtcca

SEQ ID NO: 1142765 - DNA, 25 bp, Homo sapien
ctgaagtgagactggtggagtccac

SEQ ID NO: 1142766 - DNA, 25 bp, Homo sapien
ctttggaagaaacattgaaaatcag

SEQ ID NO: 1142767 - DNA, 25 bp, Homo sapien
ctacaaatttacatggaaagctcat

SEQ ID NO: 1142768 - DNA, 25 bp, Homo sapien
cagaaggaagctggctacaaattta

SEQ ID NO: 1142769 - DNA, 25 bp, Homo sapien
tgaaaatcagaaggaagctggctac

SEQ ID NO: 1142770 - DNA, 25 bp, Homo sapien
aggcattcgtaatctctttggagac

SEQ ID NO: 1142771 - DNA, 25 bp, Homo sapien
tccaagttgatgtcctgacccaagg

SEQ ID NO: 1142772 - DNA, 25 bp, Homo sapien
tgaaaactaggaatgtccaagttga

SEQ ID NO: 1142773 - DNA, 25 bp, Homo sapien
cttgtagatatcctgatcatcggtc

SEQ ID NO: 1142774 - DNA, 25 bp, Homo sapien
agcaattaagggaatgaacacttac

SEQ ID NO: 1142775 - DNA, 25 bp, Homo sapien
aagcaattaagggaatgaacactta

SEQ ID NO: 1142776 - DNA, 25 bp, Homo sapien
aaagcaattaagggaatgaacactt

SEQ ID NO: 1142777 - DNA, 25 bp, Homo sapien
aagacagagttgtaggcaggtagac

SEQ ID NO: 1142778 - DNA, 25 bp, Homo sapien
tgtggatcccattcccgcattggac

SEQ ID NO: 1142779 - DNA, 25 bp, Homo sapien
gacttgagggtctatcagatgtgtg

SEQ ID NO: 1142780 - DNA, 25 bp, Homo sapien
cacattcctgtaaccacctgaagac

SEQ ID NO: 1142781 - DNA, 25 bp, Homo sapien
tccattcattacctcacaggtcagg

SEQ ID NO: 1142782 - DNA, 25 bp, Homo sapien
agttccattcattacctcacaggtc

SEQ ID NO: 1142783 - DNA, 25 bp, Homo sapien
ttgatacaagtccaggagatctttg

SEQ ID NO: 1142784 - DNA, 25 bp, Homo sapien
cacaggtcagggttgtgttgataca

SEQ ID NO: 1142785 - DNA, 25 bp, Homo sapien
accctctgagaaagttttagatgtt

SEQ ID NO: 1142786 - DNA, 25 bp, Homo sapien
tagtgatgggggaatgtgggaggat

SEQ ID NO: 1142787 - DNA, 25 bp, Homo sapien
gtgatgggggaatgtgggaggatga

SEQ ID NO: 1142788 - DNA, 25 bp, Homo sapien
ccttagtgatgggggaatgtgggag

SEQ ID NO: 1142789 - DNA, 25 bp, Homo sapien
tgccttagtgatgggggaatgtggg

SEQ ID NO: 1142790 - DNA, 25 bp, Homo sapien
aaccaagtttaacagatcatcaaac

SEQ ID NO: 1142791 - DNA, 25 bp, Homo sapien
gaaaccaagtttaacagatcatcaa

SEQ ID NO: 1142792 - DNA, 25 bp, Homo sapien
aaaccaagtttaacagatcatcaaa

SEQ ID NO: 1142793 - DNA, 25 bp, Homo sapien
gggttctagggctgtctgccctttg

SEQ ID NO: 1142794 - DNA, 25 bp, Homo sapien
tagtgttctcgcactggtgtttctg

SEQ ID NO: 1142795 - DNA, 25 bp, Homo sapien
ctagggctgtctgccctttgtgagt

SEQ ID NO: 1142796 - DNA, 25 bp, Homo sapien
ttctagggctgtctgccctttgtga

SEQ ID NO: 1142797 - DNA, 25 bp, Homo sapien
tgcatcaagcagatagaagagcttg

SEQ ID NO: 1142798 - DNA, 25 bp, Homo sapien
gaagagcttgttgggacctttcacc

SEQ ID NO: 1142799 - DNA, 25 bp, Homo sapien
gcccattactctggccaaggatgct

SEQ ID NO: 1142800 - DNA, 25 bp, Homo sapien
tggtgagtggtgtcaaccctggaag

SEQ ID NO: 1142801 - DNA, 25 bp, Homo sapien
cacatatgccaatgatgagatagat

SEQ ID NO: 1142802 - DNA, 25 bp, Homo sapien
gcctcctccacatatgccaatgatg

SEQ ID NO: 1142803 - DNA, 25 bp, Homo sapien
atagaaaacgagcagtgccacaaag

SEQ ID NO: 1142804 - DNA, 25 bp, Homo sapien
tagaaaacgagcagtgccacaaaga

SEQ ID NO: 1142805 - DNA, 25 bp, Homo sapien
taaatggctcgtgtgctctaagcac

SEQ ID NO: 1142806 - DNA, 25 bp, Homo sapien
caaggttggctacggctctgtgcac

SEQ ID NO: 1142807 - DNA, 25 bp, Homo sapien
tgtgactacctgatgacctgaatga

SEQ ID NO: 1142808 - DNA, 25 bp, Homo sapien
gaacgtgaattgcagagaaccccag

SEQ ID NO: 1142809 - DNA, 25 bp, Homo sapien
gaaccctacctctgtgctgacctag

SEQ ID NO: 1142810 - DNA, 25 bp, Homo sapien
tgtaggagagaaagaagtgctcacc

SEQ ID NO: 1142811 - DNA, 25 bp, Homo sapien
gaagttgcccctactatctgagaac

SEQ ID NO: 1142812 - DNA, 25 bp, Homo sapien
tcccatgatcagagagagcacgcag

SEQ ID NO: 1142813 - DNA, 25 bp, Homo sapien
catcttggccaggtgaaatcaatgt

SEQ ID NO: 1142814 - DNA, 25 bp, Homo sapien
gcaacaacaaaacctcaatagagtt

SEQ ID NO: 1142815 - DNA, 25 bp, Homo sapien
gaaatcaatgtaaatattgagtacc

SEQ ID NO: 1142816 - DNA, 25 bp, Homo sapien
aacctcaatagagttcatcttggcc

SEQ ID NO: 1142817 - DNA, 25 bp, Homo sapien
tttcttcagtagctactctgtgggc

SEQ ID NO: 1142818 - DNA, 25 bp, Homo sapien
ctgggaacgatgaccaggtggtgga

SEQ ID NO: 1142819 - DNA, 25 bp, Homo sapien
ggaacgatgaccaggtggtggagga

SEQ ID NO: 1142820 - DNA, 25 bp, Homo sapien
ccctttcttcagtagctactctgtg

SEQ ID NO: 1142821 - DNA, 25 bp, Homo sapien
caggaggcgggggacgatgactagg

SEQ ID NO: 1142822 - DNA, 25 bp, Homo sapien
ctcttctgaggctggtgctgaacac

SEQ ID NO: 1142823 - DNA, 25 bp, Homo sapien
ctggtgctgaacacggtgtccagga

SEQ ID NO: 1142824 - DNA, 25 bp, Homo sapien
gaggcgggggacgatgactaggtgc

SEQ ID NO: 1142825 - DNA, 25 bp, Homo sapien
gggcgggcctttctgctggtgaact

SEQ ID NO: 1142826 - DNA, 25 bp, Homo sapien
ggcctttctgctggtgaacttgtgt

SEQ ID NO: 1142827 - DNA, 25 bp, Homo sapien
ctttctgctggtgaacttgtgtgcc

SEQ ID NO: 1142828 - DNA, 25 bp, Homo sapien
ctgctggtgaacttgtgtgcccgac

SEQ ID NO: 1142829 - DNA, 25 bp, Homo sapien
tgccccatggggaggttttggctga

SEQ ID NO: 1142830 - DNA, 25 bp, Homo sapien
gccccatggggaggttttggctgaa

SEQ ID NO: 1142831 - DNA, 25 bp, Homo sapien
tagaggaaggggacaatgagttttc

SEQ ID NO: 1142832 - DNA, 25 bp, Homo sapien
taattagaggaaggggacaatgagt

SEQ ID NO: 1142833 - DNA, 25 bp, Homo sapien
attgaaaaagacagtttctatcttt

SEQ ID NO: 1142834 - DNA, 25 bp, Homo sapien
tttattgaaaaagacagtttctatc

SEQ ID NO: 1142835 - DNA, 25 bp, Homo sapien
agtgctttttattgaaaaagacagt

SEQ ID NO: 1142836 - DNA, 25 bp, Homo sapien
tattgaaaaagacagtttctatctt

SEQ ID NO: 1142837 - DNA, 25 bp, Homo sapien
tctaagatttctgtgctcggtcctc

SEQ ID NO: 1142838 - DNA, 25 bp, Homo sapien
aaaactccagatgttgaccacatgg

SEQ ID NO: 1142839 - DNA, 25 bp, Homo sapien
tacggatatgcacatcaggagggca

SEQ ID NO: 1142840 - DNA, 25 bp, Homo sapien
gaaaacacctcatggaagtacggat

SEQ ID NO: 1142841 - DNA, 25 bp, Homo sapien
ttgatttatcgcatctacacatgac

SEQ ID NO: 1142842 - DNA, 25 bp, Homo sapien
caggatggtgggcaagtgtccacca

SEQ ID NO: 1142843 - DNA, 25 bp, Homo sapien
gtctcttaagcagataggctgcttg

SEQ ID NO: 1142844 - DNA, 25 bp, Homo sapien
tgcttgtagtgagacccaggcacac

SEQ ID NO: 1142845 - DNA, 25 bp, Homo sapien
ttcttattcggcagcttcctctcct

SEQ ID NO: 1142846 - DNA, 25 bp, Homo sapien
taaggaggtctcagccggattgagt

SEQ ID NO: 1142847 - DNA, 25 bp, Homo sapien
gagttgactgaatttgatcctgctg

SEQ ID NO: 1142848 - DNA, 25 bp, Homo sapien
gtcacaccagcgaggctctttctta

SEQ ID NO: 1142849 - DNA, 25 bp, Homo sapien
tggaggctttaattcattatggaaa

SEQ ID NO: 1142850 - DNA, 25 bp, Homo sapien
tctacaaataggttgttggacccag

SEQ ID NO: 1142851 - DNA, 25 bp, Homo sapien
ttggacccagctttgcagctgagac

SEQ ID NO: 1142852 - DNA, 25 bp, Homo sapien
ctgttaacgtttgtgcatggaggct

SEQ ID NO: 1142853 - DNA, 25 bp, Homo sapien
accaacttgtgcaggacgagagccg

SEQ ID NO: 1142854 - DNA, 25 bp, Homo sapien
tgaccaacttgtgcaggacgagagc

SEQ ID NO: 1142855 - DNA, 25 bp, Homo sapien
gaaccagtgaaatccatcaaagaat

SEQ ID NO: 1142856 - DNA, 25 bp, Homo sapien
caatgaaccagtgaaatccatcaaa

SEQ ID NO: 1142857 - DNA, 25 bp, Homo sapien
ctttcaccgccataacgtagctttg

SEQ ID NO: 1142858 - DNA, 25 bp, Homo sapien
tgtccacatctgatgctttcaccgc

SEQ ID NO: 1142859 - DNA, 25 bp, Homo sapien
tgcttggagggaactggcgcttttc

SEQ ID NO: 1142860 - DNA, 25 bp, Homo sapien
aacgtagctttgaggaattttgcca

SEQ ID NO: 1142861 - DNA, 25 bp, Homo sapien
taattgagaaccctctgagaagact

SEQ ID NO: 1142862 - DNA, 25 bp, Homo sapien
taaactaacatataattgagaaccc

SEQ ID NO: 1142863 - DNA, 25 bp, Homo sapien
gaaggctcttttgaaccagaatgtg

SEQ ID NO: 1142864 - DNA, 25 bp, Homo sapien
cagaatgtgagcaagcacatgttgg

SEQ ID NO: 1142865 - DNA, 25 bp, Homo sapien
cgatggcagtaaaaagttggtcctt

SEQ ID NO: 1142866 - DNA, 25 bp, Homo sapien
tcaaacgatggcagtaaaaagttgg

SEQ ID NO: 1142867 - DNA, 25 bp, Homo sapien
caaacgatggcagtaaaaagttggt

SEQ ID NO: 1142868 - DNA, 25 bp, Homo sapien
acgatggcagtaaaaagttggtcct

SEQ ID NO: 1142869 - DNA, 25 bp, Homo sapien
tctggtggttcttccatgtagatct

SEQ ID NO: 1142870 - DNA, 25 bp, Homo sapien
ttctgagagctcctgccagctcagg

SEQ ID NO: 1142871 - DNA, 25 bp, Homo sapien
gatgttctgagagctcctgccagct

SEQ ID NO: 1142872 - DNA, 25 bp, Homo sapien
gttctgagagctcctgccagctcag

SEQ ID NO: 1142873 - DNA, 25 bp, Homo sapien
gtggatgttctgagagctcctgcca

SEQ ID NO: 1142874 - DNA, 25 bp, Homo sapien
ccaaggctcccaatgcagagacact

SEQ ID NO: 1142875 - DNA, 25 bp, Homo sapien
caaggctcccaatgcagagacactg

SEQ ID NO: 1142876 - DNA, 25 bp, Homo sapien
aaggctcccaatgcagagacactgt

SEQ ID NO: 1142877 - DNA, 25 bp, Homo sapien
aggctcccaatgcagagacactgtc

SEQ ID NO: 1142878 - DNA, 25 bp, Homo sapien
tcagctaagtctgcggtcctcttcc

SEQ ID NO: 1142879 - DNA, 25 bp, Homo sapien
gagttggctgcagggcgtacacttt

SEQ ID NO: 1142880 - DNA, 25 bp, Homo sapien
tggctgcagggcgtacacttttctc

SEQ ID NO: 1142881 - DNA, 25 bp, Homo sapien
ttgggagttggctgcagggcgtaca

SEQ ID NO: 1142882 - DNA, 25 bp, Homo sapien
ttatataccaaagtgggtgctcagg

SEQ ID NO: 1142883 - DNA, 25 bp, Homo sapien
cgcccggcagagtagtgaaaagctt

SEQ ID NO: 1142884 - DNA, 25 bp, Homo sapien
tgatgggtcccttaccaagagaaac

SEQ ID NO: 1142885 - DNA, 25 bp, Homo sapien
gattatcggcaagaggccatgcagc

SEQ ID NO: 1142886 - DNA, 25 bp, Homo sapien
cacatgggaccacggtgcagtctct

SEQ ID NO: 1142887 - DNA, 25 bp, Homo sapien
tctctttcagtcctaacatcatggc

SEQ ID NO: 1142888 - DNA, 25 bp, Homo sapien
accacggtgcagtctctttcagtcc

SEQ ID NO: 1142889 - DNA, 25 bp, Homo sapien
cagtcctaacatcatggcctttcta

SEQ ID NO: 1142890 - DNA, 25 bp, Homo sapien
tgtcacacagcactcggaacagagt

SEQ ID NO: 1142891 - DNA, 25 bp, Homo sapien
tcaggctgtaaattataccaaagct

SEQ ID NO: 1142892 - DNA, 25 bp, Homo sapien
cttctgagtctcaggctgtaaatta

SEQ ID NO: 1142893 - DNA, 25 bp, Homo sapien
aacagagtttatggccttggctgtg

SEQ ID NO: 1142894 - DNA, 25 bp, Homo sapien
cggcagaagggtgctctgtaatgaa

SEQ ID NO: 1142895 - DNA, 25 bp, Homo sapien
aggagcggcagaagggtgctctgta

SEQ ID NO: 1142896 - DNA, 25 bp, Homo sapien
agcggcagaagggtgctctgtaatg

SEQ ID NO: 1142897 - DNA, 25 bp, Homo sapien
ggagcggcagaagggtgctctgtaa

SEQ ID NO: 1142898 - DNA, 25 bp, Homo sapien
tgtgcggggagctaggtgtgttggg

SEQ ID NO: 1142899 - DNA, 25 bp, Homo sapien
taagtgtgcggggagctaggtgtgt

SEQ ID NO: 1142900 - DNA, 25 bp, Homo sapien
tgcggggagctaggtgtgttgggat

SEQ ID NO: 1142901 - DNA, 25 bp, Homo sapien
agctaagtgtgcggggagctaggtg

SEQ ID NO: 1142902 - DNA, 25 bp, Homo sapien
gagaggaccagggtgtgcaagggcc

SEQ ID NO: 1142903 - DNA, 25 bp, Homo sapien
tgggtgttcgaggaccagggtctga

SEQ ID NO: 1142904 - DNA, 25 bp, Homo sapien
gcaagggcctgggtgtgcgatgacc

SEQ ID NO: 1142905 - DNA, 25 bp, Homo sapien
attctctgtgcgtgtgcctcacagg

SEQ ID NO: 1142906 - DNA, 25 bp, Homo sapien
gaagaaactcaggtagcaggaatca

SEQ ID NO: 1142907 - DNA, 25 bp, Homo sapien
tatggaattgccttggtccctaggg

SEQ ID NO: 1142908 - DNA, 25 bp, Homo sapien
ttccaacaacagtgtgtgagctacg

SEQ ID NO: 1142909 - DNA, 25 bp, Homo sapien
tctaggatgttggaagatgcacaga

SEQ ID NO: 1142910 - DNA, 25 bp, Homo sapien
cttcttagatacaattggaggtaca

SEQ ID NO: 1142911 - DNA, 25 bp, Homo sapien
ttcttagatacaattggaggtacag

SEQ ID NO: 1142912 - DNA, 25 bp, Homo sapien
atgcagatctgcgtgtgaaagaagg

SEQ ID NO: 1142913 - DNA, 25 bp, Homo sapien
cagatctgcgtgtgaaagaagggaa

SEQ ID NO: 1142914 - DNA, 25 bp, Homo sapien
ctgcgtgtgaaagaagggaaggttt

SEQ ID NO: 1142915 - DNA, 25 bp, Homo sapien
tgcgtgtgaaagaagggaaggtttc

SEQ ID NO: 1142916 - DNA, 25 bp, Homo sapien
gttgcatggcaggtttatcactccc

SEQ ID NO: 1142917 - DNA, 25 bp, Homo sapien
taaagtaataacatcgttgcatggc

SEQ ID NO: 1142918 - DNA, 25 bp, Homo sapien
caaccggtcctgtatccattaaagt

SEQ ID NO: 1142919 - DNA, 25 bp, Homo sapien
aataaagtgctcaaccggtcctgta

SEQ ID NO: 1142920 - DNA, 25 bp, Homo sapien
cgcacagctgttgaacgttaattct

SEQ ID NO: 1142921 - DNA, 25 bp, Homo sapien
actcatgaatcacccgatgggccaa

SEQ ID NO: 1142922 - DNA, 25 bp, Homo sapien
ctccctttctctggcggcttgtgtt

SEQ ID NO: 1142923 - DNA, 25 bp, Homo sapien
tcagcagtgtgaatacgcacagctg

SEQ ID NO: 1142924 - DNA, 25 bp, Homo sapien
cacgtagctgggatagttcaatccc

SEQ ID NO: 1142925 - DNA, 25 bp, Homo sapien
ggagggcaagtttgataccagctac

SEQ ID NO: 1142926 - DNA, 25 bp, Homo sapien
attaccctgtaatgcctgtgtacga

SEQ ID NO: 1142927 - DNA, 25 bp, Homo sapien
tcttcctaatgtagatggtctgtgg

SEQ ID NO: 1142928 - DNA, 25 bp, Homo sapien
cgcgcgcctgctccgctctcctcgc

SEQ ID NO: 1142929 - DNA, 25 bp, Homo sapien
gcgcctgctccgctctcctcgcgag

SEQ ID NO: 1142930 - DNA, 25 bp, Homo sapien
ggctgctccagagtcggcgctcctc

SEQ ID NO: 1142931 - DNA, 25 bp, Homo sapien
gccgcgcgcctgctccgctctcctc

SEQ ID NO: 1142932 - DNA, 25 bp, Homo sapien
agcagcagcggcctcgaggccaggc

SEQ ID NO: 1142933 - DNA, 25 bp, Homo sapien
agcagcggcctcgaggccaggcgcc

SEQ ID NO: 1142934 - DNA, 25 bp, Homo sapien
cagcggcctcgaggccaggcgcccc

SEQ ID NO: 1142935 - DNA, 25 bp, Homo sapien
ccaacgacaggagcgccagcagcag

SEQ ID NO: 1142936 - DNA, 25 bp, Homo sapien
gaagttggaggattctctcgcttcc

SEQ ID NO: 1142937 - DNA, 25 bp, Homo sapien
gatttccattgtaacgctccgggcc

SEQ ID NO: 1142938 - DNA, 25 bp, Homo sapien
gatctagccacgacgaaaatgacgg

SEQ ID NO: 1142939 - DNA, 25 bp, Homo sapien
aaatgacggcaggactcgcccgccg

SEQ ID NO: 1142940 - DNA, 25 bp, Homo sapien
ctgcctatcccacgtgtactccttg

SEQ ID NO: 1142941 - DNA, 25 bp, Homo sapien
gcctatcccacgtgtactccttggc

SEQ ID NO: 1142942 - DNA, 25 bp, Homo sapien
tgcctatcccacgtgtactccttgg

SEQ ID NO: 1142943 - DNA, 25 bp, Homo sapien
cctatcccacgtgtactccttggct

SEQ ID NO: 1142944 - DNA, 25 bp, Homo sapien
ctctggagggactgctcatcaccac

SEQ ID NO: 1142945 - DNA, 25 bp, Homo sapien
tcacctggagccaactgcctgtcag

SEQ ID NO: 1142946 - DNA, 25 bp, Homo sapien
cagagtttagaaggtgcccactgcg

SEQ ID NO: 1142947 - DNA, 25 bp, Homo sapien
cagcatgcctgctgatgcagtgact

SEQ ID NO: 1142948 - DNA, 25 bp, Homo sapien
cctcagagtacctttgatacccaag

SEQ ID NO: 1142949 - DNA, 25 bp, Homo sapien
cagttaccacagcctcagagtacct

SEQ ID NO: 1142950 - DNA, 25 bp, Homo sapien
agggcactttaactatcaccttcat

SEQ ID NO: 1142951 - DNA, 25 bp, Homo sapien
caaaataagggcactttaactatca

SEQ ID NO: 1142952 - DNA, 25 bp, Homo sapien
cagtgcccaccactcgaaccagggt

SEQ ID NO: 1142953 - DNA, 25 bp, Homo sapien
tcagtgcccaccactcgaaccaggg

SEQ ID NO: 1142954 - DNA, 25 bp, Homo sapien
gaaccagggtcgctgtggggactct

SEQ ID NO: 1142955 - DNA, 25 bp, Homo sapien
tcgaaccagggtcgctgtggggact

SEQ ID NO: 1142956 - DNA, 25 bp, Homo sapien
tgagaagctccagtcaaagttttgc

SEQ ID NO: 1142957 - DNA, 25 bp, Homo sapien
tcccaggtgcttgcaagctccacaa

SEQ ID NO: 1142958 - DNA, 25 bp, Homo sapien
ggcagtccgccttaacaggatctcg

SEQ ID NO: 1142959 - DNA, 25 bp, Homo sapien
tatgtggagctccacggcgtcgttg

SEQ ID NO: 1142960 - DNA, 25 bp, Homo sapien
cccactgtggtagcgctgctcgtac

SEQ ID NO: 1142961 - DNA, 25 bp, Homo sapien
gatcaccacggtggcaacttccacg

SEQ ID NO: 1142962 - DNA, 25 bp, Homo sapien
gctgacgatacacctgtaggagccc

SEQ ID NO: 1142963 - DNA, 25 bp, Homo sapien
gctcggcgatccactcgctgacgat

SEQ ID NO: 1142964 - DNA, 25 bp, Homo sapien
ccaggtagggtgctgtcaggcatcc

SEQ ID NO: 1142965 - DNA, 25 bp, Homo sapien
cagtaaatggtaggagcgtgcatcc

SEQ ID NO: 1142966 - DNA, 25 bp, Homo sapien
acgtcatcggctcggtctgttgtga

SEQ ID NO: 1142967 - DNA, 25 bp, Homo sapien
caaagcaacatgaggcgagctgtgc

SEQ ID NO: 1142968 - DNA, 25 bp, Homo sapien
agctggggaagacacggcctctgcc

SEQ ID NO: 1142969 - DNA, 25 bp, Homo sapien
ctggggtgagagcgtccacaaaaca

SEQ ID NO: 1142970 - DNA, 25 bp, Homo sapien
ggggtgagagcgtccacaaaacaag

SEQ ID NO: 1142971 - DNA, 25 bp, Homo sapien
gggtgagagcgtccacaaaacaagc

SEQ ID NO: 1142972 - DNA, 25 bp, Homo sapien
tggggtgagagcgtccacaaaacaa

SEQ ID NO: 1142973 - DNA, 25 bp, Homo sapien
ttccgcttactctcattgctcttct

SEQ ID NO: 1142974 - DNA, 25 bp, Homo sapien
ggaatcggattgtcccttccgctta

SEQ ID NO: 1142975 - DNA, 25 bp, Homo sapien
taacagggctgatgaacaccctgcc

SEQ ID NO: 1142976 - DNA, 25 bp, Homo sapien
tgcctcgtctccatcggaatcggat

SEQ ID NO: 1142977 - DNA, 25 bp, Homo sapien
tgagtcataggcacagggaaggagg

SEQ ID NO: 1142978 - DNA, 25 bp, Homo sapien
agtctttgagaagggtctgctgcta

SEQ ID NO: 1142979 - DNA, 25 bp, Homo sapien
ggtctgctgctatgctcatgcccta

SEQ ID NO: 1142980 - DNA, 25 bp, Homo sapien
tgccctacccgctcctgacaagtgt

SEQ ID NO: 1142981 - DNA, 25 bp, Homo sapien
agaagggatatactctgtgctccca

SEQ ID NO: 1142982 - DNA, 25 bp, Homo sapien
gtccccagaagggatatactctgtg

SEQ ID NO: 1142983 - DNA, 25 bp, Homo sapien
ccagaagggatatactctgtgctcc

SEQ ID NO: 1142984 - DNA, 25 bp, Homo sapien
tccccagaagggatatactctgtgc

SEQ ID NO: 1142985 - DNA, 25 bp, Homo sapien
aaataaagtctccatcctgggcccg

SEQ ID NO: 1142986 - DNA, 25 bp, Homo sapien
cgctgcgccggttcatcctgtagta

SEQ ID NO: 1142987 - DNA, 25 bp, Homo sapien
gaaaccgtgaatcggacattcgcct

SEQ ID NO: 1142988 - DNA, 25 bp, Homo sapien
cctttggatccggaaattgaacgtg

SEQ ID NO: 1142989 - DNA, 25 bp, Homo sapien
catgatgagaacagagtagcgtggc

SEQ ID NO: 1142990 - DNA, 25 bp, Homo sapien
tgagtctggtacattcgatagcgga

SEQ ID NO: 1142991 - DNA, 25 bp, Homo sapien
tggttgctgcttctcgccaaaggct

SEQ ID NO: 1142992 - DNA, 25 bp, Homo sapien
tacagccctgcgtctgagacctgag

SEQ ID NO: 1142993 - DNA, 25 bp, Homo sapien
tatgaattgcatcttaacaaagctg

SEQ ID NO: 1142994 - DNA, 25 bp, Homo sapien
aaaactggtcgtggtgatgatcaca

SEQ ID NO: 1142995 - DNA, 25 bp, Homo sapien
caatgtgggatatccatacgatgga

SEQ ID NO: 1142996 - DNA, 25 bp, Homo sapien
aaagtagatcatggttgctgcagaa

SEQ ID NO: 1142997 - DNA, 25 bp, Homo sapien
gaggatgttaaagatcttccacttt

SEQ ID NO: 1142998 - DNA, 25 bp, Homo sapien
ttgtatgattcaattgacacctgaa

SEQ ID NO: 1142999 - DNA, 25 bp, Homo sapien
tgggaggctcaattccctcctctct

SEQ ID NO: 1143000 - DNA, 25 bp, Homo sapien
aactttattagagtctagcttacct

SEQ ID NO: 1143001 - DNA, 25 bp, Homo sapien
tgcacagaagcattaaatataggac

SEQ ID NO: 1143002 - DNA, 25 bp, Homo sapien
aatgcacagaagcattaaatatagg

SEQ ID NO: 1143003 - DNA, 25 bp, Homo sapien
gaatgcacagaagcattaaatatag

SEQ ID NO: 1143004 - DNA, 25 bp, Homo sapien
ctgaatgcacagaagcattaaatat

SEQ ID NO: 1143005 - DNA, 25 bp, Homo sapien
tttgatcagatctccccgaattact

SEQ ID NO: 1143006 - DNA, 25 bp, Homo sapien
cagtgctgctccctcgacagtgatg

SEQ ID NO: 1143007 - DNA, 25 bp, Homo sapien
tccctcgacagtgatgatacagaac

SEQ ID NO: 1143008 - DNA, 25 bp, Homo sapien
tctccccgaattactgatggtgtgt

SEQ ID NO: 1143009 - DNA, 25 bp, Homo sapien
taaacacttaatgagtacaaagtac

SEQ ID NO: 1143010 - DNA, 25 bp, Homo sapien
gataaatagataatcctatccctaa

SEQ ID NO: 1143011 - DNA, 25 bp, Homo sapien
tatccctaacccacatctgtgtaac

SEQ ID NO: 1143012 - DNA, 25 bp, Homo sapien
cacagtgcggatgatatgagaaaca

SEQ ID NO: 1143013 - DNA, 25 bp, Homo sapien
ccttgtccaggccaaaagagtgcac

SEQ ID NO: 1143014 - DNA, 25 bp, Homo sapien
gccaggaacctgttggtgacttcac

SEQ ID NO: 1143015 - DNA, 25 bp, Homo sapien
tccaggctgaggtcgctcttccagt

SEQ ID NO: 1143016 - DNA, 25 bp, Homo sapien
cccatggagtcacggaacagtagta

SEQ ID NO: 1143017 - DNA, 25 bp, Homo sapien
tgggagctgcagtacccgatgagac

SEQ ID NO: 1143018 - DNA, 25 bp, Homo sapien
tggacagaccgacgccgatcagcaa

SEQ ID NO: 1143019 - DNA, 25 bp, Homo sapien
tcagcaagggatacttgaaggcgtt

SEQ ID NO: 1143020 - DNA, 25 bp, Homo sapien
gagacaggacaggagcccgatgacc

SEQ ID NO: 1143021 - DNA, 25 bp, Homo sapien
ggcgctcgcgccgtgtctcctgaac

SEQ ID NO: 1143022 - DNA, 25 bp, Homo sapien
ctccatcgacatgagcctgcggcgc

SEQ ID NO: 1143023 - DNA, 25 bp, Homo sapien
atcgacatgagcctgcggcgctcgc

SEQ ID NO: 1143024 - DNA, 25 bp, Homo sapien
gctcgcgccgtgtctcctgaacctc

SEQ ID NO: 1143025 - DNA, 25 bp, Homo sapien
tcttcttgccccaattgctcctaga

SEQ ID NO: 1143026 - DNA, 25 bp, Homo sapien
ttgccccaattgctcctagaacgtc

SEQ ID NO: 1143027 - DNA, 25 bp, Homo sapien
ctggtttttagtgtaacacactttg

SEQ ID NO: 1143028 - DNA, 25 bp, Homo sapien
ttgctcctagaacgtccctctgtca

SEQ ID NO: 1143029 - DNA, 25 bp, Homo sapien
gatgcttccgaaaggccagtgctgt

SEQ ID NO: 1143030 - DNA, 25 bp, Homo sapien
cctggccccagctgcgtaagaataa

SEQ ID NO: 1143031 - DNA, 25 bp, Homo sapien
ggttaaggagcccaagcacgtgtga

SEQ ID NO: 1143032 - DNA, 25 bp, Homo sapien
tggtaaacatgtccgcgctcagaac

SEQ ID NO: 1143033 - DNA, 25 bp, Homo sapien
tccggcccatggtgacaaagagctg

SEQ ID NO: 1143034 - DNA, 25 bp, Homo sapien
acccggtcaggtccaaagctaagca

SEQ ID NO: 1143035 - DNA, 25 bp, Homo sapien
caattccacctgtgtgagacgcggc

SEQ ID NO: 1143036 - DNA, 25 bp, Homo sapien
taggtccttggtacaatgccctggg

SEQ ID NO: 1143037 - DNA, 25 bp, Homo sapien
aagtcagcgttttctcttctaggga

SEQ ID NO: 1143038 - DNA, 25 bp, Homo sapien
ctctgttgtcatcggtgaagctaaa

SEQ ID NO: 1143039 - DNA, 25 bp, Homo sapien
tctgcagatccttatgtgccacact

SEQ ID NO: 1143040 - DNA, 25 bp, Homo sapien
caagatcctttctttgtctacggaa

SEQ ID NO: 1143041 - DNA, 25 bp, Homo sapien
catgtgctggacatccattaaggac

SEQ ID NO: 1143042 - DNA, 25 bp, Homo sapien
tgtgctggacatccattaaggacat

SEQ ID NO: 1143043 - DNA, 25 bp, Homo sapien
tggacatccattaaggacataatta

SEQ ID NO: 1143044 - DNA, 25 bp, Homo sapien
gctggacatccattaaggacataat

SEQ ID NO: 1143045 - DNA, 25 bp, Homo sapien
gatgccacatatgagatgcctgcca

SEQ ID NO: 1143046 - DNA, 25 bp, Homo sapien
agatgccacatatgagatgcctgcc

SEQ ID NO: 1143047 - DNA, 25 bp, Homo sapien
gcagccaatgctgactgggtaacct

SEQ ID NO: 1143048 - DNA, 25 bp, Homo sapien
tgtcggcaggtaaacagaccactgg

SEQ ID NO: 1143049 - DNA, 25 bp, Homo sapien
ggtgtgtgacactcatactcgccag

SEQ ID NO: 1143050 - DNA, 25 bp, Homo sapien
gcacccgctgcgtatatactgcgta

SEQ ID NO: 1143051 - DNA, 25 bp, Homo sapien
cgctctgtatacaagggcccaggga

SEQ ID NO: 1143052 - DNA, 25 bp, Homo sapien
tgaccctgatctgaggactggagcc

SEQ ID NO: 1143053 - DNA, 25 bp, Homo sapien
ggagcctctctatggacagcctgaa

SEQ ID NO: 1143054 - DNA, 25 bp, Homo sapien
gctgtacgtcactggctgcaaaccg

SEQ ID NO: 1143055 - DNA, 25 bp, Homo sapien
caggactccaccagcatcaatgtga

SEQ ID NO: 1143056 - DNA, 25 bp, Homo sapien
gaacctgtgcgtgttttcatgacct

SEQ ID NO: 1143057 - DNA, 25 bp, Homo sapien
ctttgtagtcattcttcaggcccag

SEQ ID NO: 1143058 - DNA, 25 bp, Homo sapien
tctgtaggcgccttcatcctctggg

SEQ ID NO: 1143059 - DNA, 25 bp, Homo sapien
ccttacagagaaaggcgagtgtctc

SEQ ID NO: 1143060 - DNA, 25 bp, Homo sapien
tctccagccttgtgttgccatggta

SEQ ID NO: 1143061 - DNA, 25 bp, Homo sapien
tgtctggtcccgtgggatgtgccac

SEQ ID NO: 1143062 - DNA, 25 bp, Homo sapien
tctggcctggttccgagacttctca

SEQ ID NO: 1143063 - DNA, 25 bp, Homo sapien
catgcgtgggttcagtatcagaacc

SEQ ID NO: 1143064 - DNA, 25 bp, Homo sapien
tatcagaacccttttgcacatgctt

SEQ ID NO: 1143065 - DNA, 25 bp, Homo sapien
ttttgcacatgcttcaatgggctct

SEQ ID NO: 1143066 - DNA, 25 bp, Homo sapien
ggttcagtatcagaacccttttgca

SEQ ID NO: 1143067 - DNA, 25 bp, Homo sapien
caccttgaggtcagagtaaccggcc

SEQ ID NO: 1143068 - DNA, 25 bp, Homo sapien
ggttaacatcacttgcggctgacgg

SEQ ID NO: 1143069 - DNA, 25 bp, Homo sapien
taaagtgacggctatcctcagtggg

SEQ ID NO: 1143070 - DNA, 25 bp, Homo sapien
cacgtcacagtgagtggcaccttga

SEQ ID NO: 1143071 - DNA, 25 bp, Homo sapien
acagtgatatttgccccgatcgctg

SEQ ID NO: 1143072 - DNA, 25 bp, Homo sapien
tgccatttgtagacaggagccattc

SEQ ID NO: 1143073 - DNA, 25 bp, Homo sapien
cattggaccgggacaagatgctaca

SEQ ID NO: 1143074 - DNA, 25 bp, Homo sapien
caagaggcattagtggaaacaggag

SEQ ID NO: 1143075 - DNA, 25 bp, Homo sapien
cactttggagacacgtaccttactt

SEQ ID NO: 1143076 - DNA, 25 bp, Homo sapien
tcggtccagtacactttggagacac

SEQ ID NO: 1143077 - DNA, 25 bp, Homo sapien
tctctgtgctcagtcacattttcgg

SEQ ID NO: 1143078 - DNA, 25 bp, Homo sapien
catcacagagtacagagtggctgag

SEQ ID NO: 1143079 - DNA, 25 bp, Homo sapien
catcatgttgcaagtgcaccagcaa

SEQ ID NO: 1143080 - DNA, 25 bp, Homo sapien
caagccatcatgttgcaagtgcacc

SEQ ID NO: 1143081 - DNA, 25 bp, Homo sapien
ttccccatactccagcaagccatca

SEQ ID NO: 1143082 - DNA, 25 bp, Homo sapien
gtgcaccagcaatttacttccagag

SEQ ID NO: 1143083 - DNA, 25 bp, Homo sapien
tgtagaggatgaacggtaacagtgc

SEQ ID NO: 1143084 - DNA, 25 bp, Homo sapien
accgtgagcaccatccgctgtgact

SEQ ID NO: 1143085 - DNA, 25 bp, Homo sapien
cgctgtgactcatcggatgcttgat

SEQ ID NO: 1143086 - DNA, 25 bp, Homo sapien
taatccacttgcttgggtgtccatg

SEQ ID NO: 1143087 - DNA, 25 bp, Homo sapien
ttagggaacctgaaaattgtcttca

SEQ ID NO: 1143088 - DNA, 25 bp, Homo sapien
gggaacctgaaaattgtcttcagtc

SEQ ID NO: 1143089 - DNA, 25 bp, Homo sapien
ctgaaaattgtcttcagtctgaaaa

SEQ ID NO: 1143090 - DNA, 25 bp, Homo sapien
cctgaaaattgtcttcagtctgaaa

SEQ ID NO: 1143091 - DNA, 25 bp, Homo sapien
caaacaccacaggtttcaggaaaca

SEQ ID NO: 1143092 - DNA, 25 bp, Homo sapien
agaggactgcaaacaccacaggttt

SEQ ID NO: 1143093 - DNA, 25 bp, Homo sapien
tgcaaacaccacaggtttcaggaaa

SEQ ID NO: 1143094 - DNA, 25 bp, Homo sapien
gactgcaaacaccacaggtttcagg

SEQ ID NO: 1143095 - DNA, 25 bp, Homo sapien
gcagtccgccgggaagcactatcaa

SEQ ID NO: 1143096 - DNA, 25 bp, Homo sapien
cgcagctgcagtccgccgggaagca

SEQ ID NO: 1143097 - DNA, 25 bp, Homo sapien
cagtccgccgggaagcactatcaat

SEQ ID NO: 1143098 - DNA, 25 bp, Homo sapien
tccgccgggaagcactatcaatcag

SEQ ID NO: 1143099 - DNA, 25 bp, Homo sapien
cgttctcactcagccctttgtttag

SEQ ID NO: 1143100 - DNA, 25 bp, Homo sapien
gatctgaattaaattggattgactg

SEQ ID NO: 1143101 - DNA, 25 bp, Homo sapien
tctatatcccctacagtgcctagca

SEQ ID NO: 1143102 - DNA, 25 bp, Homo sapien
tacttgagtatgtctgatagtgcca

SEQ ID NO: 1143103 - DNA, 25 bp, Homo sapien
ttttctttccgtgtgttggaacgca

SEQ ID NO: 1143104 - DNA, 25 bp, Homo sapien
ccttccagtataagcagaggaggga

SEQ ID NO: 1143105 - DNA, 25 bp, Homo sapien
ttggaacgcagtgttgacaacttcc

SEQ ID NO: 1143106 - DNA, 25 bp, Homo sapien
cagatgaacaggaaatagagtaaag

SEQ ID NO: 1143107 - DNA, 25 bp, Homo sapien
cctcctcgtcttccctcctatttgt

SEQ ID NO: 1143108 - DNA, 25 bp, Homo sapien
tcctggctgcaggtgcctcttggga

SEQ ID NO: 1143109 - DNA, 25 bp, Homo sapien
cctggctgcaggtgcctcttgggat

SEQ ID NO: 1143110 - DNA, 25 bp, Homo sapien
ctttccttcctggctgcaggtgcct

SEQ ID NO: 1143111 - DNA, 25 bp, Homo sapien
tccttcctggctgcaggtgcctctt

SEQ ID NO: 1143112 - DNA, 25 bp, Homo sapien
gtaggatctcatttagccctccaga

SEQ ID NO: 1143113 - DNA, 25 bp, Homo sapien
tgcgtagaaccaataagcactcagt

SEQ ID NO: 1143114 - DNA, 25 bp, Homo sapien
caaaggaacacctaacagtgcgtag

SEQ ID NO: 1143115 - DNA, 25 bp, Homo sapien
ccagggacctgaaccttcaagagat

SEQ ID NO: 1143116 - DNA, 25 bp, Homo sapien
acaaagagcatgttaccaattcctt

SEQ ID NO: 1143117 - DNA, 25 bp, Homo sapien
tgttgtggggacagattttaggtaa

SEQ ID NO: 1143118 - DNA, 25 bp, Homo sapien
cctacacctctcatctggaggaaaa

SEQ ID NO: 1143119 - DNA, 25 bp, Homo sapien
ggtaaacaaagagcatgttaccaat

SEQ ID NO: 1143120 - DNA, 25 bp, Homo sapien
gaacttgctcttgagtgggcctttg

SEQ ID NO: 1143121 - DNA, 25 bp, Homo sapien
aattgaatttctgcctcgaaggaag

SEQ ID NO: 1143122 - DNA, 25 bp, Homo sapien
cctttacacagaacttgctcttgag

SEQ ID NO: 1143123 - DNA, 25 bp, Homo sapien
caaagaacctgtattagttaagcac

SEQ ID NO: 1143124 - DNA, 25 bp, Homo sapien
cttgggaagaaacaggcagcaaggc

SEQ ID NO: 1143125 - DNA, 25 bp, Homo sapien
aagaaacaggcagcaaggcaggaag

SEQ ID NO: 1143126 - DNA, 25 bp, Homo sapien
gaagaaacaggcagcaaggcaggaa

SEQ ID NO: 1143127 - DNA, 25 bp, Homo sapien
gagcgctgggaatactctccaaagc

SEQ ID NO: 1143128 - DNA, 25 bp, Homo sapien
tggcgcagccgcagtgagtcgtcct

SEQ ID NO: 1143129 - DNA, 25 bp, Homo sapien
actaggtcaccacattccacacggg

SEQ ID NO: 1143130 - DNA, 25 bp, Homo sapien
tgacttcaggatggtaatgaggaaa

SEQ ID NO: 1143131 - DNA, 25 bp, Homo sapien
cagcattaatgatcagctgcagagg

SEQ ID NO: 1143132 - DNA, 25 bp, Homo sapien
aggaggtgtcaagggtttctgtatt

SEQ ID NO: 1143133 - DNA, 25 bp, Homo sapien
tgtcaagggtttctgtattcccacc

SEQ ID NO: 1143134 - DNA, 25 bp, Homo sapien
agaaacagcattaatgatcagctgc

SEQ ID NO: 1143135 - DNA, 25 bp, Homo sapien
gtttctcttcttctcctgctttccc

SEQ ID NO: 1143136 - DNA, 25 bp, Homo sapien
tctcttcttctcctgctttccccac

SEQ ID NO: 1143137 - DNA, 25 bp, Homo sapien
ctaattgtcactgtttcttctctct

SEQ ID NO: 1143138 - DNA, 25 bp, Homo sapien
tctctctgtttctcttcttctcctg

SEQ ID NO: 1143139 - DNA, 25 bp, Homo sapien
gaacctgaagacctccagtggctat

SEQ ID NO: 1143140 - DNA, 25 bp, Homo sapien
aagacctccagtggctatgtacttg

SEQ ID NO: 1143141 - DNA, 25 bp, Homo sapien
cctgaagacctccagtggctatgta

SEQ ID NO: 1143142 - DNA, 25 bp, Homo sapien
gtacttgttttctggtggccatcct

SEQ ID NO: 1143143 - DNA, 25 bp, Homo sapien
cgtgctctggacacctaacttcttc

SEQ ID NO: 1143144 - DNA, 25 bp, Homo sapien
tgctctggacacctaacttcttcca

SEQ ID NO: 1143145 - DNA, 25 bp, Homo sapien
gctctggacacctaacttcttccat

SEQ ID NO: 1143146 - DNA, 25 bp, Homo sapien
gtgctctggacacctaacttcttcc

SEQ ID NO: 1143147 - DNA, 25 bp, Homo sapien
tgcccggcacacgtagaagctcttt

SEQ ID NO: 1143148 - DNA, 25 bp, Homo sapien
tctttcctttattcgggccatcgcg

SEQ ID NO: 1143149 - DNA, 25 bp, Homo sapien
cgcacgaagctgcacgtgtctgccc

SEQ ID NO: 1143150 - DNA, 25 bp, Homo sapien
cgcggacgccggtcttaagaaagca

SEQ ID NO: 1143151 - DNA, 25 bp, Homo sapien
cacaaagtcctcatgcaataagcaa

SEQ ID NO: 1143152 - DNA, 25 bp, Homo sapien
acaaagtcctcatgcaataagcaat

SEQ ID NO: 1143153 - DNA, 25 bp, Homo sapien
ccacaaagtcctcatgcaataagca

SEQ ID NO: 1143154 - DNA, 25 bp, Homo sapien
taccacaaagtcctcatgcaataag

SEQ ID NO: 1143155 - DNA, 25 bp, Homo sapien
agttttctttactgcctgtacacag

SEQ ID NO: 1143156 - DNA, 25 bp, Homo sapien
caaatgctggtcagtggtgccatct

SEQ ID NO: 1143157 - DNA, 25 bp, Homo sapien
ggttctactgagattatcagttttc

SEQ ID NO: 1143158 - DNA, 25 bp, Homo sapien
agggccatggccgaatggctagtca

SEQ ID NO: 1143159 - DNA, 25 bp, Homo sapien
ctgctcactatactagggctagata

SEQ ID NO: 1143160 - DNA, 25 bp, Homo sapien
ccaatagccaacaacacgaggagtt

SEQ ID NO: 1143161 - DNA, 25 bp, Homo sapien
tcagtggtccttcacagctggtggg

SEQ ID NO: 1143162 - DNA, 25 bp, Homo sapien
gcaggtcaatttcacccaatagcca

SEQ ID NO: 1143163 - DNA, 25 bp, Homo sapien
ctgccatggaatacttccacaccag

SEQ ID NO: 1143164 - DNA, 25 bp, Homo sapien
cagcgtttcccctctgccttacttc

SEQ ID NO: 1143165 - DNA, 25 bp, Homo sapien
tggaatacttccacaccagcgtttc

SEQ ID NO: 1143166 - DNA, 25 bp, Homo sapien
tacttctaatgcatcggaagaacaa

SEQ ID NO: 1143167 - DNA, 25 bp, Homo sapien
cttcacgatactttcgaagcttggt

SEQ ID NO: 1143168 - DNA, 25 bp, Homo sapien
ttcttcacgatactttcgaagcttg

SEQ ID NO: 1143169 - DNA, 25 bp, Homo sapien
ccacaaaggactcatttcttcacga

SEQ ID NO: 1143170 - DNA, 25 bp, Homo sapien
caaaggactcatttcttcacgatac

SEQ ID NO: 1143171 - DNA, 25 bp, Homo sapien
ttttgatcgaaaagctgatctccct

SEQ ID NO: 1143172 - DNA, 25 bp, Homo sapien
tttctttggtaccaggccagatgag

SEQ ID NO: 1143173 - DNA, 25 bp, Homo sapien
tgtaagctcattaccttggcactgt

SEQ ID NO: 1143174 - DNA, 25 bp, Homo sapien
taccttgaatggatttctcagccag

SEQ ID NO: 1143175 - DNA, 25 bp, Homo sapien
cactgcttgtggcagcttcacggcc

SEQ ID NO: 1143176 - DNA, 25 bp, Homo sapien
gccgctcttggaaatgcccctgagg

SEQ ID NO: 1143177 - DNA, 25 bp, Homo sapien
gcctgtatgctagggccatcctttg

SEQ ID NO: 1143178 - DNA, 25 bp, Homo sapien
tgtttctttagcctcccagttcgtg

SEQ ID NO: 1143179 - DNA, 25 bp, Homo sapien
tccagagtcgagtcaaagagtaggg

SEQ ID NO: 1143180 - DNA, 25 bp, Homo sapien
gaggcaggagacacctttctttgca

SEQ ID NO: 1143181 - DNA, 25 bp, Homo sapien
gttttccttcgtctctaagtccaga

SEQ ID NO: 1143182 - DNA, 25 bp, Homo sapien
cacacttcgatcagggaattggagg

SEQ ID NO: 1143183 - DNA, 25 bp, Homo sapien
agacacgccgggctactgggtctga

SEQ ID NO: 1143184 - DNA, 25 bp, Homo sapien
ttcagttgtgttgtaaggtagacac

SEQ ID NO: 1143185 - DNA, 25 bp, Homo sapien
tgtaaggtagacacgccgggctact

SEQ ID NO: 1143186 - DNA, 25 bp, Homo sapien
ttgtgttgtaaggtagacacgccgg

SEQ ID NO: 1143187 - DNA, 25 bp, Homo sapien
ctcagaaacaaaacacgagtcaata

SEQ ID NO: 1143188 - DNA, 25 bp, Homo sapien
tcagaaacaaaacacgagtcaatag

SEQ ID NO: 1143189 - DNA, 25 bp, Homo sapien
cagaaacaaaacacgagtcaatagt

SEQ ID NO: 1143190 - DNA, 25 bp, Homo sapien
gaaacaaaacacgagtcaatagtta

SEQ ID NO: 1143191 - DNA, 25 bp, Homo sapien
ttgtttgatcaacttctgacccttg

SEQ ID NO: 1143192 - DNA, 25 bp, Homo sapien
tctggggaaagggtaagaccactga

SEQ ID NO: 1143193 - DNA, 25 bp, Homo sapien
tctgacccttgtctggaagagcctg

SEQ ID NO: 1143194 - DNA, 25 bp, Homo sapien
tggaagagcctggatgttcactgat

SEQ ID NO: 1143195 - DNA, 25 bp, Homo sapien
gagttctgaggcataagccacttta

SEQ ID NO: 1143196 - DNA, 25 bp, Homo sapien
taaagtcgatgcaaacccggagttc

SEQ ID NO: 1143197 - DNA, 25 bp, Homo sapien
aaagggcttcccgaatgtctcttgt

SEQ ID NO: 1143198 - DNA, 25 bp, Homo sapien
gaatgtctcttgtaaagtcgatgca

SEQ ID NO: 1143199 - DNA, 25 bp, Homo sapien
ccagtggtagttttggtgaagtgac

SEQ ID NO: 1143200 - DNA, 25 bp, Homo sapien
cacaggttgggtaccacgacgagga

SEQ ID NO: 1143201 - DNA, 25 bp, Homo sapien
cctggcaggcagactttagttctag

SEQ ID NO: 1143202 - DNA, 25 bp, Homo sapien
tagttctagagaacccacaggttgg

SEQ ID NO: 1143203 - DNA, 25 bp, Homo sapien
gggtggctattcacagcagggtcag

SEQ ID NO: 1143204 - DNA, 25 bp, Homo sapien
aggggtggctattcacagcagggtc

SEQ ID NO: 1143205 - DNA, 25 bp, Homo sapien
gtggctattcacagcagggtcaggc

SEQ ID NO: 1143206 - DNA, 25 bp, Homo sapien
tggctattcacagcagggtcaggcc

SEQ ID NO: 1143207 - DNA, 25 bp, Homo sapien
caagtgagcgatgcagttgaccgat

SEQ ID NO: 1143208 - DNA, 25 bp, Homo sapien
gttgaccgatggcttcacttgtgat

SEQ ID NO: 1143209 - DNA, 25 bp, Homo sapien
acaaccgtctcaccaggacatgact

SEQ ID NO: 1143210 - DNA, 25 bp, Homo sapien
tttccacactgcatgaacgtgatct

SEQ ID NO: 1143211 - DNA, 25 bp, Homo sapien
ttctgactttctcgccatagtaacc

SEQ ID NO: 1143212 - DNA, 25 bp, Homo sapien
gtggcttctgactttctcgccatag

SEQ ID NO: 1143213 - DNA, 25 bp, Homo sapien
tttctcgccatagtaaccaagccaa

SEQ ID NO: 1143214 - DNA, 25 bp, Homo sapien
tgactttctcgccatagtaaccaag

SEQ ID NO: 1143215 - DNA, 25 bp, Homo sapien
gatgagcgcaatcattgtcagggtt

SEQ ID NO: 1143216 - DNA, 25 bp, Homo sapien
tgtcagggtttttcctaagcccata

SEQ ID NO: 1143217 - DNA, 25 bp, Homo sapien
ctgggtcaggatgagcgcaatcatt

SEQ ID NO: 1143218 - DNA, 25 bp, Homo sapien
gagagccacgtcaaagctgtgcttt

SEQ ID NO: 1143219 - DNA, 25 bp, Homo sapien
taattaaatatgaccaaaggtgtcc

SEQ ID NO: 1143220 - DNA, 25 bp, Homo sapien
tcaaatgacgtagggaatggcaggc

SEQ ID NO: 1143221 - DNA, 25 bp, Homo sapien
aggctattaaggcacttctgtctac

SEQ ID NO: 1143222 - DNA, 25 bp, Homo sapien
tcttgggtggctcaaatgacgtagg

SEQ ID NO: 1143223 - DNA, 25 bp, Homo sapien
ttatacggaaaaaatgatcacttat

SEQ ID NO: 1143224 - DNA, 25 bp, Homo sapien
tataattagcatactcagcatcaga

SEQ ID NO: 1143225 - DNA, 25 bp, Homo sapien
taaaattctgcctagtttataggca

SEQ ID NO: 1143226 - DNA, 25 bp, Homo sapien
aaattaagtgttctagagcctcagc

SEQ ID NO: 1143227 - DNA, 25 bp, Homo sapien
ggtttgtttataccatggcccctca

SEQ ID NO: 1143228 - DNA, 25 bp, Homo sapien
tcatcgtgtttgaccggcctttaac

SEQ ID NO: 1143229 - DNA, 25 bp, Homo sapien
caaagggatataggacccagctgca

SEQ ID NO: 1143230 - DNA, 25 bp, Homo sapien
gaaagtgggtggcacatgacctcag

SEQ ID NO: 1143231 - DNA, 25 bp, Homo sapien
actctggcacgtgaatcccggtttg

SEQ ID NO: 1143232 - DNA, 25 bp, Homo sapien
gactcttagtttgttgctgttcacc

SEQ ID NO: 1143233 - DNA, 25 bp, Homo sapien
ggcccatggtagagatagactctta

SEQ ID NO: 1143234 - DNA, 25 bp, Homo sapien
ttttccaatgatggatcagggaggc

SEQ ID NO: 1143235 - DNA, 25 bp, Homo sapien
tgttctcatccttgactacagcagc

SEQ ID NO: 1143236 - DNA, 25 bp, Homo sapien
gactaggactaagattgccatgtgg

SEQ ID NO: 1143237 - DNA, 25 bp, Homo sapien
gactgccgccccgttctttaggaga

SEQ ID NO: 1143238 - DNA, 25 bp, Homo sapien
tttgcctgcagaagcgactctcagt

SEQ ID NO: 1143239 - DNA, 25 bp, Homo sapien
gatcacgatgtcatatgtagagagg

SEQ ID NO: 1143240 - DNA, 25 bp, Homo sapien
tccttggccacgaggctataggtag

SEQ ID NO: 1143241 - DNA, 25 bp, Homo sapien
gtttgtgggaatctccttggccacg

SEQ ID NO: 1143242 - DNA, 25 bp, Homo sapien
gctataggtagtgatcacgatgtca

SEQ ID NO: 1143243 - DNA, 25 bp, Homo sapien
ctcttgctatcgtggaggctgagaa

SEQ ID NO: 1143244 - DNA, 25 bp, Homo sapien
gaggctgagaaagactcccattaaa

SEQ ID NO: 1143245 - DNA, 25 bp, Homo sapien
ctccagggaggtcctcttgctatcg

SEQ ID NO: 1143246 - DNA, 25 bp, Homo sapien
gtggctccaactccacttccctggc

SEQ ID NO: 1143247 - DNA, 25 bp, Homo sapien
cttaacattgtgagcttcatccaat

SEQ ID NO: 1143248 - DNA, 25 bp, Homo sapien
tcatccaatatgattcgagcccagg

SEQ ID NO: 1143249 - DNA, 25 bp, Homo sapien
cgagcccaggctattcgaagcaaag

SEQ ID NO: 1143250 - DNA, 25 bp, Homo sapien
ggcacaggcttgtagcttacacaca

SEQ ID NO: 1143251 - DNA, 25 bp, Homo sapien
tctttgagccattgtcaacctgact

SEQ ID NO: 1143252 - DNA, 25 bp, Homo sapien
tgactcctccacagattgaactcat

SEQ ID NO: 1143253 - DNA, 25 bp, Homo sapien
catcaaatggagagcaacggagaaa

SEQ ID NO: 1143254 - DNA, 25 bp, Homo sapien
caaaggtctgccagtagagtccagc

SEQ ID NO: 1143255 - DNA, 25 bp, Homo sapien
tgttcaacccaagacaaggacacag

SEQ ID NO: 1143256 - DNA, 25 bp, Homo sapien
caaagcagatggctgttcaacccaa

SEQ ID NO: 1143257 - DNA, 25 bp, Homo sapien
ccccagggacaggtacaaacttgat

SEQ ID NO: 1143258 - DNA, 25 bp, Homo sapien
ccagggacaggtacaaacttgatta

SEQ ID NO: 1143259 - DNA, 25 bp, Homo sapien
taaatggtgcaactgaaatttacgc

SEQ ID NO: 1143260 - DNA, 25 bp, Homo sapien
cagaaagctttaaatggtgcaactg

SEQ ID NO: 1143261 - DNA, 25 bp, Homo sapien
tggtgcaactgaaatttacgctggg

SEQ ID NO: 1143262 - DNA, 25 bp, Homo sapien
gaaatttacgctggggcagtatcac

SEQ ID NO: 1143263 - DNA, 25 bp, Homo sapien
cagattggttgcctctactttcatg

SEQ ID NO: 1143264 - DNA, 25 bp, Homo sapien
attggttgcctctactttcatgtct

SEQ ID NO: 1143265 - DNA, 25 bp, Homo sapien
tccagattggttgcctctactttca

SEQ ID NO: 1143266 - DNA, 25 bp, Homo sapien
ctgaatggattattagggcttcttc

SEQ ID NO: 1143267 - DNA, 25 bp, Homo sapien
tctgctgcctccgagtgtctaggct

SEQ ID NO: 1143268 - DNA, 25 bp, Homo sapien
tccgagtgtctaggctcctcagacc

SEQ ID NO: 1143269 - DNA, 25 bp, Homo sapien
ctggatctcggtgagtctgctgcct

SEQ ID NO: 1143270 - DNA, 25 bp, Homo sapien
tcctcagacccaaactccagtgcca

SEQ ID NO: 1143271 - DNA, 25 bp, Homo sapien
cactggcggagtctcagcaactggg

SEQ ID NO: 1143272 - DNA, 25 bp, Homo sapien
gacagcaacactggcggagtctcag

SEQ ID NO: 1143273 - DNA, 25 bp, Homo sapien
atgacagcaacactggcggagtctc

SEQ ID NO: 1143274 - DNA, 25 bp, Homo sapien
caacactggcggagtctcagcaact

SEQ ID NO: 1143275 - DNA, 25 bp, Homo sapien
ggagttctgacaaggtcaaagcact

SEQ ID NO: 1143276 - DNA, 25 bp, Homo sapien
tgctctctcgcatgccttcaaaaag

SEQ ID NO: 1143277 - DNA, 25 bp, Homo sapien
gatggctctgagtcacggagttctg

SEQ ID NO: 1143278 - DNA, 25 bp, Homo sapien
tcttgaagaaggtgccgttaaggga

SEQ ID NO: 1143279 - DNA, 25 bp, Homo sapien
cccagtgacccatgacagaaaaccc

SEQ ID NO: 1143280 - DNA, 25 bp, Homo sapien
tctcaaagtcccctatgtagtaagg

SEQ ID NO: 1143281 - DNA, 25 bp, Homo sapien
tcagtgcaatgctggggttgtccca

SEQ ID NO: 1143282 - DNA, 25 bp, Homo sapien
gttgtcccaaattactctctcaaag

SEQ ID NO: 1143283 - DNA, 25 bp, Homo sapien
ctcttttgggatgctgaatttcttt

SEQ ID NO: 1143284 - DNA, 25 bp, Homo sapien
ggatgctgaatttctttgaattgcc

SEQ ID NO: 1143285 - DNA, 25 bp, Homo sapien
ttgaattgcctccaattctgccaac

SEQ ID NO: 1143286 - DNA, 25 bp, Homo sapien
tctttgaattgcctccaattctgcc

SEQ ID NO: 1143287 - DNA, 25 bp, Homo sapien
tctcacataattatgaccaatactt

SEQ ID NO: 1143288 - DNA, 25 bp, Homo sapien
ttctcacataattatgaccaatact

SEQ ID NO: 1143289 - DNA, 25 bp, Homo sapien
agtgctttctgctgagcatgactca

SEQ ID NO: 1143290 - DNA, 25 bp, Homo sapien
cagtgctttctgctgagcatgactc

SEQ ID NO: 1143291 - DNA, 25 bp, Homo sapien
ctcagtgctttctgctgagcatgac

SEQ ID NO: 1143292 - DNA, 25 bp, Homo sapien
gtgctttctgctgagcatgactcac

SEQ ID NO: 1143293 - DNA, 25 bp, Homo sapien
catcgatggtggcataagtcagtcc

SEQ ID NO: 1143294 - DNA, 25 bp, Homo sapien
gcctctggagtggttaaatgcctct

SEQ ID NO: 1143295 - DNA, 25 bp, Homo sapien
caggtgcaatgctacaactttcagc

SEQ ID NO: 1143296 - DNA, 25 bp, Homo sapien
tgggattgacagagccatcgatggt

SEQ ID NO: 1143297 - DNA, 25 bp, Homo sapien
ttagaccaacacctccggccaagag

SEQ ID NO: 1143298 - DNA, 25 bp, Homo sapien
tcaggtttagaccaacacctccggc

SEQ ID NO: 1143299 - DNA, 25 bp, Homo sapien
acctccggccaagagagagattagc

SEQ ID NO: 1143300 - DNA, 25 bp, Homo sapien
cctccagtcaggtttagaccaacac

SEQ ID NO: 1143301 - DNA, 25 bp, Homo sapien
cgaaagatgtggttgtactcctggt

SEQ ID NO: 1143302 - DNA, 25 bp, Homo sapien
ccttgattggcataactggaaaacc

SEQ ID NO: 1143303 - DNA, 25 bp, Homo sapien
cactcacgtgtacagaggagtccca

SEQ ID NO: 1143304 - DNA, 25 bp, Homo sapien
tctgggctgtctggagaattggacc

SEQ ID NO: 1143305 - DNA, 25 bp, Homo sapien
aatcttggataacatttctctatct

SEQ ID NO: 1143306 - DNA, 25 bp, Homo sapien
aaaatcttggataacatttctctat

SEQ ID NO: 1143307 - DNA, 25 bp, Homo sapien
aaatcttggataacatttctctatc

SEQ ID NO: 1143308 - DNA, 25 bp, Homo sapien
gatccctgtcctaagctatactggc

SEQ ID NO: 1143309 - DNA, 25 bp, Homo sapien
gaagggccagctaatgatcttgact

SEQ ID NO: 1143310 - DNA, 25 bp, Homo sapien
gcctaagacaagctggtgccagata

SEQ ID NO: 1143311 - DNA, 25 bp, Homo sapien
aactcaggtctggtctctaggtagc

SEQ ID NO: 1143312 - DNA, 25 bp, Homo sapien
taaattcggtcacaagcttgatctt

SEQ ID NO: 1143313 - DNA, 25 bp, Homo sapien
tgctgccctactcggtaaattcggt

SEQ ID NO: 1143314 - DNA, 25 bp, Homo sapien
tactcggtaaattcggtcacaagct

SEQ ID NO: 1143315 - DNA, 25 bp, Homo sapien
ctttctgctgccctactcggtaaat

SEQ ID NO: 1143316 - DNA, 25 bp, Homo sapien
ggagcatcaggtctacaacttgttc

SEQ ID NO: 1143317 - DNA, 25 bp, Homo sapien
tctcaagtggtccagaaaaatgttt

SEQ ID NO: 1143318 - DNA, 25 bp, Homo sapien
ggactgccctcaccatatacacaaa

SEQ ID NO: 1143319 - DNA, 25 bp, Homo sapien
gtacttagggacaaaggagcatcag

SEQ ID NO: 1143320 - DNA, 25 bp, Homo sapien
taactggctcatgctcatcaaaatg

SEQ ID NO: 1143321 - DNA, 25 bp, Homo sapien
aaactgcgtgctaccaggatctggg

SEQ ID NO: 1143322 - DNA, 25 bp, Homo sapien
cataaaacacaaagactgggtactg

SEQ ID NO: 1143323 - DNA, 25 bp, Homo sapien
tgctgtgaaggacatcactgagaca

SEQ ID NO: 1143324 - DNA, 25 bp, Homo sapien
tccaaaaaagtatagagatccagct

SEQ ID NO: 1143325 - DNA, 25 bp, Homo sapien
taggtccagttaagaaccctgtctg

SEQ ID NO: 1143326 - DNA, 25 bp, Homo sapien
tccctttaaaaggatgtgacccaca

SEQ ID NO: 1143327 - DNA, 25 bp, Homo sapien
tatcaaaaaccctaagcagcacatc

SEQ ID NO: 1143328 - DNA, 25 bp, Homo sapien
gccaaaaaggactctgaggtcagcc

SEQ ID NO: 1143329 - DNA, 25 bp, Homo sapien
tcttctactgttccctcacaaacaa

SEQ ID NO: 1143330 - DNA, 25 bp, Homo sapien
gaccctgatagaacttgtttggcca

SEQ ID NO: 1143331 - DNA, 25 bp, Homo sapien
tcttggagctgtaagatcttttctt

SEQ ID NO: 1143332 - DNA, 25 bp, Homo sapien
ctattctgagcccttatccacagga

SEQ ID NO: 1143333 - DNA, 25 bp, Homo sapien
atggtgctattctgagcccttatcc

SEQ ID NO: 1143334 - DNA, 25 bp, Homo sapien
gcaatggtgctattctgagccctta

SEQ ID NO: 1143335 - DNA, 25 bp, Homo sapien
cagcaatggtgctattctgagccct

SEQ ID NO: 1143336 - DNA, 25 bp, Homo sapien
ggcttgacggtgaaattgaaatgca

SEQ ID NO: 1143337 - DNA, 25 bp, Homo sapien
caattctgccagagttgttttccaa

SEQ ID NO: 1143338 - DNA, 25 bp, Homo sapien
ctggcccgctttttgaactttactg

SEQ ID NO: 1143339 - DNA, 25 bp, Homo sapien
gcaaagaacagagttcaaggctcat

SEQ ID NO: 1143340 - DNA, 25 bp, Homo sapien
gatgaagagataggatggagcctgt

SEQ ID NO: 1143341 - DNA, 25 bp, Homo sapien
gagaaggtagtaactggttctccca

SEQ ID NO: 1143342 - DNA, 25 bp, Homo sapien
gatggagcctgtgttagagaaggta

SEQ ID NO: 1143343 - DNA, 25 bp, Homo sapien
gtagtaactggttctcccatcatca

SEQ ID NO: 1143344 - DNA, 25 bp, Homo sapien
gaaatactaaacgatacaatgaacc

SEQ ID NO: 1143345 - DNA, 25 bp, Homo sapien
tacaaagcatctccttgatcttcag

SEQ ID NO: 1143346 - DNA, 25 bp, Homo sapien
gaactgcctgcactgagagaactgc

SEQ ID NO: 1143347 - DNA, 25 bp, Homo sapien
ctcagcatctgttcatgtacaaagc

SEQ ID NO: 1143348 - DNA, 25 bp, Homo sapien
gctaagatgaacctagaactagagt

SEQ ID NO: 1143349 - DNA, 25 bp, Homo sapien
tctgcttaaataggctccgaatgcc

SEQ ID NO: 1143350 - DNA, 25 bp, Homo sapien
tcatagtccagtgtaggtgagctgg

SEQ ID NO: 1143351 - DNA, 25 bp, Homo sapien
tcttgtttcccaactcaagggacag

SEQ ID NO: 1143352 - DNA, 25 bp, Homo sapien
ggactctgtctagctgcggcatgca

SEQ ID NO: 1143353 - DNA, 25 bp, Homo sapien
aataacactagcacttgtgtggccc

SEQ ID NO: 1143354 - DNA, 25 bp, Homo sapien
tcattgagcaacagacaatcagagc

SEQ ID NO: 1143355 - DNA, 25 bp, Homo sapien
tgccttataaatccggtgctcagga

SEQ ID NO: 1143356 - DNA, 25 bp, Homo sapien
gagtcagtgatcaacagagcccaag

SEQ ID NO: 1143357 - DNA, 25 bp, Homo sapien
cattgaagcgtcaacaagatgcagc

SEQ ID NO: 1143358 - DNA, 25 bp, Homo sapien
tgtgtagctgcatatctgtcgcccc

SEQ ID NO: 1143359 - DNA, 25 bp, Homo sapien
gctgtccccagtgtaacaaagtgct

SEQ ID NO: 1143360 - DNA, 25 bp, Homo sapien
aactaccatactgtcccgatgtagg

SEQ ID NO: 1143361 - DNA, 25 bp, Homo sapien
gtcccgatgtaggacagttcctggc

SEQ ID NO: 1143362 - DNA, 25 bp, Homo sapien
tactgtcccgatgtaggacagttcc

SEQ ID NO: 1143363 - DNA, 25 bp, Homo sapien
ctgtttgttgtctgtcctctcatat

SEQ ID NO: 1143364 - DNA, 25 bp, Homo sapien
ctggcgagatgggagcagatttgtc

SEQ ID NO: 1143365 - DNA, 25 bp, Homo sapien
tgacaccaaactggcgagatgggag

SEQ ID NO: 1143366 - DNA, 25 bp, Homo sapien
caccaaactggcgagatgggagcag

SEQ ID NO: 1143367 - DNA, 25 bp, Homo sapien
aatgacaccaaactggcgagatggg

SEQ ID NO: 1143368 - DNA, 25 bp, Homo sapien
cttctctgatgcacaaacggactgg

SEQ ID NO: 1143369 - DNA, 25 bp, Homo sapien
tgttgggaggttcagcttcataaga

SEQ ID NO: 1143370 - DNA, 25 bp, Homo sapien
tgactgctcaattacgcttaggcct

SEQ ID NO: 1143371 - DNA, 25 bp, Homo sapien
gtgacagtgcaagcctcttcctagc

SEQ ID NO: 1143372 - DNA, 25 bp, Homo sapien
tgctcatggtagactggaaccactt

SEQ ID NO: 1143373 - DNA, 25 bp, Homo sapien
aagattggctcccttgatgatggca

SEQ ID NO: 1143374 - DNA, 25 bp, Homo sapien
tgctgtgcacttggactcacttgaa

SEQ ID NO: 1143375 - DNA, 25 bp, Homo sapien
caggcagcccttggaagtttgctct

SEQ ID NO: 1143376 - DNA, 25 bp, Homo sapien
gagatcaatgccgaaccgaactgtg

SEQ ID NO: 1143377 - DNA, 25 bp, Homo sapien
gatgtgtcatatcaccccgactgca

SEQ ID NO: 1143378 - DNA, 25 bp, Homo sapien
tgtgaaagcatgaacaatcccggcc

SEQ ID NO: 1143379 - DNA, 25 bp, Homo sapien
tgttcaaaccgatgtgccaaaggag

SEQ ID NO: 1143380 - DNA, 25 bp, Homo sapien
tcctgcgtggacagctaagacctca

SEQ ID NO: 1143381 - DNA, 25 bp, Homo sapien
cattatgtcatcacaagctctgagg

SEQ ID NO: 1143382 - DNA, 25 bp, Homo sapien
tcaactgtgtcagggctaagaaacc

SEQ ID NO: 1143383 - DNA, 25 bp, Homo sapien
caatagcatctagagcagtgggact

SEQ ID NO: 1143384 - DNA, 25 bp, Homo sapien
gaagcccctggaaagtctatcccaa

SEQ ID NO: 1143385 - DNA, 25 bp, Homo sapien
tatttcaccaccagatatgacctag

SEQ ID NO: 1143386 - DNA, 25 bp, Homo sapien
taaaatgcacgtggagacaagtgca

SEQ ID NO: 1143387 - DNA, 25 bp, Homo sapien
cagaaggctccaatatgaacaagat

SEQ ID NO: 1143388 - DNA, 25 bp, Homo sapien
catttcgaccttgtaagccatgtac

SEQ ID NO: 1143389 - DNA, 25 bp, Homo sapien
tcgaccttgtaagccatgtactgtg

SEQ ID NO: 1143390 - DNA, 25 bp, Homo sapien
cttgtaagccatgtactgtggtgcc

SEQ ID NO: 1143391 - DNA, 25 bp, Homo sapien
gctttgcatttcgaccttgtaagcc

SEQ ID NO: 1143392 - DNA, 25 bp, Homo sapien
agcacagatggttagtttctgaacg

SEQ ID NO: 1143393 - DNA, 25 bp, Homo sapien
cataggccactgctctgaagcatct

SEQ ID NO: 1143394 - DNA, 25 bp, Homo sapien
taggaaacagataccgctgtagcac

SEQ ID NO: 1143395 - DNA, 25 bp, Homo sapien
tttctgaacgtatctagccaatgtc

SEQ ID NO: 1143396 - DNA, 25 bp, Homo sapien
tacaaagtgaagaagatgtgaccat

SEQ ID NO: 1143397 - DNA, 25 bp, Homo sapien
tgaggtgtgagtgggtacaaagtga

SEQ ID NO: 1143398 - DNA, 25 bp, Homo sapien
ggagtgcagtagatgaggtgtgagt

SEQ ID NO: 1143399 - DNA, 25 bp, Homo sapien
tagatgaggtgtgagtgggtacaaa

SEQ ID NO: 1143400 - DNA, 25 bp, Homo sapien
catatgttttaacaaaggcccaatt

SEQ ID NO: 1143401 - DNA, 25 bp, Homo sapien
gcatatgttttaacaaaggcccaat

SEQ ID NO: 1143402 - DNA, 25 bp, Homo sapien
ctttattgtgaatgtgaggcttttc

SEQ ID NO: 1143403 - DNA, 25 bp, Homo sapien
attgtgaatgtgaggcttttcagga

SEQ ID NO: 1143404 - DNA, 25 bp, Homo sapien
ccttgactttaccagtataaagaga

SEQ ID NO: 1143405 - DNA, 25 bp, Homo sapien
actttaccagtataaagagatacag

SEQ ID NO: 1143406 - DNA, 25 bp, Homo sapien
gaaacatactctacaccttgaattc

SEQ ID NO: 1143407 - DNA, 25 bp, Homo sapien
catactctacaccttgaattcttca

SEQ ID NO: 1143408 - DNA, 25 bp, Homo sapien
ggaagaatccactaaactgtgctgt

SEQ ID NO: 1143409 - DNA, 25 bp, Homo sapien
gggacccaggtcatgatttaattct

SEQ ID NO: 1143410 - DNA, 25 bp, Homo sapien
gaatccactaaactgtgctgtgatt

SEQ ID NO: 1143411 - DNA, 25 bp, Homo sapien
ctagttttacagtgttgggacccag

SEQ ID NO: 1143412 - DNA, 25 bp, Homo sapien
taggctttccgagaagcagccagcc

SEQ ID NO: 1143413 - DNA, 25 bp, Homo sapien
aataaacagtgcactgatcccaggg

SEQ ID NO: 1143414 - DNA, 25 bp, Homo sapien
tatgggctttcgtagagagaagctc

SEQ ID NO: 1143415 - DNA, 25 bp, Homo sapien
ggcaatagacgtacttgtttccagc

SEQ ID NO: 1143416 - DNA, 25 bp, Homo sapien
ttggactgaggggagtacgtgccaa

SEQ ID NO: 1143417 - DNA, 25 bp, Homo sapien
cctgagatgtcaaggctgtgagcac

SEQ ID NO: 1143418 - DNA, 25 bp, Homo sapien
ctgagatgtcaaggctgtgagcacc

SEQ ID NO: 1143419 - DNA, 25 bp, Homo sapien
ggagtacgtgccaagctgggcattc

SEQ ID NO: 1143420 - DNA, 25 bp, Homo sapien
gagcctggccagacaagagcctaac

SEQ ID NO: 1143421 - DNA, 25 bp, Homo sapien
agagcctaactggatttgacttaac

SEQ ID NO: 1143422 - DNA, 25 bp, Homo sapien
taattttatctgatccagcattggg

SEQ ID NO: 1143423 - DNA, 25 bp, Homo sapien
ttttatctgatccagcattgggcca

SEQ ID NO: 1143424 - DNA, 25 bp, Homo sapien
tctctctatccttatgggtgaaggg

SEQ ID NO: 1143425 - DNA, 25 bp, Homo sapien
gatcctcttctggaggtagtatata

SEQ ID NO: 1143426 - DNA, 25 bp, Homo sapien
aggtcttttggggatgctgagcact

SEQ ID NO: 1143427 - DNA, 25 bp, Homo sapien
gggaacagcagtgaggtcttttggg

SEQ ID NO: 1143428 - DNA, 25 bp, Homo sapien
cagcaatagcttctgagtattggga

SEQ ID NO: 1143429 - DNA, 25 bp, Homo sapien
cctgcccatacgcaaacactaggag

SEQ ID NO: 1143430 - DNA, 25 bp, Homo sapien
gcccatacgcaaacactaggaggat

SEQ ID NO: 1143431 - DNA, 25 bp, Homo sapien
aatggttgctccacctgcccatacg

SEQ ID NO: 1143432 - DNA, 25 bp, Homo sapien
ctccatctttactcaatggttgctc

SEQ ID NO: 1143433 - DNA, 25 bp, Homo sapien
tgtggggtttcaagcgtaattcagc

SEQ ID NO: 1143434 - DNA, 25 bp, Homo sapien
cagcaaatggtatgtctaattgtaa

SEQ ID NO: 1143435 - DNA, 25 bp, Homo sapien
atttcttccatattcccaggacaga

SEQ ID NO: 1143436 - DNA, 25 bp, Homo sapien
tcaagcgtaattcagcaaatggtat

SEQ ID NO: 1143437 - DNA, 25 bp, Homo sapien
aggaatgaaagccagtagggaagtc

SEQ ID NO: 1143438 - DNA, 25 bp, Homo sapien
ggaagtcataatgggccttgatgtg

SEQ ID NO: 1143439 - DNA, 25 bp, Homo sapien
ccagtagggaagtcataatgggcct

SEQ ID NO: 1143440 - DNA, 25 bp, Homo sapien
tgaaagccagtagggaagtcataat

SEQ ID NO: 1143441 - DNA, 25 bp, Homo sapien
ctgttgttgatgagtgaccaggaga

SEQ ID NO: 1143442 - DNA, 25 bp, Homo sapien
aactgttgttgatgagtgaccagga

SEQ ID NO: 1143443 - DNA, 25 bp, Homo sapien
tgttgttgatgagtgaccaggagaa

SEQ ID NO: 1143444 - DNA, 25 bp, Homo sapien
gttgttgatgagtgaccaggagaag

SEQ ID NO: 1143445 - DNA, 25 bp, Homo sapien
gtcacagctctccattaatatgaat

SEQ ID NO: 1143446 - DNA, 25 bp, Homo sapien
ttacccagagtcacagctctccatt

SEQ ID NO: 1143447 - DNA, 25 bp, Homo sapien
cccagagtcacagctctccattaat

SEQ ID NO: 1143448 - DNA, 25 bp, Homo sapien
gagtcacagctctccattaatatga

SEQ ID NO: 1143449 - DNA, 25 bp, Homo sapien
agttgttccctaggagccctccttg

SEQ ID NO: 1143450 - DNA, 25 bp, Homo sapien
gccattgaatatgcccattgtccag

SEQ ID NO: 1143451 - DNA, 25 bp, Homo sapien
ttcccaagccagcaattagaggagg

SEQ ID NO: 1143452 - DNA, 25 bp, Homo sapien
tctccattgctgagttatctccagt

SEQ ID NO: 1143453 - DNA, 25 bp, Homo sapien
taatgctgaattatactggctctgc

SEQ ID NO: 1143454 - DNA, 25 bp, Homo sapien
tgtgctcaatttatacttccctgga

SEQ ID NO: 1143455 - DNA, 25 bp, Homo sapien
caatccatttcagagcttctgtgct

SEQ ID NO: 1143456 - DNA, 25 bp, Homo sapien
ctctgatgttgtggttacaatccat

SEQ ID NO: 1143457 - DNA, 25 bp, Homo sapien
gccatgtagaaacgtggtaggacca

SEQ ID NO: 1143458 - DNA, 25 bp, Homo sapien
cttcttcccagacgcagggcagtac

SEQ ID NO: 1143459 - DNA, 25 bp, Homo sapien
accaagcaagccctgtctgttagga

SEQ ID NO: 1143460 - DNA, 25 bp, Homo sapien
tgatctaacggtaagagactgaggg

SEQ ID NO: 1143461 - DNA, 25 bp, Homo sapien
ccctcacctccatggtttccaccat

SEQ ID NO: 1143462 - DNA, 25 bp, Homo sapien
tttgcccctcacctccatggtttcc

SEQ ID NO: 1143463 - DNA, 25 bp, Homo sapien
gcccctcacctccatggtttccacc

SEQ ID NO: 1143464 - DNA, 25 bp, Homo sapien
ttgcccctcacctccatggtttcca

SEQ ID NO: 1143465 - DNA, 25 bp, Homo sapien
tggaggagccttaagtcccactcct

SEQ ID NO: 1143466 - DNA, 25 bp, Homo sapien
cctttttggaaaactctaatcagag

SEQ ID NO: 1143467 - DNA, 25 bp, Homo sapien
ctggaggagccttaagtcccactcc

SEQ ID NO: 1143468 - DNA, 25 bp, Homo sapien
aactctaatcagagaaatgaacatc

SEQ ID NO: 1143469 - DNA, 25 bp, Homo sapien
agtgactccactgccgtgatagatc

SEQ ID NO: 1143470 - DNA, 25 bp, Homo sapien
aggtaaccagctttacaacatctgg

SEQ ID NO: 1143471 - DNA, 25 bp, Homo sapien
gcaaagggatagaggtaatgagtca

SEQ ID NO: 1143472 - DNA, 25 bp, Homo sapien
tactgctccattgaaggtaaccagc

SEQ ID NO: 1143473 - DNA, 25 bp, Homo sapien
cactaggaataggagcatcaagatg

SEQ ID NO: 1143474 - DNA, 25 bp, Homo sapien
ggccatgtgatttggcctgtggcat

SEQ ID NO: 1143475 - DNA, 25 bp, Homo sapien
gaataggagcatcaagatgccagct

SEQ ID NO: 1143476 - DNA, 25 bp, Homo sapien
ctggccatgtgatttggcctgtggc

SEQ ID NO: 1143477 - DNA, 25 bp, Homo sapien
aaatgtagtgtcaccggagttaatg

SEQ ID NO: 1143478 - DNA, 25 bp, Homo sapien
aatgtagtgtcaccggagttaatgg

SEQ ID NO: 1143479 - DNA, 25 bp, Homo sapien
tccagcagcccgaaagcgtactgct

SEQ ID NO: 1143480 - DNA, 25 bp, Homo sapien
agaagagaaggtcgccgatctgcgc

SEQ ID NO: 1143481 - DNA, 25 bp, Homo sapien
gatctgcgctgccacgagaacttca

SEQ ID NO: 1143482 - DNA, 25 bp, Homo sapien
ccgtctgagcgcgaaagaagagaag

SEQ ID NO: 1143483 - DNA, 25 bp, Homo sapien
tgttgctaccgcacgggtctgtcag

SEQ ID NO: 1143484 - DNA, 25 bp, Homo sapien
gcgcgaagggcaatagcgtccgaaa

SEQ ID NO: 1143485 - DNA, 25 bp, Homo sapien
tagcgtccgaaacacctgagtccgg

SEQ ID NO: 1143486 - DNA, 25 bp, Homo sapien
ggtctgtcagggagcggaacttcct

SEQ ID NO: 1143487 - DNA, 25 bp, Homo sapien
gccccgaaagggagactggcgacat

SEQ ID NO: 1143488 - DNA, 25 bp, Homo sapien
catccgaggagttgtagaaggttca

SEQ ID NO: 1143489 - DNA, 25 bp, Homo sapien
gaatctcttaaccttagcggtggaa

SEQ ID NO: 1143490 - DNA, 25 bp, Homo sapien
gagatgctcaaacgtagtcttccgc

SEQ ID NO: 1143491 - DNA, 25 bp, Homo sapien
atcggattattacaagcctcctctt

SEQ ID NO: 1143492 - DNA, 25 bp, Homo sapien
gggtagatcaggcaagccacactgc

SEQ ID NO: 1143493 - DNA, 25 bp, Homo sapien
cctcttcattcctaggggtagatca

SEQ ID NO: 1143494 - DNA, 25 bp, Homo sapien
gcaaggtgggttcttccattcctgc

SEQ ID NO: 1143495 - DNA, 25 bp, Homo sapien
caaacgatcacaagtttaggtcctg

SEQ ID NO: 1143496 - DNA, 25 bp, Homo sapien
ttttaagagggcacgtcattcacgc

SEQ ID NO: 1143497 - DNA, 25 bp, Homo sapien
tcccactcagaaacgtgtgtgacct

SEQ ID NO: 1143498 - DNA, 25 bp, Homo sapien
catcttatgtcaaatgtagaataca

SEQ ID NO: 1143499 - DNA, 25 bp, Homo sapien
ctacgtccagagaggggcagcaggg

SEQ ID NO: 1143500 - DNA, 25 bp, Homo sapien
agaggggcagcagggctggggtagt

SEQ ID NO: 1143501 - DNA, 25 bp, Homo sapien
ggggcagcagggctggggtagtcat

SEQ ID NO: 1143502 - DNA, 25 bp, Homo sapien
agagaggggcagcagggctggggta

SEQ ID NO: 1143503 - DNA, 25 bp, Homo sapien
tgatgaaggcactaagaataaggag

SEQ ID NO: 1143504 - DNA, 25 bp, Homo sapien
accggcatctacatgtggaattaac

SEQ ID NO: 1143505 - DNA, 25 bp, Homo sapien
gtgtctatgttcatcgggtccatgg

SEQ ID NO: 1143506 - DNA, 25 bp, Homo sapien
gtccatggatcaggaagactccggg

SEQ ID NO: 1143507 - DNA, 25 bp, Homo sapien
tgccaaatgttagtaccagaacttc

SEQ ID NO: 1143508 - DNA, 25 bp, Homo sapien
gctctgccaaatgttagtaccagaa

SEQ ID NO: 1143509 - DNA, 25 bp, Homo sapien
caaatgttagtaccagaacttctga

SEQ ID NO: 1143510 - DNA, 25 bp, Homo sapien
ttgctctgccaaatgttagtaccag

SEQ ID NO: 1143511 - DNA, 25 bp, Homo sapien
tatgaactacttaatagaagggaac

SEQ ID NO: 1143512 - DNA, 25 bp, Homo sapien
tgtatattagcgtataacaacatgt

SEQ ID NO: 1143513 - DNA, 25 bp, Homo sapien
taaccataatcaacaccaaactaca

SEQ ID NO: 1143514 - DNA, 25 bp, Homo sapien
tctggttttgggtactgcaaaatca

SEQ ID NO: 1143515 - DNA, 25 bp, Homo sapien
cctgcttcaatgatcctcccgatta

SEQ ID NO: 1143516 - DNA, 25 bp, Homo sapien
ctaatagatgtgaagggttatctta

SEQ ID NO: 1143517 - DNA, 25 bp, Homo sapien
tctcccatgctaccgggcacctttt

SEQ ID NO: 1143518 - DNA, 25 bp, Homo sapien
tgctaccgggcaccttttcacagtt

SEQ ID NO: 1143519 - DNA, 25 bp, Homo sapien
cagtcagacctcctattaactgggt

SEQ ID NO: 1143520 - DNA, 25 bp, Homo sapien
cagactggtcctaagagaaactcca

SEQ ID NO: 1143521 - DNA, 25 bp, Homo sapien
ctcctattaactgggttccaagagg

SEQ ID NO: 1143522 - DNA, 25 bp, Homo sapien
gactggtcctaagagaaactccaga

SEQ ID NO: 1143523 - DNA, 25 bp, Homo sapien
cacaaaaggtcattcagcagggagg

SEQ ID NO: 1143524 - DNA, 25 bp, Homo sapien
gctagacggtcagtaacacaaaagg

SEQ ID NO: 1143525 - DNA, 25 bp, Homo sapien
cgggccctacagacagactggattg

SEQ ID NO: 1143526 - DNA, 25 bp, Homo sapien
gacagagccagttgagaaaaggaca

SEQ ID NO: 1143527 - DNA, 25 bp, Homo sapien
aatcagtcaaccaacgatgactact

SEQ ID NO: 1143528 - DNA, 25 bp, Homo sapien
tccaaatcagtcaaccaacgatgac

SEQ ID NO: 1143529 - DNA, 25 bp, Homo sapien
ttccaaatcagtcaaccaacgatga

SEQ ID NO: 1143530 - DNA, 25 bp, Homo sapien
caaatcagtcaaccaacgatgacta

SEQ ID NO: 1143531 - DNA, 25 bp, Homo sapien
tctgctcgaatttcctctcttgact

SEQ ID NO: 1143532 - DNA, 25 bp, Homo sapien
aaggccttctcatgatcagctcgaa

SEQ ID NO: 1143533 - DNA, 25 bp, Homo sapien
cagctcgaattttatttctcagacg

SEQ ID NO: 1143534 - DNA, 25 bp, Homo sapien
caccacgtattcctacaaggttggg

SEQ ID NO: 1143535 - DNA, 25 bp, Homo sapien
aacttgaagcccttgtttagagcca

SEQ ID NO: 1143536 - DNA, 25 bp, Homo sapien
gagtgtcttacaacccaaggagttc

SEQ ID NO: 1143537 - DNA, 25 bp, Homo sapien
gagagacagatgcttaacactcaca

SEQ ID NO: 1143538 - DNA, 25 bp, Homo sapien
cacgacaaagtggagtttaacccag

SEQ ID NO: 1143539 - DNA, 25 bp, Homo sapien
tcctatagttatcccaagcatgttt

SEQ ID NO: 1143540 - DNA, 25 bp, Homo sapien
tctgagttcattatgtccccaccca

SEQ ID NO: 1143541 - DNA, 25 bp, Homo sapien
tatgtcctatagttatcccaagcat

SEQ ID NO: 1143542 - DNA, 25 bp, Homo sapien
ccatatgtcctatagttatcccaag

SEQ ID NO: 1143543 - DNA, 25 bp, Homo sapien
gagccaggccctaactaagcaaaac

SEQ ID NO: 1143544 - DNA, 25 bp, Homo sapien
tcatgatcatggtgccccatagcct

SEQ ID NO: 1143545 - DNA, 25 bp, Homo sapien
caatgggcacaagacctaatcagag

SEQ ID NO: 1143546 - DNA, 25 bp, Homo sapien
catcctcctaagcacagcatttggt

SEQ ID NO: 1143547 - DNA, 25 bp, Homo sapien
tatggtagcacccatttgtgaactt

SEQ ID NO: 1143548 - DNA, 25 bp, Homo sapien
acactgaaatcaaggttgtcttcaa

SEQ ID NO: 1143549 - DNA, 25 bp, Homo sapien
gcccatctaggaattcatcatgaag

SEQ ID NO: 1143550 - DNA, 25 bp, Homo sapien
taaagggtatccaaagcatctacta

SEQ ID NO: 1143551 - DNA, 25 bp, Homo sapien
aataaatcgaatgttgacttcaaac

SEQ ID NO: 1143552 - DNA, 25 bp, Homo sapien
tcctctcctgataggtaatatgctg

SEQ ID NO: 1143553 - DNA, 25 bp, Homo sapien
tctcctgataggtaatatgctgcaa

SEQ ID NO: 1143554 - DNA, 25 bp, Homo sapien
ctgcaagtaggcctccaataaatcg

SEQ ID NO: 1143555 - DNA, 25 bp, Homo sapien
acttgggccatggaattaattgcaa

SEQ ID NO: 1143556 - DNA, 25 bp, Homo sapien
cttgggccatggaattaattgcaat

SEQ ID NO: 1143557 - DNA, 25 bp, Homo sapien
gaagccagcattcttaactgtagag

SEQ ID NO: 1143558 - DNA, 25 bp, Homo sapien
gagactcacaatacaaagtactcac

SEQ ID NO: 1143559 - DNA, 25 bp, Homo sapien
tgactcagtaaatcccattcctatg

SEQ ID NO: 1143560 - DNA, 25 bp, Homo sapien
tataggcaaatgcttatagcaggtt

SEQ ID NO: 1143561 - DNA, 25 bp, Homo sapien
aatacagaactaccaaaaacatgaa

SEQ ID NO: 1143562 - DNA, 25 bp, Homo sapien
actgaaacaatactgtgaagatgtc

SEQ ID NO: 1143563 - DNA, 25 bp, Homo sapien
aaaatacagaactaccaaaaacatg

SEQ ID NO: 1143564 - DNA, 25 bp, Homo sapien
catggactgaaacaatactgtgaag

SEQ ID NO: 1143565 - DNA, 25 bp, Homo sapien
ggaatactgtcctataagtttctga

SEQ ID NO: 1143566 - DNA, 25 bp, Homo sapien
tacttagcttcttgaaattcaggtc

SEQ ID NO: 1143567 - DNA, 25 bp, Homo sapien
catgatatgcctacatttggttggt

SEQ ID NO: 1143568 - DNA, 25 bp, Homo sapien
tcatcagtcaaattaaagtacctcc

SEQ ID NO: 1143569 - DNA, 25 bp, Homo sapien
tggtggttaagctatacgtgtctgc

SEQ ID NO: 1143570 - DNA, 25 bp, Homo sapien
tttattggtggttaagctatacgtg

SEQ ID NO: 1143571 - DNA, 25 bp, Homo sapien
ggttaagctatacgtgtctgcaata

SEQ ID NO: 1143572 - DNA, 25 bp, Homo sapien
taagctatacgtgtctgcaatattt

SEQ ID NO: 1143573 - DNA, 25 bp, Homo sapien
aggagtttctcagccaattgcactg

SEQ ID NO: 1143574 - DNA, 25 bp, Homo sapien
cccagtaggtgtgttaaaggcagga

SEQ ID NO: 1143575 - DNA, 25 bp, Homo sapien
caggaaggagtttctcagccaattg

SEQ ID NO: 1143576 - DNA, 25 bp, Homo sapien
cattgcccaaggaatcccagtaggt

SEQ ID NO: 1143577 - DNA, 25 bp, Homo sapien
aatgccatacttcaattcttttaga

SEQ ID NO: 1143578 - DNA, 25 bp, Homo sapien
gagtagagagaggagaattaattat

SEQ ID NO: 1143579 - DNA, 25 bp, Homo sapien
tgatgaaaactccacaactaatgcc

SEQ ID NO: 1143580 - DNA, 25 bp, Homo sapien
taagcttaaaacttatgagtcatat

SEQ ID NO: 1143581 - DNA, 25 bp, Homo sapien
aagtatctggcaacatttaacatcc

SEQ ID NO: 1143582 - DNA, 25 bp, Homo sapien
aaaaggatacattatggccaaggaa

SEQ ID NO: 1143583 - DNA, 25 bp, Homo sapien
gaatatctaaggaattcaaggttga

SEQ ID NO: 1143584 - DNA, 25 bp, Homo sapien
catttaataagaccaggtaactcac

SEQ ID NO: 1143585 - DNA, 25 bp, Homo sapien
tcttgaatacatcaaggccactgaa

SEQ ID NO: 1143586 - DNA, 25 bp, Homo sapien
tcttcttgtctcttgaatacatcaa

SEQ ID NO: 1143587 - DNA, 25 bp, Homo sapien
cactgaaaggttatttattggcatt

SEQ ID NO: 1143588 - DNA, 25 bp, Homo sapien
atacatcaaggccactgaaaggtta

SEQ ID NO: 1143589 - DNA, 25 bp, Homo sapien
gaaatccattgggtcagtcaagtct

SEQ ID NO: 1143590 - DNA, 25 bp, Homo sapien
tccatgagagagagtcgtgtccctg

SEQ ID NO: 1143591 - DNA, 25 bp, Homo sapien
tcctgggtgcctgaactggctggca

SEQ ID NO: 1143592 - DNA, 25 bp, Homo sapien
catagtctgagctttaggttggccc

SEQ ID NO: 1143593 - DNA, 25 bp, Homo sapien
tatctcagagatattatgggcctgg

SEQ ID NO: 1143594 - DNA, 25 bp, Homo sapien
gctgggttccatcaaatgttggaat

SEQ ID NO: 1143595 - DNA, 25 bp, Homo sapien
gaatctgtgaatttacagctgttta

SEQ ID NO: 1143596 - DNA, 25 bp, Homo sapien
gcctggttacagactacctccataa

SEQ ID NO: 1143597 - DNA, 25 bp, Homo sapien
ttataaactgccctgtagtgaatga

SEQ ID NO: 1143598 - DNA, 25 bp, Homo sapien
gaatgtgcaacctccacttattgtg

SEQ ID NO: 1143599 - DNA, 25 bp, Homo sapien
tgtgccaggtccaaagttataaact

SEQ ID NO: 1143600 - DNA, 25 bp, Homo sapien
aagaactggcttgcaccaaacgatg

SEQ ID NO: 1143601 - DNA, 25 bp, Homo sapien
ccagccccagtttcgccctactcca

SEQ ID NO: 1143602 - DNA, 25 bp, Homo sapien
atgaactccatatgtagtgtaccaa

SEQ ID NO: 1143603 - DNA, 25 bp, Homo sapien
tccatatgtagtgtaccaaattcag

SEQ ID NO: 1143604 - DNA, 25 bp, Homo sapien
tatgtagtgtaccaaattcagccag

SEQ ID NO: 1143605 - DNA, 25 bp, Homo sapien
taatacgtgtctttctaagcttggc

SEQ ID NO: 1143606 - DNA, 25 bp, Homo sapien
tcttattcattctatgtaactgtac

SEQ ID NO: 1143607 - DNA, 25 bp, Homo sapien
tttccatggctgagtaaaaatttga

SEQ ID NO: 1143608 - DNA, 25 bp, Homo sapien
tattctctacctccgtgagatcaat

SEQ ID NO: 1143609 - DNA, 25 bp, Homo sapien
tagggaatactaggagttggctgac

SEQ ID NO: 1143610 - DNA, 25 bp, Homo sapien
aattacatatttgacgccctgggca

SEQ ID NO: 1143611 - DNA, 25 bp, Homo sapien
caggatacggtaggaagcagactta

SEQ ID NO: 1143612 - DNA, 25 bp, Homo sapien
gcagtatgtttgcacaattgccatg

SEQ ID NO: 1143613 - DNA, 25 bp, Homo sapien
cattagcctgtgatcctgttctcat

SEQ ID NO: 1143614 - DNA, 25 bp, Homo sapien
tctgaagtagtttccgaatgtgcat

SEQ ID NO: 1143615 - DNA, 25 bp, Homo sapien
tttctgaagtagtttccgaatgtgc

SEQ ID NO: 1143616 - DNA, 25 bp, Homo sapien
ttctgaagtagtttccgaatgtgca

SEQ ID NO: 1143617 - DNA, 25 bp, Homo sapien
tgaccccagcgccctgttctggggt

SEQ ID NO: 1143618 - DNA, 25 bp, Homo sapien
taatttggataaagaccatttggac

SEQ ID NO: 1143619 - DNA, 25 bp, Homo sapien
gcgccctgttctggggttcaaataa

SEQ ID NO: 1143620 - DNA, 25 bp, Homo sapien
gataaagaccatttggacgatccat

SEQ ID NO: 1143621 - DNA, 25 bp, Homo sapien
aaatatcattcccactcagtctagg

SEQ ID NO: 1143622 - DNA, 25 bp, Homo sapien
tactaagtagacatccaatccagtc

SEQ ID NO: 1143623 - DNA, 25 bp, Homo sapien
tattttcttactggcagaatcagca

SEQ ID NO: 1143624 - DNA, 25 bp, Homo sapien
gaatcatgttttattagcggcaaag

SEQ ID NO: 1143625 - DNA, 25 bp, Homo sapien
aattgctggaaatgagttgctggct

SEQ ID NO: 1143626 - DNA, 25 bp, Homo sapien
caaatatatacactctggagagtgg

SEQ ID NO: 1143627 - DNA, 25 bp, Homo sapien
gttagatagaactgctttagattgc

SEQ ID NO: 1143628 - DNA, 25 bp, Homo sapien
gttgctggctcaaaaagcatacaaa

SEQ ID NO: 1143629 - DNA, 25 bp, Homo sapien
cagtgtcaaatcaaaggtcacgaag

SEQ ID NO: 1143630 - DNA, 25 bp, Homo sapien
ccttatactggcatggaaaatggga

SEQ ID NO: 1143631 - DNA, 25 bp, Homo sapien
tttaaggctggcaattctcaaactg

SEQ ID NO: 1143632 - DNA, 25 bp, Homo sapien
cacaacgttgaagagaaagagttct

SEQ ID NO: 1143633 - DNA, 25 bp, Homo sapien
gcaaatacaaactctagcaataact

SEQ ID NO: 1143634 - DNA, 25 bp, Homo sapien
actgcaaatacaaactctagcaata

SEQ ID NO: 1143635 - DNA, 25 bp, Homo sapien
caaactctagcaataactctccatt

SEQ ID NO: 1143636 - DNA, 25 bp, Homo sapien
aatacaaactctagcaataactctc

SEQ ID NO: 1143637 - DNA, 25 bp, Homo sapien
tcagacaacagaggatagtaatcgc

SEQ ID NO: 1143638 - DNA, 25 bp, Homo sapien
tattaagcagagtactgagcagcac

SEQ ID NO: 1143639 - DNA, 25 bp, Homo sapien
tgagcagcacttgcacgtgaagaaa

SEQ ID NO: 1143640 - DNA, 25 bp, Homo sapien
ggatgttcataccagccagacaaga

SEQ ID NO: 1143641 - DNA, 25 bp, Homo sapien
caagttcatgataaggctaggcaat

SEQ ID NO: 1143642 - DNA, 25 bp, Homo sapien
caatggataaatactgggcagaaca

SEQ ID NO: 1143643 - DNA, 25 bp, Homo sapien
caagagttgagagaagataggatcc

SEQ ID NO: 1143644 - DNA, 25 bp, Homo sapien
gaagaggtacagaatatttgccaga

SEQ ID NO: 1143645 - DNA, 25 bp, Homo sapien
ccatataacaacaggccacaggctg

SEQ ID NO: 1143646 - DNA, 25 bp, Homo sapien
cctttgaaactggactggccttgca

SEQ ID NO: 1143647 - DNA, 25 bp, Homo sapien
ggatgtcaccaatatatagggcaaa

SEQ ID NO: 1143648 - DNA, 25 bp, Homo sapien
tataccattctaagctagtgggcca

SEQ ID NO: 1143649 - DNA, 25 bp, Homo sapien
taaaaactgtctcccaggccaccga

SEQ ID NO: 1143650 - DNA, 25 bp, Homo sapien
caaccatgctttcagtaagtattca

SEQ ID NO: 1143651 - DNA, 25 bp, Homo sapien
tacatctttcttgcctcatggtctg

SEQ ID NO: 1143652 - DNA, 25 bp, Homo sapien
tcaatagcatcatcatacatctttc

SEQ ID NO: 1143653 - DNA, 25 bp, Homo sapien
tccaataaaggtaagacctccacga

SEQ ID NO: 1143654 - DNA, 25 bp, Homo sapien
gctctaaataatgaccagctttatc

SEQ ID NO: 1143655 - DNA, 25 bp, Homo sapien
gacctccacgagacttcttaataag

SEQ ID NO: 1143656 - DNA, 25 bp, Homo sapien
acaagtacgtgcaatttctgcccct

SEQ ID NO: 1143657 - DNA, 25 bp, Homo sapien
atgtttgtttgcaaggacttctttc

SEQ ID NO: 1143658 - DNA, 25 bp, Homo sapien
tgtttgtttgcaaggacttctttct

SEQ ID NO: 1143659 - DNA, 25 bp, Homo sapien
tatgtttgtttgcaaggacttcttt

SEQ ID NO: 1143660 - DNA, 25 bp, Homo sapien
ttttcagcctgccggacagccacag

SEQ ID NO: 1143661 - DNA, 25 bp, Homo sapien
tcgtgagtgaatcgccataggtacc

SEQ ID NO: 1143662 - DNA, 25 bp, Homo sapien
cgccataggtaccaataggtttcaa

SEQ ID NO: 1143663 - DNA, 25 bp, Homo sapien
actgcctgtatcttggatcgtgagt

SEQ ID NO: 1143664 - DNA, 25 bp, Homo sapien
catggcttgttgttcctagtcttgc

SEQ ID NO: 1143665 - DNA, 25 bp, Homo sapien
gcttgttgttcctagtcttgctact

SEQ ID NO: 1143666 - DNA, 25 bp, Homo sapien
gttgttcctagtcttgctacttttc

SEQ ID NO: 1143667 - DNA, 25 bp, Homo sapien
atcgctgtctgccatggcttgttgt

SEQ ID NO: 1143668 - DNA, 25 bp, Homo sapien
aaagctctgctgtacatcatcatgt

SEQ ID NO: 1143669 - DNA, 25 bp, Homo sapien
taatgtttcagcaagaaaaaagctc

SEQ ID NO: 1143670 - DNA, 25 bp, Homo sapien
ccattaactcggcaatacttttcaa

SEQ ID NO: 1143671 - DNA, 25 bp, Homo sapien
aacccaccattaactcggcaatact

SEQ ID NO: 1143672 - DNA, 25 bp, Homo sapien
cagtagtaccatttagctcttctta

SEQ ID NO: 1143673 - DNA, 25 bp, Homo sapien
tgttaactaaaagctattcatggct

SEQ ID NO: 1143674 - DNA, 25 bp, Homo sapien
ggagggacaaaagccattatcaaag

SEQ ID NO: 1143675 - DNA, 25 bp, Homo sapien
caatcaagactccaaccaagtgtct

SEQ ID NO: 1143676 - DNA, 25 bp, Homo sapien
taagagacttttgaccaactgctat

SEQ ID NO: 1143677 - DNA, 25 bp, Homo sapien
tcgcaattctttcagcttaagagac

SEQ ID NO: 1143678 - DNA, 25 bp, Homo sapien
ctttcagcttaagagacttttgacc

SEQ ID NO: 1143679 - DNA, 25 bp, Homo sapien
taatttcctcgcaattctttcagct

SEQ ID NO: 1143680 - DNA, 25 bp, Homo sapien
tccacgtgggagatattcattcagc

SEQ ID NO: 1143681 - DNA, 25 bp, Homo sapien
gctgctactagagaaccgctcctag

SEQ ID NO: 1143682 - DNA, 25 bp, Homo sapien
gatttctgagctgcctaatgcctga

SEQ ID NO: 1143683 - DNA, 25 bp, Homo sapien
gatctaggtgaatgggtgtagacac

SEQ ID NO: 1143684 - DNA, 25 bp, Homo sapien
gtaaataaaacatagcatctgatct

SEQ ID NO: 1143685 - DNA, 25 bp, Homo sapien
tagttttggtacttagcagtgatcc

SEQ ID NO: 1143686 - DNA, 25 bp, Homo sapien
gggttttgtatcatgccatcttcat

SEQ ID NO: 1143687 - DNA, 25 bp, Homo sapien
cttacaagtggatcaagcattcttc

SEQ ID NO: 1143688 - DNA, 25 bp, Homo sapien
catgaacccattgacatggagggcc

SEQ ID NO: 1143689 - DNA, 25 bp, Homo sapien
gatttgacttagcttgtctccagga

SEQ ID NO: 1143690 - DNA, 25 bp, Homo sapien
aaatttgtccatgcctaaaggtaag

SEQ ID NO: 1143691 - DNA, 25 bp, Homo sapien
aaacagttctctcatggtaggaggc

SEQ ID NO: 1143692 - DNA, 25 bp, Homo sapien
tttgaatagagggaacatagttatc

SEQ ID NO: 1143693 - DNA, 25 bp, Homo sapien
tgcctcttggcatgcatggtaatct

SEQ ID NO: 1143694 - DNA, 25 bp, Homo sapien
gttagatcacttagaaacagtctga

SEQ ID NO: 1143695 - DNA, 25 bp, Homo sapien
tgactaagatgctagacattacaga

SEQ ID NO: 1143696 - DNA, 25 bp, Homo sapien
tgtaaggtggtgtcgcaatgtggtt

SEQ ID NO: 1143697 - DNA, 25 bp, Homo sapien
gtgtaaggtggtgtcgcaatgtggt

SEQ ID NO: 1143698 - DNA, 25 bp, Homo sapien
gaagagagcagacacctttgtcttg

SEQ ID NO: 1143699 - DNA, 25 bp, Homo sapien
tatatgcccttatcagggtaagaag

SEQ ID NO: 1143700 - DNA, 25 bp, Homo sapien
gaaataaacctcagacacccaaatg

SEQ ID NO: 1143701 - DNA, 25 bp, Homo sapien
taagatgaacaactagacctactga

SEQ ID NO: 1143702 - DNA, 25 bp, Homo sapien
agggtgagcctctgtattaaacacc

SEQ ID NO: 1143703 - DNA, 25 bp, Homo sapien
gtgagcctctgtattaaacacccag

SEQ ID NO: 1143704 - DNA, 25 bp, Homo sapien
gcctctgtattaaacacccagtggt

SEQ ID NO: 1143705 - DNA, 25 bp, Homo sapien
tctgtattaaacacccagtggtcta

SEQ ID NO: 1143706 - DNA, 25 bp, Homo sapien
catagaggtccaggttttcaaaagc

SEQ ID NO: 1143707 - DNA, 25 bp, Homo sapien
ttaacgatcaaagcacatccaggtc

SEQ ID NO: 1143708 - DNA, 25 bp, Homo sapien
gtgagaatggtccttctggaactgc

SEQ ID NO: 1143709 - DNA, 25 bp, Homo sapien
catgtgaccacctcattaacgatca

SEQ ID NO: 1143710 - DNA, 25 bp, Homo sapien
atttgaatgctgctccactgtagga

SEQ ID NO: 1143711 - DNA, 25 bp, Homo sapien
tgaatgctgctccactgtaggagga

SEQ ID NO: 1143712 - DNA, 25 bp, Homo sapien
gaaaaagtgataagcaatatgtaaa

SEQ ID NO: 1143713 - DNA, 25 bp, Homo sapien
gatttgaatgctgctccactgtagg

SEQ ID NO: 1143714 - DNA, 25 bp, Homo sapien
gactgaactacatgcacaaaatccc

SEQ ID NO: 1143715 - DNA, 25 bp, Homo sapien
tcaaggcaacaaactgcggcatttt

SEQ ID NO: 1143716 - DNA, 25 bp, Homo sapien
aacaaaaccaaggattgctcttagg

SEQ ID NO: 1143717 - DNA, 25 bp, Homo sapien
tgtcatgctaccaacactagactga

SEQ ID NO: 1143718 - DNA, 25 bp, Homo sapien
gctacttttacgaggaaggctaaca

SEQ ID NO: 1143719 - DNA, 25 bp, Homo sapien
gagttcattgccatctgcactgctg

SEQ ID NO: 1143720 - DNA, 25 bp, Homo sapien
cagtgattcataagtgggcttgtgc

SEQ ID NO: 1143721 - DNA, 25 bp, Homo sapien
ggactattgtaactggccctgcatc

SEQ ID NO: 1143722 - DNA, 25 bp, Homo sapien
tgggtaatacaaatagagcacttgg

SEQ ID NO: 1143723 - DNA, 25 bp, Homo sapien
ttctcttaagcttcagtcatctggg

SEQ ID NO: 1143724 - DNA, 25 bp, Homo sapien
tggctctgcttgtatacttccctgc

SEQ ID NO: 1143725 - DNA, 25 bp, Homo sapien
taaggagtggtgaagaagacccttc

SEQ ID NO: 1143726 - DNA, 25 bp, Homo sapien
cattatatgggataagaattgatct

SEQ ID NO: 1143727 - DNA, 25 bp, Homo sapien
gctaagcattatatgggataagaat

SEQ ID NO: 1143728 - DNA, 25 bp, Homo sapien
tggaagctaagcattatatgggata

SEQ ID NO: 1143729 - DNA, 25 bp, Homo sapien
tatgggataagaattgatcttgaag

SEQ ID NO: 1143730 - DNA, 25 bp, Homo sapien
tattaaggtctacaaaatgcaaaga

SEQ ID NO: 1143731 - DNA, 25 bp, Homo sapien
gagtattaaggtctacaaaatgcaa

SEQ ID NO: 1143732 - DNA, 25 bp, Homo sapien
ctgagtattaaggtctacaaaatgc

SEQ ID NO: 1143733 - DNA, 25 bp, Homo sapien
gtattaaggtctacaaaatgcaaag

SEQ ID NO: 1143734 - DNA, 25 bp, Homo sapien
catagaggatcagggtcaatactcc

SEQ ID NO: 1143735 - DNA, 25 bp, Homo sapien
tctagcaagtatagccctgagttgc

SEQ ID NO: 1143736 - DNA, 25 bp, Homo sapien
tctaatgattgaaagtgccaggcac

SEQ ID NO: 1143737 - DNA, 25 bp, Homo sapien
aatgcatttcccttcgatacccagg

SEQ ID NO: 1143738 - DNA, 25 bp, Homo sapien
ctgctttttaattatgcaattaaag

SEQ ID NO: 1143739 - DNA, 25 bp, Homo sapien
tataaaacactgctttttaattatg

SEQ ID NO: 1143740 - DNA, 25 bp, Homo sapien
ataaaacactgctttttaattatgc

SEQ ID NO: 1143741 - DNA, 25 bp, Homo sapien
acactgctttttaattatgcaatta

SEQ ID NO: 1143742 - DNA, 25 bp, Homo sapien
ggaaaccagtttaggagcagccagt

SEQ ID NO: 1143743 - DNA, 25 bp, Homo sapien
cagcatgggactattaatagggccc

SEQ ID NO: 1143744 - DNA, 25 bp, Homo sapien
gagctctaagagtacccaagtgggt

SEQ ID NO: 1143745 - DNA, 25 bp, Homo sapien
tactggaggacatgactggaaacca

SEQ ID NO: 1143746 - DNA, 25 bp, Homo sapien
actgtaaaagccaacgttgctcttc

SEQ ID NO: 1143747 - DNA, 25 bp, Homo sapien
gttactgtaaaagccaacgttgctc

SEQ ID NO: 1143748 - DNA, 25 bp, Homo sapien
aaagccaacgttgctcttctgtaca

SEQ ID NO: 1143749 - DNA, 25 bp, Homo sapien
cagttactgtaaaagccaacgttgc

SEQ ID NO: 1143750 - DNA, 25 bp, Homo sapien
gagccaagtggtgattgtgagtgaa

SEQ ID NO: 1143751 - DNA, 25 bp, Homo sapien
aaggtgttgagtaaggctggagcca

SEQ ID NO: 1143752 - DNA, 25 bp, Homo sapien
agtgaagtcctagactcctctgccc

SEQ ID NO: 1143753 - DNA, 25 bp, Homo sapien
aaaagtcgtggtagactggaaggtg

SEQ ID NO: 1143754 - DNA, 25 bp, Homo sapien
tattggtctgaagagtgctgaggcc

SEQ ID NO: 1143755 - DNA, 25 bp, Homo sapien
gagggaactgcggattgcgtcacac

SEQ ID NO: 1143756 - DNA, 25 bp, Homo sapien
gcgtcacacgggtgccctttcagga

SEQ ID NO: 1143757 - DNA, 25 bp, Homo sapien
cctgacatgtctttgggaggcttcc

SEQ ID NO: 1143758 - DNA, 25 bp, Homo sapien
tacagtgcacatcccatgttacagg

SEQ ID NO: 1143759 - DNA, 25 bp, Homo sapien
gaaacggccttttcatctccgcagc

SEQ ID NO: 1143760 - DNA, 25 bp, Homo sapien
ctcaacggcaggattaggaggctca

SEQ ID NO: 1143761 - DNA, 25 bp, Homo sapien
cagaggccccgtgaactgatgacat

SEQ ID NO: 1143762 - DNA, 25 bp, Homo sapien
taaagggcgggaaagcgatactgcc

SEQ ID NO: 1143763 - DNA, 25 bp, Homo sapien
cacaaccacttgaaattcgtcacca

SEQ ID NO: 1143764 - DNA, 25 bp, Homo sapien
gaaagcgatactgccacaaccactt

SEQ ID NO: 1143765 - DNA, 25 bp, Homo sapien
tactgccacaaccacttgaaattcg

SEQ ID NO: 1143766 - DNA, 25 bp, Homo sapien
gagcatccataaccatcatgcttga

SEQ ID NO: 1143767 - DNA, 25 bp, Homo sapien
ctcctgagcatccataaccatcatg

SEQ ID NO: 1143768 - DNA, 25 bp, Homo sapien
agatggacagaaccaacaaacacca

SEQ ID NO: 1143769 - DNA, 25 bp, Homo sapien
tggattgatcccacaggaagcttcc

SEQ ID NO: 1143770 - DNA, 25 bp, Homo sapien
tccagccactgtaagttcccattct

SEQ ID NO: 1143771 - DNA, 25 bp, Homo sapien
cagccactgtaagttcccattcttc

SEQ ID NO: 1143772 - DNA, 25 bp, Homo sapien
tatccagccactgtaagttcccatt

SEQ ID NO: 1143773 - DNA, 25 bp, Homo sapien
ttatccagccactgtaagttcccat

SEQ ID NO: 1143774 - DNA, 25 bp, Homo sapien
cgccacatgattaggaaactagact

SEQ ID NO: 1143775 - DNA, 25 bp, Homo sapien
cacatgattaggaaactagacttgc

SEQ ID NO: 1143776 - DNA, 25 bp, Homo sapien
catgattaggaaactagacttgctc

SEQ ID NO: 1143777 - DNA, 25 bp, Homo sapien
cctccgccacatgattaggaaacta

SEQ ID NO: 1143778 - DNA, 25 bp, Homo sapien
ttctctatgtcttccccattggtca

SEQ ID NO: 1143779 - DNA, 25 bp, Homo sapien
tctctatgtcttccccattggtcag

SEQ ID NO: 1143780 - DNA, 25 bp, Homo sapien
tcactggtctccgagtgagatggtg

SEQ ID NO: 1143781 - DNA, 25 bp, Homo sapien
gatctcagccttatgttcctactga

SEQ ID NO: 1143782 - DNA, 25 bp, Homo sapien
tggtgatgatctcagccttatgttc

SEQ ID NO: 1143783 - DNA, 25 bp, Homo sapien
tctccgagtgagatggtgatgatct

SEQ ID NO: 1143784 - DNA, 25 bp, Homo sapien
gagtctggtggattcacaggttcaa

SEQ ID NO: 1143785 - DNA, 25 bp, Homo sapien
ggtggattcacaggttcaatgtgtg

SEQ ID NO: 1143786 - DNA, 25 bp, Homo sapien
tctggtggattcacaggttcaatgt

SEQ ID NO: 1143787 - DNA, 25 bp, Homo sapien
ggattcacaggttcaatgtgtgggt

SEQ ID NO: 1143788 - DNA, 25 bp, Homo sapien
tttgagcaatttgtcctagatcccc

SEQ ID NO: 1143789 - DNA, 25 bp, Homo sapien
gcccaccagaggcacaacaagctgt

SEQ ID NO: 1143790 - DNA, 25 bp, Homo sapien
cttggcccaccagaggcacaacaag

SEQ ID NO: 1143791 - DNA, 25 bp, Homo sapien
ccaccagaggcacaacaagctgtct

SEQ ID NO: 1143792 - DNA, 25 bp, Homo sapien
tgagctttcttcactggtgcccagg

SEQ ID NO: 1143793 - DNA, 25 bp, Homo sapien
tggtgcccagggagacttcatgcaa

SEQ ID NO: 1143794 - DNA, 25 bp, Homo sapien
tcatgcaagagagttcccctccaag

SEQ ID NO: 1143795 - DNA, 25 bp, Homo sapien
gagacttcatgcaagagagttcccc

SEQ ID NO: 1143796 - DNA, 25 bp, Homo sapien
tttcaagttactccatcctccatct

SEQ ID NO: 1143797 - DNA, 25 bp, Homo sapien
ccagaattggtgcacagcttaatac

SEQ ID NO: 1143798 - DNA, 25 bp, Homo sapien
gcttggctgccagaattggtgcaca

SEQ ID NO: 1143799 - DNA, 25 bp, Homo sapien
ctgccagaattggtgcacagcttaa

SEQ ID NO: 1143800 - DNA, 25 bp, Homo sapien
cataaggcttctttgctggcacaca

SEQ ID NO: 1143801 - DNA, 25 bp, Homo sapien
gcctgggccccagaaaccataaggc

SEQ ID NO: 1143802 - DNA, 25 bp, Homo sapien
ccagaaaccataaggcttctttgct

SEQ ID NO: 1143803 - DNA, 25 bp, Homo sapien
ggcttctttgctggcacacaggaag

SEQ ID NO: 1143804 - DNA, 25 bp, Homo sapien
ctgctcaaacatgggtctgtgcatt

SEQ ID NO: 1143805 - DNA, 25 bp, Homo sapien
cctcctgtggttggcgcatcctggt

SEQ ID NO: 1143806 - DNA, 25 bp, Homo sapien
ggcgcatcctggtccaacagaactt

SEQ ID NO: 1143807 - DNA, 25 bp, Homo sapien
aagtatttattcttccctcctgtgg

SEQ ID NO: 1143808 - DNA, 25 bp, Homo sapien
tgtcagatagctggctggttcaccg

SEQ ID NO: 1143809 - DNA, 25 bp, Homo sapien
tgaggtgatgatgccaaccaggccc

SEQ ID NO: 1143810 - DNA, 25 bp, Homo sapien
cacgtggtgacagaaatgtaccctg

SEQ ID NO: 1143811 - DNA, 25 bp, Homo sapien
ccacttctccctaaaggtgaggtga

SEQ ID NO: 1143812 - DNA, 25 bp, Homo sapien
catgttccactctatcgccaaggtg

SEQ ID NO: 1143813 - DNA, 25 bp, Homo sapien
taagttggaactgccttgcagctgg

SEQ ID NO: 1143814 - DNA, 25 bp, Homo sapien
tatcgccaaggtgatgctgagcaca

SEQ ID NO: 1143815 - DNA, 25 bp, Homo sapien
tgagctctcgcaggtccattagttg

SEQ ID NO: 1143816 - DNA, 25 bp, Homo sapien
ctctctgcattgactggacagatgg

SEQ ID NO: 1143817 - DNA, 25 bp, Homo sapien
tctctgcattgactggacagatggc

SEQ ID NO: 1143818 - DNA, 25 bp, Homo sapien
tgcattgactggacagatggcagct

SEQ ID NO: 1143819 - DNA, 25 bp, Homo sapien
tctgcattgactggacagatggcag

SEQ ID NO: 1143820 - DNA, 25 bp, Homo sapien
tcttcccaaagacgcctggtctggg

SEQ ID NO: 1143821 - DNA, 25 bp, Homo sapien
cccaaagacgcctggtctgggaggc

SEQ ID NO: 1143822 - DNA, 25 bp, Homo sapien
ttcttcccaaagacgcctggtctgg

SEQ ID NO: 1143823 - DNA, 25 bp, Homo sapien
ttcccaaagacgcctggtctgggag

SEQ ID NO: 1143824 - DNA, 25 bp, Homo sapien
agtgaacatgaccagcacaccacac

SEQ ID NO: 1143825 - DNA, 25 bp, Homo sapien
gcaaaacaggaagtgaacatgacca

SEQ ID NO: 1143826 - DNA, 25 bp, Homo sapien
aggaagtgaacatgaccagcacacc

SEQ ID NO: 1143827 - DNA, 25 bp, Homo sapien
ctgcaccagcaaaacaggaagtgaa

SEQ ID NO: 1143828 - DNA, 25 bp, Homo sapien
gcagggcccaggtctcagtgttgca

SEQ ID NO: 1143829 - DNA, 25 bp, Homo sapien
gcccaggtctcagtgttgcacattg

SEQ ID NO: 1143830 - DNA, 25 bp, Homo sapien
gggcccaggtctcagtgttgcacat

SEQ ID NO: 1143831 - DNA, 25 bp, Homo sapien
agggcccaggtctcagtgttgcaca

SEQ ID NO: 1143832 - DNA, 25 bp, Homo sapien
tccatccatcttttggagcatatgc

SEQ ID NO: 1143833 - DNA, 25 bp, Homo sapien
ctccatccatcttttggagcatatg

SEQ ID NO: 1143834 - DNA, 25 bp, Homo sapien
gggctagcacagtgctttctgccat

SEQ ID NO: 1143835 - DNA, 25 bp, Homo sapien
ccacaccgggctagcacagtgcttt

SEQ ID NO: 1143836 - DNA, 25 bp, Homo sapien
gggatgcaggtcctcaaagagggca

SEQ ID NO: 1143837 - DNA, 25 bp, Homo sapien
gatgcaggtcctcaaagagggcaaa

SEQ ID NO: 1143838 - DNA, 25 bp, Homo sapien
atgcaggtcctcaaagagggcaaag

SEQ ID NO: 1143839 - DNA, 25 bp, Homo sapien
gggggatgcaggtcctcaaagaggg

SEQ ID NO: 1143840 - DNA, 25 bp, Homo sapien
catccactgaccacttgggggaagg

SEQ ID NO: 1143841 - DNA, 25 bp, Homo sapien
atccactgaccacttgggggaaggg

SEQ ID NO: 1143842 - DNA, 25 bp, Homo sapien
acagccatacatccactgaccactt

SEQ ID NO: 1143843 - DNA, 25 bp, Homo sapien
gccatacatccactgaccacttggg

SEQ ID NO: 1143844 - DNA, 25 bp, Homo sapien
cagatggagtctctgactgtagggc

SEQ ID NO: 1143845 - DNA, 25 bp, Homo sapien
ctgggtctccaaaccatgggcctgg

SEQ ID NO: 1143846 - DNA, 25 bp, Homo sapien
gcctgggtctccaaaccatgggcct

SEQ ID NO: 1143847 - DNA, 25 bp, Homo sapien
tctgtgacaattgcccagagcgacc

SEQ ID NO: 1143848 - DNA, 25 bp, Homo sapien
tgtgaccacttgtgaggcccactgg

SEQ ID NO: 1143849 - DNA, 25 bp, Homo sapien
cagaaagaaatgatcgccccagcta

SEQ ID NO: 1143850 - DNA, 25 bp, Homo sapien
caggaaaattcttgtcagggccagc

SEQ ID NO: 1143851 - DNA, 25 bp, Homo sapien
acctgtgtgcagttagtgggacgaa

SEQ ID NO: 1143852 - DNA, 25 bp, Homo sapien
gattccccaagcaaactggctggag

SEQ ID NO: 1143853 - DNA, 25 bp, Homo sapien
ggagtccatcgccaatgtcggcagc

SEQ ID NO: 1143854 - DNA, 25 bp, Homo sapien
tgttatataacatgcaggcagggct

SEQ ID NO: 1143855 - DNA, 25 bp, Homo sapien
tctctggggattttcgcgttggttc

SEQ ID NO: 1143856 - DNA, 25 bp, Homo sapien
gattttcgcgttggttctccctgcc

SEQ ID NO: 1143857 - DNA, 25 bp, Homo sapien
tctcgcaggcaggtttttcttccgc

SEQ ID NO: 1143858 - DNA, 25 bp, Homo sapien
agtgaggcgggtaacgcccacgcct

SEQ ID NO: 1143859 - DNA, 25 bp, Homo sapien
ggtccttggcgtgggcaggccccag

SEQ ID NO: 1143860 - DNA, 25 bp, Homo sapien
ggaggcgacagaggcaggtccttgg

SEQ ID NO: 1143861 - DNA, 25 bp, Homo sapien
agcaggagcggcgcgacctctacag

SEQ ID NO: 1143862 - DNA, 25 bp, Homo sapien
gcggcaccgagtgagccgtcccgcc

SEQ ID NO: 1143863 - DNA, 25 bp, Homo sapien
acctgagcaccacttagtgggggcg

SEQ ID NO: 1143864 - DNA, 25 bp, Homo sapien
actaagtgagctcgcggctccctgg

SEQ ID NO: 1143865 - DNA, 25 bp, Homo sapien
aggctgggcaaagacctgagcacca

SEQ ID NO: 1143866 - DNA, 25 bp, Homo sapien
gggcggacccccactaagtgagctc

SEQ ID NO: 1143867 - DNA, 25 bp, Homo sapien
gcgggccggcgaaggtgtgcgcgcc

SEQ ID NO: 1143868 - DNA, 25 bp, Homo sapien
attcgaattcacactcggcgggccg

SEQ ID NO: 1143869 - DNA, 25 bp, Homo sapien
gctgcgcctagtgaaaccgccgaat

SEQ ID NO: 1143870 - DNA, 25 bp, Homo sapien
gagcccgagggactgcaagccagga

SEQ ID NO: 1143871 - DNA, 25 bp, Homo sapien
cagtaaagcaagtttcattttcaaa

SEQ ID NO: 1143872 - DNA, 25 bp, Homo sapien
ctacgcagtaaagcaagtttcattt

SEQ ID NO: 1143873 - DNA, 25 bp, Homo sapien
tacgcagtaaagcaagtttcatttt

SEQ ID NO: 1143874 - DNA, 25 bp, Homo sapien
cgcagtaaagcaagtttcattttca

SEQ ID NO: 1143875 - DNA, 25 bp, Homo sapien
gagtcgacccacttgccgtggcttt

SEQ ID NO: 1143876 - DNA, 25 bp, Homo sapien
tcctgcctcgcgaccagtgcgaagg

SEQ ID NO: 1143877 - DNA, 25 bp, Homo sapien
gtatccgtccgagtcgacccacttg

SEQ ID NO: 1143878 - DNA, 25 bp, Homo sapien
agggagtccccgaactgcgacacct

SEQ ID NO: 1143879 - DNA, 25 bp, Homo sapien
gagttcaggtgtgcaggctaccaac

SEQ ID NO: 1143880 - DNA, 25 bp, Homo sapien
tttctcgcccgccagcgttgagttc

SEQ ID NO: 1143881 - DNA, 25 bp, Homo sapien
cgttgagttcaggtgtgcaggctac

SEQ ID NO: 1143882 - DNA, 25 bp, Homo sapien
cgccagcgttgagttcaggtgtgca

SEQ ID NO: 1143883 - DNA, 25 bp, Homo sapien
gggagctgacactatccctcccgca

SEQ ID NO: 1143884 - DNA, 25 bp, Homo sapien
cagaagctcgccaggcattcatttc

SEQ ID NO: 1143885 - DNA, 25 bp, Homo sapien
ccgcagggtccagccctaatagtgg

SEQ ID NO: 1143886 - DNA, 25 bp, Homo sapien
agccctaatagtgggttctccagaa

SEQ ID NO: 1143887 - DNA, 25 bp, Homo sapien
cactgcagggcctaacgtggctggt

SEQ ID NO: 1143888 - DNA, 25 bp, Homo sapien
gtggctggtctcacaccctcaataa

SEQ ID NO: 1143889 - DNA, 25 bp, Homo sapien
caagaatgtcaaaggacagaacccc

SEQ ID NO: 1143890 - DNA, 25 bp, Homo sapien
cagtaaaattctgggtaagctctcc

SEQ ID NO: 1143891 - DNA, 25 bp, Homo sapien
tgctcacggtacaagagaagaaacc

SEQ ID NO: 1143892 - DNA, 25 bp, Homo sapien
gatttcagtggctacttgtgctcac

SEQ ID NO: 1143893 - DNA, 25 bp, Homo sapien
ccaggtagagatagccacaggtgca

SEQ ID NO: 1143894 - DNA, 25 bp, Homo sapien
ggcctctggaactcgggagatttca

SEQ ID NO: 1143895 - DNA, 25 bp, Homo sapien
cctggccttgaacacgggggaatgt

SEQ ID NO: 1143896 - DNA, 25 bp, Homo sapien
tgcactgttccttggactttcagaa

SEQ ID NO: 1143897 - DNA, 25 bp, Homo sapien
ttctgttctctgaccggcagcgcaa

SEQ ID NO: 1143898 - DNA, 25 bp, Homo sapien
actttcagaaatatgaggaattctg

SEQ ID NO: 1143899 - DNA, 25 bp, Homo sapien
tctatcaaatgtgtctggttaatgg

SEQ ID NO: 1143900 - DNA, 25 bp, Homo sapien
tctggttaatggtactgtgaaaaca

SEQ ID NO: 1143901 - DNA, 25 bp, Homo sapien
ttaatggtactgtgaaaacaagagc

SEQ ID NO: 1143902 - DNA, 25 bp, Homo sapien
caaatgtgtctggttaatggtactg

SEQ ID NO: 1143903 - DNA, 25 bp, Homo sapien
catgaacacaacattgatcagagac

SEQ ID NO: 1143904 - DNA, 25 bp, Homo sapien
gggcttccacgacttctctcagtaa

SEQ ID NO: 1143905 - DNA, 25 bp, Homo sapien
aaaaaggttcaactcatccactgag

SEQ ID NO: 1143906 - DNA, 25 bp, Homo sapien
ttctttagtaggtaactccatgaac

SEQ ID NO: 1143907 - DNA, 25 bp, Homo sapien
aacactccatgcagttttgtgacca

SEQ ID NO: 1143908 - DNA, 25 bp, Homo sapien
ctgactcaatcacggttctccaaga

SEQ ID NO: 1143909 - DNA, 25 bp, Homo sapien
aagactttagtctcaagctccgaca

SEQ ID NO: 1143910 - DNA, 25 bp, Homo sapien
tactgcctaggaagcacttaactac

SEQ ID NO: 1143911 - DNA, 25 bp, Homo sapien
caggtactgcgcatagcagcagctc

SEQ ID NO: 1143912 - DNA, 25 bp, Homo sapien
gttttgcatggatccttcccttagg

SEQ ID NO: 1143913 - DNA, 25 bp, Homo sapien
ggcattcaagttgcaggttccgggc

SEQ ID NO: 1143914 - DNA, 25 bp, Homo sapien
cagagcagatgctaattacgtgcat

SEQ ID NO: 1143915 - DNA, 25 bp, Homo sapien
cattcacaagtgtctaagtgtgagc

SEQ ID NO: 1143916 - DNA, 25 bp, Homo sapien
cacaagtgtctaagtgtgagctgac

SEQ ID NO: 1143917 - DNA, 25 bp, Homo sapien
tcacaagtgtctaagtgtgagctga

SEQ ID NO: 1143918 - DNA, 25 bp, Homo sapien
cccattcacaagtgtctaagtgtga

SEQ ID NO: 1143919 - DNA, 25 bp, Homo sapien
tttcacccataagaaaagagccagg

SEQ ID NO: 1143920 - DNA, 25 bp, Homo sapien
cgcttcgaatgaccatggaccttgg

SEQ ID NO: 1143921 - DNA, 25 bp, Homo sapien
catgtagtttgacccttgagattct

SEQ ID NO: 1143922 - DNA, 25 bp, Homo sapien
ctgcatgtagtttgacccttgagat

SEQ ID NO: 1143923 - DNA, 25 bp, Homo sapien
agaccattccattacatatgaaaac

SEQ ID NO: 1143924 - DNA, 25 bp, Homo sapien
gagaccattccattacatatgaaaa

SEQ ID NO: 1143925 - DNA, 25 bp, Homo sapien
agagaccattccattacatatgaaa

SEQ ID NO: 1143926 - DNA, 25 bp, Homo sapien
caacaggggacccgtgcacctgtgg

SEQ ID NO: 1143927 - DNA, 25 bp, Homo sapien
ctcctcccccgtgtacaagaggaca

SEQ ID NO: 1143928 - DNA, 25 bp, Homo sapien
caaactcctcccccgtgtacaagag

SEQ ID NO: 1143929 - DNA, 25 bp, Homo sapien
gccaacaggggacccgtgcacctgt

SEQ ID NO: 1143930 - DNA, 25 bp, Homo sapien
caaggtaagagctggaatcttgggc

SEQ ID NO: 1143931 - DNA, 25 bp, Homo sapien
tcaaatgtgtggttcttcccagtaa

SEQ ID NO: 1143932 - DNA, 25 bp, Homo sapien
cctggtgacagactccaagagaagt

SEQ ID NO: 1143933 - DNA, 25 bp, Homo sapien
tgggcaatgcgccaagcctggtgac

SEQ ID NO: 1143934 - DNA, 25 bp, Homo sapien
tgtgaggaacccaaggtgggcgagc

SEQ ID NO: 1143935 - DNA, 25 bp, Homo sapien
acgatgaaagtgtgaggaacccaag

SEQ ID NO: 1143936 - DNA, 25 bp, Homo sapien
atgaaagtgtgaggaacccaaggtg

SEQ ID NO: 1143937 - DNA, 25 bp, Homo sapien
tgaggaacccaaggtgggcgagcgg

SEQ ID NO: 1143938 - DNA, 25 bp, Homo sapien
cttctattatctgactgcagtaaag

SEQ ID NO: 1143939 - DNA, 25 bp, Homo sapien
ttcttctattatctgactgcagtaa

SEQ ID NO: 1143940 - DNA, 25 bp, Homo sapien
tcttctattatctgactgcagtaaa

SEQ ID NO: 1143941 - DNA, 25 bp, Homo sapien
tgtctacattcgtctaggctacaac

SEQ ID NO: 1143942 - DNA, 25 bp, Homo sapien
cagtgttgccatgaggactcaatga

SEQ ID NO: 1143943 - DNA, 25 bp, Homo sapien
ggaccgcagtagaattagttactcc

SEQ ID NO: 1143944 - DNA, 25 bp, Homo sapien
tgagcaaaccatataggaccgcagt

SEQ ID NO: 1143945 - DNA, 25 bp, Homo sapien
tcaggggatgttctggctggggaaa

SEQ ID NO: 1143946 - DNA, 25 bp, Homo sapien
ttcaggggatgttctggctggggaa

SEQ ID NO: 1143947 - DNA, 25 bp, Homo sapien
cttcaggggatgttctggctgggga

SEQ ID NO: 1143948 - DNA, 25 bp, Homo sapien
gaagttgccatcactgacgtaaggg

SEQ ID NO: 1143949 - DNA, 25 bp, Homo sapien
caaactgacgccgaatggagtcgac

SEQ ID NO: 1143950 - DNA, 25 bp, Homo sapien
agcttgttcacaccctctggcagga

SEQ ID NO: 1143951 - DNA, 25 bp, Homo sapien
tttgaccaaaacgtggccagctgcg

SEQ ID NO: 1143952 - DNA, 25 bp, Homo sapien
tgtagcgttttccaacgtggcactg

SEQ ID NO: 1143953 - DNA, 25 bp, Homo sapien
gtagcttagcacttctcacgcgctg

SEQ ID NO: 1143954 - DNA, 25 bp, Homo sapien
ggcactgtaatacgggtcctttgag

SEQ ID NO: 1143955 - DNA, 25 bp, Homo sapien
tgcctacatctagaaggaggctccc

SEQ ID NO: 1143956 - DNA, 25 bp, Homo sapien
gcaatatctcgcaattcctcaggat

SEQ ID NO: 1143957 - DNA, 25 bp, Homo sapien
ttcccctcagcaatatctcgcaatt

SEQ ID NO: 1143958 - DNA, 25 bp, Homo sapien
ggatagtacagcatgtaaaccataa

SEQ ID NO: 1143959 - DNA, 25 bp, Homo sapien
tcgcaattcctcaggatagtacagc

SEQ ID NO: 1143960 - DNA, 25 bp, Homo sapien
taactaaggctcacagggaaacagg

SEQ ID NO: 1143961 - DNA, 25 bp, Homo sapien
gaatatgttccaaagcgagctgtga

SEQ ID NO: 1143962 - DNA, 25 bp, Homo sapien
ggactccgagacaaccatggtgcaa

SEQ ID NO: 1143963 - DNA, 25 bp, Homo sapien
ttcacacagagcacgaagacagcag

SEQ ID NO: 1143964 - DNA, 25 bp, Homo sapien
tagtgaccaccacgaaagaggaatc

SEQ ID NO: 1143965 - DNA, 25 bp, Homo sapien
cctctttagtagatggtcatctcac

SEQ ID NO: 1143966 - DNA, 25 bp, Homo sapien
aagaggaatccccagacctcctagg

SEQ ID NO: 1143967 - DNA, 25 bp, Homo sapien
tttaaaaacacccacagatctgtat

SEQ ID NO: 1143968 - DNA, 25 bp, Homo sapien
aaggtaaggtggcagaatggcacca

SEQ ID NO: 1143969 - DNA, 25 bp, Homo sapien
ctccaggccaaggtaaggtggcaga

SEQ ID NO: 1143970 - DNA, 25 bp, Homo sapien
caaggtaaggtggcagaatggcacc

SEQ ID NO: 1143971 - DNA, 25 bp, Homo sapien
cacagtcccgtgttgcagaaggcac

SEQ ID NO: 1143972 - DNA, 25 bp, Homo sapien
gacacagtcccgtgttgcagaaggc

SEQ ID NO: 1143973 - DNA, 25 bp, Homo sapien
ggcagcacatgcttctaggtagcat

SEQ ID NO: 1143974 - DNA, 25 bp, Homo sapien
ggcaggaaaccagcaccgtggcccc

SEQ ID NO: 1143975 - DNA, 25 bp, Homo sapien
ggctccagctccctagattctgggc

SEQ ID NO: 1143976 - DNA, 25 bp, Homo sapien
atgaaaccaagcctcccgacaggct

SEQ ID NO: 1143977 - DNA, 25 bp, Homo sapien
tggtatgaaaccaagcctcccgaca

SEQ ID NO: 1143978 - DNA, 25 bp, Homo sapien
gattctgggcggcactgacagaaac

SEQ ID NO: 1143979 - DNA, 25 bp, Homo sapien
gggaagcacccgaaagaaaggcagc

SEQ ID NO: 1143980 - DNA, 25 bp, Homo sapien
aacaggtagcctgcgttgctctgag

SEQ ID NO: 1143981 - DNA, 25 bp, Homo sapien
ggccagaacaggtagcctgcgttgc

SEQ ID NO: 1143982 - DNA, 25 bp, Homo sapien
catgcctttcccttagggacatttc

SEQ ID NO: 1143983 - DNA, 25 bp, Homo sapien
ctggaccgctgaccctatttgaagt

SEQ ID NO: 1143984 - DNA, 25 bp, Homo sapien
aggcctggaccgctgaccctatttg

SEQ ID NO: 1143985 - DNA, 25 bp, Homo sapien
gcctggaccgctgaccctatttgaa

SEQ ID NO: 1143986 - DNA, 25 bp, Homo sapien
accaggcctggaccgctgaccctat

SEQ ID NO: 1143987 - DNA, 25 bp, Homo sapien
tacactgatatcgtcagggttctcc

SEQ ID NO: 1143988 - DNA, 25 bp, Homo sapien
gagtgaagcctttttcatgatggcc

SEQ ID NO: 1143989 - DNA, 25 bp, Homo sapien
catttggaacgtcctctcatcagga

SEQ ID NO: 1143990 - DNA, 25 bp, Homo sapien
gaatggcccgcagagttacactgat

SEQ ID NO: 1143991 - DNA, 25 bp, Homo sapien
caggtaccagctgcactcgttttgg

SEQ ID NO: 1143992 - DNA, 25 bp, Homo sapien
tggacttgcaattcatggctcagct

SEQ ID NO: 1143993 - DNA, 25 bp, Homo sapien
tgggtaccagatgagctttaacagc

SEQ ID NO: 1143994 - DNA, 25 bp, Homo sapien
caagaagcagcgtgtaaagcttggc

SEQ ID NO: 1143995 - DNA, 25 bp, Homo sapien
gtcaaagctcccagagagggtttca

SEQ ID NO: 1143996 - DNA, 25 bp, Homo sapien
ccagagagggtttcaacaaaggatt

SEQ ID NO: 1143997 - DNA, 25 bp, Homo sapien
tgtcaaagctcccagagagggtttc

SEQ ID NO: 1143998 - DNA, 25 bp, Homo sapien
cccagagagggtttcaacaaaggat

SEQ ID NO: 1143999 - DNA, 25 bp, Homo sapien
gaagtgcttatgatcaaagggctca

SEQ ID NO: 1144000 - DNA, 25 bp, Homo sapien
tcttaccaaggcaggaaagtatgca

SEQ ID NO: 1144001 - DNA, 25 bp, Homo sapien
cagggagtcatccagttacatggtc

SEQ ID NO: 1144002 - DNA, 25 bp, Homo sapien
taacagcaggatagcaccagaaggc

SEQ ID NO: 1144003 - DNA, 25 bp, Homo sapien
gtccaatatttgatgatcctagtga

SEQ ID NO: 1144004 - DNA, 25 bp, Homo sapien
caatatttgatgatcctagtgatat

SEQ ID NO: 1144005 - DNA, 25 bp, Homo sapien
atatttgatgatcctagtgatatct

SEQ ID NO: 1144006 - DNA, 25 bp, Homo sapien
ccaatatttgatgatcctagtgata

SEQ ID NO: 1144007 - DNA, 25 bp, Homo sapien
tccgacaaagtcctcaatgggctca

SEQ ID NO: 1144008 - DNA, 25 bp, Homo sapien
tagaacaagtgctgctccgacaaag

SEQ ID NO: 1144009 - DNA, 25 bp, Homo sapien
tgggctcacaaggaacctaacttcg

SEQ ID NO: 1144010 - DNA, 25 bp, Homo sapien
tgtaggcccatccacgttcatgtct

SEQ ID NO: 1144011 - DNA, 25 bp, Homo sapien
cgtggacccattctaacatcgctgg

SEQ ID NO: 1144012 - DNA, 25 bp, Homo sapien
tctggtcctgagttctgctccgctg

SEQ ID NO: 1144013 - DNA, 25 bp, Homo sapien
tcttctgtaggaagctgcggctcct

SEQ ID NO: 1144014 - DNA, 25 bp, Homo sapien
tctgtgctgcggaaaaggctgcctt

SEQ ID NO: 1144015 - DNA, 25 bp, Homo sapien
gcactaggacaaaagaggaaccgga

SEQ ID NO: 1144016 - DNA, 25 bp, Homo sapien
gatgcggggcactgggaacgacaga

SEQ ID NO: 1144017 - DNA, 25 bp, Homo sapien
ccggagcgaagggaaaccagagagg

SEQ ID NO: 1144018 - DNA, 25 bp, Homo sapien
agagccaatgagatgcggggcactg

SEQ ID NO: 1144019 - DNA, 25 bp, Homo sapien
tcctggcagccaatctgcaggggtg

SEQ ID NO: 1144020 - DNA, 25 bp, Homo sapien
gtcctggcagccaatctgcaggggt

SEQ ID NO: 1144021 - DNA, 25 bp, Homo sapien
cactggcatacgctttcgtcctggc

SEQ ID NO: 1144022 - DNA, 25 bp, Homo sapien
ggcatcttgtattaaccagcagaaa

SEQ ID NO: 1144023 - DNA, 25 bp, Homo sapien
cagaagcaccgtgcaaggaggagac

SEQ ID NO: 1144024 - DNA, 25 bp, Homo sapien
gaaataggttaccacataaagcacc

SEQ ID NO: 1144025 - DNA, 25 bp, Homo sapien
gatttgggctggacacatcacgtgt

SEQ ID NO: 1144026 - DNA, 25 bp, Homo sapien
ttcgggtcagtcaggcagctttgct

SEQ ID NO: 1144027 - DNA, 25 bp, Homo sapien
gctgatctaggccacccttggcaga

SEQ ID NO: 1144028 - DNA, 25 bp, Homo sapien
caacaggctggctcgggtgcatttt

SEQ ID NO: 1144029 - DNA, 25 bp, Homo sapien
tattatcaccatgtgccggcaattc

SEQ ID NO: 1144030 - DNA, 25 bp, Homo sapien
cattcaagctgacttcacgtgccca

SEQ ID NO: 1144031 - DNA, 25 bp, Homo sapien
catacccctgcatctagacagtaga

SEQ ID NO: 1144032 - DNA, 25 bp, Homo sapien
tatagcttgcattctacttagaagt

SEQ ID NO: 1144033 - DNA, 25 bp, Homo sapien
gctgctgcttcggagttagcttcct

SEQ ID NO: 1144034 - DNA, 25 bp, Homo sapien
gttagcttccttgctggccttctgg

SEQ ID NO: 1144035 - DNA, 25 bp, Homo sapien
ctctgttgtccccattactggtaga

SEQ ID NO: 1144036 - DNA, 25 bp, Homo sapien
ttactggtagattcatctttgtcca

SEQ ID NO: 1144037 - DNA, 25 bp, Homo sapien
tgcaagattcgccagtttgatcacc

SEQ ID NO: 1144038 - DNA, 25 bp, Homo sapien
gattcgccagtttgatcaccctcca

SEQ ID NO: 1144039 - DNA, 25 bp, Homo sapien
ccacccacactcatgtgttctgtgt

SEQ ID NO: 1144040 - DNA, 25 bp, Homo sapien
tcaaggctttgcaagattcgccagt

SEQ ID NO: 1144041 - DNA, 25 bp, Homo sapien
tgtcaagaccccaaagccaaagatg

SEQ ID NO: 1144042 - DNA, 25 bp, Homo sapien
cacatggcagttgtcaagaccccaa

SEQ ID NO: 1144043 - DNA, 25 bp, Homo sapien
gatacaattaatactggaggctcca

SEQ ID NO: 1144044 - DNA, 25 bp, Homo sapien
gcccttgcaaattcctggatacaat

SEQ ID NO: 1144045 - DNA, 25 bp, Homo sapien
ttgtccacccgatcttggtgctcct

SEQ ID NO: 1144046 - DNA, 25 bp, Homo sapien
gtccacccgatcttggtgctcctca

SEQ ID NO: 1144047 - DNA, 25 bp, Homo sapien
ttatttgtccacccgatcttggtgc

SEQ ID NO: 1144048 - DNA, 25 bp, Homo sapien
atttgtccacccgatcttggtgctc

SEQ ID NO: 1144049 - DNA, 25 bp, Homo sapien
catcagttgccttctggatgctaga

SEQ ID NO: 1144050 - DNA, 25 bp, Homo sapien
gaaggacccgcagcatgaaggaaag

SEQ ID NO: 1144051 - DNA, 25 bp, Homo sapien
cagttgccttctggatgctagacat

SEQ ID NO: 1144052 - DNA, 25 bp, Homo sapien
gggcagggcctagcactcaggcttc

SEQ ID NO: 1144053 - DNA, 25 bp, Homo sapien
agtgaggacactatcactgtgctca

SEQ ID NO: 1144054 - DNA, 25 bp, Homo sapien
tccagagatcgtgcagtgaggacac

SEQ ID NO: 1144055 - DNA, 25 bp, Homo sapien
gtacagtggtcatcctctgagagag

SEQ ID NO: 1144056 - DNA, 25 bp, Homo sapien
ctaggtacagtggtcatcctctgag

SEQ ID NO: 1144057 - DNA, 25 bp, Homo sapien
ttagcccacgcccacagggagaata

SEQ ID NO: 1144058 - DNA, 25 bp, Homo sapien
gcccacgcccacagggagaatactg

SEQ ID NO: 1144059 - DNA, 25 bp, Homo sapien
agcccacgcccacagggagaatact

SEQ ID NO: 1144060 - DNA, 25 bp, Homo sapien
cccacgcccacagggagaatactga

SEQ ID NO: 1144061 - DNA, 25 bp, Homo sapien
agccgctgccgcgttagttccgagc

SEQ ID NO: 1144062 - DNA, 25 bp, Homo sapien
tgccgcgttagttccgagcttgaag

SEQ ID NO: 1144063 - DNA, 25 bp, Homo sapien
cgcgttagttccgagcttgaagtca

SEQ ID NO: 1144064 - DNA, 25 bp, Homo sapien
gctgccgcgttagttccgagcttga

SEQ ID NO: 1144065 - DNA, 25 bp, Homo sapien
ttcgtgggctttgtcggtccgtgcc

SEQ ID NO: 1144066 - DNA, 25 bp, Homo sapien
tcatcggtgttcgtgggctttgtcg

SEQ ID NO: 1144067 - DNA, 25 bp, Homo sapien
tgggctttgtcggtccgtgcctcgt

SEQ ID NO: 1144068 - DNA, 25 bp, Homo sapien
ctttgtcggtccgtgcctcgtctct

SEQ ID NO: 1144069 - DNA, 25 bp, Homo sapien
tttctcccacttgatgattatcttc

SEQ ID NO: 1144070 - DNA, 25 bp, Homo sapien
tctcccacttgatgattatcttctc

SEQ ID NO: 1144071 - DNA, 25 bp, Homo sapien
ttcattacatcctggatcaagtgtt

SEQ ID NO: 1144072 - DNA, 25 bp, Homo sapien
cctggatcaagtgttttcttagata

SEQ ID NO: 1144073 - DNA, 25 bp, Homo sapien
taagcagcacctttgttatgctcag

SEQ ID NO: 1144074 - DNA, 25 bp, Homo sapien
cctccagatttaggttaagcagcac

SEQ ID NO: 1144075 - DNA, 25 bp, Homo sapien
tgttatgctcagatctgccaccaag

SEQ ID NO: 1144076 - DNA, 25 bp, Homo sapien
actggggacatggatttaagcaaca

SEQ ID NO: 1144077 - DNA, 25 bp, Homo sapien
tgaatccctacttttcgttccacag

SEQ ID NO: 1144078 - DNA, 25 bp, Homo sapien
cctacttttcgttccacagttatct

SEQ ID NO: 1144079 - DNA, 25 bp, Homo sapien
tctcctgttgaatccctacttttcg

SEQ ID NO: 1144080 - DNA, 25 bp, Homo sapien
cttctctcctgttgaatccctactt

SEQ ID NO: 1144081 - DNA, 25 bp, Homo sapien
ttcttccagcagcagagccgtaacc

SEQ ID NO: 1144082 - DNA, 25 bp, Homo sapien
accaggtgaatccttcttccagcag

SEQ ID NO: 1144083 - DNA, 25 bp, Homo sapien
cacaaaaccaggtgaatccttcttc

SEQ ID NO: 1144084 - DNA, 25 bp, Homo sapien
gagcgagaccacaaaaccaggtgaa

SEQ ID NO: 1144085 - DNA, 25 bp, Homo sapien
tacaagattacaactagctgaaggc

SEQ ID NO: 1144086 - DNA, 25 bp, Homo sapien
tgtatgactcctcgtgttactgcaa

SEQ ID NO: 1144087 - DNA, 25 bp, Homo sapien
gctatagtctggaacggaacctgca

SEQ ID NO: 1144088 - DNA, 25 bp, Homo sapien
gtttacaggccactatctactattg

SEQ ID NO: 1144089 - DNA, 25 bp, Homo sapien
aataaacatctatccagtttagcct

SEQ ID NO: 1144090 - DNA, 25 bp, Homo sapien
gcttgccatgtggacggtctatttg

SEQ ID NO: 1144091 - DNA, 25 bp, Homo sapien
ccatgtggacggtctatttgagggc

SEQ ID NO: 1144092 - DNA, 25 bp, Homo sapien
atccagtttagcctctgtgtgagga

SEQ ID NO: 1144093 - DNA, 25 bp, Homo sapien
agaggttcccacttagtggcaggag

SEQ ID NO: 1144094 - DNA, 25 bp, Homo sapien
ctaccagaggttcccacttagtggc

SEQ ID NO: 1144095 - DNA, 25 bp, Homo sapien
accagaggttcccacttagtggcag

SEQ ID NO: 1144096 - DNA, 25 bp, Homo sapien
tctaccagaggttcccacttagtgg

SEQ ID NO: 1144097 - DNA, 25 bp, Homo sapien
gccccaggattagatcttaggtgta

SEQ ID NO: 1144098 - DNA, 25 bp, Homo sapien
tagtagcggactgaatacctagcat

SEQ ID NO: 1144099 - DNA, 25 bp, Homo sapien
tgggctatgggaaacatggccctct

SEQ ID NO: 1144100 - DNA, 25 bp, Homo sapien
aaaactgagaagtagtagcggactg

SEQ ID NO: 1144101 - DNA, 25 bp, Homo sapien
tccagccagcaggactacgtcatgg

SEQ ID NO: 1144102 - DNA, 25 bp, Homo sapien
cactcagtgagaacaggcaaagcct

SEQ ID NO: 1144103 - DNA, 25 bp, Homo sapien
ctcagtgagaacaggcaaagcctgc

SEQ ID NO: 1144104 - DNA, 25 bp, Homo sapien
ccagccagcaggactacgtcatggc

SEQ ID NO: 1144105 - DNA, 25 bp, Homo sapien
taggttcccgcaatccctggagtga

SEQ ID NO: 1144106 - DNA, 25 bp, Homo sapien
ttaagtgctctttcaccaagtggga

SEQ ID NO: 1144107 - DNA, 25 bp, Homo sapien
tgtttccgctctctggccgcttgag

SEQ ID NO: 1144108 - DNA, 25 bp, Homo sapien
ccaggatggtgcgttgtctaggttc

SEQ ID NO: 1144109 - DNA, 25 bp, Homo sapien
tggcgccacttcctcgcatgttggt

SEQ ID NO: 1144110 - DNA, 25 bp, Homo sapien
ttctcttgaagaacgagcctggcgc

SEQ ID NO: 1144111 - DNA, 25 bp, Homo sapien
catgttggttaggttctttcccgag

SEQ ID NO: 1144112 - DNA, 25 bp, Homo sapien
tgaagaacgagcctggcgccacttc

SEQ ID NO: 1144113 - DNA, 25 bp, Homo sapien
ctaggaggaaatgacggagaaagcc

SEQ ID NO: 1144114 - DNA, 25 bp, Homo sapien
ggagatgtcgctcggccgccttcta

SEQ ID NO: 1144115 - DNA, 25 bp, Homo sapien
tgggactttgactcgccgtactcgg

SEQ ID NO: 1144116 - DNA, 25 bp, Homo sapien
agcggaagccggtgtttcgcagccc

SEQ ID NO: 1144117 - DNA, 25 bp, Homo sapien
tcttccgccagaggttccctttgcc

SEQ ID NO: 1144118 - DNA, 25 bp, Homo sapien
agcctcttccgccagaggttccctt

SEQ ID NO: 1144119 - DNA, 25 bp, Homo sapien
ccacgaggctcccagccgattggac

SEQ ID NO: 1144120 - DNA, 25 bp, Homo sapien
cgcccacaagacctgccccttccgg

SEQ ID NO: 1144121 - DNA, 25 bp, Homo sapien
gctgctgacatcacgaacgcctcag

SEQ ID NO: 1144122 - DNA, 25 bp, Homo sapien
cagccctagcaaccggcctttaaca

SEQ ID NO: 1144123 - DNA, 25 bp, Homo sapien
tttaacacgcccgtctcggctgctg

SEQ ID NO: 1144124 - DNA, 25 bp, Homo sapien
ccagaatctgcaaaatcggagccgc

SEQ ID NO: 1144125 - DNA, 25 bp, Homo sapien
gagggtgacggagggttccacacac

SEQ ID NO: 1144126 - DNA, 25 bp, Homo sapien
cgtgcacacgcacggtcaggcagct

SEQ ID NO: 1144127 - DNA, 25 bp, Homo sapien
acacggtcatatcatcctcaggcca

SEQ ID NO: 1144128 - DNA, 25 bp, Homo sapien
cattcctaaacgagtcttcggtcag

SEQ ID NO: 1144129 - DNA, 25 bp, Homo sapien
tgacagttcacgaccaaaccttctt

SEQ ID NO: 1144130 - DNA, 25 bp, Homo sapien
atgatctccgcttcctaacctacag

SEQ ID NO: 1144131 - DNA, 25 bp, Homo sapien
gatgtttccaagatgcactgaaggc

SEQ ID NO: 1144132 - DNA, 25 bp, Homo sapien
aaaccttcttccgagaccccatgat

SEQ ID NO: 1144133 - DNA, 25 bp, Homo sapien
gagtaagcccaattctagcagcctt

SEQ ID NO: 1144134 - DNA, 25 bp, Homo sapien
tagcagccttttttcatcgcctcga

SEQ ID NO: 1144135 - DNA, 25 bp, Homo sapien
catcgcctcgatatttaaactacct

SEQ ID NO: 1144136 - DNA, 25 bp, Homo sapien
cacttcctttcgagtaagcccaatt

SEQ ID NO: 1144137 - DNA, 25 bp, Homo sapien
atgtctgataccacaggtgaagcaa

SEQ ID NO: 1144138 - DNA, 25 bp, Homo sapien
gatgtctgataccacaggtgaagca

SEQ ID NO: 1144139 - DNA, 25 bp, Homo sapien
tgtctgataccacaggtgaagcaat

SEQ ID NO: 1144140 - DNA, 25 bp, Homo sapien
tttttggctgccgataacgccaaag

SEQ ID NO: 1144141 - DNA, 25 bp, Homo sapien
tagcgtaggtactgcttggtgagcc

SEQ ID NO: 1144142 - DNA, 25 bp, Homo sapien
cactagcaacatagcgtaggtactg

SEQ ID NO: 1144143 - DNA, 25 bp, Homo sapien
gccaaagaccgcactagcaacatag

SEQ ID NO: 1144144 - DNA, 25 bp, Homo sapien
caagctggtactgccacataacgtc

SEQ ID NO: 1144145 - DNA, 25 bp, Homo sapien
tccttaagtcccagatgaaaacgtg

SEQ ID NO: 1144146 - DNA, 25 bp, Homo sapien
cgaagtgtcacaaagacaatattac

SEQ ID NO: 1144147 - DNA, 25 bp, Homo sapien
taacgtcctttctcaccacgaagtg

SEQ ID NO: 1144148 - DNA, 25 bp, Homo sapien
gaattcagtggcgaagaacacaaag

SEQ ID NO: 1144149 - DNA, 25 bp, Homo sapien
aggaacttgatgcttggctagctag

SEQ ID NO: 1144150 - DNA, 25 bp, Homo sapien
gaacttgatgcttggctagctagac

SEQ ID NO: 1144151 - DNA, 25 bp, Homo sapien
tcagaattcagtggcgaagaacaca

SEQ ID NO: 1144152 - DNA, 25 bp, Homo sapien
tagacatctaagaaataagctccta

SEQ ID NO: 1144153 - DNA, 25 bp, Homo sapien
atagacatctaagaaataagctcct

SEQ ID NO: 1144154 - DNA, 25 bp, Homo sapien
aacagctaagtgtagcccatctggg

SEQ ID NO: 1144155 - DNA, 25 bp, Homo sapien
gccagtctgcctcctagctgatcat

SEQ ID NO: 1144156 - DNA, 25 bp, Homo sapien
catacttcaaggtagtgatagctgc

SEQ ID NO: 1144157 - DNA, 25 bp, Homo sapien
gaagattcggatcgacccatcctca

SEQ ID NO: 1144158 - DNA, 25 bp, Homo sapien
tgtgcccctttagacggtacagacc

SEQ ID NO: 1144159 - DNA, 25 bp, Homo sapien
tagtaactagcaggttcttttctcg

SEQ ID NO: 1144160 - DNA, 25 bp, Homo sapien
tttagacggtacagaccactttcat

SEQ ID NO: 1144161 - DNA, 25 bp, Homo sapien
tagaaacaatgcttgtgtgatggca

SEQ ID NO: 1144162 - DNA, 25 bp, Homo sapien
cagtccggtggccaaccattgtttt

SEQ ID NO: 1144163 - DNA, 25 bp, Homo sapien
tcaaggtcccaccatttcaccatgg

SEQ ID NO: 1144164 - DNA, 25 bp, Homo sapien
aagcagtgctgagtatcaaggtccc

SEQ ID NO: 1144165 - DNA, 25 bp, Homo sapien
tgctgagtatcaaggtcccaccatt

SEQ ID NO: 1144166 - DNA, 25 bp, Homo sapien
ccccagtgatgagtcgcttttcttc

SEQ ID NO: 1144167 - DNA, 25 bp, Homo sapien
gtgatgagtcgcttttcttctgaca

SEQ ID NO: 1144168 - DNA, 25 bp, Homo sapien
aggccccagtgatgagtcgcttttc

SEQ ID NO: 1144169 - DNA, 25 bp, Homo sapien
ccagtgatgagtcgcttttcttctg

SEQ ID NO: 1144170 - DNA, 25 bp, Homo sapien
cttgcagataagctatgtcccatac

SEQ ID NO: 1144171 - DNA, 25 bp, Homo sapien
tcttgcagataagctatgtcccata

SEQ ID NO: 1144172 - DNA, 25 bp, Homo sapien
ctcttgcagataagctatgtcccat

SEQ ID NO: 1144173 - DNA, 25 bp, Homo sapien
gtctcaaaggcaccatcctctgcct

SEQ ID NO: 1144174 - DNA, 25 bp, Homo sapien
cctctgcctcaagagtatcttgtat

SEQ ID NO: 1144175 - DNA, 25 bp, Homo sapien
ctcaggggcttcatccgtctcaaag

SEQ ID NO: 1144176 - DNA, 25 bp, Homo sapien
tgcctcaagagtatcttgtattcca

SEQ ID NO: 1144177 - DNA, 25 bp, Homo sapien
caattaaacttaagaaatgaaaatg

SEQ ID NO: 1144178 - DNA, 25 bp, Homo sapien
ttattcaacacaattaaacttaaga

SEQ ID NO: 1144179 - DNA, 25 bp, Homo sapien
tcaacacaattaaacttaagaaatg

SEQ ID NO: 1144180 - DNA, 25 bp, Homo sapien
tttcccattattcaacacaattaaa

SEQ ID NO: 1144181 - DNA, 25 bp, Homo sapien
tgcctgtcttgtcgactgcaaggtt

SEQ ID NO: 1144182 - DNA, 25 bp, Homo sapien
gcaagcaagaatcctgcctgtcttg

SEQ ID NO: 1144183 - DNA, 25 bp, Homo sapien
ttccttcccgcattatggaaccagc

SEQ ID NO: 1144184 - DNA, 25 bp, Homo sapien
caaggtttacaactctgtctcttcc

SEQ ID NO: 1144185 - DNA, 25 bp, Homo sapien
tacaaaacaattctagcacagagtc

SEQ ID NO: 1144186 - DNA, 25 bp, Homo sapien
caaaacaattctagcacagagtcag

SEQ ID NO: 1144187 - DNA, 25 bp, Homo sapien
aaacaattctagcacagagtcagtt

SEQ ID NO: 1144188 - DNA, 25 bp, Homo sapien
aaaacaattctagcacagagtcagt

SEQ ID NO: 1144189 - DNA, 25 bp, Homo sapien
tgctttctttctagctttcttcatc

SEQ ID NO: 1144190 - DNA, 25 bp, Homo sapien
tttgctttctttctagctttcttca

SEQ ID NO: 1144191 - DNA, 25 bp, Homo sapien
catcttcttatccattttcttctga

SEQ ID NO: 1144192 - DNA, 25 bp, Homo sapien
cttcatcttcttatccattttcttc

SEQ ID NO: 1144193 - DNA, 25 bp, Homo sapien
tcattattaatgtaagtattaagaa

SEQ ID NO: 1144194 - DNA, 25 bp, Homo sapien
cttcattattaatgtaagtattaag

SEQ ID NO: 1144195 - DNA, 25 bp, Homo sapien
ttcattattaatgtaagtattaaga

SEQ ID NO: 1144196 - DNA, 25 bp, Homo sapien
cattattaatgtaagtattaagaaa

SEQ ID NO: 1144197 - DNA, 25 bp, Homo sapien
gtttttatattagtcacccgctgga

SEQ ID NO: 1144198 - DNA, 25 bp, Homo sapien
tttatattagtcacccgctggattt

SEQ ID NO: 1144199 - DNA, 25 bp, Homo sapien
ttttatattagtcacccgctggatt

SEQ ID NO: 1144200 - DNA, 25 bp, Homo sapien
tttttatattagtcacccgctggat

SEQ ID NO: 1144201 - DNA, 25 bp, Homo sapien
ggaaaaggctttacaatgtcctcta

SEQ ID NO: 1144202 - DNA, 25 bp, Homo sapien
gctaccatcttagctcacaaggttt

SEQ ID NO: 1144203 - DNA, 25 bp, Homo sapien
caatttttcaagtaagagtgccctg

SEQ ID NO: 1144204 - DNA, 25 bp, Homo sapien
aaatgttctagctaccatcttagct

SEQ ID NO: 1144205 - DNA, 25 bp, Homo sapien
gattcagtgaatacaattccaccag

SEQ ID NO: 1144206 - DNA, 25 bp, Homo sapien
ccaatagtgattctgcttgtcctga

SEQ ID NO: 1144207 - DNA, 25 bp, Homo sapien
tgagctgaatgacaaagtccgcaca

SEQ ID NO: 1144208 - DNA, 25 bp, Homo sapien
cagcctttaactctccgtgaggtga

SEQ ID NO: 1144209 - DNA, 25 bp, Homo sapien
tttcttctctaagctccacaggcta

SEQ ID NO: 1144210 - DNA, 25 bp, Homo sapien
tactactaactacagctatataaaa

SEQ ID NO: 1144211 - DNA, 25 bp, Homo sapien
tctaagctccacaggctaatggccc

SEQ ID NO: 1144212 - DNA, 25 bp, Homo sapien
ggcccaaatgcactaaagataattg

SEQ ID NO: 1144213 - DNA, 25 bp, Homo sapien
caaagtgcatattcacaggtcattg

SEQ ID NO: 1144214 - DNA, 25 bp, Homo sapien
cattgtgcgaatacactgcagtgta

SEQ ID NO: 1144215 - DNA, 25 bp, Homo sapien
ttcacaggtcattgtgcgaatacac

SEQ ID NO: 1144216 - DNA, 25 bp, Homo sapien
ctgtctatcaccaggtacaaagaat

SEQ ID NO: 1144217 - DNA, 25 bp, Homo sapien
ttgtctccagcagattccctgaagc

SEQ ID NO: 1144218 - DNA, 25 bp, Homo sapien
ggacatggaccacaaagctccatca

SEQ ID NO: 1144219 - DNA, 25 bp, Homo sapien
tgaagccaagtcataaagctgcagc

SEQ ID NO: 1144220 - DNA, 25 bp, Homo sapien
atgtgcatctattgtctccagcaga

SEQ ID NO: 1144221 - DNA, 25 bp, Homo sapien
ttcatctttcactaactcaaaatcc

SEQ ID NO: 1144222 - DNA, 25 bp, Homo sapien
agatttatctgcaccacctgtcaca

SEQ ID NO: 1144223 - DNA, 25 bp, Homo sapien
ctcttttgggtactattttcatctt

SEQ ID NO: 1144224 - DNA, 25 bp, Homo sapien
tttcactaactcaaaatcccagaat

SEQ ID NO: 1144225 - DNA, 25 bp, Homo sapien
gacacagccaatagcttttgattgg

SEQ ID NO: 1144226 - DNA, 25 bp, Homo sapien
tcttcatctagttgcaaagttcggg

SEQ ID NO: 1144227 - DNA, 25 bp, Homo sapien
tttcacagtacagtccagcaaagac

SEQ ID NO: 1144228 - DNA, 25 bp, Homo sapien
ttttgattgggagagtaactgacac

SEQ ID NO: 1144229 - DNA, 25 bp, Homo sapien
cagtttgtgtccatacagtgacaga

SEQ ID NO: 1144230 - DNA, 25 bp, Homo sapien
tccatgcatataacaggcagtttgt

SEQ ID NO: 1144231 - DNA, 25 bp, Homo sapien
caggcagtttgtgtccatacagtga

SEQ ID NO: 1144232 - DNA, 25 bp, Homo sapien
agagatgtccatgcatataacaggc

SEQ ID NO: 1144233 - DNA, 25 bp, Homo sapien
ggagccagttgctatgagtgctcca

SEQ ID NO: 1144234 - DNA, 25 bp, Homo sapien
tcatgtgcaaagagagacttgtggc

SEQ ID NO: 1144235 - DNA, 25 bp, Homo sapien
atcagcggagccagttgctatgagt

SEQ ID NO: 1144236 - DNA, 25 bp, Homo sapien
aagagagacttgtggcagtccccaa

SEQ ID NO: 1144237 - DNA, 25 bp, Homo sapien
tctgtatgtgttcaaatttgtctgc

SEQ ID NO: 1144238 - DNA, 25 bp, Homo sapien
tgcatcccactgtttaatcttatga

SEQ ID NO: 1144239 - DNA, 25 bp, Homo sapien
aatcttatgatcttttccggcagtg

SEQ ID NO: 1144240 - DNA, 25 bp, Homo sapien
aagaggtgagacttgggtacaaact

SEQ ID NO: 1144241 - DNA, 25 bp, Homo sapien
ggcttacagccaaacaccatatttc

SEQ ID NO: 1144242 - DNA, 25 bp, Homo sapien
ttgtcatgggacgatgatacaacat

SEQ ID NO: 1144243 - DNA, 25 bp, Homo sapien
tacaacatagtctccactggggctt

SEQ ID NO: 1144244 - DNA, 25 bp, Homo sapien
gatttgtcatgggacgatgatacaa

SEQ ID NO: 1144245 - DNA, 25 bp, Homo sapien
ctggttggtcttctttggccacact

SEQ ID NO: 1144246 - DNA, 25 bp, Homo sapien
actctcctcatattctgcttctctt

SEQ ID NO: 1144247 - DNA, 25 bp, Homo sapien
tgctggttggtcttctttggccaca

SEQ ID NO: 1144248 - DNA, 25 bp, Homo sapien
tggccacactctcctcatattctgc

SEQ ID NO: 1144249 - DNA, 25 bp, Homo sapien
aagaaatccttgaataacactgttg

SEQ ID NO: 1144250 - DNA, 25 bp, Homo sapien
aacaaagaaatccttgaataacact

SEQ ID NO: 1144251 - DNA, 25 bp, Homo sapien
ataacactgttgactgttgagttaa

SEQ ID NO: 1144252 - DNA, 25 bp, Homo sapien
taacactgttgactgttgagttaaa

SEQ ID NO: 1144253 - DNA, 25 bp, Homo sapien
aagtaactgtcaccttgagtctctc

SEQ ID NO: 1144254 - DNA, 25 bp, Homo sapien
taaagtaactgtcaccttgagtctc

SEQ ID NO: 1144255 - DNA, 25 bp, Homo sapien
agtaaagtaactgtcaccttgagtc

SEQ ID NO: 1144256 - DNA, 25 bp, Homo sapien
tccagtaaagtaactgtcaccttga

SEQ ID NO: 1144257 - DNA, 25 bp, Homo sapien
cggtacaactcaatagcctccataa

SEQ ID NO: 1144258 - DNA, 25 bp, Homo sapien
agtttcttctcggtacaactcaata

SEQ ID NO: 1144259 - DNA, 25 bp, Homo sapien
tctcggtacaactcaatagcctcca

SEQ ID NO: 1144260 - DNA, 25 bp, Homo sapien
tcttctcggtacaactcaatagcct

SEQ ID NO: 1144261 - DNA, 25 bp, Homo sapien
tgagatactgccataagccattagg

SEQ ID NO: 1144262 - DNA, 25 bp, Homo sapien
gacttgatccctttaaaaatctcta

SEQ ID NO: 1144263 - DNA, 25 bp, Homo sapien
aaatctctaatacataagctgaagg

SEQ ID NO: 1144264 - DNA, 25 bp, Homo sapien
ctcgacttgatccctttaaaaatct

SEQ ID NO: 1144265 - DNA, 25 bp, Homo sapien
aaaatctctaatacataagctgaag

SEQ ID NO: 1144266 - DNA, 25 bp, Homo sapien
aaattgtgcgcaaggactcactcac

SEQ ID NO: 1144267 - DNA, 25 bp, Homo sapien
tattaggctgctaggactcttaaga

SEQ ID NO: 1144268 - DNA, 25 bp, Homo sapien
taatcaccctggaaagtaatttggc

SEQ ID NO: 1144269 - DNA, 25 bp, Homo sapien
tatttcccgttcagataagcacttc

SEQ ID NO: 1144270 - DNA, 25 bp, Homo sapien
gaaaggcagcacaagtagagattct

SEQ ID NO: 1144271 - DNA, 25 bp, Homo sapien
aaggcagcacaagtagagattcttc

SEQ ID NO: 1144272 - DNA, 25 bp, Homo sapien
ggcagcacaagtagagattcttcca

SEQ ID NO: 1144273 - DNA, 25 bp, Homo sapien
aggcagcacaagtagagattcttcc

SEQ ID NO: 1144274 - DNA, 25 bp, Homo sapien
gcccagctgaatgaattcgttaaag

SEQ ID NO: 1144275 - DNA, 25 bp, Homo sapien
gctgaatgaattcgttaaagagttt

SEQ ID NO: 1144276 - DNA, 25 bp, Homo sapien
aagaggcaccggcatataagttcaa

SEQ ID NO: 1144277 - DNA, 25 bp, Homo sapien
tataagttcaacatcagagcccagc

SEQ ID NO: 1144278 - DNA, 25 bp, Homo sapien
ctgaacagacatggtattctttgga

SEQ ID NO: 1144279 - DNA, 25 bp, Homo sapien
gcagttctgctgaacagacatggta

SEQ ID NO: 1144280 - DNA, 25 bp, Homo sapien
tctgctgaacagacatggtattctt

SEQ ID NO: 1144281 - DNA, 25 bp, Homo sapien
tgaagcagttctgctgaacagacat

SEQ ID NO: 1144282 - DNA, 25 bp, Homo sapien
ggcacaagcatttgattgctagtga

SEQ ID NO: 1144283 - DNA, 25 bp, Homo sapien
ccggacttggctgacttttgaaata

SEQ ID NO: 1144284 - DNA, 25 bp, Homo sapien
caagcatttgattgctagtgatctg

SEQ ID NO: 1144285 - DNA, 25 bp, Homo sapien
catttgattgctagtgatctgtcca

SEQ ID NO: 1144286 - DNA, 25 bp, Homo sapien
cagccatattgaagccgataacatc

SEQ ID NO: 1144287 - DNA, 25 bp, Homo sapien
gcctcgcattccctcttgagataat

SEQ ID NO: 1144288 - DNA, 25 bp, Homo sapien
ttgagataatcaagaccagccatat

SEQ ID NO: 1144289 - DNA, 25 bp, Homo sapien
tttttgcctcgcattccctcttgag

SEQ ID NO: 1144290 - DNA, 25 bp, Homo sapien
tagtagcatcagcaaaaaacataac

SEQ ID NO: 1144291 - DNA, 25 bp, Homo sapien
cttctcttccaagtggctagtagca

SEQ ID NO: 1144292 - DNA, 25 bp, Homo sapien
tcttctcttccaagtggctagtagc

SEQ ID NO: 1144293 - DNA, 25 bp, Homo sapien
gcaaggctcaagctttgagagcaca

SEQ ID NO: 1144294 - DNA, 25 bp, Homo sapien
ggagccagcccataatctcatgttg

SEQ ID NO: 1144295 - DNA, 25 bp, Homo sapien
taaagggaacaacaagcttgagctg

SEQ ID NO: 1144296 - DNA, 25 bp, Homo sapien
ttaagtccaagaaatggagccagcc

SEQ ID NO: 1144297 - DNA, 25 bp, Homo sapien
tttttatggccaaagggcaatcaat

SEQ ID NO: 1144298 - DNA, 25 bp, Homo sapien
caatcaattatgcacctggttgtct

SEQ ID NO: 1144299 - DNA, 25 bp, Homo sapien
tgcagaaggttaagtctgaggacgc

SEQ ID NO: 1144300 - DNA, 25 bp, Homo sapien
tatacagacataacttgcagaaggt

SEQ ID NO: 1144301 - DNA, 25 bp, Homo sapien
cacacacgagtgtattaattcctca

SEQ ID NO: 1144302 - DNA, 25 bp, Homo sapien
cagtcaataacaggctactagtact

SEQ ID NO: 1144303 - DNA, 25 bp, Homo sapien
tataatacatcagtcaggctcccag

SEQ ID NO: 1144304 - DNA, 25 bp, Homo sapien
aatacatcagtcaggctcccagtca

SEQ ID NO: 1144305 - DNA, 25 bp, Homo sapien
agctcaagtgttgtgcgtatgcact

SEQ ID NO: 1144306 - DNA, 25 bp, Homo sapien
gatcatacatggtgcaattcacagt

SEQ ID NO: 1144307 - DNA, 25 bp, Homo sapien
ctgcacgcagcccagatattttcaa

SEQ ID NO: 1144308 - DNA, 25 bp, Homo sapien
aaagtagttatatcatgaatgcaca

SEQ ID NO: 1144309 - DNA, 25 bp, Homo sapien
tatacatctcgaatgccctcctgga

SEQ ID NO: 1144310 - DNA, 25 bp, Homo sapien
tccttggaaagcacctagaatgcat

SEQ ID NO: 1144311 - DNA, 25 bp, Homo sapien
tagaatgcattatcctgcctgccta

SEQ ID NO: 1144312 - DNA, 25 bp, Homo sapien
tccctggtggcaggaatagctgcct

SEQ ID NO: 1144313 - DNA, 25 bp, Homo sapien
cttaatgactagaaatttgcctggc

SEQ ID NO: 1144314 - DNA, 25 bp, Homo sapien
agccaatggctgactaaggcaatga

SEQ ID NO: 1144315 - DNA, 25 bp, Homo sapien
tccctagcactatcaggcttttgag

SEQ ID NO: 1144316 - DNA, 25 bp, Homo sapien
cttggctaggttctgtacatgtcac

SEQ ID NO: 1144317 - DNA, 25 bp, Homo sapien
gtcagaaacctataagccacctggc

SEQ ID NO: 1144318 - DNA, 25 bp, Homo sapien
tcatgtctcgtaaagtttctccaca

SEQ ID NO: 1144319 - DNA, 25 bp, Homo sapien
ccctcttcttatagtcagaaaccta

SEQ ID NO: 1144320 - DNA, 25 bp, Homo sapien
ccacattaggtacagtaagtaataa

SEQ ID NO: 1144321 - DNA, 25 bp, Homo sapien
gaagctgaagatagctgatgattca

SEQ ID NO: 1144322 - DNA, 25 bp, Homo sapien
cagatattccgaggtgaaggagaaa

SEQ ID NO: 1144323 - DNA, 25 bp, Homo sapien
ttcaaagatgccgaaacgcctgcct

SEQ ID NO: 1144324 - DNA, 25 bp, Homo sapien
taaaggaacttgtgtcagatagcac

SEQ ID NO: 1144325 - DNA, 25 bp, Homo sapien
tataaaggttgggtattcactgaat

SEQ ID NO: 1144326 - DNA, 25 bp, Homo sapien
ggctatctacggaatatcagacaga

SEQ ID NO: 1144327 - DNA, 25 bp, Homo sapien
catagtatatgtgcagtaacttcag

SEQ ID NO: 1144328 - DNA, 25 bp, Homo sapien
tctttgaaagcacctagccaaatct

SEQ ID NO: 1144329 - DNA, 25 bp, Homo sapien
tctcattcaacagtgaaattttgtc

SEQ ID NO: 1144330 - DNA, 25 bp, Homo sapien
tttggagttatacaacagaattcct

SEQ ID NO: 1144331 - DNA, 25 bp, Homo sapien
gatatgtagataagccctgatccag

SEQ ID NO: 1144332 - DNA, 25 bp, Homo sapien
cagctagtaggtatgaagttatttt

SEQ ID NO: 1144333 - DNA, 25 bp, Homo sapien
cacttttgtacgagtggtgagtcca

SEQ ID NO: 1144334 - DNA, 25 bp, Homo sapien
tcatagctataatgcataacactct

SEQ ID NO: 1144335 - DNA, 25 bp, Homo sapien
ccatggaacaacactaaacgtctag

SEQ ID NO: 1144336 - DNA, 25 bp, Homo sapien
caggagatgcagtccaagttgccac

SEQ ID NO: 1144337 - DNA, 25 bp, Homo sapien
gagggtctccagtagaagtgtcaat

SEQ ID NO: 1144338 - DNA, 25 bp, Homo sapien
gaccacctgatctaaagaaccctct

SEQ ID NO: 1144339 - DNA, 25 bp, Homo sapien
cacgtcatctacataggccttctgg

SEQ ID NO: 1144340 - DNA, 25 bp, Homo sapien
taaaaatagggttctgagatgtacc

SEQ ID NO: 1144341 - DNA, 25 bp, Homo sapien
tcaacttgtaggcttcttactgaga

SEQ ID NO: 1144342 - DNA, 25 bp, Homo sapien
ctgcaacatcggacttcatccttag

SEQ ID NO: 1144343 - DNA, 25 bp, Homo sapien
catccttagtaaatcttttatcctc

SEQ ID NO: 1144344 - DNA, 25 bp, Homo sapien
tactcaacttgtaggcttcttactg

SEQ ID NO: 1144345 - DNA, 25 bp, Homo sapien
taagagataatatttgcataattat

SEQ ID NO: 1144346 - DNA, 25 bp, Homo sapien
ctaggtcttgcttccaatttctgta

SEQ ID NO: 1144347 - DNA, 25 bp, Homo sapien
tctgtattttcattctcagtgtagg

SEQ ID NO: 1144348 - DNA, 25 bp, Homo sapien
tcagtgtagggttgcccttttttca

SEQ ID NO: 1144349 - DNA, 25 bp, Homo sapien
gctgctcccctgacacaaatgccaa

SEQ ID NO: 1144350 - DNA, 25 bp, Homo sapien
caattatgaccgtcagtaaccagct

SEQ ID NO: 1144351 - DNA, 25 bp, Homo sapien
tcccatttgcacaattatgaccgtc

SEQ ID NO: 1144352 - DNA, 25 bp, Homo sapien
tatgaccgtcagtaaccagctggca

SEQ ID NO: 1144353 - DNA, 25 bp, Homo sapien
ctcccatttgcacaattatgaccgt

SEQ ID NO: 1144354 - DNA, 25 bp, Homo sapien
tccttaaactctgtgccttacccat

SEQ ID NO: 1144355 - DNA, 25 bp, Homo sapien
ttccttaaactctgtgccttaccca

SEQ ID NO: 1144356 - DNA, 25 bp, Homo sapien
ccatctccctgcaatatcgaaattt

SEQ ID NO: 1144357 - DNA, 25 bp, Homo sapien
tgatcttttagctaaaggggaccca

SEQ ID NO: 1144358 - DNA, 25 bp, Homo sapien
tcagaatgtggtttaaattctttga

SEQ ID NO: 1144359 - DNA, 25 bp, Homo sapien
caatatcgaaattttgcccacttca

SEQ ID NO: 1144360 - DNA, 25 bp, Homo sapien
tatggaagaaaccttgacaacgtga

SEQ ID NO: 1144361 - DNA, 25 bp, Homo sapien
tgaattgccaccctctatggaagaa

SEQ ID NO: 1144362 - DNA, 25 bp, Homo sapien
gaaaccttgacaacgtgagtacaac

SEQ ID NO: 1144363 - DNA, 25 bp, Homo sapien
acgtgagtacaactaagcaacagga

SEQ ID NO: 1144364 - DNA, 25 bp, Homo sapien
gtgccaacccatccctgatatttca

SEQ ID NO: 1144365 - DNA, 25 bp, Homo sapien
aagtgccaacccatccctgatattt

SEQ ID NO: 1144366 - DNA, 25 bp, Homo sapien
tgccaacccatccctgatatttcat

SEQ ID NO: 1144367 - DNA, 25 bp, Homo sapien
agtgccaacccatccctgatatttc

SEQ ID NO: 1144368 - DNA, 25 bp, Homo sapien
gctattattgctaccaggagtggcc

SEQ ID NO: 1144369 - DNA, 25 bp, Homo sapien
ggctattattgctaccaggagtggc

SEQ ID NO: 1144370 - DNA, 25 bp, Homo sapien
tattattgctaccaggagtggccaa

SEQ ID NO: 1144371 - DNA, 25 bp, Homo sapien
ctattattgctaccaggagtggcca

SEQ ID NO: 1144372 - DNA, 25 bp, Homo sapien
ctgacaagtcggatgcctgccagac

SEQ ID NO: 1144373 - DNA, 25 bp, Homo sapien
tggttggcaggcctcccatgagcat

SEQ ID NO: 1144374 - DNA, 25 bp, Homo sapien
gggagaaacagataccacttactct

SEQ ID NO: 1144375 - DNA, 25 bp, Homo sapien
aaatatcaacagtctacccccaggc

SEQ ID NO: 1144376 - DNA, 25 bp, Homo sapien
tattctcaacatcataaccatttca

SEQ ID NO: 1144377 - DNA, 25 bp, Homo sapien
gaaccaacagaagggcagcttcact

SEQ ID NO: 1144378 - DNA, 25 bp, Homo sapien
tccagtgaaggcttggtttgcagat

SEQ ID NO: 1144379 - DNA, 25 bp, Homo sapien
actttccttacggtgtccagtgaag

SEQ ID NO: 1144380 - DNA, 25 bp, Homo sapien
ggagcaaactgaaccaacagaaggg

SEQ ID NO: 1144381 - DNA, 25 bp, Homo sapien
tctgctgcagtgtttggtaataagt

SEQ ID NO: 1144382 - DNA, 25 bp, Homo sapien
tcagccccgtctgattcgtgcacac

SEQ ID NO: 1144383 - DNA, 25 bp, Homo sapien
gtttcctgtgattttggtctcctca

SEQ ID NO: 1144384 - DNA, 25 bp, Homo sapien
tcactgattccactctcagccccgt

SEQ ID NO: 1144385 - DNA, 25 bp, Homo sapien
tttttctgctcttaaccaaggaatc

SEQ ID NO: 1144386 - DNA, 25 bp, Homo sapien
aaaagccccatcgttcttctcaact

SEQ ID NO: 1144387 - DNA, 25 bp, Homo sapien
catcaacactagtcagaattacatc

SEQ ID NO: 1144388 - DNA, 25 bp, Homo sapien
tcaatccatcaacactagtcagaat

SEQ ID NO: 1144389 - DNA, 25 bp, Homo sapien
agaaaatgaccctatcctcaaaagc

SEQ ID NO: 1144390 - DNA, 25 bp, Homo sapien
ggctgaatcttgtaaaggcaccaac

SEQ ID NO: 1144391 - DNA, 25 bp, Homo sapien
tggggctgaatcttgtaaaggcacc

SEQ ID NO: 1144392 - DNA, 25 bp, Homo sapien
catagctgagtacttgaaagcacag

SEQ ID NO: 1144393 - DNA, 25 bp, Homo sapien
taaaggcaccaacatagctgagtac

SEQ ID NO: 1144394 - DNA, 25 bp, Homo sapien
catttatggtcaagatttcttccct

SEQ ID NO: 1144395 - DNA, 25 bp, Homo sapien
tttatggtcaagatttcttccctca

SEQ ID NO: 1144396 - DNA, 25 bp, Homo sapien
atttatggtcaagatttcttccctc

SEQ ID NO: 1144397 - DNA, 25 bp, Homo sapien
ttatggtcaagatttcttccctcaa

SEQ ID NO: 1144398 - DNA, 25 bp, Homo sapien
tcccatcaggatctgtgtttagtgg

SEQ ID NO: 1144399 - DNA, 25 bp, Homo sapien
gtttagtggcttcttgtggctgctg

SEQ ID NO: 1144400 - DNA, 25 bp, Homo sapien
ttaagcactataccaggttccacat

SEQ ID NO: 1144401 - DNA, 25 bp, Homo sapien
ctgctgggaagatttggaagcccca

SEQ ID NO: 1144402 - DNA, 25 bp, Homo sapien
aatcaacaacggcttgatggggata

SEQ ID NO: 1144403 - DNA, 25 bp, Homo sapien
aaatcaacaacggcttgatggggat

SEQ ID NO: 1144404 - DNA, 25 bp, Homo sapien
gaaaatcaacaacggcttgatgggg

SEQ ID NO: 1144405 - DNA, 25 bp, Homo sapien
aagaaaatcaacaacggcttgatgg

SEQ ID NO: 1144406 - DNA, 25 bp, Homo sapien
gctgataattccatgcatagacaca

SEQ ID NO: 1144407 - DNA, 25 bp, Homo sapien
taattccatgcatagacacactggg

SEQ ID NO: 1144408 - DNA, 25 bp, Homo sapien
gataattccatgcatagacacactg

SEQ ID NO: 1144409 - DNA, 25 bp, Homo sapien
ctgctgctgataattccatgcatag

SEQ ID NO: 1144410 - DNA, 25 bp, Homo sapien
tattagaagaaagcttcacactgag

SEQ ID NO: 1144411 - DNA, 25 bp, Homo sapien
catgccaaatggatttccattgagc

SEQ ID NO: 1144412 - DNA, 25 bp, Homo sapien
gagcactgtgtagaccttcttgctt

SEQ ID NO: 1144413 - DNA, 25 bp, Homo sapien
ttgtttagcaaggactgggattgaa

SEQ ID NO: 1144414 - DNA, 25 bp, Homo sapien
tgacctgaactctgaacccttccag

SEQ ID NO: 1144415 - DNA, 25 bp, Homo sapien
gttgctccagtgacctgaactctga

SEQ ID NO: 1144416 - DNA, 25 bp, Homo sapien
tccagtgacctgaactctgaaccct

SEQ ID NO: 1144417 - DNA, 25 bp, Homo sapien
tgctccagtgacctgaactctgaac

SEQ ID NO: 1144418 - DNA, 25 bp, Homo sapien
ctccatgggagttcttcggaaggac

SEQ ID NO: 1144419 - DNA, 25 bp, Homo sapien
gtcccactaccatctgctgggctgt

SEQ ID NO: 1144420 - DNA, 25 bp, Homo sapien
gacccatctggtagagggcatggta

SEQ ID NO: 1144421 - DNA, 25 bp, Homo sapien
ggcatggtaactggatgagtcccac

SEQ ID NO: 1144422 - DNA, 25 bp, Homo sapien
taaatgcagtctgctaagaactggg

SEQ ID NO: 1144423 - DNA, 25 bp, Homo sapien
ctaaatgcagtctgctaagaactgg

SEQ ID NO: 1144424 - DNA, 25 bp, Homo sapien
ataatcggaagccataatcagtgac

SEQ ID NO: 1144425 - DNA, 25 bp, Homo sapien
ttacttaaataatcggaagccataa

SEQ ID NO: 1144426 - DNA, 25 bp, Homo sapien
aaataatcggaagccataatcagtg

SEQ ID NO: 1144427 - DNA, 25 bp, Homo sapien
ttaaataatcggaagccataatcag

SEQ ID NO: 1144428 - DNA, 25 bp, Homo sapien
aacacatatcatggggggttattgt

SEQ ID NO: 1144429 - DNA, 25 bp, Homo sapien
cacatatcatggggggttattgtac

SEQ ID NO: 1144430 - DNA, 25 bp, Homo sapien
acatatcatggggggttattgtaca

SEQ ID NO: 1144431 - DNA, 25 bp, Homo sapien
atatcatggggggttattgtacata

SEQ ID NO: 1144432 - DNA, 25 bp, Homo sapien
gaaagtctccacataccaagctata

SEQ ID NO: 1144433 - DNA, 25 bp, Homo sapien
ctggaaagtctccacataccaagct

SEQ ID NO: 1144434 - DNA, 25 bp, Homo sapien
cacataccaagctataaatattcct

SEQ ID NO: 1144435 - DNA, 25 bp, Homo sapien
gtctccacataccaagctataaata

SEQ ID NO: 1144436 - DNA, 25 bp, Homo sapien
gaagataatgcccttatccagctga

SEQ ID NO: 1144437 - DNA, 25 bp, Homo sapien
tatctctctagtttaaattgccagc

SEQ ID NO: 1144438 - DNA, 25 bp, Homo sapien
tgatgtgttgaaagcagccctgcga

SEQ ID NO: 1144439 - DNA, 25 bp, Homo sapien
tcatcacaatagagactggctgctg

SEQ ID NO: 1144440 - DNA, 25 bp, Homo sapien
gagtggaagctaggaccatttattt

SEQ ID NO: 1144441 - DNA, 25 bp, Homo sapien
ctagtctacctagggattttcactc

SEQ ID NO: 1144442 - DNA, 25 bp, Homo sapien
taaagagccaacttctgactgtcaa

SEQ ID NO: 1144443 - DNA, 25 bp, Homo sapien
ccatttggttgaaaatagaatcaaa

SEQ ID NO: 1144444 - DNA, 25 bp, Homo sapien
aaatgtgtaatgttgctcgtatgtg

SEQ ID NO: 1144445 - DNA, 25 bp, Homo sapien
gttgtgagactctaggatattattt

SEQ ID NO: 1144446 - DNA, 25 bp, Homo sapien
tgattgttcaaaaggagcttcataa

SEQ ID NO: 1144447 - DNA, 25 bp, Homo sapien
tgttcaaaaggagcttcataaataa

SEQ ID NO: 1144448 - DNA, 25 bp, Homo sapien
gggagagcccacgaaccacaatatt

SEQ ID NO: 1144449 - DNA, 25 bp, Homo sapien
tattggaacactaaggcagtttgtg

SEQ ID NO: 1144450 - DNA, 25 bp, Homo sapien
gagagcccacgaaccacaatattta

SEQ ID NO: 1144451 - DNA, 25 bp, Homo sapien
gggctggcttcgttacctaatgaag

SEQ ID NO: 1144452 - DNA, 25 bp, Homo sapien
tcaagcttcaaaggggaggtatagg

SEQ ID NO: 1144453 - DNA, 25 bp, Homo sapien
ggtataggaatgaagactgctgctt

SEQ ID NO: 1144454 - DNA, 25 bp, Homo sapien
caaaggggaggtataggaatgaaga

SEQ ID NO: 1144455 - DNA, 25 bp, Homo sapien
ggggaggtataggaatgaagactgc

SEQ ID NO: 1144456 - DNA, 25 bp, Homo sapien
tcctcaacagtaaactggatgttca

SEQ ID NO: 1144457 - DNA, 25 bp, Homo sapien
tcaatatagtatcttgtgtagcttc

SEQ ID NO: 1144458 - DNA, 25 bp, Homo sapien
catcatcctcaacagtaaactggat

SEQ ID NO: 1144459 - DNA, 25 bp, Homo sapien
tatagtatcttgtgtagcttctgta

SEQ ID NO: 1144460 - DNA, 25 bp, Homo sapien
agtgatgtgggatgtccaatggaac

SEQ ID NO: 1144461 - DNA, 25 bp, Homo sapien
cagtgatgtgggatgtccaatggaa

SEQ ID NO: 1144462 - DNA, 25 bp, Homo sapien
gaattcatccacgattttggatcca

SEQ ID NO: 1144463 - DNA, 25 bp, Homo sapien
ttcatccacgattttggatccatga

SEQ ID NO: 1144464 - DNA, 25 bp, Homo sapien
tgaattcatccacgattttggatcc

SEQ ID NO: 1144465 - DNA, 25 bp, Homo sapien
attcatccacgattttggatccatg

SEQ ID NO: 1144466 - DNA, 25 bp, Homo sapien
caccttggactcttcatgcactggg

SEQ ID NO: 1144467 - DNA, 25 bp, Homo sapien
gagcctcatcatggtgccacagttg

SEQ ID NO: 1144468 - DNA, 25 bp, Homo sapien
caaagcctctgaatgcaccttggac

SEQ ID NO: 1144469 - DNA, 25 bp, Homo sapien
ccaggtattcctcctctaggttgag

SEQ ID NO: 1144470 - DNA, 25 bp, Homo sapien
tggtggtccacggtgtgtcccatac

SEQ ID NO: 1144471 - DNA, 25 bp, Homo sapien
ctggtggtccacggtgtgtcccata

SEQ ID NO: 1144472 - DNA, 25 bp, Homo sapien
ttatttggggctccaagagagggtc

SEQ ID NO: 1144473 - DNA, 25 bp, Homo sapien
agagagggtcttgggggccacctga

SEQ ID NO: 1144474 - DNA, 25 bp, Homo sapien
cctgaaattgggaaatttctcatag

SEQ ID NO: 1144475 - DNA, 25 bp, Homo sapien
ctgagccctgaaattgggaaatttc

SEQ ID NO: 1144476 - DNA, 25 bp, Homo sapien
cttctgactgtaaagggaactccaa

SEQ ID NO: 1144477 - DNA, 25 bp, Homo sapien
tctgactgtaaagggaactccaaga

SEQ ID NO: 1144478 - DNA, 25 bp, Homo sapien
ttggagctgtatgaggagtaacaat

SEQ ID NO: 1144479 - DNA, 25 bp, Homo sapien
taacaattgtgagaactgtgtgctc

SEQ ID NO: 1144480 - DNA, 25 bp, Homo sapien
caaagcgcaggaggtgttacactta

SEQ ID NO: 1144481 - DNA, 25 bp, Homo sapien
ccagaaacggcaaagcgcaggaggt

SEQ ID NO: 1144482 - DNA, 25 bp, Homo sapien
caggaggtgttacacttagctttct

SEQ ID NO: 1144483 - DNA, 25 bp, Homo sapien
aacggcaaagcgcaggaggtgttac

SEQ ID NO: 1144484 - DNA, 25 bp, Homo sapien
tgccatacatgaccaggtttcaaag

SEQ ID NO: 1144485 - DNA, 25 bp, Homo sapien
gctgctgtgtgccatacatgaccag

SEQ ID NO: 1144486 - DNA, 25 bp, Homo sapien
gctgtgtgccatacatgaccaggtt

SEQ ID NO: 1144487 - DNA, 25 bp, Homo sapien
catgaccaggtttcaaagcctccat

SEQ ID NO: 1144488 - DNA, 25 bp, Homo sapien
ggttgctaagtgaatgacctttgtg

SEQ ID NO: 1144489 - DNA, 25 bp, Homo sapien
tcaacggtaggagtggttgctaagt

SEQ ID NO: 1144490 - DNA, 25 bp, Homo sapien
ctctgcttctcatgtcgtgggtcaa

SEQ ID NO: 1144491 - DNA, 25 bp, Homo sapien
ctcatgtcgtgggtcaacggtagga

SEQ ID NO: 1144492 - DNA, 25 bp, Homo sapien
ttctagcagaaagagggaatgtgtt

SEQ ID NO: 1144493 - DNA, 25 bp, Homo sapien
ttttcttttctagcagaaagaggga

SEQ ID NO: 1144494 - DNA, 25 bp, Homo sapien
cagaaagagggaatgtgttagcaga

SEQ ID NO: 1144495 - DNA, 25 bp, Homo sapien
agggaattaaagatggtggcagttt

SEQ ID NO: 1144496 - DNA, 25 bp, Homo sapien
tagcaacggaagtgtgctgggccca

SEQ ID NO: 1144497 - DNA, 25 bp, Homo sapien
gaaggtgtaattccgacaagcagag

SEQ ID NO: 1144498 - DNA, 25 bp, Homo sapien
tgatcaaaaagtatgcaaacactga

SEQ ID NO: 1144499 - DNA, 25 bp, Homo sapien
tagttaaggtactttagagtcctgc

SEQ ID NO: 1144500 - DNA, 25 bp, Homo sapien
tgaaggattttttaagtgctgttca

SEQ ID NO: 1144501 - DNA, 25 bp, Homo sapien
ggattttttaagtgctgttcatcca

SEQ ID NO: 1144502 - DNA, 25 bp, Homo sapien
aaggattttttaagtgctgttcatc

SEQ ID NO: 1144503 - DNA, 25 bp, Homo sapien
gattttttaagtgctgttcatccat

SEQ ID NO: 1144504 - DNA, 25 bp, Homo sapien
tggagagggcctctttgtcggcacc

SEQ ID NO: 1144505 - DNA, 25 bp, Homo sapien
tacatgcttcttgtgaaaagggagc

SEQ ID NO: 1144506 - DNA, 25 bp, Homo sapien
gaatggccttgcaattggaaccagg

SEQ ID NO: 1144507 - DNA, 25 bp, Homo sapien
cagttgccagagattgttgcaggaa

SEQ ID NO: 1144508 - DNA, 25 bp, Homo sapien
tgagtactcacagtaagcagcacac

SEQ ID NO: 1144509 - DNA, 25 bp, Homo sapien
tatagctcacaagcagcagagccaa

SEQ ID NO: 1144510 - DNA, 25 bp, Homo sapien
gagaacttgatcttttgaccatcga

SEQ ID NO: 1144511 - DNA, 25 bp, Homo sapien
gagtcctattgctccttgacaagag

SEQ ID NO: 1144512 - DNA, 25 bp, Homo sapien
caccatttgtgaatctggttgagca

SEQ ID NO: 1144513 - DNA, 25 bp, Homo sapien
accatttgtgaatctggttgagcat

SEQ ID NO: 1144514 - DNA, 25 bp, Homo sapien
cataatccaccttcttgattccttc

SEQ ID NO: 1144515 - DNA, 25 bp, Homo sapien
ataatccaccttcttgattccttca

SEQ ID NO: 1144516 - DNA, 25 bp, Homo sapien
taatccaccttcttgattccttcat

SEQ ID NO: 1144517 - DNA, 25 bp, Homo sapien
actgaaacctcttctacaataataa

SEQ ID NO: 1144518 - DNA, 25 bp, Homo sapien
ctgaaacctcttctacaataataat

SEQ ID NO: 1144519 - DNA, 25 bp, Homo sapien
aatagttttgatgagctcagtcaga

SEQ ID NO: 1144520 - DNA, 25 bp, Homo sapien
agtttgaaatattaatgcctctgat

SEQ ID NO: 1144521 - DNA, 25 bp, Homo sapien
agagtttgaaatattaatgcctctg

SEQ ID NO: 1144522 - DNA, 25 bp, Homo sapien
tagttttgatgagctcagtcagaat

SEQ ID NO: 1144523 - DNA, 25 bp, Homo sapien
tccaccagtcttaaggcttttgtca

SEQ ID NO: 1144524 - DNA, 25 bp, Homo sapien
ccaccagtcttaaggcttttgtcat

SEQ ID NO: 1144525 - DNA, 25 bp, Homo sapien
gtccaccagtcttaaggcttttgtc

SEQ ID NO: 1144526 - DNA, 25 bp, Homo sapien
aagtgaaaaactggtgactgtactg

SEQ ID NO: 1144527 - DNA, 25 bp, Homo sapien
gaaaatataactgtttttcatatgg

SEQ ID NO: 1144528 - DNA, 25 bp, Homo sapien
aatccaaggtggtttaatttccatg

SEQ ID NO: 1144529 - DNA, 25 bp, Homo sapien
ggagactggcttgacttggaaaata

SEQ ID NO: 1144530 - DNA, 25 bp, Homo sapien
aacttgctcgttttatcttggatcc

SEQ ID NO: 1144531 - DNA, 25 bp, Homo sapien
gaaaatgcatcttgatcttttgaac

SEQ ID NO: 1144532 - DNA, 25 bp, Homo sapien
ggagcccctgcaatggatttgccat

SEQ ID NO: 1144533 - DNA, 25 bp, Homo sapien
tcttttgaacttgctcgttttatct

SEQ ID NO: 1144534 - DNA, 25 bp, Homo sapien
caaatctccattgtcccgaagcaca

SEQ ID NO: 1144535 - DNA, 25 bp, Homo sapien
ccattgtcccgaagcacatatttaa

SEQ ID NO: 1144536 - DNA, 25 bp, Homo sapien
tgacactgacagattctcatgctga

SEQ ID NO: 1144537 - DNA, 25 bp, Homo sapien
ggctccatagctgaaccccaaatct

SEQ ID NO: 1144538 - DNA, 25 bp, Homo sapien
gtcttcttttatttcgttgagcagt

SEQ ID NO: 1144539 - DNA, 25 bp, Homo sapien
cttcttttatttcgttgagcagtgt

SEQ ID NO: 1144540 - DNA, 25 bp, Homo sapien
gagttggctctctctttgtctgttg

SEQ ID NO: 1144541 - DNA, 25 bp, Homo sapien
tgataagtatgtgaggcgaaggata

SEQ ID NO: 1144542 - DNA, 25 bp, Homo sapien
gaaaatatattacaacgtaatgata

SEQ ID NO: 1144543 - DNA, 25 bp, Homo sapien
attacaacgtaatgataagtatgtg

SEQ ID NO: 1144544 - DNA, 25 bp, Homo sapien
ataagtatgtgaggcgaaggatatg

SEQ ID NO: 1144545 - DNA, 25 bp, Homo sapien
ctgatttgcgcagcgaaagaagcat

SEQ ID NO: 1144546 - DNA, 25 bp, Homo sapien
aaaaacccggtagagctgatttgcg

SEQ ID NO: 1144547 - DNA, 25 bp, Homo sapien
taattgaattccttgcgggtaagag

SEQ ID NO: 1144548 - DNA, 25 bp, Homo sapien
tgattgaatgagtctcctctccggg

SEQ ID NO: 1144549 - DNA, 25 bp, Homo sapien
cttgtggtaaactaatatctgtggc

SEQ ID NO: 1144550 - DNA, 25 bp, Homo sapien
tagcacatagctgagtggacacgca

SEQ ID NO: 1144551 - DNA, 25 bp, Homo sapien
gacacgcaggtttcctagcctggag

SEQ ID NO: 1144552 - DNA, 25 bp, Homo sapien
ggatcttacaagagtagccttgtgg

SEQ ID NO: 1144553 - DNA, 25 bp, Homo sapien
tgtgagagactgtatgactgtgtat

SEQ ID NO: 1144554 - DNA, 25 bp, Homo sapien
gtccacaggtggaatcgcttagcat

SEQ ID NO: 1144555 - DNA, 25 bp, Homo sapien
agtgttgtttttgatccttctggag

SEQ ID NO: 1144556 - DNA, 25 bp, Homo sapien
gtatatgtccacaggtggaatcgct

SEQ ID NO: 1144557 - DNA, 25 bp, Homo sapien
tgaaatgactcacccctgcaaggga

SEQ ID NO: 1144558 - DNA, 25 bp, Homo sapien
taataggtggttggcaagaactctc

SEQ ID NO: 1144559 - DNA, 25 bp, Homo sapien
catgtggaacacgttaatggcatac

SEQ ID NO: 1144560 - DNA, 25 bp, Homo sapien
taataaaggcacaatcgcaatcagc

SEQ ID NO: 1144561 - DNA, 25 bp, Homo sapien
gatacggcctatgttgtcaatggag

SEQ ID NO: 1144562 - DNA, 25 bp, Homo sapien
aaccggagaggtgattacagccaaa

SEQ ID NO: 1144563 - DNA, 25 bp, Homo sapien
cattctgttggtttggctagtgagc

SEQ ID NO: 1144564 - DNA, 25 bp, Homo sapien
tcaatggagctaacagggaaaaaat

SEQ ID NO: 1144565 - DNA, 25 bp, Homo sapien
ctgttattcccactacctgaaattc

SEQ ID NO: 1144566 - DNA, 25 bp, Homo sapien
atcactgttattcccactacctgaa

SEQ ID NO: 1144567 - DNA, 25 bp, Homo sapien
taatcactgttattcccactacctg

SEQ ID NO: 1144568 - DNA, 25 bp, Homo sapien
cactgttattcccactacctgaaat

SEQ ID NO: 1144569 - DNA, 25 bp, Homo sapien
tctcctctacctttacataatctaa

SEQ ID NO: 1144570 - DNA, 25 bp, Homo sapien
ttacataatctaaactctgacatac

SEQ ID NO: 1144571 - DNA, 25 bp, Homo sapien
ctacctttacataatctaaactctg

SEQ ID NO: 1144572 - DNA, 25 bp, Homo sapien
ttctcctctacctttacataatcta

SEQ ID NO: 1144573 - DNA, 25 bp, Homo sapien
ttgctcctggtacagacagggctgc

SEQ ID NO: 1144574 - DNA, 25 bp, Homo sapien
aaagatttcgggtcagacctcgcca

SEQ ID NO: 1144575 - DNA, 25 bp, Homo sapien
cagttgaaacccctgaaagatttcg

SEQ ID NO: 1144576 - DNA, 25 bp, Homo sapien
gacctcgccactcagtttgacacag

SEQ ID NO: 1144577 - DNA, 25 bp, Homo sapien
cacagctcacagtcatgcaaggaaa

SEQ ID NO: 1144578 - DNA, 25 bp, Homo sapien
tgcagacaacagagacaccagatgt

SEQ ID NO: 1144579 - DNA, 25 bp, Homo sapien
aggaggaggatatctgtctcactac

SEQ ID NO: 1144580 - DNA, 25 bp, Homo sapien
ggaaaccccacttcactgcagacaa

SEQ ID NO: 1144581 - DNA, 25 bp, Homo sapien
tgagcacagcagtcattctgttcct

SEQ ID NO: 1144582 - DNA, 25 bp, Homo sapien
tacagggaccactgcctaagagcac

SEQ ID NO: 1144583 - DNA, 25 bp, Homo sapien
tgcaagtcccgcaacagcagacttg

SEQ ID NO: 1144584 - DNA, 25 bp, Homo sapien
cagacttttggcacacataaggaga

SEQ ID NO: 1144585 - DNA, 25 bp, Homo sapien
gatttcttctgagatacagggacca

SEQ ID NO: 1144586 - DNA, 25 bp, Homo sapien
cctgttgtagggcttttgattagac

SEQ ID NO: 1144587 - DNA, 25 bp, Homo sapien
tttattgactttgtcctgtgcctga

SEQ ID NO: 1144588 - DNA, 25 bp, Homo sapien
ggagttggagcatagtgaactttat

SEQ ID NO: 1144589 - DNA, 25 bp, Homo sapien
ccttctgtgatcctgttgtagggct

SEQ ID NO: 1144590 - DNA, 25 bp, Homo sapien
tcttccttgattattgtcaagtgca

SEQ ID NO: 1144591 - DNA, 25 bp, Homo sapien
ggtccgactctgaccaaattcttca

SEQ ID NO: 1144592 - DNA, 25 bp, Homo sapien
tttcttccttgattattgtcaagtg

SEQ ID NO: 1144593 - DNA, 25 bp, Homo sapien
tggattggtccgactctgaccaaat

SEQ ID NO: 1144594 - DNA, 25 bp, Homo sapien
ggctctcgaaactagagcttcctgg

SEQ ID NO: 1144595 - DNA, 25 bp, Homo sapien
tgcaaaaatgcatggggctctcgaa

SEQ ID NO: 1144596 - DNA, 25 bp, Homo sapien
tcctggtgtgaatcagatgaaacct

SEQ ID NO: 1144597 - DNA, 25 bp, Homo sapien
agatgaaacctgaactgggcggaag

SEQ ID NO: 1144598 - DNA, 25 bp, Homo sapien
tgtaggcacgatttgaggttatgta

SEQ ID NO: 1144599 - DNA, 25 bp, Homo sapien
tacgcattgaggaaatgtaggcacg

SEQ ID NO: 1144600 - DNA, 25 bp, Homo sapien
tgaggttatgtaggcaaccagaagt

SEQ ID NO: 1144601 - DNA, 25 bp, Homo sapien
tatcatcagctgaattgtcattacg

SEQ ID NO: 1144602 - DNA, 25 bp, Homo sapien
ttttgggagaagtgatgatagttac

SEQ ID NO: 1144603 - DNA, 25 bp, Homo sapien
tacttttgggagaagtgatgatagt

SEQ ID NO: 1144604 - DNA, 25 bp, Homo sapien
cttttgggagaagtgatgatagtta

SEQ ID NO: 1144605 - DNA, 25 bp, Homo sapien
ttacttttgggagaagtgatgatag

SEQ ID NO: 1144606 - DNA, 25 bp, Homo sapien
ccggaggctttcaaggtgttgagta

SEQ ID NO: 1144607 - DNA, 25 bp, Homo sapien
gctttcaaggtgttgagtaaataag

SEQ ID NO: 1144608 - DNA, 25 bp, Homo sapien
taggatcctggggtgcaagtcttca

SEQ ID NO: 1144609 - DNA, 25 bp, Homo sapien
tcctggggtgcaagtcttcagtgcc

SEQ ID NO: 1144610 - DNA, 25 bp, Homo sapien
gaactgctttctgaggatatatatt

SEQ ID NO: 1144611 - DNA, 25 bp, Homo sapien
gaggatatatattgtccataaagat

SEQ ID NO: 1144612 - DNA, 25 bp, Homo sapien
atatatattgtccataaagatttga

SEQ ID NO: 1144613 - DNA, 25 bp, Homo sapien
ggatatatattgtccataaagattt

SEQ ID NO: 1144614 - DNA, 25 bp, Homo sapien
gcctttatcatttatagaataactg

SEQ ID NO: 1144615 - DNA, 25 bp, Homo sapien
tgcctttatcatttatagaataact

SEQ ID NO: 1144616 - DNA, 25 bp, Homo sapien
ctgcctttatcatttatagaataac

SEQ ID NO: 1144617 - DNA, 25 bp, Homo sapien
cctttatcatttatagaataactgc

SEQ ID NO: 1144618 - DNA, 25 bp, Homo sapien
ctcttggaaggaggtcttcaccaag

SEQ ID NO: 1144619 - DNA, 25 bp, Homo sapien
tcaccaagtaacctgacttgaccat

SEQ ID NO: 1144620 - DNA, 25 bp, Homo sapien
cattatcagctcctcttggaaggag

SEQ ID NO: 1144621 - DNA, 25 bp, Homo sapien
aggaggtcttcaccaagtaacctga

SEQ ID NO: 1144622 - DNA, 25 bp, Homo sapien
tcaaaggtgtagccaagattgtaca

SEQ ID NO: 1144623 - DNA, 25 bp, Homo sapien
gagccccagttaagtattctgcaac

SEQ ID NO: 1144624 - DNA, 25 bp, Homo sapien
gccccagttaagtattctgcaactc

SEQ ID NO: 1144625 - DNA, 25 bp, Homo sapien
aagggagctcttcttttagggatgt

SEQ ID NO: 1144626 - DNA, 25 bp, Homo sapien
caaaatggcaccagggtgtttctgt

SEQ ID NO: 1144627 - DNA, 25 bp, Homo sapien
gcctttctgaatgcagggaagtgga

SEQ ID NO: 1144628 - DNA, 25 bp, Homo sapien
gggaagtggaataatgcaagcatgt

SEQ ID NO: 1144629 - DNA, 25 bp, Homo sapien
taccggataggaaatagaaggattc

SEQ ID NO: 1144630 - DNA, 25 bp, Homo sapien
gccatattccaatgtacccccagga

SEQ ID NO: 1144631 - DNA, 25 bp, Homo sapien
ggaaaaacagcgcagtttcggtgac

SEQ ID NO: 1144632 - DNA, 25 bp, Homo sapien
ctggaaaaacagcgcagtttcggtg

SEQ ID NO: 1144633 - DNA, 25 bp, Homo sapien
tggaaaaacagcgcagtttcggtga

SEQ ID NO: 1144634 - DNA, 25 bp, Homo sapien
agaatttcagatcccgtttcgccgc

SEQ ID NO: 1144635 - DNA, 25 bp, Homo sapien
ttttcctccacgcacgatgaaaacg

SEQ ID NO: 1144636 - DNA, 25 bp, Homo sapien
cacgcacgatgaaaacgtccaattc

SEQ ID NO: 1144637 - DNA, 25 bp, Homo sapien
aggaactgggattgcatctcttctc

SEQ ID NO: 1144638 - DNA, 25 bp, Homo sapien
caactggatgaaccgattttccgaa

SEQ ID NO: 1144639 - DNA, 25 bp, Homo sapien
gatgacgagtagagttcccttggaa

SEQ ID NO: 1144640 - DNA, 25 bp, Homo sapien
cattattatagacctagcccggagc

SEQ ID NO: 1144641 - DNA, 25 bp, Homo sapien
tagttgccaaggctcaaatgagctg

SEQ ID NO: 1144642 - DNA, 25 bp, Homo sapien
gtgagatgccggagggtctgctggg

SEQ ID NO: 1144643 - DNA, 25 bp, Homo sapien
agggacagggtgttcggcgaacgcg

SEQ ID NO: 1144644 - DNA, 25 bp, Homo sapien
tggtttgtctctgccgtgcacgccc

SEQ ID NO: 1144645 - DNA, 25 bp, Homo sapien
tcggcgaacgcgtagagtgagatgc

SEQ ID NO: 1144646 - DNA, 25 bp, Homo sapien
ctttcattcaaagacgaggcctttt

SEQ ID NO: 1144647 - DNA, 25 bp, Homo sapien
agctggctttagttggcgcccgagc

SEQ ID NO: 1144648 - DNA, 25 bp, Homo sapien
cattcaaagacgaggccttttgctt

SEQ ID NO: 1144649 - DNA, 25 bp, Homo sapien
ttctttccgcgtctggacagagctg

SEQ ID NO: 1144650 - DNA, 25 bp, Homo sapien
gaagctttccagcccggacttctaa

SEQ ID NO: 1144651 - DNA, 25 bp, Homo sapien
aacgctcgcaacttggtttagcggt

SEQ ID NO: 1144652 - DNA, 25 bp, Homo sapien
ttcacacgctgacaagcccggggag

SEQ ID NO: 1144653 - DNA, 25 bp, Homo sapien
tgctggaaggtgctcctgctgaaca

SEQ ID NO: 1144654 - DNA, 25 bp, Homo sapien
tggacttgcagcgtctatgagacca

SEQ ID NO: 1144655 - DNA, 25 bp, Homo sapien
ttccagatctgcaactaaagtgact

SEQ ID NO: 1144656 - DNA, 25 bp, Homo sapien
gaatcgttttctggcattttggaca

SEQ ID NO: 1144657 - DNA, 25 bp, Homo sapien
ggttaacattttgtcagagccccaa

SEQ ID NO: 1144658 - DNA, 25 bp, Homo sapien
cattcgcctgggatgctagcttcct

SEQ ID NO: 1144659 - DNA, 25 bp, Homo sapien
tttgcattcgcctgggatgctagct

SEQ ID NO: 1144660 - DNA, 25 bp, Homo sapien
cctgggatgctagcttcctgacatc

SEQ ID NO: 1144661 - DNA, 25 bp, Homo sapien
gttctttttgcattcgcctgggatg

SEQ ID NO: 1144662 - DNA, 25 bp, Homo sapien
cacactcatccggtggcttttccat

SEQ ID NO: 1144663 - DNA, 25 bp, Homo sapien
cagagttcatgttcgtgctccctgg

SEQ ID NO: 1144664 - DNA, 25 bp, Homo sapien
tggggacctccaagcctgagacaca

SEQ ID NO: 1144665 - DNA, 25 bp, Homo sapien
tggctgaatcacactcatccggtgg

SEQ ID NO: 1144666 - DNA, 25 bp, Homo sapien
tcctggaagcaacgccaaatgctga

SEQ ID NO: 1144667 - DNA, 25 bp, Homo sapien
tttcagcgacgactcctggaagcaa

SEQ ID NO: 1144668 - DNA, 25 bp, Homo sapien
gaagtgggagatcctgcgcctctcc

SEQ ID NO: 1144669 - DNA, 25 bp, Homo sapien
actgaagtgggagatcctgcgcctc

SEQ ID NO: 1144670 - DNA, 25 bp, Homo sapien
tcccaggtatccaataaccttcgct

SEQ ID NO: 1144671 - DNA, 25 bp, Homo sapien
acccctctgtaagcccctgcaggta

SEQ ID NO: 1144672 - DNA, 25 bp, Homo sapien
aggtagcctgtgaaaccccagggct

SEQ ID NO: 1144673 - DNA, 25 bp, Homo sapien
ttccccttccaagactaggcctgga

SEQ ID NO: 1144674 - DNA, 25 bp, Homo sapien
gcggcgctggccttgggcgggcgtt

SEQ ID NO: 1144675 - DNA, 25 bp, Homo sapien
ttgggcgggcgtttccagaaatcca

SEQ ID NO: 1144676 - DNA, 25 bp, Homo sapien
ggcgctggccttgggcgggcgtttc

SEQ ID NO: 1144677 - DNA, 25 bp, Homo sapien
gcgggcgtttccagaaatccactcc

SEQ ID NO: 1144678 - DNA, 25 bp, Homo sapien
aacaatcgcgcaattttgcggcccg

SEQ ID NO: 1144679 - DNA, 25 bp, Homo sapien
tcagcgaacaatcgcgcaattttgc

SEQ ID NO: 1144680 - DNA, 25 bp, Homo sapien
gaagtcagcgaacaatcgcgcaatt

SEQ ID NO: 1144681 - DNA, 25 bp, Homo sapien
atcgcgcaattttgcggcccgccgg

SEQ ID NO: 1144682 - DNA, 25 bp, Homo sapien
tcgggctgcggcgttgcacgaaacg

SEQ ID NO: 1144683 - DNA, 25 bp, Homo sapien
gctgcggcgttgcacgaaacgccgt

SEQ ID NO: 1144684 - DNA, 25 bp, Homo sapien
cctgcagtcgaaggtcgggctgcgg

SEQ ID NO: 1144685 - DNA, 25 bp, Homo sapien
tcgaaggtcgggctgcggcgttgca

SEQ ID NO: 1144686 - DNA, 25 bp, Homo sapien
cagctcaggctcgaagttacgcatc

SEQ ID NO: 1144687 - DNA, 25 bp, Homo sapien
caaggcctgtctttccgccttggta

SEQ ID NO: 1144688 - DNA, 25 bp, Homo sapien
ccttcacctcgcacccaaggcctgt

SEQ ID NO: 1144689 - DNA, 25 bp, Homo sapien
tccagcattgcggaagcaaggcaaa

SEQ ID NO: 1144690 - DNA, 25 bp, Homo sapien
aacatatggctttgtgtagtcacac

SEQ ID NO: 1144691 - DNA, 25 bp, Homo sapien
catgcttatgtgtgctgccggataa

SEQ ID NO: 1144692 - DNA, 25 bp, Homo sapien
tagaaaggtacatggatacaacgcg

SEQ ID NO: 1144693 - DNA, 25 bp, Homo sapien
tacaacgcgtgtgggtgtacgaagt

SEQ ID NO: 1144694 - DNA, 25 bp, Homo sapien
ggcaatgtttgactctcagcagaca

SEQ ID NO: 1144695 - DNA, 25 bp, Homo sapien
tttgagtaggaccagcagttgggac

SEQ ID NO: 1144696 - DNA, 25 bp, Homo sapien
gcagctcaagggactctggcaatgt

SEQ ID NO: 1144697 - DNA, 25 bp, Homo sapien
gcaatgggccagagtgcaatgcctc

SEQ ID NO: 1144698 - DNA, 25 bp, Homo sapien
ttgcagcatcgctgccaaggttcgt

SEQ ID NO: 1144699 - DNA, 25 bp, Homo sapien
cagaactggaactcctctaagccca

SEQ ID NO: 1144700 - DNA, 25 bp, Homo sapien
ctaagcccagaagtcgagaggggct

SEQ ID NO: 1144701 - DNA, 25 bp, Homo sapien
agaactggaactcctctaagcccag

SEQ ID NO: 1144702 - DNA, 25 bp, Homo sapien
ttctggatcccacaggaagcggtgg

SEQ ID NO: 1144703 - DNA, 25 bp, Homo sapien
taaaagcttcctttactctggcagc

SEQ ID NO: 1144704 - DNA, 25 bp, Homo sapien
caggtcatcccagggactggcttcg

SEQ ID NO: 1144705 - DNA, 25 bp, Homo sapien
agggactggcttcgtcccctccatc

SEQ ID NO: 1144706 - DNA, 25 bp, Homo sapien
gaggagacgctcagagagaaaacca

SEQ ID NO: 1144707 - DNA, 25 bp, Homo sapien
cagagcacggagatttactggaata

SEQ ID NO: 1144708 - DNA, 25 bp, Homo sapien
gctccagtccgggaaagtgaattaa

SEQ ID NO: 1144709 - DNA, 25 bp, Homo sapien
actggaataactctgatgtgcaacc

SEQ ID NO: 1144710 - DNA, 25 bp, Homo sapien
gacaccatttttctaggcaaagata

SEQ ID NO: 1144711 - DNA, 25 bp, Homo sapien
gaagtaagtgatgatgcagaatccc

SEQ ID NO: 1144712 - DNA, 25 bp, Homo sapien
caagtaaggaaacccggaatatctg

SEQ ID NO: 1144713 - DNA, 25 bp, Homo sapien
caggtagacacaatccctctaggaa

SEQ ID NO: 1144714 - DNA, 25 bp, Homo sapien
gaaatacgacagtgttccaaatccc

SEQ ID NO: 1144715 - DNA, 25 bp, Homo sapien
tagatgtataatccttgagatgcca

SEQ ID NO: 1144716 - DNA, 25 bp, Homo sapien
tgtctgaatccccaattattgaggc

SEQ ID NO: 1144717 - DNA, 25 bp, Homo sapien
tattgaggcacactccttggcctgc

SEQ ID NO: 1144718 - DNA, 25 bp, Homo sapien
taagaagagagttcagcccagtctt

SEQ ID NO: 1144719 - DNA, 25 bp, Homo sapien
tcagcccagtcttatacatactcat

SEQ ID NO: 1144720 - DNA, 25 bp, Homo sapien
gtactccaggcagccgacattctgt

SEQ ID NO: 1144721 - DNA, 25 bp, Homo sapien
ccgacattctgttgtacaagtaaga

SEQ ID NO: 1144722 - DNA, 25 bp, Homo sapien
caactacgtcaacactaatttcaat

SEQ ID NO: 1144723 - DNA, 25 bp, Homo sapien
tgcagtcggataaccccagggtagg

SEQ ID NO: 1144724 - DNA, 25 bp, Homo sapien
ttatttttgcagtcggataacccca

SEQ ID NO: 1144725 - DNA, 25 bp, Homo sapien
taggtagcccccaactacgtcaaca

SEQ ID NO: 1144726 - DNA, 25 bp, Homo sapien
cttcgtggagacatagtggtagctt

SEQ ID NO: 1144727 - DNA, 25 bp, Homo sapien
caaggaaaatactcagcttcgtgga

SEQ ID NO: 1144728 - DNA, 25 bp, Homo sapien
aagtaagtttcattccatatgtcca

SEQ ID NO: 1144729 - DNA, 25 bp, Homo sapien
caccaggaagatctctgcagaatat

SEQ ID NO: 1144730 - DNA, 25 bp, Homo sapien
gaaaattggttttgcatagtcaggc

SEQ ID NO: 1144731 - DNA, 25 bp, Homo sapien
gttacagggctcatacaagtccaag

SEQ ID NO: 1144732 - DNA, 25 bp, Homo sapien
agccactgcccgagctctgtcttgg

SEQ ID NO: 1144733 - DNA, 25 bp, Homo sapien
cacttcttacacaccagcggcaaga

SEQ ID NO: 1144734 - DNA, 25 bp, Homo sapien
ttacatttggaactaaagtatggga

SEQ ID NO: 1144735 - DNA, 25 bp, Homo sapien
catttggaactaaagtatgggagaa

SEQ ID NO: 1144736 - DNA, 25 bp, Homo sapien
cctttacatttggaactaaagtatg

SEQ ID NO: 1144737 - DNA, 25 bp, Homo sapien
tacatttggaactaaagtatgggag

SEQ ID NO: 1144738 - DNA, 25 bp, Homo sapien
agcatagaggctacgaccacagcgt

SEQ ID NO: 1144739 - DNA, 25 bp, Homo sapien
aatcttctgtccttcgtggctgccg

SEQ ID NO: 1144740 - DNA, 25 bp, Homo sapien
cttctgtccttcgtggctgccgcat

SEQ ID NO: 1144741 - DNA, 25 bp, Homo sapien
acgaccacagcgtcataatcttctg

SEQ ID NO: 1144742 - DNA, 25 bp, Homo sapien
tgctcgagtgttgaatccagacttt

SEQ ID NO: 1144743 - DNA, 25 bp, Homo sapien
gtgctcgagtgttgaatccagactt

SEQ ID NO: 1144744 - DNA, 25 bp, Homo sapien
agtgctcgagtgttgaatccagact

SEQ ID NO: 1144745 - DNA, 25 bp, Homo sapien
tcttaggaatcttcgcagtggtagg

SEQ ID NO: 1144746 - DNA, 25 bp, Homo sapien
ttcttccttactgctgaagacatta

SEQ ID NO: 1144747 - DNA, 25 bp, Homo sapien
taagaccaaagcgttttcctccata

SEQ ID NO: 1144748 - DNA, 25 bp, Homo sapien
atcttcgcagtggtaggaaaccctg

SEQ ID NO: 1144749 - DNA, 25 bp, Homo sapien
agttagaaggaatggggaacgagag

SEQ ID NO: 1144750 - DNA, 25 bp, Homo sapien
atgtggatataaagtcagccagttt

SEQ ID NO: 1144751 - DNA, 25 bp, Homo sapien
caagttagaaggaatggggaacgag

SEQ ID NO: 1144752 - DNA, 25 bp, Homo sapien
catgtggatataaagtcagccagtt

SEQ ID NO: 1144753 - DNA, 25 bp, Homo sapien
ggctggcaaccttccagctactccc

SEQ ID NO: 1144754 - DNA, 25 bp, Homo sapien
gctggcaaccttccagctactccca

SEQ ID NO: 1144755 - DNA, 25 bp, Homo sapien
ctggcaaccttccagctactcccat

SEQ ID NO: 1144756 - DNA, 25 bp, Homo sapien
gtcagattggcccaccgactggcta

SEQ ID NO: 1144757 - DNA, 25 bp, Homo sapien
gattggcccaccgactggctactag

SEQ ID NO: 1144758 - DNA, 25 bp, Homo sapien
tggcccaccgactggctactagcta

SEQ ID NO: 1144759 - DNA, 25 bp, Homo sapien
gagtcagattggcccaccgactggc

SEQ ID NO: 1144760 - DNA, 25 bp, Homo sapien
tgtgcagtgcgaagttggagtccca

SEQ ID NO: 1144761 - DNA, 25 bp, Homo sapien
caagggagatgtaaaggaccagact

SEQ ID NO: 1144762 - DNA, 25 bp, Homo sapien
gagtcccaagggagatgtaaaggac

SEQ ID NO: 1144763 - DNA, 25 bp, Homo sapien
cttcttgggctgagggtaagtgtgc

SEQ ID NO: 1144764 - DNA, 25 bp, Homo sapien
tctgagcagccagttcataaatttg

SEQ ID NO: 1144765 - DNA, 25 bp, Homo sapien
atcgcagatttggattcctgtcctc

SEQ ID NO: 1144766 - DNA, 25 bp, Homo sapien
tcctcccatggggagaatggtctga

SEQ ID NO: 1144767 - DNA, 25 bp, Homo sapien
aatggtctgagcagccagttcataa

SEQ ID NO: 1144768 - DNA, 25 bp, Homo sapien
taatttagctacagacttagttcaa

SEQ ID NO: 1144769 - DNA, 25 bp, Homo sapien
gcaaaattagtacagagaatttctg

SEQ ID NO: 1144770 - DNA, 25 bp, Homo sapien
tcaaatccagggtcccacaatgcat

SEQ ID NO: 1144771 - DNA, 25 bp, Homo sapien
tgtatacccttcaccaagctttgtc

SEQ ID NO: 1144772 - DNA, 25 bp, Homo sapien
cttcataagggatccgcagctgctc

SEQ ID NO: 1144773 - DNA, 25 bp, Homo sapien
tcaatgcggaaagcgcgtgagcgct

SEQ ID NO: 1144774 - DNA, 25 bp, Homo sapien
ccgcttcttagggaaagtacatgcc

SEQ ID NO: 1144775 - DNA, 25 bp, Homo sapien
tgggattggctctctgaacagacgt

SEQ ID NO: 1144776 - DNA, 25 bp, Homo sapien
tttataggcatctcttatctcctac

SEQ ID NO: 1144777 - DNA, 25 bp, Homo sapien
ttataggcatctcttatctcctacc

SEQ ID NO: 1144778 - DNA, 25 bp, Homo sapien
taggcatctcttatctcctacctct

SEQ ID NO: 1144779 - DNA, 25 bp, Homo sapien
tataggcatctcttatctcctacct

SEQ ID NO: 1144780 - DNA, 25 bp, Homo sapien
gagctccagacccatgtatctattt

SEQ ID NO: 1144781 - DNA, 25 bp, Homo sapien
tacaagcacctcaaatttaacagcc

SEQ ID NO: 1144782 - DNA, 25 bp, Homo sapien
accaaactgatcagctttgttgaag

SEQ ID NO: 1144783 - DNA, 25 bp, Homo sapien
tcactccacaaactctatctgatgg

SEQ ID NO: 1144784 - DNA, 25 bp, Homo sapien
taaagtaggtacaccctttgacagc

SEQ ID NO: 1144785 - DNA, 25 bp, Homo sapien
ttggtcataggagtctgcagatacg

SEQ ID NO: 1144786 - DNA, 25 bp, Homo sapien
tatgtcttggaaatacctcccacgg

SEQ ID NO: 1144787 - DNA, 25 bp, Homo sapien
ccccgaggagtcatggttaccatta

SEQ ID NO: 1144788 - DNA, 25 bp, Homo sapien
tgccgccttccagtttcgagcgatt

SEQ ID NO: 1144789 - DNA, 25 bp, Homo sapien
actgccgccttccagtttcgagcga

SEQ ID NO: 1144790 - DNA, 25 bp, Homo sapien
tgcaactgccgccttccagtttcga

SEQ ID NO: 1144791 - DNA, 25 bp, Homo sapien
tgcttttacttgtgtgattttggtc

SEQ ID NO: 1144792 - DNA, 25 bp, Homo sapien
tctcagtatcttccacagacatggg

SEQ ID NO: 1144793 - DNA, 25 bp, Homo sapien
tactctaaaacgtggattctgactg

SEQ ID NO: 1144794 - DNA, 25 bp, Homo sapien
taaaccgaaacctgctatgctagga

SEQ ID NO: 1144795 - DNA, 25 bp, Homo sapien
gaaagaggcacatacacggaaaaag

SEQ ID NO: 1144796 - DNA, 25 bp, Homo sapien
aaagagatctgtggaaagccacttc

SEQ ID NO: 1144797 - DNA, 25 bp, Homo sapien
tctggaactctctcttgggctagca

SEQ ID NO: 1144798 - DNA, 25 bp, Homo sapien
tgcaagctgtgcgttgacaatggct

SEQ ID NO: 1144799 - DNA, 25 bp, Homo sapien
taggtagccctcttctggaactctc

SEQ ID NO: 1144800 - DNA, 25 bp, Homo sapien
gcagctgtcatacaaatcattgcga

SEQ ID NO: 1144801 - DNA, 25 bp, Homo sapien
cctagtactgtaagtcagagatgaa

SEQ ID NO: 1144802 - DNA, 25 bp, Homo sapien
taagtcatattcctttgccctgagg

SEQ ID NO: 1144803 - DNA, 25 bp, Homo sapien
cggagggactgacctttacggattg

SEQ ID NO: 1144804 - DNA, 25 bp, Homo sapien
cctctcttgcatgtgcctagtactg

SEQ ID NO: 1144805 - DNA, 25 bp, Homo sapien
catttccttcttagactgactctcc

SEQ ID NO: 1144806 - DNA, 25 bp, Homo sapien
tcatcacatttccttcttagactga

SEQ ID NO: 1144807 - DNA, 25 bp, Homo sapien
tcacatttccttcttagactgactc

SEQ ID NO: 1144808 - DNA, 25 bp, Homo sapien
tccttcttagactgactctcctgct

SEQ ID NO: 1144809 - DNA, 25 bp, Homo sapien
ctgtgttccatctggaggctttagg

SEQ ID NO: 1144810 - DNA, 25 bp, Homo sapien
tcctgaaatcaaggtggaggcaggg

SEQ ID NO: 1144811 - DNA, 25 bp, Homo sapien
tcttggggtaagaagtcctgaaatc

SEQ ID NO: 1144812 - DNA, 25 bp, Homo sapien
aggctttaggggagaatccaggctt

SEQ ID NO: 1144813 - DNA, 25 bp, Homo sapien
gaacccggaagatggacgctgcagt

SEQ ID NO: 1144814 - DNA, 25 bp, Homo sapien
gcttgaacccggaagatggacgctg

SEQ ID NO: 1144815 - DNA, 25 bp, Homo sapien
ttgaacccggaagatggacgctgca

SEQ ID NO: 1144816 - DNA, 25 bp, Homo sapien
tgcaaggagaaaaaaccaatcaccg

SEQ ID NO: 1144817 - DNA, 25 bp, Homo sapien
gggcaatcccctgttcacttgtcac

SEQ ID NO: 1144818 - DNA, 25 bp, Homo sapien
aagtgtgtagagttcaagactgctc

SEQ ID NO: 1144819 - DNA, 25 bp, Homo sapien
tggctcagactagctttcggaaaat

SEQ ID NO: 1144820 - DNA, 25 bp, Homo sapien
cctatttagctgtaagtgtgtagag

SEQ ID NO: 1144821 - DNA, 25 bp, Homo sapien
taaggatcagactgctcagttgaga

SEQ ID NO: 1144822 - DNA, 25 bp, Homo sapien
tctgggcctccacagaaaccttgtt

SEQ ID NO: 1144823 - DNA, 25 bp, Homo sapien
tacttttgggaatctctacttgacc

SEQ ID NO: 1144824 - DNA, 25 bp, Homo sapien
caagcagggttgaaggacccctctg

SEQ ID NO: 1144825 - DNA, 25 bp, Homo sapien
tgagctgcacaggatgctggctata

SEQ ID NO: 1144826 - DNA, 25 bp, Homo sapien
ttatctcatcatgggcttatgactc

SEQ ID NO: 1144827 - DNA, 25 bp, Homo sapien
tgaaaatgcctgtgtaatgccaggg

SEQ ID NO: 1144828 - DNA, 25 bp, Homo sapien
ggcttatgactcctcatgagctgca

SEQ ID NO: 1144829 - DNA, 25 bp, Homo sapien
tcaccaaaaagaggttgtataaaca

SEQ ID NO: 1144830 - DNA, 25 bp, Homo sapien
tgagggagcagttgggaaatacact

SEQ ID NO: 1144831 - DNA, 25 bp, Homo sapien
tagaaatttactctgcaggtataag

SEQ ID NO: 1144832 - DNA, 25 bp, Homo sapien
cagatgtctatgaaagtaaaaagca

SEQ ID NO: 1144833 - DNA, 25 bp, Homo sapien
gaatctggatgttgtttcccaagga

SEQ ID NO: 1144834 - DNA, 25 bp, Homo sapien
cagaaacactttgtggcaggccagg

SEQ ID NO: 1144835 - DNA, 25 bp, Homo sapien
taatgattctgagagtgggacacgt

SEQ ID NO: 1144836 - DNA, 25 bp, Homo sapien
ggagttgcatcctaaagtcgccgag

SEQ ID NO: 1144837 - DNA, 25 bp, Homo sapien
tataggttgatgttccacctaagaa

SEQ ID NO: 1144838 - DNA, 25 bp, Homo sapien
taggttgatgttccacctaagaaaa

SEQ ID NO: 1144839 - DNA, 25 bp, Homo sapien
ataggttgatgttccacctaagaaa

SEQ ID NO: 1144840 - DNA, 25 bp, Homo sapien
ctcactgggacgcagaatacatgga

SEQ ID NO: 1144841 - DNA, 25 bp, Homo sapien
tgggagctgtttgcactcggccaac

SEQ ID NO: 1144842 - DNA, 25 bp, Homo sapien
ggcattgaggaagcataccactctg

SEQ ID NO: 1144843 - DNA, 25 bp, Homo sapien
cagtaattgatagggagactcttgc

SEQ ID NO: 1144844 - DNA, 25 bp, Homo sapien
gatccagcagaaactaccttcaagg

SEQ ID NO: 1144845 - DNA, 25 bp, Homo sapien
cagatccagcagaaactaccttcaa

SEQ ID NO: 1144846 - DNA, 25 bp, Homo sapien
agatccagcagaaactaccttcaag

SEQ ID NO: 1144847 - DNA, 25 bp, Homo sapien
atccagcagaaactaccttcaaggc

SEQ ID NO: 1144848 - DNA, 25 bp, Homo sapien
gaacccgtggatggcccaaatgcat

SEQ ID NO: 1144849 - DNA, 25 bp, Homo sapien
aaggcctagcccgaaagcactgaag

SEQ ID NO: 1144850 - DNA, 25 bp, Homo sapien
tctgtgaccccataacactccaata

SEQ ID NO: 1144851 - DNA, 25 bp, Homo sapien
cattaacctagcagatttcctaaca

SEQ ID NO: 1144852 - DNA, 25 bp, Homo sapien
tggaagcgctggtctacctggaacc

SEQ ID NO: 1144853 - DNA, 25 bp, Homo sapien
taaataaaagggaggcgcatagtcc

SEQ ID NO: 1144854 - DNA, 25 bp, Homo sapien
cattagccggttgagatcatggcgc

SEQ ID NO: 1144855 - DNA, 25 bp, Homo sapien
gaaagctgtcatcccaaactctcgg

SEQ ID NO: 1144856 - DNA, 25 bp, Homo sapien
agaaggacagttgagcttgggaggt

SEQ ID NO: 1144857 - DNA, 25 bp, Homo sapien
gtatatgtacacaatagaacactaa

SEQ ID NO: 1144858 - DNA, 25 bp, Homo sapien
caatagaacactaaaaggaaatgct

SEQ ID NO: 1144859 - DNA, 25 bp, Homo sapien
ggcaaaggaacaagaagaccctgtc

SEQ ID NO: 1144860 - DNA, 25 bp, Homo sapien
aaattcaatagactccaagcacaag

SEQ ID NO: 1144861 - DNA, 25 bp, Homo sapien
ggcaagcagggagttacaaaatatt

SEQ ID NO: 1144862 - DNA, 25 bp, Homo sapien
tatccaaaacgaagcacagaagatt

SEQ ID NO: 1144863 - DNA, 25 bp, Homo sapien
gatttcctgtcacatactatgcaag

SEQ ID NO: 1144864 - DNA, 25 bp, Homo sapien
tatttaatcatggtaggttgtatgc

SEQ ID NO: 1144865 - DNA, 25 bp, Homo sapien
tactcactacttatcgctgtgttca

SEQ ID NO: 1144866 - DNA, 25 bp, Homo sapien
tagctgtctgaaaaggtcgagggtc

SEQ ID NO: 1144867 - DNA, 25 bp, Homo sapien
tggaaaacgttttattcctgactca

SEQ ID NO: 1144868 - DNA, 25 bp, Homo sapien
ttttttgtgctgaggtatattcctt

SEQ ID NO: 1144869 - DNA, 25 bp, Homo sapien
tctggctaggactatgttgtccttc

SEQ ID NO: 1144870 - DNA, 25 bp, Homo sapien
caacattacgttacatagaagtggt

SEQ ID NO: 1144871 - DNA, 25 bp, Homo sapien
tatttttaccttgcaagtttactga

SEQ ID NO: 1144872 - DNA, 25 bp, Homo sapien
catctcggaatacaggattccccat

SEQ ID NO: 1144873 - DNA, 25 bp, Homo sapien
ttcacacatcactccatctcggaat

SEQ ID NO: 1144874 - DNA, 25 bp, Homo sapien
cacatcactccatctcggaatacag

SEQ ID NO: 1144875 - DNA, 25 bp, Homo sapien
cactccatctcggaatacaggattc

SEQ ID NO: 1144876 - DNA, 25 bp, Homo sapien
tcactaaggtatagcagttgactcc

SEQ ID NO: 1144877 - DNA, 25 bp, Homo sapien
gatgtcttcacaggtattcagacca

SEQ ID NO: 1144878 - DNA, 25 bp, Homo sapien
aactaaagacttacactctagcagg

SEQ ID NO: 1144879 - DNA, 25 bp, Homo sapien
ttattcatcgttgcagaacaatggc

SEQ ID NO: 1144880 - DNA, 25 bp, Homo sapien
gctattcttgtttggcagagccagc

SEQ ID NO: 1144881 - DNA, 25 bp, Homo sapien
gacgtcgcagatcatgctattcttg

SEQ ID NO: 1144882 - DNA, 25 bp, Homo sapien
gtggctgggccagggtatagcaggc

SEQ ID NO: 1144883 - DNA, 25 bp, Homo sapien
gcagagccagctttactgtagcctt

SEQ ID NO: 1144884 - DNA, 25 bp, Homo sapien
ccaaatatggaaaagagttagttgc

SEQ ID NO: 1144885 - DNA, 25 bp, Homo sapien
tccatctgctcaggtagcatcaccg

SEQ ID NO: 1144886 - DNA, 25 bp, Homo sapien
agattgctatccagtttagggattt

SEQ ID NO: 1144887 - DNA, 25 bp, Homo sapien
gttagttgctccccaagtgcttaaa

SEQ ID NO: 1144888 - DNA, 25 bp, Homo sapien
ggcagccaacaaatgattgccagga

SEQ ID NO: 1144889 - DNA, 25 bp, Homo sapien
tggcagccaacaaatgattgccagg

SEQ ID NO: 1144890 - DNA, 25 bp, Homo sapien
tacatggcagccaacaaatgattgc

SEQ ID NO: 1144891 - DNA, 25 bp, Homo sapien
catggcagccaacaaatgattgcca

SEQ ID NO: 1144892 - DNA, 25 bp, Homo sapien
gatggactcttagaattattgggcc

SEQ ID NO: 1144893 - DNA, 25 bp, Homo sapien
ggctcccaaattctaaacacgcatt

SEQ ID NO: 1144894 - DNA, 25 bp, Homo sapien
taaccaatgcattgtatttcacagg

SEQ ID NO: 1144895 - DNA, 25 bp, Homo sapien
cactgacaattgtatgagcatgcca

SEQ ID NO: 1144896 - DNA, 25 bp, Homo sapien
cagctgtaagccatcgagcccagtg

SEQ ID NO: 1144897 - DNA, 25 bp, Homo sapien
cataatcacattatcacacttagga

SEQ ID NO: 1144898 - DNA, 25 bp, Homo sapien
ccaagaatataatgttctctgacat

SEQ ID NO: 1144899 - DNA, 25 bp, Homo sapien
tagcaacacatgtcctaatattagc

SEQ ID NO: 1144900 - DNA, 25 bp, Homo sapien
tccagacatcaacgccacgaggtat

SEQ ID NO: 1144901 - DNA, 25 bp, Homo sapien
gacagggtgtaattccagacatcaa

SEQ ID NO: 1144902 - DNA, 25 bp, Homo sapien
caacgccacgaggtatggtaaggag

SEQ ID NO: 1144903 - DNA, 25 bp, Homo sapien
gtccatgacagggtgtaattccaga

SEQ ID NO: 1144904 - DNA, 25 bp, Homo sapien
agagcatcacaagtccgggaaacag

SEQ ID NO: 1144905 - DNA, 25 bp, Homo sapien
tgcctgtactgcagcaggagcaaca

SEQ ID NO: 1144906 - DNA, 25 bp, Homo sapien
ttgacctgtggacatgactcttcac

SEQ ID NO: 1144907 - DNA, 25 bp, Homo sapien
agggttgcaaccctgaatttcagga

SEQ ID NO: 1144908 - DNA, 25 bp, Homo sapien
agtacatgattctgtgtggctccca

SEQ ID NO: 1144909 - DNA, 25 bp, Homo sapien
ggaggacctttcagtcacctttgta

SEQ ID NO: 1144910 - DNA, 25 bp, Homo sapien
ttcccacaagcaggccagagtacat

SEQ ID NO: 1144911 - DNA, 25 bp, Homo sapien
catgggcacatgacgagcagttact

SEQ ID NO: 1144912 - DNA, 25 bp, Homo sapien
gacagaactaatgggacagacgtat

SEQ ID NO: 1144913 - DNA, 25 bp, Homo sapien
tccaaccccacatatagcagaactt

SEQ ID NO: 1144914 - DNA, 25 bp, Homo sapien
taaattcctagtagtgcatcaaagg

SEQ ID NO: 1144915 - DNA, 25 bp, Homo sapien
tacaatactgtccatcttaggttac

SEQ ID NO: 1144916 - DNA, 25 bp, Homo sapien
cagccaatcatcacactcttgaact

SEQ ID NO: 1144917 - DNA, 25 bp, Homo sapien
ggtaaggcagataatgtgctgatgt

SEQ ID NO: 1144918 - DNA, 25 bp, Homo sapien
catgctcatgaacagccaatcatca

SEQ ID NO: 1144919 - DNA, 25 bp, Homo sapien
ggtggcatatctcatacatgctcat

SEQ ID NO: 1144920 - DNA, 25 bp, Homo sapien
gtgatggatggctgtatgtttatgt

SEQ ID NO: 1144921 - DNA, 25 bp, Homo sapien
ggatggctgtatgtttatgtttact

SEQ ID NO: 1144922 - DNA, 25 bp, Homo sapien
ccaggtgactggtgtcctggtttcc

SEQ ID NO: 1144923 - DNA, 25 bp, Homo sapien
tcccaggtgactggtgtcctggttt

SEQ ID NO: 1144924 - DNA, 25 bp, Homo sapien
cttcaggttaagaacaaacaacatg

SEQ ID NO: 1144925 - DNA, 25 bp, Homo sapien
gatgggagagtctcttgtagctcac

SEQ ID NO: 1144926 - DNA, 25 bp, Homo sapien
cgcatgtggacttagatgaagggca

SEQ ID NO: 1144927 - DNA, 25 bp, Homo sapien
caggctttcgggagctgtattagct

SEQ ID NO: 1144928 - DNA, 25 bp, Homo sapien
ttttcagaagcaaccccatcagaag

SEQ ID NO: 1144929 - DNA, 25 bp, Homo sapien
ttcagaagcaaccccatcagaagct

SEQ ID NO: 1144930 - DNA, 25 bp, Homo sapien
tttcagaagcaaccccatcagaagc

SEQ ID NO: 1144931 - DNA, 25 bp, Homo sapien
tcagaagcaaccccatcagaagctg

SEQ ID NO: 1144932 - DNA, 25 bp, Homo sapien
cctctcatcctgtccaaatcctgcc

SEQ ID NO: 1144933 - DNA, 25 bp, Homo sapien
ctctcatcctgtccaaatcctgcca

SEQ ID NO: 1144934 - DNA, 25 bp, Homo sapien
tctcatcctgtccaaatcctgccat

SEQ ID NO: 1144935 - DNA, 25 bp, Homo sapien
gccgatacttctgtggcaggtccag

SEQ ID NO: 1144936 - DNA, 25 bp, Homo sapien
tcatgatttttccaagatcagccga

SEQ ID NO: 1144937 - DNA, 25 bp, Homo sapien
tttccaagatcagccgatacttctg

SEQ ID NO: 1144938 - DNA, 25 bp, Homo sapien
gatcagccgatacttctgtggcagg

SEQ ID NO: 1144939 - DNA, 25 bp, Homo sapien
ggcattggacaatagcgccatctgt

SEQ ID NO: 1144940 - DNA, 25 bp, Homo sapien
ggagttctgcgtgagcccctcattg

SEQ ID NO: 1144941 - DNA, 25 bp, Homo sapien
cattgctcctataccagtgccacag

SEQ ID NO: 1144942 - DNA, 25 bp, Homo sapien
ctttggtcccaagtggtcaggctgg

SEQ ID NO: 1144943 - DNA, 25 bp, Homo sapien
cagagtaaaattgggaacagagtga

SEQ ID NO: 1144944 - DNA, 25 bp, Homo sapien
tggagttgtcacatataatcaagtc

SEQ ID NO: 1144945 - DNA, 25 bp, Homo sapien
cctggtataacctgacaatttggag

SEQ ID NO: 1144946 - DNA, 25 bp, Homo sapien
tataacctgacaatttggagttgtc

SEQ ID NO: 1144947 - DNA, 25 bp, Homo sapien
ggtcttttgtgaactaatgctggga

SEQ ID NO: 1144948 - DNA, 25 bp, Homo sapien
aagtaatacctgcaccgctgttaac

SEQ ID NO: 1144949 - DNA, 25 bp, Homo sapien
tgtgcagcacacatagaagggtctt

SEQ ID NO: 1144950 - DNA, 25 bp, Homo sapien
tactgataagctgtggaggtacccc

SEQ ID NO: 1144951 - DNA, 25 bp, Homo sapien
actccactttgcacctctaagaggt

SEQ ID NO: 1144952 - DNA, 25 bp, Homo sapien
gagttggtgatagtaccactccact

SEQ ID NO: 1144953 - DNA, 25 bp, Homo sapien
cctcctgttgctggaataggtttcc

SEQ ID NO: 1144954 - DNA, 25 bp, Homo sapien
tgtcctccaggtccgtattaaccca

SEQ ID NO: 1144955 - DNA, 25 bp, Homo sapien
cacctagtggtttgactaggtgttt

SEQ ID NO: 1144956 - DNA, 25 bp, Homo sapien
ctagtggtttgactaggtgttttgc

SEQ ID NO: 1144957 - DNA, 25 bp, Homo sapien
tggtttgactaggtgttttgcacac

SEQ ID NO: 1144958 - DNA, 25 bp, Homo sapien
agtggtttgactaggtgttttgcac

SEQ ID NO: 1144959 - DNA, 25 bp, Homo sapien
ttcctcacacttcaggatcaggcgg

SEQ ID NO: 1144960 - DNA, 25 bp, Homo sapien
gatcaggcggcactaaagttacgtc

SEQ ID NO: 1144961 - DNA, 25 bp, Homo sapien
tctaggcttacagtgcttcaaaggc

SEQ ID NO: 1144962 - DNA, 25 bp, Homo sapien
aagttacgtcagctccttagaaaag

SEQ ID NO: 1144963 - DNA, 25 bp, Homo sapien
ggcttcgaatttcagtaacataagg

SEQ ID NO: 1144964 - DNA, 25 bp, Homo sapien
cgtggatttaaaagccttctcagaa

SEQ ID NO: 1144965 - DNA, 25 bp, Homo sapien
taacataaggataccaacccctgtc

SEQ ID NO: 1144966 - DNA, 25 bp, Homo sapien
tgaacagaatccatcgggcttttaa

SEQ ID NO: 1144967 - DNA, 25 bp, Homo sapien
ctatgtctcagaggagagggagctc

SEQ ID NO: 1144968 - DNA, 25 bp, Homo sapien
ttctcctgctgacctaggaagggga

SEQ ID NO: 1144969 - DNA, 25 bp, Homo sapien
gggctgcatttgatgccgcacaaaa

SEQ ID NO: 1144970 - DNA, 25 bp, Homo sapien
tgctgacctaggaaggggaaatcct

SEQ ID NO: 1144971 - DNA, 25 bp, Homo sapien
tgggctatgcatgggaagggctgca

SEQ ID NO: 1144972 - DNA, 25 bp, Homo sapien
cttttgatgagtgcctttctttgga

SEQ ID NO: 1144973 - DNA, 25 bp, Homo sapien
ctggctctgcttttgatgagtgcct

SEQ ID NO: 1144974 - DNA, 25 bp, Homo sapien
catgaggctcctgagcatcataggt

SEQ ID NO: 1144975 - DNA, 25 bp, Homo sapien
tcataggtcggcgaggtctggctct

SEQ ID NO: 1144976 - DNA, 25 bp, Homo sapien
acaggccggtgcacagctccgcttt

SEQ ID NO: 1144977 - DNA, 25 bp, Homo sapien
caagaaatatatcgcgtgctgacac

SEQ ID NO: 1144978 - DNA, 25 bp, Homo sapien
ccgggccggcttacagtacacaggc

SEQ ID NO: 1144979 - DNA, 25 bp, Homo sapien
tgctgacacttttacgacccgggcc

SEQ ID NO: 1144980 - DNA, 25 bp, Homo sapien
ctggagcgagaacgtgagggcccgg

SEQ ID NO: 1144981 - DNA, 25 bp, Homo sapien
ttgcaggcccggctagggcggctgc

SEQ ID NO: 1144982 - DNA, 25 bp, Homo sapien
cggctagggcggctgccagccacgg

SEQ ID NO: 1144983 - DNA, 25 bp, Homo sapien
ctggggcatccgctgtttgcaggcc

SEQ ID NO: 1144984 - DNA, 25 bp, Homo sapien
gagtgacagcaattaactcctccgc

SEQ ID NO: 1144985 - DNA, 25 bp, Homo sapien
cgacctctttcgctgaagtcaggag

SEQ ID NO: 1144986 - DNA, 25 bp, Homo sapien
agggccagatgccacgtgagagacc

SEQ ID NO: 1144987 - DNA, 25 bp, Homo sapien
tctttcgctgaagtcaggagtgaca

SEQ ID NO: 1144988 - DNA, 25 bp, Homo sapien
attgagttgccccatcaaactcttg

SEQ ID NO: 1144989 - DNA, 25 bp, Homo sapien
gtcaatccccagcttcaatatctca

SEQ ID NO: 1144990 - DNA, 25 bp, Homo sapien
ctctgggaacattgagtttgctatt

SEQ ID NO: 1144991 - DNA, 25 bp, Homo sapien
tttgctattgagttgccccatcaaa

SEQ ID NO: 1144992 - DNA, 25 bp, Homo sapien
agtctgaccggtagactaaacatcc

SEQ ID NO: 1144993 - DNA, 25 bp, Homo sapien
agatataagacctggagtctgaccg

SEQ ID NO: 1144994 - DNA, 25 bp, Homo sapien
tcaagatataagacctggagtctga

SEQ ID NO: 1144995 - DNA, 25 bp, Homo sapien
caggcccctgctaaccccgaggaag

SEQ ID NO: 1144996 - DNA, 25 bp, Homo sapien
ctttgcctccatccttactctgaat

SEQ ID NO: 1144997 - DNA, 25 bp, Homo sapien
tctttgcctccatccttactctgaa

SEQ ID NO: 1144998 - DNA, 25 bp, Homo sapien
tgcctccatccttactctgaattgt

SEQ ID NO: 1144999 - DNA, 25 bp, Homo sapien
ttgcctccatccttactctgaattg

SEQ ID NO: 1145000 - DNA, 25 bp, Homo sapien
tcttcatcactgaacacctttatga

SEQ ID NO: 1145001 - DNA, 25 bp, Homo sapien
tcactgaacacctttatgaggtcat

SEQ ID NO: 1145002 - DNA, 25 bp, Homo sapien
tcatcactgaacacctttatgaggt

SEQ ID NO: 1145003 - DNA, 25 bp, Homo sapien
tcttcagccactcctcttcatcact

SEQ ID NO: 1145004 - DNA, 25 bp, Homo sapien
taatggctgcgatagaaagcaaaga

SEQ ID NO: 1145005 - DNA, 25 bp, Homo sapien
ggccctcctcagttactgacttaag

SEQ ID NO: 1145006 - DNA, 25 bp, Homo sapien
tggactgaactcaggaccgtggccc

SEQ ID NO: 1145007 - DNA, 25 bp, Homo sapien
ggtttgtgttgactctagacagcca

SEQ ID NO: 1145008 - DNA, 25 bp, Homo sapien
tgctctttacaacaggagtgggccc

SEQ ID NO: 1145009 - DNA, 25 bp, Homo sapien
tgctgctgctctttacaacaggagt

SEQ ID NO: 1145010 - DNA, 25 bp, Homo sapien
tgctgctctttacaacaggagtggg

SEQ ID NO: 1145011 - DNA, 25 bp, Homo sapien
aatgctgctgctctttacaacagga

SEQ ID NO: 1145012 - DNA, 25 bp, Homo sapien
taggctgggatatgatacattgttg

SEQ ID NO: 1145013 - DNA, 25 bp, Homo sapien
gctgggatatgatacattgttgatc

SEQ ID NO: 1145014 - DNA, 25 bp, Homo sapien
gcaaccagaggcattccaggtgagc

SEQ ID NO: 1145015 - DNA, 25 bp, Homo sapien
cagcccttcagcaaccagaggcatt

SEQ ID NO: 1145016 - DNA, 25 bp, Homo sapien
cacgtatctatttctcgtaagtgca

SEQ ID NO: 1145017 - DNA, 25 bp, Homo sapien
tcgtaagtgcattatgctggcataa

SEQ ID NO: 1145018 - DNA, 25 bp, Homo sapien
tctatttctcgtaagtgcattatgc

SEQ ID NO: 1145019 - DNA, 25 bp, Homo sapien
cgcacgtatctatttctcgtaagtg

SEQ ID NO: 1145020 - DNA, 25 bp, Homo sapien
atgaaggtacttgttccatgcagct

SEQ ID NO: 1145021 - DNA, 25 bp, Homo sapien
ttgtgggcactcggagatctctgtc

SEQ ID NO: 1145022 - DNA, 25 bp, Homo sapien
cttgtgggcactcggagatctctgt

SEQ ID NO: 1145023 - DNA, 25 bp, Homo sapien
gttgaccctccaaagcatagggctt

SEQ ID NO: 1145024 - DNA, 25 bp, Homo sapien
gaccctccaaagcatagggcttggt

SEQ ID NO: 1145025 - DNA, 25 bp, Homo sapien
ttgaccctccaaagcatagggcttg

SEQ ID NO: 1145026 - DNA, 25 bp, Homo sapien
tgaccctccaaagcatagggcttgg

SEQ ID NO: 1145027 - DNA, 25 bp, Homo sapien
taggtagcgcactgtccagtgatcc

SEQ ID NO: 1145028 - DNA, 25 bp, Homo sapien
tggtctttgttccagtaggtagcgc

SEQ ID NO: 1145029 - DNA, 25 bp, Homo sapien
aactggttggtctttgttccagtag

SEQ ID NO: 1145030 - DNA, 25 bp, Homo sapien
ctagtttgctatcactgctgaagca

SEQ ID NO: 1145031 - DNA, 25 bp, Homo sapien
tgggtgttttcatatggccattcac

SEQ ID NO: 1145032 - DNA, 25 bp, Homo sapien
tgatacgatgttcccttgtgctggc

SEQ ID NO: 1145033 - DNA, 25 bp, Homo sapien
tctaagcagtcctgtcctcgctggg

SEQ ID NO: 1145034 - DNA, 25 bp, Homo sapien
caaaccagatagcttttgtgtctca

SEQ ID NO: 1145035 - DNA, 25 bp, Homo sapien
caaactatggagttcctaagtccta

SEQ ID NO: 1145036 - DNA, 25 bp, Homo sapien
gcaagctggtaaatttgtatttatc

SEQ ID NO: 1145037 - DNA, 25 bp, Homo sapien
tgcatcttaccatgtaaattttgct

SEQ ID NO: 1145038 - DNA, 25 bp, Homo sapien
gtaaaagctgtaggaacttcgtgtg

SEQ ID NO: 1145039 - DNA, 25 bp, Homo sapien
gatcacccagcgttttgagccctct

SEQ ID NO: 1145040 - DNA, 25 bp, Homo sapien
gcagcacatattgatccaccacaca

SEQ ID NO: 1145041 - DNA, 25 bp, Homo sapien
gaaactgagacatgtaaaagggtgg

SEQ ID NO: 1145042 - DNA, 25 bp, Homo sapien
caaaaaccctagaccatagctcagt

SEQ ID NO: 1145043 - DNA, 25 bp, Homo sapien
ctgactgttacatctgggcatgctc

SEQ ID NO: 1145044 - DNA, 25 bp, Homo sapien
actgttacatctgggcatgctcggc

SEQ ID NO: 1145045 - DNA, 25 bp, Homo sapien
ttacatctgggcatgctcggctcca

SEQ ID NO: 1145046 - DNA, 25 bp, Homo sapien
gttacatctgggcatgctcggctcc

SEQ ID NO: 1145047 - DNA, 25 bp, Homo sapien
ttaacattatcctagtggttgcttg

SEQ ID NO: 1145048 - DNA, 25 bp, Homo sapien
taacattatcctagtggttgcttgc

SEQ ID NO: 1145049 - DNA, 25 bp, Homo sapien
aagtaagataaaaatctttgctcct

SEQ ID NO: 1145050 - DNA, 25 bp, Homo sapien
tatgaaaatcacaaagtaagataaa

SEQ ID NO: 1145051 - DNA, 25 bp, Homo sapien
tttaattatgaaaatcacaaagtaa

SEQ ID NO: 1145052 - DNA, 25 bp, Homo sapien
cacaaagtaagataaaaatctttgc

SEQ ID NO: 1145053 - DNA, 25 bp, Homo sapien
gaacatgtagatccatagtcttctt

SEQ ID NO: 1145054 - DNA, 25 bp, Homo sapien
ggcttatgctgtaatcctgccacct

SEQ ID NO: 1145055 - DNA, 25 bp, Homo sapien
gccacctcaggaggctacagtggaa

SEQ ID NO: 1145056 - DNA, 25 bp, Homo sapien
ttccaaagtgtgactgaggccaggc

SEQ ID NO: 1145057 - DNA, 25 bp, Homo sapien
cactgccggaggtgttaggaaacac

SEQ ID NO: 1145058 - DNA, 25 bp, Homo sapien
aaagaagtgtttagacgcagccact

SEQ ID NO: 1145059 - DNA, 25 bp, Homo sapien
tctaatgtcttccagtcctcaggga

SEQ ID NO: 1145060 - DNA, 25 bp, Homo sapien
ttagacgcagccactcaaagcctgg

SEQ ID NO: 1145061 - DNA, 25 bp, Homo sapien
gcaaactcatagttggcttccacga

SEQ ID NO: 1145062 - DNA, 25 bp, Homo sapien
ctcatagttggcttccacgatatct

SEQ ID NO: 1145063 - DNA, 25 bp, Homo sapien
tagttggcttccacgatatcttcca

SEQ ID NO: 1145064 - DNA, 25 bp, Homo sapien
tggcttccacgatatcttccattcc

SEQ ID NO: 1145065 - DNA, 25 bp, Homo sapien
tgttgcttaaatacaggcatggctc

SEQ ID NO: 1145066 - DNA, 25 bp, Homo sapien
ggtggcggaggcatatactgctccc

SEQ ID NO: 1145067 - DNA, 25 bp, Homo sapien
tggtatgtgaccctccagctttgtt

SEQ ID NO: 1145068 - DNA, 25 bp, Homo sapien
ggcatggctctgtgactagttcttc

SEQ ID NO: 1145069 - DNA, 25 bp, Homo sapien
aacaacagcactgtcaggggagagg

SEQ ID NO: 1145070 - DNA, 25 bp, Homo sapien
caacaacagcactgtcaggggagag

SEQ ID NO: 1145071 - DNA, 25 bp, Homo sapien
tcaacaacagcactgtcaggggaga

SEQ ID NO: 1145072 - DNA, 25 bp, Homo sapien
ctgagaaacaatgtatgttggctcc

SEQ ID NO: 1145073 - DNA, 25 bp, Homo sapien
tgtatgttggctccatttattccca

SEQ ID NO: 1145074 - DNA, 25 bp, Homo sapien
aacgcagagcttggtacttttgata

SEQ ID NO: 1145075 - DNA, 25 bp, Homo sapien
aatttgagccctataaacgcagagc

SEQ ID NO: 1145076 - DNA, 25 bp, Homo sapien
gatgctactatctggtagttcccag

SEQ ID NO: 1145077 - DNA, 25 bp, Homo sapien
gctactatctggtagttcccaggaa

SEQ ID NO: 1145078 - DNA, 25 bp, Homo sapien
actgatgctactatctggtagttcc

SEQ ID NO: 1145079 - DNA, 25 bp, Homo sapien
ggtgaactgatgctactatctggta

SEQ ID NO: 1145080 - DNA, 25 bp, Homo sapien
cttcctaaagttcaaggctgatcat

SEQ ID NO: 1145081 - DNA, 25 bp, Homo sapien
tcacattcactccacatcttgtctt

SEQ ID NO: 1145082 - DNA, 25 bp, Homo sapien
tcaaggctgatcatgcctgcctctt

SEQ ID NO: 1145083 - DNA, 25 bp, Homo sapien
ttctaggccctggattttcactgcc

SEQ ID NO: 1145084 - DNA, 25 bp, Homo sapien
tgctccaccttcaataaaatcccga

SEQ ID NO: 1145085 - DNA, 25 bp, Homo sapien
gcaatgttgtcatcccgcgtgatgc

SEQ ID NO: 1145086 - DNA, 25 bp, Homo sapien
aaaatcccgagttgacttagacagc

SEQ ID NO: 1145087 - DNA, 25 bp, Homo sapien
tgctctcgcgcatgggcctgaaagt

SEQ ID NO: 1145088 - DNA, 25 bp, Homo sapien
aacaaagagatcttctgttggtgag

SEQ ID NO: 1145089 - DNA, 25 bp, Homo sapien
caaagagatcttctgttggtgagat

SEQ ID NO: 1145090 - DNA, 25 bp, Homo sapien
ctgtgccggacaacaaagagatctt

SEQ ID NO: 1145091 - DNA, 25 bp, Homo sapien
tgccggacaacaaagagatcttctg

SEQ ID NO: 1145092 - DNA, 25 bp, Homo sapien
atttccccatcaggccagacaaggc

SEQ ID NO: 1145093 - DNA, 25 bp, Homo sapien
cccttggattgtggttctggtgtcc

SEQ ID NO: 1145094 - DNA, 25 bp, Homo sapien
gaaccctgtgggtgcgatacaaata

SEQ ID NO: 1145095 - DNA, 25 bp, Homo sapien
tcagacacatctctcaggtaccgcg

SEQ ID NO: 1145096 - DNA, 25 bp, Homo sapien
atgacaatgtcttcaaggctacagc

SEQ ID NO: 1145097 - DNA, 25 bp, Homo sapien
agctggcaaatgtgctggtgatgta

SEQ ID NO: 1145098 - DNA, 25 bp, Homo sapien
tgtcttcaaggctacagctggcaaa

SEQ ID NO: 1145099 - DNA, 25 bp, Homo sapien
atgtagcagataccagccgcttggg

SEQ ID NO: 1145100 - DNA, 25 bp, Homo sapien
cctagggattctaccctctggatca

SEQ ID NO: 1145101 - DNA, 25 bp, Homo sapien
tcaactgtttgttcagctgcaggtc

SEQ ID NO: 1145102 - DNA, 25 bp, Homo sapien
atagagttggaaccatcggaggcct

SEQ ID NO: 1145103 - DNA, 25 bp, Homo sapien
caaagctttgaaacctagggattct

SEQ ID NO: 1145104 - DNA, 25 bp, Homo sapien
catacaggtgtatccaaagttatta

SEQ ID NO: 1145105 - DNA, 25 bp, Homo sapien
tgccacatacaggtgtatccaaagt

SEQ ID NO: 1145106 - DNA, 25 bp, Homo sapien
tcatgtcgcctgttgccacatacag

SEQ ID NO: 1145107 - DNA, 25 bp, Homo sapien
tggtttcgaatgtcatgtcgcctgt

SEQ ID NO: 1145108 - DNA, 25 bp, Homo sapien
ctgctttatccgcagtgtctggcac

SEQ ID NO: 1145109 - DNA, 25 bp, Homo sapien
tggtcttatgttgattgtgcttgtc

SEQ ID NO: 1145110 - DNA, 25 bp, Homo sapien
tgtctggaaactctagggagcagga

SEQ ID NO: 1145111 - DNA, 25 bp, Homo sapien
aactctagggagcaggaaccatatc

SEQ ID NO: 1145112 - DNA, 25 bp, Homo sapien
tctactatagccagggattcccact

SEQ ID NO: 1145113 - DNA, 25 bp, Homo sapien
tggtcatgaacatcccctttggaga

SEQ ID NO: 1145114 - DNA, 25 bp, Homo sapien
gaacctggcctgtctagactgtctg

SEQ ID NO: 1145115 - DNA, 25 bp, Homo sapien
tatgttacggttgaggcatacccag

SEQ ID NO: 1145116 - DNA, 25 bp, Homo sapien
gctgataggagtcatctggaaataa

SEQ ID NO: 1145117 - DNA, 25 bp, Homo sapien
agtgctgataggagtcatctggaaa

SEQ ID NO: 1145118 - DNA, 25 bp, Homo sapien
cagagagaagtgctgataggagtca

SEQ ID NO: 1145119 - DNA, 25 bp, Homo sapien
gagaagtgctgataggagtcatctg

SEQ ID NO: 1145120 - DNA, 25 bp, Homo sapien
tgaagcaagaacctcatcaagctgc

SEQ ID NO: 1145121 - DNA, 25 bp, Homo sapien
ctttcaggatgatgggcaatcgagt

SEQ ID NO: 1145122 - DNA, 25 bp, Homo sapien
accatggttggaaacaatgataccc

SEQ ID NO: 1145123 - DNA, 25 bp, Homo sapien
tggacattgtgcttcacagctaact

SEQ ID NO: 1145124 - DNA, 25 bp, Homo sapien
cgccatccaggtagacttcaatttt

SEQ ID NO: 1145125 - DNA, 25 bp, Homo sapien
cagccaccacttctgtcaaagcatc

SEQ ID NO: 1145126 - DNA, 25 bp, Homo sapien
aaatgcacttagctccaagggccag

SEQ ID NO: 1145127 - DNA, 25 bp, Homo sapien
cataggattggtctcccaagaaaaa

SEQ ID NO: 1145128 - DNA, 25 bp, Homo sapien
cttgggaataaaggaaagcacagag

SEQ ID NO: 1145129 - DNA, 25 bp, Homo sapien
tgggaataaaggaaagcacagagac

SEQ ID NO: 1145130 - DNA, 25 bp, Homo sapien
ttgggaataaaggaaagcacagaga

SEQ ID NO: 1145131 - DNA, 25 bp, Homo sapien
gatgtagtcagagctataatgggaa

SEQ ID NO: 1145132 - DNA, 25 bp, Homo sapien
gaccatccactagtataaattctag

SEQ ID NO: 1145133 - DNA, 25 bp, Homo sapien
tataaattctagatgtagtcagagc

SEQ ID NO: 1145134 - DNA, 25 bp, Homo sapien
gagacataaaggaacattctgacca

SEQ ID NO: 1145135 - DNA, 25 bp, Homo sapien
tggaactcatttgttaaaatgttca

SEQ ID NO: 1145136 - DNA, 25 bp, Homo sapien
caaaacttccttaacaccatgttca

SEQ ID NO: 1145137 - DNA, 25 bp, Homo sapien
agggccatggaagtgtggaactcat

SEQ ID NO: 1145138 - DNA, 25 bp, Homo sapien
ctgtaagggccatggaagtgtggaa

SEQ ID NO: 1145139 - DNA, 25 bp, Homo sapien
ccaagtttcgattgatctcagcgac

SEQ ID NO: 1145140 - DNA, 25 bp, Homo sapien
attgatctcagcgaccgaccggcag

SEQ ID NO: 1145141 - DNA, 25 bp, Homo sapien
ttcgattgatctcagcgaccgaccg

SEQ ID NO: 1145142 - DNA, 25 bp, Homo sapien
ctggaaaactggaccaagtttcgat

SEQ ID NO: 1145143 - DNA, 25 bp, Homo sapien
tgtgatcctcctgtgggcaacctca

SEQ ID NO: 1145144 - DNA, 25 bp, Homo sapien
aatgtgggaaatatgggccatgagc

SEQ ID NO: 1145145 - DNA, 25 bp, Homo sapien
cagcagtctggttattggccctttt

SEQ ID NO: 1145146 - DNA, 25 bp, Homo sapien
ggccatgagcctccggacagaatgg

SEQ ID NO: 1145147 - DNA, 25 bp, Homo sapien
tctcatctcatcagggcggtgacag

SEQ ID NO: 1145148 - DNA, 25 bp, Homo sapien
cagtgcccgagagagctagagatca

SEQ ID NO: 1145149 - DNA, 25 bp, Homo sapien
gaatagaagggaggccaatctggct

SEQ ID NO: 1145150 - DNA, 25 bp, Homo sapien
gatctgggcaaaagtggacctgtac

SEQ ID NO: 1145151 - DNA, 25 bp, Homo sapien
gaagttcacgatgcaagtttccaca

SEQ ID NO: 1145152 - DNA, 25 bp, Homo sapien
tcacaccttgggcactcagagtatt

SEQ ID NO: 1145153 - DNA, 25 bp, Homo sapien
gggctctcttccgagttctgcagga

SEQ ID NO: 1145154 - DNA, 25 bp, Homo sapien
agaccttcaggttctctattgaggg

SEQ ID NO: 1145155 - DNA, 25 bp, Homo sapien
gatcgctttttgcagtctacaattt

SEQ ID NO: 1145156 - DNA, 25 bp, Homo sapien
ttcacgatgctgattctacccattc

SEQ ID NO: 1145157 - DNA, 25 bp, Homo sapien
catttaatttgtagatcgctttttg

SEQ ID NO: 1145158 - DNA, 25 bp, Homo sapien
tctacaattttttcacgatgctgat

SEQ ID NO: 1145159 - DNA, 25 bp, Homo sapien
ctgtctttcccagaaggccttcgaa

SEQ ID NO: 1145160 - DNA, 25 bp, Homo sapien
taatgacagattgggaccattgccc

SEQ ID NO: 1145161 - DNA, 25 bp, Homo sapien
tggatatgaataggttcccaggtat

SEQ ID NO: 1145162 - DNA, 25 bp, Homo sapien
ctggaaagtttctcatactaatgac

SEQ ID NO: 1145163 - DNA, 25 bp, Homo sapien
gagtccaagtccttactgcctcatc

SEQ ID NO: 1145164 - DNA, 25 bp, Homo sapien
ggactggagctttatgctctgtggc

SEQ ID NO: 1145165 - DNA, 25 bp, Homo sapien
gacagaggagtccaagtccttactg

SEQ ID NO: 1145166 - DNA, 25 bp, Homo sapien
ttagattgttaaaagctggacagag

SEQ ID NO: 1145167 - DNA, 25 bp, Homo sapien
gccaggagtagttgaaagaaaagga

SEQ ID NO: 1145168 - DNA, 25 bp, Homo sapien
acaaaaattccatgaccccacaact

SEQ ID NO: 1145169 - DNA, 25 bp, Homo sapien
ttacaaaaattccatgaccccacaa

SEQ ID NO: 1145170 - DNA, 25 bp, Homo sapien
actgccaggagtagttgaaagaaaa

SEQ ID NO: 1145171 - DNA, 25 bp, Homo sapien
acaagaggtaaaatggttatacact

SEQ ID NO: 1145172 - DNA, 25 bp, Homo sapien
caagaggtaaaatggttatacactc

SEQ ID NO: 1145173 - DNA, 25 bp, Homo sapien
aagaggtaaaatggttatacactca

SEQ ID NO: 1145174 - DNA, 25 bp, Homo sapien
tctgattctagcgtgacccagaaga

SEQ ID NO: 1145175 - DNA, 25 bp, Homo sapien
agatctgattctagcgtgacccaga

SEQ ID NO: 1145176 - DNA, 25 bp, Homo sapien
gatctgattctagcgtgacccagaa

SEQ ID NO: 1145177 - DNA, 25 bp, Homo sapien
tgattctagcgtgacccagaagagg

SEQ ID NO: 1145178 - DNA, 25 bp, Homo sapien
ctgtcacaaggcagctccagcccat

SEQ ID NO: 1145179 - DNA, 25 bp, Homo sapien
accaacaggcggacgatcctctgac

SEQ ID NO: 1145180 - DNA, 25 bp, Homo sapien
ccaccaacaggcggacgatcctctg

SEQ ID NO: 1145181 - DNA, 25 bp, Homo sapien
caacaggcggacgatcctctgaccc

SEQ ID NO: 1145182 - DNA, 25 bp, Homo sapien
cttccaccaacaggcggacgatcct

SEQ ID NO: 1145183 - DNA, 25 bp, Homo sapien
cttctcctttgctgccgactttaga

SEQ ID NO: 1145184 - DNA, 25 bp, Homo sapien
gactttagacagactggctcaaagg

SEQ ID NO: 1145185 - DNA, 25 bp, Homo sapien
gaattgccatttcatagcagaagtc

SEQ ID NO: 1145186 - DNA, 25 bp, Homo sapien
tccaaagccgatagaaaatgactct

SEQ ID NO: 1145187 - DNA, 25 bp, Homo sapien
tgaggtaggtattctgagtcccact

SEQ ID NO: 1145188 - DNA, 25 bp, Homo sapien
tctagtgaaggctcaaacctgccca

SEQ ID NO: 1145189 - DNA, 25 bp, Homo sapien
gcaggaatagctgtttagaatcaac

SEQ ID NO: 1145190 - DNA, 25 bp, Homo sapien
cagtgagagcgaaattcagaatgaa

SEQ ID NO: 1145191 - DNA, 25 bp, Homo sapien
taaagttgtcacctggaattagccc

SEQ ID NO: 1145192 - DNA, 25 bp, Homo sapien
gaaatccacaggtagtgacgctgcc

SEQ ID NO: 1145193 - DNA, 25 bp, Homo sapien
tagccaagggcagcggatgtaacat

SEQ ID NO: 1145194 - DNA, 25 bp, Homo sapien
gaattagcccacaaaatgaacacca

SEQ ID NO: 1145195 - DNA, 25 bp, Homo sapien
aaaatcacccttacagtttcctgct

SEQ ID NO: 1145196 - DNA, 25 bp, Homo sapien
atcacccttacagtttcctgcttgg

SEQ ID NO: 1145197 - DNA, 25 bp, Homo sapien
aaatcacccttacagtttcctgctt

SEQ ID NO: 1145198 - DNA, 25 bp, Homo sapien
ttgaaggtcctggtacctactggag

SEQ ID NO: 1145199 - DNA, 25 bp, Homo sapien
cttgaaggtcctggtacctactgga

SEQ ID NO: 1145200 - DNA, 25 bp, Homo sapien
cttggcttgaggatataaaacagac

SEQ ID NO: 1145201 - DNA, 25 bp, Homo sapien
gctaatcacaaacctgaagcaggag

SEQ ID NO: 1145202 - DNA, 25 bp, Homo sapien
ccaaagtttagatgaggactggaac

SEQ ID NO: 1145203 - DNA, 25 bp, Homo sapien
gataaacagacgcagagttgtggcg

SEQ ID NO: 1145204 - DNA, 25 bp, Homo sapien
agaattatgattttgggtctccagc

SEQ ID NO: 1145205 - DNA, 25 bp, Homo sapien
tgagcagtgaattgtcacacatccg

SEQ ID NO: 1145206 - DNA, 25 bp, Homo sapien
gcaccatgtcaaagaaaaaccctta

SEQ ID NO: 1145207 - DNA, 25 bp, Homo sapien
gaatttaattctgtaggcgatgagg

SEQ ID NO: 1145208 - DNA, 25 bp, Homo sapien
gcgatgttacataggtgctcaaaga

SEQ ID NO: 1145209 - DNA, 25 bp, Homo sapien
aggcgatgttacataggtgctcaaa

SEQ ID NO: 1145210 - DNA, 25 bp, Homo sapien
gatgttacataggtgctcaaagaga

SEQ ID NO: 1145211 - DNA, 25 bp, Homo sapien
tgttacataggtgctcaaagagatt

SEQ ID NO: 1145212 - DNA, 25 bp, Homo sapien
aacacaggtcaggtcattggaaaga

SEQ ID NO: 1145213 - DNA, 25 bp, Homo sapien
tggaaagatttctggatctggctgg

SEQ ID NO: 1145214 - DNA, 25 bp, Homo sapien
tgaacacaggtcaggtcattggaaa

SEQ ID NO: 1145215 - DNA, 25 bp, Homo sapien
caggtcaggtcattggaaagatttc

SEQ ID NO: 1145216 - DNA, 25 bp, Homo sapien
tgtctccttcaagtacagtcagctt

SEQ ID NO: 1145217 - DNA, 25 bp, Homo sapien
ccttcaagtacagtcagcttggtcc

SEQ ID NO: 1145218 - DNA, 25 bp, Homo sapien
gaatgtctccttcaagtacagtcag

SEQ ID NO: 1145219 - DNA, 25 bp, Homo sapien
cagaatgtctccttcaagtacagtc

SEQ ID NO: 1145220 - DNA, 25 bp, Homo sapien
tggagtcatcgagcaaacagtgggt

SEQ ID NO: 1145221 - DNA, 25 bp, Homo sapien
tttgtcacaaagaccatccctggag

SEQ ID NO: 1145222 - DNA, 25 bp, Homo sapien
gaacagtcccaatcagtccttaggc

SEQ ID NO: 1145223 - DNA, 25 bp, Homo sapien
gcacactccttgaactatagcggta

SEQ ID NO: 1145224 - DNA, 25 bp, Homo sapien
ctgcccacgaagagcatgatgacag

SEQ ID NO: 1145225 - DNA, 25 bp, Homo sapien
tgcccacgaagagcatgatgacagt

SEQ ID NO: 1145226 - DNA, 25 bp, Homo sapien
ccacgaagagcatgatgacagtgtc

SEQ ID NO: 1145227 - DNA, 25 bp, Homo sapien
gacagtgtcaggaaatatcccaaag

SEQ ID NO: 1145228 - DNA, 25 bp, Homo sapien
cggctacctctatgctactggtgta

SEQ ID NO: 1145229 - DNA, 25 bp, Homo sapien
acctctatgctactggtgtagatga

SEQ ID NO: 1145230 - DNA, 25 bp, Homo sapien
ggcccggctacctctatgctactgg

SEQ ID NO: 1145231 - DNA, 25 bp, Homo sapien
ggctacctctatgctactggtgtag

SEQ ID NO: 1145232 - DNA, 25 bp, Homo sapien
actttccaacacttgacaggatccc

SEQ ID NO: 1145233 - DNA, 25 bp, Homo sapien
agaactttccaacacttgacaggat

SEQ ID NO: 1145234 - DNA, 25 bp, Homo sapien
gaactttccaacacttgacaggatc

SEQ ID NO: 1145235 - DNA, 25 bp, Homo sapien
gagaactttccaacacttgacagga

SEQ ID NO: 1145236 - DNA, 25 bp, Homo sapien
catctgagatgtaatagaattgacc

SEQ ID NO: 1145237 - DNA, 25 bp, Homo sapien
gggttgataggagtaaattgggctg

SEQ ID NO: 1145238 - DNA, 25 bp, Homo sapien
atagaattgacctcggacacttggg

SEQ ID NO: 1145239 - DNA, 25 bp, Homo sapien
actatttgataatgtgactgtgtgg

SEQ ID NO: 1145240 - DNA, 25 bp, Homo sapien
gagaacctcaagttaagagagacca

SEQ ID NO: 1145241 - DNA, 25 bp, Homo sapien
aaatggagctctattagtcaaaaga

SEQ ID NO: 1145242 - DNA, 25 bp, Homo sapien
gggcttgtgcccctgttgccttctg

SEQ ID NO: 1145243 - DNA, 25 bp, Homo sapien
gggccagtgactgtgcagattttga

SEQ ID NO: 1145244 - DNA, 25 bp, Homo sapien
ggtacattttcagggaagctcatgc

SEQ ID NO: 1145245 - DNA, 25 bp, Homo sapien
tacttgcccaggaacccatggtgtg

SEQ ID NO: 1145246 - DNA, 25 bp, Homo sapien
tggccagcacacatatagccaggtg

SEQ ID NO: 1145247 - DNA, 25 bp, Homo sapien
tatgtatgaccaaaatggccagcac

SEQ ID NO: 1145248 - DNA, 25 bp, Homo sapien
caaggagctcctcatacccctcatc

SEQ ID NO: 1145249 - DNA, 25 bp, Homo sapien
tggaccctgcctgtcaggtctgtgg

SEQ ID NO: 1145250 - DNA, 25 bp, Homo sapien
tcttgcacctgagctccctcatctg

SEQ ID NO: 1145251 - DNA, 25 bp, Homo sapien
ctctgtacacgcttcccagaaggtg

SEQ ID NO: 1145252 - DNA, 25 bp, Homo sapien
agactttggatagcccctctgggaa

SEQ ID NO: 1145253 - DNA, 25 bp, Homo sapien
tgtggcatgacgatcacaggtctct

SEQ ID NO: 1145254 - DNA, 25 bp, Homo sapien
cagaagactttggatagcccctctg

SEQ ID NO: 1145255 - DNA, 25 bp, Homo sapien
gaagactttggatagcccctctggg

SEQ ID NO: 1145256 - DNA, 25 bp, Homo sapien
tgctaacgtccccaggtttctgatg

SEQ ID NO: 1145257 - DNA, 25 bp, Homo sapien
aacgtccccaggtttctgatggatg

SEQ ID NO: 1145258 - DNA, 25 bp, Homo sapien
atcaaatagggcgatactggcactg

SEQ ID NO: 1145259 - DNA, 25 bp, Homo sapien
cgatactggcactgagtacattgtg

SEQ ID NO: 1145260 - DNA, 25 bp, Homo sapien
ggatattatcgccatcgatgacccc

SEQ ID NO: 1145261 - DNA, 25 bp, Homo sapien
catttagctcaactacaaggcctac

SEQ ID NO: 1145262 - DNA, 25 bp, Homo sapien
ttagctcaactacaaggcctacatg

SEQ ID NO: 1145263 - DNA, 25 bp, Homo sapien
ccttcatttagctcaactacaaggc

SEQ ID NO: 1145264 - DNA, 25 bp, Homo sapien
acaatgtcctgttttgctccagcca

SEQ ID NO: 1145265 - DNA, 25 bp, Homo sapien
tatgctgtagctagttctcctctct

SEQ ID NO: 1145266 - DNA, 25 bp, Homo sapien
tccttttccacaggcggccacaatg

SEQ ID NO: 1145267 - DNA, 25 bp, Homo sapien
ttctcgatatgataaccatgtgtta

SEQ ID NO: 1145268 - DNA, 25 bp, Homo sapien
caatccgaggtagcaggaaacactc

SEQ ID NO: 1145269 - DNA, 25 bp, Homo sapien
ccgaggtagcaggaaacactctcca

SEQ ID NO: 1145270 - DNA, 25 bp, Homo sapien
catggccaatccgaggtagcaggaa

SEQ ID NO: 1145271 - DNA, 25 bp, Homo sapien
gtcatggccaatccgaggtagcagg

SEQ ID NO: 1145272 - DNA, 25 bp, Homo sapien
cactaacaggcagatgatcctctga

SEQ ID NO: 1145273 - DNA, 25 bp, Homo sapien
cctccactaacaggcagatgatcct

SEQ ID NO: 1145274 - DNA, 25 bp, Homo sapien
tccactaacaggcagatgatcctct

SEQ ID NO: 1145275 - DNA, 25 bp, Homo sapien
actaacaggcagatgatcctctgac

SEQ ID NO: 1145276 - DNA, 25 bp, Homo sapien
attcctccctcaatcctggtctgaa

SEQ ID NO: 1145277 - DNA, 25 bp, Homo sapien
aaattcctccctcaatcctggtctg

SEQ ID NO: 1145278 - DNA, 25 bp, Homo sapien
gaaaattcctccctcaatcctggtc

SEQ ID NO: 1145279 - DNA, 25 bp, Homo sapien
agaaaattcctccctcaatcctggt

SEQ ID NO: 1145280 - DNA, 25 bp, Homo sapien
gagagtggagccattactagggaat

SEQ ID NO: 1145281 - DNA, 25 bp, Homo sapien
tcacccctatggtttcctgcttggg

SEQ ID NO: 1145282 - DNA, 25 bp, Homo sapien
caatgccgaaaatgagttggccgcc

SEQ ID NO: 1145283 - DNA, 25 bp, Homo sapien
tgaggataggcataaatgatgaatg

SEQ ID NO: 1145284 - DNA, 25 bp, Homo sapien
aaggtcctggtacctatttgagctg

SEQ ID NO: 1145285 - DNA, 25 bp, Homo sapien
cttgaaggtcctggtacctatttga

SEQ ID NO: 1145286 - DNA, 25 bp, Homo sapien
ggtcctggtacctatttgagctggg

SEQ ID NO: 1145287 - DNA, 25 bp, Homo sapien
tgaaggtcctggtacctatttgagc

SEQ ID NO: 1145288 - DNA, 25 bp, Homo sapien
ctgtgtgagcagaggttaggtcatt

SEQ ID NO: 1145289 - DNA, 25 bp, Homo sapien
tgtgagcagaggttaggtcattgga

SEQ ID NO: 1145290 - DNA, 25 bp, Homo sapien
tgagcagaggttaggtcattggaat

SEQ ID NO: 1145291 - DNA, 25 bp, Homo sapien
agcagaggttaggtcattggaatga

SEQ ID NO: 1145292 - DNA, 25 bp, Homo sapien
tacaggcggtgtggatgacgaccga

SEQ ID NO: 1145293 - DNA, 25 bp, Homo sapien
ccgaagacatcaatgatacaggcgg

SEQ ID NO: 1145294 - DNA, 25 bp, Homo sapien
gacatcaatgatacaggcggtgtgg

SEQ ID NO: 1145295 - DNA, 25 bp, Homo sapien
catcaatgatacaggcggtgtggat

SEQ ID NO: 1145296 - DNA, 25 bp, Homo sapien
ttgctttatctcctccccaggctac

SEQ ID NO: 1145297 - DNA, 25 bp, Homo sapien
cttgctttatctcctccccaggcta

SEQ ID NO: 1145298 - DNA, 25 bp, Homo sapien
acgggtagctggatttcaagagtct

SEQ ID NO: 1145299 - DNA, 25 bp, Homo sapien
ggagccaacgggtagctggatttca

SEQ ID NO: 1145300 - DNA, 25 bp, Homo sapien
gatttcaagagtctgaagtcggaga

SEQ ID NO: 1145301 - DNA, 25 bp, Homo sapien
ttcaagagtctgaagtcggagatta

SEQ ID NO: 1145302 - DNA, 25 bp, Homo sapien
tttccttgtcatttcatatcccctg

SEQ ID NO: 1145303 - DNA, 25 bp, Homo sapien
tgtcatttcatatcccctgttgtat

SEQ ID NO: 1145304 - DNA, 25 bp, Homo sapien
atttcatatcccctgttgtatggag

SEQ ID NO: 1145305 - DNA, 25 bp, Homo sapien
ccttgtcatttcatatcccctgttg

SEQ ID NO: 1145306 - DNA, 25 bp, Homo sapien
ctgggtacccgcccagaaagagcat

SEQ ID NO: 1145307 - DNA, 25 bp, Homo sapien
cttggacacaggcctccaacaggag

SEQ ID NO: 1145308 - DNA, 25 bp, Homo sapien
gccagcacagccttctcagcaagct

SEQ ID NO: 1145309 - DNA, 25 bp, Homo sapien
gttcagggcctcatttatattggca

SEQ ID NO: 1145310 - DNA, 25 bp, Homo sapien
ttcagggcctcatttatattggcag

SEQ ID NO: 1145311 - DNA, 25 bp, Homo sapien
tgttcagggcctcatttatattggc

SEQ ID NO: 1145312 - DNA, 25 bp, Homo sapien
ctgtggagaacttgctgacactcga

SEQ ID NO: 1145313 - DNA, 25 bp, Homo sapien
aactctttgctcaggatgtaattaa

SEQ ID NO: 1145314 - DNA, 25 bp, Homo sapien
ccttcttgtaagagaaggtgaacat

SEQ ID NO: 1145315 - DNA, 25 bp, Homo sapien
gagacccttaagataaaagagacca

SEQ ID NO: 1145316 - DNA, 25 bp, Homo sapien
cacctggcaccagtaggtgtaagaa

SEQ ID NO: 1145317 - DNA, 25 bp, Homo sapien
aaggcctctatgcttgttcagttga

SEQ ID NO: 1145318 - DNA, 25 bp, Homo sapien
gatggcacatattgttggccacaac

SEQ ID NO: 1145319 - DNA, 25 bp, Homo sapien
ccccatgtgatgcattgcgtgaggt

SEQ ID NO: 1145320 - DNA, 25 bp, Homo sapien
tcaacatcaatattcatcgctggag

SEQ ID NO: 1145321 - DNA, 25 bp, Homo sapien
acatcaatattcatcgctggaggag

SEQ ID NO: 1145322 - DNA, 25 bp, Homo sapien
tttaagaggggcacagactcgtact

SEQ ID NO: 1145323 - DNA, 25 bp, Homo sapien
caagtggtctttaagaggggcacag

SEQ ID NO: 1145324 - DNA, 25 bp, Homo sapien
gatctaattcccagtccctttataa

SEQ ID NO: 1145325 - DNA, 25 bp, Homo sapien
tctcatcatgataatccaggttctt

SEQ ID NO: 1145326 - DNA, 25 bp, Homo sapien
tcactcttcacatcacacaaacaag

SEQ ID NO: 1145327 - DNA, 25 bp, Homo sapien
aagttcattctcaaccccatacctg

SEQ ID NO: 1145328 - DNA, 25 bp, Homo sapien
tgaagcagacatcagaggatcccct

SEQ ID NO: 1145329 - DNA, 25 bp, Homo sapien
agcagacatcagaggatcccctcaa

SEQ ID NO: 1145330 - DNA, 25 bp, Homo sapien
ggtgaagcagacatcagaggatccc

SEQ ID NO: 1145331 - DNA, 25 bp, Homo sapien
gtggtgaagcagacatcagaggatc

SEQ ID NO: 1145332 - DNA, 25 bp, Homo sapien
ctgaacgggaagctcactggcatgg

SEQ ID NO: 1145333 - DNA, 25 bp, Homo sapien
aacgggaagctcactggcatggcct

SEQ ID NO: 1145334 - DNA, 25 bp, Homo sapien
gaagctcactggcatggccttccat

SEQ ID NO: 1145335 - DNA, 25 bp, Homo sapien
ggaagctcactggcatggccttcca

SEQ ID NO: 1145336 - DNA, 25 bp, Homo sapien
tgtgaatgccccttcgtgaaactgg

SEQ ID NO: 1145337 - DNA, 25 bp, Homo sapien
gcatcatggccgcagagatctcatc

SEQ ID NO: 1145338 - DNA, 25 bp, Homo sapien
agcgctatcgctgctacccagaaga

SEQ ID NO: 1145339 - DNA, 25 bp, Homo sapien
tttgcatctactggcgccgtcaagg

SEQ ID NO: 1145340 - DNA, 25 bp, Homo sapien
ttgcaaggttgagctaaaagagtca

SEQ ID NO: 1145341 - DNA, 25 bp, Homo sapien
ttataatgggtatgaaccatgagaa

SEQ ID NO: 1145342 - DNA, 25 bp, Homo sapien
ccatgtttataatgggtatgaacca

SEQ ID NO: 1145343 - DNA, 25 bp, Homo sapien
caaggttgagctaaaagagtcatca

SEQ ID NO: 1145344 - DNA, 25 bp, Homo sapien
atcaaatagggtgattctggaactg

SEQ ID NO: 1145345 - DNA, 25 bp, Homo sapien
ggaactgagtacatcatagagtcca

SEQ ID NO: 1145346 - DNA, 25 bp, Homo sapien
tggaactgagtacatcatagagtcc

SEQ ID NO: 1145347 - DNA, 25 bp, Homo sapien
atcagtggaaatcccaccaccatca

SEQ ID NO: 1145348 - DNA, 25 bp, Homo sapien
tcagtggaaatcccaccaccatcat

SEQ ID NO: 1145349 - DNA, 25 bp, Homo sapien
gctgggtcaccagggctacttataa

SEQ ID NO: 1145350 - DNA, 25 bp, Homo sapien
gcatgtgaagaatttctcagtgtga

SEQ ID NO: 1145351 - DNA, 25 bp, Homo sapien
tgaaaatgaaggcctaagtcaatgg

SEQ ID NO: 1145352 - DNA, 25 bp, Homo sapien
agcatcatcttctcgtgcagagcca

SEQ ID NO: 1145353 - DNA, 25 bp, Homo sapien
cagaggtaaagtggttatagacttg

SEQ ID NO: 1145354 - DNA, 25 bp, Homo sapien
tcctccaccacattgtttgcaaaaa

SEQ ID NO: 1145355 - DNA, 25 bp, Homo sapien
ccatggagaggactaaaaacagagg

SEQ ID NO: 1145356 - DNA, 25 bp, Homo sapien
ggtaaagtggttatagacttgcaca

SEQ ID NO: 1145357 - DNA, 25 bp, Homo sapien
ttgcaggaaacactcgccaggaaat

SEQ ID NO: 1145358 - DNA, 25 bp, Homo sapien
tgcaggaaacactcgccaggaaata

SEQ ID NO: 1145359 - DNA, 25 bp, Homo sapien
ggttgacaatcctctgacccggaaa

SEQ ID NO: 1145360 - DNA, 25 bp, Homo sapien
ttgacaatcctctgacccggaaacc

SEQ ID NO: 1145361 - DNA, 25 bp, Homo sapien
caagaggttgacaatcctctgaccc

SEQ ID NO: 1145362 - DNA, 25 bp, Homo sapien
agaggttgacaatcctctgacccgg

SEQ ID NO: 1145363 - DNA, 25 bp, Homo sapien
tttctccctcaatcctgatctgaag

SEQ ID NO: 1145364 - DNA, 25 bp, Homo sapien
gaaaatttctccctcaatcctgatc

SEQ ID NO: 1145365 - DNA, 25 bp, Homo sapien
aaggccttgtccaaggccctgatct

SEQ ID NO: 1145366 - DNA, 25 bp, Homo sapien
cctcaatcctgatctgaaggccttg

SEQ ID NO: 1145367 - DNA, 25 bp, Homo sapien
ggaatagctgtttacaatcaacttt

SEQ ID NO: 1145368 - DNA, 25 bp, Homo sapien
ctgtacaccaggtgcaggaatagct

SEQ ID NO: 1145369 - DNA, 25 bp, Homo sapien
tgcaggaatagctgtttacaatcaa

SEQ ID NO: 1145370 - DNA, 25 bp, Homo sapien
cctgtacaccaggtgcaggaatagc

SEQ ID NO: 1145371 - DNA, 25 bp, Homo sapien
gaaggtcctggtacctgttggatct

SEQ ID NO: 1145372 - DNA, 25 bp, Homo sapien
ttgaaggtcctggtacctgttggat

SEQ ID NO: 1145373 - DNA, 25 bp, Homo sapien
tgaaggtcctggtacctgttggatc

SEQ ID NO: 1145374 - DNA, 25 bp, Homo sapien
ctgcaagaacataggtcaggtcatt

SEQ ID NO: 1145375 - DNA, 25 bp, Homo sapien
gcaagaacataggtcaggtcattgg

SEQ ID NO: 1145376 - DNA, 25 bp, Homo sapien
agggtttccgaatctggcttggaag

SEQ ID NO: 1145377 - DNA, 25 bp, Homo sapien
aggctctcttcaggcatgactgatc

SEQ ID NO: 1145378 - DNA, 25 bp, Homo sapien
tccttctagcactgtcatcttggtc

SEQ ID NO: 1145379 - DNA, 25 bp, Homo sapien
ttctagcactgtcatcttggtcttg

SEQ ID NO: 1145380 - DNA, 25 bp, Homo sapien
tcttcaggcatgactgatccagaat

SEQ ID NO: 1145381 - DNA, 25 bp, Homo sapien
cgaagatgtcaatgatagaggcggt

SEQ ID NO: 1145382 - DNA, 25 bp, Homo sapien
gaggcggtgtggatgactaccgaga

SEQ ID NO: 1145383 - DNA, 25 bp, Homo sapien
cggtgtggatgactaccgagatgtc

SEQ ID NO: 1145384 - DNA, 25 bp, Homo sapien
aagatgtcaatgatagaggcggtgt

SEQ ID NO: 1145385 - DNA, 25 bp, Homo sapien
ttcacgttgaagttcatgatagact

SEQ ID NO: 1145386 - DNA, 25 bp, Homo sapien
gttcatgatagactctctgtgagtg

SEQ ID NO: 1145387 - DNA, 25 bp, Homo sapien
ctttcacgttgaagttcatgataga

SEQ ID NO: 1145388 - DNA, 25 bp, Homo sapien
cacgttgaagttcatgatagactct

SEQ ID NO: 1145389 - DNA, 25 bp, Homo sapien
gagcatgctgtcaatgtcaggaaat

SEQ ID NO: 1145390 - DNA, 25 bp, Homo sapien
catgaagagcatgctgtcaatgtca

SEQ ID NO: 1145391 - DNA, 25 bp, Homo sapien
cccatgaagagcatgctgtcaatgt

SEQ ID NO: 1145392 - DNA, 25 bp, Homo sapien
tgaagagcatgctgtcaatgtcagg

SEQ ID NO: 1145393 - DNA, 25 bp, Homo sapien
atggatgaagactagcacactagct

SEQ ID NO: 1145394 - DNA, 25 bp, Homo sapien
tgctggtatggatgaagactagcac

SEQ ID NO: 1145395 - DNA, 25 bp, Homo sapien
tatgctgctggtatggatgaagact

SEQ ID NO: 1145396 - DNA, 25 bp, Homo sapien
tggtatggatgaagactagcacact

SEQ ID NO: 1145397 - DNA, 25 bp, Homo sapien
ccagatgctcttgtttgtgtcgatt

SEQ ID NO: 1145398 - DNA, 25 bp, Homo sapien
cagatgctcttgtttgtgtcgattc

SEQ ID NO: 1145399 - DNA, 25 bp, Homo sapien
gatgctcttgtttgtgtcgattctg

SEQ ID NO: 1145400 - DNA, 25 bp, Homo sapien
agatgctcttgtttgtgtcgattct

SEQ ID NO: 1145401 - DNA, 25 bp, Homo sapien
agcacagccttctcagcaagttttt

SEQ ID NO: 1145402 - DNA, 25 bp, Homo sapien
cagcacagccttctcagcaagtttt

SEQ ID NO: 1145403 - DNA, 25 bp, Homo sapien
gcacagccttctcagcaagtttttg

SEQ ID NO: 1145404 - DNA, 25 bp, Homo sapien
cagttgacaggatcgcattgttttt

SEQ ID NO: 1145405 - DNA, 25 bp, Homo sapien
gcacaagtgtacaacatgccagcat

SEQ ID NO: 1145406 - DNA, 25 bp, Homo sapien
ccagcccacatagactgggttggtt

SEQ ID NO: 1145407 - DNA, 25 bp, Homo sapien
ccttccccatagatatgcattgagc

SEQ ID NO: 1145408 - DNA, 25 bp, Homo sapien
cagacacttgggaccttcttggggc

SEQ ID NO: 1145409 - DNA, 25 bp, Homo sapien
aggcagaggccgaactctttgctca

SEQ ID NO: 1145410 - DNA, 25 bp, Homo sapien
ttcagtacctcagggctaaaggaag

SEQ ID NO: 1145411 - DNA, 25 bp, Homo sapien
ttgaagggaggtcaataggtataaa

SEQ ID NO: 1145412 - DNA, 25 bp, Homo sapien
gcagttgaagggaggtcaataggta

SEQ ID NO: 1145413 - DNA, 25 bp, Homo sapien
agtacctcagggctaaaggaagcct

SEQ ID NO: 1145414 - DNA, 25 bp, Homo sapien
gccttcttgtaagagaaggtgacca

SEQ ID NO: 1145415 - DNA, 25 bp, Homo sapien
gtgaccatgctgttggacaatgtca

SEQ ID NO: 1145416 - DNA, 25 bp, Homo sapien
agccttcttgtaagagaaggtgacc

SEQ ID NO: 1145417 - DNA, 25 bp, Homo sapien
aggtgaccatgctgttggacaatgt

SEQ ID NO: 1145418 - DNA, 25 bp, Homo sapien
tcccagctgtaaattggcttatacg

SEQ ID NO: 1145419 - DNA, 25 bp, Homo sapien
tgttccagtccacaagggaaccaac

SEQ ID NO: 1145420 - DNA, 25 bp, Homo sapien
tagggtctccttgttccagtccaca

SEQ ID NO: 1145421 - DNA, 25 bp, Homo sapien
aacccactccatggttttctgctgg

SEQ ID NO: 1145422 - DNA, 25 bp, Homo sapien
cacaggaagataataagttggctat

SEQ ID NO: 1145423 - DNA, 25 bp, Homo sapien
aattgttcagaatcaggccacgaga

SEQ ID NO: 1145424 - DNA, 25 bp, Homo sapien
taggacagaaagcttttggttaggc

SEQ ID NO: 1145425 - DNA, 25 bp, Homo sapien
gagctatagtagtcgaaagagaccc

SEQ ID NO: 1145426 - DNA, 25 bp, Homo sapien
gctcaattctgtccctgatgcccct

SEQ ID NO: 1145427 - DNA, 25 bp, Homo sapien
tgttggttgcttaataactatgtca

SEQ ID NO: 1145428 - DNA, 25 bp, Homo sapien
agtccccaaacttatattgattggc

SEQ ID NO: 1145429 - DNA, 25 bp, Homo sapien
gaagtccccaaacttatattgattg

SEQ ID NO: 1145430 - DNA, 25 bp, Homo sapien
caagtggtctttaagaggggtcaca

SEQ ID NO: 1145431 - DNA, 25 bp, Homo sapien
gaggggtcacagaattcctactctg

SEQ ID NO: 1145432 - DNA, 25 bp, Homo sapien
ggtcacagaattcctactctgaagg

SEQ ID NO: 1145433 - DNA, 25 bp, Homo sapien
cacagaattcctactctgaaggcaa

SEQ ID NO: 1145434 - DNA, 25 bp, Homo sapien
ggaagacgacacattcaagaggtgt

SEQ ID NO: 1145435 - DNA, 25 bp, Homo sapien
aggtaaagttggtagcgctgaatga

SEQ ID NO: 1145436 - DNA, 25 bp, Homo sapien
cattcaagaggtgttgtggaggtaa

SEQ ID NO: 1145437 - DNA, 25 bp, Homo sapien
cagtgctgtctaaactagtggccat

SEQ ID NO: 1145438 - DNA, 25 bp, Homo sapien
ggagagagtggccaagccattttgt

SEQ ID NO: 1145439 - DNA, 25 bp, Homo sapien
gagagtggccaagccattttgttct

SEQ ID NO: 1145440 - DNA, 25 bp, Homo sapien
gttctgttcatctggccttccccct

SEQ ID NO: 1145441 - DNA, 25 bp, Homo sapien
gagtggccaagccattttgttctgt

SEQ ID NO: 1145442 - DNA, 25 bp, Homo sapien
gaaagattgcgctgttcaataggga

SEQ ID NO: 1145443 - DNA, 25 bp, Homo sapien
caatagggagcttcaggtttccaga

SEQ ID NO: 1145444 - DNA, 25 bp, Homo sapien
ggttcttccatttctcgaggaaaga

SEQ ID NO: 1145445 - DNA, 25 bp, Homo sapien
tagaagaagggctgacttcactagt

SEQ ID NO: 1145446 - DNA, 25 bp, Homo sapien
agtgagaaggcatggcctccctttc

SEQ ID NO: 1145447 - DNA, 25 bp, Homo sapien
tcctaaagtcttgtgtcatagctcc

SEQ ID NO: 1145448 - DNA, 25 bp, Homo sapien
cctaaagtcttgtgtcatagctcct

SEQ ID NO: 1145449 - DNA, 25 bp, Homo sapien
ttactttagggattggcactaggag

SEQ ID NO: 1145450 - DNA, 25 bp, Homo sapien
ttaagtattactttagggattggca

SEQ ID NO: 1145451 - DNA, 25 bp, Homo sapien
tattctgccaactttaagtattact

SEQ ID NO: 1145452 - DNA, 25 bp, Homo sapien
ctgccaactttaagtattactttag

SEQ ID NO: 1145453 - DNA, 25 bp, Homo sapien
catgtgctggacgtagtgctcaatg

SEQ ID NO: 1145454 - DNA, 25 bp, Homo sapien
gagtgggcatgtgctggacgtagtg

SEQ ID NO: 1145455 - DNA, 25 bp, Homo sapien
ggcatgtgctggacgtagtgctcaa

SEQ ID NO: 1145456 - DNA, 25 bp, Homo sapien
tgggcatgtgctggacgtagtgctc

SEQ ID NO: 1145457 - DNA, 25 bp, Homo sapien
gagattcaggccactgttcacaatg

SEQ ID NO: 1145458 - DNA, 25 bp, Homo sapien
gctcccctgagattcaggccactgt

SEQ ID NO: 1145459 - DNA, 25 bp, Homo sapien
tgcctcattccagcagtcgggaatg

SEQ ID NO: 1145460 - DNA, 25 bp, Homo sapien
gggcggtaaggtgttttatatgcca

SEQ ID NO: 1145461 - DNA, 25 bp, Homo sapien
tcatgcacttttccaccttcgatgc

SEQ ID NO: 1145462 - DNA, 25 bp, Homo sapien
gtgaagcagaattggaaggctccct

SEQ ID NO: 1145463 - DNA, 25 bp, Homo sapien
tgaagcagaattggaaggctccctc

SEQ ID NO: 1145464 - DNA, 25 bp, Homo sapien
catcatgcacttttccaccttcgat

SEQ ID NO: 1145465 - DNA, 25 bp, Homo sapien
gcatcagaactatgacaacagcctc

SEQ ID NO: 1145466 - DNA, 25 bp, Homo sapien
cgctgctgacatccccacgtttgtg

SEQ ID NO: 1145467 - DNA, 25 bp, Homo sapien
aaaatcaaatatggtaatgctggca

SEQ ID NO: 1145468 - DNA, 25 bp, Homo sapien
gctggcactgagtacaccatggagt

SEQ ID NO: 1145469 - DNA, 25 bp, Homo sapien
tagattgttaaaagctggacagaag

SEQ ID NO: 1145470 - DNA, 25 bp, Homo sapien
gttagattgttaaaagctggacaga

SEQ ID NO: 1145471 - DNA, 25 bp, Homo sapien
ttagttagattgttaaaagctggac

SEQ ID NO: 1145472 - DNA, 25 bp, Homo sapien
cattagttagattgttaaaagctgg

SEQ ID NO: 1145473 - DNA, 25 bp, Homo sapien
tcaaatggttatatactcacacaga

SEQ ID NO: 1145474 - DNA, 25 bp, Homo sapien
caaatggttatatactcacacagat

SEQ ID NO: 1145475 - DNA, 25 bp, Homo sapien
aaatggttatatactcacacagatg

SEQ ID NO: 1145476 - DNA, 25 bp, Homo sapien
caaagtagcaggaatcactcaccag

SEQ ID NO: 1145477 - DNA, 25 bp, Homo sapien
agtagcaggaatcactcaccaggaa

SEQ ID NO: 1145478 - DNA, 25 bp, Homo sapien
aagtagcaggaatcactcaccagga

SEQ ID NO: 1145479 - DNA, 25 bp, Homo sapien
atccaaagtagcaggaatcactcac

SEQ ID NO: 1145480 - DNA, 25 bp, Homo sapien
tgtcacaaggcagctccagcccgtc

SEQ ID NO: 1145481 - DNA, 25 bp, Homo sapien
ctgtcacaaggcagctccagcccgt

SEQ ID NO: 1145482 - DNA, 25 bp, Homo sapien
gtcacaaggcagctccagcccgtca

SEQ ID NO: 1145483 - DNA, 25 bp, Homo sapien
tcacaaggcagctccagcccgtcat

SEQ ID NO: 1145484 - DNA, 25 bp, Homo sapien
cggatgatcctctgtcccagaaacc

SEQ ID NO: 1145485 - DNA, 25 bp, Homo sapien
ggcggatgatcctctgtcccagaaa

SEQ ID NO: 1145486 - DNA, 25 bp, Homo sapien
caagaggcggatgatcctctgtccc

SEQ ID NO: 1145487 - DNA, 25 bp, Homo sapien
gaggcggatgatcctctgtcccaga

SEQ ID NO: 1145488 - DNA, 25 bp, Homo sapien
ctctctcaattctggtccgaaggcc

SEQ ID NO: 1145489 - DNA, 25 bp, Homo sapien
cctctctcaattctggtccgaaggc

SEQ ID NO: 1145490 - DNA, 25 bp, Homo sapien
tcctctctcaattctggtccgaagg

SEQ ID NO: 1145491 - DNA, 25 bp, Homo sapien
caatgacccattggtgaggtctcca

SEQ ID NO: 1145492 - DNA, 25 bp, Homo sapien
tgaggcatgtctggccttatactgc

SEQ ID NO: 1145493 - DNA, 25 bp, Homo sapien
tctagtctctggaaatcccacccag

SEQ ID NO: 1145494 - DNA, 25 bp, Homo sapien
gaggtctccagggtaatagtgtcct

SEQ ID NO: 1145495 - DNA, 25 bp, Homo sapien
acataggtgttcaaggatggttaga

SEQ ID NO: 1145496 - DNA, 25 bp, Homo sapien
agtggagggtgtacattctacggaa

SEQ ID NO: 1145497 - DNA, 25 bp, Homo sapien
tacattctacggaaagaacaagtaa

SEQ ID NO: 1145498 - DNA, 25 bp, Homo sapien
tatcaatttcttggaaagagcaaac

SEQ ID NO: 1145499 - DNA, 25 bp, Homo sapien
ctgtgtgaacacaggtcaggtcatt

SEQ ID NO: 1145500 - DNA, 25 bp, Homo sapien
gaatgatttctgtatctggctgaga

SEQ ID NO: 1145501 - DNA, 25 bp, Homo sapien
gatttctgtatctggctgagaagtt

SEQ ID NO: 1145502 - DNA, 25 bp, Homo sapien
aacacaggtcaggtcattggaatga

SEQ ID NO: 1145503 - DNA, 25 bp, Homo sapien
cgaagacatcaatgatacaggcggt

SEQ ID NO: 1145504 - DNA, 25 bp, Homo sapien
agacatcaatgatacaggcggtgtg

SEQ ID NO: 1145505 - DNA, 25 bp, Homo sapien
gacatcaatgatacaggcggtgtgg

SEQ ID NO: 1145506 - DNA, 25 bp, Homo sapien
catcaatgatacaggcggtgtggat

SEQ ID NO: 1145507 - DNA, 25 bp, Homo sapien
tgacattcatgatagactctctgtg

SEQ ID NO: 1145508 - DNA, 25 bp, Homo sapien
ctttcacattgacattcatgataga

SEQ ID NO: 1145509 - DNA, 25 bp, Homo sapien
attgacattcatgatagactctctg

SEQ ID NO: 1145510 - DNA, 25 bp, Homo sapien
cacattgacattcatgatagactct

SEQ ID NO: 1145511 - DNA, 25 bp, Homo sapien
tgcaaggtctgcttctggcctggga

SEQ ID NO: 1145512 - DNA, 25 bp, Homo sapien
cacctggctgaaaacggctctggaa

SEQ ID NO: 1145513 - DNA, 25 bp, Homo sapien
ccagctttgctagttctctcgagag

SEQ ID NO: 1145514 - DNA, 25 bp, Homo sapien
cagagtagactaaatgcggagggcc

SEQ ID NO: 1145515 - DNA, 25 bp, Homo sapien
gtgggttctggagagtaagaatttc

SEQ ID NO: 1145516 - DNA, 25 bp, Homo sapien
tccttaggcaaaatgggcagttgaa

SEQ ID NO: 1145517 - DNA, 25 bp, Homo sapien
gggcagttgaagaattcacatcaca

SEQ ID NO: 1145518 - DNA, 25 bp, Homo sapien
gaatatggacagttccagtccttag

SEQ ID NO: 1145519 - DNA, 25 bp, Homo sapien
agagcatattgtcactgtcaggata

SEQ ID NO: 1145520 - DNA, 25 bp, Homo sapien
aagagcatattgtcactgtcaggat

SEQ ID NO: 1145521 - DNA, 25 bp, Homo sapien
cagattccacccgttagccgccagt

SEQ ID NO: 1145522 - DNA, 25 bp, Homo sapien
tacagggtgccgccgtttttcagat

SEQ ID NO: 1145523 - DNA, 25 bp, Homo sapien
acagggtgccgccgtttttcagatt

SEQ ID NO: 1145524 - DNA, 25 bp, Homo sapien
cagggtgccgccgtttttcagattc

SEQ ID NO: 1145525 - DNA, 25 bp, Homo sapien
ttatactagcagaaaggaatcggct

SEQ ID NO: 1145526 - DNA, 25 bp, Homo sapien
tgggttaacagtggagaactttcca

SEQ ID NO: 1145527 - DNA, 25 bp, Homo sapien
tcgtttatactagcagaaaggaatc

SEQ ID NO: 1145528 - DNA, 25 bp, Homo sapien
tagcagaaaggaatcggcttccttc

SEQ ID NO: 1145529 - DNA, 25 bp, Homo sapien
atgtggcggttgaagggcggtcgat

SEQ ID NO: 1145530 - DNA, 25 bp, Homo sapien
tccaatacatcagggataaaggaaa

SEQ ID NO: 1145531 - DNA, 25 bp, Homo sapien
cgataggtgtaaattggcctgagta

SEQ ID NO: 1145532 - DNA, 25 bp, Homo sapien
ggttgaagggcggtcgataggtgta

SEQ ID NO: 1145533 - DNA, 25 bp, Homo sapien
ttgttgggccaatgactgcgcaggt

SEQ ID NO: 1145534 - DNA, 25 bp, Homo sapien
caaactatgtgaaggaatggaagat

SEQ ID NO: 1145535 - DNA, 25 bp, Homo sapien
gacctgagcttgtgcccttgtcact

SEQ ID NO: 1145536 - DNA, 25 bp, Homo sapien
tctagtagtcaaaacgaccctcaag

SEQ ID NO: 1145537 - DNA, 25 bp, Homo sapien
tttaattgccctggccagcacttcc

SEQ ID NO: 1145538 - DNA, 25 bp, Homo sapien
ttaattgccctggccagcacttcca

SEQ ID NO: 1145539 - DNA, 25 bp, Homo sapien
tgtcaaaggccttttatgcatataa

SEQ ID NO: 1145540 - DNA, 25 bp, Homo sapien
catataatgagatattcatgtggtt

SEQ ID NO: 1145541 - DNA, 25 bp, Homo sapien
gggcaattctccccaccatacaggg

SEQ ID NO: 1145542 - DNA, 25 bp, Homo sapien
atggatatgaataggttctcaggta

SEQ ID NO: 1145543 - DNA, 25 bp, Homo sapien
tggatatgaataggttctcaggtat

SEQ ID NO: 1145544 - DNA, 25 bp, Homo sapien
aatgggcaattctccccaccataca

SEQ ID NO: 1145545 - DNA, 25 bp, Homo sapien
ttgtgccatgaagatctcagagtag

SEQ ID NO: 1145546 - DNA, 25 bp, Homo sapien
gtgaacaatcaaggactctagaatg

SEQ ID NO: 1145547 - DNA, 25 bp, Homo sapien
gaaatggaagtatgggtgaacaatc

SEQ ID NO: 1145548 - DNA, 25 bp, Homo sapien
tacagccagtggagtgaagagtttg

SEQ ID NO: 1145549 - DNA, 25 bp, Homo sapien
catggaaggacttatggcgacagtc

SEQ ID NO: 1145550 - DNA, 25 bp, Homo sapien
tatggcgacagtccacacatcgctg

SEQ ID NO: 1145551 - DNA, 25 bp, Homo sapien
gaaactatgccatgagagtcgcggg

SEQ ID NO: 1145552 - DNA, 25 bp, Homo sapien
cccctccaggaaactatgccatgag

SEQ ID NO: 1145553 - DNA, 25 bp, Homo sapien
ccacagtgaaggtgaagcctggagt

SEQ ID NO: 1145554 - DNA, 25 bp, Homo sapien
cattttcttgtgcagcgccagtggc

SEQ ID NO: 1145555 - DNA, 25 bp, Homo sapien
tttggctatattgggtgcctggcct

SEQ ID NO: 1145556 - DNA, 25 bp, Homo sapien
cctggagtcaattggtttggctata

SEQ ID NO: 1145557 - DNA, 25 bp, Homo sapien
gctttattagctattcctacacctt

SEQ ID NO: 1145558 - DNA, 25 bp, Homo sapien
cccatcaacaatgcatgagtatttc

SEQ ID NO: 1145559 - DNA, 25 bp, Homo sapien
acttcctcaattgttattgtccttc

SEQ ID NO: 1145560 - DNA, 25 bp, Homo sapien
tgtgctttattagctattcctacac

SEQ ID NO: 1145561 - DNA, 25 bp, Homo sapien
gacaacccctaattgacttactgac

SEQ ID NO: 1145562 - DNA, 25 bp, Homo sapien
tttagacttgtttgaccatcatcac

SEQ ID NO: 1145563 - DNA, 25 bp, Homo sapien
tctactttatggactattatggata

SEQ ID NO: 1145564 - DNA, 25 bp, Homo sapien
ctattaaattgtatggatcactccc

SEQ ID NO: 1145565 - DNA, 25 bp, Homo sapien
ccttcaccaagagatggatgattct

SEQ ID NO: 1145566 - DNA, 25 bp, Homo sapien
ttcaccaagagatggatgattctct

SEQ ID NO: 1145567 - DNA, 25 bp, Homo sapien
tccttcaccaagagatggatgattc

SEQ ID NO: 1145568 - DNA, 25 bp, Homo sapien
cttcaccaagagatggatgattctc

SEQ ID NO: 1145569 - DNA, 25 bp, Homo sapien
aggaacaagtaaacaaagacagaga

SEQ ID NO: 1145570 - DNA, 25 bp, Homo sapien
tttcataagtgctcaaggatgttag

SEQ ID NO: 1145571 - DNA, 25 bp, Homo sapien
gataaaggtgatgtttcataagtgc

SEQ ID NO: 1145572 - DNA, 25 bp, Homo sapien
taaaggtgatgtttcataagtgctc

SEQ ID NO: 1145573 - DNA, 25 bp, Homo sapien
taagtgctcaaggatgttagagtgg

SEQ ID NO: 1145574 - DNA, 25 bp, Homo sapien
tagaggcagtgtggatgatgaccaa

SEQ ID NO: 1145575 - DNA, 25 bp, Homo sapien
gttttggagctttgcatgaacatgg

SEQ ID NO: 1145576 - DNA, 25 bp, Homo sapien
ctttgcatgaacatgggtcaggtca

SEQ ID NO: 1145577 - DNA, 25 bp, Homo sapien
gaacatgggtcaggtcattgcaatg

SEQ ID NO: 1145578 - DNA, 25 bp, Homo sapien
ccatctcctccccaggatactgtac

SEQ ID NO: 1145579 - DNA, 25 bp, Homo sapien
gctccatctcctccccaggatactg

SEQ ID NO: 1145580 - DNA, 25 bp, Homo sapien
attgctccatctcctccccaggata

SEQ ID NO: 1145581 - DNA, 25 bp, Homo sapien
tgctccatctcctccccaggatact

SEQ ID NO: 1145582 - DNA, 25 bp, Homo sapien
gacatctggaaggtatgatttttgc

SEQ ID NO: 1145583 - DNA, 25 bp, Homo sapien
tgactatggtgacatctggaaggta

SEQ ID NO: 1145584 - DNA, 25 bp, Homo sapien
tggtgacatctggaaggtatgattt

SEQ ID NO: 1145585 - DNA, 25 bp, Homo sapien
ctatggtgacatctggaaggtatga

SEQ ID NO: 1145586 - DNA, 25 bp, Homo sapien
ctgcccacgaagagtatgctgtcag

SEQ ID NO: 1145587 - DNA, 25 bp, Homo sapien
tgcccacgaagagtatgctgtcagt

SEQ ID NO: 1145588 - DNA, 25 bp, Homo sapien
gcccacgaagagtatgctgtcagtg

SEQ ID NO: 1145589 - DNA, 25 bp, Homo sapien
gatatctcctgtagcgattgaaggg

SEQ ID NO: 1145590 - DNA, 25 bp, Homo sapien
tagtggcagaaagtatagggcttcc

SEQ ID NO: 1145591 - DNA, 25 bp, Homo sapien
gaactgtcctcggatgcttagggcc

SEQ ID NO: 1145592 - DNA, 25 bp, Homo sapien
catatcagggctagaggaaggctcc

SEQ ID NO: 1145593 - DNA, 25 bp, Homo sapien
tagccactgatatttggtaacggca

SEQ ID NO: 1145594 - DNA, 25 bp, Homo sapien
ctgatatttggtaacggcaaatcac

SEQ ID NO: 1145595 - DNA, 25 bp, Homo sapien
tttggtaacggcaaatcacattgtc

SEQ ID NO: 1145596 - DNA, 25 bp, Homo sapien
ttagccactgatatttggtaacggc

SEQ ID NO: 1145597 - DNA, 25 bp, Homo sapien
ctgtgtcctctgggatttccagctc

SEQ ID NO: 1145598 - DNA, 25 bp, Homo sapien
tgtgtcctctgggatttccagctcc

SEQ ID NO: 1145599 - DNA, 25 bp, Homo sapien
tcctaaagtcttgtgtcatagctcc

SEQ ID NO: 1145600 - DNA, 25 bp, Homo sapien
cctaaagtcttgtgtcatagctcct

SEQ ID NO: 1145601 - DNA, 25 bp, Homo sapien
gtcaccaggggtacttataactctg

SEQ ID NO: 1145602 - DNA, 25 bp, Homo sapien
ctggtcaccaggggtacttataact

SEQ ID NO: 1145603 - DNA, 25 bp, Homo sapien
caccaggggtacttataactctggt

SEQ ID NO: 1145604 - DNA, 25 bp, Homo sapien
cagtatgattccacctatgacaaat

SEQ ID NO: 1145605 - DNA, 25 bp, Homo sapien
caatggatttgtccctattgggtac

SEQ ID NO: 1145606 - DNA, 25 bp, Homo sapien
cagcactagccacatccctgagaca

SEQ ID NO: 1145607 - DNA, 25 bp, Homo sapien
cagagtcaatggatttgtccctatt

SEQ ID NO: 1145608 - DNA, 25 bp, Homo sapien
aaggccagagtcaatggatttgtcc

SEQ ID NO: 1145609 - DNA, 25 bp, Homo sapien
gtcattgccaatccaatattgcagg

SEQ ID NO: 1145610 - DNA, 25 bp, Homo sapien
ccctcagctttggtctgaaggcctt

SEQ ID NO: 1145611 - DNA, 25 bp, Homo sapien
aaggccttgtccaaggccctgatct

SEQ ID NO: 1145612 - DNA, 25 bp, Homo sapien
ctccctcagctttggtctgaaggcc

SEQ ID NO: 1145613 - DNA, 25 bp, Homo sapien
ttcctccctcagctttggtctgaag

SEQ ID NO: 1145614 - DNA, 25 bp, Homo sapien
actctcctatacattcacttccttt

SEQ ID NO: 1145615 - DNA, 25 bp, Homo sapien
acactctcctatacattcacttcct

SEQ ID NO: 1145616 - DNA, 25 bp, Homo sapien
ctctcctatacattcacttcctttt

SEQ ID NO: 1145617 - DNA, 25 bp, Homo sapien
cactctcctatacattcacttcctt

SEQ ID NO: 1145618 - DNA, 25 bp, Homo sapien
tatttgcacaaggatctgctacacc

SEQ ID NO: 1145619 - DNA, 25 bp, Homo sapien
ggatctgctacaccgaattctgcaa

SEQ ID NO: 1145620 - DNA, 25 bp, Homo sapien
aaggatctgctacaccgaattctgc

SEQ ID NO: 1145621 - DNA, 25 bp, Homo sapien
tgcacaaggatctgctacaccgaat

SEQ ID NO: 1145622 - DNA, 25 bp, Homo sapien
tacaccgggtacaggcctagctgtt

SEQ ID NO: 1145623 - DNA, 25 bp, Homo sapien
tctaagtgttgtactctgtacaccg

SEQ ID NO: 1145624 - DNA, 25 bp, Homo sapien
tctgtacaccgggtacaggcctagc

SEQ ID NO: 1145625 - DNA, 25 bp, Homo sapien
tgttgtactctgtacaccgggtaca

SEQ ID NO: 1145626 - DNA, 25 bp, Homo sapien
tgttgttgcataggtgtttgaggat

SEQ ID NO: 1145627 - DNA, 25 bp, Homo sapien
aagatgttgttgcataggtgtttga

SEQ ID NO: 1145628 - DNA, 25 bp, Homo sapien
ctgataaagatgttgttgcataggt

SEQ ID NO: 1145629 - DNA, 25 bp, Homo sapien
gataaagatgttgttgcataggtgt

SEQ ID NO: 1145630 - DNA, 25 bp, Homo sapien
gagtgacaccgatgacatatatgat

SEQ ID NO: 1145631 - DNA, 25 bp, Homo sapien
tgtgaacacgggacaggttatcgga

SEQ ID NO: 1145632 - DNA, 25 bp, Homo sapien
gctctgtgtgaacacgggacaggtt

SEQ ID NO: 1145633 - DNA, 25 bp, Homo sapien
gacaggttatcggaatggtttctga

SEQ ID NO: 1145634 - DNA, 25 bp, Homo sapien
gattctgtcccatagaggcaaagag

SEQ ID NO: 1145635 - DNA, 25 bp, Homo sapien
tagaggcaaagagtggctgaatatc

SEQ ID NO: 1145636 - DNA, 25 bp, Homo sapien
aagagtggctgaatatcaagagtct

SEQ ID NO: 1145637 - DNA, 25 bp, Homo sapien
gaaggtttgattctgtcccatagag

SEQ ID NO: 1145638 - DNA, 25 bp, Homo sapien
ctgggaggaccttgccgcctcccct

SEQ ID NO: 1145639 - DNA, 25 bp, Homo sapien
ggagaggagtgtgccctctgctggt

SEQ ID NO: 1145640 - DNA, 25 bp, Homo sapien
gagaggagtgtgccctctgctggta

SEQ ID NO: 1145641 - DNA, 25 bp, Homo sapien
gggagaggagtgtgccctctgctgg

SEQ ID NO: 1145642 - DNA, 25 bp, Homo sapien
ctggttatgtaaagtcggggtgata

SEQ ID NO: 1145643 - DNA, 25 bp, Homo sapien
ggctcttcttcatgaccgttctgaa

SEQ ID NO: 1145644 - DNA, 25 bp, Homo sapien
gctcttcttcatgaccgttctgaat

SEQ ID NO: 1145645 - DNA, 25 bp, Homo sapien
gcctcatttataccggcagaaagga

SEQ ID NO: 1145646 - DNA, 25 bp, Homo sapien
tagataaacattggtcttacggcac

SEQ ID NO: 1145647 - DNA, 25 bp, Homo sapien
gcagaaaggattgggcttccttccc

SEQ ID NO: 1145648 - DNA, 25 bp, Homo sapien
ctggagaacttgctgaaacttgaca

SEQ ID NO: 1145649 - DNA, 25 bp, Homo sapien
tatagtagaactgtcctcggacact

SEQ ID NO: 1145650 - DNA, 25 bp, Homo sapien
cgcagggccctcaaggccagaatgt

SEQ ID NO: 1145651 - DNA, 25 bp, Homo sapien
gacacttggggccttcttgggctcc

SEQ ID NO: 1145652 - DNA, 25 bp, Homo sapien
tgtgggcccaggctatgttgccaac

SEQ ID NO: 1145653 - DNA, 25 bp, Homo sapien
aggcagaggccgaactctttgctca

SEQ ID NO: 1145654 - DNA, 25 bp, Homo sapien
tagaagagactacaattgttcggaa

SEQ ID NO: 1145655 - DNA, 25 bp, Homo sapien
tgtaaactggcctcggcaggaagct

SEQ ID NO: 1145656 - DNA, 25 bp, Homo sapien
cattggactgcgtgaagaaatagga

SEQ ID NO: 1145657 - DNA, 25 bp, Homo sapien
taaaaatgacctcaagttagaagag

SEQ ID NO: 1145658 - DNA, 25 bp, Homo sapien
gcctctttcgctgatcacccctcac

SEQ ID NO: 1145659 - DNA, 25 bp, Homo sapien
tcctcgcctctttcgctgatcaccc

SEQ ID NO: 1145660 - DNA, 25 bp, Homo sapien
tgccctggtggtttcgtaagcgtag

SEQ ID NO: 1145661 - DNA, 25 bp, Homo sapien
tggctgactgatcaggcctcctcgc

SEQ ID NO: 1145662 - DNA, 25 bp, Homo sapien
atctctttcagtccatcctacgaca

SEQ ID NO: 1145663 - DNA, 25 bp, Homo sapien
tccatcctacgacatgctgccaagg

SEQ ID NO: 1145664 - DNA, 25 bp, Homo sapien
tagatcttgaagtatcctcttcatc

SEQ ID NO: 1145665 - DNA, 25 bp, Homo sapien
tttcagtccatcctacgacatgctg

SEQ ID NO: 1145666 - DNA, 25 bp, Homo sapien
aatgccgtgcactggcctaggtaga

SEQ ID NO: 1145667 - DNA, 25 bp, Homo sapien
agaaggaatgccgtgcactggccta

SEQ ID NO: 1145668 - DNA, 25 bp, Homo sapien
taagcagaaggaatgccgtgcactg

SEQ ID NO: 1145669 - DNA, 25 bp, Homo sapien
ctaagcagaaggaatgccgtgcact

SEQ ID NO: 1145670 - DNA, 25 bp, Homo sapien
ggtgggtggcaagttgttccatata

SEQ ID NO: 1145671 - DNA, 25 bp, Homo sapien
aggtgggtggcaagttgttccatat

SEQ ID NO: 1145672 - DNA, 25 bp, Homo sapien
tgggtggcaagttgttccatatacc

SEQ ID NO: 1145673 - DNA, 25 bp, Homo sapien
ggtggcaagttgttccatataccat

SEQ ID NO: 1145674 - DNA, 25 bp, Homo sapien
tctgcatccagtgggtgccctacct

SEQ ID NO: 1145675 - DNA, 25 bp, Homo sapien
acattccaatgggtttcaatttcca

SEQ ID NO: 1145676 - DNA, 25 bp, Homo sapien
caaggtcatgttcactaacccaaag

SEQ ID NO: 1145677 - DNA, 25 bp, Homo sapien
tgctgccagactgtggtttcaaggt

SEQ ID NO: 1145678 - DNA, 25 bp, Homo sapien
cagtctcgggagtgtctaggaccac

SEQ ID NO: 1145679 - DNA, 25 bp, Homo sapien
tctttgatgtgagtgagcctctgcc

SEQ ID NO: 1145680 - DNA, 25 bp, Homo sapien
tctgttacccagagtactgttgtgc

SEQ ID NO: 1145681 - DNA, 25 bp, Homo sapien
gaaactgtacctgattgccatggaa

SEQ ID NO: 1145682 - DNA, 25 bp, Homo sapien
tttctcatatgataatgaatttggg

SEQ ID NO: 1145683 - DNA, 25 bp, Homo sapien
catatgataatgaatttgggtacag

SEQ ID NO: 1145684 - DNA, 25 bp, Homo sapien
tctcatatgataatgaatttgggta

SEQ ID NO: 1145685 - DNA, 25 bp, Homo sapien
ctcatatgataatgaatttgggtac

SEQ ID NO: 1145686 - DNA, 25 bp, Homo sapien
tctttttgttgcgtagttgtaagtg

SEQ ID NO: 1145687 - DNA, 25 bp, Homo sapien
cccatcaacaatgcgtgagtgtttt

SEQ ID NO: 1145688 - DNA, 25 bp, Homo sapien
gttgcgtagttgtaagtgtatttca

SEQ ID NO: 1145689 - DNA, 25 bp, Homo sapien
cattatttcacttcccccaggtgtt

SEQ ID NO: 1145690 - DNA, 25 bp, Homo sapien
tcacctttcggatggggccagacat

SEQ ID NO: 1145691 - DNA, 25 bp, Homo sapien
gcctgctatagcacatgctagagtg

SEQ ID NO: 1145692 - DNA, 25 bp, Homo sapien
ctttgcctgctatagcacatgctag

SEQ ID NO: 1145693 - DNA, 25 bp, Homo sapien
agatcccatcacctttcggatgggg

SEQ ID NO: 1145694 - DNA, 25 bp, Homo sapien
tgttctccgatagctacaggccctg

SEQ ID NO: 1145695 - DNA, 25 bp, Homo sapien
gttctccgatagctacaggccctgg

SEQ ID NO: 1145696 - DNA, 25 bp, Homo sapien
atgtcttattttcctctaccccatt

SEQ ID NO: 1145697 - DNA, 25 bp, Homo sapien
ttgcaaaaattccatgtctccacca

SEQ ID NO: 1145698 - DNA, 25 bp, Homo sapien
acagatgtcttattttcctctaccc

SEQ ID NO: 1145699 - DNA, 25 bp, Homo sapien
ttttgcaaaaattccatgtctccac

SEQ ID NO: 1145700 - DNA, 25 bp, Homo sapien
taaaaaaagagatcaaatggttata

SEQ ID NO: 1145701 - DNA, 25 bp, Homo sapien
agagatcaaatggttatatactcac

SEQ ID NO: 1145702 - DNA, 25 bp, Homo sapien
aaagagatcaaatggttatatactc

SEQ ID NO: 1145703 - DNA, 25 bp, Homo sapien
aaaaagagatcaaatggttatatac

SEQ ID NO: 1145704 - DNA, 25 bp, Homo sapien
gagcagatctgattctagggtgacc

SEQ ID NO: 1145705 - DNA, 25 bp, Homo sapien
tccaggaaacagaagatgctgggga

SEQ ID NO: 1145706 - DNA, 25 bp, Homo sapien
gatgctggggagcagatctgattct

SEQ ID NO: 1145707 - DNA, 25 bp, Homo sapien
ctggggagcagatctgattctaggg

SEQ ID NO: 1145708 - DNA, 25 bp, Homo sapien
ctgtcatggccaatccaaagtagca

SEQ ID NO: 1145709 - DNA, 25 bp, Homo sapien
ccaatccaaagtagcagacaacaca

SEQ ID NO: 1145710 - DNA, 25 bp, Homo sapien
catggccaatccaaagtagcagaca

SEQ ID NO: 1145711 - DNA, 25 bp, Homo sapien
tggccaatccaaagtagcagacaac

SEQ ID NO: 1145712 - DNA, 25 bp, Homo sapien
ctcctccaccaagaggcggatgata

SEQ ID NO: 1145713 - DNA, 25 bp, Homo sapien
aaggccttgtccaaggccctgatct

SEQ ID NO: 1145714 - DNA, 25 bp, Homo sapien
ggatgatactctaacccagaaaccc

SEQ ID NO: 1145715 - DNA, 25 bp, Homo sapien
cctcaattccggtctgaaggccttg

SEQ ID NO: 1145716 - DNA, 25 bp, Homo sapien
tcatctataacttcacttcctttta

SEQ ID NO: 1145717 - DNA, 25 bp, Homo sapien
ttattttgccttcaccaaaggtgcc

SEQ ID NO: 1145718 - DNA, 25 bp, Homo sapien
ttacacactcatctataacttcact

SEQ ID NO: 1145719 - DNA, 25 bp, Homo sapien
gccttcaccaaaggtgccaaggttg

SEQ ID NO: 1145720 - DNA, 25 bp, Homo sapien
taaccagatggtcttagcaagttgt

SEQ ID NO: 1145721 - DNA, 25 bp, Homo sapien
ggtctgaggtctgctacacattaac

SEQ ID NO: 1145722 - DNA, 25 bp, Homo sapien
tatttgcacaagaagttgctacagc

SEQ ID NO: 1145723 - DNA, 25 bp, Homo sapien
cagttggatatgactccttttctac

SEQ ID NO: 1145724 - DNA, 25 bp, Homo sapien
tgacaccgatgatgtctatgatgga

SEQ ID NO: 1145725 - DNA, 25 bp, Homo sapien
gtgacaccgatgatgtctatgatgg

SEQ ID NO: 1145726 - DNA, 25 bp, Homo sapien
agtgacaccgatgatgtctatgatg

SEQ ID NO: 1145727 - DNA, 25 bp, Homo sapien
cttgcttcatctcctccccaggcta

SEQ ID NO: 1145728 - DNA, 25 bp, Homo sapien
tcatctcctccccaggctactgtac

SEQ ID NO: 1145729 - DNA, 25 bp, Homo sapien
ttgcttcatctcctccccaggctac

SEQ ID NO: 1145730 - DNA, 25 bp, Homo sapien
gcttcatctcctccccaggctactg

SEQ ID NO: 1145731 - DNA, 25 bp, Homo sapien
cctgccctggcgtttcctgtggagc

SEQ ID NO: 1145732 - DNA, 25 bp, Homo sapien
ctggttatgtaaagtcggggtgata

SEQ ID NO: 1145733 - DNA, 25 bp, Homo sapien
ctgccctggcgtttcctgtggagcc

SEQ ID NO: 1145734 - DNA, 25 bp, Homo sapien
ctaccaacgaaaagcattctgtcag

SEQ ID NO: 1145735 - DNA, 25 bp, Homo sapien
caggccatgtttccaatatagactg

SEQ ID NO: 1145736 - DNA, 25 bp, Homo sapien
ggcccaggccatgtttccaatatag

SEQ ID NO: 1145737 - DNA, 25 bp, Homo sapien
catgtttccaatatagactgggttg

SEQ ID NO: 1145738 - DNA, 25 bp, Homo sapien
ggccatgtttccaatatagactggg

SEQ ID NO: 1145739 - DNA, 25 bp, Homo sapien
cactccacggttctaacagactcag

SEQ ID NO: 1145740 - DNA, 25 bp, Homo sapien
taacagactcaggtacattcttctt

SEQ ID NO: 1145741 - DNA, 25 bp, Homo sapien
cacggttctaacagactcaggtaca

SEQ ID NO: 1145742 - DNA, 25 bp, Homo sapien
ggttctaacagactcaggtacattc

SEQ ID NO: 1145743 - DNA, 25 bp, Homo sapien
gcccttggaacctgcctgtctagtc

SEQ ID NO: 1145744 - DNA, 25 bp, Homo sapien
gtacatgctttccagaaggcgaggg

SEQ ID NO: 1145745 - DNA, 25 bp, Homo sapien
ttagtctggcacccgagctctctca

SEQ ID NO: 1145746 - DNA, 25 bp, Homo sapien
cctctgtacatgctttccagaaggc

SEQ ID NO: 1145747 - DNA, 25 bp, Homo sapien
catcaccatcaatattcatagctag

SEQ ID NO: 1145748 - DNA, 25 bp, Homo sapien
aagccgaaggaacgcagtgcactgg

SEQ ID NO: 1145749 - DNA, 25 bp, Homo sapien
gccgaaggaacgcagtgcactggcc

SEQ ID NO: 1145750 - DNA, 25 bp, Homo sapien
ctaagccgaaggaacgcagtgcact

SEQ ID NO: 1145751 - DNA, 25 bp, Homo sapien
cctctaagccgaaggaacgcagtgc

SEQ ID NO: 1145752 - DNA, 25 bp, Homo sapien
cctaaagtcttgtgtcatagctcct

SEQ ID NO: 1145753 - DNA, 25 bp, Homo sapien
tgtcctaaagtcttgtgtcatagct

SEQ ID NO: 1145754 - DNA, 25 bp, Homo sapien
gaggggtgtcctaaagtcttgtgtc

SEQ ID NO: 1145755 - DNA, 25 bp, Homo sapien
gggtgtcctaaagtcttgtgtcata

SEQ ID NO: 1145756 - DNA, 25 bp, Homo sapien
tggagaccagggattcactggaagc

SEQ ID NO: 1145757 - DNA, 25 bp, Homo sapien
ctggagaccagggattcactggaag

SEQ ID NO: 1145758 - DNA, 25 bp, Homo sapien
agaccagggattcactggaagcagt

SEQ ID NO: 1145759 - DNA, 25 bp, Homo sapien
gagaccagggattcactggaagcag

SEQ ID NO: 1145760 - DNA, 25 bp, Homo sapien
ggtgtcagtgtacgtgcaatgttta

SEQ ID NO: 1145761 - DNA, 25 bp, Homo sapien
gcattcccacacacgtatttgaagg

SEQ ID NO: 1145762 - DNA, 25 bp, Homo sapien
tttccaacctgagtaaagaactgcc

SEQ ID NO: 1145763 - DNA, 25 bp, Homo sapien
ggcaaggtgttccatataccatgtt

SEQ ID NO: 1145764 - DNA, 25 bp, Homo sapien
cagagaaggcctccacagaggcagg

SEQ ID NO: 1145765 - DNA, 25 bp, Homo sapien
cattccaaaggctctgtagaaccag

SEQ ID NO: 1145766 - DNA, 25 bp, Homo sapien
aaccagggccacctcagagaaggcc

SEQ ID NO: 1145767 - DNA, 25 bp, Homo sapien
gagctcccagccaagcaagaggcat

SEQ ID NO: 1145768 - DNA, 25 bp, Homo sapien
ccacatggtgagttgttcattaata

SEQ ID NO: 1145769 - DNA, 25 bp, Homo sapien
tccctggttcttgtatccacatggt

SEQ ID NO: 1145770 - DNA, 25 bp, Homo sapien
aagctgtttgtacttgccaaaggcc

SEQ ID NO: 1145771 - DNA, 25 bp, Homo sapien
ttcattaatagaacctttagcagca

SEQ ID NO: 1145772 - DNA, 25 bp, Homo sapien
tacctccgtgactgtccggttgaac

SEQ ID NO: 1145773 - DNA, 25 bp, Homo sapien
ccttgaagatgcaacagacattctt

SEQ ID NO: 1145774 - DNA, 25 bp, Homo sapien
tccttcgagcaaatagctccccagt

SEQ ID NO: 1145775 - DNA, 25 bp, Homo sapien
agacattcttctacctccgtgactg

SEQ ID NO: 1145776 - DNA, 25 bp, Homo sapien
cagcgatgcaagagggaataggacc

SEQ ID NO: 1145777 - DNA, 25 bp, Homo sapien
tgcctcgtaaagtggaccgttgtcc

SEQ ID NO: 1145778 - DNA, 25 bp, Homo sapien
atcagagaccctcggagaaaccaag

SEQ ID NO: 1145779 - DNA, 25 bp, Homo sapien
tgtgcagctgtggaccttgacggac

SEQ ID NO: 1145780 - DNA, 25 bp, Homo sapien
cgccaagatcttaaggaacctgaat

SEQ ID NO: 1145781 - DNA, 25 bp, Homo sapien
cccagcaggatgtcaacggcgtaaa

SEQ ID NO: 1145782 - DNA, 25 bp, Homo sapien
gaattcctggtgagcaatcaagttc

SEQ ID NO: 1145783 - DNA, 25 bp, Homo sapien
tcaccgggtcgggatctggaaacaa

SEQ ID NO: 1145784 - DNA, 25 bp, Homo sapien
tcagctttactctcagaaaggattc

SEQ ID NO: 1145785 - DNA, 25 bp, Homo sapien
agaaaggattcctgttgactatttt

SEQ ID NO: 1145786 - DNA, 25 bp, Homo sapien
cttcagctttactctcagaaaggat

SEQ ID NO: 1145787 - DNA, 25 bp, Homo sapien
ttcagctttactctcagaaaggatt

SEQ ID NO: 1145788 - DNA, 25 bp, Homo sapien
ctgcttgatgagagcatgtggctcc

SEQ ID NO: 1145789 - DNA, 25 bp, Homo sapien
tgcttgatgagagcatgtggctcct

SEQ ID NO: 1145790 - DNA, 25 bp, Homo sapien
tttctgcttgatgagagcatgtggc

SEQ ID NO: 1145791 - DNA, 25 bp, Homo sapien
tctgcttgatgagagcatgtggctc

SEQ ID NO: 1145792 - DNA, 25 bp, Homo sapien
ccttaccctcccagagctcacaggt

SEQ ID NO: 1145793 - DNA, 25 bp, Homo sapien
ttctaccactgccttaccctcccag

SEQ ID NO: 1145794 - DNA, 25 bp, Homo sapien
tgccttaccctcccagagctcacag

SEQ ID NO: 1145795 - DNA, 25 bp, Homo sapien
ttaccctcccagagctcacaggtag

SEQ ID NO: 1145796 - DNA, 25 bp, Homo sapien
gagctcttagatacaattctagcat

SEQ ID NO: 1145797 - DNA, 25 bp, Homo sapien
tgagctcttagatacaattctagca

SEQ ID NO: 1145798 - DNA, 25 bp, Homo sapien
gtgagctcttagatacaattctagc

SEQ ID NO: 1145799 - DNA, 25 bp, Homo sapien
atctcttcgtcatgtataatcaggg

SEQ ID NO: 1145800 - DNA, 25 bp, Homo sapien
ctggccagtatatccacatgtccag

SEQ ID NO: 1145801 - DNA, 25 bp, Homo sapien
tcctctgttgtccactgttactttc

SEQ ID NO: 1145802 - DNA, 25 bp, Homo sapien
tcagtttttggtgatctcttcgtca

SEQ ID NO: 1145803 - DNA, 25 bp, Homo sapien
ttcttcttttcgaaacgtggcctca

SEQ ID NO: 1145804 - DNA, 25 bp, Homo sapien
tcttttcgaaacgtggcctcactgg

SEQ ID NO: 1145805 - DNA, 25 bp, Homo sapien
aaacgtggcctcactggttgggcac

SEQ ID NO: 1145806 - DNA, 25 bp, Homo sapien
cctcatctacacagtcatgtatttt

SEQ ID NO: 1145807 - DNA, 25 bp, Homo sapien
cctggtgagcatataaaaagcacaa

SEQ ID NO: 1145808 - DNA, 25 bp, Homo sapien
ctacacctggtgagcatataaaaag

SEQ ID NO: 1145809 - DNA, 25 bp, Homo sapien
cacctggtgagcatataaaaagcac

SEQ ID NO: 1145810 - DNA, 25 bp, Homo sapien
tggtgagcatataaaaagcacaatt

SEQ ID NO: 1145811 - DNA, 25 bp, Homo sapien
taagccaagaagctgcggttcggcc

SEQ ID NO: 1145812 - DNA, 25 bp, Homo sapien
tcggccgctgtgagtagaagtacct

SEQ ID NO: 1145813 - DNA, 25 bp, Homo sapien
ttcggcctggcgcgctagagtaact

SEQ ID NO: 1145814 - DNA, 25 bp, Homo sapien
gagtaactgggcagtattctccagc

SEQ ID NO: 1145815 - DNA, 25 bp, Homo sapien
agatcttccggcagcaagggtccag

SEQ ID NO: 1145816 - DNA, 25 bp, Homo sapien
tgtcactgatgagcactttccgcag

SEQ ID NO: 1145817 - DNA, 25 bp, Homo sapien
ctttccgcagatttgcaaaagccat

SEQ ID NO: 1145818 - DNA, 25 bp, Homo sapien
ggcagcaagggtccaggctgtcact

SEQ ID NO: 1145819 - DNA, 25 bp, Homo sapien
ctgggttccccgcaaagaagccact

SEQ ID NO: 1145820 - DNA, 25 bp, Homo sapien
cagcctgcaggaccagttggagcag

SEQ ID NO: 1145821 - DNA, 25 bp, Homo sapien
gttgggaagaatcgccagtccctgg

SEQ ID NO: 1145822 - DNA, 25 bp, Homo sapien
gaggctgccagaacaattgcgcgct

SEQ ID NO: 1145823 - DNA, 25 bp, Homo sapien
ttatctccactaagaagagaagagg

SEQ ID NO: 1145824 - DNA, 25 bp, Homo sapien
agaagaggaatgatgcttaggctgc

SEQ ID NO: 1145825 - DNA, 25 bp, Homo sapien
aatgtaaggagagcagtgggtaatt

SEQ ID NO: 1145826 - DNA, 25 bp, Homo sapien
gagagcagtgggtaattttatctcc

SEQ ID NO: 1145827 - DNA, 25 bp, Homo sapien
cattagacactgagctactgagggc

SEQ ID NO: 1145828 - DNA, 25 bp, Homo sapien
ccaggccggtaagaaagcagcaagt

SEQ ID NO: 1145829 - DNA, 25 bp, Homo sapien
tggcttctagggtaagggcccacac

SEQ ID NO: 1145830 - DNA, 25 bp, Homo sapien
aaaatgggagttcctgcctgctggc

SEQ ID NO: 1145831 - DNA, 25 bp, Homo sapien
ctgcagcctggatgtccatcagaca

SEQ ID NO: 1145832 - DNA, 25 bp, Homo sapien
gcagcctggatgtccatcagacaca

SEQ ID NO: 1145833 - DNA, 25 bp, Homo sapien
tgcagcctggatgtccatcagacac

SEQ ID NO: 1145834 - DNA, 25 bp, Homo sapien
cctgcagcctggatgtccatcagac

SEQ ID NO: 1145835 - DNA, 25 bp, Homo sapien
tgtttggcatgctcaagaaagggca

SEQ ID NO: 1145836 - DNA, 25 bp, Homo sapien
caaccgctttgtttggcatgctcaa

SEQ ID NO: 1145837 - DNA, 25 bp, Homo sapien
ggcatgctcaagaaagggcagcatt

SEQ ID NO: 1145838 - DNA, 25 bp, Homo sapien
ggctcatctctctagacagcaccat

SEQ ID NO: 1145839 - DNA, 25 bp, Homo sapien
catgctgatttttacttagagtgga

SEQ ID NO: 1145840 - DNA, 25 bp, Homo sapien
aaatgtgggctaggactcatgctga

SEQ ID NO: 1145841 - DNA, 25 bp, Homo sapien
ggctaggactcatgctgatttttac

SEQ ID NO: 1145842 - DNA, 25 bp, Homo sapien
tttttacttagagtggaggagactg

SEQ ID NO: 1145843 - DNA, 25 bp, Homo sapien
ttcatagatatctttggtatactca

SEQ ID NO: 1145844 - DNA, 25 bp, Homo sapien
ttccggaaccttaggaagtcactga

SEQ ID NO: 1145845 - DNA, 25 bp, Homo sapien
aagagatgcatttccggaaccttag

SEQ ID NO: 1145846 - DNA, 25 bp, Homo sapien
actgccagttcatagatatctttgg

SEQ ID NO: 1145847 - DNA, 25 bp, Homo sapien
agaactcgtaaagccgcaggcacat

SEQ ID NO: 1145848 - DNA, 25 bp, Homo sapien
gtcattctgtgagaactcgtaaagc

SEQ ID NO: 1145849 - DNA, 25 bp, Homo sapien
tgtgagaactcgtaaagccgcaggc

SEQ ID NO: 1145850 - DNA, 25 bp, Homo sapien
gaaagtcattctgtgagaactcgta

SEQ ID NO: 1145851 - DNA, 25 bp, Homo sapien
accttggtggcagagcgaacaataa

SEQ ID NO: 1145852 - DNA, 25 bp, Homo sapien
ggagtttctcagctgcgttgatgac

SEQ ID NO: 1145853 - DNA, 25 bp, Homo sapien
gagcgaacaataaggccttcacagt

SEQ ID NO: 1145854 - DNA, 25 bp, Homo sapien
gttgatgacatcagcggtcaccttg

SEQ ID NO: 1145855 - DNA, 25 bp, Homo sapien
cccttccttgttgcggcctccagat

SEQ ID NO: 1145856 - DNA, 25 bp, Homo sapien
tgcccttccttgttgcggcctccag

SEQ ID NO: 1145857 - DNA, 25 bp, Homo sapien
agatgcccttccttgttgcggcctc

SEQ ID NO: 1145858 - DNA, 25 bp, Homo sapien
aagatgcccttccttgttgcggcct

SEQ ID NO: 1145859 - DNA, 25 bp, Homo sapien
ctggaagcccttccaatggactcag

SEQ ID NO: 1145860 - DNA, 25 bp, Homo sapien
tgtgttgaccatgcaggccctagac

SEQ ID NO: 1145861 - DNA, 25 bp, Homo sapien
ctctcaagtgagttttttctcccta

SEQ ID NO: 1145862 - DNA, 25 bp, Homo sapien
taggtgtggtcagtctccgcactca

SEQ ID NO: 1145863 - DNA, 25 bp, Homo sapien
cctgtataagataaacggactctca

SEQ ID NO: 1145864 - DNA, 25 bp, Homo sapien
caagttctgaactgagaaagcctcc

SEQ ID NO: 1145865 - DNA, 25 bp, Homo sapien
gaatttcatatacgtgttcaccctg

SEQ ID NO: 1145866 - DNA, 25 bp, Homo sapien
tattagtaatctccacctgtctgac

SEQ ID NO: 1145867 - DNA, 25 bp, Homo sapien
cacaagtgagttctgcggcactgag

SEQ ID NO: 1145868 - DNA, 25 bp, Homo sapien
ttctgcggcactgaggctgttccca

SEQ ID NO: 1145869 - DNA, 25 bp, Homo sapien
aggcacatgatcattccacaagtga

SEQ ID NO: 1145870 - DNA, 25 bp, Homo sapien
ctggccaggcacatgatcattccac

SEQ ID NO: 1145871 - DNA, 25 bp, Homo sapien
gcacattctgtgccacaaccatttg

SEQ ID NO: 1145872 - DNA, 25 bp, Homo sapien
tgccccatccactcaagaggcctgg

SEQ ID NO: 1145873 - DNA, 25 bp, Homo sapien
cccatccactcaagaggcctggaac

SEQ ID NO: 1145874 - DNA, 25 bp, Homo sapien
acaaccatttgatttctaggctgcc

SEQ ID NO: 1145875 - DNA, 25 bp, Homo sapien
gaatatcagtgaataccagagagct

SEQ ID NO: 1145876 - DNA, 25 bp, Homo sapien
caggtctcgccatgggaaaagtaat

SEQ ID NO: 1145877 - DNA, 25 bp, Homo sapien
ggaaagcaggtctcgccatgggaaa

SEQ ID NO: 1145878 - DNA, 25 bp, Homo sapien
ggagttagagcagaggtaaattccc

SEQ ID NO: 1145879 - DNA, 25 bp, Homo sapien
tagactagtctggaccctagagtgg

SEQ ID NO: 1145880 - DNA, 25 bp, Homo sapien
tcctgtgggcatgggtcatcaacac

SEQ ID NO: 1145881 - DNA, 25 bp, Homo sapien
caattagggcaacattagaggtcaa

SEQ ID NO: 1145882 - DNA, 25 bp, Homo sapien
tctgtcctgaatgcgtggtcccaac

SEQ ID NO: 1145883 - DNA, 25 bp, Homo sapien
gccacttccccaagaactgggtctg

SEQ ID NO: 1145884 - DNA, 25 bp, Homo sapien
ccaggaaggagatgcaacatcaggt

SEQ ID NO: 1145885 - DNA, 25 bp, Homo sapien
gacacaggttcagagggtccattcg

SEQ ID NO: 1145886 - DNA, 25 bp, Homo sapien
catcaggtttgcacagtcactgccc

SEQ ID NO: 1145887 - DNA, 25 bp, Homo sapien
gtccttcatcgaagccgtcgcctgg

SEQ ID NO: 1145888 - DNA, 25 bp, Homo sapien
cgaagccgtcgcctggggaatctgc

SEQ ID NO: 1145889 - DNA, 25 bp, Homo sapien
tcccatttgccgtccttcatcgaag

SEQ ID NO: 1145890 - DNA, 25 bp, Homo sapien
ttgccgtccttcatcgaagccgtcg

SEQ ID NO: 1145891 - DNA, 25 bp, Homo sapien
ctgcaaccaaacaggcaaaaggaaa

SEQ ID NO: 1145892 - DNA, 25 bp, Homo sapien
gcaaccaaacaggcaaaaggaaaga

SEQ ID NO: 1145893 - DNA, 25 bp, Homo sapien
tgcaaccaaacaggcaaaaggaaag

SEQ ID NO: 1145894 - DNA, 25 bp, Homo sapien
tcccaaaggactgcatccgggtagc

SEQ ID NO: 1145895 - DNA, 25 bp, Homo sapien
ccaaaggactgcatccgggtagcta

SEQ ID NO: 1145896 - DNA, 25 bp, Homo sapien
aaaggactgcatccgggtagctacc

SEQ ID NO: 1145897 - DNA, 25 bp, Homo sapien
gactgcatccgggtagctacctctc

SEQ ID NO: 1145898 - DNA, 25 bp, Homo sapien
ccacatcacagggttccagcaacat

SEQ ID NO: 1145899 - DNA, 25 bp, Homo sapien
cacatcacagggttccagcaacatc

SEQ ID NO: 1145900 - DNA, 25 bp, Homo sapien
aatgctgcaccgtgtctcttgttta

SEQ ID NO: 1145901 - DNA, 25 bp, Homo sapien
tctctcccgaggtgtactgtctact

SEQ ID NO: 1145902 - DNA, 25 bp, Homo sapien
tcaacacctggttcactgggactca

SEQ ID NO: 1145903 - DNA, 25 bp, Homo sapien
ttcactcaccagagagctaaaggac

SEQ ID NO: 1145904 - DNA, 25 bp, Homo sapien
gaaggggagtcatggggaagaggac

SEQ ID NO: 1145905 - DNA, 25 bp, Homo sapien
ggaaggggagtcatggggaagagga

SEQ ID NO: 1145906 - DNA, 25 bp, Homo sapien
ttgccaggaatattgatgtgtagtg

SEQ ID NO: 1145907 - DNA, 25 bp, Homo sapien
tgccgaagtctccatgatgaagaat

SEQ ID NO: 1145908 - DNA, 25 bp, Homo sapien
tttcatctggttgaagtcgctgccg

SEQ ID NO: 1145909 - DNA, 25 bp, Homo sapien
gtgtagtggtgccacggagaaggaa

SEQ ID NO: 1145910 - DNA, 25 bp, Homo sapien
tagactctccggaatgatgaggtcc

SEQ ID NO: 1145911 - DNA, 25 bp, Homo sapien
gggagacggaatgatccaagccatg

SEQ ID NO: 1145912 - DNA, 25 bp, Homo sapien
gccacttagactctccggaatgatg

SEQ ID NO: 1145913 - DNA, 25 bp, Homo sapien
gacggaatgatccaagccatgtttc

SEQ ID NO: 1145914 - DNA, 25 bp, Homo sapien
tccaaaaagaggatgaggctagtat

SEQ ID NO: 1145915 - DNA, 25 bp, Homo sapien
tttatatgagaatgcattcctttat

SEQ ID NO: 1145916 - DNA, 25 bp, Homo sapien
taaatagtccgggtatctgacatct

SEQ ID NO: 1145917 - DNA, 25 bp, Homo sapien
ggtatctgacatctagggatttcca

SEQ ID NO: 1145918 - DNA, 25 bp, Homo sapien
aagcataccggcatggcacagggac

SEQ ID NO: 1145919 - DNA, 25 bp, Homo sapien
ctttggaatagctaagcataccggc

SEQ ID NO: 1145920 - DNA, 25 bp, Homo sapien
ctgtttacctaaaatggatcatgaa

SEQ ID NO: 1145921 - DNA, 25 bp, Homo sapien
gaatagctaagcataccggcatggc

SEQ ID NO: 1145922 - DNA, 25 bp, Homo sapien
aacccgaggctcttgagtttgagaa

SEQ ID NO: 1145923 - DNA, 25 bp, Homo sapien
ctgggcagtaagcattccaggtaac

SEQ ID NO: 1145924 - DNA, 25 bp, Homo sapien
cagtaagcattccaggtaacacact

SEQ ID NO: 1145925 - DNA, 25 bp, Homo sapien
acacactgagataggagctgcccat

SEQ ID NO: 1145926 - DNA, 25 bp, Homo sapien
ggctcaatgtgccaccacctgctgt

SEQ ID NO: 1145927 - DNA, 25 bp, Homo sapien
gaaatcttaaacagagacccaaata

SEQ ID NO: 1145928 - DNA, 25 bp, Homo sapien
taaaggctcaatgtgccaccacctg

SEQ ID NO: 1145929 - DNA, 25 bp, Homo sapien
aaaaataggtcaattcaaagctgca

SEQ ID NO: 1145930 - DNA, 25 bp, Homo sapien
cggccagaacaatggccctgttcat

SEQ ID NO: 1145931 - DNA, 25 bp, Homo sapien
ggccggccagaacaatggccctgtt

SEQ ID NO: 1145932 - DNA, 25 bp, Homo sapien
gaggccggccagaacaatggccctg

SEQ ID NO: 1145933 - DNA, 25 bp, Homo sapien
ctgaggccggccagaacaatggccc

SEQ ID NO: 1145934 - DNA, 25 bp, Homo sapien
tgccatcgttgtcacaagtcttctt

SEQ ID NO: 1145935 - DNA, 25 bp, Homo sapien
gcgaggagatgggatccctgccatc

SEQ ID NO: 1145936 - DNA, 25 bp, Homo sapien
tgctgctcccctcggctgtaaccta

SEQ ID NO: 1145937 - DNA, 25 bp, Homo sapien
cctcggctgtaacctactcatttct

SEQ ID NO: 1145938 - DNA, 25 bp, Homo sapien
tgaccacacaatgatgctgggactg

SEQ ID NO: 1145939 - DNA, 25 bp, Homo sapien
gcttaattaattctcatgaccacac

SEQ ID NO: 1145940 - DNA, 25 bp, Homo sapien
taattctccagttaatttaccatac

SEQ ID NO: 1145941 - DNA, 25 bp, Homo sapien
ccatgttccacatactaagtactat

SEQ ID NO: 1145942 - DNA, 25 bp, Homo sapien
tgctgaacaccaaaggaggccgaga

SEQ ID NO: 1145943 - DNA, 25 bp, Homo sapien
tgaacaccaaaggaggccgagacct

SEQ ID NO: 1145944 - DNA, 25 bp, Homo sapien
aacaccaaaggaggccgagacctct

SEQ ID NO: 1145945 - DNA, 25 bp, Homo sapien
tctggggaaatgatggggtcatacc

SEQ ID NO: 1145946 - DNA, 25 bp, Homo sapien
gtcgtggagggcaggagaggagtgt

SEQ ID NO: 1145947 - DNA, 25 bp, Homo sapien
ctgtcgtggagggcaggagaggagt

SEQ ID NO: 1145948 - DNA, 25 bp, Homo sapien
tggagggcaggagaggagtgtgcac

SEQ ID NO: 1145949 - DNA, 25 bp, Homo sapien
cgtggagggcaggagaggagtgtgc

SEQ ID NO: 1145950 - DNA, 25 bp, Homo sapien
gtccacgatccctccacgggcacag

SEQ ID NO: 1145951 - DNA, 25 bp, Homo sapien
acgggcacagttcaccacacgcacc

SEQ ID NO: 1145952 - DNA, 25 bp, Homo sapien
ggagcagggcgccttcgtccacgat

SEQ ID NO: 1145953 - DNA, 25 bp, Homo sapien
acccccttcttgcactgggcaaagg

SEQ ID NO: 1145954 - DNA, 25 bp, Homo sapien
agaggctttctgtaaaacgccaggc

SEQ ID NO: 1145955 - DNA, 25 bp, Homo sapien
tctcccgtcctcctgacgctgaggc

SEQ ID NO: 1145956 - DNA, 25 bp, Homo sapien
caggctccgcaaggactcctcaaac

SEQ ID NO: 1145957 - DNA, 25 bp, Homo sapien
gaaagagacaataagctagaggctt

SEQ ID NO: 1145958 - DNA, 25 bp, Homo sapien
gaatactgccagtatcctcgggctt

SEQ ID NO: 1145959 - DNA, 25 bp, Homo sapien
gagggaatactgccagtatcctcgg

SEQ ID NO: 1145960 - DNA, 25 bp, Homo sapien
tgggaaagcagcccaccccgaggac

SEQ ID NO: 1145961 - DNA, 25 bp, Homo sapien
gggaatactgccagtatcctcgggc

SEQ ID NO: 1145962 - DNA, 25 bp, Homo sapien
tcactgagaagattgcccttgggta

SEQ ID NO: 1145963 - DNA, 25 bp, Homo sapien
cttggctctcatcaggacaggttgc

SEQ ID NO: 1145964 - DNA, 25 bp, Homo sapien
gtaatcctgtgagtcccggccacat

SEQ ID NO: 1145965 - DNA, 25 bp, Homo sapien
taaccatgtaagtaccaccagcaag

SEQ ID NO: 1145966 - DNA, 25 bp, Homo sapien
caggaaagttggagggaaggcagtc

SEQ ID NO: 1145967 - DNA, 25 bp, Homo sapien
ggtggtcactggactcaataatggg

SEQ ID NO: 1145968 - DNA, 25 bp, Homo sapien
aaagagatacctctaagttggctgc

SEQ ID NO: 1145969 - DNA, 25 bp, Homo sapien
tctggtgccttccacttctattttg

SEQ ID NO: 1145970 - DNA, 25 bp, Homo sapien
cccacagcggctctgagcctccttg

SEQ ID NO: 1145971 - DNA, 25 bp, Homo sapien
atgacattctcatggtccaccaagg

SEQ ID NO: 1145972 - DNA, 25 bp, Homo sapien
tgacattctcatggtccaccaaggc

SEQ ID NO: 1145973 - DNA, 25 bp, Homo sapien
ggggacagctgatgacattctcatg

SEQ ID NO: 1145974 - DNA, 25 bp, Homo sapien
tgctggtcatagccctgctgacttc

SEQ ID NO: 1145975 - DNA, 25 bp, Homo sapien
gctggtcatagccctgctgacttcc

SEQ ID NO: 1145976 - DNA, 25 bp, Homo sapien
gctgctggtcatagccctgctgact

SEQ ID NO: 1145977 - DNA, 25 bp, Homo sapien
ctgctggtcatagccctgctgactt

SEQ ID NO: 1145978 - DNA, 25 bp, Homo sapien
catagaggacagaggatgcagacag

SEQ ID NO: 1145979 - DNA, 25 bp, Homo sapien
gcaagatgagtgaagtgtgctctgc

SEQ ID NO: 1145980 - DNA, 25 bp, Homo sapien
gaggagcccacacagcatagaggac

SEQ ID NO: 1145981 - DNA, 25 bp, Homo sapien
tgcagacaggtcagagtctctgctg

SEQ ID NO: 1145982 - DNA, 25 bp, Homo sapien
caataaattgcaaggctgcgatggg

SEQ ID NO: 1145983 - DNA, 25 bp, Homo sapien
gtaaaaccctgaagcccagattggc

SEQ ID NO: 1145984 - DNA, 25 bp, Homo sapien
cctaatggtaatggcaataaattgc

SEQ ID NO: 1145985 - DNA, 25 bp, Homo sapien
actgctacctaatggtaatggcaat

SEQ ID NO: 1145986 - DNA, 25 bp, Homo sapien
ggaggtgtccatcacagggctccca

SEQ ID NO: 1145987 - DNA, 25 bp, Homo sapien
tcacgggagcctctccagtgtggga

SEQ ID NO: 1145988 - DNA, 25 bp, Homo sapien
actaagagggcccataacgcaggca

SEQ ID NO: 1145989 - DNA, 25 bp, Homo sapien
gaggagatctggagcaccatgctgc

SEQ ID NO: 1145990 - DNA, 25 bp, Homo sapien
gagttaggcatctggccacttttat

SEQ ID NO: 1145991 - DNA, 25 bp, Homo sapien
tattgagataacttgtaaagtcaac

SEQ ID NO: 1145992 - DNA, 25 bp, Homo sapien
tgagataacttgtaaagtcaaccat

SEQ ID NO: 1145993 - DNA, 25 bp, Homo sapien
ttctgagttaggcatctggccactt

SEQ ID NO: 1145994 - DNA, 25 bp, Homo sapien
tcagccactaacaacaggacaagga

SEQ ID NO: 1145995 - DNA, 25 bp, Homo sapien
gaaagacagtatagggtcactcctg

SEQ ID NO: 1145996 - DNA, 25 bp, Homo sapien
cacaaaacatatgggagtcgcagat

SEQ ID NO: 1145997 - DNA, 25 bp, Homo sapien
caaatatcaacgcatgcgaagtcca

SEQ ID NO: 1145998 - DNA, 25 bp, Homo sapien
acccagcccaggctcgcatcagtgt

SEQ ID NO: 1145999 - DNA, 25 bp, Homo sapien
tctgccagaccaatccaaggcttgg

SEQ ID NO: 1146000 - DNA, 25 bp, Homo sapien
cagagcttctgccagaccaatccaa

SEQ ID NO: 1146001 - DNA, 25 bp, Homo sapien
cccagcccaggctcgcatcagtgtc

SEQ ID NO: 1146002 - DNA, 25 bp, Homo sapien
cagcagcttagcgttcaccaagttc

SEQ ID NO: 1146003 - DNA, 25 bp, Homo sapien
ttagcgttcaccaagttcacatccg

SEQ ID NO: 1146004 - DNA, 25 bp, Homo sapien
cggggcttaggcagttcccagcatt

SEQ ID NO: 1146005 - DNA, 25 bp, Homo sapien
ttcaggaggccgacaatgactgcgg

SEQ ID NO: 1146006 - DNA, 25 bp, Homo sapien
tgtgggggagaagactagtgctgac

SEQ ID NO: 1146007 - DNA, 25 bp, Homo sapien
tcagagaacgggctctggaaatgtg

SEQ ID NO: 1146008 - DNA, 25 bp, Homo sapien
tagacaggccgatgcaaggctggga

SEQ ID NO: 1146009 - DNA, 25 bp, Homo sapien
aggctgggacctaggcctccgctca

SEQ ID NO: 1146010 - DNA, 25 bp, Homo sapien
tcaagaacccgggtgctacggcatg

SEQ ID NO: 1146011 - DNA, 25 bp, Homo sapien
tcctagagcttgcaagtgaatcaag

SEQ ID NO: 1146012 - DNA, 25 bp, Homo sapien
caagtgaatcaagaacccgggtgct

SEQ ID NO: 1146013 - DNA, 25 bp, Homo sapien
cgccaacgggaagccgtgcaaggca

SEQ ID NO: 1146014 - DNA, 25 bp, Homo sapien
agtggcatgactggcatgcaggagt

SEQ ID NO: 1146015 - DNA, 25 bp, Homo sapien
gctctactgcctatcccttctgcca

SEQ ID NO: 1146016 - DNA, 25 bp, Homo sapien
agctctactgcctatcccttctgcc

SEQ ID NO: 1146017 - DNA, 25 bp, Homo sapien
catgactggcatgcaggagtggagg

SEQ ID NO: 1146018 - DNA, 25 bp, Homo sapien
ctcagtaattcaggaccagaaggga

SEQ ID NO: 1146019 - DNA, 25 bp, Homo sapien
cagcctggataatgtgctcagtaat

SEQ ID NO: 1146020 - DNA, 25 bp, Homo sapien
cattggtaggatgtagggctccagc

SEQ ID NO: 1146021 - DNA, 25 bp, Homo sapien
tcttggccaaatcacccattggtag

SEQ ID NO: 1146022 - DNA, 25 bp, Homo sapien
tccattgagcccctgcagtacaggc

SEQ ID NO: 1146023 - DNA, 25 bp, Homo sapien
cagtacaggcgtagtgccttggacc

SEQ ID NO: 1146024 - DNA, 25 bp, Homo sapien
tgagcccctgcagtacaggcgtagt

SEQ ID NO: 1146025 - DNA, 25 bp, Homo sapien
ggcgtagtgccttggaccaagccca

SEQ ID NO: 1146026 - DNA, 25 bp, Homo sapien
ggtctgagtccggaataggagcagg

SEQ ID NO: 1146027 - DNA, 25 bp, Homo sapien
gtctgagtccggaataggagcaggg

SEQ ID NO: 1146028 - DNA, 25 bp, Homo sapien
caatcatggtaggcagcattgcagg

SEQ ID NO: 1146029 - DNA, 25 bp, Homo sapien
atcatggtaggcagcattgcagggt

SEQ ID NO: 1146030 - DNA, 25 bp, Homo sapien
tagaagaaactcctggttggcacag

SEQ ID NO: 1146031 - DNA, 25 bp, Homo sapien
gaagttcaaagcttttgtgatcaaa

SEQ ID NO: 1146032 - DNA, 25 bp, Homo sapien
gagcggatgatggtctcagaatcaa

SEQ ID NO: 1146033 - DNA, 25 bp, Homo sapien
gattgggagcagaatcagaagttca

SEQ ID NO: 1146034 - DNA, 25 bp, Homo sapien
tgacgtgccaggtctccccatctga

SEQ ID NO: 1146035 - DNA, 25 bp, Homo sapien
tggtaggacagcagccgcacgcctg

SEQ ID NO: 1146036 - DNA, 25 bp, Homo sapien
gacaccagtgaagtctggtaggaca

SEQ ID NO: 1146037 - DNA, 25 bp, Homo sapien
aggagatgcccatgacgtgccaggt

SEQ ID NO: 1146038 - DNA, 25 bp, Homo sapien
tttctctccctattgatcacagtgg

SEQ ID NO: 1146039 - DNA, 25 bp, Homo sapien
agaggcccgcgttcagcccaagaat

SEQ ID NO: 1146040 - DNA, 25 bp, Homo sapien
ccgcgttcagcccaagaatgtggat

SEQ ID NO: 1146041 - DNA, 25 bp, Homo sapien
agtgtaagcagtgtcagaggcccgc

SEQ ID NO: 1146042 - DNA, 25 bp, Homo sapien
catcagccctgtagagtgaggagcc

SEQ ID NO: 1146043 - DNA, 25 bp, Homo sapien
tccagaaatgtgcatgcagatcagc

SEQ ID NO: 1146044 - DNA, 25 bp, Homo sapien
gaatttgaatcgacatagtagcccc

SEQ ID NO: 1146045 - DNA, 25 bp, Homo sapien
cctgggcttatggtgctatggacta

SEQ ID NO: 1146046 - DNA, 25 bp, Homo sapien
taggagaggtggacaagtgggctga

SEQ ID NO: 1146047 - DNA, 25 bp, Homo sapien
cccagatgttgttagggctaggaga

SEQ ID NO: 1146048 - DNA, 25 bp, Homo sapien
gagaggacgagctcagttagcagcc

SEQ ID NO: 1146049 - DNA, 25 bp, Homo sapien
ccgcaggatgcctttgagaggacga

SEQ ID NO: 1146050 - DNA, 25 bp, Homo sapien
ttgattgcaactgattaaagagaag

SEQ ID NO: 1146051 - DNA, 25 bp, Homo sapien
tctgcctgcatgttttgctaacaag

SEQ ID NO: 1146052 - DNA, 25 bp, Homo sapien
tcttggtattctaagccacacacac

SEQ ID NO: 1146053 - DNA, 25 bp, Homo sapien
ggcatacaccttgaccaaatcagtg

SEQ ID NO: 1146054 - DNA, 25 bp, Homo sapien
gcacttatttggctactacttagag

SEQ ID NO: 1146055 - DNA, 25 bp, Homo sapien
gatttaagcatggagtaagtttgtt

SEQ ID NO: 1146056 - DNA, 25 bp, Homo sapien
tgaagggatttaagcatggagtaag

SEQ ID NO: 1146057 - DNA, 25 bp, Homo sapien
tggctactacttagagactagattg

SEQ ID NO: 1146058 - DNA, 25 bp, Homo sapien
agatgaaagaaactcgtaccaaagg

SEQ ID NO: 1146059 - DNA, 25 bp, Homo sapien
tgtttgggcacatcaagaaaacagt

SEQ ID NO: 1146060 - DNA, 25 bp, Homo sapien
tacatgatgtcaagggatgggcaag

SEQ ID NO: 1146061 - DNA, 25 bp, Homo sapien
gacagtggtctccaaagtgaagtac

SEQ ID NO: 1146062 - DNA, 25 bp, Homo sapien
ctttttttattatatagcttgcctt

SEQ ID NO: 1146063 - DNA, 25 bp, Homo sapien
tattatatagcttgcctttttttat

SEQ ID NO: 1146064 - DNA, 25 bp, Homo sapien
ttattatatagcttgccttttttta

SEQ ID NO: 1146065 - DNA, 25 bp, Homo sapien
ggcctttttttattatatagcttgc

SEQ ID NO: 1146066 - DNA, 25 bp, Homo sapien
aaggcttggagttaacatctttgta

SEQ ID NO: 1146067 - DNA, 25 bp, Homo sapien
cttggagttaacatctttgtacgcc

SEQ ID NO: 1146068 - DNA, 25 bp, Homo sapien
ggcttggagttaacatctttgtacg

SEQ ID NO: 1146069 - DNA, 25 bp, Homo sapien
tggagttaacatctttgtacgccat

SEQ ID NO: 1146070 - DNA, 25 bp, Homo sapien
ttccctgcaaacaggaacgattcat

SEQ ID NO: 1146071 - DNA, 25 bp, Homo sapien
ctctgtctctaagcttccctgcaaa

SEQ ID NO: 1146072 - DNA, 25 bp, Homo sapien
ccacgagtttccctctgtctctaag

SEQ ID NO: 1146073 - DNA, 25 bp, Homo sapien
ctgtctctaagcttccctgcaaaca

SEQ ID NO: 1146074 - DNA, 25 bp, Homo sapien
tgaagggacaaagtccaaggccata

SEQ ID NO: 1146075 - DNA, 25 bp, Homo sapien
gcttcaatatcaggagatgttaagg

SEQ ID NO: 1146076 - DNA, 25 bp, Homo sapien
cttcaatatcaggagatgttaaggg

SEQ ID NO: 1146077 - DNA, 25 bp, Homo sapien
ctttctcctgctgataggatttgct

SEQ ID NO: 1146078 - DNA, 25 bp, Homo sapien
cctttctcctgctgataggatttgc

SEQ ID NO: 1146079 - DNA, 25 bp, Homo sapien
ttgatccataggctcacatttgatc

SEQ ID NO: 1146080 - DNA, 25 bp, Homo sapien
tccataggctcacatttgatcccaa

SEQ ID NO: 1146081 - DNA, 25 bp, Homo sapien
cataggctcacatttgatcccaact

SEQ ID NO: 1146082 - DNA, 25 bp, Homo sapien
aggctcacatttgatcccaactggc

SEQ ID NO: 1146083 - DNA, 25 bp, Homo sapien
cctggtggtatttcagataagacac

SEQ ID NO: 1146084 - DNA, 25 bp, Homo sapien
ctggtggtatttcagataagacact

SEQ ID NO: 1146085 - DNA, 25 bp, Homo sapien
ccaggctcttctcactccggataag

SEQ ID NO: 1146086 - DNA, 25 bp, Homo sapien
cggataagcatgacaactcccaggg

SEQ ID NO: 1146087 - DNA, 25 bp, Homo sapien
catatgtggccatgacatgaccagg

SEQ ID NO: 1146088 - DNA, 25 bp, Homo sapien
gaggtcacagtattgcaaatcttcc

SEQ ID NO: 1146089 - DNA, 25 bp, Homo sapien
tctctgagacactaaatgctctctc

SEQ ID NO: 1146090 - DNA, 25 bp, Homo sapien
gtgatgaatgatgtcctgtcttctc

SEQ ID NO: 1146091 - DNA, 25 bp, Homo sapien
atcatgaaagtgatgaatgatgtcc

SEQ ID NO: 1146092 - DNA, 25 bp, Homo sapien
tctgagacactaaatgctctctcca

SEQ ID NO: 1146093 - DNA, 25 bp, Homo sapien
tgtaactcaaatggccggcttcctg

SEQ ID NO: 1146094 - DNA, 25 bp, Homo sapien
gaaatttcttgtaactcaaatggcc

SEQ ID NO: 1146095 - DNA, 25 bp, Homo sapien
cagagatgaacattctagaaatcaa

SEQ ID NO: 1146096 - DNA, 25 bp, Homo sapien
agaaatcaatgagaaattgcgcccc

SEQ ID NO: 1146097 - DNA, 25 bp, Homo sapien
tttcaccagtttttaacccatcatg

SEQ ID NO: 1146098 - DNA, 25 bp, Homo sapien
ctgccacaaacgtcaccatggtggt

SEQ ID NO: 1146099 - DNA, 25 bp, Homo sapien
taacccatcatgtgtttgcgtttct

SEQ ID NO: 1146100 - DNA, 25 bp, Homo sapien
gattaaacctattcgatttcaccag

SEQ ID NO: 1146101 - DNA, 25 bp, Homo sapien
tgctgtggggagtgatcacgttttt

SEQ ID NO: 1146102 - DNA, 25 bp, Homo sapien
gggagtgatcacgtttttctcaaca

SEQ ID NO: 1146103 - DNA, 25 bp, Homo sapien
tgtggggagtgatcacgtttttctc

SEQ ID NO: 1146104 - DNA, 25 bp, Homo sapien
agtgatcacgtttttctcaacagta

SEQ ID NO: 1146105 - DNA, 25 bp, Homo sapien
gggctcctaagattccatgacaccc

SEQ ID NO: 1146106 - DNA, 25 bp, Homo sapien
tgcagggctcctaagattccatgac

SEQ ID NO: 1146107 - DNA, 25 bp, Homo sapien
gaatgcagggctcctaagattccat

SEQ ID NO: 1146108 - DNA, 25 bp, Homo sapien
aagcctgggcaattggaatgcaggg

SEQ ID NO: 1146109 - DNA, 25 bp, Homo sapien
gtcattggaggattgtgtgggctgc

SEQ ID NO: 1146110 - DNA, 25 bp, Homo sapien
ttggaggattgtgtgggctgcagag

SEQ ID NO: 1146111 - DNA, 25 bp, Homo sapien
attggaggattgtgtgggctgcaga

SEQ ID NO: 1146112 - DNA, 25 bp, Homo sapien
agtgtcattggaggattgtgtgggc

SEQ ID NO: 1146113 - DNA, 25 bp, Homo sapien
caagggaagacccaagtctcatact

SEQ ID NO: 1146114 - DNA, 25 bp, Homo sapien
tcccatacggttaaagcaagtttgc

SEQ ID NO: 1146115 - DNA, 25 bp, Homo sapien
tcttagtgagaatcattggtattcc

SEQ ID NO: 1146116 - DNA, 25 bp, Homo sapien
gtttgcagacacttccgaattttgg

SEQ ID NO: 1146117 - DNA, 25 bp, Homo sapien
gatcagaggcattgagacatgaaga

SEQ ID NO: 1146118 - DNA, 25 bp, Homo sapien
ctagatcagaggcattgagacatga

SEQ ID NO: 1146119 - DNA, 25 bp, Homo sapien
ttcactttcaggacagttgtgttca

SEQ ID NO: 1146120 - DNA, 25 bp, Homo sapien
cagttgtgttcactagatcagaggc

SEQ ID NO: 1146121 - DNA, 25 bp, Homo sapien
agcatgggctggcaagcgttctcag

SEQ ID NO: 1146122 - DNA, 25 bp, Homo sapien
ctcaacttcaattctaaaggccctg

SEQ ID NO: 1146123 - DNA, 25 bp, Homo sapien
gcaagcgttctcagagagcctctca

SEQ ID NO: 1146124 - DNA, 25 bp, Homo sapien
ggaatagacggtagaagtttgctcc

SEQ ID NO: 1146125 - DNA, 25 bp, Homo sapien
ctcctctggtcgctgctgctggggc

SEQ ID NO: 1146126 - DNA, 25 bp, Homo sapien
tgcaggggctcctctggtcgctgct

SEQ ID NO: 1146127 - DNA, 25 bp, Homo sapien
ctggccgtcgcgctgctgcaggggc

SEQ ID NO: 1146128 - DNA, 25 bp, Homo sapien
tggccgtcgcgctgctgcaggggct

SEQ ID NO: 1146129 - DNA, 25 bp, Homo sapien
ccgtccgccatgaggctgtagatgg

SEQ ID NO: 1146130 - DNA, 25 bp, Homo sapien
tcccgtccgccatgaggctgtagat

SEQ ID NO: 1146131 - DNA, 25 bp, Homo sapien
aggtcccgtccgccatgaggctgta

SEQ ID NO: 1146132 - DNA, 25 bp, Homo sapien
gtcccgtccgccatgaggctgtaga

SEQ ID NO: 1146133 - DNA, 25 bp, Homo sapien
tggagggcgagtccttgttgcccac

SEQ ID NO: 1146134 - DNA, 25 bp, Homo sapien
ccttgttgcccacaatggctgtgtc

SEQ ID NO: 1146135 - DNA, 25 bp, Homo sapien
cagatggagggcgagtccttgttgc

SEQ ID NO: 1146136 - DNA, 25 bp, Homo sapien
gagggcgagtccttgttgcccacaa

SEQ ID NO: 1146137 - DNA, 25 bp, Homo sapien
gcagtcatggtgatagtgacattga

SEQ ID NO: 1146138 - DNA, 25 bp, Homo sapien
tcacatgaagatccgcggtcaattc

SEQ ID NO: 1146139 - DNA, 25 bp, Homo sapien
tgccgtggacacctttgcccatcag

SEQ ID NO: 1146140 - DNA, 25 bp, Homo sapien
gtcagcccattcacgaaaaagtttg

SEQ ID NO: 1146141 - DNA, 25 bp, Homo sapien
tcagtactgggaacgctgaaggtgg

SEQ ID NO: 1146142 - DNA, 25 bp, Homo sapien
gtgggaggccatttcataacatttc

SEQ ID NO: 1146143 - DNA, 25 bp, Homo sapien
ctgaaggtgggaggccatttcataa

SEQ ID NO: 1146144 - DNA, 25 bp, Homo sapien
tactgggaacgctgaaggtgggagg

SEQ ID NO: 1146145 - DNA, 25 bp, Homo sapien
gctgctatccagataaagctccctc

SEQ ID NO: 1146146 - DNA, 25 bp, Homo sapien
tgctatccagataaagctccctcat

SEQ ID NO: 1146147 - DNA, 25 bp, Homo sapien
ctgctgctatccagataaagctccc

SEQ ID NO: 1146148 - DNA, 25 bp, Homo sapien
tgctgctatccagataaagctccct

SEQ ID NO: 1146149 - DNA, 25 bp, Homo sapien
tggtgctacacttgggcctggaacc

SEQ ID NO: 1146150 - DNA, 25 bp, Homo sapien
gtggattcttctctgcccacggtta

SEQ ID NO: 1146151 - DNA, 25 bp, Homo sapien
cccacggttaggcattggtgctaca

SEQ ID NO: 1146152 - DNA, 25 bp, Homo sapien
caaatagtgaaggtacctgggaagt

SEQ ID NO: 1146153 - DNA, 25 bp, Homo sapien
tcaggaacctctggatacgcagggc

SEQ ID NO: 1146154 - DNA, 25 bp, Homo sapien
gtgcaggccttaggccgctccctgg

SEQ ID NO: 1146155 - DNA, 25 bp, Homo sapien
tacgcagggctaatatttgccacaa

SEQ ID NO: 1146156 - DNA, 25 bp, Homo sapien
cgctccctggaatggtgtgaccaaa

SEQ ID NO: 1146157 - DNA, 25 bp, Homo sapien
gatgcttgaccacggtaggatgtgt

SEQ ID NO: 1146158 - DNA, 25 bp, Homo sapien
gaccacggtaggatgtgtgggcaca

SEQ ID NO: 1146159 - DNA, 25 bp, Homo sapien
cagctaggggatgcttgaccacggt

SEQ ID NO: 1146160 - DNA, 25 bp, Homo sapien
gaaaggcagctaggggatgcttgac

SEQ ID NO: 1146161 - DNA, 25 bp, Homo sapien
accagcaaagcacctagctgcaacc

SEQ ID NO: 1146162 - DNA, 25 bp, Homo sapien
aaagcacctagctgcaaccctagac

SEQ ID NO: 1146163 - DNA, 25 bp, Homo sapien
gcaaagcacctagctgcaaccctag

SEQ ID NO: 1146164 - DNA, 25 bp, Homo sapien
cagcaaagcacctagctgcaaccct

SEQ ID NO: 1146165 - DNA, 25 bp, Homo sapien
gcaaggattgctgatgcgtgcatca

SEQ ID NO: 1146166 - DNA, 25 bp, Homo sapien
ggcaggtgcaaatatactgcccatt

SEQ ID NO: 1146167 - DNA, 25 bp, Homo sapien
tactgcccattgacggggttggtgt

SEQ ID NO: 1146168 - DNA, 25 bp, Homo sapien
catgacacagtcgtccacatcttct

SEQ ID NO: 1146169 - DNA, 25 bp, Homo sapien
gctgagttcgatagacactccaagg

SEQ ID NO: 1146170 - DNA, 25 bp, Homo sapien
tgagttcgatagacactccaaggaa

SEQ ID NO: 1146171 - DNA, 25 bp, Homo sapien
cttgctgagttcgatagacactcca

SEQ ID NO: 1146172 - DNA, 25 bp, Homo sapien
acacttgctgagttcgatagacact

SEQ ID NO: 1146173 - DNA, 25 bp, Homo sapien
taaacgtagtaaggaaaatgcacac

SEQ ID NO: 1146174 - DNA, 25 bp, Homo sapien
ggctgtgatgctcaaatccattgca

SEQ ID NO: 1146175 - DNA, 25 bp, Homo sapien
gacacatttatgtacccagaggccc

SEQ ID NO: 1146176 - DNA, 25 bp, Homo sapien
tgtttgtatgagaaacccagtaacc

SEQ ID NO: 1146177 - DNA, 25 bp, Homo sapien
tttccttaagcacaatgtcagacca

SEQ ID NO: 1146178 - DNA, 25 bp, Homo sapien
cattacagacaacaggtttcagtga

SEQ ID NO: 1146179 - DNA, 25 bp, Homo sapien
gaaagtatcagctactgatccagcc

SEQ ID NO: 1146180 - DNA, 25 bp, Homo sapien
tgatgaggaggacaacactgccttt

SEQ ID NO: 1146181 - DNA, 25 bp, Homo sapien
cctgatttgtctgtcggtggcccca

SEQ ID NO: 1146182 - DNA, 25 bp, Homo sapien
ggccccatatggaaaccctgcgtgt

SEQ ID NO: 1146183 - DNA, 25 bp, Homo sapien
tattaacaggtgaattcccgactct

SEQ ID NO: 1146184 - DNA, 25 bp, Homo sapien
gctgtgatgcccatgacacctgcaa

SEQ ID NO: 1146185 - DNA, 25 bp, Homo sapien
gattatcttgctgcttaaaggcctg

SEQ ID NO: 1146186 - DNA, 25 bp, Homo sapien
tccgtttgtcagatgatcagtctct

SEQ ID NO: 1146187 - DNA, 25 bp, Homo sapien
cacaccgtgtggtccgtgttactgg

SEQ ID NO: 1146188 - DNA, 25 bp, Homo sapien
tacccttgccatttaggactgaact

SEQ ID NO: 1146189 - DNA, 25 bp, Homo sapien
gaatggtggcagaactgatcaactg

SEQ ID NO: 1146190 - DNA, 25 bp, Homo sapien
tctagattctgattcgcaaccgagt

SEQ ID NO: 1146191 - DNA, 25 bp, Homo sapien
gatgaatgatggtactacacccctg

SEQ ID NO: 1146192 - DNA, 25 bp, Homo sapien
tgatcaactgccaagcggatgtgaa

SEQ ID NO: 1146193 - DNA, 25 bp, Homo sapien
cctggccgcatgtgtcattttcttg

SEQ ID NO: 1146194 - DNA, 25 bp, Homo sapien
gttatactgatcgtatatttgcagg

SEQ ID NO: 1146195 - DNA, 25 bp, Homo sapien
gcttttgtgacagacttcttctggg

SEQ ID NO: 1146196 - DNA, 25 bp, Homo sapien
attttcttgggtgttatactgatcg

SEQ ID NO: 1146197 - DNA, 25 bp, Homo sapien
ttagtaatccagacacttcatgagc

SEQ ID NO: 1146198 - DNA, 25 bp, Homo sapien
tccctgcaaaggatactgtagtcac

SEQ ID NO: 1146199 - DNA, 25 bp, Homo sapien
gactcgtcttgtatgacacagaaag

SEQ ID NO: 1146200 - DNA, 25 bp, Homo sapien
caactctgagtcagtgaatgccaca

SEQ ID NO: 1146201 - DNA, 25 bp, Homo sapien
gaaactctggtggaggtccgtagca

SEQ ID NO: 1146202 - DNA, 25 bp, Homo sapien
ggcatgagcacaaatgttaggacct

SEQ ID NO: 1146203 - DNA, 25 bp, Homo sapien
cctgatgtgcaaatcggtcatccaa

SEQ ID NO: 1146204 - DNA, 25 bp, Homo sapien
gacctgaaaggtggtgaactctgcc

SEQ ID NO: 1146205 - DNA, 25 bp, Homo sapien
ataagggctaatgagtaacacaggc

SEQ ID NO: 1146206 - DNA, 25 bp, Homo sapien
taggtaaatagctcaacccagttgt

SEQ ID NO: 1146207 - DNA, 25 bp, Homo sapien
gttggcccaatttgactgatatagg

SEQ ID NO: 1146208 - DNA, 25 bp, Homo sapien
gttgaatgccttctatatgccagtc

SEQ ID NO: 1146209 - DNA, 25 bp, Homo sapien
ggtcaagacatatacaaccacaaac

SEQ ID NO: 1146210 - DNA, 25 bp, Homo sapien
gatcccctgcttggagtgggacagt

SEQ ID NO: 1146211 - DNA, 25 bp, Homo sapien
agtggtcaagacatatacaaccaca

SEQ ID NO: 1146212 - DNA, 25 bp, Homo sapien
cttggagtgggacagtggtcaagac

SEQ ID NO: 1146213 - DNA, 25 bp, Homo sapien
gaaatgaggtctgtcccggtctcac

SEQ ID NO: 1146214 - DNA, 25 bp, Homo sapien
actttataagcatgaagctgccttc

SEQ ID NO: 1146215 - DNA, 25 bp, Homo sapien
cactttcatggcttcaggttatcaa

SEQ ID NO: 1146216 - DNA, 25 bp, Homo sapien
ttttgctcctgagtaaagccacgag

SEQ ID NO: 1146217 - DNA, 25 bp, Homo sapien
tcttgttaatgtgatgaggtgatga

SEQ ID NO: 1146218 - DNA, 25 bp, Homo sapien
ggtgatgatgggaaggacattccca

SEQ ID NO: 1146219 - DNA, 25 bp, Homo sapien
tccctttgtaagtccctcttgttca

SEQ ID NO: 1146220 - DNA, 25 bp, Homo sapien
cactgggcccgaagtggtgaaactg

SEQ ID NO: 1146221 - DNA, 25 bp, Homo sapien
aggggccaggctgtagattttcagc

SEQ ID NO: 1146222 - DNA, 25 bp, Homo sapien
cattaggtgggtgattttggtttct

SEQ ID NO: 1146223 - DNA, 25 bp, Homo sapien
agtatattgctgatttggatcaggg

SEQ ID NO: 1146224 - DNA, 25 bp, Homo sapien
tccttaatattagtatattgctgat

SEQ ID NO: 1146225 - DNA, 25 bp, Homo sapien
tgaaggccacttttatctagcacat

SEQ ID NO: 1146226 - DNA, 25 bp, Homo sapien
tgactctcacagcaatccaactgga

SEQ ID NO: 1146227 - DNA, 25 bp, Homo sapien
tggacatttgaccatgccccgtggt

SEQ ID NO: 1146228 - DNA, 25 bp, Homo sapien
ccccgtggtcagtggagagcttctt

SEQ ID NO: 1146229 - DNA, 25 bp, Homo sapien
tgcgaagtggcctatgtcggatttc

SEQ ID NO: 1146230 - DNA, 25 bp, Homo sapien
tcaggcatgcgaagtggcctatgtc

SEQ ID NO: 1146231 - DNA, 25 bp, Homo sapien
aagtggcctatgtcggatttctgag

SEQ ID NO: 1146232 - DNA, 25 bp, Homo sapien
gcttatctgatcaggcatgcgaagt

SEQ ID NO: 1146233 - DNA, 25 bp, Homo sapien
tcctctagctagcaaagcagtgtgt

SEQ ID NO: 1146234 - DNA, 25 bp, Homo sapien
taggtggcgatacagacctcactgg

SEQ ID NO: 1146235 - DNA, 25 bp, Homo sapien
tttaatggactttggcgccttggcc

SEQ ID NO: 1146236 - DNA, 25 bp, Homo sapien
gatcccggcaaactccagtgcttga

SEQ ID NO: 1146237 - DNA, 25 bp, Homo sapien
ttgagcacttatgtgatagaaaccg

SEQ ID NO: 1146238 - DNA, 25 bp, Homo sapien
ggtgtagctcaatctatgtgtcata

SEQ ID NO: 1146239 - DNA, 25 bp, Homo sapien
tgtcatagctatcccacaatctctt

SEQ ID NO: 1146240 - DNA, 25 bp, Homo sapien
catggagagattcgtggtgtagctc

SEQ ID NO: 1146241 - DNA, 25 bp, Homo sapien
ttataatgggatttctcttccttac

SEQ ID NO: 1146242 - DNA, 25 bp, Homo sapien
tcttccttacttttgatgtcccctc

SEQ ID NO: 1146243 - DNA, 25 bp, Homo sapien
tggcctgtgcacactttttataatg

SEQ ID NO: 1146244 - DNA, 25 bp, Homo sapien
ttctcaggcacaggtgattcttcca

SEQ ID NO: 1146245 - DNA, 25 bp, Homo sapien
cttcagggaggtatcttaagagccg

SEQ ID NO: 1146246 - DNA, 25 bp, Homo sapien
tcactgctggaacaatgctgtgggc

SEQ ID NO: 1146247 - DNA, 25 bp, Homo sapien
ggcacattgaattctttggagggac

SEQ ID NO: 1146248 - DNA, 25 bp, Homo sapien
tttctcctcaaaaccaagtggtgga

SEQ ID NO: 1146249 - DNA, 25 bp, Homo sapien
tccttggtcatgctgttcctgtccc

SEQ ID NO: 1146250 - DNA, 25 bp, Homo sapien
cttccttggtcatgctgttcctgtc

SEQ ID NO: 1146251 - DNA, 25 bp, Homo sapien
ttggtcatgctgttcctgtcccatc

SEQ ID NO: 1146252 - DNA, 25 bp, Homo sapien
ccttggtcatgctgttcctgtccca

SEQ ID NO: 1146253 - DNA, 25 bp, Homo sapien
cgctcagctaagtcaaagcccaggg

SEQ ID NO: 1146254 - DNA, 25 bp, Homo sapien
cacgctcagctaagtcaaagcccag

SEQ ID NO: 1146255 - DNA, 25 bp, Homo sapien
acgctcagctaagtcaaagcccagg

SEQ ID NO: 1146256 - DNA, 25 bp, Homo sapien
gggtggggcactttcatctcaaaga

SEQ ID NO: 1146257 - DNA, 25 bp, Homo sapien
tataggagtgccctgggagcccatc

SEQ ID NO: 1146258 - DNA, 25 bp, Homo sapien
acatatccagtataggagtgccctg

SEQ ID NO: 1146259 - DNA, 25 bp, Homo sapien
tccagtataggagtgccctgggagc

SEQ ID NO: 1146260 - DNA, 25 bp, Homo sapien
cgcctcctccgaggttcaggcaggg

SEQ ID NO: 1146261 - DNA, 25 bp, Homo sapien
acagtgactgaggcggaccctggag

SEQ ID NO: 1146262 - DNA, 25 bp, Homo sapien
agccctggccgtcttccctgcgcgg

SEQ ID NO: 1146263 - DNA, 25 bp, Homo sapien
tgcgcggccctaggcagcggtgcct

SEQ ID NO: 1146264 - DNA, 25 bp, Homo sapien
ccctgcagcagtccatggaatccag

SEQ ID NO: 1146265 - DNA, 25 bp, Homo sapien
cctgcagcagtccatggaatccagg

SEQ ID NO: 1146266 - DNA, 25 bp, Homo sapien
ctgcagcagtccatggaatccaggg

SEQ ID NO: 1146267 - DNA, 25 bp, Homo sapien
cgtttgtcaagtgcggagcagctgc

SEQ ID NO: 1146268 - DNA, 25 bp, Homo sapien
caactttcccttgcttgccggctga

SEQ ID NO: 1146269 - DNA, 25 bp, Homo sapien
tgcaactttcccttgcttgccggct

SEQ ID NO: 1146270 - DNA, 25 bp, Homo sapien
gtgtccagcacgtttgtcaagtgcg

SEQ ID NO: 1146271 - DNA, 25 bp, Homo sapien
ctggacaacttctgatccagtttca

SEQ ID NO: 1146272 - DNA, 25 bp, Homo sapien
ctgatccagtttcaccaacaacagc

SEQ ID NO: 1146273 - DNA, 25 bp, Homo sapien
tgatccagtttcaccaacaacagca

SEQ ID NO: 1146274 - DNA, 25 bp, Homo sapien
gacaacttctgatccagtttcacca

SEQ ID NO: 1146275 - DNA, 25 bp, Homo sapien
ctggacagaccggaaagcttttctt

SEQ ID NO: 1146276 - DNA, 25 bp, Homo sapien
cagacaatggtatgtgggtgagaaa

SEQ ID NO: 1146277 - DNA, 25 bp, Homo sapien
aggagactggacagaccggaaagct

SEQ ID NO: 1146278 - DNA, 25 bp, Homo sapien
ggatccattccaagccagacaatgg

SEQ ID NO: 1146279 - DNA, 25 bp, Homo sapien
gcatatgtgcagctgaagtgagcaa

SEQ ID NO: 1146280 - DNA, 25 bp, Homo sapien
tggaatgcttcatgcatgtcatcct

SEQ ID NO: 1146281 - DNA, 25 bp, Homo sapien
tgtgcaggggccatgacaatcttct

SEQ ID NO: 1146282 - DNA, 25 bp, Homo sapien
gccatgacaatcttctctgtatcct

SEQ ID NO: 1146283 - DNA, 25 bp, Homo sapien
tactgcattagagccttggctgaag

SEQ ID NO: 1146284 - DNA, 25 bp, Homo sapien
cgaacattctatggaggattgggcc

SEQ ID NO: 1146285 - DNA, 25 bp, Homo sapien
gaagcaaatctgcatcttgatactg

SEQ ID NO: 1146286 - DNA, 25 bp, Homo sapien
agtactaataatacccgaacattct

SEQ ID NO: 1146287 - DNA, 25 bp, Homo sapien
ccaagcctttcatggtttgtgacat

SEQ ID NO: 1146288 - DNA, 25 bp, Homo sapien
caagcctttcatggtttgtgacatc

SEQ ID NO: 1146289 - DNA, 25 bp, Homo sapien
accaagcctttcatggtttgtgaca

SEQ ID NO: 1146290 - DNA, 25 bp, Homo sapien
cactgtcagcaagtttgtagcccca

SEQ ID NO: 1146291 - DNA, 25 bp, Homo sapien
tgtcagcaagtttgtagccccagct

SEQ ID NO: 1146292 - DNA, 25 bp, Homo sapien
agccactgtcagcaagtttgtagcc

SEQ ID NO: 1146293 - DNA, 25 bp, Homo sapien
tcagcaagtttgtagccccagcttc

SEQ ID NO: 1146294 - DNA, 25 bp, Homo sapien
tacatagcatggtataatacacagt

SEQ ID NO: 1146295 - DNA, 25 bp, Homo sapien
acatagcatggtataatacacagtc

SEQ ID NO: 1146296 - DNA, 25 bp, Homo sapien
tgcggttaaatagagctgctcagac

SEQ ID NO: 1146297 - DNA, 25 bp, Homo sapien
gatccagtttgcatgcagtggtagc

SEQ ID NO: 1146298 - DNA, 25 bp, Homo sapien
ggttgccctatacttgcccctagat

SEQ ID NO: 1146299 - DNA, 25 bp, Homo sapien
gggaggaagcgcaaaccgataccca

SEQ ID NO: 1146300 - DNA, 25 bp, Homo sapien
cccacattggcaccagggagtgtgt

SEQ ID NO: 1146301 - DNA, 25 bp, Homo sapien
aattgcatcacattcttggcttaac

SEQ ID NO: 1146302 - DNA, 25 bp, Homo sapien
ccagggagtgtgtagcccttcttta

SEQ ID NO: 1146303 - DNA, 25 bp, Homo sapien
cattcttggcttaacgtaaccaaca

SEQ ID NO: 1146304 - DNA, 25 bp, Homo sapien
catatgagttaatgtactggtacaa

SEQ ID NO: 1146305 - DNA, 25 bp, Homo sapien
tatatttagagcttcaacagttacc

SEQ ID NO: 1146306 - DNA, 25 bp, Homo sapien
tcttcaagaaacaagctcctctagt

SEQ ID NO: 1146307 - DNA, 25 bp, Homo sapien
gaagatatgcccctgttttaagaaa

SEQ ID NO: 1146308 - DNA, 25 bp, Homo sapien
tcaggctgttcaaagactacaaagt

SEQ ID NO: 1146309 - DNA, 25 bp, Homo sapien
taagagctccagagataaaggatgt

SEQ ID NO: 1146310 - DNA, 25 bp, Homo sapien
tatttggacactgtacactctggtt

SEQ ID NO: 1146311 - DNA, 25 bp, Homo sapien
tcaaggatctggttccacagcaaaa

SEQ ID NO: 1146312 - DNA, 25 bp, Homo sapien
cattgaagcatactcctaacactgg

SEQ ID NO: 1146313 - DNA, 25 bp, Homo sapien
cagaaagtagtactggtcaccagca

SEQ ID NO: 1146314 - DNA, 25 bp, Homo sapien
tttaggcaatgaaagcgcacatgtc

SEQ ID NO: 1146315 - DNA, 25 bp, Homo sapien
gatttcgagactggagcaaagacta

SEQ ID NO: 1146316 - DNA, 25 bp, Homo sapien
accagtaggtggacctccttgacca

SEQ ID NO: 1146317 - DNA, 25 bp, Homo sapien
ccagtaggtggacctccttgaccat

SEQ ID NO: 1146318 - DNA, 25 bp, Homo sapien
caccagtaggtggacctccttgacc

SEQ ID NO: 1146319 - DNA, 25 bp, Homo sapien
ccaccagtaggtggacctccttgac

SEQ ID NO: 1146320 - DNA, 25 bp, Homo sapien
gaaagaaggagtttattgaggcact

SEQ ID NO: 1146321 - DNA, 25 bp, Homo sapien
aagaaagaaggagtttattgaggca

SEQ ID NO: 1146322 - DNA, 25 bp, Homo sapien
agaaagaaggagtttattgaggcac

SEQ ID NO: 1146323 - DNA, 25 bp, Homo sapien
catctttataatccatctgttacaa

SEQ ID NO: 1146324 - DNA, 25 bp, Homo sapien
caagtaattgtgaagtttcccctca

SEQ ID NO: 1146325 - DNA, 25 bp, Homo sapien
aagtaattgtgaagtttcccctcat

SEQ ID NO: 1146326 - DNA, 25 bp, Homo sapien
tataatccatctgttacaattccac

SEQ ID NO: 1146327 - DNA, 25 bp, Homo sapien
cacagaatccgtttccacctcttca

SEQ ID NO: 1146328 - DNA, 25 bp, Homo sapien
atcatgcacagaatccgtttccacc

SEQ ID NO: 1146329 - DNA, 25 bp, Homo sapien
tcatgcacagaatccgtttccacct

SEQ ID NO: 1146330 - DNA, 25 bp, Homo sapien
gcacagaatccgtttccacctcttc

SEQ ID NO: 1146331 - DNA, 25 bp, Homo sapien
ttcccagagggcagttagcaacaca

SEQ ID NO: 1146332 - DNA, 25 bp, Homo sapien
aaaagggctctgttattgttggcac

SEQ ID NO: 1146333 - DNA, 25 bp, Homo sapien
gaattcacggcagagtaataaccct

SEQ ID NO: 1146334 - DNA, 25 bp, Homo sapien
tccatcacgcagcagaaaaagggct

SEQ ID NO: 1146335 - DNA, 25 bp, Homo sapien
aacacttctacagcgtttctgggaa

SEQ ID NO: 1146336 - DNA, 25 bp, Homo sapien
gaaagcccggcaatatgcaacatgg

SEQ ID NO: 1146337 - DNA, 25 bp, Homo sapien
ggaagtcaccctttcatccaagtaa

SEQ ID NO: 1146338 - DNA, 25 bp, Homo sapien
gagatattgcctcaagccctttaga

SEQ ID NO: 1146339 - DNA, 25 bp, Homo sapien
aatttgtgtttatgattgtgttggg

SEQ ID NO: 1146340 - DNA, 25 bp, Homo sapien
caaatttgtgtttatgattgtgttg

SEQ ID NO: 1146341 - DNA, 25 bp, Homo sapien
aaatttgtgtttatgattgtgttgg

SEQ ID NO: 1146342 - DNA, 25 bp, Homo sapien
cttttctttccagtcccatgctcat

SEQ ID NO: 1146343 - DNA, 25 bp, Homo sapien
tttctttccagtcccatgctcattt

SEQ ID NO: 1146344 - DNA, 25 bp, Homo sapien
ctttccagtcccatgctcattttct

SEQ ID NO: 1146345 - DNA, 25 bp, Homo sapien
tccttttctttccagtcccatgctc

SEQ ID NO: 1146346 - DNA, 25 bp, Homo sapien
cagtcaccagggcaactacttttca

SEQ ID NO: 1146347 - DNA, 25 bp, Homo sapien
cagggcaactacttttcacccagtg

SEQ ID NO: 1146348 - DNA, 25 bp, Homo sapien
gtcaccagggcaactacttttcacc

SEQ ID NO: 1146349 - DNA, 25 bp, Homo sapien
accagggcaactacttttcacccag

SEQ ID NO: 1146350 - DNA, 25 bp, Homo sapien
cccgctacaagaccgcctctgggtg

SEQ ID NO: 1146351 - DNA, 25 bp, Homo sapien
aagaccgcctctgggtgacgcactt

SEQ ID NO: 1146352 - DNA, 25 bp, Homo sapien
gcacttccggatgaaaatggcggag

SEQ ID NO: 1146353 - DNA, 25 bp, Homo sapien
gacgcacttccggatgaaaatggcg

SEQ ID NO: 1146354 - DNA, 25 bp, Homo sapien
cccgcgatgcgcccacgcgtctgct

SEQ ID NO: 1146355 - DNA, 25 bp, Homo sapien
gcccgcgatgcgcccacgcgtctgc

SEQ ID NO: 1146356 - DNA, 25 bp, Homo sapien
ccgcgatgcgcccacgcgtctgctc

SEQ ID NO: 1146357 - DNA, 25 bp, Homo sapien
ccccgccagggtccgctgcccgcac

SEQ ID NO: 1146358 - DNA, 25 bp, Homo sapien
tgccgggaccccacgcctgtcctcc

SEQ ID NO: 1146359 - DNA, 25 bp, Homo sapien
actgccgggaccccacgcctgtcct

SEQ ID NO: 1146360 - DNA, 25 bp, Homo sapien
cagcccccgccagggtccgctgccc

SEQ ID NO: 1146361 - DNA, 25 bp, Homo sapien
gctcctgcgcctctagaacccgctt

SEQ ID NO: 1146362 - DNA, 25 bp, Homo sapien
ctcctgcgcctctagaacccgcttc

SEQ ID NO: 1146363 - DNA, 25 bp, Homo sapien
ttggtaaccgggtccctcagcggca

SEQ ID NO: 1146364 - DNA, 25 bp, Homo sapien
aaccgggtccctcagcggcaggaca

SEQ ID NO: 1146365 - DNA, 25 bp, Homo sapien
ggcaggacaggagcgcggcctgcag

SEQ ID NO: 1146366 - DNA, 25 bp, Homo sapien
cggcctgcagactccgggcccaggg

SEQ ID NO: 1146367 - DNA, 25 bp, Homo sapien
aaactaggtctcgtataaacttctg

SEQ ID NO: 1146368 - DNA, 25 bp, Homo sapien
taagactgaagtacccttaaggctg

SEQ ID NO: 1146369 - DNA, 25 bp, Homo sapien
ccaggaggactaggcaggtcacaca

SEQ ID NO: 1146370 - DNA, 25 bp, Homo sapien
cactactcctctgggaatggggaac

SEQ ID NO: 1146371 - DNA, 25 bp, Homo sapien
gaaacacccagaggacactggaaac

SEQ ID NO: 1146372 - DNA, 25 bp, Homo sapien
tgctcttggaaacacccagaggaca

SEQ ID NO: 1146373 - DNA, 25 bp, Homo sapien
cagagatttattcgtttcctgttgc

SEQ ID NO: 1146374 - DNA, 25 bp, Homo sapien
agatttattcgtttcctgttgctct

SEQ ID NO: 1146375 - DNA, 25 bp, Homo sapien
ttttacgagtttgcatgcaggcatc

SEQ ID NO: 1146376 - DNA, 25 bp, Homo sapien
ttacgagtttgcatgcaggcatctc

SEQ ID NO: 1146377 - DNA, 25 bp, Homo sapien
tacgagtttgcatgcaggcatctct

SEQ ID NO: 1146378 - DNA, 25 bp, Homo sapien
atgttttacgagtttgcatgcaggc

SEQ ID NO: 1146379 - DNA, 25 bp, Homo sapien
aacaaatcagatctatagaccaatg

SEQ ID NO: 1146380 - DNA, 25 bp, Homo sapien
gatgaagactcttcccatggctatg

SEQ ID NO: 1146381 - DNA, 25 bp, Homo sapien
gcttcacatgttcgttggctgtata

SEQ ID NO: 1146382 - DNA, 25 bp, Homo sapien
tcttttgcgctgcagatactcttaa

SEQ ID NO: 1146383 - DNA, 25 bp, Homo sapien
tgctagtcaaggctaaactgaagga

SEQ ID NO: 1146384 - DNA, 25 bp, Homo sapien
cttttaaagcgtcagcagtttgtcc

SEQ ID NO: 1146385 - DNA, 25 bp, Homo sapien
caatgtgaagattgtgccctgttca

SEQ ID NO: 1146386 - DNA, 25 bp, Homo sapien
gccctgttcactacagaaacctgag

SEQ ID NO: 1146387 - DNA, 25 bp, Homo sapien
tctggttgagatctaagtttgattt

SEQ ID NO: 1146388 - DNA, 25 bp, Homo sapien
atggcagagaacgatcaccagcctg

SEQ ID NO: 1146389 - DNA, 25 bp, Homo sapien
accaacaggataatttgctgaggtt

SEQ ID NO: 1146390 - DNA, 25 bp, Homo sapien
gagaacgatcaccagcctgagcctt

SEQ ID NO: 1146391 - DNA, 25 bp, Homo sapien
ggctgaggtcaaaccagctccatct

SEQ ID NO: 1146392 - DNA, 25 bp, Homo sapien
catgtgcaagaccacccagcagaat

SEQ ID NO: 1146393 - DNA, 25 bp, Homo sapien
caagaccacccagcagaatagacca

SEQ ID NO: 1146394 - DNA, 25 bp, Homo sapien
gctgaggtcaaaccagctccatctc

SEQ ID NO: 1146395 - DNA, 25 bp, Homo sapien
accattggaactatccagccagtag

SEQ ID NO: 1146396 - DNA, 25 bp, Homo sapien
gccagtccaccattggaactatcca

SEQ ID NO: 1146397 - DNA, 25 bp, Homo sapien
cagccagtccaccattggaactatc

SEQ ID NO: 1146398 - DNA, 25 bp, Homo sapien
cagtccaccattggaactatccagc

SEQ ID NO: 1146399 - DNA, 25 bp, Homo sapien
ctgtactctgacttgagaaaagttg

SEQ ID NO: 1146400 - DNA, 25 bp, Homo sapien
tgtactctgacttgagaaaagttgg

SEQ ID NO: 1146401 - DNA, 25 bp, Homo sapien
ttggaatgtatgaagggttttggtc

SEQ ID NO: 1146402 - DNA, 25 bp, Homo sapien
gactagccttcatggccccactttt

SEQ ID NO: 1146403 - DNA, 25 bp, Homo sapien
ccctgagagtggctcgaggcagcca

SEQ ID NO: 1146404 - DNA, 25 bp, Homo sapien
ttgtatcccaacttggaatgtatga

SEQ ID NO: 1146405 - DNA, 25 bp, Homo sapien
caggctggtccgtggaacttaatca

SEQ ID NO: 1146406 - DNA, 25 bp, Homo sapien
tagtcagcagagacgcttgtcagtg

SEQ ID NO: 1146407 - DNA, 25 bp, Homo sapien
cttggtcagtggagaccttgggacc

SEQ ID NO: 1146408 - DNA, 25 bp, Homo sapien
gcctggtcagagaggacttgatcat

SEQ ID NO: 1146409 - DNA, 25 bp, Homo sapien
tccacatagtgttaagccagcagct

SEQ ID NO: 1146410 - DNA, 25 bp, Homo sapien
tacaccttgcatcactgcttcaggg

SEQ ID NO: 1146411 - DNA, 25 bp, Homo sapien
tggataatttgaagcctggccaagt

SEQ ID NO: 1146412 - DNA, 25 bp, Homo sapien
tgtctgtgtcgaacagcctgtggtc

SEQ ID NO: 1146413 - DNA, 25 bp, Homo sapien
cacctatagaggctctaatgctcta

SEQ ID NO: 1146414 - DNA, 25 bp, Homo sapien
agaggctctaatgctctaaggtgac

SEQ ID NO: 1146415 - DNA, 25 bp, Homo sapien
tatagaggctctaatgctctaaggt

SEQ ID NO: 1146416 - DNA, 25 bp, Homo sapien
agcacctatagaggctctaatgctc

SEQ ID NO: 1146417 - DNA, 25 bp, Homo sapien
agccctctcagcattatgcagtgcc

SEQ ID NO: 1146418 - DNA, 25 bp, Homo sapien
tctcagcattatgcagtgcccctcc

SEQ ID NO: 1146419 - DNA, 25 bp, Homo sapien
cagcattatgcagtgcccctcctct

SEQ ID NO: 1146420 - DNA, 25 bp, Homo sapien
ccagccctctcagcattatgcagtg

SEQ ID NO: 1146421 - DNA, 25 bp, Homo sapien
cagggaaagtgagtcggggcaccct

SEQ ID NO: 1146422 - DNA, 25 bp, Homo sapien
gcagggaaagtgagtcggggcaccc

SEQ ID NO: 1146423 - DNA, 25 bp, Homo sapien
gttgtctgtggagcctccttgcctc

SEQ ID NO: 1146424 - DNA, 25 bp, Homo sapien
caggggggttgtctgtggagcctcc

SEQ ID NO: 1146425 - DNA, 25 bp, Homo sapien
ctggcctgctggccactatgtgacc

SEQ ID NO: 1146426 - DNA, 25 bp, Homo sapien
tagtcattggaagcctggtcagtgg

SEQ ID NO: 1146427 - DNA, 25 bp, Homo sapien
cagctgggtactcgttcatggagaa

SEQ ID NO: 1146428 - DNA, 25 bp, Homo sapien
ccatgaggcctattaagtgtgggcc

SEQ ID NO: 1146429 - DNA, 25 bp, Homo sapien
tacacaatatatcacgggcctggtc

SEQ ID NO: 1146430 - DNA, 25 bp, Homo sapien
gggtgagtgtggatctcggaacctg

SEQ ID NO: 1146431 - DNA, 25 bp, Homo sapien
gagtgtggatctcggaacctggagc

SEQ ID NO: 1146432 - DNA, 25 bp, Homo sapien
gtgagtgtggatctcggaacctgga

SEQ ID NO: 1146433 - DNA, 25 bp, Homo sapien
tgtggatctcggaacctggagcctg

SEQ ID NO: 1146434 - DNA, 25 bp, Homo sapien
gattaggccagtagtagacattcca

SEQ ID NO: 1146435 - DNA, 25 bp, Homo sapien
tagtagacattccaagctgacttta

SEQ ID NO: 1146436 - DNA, 25 bp, Homo sapien
tactgaagtaggatatttttgtatc

SEQ ID NO: 1146437 - DNA, 25 bp, Homo sapien
gctccaattccccaagattaggcca

SEQ ID NO: 1146438 - DNA, 25 bp, Homo sapien
taactctgataaagttctcaagtct

SEQ ID NO: 1146439 - DNA, 25 bp, Homo sapien
actctgataaagttctcaagtcttt

SEQ ID NO: 1146440 - DNA, 25 bp, Homo sapien
attaactctgataaagttctcaagt

SEQ ID NO: 1146441 - DNA, 25 bp, Homo sapien
tctgataaagttctcaagtctttag

SEQ ID NO: 1146442 - DNA, 25 bp, Homo sapien
gtacttatgcaccataaattcatca

SEQ ID NO: 1146443 - DNA, 25 bp, Homo sapien
agccagcacactgaaacgattctca

SEQ ID NO: 1146444 - DNA, 25 bp, Homo sapien
gcttaaacagttcccaagaagtctg

SEQ ID NO: 1146445 - DNA, 25 bp, Homo sapien
cataaattcatcatgttccaaagct

SEQ ID NO: 1146446 - DNA, 25 bp, Homo sapien
tgtcataaaggtgggaataatagac

SEQ ID NO: 1146447 - DNA, 25 bp, Homo sapien
ctaaacaaaccaacgcagaaacaga

SEQ ID NO: 1146448 - DNA, 25 bp, Homo sapien
tgggtgcacattgtcataaaggtgg

SEQ ID NO: 1146449 - DNA, 25 bp, Homo sapien
cactcatgtgggagctacatattgg

SEQ ID NO: 1146450 - DNA, 25 bp, Homo sapien
agcaggtattgatgccgggtttttg

SEQ ID NO: 1146451 - DNA, 25 bp, Homo sapien
ctgggttcttctctcgtgaccagga

SEQ ID NO: 1146452 - DNA, 25 bp, Homo sapien
ctgtagcaggtattgatgccgggtt

SEQ ID NO: 1146453 - DNA, 25 bp, Homo sapien
tctgtgctgtagcaggtattgatgc

SEQ ID NO: 1146454 - DNA, 25 bp, Homo sapien
atgttagtccccagttaaacacctg

SEQ ID NO: 1146455 - DNA, 25 bp, Homo sapien
cttctaagtgtttcatgttagtccc

SEQ ID NO: 1146456 - DNA, 25 bp, Homo sapien
tgtttcatgttagtccccagttaaa

SEQ ID NO: 1146457 - DNA, 25 bp, Homo sapien
taagtgtttcatgttagtccccagt

SEQ ID NO: 1146458 - DNA, 25 bp, Homo sapien
caatagagtccagggttttcagctc

SEQ ID NO: 1146459 - DNA, 25 bp, Homo sapien
cagtttgtcagctgaacagttctgg

SEQ ID NO: 1146460 - DNA, 25 bp, Homo sapien
cagttctgggtgcagcttgtccgat

SEQ ID NO: 1146461 - DNA, 25 bp, Homo sapien
caggagccttgatttagcaatagag

SEQ ID NO: 1146462 - DNA, 25 bp, Homo sapien
taaactagtgttaaaggagtcatca

SEQ ID NO: 1146463 - DNA, 25 bp, Homo sapien
tttaacaacaatggccactgagtta

SEQ ID NO: 1146464 - DNA, 25 bp, Homo sapien
caaatgacatgacctttcagactat

SEQ ID NO: 1146465 - DNA, 25 bp, Homo sapien
caaggtaacatgaagtattgggtca

SEQ ID NO: 1146466 - DNA, 25 bp, Homo sapien
ttatttaaaaagtcatttgatggag

SEQ ID NO: 1146467 - DNA, 25 bp, Homo sapien
agcctgaggtgggcgggtaatgagg

SEQ ID NO: 1146468 - DNA, 25 bp, Homo sapien
gcctgaggtgggcgggtaatgaggt

SEQ ID NO: 1146469 - DNA, 25 bp, Homo sapien
ttaaaaagtcatttgatggaggcca

SEQ ID NO: 1146470 - DNA, 25 bp, Homo sapien
gcagaagtggaagatttgcttgagc

SEQ ID NO: 1146471 - DNA, 25 bp, Homo sapien
ccagcctgggaggtataatgaggcc

SEQ ID NO: 1146472 - DNA, 25 bp, Homo sapien
ggtgcaaactgcttatctcaacatt

SEQ ID NO: 1146473 - DNA, 25 bp, Homo sapien
ttagcatgacatgatggtatgcacc

SEQ ID NO: 1146474 - DNA, 25 bp, Homo sapien
cttgtgtgaggtggatcttttggag

SEQ ID NO: 1146475 - DNA, 25 bp, Homo sapien
ctttctcagatgaagggaatcctgt

SEQ ID NO: 1146476 - DNA, 25 bp, Homo sapien
tggctttctcagatgaagggaatcc

SEQ ID NO: 1146477 - DNA, 25 bp, Homo sapien
ttgtgtgaggtggatcttttggagg

SEQ ID NO: 1146478 - DNA, 25 bp, Homo sapien
agctactggcctgtcttgcttacag

SEQ ID NO: 1146479 - DNA, 25 bp, Homo sapien
taagtgtttgttgcatgaggtctag

SEQ ID NO: 1146480 - DNA, 25 bp, Homo sapien
tgcatgaggtctagctactggcctg

SEQ ID NO: 1146481 - DNA, 25 bp, Homo sapien
ggtctagctactggcctgtcttgct

SEQ ID NO: 1146482 - DNA, 25 bp, Homo sapien
gcttccctttagcatgtgtttcaga

SEQ ID NO: 1146483 - DNA, 25 bp, Homo sapien
ctttagcactgcctttgttgccttc

SEQ ID NO: 1146484 - DNA, 25 bp, Homo sapien
aatttaagcaactgcagctgtaagc

SEQ ID NO: 1146485 - DNA, 25 bp, Homo sapien
tgagtttgggtatgtcatggttttg

SEQ ID NO: 1146486 - DNA, 25 bp, Homo sapien
tttcttatggtcaatagggtactca

SEQ ID NO: 1146487 - DNA, 25 bp, Homo sapien
ttccttcattgcctgtgttgccgtt

SEQ ID NO: 1146488 - DNA, 25 bp, Homo sapien
cctgtgttgccgttgaccaaatttc

SEQ ID NO: 1146489 - DNA, 25 bp, Homo sapien
actgaatcctgaatcagtttgtggt

SEQ ID NO: 1146490 - DNA, 25 bp, Homo sapien
ttccaatgatgttaccatgaaggat

SEQ ID NO: 1146491 - DNA, 25 bp, Homo sapien
catgaaggatcttgggaaccagttt

SEQ ID NO: 1146492 - DNA, 25 bp, Homo sapien
accatgaaggatcttgggaaccagt

SEQ ID NO: 1146493 - DNA, 25 bp, Homo sapien
atgatgttaccatgaaggatcttgg

SEQ ID NO: 1146494 - DNA, 25 bp, Homo sapien
acaaggaatacctggcccgtccagg

SEQ ID NO: 1146495 - DNA, 25 bp, Homo sapien
gaaggtccccacaggagttagggca

SEQ ID NO: 1146496 - DNA, 25 bp, Homo sapien
ccgcctcagcaagcagtgctgctgt

SEQ ID NO: 1146497 - DNA, 25 bp, Homo sapien
tagggcacccttaccctgaggcact

SEQ ID NO: 1146498 - DNA, 25 bp, Homo sapien
cttcaaccattgagaccttatctta

SEQ ID NO: 1146499 - DNA, 25 bp, Homo sapien
aatgtataccctctgagaaagagag

SEQ ID NO: 1146500 - DNA, 25 bp, Homo sapien
gaccttatcttataggaagcaaaat

SEQ ID NO: 1146501 - DNA, 25 bp, Homo sapien
gacagtattccaatcaagatgatga

SEQ ID NO: 1146502 - DNA, 25 bp, Homo sapien
ggaatggagccatctaatataattt

SEQ ID NO: 1146503 - DNA, 25 bp, Homo sapien
aatttgtgtttatgattgtgttggg

SEQ ID NO: 1146504 - DNA, 25 bp, Homo sapien
caaatttgtgtttatgattgtgttg

SEQ ID NO: 1146505 - DNA, 25 bp, Homo sapien
aaatttgtgtttatgattgtgttgg

SEQ ID NO: 1146506 - DNA, 25 bp, Homo sapien
ttacaccagggacatacactgggtc

SEQ ID NO: 1146507 - DNA, 25 bp, Homo sapien
cttacaccagggacatacactgggt

SEQ ID NO: 1146508 - DNA, 25 bp, Homo sapien
tactgcgacactatgggctatggtg

SEQ ID NO: 1146509 - DNA, 25 bp, Homo sapien
taaaatatagctactttgatacact

SEQ ID NO: 1146510 - DNA, 25 bp, Homo sapien
taaatctactgcgacactatgggct

SEQ ID NO: 1146511 - DNA, 25 bp, Homo sapien
ctatggtgggggacagataatgtat

SEQ ID NO: 1146512 - DNA, 25 bp, Homo sapien
cacagtgcccgggctaaaacttaag

SEQ ID NO: 1146513 - DNA, 25 bp, Homo sapien
agccacagtgcccgggctaaaactt

SEQ ID NO: 1146514 - DNA, 25 bp, Homo sapien
taaaatttcaaaaataggctgggca

SEQ ID NO: 1146515 - DNA, 25 bp, Homo sapien
gggcatggtggctcacacctgtaat

SEQ ID NO: 1146516 - DNA, 25 bp, Homo sapien
aggacatcaagccagtcattctaag

SEQ ID NO: 1146517 - DNA, 25 bp, Homo sapien
cttcttaccacaaggatagcaactt

SEQ ID NO: 1146518 - DNA, 25 bp, Homo sapien
tgtaaaggacctttgtagacaggac

SEQ ID NO: 1146519 - DNA, 25 bp, Homo sapien
ctattcagaaatcttgccagatctc

SEQ ID NO: 1146520 - DNA, 25 bp, Homo sapien
gacaattacctctcatatgccagcg

SEQ ID NO: 1146521 - DNA, 25 bp, Homo sapien
ccatgtgtgcttgatccagggacca

SEQ ID NO: 1146522 - DNA, 25 bp, Homo sapien
tcagcgttcagaaacattggagtta

SEQ ID NO: 1146523 - DNA, 25 bp, Homo sapien
cacagggtccctgacggattctgaa

SEQ ID NO: 1146524 - DNA, 25 bp, Homo sapien
tgacactgttgatgtgaaccccagt

SEQ ID NO: 1146525 - DNA, 25 bp, Homo sapien
gacactgttgatgtgaaccccagtt

SEQ ID NO: 1146526 - DNA, 25 bp, Homo sapien
ctaaccaagcaggacagtcactcat

SEQ ID NO: 1146527 - DNA, 25 bp, Homo sapien
gcagggcttcaccactctcacatcc

SEQ ID NO: 1146528 - DNA, 25 bp, Homo sapien
tcccgcagggcttcaccactctcac

SEQ ID NO: 1146529 - DNA, 25 bp, Homo sapien
ggcttcaccactctcacatccatca

SEQ ID NO: 1146530 - DNA, 25 bp, Homo sapien
agggcttcaccactctcacatccat

SEQ ID NO: 1146531 - DNA, 25 bp, Homo sapien
ttcaaagtcgcaagatgctgtgagc

SEQ ID NO: 1146532 - DNA, 25 bp, Homo sapien
gcttcaaagtcgcaagatgctgtga

SEQ ID NO: 1146533 - DNA, 25 bp, Homo sapien
cgcttcaaagtcgcaagatgctgtg

SEQ ID NO: 1146534 - DNA, 25 bp, Homo sapien
tcaaagtcgcaagatgctgtgagct

SEQ ID NO: 1146535 - DNA, 25 bp, Homo sapien
ccctcacgggaaccgtggagaaatg

SEQ ID NO: 1146536 - DNA, 25 bp, Homo sapien
cacgggaaccgtggagaaatggcca

SEQ ID NO: 1146537 - DNA, 25 bp, Homo sapien
tcatgtgggctggtagattgaccag

SEQ ID NO: 1146538 - DNA, 25 bp, Homo sapien
cgtcatgtgggctggtagattgacc

SEQ ID NO: 1146539 - DNA, 25 bp, Homo sapien
ctgctggagcgtcatgccagcatgg

SEQ ID NO: 1146540 - DNA, 25 bp, Homo sapien
ccattaaaaggggccttttctgctg

SEQ ID NO: 1146541 - DNA, 25 bp, Homo sapien
tcatgccagcatgggctgtggcatc

SEQ ID NO: 1146542 - DNA, 25 bp, Homo sapien
ttaaaaggggccttttctgctggca

SEQ ID NO: 1146543 - DNA, 25 bp, Homo sapien
accggtagtgtggcaagcagggacg

SEQ ID NO: 1146544 - DNA, 25 bp, Homo sapien
tcaccggtagtgtggcaagcaggga

SEQ ID NO: 1146545 - DNA, 25 bp, Homo sapien
tagtgtggcaagcagggacgccgac

SEQ ID NO: 1146546 - DNA, 25 bp, Homo sapien
cggtagtgtggcaagcagggacgcc

SEQ ID NO: 1146547 - DNA, 25 bp, Homo sapien
gtcattgcaaggaacgaggatcacg

SEQ ID NO: 1146548 - DNA, 25 bp, Homo sapien
cattgcaaggaacgaggatcacgct

SEQ ID NO: 1146549 - DNA, 25 bp, Homo sapien
tgcaaggaacgaggatcacgctagc

SEQ ID NO: 1146550 - DNA, 25 bp, Homo sapien
aggaacgaggatcacgctagccata

SEQ ID NO: 1146551 - DNA, 25 bp, Homo sapien
ccgaggaagaacgtgtcttcccatc

SEQ ID NO: 1146552 - DNA, 25 bp, Homo sapien
atcagccaatccgcttggcccagtg

SEQ ID NO: 1146553 - DNA, 25 bp, Homo sapien
ccaaagcatgcagaaggcacaagag

SEQ ID NO: 1146554 - DNA, 25 bp, Homo sapien
ccccaaagcatgcagaaggcacaag

SEQ ID NO: 1146555 - DNA, 25 bp, Homo sapien
ggaatctagagtccctggttcgagc

SEQ ID NO: 1146556 - DNA, 25 bp, Homo sapien
aagaaaccacgccacggagaagtgg

SEQ ID NO: 1146557 - DNA, 25 bp, Homo sapien
accccaaggcggtggaaagcccatg

SEQ ID NO: 1146558 - DNA, 25 bp, Homo sapien
accctggttataggcctgggtgcac

SEQ ID NO: 1146559 - DNA, 25 bp, Homo sapien
agacgaggagcctactctcaccact

SEQ ID NO: 1146560 - DNA, 25 bp, Homo sapien
aagacgaggagcctactctcaccac

SEQ ID NO: 1146561 - DNA, 25 bp, Homo sapien
gagccatttgtatgggcactcggca

SEQ ID NO: 1146562 - DNA, 25 bp, Homo sapien
actgggacacgtggccctgcttcta

SEQ ID NO: 1146563 - DNA, 25 bp, Homo sapien
ttctatgatgctaggagcgcgagcg

SEQ ID NO: 1146564 - DNA, 25 bp, Homo sapien
gagatcggagccatttgtatgggca

SEQ ID NO: 1146565 - DNA, 25 bp, Homo sapien
ttcaatggactactcatcttccatg

SEQ ID NO: 1146566 - DNA, 25 bp, Homo sapien
tctccacggaatcatcttcaacaga

SEQ ID NO: 1146567 - DNA, 25 bp, Homo sapien
atcttcaatggactactcatcttcc

SEQ ID NO: 1146568 - DNA, 25 bp, Homo sapien
caatggactactcatcttccatgga

SEQ ID NO: 1146569 - DNA, 25 bp, Homo sapien
cgtggactcgagagctgatatgaga

SEQ ID NO: 1146570 - DNA, 25 bp, Homo sapien
tggactcgagagctgatatgagaaa

SEQ ID NO: 1146571 - DNA, 25 bp, Homo sapien
tcgagagctgatatgagaaatgtta

SEQ ID NO: 1146572 - DNA, 25 bp, Homo sapien
gactcgagagctgatatgagaaatg

SEQ ID NO: 1146573 - DNA, 25 bp, Homo sapien
catggaggcgagagctgacaggaat

SEQ ID NO: 1146574 - DNA, 25 bp, Homo sapien
gcagggtggaacctgcaacttgtgt

SEQ ID NO: 1146575 - DNA, 25 bp, Homo sapien
agggtggaacctgcaacttgtgtca

SEQ ID NO: 1146576 - DNA, 25 bp, Homo sapien
tcatcttcaacagactcctcatctt

SEQ ID NO: 1146577 - DNA, 25 bp, Homo sapien
tttctggatgtagaaaacgttccca

SEQ ID NO: 1146578 - DNA, 25 bp, Homo sapien
gtgcttactctgcggcctttccagc

SEQ ID NO: 1146579 - DNA, 25 bp, Homo sapien
tggatgtagaaaacgttcccatttc

SEQ ID NO: 1146580 - DNA, 25 bp, Homo sapien
ctctgcggcctttccagcgtttgct

SEQ ID NO: 1146581 - DNA, 25 bp, Homo sapien
tgaagccagccctgtaaaatagaca

SEQ ID NO: 1146582 - DNA, 25 bp, Homo sapien
tcaccgccgcaatctctggtctcac

SEQ ID NO: 1146583 - DNA, 25 bp, Homo sapien
tgttgagtcttgcggtcaacagagg

SEQ ID NO: 1146584 - DNA, 25 bp, Homo sapien
ccgccgcaatctctggtctcactct

SEQ ID NO: 1146585 - DNA, 25 bp, Homo sapien
gatttagtggttggctagagttagc

SEQ ID NO: 1146586 - DNA, 25 bp, Homo sapien
tgtttgcttccaagataaagataca

SEQ ID NO: 1146587 - DNA, 25 bp, Homo sapien
catctatctctgcattctatgtttg

SEQ ID NO: 1146588 - DNA, 25 bp, Homo sapien
gctagagttagcagcatccaggcca

SEQ ID NO: 1146589 - DNA, 25 bp, Homo sapien
agtcattgctgccaaacaggaccca

SEQ ID NO: 1146590 - DNA, 25 bp, Homo sapien
cagtcattgctgccaaacaggaccc

SEQ ID NO: 1146591 - DNA, 25 bp, Homo sapien
gtcattgctgccaaacaggacccaa

SEQ ID NO: 1146592 - DNA, 25 bp, Homo sapien
tcctcctgagtttgggtatgtcatg

SEQ ID NO: 1146593 - DNA, 25 bp, Homo sapien
tctggtcttattctgcttatctctg

SEQ ID NO: 1146594 - DNA, 25 bp, Homo sapien
tggtcttattctgcttatctctgct

SEQ ID NO: 1146595 - DNA, 25 bp, Homo sapien
ctcctcctgagtttgggtatgtcat

SEQ ID NO: 1146596 - DNA, 25 bp, Homo sapien
ggcaagtactattctactttgtgtt

SEQ ID NO: 1146597 - DNA, 25 bp, Homo sapien
ctggcaagtactattctactttgtg

SEQ ID NO: 1146598 - DNA, 25 bp, Homo sapien
tggcaagtactattctactttgtgt

SEQ ID NO: 1146599 - DNA, 25 bp, Homo sapien
gagagagcagtattaattcaccagc

SEQ ID NO: 1146600 - DNA, 25 bp, Homo sapien
tactgccaagtaccatttgggtcag

SEQ ID NO: 1146601 - DNA, 25 bp, Homo sapien
gattcacatacgttgaggctctgtg

SEQ ID NO: 1146602 - DNA, 25 bp, Homo sapien
gaaccttttctcaatcgatcgacat

SEQ ID NO: 1146603 - DNA, 25 bp, Homo sapien
agcaggaaagaatttgtcaccttta

SEQ ID NO: 1146604 - DNA, 25 bp, Homo sapien
ggagcaggaaagaatttgtcacctt

SEQ ID NO: 1146605 - DNA, 25 bp, Homo sapien
caggagcaggaaagaatttgtcacc

SEQ ID NO: 1146606 - DNA, 25 bp, Homo sapien
acaggagcaggaaagaatttgtcac

SEQ ID NO: 1146607 - DNA, 25 bp, Homo sapien
tgctgttgaccaactttccctgcct

SEQ ID NO: 1146608 - DNA, 25 bp, Homo sapien
gctgttgaccaactttccctgcctt

SEQ ID NO: 1146609 - DNA, 25 bp, Homo sapien
tttcttatggtcaatagggtattca

SEQ ID NO: 1146610 - DNA, 25 bp, Homo sapien
acggacttcctcccagtctggcagt

SEQ ID NO: 1146611 - DNA, 25 bp, Homo sapien
caggcagaagctgtaaggtctctca

SEQ ID NO: 1146612 - DNA, 25 bp, Homo sapien
gcaggcacccagaaggactctagtg

SEQ ID NO: 1146613 - DNA, 25 bp, Homo sapien
tgtgggtttgttgcttcatgatctc

SEQ ID NO: 1146614 - DNA, 25 bp, Homo sapien
tcgccacatgccatgtttcagatca

SEQ ID NO: 1146615 - DNA, 25 bp, Homo sapien
taaatcgccacatgccatgtttcag

SEQ ID NO: 1146616 - DNA, 25 bp, Homo sapien
tcaatataaatcgccacatgccatg

SEQ ID NO: 1146617 - DNA, 25 bp, Homo sapien
cacatgccatgtttcagatcaaggt

SEQ ID NO: 1146618 - DNA, 25 bp, Homo sapien
gggtttctatgttttgatcagggtg

SEQ ID NO: 1146619 - DNA, 25 bp, Homo sapien
atggggtttctatgttttgatcagg

SEQ ID NO: 1146620 - DNA, 25 bp, Homo sapien
ggtttctatgttttgatcagggtgg

SEQ ID NO: 1146621 - DNA, 25 bp, Homo sapien
tttctatgttttgatcagggtggtc

SEQ ID NO: 1146622 - DNA, 25 bp, Homo sapien
agagcagtccttgcaggtgcctttc

SEQ ID NO: 1146623 - DNA, 25 bp, Homo sapien
gagcagtccttgcaggtgcctttct

SEQ ID NO: 1146624 - DNA, 25 bp, Homo sapien
ctccggaggccctagcagtcctgct

SEQ ID NO: 1146625 - DNA, 25 bp, Homo sapien
agcagtccttgcaggtgcctttctt

SEQ ID NO: 1146626 - DNA, 25 bp, Homo sapien
tgtaagtgttagcagctgcacagat

SEQ ID NO: 1146627 - DNA, 25 bp, Homo sapien
cacagatacttaagataagagtctc

SEQ ID NO: 1146628 - DNA, 25 bp, Homo sapien
agagtttacttgcttaactaagtgg

SEQ ID NO: 1146629 - DNA, 25 bp, Homo sapien
tctggggggaactgtccttgttagc

SEQ ID NO: 1146630 - DNA, 25 bp, Homo sapien
tgttccaggtgcatactctcaagtt

SEQ ID NO: 1146631 - DNA, 25 bp, Homo sapien
tgattcacaaatcggacagtcccca

SEQ ID NO: 1146632 - DNA, 25 bp, Homo sapien
gggaaatggcataccgaaatcggaa

SEQ ID NO: 1146633 - DNA, 25 bp, Homo sapien
acagtttgaacatttggcagtgcct

SEQ ID NO: 1146634 - DNA, 25 bp, Homo sapien
tcagagcataatatgagggcttgca

SEQ ID NO: 1146635 - DNA, 25 bp, Homo sapien
gaaaagcaagatgtactgtcatggg

SEQ ID NO: 1146636 - DNA, 25 bp, Homo sapien
ggtttgcaagatgcactttccatga

SEQ ID NO: 1146637 - DNA, 25 bp, Homo sapien
tacaatggtgtactgtaggaaatac

SEQ ID NO: 1146638 - DNA, 25 bp, Homo sapien
ttcctgcttggctgcgatgataact

SEQ ID NO: 1146639 - DNA, 25 bp, Homo sapien
gcttggctgcgatgataactccttc

SEQ ID NO: 1146640 - DNA, 25 bp, Homo sapien
ggctgcgatgataactccttcagat

SEQ ID NO: 1146641 - DNA, 25 bp, Homo sapien
gcgatgataactccttcagattttt

SEQ ID NO: 1146642 - DNA, 25 bp, Homo sapien
atcatgcacagaatccgtttccacc

SEQ ID NO: 1146643 - DNA, 25 bp, Homo sapien
cacagaatccgtttccacctcttca

SEQ ID NO: 1146644 - DNA, 25 bp, Homo sapien
tcatgcacagaatccgtttccacct

SEQ ID NO: 1146645 - DNA, 25 bp, Homo sapien
gcacagaatccgtttccacctcttc

SEQ ID NO: 1146646 - DNA, 25 bp, Homo sapien
caaatttgtgtttatgattgtgttg

SEQ ID NO: 1146647 - DNA, 25 bp, Homo sapien
aatttgtgtttatgattgtgttggg

SEQ ID NO: 1146648 - DNA, 25 bp, Homo sapien
aaatttgtgtttatgattgtgttgg

SEQ ID NO: 1146649 - DNA, 25 bp, Homo sapien
tccagtcccaatctcgttttctcta

SEQ ID NO: 1146650 - DNA, 25 bp, Homo sapien
tctcgttttctctatcacattctac

SEQ ID NO: 1146651 - DNA, 25 bp, Homo sapien
tcttgtttccagtcccaatctcgtt

SEQ ID NO: 1146652 - DNA, 25 bp, Homo sapien
cagtcccaatctcgttttctctatc

SEQ ID NO: 1146653 - DNA, 25 bp, Homo sapien
gataatattctgaaattgtcttaac

SEQ ID NO: 1146654 - DNA, 25 bp, Homo sapien
tctgaaattgtcttaacatttaccc

SEQ ID NO: 1146655 - DNA, 25 bp, Homo sapien
taataagcttttaatatgtgataat

SEQ ID NO: 1146656 - DNA, 25 bp, Homo sapien
ataataagcttttaatatgtgataa

SEQ ID NO: 1146657 - DNA, 25 bp, Homo sapien
gtcaccagggcaactacttttcacc

SEQ ID NO: 1146658 - DNA, 25 bp, Homo sapien
accagggcaactacttttcacccag

SEQ ID NO: 1146659 - DNA, 25 bp, Homo sapien
cagggcaactacttttcacccagtg

SEQ ID NO: 1146660 - DNA, 25 bp, Homo sapien
cagtcaccagggcaactacttttca

SEQ ID NO: 1146661 - DNA, 25 bp, Homo sapien
cgtttcttgccgctcttggaaacac

SEQ ID NO: 1146662 - DNA, 25 bp, Homo sapien
agatttattcgtttcttgccgctct

SEQ ID NO: 1146663 - DNA, 25 bp, Homo sapien
tattcgtttcttgccgctcttggaa

SEQ ID NO: 1146664 - DNA, 25 bp, Homo sapien
gtttcttgccgctcttggaaacacc

SEQ ID NO: 1146665 - DNA, 25 bp, Homo sapien
gaccatttccactgtacaacatgct

SEQ ID NO: 1146666 - DNA, 25 bp, Homo sapien
cacaacacgccatgctttagcggaa

SEQ ID NO: 1146667 - DNA, 25 bp, Homo sapien
catttccactgcacaacacgccgtg

SEQ ID NO: 1146668 - DNA, 25 bp, Homo sapien
catttccactgcacaacacgccatg

SEQ ID NO: 1146669 - DNA, 25 bp, Homo sapien
ggatactacagaggcccttgaagca

SEQ ID NO: 1146670 - DNA, 25 bp, Homo sapien
cataatgttgaaccttcttcaggtt

SEQ ID NO: 1146671 - DNA, 25 bp, Homo sapien
tcttttctgacctctaactttggga

SEQ ID NO: 1146672 - DNA, 25 bp, Homo sapien
caagtcacatgggtagcactgtcaa

SEQ ID NO: 1146673 - DNA, 25 bp, Homo sapien
gaagatgttcaggtaatattaaaaa

SEQ ID NO: 1146674 - DNA, 25 bp, Homo sapien
ttaaagaagatgttcaggtaatatt

SEQ ID NO: 1146675 - DNA, 25 bp, Homo sapien
taaagaagatgttcaggtaatatta

SEQ ID NO: 1146676 - DNA, 25 bp, Homo sapien
aagaagatgttcaggtaatattaaa

SEQ ID NO: 1146677 - DNA, 25 bp, Homo sapien
gattttccattgtgatgcagcttgg

SEQ ID NO: 1146678 - DNA, 25 bp, Homo sapien
ttggcccccagagctataatgtggt

SEQ ID NO: 1146679 - DNA, 25 bp, Homo sapien
tgttaatttggttactccaagcaaa

SEQ ID NO: 1146680 - DNA, 25 bp, Homo sapien
ctgagtggattcttcctgtgattcc

SEQ ID NO: 1146681 - DNA, 25 bp, Homo sapien
ggatgttttagaagttatgacagaa

SEQ ID NO: 1146682 - DNA, 25 bp, Homo sapien
aaagggaccgggtccaggatcagat

SEQ ID NO: 1146683 - DNA, 25 bp, Homo sapien
ccaggatcagatttgatccagtagt

SEQ ID NO: 1146684 - DNA, 25 bp, Homo sapien
gaccgggtccaggatcagatttgat

SEQ ID NO: 1146685 - DNA, 25 bp, Homo sapien
ctaaggacgtcaccacagtgctggc

SEQ ID NO: 1146686 - DNA, 25 bp, Homo sapien
gtaaatataacaaagcttctgtgct

SEQ ID NO: 1146687 - DNA, 25 bp, Homo sapien
gaacacacccttcaggttttgccaa

SEQ ID NO: 1146688 - DNA, 25 bp, Homo sapien
tgtgcttgttagtgaacaccaactc

SEQ ID NO: 1146689 - DNA, 25 bp, Homo sapien
gtgacccactaactcctgaatgctt

SEQ ID NO: 1146690 - DNA, 25 bp, Homo sapien
gacccactaactcctgaatgctttc

SEQ ID NO: 1146691 - DNA, 25 bp, Homo sapien
tgacccactaactcctgaatgcttt

SEQ ID NO: 1146692 - DNA, 25 bp, Homo sapien
acccactaactcctgaatgctttct

SEQ ID NO: 1146693 - DNA, 25 bp, Homo sapien
gccaacccaggattaggccctgcag

SEQ ID NO: 1146694 - DNA, 25 bp, Homo sapien
tgccaacccaggattaggccctgca

SEQ ID NO: 1146695 - DNA, 25 bp, Homo sapien
ctgccaacccaggattaggccctgc

SEQ ID NO: 1146696 - DNA, 25 bp, Homo sapien
tctgccaacccaggattaggccctg

SEQ ID NO: 1146697 - DNA, 25 bp, Homo sapien
aggatgtaatgggtaaaaatcctga

SEQ ID NO: 1146698 - DNA, 25 bp, Homo sapien
gggacattccaatccatttatcagg

SEQ ID NO: 1146699 - DNA, 25 bp, Homo sapien
tactcagaataattagtcaagagaa

SEQ ID NO: 1146700 - DNA, 25 bp, Homo sapien
aatttctactcagaataattagtca

SEQ ID NO: 1146701 - DNA, 25 bp, Homo sapien
ctcaaacccatgctaaagggaagct

SEQ ID NO: 1146702 - DNA, 25 bp, Homo sapien
agaagaaagatctgaaacccttgct

SEQ ID NO: 1146703 - DNA, 25 bp, Homo sapien
gaagcttatagctgcaggtgcttaa

SEQ ID NO: 1146704 - DNA, 25 bp, Homo sapien
aagggaagcttacagctgcagatgc

SEQ ID NO: 1146705 - DNA, 25 bp, Homo sapien
aggcagtgctaaagggaagcttaca

SEQ ID NO: 1146706 - DNA, 25 bp, Homo sapien
catgacatacccaaactcaggagga

SEQ ID NO: 1146707 - DNA, 25 bp, Homo sapien
ttaagcaaatgaaaacgaaaccatg

SEQ ID NO: 1146708 - DNA, 25 bp, Homo sapien
aactcaggaggaggcaacaaaggca

SEQ ID NO: 1146709 - DNA, 25 bp, Homo sapien
ccatatataggaaaggagcaggagg

SEQ ID NO: 1146710 - DNA, 25 bp, Homo sapien
gttccaacagcatgagtagctgcca

SEQ ID NO: 1146711 - DNA, 25 bp, Homo sapien
tgtgactggcagcatgtgaggttgg

SEQ ID NO: 1146712 - DNA, 25 bp, Homo sapien
tgctacaaatgaagccatatatagg

SEQ ID NO: 1146713 - DNA, 25 bp, Homo sapien
tcaaacataacctgagtacctgtta

SEQ ID NO: 1146714 - DNA, 25 bp, Homo sapien
atcaaacataacctgagtacctgtt

SEQ ID NO: 1146715 - DNA, 25 bp, Homo sapien
caaacataacctgagtacctgttat

SEQ ID NO: 1146716 - DNA, 25 bp, Homo sapien
aaacataacctgagtacctgttatg

SEQ ID NO: 1146717 - DNA, 25 bp, Homo sapien
tccttgtccaggactcccatcaggg

SEQ ID NO: 1146718 - DNA, 25 bp, Homo sapien
tggcggtgctctccccatcgtcctt

SEQ ID NO: 1146719 - DNA, 25 bp, Homo sapien
tgtgatgctctgactcacatgctgg

SEQ ID NO: 1146720 - DNA, 25 bp, Homo sapien
gctgggaggcccttttcccagtgta

SEQ ID NO: 1146721 - DNA, 25 bp, Homo sapien
tagcctgataggaactccaccccat

SEQ ID NO: 1146722 - DNA, 25 bp, Homo sapien
aaaaatacagctttccccagaatgc

SEQ ID NO: 1146723 - DNA, 25 bp, Homo sapien
tccattccaacctagtaaggatagt

SEQ ID NO: 1146724 - DNA, 25 bp, Homo sapien
gactttaagagagcgttcctactcc

SEQ ID NO: 1146725 - DNA, 25 bp, Homo sapien
caaggcagcgtgtagtgcttgcact

SEQ ID NO: 1146726 - DNA, 25 bp, Homo sapien
ccaccatggctgtacaagtagtacc

SEQ ID NO: 1146727 - DNA, 25 bp, Homo sapien
tattgtcaacagtggtgcaaccaac

SEQ ID NO: 1146728 - DNA, 25 bp, Homo sapien
caattggtaaaagaacaaggcagcg

SEQ ID NO: 1146729 - DNA, 25 bp, Homo sapien
tagaacctatattacggaagtcagc

SEQ ID NO: 1146730 - DNA, 25 bp, Homo sapien
ttatatcacagaagtatgggctcac

SEQ ID NO: 1146731 - DNA, 25 bp, Homo sapien
gaaccaatggttatataatacccag

SEQ ID NO: 1146732 - DNA, 25 bp, Homo sapien
cttttggaatggcaacacaagtgag

SEQ ID NO: 1146733 - DNA, 25 bp, Homo sapien
tgttgctacaaagcatagattatga

SEQ ID NO: 1146734 - DNA, 25 bp, Homo sapien
gcagtgccatttctaactaggtgta

SEQ ID NO: 1146735 - DNA, 25 bp, Homo sapien
tagtctcgtcttttctctagtgcct

SEQ ID NO: 1146736 - DNA, 25 bp, Homo sapien
gctattcagtaactacactataggt

SEQ ID NO: 1146737 - DNA, 25 bp, Homo sapien
cagggtccatttccataattctaaa

SEQ ID NO: 1146738 - DNA, 25 bp, Homo sapien
gaggcacacaaatggataataattc

SEQ ID NO: 1146739 - DNA, 25 bp, Homo sapien
gccatgtagacaaagatgtgatgaa

SEQ ID NO: 1146740 - DNA, 25 bp, Homo sapien
tgtgatgaacctgtaacacatttct

SEQ ID NO: 1146741 - DNA, 25 bp, Homo sapien
ctggatgtagaaaacgttcctattt

SEQ ID NO: 1146742 - DNA, 25 bp, Homo sapien
tttctggatgtagaaaacgttccta

SEQ ID NO: 1146743 - DNA, 25 bp, Homo sapien
gtgcttactctgcggcctttccagg

SEQ ID NO: 1146744 - DNA, 25 bp, Homo sapien
gcttactctgcggcctttccagggt

SEQ ID NO: 1146745 - DNA, 25 bp, Homo sapien
acagtgagatgtgaaaggtcccagt

SEQ ID NO: 1146746 - DNA, 25 bp, Homo sapien
cagtgagatgtgaaaggtcccagtg

SEQ ID NO: 1146747 - DNA, 25 bp, Homo sapien
gacagtgagatgtgaaaggtcccag

SEQ ID NO: 1146748 - DNA, 25 bp, Homo sapien
gtgagatgtgaaaggtcccagtgtg

SEQ ID NO: 1146749 - DNA, 25 bp, Homo sapien
taattactcttacagcaatgcgatg

SEQ ID NO: 1146750 - DNA, 25 bp, Homo sapien
ttactcttacagcaatgcgatgaat

SEQ ID NO: 1146751 - DNA, 25 bp, Homo sapien
ctcttacagcaatgcgatgaatcat

SEQ ID NO: 1146752 - DNA, 25 bp, Homo sapien
tctaattactcttacagcaatgcga

SEQ ID NO: 1146753 - DNA, 25 bp, Homo sapien
gtgatttattcagatgtgactgaag

SEQ ID NO: 1146754 - DNA, 25 bp, Homo sapien
aagtgatttattcagatgtgactga

SEQ ID NO: 1146755 - DNA, 25 bp, Homo sapien
tgatttattcagatgtgactgaaga

SEQ ID NO: 1146756 - DNA, 25 bp, Homo sapien
ctaagtgatttattcagatgtgact

SEQ ID NO: 1146757 - DNA, 25 bp, Homo sapien
gacccctgtgtgcaatcttcatagc

SEQ ID NO: 1146758 - DNA, 25 bp, Homo sapien
ttaacattctcaaaacaggatgcat

SEQ ID NO: 1146759 - DNA, 25 bp, Homo sapien
aaaacaggatgcatctggacccctg

SEQ ID NO: 1146760 - DNA, 25 bp, Homo sapien
gcagcagctggtgtatccattaaca

SEQ ID NO: 1146761 - DNA, 25 bp, Homo sapien
ctgactgcagattcatcagaaattc

SEQ ID NO: 1146762 - DNA, 25 bp, Homo sapien
tgcagattcatcagaaattccaaca

SEQ ID NO: 1146763 - DNA, 25 bp, Homo sapien
gactgcagattcatcagaaattcca

SEQ ID NO: 1146764 - DNA, 25 bp, Homo sapien
gcagattcatcagaaattccaacat

SEQ ID NO: 1146765 - DNA, 25 bp, Homo sapien
tcaggtccacataaactagcaatcc

SEQ ID NO: 1146766 - DNA, 25 bp, Homo sapien
ggcactcagacacccaaggagagag

SEQ ID NO: 1146767 - DNA, 25 bp, Homo sapien
cttattcaggtccacataaactagc

SEQ ID NO: 1146768 - DNA, 25 bp, Homo sapien
cacataaactagcaatcccttaaaa

SEQ ID NO: 1146769 - DNA, 25 bp, Homo sapien
taaaacaaggtagaaagatccactg

SEQ ID NO: 1146770 - DNA, 25 bp, Homo sapien
gagcctgacaataatgtgccctcac

SEQ ID NO: 1146771 - DNA, 25 bp, Homo sapien
cagtcaatatattggcagagcctga

SEQ ID NO: 1146772 - DNA, 25 bp, Homo sapien
gtgccctcacaaattatctgtcctg

SEQ ID NO: 1146773 - DNA, 25 bp, Homo sapien
gtcttcatcatccaatgtaggcaat

SEQ ID NO: 1146774 - DNA, 25 bp, Homo sapien
agtcttcatcatccaatgtaggcaa

SEQ ID NO: 1146775 - DNA, 25 bp, Homo sapien
tagcttatggtatgcaggagttcca

SEQ ID NO: 1146776 - DNA, 25 bp, Homo sapien
agactgtattctaggtactccagga

SEQ ID NO: 1146777 - DNA, 25 bp, Homo sapien
catggtgacacaggtctatggtgac

SEQ ID NO: 1146778 - DNA, 25 bp, Homo sapien
taaatcagatacaatgttacccagg

SEQ ID NO: 1146779 - DNA, 25 bp, Homo sapien
tctgagcaaactgttccaaggacag

SEQ ID NO: 1146780 - DNA, 25 bp, Homo sapien
aaaccaaacaccacatgttctcact

SEQ ID NO: 1146781 - DNA, 25 bp, Homo sapien
gggaactgaaaaatgagaacacttg

SEQ ID NO: 1146782 - DNA, 25 bp, Homo sapien
gtgggaactgaaaaatgagaacact

SEQ ID NO: 1146783 - DNA, 25 bp, Homo sapien
taaaattataatgagttgcatcaag

SEQ ID NO: 1146784 - DNA, 25 bp, Homo sapien
tgagttgcatcaagagtttcttatc

SEQ ID NO: 1146785 - DNA, 25 bp, Homo sapien
gtgcataccatcatgtcatgctaat

SEQ ID NO: 1146786 - DNA, 25 bp, Homo sapien
gcataccatcatgtcatgctaatgt

SEQ ID NO: 1146787 - DNA, 25 bp, Homo sapien
ctttttcatgagaaggtccacgtaa

SEQ ID NO: 1146788 - DNA, 25 bp, Homo sapien
tcatgagaaggtccacgtaaaggct

SEQ ID NO: 1146789 - DNA, 25 bp, Homo sapien
tcctttttcatgagaaggtccacgt

SEQ ID NO: 1146790 - DNA, 25 bp, Homo sapien
tttcatgagaaggtccacgtaaagg

SEQ ID NO: 1146791 - DNA, 25 bp, Homo sapien
tcttcttggcttcttcttttcattg

SEQ ID NO: 1146792 - DNA, 25 bp, Homo sapien
cttcttggcttcttcttttcattgc

SEQ ID NO: 1146793 - DNA, 25 bp, Homo sapien
tttgagggttcttcttggcttcttc

SEQ ID NO: 1146794 - DNA, 25 bp, Homo sapien
ggttcttcttggcttcttcttttca

SEQ ID NO: 1146795 - DNA, 25 bp, Homo sapien
aaggaaggatgttttgcaggaggcc

SEQ ID NO: 1146796 - DNA, 25 bp, Homo sapien
ttcaaggaaggatgttttgcaggag

SEQ ID NO: 1146797 - DNA, 25 bp, Homo sapien
cttcaaggaaggatgttttgcagga

SEQ ID NO: 1146798 - DNA, 25 bp, Homo sapien
caaggaaggatgttttgcaggaggc

SEQ ID NO: 1146799 - DNA, 25 bp, Homo sapien
tcaatgtctgtacatactttctttg

SEQ ID NO: 1146800 - DNA, 25 bp, Homo sapien
actttctttgtactgctcctttcac

SEQ ID NO: 1146801 - DNA, 25 bp, Homo sapien
tcacagcaggatcttccacttcagt

SEQ ID NO: 1146802 - DNA, 25 bp, Homo sapien
ctgctctcaatgtctgtacatactt

SEQ ID NO: 1146803 - DNA, 25 bp, Homo sapien
gataatcttccctcaatgcatgaat

SEQ ID NO: 1146804 - DNA, 25 bp, Homo sapien
tatggtagcacgtgcatgtagtatc

SEQ ID NO: 1146805 - DNA, 25 bp, Homo sapien
taccttcagaattcacatagaccaa

SEQ ID NO: 1146806 - DNA, 25 bp, Homo sapien
gctggcacaatgactcccacctgta

SEQ ID NO: 1146807 - DNA, 25 bp, Homo sapien
tggatctaccaagctcatgagaaaa

SEQ ID NO: 1146808 - DNA, 25 bp, Homo sapien
tagcttgtcctcactactttagaag

SEQ ID NO: 1146809 - DNA, 25 bp, Homo sapien
gaaactttggatttatagcttgtcc

SEQ ID NO: 1146810 - DNA, 25 bp, Homo sapien
gttatgtttcctggatctaccaagc

SEQ ID NO: 1146811 - DNA, 25 bp, Homo sapien
ttgctcttcctctaaagccactggt

SEQ ID NO: 1146812 - DNA, 25 bp, Homo sapien
ctctaaagccactggtaaggtttgt

SEQ ID NO: 1146813 - DNA, 25 bp, Homo sapien
acttctttcacacctttcttgctct

SEQ ID NO: 1146814 - DNA, 25 bp, Homo sapien
cacttctttcacacctttcttgctc

SEQ ID NO: 1146815 - DNA, 25 bp, Homo sapien
tgacttttatgaccccattcactcc

SEQ ID NO: 1146816 - DNA, 25 bp, Homo sapien
ttgacttttatgaccccattcactc

SEQ ID NO: 1146817 - DNA, 25 bp, Homo sapien
tgctgaggatacgttttcccaatct

SEQ ID NO: 1146818 - DNA, 25 bp, Homo sapien
tgacatacattttctgatagttgta

SEQ ID NO: 1146819 - DNA, 25 bp, Homo sapien
cagcagaagatgtactatgacatac

SEQ ID NO: 1146820 - DNA, 25 bp, Homo sapien
tttctttggttaatctgtcagcagc

SEQ ID NO: 1146821 - DNA, 25 bp, Homo sapien
tttcttcactttcttgtcttaagat

SEQ ID NO: 1146822 - DNA, 25 bp, Homo sapien
ttttgcacagcatattaacatttgt

SEQ ID NO: 1146823 - DNA, 25 bp, Homo sapien
ttcactttcttgtcttaagatgcat

SEQ ID NO: 1146824 - DNA, 25 bp, Homo sapien
tttttgcacagcatattaacatttg

SEQ ID NO: 1146825 - DNA, 25 bp, Homo sapien
ttcattgtgcgtatttcctgtcgga

SEQ ID NO: 1146826 - DNA, 25 bp, Homo sapien
cattgtgcgtatttcctgtcggagt

SEQ ID NO: 1146827 - DNA, 25 bp, Homo sapien
gtgcgtatttcctgtcggagtatag

SEQ ID NO: 1146828 - DNA, 25 bp, Homo sapien
ttgtgcgtatttcctgtcggagtat

SEQ ID NO: 1146829 - DNA, 25 bp, Homo sapien
gagatcattaagctcttgttgatac

SEQ ID NO: 1146830 - DNA, 25 bp, Homo sapien
tgagatcattaagctcttgttgata

SEQ ID NO: 1146831 - DNA, 25 bp, Homo sapien
tgtttggcttaggtcgtttggagag

SEQ ID NO: 1146832 - DNA, 25 bp, Homo sapien
ctgtgtttggcttaggtcgtttgga

SEQ ID NO: 1146833 - DNA, 25 bp, Homo sapien
ctgctgtgtttggcttaggtcgttt

SEQ ID NO: 1146834 - DNA, 25 bp, Homo sapien
tgctgtgtttggcttaggtcgtttg

SEQ ID NO: 1146835 - DNA, 25 bp, Homo sapien
cactttagcttctgcattttcatac

SEQ ID NO: 1146836 - DNA, 25 bp, Homo sapien
tctagttgctgttcaatgcacggat

SEQ ID NO: 1146837 - DNA, 25 bp, Homo sapien
ttcaatgcacggattttcatgttgg

SEQ ID NO: 1146838 - DNA, 25 bp, Homo sapien
catctagttgctgttcaatgcacgg

SEQ ID NO: 1146839 - DNA, 25 bp, Homo sapien
taatgatcacattcgttcattagct

SEQ ID NO: 1146840 - DNA, 25 bp, Homo sapien
taaagcctctttggatattagttac

SEQ ID NO: 1146841 - DNA, 25 bp, Homo sapien
ttttctcttctagcatgtggtcttt

SEQ ID NO: 1146842 - DNA, 25 bp, Homo sapien
ttctagcatgtggtctttctttcca

SEQ ID NO: 1146843 - DNA, 25 bp, Homo sapien
tctgaaaatagggatctaatgcctt

SEQ ID NO: 1146844 - DNA, 25 bp, Homo sapien
ccaatgatagtcattaagccttgaa

SEQ ID NO: 1146845 - DNA, 25 bp, Homo sapien
taatgccttactcataaatcacagg

SEQ ID NO: 1146846 - DNA, 25 bp, Homo sapien
ttcccactgtacgtgaagcctgcca

SEQ ID NO: 1146847 - DNA, 25 bp, Homo sapien
agagacaggctaaagacactgagct

SEQ ID NO: 1146848 - DNA, 25 bp, Homo sapien
tggaacatagtgagctacataaaat

SEQ ID NO: 1146849 - DNA, 25 bp, Homo sapien
ggaacatagtgagctacataaaata

SEQ ID NO: 1146850 - DNA, 25 bp, Homo sapien
gcttgtttgtatggagaagttaaga

SEQ ID NO: 1146851 - DNA, 25 bp, Homo sapien
aagcttgtttgtatggagaagttaa

SEQ ID NO: 1146852 - DNA, 25 bp, Homo sapien
cttgtttgtatggagaagttaagac

SEQ ID NO: 1146853 - DNA, 25 bp, Homo sapien
ttgtttgtatggagaagttaagacc

SEQ ID NO: 1146854 - DNA, 25 bp, Homo sapien
aagatacagcttccttctccgccat

SEQ ID NO: 1146855 - DNA, 25 bp, Homo sapien
tcctgttgaaaaacttgattctctt

SEQ ID NO: 1146856 - DNA, 25 bp, Homo sapien
agtttactaagttctaccatactgt

SEQ ID NO: 1146857 - DNA, 25 bp, Homo sapien
tgattctctttagccaaattgacac

SEQ ID NO: 1146858 - DNA, 25 bp, Homo sapien
gaagctgtatgatatccttgtttaa

SEQ ID NO: 1146859 - DNA, 25 bp, Homo sapien
agctgtatgatatccttgtttaact

SEQ ID NO: 1146860 - DNA, 25 bp, Homo sapien
gtgaagctgtatgatatccttgttt

SEQ ID NO: 1146861 - DNA, 25 bp, Homo sapien
ttagtgaagctgtatgatatccttg

SEQ ID NO: 1146862 - DNA, 25 bp, Homo sapien
tttgacatggaactgttagctttca

SEQ ID NO: 1146863 - DNA, 25 bp, Homo sapien
tgtagaatttacaatccacatcttt

SEQ ID NO: 1146864 - DNA, 25 bp, Homo sapien
cttatattcttctaactcagttgta

SEQ ID NO: 1146865 - DNA, 25 bp, Homo sapien
aactgttagctttcaatgctgctgc

SEQ ID NO: 1146866 - DNA, 25 bp, Homo sapien
tctttctccataaagagctgatact

SEQ ID NO: 1146867 - DNA, 25 bp, Homo sapien
tctcgacctcaccttgtaggaagag

SEQ ID NO: 1146868 - DNA, 25 bp, Homo sapien
tgactctcgacctcaccttgtagga

SEQ ID NO: 1146869 - DNA, 25 bp, Homo sapien
agagctgatactgatcattgctatt

SEQ ID NO: 1146870 - DNA, 25 bp, Homo sapien
gatctttacttcacatgcaaaagtc

SEQ ID NO: 1146871 - DNA, 25 bp, Homo sapien
aataaagttagcaaatggatatctc

SEQ ID NO: 1146872 - DNA, 25 bp, Homo sapien
ataaagttagcaaatggatatctct

SEQ ID NO: 1146873 - DNA, 25 bp, Homo sapien
gaataaagttagcaaatggatatct

SEQ ID NO: 1146874 - DNA, 25 bp, Homo sapien
aaaacacttcagttaactaagagtg

SEQ ID NO: 1146875 - DNA, 25 bp, Homo sapien
gacttgagaactttatcagagttaa

SEQ ID NO: 1146876 - DNA, 25 bp, Homo sapien
tgagaactttatcagagttaataag

SEQ ID NO: 1146877 - DNA, 25 bp, Homo sapien
cttcagttaactaagagtgagttta

SEQ ID NO: 1146878 - DNA, 25 bp, Homo sapien
tgggagcaagtgtccaatacagcaa

SEQ ID NO: 1146879 - DNA, 25 bp, Homo sapien
aagtagatgggagcaagtgtccaat

SEQ ID NO: 1146880 - DNA, 25 bp, Homo sapien
tagatgggagcaagtgtccaataca

SEQ ID NO: 1146881 - DNA, 25 bp, Homo sapien
gagcaagtgtccaatacagcaacag

SEQ ID NO: 1146882 - DNA, 25 bp, Homo sapien
ttgtaacattagcatggacaaacct

SEQ ID NO: 1146883 - DNA, 25 bp, Homo sapien
caaacctggcaggtactccttaact

SEQ ID NO: 1146884 - DNA, 25 bp, Homo sapien
taagccttcgatgacatttactaac

SEQ ID NO: 1146885 - DNA, 25 bp, Homo sapien
gtatctccatacaaaatacggttga

SEQ ID NO: 1146886 - DNA, 25 bp, Homo sapien
gacatttggcagataaggcacgctg

SEQ ID NO: 1146887 - DNA, 25 bp, Homo sapien
tttggcagataaggcacgctgtgct

SEQ ID NO: 1146888 - DNA, 25 bp, Homo sapien
ggacatttggcagataaggcacgct

SEQ ID NO: 1146889 - DNA, 25 bp, Homo sapien
catttggcagataaggcacgctgtg

SEQ ID NO: 1146890 - DNA, 25 bp, Homo sapien
ctgcagatggaggcaaggaggctcc

SEQ ID NO: 1146891 - DNA, 25 bp, Homo sapien
cagatggaggcaaggaggctccaca

SEQ ID NO: 1146892 - DNA, 25 bp, Homo sapien
gaggctccacagacaacctccctgc

SEQ ID NO: 1146893 - DNA, 25 bp, Homo sapien
ggaggctccacagacaacctccctg

SEQ ID NO: 1146894 - DNA, 25 bp, Homo sapien
ctctttccagcgaccctccagggtg

SEQ ID NO: 1146895 - DNA, 25 bp, Homo sapien
tccagggtgccccgactcactttcc

SEQ ID NO: 1146896 - DNA, 25 bp, Homo sapien
cttctctttccagcgaccctccagg

SEQ ID NO: 1146897 - DNA, 25 bp, Homo sapien
cctccagggtgccccgactcacttt

SEQ ID NO: 1146898 - DNA, 25 bp, Homo sapien
tttatgaatgacttgcaaggcccag

SEQ ID NO: 1146899 - DNA, 25 bp, Homo sapien
aagtgaccagctttccctttatgaa

SEQ ID NO: 1146900 - DNA, 25 bp, Homo sapien
tcagagacctcaaagtgaccagctt

SEQ ID NO: 1146901 - DNA, 25 bp, Homo sapien
gctttccctttatgaatgacttgca

SEQ ID NO: 1146902 - DNA, 25 bp, Homo sapien
gaagctgctccgagtaagtttgtct

SEQ ID NO: 1146903 - DNA, 25 bp, Homo sapien
tactgagaagctgctccgagtaagt

SEQ ID NO: 1146904 - DNA, 25 bp, Homo sapien
ctgctccgagtaagtttgtcttggg

SEQ ID NO: 1146905 - DNA, 25 bp, Homo sapien
gcacaggccccaggtactgagaagc

SEQ ID NO: 1146906 - DNA, 25 bp, Homo sapien
tagaagccccgatgcttggactgga

SEQ ID NO: 1146907 - DNA, 25 bp, Homo sapien
agccccgatgcttggactggagccc

SEQ ID NO: 1146908 - DNA, 25 bp, Homo sapien
gctgtagaagccccgatgcttggac

SEQ ID NO: 1146909 - DNA, 25 bp, Homo sapien
ccaaaggcggcacacaccccagttc

SEQ ID NO: 1146910 - DNA, 25 bp, Homo sapien
agtggaaggcatctatactgaagtg

SEQ ID NO: 1146911 - DNA, 25 bp, Homo sapien
gacagagtggaaggcatctatactg

SEQ ID NO: 1146912 - DNA, 25 bp, Homo sapien
cagagtggaaggcatctatactgaa

SEQ ID NO: 1146913 - DNA, 25 bp, Homo sapien
ctgacagagtggaaggcatctatac

SEQ ID NO: 1146914 - DNA, 25 bp, Homo sapien
tagtatgatttagttcacgattgct

SEQ ID NO: 1146915 - DNA, 25 bp, Homo sapien
catagtatgatttagttcacgattg

SEQ ID NO: 1146916 - DNA, 25 bp, Homo sapien
gtatgatttagttcacgattgctac

SEQ ID NO: 1146917 - DNA, 25 bp, Homo sapien
cataattcaatcacattataccagg

SEQ ID NO: 1146918 - DNA, 25 bp, Homo sapien
ctgtccttgacccaatgaatctcat

SEQ ID NO: 1146919 - DNA, 25 bp, Homo sapien
tgtccttgacccaatgaatctcatg

SEQ ID NO: 1146920 - DNA, 25 bp, Homo sapien
tctgtccttgacccaatgaatctca

SEQ ID NO: 1146921 - DNA, 25 bp, Homo sapien
cagtcacttaatgctacagctccaa

SEQ ID NO: 1146922 - DNA, 25 bp, Homo sapien
ggcagtgggtgactcataggataca

SEQ ID NO: 1146923 - DNA, 25 bp, Homo sapien
cagcaggccagtcacttaatgctac

SEQ ID NO: 1146924 - DNA, 25 bp, Homo sapien
tgtacaggcagtgggtgactcatag

SEQ ID NO: 1146925 - DNA, 25 bp, Homo sapien
tccaaagggtagaggtttgccagga

SEQ ID NO: 1146926 - DNA, 25 bp, Homo sapien
caccatcatgaggaaaggattaagg

SEQ ID NO: 1146927 - DNA, 25 bp, Homo sapien
atgagtttccatagcgacacacagc

SEQ ID NO: 1146928 - DNA, 25 bp, Homo sapien
tccaaaacccaggagaccagtatcc

SEQ ID NO: 1146929 - DNA, 25 bp, Homo sapien
ctcgataacatgcatttcccctgac

SEQ ID NO: 1146930 - DNA, 25 bp, Homo sapien
cgataacatgcatttcccctgacat

SEQ ID NO: 1146931 - DNA, 25 bp, Homo sapien
ccacaggctcctcgataacatgcat

SEQ ID NO: 1146932 - DNA, 25 bp, Homo sapien
ggctcctcgataacatgcatttccc

SEQ ID NO: 1146933 - DNA, 25 bp, Homo sapien
catcccagaactggactttctgagt

SEQ ID NO: 1146934 - DNA, 25 bp, Homo sapien
caccgtcccatcccagaactggact

SEQ ID NO: 1146935 - DNA, 25 bp, Homo sapien
tccctggaccccggctgggtgatgt

SEQ ID NO: 1146936 - DNA, 25 bp, Homo sapien
tcccatcccagaactggactttctg

SEQ ID NO: 1146937 - DNA, 25 bp, Homo sapien
agagagaatttcgtttgctcctgga

SEQ ID NO: 1146938 - DNA, 25 bp, Homo sapien
tcagtaggacctgcccatcaagtag

SEQ ID NO: 1146939 - DNA, 25 bp, Homo sapien
ccatcaagtagactgtctggccact

SEQ ID NO: 1146940 - DNA, 25 bp, Homo sapien
ccaggtcagtaggacctgcccatca

SEQ ID NO: 1146941 - DNA, 25 bp, Homo sapien
tgccatactacgtgaaatttctttt

SEQ ID NO: 1146942 - DNA, 25 bp, Homo sapien
catgttattatatggtatatctgtc

SEQ ID NO: 1146943 - DNA, 25 bp, Homo sapien
atatctgtctctgccatactacgtg

SEQ ID NO: 1146944 - DNA, 25 bp, Homo sapien
tattatatggtatatctgtctctgc

SEQ ID NO: 1146945 - DNA, 25 bp, Homo sapien
caggtactgacactctgctccgagt

SEQ ID NO: 1146946 - DNA, 25 bp, Homo sapien
atccgtgcttccttgagcgggtgag

SEQ ID NO: 1146947 - DNA, 25 bp, Homo sapien
gttgctggcttgtccgcctgctaca

SEQ ID NO: 1146948 - DNA, 25 bp, Homo sapien
agcgggtgaggttgctggcttgtcc

SEQ ID NO: 1146949 - DNA, 25 bp, Homo sapien
tgccagacgtggtacatcagttctt

SEQ ID NO: 1146950 - DNA, 25 bp, Homo sapien
taaaggtggggccaagaggcagacc

SEQ ID NO: 1146951 - DNA, 25 bp, Homo sapien
gggccaagaggcagaccacaggcca

SEQ ID NO: 1146952 - DNA, 25 bp, Homo sapien
atcagttcttctaccctaaaggtgg

SEQ ID NO: 1146953 - DNA, 25 bp, Homo sapien
tggctcctccaccagaatggatgct

SEQ ID NO: 1146954 - DNA, 25 bp, Homo sapien
tttgcctagcatgcacaggctccgg

SEQ ID NO: 1146955 - DNA, 25 bp, Homo sapien
tggccatgtggttggctcctccacc

SEQ ID NO: 1146956 - DNA, 25 bp, Homo sapien
cgggtaccgaaatgttgctctgagt

SEQ ID NO: 1146957 - DNA, 25 bp, Homo sapien
tggactgaccggcaaggagcttact

SEQ ID NO: 1146958 - DNA, 25 bp, Homo sapien
ctgaccggcaaggagcttactgatg

SEQ ID NO: 1146959 - DNA, 25 bp, Homo sapien
tcctggactgaccggcaaggagctt

SEQ ID NO: 1146960 - DNA, 25 bp, Homo sapien
gtccttcctggactgaccggcaagg

SEQ ID NO: 1146961 - DNA, 25 bp, Homo sapien
ctgttcctgtgataatgacgccatc

SEQ ID NO: 1146962 - DNA, 25 bp, Homo sapien
ataatgacgccatcagcctctgcac

SEQ ID NO: 1146963 - DNA, 25 bp, Homo sapien
gttcctgtgataatgacgccatcag

SEQ ID NO: 1146964 - DNA, 25 bp, Homo sapien
tcctgttcctgtgataatgacgcca

SEQ ID NO: 1146965 - DNA, 25 bp, Homo sapien
tcactgcgtctaaggtacaatgatg

SEQ ID NO: 1146966 - DNA, 25 bp, Homo sapien
aataaaaagcaagttcactgcgtct

SEQ ID NO: 1146967 - DNA, 25 bp, Homo sapien
tatttttatctgaggccccctcagc

SEQ ID NO: 1146968 - DNA, 25 bp, Homo sapien
ttatttttatctgaggccccctcag

SEQ ID NO: 1146969 - DNA, 25 bp, Homo sapien
ctggtcaccagtgccccagcccatg

SEQ ID NO: 1146970 - DNA, 25 bp, Homo sapien
tgaccaggtctccactgatcaagcc

SEQ ID NO: 1146971 - DNA, 25 bp, Homo sapien
taggttccatgtgcccagtcctcca

SEQ ID NO: 1146972 - DNA, 25 bp, Homo sapien
cttgacctggtcaccagtgccccag

SEQ ID NO: 1146973 - DNA, 25 bp, Homo sapien
gagtgacaaacttccagactccagc

SEQ ID NO: 1146974 - DNA, 25 bp, Homo sapien
gtgagtgacaaacttccagactcca

SEQ ID NO: 1146975 - DNA, 25 bp, Homo sapien
atgtgagtgacaaacttccagactc

SEQ ID NO: 1146976 - DNA, 25 bp, Homo sapien
tgagtgacaaacttccagactccag

SEQ ID NO: 1146977 - DNA, 25 bp, Homo sapien
acagcagaagtgttccggaatctta

SEQ ID NO: 1146978 - DNA, 25 bp, Homo sapien
cagtgttctgcagtcttaagtgagg

SEQ ID NO: 1146979 - DNA, 25 bp, Homo sapien
accctcgaagcagtgttctgcagtc

SEQ ID NO: 1146980 - DNA, 25 bp, Homo sapien
gtcttaagtgaggaacaaaaattca

SEQ ID NO: 1146981 - DNA, 25 bp, Homo sapien
ccacagtcttggatatcatcttctg

SEQ ID NO: 1146982 - DNA, 25 bp, Homo sapien
cccacagtcttggatatcatcttct

SEQ ID NO: 1146983 - DNA, 25 bp, Homo sapien
ctgtgagaatgaccgaaatgtgaca

SEQ ID NO: 1146984 - DNA, 25 bp, Homo sapien
cttaaaatactgtgagaatgaccga

SEQ ID NO: 1146985 - DNA, 25 bp, Homo sapien
aatactgtgagaatgaccgaaatgt

SEQ ID NO: 1146986 - DNA, 25 bp, Homo sapien
tttgatagactctgacaatctctat

SEQ ID NO: 1146987 - DNA, 25 bp, Homo sapien
tcctcctgagtttgggtatgtcatg

SEQ ID NO: 1146988 - DNA, 25 bp, Homo sapien
ctcctcctgagtttgggtatgtcat

SEQ ID NO: 1146989 - DNA, 25 bp, Homo sapien
tggtcttattctgcttatctctgct

SEQ ID NO: 1146990 - DNA, 25 bp, Homo sapien
tctggtcttattctgcttatctctg

SEQ ID NO: 1146991 - DNA, 25 bp, Homo sapien
ctggtcttattctgcttatctctgc

SEQ ID NO: 1146992 - DNA, 25 bp, Homo sapien
caagggttacagtttcacctgcgct

SEQ ID NO: 1146993 - DNA, 25 bp, Homo sapien
caaatacagacctgaccatggaggg

SEQ ID NO: 1146994 - DNA, 25 bp, Homo sapien
tcctcattacgttgggcaaacagtc

SEQ ID NO: 1146995 - DNA, 25 bp, Homo sapien
gaatcagcagaggtagaccaccact

SEQ ID NO: 1146996 - DNA, 25 bp, Homo sapien
cggtgctgtgtagcagatttctaga

SEQ ID NO: 1146997 - DNA, 25 bp, Homo sapien
tagaattttcgtaacaaacacatac

SEQ ID NO: 1146998 - DNA, 25 bp, Homo sapien
ttaccatcgtaaccagttgtaggta

SEQ ID NO: 1146999 - DNA, 25 bp, Homo sapien
ccagttgtaggtatacagttttgta

SEQ ID NO: 1147000 - DNA, 25 bp, Homo sapien
gcccagtacgggtccctgagaatgg

SEQ ID NO: 1147001 - DNA, 25 bp, Homo sapien
tggccacaaactattaacgtttctc

SEQ ID NO: 1147002 - DNA, 25 bp, Homo sapien
tctggccacaaactattaacgtttc

SEQ ID NO: 1147003 - DNA, 25 bp, Homo sapien
tttccttatggcactggctggtagc

SEQ ID NO: 1147004 - DNA, 25 bp, Homo sapien
ctggccacaaactattaacgtttct

SEQ ID NO: 1147005 - DNA, 25 bp, Homo sapien
tcaccacattatagctctgggggcc

SEQ ID NO: 1147006 - DNA, 25 bp, Homo sapien
gttgcttggagtaaccaaattaaca

SEQ ID NO: 1147007 - DNA, 25 bp, Homo sapien
gtaagactcaaacttgctcccagat

SEQ ID NO: 1147008 - DNA, 25 bp, Homo sapien
tcaaactggtaagactcaaacttgc

SEQ ID NO: 1147009 - DNA, 25 bp, Homo sapien
aggttagctatctaaggaagagtct

SEQ ID NO: 1147010 - DNA, 25 bp, Homo sapien
aaacaaggttagctatctaaggaag

SEQ ID NO: 1147011 - DNA, 25 bp, Homo sapien
acaaggttagctatctaaggaagag

SEQ ID NO: 1147012 - DNA, 25 bp, Homo sapien
caaggttagctatctaaggaagagt

SEQ ID NO: 1147013 - DNA, 25 bp, Homo sapien
tactctcggccctaaagaatgggct

SEQ ID NO: 1147014 - DNA, 25 bp, Homo sapien
gagagatggctaacacaggaaatac

SEQ ID NO: 1147015 - DNA, 25 bp, Homo sapien
cacaaagtgatgagtgagggtgctc

SEQ ID NO: 1147016 - DNA, 25 bp, Homo sapien
ggggggattccagctgcaataaact

SEQ ID NO: 1147017 - DNA, 25 bp, Homo sapien
ccggagtctgcaggccgcgctcctg

SEQ ID NO: 1147018 - DNA, 25 bp, Homo sapien
ccctgggcccggagtctgcaggccg

SEQ ID NO: 1147019 - DNA, 25 bp, Homo sapien
cgtgcatttgcgggccgtggaccct

SEQ ID NO: 1147020 - DNA, 25 bp, Homo sapien
gggcctgacgtgcatttgcgggccg

SEQ ID NO: 1147021 - DNA, 25 bp, Homo sapien
ctactggtgttgagataagacttac

SEQ ID NO: 1147022 - DNA, 25 bp, Homo sapien
caaggtctcactctaaggtctcact

SEQ ID NO: 1147023 - DNA, 25 bp, Homo sapien
ctgctgatttgtctactggtgttga

SEQ ID NO: 1147024 - DNA, 25 bp, Homo sapien
gacttactgtctgtggtgttactaa

SEQ ID NO: 1147025 - DNA, 25 bp, Homo sapien
tgttgggaatatcatttcaacctcc

SEQ ID NO: 1147026 - DNA, 25 bp, Homo sapien
ttgctttcactcttccacaggtgtt

SEQ ID NO: 1147027 - DNA, 25 bp, Homo sapien
tcctgctccgcccaatcctattgct

SEQ ID NO: 1147028 - DNA, 25 bp, Homo sapien
cttgcatgcaaatctccaactcgga

SEQ ID NO: 1147029 - DNA, 25 bp, Homo sapien
gaaggtctccagagtgttgctctac

SEQ ID NO: 1147030 - DNA, 25 bp, Homo sapien
aatgcctcaaaagaaggtctccaga

SEQ ID NO: 1147031 - DNA, 25 bp, Homo sapien
agaaggtctccagagtgttgctcta

SEQ ID NO: 1147032 - DNA, 25 bp, Homo sapien
tctggtggtgaaatgcctcaaaaga

SEQ ID NO: 1147033 - DNA, 25 bp, Homo sapien
taccaacattggttccaacatcatt

SEQ ID NO: 1147034 - DNA, 25 bp, Homo sapien
tattaaacctgggatatttgcccga

SEQ ID NO: 1147035 - DNA, 25 bp, Homo sapien
tatttgcccgacttctatcatctga

SEQ ID NO: 1147036 - DNA, 25 bp, Homo sapien
tgactttcaaaattaccaacattgg

SEQ ID NO: 1147037 - DNA, 25 bp, Homo sapien
tccaatccctctataaccttggaga

SEQ ID NO: 1147038 - DNA, 25 bp, Homo sapien
ccaatccctctataaccttggagat

SEQ ID NO: 1147039 - DNA, 25 bp, Homo sapien
acagagtctcaccttatttgtctta

SEQ ID NO: 1147040 - DNA, 25 bp, Homo sapien
caccttatttgtcttacataagtaa

SEQ ID NO: 1147041 - DNA, 25 bp, Homo sapien
cataagtaaaactttatgacctttg

SEQ ID NO: 1147042 - DNA, 25 bp, Homo sapien
gagtctcaccttatttgtcttacat

SEQ ID NO: 1147043 - DNA, 25 bp, Homo sapien
ttgtgaagactgtggtaatagcgca

SEQ ID NO: 1147044 - DNA, 25 bp, Homo sapien
tctgggccagagtgctcagtacagt

SEQ ID NO: 1147045 - DNA, 25 bp, Homo sapien
aaatagactcctgcggctagctcgg

SEQ ID NO: 1147046 - DNA, 25 bp, Homo sapien
ttctttggctacacccacagtccaa

SEQ ID NO: 1147047 - DNA, 25 bp, Homo sapien
taagactgggattaaagcctgagca

SEQ ID NO: 1147048 - DNA, 25 bp, Homo sapien
caaagatgggagttccggattcctc

SEQ ID NO: 1147049 - DNA, 25 bp, Homo sapien
taagcatgagtaggtctggaaataa

SEQ ID NO: 1147050 - DNA, 25 bp, Homo sapien
ccagagaactgagtatggaggctag

SEQ ID NO: 1147051 - DNA, 25 bp, Homo sapien
cctgctaagttatgacagctggata

SEQ ID NO: 1147052 - DNA, 25 bp, Homo sapien
tttaagaatggagccaagatcccat

SEQ ID NO: 1147053 - DNA, 25 bp, Homo sapien
tagccattacccactagatgtgagt

SEQ ID NO: 1147054 - DNA, 25 bp, Homo sapien
taaagcacgtatcagagaagcacat

SEQ ID NO: 1147055 - DNA, 25 bp, Homo sapien
cagggtcccagagttcagcaagtta

SEQ ID NO: 1147056 - DNA, 25 bp, Homo sapien
cagcctggtatggagtattagggcc

SEQ ID NO: 1147057 - DNA, 25 bp, Homo sapien
tgggtgatgtttgatcccaaacacg

SEQ ID NO: 1147058 - DNA, 25 bp, Homo sapien
cagcaagttaacaaggcttttgtgc

SEQ ID NO: 1147059 - DNA, 25 bp, Homo sapien
cagtctccacgagaactgaggcgga

SEQ ID NO: 1147060 - DNA, 25 bp, Homo sapien
gaatattccaagctacagcctcgtg

SEQ ID NO: 1147061 - DNA, 25 bp, Homo sapien
cagtacaagttgtctggcagctgga

SEQ ID NO: 1147062 - DNA, 25 bp, Homo sapien
cataagaaagcccaaagatgtccgg

SEQ ID NO: 1147063 - DNA, 25 bp, Homo sapien
acactcactgtgaggcccgcagctt

SEQ ID NO: 1147064 - DNA, 25 bp, Homo sapien
gtaacactcactgtgaggcccgcag

SEQ ID NO: 1147065 - DNA, 25 bp, Homo sapien
ctgtaacactcactgtgaggcccgc

SEQ ID NO: 1147066 - DNA, 25 bp, Homo sapien
taacactcactgtgaggcccgcagc

SEQ ID NO: 1147067 - DNA, 25 bp, Homo sapien
cgagtgtctgcggcttcattcctga

SEQ ID NO: 1147068 - DNA, 25 bp, Homo sapien
gagtgtctgcggcttcattcctgaa

SEQ ID NO: 1147069 - DNA, 25 bp, Homo sapien
gcgagtgtctgcggcttcattcctg

SEQ ID NO: 1147070 - DNA, 25 bp, Homo sapien
tgcgagtgtctgcggcttcattcct

SEQ ID NO: 1147071 - DNA, 25 bp, Homo sapien
gtcatacaagaatagtgtatccagc

SEQ ID NO: 1147072 - DNA, 25 bp, Homo sapien
aaacaaaactgtcatacaagaatag

SEQ ID NO: 1147073 - DNA, 25 bp, Homo sapien
caagaatagtgtatccagcaaactt

SEQ ID NO: 1147074 - DNA, 25 bp, Homo sapien
ccagcaaacttattgtgaagatgat

SEQ ID NO: 1147075 - DNA, 25 bp, Homo sapien
ctgtgtgaaagtttcttgataagtc

SEQ ID NO: 1147076 - DNA, 25 bp, Homo sapien
tgctgtgtgaaagtttcttgataag

SEQ ID NO: 1147077 - DNA, 25 bp, Homo sapien
gctgtgtgaaagtttcttgataagt

SEQ ID NO: 1147078 - DNA, 25 bp, Homo sapien
tgctgaacacggagctcaagggtac

SEQ ID NO: 1147079 - DNA, 25 bp, Homo sapien
aacacggagctcaagggtactctca

SEQ ID NO: 1147080 - DNA, 25 bp, Homo sapien
tgctttcttgctgaacacggagctc

SEQ ID NO: 1147081 - DNA, 25 bp, Homo sapien
tttcaagctcttcaactctgttgtg

SEQ ID NO: 1147082 - DNA, 25 bp, Homo sapien
gtagatcgttgataagctccaagac

SEQ ID NO: 1147083 - DNA, 25 bp, Homo sapien
agtagatcgttgataagctccaaga

SEQ ID NO: 1147084 - DNA, 25 bp, Homo sapien
tcctgttttacttgatctgatttta

SEQ ID NO: 1147085 - DNA, 25 bp, Homo sapien
actagatccttgataagctccaagg

SEQ ID NO: 1147086 - DNA, 25 bp, Homo sapien
ctagatccttgataagctccaaggc

SEQ ID NO: 1147087 - DNA, 25 bp, Homo sapien
tgaatgtaggagcactaagacctgg

SEQ ID NO: 1147088 - DNA, 25 bp, Homo sapien
tcatgtgtgatgaaagagaccccag

SEQ ID NO: 1147089 - DNA, 25 bp, Homo sapien
ctgatcacaggtagtgtcagtgatg

SEQ ID NO: 1147090 - DNA, 25 bp, Homo sapien
cagtgatggtgcaatagtgaatgta

SEQ ID NO: 1147091 - DNA, 25 bp, Homo sapien
tttcctgtctagtctgatctcttcc

SEQ ID NO: 1147092 - DNA, 25 bp, Homo sapien
ttttcctgtctagtctgatctcttc

SEQ ID NO: 1147093 - DNA, 25 bp, Homo sapien
tcctgtctagtctgatctcttcctc

SEQ ID NO: 1147094 - DNA, 25 bp, Homo sapien
cctcaaggggtttcctgcaggaaga

SEQ ID NO: 1147095 - DNA, 25 bp, Homo sapien
tcaaggggtttcctgcaggaagaag

SEQ ID NO: 1147096 - DNA, 25 bp, Homo sapien
tcctagctctgtccagtacgttagg

SEQ ID NO: 1147097 - DNA, 25 bp, Homo sapien
tagctctgtccagtacgttagggac

SEQ ID NO: 1147098 - DNA, 25 bp, Homo sapien
tcttgtaggtgaggaaaccgaaggc

SEQ ID NO: 1147099 - DNA, 25 bp, Homo sapien
ccgaaggcccgagggagaaatgact

SEQ ID NO: 1147100 - DNA, 25 bp, Homo sapien
ccagccctctcatcttgtaggtgag

SEQ ID NO: 1147101 - DNA, 25 bp, Homo sapien
gaatttccatctggtccagccctct

SEQ ID NO: 1147102 - DNA, 25 bp, Homo sapien
aggatttgtggagcgggtgcgtggt

SEQ ID NO: 1147103 - DNA, 25 bp, Homo sapien
tttgtggagcgggtgcgtggtggga

SEQ ID NO: 1147104 - DNA, 25 bp, Homo sapien
gcgggtgcgtggtgggaactgggat

SEQ ID NO: 1147105 - DNA, 25 bp, Homo sapien
gtgggaactgggatggaggctccag

SEQ ID NO: 1147106 - DNA, 25 bp, Homo sapien
gtcatcttcattggcagcctgtgcg

SEQ ID NO: 1147107 - DNA, 25 bp, Homo sapien
ggctttttgcgccccgctgtcacgg

SEQ ID NO: 1147108 - DNA, 25 bp, Homo sapien
tgcgccccgctgtcacggctttttg

SEQ ID NO: 1147109 - DNA, 25 bp, Homo sapien
cgcggctttttactcgccacggcct

SEQ ID NO: 1147110 - DNA, 25 bp, Homo sapien
ttttgcgccccgctgtcacggcttt

SEQ ID NO: 1147111 - DNA, 25 bp, Homo sapien
ccaccttgcctcggctttttgaccg

SEQ ID NO: 1147112 - DNA, 25 bp, Homo sapien
ttgcctcggctttttgaccgccgcg

SEQ ID NO: 1147113 - DNA, 25 bp, Homo sapien
ccttgcctcggctttttgaccgccg

SEQ ID NO: 1147114 - DNA, 25 bp, Homo sapien
tgcctcggctttttgaccgccgcgg

SEQ ID NO: 1147115 - DNA, 25 bp, Homo sapien
gaccccttgccgctgcgaattttgc

SEQ ID NO: 1147116 - DNA, 25 bp, Homo sapien
tttttgaccccttgccgctgcgaat

SEQ ID NO: 1147117 - DNA, 25 bp, Homo sapien
ggctttttgaccccttgccgctgcg

SEQ ID NO: 1147118 - DNA, 25 bp, Homo sapien
ttttgaccccttgccgctgcgaatt

SEQ ID NO: 1147119 - DNA, 25 bp, Homo sapien
atatcttcagctaagatttcccaac

SEQ ID NO: 1147120 - DNA, 25 bp, Homo sapien
gcctcattcacgtacatgggagagt

SEQ ID NO: 1147121 - DNA, 25 bp, Homo sapien
cacgtattcataggttaagccacat

SEQ ID NO: 1147122 - DNA, 25 bp, Homo sapien
ttgtgccggctttaaagaacccagc

SEQ ID NO: 1147123 - DNA, 25 bp, Homo sapien
tgggagagtctacaaagtcacacgt

SEQ ID NO: 1147124 - DNA, 25 bp, Homo sapien
aatgggatacccacattaagcaggg

SEQ ID NO: 1147125 - DNA, 25 bp, Homo sapien
gaaagctttctgaccacttgtggct

SEQ ID NO: 1147126 - DNA, 25 bp, Homo sapien
aaactggtaacctcgcaaatcctgc

SEQ ID NO: 1147127 - DNA, 25 bp, Homo sapien
tagtgtgcctagtgaccaagagggc

SEQ ID NO: 1147128 - DNA, 25 bp, Homo sapien
aaaatgattatacaaagccaaatat

SEQ ID NO: 1147129 - DNA, 25 bp, Homo sapien
taattctaccagctagagataatgg

SEQ ID NO: 1147130 - DNA, 25 bp, Homo sapien
gctgtacatattgttttacaatcta

SEQ ID NO: 1147131 - DNA, 25 bp, Homo sapien
gataatggtgttagaatatattcct

SEQ ID NO: 1147132 - DNA, 25 bp, Homo sapien
tatgagtagctatatgtctaagaca

SEQ ID NO: 1147133 - DNA, 25 bp, Homo sapien
gcttcagcttctaggtacctcagtt

SEQ ID NO: 1147134 - DNA, 25 bp, Homo sapien
gtggaatattctttgcagaactgag

SEQ ID NO: 1147135 - DNA, 25 bp, Homo sapien
cttgagctggaaggcactaataaag

SEQ ID NO: 1147136 - DNA, 25 bp, Homo sapien
cagatgggttgcttggctctttaac

SEQ ID NO: 1147137 - DNA, 25 bp, Homo sapien
gaaggtcctgaacgagctctactcg

SEQ ID NO: 1147138 - DNA, 25 bp, Homo sapien
gcagccatagtacatcagcaacaga

SEQ ID NO: 1147139 - DNA, 25 bp, Homo sapien
gagtaaagaagtcggccagcagctc

SEQ ID NO: 1147140 - DNA, 25 bp, Homo sapien
ggagctcagctttcctctcaatgga

SEQ ID NO: 1147141 - DNA, 25 bp, Homo sapien
gatgaaaggcattccctcttgtggc

SEQ ID NO: 1147142 - DNA, 25 bp, Homo sapien
gacaggctggtatgtgagatcacag

SEQ ID NO: 1147143 - DNA, 25 bp, Homo sapien
cagcagttgaggtcattggatgaga

SEQ ID NO: 1147144 - DNA, 25 bp, Homo sapien
ccaagttagctgagagagaggacca

SEQ ID NO: 1147145 - DNA, 25 bp, Homo sapien
caaaataagagatcccagcctgagc

SEQ ID NO: 1147146 - DNA, 25 bp, Homo sapien
tgctgccagagcttaatacagggtc

SEQ ID NO: 1147147 - DNA, 25 bp, Homo sapien
gaagtggttagtgaatgcccctgaa

SEQ ID NO: 1147148 - DNA, 25 bp, Homo sapien
gttcttgtacatctagaagcaatta

SEQ ID NO: 1147149 - DNA, 25 bp, Homo sapien
tctcccctggactatgttcttgtac

SEQ ID NO: 1147150 - DNA, 25 bp, Homo sapien
tctcgttgtctttttggaaatcact

SEQ ID NO: 1147151 - DNA, 25 bp, Homo sapien
taggatgactaggtagccaaggctt

SEQ ID NO: 1147152 - DNA, 25 bp, Homo sapien
taatactgagcttcagttaaggcta

SEQ ID NO: 1147153 - DNA, 25 bp, Homo sapien
taaaagaccataggaacctcagacc

SEQ ID NO: 1147154 - DNA, 25 bp, Homo sapien
gaccatccctcttcatggtctcaag

SEQ ID NO: 1147155 - DNA, 25 bp, Homo sapien
ctaagtagttattagtaaggcccag

SEQ ID NO: 1147156 - DNA, 25 bp, Homo sapien
gctgctcgggggtcaggggtcaggg

SEQ ID NO: 1147157 - DNA, 25 bp, Homo sapien
ccccatctttgaggttttctctact

SEQ ID NO: 1147158 - DNA, 25 bp, Homo sapien
ggctgctcgggggtcaggggtcagg

SEQ ID NO: 1147159 - DNA, 25 bp, Homo sapien
catctttgaggttttctctactttt

SEQ ID NO: 1147160 - DNA, 25 bp, Homo sapien
gcagctgttgggctagcaatgccat

SEQ ID NO: 1147161 - DNA, 25 bp, Homo sapien
tattcaacttgggatgcagcaggtt

SEQ ID NO: 1147162 - DNA, 25 bp, Homo sapien
tctcagggacgtggaaactattcaa

SEQ ID NO: 1147163 - DNA, 25 bp, Homo sapien
gggctgaattcagtccacatggatt

SEQ ID NO: 1147164 - DNA, 25 bp, Homo sapien
tagtctaggtgttagccatccaggg

SEQ ID NO: 1147165 - DNA, 25 bp, Homo sapien
caggcttcttattccatcccgagag

SEQ ID NO: 1147166 - DNA, 25 bp, Homo sapien
ttgctgtgcagagacaaccatcctg

SEQ ID NO: 1147167 - DNA, 25 bp, Homo sapien
gaaacagaattggtacctggcagtc

SEQ ID NO: 1147168 - DNA, 25 bp, Homo sapien
ctagatatggagtgccgattggtgt

SEQ ID NO: 1147169 - DNA, 25 bp, Homo sapien
tatggagtgccgattggtgtattta

SEQ ID NO: 1147170 - DNA, 25 bp, Homo sapien
tgagctagatatggagtgccgattg

SEQ ID NO: 1147171 - DNA, 25 bp, Homo sapien
cttgagctagatatggagtgccgat

SEQ ID NO: 1147172 - DNA, 25 bp, Homo sapien
gttttgacacacaggttctctaagg

SEQ ID NO: 1147173 - DNA, 25 bp, Homo sapien
agagttttgacacacaggttctcta

SEQ ID NO: 1147174 - DNA, 25 bp, Homo sapien
cattcaccaaccttgagctaaacac

SEQ ID NO: 1147175 - DNA, 25 bp, Homo sapien
agatacagagttttgacacacaggt

SEQ ID NO: 1147176 - DNA, 25 bp, Homo sapien
gggaatggtccttttgctctccacc

SEQ ID NO: 1147177 - DNA, 25 bp, Homo sapien
gacacagggaatggtccttttgctc

SEQ ID NO: 1147178 - DNA, 25 bp, Homo sapien
cacagggaatggtccttttgctctc

SEQ ID NO: 1147179 - DNA, 25 bp, Homo sapien
cagggaatggtccttttgctctcca

SEQ ID NO: 1147180 - DNA, 25 bp, Homo sapien
cctgaatttcttcgattatttcggt

SEQ ID NO: 1147181 - DNA, 25 bp, Homo sapien
ttcttcgattatttcggttccttgc

SEQ ID NO: 1147182 - DNA, 25 bp, Homo sapien
gattatttcggttccttgcatgcag

SEQ ID NO: 1147183 - DNA, 25 bp, Homo sapien
tcgattatttcggttccttgcatgc

SEQ ID NO: 1147184 - DNA, 25 bp, Homo sapien
aaggctcaagtgtgcttggtgtatt

SEQ ID NO: 1147185 - DNA, 25 bp, Homo sapien
cctaaggctcaagtgtgcttggtgt

SEQ ID NO: 1147186 - DNA, 25 bp, Homo sapien
tcaagtgtgcttggtgtatttgagg

SEQ ID NO: 1147187 - DNA, 25 bp, Homo sapien
tgggaatgaggcggaaaaggactag

SEQ ID NO: 1147188 - DNA, 25 bp, Homo sapien
ctttttacgtcttagagtagctggg

SEQ ID NO: 1147189 - DNA, 25 bp, Homo sapien
tccactttttacgtcttagagtagc

SEQ ID NO: 1147190 - DNA, 25 bp, Homo sapien
atctttgcagccacaaagtcctttg

SEQ ID NO: 1147191 - DNA, 25 bp, Homo sapien
gcagccacaaagtcctttgttccac

SEQ ID NO: 1147192 - DNA, 25 bp, Homo sapien
tcagagcactgaggactgcaaaggg

SEQ ID NO: 1147193 - DNA, 25 bp, Homo sapien
ctgtctgcttggcagtgaccagcag

SEQ ID NO: 1147194 - DNA, 25 bp, Homo sapien
gtctgcttggcagtgaccagcagct

SEQ ID NO: 1147195 - DNA, 25 bp, Homo sapien
actgaggactgcaaaggggaacaga

SEQ ID NO: 1147196 - DNA, 25 bp, Homo sapien
tataagactaaagcaaaggtaagga

SEQ ID NO: 1147197 - DNA, 25 bp, Homo sapien
gacaaaccagatagtaggagagtaa

SEQ ID NO: 1147198 - DNA, 25 bp, Homo sapien
gataaccactagaacaaaaatgcgg

SEQ ID NO: 1147199 - DNA, 25 bp, Homo sapien
tcattattgaaagctgacaaaccag

SEQ ID NO: 1147200 - DNA, 25 bp, Homo sapien
gacccttgttggacacacagcataa

SEQ ID NO: 1147201 - DNA, 25 bp, Homo sapien
gaaacagggctggaccaaatgaacc

SEQ ID NO: 1147202 - DNA, 25 bp, Homo sapien
tacaggcttccagtgcttactcaca

SEQ ID NO: 1147203 - DNA, 25 bp, Homo sapien
tgatggaaagattgcccctccctga

SEQ ID NO: 1147204 - DNA, 25 bp, Homo sapien
ttgctgcagcctcacctacctgggt

SEQ ID NO: 1147205 - DNA, 25 bp, Homo sapien
gagccactatatttggtctcatttg

SEQ ID NO: 1147206 - DNA, 25 bp, Homo sapien
gccactatatttggtctcatttgta

SEQ ID NO: 1147207 - DNA, 25 bp, Homo sapien
tgtgagccactatatttggtctcat

SEQ ID NO: 1147208 - DNA, 25 bp, Homo sapien
ctttttaccagagctgatcacagga

SEQ ID NO: 1147209 - DNA, 25 bp, Homo sapien
ttttaccagagctgatcacaggaaa

SEQ ID NO: 1147210 - DNA, 25 bp, Homo sapien
tttaccagagctgatcacaggaaac

SEQ ID NO: 1147211 - DNA, 25 bp, Homo sapien
tttttaccagagctgatcacaggaa

SEQ ID NO: 1147212 - DNA, 25 bp, Homo sapien
aaatcgctggtacatcaagtcatcc

SEQ ID NO: 1147213 - DNA, 25 bp, Homo sapien
tctggctctgtatcattggcaaagg

SEQ ID NO: 1147214 - DNA, 25 bp, Homo sapien
ggtcccaaatgtggtaaatcgctgg

SEQ ID NO: 1147215 - DNA, 25 bp, Homo sapien
gcattataaagaggcttggcagcag

SEQ ID NO: 1147216 - DNA, 25 bp, Homo sapien
ctaggattctagatcaagtgctggg

SEQ ID NO: 1147217 - DNA, 25 bp, Homo sapien
gaagccttgcctaaaccctaagctg

SEQ ID NO: 1147218 - DNA, 25 bp, Homo sapien
tggcccatcaggactaatattaccc

SEQ ID NO: 1147219 - DNA, 25 bp, Homo sapien
aacatgatacctctgcaacttggca

SEQ ID NO: 1147220 - DNA, 25 bp, Homo sapien
tcctatactcggttttctgcttctg

SEQ ID NO: 1147221 - DNA, 25 bp, Homo sapien
agaactttgggactctcaagggtca

SEQ ID NO: 1147222 - DNA, 25 bp, Homo sapien
ttgtcagtctctgtgggttaagaac

SEQ ID NO: 1147223 - DNA, 25 bp, Homo sapien
gtattttgtacattgtcagtctctg

SEQ ID NO: 1147224 - DNA, 25 bp, Homo sapien
ggcaccttggctgactggactaaac

SEQ ID NO: 1147225 - DNA, 25 bp, Homo sapien
ctgagtgggtttagcatttgagaaa

SEQ ID NO: 1147226 - DNA, 25 bp, Homo sapien
ttgagaaatagaggggcaccttggc

SEQ ID NO: 1147227 - DNA, 25 bp, Homo sapien
gtgggtttagcatttgagaaataga

SEQ ID NO: 1147228 - DNA, 25 bp, Homo sapien
tctggatctactcggttgatggagc

SEQ ID NO: 1147229 - DNA, 25 bp, Homo sapien
gctgtgctgcttcttccacggagac

SEQ ID NO: 1147230 - DNA, 25 bp, Homo sapien
ggatctactcggttgatggagcagc

SEQ ID NO: 1147231 - DNA, 25 bp, Homo sapien
accatctggatctactcggttgatg

SEQ ID NO: 1147232 - DNA, 25 bp, Homo sapien
tgttggagggcccttctgaaactcc

SEQ ID NO: 1147233 - DNA, 25 bp, Homo sapien
aaacaaacagcagtgtgggtctcag

SEQ ID NO: 1147234 - DNA, 25 bp, Homo sapien
gtagtctggatgcttgtgaacaagc

SEQ ID NO: 1147235 - DNA, 25 bp, Homo sapien
ctgcttgcaggtgccgaaacaaaca

SEQ ID NO: 1147236 - DNA, 25 bp, Homo sapien
gcagaacactggtaagaagctaatg

SEQ ID NO: 1147237 - DNA, 25 bp, Homo sapien
gttatgtggtatagaagtccagcat

SEQ ID NO: 1147238 - DNA, 25 bp, Homo sapien
tcttgacagactgcatctcgatggc

SEQ ID NO: 1147239 - DNA, 25 bp, Homo sapien
aagctaatgatgttggttccgtttc

SEQ ID NO: 1147240 - DNA, 25 bp, Homo sapien
aaagagggacagtcccactcttgca

SEQ ID NO: 1147241 - DNA, 25 bp, Homo sapien
gagggacagtcccactcttgcagag

SEQ ID NO: 1147242 - DNA, 25 bp, Homo sapien
gacagtcccactcttgcagaggtga

SEQ ID NO: 1147243 - DNA, 25 bp, Homo sapien
gcaaagagggacagtcccactcttg

SEQ ID NO: 1147244 - DNA, 25 bp, Homo sapien
tatctgaagtgtttgtacaaagatg

SEQ ID NO: 1147245 - DNA, 25 bp, Homo sapien
gacttagttgaaagccccaagtgtg

SEQ ID NO: 1147246 - DNA, 25 bp, Homo sapien
ggctgactccagtattcttcaggag

SEQ ID NO: 1147247 - DNA, 25 bp, Homo sapien
tcttcaggagacacagtagcaggaa

SEQ ID NO: 1147248 - DNA, 25 bp, Homo sapien
tgccttcactaagcccctcaggtgg

SEQ ID NO: 1147249 - DNA, 25 bp, Homo sapien
gactgtagtgttcgggacattccgg

SEQ ID NO: 1147250 - DNA, 25 bp, Homo sapien
caggatatgatccagaatggtggtc

SEQ ID NO: 1147251 - DNA, 25 bp, Homo sapien
cattccggagagtcacattgtttac

SEQ ID NO: 1147252 - DNA, 25 bp, Homo sapien
ttatctgtagtagccagacggcctg

SEQ ID NO: 1147253 - DNA, 25 bp, Homo sapien
tgggcgctcacagtaagttacgttt

SEQ ID NO: 1147254 - DNA, 25 bp, Homo sapien
tctgcattctggtcaggcggctgcg

SEQ ID NO: 1147255 - DNA, 25 bp, Homo sapien
cgtttacatagtggagaggtgagca

SEQ ID NO: 1147256 - DNA, 25 bp, Homo sapien
cacctccagtttgacctacttaaca

SEQ ID NO: 1147257 - DNA, 25 bp, Homo sapien
taagactactagatgccagtttagt

SEQ ID NO: 1147258 - DNA, 25 bp, Homo sapien
acattcttttattgtatctcactca

SEQ ID NO: 1147259 - DNA, 25 bp, Homo sapien
caaaagactagctgtttatttatac

SEQ ID NO: 1147260 - DNA, 25 bp, Homo sapien
gattttagggctattgtcaaggtcc

SEQ ID NO: 1147261 - DNA, 25 bp, Homo sapien
caagctttggtaccctatttgccaa

SEQ ID NO: 1147262 - DNA, 25 bp, Homo sapien
agctcgggcttggagataagaccca

SEQ ID NO: 1147263 - DNA, 25 bp, Homo sapien
tgtaagcccacttgaactaatctgg

SEQ ID NO: 1147264 - DNA, 25 bp, Homo sapien
ctgcgagtggaagccatacgtccta

SEQ ID NO: 1147265 - DNA, 25 bp, Homo sapien
gagtggaagccatacgtcctacgga

SEQ ID NO: 1147266 - DNA, 25 bp, Homo sapien
gaagccatacgtcctacggactgat

SEQ ID NO: 1147267 - DNA, 25 bp, Homo sapien
ccatacgtcctacggactgatctag

SEQ ID NO: 1147268 - DNA, 25 bp, Homo sapien
gggttgcgcgtgggaagtgaccgtg

SEQ ID NO: 1147269 - DNA, 25 bp, Homo sapien
ccgtgcgtgtaaggggtgaggcgta

SEQ ID NO: 1147270 - DNA, 25 bp, Homo sapien
tggggggttgcgcgtgggaagtgac

SEQ ID NO: 1147271 - DNA, 25 bp, Homo sapien
ttgcgcgtgggaagtgaccgtgcgt

SEQ ID NO: 1147272 - DNA, 25 bp, Homo sapien
agcaagtccaggaccgccggttgga

SEQ ID NO: 1147273 - DNA, 25 bp, Homo sapien
gagcagagccggaccgggaaaggtg

SEQ ID NO: 1147274 - DNA, 25 bp, Homo sapien
tggacgtgatagtcccagctgtgtg

SEQ ID NO: 1147275 - DNA, 25 bp, Homo sapien
tgcttcgccacggaggatttctcct

SEQ ID NO: 1147276 - DNA, 25 bp, Homo sapien
ttctgacagcccctttcaaggtaaa

SEQ ID NO: 1147277 - DNA, 25 bp, Homo sapien
cccttctcaaatggcactgtaaatt

SEQ ID NO: 1147278 - DNA, 25 bp, Homo sapien
ctgacacgcgtcagtaccctggcaa

SEQ ID NO: 1147279 - DNA, 25 bp, Homo sapien
cagtaccctggcaaattccttaata

SEQ ID NO: 1147280 - DNA, 25 bp, Homo sapien
ttctcaaatggcactgtaaattcat

SEQ ID NO: 1147281 - DNA, 25 bp, Homo sapien
cgagccttgggagcgggctcaggac

SEQ ID NO: 1147282 - DNA, 25 bp, Homo sapien
ggctcaggaccgctggtccggccgg

SEQ ID NO: 1147283 - DNA, 25 bp, Homo sapien
tcaggaccgctggtccggccggaga

SEQ ID NO: 1147284 - DNA, 25 bp, Homo sapien
tcgcctcgaaggagttcccgagcct

SEQ ID NO: 1147285 - DNA, 25 bp, Homo sapien
gcctgtgtcagttaaactctttact

SEQ ID NO: 1147286 - DNA, 25 bp, Homo sapien
aatgccatggtctccgtgaattgat

SEQ ID NO: 1147287 - DNA, 25 bp, Homo sapien
gagtaataactctgtcccctacatg

SEQ ID NO: 1147288 - DNA, 25 bp, Homo sapien
tacatgtcatggctagcctgtgtca

SEQ ID NO: 1147289 - DNA, 25 bp, Homo sapien
ggcattacagatgtgagcagctgca

SEQ ID NO: 1147290 - DNA, 25 bp, Homo sapien
gagcagctgcacctggccttgcttg

SEQ ID NO: 1147291 - DNA, 25 bp, Homo sapien
ctggcattacagatgtgagcagctg

SEQ ID NO: 1147292 - DNA, 25 bp, Homo sapien
tgtgagcagctgcacctggccttgc

SEQ ID NO: 1147293 - DNA, 25 bp, Homo sapien
ctacatagaaatcgccctctccgtg

SEQ ID NO: 1147294 - DNA, 25 bp, Homo sapien
atctacatagaaatcgccctctccg

SEQ ID NO: 1147295 - DNA, 25 bp, Homo sapien
gaaatcgccctctccgtgatgtcac

SEQ ID NO: 1147296 - DNA, 25 bp, Homo sapien
atagaaatcgccctctccgtgatgt

SEQ ID NO: 1147297 - DNA, 25 bp, Homo sapien
gagtaaaattgctaagccttgccct

SEQ ID NO: 1147298 - DNA, 25 bp, Homo sapien
agagtaaaattgctaagccttgccc

SEQ ID NO: 1147299 - DNA, 25 bp, Homo sapien
cagagtaaaattgctaagccttgcc

SEQ ID NO: 1147300 - DNA, 25 bp, Homo sapien
ttacagtgggctcccatagggaaaa

SEQ ID NO: 1147301 - DNA, 25 bp, Homo sapien
gacgggtccaccatatttgaccaca

SEQ ID NO: 1147302 - DNA, 25 bp, Homo sapien
gcagtaagccatgcactccagtgaa

SEQ ID NO: 1147303 - DNA, 25 bp, Homo sapien
ctccagagctcgagcggtattaaca

SEQ ID NO: 1147304 - DNA, 25 bp, Homo sapien
catccctggatgggcttgcaccacc

SEQ ID NO: 1147305 - DNA, 25 bp, Homo sapien
atttcatcagcatcccgcaactctg

SEQ ID NO: 1147306 - DNA, 25 bp, Homo sapien
gcatcccgcaactctgagaatcctt

SEQ ID NO: 1147307 - DNA, 25 bp, Homo sapien
caagacaaaggtacctaagcttaga

SEQ ID NO: 1147308 - DNA, 25 bp, Homo sapien
gagaatccttagccacaaaaacaag

SEQ ID NO: 1147309 - DNA, 25 bp, Homo sapien
aggcagtagctttggatgtcaggaa

SEQ ID NO: 1147310 - DNA, 25 bp, Homo sapien
ttctgtttgcacttttccagttcag

SEQ ID NO: 1147311 - DNA, 25 bp, Homo sapien
gagcgcaagtactgattggtttcca

SEQ ID NO: 1147312 - DNA, 25 bp, Homo sapien
caaaacaagtggtggcagatactgc

SEQ ID NO: 1147313 - DNA, 25 bp, Homo sapien
gctgacctcggcaattcggccagct

SEQ ID NO: 1147314 - DNA, 25 bp, Homo sapien
cggagccttgcagctgacctcggca

SEQ ID NO: 1147315 - DNA, 25 bp, Homo sapien
ttgcagctgacctcggcaattcggc

SEQ ID NO: 1147316 - DNA, 25 bp, Homo sapien
cagattctataaggtctttgcactc

SEQ ID NO: 1147317 - DNA, 25 bp, Homo sapien
gagaaggccctcaaaagacttgact

SEQ ID NO: 1147318 - DNA, 25 bp, Homo sapien
tgactgtgttcttcacatgctgggt

SEQ ID NO: 1147319 - DNA, 25 bp, Homo sapien
gaatctctgtctctggtagtaggca

SEQ ID NO: 1147320 - DNA, 25 bp, Homo sapien
tggcaagttttctgacaaggatctc

SEQ ID NO: 1147321 - DNA, 25 bp, Homo sapien
gtccaaagcaggtggattacttcag

SEQ ID NO: 1147322 - DNA, 25 bp, Homo sapien
gcaggtggattacttcagctcagta

SEQ ID NO: 1147323 - DNA, 25 bp, Homo sapien
ccagcttgggtaagagagcaagatt

SEQ ID NO: 1147324 - DNA, 25 bp, Homo sapien
acttcagctcagtagttcaagacaa

SEQ ID NO: 1147325 - DNA, 25 bp, Homo sapien
tgtgcagaaaccagataggcatctc

SEQ ID NO: 1147326 - DNA, 25 bp, Homo sapien
tctgggacctttaacctcttgagtc

SEQ ID NO: 1147327 - DNA, 25 bp, Homo sapien
ccctagctctaaatacttggtatgg

SEQ ID NO: 1147328 - DNA, 25 bp, Homo sapien
aaaaggacacattgtataatcagtc

SEQ ID NO: 1147329 - DNA, 25 bp, Homo sapien
gaagtccctccaggactttatccat

SEQ ID NO: 1147330 - DNA, 25 bp, Homo sapien
tgtttgaagtccctccaggacttta

SEQ ID NO: 1147331 - DNA, 25 bp, Homo sapien
tttgaagtccctccaggactttatc

SEQ ID NO: 1147332 - DNA, 25 bp, Homo sapien
ctgtttgaagtccctccaggacttt

SEQ ID NO: 1147333 - DNA, 25 bp, Homo sapien
agaaacttgatacaggcaagtcggg

SEQ ID NO: 1147334 - DNA, 25 bp, Homo sapien
tagaaacttgatacaggcaagtcgg

SEQ ID NO: 1147335 - DNA, 25 bp, Homo sapien
ctagaaacttgatacaggcaagtcg

SEQ ID NO: 1147336 - DNA, 25 bp, Homo sapien
ctccagtagtctgaggacagtcctt

SEQ ID NO: 1147337 - DNA, 25 bp, Homo sapien
tagtctgaggacagtccttactcag

SEQ ID NO: 1147338 - DNA, 25 bp, Homo sapien
gaggacagtccttactcagaagggt

SEQ ID NO: 1147339 - DNA, 25 bp, Homo sapien
ctaaatgactccagtagtctgagga

SEQ ID NO: 1147340 - DNA, 25 bp, Homo sapien
tatctatggatgtaggcatcactgt

SEQ ID NO: 1147341 - DNA, 25 bp, Homo sapien
gcttctcggagatggagctttcaaa

SEQ ID NO: 1147342 - DNA, 25 bp, Homo sapien
caacatcagttgttacctgaaacaa

SEQ ID NO: 1147343 - DNA, 25 bp, Homo sapien
ttaatcttgattacaagtccttgcc

SEQ ID NO: 1147344 - DNA, 25 bp, Homo sapien
tctgacccagaagataaagacatcc

SEQ ID NO: 1147345 - DNA, 25 bp, Homo sapien
tcccaaccccattgaacagagcagg

SEQ ID NO: 1147346 - DNA, 25 bp, Homo sapien
gagcataaagacactaccactggga

SEQ ID NO: 1147347 - DNA, 25 bp, Homo sapien
tctccagtgctaggcagggtctatg

SEQ ID NO: 1147348 - DNA, 25 bp, Homo sapien
gtggaactccacatctatgttcatg

SEQ ID NO: 1147349 - DNA, 25 bp, Homo sapien
gccggcaacttgttccaggtatagt

SEQ ID NO: 1147350 - DNA, 25 bp, Homo sapien
actgtctcacattggccggcaactt

SEQ ID NO: 1147351 - DNA, 25 bp, Homo sapien
atagttgtgccggatgtggaactcc

SEQ ID NO: 1147352 - DNA, 25 bp, Homo sapien
tctgtatcgtaactgattgcagata

SEQ ID NO: 1147353 - DNA, 25 bp, Homo sapien
gacatgtttaagttatttctgtatc

SEQ ID NO: 1147354 - DNA, 25 bp, Homo sapien
gcagatactgtacaggacaacctgc

SEQ ID NO: 1147355 - DNA, 25 bp, Homo sapien
acaggacaacctgcttttcatattc

SEQ ID NO: 1147356 - DNA, 25 bp, Homo sapien
ggtaagggtacagcatgagatgatc

SEQ ID NO: 1147357 - DNA, 25 bp, Homo sapien
tccactggctttattggtagaagat

SEQ ID NO: 1147358 - DNA, 25 bp, Homo sapien
taagatcaatatactggtttcttcc

SEQ ID NO: 1147359 - DNA, 25 bp, Homo sapien
cactggctttattggtagaagatca

SEQ ID NO: 1147360 - DNA, 25 bp, Homo sapien
gatatatccagcctgcaccacccac

SEQ ID NO: 1147361 - DNA, 25 bp, Homo sapien
cttatgtgatatatccagcctgcac

SEQ ID NO: 1147362 - DNA, 25 bp, Homo sapien
atgtgatatatccagcctgcaccac

SEQ ID NO: 1147363 - DNA, 25 bp, Homo sapien
tgatatatccagcctgcaccaccca

SEQ ID NO: 1147364 - DNA, 25 bp, Homo sapien
tctcaggcaaagtgcgtatcttgat

SEQ ID NO: 1147365 - DNA, 25 bp, Homo sapien
tgatttctcaggcacatttctcagg

SEQ ID NO: 1147366 - DNA, 25 bp, Homo sapien
tttctcaggcacatttctcaggcaa

SEQ ID NO: 1147367 - DNA, 25 bp, Homo sapien
ggcaaagtgcgtatcttgatgtcat

SEQ ID NO: 1147368 - DNA, 25 bp, Homo sapien
tcccatcattaagaaggcagtaaga

SEQ ID NO: 1147369 - DNA, 25 bp, Homo sapien
ccggatttcattggtgaggggagcc

SEQ ID NO: 1147370 - DNA, 25 bp, Homo sapien
cataattgggttggtctggctgtgc

SEQ ID NO: 1147371 - DNA, 25 bp, Homo sapien
ggatcttcttgactatttgtatcag

SEQ ID NO: 1147372 - DNA, 25 bp, Homo sapien
gatggtggtccttgtccagtgatat

SEQ ID NO: 1147373 - DNA, 25 bp, Homo sapien
agtgatatgataaatgtaccgttta

SEQ ID NO: 1147374 - DNA, 25 bp, Homo sapien
gaggtcttgtacctttggacaataa

SEQ ID NO: 1147375 - DNA, 25 bp, Homo sapien
tatatctggcagtttttgaggtctt

SEQ ID NO: 1147376 - DNA, 25 bp, Homo sapien
taaagcatcattcaacatcgtgagc

SEQ ID NO: 1147377 - DNA, 25 bp, Homo sapien
catcgtgagcacatttgaggtagga

SEQ ID NO: 1147378 - DNA, 25 bp, Homo sapien
ggtaggaactactccaggatcatga

SEQ ID NO: 1147379 - DNA, 25 bp, Homo sapien
atgttattagcaatcgatcataact

SEQ ID NO: 1147380 - DNA, 25 bp, Homo sapien
catggacagtttctcctatcccatg

SEQ ID NO: 1147381 - DNA, 25 bp, Homo sapien
tttctcctatcccatgcagaccatg

SEQ ID NO: 1147382 - DNA, 25 bp, Homo sapien
gcaatgctttatgaacacccatatt

SEQ ID NO: 1147383 - DNA, 25 bp, Homo sapien
gaacacccatattgacacgagtgaa

SEQ ID NO: 1147384 - DNA, 25 bp, Homo sapien
gaacccaatctgcttctgttgtggc

SEQ ID NO: 1147385 - DNA, 25 bp, Homo sapien
gaacagtggaattccaaagcacagc

SEQ ID NO: 1147386 - DNA, 25 bp, Homo sapien
tccaaagcacagctcgagaggaacc

SEQ ID NO: 1147387 - DNA, 25 bp, Homo sapien
gtttaattcggaactgaacagtgga

SEQ ID NO: 1147388 - DNA, 25 bp, Homo sapien
taagttatttagcgcaattttccta

SEQ ID NO: 1147389 - DNA, 25 bp, Homo sapien
agttatttagcgcaattttcctaca

SEQ ID NO: 1147390 - DNA, 25 bp, Homo sapien
attcccacatgtcaggatgccttca

SEQ ID NO: 1147391 - DNA, 25 bp, Homo sapien
tttcccatgggattgcaaggcagct

SEQ ID NO: 1147392 - DNA, 25 bp, Homo sapien
tcctgtgagctagcattgtttccca

SEQ ID NO: 1147393 - DNA, 25 bp, Homo sapien
gagcttgtgtgtcttgacattccca

SEQ ID NO: 1147394 - DNA, 25 bp, Homo sapien
tcacatgagcctatcagagaactta

SEQ ID NO: 1147395 - DNA, 25 bp, Homo sapien
tcaggatggctactctgaagccagg

SEQ ID NO: 1147396 - DNA, 25 bp, Homo sapien
ccaggagcttaggaagtgtcacaga

SEQ ID NO: 1147397 - DNA, 25 bp, Homo sapien
gctaaactgatgttactggtgaacc

SEQ ID NO: 1147398 - DNA, 25 bp, Homo sapien
gaactactctttatcttctactgta

SEQ ID NO: 1147399 - DNA, 25 bp, Homo sapien
gggatttaatattgctggtctcagc

SEQ ID NO: 1147400 - DNA, 25 bp, Homo sapien
tctttgattaacatctcactgacac

SEQ ID NO: 1147401 - DNA, 25 bp, Homo sapien
tactgtaagagatatacaacatact

SEQ ID NO: 1147402 - DNA, 25 bp, Homo sapien
ttcttgatgtggttaggacttccca

SEQ ID NO: 1147403 - DNA, 25 bp, Homo sapien
tctgaggcattcttgatgtggttag

SEQ ID NO: 1147404 - DNA, 25 bp, Homo sapien
gaggcattcttgatgtggttaggac

SEQ ID NO: 1147405 - DNA, 25 bp, Homo sapien
gcattcttgatgtggttaggacttc

SEQ ID NO: 1147406 - DNA, 25 bp, Homo sapien
tttcttaaaatttgaaatgacaaga

SEQ ID NO: 1147407 - DNA, 25 bp, Homo sapien
ttcttaaaatttgaaatgacaagaa

SEQ ID NO: 1147408 - DNA, 25 bp, Homo sapien
tcttaaaatttgaaatgacaagaac

SEQ ID NO: 1147409 - DNA, 25 bp, Homo sapien
tccccagagcttgcttaagtgtgtg

SEQ ID NO: 1147410 - DNA, 25 bp, Homo sapien
tctggaagaactctatcttttaaag

SEQ ID NO: 1147411 - DNA, 25 bp, Homo sapien
tgaagggttagtctgtaagtgatac

SEQ ID NO: 1147412 - DNA, 25 bp, Homo sapien
ggctcataactatgcttcactttca

SEQ ID NO: 1147413 - DNA, 25 bp, Homo sapien
taacatgtactattattgaataaca

SEQ ID NO: 1147414 - DNA, 25 bp, Homo sapien
tatttgtaacatgtactattattga

SEQ ID NO: 1147415 - DNA, 25 bp, Homo sapien
tgtaacatgtactattattgaataa

SEQ ID NO: 1147416 - DNA, 25 bp, Homo sapien
gtctctcttcatactacatactatc

SEQ ID NO: 1147417 - DNA, 25 bp, Homo sapien
ttggctcagaaatgataagactggg

SEQ ID NO: 1147418 - DNA, 25 bp, Homo sapien
tccagctgtaagtcatcagcaagta

SEQ ID NO: 1147419 - DNA, 25 bp, Homo sapien
aaccagcctagaatggtgatttcag

SEQ ID NO: 1147420 - DNA, 25 bp, Homo sapien
tcagtttcaggtgatttcgatagaa

SEQ ID NO: 1147421 - DNA, 25 bp, Homo sapien
cagagccctctctggtacctgatta

SEQ ID NO: 1147422 - DNA, 25 bp, Homo sapien
ggtacctgattagaagtccgtcttc

SEQ ID NO: 1147423 - DNA, 25 bp, Homo sapien
tctctggtacctgattagaagtccg

SEQ ID NO: 1147424 - DNA, 25 bp, Homo sapien
tctcatagggaagtgttagagatgg

SEQ ID NO: 1147425 - DNA, 25 bp, Homo sapien
ggccagtggttaccaaagccaagga

SEQ ID NO: 1147426 - DNA, 25 bp, Homo sapien
tggactgctctggaattccgagtgt

SEQ ID NO: 1147427 - DNA, 25 bp, Homo sapien
actttcagccaagaaggtagtgtga

SEQ ID NO: 1147428 - DNA, 25 bp, Homo sapien
ctggccatggactgctctggaattc

SEQ ID NO: 1147429 - DNA, 25 bp, Homo sapien
agctttttgagcatgcagacactac

SEQ ID NO: 1147430 - DNA, 25 bp, Homo sapien
aaacgtatttcatcacactcccgag

SEQ ID NO: 1147431 - DNA, 25 bp, Homo sapien
ttatttggtggtcctcagagtggca

SEQ ID NO: 1147432 - DNA, 25 bp, Homo sapien
tctgccttgtggacttgaggtggaa

SEQ ID NO: 1147433 - DNA, 25 bp, Homo sapien
taaaggatcttcgtatatgactact

SEQ ID NO: 1147434 - DNA, 25 bp, Homo sapien
ttaacaattcaatgagaggagactt

SEQ ID NO: 1147435 - DNA, 25 bp, Homo sapien
taaattaatgctggtcctacacatt

SEQ ID NO: 1147436 - DNA, 25 bp, Homo sapien
ggtcctacacattatatctaaagga

SEQ ID NO: 1147437 - DNA, 25 bp, Homo sapien
ggcagtgcgtggtatttccagcccc

SEQ ID NO: 1147438 - DNA, 25 bp, Homo sapien
tagtcccctccgactggcaaagaga

SEQ ID NO: 1147439 - DNA, 25 bp, Homo sapien
ggattcctcggattcccaaggcacc

SEQ ID NO: 1147440 - DNA, 25 bp, Homo sapien
agggattcctcggattcccaaggca

SEQ ID NO: 1147441 - DNA, 25 bp, Homo sapien
tatcgacgtcgtgatccagaagtcc

SEQ ID NO: 1147442 - DNA, 25 bp, Homo sapien
cgtgatccagaagtccagagctgag

SEQ ID NO: 1147443 - DNA, 25 bp, Homo sapien
taatggggatgtgttcaaggcaaga

SEQ ID NO: 1147444 - DNA, 25 bp, Homo sapien
gaattcagaaggatatcgacgtcgt

SEQ ID NO: 1147445 - DNA, 25 bp, Homo sapien
gatcacttccgaaaccacttggcct

SEQ ID NO: 1147446 - DNA, 25 bp, Homo sapien
ttaactgaatatttacgaaagctga

SEQ ID NO: 1147447 - DNA, 25 bp, Homo sapien
ccaggatcacttccgaaaccacttg

SEQ ID NO: 1147448 - DNA, 25 bp, Homo sapien
ttacgaaagctgaaagcgtgcgagg

SEQ ID NO: 1147449 - DNA, 25 bp, Homo sapien
caccaatccatcgccagaaggggag

SEQ ID NO: 1147450 - DNA, 25 bp, Homo sapien
ccaatccatcgccagaaggggagga

SEQ ID NO: 1147451 - DNA, 25 bp, Homo sapien
tcaccaatccatcgccagaagggga

SEQ ID NO: 1147452 - DNA, 25 bp, Homo sapien
aatccatcgccagaaggggaggaaa

SEQ ID NO: 1147453 - DNA, 25 bp, Homo sapien
cccagccggtgatcgctctccggcc

SEQ ID NO: 1147454 - DNA, 25 bp, Homo sapien
agccggtgatcgctctccggccgtc

SEQ ID NO: 1147455 - DNA, 25 bp, Homo sapien
ggtgatcgctctccggccgtccccg

SEQ ID NO: 1147456 - DNA, 25 bp, Homo sapien
gccggtgatcgctctccggccgtcc

SEQ ID NO: 1147457 - DNA, 25 bp, Homo sapien
cctaccgtgctgaacatcatgttgt

SEQ ID NO: 1147458 - DNA, 25 bp, Homo sapien
gaaacagtttggcactcttgggcac

SEQ ID NO: 1147459 - DNA, 25 bp, Homo sapien
catgttgtcacggtcagaatcagaa

SEQ ID NO: 1147460 - DNA, 25 bp, Homo sapien
aagactccttcagagatggcagtca

SEQ ID NO: 1147461 - DNA, 25 bp, Homo sapien
cttgtgcctcagccgggcaccacca

SEQ ID NO: 1147462 - DNA, 25 bp, Homo sapien
tgtgcctcagccgggcaccaccatg

SEQ ID NO: 1147463 - DNA, 25 bp, Homo sapien
ttgtgcctcagccgggcaccaccat

SEQ ID NO: 1147464 - DNA, 25 bp, Homo sapien
catgtgatgcacacgtaccctagaa

SEQ ID NO: 1147465 - DNA, 25 bp, Homo sapien
acaaacctgcatgtgatgcacacgt

SEQ ID NO: 1147466 - DNA, 25 bp, Homo sapien
aaacctgcatgtgatgcacacgtac

SEQ ID NO: 1147467 - DNA, 25 bp, Homo sapien
gtgatgcacacgtaccctagaactt

SEQ ID NO: 1147468 - DNA, 25 bp, Homo sapien
ggagactctcccgacttgcctgaat

SEQ ID NO: 1147469 - DNA, 25 bp, Homo sapien
tctcagagaagaataccggagactc

SEQ ID NO: 1147470 - DNA, 25 bp, Homo sapien
tgaagtcactctcagatgggtccct

SEQ ID NO: 1147471 - DNA, 25 bp, Homo sapien
tccagaggtaagtggtgaaaggcca

SEQ ID NO: 1147472 - DNA, 25 bp, Homo sapien
catgtcctggtggaatggctgcaga

SEQ ID NO: 1147473 - DNA, 25 bp, Homo sapien
agtggcagcacctgaaggagaccct

SEQ ID NO: 1147474 - DNA, 25 bp, Homo sapien
tgatcagcatcttcacttcccatct

SEQ ID NO: 1147475 - DNA, 25 bp, Homo sapien
tggctgcagaagatgagatccagag

SEQ ID NO: 1147476 - DNA, 25 bp, Homo sapien
tagcttctttaatacaaggtataca

SEQ ID NO: 1147477 - DNA, 25 bp, Homo sapien
ttatctacagattctctcatctgtg

SEQ ID NO: 1147478 - DNA, 25 bp, Homo sapien
gcttatctacagattctctcatctg

SEQ ID NO: 1147479 - DNA, 25 bp, Homo sapien
gtgcttatctacagattctctcatc

SEQ ID NO: 1147480 - DNA, 25 bp, Homo sapien
tgaggacccggcccagaagagggag

SEQ ID NO: 1147481 - DNA, 25 bp, Homo sapien
ctgaggacccggcccagaagaggga

SEQ ID NO: 1147482 - DNA, 25 bp, Homo sapien
cggcccagaagagggagtgtctctt

SEQ ID NO: 1147483 - DNA, 25 bp, Homo sapien
cccagaagagggagtgtctcttcat

SEQ ID NO: 1147484 - DNA, 25 bp, Homo sapien
gaaatccttggaggagtagatcatc

SEQ ID NO: 1147485 - DNA, 25 bp, Homo sapien
tagacagaaaactaggcgtctggga

SEQ ID NO: 1147486 - DNA, 25 bp, Homo sapien
gaggacctattgctccccaagaata

SEQ ID NO: 1147487 - DNA, 25 bp, Homo sapien
gaacctgaaagagccccaaactcga

SEQ ID NO: 1147488 - DNA, 25 bp, Homo sapien
cttctgcgctgtggagcctctgggg

SEQ ID NO: 1147489 - DNA, 25 bp, Homo sapien
agctgggcggtggtcgggtcgtggg

SEQ ID NO: 1147490 - DNA, 25 bp, Homo sapien
tcagctgggcggtggtcgggtcgtg

SEQ ID NO: 1147491 - DNA, 25 bp, Homo sapien
tctgcgctgtggagcctctggggct

SEQ ID NO: 1147492 - DNA, 25 bp, Homo sapien
ctgcccagtcgctgttgggctgctg

SEQ ID NO: 1147493 - DNA, 25 bp, Homo sapien
cctgcccagtcgctgttgggctgct

SEQ ID NO: 1147494 - DNA, 25 bp, Homo sapien
ttccggttctttgtgccgccttcac

SEQ ID NO: 1147495 - DNA, 25 bp, Homo sapien
agcccgagacgcctggggtcccaag

SEQ ID NO: 1147496 - DNA, 25 bp, Homo sapien
cacccagtgaaggagcctgtatcca

SEQ ID NO: 1147497 - DNA, 25 bp, Homo sapien
agccagagggagagaccccagaaac

SEQ ID NO: 1147498 - DNA, 25 bp, Homo sapien
accaccaagctttcggttaacagcg

SEQ ID NO: 1147499 - DNA, 25 bp, Homo sapien
agctttcggttaacagcggaacgcg

SEQ ID NO: 1147500 - DNA, 25 bp, Homo sapien
gctcgaaccaccaagctttcggtta

SEQ ID NO: 1147501 - DNA, 25 bp, Homo sapien
gtgggctcgaaccaccaagctttcg

SEQ ID NO: 1147502 - DNA, 25 bp, Homo sapien
gtgaggacaccacgggttctggtcc

SEQ ID NO: 1147503 - DNA, 25 bp, Homo sapien
cacgggttctggtccttcccacgcg

SEQ ID NO: 1147504 - DNA, 25 bp, Homo sapien
cagtgaggacaccacgggttctggt

SEQ ID NO: 1147505 - DNA, 25 bp, Homo sapien
cgggttctggtccttcccacgcgcg

SEQ ID NO: 1147506 - DNA, 25 bp, Homo sapien
gaatactcgatctcctaagtaactg

SEQ ID NO: 1147507 - DNA, 25 bp, Homo sapien
tccactggagtgcatggcgggatcc

SEQ ID NO: 1147508 - DNA, 25 bp, Homo sapien
caagcgcaggccactaaaaaattag

SEQ ID NO: 1147509 - DNA, 25 bp, Homo sapien
cctacgggagcccattgtaaacatt

SEQ ID NO: 1147510 - DNA, 25 bp, Homo sapien
cttgcgtgtaaagggtgaggcatat

SEQ ID NO: 1147511 - DNA, 25 bp, Homo sapien
gcgtgtaaagggtgaggcatatgag

SEQ ID NO: 1147512 - DNA, 25 bp, Homo sapien
cgtgtaaagggtgaggcatatgagg

SEQ ID NO: 1147513 - DNA, 25 bp, Homo sapien
tgcgtgtaaagggtgaggcatatga

SEQ ID NO: 1147514 - DNA, 25 bp, Homo sapien
gaccggagagtcgcagctgtgtgtt

SEQ ID NO: 1147515 - DNA, 25 bp, Homo sapien
accggagagtcgcagctgtgtgtta

SEQ ID NO: 1147516 - DNA, 25 bp, Homo sapien
gctctagtggctgcacttagctgat

SEQ ID NO: 1147517 - DNA, 25 bp, Homo sapien
tgagtactagccttccacaatcttc

SEQ ID NO: 1147518 - DNA, 25 bp, Homo sapien
gtagcctgcctaaacctataccaag

SEQ ID NO: 1147519 - DNA, 25 bp, Homo sapien
cacgatgcattatgactctcaggat

SEQ ID NO: 1147520 - DNA, 25 bp, Homo sapien
gctaaactgatgttactggtgaacc

SEQ ID NO: 1147521 - DNA, 25 bp, Homo sapien
tcacatgagcctatcagagaactta

SEQ ID NO: 1147522 - DNA, 25 bp, Homo sapien
ccaggagcttaggaagtgtcacaga

SEQ ID NO: 1147523 - DNA, 25 bp, Homo sapien
tcaggatggctactctgaagccagg

SEQ ID NO: 1147524 - DNA, 25 bp, Homo sapien
tggcatagatccattcagcttcgta

SEQ ID NO: 1147525 - DNA, 25 bp, Homo sapien
aaatctggcatatttggcatagatc

SEQ ID NO: 1147526 - DNA, 25 bp, Homo sapien
catagatccattcagcttcgtatac

SEQ ID NO: 1147527 - DNA, 25 bp, Homo sapien
tctggcatatttggcatagatccat

SEQ ID NO: 1147528 - DNA, 25 bp, Homo sapien
ggtgcatcctggtcttacccaacag

SEQ ID NO: 1147529 - DNA, 25 bp, Homo sapien
taaactgtcataaacggagagctgt

SEQ ID NO: 1147530 - DNA, 25 bp, Homo sapien
aagtggtgactccagtgcaggtgac

SEQ ID NO: 1147531 - DNA, 25 bp, Homo sapien
tcctgtttcagggtgggctctagag

SEQ ID NO: 1147532 - DNA, 25 bp, Homo sapien
tggcccaagacctgagacatgcaaa

SEQ ID NO: 1147533 - DNA, 25 bp, Homo sapien
gcagacggtattcagcacagggcct

SEQ ID NO: 1147534 - DNA, 25 bp, Homo sapien
tgggcaaacaagacctgctgagtta

SEQ ID NO: 1147535 - DNA, 25 bp, Homo sapien
caaggaccagtcctaaaggcagacc

SEQ ID NO: 1147536 - DNA, 25 bp, Homo sapien
cataacatgtacatacctgaaactc

SEQ ID NO: 1147537 - DNA, 25 bp, Homo sapien
ctgcctactaattttcaatcaccat

SEQ ID NO: 1147538 - DNA, 25 bp, Homo sapien
gtttgaatattgagcttaaacataa

SEQ ID NO: 1147539 - DNA, 25 bp, Homo sapien
gcctactaattttcaatcaccatag

SEQ ID NO: 1147540 - DNA, 25 bp, Homo sapien
gataagtacatgagagtaaatcaca

SEQ ID NO: 1147541 - DNA, 25 bp, Homo sapien
agataagtacatgagagtaaatcac

SEQ ID NO: 1147542 - DNA, 25 bp, Homo sapien
taagtacatgagagtaaatcacatt

SEQ ID NO: 1147543 - DNA, 25 bp, Homo sapien
tgtagataagtacatgagagtaaat

SEQ ID NO: 1147544 - DNA, 25 bp, Homo sapien
ttggctcagaaatgataagactggg

SEQ ID NO: 1147545 - DNA, 25 bp, Homo sapien
aaccagcctagaatggtgatttcag

SEQ ID NO: 1147546 - DNA, 25 bp, Homo sapien
tccagctgtaagtcatcagcaagta

SEQ ID NO: 1147547 - DNA, 25 bp, Homo sapien
tcagtttcaggtgatttcgatagaa

SEQ ID NO: 1147548 - DNA, 25 bp, Homo sapien
ggtacctgattagaagtccgtcttc

SEQ ID NO: 1147549 - DNA, 25 bp, Homo sapien
tctctggtacctgattagaagtccg

SEQ ID NO: 1147550 - DNA, 25 bp, Homo sapien
tctcatagggaagtgttagagatgg

SEQ ID NO: 1147551 - DNA, 25 bp, Homo sapien
cagagccctctctggtacctgatta

SEQ ID NO: 1147552 - DNA, 25 bp, Homo sapien
ttgttggcctcttcatcccatccca

SEQ ID NO: 1147553 - DNA, 25 bp, Homo sapien
cctcttctggttcctgaagctccgg

SEQ ID NO: 1147554 - DNA, 25 bp, Homo sapien
ggcaacctctgctttgaaacattgt

SEQ ID NO: 1147555 - DNA, 25 bp, Homo sapien
gaagctccggcaacctctgctttga

SEQ ID NO: 1147556 - DNA, 25 bp, Homo sapien
ggccagtggttaccaaagccaagga

SEQ ID NO: 1147557 - DNA, 25 bp, Homo sapien
tggactgctctggaattccgagtgt

SEQ ID NO: 1147558 - DNA, 25 bp, Homo sapien
ctggccatggactgctctggaattc

SEQ ID NO: 1147559 - DNA, 25 bp, Homo sapien
actttcagccaagaaggtagtgtga

SEQ ID NO: 1147560 - DNA, 25 bp, Homo sapien
tgctaagagctataaagcagaggct

SEQ ID NO: 1147561 - DNA, 25 bp, Homo sapien
gaatagctccacagctatcagtggt

SEQ ID NO: 1147562 - DNA, 25 bp, Homo sapien
ggttctgccacaggttcagagcctt

SEQ ID NO: 1147563 - DNA, 25 bp, Homo sapien
tcccagtactgccttcttatttgag

SEQ ID NO: 1147564 - DNA, 25 bp, Homo sapien
taaaggatcttcgtatatgactact

SEQ ID NO: 1147565 - DNA, 25 bp, Homo sapien
ttaacaattcaatgagaggagactt

SEQ ID NO: 1147566 - DNA, 25 bp, Homo sapien
ggtcctacacattatatctaaagga

SEQ ID NO: 1147567 - DNA, 25 bp, Homo sapien
taaattaatgctggtcctacacatt

SEQ ID NO: 1147568 - DNA, 25 bp, Homo sapien
tagtcccctccgactggcaaagaga

SEQ ID NO: 1147569 - DNA, 25 bp, Homo sapien
ggattcctcggattcccaaggcacc

SEQ ID NO: 1147570 - DNA, 25 bp, Homo sapien
agggattcctcggattcccaaggca

SEQ ID NO: 1147571 - DNA, 25 bp, Homo sapien
ggcagtgcgtggtatttccagcccc

SEQ ID NO: 1147572 - DNA, 25 bp, Homo sapien
agggtttgcacgtccgcattccggg

SEQ ID NO: 1147573 - DNA, 25 bp, Homo sapien
tggagggtttgcacgtccgcattcc

SEQ ID NO: 1147574 - DNA, 25 bp, Homo sapien
ggagggtttgcacgtccgcattccg

SEQ ID NO: 1147575 - DNA, 25 bp, Homo sapien
ggtggagggtttgcacgtccgcatt

SEQ ID NO: 1147576 - DNA, 25 bp, Homo sapien
gaaggatatcgacgtcgtgatccag

SEQ ID NO: 1147577 - DNA, 25 bp, Homo sapien
cgaattcagaaggatatcgacgtcg

SEQ ID NO: 1147578 - DNA, 25 bp, Homo sapien
cgtgatccagaagtccagagctgag

SEQ ID NO: 1147579 - DNA, 25 bp, Homo sapien
tatcgacgtcgtgatccagaagtcc

SEQ ID NO: 1147580 - DNA, 25 bp, Homo sapien
ggtggggtggaaatagcggctgctt

SEQ ID NO: 1147581 - DNA, 25 bp, Homo sapien
gggtggaaatagcggctgcttcttt

SEQ ID NO: 1147582 - DNA, 25 bp, Homo sapien
tggggtggaaatagcggctgcttct

SEQ ID NO: 1147583 - DNA, 25 bp, Homo sapien
gtggaaatagcggctgcttcttttc

SEQ ID NO: 1147584 - DNA, 25 bp, Homo sapien
ccaatccatcgccagaaggggagga

SEQ ID NO: 1147585 - DNA, 25 bp, Homo sapien
tcaccaatccatcgccagaagggga

SEQ ID NO: 1147586 - DNA, 25 bp, Homo sapien
caccaatccatcgccagaaggggag

SEQ ID NO: 1147587 - DNA, 25 bp, Homo sapien
aatccatcgccagaaggggaggaaa

SEQ ID NO: 1147588 - DNA, 25 bp, Homo sapien
agctcccggcgcgagtggaggtcgg

SEQ ID NO: 1147589 - DNA, 25 bp, Homo sapien
ggagtcgaattcataaaagtgatgg

SEQ ID NO: 1147590 - DNA, 25 bp, Homo sapien
gaaagtggagtcgaattcataaaag

SEQ ID NO: 1147591 - DNA, 25 bp, Homo sapien
ataattcctttagaaagtggagtcg

SEQ ID NO: 1147592 - DNA, 25 bp, Homo sapien
gaccctggaacgtgccagttgattc

SEQ ID NO: 1147593 - DNA, 25 bp, Homo sapien
gaagaccctggaacgtgccagttga

SEQ ID NO: 1147594 - DNA, 25 bp, Homo sapien
tggaacgtgccagttgattctgaca

SEQ ID NO: 1147595 - DNA, 25 bp, Homo sapien
tttaggaagaccctggaacgtgcca

SEQ ID NO: 1147596 - DNA, 25 bp, Homo sapien
tcccacattaaaggcctgatagctc

SEQ ID NO: 1147597 - DNA, 25 bp, Homo sapien
tactaacaaagattccttgcttggc

SEQ ID NO: 1147598 - DNA, 25 bp, Homo sapien
tagaaatcttattgatcagctgccc

SEQ ID NO: 1147599 - DNA, 25 bp, Homo sapien
cctctgggctcagaaactgtcttta

SEQ ID NO: 1147600 - DNA, 25 bp, Homo sapien
tacgtttgtttgtagcccaggtgcc

SEQ ID NO: 1147601 - DNA, 25 bp, Homo sapien
gcaggagtattagcagtaccaggca

SEQ ID NO: 1147602 - DNA, 25 bp, Homo sapien
gtttccagcaggagtattagcagta

SEQ ID NO: 1147603 - DNA, 25 bp, Homo sapien
cttacgtttgtttgtagcccaggtg

SEQ ID NO: 1147604 - DNA, 25 bp, Homo sapien
tgttcactacatgtataccacagaa

SEQ ID NO: 1147605 - DNA, 25 bp, Homo sapien
aggcaagatactcctgtttcctgca

SEQ ID NO: 1147606 - DNA, 25 bp, Homo sapien
gcagggaaacagatctataagcagg

SEQ ID NO: 1147607 - DNA, 25 bp, Homo sapien
aattaaatgttagcactcagtagtg

SEQ ID NO: 1147608 - DNA, 25 bp, Homo sapien
aataaagcctgtagtagtaagcagt

SEQ ID NO: 1147609 - DNA, 25 bp, Homo sapien
agttgttcagaattgcaattagaaa

SEQ ID NO: 1147610 - DNA, 25 bp, Homo sapien
ttcacaacccataagttgttcagaa

SEQ ID NO: 1147611 - DNA, 25 bp, Homo sapien
ataaagcctgtagtagtaagcagtc

SEQ ID NO: 1147612 - DNA, 25 bp, Homo sapien
tgaagtcactctcagatgggtccct

SEQ ID NO: 1147613 - DNA, 25 bp, Homo sapien
ggagactctcccgacttgcctgaat

SEQ ID NO: 1147614 - DNA, 25 bp, Homo sapien
tctcagagaagaataccggagactc

SEQ ID NO: 1147615 - DNA, 25 bp, Homo sapien
tccagaggtaagtggtgaaaggcca

SEQ ID NO: 1147616 - DNA, 25 bp, Homo sapien
tgatcagcatcttcacttcccatct

SEQ ID NO: 1147617 - DNA, 25 bp, Homo sapien
tggctgcagaagatgagatccagag

SEQ ID NO: 1147618 - DNA, 25 bp, Homo sapien
agtggcagcacctgaaggagaccct

SEQ ID NO: 1147619 - DNA, 25 bp, Homo sapien
catgtcctggtggaatggctgcaga

SEQ ID NO: 1147620 - DNA, 25 bp, Homo sapien
taagacacaatgaggctatggtcta

SEQ ID NO: 1147621 - DNA, 25 bp, Homo sapien
cagaactagactaagacacaatgag

SEQ ID NO: 1147622 - DNA, 25 bp, Homo sapien
gaggctatggtctagttaggtctct

SEQ ID NO: 1147623 - DNA, 25 bp, Homo sapien
gactcaggcacagaactagactaag

SEQ ID NO: 1147624 - DNA, 25 bp, Homo sapien
aatatcatccactcgctgtttagcc

SEQ ID NO: 1147625 - DNA, 25 bp, Homo sapien
tgcatatgagactttgtgctagtca

SEQ ID NO: 1147626 - DNA, 25 bp, Homo sapien
tgtttagccctgatttgcatatgag

SEQ ID NO: 1147627 - DNA, 25 bp, Homo sapien
aatacccatggctgatctagacaaa

SEQ ID NO: 1147628 - DNA, 25 bp, Homo sapien
tcttttggcttaattgtaggaaaga

SEQ ID NO: 1147629 - DNA, 25 bp, Homo sapien
gtgtgctgtgagaaaaagactagcc

SEQ ID NO: 1147630 - DNA, 25 bp, Homo sapien
gaaagattgggcaggttaaagtctg

SEQ ID NO: 1147631 - DNA, 25 bp, Homo sapien
aagattgggcaggttaaagtctgta

SEQ ID NO: 1147632 - DNA, 25 bp, Homo sapien
gtgggaaccacagcgtcaccgctca

SEQ ID NO: 1147633 - DNA, 25 bp, Homo sapien
aacattactgcccgccagagacagc

SEQ ID NO: 1147634 - DNA, 25 bp, Homo sapien
gcggcggtgcggtgggaaccacagc

SEQ ID NO: 1147635 - DNA, 25 bp, Homo sapien
actgcccgccagagacagcgagagg

SEQ ID NO: 1147636 - DNA, 25 bp, Homo sapien
gacccggcccagaagagggagtatc

SEQ ID NO: 1147637 - DNA, 25 bp, Homo sapien
cctgaggacccggcccagaagaggg

SEQ ID NO: 1147638 - DNA, 25 bp, Homo sapien
agcgacctgaggacccggcccagaa

SEQ ID NO: 1147639 - DNA, 25 bp, Homo sapien
tgaggacccggcccagaagagggag

SEQ ID NO: 1147640 - DNA, 25 bp, Homo sapien
cttctgcgctgtggagcctctgggg

SEQ ID NO: 1147641 - DNA, 25 bp, Homo sapien
tcagctgggcggtggtcgggtcgtg

SEQ ID NO: 1147642 - DNA, 25 bp, Homo sapien
tctgcgctgtggagcctctggggct

SEQ ID NO: 1147643 - DNA, 25 bp, Homo sapien
agctgggcggtggtcgggtcgtggg

SEQ ID NO: 1147644 - DNA, 25 bp, Homo sapien
cctgcccagtcgctgttgggctgct

SEQ ID NO: 1147645 - DNA, 25 bp, Homo sapien
ctgcccagtcgctgttgggctgctg

SEQ ID NO: 1147646 - DNA, 25 bp, Homo sapien
agcccgagacgcctggggtcccaag

SEQ ID NO: 1147647 - DNA, 25 bp, Homo sapien
cacccagtgaaggagcctgtatcca

SEQ ID NO: 1147648 - DNA, 25 bp, Homo sapien
ttccggttctttgtgccgccttcac

SEQ ID NO: 1147649 - DNA, 25 bp, Homo sapien
agccagagggagagaccccagaaac

SEQ ID NO: 1147650 - DNA, 25 bp, Homo sapien
gtgggctcaaaccaccaagctttcg

SEQ ID NO: 1147651 - DNA, 25 bp, Homo sapien
caagctttcggttaacagcggaacg

SEQ ID NO: 1147652 - DNA, 25 bp, Homo sapien
agctttcggttaacagcggaacgcg

SEQ ID NO: 1147653 - DNA, 25 bp, Homo sapien
ccctgggtgggctcaaaccaccaag

SEQ ID NO: 1147654 - DNA, 25 bp, Homo sapien
cgggttctggtccttcccacgcgcg

SEQ ID NO: 1147655 - DNA, 25 bp, Homo sapien
cacgggttctggtccttcccacgcg

SEQ ID NO: 1147656 - DNA, 25 bp, Homo sapien
cagtgaggacaccacgggttctggt

SEQ ID NO: 1147657 - DNA, 25 bp, Homo sapien
gtgaggacaccacgggttctggtcc

SEQ ID NO: 1147658 - DNA, 25 bp, Homo sapien
tccactggagtgcatggcgggatcc

SEQ ID NO: 1147659 - DNA, 25 bp, Homo sapien
gaatactcgatctcctaagtaactg

SEQ ID NO: 1147660 - DNA, 25 bp, Homo sapien
caagcgcaggccactaaaaaattag

SEQ ID NO: 1147661 - DNA, 25 bp, Homo sapien
cctacgggagcccattgtaaacatt

SEQ ID NO: 1147662 - DNA, 25 bp, Homo sapien
cgtgtaaagggtgaggcatatgagg

SEQ ID NO: 1147663 - DNA, 25 bp, Homo sapien
cttgcgtgtaaagggtgaggcatat

SEQ ID NO: 1147664 - DNA, 25 bp, Homo sapien
gcgtgtaaagggtgaggcatatgag

SEQ ID NO: 1147665 - DNA, 25 bp, Homo sapien
tgcgtgtaaagggtgaggcatatga

SEQ ID NO: 1147666 - DNA, 25 bp, Homo sapien
gaccggagagtcgcagctgtgtgtt

SEQ ID NO: 1147667 - DNA, 25 bp, Homo sapien
accggagagtcgcagctgtgtgtta

SEQ ID NO: 1147668 - DNA, 25 bp, Homo sapien
tcacatgagcctatcagagaactta

SEQ ID NO: 1147669 - DNA, 25 bp, Homo sapien
ccaggagcttaggaagtgtcacaga

SEQ ID NO: 1147670 - DNA, 25 bp, Homo sapien
gctaaactgatgttactggtgaacc

SEQ ID NO: 1147671 - DNA, 25 bp, Homo sapien
tcaggatggctactctgaagccagg

SEQ ID NO: 1147672 - DNA, 25 bp, Homo sapien
ttttgatatctgtagcagcaagttt

SEQ ID NO: 1147673 - DNA, 25 bp, Homo sapien
gatggtaacattcctttttgatatc

SEQ ID NO: 1147674 - DNA, 25 bp, Homo sapien
cagcttcgtatactttgttaggacc

SEQ ID NO: 1147675 - DNA, 25 bp, Homo sapien
aaatcgatgcactgttattaaaaca

SEQ ID NO: 1147676 - DNA, 25 bp, Homo sapien
tgttaaactacttgacaaggcatct

SEQ ID NO: 1147677 - DNA, 25 bp, Homo sapien
gacccgagggcatgcctgattttca

SEQ ID NO: 1147678 - DNA, 25 bp, Homo sapien
aagtggtgactccagtgcaggtgac

SEQ ID NO: 1147679 - DNA, 25 bp, Homo sapien
taaactgtcataaacggagagctgt

SEQ ID NO: 1147680 - DNA, 25 bp, Homo sapien
ggtgcatcctggtcttacccaacag

SEQ ID NO: 1147681 - DNA, 25 bp, Homo sapien
tcctgtttcagggtgggctctagag

SEQ ID NO: 1147682 - DNA, 25 bp, Homo sapien
caaggaccagtcctaaaggcagacc

SEQ ID NO: 1147683 - DNA, 25 bp, Homo sapien
gcagacggtattcagcacagggcct

SEQ ID NO: 1147684 - DNA, 25 bp, Homo sapien
tggcccaagacctgagacatgcaaa

SEQ ID NO: 1147685 - DNA, 25 bp, Homo sapien
tgggcaaacaagacctgctgagtta

SEQ ID NO: 1147686 - DNA, 25 bp, Homo sapien
cataacatgtacatacctgaaactc

SEQ ID NO: 1147687 - DNA, 25 bp, Homo sapien
gtttgaatattgagcttaaacataa

SEQ ID NO: 1147688 - DNA, 25 bp, Homo sapien
gcctactaattttcaatcaccatag

SEQ ID NO: 1147689 - DNA, 25 bp, Homo sapien
ctgcctactaattttcaatcaccat

SEQ ID NO: 1147690 - DNA, 25 bp, Homo sapien
gataagtacatgagagtaaatcaca

SEQ ID NO: 1147691 - DNA, 25 bp, Homo sapien
tgtagataagtacatgagagtaaat

SEQ ID NO: 1147692 - DNA, 25 bp, Homo sapien
agataagtacatgagagtaaatcac

SEQ ID NO: 1147693 - DNA, 25 bp, Homo sapien
taagtacatgagagtaaatcacatt

SEQ ID NO: 1147694 - DNA, 25 bp, Homo sapien
ttggctcagaaatgataagactggg

SEQ ID NO: 1147695 - DNA, 25 bp, Homo sapien
tcagtttcaggtgatttcgatagaa

SEQ ID NO: 1147696 - DNA, 25 bp, Homo sapien
aaccagcctagaatggtgatttcag

SEQ ID NO: 1147697 - DNA, 25 bp, Homo sapien
tccagctgtaagtcatcagcaagta

SEQ ID NO: 1147698 - DNA, 25 bp, Homo sapien
tctctggtacctgattagaagtccg

SEQ ID NO: 1147699 - DNA, 25 bp, Homo sapien
cagagccctctctggtacctgatta

SEQ ID NO: 1147700 - DNA, 25 bp, Homo sapien
ggtacctgattagaagtccgtcttc

SEQ ID NO: 1147701 - DNA, 25 bp, Homo sapien
tctcatagggaagtgttagagatgg

SEQ ID NO: 1147702 - DNA, 25 bp, Homo sapien
ggccagtggttaccaaagccaagga

SEQ ID NO: 1147703 - DNA, 25 bp, Homo sapien
tggactgctctggaattccgagtgt

SEQ ID NO: 1147704 - DNA, 25 bp, Homo sapien
ctggccatggactgctctggaattc

SEQ ID NO: 1147705 - DNA, 25 bp, Homo sapien
actttcagccaagaaggtagtgtga

SEQ ID NO: 1147706 - DNA, 25 bp, Homo sapien
ggttctgccacaggttcagagcctt

SEQ ID NO: 1147707 - DNA, 25 bp, Homo sapien
tgctaagagctataaagcagaggct

SEQ ID NO: 1147708 - DNA, 25 bp, Homo sapien
gaatagctccacagctatcagtggt

SEQ ID NO: 1147709 - DNA, 25 bp, Homo sapien
tcccagtactgccttcttatttgag

SEQ ID NO: 1147710 - DNA, 25 bp, Homo sapien
ttaacaattcaatgagaggagactt

SEQ ID NO: 1147711 - DNA, 25 bp, Homo sapien
ggtcctacacattatatctaaagga

SEQ ID NO: 1147712 - DNA, 25 bp, Homo sapien
taaattaatgctggtcctacacatt

SEQ ID NO: 1147713 - DNA, 25 bp, Homo sapien
taaaggatcttcgtatatgactact

SEQ ID NO: 1147714 - DNA, 25 bp, Homo sapien
ggattcctcggattcccaaggcacc

SEQ ID NO: 1147715 - DNA, 25 bp, Homo sapien
tagtcccctccgactggcaaagaga

SEQ ID NO: 1147716 - DNA, 25 bp, Homo sapien
ggcagtgcgtggtatttccagcccc

SEQ ID NO: 1147717 - DNA, 25 bp, Homo sapien
agggattcctcggattcccaaggca

SEQ ID NO: 1147718 - DNA, 25 bp, Homo sapien
agggtttgcacgtccgcattccggg

SEQ ID NO: 1147719 - DNA, 25 bp, Homo sapien
ggtggagggtttgcacgtccgcatt

SEQ ID NO: 1147720 - DNA, 25 bp, Homo sapien
tggagggtttgcacgtccgcattcc

SEQ ID NO: 1147721 - DNA, 25 bp, Homo sapien
ggagggtttgcacgtccgcattccg

SEQ ID NO: 1147722 - DNA, 25 bp, Homo sapien
tcaccaatccatcgccagaagggga

SEQ ID NO: 1147723 - DNA, 25 bp, Homo sapien
ccaatccatcgccagaaggggagga

SEQ ID NO: 1147724 - DNA, 25 bp, Homo sapien
caccaatccatcgccagaaggggag

SEQ ID NO: 1147725 - DNA, 25 bp, Homo sapien
aatccatcgccagaaggggaggaaa

SEQ ID NO: 1147726 - DNA, 25 bp, Homo sapien
ataattcctttagaaagtggagtcg

SEQ ID NO: 1147727 - DNA, 25 bp, Homo sapien
ggagtcgaattcataaaagtgatgg

SEQ ID NO: 1147728 - DNA, 25 bp, Homo sapien
agctcccggcgcgagtggaggtcgg

SEQ ID NO: 1147729 - DNA, 25 bp, Homo sapien
gaaagtggagtcgaattcataaaag

SEQ ID NO: 1147730 - DNA, 25 bp, Homo sapien
tttaggaagaccctggaacgtgcca

SEQ ID NO: 1147731 - DNA, 25 bp, Homo sapien
gaccctggaacgtgccagttgattc

SEQ ID NO: 1147732 - DNA, 25 bp, Homo sapien
gaagaccctggaacgtgccagttga

SEQ ID NO: 1147733 - DNA, 25 bp, Homo sapien
tggaacgtgccagttgattctgaca

SEQ ID NO: 1147734 - DNA, 25 bp, Homo sapien
tggcccatctttatggcattcaaac

SEQ ID NO: 1147735 - DNA, 25 bp, Homo sapien
acaacagcttgtgtgtggcccatct

SEQ ID NO: 1147736 - DNA, 25 bp, Homo sapien
accagctgaagatactacaagccca

SEQ ID NO: 1147737 - DNA, 25 bp, Homo sapien
gctattctggcttggaatcactaaa

SEQ ID NO: 1147738 - DNA, 25 bp, Homo sapien
tgggcccataccatatgactgtttc

SEQ ID NO: 1147739 - DNA, 25 bp, Homo sapien
gacagacagtatggcaagactaaac

SEQ ID NO: 1147740 - DNA, 25 bp, Homo sapien
tccaggattatgtttgggacagaca

SEQ ID NO: 1147741 - DNA, 25 bp, Homo sapien
tagatcagtgtatcattgggcccat

SEQ ID NO: 1147742 - DNA, 25 bp, Homo sapien
ctctgccactcggccgaccaaccag

SEQ ID NO: 1147743 - DNA, 25 bp, Homo sapien
ccctctgccactcggccgaccaacc

SEQ ID NO: 1147744 - DNA, 25 bp, Homo sapien
caccctctgccactcggccgaccaa

SEQ ID NO: 1147745 - DNA, 25 bp, Homo sapien
cccaccctctgccactcggccgacc

SEQ ID NO: 1147746 - DNA, 25 bp, Homo sapien
gaatcgccctatctgtgatgtcacc

SEQ ID NO: 1147747 - DNA, 25 bp, Homo sapien
gctgggactatcacgtccaaccgga

SEQ ID NO: 1147748 - DNA, 25 bp, Homo sapien
aaatctttcctggcgaagcagcagc

SEQ ID NO: 1147749 - DNA, 25 bp, Homo sapien
accggaagtcctggactagctccca

SEQ ID NO: 1147750 - DNA, 25 bp, Homo sapien
atgccgcctcaagtcctcctagccc

SEQ ID NO: 1147751 - DNA, 25 bp, Homo sapien
cgcctcaagtcctcctagccctgac

SEQ ID NO: 1147752 - DNA, 25 bp, Homo sapien
ccatgccgcctcaagtcctcctagc

SEQ ID NO: 1147753 - DNA, 25 bp, Homo sapien
ccccatgccgcctcaagtcctccta

SEQ ID NO: 1147754 - DNA, 25 bp, Homo sapien
catgtggaagtaacaggagtcagtc

SEQ ID NO: 1147755 - DNA, 25 bp, Homo sapien
caaattacagtccagtttccccaca

SEQ ID NO: 1147756 - DNA, 25 bp, Homo sapien
ggaaaacaccaacttcatggccgta

SEQ ID NO: 1147757 - DNA, 25 bp, Homo sapien
gaagaaagcgcgaacgcaattcccc

SEQ ID NO: 1147758 - DNA, 25 bp, Homo sapien
ctgaaagtatcacttggtagacaaa

SEQ ID NO: 1147759 - DNA, 25 bp, Homo sapien
aagctgaaagtatcacttggtagac

SEQ ID NO: 1147760 - DNA, 25 bp, Homo sapien
ggtagacaaactgctttttacacta

SEQ ID NO: 1147761 - DNA, 25 bp, Homo sapien
acggatattgttcagcatttgtaaa

SEQ ID NO: 1147762 - DNA, 25 bp, Homo sapien
atctcaaaacatccacgtgctcttc

SEQ ID NO: 1147763 - DNA, 25 bp, Homo sapien
tcatctcaaaacatccacgtgctct

SEQ ID NO: 1147764 - DNA, 25 bp, Homo sapien
caaaacatccacgtgctcttccatt

SEQ ID NO: 1147765 - DNA, 25 bp, Homo sapien
tcttctcatctcaaaacatccacgt

SEQ ID NO: 1147766 - DNA, 25 bp, Homo sapien
cataagtgagactcctttgttccct

SEQ ID NO: 1147767 - DNA, 25 bp, Homo sapien
tgtaaggtcatcttacataagtgag

SEQ ID NO: 1147768 - DNA, 25 bp, Homo sapien
cccttaataacaagcctacacggag

SEQ ID NO: 1147769 - DNA, 25 bp, Homo sapien
taacaagcctacacggaggtgaagg

SEQ ID NO: 1147770 - DNA, 25 bp, Homo sapien
ccaagaggagtcatccaggtgtcgg

SEQ ID NO: 1147771 - DNA, 25 bp, Homo sapien
ccccaggtagccaagaggagtcatc

SEQ ID NO: 1147772 - DNA, 25 bp, Homo sapien
ctggcgtcggctgcctcccacaatg

SEQ ID NO: 1147773 - DNA, 25 bp, Homo sapien
tagccaagaggagtcatccaggtgt

SEQ ID NO: 1147774 - DNA, 25 bp, Homo sapien
tcactgacaaagaatcctcctccgg

SEQ ID NO: 1147775 - DNA, 25 bp, Homo sapien
gacaaagaatcctcctccggcctgt

SEQ ID NO: 1147776 - DNA, 25 bp, Homo sapien
tcctcctccggcctgtcagtggcaa

SEQ ID NO: 1147777 - DNA, 25 bp, Homo sapien
aagaatcctcctccggcctgtcagt

SEQ ID NO: 1147778 - DNA, 25 bp, Homo sapien
tcttgcgatcgagccctttgtttct

SEQ ID NO: 1147779 - DNA, 25 bp, Homo sapien
ggtctgctcaggcatcttgctactc

SEQ ID NO: 1147780 - DNA, 25 bp, Homo sapien
tcttgctactcttgcgatcgagccc

SEQ ID NO: 1147781 - DNA, 25 bp, Homo sapien
accctgtgggtctgctcaggcatct

SEQ ID NO: 1147782 - DNA, 25 bp, Homo sapien
gatcatgaaaagatctaggccaggc

SEQ ID NO: 1147783 - DNA, 25 bp, Homo sapien
tacccctggctcactacatgacaaa

SEQ ID NO: 1147784 - DNA, 25 bp, Homo sapien
accacatggagtaacatttcacgta

SEQ ID NO: 1147785 - DNA, 25 bp, Homo sapien
taggccaggcaagtatgcaaacaag

SEQ ID NO: 1147786 - DNA, 25 bp, Homo sapien
tgctggaaaacttgcaatggaggaa

SEQ ID NO: 1147787 - DNA, 25 bp, Homo sapien
tgcagaacaacttccccaatacagg

SEQ ID NO: 1147788 - DNA, 25 bp, Homo sapien
agttacaacctctccccttgtgtag

SEQ ID NO: 1147789 - DNA, 25 bp, Homo sapien
gactcaccctgaagacattcgtaaa

SEQ ID NO: 1147790 - DNA, 25 bp, Homo sapien
caaatcgtacgtgtttcctgaatac

SEQ ID NO: 1147791 - DNA, 25 bp, Homo sapien
cttagagtgagttgacattgatgac

SEQ ID NO: 1147792 - DNA, 25 bp, Homo sapien
tggctggttcaataacacatggctt

SEQ ID NO: 1147793 - DNA, 25 bp, Homo sapien
caactttgctacgtggttgacaaga

SEQ ID NO: 1147794 - DNA, 25 bp, Homo sapien
gaaaagcaaggcgatatatcacttc

SEQ ID NO: 1147795 - DNA, 25 bp, Homo sapien
tcacttcccgattcaaagcatccaa

SEQ ID NO: 1147796 - DNA, 25 bp, Homo sapien
gtgtagggagaaaggtctatagtca

SEQ ID NO: 1147797 - DNA, 25 bp, Homo sapien
aataacagtgtagggagaaaggtct

SEQ ID NO: 1147798 - DNA, 25 bp, Homo sapien
gtgagaacaccttcaccgctggcac

SEQ ID NO: 1147799 - DNA, 25 bp, Homo sapien
ctcctgtggggaccgcggttacaag

SEQ ID NO: 1147800 - DNA, 25 bp, Homo sapien
cttcaccgctggcacagaaatccta

SEQ ID NO: 1147801 - DNA, 25 bp, Homo sapien
gttacaagcagacgctgtgtgaaag

SEQ ID NO: 1147802 - DNA, 25 bp, Homo sapien
gcttctcggaacacgcggatctatg

SEQ ID NO: 1147803 - DNA, 25 bp, Homo sapien
gcagaggcttctcggaacacgcgga

SEQ ID NO: 1147804 - DNA, 25 bp, Homo sapien
ccagggaacgccataggctttcccg

SEQ ID NO: 1147805 - DNA, 25 bp, Homo sapien
gccataggctttcccgctgtgttcc

SEQ ID NO: 1147806 - DNA, 25 bp, Homo sapien
tttaggcttgccagaccaggttttg

SEQ ID NO: 1147807 - DNA, 25 bp, Homo sapien
gcaatatttcctcaaacgtcacaaa

SEQ ID NO: 1147808 - DNA, 25 bp, Homo sapien
caattcacgaagagcaatgaacagg

SEQ ID NO: 1147809 - DNA, 25 bp, Homo sapien
caggttttgtagcaactatcagtta

SEQ ID NO: 1147810 - DNA, 25 bp, Homo sapien
ataagagagggcagagattggttct

SEQ ID NO: 1147811 - DNA, 25 bp, Homo sapien
catgtgggtcatttctccatggtga

SEQ ID NO: 1147812 - DNA, 25 bp, Homo sapien
ctccatggtgatacctattattttc

SEQ ID NO: 1147813 - DNA, 25 bp, Homo sapien
agagtctcagccctcatgtgggtca

SEQ ID NO: 1147814 - DNA, 25 bp, Homo sapien
ttgccatagcaattgggtgggtgga

SEQ ID NO: 1147815 - DNA, 25 bp, Homo sapien
agttctcacggagtggcccctccct

SEQ ID NO: 1147816 - DNA, 25 bp, Homo sapien
ccctcagcggctccactgttgccat

SEQ ID NO: 1147817 - DNA, 25 bp, Homo sapien
tgttgccatagcaattgggtgggtg

SEQ ID NO: 1147818 - DNA, 25 bp, Homo sapien
catctgttccctcagttctgggctt

SEQ ID NO: 1147819 - DNA, 25 bp, Homo sapien
ccaagatgttggttgtaccttgaga

SEQ ID NO: 1147820 - DNA, 25 bp, Homo sapien
tgttttgacccatcatggagccaag

SEQ ID NO: 1147821 - DNA, 25 bp, Homo sapien
ggctgtgttaactgttttgacccat

SEQ ID NO: 1147822 - DNA, 25 bp, Homo sapien
gacccatcatggagccaagatgttg

SEQ ID NO: 1147823 - DNA, 25 bp, Homo sapien
gaaggggcttcagtaggaacgctct

SEQ ID NO: 1147824 - DNA, 25 bp, Homo sapien
agtctccactccaaggcccgtgagg

SEQ ID NO: 1147825 - DNA, 25 bp, Homo sapien
aaggcccgtgaggacaggccacctg

SEQ ID NO: 1147826 - DNA, 25 bp, Homo sapien
catgcccagaacacccatctctgac

SEQ ID NO: 1147827 - DNA, 25 bp, Homo sapien
tcaccgttggttgtgaagctgcagg

SEQ ID NO: 1147828 - DNA, 25 bp, Homo sapien
caggatcaccgttggttgtgaagct

SEQ ID NO: 1147829 - DNA, 25 bp, Homo sapien
caccgttggttgtgaagctgcaggt

SEQ ID NO: 1147830 - DNA, 25 bp, Homo sapien
gatcaccgttggttgtgaagctgca

SEQ ID NO: 1147831 - DNA, 25 bp, Homo sapien
tccaggagtagatattgagtgggac

SEQ ID NO: 1147832 - DNA, 25 bp, Homo sapien
catcgattgacagatgagcaccagg

SEQ ID NO: 1147833 - DNA, 25 bp, Homo sapien
ggacggagagtaaggatgaacacaa

SEQ ID NO: 1147834 - DNA, 25 bp, Homo sapien
ctccttattcctcggctgcgggcat

SEQ ID NO: 1147835 - DNA, 25 bp, Homo sapien
catgaatgtggccaatgacttgatg

SEQ ID NO: 1147836 - DNA, 25 bp, Homo sapien
tgaatgtggccaatgacttgatgcc

SEQ ID NO: 1147837 - DNA, 25 bp, Homo sapien
ttgaggcatgaatgtggccaatgac

SEQ ID NO: 1147838 - DNA, 25 bp, Homo sapien
aggcatgaatgtggccaatgacttg

SEQ ID NO: 1147839 - DNA, 25 bp, Homo sapien
gaacagcagttttcttttgatcatc

SEQ ID NO: 1147840 - DNA, 25 bp, Homo sapien
tcctgctctaagcttgcaggccagg

SEQ ID NO: 1147841 - DNA, 25 bp, Homo sapien
tttgatcatcttcggttttaggaca

SEQ ID NO: 1147842 - DNA, 25 bp, Homo sapien
ctccacttgctgaacagcagttttc

SEQ ID NO: 1147843 - DNA, 25 bp, Homo sapien
gatcagaaggacctggcagcatggc

SEQ ID NO: 1147844 - DNA, 25 bp, Homo sapien
ggcagcatggcagcccatgggacac

SEQ ID NO: 1147845 - DNA, 25 bp, Homo sapien
agcaaacaggggatggggatcagaa

SEQ ID NO: 1147846 - DNA, 25 bp, Homo sapien
cagcccatgggacacagaggtaata

SEQ ID NO: 1147847 - DNA, 25 bp, Homo sapien
tgaaaatgctttttgtgacatccgt

SEQ ID NO: 1147848 - DNA, 25 bp, Homo sapien
gctttttgtgacatccgttctttct

SEQ ID NO: 1147849 - DNA, 25 bp, Homo sapien
ttcttttcattgttccagcagcatt

SEQ ID NO: 1147850 - DNA, 25 bp, Homo sapien
aaaatgctttttgtgacatccgttc

SEQ ID NO: 1147851 - DNA, 25 bp, Homo sapien
aaactcaagctaagcatttttagca

SEQ ID NO: 1147852 - DNA, 25 bp, Homo sapien
aagctgagaggagtagggctaaagc

SEQ ID NO: 1147853 - DNA, 25 bp, Homo sapien
ggactgtctgaaggagacaggttat

SEQ ID NO: 1147854 - DNA, 25 bp, Homo sapien
tctgaaggagacaggttattgtcct

SEQ ID NO: 1147855 - DNA, 25 bp, Homo sapien
ggaacacctctcgactatttctgta

SEQ ID NO: 1147856 - DNA, 25 bp, Homo sapien
taaagctatgattaccccaactcca

SEQ ID NO: 1147857 - DNA, 25 bp, Homo sapien
ccctgttaggattctgtaatttctg

SEQ ID NO: 1147858 - DNA, 25 bp, Homo sapien
tgctgctgagcctatctgctggact

SEQ ID NO: 1147859 - DNA, 25 bp, Homo sapien
agctccaggtccagatggtttcact

SEQ ID NO: 1147860 - DNA, 25 bp, Homo sapien
gtagctctgtaactatgaaaataat

SEQ ID NO: 1147861 - DNA, 25 bp, Homo sapien
gctccaggtccagatggtttcactg

SEQ ID NO: 1147862 - DNA, 25 bp, Homo sapien
taactatgaaaataattggattcct

SEQ ID NO: 1147863 - DNA, 25 bp, Homo sapien
cggcccgctcctggcgccacaggtc

SEQ ID NO: 1147864 - DNA, 25 bp, Homo sapien
tcgctgtaaaccgtaacttcccatc

SEQ ID NO: 1147865 - DNA, 25 bp, Homo sapien
tcggcccgctcctggcgccacaggt

SEQ ID NO: 1147866 - DNA, 25 bp, Homo sapien
ctgggtggacttcgctgtaaaccgt

SEQ ID NO: 1147867 - DNA, 25 bp, Homo sapien
ccccggcctggcgcggcgccttcac

SEQ ID NO: 1147868 - DNA, 25 bp, Homo sapien
cccccggcctggcgcggcgccttca

SEQ ID NO: 1147869 - DNA, 25 bp, Homo sapien
cgccccccggcctggcgcggcgcct

SEQ ID NO: 1147870 - DNA, 25 bp, Homo sapien
ctacaaacgcgcctcatgtgttgcc

SEQ ID NO: 1147871 - DNA, 25 bp, Homo sapien
caaacgcgcctcatgtgttgcccat

SEQ ID NO: 1147872 - DNA, 25 bp, Homo sapien
aacgcgcctcatgtgttgcccatca

SEQ ID NO: 1147873 - DNA, 25 bp, Homo sapien
tacaaacgcgcctcatgtgttgccc

SEQ ID NO: 1147874 - DNA, 25 bp, Homo sapien
aacaaagactaaacactaccagcag

SEQ ID NO: 1147875 - DNA, 25 bp, Homo sapien
gaaagcagctctagcagcaaaagat

SEQ ID NO: 1147876 - DNA, 25 bp, Homo sapien
aaagcagctctagcagcaaaagata

SEQ ID NO: 1147877 - DNA, 25 bp, Homo sapien
ctcagaacaaagactaaacactacc

SEQ ID NO: 1147878 - DNA, 25 bp, Homo sapien
ggtgtgatctaccgcgcccggacca

SEQ ID NO: 1147879 - DNA, 25 bp, Homo sapien
ttaaagctagcatttcacaacagaa

SEQ ID NO: 1147880 - DNA, 25 bp, Homo sapien
aacctctctgtatacttcagtaact

SEQ ID NO: 1147881 - DNA, 25 bp, Homo sapien
gaccacctgcacatttaaaattgtg

SEQ ID NO: 1147882 - DNA, 25 bp, Homo sapien
agcaccattaaaagagcgaaaaggc

SEQ ID NO: 1147883 - DNA, 25 bp, Homo sapien
accattaaaagagcgaaaaggcaag

SEQ ID NO: 1147884 - DNA, 25 bp, Homo sapien
caccattaaaagagcgaaaaggcaa

SEQ ID NO: 1147885 - DNA, 25 bp, Homo sapien
taagcaccattaaaagagcgaaaag

SEQ ID NO: 1147886 - DNA, 25 bp, Homo sapien
tgtaggtctcagctacctgggggct

SEQ ID NO: 1147887 - DNA, 25 bp, Homo sapien
ggaggtcaaggttgcggtcagctgt

SEQ ID NO: 1147888 - DNA, 25 bp, Homo sapien
ctgtaggtctcagctacctgggggc

SEQ ID NO: 1147889 - DNA, 25 bp, Homo sapien
caaggttgcggtcagctgtgattgt

SEQ ID NO: 1147890 - DNA, 25 bp, Homo sapien
ggaaacatgttgaatccccatctct

SEQ ID NO: 1147891 - DNA, 25 bp, Homo sapien
cacactcctatagtcgcagctactc

SEQ ID NO: 1147892 - DNA, 25 bp, Homo sapien
ctgggaaacatgttgaatccccatc

SEQ ID NO: 1147893 - DNA, 25 bp, Homo sapien
aaatatgaaaattaagccaggcatg

SEQ ID NO: 1147894 - DNA, 25 bp, Homo sapien
gaattaccaacacccgtatgtagcc

SEQ ID NO: 1147895 - DNA, 25 bp, Homo sapien
tgtgaacaccacatacttcccttaa

SEQ ID NO: 1147896 - DNA, 25 bp, Homo sapien
gaccatgcagtcatccgatttaaga

SEQ ID NO: 1147897 - DNA, 25 bp, Homo sapien
taaatggtgctggatcaagcagaca

SEQ ID NO: 1147898 - DNA, 25 bp, Homo sapien
tgcatctaaacaggatttgctttca

SEQ ID NO: 1147899 - DNA, 25 bp, Homo sapien
taaacaggatttgctttcagattgc

SEQ ID NO: 1147900 - DNA, 25 bp, Homo sapien
atctaaacaggatttgctttcagat

SEQ ID NO: 1147901 - DNA, 25 bp, Homo sapien
ctgcatctaaacaggatttgctttc

SEQ ID NO: 1147902 - DNA, 25 bp, Homo sapien
aagggacggtaaggtgagagcctgg

SEQ ID NO: 1147903 - DNA, 25 bp, Homo sapien
gctggcaatgcctcagggtttttac

SEQ ID NO: 1147904 - DNA, 25 bp, Homo sapien
cgagctggcaatgcctcagggtttt

SEQ ID NO: 1147905 - DNA, 25 bp, Homo sapien
tcgagctggcaatgcctcagggttt

SEQ ID NO: 1147906 - DNA, 25 bp, Homo sapien
ccatcgagctggcaatgcctcaggg

SEQ ID NO: 1147907 - DNA, 25 bp, Homo sapien
ggtctgacatcgtccatttgtcatt

SEQ ID NO: 1147908 - DNA, 25 bp, Homo sapien
gggtctgacatcgtccatttgtcat

SEQ ID NO: 1147909 - DNA, 25 bp, Homo sapien
gtctgacatcgtccatttgtcattc

SEQ ID NO: 1147910 - DNA, 25 bp, Homo sapien
tctgacatcgtccatttgtcattct

SEQ ID NO: 1147911 - DNA, 25 bp, Homo sapien
tttcagtgcagtgtggtctatttaa

SEQ ID NO: 1147912 - DNA, 25 bp, Homo sapien
ttggtaagtaatgtagatttcagtg

SEQ ID NO: 1147913 - DNA, 25 bp, Homo sapien
agatttcagtgcagtgtggtctatt

SEQ ID NO: 1147914 - DNA, 25 bp, Homo sapien
gttttggtaagtaatgtagatttca

SEQ ID NO: 1147915 - DNA, 25 bp, Homo sapien
tacaaaacaagctgtcaagtcatga

SEQ ID NO: 1147916 - DNA, 25 bp, Homo sapien
aaacaagctgtcaagtcatgaaaag

SEQ ID NO: 1147917 - DNA, 25 bp, Homo sapien
tacaacatactaataggggaaactg

SEQ ID NO: 1147918 - DNA, 25 bp, Homo sapien
aggaggcacgaaatggtgaagtaca

SEQ ID NO: 1147919 - DNA, 25 bp, Homo sapien
aaaactgctgtccaaaatatatgaa

SEQ ID NO: 1147920 - DNA, 25 bp, Homo sapien
aaaataatctgatggaaaaactgct

SEQ ID NO: 1147921 - DNA, 25 bp, Homo sapien
gaaaaactgctgtccaaaatatatg

SEQ ID NO: 1147922 - DNA, 25 bp, Homo sapien
gatggaaaaactgctgtccaaaata

SEQ ID NO: 1147923 - DNA, 25 bp, Homo sapien
agatgcatggaaaagaatacggagc

SEQ ID NO: 1147924 - DNA, 25 bp, Homo sapien
tagatgcatggaaaagaatacggag

SEQ ID NO: 1147925 - DNA, 25 bp, Homo sapien
gatgcatggaaaagaatacggagcc

SEQ ID NO: 1147926 - DNA, 25 bp, Homo sapien
tcaggtcaggccgtggctcgtgtct

SEQ ID NO: 1147927 - DNA, 25 bp, Homo sapien
tttccccacagttcaggtcaggccg

SEQ ID NO: 1147928 - DNA, 25 bp, Homo sapien
ccacagttcaggtcaggccgtggct

SEQ ID NO: 1147929 - DNA, 25 bp, Homo sapien
gatggtgccgttgcatttgagccca

SEQ ID NO: 1147930 - DNA, 25 bp, Homo sapien
acggaggacccatgctggcactggc

SEQ ID NO: 1147931 - DNA, 25 bp, Homo sapien
catacggaggacccatgctggcact

SEQ ID NO: 1147932 - DNA, 25 bp, Homo sapien
ttattgatcattatcgggcatttcc

SEQ ID NO: 1147933 - DNA, 25 bp, Homo sapien
attgatcattatcgggcatttccag

SEQ ID NO: 1147934 - DNA, 25 bp, Homo sapien
caatgaggggtatttcaggcacttg

SEQ ID NO: 1147935 - DNA, 25 bp, Homo sapien
agacaatgaggggtatttcaggcac

SEQ ID NO: 1147936 - DNA, 25 bp, Homo sapien
aagaagacaatgaggggtatttcag

SEQ ID NO: 1147937 - DNA, 25 bp, Homo sapien
agaagacaatgaggggtatttcagg

SEQ ID NO: 1147938 - DNA, 25 bp, Homo sapien
tgtggctgttccagagcccttgcca

SEQ ID NO: 1147939 - DNA, 25 bp, Homo sapien
ctttatgtggctgttccagagccct

SEQ ID NO: 1147940 - DNA, 25 bp, Homo sapien
tatgtggctgttccagagcccttgc

SEQ ID NO: 1147941 - DNA, 25 bp, Homo sapien
gtggctgttccagagcccttgccac

SEQ ID NO: 1147942 - DNA, 25 bp, Homo sapien
tgactctgatcagagaacccggcca

SEQ ID NO: 1147943 - DNA, 25 bp, Homo sapien
cggccacttcattccagacttctgt

SEQ ID NO: 1147944 - DNA, 25 bp, Homo sapien
gagaaaactagtacaggtgcctgtc

SEQ ID NO: 1147945 - DNA, 25 bp, Homo sapien
taaatgtatgctaaccctctaagag

SEQ ID NO: 1147946 - DNA, 25 bp, Homo sapien
tgtcaaggatctgcacttaatggac

SEQ ID NO: 1147947 - DNA, 25 bp, Homo sapien
ttaatggacactctcggaagcctca

SEQ ID NO: 1147948 - DNA, 25 bp, Homo sapien
gttcagtttcacaggtcgacagagg

SEQ ID NO: 1147949 - DNA, 25 bp, Homo sapien
tttgagtgcaataggagccatacgc

SEQ ID NO: 1147950 - DNA, 25 bp, Homo sapien
ttgatccataggctcacatttgatc

SEQ ID NO: 1147951 - DNA, 25 bp, Homo sapien
tccataggctcacatttgatcccaa

SEQ ID NO: 1147952 - DNA, 25 bp, Homo sapien
cataggctcacatttgatcccaact

SEQ ID NO: 1147953 - DNA, 25 bp, Homo sapien
aggctcacatttgatcccaactggc

SEQ ID NO: 1147954 - DNA, 25 bp, Homo sapien
actcagctaagcatatgggctagat

SEQ ID NO: 1147955 - DNA, 25 bp, Homo sapien
aaatttaagcctaatgcaataaaga

SEQ ID NO: 1147956 - DNA, 25 bp, Homo sapien
tgttgaacaagggacatcatcattt

SEQ ID NO: 1147957 - DNA, 25 bp, Homo sapien
gaatgcccataaaattattatctaa

SEQ ID NO: 1147958 - DNA, 25 bp, Homo sapien
ctatgtacataaagggaggggacag

SEQ ID NO: 1147959 - DNA, 25 bp, Homo sapien
gggacagacaacaaatttgcatatt

SEQ ID NO: 1147960 - DNA, 25 bp, Homo sapien
cagacaacaaatttgcatattataa

SEQ ID NO: 1147961 - DNA, 25 bp, Homo sapien
ggaggggacagacaacaaatttgca

SEQ ID NO: 1147962 - DNA, 25 bp, Homo sapien
gaccatctgtttcatggccacctgt

SEQ ID NO: 1147963 - DNA, 25 bp, Homo sapien
gaaccaattctatgaccatctgttt

SEQ ID NO: 1147964 - DNA, 25 bp, Homo sapien
gggttgctgcactcacaaccactga

SEQ ID NO: 1147965 - DNA, 25 bp, Homo sapien
caaccactgaaccaattctatgacc

SEQ ID NO: 1147966 - DNA, 25 bp, Homo sapien
tatcctaaggcgtccagttgaaaaa

SEQ ID NO: 1147967 - DNA, 25 bp, Homo sapien
ttttggctactttgtttttgcaagc

SEQ ID NO: 1147968 - DNA, 25 bp, Homo sapien
tttttgcaagcatgtatcctaaggc

SEQ ID NO: 1147969 - DNA, 25 bp, Homo sapien
ctgtgtccagacattcctggtggta

SEQ ID NO: 1147970 - DNA, 25 bp, Homo sapien
ttcttcaccacaacaatctccaatg

SEQ ID NO: 1147971 - DNA, 25 bp, Homo sapien
caacaatctccaatgaattgtgggc

SEQ ID NO: 1147972 - DNA, 25 bp, Homo sapien
acagaaggcagacccatccctgctt

SEQ ID NO: 1147973 - DNA, 25 bp, Homo sapien
ccaatgaattgtgggcacagaaggc

SEQ ID NO: 1147974 - DNA, 25 bp, Homo sapien
ccactgtcggctgctcatttgtcca

SEQ ID NO: 1147975 - DNA, 25 bp, Homo sapien
taaagtgctacatggcattggggct

SEQ ID NO: 1147976 - DNA, 25 bp, Homo sapien
atggcattggggctggtacagcctc

SEQ ID NO: 1147977 - DNA, 25 bp, Homo sapien
ctcaattatgggttgaagagtacac

SEQ ID NO: 1147978 - DNA, 25 bp, Homo sapien
aagaccacttatattgagagcttac

SEQ ID NO: 1147979 - DNA, 25 bp, Homo sapien
agagcttacattctgcaacactacc

SEQ ID NO: 1147980 - DNA, 25 bp, Homo sapien
tataagcacaacatgtatttagatg

SEQ ID NO: 1147981 - DNA, 25 bp, Homo sapien
cacggtgcccagtctgttgaattta

SEQ ID NO: 1147982 - DNA, 25 bp, Homo sapien
tgccattgtgggtaacaaggacccg

SEQ ID NO: 1147983 - DNA, 25 bp, Homo sapien
acaacaacataataaggagaagctt

SEQ ID NO: 1147984 - DNA, 25 bp, Homo sapien
ttaaaacatttagaagcggcggtgc

SEQ ID NO: 1147985 - DNA, 25 bp, Homo sapien
gagtgctacagtatctagtctaaga

SEQ ID NO: 1147986 - DNA, 25 bp, Homo sapien
tcctggtctagagatagcgtttaag

SEQ ID NO: 1147987 - DNA, 25 bp, Homo sapien
taactactgtgcataagtaactatg

SEQ ID NO: 1147988 - DNA, 25 bp, Homo sapien
ttctgatgggagacaggtttacttg

SEQ ID NO: 1147989 - DNA, 25 bp, Homo sapien
gttgctctacattcccacacactta

SEQ ID NO: 1147990 - DNA, 25 bp, Homo sapien
tatctatagctagggatggagttgc

SEQ ID NO: 1147991 - DNA, 25 bp, Homo sapien
tgtcatggaatcttaggagccctgc

SEQ ID NO: 1147992 - DNA, 25 bp, Homo sapien
gtgtcatggaatcttaggagccctg

SEQ ID NO: 1147993 - DNA, 25 bp, Homo sapien
ggtgtcatggaatcttaggagccct

SEQ ID NO: 1147994 - DNA, 25 bp, Homo sapien
ggggtgtcatggaatcttaggagcc

SEQ ID NO: 1147995 - DNA, 25 bp, Homo sapien
cagactctgataagagtgaggtaga

SEQ ID NO: 1147996 - DNA, 25 bp, Homo sapien
aacatctctttgaggtttacgaact

SEQ ID NO: 1147997 - DNA, 25 bp, Homo sapien
tgagttagaaaacatctctttgagg

SEQ ID NO: 1147998 - DNA, 25 bp, Homo sapien
agttgagttagaaaacatctctttg

SEQ ID NO: 1147999 - DNA, 25 bp, Homo sapien
catctctttgaggtttacgaactgc

SEQ ID NO: 1148000 - DNA, 25 bp, Homo sapien
gaaacagcataagattagtttgtgt

SEQ ID NO: 1148001 - DNA, 25 bp, Homo sapien
gtgtttacactgtgccaattaatgt

SEQ ID NO: 1148002 - DNA, 25 bp, Homo sapien
gaactaatagatagtgtttacactg

SEQ ID NO: 1148003 - DNA, 25 bp, Homo sapien
gagggtccctgctttgcacactgca

SEQ ID NO: 1148004 - DNA, 25 bp, Homo sapien
tgaactgtcgctcattcctcagcat

SEQ ID NO: 1148005 - DNA, 25 bp, Homo sapien
ttcctgtaacttctcctttaactgc

SEQ ID NO: 1148006 - DNA, 25 bp, Homo sapien
ggacttgtccggctcatccagagtg

SEQ ID NO: 1148007 - DNA, 25 bp, Homo sapien
tgtaacttctcctttaactgcgtca

SEQ ID NO: 1148008 - DNA, 25 bp, Homo sapien
cctgtaacttctcctttaactgcgt

SEQ ID NO: 1148009 - DNA, 25 bp, Homo sapien
tcaagatgtggccaaatactgaaaa

SEQ ID NO: 1148010 - DNA, 25 bp, Homo sapien
cacaaaatgccctggcatggtttcc

SEQ ID NO: 1148011 - DNA, 25 bp, Homo sapien
ggtttcctggtccatcgggcaatgc

SEQ ID NO: 1148012 - DNA, 25 bp, Homo sapien
ttcctggtccatcgggcaatgcatt

SEQ ID NO: 1148013 - DNA, 25 bp, Homo sapien
tttctcatcctcctcaacttgaaca

SEQ ID NO: 1148014 - DNA, 25 bp, Homo sapien
gggcagatgatttctgcactttctc

SEQ ID NO: 1148015 - DNA, 25 bp, Homo sapien
ctgggggcagatgatttctgcactt

SEQ ID NO: 1148016 - DNA, 25 bp, Homo sapien
tcctcctcaacttgaacatcttcat

SEQ ID NO: 1148017 - DNA, 25 bp, Homo sapien
gaggattctctgtctacaaccagag

SEQ ID NO: 1148018 - DNA, 25 bp, Homo sapien
atgagaggattctctgtctacaacc

SEQ ID NO: 1148019 - DNA, 25 bp, Homo sapien
gctccatcctagtttctgactaaaa

SEQ ID NO: 1148020 - DNA, 25 bp, Homo sapien
cttattaatagctaagacaagccaa

SEQ ID NO: 1148021 - DNA, 25 bp, Homo sapien
taatagctaagacaagccaatgaaa

SEQ ID NO: 1148022 - DNA, 25 bp, Homo sapien
tagctaagacaagccaatgaaaagg

SEQ ID NO: 1148023 - DNA, 25 bp, Homo sapien
gccagctgggggtgcaatttctcat

SEQ ID NO: 1148024 - DNA, 25 bp, Homo sapien
aggaagccggccagttgagttagaa

SEQ ID NO: 1148025 - DNA, 25 bp, Homo sapien
aacatttctctttgaggtttctgaa

SEQ ID NO: 1148026 - DNA, 25 bp, Homo sapien
ccagttgagttagaaaacatttctc

SEQ ID NO: 1148027 - DNA, 25 bp, Homo sapien
catcactttcatgatggtgagcctg

SEQ ID NO: 1148028 - DNA, 25 bp, Homo sapien
atgatggtgagcctgtagatcttac

SEQ ID NO: 1148029 - DNA, 25 bp, Homo sapien
gaagacaggatatcattcatcactt

SEQ ID NO: 1148030 - DNA, 25 bp, Homo sapien
gagagaagacaggatatcattcatc

SEQ ID NO: 1148031 - DNA, 25 bp, Homo sapien
gtttgtggcagaagaggtggggcca

SEQ ID NO: 1148032 - DNA, 25 bp, Homo sapien
gtggcagaagaggtggggccaggga

SEQ ID NO: 1148033 - DNA, 25 bp, Homo sapien
ttgtggcagaagaggtggggccagg

SEQ ID NO: 1148034 - DNA, 25 bp, Homo sapien
gctgacgtttgtggcagaagaggtg

SEQ ID NO: 1148035 - DNA, 25 bp, Homo sapien
gaagccggacagttgagttagaaaa

SEQ ID NO: 1148036 - DNA, 25 bp, Homo sapien
ccggacagttgagttagaaaacatt

SEQ ID NO: 1148037 - DNA, 25 bp, Homo sapien
acagttgagttagaaaacatttctc

SEQ ID NO: 1148038 - DNA, 25 bp, Homo sapien
caggaagccggacagttgagttaga

SEQ ID NO: 1148039 - DNA, 25 bp, Homo sapien
attttatgaggtctttacactcttc

SEQ ID NO: 1148040 - DNA, 25 bp, Homo sapien
aaattttatgaggtctttacactct

SEQ ID NO: 1148041 - DNA, 25 bp, Homo sapien
ttttatgaggtctttacactcttca

SEQ ID NO: 1148042 - DNA, 25 bp, Homo sapien
tttatgaggtctttacactcttcat

SEQ ID NO: 1148043 - DNA, 25 bp, Homo sapien
tgaactgtcgctcattcctcagcat

SEQ ID NO: 1148044 - DNA, 25 bp, Homo sapien
gtacttcagagatttacacacctgc

SEQ ID NO: 1148045 - DNA, 25 bp, Homo sapien
tggcccagcttagctcttacgtctc

SEQ ID NO: 1148046 - DNA, 25 bp, Homo sapien
cagcttagctcttacgtctccccac

SEQ ID NO: 1148047 - DNA, 25 bp, Homo sapien
acttcagagatttacacacctgccc

SEQ ID NO: 1148048 - DNA, 25 bp, Homo sapien
agctctcgttcctgagcgtgaacca

SEQ ID NO: 1148049 - DNA, 25 bp, Homo sapien
aaggtgctgtgccagtctacacccc

SEQ ID NO: 1148050 - DNA, 25 bp, Homo sapien
ttcttggaggtcctgcccctgggac

SEQ ID NO: 1148051 - DNA, 25 bp, Homo sapien
ctcattcaatgagcgggaggcatct

SEQ ID NO: 1148052 - DNA, 25 bp, Homo sapien
gggcagacgatttctgcactttctc

SEQ ID NO: 1148053 - DNA, 25 bp, Homo sapien
cacctcaacttgaacatcttcattg

SEQ ID NO: 1148054 - DNA, 25 bp, Homo sapien
atcttcattgtcatcgttgtcattt

SEQ ID NO: 1148055 - DNA, 25 bp, Homo sapien
ctgggggcagacgatttctgcactt

SEQ ID NO: 1148056 - DNA, 25 bp, Homo sapien
tggctggttggagtcataagggcca

SEQ ID NO: 1148057 - DNA, 25 bp, Homo sapien
ttcctcttcctcatcatcactttca

SEQ ID NO: 1148058 - DNA, 25 bp, Homo sapien
ctgggagacactggccctttttctt

SEQ ID NO: 1148059 - DNA, 25 bp, Homo sapien
ctcttcctcatcatcactttcattt

SEQ ID NO: 1148060 - DNA, 25 bp, Homo sapien
tcttcctcatcatcactttcatttt

SEQ ID NO: 1148061 - DNA, 25 bp, Homo sapien
tatccttctaaatacagggtggagg

SEQ ID NO: 1148062 - DNA, 25 bp, Homo sapien
gagagttcttgacgcagtgcagaca

SEQ ID NO: 1148063 - DNA, 25 bp, Homo sapien
cagatcttgtgtattaagggcccca

SEQ ID NO: 1148064 - DNA, 25 bp, Homo sapien
cagagaactgacacagggcttcaac

SEQ ID NO: 1148065 - DNA, 25 bp, Homo sapien
ctcctcttcagactcctgcagattc

SEQ ID NO: 1148066 - DNA, 25 bp, Homo sapien
cctcctcttcagactcctgcagatt

SEQ ID NO: 1148067 - DNA, 25 bp, Homo sapien
ttcatcccaggactcctgggggact

SEQ ID NO: 1148068 - DNA, 25 bp, Homo sapien
caggactcctgggggacttcctcct

SEQ ID NO: 1148069 - DNA, 25 bp, Homo sapien
gtgaaatgtgctgctgtaagacttg

SEQ ID NO: 1148070 - DNA, 25 bp, Homo sapien
tttcaggaggaattgagggagtcga

SEQ ID NO: 1148071 - DNA, 25 bp, Homo sapien
agacttgtacgaggccaacatttca

SEQ ID NO: 1148072 - DNA, 25 bp, Homo sapien
ctgctgtaagacttgtacgaggcca

SEQ ID NO: 1148073 - DNA, 25 bp, Homo sapien
ctgggccatgaactggagctttatc

SEQ ID NO: 1148074 - DNA, 25 bp, Homo sapien
ggagctttatcaccttcacaatgga

SEQ ID NO: 1148075 - DNA, 25 bp, Homo sapien
actggagctttatcaccttcacaat

SEQ ID NO: 1148076 - DNA, 25 bp, Homo sapien
gaactggagctttatcaccttcaca

SEQ ID NO: 1148077 - DNA, 25 bp, Homo sapien
gaaatctacattgatatataggttc

SEQ ID NO: 1148078 - DNA, 25 bp, Homo sapien
taggaagagagcaaagctcactgac

SEQ ID NO: 1148079 - DNA, 25 bp, Homo sapien
aagagagcaaagctcactgacccac

SEQ ID NO: 1148080 - DNA, 25 bp, Homo sapien
ctaggaagagagcaaagctcactga

SEQ ID NO: 1148081 - DNA, 25 bp, Homo sapien
ggaagagagcaaagctcactgaccc

SEQ ID NO: 1148082 - DNA, 25 bp, Homo sapien
gttcaatgtcgtgacagtcagtcca

SEQ ID NO: 1148083 - DNA, 25 bp, Homo sapien
tgccttgagttcaatgtcgtgacag

SEQ ID NO: 1148084 - DNA, 25 bp, Homo sapien
gtgacagtcagtccaggttggcacg

SEQ ID NO: 1148085 - DNA, 25 bp, Homo sapien
caatgtcgtgacagtcagtccaggt

SEQ ID NO: 1148086 - DNA, 25 bp, Homo sapien
gatgagctgatctgacagacaactc

SEQ ID NO: 1148087 - DNA, 25 bp, Homo sapien
gctttgggaacaaaactcataagga

SEQ ID NO: 1148088 - DNA, 25 bp, Homo sapien
taaggaattttgtagctggcaagag

SEQ ID NO: 1148089 - DNA, 25 bp, Homo sapien
tctgacagacaactcctgggcatgt

SEQ ID NO: 1148090 - DNA, 25 bp, Homo sapien
agaggtagacaagggtgacactggc

SEQ ID NO: 1148091 - DNA, 25 bp, Homo sapien
ggacagatgagctaaaacaagcgaa

SEQ ID NO: 1148092 - DNA, 25 bp, Homo sapien
gatgagctaaaacaagcgaacttag

SEQ ID NO: 1148093 - DNA, 25 bp, Homo sapien
gagctaaaacaagcgaacttagaag

SEQ ID NO: 1148094 - DNA, 25 bp, Homo sapien
ctaaaacaagcgaacttagaagaca

SEQ ID NO: 1148095 - DNA, 25 bp, Homo sapien
gatagtttatgagattgtggacaca

SEQ ID NO: 1148096 - DNA, 25 bp, Homo sapien
cttgggcaaaattcccctgtgttgg

SEQ ID NO: 1148097 - DNA, 25 bp, Homo sapien
gaaatattccagtaggcctgaggtc

SEQ ID NO: 1148098 - DNA, 25 bp, Homo sapien
tagttctaacacctcataggagaga

SEQ ID NO: 1148099 - DNA, 25 bp, Homo sapien
ctgggacctgttgcctcttggtcct

SEQ ID NO: 1148100 - DNA, 25 bp, Homo sapien
acctgttgcctcttggtcctccttt

SEQ ID NO: 1148101 - DNA, 25 bp, Homo sapien
tttttcacttgatcccaccgatgtc

SEQ ID NO: 1148102 - DNA, 25 bp, Homo sapien
gttgcctcttggtcctcctttttca

SEQ ID NO: 1148103 - DNA, 25 bp, Homo sapien
tcagacttgtctgacaagacaaaat

SEQ ID NO: 1148104 - DNA, 25 bp, Homo sapien
ctctaatgagaaccaaaaagcaatg

SEQ ID NO: 1148105 - DNA, 25 bp, Homo sapien
ggtgtcaacatcaaattaactgtcc

SEQ ID NO: 1148106 - DNA, 25 bp, Homo sapien
caagtttccctgcagttaccatgag

SEQ ID NO: 1148107 - DNA, 25 bp, Homo sapien
gagtcagtcagttcaagacaacctg

SEQ ID NO: 1148108 - DNA, 25 bp, Homo sapien
tgaaggagttgaataacatctatac

SEQ ID NO: 1148109 - DNA, 25 bp, Homo sapien
gctccaatacgtaaaaggcacttct

SEQ ID NO: 1148110 - DNA, 25 bp, Homo sapien
aacagccaagccaacacgctgttgc

SEQ ID NO: 1148111 - DNA, 25 bp, Homo sapien
tgatgggtcttggtcttcttccact

SEQ ID NO: 1148112 - DNA, 25 bp, Homo sapien
catgatgggtcttggtcttcttcca

SEQ ID NO: 1148113 - DNA, 25 bp, Homo sapien
gcatgatgggtcttggtcttcttcc

SEQ ID NO: 1148114 - DNA, 25 bp, Homo sapien
gggcatgatgggtcttggtcttctt

SEQ ID NO: 1148115 - DNA, 25 bp, Homo sapien
cctccaatgagtaaacagcactgct

SEQ ID NO: 1148116 - DNA, 25 bp, Homo sapien
aaggagtcgaataccatctacccag

SEQ ID NO: 1148117 - DNA, 25 bp, Homo sapien
gtaaacagcactgctgtagggctgg

SEQ ID NO: 1148118 - DNA, 25 bp, Homo sapien
cctaagtcaggcagttcaagataac

SEQ ID NO: 1148119 - DNA, 25 bp, Homo sapien
ggtttgcatctcagaaccaagggtg

SEQ ID NO: 1148120 - DNA, 25 bp, Homo sapien
tgcatctcagaaccaagggtgaaat

SEQ ID NO: 1148121 - DNA, 25 bp, Homo sapien
tttgcatctcagaaccaagggtgaa

SEQ ID NO: 1148122 - DNA, 25 bp, Homo sapien
ttggtttgcatctcagaaccaaggg

SEQ ID NO: 1148123 - DNA, 25 bp, Homo sapien
tggggcatggtgggccttggtcttc

SEQ ID NO: 1148124 - DNA, 25 bp, Homo sapien
gcatggtgggccttggtcttcttcc

SEQ ID NO: 1148125 - DNA, 25 bp, Homo sapien
ctggggcatggtgggccttggtctt

SEQ ID NO: 1148126 - DNA, 25 bp, Homo sapien
gggcatggtgggccttggtcttctt

SEQ ID NO: 1148127 - DNA, 25 bp, Homo sapien
gaaaagatgtaatcgataatgtcag

SEQ ID NO: 1148128 - DNA, 25 bp, Homo sapien
gtcagcccgctctgttttccctgaa

SEQ ID NO: 1148129 - DNA, 25 bp, Homo sapien
taatcgataatgtcagcccgctctg

SEQ ID NO: 1148130 - DNA, 25 bp, Homo sapien
gatgtaatcgataatgtcagcccgc

SEQ ID NO: 1148131 - DNA, 25 bp, Homo sapien
taacatctatccagtgagtcctgca

SEQ ID NO: 1148132 - DNA, 25 bp, Homo sapien
aataacatctatccagtgagtcctg

SEQ ID NO: 1148133 - DNA, 25 bp, Homo sapien
ataacatctatccagtgagtcctgc

SEQ ID NO: 1148134 - DNA, 25 bp, Homo sapien
gtccctattctagtagatcgttatc

SEQ ID NO: 1148135 - DNA, 25 bp, Homo sapien
gattgttcatggttgtgaggacttt

SEQ ID NO: 1148136 - DNA, 25 bp, Homo sapien
ctcatcaaatactcagattgttcat

SEQ ID NO: 1148137 - DNA, 25 bp, Homo sapien
aaaatgtccctattctagtagatcg

SEQ ID NO: 1148138 - DNA, 25 bp, Homo sapien
cctcaggctcctcagcataagaata

SEQ ID NO: 1148139 - DNA, 25 bp, Homo sapien
tcaggctcctcagcataagaatagg

SEQ ID NO: 1148140 - DNA, 25 bp, Homo sapien
ggctcctcagcataagaataggaca

SEQ ID NO: 1148141 - DNA, 25 bp, Homo sapien
caggctcctcagcataagaatagga

SEQ ID NO: 1148142 - DNA, 25 bp, Homo sapien
ttcccctacacacataacaatccac

SEQ ID NO: 1148143 - DNA, 25 bp, Homo sapien
tcccctacacacataacaatccact

SEQ ID NO: 1148144 - DNA, 25 bp, Homo sapien
gctgattcccctacacacataacaa

SEQ ID NO: 1148145 - DNA, 25 bp, Homo sapien
tgattcccctacacacataacaatc

SEQ ID NO: 1148146 - DNA, 25 bp, Homo sapien
tcttctttccttctttgatcttctt

SEQ ID NO: 1148147 - DNA, 25 bp, Homo sapien
ctggggcatggtgggttttgatctt

SEQ ID NO: 1148148 - DNA, 25 bp, Homo sapien
tccttctttgatcttcttccccttc

SEQ ID NO: 1148149 - DNA, 25 bp, Homo sapien
gggcatggtgggttttgatcttctt

SEQ ID NO: 1148150 - DNA, 25 bp, Homo sapien
aaggagacaaaactaaagaagcagc

SEQ ID NO: 1148151 - DNA, 25 bp, Homo sapien
gacaaaactaaagaagcagccaggg

SEQ ID NO: 1148152 - DNA, 25 bp, Homo sapien
accacagagccccactagatttcag

SEQ ID NO: 1148153 - DNA, 25 bp, Homo sapien
ccacagagccccactagatttcaga

SEQ ID NO: 1148154 - DNA, 25 bp, Homo sapien
aatgagtcaggtagttcaaagtaca

SEQ ID NO: 1148155 - DNA, 25 bp, Homo sapien
agtcaggtagttcaaagtacattga

SEQ ID NO: 1148156 - DNA, 25 bp, Homo sapien
gagtcaggtagttcaaagtacattg

SEQ ID NO: 1148157 - DNA, 25 bp, Homo sapien
tgagtcaggtagttcaaagtacatt

SEQ ID NO: 1148158 - DNA, 25 bp, Homo sapien
ctaagtactgacaccaattggaggc

SEQ ID NO: 1148159 - DNA, 25 bp, Homo sapien
taagtactgacaccaattggaggct

SEQ ID NO: 1148160 - DNA, 25 bp, Homo sapien
cttcctaagtactgacaccaattgg

SEQ ID NO: 1148161 - DNA, 25 bp, Homo sapien
tcctaagtactgacaccaattggag

SEQ ID NO: 1148162 - DNA, 25 bp, Homo sapien
ccggcagagtcctgggtgacatgct

SEQ ID NO: 1148163 - DNA, 25 bp, Homo sapien
caccggcagagtcctgggtgacatg

SEQ ID NO: 1148164 - DNA, 25 bp, Homo sapien
gcaccggcagagtcctgggtgacat

SEQ ID NO: 1148165 - DNA, 25 bp, Homo sapien
accggcagagtcctgggtgacatgc

SEQ ID NO: 1148166 - DNA, 25 bp, Homo sapien
aaccaagtaaccagtcctgatatca

SEQ ID NO: 1148167 - DNA, 25 bp, Homo sapien
agtaaggtgtctctaaaagggacag

SEQ ID NO: 1148168 - DNA, 25 bp, Homo sapien
accaagtaaccagtcctgatatcat

SEQ ID NO: 1148169 - DNA, 25 bp, Homo sapien
tggacaaactagaccttctctgccc

SEQ ID NO: 1148170 - DNA, 25 bp, Homo sapien
atcagtacccaccaaaaccaatcag

SEQ ID NO: 1148171 - DNA, 25 bp, Homo sapien
catcagtacccaccaaaaccaatca

SEQ ID NO: 1148172 - DNA, 25 bp, Homo sapien
ctaaacaccagggctagggaacact

SEQ ID NO: 1148173 - DNA, 25 bp, Homo sapien
gggctagggaacactgtggccctca

SEQ ID NO: 1148174 - DNA, 25 bp, Homo sapien
cagggctagggaacactgtggccct

SEQ ID NO: 1148175 - DNA, 25 bp, Homo sapien
aaacaccagggctagggaacactgt

SEQ ID NO: 1148176 - DNA, 25 bp, Homo sapien
tcagtgtctatgcacacccaagctt

SEQ ID NO: 1148177 - DNA, 25 bp, Homo sapien
tttgcagcaggacaggtagagcaga

SEQ ID NO: 1148178 - DNA, 25 bp, Homo sapien
ctggaactttggtgtcaatgctcaa

SEQ ID NO: 1148179 - DNA, 25 bp, Homo sapien
ccatctggctgcttgatattctaag

SEQ ID NO: 1148180 - DNA, 25 bp, Homo sapien
tatgttagtttcaacttctattcct

SEQ ID NO: 1148181 - DNA, 25 bp, Homo sapien
gattccatttagccctatactgggg

SEQ ID NO: 1148182 - DNA, 25 bp, Homo sapien
ttatgttagtttcaacttctattcc

SEQ ID NO: 1148183 - DNA, 25 bp, Homo sapien
attccatttagccctatactggggg

SEQ ID NO: 1148184 - DNA, 25 bp, Homo sapien
gagagtccctgaagatactggcctc

SEQ ID NO: 1148185 - DNA, 25 bp, Homo sapien
cctgctatgtatatccaatgtgact

SEQ ID NO: 1148186 - DNA, 25 bp, Homo sapien
gggagggtgaccaaagattgcaaaa

SEQ ID NO: 1148187 - DNA, 25 bp, Homo sapien
tgtagcaattgacccagcaaatgag

SEQ ID NO: 1148188 - DNA, 25 bp, Homo sapien
ccaagcctagtaaagcctagtctgt

SEQ ID NO: 1148189 - DNA, 25 bp, Homo sapien
cccattttgtcaccctatcttatct

SEQ ID NO: 1148190 - DNA, 25 bp, Homo sapien
agtaaagcctagtctgtgtcttcac

SEQ ID NO: 1148191 - DNA, 25 bp, Homo sapien
ttttgtcaccctatcttatctcggg

SEQ ID NO: 1148192 - DNA, 25 bp, Homo sapien
tgggaactagcaagagcacatttct

SEQ ID NO: 1148193 - DNA, 25 bp, Homo sapien
aaactcagtgaatataggaccctga

SEQ ID NO: 1148194 - DNA, 25 bp, Homo sapien
cagcactaagaaaaagatgcgtagt

SEQ ID NO: 1148195 - DNA, 25 bp, Homo sapien
ccccagcagcttgggaactagcaag

SEQ ID NO: 1148196 - DNA, 25 bp, Homo sapien
tccatagtgtgaaaatgacttgggc

SEQ ID NO: 1148197 - DNA, 25 bp, Homo sapien
cacattcccgggttaagaacagcaa

SEQ ID NO: 1148198 - DNA, 25 bp, Homo sapien
tgggtctcattggtctaaaagcgaa

SEQ ID NO: 1148199 - DNA, 25 bp, Homo sapien
ttagagcagcacttacaggattgcc

SEQ ID NO: 1148200 - DNA, 25 bp, Homo sapien
taccaccaagtatgctgaatccctg

SEQ ID NO: 1148201 - DNA, 25 bp, Homo sapien
tagacctggtgctctcacactgtag

SEQ ID NO: 1148202 - DNA, 25 bp, Homo sapien
actgtagacagtgttggataccacc

SEQ ID NO: 1148203 - DNA, 25 bp, Homo sapien
aaaaagatggccacattcagtgggc

SEQ ID NO: 1148204 - DNA, 25 bp, Homo sapien
tattggacagtacaggtctagggtc

SEQ ID NO: 1148205 - DNA, 25 bp, Homo sapien
tatgagacttgtggccgaagcgaga

SEQ ID NO: 1148206 - DNA, 25 bp, Homo sapien
gagatgatagtgtacaatccctgac

SEQ ID NO: 1148207 - DNA, 25 bp, Homo sapien
ccaccagtcctggtaagagcacagg

SEQ ID NO: 1148208 - DNA, 25 bp, Homo sapien
actgtggtaaccaaagagggtctga

SEQ ID NO: 1148209 - DNA, 25 bp, Homo sapien
caatgtctgatggatgggagatcga

SEQ ID NO: 1148210 - DNA, 25 bp, Homo sapien
tttgccttgagaatgcggagctgaa

SEQ ID NO: 1148211 - DNA, 25 bp, Homo sapien
gctgagttcagaaagctccagggaa

SEQ ID NO: 1148212 - DNA, 25 bp, Homo sapien
tataaattatgagtttctatctgtg

SEQ ID NO: 1148213 - DNA, 25 bp, Homo sapien
taggcatgcatttataccagcatgt

SEQ ID NO: 1148214 - DNA, 25 bp, Homo sapien
atctgtgtccatgaagtcttactag

SEQ ID NO: 1148215 - DNA, 25 bp, Homo sapien
tctataacctttgtaggcatgcatt

SEQ ID NO: 1148216 - DNA, 25 bp, Homo sapien
tgcagagtggggaccccactgggct

SEQ ID NO: 1148217 - DNA, 25 bp, Homo sapien
cgcgcccctgcagagtggggacccc

SEQ ID NO: 1148218 - DNA, 25 bp, Homo sapien
cgcccctgcagagtggggaccccac

SEQ ID NO: 1148219 - DNA, 25 bp, Homo sapien
caggggcgcgcccctgcagagtggg

SEQ ID NO: 1148220 - DNA, 25 bp, Homo sapien
aggggaggacgttgaggacgcggcg

SEQ ID NO: 1148221 - DNA, 25 bp, Homo sapien
ccccgaggctttgcgtctgcgcggc

SEQ ID NO: 1148222 - DNA, 25 bp, Homo sapien
gaggctttgcgtctgcgcggccggc

SEQ ID NO: 1148223 - DNA, 25 bp, Homo sapien
cgaggctttgcgtctgcgcggccgg

SEQ ID NO: 1148224 - DNA, 25 bp, Homo sapien
ccgaggctttgcgtctgcgcggccg

SEQ ID NO: 1148225 - DNA, 25 bp, Homo sapien
cgtgagccaggtgtgcaaccggatt

SEQ ID NO: 1148226 - DNA, 25 bp, Homo sapien
tgaggtcttagcagatgaaagcggc

SEQ ID NO: 1148227 - DNA, 25 bp, Homo sapien
gaggagcctcgacatcctgcagagg

SEQ ID NO: 1148228 - DNA, 25 bp, Homo sapien
gacgtggcactgtccgagaatgcag

SEQ ID NO: 1148229 - DNA, 25 bp, Homo sapien
gagtcgaggtaagggttgcacggcc

SEQ ID NO: 1148230 - DNA, 25 bp, Homo sapien
ctcaggcccttagaacccaggcggg

SEQ ID NO: 1148231 - DNA, 25 bp, Homo sapien
cgttaccaagccttccctcgcctgc

SEQ ID NO: 1148232 - DNA, 25 bp, Homo sapien
cacatcaagggagaaacactcctct

SEQ ID NO: 1148233 - DNA, 25 bp, Homo sapien
attcacattgtatgtgccggactct

SEQ ID NO: 1148234 - DNA, 25 bp, Homo sapien
caagatcttggttaaccagattcac

SEQ ID NO: 1148235 - DNA, 25 bp, Homo sapien
gctggctgcatccttaaaaaagccc

SEQ ID NO: 1148236 - DNA, 25 bp, Homo sapien
tgtatgtgccggactctttctcagg

SEQ ID NO: 1148237 - DNA, 25 bp, Homo sapien
acactccagctcttacggaaagaag

SEQ ID NO: 1148238 - DNA, 25 bp, Homo sapien
gaagcactgtcttttgcgctagtgt

SEQ ID NO: 1148239 - DNA, 25 bp, Homo sapien
gctagtgtttgtctaccgtcccctg

SEQ ID NO: 1148240 - DNA, 25 bp, Homo sapien
taaaataatgactgccctctacctg

SEQ ID NO: 1148241 - DNA, 25 bp, Homo sapien
tacaatggagctacaagattttgct

SEQ ID NO: 1148242 - DNA, 25 bp, Homo sapien
aactcactctctattgcaaaggtag

SEQ ID NO: 1148243 - DNA, 25 bp, Homo sapien
tcatatcacctactaagcccaaagc

SEQ ID NO: 1148244 - DNA, 25 bp, Homo sapien
gcaaaggtagcacaaacccatgagg

SEQ ID NO: 1148245 - DNA, 25 bp, Homo sapien
tatgcaaaattctatagcctatgat

SEQ ID NO: 1148246 - DNA, 25 bp, Homo sapien
gcattgctatacatacttgagacca

SEQ ID NO: 1148247 - DNA, 25 bp, Homo sapien
aatgcagctgtggttttacttgaac

SEQ ID NO: 1148248 - DNA, 25 bp, Homo sapien
catagtagatgaaattacatatgca

SEQ ID NO: 1148249 - DNA, 25 bp, Homo sapien
acttaagactgggtacagcagggta

SEQ ID NO: 1148250 - DNA, 25 bp, Homo sapien
cttttgaggaacagagaataaccca

SEQ ID NO: 1148251 - DNA, 25 bp, Homo sapien
ttataatgccaaatgctcacacagg

SEQ ID NO: 1148252 - DNA, 25 bp, Homo sapien
gatcaccatagattccaaagcatgt

SEQ ID NO: 1148253 - DNA, 25 bp, Homo sapien
gaaaataaatgtccataattccact

SEQ ID NO: 1148254 - DNA, 25 bp, Homo sapien
cattactaataacttgtggatcccc

SEQ ID NO: 1148255 - DNA, 25 bp, Homo sapien
cactctctagacataaccattacta

SEQ ID NO: 1148256 - DNA, 25 bp, Homo sapien
tttaccacttagaccctgacattag

SEQ ID NO: 1148257 - DNA, 25 bp, Homo sapien
tgtccattcagatcaatagtatgtg

SEQ ID NO: 1148258 - DNA, 25 bp, Homo sapien
ttgaggagctttttgatgtgaggct

SEQ ID NO: 1148259 - DNA, 25 bp, Homo sapien
ccattcagatcaatagtatgtgtga

SEQ ID NO: 1148260 - DNA, 25 bp, Homo sapien
gatcaatagtatgtgtgatcagagt

SEQ ID NO: 1148261 - DNA, 25 bp, Homo sapien
atcttagccaaaaggccgagaagcg

SEQ ID NO: 1148262 - DNA, 25 bp, Homo sapien
ttaagctgataagaacagatactac

SEQ ID NO: 1148263 - DNA, 25 bp, Homo sapien
acttgatcttagccaaaaggccgag

SEQ ID NO: 1148264 - DNA, 25 bp, Homo sapien
ttagccaaaaggccgagaagcgatt

SEQ ID NO: 1148265 - DNA, 25 bp, Homo sapien
ggaagagtgagatcacagtccgtga

SEQ ID NO: 1148266 - DNA, 25 bp, Homo sapien
tttgatcaaacaatcccgagaagga

SEQ ID NO: 1148267 - DNA, 25 bp, Homo sapien
ggtaaatccaccagacctaagactg

SEQ ID NO: 1148268 - DNA, 25 bp, Homo sapien
tctctattactaggtcagatggacc

SEQ ID NO: 1148269 - DNA, 25 bp, Homo sapien
gctgtggaccaaggcaagactcaaa

SEQ ID NO: 1148270 - DNA, 25 bp, Homo sapien
ttatgtcaagggtcacaaagagggc

SEQ ID NO: 1148271 - DNA, 25 bp, Homo sapien
taatatatactctgtcctgcaatgg

SEQ ID NO: 1148272 - DNA, 25 bp, Homo sapien
tagagaacgaatagacttaagcagt

SEQ ID NO: 1148273 - DNA, 25 bp, Homo sapien
tgttgcatcctcacctcaataaaaa

SEQ ID NO: 1148274 - DNA, 25 bp, Homo sapien
ggccggcctatctagttgtcttagc

SEQ ID NO: 1148275 - DNA, 25 bp, Homo sapien
gtataactttaccatcagagtcccc

SEQ ID NO: 1148276 - DNA, 25 bp, Homo sapien
tgtcttagcaggattttcacaaact

SEQ ID NO: 1148277 - DNA, 25 bp, Homo sapien
gactgcaacctccacctcctgggtt

SEQ ID NO: 1148278 - DNA, 25 bp, Homo sapien
gcagcagcatgatcttggctgactg

SEQ ID NO: 1148279 - DNA, 25 bp, Homo sapien
caggcgcatgtcaccacgcccagct

SEQ ID NO: 1148280 - DNA, 25 bp, Homo sapien
gtgcagcagcatgatcttggctgac

SEQ ID NO: 1148281 - DNA, 25 bp, Homo sapien
tgaaatgccttcacaagtatggtag

SEQ ID NO: 1148282 - DNA, 25 bp, Homo sapien
tagtatttgtgtttcgaccaccctg

SEQ ID NO: 1148283 - DNA, 25 bp, Homo sapien
gctgctattgtatgttgccttggac

SEQ ID NO: 1148284 - DNA, 25 bp, Homo sapien
taaaatgccttgagtccaactgcct

SEQ ID NO: 1148285 - DNA, 25 bp, Homo sapien
ggttggtttcatagtgcctctcact

SEQ ID NO: 1148286 - DNA, 25 bp, Homo sapien
gctccagtcatttgagacctcacgt

SEQ ID NO: 1148287 - DNA, 25 bp, Homo sapien
gcagaggacatccatatagctccag

SEQ ID NO: 1148288 - DNA, 25 bp, Homo sapien
gagattccctatgtcacatcatgag

SEQ ID NO: 1148289 - DNA, 25 bp, Homo sapien
gctttttgaacagacggaatgaaat

SEQ ID NO: 1148290 - DNA, 25 bp, Homo sapien
ttgacaaagagccaagaagacttgg

SEQ ID NO: 1148291 - DNA, 25 bp, Homo sapien
gggaaaccagatatgagactattca

SEQ ID NO: 1148292 - DNA, 25 bp, Homo sapien
tagatgggcgaacactcctttggag

SEQ ID NO: 1148293 - DNA, 25 bp, Homo sapien
gaaatcattagttctgactgggagg

SEQ ID NO: 1148294 - DNA, 25 bp, Homo sapien
cagagtcgggtgagtgctatactaa

SEQ ID NO: 1148295 - DNA, 25 bp, Homo sapien
tagcacctgtttgtactatcagaag

SEQ ID NO: 1148296 - DNA, 25 bp, Homo sapien
gcccagaggtaattatgatagcacc

SEQ ID NO: 1148297 - DNA, 25 bp, Homo sapien
gcttagtgttgaccagaaatacctc

SEQ ID NO: 1148298 - DNA, 25 bp, Homo sapien
cacggcaaagttaagcagaagagcc

SEQ ID NO: 1148299 - DNA, 25 bp, Homo sapien
tgaacacccactatatgtcaggtat

SEQ ID NO: 1148300 - DNA, 25 bp, Homo sapien
catgcatctgactatctttgggaaa

SEQ ID NO: 1148301 - DNA, 25 bp, Homo sapien
ctttagataggagcatggatagttg

SEQ ID NO: 1148302 - DNA, 25 bp, Homo sapien
tacctgataagggtatgaggtccat

SEQ ID NO: 1148303 - DNA, 25 bp, Homo sapien
tctaggtgttgcctttgagaggtag

SEQ ID NO: 1148304 - DNA, 25 bp, Homo sapien
tagcatgttcgtatgccaacagaat

SEQ ID NO: 1148305 - DNA, 25 bp, Homo sapien
tcatgcacatggcaagtaaacgcta

SEQ ID NO: 1148306 - DNA, 25 bp, Homo sapien
gagtacctggtatcccagcagccgt

SEQ ID NO: 1148307 - DNA, 25 bp, Homo sapien
catcaataggctcagggagagtacc

SEQ ID NO: 1148308 - DNA, 25 bp, Homo sapien
ccgtgtggcctcattctacagttaa

SEQ ID NO: 1148309 - DNA, 25 bp, Homo sapien
gacaacagggttgtcaactctctac

SEQ ID NO: 1148310 - DNA, 25 bp, Homo sapien
taatttattcctccagtcgttctgg

SEQ ID NO: 1148311 - DNA, 25 bp, Homo sapien
ccacccacctagcacagttgtattg

SEQ ID NO: 1148312 - DNA, 25 bp, Homo sapien
gatatgagcctccacatgcttctct

SEQ ID NO: 1148313 - DNA, 25 bp, Homo sapien
tatcttctcttcgtatatgaagctt

SEQ ID NO: 1148314 - DNA, 25 bp, Homo sapien
gatttgaagcttcttttagcaattc

SEQ ID NO: 1148315 - DNA, 25 bp, Homo sapien
tcttctcttcgtatatgaagcttag

SEQ ID NO: 1148316 - DNA, 25 bp, Homo sapien
ctgtatcttctcttcgtatatgaag

SEQ ID NO: 1148317 - DNA, 25 bp, Homo sapien
taggaatatgaacttcccttttagc

SEQ ID NO: 1148318 - DNA, 25 bp, Homo sapien
tctcgatttcatgatcattcaggag

SEQ ID NO: 1148319 - DNA, 25 bp, Homo sapien
aggaatatgaacttcccttttagca

SEQ ID NO: 1148320 - DNA, 25 bp, Homo sapien
aatttccatctcgatttcatgatca

SEQ ID NO: 1148321 - DNA, 25 bp, Homo sapien
ttgaatgcctggttacattctgctg

SEQ ID NO: 1148322 - DNA, 25 bp, Homo sapien
gcctggttacattctgctgtgaatc

SEQ ID NO: 1148323 - DNA, 25 bp, Homo sapien
ttctttgaatgcctggttacattct

SEQ ID NO: 1148324 - DNA, 25 bp, Homo sapien
atgcctggttacattctgctgtgaa

SEQ ID NO: 1148325 - DNA, 25 bp, Homo sapien
gagctttctggaggactctaggatt

SEQ ID NO: 1148326 - DNA, 25 bp, Homo sapien
cttcctctataacaatttggatccc

SEQ ID NO: 1148327 - DNA, 25 bp, Homo sapien
tctataacaatttggatccccttta

SEQ ID NO: 1148328 - DNA, 25 bp, Homo sapien
gctactgattcgcatgcattaattt

SEQ ID NO: 1148329 - DNA, 25 bp, Homo sapien
gttttttcgatgataccttctagaa

SEQ ID NO: 1148330 - DNA, 25 bp, Homo sapien
ttttttcgatgataccttctagaat

SEQ ID NO: 1148331 - DNA, 25 bp, Homo sapien
ttttcgatgataccttctagaattt

SEQ ID NO: 1148332 - DNA, 25 bp, Homo sapien
ggttttttcgatgataccttctaga

SEQ ID NO: 1148333 - DNA, 25 bp, Homo sapien
tgcttacaatgacctctgggacctt

SEQ ID NO: 1148334 - DNA, 25 bp, Homo sapien
caggtagccggagttataattagcc

SEQ ID NO: 1148335 - DNA, 25 bp, Homo sapien
aatctagtgcggttaccaggtagcc

SEQ ID NO: 1148336 - DNA, 25 bp, Homo sapien
gctggaccaggattgacgcacacat

SEQ ID NO: 1148337 - DNA, 25 bp, Homo sapien
tacaaggccacttctttctatagtg

SEQ ID NO: 1148338 - DNA, 25 bp, Homo sapien
tctgcatgaacttattacaaggcca

SEQ ID NO: 1148339 - DNA, 25 bp, Homo sapien
taataagggctaccatagaggtatg

SEQ ID NO: 1148340 - DNA, 25 bp, Homo sapien
ggtatattcagtcaaacgtctattg

SEQ ID NO: 1148341 - DNA, 25 bp, Homo sapien
tactggaatcttgtctgaccctgga

SEQ ID NO: 1148342 - DNA, 25 bp, Homo sapien
gaatttatgaaatccactgctgtgt

SEQ ID NO: 1148343 - DNA, 25 bp, Homo sapien
tgtgtggtaaacacccagtctccaa

SEQ ID NO: 1148344 - DNA, 25 bp, Homo sapien
tgttgtcgtccttgaccagatagag

SEQ ID NO: 1148345 - DNA, 25 bp, Homo sapien
tgagtatggcccactcctagggaga

SEQ ID NO: 1148346 - DNA, 25 bp, Homo sapien
taccgacagagtgggacatatgcct

SEQ ID NO: 1148347 - DNA, 25 bp, Homo sapien
tgcagtacactgactctgaagcaaa

SEQ ID NO: 1148348 - DNA, 25 bp, Homo sapien
ggctgcttaccctctgtaccgacag

SEQ ID NO: 1148349 - DNA, 25 bp, Homo sapien
ccttagcgttggaaggacacttctt

SEQ ID NO: 1148350 - DNA, 25 bp, Homo sapien
caaccaggagacttagttaggcaag

SEQ ID NO: 1148351 - DNA, 25 bp, Homo sapien
caagtggcaagtcttctcctaggta

SEQ ID NO: 1148352 - DNA, 25 bp, Homo sapien
gaacgagggattcggaaaacactgc

SEQ ID NO: 1148353 - DNA, 25 bp, Homo sapien
tcatgaaatccgtcgggtgggtcac

SEQ ID NO: 1148354 - DNA, 25 bp, Homo sapien
tattattgccacaaagaacccgtgt

SEQ ID NO: 1148355 - DNA, 25 bp, Homo sapien
tatcttaacatatcatggccagctg

SEQ ID NO: 1148356 - DNA, 25 bp, Homo sapien
gcagctgtcactcaaggatcttaaa

SEQ ID NO: 1148357 - DNA, 25 bp, Homo sapien
gcctatttcaggacagtatgtgccc

SEQ ID NO: 1148358 - DNA, 25 bp, Homo sapien
cactcttatccagattgagagccag

SEQ ID NO: 1148359 - DNA, 25 bp, Homo sapien
caccctggctttcaagatctccttg

SEQ ID NO: 1148360 - DNA, 25 bp, Homo sapien
ggtgggcacactgccctttcgctta

SEQ ID NO: 1148361 - DNA, 25 bp, Homo sapien
aacgctggtcttcatggttcaaagc

SEQ ID NO: 1148362 - DNA, 25 bp, Homo sapien
tagaatttcaggatggccaaagatc

SEQ ID NO: 1148363 - DNA, 25 bp, Homo sapien
tatctaattgataactgcctccctg

SEQ ID NO: 1148364 - DNA, 25 bp, Homo sapien
taacagtatccctgaaaggtgattc

SEQ ID NO: 1148365 - DNA, 25 bp, Homo sapien
ttttagggctacaggagagctagtg

SEQ ID NO: 1148366 - DNA, 25 bp, Homo sapien
aggcagccggagctctcagtctgaa

SEQ ID NO: 1148367 - DNA, 25 bp, Homo sapien
gtagactctcattaccttttagggc

SEQ ID NO: 1148368 - DNA, 25 bp, Homo sapien
tgcttctgtagcacaaggcagccgg

SEQ ID NO: 1148369 - DNA, 25 bp, Homo sapien
tagttccctgggtgctaaaaagcag

SEQ ID NO: 1148370 - DNA, 25 bp, Homo sapien
gcaggaaatactccccagacatttg

SEQ ID NO: 1148371 - DNA, 25 bp, Homo sapien
taagctgggctcctggttgtagttc

SEQ ID NO: 1148372 - DNA, 25 bp, Homo sapien
gaaatatggcgtcctttacatgcac

SEQ ID NO: 1148373 - DNA, 25 bp, Homo sapien
tcagatcctttagggtcaccaccag

SEQ ID NO: 1148374 - DNA, 25 bp, Homo sapien
ggctcagaagggtcatacagtctca

SEQ ID NO: 1148375 - DNA, 25 bp, Homo sapien
tacccagttgcaagtgaatcccagg

SEQ ID NO: 1148376 - DNA, 25 bp, Homo sapien
tagagacgcctagacacagagatgt

SEQ ID NO: 1148377 - DNA, 25 bp, Homo sapien
cctgctgatgttgattggaccaaag

SEQ ID NO: 1148378 - DNA, 25 bp, Homo sapien
tctttatccacatgatgaggctgcc

SEQ ID NO: 1148379 - DNA, 25 bp, Homo sapien
gagaatctagtttggagtccggtaa

SEQ ID NO: 1148380 - DNA, 25 bp, Homo sapien
atctagagaaaaaggtgagcccata

SEQ ID NO: 1148381 - DNA, 25 bp, Homo sapien
gagcaggtcgtagtcatgccttcaa

SEQ ID NO: 1148382 - DNA, 25 bp, Homo sapien
ggtcgtagtcatgccttcaaaattg

SEQ ID NO: 1148383 - DNA, 25 bp, Homo sapien
cgtagtcatgccttcaaaattgcct

SEQ ID NO: 1148384 - DNA, 25 bp, Homo sapien
tggccagagcaggtcgtagtcatgc

SEQ ID NO: 1148385 - DNA, 25 bp, Homo sapien
aaagtgttgggattggcatctcaaa

SEQ ID NO: 1148386 - DNA, 25 bp, Homo sapien
gcctccctaagtgccactgcgcctg

SEQ ID NO: 1148387 - DNA, 25 bp, Homo sapien
tcaaagtgtttgagccacaacacct

SEQ ID NO: 1148388 - DNA, 25 bp, Homo sapien
tgccaccacactggcaaactttgta

SEQ ID NO: 1148389 - DNA, 25 bp, Homo sapien
taggttatgccctccactgagaaag

SEQ ID NO: 1148390 - DNA, 25 bp, Homo sapien
caataagagtaggtccgcagtgctg

SEQ ID NO: 1148391 - DNA, 25 bp, Homo sapien
cctgttgttaaggaactccagatct

SEQ ID NO: 1148392 - DNA, 25 bp, Homo sapien
gctgtggaagcattcaggagaagcc

SEQ ID NO: 1148393 - DNA, 25 bp, Homo sapien
ccaaagctgagttagattttactag

SEQ ID NO: 1148394 - DNA, 25 bp, Homo sapien
gatatgttcaaataagagactggac

SEQ ID NO: 1148395 - DNA, 25 bp, Homo sapien
gcaaatactggcacattatggaacc

SEQ ID NO: 1148396 - DNA, 25 bp, Homo sapien
ctaaaagtgctcaatctgtcaaaag

SEQ ID NO: 1148397 - DNA, 25 bp, Homo sapien
tttgccaaagtagggtcgactcctc

SEQ ID NO: 1148398 - DNA, 25 bp, Homo sapien
aggacagtacactctgagatcttga

SEQ ID NO: 1148399 - DNA, 25 bp, Homo sapien
gagatactttagttcctgcccttag

SEQ ID NO: 1148400 - DNA, 25 bp, Homo sapien
gataggtagcagtactcagagagag

SEQ ID NO: 1148401 - DNA, 25 bp, Homo sapien
caggtaaatcatgcagtgttgtgtc

SEQ ID NO: 1148402 - DNA, 25 bp, Homo sapien
gaaagtcattgcaggtaaatcatgc

SEQ ID NO: 1148403 - DNA, 25 bp, Homo sapien
ttgtgtcacacgtttgttcattttc

SEQ ID NO: 1148404 - DNA, 25 bp, Homo sapien
tgcagtgttgtgtcacacgtttgtt

SEQ ID NO: 1148405 - DNA, 25 bp, Homo sapien
ccttttcattgagagatgactggaa

SEQ ID NO: 1148406 - DNA, 25 bp, Homo sapien
gaatgggtggcagatataaggccca

SEQ ID NO: 1148407 - DNA, 25 bp, Homo sapien
tatttctcgatgctgggaaacactg

SEQ ID NO: 1148408 - DNA, 25 bp, Homo sapien
cagaaaccaagctaagacgcaggga

SEQ ID NO: 1148409 - DNA, 25 bp, Homo sapien
gaaaaggtcccgtttgtgcagacat

SEQ ID NO: 1148410 - DNA, 25 bp, Homo sapien
aatatgacccatggattggtccgga

SEQ ID NO: 1148411 - DNA, 25 bp, Homo sapien
cacaagcgctgtgatactgcaacaa

SEQ ID NO: 1148412 - DNA, 25 bp, Homo sapien
gacccaggctcttcgagactttgag

SEQ ID NO: 1148413 - DNA, 25 bp, Homo sapien
gcaaactgggcattatcgctgctgg

SEQ ID NO: 1148414 - DNA, 25 bp, Homo sapien
ggtagaccgacttcttcacagcatg

SEQ ID NO: 1148415 - DNA, 25 bp, Homo sapien
cttgctcacatgtctggcaggtggt

SEQ ID NO: 1148416 - DNA, 25 bp, Homo sapien
tcgctgctggtctcacttgggatca

SEQ ID NO: 1148417 - DNA, 25 bp, Homo sapien
gtgtctagttaacttttcctcagcc

SEQ ID NO: 1148418 - DNA, 25 bp, Homo sapien
tcttactcccttggatctcctttcc

SEQ ID NO: 1148419 - DNA, 25 bp, Homo sapien
ttgcctcttactcccttggatctcc

SEQ ID NO: 1148420 - DNA, 25 bp, Homo sapien
caagtgtctagttaacttttcctca

SEQ ID NO: 1148421 - DNA, 25 bp, Homo sapien
caatgaattagccaagatgttctcc

SEQ ID NO: 1148422 - DNA, 25 bp, Homo sapien
tgtactatgcactaataaagcctgc

SEQ ID NO: 1148423 - DNA, 25 bp, Homo sapien
gctgcacgaaaaacaattgaagagg

SEQ ID NO: 1148424 - DNA, 25 bp, Homo sapien
tcctcaaggctgtatattatctgca

SEQ ID NO: 1148425 - DNA, 25 bp, Homo sapien
gcccgatgtgccctgtctggtattt

SEQ ID NO: 1148426 - DNA, 25 bp, Homo sapien
gtgaagatttctgccaagatccagc

SEQ ID NO: 1148427 - DNA, 25 bp, Homo sapien
ccatctgggacttaacaaagtgaag

SEQ ID NO: 1148428 - DNA, 25 bp, Homo sapien
tcaggtggcatgtgtagcccgatgt

SEQ ID NO: 1148429 - DNA, 25 bp, Homo sapien
ggttcaatgcctactcctgtgagga

SEQ ID NO: 1148430 - DNA, 25 bp, Homo sapien
caagaaagagcaaacttcagcagtc

SEQ ID NO: 1148431 - DNA, 25 bp, Homo sapien
tgttaaatgagctccaagaatatgg

SEQ ID NO: 1148432 - DNA, 25 bp, Homo sapien
ttgaaacagaaaccagcaactcatg

SEQ ID NO: 1148433 - DNA, 25 bp, Homo sapien
tgcaaaaggtaagtttcagaggtgg

SEQ ID NO: 1148434 - DNA, 25 bp, Homo sapien
cttaacattcagtctagggctctag

SEQ ID NO: 1148435 - DNA, 25 bp, Homo sapien
gtggagagaccatacaccatccctg

SEQ ID NO: 1148436 - DNA, 25 bp, Homo sapien
gattgtagggtgcattgccaggacc

SEQ ID NO: 1148437 - DNA, 25 bp, Homo sapien
ctggagattcgtgggcaaggcttct

SEQ ID NO: 1148438 - DNA, 25 bp, Homo sapien
ccttagggagagagaggtcgcccct

SEQ ID NO: 1148439 - DNA, 25 bp, Homo sapien
gcaggttcggccacgtcaaatccat

SEQ ID NO: 1148440 - DNA, 25 bp, Homo sapien
tggaaaatggagcagacctggacga

SEQ ID NO: 1148441 - DNA, 25 bp, Homo sapien
tcttcctgtagttggttgattgtat

SEQ ID NO: 1148442 - DNA, 25 bp, Homo sapien
cttggtaccgcgtcctctaagctct

SEQ ID NO: 1148443 - DNA, 25 bp, Homo sapien
tctaagaccttcgttgggatgggcg

SEQ ID NO: 1148444 - DNA, 25 bp, Homo sapien
ggcgtgtaacctgggccgattctgc

SEQ ID NO: 1148445 - DNA, 25 bp, Homo sapien
tccttgaagctattggtagagccca

SEQ ID NO: 1148446 - DNA, 25 bp, Homo sapien
tcaggaagcttctccctccttgaag

SEQ ID NO: 1148447 - DNA, 25 bp, Homo sapien
ttggtagagcccagttgctggcgaa

SEQ ID NO: 1148448 - DNA, 25 bp, Homo sapien
ttgctggcgaaactgaaaaacgagg

SEQ ID NO: 1148449 - DNA, 25 bp, Homo sapien
agtgtctggaagagcttgctctctg

SEQ ID NO: 1148450 - DNA, 25 bp, Homo sapien
ctcccaagatggctccttgttgcca

SEQ ID NO: 1148451 - DNA, 25 bp, Homo sapien
gtgtctggaagagcttgctctctgc

SEQ ID NO: 1148452 - DNA, 25 bp, Homo sapien
gttgccacagatgctgtgtcctcac

SEQ ID NO: 1148453 - DNA, 25 bp, Homo sapien
taattctagcatggttcagcagggc

SEQ ID NO: 1148454 - DNA, 25 bp, Homo sapien
tagtggccacagttagggttgctca

SEQ ID NO: 1148455 - DNA, 25 bp, Homo sapien
gtttgacttatccagcagcttaggc

SEQ ID NO: 1148456 - DNA, 25 bp, Homo sapien
caagtaagtctctaagggtagccca

SEQ ID NO: 1148457 - DNA, 25 bp, Homo sapien
ttcgaacttcctcctttagctcgga

SEQ ID NO: 1148458 - DNA, 25 bp, Homo sapien
acttctttgccatgggttcgaactt

SEQ ID NO: 1148459 - DNA, 25 bp, Homo sapien
ttctagttagccattggtctaattt

SEQ ID NO: 1148460 - DNA, 25 bp, Homo sapien
tagccattggtctaattttttttca

SEQ ID NO: 1148461 - DNA, 25 bp, Homo sapien
cagactcaaggcgagggaattacac

SEQ ID NO: 1148462 - DNA, 25 bp, Homo sapien
gctccagtgtcctacccgagggtag

SEQ ID NO: 1148463 - DNA, 25 bp, Homo sapien
taaggttcacatctatggctccagt

SEQ ID NO: 1148464 - DNA, 25 bp, Homo sapien
tcaaccaccgctggaagacattgct

SEQ ID NO: 1148465 - DNA, 25 bp, Homo sapien
taccatgggccatatcaccagtgcc

SEQ ID NO: 1148466 - DNA, 25 bp, Homo sapien
ggttaatggttctccgctaagggca

SEQ ID NO: 1148467 - DNA, 25 bp, Homo sapien
caaacaactagagcatcagagcccc

SEQ ID NO: 1148468 - DNA, 25 bp, Homo sapien
taaatgtagacaaaaagccagtggg

SEQ ID NO: 1148469 - DNA, 25 bp, Homo sapien
ttatacatcatgacaaagtggcatt

SEQ ID NO: 1148470 - DNA, 25 bp, Homo sapien
gaaaaagattatacatcatgacaaa

SEQ ID NO: 1148471 - DNA, 25 bp, Homo sapien
taatgcaccatattacaaaggacaa

SEQ ID NO: 1148472 - DNA, 25 bp, Homo sapien
tgcaccatattacaaaggacaaagg

SEQ ID NO: 1148473 - DNA, 25 bp, Homo sapien
tagtacctttgtgtcccttggccag

SEQ ID NO: 1148474 - DNA, 25 bp, Homo sapien
taccacatggcatagggcaaaccag

SEQ ID NO: 1148475 - DNA, 25 bp, Homo sapien
tctgtgtgccatttctctacggagg

SEQ ID NO: 1148476 - DNA, 25 bp, Homo sapien
taggcagacttcactccagaaacag

SEQ ID NO: 1148477 - DNA, 25 bp, Homo sapien
tcacagcccttagctgtgtcctccg

SEQ ID NO: 1148478 - DNA, 25 bp, Homo sapien
acagcccttagctgtgtcctccgca

SEQ ID NO: 1148479 - DNA, 25 bp, Homo sapien
cacagcccttagctgtgtcctccgc

SEQ ID NO: 1148480 - DNA, 25 bp, Homo sapien
tgcaaacgcttaagattcctgctcc

SEQ ID NO: 1148481 - DNA, 25 bp, Homo sapien
gctccccacagttctgccagattcc

SEQ ID NO: 1148482 - DNA, 25 bp, Homo sapien
aaaaaagctattgccctgagcatcc

SEQ ID NO: 1148483 - DNA, 25 bp, Homo sapien
tgagcatccccttcttgagcccctt

SEQ ID NO: 1148484 - DNA, 25 bp, Homo sapien
caatctttttgtttccccagtgcca

SEQ ID NO: 1148485 - DNA, 25 bp, Homo sapien
aatctttttgtttccccagtgccat

SEQ ID NO: 1148486 - DNA, 25 bp, Homo sapien
tgaataagcatgaggtgaaccaggg

SEQ ID NO: 1148487 - DNA, 25 bp, Homo sapien
atgataaagtggcagatcagcaaat

SEQ ID NO: 1148488 - DNA, 25 bp, Homo sapien
gataggcagagtccagtcgaggtat

SEQ ID NO: 1148489 - DNA, 25 bp, Homo sapien
tgtagatagtgtactgctaagctga

SEQ ID NO: 1148490 - DNA, 25 bp, Homo sapien
gttcattcaactttcgaaagagtta

SEQ ID NO: 1148491 - DNA, 25 bp, Homo sapien
gttacttagcctgactctgatactg

SEQ ID NO: 1148492 - DNA, 25 bp, Homo sapien
catctggtaggggactgttcattca

SEQ ID NO: 1148493 - DNA, 25 bp, Homo sapien
tgactctgatactgttgaaggtccc

SEQ ID NO: 1148494 - DNA, 25 bp, Homo sapien
gtgcaaatcttctaggtaggcaaaa

SEQ ID NO: 1148495 - DNA, 25 bp, Homo sapien
gccaacgtcttagggaaggcagctt

SEQ ID NO: 1148496 - DNA, 25 bp, Homo sapien
ataaaggaatagggtcgggacacag

SEQ ID NO: 1148497 - DNA, 25 bp, Homo sapien
taggcaaaagccaacgtcttaggga

SEQ ID NO: 1148498 - DNA, 25 bp, Homo sapien
tatctaaggctgctatcagaatcct

SEQ ID NO: 1148499 - DNA, 25 bp, Homo sapien
cagaatccttagaggaattaagacc

SEQ ID NO: 1148500 - DNA, 25 bp, Homo sapien
gacgaccattcaggagaaatgtcct

SEQ ID NO: 1148501 - DNA, 25 bp, Homo sapien
tcctggatttgccactgtccatggt

SEQ ID NO: 1148502 - DNA, 25 bp, Homo sapien
cagtgttgatggagcctaggtttct

SEQ ID NO: 1148503 - DNA, 25 bp, Homo sapien
tattggccaccatgatcctctgcac

SEQ ID NO: 1148504 - DNA, 25 bp, Homo sapien
gagagtgcttctcctcgttgtaaca

SEQ ID NO: 1148505 - DNA, 25 bp, Homo sapien
taggtttcttcgagcacaactgtca

SEQ ID NO: 1148506 - DNA, 25 bp, Homo sapien
gacaaagctattgcttggagaagtc

SEQ ID NO: 1148507 - DNA, 25 bp, Homo sapien
tctttaaagagcttacatgtccaca

SEQ ID NO: 1148508 - DNA, 25 bp, Homo sapien
tcccatataggaattgcaagtctgt

SEQ ID NO: 1148509 - DNA, 25 bp, Homo sapien
taaggaacctatttgtgaccatttc

SEQ ID NO: 1148510 - DNA, 25 bp, Homo sapien
tagaagtgcaggttctggcctcaga

SEQ ID NO: 1148511 - DNA, 25 bp, Homo sapien
gacattggtcaagtcatgtaaccta

SEQ ID NO: 1148512 - DNA, 25 bp, Homo sapien
gcctcagactctttggttcagatat

SEQ ID NO: 1148513 - DNA, 25 bp, Homo sapien
tgtaaagtgagcaacaatgcctgca

SEQ ID NO: 1148514 - DNA, 25 bp, Homo sapien
tgatgaaaaatacagctactgctgc

SEQ ID NO: 1148515 - DNA, 25 bp, Homo sapien
caagtttggcataagtggaatgcat

SEQ ID NO: 1148516 - DNA, 25 bp, Homo sapien
tgttcaagtacttcgcatcctggcg

SEQ ID NO: 1148517 - DNA, 25 bp, Homo sapien
tatttcttggacagactggacaaat

SEQ ID NO: 1148518 - DNA, 25 bp, Homo sapien
caatagacaagatctgtggagcaca

SEQ ID NO: 1148519 - DNA, 25 bp, Homo sapien
atgagaatgccccagccagtgctgt

SEQ ID NO: 1148520 - DNA, 25 bp, Homo sapien
gctgtaattataacctgggcctgcc

SEQ ID NO: 1148521 - DNA, 25 bp, Homo sapien
taatatatatggcttggcacccaga

SEQ ID NO: 1148522 - DNA, 25 bp, Homo sapien
gatccctcagggttataaaattgct

SEQ ID NO: 1148523 - DNA, 25 bp, Homo sapien
gcagcatgcaactctcaacaatgag

SEQ ID NO: 1148524 - DNA, 25 bp, Homo sapien
caggaatgaagtgctctcagagact

SEQ ID NO: 1148525 - DNA, 25 bp, Homo sapien
cagcaggagccttttagggacttaa

SEQ ID NO: 1148526 - DNA, 25 bp, Homo sapien
gatggtctaaactcctcagcatgat

SEQ ID NO: 1148527 - DNA, 25 bp, Homo sapien
ccctatgggctaagctgaatcaagc

SEQ ID NO: 1148528 - DNA, 25 bp, Homo sapien
gcacatgccattgactcttcctaga

SEQ ID NO: 1148529 - DNA, 25 bp, Homo sapien
tgttgtctatgcttaccctatgggc

SEQ ID NO: 1148530 - DNA, 25 bp, Homo sapien
tatagtggtgtaaagagtacttact

SEQ ID NO: 1148531 - DNA, 25 bp, Homo sapien
caaatcttagctctattactttcta

SEQ ID NO: 1148532 - DNA, 25 bp, Homo sapien
ctttggtcagtgtgagaaataagct

SEQ ID NO: 1148533 - DNA, 25 bp, Homo sapien
gtcagtgtgagaaataagctcctaa

SEQ ID NO: 1148534 - DNA, 25 bp, Homo sapien
ctctctccacaaagttaattcaaat

SEQ ID NO: 1148535 - DNA, 25 bp, Homo sapien
caattttttgctgtggaaccagatc

SEQ ID NO: 1148536 - DNA, 25 bp, Homo sapien
ccttgaatgcactacaggaaaatat

SEQ ID NO: 1148537 - DNA, 25 bp, Homo sapien
aaatggagttttcaaggctctgggt

SEQ ID NO: 1148538 - DNA, 25 bp, Homo sapien
ggagcttgtttcttgaagaattctt

SEQ ID NO: 1148539 - DNA, 25 bp, Homo sapien
gagcttgtttcttgaagaattcttg

SEQ ID NO: 1148540 - DNA, 25 bp, Homo sapien
cagtaatataggtaactgttgaagc

SEQ ID NO: 1148541 - DNA, 25 bp, Homo sapien
gagtggaggtatgctttagatgcaa

SEQ ID NO: 1148542 - DNA, 25 bp, Homo sapien
tatgggatattcaaaacagatatat

SEQ ID NO: 1148543 - DNA, 25 bp, Homo sapien
gatgcaattatttatgggatattca

SEQ ID NO: 1148544 - DNA, 25 bp, Homo sapien
caagtttgaaggtatatttgggagt

SEQ ID NO: 1148545 - DNA, 25 bp, Homo sapien
acttggactgaatagtgacactcgg

SEQ ID NO: 1148546 - DNA, 25 bp, Homo sapien
cctggaacccagtctagcaaaatga

SEQ ID NO: 1148547 - DNA, 25 bp, Homo sapien
gatgacattttctgaccaggcacat

SEQ ID NO: 1148548 - DNA, 25 bp, Homo sapien
tctgctgagtatgacaaatagtgtc

SEQ ID NO: 1148549 - DNA, 25 bp, Homo sapien
catgatattcttagaggtaataagg

SEQ ID NO: 1148550 - DNA, 25 bp, Homo sapien
tcttagaggtaataaggtaatgatg

SEQ ID NO: 1148551 - DNA, 25 bp, Homo sapien
gatattcttagaggtaataaggtaa

SEQ ID NO: 1148552 - DNA, 25 bp, Homo sapien
ttgtacatgatattcttagaggtaa

SEQ ID NO: 1148553 - DNA, 25 bp, Homo sapien
tttctatcttcaatggactaagatt

SEQ ID NO: 1148554 - DNA, 25 bp, Homo sapien
aattatatacttaacatagcagaga

SEQ ID NO: 1148555 - DNA, 25 bp, Homo sapien
ataagactgcttccacctgaaatgc

SEQ ID NO: 1148556 - DNA, 25 bp, Homo sapien
taagactgcttccacctgaaatgct

SEQ ID NO: 1148557 - DNA, 25 bp, Homo sapien
ggagtggagtcttgaaatctaattc

SEQ ID NO: 1148558 - DNA, 25 bp, Homo sapien
tctaaatgccagtcagtgatgatcg

SEQ ID NO: 1148559 - DNA, 25 bp, Homo sapien
catcacagttgagtgaaatggcctt

SEQ ID NO: 1148560 - DNA, 25 bp, Homo sapien
tgatgatcgcatcacagttgagtga

SEQ ID NO: 1148561 - DNA, 25 bp, Homo sapien
gctggtgagtagcagccggtaccca

SEQ ID NO: 1148562 - DNA, 25 bp, Homo sapien
ccagaccagtggattgtcccaggag

SEQ ID NO: 1148563 - DNA, 25 bp, Homo sapien
tgtcataaacctgtacatgcagagt

SEQ ID NO: 1148564 - DNA, 25 bp, Homo sapien
aaccaagaccgaaagcacagaacat

SEQ ID NO: 1148565 - DNA, 25 bp, Homo sapien
ctacgaccgcgagggcttcaagaag

SEQ ID NO: 1148566 - DNA, 25 bp, Homo sapien
ccgcgagggcttcaagaagcgggcg

SEQ ID NO: 1148567 - DNA, 25 bp, Homo sapien
gggcttcaagaagcgggcggcgtgc

SEQ ID NO: 1148568 - DNA, 25 bp, Homo sapien
gagggcttcaagaagcgggcggcgt

SEQ ID NO: 1148569 - DNA, 25 bp, Homo sapien
gatgaagttcaagcccaaccagacg

SEQ ID NO: 1148570 - DNA, 25 bp, Homo sapien
tatgatgaagttcaagcccaaccag

SEQ ID NO: 1148571 - DNA, 25 bp, Homo sapien
tctatgatgaagttcaagcccaacc

SEQ ID NO: 1148572 - DNA, 25 bp, Homo sapien
agttcaagcccaaccagacgcggac

SEQ ID NO: 1148573 - DNA, 25 bp, Homo sapien
tctagaacagttacctctagtctct

SEQ ID NO: 1148574 - DNA, 25 bp, Homo sapien
ttctagaacagttacctctagtctc

SEQ ID NO: 1148575 - DNA, 25 bp, Homo sapien
tgcttctcccgcaaaagcaagtttt

SEQ ID NO: 1148576 - DNA, 25 bp, Homo sapien
caatcccttagtcatgtcttgcttc

SEQ ID NO: 1148577 - DNA, 25 bp, Homo sapien
ctttcaatcccttagtcatgtcttg

SEQ ID NO: 1148578 - DNA, 25 bp, Homo sapien
gtcttgcttctcccgcaaaagcaag

SEQ ID NO: 1148579 - DNA, 25 bp, Homo sapien
ccggatttactaaggctcctgtgct

SEQ ID NO: 1148580 - DNA, 25 bp, Homo sapien
tttactaaggctcctgtgctcttca

SEQ ID NO: 1148581 - DNA, 25 bp, Homo sapien
tcatcagatttaccccagctttcca

SEQ ID NO: 1148582 - DNA, 25 bp, Homo sapien
cttcatcagatttaccccagctttc

SEQ ID NO: 1148583 - DNA, 25 bp, Homo sapien
aacaagccaactccaaacaggtaat

SEQ ID NO: 1148584 - DNA, 25 bp, Homo sapien
acaagccaactccaaacaggtaata

SEQ ID NO: 1148585 - DNA, 25 bp, Homo sapien
gccaggcgttccagttagaagtctg

SEQ ID NO: 1148586 - DNA, 25 bp, Homo sapien
ggcgttccagttagaagtctgctca

SEQ ID NO: 1148587 - DNA, 25 bp, Homo sapien
ttgtccaagagccaggcgttccagt

SEQ ID NO: 1148588 - DNA, 25 bp, Homo sapien
caggcgttccagttagaagtctgct

SEQ ID NO: 1148589 - DNA, 25 bp, Homo sapien
catcatgtgtattgttatagttagc

SEQ ID NO: 1148590 - DNA, 25 bp, Homo sapien
catgtgtattgttatagttagccag

SEQ ID NO: 1148591 - DNA, 25 bp, Homo sapien
ttgttatagttagccagacaccaag

SEQ ID NO: 1148592 - DNA, 25 bp, Homo sapien
tgtattgttatagttagccagacac

SEQ ID NO: 1148593 - DNA, 25 bp, Homo sapien
gagtctgcaacaccagctaatgggc

SEQ ID NO: 1148594 - DNA, 25 bp, Homo sapien
ctggcccttctgatttggatggtca

SEQ ID NO: 1148595 - DNA, 25 bp, Homo sapien
aaccccttggagtaccacagtggag

SEQ ID NO: 1148596 - DNA, 25 bp, Homo sapien
tctgatttggatggtcatctgccct

SEQ ID NO: 1148597 - DNA, 25 bp, Homo sapien
gccagtaatcccctgggctttgact

SEQ ID NO: 1148598 - DNA, 25 bp, Homo sapien
ggctttgacttagctgagcgtggac

SEQ ID NO: 1148599 - DNA, 25 bp, Homo sapien
cgtggactcagtttcagttgcttgg

SEQ ID NO: 1148600 - DNA, 25 bp, Homo sapien
gatgccagtaatcccctgggctttg

SEQ ID NO: 1148601 - DNA, 25 bp, Homo sapien
tcattcaatggagttgttctgagcc

SEQ ID NO: 1148602 - DNA, 25 bp, Homo sapien
ttggccacgctagcttaggtttttc

SEQ ID NO: 1148603 - DNA, 25 bp, Homo sapien
ctatattggccacgctagcttaggt

SEQ ID NO: 1148604 - DNA, 25 bp, Homo sapien
taaaacctatattggccacgctagc

SEQ ID NO: 1148605 - DNA, 25 bp, Homo sapien
ccattaaaacctatattggccacgc

SEQ ID NO: 1148606 - DNA, 25 bp, Homo sapien
gcacattctgattgttgtggtgacc

SEQ ID NO: 1148607 - DNA, 25 bp, Homo sapien
cacattctgattgttgtggtgacca

SEQ ID NO: 1148608 - DNA, 25 bp, Homo sapien
cattctgattgttgtggtgaccaga

SEQ ID NO: 1148609 - DNA, 25 bp, Homo sapien
ctgcacattctgattgttgtggtga

SEQ ID NO: 1148610 - DNA, 25 bp, Homo sapien
tttaggacagtcatcccaccaagta

SEQ ID NO: 1148611 - DNA, 25 bp, Homo sapien
tgaactgagcactctgcaatgggcc

SEQ ID NO: 1148612 - DNA, 25 bp, Homo sapien
aacagtcctgccaaccgtggatgct

SEQ ID NO: 1148613 - DNA, 25 bp, Homo sapien
cagcacgctgctgcatctgagacca

SEQ ID NO: 1148614 - DNA, 25 bp, Homo sapien
gctgaagttagaagacaacctttaa

SEQ ID NO: 1148615 - DNA, 25 bp, Homo sapien
aaaaaagatttctggtagccgccag

SEQ ID NO: 1148616 - DNA, 25 bp, Homo sapien
gccgccagaagctaagaacagattc

SEQ ID NO: 1148617 - DNA, 25 bp, Homo sapien
ttacttatgtaaactctgagtgctg

SEQ ID NO: 1148618 - DNA, 25 bp, Homo sapien
gccgccgcccgaagtttggctgaaa

SEQ ID NO: 1148619 - DNA, 25 bp, Homo sapien
tcctgcttcaaaggctcaggccctg

SEQ ID NO: 1148620 - DNA, 25 bp, Homo sapien
tggctgaaactttctcgggtgtgca

SEQ ID NO: 1148621 - DNA, 25 bp, Homo sapien
gggtcccgatagaggagccccactc

SEQ ID NO: 1148622 - DNA, 25 bp, Homo sapien
ggcgcagggcgggtatcttctcggt

SEQ ID NO: 1148623 - DNA, 25 bp, Homo sapien
cgcagggcgggtatcttctcggtcg

SEQ ID NO: 1148624 - DNA, 25 bp, Homo sapien
catgcgcgggggtcgcgcagcacag

SEQ ID NO: 1148625 - DNA, 25 bp, Homo sapien
agggcgggtatcttctcggtcgcct

SEQ ID NO: 1148626 - DNA, 25 bp, Homo sapien
tccaggattacagagcagggctcca

SEQ ID NO: 1148627 - DNA, 25 bp, Homo sapien
gaagccctttgaattgacgtatcca

SEQ ID NO: 1148628 - DNA, 25 bp, Homo sapien
acctttcaaagacgcgagcagcaca

SEQ ID NO: 1148629 - DNA, 25 bp, Homo sapien
agaagcagtaaaacacagcctcggc

SEQ ID NO: 1148630 - DNA, 25 bp, Homo sapien
gcctggtactgtccaatgaatctaa

SEQ ID NO: 1148631 - DNA, 25 bp, Homo sapien
gctagtaaatttagagcaaggcttg

SEQ ID NO: 1148632 - DNA, 25 bp, Homo sapien
gagaagggccattgctcctgagagc

SEQ ID NO: 1148633 - DNA, 25 bp, Homo sapien
taaaattgaggcacaccatgcttca

SEQ ID NO: 1148634 - DNA, 25 bp, Homo sapien
atctccccaaactgaaagtgtacct

SEQ ID NO: 1148635 - DNA, 25 bp, Homo sapien
aataaggtatgcctatagataaaat

SEQ ID NO: 1148636 - DNA, 25 bp, Homo sapien
tctccccaaactgaaagtgtacctc

SEQ ID NO: 1148637 - DNA, 25 bp, Homo sapien
tatgcctatagataaaatctcccca

SEQ ID NO: 1148638 - DNA, 25 bp, Homo sapien
tttgtaactaaaacggctggcatca

SEQ ID NO: 1148639 - DNA, 25 bp, Homo sapien
cactatctaagggactacaggattc

SEQ ID NO: 1148640 - DNA, 25 bp, Homo sapien
ccactgactggctaggtgatctgga

SEQ ID NO: 1148641 - DNA, 25 bp, Homo sapien
tacaggattccaccagacaatggca

SEQ ID NO: 1148642 - DNA, 25 bp, Homo sapien
tccaaggaagttaccaagaattgct

SEQ ID NO: 1148643 - DNA, 25 bp, Homo sapien
caattccagggagctacatgtacaa

SEQ ID NO: 1148644 - DNA, 25 bp, Homo sapien
catgtacaatcaaacggactcctgc

SEQ ID NO: 1148645 - DNA, 25 bp, Homo sapien
tagaaatgcaatctaccaggtcccg

SEQ ID NO: 1148646 - DNA, 25 bp, Homo sapien
cttttaactagctgcataatcttgg

SEQ ID NO: 1148647 - DNA, 25 bp, Homo sapien
tgtctgacataaaatacatactcaa

SEQ ID NO: 1148648 - DNA, 25 bp, Homo sapien
gtaaagcacttagccacactgtgtc

SEQ ID NO: 1148649 - DNA, 25 bp, Homo sapien
aagagaaataggctcacctataagc

SEQ ID NO: 1148650 - DNA, 25 bp, Homo sapien
taggttctaataagctcagaaacta

SEQ ID NO: 1148651 - DNA, 25 bp, Homo sapien
acattaggttctaataagctcagaa

SEQ ID NO: 1148652 - DNA, 25 bp, Homo sapien
gaaatatctaaatatggagattata

SEQ ID NO: 1148653 - DNA, 25 bp, Homo sapien
cattaggttctaataagctcagaaa

SEQ ID NO: 1148654 - DNA, 25 bp, Homo sapien
agtacatgcttttaagtacacttgc

SEQ ID NO: 1148655 - DNA, 25 bp, Homo sapien
tacatgcttttaagtacacttgctg

SEQ ID NO: 1148656 - DNA, 25 bp, Homo sapien
gcttttaagtacacttgctggaaaa

SEQ ID NO: 1148657 - DNA, 25 bp, Homo sapien
catgcttttaagtacacttgctgga

SEQ ID NO: 1148658 - DNA, 25 bp, Homo sapien
cttccagaagcactacttgtaacat

SEQ ID NO: 1148659 - DNA, 25 bp, Homo sapien
tgggtgcaaaaatcacggcctgttc

SEQ ID NO: 1148660 - DNA, 25 bp, Homo sapien
cctacctgtaccaagctgagagcga

SEQ ID NO: 1148661 - DNA, 25 bp, Homo sapien
tgtctgtacccctaactgcaagcaa

SEQ ID NO: 1148662 - DNA, 25 bp, Homo sapien
aatcctggtgcagtggagggactca

SEQ ID NO: 1148663 - DNA, 25 bp, Homo sapien
caggcaaattcaggaagagggtcat

SEQ ID NO: 1148664 - DNA, 25 bp, Homo sapien
aggctgcaggcccaaacaggcaaat

SEQ ID NO: 1148665 - DNA, 25 bp, Homo sapien
ttcccacactgataagcccaatgca

SEQ ID NO: 1148666 - DNA, 25 bp, Homo sapien
tccctgtaaggctcaaatgctccct

SEQ ID NO: 1148667 - DNA, 25 bp, Homo sapien
catttacacagggttcatagccatc

SEQ ID NO: 1148668 - DNA, 25 bp, Homo sapien
tccttcatttacacagggttcatag

SEQ ID NO: 1148669 - DNA, 25 bp, Homo sapien
tacacagggttcatagccatctcga

SEQ ID NO: 1148670 - DNA, 25 bp, Homo sapien
cacagggttcatagccatctcgaca

SEQ ID NO: 1148671 - DNA, 25 bp, Homo sapien
tgcagtatcctgtgccattgtggta

SEQ ID NO: 1148672 - DNA, 25 bp, Homo sapien
ctgtgccattgtggtaggtaacaca

SEQ ID NO: 1148673 - DNA, 25 bp, Homo sapien
tgccattgtggtaggtaacacacat

SEQ ID NO: 1148674 - DNA, 25 bp, Homo sapien
ttgcagtatcctgtgccattgtggt

SEQ ID NO: 1148675 - DNA, 25 bp, Homo sapien
gctcttaagccaagaactagcctac

SEQ ID NO: 1148676 - DNA, 25 bp, Homo sapien
tataataatacacacccaaagcccc

SEQ ID NO: 1148677 - DNA, 25 bp, Homo sapien
aaaacgtcttggctagagtagatgg

SEQ ID NO: 1148678 - DNA, 25 bp, Homo sapien
taatattcacatatactgggccgaa

SEQ ID NO: 1148679 - DNA, 25 bp, Homo sapien
gtgctgaagtaaacacacatgtgca

SEQ ID NO: 1148680 - DNA, 25 bp, Homo sapien
ccccacgtgcattaggtattcatcc

SEQ ID NO: 1148681 - DNA, 25 bp, Homo sapien
cacgtgcattaggtattcatcctaa

SEQ ID NO: 1148682 - DNA, 25 bp, Homo sapien
tgcatactattccatcgtgtataca

SEQ ID NO: 1148683 - DNA, 25 bp, Homo sapien
tctgaacctctctaagaagcccaag

SEQ ID NO: 1148684 - DNA, 25 bp, Homo sapien
ccatactaggtcataaggcaaaaga

SEQ ID NO: 1148685 - DNA, 25 bp, Homo sapien
tgtgccttacttgcctcaccatggt

SEQ ID NO: 1148686 - DNA, 25 bp, Homo sapien
tatgtggtacgcataaatagcatgc

SEQ ID NO: 1148687 - DNA, 25 bp, Homo sapien
aaagtctcatgtgggttgcgtcggc

SEQ ID NO: 1148688 - DNA, 25 bp, Homo sapien
tgagttagctcagttgttcccaagg

SEQ ID NO: 1148689 - DNA, 25 bp, Homo sapien
tgactacataaaccaccagggacct

SEQ ID NO: 1148690 - DNA, 25 bp, Homo sapien
taagcatcggtcagtaacaaaggtc

SEQ ID NO: 1148691 - DNA, 25 bp, Homo sapien
tgtctctgatccttccaacagcaga

SEQ ID NO: 1148692 - DNA, 25 bp, Homo sapien
tctctgatccttccaacagcagatg

SEQ ID NO: 1148693 - DNA, 25 bp, Homo sapien
ctgtctctgatccttccaacagcag

SEQ ID NO: 1148694 - DNA, 25 bp, Homo sapien
tctgatccttccaacagcagatgta

SEQ ID NO: 1148695 - DNA, 25 bp, Homo sapien
tctatgactgtagcctaatttcaga

SEQ ID NO: 1148696 - DNA, 25 bp, Homo sapien
cttctatgactgtagcctaatttca

SEQ ID NO: 1148697 - DNA, 25 bp, Homo sapien
tatgactgtagcctaatttcagata

SEQ ID NO: 1148698 - DNA, 25 bp, Homo sapien
actgtagcctaatttcagatattcc

SEQ ID NO: 1148699 - DNA, 25 bp, Homo sapien
cagagctgcataagataagcatggc

SEQ ID NO: 1148700 - DNA, 25 bp, Homo sapien
gagcggctaaggctctgggcatctt

SEQ ID NO: 1148701 - DNA, 25 bp, Homo sapien
cccagagctgcataagataagcatg

SEQ ID NO: 1148702 - DNA, 25 bp, Homo sapien
agcaaggagcggctaaggctctggg

SEQ ID NO: 1148703 - DNA, 25 bp, Homo sapien
gctggtgccccaaatatgtgattca

SEQ ID NO: 1148704 - DNA, 25 bp, Homo sapien
tattcaaacgcaaaatgcaccccag

SEQ ID NO: 1148705 - DNA, 25 bp, Homo sapien
tcaggtggctgacattacaacggaa

SEQ ID NO: 1148706 - DNA, 25 bp, Homo sapien
gctgctatatatttggctggtgccc

SEQ ID NO: 1148707 - DNA, 25 bp, Homo sapien
tgtaaacccgacttgacaggtgcac

SEQ ID NO: 1148708 - DNA, 25 bp, Homo sapien
taggtatcccggctgagcatatggc

SEQ ID NO: 1148709 - DNA, 25 bp, Homo sapien
tcgagacacaaagcatggatgagat

SEQ ID NO: 1148710 - DNA, 25 bp, Homo sapien
catatggcatgtgccgccattcagg

SEQ ID NO: 1148711 - DNA, 25 bp, Homo sapien
tctgctgaaggtaggaaagcactgg

SEQ ID NO: 1148712 - DNA, 25 bp, Homo sapien
gctgaaggtaggaaagcactggctt

SEQ ID NO: 1148713 - DNA, 25 bp, Homo sapien
ccatgatctaaaagatgctaaataa

SEQ ID NO: 1148714 - DNA, 25 bp, Homo sapien
tgctgaaggtaggaaagcactggct

SEQ ID NO: 1148715 - DNA, 25 bp, Homo sapien
tttcaggtcctaacatttgtgctca

SEQ ID NO: 1148716 - DNA, 25 bp, Homo sapien
tcaggactgctacggacctccacca

SEQ ID NO: 1148717 - DNA, 25 bp, Homo sapien
ttcaggtcctaacatttgtgctcat

SEQ ID NO: 1148718 - DNA, 25 bp, Homo sapien
atatattatgtataggcactaactt

SEQ ID NO: 1148719 - DNA, 25 bp, Homo sapien
tattatgtataggcactaacttgct

SEQ ID NO: 1148720 - DNA, 25 bp, Homo sapien
aaagaaagaatcaaccctgaatttg

SEQ ID NO: 1148721 - DNA, 25 bp, Homo sapien
tgaatttggtttccatatatattat

SEQ ID NO: 1148722 - DNA, 25 bp, Homo sapien
gccacagtggtacaggtacttccat

SEQ ID NO: 1148723 - DNA, 25 bp, Homo sapien
tggccacagtggtacaggtacttcc

SEQ ID NO: 1148724 - DNA, 25 bp, Homo sapien
ggccacagtggtacaggtacttcca

SEQ ID NO: 1148725 - DNA, 25 bp, Homo sapien
aagtgaagtcaccagtctgccgaca

SEQ ID NO: 1148726 - DNA, 25 bp, Homo sapien
gtctgccgacaggtgcctccattga

SEQ ID NO: 1148727 - DNA, 25 bp, Homo sapien
acagtactggcctgtgaagccctga

SEQ ID NO: 1148728 - DNA, 25 bp, Homo sapien
acagggcacatacaggctgtcacag

SEQ ID NO: 1148729 - DNA, 25 bp, Homo sapien
ctcagtttatggaccacagtgggcc

SEQ ID NO: 1148730 - DNA, 25 bp, Homo sapien
aaaaagcaattgagccacacccact

SEQ ID NO: 1148731 - DNA, 25 bp, Homo sapien
ccctgacatgctaaattatcccctg

SEQ ID NO: 1148732 - DNA, 25 bp, Homo sapien
taatcctgggacactagggagctcc

SEQ ID NO: 1148733 - DNA, 25 bp, Homo sapien
ctaattctcatcgtgttcttttcca

SEQ ID NO: 1148734 - DNA, 25 bp, Homo sapien
taattctcatcgtgttcttttccat

SEQ ID NO: 1148735 - DNA, 25 bp, Homo sapien
tttaaagcactttattaaccacaca

SEQ ID NO: 1148736 - DNA, 25 bp, Homo sapien
accacacatacatattttccagtgt

SEQ ID NO: 1148737 - DNA, 25 bp, Homo sapien
aagcactttattaaccacacataca

SEQ ID NO: 1148738 - DNA, 25 bp, Homo sapien
taaagcactttattaaccacacata

SEQ ID NO: 1148739 - DNA, 25 bp, Homo sapien
gaatctaagattcccactctgaaag

SEQ ID NO: 1148740 - DNA, 25 bp, Homo sapien
tgtgccacgcatagtctctcatata

SEQ ID NO: 1148741 - DNA, 25 bp, Homo sapien
cagagaaaatcaagggcagctgggt

SEQ ID NO: 1148742 - DNA, 25 bp, Homo sapien
gattaacagaggatcccctcctcag

SEQ ID NO: 1148743 - DNA, 25 bp, Homo sapien
ttccaaatacatagcatggtgccta

SEQ ID NO: 1148744 - DNA, 25 bp, Homo sapien
gcaggcagtcaatacatttttacca

SEQ ID NO: 1148745 - DNA, 25 bp, Homo sapien
taattaaatagcttgttcttgtgac

SEQ ID NO: 1148746 - DNA, 25 bp, Homo sapien
tgtgacaatgctttgtatagctgta

SEQ ID NO: 1148747 - DNA, 25 bp, Homo sapien
tacaaccagagaataagagacagcc

SEQ ID NO: 1148748 - DNA, 25 bp, Homo sapien
ttatgggaccctgaaaagcaagaac

SEQ ID NO: 1148749 - DNA, 25 bp, Homo sapien
taaactgcctcggtttcaggaccca

SEQ ID NO: 1148750 - DNA, 25 bp, Homo sapien
taagcatggaagtacctggcacagt

SEQ ID NO: 1148751 - DNA, 25 bp, Homo sapien
tactttaatgatatagggatatcac

SEQ ID NO: 1148752 - DNA, 25 bp, Homo sapien
catatcatcagcctgtggagtacag

SEQ ID NO: 1148753 - DNA, 25 bp, Homo sapien
gatatagggatatcacatatcatca

SEQ ID NO: 1148754 - DNA, 25 bp, Homo sapien
gtgcttaggctttactttaatgata

SEQ ID NO: 1148755 - DNA, 25 bp, Homo sapien
taatacaccctggaaagtggtatga

SEQ ID NO: 1148756 - DNA, 25 bp, Homo sapien
gtggtatgatcatttctgcatctgc

SEQ ID NO: 1148757 - DNA, 25 bp, Homo sapien
catcaggtaaaacagacttagggcc

SEQ ID NO: 1148758 - DNA, 25 bp, Homo sapien
tcaaaggagctaaaataatacaccc

SEQ ID NO: 1148759 - DNA, 25 bp, Homo sapien
gaaatagggtgcctttgacaaatca

SEQ ID NO: 1148760 - DNA, 25 bp, Homo sapien
tagaaggtctacaatccacttggag

SEQ ID NO: 1148761 - DNA, 25 bp, Homo sapien
gcagcataggcaagaacatccagca

SEQ ID NO: 1148762 - DNA, 25 bp, Homo sapien
taatcaccgtgataagtgctgtgct

SEQ ID NO: 1148763 - DNA, 25 bp, Homo sapien
acctcgggccacttaactgattaat

SEQ ID NO: 1148764 - DNA, 25 bp, Homo sapien
ttaatcatggcaatgagggcaggga

SEQ ID NO: 1148765 - DNA, 25 bp, Homo sapien
gagtctttagaacctgtcatcccca

SEQ ID NO: 1148766 - DNA, 25 bp, Homo sapien
cagggaccagaaaagagtctttaga

SEQ ID NO: 1148767 - DNA, 25 bp, Homo sapien
ccatatgttttctgggatcccggag

SEQ ID NO: 1148768 - DNA, 25 bp, Homo sapien
gaatcaagttagactccctcctcgc

SEQ ID NO: 1148769 - DNA, 25 bp, Homo sapien
cagcattaccatctgacgcagcaat

SEQ ID NO: 1148770 - DNA, 25 bp, Homo sapien
ccgtactaaagggagtctactgctt

SEQ ID NO: 1148771 - DNA, 25 bp, Homo sapien
ttaatgaaaatacaaggcatggaga

SEQ ID NO: 1148772 - DNA, 25 bp, Homo sapien
gggattacaagagtaaaccactgag

SEQ ID NO: 1148773 - DNA, 25 bp, Homo sapien
gattacaagagtaaaccactgagcc

SEQ ID NO: 1148774 - DNA, 25 bp, Homo sapien
tacaagagtaaaccactgagcctgg

SEQ ID NO: 1148775 - DNA, 25 bp, Homo sapien
tccttttcttgtaagctgagcagct

SEQ ID NO: 1148776 - DNA, 25 bp, Homo sapien
ctatgactgctgaagtttgaattct

SEQ ID NO: 1148777 - DNA, 25 bp, Homo sapien
agcagcttaggaaagattggccatg

SEQ ID NO: 1148778 - DNA, 25 bp, Homo sapien
ttgaattcttagcagtatgattcct

SEQ ID NO: 1148779 - DNA, 25 bp, Homo sapien
actgaaagaacctgctaaatttcga

SEQ ID NO: 1148780 - DNA, 25 bp, Homo sapien
tgtgttcccacttccctaatgttcc

SEQ ID NO: 1148781 - DNA, 25 bp, Homo sapien
ctgaaagaacctgctaaatttcgag

SEQ ID NO: 1148782 - DNA, 25 bp, Homo sapien
ttcccacttccctaatgttccagtg

SEQ ID NO: 1148783 - DNA, 25 bp, Homo sapien
ggatcaggacgtcagacacattcca

SEQ ID NO: 1148784 - DNA, 25 bp, Homo sapien
gggatcaggacgtcagacacattcc

SEQ ID NO: 1148785 - DNA, 25 bp, Homo sapien
cagggatcaggacgtcagacacatt

SEQ ID NO: 1148786 - DNA, 25 bp, Homo sapien
gatcaggacgtcagacacattccag

SEQ ID NO: 1148787 - DNA, 25 bp, Homo sapien
atctccatgcactgcgcaattccat

SEQ ID NO: 1148788 - DNA, 25 bp, Homo sapien
ctcatcctgctgagccatctccatg

SEQ ID NO: 1148789 - DNA, 25 bp, Homo sapien
tgattcggggtcctcccaaggctcc

SEQ ID NO: 1148790 - DNA, 25 bp, Homo sapien
ttccatcagtgattcggggtcctcc

SEQ ID NO: 1148791 - DNA, 25 bp, Homo sapien
tccagtgacactgtaaggatactgc

SEQ ID NO: 1148792 - DNA, 25 bp, Homo sapien
gacagctaatcacgtatttggccat

SEQ ID NO: 1148793 - DNA, 25 bp, Homo sapien
ccagaatgggtcacgggaagagtat

SEQ ID NO: 1148794 - DNA, 25 bp, Homo sapien
cacaaagtgtcatgggttacttgag

SEQ ID NO: 1148795 - DNA, 25 bp, Homo sapien
cttgctgctgcatcccattgttaga

SEQ ID NO: 1148796 - DNA, 25 bp, Homo sapien
acctgatgctattttgttgtttcca

SEQ ID NO: 1148797 - DNA, 25 bp, Homo sapien
tagaccagtttgacatccctacgtc

SEQ ID NO: 1148798 - DNA, 25 bp, Homo sapien
gaccatctatcttgggaagttttgt

SEQ ID NO: 1148799 - DNA, 25 bp, Homo sapien
tgtggccagcgtgccaggtaaccgt

SEQ ID NO: 1148800 - DNA, 25 bp, Homo sapien
ggactgagggatgtcagtaactgaa

SEQ ID NO: 1148801 - DNA, 25 bp, Homo sapien
ttgtggcagaagaggtggagtcagg

SEQ ID NO: 1148802 - DNA, 25 bp, Homo sapien
gtttgtggcagaagaggtggagtca

SEQ ID NO: 1148803 - DNA, 25 bp, Homo sapien
gtggcagaagaggtggagtcaggga

SEQ ID NO: 1148804 - DNA, 25 bp, Homo sapien
gctgacgtttgtggcagaagaggtg

SEQ ID NO: 1148805 - DNA, 25 bp, Homo sapien
gggcgcaatgtctcgttgatttcta

SEQ ID NO: 1148806 - DNA, 25 bp, Homo sapien
cgcaatgtctcgttgatttctagaa

SEQ ID NO: 1148807 - DNA, 25 bp, Homo sapien
ccagctgggggcgcaatgtctcgtt

SEQ ID NO: 1148808 - DNA, 25 bp, Homo sapien
ccagttgagttagaaaacatttctc

SEQ ID NO: 1148809 - DNA, 25 bp, Homo sapien
tgaactgtcgctcattcctcagcat

SEQ ID NO: 1148810 - DNA, 25 bp, Homo sapien
aatgagaagacgcagtcagtcagga

SEQ ID NO: 1148811 - DNA, 25 bp, Homo sapien
gaaggtcagcacatgttgaaaggaa

SEQ ID NO: 1148812 - DNA, 25 bp, Homo sapien
catagtgcatcttgcggccactaga

SEQ ID NO: 1148813 - DNA, 25 bp, Homo sapien
tcaaggagacctccaagcagaaggt

SEQ ID NO: 1148814 - DNA, 25 bp, Homo sapien
ctcatacaatgagcgggaggcatct

SEQ ID NO: 1148815 - DNA, 25 bp, Homo sapien
gctgggtcagctctcgttcctgaga

SEQ ID NO: 1148816 - DNA, 25 bp, Homo sapien
aaggtgctgtgccagtctacacccc

SEQ ID NO: 1148817 - DNA, 25 bp, Homo sapien
gagggcctggagatgctcatacaat

SEQ ID NO: 1148818 - DNA, 25 bp, Homo sapien
gatgattccagtactttctcagcct

SEQ ID NO: 1148819 - DNA, 25 bp, Homo sapien
tcagcctcctcaacttgaacatctt

SEQ ID NO: 1148820 - DNA, 25 bp, Homo sapien
ctgggggcagatgattccagtactt

SEQ ID NO: 1148821 - DNA, 25 bp, Homo sapien
agcctcctcaacttgaacatcttca

SEQ ID NO: 1148822 - DNA, 25 bp, Homo sapien
tgcaacagaccatggctgccatggg

SEQ ID NO: 1148823 - DNA, 25 bp, Homo sapien
tatccctgcatggtacagacatgac

SEQ ID NO: 1148824 - DNA, 25 bp, Homo sapien
tgaggaggatgaagactcagctatc

SEQ ID NO: 1148825 - DNA, 25 bp, Homo sapien
tcagtgcactgaacagataggagct

SEQ ID NO: 1148826 - DNA, 25 bp, Homo sapien
gaggattctctgtctacaaccagag

SEQ ID NO: 1148827 - DNA, 25 bp, Homo sapien
atgagaggattctctgtctacaacc

SEQ ID NO: 1148828 - DNA, 25 bp, Homo sapien
gagtctagcctgacagaagtgaatg

SEQ ID NO: 1148829 - DNA, 25 bp, Homo sapien
gcgcccctggtcagagacttacttt

SEQ ID NO: 1148830 - DNA, 25 bp, Homo sapien
tagcctagacagaggtatgagacac

SEQ ID NO: 1148831 - DNA, 25 bp, Homo sapien
cagaattgatcttccatagcctaga

SEQ ID NO: 1148832 - DNA, 25 bp, Homo sapien
caggaagccggacagttgagttaga

SEQ ID NO: 1148833 - DNA, 25 bp, Homo sapien
gaagccggacagttgagttagaaaa

SEQ ID NO: 1148834 - DNA, 25 bp, Homo sapien
ccggacagttgagttagaaaacatt

SEQ ID NO: 1148835 - DNA, 25 bp, Homo sapien
acagttgagttagaaaacatttctc

SEQ ID NO: 1148836 - DNA, 25 bp, Homo sapien
tgaactgtcgctcattcctcagcat

SEQ ID NO: 1148837 - DNA, 25 bp, Homo sapien
gcccctgggacttgtccggctcata

SEQ ID NO: 1148838 - DNA, 25 bp, Homo sapien
cttgtccggctcatacggagtgagg

SEQ ID NO: 1148839 - DNA, 25 bp, Homo sapien
aaggtgctgtgccagtctacacccc

SEQ ID NO: 1148840 - DNA, 25 bp, Homo sapien
ggacttgtccggctcatacggagtg

SEQ ID NO: 1148841 - DNA, 25 bp, Homo sapien
atcttcatcgtcatcgttgtcattt

SEQ ID NO: 1148842 - DNA, 25 bp, Homo sapien
agccacctcaacttgaacatcttca

SEQ ID NO: 1148843 - DNA, 25 bp, Homo sapien
tgatttctgcactttctcagccacc

SEQ ID NO: 1148844 - DNA, 25 bp, Homo sapien
ctgggggcagatgatttctgcactt

SEQ ID NO: 1148845 - DNA, 25 bp, Homo sapien
gaataatgtgtacagcatcctccca

SEQ ID NO: 1148846 - DNA, 25 bp, Homo sapien
ctggttggagtcataagagccatgg

SEQ ID NO: 1148847 - DNA, 25 bp, Homo sapien
tatgtggctggttggagtcataaga

SEQ ID NO: 1148848 - DNA, 25 bp, Homo sapien
gtggctggttggagtcataagagcc

SEQ ID NO: 1148849 - DNA, 25 bp, Homo sapien
ctgggagacactggccctttttctt

SEQ ID NO: 1148850 - DNA, 25 bp, Homo sapien
ttcctcttcctcatcatcactttca

SEQ ID NO: 1148851 - DNA, 25 bp, Homo sapien
ctcttcctcatcatcactttcattt

SEQ ID NO: 1148852 - DNA, 25 bp, Homo sapien
tcttcctcatcatcactttcatttt

SEQ ID NO: 1148853 - DNA, 25 bp, Homo sapien
tgagagagtcgaataaccttcatcc

SEQ ID NO: 1148854 - DNA, 25 bp, Homo sapien
gaggaattgagagagtcgaataacc

SEQ ID NO: 1148855 - DNA, 25 bp, Homo sapien
gaattgagagagtcgaataaccttc

SEQ ID NO: 1148856 - DNA, 25 bp, Homo sapien
aggaggaattgagagagtcgaataa

SEQ ID NO: 1148857 - DNA, 25 bp, Homo sapien
aaatgtgctgctgtaagactggtac

SEQ ID NO: 1148858 - DNA, 25 bp, Homo sapien
gcctatgtcaacagccatgcagact

SEQ ID NO: 1148859 - DNA, 25 bp, Homo sapien
tgtgctgctgtaagactggtacgag

SEQ ID NO: 1148860 - DNA, 25 bp, Homo sapien
tgtaagactggtacgaggccaacat

SEQ ID NO: 1148861 - DNA, 25 bp, Homo sapien
actggagctttatcaccttcacaat

SEQ ID NO: 1148862 - DNA, 25 bp, Homo sapien
gaactggagctttatcaccttcaca

SEQ ID NO: 1148863 - DNA, 25 bp, Homo sapien
ggagctttatcaccttcacaatgga

SEQ ID NO: 1148864 - DNA, 25 bp, Homo sapien
ctgggccatgaactggagctttatc

SEQ ID NO: 1148865 - DNA, 25 bp, Homo sapien
agacttgactccagagtgactgaag

SEQ ID NO: 1148866 - DNA, 25 bp, Homo sapien
tgactccagagtgactgaagtctac

SEQ ID NO: 1148867 - DNA, 25 bp, Homo sapien
cttgactccagagtgactgaagtct

SEQ ID NO: 1148868 - DNA, 25 bp, Homo sapien
gacttgactccagagtgactgaagt

SEQ ID NO: 1148869 - DNA, 25 bp, Homo sapien
tgccttgagttcaatgtcgtgacag

SEQ ID NO: 1148870 - DNA, 25 bp, Homo sapien
gtgacagtcagtccaggttggcacg

SEQ ID NO: 1148871 - DNA, 25 bp, Homo sapien
gttcaatgtcgtgacagtcagtcca

SEQ ID NO: 1148872 - DNA, 25 bp, Homo sapien
caatgtcgtgacagtcagtccaggt

SEQ ID NO: 1148873 - DNA, 25 bp, Homo sapien
gcaggtaaagaaccacacagacatg

SEQ ID NO: 1148874 - DNA, 25 bp, Homo sapien
gggcaggtaaagaaccacacagaca

SEQ ID NO: 1148875 - DNA, 25 bp, Homo sapien
tgggcaggtaaagaaccacacagac

SEQ ID NO: 1148876 - DNA, 25 bp, Homo sapien
cttgggcaggtaaagaaccacacag

SEQ ID NO: 1148877 - DNA, 25 bp, Homo sapien
agaggtagacaagggtgacactggc

SEQ ID NO: 1148878 - DNA, 25 bp, Homo sapien
gagctaaaacaagcgaacttagaag

SEQ ID NO: 1148879 - DNA, 25 bp, Homo sapien
ggacagatgagctaaaacaagcgaa

SEQ ID NO: 1148880 - DNA, 25 bp, Homo sapien
ctaaaacaagcgaacttagaagaca

SEQ ID NO: 1148881 - DNA, 25 bp, Homo sapien
gatgagctaaaacaagcgaacttag

SEQ ID NO: 1148882 - DNA, 25 bp, Homo sapien
gttgcctcttggtcctcctttttca

SEQ ID NO: 1148883 - DNA, 25 bp, Homo sapien
acctgttgcctcttggtcctccttt

SEQ ID NO: 1148884 - DNA, 25 bp, Homo sapien
tttttcacttgatcccaccgatgtc

SEQ ID NO: 1148885 - DNA, 25 bp, Homo sapien
ctgggacctgttgcctcttggtcct

SEQ ID NO: 1148886 - DNA, 25 bp, Homo sapien
tgttgctccaatatgtaaaaggcac

SEQ ID NO: 1148887 - DNA, 25 bp, Homo sapien
catctatcctgtgagtcctggaaga

SEQ ID NO: 1148888 - DNA, 25 bp, Homo sapien
gagtcagtcagttcaagacaacctg

SEQ ID NO: 1148889 - DNA, 25 bp, Homo sapien
catccatgtcaatagccaagccaac

SEQ ID NO: 1148890 - DNA, 25 bp, Homo sapien
gggcatgatgggtcttggtcttctt

SEQ ID NO: 1148891 - DNA, 25 bp, Homo sapien
catgatgggtcttggtcttcttcca

SEQ ID NO: 1148892 - DNA, 25 bp, Homo sapien
tgatgggtcttggtcttcttccact

SEQ ID NO: 1148893 - DNA, 25 bp, Homo sapien
gcatgatgggtcttggtcttcttcc

SEQ ID NO: 1148894 - DNA, 25 bp, Homo sapien
gctcaagattccatgcagttgccat

SEQ ID NO: 1148895 - DNA, 25 bp, Homo sapien
tcgggacacacagcgaacagtgatc

SEQ ID NO: 1148896 - DNA, 25 bp, Homo sapien
ccatacagcctttgaggtatggtca

SEQ ID NO: 1148897 - DNA, 25 bp, Homo sapien
taattttccataaacttgctcaaga

SEQ ID NO: 1148898 - DNA, 25 bp, Homo sapien
taacatctatccagtgagtcctgca

SEQ ID NO: 1148899 - DNA, 25 bp, Homo sapien
ataacatctatccagtgagtcctgc

SEQ ID NO: 1148900 - DNA, 25 bp, Homo sapien
aataacatctatccagtgagtcctg

SEQ ID NO: 1148901 - DNA, 25 bp, Homo sapien
gtctaggcttccaactgagactaca

SEQ ID NO: 1148902 - DNA, 25 bp, Homo sapien
ttcattacaacctatatgcgcccat

SEQ ID NO: 1148903 - DNA, 25 bp, Homo sapien
tcattacaacctatatgcgcccata

SEQ ID NO: 1148904 - DNA, 25 bp, Homo sapien
atgtctaggcttccaactgagacta

SEQ ID NO: 1148905 - DNA, 25 bp, Homo sapien
gggcatggtgggccttggtcttctt

SEQ ID NO: 1148906 - DNA, 25 bp, Homo sapien
ctggggcatggtgggccttggtctt

SEQ ID NO: 1148907 - DNA, 25 bp, Homo sapien
tggggcatggtgggccttggtcttc

SEQ ID NO: 1148908 - DNA, 25 bp, Homo sapien
gcatggtgggccttggtcttcttcc

SEQ ID NO: 1148909 - DNA, 25 bp, Homo sapien
aagtagctgttcacaattgctcagt

SEQ ID NO: 1148910 - DNA, 25 bp, Homo sapien
agtagctgttcacaattgctcagtt

SEQ ID NO: 1148911 - DNA, 25 bp, Homo sapien
tagctgttcacaattgctcagttac

SEQ ID NO: 1148912 - DNA, 25 bp, Homo sapien
gtagctgttcacaattgctcagtta

SEQ ID NO: 1148913 - DNA, 25 bp, Homo sapien
aacagagccccaactaggtttcatg

SEQ ID NO: 1148914 - DNA, 25 bp, Homo sapien
agccccaactaggtttcatgggtag

SEQ ID NO: 1148915 - DNA, 25 bp, Homo sapien
cagagccccaactaggtttcatggg

SEQ ID NO: 1148916 - DNA, 25 bp, Homo sapien
acacaacagagccccaactaggttt

SEQ ID NO: 1148917 - DNA, 25 bp, Homo sapien
taacatctatccagtgagtcctgca

SEQ ID NO: 1148918 - DNA, 25 bp, Homo sapien
ataacatctatccagtgagtcctgc

SEQ ID NO: 1148919 - DNA, 25 bp, Homo sapien
aataacatctatccagtgagtcctg

SEQ ID NO: 1148920 - DNA, 25 bp, Homo sapien
cctcaggctcctcagcataagaata

SEQ ID NO: 1148921 - DNA, 25 bp, Homo sapien
ggctcctcagcataagaataggaca

SEQ ID NO: 1148922 - DNA, 25 bp, Homo sapien
tcaggctcctcagcataagaatagg

SEQ ID NO: 1148923 - DNA, 25 bp, Homo sapien
caggctcctcagcataagaatagga

SEQ ID NO: 1148924 - DNA, 25 bp, Homo sapien
gggcatggtgggttttgatcttctt

SEQ ID NO: 1148925 - DNA, 25 bp, Homo sapien
tccttctttgatcttcttccccttc

SEQ ID NO: 1148926 - DNA, 25 bp, Homo sapien
ctggggcatggtgggttttgatctt

SEQ ID NO: 1148927 - DNA, 25 bp, Homo sapien
tcttctttccttctttgatcttctt

SEQ ID NO: 1148928 - DNA, 25 bp, Homo sapien
gtgccctcatgacacacagcaaact

SEQ ID NO: 1148929 - DNA, 25 bp, Homo sapien
atatgctcaaaattcgatgcagtgg

SEQ ID NO: 1148930 - DNA, 25 bp, Homo sapien
cagtggccatgagagtacagctttt

SEQ ID NO: 1148931 - DNA, 25 bp, Homo sapien
tcaaaattcgatgcagtggccatga

SEQ ID NO: 1148932 - DNA, 25 bp, Homo sapien
aataacatctatccagtgagtcctg

SEQ ID NO: 1148933 - DNA, 25 bp, Homo sapien
taacatctatccagtgagtcctgca

SEQ ID NO: 1148934 - DNA, 25 bp, Homo sapien
ataacatctatccagtgagtcctgc

SEQ ID NO: 1148935 - DNA, 25 bp, Homo sapien
tgttgctccaatacataaaaggcac

SEQ ID NO: 1148936 - DNA, 25 bp, Homo sapien
catccatgtcaacagcgaagccaac

SEQ ID NO: 1148937 - DNA, 25 bp, Homo sapien
aacacgctgttgctccaatacataa

SEQ ID NO: 1148938 - DNA, 25 bp, Homo sapien
tgtcaacagcgaagccaacacgctg

SEQ ID NO: 1148939 - DNA, 25 bp, Homo sapien
tgatgggtcttggtcttcttccact

SEQ ID NO: 1148940 - DNA, 25 bp, Homo sapien
gggcatgatgggtcttggtcttctt

SEQ ID NO: 1148941 - DNA, 25 bp, Homo sapien
catgatgggtcttggtcttcttcca

SEQ ID NO: 1148942 - DNA, 25 bp, Homo sapien
gcatgatgggtcttggtcttcttcc

SEQ ID NO: 1148943 - DNA, 25 bp, Homo sapien
aataacatctatccagtgagtcctg

SEQ ID NO: 1148944 - DNA, 25 bp, Homo sapien
ataacatctatccagtgagtcctgc

SEQ ID NO: 1148945 - DNA, 25 bp, Homo sapien
taacatctatccagtgagtcctgca

SEQ ID NO: 1148946 - DNA, 25 bp, Homo sapien
tggggcatggtgggccttggtcttc

SEQ ID NO: 1148947 - DNA, 25 bp, Homo sapien
gggcatggtgggccttggtcttctt

SEQ ID NO: 1148948 - DNA, 25 bp, Homo sapien
ctggggcatggtgggccttggtctt

SEQ ID NO: 1148949 - DNA, 25 bp, Homo sapien
gcatggtgggccttggtcttcttcc

SEQ ID NO: 1148950 - DNA, 25 bp, Homo sapien
cagagccccaactaggtttcatggg

SEQ ID NO: 1148951 - DNA, 25 bp, Homo sapien
aacagagccccaactaggtttcatg

SEQ ID NO: 1148952 - DNA, 25 bp, Homo sapien
agccccaactaggtttcatgggtag

SEQ ID NO: 1148953 - DNA, 25 bp, Homo sapien
acacaacagagccccaactaggttt

SEQ ID NO: 1148954 - DNA, 25 bp, Homo sapien
taacatctatccagtgagtcctgca

SEQ ID NO: 1148955 - DNA, 25 bp, Homo sapien
aataacatctatccagtgagtcctg

SEQ ID NO: 1148956 - DNA, 25 bp, Homo sapien
ataacatctatccagtgagtcctgc

SEQ ID NO: 1148957 - DNA, 25 bp, Homo sapien
ggctcctcagcataagaataggaca

SEQ ID NO: 1148958 - DNA, 25 bp, Homo sapien
tcaggctcctcagcataagaatagg

SEQ ID NO: 1148959 - DNA, 25 bp, Homo sapien
cctcaggctcctcagcataagaata

SEQ ID NO: 1148960 - DNA, 25 bp, Homo sapien
caggctcctcagcataagaatagga

SEQ ID NO: 1148961 - DNA, 25 bp, Homo sapien
tccttctttgatcttcttccccttc

SEQ ID NO: 1148962 - DNA, 25 bp, Homo sapien
tctttccttctttgatcttcttccc

SEQ ID NO: 1148963 - DNA, 25 bp, Homo sapien
cttcttctttccttctttgatcttc

SEQ ID NO: 1148964 - DNA, 25 bp, Homo sapien
tcttctttccttctttgatcttctt

SEQ ID NO: 1148965 - DNA, 25 bp, Homo sapien
ctggggcatggtgggttttgatctt

SEQ ID NO: 1148966 - DNA, 25 bp, Homo sapien
ggggcatggtgggttttgatcttct

SEQ ID NO: 1148967 - DNA, 25 bp, Homo sapien
gggcatggtgggttttgatcttctt

SEQ ID NO: 1148968 - DNA, 25 bp, Homo sapien
tggggcatggtgggttttgatcttc

SEQ ID NO: 1148969 - DNA, 25 bp, Homo sapien
taacatctatccagtgagtcctgca

SEQ ID NO: 1148970 - DNA, 25 bp, Homo sapien
aataacatctatccagtgagtcctg

SEQ ID NO: 1148971 - DNA, 25 bp, Homo sapien
ataacatctatccagtgagtcctgc

SEQ ID NO: 1148972 - DNA, 25 bp, Homo sapien
tgttgctccaatacataaaaggcac

SEQ ID NO: 1148973 - DNA, 25 bp, Homo sapien
aacacgctgttgctccaatacataa

SEQ ID NO: 1148974 - DNA, 25 bp, Homo sapien
catccatgtcaacagcgaagccaac

SEQ ID NO: 1148975 - DNA, 25 bp, Homo sapien
tgtcaacagcgaagccaacacgctg

SEQ ID NO: 1148976 - DNA, 25 bp, Homo sapien
tgatgggtcttggtcttcttccact

SEQ ID NO: 1148977 - DNA, 25 bp, Homo sapien
gggcatgatgggtcttggtcttctt

SEQ ID NO: 1148978 - DNA, 25 bp, Homo sapien
catgatgggtcttggtcttcttcca

SEQ ID NO: 1148979 - DNA, 25 bp, Homo sapien
gcatgatgggtcttggtcttcttcc

SEQ ID NO: 1148980 - DNA, 25 bp, Homo sapien
aataacatctatccagtgagtcctg

SEQ ID NO: 1148981 - DNA, 25 bp, Homo sapien
ataacatctatccagtgagtcctgc

SEQ ID NO: 1148982 - DNA, 25 bp, Homo sapien
taacatctatccagtgagtcctgca

SEQ ID NO: 1148983 - DNA, 25 bp, Homo sapien
gcatggtgggtcttggtcttcttcc

SEQ ID NO: 1148984 - DNA, 25 bp, Homo sapien
ggggcatggtgggtcttggtcttct

SEQ ID NO: 1148985 - DNA, 25 bp, Homo sapien
ggcatggtgggtcttggtcttcttc

SEQ ID NO: 1148986 - DNA, 25 bp, Homo sapien
ctggggcatggtgggtcttggtctt

SEQ ID NO: 1148987 - DNA, 25 bp, Homo sapien
aataacatctatccagtgagtcctg

SEQ ID NO: 1148988 - DNA, 25 bp, Homo sapien
taacatctatccagtgagtcctgca

SEQ ID NO: 1148989 - DNA, 25 bp, Homo sapien
ataacatctatccagtgagtcctgc

SEQ ID NO: 1148990 - DNA, 25 bp, Homo sapien
gtccctattctagtagatcgttatc

SEQ ID NO: 1148991 - DNA, 25 bp, Homo sapien
gattgttcatggttgtgaggacttt

SEQ ID NO: 1148992 - DNA, 25 bp, Homo sapien
aaaatgtccctattctagtagatcg

SEQ ID NO: 1148993 - DNA, 25 bp, Homo sapien
ctcatcaaatactcagattgttcat

SEQ ID NO: 1148994 - DNA, 25 bp, Homo sapien
tcaggctcctcagcataagaatagg

SEQ ID NO: 1148995 - DNA, 25 bp, Homo sapien
cctcaggctcctcagcataagaata

SEQ ID NO: 1148996 - DNA, 25 bp, Homo sapien
ggctcctcagcataagaataggaca

SEQ ID NO: 1148997 - DNA, 25 bp, Homo sapien
caggctcctcagcataagaatagga

SEQ ID NO: 1148998 - DNA, 25 bp, Homo sapien
ttcccctacacacataacaatccac

SEQ ID NO: 1148999 - DNA, 25 bp, Homo sapien
tgattcccctacacacataacaatc

SEQ ID NO: 1149000 - DNA, 25 bp, Homo sapien
gctgattcccctacacacataacaa

SEQ ID NO: 1149001 - DNA, 25 bp, Homo sapien
tcccctacacacataacaatccact

SEQ ID NO: 1149002 - DNA, 25 bp, Homo sapien
ctggggcatggtgggttttgatctt

SEQ ID NO: 1149003 - DNA, 25 bp, Homo sapien
tccttctttgatcttcttccccttc

SEQ ID NO: 1149004 - DNA, 25 bp, Homo sapien
tcttctttccttctttgatcttctt

SEQ ID NO: 1149005 - DNA, 25 bp, Homo sapien
gggcatggtgggttttgatcttctt

SEQ ID NO: 1149006 - DNA, 25 bp, Homo sapien
atatgctcaaaattcgatgcagtgg

SEQ ID NO: 1149007 - DNA, 25 bp, Homo sapien
cagtggccatgagagtacagctttt

SEQ ID NO: 1149008 - DNA, 25 bp, Homo sapien
tcaaaattcgatgcagtggccatga

SEQ ID NO: 1149009 - DNA, 25 bp, Homo sapien
gtgccctcatgacacacagcaaact

SEQ ID NO: 1149010 - DNA, 25 bp, Homo sapien
tgaataacatctatccagtgagtct

SEQ ID NO: 1149011 - DNA, 25 bp, Homo sapien
agtgagtcttgcaagacttcaggcc

SEQ ID NO: 1149012 - DNA, 25 bp, Homo sapien
ataacatctatccagtgagtcttgc

SEQ ID NO: 1149013 - DNA, 25 bp, Homo sapien
cttgcaagacttcaggccctttctc

SEQ ID NO: 1149014 - DNA, 25 bp, Homo sapien
gctgttgctccaatacataaaaggc

SEQ ID NO: 1149015 - DNA, 25 bp, Homo sapien
tgttgctccaatacataaaaggcac

SEQ ID NO: 1149016 - DNA, 25 bp, Homo sapien
aacacgctgttgctccaatacataa

SEQ ID NO: 1149017 - DNA, 25 bp, Homo sapien
tgtcaacagccatgccaacacgctg

SEQ ID NO: 1149018 - DNA, 25 bp, Homo sapien
tgatgggtcttggtcttcttccact

SEQ ID NO: 1149019 - DNA, 25 bp, Homo sapien
gggcatgatgggtcttggtcttctt

SEQ ID NO: 1149020 - DNA, 25 bp, Homo sapien
gcatgatgggtcttggtcttcttcc

SEQ ID NO: 1149021 - DNA, 25 bp, Homo sapien
catgatgggtcttggtcttcttcca

SEQ ID NO: 1149022 - DNA, 25 bp, Homo sapien
gccaaggtactgttcctccaatgag

SEQ ID NO: 1149023 - DNA, 25 bp, Homo sapien
cctccaatgagtaaacagcactgct

SEQ ID NO: 1149024 - DNA, 25 bp, Homo sapien
gtaaacagcactgctgtagggctgg

SEQ ID NO: 1149025 - DNA, 25 bp, Homo sapien
cctaagtcaggcagttcaagataac

SEQ ID NO: 1149026 - DNA, 25 bp, Homo sapien
ggcatggtgggtcttggtcttcgtc

SEQ ID NO: 1149027 - DNA, 25 bp, Homo sapien
gcatggtgggtcttggtcttcgtct

SEQ ID NO: 1149028 - DNA, 25 bp, Homo sapien
tggtgggtcttggtcttcgtcttct

SEQ ID NO: 1149029 - DNA, 25 bp, Homo sapien
tgggtcttggtcttcgtcttcttcc

SEQ ID NO: 1149030 - DNA, 25 bp, Homo sapien
aataacatctatccagtgagtcctg

SEQ ID NO: 1149031 - DNA, 25 bp, Homo sapien
ataacatctatccagtgagtcctgc

SEQ ID NO: 1149032 - DNA, 25 bp, Homo sapien
taacatctatccagtgagtcctgca

SEQ ID NO: 1149033 - DNA, 25 bp, Homo sapien
gctggtcatgatagaaattcctcgg

SEQ ID NO: 1149034 - DNA, 25 bp, Homo sapien
tggtcatgatagaaattcctcggtt

SEQ ID NO: 1149035 - DNA, 25 bp, Homo sapien
tcatgatagaaattcctcggttttt

SEQ ID NO: 1149036 - DNA, 25 bp, Homo sapien
tgatagaaattcctcggtttttctc

SEQ ID NO: 1149037 - DNA, 25 bp, Homo sapien
tcaggctcctcagcataagaatagg

SEQ ID NO: 1149038 - DNA, 25 bp, Homo sapien
cctcaggctcctcagcataagaata

SEQ ID NO: 1149039 - DNA, 25 bp, Homo sapien
caggctcctcagcataagaatagga

SEQ ID NO: 1149040 - DNA, 25 bp, Homo sapien
ggctcctcagcataagaataggaca

SEQ ID NO: 1149041 - DNA, 25 bp, Homo sapien
tgattcccctacacacataacaatc

SEQ ID NO: 1149042 - DNA, 25 bp, Homo sapien
tcccctacacacataacaatccact

SEQ ID NO: 1149043 - DNA, 25 bp, Homo sapien
ttcccctacacacataacaatccac

SEQ ID NO: 1149044 - DNA, 25 bp, Homo sapien
gctgattcccctacacacataacaa

SEQ ID NO: 1149045 - DNA, 25 bp, Homo sapien
gggcatggtgggttttgatcttctt

SEQ ID NO: 1149046 - DNA, 25 bp, Homo sapien
tcttctttccttctttgatcttctt

SEQ ID NO: 1149047 - DNA, 25 bp, Homo sapien
tccttctttgatcttcttccccttc

SEQ ID NO: 1149048 - DNA, 25 bp, Homo sapien
ctggggcatggtgggttttgatctt

SEQ ID NO: 1149049 - DNA, 25 bp, Homo sapien
aataacatctatccagtgagtcctg

SEQ ID NO: 1149050 - DNA, 25 bp, Homo sapien
ataacatctatccagtgagtcctgc

SEQ ID NO: 1149051 - DNA, 25 bp, Homo sapien
taacatctatccagtgagtcctgca

SEQ ID NO: 1149052 - DNA, 25 bp, Homo sapien
acagccaagccaacatgctgttgct

SEQ ID NO: 1149053 - DNA, 25 bp, Homo sapien
gccaacatgctgttgctccaataca

SEQ ID NO: 1149054 - DNA, 25 bp, Homo sapien
tgctgttgctccaatacataaaagg

SEQ ID NO: 1149055 - DNA, 25 bp, Homo sapien
catgagtcagtcagttcaagacaac

SEQ ID NO: 1149056 - DNA, 25 bp, Homo sapien
gcatgatgggtcttggtcttcttcc

SEQ ID NO: 1149057 - DNA, 25 bp, Homo sapien
gggcatgatgggtcttggtcttctt

SEQ ID NO: 1149058 - DNA, 25 bp, Homo sapien
catgatgggtcttggtcttcttcca

SEQ ID NO: 1149059 - DNA, 25 bp, Homo sapien
tgatgggtcttggtcttcttccact

SEQ ID NO: 1149060 - DNA, 25 bp, Homo sapien
aataacatctatccagtgagtcctg

SEQ ID NO: 1149061 - DNA, 25 bp, Homo sapien
ataacatctatccagtgagtcctgc

SEQ ID NO: 1149062 - DNA, 25 bp, Homo sapien
taacatctatccagtgagtcctgca

SEQ ID NO: 1149063 - DNA, 25 bp, Homo sapien
tggggcatggtgggccttggtcttc

SEQ ID NO: 1149064 - DNA, 25 bp, Homo sapien
gcatggtgggccttggtcttcttcc

SEQ ID NO: 1149065 - DNA, 25 bp, Homo sapien
ctggggcatggtgggccttggtctt

SEQ ID NO: 1149066 - DNA, 25 bp, Homo sapien
gggcatggtgggccttggtcttctt

SEQ ID NO: 1149067 - DNA, 25 bp, Homo sapien
aataacatctatccagtgagtcctg

SEQ ID NO: 1149068 - DNA, 25 bp, Homo sapien
ataacatctatccagtgagtcctgc

SEQ ID NO: 1149069 - DNA, 25 bp, Homo sapien
taacatctatccagtgagtcctgca

SEQ ID NO: 1149070 - DNA, 25 bp, Homo sapien
gtccctattctagtagatcgttatc

SEQ ID NO: 1149071 - DNA, 25 bp, Homo sapien
ctcatcaaatactcagattgttcat

SEQ ID NO: 1149072 - DNA, 25 bp, Homo sapien
gattgttcatggttgtgaggacttt

SEQ ID NO: 1149073 - DNA, 25 bp, Homo sapien
aaaatgtccctattctagtagatcg

SEQ ID NO: 1149074 - DNA, 25 bp, Homo sapien
tcaggctcctcagcataagaatagg

SEQ ID NO: 1149075 - DNA, 25 bp, Homo sapien
cctcaggctcctcagcataagaata

SEQ ID NO: 1149076 - DNA, 25 bp, Homo sapien
ggctcctcagcataagaataggaca

SEQ ID NO: 1149077 - DNA, 25 bp, Homo sapien
caggctcctcagcataagaatagga

SEQ ID NO: 1149078 - DNA, 25 bp, Homo sapien
tcccctacacacataacaatccact

SEQ ID NO: 1149079 - DNA, 25 bp, Homo sapien
ttcccctacacacataacaatccac

SEQ ID NO: 1149080 - DNA, 25 bp, Homo sapien
gctgattcccctacacacataacaa

SEQ ID NO: 1149081 - DNA, 25 bp, Homo sapien
tgattcccctacacacataacaatc

SEQ ID NO: 1149082 - DNA, 25 bp, Homo sapien
tccttctttgatcttcttccccttc

SEQ ID NO: 1149083 - DNA, 25 bp, Homo sapien
ctggggcatggtgggttttgatctt

SEQ ID NO: 1149084 - DNA, 25 bp, Homo sapien
tcttctttccttctttgatcttctt

SEQ ID NO: 1149085 - DNA, 25 bp, Homo sapien
gggcatggtgggttttgatcttctt

SEQ ID NO: 1149086 - DNA, 25 bp, Homo sapien
caggtgacatactggtaagggagtc

SEQ ID NO: 1149087 - DNA, 25 bp, Homo sapien
caatgacagtaggagtaattcagcc

SEQ ID NO: 1149088 - DNA, 25 bp, Homo sapien
cagtggccatgagagtacagctttt

SEQ ID NO: 1149089 - DNA, 25 bp, Homo sapien
gctcaaaattcgatgcagtggccat

SEQ ID NO: 1149090 - DNA, 25 bp, Homo sapien
aataacatctatccagtgagtcctg

SEQ ID NO: 1149091 - DNA, 25 bp, Homo sapien
taacatctatccagtgagtcctgca

SEQ ID NO: 1149092 - DNA, 25 bp, Homo sapien
ataacatctatccagtgagtcctgc

SEQ ID NO: 1149093 - DNA, 25 bp, Homo sapien
catgagtcagtcagttcaagacaac

SEQ ID NO: 1149094 - DNA, 25 bp, Homo sapien
gccaacatgctgttgctccaataca

SEQ ID NO: 1149095 - DNA, 25 bp, Homo sapien
tgctgttgctccaatacataaaagg

SEQ ID NO: 1149096 - DNA, 25 bp, Homo sapien
acagccaagccaacatgctgttgct

SEQ ID NO: 1149097 - DNA, 25 bp, Homo sapien
tgatgggtcttggtcttcttccact

SEQ ID NO: 1149098 - DNA, 25 bp, Homo sapien
gggcatgatgggtcttggtcttctt

SEQ ID NO: 1149099 - DNA, 25 bp, Homo sapien
catgatgggtcttggtcttcttcca

SEQ ID NO: 1149100 - DNA, 25 bp, Homo sapien
gcatgatgggtcttggtcttcttcc

SEQ ID NO: 1149101 - DNA, 25 bp, Homo sapien
aataacatctatccagtgagtcctg

SEQ ID NO: 1149102 - DNA, 25 bp, Homo sapien
taacatctatccagtgagtcctgca

SEQ ID NO: 1149103 - DNA, 25 bp, Homo sapien
ataacatctatccagtgagtcctgc

SEQ ID NO: 1149104 - DNA, 25 bp, Homo sapien
cccagctcgttcatggatgcaagaa

SEQ ID NO: 1149105 - DNA, 25 bp, Homo sapien
tcaaatgcccagctcgttcatggat

SEQ ID NO: 1149106 - DNA, 25 bp, Homo sapien
atgcaagaattttagacactgaaat

SEQ ID NO: 1149107 - DNA, 25 bp, Homo sapien
tcgttcatggatgcaagaattttag

SEQ ID NO: 1149108 - DNA, 25 bp, Homo sapien
tggggcatggtgggccttggtcttc

SEQ ID NO: 1149109 - DNA, 25 bp, Homo sapien
ctggggcatggtgggccttggtctt

SEQ ID NO: 1149110 - DNA, 25 bp, Homo sapien
gggcatggtgggccttggtcttctt

SEQ ID NO: 1149111 - DNA, 25 bp, Homo sapien
gcatggtgggccttggtcttcttcc

SEQ ID NO: 1149112 - DNA, 25 bp, Homo sapien
aataacatctatccagtgagtcctg

SEQ ID NO: 1149113 - DNA, 25 bp, Homo sapien
taacatctatccagtgagtcctgca

SEQ ID NO: 1149114 - DNA, 25 bp, Homo sapien
ataacatctatccagtgagtcctgc

SEQ ID NO: 1149115 - DNA, 25 bp, Homo sapien
ctcatcaaatactcagattgttcat

SEQ ID NO: 1149116 - DNA, 25 bp, Homo sapien
gattgttcatggttgtgaggacttt

SEQ ID NO: 1149117 - DNA, 25 bp, Homo sapien
aaaatgtccctattctagtagatcg

SEQ ID NO: 1149118 - DNA, 25 bp, Homo sapien
gtccctattctagtagatcgttatc

SEQ ID NO: 1149119 - DNA, 25 bp, Homo sapien
tcaggctcctcagcataagaatagg

SEQ ID NO: 1149120 - DNA, 25 bp, Homo sapien
cctcaggctcctcagcataagaata

SEQ ID NO: 1149121 - DNA, 25 bp, Homo sapien
ggctcctcagcataagaataggaca

SEQ ID NO: 1149122 - DNA, 25 bp, Homo sapien
caggctcctcagcataagaatagga

SEQ ID NO: 1149123 - DNA, 25 bp, Homo sapien
ttcccctacacacataacaatccac

SEQ ID NO: 1149124 - DNA, 25 bp, Homo sapien
tcccctacacacataacaatccact

SEQ ID NO: 1149125 - DNA, 25 bp, Homo sapien
gctgattcccctacacacataacaa

SEQ ID NO: 1149126 - DNA, 25 bp, Homo sapien
tgattcccctacacacataacaatc

SEQ ID NO: 1149127 - DNA, 25 bp, Homo sapien
ctggggcatggtgggttttgatctt

SEQ ID NO: 1149128 - DNA, 25 bp, Homo sapien
tccttctttgatcttcttccccttc

SEQ ID NO: 1149129 - DNA, 25 bp, Homo sapien
gggcatggtgggttttgatcttctt

SEQ ID NO: 1149130 - DNA, 25 bp, Homo sapien
tcttctttccttctttgatcttctt

SEQ ID NO: 1149131 - DNA, 25 bp, Homo sapien
caggtgacatactggtaagggagtc

SEQ ID NO: 1149132 - DNA, 25 bp, Homo sapien
gctcaaaattcgatgcagtggccat

SEQ ID NO: 1149133 - DNA, 25 bp, Homo sapien
cagtggccatgagagtacagctttt

SEQ ID NO: 1149134 - DNA, 25 bp, Homo sapien
caatgacagtaggagtaattcagcc

SEQ ID NO: 1149135 - DNA, 25 bp, Homo sapien
aataacatctatccagtgagtcctg

SEQ ID NO: 1149136 - DNA, 25 bp, Homo sapien
taacatctatccagtgagtcctgca

SEQ ID NO: 1149137 - DNA, 25 bp, Homo sapien
ataacatctatccagtgagtcctgc

SEQ ID NO: 1149138 - DNA, 25 bp, Homo sapien
tgctgttgctccaatacataaaagg

SEQ ID NO: 1149139 - DNA, 25 bp, Homo sapien
gccaacatgctgttgctccaataca

SEQ ID NO: 1149140 - DNA, 25 bp, Homo sapien
catgagtcagtcagttcaagacaac

SEQ ID NO: 1149141 - DNA, 25 bp, Homo sapien
acagccaagccaacatgctgttgct

SEQ ID NO: 1149142 - DNA, 25 bp, Homo sapien
gggcatgatgggtcttggtcttctt

SEQ ID NO: 1149143 - DNA, 25 bp, Homo sapien
catgatgggtcttggtcttcttcca

SEQ ID NO: 1149144 - DNA, 25 bp, Homo sapien
gcatgatgggtcttggtcttcttcc

SEQ ID NO: 1149145 - DNA, 25 bp, Homo sapien
tgatgggtcttggtcttcttccact

SEQ ID NO: 1149146 - DNA, 25 bp, Homo sapien
aataacatctatccagtgagtcctg

SEQ ID NO: 1149147 - DNA, 25 bp, Homo sapien
ataacatctatccagtgagtcctgc

SEQ ID NO: 1149148 - DNA, 25 bp, Homo sapien
taacatctatccagtgagtcctgca

SEQ ID NO: 1149149 - DNA, 25 bp, Homo sapien
tcaaatgcccagctcgttcatggat

SEQ ID NO: 1149150 - DNA, 25 bp, Homo sapien
cccagctcgttcatggatgcaagaa

SEQ ID NO: 1149151 - DNA, 25 bp, Homo sapien
tcgttcatggatgcaagaattttag

SEQ ID NO: 1149152 - DNA, 25 bp, Homo sapien
atgcaagaattttagacactgaaat

SEQ ID NO: 1149153 - DNA, 25 bp, Homo sapien
gcatggtgggccttggtcttcttcc

SEQ ID NO: 1149154 - DNA, 25 bp, Homo sapien
ctggggcatggtgggccttggtctt

SEQ ID NO: 1149155 - DNA, 25 bp, Homo sapien
tggggcatggtgggccttggtcttc

SEQ ID NO: 1149156 - DNA, 25 bp, Homo sapien
gggcatggtgggccttggtcttctt

SEQ ID NO: 1149157 - DNA, 25 bp, Homo sapien
taacatctatccagtgagtcctgca

SEQ ID NO: 1149158 - DNA, 25 bp, Homo sapien
aataacatctatccagtgagtcctg

SEQ ID NO: 1149159 - DNA, 25 bp, Homo sapien
ataacatctatccagtgagtcctgc

SEQ ID NO: 1149160 - DNA, 25 bp, Homo sapien
gtccctattctagtagatcgttatc

SEQ ID NO: 1149161 - DNA, 25 bp, Homo sapien
aaaatgtccctattctagtagatcg

SEQ ID NO: 1149162 - DNA, 25 bp, Homo sapien
ctcatcaaatactcagattgttcat

SEQ ID NO: 1149163 - DNA, 25 bp, Homo sapien
gattgttcatggttgtgaggacttt

SEQ ID NO: 1149164 - DNA, 25 bp, Homo sapien
ggctcctcagcataagaataggaca

SEQ ID NO: 1149165 - DNA, 25 bp, Homo sapien
cctcaggctcctcagcataagaata

SEQ ID NO: 1149166 - DNA, 25 bp, Homo sapien
tcaggctcctcagcataagaatagg

SEQ ID NO: 1149167 - DNA, 25 bp, Homo sapien
caggctcctcagcataagaatagga

SEQ ID NO: 1149168 - DNA, 25 bp, Homo sapien
ttcccctacacacataacaatccac

SEQ ID NO: 1149169 - DNA, 25 bp, Homo sapien
tcccctacacacataacaatccact

SEQ ID NO: 1149170 - DNA, 25 bp, Homo sapien
gctgattcccctacacacataacaa

SEQ ID NO: 1149171 - DNA, 25 bp, Homo sapien
tgattcccctacacacataacaatc

SEQ ID NO: 1149172 - DNA, 25 bp, Homo sapien
tcttctttccttctttgatcttctt

SEQ ID NO: 1149173 - DNA, 25 bp, Homo sapien
tccttctttgatcttcttccccttc

SEQ ID NO: 1149174 - DNA, 25 bp, Homo sapien
gggcatggtgggttttgatcttctt

SEQ ID NO: 1149175 - DNA, 25 bp, Homo sapien
ctggggcatggtgggttttgatctt

SEQ ID NO: 1149176 - DNA, 25 bp, Homo sapien
caggtgacatactggtaagggagtc

SEQ ID NO: 1149177 - DNA, 25 bp, Homo sapien
caatgacagtaggagtaattcagcc

SEQ ID NO: 1149178 - DNA, 25 bp, Homo sapien
cagtggccatgagagtacagctttt

SEQ ID NO: 1149179 - DNA, 25 bp, Homo sapien
gctcaaaattcgatgcagtggccat

SEQ ID NO: 1149180 - DNA, 25 bp, Homo sapien
aataacatctatccagtgagtcctg

SEQ ID NO: 1149181 - DNA, 25 bp, Homo sapien
taacatctatccagtgagtcctgca

SEQ ID NO: 1149182 - DNA, 25 bp, Homo sapien
ataacatctatccagtgagtcctgc

SEQ ID NO: 1149183 - DNA, 25 bp, Homo sapien
catgagtcagtcagttcaagacaac

SEQ ID NO: 1149184 - DNA, 25 bp, Homo sapien
acagccaagccaacatgctgttgct

SEQ ID NO: 1149185 - DNA, 25 bp, Homo sapien
gccaacatgctgttgctccaataca

SEQ ID NO: 1149186 - DNA, 25 bp, Homo sapien
tgctgttgctccaatacataaaagg

SEQ ID NO: 1149187 - DNA, 25 bp, Homo sapien
gggcatgatgggtcttggtcttctt

SEQ ID NO: 1149188 - DNA, 25 bp, Homo sapien
tgatgggtcttggtcttcttccact

SEQ ID NO: 1149189 - DNA, 25 bp, Homo sapien
gcatgatgggtcttggtcttcttcc

SEQ ID NO: 1149190 - DNA, 25 bp, Homo sapien
catgatgggtcttggtcttcttcca

SEQ ID NO: 1149191 - DNA, 25 bp, Homo sapien
aataacatctatccagtgagtcctg

SEQ ID NO: 1149192 - DNA, 25 bp, Homo sapien
taacatctatccagtgagtcctgca

SEQ ID NO: 1149193 - DNA, 25 bp, Homo sapien
ataacatctatccagtgagtcctgc

SEQ ID NO: 1149194 - DNA, 25 bp, Homo sapien
tcaaatgcccagctcgttcatggat

SEQ ID NO: 1149195 - DNA, 25 bp, Homo sapien
tcgttcatggatgcaagaattttag

SEQ ID NO: 1149196 - DNA, 25 bp, Homo sapien
cccagctcgttcatggatgcaagaa

SEQ ID NO: 1149197 - DNA, 25 bp, Homo sapien
atgcaagaattttagacactgaaat

SEQ ID NO: 1149198 - DNA, 25 bp, Homo sapien
gggcatggtgggccttggtcttctt

SEQ ID NO: 1149199 - DNA, 25 bp, Homo sapien
gcatggtgggccttggtcttcttcc

SEQ ID NO: 1149200 - DNA, 25 bp, Homo sapien
ctggggcatggtgggccttggtctt

SEQ ID NO: 1149201 - DNA, 25 bp, Homo sapien
tggggcatggtgggccttggtcttc

SEQ ID NO: 1149202 - DNA, 25 bp, Homo sapien
taacatctatccagtgagtcctgca

SEQ ID NO: 1149203 - DNA, 25 bp, Homo sapien
ataacatctatccagtgagtcctgc

SEQ ID NO: 1149204 - DNA, 25 bp, Homo sapien
aataacatctatccagtgagtcctg

SEQ ID NO: 1149205 - DNA, 25 bp, Homo sapien
gattgttcatggttgtgaggacttt

SEQ ID NO: 1149206 - DNA, 25 bp, Homo sapien
gtccctattctagtagatcgttatc

SEQ ID NO: 1149207 - DNA, 25 bp, Homo sapien
ctcatcaaatactcagattgttcat

SEQ ID NO: 1149208 - DNA, 25 bp, Homo sapien
aaaatgtccctattctagtagatcg

SEQ ID NO: 1149209 - DNA, 25 bp, Homo sapien
cctcaggctcctcagcataagaata

SEQ ID NO: 1149210 - DNA, 25 bp, Homo sapien
ggctcctcagcataagaataggaca

SEQ ID NO: 1149211 - DNA, 25 bp, Homo sapien
tcaggctcctcagcataagaatagg

SEQ ID NO: 1149212 - DNA, 25 bp, Homo sapien
caggctcctcagcataagaatagga

SEQ ID NO: 1149213 - DNA, 25 bp, Homo sapien
tcccctacacacataacaatccact

SEQ ID NO: 1149214 - DNA, 25 bp, Homo sapien
ttcccctacacacataacaatccac

SEQ ID NO: 1149215 - DNA, 25 bp, Homo sapien
gctgattcccctacacacataacaa

SEQ ID NO: 1149216 - DNA, 25 bp, Homo sapien
tgattcccctacacacataacaatc

SEQ ID NO: 1149217 - DNA, 25 bp, Homo sapien
gggcatggtgggttttgatcttctt

SEQ ID NO: 1149218 - DNA, 25 bp, Homo sapien
tcttctttccttctttgatcttctt

SEQ ID NO: 1149219 - DNA, 25 bp, Homo sapien
tccttctttgatcttcttccccttc

SEQ ID NO: 1149220 - DNA, 25 bp, Homo sapien
ctggggcatggtgggttttgatctt

SEQ ID NO: 1149221 - DNA, 25 bp, Homo sapien
aataacatctatccagtgagtcctg

SEQ ID NO: 1149222 - DNA, 25 bp, Homo sapien
ataacatctatccagtgagtcctgc

SEQ ID NO: 1149223 - DNA, 25 bp, Homo sapien
taacatctatccagtgagtcctgca

SEQ ID NO: 1149224 - DNA, 25 bp, Homo sapien
catgagtcagtcagttcaagacaac

SEQ ID NO: 1149225 - DNA, 25 bp, Homo sapien
acagccaagccaacatgctgttgct

SEQ ID NO: 1149226 - DNA, 25 bp, Homo sapien
gccaacatgctgttgctccaataca

SEQ ID NO: 1149227 - DNA, 25 bp, Homo sapien
tgctgttgctccaatacataaaagg

SEQ ID NO: 1149228 - DNA, 25 bp, Homo sapien
catgatgggtcttggtcttcttcca

SEQ ID NO: 1149229 - DNA, 25 bp, Homo sapien
tgatgggtcttggtcttcttccact

SEQ ID NO: 1149230 - DNA, 25 bp, Homo sapien
gggcatgatgggtcttggtcttctt

SEQ ID NO: 1149231 - DNA, 25 bp, Homo sapien
gcatgatgggtcttggtcttcttcc

SEQ ID NO: 1149232 - DNA, 25 bp, Homo sapien
taacatctatccagtgagtcctgca

SEQ ID NO: 1149233 - DNA, 25 bp, Homo sapien
ataacatctatccagtgagtcctgc

SEQ ID NO: 1149234 - DNA, 25 bp, Homo sapien
aataacatctatccagtgagtcctg

SEQ ID NO: 1149235 - DNA, 25 bp, Homo sapien
cccagctcgttcatggatgcaagaa

SEQ ID NO: 1149236 - DNA, 25 bp, Homo sapien
tcaaatgcccagctcgttcatggat

SEQ ID NO: 1149237 - DNA, 25 bp, Homo sapien
tcgttcatggatgcaagaattttag

SEQ ID NO: 1149238 - DNA, 25 bp, Homo sapien
atgcaagaattttagacactgaaat

SEQ ID NO: 1149239 - DNA, 25 bp, Homo sapien
tcctcagcatgagaacaggacaatg

SEQ ID NO: 1149240 - DNA, 25 bp, Homo sapien
tcagcatgagaacaggacaatgtga

SEQ ID NO: 1149241 - DNA, 25 bp, Homo sapien
cctcagcatgagaacaggacaatgt

SEQ ID NO: 1149242 - DNA, 25 bp, Homo sapien
gctcctcagcatgagaacaggacaa

SEQ ID NO: 1149243 - DNA, 25 bp, Homo sapien
tggggcatggtgggccttggtcttc

SEQ ID NO: 1149244 - DNA, 25 bp, Homo sapien
gggcatggtgggccttggtcttctt

SEQ ID NO: 1149245 - DNA, 25 bp, Homo sapien
ctggggcatggtgggccttggtctt

SEQ ID NO: 1149246 - DNA, 25 bp, Homo sapien
gcatggtgggccttggtcttcttcc

SEQ ID NO: 1149247 - DNA, 25 bp, Homo sapien
taatcgataatgtcagcccgctctg

SEQ ID NO: 1149248 - DNA, 25 bp, Homo sapien
gtcagcccgctctgttttccctgaa

SEQ ID NO: 1149249 - DNA, 25 bp, Homo sapien
gatgtaatcgataatgtcagcccgc

SEQ ID NO: 1149250 - DNA, 25 bp, Homo sapien
gaaaagatgtaatcgataatgtcag

SEQ ID NO: 1149251 - DNA, 25 bp, Homo sapien
taacatctatccagtgagtcctgca

SEQ ID NO: 1149252 - DNA, 25 bp, Homo sapien
ataacatctatccagtgagtcctgc

SEQ ID NO: 1149253 - DNA, 25 bp, Homo sapien
aataacatctatccagtgagtcctg

SEQ ID NO: 1149254 - DNA, 25 bp, Homo sapien
gtccctattctagtagatcgttatc

SEQ ID NO: 1149255 - DNA, 25 bp, Homo sapien
aaaatgtccctattctagtagatcg

SEQ ID NO: 1149256 - DNA, 25 bp, Homo sapien
ctcatcaaatactcagattgttcat

SEQ ID NO: 1149257 - DNA, 25 bp, Homo sapien
gattgttcatggttgtgaggacttt

SEQ ID NO: 1149258 - DNA, 25 bp, Homo sapien
ggctcctcagcataagaataggaca

SEQ ID NO: 1149259 - DNA, 25 bp, Homo sapien
cctcaggctcctcagcataagaata

SEQ ID NO: 1149260 - DNA, 25 bp, Homo sapien
caggctcctcagcataagaatagga

SEQ ID NO: 1149261 - DNA, 25 bp, Homo sapien
tcaggctcctcagcataagaatagg

SEQ ID NO: 1149262 - DNA, 25 bp, Homo sapien
gctgattcccctacacacataacaa

SEQ ID NO: 1149263 - DNA, 25 bp, Homo sapien
ttcccctacacacataacaatccac

SEQ ID NO: 1149264 - DNA, 25 bp, Homo sapien
tgattcccctacacacataacaatc

SEQ ID NO: 1149265 - DNA, 25 bp, Homo sapien
tcccctacacacataacaatccact

SEQ ID NO: 1149266 - DNA, 25 bp, Homo sapien
tccttctttgatcttcttccccttc

SEQ ID NO: 1149267 - DNA, 25 bp, Homo sapien
tcttctttccttctttgatcttctt

SEQ ID NO: 1149268 - DNA, 25 bp, Homo sapien
tctttccttctttgatcttcttccc

SEQ ID NO: 1149269 - DNA, 25 bp, Homo sapien
cttcttctttccttctttgatcttc

SEQ ID NO: 1149270 - DNA, 25 bp, Homo sapien
ctggggcatggtgggttttgatctt

SEQ ID NO: 1149271 - DNA, 25 bp, Homo sapien
tggggcatggtgggttttgatcttc

SEQ ID NO: 1149272 - DNA, 25 bp, Homo sapien
gggcatggtgggttttgatcttctt

SEQ ID NO: 1149273 - DNA, 25 bp, Homo sapien
ggggcatggtgggttttgatcttct

SEQ ID NO: 1149274 - DNA, 25 bp, Homo sapien
gctcaaaattcgatgcagtggccat

SEQ ID NO: 1149275 - DNA, 25 bp, Homo sapien
cagtggccatgagagtacagctttt

SEQ ID NO: 1149276 - DNA, 25 bp, Homo sapien
caggtgacatactggtaagggagtc

SEQ ID NO: 1149277 - DNA, 25 bp, Homo sapien
caatgacagtaggagtaattcagcc

SEQ ID NO: 1149278 - DNA, 25 bp, Homo sapien
ataacatctatccagtgagtcctgc

SEQ ID NO: 1149279 - DNA, 25 bp, Homo sapien
taacatctatccagtgagtcctgca

SEQ ID NO: 1149280 - DNA, 25 bp, Homo sapien
aataacatctatccagtgagtcctg

SEQ ID NO: 1149281 - DNA, 25 bp, Homo sapien
catgagtcagtcagttcaagacaac

SEQ ID NO: 1149282 - DNA, 25 bp, Homo sapien
acagccaagccaacatgctgttgct

SEQ ID NO: 1149283 - DNA, 25 bp, Homo sapien
gccaacatgctgttgctccaataca

SEQ ID NO: 1149284 - DNA, 25 bp, Homo sapien
tgctgttgctccaatacataaaagg

SEQ ID NO: 1149285 - DNA, 25 bp, Homo sapien
catgatgggtcttggtcttcttcca

SEQ ID NO: 1149286 - DNA, 25 bp, Homo sapien
gggcatgatgggtcttggtcttctt

SEQ ID NO: 1149287 - DNA, 25 bp, Homo sapien
gcatgatgggtcttggtcttcttcc

SEQ ID NO: 1149288 - DNA, 25 bp, Homo sapien
tgatgggtcttggtcttcttccact

SEQ ID NO: 1149289 - DNA, 25 bp, Homo sapien
taacatctatccagtgagtcctgca

SEQ ID NO: 1149290 - DNA, 25 bp, Homo sapien
aataacatctatccagtgagtcctg

SEQ ID NO: 1149291 - DNA, 25 bp, Homo sapien
ataacatctatccagtgagtcctgc

SEQ ID NO: 1149292 - DNA, 25 bp, Homo sapien
gcatggtgggccttggtcttcttcc

SEQ ID NO: 1149293 - DNA, 25 bp, Homo sapien
ctggggcatggtgggccttggtctt

SEQ ID NO: 1149294 - DNA, 25 bp, Homo sapien
tggggcatggtgggccttggtcttc

SEQ ID NO: 1149295 - DNA, 25 bp, Homo sapien
gggcatggtgggccttggtcttctt

SEQ ID NO: 1149296 - DNA, 25 bp, Homo sapien
aacagagccccaactaggtttcatg

SEQ ID NO: 1149297 - DNA, 25 bp, Homo sapien
agccccaactaggtttcatgggtag

SEQ ID NO: 1149298 - DNA, 25 bp, Homo sapien
cagagccccaactaggtttcatggg

SEQ ID NO: 1149299 - DNA, 25 bp, Homo sapien
acacaacagagccccaactaggttt

SEQ ID NO: 1149300 - DNA, 25 bp, Homo sapien
taacatctatccagtgagtcctgca

SEQ ID NO: 1149301 - DNA, 25 bp, Homo sapien
ataacatctatccagtgagtcctgc

SEQ ID NO: 1149302 - DNA, 25 bp, Homo sapien
aataacatctatccagtgagtcctg

SEQ ID NO: 1149303 - DNA, 25 bp, Homo sapien
gtccctattctagtagatcgttatc

SEQ ID NO: 1149304 - DNA, 25 bp, Homo sapien
gattgttcatggttgtgaggacttt

SEQ ID NO: 1149305 - DNA, 25 bp, Homo sapien
aaaatgtccctattctagtagatcg

SEQ ID NO: 1149306 - DNA, 25 bp, Homo sapien
ctcatcaaatactcagattgttcat

SEQ ID NO: 1149307 - DNA, 25 bp, Homo sapien
tcaggctcctcagcataagaatagg

SEQ ID NO: 1149308 - DNA, 25 bp, Homo sapien
cctcaggctcctcagcataagaata

SEQ ID NO: 1149309 - DNA, 25 bp, Homo sapien
ggctcctcagcataagaataggaca

SEQ ID NO: 1149310 - DNA, 25 bp, Homo sapien
caggctcctcagcataagaatagga

SEQ ID NO: 1149311 - DNA, 25 bp, Homo sapien
ttcccctacacacataacaatccac

SEQ ID NO: 1149312 - DNA, 25 bp, Homo sapien
tgattcccctacacacataacaatc

SEQ ID NO: 1149313 - DNA, 25 bp, Homo sapien
gctgattcccctacacacataacaa

SEQ ID NO: 1149314 - DNA, 25 bp, Homo sapien
tcccctacacacataacaatccact

SEQ ID NO: 1149315 - DNA, 25 bp, Homo sapien
ctggggcatggtgggttttgatctt

SEQ ID NO: 1149316 - DNA, 25 bp, Homo sapien
tccttctttgatcttcttccccttc

SEQ ID NO: 1149317 - DNA, 25 bp, Homo sapien
tcttctttccttctttgatcttctt

SEQ ID NO: 1149318 - DNA, 25 bp, Homo sapien
gggcatggtgggttttgatcttctt

SEQ ID NO: 1149319 - DNA, 25 bp, Homo sapien
aataacatctatccagtgagtcctg

SEQ ID NO: 1149320 - DNA, 25 bp, Homo sapien
ataacatctatccagtgagtcctgc

SEQ ID NO: 1149321 - DNA, 25 bp, Homo sapien
taacatctatccagtgagtcctgca

SEQ ID NO: 1149322 - DNA, 25 bp, Homo sapien
aacacgctgttgctccaatacataa

SEQ ID NO: 1149323 - DNA, 25 bp, Homo sapien
gctgttgctccaatacataaaaggc

SEQ ID NO: 1149324 - DNA, 25 bp, Homo sapien
gccaacacgctgttgctccaataca

SEQ ID NO: 1149325 - DNA, 25 bp, Homo sapien
tgttgctccaatacataaaaggcac

SEQ ID NO: 1149326 - DNA, 25 bp, Homo sapien
tgatgggtcttggtcttcttccact

SEQ ID NO: 1149327 - DNA, 25 bp, Homo sapien
gggcatgatgggtcttggtcttctt

SEQ ID NO: 1149328 - DNA, 25 bp, Homo sapien
catgatgggtcttggtcttcttcca

SEQ ID NO: 1149329 - DNA, 25 bp, Homo sapien
gcatgatgggtcttggtcttcttcc

SEQ ID NO: 1149330 - DNA, 25 bp, Homo sapien
ataacatctatccagtgagtcctgc

SEQ ID NO: 1149331 - DNA, 25 bp, Homo sapien
aataacatctatccagtgagtcctg

SEQ ID NO: 1149332 - DNA, 25 bp, Homo sapien
taacatctatccagtgagtcctgca

SEQ ID NO: 1149333 - DNA, 25 bp, Homo sapien
catgatgggtcttggtcttcttcca

SEQ ID NO: 1149334 - DNA, 25 bp, Homo sapien
gggcatgatgggtcttggtcttctt

SEQ ID NO: 1149335 - DNA, 25 bp, Homo sapien
tgatgggtcttggtcttcttccact

SEQ ID NO: 1149336 - DNA, 25 bp, Homo sapien
gcatgatgggtcttggtcttcttcc

SEQ ID NO: 1149337 - DNA, 25 bp, Homo sapien
gctcaagattccatgcagttgccat

SEQ ID NO: 1149338 - DNA, 25 bp, Homo sapien
tcgggacacacagcgaacagtgatc

SEQ ID NO: 1149339 - DNA, 25 bp, Homo sapien
ccatacagcctttgaggtatggtca

SEQ ID NO: 1149340 - DNA, 25 bp, Homo sapien
taattttccataaacttgctcaaga

SEQ ID NO: 1149341 - DNA, 25 bp, Homo sapien
taacatctatccagtgagtcctgca

SEQ ID NO: 1149342 - DNA, 25 bp, Homo sapien
aataacatctatccagtgagtcctg

SEQ ID NO: 1149343 - DNA, 25 bp, Homo sapien
ataacatctatccagtgagtcctgc

SEQ ID NO: 1149344 - DNA, 25 bp, Homo sapien
tcaaatgcccagctcgttcatggat

SEQ ID NO: 1149345 - DNA, 25 bp, Homo sapien
cccagctcgttcatggatgcaagaa

SEQ ID NO: 1149346 - DNA, 25 bp, Homo sapien
tcgttcatggatgcaagaattttag

SEQ ID NO: 1149347 - DNA, 25 bp, Homo sapien
atgcaagaattttagacactgaaat

SEQ ID NO: 1149348 - DNA, 25 bp, Homo sapien
gggcatggtgggccttggtcttctt

SEQ ID NO: 1149349 - DNA, 25 bp, Homo sapien
ctggggcatggtgggccttggtctt

SEQ ID NO: 1149350 - DNA, 25 bp, Homo sapien
gcatggtgggccttggtcttcttcc

SEQ ID NO: 1149351 - DNA, 25 bp, Homo sapien
tggggcatggtgggccttggtcttc

SEQ ID NO: 1149352 - DNA, 25 bp, Homo sapien
ggacagaacagggccaaatggaaaa

SEQ ID NO: 1149353 - DNA, 25 bp, Homo sapien
gaacagggccaaatggaaaagaatg

SEQ ID NO: 1149354 - DNA, 25 bp, Homo sapien
acagaacagggccaaatggaaaaga

SEQ ID NO: 1149355 - DNA, 25 bp, Homo sapien
cagaacagggccaaatggaaaagaa

SEQ ID NO: 1149356 - DNA, 25 bp, Homo sapien
taacatctatccagtgagtcctgca

SEQ ID NO: 1149357 - DNA, 25 bp, Homo sapien
ataacatctatccagtgagtcctgc

SEQ ID NO: 1149358 - DNA, 25 bp, Homo sapien
aataacatctatccagtgagtcctg

SEQ ID NO: 1149359 - DNA, 25 bp, Homo sapien
aaaatgtccctattctagtagatcg

SEQ ID NO: 1149360 - DNA, 25 bp, Homo sapien
gtccctattctagtagatcgttatc

SEQ ID NO: 1149361 - DNA, 25 bp, Homo sapien
ctcatcaaatactcagattgttcat

SEQ ID NO: 1149362 - DNA, 25 bp, Homo sapien
gattgttcatggttgtgaggacttt

SEQ ID NO: 1149363 - DNA, 25 bp, Homo sapien
cctcaggctcctcagcataagaata

SEQ ID NO: 1149364 - DNA, 25 bp, Homo sapien
ggctcctcagcataagaataggaca

SEQ ID NO: 1149365 - DNA, 25 bp, Homo sapien
caggctcctcagcataagaatagga

SEQ ID NO: 1149366 - DNA, 25 bp, Homo sapien
tcaggctcctcagcataagaatagg

SEQ ID NO: 1149367 - DNA, 25 bp, Homo sapien
tgattcccctacacacataacaatc

SEQ ID NO: 1149368 - DNA, 25 bp, Homo sapien
ttcccctacacacataacaatccac

SEQ ID NO: 1149369 - DNA, 25 bp, Homo sapien
gctgattcccctacacacataacaa

SEQ ID NO: 1149370 - DNA, 25 bp, Homo sapien
tcccctacacacataacaatccact

SEQ ID NO: 1149371 - DNA, 25 bp, Homo sapien
tcttctttccttctttgatcttctt

SEQ ID NO: 1149372 - DNA, 25 bp, Homo sapien
tccttctttgatcttcttccccttc

SEQ ID NO: 1149373 - DNA, 25 bp, Homo sapien
ctggggcatggtgggttttgatctt

SEQ ID NO: 1149374 - DNA, 25 bp, Homo sapien
gggcatggtgggttttgatcttctt

SEQ ID NO: 1149375 - DNA, 25 bp, Homo sapien
taacatctatccagtgagtcctgca

SEQ ID NO: 1149376 - DNA, 25 bp, Homo sapien
aataacatctatccagtgagtcctg

SEQ ID NO: 1149377 - DNA, 25 bp, Homo sapien
ataacatctatccagtgagtcctgc

SEQ ID NO: 1149378 - DNA, 25 bp, Homo sapien
acagccaagccaacatgctgttgct

SEQ ID NO: 1149379 - DNA, 25 bp, Homo sapien
ctgtagggctggcatgagtcacaca

SEQ ID NO: 1149380 - DNA, 25 bp, Homo sapien
gcatgagtcacacagttcaagacaa

SEQ ID NO: 1149381 - DNA, 25 bp, Homo sapien
tgctgttgctccaatacataaaagg

SEQ ID NO: 1149382 - DNA, 25 bp, Homo sapien
cgctgaaattagagtgaaggatgaa

SEQ ID NO: 1149383 - DNA, 25 bp, Homo sapien
gcccagatccaacatcttgagagta

SEQ ID NO: 1149384 - DNA, 25 bp, Homo sapien
attagggcgccacaggcatggcctg

SEQ ID NO: 1149385 - DNA, 25 bp, Homo sapien
gaaggctgatcaccatagagattcc

SEQ ID NO: 1149386 - DNA, 25 bp, Homo sapien
catgatgggtcttggtcttcttcca

SEQ ID NO: 1149387 - DNA, 25 bp, Homo sapien
gggcatgatgggtcttggtcttctt

SEQ ID NO: 1149388 - DNA, 25 bp, Homo sapien
tgatgggtcttggtcttcttccact

SEQ ID NO: 1149389 - DNA, 25 bp, Homo sapien
gcatgatgggtcttggtcttcttcc

SEQ ID NO: 1149390 - DNA, 25 bp, Homo sapien
taacatctatccagtgagtcctgca

SEQ ID NO: 1149391 - DNA, 25 bp, Homo sapien
aataacatctatccagtgagtcctg

SEQ ID NO: 1149392 - DNA, 25 bp, Homo sapien
ataacatctatccagtgagtcctgc

SEQ ID NO: 1149393 - DNA, 25 bp, Homo sapien
ctatatgcgcccataggtcctgcct

SEQ ID NO: 1149394 - DNA, 25 bp, Homo sapien
tatatgcgcccataggtcctgcctg

SEQ ID NO: 1149395 - DNA, 25 bp, Homo sapien
atatgcgcccataggtcctgcctgc

SEQ ID NO: 1149396 - DNA, 25 bp, Homo sapien
atgcgcccataggtcctgcctgcgg

SEQ ID NO: 1149397 - DNA, 25 bp, Homo sapien
ggctcctcagcataagaataggaca

SEQ ID NO: 1149398 - DNA, 25 bp, Homo sapien
tcaggctcctcagcataagaatagg

SEQ ID NO: 1149399 - DNA, 25 bp, Homo sapien
cctcaggctcctcagcataagaata

SEQ ID NO: 1149400 - DNA, 25 bp, Homo sapien
caggctcctcagcataagaatagga

SEQ ID NO: 1149401 - DNA, 25 bp, Homo sapien
gctgattcccctacacacataaaaa

SEQ ID NO: 1149402 - DNA, 25 bp, Homo sapien
tcagacatggacagacacattaagc

SEQ ID NO: 1149403 - DNA, 25 bp, Homo sapien
ataaattcagacatggacagacaca

SEQ ID NO: 1149404 - DNA, 25 bp, Homo sapien
aagctgattcccctacacacataaa

SEQ ID NO: 1149405 - DNA, 25 bp, Homo sapien
tcttctttccttctttgatcttctt

SEQ ID NO: 1149406 - DNA, 25 bp, Homo sapien
tccttctttgatcttcttccccttc

SEQ ID NO: 1149407 - DNA, 25 bp, Homo sapien
ctggggcatggtgggttttgatctt

SEQ ID NO: 1149408 - DNA, 25 bp, Homo sapien
gggcatggtgggttttgatcttctt

SEQ ID NO: 1149409 - DNA, 25 bp, Homo sapien
cagtggccatgagagtacagctttt

SEQ ID NO: 1149410 - DNA, 25 bp, Homo sapien
caatgacagtaggagtaattcagcc

SEQ ID NO: 1149411 - DNA, 25 bp, Homo sapien
gacagtaggagtaattcagccttcg

SEQ ID NO: 1149412 - DNA, 25 bp, Homo sapien
tatgctcaaaattcgatgcagtggc

SEQ ID NO: 1149413 - DNA, 25 bp, Homo sapien
gctcttccacttccatcagcacgcc

SEQ ID NO: 1149414 - DNA, 25 bp, Homo sapien
tcttccacttccatcagcacgccgt

SEQ ID NO: 1149415 - DNA, 25 bp, Homo sapien
ccacttccatcagcacgccgttgag

SEQ ID NO: 1149416 - DNA, 25 bp, Homo sapien
ttccacttccatcagcacgccgttg

SEQ ID NO: 1149417 - DNA, 25 bp, Homo sapien
agtcaggtagttcaaagtacattga

SEQ ID NO: 1149418 - DNA, 25 bp, Homo sapien
gagtcaggtagttcaaagtacattg

SEQ ID NO: 1149419 - DNA, 25 bp, Homo sapien
aatgagtcaggtagttcaaagtaca

SEQ ID NO: 1149420 - DNA, 25 bp, Homo sapien
tgagtcaggtagttcaaagtacatt

SEQ ID NO: 1149421 - DNA, 25 bp, Homo sapien
ccggcagagtcctgggtgacatgct

SEQ ID NO: 1149422 - DNA, 25 bp, Homo sapien
taagtactgacaccaattggaggct

SEQ ID NO: 1149423 - DNA, 25 bp, Homo sapien
caccggcagagtcctgggtgacatg

SEQ ID NO: 1149424 - DNA, 25 bp, Homo sapien
cttcctaagtactgacaccaattgg

SEQ ID NO: 1149425 - DNA, 25 bp, Homo sapien
catcagtacccaccaaaaccaatca

SEQ ID NO: 1149426 - DNA, 25 bp, Homo sapien
gggtcaacttagagactcaaaaatc

SEQ ID NO: 1149427 - DNA, 25 bp, Homo sapien
ggagcaagtccacctaggatgataa

SEQ ID NO: 1149428 - DNA, 25 bp, Homo sapien
cataatcctgccctaaacaccaggg

SEQ ID NO: 1149429 - DNA, 25 bp, Homo sapien
ccacctaggatgataacagctgaat

SEQ ID NO: 1149430 - DNA, 25 bp, Homo sapien
tctgtgtacaagtacggcaccttct

SEQ ID NO: 1149431 - DNA, 25 bp, Homo sapien
aatctcctcgagcaatgttctgtag

SEQ ID NO: 1149432 - DNA, 25 bp, Homo sapien
aaggccacttcttgataggattgta

SEQ ID NO: 1149433 - DNA, 25 bp, Homo sapien
caacccatggacacaagatgtctgt

SEQ ID NO: 1149434 - DNA, 25 bp, Homo sapien
tattgaagactaccaagtactgctt

SEQ ID NO: 1149435 - DNA, 25 bp, Homo sapien
gcctatatattgaagactaccaagt

SEQ ID NO: 1149436 - DNA, 25 bp, Homo sapien
gaaagcctatatattgaagactacc

SEQ ID NO: 1149437 - DNA, 25 bp, Homo sapien
gatatgaaagcctatatattgaaga

SEQ ID NO: 1149438 - DNA, 25 bp, Homo sapien
acattaatatgactggatgggctca

SEQ ID NO: 1149439 - DNA, 25 bp, Homo sapien
ttttgccccaagcaacaaagaggca

SEQ ID NO: 1149440 - DNA, 25 bp, Homo sapien
ggtcacgtcagctagaaacattaat

SEQ ID NO: 1149441 - DNA, 25 bp, Homo sapien
gaagtattctccgttgccaagctag

SEQ ID NO: 1149442 - DNA, 25 bp, Homo sapien
tgggcccatcagatccagtacttac

SEQ ID NO: 1149443 - DNA, 25 bp, Homo sapien
gagctgggcccatcagatccagtac

SEQ ID NO: 1149444 - DNA, 25 bp, Homo sapien
ctgagctgggcccatcagatccagt

SEQ ID NO: 1149445 - DNA, 25 bp, Homo sapien
gctgggcccatcagatccagtactt

SEQ ID NO: 1149446 - DNA, 25 bp, Homo sapien
ggtccttagcctgtattgcggagca

SEQ ID NO: 1149447 - DNA, 25 bp, Homo sapien
tgggcacccttcttcgaacaatggc

SEQ ID NO: 1149448 - DNA, 25 bp, Homo sapien
aattctcagactagaacgtttagga

SEQ ID NO: 1149449 - DNA, 25 bp, Homo sapien
aagctttcggcgaccagctggaccc

SEQ ID NO: 1149450 - DNA, 25 bp, Homo sapien
caccttcgtgaccagggtatctctc

SEQ ID NO: 1149451 - DNA, 25 bp, Homo sapien
agcgcgaatgcagtctaccactgcc

SEQ ID NO: 1149452 - DNA, 25 bp, Homo sapien
tcgtgaccagggtatctctcctgcc

SEQ ID NO: 1149453 - DNA, 25 bp, Homo sapien
gcgcgaatgcagtctaccactgcca

SEQ ID NO: 1149454 - DNA, 25 bp, Homo sapien
atatttgcccacacacgcctgaggt

SEQ ID NO: 1149455 - DNA, 25 bp, Homo sapien
cgcctgaggtcgagcgatattaaca

SEQ ID NO: 1149456 - DNA, 25 bp, Homo sapien
tcgacgtacctcatagattgctggg

SEQ ID NO: 1149457 - DNA, 25 bp, Homo sapien
gcccagtatgcgtttctgcagcaaa

SEQ ID NO: 1149458 - DNA, 25 bp, Homo sapien
gcttgaaccaccagcctttcggttc

SEQ ID NO: 1149459 - DNA, 25 bp, Homo sapien
ggcactaaccgatggcgccacagag

SEQ ID NO: 1149460 - DNA, 25 bp, Homo sapien
cagcctttcggttcaaacagccgaa

SEQ ID NO: 1149461 - DNA, 25 bp, Homo sapien
aacagccgaaggcactaaccgatgg

SEQ ID NO: 1149462 - DNA, 25 bp, Homo sapien
gaaattgaggcttcaccacaagtga

SEQ ID NO: 1149463 - DNA, 25 bp, Homo sapien
cgcacagcgtattttggcatcgaat

SEQ ID NO: 1149464 - DNA, 25 bp, Homo sapien
gctagtagaggtccggaagattccc

SEQ ID NO: 1149465 - DNA, 25 bp, Homo sapien
tggaacttgagccttcgcacagcgt

SEQ ID NO: 1149466 - DNA, 25 bp, Homo sapien
cacaagctcccacaatgccagagag

SEQ ID NO: 1149467 - DNA, 25 bp, Homo sapien
tatttatgagtcaagatgaggaagt

SEQ ID NO: 1149468 - DNA, 25 bp, Homo sapien
tgtctgaaatagaggctggttggat

SEQ ID NO: 1149469 - DNA, 25 bp, Homo sapien
agaggtggctctgatatatttatga

SEQ ID NO: 1149470 - DNA, 25 bp, Homo sapien
tctaatgaagtaaccgctgttaagt

SEQ ID NO: 1149471 - DNA, 25 bp, Homo sapien
ctctaatgaagtaaccgctgttaag

SEQ ID NO: 1149472 - DNA, 25 bp, Homo sapien
ctaatgaagtaaccgctgttaagtt

SEQ ID NO: 1149473 - DNA, 25 bp, Homo sapien
gtctcactgaggtcagggaaccaga

SEQ ID NO: 1149474 - DNA, 25 bp, Homo sapien
actctgtgggtcagctccagccagg

SEQ ID NO: 1149475 - DNA, 25 bp, Homo sapien
caggccggctgctgtctcactgagg

SEQ ID NO: 1149476 - DNA, 25 bp, Homo sapien
gattccctactctgtgggtcagctc

SEQ ID NO: 1149477 - DNA, 25 bp, Homo sapien
caaacattactctgctatccaattc

SEQ ID NO: 1149478 - DNA, 25 bp, Homo sapien
ttccagaggtcaaacattactctgc

SEQ ID NO: 1149479 - DNA, 25 bp, Homo sapien
gaggtcaaacattactctgctatcc

SEQ ID NO: 1149480 - DNA, 25 bp, Homo sapien
tgtttccagaggtcaaacattactc

SEQ ID NO: 1149481 - DNA, 25 bp, Homo sapien
tcccaggcgccggttcttcccagct

SEQ ID NO: 1149482 - DNA, 25 bp, Homo sapien
ttcccaggcgccggttcttcccagc

SEQ ID NO: 1149483 - DNA, 25 bp, Homo sapien
tgagagtgcttagagttgggggact

SEQ ID NO: 1149484 - DNA, 25 bp, Homo sapien
gagttgggggactgccatgggagga

SEQ ID NO: 1149485 - DNA, 25 bp, Homo sapien
gggggactgccatgggaggacctgg

SEQ ID NO: 1149486 - DNA, 25 bp, Homo sapien
gagtgagagtgcttagagttggggg

SEQ ID NO: 1149487 - DNA, 25 bp, Homo sapien
agcattgcagcggaggatcttgcat

SEQ ID NO: 1149488 - DNA, 25 bp, Homo sapien
tcctcgaagtgctcctgatgaaccc

SEQ ID NO: 1149489 - DNA, 25 bp, Homo sapien
ctcctcctcgaagtgctcctgatga

SEQ ID NO: 1149490 - DNA, 25 bp, Homo sapien
aaggctcagagtggacgatacgtac

SEQ ID NO: 1149491 - DNA, 25 bp, Homo sapien
ccacctctaaggctcagagtggacg

SEQ ID NO: 1149492 - DNA, 25 bp, Homo sapien
ggtgcgccgagtgcagagcgcatag

SEQ ID NO: 1149493 - DNA, 25 bp, Homo sapien
agggctcgacagaggccgccagagc

SEQ ID NO: 1149494 - DNA, 25 bp, Homo sapien
gagcgcataggagcggagggctcga

SEQ ID NO: 1149495 - DNA, 25 bp, Homo sapien
aatggaaggcgaggtccccgcggca

SEQ ID NO: 1149496 - DNA, 25 bp, Homo sapien
gaaaaccggccttcatagtcacaag

SEQ ID NO: 1149497 - DNA, 25 bp, Homo sapien
caagctccttggacacggcatgtgt

SEQ ID NO: 1149498 - DNA, 25 bp, Homo sapien
aaggaagcgcaatgcaagaaccccg

SEQ ID NO: 1149499 - DNA, 25 bp, Homo sapien
tcattatccagtagaggccaagctc

SEQ ID NO: 1149500 - DNA, 25 bp, Homo sapien
tatcaatggttatagctccccgacg

SEQ ID NO: 1149501 - DNA, 25 bp, Homo sapien
agagtcgctgacttggagggcaccc

SEQ ID NO: 1149502 - DNA, 25 bp, Homo sapien
cgacgattgcgctctgatcgagaga

SEQ ID NO: 1149503 - DNA, 25 bp, Homo sapien
ccagggttagcagtttgaatcgaca

SEQ ID NO: 1149504 - DNA, 25 bp, Homo sapien
cacagagatccggaatgcagtaacc

SEQ ID NO: 1149505 - DNA, 25 bp, Homo sapien
gatgatacttctgtcctacctgtgc

SEQ ID NO: 1149506 - DNA, 25 bp, Homo sapien
caaactagtaatgggactgatggtc

SEQ ID NO: 1149507 - DNA, 25 bp, Homo sapien
tgtgataatttcaaccctggactgc

SEQ ID NO: 1149508 - DNA, 25 bp, Homo sapien
agtggagtgaacacattgcatttac

SEQ ID NO: 1149509 - DNA, 25 bp, Homo sapien
tccctgagatagcaacagtatctga

SEQ ID NO: 1149510 - DNA, 25 bp, Homo sapien
ttgtctctccaatagcctgtaaact

SEQ ID NO: 1149511 - DNA, 25 bp, Homo sapien
agtatctgatacttccgagccctct

SEQ ID NO: 1149512 - DNA, 25 bp, Homo sapien
gcctggaagatcgttaacaatttga

SEQ ID NO: 1149513 - DNA, 25 bp, Homo sapien
tgtcccattactccttgtctactgc

SEQ ID NO: 1149514 - DNA, 25 bp, Homo sapien
tgaatccatgcataactccagatgg

SEQ ID NO: 1149515 - DNA, 25 bp, Homo sapien
aggtgcttcataatctggcctctgc

SEQ ID NO: 1149516 - DNA, 25 bp, Homo sapien
taagagttagaaatgacggtggaag

SEQ ID NO: 1149517 - DNA, 25 bp, Homo sapien
gcgcctaaaaaatatacgccgctgg

SEQ ID NO: 1149518 - DNA, 25 bp, Homo sapien
tccaaatcgaggaaacccctttgca

SEQ ID NO: 1149519 - DNA, 25 bp, Homo sapien
tacactaagcgaagtcagagaaaaa

SEQ ID NO: 1149520 - DNA, 25 bp, Homo sapien
cctaacggctttgacacgagtaact

SEQ ID NO: 1149521 - DNA, 25 bp, Homo sapien
actgccgtacaccttttcagggtcg

SEQ ID NO: 1149522 - DNA, 25 bp, Homo sapien
tccgcaagccaggatcctaacggct

SEQ ID NO: 1149523 - DNA, 25 bp, Homo sapien
aagtctgtttgcactgctgggatcc

SEQ ID NO: 1149524 - DNA, 25 bp, Homo sapien
cttccagaagaagcgtgtcttcata

SEQ ID NO: 1149525 - DNA, 25 bp, Homo sapien
gtcttccagaagaagcgtgtcttca

SEQ ID NO: 1149526 - DNA, 25 bp, Homo sapien
agcgtgtcttcatagcgcaggtact

SEQ ID NO: 1149527 - DNA, 25 bp, Homo sapien
gcgtgtcttcatagcgcaggtactc

SEQ ID NO: 1149528 - DNA, 25 bp, Homo sapien
tacaggttttgtgtattcaattctc

SEQ ID NO: 1149529 - DNA, 25 bp, Homo sapien
tcttctctaatcagctttcaccctc

SEQ ID NO: 1149530 - DNA, 25 bp, Homo sapien
gagcaacttaaaacatttcgtacag

SEQ ID NO: 1149531 - DNA, 25 bp, Homo sapien
ctttcaccctccaacaatgaattgg

SEQ ID NO: 1149532 - DNA, 25 bp, Homo sapien
taaggaatgcttgggtggcatgcaa

SEQ ID NO: 1149533 - DNA, 25 bp, Homo sapien
gcaatactgaaagattcacccagga

SEQ ID NO: 1149534 - DNA, 25 bp, Homo sapien
tctgatgtattttgtcgggcagcaa

SEQ ID NO: 1149535 - DNA, 25 bp, Homo sapien
cataagactttaactacccgaggca

SEQ ID NO: 1149536 - DNA, 25 bp, Homo sapien
tgaggaagctcaaagccgaacttgt

SEQ ID NO: 1149537 - DNA, 25 bp, Homo sapien
ttccaggtctcatgatcaccatctc

SEQ ID NO: 1149538 - DNA, 25 bp, Homo sapien
tttccaggtctcatgatcaccatct

SEQ ID NO: 1149539 - DNA, 25 bp, Homo sapien
aaagccgaacttgtactcatatttg

SEQ ID NO: 1149540 - DNA, 25 bp, Homo sapien
gtaagtgatcaaaggagggcaagat

SEQ ID NO: 1149541 - DNA, 25 bp, Homo sapien
tgatcaaaggagggcaagatatttt

SEQ ID NO: 1149542 - DNA, 25 bp, Homo sapien
aagtgatcaaaggagggcaagatat

SEQ ID NO: 1149543 - DNA, 25 bp, Homo sapien
gtgatcaaaggagggcaagatattt

SEQ ID NO: 1149544 - DNA, 25 bp, Homo sapien
aagccttcacccagtagtctacaca

SEQ ID NO: 1149545 - DNA, 25 bp, Homo sapien
tggctcgggcggtcaagaaaagcct

SEQ ID NO: 1149546 - DNA, 25 bp, Homo sapien
aatcaggggtattgacatccaccag

SEQ ID NO: 1149547 - DNA, 25 bp, Homo sapien
ttgtctcttgagttggctggctcgg

SEQ ID NO: 1149548 - DNA, 25 bp, Homo sapien
caatctaatgcccaagacgtctgat

SEQ ID NO: 1149549 - DNA, 25 bp, Homo sapien
ttgagatgcttcaatctaatgccca

SEQ ID NO: 1149550 - DNA, 25 bp, Homo sapien
caagacgtctgatttatcatcctca

SEQ ID NO: 1149551 - DNA, 25 bp, Homo sapien
ctcatgacccaggagaatagaatct

SEQ ID NO: 1149552 - DNA, 25 bp, Homo sapien
tgtcaattcgagcagagacagacac

SEQ ID NO: 1149553 - DNA, 25 bp, Homo sapien
cagacacccgcccatcaggaatgaa

SEQ ID NO: 1149554 - DNA, 25 bp, Homo sapien
agacacccgcccatcaggaatgaac

SEQ ID NO: 1149555 - DNA, 25 bp, Homo sapien
ccttttctgtcaattcgagcagaga

SEQ ID NO: 1149556 - DNA, 25 bp, Homo sapien
tgttttaactgccataagcactagg

SEQ ID NO: 1149557 - DNA, 25 bp, Homo sapien
cagtcccatgcccttgcccctaaac

SEQ ID NO: 1149558 - DNA, 25 bp, Homo sapien
actgccataagcactaggattttac

SEQ ID NO: 1149559 - DNA, 25 bp, Homo sapien
actcagtatagttaatgacacttcc

SEQ ID NO: 1149560 - DNA, 25 bp, Homo sapien
tgatgcgcatgtccctgagataata

SEQ ID NO: 1149561 - DNA, 25 bp, Homo sapien
tattctcaaagtcagcatggatgga

SEQ ID NO: 1149562 - DNA, 25 bp, Homo sapien
cacaattcgggaacatgtattctca

SEQ ID NO: 1149563 - DNA, 25 bp, Homo sapien
cagcaccttggtctggccattggca

SEQ ID NO: 1149564 - DNA, 25 bp, Homo sapien
gcagcccaggatagaaggcctgatc

SEQ ID NO: 1149565 - DNA, 25 bp, Homo sapien
actcgaaggatgttgcagcccagga

SEQ ID NO: 1149566 - DNA, 25 bp, Homo sapien
gcccaggatagaaggcctgatcttc

SEQ ID NO: 1149567 - DNA, 25 bp, Homo sapien
ggaatattcaactcgaaggatgttg

SEQ ID NO: 1149568 - DNA, 25 bp, Homo sapien
aagacagctgtggtaacagatgaac

SEQ ID NO: 1149569 - DNA, 25 bp, Homo sapien
cagctgtggtaacagatgaacaatt

SEQ ID NO: 1149570 - DNA, 25 bp, Homo sapien
gatggcagtttattacaccagaggt

SEQ ID NO: 1149571 - DNA, 25 bp, Homo sapien
ctagaaaggaagatggcagtttatt

SEQ ID NO: 1149572 - DNA, 25 bp, Homo sapien
gctgcttagacctgatctgctgcca

SEQ ID NO: 1149573 - DNA, 25 bp, Homo sapien
ggatgttcagatctacccaactcat

SEQ ID NO: 1149574 - DNA, 25 bp, Homo sapien
gcaggtcaaggatgaccttcttgga

SEQ ID NO: 1149575 - DNA, 25 bp, Homo sapien
ccttcttggatccaggaacgctaac

SEQ ID NO: 1149576 - DNA, 25 bp, Homo sapien
tcctgcccaagaaatgctggaccat

SEQ ID NO: 1149577 - DNA, 25 bp, Homo sapien
gaatcctgcccaagaaatgctggac

SEQ ID NO: 1149578 - DNA, 25 bp, Homo sapien
ccaagaaatgctggaccatcacaat

SEQ ID NO: 1149579 - DNA, 25 bp, Homo sapien
gctggaccatcacaattttacaaac

SEQ ID NO: 1149580 - DNA, 25 bp, Homo sapien
gggctctccaatcggtgatcttcag

SEQ ID NO: 1149581 - DNA, 25 bp, Homo sapien
cagtataagtcggtggtggcatgaa

SEQ ID NO: 1149582 - DNA, 25 bp, Homo sapien
gctgtcttgagagccatccatgtca

SEQ ID NO: 1149583 - DNA, 25 bp, Homo sapien
tcaggaatgacatccatatagcagg

SEQ ID NO: 1149584 - DNA, 25 bp, Homo sapien
gaaacagactatttcagttcaggta

SEQ ID NO: 1149585 - DNA, 25 bp, Homo sapien
aaaccagtttagcaatccgtctaag

SEQ ID NO: 1149586 - DNA, 25 bp, Homo sapien
tcttatagaaagcttaggacaaatt

SEQ ID NO: 1149587 - DNA, 25 bp, Homo sapien
taacagtaaagatgacaatcctcac

SEQ ID NO: 1149588 - DNA, 25 bp, Homo sapien
cattgttgttgaggatgcagggatc

SEQ ID NO: 1149589 - DNA, 25 bp, Homo sapien
tgcacattgttgttgaggatgcagg

SEQ ID NO: 1149590 - DNA, 25 bp, Homo sapien
tcactgcacattgttgttgaggatg

SEQ ID NO: 1149591 - DNA, 25 bp, Homo sapien
cacattgttgttgaggatgcaggga

SEQ ID NO: 1149592 - DNA, 25 bp, Homo sapien
tatttgcagtaggagaacacagtgc

SEQ ID NO: 1149593 - DNA, 25 bp, Homo sapien
caaagatgaccgtagagcagctagc

SEQ ID NO: 1149594 - DNA, 25 bp, Homo sapien
ttgaaaagcttacgccaggaggcca

SEQ ID NO: 1149595 - DNA, 25 bp, Homo sapien
gagacacagtagaccagtttcagct

SEQ ID NO: 1149596 - DNA, 25 bp, Homo sapien
tgacagcagcaaccctttcacatga

SEQ ID NO: 1149597 - DNA, 25 bp, Homo sapien
cacagggttcggcatcttgatcaag

SEQ ID NO: 1149598 - DNA, 25 bp, Homo sapien
ttctcatggcagtatttggaggttc

SEQ ID NO: 1149599 - DNA, 25 bp, Homo sapien
ccttgggtttgaagtcacagtgggc

SEQ ID NO: 1149600 - DNA, 25 bp, Homo sapien
ctttctggctgtaataactctcaga

SEQ ID NO: 1149601 - DNA, 25 bp, Homo sapien
cagaaaagggtggagctcagtgctc

SEQ ID NO: 1149602 - DNA, 25 bp, Homo sapien
acaaagtgctatggctgagagtgac

SEQ ID NO: 1149603 - DNA, 25 bp, Homo sapien
tgagagtgactgaccaagtgctggc

SEQ ID NO: 1149604 - DNA, 25 bp, Homo sapien
ttacaaagaatatccccatctgggg

SEQ ID NO: 1149605 - DNA, 25 bp, Homo sapien
tctggttaagtacaaaatatagtct

SEQ ID NO: 1149606 - DNA, 25 bp, Homo sapien
tacaaagaatatccccatctggggt

SEQ ID NO: 1149607 - DNA, 25 bp, Homo sapien
tacaaaatatagtctttaccataca

SEQ ID NO: 1149608 - DNA, 25 bp, Homo sapien
gagatagaactgcagagaagcctct

SEQ ID NO: 1149609 - DNA, 25 bp, Homo sapien
tccaaaagtatgtgaagcacaggcc

SEQ ID NO: 1149610 - DNA, 25 bp, Homo sapien
ggcagagctacacctatctccaggg

SEQ ID NO: 1149611 - DNA, 25 bp, Homo sapien
agagtttgaagctgtcctgcgggac

SEQ ID NO: 1149612 - DNA, 25 bp, Homo sapien
agttcaaggtcacaatctgcaagcc

SEQ ID NO: 1149613 - DNA, 25 bp, Homo sapien
cagtagatttctgactgaagaaggg

SEQ ID NO: 1149614 - DNA, 25 bp, Homo sapien
gccaggactcaaatcaaacaggcca

SEQ ID NO: 1149615 - DNA, 25 bp, Homo sapien
caccagtagatttctgactgaagaa

SEQ ID NO: 1149616 - DNA, 25 bp, Homo sapien
caggcatctggccagtcgtttccaa

SEQ ID NO: 1149617 - DNA, 25 bp, Homo sapien
atcaactagcaagaaagggacacca

SEQ ID NO: 1149618 - DNA, 25 bp, Homo sapien
caattccatcaactagcaagaaagg

SEQ ID NO: 1149619 - DNA, 25 bp, Homo sapien
aagaacctgcttcagcttgggtagc

SEQ ID NO: 1149620 - DNA, 25 bp, Homo sapien
gcagtttgaaggagtaagcctggtt

SEQ ID NO: 1149621 - DNA, 25 bp, Homo sapien
tatatagctctttgtggagataatt

SEQ ID NO: 1149622 - DNA, 25 bp, Homo sapien
gagttcatataatctgtctgttccc

SEQ ID NO: 1149623 - DNA, 25 bp, Homo sapien
gtgcaaaggacaaacatctcaattg

SEQ ID NO: 1149624 - DNA, 25 bp, Homo sapien
atggcagttttctatcgcgcatggg

SEQ ID NO: 1149625 - DNA, 25 bp, Homo sapien
tattgattgtatactagagaatggc

SEQ ID NO: 1149626 - DNA, 25 bp, Homo sapien
gattgtatactagagaatggcagtt

SEQ ID NO: 1149627 - DNA, 25 bp, Homo sapien
agagaatggcagttttctatcgcgc

SEQ ID NO: 1149628 - DNA, 25 bp, Homo sapien
tcggtccgacacttgccaaacttgt

SEQ ID NO: 1149629 - DNA, 25 bp, Homo sapien
tagaacgccaccgacttgaggaagc

SEQ ID NO: 1149630 - DNA, 25 bp, Homo sapien
taaggcttgacctggttcggtccga

SEQ ID NO: 1149631 - DNA, 25 bp, Homo sapien
ggaagcccagtacatttcaagttgg

SEQ ID NO: 1149632 - DNA, 25 bp, Homo sapien
cagaggttcatttctccgtaggccc

SEQ ID NO: 1149633 - DNA, 25 bp, Homo sapien
ccttcatctggagtgagaccggaaa

SEQ ID NO: 1149634 - DNA, 25 bp, Homo sapien
gaccggaaataagtgaccccagctg

SEQ ID NO: 1149635 - DNA, 25 bp, Homo sapien
acacggtccctcgatgagatatgag

SEQ ID NO: 1149636 - DNA, 25 bp, Homo sapien
gtctccccaaccctggtacgctgat

SEQ ID NO: 1149637 - DNA, 25 bp, Homo sapien
tccccaaccctggtacgctgatccc

SEQ ID NO: 1149638 - DNA, 25 bp, Homo sapien
aaccctggtacgctgatcccaaatc

SEQ ID NO: 1149639 - DNA, 25 bp, Homo sapien
cccaaccctggtacgctgatcccaa

SEQ ID NO: 1149640 - DNA, 25 bp, Homo sapien
ctcagggtcctgagctaattcagag

SEQ ID NO: 1149641 - DNA, 25 bp, Homo sapien
tcttggacacgtgtcaactatgtgc

SEQ ID NO: 1149642 - DNA, 25 bp, Homo sapien
gaggccccccagatgcaagatactg

SEQ ID NO: 1149643 - DNA, 25 bp, Homo sapien
tttgcaggaagctacccatttttac

SEQ ID NO: 1149644 - DNA, 25 bp, Homo sapien
tgtctccatggttaccatagcttcc

SEQ ID NO: 1149645 - DNA, 25 bp, Homo sapien
ttccatccacatattttaggaatga

SEQ ID NO: 1149646 - DNA, 25 bp, Homo sapien
catggttaccatagcttccatccac

SEQ ID NO: 1149647 - DNA, 25 bp, Homo sapien
ccatccacatattttaggaatgagt

SEQ ID NO: 1149648 - DNA, 25 bp, Homo sapien
tccatcttgcttgacgatctctgtc

SEQ ID NO: 1149649 - DNA, 25 bp, Homo sapien
tcctatctgtctattggtctctcac

SEQ ID NO: 1149650 - DNA, 25 bp, Homo sapien
ttaatctcagtcttgcttagacgtc

SEQ ID NO: 1149651 - DNA, 25 bp, Homo sapien
tgcttagacgtcttattttttccat

SEQ ID NO: 1149652 - DNA, 25 bp, Homo sapien
ttttagataaggcaagggacattcc

SEQ ID NO: 1149653 - DNA, 25 bp, Homo sapien
aaaaacggaacacccatcgcagaga

SEQ ID NO: 1149654 - DNA, 25 bp, Homo sapien
gacctcagctcccttatgtagacct

SEQ ID NO: 1149655 - DNA, 25 bp, Homo sapien
caccccgtattattgtgggcaggga

SEQ ID NO: 1149656 - DNA, 25 bp, Homo sapien
gcaaagagaggcaagagatgtggct

SEQ ID NO: 1149657 - DNA, 25 bp, Homo sapien
ctgtgcaaagagaggcaagagatgt

SEQ ID NO: 1149658 - DNA, 25 bp, Homo sapien
agagaggcaagagatgtggctttct

SEQ ID NO: 1149659 - DNA, 25 bp, Homo sapien
agaggcaagagatgtggctttcttc

SEQ ID NO: 1149660 - DNA, 25 bp, Homo sapien
gtagaaaggctttttggatccacag

SEQ ID NO: 1149661 - DNA, 25 bp, Homo sapien
ctgtgtaagaaaggtgtagaaaggc

SEQ ID NO: 1149662 - DNA, 25 bp, Homo sapien
tgtgtaagaaaggtgtagaaaggct

SEQ ID NO: 1149663 - DNA, 25 bp, Homo sapien
aaaggctttttggatccacagccgg

SEQ ID NO: 1149664 - DNA, 25 bp, Homo sapien
cccagacagggaccatcatccagat

SEQ ID NO: 1149665 - DNA, 25 bp, Homo sapien
tgtttgtgcgctcctgtgcgccaga

SEQ ID NO: 1149666 - DNA, 25 bp, Homo sapien
agatccccattctccgcacttggtg

SEQ ID NO: 1149667 - DNA, 25 bp, Homo sapien
tgacctgccatacacggcacatggc

SEQ ID NO: 1149668 - DNA, 25 bp, Homo sapien
ggagctctgctgtgctatttatagc

SEQ ID NO: 1149669 - DNA, 25 bp, Homo sapien
ggcacccggattcccttggtgtcag

SEQ ID NO: 1149670 - DNA, 25 bp, Homo sapien
tggtgtcagtatctgcgccccggcg

SEQ ID NO: 1149671 - DNA, 25 bp, Homo sapien
tgaatgtccgcagaatctccgcctg

SEQ ID NO: 1149672 - DNA, 25 bp, Homo sapien
gcaccctacagtcacacatgtattc

SEQ ID NO: 1149673 - DNA, 25 bp, Homo sapien
tcctaacctgttttagcttgccaca

SEQ ID NO: 1149674 - DNA, 25 bp, Homo sapien
taacctgttttagcttgccacaacc

SEQ ID NO: 1149675 - DNA, 25 bp, Homo sapien
cacacatgtattctcattcctaacc

SEQ ID NO: 1149676 - DNA, 25 bp, Homo sapien
ctgccgaggatgactaggggtatgg

SEQ ID NO: 1149677 - DNA, 25 bp, Homo sapien
gaggtctcagtgacgaagccgatcc

SEQ ID NO: 1149678 - DNA, 25 bp, Homo sapien
cctgaggtctcagtgacgaagccga

SEQ ID NO: 1149679 - DNA, 25 bp, Homo sapien
tgccgaggatgactaggggtatggg

SEQ ID NO: 1149680 - DNA, 25 bp, Homo sapien
ctggggcgagggcacagatggagcc

SEQ ID NO: 1149681 - DNA, 25 bp, Homo sapien
ggctggggcgagggcacagatggag

SEQ ID NO: 1149682 - DNA, 25 bp, Homo sapien
tggggcgagggcacagatggagccg

SEQ ID NO: 1149683 - DNA, 25 bp, Homo sapien
gggcgagggcacagatggagccggg

SEQ ID NO: 1149684 - DNA, 25 bp, Homo sapien
gatgatgatgacctccgtacccttg

SEQ ID NO: 1149685 - DNA, 25 bp, Homo sapien
acctccgggttgtgggcgaatgtca

SEQ ID NO: 1149686 - DNA, 25 bp, Homo sapien
gatactgccgggtcttcttggtgcc

SEQ ID NO: 1149687 - DNA, 25 bp, Homo sapien
tggatttccgaaggcgacgtgcaga

SEQ ID NO: 1149688 - DNA, 25 bp, Homo sapien
tcagcgccctggctccccaggccca

SEQ ID NO: 1149689 - DNA, 25 bp, Homo sapien
cagcgccctggctccccaggcccac

SEQ ID NO: 1149690 - DNA, 25 bp, Homo sapien
gatgtccacggagagagtgtgcaaa

SEQ ID NO: 1149691 - DNA, 25 bp, Homo sapien
gcaagagagtttgggaccctagccc

SEQ ID NO: 1149692 - DNA, 25 bp, Homo sapien
gaagagcagcttagagcccatgacc

SEQ ID NO: 1149693 - DNA, 25 bp, Homo sapien
tcggagactgcccataagtaagggt

SEQ ID NO: 1149694 - DNA, 25 bp, Homo sapien
caaccaccccagtcagctagcgcct

SEQ ID NO: 1149695 - DNA, 25 bp, Homo sapien
cccaaccaccccagtcagctagcgc

SEQ ID NO: 1149696 - DNA, 25 bp, Homo sapien
gtcccaaccaccccagtcagctagc

SEQ ID NO: 1149697 - DNA, 25 bp, Homo sapien
ctgccgagctaacggtcccaaccac

SEQ ID NO: 1149698 - DNA, 25 bp, Homo sapien
cccggccgccaatggagtagcgccc

SEQ ID NO: 1149699 - DNA, 25 bp, Homo sapien
cggccgccaatggagtagcgccccg

SEQ ID NO: 1149700 - DNA, 25 bp, Homo sapien
ccgccaatggagtagcgccccggag

SEQ ID NO: 1149701 - DNA, 25 bp, Homo sapien
gccaatggagtagcgccccggagcc

SEQ ID NO: 1149702 - DNA, 25 bp, Homo sapien
cagccgctgcgctcgcatagtctcc

SEQ ID NO: 1149703 - DNA, 25 bp, Homo sapien
agccgctgcgctcgcatagtctcca

SEQ ID NO: 1149704 - DNA, 25 bp, Homo sapien
gcagccgctgcgctcgcatagtctc

SEQ ID NO: 1149705 - DNA, 25 bp, Homo sapien
gccgctgcgctcgcatagtctccat

SEQ ID NO: 1149706 - DNA, 25 bp, Homo sapien
gccccagtcactccgggccgcagcg

SEQ ID NO: 1149707 - DNA, 25 bp, Homo sapien
ccgcggccccagtcactccgggccg

SEQ ID NO: 1149708 - DNA, 25 bp, Homo sapien
cagccgcggccccagtcactccggg

SEQ ID NO: 1149709 - DNA, 25 bp, Homo sapien
gcggccccagtcactccgggccgca

SEQ ID NO: 1149710 - DNA, 25 bp, Homo sapien
ggcggtgcgggaggcggcggggcag

SEQ ID NO: 1149711 - DNA, 25 bp, Homo sapien
gggccccagacaggagcagcggcgg

SEQ ID NO: 1149712 - DNA, 25 bp, Homo sapien
ctggggccccagacaggagcagcgg

SEQ ID NO: 1149713 - DNA, 25 bp, Homo sapien
cggtgcgggaggcggcggggcaggc

SEQ ID NO: 1149714 - DNA, 25 bp, Homo sapien
ggcctccacggcctctcgcagcact

SEQ ID NO: 1149715 - DNA, 25 bp, Homo sapien
cctcaccacggcctccacggcctct

SEQ ID NO: 1149716 - DNA, 25 bp, Homo sapien
cacggcctccacggcctctcgcagc

SEQ ID NO: 1149717 - DNA, 25 bp, Homo sapien
cacggcctctcgcagcactgccggg

SEQ ID NO: 1149718 - DNA, 25 bp, Homo sapien
ctcggccatagccctgcgtgtgctt

SEQ ID NO: 1149719 - DNA, 25 bp, Homo sapien
cattctttaagtcagcaccacggga

SEQ ID NO: 1149720 - DNA, 25 bp, Homo sapien
tcataaaccactagagccccattct

SEQ ID NO: 1149721 - DNA, 25 bp, Homo sapien
ttggagggaaccatctcataaacca

SEQ ID NO: 1149722 - DNA, 25 bp, Homo sapien
caggcagggtgacatagcagacata

SEQ ID NO: 1149723 - DNA, 25 bp, Homo sapien
gacactcttctcgatgaactcatca

SEQ ID NO: 1149724 - DNA, 25 bp, Homo sapien
gaactcatcagtgattcttcgggaa

SEQ ID NO: 1149725 - DNA, 25 bp, Homo sapien
taaacacagaattcattagcgcaat

SEQ ID NO: 1149726 - DNA, 25 bp, Homo sapien
gcaatctttgcagcactcctccggg

SEQ ID NO: 1149727 - DNA, 25 bp, Homo sapien
gctatatcatgttaagcaacattcc

SEQ ID NO: 1149728 - DNA, 25 bp, Homo sapien
ggcgtgaccaattactagctatatc

SEQ ID NO: 1149729 - DNA, 25 bp, Homo sapien
gaagatggcggtgttaatttctaag

SEQ ID NO: 1149730 - DNA, 25 bp, Homo sapien
aaatagaacagatacttggtctgac

SEQ ID NO: 1149731 - DNA, 25 bp, Homo sapien
gttggattccagcatgaatcggaag

SEQ ID NO: 1149732 - DNA, 25 bp, Homo sapien
ccctgtatttgggttgtcagcttcc

SEQ ID NO: 1149733 - DNA, 25 bp, Homo sapien
tccagcatgaatcggaaggcaccaa

SEQ ID NO: 1149734 - DNA, 25 bp, Homo sapien
gaaggcaccaatccctgtatttggg

SEQ ID NO: 1149735 - DNA, 25 bp, Homo sapien
tcgttccctcatggccttaaggctg

SEQ ID NO: 1149736 - DNA, 25 bp, Homo sapien
ctgccgagagcattgtcgttccctc

SEQ ID NO: 1149737 - DNA, 25 bp, Homo sapien
gagagcattgtcgttccctcatggc

SEQ ID NO: 1149738 - DNA, 25 bp, Homo sapien
cattgtcgttccctcatggccttaa

SEQ ID NO: 1149739 - DNA, 25 bp, Homo sapien
atccagggcccggtgcgaataatga

SEQ ID NO: 1149740 - DNA, 25 bp, Homo sapien
tggtggcgaatatcatcatccaggg

SEQ ID NO: 1149741 - DNA, 25 bp, Homo sapien
agaatgcatattgcccaactgccca

SEQ ID NO: 1149742 - DNA, 25 bp, Homo sapien
cagtccaaggccatttggtggcgaa

SEQ ID NO: 1149743 - DNA, 25 bp, Homo sapien
aaaacacaaatagtgccgggcgcgg

SEQ ID NO: 1149744 - DNA, 25 bp, Homo sapien
taatccacacgtcccagagaaagga

SEQ ID NO: 1149745 - DNA, 25 bp, Homo sapien
taaatccaggaggtacgagggcaat

SEQ ID NO: 1149746 - DNA, 25 bp, Homo sapien
caaggaagcccgtttcaagcactaa

SEQ ID NO: 1149747 - DNA, 25 bp, Homo sapien
tcgtctgtgccgctcagacactagg

SEQ ID NO: 1149748 - DNA, 25 bp, Homo sapien
tctgtgccgctcagacactaggtac

SEQ ID NO: 1149749 - DNA, 25 bp, Homo sapien
ctcgccttcgatcgagatctcgtct

SEQ ID NO: 1149750 - DNA, 25 bp, Homo sapien
atcgagatctcgtctgtgccgctca

SEQ ID NO: 1149751 - DNA, 25 bp, Homo sapien
cgtgaagatctagcacgtccgccat

SEQ ID NO: 1149752 - DNA, 25 bp, Homo sapien
cccagcctcgtgaagatctagcacg

SEQ ID NO: 1149753 - DNA, 25 bp, Homo sapien
gcctcgtgaagatctagcacgtccg

SEQ ID NO: 1149754 - DNA, 25 bp, Homo sapien
tcgtgaagatctagcacgtccgcca

SEQ ID NO: 1149755 - DNA, 25 bp, Homo sapien
caccagccgtctccactgtcctcac

SEQ ID NO: 1149756 - DNA, 25 bp, Homo sapien
ttccccgcttcccaccagccgtctc

SEQ ID NO: 1149757 - DNA, 25 bp, Homo sapien
tcccaccagccgtctccactgtcct

SEQ ID NO: 1149758 - DNA, 25 bp, Homo sapien
cttccccgcttcccaccagccgtct

SEQ ID NO: 1149759 - DNA, 25 bp, Homo sapien
ttcctattatagccttctctcgcac

SEQ ID NO: 1149760 - DNA, 25 bp, Homo sapien
tttcctattatagccttctctcgca

SEQ ID NO: 1149761 - DNA, 25 bp, Homo sapien
aaattttcctattatagccttctct

SEQ ID NO: 1149762 - DNA, 25 bp, Homo sapien
attttcctattatagccttctctcg

SEQ ID NO: 1149763 - DNA, 25 bp, Homo sapien
caagacccggttcctcgattcccat

SEQ ID NO: 1149764 - DNA, 25 bp, Homo sapien
gaagggggcggaatctctaatccac

SEQ ID NO: 1149765 - DNA, 25 bp, Homo sapien
ctgaagggggcggaatctctaatcc

SEQ ID NO: 1149766 - DNA, 25 bp, Homo sapien
gggggcggaatctctaatccaccca

SEQ ID NO: 1149767 - DNA, 25 bp, Homo sapien
tctttcccaatacactaccagcaag

SEQ ID NO: 1149768 - DNA, 25 bp, Homo sapien
ctggaaccccagaagataaaagaat

SEQ ID NO: 1149769 - DNA, 25 bp, Homo sapien
cagtcatttgtaacaatcgtctctt

SEQ ID NO: 1149770 - DNA, 25 bp, Homo sapien
gaataagtaactatgacagtcattt

SEQ ID NO: 1149771 - DNA, 25 bp, Homo sapien
cgctttttctttcagtttgtgaatg

SEQ ID NO: 1149772 - DNA, 25 bp, Homo sapien
tcttcgctttttctttcagtttgtg

SEQ ID NO: 1149773 - DNA, 25 bp, Homo sapien
ttttctttcagtttgtgaatgctct

SEQ ID NO: 1149774 - DNA, 25 bp, Homo sapien
cggagccaaagccgcgacccttccg

SEQ ID NO: 1149775 - DNA, 25 bp, Homo sapien
ggactccaaaacccgtagctcctgc

SEQ ID NO: 1149776 - DNA, 25 bp, Homo sapien
ctgccctactaggccactctacccc

SEQ ID NO: 1149777 - DNA, 25 bp, Homo sapien
cctgccctactaggccactctaccc

SEQ ID NO: 1149778 - DNA, 25 bp, Homo sapien
ccgtagctcctgccctactaggcca

SEQ ID NO: 1149779 - DNA, 25 bp, Homo sapien
cgaaaactcctcctttctcccattg

SEQ ID NO: 1149780 - DNA, 25 bp, Homo sapien
ggtccgggttcatcgccatcctgct

SEQ ID NO: 1149781 - DNA, 25 bp, Homo sapien
aatcctcacgcatccgcgctcggga

SEQ ID NO: 1149782 - DNA, 25 bp, Homo sapien
agcgttgtggtccgggttcatcgcc

SEQ ID NO: 1149783 - DNA, 25 bp, Homo sapien
ctgtcataatcctcacgcatccgcg

SEQ ID NO: 1149784 - DNA, 25 bp, Homo sapien
tatctctgaacccattcctactgcg

SEQ ID NO: 1149785 - DNA, 25 bp, Homo sapien
gagtgcggactcagattgtttaagc

SEQ ID NO: 1149786 - DNA, 25 bp, Homo sapien
ttctaactactaccacagacacgga

SEQ ID NO: 1149787 - DNA, 25 bp, Homo sapien
tacatgagagacactttaagcaggc

SEQ ID NO: 1149788 - DNA, 25 bp, Homo sapien
ttccccatattctgcgaatttgtcg

SEQ ID NO: 1149789 - DNA, 25 bp, Homo sapien
ccatattctgcgaatttgtcgtgta

SEQ ID NO: 1149790 - DNA, 25 bp, Homo sapien
ttctgcgaatttgtcgtgtatgtct

SEQ ID NO: 1149791 - DNA, 25 bp, Homo sapien
gcgaatttgtcgtgtatgtcttctt

SEQ ID NO: 1149792 - DNA, 25 bp, Homo sapien
cgtgtctgacaaaacatagatttcc

SEQ ID NO: 1149793 - DNA, 25 bp, Homo sapien
gaactacgaatgctacctaaggctt

SEQ ID NO: 1149794 - DNA, 25 bp, Homo sapien
tttctgtctctttggcgtgtctgac

SEQ ID NO: 1149795 - DNA, 25 bp, Homo sapien
tcctatttccccaagtatcactgag

SEQ ID NO: 1149796 - DNA, 25 bp, Homo sapien
ttgagtccctccatagcagcctggg

SEQ ID NO: 1149797 - DNA, 25 bp, Homo sapien
tttcatattcaactagagtataccc

SEQ ID NO: 1149798 - DNA, 25 bp, Homo sapien
ccatcaaatcctggccattgagtcc

SEQ ID NO: 1149799 - DNA, 25 bp, Homo sapien
tgtttcatattcaactagagtatac

SEQ ID NO: 1149800 - DNA, 25 bp, Homo sapien
ttcgttcgtattcccttcacccaga

SEQ ID NO: 1149801 - DNA, 25 bp, Homo sapien
gagaggagtccattagagggacata

SEQ ID NO: 1149802 - DNA, 25 bp, Homo sapien
ttcacccagacagtatttgccctct

SEQ ID NO: 1149803 - DNA, 25 bp, Homo sapien
tactaagtcctcattctgtttcgtt

SEQ ID NO: 1149804 - DNA, 25 bp, Homo sapien
tccggtctggacttctgctgcgtct

SEQ ID NO: 1149805 - DNA, 25 bp, Homo sapien
tcagcgacgtctccggtctggactt

SEQ ID NO: 1149806 - DNA, 25 bp, Homo sapien
tggacttctgctgcgtcttcggcca

SEQ ID NO: 1149807 - DNA, 25 bp, Homo sapien
gacgtctccggtctggacttctgct

SEQ ID NO: 1149808 - DNA, 25 bp, Homo sapien
tcgcaactcaaatactacgcatata

SEQ ID NO: 1149809 - DNA, 25 bp, Homo sapien
aaatataaacacagcaagttccacc

SEQ ID NO: 1149810 - DNA, 25 bp, Homo sapien
aaatggaacatttattcgcaactca

SEQ ID NO: 1149811 - DNA, 25 bp, Homo sapien
ataaacacagcaagttccaccccag

SEQ ID NO: 1149812 - DNA, 25 bp, Homo sapien
gctatgatcagctgcaatccaccct

SEQ ID NO: 1149813 - DNA, 25 bp, Homo sapien
aatgatccatacagccttgctatgc

SEQ ID NO: 1149814 - DNA, 25 bp, Homo sapien
catagagttcagtccctagaagtat

SEQ ID NO: 1149815 - DNA, 25 bp, Homo sapien
aagaaatacatagagttcagtccct

SEQ ID NO: 1149816 - DNA, 25 bp, Homo sapien
tatagccgcattgtcctcagtgtgt

SEQ ID NO: 1149817 - DNA, 25 bp, Homo sapien
agaaatcatatagtcccaggttggg

SEQ ID NO: 1149818 - DNA, 25 bp, Homo sapien
tagaaactcacataactagcccagg

SEQ ID NO: 1149819 - DNA, 25 bp, Homo sapien
catgcctttagacagctggaagtac

SEQ ID NO: 1149820 - DNA, 25 bp, Homo sapien
tccatgggccacaagatgatgcaat

SEQ ID NO: 1149821 - DNA, 25 bp, Homo sapien
tctcaagcacttcttaggcagagca

SEQ ID NO: 1149822 - DNA, 25 bp, Homo sapien
gaatctgatgcctactgagcttacc

SEQ ID NO: 1149823 - DNA, 25 bp, Homo sapien
gctaaggcacttgaaatccatgggc

SEQ ID NO: 1149824 - DNA, 25 bp, Homo sapien
gacaatgcattatactgatttaaga

SEQ ID NO: 1149825 - DNA, 25 bp, Homo sapien
ctatactcctaagaacaaagaaagg

SEQ ID NO: 1149826 - DNA, 25 bp, Homo sapien
taagatttgatccttacttacatcc

SEQ ID NO: 1149827 - DNA, 25 bp, Homo sapien
ctactagaagttagtctgactatac

SEQ ID NO: 1149828 - DNA, 25 bp, Homo sapien
tacaaagcaattccttcaaggcaaa

SEQ ID NO: 1149829 - DNA, 25 bp, Homo sapien
ctctgagactgtaggattagaatta

SEQ ID NO: 1149830 - DNA, 25 bp, Homo sapien
ggcaggatacaacagcatctctgag

SEQ ID NO: 1149831 - DNA, 25 bp, Homo sapien
tagaattatgtcagaaggaggccaa

SEQ ID NO: 1149832 - DNA, 25 bp, Homo sapien
gacacagccgtgcagtcaggaaaag

SEQ ID NO: 1149833 - DNA, 25 bp, Homo sapien
tagaggatctcaatgctactaaagc

SEQ ID NO: 1149834 - DNA, 25 bp, Homo sapien
caaattttgctaaggacagggcagc

SEQ ID NO: 1149835 - DNA, 25 bp, Homo sapien
tcaaaagtgttatgctaaaggagct

SEQ ID NO: 1149836 - DNA, 25 bp, Homo sapien
tgcacacatgtttattgcggcacta

SEQ ID NO: 1149837 - DNA, 25 bp, Homo sapien
ctggattaagaaaatgtggcacata

SEQ ID NO: 1149838 - DNA, 25 bp, Homo sapien
aacccaaatgtctaataatgataga

SEQ ID NO: 1149839 - DNA, 25 bp, Homo sapien
ttcacaacagcaaagacttggaacc

SEQ ID NO: 1149840 - DNA, 25 bp, Homo sapien
gtgtattactgtgcgtgtctgcgtc

SEQ ID NO: 1149841 - DNA, 25 bp, Homo sapien
tgcctcgcgagggacaaacagtatc

SEQ ID NO: 1149842 - DNA, 25 bp, Homo sapien
gaaactcgtgtcttttgagcctcca

SEQ ID NO: 1149843 - DNA, 25 bp, Homo sapien
aagcggaatttcaggacgcgaaact

SEQ ID NO: 1149844 - DNA, 25 bp, Homo sapien
ggctctgagcactgaagcggaccca

SEQ ID NO: 1149845 - DNA, 25 bp, Homo sapien
cactgaagcggacccaggcgtccat

SEQ ID NO: 1149846 - DNA, 25 bp, Homo sapien
agcactgaagcggacccaggcgtcc

SEQ ID NO: 1149847 - DNA, 25 bp, Homo sapien
ctgagcactgaagcggacccaggcg

SEQ ID NO: 1149848 - DNA, 25 bp, Homo sapien
catctcttccgcgaacggaaaggaa

SEQ ID NO: 1149849 - DNA, 25 bp, Homo sapien
ccgcgaacggaaaggaatcatctca

SEQ ID NO: 1149850 - DNA, 25 bp, Homo sapien
tctcaacagcggctcaaatctgcgc

SEQ ID NO: 1149851 - DNA, 25 bp, Homo sapien
tcaaatctgcgcctcacggtccgtt

SEQ ID NO: 1149852 - DNA, 25 bp, Homo sapien
ggagcactactgaatgttgagcaaa

SEQ ID NO: 1149853 - DNA, 25 bp, Homo sapien
ttcaaggccctctagctgaatggag

SEQ ID NO: 1149854 - DNA, 25 bp, Homo sapien
gacacggaaactgggagtgcctcct

SEQ ID NO: 1149855 - DNA, 25 bp, Homo sapien
ctgaatggagaccaaacgccagggc

SEQ ID NO: 1149856 - DNA, 25 bp, Homo sapien
aggctcaggtggctctccagttgtc

SEQ ID NO: 1149857 - DNA, 25 bp, Homo sapien
tggccaagaagagagcaagcatact

SEQ ID NO: 1149858 - DNA, 25 bp, Homo sapien
catgcctctgcagcgcatggccaag

SEQ ID NO: 1149859 - DNA, 25 bp, Homo sapien
tctccagttgtcgaatctgtttctg

SEQ ID NO: 1149860 - DNA, 25 bp, Homo sapien
caaggctcgattgaggtgactaaca

SEQ ID NO: 1149861 - DNA, 25 bp, Homo sapien
tgtcacaggcgaagtacaaggctcg

SEQ ID NO: 1149862 - DNA, 25 bp, Homo sapien
gaacagctcttttggctgactcaag

SEQ ID NO: 1149863 - DNA, 25 bp, Homo sapien
gcatctgctgagttacccaggcgta

SEQ ID NO: 1149864 - DNA, 25 bp, Homo sapien
gagattacacattagatcagaagta

SEQ ID NO: 1149865 - DNA, 25 bp, Homo sapien
tgaatgctattacccctattagaaa

SEQ ID NO: 1149866 - DNA, 25 bp, Homo sapien
aagtgaatgctattacccctattag

SEQ ID NO: 1149867 - DNA, 25 bp, Homo sapien
ggtcagtaagggcatgtatacctac

SEQ ID NO: 1149868 - DNA, 25 bp, Homo sapien
taggcgaatctcataagcatcacgg

SEQ ID NO: 1149869 - DNA, 25 bp, Homo sapien
cgccagaggcctagtttgtccagag

SEQ ID NO: 1149870 - DNA, 25 bp, Homo sapien
gactcttgctccatcagtaggcgaa

SEQ ID NO: 1149871 - DNA, 25 bp, Homo sapien
gatgacctctaaggactcgagccag

SEQ ID NO: 1149872 - DNA, 25 bp, Homo sapien
caattcaggtcccctccttatcctg

SEQ ID NO: 1149873 - DNA, 25 bp, Homo sapien
aattcaggtcccctccttatcctgt

SEQ ID NO: 1149874 - DNA, 25 bp, Homo sapien
caggtcccctccttatcctgtaccg

SEQ ID NO: 1149875 - DNA, 25 bp, Homo sapien
ttcaggtcccctccttatcctgtac

SEQ ID NO: 1149876 - DNA, 25 bp, Homo sapien
gaacagaagctcaggcacatctaga

SEQ ID NO: 1149877 - DNA, 25 bp, Homo sapien
gaaggcagttagaaccttacaggcc

SEQ ID NO: 1149878 - DNA, 25 bp, Homo sapien
gagacatcctattaacttcacgagt

SEQ ID NO: 1149879 - DNA, 25 bp, Homo sapien
agtagaattcgaatgaggctggcac

SEQ ID NO: 1149880 - DNA, 25 bp, Homo sapien
taagggaagagtccactggcacata

SEQ ID NO: 1149881 - DNA, 25 bp, Homo sapien
gcataggccacagctatttacacag

SEQ ID NO: 1149882 - DNA, 25 bp, Homo sapien
gaggaaacatccaacaacttgtggt

SEQ ID NO: 1149883 - DNA, 25 bp, Homo sapien
tgtacaaggaaggataagggccaaa

SEQ ID NO: 1149884 - DNA, 25 bp, Homo sapien
ttgcttacctgaaaggcttgctctt

SEQ ID NO: 1149885 - DNA, 25 bp, Homo sapien
tgcttacctgaaaggcttgctcttc

SEQ ID NO: 1149886 - DNA, 25 bp, Homo sapien
tttgcttacctgaaaggcttgctct

SEQ ID NO: 1149887 - DNA, 25 bp, Homo sapien
ccagtatgagaagtcctctggcctc

SEQ ID NO: 1149888 - DNA, 25 bp, Homo sapien
ctgtccagtatgagaagtcctctgg

SEQ ID NO: 1149889 - DNA, 25 bp, Homo sapien
tccagtatgagaagtcctctggcct

SEQ ID NO: 1149890 - DNA, 25 bp, Homo sapien
tgtccagtatgagaagtcctctggc

SEQ ID NO: 1149891 - DNA, 25 bp, Homo sapien
gggcaagaacaggtgagtgacgaag

SEQ ID NO: 1149892 - DNA, 25 bp, Homo sapien
gcaagaacaggtgagtgacgaaggg

SEQ ID NO: 1149893 - DNA, 25 bp, Homo sapien
caggtgagtgacgaaggggagttcc

SEQ ID NO: 1149894 - DNA, 25 bp, Homo sapien
ggtgagtgacgaaggggagttccat

SEQ ID NO: 1149895 - DNA, 25 bp, Homo sapien
tcataatgttagtatgaggtagtga

SEQ ID NO: 1149896 - DNA, 25 bp, Homo sapien
ctgtggggtcaggatcataatgtta

SEQ ID NO: 1149897 - DNA, 25 bp, Homo sapien
tgtggggtcaggatcataatgttag

SEQ ID NO: 1149898 - DNA, 25 bp, Homo sapien
aatgttagtatgaggtagtgaatgg

SEQ ID NO: 1149899 - DNA, 25 bp, Homo sapien
gggaataggcgtgggtgatgttcat

SEQ ID NO: 1149900 - DNA, 25 bp, Homo sapien
ataggcgtgggtgatgttcatccag

SEQ ID NO: 1149901 - DNA, 25 bp, Homo sapien
gaataggcgtgggtgatgttcatcc

SEQ ID NO: 1149902 - DNA, 25 bp, Homo sapien
ctgggaataggcgtgggtgatgttc

SEQ ID NO: 1149903 - DNA, 25 bp, Homo sapien
aacatgttgtaagacactgtatcca

SEQ ID NO: 1149904 - DNA, 25 bp, Homo sapien
ccccaacatgttgtaagacactgta

SEQ ID NO: 1149905 - DNA, 25 bp, Homo sapien
caacatgttgtaagacactgtatcc

SEQ ID NO: 1149906 - DNA, 25 bp, Homo sapien
tgtccacccccaacatgttgtaaga

SEQ ID NO: 1149907 - DNA, 25 bp, Homo sapien
attgtgggccccccctacagggcag

SEQ ID NO: 1149908 - DNA, 25 bp, Homo sapien
ccctccggtcgcctgaaggcccatc

SEQ ID NO: 1149909 - DNA, 25 bp, Homo sapien
ggtcgcctgaaggcccatcccaggg

SEQ ID NO: 1149910 - DNA, 25 bp, Homo sapien
ctacagggcagcgataaacgtcccc

SEQ ID NO: 1149911 - DNA, 25 bp, Homo sapien
ccccaggtgcatattcacagcagga

SEQ ID NO: 1149912 - DNA, 25 bp, Homo sapien
catccccaggtgcatattcacagca

SEQ ID NO: 1149913 - DNA, 25 bp, Homo sapien
tcacagcaggatgagatgaatttcc

SEQ ID NO: 1149914 - DNA, 25 bp, Homo sapien
tgtctctaacagagacatccccagg

SEQ ID NO: 1149915 - DNA, 25 bp, Homo sapien
cccagttgaaggaggcatgaagact

SEQ ID NO: 1149916 - DNA, 25 bp, Homo sapien
cctcagaacatgctcccagttgaag

SEQ ID NO: 1149917 - DNA, 25 bp, Homo sapien
gaagactactccctgacattaccta

SEQ ID NO: 1149918 - DNA, 25 bp, Homo sapien
acagaccattttcccttaccacact

SEQ ID NO: 1149919 - DNA, 25 bp, Homo sapien
acgggcacatatcccagaactgaag

SEQ ID NO: 1149920 - DNA, 25 bp, Homo sapien
agacagagctgccacaagcacgaga

SEQ ID NO: 1149921 - DNA, 25 bp, Homo sapien
ccctgaggctggaatgaagcatcca

SEQ ID NO: 1149922 - DNA, 25 bp, Homo sapien
ccacaagcacgagaccagagagggg

SEQ ID NO: 1149923 - DNA, 25 bp, Homo sapien
gtgccaggccagatcatggactcct

SEQ ID NO: 1149924 - DNA, 25 bp, Homo sapien
ttctgggaaccaagtactcagcctt

SEQ ID NO: 1149925 - DNA, 25 bp, Homo sapien
gaaacatggagcttttgcaagcaca

SEQ ID NO: 1149926 - DNA, 25 bp, Homo sapien
tagcaatgaggatagccatgcaggc

SEQ ID NO: 1149927 - DNA, 25 bp, Homo sapien
tatgtaggaacatagcaatgactgt

SEQ ID NO: 1149928 - DNA, 25 bp, Homo sapien
agctgggggcaacaagggaaagagg

SEQ ID NO: 1149929 - DNA, 25 bp, Homo sapien
aggggaacactgaggtagaggacac

SEQ ID NO: 1149930 - DNA, 25 bp, Homo sapien
ggaacaaaagcagagtggttctgat

SEQ ID NO: 1149931 - DNA, 25 bp, Homo sapien
ctgtatctgttctgggtcaataaac

SEQ ID NO: 1149932 - DNA, 25 bp, Homo sapien
acagtttccctaccagtcttcgtag

SEQ ID NO: 1149933 - DNA, 25 bp, Homo sapien
gccatccaagacaatgacaacatcc

SEQ ID NO: 1149934 - DNA, 25 bp, Homo sapien
ggaaggtctgaacttcagaccaggg

SEQ ID NO: 1149935 - DNA, 25 bp, Homo sapien
aggtgccacaagcaactgtgcccag

SEQ ID NO: 1149936 - DNA, 25 bp, Homo sapien
agtaggtgccacaagcaactgtgcc

SEQ ID NO: 1149937 - DNA, 25 bp, Homo sapien
ctccacctcttaagtaggtgccaca

SEQ ID NO: 1149938 - DNA, 25 bp, Homo sapien
tcttaagtaggtgccacaagcaact

SEQ ID NO: 1149939 - DNA, 25 bp, Homo sapien
tcgttcggaaatctcccagggacca

SEQ ID NO: 1149940 - DNA, 25 bp, Homo sapien
cagtctttgtttctcgtccctcccg

SEQ ID NO: 1149941 - DNA, 25 bp, Homo sapien
tcaccacttcttccttcgttcggaa

SEQ ID NO: 1149942 - DNA, 25 bp, Homo sapien
ccagggaccactcatgtacagggct

SEQ ID NO: 1149943 - DNA, 25 bp, Homo sapien
catcagtgacaaccaccagtagcct

SEQ ID NO: 1149944 - DNA, 25 bp, Homo sapien
atcagtgacaaccaccagtagcctg

SEQ ID NO: 1149945 - DNA, 25 bp, Homo sapien
tcagtgacaaccaccagtagcctgg

SEQ ID NO: 1149946 - DNA, 25 bp, Homo sapien
agcctcacaggcctttagtgctgca

SEQ ID NO: 1149947 - DNA, 25 bp, Homo sapien
acaggcctttagtgctgcaggaagc

SEQ ID NO: 1149948 - DNA, 25 bp, Homo sapien
atagcgtgtcactcttccagcctca

SEQ ID NO: 1149949 - DNA, 25 bp, Homo sapien
tgcaatcccatagcgtgtcactctt

SEQ ID NO: 1149950 - DNA, 25 bp, Homo sapien
ctaacatgctgtggctgaagtctgg

SEQ ID NO: 1149951 - DNA, 25 bp, Homo sapien
attagagttggtacagaacacagcc

SEQ ID NO: 1149952 - DNA, 25 bp, Homo sapien
gatcaaggaatgaggcattagagtt

SEQ ID NO: 1149953 - DNA, 25 bp, Homo sapien
tggacagttcacaagacactgcccc

SEQ ID NO: 1149954 - DNA, 25 bp, Homo sapien
cattgaaaaagaatcgctcatctgg

SEQ ID NO: 1149955 - DNA, 25 bp, Homo sapien
aaaaatccgatctcctagtgcatcc

SEQ ID NO: 1149956 - DNA, 25 bp, Homo sapien
tgccgccggaggtagtgaccaagga

SEQ ID NO: 1149957 - DNA, 25 bp, Homo sapien
tcatctggatcactggcaatagttc

SEQ ID NO: 1149958 - DNA, 25 bp, Homo sapien
tccagagccccacctacactccaga

SEQ ID NO: 1149959 - DNA, 25 bp, Homo sapien
cttctcccgccctgtccatttctcc

SEQ ID NO: 1149960 - DNA, 25 bp, Homo sapien
ttctcccgccctgtccatttctcca

SEQ ID NO: 1149961 - DNA, 25 bp, Homo sapien
cagagccccacctacactccagaac

SEQ ID NO: 1149962 - DNA, 25 bp, Homo sapien
tgagacatttccagcccaaaggagc

SEQ ID NO: 1149963 - DNA, 25 bp, Homo sapien
gagacatttccagcccaaaggagct

SEQ ID NO: 1149964 - DNA, 25 bp, Homo sapien
agcccaaaggagctttcgttttctg

SEQ ID NO: 1149965 - DNA, 25 bp, Homo sapien
gggaactcgtcttccagtgccattc

SEQ ID NO: 1149966 - DNA, 25 bp, Homo sapien
tccttcaagccatagcacagagcct

SEQ ID NO: 1149967 - DNA, 25 bp, Homo sapien
ggggggaactcgtcttccagtgcca

SEQ ID NO: 1149968 - DNA, 25 bp, Homo sapien
ctcgtcttccagtgccattcgtggg

SEQ ID NO: 1149969 - DNA, 25 bp, Homo sapien
cctgtaagtcctctgcaactctctg

SEQ ID NO: 1149970 - DNA, 25 bp, Homo sapien
taagtcctctgcaactctctgctgc

SEQ ID NO: 1149971 - DNA, 25 bp, Homo sapien
aagtcctctgcaactctctgctgct

SEQ ID NO: 1149972 - DNA, 25 bp, Homo sapien
tgtaagtcctctgcaactctctgct

SEQ ID NO: 1149973 - DNA, 25 bp, Homo sapien
gcgtccaccccgcaaaagcatggaa

SEQ ID NO: 1149974 - DNA, 25 bp, Homo sapien
cttaagctggaaggcgatgactttt

SEQ ID NO: 1149975 - DNA, 25 bp, Homo sapien
tgtctaaatcgaggagccccagaga

SEQ ID NO: 1149976 - DNA, 25 bp, Homo sapien
ggaggctctgggcaaccctcacagc

SEQ ID NO: 1149977 - DNA, 25 bp, Homo sapien
gggcagccacaagtaagacatcagt

SEQ ID NO: 1149978 - DNA, 25 bp, Homo sapien
taagacatcagttgttccatcccta

SEQ ID NO: 1149979 - DNA, 25 bp, Homo sapien
tctgtatccaatgggcagagctcac

SEQ ID NO: 1149980 - DNA, 25 bp, Homo sapien
cacataaacacgtcctgtttccttg

SEQ ID NO: 1149981 - DNA, 25 bp, Homo sapien
catggtacaggtacagtgctccctg

SEQ ID NO: 1149982 - DNA, 25 bp, Homo sapien
gccacatcagcaaaaccatcttggt

SEQ ID NO: 1149983 - DNA, 25 bp, Homo sapien
tcaggaagagctcccatggcaaagc

SEQ ID NO: 1149984 - DNA, 25 bp, Homo sapien
tgactccactctgggttccatggta

SEQ ID NO: 1149985 - DNA, 25 bp, Homo sapien
atctagccgaccatccacacttcgg

SEQ ID NO: 1149986 - DNA, 25 bp, Homo sapien
gccacatcgaccagatcatctccat

SEQ ID NO: 1149987 - DNA, 25 bp, Homo sapien
gcacccacagccacatcgaccagat

SEQ ID NO: 1149988 - DNA, 25 bp, Homo sapien
tcatctccatccagatctagccgac

SEQ ID NO: 1149989 - DNA, 25 bp, Homo sapien
tggcctgtggggtcacctccagtga

SEQ ID NO: 1149990 - DNA, 25 bp, Homo sapien
ggtcagatggacaatgggccgggag

SEQ ID NO: 1149991 - DNA, 25 bp, Homo sapien
agtcagacagactgcctcttggcct

SEQ ID NO: 1149992 - DNA, 25 bp, Homo sapien
gtcacttggaagcaaagggctgcag

SEQ ID NO: 1149993 - DNA, 25 bp, Homo sapien
agagccatcaaatgctgcacgtgcc

SEQ ID NO: 1149994 - DNA, 25 bp, Homo sapien
tccagtgatgcggtgaacctcatgt

SEQ ID NO: 1149995 - DNA, 25 bp, Homo sapien
gcacatggaagtgtagctgctcaca

SEQ ID NO: 1149996 - DNA, 25 bp, Homo sapien
tagctgctcacaagtgacattcccc

SEQ ID NO: 1149997 - DNA, 25 bp, Homo sapien
gccactggccggaggtaatctgatg

SEQ ID NO: 1149998 - DNA, 25 bp, Homo sapien
cagcttttgtatagaggtgggtgag

SEQ ID NO: 1149999 - DNA, 25 bp, Homo sapien
caggccctggctttgtagtattgtc

SEQ ID NO: 1150000 - DNA, 25 bp, Homo sapien
cacagtcaaggccactggccggagg

SEQ ID NO: 1150001 - DNA, 25 bp, Homo sapien
cagtgttgggagcaaggggcagggc

SEQ ID NO: 1150002 - DNA, 25 bp, Homo sapien
gcaaggggcagggcatggcactgct

SEQ ID NO: 1150003 - DNA, 25 bp, Homo sapien
gcagtgttgggagcaaggggcaggg

SEQ ID NO: 1150004 - DNA, 25 bp, Homo sapien
aggggcagggcatggcactgctgac

SEQ ID NO: 1150005 - DNA, 25 bp, Homo sapien
gacacattcattgtcagggccacaa

SEQ ID NO: 1150006 - DNA, 25 bp, Homo sapien
tggagcctctgatgtccatattcac

SEQ ID NO: 1150007 - DNA, 25 bp, Homo sapien
ctggagcctctgatgtccatattca

SEQ ID NO: 1150008 - DNA, 25 bp, Homo sapien
tggtttgcctagtacatgtccatcc

SEQ ID NO: 1150009 - DNA, 25 bp, Homo sapien
tttgcctagtacatgtccatccaac

SEQ ID NO: 1150010 - DNA, 25 bp, Homo sapien
cctggtttgcctagtacatgtccat

SEQ ID NO: 1150011 - DNA, 25 bp, Homo sapien
ggtttgcctagtacatgtccatcca

SEQ ID NO: 1150012 - DNA, 25 bp, Homo sapien
ttgtagataccagcactttccgccg

SEQ ID NO: 1150013 - DNA, 25 bp, Homo sapien
gagactcaggctcgtattgtaagca

SEQ ID NO: 1150014 - DNA, 25 bp, Homo sapien
cacctcgaaccacaaatggggcctt

SEQ ID NO: 1150015 - DNA, 25 bp, Homo sapien
gaggtttctagagaagatgagactc

SEQ ID NO: 1150016 - DNA, 25 bp, Homo sapien
gctccagtctggaagacaggatgcc

SEQ ID NO: 1150017 - DNA, 25 bp, Homo sapien
tccagtctggaagacaggatgcccc

SEQ ID NO: 1150018 - DNA, 25 bp, Homo sapien
cccacactgcagagccgggcatgag

SEQ ID NO: 1150019 - DNA, 25 bp, Homo sapien
tgagcagaaggggcggcacattcca

SEQ ID NO: 1150020 - DNA, 25 bp, Homo sapien
actcaaactctagcagaaaggtcac

SEQ ID NO: 1150021 - DNA, 25 bp, Homo sapien
tggcagtcagcttcacgaagacctg

SEQ ID NO: 1150022 - DNA, 25 bp, Homo sapien
gcagctaaactcaaactctagcaga

SEQ ID NO: 1150023 - DNA, 25 bp, Homo sapien
ctgctggcagtcagcttcacgaaga

SEQ ID NO: 1150024 - DNA, 25 bp, Homo sapien
gtctgggctgtgttatcttgaaggg

SEQ ID NO: 1150025 - DNA, 25 bp, Homo sapien
gctcatattggatgtaggctgaggt

SEQ ID NO: 1150026 - DNA, 25 bp, Homo sapien
aggtctgggctgtgttatcttgaag

SEQ ID NO: 1150027 - DNA, 25 bp, Homo sapien
tcatattggatgtaggctgaggtct

SEQ ID NO: 1150028 - DNA, 25 bp, Homo sapien
gtcaggaagtacatggtcacagcca

SEQ ID NO: 1150029 - DNA, 25 bp, Homo sapien
agggccagcacatggataaagaggt

SEQ ID NO: 1150030 - DNA, 25 bp, Homo sapien
gaacatgacacagacaatgcaagct

SEQ ID NO: 1150031 - DNA, 25 bp, Homo sapien
gacacaggggcatatgatcagcaca

SEQ ID NO: 1150032 - DNA, 25 bp, Homo sapien
tgggagggtcccatatgggtgaacc

SEQ ID NO: 1150033 - DNA, 25 bp, Homo sapien
tgggtgaacctcatagcggtgcagg

SEQ ID NO: 1150034 - DNA, 25 bp, Homo sapien
actgggagggtcccatatgggtgaa

SEQ ID NO: 1150035 - DNA, 25 bp, Homo sapien
ggagggtcccatatgggtgaacctc

SEQ ID NO: 1150036 - DNA, 25 bp, Homo sapien
gacagtgataggaagtaattgcccc

SEQ ID NO: 1150037 - DNA, 25 bp, Homo sapien
tgttagtgatgacttgagacagtga

SEQ ID NO: 1150038 - DNA, 25 bp, Homo sapien
agtaattgcccccatgggccacagc

SEQ ID NO: 1150039 - DNA, 25 bp, Homo sapien
tgaccacatagcagcctaggttctg

SEQ ID NO: 1150040 - DNA, 25 bp, Homo sapien
cctgggggttcagtcaggttctgca

SEQ ID NO: 1150041 - DNA, 25 bp, Homo sapien
gggttcagtcaggttctgcactatg

SEQ ID NO: 1150042 - DNA, 25 bp, Homo sapien
gttcagtcaggttctgcactatgca

SEQ ID NO: 1150043 - DNA, 25 bp, Homo sapien
gtttgtgtgttgaagctcctctgga

SEQ ID NO: 1150044 - DNA, 25 bp, Homo sapien
tcaccacctgacactgagtattgct

SEQ ID NO: 1150045 - DNA, 25 bp, Homo sapien
tgccagctgcccaaggtggcacctc

SEQ ID NO: 1150046 - DNA, 25 bp, Homo sapien
cctcaatagtccaacagagacctca

SEQ ID NO: 1150047 - DNA, 25 bp, Homo sapien
tcattgtgaaccagcctcaatagtc

SEQ ID NO: 1150048 - DNA, 25 bp, Homo sapien
aaaggtgctgaccaccgtcagggac

SEQ ID NO: 1150049 - DNA, 25 bp, Homo sapien
actccaacgggaggcttcagtcagc

SEQ ID NO: 1150050 - DNA, 25 bp, Homo sapien
cctcttcggttcccagctcaaaggt

SEQ ID NO: 1150051 - DNA, 25 bp, Homo sapien
taggacactgccctcttcggttccc

SEQ ID NO: 1150052 - DNA, 25 bp, Homo sapien
ttttcacagctctcagactcggtct

SEQ ID NO: 1150053 - DNA, 25 bp, Homo sapien
acagctctcagactcggtctccagc

SEQ ID NO: 1150054 - DNA, 25 bp, Homo sapien
catcattattttcacagctctcaga

SEQ ID NO: 1150055 - DNA, 25 bp, Homo sapien
ccatcatcattattttcacagctct

SEQ ID NO: 1150056 - DNA, 25 bp, Homo sapien
gcaagcaggagcaaccctcccagga

SEQ ID NO: 1150057 - DNA, 25 bp, Homo sapien
gagagcaagcaggagcaaccctccc

SEQ ID NO: 1150058 - DNA, 25 bp, Homo sapien
gccgggtctgaaccacctccaagag

SEQ ID NO: 1150059 - DNA, 25 bp, Homo sapien
cagggagatgaggataggccgggtc

SEQ ID NO: 1150060 - DNA, 25 bp, Homo sapien
tcattgctccaacttctcttctctt

SEQ ID NO: 1150061 - DNA, 25 bp, Homo sapien
ttcttcctcagggattttcttatgg

SEQ ID NO: 1150062 - DNA, 25 bp, Homo sapien
ttttcttatgggcaaagaagccaag

SEQ ID NO: 1150063 - DNA, 25 bp, Homo sapien
cagggattttcttatgggcaaagaa

SEQ ID NO: 1150064 - DNA, 25 bp, Homo sapien
ctgccagggaggactttctagaccc

SEQ ID NO: 1150065 - DNA, 25 bp, Homo sapien
aagccccagtgttggctatggaacc

SEQ ID NO: 1150066 - DNA, 25 bp, Homo sapien
tatggaaccaggatcacgaggagga

SEQ ID NO: 1150067 - DNA, 25 bp, Homo sapien
tctagccagcagcatccctaggact

SEQ ID NO: 1150068 - DNA, 25 bp, Homo sapien
gaagaatcgaggaagataaccctca

SEQ ID NO: 1150069 - DNA, 25 bp, Homo sapien
tggaagaatcgaggaagataaccct

SEQ ID NO: 1150070 - DNA, 25 bp, Homo sapien
ggtggaagaatcgaggaagataacc

SEQ ID NO: 1150071 - DNA, 25 bp, Homo sapien
agaatcgaggaagataaccctcatc

SEQ ID NO: 1150072 - DNA, 25 bp, Homo sapien
cagatgttgactttactcctttcaa

SEQ ID NO: 1150073 - DNA, 25 bp, Homo sapien
tactcctttcaagccaacgtcagct

SEQ ID NO: 1150074 - DNA, 25 bp, Homo sapien
tgactttactcctttcaagccaacg

SEQ ID NO: 1150075 - DNA, 25 bp, Homo sapien
gttgactttactcctttcaagccaa

SEQ ID NO: 1150076 - DNA, 25 bp, Homo sapien
tccttggaattgtacagaatgtctc

SEQ ID NO: 1150077 - DNA, 25 bp, Homo sapien
ctctgttccttggaattgtacagaa

SEQ ID NO: 1150078 - DNA, 25 bp, Homo sapien
ttggaattgtacagaatgtctcttg

SEQ ID NO: 1150079 - DNA, 25 bp, Homo sapien
tgttccttggaattgtacagaatgt

SEQ ID NO: 1150080 - DNA, 25 bp, Homo sapien
tgctttctaagcaggccccaaggag

SEQ ID NO: 1150081 - DNA, 25 bp, Homo sapien
tatgaccagggttctagggttgccc

SEQ ID NO: 1150082 - DNA, 25 bp, Homo sapien
tttccagtaagcatcaagcaagggc

SEQ ID NO: 1150083 - DNA, 25 bp, Homo sapien
gcactacaggtctcaggtttcaggg

SEQ ID NO: 1150084 - DNA, 25 bp, Homo sapien
tttgttctgaccatctgatatactg

SEQ ID NO: 1150085 - DNA, 25 bp, Homo sapien
gaccatctgatatactgtccacccc

SEQ ID NO: 1150086 - DNA, 25 bp, Homo sapien
ccactgggaaacagagacaatgccc

SEQ ID NO: 1150087 - DNA, 25 bp, Homo sapien
aacagagacaatgcccatgagggtg

SEQ ID NO: 1150088 - DNA, 25 bp, Homo sapien
tatactttctggtcacttaagcagg

SEQ ID NO: 1150089 - DNA, 25 bp, Homo sapien
gaagttaagtctgtcctaggtcaaa

SEQ ID NO: 1150090 - DNA, 25 bp, Homo sapien
tatcctagggaatacatatagagcc

SEQ ID NO: 1150091 - DNA, 25 bp, Homo sapien
gaatacatctcctgtgggaaagcca

SEQ ID NO: 1150092 - DNA, 25 bp, Homo sapien
gagagccgggccacaggttcccgaa

SEQ ID NO: 1150093 - DNA, 25 bp, Homo sapien
gggggatggggacgcgcagagagcc

SEQ ID NO: 1150094 - DNA, 25 bp, Homo sapien
atggggacgcgcagagagccgggcc

SEQ ID NO: 1150095 - DNA, 25 bp, Homo sapien
gggccacgggggatggggacgcgca

SEQ ID NO: 1150096 - DNA, 25 bp, Homo sapien
tggagcaggagaagatacgcttcat

SEQ ID NO: 1150097 - DNA, 25 bp, Homo sapien
ggctgaccagactgcaatattaact

SEQ ID NO: 1150098 - DNA, 25 bp, Homo sapien
tcctaagcaactgggcaagggttca

SEQ ID NO: 1150099 - DNA, 25 bp, Homo sapien
ttgagccttgactggcccaagaacc

SEQ ID NO: 1150100 - DNA, 25 bp, Homo sapien
gagcagtcaggcaactgtgcatcct

SEQ ID NO: 1150101 - DNA, 25 bp, Homo sapien
cacaggttgtgtgaatatagggcat

SEQ ID NO: 1150102 - DNA, 25 bp, Homo sapien
aaaagaggcaaatggttaggatgcc

SEQ ID NO: 1150103 - DNA, 25 bp, Homo sapien
gaggcaaatggttaggatgccaaat

SEQ ID NO: 1150104 - DNA, 25 bp, Homo sapien
tccagagccacaggttgtgtgaata

SEQ ID NO: 1150105 - DNA, 25 bp, Homo sapien
ctccagcagcttctgatcatggcgg

SEQ ID NO: 1150106 - DNA, 25 bp, Homo sapien
agcttggtgggtcgggcagatttcc

SEQ ID NO: 1150107 - DNA, 25 bp, Homo sapien
gatcatggcggttccatctctccac

SEQ ID NO: 1150108 - DNA, 25 bp, Homo sapien
gggactggccattcgagtcaagctt

SEQ ID NO: 1150109 - DNA, 25 bp, Homo sapien
aggcctttggaggctgccagatgaa

SEQ ID NO: 1150110 - DNA, 25 bp, Homo sapien
gccccatttgcaagcaggatagtca

SEQ ID NO: 1150111 - DNA, 25 bp, Homo sapien
cagacattctgtcaggcctttggag

SEQ ID NO: 1150112 - DNA, 25 bp, Homo sapien
catttgcaagcaggatagtcagaca

SEQ ID NO: 1150113 - DNA, 25 bp, Homo sapien
gaagcagaaccttaacacactgtgg

SEQ ID NO: 1150114 - DNA, 25 bp, Homo sapien
tgaagcagaaccttaacacactgtg

SEQ ID NO: 1150115 - DNA, 25 bp, Homo sapien
ctgaagcagaaccttaacacactgt

SEQ ID NO: 1150116 - DNA, 25 bp, Homo sapien
ggcagccttgaatatcagccctggt

SEQ ID NO: 1150117 - DNA, 25 bp, Homo sapien
taggcagccttgaatatcagccctg

SEQ ID NO: 1150118 - DNA, 25 bp, Homo sapien
cagccttgaatatcagccctggttt

SEQ ID NO: 1150119 - DNA, 25 bp, Homo sapien
gcagccttgaatatcagccctggtt

SEQ ID NO: 1150120 - DNA, 25 bp, Homo sapien
ctttggagaaggctatctactaggc

SEQ ID NO: 1150121 - DNA, 25 bp, Homo sapien
gagaaggctatctactaggcaagcc

SEQ ID NO: 1150122 - DNA, 25 bp, Homo sapien
ccccattgggtcaccaatttccatg

SEQ ID NO: 1150123 - DNA, 25 bp, Homo sapien
caatttccatggtaatatgaggagg

SEQ ID NO: 1150124 - DNA, 25 bp, Homo sapien
tggactacggttttctgcatccaca

SEQ ID NO: 1150125 - DNA, 25 bp, Homo sapien
tgcaatggactacggttttctgcat

SEQ ID NO: 1150126 - DNA, 25 bp, Homo sapien
ccagtgcaatggactacggttttct

SEQ ID NO: 1150127 - DNA, 25 bp, Homo sapien
ctgcccagtgcaatggactacggtt

SEQ ID NO: 1150128 - DNA, 25 bp, Homo sapien
caggaaggcttcgtggtcacacagc

SEQ ID NO: 1150129 - DNA, 25 bp, Homo sapien
cacgtccaggaaggcttcgtggtca

SEQ ID NO: 1150130 - DNA, 25 bp, Homo sapien
attatccaacacgtccaggaaggct

SEQ ID NO: 1150131 - DNA, 25 bp, Homo sapien
caacacgtccaggaaggcttcgtgg

SEQ ID NO: 1150132 - DNA, 25 bp, Homo sapien
gactgcagaggcttgacaatcctac

SEQ ID NO: 1150133 - DNA, 25 bp, Homo sapien
cagaggcttgacaatcctaccggct

SEQ ID NO: 1150134 - DNA, 25 bp, Homo sapien
ggactgcagaggcttgacaatccta

SEQ ID NO: 1150135 - DNA, 25 bp, Homo sapien
tgcagaggcttgacaatcctaccgg

SEQ ID NO: 1150136 - DNA, 25 bp, Homo sapien
gtaacattaactcgggcgcctcgct

SEQ ID NO: 1150137 - DNA, 25 bp, Homo sapien
cgatcatcaggggtgtacgtccatc

SEQ ID NO: 1150138 - DNA, 25 bp, Homo sapien
ttcttgtctgtaacattaactcggg

SEQ ID NO: 1150139 - DNA, 25 bp, Homo sapien
tgtgagcagatagctgcgtgcccac

SEQ ID NO: 1150140 - DNA, 25 bp, Homo sapien
tctcacaggccaggatcaaagccga

SEQ ID NO: 1150141 - DNA, 25 bp, Homo sapien
tagtgcagagcatcatgccctgtgc

SEQ ID NO: 1150142 - DNA, 25 bp, Homo sapien
tcttgtgtgtgcagagcatagtgca

SEQ ID NO: 1150143 - DNA, 25 bp, Homo sapien
tcaggagcagttcagccacctcggc

SEQ ID NO: 1150144 - DNA, 25 bp, Homo sapien
agatctgggtgctggactagcctct

SEQ ID NO: 1150145 - DNA, 25 bp, Homo sapien
cgagatctgggtgctggactagcct

SEQ ID NO: 1150146 - DNA, 25 bp, Homo sapien
gatgcgagatctgggtgctggacta

SEQ ID NO: 1150147 - DNA, 25 bp, Homo sapien
tgggatgcgagatctgggtgctgga

SEQ ID NO: 1150148 - DNA, 25 bp, Homo sapien
gcagcaagctcctcccttagttgaa

SEQ ID NO: 1150149 - DNA, 25 bp, Homo sapien
tcaaggtccagataggctgcagctt

SEQ ID NO: 1150150 - DNA, 25 bp, Homo sapien
gccagttcatttgtcagcagcccca

SEQ ID NO: 1150151 - DNA, 25 bp, Homo sapien
ttttctcaaactgctcggagcgccc

SEQ ID NO: 1150152 - DNA, 25 bp, Homo sapien
tgcaaaggactggtgctccgtttgg

SEQ ID NO: 1150153 - DNA, 25 bp, Homo sapien
tttggggtattaatctgacccactg

SEQ ID NO: 1150154 - DNA, 25 bp, Homo sapien
cctcagacccacgagaacatagtag

SEQ ID NO: 1150155 - DNA, 25 bp, Homo sapien
gaacatagtagtgtggtccctgcaa

SEQ ID NO: 1150156 - DNA, 25 bp, Homo sapien
cattttctccccgaattgctagaac

SEQ ID NO: 1150157 - DNA, 25 bp, Homo sapien
ggcaaggcgagcattttctccccga

SEQ ID NO: 1150158 - DNA, 25 bp, Homo sapien
agctgcagggcaaggcgagcatttt

SEQ ID NO: 1150159 - DNA, 25 bp, Homo sapien
tccccgaattgctagaacctcttct

SEQ ID NO: 1150160 - DNA, 25 bp, Homo sapien
ttcctgtaggtggagatgatctctt

SEQ ID NO: 1150161 - DNA, 25 bp, Homo sapien
tcctcttccatgctaaggatttgca

SEQ ID NO: 1150162 - DNA, 25 bp, Homo sapien
catgctaaggatttgcagcaggata

SEQ ID NO: 1150163 - DNA, 25 bp, Homo sapien
tattgtacacttcatgttccatgta

SEQ ID NO: 1150164 - DNA, 25 bp, Homo sapien
tgtacacttcatgttccatgtaacc

SEQ ID NO: 1150165 - DNA, 25 bp, Homo sapien
aacagagaatctcgtatccctgagg

SEQ ID NO: 1150166 - DNA, 25 bp, Homo sapien
gaatctcgtatccctgagggcacac

SEQ ID NO: 1150167 - DNA, 25 bp, Homo sapien
cagagaatctcgtatccctgagggc

SEQ ID NO: 1150168 - DNA, 25 bp, Homo sapien
gagaatctcgtatccctgagggcac

SEQ ID NO: 1150169 - DNA, 25 bp, Homo sapien
tctcaggtctgaggtccataatgtc

SEQ ID NO: 1150170 - DNA, 25 bp, Homo sapien
catagagcttgtttccatccatacc

SEQ ID NO: 1150171 - DNA, 25 bp, Homo sapien
ccataatgtcaggtgaagccctgcc

SEQ ID NO: 1150172 - DNA, 25 bp, Homo sapien
gctgattccagggtccaggttctca

SEQ ID NO: 1150173 - DNA, 25 bp, Homo sapien
ccaggaatcagacttttcatccctt

SEQ ID NO: 1150174 - DNA, 25 bp, Homo sapien
gtgcccatccacgtaaaacctctgc

SEQ ID NO: 1150175 - DNA, 25 bp, Homo sapien
gatccagatatctcagatgctcttt

SEQ ID NO: 1150176 - DNA, 25 bp, Homo sapien
tccattttcctggccgtaaagcagt

SEQ ID NO: 1150177 - DNA, 25 bp, Homo sapien
ggccgtaaagcagtcccgtgcccat

SEQ ID NO: 1150178 - DNA, 25 bp, Homo sapien
cttttgatgatctttcttcaatagc

SEQ ID NO: 1150179 - DNA, 25 bp, Homo sapien
tgatgatctttcttcaatagctgca

SEQ ID NO: 1150180 - DNA, 25 bp, Homo sapien
gatgatctttcttcaatagctgcac

SEQ ID NO: 1150181 - DNA, 25 bp, Homo sapien
tttgatgatctttcttcaatagctg

SEQ ID NO: 1150182 - DNA, 25 bp, Homo sapien
gttctgttccccttaatagaaatga

SEQ ID NO: 1150183 - DNA, 25 bp, Homo sapien
ctgttccccttaatagaaatgactc

SEQ ID NO: 1150184 - DNA, 25 bp, Homo sapien
tctgttccccttaatagaaatgact

SEQ ID NO: 1150185 - DNA, 25 bp, Homo sapien
tgttccccttaatagaaatgactca

SEQ ID NO: 1150186 - DNA, 25 bp, Homo sapien
gactcattcttgagtttagcccaat

SEQ ID NO: 1150187 - DNA, 25 bp, Homo sapien
ccaaagctgcttcctgactcattct

SEQ ID NO: 1150188 - DNA, 25 bp, Homo sapien
agccccggagggagccaaagtcctg

SEQ ID NO: 1150189 - DNA, 25 bp, Homo sapien
caccccacacgtcatatataacaag

SEQ ID NO: 1150190 - DNA, 25 bp, Homo sapien
caggtcctgagatcttttttgctgt

SEQ ID NO: 1150191 - DNA, 25 bp, Homo sapien
caacacctgagtcttcatcaggtcc

SEQ ID NO: 1150192 - DNA, 25 bp, Homo sapien
cttccaacacctgagtcttcatcag

SEQ ID NO: 1150193 - DNA, 25 bp, Homo sapien
tcaactagttctaaattccagctgc

SEQ ID NO: 1150194 - DNA, 25 bp, Homo sapien
caaccaagctgatcactcacatgca

SEQ ID NO: 1150195 - DNA, 25 bp, Homo sapien
gctgatcactcacatgcaggcacca

SEQ ID NO: 1150196 - DNA, 25 bp, Homo sapien
cctccaaagccttggaccctccaga

SEQ ID NO: 1150197 - DNA, 25 bp, Homo sapien
gaggccccatcccaaccaagctgat

SEQ ID NO: 1150198 - DNA, 25 bp, Homo sapien
ctgtccgcacggcagaagttcggtc

SEQ ID NO: 1150199 - DNA, 25 bp, Homo sapien
agaagttcggtccagcagccggacg

SEQ ID NO: 1150200 - DNA, 25 bp, Homo sapien
tggagagagggctcgggaggctcag

SEQ ID NO: 1150201 - DNA, 25 bp, Homo sapien
acggcagaagttcggtccagcagcc

SEQ ID NO: 1150202 - DNA, 25 bp, Homo sapien
accctggcgccggccgcaaatgccg

SEQ ID NO: 1150203 - DNA, 25 bp, Homo sapien
agggaccggcgcacaactctccacc

SEQ ID NO: 1150204 - DNA, 25 bp, Homo sapien
atcttgagacatcgcaggcgcccca

SEQ ID NO: 1150205 - DNA, 25 bp, Homo sapien
actctccaccctggcgccggccgca

SEQ ID NO: 1150206 - DNA, 25 bp, Homo sapien
ggcacccagtctcggtcgcttcccg

SEQ ID NO: 1150207 - DNA, 25 bp, Homo sapien
tcgcttcccggacacggcgtaccgc

SEQ ID NO: 1150208 - DNA, 25 bp, Homo sapien
ccgagccccggcacccagtctcggt

SEQ ID NO: 1150209 - DNA, 25 bp, Homo sapien
agtctcggtcgcttcccggacacgg

SEQ ID NO: 1150210 - DNA, 25 bp, Homo sapien
tctgctttaagctgcttatctcctc

SEQ ID NO: 1150211 - DNA, 25 bp, Homo sapien
actctgctttaagctgcttatctcc

SEQ ID NO: 1150212 - DNA, 25 bp, Homo sapien
tggactctgctttaagctgcttatc

SEQ ID NO: 1150213 - DNA, 25 bp, Homo sapien
gctttaagctgcttatctcctctct

SEQ ID NO: 1150214 - DNA, 25 bp, Homo sapien
tttagcaaccatcaggtcagcatca

SEQ ID NO: 1150215 - DNA, 25 bp, Homo sapien
gcttgagcaacactatttccccagg

SEQ ID NO: 1150216 - DNA, 25 bp, Homo sapien
agcaacactatttccccaggcctgg

SEQ ID NO: 1150217 - DNA, 25 bp, Homo sapien
ccccgagcttgagcaacactatttc

SEQ ID NO: 1150218 - DNA, 25 bp, Homo sapien
ccaagaagcacctggagctcagaca

SEQ ID NO: 1150219 - DNA, 25 bp, Homo sapien
ttggccaggagctcgtgcttccgtc

SEQ ID NO: 1150220 - DNA, 25 bp, Homo sapien
gatgagctccccatagacttcatag

SEQ ID NO: 1150221 - DNA, 25 bp, Homo sapien
ggtgcatgtccacctcacgcttggg

SEQ ID NO: 1150222 - DNA, 25 bp, Homo sapien
ctgatcccataggactaaagcctaa

SEQ ID NO: 1150223 - DNA, 25 bp, Homo sapien
ccagaagactaagggaccacaaaga

SEQ ID NO: 1150224 - DNA, 25 bp, Homo sapien
catcccaggtcactgatcccatagg

SEQ ID NO: 1150225 - DNA, 25 bp, Homo sapien
ttattccaagcccatgcacaggcag

SEQ ID NO: 1150226 - DNA, 25 bp, Homo sapien
ctggatgtaagaatctgctgcactt

SEQ ID NO: 1150227 - DNA, 25 bp, Homo sapien
gagggcaaaggtaaagtgcgcttcc

SEQ ID NO: 1150228 - DNA, 25 bp, Homo sapien
tcaaaccgctggctagaagtggatg

SEQ ID NO: 1150229 - DNA, 25 bp, Homo sapien
gatgtaagaatctgctgcacttgct

SEQ ID NO: 1150230 - DNA, 25 bp, Homo sapien
tagctgcacctgtatggtataatca

SEQ ID NO: 1150231 - DNA, 25 bp, Homo sapien
cttagctgcacctgtatggtataat

SEQ ID NO: 1150232 - DNA, 25 bp, Homo sapien
gctgcacctgtatggtataatcaca

SEQ ID NO: 1150233 - DNA, 25 bp, Homo sapien
tgcacctgtatggtataatcacatt

SEQ ID NO: 1150234 - DNA, 25 bp, Homo sapien
ttcccattgaccttgacaaagaggt

SEQ ID NO: 1150235 - DNA, 25 bp, Homo sapien
cccattgaccttgacaaagaggttg

SEQ ID NO: 1150236 - DNA, 25 bp, Homo sapien
cattgaccttgacaaagaggttggg

SEQ ID NO: 1150237 - DNA, 25 bp, Homo sapien
ggcagctggtctcacagagacagaa

SEQ ID NO: 1150238 - DNA, 25 bp, Homo sapien
gatgaccaattgaccacaatggtgt

SEQ ID NO: 1150239 - DNA, 25 bp, Homo sapien
agagtcgagccaggggtgtgatgtt

SEQ ID NO: 1150240 - DNA, 25 bp, Homo sapien
gggaacagtggctgagagtcgagcc

SEQ ID NO: 1150241 - DNA, 25 bp, Homo sapien
ccgtccgaactcagatgaccaattg

SEQ ID NO: 1150242 - DNA, 25 bp, Homo sapien
tggaggcagggggtagacaattagc

SEQ ID NO: 1150243 - DNA, 25 bp, Homo sapien
aggcagggggtagacaattagcctc

SEQ ID NO: 1150244 - DNA, 25 bp, Homo sapien
gggggtagacaattagcctctgctt

SEQ ID NO: 1150245 - DNA, 25 bp, Homo sapien
ttagcctctgcttctcataccacca

SEQ ID NO: 1150246 - DNA, 25 bp, Homo sapien
aactgcctcaccaggtacacagaca

SEQ ID NO: 1150247 - DNA, 25 bp, Homo sapien
ccaggtacacagacaaggagtaatt

SEQ ID NO: 1150248 - DNA, 25 bp, Homo sapien
tcagtgcccgcgagtggtctgggtt

SEQ ID NO: 1150249 - DNA, 25 bp, Homo sapien
tgggttccggataccctttgctctg

SEQ ID NO: 1150250 - DNA, 25 bp, Homo sapien
ccatattctagcagggctggagtta

SEQ ID NO: 1150251 - DNA, 25 bp, Homo sapien
tgcttaaacatagcgtgacactctg

SEQ ID NO: 1150252 - DNA, 25 bp, Homo sapien
gattctttccagtccggagagccca

SEQ ID NO: 1150253 - DNA, 25 bp, Homo sapien
gaagacttgaatccagatcaggtgg

SEQ ID NO: 1150254 - DNA, 25 bp, Homo sapien
cttgtagtggccacctcactgtcag

SEQ ID NO: 1150255 - DNA, 25 bp, Homo sapien
cacatgagtgacacccggagacttg

SEQ ID NO: 1150256 - DNA, 25 bp, Homo sapien
cgggcacatgagtgacacccggaga

SEQ ID NO: 1150257 - DNA, 25 bp, Homo sapien
tgacacccggagacttgtagtggcc

SEQ ID NO: 1150258 - DNA, 25 bp, Homo sapien
cagaggccctactctgatttcatcc

SEQ ID NO: 1150259 - DNA, 25 bp, Homo sapien
aacttcacgccagtatccctaggaa

SEQ ID NO: 1150260 - DNA, 25 bp, Homo sapien
ggaaccctcatcaaagtccacaggc

SEQ ID NO: 1150261 - DNA, 25 bp, Homo sapien
ttcatcccagaaaacttcacgccag

SEQ ID NO: 1150262 - DNA, 25 bp, Homo sapien
cgcaggtgagggcacgacaagggac

SEQ ID NO: 1150263 - DNA, 25 bp, Homo sapien
tgggcgcaggtgagggcacgacaag

SEQ ID NO: 1150264 - DNA, 25 bp, Homo sapien
gagggcacgacaagggacagtcagg

SEQ ID NO: 1150265 - DNA, 25 bp, Homo sapien
ggtgagggcacgacaagggacagtc

SEQ ID NO: 1150266 - DNA, 25 bp, Homo sapien
gtagataaagggcagcatcgaagct

SEQ ID NO: 1150267 - DNA, 25 bp, Homo sapien
ctgtagataaagggcagcatcgaag

SEQ ID NO: 1150268 - DNA, 25 bp, Homo sapien
tgtagataaagggcagcatcgaagc

SEQ ID NO: 1150269 - DNA, 25 bp, Homo sapien
agattcatagggagccttcttgtca

SEQ ID NO: 1150270 - DNA, 25 bp, Homo sapien
gataagagattcatagggagccttc

SEQ ID NO: 1150271 - DNA, 25 bp, Homo sapien
gtccatgtaggcttcttctcattca

SEQ ID NO: 1150272 - DNA, 25 bp, Homo sapien
tgtccatgtaggcttcttctcattc

SEQ ID NO: 1150273 - DNA, 25 bp, Homo sapien
atgtcctaggtaagaggaagcaaaa

SEQ ID NO: 1150274 - DNA, 25 bp, Homo sapien
ggatgtcctaggtaagaggaagcaa

SEQ ID NO: 1150275 - DNA, 25 bp, Homo sapien
ggagccgagtccatagggttattgt

SEQ ID NO: 1150276 - DNA, 25 bp, Homo sapien
tgagctattataacatgcctggcta

SEQ ID NO: 1150277 - DNA, 25 bp, Homo sapien
gatgccttgtatatactaagtcctt

SEQ ID NO: 1150278 - DNA, 25 bp, Homo sapien
tgagataactcatgcaaagtgctca

SEQ ID NO: 1150279 - DNA, 25 bp, Homo sapien
gaacattatccatcctactggaccg

SEQ ID NO: 1150280 - DNA, 25 bp, Homo sapien
gaccgctctgagttgttggaatcaa

SEQ ID NO: 1150281 - DNA, 25 bp, Homo sapien
cacaaggtatgtaaaagagctttgc

SEQ ID NO: 1150282 - DNA, 25 bp, Homo sapien
agttctgtaactcaccttcctgtat

SEQ ID NO: 1150283 - DNA, 25 bp, Homo sapien
catcttccatgaattggatctcatc

SEQ ID NO: 1150284 - DNA, 25 bp, Homo sapien
tctgaacaggaactaagaatctcca

SEQ ID NO: 1150285 - DNA, 25 bp, Homo sapien
gtttcattgggcaccaggatccatc

SEQ ID NO: 1150286 - DNA, 25 bp, Homo sapien
cacaatctgaacaggaactaagaat

SEQ ID NO: 1150287 - DNA, 25 bp, Homo sapien
cagcccataccctggcggggggcaa

SEQ ID NO: 1150288 - DNA, 25 bp, Homo sapien
catccagcccataccctggcggggg

SEQ ID NO: 1150289 - DNA, 25 bp, Homo sapien
ccagcccataccctggcggggggca

SEQ ID NO: 1150290 - DNA, 25 bp, Homo sapien
atccagcccataccctggcgggggg

SEQ ID NO: 1150291 - DNA, 25 bp, Homo sapien
gtcaataacttcgaccttcttctta

SEQ ID NO: 1150292 - DNA, 25 bp, Homo sapien
aggtagggccgggatggcagctgag

SEQ ID NO: 1150293 - DNA, 25 bp, Homo sapien
ctttctattgtcaagtcaataactt

SEQ ID NO: 1150294 - DNA, 25 bp, Homo sapien
tgcttcttggtagggggcagatcct

SEQ ID NO: 1150295 - DNA, 25 bp, Homo sapien
ccagctcaggtccccaggttccctc

SEQ ID NO: 1150296 - DNA, 25 bp, Homo sapien
gccctcacccagctcaggtccccag

SEQ ID NO: 1150297 - DNA, 25 bp, Homo sapien
ccagcaaaccacagatgccctcacc

SEQ ID NO: 1150298 - DNA, 25 bp, Homo sapien
gcaaaccacagatgccctcacccag

SEQ ID NO: 1150299 - DNA, 25 bp, Homo sapien
gaaggcaggtgggtactcatgtagt

SEQ ID NO: 1150300 - DNA, 25 bp, Homo sapien
tactcatgtagtgggagactggaca

SEQ ID NO: 1150301 - DNA, 25 bp, Homo sapien
caacgtgcccatagcagggctcctt

SEQ ID NO: 1150302 - DNA, 25 bp, Homo sapien
ctccttagcaccgaggatggctggt

SEQ ID NO: 1150303 - DNA, 25 bp, Homo sapien
ctgactctctgtctgaagaaatgaa

SEQ ID NO: 1150304 - DNA, 25 bp, Homo sapien
gactctctgtctgaagaaatgaaaa

SEQ ID NO: 1150305 - DNA, 25 bp, Homo sapien
tgactctctgtctgaagaaatgaaa

SEQ ID NO: 1150306 - DNA, 25 bp, Homo sapien
ggccccatcagtgtctagaaaggaa

SEQ ID NO: 1150307 - DNA, 25 bp, Homo sapien
tggaatgtccggttagagcaggcat

SEQ ID NO: 1150308 - DNA, 25 bp, Homo sapien
tatgagagcaatcaacccctgtgga

SEQ ID NO: 1150309 - DNA, 25 bp, Homo sapien
gaaagcagatttacatccccagaga

SEQ ID NO: 1150310 - DNA, 25 bp, Homo sapien
gtgaggtgatgacagaggggccata

SEQ ID NO: 1150311 - DNA, 25 bp, Homo sapien
ctagtgaggtgatgacagaggggcc

SEQ ID NO: 1150312 - DNA, 25 bp, Homo sapien
aggtgatgacagaggggccatagtg

SEQ ID NO: 1150313 - DNA, 25 bp, Homo sapien
tagtgaggtgatgacagaggggcca

SEQ ID NO: 1150314 - DNA, 25 bp, Homo sapien
aaatgatgtctgaccgacagccagt

SEQ ID NO: 1150315 - DNA, 25 bp, Homo sapien
ccggagtggcgctgcagtgggagct

SEQ ID NO: 1150316 - DNA, 25 bp, Homo sapien
gacagccagtcaaagagggacctga

SEQ ID NO: 1150317 - DNA, 25 bp, Homo sapien
ccagaaagtgagaaggggtccctcg

SEQ ID NO: 1150318 - DNA, 25 bp, Homo sapien
aacataggtcctaggccttggcgag

SEQ ID NO: 1150319 - DNA, 25 bp, Homo sapien
aaccctttgggtgctggccttgtca

SEQ ID NO: 1150320 - DNA, 25 bp, Homo sapien
aatgagccaggcctaactacagggc

SEQ ID NO: 1150321 - DNA, 25 bp, Homo sapien
gacagcgaagtttccataatccagg

SEQ ID NO: 1150322 - DNA, 25 bp, Homo sapien
tgtggaagactacagaggttcctca

SEQ ID NO: 1150323 - DNA, 25 bp, Homo sapien
cacaaatggccgacagatacatcaa

SEQ ID NO: 1150324 - DNA, 25 bp, Homo sapien
ggtagttttcgaaagaagatacaca

SEQ ID NO: 1150325 - DNA, 25 bp, Homo sapien
gagataacatctcaccccaattcat

SEQ ID NO: 1150326 - DNA, 25 bp, Homo sapien
agaaacgcggcggcgccaacagcta

SEQ ID NO: 1150327 - DNA, 25 bp, Homo sapien
gctacctcccgagctgcagtcgtcg

SEQ ID NO: 1150328 - DNA, 25 bp, Homo sapien
caaagaggcgcaggaaggagagaca

SEQ ID NO: 1150329 - DNA, 25 bp, Homo sapien
ccgcgtcggtcacgtgagttggcca

SEQ ID NO: 1150330 - DNA, 25 bp, Homo sapien
gcagaaaaaccggtgggcggctaca

SEQ ID NO: 1150331 - DNA, 25 bp, Homo sapien
tagtttggggctgacctcgcccttg

SEQ ID NO: 1150332 - DNA, 25 bp, Homo sapien
cctcgcccttgcaaaagtggcagaa

SEQ ID NO: 1150333 - DNA, 25 bp, Homo sapien
tgggcggctacagcggcgcccgagt

SEQ ID NO: 1150334 - DNA, 25 bp, Homo sapien
tcccaagtatagagaacacagcgct

SEQ ID NO: 1150335 - DNA, 25 bp, Homo sapien
ggcagcaggtattcggcagaccgat

SEQ ID NO: 1150336 - DNA, 25 bp, Homo sapien
gcagaccgatgtcgggcgagtcaat

SEQ ID NO: 1150337 - DNA, 25 bp, Homo sapien
gccggcggcttagaagtgggcagca

SEQ ID NO: 1150338 - DNA, 25 bp, Homo sapien
gaggtcatcgtaggaaaaagaccag

SEQ ID NO: 1150339 - DNA, 25 bp, Homo sapien
gcaatccgctatttcgcttcactga

SEQ ID NO: 1150340 - DNA, 25 bp, Homo sapien
gagtgacaatcctcagcaatccgct

SEQ ID NO: 1150341 - DNA, 25 bp, Homo sapien
gaccaggtataaaagaatgcaagaa

SEQ ID NO: 1150342 - DNA, 25 bp, Homo sapien
attagccagggtgcggtggtcgtgc

SEQ ID NO: 1150343 - DNA, 25 bp, Homo sapien
catgctcctgggtgatagacagagg

SEQ ID NO: 1150344 - DNA, 25 bp, Homo sapien
tcctgggtgatagacagaggctgtc

SEQ ID NO: 1150345 - DNA, 25 bp, Homo sapien
aatcatgctcctgggtgatagacag

SEQ ID NO: 1150346 - DNA, 25 bp, Homo sapien
tgaactccagtatgggcgacacagt

SEQ ID NO: 1150347 - DNA, 25 bp, Homo sapien
cactgaactccagtatgggcgacac

SEQ ID NO: 1150348 - DNA, 25 bp, Homo sapien
gaactccagtatgggcgacacagtg

SEQ ID NO: 1150349 - DNA, 25 bp, Homo sapien
gatcacctgagtctgggaagtcgag

SEQ ID NO: 1150350 - DNA, 25 bp, Homo sapien
ccagtgagggatggttcttggtatc

SEQ ID NO: 1150351 - DNA, 25 bp, Homo sapien
gtgagggatggttcttggtatccaa

SEQ ID NO: 1150352 - DNA, 25 bp, Homo sapien
ccaactatcacaagagtcagtaccc

SEQ ID NO: 1150353 - DNA, 25 bp, Homo sapien
cagtgagggatggttcttggtatcc

SEQ ID NO: 1150354 - DNA, 25 bp, Homo sapien
gaaagacggatggtagggtgtagga

SEQ ID NO: 1150355 - DNA, 25 bp, Homo sapien
gactctaccagatttaatcacataa

SEQ ID NO: 1150356 - DNA, 25 bp, Homo sapien
ggaatggaataacacctttacactc

SEQ ID NO: 1150357 - DNA, 25 bp, Homo sapien
ccagatttaatcacataaggtaaca

SEQ ID NO: 1150358 - DNA, 25 bp, Homo sapien
ttgcccattctgaagtgatatggta

SEQ ID NO: 1150359 - DNA, 25 bp, Homo sapien
gcagtggcaagaatgggcatctttg

SEQ ID NO: 1150360 - DNA, 25 bp, Homo sapien
gaagtgatatggtacgatctttgct

SEQ ID NO: 1150361 - DNA, 25 bp, Homo sapien
gcaagaatgggcatctttgccatgt

SEQ ID NO: 1150362 - DNA, 25 bp, Homo sapien
cccatagaactgaccattatagttt

SEQ ID NO: 1150363 - DNA, 25 bp, Homo sapien
ccatagaactgaccattatagtttc

SEQ ID NO: 1150364 - DNA, 25 bp, Homo sapien
gatactgacaccaacaacctaactg

SEQ ID NO: 1150365 - DNA, 25 bp, Homo sapien
aatttttgatactgacaccaacaac

SEQ ID NO: 1150366 - DNA, 25 bp, Homo sapien
tcttctggattcacacaagtcacta

SEQ ID NO: 1150367 - DNA, 25 bp, Homo sapien
tctggattcacacaagtcactagct

SEQ ID NO: 1150368 - DNA, 25 bp, Homo sapien
tcacacaagtcactagctttcccat

SEQ ID NO: 1150369 - DNA, 25 bp, Homo sapien
cttttcttctggattcacacaagtc

SEQ ID NO: 1150370 - DNA, 25 bp, Homo sapien
gtcccagtcacggttctgtgtccgg

SEQ ID NO: 1150371 - DNA, 25 bp, Homo sapien
cctattgggatcatgtgaagtcccc

SEQ ID NO: 1150372 - DNA, 25 bp, Homo sapien
gtggtgcgatctcctattgggatca

SEQ ID NO: 1150373 - DNA, 25 bp, Homo sapien
ccagtcacggttctgtgtccggaat

SEQ ID NO: 1150374 - DNA, 25 bp, Homo sapien
gatttacaaggctggtctgtgctca

SEQ ID NO: 1150375 - DNA, 25 bp, Homo sapien
catgatttacaaggctggtctgtgc

SEQ ID NO: 1150376 - DNA, 25 bp, Homo sapien
taacatgatttacaaggctggtctg

SEQ ID NO: 1150377 - DNA, 25 bp, Homo sapien
ttgattctttgaactcatcaagctc

SEQ ID NO: 1150378 - DNA, 25 bp, Homo sapien
cagcccgaatatcttccctcttaag

SEQ ID NO: 1150379 - DNA, 25 bp, Homo sapien
tcttccctcttaagtcgtgtcctgc

SEQ ID NO: 1150380 - DNA, 25 bp, Homo sapien
gaatatcttccctcttaagtcgtgt

SEQ ID NO: 1150381 - DNA, 25 bp, Homo sapien
tcttaagtcgtgtcctgcttctctt

SEQ ID NO: 1150382 - DNA, 25 bp, Homo sapien
tatgcagacaggcagataggggcca

SEQ ID NO: 1150383 - DNA, 25 bp, Homo sapien
taggaccatgatgatagaaaacagc

SEQ ID NO: 1150384 - DNA, 25 bp, Homo sapien
gggaactagggaaagctctgactga

SEQ ID NO: 1150385 - DNA, 25 bp, Homo sapien
tattaatatcgactttaccttgagg

SEQ ID NO: 1150386 - DNA, 25 bp, Homo sapien
tgttttacctgaagatgatgtaagc

SEQ ID NO: 1150387 - DNA, 25 bp, Homo sapien
cccagttcaactattttcttatgcc

SEQ ID NO: 1150388 - DNA, 25 bp, Homo sapien
actgtgcccagttcaactattttct

SEQ ID NO: 1150389 - DNA, 25 bp, Homo sapien
taagctgtatttggctcttcaaaga

SEQ ID NO: 1150390 - DNA, 25 bp, Homo sapien
ataaagcctgattcacatctgggac

SEQ ID NO: 1150391 - DNA, 25 bp, Homo sapien
taaagcctgattcacatctgggaca

SEQ ID NO: 1150392 - DNA, 25 bp, Homo sapien
tgcgtacagatgtacatggaatgcc

SEQ ID NO: 1150393 - DNA, 25 bp, Homo sapien
tggaatgccacatacaatcaggagc

SEQ ID NO: 1150394 - DNA, 25 bp, Homo sapien
ggagcagtgcgtatcaccacatctg

SEQ ID NO: 1150395 - DNA, 25 bp, Homo sapien
cacatctgctatgatatcactttcc

SEQ ID NO: 1150396 - DNA, 25 bp, Homo sapien
gagtaacaatcggttttcctggcta

SEQ ID NO: 1150397 - DNA, 25 bp, Homo sapien
taacagcagtttaccttcagacagc

SEQ ID NO: 1150398 - DNA, 25 bp, Homo sapien
caagagattcaaggcctcctcaaag

SEQ ID NO: 1150399 - DNA, 25 bp, Homo sapien
ttgtcagaagtcactccctaacccg

SEQ ID NO: 1150400 - DNA, 25 bp, Homo sapien
tgtggaagggaccttcaactttaga

SEQ ID NO: 1150401 - DNA, 25 bp, Homo sapien
taggatttgccacatccatttcaac

SEQ ID NO: 1150402 - DNA, 25 bp, Homo sapien
tatctaggatttgccacatccattt

SEQ ID NO: 1150403 - DNA, 25 bp, Homo sapien
aaatatctaggatttgccacatcca

SEQ ID NO: 1150404 - DNA, 25 bp, Homo sapien
tctaggatttgccacatccatttca

SEQ ID NO: 1150405 - DNA, 25 bp, Homo sapien
ggtattgtctatccgactgccgcca

SEQ ID NO: 1150406 - DNA, 25 bp, Homo sapien
tgtggtattgtctatccgactgccg

SEQ ID NO: 1150407 - DNA, 25 bp, Homo sapien
tgtgttgttgtggtattgtctatcc

SEQ ID NO: 1150408 - DNA, 25 bp, Homo sapien
gttgttgtggtattgtctatccgac

SEQ ID NO: 1150409 - DNA, 25 bp, Homo sapien
aattggcagaccgatctatttccat

SEQ ID NO: 1150410 - DNA, 25 bp, Homo sapien
tggcagaccgatctatttccattac

SEQ ID NO: 1150411 - DNA, 25 bp, Homo sapien
ttggcagaccgatctatttccatta

SEQ ID NO: 1150412 - DNA, 25 bp, Homo sapien
aaaattggcagaccgatctatttcc

SEQ ID NO: 1150413 - DNA, 25 bp, Homo sapien
tcttaagtgtttgcacttgctccac

SEQ ID NO: 1150414 - DNA, 25 bp, Homo sapien
ttcaggcaaggcaaccatgacattt

SEQ ID NO: 1150415 - DNA, 25 bp, Homo sapien
ccctatttctaggagagtgctatgt

SEQ ID NO: 1150416 - DNA, 25 bp, Homo sapien
gtgctatgtatgaaacattcagtat

SEQ ID NO: 1150417 - DNA, 25 bp, Homo sapien
caaaattccaaagtaaacacgacat

SEQ ID NO: 1150418 - DNA, 25 bp, Homo sapien
gattcccttactatatacaattcca

SEQ ID NO: 1150419 - DNA, 25 bp, Homo sapien
gctcacagaagacaactctcaaagt

SEQ ID NO: 1150420 - DNA, 25 bp, Homo sapien
tgaaaaagtacgagcagactcctcc

SEQ ID NO: 1150421 - DNA, 25 bp, Homo sapien
aattctaatatataagctgaagaac

SEQ ID NO: 1150422 - DNA, 25 bp, Homo sapien
ttctaatatataagctgaagaacaa

SEQ ID NO: 1150423 - DNA, 25 bp, Homo sapien
taatatgcagagtaaaaacatcaat

SEQ ID NO: 1150424 - DNA, 25 bp, Homo sapien
aaagagtaatatgcagagtaaaaac

SEQ ID NO: 1150425 - DNA, 25 bp, Homo sapien
ccttcttgggtgttagctgagcttc

SEQ ID NO: 1150426 - DNA, 25 bp, Homo sapien
tgtttctgcagagggatgacccaca

SEQ ID NO: 1150427 - DNA, 25 bp, Homo sapien
tcttttgttgagctcccctagtgaa

SEQ ID NO: 1150428 - DNA, 25 bp, Homo sapien
gaaaagtaaaatgctcgccaggtct

SEQ ID NO: 1150429 - DNA, 25 bp, Homo sapien
tcttcaactttactgggtaatgaca

SEQ ID NO: 1150430 - DNA, 25 bp, Homo sapien
ttttatattacaaatggccactgtg

SEQ ID NO: 1150431 - DNA, 25 bp, Homo sapien
gcagaggtaccagagtttctatatt

SEQ ID NO: 1150432 - DNA, 25 bp, Homo sapien
aagtcacatgttagaaaaatcaatc

SEQ ID NO: 1150433 - DNA, 25 bp, Homo sapien
gagatctgtatctccgacccaatgg

SEQ ID NO: 1150434 - DNA, 25 bp, Homo sapien
aaacatcgtgtgatccaaatggccc

SEQ ID NO: 1150435 - DNA, 25 bp, Homo sapien
caatagctggagatctgtcaggacg

SEQ ID NO: 1150436 - DNA, 25 bp, Homo sapien
tccagtggactgctacttagaaagg

SEQ ID NO: 1150437 - DNA, 25 bp, Homo sapien
ggactgagacacatatcatctataa

SEQ ID NO: 1150438 - DNA, 25 bp, Homo sapien
tcatgttaagtccactgttccaatc

SEQ ID NO: 1150439 - DNA, 25 bp, Homo sapien
aatgtgccctcctcaaaaattcatg

SEQ ID NO: 1150440 - DNA, 25 bp, Homo sapien
tatcatcgggtgagtactaacattc

SEQ ID NO: 1150441 - DNA, 25 bp, Homo sapien
tgtggtcctagatgcttaggaagct

SEQ ID NO: 1150442 - DNA, 25 bp, Homo sapien
cccctagatgggctctgatatggtt

SEQ ID NO: 1150443 - DNA, 25 bp, Homo sapien
ctcatttctcttgccgccgccatgt

SEQ ID NO: 1150444 - DNA, 25 bp, Homo sapien
cacctgtggtcctagatgcttagga

SEQ ID NO: 1150445 - DNA, 25 bp, Homo sapien
tgttggccgggctgtcaagtaatcc

SEQ ID NO: 1150446 - DNA, 25 bp, Homo sapien
cattgttattaactactgtcaccca

SEQ ID NO: 1150447 - DNA, 25 bp, Homo sapien
ttggccgggctgtcaagtaatccgc

SEQ ID NO: 1150448 - DNA, 25 bp, Homo sapien
ccacctggctgaaaacattgttatt

SEQ ID NO: 1150449 - DNA, 25 bp, Homo sapien
atttgcaaagaatcctgcaaagatg

SEQ ID NO: 1150450 - DNA, 25 bp, Homo sapien
aatttgcaaagaatcctgcaaagat

SEQ ID NO: 1150451 - DNA, 25 bp, Homo sapien
caggctctgccttacaccacagaaa

SEQ ID NO: 1150452 - DNA, 25 bp, Homo sapien
tatacgtgagatgagatagacagca

SEQ ID NO: 1150453 - DNA, 25 bp, Homo sapien
gaaagtcactagtcctccaggatca

SEQ ID NO: 1150454 - DNA, 25 bp, Homo sapien
aaaaaattggcagagggatcctgtt

SEQ ID NO: 1150455 - DNA, 25 bp, Homo sapien
cctgtctgaccccaggcatagtccc

SEQ ID NO: 1150456 - DNA, 25 bp, Homo sapien
ctgggttacaatggcatcaagccct

SEQ ID NO: 1150457 - DNA, 25 bp, Homo sapien
ggttacaatggcatcaagccctgtc

SEQ ID NO: 1150458 - DNA, 25 bp, Homo sapien
acaatggcatcaagccctgtctgac

SEQ ID NO: 1150459 - DNA, 25 bp, Homo sapien
taaattactgcctataagacgactg

SEQ ID NO: 1150460 - DNA, 25 bp, Homo sapien
tcagacctaggaagtgcatggatgc

SEQ ID NO: 1150461 - DNA, 25 bp, Homo sapien
gaaaagtagcataacgtgagccaag

SEQ ID NO: 1150462 - DNA, 25 bp, Homo sapien
tacagacaaacccatgattgcaagg

SEQ ID NO: 1150463 - DNA, 25 bp, Homo sapien
caacttgttcctgagttactgtcac

SEQ ID NO: 1150464 - DNA, 25 bp, Homo sapien
tgagttactgtcactgttggaagag

SEQ ID NO: 1150465 - DNA, 25 bp, Homo sapien
ctgtgaaagaagtgattgcaaggta

SEQ ID NO: 1150466 - DNA, 25 bp, Homo sapien
ccacggcacaatacaactgctgtga

SEQ ID NO: 1150467 - DNA, 25 bp, Homo sapien
ttgcaaggtaactgccggacttcct

SEQ ID NO: 1150468 - DNA, 25 bp, Homo sapien
tcttctttgcatactggacactcta

SEQ ID NO: 1150469 - DNA, 25 bp, Homo sapien
tcctacatacaggacatgtgtcatg

SEQ ID NO: 1150470 - DNA, 25 bp, Homo sapien
tcagaaagtccatcggtcatgtagc

SEQ ID NO: 1150471 - DNA, 25 bp, Homo sapien
tctggctttgccgagtagagtcctc

SEQ ID NO: 1150472 - DNA, 25 bp, Homo sapien
gactgtcattgctaaatctgttgct

SEQ ID NO: 1150473 - DNA, 25 bp, Homo sapien
cctaaatccatctactaattttttg

SEQ ID NO: 1150474 - DNA, 25 bp, Homo sapien
gatgattaccacagccctgattcag

SEQ ID NO: 1150475 - DNA, 25 bp, Homo sapien
tacagctatggtaagatgattacca

SEQ ID NO: 1150476 - DNA, 25 bp, Homo sapien
ttttgatacaatttacagctatggt

SEQ ID NO: 1150477 - DNA, 25 bp, Homo sapien
tcactctgaattcagggataagagg

SEQ ID NO: 1150478 - DNA, 25 bp, Homo sapien
catccgttacaaggcaacatgacag

SEQ ID NO: 1150479 - DNA, 25 bp, Homo sapien
tcagcaggactttagggctgtggtt

SEQ ID NO: 1150480 - DNA, 25 bp, Homo sapien
taagaggcatttggttgtagataca

SEQ ID NO: 1150481 - DNA, 25 bp, Homo sapien
tcttagatacctgaatttgacctcg

SEQ ID NO: 1150482 - DNA, 25 bp, Homo sapien
gcctcatagctaatgtgatcaagag

SEQ ID NO: 1150483 - DNA, 25 bp, Homo sapien
tgaatttgacctcgcctcatagcta

SEQ ID NO: 1150484 - DNA, 25 bp, Homo sapien
aaaatcattagtcttagatacctga

SEQ ID NO: 1150485 - DNA, 25 bp, Homo sapien
gcattggtatgatccggctcaccgc

SEQ ID NO: 1150486 - DNA, 25 bp, Homo sapien
tctgtgcctgtatgctgcccaactc

SEQ ID NO: 1150487 - DNA, 25 bp, Homo sapien
tgtatgctgcccaactcattcccaa

SEQ ID NO: 1150488 - DNA, 25 bp, Homo sapien
gcgcccagcggtaatcattttttaa

SEQ ID NO: 1150489 - DNA, 25 bp, Homo sapien
tccgtcacccacaaatcagcgtatg

SEQ ID NO: 1150490 - DNA, 25 bp, Homo sapien
tggtcacaacttttagaggcaggct

SEQ ID NO: 1150491 - DNA, 25 bp, Homo sapien
tgtgtgacaatacaaatggtgcccc

SEQ ID NO: 1150492 - DNA, 25 bp, Homo sapien
catgtgcatgggacactactaggct

SEQ ID NO: 1150493 - DNA, 25 bp, Homo sapien
aacttaattgggatgaggagcactc

SEQ ID NO: 1150494 - DNA, 25 bp, Homo sapien
taagaagcacctgtcggctgggagt

SEQ ID NO: 1150495 - DNA, 25 bp, Homo sapien
tcttctagggtatccaagctggcct

SEQ ID NO: 1150496 - DNA, 25 bp, Homo sapien
gagaataacagggtaccagcccaag

SEQ ID NO: 1150497 - DNA, 25 bp, Homo sapien
caatttggtgtcaataatttgtcag

SEQ ID NO: 1150498 - DNA, 25 bp, Homo sapien
tcctgatttattaagaccgacatat

SEQ ID NO: 1150499 - DNA, 25 bp, Homo sapien
gcatgcaggtcatgaattattcaat

SEQ ID NO: 1150500 - DNA, 25 bp, Homo sapien
tataatatagaagcaacggataatg

SEQ ID NO: 1150501 - DNA, 25 bp, Homo sapien
tttcaattggatgtagattctggtg

SEQ ID NO: 1150502 - DNA, 25 bp, Homo sapien
aaatactaataatatggctatcaag

SEQ ID NO: 1150503 - DNA, 25 bp, Homo sapien
caagttgttggaagggaatctaata

SEQ ID NO: 1150504 - DNA, 25 bp, Homo sapien
tctggtgtgactaataaattaactt

SEQ ID NO: 1150505 - DNA, 25 bp, Homo sapien
gataaaaggactagccatggaggca

SEQ ID NO: 1150506 - DNA, 25 bp, Homo sapien
gatttgtgcagaccaagagcaccac

SEQ ID NO: 1150507 - DNA, 25 bp, Homo sapien
gcaaggacctgccaaatgtgggagc

SEQ ID NO: 1150508 - DNA, 25 bp, Homo sapien
gattttagactgtatcccatggaga

SEQ ID NO: 1150509 - DNA, 25 bp, Homo sapien
ccttgcaagcaaacatcccctggtt

SEQ ID NO: 1150510 - DNA, 25 bp, Homo sapien
aacgaaaagtcccacacatatggca

SEQ ID NO: 1150511 - DNA, 25 bp, Homo sapien
ggttttgaacaatgcggctcctcag

SEQ ID NO: 1150512 - DNA, 25 bp, Homo sapien
catgtagctgagtcctctgaaaacc

SEQ ID NO: 1150513 - DNA, 25 bp, Homo sapien
taacttatgctagattgcttgaacc

SEQ ID NO: 1150514 - DNA, 25 bp, Homo sapien
tccaaggcgactaagctgtttcagc

SEQ ID NO: 1150515 - DNA, 25 bp, Homo sapien
agatctattccaaaagggcaagatt

SEQ ID NO: 1150516 - DNA, 25 bp, Homo sapien
tgcttgaaccactctagaaaatggg

SEQ ID NO: 1150517 - DNA, 25 bp, Homo sapien
agactctcactctgtggtccgggct

SEQ ID NO: 1150518 - DNA, 25 bp, Homo sapien
tccaaggttcaagtgattctcctgc

SEQ ID NO: 1150519 - DNA, 25 bp, Homo sapien
cactgcaacctccacctccaaggtt

SEQ ID NO: 1150520 - DNA, 25 bp, Homo sapien
ggagagcagtggcgtgatctctgct

SEQ ID NO: 1150521 - DNA, 25 bp, Homo sapien
gaagtcaggtatccgccttcagggc

SEQ ID NO: 1150522 - DNA, 25 bp, Homo sapien
aatactcctaatgccaccaggtggg

SEQ ID NO: 1150523 - DNA, 25 bp, Homo sapien
tcacaccgttgcacagtgggaccta

SEQ ID NO: 1150524 - DNA, 25 bp, Homo sapien
cctaccagtgttgtgccagaagcca

SEQ ID NO: 1150525 - DNA, 25 bp, Homo sapien
aattaggtcagagacacccatcgag

SEQ ID NO: 1150526 - DNA, 25 bp, Homo sapien
tcatagcggatcaagctgccaaggg

SEQ ID NO: 1150527 - DNA, 25 bp, Homo sapien
gggttttgcgaggatccatcacagt

SEQ ID NO: 1150528 - DNA, 25 bp, Homo sapien
ggaaaatcaagtgggcagactggca

SEQ ID NO: 1150529 - DNA, 25 bp, Homo sapien
ttaggagactgaagccaaggatacc

SEQ ID NO: 1150530 - DNA, 25 bp, Homo sapien
tggaaggctttgtctagtgggtccc

SEQ ID NO: 1150531 - DNA, 25 bp, Homo sapien
accctagagcagagacggccatggg

SEQ ID NO: 1150532 - DNA, 25 bp, Homo sapien
agtctggtggtgaggatagacccta

SEQ ID NO: 1150533 - DNA, 25 bp, Homo sapien
taggcaccgcgaagtctggccactc

SEQ ID NO: 1150534 - DNA, 25 bp, Homo sapien
gccactccagcggagtgaccagctg

SEQ ID NO: 1150535 - DNA, 25 bp, Homo sapien
cggccctaggcaccgcgaagtctgg

SEQ ID NO: 1150536 - DNA, 25 bp, Homo sapien
gctcttcttcaactcggccctaggc

SEQ ID NO: 1150537 - DNA, 25 bp, Homo sapien
tcaaggattggcctgagacaagccg

SEQ ID NO: 1150538 - DNA, 25 bp, Homo sapien
ggaggaattcctcaaattaccagag

SEQ ID NO: 1150539 - DNA, 25 bp, Homo sapien
tgaggacaggcttctcatgaggtcc

SEQ ID NO: 1150540 - DNA, 25 bp, Homo sapien
cattctgacattcctcaaatggagg

SEQ ID NO: 1150541 - DNA, 25 bp, Homo sapien
gatggtgctctttctattctccagc

SEQ ID NO: 1150542 - DNA, 25 bp, Homo sapien
ttctccagcctagcgataattgtct

SEQ ID NO: 1150543 - DNA, 25 bp, Homo sapien
tagccctagccatgatcagcagctg

SEQ ID NO: 1150544 - DNA, 25 bp, Homo sapien
ctgcccgagcagtaggctggtgccc

SEQ ID NO: 1150545 - DNA, 25 bp, Homo sapien
gctccctaggagtttagcaagcaaa

SEQ ID NO: 1150546 - DNA, 25 bp, Homo sapien
cctccccaaggagcagtagcctata

SEQ ID NO: 1150547 - DNA, 25 bp, Homo sapien
gcaagcaaagccctagagcaagcaa

SEQ ID NO: 1150548 - DNA, 25 bp, Homo sapien
gattctcacttgtgtgctccctagg

SEQ ID NO: 1150549 - DNA, 25 bp, Homo sapien
gagatggaagaggagctgctctgtt

SEQ ID NO: 1150550 - DNA, 25 bp, Homo sapien
tgagcattaggcttgcaactcactg

SEQ ID NO: 1150551 - DNA, 25 bp, Homo sapien
gctctgttcgttcactcaggaattc

SEQ ID NO: 1150552 - DNA, 25 bp, Homo sapien
gtctctgcaggtgagcattaggctt

SEQ ID NO: 1150553 - DNA, 25 bp, Homo sapien
aaatctgtttgggatcatgaacata

SEQ ID NO: 1150554 - DNA, 25 bp, Homo sapien
tggggcaggtgaaatctgtttggga

SEQ ID NO: 1150555 - DNA, 25 bp, Homo sapien
actccagcctgggcaacagaatgag

SEQ ID NO: 1150556 - DNA, 25 bp, Homo sapien
ctggaggcagagaggttgctgtgag

SEQ ID NO: 1150557 - DNA, 25 bp, Homo sapien
ccagcctgggcaacagaatgagacc

SEQ ID NO: 1150558 - DNA, 25 bp, Homo sapien
tgagccgagatcgcaccactgcact

SEQ ID NO: 1150559 - DNA, 25 bp, Homo sapien
caccttgggagagctaggcagctct

SEQ ID NO: 1150560 - DNA, 25 bp, Homo sapien
gaccagctgccaggaaaacaccact

SEQ ID NO: 1150561 - DNA, 25 bp, Homo sapien
tgccttatcaaaagccatgaccagc

SEQ ID NO: 1150562 - DNA, 25 bp, Homo sapien
agtggtcaacaccagcaccttggga

SEQ ID NO: 1150563 - DNA, 25 bp, Homo sapien
cagtacaaatcagacagagagcccc

SEQ ID NO: 1150564 - DNA, 25 bp, Homo sapien
cccacgccaccagtggcacgagtga

SEQ ID NO: 1150565 - DNA, 25 bp, Homo sapien
tgcagtctccgcaaagtctgaagcc

SEQ ID NO: 1150566 - DNA, 25 bp, Homo sapien
catgcccacagagacgtacagtaca

SEQ ID NO: 1150567 - DNA, 25 bp, Homo sapien
cctcggtgtccttctcaattcgcag

SEQ ID NO: 1150568 - DNA, 25 bp, Homo sapien
tgcccttcttgcttggacagtttac

SEQ ID NO: 1150569 - DNA, 25 bp, Homo sapien
ggaagaagccatagttttgcccttc

SEQ ID NO: 1150570 - DNA, 25 bp, Homo sapien
acttctcaaccacccggaccaggtg

SEQ ID NO: 1150571 - DNA, 25 bp, Homo sapien
gaatccccatccagaactagtaaag

SEQ ID NO: 1150572 - DNA, 25 bp, Homo sapien
tgaattcccactctttctgaccaga

SEQ ID NO: 1150573 - DNA, 25 bp, Homo sapien
tccttcacgagatagcagagccggg

SEQ ID NO: 1150574 - DNA, 25 bp, Homo sapien
ggctgggtccaagtttgcacacctc

SEQ ID NO: 1150575 - DNA, 25 bp, Homo sapien
tcaagtgatcatcagccagaactcc

SEQ ID NO: 1150576 - DNA, 25 bp, Homo sapien
tggctggcatcctctacattctctc

SEQ ID NO: 1150577 - DNA, 25 bp, Homo sapien
caccttgaggtgtaatatcagtcat

SEQ ID NO: 1150578 - DNA, 25 bp, Homo sapien
gtgatcatcagccagaactccagct

SEQ ID NO: 1150579 - DNA, 25 bp, Homo sapien
tcatctccacaattcggggctggtg

SEQ ID NO: 1150580 - DNA, 25 bp, Homo sapien
ttctgagcctgccctcagatagaaa

SEQ ID NO: 1150581 - DNA, 25 bp, Homo sapien
cagcaggaacatgacacggcttcct

SEQ ID NO: 1150582 - DNA, 25 bp, Homo sapien
tatcttctgctcaacatgacgcttg

SEQ ID NO: 1150583 - DNA, 25 bp, Homo sapien
gattgctaagtcctctgatgctacc

SEQ ID NO: 1150584 - DNA, 25 bp, Homo sapien
tgttagtggagcaacatcatcccag

SEQ ID NO: 1150585 - DNA, 25 bp, Homo sapien
gagcatgggctttggaactaaacaa

SEQ ID NO: 1150586 - DNA, 25 bp, Homo sapien
cacttcctggtgcaacagaatgagc

SEQ ID NO: 1150587 - DNA, 25 bp, Homo sapien
aaaacagattttctgctggagccca

SEQ ID NO: 1150588 - DNA, 25 bp, Homo sapien
aacagattttctgctggagcccaaa

SEQ ID NO: 1150589 - DNA, 25 bp, Homo sapien
agattttctgctggagcccaaagcc

SEQ ID NO: 1150590 - DNA, 25 bp, Homo sapien
cagattttctgctggagcccaaagc

SEQ ID NO: 1150591 - DNA, 25 bp, Homo sapien
tctttgtctaccaccaacagtgaag

SEQ ID NO: 1150592 - DNA, 25 bp, Homo sapien
cagtctgtacatgttgtccgtctct

SEQ ID NO: 1150593 - DNA, 25 bp, Homo sapien
agggtttccacagactcgccgttga

SEQ ID NO: 1150594 - DNA, 25 bp, Homo sapien
tctaccacactgtcatgatccaggg

SEQ ID NO: 1150595 - DNA, 25 bp, Homo sapien
gaggagggcctaagatatcaccacc

SEQ ID NO: 1150596 - DNA, 25 bp, Homo sapien
cggttaggaacaagtagcatgccat

SEQ ID NO: 1150597 - DNA, 25 bp, Homo sapien
ggtttcctaatctatgaggagggcc

SEQ ID NO: 1150598 - DNA, 25 bp, Homo sapien
caagaatttgggttcagataccacc

SEQ ID NO: 1150599 - DNA, 25 bp, Homo sapien
caaatcgcactgtttagcagcctga

SEQ ID NO: 1150600 - DNA, 25 bp, Homo sapien
acacttgagattttggccgggcttg

SEQ ID NO: 1150601 - DNA, 25 bp, Homo sapien
tgcccacacgtgtccggaacatttg

SEQ ID NO: 1150602 - DNA, 25 bp, Homo sapien
gacagtcgcagctcatctcgaggca

SEQ ID NO: 1150603 - DNA, 25 bp, Homo sapien
caaatgcacacatgaacataaaagc

SEQ ID NO: 1150604 - DNA, 25 bp, Homo sapien
gaagactgtgcttcgttatggagta

SEQ ID NO: 1150605 - DNA, 25 bp, Homo sapien
tataggatgcggtacaaggatccca

SEQ ID NO: 1150606 - DNA, 25 bp, Homo sapien
cattaacttagttgtaaccatgagt

SEQ ID NO: 1150607 - DNA, 25 bp, Homo sapien
cagttcttgactttgatagtagaga

SEQ ID NO: 1150608 - DNA, 25 bp, Homo sapien
ctggagcctccttgacagagccatt

SEQ ID NO: 1150609 - DNA, 25 bp, Homo sapien
gacagagccattgggcagttcttga

SEQ ID NO: 1150610 - DNA, 25 bp, Homo sapien
tatctggtggacttgagacttccag

SEQ ID NO: 1150611 - DNA, 25 bp, Homo sapien
cccgaatcgcatttaagtgaaagcc

SEQ ID NO: 1150612 - DNA, 25 bp, Homo sapien
ttaagtgaaagccatagccattttc

SEQ ID NO: 1150613 - DNA, 25 bp, Homo sapien
ctggcagaccccgaatcgcatttaa

SEQ ID NO: 1150614 - DNA, 25 bp, Homo sapien
gaaagccatagccattttcaccttt

SEQ ID NO: 1150615 - DNA, 25 bp, Homo sapien
aagctgagactatcctaattgtggc

SEQ ID NO: 1150616 - DNA, 25 bp, Homo sapien
gccatcaatgggtgggaaaagctga

SEQ ID NO: 1150617 - DNA, 25 bp, Homo sapien
cctaaagggtgtgggaccatgacaa

SEQ ID NO: 1150618 - DNA, 25 bp, Homo sapien
ccttaagagaatagatgaggagctc

SEQ ID NO: 1150619 - DNA, 25 bp, Homo sapien
gcttggaaataatcataggccttct

SEQ ID NO: 1150620 - DNA, 25 bp, Homo sapien
acaatagggattttcttagcttgga

SEQ ID NO: 1150621 - DNA, 25 bp, Homo sapien
tctttccacagactagaagtgtgac

SEQ ID NO: 1150622 - DNA, 25 bp, Homo sapien
caagtcagcaggaccgcccttctgt

SEQ ID NO: 1150623 - DNA, 25 bp, Homo sapien
tcacagcatgcagttgacagcaatt

SEQ ID NO: 1150624 - DNA, 25 bp, Homo sapien
catgcagttgacagcaattgtgtag

SEQ ID NO: 1150625 - DNA, 25 bp, Homo sapien
cagcatgcagttgacagcaattgtg

SEQ ID NO: 1150626 - DNA, 25 bp, Homo sapien
tgcagttgacagcaattgtgtagag

SEQ ID NO: 1150627 - DNA, 25 bp, Homo sapien
tctctgtatcttcagaattggaaga

SEQ ID NO: 1150628 - DNA, 25 bp, Homo sapien
aattggaagaagaatgtgaggctgt

SEQ ID NO: 1150629 - DNA, 25 bp, Homo sapien
cacatctctgtatcttcagaattgg

SEQ ID NO: 1150630 - DNA, 25 bp, Homo sapien
gaagaagaatgtgaggctgtactgt

SEQ ID NO: 1150631 - DNA, 25 bp, Homo sapien
tcacacatggtgaatggtttccagt

SEQ ID NO: 1150632 - DNA, 25 bp, Homo sapien
cacacatggtgaatggtttccagtg

SEQ ID NO: 1150633 - DNA, 25 bp, Homo sapien
gttaagcataaattagccgtctgca

SEQ ID NO: 1150634 - DNA, 25 bp, Homo sapien
taaattagccgtctgcaatagccgc

SEQ ID NO: 1150635 - DNA, 25 bp, Homo sapien
tatctcttcctaagttaagcataaa

SEQ ID NO: 1150636 - DNA, 25 bp, Homo sapien
tcctaagttaagcataaattagccg

SEQ ID NO: 1150637 - DNA, 25 bp, Homo sapien
tagaagtaagagacatcatcataca

SEQ ID NO: 1150638 - DNA, 25 bp, Homo sapien
catcatcatacagagaaatgtagtt

SEQ ID NO: 1150639 - DNA, 25 bp, Homo sapien
gtagaagtaagagacatcatcatac

SEQ ID NO: 1150640 - DNA, 25 bp, Homo sapien
gcacaattttaataggcttatctgc

SEQ ID NO: 1150641 - DNA, 25 bp, Homo sapien
gctaagatgcttttataagcagctg

SEQ ID NO: 1150642 - DNA, 25 bp, Homo sapien
gcaaccacaacattgttacaaaagc

SEQ ID NO: 1150643 - DNA, 25 bp, Homo sapien
gcagctgtcacctatacagagttat

SEQ ID NO: 1150644 - DNA, 25 bp, Homo sapien
tcttattctgtactttattgtgttt

SEQ ID NO: 1150645 - DNA, 25 bp, Homo sapien
ggtttctagaggcaaatgaaggtta

SEQ ID NO: 1150646 - DNA, 25 bp, Homo sapien
ttctagaggcaaatgaaggttaaag

SEQ ID NO: 1150647 - DNA, 25 bp, Homo sapien
ctagaggcaaatgaaggttaaagca

SEQ ID NO: 1150648 - DNA, 25 bp, Homo sapien
tatgtgatcaattttagagtatgtg

SEQ ID NO: 1150649 - DNA, 25 bp, Homo sapien
atgtgccatgtggcaccaagaagaa

SEQ ID NO: 1150650 - DNA, 25 bp, Homo sapien
gttctacttccagttatgtgatcaa

SEQ ID NO: 1150651 - DNA, 25 bp, Homo sapien
agttatgtgatcaattttagagtat

SEQ ID NO: 1150652 - DNA, 25 bp, Homo sapien
gaatataggcaactccgggaatcca

SEQ ID NO: 1150653 - DNA, 25 bp, Homo sapien
aattgagaatataggcaactccggg

SEQ ID NO: 1150654 - DNA, 25 bp, Homo sapien
ctgaagtagcgctgctggctatgaa

SEQ ID NO: 1150655 - DNA, 25 bp, Homo sapien
ggaaagctgctctgaagtagcgctg

SEQ ID NO: 1150656 - DNA, 25 bp, Homo sapien
cactccacagccagtcattagtgtt

SEQ ID NO: 1150657 - DNA, 25 bp, Homo sapien
gccagtcattagtgtttgttgtaga

SEQ ID NO: 1150658 - DNA, 25 bp, Homo sapien
cagtcattagtgtttgttgtagaca

SEQ ID NO: 1150659 - DNA, 25 bp, Homo sapien
cacagccagtcattagtgtttgttg

SEQ ID NO: 1150660 - DNA, 25 bp, Homo sapien
tcccctaaggtgatactcttttgct

SEQ ID NO: 1150661 - DNA, 25 bp, Homo sapien
gatctcttttattgggtgatagcag

SEQ ID NO: 1150662 - DNA, 25 bp, Homo sapien
taaatagcaggaactactttgtgct

SEQ ID NO: 1150663 - DNA, 25 bp, Homo sapien
tcccatatgcttcagagtgatctct

SEQ ID NO: 1150664 - DNA, 25 bp, Homo sapien
aaagaagagccatgagagtcactcc

SEQ ID NO: 1150665 - DNA, 25 bp, Homo sapien
ggaagtaagacatgtaagtgtatgg

SEQ ID NO: 1150666 - DNA, 25 bp, Homo sapien
tccagaaagaagagccatgagagtc

SEQ ID NO: 1150667 - DNA, 25 bp, Homo sapien
tgggcagttgacagcaccaaatcca

SEQ ID NO: 1150668 - DNA, 25 bp, Homo sapien
catttaggatgtatgtttaagcaca

SEQ ID NO: 1150669 - DNA, 25 bp, Homo sapien
taaaggcaagccgtacaagtgataa

SEQ ID NO: 1150670 - DNA, 25 bp, Homo sapien
agaaagatttccaggtcaatgccca

SEQ ID NO: 1150671 - DNA, 25 bp, Homo sapien
tactgttctgttaatatctaggagg

SEQ ID NO: 1150672 - DNA, 25 bp, Homo sapien
tccagggctagaatatccgtgtcag

SEQ ID NO: 1150673 - DNA, 25 bp, Homo sapien
tccatggtttgcagcagtcgccgtt

SEQ ID NO: 1150674 - DNA, 25 bp, Homo sapien
tagaatatccgtgtcagtcacattc

SEQ ID NO: 1150675 - DNA, 25 bp, Homo sapien
agcagtcgccgttccagggctagaa

SEQ ID NO: 1150676 - DNA, 25 bp, Homo sapien
tgtgtaatctggatccacttggagt

SEQ ID NO: 1150677 - DNA, 25 bp, Homo sapien
tacctgcagcagctaatgtttctgc

SEQ ID NO: 1150678 - DNA, 25 bp, Homo sapien
tatcttgaacattggtcacatcgtc

SEQ ID NO: 1150679 - DNA, 25 bp, Homo sapien
cttggagttagtatctattggctgc

SEQ ID NO: 1150680 - DNA, 25 bp, Homo sapien
cttttacagagcgaaagtgttaaat

SEQ ID NO: 1150681 - DNA, 25 bp, Homo sapien
ttaacagtcttttacagagcgaaag

SEQ ID NO: 1150682 - DNA, 25 bp, Homo sapien
cgggccttaacagtcttttacagag

SEQ ID NO: 1150683 - DNA, 25 bp, Homo sapien
tcaagtaaagaactttttgtgtagc

SEQ ID NO: 1150684 - DNA, 25 bp, Homo sapien
gaccgactagtacagtggtagctgc

SEQ ID NO: 1150685 - DNA, 25 bp, Homo sapien
ccgactagtacagtggtagctgctg

SEQ ID NO: 1150686 - DNA, 25 bp, Homo sapien
gaggaccgactagtacagtggtagc

SEQ ID NO: 1150687 - DNA, 25 bp, Homo sapien
ctgtggaggaccgactagtacagtg

SEQ ID NO: 1150688 - DNA, 25 bp, Homo sapien
gtgaataagtcaacaggaaacctac

SEQ ID NO: 1150689 - DNA, 25 bp, Homo sapien
caggtgaataagtcaacaggaaacc

SEQ ID NO: 1150690 - DNA, 25 bp, Homo sapien
cttctgtaatctgtcctacaggtga

SEQ ID NO: 1150691 - DNA, 25 bp, Homo sapien
gtcctacaggtgaataagtcaacag

SEQ ID NO: 1150692 - DNA, 25 bp, Homo sapien
gcacttcccccttctggaacattgt

SEQ ID NO: 1150693 - DNA, 25 bp, Homo sapien
gctgaagtggtaacactttttatca

SEQ ID NO: 1150694 - DNA, 25 bp, Homo sapien
cctgatggtttgttatgcacttccc

SEQ ID NO: 1150695 - DNA, 25 bp, Homo sapien
tttcacttcctgatgctgaagtggt

SEQ ID NO: 1150696 - DNA, 25 bp, Homo sapien
attactttagaaatgggccatttat

SEQ ID NO: 1150697 - DNA, 25 bp, Homo sapien
taggtagccattatgctttatggtg

SEQ ID NO: 1150698 - DNA, 25 bp, Homo sapien
caaaatgtcactggagaagcagagc

SEQ ID NO: 1150699 - DNA, 25 bp, Homo sapien
gaagcagagctacttaaaatttgtt

SEQ ID NO: 1150700 - DNA, 25 bp, Homo sapien
ttttccaagaactcaatcaggtaga

SEQ ID NO: 1150701 - DNA, 25 bp, Homo sapien
tagtggctactactggcatggttca

SEQ ID NO: 1150702 - DNA, 25 bp, Homo sapien
tcccatgattagagggtaagctcct

SEQ ID NO: 1150703 - DNA, 25 bp, Homo sapien
tcttagcactcagcctggaaatagg

SEQ ID NO: 1150704 - DNA, 25 bp, Homo sapien
tatcttcatgggattgtcttatgcc

SEQ ID NO: 1150705 - DNA, 25 bp, Homo sapien
tcttttatatcttatcttcatggga

SEQ ID NO: 1150706 - DNA, 25 bp, Homo sapien
tgccatggtgttatccattttgcac

SEQ ID NO: 1150707 - DNA, 25 bp, Homo sapien
gggattgtcttatgccatggtgtta

SEQ ID NO: 1150708 - DNA, 25 bp, Homo sapien
gcatatagatcagctgtttccagaa

SEQ ID NO: 1150709 - DNA, 25 bp, Homo sapien
gtagcatatagatcagctgtttcca

SEQ ID NO: 1150710 - DNA, 25 bp, Homo sapien
tagcatatagatcagctgtttccag

SEQ ID NO: 1150711 - DNA, 25 bp, Homo sapien
tggtagcatatagatcagctgtttc

SEQ ID NO: 1150712 - DNA, 25 bp, Homo sapien
gaaggttttggagtattctattctc

SEQ ID NO: 1150713 - DNA, 25 bp, Homo sapien
ttttccaaacacagtaaatagagaa

SEQ ID NO: 1150714 - DNA, 25 bp, Homo sapien
ccttgaaggttttggagtattctat

SEQ ID NO: 1150715 - DNA, 25 bp, Homo sapien
aggttttggagtattctattctctc

SEQ ID NO: 1150716 - DNA, 25 bp, Homo sapien
agcggcgtgataatagctcactgag

SEQ ID NO: 1150717 - DNA, 25 bp, Homo sapien
gctcactgaggccttggacttctgg

SEQ ID NO: 1150718 - DNA, 25 bp, Homo sapien
aatttttattgttttgctgagatgg

SEQ ID NO: 1150719 - DNA, 25 bp, Homo sapien
tcactgaggccttggacttctgggc

SEQ ID NO: 1150720 - DNA, 25 bp, Homo sapien
cctaatgacagagcttcaaaatacg

SEQ ID NO: 1150721 - DNA, 25 bp, Homo sapien
tattctactcacatacaggtaagac

SEQ ID NO: 1150722 - DNA, 25 bp, Homo sapien
tggatcccctctctcaataactgat

SEQ ID NO: 1150723 - DNA, 25 bp, Homo sapien
ggacaaatccacaatagctggatcc

SEQ ID NO: 1150724 - DNA, 25 bp, Homo sapien
tcccagataattcacagtgatctca

SEQ ID NO: 1150725 - DNA, 25 bp, Homo sapien
tggattcccagataattcacagtga

SEQ ID NO: 1150726 - DNA, 25 bp, Homo sapien
attcccagataattcacagtgatct

SEQ ID NO: 1150727 - DNA, 25 bp, Homo sapien
ttcccagataattcacagtgatctc

SEQ ID NO: 1150728 - DNA, 25 bp, Homo sapien
aagagtgatcagcaatcctctgatg

SEQ ID NO: 1150729 - DNA, 25 bp, Homo sapien
taagagtgatcagcaatcctctgat

SEQ ID NO: 1150730 - DNA, 25 bp, Homo sapien
agacacttctcatgtgcagccaaca

SEQ ID NO: 1150731 - DNA, 25 bp, Homo sapien
acttctcatgtgcagccaacagaca

SEQ ID NO: 1150732 - DNA, 25 bp, Homo sapien
cagacacatggaaaaatgctgatca

SEQ ID NO: 1150733 - DNA, 25 bp, Homo sapien
aacagacacttctcatgtgcagcca

SEQ ID NO: 1150734 - DNA, 25 bp, Homo sapien
tgtaattgttagtaggctcccacgc

SEQ ID NO: 1150735 - DNA, 25 bp, Homo sapien
ggactcactttccacctccgtgaag

SEQ ID NO: 1150736 - DNA, 25 bp, Homo sapien
tccagcccactccaagcggttgtaa

SEQ ID NO: 1150737 - DNA, 25 bp, Homo sapien
aactgtgctagatgcctgcagatcc

SEQ ID NO: 1150738 - DNA, 25 bp, Homo sapien
tctgtgctaatagcaggacaatgac

SEQ ID NO: 1150739 - DNA, 25 bp, Homo sapien
cattatctgtgctaatagcaggaca

SEQ ID NO: 1150740 - DNA, 25 bp, Homo sapien
aggacaatgacattggaggacttac

SEQ ID NO: 1150741 - DNA, 25 bp, Homo sapien
ctaatagcaggacaatgacattgga

SEQ ID NO: 1150742 - DNA, 25 bp, Homo sapien
tcaaatgaattaatccagaagtgac

SEQ ID NO: 1150743 - DNA, 25 bp, Homo sapien
aagtcaaatgaattaatccagaagt

SEQ ID NO: 1150744 - DNA, 25 bp, Homo sapien
caaatgaattaatccagaagtgact

SEQ ID NO: 1150745 - DNA, 25 bp, Homo sapien
ctgtaagtcaaatgaattaatccag

SEQ ID NO: 1150746 - DNA, 25 bp, Homo sapien
gagtatgctagagagagcgctgacc

SEQ ID NO: 1150747 - DNA, 25 bp, Homo sapien
tactcattcggatcagcagcacaga

SEQ ID NO: 1150748 - DNA, 25 bp, Homo sapien
caaggacttcagtgattatggtgcg

SEQ ID NO: 1150749 - DNA, 25 bp, Homo sapien
tgagccaaatagaggaagagtatgc

SEQ ID NO: 1150750 - DNA, 25 bp, Homo sapien
tctaacagtctgtagtaggcttaag

SEQ ID NO: 1150751 - DNA, 25 bp, Homo sapien
ctctaacagtctgtagtaggcttaa

SEQ ID NO: 1150752 - DNA, 25 bp, Homo sapien
ctaacagtctgtagtaggcttaagt

SEQ ID NO: 1150753 - DNA, 25 bp, Homo sapien
gagtatgctatgaaggtgaaaaatg

SEQ ID NO: 1150754 - DNA, 25 bp, Homo sapien
aggagtatgctatgaaggtgaaaaa

SEQ ID NO: 1150755 - DNA, 25 bp, Homo sapien
gaaggtgaaaaatgctaccatagca

SEQ ID NO: 1150756 - DNA, 25 bp, Homo sapien
ctatgaaggtgaaaaatgctaccat

SEQ ID NO: 1150757 - DNA, 25 bp, Homo sapien
gatgctactcatggtcatagtatca

SEQ ID NO: 1150758 - DNA, 25 bp, Homo sapien
gagtattgtcttgagttagttctcc

SEQ ID NO: 1150759 - DNA, 25 bp, Homo sapien
atgttctggctgatgctactcatgg

SEQ ID NO: 1150760 - DNA, 25 bp, Homo sapien
cgcctctacaccagcctcatatcca

SEQ ID NO: 1150761 - DNA, 25 bp, Homo sapien
caaagctataaccttttccatgtga

SEQ ID NO: 1150762 - DNA, 25 bp, Homo sapien
tttaatgagtcaatctcaaggcaaa

SEQ ID NO: 1150763 - DNA, 25 bp, Homo sapien
caaggcaaagctataaccttttcca

SEQ ID NO: 1150764 - DNA, 25 bp, Homo sapien
ctctgattttaatgagtcaatctca

SEQ ID NO: 1150765 - DNA, 25 bp, Homo sapien
ccaagctatgcttgataaaatgaac

SEQ ID NO: 1150766 - DNA, 25 bp, Homo sapien
atgttagatcacacaagcataataa

SEQ ID NO: 1150767 - DNA, 25 bp, Homo sapien
tgataaaatgaacgtaaggcaaaag

SEQ ID NO: 1150768 - DNA, 25 bp, Homo sapien
ggttattttaatggggcaggatcag

SEQ ID NO: 1150769 - DNA, 25 bp, Homo sapien
taaatgttgtcatggtcccacaccc

SEQ ID NO: 1150770 - DNA, 25 bp, Homo sapien
tctgcaggctggctaaaggtgaaaa

SEQ ID NO: 1150771 - DNA, 25 bp, Homo sapien
gaactgcccaatggctctgtcaagg

SEQ ID NO: 1150772 - DNA, 25 bp, Homo sapien
tcaagtccaccagatactacagagg

SEQ ID NO: 1150773 - DNA, 25 bp, Homo sapien
gtggtatctgaacccaaattcttgg

SEQ ID NO: 1150774 - DNA, 25 bp, Homo sapien
ggtggtgatatcttaggccctcctc

SEQ ID NO: 1150775 - DNA, 25 bp, Homo sapien
gccctcctcatagattaggaaaccg

SEQ ID NO: 1150776 - DNA, 25 bp, Homo sapien
taaagtcacgcagcttagtaaagac

SEQ ID NO: 1150777 - DNA, 25 bp, Homo sapien
gagggtaggtcaaatcatcaaggac

SEQ ID NO: 1150778 - DNA, 25 bp, Homo sapien
tgagttctgagcaggaaacgagcct

SEQ ID NO: 1150779 - DNA, 25 bp, Homo sapien
tggctacaagtatgcccactgactt

SEQ ID NO: 1150780 - DNA, 25 bp, Homo sapien
gggctccagcagaaaatctgtttta

SEQ ID NO: 1150781 - DNA, 25 bp, Homo sapien
tttgcttaataatggcccagcacag

SEQ ID NO: 1150782 - DNA, 25 bp, Homo sapien
cccgtcttggacgtgaatcctctgt

SEQ ID NO: 1150783 - DNA, 25 bp, Homo sapien
tccacgtggcatgtgcttacctgcc

SEQ ID NO: 1150784 - DNA, 25 bp, Homo sapien
tgtttgtctagcatctccacgtggc

SEQ ID NO: 1150785 - DNA, 25 bp, Homo sapien
ttttgatagtatcctcagctgcagc

SEQ ID NO: 1150786 - DNA, 25 bp, Homo sapien
cctgttctgaggtgcatctttgagc

SEQ ID NO: 1150787 - DNA, 25 bp, Homo sapien
tctgagtgcccagatagtcattcac

SEQ ID NO: 1150788 - DNA, 25 bp, Homo sapien
caggcactgttacctttgctgagaa

SEQ ID NO: 1150789 - DNA, 25 bp, Homo sapien
catctcatgtccgaatctcctctag

SEQ ID NO: 1150790 - DNA, 25 bp, Homo sapien
gggtttaactcatagggtgaatgca

SEQ ID NO: 1150791 - DNA, 25 bp, Homo sapien
tacatacctttcttagcggcctgtg

SEQ ID NO: 1150792 - DNA, 25 bp, Homo sapien
tcagtaatggaattgtcaactccca

SEQ ID NO: 1150793 - DNA, 25 bp, Homo sapien
ggctttcaaagacccaggagctgga

SEQ ID NO: 1150794 - DNA, 25 bp, Homo sapien
tttttgccaacccatgccttggtgt

SEQ ID NO: 1150795 - DNA, 25 bp, Homo sapien
tgtgggatgatggagcttctcttcc

SEQ ID NO: 1150796 - DNA, 25 bp, Homo sapien
tacacaggaaattcatccaggcctt

SEQ ID NO: 1150797 - DNA, 25 bp, Homo sapien
tggggagaatgccaccgctgaacta

SEQ ID NO: 1150798 - DNA, 25 bp, Homo sapien
agaatgccaccgctgaactaccaat

SEQ ID NO: 1150799 - DNA, 25 bp, Homo sapien
atgccaccgctgaactaccaatgct

SEQ ID NO: 1150800 - DNA, 25 bp, Homo sapien
tgctttggccgggagttgaacccag

SEQ ID NO: 1150801 - DNA, 25 bp, Homo sapien
cgtctgatggcctttggattactca

SEQ ID NO: 1150802 - DNA, 25 bp, Homo sapien
tgcccggagactagatgaaagtagc

SEQ ID NO: 1150803 - DNA, 25 bp, Homo sapien
gaaagtccagcacgagaatccgtct

SEQ ID NO: 1150804 - DNA, 25 bp, Homo sapien
tccagaggtggcaggtttagcttcc

SEQ ID NO: 1150805 - DNA, 25 bp, Homo sapien
tcagtagaacgagcttgaaccagcc

SEQ ID NO: 1150806 - DNA, 25 bp, Homo sapien
cctcatgtcgtatgggagacacgga

SEQ ID NO: 1150807 - DNA, 25 bp, Homo sapien
tgaaccagccaactccagacttgga

SEQ ID NO: 1150808 - DNA, 25 bp, Homo sapien
tgtgctgggtagaagaaagttgcca

SEQ ID NO: 1150809 - DNA, 25 bp, Homo sapien
cagcaaggcccttactgtctttcct

SEQ ID NO: 1150810 - DNA, 25 bp, Homo sapien
tcagcaaggcccttactgtctttcc

SEQ ID NO: 1150811 - DNA, 25 bp, Homo sapien
gctctcagcaaggcccttactgtct

SEQ ID NO: 1150812 - DNA, 25 bp, Homo sapien
tctcagcaaggcccttactgtcttt

SEQ ID NO: 1150813 - DNA, 25 bp, Homo sapien
aggagaccagggtgataattgagct

SEQ ID NO: 1150814 - DNA, 25 bp, Homo sapien
cttcaggacccaggaactcgagtat

SEQ ID NO: 1150815 - DNA, 25 bp, Homo sapien
ggacccaggaactcgagtatgaaaa

SEQ ID NO: 1150816 - DNA, 25 bp, Homo sapien
ccaggaactcgagtatgaaaagctg

SEQ ID NO: 1150817 - DNA, 25 bp, Homo sapien
tctctttgcctccctgttgcttggt

SEQ ID NO: 1150818 - DNA, 25 bp, Homo sapien
ctctttgcctccctgttgcttggtt

SEQ ID NO: 1150819 - DNA, 25 bp, Homo sapien
tctttgcctccctgttgcttggttc

SEQ ID NO: 1150820 - DNA, 25 bp, Homo sapien
ttgccggaaatggaatccaggtctc

SEQ ID NO: 1150821 - DNA, 25 bp, Homo sapien
tgcatttgccggaaatggaatccag

SEQ ID NO: 1150822 - DNA, 25 bp, Homo sapien
aaatggaatccaggtctcccgggtg

SEQ ID NO: 1150823 - DNA, 25 bp, Homo sapien
attctaccactgaactgccaacgcc

SEQ ID NO: 1150824 - DNA, 25 bp, Homo sapien
cagtctctgcaaagtctcggcttag

SEQ ID NO: 1150825 - DNA, 25 bp, Homo sapien
aagacagtctctgcaaagtctcggc

SEQ ID NO: 1150826 - DNA, 25 bp, Homo sapien
gcttcaaagacagtctctgcaaagt

SEQ ID NO: 1150827 - DNA, 25 bp, Homo sapien
caaagtctcggcttagataaattcc

SEQ ID NO: 1150828 - DNA, 25 bp, Homo sapien
ttagggccaaatacgtagaaacgca

SEQ ID NO: 1150829 - DNA, 25 bp, Homo sapien
ctttgtattgcagggatccgacagc

SEQ ID NO: 1150830 - DNA, 25 bp, Homo sapien
cagagacgataaaagtcgcgccggt

SEQ ID NO: 1150831 - DNA, 25 bp, Homo sapien
tacgtagaaacgcagagaccaagca

SEQ ID NO: 1150832 - DNA, 25 bp, Homo sapien
atgaaaacaggggtgaaaccggatg

SEQ ID NO: 1150833 - DNA, 25 bp, Homo sapien
tgaaaacaggggtgaaaccggatga

SEQ ID NO: 1150834 - DNA, 25 bp, Homo sapien
tgtcagcggctcttaaccctccaat

SEQ ID NO: 1150835 - DNA, 25 bp, Homo sapien
aatgcggtagctgcgatgtgacatc

SEQ ID NO: 1150836 - DNA, 25 bp, Homo sapien
taaccctccaatgcggtagctgcga

SEQ ID NO: 1150837 - DNA, 25 bp, Homo sapien
acatcgggaacccatataggcttcg

SEQ ID NO: 1150838 - DNA, 25 bp, Homo sapien
agctcctgaaactcaatcctggaag

SEQ ID NO: 1150839 - DNA, 25 bp, Homo sapien
cagctcctgaaactcaatcctggaa

SEQ ID NO: 1150840 - DNA, 25 bp, Homo sapien
gctcctgaaactcaatcctggaaga

SEQ ID NO: 1150841 - DNA, 25 bp, Homo sapien
ctcctgaaactcaatcctggaagaa

SEQ ID NO: 1150842 - DNA, 25 bp, Homo sapien
gtaccagggagcctaggaaagttga

SEQ ID NO: 1150843 - DNA, 25 bp, Homo sapien
ctgaggaaaacagggagggaaacag

SEQ ID NO: 1150844 - DNA, 25 bp, Homo sapien
ggagggctgtaccagggagcctagg

SEQ ID NO: 1150845 - DNA, 25 bp, Homo sapien
gctgtaccagggagcctaggaaagt

SEQ ID NO: 1150846 - DNA, 25 bp, Homo sapien
ttctcagggtagtagatcttttgtt

SEQ ID NO: 1150847 - DNA, 25 bp, Homo sapien
ctcccaacaagatgtcatcctgcaa

SEQ ID NO: 1150848 - DNA, 25 bp, Homo sapien
ctcagggtagtagatcttttgtttg

SEQ ID NO: 1150849 - DNA, 25 bp, Homo sapien
tctcagggtagtagatcttttgttt

SEQ ID NO: 1150850 - DNA, 25 bp, Homo sapien
cccttgagatttttgtgaggctgaa

SEQ ID NO: 1150851 - DNA, 25 bp, Homo sapien
agatttttgtgaggctgaatgcaga

SEQ ID NO: 1150852 - DNA, 25 bp, Homo sapien
tgcagaggtgcttggccacttctcc

SEQ ID NO: 1150853 - DNA, 25 bp, Homo sapien
tccccttgagatttttgtgaggctg

SEQ ID NO: 1150854 - DNA, 25 bp, Homo sapien
aatgtgctggtagagttggtttctg

SEQ ID NO: 1150855 - DNA, 25 bp, Homo sapien
caatgttctagaggccaaaagtcca

SEQ ID NO: 1150856 - DNA, 25 bp, Homo sapien
tttctcaatgttctagaggccaaaa

SEQ ID NO: 1150857 - DNA, 25 bp, Homo sapien
agatcaatgtgctggtagagttggt

SEQ ID NO: 1150858 - DNA, 25 bp, Homo sapien
aggatactacacaaattctgttagt

SEQ ID NO: 1150859 - DNA, 25 bp, Homo sapien
cgatccctgcaattgagtctattca

SEQ ID NO: 1150860 - DNA, 25 bp, Homo sapien
tattcattaggtgctcacgggaaac

SEQ ID NO: 1150861 - DNA, 25 bp, Homo sapien
tagtgagcatcttgacgatccctgc

SEQ ID NO: 1150862 - DNA, 25 bp, Homo sapien
aggttccaccgagactcgaactcgg

SEQ ID NO: 1150863 - DNA, 25 bp, Homo sapien
gagtgctcaccattacaccatggaa

SEQ ID NO: 1150864 - DNA, 25 bp, Homo sapien
ttccaccgagactcgaactcggatc

SEQ ID NO: 1150865 - DNA, 25 bp, Homo sapien
aactcggatcgctggattcagagtc

SEQ ID NO: 1150866 - DNA, 25 bp, Homo sapien
agggagtaaaacacaacattgccgt

SEQ ID NO: 1150867 - DNA, 25 bp, Homo sapien
tagggagtaaaacacaacattgccg

SEQ ID NO: 1150868 - DNA, 25 bp, Homo sapien
gggagtaaaacacaacattgccgtc

SEQ ID NO: 1150869 - DNA, 25 bp, Homo sapien
cccgactggatgactcggcaatttc

SEQ ID NO: 1150870 - DNA, 25 bp, Homo sapien
tgatcccgactggatgactcggcaa

SEQ ID NO: 1150871 - DNA, 25 bp, Homo sapien
tcgctgatcccgactggatgactcg

SEQ ID NO: 1150872 - DNA, 25 bp, Homo sapien
ggctcgctgatcccgactggatgac

SEQ ID NO: 1150873 - DNA, 25 bp, Homo sapien
ggcctccgattgctgggtgccagga

SEQ ID NO: 1150874 - DNA, 25 bp, Homo sapien
gggcctccgattgctgggtgccagg

SEQ ID NO: 1150875 - DNA, 25 bp, Homo sapien
cgggcctccgattgctgggtgccag

SEQ ID NO: 1150876 - DNA, 25 bp, Homo sapien
aaaatgagagcgatggtcctgagcg

SEQ ID NO: 1150877 - DNA, 25 bp, Homo sapien
tgacatcttagttcgctcccaagac

SEQ ID NO: 1150878 - DNA, 25 bp, Homo sapien
ctgagcgcctggagtgacatcttag

SEQ ID NO: 1150879 - DNA, 25 bp, Homo sapien
ccctcaaagactgcggtatttttca

SEQ ID NO: 1150880 - DNA, 25 bp, Homo sapien
tgtgatcaaatatttgtaaacagga

SEQ ID NO: 1150881 - DNA, 25 bp, Homo sapien
gatcaaatatttgtaaacaggaatg

SEQ ID NO: 1150882 - DNA, 25 bp, Homo sapien
gtgatcaaatatttgtaaacaggaa

SEQ ID NO: 1150883 - DNA, 25 bp, Homo sapien
gttgtgatcaaatatttgtaaacag

SEQ ID NO: 1150884 - DNA, 25 bp, Homo sapien
gccagtttaccggtctgggtgtgcc

SEQ ID NO: 1150885 - DNA, 25 bp, Homo sapien
tagctttgctaaggagatctgatcc

SEQ ID NO: 1150886 - DNA, 25 bp, Homo sapien
cccaagataggaaggagtttgtctc

SEQ ID NO: 1150887 - DNA, 25 bp, Homo sapien
gggagcttaggaatcatgtggcttc

SEQ ID NO: 1150888 - DNA, 25 bp, Homo sapien
gctaggaaggctcgggggtgcgcgg

SEQ ID NO: 1150889 - DNA, 25 bp, Homo sapien
tcagggctaggaaggctcgggggtg

SEQ ID NO: 1150890 - DNA, 25 bp, Homo sapien
gggctaggaaggctcgggggtgcgc

SEQ ID NO: 1150891 - DNA, 25 bp, Homo sapien
cagggctaggaaggctcgggggtgc

SEQ ID NO: 1150892 - DNA, 25 bp, Homo sapien
tttcaccacgaaggagctcccgtgc

SEQ ID NO: 1150893 - DNA, 25 bp, Homo sapien
cgggacgaggaaggcgctgtcggtg

SEQ ID NO: 1150894 - DNA, 25 bp, Homo sapien
tgtttcaccacgaaggagctcccgt

SEQ ID NO: 1150895 - DNA, 25 bp, Homo sapien
tgctgcttcgccactggctgtttca

SEQ ID NO: 1150896 - DNA, 25 bp, Homo sapien
acaacagaaacacccgcttctttgg

SEQ ID NO: 1150897 - DNA, 25 bp, Homo sapien
caggctctggcaccatgttggtcgg

SEQ ID NO: 1150898 - DNA, 25 bp, Homo sapien
ttggtcggctgagtggcggagggtg

SEQ ID NO: 1150899 - DNA, 25 bp, Homo sapien
ctacaacagaaacacccgcttcttt

SEQ ID NO: 1150900 - DNA, 25 bp, Homo sapien
cagcctccgcagcccgctttagatg

SEQ ID NO: 1150901 - DNA, 25 bp, Homo sapien
agcctccgcagcccgctttagatga

SEQ ID NO: 1150902 - DNA, 25 bp, Homo sapien
gcctccgcagcccgctttagatgat

SEQ ID NO: 1150903 - DNA, 25 bp, Homo sapien
ctccgcagcccgctttagatgatag

SEQ ID NO: 1150904 - DNA, 25 bp, Homo sapien
tgcttcccgtggttcgaaatccttc

SEQ ID NO: 1150905 - DNA, 25 bp, Homo sapien
gaaagtagctccatacatttttggg

SEQ ID NO: 1150906 - DNA, 25 bp, Homo sapien
tttgggggagcacgcttttgctttg

SEQ ID NO: 1150907 - DNA, 25 bp, Homo sapien
gcctgaccattaagaaagtagctcc

SEQ ID NO: 1150908 - DNA, 25 bp, Homo sapien
cttgctcagtcatcctgccggacaa

SEQ ID NO: 1150909 - DNA, 25 bp, Homo sapien
agtcatcctgccggacaagccctga

SEQ ID NO: 1150910 - DNA, 25 bp, Homo sapien
tcatcctgccggacaagccctgagg

SEQ ID NO: 1150911 - DNA, 25 bp, Homo sapien
tgctcagtcatcctgccggacaagc

SEQ ID NO: 1150912 - DNA, 25 bp, Homo sapien
ggtgccgaacgcaggatccgaagaa

SEQ ID NO: 1150913 - DNA, 25 bp, Homo sapien
gagccccggtgccgaacgcaggatc

SEQ ID NO: 1150914 - DNA, 25 bp, Homo sapien
cccggtgccgaacgcaggatccgaa

SEQ ID NO: 1150915 - DNA, 25 bp, Homo sapien
ggtggagccccggtgccgaacgcag

SEQ ID NO: 1150916 - DNA, 25 bp, Homo sapien
tagatgtctggtctaccgctctccg

SEQ ID NO: 1150917 - DNA, 25 bp, Homo sapien
atgtctggtctaccgctctccggct

SEQ ID NO: 1150918 - DNA, 25 bp, Homo sapien
agatgtctggtctaccgctctccgg

SEQ ID NO: 1150919 - DNA, 25 bp, Homo sapien
ctagatgtctggtctaccgctctcc

SEQ ID NO: 1150920 - DNA, 25 bp, Homo sapien
agtgaggtgcgtttcatagttttag

SEQ ID NO: 1150921 - DNA, 25 bp, Homo sapien
gtgcagatatttctatagtgtggac

SEQ ID NO: 1150922 - DNA, 25 bp, Homo sapien
ggacaacaggatgtgctaattttac

SEQ ID NO: 1150923 - DNA, 25 bp, Homo sapien
tagttttaggattacaaatgatgct

SEQ ID NO: 1150924 - DNA, 25 bp, Homo sapien
tcgccagtgtttgtgagaacagcat

SEQ ID NO: 1150925 - DNA, 25 bp, Homo sapien
ggtgatcatcgccagtgtttgtgag

SEQ ID NO: 1150926 - DNA, 25 bp, Homo sapien
atcatcgccagtgtttgtgagaaca

SEQ ID NO: 1150927 - DNA, 25 bp, Homo sapien
catcgccagtgtttgtgagaacagc

SEQ ID NO: 1150928 - DNA, 25 bp, Homo sapien
gtatcctatccccaggatgtgcctg

SEQ ID NO: 1150929 - DNA, 25 bp, Homo sapien
taggaggcctattacagtagtatcc

SEQ ID NO: 1150930 - DNA, 25 bp, Homo sapien
tttcatgtttaataataggaggcct

SEQ ID NO: 1150931 - DNA, 25 bp, Homo sapien
tgacttgggtcagttaggtggacat

SEQ ID NO: 1150932 - DNA, 25 bp, Homo sapien
aggaatcccatagaccttagaaagg

SEQ ID NO: 1150933 - DNA, 25 bp, Homo sapien
caggaatcccatagaccttagaaag

SEQ ID NO: 1150934 - DNA, 25 bp, Homo sapien
ggaatcccatagaccttagaaagga

SEQ ID NO: 1150935 - DNA, 25 bp, Homo sapien
tgattgatcaccagacacacatgtc

SEQ ID NO: 1150936 - DNA, 25 bp, Homo sapien
tgttgatgggacaaccaactcctga

SEQ ID NO: 1150937 - DNA, 25 bp, Homo sapien
atagaaaggttggtagttccagccg

SEQ ID NO: 1150938 - DNA, 25 bp, Homo sapien
gaacgtgtacctgcagcgcaattcg

SEQ ID NO: 1150939 - DNA, 25 bp, Homo sapien
tgaggggatggggagtttgctgagt

SEQ ID NO: 1150940 - DNA, 25 bp, Homo sapien
acctggaacttgcacagtcgtcctg

SEQ ID NO: 1150941 - DNA, 25 bp, Homo sapien
ggacctggaacttgcacagtcgtcc

SEQ ID NO: 1150942 - DNA, 25 bp, Homo sapien
gacctggaacttgcacagtcgtcct

SEQ ID NO: 1150943 - DNA, 25 bp, Homo sapien
tccttcgtgctctagaatatcccaa

SEQ ID NO: 1150944 - DNA, 25 bp, Homo sapien
gcgcaggtgtccaacactacaattc

SEQ ID NO: 1150945 - DNA, 25 bp, Homo sapien
tcgtgctctagaatatcccaacgcg

SEQ ID NO: 1150946 - DNA, 25 bp, Homo sapien
tgctctagaatatcccaacgcgcag

SEQ ID NO: 1150947 - DNA, 25 bp, Homo sapien
gcggcgcaaagaacgcgaagatgca

SEQ ID NO: 1150948 - DNA, 25 bp, Homo sapien
aaagaacgcgaagatgcatcccagg

SEQ ID NO: 1150949 - DNA, 25 bp, Homo sapien
gcgcaaagaacgcgaagatgcatcc

SEQ ID NO: 1150950 - DNA, 25 bp, Homo sapien
caaagaacgcgaagatgcatcccag

SEQ ID NO: 1150951 - DNA, 25 bp, Homo sapien
ggtgagtgccataccctgtttcccg

SEQ ID NO: 1150952 - DNA, 25 bp, Homo sapien
agtcgtgcgctctggtgagtgccat

SEQ ID NO: 1150953 - DNA, 25 bp, Homo sapien
cgctctggtgagtgccataccctgt

SEQ ID NO: 1150954 - DNA, 25 bp, Homo sapien
agtgccataccctgtttcccgcgag

SEQ ID NO: 1150955 - DNA, 25 bp, Homo sapien
ttaggacttaatgagacttgcagtt

SEQ ID NO: 1150956 - DNA, 25 bp, Homo sapien
aactgcaagtctcattaagtcctaa

SEQ ID NO: 1150957 - DNA, 25 bp, Homo sapien
gcacccacccaaaaacagcgcagct

SEQ ID NO: 1150958 - DNA, 25 bp, Homo sapien
tgggaagtttcctcgccagggtcgc

SEQ ID NO: 1150959 - DNA, 25 bp, Homo sapien
tccttgcagttacccgttggaccca

SEQ ID NO: 1150960 - DNA, 25 bp, Homo sapien
cgcctctgccgacttccttgctctc

SEQ ID NO: 1150961 - DNA, 25 bp, Homo sapien
gcttcggcctaagggtccccatgat

SEQ ID NO: 1150962 - DNA, 25 bp, Homo sapien
aatataccatcacaggaagccgcct

SEQ ID NO: 1150963 - DNA, 25 bp, Homo sapien
aaacttaatatagggctgcttcggc

SEQ ID NO: 1150964 - DNA, 25 bp, Homo sapien
gccgcgatgcagagtactaaccaat

SEQ ID NO: 1150965 - DNA, 25 bp, Homo sapien
ggcactggtaagttgtaacctctct

SEQ ID NO: 1150966 - DNA, 25 bp, Homo sapien
ctttcaagatgactggaccccagca

SEQ ID NO: 1150967 - DNA, 25 bp, Homo sapien
ctctagtcgcaggtaaaagcgcagc

SEQ ID NO: 1150968 - DNA, 25 bp, Homo sapien
ccagcatgcaaggtaggggttcctt

SEQ ID NO: 1150969 - DNA, 25 bp, Homo sapien
taatagtggaggattccaataaggc

SEQ ID NO: 1150970 - DNA, 25 bp, Homo sapien
tctcgcttgtttctgattcggcctt

SEQ ID NO: 1150971 - DNA, 25 bp, Homo sapien
tctgaaccagaaaaacggttatggc

SEQ ID NO: 1150972 - DNA, 25 bp, Homo sapien
tatggccacatcgtggtaatagtgg

SEQ ID NO: 1150973 - DNA, 25 bp, Homo sapien
ttcccagttggagtgcaaactatcc

SEQ ID NO: 1150974 - DNA, 25 bp, Homo sapien
tacttaaaattcccagttggagtgc

SEQ ID NO: 1150975 - DNA, 25 bp, Homo sapien
ttagattttattgtattctttaggc

SEQ ID NO: 1150976 - DNA, 25 bp, Homo sapien
tattgtattctttaggctttactta

SEQ ID NO: 1150977 - DNA, 25 bp, Homo sapien
ttggatagacttttaacccatagta

SEQ ID NO: 1150978 - DNA, 25 bp, Homo sapien
gatagacttttaacccatagtacca

SEQ ID NO: 1150979 - DNA, 25 bp, Homo sapien
tgttgtacagatttggatagacttt

SEQ ID NO: 1150980 - DNA, 25 bp, Homo sapien
tggatagacttttaacccatagtac

SEQ ID NO: 1150981 - DNA, 25 bp, Homo sapien
gtgtttctcttatacctctcagaag

SEQ ID NO: 1150982 - DNA, 25 bp, Homo sapien
tgtgtttctcttatacctctcagaa

SEQ ID NO: 1150983 - DNA, 25 bp, Homo sapien
tctcttatacctctcagaagtttca

SEQ ID NO: 1150984 - DNA, 25 bp, Homo sapien
gtttctcttatacctctcagaagtt

SEQ ID NO: 1150985 - DNA, 25 bp, Homo sapien
tcaacttcgtttattttggttgtca

SEQ ID NO: 1150986 - DNA, 25 bp, Homo sapien
caacttcgtttattttggttgtcat

SEQ ID NO: 1150987 - DNA, 25 bp, Homo sapien
gcactcctatcgctgttgaaggaaa

SEQ ID NO: 1150988 - DNA, 25 bp, Homo sapien
gcagacggtctgcactcctatcgct

SEQ ID NO: 1150989 - DNA, 25 bp, Homo sapien
taatgacttgcagacggtctgcact

SEQ ID NO: 1150990 - DNA, 25 bp, Homo sapien
ggtctgcactcctatcgctgttgaa

SEQ ID NO: 1150991 - DNA, 25 bp, Homo sapien
cggtaagagcgctgtgttctctata

SEQ ID NO: 1150992 - DNA, 25 bp, Homo sapien
tacttgggaacctcatagattcctg

SEQ ID NO: 1150993 - DNA, 25 bp, Homo sapien
atcggtctgccgaatacctgctgcc

SEQ ID NO: 1150994 - DNA, 25 bp, Homo sapien
tttctgcacatcattgactccccgg

SEQ ID NO: 1150995 - DNA, 25 bp, Homo sapien
tgctccttgtgactcagactatggt

SEQ ID NO: 1150996 - DNA, 25 bp, Homo sapien
gaagctgttggctcttattctgcaa

SEQ ID NO: 1150997 - DNA, 25 bp, Homo sapien
tagctgctgcaaggcttttcgcaat

SEQ ID NO: 1150998 - DNA, 25 bp, Homo sapien
gactcagactatggtttaggtgctg

SEQ ID NO: 1150999 - DNA, 25 bp, Homo sapien
tgagaccaaaacatcgtttctttta

SEQ ID NO: 1151000 - DNA, 25 bp, Homo sapien
ctgagaccaaaacatcgtttctttt

SEQ ID NO: 1151001 - DNA, 25 bp, Homo sapien
tattcgctggcgaagtttctcaagc

SEQ ID NO: 1151002 - DNA, 25 bp, Homo sapien
gatactgtaggagctcccgaaattc

SEQ ID NO: 1151003 - DNA, 25 bp, Homo sapien
caacagctttatcatgtattcgctg

SEQ ID NO: 1151004 - DNA, 25 bp, Homo sapien
ggttttgtctgagttatctcgatac

SEQ ID NO: 1151005 - DNA, 25 bp, Homo sapien
ggtgggatcgagaggacagcagagc

SEQ ID NO: 1151006 - DNA, 25 bp, Homo sapien
ggaaaggcgttcctccctgaaatgc

SEQ ID NO: 1151007 - DNA, 25 bp, Homo sapien
tccctcaggctttccatctcctggg

SEQ ID NO: 1151008 - DNA, 25 bp, Homo sapien
tccagctcttgaaggtgggatcgag

SEQ ID NO: 1151009 - DNA, 25 bp, Homo sapien
ctctgactggagggactcaaagagc

SEQ ID NO: 1151010 - DNA, 25 bp, Homo sapien
tgccaaggaccccactatcatctga

SEQ ID NO: 1151011 - DNA, 25 bp, Homo sapien
gaagaggagtctggtaacattgacc

SEQ ID NO: 1151012 - DNA, 25 bp, Homo sapien
ttccaagcacttgtcagaaccctcc

SEQ ID NO: 1151013 - DNA, 25 bp, Homo sapien
tccaggctgtaagctaagagagaag

SEQ ID NO: 1151014 - DNA, 25 bp, Homo sapien
ggctttgccagcaggctatccagct

SEQ ID NO: 1151015 - DNA, 25 bp, Homo sapien
ttgccagcaggctatccagctgctg

SEQ ID NO: 1151016 - DNA, 25 bp, Homo sapien
cacagacaattgttcccctgaatgc

SEQ ID NO: 1151017 - DNA, 25 bp, Homo sapien
ctggctttgccagcaggctatccag

SEQ ID NO: 1151018 - DNA, 25 bp, Homo sapien
gctgcttgtttccagggtcagcgct

SEQ ID NO: 1151019 - DNA, 25 bp, Homo sapien
tgcttgtttccagggtcagcgctgg

SEQ ID NO: 1151020 - DNA, 25 bp, Homo sapien
gcagctgcttgtttccagggtcagc

SEQ ID NO: 1151021 - DNA, 25 bp, Homo sapien
cttgtttccagggtcagcgctggct

SEQ ID NO: 1151022 - DNA, 25 bp, Homo sapien
accataaggagcatggaccaggcag

SEQ ID NO: 1151023 - DNA, 25 bp, Homo sapien
taaggagcatggaccaggcagacat

SEQ ID NO: 1151024 - DNA, 25 bp, Homo sapien
cataaggagcatggaccaggcagac

SEQ ID NO: 1151025 - DNA, 25 bp, Homo sapien
ccataaggagcatggaccaggcaga

SEQ ID NO: 1151026 - DNA, 25 bp, Homo sapien
gagccctgtttccttaggggcagga

SEQ ID NO: 1151027 - DNA, 25 bp, Homo sapien
tttgccacacagttgagttccccac

SEQ ID NO: 1151028 - DNA, 25 bp, Homo sapien
taggggcaggaacattttgccacac

SEQ ID NO: 1151029 - DNA, 25 bp, Homo sapien
tccttaggggcaggaacattttgcc

SEQ ID NO: 1151030 - DNA, 25 bp, Homo sapien
acatcccggactggaggggacacag

SEQ ID NO: 1151031 - DNA, 25 bp, Homo sapien
caacatcccggactggaggggacac

SEQ ID NO: 1151032 - DNA, 25 bp, Homo sapien
cccggactggaggggacacagctga

SEQ ID NO: 1151033 - DNA, 25 bp, Homo sapien
cggactggaggggacacagctgaat

SEQ ID NO: 1151034 - DNA, 25 bp, Homo sapien
ccgtttctgagccaggagtagagga

SEQ ID NO: 1151035 - DNA, 25 bp, Homo sapien
gtgttctgttgattatggccgtttc

SEQ ID NO: 1151036 - DNA, 25 bp, Homo sapien
catgtgttctgttgattatggccgt

SEQ ID NO: 1151037 - DNA, 25 bp, Homo sapien
gagccaggagtagaggaagcagagc

SEQ ID NO: 1151038 - DNA, 25 bp, Homo sapien
ctgttattcataatgatatcctcag

SEQ ID NO: 1151039 - DNA, 25 bp, Homo sapien
taatgatatcctcagtttgctccaa

SEQ ID NO: 1151040 - DNA, 25 bp, Homo sapien
aatgacaacacaacagaatcttctg

SEQ ID NO: 1151041 - DNA, 25 bp, Homo sapien
gacaacacaacagaatcttctgtta

SEQ ID NO: 1151042 - DNA, 25 bp, Homo sapien
ttactggagaagtatccaaacccaa

SEQ ID NO: 1151043 - DNA, 25 bp, Homo sapien
actggagaagtatccaaacccaagc

SEQ ID NO: 1151044 - DNA, 25 bp, Homo sapien
ttcattactggagaagtatccaaac

SEQ ID NO: 1151045 - DNA, 25 bp, Homo sapien
cattactggagaagtatccaaaccc

SEQ ID NO: 1151046 - DNA, 25 bp, Homo sapien
aagagacactatctttttgaccagc

SEQ ID NO: 1151047 - DNA, 25 bp, Homo sapien
gctgtcttagggcactgtagtcatc

SEQ ID NO: 1151048 - DNA, 25 bp, Homo sapien
cttagggcactgtagtcatcaatgt

SEQ ID NO: 1151049 - DNA, 25 bp, Homo sapien
gagacactatctttttgaccagcag

SEQ ID NO: 1151050 - DNA, 25 bp, Homo sapien
ttgggcttcaaggccagggaagctg

SEQ ID NO: 1151051 - DNA, 25 bp, Homo sapien
tgggcttcaaggccagggaagctgc

SEQ ID NO: 1151052 - DNA, 25 bp, Homo sapien
atgaccacatttgcattggtgctct

SEQ ID NO: 1151053 - DNA, 25 bp, Homo sapien
cacatttgcattggtgctctcacag

SEQ ID NO: 1151054 - DNA, 25 bp, Homo sapien
catttgcattggtgctctcacagca

SEQ ID NO: 1151055 - DNA, 25 bp, Homo sapien
gaccacatttgcattggtgctctca

SEQ ID NO: 1151056 - DNA, 25 bp, Homo sapien
tttgcagctctcagaactaaggtgc

SEQ ID NO: 1151057 - DNA, 25 bp, Homo sapien
gaagccctcgcacaaccatttgcag

SEQ ID NO: 1151058 - DNA, 25 bp, Homo sapien
ctgtgaagccctcgcacaaccattt

SEQ ID NO: 1151059 - DNA, 25 bp, Homo sapien
ggtgctgctccttttaccaggaatg

SEQ ID NO: 1151060 - DNA, 25 bp, Homo sapien
ccgactcctctagggcatggtgcag

SEQ ID NO: 1151061 - DNA, 25 bp, Homo sapien
gcagggccactctccagaacatggt

SEQ ID NO: 1151062 - DNA, 25 bp, Homo sapien
tcatgaatgcctttgctgcctagca

SEQ ID NO: 1151063 - DNA, 25 bp, Homo sapien
ggatgtgggtgcttggcagggccac

SEQ ID NO: 1151064 - DNA, 25 bp, Homo sapien
ttctgtgatcatttgaccacgggac

SEQ ID NO: 1151065 - DNA, 25 bp, Homo sapien
ggcattctgtgatcatttgaccacg

SEQ ID NO: 1151066 - DNA, 25 bp, Homo sapien
agtctcatgggggcattctgtgatc

SEQ ID NO: 1151067 - DNA, 25 bp, Homo sapien
taaaaaggctcagtctcatgggggc

SEQ ID NO: 1151068 - DNA, 25 bp, Homo sapien
caggcagaagacataaagcaccctg

SEQ ID NO: 1151069 - DNA, 25 bp, Homo sapien
gctggctgacgatgaactgctccat

SEQ ID NO: 1151070 - DNA, 25 bp, Homo sapien
gctgtgctctgaaggagccactcct

SEQ ID NO: 1151071 - DNA, 25 bp, Homo sapien
agccactcctgtttggatactttgg

SEQ ID NO: 1151072 - DNA, 25 bp, Homo sapien
tctttctgctggttggcgatcttca

SEQ ID NO: 1151073 - DNA, 25 bp, Homo sapien
gcctctgactggtgcagtagtttcc

SEQ ID NO: 1151074 - DNA, 25 bp, Homo sapien
cctctgactggtgcagtagtttcct

SEQ ID NO: 1151075 - DNA, 25 bp, Homo sapien
tgcctctgactggtgcagtagtttc

SEQ ID NO: 1151076 - DNA, 25 bp, Homo sapien
tctgactggtgcagtagtttcctta

SEQ ID NO: 1151077 - DNA, 25 bp, Homo sapien
aaggcgaaagcaggccaagcgtcac

SEQ ID NO: 1151078 - DNA, 25 bp, Homo sapien
agtggactggaaatcttctcctgga

SEQ ID NO: 1151079 - DNA, 25 bp, Homo sapien
ggaaatcttctcctggaaggcgaaa

SEQ ID NO: 1151080 - DNA, 25 bp, Homo sapien
gaaggcgaaagcaggccaagcgtca

SEQ ID NO: 1151081 - DNA, 25 bp, Homo sapien
cagaggcaatcctgtaagtgctgct

SEQ ID NO: 1151082 - DNA, 25 bp, Homo sapien
ggcaatcctgtaagtgctgctctaa

SEQ ID NO: 1151083 - DNA, 25 bp, Homo sapien
gaggcaatcctgtaagtgctgctct

SEQ ID NO: 1151084 - DNA, 25 bp, Homo sapien
tttacagaggcaatcctgtaagtgc

SEQ ID NO: 1151085 - DNA, 25 bp, Homo sapien
gaaggcaagggtcacaaggctggag

SEQ ID NO: 1151086 - DNA, 25 bp, Homo sapien
gctggagtacatggcagagccctta

SEQ ID NO: 1151087 - DNA, 25 bp, Homo sapien
tggaaggcaagggtcacaaggctgg

SEQ ID NO: 1151088 - DNA, 25 bp, Homo sapien
atggcagagcccttagggatttcac

SEQ ID NO: 1151089 - DNA, 25 bp, Homo sapien
ggacttccggtggctgcgcttcttg

SEQ ID NO: 1151090 - DNA, 25 bp, Homo sapien
cctgctgttttaaggacttccggtg

SEQ ID NO: 1151091 - DNA, 25 bp, Homo sapien
ttttaaggacttccggtggctgcgc

SEQ ID NO: 1151092 - DNA, 25 bp, Homo sapien
cttccggtggctgcgcttcttgcat

SEQ ID NO: 1151093 - DNA, 25 bp, Homo sapien
ctgcacaaaagggggacaggccaac

SEQ ID NO: 1151094 - DNA, 25 bp, Homo sapien
tacaactctgactccctcttctgga

SEQ ID NO: 1151095 - DNA, 25 bp, Homo sapien
ttggaggaatgaggcccagatgctc

SEQ ID NO: 1151096 - DNA, 25 bp, Homo sapien
ctcttctggaccctccagtggactt

SEQ ID NO: 1151097 - DNA, 25 bp, Homo sapien
gctccaccaggatacaactctgact

SEQ ID NO: 1151098 - DNA, 25 bp, Homo sapien
cagcaataggaccacgtgccccatt

SEQ ID NO: 1151099 - DNA, 25 bp, Homo sapien
agcaataggaccacgtgccccattc

SEQ ID NO: 1151100 - DNA, 25 bp, Homo sapien
ccccacgagcagtgtctggcagggc

SEQ ID NO: 1151101 - DNA, 25 bp, Homo sapien
cacgagcagtgtctggcagggcacc

SEQ ID NO: 1151102 - DNA, 25 bp, Homo sapien
ggtgtgacacgttcacataactgtg

SEQ ID NO: 1151103 - DNA, 25 bp, Homo sapien
tgtgcagcacatgccgggagtgatc

SEQ ID NO: 1151104 - DNA, 25 bp, Homo sapien
tgggtcagtgggcatggctctattc

SEQ ID NO: 1151105 - DNA, 25 bp, Homo sapien
tttggaagcccagacataggatggg

SEQ ID NO: 1151106 - DNA, 25 bp, Homo sapien
gttgtcttgaacagcctgactcctg

SEQ ID NO: 1151107 - DNA, 25 bp, Homo sapien
cttccagttgtcttgaacagcctga

SEQ ID NO: 1151108 - DNA, 25 bp, Homo sapien
ctgccagccctacggaagttccttt

SEQ ID NO: 1151109 - DNA, 25 bp, Homo sapien
tacggaagttccttttatgcattgg

SEQ ID NO: 1151110 - DNA, 25 bp, Homo sapien
ttgcaggactcactggatagatgtt

SEQ ID NO: 1151111 - DNA, 25 bp, Homo sapien
aagtcttgcaggactcactggatag

SEQ ID NO: 1151112 - DNA, 25 bp, Homo sapien
tcttgcaggactcactggatagatg

SEQ ID NO: 1151113 - DNA, 25 bp, Homo sapien
cctgaagtcttgcaggactcactgg

SEQ ID NO: 1151114 - DNA, 25 bp, Homo sapien
tgggaaactgtttctgccttgatga

SEQ ID NO: 1151115 - DNA, 25 bp, Homo sapien
ccttgatgatgttgtacagacaaga

SEQ ID NO: 1151116 - DNA, 25 bp, Homo sapien
ttgtacagacaagagataaacagtg

SEQ ID NO: 1151117 - DNA, 25 bp, Homo sapien
gaatatgcttagatgtattgggaaa

SEQ ID NO: 1151118 - DNA, 25 bp, Homo sapien
caagtaaacctgtctcccatcagaa

SEQ ID NO: 1151119 - DNA, 25 bp, Homo sapien
cacctgagtaaagagaagtcggccg

SEQ ID NO: 1151120 - DNA, 25 bp, Homo sapien
tagtggcatatatacccacctgagt

SEQ ID NO: 1151121 - DNA, 25 bp, Homo sapien
caataggatattacttggccaaaac

SEQ ID NO: 1151122 - DNA, 25 bp, Homo sapien
ctcctcgccacgactctgctagctg

SEQ ID NO: 1151123 - DNA, 25 bp, Homo sapien
gtcctcctcgccacgactctgctag

SEQ ID NO: 1151124 - DNA, 25 bp, Homo sapien
tgtcctcctcgccacgactctgcta

SEQ ID NO: 1151125 - DNA, 25 bp, Homo sapien
ctcgccacgactctgctagctgtgc

SEQ ID NO: 1151126 - DNA, 25 bp, Homo sapien
tggaaggtgggtccttgttgcccac

SEQ ID NO: 1151127 - DNA, 25 bp, Homo sapien
ctgggacggtggcacagatggaagg

SEQ ID NO: 1151128 - DNA, 25 bp, Homo sapien
gaaggtgggtccttgttgcccacaa

SEQ ID NO: 1151129 - DNA, 25 bp, Homo sapien
ggacggtggcacagatggaaggtgg

SEQ ID NO: 1151130 - DNA, 25 bp, Homo sapien
tcttcatacaaagatccgtggtcaa

SEQ ID NO: 1151131 - DNA, 25 bp, Homo sapien
atacaaagatccgtggtcaattccc

SEQ ID NO: 1151132 - DNA, 25 bp, Homo sapien
gatgctcttcatacaaagatccgtg

SEQ ID NO: 1151133 - DNA, 25 bp, Homo sapien
tcatacaaagatccgtggtcaattc

SEQ ID NO: 1151134 - DNA, 25 bp, Homo sapien
ttgttgatgaaattgccatggatac

SEQ ID NO: 1151135 - DNA, 25 bp, Homo sapien
gacagagacctgttggagtcaccat

SEQ ID NO: 1151136 - DNA, 25 bp, Homo sapien
agagtgaagccttcaatgctgccac

SEQ ID NO: 1151137 - DNA, 25 bp, Homo sapien
agatacctggagcttcttgactggg

SEQ ID NO: 1151138 - DNA, 25 bp, Homo sapien
atgctgccacaagtgtgatccgccc

SEQ ID NO: 1151139 - DNA, 25 bp, Homo sapien
tggacacagtagacaaaggtttttc

SEQ ID NO: 1151140 - DNA, 25 bp, Homo sapien
tgagtgcagcaacccaagagtgtct

SEQ ID NO: 1151141 - DNA, 25 bp, Homo sapien
ttgtttcagtgcttgtgagtgcagc

SEQ ID NO: 1151142 - DNA, 25 bp, Homo sapien
taccaccaggaatgtctggacacag

SEQ ID NO: 1151143 - DNA, 25 bp, Homo sapien
taccaaaccttgtctggtgagcaca

SEQ ID NO: 1151144 - DNA, 25 bp, Homo sapien
ttccttgggctcgaatgcaacggcg

SEQ ID NO: 1151145 - DNA, 25 bp, Homo sapien
ttctctgatccaccctagaagggtt

SEQ ID NO: 1151146 - DNA, 25 bp, Homo sapien
gctgtgaggacaagtgatgactgcc

SEQ ID NO: 1151147 - DNA, 25 bp, Homo sapien
gctgttctagcaccactagttggaa

SEQ ID NO: 1151148 - DNA, 25 bp, Homo sapien
taaattgtctctaaacctccatgga

SEQ ID NO: 1151149 - DNA, 25 bp, Homo sapien
gaagccatcattgaacccaggatcc

SEQ ID NO: 1151150 - DNA, 25 bp, Homo sapien
aagatcagtggactgtatgtaggcc

SEQ ID NO: 1151151 - DNA, 25 bp, Homo sapien
ggggtgctccgagtcgcgggcaggg

SEQ ID NO: 1151152 - DNA, 25 bp, Homo sapien
agggagcctcgcaaccacaggtctc

SEQ ID NO: 1151153 - DNA, 25 bp, Homo sapien
gccccagggagcctcgcaaccacag

SEQ ID NO: 1151154 - DNA, 25 bp, Homo sapien
gcccagccccatcgcggtccaagcc

SEQ ID NO: 1151155 - DNA, 25 bp, Homo sapien
cttggcagcgatgcggccggggcag

SEQ ID NO: 1151156 - DNA, 25 bp, Homo sapien
tcgcgctggctgtactggaagtcgg

SEQ ID NO: 1151157 - DNA, 25 bp, Homo sapien
gcgagcttggcagcgatgcggccgg

SEQ ID NO: 1151158 - DNA, 25 bp, Homo sapien
atggtgtccagctcgcgctggctgt

SEQ ID NO: 1151159 - DNA, 25 bp, Homo sapien
gccgtgcgagaagaggaccgtgtac

SEQ ID NO: 1151160 - DNA, 25 bp, Homo sapien
tggcccaggtccacggcattgccgt

SEQ ID NO: 1151161 - DNA, 25 bp, Homo sapien
atagaggttcctctcggaaggcctg

SEQ ID NO: 1151162 - DNA, 25 bp, Homo sapien
gccaggtggcgtcgatgtcggcata

SEQ ID NO: 1151163 - DNA, 25 bp, Homo sapien
agctccggatgcgaccctccagtct

SEQ ID NO: 1151164 - DNA, 25 bp, Homo sapien
gcgctgccgttcactggcgtttcct

SEQ ID NO: 1151165 - DNA, 25 bp, Homo sapien
ctgccgttcactggcgtttcctagc

SEQ ID NO: 1151166 - DNA, 25 bp, Homo sapien
gcacccttcccaccagcgggcgtcc

SEQ ID NO: 1151167 - DNA, 25 bp, Homo sapien
cgtgccgatgctctgcccgtacagg

SEQ ID NO: 1151168 - DNA, 25 bp, Homo sapien
tgccgatgctctgcccgtacaggat

SEQ ID NO: 1151169 - DNA, 25 bp, Homo sapien
gatgctctgcccgtacaggatgatg

SEQ ID NO: 1151170 - DNA, 25 bp, Homo sapien
tctgcccgtacaggatgatgctgtc

SEQ ID NO: 1151171 - DNA, 25 bp, Homo sapien
accgcggcacactcgtagcgcgagg

SEQ ID NO: 1151172 - DNA, 25 bp, Homo sapien
gcgcatgcccgaggtgagcggcgag

SEQ ID NO: 1151173 - DNA, 25 bp, Homo sapien
gcaccaccgcggcacactcgtagcg

SEQ ID NO: 1151174 - DNA, 25 bp, Homo sapien
accaccgcggcacactcgtagcgcg

SEQ ID NO: 1151175 - DNA, 25 bp, Homo sapien
aggtcttcttggtgtcgcggaaggc

SEQ ID NO: 1151176 - DNA, 25 bp, Homo sapien
ctcgatgttagggaaggcgtcgaag

SEQ ID NO: 1151177 - DNA, 25 bp, Homo sapien
tcttcttggtgtcgcggaaggcgac

SEQ ID NO: 1151178 - DNA, 25 bp, Homo sapien
cagtaggtcttcttggtgtcgcgga

SEQ ID NO: 1151179 - DNA, 25 bp, Homo sapien
ctcgtcctccctgccgtggatgatg

SEQ ID NO: 1151180 - DNA, 25 bp, Homo sapien
gcgagaagtcgatcacctcgtcctc

SEQ ID NO: 1151181 - DNA, 25 bp, Homo sapien
gaagtcgatcacctcgtcctccctg

SEQ ID NO: 1151182 - DNA, 25 bp, Homo sapien
atcacctcgtcctccctgccgtgga

SEQ ID NO: 1151183 - DNA, 25 bp, Homo sapien
gtccgggggccgccttattgctgag

SEQ ID NO: 1151184 - DNA, 25 bp, Homo sapien
aaggaaaggagtgcgtagctctgtt

SEQ ID NO: 1151185 - DNA, 25 bp, Homo sapien
aaaaggaaaggagtgcgtagctctg

SEQ ID NO: 1151186 - DNA, 25 bp, Homo sapien
tccaaaaggaaaggagtgcgtagct

SEQ ID NO: 1151187 - DNA, 25 bp, Homo sapien
ccaaaaggaaaggagtgcgtagctc

SEQ ID NO: 1151188 - DNA, 25 bp, Homo sapien
ggcaagagcgctcgcgcccctgact

SEQ ID NO: 1151189 - DNA, 25 bp, Homo sapien
ttctttctgggaacttgaggggcaa

SEQ ID NO: 1151190 - DNA, 25 bp, Homo sapien
gagcacactgacttcgcaccccacc

SEQ ID NO: 1151191 - DNA, 25 bp, Homo sapien
aagttccctgcgcttgattcctcgc

SEQ ID NO: 1151192 - DNA, 25 bp, Homo sapien
gaggcaaacaggctttcgaagaccc

SEQ ID NO: 1151193 - DNA, 25 bp, Homo sapien
tgccaacccttgccttggtactttc

SEQ ID NO: 1151194 - DNA, 25 bp, Homo sapien
cactgatgaggtaatctttttgcca

SEQ ID NO: 1151195 - DNA, 25 bp, Homo sapien
ccaaccctgaggcaaacaggctttc

SEQ ID NO: 1151196 - DNA, 25 bp, Homo sapien
tttgaagtctctggacggcctttga

SEQ ID NO: 1151197 - DNA, 25 bp, Homo sapien
gacggcctttgaagcggtggttcta

SEQ ID NO: 1151198 - DNA, 25 bp, Homo sapien
ggtttgcataggaaattcatccagc

SEQ ID NO: 1151199 - DNA, 25 bp, Homo sapien
gcggtggttctaaaagaggtttgca

SEQ ID NO: 1151200 - DNA, 25 bp, Homo sapien
gaccaaccgccgaagagtctccctg

SEQ ID NO: 1151201 - DNA, 25 bp, Homo sapien
gcccctcatctctacgcggatagat

SEQ ID NO: 1151202 - DNA, 25 bp, Homo sapien
ctgcgtgggactgtctccgccgcgc

SEQ ID NO: 1151203 - DNA, 25 bp, Homo sapien
tacgcggatagattcccacacgctt

SEQ ID NO: 1151204 - DNA, 25 bp, Homo sapien
taagtaactcggtgtttgggcatac

SEQ ID NO: 1151205 - DNA, 25 bp, Homo sapien
ggatgaaaattcaccaccccttgtc

SEQ ID NO: 1151206 - DNA, 25 bp, Homo sapien
gaaccttcgtgggtccaacatatag

SEQ ID NO: 1151207 - DNA, 25 bp, Homo sapien
gagcaagggaatccgccaaagattt

SEQ ID NO: 1151208 - DNA, 25 bp, Homo sapien
tgtgggtcttctcacaaacccgact

SEQ ID NO: 1151209 - DNA, 25 bp, Homo sapien
gtgtgggtcttctcacaaacccgac

SEQ ID NO: 1151210 - DNA, 25 bp, Homo sapien
tctcacaaacccgactttcctccag

SEQ ID NO: 1151211 - DNA, 25 bp, Homo sapien
caaacccgactttcctccagcggct

SEQ ID NO: 1151212 - DNA, 25 bp, Homo sapien
cggtgtgaatcttccgtccgctcat

SEQ ID NO: 1151213 - DNA, 25 bp, Homo sapien
gggatctgggcgctcgaccacttcg

SEQ ID NO: 1151214 - DNA, 25 bp, Homo sapien
ttcggtgtgaatcttccgtccgctc

SEQ ID NO: 1151215 - DNA, 25 bp, Homo sapien
ggcgctcgaccacttcggtgtgaat

SEQ ID NO: 1151216 - DNA, 25 bp, Homo sapien
cggaggcattatcctgccgggccca

SEQ ID NO: 1151217 - DNA, 25 bp, Homo sapien
accggaggcattatcctgccgggcc

SEQ ID NO: 1151218 - DNA, 25 bp, Homo sapien
agaaccggaggcattatcctgccgg

SEQ ID NO: 1151219 - DNA, 25 bp, Homo sapien
gaggcattatcctgccgggcccact

SEQ ID NO: 1151220 - DNA, 25 bp, Homo sapien
cctgggtcgtgtagcccacagaggt

SEQ ID NO: 1151221 - DNA, 25 bp, Homo sapien
ggcccaggactcctcgctcctcctg

SEQ ID NO: 1151222 - DNA, 25 bp, Homo sapien
aggcctgggtcgtgtagcccacaga

SEQ ID NO: 1151223 - DNA, 25 bp, Homo sapien
tggaaggcctgggtcgtgtagccca

SEQ ID NO: 1151224 - DNA, 25 bp, Homo sapien
ggcactaatggaaaactgtggccgg

SEQ ID NO: 1151225 - DNA, 25 bp, Homo sapien
ctaatggaaaactgtggccggtgcc

SEQ ID NO: 1151226 - DNA, 25 bp, Homo sapien
actaatggaaaactgtggccggtgc

SEQ ID NO: 1151227 - DNA, 25 bp, Homo sapien
gcactaatggaaaactgtggccggt

SEQ ID NO: 1151228 - DNA, 25 bp, Homo sapien
tgtacaccaccgtgcagagatggca

SEQ ID NO: 1151229 - DNA, 25 bp, Homo sapien
ccaagaagcccaccatctttgccgc

SEQ ID NO: 1151230 - DNA, 25 bp, Homo sapien
cgccatcccagaggcgccgattggg

SEQ ID NO: 1151231 - DNA, 25 bp, Homo sapien
ctcttatttatctccgtgtccacca

SEQ ID NO: 1151232 - DNA, 25 bp, Homo sapien
cccagcgacccgctactgtttctcc

SEQ ID NO: 1151233 - DNA, 25 bp, Homo sapien
tcgcagagtgctgggtgtgtcgcct

SEQ ID NO: 1151234 - DNA, 25 bp, Homo sapien
tctaggtcagtggtcagctgcagcc

SEQ ID NO: 1151235 - DNA, 25 bp, Homo sapien
tcgctccaggactcgggaatcaggg

SEQ ID NO: 1151236 - DNA, 25 bp, Homo sapien
cgggagcctcctcgctccggcctgc

SEQ ID NO: 1151237 - DNA, 25 bp, Homo sapien
agcctcctcgctccggcctgctcct

SEQ ID NO: 1151238 - DNA, 25 bp, Homo sapien
cctcgctccggcctgctcctggcta

SEQ ID NO: 1151239 - DNA, 25 bp, Homo sapien
ctcgctccggcctgctcctggctac

SEQ ID NO: 1151240 - DNA, 25 bp, Homo sapien
cactccacctagtgggccttttgtt

SEQ ID NO: 1151241 - DNA, 25 bp, Homo sapien
catcccacttgattctgcttctgga

SEQ ID NO: 1151242 - DNA, 25 bp, Homo sapien
ctttaagtatgtactaaggtggctg

SEQ ID NO: 1151243 - DNA, 25 bp, Homo sapien
ggtggctgattcttaatgctcctcc

SEQ ID NO: 1151244 - DNA, 25 bp, Homo sapien
agtccacgtgctgtacttgatagta

SEQ ID NO: 1151245 - DNA, 25 bp, Homo sapien
ctatcaagagatcctgtgtatttaa

SEQ ID NO: 1151246 - DNA, 25 bp, Homo sapien
taatgttctaacttagtccacgtgc

SEQ ID NO: 1151247 - DNA, 25 bp, Homo sapien
gatcctgtgtatttaatgttctaac

SEQ ID NO: 1151248 - DNA, 25 bp, Homo sapien
gaagattaaaactggaaagtctgag

SEQ ID NO: 1151249 - DNA, 25 bp, Homo sapien
ctagaagattaaaactggaaagtct

SEQ ID NO: 1151250 - DNA, 25 bp, Homo sapien
taaaactggaaagtctgaggataat

SEQ ID NO: 1151251 - DNA, 25 bp, Homo sapien
gattaaaactggaaagtctgaggat

SEQ ID NO: 1151252 - DNA, 25 bp, Homo sapien
tacaggatcccattcctctgatgtt

SEQ ID NO: 1151253 - DNA, 25 bp, Homo sapien
tacccccattgatggcaacaggatt

SEQ ID NO: 1151254 - DNA, 25 bp, Homo sapien
tcatcagcggggacaggatcaggtt

SEQ ID NO: 1151255 - DNA, 25 bp, Homo sapien
cttcacctacaggatcccattcctc

SEQ ID NO: 1151256 - DNA, 25 bp, Homo sapien
aagtccatgattcatttcaatgctg

SEQ ID NO: 1151257 - DNA, 25 bp, Homo sapien
tgtgccatagcatacgcttcctcca

SEQ ID NO: 1151258 - DNA, 25 bp, Homo sapien
ctgtgccatagcatacgcttcctcc

SEQ ID NO: 1151259 - DNA, 25 bp, Homo sapien
gtgccatagcatacgcttcctccat

SEQ ID NO: 1151260 - DNA, 25 bp, Homo sapien
cacatggcctctctagtagggtggc

SEQ ID NO: 1151261 - DNA, 25 bp, Homo sapien
tgtctggagtgtctacacatggcct

SEQ ID NO: 1151262 - DNA, 25 bp, Homo sapien
ggatggctttcctcacatgactgcc

SEQ ID NO: 1151263 - DNA, 25 bp, Homo sapien
ttagatagttatggcagcactccac

SEQ ID NO: 1151264 - DNA, 25 bp, Homo sapien
ttcttccaacatcaaggatttccaa

SEQ ID NO: 1151265 - DNA, 25 bp, Homo sapien
gctcagaaaagctccagcataagga

SEQ ID NO: 1151266 - DNA, 25 bp, Homo sapien
ctccagcataaggaaataggtcagc

SEQ ID NO: 1151267 - DNA, 25 bp, Homo sapien
caaattcagcccagaagacttaata

SEQ ID NO: 1151268 - DNA, 25 bp, Homo sapien
ggagttaatttgtgggtgtttcatg

SEQ ID NO: 1151269 - DNA, 25 bp, Homo sapien
caggctcagctgcttactaagtgtc

SEQ ID NO: 1151270 - DNA, 25 bp, Homo sapien
gaattgggcctaaagtcaaagcaaa

SEQ ID NO: 1151271 - DNA, 25 bp, Homo sapien
tgcaacctggactgacaggctcagc

SEQ ID NO: 1151272 - DNA, 25 bp, Homo sapien
ccatatatgcgagtggtcaaagcac

SEQ ID NO: 1151273 - DNA, 25 bp, Homo sapien
ttccatatatgcgagtggtcaaagc

SEQ ID NO: 1151274 - DNA, 25 bp, Homo sapien
gtcctattccatatatgcgagtggt

SEQ ID NO: 1151275 - DNA, 25 bp, Homo sapien
tgtacccgccgagagctcactcgct

SEQ ID NO: 1151276 - DNA, 25 bp, Homo sapien
tctgcttctgatactaaaagtaaga

SEQ ID NO: 1151277 - DNA, 25 bp, Homo sapien
cttccctaaggaacagaatggtctg

SEQ ID NO: 1151278 - DNA, 25 bp, Homo sapien
aatatctcaattgaaatgatttccc

SEQ ID NO: 1151279 - DNA, 25 bp, Homo sapien
aacataaattcaaatagggataaca

SEQ ID NO: 1151280 - DNA, 25 bp, Homo sapien
catccaagtactaacaggcctaacc

SEQ ID NO: 1151281 - DNA, 25 bp, Homo sapien
gtactaacaggcctaaccctgctta

SEQ ID NO: 1151282 - DNA, 25 bp, Homo sapien
tactaacaggcctaaccctgcttag

SEQ ID NO: 1151283 - DNA, 25 bp, Homo sapien
caagtactaacaggcctaaccctgc

SEQ ID NO: 1151284 - DNA, 25 bp, Homo sapien
atgtcactgtaagtcgcagcccgca

SEQ ID NO: 1151285 - DNA, 25 bp, Homo sapien
gctgctggcgatggaatccatcatg

SEQ ID NO: 1151286 - DNA, 25 bp, Homo sapien
tgctggcgatggaatccatcatgtt

SEQ ID NO: 1151287 - DNA, 25 bp, Homo sapien
actgtaagtcgcagcccgcaggctg

SEQ ID NO: 1151288 - DNA, 25 bp, Homo sapien
tgtaactttcggctccaggatgctg

SEQ ID NO: 1151289 - DNA, 25 bp, Homo sapien
agattgtttggatttacaggttcgg

SEQ ID NO: 1151290 - DNA, 25 bp, Homo sapien
caggatgctgcgcagctcctctctg

SEQ ID NO: 1151291 - DNA, 25 bp, Homo sapien
acaggttcgggccacaacatccgtg

SEQ ID NO: 1151292 - DNA, 25 bp, Homo sapien
ggtcagctgactagtgtacacagag

SEQ ID NO: 1151293 - DNA, 25 bp, Homo sapien
gattgccatggacatcctcttgatg

SEQ ID NO: 1151294 - DNA, 25 bp, Homo sapien
caatgacacaccttaggtcagctga

SEQ ID NO: 1151295 - DNA, 25 bp, Homo sapien
tacaatatgctgtcagggtaaggcc

SEQ ID NO: 1151296 - DNA, 25 bp, Homo sapien
gcacccttagggcactgtcatttaa

SEQ ID NO: 1151297 - DNA, 25 bp, Homo sapien
taatacagagctaagggcacaggca

SEQ ID NO: 1151298 - DNA, 25 bp, Homo sapien
catatatttatcatgagccagcaca

SEQ ID NO: 1151299 - DNA, 25 bp, Homo sapien
tagaaactttcctctaggctcacca

SEQ ID NO: 1151300 - DNA, 25 bp, Homo sapien
aatgagtcactgagagtcaatctgt

SEQ ID NO: 1151301 - DNA, 25 bp, Homo sapien
gctgttcagcctggtattcgaacta

SEQ ID NO: 1151302 - DNA, 25 bp, Homo sapien
tattcgaactattgatgcagagcca

SEQ ID NO: 1151303 - DNA, 25 bp, Homo sapien
tgtccaacccaggagctaaatgagt

SEQ ID NO: 1151304 - DNA, 25 bp, Homo sapien
tcatcgcatggctatgaatctgaat

SEQ ID NO: 1151305 - DNA, 25 bp, Homo sapien
catctatgtcaatgataacagtagc

SEQ ID NO: 1151306 - DNA, 25 bp, Homo sapien
tacaatcttatttccgggctggtca

SEQ ID NO: 1151307 - DNA, 25 bp, Homo sapien
gataacagtagcattcatcgcatgg

SEQ ID NO: 1151308 - DNA, 25 bp, Homo sapien
cttctcctccttgaactgtagctca

SEQ ID NO: 1151309 - DNA, 25 bp, Homo sapien
tcctccttgaactgtagctcattcc

SEQ ID NO: 1151310 - DNA, 25 bp, Homo sapien
ttgaactgtagctcattcctcagca

SEQ ID NO: 1151311 - DNA, 25 bp, Homo sapien
ctgtagctcattcctcagcatagat

SEQ ID NO: 1151312 - DNA, 25 bp, Homo sapien
aaggtgttgtgccagtctacacccc

SEQ ID NO: 1151313 - DNA, 25 bp, Homo sapien
tgttgtgccagtctacacccctcag

SEQ ID NO: 1151314 - DNA, 25 bp, Homo sapien
gggctgagcttttggacaaggtgtt

SEQ ID NO: 1151315 - DNA, 25 bp, Homo sapien
tgagcttttggacaaggtgttgtgc

SEQ ID NO: 1151316 - DNA, 25 bp, Homo sapien
cacttcacagtctgcaagcacagtc

SEQ ID NO: 1151317 - DNA, 25 bp, Homo sapien
ctgtaaatacagaagtgttcattca

SEQ ID NO: 1151318 - DNA, 25 bp, Homo sapien
acagtcagcccaatgtgcaacaggg

SEQ ID NO: 1151319 - DNA, 25 bp, Homo sapien
gttcattcagatatttcccacttca

SEQ ID NO: 1151320 - DNA, 25 bp, Homo sapien
tcagccacctcaacttgaacatctt

SEQ ID NO: 1151321 - DNA, 25 bp, Homo sapien
gggaagacgatttctgcactttctc

SEQ ID NO: 1151322 - DNA, 25 bp, Homo sapien
ctgggggaagacgatttctgcactt

SEQ ID NO: 1151323 - DNA, 25 bp, Homo sapien
tcttcatcgtcatcgttatcatttt

SEQ ID NO: 1151324 - DNA, 25 bp, Homo sapien
atatttcacatactgtggccaagcg

SEQ ID NO: 1151325 - DNA, 25 bp, Homo sapien
gagagggtgtgcctcctagatattc

SEQ ID NO: 1151326 - DNA, 25 bp, Homo sapien
gccagagagggtgtgcctcctagat

SEQ ID NO: 1151327 - DNA, 25 bp, Homo sapien
agcgaatgcgggtttttggcccatc

SEQ ID NO: 1151328 - DNA, 25 bp, Homo sapien
tggctggttggagtcataagggcca

SEQ ID NO: 1151329 - DNA, 25 bp, Homo sapien
ttcctcttcctcatcatcactttca

SEQ ID NO: 1151330 - DNA, 25 bp, Homo sapien
ctgggagacactggccctttttctt

SEQ ID NO: 1151331 - DNA, 25 bp, Homo sapien
ctcttcctcatcatcactttcattt

SEQ ID NO: 1151332 - DNA, 25 bp, Homo sapien
tcttcctcatcatcactttcatttt

SEQ ID NO: 1151333 - DNA, 25 bp, Homo sapien
agttcacctggctcatctgatggca

SEQ ID NO: 1151334 - DNA, 25 bp, Homo sapien
gatgtcactactgaattaacagcca

SEQ ID NO: 1151335 - DNA, 25 bp, Homo sapien
tgatggcaagttcctatcttgagag

SEQ ID NO: 1151336 - DNA, 25 bp, Homo sapien
taaatcagcacaatttgtagctggg

SEQ ID NO: 1151337 - DNA, 25 bp, Homo sapien
ttcatcccaggactcctgggggact

SEQ ID NO: 1151338 - DNA, 25 bp, Homo sapien
ctcctcttcagactcctgcagattc

SEQ ID NO: 1151339 - DNA, 25 bp, Homo sapien
caggactcctgggggacttcctcct

SEQ ID NO: 1151340 - DNA, 25 bp, Homo sapien
cctcctcttcagactcctgcagatt

SEQ ID NO: 1151341 - DNA, 25 bp, Homo sapien
ctttcaggaggaattgagagagtcg

SEQ ID NO: 1151342 - DNA, 25 bp, Homo sapien
ttcaggaggaattgagagagtcgaa

SEQ ID NO: 1151343 - DNA, 25 bp, Homo sapien
caggaggaattgagagagtcgaata

SEQ ID NO: 1151344 - DNA, 25 bp, Homo sapien
ggaggaattgagagagtcgaataac

SEQ ID NO: 1151345 - DNA, 25 bp, Homo sapien
gctgctgtaagactggtatgaggcc

SEQ ID NO: 1151346 - DNA, 25 bp, Homo sapien
aaatgtgctgctgtaagactggtat

SEQ ID NO: 1151347 - DNA, 25 bp, Homo sapien
tgtgctgctgtaagactggtatgag

SEQ ID NO: 1151348 - DNA, 25 bp, Homo sapien
tgctgtaagactggtatgaggccaa

SEQ ID NO: 1151349 - DNA, 25 bp, Homo sapien
ctgggccatgaactggagctttatc

SEQ ID NO: 1151350 - DNA, 25 bp, Homo sapien
ggagctttatcaccttcacaatgga

SEQ ID NO: 1151351 - DNA, 25 bp, Homo sapien
gaactggagctttatcaccttcaca

SEQ ID NO: 1151352 - DNA, 25 bp, Homo sapien
actggagctttatcaccttcacaat

SEQ ID NO: 1151353 - DNA, 25 bp, Homo sapien
gaaatctacattgatatataggttc

SEQ ID NO: 1151354 - DNA, 25 bp, Homo sapien
gttcaatgtcgtgacagtcagtcca

SEQ ID NO: 1151355 - DNA, 25 bp, Homo sapien
tgccttgagttcaatgtcgtgacag

SEQ ID NO: 1151356 - DNA, 25 bp, Homo sapien
gtgacagtcagtccaggttggcacg

SEQ ID NO: 1151357 - DNA, 25 bp, Homo sapien
caatgtcgtgacagtcagtccaggt

SEQ ID NO: 1151358 - DNA, 25 bp, Homo sapien
tgggcaggtaaagaaccacacagac

SEQ ID NO: 1151359 - DNA, 25 bp, Homo sapien
gcaggtaaagaaccacacagacatg

SEQ ID NO: 1151360 - DNA, 25 bp, Homo sapien
gggcaggtaaagaaccacacagaca

SEQ ID NO: 1151361 - DNA, 25 bp, Homo sapien
cttgggcaggtaaagaaccacacag

SEQ ID NO: 1151362 - DNA, 25 bp, Homo sapien
agaggtagacaagggtgacactggc

SEQ ID NO: 1151363 - DNA, 25 bp, Homo sapien
gagctaaaacaagcgaacttagaag

SEQ ID NO: 1151364 - DNA, 25 bp, Homo sapien
ggacagatgagctaaaacaagcgaa

SEQ ID NO: 1151365 - DNA, 25 bp, Homo sapien
gatgagctaaaacaagcgaacttag

SEQ ID NO: 1151366 - DNA, 25 bp, Homo sapien
ctaaaacaagcgaacttagaagaca

SEQ ID NO: 1151367 - DNA, 25 bp, Homo sapien
ctgggacctgttgcctcttggtcct

SEQ ID NO: 1151368 - DNA, 25 bp, Homo sapien
gttgcctcttggtcctcctttttca

SEQ ID NO: 1151369 - DNA, 25 bp, Homo sapien
acctgttgcctcttggtcctccttt

SEQ ID NO: 1151370 - DNA, 25 bp, Homo sapien
tttttcacttgatcccaccgatgtc

SEQ ID NO: 1151371 - DNA, 25 bp, Homo sapien
ataacatctatccagtgagtcctgc

SEQ ID NO: 1151372 - DNA, 25 bp, Homo sapien
aataacatctatccagtgagtcctg

SEQ ID NO: 1151373 - DNA, 25 bp, Homo sapien
taacatctatccagtgagtcctgca

SEQ ID NO: 1151374 - DNA, 25 bp, Homo sapien
catgatgggtcttggtcttcttcca

SEQ ID NO: 1151375 - DNA, 25 bp, Homo sapien
gggcatgatgggtcttggtcttctt

SEQ ID NO: 1151376 - DNA, 25 bp, Homo sapien
gcatgatgggtcttggtcttcttcc

SEQ ID NO: 1151377 - DNA, 25 bp, Homo sapien
tgatgggtcttggtcttcttccact

SEQ ID NO: 1151378 - DNA, 25 bp, Homo sapien
aataacatctatccagtgagtcctg

SEQ ID NO: 1151379 - DNA, 25 bp, Homo sapien
taacatctatccagtgagtcctgca

SEQ ID NO: 1151380 - DNA, 25 bp, Homo sapien
ataacatctatccagtgagtcctgc

SEQ ID NO: 1151381 - DNA, 25 bp, Homo sapien
ggtttgcatctcagaaccaagggtg

SEQ ID NO: 1151382 - DNA, 25 bp, Homo sapien
tgcatctcagaaccaagggtgaaat

SEQ ID NO: 1151383 - DNA, 25 bp, Homo sapien
tttgcatctcagaaccaagggtgaa

SEQ ID NO: 1151384 - DNA, 25 bp, Homo sapien
ttggtttgcatctcagaaccaaggg

SEQ ID NO: 1151385 - DNA, 25 bp, Homo sapien
gggcatggtgggccttggtcttctt

SEQ ID NO: 1151386 - DNA, 25 bp, Homo sapien
ctggggcatggtgggccttggtctt

SEQ ID NO: 1151387 - DNA, 25 bp, Homo sapien
tggggcatggtgggccttggtcttc

SEQ ID NO: 1151388 - DNA, 25 bp, Homo sapien
gcatggtgggccttggtcttcttcc

SEQ ID NO: 1151389 - DNA, 25 bp, Homo sapien
acagaacagggccaaatggaaaaga

SEQ ID NO: 1151390 - DNA, 25 bp, Homo sapien
gaacagggccaaatggaaaagaatg

SEQ ID NO: 1151391 - DNA, 25 bp, Homo sapien
cagaacagggccaaatggaaaagaa

SEQ ID NO: 1151392 - DNA, 25 bp, Homo sapien
ggacagaacagggccaaatggaaaa

SEQ ID NO: 1151393 - DNA, 25 bp, Homo sapien
aataacatctatccagtgagtcctg

SEQ ID NO: 1151394 - DNA, 25 bp, Homo sapien
ataacatctatccagtgagtcctgc

SEQ ID NO: 1151395 - DNA, 25 bp, Homo sapien
taacatctatccagtgagtcctgca

SEQ ID NO: 1151396 - DNA, 25 bp, Homo sapien
tcaggctcctcagcataagaatagg

SEQ ID NO: 1151397 - DNA, 25 bp, Homo sapien
cctcaggctcctcagcataagaata

SEQ ID NO: 1151398 - DNA, 25 bp, Homo sapien
ggctcctcagcataagaataggaca

SEQ ID NO: 1151399 - DNA, 25 bp, Homo sapien
caggctcctcagcataagaatagga

SEQ ID NO: 1151400 - DNA, 25 bp, Homo sapien
ctggggcatggtgggttttgatctt

SEQ ID NO: 1151401 - DNA, 25 bp, Homo sapien
ttcttctttgatcttcttccccttc

SEQ ID NO: 1151402 - DNA, 25 bp, Homo sapien
gggcatggtgggttttgatcttctt

SEQ ID NO: 1151403 - DNA, 25 bp, Homo sapien
tcttttcttctttgatcttcttccc

SEQ ID NO: 1151404 - DNA, 25 bp, Homo sapien
tgggtcagtcagtccaagataaact

SEQ ID NO: 1151405 - DNA, 25 bp, Homo sapien
ggtcagtcagtccaagataaactga

SEQ ID NO: 1151406 - DNA, 25 bp, Homo sapien
tggcatgggtcagtcagtccaagat

SEQ ID NO: 1151407 - DNA, 25 bp, Homo sapien
catgggtcagtcagtccaagataaa

SEQ ID NO: 1151408 - DNA, 25 bp, Homo sapien
catgatgggtcttggtcttcttcca

SEQ ID NO: 1151409 - DNA, 25 bp, Homo sapien
gggcatgatgggtcttggtcttctt

SEQ ID NO: 1151410 - DNA, 25 bp, Homo sapien
tgatgggtcttggtcttcttccact

SEQ ID NO: 1151411 - DNA, 25 bp, Homo sapien
gcatgatgggtcttggtcttcttcc

SEQ ID NO: 1151412 - DNA, 25 bp, Homo sapien
agataacctgaaggagtcgaatacc

SEQ ID NO: 1151413 - DNA, 25 bp, Homo sapien
cctaagtcaggcagttcaagataac

SEQ ID NO: 1151414 - DNA, 25 bp, Homo sapien
cctccaatgagtaaacagcacttct

SEQ ID NO: 1151415 - DNA, 25 bp, Homo sapien
ttctgtagggctggcctaagtcagg

SEQ ID NO: 1151416 - DNA, 25 bp, Homo sapien
tcaaatgcccagctcgttcacggat

SEQ ID NO: 1151417 - DNA, 25 bp, Homo sapien
ccagctcgttcacggatgcaagaat

SEQ ID NO: 1151418 - DNA, 25 bp, Homo sapien
cttgagtccaaatcatagttctgtg

SEQ ID NO: 1151419 - DNA, 25 bp, Homo sapien
tcgttcacggatgcaagaattttag

SEQ ID NO: 1151420 - DNA, 25 bp, Homo sapien
tggggcatggtgggccttggtcttc

SEQ ID NO: 1151421 - DNA, 25 bp, Homo sapien
ctggggcatggtgggccttggtctt

SEQ ID NO: 1151422 - DNA, 25 bp, Homo sapien
gcatggtgggccttggtcttcttcc

SEQ ID NO: 1151423 - DNA, 25 bp, Homo sapien
gggcatggtgggccttggtcttctt

SEQ ID NO: 1151424 - DNA, 25 bp, Homo sapien
aataacatctatccagtgagtcctg

SEQ ID NO: 1151425 - DNA, 25 bp, Homo sapien
taacatctatccagtgagtcctgca

SEQ ID NO: 1151426 - DNA, 25 bp, Homo sapien
ataacatctatccagtgagtcctgc

SEQ ID NO: 1151427 - DNA, 25 bp, Homo sapien
tcaggctcctcagcataagaatagg

SEQ ID NO: 1151428 - DNA, 25 bp, Homo sapien
ggctcctcagcataagaataggaca

SEQ ID NO: 1151429 - DNA, 25 bp, Homo sapien
cctcaggctcctcagcataagaata

SEQ ID NO: 1151430 - DNA, 25 bp, Homo sapien
caggctcctcagcataagaatagga

SEQ ID NO: 1151431 - DNA, 25 bp, Homo sapien
ggtcagtcagtccaagataaactga

SEQ ID NO: 1151432 - DNA, 25 bp, Homo sapien
catgggtcagtcagtccaagataaa

SEQ ID NO: 1151433 - DNA, 25 bp, Homo sapien
tgggtcagtcagtccaagataaact

SEQ ID NO: 1151434 - DNA, 25 bp, Homo sapien
tggcatgggtcagtcagtccaagat

SEQ ID NO: 1151435 - DNA, 25 bp, Homo sapien
tgatgggtcttggtcttcttccact

SEQ ID NO: 1151436 - DNA, 25 bp, Homo sapien
gggcatgatgggtcttggtcttctt

SEQ ID NO: 1151437 - DNA, 25 bp, Homo sapien
catgatgggtcttggtcttcttcca

SEQ ID NO: 1151438 - DNA, 25 bp, Homo sapien
gcatgatgggtcttggtcttcttcc

SEQ ID NO: 1151439 - DNA, 25 bp, Homo sapien
taacatctatccagtgagtcctgca

SEQ ID NO: 1151440 - DNA, 25 bp, Homo sapien
aataacatctatccagtgagtcctg

SEQ ID NO: 1151441 - DNA, 25 bp, Homo sapien
ataacatctatccagtgagtcctgc

SEQ ID NO: 1151442 - DNA, 25 bp, Homo sapien
ttggtttgcatctcagaaccaaggg

SEQ ID NO: 1151443 - DNA, 25 bp, Homo sapien
tttgcatctcagaaccaagggtgaa

SEQ ID NO: 1151444 - DNA, 25 bp, Homo sapien
tgcatctcagaaccaagggtgaaat

SEQ ID NO: 1151445 - DNA, 25 bp, Homo sapien
ggtttgcatctcagaaccaagggtg

SEQ ID NO: 1151446 - DNA, 25 bp, Homo sapien
tggggcatggtgggccttggtcttc

SEQ ID NO: 1151447 - DNA, 25 bp, Homo sapien
gcatggtgggccttggtcttcttcc

SEQ ID NO: 1151448 - DNA, 25 bp, Homo sapien
ctggggcatggtgggccttggtctt

SEQ ID NO: 1151449 - DNA, 25 bp, Homo sapien
gggcatggtgggccttggtcttctt

SEQ ID NO: 1151450 - DNA, 25 bp, Homo sapien
aataacatctatccagtgagtcctg

SEQ ID NO: 1151451 - DNA, 25 bp, Homo sapien
ataacatctatccagtgagtcctgc

SEQ ID NO: 1151452 - DNA, 25 bp, Homo sapien
taacatctatccagtgagtcctgca

SEQ ID NO: 1151453 - DNA, 25 bp, Homo sapien
tcaggctcctcagcataagaatagg

SEQ ID NO: 1151454 - DNA, 25 bp, Homo sapien
ggctcctcagcataagaataggaca

SEQ ID NO: 1151455 - DNA, 25 bp, Homo sapien
cctcaggctcctcagcataagaata

SEQ ID NO: 1151456 - DNA, 25 bp, Homo sapien
caggctcctcagcataagaatagga

SEQ ID NO: 1151457 - DNA, 25 bp, Homo sapien
tgggtcagtcagtccaagataaact

SEQ ID NO: 1151458 - DNA, 25 bp, Homo sapien
tggcatgggtcagtcagtccaagat

SEQ ID NO: 1151459 - DNA, 25 bp, Homo sapien
ggtcagtcagtccaagataaactga

SEQ ID NO: 1151460 - DNA, 25 bp, Homo sapien
catgggtcagtcagtccaagataaa

SEQ ID NO: 1151461 - DNA, 25 bp, Homo sapien
tgatgggtcttggtcttcttccact

SEQ ID NO: 1151462 - DNA, 25 bp, Homo sapien
catgatgggtcttggtcttcttcca

SEQ ID NO: 1151463 - DNA, 25 bp, Homo sapien
gggcatgatgggtcttggtcttctt

SEQ ID NO: 1151464 - DNA, 25 bp, Homo sapien
gcatgatgggtcttggtcttcttcc

SEQ ID NO: 1151465 - DNA, 25 bp, Homo sapien
taacatctatccagtgagtcctgca

SEQ ID NO: 1151466 - DNA, 25 bp, Homo sapien
aataacatctatccagtgagtcctg

SEQ ID NO: 1151467 - DNA, 25 bp, Homo sapien
ataacatctatccagtgagtcctgc

SEQ ID NO: 1151468 - DNA, 25 bp, Homo sapien
tcaaatgcccagctcgttcacggat

SEQ ID NO: 1151469 - DNA, 25 bp, Homo sapien
ccagctcgttcacggatgcaagaat

SEQ ID NO: 1151470 - DNA, 25 bp, Homo sapien
cttgagtccaaatcatagttctgtg

SEQ ID NO: 1151471 - DNA, 25 bp, Homo sapien
tcgttcacggatgcaagaattttag

SEQ ID NO: 1151472 - DNA, 25 bp, Homo sapien
tggggcatggtgggccttggtcttc

SEQ ID NO: 1151473 - DNA, 25 bp, Homo sapien
ctggggcatggtgggccttggtctt

SEQ ID NO: 1151474 - DNA, 25 bp, Homo sapien
gcatggtgggccttggtcttcttcc

SEQ ID NO: 1151475 - DNA, 25 bp, Homo sapien
gggcatggtgggccttggtcttctt

SEQ ID NO: 1151476 - DNA, 25 bp, Homo sapien
cagaacagggccaaatggaaaagaa

SEQ ID NO: 1151477 - DNA, 25 bp, Homo sapien
ggacagaacagggccaaatggaaaa

SEQ ID NO: 1151478 - DNA, 25 bp, Homo sapien
acagaacagggccaaatggaaaaga

SEQ ID NO: 1151479 - DNA, 25 bp, Homo sapien
gaacagggccaaatggaaaagaatg

SEQ ID NO: 1151480 - DNA, 25 bp, Homo sapien
aataacatctatccagtgagtcctg

SEQ ID NO: 1151481 - DNA, 25 bp, Homo sapien
ataacatctatccagtgagtcctgc

SEQ ID NO: 1151482 - DNA, 25 bp, Homo sapien
taacatctatccagtgagtcctgca

SEQ ID NO: 1151483 - DNA, 25 bp, Homo sapien
cctcaggctcctcagcataagaata

SEQ ID NO: 1151484 - DNA, 25 bp, Homo sapien
ggctcctcagcataagaataggaca

SEQ ID NO: 1151485 - DNA, 25 bp, Homo sapien
caggctcctcagcataagaatagga

SEQ ID NO: 1151486 - DNA, 25 bp, Homo sapien
tcaggctcctcagcataagaatagg

SEQ ID NO: 1151487 - DNA, 25 bp, Homo sapien
gggcatggtgggttttgatcttctt

SEQ ID NO: 1151488 - DNA, 25 bp, Homo sapien
ttcttctttgatcttcttccccttc

SEQ ID NO: 1151489 - DNA, 25 bp, Homo sapien
ctggggcatggtgggttttgatctt

SEQ ID NO: 1151490 - DNA, 25 bp, Homo sapien
tcttttcttctttgatcttcttccc

SEQ ID NO: 1151491 - DNA, 25 bp, Homo sapien
ttccacttccatcagcacgctgttg

SEQ ID NO: 1151492 - DNA, 25 bp, Homo sapien
cacttccatcagcacgctgttgagc

SEQ ID NO: 1151493 - DNA, 25 bp, Homo sapien
cttccacttccatcagcacgctgtt

SEQ ID NO: 1151494 - DNA, 25 bp, Homo sapien
gctcttccacttccatcagcacgct

SEQ ID NO: 1151495 - DNA, 25 bp, Homo sapien
gagtcaggtagttcaaagtacattg

SEQ ID NO: 1151496 - DNA, 25 bp, Homo sapien
agtcaggtagttcaaagtacattga

SEQ ID NO: 1151497 - DNA, 25 bp, Homo sapien
aatgagtcaggtagttcaaagtaca

SEQ ID NO: 1151498 - DNA, 25 bp, Homo sapien
tgagtcaggtagttcaaagtacatt

SEQ ID NO: 1151499 - DNA, 25 bp, Homo sapien
ccggcagagtcctgggtgacatgct

SEQ ID NO: 1151500 - DNA, 25 bp, Homo sapien
caccggcagagtcctgggtgacatg

SEQ ID NO: 1151501 - DNA, 25 bp, Homo sapien
taagtactgacaccaattggaggct

SEQ ID NO: 1151502 - DNA, 25 bp, Homo sapien
cttcctaagtactgacaccaattgg

SEQ ID NO: 1151503 - DNA, 25 bp, Homo sapien
atcagtacccaccaaaaccaatcag

SEQ ID NO: 1151504 - DNA, 25 bp, Homo sapien
catcagtacccaccaaaaccaatca

SEQ ID NO: 1151505 - DNA, 25 bp, Homo sapien
aacatagatcatgcctgagacctgg

SEQ ID NO: 1151506 - DNA, 25 bp, Homo sapien
gcactggctactggggaattgaaag

SEQ ID NO: 1151507 - DNA, 25 bp, Homo sapien
tcagaaagcgagtgtggagaaacat

SEQ ID NO: 1151508 - DNA, 25 bp, Homo sapien
tgagacctggtggattagagcactg

SEQ ID NO: 1151509 - DNA, 25 bp, Homo sapien
gggctagggaacactgtggccctca

SEQ ID NO: 1151510 - DNA, 25 bp, Homo sapien
ctgggagccacacgacggcagaggg

SEQ ID NO: 1151511 - DNA, 25 bp, Homo sapien
aggtctgggagccacacgacggcag

SEQ ID NO: 1151512 - DNA, 25 bp, Homo sapien
taaacaccagggctagggaacactg

SEQ ID NO: 1151513 - DNA, 25 bp, Homo sapien
gaggcctaatgggaaacaaatgctt

SEQ ID NO: 1151514 - DNA, 25 bp, Homo sapien
ggaaatcaccaatatgacaaagggc

SEQ ID NO: 1151515 - DNA, 25 bp, Homo sapien
ttgtcactgtgaccgagcaccaggg

SEQ ID NO: 1151516 - DNA, 25 bp, Homo sapien
gattaacattgggatgggcagacta

SEQ ID NO: 1151517 - DNA, 25 bp, Homo sapien
tctcttccccgggagcccgcgcctc

SEQ ID NO: 1151518 - DNA, 25 bp, Homo sapien
cgcagggctaaggttcccgatgtaa

SEQ ID NO: 1151519 - DNA, 25 bp, Homo sapien
tcgtcggcggtgaccgcagggctaa

SEQ ID NO: 1151520 - DNA, 25 bp, Homo sapien
gtgaccgcagggctaaggttcccga

SEQ ID NO: 1151521 - DNA, 25 bp, Homo sapien
gaccgcagggctaaggttcccgatg

SEQ ID NO: 1151522 - DNA, 25 bp, Homo sapien
gagggatgtttcgaatctgaatttt

SEQ ID NO: 1151523 - DNA, 25 bp, Homo sapien
ggagggatgtttcgaatctgaattt

SEQ ID NO: 1151524 - DNA, 25 bp, Homo sapien
aggagggatgtttcgaatctgaatt

SEQ ID NO: 1151525 - DNA, 25 bp, Homo sapien
cctggttatttatgctcaaatcctg

SEQ ID NO: 1151526 - DNA, 25 bp, Homo sapien
tccggagtgcgtattaacagccaac

SEQ ID NO: 1151527 - DNA, 25 bp, Homo sapien
ctgcaaactgtaggggaccaggacc

SEQ ID NO: 1151528 - DNA, 25 bp, Homo sapien
cacagtgatgattctttcctggtta

SEQ ID NO: 1151529 - DNA, 25 bp, Homo sapien
agtgatgatgcgggaacgggccaac

SEQ ID NO: 1151530 - DNA, 25 bp, Homo sapien
ggataagagtgatgatgcgggaacg

SEQ ID NO: 1151531 - DNA, 25 bp, Homo sapien
ctggataagagtgatgatgcgggaa

SEQ ID NO: 1151532 - DNA, 25 bp, Homo sapien
agagtgatgatgcgggaacgggcca

SEQ ID NO: 1151533 - DNA, 25 bp, Homo sapien
ctgggccttccgcaagggcgatctt

SEQ ID NO: 1151534 - DNA, 25 bp, Homo sapien
ttcattcaaggtattgacacctttg

SEQ ID NO: 1151535 - DNA, 25 bp, Homo sapien
cattcaaggtattgacacctttgcc

SEQ ID NO: 1151536 - DNA, 25 bp, Homo sapien
ggccttccgcaagggcgatcttgat

SEQ ID NO: 1151537 - DNA, 25 bp, Homo sapien
cctgatcttgtgctatgcagttggg

SEQ ID NO: 1151538 - DNA, 25 bp, Homo sapien
gcttggctttgaacgcatcactatg

SEQ ID NO: 1151539 - DNA, 25 bp, Homo sapien
ctggaattctcagggcctcttcaga

SEQ ID NO: 1151540 - DNA, 25 bp, Homo sapien
tgtctatactgtgagacctcccaaa

SEQ ID NO: 1151541 - DNA, 25 bp, Homo sapien
tgccgtgactcggattcgaaccgag

SEQ ID NO: 1151542 - DNA, 25 bp, Homo sapien
ttcgaaccgaggttgctgcggccac

SEQ ID NO: 1151543 - DNA, 25 bp, Homo sapien
ctcggattcgaaccgaggttgctgc

SEQ ID NO: 1151544 - DNA, 25 bp, Homo sapien
tgactcggattcgaaccgaggttgc

SEQ ID NO: 1151545 - DNA, 25 bp, Homo sapien
ctggtaatccaacccgagctgcggc

SEQ ID NO: 1151546 - DNA, 25 bp, Homo sapien
cggcggtgaaagcgctaaattctag

SEQ ID NO: 1151547 - DNA, 25 bp, Homo sapien
tggtaatccaacccgagctgcggcg

SEQ ID NO: 1151548 - DNA, 25 bp, Homo sapien
cggtgaaagcgctaaattctagcca

SEQ ID NO: 1151549 - DNA, 25 bp, Homo sapien
aaatcgcaggggtgagcgcagccag

SEQ ID NO: 1151550 - DNA, 25 bp, Homo sapien
ggtagcacgaacaccaccgcagact

SEQ ID NO: 1151551 - DNA, 25 bp, Homo sapien
agccagagtgcggtggactagcctc

SEQ ID NO: 1151552 - DNA, 25 bp, Homo sapien
accgcagactagggccccgcgtgtg

SEQ ID NO: 1151553 - DNA, 25 bp, Homo sapien
tgaactctgctctgttcccattgct

SEQ ID NO: 1151554 - DNA, 25 bp, Homo sapien
ccctcccaggaccttccattcccat

SEQ ID NO: 1151555 - DNA, 25 bp, Homo sapien
aggaccttccattcccatctgctct

SEQ ID NO: 1151556 - DNA, 25 bp, Homo sapien
ctgtgtcccatgagctgccaccctc

SEQ ID NO: 1151557 - DNA, 25 bp, Homo sapien
tactctccgtcccactcaatatctc

SEQ ID NO: 1151558 - DNA, 25 bp, Homo sapien
tctccgtcccactcaatatctcctc

SEQ ID NO: 1151559 - DNA, 25 bp, Homo sapien
ctctccgtcccactcaatatctcct

SEQ ID NO: 1151560 - DNA, 25 bp, Homo sapien
ttactctccgtcccactcaatatct

SEQ ID NO: 1151561 - DNA, 25 bp, Homo sapien
ctcagggatttcattttgcaggcat

SEQ ID NO: 1151562 - DNA, 25 bp, Homo sapien
gcgttactgacccatttggatgtgg

SEQ ID NO: 1151563 - DNA, 25 bp, Homo sapien
tactgacccatttggatgtggaaat

SEQ ID NO: 1151564 - DNA, 25 bp, Homo sapien
ctgacccatttggatgtggaaatac

SEQ ID NO: 1151565 - DNA, 25 bp, Homo sapien
gttactgacccatttggatgtggaa

SEQ ID NO: 1151566 - DNA, 25 bp, Homo sapien
gttggtattacacggcagcatttcg

SEQ ID NO: 1151567 - DNA, 25 bp, Homo sapien
tcataaaggagtggcagacaagagt

SEQ ID NO: 1151568 - DNA, 25 bp, Homo sapien
tcaggttaaatggtcaagggatacc

SEQ ID NO: 1151569 - DNA, 25 bp, Homo sapien
tggttagtcctaatcactacacggg

SEQ ID NO: 1151570 - DNA, 25 bp, Homo sapien
gtctctccttaagtgccaatcacaa

SEQ ID NO: 1151571 - DNA, 25 bp, Homo sapien
gggctgctgactccagttacccatg

SEQ ID NO: 1151572 - DNA, 25 bp, Homo sapien
gatttctgcaatgaacccaaacttt

SEQ ID NO: 1151573 - DNA, 25 bp, Homo sapien
tattcctgcattattgtgattcccc

SEQ ID NO: 1151574 - DNA, 25 bp, Homo sapien
aatagttcttcaggagggccgacct

SEQ ID NO: 1151575 - DNA, 25 bp, Homo sapien
tgaggtaactctcagcccagatgtg

SEQ ID NO: 1151576 - DNA, 25 bp, Homo sapien
gcagagagtgtcagtttcccaagtt

SEQ ID NO: 1151577 - DNA, 25 bp, Homo sapien
cccagatgtgaaatgggagcctacc

SEQ ID NO: 1151578 - DNA, 25 bp, Homo sapien
tagtttggtgccaaggctcaggctg

SEQ ID NO: 1151579 - DNA, 25 bp, Homo sapien
tcttagattaatatggccaaccctg

SEQ ID NO: 1151580 - DNA, 25 bp, Homo sapien
cactgctctagataaactgctcaag

SEQ ID NO: 1151581 - DNA, 25 bp, Homo sapien
taactcatttgatgcacctaaaggg

SEQ ID NO: 1151582 - DNA, 25 bp, Homo sapien
tatcttatttgcactggtgaggaac

SEQ ID NO: 1151583 - DNA, 25 bp, Homo sapien
taccttgaggcacttctgtatccta

SEQ ID NO: 1151584 - DNA, 25 bp, Homo sapien
tatactaaggtgaaccatttgaggg

SEQ ID NO: 1151585 - DNA, 25 bp, Homo sapien
tcattctctagaaaaggttcaccaa

SEQ ID NO: 1151586 - DNA, 25 bp, Homo sapien
tatctctgacttccattacaactgg

SEQ ID NO: 1151587 - DNA, 25 bp, Homo sapien
tacaactggtaattgagagctattc

SEQ ID NO: 1151588 - DNA, 25 bp, Homo sapien
taattgcctgcctatgagttaaact

SEQ ID NO: 1151589 - DNA, 25 bp, Homo sapien
gactcagaagcatatcataattgcc

SEQ ID NO: 1151590 - DNA, 25 bp, Homo sapien
taatttgtcaaggagctagagctcc

SEQ ID NO: 1151591 - DNA, 25 bp, Homo sapien
tgcgcccggtcagaacagttttaac

SEQ ID NO: 1151592 - DNA, 25 bp, Homo sapien
ttctgccgggtagtctcagaggcca

SEQ ID NO: 1151593 - DNA, 25 bp, Homo sapien
cggagtatcgctgagtcgccaggct

SEQ ID NO: 1151594 - DNA, 25 bp, Homo sapien
tagagctgctcactcagaaagggtg

SEQ ID NO: 1151595 - DNA, 25 bp, Homo sapien
tccgcaaatgcaaaagcctactctg

SEQ ID NO: 1151596 - DNA, 25 bp, Homo sapien
cagttgacgccaacactgctggtct

SEQ ID NO: 1151597 - DNA, 25 bp, Homo sapien
catcattggccgtgtttaagcctaa

SEQ ID NO: 1151598 - DNA, 25 bp, Homo sapien
ttgtttctgctaggctgatttgact

SEQ ID NO: 1151599 - DNA, 25 bp, Homo sapien
aacgtactttgtttctgctaggctg

SEQ ID NO: 1151600 - DNA, 25 bp, Homo sapien
cattggttaacgtactttgtttctg

SEQ ID NO: 1151601 - DNA, 25 bp, Homo sapien
acagtttatttctctccgtcagttt

SEQ ID NO: 1151602 - DNA, 25 bp, Homo sapien
tgtcatggataatcttccaaagcag

SEQ ID NO: 1151603 - DNA, 25 bp, Homo sapien
agggcagaacagtgtcatggataat

SEQ ID NO: 1151604 - DNA, 25 bp, Homo sapien
ggcagaacagtgtcatggataatct

SEQ ID NO: 1151605 - DNA, 25 bp, Homo sapien
gaacagtgtcatggataatcttcca

SEQ ID NO: 1151606 - DNA, 25 bp, Homo sapien
cgaggtctctttagcagtgtgtgta

SEQ ID NO: 1151607 - DNA, 25 bp, Homo sapien
gacatcctagacacagtaacatcag

SEQ ID NO: 1151608 - DNA, 25 bp, Homo sapien
cagaatgattgatctgaggagacca

SEQ ID NO: 1151609 - DNA, 25 bp, Homo sapien
cacttctcagaggaagcgaggtctc

SEQ ID NO: 1151610 - DNA, 25 bp, Homo sapien
tattgattcaccagatgtattagcc

SEQ ID NO: 1151611 - DNA, 25 bp, Homo sapien
gtagaagggaagcaagctcatctta

SEQ ID NO: 1151612 - DNA, 25 bp, Homo sapien
gaagcaagctcatcttatgtggcac

SEQ ID NO: 1151613 - DNA, 25 bp, Homo sapien
catctctggtgagaattcatgcact

SEQ ID NO: 1151614 - DNA, 25 bp, Homo sapien
atttagttgttaagtctccttagtg

SEQ ID NO: 1151615 - DNA, 25 bp, Homo sapien
tttgtgttccaggatcagattcagg

SEQ ID NO: 1151616 - DNA, 25 bp, Homo sapien
tagtgtcctctaatcgttgtcagtt

SEQ ID NO: 1151617 - DNA, 25 bp, Homo sapien
gggcgcgcgaccacctattttacca

SEQ ID NO: 1151618 - DNA, 25 bp, Homo sapien
ctctccaagttgtcgtccctgagtc

SEQ ID NO: 1151619 - DNA, 25 bp, Homo sapien
tctccaagttgtcgtccctgagtcc

SEQ ID NO: 1151620 - DNA, 25 bp, Homo sapien
tagtgagatgtgaaggacgaaataa

SEQ ID NO: 1151621 - DNA, 25 bp, Homo sapien
aacttgttagtgagatgtgaaggac

SEQ ID NO: 1151622 - DNA, 25 bp, Homo sapien
gtgaaggacgaaataagatgatacc

SEQ ID NO: 1151623 - DNA, 25 bp, Homo sapien
gatgtgaaggacgaaataagatgat

SEQ ID NO: 1151624 - DNA, 25 bp, Homo sapien
cacgcgagaaatcctcctgcatgac

SEQ ID NO: 1151625 - DNA, 25 bp, Homo sapien
tcacgcgagaaatcctcctgcatga

SEQ ID NO: 1151626 - DNA, 25 bp, Homo sapien
acgcgagaaatcctcctgcatgaca

SEQ ID NO: 1151627 - DNA, 25 bp, Homo sapien
aatcacttaattcatggccaccttc

SEQ ID NO: 1151628 - DNA, 25 bp, Homo sapien
agtgcagctaagaaatggcttagag

SEQ ID NO: 1151629 - DNA, 25 bp, Homo sapien
gtgcagctaagaaatggcttagaga

SEQ ID NO: 1151630 - DNA, 25 bp, Homo sapien
tattatacgattaagtaaaccatgg

SEQ ID NO: 1151631 - DNA, 25 bp, Homo sapien
tagaaatgattgcagtcctccacaa

SEQ ID NO: 1151632 - DNA, 25 bp, Homo sapien
ttaagtaaaccatggaccgcattcc

SEQ ID NO: 1151633 - DNA, 25 bp, Homo sapien
ttacaaaaacagtagagttcttata

SEQ ID NO: 1151634 - DNA, 25 bp, Homo sapien
cctggatggactcctgcaacagaaa

SEQ ID NO: 1151635 - DNA, 25 bp, Homo sapien
aaagtatgcattttggttaataatg

SEQ ID NO: 1151636 - DNA, 25 bp, Homo sapien
caaatgtaccagaggaatgtaaaat

SEQ ID NO: 1151637 - DNA, 25 bp, Homo sapien
taaggagacataacatctaaatgta

SEQ ID NO: 1151638 - DNA, 25 bp, Homo sapien
agccaacgccataccattcagggag

SEQ ID NO: 1151639 - DNA, 25 bp, Homo sapien
cactatcgtgtacagggccctggaa

SEQ ID NO: 1151640 - DNA, 25 bp, Homo sapien
cacagatgatcgcatcaggaagcct

SEQ ID NO: 1151641 - DNA, 25 bp, Homo sapien
tacacttattactgggaccctgcac

SEQ ID NO: 1151642 - DNA, 25 bp, Homo sapien
ttcaacagagtgttggatattctgg

SEQ ID NO: 1151643 - DNA, 25 bp, Homo sapien
ctattcaacagagtgttggatattc

SEQ ID NO: 1151644 - DNA, 25 bp, Homo sapien
aacagagtgttggatattctggcca

SEQ ID NO: 1151645 - DNA, 25 bp, Homo sapien
cctattcaacagagtgttggatatt

SEQ ID NO: 1151646 - DNA, 25 bp, Homo sapien
aaatctctggatcacaagaagtcat

SEQ ID NO: 1151647 - DNA, 25 bp, Homo sapien
gaagtcattatgtcataggctggca

SEQ ID NO: 1151648 - DNA, 25 bp, Homo sapien
atatcaagttacaccaaatctctgg

SEQ ID NO: 1151649 - DNA, 25 bp, Homo sapien
gattgcgtcttttgcagcccttgca

SEQ ID NO: 1151650 - DNA, 25 bp, Homo sapien
aggagggagcgaaacacttttcaga

SEQ ID NO: 1151651 - DNA, 25 bp, Homo sapien
tcttctgagcggtcacgtgaacggc

SEQ ID NO: 1151652 - DNA, 25 bp, Homo sapien
gagcttgcccaaaccactcgtacag

SEQ ID NO: 1151653 - DNA, 25 bp, Homo sapien
tagaaacatacaagcttgcaaggag

SEQ ID NO: 1151654 - DNA, 25 bp, Homo sapien
taggagatagccaaacaaatagagc

SEQ ID NO: 1151655 - DNA, 25 bp, Homo sapien
tatgctccaggacttgcatgtagtc

SEQ ID NO: 1151656 - DNA, 25 bp, Homo sapien
caaatagagcaagggtatagcattc

SEQ ID NO: 1151657 - DNA, 25 bp, Homo sapien
aaagacaaagtcttggaacagcaaa

SEQ ID NO: 1151658 - DNA, 25 bp, Homo sapien
ttctctctttgacatgggctttctt

SEQ ID NO: 1151659 - DNA, 25 bp, Homo sapien
ccattggtctatataagaaataatt

SEQ ID NO: 1151660 - DNA, 25 bp, Homo sapien
aattctctctttgacatgggctttc

SEQ ID NO: 1151661 - DNA, 25 bp, Homo sapien
attctctctttgacatgggctttct

SEQ ID NO: 1151662 - DNA, 25 bp, Homo sapien
tcagcggtttcttcatggaggaggc

SEQ ID NO: 1151663 - DNA, 25 bp, Homo sapien
aattgtcagcctgaatagtcagcgg

SEQ ID NO: 1151664 - DNA, 25 bp, Homo sapien
tattcttggacagtagatacaccaa

SEQ ID NO: 1151665 - DNA, 25 bp, Homo sapien
gaacaggcttcgcagagttaagagg

SEQ ID NO: 1151666 - DNA, 25 bp, Homo sapien
tgaaatgcgagtaggtatttaaggg

SEQ ID NO: 1151667 - DNA, 25 bp, Homo sapien
tgctgtaagtgaaatgcgagtaggt

SEQ ID NO: 1151668 - DNA, 25 bp, Homo sapien
ctctatactctaaagtatataagaa

SEQ ID NO: 1151669 - DNA, 25 bp, Homo sapien
tcagtctttggcctggattttcatt

SEQ ID NO: 1151670 - DNA, 25 bp, Homo sapien
tcaaatgactggagtatcaaaggga

SEQ ID NO: 1151671 - DNA, 25 bp, Homo sapien
ttagttttacaatgactttagtcat

SEQ ID NO: 1151672 - DNA, 25 bp, Homo sapien
cattgtatcaaatgactggagtatc

SEQ ID NO: 1151673 - DNA, 25 bp, Homo sapien
tagtcattgtatcaaatgactggag

SEQ ID NO: 1151674 - DNA, 25 bp, Homo sapien
gctcggaggaaagatgttgaaccca

SEQ ID NO: 1151675 - DNA, 25 bp, Homo sapien
catgaaatatcaggttccagggaag

SEQ ID NO: 1151676 - DNA, 25 bp, Homo sapien
agatctatacgttgcagctcggagg

SEQ ID NO: 1151677 - DNA, 25 bp, Homo sapien
gaataaaagggtgatctcggcagag

SEQ ID NO: 1151678 - DNA, 25 bp, Homo sapien
catatattttggctgcagatacagg

SEQ ID NO: 1151679 - DNA, 25 bp, Homo sapien
ttcatatattttggctgcagataca

SEQ ID NO: 1151680 - DNA, 25 bp, Homo sapien
gcacatgtatttatcctacccaggc

SEQ ID NO: 1151681 - DNA, 25 bp, Homo sapien
tgtatttatcctacccaggcaaaaa

SEQ ID NO: 1151682 - DNA, 25 bp, Homo sapien
aacttcatgcataatgcccaggtcc

SEQ ID NO: 1151683 - DNA, 25 bp, Homo sapien
caatcccagatcattatcccaactt

SEQ ID NO: 1151684 - DNA, 25 bp, Homo sapien
cctggagtatttcaggatgtatgcc

SEQ ID NO: 1151685 - DNA, 25 bp, Homo sapien
gcttcagtgactatccaatcccaga

SEQ ID NO: 1151686 - DNA, 25 bp, Homo sapien
taaagaaggatatggctactctcgg

SEQ ID NO: 1151687 - DNA, 25 bp, Homo sapien
aagagacatgtctaacagggagcga

SEQ ID NO: 1151688 - DNA, 25 bp, Homo sapien
ttgcacatccaatacacaccaggtc

SEQ ID NO: 1151689 - DNA, 25 bp, Homo sapien
tctcgggtttctcacagtcatggaa

SEQ ID NO: 1151690 - DNA, 25 bp, Homo sapien
tatgcacagcccactattaaggaca

SEQ ID NO: 1151691 - DNA, 25 bp, Homo sapien
taggccttctgtctttccatatgaa

SEQ ID NO: 1151692 - DNA, 25 bp, Homo sapien
ggctggtataactgctagccatatg

SEQ ID NO: 1151693 - DNA, 25 bp, Homo sapien
tcctggcttgaaatagcatttgtca

SEQ ID NO: 1151694 - DNA, 25 bp, Homo sapien
agggtacatactatccacattatac

SEQ ID NO: 1151695 - DNA, 25 bp, Homo sapien
tacagagaattacagtacacctcat

SEQ ID NO: 1151696 - DNA, 25 bp, Homo sapien
ggaatattataaggtgccattctcc

SEQ ID NO: 1151697 - DNA, 25 bp, Homo sapien
tacttactggccaggtatgctgtag

SEQ ID NO: 1151698 - DNA, 25 bp, Homo sapien
tattttattacagagggactttcta

SEQ ID NO: 1151699 - DNA, 25 bp, Homo sapien
cagacttgcatttatcggtacctca

SEQ ID NO: 1151700 - DNA, 25 bp, Homo sapien
ggctctactctttgtaaacgttgaa

SEQ ID NO: 1151701 - DNA, 25 bp, Homo sapien
tttggaatacacatacagacttgca

SEQ ID NO: 1151702 - DNA, 25 bp, Homo sapien
cttttggaaagcagtggattggcac

SEQ ID NO: 1151703 - DNA, 25 bp, Homo sapien
gattggcacagtggtaaaccttacc

SEQ ID NO: 1151704 - DNA, 25 bp, Homo sapien
tgtgagccttgtgcctaggtaggaa

SEQ ID NO: 1151705 - DNA, 25 bp, Homo sapien
cctaagttccaatcaggtgtttcga

SEQ ID NO: 1151706 - DNA, 25 bp, Homo sapien
tggtgtctcgatgggggtatcccct

SEQ ID NO: 1151707 - DNA, 25 bp, Homo sapien
cctgctggaaagacgggtggtgtct

SEQ ID NO: 1151708 - DNA, 25 bp, Homo sapien
ccaatcttacctcacccttgataat

SEQ ID NO: 1151709 - DNA, 25 bp, Homo sapien
gtgattgtgttaacccctgctggaa

SEQ ID NO: 1151710 - DNA, 25 bp, Homo sapien
gacactaacaggtgaagatctcggg

SEQ ID NO: 1151711 - DNA, 25 bp, Homo sapien
gagcgggctctcttccatcaagtgc

SEQ ID NO: 1151712 - DNA, 25 bp, Homo sapien
gatctcgggagaccatgactaagaa

SEQ ID NO: 1151713 - DNA, 25 bp, Homo sapien
ctttgaaaggactgatgacatcgga

SEQ ID NO: 1151714 - DNA, 25 bp, Homo sapien
gaatttattcgaatgccacggccaa

SEQ ID NO: 1151715 - DNA, 25 bp, Homo sapien
tcagctctgggtcttgcaggcgcag

SEQ ID NO: 1151716 - DNA, 25 bp, Homo sapien
tctgttgagcgcttcaggaaaggcg

SEQ ID NO: 1151717 - DNA, 25 bp, Homo sapien
ttttattcccatcgagggagggaga

SEQ ID NO: 1151718 - DNA, 25 bp, Homo sapien
ctcggctcggccctcagtatgaagc

SEQ ID NO: 1151719 - DNA, 25 bp, Homo sapien
agtaagaagccaggcgcttggcccc

SEQ ID NO: 1151720 - DNA, 25 bp, Homo sapien
actgccgtaagtcctgctcctgcac

SEQ ID NO: 1151721 - DNA, 25 bp, Homo sapien
agtatgaagccgcagtaagaagcca

SEQ ID NO: 1151722 - DNA, 25 bp, Homo sapien
caggatacagccattctgacaatgg

SEQ ID NO: 1151723 - DNA, 25 bp, Homo sapien
aatggaagcgctgggcgagccagtt

SEQ ID NO: 1151724 - DNA, 25 bp, Homo sapien
ccctccagctggtaagagcgtaggt

SEQ ID NO: 1151725 - DNA, 25 bp, Homo sapien
agcgctgggcgagccagtttactcc

SEQ ID NO: 1151726 - DNA, 25 bp, Homo sapien
ccaaataaatgaagagagcaatagt

SEQ ID NO: 1151727 - DNA, 25 bp, Homo sapien
tgccaaataaatgaagagagcaata

SEQ ID NO: 1151728 - DNA, 25 bp, Homo sapien
ctgccaaataaatgaagagagcaat

SEQ ID NO: 1151729 - DNA, 25 bp, Homo sapien
gccaaataaatgaagagagcaatag

SEQ ID NO: 1151730 - DNA, 25 bp, Homo sapien
cagaaatggcccttcatcatttaat

SEQ ID NO: 1151731 - DNA, 25 bp, Homo sapien
aatcagaaatggcccttcatcattt

SEQ ID NO: 1151732 - DNA, 25 bp, Homo sapien
tcagaaatggcccttcatcatttaa

SEQ ID NO: 1151733 - DNA, 25 bp, Homo sapien
gaatcagaaatggcccttcatcatt

SEQ ID NO: 1151734 - DNA, 25 bp, Homo sapien
cctgtttcaggtcttgctgaaggca

SEQ ID NO: 1151735 - DNA, 25 bp, Homo sapien
ctcataggtagtcagtagcacatga

SEQ ID NO: 1151736 - DNA, 25 bp, Homo sapien
acgtgactcctgtttcaggtcttgc

SEQ ID NO: 1151737 - DNA, 25 bp, Homo sapien
tagcacatgaaaacgtgactcctgt

SEQ ID NO: 1151738 - DNA, 25 bp, Homo sapien
tagaaatgatgcatctttcaagcaa

SEQ ID NO: 1151739 - DNA, 25 bp, Homo sapien
gaaatgatgcatctttcaagcaaat

SEQ ID NO: 1151740 - DNA, 25 bp, Homo sapien
gattttagaaatgatgcatctttca

SEQ ID NO: 1151741 - DNA, 25 bp, Homo sapien
ttttagaaatgatgcatctttcaag

SEQ ID NO: 1151742 - DNA, 25 bp, Homo sapien
agcttcatccacaacaagaacactc

SEQ ID NO: 1151743 - DNA, 25 bp, Homo sapien
tgacaaggtcttatgcagcagggag

SEQ ID NO: 1151744 - DNA, 25 bp, Homo sapien
gcttcatccacaacaagaacactcc

SEQ ID NO: 1151745 - DNA, 25 bp, Homo sapien
cttcatccacaacaagaacactcca

SEQ ID NO: 1151746 - DNA, 25 bp, Homo sapien
ttatataaaaactaaggctacactg

SEQ ID NO: 1151747 - DNA, 25 bp, Homo sapien
gttgtgaatctaaaattactctaaa

SEQ ID NO: 1151748 - DNA, 25 bp, Homo sapien
tataaaaactaaggctacactgtaa

SEQ ID NO: 1151749 - DNA, 25 bp, Homo sapien
tgttgtgaatctaaaattactctaa

SEQ ID NO: 1151750 - DNA, 25 bp, Homo sapien
tgttgataatgggtgaagctgtaca

SEQ ID NO: 1151751 - DNA, 25 bp, Homo sapien
gttgcaacaactgtgccactctggt

SEQ ID NO: 1151752 - DNA, 25 bp, Homo sapien
aagatgaatatgtggagcacagagg

SEQ ID NO: 1151753 - DNA, 25 bp, Homo sapien
tgtccaaacctacagaatgcacacc

SEQ ID NO: 1151754 - DNA, 25 bp, Homo sapien
cagaacttagctttcccactccaaa

SEQ ID NO: 1151755 - DNA, 25 bp, Homo sapien
gctggttgcgtccaacttttataaa

SEQ ID NO: 1151756 - DNA, 25 bp, Homo sapien
catctcagcccaataaatacatgta

SEQ ID NO: 1151757 - DNA, 25 bp, Homo sapien
tccaactagttatctgcaacccaag

SEQ ID NO: 1151758 - DNA, 25 bp, Homo sapien
ggaaaccaaggctgctagtcgctac

SEQ ID NO: 1151759 - DNA, 25 bp, Homo sapien
tgttcaccaagtaaagagctgaggt

SEQ ID NO: 1151760 - DNA, 25 bp, Homo sapien
gaatgtcgcataaattgtacaacca

SEQ ID NO: 1151761 - DNA, 25 bp, Homo sapien
taccttttgcaaatgcactgcatga

SEQ ID NO: 1151762 - DNA, 25 bp, Homo sapien
tgagcctgtaattacagcctgtttt

SEQ ID NO: 1151763 - DNA, 25 bp, Homo sapien
tcttaaattttcttatagcgacaag

SEQ ID NO: 1151764 - DNA, 25 bp, Homo sapien
gcctgtaattacagcctgttttaaa

SEQ ID NO: 1151765 - DNA, 25 bp, Homo sapien
aattttcttatagcgacaaggtctc

SEQ ID NO: 1151766 - DNA, 25 bp, Homo sapien
gagttccggtcaacaggagactgaa

SEQ ID NO: 1151767 - DNA, 25 bp, Homo sapien
tgggagttccggtcaacaggagact

SEQ ID NO: 1151768 - DNA, 25 bp, Homo sapien
ttccggtcaacaggagactgaagac

SEQ ID NO: 1151769 - DNA, 25 bp, Homo sapien
atgggagttccggtcaacaggagac

SEQ ID NO: 1151770 - DNA, 25 bp, Homo sapien
tcctggtagcgttgaataaaatctc

SEQ ID NO: 1151771 - DNA, 25 bp, Homo sapien
tcaatatcctggtagcgttgaataa

SEQ ID NO: 1151772 - DNA, 25 bp, Homo sapien
ggaaaagagatcaggctccacaaaa

SEQ ID NO: 1151773 - DNA, 25 bp, Homo sapien
ttggaaaagagatcaggctccacaa

SEQ ID NO: 1151774 - DNA, 25 bp, Homo sapien
gcttcttggggatgatttgcaggaa

SEQ ID NO: 1151775 - DNA, 25 bp, Homo sapien
cattatgcatgaggatggtttctgt

SEQ ID NO: 1151776 - DNA, 25 bp, Homo sapien
cttcttggggatgatttgcaggaaa

SEQ ID NO: 1151777 - DNA, 25 bp, Homo sapien
tgaggatggtttctgtgccaaggct

SEQ ID NO: 1151778 - DNA, 25 bp, Homo sapien
ggataatatcacagggatagatgga

SEQ ID NO: 1151779 - DNA, 25 bp, Homo sapien
ccaggataatatcacagggatagat

SEQ ID NO: 1151780 - DNA, 25 bp, Homo sapien
tcatcccaggataatatcacaggga

SEQ ID NO: 1151781 - DNA, 25 bp, Homo sapien
gaaaaatcatcccaggataatatca

SEQ ID NO: 1151782 - DNA, 25 bp, Homo sapien
catcaaaatggccttgtagtatttc

SEQ ID NO: 1151783 - DNA, 25 bp, Homo sapien
gggaagctctgtagctacctcagct

SEQ ID NO: 1151784 - DNA, 25 bp, Homo sapien
tcagctttcactcgcctcagcagaa

SEQ ID NO: 1151785 - DNA, 25 bp, Homo sapien
gacatgccatggtatatcactactt

SEQ ID NO: 1151786 - DNA, 25 bp, Homo sapien
gctgggacaaaatgttctgtagttt

SEQ ID NO: 1151787 - DNA, 25 bp, Homo sapien
cacacactttcgaagctgggacaaa

SEQ ID NO: 1151788 - DNA, 25 bp, Homo sapien
ttcgaagctgggacaaaatgttctg

SEQ ID NO: 1151789 - DNA, 25 bp, Homo sapien
tgatccacacactttcgaagctggg

SEQ ID NO: 1151790 - DNA, 25 bp, Homo sapien
gaaaggctgactgagtcaattcaag

SEQ ID NO: 1151791 - DNA, 25 bp, Homo sapien
cattagtgaacctggagtagcggtg

SEQ ID NO: 1151792 - DNA, 25 bp, Homo sapien
cgctgaagaatgtttctagattata

SEQ ID NO: 1151793 - DNA, 25 bp, Homo sapien
gagtagcggtgaggaaaggctgact

SEQ ID NO: 1151794 - DNA, 25 bp, Homo sapien
aacttcaaaaggctccggctccaca

SEQ ID NO: 1151795 - DNA, 25 bp, Homo sapien
caggtgaagcttcccactagcctca

SEQ ID NO: 1151796 - DNA, 25 bp, Homo sapien
tagtagcttatccagcaggtgaagc

SEQ ID NO: 1151797 - DNA, 25 bp, Homo sapien
ccagaatacaggaatgctagtagct

SEQ ID NO: 1151798 - DNA, 25 bp, Homo sapien
gaaaactggaattggcctgaacaac

SEQ ID NO: 1151799 - DNA, 25 bp, Homo sapien
caatgccaagttactagcaggcaac

SEQ ID NO: 1151800 - DNA, 25 bp, Homo sapien
tcagacagcagattacggcagcaca

SEQ ID NO: 1151801 - DNA, 25 bp, Homo sapien
gaacctcgtcttctaatgcgcaact

SEQ ID NO: 1151802 - DNA, 25 bp, Homo sapien
ctaagacagtcattccaaagggata

SEQ ID NO: 1151803 - DNA, 25 bp, Homo sapien
ttttcctagactcctctagaaagag

SEQ ID NO: 1151804 - DNA, 25 bp, Homo sapien
taagacagtcattccaaagggataa

SEQ ID NO: 1151805 - DNA, 25 bp, Homo sapien
agacagtcattccaaagggataatt

SEQ ID NO: 1151806 - DNA, 25 bp, Homo sapien
catctacaactatgccctgtttggg

SEQ ID NO: 1151807 - DNA, 25 bp, Homo sapien
gaaagcctgtggtcagtcatctaca

SEQ ID NO: 1151808 - DNA, 25 bp, Homo sapien
gagtaagtcaagaacaaagtcaagc

SEQ ID NO: 1151809 - DNA, 25 bp, Homo sapien
gcctagagtcccttgttactggctg

SEQ ID NO: 1151810 - DNA, 25 bp, Homo sapien
ctctgtaatccatatagtcttggag

SEQ ID NO: 1151811 - DNA, 25 bp, Homo sapien
gtaatccatatagtcttggagaata

SEQ ID NO: 1151812 - DNA, 25 bp, Homo sapien
ctgtaatccatatagtcttggagaa

SEQ ID NO: 1151813 - DNA, 25 bp, Homo sapien
atccatatagtcttggagaatatcc

SEQ ID NO: 1151814 - DNA, 25 bp, Homo sapien
catattattcttcatggacctatct

SEQ ID NO: 1151815 - DNA, 25 bp, Homo sapien
ttaagtctaacagagccttaggtaa

SEQ ID NO: 1151816 - DNA, 25 bp, Homo sapien
tcctttgtaatattctcatatccca

SEQ ID NO: 1151817 - DNA, 25 bp, Homo sapien
taggtaatgtagtggccaaaaggtg

SEQ ID NO: 1151818 - DNA, 25 bp, Homo sapien
tccactggaccaggtatactgcgga

SEQ ID NO: 1151819 - DNA, 25 bp, Homo sapien
tgggctcaagatcaactcatgttag

SEQ ID NO: 1151820 - DNA, 25 bp, Homo sapien
atactgcggaactcagacacccggt

SEQ ID NO: 1151821 - DNA, 25 bp, Homo sapien
gacgctaaaagctctagtcactgaa

SEQ ID NO: 1151822 - DNA, 25 bp, Homo sapien
gaggctttagagttcgccacctgcc

SEQ ID NO: 1151823 - DNA, 25 bp, Homo sapien
tatgtaaacagaagacaagcgcttg

SEQ ID NO: 1151824 - DNA, 25 bp, Homo sapien
aaccctgagcatctatcctgtgtga

SEQ ID NO: 1151825 - DNA, 25 bp, Homo sapien
gtgagtgagccccttctaacagtcc

SEQ ID NO: 1151826 - DNA, 25 bp, Homo sapien
tacagagaggaagaaaaacagaaat

SEQ ID NO: 1151827 - DNA, 25 bp, Homo sapien
ttacagagaggaagaaaaacagaaa

SEQ ID NO: 1151828 - DNA, 25 bp, Homo sapien
ctttacagagaggaagaaaaacaga

SEQ ID NO: 1151829 - DNA, 25 bp, Homo sapien
tttacagagaggaagaaaaacagaa

SEQ ID NO: 1151830 - DNA, 25 bp, Homo sapien
tctcacagaaccatccacacgctca

SEQ ID NO: 1151831 - DNA, 25 bp, Homo sapien
gagaaaaacgaaaatgggctgctgt

SEQ ID NO: 1151832 - DNA, 25 bp, Homo sapien
agaaaaacgaaaatgggctgctgtc

SEQ ID NO: 1151833 - DNA, 25 bp, Homo sapien
accatccacacgctcatagctgtag

SEQ ID NO: 1151834 - DNA, 25 bp, Homo sapien
tgacagtttggacaggctggataga

SEQ ID NO: 1151835 - DNA, 25 bp, Homo sapien
gacagtttggacaggctggatagaa

SEQ ID NO: 1151836 - DNA, 25 bp, Homo sapien
atgacagtttggacaggctggatag

SEQ ID NO: 1151837 - DNA, 25 bp, Homo sapien
tcccaggtcaatggtcaaagcagat

SEQ ID NO: 1151838 - DNA, 25 bp, Homo sapien
tatagaggaaggacaactagtagac

SEQ ID NO: 1151839 - DNA, 25 bp, Homo sapien
gaaagcactctgtaactggtaaagc

SEQ ID NO: 1151840 - DNA, 25 bp, Homo sapien
gaagagctacttccactgaatgtaa

SEQ ID NO: 1151841 - DNA, 25 bp, Homo sapien
agaaaaatttcttaggctggaatgc

SEQ ID NO: 1151842 - DNA, 25 bp, Homo sapien
tccaggacctgagaaaaatttctta

SEQ ID NO: 1151843 - DNA, 25 bp, Homo sapien
acgcaccactacatccagctaagtt

SEQ ID NO: 1151844 - DNA, 25 bp, Homo sapien
gcttgctccaggacctgagaaaaat

SEQ ID NO: 1151845 - DNA, 25 bp, Homo sapien
tatgagaggtctgcaatgcgcactg

SEQ ID NO: 1151846 - DNA, 25 bp, Homo sapien
tgttccagcggtgagaagtgctacc

SEQ ID NO: 1151847 - DNA, 25 bp, Homo sapien
tcaagagaagagtgccgaatgtcgc

SEQ ID NO: 1151848 - DNA, 25 bp, Homo sapien
gaaccgtgaaggtacattgcagcct

SEQ ID NO: 1151849 - DNA, 25 bp, Homo sapien
tatctgctgctgttaagttcatgcc

SEQ ID NO: 1151850 - DNA, 25 bp, Homo sapien
atctgctgctgttaagttcatgcca

SEQ ID NO: 1151851 - DNA, 25 bp, Homo sapien
ttgttttggccaatgcgatgagccc

SEQ ID NO: 1151852 - DNA, 25 bp, Homo sapien
ggcagctgcttgcaagtcattctga

SEQ ID NO: 1151853 - DNA, 25 bp, Homo sapien
cagctgcttgcaagtcattctgagg

SEQ ID NO: 1151854 - DNA, 25 bp, Homo sapien
tttggccaatgcgatgagccctggc

SEQ ID NO: 1151855 - DNA, 25 bp, Homo sapien
cacagtgtctcgaccaatcagccga

SEQ ID NO: 1151856 - DNA, 25 bp, Homo sapien
cctccttctatgatcatgttggtga

SEQ ID NO: 1151857 - DNA, 25 bp, Homo sapien
ggaggctgctttcctatagactatt

SEQ ID NO: 1151858 - DNA, 25 bp, Homo sapien
tcagcatcggcagcgggtttctggg

SEQ ID NO: 1151859 - DNA, 25 bp, Homo sapien
gaattttctatctccctactgttga

SEQ ID NO: 1151860 - DNA, 25 bp, Homo sapien
tatcctaggagttggtctctttgca

SEQ ID NO: 1151861 - DNA, 25 bp, Homo sapien
tttgcaatgtttctcacaccagact

SEQ ID NO: 1151862 - DNA, 25 bp, Homo sapien
tacctgcatctttctagtatcctag

SEQ ID NO: 1151863 - DNA, 25 bp, Homo sapien
agcagtccatgttcccactcgtttg

SEQ ID NO: 1151864 - DNA, 25 bp, Homo sapien
tcacagtgatgtgtccagcagccca

SEQ ID NO: 1151865 - DNA, 25 bp, Homo sapien
gggcaagaagtccaacagagtcgct

SEQ ID NO: 1151866 - DNA, 25 bp, Homo sapien
taactttccgataaccatgagctgg

SEQ ID NO: 1151867 - DNA, 25 bp, Homo sapien
ccagcagtttatccaaaccaaattt

SEQ ID NO: 1151868 - DNA, 25 bp, Homo sapien
ccaaaccaaatttgagtatctcact

SEQ ID NO: 1151869 - DNA, 25 bp, Homo sapien
ggccagcagtttatccaaaccaaat

SEQ ID NO: 1151870 - DNA, 25 bp, Homo sapien
aaaccaaatttgagtatctcactca

SEQ ID NO: 1151871 - DNA, 25 bp, Homo sapien
cagtatggactccaggtctatttca

SEQ ID NO: 1151872 - DNA, 25 bp, Homo sapien
tatggactccaggtctatttcatcc

SEQ ID NO: 1151873 - DNA, 25 bp, Homo sapien
ttctcccagtatggactccaggtct

SEQ ID NO: 1151874 - DNA, 25 bp, Homo sapien
tcccagtatggactccaggtctatt

SEQ ID NO: 1151875 - DNA, 25 bp, Homo sapien
tccttctgctgcaggcaaggcatca

SEQ ID NO: 1151876 - DNA, 25 bp, Homo sapien
ttctgctgcaggcaaggcatcagag

SEQ ID NO: 1151877 - DNA, 25 bp, Homo sapien
tccttcctcttgatctctgctccct

SEQ ID NO: 1151878 - DNA, 25 bp, Homo sapien
tcctcttgatctctgctccctcctt

SEQ ID NO: 1151879 - DNA, 25 bp, Homo sapien
tcacggtcctatagaaacaaaagag

SEQ ID NO: 1151880 - DNA, 25 bp, Homo sapien
gaaagcgagcgatggaaattcacgg

SEQ ID NO: 1151881 - DNA, 25 bp, Homo sapien
tcagagcagtggctactaaggaact

SEQ ID NO: 1151882 - DNA, 25 bp, Homo sapien
ccacactagagtagacagtcaggca

SEQ ID NO: 1151883 - DNA, 25 bp, Homo sapien
ctcttgactagctttctccaaaagg

SEQ ID NO: 1151884 - DNA, 25 bp, Homo sapien
cttactgggctctttagaataatct

SEQ ID NO: 1151885 - DNA, 25 bp, Homo sapien
actgcctttatttcggagtgatcgg

SEQ ID NO: 1151886 - DNA, 25 bp, Homo sapien
tatttcggagtgatcggccctcttg

SEQ ID NO: 1151887 - DNA, 25 bp, Homo sapien
ttttggtagatccctccacaaggcc

SEQ ID NO: 1151888 - DNA, 25 bp, Homo sapien
tttggtagatccctccacaaggcct

SEQ ID NO: 1151889 - DNA, 25 bp, Homo sapien
tcctctatgagtctccttctcttgg

SEQ ID NO: 1151890 - DNA, 25 bp, Homo sapien
tcttcttctcctctatgagtctcct

SEQ ID NO: 1151891 - DNA, 25 bp, Homo sapien
tcttctcctctatgagtctccttct

SEQ ID NO: 1151892 - DNA, 25 bp, Homo sapien
tctatgagtctccttctcttggcag

SEQ ID NO: 1151893 - DNA, 25 bp, Homo sapien
tggccgccagcttggttaacgcaga

SEQ ID NO: 1151894 - DNA, 25 bp, Homo sapien
tcaactgtggccgccagcttggtta

SEQ ID NO: 1151895 - DNA, 25 bp, Homo sapien
gccagcttggttaacgcagacatac

SEQ ID NO: 1151896 - DNA, 25 bp, Homo sapien
aactgtggccgccagcttggttaac

SEQ ID NO: 1151897 - DNA, 25 bp, Homo sapien
acatcaccactaacgtacttgaggg

SEQ ID NO: 1151898 - DNA, 25 bp, Homo sapien
tacttgagggaagtagcatctgggt

SEQ ID NO: 1151899 - DNA, 25 bp, Homo sapien
gcatctgggtcttggtaatccagct

SEQ ID NO: 1151900 - DNA, 25 bp, Homo sapien
gcagaaggactggtaattgttggat

SEQ ID NO: 1151901 - DNA, 25 bp, Homo sapien
gcatctcaaaaattagggttctcaa

SEQ ID NO: 1151902 - DNA, 25 bp, Homo sapien
taggttatgcaacagcacataggca

SEQ ID NO: 1151903 - DNA, 25 bp, Homo sapien
caatgagcaaaatctctgtggtgca

SEQ ID NO: 1151904 - DNA, 25 bp, Homo sapien
tataggaggtgaagtccagtgcaca

SEQ ID NO: 1151905 - DNA, 25 bp, Homo sapien
tgtttgaagaaagagaaaattttca

SEQ ID NO: 1151906 - DNA, 25 bp, Homo sapien
ctgtaaataaaccacctctgcccca

SEQ ID NO: 1151907 - DNA, 25 bp, Homo sapien
acctctgccccagtggccagagtca

SEQ ID NO: 1151908 - DNA, 25 bp, Homo sapien
cctctgccccagtggccagagtcat

SEQ ID NO: 1151909 - DNA, 25 bp, Homo sapien
aaataaaccacctctgccccagtgg

SEQ ID NO: 1151910 - DNA, 25 bp, Homo sapien
ggctcagcggatcgcttttccagag

SEQ ID NO: 1151911 - DNA, 25 bp, Homo sapien
tatttttcttggctcagcggatcgc

SEQ ID NO: 1151912 - DNA, 25 bp, Homo sapien
cttggctcagcggatcgcttttcca

SEQ ID NO: 1151913 - DNA, 25 bp, Homo sapien
ttttcttggctcagcggatcgcttt

SEQ ID NO: 1151914 - DNA, 25 bp, Homo sapien
ctaattccttatctagtgctgtgta

SEQ ID NO: 1151915 - DNA, 25 bp, Homo sapien
tctagtgctgtgtaaccctcacgat

SEQ ID NO: 1151916 - DNA, 25 bp, Homo sapien
gtaaccctcacgatacagtcttagg

SEQ ID NO: 1151917 - DNA, 25 bp, Homo sapien
tcacgatacagtcttaggtgtcctc

SEQ ID NO: 1151918 - DNA, 25 bp, Homo sapien
gtttcttgattctttatcatcaaca

SEQ ID NO: 1151919 - DNA, 25 bp, Homo sapien
tatcatcaacaggaaataaaaggac

SEQ ID NO: 1151920 - DNA, 25 bp, Homo sapien
ataaaaggacacctcccaaactcag

SEQ ID NO: 1151921 - DNA, 25 bp, Homo sapien
gattctttatcatcaacaggaaata

SEQ ID NO: 1151922 - DNA, 25 bp, Homo sapien
tcaagggagcttccgggatgacatc

SEQ ID NO: 1151923 - DNA, 25 bp, Homo sapien
gaaaccactttgctgttagtcactg

SEQ ID NO: 1151924 - DNA, 25 bp, Homo sapien
gacatggtgctctactccctgtaaa

SEQ ID NO: 1151925 - DNA, 25 bp, Homo sapien
tgttcgaacaattcccatgaggaca

SEQ ID NO: 1151926 - DNA, 25 bp, Homo sapien
tgaccaacccaacatgaaacagcca

SEQ ID NO: 1151927 - DNA, 25 bp, Homo sapien
caccattagatgaccaacccaacat

SEQ ID NO: 1151928 - DNA, 25 bp, Homo sapien
gaaacagccacactcaaccaagtga

SEQ ID NO: 1151929 - DNA, 25 bp, Homo sapien
tgaaacagccacactcaaccaagtg

SEQ ID NO: 1151930 - DNA, 25 bp, Homo sapien
cattggaacgatcacgatgctgagc

SEQ ID NO: 1151931 - DNA, 25 bp, Homo sapien
aggacattggaacgatcacgatgct

SEQ ID NO: 1151932 - DNA, 25 bp, Homo sapien
tcacgatgctgagccacaatcaagg

SEQ ID NO: 1151933 - DNA, 25 bp, Homo sapien
gaacgatcacgatgctgagccacaa

SEQ ID NO: 1151934 - DNA, 25 bp, Homo sapien
ttcaggccctcttctagggctgcca

SEQ ID NO: 1151935 - DNA, 25 bp, Homo sapien
tcaggccctcttctagggctgccat

SEQ ID NO: 1151936 - DNA, 25 bp, Homo sapien
gctaaaaatatcttcttcaggccct

SEQ ID NO: 1151937 - DNA, 25 bp, Homo sapien
atatcttcttcaggccctcttctag

SEQ ID NO: 1151938 - DNA, 25 bp, Homo sapien
ctattatgaagagaagaacacgtct

SEQ ID NO: 1151939 - DNA, 25 bp, Homo sapien
gaacacgtcttcactcatcaaaaat

SEQ ID NO: 1151940 - DNA, 25 bp, Homo sapien
gagaagaacacgtcttcactcatca

SEQ ID NO: 1151941 - DNA, 25 bp, Homo sapien
cgtcttcactcatcaaaaattgatt

SEQ ID NO: 1151942 - DNA, 25 bp, Homo sapien
ttgcagccagatgtttccgaataag

SEQ ID NO: 1151943 - DNA, 25 bp, Homo sapien
gtcgctcagtaccataccagttaaa

SEQ ID NO: 1151944 - DNA, 25 bp, Homo sapien
gttaaaacctttcgtggcatgtcca

SEQ ID NO: 1151945 - DNA, 25 bp, Homo sapien
gtccaatacgtggaagatgaacact

SEQ ID NO: 1151946 - DNA, 25 bp, Homo sapien
ggttgggagaacacacaatgaagat

SEQ ID NO: 1151947 - DNA, 25 bp, Homo sapien
ggagaacacacaatgaagatcacaa

SEQ ID NO: 1151948 - DNA, 25 bp, Homo sapien
tccctcttgggttgggagaacacac

SEQ ID NO: 1151949 - DNA, 25 bp, Homo sapien
cacattttccctcttgggttgggag

SEQ ID NO: 1151950 - DNA, 25 bp, Homo sapien
gaggaagatgaagactgtgcatgaa

SEQ ID NO: 1151951 - DNA, 25 bp, Homo sapien
aagatgaagactgtgcatgaaggac

SEQ ID NO: 1151952 - DNA, 25 bp, Homo sapien
gcaccagctgtcttgaggaggaaga

SEQ ID NO: 1151953 - DNA, 25 bp, Homo sapien
gcatgaaggacagcagacttgcttc

SEQ ID NO: 1151954 - DNA, 25 bp, Homo sapien
caaaacatccaggagaaccaaattg

SEQ ID NO: 1151955 - DNA, 25 bp, Homo sapien
gttgtgtttccctatattacaggta

SEQ ID NO: 1151956 - DNA, 25 bp, Homo sapien
tgaggcccaccagatcctgattcca

SEQ ID NO: 1151957 - DNA, 25 bp, Homo sapien
ccattttgaaatactctattgcagt

SEQ ID NO: 1151958 - DNA, 25 bp, Homo sapien
attattatgcaactagcaagctggg

SEQ ID NO: 1151959 - DNA, 25 bp, Homo sapien
ttattattatgcaactagcaagctg

SEQ ID NO: 1151960 - DNA, 25 bp, Homo sapien
atttattattatgcaactagcaagc

SEQ ID NO: 1151961 - DNA, 25 bp, Homo sapien
aaatttattattatgcaactagcaa

SEQ ID NO: 1151962 - DNA, 25 bp, Homo sapien
ttttaagggtgggagctcagctgtc

SEQ ID NO: 1151963 - DNA, 25 bp, Homo sapien
gtgggagctcagctgtcttcaactc

SEQ ID NO: 1151964 - DNA, 25 bp, Homo sapien
ggagctcagctgtcttcaactcaaa

SEQ ID NO: 1151965 - DNA, 25 bp, Homo sapien
attttttaagggtgggagctcagct

SEQ ID NO: 1151966 - DNA, 25 bp, Homo sapien
agttctgttggtaaggctgcgtttt

SEQ ID NO: 1151967 - DNA, 25 bp, Homo sapien
tagttctgttggtaaggctgcgttt

SEQ ID NO: 1151968 - DNA, 25 bp, Homo sapien
cagagacagtggtactgtgtcaggc

SEQ ID NO: 1151969 - DNA, 25 bp, Homo sapien
tgaggcctgtcatgctaactgtccc

SEQ ID NO: 1151970 - DNA, 25 bp, Homo sapien
ccatgagcaatggagtgtgctgtcc

SEQ ID NO: 1151971 - DNA, 25 bp, Homo sapien
tgtgtcaggccattctgttggcagg

SEQ ID NO: 1151972 - DNA, 25 bp, Homo sapien
gcagtcttttcgtcagaccctactg

SEQ ID NO: 1151973 - DNA, 25 bp, Homo sapien
gcaggcagtcttttcgtcagaccct

SEQ ID NO: 1151974 - DNA, 25 bp, Homo sapien
tccaagctttttaaggcaggcagtc

SEQ ID NO: 1151975 - DNA, 25 bp, Homo sapien
cttgtagttaaagacatcagatcca

SEQ ID NO: 1151976 - DNA, 25 bp, Homo sapien
gtgtttgaaaaccatccacttacat

SEQ ID NO: 1151977 - DNA, 25 bp, Homo sapien
tatatatagagatagctccacatgt

SEQ ID NO: 1151978 - DNA, 25 bp, Homo sapien
gaaaaccatccacttacattaccaa

SEQ ID NO: 1151979 - DNA, 25 bp, Homo sapien
tatgttatatatagagatagctcca

SEQ ID NO: 1151980 - DNA, 25 bp, Homo sapien
gatttgaccctctgagacccatttc

SEQ ID NO: 1151981 - DNA, 25 bp, Homo sapien
ttccatgtgaagctcctgatacatc

SEQ ID NO: 1151982 - DNA, 25 bp, Homo sapien
gtgaagctcctgatacatctaacaa

SEQ ID NO: 1151983 - DNA, 25 bp, Homo sapien
cctgatacatctaacaatctctggg

SEQ ID NO: 1151984 - DNA, 25 bp, Homo sapien
tctggctaggagttatgcagtattt

SEQ ID NO: 1151985 - DNA, 25 bp, Homo sapien
taagatgacttgagtagtttttgtt

SEQ ID NO: 1151986 - DNA, 25 bp, Homo sapien
aactgaggtaaatagggctttcgtg

SEQ ID NO: 1151987 - DNA, 25 bp, Homo sapien
gaaagctgtatgtggtatactaata

SEQ ID NO: 1151988 - DNA, 25 bp, Homo sapien
tgatcttcatccaagacctctgcag

SEQ ID NO: 1151989 - DNA, 25 bp, Homo sapien
atgatcttcatccaagacctctgca

SEQ ID NO: 1151990 - DNA, 25 bp, Homo sapien
cttcatccaagacctctgcagtcag

SEQ ID NO: 1151991 - DNA, 25 bp, Homo sapien
atccaagacctctgcagtcagttct

SEQ ID NO: 1151992 - DNA, 25 bp, Homo sapien
gttcttgtttgtgaatttcttacag

SEQ ID NO: 1151993 - DNA, 25 bp, Homo sapien
cttgtttgtgaatttcttacagtca

SEQ ID NO: 1151994 - DNA, 25 bp, Homo sapien
ctgttcttgtttgtgaatttcttac

SEQ ID NO: 1151995 - DNA, 25 bp, Homo sapien
tcttgtttgtgaatttcttacagtc

SEQ ID NO: 1151996 - DNA, 25 bp, Homo sapien
tctctgatctcgtgatgcagaagta

SEQ ID NO: 1151997 - DNA, 25 bp, Homo sapien
acatctgtaattctctgatctcgtg

SEQ ID NO: 1151998 - DNA, 25 bp, Homo sapien
taattctctgatctcgtgatgcaga

SEQ ID NO: 1151999 - DNA, 25 bp, Homo sapien
tctcgtgatgcagaagtaggccaca

SEQ ID NO: 1152000 - DNA, 25 bp, Homo sapien
ggaagcgttcactactgaaggtttg

SEQ ID NO: 1152001 - DNA, 25 bp, Homo sapien
cgttcactactgaaggtttgtcttc

SEQ ID NO: 1152002 - DNA, 25 bp, Homo sapien
tcaaagggaagcgttcactactgaa

SEQ ID NO: 1152003 - DNA, 25 bp, Homo sapien
cactactgaaggtttgtcttcactg

SEQ ID NO: 1152004 - DNA, 25 bp, Homo sapien
tgtgtccagggagcacccttctgtg

SEQ ID NO: 1152005 - DNA, 25 bp, Homo sapien
tgtcatagttgaagtggtctgttcc

SEQ ID NO: 1152006 - DNA, 25 bp, Homo sapien
tatgtaggacattgccataaacagg

SEQ ID NO: 1152007 - DNA, 25 bp, Homo sapien
gatgatgaatatgtaggacattgcc

SEQ ID NO: 1152008 - DNA, 25 bp, Homo sapien
gctctttggagacactctgaatgga

SEQ ID NO: 1152009 - DNA, 25 bp, Homo sapien
tctgtttgttctggtggccacggcc

SEQ ID NO: 1152010 - DNA, 25 bp, Homo sapien
gctaaagcctgaaagacagccttgt

SEQ ID NO: 1152011 - DNA, 25 bp, Homo sapien
tcccagcatgcaatgaagaggtcag

SEQ ID NO: 1152012 - DNA, 25 bp, Homo sapien
ccatatacagttgtggcaggaattt

SEQ ID NO: 1152013 - DNA, 25 bp, Homo sapien
gatttaccatatacagttgtggcag

SEQ ID NO: 1152014 - DNA, 25 bp, Homo sapien
ctgatttaccatatacagttgtggc

SEQ ID NO: 1152015 - DNA, 25 bp, Homo sapien
taccatatacagttgtggcaggaat

SEQ ID NO: 1152016 - DNA, 25 bp, Homo sapien
gctggtgcaaatggatgcctttctg

SEQ ID NO: 1152017 - DNA, 25 bp, Homo sapien
ccagtgttggaccagacagtgctca

SEQ ID NO: 1152018 - DNA, 25 bp, Homo sapien
gcctttctgaaattaaccagttgat

SEQ ID NO: 1152019 - DNA, 25 bp, Homo sapien
tcacagccatcaggcttccctccag

SEQ ID NO: 1152020 - DNA, 25 bp, Homo sapien
ctgacttgggtatgagtttgtgagt

SEQ ID NO: 1152021 - DNA, 25 bp, Homo sapien
cagggaagtacatcggcgttatggc

SEQ ID NO: 1152022 - DNA, 25 bp, Homo sapien
cttgggtatgagtttgtgagtcaga

SEQ ID NO: 1152023 - DNA, 25 bp, Homo sapien
catcggcgttatggctgacttgggt

SEQ ID NO: 1152024 - DNA, 25 bp, Homo sapien
ccttctgagagcagtctacgagtca

SEQ ID NO: 1152025 - DNA, 25 bp, Homo sapien
acttgataatagtccgtcctggtgg

SEQ ID NO: 1152026 - DNA, 25 bp, Homo sapien
gaggatgagctctgatcagacccag

SEQ ID NO: 1152027 - DNA, 25 bp, Homo sapien
tttgcaatgatgcagtgtaaccctg

SEQ ID NO: 1152028 - DNA, 25 bp, Homo sapien
gaatctggatagtatggccttgcat

SEQ ID NO: 1152029 - DNA, 25 bp, Homo sapien
ggttgccttgactcccattgaatcc

SEQ ID NO: 1152030 - DNA, 25 bp, Homo sapien
ggtaaccctcatgctccaaatgttg

SEQ ID NO: 1152031 - DNA, 25 bp, Homo sapien
gttgctgccagtcaagccctgcctg

SEQ ID NO: 1152032 - DNA, 25 bp, Homo sapien
tatggacactggaaggatctaacac

SEQ ID NO: 1152033 - DNA, 25 bp, Homo sapien
gaggcacatcacaggagcatctggc

SEQ ID NO: 1152034 - DNA, 25 bp, Homo sapien
gatctaacactgaggtggcccttca

SEQ ID NO: 1152035 - DNA, 25 bp, Homo sapien
gcatcctggtgagtgaaatgtcata

SEQ ID NO: 1152036 - DNA, 25 bp, Homo sapien
ggtctaacttcccaatcagggagga

SEQ ID NO: 1152037 - DNA, 25 bp, Homo sapien
tccagtccactcgagcagaagggaa

SEQ ID NO: 1152038 - DNA, 25 bp, Homo sapien
cagaagggaaccttcttgtgggaag

SEQ ID NO: 1152039 - DNA, 25 bp, Homo sapien
acttcccaatcagggaggaggctgc

SEQ ID NO: 1152040 - DNA, 25 bp, Homo sapien
tctgcaagagttagggctgccgtgt

SEQ ID NO: 1152041 - DNA, 25 bp, Homo sapien
tgatcttgctttatgatttaacata

SEQ ID NO: 1152042 - DNA, 25 bp, Homo sapien
tgatttaacatattctctctgcaag

SEQ ID NO: 1152043 - DNA, 25 bp, Homo sapien
gatgtgatcatatatgatcttgctt

SEQ ID NO: 1152044 - DNA, 25 bp, Homo sapien
catctccttgcctccctcctccacg

SEQ ID NO: 1152045 - DNA, 25 bp, Homo sapien
gggactggaccatccatactgaggt

SEQ ID NO: 1152046 - DNA, 25 bp, Homo sapien
tggagcagacctacaggatgaggat

SEQ ID NO: 1152047 - DNA, 25 bp, Homo sapien
gaaagtggtcaaggaccagctccct

SEQ ID NO: 1152048 - DNA, 25 bp, Homo sapien
gggcccttgtggagcagacctacag

SEQ ID NO: 1152049 - DNA, 25 bp, Homo sapien
cctttgacgttcacagctctgatcc

SEQ ID NO: 1152050 - DNA, 25 bp, Homo sapien
ctttgacgttcacagctctgatcca

SEQ ID NO: 1152051 - DNA, 25 bp, Homo sapien
aggtgaggatcacccctctcctttg

SEQ ID NO: 1152052 - DNA, 25 bp, Homo sapien
gtgaggatcacccctctcctttgac

SEQ ID NO: 1152053 - DNA, 25 bp, Homo sapien
cacatctaagttctttctttccttt

SEQ ID NO: 1152054 - DNA, 25 bp, Homo sapien
tcattcgccagaaagagactgcttc

SEQ ID NO: 1152055 - DNA, 25 bp, Homo sapien
tcgccagaaagagactgcttcttct

SEQ ID NO: 1152056 - DNA, 25 bp, Homo sapien
ctgcttcttctgattgaccttggct

SEQ ID NO: 1152057 - DNA, 25 bp, Homo sapien
cttcttctgattgaccttggctgct

SEQ ID NO: 1152058 - DNA, 25 bp, Homo sapien
catcaaagacacagacttgttcctg

SEQ ID NO: 1152059 - DNA, 25 bp, Homo sapien
acatcaaagacacagacttgttcct

SEQ ID NO: 1152060 - DNA, 25 bp, Homo sapien
tgcggtgacacttggtacggcccag

SEQ ID NO: 1152061 - DNA, 25 bp, Homo sapien
gtatcaagacaccaggacaacatca

SEQ ID NO: 1152062 - DNA, 25 bp, Homo sapien
taggggcctattgtctgctctggtc

SEQ ID NO: 1152063 - DNA, 25 bp, Homo sapien
gcattcatgccaagtagctttcaca

SEQ ID NO: 1152064 - DNA, 25 bp, Homo sapien
tggatgccttgaaagacttccaggg

SEQ ID NO: 1152065 - DNA, 25 bp, Homo sapien
cagaggcacagatcgtgttactggg

SEQ ID NO: 1152066 - DNA, 25 bp, Homo sapien
gggcaacgcaggagctccaatcgca

SEQ ID NO: 1152067 - DNA, 25 bp, Homo sapien
tcctccagagcagcgcaggaatgag

SEQ ID NO: 1152068 - DNA, 25 bp, Homo sapien
tctctacgaccagaggaatccctga

SEQ ID NO: 1152069 - DNA, 25 bp, Homo sapien
cacaaagctcgatgcaatctctgca

SEQ ID NO: 1152070 - DNA, 25 bp, Homo sapien
aatctctgcagtcactcggcggagc

SEQ ID NO: 1152071 - DNA, 25 bp, Homo sapien
tggatcgtcttgtggcagagttctc

SEQ ID NO: 1152072 - DNA, 25 bp, Homo sapien
ccaaggtagagtttacagatgcgtc

SEQ ID NO: 1152073 - DNA, 25 bp, Homo sapien
tacaaatcggccaataaatctaacg

SEQ ID NO: 1152074 - DNA, 25 bp, Homo sapien
tctccacgcgtttcagacacagtga

SEQ ID NO: 1152075 - DNA, 25 bp, Homo sapien
tctgtttcgctcaatcccagggagg

SEQ ID NO: 1152076 - DNA, 25 bp, Homo sapien
aattccaagatgacagtgataatgg

SEQ ID NO: 1152077 - DNA, 25 bp, Homo sapien
gaggggtaggatatgtgtccttgct

SEQ ID NO: 1152078 - DNA, 25 bp, Homo sapien
tggaattccaagatgacagtgataa

SEQ ID NO: 1152079 - DNA, 25 bp, Homo sapien
tgcagctgagtgtttagtaccagcc

SEQ ID NO: 1152080 - DNA, 25 bp, Homo sapien
caaatgcagaccacagcaagctggc

SEQ ID NO: 1152081 - DNA, 25 bp, Homo sapien
gggctgggcacatccctgtgtaaca

SEQ ID NO: 1152082 - DNA, 25 bp, Homo sapien
aaatgaagtgcataccgctcagagg

SEQ ID NO: 1152083 - DNA, 25 bp, Homo sapien
caagctggcaagctccggtttaggt

SEQ ID NO: 1152084 - DNA, 25 bp, Homo sapien
gctcacggacagctccaaccttaag

SEQ ID NO: 1152085 - DNA, 25 bp, Homo sapien
ggacagctccaaccttaagctggct

SEQ ID NO: 1152086 - DNA, 25 bp, Homo sapien
actagaggtgaccttctggctcacg

SEQ ID NO: 1152087 - DNA, 25 bp, Homo sapien
cctttaccacaacatcctagactag

SEQ ID NO: 1152088 - DNA, 25 bp, Homo sapien
cagttttataccaagtgacaaccgc

SEQ ID NO: 1152089 - DNA, 25 bp, Homo sapien
tataccaagtgacaaccgctctacc

SEQ ID NO: 1152090 - DNA, 25 bp, Homo sapien
cttccatggttcgtactaaaagaca

SEQ ID NO: 1152091 - DNA, 25 bp, Homo sapien
tggttcgtactaaaagacagtccag

SEQ ID NO: 1152092 - DNA, 25 bp, Homo sapien
cggatgtagaaactcaatgtaactg

SEQ ID NO: 1152093 - DNA, 25 bp, Homo sapien
agatgtctactaggccctctttaaa

SEQ ID NO: 1152094 - DNA, 25 bp, Homo sapien
acaggattcggatgtagaaactcaa

SEQ ID NO: 1152095 - DNA, 25 bp, Homo sapien
ctaggccctctttaaacaggattcg

SEQ ID NO: 1152096 - DNA, 25 bp, Homo sapien
gaatatcctccagatctgacttctt

SEQ ID NO: 1152097 - DNA, 25 bp, Homo sapien
tataataaactcaaagctgcaagga

SEQ ID NO: 1152098 - DNA, 25 bp, Homo sapien
cctctactggtgctcaatacaagat

SEQ ID NO: 1152099 - DNA, 25 bp, Homo sapien
tgtcttgtcaagctgaatatcctcc

SEQ ID NO: 1152100 - DNA, 25 bp, Homo sapien
tttgggagagaagtccaaagataag

SEQ ID NO: 1152101 - DNA, 25 bp, Homo sapien
ctttgggagagaagtccaaagataa

SEQ ID NO: 1152102 - DNA, 25 bp, Homo sapien
ttgggagagaagtccaaagataagt

SEQ ID NO: 1152103 - DNA, 25 bp, Homo sapien
tgggagagaagtccaaagataagtg

SEQ ID NO: 1152104 - DNA, 25 bp, Homo sapien
cagaggagaccagaccaaggaacgc

SEQ ID NO: 1152105 - DNA, 25 bp, Homo sapien
tcttagaaatccatagcagccattg

SEQ ID NO: 1152106 - DNA, 25 bp, Homo sapien
actcttagaaatccatagcagccat

SEQ ID NO: 1152107 - DNA, 25 bp, Homo sapien
ggaacgcaagatttccttctactct

SEQ ID NO: 1152108 - DNA, 25 bp, Homo sapien
tgaaatatgaagttctcttagcata

SEQ ID NO: 1152109 - DNA, 25 bp, Homo sapien
tctgaaatatgaagttctcttagca

SEQ ID NO: 1152110 - DNA, 25 bp, Homo sapien
ctgaaatatgaagttctcttagcat

SEQ ID NO: 1152111 - DNA, 25 bp, Homo sapien
aaatatgaagttctcttagcatatc

SEQ ID NO: 1152112 - DNA, 25 bp, Homo sapien
gaatgaactccttacccacgttgga

SEQ ID NO: 1152113 - DNA, 25 bp, Homo sapien
tctacaattgtacaaagcaggccag

SEQ ID NO: 1152114 - DNA, 25 bp, Homo sapien
ccacgttggaagaggttcttgtcct

SEQ ID NO: 1152115 - DNA, 25 bp, Homo sapien
tctgtacagtccacgaattcactcg

SEQ ID NO: 1152116 - DNA, 25 bp, Homo sapien
ttttgccttgcagttatatttataa

SEQ ID NO: 1152117 - DNA, 25 bp, Homo sapien
tgcactacgttcttccacaaatgac

SEQ ID NO: 1152118 - DNA, 25 bp, Homo sapien
cacaaatgacaactgcggtgtcagg

SEQ ID NO: 1152119 - DNA, 25 bp, Homo sapien
cactgagagtggacacagtggcaaa

SEQ ID NO: 1152120 - DNA, 25 bp, Homo sapien
tatcgaagaagtatgacttctctct

SEQ ID NO: 1152121 - DNA, 25 bp, Homo sapien
tgttttattatcgaagaagtatgac

SEQ ID NO: 1152122 - DNA, 25 bp, Homo sapien
agaaggatgaaattctacagctagc

SEQ ID NO: 1152123 - DNA, 25 bp, Homo sapien
gaaattctacagctagcacttgctt

SEQ ID NO: 1152124 - DNA, 25 bp, Homo sapien
tgcattcaggttgcacccactggcc

SEQ ID NO: 1152125 - DNA, 25 bp, Homo sapien
ctccatagaatccttgaccatccac

SEQ ID NO: 1152126 - DNA, 25 bp, Homo sapien
aatccttgaccatccaccattctgg

SEQ ID NO: 1152127 - DNA, 25 bp, Homo sapien
atttctaatgctaagatgtaccttc

SEQ ID NO: 1152128 - DNA, 25 bp, Homo sapien
aagcctgagtatcccggcgctgttg

SEQ ID NO: 1152129 - DNA, 25 bp, Homo sapien
cgctgttgtgagagggtagcccatt

SEQ ID NO: 1152130 - DNA, 25 bp, Homo sapien
ttcggaagacctctgctctgaaggg

SEQ ID NO: 1152131 - DNA, 25 bp, Homo sapien
ctctgcgaagtgcaggagtcccgct

SEQ ID NO: 1152132 - DNA, 25 bp, Homo sapien
ctagccctcaaccttcaaggccacc

SEQ ID NO: 1152133 - DNA, 25 bp, Homo sapien
tagccctcaaccttcaaggccacct

SEQ ID NO: 1152134 - DNA, 25 bp, Homo sapien
ctcaaccttcaaggccacctcctca

SEQ ID NO: 1152135 - DNA, 25 bp, Homo sapien
agcagggaaagaggcttgggtccgg

SEQ ID NO: 1152136 - DNA, 25 bp, Homo sapien
gggcggctctcagccccgcggggcc

SEQ ID NO: 1152137 - DNA, 25 bp, Homo sapien
gggagaggaggtgcggagcagggaa

SEQ ID NO: 1152138 - DNA, 25 bp, Homo sapien
agaggcttgggtccggggcggctct

SEQ ID NO: 1152139 - DNA, 25 bp, Homo sapien
caatcagatgggaatgtttaggtca

SEQ ID NO: 1152140 - DNA, 25 bp, Homo sapien
tacatcgggacacggaagaactttc

SEQ ID NO: 1152141 - DNA, 25 bp, Homo sapien
tcaatatgtccaatttgctatttct

SEQ ID NO: 1152142 - DNA, 25 bp, Homo sapien
agaatgacgccaactgggcccacat

SEQ ID NO: 1152143 - DNA, 25 bp, Homo sapien
accccaagggtcacgacactgcagt

SEQ ID NO: 1152144 - DNA, 25 bp, Homo sapien
aaaccccaagggtcacgacactgca

SEQ ID NO: 1152145 - DNA, 25 bp, Homo sapien
cccaagggtcacgacactgcagtgc

SEQ ID NO: 1152146 - DNA, 25 bp, Homo sapien
acccccttctcaaagatgacccttg

SEQ ID NO: 1152147 - DNA, 25 bp, Homo sapien
tcataaaccattttgtaacctctca

SEQ ID NO: 1152148 - DNA, 25 bp, Homo sapien
gattctggttgtcaagttggacata

SEQ ID NO: 1152149 - DNA, 25 bp, Homo sapien
ttctgtctgcatcacgtattctagc

SEQ ID NO: 1152150 - DNA, 25 bp, Homo sapien
aatgaatcctgcatggacaaagcca

SEQ ID NO: 1152151 - DNA, 25 bp, Homo sapien
tctcgggttgcagcagaaacagctg

SEQ ID NO: 1152152 - DNA, 25 bp, Homo sapien
agcattctctgggtgcgtgcctcct

SEQ ID NO: 1152153 - DNA, 25 bp, Homo sapien
ttagcgctcgctgcctgtatgcctt

SEQ ID NO: 1152154 - DNA, 25 bp, Homo sapien
tgctgtggaagtgggtcctttcccc

SEQ ID NO: 1152155 - DNA, 25 bp, Homo sapien
ttgaaatcctgagcttgcagtcaca

SEQ ID NO: 1152156 - DNA, 25 bp, Homo sapien
cctgagcttgcagtcacaaacggga

SEQ ID NO: 1152157 - DNA, 25 bp, Homo sapien
aatcctgagcttgcagtcacaaacg

SEQ ID NO: 1152158 - DNA, 25 bp, Homo sapien
tgattgaaatcctgagcttgcagtc

SEQ ID NO: 1152159 - DNA, 25 bp, Homo sapien
ctcactttagggttactggaatgca

SEQ ID NO: 1152160 - DNA, 25 bp, Homo sapien
ggagagctcctcactttagggttac

SEQ ID NO: 1152161 - DNA, 25 bp, Homo sapien
agctcctcactttagggttactgga

SEQ ID NO: 1152162 - DNA, 25 bp, Homo sapien
ctcctcactttagggttactggaat

SEQ ID NO: 1152163 - DNA, 25 bp, Homo sapien
tcaacagagaggaggatcaagcaga

SEQ ID NO: 1152164 - DNA, 25 bp, Homo sapien
gcaaacttaggcaaactgtactggt

SEQ ID NO: 1152165 - DNA, 25 bp, Homo sapien
gaaaatgcaagctggtcccaaagag

SEQ ID NO: 1152166 - DNA, 25 bp, Homo sapien
aggagagcctcacttccctgctgga

SEQ ID NO: 1152167 - DNA, 25 bp, Homo sapien
ctggtcagcacaaattagagagagg

SEQ ID NO: 1152168 - DNA, 25 bp, Homo sapien
tcagcacaaattagagagaggcagt

SEQ ID NO: 1152169 - DNA, 25 bp, Homo sapien
ggtcagcacaaattagagagaggca

SEQ ID NO: 1152170 - DNA, 25 bp, Homo sapien
cagcacaaattagagagaggcagtt

SEQ ID NO: 1152171 - DNA, 25 bp, Homo sapien
aaacaaataacaaaggaagatcaga

SEQ ID NO: 1152172 - DNA, 25 bp, Homo sapien
ataacaaaggaagatcagacaccag

SEQ ID NO: 1152173 - DNA, 25 bp, Homo sapien
aaataacaaaggaagatcagacacc

SEQ ID NO: 1152174 - DNA, 25 bp, Homo sapien
aaggaagatcagacaccagatacag

SEQ ID NO: 1152175 - DNA, 25 bp, Homo sapien
cacctcctgctttgacttagggcta

SEQ ID NO: 1152176 - DNA, 25 bp, Homo sapien
acatcactgtagggggacggaccat

SEQ ID NO: 1152177 - DNA, 25 bp, Homo sapien
gacatcactgtagggggacggacca

SEQ ID NO: 1152178 - DNA, 25 bp, Homo sapien
tgctttaggggtatggcccccactc

SEQ ID NO: 1152179 - DNA, 25 bp, Homo sapien
gggtatggcccccactcttggagtc

SEQ ID NO: 1152180 - DNA, 25 bp, Homo sapien
ggtatggcccccactcttggagtca

SEQ ID NO: 1152181 - DNA, 25 bp, Homo sapien
taggggtatggcccccactcttgga

SEQ ID NO: 1152182 - DNA, 25 bp, Homo sapien
cccaggatctctctgatcaaaggag

SEQ ID NO: 1152183 - DNA, 25 bp, Homo sapien
gagtcggcggaaatacttcgctccc

SEQ ID NO: 1152184 - DNA, 25 bp, Homo sapien
ctttaatgtcagagtcatcgtttgg

SEQ ID NO: 1152185 - DNA, 25 bp, Homo sapien
tcatcgtttggagtcccaggatctc

SEQ ID NO: 1152186 - DNA, 25 bp, Homo sapien
ctaaaccgttgcatccttaagggca

SEQ ID NO: 1152187 - DNA, 25 bp, Homo sapien
tactgccagggccattaaggcttcc

SEQ ID NO: 1152188 - DNA, 25 bp, Homo sapien
cactggcacagacaaactagagcta

SEQ ID NO: 1152189 - DNA, 25 bp, Homo sapien
gcatagaggccagaaacgtgtacga

SEQ ID NO: 1152190 - DNA, 25 bp, Homo sapien
gctctgtggcagtagtttggccatg

SEQ ID NO: 1152191 - DNA, 25 bp, Homo sapien
gggtcatcgagtgtggtgtgtgctg

SEQ ID NO: 1152192 - DNA, 25 bp, Homo sapien
aaacacgtacaccactttggctgga

SEQ ID NO: 1152193 - DNA, 25 bp, Homo sapien
catctcagtagaaaacacgtacacc

SEQ ID NO: 1152194 - DNA, 25 bp, Homo sapien
gatgtggaaagagacgatagtttca

SEQ ID NO: 1152195 - DNA, 25 bp, Homo sapien
tggaaagagacgatagtttcaacct

SEQ ID NO: 1152196 - DNA, 25 bp, Homo sapien
gagacgatagtttcaacctggccct

SEQ ID NO: 1152197 - DNA, 25 bp, Homo sapien
gatagtttcaacctggcccttcaaa

SEQ ID NO: 1152198 - DNA, 25 bp, Homo sapien
gatcactgattccacatttgataag

SEQ ID NO: 1152199 - DNA, 25 bp, Homo sapien
ccatttcaacgtctcctctggcagg

SEQ ID NO: 1152200 - DNA, 25 bp, Homo sapien
tgacatctctggtttccgtttttgg

SEQ ID NO: 1152201 - DNA, 25 bp, Homo sapien
ctctggcagggtgactactgaggca

SEQ ID NO: 1152202 - DNA, 25 bp, Homo sapien
tcatatggtcaaggtggtcgggtcc

SEQ ID NO: 1152203 - DNA, 25 bp, Homo sapien
aaagcatgcgctggatatctctgag

SEQ ID NO: 1152204 - DNA, 25 bp, Homo sapien
tgagagtttgtaaggagcgctcccg

SEQ ID NO: 1152205 - DNA, 25 bp, Homo sapien
tgaggcccatctaataccccaggat

SEQ ID NO: 1152206 - DNA, 25 bp, Homo sapien
tgggggtgctcaccaaatggcagtg

SEQ ID NO: 1152207 - DNA, 25 bp, Homo sapien
gggggtgctcaccaaatggcagtgg

SEQ ID NO: 1152208 - DNA, 25 bp, Homo sapien
ggggtgctcaccaaatggcagtggc

SEQ ID NO: 1152209 - DNA, 25 bp, Homo sapien
ctgggggtgctcaccaaatggcagt

SEQ ID NO: 1152210 - DNA, 25 bp, Homo sapien
tctggtcgggcccaattggttctct

SEQ ID NO: 1152211 - DNA, 25 bp, Homo sapien
gagattccgcaagccactgttgctg

SEQ ID NO: 1152212 - DNA, 25 bp, Homo sapien
ttatggtttggagggatcccaggac

SEQ ID NO: 1152213 - DNA, 25 bp, Homo sapien
gacttggtgcatcgtgggagacttc

SEQ ID NO: 1152214 - DNA, 25 bp, Homo sapien
caaatatggccatttcaacaaagac

SEQ ID NO: 1152215 - DNA, 25 bp, Homo sapien
ggacacttctgcataaccccatgga

SEQ ID NO: 1152216 - DNA, 25 bp, Homo sapien
gaagcactgattatgcaccttgcca

SEQ ID NO: 1152217 - DNA, 25 bp, Homo sapien
aactatcaggtctagcagtctccag

SEQ ID NO: 1152218 - DNA, 25 bp, Homo sapien
cacctctagtcccactcacaaaacc

SEQ ID NO: 1152219 - DNA, 25 bp, Homo sapien
tcatcatcagcaagaatctctccca

SEQ ID NO: 1152220 - DNA, 25 bp, Homo sapien
gaaaatcctcctaaattgtagctga

SEQ ID NO: 1152221 - DNA, 25 bp, Homo sapien
tctagtcccactcacaaaaccatca

SEQ ID NO: 1152222 - DNA, 25 bp, Homo sapien
gctggccacagtcttgatagcatca

SEQ ID NO: 1152223 - DNA, 25 bp, Homo sapien
aggtgtactagagggaagacttcca

SEQ ID NO: 1152224 - DNA, 25 bp, Homo sapien
ggagtcgtcatctgagctggccaca

SEQ ID NO: 1152225 - DNA, 25 bp, Homo sapien
gcaaacttggacattcgagacatca

SEQ ID NO: 1152226 - DNA, 25 bp, Homo sapien
actggaaccagaaactcatggctga

SEQ ID NO: 1152227 - DNA, 25 bp, Homo sapien
tgtggaattaccaccgagtgtggca

SEQ ID NO: 1152228 - DNA, 25 bp, Homo sapien
gggcttatgctgttcctggtacatg

SEQ ID NO: 1152229 - DNA, 25 bp, Homo sapien
catggctgaaaagtcatggtctctt

SEQ ID NO: 1152230 - DNA, 25 bp, Homo sapien
caaactcaggtattccggtggctcc

SEQ ID NO: 1152231 - DNA, 25 bp, Homo sapien
tccttgaggtaccatcggtggctcc

SEQ ID NO: 1152232 - DNA, 25 bp, Homo sapien
tctgtaaacaccgaaggcatgctgt

SEQ ID NO: 1152233 - DNA, 25 bp, Homo sapien
catgaggaggtatgttgggtcccac

SEQ ID NO: 1152234 - DNA, 25 bp, Homo sapien
acccatgcccacgtcagcagccatg

SEQ ID NO: 1152235 - DNA, 25 bp, Homo sapien
ggtccttggctaaatccacccatgc

SEQ ID NO: 1152236 - DNA, 25 bp, Homo sapien
tgtttcctgggttgccaggtccttg

SEQ ID NO: 1152237 - DNA, 25 bp, Homo sapien
aacatcatgtttcctgggttgccag

SEQ ID NO: 1152238 - DNA, 25 bp, Homo sapien
taacactgtgtattgcagctgccaa

SEQ ID NO: 1152239 - DNA, 25 bp, Homo sapien
cattttgacaaggatcggcacatcc

SEQ ID NO: 1152240 - DNA, 25 bp, Homo sapien
taaacatacagagaacggtgcaaca

SEQ ID NO: 1152241 - DNA, 25 bp, Homo sapien
cacagaacgtcttacgcatgggagg

SEQ ID NO: 1152242 - DNA, 25 bp, Homo sapien
agccagtactccagagcccgtaaag

SEQ ID NO: 1152243 - DNA, 25 bp, Homo sapien
tgagaaacaaacatgagctcctggg

SEQ ID NO: 1152244 - DNA, 25 bp, Homo sapien
tttctagcaaggtgccagacgcagc

SEQ ID NO: 1152245 - DNA, 25 bp, Homo sapien
caaaagcgtggccttagatcacaga

SEQ ID NO: 1152246 - DNA, 25 bp, Homo sapien
tgattaagaccaaagagtgggtccc

SEQ ID NO: 1152247 - DNA, 25 bp, Homo sapien
gaataggtgcgtgcttccagtcagc

SEQ ID NO: 1152248 - DNA, 25 bp, Homo sapien
ggtcccaattgtttcccatatcaag

SEQ ID NO: 1152249 - DNA, 25 bp, Homo sapien
ccagactcacttgataaaacactta

SEQ ID NO: 1152250 - DNA, 25 bp, Homo sapien
tgtataactcagtatctctttgcct

SEQ ID NO: 1152251 - DNA, 25 bp, Homo sapien
taccatagctacactctgggagacc

SEQ ID NO: 1152252 - DNA, 25 bp, Homo sapien
gcctggtactgccaaacgtactgag

SEQ ID NO: 1152253 - DNA, 25 bp, Homo sapien
tcttctatctaaccatcctatttct

SEQ ID NO: 1152254 - DNA, 25 bp, Homo sapien
ttcctgtcccgcttcttgtgatctt

SEQ ID NO: 1152255 - DNA, 25 bp, Homo sapien
agttcctgtcccgcttcttgtgatc

SEQ ID NO: 1152256 - DNA, 25 bp, Homo sapien
gcttcagttcctgtcccgcttcttg

SEQ ID NO: 1152257 - DNA, 25 bp, Homo sapien
gttcctgtcccgcttcttgtgatct

SEQ ID NO: 1152258 - DNA, 25 bp, Homo sapien
gtctacaacatgccaggaagggatc

SEQ ID NO: 1152259 - DNA, 25 bp, Homo sapien
tcggctttgggctagagcgtgtcct

SEQ ID NO: 1152260 - DNA, 25 bp, Homo sapien
gggatcattcttcggctttgggcta

SEQ ID NO: 1152261 - DNA, 25 bp, Homo sapien
ccaggaagggatcattcttcggctt

SEQ ID NO: 1152262 - DNA, 25 bp, Homo sapien
ctggaatcctctagggcaccgccat

SEQ ID NO: 1152263 - DNA, 25 bp, Homo sapien
tcagctggaatcctctagggcaccg

SEQ ID NO: 1152264 - DNA, 25 bp, Homo sapien
tggaatcctctagggcaccgccatc

SEQ ID NO: 1152265 - DNA, 25 bp, Homo sapien
agctggaatcctctagggcaccgcc

SEQ ID NO: 1152266 - DNA, 25 bp, Homo sapien
ggctggagtgcttatcctaccactg

SEQ ID NO: 1152267 - DNA, 25 bp, Homo sapien
tgataagcatgggatatttgacctg

SEQ ID NO: 1152268 - DNA, 25 bp, Homo sapien
tagcggtcccctgctctcaaaaagg

SEQ ID NO: 1152269 - DNA, 25 bp, Homo sapien
tctcaaaaaggtcacctactactga

SEQ ID NO: 1152270 - DNA, 25 bp, Homo sapien
ttacggcaagtggtctccaaagatg

SEQ ID NO: 1152271 - DNA, 25 bp, Homo sapien
gttacggcaagtggtctccaaagat

SEQ ID NO: 1152272 - DNA, 25 bp, Homo sapien
agttacggcaagtggtctccaaaga

SEQ ID NO: 1152273 - DNA, 25 bp, Homo sapien
gattcaactagtacatgggtcccta

SEQ ID NO: 1152274 - DNA, 25 bp, Homo sapien
catacacgtcgcaccatgttggaaa

SEQ ID NO: 1152275 - DNA, 25 bp, Homo sapien
ggtgtttgggtccactgctaccaca

SEQ ID NO: 1152276 - DNA, 25 bp, Homo sapien
tgggtccctattcacttctgctggt

SEQ ID NO: 1152277 - DNA, 25 bp, Homo sapien
acagccggctgatcacagaatcctc

SEQ ID NO: 1152278 - DNA, 25 bp, Homo sapien
gcaccaggagccttccgtgaatctg

SEQ ID NO: 1152279 - DNA, 25 bp, Homo sapien
ccttccgtgaatctgacagccggct

SEQ ID NO: 1152280 - DNA, 25 bp, Homo sapien
tgtttctctagaacaaaccaaccaa

SEQ ID NO: 1152281 - DNA, 25 bp, Homo sapien
caggcatgggaagcctgctgctcca

SEQ ID NO: 1152282 - DNA, 25 bp, Homo sapien
tcggagaaagtaaagggagcaataa

SEQ ID NO: 1152283 - DNA, 25 bp, Homo sapien
aatatttgccaagccctgtacagcc

SEQ ID NO: 1152284 - DNA, 25 bp, Homo sapien
tgggaaatcctctggaccacccaac

SEQ ID NO: 1152285 - DNA, 25 bp, Homo sapien
gcaaagattggagcctcatgatcca

SEQ ID NO: 1152286 - DNA, 25 bp, Homo sapien
aacacataagcatcatcaaggccat

SEQ ID NO: 1152287 - DNA, 25 bp, Homo sapien
aagattggagcctcatgatccatgg

SEQ ID NO: 1152288 - DNA, 25 bp, Homo sapien
cacaggcaaagattggagcctcatg

SEQ ID NO: 1152289 - DNA, 25 bp, Homo sapien
ctggggagtcaaggacaagataagt

SEQ ID NO: 1152290 - DNA, 25 bp, Homo sapien
aggacaagataagtaccctgagcac

SEQ ID NO: 1152291 - DNA, 25 bp, Homo sapien
gcctatcttgtagggatgatggctc

SEQ ID NO: 1152292 - DNA, 25 bp, Homo sapien
ctgtaagtgtacttgcatcaaaact

SEQ ID NO: 1152293 - DNA, 25 bp, Homo sapien
agtatggggtactccagtggaagca

SEQ ID NO: 1152294 - DNA, 25 bp, Homo sapien
gatggctcaaagtatggggtactcc

SEQ ID NO: 1152295 - DNA, 25 bp, Homo sapien
gacacaacggtttatccaaagagct

SEQ ID NO: 1152296 - DNA, 25 bp, Homo sapien
tccaagcttgttgctactatcatgt

SEQ ID NO: 1152297 - DNA, 25 bp, Homo sapien
tatgtttccaagacatcctgcctcc

SEQ ID NO: 1152298 - DNA, 25 bp, Homo sapien
tgacagccccccagttttatttgaa

SEQ ID NO: 1152299 - DNA, 25 bp, Homo sapien
gggaacaatgccatattaccaggga

SEQ ID NO: 1152300 - DNA, 25 bp, Homo sapien
cagtgctcagtgtggtaagaggaaa

SEQ ID NO: 1152301 - DNA, 25 bp, Homo sapien
tcaaccactcgggaccttgtagagg

SEQ ID NO: 1152302 - DNA, 25 bp, Homo sapien
gcaggcaccgtttgggaggatatct

SEQ ID NO: 1152303 - DNA, 25 bp, Homo sapien
cccttaaatgggatatggttagcag

SEQ ID NO: 1152304 - DNA, 25 bp, Homo sapien
ggatatggttagcaggaggtgccca

SEQ ID NO: 1152305 - DNA, 25 bp, Homo sapien
tttgggctcagactgtcacccttaa

SEQ ID NO: 1152306 - DNA, 25 bp, Homo sapien
gactgtcacccttaaatgggatatg

SEQ ID NO: 1152307 - DNA, 25 bp, Homo sapien
cagttattaacctaaacagatagcc

SEQ ID NO: 1152308 - DNA, 25 bp, Homo sapien
aggaaaccacagagaaacttgtgtc

SEQ ID NO: 1152309 - DNA, 25 bp, Homo sapien
tctccggctgcctggcagttattaa

SEQ ID NO: 1152310 - DNA, 25 bp, Homo sapien
atagccacaagaggttgggacagag

SEQ ID NO: 1152311 - DNA, 25 bp, Homo sapien
catggaccattcctcggagtagtgg

SEQ ID NO: 1152312 - DNA, 25 bp, Homo sapien
ggtatgtacctctggcaaatgcccc

SEQ ID NO: 1152313 - DNA, 25 bp, Homo sapien
tagggtgtacacctagcctgtgcag

SEQ ID NO: 1152314 - DNA, 25 bp, Homo sapien
cctgctagggagtcactgtacacac

SEQ ID NO: 1152315 - DNA, 25 bp, Homo sapien
taatatggcctcccaacaaaacaca

SEQ ID NO: 1152316 - DNA, 25 bp, Homo sapien
ataatatggcctcccaacaaaacac

SEQ ID NO: 1152317 - DNA, 25 bp, Homo sapien
gaagacttggcatggctggacaaaa

SEQ ID NO: 1152318 - DNA, 25 bp, Homo sapien
cacagaaacttagcagcagggcgag

SEQ ID NO: 1152319 - DNA, 25 bp, Homo sapien
tgcaccgaggcatgggagatcaaca

SEQ ID NO: 1152320 - DNA, 25 bp, Homo sapien
gatcaacattgccttaccagccagg

SEQ ID NO: 1152321 - DNA, 25 bp, Homo sapien
cagggtttcacatggcaagttaagc

SEQ ID NO: 1152322 - DNA, 25 bp, Homo sapien
agaatgatggctggcaccctgtagc

SEQ ID NO: 1152323 - DNA, 25 bp, Homo sapien
gactttctaagtggtaggaagccag

SEQ ID NO: 1152324 - DNA, 25 bp, Homo sapien
ggtataaaggcagttacactcagtg

SEQ ID NO: 1152325 - DNA, 25 bp, Homo sapien
tggcattaggtgttttgagagacct

SEQ ID NO: 1152326 - DNA, 25 bp, Homo sapien
gccttgatcaatttggcattaggtg

SEQ ID NO: 1152327 - DNA, 25 bp, Homo sapien
cttcagcaaccggtaaataattgcc

SEQ ID NO: 1152328 - DNA, 25 bp, Homo sapien
gcagcatggccccaacgtgttgctt

SEQ ID NO: 1152329 - DNA, 25 bp, Homo sapien
aggtgtccctatgccagcttcccag

SEQ ID NO: 1152330 - DNA, 25 bp, Homo sapien
ccagaacatgtgtcgttgtccagaa

SEQ ID NO: 1152331 - DNA, 25 bp, Homo sapien
tgacaagcttggataagttccccag

SEQ ID NO: 1152332 - DNA, 25 bp, Homo sapien
tccagaattagactcagactctgtg

SEQ ID NO: 1152333 - DNA, 25 bp, Homo sapien
gatctgttagatactgtccagaaca

SEQ ID NO: 1152334 - DNA, 25 bp, Homo sapien
agtggaattatagcatgggcccagg

SEQ ID NO: 1152335 - DNA, 25 bp, Homo sapien
gagtggaattatagcatgggcccag

SEQ ID NO: 1152336 - DNA, 25 bp, Homo sapien
tggtgagtggaattatagcatgggc

SEQ ID NO: 1152337 - DNA, 25 bp, Homo sapien
gtgagtggaattatagcatgggccc

SEQ ID NO: 1152338 - DNA, 25 bp, Homo sapien
ctgaactaaactgcactgatatgat

SEQ ID NO: 1152339 - DNA, 25 bp, Homo sapien
catggcagaggagctcgataagcac

SEQ ID NO: 1152340 - DNA, 25 bp, Homo sapien
tctcaggcagcctttcagtgaggcc

SEQ ID NO: 1152341 - DNA, 25 bp, Homo sapien
gtgaggccctttgggtcctttcaca

SEQ ID NO: 1152342 - DNA, 25 bp, Homo sapien
cactaaccagcctgaagcactatca

SEQ ID NO: 1152343 - DNA, 25 bp, Homo sapien
aaccagcctgaagcactatcagatt

SEQ ID NO: 1152344 - DNA, 25 bp, Homo sapien
ctaaccagcctgaagcactatcaga

SEQ ID NO: 1152345 - DNA, 25 bp, Homo sapien
taaccagcctgaagcactatcagat

SEQ ID NO: 1152346 - DNA, 25 bp, Homo sapien
gggctcaagggttgagctggacaaa

SEQ ID NO: 1152347 - DNA, 25 bp, Homo sapien
ttccttactattgttggaagctgct

SEQ ID NO: 1152348 - DNA, 25 bp, Homo sapien
gaagctgacttccttactattgttg

SEQ ID NO: 1152349 - DNA, 25 bp, Homo sapien
ctcaagggttgagctggacaaaggg

SEQ ID NO: 1152350 - DNA, 25 bp, Homo sapien
gattccagtagctctctgtgtgaat

SEQ ID NO: 1152351 - DNA, 25 bp, Homo sapien
gggattccagtagctctctgtgtga

SEQ ID NO: 1152352 - DNA, 25 bp, Homo sapien
ccagtagctctctgtgtgaatgaac

SEQ ID NO: 1152353 - DNA, 25 bp, Homo sapien
ttccagtagctctctgtgtgaatga

SEQ ID NO: 1152354 - DNA, 25 bp, Homo sapien
tggctgaccccacctcttaggacag

SEQ ID NO: 1152355 - DNA, 25 bp, Homo sapien
tgctcttcatcgtctacactggctg

SEQ ID NO: 1152356 - DNA, 25 bp, Homo sapien
gggacctgtctatgtggatcaatca

SEQ ID NO: 1152357 - DNA, 25 bp, Homo sapien
catcgtctacactggctgttcgtgg

SEQ ID NO: 1152358 - DNA, 25 bp, Homo sapien
gctgtttggagcctgctcccctggc

SEQ ID NO: 1152359 - DNA, 25 bp, Homo sapien
ctgtttggagcctgctcccctggct

SEQ ID NO: 1152360 - DNA, 25 bp, Homo sapien
cctgccaagttgcccggcggcagag

SEQ ID NO: 1152361 - DNA, 25 bp, Homo sapien
ctgccaagttgcccggcggcagagc

SEQ ID NO: 1152362 - DNA, 25 bp, Homo sapien
gaaaaaggctctggtgcaaagaggt

SEQ ID NO: 1152363 - DNA, 25 bp, Homo sapien
ctggaaaaaggctctggtgcaaaga

SEQ ID NO: 1152364 - DNA, 25 bp, Homo sapien
aagagcaccgaacagggagtcagaa

SEQ ID NO: 1152365 - DNA, 25 bp, Homo sapien
cagggcagtgcaaagagcaccgaac

SEQ ID NO: 1152366 - DNA, 25 bp, Homo sapien
ccattataatagagggattccttgt

SEQ ID NO: 1152367 - DNA, 25 bp, Homo sapien
tattctccctcgcagtattccatta

SEQ ID NO: 1152368 - DNA, 25 bp, Homo sapien
taatagagggattccttgttctcac

SEQ ID NO: 1152369 - DNA, 25 bp, Homo sapien
cgcagtattccattataatagaggg

SEQ ID NO: 1152370 - DNA, 25 bp, Homo sapien
ctgggtccacggctaagtgtttaag

SEQ ID NO: 1152371 - DNA, 25 bp, Homo sapien
caactgggtccacggctaagtgttt

SEQ ID NO: 1152372 - DNA, 25 bp, Homo sapien
gtccacggctaagtgtttaagttga

SEQ ID NO: 1152373 - DNA, 25 bp, Homo sapien
tccaactgggtccacggctaagtgt

SEQ ID NO: 1152374 - DNA, 25 bp, Homo sapien
cagggtcatgagtgtgtctgtatct

SEQ ID NO: 1152375 - DNA, 25 bp, Homo sapien
tgtgtctgtatctgggcagctcttc

SEQ ID NO: 1152376 - DNA, 25 bp, Homo sapien
gtgtgtctgtatctgggcagctctt

SEQ ID NO: 1152377 - DNA, 25 bp, Homo sapien
tccagggtcatgagtgtgtctgtat

SEQ ID NO: 1152378 - DNA, 25 bp, Homo sapien
catagaataggctgggcccatagga

SEQ ID NO: 1152379 - DNA, 25 bp, Homo sapien
ggctgggcccataggagtagccaat

SEQ ID NO: 1152380 - DNA, 25 bp, Homo sapien
cttgtttctcacatagaataggctg

SEQ ID NO: 1152381 - DNA, 25 bp, Homo sapien
ggcccataggagtagccaatgattc

SEQ ID NO: 1152382 - DNA, 25 bp, Homo sapien
ggccaataggtttcatgagaatttc

SEQ ID NO: 1152383 - DNA, 25 bp, Homo sapien
aataggtttcatgagaatttcttct

SEQ ID NO: 1152384 - DNA, 25 bp, Homo sapien
gtttcatgagaatttcttctacagc

SEQ ID NO: 1152385 - DNA, 25 bp, Homo sapien
caggccaataggtttcatgagaatt

SEQ ID NO: 1152386 - DNA, 25 bp, Homo sapien
tgcacatgttgtcatgtaggctgta

SEQ ID NO: 1152387 - DNA, 25 bp, Homo sapien
ggctgtaagggaggtagccctggac

SEQ ID NO: 1152388 - DNA, 25 bp, Homo sapien
gctgacaaataatttgcacatgttg

SEQ ID NO: 1152389 - DNA, 25 bp, Homo sapien
cgttcttgcaattagatgctgacaa

SEQ ID NO: 1152390 - DNA, 25 bp, Homo sapien
ctccagactcttggagcctatccca

SEQ ID NO: 1152391 - DNA, 25 bp, Homo sapien
cagactcttggagcctatcccactg

SEQ ID NO: 1152392 - DNA, 25 bp, Homo sapien
gacactccagactcttggagcctat

SEQ ID NO: 1152393 - DNA, 25 bp, Homo sapien
acactccagactcttggagcctatc

SEQ ID NO: 1152394 - DNA, 25 bp, Homo sapien
gagtcagcatcccttgaaaatggcc

SEQ ID NO: 1152395 - DNA, 25 bp, Homo sapien
caaagaacttttaccgagtcagcat

SEQ ID NO: 1152396 - DNA, 25 bp, Homo sapien
gtttacttgctacgtggcttggaca

SEQ ID NO: 1152397 - DNA, 25 bp, Homo sapien
ggactctgacgccagaacgtttgga

SEQ ID NO: 1152398 - DNA, 25 bp, Homo sapien
gggtctctgcttatgattccccaag

SEQ ID NO: 1152399 - DNA, 25 bp, Homo sapien
aggcactcaacctgtcggcctgtcc

SEQ ID NO: 1152400 - DNA, 25 bp, Homo sapien
gcttttcgggggtctctgcttatga

SEQ ID NO: 1152401 - DNA, 25 bp, Homo sapien
ctctgcttatgattccccaagaggg

SEQ ID NO: 1152402 - DNA, 25 bp, Homo sapien
tgcaaacccagggtccggttctcca

SEQ ID NO: 1152403 - DNA, 25 bp, Homo sapien
gagatttcagagggtttctccgaga

SEQ ID NO: 1152404 - DNA, 25 bp, Homo sapien
ttggagatttcagagggtttctccg

SEQ ID NO: 1152405 - DNA, 25 bp, Homo sapien
ggagatttcagagggtttctccgag

SEQ ID NO: 1152406 - DNA, 25 bp, Homo sapien
cacaaaaagttgctcggttgaattc

SEQ ID NO: 1152407 - DNA, 25 bp, Homo sapien
aaatccaggtccatcgtacccttga

SEQ ID NO: 1152408 - DNA, 25 bp, Homo sapien
tacagccacacactagactcaaagt

SEQ ID NO: 1152409 - DNA, 25 bp, Homo sapien
gcttctattgtataacaggacagga

SEQ ID NO: 1152410 - DNA, 25 bp, Homo sapien
gcaaaatgtctgatgcaacaactaa

SEQ ID NO: 1152411 - DNA, 25 bp, Homo sapien
caatgtcccagaagactaactgcaa

SEQ ID NO: 1152412 - DNA, 25 bp, Homo sapien
tcaatatgcttaacactgggccacg

SEQ ID NO: 1152413 - DNA, 25 bp, Homo sapien
cacgtttgggccttagattgccccg

SEQ ID NO: 1152414 - DNA, 25 bp, Homo sapien
cggatagaggatggagataaactgc

SEQ ID NO: 1152415 - DNA, 25 bp, Homo sapien
ccagcattcacaccacggatagagg

SEQ ID NO: 1152416 - DNA, 25 bp, Homo sapien
aacttttgcttaacctactgtctag

SEQ ID NO: 1152417 - DNA, 25 bp, Homo sapien
tgaaagctaatctcatataggtgaa

SEQ ID NO: 1152418 - DNA, 25 bp, Homo sapien
tctctgtccagtgctaaataaatct

SEQ ID NO: 1152419 - DNA, 25 bp, Homo sapien
cactttccctgagagactccagctt

SEQ ID NO: 1152420 - DNA, 25 bp, Homo sapien
ctaaataaatctagctgcactcatg

SEQ ID NO: 1152421 - DNA, 25 bp, Homo sapien
tgcactcatgaaaacccaggcttct

SEQ ID NO: 1152422 - DNA, 25 bp, Homo sapien
gtcctgcagggtacaagggatcttc

SEQ ID NO: 1152423 - DNA, 25 bp, Homo sapien
ggtggaggatattctgttctctgcc

SEQ ID NO: 1152424 - DNA, 25 bp, Homo sapien
ctgcagggtacaagggatcttccat

SEQ ID NO: 1152425 - DNA, 25 bp, Homo sapien
ctccaggtggaggatattctgttct

SEQ ID NO: 1152426 - DNA, 25 bp, Homo sapien
tttgtctgcagacggcatgcttgga

SEQ ID NO: 1152427 - DNA, 25 bp, Homo sapien
tgagggtcaaggacacatgcagcct

SEQ ID NO: 1152428 - DNA, 25 bp, Homo sapien
aaagccttgaaacaggcggaaggtg

SEQ ID NO: 1152429 - DNA, 25 bp, Homo sapien
ccagtgatcttggatggtaaagcct

SEQ ID NO: 1152430 - DNA, 25 bp, Homo sapien
acagtaaaagggatgaacgaattct

SEQ ID NO: 1152431 - DNA, 25 bp, Homo sapien
cagtaaaagggatgaacgaattctt

SEQ ID NO: 1152432 - DNA, 25 bp, Homo sapien
tcatcattcttagcccccggaggag

SEQ ID NO: 1152433 - DNA, 25 bp, Homo sapien
catcattcttagcccccggaggagc

SEQ ID NO: 1152434 - DNA, 25 bp, Homo sapien
ccccatacatctgttcttctctggg

SEQ ID NO: 1152435 - DNA, 25 bp, Homo sapien
ttccctgccccatacatctgttctt

SEQ ID NO: 1152436 - DNA, 25 bp, Homo sapien
ctgagcaccatttttccctgcccca

SEQ ID NO: 1152437 - DNA, 25 bp, Homo sapien
gagcaccatttttccctgccccata

SEQ ID NO: 1152438 - DNA, 25 bp, Homo sapien
gatctaggagttttgacacagtggc

SEQ ID NO: 1152439 - DNA, 25 bp, Homo sapien
aagaggcagctccttgtcagcaatg

SEQ ID NO: 1152440 - DNA, 25 bp, Homo sapien
tcagcaatgtagtttaggggagagt

SEQ ID NO: 1152441 - DNA, 25 bp, Homo sapien
tctaggagttttgacacagtggctt

SEQ ID NO: 1152442 - DNA, 25 bp, Homo sapien
tcttagcctggtcaagctggagcca

SEQ ID NO: 1152443 - DNA, 25 bp, Homo sapien
gaagctctagagaattctcagtgga

SEQ ID NO: 1152444 - DNA, 25 bp, Homo sapien
taagccagctaagatgggtgtcact

SEQ ID NO: 1152445 - DNA, 25 bp, Homo sapien
gctggccgtggctatagataagact

SEQ ID NO: 1152446 - DNA, 25 bp, Homo sapien
tggctttgagaaggccatttctggc

SEQ ID NO: 1152447 - DNA, 25 bp, Homo sapien
gcaagtgatgcagggtgactgactc

SEQ ID NO: 1152448 - DNA, 25 bp, Homo sapien
gaaatgcctacagcacgtgtgcaga

SEQ ID NO: 1152449 - DNA, 25 bp, Homo sapien
gaaagggagtgtcagatgtcacgct

SEQ ID NO: 1152450 - DNA, 25 bp, Homo sapien
cttaggtacagacaccgtcagcaga

SEQ ID NO: 1152451 - DNA, 25 bp, Homo sapien
gaagcagtgtgggtttaggatccat

SEQ ID NO: 1152452 - DNA, 25 bp, Homo sapien
tttagtgtgaattcttacagtccag

SEQ ID NO: 1152453 - DNA, 25 bp, Homo sapien
gtgtgaattcttacagtccagttgt

SEQ ID NO: 1152454 - DNA, 25 bp, Homo sapien
tactttagtgtgaattcttacagtc

SEQ ID NO: 1152455 - DNA, 25 bp, Homo sapien
tacagtccagttgttttttgtctta

SEQ ID NO: 1152456 - DNA, 25 bp, Homo sapien
tgctcttggataatctacttctgaa

SEQ ID NO: 1152457 - DNA, 25 bp, Homo sapien
tcatgctcttggataatctacttct

SEQ ID NO: 1152458 - DNA, 25 bp, Homo sapien
catgctcttggataatctacttctg

SEQ ID NO: 1152459 - DNA, 25 bp, Homo sapien
atgctcttggataatctacttctga

SEQ ID NO: 1152460 - DNA, 25 bp, Homo sapien
ggccaagaactggttcctcagcagg

SEQ ID NO: 1152461 - DNA, 25 bp, Homo sapien
cctggtggaggcctcagtgaacagc

SEQ ID NO: 1152462 - DNA, 25 bp, Homo sapien
tagaatctcacagcatctcctggtg

SEQ ID NO: 1152463 - DNA, 25 bp, Homo sapien
cagcagacagaagacctccttgggc

SEQ ID NO: 1152464 - DNA, 25 bp, Homo sapien
tcttcagcatagctcgcaaggtctc

SEQ ID NO: 1152465 - DNA, 25 bp, Homo sapien
tggccagtagtgtatcaagtctctt

SEQ ID NO: 1152466 - DNA, 25 bp, Homo sapien
aacatcccgcaaatccagcacttga

SEQ ID NO: 1152467 - DNA, 25 bp, Homo sapien
atcaacatcccgcaaatccagcact

SEQ ID NO: 1152468 - DNA, 25 bp, Homo sapien
aattctcatcaacatcccgcaaatc

SEQ ID NO: 1152469 - DNA, 25 bp, Homo sapien
tctcatcaacatcccgcaaatccag

SEQ ID NO: 1152470 - DNA, 25 bp, Homo sapien
tagcgcagacattcatccagggtgt

SEQ ID NO: 1152471 - DNA, 25 bp, Homo sapien
gttctattcagcgagcactttttcc

SEQ ID NO: 1152472 - DNA, 25 bp, Homo sapien
caaatcatggatactgctgtctggg

SEQ ID NO: 1152473 - DNA, 25 bp, Homo sapien
gtggatccacccacagaggtagcgc

SEQ ID NO: 1152474 - DNA, 25 bp, Homo sapien
ctgttggccgcacatgtataactca

SEQ ID NO: 1152475 - DNA, 25 bp, Homo sapien
ctgctgttggccgcacatgtataac

SEQ ID NO: 1152476 - DNA, 25 bp, Homo sapien
tgctgttggccgcacatgtataact

SEQ ID NO: 1152477 - DNA, 25 bp, Homo sapien
tgttggccgcacatgtataactcac

SEQ ID NO: 1152478 - DNA, 25 bp, Homo sapien
ctgagcaggtgctctttgatattat

SEQ ID NO: 1152479 - DNA, 25 bp, Homo sapien
gcaggtgctctttgatattattgac

SEQ ID NO: 1152480 - DNA, 25 bp, Homo sapien
gagcaggtgctctttgatattattg

SEQ ID NO: 1152481 - DNA, 25 bp, Homo sapien
agcaggtgctctttgatattattga

SEQ ID NO: 1152482 - DNA, 25 bp, Homo sapien
ctaggtaagcatgacagaatgtaaa

SEQ ID NO: 1152483 - DNA, 25 bp, Homo sapien
tgacagaatgtaaaggcctccaagg

SEQ ID NO: 1152484 - DNA, 25 bp, Homo sapien
taagcatgacagaatgtaaaggcct

SEQ ID NO: 1152485 - DNA, 25 bp, Homo sapien
gacagaatgtaaaggcctccaaggg

SEQ ID NO: 1152486 - DNA, 25 bp, Homo sapien
ggcttgggtactgacaccccatgtc

SEQ ID NO: 1152487 - DNA, 25 bp, Homo sapien
ccttccctagaagcgaagatgcagc

SEQ ID NO: 1152488 - DNA, 25 bp, Homo sapien
cgagggtctcgatagtagcagcagc

SEQ ID NO: 1152489 - DNA, 25 bp, Homo sapien
tcagttcacctgtgtgatgcaacag

SEQ ID NO: 1152490 - DNA, 25 bp, Homo sapien
agtgtccgggagaaagcctatccac

SEQ ID NO: 1152491 - DNA, 25 bp, Homo sapien
tagtgcccaagtgtccgggagaaag

SEQ ID NO: 1152492 - DNA, 25 bp, Homo sapien
ccaagtgtccgggagaaagcctatc

SEQ ID NO: 1152493 - DNA, 25 bp, Homo sapien
ctagattttagtgcccaagtgtccg

SEQ ID NO: 1152494 - DNA, 25 bp, Homo sapien
acaccttggagggtcaagttggatg

SEQ ID NO: 1152495 - DNA, 25 bp, Homo sapien
gacaccttggagggtcaagttggat

SEQ ID NO: 1152496 - DNA, 25 bp, Homo sapien
ctgtcctccaggcatcttgagtctc

SEQ ID NO: 1152497 - DNA, 25 bp, Homo sapien
gacatcagctttatgtgctgtacaa

SEQ ID NO: 1152498 - DNA, 25 bp, Homo sapien
catcttgagtctctgggcttatgga

SEQ ID NO: 1152499 - DNA, 25 bp, Homo sapien
gcttatggacctggctgacatcagc

SEQ ID NO: 1152500 - DNA, 25 bp, Homo sapien
ccacttcgctgcttccaaagacaaa

SEQ ID NO: 1152501 - DNA, 25 bp, Homo sapien
acttcgctgcttccaaagacaaatt

SEQ ID NO: 1152502 - DNA, 25 bp, Homo sapien
cctccacttcgctgcttccaaagac

SEQ ID NO: 1152503 - DNA, 25 bp, Homo sapien
tccacttcgctgcttccaaagacaa

SEQ ID NO: 1152504 - DNA, 25 bp, Homo sapien
tgtccttgtaaacgatgagggagtc

SEQ ID NO: 1152505 - DNA, 25 bp, Homo sapien
tccttgtaaacgatgagggagtctt

SEQ ID NO: 1152506 - DNA, 25 bp, Homo sapien
tgtaaacgatgagggagtcttccat

SEQ ID NO: 1152507 - DNA, 25 bp, Homo sapien
cttgtaaacgatgagggagtcttcc

SEQ ID NO: 1152508 - DNA, 25 bp, Homo sapien
gcccaggacagcgtccggaataccg

SEQ ID NO: 1152509 - DNA, 25 bp, Homo sapien
gggcgatgccgtctctcttttgctc

SEQ ID NO: 1152510 - DNA, 25 bp, Homo sapien
cgcactgtagtagacgccttcagag

SEQ ID NO: 1152511 - DNA, 25 bp, Homo sapien
ccggaataccgcagagcttggccct

SEQ ID NO: 1152512 - DNA, 25 bp, Homo sapien
cagccagaggttctgagggcagcat

SEQ ID NO: 1152513 - DNA, 25 bp, Homo sapien
gccagaggttctgagggcagcattt

SEQ ID NO: 1152514 - DNA, 25 bp, Homo sapien
ttcaacagccagaggttctgagggc

SEQ ID NO: 1152515 - DNA, 25 bp, Homo sapien
tcattcaacagccagaggttctgag

SEQ ID NO: 1152516 - DNA, 25 bp, Homo sapien
gacttccctgaggaatggttggaag

SEQ ID NO: 1152517 - DNA, 25 bp, Homo sapien
gcctagaaactggagtggtctcttt

SEQ ID NO: 1152518 - DNA, 25 bp, Homo sapien
taatctcactgtggtttgctgtcac

SEQ ID NO: 1152519 - DNA, 25 bp, Homo sapien
acgtcgtttgatcatgtccttccca

SEQ ID NO: 1152520 - DNA, 25 bp, Homo sapien
tcacaaccatttggctgaggttcaa

SEQ ID NO: 1152521 - DNA, 25 bp, Homo sapien
ggccaatttggttgggagccagaaa

SEQ ID NO: 1152522 - DNA, 25 bp, Homo sapien
ctccctggccaatttggttgggagc

SEQ ID NO: 1152523 - DNA, 25 bp, Homo sapien
ttggttgggagccagaaattcttca

SEQ ID NO: 1152524 - DNA, 25 bp, Homo sapien
cccacggagaaatatgtgctctttc

SEQ ID NO: 1152525 - DNA, 25 bp, Homo sapien
caaggagtgtcccacggagaaatat

SEQ ID NO: 1152526 - DNA, 25 bp, Homo sapien
caatacaaggagtgtcccacggaga

SEQ ID NO: 1152527 - DNA, 25 bp, Homo sapien
gagtgtcccacggagaaatatgtgc

SEQ ID NO: 1152528 - DNA, 25 bp, Homo sapien
tagtatcaaaaggttttggagggca

SEQ ID NO: 1152529 - DNA, 25 bp, Homo sapien
cagtcctgtatgttaaccaatcttg

SEQ ID NO: 1152530 - DNA, 25 bp, Homo sapien
tctcagtcctgtatgttaaccaatc

SEQ ID NO: 1152531 - DNA, 25 bp, Homo sapien
atgctctcagtcctgtatgttaacc

SEQ ID NO: 1152532 - DNA, 25 bp, Homo sapien
gagtctggccagacagaacctggtg

SEQ ID NO: 1152533 - DNA, 25 bp, Homo sapien
acctggtggcaggatactaattgca

SEQ ID NO: 1152534 - DNA, 25 bp, Homo sapien
tgttcgcttcttgtgggagagcaga

SEQ ID NO: 1152535 - DNA, 25 bp, Homo sapien
tcataagctcccaatcaggcagggc

SEQ ID NO: 1152536 - DNA, 25 bp, Homo sapien
aaagaaggccccgaagaatgtgctt

SEQ ID NO: 1152537 - DNA, 25 bp, Homo sapien
gaatgtgcttccatccgcttcctca

SEQ ID NO: 1152538 - DNA, 25 bp, Homo sapien
cacaaatggtctgaaagcatcaatg

SEQ ID NO: 1152539 - DNA, 25 bp, Homo sapien
tgtgcacacagcgtctatccagtgc

SEQ ID NO: 1152540 - DNA, 25 bp, Homo sapien
tgagccagactctgccgatgacggt

SEQ ID NO: 1152541 - DNA, 25 bp, Homo sapien
atgggaaaggcctcgtcgtagcaga

SEQ ID NO: 1152542 - DNA, 25 bp, Homo sapien
gaggatccggaagatgaaaagcacg

SEQ ID NO: 1152543 - DNA, 25 bp, Homo sapien
gttgcacacgaagtcggattgctca

SEQ ID NO: 1152544 - DNA, 25 bp, Homo sapien
gctcctccgcctcgcggcttttgcg

SEQ ID NO: 1152545 - DNA, 25 bp, Homo sapien
gcctcgcggcttttgcgcttctcct

SEQ ID NO: 1152546 - DNA, 25 bp, Homo sapien
ttgacgctgccctggtccgggccgc

SEQ ID NO: 1152547 - DNA, 25 bp, Homo sapien
ggccgccgttagtccccgcctgctg

SEQ ID NO: 1152548 - DNA, 25 bp, Homo sapien
ccaccggctgcagcggtacagaggc

SEQ ID NO: 1152549 - DNA, 25 bp, Homo sapien
gcccacttcaaagagggtcttgaag

SEQ ID NO: 1152550 - DNA, 25 bp, Homo sapien
caggatccggaacccgtacaggaag

SEQ ID NO: 1152551 - DNA, 25 bp, Homo sapien
gtacaggaagtagtggcccacgatg

SEQ ID NO: 1152552 - DNA, 25 bp, Homo sapien
tcttcttctaggagctgatagccct

SEQ ID NO: 1152553 - DNA, 25 bp, Homo sapien
tgtgctgatcttctcctcgaactga

SEQ ID NO: 1152554 - DNA, 25 bp, Homo sapien
ggtggcccaactccatcacgttgag

SEQ ID NO: 1152555 - DNA, 25 bp, Homo sapien
tcacgttgaggaatagggacacaga

SEQ ID NO: 1152556 - DNA, 25 bp, Homo sapien
tggcatcatctgttgtcagctctgg

SEQ ID NO: 1152557 - DNA, 25 bp, Homo sapien
tttgacaccttctccgactgcggct

SEQ ID NO: 1152558 - DNA, 25 bp, Homo sapien
tagatcgtctgacctggctcggctg

SEQ ID NO: 1152559 - DNA, 25 bp, Homo sapien
tttgcttagcctgctcaggggtctg

SEQ ID NO: 1152560 - DNA, 25 bp, Homo sapien
tagtcactagtgaaaaaaggtatag

SEQ ID NO: 1152561 - DNA, 25 bp, Homo sapien
gagcagatgtcctccagctcgaaac

SEQ ID NO: 1152562 - DNA, 25 bp, Homo sapien
tagattttaggctgagcactgatgc

SEQ ID NO: 1152563 - DNA, 25 bp, Homo sapien
cagctcgaaactgggcttgcttcta

SEQ ID NO: 1152564 - DNA, 25 bp, Homo sapien
gaatatgaggacaggagcccttcaa

SEQ ID NO: 1152565 - DNA, 25 bp, Homo sapien
tgtgtcctttccagggatgaagctt

SEQ ID NO: 1152566 - DNA, 25 bp, Homo sapien
tgtgtgagcacccactttgtgagag

SEQ ID NO: 1152567 - DNA, 25 bp, Homo sapien
tgaggatttcccctgaacagactct

SEQ ID NO: 1152568 - DNA, 25 bp, Homo sapien
taggacacccctggatgtaggtagg

SEQ ID NO: 1152569 - DNA, 25 bp, Homo sapien
cagtgtgggtacgttcattgaagca

SEQ ID NO: 1152570 - DNA, 25 bp, Homo sapien
tggcagccaactcaatctttaggac

SEQ ID NO: 1152571 - DNA, 25 bp, Homo sapien
taagcagtagccagaaaatcacgtg

SEQ ID NO: 1152572 - DNA, 25 bp, Homo sapien
gggaatggtaccactcagcaggcct

SEQ ID NO: 1152573 - DNA, 25 bp, Homo sapien
cttactgctgttggaggaatctctc

SEQ ID NO: 1152574 - DNA, 25 bp, Homo sapien
aggaatctctcagggaatggtacca

SEQ ID NO: 1152575 - DNA, 25 bp, Homo sapien
taactacgaggcaggttggagggac

SEQ ID NO: 1152576 - DNA, 25 bp, Homo sapien
gtgtctatttcacgttgaaaaactc

SEQ ID NO: 1152577 - DNA, 25 bp, Homo sapien
gagtgtctatttcacgttgaaaaac

SEQ ID NO: 1152578 - DNA, 25 bp, Homo sapien
gtctatttcacgttgaaaaactcac

SEQ ID NO: 1152579 - DNA, 25 bp, Homo sapien
tggagtgtctatttcacgttgaaaa

SEQ ID NO: 1152580 - DNA, 25 bp, Homo sapien
tgtagctgcctagagtaaagaccac

SEQ ID NO: 1152581 - DNA, 25 bp, Homo sapien
catgcagctgcttctaaatggaaac

SEQ ID NO: 1152582 - DNA, 25 bp, Homo sapien
tggtcacagatatcccctgagggtg

SEQ ID NO: 1152583 - DNA, 25 bp, Homo sapien
tatctaacaagggaccgactaggag

SEQ ID NO: 1152584 - DNA, 25 bp, Homo sapien
tgtccagtgctgtactggatgcttc

SEQ ID NO: 1152585 - DNA, 25 bp, Homo sapien
cacagaccttcaggaatatctgtcc

SEQ ID NO: 1152586 - DNA, 25 bp, Homo sapien
tgggtccccaggtcacacagacctt

SEQ ID NO: 1152587 - DNA, 25 bp, Homo sapien
tgtgggtccccaggtcacacagacc

SEQ ID NO: 1152588 - DNA, 25 bp, Homo sapien
accaattcttgcgtgattaaagaca

SEQ ID NO: 1152589 - DNA, 25 bp, Homo sapien
caaccaattcttgcgtgattaaaga

SEQ ID NO: 1152590 - DNA, 25 bp, Homo sapien
gcaaccaattcttgcgtgattaaag

SEQ ID NO: 1152591 - DNA, 25 bp, Homo sapien
caattcttgcgtgattaaagacatt

SEQ ID NO: 1152592 - DNA, 25 bp, Homo sapien
catatgtgagctctactaagccgag

SEQ ID NO: 1152593 - DNA, 25 bp, Homo sapien
tagagcacgcctaatgacccttctc

SEQ ID NO: 1152594 - DNA, 25 bp, Homo sapien
aatcttgtcctaggccttccacatg

SEQ ID NO: 1152595 - DNA, 25 bp, Homo sapien
gacccttctcgggaactggagagga

SEQ ID NO: 1152596 - DNA, 25 bp, Homo sapien
caggcaaacctttctcatctaaact

SEQ ID NO: 1152597 - DNA, 25 bp, Homo sapien
gattgtatttacactcagaagagtt

SEQ ID NO: 1152598 - DNA, 25 bp, Homo sapien
tgcacacagtatgcatagagggtaa

SEQ ID NO: 1152599 - DNA, 25 bp, Homo sapien
ggtacacacttagtagttttacaga

SEQ ID NO: 1152600 - DNA, 25 bp, Homo sapien
aaaaattgcagaaaaaggccatggg

SEQ ID NO: 1152601 - DNA, 25 bp, Homo sapien
taacacacgactattagctctggca

SEQ ID NO: 1152602 - DNA, 25 bp, Homo sapien
gagaatacaggaccaccatcccaat

SEQ ID NO: 1152603 - DNA, 25 bp, Homo sapien
cccaggaagtttgttatgaatgtgc

SEQ ID NO: 1152604 - DNA, 25 bp, Homo sapien
ggagctggtttgtactggctgacaa

SEQ ID NO: 1152605 - DNA, 25 bp, Homo sapien
cagtggcattaggttggtagcttga

SEQ ID NO: 1152606 - DNA, 25 bp, Homo sapien
tactcaatggtacacatcagtcgta

SEQ ID NO: 1152607 - DNA, 25 bp, Homo sapien
cagtcgtatggtggaaacccttatc

SEQ ID NO: 1152608 - DNA, 25 bp, Homo sapien
gaaagctgagtatcagagaaaaaca

SEQ ID NO: 1152609 - DNA, 25 bp, Homo sapien
tcaggaaagctgagtatcagagaaa

SEQ ID NO: 1152610 - DNA, 25 bp, Homo sapien
gctgagtatcagagaaaaacagatg

SEQ ID NO: 1152611 - DNA, 25 bp, Homo sapien
agctgagtatcagagaaaaacagat

SEQ ID NO: 1152612 - DNA, 25 bp, Homo sapien
ctgcctccatggacagtcacaccat

SEQ ID NO: 1152613 - DNA, 25 bp, Homo sapien
ctgccatcctcttagaatagtggga

SEQ ID NO: 1152614 - DNA, 25 bp, Homo sapien
gaatagtgggatcttttggttctgc

SEQ ID NO: 1152615 - DNA, 25 bp, Homo sapien
atattctcccgatccactctagctg

SEQ ID NO: 1152616 - DNA, 25 bp, Homo sapien
acacggtctgccttctcccaggtgc

SEQ ID NO: 1152617 - DNA, 25 bp, Homo sapien
tgctggagtcgatcaggaaactcat

SEQ ID NO: 1152618 - DNA, 25 bp, Homo sapien
gaggtaatcatgatgctggagtcga

SEQ ID NO: 1152619 - DNA, 25 bp, Homo sapien
agctgcgccccagtcagccaatcag

SEQ ID NO: 1152620 - DNA, 25 bp, Homo sapien
gctcttagcctggaggtcggcggac

SEQ ID NO: 1152621 - DNA, 25 bp, Homo sapien
tcggcggaccgcttccaaaagtgga

SEQ ID NO: 1152622 - DNA, 25 bp, Homo sapien
accgaaattccggggatggatgccg

SEQ ID NO: 1152623 - DNA, 25 bp, Homo sapien
tggcggcgccggctcttagcctgga

SEQ ID NO: 1152624 - DNA, 25 bp, Homo sapien
ggacgaggtgtcagtgcaaaaacga

SEQ ID NO: 1152625 - DNA, 25 bp, Homo sapien
gacgaaacttctattgagcagagac

SEQ ID NO: 1152626 - DNA, 25 bp, Homo sapien
gattacatggtaaaagcaagaggct

SEQ ID NO: 1152627 - DNA, 25 bp, Homo sapien
tacaaacaaatgaaggtggccaatg

SEQ ID NO: 1152628 - DNA, 25 bp, Homo sapien
catagtctttaaacaattggcgcat

SEQ ID NO: 1152629 - DNA, 25 bp, Homo sapien
gtctttaaacaattggcgcatgaag

SEQ ID NO: 1152630 - DNA, 25 bp, Homo sapien
tagtctttaaacaattggcgcatga

SEQ ID NO: 1152631 - DNA, 25 bp, Homo sapien
tcatagtctttaaacaattggcgca

SEQ ID NO: 1152632 - DNA, 25 bp, Homo sapien
tataaggcttgcaattcagggccag

SEQ ID NO: 1152633 - DNA, 25 bp, Homo sapien
cctgatagccttgggattttggtat

SEQ ID NO: 1152634 - DNA, 25 bp, Homo sapien
taatccttgctcctaacttctgggc

SEQ ID NO: 1152635 - DNA, 25 bp, Homo sapien
tttggtaaaagcttcctatcttgga

SEQ ID NO: 1152636 - DNA, 25 bp, Homo sapien
gaagatcacctgtacaacatactga

SEQ ID NO: 1152637 - DNA, 25 bp, Homo sapien
agaagatcacctgtacaacatactg

SEQ ID NO: 1152638 - DNA, 25 bp, Homo sapien
agatcacctgtacaacatactgacg

SEQ ID NO: 1152639 - DNA, 25 bp, Homo sapien
gagaagatcacctgtacaacatact

SEQ ID NO: 1152640 - DNA, 25 bp, Homo sapien
agatttcaaagatgatgagctcaaa

SEQ ID NO: 1152641 - DNA, 25 bp, Homo sapien
gctattcaatactcctaagatttca

SEQ ID NO: 1152642 - DNA, 25 bp, Homo sapien
ctgctattcaatactcctaagattt

SEQ ID NO: 1152643 - DNA, 25 bp, Homo sapien
tttcaaagatgatgagctcaaacat

SEQ ID NO: 1152644 - DNA, 25 bp, Homo sapien
taccctacagggagtgaataccatt

SEQ ID NO: 1152645 - DNA, 25 bp, Homo sapien
catttagactagatacattgacagc

SEQ ID NO: 1152646 - DNA, 25 bp, Homo sapien
ttccttccttagtacagatggcagg

SEQ ID NO: 1152647 - DNA, 25 bp, Homo sapien
tggcaggcatcacgaaacaaagagc

SEQ ID NO: 1152648 - DNA, 25 bp, Homo sapien
acaggtaaaatattgggccaagcct

SEQ ID NO: 1152649 - DNA, 25 bp, Homo sapien
ggcctaagtggttaaatggcttaca

SEQ ID NO: 1152650 - DNA, 25 bp, Homo sapien
tattctagatacgagtcccagtcca

SEQ ID NO: 1152651 - DNA, 25 bp, Homo sapien
atctattcatatgtgcttactggcc

SEQ ID NO: 1152652 - DNA, 25 bp, Homo sapien
tgctcacaataaaatagccaatgta

SEQ ID NO: 1152653 - DNA, 25 bp, Homo sapien
tgaaaaccaggatcagcagaattac

SEQ ID NO: 1152654 - DNA, 25 bp, Homo sapien
tcagcagaattacacacaggttcat

SEQ ID NO: 1152655 - DNA, 25 bp, Homo sapien
agccaatgtaaaaaggcaccatgaa

SEQ ID NO: 1152656 - DNA, 25 bp, Homo sapien
gaaaaaagcagtcgttgtttatgca

SEQ ID NO: 1152657 - DNA, 25 bp, Homo sapien
ggaaaaaagcagtcgttgtttatgc

SEQ ID NO: 1152658 - DNA, 25 bp, Homo sapien
aggaaaaaagcagtcgttgtttatg

SEQ ID NO: 1152659 - DNA, 25 bp, Homo sapien
tgttttgggctgagaatgggaaagg

SEQ ID NO: 1152660 - DNA, 25 bp, Homo sapien
tgggctgagaatgggaaagggatct

SEQ ID NO: 1152661 - DNA, 25 bp, Homo sapien
catgttttgggctgagaatgggaaa

SEQ ID NO: 1152662 - DNA, 25 bp, Homo sapien
ttttgggctgagaatgggaaaggga

SEQ ID NO: 1152663 - DNA, 25 bp, Homo sapien
tgaaaggacaatagatacaatggcc

SEQ ID NO: 1152664 - DNA, 25 bp, Homo sapien
tagtgcaagtcgttcccttcgttga

SEQ ID NO: 1152665 - DNA, 25 bp, Homo sapien
tcagtttccacactaggcactaggg

SEQ ID NO: 1152666 - DNA, 25 bp, Homo sapien
cactggtcatgtgagctgaatgcac

SEQ ID NO: 1152667 - DNA, 25 bp, Homo sapien
tattccttttctgactactggcctc

SEQ ID NO: 1152668 - DNA, 25 bp, Homo sapien
actcgttttagaggtcagtgcaacc

SEQ ID NO: 1152669 - DNA, 25 bp, Homo sapien
tctaggatagaattcactacagcca

SEQ ID NO: 1152670 - DNA, 25 bp, Homo sapien
aaatgccagagctatataattcagg

SEQ ID NO: 1152671 - DNA, 25 bp, Homo sapien
taaatagcaggaactactttgtgct

SEQ ID NO: 1152672 - DNA, 25 bp, Homo sapien
tcccatatgcttcagagtgatctct

SEQ ID NO: 1152673 - DNA, 25 bp, Homo sapien
gatctcttttattgggtgatagcag

SEQ ID NO: 1152674 - DNA, 25 bp, Homo sapien
tcccctaaggtgatactcttttgct

SEQ ID NO: 1152675 - DNA, 25 bp, Homo sapien
ggaagtaagacatgtaagtgtatgg

SEQ ID NO: 1152676 - DNA, 25 bp, Homo sapien
tccagaaagaagagccatgagagtc

SEQ ID NO: 1152677 - DNA, 25 bp, Homo sapien
aaagaagagccatgagagtcactcc

SEQ ID NO: 1152678 - DNA, 25 bp, Homo sapien
tgggcagttgacagcaccaaatcca

SEQ ID NO: 1152679 - DNA, 25 bp, Homo sapien
catttaggatgtatgtttaagcaca

SEQ ID NO: 1152680 - DNA, 25 bp, Homo sapien
taaaggcaagccgtacaagtgataa

SEQ ID NO: 1152681 - DNA, 25 bp, Homo sapien
agaaagatttccaggtcaatgccca

SEQ ID NO: 1152682 - DNA, 25 bp, Homo sapien
tactgttctgttaatatctaggagg

SEQ ID NO: 1152683 - DNA, 25 bp, Homo sapien
gggtgacgttggctccttgagaaat

SEQ ID NO: 1152684 - DNA, 25 bp, Homo sapien
gaaggaggattggtgacttcccttc

SEQ ID NO: 1152685 - DNA, 25 bp, Homo sapien
gtgacgttggctccttgagaaatga

SEQ ID NO: 1152686 - DNA, 25 bp, Homo sapien
ttcccttccttcagacaagcaatga

SEQ ID NO: 1152687 - DNA, 25 bp, Homo sapien
tgaatgggagctttcttttggtcat

SEQ ID NO: 1152688 - DNA, 25 bp, Homo sapien
gagctttcttttggtcatcttcggt

SEQ ID NO: 1152689 - DNA, 25 bp, Homo sapien
tccacttgctgaatgggagctttct

SEQ ID NO: 1152690 - DNA, 25 bp, Homo sapien
tgggagctttcttttggtcatcttc

SEQ ID NO: 1152691 - DNA, 25 bp, Homo sapien
atattctcaatatctgatcgacaaa

SEQ ID NO: 1152692 - DNA, 25 bp, Homo sapien
tattctcaatatctgatcgacaaaa

SEQ ID NO: 1152693 - DNA, 25 bp, Homo sapien
aaaatgctttttgtgatatcctttc

SEQ ID NO: 1152694 - DNA, 25 bp, Homo sapien
aacgaaaatgctttttgtgatatcc

SEQ ID NO: 1152695 - DNA, 25 bp, Homo sapien
tcctgtgttgtgttgagctttcaat

SEQ ID NO: 1152696 - DNA, 25 bp, Homo sapien
catcaaacgaaaatgctttttgtga

SEQ ID NO: 1152697 - DNA, 25 bp, Homo sapien
tattcaggttgacttctcggcaccc

SEQ ID NO: 1152698 - DNA, 25 bp, Homo sapien
tgttgaatgaatccatcgtggcctt

SEQ ID NO: 1152699 - DNA, 25 bp, Homo sapien
ctgaagagcgttgagaatggaaatc

SEQ ID NO: 1152700 - DNA, 25 bp, Homo sapien
tcttttagtcctctgaagagcgttg

SEQ ID NO: 1152701 - DNA, 25 bp, Homo sapien
tgcccagtcgctttcggggcgctga

SEQ ID NO: 1152702 - DNA, 25 bp, Homo sapien
ccggtccgcgatccgggcccgagca

SEQ ID NO: 1152703 - DNA, 25 bp, Homo sapien
cggatgctgtgtcccgcacggaggg

SEQ ID NO: 1152704 - DNA, 25 bp, Homo sapien
gagctacccggatggctcttccggt

SEQ ID NO: 1152705 - DNA, 25 bp, Homo sapien
tgaactactcaccgttcggttaata

SEQ ID NO: 1152706 - DNA, 25 bp, Homo sapien
ctactcaccgttcggttaatagccg

SEQ ID NO: 1152707 - DNA, 25 bp, Homo sapien
cgttcggttaatagccgaacgctct

SEQ ID NO: 1152708 - DNA, 25 bp, Homo sapien
gttaatagccgaacgctctgaccga

SEQ ID NO: 1152709 - DNA, 25 bp, Homo sapien
ttggaggcgaaagagacgaagcctc

SEQ ID NO: 1152710 - DNA, 25 bp, Homo sapien
cacattatggtgaagcagtatacac

SEQ ID NO: 1152711 - DNA, 25 bp, Homo sapien
taagtgcattgctaaattctcctcc

SEQ ID NO: 1152712 - DNA, 25 bp, Homo sapien
gggctcaggtaagggagactatgca

SEQ ID NO: 1152713 - DNA, 25 bp, Homo sapien
cagcggaattcactaacgcagcccc

SEQ ID NO: 1152714 - DNA, 25 bp, Homo sapien
cactctggaaaaacgatcttcacaa

SEQ ID NO: 1152715 - DNA, 25 bp, Homo sapien
tcgcaaggatcagtacacacaatag

SEQ ID NO: 1152716 - DNA, 25 bp, Homo sapien
tcctacatttaggaaaatcgcaagg

SEQ ID NO: 1152717 - DNA, 25 bp, Homo sapien
catcttgtgatggagtgcggttcaa

SEQ ID NO: 1152718 - DNA, 25 bp, Homo sapien
tctcggcaaaatgaaggatgggccc

SEQ ID NO: 1152719 - DNA, 25 bp, Homo sapien
cccagtctttggtggtctcggcaaa

SEQ ID NO: 1152720 - DNA, 25 bp, Homo sapien
tgcggttcaagaaatgacattcccg

SEQ ID NO: 1152721 - DNA, 25 bp, Homo sapien
ctgatcacggattctctgcctggac

SEQ ID NO: 1152722 - DNA, 25 bp, Homo sapien
tctctgcgtttctgcatatttggcc

SEQ ID NO: 1152723 - DNA, 25 bp, Homo sapien
tatttggccctaaaactggtgctac

SEQ ID NO: 1152724 - DNA, 25 bp, Homo sapien
ttctgcatatttggccctaaaactg

SEQ ID NO: 1152725 - DNA, 25 bp, Homo sapien
aaactggtgctacttttattgtctc

SEQ ID NO: 1152726 - DNA, 25 bp, Homo sapien
attgtgaccctcaaagaggtcacag

SEQ ID NO: 1152727 - DNA, 25 bp, Homo sapien
taattgtgaccctcaaagaggtcac

SEQ ID NO: 1152728 - DNA, 25 bp, Homo sapien
tgtaattgtgaccctcaaagaggtc

SEQ ID NO: 1152729 - DNA, 25 bp, Homo sapien
gaccctcaaagaggtcacagccaca

SEQ ID NO: 1152730 - DNA, 25 bp, Homo sapien
catctggtattggattccttctgct

SEQ ID NO: 1152731 - DNA, 25 bp, Homo sapien
cttcatttcctcgtggagatctgga

SEQ ID NO: 1152732 - DNA, 25 bp, Homo sapien
gactggtagtgaattcggtcagctt

SEQ ID NO: 1152733 - DNA, 25 bp, Homo sapien
cggtcagcttttgtacatctctaaa

SEQ ID NO: 1152734 - DNA, 25 bp, Homo sapien
taaaaatgcttaaaccgctggcaag

SEQ ID NO: 1152735 - DNA, 25 bp, Homo sapien
ggcggtggctcctcctaacgttgga

SEQ ID NO: 1152736 - DNA, 25 bp, Homo sapien
tggtgataccagagtgagagtcgtc

SEQ ID NO: 1152737 - DNA, 25 bp, Homo sapien
ggttcgagcctgttctatggagcat

SEQ ID NO: 1152738 - DNA, 25 bp, Homo sapien
cgtttcctgggatgctgggtctgac

SEQ ID NO: 1152739 - DNA, 25 bp, Homo sapien
cttccagcttcggaatcacccaatg

SEQ ID NO: 1152740 - DNA, 25 bp, Homo sapien
agcttcggaatcacccaatgcacgg

SEQ ID NO: 1152741 - DNA, 25 bp, Homo sapien
tgacgcctgcgagggtcaggacggg

SEQ ID NO: 1152742 - DNA, 25 bp, Homo sapien
cagcagtagagaatcgggtgaaggc

SEQ ID NO: 1152743 - DNA, 25 bp, Homo sapien
tgtggggcctctccgtatttctgct

SEQ ID NO: 1152744 - DNA, 25 bp, Homo sapien
ttcatacgtgatgagaacaattctc

SEQ ID NO: 1152745 - DNA, 25 bp, Homo sapien
tctctcgggaggtctctctgtcctg

SEQ ID NO: 1152746 - DNA, 25 bp, Homo sapien
tgactcggattcgaaccgaggttgc

SEQ ID NO: 1152747 - DNA, 25 bp, Homo sapien
ttcgaaccgaggttgctgcggccac

SEQ ID NO: 1152748 - DNA, 25 bp, Homo sapien
tgccgtgactcggattcgaaccgag

SEQ ID NO: 1152749 - DNA, 25 bp, Homo sapien
ctcggattcgaaccgaggttgctgc

SEQ ID NO: 1152750 - DNA, 25 bp, Homo sapien
cacacaaggaggtgagtccagcaca

SEQ ID NO: 1152751 - DNA, 25 bp, Homo sapien
caagtggcatcggtttcctatcagc

SEQ ID NO: 1152752 - DNA, 25 bp, Homo sapien
gactggacgggagaacaacacatta

SEQ ID NO: 1152753 - DNA, 25 bp, Homo sapien
gatgactccttatctctcaggaagg

SEQ ID NO: 1152754 - DNA, 25 bp, Homo sapien
aagtatgctgagatcttcttacctg

SEQ ID NO: 1152755 - DNA, 25 bp, Homo sapien
caagtatgctagatgggtaaaagac

SEQ ID NO: 1152756 - DNA, 25 bp, Homo sapien
cagggagaaaatagtcacgaaactt

SEQ ID NO: 1152757 - DNA, 25 bp, Homo sapien
gaagaaatgagacagcctcagacag

SEQ ID NO: 1152758 - DNA, 25 bp, Homo sapien
aaatcagacattcaagtgccagacc

SEQ ID NO: 1152759 - DNA, 25 bp, Homo sapien
cagacattcaagtgccagaccctga

SEQ ID NO: 1152760 - DNA, 25 bp, Homo sapien
tctctttctccaaaatcagacattc

SEQ ID NO: 1152761 - DNA, 25 bp, Homo sapien
agtgccagaccctgaaatcagtttt

SEQ ID NO: 1152762 - DNA, 25 bp, Homo sapien
taccagctattaggcattcccagtc

SEQ ID NO: 1152763 - DNA, 25 bp, Homo sapien
ggagcttccctacccaggatttcag

SEQ ID NO: 1152764 - DNA, 25 bp, Homo sapien
caactgaacagctttgttattccaa

SEQ ID NO: 1152765 - DNA, 25 bp, Homo sapien
acgacaatggccagtaccagctatt

SEQ ID NO: 1152766 - DNA, 25 bp, Homo sapien
caggatctaaagttatcgggaagtc

SEQ ID NO: 1152767 - DNA, 25 bp, Homo sapien
ggatctaaagttatcgggaagtcga

SEQ ID NO: 1152768 - DNA, 25 bp, Homo sapien
gatctaaagttatcgggaagtcgac

SEQ ID NO: 1152769 - DNA, 25 bp, Homo sapien
aggatctaaagttatcgggaagtcg

SEQ ID NO: 1152770 - DNA, 25 bp, Homo sapien
gcaagggatccctttctgacgggaa

SEQ ID NO: 1152771 - DNA, 25 bp, Homo sapien
cgcaagggatccctttctgacggga

SEQ ID NO: 1152772 - DNA, 25 bp, Homo sapien
tcctgctggtctcactcgccggtag

SEQ ID NO: 1152773 - DNA, 25 bp, Homo sapien
tgactgttgttctcaacccccggca

SEQ ID NO: 1152774 - DNA, 25 bp, Homo sapien
ggtagttaggtctcccgtcagcctg

SEQ ID NO: 1152775 - DNA, 25 bp, Homo sapien
tcactcgccggtagttaggtctccc

SEQ ID NO: 1152776 - DNA, 25 bp, Homo sapien
tcaggcctgtttcggttgggcctgc

SEQ ID NO: 1152777 - DNA, 25 bp, Homo sapien
cttcaggcctgtttcggttgggcct

SEQ ID NO: 1152778 - DNA, 25 bp, Homo sapien
tttagggaccacttcgttcggcatc

SEQ ID NO: 1152779 - DNA, 25 bp, Homo sapien
gcctgcagaggagctttagggacca

SEQ ID NO: 1152780 - DNA, 25 bp, Homo sapien
aaggctggtttcgctcaaagaggat

SEQ ID NO: 1152781 - DNA, 25 bp, Homo sapien
aggctggtttcgctcaaagaggatc

SEQ ID NO: 1152782 - DNA, 25 bp, Homo sapien
ggctggtttcgctcaaagaggatcc

SEQ ID NO: 1152783 - DNA, 25 bp, Homo sapien
tttgagtgttttaacatctcgacat

SEQ ID NO: 1152784 - DNA, 25 bp, Homo sapien
gagtgttttaacatctcgacatcat

SEQ ID NO: 1152785 - DNA, 25 bp, Homo sapien
aatttgagtgttttaacatctcgac

SEQ ID NO: 1152786 - DNA, 25 bp, Homo sapien
acatctcgacatcatgagattctac

SEQ ID NO: 1152787 - DNA, 25 bp, Homo sapien
gatccaagatccagttagtcgccaa

SEQ ID NO: 1152788 - DNA, 25 bp, Homo sapien
gaaccattggtgcacatagtcctgt

SEQ ID NO: 1152789 - DNA, 25 bp, Homo sapien
tgaagttgccgcctgatgagaacca

SEQ ID NO: 1152790 - DNA, 25 bp, Homo sapien
gtgatttcctgtccgccaagtgcgt

SEQ ID NO: 1152791 - DNA, 25 bp, Homo sapien
caatagctttctgtatacactttgg

SEQ ID NO: 1152792 - DNA, 25 bp, Homo sapien
caggagagatagtcttatctggaca

SEQ ID NO: 1152793 - DNA, 25 bp, Homo sapien
tttccaaaatgttaagcgccatctc

SEQ ID NO: 1152794 - DNA, 25 bp, Homo sapien
tgtcaaactttgtaccaggagagat

SEQ ID NO: 1152795 - DNA, 25 bp, Homo sapien
caaaagtctgacctgcccatgagta

SEQ ID NO: 1152796 - DNA, 25 bp, Homo sapien
tataaatacaaagggctaccgaagc

SEQ ID NO: 1152797 - DNA, 25 bp, Homo sapien
caactggttaatgagcactgtccct

SEQ ID NO: 1152798 - DNA, 25 bp, Homo sapien
tttgactgaaccacaaggtgcccag

SEQ ID NO: 1152799 - DNA, 25 bp, Homo sapien
gggtggagagatcgttgctattact

SEQ ID NO: 1152800 - DNA, 25 bp, Homo sapien
tccaccgtggatcgtaatagctagg

SEQ ID NO: 1152801 - DNA, 25 bp, Homo sapien
gttgctattactccccttattgcgg

SEQ ID NO: 1152802 - DNA, 25 bp, Homo sapien
taaacaggctatgagtccaccgtgg

SEQ ID NO: 1152803 - DNA, 25 bp, Homo sapien
gatcctctttgagcgaaaccagcct

SEQ ID NO: 1152804 - DNA, 25 bp, Homo sapien
ggatcctctttgagcgaaaccagcc

SEQ ID NO: 1152805 - DNA, 25 bp, Homo sapien
cctctttgagcgaaaccagccttct

SEQ ID NO: 1152806 - DNA, 25 bp, Homo sapien
tcctctttgagcgaaaccagccttc

SEQ ID NO: 1152807 - DNA, 25 bp, Homo sapien
tgtctgttgtggatcagctacccag

SEQ ID NO: 1152808 - DNA, 25 bp, Homo sapien
tatgtacttctcaacagatcggccc

SEQ ID NO: 1152809 - DNA, 25 bp, Homo sapien
gaagatggcagtctatgaccaggaa

SEQ ID NO: 1152810 - DNA, 25 bp, Homo sapien
aggagacctaactaccggcgactga

SEQ ID NO: 1152811 - DNA, 25 bp, Homo sapien
agaaatgtattctgctacattctct

SEQ ID NO: 1152812 - DNA, 25 bp, Homo sapien
gtctgtggctcaccttctcactttc

SEQ ID NO: 1152813 - DNA, 25 bp, Homo sapien
ccttctcactttctcatggtgattc

SEQ ID NO: 1152814 - DNA, 25 bp, Homo sapien
cctgttatctcttaaggcagaaatg

SEQ ID NO: 1152815 - DNA, 25 bp, Homo sapien
taatgtgttgttctcccgtccagtc

SEQ ID NO: 1152816 - DNA, 25 bp, Homo sapien
ccttggcgactctgataccaagagg

SEQ ID NO: 1152817 - DNA, 25 bp, Homo sapien
ccttgtatttccttggcgactctga

SEQ ID NO: 1152818 - DNA, 25 bp, Homo sapien
gaccaacgcccaagactgaagcgga

SEQ ID NO: 1152819 - DNA, 25 bp, Homo sapien
gcatcaactggcacctggccagctg

SEQ ID NO: 1152820 - DNA, 25 bp, Homo sapien
gtgcatcaactggcacctggccagc

SEQ ID NO: 1152821 - DNA, 25 bp, Homo sapien
cctggccagctgctgtatctgcccc

SEQ ID NO: 1152822 - DNA, 25 bp, Homo sapien
ggcacctggccagctgctgtatctg

SEQ ID NO: 1152823 - DNA, 25 bp, Homo sapien
tcagacttggtgtgtacccctttgt

SEQ ID NO: 1152824 - DNA, 25 bp, Homo sapien
ccgatcagacttggtgtgtacccct

SEQ ID NO: 1152825 - DNA, 25 bp, Homo sapien
tatcaccagaccaagggacgatcca

SEQ ID NO: 1152826 - DNA, 25 bp, Homo sapien
tcaactctcgttctggtatcaccag

SEQ ID NO: 1152827 - DNA, 25 bp, Homo sapien
tgagaggcacatcttgccggcacat

SEQ ID NO: 1152828 - DNA, 25 bp, Homo sapien
gacgatccaacgttcggcggagcta

SEQ ID NO: 1152829 - DNA, 25 bp, Homo sapien
gaggcctctagatgtgggctctgta

SEQ ID NO: 1152830 - DNA, 25 bp, Homo sapien
gattggcacaccatgcagctactca

SEQ ID NO: 1152831 - DNA, 25 bp, Homo sapien
aacgctcgtggggaggacacaagcc

SEQ ID NO: 1152832 - DNA, 25 bp, Homo sapien
gacacaagccggttgtgttcccact

SEQ ID NO: 1152833 - DNA, 25 bp, Homo sapien
tggccgctccatctcttagaaagtt

SEQ ID NO: 1152834 - DNA, 25 bp, Homo sapien
tcctgcagcccgcttgggtcacaga

SEQ ID NO: 1152835 - DNA, 25 bp, Homo sapien
ttcagttggccgctccatctcttag

SEQ ID NO: 1152836 - DNA, 25 bp, Homo sapien
gggtcacagacagccactttcagtt

SEQ ID NO: 1152837 - DNA, 25 bp, Homo sapien
ctttccggggccttttgctagcact

SEQ ID NO: 1152838 - DNA, 25 bp, Homo sapien
tgagggatcgcaggtgctttccggg

SEQ ID NO: 1152839 - DNA, 25 bp, Homo sapien
ggccttttgctagcactttcctggg

SEQ ID NO: 1152840 - DNA, 25 bp, Homo sapien
aatgtccagatgcagtcgaatttca

SEQ ID NO: 1152841 - DNA, 25 bp, Homo sapien
gaatcccgcacatgggcgcttagtt

SEQ ID NO: 1152842 - DNA, 25 bp, Homo sapien
tggaactggataccccgcgggaaga

SEQ ID NO: 1152843 - DNA, 25 bp, Homo sapien
tgctgccgcttctgcgagccggaga

SEQ ID NO: 1152844 - DNA, 25 bp, Homo sapien
tgttagccaggcgaatcccgcacat

SEQ ID NO: 1152845 - DNA, 25 bp, Homo sapien
tttctgccaagtcgcttatacaagg

SEQ ID NO: 1152846 - DNA, 25 bp, Homo sapien
gcttttgtttgaccaaaccaatgta

SEQ ID NO: 1152847 - DNA, 25 bp, Homo sapien
gctttctgccaagtcgcttatacaa

SEQ ID NO: 1152848 - DNA, 25 bp, Homo sapien
ttgcttttgtttgaccaaaccaatg

SEQ ID NO: 1152849 - DNA, 25 bp, Homo sapien
agcccgcctgcggacacaggatccg

SEQ ID NO: 1152850 - DNA, 25 bp, Homo sapien
tcgggcccgggtcgcagactggggc

SEQ ID NO: 1152851 - DNA, 25 bp, Homo sapien
aaggcggcgcgaagaactggaagag

SEQ ID NO: 1152852 - DNA, 25 bp, Homo sapien
gctcgggcccgggtcgcagactggg

SEQ ID NO: 1152853 - DNA, 25 bp, Homo sapien
ggagacaaggctgctggggccacag

SEQ ID NO: 1152854 - DNA, 25 bp, Homo sapien
tactaaccacaatacgatcaccgca

SEQ ID NO: 1152855 - DNA, 25 bp, Homo sapien
ctgctggggccacagcgcagagtac

SEQ ID NO: 1152856 - DNA, 25 bp, Homo sapien
gccatgactcggattggagacaagg

SEQ ID NO: 1152857 - DNA, 25 bp, Homo sapien
tcagaacagcgggtacagccatatc

SEQ ID NO: 1152858 - DNA, 25 bp, Homo sapien
aagttgtgacctttctagccgcagg

SEQ ID NO: 1152859 - DNA, 25 bp, Homo sapien
taccgggagttcctaagccacagga

SEQ ID NO: 1152860 - DNA, 25 bp, Homo sapien
tacccagttggagtgtgaactctca

SEQ ID NO: 1152861 - DNA, 25 bp, Homo sapien
ttcatgtgcacctcggaaaataagg

SEQ ID NO: 1152862 - DNA, 25 bp, Homo sapien
atttcatgtgcacctcggaaaataa

SEQ ID NO: 1152863 - DNA, 25 bp, Homo sapien
tcatgtgcacctcggaaaataaggc

SEQ ID NO: 1152864 - DNA, 25 bp, Homo sapien
tgtgcacctcggaaaataaggcaaa

SEQ ID NO: 1152865 - DNA, 25 bp, Homo sapien
cagagactcgaactcagatggctgg

SEQ ID NO: 1152866 - DNA, 25 bp, Homo sapien
cacagagactcgaactcagatggct

SEQ ID NO: 1152867 - DNA, 25 bp, Homo sapien
agagactcgaactcagatggctgga

SEQ ID NO: 1152868 - DNA, 25 bp, Homo sapien
ttccacagagactcgaactcagatg

SEQ ID NO: 1152869 - DNA, 25 bp, Homo sapien
tcgcggggttcagacagcgggagta

SEQ ID NO: 1152870 - DNA, 25 bp, Homo sapien
agcttctgaagaacgtcagcggaat

SEQ ID NO: 1152871 - DNA, 25 bp, Homo sapien
aggggacgaacagcgcgggggacat

SEQ ID NO: 1152872 - DNA, 25 bp, Homo sapien
gagcttctgaagaacgtcagcggaa

SEQ ID NO: 1152873 - DNA, 25 bp, Homo sapien
ccaactggatgatttcgcaatttcc

SEQ ID NO: 1152874 - DNA, 25 bp, Homo sapien
ggatgatttcgcaatttccctatga

SEQ ID NO: 1152875 - DNA, 25 bp, Homo sapien
actggatgatttcgcaatttcccta

SEQ ID NO: 1152876 - DNA, 25 bp, Homo sapien
atttcgcaatttccctatgatccgg

SEQ ID NO: 1152877 - DNA, 25 bp, Homo sapien
caggcctccgatagcacggggccag

SEQ ID NO: 1152878 - DNA, 25 bp, Homo sapien
aggcctccgatagcacggggccagg

SEQ ID NO: 1152879 - DNA, 25 bp, Homo sapien
gggggtgtccaggcctccgatagca

SEQ ID NO: 1152880 - DNA, 25 bp, Homo sapien
gtgtccaggcctccgatagcacggg

SEQ ID NO: 1152881 - DNA, 25 bp, Homo sapien
gacaatggatgccattacgagattt

SEQ ID NO: 1152882 - DNA, 25 bp, Homo sapien
attgaagggcggcagcctttttagt

SEQ ID NO: 1152883 - DNA, 25 bp, Homo sapien
cattacgagatttcccgagtgaaag

SEQ ID NO: 1152884 - DNA, 25 bp, Homo sapien
tctaggattgaagggcggcagcctt

SEQ ID NO: 1152885 - DNA, 25 bp, Homo sapien
gcgacttttaggaccggcaatggag

SEQ ID NO: 1152886 - DNA, 25 bp, Homo sapien
gacgcaggagctagaaattcggcat

SEQ ID NO: 1152887 - DNA, 25 bp, Homo sapien
tcttgggacgaacgaatagatttct

SEQ ID NO: 1152888 - DNA, 25 bp, Homo sapien
tccgaagcttagtgaaacggcgact

SEQ ID NO: 1152889 - DNA, 25 bp, Homo sapien
gggagccccaccgtcagagactcgc

SEQ ID NO: 1152890 - DNA, 25 bp, Homo sapien
ccaccgtcagagactcgcccctcag

SEQ ID NO: 1152891 - DNA, 25 bp, Homo sapien
gtcagagactcgcccctcagagctg

SEQ ID NO: 1152892 - DNA, 25 bp, Homo sapien
gggggagccccaccgtcagagactc

SEQ ID NO: 1152893 - DNA, 25 bp, Homo sapien
agactgcagcgtttttcagtccttc

SEQ ID NO: 1152894 - DNA, 25 bp, Homo sapien
cttgagcgcctggagcgacatgtta

SEQ ID NO: 1152895 - DNA, 25 bp, Homo sapien
actcccgcatcctccaaacttagcc

SEQ ID NO: 1152896 - DNA, 25 bp, Homo sapien
cgacatgttagtttgctcccaagac

SEQ ID NO: 1152897 - DNA, 25 bp, Homo sapien
gttgtgatcaattatttgtaaagag

SEQ ID NO: 1152898 - DNA, 25 bp, Homo sapien
acatcatgccgagtgatgaaaagag

SEQ ID NO: 1152899 - DNA, 25 bp, Homo sapien
ggcatcctgtgtggcgccatcaagg

SEQ ID NO: 1152900 - DNA, 25 bp, Homo sapien
caaaaacatcatgccgagtgatgaa

SEQ ID NO: 1152901 - DNA, 25 bp, Homo sapien
gtgtggcgccatcaaggtgaatttc

SEQ ID NO: 1152902 - DNA, 25 bp, Homo sapien
tgtggacgtgctgatcctgcgatta

SEQ ID NO: 1152903 - DNA, 25 bp, Homo sapien
cagggcgttgcttttccattgcact

SEQ ID NO: 1152904 - DNA, 25 bp, Homo sapien
catcgcagaggacgttatgaaggtt

SEQ ID NO: 1152905 - DNA, 25 bp, Homo sapien
tcctgcgattaacccaaatgggaga

SEQ ID NO: 1152906 - DNA, 25 bp, Homo sapien
tcccttgggctggtgataaaggtcc

SEQ ID NO: 1152907 - DNA, 25 bp, Homo sapien
tgaaagtttccaaagatactgccac

SEQ ID NO: 1152908 - DNA, 25 bp, Homo sapien
ccaattgaaatgagaaagattcttc

SEQ ID NO: 1152909 - DNA, 25 bp, Homo sapien
aaagatactgccactggccgatcaa

SEQ ID NO: 1152910 - DNA, 25 bp, Homo sapien
gagattacctcagtggatggcctgg

SEQ ID NO: 1152911 - DNA, 25 bp, Homo sapien
tgagctgggaaccatgaacacagag

SEQ ID NO: 1152912 - DNA, 25 bp, Homo sapien
gaaccagtggttcatgctgcatgga

SEQ ID NO: 1152913 - DNA, 25 bp, Homo sapien
gaactctcagtctagtgaccagcga

SEQ ID NO: 1152914 - DNA, 25 bp, Homo sapien
agcctcagcgctgctacctcttgga

SEQ ID NO: 1152915 - DNA, 25 bp, Homo sapien
tgcctcccacaaagtgagcagatgt

SEQ ID NO: 1152916 - DNA, 25 bp, Homo sapien
atcctgatttggtgcgtcaagagct

SEQ ID NO: 1152917 - DNA, 25 bp, Homo sapien
atttggtgcgtcaagagctgcctcc

SEQ ID NO: 1152918 - DNA, 25 bp, Homo sapien
tctgattgcgaaagtccaaggaaat

SEQ ID NO: 1152919 - DNA, 25 bp, Homo sapien
aattgaaagcagtaggagccatcgt

SEQ ID NO: 1152920 - DNA, 25 bp, Homo sapien
cccagaagagtcatgttcacattcc

SEQ ID NO: 1152921 - DNA, 25 bp, Homo sapien
gagccatcgtctttgcaagtccagt

SEQ ID NO: 1152922 - DNA, 25 bp, Homo sapien
cagggtgctcaccattaacccatgg

SEQ ID NO: 1152923 - DNA, 25 bp, Homo sapien
tccagggtgctcaccattaacccat

SEQ ID NO: 1152924 - DNA, 25 bp, Homo sapien
agggtgctcaccattaacccatgga

SEQ ID NO: 1152925 - DNA, 25 bp, Homo sapien
agtccagggtgctcaccattaaccc

SEQ ID NO: 1152926 - DNA, 25 bp, Homo sapien
gtacgaagggcaaatgtaaaccaca

SEQ ID NO: 1152927 - DNA, 25 bp, Homo sapien
gagggactaggggatttgcagcagc

SEQ ID NO: 1152928 - DNA, 25 bp, Homo sapien
ccaggacttggtacgaagggcaaat

SEQ ID NO: 1152929 - DNA, 25 bp, Homo sapien
gacttggtacgaagggcaaatgtaa

SEQ ID NO: 1152930 - DNA, 25 bp, Homo sapien
gggacttgttcggttgctgggacgc

SEQ ID NO: 1152931 - DNA, 25 bp, Homo sapien
ttcggttgctgggacgctggctgcg

SEQ ID NO: 1152932 - DNA, 25 bp, Homo sapien
tgactccgatgggatgtttgggcaa

SEQ ID NO: 1152933 - DNA, 25 bp, Homo sapien
gggaccaggattggtgactccgatg

SEQ ID NO: 1152934 - DNA, 25 bp, Homo sapien
tggatgcgattacgagatttcccga

SEQ ID NO: 1152935 - DNA, 25 bp, Homo sapien
gccgcagcccttttagtgtaggaaa

SEQ ID NO: 1152936 - DNA, 25 bp, Homo sapien
caaaaagacaatggatgcgattacg

SEQ ID NO: 1152937 - DNA, 25 bp, Homo sapien
gtctagcactgaggggccgcagccc

SEQ ID NO: 1152938 - DNA, 25 bp, Homo sapien
attgttgctctttgactgcccagtt

SEQ ID NO: 1152939 - DNA, 25 bp, Homo sapien
ttttccatcctaggccctgcagtcc

SEQ ID NO: 1152940 - DNA, 25 bp, Homo sapien
gcagtcaacctctacatattgttgc

SEQ ID NO: 1152941 - DNA, 25 bp, Homo sapien
tgactgcccagttttccatcctagg

SEQ ID NO: 1152942 - DNA, 25 bp, Homo sapien
atctgtagctagttgtgataattgg

SEQ ID NO: 1152943 - DNA, 25 bp, Homo sapien
tctgtagctagttgtgataattggt

SEQ ID NO: 1152944 - DNA, 25 bp, Homo sapien
aatctgtagctagttgtgataattg

SEQ ID NO: 1152945 - DNA, 25 bp, Homo sapien
ttgcgcgtgggaagtgaccgtgcgt

SEQ ID NO: 1152946 - DNA, 25 bp, Homo sapien
agcaagtccaggaccgccggttgga

SEQ ID NO: 1152947 - DNA, 25 bp, Homo sapien
tggacgtgatagtcccagctgtgtg

SEQ ID NO: 1152948 - DNA, 25 bp, Homo sapien
tgcttcgccacggaggatttctcct

SEQ ID NO: 1152949 - DNA, 25 bp, Homo sapien
agagggtggggcagaagagcagagc

SEQ ID NO: 1152950 - DNA, 25 bp, Homo sapien
gggtggggcagaagagcagagccgg

SEQ ID NO: 1152951 - DNA, 25 bp, Homo sapien
tcatcggctgaggtggcagagggtg

SEQ ID NO: 1152952 - DNA, 25 bp, Homo sapien
gtggggcagaagagcagagccggac

SEQ ID NO: 1152953 - DNA, 25 bp, Homo sapien
ttctgacagcccctttcaaggtaaa

SEQ ID NO: 1152954 - DNA, 25 bp, Homo sapien
tcccaacctgcggatctccaatgag

SEQ ID NO: 1152955 - DNA, 25 bp, Homo sapien
caaggtcgtcctggttccagaatct

SEQ ID NO: 1152956 - DNA, 25 bp, Homo sapien
ccccaggcggttcaggtatgtgtcg

SEQ ID NO: 1152957 - DNA, 25 bp, Homo sapien
tccaaagccttgcacagttgtactg

SEQ ID NO: 1152958 - DNA, 25 bp, Homo sapien
ttctcaaatggcactgtaaattcat

SEQ ID NO: 1152959 - DNA, 25 bp, Homo sapien
cccttctcaaatggcactgtaaatt

SEQ ID NO: 1152960 - DNA, 25 bp, Homo sapien
cagtaccctggcaaattccttaata

SEQ ID NO: 1152961 - DNA, 25 bp, Homo sapien
ctgacacgcgtcagtaccctggcaa

SEQ ID NO: 1152962 - DNA, 25 bp, Homo sapien
cgagccttgggagcgggctcaggac

SEQ ID NO: 1152963 - DNA, 25 bp, Homo sapien
tcgcctcgaaggagttcccgagcct

SEQ ID NO: 1152964 - DNA, 25 bp, Homo sapien
ggctcaggaccgctggtccggccgg

SEQ ID NO: 1152965 - DNA, 25 bp, Homo sapien
tcaggaccgctggtccggccggaga

SEQ ID NO: 1152966 - DNA, 25 bp, Homo sapien
ggttggtcggctgactggcagaaag

SEQ ID NO: 1152967 - DNA, 25 bp, Homo sapien
cggctgactggcagaaaggcagatg

SEQ ID NO: 1152968 - DNA, 25 bp, Homo sapien
gctgactggcagaaaggcagatggg

SEQ ID NO: 1152969 - DNA, 25 bp, Homo sapien
gcagcgggttggtcggctgactggc

SEQ ID NO: 1152970 - DNA, 25 bp, Homo sapien
aatgccatggtctccgtgaattgat

SEQ ID NO: 1152971 - DNA, 25 bp, Homo sapien
gagtaataactctgtcccctacatg

SEQ ID NO: 1152972 - DNA, 25 bp, Homo sapien
gcctgtgtcagttaaactctttact

SEQ ID NO: 1152973 - DNA, 25 bp, Homo sapien
tacatgtcatggctagcctgtgtca

SEQ ID NO: 1152974 - DNA, 25 bp, Homo sapien
gagcagctgcacctggccttgcttg

SEQ ID NO: 1152975 - DNA, 25 bp, Homo sapien
ctggcattacagatgtgagcagctg

SEQ ID NO: 1152976 - DNA, 25 bp, Homo sapien
tgtgagcagctgcacctggccttgc

SEQ ID NO: 1152977 - DNA, 25 bp, Homo sapien
ggcattacagatgtgagcagctgca

SEQ ID NO: 1152978 - DNA, 25 bp, Homo sapien
ctacatagaaatcgccctctccgtg

SEQ ID NO: 1152979 - DNA, 25 bp, Homo sapien
atctacatagaaatcgccctctccg

SEQ ID NO: 1152980 - DNA, 25 bp, Homo sapien
atagaaatcgccctctccgtgatgt

SEQ ID NO: 1152981 - DNA, 25 bp, Homo sapien
gaaatcgccctctccgtgatgtcac

SEQ ID NO: 1152982 - DNA, 25 bp, Homo sapien
agagtaaaattgctaagccttgccc

SEQ ID NO: 1152983 - DNA, 25 bp, Homo sapien
cagagtaaaattgctaagccttgcc

SEQ ID NO: 1152984 - DNA, 25 bp, Homo sapien
gagtaaaattgctaagccttgccct

SEQ ID NO: 1152985 - DNA, 25 bp, Homo sapien
gacgggtccaccatatttgaccaca

SEQ ID NO: 1152986 - DNA, 25 bp, Homo sapien
ctccagagctcgagcggtattaaca

SEQ ID NO: 1152987 - DNA, 25 bp, Homo sapien
gcagtaagccatgcactccagtgaa

SEQ ID NO: 1152988 - DNA, 25 bp, Homo sapien
ttacagtgggctcccatagggaaaa

SEQ ID NO: 1152989 - DNA, 25 bp, Homo sapien
catccctggatgggcttgcaccacc

SEQ ID NO: 1152990 - DNA, 25 bp, Homo sapien
caagacaaaggtacctaagcttaga

SEQ ID NO: 1152991 - DNA, 25 bp, Homo sapien
atttcatcagcatcccgcaactctg

SEQ ID NO: 1152992 - DNA, 25 bp, Homo sapien
gcatcccgcaactctgagaatcctt

SEQ ID NO: 1152993 - DNA, 25 bp, Homo sapien
gagaatccttagccacaaaaacaag

SEQ ID NO: 1152994 - DNA, 25 bp, Homo sapien
ttctgtttgcacttttccagttcag

SEQ ID NO: 1152995 - DNA, 25 bp, Homo sapien
caaaacaagtggtggcagatactgc

SEQ ID NO: 1152996 - DNA, 25 bp, Homo sapien
aggcagtagctttggatgtcaggaa

SEQ ID NO: 1152997 - DNA, 25 bp, Homo sapien
gagcgcaagtactgattggtttcca

SEQ ID NO: 1152998 - DNA, 25 bp, Homo sapien
cggagccttgcagctgacctcggca

SEQ ID NO: 1152999 - DNA, 25 bp, Homo sapien
gctgacctcggcaattcggccagct

SEQ ID NO: 1153000 - DNA, 25 bp, Homo sapien
cagattctataaggtctttgcactc

SEQ ID NO: 1153001 - DNA, 25 bp, Homo sapien
ttgcagctgacctcggcaattcggc

SEQ ID NO: 1153002 - DNA, 25 bp, Homo sapien
gagaaggccctcaaaagacttgact

SEQ ID NO: 1153003 - DNA, 25 bp, Homo sapien
tggcaagttttctgacaaggatctc

SEQ ID NO: 1153004 - DNA, 25 bp, Homo sapien
gaatctctgtctctggtagtaggca

SEQ ID NO: 1153005 - DNA, 25 bp, Homo sapien
tgactgtgttcttcacatgctgggt

SEQ ID NO: 1153006 - DNA, 25 bp, Homo sapien
acttcagctcagtagttcaagacaa

SEQ ID NO: 1153007 - DNA, 25 bp, Homo sapien
gcaggtggattacttcagctcagta

SEQ ID NO: 1153008 - DNA, 25 bp, Homo sapien
gtccaaagcaggtggattacttcag

SEQ ID NO: 1153009 - DNA, 25 bp, Homo sapien
ccagcttgggtaagagagcaagatt

SEQ ID NO: 1153010 - DNA, 25 bp, Homo sapien
tgtgcagaaaccagataggcatctc

SEQ ID NO: 1153011 - DNA, 25 bp, Homo sapien
tctgggacctttaacctcttgagtc

SEQ ID NO: 1153012 - DNA, 25 bp, Homo sapien
ccctagctctaaatacttggtatgg

SEQ ID NO: 1153013 - DNA, 25 bp, Homo sapien
aaaaggacacattgtataatcagtc

SEQ ID NO: 1153014 - DNA, 25 bp, Homo sapien
ctgtttgaagtccctccaggacttt

SEQ ID NO: 1153015 - DNA, 25 bp, Homo sapien
gaagtccctccaggactttatccat

SEQ ID NO: 1153016 - DNA, 25 bp, Homo sapien
tttgaagtccctccaggactttatc

SEQ ID NO: 1153017 - DNA, 25 bp, Homo sapien
tgtttgaagtccctccaggacttta

SEQ ID NO: 1153018 - DNA, 25 bp, Homo sapien
tttttcttatcaaaggagcactcac

SEQ ID NO: 1153019 - DNA, 25 bp, Homo sapien
ctgagagattgatggagctttattt

SEQ ID NO: 1153020 - DNA, 25 bp, Homo sapien
ttatttttcttatcaaaggagcact

SEQ ID NO: 1153021 - DNA, 25 bp, Homo sapien
ctactgagagattgatggagcttta

SEQ ID NO: 1153022 - DNA, 25 bp, Homo sapien
gctaccgctgtctctggatctcatc

SEQ ID NO: 1153023 - DNA, 25 bp, Homo sapien
caggtgctaccgctgtctctggatc

SEQ ID NO: 1153024 - DNA, 25 bp, Homo sapien
tttccttcaggtgctaccgctgtct

SEQ ID NO: 1153025 - DNA, 25 bp, Homo sapien
cttcaggtgctaccgctgtctctgg

SEQ ID NO: 1153026 - DNA, 25 bp, Homo sapien
tcattatacagctggacgatggaat

SEQ ID NO: 1153027 - DNA, 25 bp, Homo sapien
gaatctatgatgtgcctgtagagtt

SEQ ID NO: 1153028 - DNA, 25 bp, Homo sapien
tcgggggagtctccggtgttctctg

SEQ ID NO: 1153029 - DNA, 25 bp, Homo sapien
gggagtctccggtgttctctgagaa

SEQ ID NO: 1153030 - DNA, 25 bp, Homo sapien
tatctatggatgtaggcatcactgt

SEQ ID NO: 1153031 - DNA, 25 bp, Homo sapien
gcttctcggagatggagctttcaaa

SEQ ID NO: 1153032 - DNA, 25 bp, Homo sapien
caacatcagttgttacctgaaacaa

SEQ ID NO: 1153033 - DNA, 25 bp, Homo sapien
ttaatcttgattacaagtccttgcc

SEQ ID NO: 1153034 - DNA, 25 bp, Homo sapien
gagcataaagacactaccactggga

SEQ ID NO: 1153035 - DNA, 25 bp, Homo sapien
tctgacccagaagataaagacatcc

SEQ ID NO: 1153036 - DNA, 25 bp, Homo sapien
tctccagtgctaggcagggtctatg

SEQ ID NO: 1153037 - DNA, 25 bp, Homo sapien
tcccaaccccattgaacagagcagg

SEQ ID NO: 1153038 - DNA, 25 bp, Homo sapien
gtggaactccacatctatgttcatg

SEQ ID NO: 1153039 - DNA, 25 bp, Homo sapien
caggtatagttgtgccggatgtgga

SEQ ID NO: 1153040 - DNA, 25 bp, Homo sapien
atagttgtgccggatgtggaactcc

SEQ ID NO: 1153041 - DNA, 25 bp, Homo sapien
gccggcaacttgttccaggtatagt

SEQ ID NO: 1153042 - DNA, 25 bp, Homo sapien
gcagatactgtacaggacaacctgc

SEQ ID NO: 1153043 - DNA, 25 bp, Homo sapien
tctgtatcgtaactgattgcagata

SEQ ID NO: 1153044 - DNA, 25 bp, Homo sapien
acaggacaacctgcttttcatattc

SEQ ID NO: 1153045 - DNA, 25 bp, Homo sapien
gacatgtttaagttatttctgtatc

SEQ ID NO: 1153046 - DNA, 25 bp, Homo sapien
gtaagggtacagcatgagatgatct

SEQ ID NO: 1153047 - DNA, 25 bp, Homo sapien
ggtaagggtacagcatgagatgatc

SEQ ID NO: 1153048 - DNA, 25 bp, Homo sapien
tccactggctttattggtagaagat

SEQ ID NO: 1153049 - DNA, 25 bp, Homo sapien
ccactggctttattggtagaagatc

SEQ ID NO: 1153050 - DNA, 25 bp, Homo sapien
cactggctttattggtagaagatca

SEQ ID NO: 1153051 - DNA, 25 bp, Homo sapien
atgtgatatatccagcctgcaccac

SEQ ID NO: 1153052 - DNA, 25 bp, Homo sapien
gatatatccagcctgcaccacccac

SEQ ID NO: 1153053 - DNA, 25 bp, Homo sapien
cttatgtgatatatccagcctgcac

SEQ ID NO: 1153054 - DNA, 25 bp, Homo sapien
tgatatatccagcctgcaccaccca

SEQ ID NO: 1153055 - DNA, 25 bp, Homo sapien
acatttctcaggcaaagtgtgtatc

SEQ ID NO: 1153056 - DNA, 25 bp, Homo sapien
tgatttctcaggcacatttctcagg

SEQ ID NO: 1153057 - DNA, 25 bp, Homo sapien
ttctcaggcaaagtgtgtatcttga

SEQ ID NO: 1153058 - DNA, 25 bp, Homo sapien
tttctcaggcacatttctcaggcaa

SEQ ID NO: 1153059 - DNA, 25 bp, Homo sapien
gatcttcttgactatttgtatcagt

SEQ ID NO: 1153060 - DNA, 25 bp, Homo sapien
ggatcttcttgactatttgtatcag

SEQ ID NO: 1153061 - DNA, 25 bp, Homo sapien
tggatcttcttgactatttgtatca

SEQ ID NO: 1153062 - DNA, 25 bp, Homo sapien
ggccggatttcattggtgaggggag

SEQ ID NO: 1153063 - DNA, 25 bp, Homo sapien
tttcattggtgaggggagccatgga

SEQ ID NO: 1153064 - DNA, 25 bp, Homo sapien
tcccatcattaagaaggcagtaaga

SEQ ID NO: 1153065 - DNA, 25 bp, Homo sapien
cataattgggttggtctggctgtgc

SEQ ID NO: 1153066 - DNA, 25 bp, Homo sapien
tatatctggcagtttttgaggtctt

SEQ ID NO: 1153067 - DNA, 25 bp, Homo sapien
agtgatatgataaatgtaccgttta

SEQ ID NO: 1153068 - DNA, 25 bp, Homo sapien
gatggtggtccttgtccagtgatat

SEQ ID NO: 1153069 - DNA, 25 bp, Homo sapien
gaggtcttgtacctttggacaataa

SEQ ID NO: 1153070 - DNA, 25 bp, Homo sapien
atgttattagcaatcgatcataact

SEQ ID NO: 1153071 - DNA, 25 bp, Homo sapien
taaagcatcattcaacatcgtgagc

SEQ ID NO: 1153072 - DNA, 25 bp, Homo sapien
catcgtgagcacatttgaggtagga

SEQ ID NO: 1153073 - DNA, 25 bp, Homo sapien
ggtaggaactactccaggatcatga

SEQ ID NO: 1153074 - DNA, 25 bp, Homo sapien
catggacagtttctcctatcccatg

SEQ ID NO: 1153075 - DNA, 25 bp, Homo sapien
gaacacccatattgacacgagtgaa

SEQ ID NO: 1153076 - DNA, 25 bp, Homo sapien
gacagtttctcctatcccatgcaga

SEQ ID NO: 1153077 - DNA, 25 bp, Homo sapien
gcaatgctttatgaacacccatatt

SEQ ID NO: 1153078 - DNA, 25 bp, Homo sapien
ccagaagccaaatcaggttttcctc

SEQ ID NO: 1153079 - DNA, 25 bp, Homo sapien
ttctatttgcaagttggatggaaac

SEQ ID NO: 1153080 - DNA, 25 bp, Homo sapien
tttgcaagttggatggaaacattca

SEQ ID NO: 1153081 - DNA, 25 bp, Homo sapien
ttcctctctcatcagaagcatcact

SEQ ID NO: 1153082 - DNA, 25 bp, Homo sapien
tccaaagcacagctcgagaggaacc

SEQ ID NO: 1153083 - DNA, 25 bp, Homo sapien
gaacccaatctgcttctgttgtggc

SEQ ID NO: 1153084 - DNA, 25 bp, Homo sapien
gaacagtggaattccaaagcacagc

SEQ ID NO: 1153085 - DNA, 25 bp, Homo sapien
gtttaattcggaactgaacagtgga

SEQ ID NO: 1153086 - DNA, 25 bp, Homo sapien
taagttatttagcgcaattttccta

SEQ ID NO: 1153087 - DNA, 25 bp, Homo sapien
agttatttagcgcaattttcctaca

SEQ ID NO: 1153088 - DNA, 25 bp, Homo sapien
tttcccatgggattgcaaggcagct

SEQ ID NO: 1153089 - DNA, 25 bp, Homo sapien
attcccacatgtcaggatgccttca

SEQ ID NO: 1153090 - DNA, 25 bp, Homo sapien
gagcttgtgtgtcttgacattccca

SEQ ID NO: 1153091 - DNA, 25 bp, Homo sapien
tcctgtgagctagcattgtttccca

SEQ ID NO: 1153092 - DNA, 25 bp, Homo sapien
gaactactctttatcttctactgta

SEQ ID NO: 1153093 - DNA, 25 bp, Homo sapien
tctttgattaacatctcactgacac

SEQ ID NO: 1153094 - DNA, 25 bp, Homo sapien
gggatttaatattgctggtctcagc

SEQ ID NO: 1153095 - DNA, 25 bp, Homo sapien
tactgtaagagatatacaacatact

SEQ ID NO: 1153096 - DNA, 25 bp, Homo sapien
caggtttgactacaatgcagtgtga

SEQ ID NO: 1153097 - DNA, 25 bp, Homo sapien
gaatgcttgaaattaggactgaccc

SEQ ID NO: 1153098 - DNA, 25 bp, Homo sapien
ctactgattgcttagctgtggacca

SEQ ID NO: 1153099 - DNA, 25 bp, Homo sapien
ccatgtggttgctgtcgactggtca

SEQ ID NO: 1153100 - DNA, 25 bp, Homo sapien
tctgcctatggagaagtcacctttt

SEQ ID NO: 1153101 - DNA, 25 bp, Homo sapien
agataagtacatgagagtaaatcac

SEQ ID NO: 1153102 - DNA, 25 bp, Homo sapien
tgtagataagtacatgagagtaaat

SEQ ID NO: 1153103 - DNA, 25 bp, Homo sapien
taagtacatgagagtaaatcacatt

SEQ ID NO: 1153104 - DNA, 25 bp, Homo sapien
gataagtacatgagagtaaatcaca

SEQ ID NO: 1153105 - DNA, 25 bp, Homo sapien
cgtagatattgactgggagacccaa

SEQ ID NO: 1153106 - DNA, 25 bp, Homo sapien
taagctttagggaaccacatgccac

SEQ ID NO: 1153107 - DNA, 25 bp, Homo sapien
cacattagttgggaagcaaacccct

SEQ ID NO: 1153108 - DNA, 25 bp, Homo sapien
gagattgaagagtgaagtccctgct

SEQ ID NO: 1153109 - DNA, 25 bp, Homo sapien
ggtacctgattagaagtccgtcttc

SEQ ID NO: 1153110 - DNA, 25 bp, Homo sapien
tctctggtacctgattagaagtccg

SEQ ID NO: 1153111 - DNA, 25 bp, Homo sapien
cagagccctctctggtacctgatta

SEQ ID NO: 1153112 - DNA, 25 bp, Homo sapien
tctcatagggaagtgttagagatgg

SEQ ID NO: 1153113 - DNA, 25 bp, Homo sapien
actttcagccaagaaggtagtgtga

SEQ ID NO: 1153114 - DNA, 25 bp, Homo sapien
tggactgctctggaattccgagtgt

SEQ ID NO: 1153115 - DNA, 25 bp, Homo sapien
ctggccatggactgctctggaattc

SEQ ID NO: 1153116 - DNA, 25 bp, Homo sapien
ggccagtggttaccaaagccaagga

SEQ ID NO: 1153117 - DNA, 25 bp, Homo sapien
agctttttgagcatgcagacactac

SEQ ID NO: 1153118 - DNA, 25 bp, Homo sapien
ttatttggtggtcctcagagtggca

SEQ ID NO: 1153119 - DNA, 25 bp, Homo sapien
aaacgtatttcatcacactcccgag

SEQ ID NO: 1153120 - DNA, 25 bp, Homo sapien
tctgccttgtggacttgaggtggaa

SEQ ID NO: 1153121 - DNA, 25 bp, Homo sapien
ggtcctacacattatatctaaagga

SEQ ID NO: 1153122 - DNA, 25 bp, Homo sapien
taaaggatcttcgtatatgactact

SEQ ID NO: 1153123 - DNA, 25 bp, Homo sapien
taaattaatgctggtcctacacatt

SEQ ID NO: 1153124 - DNA, 25 bp, Homo sapien
ttaacaattcaatgagaggagactt

SEQ ID NO: 1153125 - DNA, 25 bp, Homo sapien
tcttagcgtgttccgtgttcgggta

SEQ ID NO: 1153126 - DNA, 25 bp, Homo sapien
tttggttgcttgtttgattactgtg

SEQ ID NO: 1153127 - DNA, 25 bp, Homo sapien
tatttatgggtgtagagttgcttca

SEQ ID NO: 1153128 - DNA, 25 bp, Homo sapien
ttggcggccccagaaggtatttatg

SEQ ID NO: 1153129 - DNA, 25 bp, Homo sapien
ggattcctcggattcccaaggcacc

SEQ ID NO: 1153130 - DNA, 25 bp, Homo sapien
tagtcccctccgactggcaaagaga

SEQ ID NO: 1153131 - DNA, 25 bp, Homo sapien
agggattcctcggattcccaaggca

SEQ ID NO: 1153132 - DNA, 25 bp, Homo sapien
ggcagtgcgtggtatttccagcccc

SEQ ID NO: 1153133 - DNA, 25 bp, Homo sapien
agggtttgcacgtccgcattccggg

SEQ ID NO: 1153134 - DNA, 25 bp, Homo sapien
ggtggagggtttgcacgtccgcatt

SEQ ID NO: 1153135 - DNA, 25 bp, Homo sapien
tggagggtttgcacgtccgcattcc

SEQ ID NO: 1153136 - DNA, 25 bp, Homo sapien
ggagggtttgcacgtccgcattccg

SEQ ID NO: 1153137 - DNA, 25 bp, Homo sapien
gaattcagaaggatatcgacgtcgt

SEQ ID NO: 1153138 - DNA, 25 bp, Homo sapien
cgtgatccagaagtccagagctgag

SEQ ID NO: 1153139 - DNA, 25 bp, Homo sapien
taatggggatgtgttcaaggcaaga

SEQ ID NO: 1153140 - DNA, 25 bp, Homo sapien
tatcgacgtcgtgatccagaagtcc

SEQ ID NO: 1153141 - DNA, 25 bp, Homo sapien
tctggaaatggaaagccgacctccc

SEQ ID NO: 1153142 - DNA, 25 bp, Homo sapien
agctgggaggtcacatctggaaatg

SEQ ID NO: 1153143 - DNA, 25 bp, Homo sapien
cacatctggaaatggaaagccgacc

SEQ ID NO: 1153144 - DNA, 25 bp, Homo sapien
ctcctctcacccaggatcacttccg

SEQ ID NO: 1153145 - DNA, 25 bp, Homo sapien
ataattcctttagaaagtggagtcg

SEQ ID NO: 1153146 - DNA, 25 bp, Homo sapien
agctcccggcgcgagtggaggtcgg

SEQ ID NO: 1153147 - DNA, 25 bp, Homo sapien
ggagtcgaattcataaaagtgatgg

SEQ ID NO: 1153148 - DNA, 25 bp, Homo sapien
gaaagtggagtcgaattcataaaag

SEQ ID NO: 1153149 - DNA, 25 bp, Homo sapien
gaagaccctggaacgtgccagttga

SEQ ID NO: 1153150 - DNA, 25 bp, Homo sapien
tttaggaagaccctggaacgtgcca

SEQ ID NO: 1153151 - DNA, 25 bp, Homo sapien
gaccctggaacgtgccagttgattc

SEQ ID NO: 1153152 - DNA, 25 bp, Homo sapien
tggaacgtgccagttgattctgaca

SEQ ID NO: 1153153 - DNA, 25 bp, Homo sapien
cctctgggctcagaaactgtcttta

SEQ ID NO: 1153154 - DNA, 25 bp, Homo sapien
tactaacaaagattccttgcttggc

SEQ ID NO: 1153155 - DNA, 25 bp, Homo sapien
tagaaatcttattgatcagctgccc

SEQ ID NO: 1153156 - DNA, 25 bp, Homo sapien
tcccacattaaaggcctgatagctc

SEQ ID NO: 1153157 - DNA, 25 bp, Homo sapien
tacgtttgtttgtagcccaggtgcc

SEQ ID NO: 1153158 - DNA, 25 bp, Homo sapien
gcaggagtattagcagtaccaggca

SEQ ID NO: 1153159 - DNA, 25 bp, Homo sapien
gtttccagcaggagtattagcagta

SEQ ID NO: 1153160 - DNA, 25 bp, Homo sapien
cttacgtttgtttgtagcccaggtg

SEQ ID NO: 1153161 - DNA, 25 bp, Homo sapien
gggaatatggtatcaaaaacagtgt

SEQ ID NO: 1153162 - DNA, 25 bp, Homo sapien
atatggtatcaaaaacagtgtcaca

SEQ ID NO: 1153163 - DNA, 25 bp, Homo sapien
cagagatactgtattcataagtaac

SEQ ID NO: 1153164 - DNA, 25 bp, Homo sapien
aatatggtatcaaaaacagtgtcac

SEQ ID NO: 1153165 - DNA, 25 bp, Homo sapien
tcgtttagataatagtatctcccct

SEQ ID NO: 1153166 - DNA, 25 bp, Homo sapien
gaacacaatggataaccctcgccct

SEQ ID NO: 1153167 - DNA, 25 bp, Homo sapien
gtcagcacatccggaacacaatgga

SEQ ID NO: 1153168 - DNA, 25 bp, Homo sapien
accaccttcgtttagataatagtat

SEQ ID NO: 1153169 - DNA, 25 bp, Homo sapien
caacgggaggacctggcccagaaga

SEQ ID NO: 1153170 - DNA, 25 bp, Homo sapien
ctgcaacgggaggacctggcccaga

SEQ ID NO: 1153171 - DNA, 25 bp, Homo sapien
ggcccagaagaggtggccttcatct

SEQ ID NO: 1153172 - DNA, 25 bp, Homo sapien
aggacctggcccagaagaggtggcc

SEQ ID NO: 1153173 - DNA, 25 bp, Homo sapien
ctgggtgggctcgaaccaccaactt

SEQ ID NO: 1153174 - DNA, 25 bp, Homo sapien
cagccgaacgcgctaaccgactacg

SEQ ID NO: 1153175 - DNA, 25 bp, Homo sapien
gaacgcgctaaccgactacgccaca

SEQ ID NO: 1153176 - DNA, 25 bp, Homo sapien
ccgaacgcgctaaccgactacgcca

SEQ ID NO: 1153177 - DNA, 25 bp, Homo sapien
tataatgaagtacttgggaaagcgg

SEQ ID NO: 1153178 - DNA, 25 bp, Homo sapien
tgggaaagcggttttcaagagtata

SEQ ID NO: 1153179 - DNA, 25 bp, Homo sapien
ccttacttataatgaagtacttggg

SEQ ID NO: 1153180 - DNA, 25 bp, Homo sapien
tttagagacaccttacttataatga

SEQ ID NO: 1153181 - DNA, 25 bp, Homo sapien
ggcaggtgtgtaaatctctgaagta

SEQ ID NO: 1153182 - DNA, 25 bp, Homo sapien
tctctgaagtacagcagctcggtgg

SEQ ID NO: 1153183 - DNA, 25 bp, Homo sapien
caggaattgccatggcaggctcgct

SEQ ID NO: 1153184 - DNA, 25 bp, Homo sapien
gagacgtaagagctaagctgggcca

SEQ ID NO: 1153185 - DNA, 25 bp, Homo sapien
tgtttttggttcgtccaactcgcca

SEQ ID NO: 1153186 - DNA, 25 bp, Homo sapien
tggttcgtccaactcgccatgacat

SEQ ID NO: 1153187 - DNA, 25 bp, Homo sapien
ttttggttcgtccaactcgccatga

SEQ ID NO: 1153188 - DNA, 25 bp, Homo sapien
ttggttcgtccaactcgccatgaca

SEQ ID NO: 1153189 - DNA, 25 bp, Homo sapien
aataacagtgtagggagaaaggtct

SEQ ID NO: 1153190 - DNA, 25 bp, Homo sapien
gtgtagggagaaaggtctatagtca

SEQ ID NO: 1153191 - DNA, 25 bp, Homo sapien
gaaaagcaaggcgatatatcacttc

SEQ ID NO: 1153192 - DNA, 25 bp, Homo sapien
tcacttcccgattcaaagcatccaa

SEQ ID NO: 1153193 - DNA, 25 bp, Homo sapien
gtgagaacaccttcaccgctggcac

SEQ ID NO: 1153194 - DNA, 25 bp, Homo sapien
cttcaccgctggcacagaaatccta

SEQ ID NO: 1153195 - DNA, 25 bp, Homo sapien
ctcctgtggggaccgcggttacaag

SEQ ID NO: 1153196 - DNA, 25 bp, Homo sapien
gttacaagcagacgctgtgtgaaag

SEQ ID NO: 1153197 - DNA, 25 bp, Homo sapien
gcagaggcttctcggaacacgcgga

SEQ ID NO: 1153198 - DNA, 25 bp, Homo sapien
ccagggaacgccataggctttcccg

SEQ ID NO: 1153199 - DNA, 25 bp, Homo sapien
gcttctcggaacacgcggatctatg

SEQ ID NO: 1153200 - DNA, 25 bp, Homo sapien
gccataggctttcccgctgtgttcc

SEQ ID NO: 1153201 - DNA, 25 bp, Homo sapien
cctccttaaatggttacatcgtaga

SEQ ID NO: 1153202 - DNA, 25 bp, Homo sapien
ccttaaatggttacatcgtagattt

SEQ ID NO: 1153203 - DNA, 25 bp, Homo sapien
tggttacatcgtagatttaaaattg

SEQ ID NO: 1153204 - DNA, 25 bp, Homo sapien
taaatggttacatcgtagatttaaa

SEQ ID NO: 1153205 - DNA, 25 bp, Homo sapien
catgtgggtcatttctccatggtga

SEQ ID NO: 1153206 - DNA, 25 bp, Homo sapien
ctccatggtgatacctattattttc

SEQ ID NO: 1153207 - DNA, 25 bp, Homo sapien
agagtctcagccctcatgtgggtca

SEQ ID NO: 1153208 - DNA, 25 bp, Homo sapien
ataagagagggcagagattggttct

SEQ ID NO: 1153209 - DNA, 25 bp, Homo sapien
tccccagcaaatggaaaggtgggtg

SEQ ID NO: 1153210 - DNA, 25 bp, Homo sapien
tggaaaggtgggtggcttgattggc

SEQ ID NO: 1153211 - DNA, 25 bp, Homo sapien
ggaaaggtgggtggcttgattggca

SEQ ID NO: 1153212 - DNA, 25 bp, Homo sapien
tgttgccatagcaattgggtgggtg

SEQ ID NO: 1153213 - DNA, 25 bp, Homo sapien
ccctcagcggctccactgttgccat

SEQ ID NO: 1153214 - DNA, 25 bp, Homo sapien
ttgccatagcaattgggtgggtgga

SEQ ID NO: 1153215 - DNA, 25 bp, Homo sapien
agttctcacggagtggcccctccct

SEQ ID NO: 1153216 - DNA, 25 bp, Homo sapien
ctgaggtaagccacccagtggccca

SEQ ID NO: 1153217 - DNA, 25 bp, Homo sapien
tgaggtaagccacccagtggcccag

SEQ ID NO: 1153218 - DNA, 25 bp, Homo sapien
aaggggcttcagtaggaacgctctc

SEQ ID NO: 1153219 - DNA, 25 bp, Homo sapien
gaaggggcttcagtaggaacgctct

SEQ ID NO: 1153220 - DNA, 25 bp, Homo sapien
agtctccactccaaggcccgtgagg

SEQ ID NO: 1153221 - DNA, 25 bp, Homo sapien
aaggcccgtgaggacaggccacctg

SEQ ID NO: 1153222 - DNA, 25 bp, Homo sapien
caaggcccgtgaggacaggccacct

SEQ ID NO: 1153223 - DNA, 25 bp, Homo sapien
tgtgttgagctttcaattgctttgc

SEQ ID NO: 1153224 - DNA, 25 bp, Homo sapien
tgaaaatgcttttgtgacatccgtt

SEQ ID NO: 1153225 - DNA, 25 bp, Homo sapien
cttttgtgacatccgttctttcttt

SEQ ID NO: 1153226 - DNA, 25 bp, Homo sapien
tcctgtgttgtgttgagctttcaat

SEQ ID NO: 1153227 - DNA, 25 bp, Homo sapien
cggcccgctcctggcgccacaggtc

SEQ ID NO: 1153228 - DNA, 25 bp, Homo sapien
tcggcccgctcctggcgccacaggt

SEQ ID NO: 1153229 - DNA, 25 bp, Homo sapien
ctgggtggacttcgctgtaaaccgt

SEQ ID NO: 1153230 - DNA, 25 bp, Homo sapien
tcgctgtaaaccgtaacttcccatc

SEQ ID NO: 1153231 - DNA, 25 bp, Homo sapien
gtggtctcgcttctcaggtccccag

SEQ ID NO: 1153232 - DNA, 25 bp, Homo sapien
ggtcagggtcctccacaggatacac

SEQ ID NO: 1153233 - DNA, 25 bp, Homo sapien
ggtccccagaggcaaccgatttctg

SEQ ID NO: 1153234 - DNA, 25 bp, Homo sapien
tccacaggatacacgaggacgtgcc

SEQ ID NO: 1153235 - DNA, 25 bp, Homo sapien
tcctggacttggtacacccggcttg

SEQ ID NO: 1153236 - DNA, 25 bp, Homo sapien
gcatcctggacttggtacacccggc

SEQ ID NO: 1153237 - DNA, 25 bp, Homo sapien
atcctggacttggtacacccggctt

SEQ ID NO: 1153238 - DNA, 25 bp, Homo sapien
ggacttggtacacccggcttgccca

SEQ ID NO: 1153239 - DNA, 25 bp, Homo sapien
agctactaacacatatcagctcaga

SEQ ID NO: 1153240 - DNA, 25 bp, Homo sapien
tgagaagatctaacaagccagaaag

SEQ ID NO: 1153241 - DNA, 25 bp, Homo sapien
acaaaaagctactaacacatatcag

SEQ ID NO: 1153242 - DNA, 25 bp, Homo sapien
agaaagacagatacagggaaatcac

SEQ ID NO: 1153243 - DNA, 25 bp, Homo sapien
gtatccctgctaaatggtacaacca

SEQ ID NO: 1153244 - DNA, 25 bp, Homo sapien
gggtaaccagagtatccctgctaaa

SEQ ID NO: 1153245 - DNA, 25 bp, Homo sapien
tgatacattactgcacccctactag

SEQ ID NO: 1153246 - DNA, 25 bp, Homo sapien
cacccctactagaatggcaaaataa

SEQ ID NO: 1153247 - DNA, 25 bp, Homo sapien
ggaggtcaaggttgcggtcagctgt

SEQ ID NO: 1153248 - DNA, 25 bp, Homo sapien
caaggttgcggtcagctgtgattgt

SEQ ID NO: 1153249 - DNA, 25 bp, Homo sapien
cttgggaggtcaaggttgcggtcag

SEQ ID NO: 1153250 - DNA, 25 bp, Homo sapien
gtcaaggttgcggtcagctgtgatt

SEQ ID NO: 1153251 - DNA, 25 bp, Homo sapien
tggtggcacactcctatagtcgcag

SEQ ID NO: 1153252 - DNA, 25 bp, Homo sapien
tgggaaacatgttgaatcccaatct

SEQ ID NO: 1153253 - DNA, 25 bp, Homo sapien
cacactcctatagtcgcagctactc

SEQ ID NO: 1153254 - DNA, 25 bp, Homo sapien
aaatatgaaaattaagccaggcatg

SEQ ID NO: 1153255 - DNA, 25 bp, Homo sapien
tgcatctaaacaggatttgctttca

SEQ ID NO: 1153256 - DNA, 25 bp, Homo sapien
taaacaggatttgctttcagattgc

SEQ ID NO: 1153257 - DNA, 25 bp, Homo sapien
atctaaacaggatttgctttcagat

SEQ ID NO: 1153258 - DNA, 25 bp, Homo sapien
ctgcatctaaacaggatttgctttc

SEQ ID NO: 1153259 - DNA, 25 bp, Homo sapien
aagggacggtaaggtgagagcctgg

SEQ ID NO: 1153260 - DNA, 25 bp, Homo sapien
tgggatctggcagctcttcattcag

SEQ ID NO: 1153261 - DNA, 25 bp, Homo sapien
gatctggcagctcttcattcagccc

SEQ ID NO: 1153262 - DNA, 25 bp, Homo sapien
tggcagctcttcattcagcccacac

SEQ ID NO: 1153263 - DNA, 25 bp, Homo sapien
tgtgggatctggcagctcttcattc

SEQ ID NO: 1153264 - DNA, 25 bp, Homo sapien
ctggtggacggccacgtgagaagga

SEQ ID NO: 1153265 - DNA, 25 bp, Homo sapien
tggacggccacgtgagaaggataca

SEQ ID NO: 1153266 - DNA, 25 bp, Homo sapien
gacggccacgtgagaaggatacaaa

SEQ ID NO: 1153267 - DNA, 25 bp, Homo sapien
cggccacgtgagaaggatacaaaca

SEQ ID NO: 1153268 - DNA, 25 bp, Homo sapien
cgagctccctgcctacaagacagaa

SEQ ID NO: 1153269 - DNA, 25 bp, Homo sapien
caggtgcaaaccatctaggtgggca

SEQ ID NO: 1153270 - DNA, 25 bp, Homo sapien
tgatgactaggaaccactgagactc

SEQ ID NO: 1153271 - DNA, 25 bp, Homo sapien
gcagatcagttaggcagaagcagcc

SEQ ID NO: 1153272 - DNA, 25 bp, Homo sapien
aaacacaggctaacacacaaggagt

SEQ ID NO: 1153273 - DNA, 25 bp, Homo sapien
gaggtttggcactaccaacttcagg

SEQ ID NO: 1153274 - DNA, 25 bp, Homo sapien
tactagaagctgagggtagcctggc

SEQ ID NO: 1153275 - DNA, 25 bp, Homo sapien
caaggagtcacagctcacagggaag

SEQ ID NO: 1153276 - DNA, 25 bp, Homo sapien
tgagatggcgccgttgcattcgagc

SEQ ID NO: 1153277 - DNA, 25 bp, Homo sapien
gccgttgcattcgagcccaaggaaa

SEQ ID NO: 1153278 - DNA, 25 bp, Homo sapien
tggcgccgttgcattcgagcccaag

SEQ ID NO: 1153279 - DNA, 25 bp, Homo sapien
cgttgcattcgagcccaaggaaaag

SEQ ID NO: 1153280 - DNA, 25 bp, Homo sapien
caatgaggggtatttcaggcacttg

SEQ ID NO: 1153281 - DNA, 25 bp, Homo sapien
agacaatgaggggtatttcaggcac

SEQ ID NO: 1153282 - DNA, 25 bp, Homo sapien
aagaagacaatgaggggtatttcag

SEQ ID NO: 1153283 - DNA, 25 bp, Homo sapien
agaagacaatgaggggtatttcagg

SEQ ID NO: 1153284 - DNA, 25 bp, Homo sapien
gtggctgttccagagcccttgccac

SEQ ID NO: 1153285 - DNA, 25 bp, Homo sapien
ctttatgtggctgttccagagccct

SEQ ID NO: 1153286 - DNA, 25 bp, Homo sapien
tatgtggctgttccagagcccttgc

SEQ ID NO: 1153287 - DNA, 25 bp, Homo sapien
tgtggctgttccagagcccttgcca

SEQ ID NO: 1153288 - DNA, 25 bp, Homo sapien
taaatgtatgctaaccctctaagag

SEQ ID NO: 1153289 - DNA, 25 bp, Homo sapien
gagaaaactagtacaggtgcctgtc

SEQ ID NO: 1153290 - DNA, 25 bp, Homo sapien
tgactctgatcagagaacccggcca

SEQ ID NO: 1153291 - DNA, 25 bp, Homo sapien
cggccacttcattccagacttctgt

SEQ ID NO: 1153292 - DNA, 25 bp, Homo sapien
caaacaagaataggaactctttcat

SEQ ID NO: 1153293 - DNA, 25 bp, Homo sapien
aggaactctttcattatctgtagtg

SEQ ID NO: 1153294 - DNA, 25 bp, Homo sapien
cccacaaacaagaataggaactctt

SEQ ID NO: 1153295 - DNA, 25 bp, Homo sapien
caagaataggaactctttcattatc

SEQ ID NO: 1153296 - DNA, 25 bp, Homo sapien
ttaatggacactctcggaagcctca

SEQ ID NO: 1153297 - DNA, 25 bp, Homo sapien
cagtttcacaggtcgacagaggtaa

SEQ ID NO: 1153298 - DNA, 25 bp, Homo sapien
gactttaagatggtgaggttaccgc

SEQ ID NO: 1153299 - DNA, 25 bp, Homo sapien
tttgagtgcaataggagccatacgc

SEQ ID NO: 1153300 - DNA, 25 bp, Homo sapien
ttgatccataggctcacatttgatc

SEQ ID NO: 1153301 - DNA, 25 bp, Homo sapien
tccataggctcacatttgatcccaa

SEQ ID NO: 1153302 - DNA, 25 bp, Homo sapien
cataggctcacatttgatcccaact

SEQ ID NO: 1153303 - DNA, 25 bp, Homo sapien
aggctcacatttgatcccaactggc

SEQ ID NO: 1153304 - DNA, 25 bp, Homo sapien
gaatgcccataaaattattatctaa

SEQ ID NO: 1153305 - DNA, 25 bp, Homo sapien
actcagctaagcatatgggctagat

SEQ ID NO: 1153306 - DNA, 25 bp, Homo sapien
aaatttaagcctaatgcaataaaga

SEQ ID NO: 1153307 - DNA, 25 bp, Homo sapien
tgttgaacaagggacatcatcattt

SEQ ID NO: 1153308 - DNA, 25 bp, Homo sapien
gactatctgtttcatggccacctgt

SEQ ID NO: 1153309 - DNA, 25 bp, Homo sapien
caaccactgaaccaattctatgact

SEQ ID NO: 1153310 - DNA, 25 bp, Homo sapien
tctatgactatctgtttcatggcca

SEQ ID NO: 1153311 - DNA, 25 bp, Homo sapien
ccactgaaccaattctatgactatc

SEQ ID NO: 1153312 - DNA, 25 bp, Homo sapien
ttcttcaccacaacaatctccaatg

SEQ ID NO: 1153313 - DNA, 25 bp, Homo sapien
caacaatctccaatgaattgtgggc

SEQ ID NO: 1153314 - DNA, 25 bp, Homo sapien
ccaatgaattgtgggcacagaaggc

SEQ ID NO: 1153315 - DNA, 25 bp, Homo sapien
acagaaggcagacccatccctgctt

SEQ ID NO: 1153316 - DNA, 25 bp, Homo sapien
gccactgtcggctgctcatttgtcc

SEQ ID NO: 1153317 - DNA, 25 bp, Homo sapien
ccactgtcggctgctcatttgtcca

SEQ ID NO: 1153318 - DNA, 25 bp, Homo sapien
tcaattatgggttgaagagtacaca

SEQ ID NO: 1153319 - DNA, 25 bp, Homo sapien
ttgaagagtacacagagactgccag

SEQ ID NO: 1153320 - DNA, 25 bp, Homo sapien
ggttgaagagtacacagagactgcc

SEQ ID NO: 1153321 - DNA, 25 bp, Homo sapien
aattatgggttgaagagtacacaga

SEQ ID NO: 1153322 - DNA, 25 bp, Homo sapien
atggcattggggctggtacagcctc

SEQ ID NO: 1153323 - DNA, 25 bp, Homo sapien
gaaaagaaagctcagcgtaaagcac

SEQ ID NO: 1153324 - DNA, 25 bp, Homo sapien
ccccaatgctaaacctaactacaag

SEQ ID NO: 1153325 - DNA, 25 bp, Homo sapien
gcactcaaccaggagtcaagatatt

SEQ ID NO: 1153326 - DNA, 25 bp, Homo sapien
ccaatgctaaacctaactacaagtg

SEQ ID NO: 1153327 - DNA, 25 bp, Homo sapien
cgccttgtctctagacagccaagtc

SEQ ID NO: 1153328 - DNA, 25 bp, Homo sapien
tgtctctagacagccaagtcccacg

SEQ ID NO: 1153329 - DNA, 25 bp, Homo sapien
tctcaaggaaatccctcccgccttg

SEQ ID NO: 1153330 - DNA, 25 bp, Homo sapien
tcccgccttgtctctagacagccaa

SEQ ID NO: 1153331 - DNA, 25 bp, Homo sapien
gatttcccatccattacatcccaga

SEQ ID NO: 1153332 - DNA, 25 bp, Homo sapien
tcccagacacctcacaatgattagt

SEQ ID NO: 1153333 - DNA, 25 bp, Homo sapien
ttcactcttccccaagggatccaat

SEQ ID NO: 1153334 - DNA, 25 bp, Homo sapien
tgccaggtcaaaaattcccactatg

SEQ ID NO: 1153335 - DNA, 25 bp, Homo sapien
tagatttctagcattgttaacaaac

SEQ ID NO: 1153336 - DNA, 25 bp, Homo sapien
caaaagaccacttatattgagagct

SEQ ID NO: 1153337 - DNA, 25 bp, Homo sapien
ttctgcaacactactaaactcactg

SEQ ID NO: 1153338 - DNA, 25 bp, Homo sapien
gttcttcaaatctgcccttaatggg

SEQ ID NO: 1153339 - DNA, 25 bp, Homo sapien
taaacataacaactcttctgatcca

SEQ ID NO: 1153340 - DNA, 25 bp, Homo sapien
tctccccactaatttagttctttca

SEQ ID NO: 1153341 - DNA, 25 bp, Homo sapien
ctggagatcaatttacgaagaactg

SEQ ID NO: 1153342 - DNA, 25 bp, Homo sapien
caaaatgccgcttggaattattaga

SEQ ID NO: 1153343 - DNA, 25 bp, Homo sapien
agaaggtacattagctcaggaaaac

SEQ ID NO: 1153344 - DNA, 25 bp, Homo sapien
tcattgtgcagacacagtgtgtaaa

SEQ ID NO: 1153345 - DNA, 25 bp, Homo sapien
tagattttcaaaggagccataccat

SEQ ID NO: 1153346 - DNA, 25 bp, Homo sapien
ccagttgcagaagtcaaaactctct

SEQ ID NO: 1153347 - DNA, 25 bp, Homo sapien
gctgctaattgctagtatggagaaa

SEQ ID NO: 1153348 - DNA, 25 bp, Homo sapien
tgattctggctattaatctctatta

SEQ ID NO: 1153349 - DNA, 25 bp, Homo sapien
ttgttaagcatgtaatgattctggc

SEQ ID NO: 1153350 - DNA, 25 bp, Homo sapien
tgtacctgcttcattgcatgtattg

SEQ ID NO: 1153351 - DNA, 25 bp, Homo sapien
caccttcaacgtcattgtcaccatg

SEQ ID NO: 1153352 - DNA, 25 bp, Homo sapien
atctacagcctcgtggcggacggga

SEQ ID NO: 1153353 - DNA, 25 bp, Homo sapien
ggccaggtggacacctccatctaca

SEQ ID NO: 1153354 - DNA, 25 bp, Homo sapien
gcagcgaccagaggagcccctgcag

SEQ ID NO: 1153355 - DNA, 25 bp, Homo sapien
gatatactgggctgtttgtcaattt

SEQ ID NO: 1153356 - DNA, 25 bp, Homo sapien
cattgatatactgggctgtttgtca

SEQ ID NO: 1153357 - DNA, 25 bp, Homo sapien
tattcattgatatactgggctgttt

SEQ ID NO: 1153358 - DNA, 25 bp, Homo sapien
ttatattcattgatatactgggctg

SEQ ID NO: 1153359 - DNA, 25 bp, Homo sapien
acaggcaccctagtctcacctgagg

SEQ ID NO: 1153360 - DNA, 25 bp, Homo sapien
tgaaacacaggcaccctagtctcac

SEQ ID NO: 1153361 - DNA, 25 bp, Homo sapien
gcaccctagtctcacctgagggtca

SEQ ID NO: 1153362 - DNA, 25 bp, Homo sapien
aggcaccctagtctcacctgagggt

SEQ ID NO: 1153363 - DNA, 25 bp, Homo sapien
cagactctgataagagtgaggtaga

SEQ ID NO: 1153364 - DNA, 25 bp, Homo sapien
tgtggccagcgtgccaggtaaccgt

SEQ ID NO: 1153365 - DNA, 25 bp, Homo sapien
ttctcgctggacaaagggccggctg

SEQ ID NO: 1153366 - DNA, 25 bp, Homo sapien
ctgccttctcgctggacaaagggcc

SEQ ID NO: 1153367 - DNA, 25 bp, Homo sapien
gccttctcgctggacaaagggccgg

SEQ ID NO: 1153368 - DNA, 25 bp, Homo sapien
tggacaaagggccggctgataccac

SEQ ID NO: 1153369 - DNA, 25 bp, Homo sapien
ccagttgagttagaaaacatttctc

SEQ ID NO: 1153370 - DNA, 25 bp, Homo sapien
tcttctgtcggttggccaggaagcc

SEQ ID NO: 1153371 - DNA, 25 bp, Homo sapien
gaagccggccagttgagttagaaaa

SEQ ID NO: 1153372 - DNA, 25 bp, Homo sapien
ttcttctctgccaactgggggcgca

SEQ ID NO: 1153373 - DNA, 25 bp, Homo sapien
aattttatgagatctttgcactctt

SEQ ID NO: 1153374 - DNA, 25 bp, Homo sapien
atgagatctttgcactcttcatatt

SEQ ID NO: 1153375 - DNA, 25 bp, Homo sapien
aaattttatgagatctttgcactct

SEQ ID NO: 1153376 - DNA, 25 bp, Homo sapien
tttatgagatctttgcactcttcat

SEQ ID NO: 1153377 - DNA, 25 bp, Homo sapien
tgaactgtcgctcattcctcagcat

SEQ ID NO: 1153378 - DNA, 25 bp, Homo sapien
gacaaggtgctgtgtcagtctacac

SEQ ID NO: 1153379 - DNA, 25 bp, Homo sapien
caaggtgctgtgtcagtctacaccc

SEQ ID NO: 1153380 - DNA, 25 bp, Homo sapien
aggtgctgtgtcagtctacacccct

SEQ ID NO: 1153381 - DNA, 25 bp, Homo sapien
ttggacaaggtgctgtgtcagtcta

SEQ ID NO: 1153382 - DNA, 25 bp, Homo sapien
agccacctcaacttgaacatcttca

SEQ ID NO: 1153383 - DNA, 25 bp, Homo sapien
gggcagacgatttctgcactttctc

SEQ ID NO: 1153384 - DNA, 25 bp, Homo sapien
ctgggggcagacgatttctgcactt

SEQ ID NO: 1153385 - DNA, 25 bp, Homo sapien
atcttcatcgtcatcgttgtcattt

SEQ ID NO: 1153386 - DNA, 25 bp, Homo sapien
ctgtgtctaagctgggttatatttc

SEQ ID NO: 1153387 - DNA, 25 bp, Homo sapien
tatttcacatactgtggccaagcga

SEQ ID NO: 1153388 - DNA, 25 bp, Homo sapien
gcgaatgcgggtttttggcccatca

SEQ ID NO: 1153389 - DNA, 25 bp, Homo sapien
ccagagagggtgtgcctcctagata

SEQ ID NO: 1153390 - DNA, 25 bp, Homo sapien
tggctggttggagtcataagggcca

SEQ ID NO: 1153391 - DNA, 25 bp, Homo sapien
ttcctcttcctcatcatcactttca

SEQ ID NO: 1153392 - DNA, 25 bp, Homo sapien
ctgggagacactggccctttttctt

SEQ ID NO: 1153393 - DNA, 25 bp, Homo sapien
ctcttcctcatcatcactttcattt

SEQ ID NO: 1153394 - DNA, 25 bp, Homo sapien
tcttcctcatcatcactttcatttt

SEQ ID NO: 1153395 - DNA, 25 bp, Homo sapien
acatgtccacattggtgtgcttcac

SEQ ID NO: 1153396 - DNA, 25 bp, Homo sapien
atgtccacattggtgtgcttcaccc

SEQ ID NO: 1153397 - DNA, 25 bp, Homo sapien
tacatgtccacattggtgtgcttca

SEQ ID NO: 1153398 - DNA, 25 bp, Homo sapien
catgtccacattggtgtgcttcacc

SEQ ID NO: 1153399 - DNA, 25 bp, Homo sapien
agactggtacgaggccaacatttca

SEQ ID NO: 1153400 - DNA, 25 bp, Homo sapien
tgcctatgtcaacagccatgcagac

SEQ ID NO: 1153401 - DNA, 25 bp, Homo sapien
tggtacgaggccaacatttcaggag

SEQ ID NO: 1153402 - DNA, 25 bp, Homo sapien
ctgctgtaagactggtacgaggcca

SEQ ID NO: 1153403 - DNA, 25 bp, Homo sapien
ctgggccatgaactggagctttatc

SEQ ID NO: 1153404 - DNA, 25 bp, Homo sapien
actggagctttatcaccttcacaat

SEQ ID NO: 1153405 - DNA, 25 bp, Homo sapien
gaactggagctttatcaccttcaca

SEQ ID NO: 1153406 - DNA, 25 bp, Homo sapien
ggagctttatcaccttcacaatgga

SEQ ID NO: 1153407 - DNA, 25 bp, Homo sapien
gaaatctacattgatatataggttc

SEQ ID NO: 1153408 - DNA, 25 bp, Homo sapien
gtgacagtcagtccaggttggcacg

SEQ ID NO: 1153409 - DNA, 25 bp, Homo sapien
tgccttgagttcaatgtcgtgacag

SEQ ID NO: 1153410 - DNA, 25 bp, Homo sapien
gttcaatgtcgtgacagtcagtcca

SEQ ID NO: 1153411 - DNA, 25 bp, Homo sapien
caatgtcgtgacagtcagtccaggt

SEQ ID NO: 1153412 - DNA, 25 bp, Homo sapien
gagaagtagacaagggtgacactgg

SEQ ID NO: 1153413 - DNA, 25 bp, Homo sapien
agaagtagacaagggtgacactggc

SEQ ID NO: 1153414 - DNA, 25 bp, Homo sapien
tgagaagtagacaagggtgacactg

SEQ ID NO: 1153415 - DNA, 25 bp, Homo sapien
ctgagaagtagacaagggtgacact

SEQ ID NO: 1153416 - DNA, 25 bp, Homo sapien
cagatgagctaaaacaagcgcactt

SEQ ID NO: 1153417 - DNA, 25 bp, Homo sapien
tggacagatgagctaaaacaagcgc

SEQ ID NO: 1153418 - DNA, 25 bp, Homo sapien
gatgagctaaaacaagcgcacttag

SEQ ID NO: 1153419 - DNA, 25 bp, Homo sapien
gacagatgagctaaaacaagcgcac

SEQ ID NO: 1153420 - DNA, 25 bp, Homo sapien
catcagtcttgtcagtgtgagaaca

SEQ ID NO: 1153421 - DNA, 25 bp, Homo sapien
gggccctcttacattaagcagttct

SEQ ID NO: 1153422 - DNA, 25 bp, Homo sapien
gcaaataaattcagatgggccctct

SEQ ID NO: 1153423 - DNA, 25 bp, Homo sapien
tcagatgggccctcttacattaagc

SEQ ID NO: 1153424 - DNA, 25 bp, Homo sapien
cctttttcacttgatcccaccgatg

SEQ ID NO: 1153425 - DNA, 25 bp, Homo sapien
ctgggacctgttgcctcttggtcct

SEQ ID NO: 1153426 - DNA, 25 bp, Homo sapien
acctgttgcctcttggtcctccttt

SEQ ID NO: 1153427 - DNA, 25 bp, Homo sapien
gttgcctcttggtcctcctttttca

SEQ ID NO: 1153428 - DNA, 25 bp, Homo sapien
ctctaatgagaaccaaaaagcaatg

SEQ ID NO: 1153429 - DNA, 25 bp, Homo sapien
tcagacttgtctgacaagacaaaat

SEQ ID NO: 1153430 - DNA, 25 bp, Homo sapien
ggtgtcaacatcaaattaactgtcc

SEQ ID NO: 1153431 - DNA, 25 bp, Homo sapien
caagtttccctgcagttaccatgag

SEQ ID NO: 1153432 - DNA, 25 bp, Homo sapien
gaataagccagggggaatcagaaac

SEQ ID NO: 1153433 - DNA, 25 bp, Homo sapien
taagccagggggaatcagaaaccac

SEQ ID NO: 1153434 - DNA, 25 bp, Homo sapien
gtaaagaataagccagggggaatca

SEQ ID NO: 1153435 - DNA, 25 bp, Homo sapien
aaagaataagccagggggaatcaga

SEQ ID NO: 1153436 - DNA, 25 bp, Homo sapien
taacatctatccagtgagtcctgca

SEQ ID NO: 1153437 - DNA, 25 bp, Homo sapien
ataacatctatccagtgagtcctgc

SEQ ID NO: 1153438 - DNA, 25 bp, Homo sapien
aataacatctatccagtgagtcctg

SEQ ID NO: 1153439 - DNA, 25 bp, Homo sapien
gggcatgatgggtcttggtcttctt

SEQ ID NO: 1153440 - DNA, 25 bp, Homo sapien
catgatgggtcttggtcttcttcca

SEQ ID NO: 1153441 - DNA, 25 bp, Homo sapien
tgatgggtcttggtcttcttccact

SEQ ID NO: 1153442 - DNA, 25 bp, Homo sapien
gcatgatgggtcttggtcttcttcc

SEQ ID NO: 1153443 - DNA, 25 bp, Homo sapien
aataacatctatccagtgagtcctg

SEQ ID NO: 1153444 - DNA, 25 bp, Homo sapien
taacatctatccagtgagtcctgca

SEQ ID NO: 1153445 - DNA, 25 bp, Homo sapien
ataacatctatccagtgagtcctgc

SEQ ID NO: 1153446 - DNA, 25 bp, Homo sapien
gcatggtgggccttggtcttcttcc

SEQ ID NO: 1153447 - DNA, 25 bp, Homo sapien
ctggggcatggtgggccttggtctt

SEQ ID NO: 1153448 - DNA, 25 bp, Homo sapien
tggggcatggtgggccttggtcttc

SEQ ID NO: 1153449 - DNA, 25 bp, Homo sapien
gggcatggtgggccttggtcttctt

SEQ ID NO: 1153450 - DNA, 25 bp, Homo sapien
taagccaggggaaatcagacacaac

SEQ ID NO: 1153451 - DNA, 25 bp, Homo sapien
ggaaatcagacacaacagagcccca

SEQ ID NO: 1153452 - DNA, 25 bp, Homo sapien
agaataagccaggggaaatcagaca

SEQ ID NO: 1153453 - DNA, 25 bp, Homo sapien
gggaaatcagacacaacagagcccc

SEQ ID NO: 1153454 - DNA, 25 bp, Homo sapien
taacatctatccagtgagtcctgca

SEQ ID NO: 1153455 - DNA, 25 bp, Homo sapien
aataacatctatccagtgagtcctg

SEQ ID NO: 1153456 - DNA, 25 bp, Homo sapien
ataacatctatccagtgagtcctgc

SEQ ID NO: 1153457 - DNA, 25 bp, Homo sapien
atggtgggttgtcatcttccccttc

SEQ ID NO: 1153458 - DNA, 25 bp, Homo sapien
catggtgggttgtcatcttcccctt

SEQ ID NO: 1153459 - DNA, 25 bp, Homo sapien
ccacttccatcagcacgccgtagag

SEQ ID NO: 1153460 - DNA, 25 bp, Homo sapien
gctcttccacttccatcagcacgcc

SEQ ID NO: 1153461 - DNA, 25 bp, Homo sapien
tcttccacttccatcagcacgccgt

SEQ ID NO: 1153462 - DNA, 25 bp, Homo sapien
ttccacttccatcagcacgccgtag

SEQ ID NO: 1153463 - DNA, 25 bp, Homo sapien
aataacatctatccagtgagtcctg

SEQ ID NO: 1153464 - DNA, 25 bp, Homo sapien
taagtactgacaccaattggaggct

SEQ ID NO: 1153465 - DNA, 25 bp, Homo sapien
ccggcagagtcctgggtgacatgct

SEQ ID NO: 1153466 - DNA, 25 bp, Homo sapien
caccggcagagtcctgggtgacatg

SEQ ID NO: 1153467 - DNA, 25 bp, Homo sapien
cttcctaagtactgacaccaattgg

SEQ ID NO: 1153468 - DNA, 25 bp, Homo sapien
agtaaggtgtctctaaaagggacag

SEQ ID NO: 1153469 - DNA, 25 bp, Homo sapien
tggacaaactagaccttctctgccc

SEQ ID NO: 1153470 - DNA, 25 bp, Homo sapien
atcagtacccaccaaaaccaatcag

SEQ ID NO: 1153471 - DNA, 25 bp, Homo sapien
catcagtacccaccaaaaccaatca

SEQ ID NO: 1153472 - DNA, 25 bp, Homo sapien
gaggaagtttcgtgcgtgcgccctt

SEQ ID NO: 1153473 - DNA, 25 bp, Homo sapien
ggaggaagtttcgtgcgtgcgccct

SEQ ID NO: 1153474 - DNA, 25 bp, Homo sapien
aggaagtttcgtgcgtgcgcccttc

SEQ ID NO: 1153475 - DNA, 25 bp, Homo sapien
cgctccaatctctccggttttccaa

SEQ ID NO: 1153476 - DNA, 25 bp, Homo sapien
ttttccaaggccttgctcagtcgtc

SEQ ID NO: 1153477 - DNA, 25 bp, Homo sapien
caatctctccggttttccaaggcct

SEQ ID NO: 1153478 - DNA, 25 bp, Homo sapien
tccaatctctccggttttccaaggc

SEQ ID NO: 1153479 - DNA, 25 bp, Homo sapien
gcgttcagcctccctagggccccca

SEQ ID NO: 1153480 - DNA, 25 bp, Homo sapien
cattcggctatccttctggctccag

SEQ ID NO: 1153481 - DNA, 25 bp, Homo sapien
cgttcagcctccctagggcccccag

SEQ ID NO: 1153482 - DNA, 25 bp, Homo sapien
ggccattcggctatccttctggctc

SEQ ID NO: 1153483 - DNA, 25 bp, Homo sapien
gagggggacccacgagccaccctca

SEQ ID NO: 1153484 - DNA, 25 bp, Homo sapien
gccctccggcctcaggacccgacca

SEQ ID NO: 1153485 - DNA, 25 bp, Homo sapien
tgccaagaagtccacgtaaataaat

SEQ ID NO: 1153486 - DNA, 25 bp, Homo sapien
gcggggtgccaagaagtccacgtaa

SEQ ID NO: 1153487 - DNA, 25 bp, Homo sapien
gctccacggcgcagaaggggcactg

SEQ ID NO: 1153488 - DNA, 25 bp, Homo sapien
ggagctacaggttctggcgtttggg

SEQ ID NO: 1153489 - DNA, 25 bp, Homo sapien
gggtcatgcggatgttgctcctcca

SEQ ID NO: 1153490 - DNA, 25 bp, Homo sapien
catgcggatgttgctcctccaagga

SEQ ID NO: 1153491 - DNA, 25 bp, Homo sapien
acacagagggtcatgcggatgttgc

SEQ ID NO: 1153492 - DNA, 25 bp, Homo sapien
taaccgcagactttgatatgcacac

SEQ ID NO: 1153493 - DNA, 25 bp, Homo sapien
gcttaatcccatttcgctggtgcaa

SEQ ID NO: 1153494 - DNA, 25 bp, Homo sapien
caataaacagtactgtaggctggtc

SEQ ID NO: 1153495 - DNA, 25 bp, Homo sapien
gctggtgcaacttcatccttccgta

SEQ ID NO: 1153496 - DNA, 25 bp, Homo sapien
tcggagttacctcttagcctctgtt

SEQ ID NO: 1153497 - DNA, 25 bp, Homo sapien
tcctcggagttacctcttagcctct

SEQ ID NO: 1153498 - DNA, 25 bp, Homo sapien
tcatcctcggagttacctcttagcc

SEQ ID NO: 1153499 - DNA, 25 bp, Homo sapien
ctgtcatcctcggagttacctctta

SEQ ID NO: 1153500 - DNA, 25 bp, Homo sapien
tacttgctaggtggagctcagggat

SEQ ID NO: 1153501 - DNA, 25 bp, Homo sapien
gggagctttctggtttgttcagtgc

SEQ ID NO: 1153502 - DNA, 25 bp, Homo sapien
ctcagggatcaagggtcgggagctt

SEQ ID NO: 1153503 - DNA, 25 bp, Homo sapien
tcttgggaggcgaatttcagtctct

SEQ ID NO: 1153504 - DNA, 25 bp, Homo sapien
cttctgtggtgcgaatagtaggtga

SEQ ID NO: 1153505 - DNA, 25 bp, Homo sapien
taggtgagccgtaagtgtttttgta

SEQ ID NO: 1153506 - DNA, 25 bp, Homo sapien
tgttctgtccggtcagttgtttccg

SEQ ID NO: 1153507 - DNA, 25 bp, Homo sapien
gggacagcttagaactatccactta

SEQ ID NO: 1153508 - DNA, 25 bp, Homo sapien
gtgtctgggaaaggcgctgtcggtg

SEQ ID NO: 1153509 - DNA, 25 bp, Homo sapien
tcctccgccagctccggcagcgggt

SEQ ID NO: 1153510 - DNA, 25 bp, Homo sapien
cggaagagcagacggtgtctgggaa

SEQ ID NO: 1153511 - DNA, 25 bp, Homo sapien
ggttgatcggctgagtcggcggagg

SEQ ID NO: 1153512 - DNA, 25 bp, Homo sapien
ccagggcctgccttaagaagcagat

SEQ ID NO: 1153513 - DNA, 25 bp, Homo sapien
tgcagctgtatttggagtttactgc

SEQ ID NO: 1153514 - DNA, 25 bp, Homo sapien
actgcctcaatgttcactttcaatg

SEQ ID NO: 1153515 - DNA, 25 bp, Homo sapien
caatgaaagagcgtatttcttaaca

SEQ ID NO: 1153516 - DNA, 25 bp, Homo sapien
cactttcaatgaaagagcgtatttc

SEQ ID NO: 1153517 - DNA, 25 bp, Homo sapien
taggaacattgttcagcaaatggag

SEQ ID NO: 1153518 - DNA, 25 bp, Homo sapien
caaatggaggtagacaaacatgtcc

SEQ ID NO: 1153519 - DNA, 25 bp, Homo sapien
gaccgcaagatgaagtgtaaaaacc

SEQ ID NO: 1153520 - DNA, 25 bp, Homo sapien
ttgtcggcccgttcatcatgtccca

SEQ ID NO: 1153521 - DNA, 25 bp, Homo sapien
cttccacaatattcacacgttcttt

SEQ ID NO: 1153522 - DNA, 25 bp, Homo sapien
caaaaaagacgacggagttgaccat

SEQ ID NO: 1153523 - DNA, 25 bp, Homo sapien
tcaaaaaagacgacggagttgacca

SEQ ID NO: 1153524 - DNA, 25 bp, Homo sapien
tgcctcagcccaattagttttaaag

SEQ ID NO: 1153525 - DNA, 25 bp, Homo sapien
tattggcagggaaaacctagaacac

SEQ ID NO: 1153526 - DNA, 25 bp, Homo sapien
tggcagggaaaacctagaacacaaa

SEQ ID NO: 1153527 - DNA, 25 bp, Homo sapien
taaagacgctgcatatattggcagg

SEQ ID NO: 1153528 - DNA, 25 bp, Homo sapien
gctgctaattgctagtatggagaaa

SEQ ID NO: 1153529 - DNA, 25 bp, Homo sapien
tgattctggctattaatctctatta

SEQ ID NO: 1153530 - DNA, 25 bp, Homo sapien
ttgttaagcatgtaatgattctggc

SEQ ID NO: 1153531 - DNA, 25 bp, Homo sapien
tgtacctgcttcattgcatgtattg

SEQ ID NO: 1153532 - DNA, 25 bp, Homo sapien
caccttattgctgccaaaaccacat

SEQ ID NO: 1153533 - DNA, 25 bp, Homo sapien
acacaccttattgctgccaaaacca

SEQ ID NO: 1153534 - DNA, 25 bp, Homo sapien
taccccacacaccttattgctgcca

SEQ ID NO: 1153535 - DNA, 25 bp, Homo sapien
cccacacaccttattgctgccaaaa

SEQ ID NO: 1153536 - DNA, 25 bp, Homo sapien
gttccttccactccaccgctcccca

SEQ ID NO: 1153537 - DNA, 25 bp, Homo sapien
ttgttccttccactccaccgctccc

SEQ ID NO: 1153538 - DNA, 25 bp, Homo sapien
ctttgttccttccactccaccgctc

SEQ ID NO: 1153539 - DNA, 25 bp, Homo sapien
tttgttccttccactccaccgctcc

SEQ ID NO: 1153540 - DNA, 25 bp, Homo sapien
cattgtcaccatgactgccaagacg

SEQ ID NO: 1153541 - DNA, 25 bp, Homo sapien
caccttcaacgtcattgtcaccatg

SEQ ID NO: 1153542 - DNA, 25 bp, Homo sapien
aacgtcattgtcaccatgactgcca

SEQ ID NO: 1153543 - DNA, 25 bp, Homo sapien
catgactgccaagacgctaggcctg

SEQ ID NO: 1153544 - DNA, 25 bp, Homo sapien
ttcctcaacatcacgccagctgagg

SEQ ID NO: 1153545 - DNA, 25 bp, Homo sapien
ccagggaaaaccttcctcaacatca

SEQ ID NO: 1153546 - DNA, 25 bp, Homo sapien
gggaaaaccttcctcaacatcacgc

SEQ ID NO: 1153547 - DNA, 25 bp, Homo sapien
tcctcaacatcacgccagctgaggt

SEQ ID NO: 1153548 - DNA, 25 bp, Homo sapien
atctacagcctcgtggcggacggga

SEQ ID NO: 1153549 - DNA, 25 bp, Homo sapien
ggccaggtggacacctccatctaca

SEQ ID NO: 1153550 - DNA, 25 bp, Homo sapien
tccatctacagcctcgtggcggacg

SEQ ID NO: 1153551 - DNA, 25 bp, Homo sapien
gcagcgaccagaggagcccctgcag

SEQ ID NO: 1153552 - DNA, 25 bp, Homo sapien
tattcattgatatactgggctgttt

SEQ ID NO: 1153553 - DNA, 25 bp, Homo sapien
ttatattcattgatatactgggctg

SEQ ID NO: 1153554 - DNA, 25 bp, Homo sapien
gatatactgggctgtttgtcaattt

SEQ ID NO: 1153555 - DNA, 25 bp, Homo sapien
cattgatatactgggctgtttgtca

SEQ ID NO: 1153556 - DNA, 25 bp, Homo sapien
acttattttcctgggtatctatagc

SEQ ID NO: 1153557 - DNA, 25 bp, Homo sapien
tatctatagctagggatggagttgc

SEQ ID NO: 1153558 - DNA, 25 bp, Homo sapien
taactactgtgcataagtaactatg

SEQ ID NO: 1153559 - DNA, 25 bp, Homo sapien
ttctgatgggagacaggtttacttg

SEQ ID NO: 1153560 - DNA, 25 bp, Homo sapien
tcagtattcgtgtacccttgtgaca

SEQ ID NO: 1153561 - DNA, 25 bp, Homo sapien
gtcaccaccaatggggatcattcct

SEQ ID NO: 1153562 - DNA, 25 bp, Homo sapien
ggtcaccaccaatggggatcattcc

SEQ ID NO: 1153563 - DNA, 25 bp, Homo sapien
cagactctgataagagtgaggtaga

SEQ ID NO: 1153564 - DNA, 25 bp, Homo sapien
tgtggccagcgtgccaggtaaccgt

SEQ ID NO: 1153565 - DNA, 25 bp, Homo sapien
ttgtggcagaagaggtggagtcagg

SEQ ID NO: 1153566 - DNA, 25 bp, Homo sapien
gtggcagaagaggtggagtcaggga

SEQ ID NO: 1153567 - DNA, 25 bp, Homo sapien
gtttgtggcagaagaggtggagtca

SEQ ID NO: 1153568 - DNA, 25 bp, Homo sapien
gctgacgtttgtggcagaagaggtg

SEQ ID NO: 1153569 - DNA, 25 bp, Homo sapien
acaaagggccggctgataccaccat

SEQ ID NO: 1153570 - DNA, 25 bp, Homo sapien
ttctcgctggacaaagggccggctg

SEQ ID NO: 1153571 - DNA, 25 bp, Homo sapien
gccttctcgctggacaaagggccgg

SEQ ID NO: 1153572 - DNA, 25 bp, Homo sapien
tgccttctcgctggacaaagggccg

SEQ ID NO: 1153573 - DNA, 25 bp, Homo sapien
gaagccggccagttgagttagaaaa

SEQ ID NO: 1153574 - DNA, 25 bp, Homo sapien
tcttctgtcggttggccaggaagcc

SEQ ID NO: 1153575 - DNA, 25 bp, Homo sapien
ccagttgagttagaaaacatttctc

SEQ ID NO: 1153576 - DNA, 25 bp, Homo sapien
ttcttctctgccaactgggggcgca

SEQ ID NO: 1153577 - DNA, 25 bp, Homo sapien
tgaactgtcgctcattcctcagcat

SEQ ID NO: 1153578 - DNA, 25 bp, Homo sapien
gacaaggtgctgtgtcagtctacac

SEQ ID NO: 1153579 - DNA, 25 bp, Homo sapien
caaggtgctgtgtcagtctacaccc

SEQ ID NO: 1153580 - DNA, 25 bp, Homo sapien
aggtgctgtgtcagtctacacccct

SEQ ID NO: 1153581 - DNA, 25 bp, Homo sapien
ttggacaaggtgctgtgtcagtcta

SEQ ID NO: 1153582 - DNA, 25 bp, Homo sapien
atcttcatcgtcatcgttgtcattt

SEQ ID NO: 1153583 - DNA, 25 bp, Homo sapien
ctgggggcagacgatttctgcactt

SEQ ID NO: 1153584 - DNA, 25 bp, Homo sapien
gggcagacgatttctgcactttctc

SEQ ID NO: 1153585 - DNA, 25 bp, Homo sapien
agccacctcaacttgaacatcttca

SEQ ID NO: 1153586 - DNA, 25 bp, Homo sapien
tatttcacatactgtggccaagcga

SEQ ID NO: 1153587 - DNA, 25 bp, Homo sapien
ccagagagggtgtgcctcctagata

SEQ ID NO: 1153588 - DNA, 25 bp, Homo sapien
gcgaatgcgggtttttggcccatca

SEQ ID NO: 1153589 - DNA, 25 bp, Homo sapien
ctgtgtctaagctgggttatatttc

SEQ ID NO: 1153590 - DNA, 25 bp, Homo sapien
gattaaacacagagggattggaccc

SEQ ID NO: 1153591 - DNA, 25 bp, Homo sapien
acacagagggattggaccccaggga

SEQ ID NO: 1153592 - DNA, 25 bp, Homo sapien
gaagattaaacacagagggattgga

SEQ ID NO: 1153593 - DNA, 25 bp, Homo sapien
taaacacagagggattggaccccag

SEQ ID NO: 1153594 - DNA, 25 bp, Homo sapien
tggctggttggagtcataagggcca

SEQ ID NO: 1153595 - DNA, 25 bp, Homo sapien
ttcctcttcctcatcatcactttca

SEQ ID NO: 1153596 - DNA, 25 bp, Homo sapien
gagacactggccctttttcttcctc

SEQ ID NO: 1153597 - DNA, 25 bp, Homo sapien
ctcttcctcatcatcactttcattt

SEQ ID NO: 1153598 - DNA, 25 bp, Homo sapien
tcttcctcatcatcactttcatttt

SEQ ID NO: 1153599 - DNA, 25 bp, Homo sapien
ctgctgtaagactggtacgaggcca

SEQ ID NO: 1153600 - DNA, 25 bp, Homo sapien
tgcctatgtcaacagccatgcagac

SEQ ID NO: 1153601 - DNA, 25 bp, Homo sapien
agactggtacgaggccaacatttca

SEQ ID NO: 1153602 - DNA, 25 bp, Homo sapien
tggtacgaggccaacatttcaggag

SEQ ID NO: 1153603 - DNA, 25 bp, Homo sapien
actggagctttatcaccttcacaat

SEQ ID NO: 1153604 - DNA, 25 bp, Homo sapien
ggagctttatcaccttcacaatgga

SEQ ID NO: 1153605 - DNA, 25 bp, Homo sapien
ctgggccatgaactggagctttatc

SEQ ID NO: 1153606 - DNA, 25 bp, Homo sapien
gaactggagctttatcaccttcaca

SEQ ID NO: 1153607 - DNA, 25 bp, Homo sapien
gaaatctacattgatatataggttc

SEQ ID NO: 1153608 - DNA, 25 bp, Homo sapien
agtcagtccaggttggcacgggcat

SEQ ID NO: 1153609 - DNA, 25 bp, Homo sapien
gacagtcagtccaggttggcacggg

SEQ ID NO: 1153610 - DNA, 25 bp, Homo sapien
cagtccaggttggcacgggcatggc

SEQ ID NO: 1153611 - DNA, 25 bp, Homo sapien
acagtcagtccaggttggcacgggc

SEQ ID NO: 1153612 - DNA, 25 bp, Homo sapien
ggacagatgagctaaaacaagcgaa

SEQ ID NO: 1153613 - DNA, 25 bp, Homo sapien
gatgagctaaaacaagcgaacttag

SEQ ID NO: 1153614 - DNA, 25 bp, Homo sapien
cagatgagctaaaacaagcgaactt

SEQ ID NO: 1153615 - DNA, 25 bp, Homo sapien
gacagatgagctaaaacaagcgaac

SEQ ID NO: 1153616 - DNA, 25 bp, Homo sapien
gggacctgttgcctcttggtcctcc

SEQ ID NO: 1153617 - DNA, 25 bp, Homo sapien
ctgggacctgttgcctcttggtcct

SEQ ID NO: 1153618 - DNA, 25 bp, Homo sapien
gttgcctcttggtcctcctttttca

SEQ ID NO: 1153619 - DNA, 25 bp, Homo sapien
acctgttgcctcttggtcctccttt

SEQ ID NO: 1153620 - DNA, 25 bp, Homo sapien
taacatctatccagtgagtcctgca

SEQ ID NO: 1153621 - DNA, 25 bp, Homo sapien
ataacatctatccagtgagtcctgc

SEQ ID NO: 1153622 - DNA, 25 bp, Homo sapien
aataacatctatccagtgagtcctg

SEQ ID NO: 1153623 - DNA, 25 bp, Homo sapien
catgatgggtcttggtcttcttcca

SEQ ID NO: 1153624 - DNA, 25 bp, Homo sapien
gcatgatgggtcttggtcttcttcc

SEQ ID NO: 1153625 - DNA, 25 bp, Homo sapien
gggcatgatgggtcttggtcttctt

SEQ ID NO: 1153626 - DNA, 25 bp, Homo sapien
tgatgggtcttggtcttcttccact

SEQ ID NO: 1153627 - DNA, 25 bp, Homo sapien
taacatctatccagtgagtcctgca

SEQ ID NO: 1153628 - DNA, 25 bp, Homo sapien
aataacatctatccagtgagtcctg

SEQ ID NO: 1153629 - DNA, 25 bp, Homo sapien
ataacatctatccagtgagtcctgc

SEQ ID NO: 1153630 - DNA, 25 bp, Homo sapien
gcatggtgggccttggtcttcttcc

SEQ ID NO: 1153631 - DNA, 25 bp, Homo sapien
ctggggcatggtgggccttggtctt

SEQ ID NO: 1153632 - DNA, 25 bp, Homo sapien
tggggcatggtgggccttggtcttc

SEQ ID NO: 1153633 - DNA, 25 bp, Homo sapien
gggcatggtgggccttggtcttctt

SEQ ID NO: 1153634 - DNA, 25 bp, Homo sapien
aacagagccccaactaggtttcatg

SEQ ID NO: 1153635 - DNA, 25 bp, Homo sapien
acacaacagagccccaactaggttt

SEQ ID NO: 1153636 - DNA, 25 bp, Homo sapien
agccccaactaggtttcatgggtag

SEQ ID NO: 1153637 - DNA, 25 bp, Homo sapien
cagagccccaactaggtttcatggg

SEQ ID NO: 1153638 - DNA, 25 bp, Homo sapien
actggaaggagttgaataatatcta

SEQ ID NO: 1153639 - DNA, 25 bp, Homo sapien
agacaactggaaggagttgaataat

SEQ ID NO: 1153640 - DNA, 25 bp, Homo sapien
tggaaggagttgaataatatctatc

SEQ ID NO: 1153641 - DNA, 25 bp, Homo sapien
caactggaaggagttgaataatatc

SEQ ID NO: 1153642 - DNA, 25 bp, Homo sapien
ggaagagagtcttgctcactgaccc

SEQ ID NO: 1153643 - DNA, 25 bp, Homo sapien
gtcttgctcactgacccatcccttg

SEQ ID NO: 1153644 - DNA, 25 bp, Homo sapien
atggcctgagactaggaagagagtc

SEQ ID NO: 1153645 - DNA, 25 bp, Homo sapien
ctgagactaggaagagagtcttgct

SEQ ID NO: 1153646 - DNA, 25 bp, Homo sapien
ttcttttcttctttgatcttcttcc

SEQ ID NO: 1153647 - DNA, 25 bp, Homo sapien
tcttcttttcttctttgatcttctt

SEQ ID NO: 1153648 - DNA, 25 bp, Homo sapien
tcttttcttctttgatcttcttccc

SEQ ID NO: 1153649 - DNA, 25 bp, Homo sapien
cttcttcttttcttctttgatcttc

SEQ ID NO: 1153650 - DNA, 25 bp, Homo sapien
catggtgggttgtcatcttcccctt

SEQ ID NO: 1153651 - DNA, 25 bp, Homo sapien
atggtgggttgtcatcttccccttc

SEQ ID NO: 1153652 - DNA, 25 bp, Homo sapien
gtgttaacacagaattaagcatcca

SEQ ID NO: 1153653 - DNA, 25 bp, Homo sapien
gaatctgttgcctccaggtgttaac

SEQ ID NO: 1153654 - DNA, 25 bp, Homo sapien
tgttgcctccaggtgttaacacaga

SEQ ID NO: 1153655 - DNA, 25 bp, Homo sapien
tttccctgaatctgttgcctccagg

SEQ ID NO: 1153656 - DNA, 25 bp, Homo sapien
aataacatctatccagtgagtcctg

SEQ ID NO: 1153657 - DNA, 25 bp, Homo sapien
ccggcagagtcctgggtgacatgct

SEQ ID NO: 1153658 - DNA, 25 bp, Homo sapien
cttcctaagtactgacaccaattgg

SEQ ID NO: 1153659 - DNA, 25 bp, Homo sapien
caccggcagagtcctgggtgacatg

SEQ ID NO: 1153660 - DNA, 25 bp, Homo sapien
taagtactgacaccaattggaggct

SEQ ID NO: 1153661 - DNA, 25 bp, Homo sapien
atcagtacccaccaaaaccaatcag

SEQ ID NO: 1153662 - DNA, 25 bp, Homo sapien
catcagtacccaccaaaaccaatca

SEQ ID NO: 1153663 - DNA, 25 bp, Homo sapien
aggaagtttcgtgcgtgcgcccttc

SEQ ID NO: 1153664 - DNA, 25 bp, Homo sapien
gaggaagtttcgtgcgtgcgccctt

SEQ ID NO: 1153665 - DNA, 25 bp, Homo sapien
ggaggaagtttcgtgcgtgcgccct

SEQ ID NO: 1153666 - DNA, 25 bp, Homo sapien
cgctccaatctctccggttttccaa

SEQ ID NO: 1153667 - DNA, 25 bp, Homo sapien
ttttccaaggccttgctcagtcgtc

SEQ ID NO: 1153668 - DNA, 25 bp, Homo sapien
caatctctccggttttccaaggcct

SEQ ID NO: 1153669 - DNA, 25 bp, Homo sapien
tccaatctctccggttttccaaggc

SEQ ID NO: 1153670 - DNA, 25 bp, Homo sapien
ggccattcggctatccttctggctc

SEQ ID NO: 1153671 - DNA, 25 bp, Homo sapien
ccattcggctatccttctggctcca

SEQ ID NO: 1153672 - DNA, 25 bp, Homo sapien
cattcggctatccttctggctccag

SEQ ID NO: 1153673 - DNA, 25 bp, Homo sapien
gccattcggctatccttctggctcc

SEQ ID NO: 1153674 - DNA, 25 bp, Homo sapien
cgttcagcctccctagggcccccag

SEQ ID NO: 1153675 - DNA, 25 bp, Homo sapien
gcgttcagcctccctagggccccca

SEQ ID NO: 1153676 - DNA, 25 bp, Homo sapien
ctgggcagggagggcacaggctccc

SEQ ID NO: 1153677 - DNA, 25 bp, Homo sapien
tgggcagggagggcacaggctccct

SEQ ID NO: 1153678 - DNA, 25 bp, Homo sapien
ggcagggagggcacaggctccctca

SEQ ID NO: 1153679 - DNA, 25 bp, Homo sapien
gggcagggagggcacaggctccctc

SEQ ID NO: 1153680 - DNA, 25 bp, Homo sapien
ggtggagcccccgtgcggaacacag

SEQ ID NO: 1153681 - DNA, 25 bp, Homo sapien
agctccgcagcggccccaaaagcga

SEQ ID NO: 1153682 - DNA, 25 bp, Homo sapien
gcggaagctccgcagcggccccaaa

SEQ ID NO: 1153683 - DNA, 25 bp, Homo sapien
cccgtgcggaacacaggatccgaag

SEQ ID NO: 1153684 - DNA, 25 bp, Homo sapien
gagggggacccacgagccaccctca

SEQ ID NO: 1153685 - DNA, 25 bp, Homo sapien
gccctccggcctcaggacccgacca

SEQ ID NO: 1153686 - DNA, 25 bp, Homo sapien
gcggggtgccaagaagtccacgtaa

SEQ ID NO: 1153687 - DNA, 25 bp, Homo sapien
tgccaagaagtccacgtaaataaat

SEQ ID NO: 1153688 - DNA, 25 bp, Homo sapien
gctccacggcgcagaaggggcactg

SEQ ID NO: 1153689 - DNA, 25 bp, Homo sapien
acacagagggtcatgcggatgttgc

SEQ ID NO: 1153690 - DNA, 25 bp, Homo sapien
gggtcatgcggatgttgctcctcca

SEQ ID NO: 1153691 - DNA, 25 bp, Homo sapien
catgcggatgttgctcctccaagga

SEQ ID NO: 1153692 - DNA, 25 bp, Homo sapien
ggagctacaggttctggcgtttggg

SEQ ID NO: 1153693 - DNA, 25 bp, Homo sapien
gaaaacaggaaaaccactatgctag

SEQ ID NO: 1153694 - DNA, 25 bp, Homo sapien
caggtgaaccgagttctggcctcca

SEQ ID NO: 1153695 - DNA, 25 bp, Homo sapien
caaacacaaattgcgtgccagcagg

SEQ ID NO: 1153696 - DNA, 25 bp, Homo sapien
ccattggagaccaaaggagatgact

SEQ ID NO: 1153697 - DNA, 25 bp, Homo sapien
ttcaccacagcattcacgggagttt

SEQ ID NO: 1153698 - DNA, 25 bp, Homo sapien
tgcgatccatcttgccctggcagct

SEQ ID NO: 1153699 - DNA, 25 bp, Homo sapien
acaggtgcgatccatcttgccctgg

SEQ ID NO: 1153700 - DNA, 25 bp, Homo sapien
cattcacgggagtttgtaggatttc

SEQ ID NO: 1153701 - DNA, 25 bp, Homo sapien
tacttgctaggtggagctcagggat

SEQ ID NO: 1153702 - DNA, 25 bp, Homo sapien
tcttgggaggcgaatttcagtctct

SEQ ID NO: 1153703 - DNA, 25 bp, Homo sapien
gggagctttctggtttgttcagtgc

SEQ ID NO: 1153704 - DNA, 25 bp, Homo sapien
ctcagggatcaagggtcgggagctt

SEQ ID NO: 1153705 - DNA, 25 bp, Homo sapien
ggtttgatcggctgagtcggcggag

SEQ ID NO: 1153706 - DNA, 25 bp, Homo sapien
cggaagagcagacggtgtctgggaa

SEQ ID NO: 1153707 - DNA, 25 bp, Homo sapien
gccagctccggcagcggtttgatcg

SEQ ID NO: 1153708 - DNA, 25 bp, Homo sapien
ggtgtctgggaaaggcgctgtcggt

SEQ ID NO: 1153709 - DNA, 25 bp, Homo sapien
ttacctccagccagggctattcccc

SEQ ID NO: 1153710 - DNA, 25 bp, Homo sapien
attacctccagccagggctattccc

SEQ ID NO: 1153711 - DNA, 25 bp, Homo sapien
agggctattcccccagggcctgcct

SEQ ID NO: 1153712 - DNA, 25 bp, Homo sapien
ccagggcctgccttaaggagcagat

SEQ ID NO: 1153713 - DNA, 25 bp, Homo sapien
actgcctcaatgttcactttcaatg

SEQ ID NO: 1153714 - DNA, 25 bp, Homo sapien
tgcagctgtatttggagtttactgc

SEQ ID NO: 1153715 - DNA, 25 bp, Homo sapien
caatgaaagagcgtatttcttaaca

SEQ ID NO: 1153716 - DNA, 25 bp, Homo sapien
cactttcaatgaaagagcgtatttc

SEQ ID NO: 1153717 - DNA, 25 bp, Homo sapien
tattgtctgaagatatgtcatgaac

SEQ ID NO: 1153718 - DNA, 25 bp, Homo sapien
ctttctgaatacaataaccatgata

SEQ ID NO: 1153719 - DNA, 25 bp, Homo sapien
gagagttgctaactccttaatgaaa

SEQ ID NO: 1153720 - DNA, 25 bp, Homo sapien
tttatccttgactttacaatgctgt

SEQ ID NO: 1153721 - DNA, 25 bp, Homo sapien
gaccgcaagatgaagtgtaaaaacc

SEQ ID NO: 1153722 - DNA, 25 bp, Homo sapien
taggaacattgttcagcaaatggag

SEQ ID NO: 1153723 - DNA, 25 bp, Homo sapien
caaatggaggtagacaaacatgtcc

SEQ ID NO: 1153724 - DNA, 25 bp, Homo sapien
ttgtcggcccgttcatcatgtccca

SEQ ID NO: 1153725 - DNA, 25 bp, Homo sapien
cattgccaccaatccttcagtcttt

SEQ ID NO: 1153726 - DNA, 25 bp, Homo sapien
cagtctttgtctttccgagtcccta

SEQ ID NO: 1153727 - DNA, 25 bp, Homo sapien
ttgtctttccgagtccctaattatc

SEQ ID NO: 1153728 - DNA, 25 bp, Homo sapien
gccaccaatccttcagtctttgtct

SEQ ID NO: 1153729 - DNA, 25 bp, Homo sapien
atgatagtttggtgagcattcgtat

SEQ ID NO: 1153730 - DNA, 25 bp, Homo sapien
tgatagtttggtgagcattcgtatt

SEQ ID NO: 1153731 - DNA, 25 bp, Homo sapien
gatagtttggtgagcattcgtatta

SEQ ID NO: 1153732 - DNA, 25 bp, Homo sapien
ggaatgggtctggtggtgaaaataa

SEQ ID NO: 1153733 - DNA, 25 bp, Homo sapien
gaatgggtctggtggtgaaaataaa

SEQ ID NO: 1153734 - DNA, 25 bp, Homo sapien
gcagagaatgtaaaggtgaaataat

SEQ ID NO: 1153735 - DNA, 25 bp, Homo sapien
taaatgtcacaaaatagtagagtat

SEQ ID NO: 1153736 - DNA, 25 bp, Homo sapien
ggagagttgacaccaaactgcacca

SEQ ID NO: 1153737 - DNA, 25 bp, Homo sapien
taactagtaacctcggctgcagcag

SEQ ID NO: 1153738 - DNA, 25 bp, Homo sapien
cacagttgtctcctcgtcgtgacta

SEQ ID NO: 1153739 - DNA, 25 bp, Homo sapien
cagttcctcagggtggttggcccaa

SEQ ID NO: 1153740 - DNA, 25 bp, Homo sapien
taccagctatggaaatagtcagcag

SEQ ID NO: 1153741 - DNA, 25 bp, Homo sapien
tgaactctcttatatggtagctggg

SEQ ID NO: 1153742 - DNA, 25 bp, Homo sapien
aataactccgtaactggtagatttg

SEQ ID NO: 1153743 - DNA, 25 bp, Homo sapien
gagtgttagtccaagaccaataact

SEQ ID NO: 1153744 - DNA, 25 bp, Homo sapien
caagaccaataactccgtaactggt

SEQ ID NO: 1153745 - DNA, 25 bp, Homo sapien
ggagtgttagtccaagaccaataac

SEQ ID NO: 1153746 - DNA, 25 bp, Homo sapien
ctgcttggatgcattgccagtgccc

SEQ ID NO: 1153747 - DNA, 25 bp, Homo sapien
ggctgcgtgaggacatccccttacc

SEQ ID NO: 1153748 - DNA, 25 bp, Homo sapien
tttgtggagcgggtgcgtggtggga

SEQ ID NO: 1153749 - DNA, 25 bp, Homo sapien
gcgggtgcgtggtgggaactgggat

SEQ ID NO: 1153750 - DNA, 25 bp, Homo sapien
tgggggtgggctgcgtgaggacatc

SEQ ID NO: 1153751 - DNA, 25 bp, Homo sapien
caggagatacagaccctggaggtaa

SEQ ID NO: 1153752 - DNA, 25 bp, Homo sapien
aggagcggcccggacacctccttcg

SEQ ID NO: 1153753 - DNA, 25 bp, Homo sapien
tccaggagcggcccggacacctcct

SEQ ID NO: 1153754 - DNA, 25 bp, Homo sapien
ccagcaggagatacagaccctggag

SEQ ID NO: 1153755 - DNA, 25 bp, Homo sapien
ggcgggagcggcagactcggctgcc

SEQ ID NO: 1153756 - DNA, 25 bp, Homo sapien
ctcggctgccagctctactggcgtc

SEQ ID NO: 1153757 - DNA, 25 bp, Homo sapien
ggagcggcagactcggctgccagct

SEQ ID NO: 1153758 - DNA, 25 bp, Homo sapien
gcgggagcggcagactcggctgcca

SEQ ID NO: 1153759 - DNA, 25 bp, Homo sapien
ccatcgcggctttttactcgccacg

SEQ ID NO: 1153760 - DNA, 25 bp, Homo sapien
tttgcccgccgcggctttctgccac

SEQ ID NO: 1153761 - DNA, 25 bp, Homo sapien
cccgccgcggctttctgccacacac

SEQ ID NO: 1153762 - DNA, 25 bp, Homo sapien
cgcggctttttgcccgccgcggatt

SEQ ID NO: 1153763 - DNA, 25 bp, Homo sapien
tgcccgccgcggctttctgccacac

SEQ ID NO: 1153764 - DNA, 25 bp, Homo sapien
cgccagggcttttagcccgccgcgg

SEQ ID NO: 1153765 - DNA, 25 bp, Homo sapien
gcgccagggcttttagcccgccgcg

SEQ ID NO: 1153766 - DNA, 25 bp, Homo sapien
atatcttcagctaagatttcccaac

SEQ ID NO: 1153767 - DNA, 25 bp, Homo sapien
cagctgggtttagttggtgctttca

SEQ ID NO: 1153768 - DNA, 25 bp, Homo sapien
gagaatgacagtgaactaaccccag

SEQ ID NO: 1153769 - DNA, 25 bp, Homo sapien
gagggatttcacaaatttgcgtcaa

SEQ ID NO: 1153770 - DNA, 25 bp, Homo sapien
taagttcactcaacctaggagggag

SEQ ID NO: 1153771 - DNA, 25 bp, Homo sapien
tcttgtcattgtaatcattttcaca

SEQ ID NO: 1153772 - DNA, 25 bp, Homo sapien
ctatcttgtcattgtaatcattttc

SEQ ID NO: 1153773 - DNA, 25 bp, Homo sapien
atcttgtcattgtaatcattttcac

SEQ ID NO: 1153774 - DNA, 25 bp, Homo sapien
ttgtcattgtaatcattttcacaaa

SEQ ID NO: 1153775 - DNA, 25 bp, Homo sapien
ggcagccgcgatcttggtcaggacc

SEQ ID NO: 1153776 - DNA, 25 bp, Homo sapien
gggctcgggacccactgcagcctgt

SEQ ID NO: 1153777 - DNA, 25 bp, Homo sapien
tcggcagccgcgatcttggtcagga

SEQ ID NO: 1153778 - DNA, 25 bp, Homo sapien
ctcggcagccgcgatcttggtcagg

SEQ ID NO: 1153779 - DNA, 25 bp, Homo sapien
accagcagcctctatgcgcttcggg

SEQ ID NO: 1153780 - DNA, 25 bp, Homo sapien
agcctctatgcgcttcgggtagccc

SEQ ID NO: 1153781 - DNA, 25 bp, Homo sapien
ctctatgcgcttcgggtagccctgc

SEQ ID NO: 1153782 - DNA, 25 bp, Homo sapien
gttgacaccagcagcctctatgcgc

SEQ ID NO: 1153783 - DNA, 25 bp, Homo sapien
ggatgccaggcgccccagaagacgt

SEQ ID NO: 1153784 - DNA, 25 bp, Homo sapien
ggaggaggcagctttgacttcatca

SEQ ID NO: 1153785 - DNA, 25 bp, Homo sapien
tccgcttcctgttcgccagctatgg

SEQ ID NO: 1153786 - DNA, 25 bp, Homo sapien
atccagggatggagaatcgccgggc

SEQ ID NO: 1153787 - DNA, 25 bp, Homo sapien
cagctatgggagcaaagtcttcctg

SEQ ID NO: 1153788 - DNA, 25 bp, Homo sapien
agccaatttcctgcgcctcgtggcg

SEQ ID NO: 1153789 - DNA, 25 bp, Homo sapien
tagccaatttcctgcgcctcgtggc

SEQ ID NO: 1153790 - DNA, 25 bp, Homo sapien
ctagccaatttcctgcgcctcgtgg

SEQ ID NO: 1153791 - DNA, 25 bp, Homo sapien
tgtgttattggactgacagctgctc

SEQ ID NO: 1153792 - DNA, 25 bp, Homo sapien
ggagtcccgctcatttttggagtga

SEQ ID NO: 1153793 - DNA, 25 bp, Homo sapien
gtttcataccgtaaatagccatggg

SEQ ID NO: 1153794 - DNA, 25 bp, Homo sapien
agcagatctttgacttccagggccg

SEQ ID NO: 1153795 - DNA, 25 bp, Homo sapien
tgcaaacgagtttagaatttccagg

SEQ ID NO: 1153796 - DNA, 25 bp, Homo sapien
caggcctgtaacttcttctgctgcc

SEQ ID NO: 1153797 - DNA, 25 bp, Homo sapien
aaaattcctcaagtggatgcattgg

SEQ ID NO: 1153798 - DNA, 25 bp, Homo sapien
ttagcatttgatcagcaggcctgta

SEQ ID NO: 1153799 - DNA, 25 bp, Homo sapien
gggctcactgtattatgggtactcc

SEQ ID NO: 1153800 - DNA, 25 bp, Homo sapien
tgggctcactgtattatgggtactc

SEQ ID NO: 1153801 - DNA, 25 bp, Homo sapien
ggtgggctcactgtattatgggtac

SEQ ID NO: 1153802 - DNA, 25 bp, Homo sapien
ggctcactgtattatgggtactcca

SEQ ID NO: 1153803 - DNA, 25 bp, Homo sapien
tgctccaaatggcactgccaggaag

SEQ ID NO: 1153804 - DNA, 25 bp, Homo sapien
caggaagctgcctgggtttaaaaat

SEQ ID NO: 1153805 - DNA, 25 bp, Homo sapien
cactttgatgctccaaatggcactg

SEQ ID NO: 1153806 - DNA, 25 bp, Homo sapien
aaatggcactgccaggaagctgcct

SEQ ID NO: 1153807 - DNA, 25 bp, Homo sapien
gaacgctatcagcaagcctttgcat

SEQ ID NO: 1153808 - DNA, 25 bp, Homo sapien
tcactgtgaacgctatcagcaagcc

SEQ ID NO: 1153809 - DNA, 25 bp, Homo sapien
tgtgaacgctatcagcaagcctttg

SEQ ID NO: 1153810 - DNA, 25 bp, Homo sapien
actgtgaacgctatcagcaagcctt

SEQ ID NO: 1153811 - DNA, 25 bp, Homo sapien
gccccgacagtcctgcacctcgagg

SEQ ID NO: 1153812 - DNA, 25 bp, Homo sapien
tcgccccgacagtcctgcacctcga

SEQ ID NO: 1153813 - DNA, 25 bp, Homo sapien
cgccccgacagtcctgcacctcgag

SEQ ID NO: 1153814 - DNA, 25 bp, Homo sapien
ctcgccccgacagtcctgcacctcg

SEQ ID NO: 1153815 - DNA, 25 bp, Homo sapien
aacagctccgattccacttttcagc

SEQ ID NO: 1153816 - DNA, 25 bp, Homo sapien
caacagctccgattccacttttcag

SEQ ID NO: 1153817 - DNA, 25 bp, Homo sapien
tacaacagctccgattccacttttc

SEQ ID NO: 1153818 - DNA, 25 bp, Homo sapien
aatacaacagctccgattccacttt

SEQ ID NO: 1153819 - DNA, 25 bp, Homo sapien
caaccatatcgagcacagagttttc

SEQ ID NO: 1153820 - DNA, 25 bp, Homo sapien
aacacaaccatatcgagcacagagt

SEQ ID NO: 1153821 - DNA, 25 bp, Homo sapien
accatatcgagcacagagttttctt

SEQ ID NO: 1153822 - DNA, 25 bp, Homo sapien
catatcgagcacagagttttcttca

SEQ ID NO: 1153823 - DNA, 25 bp, Homo sapien
atggatggtaacactgaccacactg

SEQ ID NO: 1153824 - DNA, 25 bp, Homo sapien
cagtatggatggtaacactgaccac

SEQ ID NO: 1153825 - DNA, 25 bp, Homo sapien
cacagtatggatggtaacactgacc

SEQ ID NO: 1153826 - DNA, 25 bp, Homo sapien
gtatggatggtaacactgaccacac

SEQ ID NO: 1153827 - DNA, 25 bp, Homo sapien
gcaaaaggctcaaagacaagtgaag

SEQ ID NO: 1153828 - DNA, 25 bp, Homo sapien
tgaagcacaaccagtcagagtacaa

SEQ ID NO: 1153829 - DNA, 25 bp, Homo sapien
tgtaagctgcacaattaccagagct

SEQ ID NO: 1153830 - DNA, 25 bp, Homo sapien
agaagcccaaagacccacaaccagg

SEQ ID NO: 1153831 - DNA, 25 bp, Homo sapien
gacacctccaacctttgctaagaac

SEQ ID NO: 1153832 - DNA, 25 bp, Homo sapien
cagttgccttcccacaggcctcaca

SEQ ID NO: 1153833 - DNA, 25 bp, Homo sapien
gagggtctaggcagtaggtgtgata

SEQ ID NO: 1153834 - DNA, 25 bp, Homo sapien
tgtctgcaatggagggtctaggcag

SEQ ID NO: 1153835 - DNA, 25 bp, Homo sapien
ataagatcttcttctctatagtttc

SEQ ID NO: 1153836 - DNA, 25 bp, Homo sapien
tcaaaaccaatgtctgctacatttt

SEQ ID NO: 1153837 - DNA, 25 bp, Homo sapien
aaaaccaatgtctgctacattttcc

SEQ ID NO: 1153838 - DNA, 25 bp, Homo sapien
caaaaccaatgtctgctacattttc

SEQ ID NO: 1153839 - DNA, 25 bp, Homo sapien
atcaaaaccaatgtctgctacattt

SEQ ID NO: 1153840 - DNA, 25 bp, Homo sapien
ttgtgacaatttgtgctacaagtga

SEQ ID NO: 1153841 - DNA, 25 bp, Homo sapien
tgacaatttgtgctacaagtgaaga

SEQ ID NO: 1153842 - DNA, 25 bp, Homo sapien
gacaatttgtgctacaagtgaagat

SEQ ID NO: 1153843 - DNA, 25 bp, Homo sapien
gtgacaatttgtgctacaagtgaag

SEQ ID NO: 1153844 - DNA, 25 bp, Homo sapien
tcagctaatccactatgagcttttt

SEQ ID NO: 1153845 - DNA, 25 bp, Homo sapien
agttagaagcactgcaaatatatgc

SEQ ID NO: 1153846 - DNA, 25 bp, Homo sapien
aatatatgcaatgctcagctaatcc

SEQ ID NO: 1153847 - DNA, 25 bp, Homo sapien
aaagagttagaagcactgcaaatat

SEQ ID NO: 1153848 - DNA, 25 bp, Homo sapien
caaacacacaccatcctgggtataa

SEQ ID NO: 1153849 - DNA, 25 bp, Homo sapien
acacacaccatcctgggtataagtc

SEQ ID NO: 1153850 - DNA, 25 bp, Homo sapien
ccatcctgggtataagtcttgggtg

SEQ ID NO: 1153851 - DNA, 25 bp, Homo sapien
gattcagtcaaacacacaccatcct

SEQ ID NO: 1153852 - DNA, 25 bp, Homo sapien
ttcttggaactgtaactgtgaggct

SEQ ID NO: 1153853 - DNA, 25 bp, Homo sapien
tacatacttgtatctagatgactaa

SEQ ID NO: 1153854 - DNA, 25 bp, Homo sapien
caaaaggtaggctaacttaacattg

SEQ ID NO: 1153855 - DNA, 25 bp, Homo sapien
cttaacattgttcactctttttaag

SEQ ID NO: 1153856 - DNA, 25 bp, Homo sapien
gaagagaagagacgagacgaggaca

SEQ ID NO: 1153857 - DNA, 25 bp, Homo sapien
cctcatcttctaggagctggatcac

SEQ ID NO: 1153858 - DNA, 25 bp, Homo sapien
tcttctaggagctggatcactcctc

SEQ ID NO: 1153859 - DNA, 25 bp, Homo sapien
tcatcttctaggagctggatcactc

SEQ ID NO: 1153860 - DNA, 25 bp, Homo sapien
tctcctcatcttctaggagctggat

SEQ ID NO: 1153861 - DNA, 25 bp, Homo sapien
agaaagggatgtgacagcagccagc

SEQ ID NO: 1153862 - DNA, 25 bp, Homo sapien
ctccggctgcgacctgctggcccag

SEQ ID NO: 1153863 - DNA, 25 bp, Homo sapien
agctccggctgcgacctgctggccc

SEQ ID NO: 1153864 - DNA, 25 bp, Homo sapien
gctccggctgcgacctgctggccca

SEQ ID NO: 1153865 - DNA, 25 bp, Homo sapien
atttgtgaagtgtttcggcctctgc

SEQ ID NO: 1153866 - DNA, 25 bp, Homo sapien
aagtgtttcggcctctgctggcgtt

SEQ ID NO: 1153867 - DNA, 25 bp, Homo sapien
tgctggcgttaagctcagctgaagg

SEQ ID NO: 1153868 - DNA, 25 bp, Homo sapien
tcccagctgacaagttgcatttgtg

SEQ ID NO: 1153869 - DNA, 25 bp, Homo sapien
gctcaccgcgctcggcgcgccagag

SEQ ID NO: 1153870 - DNA, 25 bp, Homo sapien
agtgtagtggtgatcccgcaggtcc

SEQ ID NO: 1153871 - DNA, 25 bp, Homo sapien
gtgccttggcgtcctagctcaccgc

SEQ ID NO: 1153872 - DNA, 25 bp, Homo sapien
tgccgcggtccctggccgctccccg

SEQ ID NO: 1153873 - DNA, 25 bp, Homo sapien
agcgagagaagagagcaagccgcca

SEQ ID NO: 1153874 - DNA, 25 bp, Homo sapien
ctggttcggagcgagagaagagagc

SEQ ID NO: 1153875 - DNA, 25 bp, Homo sapien
ggagcgagagaagagagcaagccgc

SEQ ID NO: 1153876 - DNA, 25 bp, Homo sapien
ggttcggagcgagagaagagagcaa

SEQ ID NO: 1153877 - DNA, 25 bp, Homo sapien
cacatggcagcgacagcggctgtgt

SEQ ID NO: 1153878 - DNA, 25 bp, Homo sapien
ctgcggcgcgccacatggcagcgac

SEQ ID NO: 1153879 - DNA, 25 bp, Homo sapien
gcgccacatggcagcgacagcggct

SEQ ID NO: 1153880 - DNA, 25 bp, Homo sapien
tgcggcgcgccacatggcagcgaca

SEQ ID NO: 1153881 - DNA, 25 bp, Homo sapien
ctggtgcccgctgacagccagggct

SEQ ID NO: 1153882 - DNA, 25 bp, Homo sapien
tccagtctacgcgatgggcacagga

SEQ ID NO: 1153883 - DNA, 25 bp, Homo sapien
ttcctgaagcgcctctggctcggtg

SEQ ID NO: 1153884 - DNA, 25 bp, Homo sapien
gagcgcgcggggacttctcttgctt

SEQ ID NO: 1153885 - DNA, 25 bp, Homo sapien
gcagagtcggtttgtgcgcgatccc

SEQ ID NO: 1153886 - DNA, 25 bp, Homo sapien
ccgcagagtcggtttgtgcgcgatc

SEQ ID NO: 1153887 - DNA, 25 bp, Homo sapien
agagtcggtttgtgcgcgatcccaa

SEQ ID NO: 1153888 - DNA, 25 bp, Homo sapien
cgggctgggccgcagagtcggtttg

SEQ ID NO: 1153889 - DNA, 25 bp, Homo sapien
gcgccacgaagaggtctgacacagg

SEQ ID NO: 1153890 - DNA, 25 bp, Homo sapien
gaggtctgacacaggtagagacacg

SEQ ID NO: 1153891 - DNA, 25 bp, Homo sapien
cgaagaggtctgacacaggtagaga

SEQ ID NO: 1153892 - DNA, 25 bp, Homo sapien
tgacacaggtagagacacgatgaag

SEQ ID NO: 1153893 - DNA, 25 bp, Homo sapien
ctggagatggcccagtagcgggcca

SEQ ID NO: 1153894 - DNA, 25 bp, Homo sapien
ggagatggcccagtagcgggccacg

SEQ ID NO: 1153895 - DNA, 25 bp, Homo sapien
tggagatggcccagtagcgggccac

SEQ ID NO: 1153896 - DNA, 25 bp, Homo sapien
cgctgggtcatcttgcgctcgtagc

SEQ ID NO: 1153897 - DNA, 25 bp, Homo sapien
ggtcatcttgcgctcgtagcggaag

SEQ ID NO: 1153898 - DNA, 25 bp, Homo sapien
catgaccaaggccatgcgctgggtc

SEQ ID NO: 1153899 - DNA, 25 bp, Homo sapien
catcttgcgctcgtagcggaagggc

SEQ ID NO: 1153900 - DNA, 25 bp, Homo sapien
ctggaccggaatgaaggagatgagg

SEQ ID NO: 1153901 - DNA, 25 bp, Homo sapien
agctggaccggaatgaaggagatga

SEQ ID NO: 1153902 - DNA, 25 bp, Homo sapien
ccagttgagctggaccggaatgaag

SEQ ID NO: 1153903 - DNA, 25 bp, Homo sapien
tgagctggaccggaatgaaggagat

SEQ ID NO: 1153904 - DNA, 25 bp, Homo sapien
cgtaggttcgattcaggctggagtc

SEQ ID NO: 1153905 - DNA, 25 bp, Homo sapien
gatggcgtaggttcgattcaggctg

SEQ ID NO: 1153906 - DNA, 25 bp, Homo sapien
tggcgtaggttcgattcaggctgga

SEQ ID NO: 1153907 - DNA, 25 bp, Homo sapien
taggttcgattcaggctggagtcac

SEQ ID NO: 1153908 - DNA, 25 bp, Homo sapien
cacctgggcgatgcggtagatgcgc

SEQ ID NO: 1153909 - DNA, 25 bp, Homo sapien
tagatgcgcgtgtaggtcacgatca

SEQ ID NO: 1153910 - DNA, 25 bp, Homo sapien
cgcgtgtaggtcacgatcatgatgg

SEQ ID NO: 1153911 - DNA, 25 bp, Homo sapien
ggaggaaatcctgcggatctgcacc

SEQ ID NO: 1153912 - DNA, 25 bp, Homo sapien
agcaacacacgaagacccccatgat

SEQ ID NO: 1153913 - DNA, 25 bp, Homo sapien
catgcagttaaggatgaagaagggc

SEQ ID NO: 1153914 - DNA, 25 bp, Homo sapien
tctcactgacgcaggggaagccggc

SEQ ID NO: 1153915 - DNA, 25 bp, Homo sapien
ggcagccagcaacacacgaagaccc

SEQ ID NO: 1153916 - DNA, 25 bp, Homo sapien
gaagtcggcgttgaaggcatagtga

SEQ ID NO: 1153917 - DNA, 25 bp, Homo sapien
cggaagtcggcgttgaaggcatagt

SEQ ID NO: 1153918 - DNA, 25 bp, Homo sapien
cttccggaagtcggcgttgaaggca

SEQ ID NO: 1153919 - DNA, 25 bp, Homo sapien
tccggaagtcggcgttgaaggcata

SEQ ID NO: 1153920 - DNA, 25 bp, Homo sapien
ctgcaccccagcagctgggcaaaca

SEQ ID NO: 1153921 - DNA, 25 bp, Homo sapien
tgcaccccagcagctgggcaaacac

SEQ ID NO: 1153922 - DNA, 25 bp, Homo sapien
tggatgtaggcagctgcgatttcct

SEQ ID NO: 1153923 - DNA, 25 bp, Homo sapien
tgtggatgtaggcagctgcgatttc

SEQ ID NO: 1153924 - DNA, 25 bp, Homo sapien
gtaggagatgagctcattgctgatg

SEQ ID NO: 1153925 - DNA, 25 bp, Homo sapien
ttgtaggagatgagctcattgctga

SEQ ID NO: 1153926 - DNA, 25 bp, Homo sapien
gacatgcgatcgaaaggactctcct

SEQ ID NO: 1153927 - DNA, 25 bp, Homo sapien
tctgggacatgcgatcgaaaggact

SEQ ID NO: 1153928 - DNA, 25 bp, Homo sapien
gggatgtctgatagatctgggacat

SEQ ID NO: 1153929 - DNA, 25 bp, Homo sapien
gatagatctgggacatgcgatcgaa

SEQ ID NO: 1153930 - DNA, 25 bp, Homo sapien
cttctctcacaggatcattgttcca

SEQ ID NO: 1153931 - DNA, 25 bp, Homo sapien
tctcacaggatcattgttccatctc

SEQ ID NO: 1153932 - DNA, 25 bp, Homo sapien
tctctcacaggatcattgttccatc

SEQ ID NO: 1153933 - DNA, 25 bp, Homo sapien
ttctctcacaggatcattgttccat

SEQ ID NO: 1153934 - DNA, 25 bp, Homo sapien
tatagcaacccatgctttagaacag

SEQ ID NO: 1153935 - DNA, 25 bp, Homo sapien
cttatttaaactggagcctagaaca

SEQ ID NO: 1153936 - DNA, 25 bp, Homo sapien
caatgcctagagcatagtacgtaat

SEQ ID NO: 1153937 - DNA, 25 bp, Homo sapien
tttgattgacaactatattcccagc

SEQ ID NO: 1153938 - DNA, 25 bp, Homo sapien
aaccactgacctagggtgaaccgtg

SEQ ID NO: 1153939 - DNA, 25 bp, Homo sapien
tactttgcccataaccctagggtgc

SEQ ID NO: 1153940 - DNA, 25 bp, Homo sapien
caattggtccatcatgtaagagcta

SEQ ID NO: 1153941 - DNA, 25 bp, Homo sapien
cagaagacggcaggagcacctgaca

SEQ ID NO: 1153942 - DNA, 25 bp, Homo sapien
ccaaccctcagtaacggttctcttg

SEQ ID NO: 1153943 - DNA, 25 bp, Homo sapien
aaccctcagtaacggttctcttgct

SEQ ID NO: 1153944 - DNA, 25 bp, Homo sapien
catctttccaaccctcagtaacggt

SEQ ID NO: 1153945 - DNA, 25 bp, Homo sapien
caaccctcagtaacggttctcttgc

SEQ ID NO: 1153946 - DNA, 25 bp, Homo sapien
tctccagtgccctccaaacagtcca

SEQ ID NO: 1153947 - DNA, 25 bp, Homo sapien
ctccagtgccctccaaacagtccat

SEQ ID NO: 1153948 - DNA, 25 bp, Homo sapien
ctctccagtgccctccaaacagtcc

SEQ ID NO: 1153949 - DNA, 25 bp, Homo sapien
taagacagcgatcataataatcaac

SEQ ID NO: 1153950 - DNA, 25 bp, Homo sapien
taatcaacattgacatagtcaatac

SEQ ID NO: 1153951 - DNA, 25 bp, Homo sapien
tgctcatgtaacaagcacctgtagt

SEQ ID NO: 1153952 - DNA, 25 bp, Homo sapien
gacatagtcaatacaaacgtagtaa

SEQ ID NO: 1153953 - DNA, 25 bp, Homo sapien
tctgggcctgaggtctcctgtgcgc

SEQ ID NO: 1153954 - DNA, 25 bp, Homo sapien
agtctgggcctgaggtctcctgtgc

SEQ ID NO: 1153955 - DNA, 25 bp, Homo sapien
tggagtctgggcctgaggtctcctg

SEQ ID NO: 1153956 - DNA, 25 bp, Homo sapien
tgggcctgaggtctcctgtgcgcct

SEQ ID NO: 1153957 - DNA, 25 bp, Homo sapien
gggggggctcgagggtgtggcacag

SEQ ID NO: 1153958 - DNA, 25 bp, Homo sapien
caggccccttggttgtgccacaggc

SEQ ID NO: 1153959 - DNA, 25 bp, Homo sapien
gcactgctcacatgagcccccatca

SEQ ID NO: 1153960 - DNA, 25 bp, Homo sapien
atcagcaggccccttggttgtgcca

SEQ ID NO: 1153961 - DNA, 25 bp, Homo sapien
gcttcggagtgtgggtcggggtcta

SEQ ID NO: 1153962 - DNA, 25 bp, Homo sapien
ttcatgatacagcttcggagtgtgg

SEQ ID NO: 1153963 - DNA, 25 bp, Homo sapien
ccacagccgggctccgttctgggaa

SEQ ID NO: 1153964 - DNA, 25 bp, Homo sapien
attccacagccgggctccgttctgg

SEQ ID NO: 1153965 - DNA, 25 bp, Homo sapien
cgcatcactattccacagccgggct

SEQ ID NO: 1153966 - DNA, 25 bp, Homo sapien
gcatcactattccacagccgggctc

SEQ ID NO: 1153967 - DNA, 25 bp, Homo sapien
gacaacggcggtgccggccctggca

SEQ ID NO: 1153968 - DNA, 25 bp, Homo sapien
gcacgaggcccaggtgtgtactctg

SEQ ID NO: 1153969 - DNA, 25 bp, Homo sapien
aggcaaacattgactgtttgccttg

SEQ ID NO: 1153970 - DNA, 25 bp, Homo sapien
gcccctggaggatcactctgactga

SEQ ID NO: 1153971 - DNA, 25 bp, Homo sapien
ggaacccttgacatccacgtgcatg

SEQ ID NO: 1153972 - DNA, 25 bp, Homo sapien
tccagggatcccttcagggtgctgc

SEQ ID NO: 1153973 - DNA, 25 bp, Homo sapien
ctccagggatcccttcagggtgctg

SEQ ID NO: 1153974 - DNA, 25 bp, Homo sapien
gggaacccttgacatccacgtgcat

SEQ ID NO: 1153975 - DNA, 25 bp, Homo sapien
ggagcgatttcccaatgcagcccta

SEQ ID NO: 1153976 - DNA, 25 bp, Homo sapien
tgtgttttccctgggagcgatttcc

SEQ ID NO: 1153977 - DNA, 25 bp, Homo sapien
tcaatgcaattgtgagacacctccc

SEQ ID NO: 1153978 - DNA, 25 bp, Homo sapien
atcagagggtcacactgggcaaccc

SEQ ID NO: 1153979 - DNA, 25 bp, Homo sapien
cagaggaggaaaagcatcaggatta

SEQ ID NO: 1153980 - DNA, 25 bp, Homo sapien
tgcagaggaggaaaagcatcaggat

SEQ ID NO: 1153981 - DNA, 25 bp, Homo sapien
agaggaggaaaagcatcaggattac

SEQ ID NO: 1153982 - DNA, 25 bp, Homo sapien
ctgcagaggaggaaaagcatcagga

SEQ ID NO: 1153983 - DNA, 25 bp, Homo sapien
accaactcttggtactggatgcagc

SEQ ID NO: 1153984 - DNA, 25 bp, Homo sapien
tcccaccaactcttggtactggatg

SEQ ID NO: 1153985 - DNA, 25 bp, Homo sapien
ccaccaactcttggtactggatgca

SEQ ID NO: 1153986 - DNA, 25 bp, Homo sapien
aactcttggtactggatgcagccat

SEQ ID NO: 1153987 - DNA, 25 bp, Homo sapien
tgctcatgtctccagccacaatatc

SEQ ID NO: 1153988 - DNA, 25 bp, Homo sapien
ttgctcatgtctccagccacaatat

SEQ ID NO: 1153989 - DNA, 25 bp, Homo sapien
tatgtcttctggtttcgtgtgacaa

SEQ ID NO: 1153990 - DNA, 25 bp, Homo sapien
tcttctggtttcgtgtgacaatgaa

SEQ ID NO: 1153991 - DNA, 25 bp, Homo sapien
ttatgtcttctggtttcgtgtgaca

SEQ ID NO: 1153992 - DNA, 25 bp, Homo sapien
tgtcttctggtttcgtgtgacaatg

SEQ ID NO: 1153993 - DNA, 25 bp, Homo sapien
ctgtgcctggcctattttaactgtt

SEQ ID NO: 1153994 - DNA, 25 bp, Homo sapien
ttttcagtttgcatcatgattgtct

SEQ ID NO: 1153995 - DNA, 25 bp, Homo sapien
ttcagtttgcatcatgattgtctgc

SEQ ID NO: 1153996 - DNA, 25 bp, Homo sapien
cttgtttatctcccatgtctctatt

SEQ ID NO: 1153997 - DNA, 25 bp, Homo sapien
tattttcagtttgcatcatgattgt

SEQ ID NO: 1153998 - DNA, 25 bp, Homo sapien
gatttattactgtaacatagtatgg

SEQ ID NO: 1153999 - DNA, 25 bp, Homo sapien
tcagcttagggttgtaatggctaag

SEQ ID NO: 1154000 - DNA, 25 bp, Homo sapien
ccagctctttatagtttaagaggaa

SEQ ID NO: 1154001 - DNA, 25 bp, Homo sapien
catagtatggatatatagtagaaag

SEQ ID NO: 1154002 - DNA, 25 bp, Homo sapien
tacagcttaaaatgtcgatagtgct

SEQ ID NO: 1154003 - DNA, 25 bp, Homo sapien
gagaaatcctggtttgacatattat

SEQ ID NO: 1154004 - DNA, 25 bp, Homo sapien
ttctacaatatacaggacagcctcc

SEQ ID NO: 1154005 - DNA, 25 bp, Homo sapien
gaatatggcaaacagtgaatctgtg

SEQ ID NO: 1154006 - DNA, 25 bp, Homo sapien
ggagaacaggagacgtctctctctg

SEQ ID NO: 1154007 - DNA, 25 bp, Homo sapien
gggacatgtcagtacttgctaaata

SEQ ID NO: 1154008 - DNA, 25 bp, Homo sapien
gacttcaagcttttagaatagcgtc

SEQ ID NO: 1154009 - DNA, 25 bp, Homo sapien
tcccattgtataaccagtgagtaaa

SEQ ID NO: 1154010 - DNA, 25 bp, Homo sapien
catgcctgggtaatttttgtatttt

SEQ ID NO: 1154011 - DNA, 25 bp, Homo sapien
acctctgcctcccacacgccaccat

SEQ ID NO: 1154012 - DNA, 25 bp, Homo sapien
ctctgcctcccacacgccaccatgc

SEQ ID NO: 1154013 - DNA, 25 bp, Homo sapien
aatctcctgacttcatgatctacct

SEQ ID NO: 1154014 - DNA, 25 bp, Homo sapien
gctctttattgtgaagacaagcaca

SEQ ID NO: 1154015 - DNA, 25 bp, Homo sapien
ccacccacagctttcaatacctctc

SEQ ID NO: 1154016 - DNA, 25 bp, Homo sapien
tgctctttattgtgaagacaagcac

SEQ ID NO: 1154017 - DNA, 25 bp, Homo sapien
gaagctgagattctagaaggccagg

SEQ ID NO: 1154018 - DNA, 25 bp, Homo sapien
gatttgtcaagcacccactcactgt

SEQ ID NO: 1154019 - DNA, 25 bp, Homo sapien
tgtgatttcgaagagagccctttct

SEQ ID NO: 1154020 - DNA, 25 bp, Homo sapien
tttcatggtattgggcacagaatcc

SEQ ID NO: 1154021 - DNA, 25 bp, Homo sapien
ggccctagaatagggtctgggagat

SEQ ID NO: 1154022 - DNA, 25 bp, Homo sapien
gacctccctataaccagcaatcaga

SEQ ID NO: 1154023 - DNA, 25 bp, Homo sapien
tcccagcttttgggactaccccaga

SEQ ID NO: 1154024 - DNA, 25 bp, Homo sapien
tggattcagctccaacaaagtttgt

SEQ ID NO: 1154025 - DNA, 25 bp, Homo sapien
tgctagagttttgtggatctcagcc

SEQ ID NO: 1154026 - DNA, 25 bp, Homo sapien
agctcagttgtgctctagaccagaa

SEQ ID NO: 1154027 - DNA, 25 bp, Homo sapien
ggccagaactccatctgacccttgt

SEQ ID NO: 1154028 - DNA, 25 bp, Homo sapien
tccaggccagaactccatctgaccc

SEQ ID NO: 1154029 - DNA, 25 bp, Homo sapien
gggtcatgggccttccctgtagcta

SEQ ID NO: 1154030 - DNA, 25 bp, Homo sapien
tgactcctggttcaagttattcttc

SEQ ID NO: 1154031 - DNA, 25 bp, Homo sapien
ctctgactcctggttcaagttattc

SEQ ID NO: 1154032 - DNA, 25 bp, Homo sapien
tattcttctccctcagcctcccgag

SEQ ID NO: 1154033 - DNA, 25 bp, Homo sapien
gattacaggtgtctgccacctcacc

SEQ ID NO: 1154034 - DNA, 25 bp, Homo sapien
acccctgcacaatgagaagagcaag

SEQ ID NO: 1154035 - DNA, 25 bp, Homo sapien
cgaggacctcaattaggaggtagca

SEQ ID NO: 1154036 - DNA, 25 bp, Homo sapien
cgtcgaggacctcaattaggaggta

SEQ ID NO: 1154037 - DNA, 25 bp, Homo sapien
tcgaggacctcaattaggaggtagc

SEQ ID NO: 1154038 - DNA, 25 bp, Homo sapien
gaggacctcaattaggaggtagcac

SEQ ID NO: 1154039 - DNA, 25 bp, Homo sapien
cattcacttcagtgggctgtcgagc

SEQ ID NO: 1154040 - DNA, 25 bp, Homo sapien
cacttcagtgggctgtcgagctgtg

SEQ ID NO: 1154041 - DNA, 25 bp, Homo sapien
ttcagtgggctgtcgagctgtgcta

SEQ ID NO: 1154042 - DNA, 25 bp, Homo sapien
gatcgaacagatcattcacttcagt

SEQ ID NO: 1154043 - DNA, 25 bp, Homo sapien
cagtcaggctgactccaagaggcta

SEQ ID NO: 1154044 - DNA, 25 bp, Homo sapien
catagagagtacacggatagctgga

SEQ ID NO: 1154045 - DNA, 25 bp, Homo sapien
caatacatatcaatgggttcacccc

SEQ ID NO: 1154046 - DNA, 25 bp, Homo sapien
ggaagcatagagagtacacggatag

SEQ ID NO: 1154047 - DNA, 25 bp, Homo sapien
ggagagagggtgtagagtcatgcca

SEQ ID NO: 1154048 - DNA, 25 bp, Homo sapien
gccagttcttaggtgctcctgacaa

SEQ ID NO: 1154049 - DNA, 25 bp, Homo sapien
gagatctgcagcactctgctcacat

SEQ ID NO: 1154050 - DNA, 25 bp, Homo sapien
tcaagcaacttaatgctaggctaag

SEQ ID NO: 1154051 - DNA, 25 bp, Homo sapien
tgtggatattgcacagcattcagtc

SEQ ID NO: 1154052 - DNA, 25 bp, Homo sapien
acaatctggatggtttgtggatatt

SEQ ID NO: 1154053 - DNA, 25 bp, Homo sapien
caatctggatggtttgtggatattg

SEQ ID NO: 1154054 - DNA, 25 bp, Homo sapien
gtggatattgcacagcattcagtca

SEQ ID NO: 1154055 - DNA, 25 bp, Homo sapien
tctcccttaaacattccagaacata

SEQ ID NO: 1154056 - DNA, 25 bp, Homo sapien
tcctcttaaatcctgttatgttaca

SEQ ID NO: 1154057 - DNA, 25 bp, Homo sapien
cacaagtagtcaggctttctgttat

SEQ ID NO: 1154058 - DNA, 25 bp, Homo sapien
aaattcagttgcagacatccttctc

SEQ ID NO: 1154059 - DNA, 25 bp, Homo sapien
tggttaaaggcgagagacacatcaa

SEQ ID NO: 1154060 - DNA, 25 bp, Homo sapien
cagtgtcaggtgatgactcaaggtt

SEQ ID NO: 1154061 - DNA, 25 bp, Homo sapien
ccacttctggataatgagacataag

SEQ ID NO: 1154062 - DNA, 25 bp, Homo sapien
gagtttacagtagggactgtcctgt

SEQ ID NO: 1154063 - DNA, 25 bp, Homo sapien
ggagatagtttcaataccacaggaa

SEQ ID NO: 1154064 - DNA, 25 bp, Homo sapien
agatgggctatttttacgttgccca

SEQ ID NO: 1154065 - DNA, 25 bp, Homo sapien
gaagtgggagatagtttcaatacca

SEQ ID NO: 1154066 - DNA, 25 bp, Homo sapien
gaggaagtgggagatagtttcaata

SEQ ID NO: 1154067 - DNA, 25 bp, Homo sapien
acatagggtatatgtttacatgttc

SEQ ID NO: 1154068 - DNA, 25 bp, Homo sapien
agacatagggtatatgtttacatgt

SEQ ID NO: 1154069 - DNA, 25 bp, Homo sapien
cctcaataatttgtaacgttttatg

SEQ ID NO: 1154070 - DNA, 25 bp, Homo sapien
catagggtatatgtttacatgttca

SEQ ID NO: 1154071 - DNA, 25 bp, Homo sapien
agaaactgcttgttgcaaagctcca

SEQ ID NO: 1154072 - DNA, 25 bp, Homo sapien
caaagggagttcacatccaaggata

SEQ ID NO: 1154073 - DNA, 25 bp, Homo sapien
ttcacatccaaggatacttgggtct

SEQ ID NO: 1154074 - DNA, 25 bp, Homo sapien
tgttgcaaagctccaaagggagttc

SEQ ID NO: 1154075 - DNA, 25 bp, Homo sapien
aatggtttcctccccaatagccaca

SEQ ID NO: 1154076 - DNA, 25 bp, Homo sapien
ctaatggtttcctccccaatagcca

SEQ ID NO: 1154077 - DNA, 25 bp, Homo sapien
tactaatggtttcctccccaatagc

SEQ ID NO: 1154078 - DNA, 25 bp, Homo sapien
tttcctccccaatagccacaaccat

SEQ ID NO: 1154079 - DNA, 25 bp, Homo sapien
taattcccagagtctaacatacaaa

SEQ ID NO: 1154080 - DNA, 25 bp, Homo sapien
ttaagagagggagtcagaaacatat

SEQ ID NO: 1154081 - DNA, 25 bp, Homo sapien
caaatatgttaggttgcacggcagt

SEQ ID NO: 1154082 - DNA, 25 bp, Homo sapien
aggtggtggcatgagaaattactca

SEQ ID NO: 1154083 - DNA, 25 bp, Homo sapien
taacaacagtgtactcctgagtact

SEQ ID NO: 1154084 - DNA, 25 bp, Homo sapien
tggtctttgacaatgtaccaaccaa

SEQ ID NO: 1154085 - DNA, 25 bp, Homo sapien
gacaatgtaccaaccaatactgagt

SEQ ID NO: 1154086 - DNA, 25 bp, Homo sapien
ccaatactgagtaattagtaacaac

SEQ ID NO: 1154087 - DNA, 25 bp, Homo sapien
gtcccaagtagtagtcaatgtcatt

SEQ ID NO: 1154088 - DNA, 25 bp, Homo sapien
ctgtcccaagtagtagtcaatgtca

SEQ ID NO: 1154089 - DNA, 25 bp, Homo sapien
tcaatgtcattgctccttaggagat

SEQ ID NO: 1154090 - DNA, 25 bp, Homo sapien
cccaagtagtagtcaatgtcattgc

SEQ ID NO: 1154091 - DNA, 25 bp, Homo sapien
ctggtgagcctctctgtcagctggc

SEQ ID NO: 1154092 - DNA, 25 bp, Homo sapien
aagtccagcttgatctttctcactt

SEQ ID NO: 1154093 - DNA, 25 bp, Homo sapien
tcaagtccagcttgatctttctcac

SEQ ID NO: 1154094 - DNA, 25 bp, Homo sapien
ctgaggaccagtggctcaagtccag

SEQ ID NO: 1154095 - DNA, 25 bp, Homo sapien
gcttgatctttctcacttttatgat

SEQ ID NO: 1154096 - DNA, 25 bp, Homo sapien
tcctgactgtggctcataggaaaag

SEQ ID NO: 1154097 - DNA, 25 bp, Homo sapien
tgtcctgactgtggctcataggaaa

SEQ ID NO: 1154098 - DNA, 25 bp, Homo sapien
gtggctcataggaaaagccaagtaa

SEQ ID NO: 1154099 - DNA, 25 bp, Homo sapien
aagccaagtaagccaaggggaccat

SEQ ID NO: 1154100 - DNA, 25 bp, Homo sapien
tcttctcttcatagtgtgtgtactc

SEQ ID NO: 1154101 - DNA, 25 bp, Homo sapien
ctttcttctcttcatagtgtgtgta

SEQ ID NO: 1154102 - DNA, 25 bp, Homo sapien
ctcttcatagtgtgtgtactcgctg

SEQ ID NO: 1154103 - DNA, 25 bp, Homo sapien
gagggtgtgagggaccgagcatcca

SEQ ID NO: 1154104 - DNA, 25 bp, Homo sapien
tgctggatttggccttagcccccag

SEQ ID NO: 1154105 - DNA, 25 bp, Homo sapien
ctggatttggccttagcccccagag

SEQ ID NO: 1154106 - DNA, 25 bp, Homo sapien
gctggatttggccttagcccccaga

SEQ ID NO: 1154107 - DNA, 25 bp, Homo sapien
tcctctctgatggcatcaggtccca

SEQ ID NO: 1154108 - DNA, 25 bp, Homo sapien
gaactcctctctgatggcatcaggt

SEQ ID NO: 1154109 - DNA, 25 bp, Homo sapien
ctctctgatggcatcaggtcccatc

SEQ ID NO: 1154110 - DNA, 25 bp, Homo sapien
ctagaactcctctctgatggcatca

SEQ ID NO: 1154111 - DNA, 25 bp, Homo sapien
ctgaaaggcaggaaactggatggag

SEQ ID NO: 1154112 - DNA, 25 bp, Homo sapien
aggagaccaccggtgtctcacagca

SEQ ID NO: 1154113 - DNA, 25 bp, Homo sapien
gagaccaccggtgtctcacagcagc

SEQ ID NO: 1154114 - DNA, 25 bp, Homo sapien
ccaaggagaccaccggtgtctcaca

SEQ ID NO: 1154115 - DNA, 25 bp, Homo sapien
agccaaggagaccaccggtgtctca

SEQ ID NO: 1154116 - DNA, 25 bp, Homo sapien
gaagcaggaggaatagtgctggcac

SEQ ID NO: 1154117 - DNA, 25 bp, Homo sapien
ctgtggaagcaggaggaatagtgct

SEQ ID NO: 1154118 - DNA, 25 bp, Homo sapien
tggaagcaggaggaatagtgctggc

SEQ ID NO: 1154119 - DNA, 25 bp, Homo sapien
tgtggaagcaggaggaatagtgctg

SEQ ID NO: 1154120 - DNA, 25 bp, Homo sapien
taagctggtacacagaggagcctga

SEQ ID NO: 1154121 - DNA, 25 bp, Homo sapien
tggagttaagctggtacacagagga

SEQ ID NO: 1154122 - DNA, 25 bp, Homo sapien
ggattcttcccagttctatggtgcc

SEQ ID NO: 1154123 - DNA, 25 bp, Homo sapien
tggtacacagaggagcctgaggata

SEQ ID NO: 1154124 - DNA, 25 bp, Homo sapien
catgggcagtagagcccagctggtg

SEQ ID NO: 1154125 - DNA, 25 bp, Homo sapien
cacttccatgggcagtagagcccag

SEQ ID NO: 1154126 - DNA, 25 bp, Homo sapien
cttccatgggcagtagagcccagct

SEQ ID NO: 1154127 - DNA, 25 bp, Homo sapien
tccatgggcagtagagcccagctgg

SEQ ID NO: 1154128 - DNA, 25 bp, Homo sapien
cattgcagagctgaggtatggactc

SEQ ID NO: 1154129 - DNA, 25 bp, Homo sapien
ccaggccctgactgtagaagttaga

SEQ ID NO: 1154130 - DNA, 25 bp, Homo sapien
ggactccaggccctgactgtagaag

SEQ ID NO: 1154131 - DNA, 25 bp, Homo sapien
ctcattgcagagctgaggtatggac

SEQ ID NO: 1154132 - DNA, 25 bp, Homo sapien
atttattatcatggggtcagagctc

SEQ ID NO: 1154133 - DNA, 25 bp, Homo sapien
gaacacggaggattgatttattatc

SEQ ID NO: 1154134 - DNA, 25 bp, Homo sapien
aacacggaggattgatttattatca

SEQ ID NO: 1154135 - DNA, 25 bp, Homo sapien
ttgatttattatcatggggtcagag

SEQ ID NO: 1154136 - DNA, 25 bp, Homo sapien
tttcctggagggaaagacgatcctc

SEQ ID NO: 1154137 - DNA, 25 bp, Homo sapien
ccagctcttgaaggtgggattgaga

SEQ ID NO: 1154138 - DNA, 25 bp, Homo sapien
tggagtcattttcctggagggaaag

SEQ ID NO: 1154139 - DNA, 25 bp, Homo sapien
agacgatcctccctgaaatgcaaga

SEQ ID NO: 1154140 - DNA, 25 bp, Homo sapien
ctctgactggagggactcaaagagc

SEQ ID NO: 1154141 - DNA, 25 bp, Homo sapien
cactgctcaaagggatttggtgaca

SEQ ID NO: 1154142 - DNA, 25 bp, Homo sapien
tggctttgccagcaccgctatccag

SEQ ID NO: 1154143 - DNA, 25 bp, Homo sapien
ctgtttgtttccagggtcagtgctg

SEQ ID NO: 1154144 - DNA, 25 bp, Homo sapien
tggctgggaagttcttgttaatgga

SEQ ID NO: 1154145 - DNA, 25 bp, Homo sapien
ttcttgttaatggagaaggggctga

SEQ ID NO: 1154146 - DNA, 25 bp, Homo sapien
agggcaggaacattttgccacacac

SEQ ID NO: 1154147 - DNA, 25 bp, Homo sapien
ccttaagggcaggaacattttgcca

SEQ ID NO: 1154148 - DNA, 25 bp, Homo sapien
cgtccagaacttccccagagccctg

SEQ ID NO: 1154149 - DNA, 25 bp, Homo sapien
ggaacattttgccacacactgagtt

SEQ ID NO: 1154150 - DNA, 25 bp, Homo sapien
aagagacactatctttttgaccagc

SEQ ID NO: 1154151 - DNA, 25 bp, Homo sapien
cttagggcactgtagtcatcaatgt

SEQ ID NO: 1154152 - DNA, 25 bp, Homo sapien
gctgtcttagggcactgtagtcatc

SEQ ID NO: 1154153 - DNA, 25 bp, Homo sapien
gagacactatctttttgaccagcag

SEQ ID NO: 1154154 - DNA, 25 bp, Homo sapien
tgggcttcaaggccagggaagctgc

SEQ ID NO: 1154155 - DNA, 25 bp, Homo sapien
ttgggcttcaaggccagggaagctg

SEQ ID NO: 1154156 - DNA, 25 bp, Homo sapien
ccattgagtcgactgtgcccacaga

SEQ ID NO: 1154157 - DNA, 25 bp, Homo sapien
tgactgcagtagataataagctacc

SEQ ID NO: 1154158 - DNA, 25 bp, Homo sapien
ggccatatacctgcaaatccttcag

SEQ ID NO: 1154159 - DNA, 25 bp, Homo sapien
caaaggctgctaggcaatgccacgt

SEQ ID NO: 1154160 - DNA, 25 bp, Homo sapien
gggtccttggcagggctgctctcca

SEQ ID NO: 1154161 - DNA, 25 bp, Homo sapien
ccaactcctctagggcatggtgcag

SEQ ID NO: 1154162 - DNA, 25 bp, Homo sapien
tgctgctctgaagctcatgaatgcc

SEQ ID NO: 1154163 - DNA, 25 bp, Homo sapien
aggcatcacagggatgtgggtcctt

SEQ ID NO: 1154164 - DNA, 25 bp, Homo sapien
ctgtgacattgaggagaaagaacag

SEQ ID NO: 1154165 - DNA, 25 bp, Homo sapien
agaacagtattagagggcaggagaa

SEQ ID NO: 1154166 - DNA, 25 bp, Homo sapien
caggagaactgggtttgaaccaaga

SEQ ID NO: 1154167 - DNA, 25 bp, Homo sapien
gtttgaaccaagaaaggacactggc

SEQ ID NO: 1154168 - DNA, 25 bp, Homo sapien
atgtggctcctgattttctggaaaa

SEQ ID NO: 1154169 - DNA, 25 bp, Homo sapien
tatgtggctcctgattttctggaaa

SEQ ID NO: 1154170 - DNA, 25 bp, Homo sapien
tgtggctcctgattttctggaaaag

SEQ ID NO: 1154171 - DNA, 25 bp, Homo sapien
ggtcttcagatgctcagctatgctt

SEQ ID NO: 1154172 - DNA, 25 bp, Homo sapien
ggcggtcttcagatgctcagctatg

SEQ ID NO: 1154173 - DNA, 25 bp, Homo sapien
gatgctcagctatgctttgaaggag

SEQ ID NO: 1154174 - DNA, 25 bp, Homo sapien
agctatgctttgaaggagccactcc

SEQ ID NO: 1154175 - DNA, 25 bp, Homo sapien
ctctaagttagtgcttgccttcttt

SEQ ID NO: 1154176 - DNA, 25 bp, Homo sapien
cttctttaaaacatcatgtgttctg

SEQ ID NO: 1154177 - DNA, 25 bp, Homo sapien
taagttagtgcttgccttctttaaa

SEQ ID NO: 1154178 - DNA, 25 bp, Homo sapien
tttaaaacatcatgtgttctggtta

SEQ ID NO: 1154179 - DNA, 25 bp, Homo sapien
ggacctgtgatcttgcaagtggacc

SEQ ID NO: 1154180 - DNA, 25 bp, Homo sapien
gacctgtgatcttgcaagtggaccc

SEQ ID NO: 1154181 - DNA, 25 bp, Homo sapien
cacaaggagtacatggcagagctct

SEQ ID NO: 1154182 - DNA, 25 bp, Homo sapien
caaggagtacatggcagagctctta

SEQ ID NO: 1154183 - DNA, 25 bp, Homo sapien
catggcagagctcttagggatttca

SEQ ID NO: 1154184 - DNA, 25 bp, Homo sapien
gagtacatggcagagctcttaggga

SEQ ID NO: 1154185 - DNA, 25 bp, Homo sapien
gctgggccaagtggaccttggctaa

SEQ ID NO: 1154186 - DNA, 25 bp, Homo sapien
ttagtgctgggccaagtggaccttg

SEQ ID NO: 1154187 - DNA, 25 bp, Homo sapien
agtgctgggccaagtggaccttggc

SEQ ID NO: 1154188 - DNA, 25 bp, Homo sapien
cctcagcagataggtagctgcacaa

SEQ ID NO: 1154189 - DNA, 25 bp, Homo sapien
cagaattggtctggccatcagtccc

SEQ ID NO: 1154190 - DNA, 25 bp, Homo sapien
tttcaacagaattggtctggccatc

SEQ ID NO: 1154191 - DNA, 25 bp, Homo sapien
ttggtctggccatcagtccccaatt

SEQ ID NO: 1154192 - DNA, 25 bp, Homo sapien
ctatgcaagaatttcaacagaattg

SEQ ID NO: 1154193 - DNA, 25 bp, Homo sapien
atcactgtagtcagagtccaaagcc

SEQ ID NO: 1154194 - DNA, 25 bp, Homo sapien
gagacttgaactctgatcactgtag

SEQ ID NO: 1154195 - DNA, 25 bp, Homo sapien
actgtagtcagagtccaaagccctc

SEQ ID NO: 1154196 - DNA, 25 bp, Homo sapien
gacttgaactctgatcactgtagtc

SEQ ID NO: 1154197 - DNA, 25 bp, Homo sapien
ctccaattgcatatagccagtggcc

SEQ ID NO: 1154198 - DNA, 25 bp, Homo sapien
gagggtccatgaccacgattgcggc

SEQ ID NO: 1154199 - DNA, 25 bp, Homo sapien
ggtccaggactccaattgcatatag

SEQ ID NO: 1154200 - DNA, 25 bp, Homo sapien
gtccatgaccacgattgcggcaatt

SEQ ID NO: 1154201 - DNA, 25 bp, Homo sapien
agtactggatctgatgggcccagct

SEQ ID NO: 1154202 - DNA, 25 bp, Homo sapien
aagtactggatctgatgggcccagc

SEQ ID NO: 1154203 - DNA, 25 bp, Homo sapien
ggcgaaggttttccctgagatggca

SEQ ID NO: 1154204 - DNA, 25 bp, Homo sapien
tggtgaaactaccgtggactccttc

SEQ ID NO: 1154205 - DNA, 25 bp, Homo sapien
gcccagttcaagtccttgttgccca

SEQ ID NO: 1154206 - DNA, 25 bp, Homo sapien
cccagttcaagtccttgttgcccat

SEQ ID NO: 1154207 - DNA, 25 bp, Homo sapien
ttctggagtggacaaggagcagcag

SEQ ID NO: 1154208 - DNA, 25 bp, Homo sapien
cagctggatagcttctggagtggac

SEQ ID NO: 1154209 - DNA, 25 bp, Homo sapien
ggcctgatgttctggagtccaccat

SEQ ID NO: 1154210 - DNA, 25 bp, Homo sapien
catggcctgatgttctggagtccac

SEQ ID NO: 1154211 - DNA, 25 bp, Homo sapien
gtgagactgtctccgccgaggccct

SEQ ID NO: 1154212 - DNA, 25 bp, Homo sapien
tatgcggatacctccccacacgctt

SEQ ID NO: 1154213 - DNA, 25 bp, Homo sapien
ggccctcatctctatgcggatacct

SEQ ID NO: 1154214 - DNA, 25 bp, Homo sapien
agctgaagcctctccgaccaaccac

SEQ ID NO: 1154215 - DNA, 25 bp, Homo sapien
gcctccacccagcttggaaccgttg

SEQ ID NO: 1154216 - DNA, 25 bp, Homo sapien
gcctgacccgtagcttgagtctcct

SEQ ID NO: 1154217 - DNA, 25 bp, Homo sapien
tggcaattggcaaaaaagcctgacc

SEQ ID NO: 1154218 - DNA, 25 bp, Homo sapien
tcctagcgtggctcttggctcgcgg

SEQ ID NO: 1154219 - DNA, 25 bp, Homo sapien
ccaggaccgcccttttgttgattga

SEQ ID NO: 1154220 - DNA, 25 bp, Homo sapien
tcctccaggaccgcccttttgttga

SEQ ID NO: 1154221 - DNA, 25 bp, Homo sapien
cgaccggaggcgatgtccgcaaggt

SEQ ID NO: 1154222 - DNA, 25 bp, Homo sapien
ggcgatgtccgcaaggttgggaggg

SEQ ID NO: 1154223 - DNA, 25 bp, Homo sapien
cagctaacgtgcttcttaggcctta

SEQ ID NO: 1154224 - DNA, 25 bp, Homo sapien
gttcgcagctaacgtgcttcttagg

SEQ ID NO: 1154225 - DNA, 25 bp, Homo sapien
tcgcagctaacgtgcttcttaggcc

SEQ ID NO: 1154226 - DNA, 25 bp, Homo sapien
ctccgttcgcagctaacgtgcttct

SEQ ID NO: 1154227 - DNA, 25 bp, Homo sapien
tgcctgttctggctacccggtgcgc

SEQ ID NO: 1154228 - DNA, 25 bp, Homo sapien
tacccggtgcgcgactctggccctg

SEQ ID NO: 1154229 - DNA, 25 bp, Homo sapien
acccggtgcgcgactctggccctgg

SEQ ID NO: 1154230 - DNA, 25 bp, Homo sapien
ctgttctggctacccggtgcgcgac

SEQ ID NO: 1154231 - DNA, 25 bp, Homo sapien
ggatcctctttgagcgaaaccagcc

SEQ ID NO: 1154232 - DNA, 25 bp, Homo sapien
cctctttgagcgaaaccagccttct

SEQ ID NO: 1154233 - DNA, 25 bp, Homo sapien
gatcctctttgagcgaaaccagcct

SEQ ID NO: 1154234 - DNA, 25 bp, Homo sapien
tcctctttgagcgaaaccagccttc

SEQ ID NO: 1154235 - DNA, 25 bp, Homo sapien
ccccctccccatgccgaaggaagtg

SEQ ID NO: 1154236 - DNA, 25 bp, Homo sapien
gtggaggtttggcgctgggggtcga

SEQ ID NO: 1154237 - DNA, 25 bp, Homo sapien
ggtttggcgctgggggtcgagaaca

SEQ ID NO: 1154238 - DNA, 25 bp, Homo sapien
gaggtttggcgctgggggtcgagaa

SEQ ID NO: 1154239 - DNA, 25 bp, Homo sapien
cggcgagtgggaccagcaggagcct

SEQ ID NO: 1154240 - DNA, 25 bp, Homo sapien
gaccagcaggagcctggaggggcgc

SEQ ID NO: 1154241 - DNA, 25 bp, Homo sapien
ccagcaggagcctggaggggcgcgc

SEQ ID NO: 1154242 - DNA, 25 bp, Homo sapien
agcaggagcctggaggggcgcgcac

SEQ ID NO: 1154243 - DNA, 25 bp, Homo sapien
gcctgggtgtctcgggagctgaggc

SEQ ID NO: 1154244 - DNA, 25 bp, Homo sapien
ctgggcctgggtgtctcgggagctg

SEQ ID NO: 1154245 - DNA, 25 bp, Homo sapien
ccttctgggcctgggtgtctcggga

SEQ ID NO: 1154246 - DNA, 25 bp, Homo sapien
ttctgggcctgggtgtctcgggagc

SEQ ID NO: 1154247 - DNA, 25 bp, Homo sapien
tagggacctccagtaccaccaactg

SEQ ID NO: 1154248 - DNA, 25 bp, Homo sapien
gtactggcagttgtcgtaggctttg

SEQ ID NO: 1154249 - DNA, 25 bp, Homo sapien
gaaagactgcggatgcctagtagct

SEQ ID NO: 1154250 - DNA, 25 bp, Homo sapien
cgtaggctttgtccactttgacaaa

SEQ ID NO: 1154251 - DNA, 25 bp, Homo sapien
tctgccaactgtacattgaaagtac

SEQ ID NO: 1154252 - DNA, 25 bp, Homo sapien
cttaggttctgccaactgtacattg

SEQ ID NO: 1154253 - DNA, 25 bp, Homo sapien
tgaaagtacaacaggccgatcgtgg

SEQ ID NO: 1154254 - DNA, 25 bp, Homo sapien
caactgtacattgaaagtacaacag

SEQ ID NO: 1154255 - DNA, 25 bp, Homo sapien
attcttcgaatgggatgttgcaaat

SEQ ID NO: 1154256 - DNA, 25 bp, Homo sapien
ttgcattcttcgaatgggatgttgc

SEQ ID NO: 1154257 - DNA, 25 bp, Homo sapien
tgtgggagtatctttcccccgatca

SEQ ID NO: 1154258 - DNA, 25 bp, Homo sapien
tgggagtatctttcccccgatcaga

SEQ ID NO: 1154259 - DNA, 25 bp, Homo sapien
tgtgtgggagtatctttcccccgat

SEQ ID NO: 1154260 - DNA, 25 bp, Homo sapien
gggagtatctttcccccgatcagac

SEQ ID NO: 1154261 - DNA, 25 bp, Homo sapien
gactgcgacacaggaacagtcgact

SEQ ID NO: 1154262 - DNA, 25 bp, Homo sapien
tccatctaacgttaggcggagccac

SEQ ID NO: 1154263 - DNA, 25 bp, Homo sapien
tctcgctctggtatcaccacgcaga

SEQ ID NO: 1154264 - DNA, 25 bp, Homo sapien
ggcagcttgccggctacggttgaaa

SEQ ID NO: 1154265 - DNA, 25 bp, Homo sapien
gagaagaaggtgtaccctgaacact

SEQ ID NO: 1154266 - DNA, 25 bp, Homo sapien
ggcagagaagaaggtgtaccctgaa

SEQ ID NO: 1154267 - DNA, 25 bp, Homo sapien
gcagagaagaaggtgtaccctgaac

SEQ ID NO: 1154268 - DNA, 25 bp, Homo sapien
cagagaagaaggtgtaccctgaaca

SEQ ID NO: 1154269 - DNA, 25 bp, Homo sapien
tgagcattaggaaccaggcctggtt

SEQ ID NO: 1154270 - DNA, 25 bp, Homo sapien
aacccttcgctgagcattaggaacc

SEQ ID NO: 1154271 - DNA, 25 bp, Homo sapien
aggcctggtttgcccgccgtgaatt

SEQ ID NO: 1154272 - DNA, 25 bp, Homo sapien
cccgccgtgaattggatcgggagac

SEQ ID NO: 1154273 - DNA, 25 bp, Homo sapien
agtgccaccaccagcctactcaagt

SEQ ID NO: 1154274 - DNA, 25 bp, Homo sapien
catggagtgatacaccagggcagcc

SEQ ID NO: 1154275 - DNA, 25 bp, Homo sapien
accagcctactcaagtcttgcccca

SEQ ID NO: 1154276 - DNA, 25 bp, Homo sapien
gctgtggtcacaccaagtgccacca

SEQ ID NO: 1154277 - DNA, 25 bp, Homo sapien
gtttccctggtgcatgcctctaccg

SEQ ID NO: 1154278 - DNA, 25 bp, Homo sapien
agtccttatcgctgcacaaagctac

SEQ ID NO: 1154279 - DNA, 25 bp, Homo sapien
tcgcagttccctgttggattcaccc

SEQ ID NO: 1154280 - DNA, 25 bp, Homo sapien
tctcccttgtgcagtccttatcgct

SEQ ID NO: 1154281 - DNA, 25 bp, Homo sapien
tgccacgactgggattcgagcccag

SEQ ID NO: 1154282 - DNA, 25 bp, Homo sapien
ccacgactgggattcgagcccaggc

SEQ ID NO: 1154283 - DNA, 25 bp, Homo sapien
caccgcgtaaagtactaaccacaat

SEQ ID NO: 1154284 - DNA, 25 bp, Homo sapien
ggctgctgcggccaccgcgtaaagt

SEQ ID NO: 1154285 - DNA, 25 bp, Homo sapien
cgttttccaggaactcgatagaggt

SEQ ID NO: 1154286 - DNA, 25 bp, Homo sapien
aatgagcatggtacagatttgcact

SEQ ID NO: 1154287 - DNA, 25 bp, Homo sapien
taggtagatgctagggtattactcc

SEQ ID NO: 1154288 - DNA, 25 bp, Homo sapien
aagatctgatcgctggcgttttcca

SEQ ID NO: 1154289 - DNA, 25 bp, Homo sapien
gaattctgccactgtaccgccaatg

SEQ ID NO: 1154290 - DNA, 25 bp, Homo sapien
aattctgccactgtaccgccaatgc

SEQ ID NO: 1154291 - DNA, 25 bp, Homo sapien
agaattctgccactgtaccgccaat

SEQ ID NO: 1154292 - DNA, 25 bp, Homo sapien
attctgccactgtaccgccaatgcc

SEQ ID NO: 1154293 - DNA, 25 bp, Homo sapien
tgcttaccattacaccatggaacct

SEQ ID NO: 1154294 - DNA, 25 bp, Homo sapien
aactcggatcgctggattcagagtc

SEQ ID NO: 1154295 - DNA, 25 bp, Homo sapien
aggttccaccgagactcgaactcgg

SEQ ID NO: 1154296 - DNA, 25 bp, Homo sapien
ttccaccgagactcgaactcggatc

SEQ ID NO: 1154297 - DNA, 25 bp, Homo sapien
tagggagtaaaacacggcattgcct

SEQ ID NO: 1154298 - DNA, 25 bp, Homo sapien
agggagtaaaacacggcattgcctt

SEQ ID NO: 1154299 - DNA, 25 bp, Homo sapien
gggagtaaaacacggcattgccttc

SEQ ID NO: 1154300 - DNA, 25 bp, Homo sapien
cctgaaaggggatcctccaggctct

SEQ ID NO: 1154301 - DNA, 25 bp, Homo sapien
tttgaccccgaatggatgattcggc

SEQ ID NO: 1154302 - DNA, 25 bp, Homo sapien
gaatggatgattcggcgatttccct

SEQ ID NO: 1154303 - DNA, 25 bp, Homo sapien
gagagcggcgtgcatcccgaggctc

SEQ ID NO: 1154304 - DNA, 25 bp, Homo sapien
gggtctaggatcgagaggtggcagc

SEQ ID NO: 1154305 - DNA, 25 bp, Homo sapien
caaaatgacaaaggatgcgattaag

SEQ ID NO: 1154306 - DNA, 25 bp, Homo sapien
aggatgcgattaagagatttcccgg

SEQ ID NO: 1154307 - DNA, 25 bp, Homo sapien
tctaggatcgagaggtggcagcctt

SEQ ID NO: 1154308 - DNA, 25 bp, Homo sapien
ctgctcaggctcctcttccccgtgg

SEQ ID NO: 1154309 - DNA, 25 bp, Homo sapien
tcagagctgctcaggctcctcttcc

SEQ ID NO: 1154310 - DNA, 25 bp, Homo sapien
gctcaggctcctcttccccgtggtc

SEQ ID NO: 1154311 - DNA, 25 bp, Homo sapien
agctgctcaggctcctcttccccgt

SEQ ID NO: 1154312 - DNA, 25 bp, Homo sapien
gatcaattatttgtgaacaggaatg

SEQ ID NO: 1154313 - DNA, 25 bp, Homo sapien
tcaattatttgtgaacaggaatgaa

SEQ ID NO: 1154314 - DNA, 25 bp, Homo sapien
tgatcaattatttgtgaacaggaat

SEQ ID NO: 1154315 - DNA, 25 bp, Homo sapien
attatttgtgaacaggaatgaattt

SEQ ID NO: 1154316 - DNA, 25 bp, Homo sapien
ctagaacgcacaggacgcccagcga

SEQ ID NO: 1154317 - DNA, 25 bp, Homo sapien
cgcggctccaaagaaaaccggctag

SEQ ID NO: 1154318 - DNA, 25 bp, Homo sapien
gggacggcactcatagatccgcacg

SEQ ID NO: 1154319 - DNA, 25 bp, Homo sapien
atggcgtcccctggtggctaccctg

SEQ ID NO: 1154320 - DNA, 25 bp, Homo sapien
ctgttctgcaccagcatttattttt

SEQ ID NO: 1154321 - DNA, 25 bp, Homo sapien
tgttctgcaccagcatttatttttg

SEQ ID NO: 1154322 - DNA, 25 bp, Homo sapien
ttatttttgtctggaggagatcacc

SEQ ID NO: 1154323 - DNA, 25 bp, Homo sapien
catttatttttgtctggaggagatc

SEQ ID NO: 1154324 - DNA, 25 bp, Homo sapien
tgaattaagattataaaggacttcc

SEQ ID NO: 1154325 - DNA, 25 bp, Homo sapien
taagattataaaggacttccctgat

SEQ ID NO: 1154326 - DNA, 25 bp, Homo sapien
cctaccattgtgtataccgcttcac

SEQ ID NO: 1154327 - DNA, 25 bp, Homo sapien
cgcttcaccaaaacgtgaattaaga

SEQ ID NO: 1154328 - DNA, 25 bp, Homo sapien
gagggcctcggtaaaacctacatca

SEQ ID NO: 1154329 - DNA, 25 bp, Homo sapien
ttcttcgggcgagaacagatgccgg

SEQ ID NO: 1154330 - DNA, 25 bp, Homo sapien
gtggccactgaaaggttgctccgca

SEQ ID NO: 1154331 - DNA, 25 bp, Homo sapien
cattatttgaagaacggtgcccagg

SEQ ID NO: 1154332 - DNA, 25 bp, Homo sapien
ttgctcagtcgtcctgccaggcggg

SEQ ID NO: 1154333 - DNA, 25 bp, Homo sapien
ctctaatctctctggttttccaaag

SEQ ID NO: 1154334 - DNA, 25 bp, Homo sapien
gctcagtcgtcctgccaggcgggcg

SEQ ID NO: 1154335 - DNA, 25 bp, Homo sapien
tggttttccaaagccttgctcagtc

SEQ ID NO: 1154336 - DNA, 25 bp, Homo sapien
gcagcagcccaaaagcgactgagca

SEQ ID NO: 1154337 - DNA, 25 bp, Homo sapien
ctgggtcgccgaccgcggagtttct

SEQ ID NO: 1154338 - DNA, 25 bp, Homo sapien
gcttccccttgggacctcaggcggc

SEQ ID NO: 1154339 - DNA, 25 bp, Homo sapien
ctgagcagggtggatacaggctcct

SEQ ID NO: 1154340 - DNA, 25 bp, Homo sapien
ccagaaagggagacataatgacacc

SEQ ID NO: 1154341 - DNA, 25 bp, Homo sapien
tatggaaatataccagtggccaatg

SEQ ID NO: 1154342 - DNA, 25 bp, Homo sapien
tcagggtttccagacgcttagtttc

SEQ ID NO: 1154343 - DNA, 25 bp, Homo sapien
gcactatgctggaacaactgctctc

SEQ ID NO: 1154344 - DNA, 25 bp, Homo sapien
gaaccgagttccgacctccactgga

SEQ ID NO: 1154345 - DNA, 25 bp, Homo sapien
cactggagaccaaatcagttgactt

SEQ ID NO: 1154346 - DNA, 25 bp, Homo sapien
tagctcttgatcctgaaccacttga

SEQ ID NO: 1154347 - DNA, 25 bp, Homo sapien
tgtctctcccgggctttccacggat

SEQ ID NO: 1154348 - DNA, 25 bp, Homo sapien
gctgtctccggagggcagtaacctt

SEQ ID NO: 1154349 - DNA, 25 bp, Homo sapien
cagtaaccttacaggtgagcttggg

SEQ ID NO: 1154350 - DNA, 25 bp, Homo sapien
agcttgggctccgaagacactcagc

SEQ ID NO: 1154351 - DNA, 25 bp, Homo sapien
cttgggctccgaagacactcagcca

SEQ ID NO: 1154352 - DNA, 25 bp, Homo sapien
ggcaaaggagtctccggtctccgga

SEQ ID NO: 1154353 - DNA, 25 bp, Homo sapien
tccggtctccggatacaggcgggat

SEQ ID NO: 1154354 - DNA, 25 bp, Homo sapien
ccctacactcaagccaaaaaaacag

SEQ ID NO: 1154355 - DNA, 25 bp, Homo sapien
taatctcgaggtcagggtttgggcc

SEQ ID NO: 1154356 - DNA, 25 bp, Homo sapien
caagagttgagacggcaaaagcctc

SEQ ID NO: 1154357 - DNA, 25 bp, Homo sapien
gaatctgtgataccaggtaggccct

SEQ ID NO: 1154358 - DNA, 25 bp, Homo sapien
gaggcttccagtcacagacctgtga

SEQ ID NO: 1154359 - DNA, 25 bp, Homo sapien
gatgatgattgcctccagtaaccca

SEQ ID NO: 1154360 - DNA, 25 bp, Homo sapien
gaacccaggctatggcagcaaaagc

SEQ ID NO: 1154361 - DNA, 25 bp, Homo sapien
gaatttttaagggtagctatcacac

SEQ ID NO: 1154362 - DNA, 25 bp, Homo sapien
gcaggcagtttgagcttatgaagaa

SEQ ID NO: 1154363 - DNA, 25 bp, Homo sapien
caaaataaactggttccctgactgg

SEQ ID NO: 1154364 - DNA, 25 bp, Homo sapien
agcttgtggagaaagtacaatcaga

SEQ ID NO: 1154365 - DNA, 25 bp, Homo sapien
gaagcttgtggagaaagtacaatca

SEQ ID NO: 1154366 - DNA, 25 bp, Homo sapien
aagcttgtggagaaagtacaatcag

SEQ ID NO: 1154367 - DNA, 25 bp, Homo sapien
tgaagcttgtggagaaagtacaatc

SEQ ID NO: 1154368 - DNA, 25 bp, Homo sapien
cagtagctttggatgtcaggaattt

SEQ ID NO: 1154369 - DNA, 25 bp, Homo sapien
ggcagtagctttggatgtcaggaat

SEQ ID NO: 1154370 - DNA, 25 bp, Homo sapien
aggcagtagctttggatgtcaggaa

SEQ ID NO: 1154371 - DNA, 25 bp, Homo sapien
gcagtagctttggatgtcaggaatt

SEQ ID NO: 1154372 - DNA, 25 bp, Homo sapien
tctactgagaatggcggtctcttcc

SEQ ID NO: 1154373 - DNA, 25 bp, Homo sapien
gtctcatagctcttatcctggacat

SEQ ID NO: 1154374 - DNA, 25 bp, Homo sapien
gcctggccgtctactgagaatggcg

SEQ ID NO: 1154375 - DNA, 25 bp, Homo sapien
ctgagaatggcggtctcttccactt

SEQ ID NO: 1154376 - DNA, 25 bp, Homo sapien
tttctatgacagtaagttagacagc

SEQ ID NO: 1154377 - DNA, 25 bp, Homo sapien
tggccctagggtatatgctctttaa

SEQ ID NO: 1154378 - DNA, 25 bp, Homo sapien
taaaaatgtgagagctaactgtgga

SEQ ID NO: 1154379 - DNA, 25 bp, Homo sapien
cgactattagtaacaggtttgggat

SEQ ID NO: 1154380 - DNA, 25 bp, Homo sapien
gccttggcaatttggtcagctccct

SEQ ID NO: 1154381 - DNA, 25 bp, Homo sapien
cttggcaatttggtcagctccctct

SEQ ID NO: 1154382 - DNA, 25 bp, Homo sapien
tggcaatttggtcagctccctctcc

SEQ ID NO: 1154383 - DNA, 25 bp, Homo sapien
gctggccttggcaatttggtcagct

SEQ ID NO: 1154384 - DNA, 25 bp, Homo sapien
gaggagagatctcttagaatccctg

SEQ ID NO: 1154385 - DNA, 25 bp, Homo sapien
agaggagagatctcttagaatccct

SEQ ID NO: 1154386 - DNA, 25 bp, Homo sapien
aggagagatctcttagaatccctgt

SEQ ID NO: 1154387 - DNA, 25 bp, Homo sapien
tggcaagttttctgacaaggatctc

SEQ ID NO: 1154388 - DNA, 25 bp, Homo sapien
gagaaggccctcaaaagacttgact

SEQ ID NO: 1154389 - DNA, 25 bp, Homo sapien
tgactgtgttcttcacatgctgggt

SEQ ID NO: 1154390 - DNA, 25 bp, Homo sapien
gaatctctgtctctggtagtaggca

SEQ ID NO: 1154391 - DNA, 25 bp, Homo sapien
gtggcttttgcctgtcttcattttc

SEQ ID NO: 1154392 - DNA, 25 bp, Homo sapien
cttcattttcttaccattgtgattt

SEQ ID NO: 1154393 - DNA, 25 bp, Homo sapien
ctgggagccagtggcttttgcctgt

SEQ ID NO: 1154394 - DNA, 25 bp, Homo sapien
ttcattttcttaccattgtgatttt

SEQ ID NO: 1154395 - DNA, 25 bp, Homo sapien
tggaatgagtcaaatactgttcatc

SEQ ID NO: 1154396 - DNA, 25 bp, Homo sapien
cctcttgagccaggtgaagtaggca

SEQ ID NO: 1154397 - DNA, 25 bp, Homo sapien
ccaggtgaagtaggcaagacaaggg

SEQ ID NO: 1154398 - DNA, 25 bp, Homo sapien
gtaggcaagacaagggattaaacca

SEQ ID NO: 1154399 - DNA, 25 bp, Homo sapien
cattccaccaggacatggaatgaga

SEQ ID NO: 1154400 - DNA, 25 bp, Homo sapien
aaaggatctctttcaggtgctgcca

SEQ ID NO: 1154401 - DNA, 25 bp, Homo sapien
tctctttcaggtgctgccactggct

SEQ ID NO: 1154402 - DNA, 25 bp, Homo sapien
cacaggcagttgttgatgaaaagga

SEQ ID NO: 1154403 - DNA, 25 bp, Homo sapien
tcagaggaagatgccatgacctata

SEQ ID NO: 1154404 - DNA, 25 bp, Homo sapien
acagatgtcagaggaagatgccatg

SEQ ID NO: 1154405 - DNA, 25 bp, Homo sapien
ctatacttgcaaactcccagaagac

SEQ ID NO: 1154406 - DNA, 25 bp, Homo sapien
caaagattcttatgagtcctcacag

SEQ ID NO: 1154407 - DNA, 25 bp, Homo sapien
aactccacgtctatgttcacgatgc

SEQ ID NO: 1154408 - DNA, 25 bp, Homo sapien
tccacgtctatgttcacgatgccgc

SEQ ID NO: 1154409 - DNA, 25 bp, Homo sapien
gaactccacgtctatgttcacgatg

SEQ ID NO: 1154410 - DNA, 25 bp, Homo sapien
gtggaactccacgtctatgttcacg

SEQ ID NO: 1154411 - DNA, 25 bp, Homo sapien
tctgtatcgtaactgattgcagata

SEQ ID NO: 1154412 - DNA, 25 bp, Homo sapien
atttctgtatcgtaactgattgcag

SEQ ID NO: 1154413 - DNA, 25 bp, Homo sapien
gcagatactgtacaggacaacctga

SEQ ID NO: 1154414 - DNA, 25 bp, Homo sapien
ggacaacctgattttcatattctct

SEQ ID NO: 1154415 - DNA, 25 bp, Homo sapien
gtaagggtacagcatgagatgatct

SEQ ID NO: 1154416 - DNA, 25 bp, Homo sapien
gcagcagtaaaattgtgcccactgt

SEQ ID NO: 1154417 - DNA, 25 bp, Homo sapien
ttttgatgatctacactgaatcata

SEQ ID NO: 1154418 - DNA, 25 bp, Homo sapien
ttttttgatgatctacactgaatca

SEQ ID NO: 1154419 - DNA, 25 bp, Homo sapien
ttgatgatctacactgaatcataag

SEQ ID NO: 1154420 - DNA, 25 bp, Homo sapien
gaatcataagatcaatatactggtt

SEQ ID NO: 1154421 - DNA, 25 bp, Homo sapien
ttgagggcctgaatcaacggtctta

SEQ ID NO: 1154422 - DNA, 25 bp, Homo sapien
gagggcctgaatcaacggtcttatc

SEQ ID NO: 1154423 - DNA, 25 bp, Homo sapien
tgagggcctgaatcaacggtcttat

SEQ ID NO: 1154424 - DNA, 25 bp, Homo sapien
cgattcattacaaaaccttcaaggg

SEQ ID NO: 1154425 - DNA, 25 bp, Homo sapien
ccttcaaggggtgcaactgctatac

SEQ ID NO: 1154426 - DNA, 25 bp, Homo sapien
gcaactgctatacaactgtcatcag

SEQ ID NO: 1154427 - DNA, 25 bp, Homo sapien
catcagacattggtacatccagata

SEQ ID NO: 1154428 - DNA, 25 bp, Homo sapien
ttgccgatgaagcttcttgtacagg

SEQ ID NO: 1154429 - DNA, 25 bp, Homo sapien
gttgccgatgaagcttcttgtacag

SEQ ID NO: 1154430 - DNA, 25 bp, Homo sapien
ggccggatttcattggtgaggggag

SEQ ID NO: 1154431 - DNA, 25 bp, Homo sapien
ataattgggttggtctggctgtgca

SEQ ID NO: 1154432 - DNA, 25 bp, Homo sapien
tttcattggtgaggggagccatgga

SEQ ID NO: 1154433 - DNA, 25 bp, Homo sapien
cataattgggttggtctggctgtgc

SEQ ID NO: 1154434 - DNA, 25 bp, Homo sapien
tgtccagtgatatgataaacgtaaa

SEQ ID NO: 1154435 - DNA, 25 bp, Homo sapien
ttgtccagtgatatgataaacgtaa

SEQ ID NO: 1154436 - DNA, 25 bp, Homo sapien
cagtgatatgataaacgtaaatgta

SEQ ID NO: 1154437 - DNA, 25 bp, Homo sapien
tccagtgatatgataaacgtaaatg

SEQ ID NO: 1154438 - DNA, 25 bp, Homo sapien
atgttattagcaatcgatcataact

SEQ ID NO: 1154439 - DNA, 25 bp, Homo sapien
atgaacacccatattgacacgagtg

SEQ ID NO: 1154440 - DNA, 25 bp, Homo sapien
acacccatattgacacgagtgaact

SEQ ID NO: 1154441 - DNA, 25 bp, Homo sapien
ggtaggaactactccaggatcatga

SEQ ID NO: 1154442 - DNA, 25 bp, Homo sapien
ccatttaacatctgagccagaagcc

SEQ ID NO: 1154443 - DNA, 25 bp, Homo sapien
ctgtactcccatttaacatctgagc

SEQ ID NO: 1154444 - DNA, 25 bp, Homo sapien
ccagaagccaaatcaggttttcctc

SEQ ID NO: 1154445 - DNA, 25 bp, Homo sapien
aagccaaatcaggttttcctctctc

SEQ ID NO: 1154446 - DNA, 25 bp, Homo sapien
gtgaacaaagttaaggacttgcaga

SEQ ID NO: 1154447 - DNA, 25 bp, Homo sapien
gagagagttttctactggaatgtaa

SEQ ID NO: 1154448 - DNA, 25 bp, Homo sapien
tgcagagagagttttctactggaat

SEQ ID NO: 1154449 - DNA, 25 bp, Homo sapien
tgaacaaagttaaggacttgcagag

SEQ ID NO: 1154450 - DNA, 25 bp, Homo sapien
ttgcaggaagtggaacacccatgtc

SEQ ID NO: 1154451 - DNA, 25 bp, Homo sapien
aggaagtggaacacccatgtcagca

SEQ ID NO: 1154452 - DNA, 25 bp, Homo sapien
gcaggaagtggaacacccatgtcag

SEQ ID NO: 1154453 - DNA, 25 bp, Homo sapien
caggaagtggaacacccatgtcagc

SEQ ID NO: 1154454 - DNA, 25 bp, Homo sapien
tagtaaagcaagaattgctccacag

SEQ ID NO: 1154455 - DNA, 25 bp, Homo sapien
aaagcaagaattgctccacagcagc

SEQ ID NO: 1154456 - DNA, 25 bp, Homo sapien
tattagtaaagcaagaattgctcca

SEQ ID NO: 1154457 - DNA, 25 bp, Homo sapien
gtaaagcaagaattgctccacagca

SEQ ID NO: 1154458 - DNA, 25 bp, Homo sapien
agtggatgtgtggttaagttttagg

SEQ ID NO: 1154459 - DNA, 25 bp, Homo sapien
ttctatacataggccatggtagtgg

SEQ ID NO: 1154460 - DNA, 25 bp, Homo sapien
tacataggccatggtagtggatgtg

SEQ ID NO: 1154461 - DNA, 25 bp, Homo sapien
tatacataggccatggtagtggatg

SEQ ID NO: 1154462 - DNA, 25 bp, Homo sapien
ccactgcccaaggaagtaagcccaa

SEQ ID NO: 1154463 - DNA, 25 bp, Homo sapien
tccagtgtgggatttcaccccaatg

SEQ ID NO: 1154464 - DNA, 25 bp, Homo sapien
caatgtcatcagaaaaccctccctt

SEQ ID NO: 1154465 - DNA, 25 bp, Homo sapien
aaaccgcgtgggatatcctcgatgc

SEQ ID NO: 1154466 - DNA, 25 bp, Homo sapien
tagaagaaagtgtaggttaccagcc

SEQ ID NO: 1154467 - DNA, 25 bp, Homo sapien
tagtggaagctaccaacatggcggt

SEQ ID NO: 1154468 - DNA, 25 bp, Homo sapien
gatggccctggctgtatcatgctgg

SEQ ID NO: 1154469 - DNA, 25 bp, Homo sapien
gcattgcaggagtcagtggtaaacc

SEQ ID NO: 1154470 - DNA, 25 bp, Homo sapien
aaagttcccaatgatctagtgcagg

SEQ ID NO: 1154471 - DNA, 25 bp, Homo sapien
acattcacgtaatatacaaccttgt

SEQ ID NO: 1154472 - DNA, 25 bp, Homo sapien
attcacgtaatatacaaccttgttc

SEQ ID NO: 1154473 - DNA, 25 bp, Homo sapien
cattcacgtaatatacaaccttgtt

SEQ ID NO: 1154474 - DNA, 25 bp, Homo sapien
tgaaaagtgcttgctgttgtttccg

SEQ ID NO: 1154475 - DNA, 25 bp, Homo sapien
gtcagggaatacatgctttgtaagg

SEQ ID NO: 1154476 - DNA, 25 bp, Homo sapien
agtgcttgctgttgtttccgtggtg

SEQ ID NO: 1154477 - DNA, 25 bp, Homo sapien
gagttcgattcctggtcagggaata

SEQ ID NO: 1154478 - DNA, 25 bp, Homo sapien
ggcccttcctgcctttgatggtgcc

SEQ ID NO: 1154479 - DNA, 25 bp, Homo sapien
tccccgctcccatcaggttctcctg

SEQ ID NO: 1154480 - DNA, 25 bp, Homo sapien
tcctgcctttgatggtgccaccact

SEQ ID NO: 1154481 - DNA, 25 bp, Homo sapien
tggtgccaccactctacttcctctg

SEQ ID NO: 1154482 - DNA, 25 bp, Homo sapien
tctgaaatcttgcagcacatctctt

SEQ ID NO: 1154483 - DNA, 25 bp, Homo sapien
cattgggggcacaattgtcaggtgg

SEQ ID NO: 1154484 - DNA, 25 bp, Homo sapien
tcttgcagcacatctctttggtatg

SEQ ID NO: 1154485 - DNA, 25 bp, Homo sapien
ctggccaccattgggggcacaattg

SEQ ID NO: 1154486 - DNA, 25 bp, Homo sapien
tcaggcctgctgttggtggtcccag

SEQ ID NO: 1154487 - DNA, 25 bp, Homo sapien
gtgcttagccccttctcagcttggg

SEQ ID NO: 1154488 - DNA, 25 bp, Homo sapien
gaacaaagagctccaactaagatgg

SEQ ID NO: 1154489 - DNA, 25 bp, Homo sapien
agccatgctgtcacctcgaaaaggg

SEQ ID NO: 1154490 - DNA, 25 bp, Homo sapien
ggaaagacaggccaacccactctcc

SEQ ID NO: 1154491 - DNA, 25 bp, Homo sapien
actctcccaagggtaccttcttcag

SEQ ID NO: 1154492 - DNA, 25 bp, Homo sapien
ggcttgaaggtgagggcagagtcaa

SEQ ID NO: 1154493 - DNA, 25 bp, Homo sapien
cagagtcaagaaagggtggaaagac

SEQ ID NO: 1154494 - DNA, 25 bp, Homo sapien
agaggtcttaagcatgcctctggac

SEQ ID NO: 1154495 - DNA, 25 bp, Homo sapien
gagaggtcttaagcatgcctctgga

SEQ ID NO: 1154496 - DNA, 25 bp, Homo sapien
agagaggtcttaagcatgcctctgg

SEQ ID NO: 1154497 - DNA, 25 bp, Homo sapien
ggatcctagcatacccaaaactgtg

SEQ ID NO: 1154498 - DNA, 25 bp, Homo sapien
ccgctgaacaggaagtatggggttc

SEQ ID NO: 1154499 - DNA, 25 bp, Homo sapien
tgtgccttgtgggatcctagcatac

SEQ ID NO: 1154500 - DNA, 25 bp, Homo sapien
tacccaaaactgtgcggcttgaagc

SEQ ID NO: 1154501 - DNA, 25 bp, Homo sapien
acaaaatgttcgttggatgccaggc

SEQ ID NO: 1154502 - DNA, 25 bp, Homo sapien
gaaaatatagagcatccaacccagg

SEQ ID NO: 1154503 - DNA, 25 bp, Homo sapien
gctcttggctcttgacaggcgatca

SEQ ID NO: 1154504 - DNA, 25 bp, Homo sapien
aattcgtttgaagaccagggcatga

SEQ ID NO: 1154505 - DNA, 25 bp, Homo sapien
gctggtggtagtgaattttcagctt

SEQ ID NO: 1154506 - DNA, 25 bp, Homo sapien
acattgacttttcccctcagtgcgg

SEQ ID NO: 1154507 - DNA, 25 bp, Homo sapien
tagaatttcacattgacttttcccc

SEQ ID NO: 1154508 - DNA, 25 bp, Homo sapien
ttcacattgacttttcccctcagtg

SEQ ID NO: 1154509 - DNA, 25 bp, Homo sapien
ccttctggtttcagagtcaggcaat

SEQ ID NO: 1154510 - DNA, 25 bp, Homo sapien
tcagagtcaggcaatgcaagcgttt

SEQ ID NO: 1154511 - DNA, 25 bp, Homo sapien
cattcggccgcccttctggtttcag

SEQ ID NO: 1154512 - DNA, 25 bp, Homo sapien
agggtgaaggccattcggccgccct

SEQ ID NO: 1154513 - DNA, 25 bp, Homo sapien
cttgggccctactaggctcaggctg

SEQ ID NO: 1154514 - DNA, 25 bp, Homo sapien
gcttcccttgggccctactaggctc

SEQ ID NO: 1154515 - DNA, 25 bp, Homo sapien
tcccttgggccctactaggctcagg

SEQ ID NO: 1154516 - DNA, 25 bp, Homo sapien
catgagagccgtcggggcgttcagc

SEQ ID NO: 1154517 - DNA, 25 bp, Homo sapien
agtccattctgatacgtgtcccatc

SEQ ID NO: 1154518 - DNA, 25 bp, Homo sapien
ccatctactgaagccgagttgagtg

SEQ ID NO: 1154519 - DNA, 25 bp, Homo sapien
tacgtgtttattcttgggcagctac

SEQ ID NO: 1154520 - DNA, 25 bp, Homo sapien
caagcggagtagatgattgcctgaa

SEQ ID NO: 1154521 - DNA, 25 bp, Homo sapien
tcagcactaggacgtcaaagcgatg

SEQ ID NO: 1154522 - DNA, 25 bp, Homo sapien
caaaagactcgtgggttcgccccag

SEQ ID NO: 1154523 - DNA, 25 bp, Homo sapien
ccagtgggtccaagatagagtctga

SEQ ID NO: 1154524 - DNA, 25 bp, Homo sapien
tctgctaaaccgtgaggcatagagc

SEQ ID NO: 1154525 - DNA, 25 bp, Homo sapien
gcacaaacggaaaactgttgccagt

SEQ ID NO: 1154526 - DNA, 25 bp, Homo sapien
caaacggaaaactgttgccagtgcc

SEQ ID NO: 1154527 - DNA, 25 bp, Homo sapien
cacaaacggaaaactgttgccagtg

SEQ ID NO: 1154528 - DNA, 25 bp, Homo sapien
aggcacaaacggaaaactgttgcca

SEQ ID NO: 1154529 - DNA, 25 bp, Homo sapien
tgattgagcggtagagggaggcgat

SEQ ID NO: 1154530 - DNA, 25 bp, Homo sapien
tcaagggcggtcccttttgctgatt

SEQ ID NO: 1154531 - DNA, 25 bp, Homo sapien
gctgattgagcggtagagggaggcg

SEQ ID NO: 1154532 - DNA, 25 bp, Homo sapien
agggcggtcccttttgctgattgag

SEQ ID NO: 1154533 - DNA, 25 bp, Homo sapien
gctaacatgctcgttaggccttcgg

SEQ ID NO: 1154534 - DNA, 25 bp, Homo sapien
tcgcagctaacatgctcgttaggcc

SEQ ID NO: 1154535 - DNA, 25 bp, Homo sapien
acatgctcgttaggccttcggaaga

SEQ ID NO: 1154536 - DNA, 25 bp, Homo sapien
ctccgttcgcagctaacatgctcgt

SEQ ID NO: 1154537 - DNA, 25 bp, Homo sapien
agtcatggcgtttgtgcgtgccctg

SEQ ID NO: 1154538 - DNA, 25 bp, Homo sapien
catggcgtttgtgcgtgccctggac

SEQ ID NO: 1154539 - DNA, 25 bp, Homo sapien
caagccaagtcatggcgtttgtgcg

SEQ ID NO: 1154540 - DNA, 25 bp, Homo sapien
ccaagtcatggcgtttgtgcgtgcc

SEQ ID NO: 1154541 - DNA, 25 bp, Homo sapien
cccgtggagctgcacttaataagcg

SEQ ID NO: 1154542 - DNA, 25 bp, Homo sapien
cgtggagctgcacttaataagcgca

SEQ ID NO: 1154543 - DNA, 25 bp, Homo sapien
cctctttgccgtcgccgccccagag

SEQ ID NO: 1154544 - DNA, 25 bp, Homo sapien
gagctgcacttaataagcgcaccct

SEQ ID NO: 1154545 - DNA, 25 bp, Homo sapien
ggccagatgtagaacagcctccgca

SEQ ID NO: 1154546 - DNA, 25 bp, Homo sapien
gggcaagtcgtggtgggccacctct

SEQ ID NO: 1154547 - DNA, 25 bp, Homo sapien
caagggccagatgtagaacagcctc

SEQ ID NO: 1154548 - DNA, 25 bp, Homo sapien
tgtagaacagcctccgcagcgaggg

SEQ ID NO: 1154549 - DNA, 25 bp, Homo sapien
gattcggtgctgaaagagccacggc

SEQ ID NO: 1154550 - DNA, 25 bp, Homo sapien
tggagtccttggtgtgtcgcctgca

SEQ ID NO: 1154551 - DNA, 25 bp, Homo sapien
gagcaaagggcgactctcacaagac

SEQ ID NO: 1154552 - DNA, 25 bp, Homo sapien
gttcagagagaaggactacgcgcag

SEQ ID NO: 1154553 - DNA, 25 bp, Homo sapien
tgcaacggaaagaagcctgaagctc

SEQ ID NO: 1154554 - DNA, 25 bp, Homo sapien
ccaggaggtgcgagaggagcctcgt

SEQ ID NO: 1154555 - DNA, 25 bp, Homo sapien
ctgcaacggaaagaagcctgaagct

SEQ ID NO: 1154556 - DNA, 25 bp, Homo sapien
aggagcctcgttgagcgagcccagc

SEQ ID NO: 1154557 - DNA, 25 bp, Homo sapien
gccgaacgaattggcccataaagct

SEQ ID NO: 1154558 - DNA, 25 bp, Homo sapien
gatgccgaacgaattggcccataaa

SEQ ID NO: 1154559 - DNA, 25 bp, Homo sapien
cggggatgccgaacgaattggccca

SEQ ID NO: 1154560 - DNA, 25 bp, Homo sapien
gggatgccgaacgaattggcccata

SEQ ID NO: 1154561 - DNA, 25 bp, Homo sapien
gaaccgcagtcaaatcctcttcttc

SEQ ID NO: 1154562 - DNA, 25 bp, Homo sapien
ggagaaccgcagtcaaatcctcttc

SEQ ID NO: 1154563 - DNA, 25 bp, Homo sapien
gggtggagaaccgcagtcaaatcct

SEQ ID NO: 1154564 - DNA, 25 bp, Homo sapien
tggagaaccgcagtcaaatcctctt

SEQ ID NO: 1154565 - DNA, 25 bp, Homo sapien
agcaggagcctggaagagcgcgcgc

SEQ ID NO: 1154566 - DNA, 25 bp, Homo sapien
ctgagacctaactcctggcaagtgg

SEQ ID NO: 1154567 - DNA, 25 bp, Homo sapien
gacctaactcctggcaagtgggacc

SEQ ID NO: 1154568 - DNA, 25 bp, Homo sapien
ctaactcctggcaagtgggaccagc

SEQ ID NO: 1154569 - DNA, 25 bp, Homo sapien
aagtgagcagatggtttcccctacg

SEQ ID NO: 1154570 - DNA, 25 bp, Homo sapien
tccggacaggacagaagtgagcaga

SEQ ID NO: 1154571 - DNA, 25 bp, Homo sapien
tcagaaagggatcccttccggacag

SEQ ID NO: 1154572 - DNA, 25 bp, Homo sapien
gtctttccgggcctgggcgtctcag

SEQ ID NO: 1154573 - DNA, 25 bp, Homo sapien
cttcgacagccacgggaggaccggg

SEQ ID NO: 1154574 - DNA, 25 bp, Homo sapien
gaggaccgggaggacctccagagga

SEQ ID NO: 1154575 - DNA, 25 bp, Homo sapien
gcctactcaacaggacaggactcac

SEQ ID NO: 1154576 - DNA, 25 bp, Homo sapien
ctccagaggaggttaggtcgacctc

SEQ ID NO: 1154577 - DNA, 25 bp, Homo sapien
aaatttctgtcgtgaattagccacc

SEQ ID NO: 1154578 - DNA, 25 bp, Homo sapien
cacacattgcaataactgggtctgg

SEQ ID NO: 1154579 - DNA, 25 bp, Homo sapien
ggtatatagttatggaagcccgaac

SEQ ID NO: 1154580 - DNA, 25 bp, Homo sapien
tgggtgcagtgtaccagaccacaat

SEQ ID NO: 1154581 - DNA, 25 bp, Homo sapien
tttgtcaacgtagagtctttcccac

SEQ ID NO: 1154582 - DNA, 25 bp, Homo sapien
gtttgtcaacgtagagtctttccca

SEQ ID NO: 1154583 - DNA, 25 bp, Homo sapien
tgtcaacgtagagtctttcccactg

SEQ ID NO: 1154584 - DNA, 25 bp, Homo sapien
ttgtcaacgtagagtctttcccact

SEQ ID NO: 1154585 - DNA, 25 bp, Homo sapien
acagcccatctaggggtctgggtca

SEQ ID NO: 1154586 - DNA, 25 bp, Homo sapien
gggtctcttggcacagcccatctag

SEQ ID NO: 1154587 - DNA, 25 bp, Homo sapien
ggcaggagggaatcccttcccttgc

SEQ ID NO: 1154588 - DNA, 25 bp, Homo sapien
ttgctgggtctcttggcacagccca

SEQ ID NO: 1154589 - DNA, 25 bp, Homo sapien
aaagccctatctccactgcttggag

SEQ ID NO: 1154590 - DNA, 25 bp, Homo sapien
tgtccttaggacagcaagatcccca

SEQ ID NO: 1154591 - DNA, 25 bp, Homo sapien
cctatctccactgcttggagaggga

SEQ ID NO: 1154592 - DNA, 25 bp, Homo sapien
gccctatctccactgcttggagagg

SEQ ID NO: 1154593 - DNA, 25 bp, Homo sapien
tggaagtaagcacccctttgaggaa

SEQ ID NO: 1154594 - DNA, 25 bp, Homo sapien
ctggtatagccgactgcttcacaca

SEQ ID NO: 1154595 - DNA, 25 bp, Homo sapien
cccatggaagtaagcacccctttga

SEQ ID NO: 1154596 - DNA, 25 bp, Homo sapien
ctctgtgcctggtatagccgactgc

SEQ ID NO: 1154597 - DNA, 25 bp, Homo sapien
caaatcctgcactccaagcttctcc

SEQ ID NO: 1154598 - DNA, 25 bp, Homo sapien
aattagaacatagtgcctactgcca

SEQ ID NO: 1154599 - DNA, 25 bp, Homo sapien
caacctccagttagacaatccacat

SEQ ID NO: 1154600 - DNA, 25 bp, Homo sapien
ctggcaattagaacatagtgcctac

SEQ ID NO: 1154601 - DNA, 25 bp, Homo sapien
cttcctgctgaaacccgaaaagtag

SEQ ID NO: 1154602 - DNA, 25 bp, Homo sapien
gctgcatgcatgctgagtaaacatg

SEQ ID NO: 1154603 - DNA, 25 bp, Homo sapien
cggccagtggtctcttatcaagaga

SEQ ID NO: 1154604 - DNA, 25 bp, Homo sapien
gtgatttacgttgatctggctggcc

SEQ ID NO: 1154605 - DNA, 25 bp, Homo sapien
tgaattttcacaggcagacaccgaa

SEQ ID NO: 1154606 - DNA, 25 bp, Homo sapien
tcctaagggtccagcttggcttcgc

SEQ ID NO: 1154607 - DNA, 25 bp, Homo sapien
ggtctgccaggaagaggacgtcaca

SEQ ID NO: 1154608 - DNA, 25 bp, Homo sapien
tgtcgaccaggctacaatttccact

SEQ ID NO: 1154609 - DNA, 25 bp, Homo sapien
gaagtcctccactagtatagcatgg

SEQ ID NO: 1154610 - DNA, 25 bp, Homo sapien
tgtatgctcatgttgtaacccgaaa

SEQ ID NO: 1154611 - DNA, 25 bp, Homo sapien
tgaaggtgtgtatcatgcaacggat

SEQ ID NO: 1154612 - DNA, 25 bp, Homo sapien
ccagggctctttcagattagtagaa

SEQ ID NO: 1154613 - DNA, 25 bp, Homo sapien
aaagatcccacctacatgttcgcag

SEQ ID NO: 1154614 - DNA, 25 bp, Homo sapien
gacatgatgcctagagagtctggaa

SEQ ID NO: 1154615 - DNA, 25 bp, Homo sapien
tttcacctgggtacggaataggaga

SEQ ID NO: 1154616 - DNA, 25 bp, Homo sapien
tgcagataatcagagagtcactagc

SEQ ID NO: 1154617 - DNA, 25 bp, Homo sapien
ttcaatttgcgaggagcccgcgagg

SEQ ID NO: 1154618 - DNA, 25 bp, Homo sapien
ggcgtttattcaatttgcgaggagc

SEQ ID NO: 1154619 - DNA, 25 bp, Homo sapien
gggcagtaacgttccgggtgagcta

SEQ ID NO: 1154620 - DNA, 25 bp, Homo sapien
tgagctagggctccgaagacagcag

SEQ ID NO: 1154621 - DNA, 25 bp, Homo sapien
ttcaccacagcattcacgggagttt

SEQ ID NO: 1154622 - DNA, 25 bp, Homo sapien
acaggtgcgatccatcttgccctgg

SEQ ID NO: 1154623 - DNA, 25 bp, Homo sapien
cattcacgggagtttgtaggatttc

SEQ ID NO: 1154624 - DNA, 25 bp, Homo sapien
tgcgatccatcttgccctggcagct

SEQ ID NO: 1154625 - DNA, 25 bp, Homo sapien
gcagcgggttgatcggctgagtcgg

SEQ ID NO: 1154626 - DNA, 25 bp, Homo sapien
ggttgatcggctgagtcggcggagg

SEQ ID NO: 1154627 - DNA, 25 bp, Homo sapien
cagcgggttgatcggctgagtcggc

SEQ ID NO: 1154628 - DNA, 25 bp, Homo sapien
cgggttgatcggctgagtcggcgga

SEQ ID NO: 1154629 - DNA, 25 bp, Homo sapien
tagcgccagaactctgtgactgttt

SEQ ID NO: 1154630 - DNA, 25 bp, Homo sapien
gcttaggaagtattgctgcctaatt

SEQ ID NO: 1154631 - DNA, 25 bp, Homo sapien
gcaccacatcaactttaaacagaat

SEQ ID NO: 1154632 - DNA, 25 bp, Homo sapien
ttatagtatttattagcgccagaac

SEQ ID NO: 1154633 - DNA, 25 bp, Homo sapien
tttccccaaaactcattgccaccaa

SEQ ID NO: 1154634 - DNA, 25 bp, Homo sapien
tgtctttctgagtccctaattatct

SEQ ID NO: 1154635 - DNA, 25 bp, Homo sapien
tttctgagtccctaattatcttttc

SEQ ID NO: 1154636 - DNA, 25 bp, Homo sapien
cattgccaccaatccttcagtgttt

SEQ ID NO: 1154637 - DNA, 25 bp, Homo sapien
aatgtagtgcctggtgaaagagatt

SEQ ID NO: 1154638 - DNA, 25 bp, Homo sapien
tatctatttgataaccttcctgatg

SEQ ID NO: 1154639 - DNA, 25 bp, Homo sapien
tagtgcctggtgaaagagattgttt

SEQ ID NO: 1154640 - DNA, 25 bp, Homo sapien
cataccttcatatctatttgataac

SEQ ID NO: 1154641 - DNA, 25 bp, Homo sapien
cgacggtgatgtcaaaaaagacgac

SEQ ID NO: 1154642 - DNA, 25 bp, Homo sapien
gacggtgatgtcaaaaaagacgacg

SEQ ID NO: 1154643 - DNA, 25 bp, Homo sapien
cgccggggctcgcagagtgtcagcc

SEQ ID NO: 1154644 - DNA, 25 bp, Homo sapien
ccggggctcgcagagtgtcagccat

SEQ ID NO: 1154645 - DNA, 25 bp, Homo sapien
ggccgccggggctcgcagagtgtca

SEQ ID NO: 1154646 - DNA, 25 bp, Homo sapien
gccgccggggctcgcagagtgtcag

SEQ ID NO: 1154647 - DNA, 25 bp, Homo sapien
gcggcggcagccgtgcccaggctgc

SEQ ID NO: 1154648 - DNA, 25 bp, Homo sapien
cccaggctgctgcagcgccacccgc

SEQ ID NO: 1154649 - DNA, 25 bp, Homo sapien
gcgggcggcggcagccgtgcccagg

SEQ ID NO: 1154650 - DNA, 25 bp, Homo sapien
cgtgcacactctcgcccgcgggcgg

SEQ ID NO: 1154651 - DNA, 25 bp, Homo sapien
gccaagtggtttcggaagtgatcct

SEQ ID NO: 1154652 - DNA, 25 bp, Homo sapien
caagtggtttcggaagtgatcctgg

SEQ ID NO: 1154653 - DNA, 25 bp, Homo sapien
tgaaggccaagtggtttcggaagtg

SEQ ID NO: 1154654 - DNA, 25 bp, Homo sapien
tccatttccagatgtgaccgcccag

SEQ ID NO: 1154655 - DNA, 25 bp, Homo sapien
tacgcaaacctggtgggtccaacca

SEQ ID NO: 1154656 - DNA, 25 bp, Homo sapien
cattacgcaaacctggtgggtccaa

SEQ ID NO: 1154657 - DNA, 25 bp, Homo sapien
gcccattacgcaaacctggtgggtc

SEQ ID NO: 1154658 - DNA, 25 bp, Homo sapien
ctcagcccattacgcaaacctggtg

SEQ ID NO: 1154659 - DNA, 25 bp, Homo sapien
cgcgcagcgtcccaggggatgcggc

SEQ ID NO: 1154660 - DNA, 25 bp, Homo sapien
caagtgccgggtgccatggcaacgg

SEQ ID NO: 1154661 - DNA, 25 bp, Homo sapien
cccggcagcaagtgccgggtgccat

SEQ ID NO: 1154662 - DNA, 25 bp, Homo sapien
gagggcggcgaggtctctccgcgca

SEQ ID NO: 1154663 - DNA, 25 bp, Homo sapien
ctgaaacagaaagtcctgtcaaaag

SEQ ID NO: 1154664 - DNA, 25 bp, Homo sapien
tgaaacagaaagtcctgtcaaaagc

SEQ ID NO: 1154665 - DNA, 25 bp, Homo sapien
cttctggggccgccaacataggtaa

SEQ ID NO: 1154666 - DNA, 25 bp, Homo sapien
taaaagtaaaggtggagtctgagta

SEQ ID NO: 1154667 - DNA, 25 bp, Homo sapien
aaggtggagtctgagtatctgaaat

SEQ ID NO: 1154668 - DNA, 25 bp, Homo sapien
ctggggccgccaacataggtaaaag

SEQ ID NO: 1154669 - DNA, 25 bp, Homo sapien
aatgaagcaactctacacccataaa

SEQ ID NO: 1154670 - DNA, 25 bp, Homo sapien
gccacagtaatcaaacaagcaacca

SEQ ID NO: 1154671 - DNA, 25 bp, Homo sapien
ttgtaggtaaagaaaagccacagta

SEQ ID NO: 1154672 - DNA, 25 bp, Homo sapien
caagcaaccaaaatacccgaacacg

SEQ ID NO: 1154673 - DNA, 25 bp, Homo sapien
cacagtaatcaaacaagcaaccaaa

SEQ ID NO: 1154674 - DNA, 25 bp, Homo sapien
agagttctgctcatcgcctgtggcg

SEQ ID NO: 1154675 - DNA, 25 bp, Homo sapien
tctagtactgtagcagaaccgtttc

SEQ ID NO: 1154676 - DNA, 25 bp, Homo sapien
tgtatcaaccccaaatcgcctgaga

SEQ ID NO: 1154677 - DNA, 25 bp, Homo sapien
tattccagttttgcaccggcttgcc

SEQ ID NO: 1154678 - DNA, 25 bp, Homo sapien
gctctgaacctgtggcagaaccact

SEQ ID NO: 1154679 - DNA, 25 bp, Homo sapien
caaataagaaggcagtactgggaag

SEQ ID NO: 1154680 - DNA, 25 bp, Homo sapien
tactgggaaggctctgaacctgtgg

SEQ ID NO: 1154681 - DNA, 25 bp, Homo sapien
cccaattgtgtacaattgaagcctc

SEQ ID NO: 1154682 - DNA, 25 bp, Homo sapien
gtttcttctaccactaactccatgt

SEQ ID NO: 1154683 - DNA, 25 bp, Homo sapien
tcccctcagtagctgtcaccatgca

SEQ ID NO: 1154684 - DNA, 25 bp, Homo sapien
taatattttcacactaccttcttgg

SEQ ID NO: 1154685 - DNA, 25 bp, Homo sapien
actccatgtctgactgcaagtgaaa

SEQ ID NO: 1154686 - DNA, 25 bp, Homo sapien
cagcagcaacctctctgctaatttt

SEQ ID NO: 1154687 - DNA, 25 bp, Homo sapien
cagaaacttgacctgactgcacaaa

SEQ ID NO: 1154688 - DNA, 25 bp, Homo sapien
taccaaaagggtatcagccacaaac

SEQ ID NO: 1154689 - DNA, 25 bp, Homo sapien
gccacaaactgaaatatcactcata

SEQ ID NO: 1154690 - DNA, 25 bp, Homo sapien
ggtgagttctcgtctcgactaaaaa

SEQ ID NO: 1154691 - DNA, 25 bp, Homo sapien
aggccaatatggtgagttcgagacc

SEQ ID NO: 1154692 - DNA, 25 bp, Homo sapien
gccaatatggtgagttcgagaccaa

SEQ ID NO: 1154693 - DNA, 25 bp, Homo sapien
atatggtgagttctcgtctcgacta

SEQ ID NO: 1154694 - DNA, 25 bp, Homo sapien
tacactttaaagcagggacttcact

SEQ ID NO: 1154695 - DNA, 25 bp, Homo sapien
tattactgtgtccacaggagtacac

SEQ ID NO: 1154696 - DNA, 25 bp, Homo sapien
ccagtcaatatctacgagtctcttc

SEQ ID NO: 1154697 - DNA, 25 bp, Homo sapien
actgcatcagcttatatccatggag

SEQ ID NO: 1154698 - DNA, 25 bp, Homo sapien
cttgccttttatagcaactatagca

SEQ ID NO: 1154699 - DNA, 25 bp, Homo sapien
actatagcaacagccatgagagtca

SEQ ID NO: 1154700 - DNA, 25 bp, Homo sapien
ggatcaaatgctccacaactagttg

SEQ ID NO: 1154701 - DNA, 25 bp, Homo sapien
tagtccttcaactgacagcttaaag

SEQ ID NO: 1154702 - DNA, 25 bp, Homo sapien
ccacaactagttgaaactggaatta

SEQ ID NO: 1154703 - DNA, 25 bp, Homo sapien
tatgaagttcctagatgatttaaag

SEQ ID NO: 1154704 - DNA, 25 bp, Homo sapien
cattcacatattacaggcaacaagc

SEQ ID NO: 1154705 - DNA, 25 bp, Homo sapien
gcaaccacatggaataatgactcat

SEQ ID NO: 1154706 - DNA, 25 bp, Homo sapien
gagacaggacaaagtacagattagg

SEQ ID NO: 1154707 - DNA, 25 bp, Homo sapien
tagggcttgaagtgcccctgaccag

SEQ ID NO: 1154708 - DNA, 25 bp, Homo sapien
gacaaatggtcccatgtgcgatatt

SEQ ID NO: 1154709 - DNA, 25 bp, Homo sapien
ggtcccatgtgcgatattcacactg

SEQ ID NO: 1154710 - DNA, 25 bp, Homo sapien
tctgacagtatgacaaatggtccca

SEQ ID NO: 1154711 - DNA, 25 bp, Homo sapien
cgatattcacactgcattgcagtca

SEQ ID NO: 1154712 - DNA, 25 bp, Homo sapien
agacatttatgcagccaaaaaacac

SEQ ID NO: 1154713 - DNA, 25 bp, Homo sapien
ccatctcacaccggttggaatggca

SEQ ID NO: 1154714 - DNA, 25 bp, Homo sapien
cctttgggtatatacttcacaaaag

SEQ ID NO: 1154715 - DNA, 25 bp, Homo sapien
atgaaaaaatgctcatcatcactgg

SEQ ID NO: 1154716 - DNA, 25 bp, Homo sapien
tagaaggcagtctctgtgttaaggg

SEQ ID NO: 1154717 - DNA, 25 bp, Homo sapien
cagtctctgtgttaaggggttgttc

SEQ ID NO: 1154718 - DNA, 25 bp, Homo sapien
catagaaggcagtctctgtgttaag

SEQ ID NO: 1154719 - DNA, 25 bp, Homo sapien
tccatagaaggcagtctctgtgtta

SEQ ID NO: 1154720 - DNA, 25 bp, Homo sapien
tctctttccatactacttgttttct

SEQ ID NO: 1154721 - DNA, 25 bp, Homo sapien
tttctttctttatagctggctcaca

SEQ ID NO: 1154722 - DNA, 25 bp, Homo sapien
tctttctttatagctggctcacatt

SEQ ID NO: 1154723 - DNA, 25 bp, Homo sapien
tttctttatagctggctcacatttc

SEQ ID NO: 1154724 - DNA, 25 bp, Homo sapien
cctttacacgcaaggtcacttgcgt

SEQ ID NO: 1154725 - DNA, 25 bp, Homo sapien
aaggtcacttgcgtcacgcgcatcc

SEQ ID NO: 1154726 - DNA, 25 bp, Homo sapien
atcctagccctaacacacagctgcg

SEQ ID NO: 1154727 - DNA, 25 bp, Homo sapien
taacacacagctgcgactctccggt

SEQ ID NO: 1154728 - DNA, 25 bp, Homo sapien
cccgccgcagcctcatatgcctcac

SEQ ID NO: 1154729 - DNA, 25 bp, Homo sapien
aaaacacagacacagttccccactg

SEQ ID NO: 1154730 - DNA, 25 bp, Homo sapien
cacagtaaaactgctaagccttgct

SEQ ID NO: 1154731 - DNA, 25 bp, Homo sapien
caaattatgtaatcaagattcccac

SEQ ID NO: 1154732 - DNA, 25 bp, Homo sapien
aagattcccacattcggggaaatca

SEQ ID NO: 1154733 - DNA, 25 bp, Homo sapien
acaagcgtgagaaccaaccactacc

SEQ ID NO: 1154734 - DNA, 25 bp, Homo sapien
caagcgtgagaaccaaccactacct

SEQ ID NO: 1154735 - DNA, 25 bp, Homo sapien
aagcgtgagaaccaaccactacctg

SEQ ID NO: 1154736 - DNA, 25 bp, Homo sapien
catccctggatgggcttgcaccacc

SEQ ID NO: 1154737 - DNA, 25 bp, Homo sapien
ccagcgcgattcaccgctctaatat

SEQ ID NO: 1154738 - DNA, 25 bp, Homo sapien
cagcgcgattcaccgctctaatatc

SEQ ID NO: 1154739 - DNA, 25 bp, Homo sapien
accagcgcgattcaccgctctaata

SEQ ID NO: 1154740 - DNA, 25 bp, Homo sapien
cggaagctccgcagcagcccaacag

SEQ ID NO: 1154741 - DNA, 25 bp, Homo sapien
ggatacaggctccttcactgggtga

SEQ ID NO: 1154742 - DNA, 25 bp, Homo sapien
agcagcccaacagcgactgggcagg

SEQ ID NO: 1154743 - DNA, 25 bp, Homo sapien
tgaaggcggcacaaagaaccggaag

SEQ ID NO: 1154744 - DNA, 25 bp, Homo sapien
gggtgccaagaaatcaacgctttgt

SEQ ID NO: 1154745 - DNA, 25 bp, Homo sapien
acagcgcagaaggtgcaccggaggt

SEQ ID NO: 1154746 - DNA, 25 bp, Homo sapien
gaggtcgtgtcagttgcccgccccg

SEQ ID NO: 1154747 - DNA, 25 bp, Homo sapien
gccaagaaatcaacgctttgtaaaa

SEQ ID NO: 1154748 - DNA, 25 bp, Homo sapien
acgtctgcacgagcccttcaggagg

SEQ ID NO: 1154749 - DNA, 25 bp, Homo sapien
gtacgtctgcacgagcccttcagga

SEQ ID NO: 1154750 - DNA, 25 bp, Homo sapien
ctgtacgtctgcacgagcccttcag

SEQ ID NO: 1154751 - DNA, 25 bp, Homo sapien
cgcctgtacgtctgcacgagccctt

SEQ ID NO: 1154752 - DNA, 25 bp, Homo sapien
agacgcctagttttctgtctagttc

SEQ ID NO: 1154753 - DNA, 25 bp, Homo sapien
aacaaacaatggaagcaagtcattt

SEQ ID NO: 1154754 - DNA, 25 bp, Homo sapien
tttatttaacaaacagacaattgaa

SEQ ID NO: 1154755 - DNA, 25 bp, Homo sapien
acaaacaatggaagcaagtcatttg

SEQ ID NO: 1154756 - DNA, 25 bp, Homo sapien
ttaacaaacagacaattgaacaaac

SEQ ID NO: 1154757 - DNA, 25 bp, Homo sapien
cacaaattacatgtcagcaggtagg

SEQ ID NO: 1154758 - DNA, 25 bp, Homo sapien
acatgtcagcaggtaggtttgaccc

SEQ ID NO: 1154759 - DNA, 25 bp, Homo sapien
cagatgtgaggaagatcactcagct

SEQ ID NO: 1154760 - DNA, 25 bp, Homo sapien
cacttccttgaagtaagagtatttg

SEQ ID NO: 1154761 - DNA, 25 bp, Homo sapien
ccttaggtccttcgcagtagggatc

SEQ ID NO: 1154762 - DNA, 25 bp, Homo sapien
ggtccttcgcagtagggatccgaaa

SEQ ID NO: 1154763 - DNA, 25 bp, Homo sapien
cggccccttaggtccttcgcagtag

SEQ ID NO: 1154764 - DNA, 25 bp, Homo sapien
cttcgcagtagggatccgaaaaagg

SEQ ID NO: 1154765 - DNA, 25 bp, Homo sapien
ctaggagcccacgaggcgcaggtga

SEQ ID NO: 1154766 - DNA, 25 bp, Homo sapien
acgaggcgcaggtgagcggtgacgc

SEQ ID NO: 1154767 - DNA, 25 bp, Homo sapien
gacgctgtggttcccaccgcaccgc

SEQ ID NO: 1154768 - DNA, 25 bp, Homo sapien
gtctccggcgggcagtaatgttcca

SEQ ID NO: 1154769 - DNA, 25 bp, Homo sapien
cttgaagcttctcccgcgtgtcggc

SEQ ID NO: 1154770 - DNA, 25 bp, Homo sapien
taggtcctcccgacgcttcttgaag

SEQ ID NO: 1154771 - DNA, 25 bp, Homo sapien
caaaggagtctcctgatacaggcgg

SEQ ID NO: 1154772 - DNA, 25 bp, Homo sapien
cattttctttgagactaccggacca

SEQ ID NO: 1154773 - DNA, 25 bp, Homo sapien
aaatgaaaccttacaggcagcagct

SEQ ID NO: 1154774 - DNA, 25 bp, Homo sapien
taaatgaaaccttacaggcagcagc

SEQ ID NO: 1154775 - DNA, 25 bp, Homo sapien
cctgatgcacctgccgtttcaacgt

SEQ ID NO: 1154776 - DNA, 25 bp, Homo sapien
cagtagctttggatgtcaggaattt

SEQ ID NO: 1154777 - DNA, 25 bp, Homo sapien
aggcagtagctttggatgtcaggaa

SEQ ID NO: 1154778 - DNA, 25 bp, Homo sapien
ggcagtagctttggatgtcaggaat

SEQ ID NO: 1154779 - DNA, 25 bp, Homo sapien
gcagtagctttggatgtcaggaatt

SEQ ID NO: 1154780 - DNA, 25 bp, Homo sapien
ttggccttgttctcattttggccat

SEQ ID NO: 1154781 - DNA, 25 bp, Homo sapien
tcattttggccatatgtctcatagc

SEQ ID NO: 1154782 - DNA, 25 bp, Homo sapien
acttggccttgttctcattttggcc

SEQ ID NO: 1154783 - DNA, 25 bp, Homo sapien
attttggccatatgtctcatagctc

SEQ ID NO: 1154784 - DNA, 25 bp, Homo sapien
cagattctataaggtctttgcactc

SEQ ID NO: 1154785 - DNA, 25 bp, Homo sapien
aagttttctgacaaggatctctgtc

SEQ ID NO: 1154786 - DNA, 25 bp, Homo sapien
gtctctggtagtaggcaatgtcagt

SEQ ID NO: 1154787 - DNA, 25 bp, Homo sapien
tttctgacaaggatctctgtcagct

SEQ ID NO: 1154788 - DNA, 25 bp, Homo sapien
ctctgtctctggtagtaggcaatgt

SEQ ID NO: 1154789 - DNA, 25 bp, Homo sapien
ctgcactccagcttgggtaagagag

SEQ ID NO: 1154790 - DNA, 25 bp, Homo sapien
ccagcttgggtaagagagcaagact

SEQ ID NO: 1154791 - DNA, 25 bp, Homo sapien
gcccaggaggcacagattgcagtca

SEQ ID NO: 1154792 - DNA, 25 bp, Homo sapien
attgcagtcagccaagatcatgtca

SEQ ID NO: 1154793 - DNA, 25 bp, Homo sapien
tgagaactataagcatgcagatgca

SEQ ID NO: 1154794 - DNA, 25 bp, Homo sapien
tgaacagaccattagtcagctgtgg

SEQ ID NO: 1154795 - DNA, 25 bp, Homo sapien
gccataggtaagactatgtatgtca

SEQ ID NO: 1154796 - DNA, 25 bp, Homo sapien
gaaagattaatcaattccaagacat

SEQ ID NO: 1154797 - DNA, 25 bp, Homo sapien
taaatacagtgctgagactagagcc

SEQ ID NO: 1154798 - DNA, 25 bp, Homo sapien
tatacagtgcctgaactaaccccaa

SEQ ID NO: 1154799 - DNA, 25 bp, Homo sapien
tgggtcttcccattctaacaagctg

SEQ ID NO: 1154800 - DNA, 25 bp, Homo sapien
gcagccttggaattatgatttgacc

SEQ ID NO: 1154801 - DNA, 25 bp, Homo sapien
ctctactccaaaaccagaggactgc

SEQ ID NO: 1154802 - DNA, 25 bp, Homo sapien
tctactccaaaaccagaggactgcc

SEQ ID NO: 1154803 - DNA, 25 bp, Homo sapien
ctcagatgttgttgggggtaattct

SEQ ID NO: 1154804 - DNA, 25 bp, Homo sapien
ccagtggcttttgcctgtcttcatt

SEQ ID NO: 1154805 - DNA, 25 bp, Homo sapien
ctgggagccagtggcttttgcctgt

SEQ ID NO: 1154806 - DNA, 25 bp, Homo sapien
ggagccagtggcttttgcctgtctt

SEQ ID NO: 1154807 - DNA, 25 bp, Homo sapien
gccagtggcttttgcctgtcttcat

SEQ ID NO: 1154808 - DNA, 25 bp, Homo sapien
agacaagggattaaaccaaggcagc

SEQ ID NO: 1154809 - DNA, 25 bp, Homo sapien
caagacaagggattaaaccaaggca

SEQ ID NO: 1154810 - DNA, 25 bp, Homo sapien
taggcaagacaagggattaaaccaa

SEQ ID NO: 1154811 - DNA, 25 bp, Homo sapien
gcaagacaagggattaaaccaaggc

SEQ ID NO: 1154812 - DNA, 25 bp, Homo sapien
ttgcagatgccggtctggaccagag

SEQ ID NO: 1154813 - DNA, 25 bp, Homo sapien
tgcgcggcagtagtggcagagagtc

SEQ ID NO: 1154814 - DNA, 25 bp, Homo sapien
tggcctgctttgagtataccggctt

SEQ ID NO: 1154815 - DNA, 25 bp, Homo sapien
tagtggcagagagtctgccataatc

SEQ ID NO: 1154816 - DNA, 25 bp, Homo sapien
tgttgatgaaaagggtctccttcag

SEQ ID NO: 1154817 - DNA, 25 bp, Homo sapien
cattccaccaggacatggaatgaga

SEQ ID NO: 1154818 - DNA, 25 bp, Homo sapien
cacaggcagttgttgatgaaaaggg

SEQ ID NO: 1154819 - DNA, 25 bp, Homo sapien
tcatcttctgcagccattccaccag

SEQ ID NO: 1154820 - DNA, 25 bp, Homo sapien
gagtctccggtattcttctctgaga

SEQ ID NO: 1154821 - DNA, 25 bp, Homo sapien
tgtgggttataaggttttgagcagc

SEQ ID NO: 1154822 - DNA, 25 bp, Homo sapien
gccctctctaagttgagaatagcta

SEQ ID NO: 1154823 - DNA, 25 bp, Homo sapien
gtgtggctcgcaccgaaatactgta

SEQ ID NO: 1154824 - DNA, 25 bp, Homo sapien
agtgtggcaagagaagggacccatc

SEQ ID NO: 1154825 - DNA, 25 bp, Homo sapien
tcactgcatcttgtggtcagaaaag

SEQ ID NO: 1154826 - DNA, 25 bp, Homo sapien
gctccacataggcaaattataggtt

SEQ ID NO: 1154827 - DNA, 25 bp, Homo sapien
tgcaattctgaacaacttatgggtt

SEQ ID NO: 1154828 - DNA, 25 bp, Homo sapien
tagtggactgcttactactacaggc

SEQ ID NO: 1154829 - DNA, 25 bp, Homo sapien
caaagattcttatgagtcctcacag

SEQ ID NO: 1154830 - DNA, 25 bp, Homo sapien
acagatgtcagaggaagatgccatg

SEQ ID NO: 1154831 - DNA, 25 bp, Homo sapien
ctatacttgcaaactcccagaagac

SEQ ID NO: 1154832 - DNA, 25 bp, Homo sapien
tcagaggaagatgccatgacctata

SEQ ID NO: 1154833 - DNA, 25 bp, Homo sapien
tgccggatgtggaactccacgtcta

SEQ ID NO: 1154834 - DNA, 25 bp, Homo sapien
ggaactccacgtctatgttcaccat

SEQ ID NO: 1154835 - DNA, 25 bp, Homo sapien
tggccggcaacttgttccaggggta

SEQ ID NO: 1154836 - DNA, 25 bp, Homo sapien
gtagttgtgccggatgtggaactcc

SEQ ID NO: 1154837 - DNA, 25 bp, Homo sapien
gtgaatttccaagacggctgggatt

SEQ ID NO: 1154838 - DNA, 25 bp, Homo sapien
gaccaatacttcctgtatttcctcc

SEQ ID NO: 1154839 - DNA, 25 bp, Homo sapien
tgaatttccaagacggctgggattt

SEQ ID NO: 1154840 - DNA, 25 bp, Homo sapien
acagcaagaccaatacttcctgtat

SEQ ID NO: 1154841 - DNA, 25 bp, Homo sapien
gtaagggtacagcatgagatgatct

SEQ ID NO: 1154842 - DNA, 25 bp, Homo sapien
gcagcagtaaaattgtgcccactgt

SEQ ID NO: 1154843 - DNA, 25 bp, Homo sapien
tccactggctttattggtagaagat

SEQ ID NO: 1154844 - DNA, 25 bp, Homo sapien
cactggctttattggtagaagatca

SEQ ID NO: 1154845 - DNA, 25 bp, Homo sapien
ccactggctttattggtagaagatc

SEQ ID NO: 1154846 - DNA, 25 bp, Homo sapien
tatgtactacattgtaatctagtga

SEQ ID NO: 1154847 - DNA, 25 bp, Homo sapien
cattgtaatctagtgatccagagag

SEQ ID NO: 1154848 - DNA, 25 bp, Homo sapien
atccagagagttgagggcctgaatc

SEQ ID NO: 1154849 - DNA, 25 bp, Homo sapien
aatctagtgatccagagagttgagg

SEQ ID NO: 1154850 - DNA, 25 bp, Homo sapien
agtcaatctcaaggacatttgcaag

SEQ ID NO: 1154851 - DNA, 25 bp, Homo sapien
aaacaaatatcttatagagtagagt

SEQ ID NO: 1154852 - DNA, 25 bp, Homo sapien
gtcccttcttatgggcaaagcccaa

SEQ ID NO: 1154853 - DNA, 25 bp, Homo sapien
cttaaccagggataagtcaatctca

SEQ ID NO: 1154854 - DNA, 25 bp, Homo sapien
gttgccgatgaagcttcttgtacag

SEQ ID NO: 1154855 - DNA, 25 bp, Homo sapien
ttgccgatgaagcttcttgtacagg

SEQ ID NO: 1154856 - DNA, 25 bp, Homo sapien
gtgcttcgtgtgtcctgcagacaga

SEQ ID NO: 1154857 - DNA, 25 bp, Homo sapien
ttttgtttagaactctgctgccagt

SEQ ID NO: 1154858 - DNA, 25 bp, Homo sapien
taagcgcatgatcaaaatatctctg

SEQ ID NO: 1154859 - DNA, 25 bp, Homo sapien
caagaaggctttcacagcataagag

SEQ ID NO: 1154860 - DNA, 25 bp, Homo sapien
gatatgataaacataaatgtactgt

SEQ ID NO: 1154861 - DNA, 25 bp, Homo sapien
gtgatatgataaacataaatgtact

SEQ ID NO: 1154862 - DNA, 25 bp, Homo sapien
tgtccagtgatatgataaacataaa

SEQ ID NO: 1154863 - DNA, 25 bp, Homo sapien
cagtgatatgataaacataaatgta

SEQ ID NO: 1154864 - DNA, 25 bp, Homo sapien
catcgtgagcacatttgaggtagga

SEQ ID NO: 1154865 - DNA, 25 bp, Homo sapien
tgttaaagcatcattcaacatcgtg

SEQ ID NO: 1154866 - DNA, 25 bp, Homo sapien
gcatcattcaacatcgtgagcacat

SEQ ID NO: 1154867 - DNA, 25 bp, Homo sapien
gaatgtgttaaagcatcattcaaca

SEQ ID NO: 1154868 - DNA, 25 bp, Homo sapien
catggacagtttctcctatcccatg

SEQ ID NO: 1154869 - DNA, 25 bp, Homo sapien
ggacagtttctcctatcccatgcag

SEQ ID NO: 1154870 - DNA, 25 bp, Homo sapien
acagtttctcctatcccatgcagac

SEQ ID NO: 1154871 - DNA, 25 bp, Homo sapien
tggacagtttctcctatcccatgca

SEQ ID NO: 1154872 - DNA, 25 bp, Homo sapien
tttatgaacacccatattgacacga

SEQ ID NO: 1154873 - DNA, 25 bp, Homo sapien
tatgaacacccatattgacacgagt

SEQ ID NO: 1154874 - DNA, 25 bp, Homo sapien
tgctttatgaacacccatattgaca

SEQ ID NO: 1154875 - DNA, 25 bp, Homo sapien
gcaatgctttatgaacacccatatt

SEQ ID NO: 1154876 - DNA, 25 bp, Homo sapien
ccagaagccaaatcaggttttcctc

SEQ ID NO: 1154877 - DNA, 25 bp, Homo sapien
ccatttaacatctgagccagaagcc

SEQ ID NO: 1154878 - DNA, 25 bp, Homo sapien
actcccatttaacatctgagccaga

SEQ ID NO: 1154879 - DNA, 25 bp, Homo sapien
ttcctctctcatcagaagcatcact

SEQ ID NO: 1154880 - DNA, 25 bp, Homo sapien
gtgaacaaagttaaggacttgcaga

SEQ ID NO: 1154881 - DNA, 25 bp, Homo sapien
tgaacaaagttaaggacttgcagag

SEQ ID NO: 1154882 - DNA, 25 bp, Homo sapien
tgcagagagagttttctactggaat

SEQ ID NO: 1154883 - DNA, 25 bp, Homo sapien
gagagagttttctactggaatgtaa

SEQ ID NO: 1154884 - DNA, 25 bp, Homo sapien
gtaaagcaagaattgctccgcagca

SEQ ID NO: 1154885 - DNA, 25 bp, Homo sapien
taaagcaagaattgctccgcagcag

SEQ ID NO: 1154886 - DNA, 25 bp, Homo sapien
tattagtaaagcaagaattgctccg

SEQ ID NO: 1154887 - DNA, 25 bp, Homo sapien
tagtaaagcaagaattgctccgcag

SEQ ID NO: 1154888 - DNA, 25 bp, Homo sapien
caacgaatagtcataatctgaatta

SEQ ID NO: 1154889 - DNA, 25 bp, Homo sapien
tacataatttagatacccataggaa

SEQ ID NO: 1154890 - DNA, 25 bp, Homo sapien
gaagatgtcccacttttacattgga

SEQ ID NO: 1154891 - DNA, 25 bp, Homo sapien
agtacctctcactgctagaagaaag

SEQ ID NO: 1154892 - DNA, 25 bp, Homo sapien
gctaaaatttggctctctctgggtc

SEQ ID NO: 1154893 - DNA, 25 bp, Homo sapien
catgaatcagccttctagcctggaa

SEQ ID NO: 1154894 - DNA, 25 bp, Homo sapien
tgagttaatccttgcccggaatggt

SEQ ID NO: 1154895 - DNA, 25 bp, Homo sapien
gaatggtcctaagtcctatttataa

SEQ ID NO: 1154896 - DNA, 25 bp, Homo sapien
gggtgtgtgagttaatccttgcccg

SEQ ID NO: 1154897 - DNA, 25 bp, Homo sapien
aatccttgcccggaatggtcctaag

SEQ ID NO: 1154898 - DNA, 25 bp, Homo sapien
tgaaaagtgcttgctgttgtttccc

SEQ ID NO: 1154899 - DNA, 25 bp, Homo sapien
tgtcaggtggaggaagaacatacat

SEQ ID NO: 1154900 - DNA, 25 bp, Homo sapien
aattgtcaggtggaggaagaacata

SEQ ID NO: 1154901 - DNA, 25 bp, Homo sapien
gggggcacaattgtcaggtggagga

SEQ ID NO: 1154902 - DNA, 25 bp, Homo sapien
tgggggcacaattgtcaggtggagg

SEQ ID NO: 1154903 - DNA, 25 bp, Homo sapien
aatcttgcagcacatctctttggta

SEQ ID NO: 1154904 - DNA, 25 bp, Homo sapien
tcttgcagcacatctctttggtatg

SEQ ID NO: 1154905 - DNA, 25 bp, Homo sapien
tgaaatcttgcagcacatctctttg

SEQ ID NO: 1154906 - DNA, 25 bp, Homo sapien
ctctgaaatcttgcagcacatctct

SEQ ID NO: 1154907 - DNA, 25 bp, Homo sapien
tacccaaaactgtgcggcttgaagc

SEQ ID NO: 1154908 - DNA, 25 bp, Homo sapien
gagaggtcttaagcatgcctctgga

SEQ ID NO: 1154909 - DNA, 25 bp, Homo sapien
tatggggttcctgactcttcaagaa

SEQ ID NO: 1154910 - DNA, 25 bp, Homo sapien
tgtgccttgtgggatcctagcatac

SEQ ID NO: 1154911 - DNA, 25 bp, Homo sapien
tgttaattgcatccagtgaatttat

SEQ ID NO: 1154912 - DNA, 25 bp, Homo sapien
ctgttaattgcatccagtgaattta

SEQ ID NO: 1154913 - DNA, 25 bp, Homo sapien
gggctctatctctggacatcgtgat

SEQ ID NO: 1154914 - DNA, 25 bp, Homo sapien
ttttccgaagctttgtagtctgcac

SEQ ID NO: 1154915 - DNA, 25 bp, Homo sapien
ttagtcgactcagcctctccggttt

SEQ ID NO: 1154916 - DNA, 25 bp, Homo sapien
cagagtcaggcaatgcaagcgtttc

SEQ ID NO: 1154917 - DNA, 25 bp, Homo sapien
caagcgtttctaacgtggaacaaca

SEQ ID NO: 1154918 - DNA, 25 bp, Homo sapien
cactctagagttgctgatctctgtg

SEQ ID NO: 1154919 - DNA, 25 bp, Homo sapien
gcaggaaagagaccgtggtcacgaa

SEQ ID NO: 1154920 - DNA, 25 bp, Homo sapien
cttcttcatcgcactctagagttgc

SEQ ID NO: 1154921 - DNA, 25 bp, Homo sapien
tcccagagtgaagcttcttcatcgc

SEQ ID NO: 1154922 - DNA, 25 bp, Homo sapien
taagcagaatgcaggtgtaaaaatc

SEQ ID NO: 1154923 - DNA, 25 bp, Homo sapien
gtaaaaatcagcactaggacgtcaa

SEQ ID NO: 1154924 - DNA, 25 bp, Homo sapien
gcagaatgcaggtgtaaaaatcagc

SEQ ID NO: 1154925 - DNA, 25 bp, Homo sapien
tgcaggtgtaaaaatcagcactagg

SEQ ID NO: 1154926 - DNA, 25 bp, Homo sapien
tggagtaggcacaaacggaaaactg

SEQ ID NO: 1154927 - DNA, 25 bp, Homo sapien
gacagcaggtggagtaggcacaaac

SEQ ID NO: 1154928 - DNA, 25 bp, Homo sapien
cacaaacggaaaactgttgccggtg

SEQ ID NO: 1154929 - DNA, 25 bp, Homo sapien
agtaggcacaaacggaaaactgttg

SEQ ID NO: 1154930 - DNA, 25 bp, Homo sapien
tgattgagcggtagagggaggcgat

SEQ ID NO: 1154931 - DNA, 25 bp, Homo sapien
gctgattgagcggtagagggaggcg

SEQ ID NO: 1154932 - DNA, 25 bp, Homo sapien
agggcggtcccttttgctgattgag

SEQ ID NO: 1154933 - DNA, 25 bp, Homo sapien
tcaagggcggtcccttttgctgatt

SEQ ID NO: 1154934 - DNA, 25 bp, Homo sapien
gctaacatgctcgttaggccttcgg

SEQ ID NO: 1154935 - DNA, 25 bp, Homo sapien
acatgctcgttaggccttcggaaga

SEQ ID NO: 1154936 - DNA, 25 bp, Homo sapien
ctccgttcgcagctaacatgctcgt

SEQ ID NO: 1154937 - DNA, 25 bp, Homo sapien
tcgcagctaacatgctcgttaggcc

SEQ ID NO: 1154938 - DNA, 25 bp, Homo sapien
catggcgtttgtgcgtgccctggac

SEQ ID NO: 1154939 - DNA, 25 bp, Homo sapien
agtcatggcgtttgtgcgtgccctg

SEQ ID NO: 1154940 - DNA, 25 bp, Homo sapien
ccaagtcatggcgtttgtgcgtgcc

SEQ ID NO: 1154941 - DNA, 25 bp, Homo sapien
caagccaagtcatggcgtttgtgcg

SEQ ID NO: 1154942 - DNA, 25 bp, Homo sapien
cccgtggagctgcacttaataaggg

SEQ ID NO: 1154943 - DNA, 25 bp, Homo sapien
cgtggagctgcacttaataagggca

SEQ ID NO: 1154944 - DNA, 25 bp, Homo sapien
cctctttgccgtcgccgccccggag

SEQ ID NO: 1154945 - DNA, 25 bp, Homo sapien
gagctgcacttaataagggcaccct

SEQ ID NO: 1154946 - DNA, 25 bp, Homo sapien
tgccgaacgaattggcccataaagc

SEQ ID NO: 1154947 - DNA, 25 bp, Homo sapien
gcgcgcaccggggtggaggttaggc

SEQ ID NO: 1154948 - DNA, 25 bp, Homo sapien
ctgagacctaactcctggcaagtgg

SEQ ID NO: 1154949 - DNA, 25 bp, Homo sapien
tggagaaccgcagtcaaatcctctt

SEQ ID NO: 1154950 - DNA, 25 bp, Homo sapien
gtttgtcaacgtagagtctttccca

SEQ ID NO: 1154951 - DNA, 25 bp, Homo sapien
tttgtcaacgtagagtctttcccac

SEQ ID NO: 1154952 - DNA, 25 bp, Homo sapien
tgtcaacgtagagtctttcccactg

SEQ ID NO: 1154953 - DNA, 25 bp, Homo sapien
ttgtcaacgtagagtctttcccact

SEQ ID NO: 1154954 - DNA, 25 bp, Homo sapien
taggacagcaagatccctagccctt

SEQ ID NO: 1154955 - DNA, 25 bp, Homo sapien
tccttaggacagcaagatccctagc

SEQ ID NO: 1154956 - DNA, 25 bp, Homo sapien
cccttgctcagctgtccttaggaca

SEQ ID NO: 1154957 - DNA, 25 bp, Homo sapien
ctgtccttaggacagcaagatccct

SEQ ID NO: 1154958 - DNA, 25 bp, Homo sapien
cccatggaagtaagcacccctttga

SEQ ID NO: 1154959 - DNA, 25 bp, Homo sapien
ctggtatagccgactgcttcacaca

SEQ ID NO: 1154960 - DNA, 25 bp, Homo sapien
ctctgtgcctggtatagccgactgc

SEQ ID NO: 1154961 - DNA, 25 bp, Homo sapien
tggaagtaagcacccctttgaggaa

SEQ ID NO: 1154962 - DNA, 25 bp, Homo sapien
tttgtgaggaacctgaacggatgag

SEQ ID NO: 1154963 - DNA, 25 bp, Homo sapien
aaaggtgccctcctctctacttgct

SEQ ID NO: 1154964 - DNA, 25 bp, Homo sapien
ttttgtgaggaacctgaacggatga

SEQ ID NO: 1154965 - DNA, 25 bp, Homo sapien
aggggggatcttgattcctattacg

SEQ ID NO: 1154966 - DNA, 25 bp, Homo sapien
gatcttgattcctattacgtttctg

SEQ ID NO: 1154967 - DNA, 25 bp, Homo sapien
ttgattcctattacgtttctgaaga

SEQ ID NO: 1154968 - DNA, 25 bp, Homo sapien
gggatcttgattcctattacgtttc

SEQ ID NO: 1154969 - DNA, 25 bp, Homo sapien
tgcatgctgagtaaacacgcctgtt

SEQ ID NO: 1154970 - DNA, 25 bp, Homo sapien
cggccagtggtctcttaccaagaga

SEQ ID NO: 1154971 - DNA, 25 bp, Homo sapien
tgtaaactgtccagaaccagcccac

SEQ ID NO: 1154972 - DNA, 25 bp, Homo sapien
agtgatttacgttgatctggttggc

SEQ ID NO: 1154973 - DNA, 25 bp, Homo sapien
tctgggcggattcctgctaacccaa

SEQ ID NO: 1154974 - DNA, 25 bp, Homo sapien
tcctgctaacccaagaaccatcagt

SEQ ID NO: 1154975 - DNA, 25 bp, Homo sapien
gctaacccaagaaccatcagtttcc

SEQ ID NO: 1154976 - DNA, 25 bp, Homo sapien
ggcggattcctgctaacccaagaac

SEQ ID NO: 1154977 - DNA, 25 bp, Homo sapien
tatggtgtacagatcctgtattgcc

SEQ ID NO: 1154978 - DNA, 25 bp, Homo sapien
tctctattgctttgtccccgcgcgc

SEQ ID NO: 1154979 - DNA, 25 bp, Homo sapien
ggcttaggtaatcaacaatttaata

SEQ ID NO: 1154980 - DNA, 25 bp, Homo sapien
ccaaactactctccggaggcttagg

SEQ ID NO: 1154981 - DNA, 25 bp, Homo sapien
ccaaaagcagaacgaggccggcgct

SEQ ID NO: 1154982 - DNA, 25 bp, Homo sapien
aaaagcagaacgaggccggcgctgc

SEQ ID NO: 1154983 - DNA, 25 bp, Homo sapien
gagccaaaagcagaacgaggccggc

SEQ ID NO: 1154984 - DNA, 25 bp, Homo sapien
agccaaaagcagaacgaggccggcg

SEQ ID NO: 1154985 - DNA, 25 bp, Homo sapien
catgaagtaggcctctttgggagct

SEQ ID NO: 1154986 - DNA, 25 bp, Homo sapien
cttggccctccagtcgctggtaagg

SEQ ID NO: 1154987 - DNA, 25 bp, Homo sapien
gccctccagtcgctggtaagggtaa

SEQ ID NO: 1154988 - DNA, 25 bp, Homo sapien
agtcgctggtaagggtaacagccca

SEQ ID NO: 1154989 - DNA, 25 bp, Homo sapien
tcatgaaatttcctgatttaaggcg

SEQ ID NO: 1154990 - DNA, 25 bp, Homo sapien
catgaaatttcctgatttaaggcga

SEQ ID NO: 1154991 - DNA, 25 bp, Homo sapien
ttgttgggtttgctggaactcggca

SEQ ID NO: 1154992 - DNA, 25 bp, Homo sapien
gtctctgtttcctccgctgtgacgg

SEQ ID NO: 1154993 - DNA, 25 bp, Homo sapien
gtgacggctcttcccgctcctgtag

SEQ ID NO: 1154994 - DNA, 25 bp, Homo sapien
tcttgtctatgtgggactccaaagg

SEQ ID NO: 1154995 - DNA, 25 bp, Homo sapien
tcgaaatcttggagattgagcaaga

SEQ ID NO: 1154996 - DNA, 25 bp, Homo sapien
ttccattttgtcctcgaaatcttgg

SEQ ID NO: 1154997 - DNA, 25 bp, Homo sapien
aatttccattttgtcctcgaaatct

SEQ ID NO: 1154998 - DNA, 25 bp, Homo sapien
tttccattttgtcctcgaaatcttg

SEQ ID NO: 1154999 - DNA, 25 bp, Homo sapien
tattgatgcaggtgcacaaatatct

SEQ ID NO: 1155000 - DNA, 25 bp, Homo sapien
ctattgatgcaggtgcacaaatatc

SEQ ID NO: 1155001 - DNA, 25 bp, Homo sapien
aatttgttggatcatgtgataatta

SEQ ID NO: 1155002 - DNA, 25 bp, Homo sapien
taaccaagctcttgccatttggagc

SEQ ID NO: 1155003 - DNA, 25 bp, Homo sapien
catttggagccgattgttatggatg

SEQ ID NO: 1155004 - DNA, 25 bp, Homo sapien
caggtgtgccctgattggagactgc

SEQ ID NO: 1155005 - DNA, 25 bp, Homo sapien
gttggtcctaagttgcaagtgggaa

SEQ ID NO: 1155006 - DNA, 25 bp, Homo sapien
ttgcgccctgtttcagtcctccagt

SEQ ID NO: 1155007 - DNA, 25 bp, Homo sapien
agggcagccgccctcttgcgccctg

SEQ ID NO: 1155008 - DNA, 25 bp, Homo sapien
cgggtcagtccgaactccgaaggcg

SEQ ID NO: 1155009 - DNA, 25 bp, Homo sapien
caaggcagggagggaccggtaggtg

SEQ ID NO: 1155010 - DNA, 25 bp, Homo sapien
aactggccaggagttctcgaggcgc

SEQ ID NO: 1155011 - DNA, 25 bp, Homo sapien
caggtgcgggtgtgcagggacgcgc

SEQ ID NO: 1155012 - DNA, 25 bp, Homo sapien
ggaccgggtattcaactggccagga

SEQ ID NO: 1155013 - DNA, 25 bp, Homo sapien
gagtttgcagttcctgcgggctcca

SEQ ID NO: 1155014 - DNA, 25 bp, Homo sapien
ccgggtacgcaaccctgcacctctt

SEQ ID NO: 1155015 - DNA, 25 bp, Homo sapien
tctcccgccgggtacgcaaccctgc

SEQ ID NO: 1155016 - DNA, 25 bp, Homo sapien
gtacgcaaccctgcacctctttcct

SEQ ID NO: 1155017 - DNA, 25 bp, Homo sapien
ccgccgggtacgcaaccctgcacct

SEQ ID NO: 1155018 - DNA, 25 bp, Homo sapien
tgtcttctcggaggccagtagcagc

SEQ ID NO: 1155019 - DNA, 25 bp, Homo sapien
ctgtcttctcggaggccagtagcag

SEQ ID NO: 1155020 - DNA, 25 bp, Homo sapien
ggccgccgttagactttggccctgc

SEQ ID NO: 1155021 - DNA, 25 bp, Homo sapien
aggccgccgttagactttggccctg

SEQ ID NO: 1155022 - DNA, 25 bp, Homo sapien
gcatagagatcgcttcaactcgcta

SEQ ID NO: 1155023 - DNA, 25 bp, Homo sapien
cagactttgatccacacaactattc

SEQ ID NO: 1155024 - DNA, 25 bp, Homo sapien
cgcggctcgcccagacgttagggtt

SEQ ID NO: 1155025 - DNA, 25 bp, Homo sapien
ttttggcaaacgacaagcaaggcat

SEQ ID NO: 1155026 - DNA, 25 bp, Homo sapien
gaatcaaccagtcccggcggtgaaa

SEQ ID NO: 1155027 - DNA, 25 bp, Homo sapien
tcccctgatctggaatcaaccagtc

SEQ ID NO: 1155028 - DNA, 25 bp, Homo sapien
aagcgccaaactttagccactagac

SEQ ID NO: 1155029 - DNA, 25 bp, Homo sapien
cggtgaaagcgccaaactttagcca

SEQ ID NO: 1155030 - DNA, 25 bp, Homo sapien
tacgttgtagggctgtatacatcgg

SEQ ID NO: 1155031 - DNA, 25 bp, Homo sapien
catctcttgcggatttatagtctaa

SEQ ID NO: 1155032 - DNA, 25 bp, Homo sapien
tctagcattggttccaaattctggg

SEQ ID NO: 1155033 - DNA, 25 bp, Homo sapien
aaagacgcagtctcacacactttgg

SEQ ID NO: 1155034 - DNA, 25 bp, Homo sapien
ttttcttctgtctaagcgtaaagta

SEQ ID NO: 1155035 - DNA, 25 bp, Homo sapien
tctaagcgtaaagtaacctttatca

SEQ ID NO: 1155036 - DNA, 25 bp, Homo sapien
cttctgtctaagcgtaaagtaacct

SEQ ID NO: 1155037 - DNA, 25 bp, Homo sapien
ttcttctgtctaagcgtaaagtaac

SEQ ID NO: 1155038 - DNA, 25 bp, Homo sapien
gatgttgtaatatagggttaatgcg

SEQ ID NO: 1155039 - DNA, 25 bp, Homo sapien
taatgcgtagtttgtgtcaaggttt

SEQ ID NO: 1155040 - DNA, 25 bp, Homo sapien
tgtaatatagggttaatgcgtagtt

SEQ ID NO: 1155041 - DNA, 25 bp, Homo sapien
tatagggttaatgcgtagtttgtgt

SEQ ID NO: 1155042 - DNA, 25 bp, Homo sapien
aatctgtaacatgcaagatattgaa

SEQ ID NO: 1155043 - DNA, 25 bp, Homo sapien
gaaatctgtaacatgcaagatattg

SEQ ID NO: 1155044 - DNA, 25 bp, Homo sapien
aaatctgtaacatgcaagatattga

SEQ ID NO: 1155045 - DNA, 25 bp, Homo sapien
ctggtgggagcagtgaaatctgtaa

SEQ ID NO: 1155046 - DNA, 25 bp, Homo sapien
aaggagcagagttgtcaagaaccac

SEQ ID NO: 1155047 - DNA, 25 bp, Homo sapien
caaaggagcagagttgtcaagaacc

SEQ ID NO: 1155048 - DNA, 25 bp, Homo sapien
ggagcagagttgtcaagaaccacat

SEQ ID NO: 1155049 - DNA, 25 bp, Homo sapien
cccaaaggagcagagttgtcaagaa

SEQ ID NO: 1155050 - DNA, 25 bp, Homo sapien
gctcttctgcaggttaataggaccc

SEQ ID NO: 1155051 - DNA, 25 bp, Homo sapien
tgagagtacattgcagggcttcagc

SEQ ID NO: 1155052 - DNA, 25 bp, Homo sapien
ttgggcaagccaagcggagctgttt

SEQ ID NO: 1155053 - DNA, 25 bp, Homo sapien
cattcaggcatttcgctcagaggaa

SEQ ID NO: 1155054 - DNA, 25 bp, Homo sapien
agagacctctctggcacctgtattc

SEQ ID NO: 1155055 - DNA, 25 bp, Homo sapien
ctcacagtgcaaggttacggtttcc

SEQ ID NO: 1155056 - DNA, 25 bp, Homo sapien
tgccattgagaaaccactgtgtaga

SEQ ID NO: 1155057 - DNA, 25 bp, Homo sapien
tacggtttcctcttggaacacgctg

SEQ ID NO: 1155058 - DNA, 25 bp, Homo sapien
atatgattagggctcgggtccacca

SEQ ID NO: 1155059 - DNA, 25 bp, Homo sapien
gtgagctgcaattgaattccccatg

SEQ ID NO: 1155060 - DNA, 25 bp, Homo sapien
tttaaaatagggcatagacggcacc

SEQ ID NO: 1155061 - DNA, 25 bp, Homo sapien
gaaatgactaagagtcagtgagctg

SEQ ID NO: 1155062 - DNA, 25 bp, Homo sapien
gatgctgaaagactgcactgcccaa

SEQ ID NO: 1155063 - DNA, 25 bp, Homo sapien
aactgtcaaacactagtaatggtag

SEQ ID NO: 1155064 - DNA, 25 bp, Homo sapien
gaaaaattaagtgtgaactaggcca

SEQ ID NO: 1155065 - DNA, 25 bp, Homo sapien
tatatatcaaaactcacgagatgca

SEQ ID NO: 1155066 - DNA, 25 bp, Homo sapien
tgctgatgtgtagcgatgctttccc

SEQ ID NO: 1155067 - DNA, 25 bp, Homo sapien
tgcctgagcaatggtaggtgccatt

SEQ ID NO: 1155068 - DNA, 25 bp, Homo sapien
gatagtaaagcacattgtacaccag

SEQ ID NO: 1155069 - DNA, 25 bp, Homo sapien
aaggctttgccatttcgatagtaaa

SEQ ID NO: 1155070 - DNA, 25 bp, Homo sapien
tcgcaccagtataacccagagtctt

SEQ ID NO: 1155071 - DNA, 25 bp, Homo sapien
tcagggctgcgcttaaggacatttc

SEQ ID NO: 1155072 - DNA, 25 bp, Homo sapien
gaagtaaagctgcaaaccaggcctc

SEQ ID NO: 1155073 - DNA, 25 bp, Homo sapien
ggtcttgctgcccatgtagaaggag

SEQ ID NO: 1155074 - DNA, 25 bp, Homo sapien
tcagtcccatgggagataagggagt

SEQ ID NO: 1155075 - DNA, 25 bp, Homo sapien
agataagggagtcccttcttctgtg

SEQ ID NO: 1155076 - DNA, 25 bp, Homo sapien
gtgccagtggcttcccgtcattctc

SEQ ID NO: 1155077 - DNA, 25 bp, Homo sapien
agtggcttcccgtcattctcactca

SEQ ID NO: 1155078 - DNA, 25 bp, Homo sapien
cttggaagagcttaattgctgggcc

SEQ ID NO: 1155079 - DNA, 25 bp, Homo sapien
tgttctagagctcacaatccctctg

SEQ ID NO: 1155080 - DNA, 25 bp, Homo sapien
tgggccctgtcagtggacttactcc

SEQ ID NO: 1155081 - DNA, 25 bp, Homo sapien
tccctctgcctcagttaaatagaga

SEQ ID NO: 1155082 - DNA, 25 bp, Homo sapien
gaagagatactatttagagaccaga

SEQ ID NO: 1155083 - DNA, 25 bp, Homo sapien
agaagagatactatttagagaccag

SEQ ID NO: 1155084 - DNA, 25 bp, Homo sapien
catgaaaccagacaggagttggtaa

SEQ ID NO: 1155085 - DNA, 25 bp, Homo sapien
accagacaggagttggtaactggag

SEQ ID NO: 1155086 - DNA, 25 bp, Homo sapien
gaaaccagacaggagttggtaactg

SEQ ID NO: 1155087 - DNA, 25 bp, Homo sapien
tgaaaccagacaggagttggtaact

SEQ ID NO: 1155088 - DNA, 25 bp, Homo sapien
ccagagaacagtgttcactaaaaac

SEQ ID NO: 1155089 - DNA, 25 bp, Homo sapien
tcttcttgaaggctggaaattacct

SEQ ID NO: 1155090 - DNA, 25 bp, Homo sapien
cagttctttacgtattgtcacccag

SEQ ID NO: 1155091 - DNA, 25 bp, Homo sapien
gaaattaccttcttctcatgaccag

SEQ ID NO: 1155092 - DNA, 25 bp, Homo sapien
caggggacggtccagatcgatggcc

SEQ ID NO: 1155093 - DNA, 25 bp, Homo sapien
gctcacggggagcaagtgggcaggg

SEQ ID NO: 1155094 - DNA, 25 bp, Homo sapien
gatgtttgtacgcagtgctcacggg

SEQ ID NO: 1155095 - DNA, 25 bp, Homo sapien
acttttggatgtttgtacgcagtgc

SEQ ID NO: 1155096 - DNA, 25 bp, Homo sapien
tggactctatggtatcgccgcttct

SEQ ID NO: 1155097 - DNA, 25 bp, Homo sapien
cagcccaagtatgagagcagcgtat

SEQ ID NO: 1155098 - DNA, 25 bp, Homo sapien
cttgtatgcctagaacgcgtatgga

SEQ ID NO: 1155099 - DNA, 25 bp, Homo sapien
caagaattctttagagtaggcctca

SEQ ID NO: 1155100 - DNA, 25 bp, Homo sapien
gctgcaatatgcacatgcggccaca

SEQ ID NO: 1155101 - DNA, 25 bp, Homo sapien
cggcccccagatacaggcggaggct

SEQ ID NO: 1155102 - DNA, 25 bp, Homo sapien
ccaacagctttcgccgcagctgggt

SEQ ID NO: 1155103 - DNA, 25 bp, Homo sapien
gcgggacacgctcggagcgcgacgc

SEQ ID NO: 1155104 - DNA, 25 bp, Homo sapien
ccgaggaaacaatgacgttgggatt

SEQ ID NO: 1155105 - DNA, 25 bp, Homo sapien
gttggagggactcagctacgcgcct

SEQ ID NO: 1155106 - DNA, 25 bp, Homo sapien
cttgactcgggcgaatgggacacga

SEQ ID NO: 1155107 - DNA, 25 bp, Homo sapien
tacagctcatttctcgctcctgcag

SEQ ID NO: 1155108 - DNA, 25 bp, Homo sapien
ttttcatccgtgataggatgggccg

SEQ ID NO: 1155109 - DNA, 25 bp, Homo sapien
tgcttttgacggtgagggaaccagc

SEQ ID NO: 1155110 - DNA, 25 bp, Homo sapien
ttcttgcccgctggcttgctgatcc

SEQ ID NO: 1155111 - DNA, 25 bp, Homo sapien
cagggcctcattgtcagtcctgtaa

SEQ ID NO: 1155112 - DNA, 25 bp, Homo sapien
gaaacgggcctgaactcttacagaa

SEQ ID NO: 1155113 - DNA, 25 bp, Homo sapien
tttagaggtctccatacccagcctg

SEQ ID NO: 1155114 - DNA, 25 bp, Homo sapien
cagaagctcttgtggccctaggatg

SEQ ID NO: 1155115 - DNA, 25 bp, Homo sapien
gctctcggattgaaggatgggccca

SEQ ID NO: 1155116 - DNA, 25 bp, Homo sapien
atttgtaaataatgcttaagaggcc

SEQ ID NO: 1155117 - DNA, 25 bp, Homo sapien
tggtgaccttgtagttgcatcgaaa

SEQ ID NO: 1155118 - DNA, 25 bp, Homo sapien
gaccttgtagttgcatcgaaagaaa

SEQ ID NO: 1155119 - DNA, 25 bp, Homo sapien
ataagcggccttacagacacaaaac

SEQ ID NO: 1155120 - DNA, 25 bp, Homo sapien
tgtctgggaatcttttactttcaca

SEQ ID NO: 1155121 - DNA, 25 bp, Homo sapien
tcctcttcgaagtatttttctgccc

SEQ ID NO: 1155122 - DNA, 25 bp, Homo sapien
tgtttcactggatatcacgccattg

SEQ ID NO: 1155123 - DNA, 25 bp, Homo sapien
ggtcacaataaactagaattcaagg

SEQ ID NO: 1155124 - DNA, 25 bp, Homo sapien
gtgtgatgtcgttttgtttattaat

SEQ ID NO: 1155125 - DNA, 25 bp, Homo sapien
aagtgtgatgtcgttttgtttatta

SEQ ID NO: 1155126 - DNA, 25 bp, Homo sapien
gaacaaggggaggattagagagttg

SEQ ID NO: 1155127 - DNA, 25 bp, Homo sapien
aagaacaaggggaggattagagagt

SEQ ID NO: 1155128 - DNA, 25 bp, Homo sapien
caagattgtgtcctgaagatatgtt

SEQ ID NO: 1155129 - DNA, 25 bp, Homo sapien
aagattgtgtcctgaagatatgttg

SEQ ID NO: 1155130 - DNA, 25 bp, Homo sapien
tcaagattgtgtcctgaagatatgt

SEQ ID NO: 1155131 - DNA, 25 bp, Homo sapien
attcaagattgtgtcctgaagatat

SEQ ID NO: 1155132 - DNA, 25 bp, Homo sapien
ctgggcgcttggcttctcaattaaa

SEQ ID NO: 1155133 - DNA, 25 bp, Homo sapien
taaaggctaatttaccagcttctct

SEQ ID NO: 1155134 - DNA, 25 bp, Homo sapien
gcaactactttggacccagaggcag

SEQ ID NO: 1155135 - DNA, 25 bp, Homo sapien
ccttgtatactctaactccctgctt

SEQ ID NO: 1155136 - DNA, 25 bp, Homo sapien
tgaatggagagtgaaaggttgcctc

SEQ ID NO: 1155137 - DNA, 25 bp, Homo sapien
tgacgagtatatcatgtatcctctg

SEQ ID NO: 1155138 - DNA, 25 bp, Homo sapien
gaacttacatggtgccagctactgt

SEQ ID NO: 1155139 - DNA, 25 bp, Homo sapien
caaaggtatccattcctcaagtcca

SEQ ID NO: 1155140 - DNA, 25 bp, Homo sapien
gaaagtttgttgactggttgccagt

SEQ ID NO: 1155141 - DNA, 25 bp, Homo sapien
ccttgagccgatgtatctatgtagc

SEQ ID NO: 1155142 - DNA, 25 bp, Homo sapien
gagtggtaaagtactacacttggca

SEQ ID NO: 1155143 - DNA, 25 bp, Homo sapien
taattattggcccagttgaaacaac

SEQ ID NO: 1155144 - DNA, 25 bp, Homo sapien
ggcagaggctctaatatcaggtcaa

SEQ ID NO: 1155145 - DNA, 25 bp, Homo sapien
tagaagcttaacatctgcaggacct

SEQ ID NO: 1155146 - DNA, 25 bp, Homo sapien
ccgccccagtaaagaggattgaatt

SEQ ID NO: 1155147 - DNA, 25 bp, Homo sapien
ggaagaaggaaccacatcgcaggga

SEQ ID NO: 1155148 - DNA, 25 bp, Homo sapien
gggtttccgatactgacacagacaa

SEQ ID NO: 1155149 - DNA, 25 bp, Homo sapien
cacactgggtgaggaaacgataggc

SEQ ID NO: 1155150 - DNA, 25 bp, Homo sapien
tagtaacagctttgacaccttttgg

SEQ ID NO: 1155151 - DNA, 25 bp, Homo sapien
tcatttcaggtacacagagttccgc

SEQ ID NO: 1155152 - DNA, 25 bp, Homo sapien
tccccgcataaagctggttctcctg

SEQ ID NO: 1155153 - DNA, 25 bp, Homo sapien
cattgaacggttccactgcgcatca

SEQ ID NO: 1155154 - DNA, 25 bp, Homo sapien
taatctccagggtgtgactcacggg

SEQ ID NO: 1155155 - DNA, 25 bp, Homo sapien
gactctttagtaactctggccgaat

SEQ ID NO: 1155156 - DNA, 25 bp, Homo sapien
tgcactgaggctaagggaaaggtct

SEQ ID NO: 1155157 - DNA, 25 bp, Homo sapien
ttctcatggacgtcagcgaatccca

SEQ ID NO: 1155158 - DNA, 25 bp, Homo sapien
tcaagtctctcatagaaagtggcgt

SEQ ID NO: 1155159 - DNA, 25 bp, Homo sapien
gcaggatttaatcccgacgagcgga

SEQ ID NO: 1155160 - DNA, 25 bp, Homo sapien
ctcaattgtccccgccctctcgaca

SEQ ID NO: 1155161 - DNA, 25 bp, Homo sapien
tcaattgtccccgccctctcgacat

SEQ ID NO: 1155162 - DNA, 25 bp, Homo sapien
cgaaagcgcgccggcgggaagcgtt

SEQ ID NO: 1155163 - DNA, 25 bp, Homo sapien
attgaaaaccgaaagcgcgccggcg

SEQ ID NO: 1155164 - DNA, 25 bp, Homo sapien
cagattgaaaaccgaaagcgcgccg

SEQ ID NO: 1155165 - DNA, 25 bp, Homo sapien
ccgaaagcgcgccggcgggaagcgt

SEQ ID NO: 1155166 - DNA, 25 bp, Homo sapien
tggagcccgatagacagcttctgtc

SEQ ID NO: 1155167 - DNA, 25 bp, Homo sapien
ccgctggagcccgatagacagcttc

SEQ ID NO: 1155168 - DNA, 25 bp, Homo sapien
ccgatagacagcttctgtcaaggcg

SEQ ID NO: 1155169 - DNA, 25 bp, Homo sapien
tagacagcttctgtcaaggcgagca

SEQ ID NO: 1155170 - DNA, 25 bp, Homo sapien
tgctcggtgtaggtgactgcgtccc

SEQ ID NO: 1155171 - DNA, 25 bp, Homo sapien
taaatgaggccagagatccgcttaa

SEQ ID NO: 1155172 - DNA, 25 bp, Homo sapien
ctagacgccgaatggcaggcttggt

SEQ ID NO: 1155173 - DNA, 25 bp, Homo sapien
tgtctctcaagaccttgcggtggcg

SEQ ID NO: 1155174 - DNA, 25 bp, Homo sapien
tcgaaacgtgcaaagctggagcggc

SEQ ID NO: 1155175 - DNA, 25 bp, Homo sapien
tcctcagatgagcaagtggtcggcc

SEQ ID NO: 1155176 - DNA, 25 bp, Homo sapien
catcgttactgttgcactttacgca

SEQ ID NO: 1155177 - DNA, 25 bp, Homo sapien
tttacgcagtcaagtgtccaactcc

SEQ ID NO: 1155178 - DNA, 25 bp, Homo sapien
agtccacccgcttgttatgtagagg

SEQ ID NO: 1155179 - DNA, 25 bp, Homo sapien
gaactctaagccgatcaggtgggaa

SEQ ID NO: 1155180 - DNA, 25 bp, Homo sapien
tatactgcaccagaagagcaagccg

SEQ ID NO: 1155181 - DNA, 25 bp, Homo sapien
tgatcgcaaagactgacgtggccct

SEQ ID NO: 1155182 - DNA, 25 bp, Homo sapien
tttgtatccttgcaatgccacaact

SEQ ID NO: 1155183 - DNA, 25 bp, Homo sapien
aactaaaagacagttatctcatagg

SEQ ID NO: 1155184 - DNA, 25 bp, Homo sapien
cactcttacagaaggatcactttaa

SEQ ID NO: 1155185 - DNA, 25 bp, Homo sapien
gttgctttcagatcatatcgttggt

SEQ ID NO: 1155186 - DNA, 25 bp, Homo sapien
gctggtttatcctttgggagctgac

SEQ ID NO: 1155187 - DNA, 25 bp, Homo sapien
tctgaagaccaataaagcaactgct

SEQ ID NO: 1155188 - DNA, 25 bp, Homo sapien
gtgtttgcagccacatctgaagacc

SEQ ID NO: 1155189 - DNA, 25 bp, Homo sapien
gttttaagcttagttcagtctcaag

SEQ ID NO: 1155190 - DNA, 25 bp, Homo sapien
tcttcgttgtgatggtaagctcctg

SEQ ID NO: 1155191 - DNA, 25 bp, Homo sapien
tgtactgcctcttactactggactg

SEQ ID NO: 1155192 - DNA, 25 bp, Homo sapien
ccgactggtaagcttctggaaggca

SEQ ID NO: 1155193 - DNA, 25 bp, Homo sapien
tttattcagagtccgacacaagccc

SEQ ID NO: 1155194 - DNA, 25 bp, Homo sapien
aatgttattcttgccacttcctccc

SEQ ID NO: 1155195 - DNA, 25 bp, Homo sapien
gatattcgaaatagcaatgctggaa

SEQ ID NO: 1155196 - DNA, 25 bp, Homo sapien
ctggaaatcacaggtcagatttaaa

SEQ ID NO: 1155197 - DNA, 25 bp, Homo sapien
acatcttgagcattaaaacctctat

SEQ ID NO: 1155198 - DNA, 25 bp, Homo sapien
caagaatgtttagccccacacgaca

SEQ ID NO: 1155199 - DNA, 25 bp, Homo sapien
caagcaacgcctggtcacagtaagt

SEQ ID NO: 1155200 - DNA, 25 bp, Homo sapien
cattcttcaagattcagccctgtga

SEQ ID NO: 1155201 - DNA, 25 bp, Homo sapien
cattaggctggcaacatttctcagg

SEQ ID NO: 1155202 - DNA, 25 bp, Homo sapien
ttaattactaggaaggactctggag

SEQ ID NO: 1155203 - DNA, 25 bp, Homo sapien
gagcaccggaggttaattactagga

SEQ ID NO: 1155204 - DNA, 25 bp, Homo sapien
ttgcatggcagttcagagcaccgga

SEQ ID NO: 1155205 - DNA, 25 bp, Homo sapien
tggcctaccgggcccatgcgattct

SEQ ID NO: 1155206 - DNA, 25 bp, Homo sapien
ggttaaaagcattcactgcagcgat

SEQ ID NO: 1155207 - DNA, 25 bp, Homo sapien
catcacagttgacaggttaaaagca

SEQ ID NO: 1155208 - DNA, 25 bp, Homo sapien
cacagttgacaggttaaaagcattc

SEQ ID NO: 1155209 - DNA, 25 bp, Homo sapien
tttcatcacagttgacaggttaaaa

SEQ ID NO: 1155210 - DNA, 25 bp, Homo sapien
tgttttcgtcggacatgtgggcaga

SEQ ID NO: 1155211 - DNA, 25 bp, Homo sapien
actcggtcctcttagaagctgcatg

SEQ ID NO: 1155212 - DNA, 25 bp, Homo sapien
cagaaggagattcactattccagtg

SEQ ID NO: 1155213 - DNA, 25 bp, Homo sapien
tattccagtgaaggcactcggtcct

SEQ ID NO: 1155214 - DNA, 25 bp, Homo sapien
gctatggcccgtactaagcagactg

SEQ ID NO: 1155215 - DNA, 25 bp, Homo sapien
tgtgcttataaagacggctgcggcg

SEQ ID NO: 1155216 - DNA, 25 bp, Homo sapien
aatggacagccagcgcgggattttc

SEQ ID NO: 1155217 - DNA, 25 bp, Homo sapien
gcccaatcgggaaaagactgtgctt

SEQ ID NO: 1155218 - DNA, 25 bp, Homo sapien
tcatgtctggtcgtggcaagcaagg

SEQ ID NO: 1155219 - DNA, 25 bp, Homo sapien
gtctacatggctgcggtcctcgagt

SEQ ID NO: 1155220 - DNA, 25 bp, Homo sapien
ttcagttcccggtagggcgagtgca

SEQ ID NO: 1155221 - DNA, 25 bp, Homo sapien
caaagggcaagtgaggctgacgtcc

SEQ ID NO: 1155222 - DNA, 25 bp, Homo sapien
tctaccggaaacgactgtgtactta

SEQ ID NO: 1155223 - DNA, 25 bp, Homo sapien
agccggcgcgaactttgcaggctca

SEQ ID NO: 1155224 - DNA, 25 bp, Homo sapien
tgtgtacttacagaggctgtgcgca

SEQ ID NO: 1155225 - DNA, 25 bp, Homo sapien
cccgagaacgcaagcagagcggtag

SEQ ID NO: 1155226 - DNA, 25 bp, Homo sapien
ccgtctttcttctgggctttggtga

SEQ ID NO: 1155227 - DNA, 25 bp, Homo sapien
ggccttgcaccagatgccggtgtcg

SEQ ID NO: 1155228 - DNA, 25 bp, Homo sapien
gcgggacgcctctcccgcgatgcgc

SEQ ID NO: 1155229 - DNA, 25 bp, Homo sapien
cttctgggctttggtgacggctttc

SEQ ID NO: 1155230 - DNA, 25 bp, Homo sapien
gagctggcgtacttggtgaccgcct

SEQ ID NO: 1155231 - DNA, 25 bp, Homo sapien
gctggcgtacttggtgaccgccttg

SEQ ID NO: 1155232 - DNA, 25 bp, Homo sapien
ttggagctggcgtacttggtgaccg

SEQ ID NO: 1155233 - DNA, 25 bp, Homo sapien
tggagctggcgtacttggtgaccgc

SEQ ID NO: 1155234 - DNA, 25 bp, Homo sapien
acccctaagtagaactcacagtaag

SEQ ID NO: 1155235 - DNA, 25 bp, Homo sapien
tgcaggaaaagggataggtgctgag

SEQ ID NO: 1155236 - DNA, 25 bp, Homo sapien
ggaaaagggataggtgctgagggaa

SEQ ID NO: 1155237 - DNA, 25 bp, Homo sapien
agtagaactcacagtaagcagtggg

SEQ ID NO: 1155238 - DNA, 25 bp, Homo sapien
ctttatcttatattcctctcccatc

SEQ ID NO: 1155239 - DNA, 25 bp, Homo sapien
ttatcttatattcctctcccatcat

SEQ ID NO: 1155240 - DNA, 25 bp, Homo sapien
tttatcttatattcctctcccatca

SEQ ID NO: 1155241 - DNA, 25 bp, Homo sapien
ctgaaaggaataccaaattgagaca

SEQ ID NO: 1155242 - DNA, 25 bp, Homo sapien
tgcggaaggaaagtttatatggtga

SEQ ID NO: 1155243 - DNA, 25 bp, Homo sapien
ttgagacaagagagctatataaacc

SEQ ID NO: 1155244 - DNA, 25 bp, Homo sapien
cacagaatggaggtctacaggtgcg

SEQ ID NO: 1155245 - DNA, 25 bp, Homo sapien
gaatcacctggtgttgtgtcataga

SEQ ID NO: 1155246 - DNA, 25 bp, Homo sapien
tttaggtatccagtctcaaagacga

SEQ ID NO: 1155247 - DNA, 25 bp, Homo sapien
taaaaagctttactatccatgacag

SEQ ID NO: 1155248 - DNA, 25 bp, Homo sapien
ggcatttaacgtcttgaaacccaga

SEQ ID NO: 1155249 - DNA, 25 bp, Homo sapien
aaaatatctcggctactactctgca

SEQ ID NO: 1155250 - DNA, 25 bp, Homo sapien
ccaggacgccgcagtatgcttaaca

SEQ ID NO: 1155251 - DNA, 25 bp, Homo sapien
tgcagtggcctgtgatgctccttaa

SEQ ID NO: 1155252 - DNA, 25 bp, Homo sapien
ggttatttaccgaacgccatgcagg

SEQ ID NO: 1155253 - DNA, 25 bp, Homo sapien
tagaactctgaatgatatccattgg

SEQ ID NO: 1155254 - DNA, 25 bp, Homo sapien
tggtcataatacgtactatgtagcg

SEQ ID NO: 1155255 - DNA, 25 bp, Homo sapien
aatacgtactatgtagcggtaatgg

SEQ ID NO: 1155256 - DNA, 25 bp, Homo sapien
aatgatatccattggtcataatacg

SEQ ID NO: 1155257 - DNA, 25 bp, Homo sapien
tcactcccaagttacattaaaaggc

SEQ ID NO: 1155258 - DNA, 25 bp, Homo sapien
cactcccaagttacattaaaaggct

SEQ ID NO: 1155259 - DNA, 25 bp, Homo sapien
cattaaaaggcttacatatgtttga

SEQ ID NO: 1155260 - DNA, 25 bp, Homo sapien
ggcttacatatgtttgataatagca

SEQ ID NO: 1155261 - DNA, 25 bp, Homo sapien
ttttcaaatggttcagaggctgtct

SEQ ID NO: 1155262 - DNA, 25 bp, Homo sapien
ggcaaatgcagcaaaattgtaataa

SEQ ID NO: 1155263 - DNA, 25 bp, Homo sapien
aaaattgtaataattggtgaatcca

SEQ ID NO: 1155264 - DNA, 25 bp, Homo sapien
aatccaggtgaagggactatggctg

SEQ ID NO: 1155265 - DNA, 25 bp, Homo sapien
atcacgtcccggagatccagacggc

SEQ ID NO: 1155266 - DNA, 25 bp, Homo sapien
tccaccatcacgtcccggagatcca

SEQ ID NO: 1155267 - DNA, 25 bp, Homo sapien
caccatcacgtcccggagatccaga

SEQ ID NO: 1155268 - DNA, 25 bp, Homo sapien
ccatcacgtcccggagatccagacg

SEQ ID NO: 1155269 - DNA, 25 bp, Homo sapien
cggtcttgggtctggccatgcctga

SEQ ID NO: 1155270 - DNA, 25 bp, Homo sapien
ttcgcgccggctcccaagaagggct

SEQ ID NO: 1155271 - DNA, 25 bp, Homo sapien
tgagcctgcaaagttcgcgccggct

SEQ ID NO: 1155272 - DNA, 25 bp, Homo sapien
cgctctgcttgcgttctcgggggtc

SEQ ID NO: 1155273 - DNA, 25 bp, Homo sapien
gacagaacggcgattgtccacggag

SEQ ID NO: 1155274 - DNA, 25 bp, Homo sapien
gatagccaataggatagctcagcca

SEQ ID NO: 1155275 - DNA, 25 bp, Homo sapien
tcaagcaaattttgtcccgatagcc

SEQ ID NO: 1155276 - DNA, 25 bp, Homo sapien
ccacggagcactttgattggctcaa

SEQ ID NO: 1155277 - DNA, 25 bp, Homo sapien
cgatagtagtcaccgagagaaactc

SEQ ID NO: 1155278 - DNA, 25 bp, Homo sapien
agtagtcaccgagagaaactcctgc

SEQ ID NO: 1155279 - DNA, 25 bp, Homo sapien
cagcgatagtagtcaccgagagaaa

SEQ ID NO: 1155280 - DNA, 25 bp, Homo sapien
gacagcgatagtagtcaccgagaga

SEQ ID NO: 1155281 - DNA, 25 bp, Homo sapien
cgtagttgcctttgcgcagcaagcg

SEQ ID NO: 1155282 - DNA, 25 bp, Homo sapien
gggcccacttgggccggacgtcagc

SEQ ID NO: 1155283 - DNA, 25 bp, Homo sapien
tgggcccacttgggccggacgtcag

SEQ ID NO: 1155284 - DNA, 25 bp, Homo sapien
ggcccacttgggccggacgtcagcc

SEQ ID NO: 1155285 - DNA, 25 bp, Homo sapien
tatttgaaaacgtgggtggctctga

SEQ ID NO: 1155286 - DNA, 25 bp, Homo sapien
atttgaaaacgtgggtggctctgaa

SEQ ID NO: 1155287 - DNA, 25 bp, Homo sapien
ttatttgaaaacgtgggtggctctg

SEQ ID NO: 1155288 - DNA, 25 bp, Homo sapien
ccaggacgtttggtgcctgcacctg

SEQ ID NO: 1155289 - DNA, 25 bp, Homo sapien
tattcactactgaggaacgctggac

SEQ ID NO: 1155290 - DNA, 25 bp, Homo sapien
gccaaggcagttacgtgctccagat

SEQ ID NO: 1155291 - DNA, 25 bp, Homo sapien
ggacccactcatcgaagagccaagg

SEQ ID NO: 1155292 - DNA, 25 bp, Homo sapien
cagttggcgaagtttcgcaagcttg

SEQ ID NO: 1155293 - DNA, 25 bp, Homo sapien
ttggcgaagtttcgcaagcttgttt

SEQ ID NO: 1155294 - DNA, 25 bp, Homo sapien
gcgaagtttcgcaagcttgtttttc

SEQ ID NO: 1155295 - DNA, 25 bp, Homo sapien
ccctttccttcagggtgaaagtcat

SEQ ID NO: 1155296 - DNA, 25 bp, Homo sapien
taagcacagtcttttcccgattggg

SEQ ID NO: 1155297 - DNA, 25 bp, Homo sapien
gccgcagccgtctttataagcacag

SEQ ID NO: 1155298 - DNA, 25 bp, Homo sapien
caataattgaaaatcccgcgctggc

SEQ ID NO: 1155299 - DNA, 25 bp, Homo sapien
cccgattgggcggaacaataattga

SEQ ID NO: 1155300 - DNA, 25 bp, Homo sapien
cacaggttcgtgtcttcgaacagcc

SEQ ID NO: 1155301 - DNA, 25 bp, Homo sapien
gatggcgcacaggttcgtgtcttcg

SEQ ID NO: 1155302 - DNA, 25 bp, Homo sapien
gatgtccttgggcataatggtcacg

SEQ ID NO: 1155303 - DNA, 25 bp, Homo sapien
ttaagcccgctctccacggatgcgg

SEQ ID NO: 1155304 - DNA, 25 bp, Homo sapien
ttgggagcctaagcggaagtgcctt

SEQ ID NO: 1155305 - DNA, 25 bp, Homo sapien
acatggacagggaacggctcgataa

SEQ ID NO: 1155306 - DNA, 25 bp, Homo sapien
ttttggatacgatggaacctccggc

SEQ ID NO: 1155307 - DNA, 25 bp, Homo sapien
gaagtcggcaaagctcaagacggca

SEQ ID NO: 1155308 - DNA, 25 bp, Homo sapien
tgtcttcccaaggatctgaactcgg

SEQ ID NO: 1155309 - DNA, 25 bp, Homo sapien
taagaggaccgagtgccttcactgg

SEQ ID NO: 1155310 - DNA, 25 bp, Homo sapien
tgtagagtgggctctgcaagaccct

SEQ ID NO: 1155311 - DNA, 25 bp, Homo sapien
gacataccatgcagcttctaagagg

SEQ ID NO: 1155312 - DNA, 25 bp, Homo sapien
ctcctggctttaggtgatccaccct

SEQ ID NO: 1155313 - DNA, 25 bp, Homo sapien
tcctggctttaggtgatccaccctc

SEQ ID NO: 1155314 - DNA, 25 bp, Homo sapien
aaagcagtggatgcaagacttgccc

SEQ ID NO: 1155315 - DNA, 25 bp, Homo sapien
tagagggccacgtcagtctttgcga

SEQ ID NO: 1155316 - DNA, 25 bp, Homo sapien
gaagcttaccagtcgggttgccagc

SEQ ID NO: 1155317 - DNA, 25 bp, Homo sapien
taacaagcgggtggactagatgcct

SEQ ID NO: 1155318 - DNA, 25 bp, Homo sapien
gacacagctgggcactaaatcctgg

SEQ ID NO: 1155319 - DNA, 25 bp, Homo sapien
ggattaaatcctgcgctggcgcgct

SEQ ID NO: 1155320 - DNA, 25 bp, Homo sapien
tctatgagagacttgagcaacctgg

SEQ ID NO: 1155321 - DNA, 25 bp, Homo sapien
tagcaggccctccatatacgcgggt

SEQ ID NO: 1155322 - DNA, 25 bp, Homo sapien
ctgtgatgcgcagtggaaccgttca

SEQ ID NO: 1155323 - DNA, 25 bp, Homo sapien
gaaccgttcaatgagcagacaggag

SEQ ID NO: 1155324 - DNA, 25 bp, Homo sapien
accaggtggatctacgtgtctcgag

SEQ ID NO: 1155325 - DNA, 25 bp, Homo sapien
ccagtagggaacacacagccaagat

SEQ ID NO: 1155326 - DNA, 25 bp, Homo sapien
catggtgttcccctcttaaaggaga

SEQ ID NO: 1155327 - DNA, 25 bp, Homo sapien
tgtgtattttggacgaaggccgcgc

SEQ ID NO: 1155328 - DNA, 25 bp, Homo sapien
tcaattaggctgttgggaatccgcc

SEQ ID NO: 1155329 - DNA, 25 bp, Homo sapien
cagcagcttttgtgtccggtcacca

SEQ ID NO: 1155330 - DNA, 25 bp, Homo sapien
caagaggaaagcctttataagcttt

SEQ ID NO: 1155331 - DNA, 25 bp, Homo sapien
aatcaaggttaaacacagacaacgc

SEQ ID NO: 1155332 - DNA, 25 bp, Homo sapien
ctgaaatcaaggttaaacacagaca

SEQ ID NO: 1155333 - DNA, 25 bp, Homo sapien
ggttaaacacagacaacgctcagaa

SEQ ID NO: 1155334 - DNA, 25 bp, Homo sapien
aaggttaaacacagacaacgctcag

SEQ ID NO: 1155335 - DNA, 25 bp, Homo sapien
cttggcgcgggccttgcctccttgt

SEQ ID NO: 1155336 - DNA, 25 bp, Homo sapien
gcgggccttgcctccttgtttgcca

SEQ ID NO: 1155337 - DNA, 25 bp, Homo sapien
ggaactggaggccagcgcgggacga

SEQ ID NO: 1155338 - DNA, 25 bp, Homo sapien
tgcctccttgtttgccacgaccaga

SEQ ID NO: 1155339 - DNA, 25 bp, Homo sapien
cgtagttgcctttgcgcagcaagcg

SEQ ID NO: 1155340 - DNA, 25 bp, Homo sapien
gatgcgcgtcttcttgttgtcccga

SEQ ID NO: 1155341 - DNA, 25 bp, Homo sapien
ttgttgtcccgagccgcgttgcccg

SEQ ID NO: 1155342 - DNA, 25 bp, Homo sapien
ctggaggtgacgagggatgatgcgc

SEQ ID NO: 1155343 - DNA, 25 bp, Homo sapien
gaggtgacgagggatgatgcgcgtc

SEQ ID NO: 1155344 - DNA, 25 bp, Homo sapien
tgcttttggctttgtggctttcggt

SEQ ID NO: 1155345 - DNA, 25 bp, Homo sapien
atgttaggcaaaacgccgccctggg

SEQ ID NO: 1155346 - DNA, 25 bp, Homo sapien
ttggtaacagaacggcctggatgtt

SEQ ID NO: 1155347 - DNA, 25 bp, Homo sapien
tctttggtaacagaacggcctggat

SEQ ID NO: 1155348 - DNA, 25 bp, Homo sapien
ctttggtcttggtttgtttgtctgc

SEQ ID NO: 1155349 - DNA, 25 bp, Homo sapien
agagcctttggtcttggtttgtttg

SEQ ID NO: 1155350 - DNA, 25 bp, Homo sapien
cctttggtcttggtttgtttgtctg

SEQ ID NO: 1155351 - DNA, 25 bp, Homo sapien
ttggtcttggtttgtttgtctgcat

SEQ ID NO: 1155352 - DNA, 25 bp, Homo sapien
gcaggacgcaaaccaagaggcggct

SEQ ID NO: 1155353 - DNA, 25 bp, Homo sapien
gaagctgtaactgcaattttagccg

SEQ ID NO: 1155354 - DNA, 25 bp, Homo sapien
tttagccgtaatgtcaggacgcgga

SEQ ID NO: 1155355 - DNA, 25 bp, Homo sapien
tattggctgttagatacggctccgc

SEQ ID NO: 1155356 - DNA, 25 bp, Homo sapien
ccatattgggatttcccggctgtaa

SEQ ID NO: 1155357 - DNA, 25 bp, Homo sapien
ggatcatcggcttcagaatccccta

SEQ ID NO: 1155358 - DNA, 25 bp, Homo sapien
gagagtaactctccgtctaaggatg

SEQ ID NO: 1155359 - DNA, 25 bp, Homo sapien
gaatcccctactctttcgtgagagt

SEQ ID NO: 1155360 - DNA, 25 bp, Homo sapien
ggaaatggagtcctcgctgcgcgtt

SEQ ID NO: 1155361 - DNA, 25 bp, Homo sapien
tggacgctccggagcaaaatgcagt

SEQ ID NO: 1155362 - DNA, 25 bp, Homo sapien
tccccactggtaaggtggtcagaaa

SEQ ID NO: 1155363 - DNA, 25 bp, Homo sapien
gaactgtagtctcggattctcccca

SEQ ID NO: 1155364 - DNA, 25 bp, Homo sapien
gtgttccctgtgaagccccggagac

SEQ ID NO: 1155365 - DNA, 25 bp, Homo sapien
tgttccctgtgaagccccggagacg

SEQ ID NO: 1155366 - DNA, 25 bp, Homo sapien
tgtgttccctgtgaagccccggaga

SEQ ID NO: 1155367 - DNA, 25 bp, Homo sapien
gaagtgaagggacaagcgaagatta

SEQ ID NO: 1155368 - DNA, 25 bp, Homo sapien
cacgcgaggcgcgttcgttccttag

SEQ ID NO: 1155369 - DNA, 25 bp, Homo sapien
gaatgggcaaaagtagggcatgtgc

SEQ ID NO: 1155370 - DNA, 25 bp, Homo sapien
cttaggggatttgcaaagaatgggc

SEQ ID NO: 1155371 - DNA, 25 bp, Homo sapien
cgccccttttctctacgtgacgtgg

SEQ ID NO: 1155372 - DNA, 25 bp, Homo sapien
gtgacgtggtgaattcgacctccag

SEQ ID NO: 1155373 - DNA, 25 bp, Homo sapien
agctcctatagggagcccgccttga

SEQ ID NO: 1155374 - DNA, 25 bp, Homo sapien
gtgagagcacaatgtcaacacccgc

SEQ ID NO: 1155375 - DNA, 25 bp, Homo sapien
ctacgccagagactcagacgccagg

SEQ ID NO: 1155376 - DNA, 25 bp, Homo sapien
caggagtgagggtcggggcgatccg

SEQ ID NO: 1155377 - DNA, 25 bp, Homo sapien
cagagactcagacgccaggagtgag

SEQ ID NO: 1155378 - DNA, 25 bp, Homo sapien
gccagagactcagacgccaggagtg

SEQ ID NO: 1155379 - DNA, 25 bp, Homo sapien
tggcacaaacaaacgcggccagcca

SEQ ID NO: 1155380 - DNA, 25 bp, Homo sapien
gcacaaacaaacgcggccagccatg

SEQ ID NO: 1155381 - DNA, 25 bp, Homo sapien
ctggcacaaacaaacgcggccagcc
